United States Patent Application Publication US 2004/0214272 A1 - sequence listing, part 27

SEQ ID NO: 111719 - DNA, 953 bp, Zea mays
  Clone ID: MRT4577_33375C.1
gccaaggccagctccagtacatcctggtgctgagcaacctcctgacggggcccatcctgccggcgtacgccgagtgcacgccgctgctccggttccgcgtgagcaacaaccacctggagggcgacgtgccgccgggcatcttcggcctcccgcacgcctccatcgtcgacctcagctacaaccacttcaccgggcccgtggcggccacggtggcgggcgccacgaacctgacctcgctgttcgcgtccaacaaccggatgtccggacagctccctccggagatcgccgccgcgtcggggctggtgaagatcgacctgagcgacaacctcatcgccggacccatcccggagtccgtgggcctgctgtcgaagctgaaccagctgtccctgcagggaaacaggctgaacggatccatcccggagacgctcgccgggctcaaggcgctgaacgtgctgaacctgtcggacaacgcgctgtccggcgagatcccggagtcgctgtgcaagctgctgcccaactcgctggacttctccacaacaacctgtcggggccggtgcccctgcagctcatcaaggagggcctgctggagagcgtggcggggaacccggggctgtgcgtggcgttccggctgaacctgacggacccggcgctgccgctgtgcccgcggccgagcctgcggcgcgggctggccggggacgtgtgggtggtgggcgtgtgcgcgctggcgtgcgccgtggcgacgctggcgctggcacggcggtgggtgctgcgggcgcggcggtacgcggggcaggacaaggggctggcgtcgtcgtctccggcgtcgagcgagtcgtacgacgtgacgagcttccataagctgagcttcgaccagcacgagatcctggaggcgctgatcgacaagaacatcgtggggcacggcggctccgggaccgtgtacaaaaacgagctca

SEQ ID NO: 111720 - DNA, 500 bp, Zea mays
  Clone ID: MRT4577_33376C.1
cggcggcgatgattcgtcgtctggcagcggaaccggggtgggacgcgccggaagcgctgtgggcagcgcccatgggtatgggaatgcaagcggtggaacaggggccggtggcgggagtggagctggctctggcggccaaggtggatacggcggcggcggtggcggtggcaccggaagtagcggtggccatccatgacgaccatgagcttgcattggtgaccgactgatgactgctgcatgatggttggatccggtgcctttggtttggggataaaaatgctgctttcgttggatccagcgcctttggggattgtattcaaaactatatactttttatagctgtctagtattgttgtggttactttgttttacgttgctgattgatgaggttcgttgattagtacgtactgttatccagcgcagtaatataacgcggttttcactcttcttggatgcactaaaacaatgtcagttggtggagtacatgcaacactttgtcc

SEQ ID NO: 111721 - DNA, 642 bp, Zea mays
  Clone ID: MRT4577_33377C.1
tatctattccccctcgccgccgccacaccccagccccctcgccgtcgcggccgcacctcagcctgctcgccgcccccgtcgccgcctccgcggtcgcacctcagcccgctcgccgcccccgtcgcaacccaacccttcctcccctccaatggatgccgccccaaccacctcatccaataggaagccccagttcggcagcctctgttcccgcccttcagcggccacctcgccacccctccaacgcccatcacgtccttatccaacgccgcccttcagcgcccacccatccgcctgcccgcccgacaacgcccgattgaattgttgctgccaagatctgcctcaatgtggtttacatcattgcggcgacgacatcgtcgatcttcgactccggcggctacatccagaaggactaccacaattctcgcggctgggatcctctactctcatctccctactatgaatcctgactgattctcttcctcctccctgtgtcttcctctctgaatttggtagtaggtattagttcgttgcaagtagttaatcagccagtggtgaatctaggataagaatggagggtgcgctgaaatcattagtcattgtgctaaactggtacgagtatgatttatagtctgaattattgca

SEQ ID NO: 111722 - DNA, 1364 bp, Zea mays
  Clone ID: MRT4577_33378C.1
ttaaattagttcatttttccttgagaaaatggagtttctaaactagttcttatctttttttcccagttttatccttagagggcagatgctgctgcagctcaagatagccacagacagtgacattgacacacttaagagctcgagatctcactctcctcacctcagctctcagagaggaaggacactgcggccgggcgatggcgagcgtggagggcaagagggagacggtgctggtcaccggcgccagcggcttcatcggatcgaccctcgtcggcctcctcctcgaccgcggctacaacgtccacgccagcgtcctcaaccccgatgacaaggcggagacggagcacctggtcgccctgggcgccggcgccggcgaaggccggctgcgcgtcttcccgggcgacctcctcgacggcgccgcgctcatggccgccgcgcggggctgctcgggcgtgttccacctcgccaccccctgcaccgtctaccccgtgagcgacccgcaggggcagatggtggtgccggcggtggagggcacgctcaacgtcctgcgcgccgccaaggaggcccgcaccgtgcggcgggtggtggtcacctcgtccagctccgccatcatacccagccccgcgtggcccgccggcgagccccgcgacgagcggtgctgggccgacgtcgactactgcaagaagaacgaggtctggtaccctgtttccaagacgctggcagagaaggcggcgtggaggtttgcggaggagaacggggtagacgtggttgtcgtcaacccggtgactgccatgggcccaatgattccgcccaccatcaactgcagcatgatcgtgctcctacgcctgctacaaggttgcacggaggagtacagggacatctggatgggggcggtgcatgtgcacgacgccgccatggcgcatatcctggtgttcgagagcccggcagcgtccgggaggcacatctgcgcccagtccatctcccactggagcgacttcgcggccaaggtcgccgagctgtaccctgagtacaaggtgcccaagttccccaaggatacccagcctgggctggtgcgacagggagccgaggaggggtccaagaagctcgtcgcgttggggttgcacttcagccctctggagaagatcatcagggacgctgtggaggccctcaagagcagaggctacatttcgtagctagccgaccgacggcagctatagtggagtagtatgcctgtcgaatttcgattcccaattggcaaattctgcaaaacgagttcgccaatatgaacaataaataaagaacgttgtgataaaataaagcagattttctgttgcatttggcccttcaaaaaaaaaaaaaaaaaa

SEQ ID NO: 111723 - DNA, 241 bp, Zea mays
  Clone ID: MRT4577_33379C.1
aactttttctcttttccgtactacaagctatcaccggggaagaattatttctcggactatggcaccacacgcaaccgatcaccaaggggattatcccactcttttacggcccaagactacatatctccgggcataccagagtccgtggccatgaatttaccaaactttacgagtaaaaaggcgactagccagcttggcatggcctgattatgtaaaccccgccgtctgtaacctgagaaag

SEQ ID NO: 111724 - DNA, 516 bp, Zea mays
  Clone ID: MRT4577_3337C.1
gcgcttttctctctagctgcacatgagtgagggtgttgaagtgtataattggattaactatcttcttccatcaacttatgtttttgggttggactggttagtacatccactctaacagcacaattgtgtgctggaactggaaaggcaaaataaaccacataccaattggttagtaggtttccttacctccattgagccaaatgaccaatgatttggtagatggatcttcagcagcctctgcgaagaagtcaaagagggcctttccagatgttgcatcaaccatgacatagcgggccggcatactgatcaaaggcagccttctcgggctgcccaggaagctcgctgatattatcagctttcttcaacccatcttgcaggatatattggatgatccatgctccaacttgtaagtattccattgtctagacgatcatgttgcggctccattcttgaccttgaaaactcctgcaatcggcaagcctggttagtcatcagcaagtgacatttgtgcgagca

SEQ ID NO: 111725 - DNA, 275 bp, Zea mays
  Clone ID: MRT4577_33380C.1
cctccacattggactggtgtgaggagaattatgtggtgaccttgttcgtcgctgagttctggaatacagtgagtaacctgattatgatcatacctccaatttttggtgcaattcaaggctttagagatagactggagaaacggtacattgctgcttacgtagcactcacagtggtaggaatgggatcctggtgtttccacatgactctgaaatttgaaatgcagctgttggatgagctccccatgatatacagttgctgcatatttgtatactgc

SEQ ID NO: 111726 - DNA, 2253 bp, Zea mays
  Clone ID: MRT4577_33381C.1
cattgggtacctcgaggccggccgggctcttttctccaccccaatcctccctcgaggccggccgggccttcccactcggccactcctcatcagccatccccaaaaggccaaaacccgcgcacaccggcgacggccggagaacctcccgccggccgccgccatgccgccgcctctacaggcccaccgcctactcatctcccaccgccgcctacccactccagctcgccgccggttcaccgccgcctcttccgtccaatccgctcccgccacaaccttggccccgggccccgccacatcctccatcctctccatccgcgagtcgctcctctcaggcgagaggaccgcggcggacatcacctccgagtacctctcccgcctccgccgtaccgagccgaccttgcgcagcttcatccacgtcgcggacgccgccgccgagcgggaggcggaggaactcgaccggaggattgcctccggggagaaggatgcggtgggtccgctcgctggagtgctggtgggagtgaaggacaatctttgcacagccaacatgccctccacgggcgggtcgcggatactggacgggtaccggccggcgtacgacgccactgccgtgcggcggctgcgggaggccggcgctattgtgttggggaagacgaacctcgacgaattcggaatggggagcaccaccgagggctccgcgtttcaggtgacaacgaacccgtgggatgattcacgtgtgcctgggggatcctctggtggttctgctgctgcagtatctgctaggcaatgcgtagtgtcactaggtagtgacacaggtggaagtgtgagacaaccagcgtcgttttgcggtgtagtgggattgaagccaacttatggccgggtttctcgttttggtctcatggcctacgcttcatcactggatgttgtgggatgctttggttcgtcggtttttgacactgcaaccatcttatctgttgttgctggccatgacaagatggacgcaaccagcagttcacaggttgttccagagtacgcatcggagttggtctccctagatttactagaatcgaaaccattaaatggtgtgagaattgggattatacaagaaactcttggagaaggtgttgccagtggagtcgtatcatcaatcaagggtgctgcttcacacctggagcagttgggatctgtggtggaagaggtttcactgccttcattttctcttggcttaccagcatattacatactagcctcatctgaagcttcttctaatctatcacgctatgatggtatcaggtatggaggacaggtctcggcggatgacttgaatgagctttatggagagtcccgggctaatggttttggtcatgaggtcaaaatgagaattttgatgggaacctatgctctttctgctgggtactatgatgcatactacaaacgagcacaacaggtcaggacactggttaagcaaagcttcaaagatgctttggaaagatacgacattctaatctcaccagctgcgccatcagcagcctacaagataggtgaaaagataaatgacccgttagccatgtatgcaggagatatcatgacggtgaatgttaatttggccgggcttcctgcattggttgtgccttgtggatttgttgaaggtggagctgcagggctcccagtgggactccagatgatgggatctccattctgtgaggggaatttgctgagagtaggccacatctttgagcagactctccagaatctcagctttgttccaccgttgttggcagagggccagttgtaacagataatccactcgctgctcaacaagcaattacctgagttacgggttttggggtggctttctgtcattcgcatgcggaggaaattggtagcacgcatgacgcatttagaaaatagaatgttttgctcgtggggtcgctgataattgtgagagagcaacgacacccatgtgatgtacaccagcaaccagcacattgcataccacacagcattttacatgccttcagaatgattgatgattttgtatcaatgctggttttctcaaaactcaaattttgcaaagaaagcggtagtgtccctggcagaggtgagtattccagcacctataagcagttgtggccttgtggggatccgatgagaaacagaacagaaagcagagaaacaaaacagaaaggacccatttggacgtagatattggatgttagaattgaatggatccaatacaaaatctgcatagtattg

SEQ ID NO: 111727 - DNA, 633 bp, Zea mays
  Clone ID: MRT4577_33382C.1
atgcgtcttaaccacaaatatttcagcaatcttaacaacatagcaaacagttcaccacaaggcatcatgaaaatatatataaatgtgaaaaatgttagaatgacttacattgtgaaaaggagggagtacataaataccacaagagaatatgcatacacaatgaggttggcgatggctgccagtatttatagttttggagacaacttgctggagcttttgactgggaaaccatcggtttctattttggaatcaatcacaaatgggtttcatctatgctgtcgatcatttgaacctgttgcttcgagcgatgtgcacccgcgtcgaaggatccaactgccgtggcacccgggaaagattcttcgcctttgccacctcataaagggagctgatcacctagcgatcaattcaattaatcaactgatgagcagcaaccaaagatcgatcgatccccaaaaccaaccaaacaaacagacgatctcaacctgcgattcttccgcgatgtcggtgagggggccggacggaggctgggagtggaaggcgcgccgggccgccgcggccatcatccttgttccggcgaacgacatcgacttggacatggacatggacatggatggatttcggattttcagttag

SEQ ID NO: 111728 - DNA, 225 bp, Zea mays
  Clone ID: MRT4577_33383C.1
ctccctttttttttttttttttttttttttttttttttttcaagagggaactgccgcgggggggtggaatatgtggggttgggaatccaaatattcctagagtttggaacatgcgtttggcaaatcatctttcaggctaacacaatgggggggtactctaggtttaaaggatcttgatcgtatatccaattttacgttgatatcaatttaacggccgttgttttc

SEQ ID NO: 111729 - DNA, 323 bp, Zea mays
  unsure (1)..(323): unsure at all n locations
  Clone ID: MRT4577_33384C.1
gacggaggcgtacgactgaaaaaaccacncaatacctttttctatcataaacaaacaacctactcatgggtgaagtatatttataaaaaaaaccttccatttctaacaccatgccacattacatgtacacccatccacaccaccacattgaggcccatcataacgcacccgatcaattagacacgaaacataaaccacccctgaacagtcccatcttcatgaacaaacacgaccacgaccagtataagaacaaacacacacttcaactgacgaccacaatagccaatgtcatccttttctatcccgataatcacaatcacaat

SEQ ID NO: 111730 - DNA, 198 bp, Zea mays
  Clone ID: MRT4577_33385C.1
acggtccccaccttctgtgtctggcgtctctcactgagcgtgaccgtcctcaggcgcatccgcgctgtggcctgcgccagcctcgctcctcttcctggctgatcgtcccaccgcgtacacgtgccgccgcctgttttgctgctgcttttgagctgagaattgtttttatgacttttaaatagctagaaggggttcaaa

SEQ ID NO: 111731 - DNA, 159 bp, Zea mays
  Clone ID: MRT4577_33386C.1
ctggaggctggccgggaccatactagaaatagcatatgcggggctgagtggatcatcagatgctatcctgtctactgagttaacgatatttgatgagacatattctgaagctggatcatatgagttagagctcttacttgcattgctggaattgggatt

SEQ ID NO: 111732 - DNA, 240 bp, Zea mays
  Clone ID: MRT4577_33387C.1
ccttctttacttcgccgccggcgccttctctgctgccgtcgccatgttgagaaggtctgcgagatgctatcgccaaatccagaacaatccataccccatgttcaggtactgccgtggtgtctctgatcccaagattaggatctacgatgttagcatgaggagaatggctgatctgatgagttcccctattgtgtgtctctttgtctcttgggagaaggggaatagcttgcagcgaggttc

SEQ ID NO: 111733 - DNA, 863 bp, Zea mays
  Clone ID: MRT4577_33388C.1
ggccgcaaattttttttttttttttttgggatctaaaaccgaaattttatgatttttttttcagttttctgaaacatataccaaattgataatgattaatttcggtttcatttccgattacagtttggttttccgattaatttagccggggcttggcagccctacgcgcggcttcgcggagtcgcgaggcggctcggctctacacctacgcgtgcgcggcctcgcctcttccctcgcacgactcgccgcgaggagtttccccttcctccgcgtgcatccccgcgagagctcgaaaacctagccgccaaatccatggctcgccgcgaccacgacgacgacgacgaggaagaggtcgaggaggaggcatacgacttggacgaggaggaggatgacgaggatgaggaagacgactacgaggaggaggcgaggcgcgggaaggcctcccgcggcggtggcaagggtggcggcgggcggaagcggtcacgcgaagacaacttcatcgacgactcggccatcgaggacgaggacgaggacgacgacgacgacggcgggggccggccgaggaagaagggcggcggcggggtgcgagggttcttcgacgaggaggcccaggtcgacgaggatgaggaagaagaggacgaaggcgagggagaggacgattttattaatgatgctggggccgaccttcctgatgaggatgttgttaggggctcaagacgtcattctattcctatgagggatgaggaagaggatattgatgagatccagacctccgtgcgcctcgtccttcccggggagctcgccaagcacgccgtctccgagggcaccaaggccgtcaccaagttcacctcggcctaggctgc

SEQ ID NO: 111734 - DNA, 769 bp, Zea mays
  Clone ID: MRT4577_33389C.1
tggaatccttacgcctgctatatctgttctttctgcatcaggtggcattagggtccagaatcagaatatgagcaccgatgttgttgtgctcgtcgccgtggtcatcctaattggattattcagcatgcagcactatggaacagataaagtgggattgctctttgcaccgatagttctgctctggttcatcctaattggaagtgttggagctataaacatacacaagtataataactctgtgttaagagcatacaacccgatatctatataccgttttttccaacggagaagaaattacgacatatggacgtctcttggaggaatcatgcttagcatcacgggaaccgaagcgttatttgctgatctctgtcactttcctgtattggcaattcagattgctttcaccttgattgtgtttccatgccttctactggcgtacacagggcaggctgcctacataatttccaacaaaacacatgtggctgacgccttctaccgatcaattccagctgccatatactggccggcctttatcatagcaactgctgcagcgattgttgccagtcaagccaccatatccgcaacctactcgatcataaagcaggctcttgcgctgggttgcttcccccgcgtgaagatcgtccacacctcgaagaaattccttggacagatctacatccctgacatcaactggatccttctggttctctgcattgctgtgactgctggattcaagaaccaaagccagataggaaacgcatacggtact

SEQ ID NO: 111735 - DNA, 353 bp, Zea mays
  unsure (1)..(353): unsure at all n locations
  Clone ID: MRT4577_3338C.1
actcgctcgctcactagcaaaatgcaggcctgttccccgcggcgagccctccttctgcggggaccgcgaggcgcccagctcttccccattcccgtaggcaacaagccccgtgccttctcctccgcgtcccccgcggcagcgcgctctcccaaagacgctcataatgcgccgccgccgattatgccgacgctgccgtggggtgatgcgctcgcagccacgcagcgcaccttctgcctgccgctcgctgggcgcgtcctcgccgcctcggcgaccgagaacgcggccgtggccccccgcgcagtctacgcctcgctggcccctggccgccgncggcgcgcgcggcgacacgcggc

SEQ ID NO: 111736 - DNA, 291 bp, Zea mays
  Clone ID: MRT4577_33390C.1
ccgacggcaagacccacgtgacggtggagtacgtgaacgaaggcggcccatggtgcccgtccgcgtgcacaccgtggtcatctccacccagcacgacgagaccgtcaccaacgacgaggtcgccgccgacctcagggagcacgtcatcaagcccgtgatcccggacaggtacgtggacgagaagaccatgttgcagctgaacccgtcggggcggttcgtcgtcggcgggccccacggggacgccggcctgaccggccgcagggtgatcgtgggcacctactgcgggtgggg

SEQ ID NO: 111737 - DNA, 371 bp, Zea mays
  Clone ID: MRT4577_33391C.1
gccaaatccctgatggttatggttctggaagaggctatggtagagggatgggtggaagaatgatggctggacgtggctttggacgtgggctagaacgcaggacacctcctccaggctatgtttgtcacagatgcaaagtacctggtcattttattcaacattgccccacaaatggggatgctagatatgatgtgaaaaggatgaaacccccaactggcattccaaaatcaatgctaatgcaaactccggatggttcatacgcactaccaagtggagctggtgctgttttgaagccaaatgaagctgcttttgagaaggagatagagggcctacctaccacacgtcctgttggtgatcttccaccagagcta

SEQ ID NO: 111738 - DNA, 359 bp, Zea mays
  Clone ID: MRT4577_33392C.1
ttttttttttttttttttaaaacaccaatttggggattgcgggtttcacaaaaaggttttttgaaaaaaaaaagcccctttcaggctgaattgggatccaaggcctgggggggcaacaatggttaagggaatctcccgttggggggggctttattacgttttttttaaaccgggtttaaaaaaggcttctgggggaccaaaggggggaaaaaaaggggggaggggccctttttgaaaaaaggccctttagggacagccaaagcccccccccccgggggggaaaatttgagggttttcacccgcctttcccgttaaagggtttttttcctccagggaaaaattttttcccattttttttg

SEQ ID NO: 111739 - DNA, 442 bp, Zea mays
  Clone ID: MRT4577_33393C.1
tgaataagtatcaattagtttgtctagatggataggttgccggtcataacagaaaagaactgaatgcttgctgtatgatcgcgtgtttacctaatttcatgctgactcatatatgaaatatgtacatatatcatgtttattggctgagcgaatttcatttatttgaggttagtataacctatattagatctgcctagtgatcatatctcatctataggggcgttcggtttatcttttatagtttcgttttaagttagaatttcttctaatctgtttaacttttattatctgatctgttttactgtttgaggttattttttttttttcttattttcttttatgtgtgatttttgtattattattattttttgtgttttttgttgtattcttttttttttttattttttaatattttgtcttatttccttaatgttttgatttt

SEQ ID NO: 111740 - DNA, 423 bp, Zea mays
  unsure (1)..(423): unsure at all n locations
  Clone ID: MRT4577_33394C.1
agctagacgaaagcacgcggcgaagcaaggagccgcagagcggccgccnncactttcttnnnaaaaaaaannnnccaggagggccccaggggggaaacggccaacacccacaagaccagggacaacaaacaaacaacccaaagcaggaaaggcacaacaccaacacggaccgggggagccaaaggacaaccagcacaggacaagggacaacacacaaaaggaacaggggaggaaccaancacagaccaaaccagagagagacggaaaaaccacaaggggaaaaggccaccgaggagaaagaagaaaccnggggccaaaccgaacccaaaaaggagcccccgaacccccaaagccgcaggacacggcggggggccacaggcgncccaaaccgaagacaaggccaacggccggcgggagaacccc

SEQ ID NO: 111741 - DNA, 785 bp, Zea mays
  Clone ID: MRT4577_33395C.1
gccggccgggtccggacgcttatcattcttttccaacagtcgtttattcacaaggaatacaacaacctagacaactatcaaaagagctctgttctcgactggtatttttcagttgagtcaacaaatggttgaaaagagaattgtacattttgttttctgggatgtttgcagaaggagagaaagaatctcttggtagaaattcgtagatttctctcaactatatatacaattgtgatgaatgcatgttgaagatagtaaacaaggtgattatcaatgtcgcaggcaaacatgatgtgatgaacaatgtaatgagcttaggtattcatcctacttgggaagatgaatgcatcagctctatggcacttggtctagacataaaatcattagacgtcgctggtagaactggtagtattgctcttcaactcttagattattgtaaaaatgtgcatagagataacacagcattcgctaaattagtttatatcaatcctcatatgcttagagaaggaaaaaaagaagtttaaggaaacaccttatattcacataggtttcttggtacaaaaggcagtaaatttggcagatattcctgatggatccgctgatttctatacaattgcctttggtattcgaaactgtactcatgtggataaggtcatcaaggaaacatacagagtatgaaagcagggagtgcgtttcatgtgtcttgagtttagcaaattagatagtctattgattgggaaataaatataggatatcatcaaaaaaaaaaaaaaaaaaggccccta

SEQ ID NO: 111742 - DNA, 167 bp, Zea mays
  Clone ID: MRT4577_33396C.1
ggggcggaaaggactcgaacgtgaaatattttgaaacacatgggcatgccgggccctgactttatatcacatttcagtttaccgatgatttggttgacacaacacaacacaacacattttattttaccggtggagctggtcttagcgtaattagcgcggacccgtgg

SEQ ID NO: 111743 - DNA, 337 bp, Zea mays
  Clone ID: MRT4577_33397C.1
aaggatataaagctcacgaggcgatccatcattagtattttcaacatacaacgacactgtacacttcaagagctttgtgaaggcgaagctccgtgtaccattggtcggatatgctctggcgcgatctataacaggctttctatggggatcgtgagagaaggatctttttaaagttagtgaaaaccatattatttgaccctactagatacagcaggcagtcagagacggactcttagcttcatgcacgctagaagctataacacttaacattcatgattgattattggacgtgagtggattaatctggcctatacattttatcgcagcagatgcgaca

SEQ ID NO: 111744 - DNA, 327 bp, Zea mays
  Clone ID: MRT4577_33398C.1
agaaaaggttttaggacttaagcaaaaaggaaagaggacgccctatacccaagaccacaggccaaggcgccgagggtttggagcgggccgacaggaagacgaaaaaaaaaaagggggggcgccccccccgtcccaaaaaaagggccccccgggccgccgggggtacaccctgggaagaacagacacccgagcccacccgggcgaaccaggaaaaagggagggaccaacgtaaaaaccggcccgctgaccccccccccggggcaccgataaaagaaaacccgggggggggacctgcccgccccacggggaaaaggaggagcccggggg

SEQ ID NO: 111745 - DNA, 439 bp, Zea mays
  unsure (1)..(439): unsure at all n locations
  Clone ID: MRT4577_33399C.1
accccccccttttattttattattacttcctcggttaaaaattacaaagccacatagggcacatccgggggccatacatactacagagggttggcaaatacataaattttccataaggcaacaaaacacgtaaaatttttaggagcttgtttgggagcaaaaaaatttttccccctccaagggctttgccaccaaaaaaaattaaggggcgtttgtggccaccacccagcatttgtttaaaaccttggccagcagtttatccttagtttactcaaaaccctacgggtttttaaactactattcacagagggaaattggaatatatgttaaatattagaataagctgcgggaaataaaaattttaaagctcccgggcgttacatagggcccaacttttttttttttaaaaaaaccggcaatncctttaaatttcttttcc

SEQ ID NO: 111746 - DNA, 329 bp, Zea mays
  Clone ID: MRT4577_3339C.1
tctttttttttttttttttttttttttttttttttttttatttcccaggttcctgctggaaaggggaaagaccaaacaaaaagaagttcatgcccggggagaagaggccagtccccagggcccagaaaaagaaagcaaaggtgcaatctgcgacaaagatgatagtggtggcaagttcaaacaccaccccaaccacgaacattaaaaagaaaacccaatacgtccaaagacataagaaacaaccaaaaaagattaattccaagacgcccgcagaccagccataaaacccaaaacccccaattcaaaaaaggaaacaccaccgcccagag

SEQ ID NO: 111747 - DNA, 1168 bp, Zea mays
  unsure (1)..(1168): unsure at all n locations
  Clone ID: MRT4577_333C.1
cggccgggcccgcctctagactctatcccctatatccgtttggttgagaagcaaggtggaatagagtcactccattctacgtttggttgaagagcgaatggagtaattggagtgactctaaacagggaatattttttatctacgagctcgttcaaaaaaaatcgatggaatcttactgtttcacttctctctctttgcggtaggtgatgcttcaaaggtgtcttatttcatcttcatgttctcttttgtaaagccgaaggtattcttgtaacgttcatgatgaagtggaataaaatatattgtttaaaaaaaaaaaaaaaaaaaaaaaaaaaaaaaaaaaaaaaaaaaaaaaaaaaagaaccgcagagacaggcgtcttcgtactcgcctatctccgcgactcaaagctttccccaattcccccccttctcccatttctcaccaccgccgccgctccccccgttcaacaacaccatgagggcagtgcatctcgatccacatcggccaggctggtatccaggtcggaaacgcgtgctgggagctgtactgcctcgagcatggcattcaggctgatggccagatgcccggtgacaagaccattgggggaggagatgatgctttcaacaccttcttcagtgagactggcgctgggaagcacgtcccccgtgctgtttttgttggccttgtgcccactggcatcgatgaggtgaggactggcgcctaccggcaggtctttcatcctgggcggctcatcagtggcgnggaggatgcagcccacaacttcgctcgtgggctctactccattggcnnggggattgttgtcctgtgccttggccgcctcttgaagcttgcggataattgcactggtctccagggcttcctcgtcttctacgctgttggggggggaacgggctctgggcttgggtctctccctcctgggcgcctggctgttgtctttggcnggagtcccagctcggtttccccgtggtcccctccccccaggggcccccttccggggttgagcctccctcagtgggctggccacccactcttttcttgggcccctgtttttgttgtcctgcctcgcctggaggccttctttggcttttgccgccgctgccttgcctttgagggcccaccttccccaccctcaacagggttggttcag

SEQ ID NO: 111748 - DNA, 236 bp, Zea mays
  Clone ID: MRT4577_33400C.1
ccgcgccagaaccccctggacgacccacgcccctattgaccaccccgaaggcgcccacaaccgggggggatggaacaaaagacgcgggcgaacaaccagcacacagaagagcccccaccacaacccccggacccaacagcggaccccaccagggaaggaaacagaggcacaccgccacaacggacaaagccccaaacccccacctcaggcccaacaagcccaaaacggccaagccc

SEQ ID NO: 111749 - DNA, 370 bp, Zea mays
  Clone ID: MRT4577_33401C.1
cccacacctacggatctgtgtgtatacacactaaatcttgaaaaacaagtgccaccagtgggctagagctacctagagggacgggcaattgcctatcaataggatcggactggggagccaccaggaggtgtaccacccgttcaccctcaaggcgggatgcgttgagttcatctccaccctgatattattcttcggcgggcagggcttcggcatggtcttcatcaagctgaccggcggcggcccgacgaccccggcggtcctgatcgtggcggaggtgtcacacgcattcgcgctgttcgcggcgaagtcggtgggcgcgaacatttcagtcggtcacgtgaacccggccgtgacctttggcgctttcgtg

SEQ ID NO: 111750 - DNA, 1117 bp, Zea mays
  unsure (1)..(1117): unsure at all n locations
  Clone ID: MRT4577_33402C.1
ctcgaggccggccggganaaaaagtccccactaccattaccaaccagagcgacaagcccgaccgcccgcttccttgcaaacgaaacaaaacaaaacaatggcgacagcgagtgagatcgcggcggtgggcgtaataggcgcggggcagatgggctcgggcatcgcccagctcgccgccgccggaggctgtgccgtacttctcctcgacgccgaccccactgccctctcccgtgccgtcgtctccatctccgcctccctacggcgcctcgccgccaagggccagctctcccaggatctcagggacgcggatcttgtgatcgaggccgtcgtggagaacgaagatgtcaagaagaagctattcgtggagctggataaggtcacgaagccctcggccatcctcgcgtccaacacgagctccatctccataacccgcctggcttcagctaccaaacgcccctctcaggtgataggcatgcacttcttcaaccctcctccggtaatgaaactgatcgagattatccgaggagccgatacgtcagatgaggtgtttgctgcggtcagatctttctccgaaagactcgggaagtccgttatatgctcgcaagattacccaggattcatcgtgaaccgcatcctcatgccgatgatcaacgaggccttctgggctctgtacaccggagtggcaaccaaagaggacatcgacgcagggatgaagctgggcacgaaccacccgatgggccctctgcagctcgccgacttcatcggcctggacgtctgcctctcagtacttcgggtactccacagcggcctgggagatagcaagtacagcccctgccctctcctcgttcagtacgtcgatgctggccggcttgggaagaagcgtggagtaggcgtgtattcgtatgggcacaggccttcgtccgtcaggccgaagtcgtctctgtaggcgtgagagcaaactgttgggcgaataaaaccaggtgcgtgttgcaattgcacgtcagagaaaaagggagcacagcctagttcagaggtactcagtcggacgcttcaggtcgtgtagattcgtaatggcagggtttgctgctctatgtagaaaagatggttcagtgttttt

SEQ ID NO: 111751 - DNA, 1364 bp, Zea mays
  Clone ID: MRT4577_33403C.1
gcggtacaggcccactcgaggccgacggggattcccacccagacccccaccccacttaccaaccagagcgacaagcccgaccgcccgcttccttgcaaacgaaacaaaacaaaacaatggcgacagcgagtgagatcgcggcggtgggcgtaataggcgcggggcagatgggctcgggcatcgcccagctcgccgccgccggaggctgtgccgtacttctcctcgacgccgaccccactgccctctcccgtgccgtcgtctccatctccgcctccctacggcgcctcgccgccaagggccagctctcccaggccgcgtgcgaggactcaataaagcggataaggtgcgtctccgccgtgcaggatctcagggacgcggatcttgtgatcgaggccgtcgtggagaacgaagatgtcaagaagaagctattcgtggagctggataaggtcacgaagccctcggccatcctcgcctccaacacgagctccatctccataacccgcctggcttcagctaccaaacgcccctctcaggtgataggcatgcacttcttcaaccctcctccggtaatgaaactgatcgagattatccgaggagccgatacgtcagatgaggtgtttgctgctgtcagatctttctccgaaagactcgggaagtccgttatatgctcgcaagattacccaggattcatcgtgaaccgcatcctcatgccgatgatcaacgaggccttctgggctctgtacaccggagtggcaaccaaagaggacatcgacgcagggatgaagctgggcacgaaccacccgatgggccctctgcagctcgccgacttcatcggcctggacgtctgcctctcagtacttcgggtactccacagcggcctgggagatagcaagtacagcccctgccctctcctcgttcagtacgtcgatgctggccggcttgggaagaagcgtggagtaggcgtgtattcgtatgggcacaggccttcgtccgtcaggccgaagtcgtctctgtaggcgtgagagcaaactgttgggcgaataaaaccaggtgcgtgttgcaattgcacgtcagagaaaaagggagcacagcctagttcagaggtactcagtcggacgcttcaggtcgtgtagattcgtaatggcagggtttgctgctctatgtagaaaagatggttcagtgtttttaatctgataagtggaagtcatgaaacatttccgcagtttgcgttctgctcgagagggtgggagaaacagaaaagctatacttcttttgtattgtaatcctctgtaaactacaaacagacagatctcactctctgaaccggtaaaggaaaccaatgagtttctattgtgaaacaaaaa

SEQ ID NO: 111752 - DNA, 281 bp, Zea mays
  Clone ID: MRT4577_33404C.1
cccacgcgtccgcaatttttcattcattatcattccttcatatgatagctaccttttgaaaattcagttgtaacatttctgatttaaatgaaagatacatctgaaagttcaaaaaaaaaaaaaaaaaaaaaaaaaaaaaaaaaaaaaaaataaaaaaaaaaaaaaaaaaaaaaaaaaaaaaaaataataaaaaacaaaagaaaatttaacccactggctttttaaccaaacgcaatgaacaaattgtgtgaattaaacagttactttcatactatggtgaa

SEQ ID NO: 111753 - DNA, 652 bp, Zea mays
  Clone ID: MRT4577_33405C.1
ccggccggtcggcctccatttcgactttcgagcgcagaaacgagagggccggagcagtcgcagtcccggagatcccgtcgccggtcgccctcatacttcctcgtcactgccttcggttctctttccaacaatcaagatgagccgtggcggtagcgcgagtggtggtcaaagatctctggtctacctctttggaagcggtgagccccccaaaccatgagcgacaccagctgaaagtgctccacctgctgctgcaggcgctccacctgctgagaaatcacctgctgcaaagactgatggcaccaggcacattgctgatgaggttaccagactaagcaataactagccacagggtcgacgatcagagcaccggaaacttccttactgaccgaccttcgaccaaggtgcacgctgctcctggcgtgggctcttccctgcgatacctgttcgccggcaactgatgccgctcaacaagctatcaccccccagtgacaacgcatgatttttcatgatcgcgaacagtcgttgtcatttcatgtgtacccgaacctctcgacccgcgtgtgtccgtaagctgagcctagatttcatggctaatcgtgtgactgaagcctcatcataagtcgtgtctgtaccagcttctcgtttcgttgca

SEQ ID NO: 111754 - DNA, 887 bp, Zea mays
  unsure (1)..(887): unsure at all n locations
  Clone ID: MRT4577_33406C.1
cggccgctcagacggcgggcgggaccgccccacctccagttcacactcccgtcacatgcccatggcgcctccgcctttgctccccctctccgcgctcctcctcctgctcgccgccgcctcccatgcctctgccaagcccgtccagactcaggccctcctcgccacccctctctcgcccgaccgtgtctccgccccgtcggaactagcccgcgacgacgacagcaacgtcttcgccggcaaccttgccgctgccgaggacgccgccgcctcgacagttcgtttccgcgtggtccaccgggatgacttctcaaagaacgccaccgcggccgagctgctcgcgtaccggctggagcgggacgagaagagggcggcacgcctctctgcggccgccggcgcggccaacggcacgcgtcgcggcggcggaggggtcgtggccccggtggtgtccgggctggcccaggggagcggggagtacttcaccaagatcggggtggggacgcccgccacgccggcgctcatggtgctcgacaccggcagcgacgtcgtgtggctgcagtgcgcgccgtgcaggcgctgctacgagcagtctggccaggtgttcgacccgcgccgctcgcgctcctacggcgcggtcggctgcgccgctccgctttgccgcaggctcgactccggcggctgtgacctgcgccgcagtgcgtgcctctaccaggtcacttacggcgatggatccgtcacccgccggggatatctccaccgagaccctcaccttcgccggcggtgcccgcgtggcgcgcgntcgctctggggtgcggcacgacaaccgaaggggttgttcgtccgcggcggcgggcctcctcgggctcggccgaggcagcctatccttcccc

SEQ ID NO: 111755 - DNA, 334 bp, Zea mays
  unsure (1)..(334): unsure at all n locations
  Clone ID: MRT4577_33407C.1
cgcaaccgcgncgggggggggcgcgagcccgagaggcccagccaacagcggccgcggcggggcgagcaagcgcgaacgccggccgngaccagaacggccgagccaaggccanggcggaaccggcccaccgcgcgccggaccccagcgcggacacacccnnccccgaacggggggggcggagcgacggcgacagcancgcgcgcgaggacnncgancnggaggaacaggacccgcacgnggacggcgaccacgaccgccacgcccaagacgggcaacccnggcaaccgcccccgcacgcgacacaagacnccacggccggggcaacgggaggagg

SEQ ID NO: 111756 - DNA, 423 bp, Zea mays
  Clone ID: MRT4577_33408C.1
acaagctttttttttttttttttttttttttttttttttttttttttttttttttttttttttttttttacctcggggggcaaccggctatagacaaaatttcttaaaactgctgggccgtacccacgcttaggggaaattccccaacattgggggacttatgtagggaatccgatcctgggacaaattttggtccaatcacggtcatacactgcttcctgggggaaatggttaatgggttaacaattgcgcagactaatgagggcgcaaacttaaattgaaaggcttggggtccctaatgggtgaccaaactgaaatatatttggggcccgctgactgaccgatttccacaaggaaaaccgagaggcccatttggattagggaactcttcaccttgcggggagagggggtttgtgtattggg

SEQ ID NO: 111757 - DNA, 875 bp, Zea mays
  Clone ID: MRT4577_33409C.1
cattgggtacctcgatgccggccgggagcacgcagaattttcttactgctggctgctgctcgccattgctgaccacactcacagcagcctccctccccctcgccaccgaaagctagcccgttgcttgcaagcctcgccaactgccgctatatatacgcatacaagcgcgcgccgcgcacgcgcagcacgcaatcagaacagtggttgctggagagcgcgcgggccgggcaaggagcaaggacgagcagggtcgtcgatggtgttcttctgcttcctggtggagcagcggcggacggtgcggagcagcaagccggcggcggggatctgctcgcgctgcggcgggtgcgccagcgtggcggacatggagaccgccaccagggtctgctacctgctcaccgtgcaccgccgcacctggcgcgccatcatctgcaccttctgcggcgccatgctcaagtcctaccgccactacaggctctactgactctcggccgatcgacggagttgttcgagtcggtgggtggtggaggaacgcgcgccttcattcttcgcgggcctcgcggcttgctgtgaggtgtagtgatgagctacgtacggtactagctagtgatctgttcttcctgatgagtcctcctctaactgggtgtcttgctcgcgactgctacaagctagattttgtttttgtttttgttttgttcctgcttgattatgctgctggggtttgcagatggttgtaatggcagagctgcgtgtaaatatagttatgtgtcatccatctgatttgtccaccatcacctgctggtgatcctctccctcctcctcgtgtgaagcgtagaatggttttccttctcttaaataaaatcttgcacacgaattgc

SEQ ID NO: 111758 - DNA, 2141 bp, Zea mays
  Clone ID: MRT4577_3340C.1
gccggccgggtcgtctcgacctcatccagtacccgcacctccgctcaaaaccccagctctcctgccccggctggtctcagccacaagtaggcggccggcaagccaagaccaaggagcccgcgagcgcgagggctcgccgacgcggatggcgctactcctccggccgattcctccccctccccgcctccgcgcgctcctcggccgcctcctctccactggcgccagtctatttccctcccgcatgctccccgcgccccgctccaccgccgccgtccctcggctcctgtttgggcccagtgctgtggccgcggcagccacgcggcgcaatggggtccgggtgcgtgcgttcatggcgtcaacgacggcgtctgaggcgatgcacgagaagcaggtgtccgcggagtacactgctgccaatgtccaggtcctagaagcattagatggagttcgcacaaggcctggtatgtacattgggagcacaggaccacgcggcttgcatcatctggtttatgaaatcttggataatgctgtggatgaagctcaagcgggccatgcttcgaagattgatgtagttcttcatgatgacaattctgtcagtgtaacagacaacggccgtgggattcctactgatatgcacccccagacgaagaaatcttgtgtggagactgtcttaacattaatgcacgctggtggcaaatttggaggttcaaaaagtggttacagtgtctctggagggcttcatggtgttggcttatcagttgttaatgctttatcagagacacttgaagttactgtttggcgtgatgggaaggaacacagacaaagctattcgcgggggaaaccaaccactaggctaactagtagcacactgactggtgaaacaagctctcgtcaagggacgcgcatcagattttggcctgataaagatatatttaccaccacgatcgattttgacttcaatacaatctccagtcgcatacgggagcttgcctttctaaatcctgagctaacaataatcttgacaaaggaagaagggcacacagttcaacgcaacgaatattgttatgctggtggccttgttgaatatgttaaatggttgaatactgacaagaaacccctgcatgacccgattgcgttcagaaaggagttggatggtataacagtggatgtctcccttcaatggtcctctgattcctactctgatacagtgctaggatacgcaaacagtatccgcactattgatggtggtactcatattgatggtctaaaggcttcattgacgagaaccattaataaccttgcaaagaagtcgaagactattaaggataaggatattaccttgagtggggagcatgtaagagaaggaatgacatgcatcatttcagtgaaggtccctagtccagagtttgagggtcaaacaaagacaaggttgggaaatccagaagtacggagaatagttgagcagtctgttcaagaaaacttaacagagtacttagagcttcatccagatgttctggattcaatcctatcaaagtcccttaatgctctcaaggctgcgttggcagccaagcgtgctagggaactagtcaggacaaagagtgtgttgaaatcttcatcactccctgggaaacttgctgattgtgcatcagctaatcctgaagaatctgaaatctttattgtcgaaggtgattctgcgggcggtagtgcaaagcaaggacgggatagaagattccaggctattttgcctctaagaggtaaaattctcaacattgaaagaagggatgaagcagccatgtacaaaaatgaagagatccaaaaccttattcttgcacttggattaggagtgaagggtgaggattttaagaaggaggctctccggtatcataagatagttatacttactgacgctgatgttgatggagcacatatccggactctcctccttactttcttcttcagatatcaaagagcattatttgatgaaggttgcatctacgttggtgtacctcctctttacaaggttgagcgtggaaaactagcacattactgctatgatgatgccgacctcaaagagatagttaacaccttccctgcaaatgcatcatatcatatccagaggtttaaaggtttgggtgagatga

SEQ ID NO: 111759 - DNA, 225 bp, Zea mays
  Clone ID: MRT4577_33410C.1
ctgacacgtccagtttgacatagttactattaacaacttcaccataacaataaattcaggtgcattcatactggtgcggaagccacaacaaatcaaaaagttacatacataacaactatttcatctccagtacaagtttccagacgttgttctttactcatataattgcttgaataaaacacttacactactttttttcagtatcaaacgctctaaatgatatat

SEQ ID NO: 111760 - DNA, 523 bp, Zea mays
  Clone ID: MRT4577_33411C.1
cgggaagaaacatgagactgggcatgtttgcttgggaccctggtagccaccatccaaacaccccctgaaagcatggatctaataatagaggtgcttcaactgtcagttgcatgactaaccaaggatttccatatgatcatatccaagggaagatatgccacaaactacaggtgctttaacctgcaggcagccaggcactcaaatttagagaccagtcaagatctttgatttttatagttcaagacaactgtggtaatacaaatgctgtcagaaagccaagaagagactcaaggtaaatttaaacacggaatcattttgaaagtcaggttggcactgaatcaagcaagcatacgcattaacctagtccatccttctgcatgtaatccaatacaaggatgctcacacaaaaaaacatgcaatatttttttctcgaacacgcaagagaagtgcatatcttatattaagaataataaaagggggaaaagaaccccaaacaatatcacaaagtcacaccttggattcc

SEQ ID NO: 111761 - DNA, 391 bp, Zea mays
  unsure (1)..(391): unsure at all n locations
  Clone ID: MRT4577_33412C.1
gtaagctcggaattcggctcgaggctagcccaaagttttttttctcttgtggtgtctggcccaaccggcggagctaccagattccacaggggtccccatggcctcaggagctgcggcggcccctgtccttaacactatggtgctgaaggctgccatccactgccatggctgctagatgaacgtccggaaagtgttcacgggcatcgaaggcgtgcacgacgtgaccgtggaccccttccaccacaaggtgactgnnaccggcaccgaggacaccgacacgctcatgaagaggctgtacaagtcctgcatgaagggagtgccctggcagtgtcacacctcctccaagaacagggagcccacgcccgaggccaccgtcaactctcacagctct

SEQ ID NO: 111762 - DNA, 366 bp, Zea mays
  Clone ID: MRT4577_33413C.1
ggacgccatcgtcgacgttcccgccgggctgagggacgagcgctgcctgcgcgccgagctgttggagaggctgcatccgagcggatagttagcagcttggtatcctcgtcgccggccgtcctgaaaagcttgagctgatctacttcgtctgcggcaaatcaagccagcacacctagcgtttcgatgccggattgcttgtactgcgttctcaggcgtcaaatcacgctgtctgcatgttatcttcaacctcattattactggtgagtccactgatgatggtgtccgacaatctggcccgcatctatagtgccaagtacttcggttgtggcgttagtcgtatctactcctgttgaggacatatatatt

SEQ ID NO: 111763 - DNA, 274 bp, Zea mays
  Clone ID: MRT4577_33414C.1
aattcggcacgagggccgcccccgtcggtcgacgaagactggctcgactacatgggctcctaaccgtgctgagctcgcgcgccttagaacagcccgtttctaggtacaaggtcatccccgtacttgattacatatctggccgaaccaactctctgaattatatatactctgttcacgagccttttgctactttccagcttagagactgcacaggtactattgtattggattgtatagcagaactctagacgttattaccttataccatgatgct

SEQ ID NO: 111764 - DNA, 284 bp, Zea mays
  Clone ID: MRT4577_33415C.1
gatttgctgcaaagattgaatctgttggaaaggctctgtggcctgaacgaaggtcttgaattgataaggagagaaatcgggatacggatatcagactgcaatgcactttcatcgtatgggtcttctttgctcccgttgtggatgcatgctgaggtgcaccttaagcaactagactcttccatttccaggatggaaatgagctaccatgcagatacagaacataggaattctaagacagaggttgttgaacacaatgcacctgatggagctgacctgacaacacc

SEQ ID NO: 111765 - DNA, 301 bp, Zea mays
  Clone ID: MRT4577_33416C.1
gtgaacaaatgatactttttgggtcatttagcaggccatcttttacacgggctgacctgacagcgggcaagaaggagtgtttacatacatgtctgcccaatatctgtcagtgaaaacagcaccaaggactaaaaatggcactaggagagaattagagtgtcaaccgcccagcacgttatcgggattgaagaactggggagaaacacctatcaagaaactacttacactatcaaaacccgccataaacaaatacaatctgcgggtgtgttaatatttaacgatccaagaacgaaataacgct

SEQ ID NO: 111766 - DNA, 1341 bp, Zea mays
  unsure (1)..(1341): unsure at all n locations
  Clone ID: MRT4577_33417C.1
tgagtttgtgacagtggttttctctgtgccgccttttgcaggggaagggggtctgggttgcgtacaggcgaaaggcacgcgccgccgctgccgcgcgagcctctccgtccccatcgccgcgcagatggatccgtcgtcggagcccctgtacgcgcaggtcgagccgtacgactccgggttcctcaaggtctccgatgtccacaccatctactacgagcagtccgggaacccgcagggccatgcggccgtgtttctccacggcggtcccggagccggcacgtcgcccggcaacaggaggttctttgacccgcagttctacaggatcgttctgtttgaccagaggggtgcaggcagaagcactccccatgcttgtttagagcagaacactacttgggacttggttgctgacattgagaagctcagggagcatcttggcatccctgaatggcaggcaattatcttctttttcaacaacactgattactcactcttcagtgctggaactcaatgctgccagacaatgtangtgtttggtggttcatggggaagcaccttggcacttgcctacagccaggagcaccctgataaggtgttgaatgctgatttgttgtggcctgttacgtcttcaccagttcatatattaaacttgaagaaccacgtggttgaagaaaagctcactgaaaatgagtaatacgtcatcttcgtcaagtggtgagcgtgctatgcagcgacagagggcaaggggtctatcttgggttggttcttttttcttttcttttcttttcttttctcttttctgtcaacatagagtcacttttacttattaaagagatcctgcctgttttagttcatcattaacatatcagatgatggtaaatggttgatggttatgttcgattttacggacgcgtgggcggacgcgtgggctcgtgagtttgtgacagtggttttctctgtgccgccttttgcaggggaagggggtctgggttgcgtacaggcgaaaggcacgcgccgccgctgccgcgcgagcctctccgtccccatcgccgcgcagatggatccgtcgtcggagcccctgtacgcgcaggtcgagccgtacgactccgggttcctcaaggtctccgatgtccacaccatctactacgagcagtccgggaacccgcagggccatgcggccgtgtttctccacggcggtcccggagccggcacgtcgcccggcaacaggaggttctttgacccgcagttctacaggatcgttctgtttgaccagaggggtgcaggcagaatcactgccaatgcttgcttagagcagaacactacttgcgacttggttgctgacat

SEQ ID NO: 111767 - DNA, 1236 bp, Zea mays
  Clone ID: MRT4577_33418C.1
ggccacctgtctttcttttcttgcatcagctggtgctaatgcagctgcgggttctggaattgaatcgttttcactgatgccgcgggataaggttcttctcgactgctcagggggcggcgtgtgtgggacctgcatcgtcgaggtggttgaaggcaaggaaatgttgtccccgaaaactgatgtggaaaaggagttgctcaaaaggaaacccaagacgtggagattggcgtgccaggcaacggtgggcaacgcagattcgactggacagagaaaggaggtctgggttgcgtacaggcgaaaggcacgcgccgccgctgccgcgcgagcctctctgtccccatcgccgcacagatggatccattgtcggagcccgtgtacgcgtcggtcgagccgtacgactctgggttcctcaaggtctccaatgtccacaccatctactacgagcagtccgggaacccgcagggccatgtggcggtgtttctccacggcggtcctggagccggcacgtcgcccggcaacaagaggttctttgacccggaattctacaggatcgttctgtttgaccagtttatttcggctactcatctttttttcttaaacgtaaccaaaggggcttggggggttgtgtgctgttcctgatctgtgttatggttcgattgcagaggggtgcaggcagaagcactccccatgcttgtttagagcagaacactacttgggacttggtagctgacattgagaagctcagggagcatcttggcatcattcaggtgtttgatggttcatggggaagcaccttggcacttgcctacagccaggagcaccctgataaggtcactggccttgttctgagaggaattttcttgcttaggaaacaggagtttgattggttctatgatggtggtgcagcagccattttcccagatggtgttgaatgctgatttgttgtggcctgttacgtcttcaccagttcatatattaaacttgaagaaccacgtggttgaagaaaagctcactgaaaatgagtaatacgtcatcttcgtcaagtggtgagcgtgctatgcagcgacagagggcaaggggtctatcttgggttggttcttttttcttttcttttcttttcttttctcttttctgtcaacatagagtcacttttacttattaaagagatcctgcctgttttagttcatcattaacatatcagatgatggtaaatggttgatggttatgttcgatttt

SEQ ID NO: 111768 - DNA, 624 bp, Zea mays
  Clone ID: MRT4577_33419C.1
aaaaacaaaaaaaaaaaaaaaaaaaaaaaaaaaaaaaaaaaaaaaaaaaaaaaaaaaaaaaaaaaaaaaaaaaaaaaaaaaaaaaaaaaaaaccctgggaaaccgaaaaaacgggggttttcgaattcgcttatctccggaaccaaaagggtccccccttccccaattcttctctaatttctcacaacggcggcggttaccccttttcaaaaacaccaggggggagggcttctcaatccacttcggcaaggcgggaatccaggtcgaaaacgcgggtgggaagttgaactgcctcaagaagggaattcaggttgagggcaaaaggcccggggaaaaaaccttggggggaggggaggaggttttcaacacttttttcagggaaatgggcgttggaaaccacgccccccgggttgtttttgtggaccttgagcccattgtcatcaaggaggggaggatgggaacctatcgccagttcttccatctggagaagttcttcaggggaaaggaggatgcagccaacaatttcgttgggggtcacaacaccattggaaaggaaatggttgacctgtgccttgaccgcatcaggaagtttgcaaataattgcacgggtctcaagggtttcct

SEQ ID NO: 111769 - DNA, 602 bp, Zea mays
  unsure (1)..(602): unsure at all n locations
  Clone ID: MRT4577_3341C.1
tttggtttttttttttggtgtnctcgtcccttgccgctgtgccngnngggcgtggggggggggtcgngcctnncgccgttttgtgccggggcnncttcccntcttgtggcccctctttttcttttgnctttgtttttgccttttggctgtcgtggggggggcggggtgntnttggttggggttgnttgctttcgggttggggcgctctgccgcgggcccccccgggtctttttgctgnntcttgcttccnctttcttcctgtctgctctctcctgccncnttcctccccctctcnccgnnggctcccccccctgcccctggtgtcnngcctgctccctcgccctcttggttttnngtgcgctcgctcctccccctgttcgcttctcttcccctccctggctccctgccccctttggggttttncttttgtcctcccccccccctcctcgctgctgcccctcnnncgnccgtccccccgngcgccccccccccccngnnccccccnccccccgcggncccccccccccnnnnggnccccccccccccccccccnccccccccccgcccttttttttttttttttnnncgcccccctttttccc

SEQ ID NO: 111770 - DNA, 1985 bp, Zea mays
  Clone ID: MRT4577_33420C.1
ttgggaccctcgaggccggccgggaaccctcccgatcggccgcactgaaatgatcagagtgagccccctcctcctcgcccgcccgctccgtgttcattgccccactccctcacgcctctcgcgcccgccgctccaccacccccacccacgctcaggggaagggggtctgggttgcgtacaggcgaaaggcacgcgccgccgctgccgcgcgagcctctccgtccccatcgccgcgcagatggatccgtcgtcggagcccctgtacgcgcaggtcgagccgtacgactccgggttcctcaaggtctccgatgtccacaccatctactacgagcagtccgggaacccgcagggccatgcggccgtgtttctccacggcggtcccggagccggcacgtcgcccggcaacaggaggttctttgacccgcagttctacaggatcgttctgtttgaccagaggggtgcaggcagaagcactccccatgcttgtttagagcagaacactacttgggacttggtagctgacattgagaagctcagggagcatcttggcatccctgaatggcaggtgtttggtggttcatggggaagcaccttggcacttgcctacagccaggagcaccctgataaggtcactggccttgttctgagaggaattttcttgcttaggaaaaaggagtttgattggttctatgagggtggtgcagcagccattttcccagatgcatgggaaccatttagagattttattcctgaggatgaaaggaattgtttcgtagatgcttataacaaaaggttaacttcctctgatcctattgttcaggttgaagctgctaagcgctggacgatgtgggagatgatgactgcgcaacttatccaaaacaatgataacattaaacgaggagaagatgatgaattttcactggcatttgcaaggattgaaaaccactactttgtgaataagggatttttaccctcggactcattcctattggacaatgttgataagatccgacatattaaaggttttattgtacagggacgttatgatgtttgttgccctatgatgtctgcttgggatcttcataaggcttggcctgaagcagaattcaaggtggtagcagatgcagggcactcggccaatgaagttggcatcgctgccgaactgaggtcagccaccgataaactgagagacttgctgcgcaaatgagccgggcgaaaggcaacctgcacctctatctgatcatggaactcagaggcccataataattacatagctgtgtaacggttagcactgtgccgttaaacaatgtcattgtcaccatcgatatgttgtttgtttgctcgctggagtgtatgaggaattgaagtttcaagacgggaccagaatgggtggggcgtgtttggtttgcgtttttagatggttcctggggaagcagcttggcacttgcctacagccaggagccccctgataaggtccctggccttgttttgagaggaattttcttgcttaggaaacaggagtttgattggttctatgatggtggtgcagcagccattttcccagatgcatgggaaccatttagagattttattcctgaggatgaaaggaattgttttgtagatgcttataacaaaaggtgttgaatgctgatttgttgtggcctgttacgtcttccccagttcatatattaaacttgaagaaccccgtggttgaagaaaagctccctgaaaatgagtaatacgtcattttcgtcaagtggtgagcgtgctatgcagcgacagagggcaaggggtctatcttgggttgggtcttttttcttttcttttcttttcttttctcttttctggcaacatagagtcccttttacttattaaagagatcctgcctgttttagttcatcattaacatatcagatgatggtaaatggttgatggttatgttccaaaaaaaaaaaaaaaaaaaaaaaaaaaaaaaaaaaaaaaaa

SEQ ID NO: 111771 - DNA, 662 bp, Zea mays
  Clone ID: MRT4577_33421C.1
tttttttttttttttaacccaacagttacttttattcgaagattttgagctaggcaagaaacacatggaccgaacaaatacgatatcggttatactagtataaactgggtctgacacaatttaaaataagatacattcatctactgctcgaacacctgatcgcactgccatagacaatttattagagaatcaaatcttcatcatttttcgtggacttgaattctctagttagccacatgttaaccgtgacagtattcgacatccacacccgtctcgcgtgctatgaacttaccgtgaccacttgttggtcaggtgacggcttctgagcgcgacgagaaggatgttattcggcgagtgcagcttggacgaagaacagacagaacggtccgcgcgaagatgtttgacggcggggtgcttcggcgtcgaaggactgttctgatgactcaactgcggtagcgtcgtagcgatgaagcaacagatctatgagcttccatagcagtggaaggattttgaacacgacacaaataacaggacactactcatagccgacctgaccatggaggcactatcaccgcggagccgggaacggcagaggaaaatacaatttttctaggaaatttctagggtgcatggcgagtctctcacggaacgcgagatcgcga

SEQ ID NO: 111772 - DNA, 527 bp, Zea mays
  Clone ID: MRT4577_33422C.1
gggacccaaccgatcatgcatatgcaacgctgaatcactgtacacgtataaactgatctcagggcactatcacgtataaactagcgcgaatgaaaaagttcaggcttggactattactcccaaaaggaacaaaagggccgtgcgcttgagtatgctgccatcgaaatatgaacccgcaactaataagccggcagggcagcaaaccatggaaaccttggcacaaaccatggatgccaaattttgcagctaccttaaatgatcaatctgcataaaaaaacacctctaaaagagtgccatactttttatttcaaattgaacttttcaatatggataacattgcactttaaagcatgcatttaagacaattgatacgaagtcaattattcagcagccaaaatacatttttttatggggatgccaaaatcctaagaaactgatgtctgcaattctcacatactgtattcaaactttttgtttttgggatgaaaacattctgaactgcctgaatactacagtgcgcctaacat

SEQ ID NO: 111773 - DNA, 366 bp, Zea mays
  Clone ID: MRT4577_33423C.1
gggagcgtgggagggtccgaagtggtagatagcgagtctggttcctgaggtgtgcttctttctacggcagcaacgtcacaatcagaaacaacaatggccaacactaactcggaagatgatccctctctggatctcatgactgagctccttcgacgactcaagcgctctctcaaacctgacaagcgtcttattctcattggcccacctggatctggaaaaggcacccagacaccaagcataatagatgagtactgattatgccactgagctactggtgatatgtgaagagcagctgtagcagctaagacccctcttggtgtcaaggctaaagaacctatggataagggagaactcggtgctgatgac

SEQ ID NO: 111774 - DNA, 649 bp, Zea mays
  Clone ID: MRT4577_33424C.1
atgacggacgccatctcccctgttcgcgtttccggacctgtgccgctcctccggtcacgcgagctcctctaaatgttcgcccacaggcttccatcagtaccatgtggcgggatgcgcgctgtcgaccccgaccgatgatcaccccaagatctaccgcatgaatcctgtgccactaacgaggttcacgccaagtcgaaggtctggtacttcctgacaaagctgaaaaacgtgaacagcaacaatgggctcatgttcttcatcatcgagatcttctagcgcaaccctaccaccatcaagaactacagcatctggctgcggaaccatagcacgacggatgaccaccacatggacgaggaggaccgtgacaccaccctgaatggcgtcgaggatcacatgaacgactagatggactcgcgccaccgtgtgaggtccccctgcatccagatcgtcgagactgcgaccgaccacttcaagctgtgcatgagggacaacgcgattgaggtccacagactgcagctatcaatgtcccgctcgtgtaccgcaaggtgaagacgacctccgttaaggtcatgaccaccttcgaggaggccaggccccacctggtcatgtgatgggcctcggaggatgtgatgacacgcacctctgtttt

SEQ ID NO: 111775 - DNA, 458 bp, Zea mays
  Clone ID: MRT4577_33425C.1
ccggccgggtggtatagtcacctccatatccatgtacagcgctccgcttgtagccgtgaagcaagtcatcctgaccaagagcgtggagttcatgcctttctacctgtcgttgttctccttgctgaccagttttacatggatgctgtacggcatcctaggaagggatccctatcttacgaagcaatcggccgccgagagcagtcaatggtgcgacaacaactagccgtgaagatgcaaatgattgcaaggtttgacttcgagagccttaagaaactgcctctctccgacgctagtaggaggttgatactaaagtggcgctattcgcgtgtgcagttattattattatctaattgtaaactgctccagtgttctttctttttgttatctaatcaatgggcatagcacctgcaaccagtaattaaccacattctgtttaaaaaaaaaaaaaaaaagcggcc

SEQ ID NO: 111776 - DNA, 232 bp, Zea mays
  Clone ID: MRT4577_33426C.1
tggagccggtcatggcgccgtcgtcctctctgccgcggagcgccagcgagctaccggacgcgccgtcagcgttcatctcgaacacggcgcagtaccgcgtctccgtgcccaccacgtgctaggttgtcggtatgttgctcgtcgttcggccacatggtgagcccgcccacccacacatcgccgatgacgcccagcagaaagcatgaccacaagcctaagccgaggccggacg

SEQ ID NO: 111777 - DNA, 1063 bp, Zea mays
  Clone ID: MRT4577_33427C.1
cattgggtacctcgaggccggccgggagctaggaaatgaaccagccacaataatcctgatcctcgatcttgcgttgtcgtcgtcaaagagacgactcgatcatcatctcatctcagagcacgcaagcaacaatggttactagcatccgcgtcatagttggaatcataggatctgtagtctgtgtgctcctctacgcggttccagtgctgacgtttaagagagtggtgaaggaggccagcgttggggagttctcgtgcgtgccatacatcctcgcccttttcagcgccttcacctggggctggtacggcttccccatcgtcagtgacgggtgggagaacctgtcgctcttcggcacgtgcgccgtcggagtgctcttcgaagcttcgttcgtcgtcgtatacgtgtggtttgcgccaagagacaaaaagaaatctgtcgtcctaatggtgtctctggttgtggcaacgctctgcgtcatcgtatccttgtcaagcttcgtgttccacacgcaccatacgcgcaagctatttgttggtagcattggtatagtcacctccatatccatgtacagcgctccgcttgtagccgtgaagcaagtcatcctgaccaagagcgtggagttcatgcctttctacctgtcgttgttctccttgctgaccagttttacatggatgctgtacggcatcctaggaagggatccctatcttacggcaccaaacggcgccgggtgtttaactggacttcttcagatcgctgtgtactgcatttacagcagatgcaatcgaccgccgaaagcagtcaatggtgcgacaactagccgtgaagatgcaaatgattgcaaggtttgacttggagagtcttaagaaactgcctctctccgacgacgctagatactacagtggcgctattaattcgcatgtgtgcagttattattatctaattgtagccttcgctagctgtgtctgttgtaagactagtttgttttacttggggcaaatcaatgggcatagcaccagcaaccagtaattaacaaaaaaaaaaaaaaaaaaaaaaaaaaaaaaaa

SEQ ID NO: 111778 - DNA, 655 bp, Zea mays
  Clone ID: MRT4577_33428C.1
ccgggaacggccttcccgggcgaattcaaaactggctgggtaaattgcctcgccttcctaagttcctaattctaaaatctattgcatctttggatgttgatgggtaaaatggaagatccatcttagcacggtgatccatcttagtttcggctaccctaagtttctacggttcaacttctcatctattttacggcgatccatcttagcacggtttctatgataaacatataaaactaagttgagatcaagcttacatgtataaaatactatgtggattagacgctaaacgtgagctaagatcgagtataaatgaattgagtttaggatctctagtcacgatccgtcttgtttttttatgttacataaataggtgaagtcacacaaactcatgtgtgccatctcaatgcatacatgtttaaggtattggtttttacatgaccctttaatatcgttttagtaccaaattttcagaagaaccggtattaaagatgtatttcatagctttagcatcgatggagcttcaaaacttcatgtgcgaaaccctttcaattgggtgtggtaggccgacgtcatagtatatgttagtgtgagatgtttatggcataagctgagttgtttagactctttccgacattttgtgaaccaaacaacacct

SEQ ID NO: 111779 - DNA, 294 bp, Zea mays
  Clone ID: MRT4577_33429C.1
catgaagagccagcattccagaattttatgcaagaatcgatggcacaatactggaagagatacaatagattggagactttagcacacttcacttgtttctagaagtccagaattttggacctccacgtgaaagaactgttcttacctctgaactgggggctcccataagggataattttcctcataatagcaaggtttctcttattagaaaaatcttgtgactcaggtgaagtcagggatagaagacccttggacctggcaggttaatgccgattattccttggcctttccctt

SEQ ID NO: 111780 - DNA, 324 bp, Zea mays
  unsure (1)..(324): unsure at all n locations
  Clone ID: MRT4577_3342C.1
ccacggggcagacggcggcggagaccccgcacgggnacttttacatttacaagcccgacgccgacgacgacgccgagggcgacgacgaggacgccgcccccgacagcgcccccaacgcggccaccatgaccgagcccagggacgacgaccccgccccacccggcgccgaagcaaccgcgggcggcaccgcccccagcaacgcgcccagcgcactcgccagcgccgacgcgcgcgactgcgccgccgacagaagccccgcgggagcccgcgccaccgtcacaggagcggagaccggcatgcgcaccggcaggggcagcaaaaacc

SEQ ID NO: 111781 - DNA, 371 bp, Zea mays
  Clone ID: MRT4577_33430C.1
tttttatccatttttaatttaatcagaactaaattgtggctttaggatattggaaggacaaggtctgattatgaatcatgccggatttgatgccacctaaccatgcctttgtttcttatttggggtggggaggtaatgactttatattgtgtggggtagcttatacttgatatattattttttatatggtgactagtggctttccaacatttattaatttacaggatcaaatccgtgtaaacagaagttgtcggtggtggcgtcagcttatggaacctcttgtttgaaaaattctcttgttgttgacccctgttagggaagccatccccgaagaggcttggcttgactaaaatatttaaaacctggttctt

SEQ ID NO: 111782 - DNA, 109 bp, Zea mays
  Clone ID: MRT4577_33431C.1
cggaaaggtgacgcactccttttcttcaaccttaacccagagggcagcaacgactcggtgatgctccatggctagttgctcggcgataaaaggcgagtgatggtcggct

SEQ ID NO: 111783 - DNA, 355 bp, Zea mays
  Clone ID: MRT4577_33432C.1
gaggataaacacgaaaagcgagggacgaggcttcaagatacaaacaccccaaccgcgcgggagcaccctcctgagcagcgtgcagcggacaggcaagccgccaccggcgacacagaagaacacgccgacgacgccatgcctgggcaccgcgatcgcaagggcccgctggacggcgccctccaaggggggggcgacccccgagcgcgacgcgcaccggggcctggctatgactgggcgcactcgccaccgtagccgggcgcctgagcgagctaacgggcacaaccgctgccctgaacgtgcgcgcgatcacacctgccctgcctactgaactacctggcgcgttaccattcccgac

SEQ ID NO: 111784 - DNA, 638 bp, Zea mays
  Clone ID: MRT4577_33433C.1
gggtacctcgaagccggccgggccgggatgacattctactacataatcactgttcgcgttggcgtagcatagctctcctcccacgactctctctcgcattgttctgctgtgcctttctgtactacgatcgagtgatgcgtctgctcgaattagacatgcattaactgtcagatcagagctaaatagcgggtagacccatggtcttccaaggaatgcgtgtacgaaggcttcgtgctctcaccacaagaccaaacgcgagacggccaaacgcaccctcaccgataagatctacgtgcaaagatgcaagaacgagcactccaggacgcagatggttcacagacaacgagagcctgatcgtgctcgaagatcgagccattcgtacggtaaccgctgcagaaggttcagactctagttgctcgtgtgtgactgctagccacgccaaggccatccaagtccccagtagaaaaaggcacatagctgctacgcatgtctgccgccccgacgtagcaagtgacgggcgatgccagcgcagcgaagcaagacactgtctaccttgcaaggataggatctgaacactatgatgcgatgttgcgggataccctgaacctagggaaccatagtagtgttctgccagagac

SEQ ID NO: 111785 - DNA, 526 bp, Zea mays
  Clone ID: MRT4577_33434C.1
ccggccgggaagaagaaatctatccagcaagacactagccattcttggatgcccctaatccactcgcgagaacaggacaaacaaagatggaggcactcaacctgatgactcgcgcggcactgtgtctcgttgctacgacatcctcctctacatatcgaagaaagatcaacggactgcacctgatgacatacaacagtctcagatagcatatctaagaaaaaagcgccctactgacagtgcgaagacgcggcatgcagcgaacgtcaacaagagtgcattgaatcggacgccaaggtcgaaagaatgtaagtatcaacgcgaggatgtatacatgattccaggcaacacctagccaggtagtgaccatcgtctctcgaaaagttctgtaacagcagatgacgggatacgtcagtctgataagaagctgtgcgacgtgactttctgacgaacggaatgaacccgccaagcctagagtgccatctctccgagtccgtcagagaggagaaatagataagtatgtagaagt

SEQ ID NO: 111786 - DNA, 859 bp, Zea mays
  Clone ID: MRT4577_33435C.1
gacggtggtcatcgatgcctccgcggtggccagcggagcaggggagggggaggaggaggaggaggagcaaggggagtgcgggttctgtctcttcatgaagggcggcggctgcaaggacgagttcgtcgcgtgggagaagtgcgtggaggagacggatgccgcggatgccagcattgacgtcgtggagcggtgccaagacgtcacggccgcgctgcggaagtgcatggacgcgcacgccgcctactacgagcctatcctccgggccgagcgcgccatggctgcggacctcgaggcctttcaggcccaagaagccgcctccgactccgcggcgtcggaggaaggccagaaggaggcggcggcggccgaggcagcgccgcgtccgtcagacttaggccagaataagcaggtggctgaggcggcagttgcggaggagagcagagatcctgcagcctgattgggcgaaaaaaggcagcggcgtcttcaattttttgtgagggatttgaggatatgaattccgtttgtaccttaggagagcatcaattaacattttgtgagggggatagatttctgtccttttctctttacatgaaaaaaaaaaaaaaaaaaaaaaagtacaacatgcccgacaacgccctccgctgcggcaaggtcgtggggctgccgctgccgccgtcctacgcccccgcgcgctaagatgacgaaggcctcgttttctcctcgtggtctgaccatccaatccaaactcaaaagaacaaatacgaaagaagcatgagtggatatatatagtattgagatgcatgccctctcaaatcactgtaccggggttctcaaaaaatcatgtaatgggagttatatatat

SEQ ID NO: 111787 - DNA, 291 bp, Zea mays
  Clone ID: MRT4577_33436C.1
gatccagtaatctacgtgctattttatgacctgttaattcatgctcaggtaaggtttcaaagctcgaaggtacacccagctaatgctattacaaagccgccaaggtaatagctgatctatcgatataacgcaaaacaatagccggaggaggcaaggtactgcgcttactagctcagcttctccaaagatctgtgatcttggcaccacggtcgcctgagtcgccgctatgccttgcagggtttcctattcatgctggagcctcctgtccggacaccttgagcattgagaggg

SEQ ID NO: 111788 - DNA, 506 bp, Zea mays
  Clone ID: MRT4577_33437C.1
cgagaaaaaggacccccgggcgctgatcatttttaatggggggcccatccccacgattaggggcctttgaccccaagcttaggggaaagccccccccgttaaaaaaatcccccaaaaaacgggggggccgggactccaaaagggtgaaaaccccgggccactacagggggggcctaaaggcgaccgcagtaatagggggaatgcctaaacaacttgctgcccaaaaaaatgagcccggggacccaaaccattttggggaccggaaacgggaagcccccaaacagcccccccataaaaaaggacttgggggaaaaaaaccccagccggggcctcctttccctgacgtactccgggaacgccttgccaaccacctttttttcgcgcgcgttgtcgtcgtcgtcggggttttccacgggcccccccccccccaaaaaccgggcgagcacaacggggttctccaacccccccaagcccccctggccgatgaacgggcccatggggtgcat

SEQ ID NO: 111789 - DNA, 457 bp, Zea mays
  Clone ID: MRT4577_33438C.1
gtttactctctgttctctctatggactgttgtggcttttggcctaacgcccaacgaccaacacaccgcggtataggacaaacgtggctactaattaccgccaaccccaattaacaatgcactcattgcctatgcgatgcaggcgcgtaacaaatgtaacacctgcatatggagaacatcaagcatttatggttacttccaccctgacatgatacgaaagacatggaagctgaataagataccccatgatctttgatccaggatacgaaattaactgtgctaggcaatgcattaatgataacgactggatggatctagttacagaggatattgattgctgccttctatgtgacgaatgctacgttagaagaacccgaacaattaaaaaaagaagaggggaggcggctttatatccttaaaaacaacatgcccaaaagatcttgaggtcgtgacccaag

SEQ ID NO: 111790 - DNA, 180 bp, Zea mays
  Clone ID: MRT4577_33439C.1
ggggcgcggaggaggaggcggacggtccagaggcccgacgccgtgacgtgacgacggtgcaacgcgacgcacacacgtacatggcaaaattgtttgctttaagtttgttccaacaccttcattgtttagtacagtatctaactcggtccggcattgttgtctcgatcgagtaataaacaa

SEQ ID NO: 111791 - DNA, 185 bp, Zea mays
  Clone ID: MRT4577_3343C.1
tcgagcggccgcccgggcaggtacaagctttttttttcttttttctttttttttttttttttctttaaaccgtctcattatcaacctatcttttaagaagacccttgctggaattttgccttacatgttgcccttactcgatacgtcaactaaaaaacggtcccagggtggacactactcaaaga

SEQ ID NO: 111792 - DNA, 326 bp, Zea mays
  Clone ID: MRT4577_33440C.1
aaaaatgaccctgcccgggcggccgttcaaagagggcaatttccacccaattgggggccgttcctaggggatccaacctcggacccaacctgggcgaattaatggccatagtggttccctggggaaaatggttttccgttaacatttccccacaacttacaacccgaaagcttaaagggtaaagccgggggggcctaaggagggacctaactaaaattaattgcgtgggcctaactgcccgttttccagtcggaaaacctgtcggcccagttgctttaatgaatcgcccaacccccggggaaaggcggtttgctttttgggccctt

SEQ ID NO: 111793 - DNA, 290 bp, Zea mays
  Clone ID: MRT4577_33441C.1
gtccactatggatcttcgtgctattctttcgcgcgggatgtccttccactggggatcagcccacgcggtgccttatatagaggcaatctgaagagcaaagcggccaacaagaggctatcaaccgatctccctacatatctctctctctttggtatcccttcctctgcttaactacccgctaactcttagtagaaagaggatgtacctgacatactgacaaggctaggctagcttgtggccgtctgagatcgatcagatgtgacgactgacatgacatggtgcaacagctt

SEQ ID NO: 111794 - DNA, 280 bp, Zea mays
  Clone ID: MRT4577_33442C.1
tggagaagtcagtgccagggtctggttgaagcttttctctggtgcagggagaagggcctggcactgctcaaagaagagccggccagtccagggggggatggcgaggccgggctggccctggccccaaacgagtgtgacttctgcgtgacagcccccccgccactgcctgtggctgtggtgcatgccatcctggaagggaaagggagcttcagccccgaggggcccaggaatgcccaacagcctgaaccaggggatcccatggagatacctgacaggtgag

SEQ ID NO: 111795 - DNA, 874 bp, Zea mays
  Clone ID: MRT4577_33443C.1
ccctgccattgattgctattcccagtttattgaagttggtacaatggtttccccaaccatttatgctcgacgttgcctgtcatatctgatgaatggcatgccacaggaggcattgaatgatgcaatgaatgctttggtaatatctcccacatggtcaacagcattctatcttcaggcagcagcactattatcacaaggcatggagaatgaagcacaagaagcactcaaggatggttgtaacttagagcaaagtagcagtggtggacattgattgtgaacatatttgtagtccccaaaatgcacataatgtcaggtgcttgtttgaagagagagagagtaatattggctttggctatggaagcagcaggcgttggtaatttgtcaatttggctaggggtttgttaaccttattcagattttgtgcttgtggaacgtcgtccctcgtccatatcttcatgtaggaatgtacatatggaagaaagcgacaacagaggctctgaaagagaggacaaagacatccaagaggtgaataaggaaattattaatggggagaagaaagtgaaacttttttcttggtcctactgaaacaagagaaggaaaacataagaagaagaagaaaaaaaaaagattgctgatgtacatgtctgtctttgctggtggcaggtgacctgtacagcaagcggttgtttttaccctgtcttaattcttcgtttcttatgcgttagctcccattggtatatttctggataagatagtggaattcttttaaaaggacaaaaatgtcagcgttctggttgttcaagagttcaacaacgctttcaccccttgctccagataattttttttattggagtacattcataaactagttaac

SEQ ID NO: 111796 - DNA, 840 bp, Zea mays
  Clone ID: MRT4577_33444C.1
ggtcctactgaaacaaaagaaggaaaccgtaaaaaaaagggggattgctgatgtacatgtacatctttgctggtggtaggtgcgtaaacctgtacagcaagcgttgtttttaccctggctttgttcttcgtttcttatgcgttagctcccattggtatatttctggataagatagtggaattcttttaaaaggcaaaaaatgtcggcgttctggtggttctaaaaaaaaaaaaaaaaaaaaaaaaaaaaaaaaaaaaaaaaaaaaaaaaaaaaaaaaaaaaaaaaaaggggggcgcaataaaaaaaaaaaaaacaaacagatgaaattttatcaagttcatcaatgtgctgttgtctcaacttgtgtaagcaatgtttaagaaagtcattgacatcaccatctttttctcatcattttgttttgtggcgcaggtgcttgtttgaagagagtattattgtctatggaagcagccatcggatgtacatatggaagaaagcgataacagaggctggctctgaaggagagggcaaagacatccgaggtgaataagtgcagtagacaggaaattaatggggtgaagaaggtgaaacatttttcttggtcctactgaaacaaaagaaggaaaacgtagggggaaaaaggttgctgatgtacatgtctatccttgttggtggtagcctggtaggtgcgtaaacctgtacagcaagcgtggtttttaccttgtctttgttcttcgtttcttatgcgttagctcccattgatatatttctgcataagatagtggaattcttttaaaaggaaaaaaatgtcagcgttctggctgttccactttcttgctc

SEQ ID NO: 111797 - DNA, 716 bp, Zea mays
  unsure (1)..(716): unsure at all n locations
  Clone ID: MRT4577_33445C.1
attgggtacctcgaggccggccggggccgccngtcagcactaggtcgtgtggccgtcgtcttttcctcggaacgccaagcccccctccggcgaaatggcccccaagcgaggtggcagggcgccggtgccggccaagaagaagacggataaagtgacgaaccctctattcgagaagaggccgaagcagttcggcatcggcggggcgttgccgcccaagaaggacctgcaccggttcgtcaagtggcccaaggtaccaccggcgctcaaccagttcacccgcaccctcgacaagaacctcgctacgaacctgtttaagatgcttctcaagtaccggcctgaagacaaggctgccaagaaggagaggcttcttaagagggcccaagctgagaatgaaggaaaaactgttgagtcgaagaaaccaattgttgtgaagtatggccttaaccatgtgacttacctcatcgagcagaacaaggctcagcttgttgtcatcgctcacgacgtggatccgattgaactggttgtgtggcttccagccctgtgcaggaagatggaggtcccttactgcattgttaaaggaaaggctcgccttggatcgattgttcacaagaagaatgcatcagtcttgtgtctgaccactgtcaagaacgaggataagcttgagttcagcaagatcctggaggctattagggaaacttcaacgacaagttcgatga

SEQ ID NO: 111798 - DNA, 459 bp, Zea mays
  unsure (1)..(459): unsure at all n locations
  Clone ID: MRT4577_33446C.1
ctcacacctgctcctgcatcctcacctcactctgctcggcaggtagcattcctcttgatcatccgctctgtccagggaagccgatccatccgggtgccgatctgatcccaccaccgcaaccagccatgcagttcctgaaagtcgtctcgcccctgcgcaggacccagtctctacgcatcctggccatcctcgtcatcttcttcgtcctggcatccgtctcccgctaccaggggtcatacgaatactccatcgacgaggacggccaggtccagtccgtgccctcagacgtcacagagcacgatatctactttacgcaccacatcgccacctttgaccccaacgaccttcggccctggaccaaaagcgacacagaggcgctcaagacgccagnaggacaggaagtggtcgactacctgacagactccagtttccaaaagcacgtcgccgagaatgacacag

SEQ ID NO: 111799 - DNA, 336 bp, Zea mays
  Clone ID: MRT4577_33447C.1
atataaacacccgtggagggcctttttttagttgtttggggcattcaaaaattgaagcaatatggtcttgtcagtttctgttcctagaaatgacacaaatcggcaccgatacagggcagaaagcctgagtcattccaaagggcaacactacatcacaaaaatgtggggcgggggccgtcaggcgccagcagagaaaaggaggagatcattgggggggaacgaacacgtttatctaactagcttgcttcacacagaacggacacggccgccctcgtgcccgttggatgtaattctgaggcaaggcccccactgctggggggggtgtttgagaggggg

SEQ ID NO: 111800 - DNA, 1005 bp, Zea mays
  Clone ID: MRT4577_33448C.1
ggaacgccaagctcccctccggcgaaatggccccgaagcgaggtggcagggcgcctgtgccggccaagaagaagacggataaagtggtgaaccctctgttcgagaagaggccgaagcagttcggcatcggcggcgcgttgccgcccaagaaggacctgcaccggttcgtcaagtggcccaaggtcgtccgcatccagcgccagcgccgcatcctcaagcagcgcctcaaggtgccaccggcgctcaaccagttcacccgcaccctcgacaagaacctcgctaccaacctgttcaagatgcttctcaaataccggcctgaagacaaggctgccaagaaggagaggcttctgaagagggctcaggctgagactgaaggaaaaactgttgaagccaagaaaccaattgttgttaagtatggccttaaccatgtgacttacctcattgagcagaacaaggctcagcttgttgtcatcgctcatgatgtggatccgattgaactggttgtgtggcttccagccctgtgcaggaagatggaggtcccttactgcattgttaaaggaaaggctcgccttggatcgattgttcacaagaagactgcatcagtcttgtgtctgaccactgtcaagaacgaggacaagcttgagttcagcaagatcttggaggctattaaggcaaacttcaacgacaagttcgatgaggtgaggaagaagtggggaggtggtatcatgggctccaagtcgcaggccaagaccaaggctagggaaaagctgatcgccaaggaggctgctcagcggatgacctagattatccacttctgagtgtgccctgtagttttgacgtggaagaactgataatcgttgtgcactcgtattgtggttttctgaatcaagtttcatatgtttctgtccaccagaccatgtttagaaactttgcaagacagagtttacagtgtttatgcgatgtctcagctagtatattattttgtgccccaggcaaccttgtttt

SEQ ID NO: 111801 - DNA, 514 bp, Zea mays
  Clone ID: MRT4577_33449C.1
gtggcttccagccctgtgtaggaagatggaggtcccttactgcattgttaaaggaaaggctcgtcttggatcgattgttcacaagaagaatgcatcagtcttgtgtctgaccactgtcaagaacgaggataagcttgagtttagcaagatcttggaggctattaaggcaaacttcaacgacaagttcgatgaggtcaggaagaagtggggaggtggcatcatgggatccaagtcgcaggccaagaccaaggcccgggaaaagctgctcgccaaggaggctgcgcagcggatgacctagattgtctattgtctactgctgtgtctgccctgtagtttgacggggaagaactgatgaactcgtattgtgggttttctgaatctagtttcatatgtttctgtcccccagaccatgtttagaagctttgcaagacagagttacagtgtttatgtgatgcctcagatccatgcagctttggttctatttgcctaagagccacccccaaagtatttcctg

SEQ ID NO: 111802 - DNA, 112 bp, Zea mays
  Clone ID: MRT4577_3344C.1
atcagaagccatcttacatgtttacagatagggagcatcgtgagccatttgaatactcagaggatcttacaagcttgactgttggggcagaggatccagaaaatgtaatttc

SEQ ID NO: 111803 - DNA, 672 bp, Zea mays
  Clone ID: MRT4577_33450C.1
agaacaaggctcaatgaggtaagtcacatggttaaggccatacttcattgagcagaacaaggctcagcttgttgtcatcgctcacgacgtggatccgatcgaacttgttgtgtggcttccagccctgtgcaggaagatggaggtcccttactgcattgttaaaggaaaggctcgccttggatcgattgttcacaagaagaatgcatcagtcttgtgtcttaccactgtcaagaacgaggataagcttgagttcagcaagattttggaggctattaaggcaaacttcaacgacaagttcgatgaggtcaggaagaagtggggaggtggcatcatgggatccaagtcgcaggccaagaccaaggcccgggaaaagctgctcgccaaggaggctgcgcagcggatgacctaaattgtctactgctgtgtctgccctgtagtttaacggggaagaactgatgaactcgtattgtggttttccgaatctagtttcataggttttctgcccccccccccctgtttaaaacctttgcaagacagggtttccagtgtttttgtgatgccccagacccatgcagctttgcttttaaaaaaaaaaaaaaaaaaaaaaaaaaaaaaaaaaaaaaaaaaaaaaaaaaaaaaaaaaaaaaaaaaacaaaaaaaaaacagggcggc

SEQ ID NO: 111804 - DNA, 1109 bp, Zea mays
  Clone ID: MRT4577_33451C.1
cattgggtacctcgaggccggccgggcactcgccgcctcctccccactgcctcgtgtggccgtcgtctcccgttcggaacgccaagccccccctccggcgaaatggcccccaagcgaggtggcagggcgccggtgccggccaagaagaagacggataaagtgacgaaccctctattcgagaagaggccgaagcagttcggcatcggcggcgcgttgccgcccaagaaggacctgcaccggttcgtcaagtggcccaaggtcgtgcgtatccagcgacagcgccgcatcctcaagcagcgcctcaaggtaccaccggcgctcaaccagttcacccgcaccctcgacaagaacctcgctacgaacctgtttaagatgcttctcaagtaccggcctgaagacaaggctgccaagaaggagaggcttctgaagagggcccaagctgagaatgaaggaaaaactgttgagtcgaagaaaccaattgttgtgaagtatggccttaaccatgtgacttacctcatcgagcagaacaaggctcagcttgttgtcatcgctcacgacgtggatccgattgaactggttgtgtggcttccagccctgtgcaggaagatggaggtcccttactgcattgttaaaggaaaggctcgccttggatcgattgttcacaagaagaatgcatcagtcttgtgtcttaccactgtcaagaacgaggataagcttgagttcagcaagattttggaggctattaaggcaaacttcaacgacaagttcgatgaggtcaggaagaagtggggaggtggcatcatgggatccaagtcgcaggccaagaccaaggcccgggaaaagctgctcgccaaggaggctgcgcagcggatgacctagattgtctattgtctactgctgtgtctgccctgtagtttaacggggaagaactgatgaactcgtattgtggttttccgaatctagtttcatatgtttctgtccaccagaccatgtttagaagctttgcaagacagagtttacagtgtttatgtgatgcctcagatccatgcagctttgcttctaaaaaaaaaaaaaaaaaaactcaagactatctctctttctcctcgtgc

SEQ ID NO: 111805 - DNA, 619 bp, Zea mays
  Clone ID: MRT4577_33452C.1
gggtaccggcgcccccccctcggttttttttttttttttttttttttttttttttttttttttttttttttttttttttttttttttttttttttttaaaaaaaaacttttccccccggggtttataaaaaaccggggcccaaaatttttttaaaaaaaactttcaggggccctaacaaaacccaaaaaacttaaaatttcaaacccaaaaaaaccccccaaagaacaggtccccaagtttaaaaaacccaaccccccgggccccttatttgaccccaaagtttgcaaaaagggaaaatttaaccacgggggaaatcccttgggaaaaaaaaacgggggttttaaaccccttggtttacccaaaaaatcctccccccaaaaagtttctttgtcttttggggaaacatgggggggaaaaattgggcgccctttttggggaccccctggaccttccccttaaggaccttatttcccaactggcccccccggggggaaggaacatttcccccccggggccaaattccgggggccggggggacccactttttttaaaggggccccccccgggggggacccccacttttggtccccttaagggggggtaaatggccccctgggg

SEQ ID NO: 111806 - DNA, 815 bp, Zea mays
  unsure (1)..(815): unsure at all n locations
  Clone ID: MRT4577_33453C.1
gactgctccacgcagctgttgccctccggaaatccaaagctcccggcctcctgcactgcgtccctgtcaggcctgctaagctccagccaaaaaatcgttggcctcggtctggtgcctgctcctcctgccgtcctcgctcctccccacctcccgcggcctcccacgcgacatgattgcattgcgggctgccgcggagctcagctctcctgtcctgccaccaccacgccgctgacgatgccttcctctcgcctgcctctgcctgcgcacaaccgaaacgtcctcctctccaggtgccgagccagggtgactgttccgaggagcgtggcgtggacccatggggaagaagggcaagtggttcggcgccgtcaagaaggtcttcagccccgaatccaaggagaagaaagaggagaggctaaggaggaaatcagcagctagcaacccagcaccggtagatctgaccccatctacctccctggaagtcaatgtttcggtgccaccccctccggctcctcctccagttcctcgccagaccgacgaggtcagggtccccgaagccgagcaggagcagagcaagcatggtcaccctggaggaggcccctgctgctgctgctgccccagcacaggcgtcggtgctgccacctggtgcgccaaccgaagagctcgccgcaatcaagatccagaccgccttccgaggttacctggcaaggagggcactaagagcactacgaggccttgtacgattgaagtcattggntgaagggtatttcagttaagcgtcaatctgcaagcactctgcgctgtatgcaaactctatc

SEQ ID NO: 111807 - DNA, 906 bp, Zea mays
  Clone ID: MRT4577_33454C.1
aagctgtccaagtcgtcagtttccctccccctacaggctacaaactcctcaccgcaccaccgcgactgcgagagaaaagggggagggggaggagcgaggaggagtaggactgtaggaggagcgacgcatcgcaacgccaacactcacagttgactatcccaccaaggttcaggcaggggagagtgcctgtttcgagggggcgtggagcggagccggagccatggggaagaagggcaagtggttcggcgccgtcaagaaggtcttcagccctgaatccaaggagaagaaagaggagaggctaaggaggaagtcagcaggtagcaacccgacgccggtagatctgaccccgtctacctccttggaagtcaatctttcggtgccaccgcctccagctcctcccccagttcttcaccaggccgaggaggttggggtccctgaagccgagcaggagcagagcaagcatgtcgccgtggaggaggcccctgctgccgccccagcgcaggcgtcggtgctgccacctgctgtgccaacccaagagctcgccgcagtcaagatccagaccgccttccgaggttacctggcaaggagggcactacgagcactgcgaggccttgttcgattgaagtcattggttgagggtaattcagtaaagcgtcaatctgcaagcactctgcgctgcatgcaaactctatcacgggtgcagtcacagatatcttccaggagagcaaagatgtccgaggagaaccaggctctccaacgccagctcctacttaaacaggaactggagaatttcagaatgggtgagaactgggatgacagcacccaatccaaggagcaaatcgaggcaagcctgataagcaggcaagaggcggcgataagaagagaaagagcgcttgcatatgcatt

SEQ ID NO: 111808 - DNA, 1093 bp, Zea mays
  Clone ID: MRT4577_33455C.1
cctgccgggactcgccgcctcctccccactgcctcgtgtggccgtcgtctcccgttcggaacgccaagcccccctccggcgaaatggcccccaagcgaggtggcagggcgccggtgccggccaagaagaagacggataaagtgacgaaccctctattcgagaagaggccgaagcagttcggcatcggcggggcgttgccgcccaagaaggacctgcaccggttcgtcaagtggcccaaggtcgtgcgtatccagcgacagcgccgcatcctcaagcagcgcctcaaggtaccaccggcgctcaaccagttcacccgcaccctcgacaagaacctcgctacgaacctgtttaagatgcttctcaagtaccggcctgaagacaaggctgccaagaaggagaggcttctgaagagggcccaagctgagaatgaaggaaaaactgttgagtcgaagaaaccaattgttgtgaagtatggccttaaccatgtgacttacctcatcgagcagaacaaggctcagcttgttgtcatcgctcacgacgtggatccgattgaactggttgtgtggcttccagccctgtgcaggaagatggaggtcccttactgcattgttaaaggaaaggctcgccttggatcgattgttcacaagaagaatgcatcagtcttgtgtctgaccactgtcaagaacgaggataagcttgagttcagcaagatcctggaggctattaaggcaaacttcaacgacaagttcgatgaggtcaggaagaagtggggaggtggcatcatgggatccaagtcgcaggccaagaccaaggcccgggagaagctgctcgccaaggaggctgcgcagcggatgacctagattgtctactgctgtgtctgccctgtagtttgacggggacgaactgatgaacgcgtattgtggttttccgaatctagtttcatatgttgctgtccaccagaccatgtttagaagctttgcaagacagagtttacagtgtttatgtgatgcctcagatccatgcagctttgcttctatttgcctaagagcaacctcaaaagtatttcatgaaaaaatgtccttctacagttttt

SEQ ID NO: 111809 - DNA, 2022 bp, Zea mays
  Clone ID: MRT4577_33456C.1
ttctatctccctcccagtcccagacccagtcccagctgttgcagcctccgaacatccaaagctcctgcactgcacccctgtcagtcaggcctctagctgcagccaaaaaccgctggccttgaacatctccccatccgcctcccgcggcctgccacgcgacatgattgcgtcgcgggctgctgcggagctcagctgcccccgcacgccgctggcgacgccttctgcttgcccgcctctgcccgcccgtcttccctgatccctcctcccctttgcttccgcacgaagatctgggcgtgtcttcttccgacaaagctgttcaggcaggggagagtgcctgtttcgatggggaagaagggcaagtggttcggcgccgtcaagaaggtcttcagccctgaatccaaggagaagaaagaggagaggctaaggaggaagtcagcagctagcaacccgacgccggtagatctgaccccgtctacctccttggaagtcaatctttcggtgccaccgcctccagctcctcccccagttcttcaccaggccgaggaggttggggtccctgaagccgagcaggagcagagcaagcatgtcgccgtggaggaggcccctgctgccgccccagcgcaggcgtcggtgctgccacctgctgtgccaacccaggagctcgccgcagtcaagatccagaccgccttccgaggttacctggcaaggagggcactacgagcactgcgaggccttgttcgattgaagtcattggttgagggtaattcagtaaagcgtcaatctgcaagcactctgcgctgcatgcaaactctatcacgggtgcagtcacagatatcttccaggagagcaaagatgtccgaggagaaccaggctctccaacgccagctcctacttaaacaggaactggagaatttcagaatgggtgagaactgggatgacagcacccaatccaaggagcaaatcgaggcaagcctgataagcaggcaagaggcggcgataagaagagaaagagcgcttgcatatgcattttcacaccagtggaagagtacatcgagatctgtcaacccaatgtttgtagacccaaacaacctgcagtggggctggagctggctggagcgctggatggcagcaaaaccatgggaaggccgcaatggggctgacaaggagagcaacattgaccggggatccgttaagagcatgagcttgaaccttggagagggtgagatcacaaaagctttcaaccgccgggactcaaagctagaaaagccatcgccgccaactccaagaccggcccgtccaacttccaggcattcccctttgacgccctctgctagagtggcaccgatacctgcgaggagaaaatttgtcacgcccaagaacgggctttcacaggtggacgatgacgcgaggagcgtgctcagtgtgcagtctgagcggccaagaaggcacagtatagccacctcgactgtgcgggacgacgagagcctcacgagctccccgtcgctcccaagctacatggttcccacagaatctgcaagggccaaatctcgcctccagggttcagcaacggccaatggcgcagagacacctgagaaaggaggctcgactggaccagccaagaagaggttatccttccagggtggaactgtgtctgcctcgccaatgcgacgacattctggtcctcccaaggtggagatcgcgccaccacaaccagaggccttggtagtcaatggtggaagcaagtgacacatatgtgatgagtaccaggatgagaaacggattatgaagatattagtttcattttcatccatgaatagaagttaaaagtggtatcatatctatgaatggtttcaattgtttttctgttacaaccacattatttgctatatacgattcacagtacctgccagttgattccattggttgtttctgtaaaacaaatatcaatttgtcactagaatctgtgatgtttgtatgtaaacaggtcctctatttatgtgagacatatatttcttttctttc

SEQ ID NO: 111810 - DNA, 1307 bp, Zea mays
  Clone ID: MRT4577_33457C.1
ccggccgggagaccggcccgcttgcttctttacctcgcatccgacggccgagaccggcccgcttgcttctctacctcacatctgacggccagagtgcgtccaactcggcgcgagtcatccttatagaatcacctctccgcctccaagcgccagtcgccgcctctccccactccctctcgtcgccgtcctctcccgttcgcaacgccacgctccccaccgccgaaatggccccgaagcgaggtggcagggcaccggtgccggccaagaagaagacggataaagtgacgaaccctctgttcgagaaaaggccgaagcagttcggcatcggcggcgcgttgcctcccaagaaggacctgcaccgattcgtcaagtggcccaaggtcgtgcgcatccagcgccagcgtcgcatcctcaagcagcgcctcaaggtgcctccggcgctcaaccagttcacccgcaccctcgacaagaacctcgctaccaacctgttcaagatgcttcttaagtaccggcccgaagacaaggctgccaagaaggagaggcttctgaagagggcccaggctgagaatgaaggaaaaactgttgaatccaagaaaccaattgttgtgaagtatggccttaaccatgtgacttacctcattgagcagaacaaggctcagctcgttgtcatcgctcatgatgtggatccgattgaactggttgtttggcttccagccctgtgcaggaagatggaggtcccatactgcattgttaaaggaaaggctcgccttggatcgatcgttcacaagaagactgcatcagtcttgtgtctgaccactgtcaagaacgaggacaagcttgagttcagcaagatcttggaggctattaaggcgaacttcaatgacaagtttgatgaagtcaggaagaagtggggaggtggcatcatgggctccaagtcgcaggccaagaccaaggccagggaaaagttgctggccaaggaggccgcccagcggatgacgtagattatccactgttgagcttgcccctgtagtttgacgtggaagaaccgatgagcattgtgcactcgtattgtgtttttttgaatctactttcatatgtttctgtccatcagaccgtgtttagaaactttggaagacagttctacagtgtttatgcaatgtcttatatcgaagtatatcatttgcgcctcaggcagttttgcttttaaaaaaaaaaaaaacataaacaaaaagaaaaaataaagataagtacaaaaaaagaaaaccaggccacgaataccggccggaggaagaaaacggcgacggcta

SEQ ID NO: 111811 - DNA, 3036 bp, Zea mays
  Clone ID: MRT4577_33458C.1
gagagcagtttggagattttggcggattctgggaattatcagtcagatggactgcttgatgatattattgagaatcctttttacacagaggactgcatggacaaccatttttgggagagaaattgccttcacctatttaataagagtgaattgaagaatgaattggacctgatcaaagcaactcttcaccaggaattctttaatttttttccgaaagctaaagtaattacctaatactgggaagggaaggcccttcctgattaaattgccactttttgatgcccgaatttcaagcatctttagaaaactatagggattaaattgagaaattgtccctttggttacatttttattaaaaccctggaaagtgactaatatgtttgttaaaaaatggttcctttaacaatggttgagattcatgttttgaaaaagaaaaacaagcaagtacttcaatacgaagtggcttctgtttgcagtttgcatcctgatgaatatagtaatctgaaaggaaagattcatattcatgatatagatgtaaagtggcggatgtatgctggagatgagtggttattacctcagaaagattctactagcttaacattcatagatggaaaagataggagctcttcactggaatttaccttgagagggctcagtatacaagttgacatgtatccagatggggatggttctatatccaagctattcatcgctgttgaggacttaactctgggtgatcaaagaatccatgctccaaggaaactggttcttggatgttacaactcaaaggattatcaaagagagtcggggtccagggctttcaggttagaactggagtctttgaggcctgagccacaggctcctttggaagactacaggctcacacagaaaacttctgcctctggaggtctctgttggacatgtcaaaaccatctcaactggtgttggacaaacttctattcaattggtgctaccccaatcctatgatatattattatcgttttggacccaagtacatcataagtggcaacaaatccgacacagcatagacattattgcaaaaactttactaatgtacagagcacttgatagcaacattatgaaataatatttcttgctattgtgctctatttatattgcgattggaatttattgtattatttctcactattttaatttgtgcaggatccatttcgaaattttgcctctacagttgcatcttgagcaagagcaacttaacttcctaatcaatttcttcaagaatgattcatgtaacaatgatcctcatttgcattgcgaaaatgagactgtcgacgtgaagaacacaagcaatggaagcaatatggttgtggatgaggcattacttcctttctttcagaaatttgaggtaaagccacttgttctgcacattaattatataccccgtcagtttgacccaattgctctaggcaagggaaattatgcagaacttctcaacattcttccatggaagggaattgatttgaagcttaagcatgtttctgcaatgggcgtttacggatggagcagcataggtgatacagtagctgcggaatggttggaagacatttctaaaaatcaggtgcacaaattgctaaaagggcttgctccaataagatcactagctgctgttggttcaggcaccagaaagttggtctctttgcccatcaaaagctacaagaaaggatcgggaaattgctcaagggagtgcaaagaggcacagttgcttttattagaagtgttagcattgaagcagtaggtcttggagtccatttggctgcaggagctcatgatatacttatgaagacagaacatgctcttacaactgttccaccacctttagcctcatgtgaagcgaaacgaacaaaacacaacattagagctaaccaacctgaaagtgcacaacaaggaatgaaacaggcatatgaaagtttgactgttggttttggaaggacagcctctgctctcattggcaaccctattaaagtttataaccgaggggcgggtgttggatcagttctagctactgcaatctgtggagcaccagctgctgcagtagctccagtctcggcatctgctcgcgctttacattatgcacttcttgggctaaggaacagccttgatcctgagcacaagaaagaatccatgtacaaataccagggaccctctcaagcatagacgtgattgagaagatgagttgggagttcagttcattcttttggcgcgccttacaccatctccttgaaacaactggtttaggaactcctttgccagtctcgtccaatggtgaggtgcaaacttgtacagtgtgtacagatcgtaggacagattatatgtggcaccaaagccttacactatgtaaattaacgcattagggtttaattaccactgatcttttccaccacgaaggcaagtggaagttttgtatcccctcttcgcttagtttagtaagatacctatggctcgcatgactgtcccaatgtacataatgtggttgcgagctgtgcggatgtaaatattctcgtttgctttggttgtgtgcgtgcacgcctcttggtccgctgacaacaggaatttgaagagtttccagtggagcatttggatacagcctaggggtatggtaggacgaagcggttccactctaaatttgttgtttgaattggttttatgtaggatagagtgactctgaaaaagaaaaattatgcttagatgctgaatcatttggcttcctaaaaaaaaaaaaaaaaaaaaaaaaaaaaaaaaaaaaaaaaaaaaaaaaaaaaaaaaaaaaaaaaaaaaaaaaaaaaaaaaaaaaaaaagggggcgggccgtttttaaagaatccaagtttacttccccgtgcttgcaacgtaatagtttttttttagggccccctaaattaaattaactggcgcggggtttaaaaacttctggactggaaaaaccttggggttccccaatttaattgctttgaaaaaaatccccttttccccagttggggtaaaaccaaaaaggccc

SEQ ID NO: 111812 - DNA, 2268 bp, Zea mays
  Clone ID: MRT4577_33459C.1
ggacaaactcctcaccgcaccaccgcgactgcgagagtaaagggggagggggaggatgtaggaggatggggactcgaagaggaggggccgggtggcaacgccaacactcacagttgactatcccaccaaggtaacggacacaagcttccctgcagctcgctctcgcattctatctccctcccagtcccagacccagtcccagctgttgcagcctccgaacatccaaagctcctgcactgcacccctgtcagtcaggcctctagctgcagccaaaaaccgctggccttgaacatctccccatccgcctcccgcggcctgccacgcgacatgattgagtcgcgggctgctgcggagctcagctgcccccgcacgccgctggcgacgccttctgcttgcccgcctctgcccgcccgccttccctgatccctcctcccctttgcttccgcacgaagatctgggcgtgtcttcttccgacaaagctgttcaggcaggggagagtgcctgtttcgagggggcgtggagcggagccggagccatggggaagaagggcaagtggttcggcgccgtcaagaaggtcttcagccctgaatccaaggagaagaaagaggagaggctaaggaggaagtcagcaggtagcaacccgacgccggtagatctgaccccgtctacctccttggaagtcaatctttcggtgccaccgcctccagctcctcccccagttcttcaccaggccgaggaggttggggtccccgaagccgagcaggagcagagcaagcatgtcaccctggaggaggcccctgctgctgccccagcacaggcgtcggtgctgccacctggtgcgccaaccgaagagctcgccgcaatcaagatccagaccgccttccgaggttacctggcaaggagggcactaagagcactacgaggccttgtacgattgaagtcattggttgagggtaattcagttaagcgtcaatctgcaagcactctgcgctgtatgcaaactctatcgcgggtgcagtcacaaatacgatctaggagagcaaagatgtccgaggagaaccaggccctccaacgccagctcctacttaaacaggaactggagaatttcagaatgggtgagaactgggacgacagcactcaatccaaggagcaaatcgaggcaagcctaataagcaggcaagaggcagcgataagaagagaaagagctcttgcatatgcattttcacatcagtggaagagcacatcaagatctgcgaacccaatgtttgtagacccaaataacttgcagtggggctggagctggttggagcgctggatggcagcaaaaccttgggagggacgcaatggggctgacaaggagagcaacattgatcgcggatccgtcaagaatatgagcttgaaccttggagttggagagggtgagatcacaaaagctttcaaccgccgggactcaaagccagaaaagccatcgccaccgactccaaaaccggcccgtccagcttccaggcattccccttcgacgccctctgctagagtggcaccaatacctgcgaggagaaaatccagcacgcccaagaacgggctttcacaggtggacgatgacgcgaggagcgtgctcagtgtgcagtctgagcggccaaggaggcacagtatagccaccacgtcgactgtgcgggacgacgagagcctcacgagctccccgtcgctcccaagctacatggttcccacagaatctgcaagggccaaatctcgcctccagggttcagcaacggccaatggcgcagagacacctgagaaaggaggctctactggaccagccaagaagaggttatccttccagggtggaactgcggctgcctcgccaatgcgacgacattctggtcctcccaaggtggagatcgcgccaccacaaccagaggccttggtagtcaatggtggaagcaagtgacacatatgtgatgagtaccaggatgagaaacggattatgaagatattagtttcattttcatccatgaatagaagttaaaagtggtatcatatctatgaatggtttcaattgtttttctgttacaaccacattatttgctatatacgattcacagtacctgccagttgattccattggttgtttctgtaaaacaaatatcaatttgtcactagaatctgtgatgtttgtatgtaaacaggtcctctatttatgtgagacatatatttcttttctttcagaaaaaaaaaaaaaaaaagaaaaaaaaaaaaaaaaaagcggcc

SEQ ID NO: 111813 - DNA, 776 bp, Zea mays
  Clone ID: MRT4577_3345C.1
ggccaaacaacccaaccatcaccgccgggagccgcaaaacacgtagcgcagcagatccaggcgggaactagaccacagagacgcgcaccggcggccggcaggtcgaaggcacgcatagaccgcgcaagagaaggaggcagcgagggagggagcagggccttactccgcgagatctccgagctggcgcaggatcccgacgaggcccgcgacggcgacgccctcgagcagcgcattgggctcctcctcctcccccgcggcagcggaagctccgccgccgtagaggccggggtcccccagccccacctcattccgcacctcgaacctgaccagcggcatcgccctccgcgctccttcgtcacagcctcggcctcggcagccgacgccccctcctcatgcacccgggccgttgcgcgctgcgctgtgctcgccgacgcgacgccggtattctggtgctggcgcggtgtgggagggagcaggtgtcgtgcgcctggttgccacccaccaaggaggcgacaccgttcttgctgccgccaatgtgagcttgtgtgcctcctcacagagccactcaccattgcatcgtagatctgggcgagcggcgacggcacgaggaagctgaaggcgttgaggacgagccagaggacgagcttggacgaccaccgcactgagtgccacgagttgcggaagtcgtgcacctctctggcgtccacgtcgggcggggttggatgcgccggcaggatttgcgtgtatcgcggcggcggcgggttacgatggatggg

SEQ ID NO: 111814 - DNA, 1065 bp, Zea mays
  Clone ID: MRT4577_33460C.1
aagtccgccgcctcccccctccacctcctccccttcgtcgcctcccgttcggaaccccaagctccccccgccgccggcgaaatggccccgaagcgaggcggcaaggccccggtgccggcgaagaagaaggcggcggacaaggtggtgaacccgctgttcgagaagaggccgaagcagttcggcatcggcggggcgctgccgcccaagaaggacctccaccggttcgtcaagtggcccaaggtcgtccgcattcagcgccagcgccgcatcctcaagcagcgcctcaaggtgcccccggcgctccaccagttcacccgcaccctcgacaagaacctcgccaccaacctgtttaagatgcttctcaagtaccgccctgaggacaaggtggctaagaaggagaggcttctgaagagggcccaggctgaggctgaggggaaaaccgttgaggccaagaagccaattgttgtgaagtatggtcttaaccatgtcacttacctcatcgagcagagcaaggctcagctggtcgtcatcgctcatgatgttgacccaattgagctggttgtgtggctcccagccctgtgcaggaagatggaggtcccatactgcattgttaaaggaaaggctcgccttggatcgatcgttcacaagaagactgcatcagtcttgtgtctgaccactgtcaagaacgaggacaagcttgagttcagcaagatcttggaggctattaaggcgaacttcaatgacaagtttgatgaagtcaggaagaagtggggaggtggcatcatgggctccaagtcgcaggccaagaccaaggccagggaaaagttgctggccaaggaggccgcccagcggatgacgtagattatccactgttgagtttgcccctgtagtttgacgtggaagaaccgatgagcattgtgcactcgtattgtgtttttttgaatctactttcatatgtttctgtccatcagaccgtgtttagaaactttggaagacagttctacagtgtttatgcaatgtcttatatcgaagtatatcatttgcgcctcaggcagttttgctttt

SEQ ID NO: 111815 - DNA, 871 bp, Zea mays
  unsure (1)..(871): unsure at all n locations
  Clone ID: MRT4577_33461C.1
ntttaacagctacgaactcttctccttctcagtcttcgctcttcctatcggcacgctcccaggccccagcactgctgacaacctcctcctccctctcagctccacgcccctagaggcctagacccagcaccaccggcgaccatcccctccacgcctctcacgccggcctctaagctctccactttgactcttcccagtccggcccaacccctcccgatgccgacggactccgcgccgccgaacgcagcgtcgctgtccgaagacgaccgactgctcgtcgcccactgcgccacgctctccttcccctccagctcccccacagccgccgccgccactaccccttccgcctcctccttccaggtacaccatgcgtcccacccctacccctgcgccgccttcgtcttcccgccctcctggtccgctgccgactggatgggaggcgatggcggccatccgccgttcggggacgccgaggtggacccggccctgttcccgtcactccgcgctgtcgggagcggcatccccgcgcgcaccaacgccgccttcctcgggaacttccgtcggctgctcgacggatcgacgctccagtccgaggtatcaagagctgttgcggaggagaaacgtgtagtattcacaggccattcatcaggaggttcaatagccacacttgctgctatatggtttcttgagaagtgcaccagacgaggaagtgttaatcaagcacatccattttgtgtgacctttggggctccccttattggagacaatatcttcaatcatgctgttaaaagagagggctggtcacagtgtatttttgcatttccttctttcactagacattgtcccacgcataccactgactccacttgca

SEQ ID NO: 111816 - DNA, 2242 bp, Zea mays
  Clone ID: MRT4577_33462C.1
cattgggtacctcgaggccggccgggctccgcgactgctcccacgcagctgttgccctccggaaatccaaagctcccggcctcctgcactgcgtccctgtcaggcctgctaagctccagccaaaaaatcgttggcctcggtctggtgcctgctcctcctgccgtcctcgctcctccccacctcccgcggcctcccacgcgacatgattgcattgcgggctgccgcggagctcagctctcctgtcctgccaccaccacgccgctgacgatgccttcctctcgcctgcctctgcctgcgcacaaccgaaacggctagcccgcccttcctcccctcccctttgcttccgcaccaagatttgggcgggcgttccttcttccgataaagttgacacccgtcgtctcgtcgtgggcctggcagatactgataggtggtctggttcgtgacttgttcagtcctcctctccaggtgccgagccagggtgactgttccgaggagcgtggcgtggacccatggggaagaagggcaagtggttcggcgccgtcaagaaggtcttcagccccgaatccaaggagaagaaagaggagaggctaaggaggaaatcagcagctagcaacccagcaccggtagatctgaccccatctacctccctggaagtcaatgtttcggtgccaccccctccggctcctcctccagttcctcgccagaccgacgaggtcagggtccccgaagccgagcaggagcagagcaagcatgtcaccctggaggaggcccctgctgctgctgctgccccagcacaggcgtcggtgctgccacctggtgcgccaaccgaagagctcgccgcaatcaagatccagaccgccttccgaggttacctggcaaggagggcactaagagcactacgaggccttgtacgattgaagtcattggttgagggtaattcagttaagcgtcaatctgcaagcactctgcgctgtatgcaaactctatcgcgggtgcagtcacaaatacgatctaggagagcaaagatgtccgaggagaaccaggccctccaacgccagctcctacttaaacaggaactggagaatttcagaatgggtgagaactgggacgacagcactcaatccaaggagcaaatcgaggcaagcctaataagcaggcaagaggcagcgataagaagagaaagagctcttgcatatgcattttcacatcagtggaagagcacatcaagatctgcgaacccaatgtttgtagacccaaataacttgcagtggggctggagctggttggagcgctggatggcagcaaaaccttgggagggacgcaatgggaccgacaaggagagcaacattgatcgcggctccgtcaagaatatgagcttgaaccttggagttggagagggtgagatcacaaaagctttcaaccgccgggactcaaagccagagaagccatcaccaccgactccaaaaccggcccgtccagcttccaggcaatccccttcgacgccctctgctagagtggccccaatacctgcgaggaggaaatccagcacgccaaagaatgggctttcacaggtggacgatgacgtgaggagcgtgctcagtgtgcagtctgagcgaccaaggaggcacagcatagccacgacgtcgaccatgcgggacgatgagagcctcgcgagctccccgtcgctcccgagctacatggttcccacagaatctgcgagggccaaatctcgcacagcaacggccaatggcgcagagacgcctgagaaaggaggctctgctggaccagtcaagaagaggttgtctttccaaggtggagctgcggctgcctcaccgatgcgacggcattctggccctcccaaggtggagagcgctgtgaaggacattgctgcgccaccacagcctgaggccttggtagccaatggtggtggaagcaagtgacttgtattgacaagttccaggatgggggagcgggttatggtcttatggagggacatgtttcatccgtgaacagaagttaagagtggtgccggatctacgaatggtttgaattgttttcccgttacaaccacattgtttgctgtataagattcactgtacctgccagttggttccatttgttgttttctgtaaaacaaacatcaatttgtcactagaatctgtgatgcttgtatgtaaacaggtcctctatttatgtgagccatatatttcattttcagaaaaaaaaaaaagcaaaagcggcc

SEQ ID NO: 111817 - DNA, 1243 bp, Zea mays
  Clone ID: MRT4577_33463C.1
gggaccctcgaggccggccgggtcgccgcctcctccccactgcctcgtgtggccgtcgtctcccgttcggaacgccaagccccccctccggcgaaatggcccccaagcgaggtggcagggcgccggtgccggccaagaagaagacggataaagtgacgaaccctctgtttgagaagaggccgaagcagttcggcatcggcggcgcgttgccgcccaagaaggacctgcaccggttcgtcaagtggcccaaggtcgtgcgtatccagcgccagcgccgcatcctcaagcagcgcctcaaggtaccaccggcgctcaaccagttcacccgcaccctcgacaagaacctcgctacgaacctgtttaagatgcttctcaagtaccggcctgaagacaaggctgccaagaaggagaggcttctgaagagggcccaagctgagaatgaaggaaaaactgttgagtcgaagaaaccaattgttgtgaagtatggccttaaccatgtgacttacctcattgagcagaacaaggctcagcttgttgtcatcgctcatgacgtggatccgattgaactggttgtgtggcttccagccctgtgcaggaagatggaggtcccttactgcattgttaaaggaaaggctcgccttggatcgattgttcacaagaagaatgcatcagtcttgtgtctcaccactgtcaagaacgaggataagcttgagttcagcaagatcttggaggctattaaggcaaacttcaacgacaagttcgatgaggtcaggaagaagtggggaggtggcatcatgggatccaagtcgcaggccaagaccaaggcccgggaaaagctgctcgccaaggaggctgcgcagcggatgacctagattgtctactgctgtgtctgccctgtagtttgacggggaagaactgatgaactcgtattgtggttttccgaatctagtttcatatgtttctgtccaccagaccatgtttagaagctttgcaagacagagtttacagtgtttatgtgatgcctcagatccatgcagctttgcttctaattgcctaagagcaacctcaaaagtatttcatgaaaaaatgcccttctacagctttttaaatttagaattttaaatgttgccatcttttgtgactgtttgcgagcgaatggtttttaaatgaggatttagaaagtgggtttatgctctaagcagtggttggatgtttttccttttctgaagatgtggcatcccgc

SEQ ID NO: 111818 - DNA, 458 bp, Zea mays
  unsure (1)..(458): unsure at all n locations
  Clone ID: MRT4577_33464C.1
aacggttatagccccgctcggtngatggcggttccgtacacctccggagtagcttaccccaaccaaatccatccaaattcaatcggaattcgcgtgcgcaagctcaaatcggaccacggtaatccaaaggccgcggcgtagcggacgcgcgggcgctggtgataaagcgggggctgggcctcgtcgcctctgctctgctctcctcgcatatagggtttatcttctcccctcctctgcccccatctcgcttctcgcacacggcagccggattccgaagcgcgccccctcggccccagccaaaaggtagcacccgctgcggttcccgcttattggctgttggatctggcgtgtctaggagtgggattggggagtctttntggtgtgctccgatccgtttgggttcccatcgtttctcgttctgtggatgggcgtgtagattcagttaggcgtttggtact

SEQ ID NO: 111819 - DNA, 390 bp, Zea mays
  Clone ID: MRT4577_33465C.1
ggctgatgaacgcaatggcgggttctgagactgttgcaaactgtgcacccaccgtggtgaggtatacttgtttggcgaagtgcctctgcaggacggggacgacagtccaggctctcactgtgctggataggacgacagacagacggctgatgccaaaccgtgcttttatgcgcacgctgcttgaagggatctaccctgagcatacggatatcaactcgtatgatgtggcgaagctttgtattgctgatcggagtgtttcgagtacacagtgctacacatgttctactcgtttacttgtggaaggtcgccatgacgagaacaagctgcatgactggcacggatgatgatgacgaacggtgtgcaactgaccccactcgattgcagttgtat

SEQ ID NO: 111820 - DNA, 375 bp, Zea mays
  unsure (1)..(375): unsure at all n locations
  Clone ID: MRT4577_33466C.1
gggagacccaggcggacgcagcattcatgatcagcatagcggcacttcttcaaaggatcgtcatcaattacataacgacgaaagtcatcgttctcgtgctgggcctggctttgtcagttgccagcgcctctgcaatgcagatgcnctgcccctgcgcggggctgcagggcttgtacagggctggacccggctgacacgatgatgggcgccggcggctgtaccctacgcgagtacctgaggcagcgagtgcacccgtgcggcgggccctatacccggtgtggcagagagcccatgtacaccgttcggacaggctgcagcacaataggatgatgacgtcagtcgtccgcacagctgagatatgatgcactgagcgtg

SEQ ID NO: 111821 - DNA, 647 bp, Zea mays
  Clone ID: MRT4577_33467C.1
gcccatgccgcccgcgttggtgagcagcatgggccggcggccgaggctgtcggcgaggaacagagggacgacgatcgccaccgtcttggcggcaccgaggaggacggtggcgccgagcacgtcgcgctcggaggtgatcccgacgtggctgaacacgcgcggggcgtacagcaccatggccgccacgccgcacgcctgctggaacacctgcagccccaggatggccagcatcacgcggcggacggcgggcgtcggccggagcaggatctcgcgccgcacgctcgccgacgacggcgcgtcgccgccgccggagcccgcctgcttcgtggcctcctgcacggacgtcaagatctcctggagccggcggtccgcgtcccccaccgtgcgcgccagcacgcggcgcgcctcgtcgcggtggccgtggaggacgagccagcgcggggtctccggcatggcaagcgcggccgcggccgctaggaatagaggagggacggcgcctatgccgatcatcaggcgccagttgagtggcgtcgggaggccggcgagcgcgaagtcggcgatgtagctcagcaggatgcccgagttgccggcgatctgacgtcacaaagcatgattataggtcacaagaaataataataactgtcaat

SEQ ID NO: 111822 - DNA, 313 bp, Zea mays
  unsure (1)..(313): unsure at all n locations
  Clone ID: MRT4577_33468C.1
ggccggagtaggatttgtctactggacaaaggacatgtatagcagctcgtttaccccttttttttctacaagctggttgggggcttaaaacgggtctggggccagaggacactagctcccaagaaagccgggcgaaaagcctacctggcaaaactctctagagctcaactctggcctcggaacaggacaaaccggcctnctttttggtttttacgcgccatacaaaagggaagcaaaccattggcgtcaaaaccggagcagattatttctggcgaaaacaagggcgcattttgcattggggcccctttagggc

SEQ ID NO: 111823 - DNA, 768 bp, Zea mays
  Clone ID: MRT4577_33469C.1
cattgggaccctcgaacccgggaagccgtccgggatccactcgacaggctttacttgcttcctggcttgacgaacttagcaagctaccagctgtcggtgaggtcgagcgcaggggcatcgccatggccgaggacggcaagtccaatgatcaaatcctcagtgagctcgacgcactcagccacacgctctaccaggcgcacaccaagcgccgcaccacctcgctcgcgctccgtcgctctgccgtcgacgaaaatgcaggcggcgctgacgctgtcgctgtccgcaccgcggcgcgcccgctctcccgccgcatgtccatgtcgccgttccggtcgaggcctaagctggacaataacttgaacgacgacgacgacgaagacgacgacgcgggcgtggcgctgccgtccaagagccagagcttcgctgcggtgacaacgtcgccgaccgtggtcggggagaaaaagggcattcggggatggaagccgatgcgcgcgttgtcgcgcatcggcatgcatcggatgggctgcctcttctccgtggaggtggtggccgcgcagggccttcccacgtccatgaatgggctgcgcctcgcggtggccgttcgcaagaaggagacgcgcgacggcggcgtgcagaccatgccgtcgcgcgtgcagcagggtgcggccgacttcgaggagacgctcttcgtccggtgcaacctctactgcagcgggggcggcgccacgggtaaaccactcaagttcgagccccggccgttcctcgtgt

SEQ ID NO: 111824 - DNA, 337 bp, Zea mays
  Clone ID: MRT4577_3346C.1
tttatcaccactacctatatctactacagagggcgtcataacccgctctgagacacgacgctgtcgctcagtaccaaagcctctaccgactctcattgcgagcgccacctgcacacatacatacggagttttgcgcttcgatccacccacgtctgcccattttccaccatcgtggcatcggccatctactgatcacctgacacgttattggcatgtcccaccgacagaactccttacctcggcatatcacctggcaaaccacgaccatgtgcccacaatctgtttcatccaaaaaacgccaccattacgcttccgatagacacccatgaacattctc

SEQ ID NO: 111825 - DNA, 417 bp, Zea mays
  Clone ID: MRT4577_33470C.1
gggcaacccaattaattggacattggtaggtgctttacaggtccagatttaacatgggcccccccataacttgggaaggtgggaagctaaacatagcacttcctcattttggattggggcatctgagctgggatgctctgaaaggtcatttttttgggcccaccgaaagtctcgggttcttttggttgggatgcccattggttggtccatcaaagggggaagtatcacatggatccccggcgggcgaggggtttgaacttccatccatgggaggtggggatatgccctcatgggtgaccttgggatgggggggaacgtttcccctgcccccatgctcaaccttttggagctcaaaaaagtccactagcacattggttttaagaagaacctttttaaccaccttttttttgagcccca

SEQ ID NO: 111826 - DNA, 474 bp, Zea mays
  unsure (1)..(474): unsure at all n locations
  Clone ID: MRT4577_33471C.1
atgccgaacgagcacagagcgccgatcccgttaccttagcttggcacgctgaaaccacgcactgcggtgcacgcgccgacttgtcgtgcttctccttcatgacatcttacacctcgtgctcctgctccacctgagcagtaaacttgccgccgtcgtctgcggtggccttgacatcagcagggctctggaacggctccttcgcttcctcggcgccctcagatgaggctatcgtcggatcgccgccggcagcgctaggcgcgacagaggaggacttcttggtctcgatcggcggcacgacgccgatgttcttgcactcgaagaagtgcgcgtaacaacctcggcccctcctggcggaggcagcagcgtcagctcctctgcttcttatggatcgggaagggtattcttgctgccgcggtggctcacggaggaagagcttatgtggtctggcaactngagtaacacacctcctgctac

SEQ ID NO: 111827 - DNA, 161 bp, Zea mays
  Clone ID: MRT4577_33472C.1
ccgacgcgtgcgttgacccaaggactgaccatcagctaatcaatgaggctgctgtccagagcatggggaccattagcctatgtgacactgactatctaatgcagtacgtccatatcggcctacaaatgaacaacaagggcatgaacaccattagatgtctg

SEQ ID NO: 111828 - DNA, 1918 bp, Zea mays
  Clone ID: MRT4577_33473C.1
cattgggtacctcgaggccgccggccgggacgtaacttattgggaggttgcgcgtacggcaactcccgtcgcctccgcgctcccctaaccgcctcccccttgtctcatggtggaagtggaacaaccctccgcccgcgccgctgcgaagtgagaagggaaaacaagaaacgatcgagggaggggacgacggagcgagctagctagcggcgcggcgggcgtcgctcggcatggacgcggaggcggcggcggcggcggcggcgacggcggtggaggagagggagcggctgcggaggagcttcgcgtcggggaggacgcggccggcggcgtggcgggaggcgcagctgcgcggccttctgcgcatggccaccgagagggaggacgacatctgcgccgccctgcacgcggacctcgcgaaaccccttaccgagtgctacgtacacgagatatcgttggtcatttcttcgtgcaaatttgctctcaagaatctcaagaaatggatgaagccccgaaaggtccccggcgggctgctgaccttcccgtcggcggccagcgtcgcggcggagcccctcggcgtcgtgctcgtcatctccgcctggaactaccccttcttgctggccatcgacccggtcgtgggggcattcgcggcgggcaacgccgtggcgctgaagccgtcggaggtggcgccggccacgtcgttgctgctggccgacctgctgccgcgctacgtggacccctcgtgcgtcagggtcgtgcagggcggcatcccggagaccaccgcgctgctggagctccagtgggacaagatcttctacacaggtaacagcagagtaggacgcatcgtcatgtcctacgctgccaagcacctgacgcccgtggtcttggagctcggtggcaaatgccctgtcgtcgtcgactccgacgtcaacctccacgtcgctgccaagaggatcgccgccggcaagtggggctgcaacagcggccaagcctgcgtctcgccggactacgtcgtcaccaccaaatcgttcgcgccaaagctgctggagtccctgaagcgagtgctgttcgagttctacggggaggagccgctgcggtcgccggacctgtcgcgcgtcgtcaactccaaccacttcaacaggctcatggcgctcatggacgactactcggtctccggcaatgtcgcgttcggcggccagatcgacgagcggcggctaaggatcgccccgacgctgctgctggacgtcccgctcgactccgcgatgatgaaggaggagatcttcgggccgctgcttcccataatcacggtggacaagatcggcgagagcttcgctgtgatcaactccatgcccaagccgctggcagcttacctcttcagcaacgacgggcagctcaagcagcagttcgagaggaccgtctcggcgggagggatcatgttcaacgacaccggcatccacctgacaaacccgaacctgccgttcggaggagtcggggagagcggcatgggcgcctaccacggcgccttcagcttcgacgccttctcccacaggaaggccgtcctggaccgcagcttcctcggcgaggccagggccaggtacccgccgtacacgccggcgaagctcgccatcctcaggggcgtgctcaatggcagcccgcttgccacggttcaggcggctgcggggtgtacaggaggggcatcagctgactgactgactgaccccccttcatgcttattattaataataagcataaatattcaccgcatacacattgctgtgcttttattaaggttgttgtgagggcgaaaaatgtattgaccctttgcgtgtgcgcgtgcgtgtatagcaactattaataaaagaaaaaagtgatgttcatttcgtacagagtatactaaattaagatcacatcacgagttttaagc

SEQ ID NO: 111829 - DNA, 303 bp, Zea mays
  Clone ID: MRT4577_33474C.1
cacaccgttgtcacacaagtgactgtacctttgcacacattcggctcaccgtttgcacactgttggtgcaccggactgtccggtgtgttaaaactagccgttggctgcacagcattgtcacactgatgactcaccgtttgctcactgttggctcactgtttgcacacaatttgctcaccgtttgctgacaagactttcctgtgtgtcagaactagccattgtcttcacatcgttggctcacttttttttcaccattttcgcaccgttatctcacatttttctcacctttgtttgacattactt

SEQ ID NO: 111830 - DNA, 170 bp, Zea mays
  Clone ID: MRT4577_33475C.1
agcatatcatcggcatcgcctgctctgctggtgaagatcgaaggccgaagtggccaagaccacacgccttccaaggtccacacctaccccaagatcctcacgctccatcagccgccacgatgtgcaccctttagcatcgcgaccgcgtcttcgtcctcatccttaccggc

SEQ ID NO: 111831 - DNA, 627 bp, Zea mays
  Clone ID: MRT4577_33476C.1
ggccgcttttttttttttttttttcttttttttttttttttttttttttttttttttttttttttttttttttttttttttgttttaaccaccgttgaaaaaaaaagaacggaaaaaaaaaacaaggggggaacacaagagaaaaccggaaacaccacgggggcagcacccgggggagcagaaaaggaacgggcggcggcccccacgagagggccaaaacaaggaaccccaccctaaggggcccccccaccatcggggctaggaggaaggggaccccacgagggcgggcgggcccccgggcctggggggggggggggggttctgcggggacaggaccggctttggggcggggaggggggagagaccagcggaaggggcccaccttggagggggggcccttgccccctggcccgaggcggggggggcccttgggggcggggggggggcggccttggaagggggggccggggacggcagacacacggcgggggggggggagggacaagggggggaccttgagcgggaaaccagggatcgggagcaagcccatggccccggggccgaacaccctgccggggagggaccaccccagggtgggggccggggcgggggaacaccgcggggggg

SEQ ID NO: 111832 - DNA, 355 bp, Zea mays
  Clone ID: MRT4577_33477C.1
gtgacgtacacgttcgtatgtggcgtaggacacaacgtttgaagcttgtacattataagggtagagatagagatagttaaacagggtgacggcgtgacaacaattatctcaattctcaaaattgggtgctgacattggagtttgtgaagctgttatttttgctgtgagaattgaattgacaattgagatagcctagtgctgctagccgaacgttgctgcgaggaacatgtcctcctcgctcccaacccagccgcactggccacattgctcgccagcacggcagcactcggccatggcgccgccggcgccggccgccctcttcgccacttgatgatctgcggcaacggcgtggaca

SEQ ID NO: 111833 - DNA, 763 bp, Zea mays
  Clone ID: MRT4577_33478C.1
agccacaccatagttgttgcagatagcgaatacaatcacgaacagcggcagagatagagatggtcaagctcgccgccctcgccttgctcgcgctgctggggtccgtggcgtgccaaggtgacaatggttcacccgcggactcaccggcggcgtacccgcctagccgaagcgtgcctccaagctcggctccggcgagcccgagcactccagctgcgagccccagccagcccatgccgagcccgattgtgttgagcccgagcccgaccccgctcgctcagcctcctagccgcggcctaggcgcaccgagccaaagcccgccggtatatccaccaagcgtgagccaacccgcctttcctccgtctggttcttccagtgccccgagcgcaagctcaccggagtaccttcctagccctagtccaagcgtgtctagtcaaactccacccacatattcacctgacccaagtccacctacttctcctagtccaagcccgttgagcccgagcaaaattgcctatccaccaagcccaagccctagccaacccacatatcctcctagcccaagcccaatcaatccaagacaacctcccagcccaggtccagcatcttatatcccaagccctagcccaagcccggatagccctgctccagccccttttcctcctatctccaactcacccagccctggggctcagtgtcggtcactacagctactcatgcccaaatgcagaagctatcgtcagggaaggccgtgaagaacgcccac

SEQ ID NO: 111834 - DNA, 516 bp, Zea mays
  Clone ID: MRT4577_33479C.1
atatataaacaaggttttttttggccatgaaaacaaccagaaagaggagacgcgaataatcagggacagttaaaaaaaaaagagaagctgcctgaattatgaaaaaacaaaggcgccgtgaaacaagggggtcaaccagggttcaaatttacaaaaaaagacttgaacgcgggggcgcaccgcgggggcaacccggaaatacgaggcggggccgagagggcgaaaaaagtttccaaaaagggggctgaataaaagcggggcgaaaaaagggaaaacactgtttccgggggaaaagggtaaaccgtaaaaaatgccaaaaaaaaaagagggcgggaagaaaaaagggaaaagccgggggggccaaaggggggaccaaaccaaaaaaaaggggggggagctaaatgcccgaattaaacaagaaaaaccgggaggcccattgcaaaaaaaaaaccgccaaacccccggggggagggggttggtgtattgggccccaggggggttttttttttaaccagg

SEQ ID NO: 111835 - DNA, 701 bp, Zea mays
  Clone ID: MRT4577_3347C.1
ccggccggggtctggtgctacactgctactctttccacgaccccatggcaaaatagcaaatttctctcgattgtgatatcagcccacatagatataaccgtttggggaaaagaatcgtgggctgtgacctgtcgtcttcgtctccggcagagcaaagcggcggcgaggcgggagatatagaggagagacgagagcgggatggggtacctgtggagggtgcggctgtcttcatttgctgccggcgcggcgacggcttcggcggcggggttcttcctcctctacaaggaccacctgctcgcccgcgctgccatcatcagccaggtggaggacatcaaggaaacttctgaaaagcattatgcagccctaaataagaggatatcagcactggaaagcagaagagaaccaggaactatcaaagaggcatcagattaattctgagttgggcttatgtcatggttacatctgcccatgtgtttttgattgctgcaggcggtataaactgcagcattttaagctgtactattgtgttgttgaaattctatgaactctgaatttgaattgtgttacacttcttgtctatgtcgtctttatgagatggacaagatcaaataaaatacattttttcttgatagaataagttaaaaagcggccgcaatatgggtcgttggcgcagtatggggtgccaccactgagggtccttc

SEQ ID NO: 111836 - DNA, 182 bp, Zea mays
  Clone ID: MRT4577_33480C.1
ccccctacacgacgcgggggagagacaaacgctatttttttttttttttttttgtttttttcaagcagaactcctcatctcattaacccaagcattggaaccaccataaacaaaaaaagccggcccgtgaaagggccaaccccttacaattgcgcccaacatactatccccggggggggggg

SEQ ID NO: 111837 - DNA, 321 bp, Zea mays
  Clone ID: MRT4577_33481C.1
accaagcgaacgaaccaacgatcgacgctcccgggcctgcgagacgaattggtcagcattcaacagccaatggaggcagcactgacgcatcaggcggtagcgacagcgactgcgacaccaacaaggtggcggtgcgtgggggacgcgcttcttgctaaccatgtacagggtctagagcgagcaggcgccgttctgctatgatctaggcgagatgcggtcagcgatgctctccgggctagcatcaacaggtatatgggccccgtgcgggcgctcatctccgaagccacccgctgaaaacttacaggggagtgtcagggaatg

SEQ ID NO: 111838 - DNA, 2538 bp, Zea mays
  Clone ID: MRT4577_33482C.1
gaaagcttcacacaagcatttgatgcctggtggaatcgttctaagttccagtggctctggcaaatcaccactttatggagccacaggatgctgttgagctcaacaacagggaagttaaactctcaggagaggagagagcagaggaactggtagtattgagcttgcttacctcaatgattgcagactcccaactgacgatcagaaatttgatggacaatgttttggaattggaccttgcttgtgctagagggtcgtatgccctatggacaaacagtgtcagaccaaccttcactgatagttataccatttgccaatcagaccagtgcaatgactattcaatttatattgagggcattcggcatcctcttctacttgaacagtctcttttggcagaagaatcaactacagaagcatctgaaatgcctgttccattggacatgtgggtcaaaaagaatgcaaggatagttgtgatctctggacctaacactggaggcaaaactgccactatgaagaccttggggctgtcctcgcttatgtcaaaagctggtatattcttcccagccaaaggaaggcctaggattccatggttcgatcaggttcttgcagatattggtgatcaccaggtagtctctgtcctttgatgagaatttctctagtcacttgtgggacaataagcttattgatgaaaactattttttggatgactagttctagagcacagcctctctacattcagtgggcacatatcacgtctgcgcaagattgtagaaatggtatcaaaagattctctagttctaattgatgagattggcagcggcactgatccagctgaaggtgtagctctttcaaccagcattttgaagtatcttgcaagtagagtgaatttagccattgtgacaactcattatgctgatctaagtcggctccagtcagttgataaccgattcgagaatgctgcaatggaattttgtgtagaaactctacaaccaacataccgaatcttatggggcagtactggtaattccaatgcacttagcattgcaaagtcaattggttttgatcaaaaagtgcttgatcgcgcacaagaatgggttgagaaactactgcctgataagcaaaaggagcggcaaggtttactttatgattctctcgttgatgaaaaagaacttttggaatcccaggcaaatgaagctgcatctgttctttcacaggttgaggggttgtacaatgagattcgcttggaagctgatgatctcgaaagcagagtagctgcattgagagcaagagagacccaaaaggtacaacaggaattgaaggttgtgaagtatcggatggacaccataatcaagaactttgaagctcagctaaagaattcaaaacttgaacaatacaattcgctaatgaggaaagcagaggctgccactgcttccgtggttgccgctcatcagccaagcgaaatagctttcgatgatgacgatgaaaaccggatctcgttcgtcccacaagttggagacaaagtgtatgttcaagggctgggaggaggaacgatggctaccgttgtcgaaactctcggagaagatgagagctgtatggttcaatacggaaagataaaggttcgagtcaagagaagcaggataaaactggttcaaagaggcacaaataacgaggcaacaacttcctcttctgtaaaagcaaagggccgaacaccgaagcagcgatcggcaacgacgacggacgtctccttcggccccgtggtgcagacgtccaagaacacggtggatctgcgcggtaagcgggtcagcgaggcggccttcgagctccgcatggccgtcgacgcgtgcaggccgtaccaggtgctgttcgtggtccatggcatgggcaccggggcggtgaaggactgcgccattgacgtcctccggaagcaccctcgcgtggccaggttcgaggacgagagccctctcaactacggctgcaccgtcgcctacatccagtgaacgggtgggtacaggcagactgtttggaactgaacgcagacatttcagtacagaaatcagtttggttttgccttgcctaccagctcccagcgtgtccttgtcacagttgccgaatgccagttgggtgagctttttgctagtagctgatctgcgggtggatcggataaatggccttggcagttgtgatcagttcggccggcgtcctatgcattggcatcgcaaaatcaccagcggaagcaaggtgtgcgtgcacatgcgcgcctcttctttccagcaggattttgtgtagcgagggctgatgtggccaggttcgtgatgagccacgagacaaaatactcgtggctagtcagctcgttcgacttgttttagttttgtcacaagttaagctagcatcttagctcgatttgttacaagccagctcgagctaagcttgttagctcgaatgatctagcatttgtaaggataaactaataagtgataaactgtattaattaggtgttgtatttatgtggtatatgaaattacaagtactattactctaaaa

SEQ ID NO: 111839 - DNA, 402 bp, Zea mays
  Clone ID: MRT4577_33483C.1
acccacgagtccgaaaaaaaaaaaaaaaaaaaaaaaaaaaaaaaaaaaaaaaaaaaaaaaaaaaaaaaaaaaaaaaaaaaataaaaaaaataaataaaaataaaaaaaaaaaaaaaaaaaaataaaaaaaaaaaaaaaaaaacaaaaaaggcgcggcccctcaaaagtttccaactttatttaccctttattccaatttcaaactccttcaaaattttccctaaatttcattccatggcccttctttttaaaacttcttacttggaaaacccctgcctttcccctttttaacccctttgcaaaaaatccccttttcccaatctggctttttaccaaaaagccctcccccttttccccttccaaaaatttccccaccttaaatgcaaattggaaccccccctt

SEQ ID NO: 111840 - DNA, 451 bp, Zea mays
  Clone ID: MRT4577_33484C.1
aaagctgacaagttgtcgcataactttattaaccaacattaggttaactccaataaggatatgcaaaagatgggaatcctaatacagcgtttgggttacgcagtcaggcagtcagccgaaagatgagaccaaatccataaaaaaaatcgcgagaggattgatggatgcaaagatgatattatagaatttcgaggagatgaacttgttgtttcctaagggtaaatccatttatccgtctcttccctagcttccagcattcgatcatatatgaaaagataatgtattcctgagcctgcatgacagaggagtgtgaaaattatcttccaaagacattgctgatgaatgccagcattgtggattccttattttttttgctaaggaatagaggcaggggaaagccgtcatgggggcgtgattgttccaaacatcctgccaaaagaggataatgccc

SEQ ID NO: 111841 - DNA, 389 bp, Zea mays
  unsure (1)..(389): unsure at all n locations
  Clone ID: MRT4577_33485C.1
gccgcggccttccagctgaggggatgagggcagcagtgacacacagnaanagacagacgacgcggcacaacaagagtggtcaagggtggcacacnatgaagaaactagaaaatatctattcacacttggatgagaaatgaagacaccggatttaaagtgctcatatgagcacaagagctccatgagcagaggatacattccctaattttgatgcacttgcttctaaaaaaaaaaaaaaaaaaaaaaaaaaaaaaaaaaaaaaaaaaaaaaaaaaaaaaaaaaaaaaaaaaaaaaaaaaaaaaaaaaaaaaaaaaaaaaaaaaaaaaaaaaaaaaaagaaaaaataaaaaaaataaaaaaaaaaaaaaaaaaaaaaaaaaaaatgggggg

SEQ ID NO: 111842 - DNA, 807 bp, Zea mays
  unsure (1)..(807): unsure at all n locations
  Clone ID: MRT4577_33486C.1
gatatcactagagagagcgagagatagagakagagagagakagagagagakakagagatactgtaccgaatgcgntacgagagatatccctcgcccctatatctcaygatccactcgakcaccaagctcgaggcaagggatggatgcgctggcgcgcgcgcgtgagtgtgcgacgagagaggcggrcgcgagtagcngtgcacagaagagaggggtsggtctcmtycackatcgactgcmctctaagcctagtggacggacagacgtatcagtagagcagcgtcgcctcgckacgatgagagtctgcctcgacgacgcgagcgcatctacaggtgcgcgcggcggcamgsctggcatactcycsgcgacwgcgcgtcactcactctgctcgcagacgtacagacacagwgactccaccgccacstctagagcgcggccsttctcmaggaggtactctgtaagtcactgagaccaagaatgtatttgwagacagcmcraccgtgctgcggactctcggtgactgcnstnsstgcgcctcgcccagncgaagagaccgcnrtactgtcatwtrtactcsgctackctccarcacttcgcgtagtcgcaactscgcggccgcacggarrarcgattrgwwwgcackacgctwaymtatttacgyatgsaacgtcgytgctattcggatccctgacacccgtcastttsatcamaatgytcctwtktatwtggtgrtgstgagwycatygagtattgcttaatatcgragcaacccctatgtgatgactgtcttcaatcaagctatgttta

SEQ ID NO: 111843 - DNA, 229 bp, Zea mays
  unsure (1)..(229): unsure at all n locations
  Clone ID: MRT4577_33487C.1
ctcnttcncttttcccaaaaaaaaacnacacagggtgaattttttgggggttacccccgttacccccttttcccgaaagggaatatgaccaaaaaaaatgggtatggcatcaacaaagagggaaggccccccaaaattgagggctctaagacattgggatgacactctttgcaaggaaacaactttaaaatcctaaaactgaccccaatgtaaatgaaagaaaagggtt

SEQ ID NO: 111844 - DNA, 270 bp, Zea mays
  Clone ID: MRT4577_33488C.1
taaaagcaaaataattaaagctataaaaaaataaaggcgggcccttctaaaggatccatgcttacatcatcttgcatgcgatgacataactacttatataacgcaacctaaattcaattaattggccgtggttttaaaacgtagttactgaaaaatccctgctactaccaaactttgtggcttgggtgttaattctgctttcgccagctttcctattacctacttggccccatctgactgtccttcatatacaattcgcaagcctgaatg

SEQ ID NO: 111845 - DNA, 280 bp, Zea mays
  Clone ID: MRT4577_33489C.1
gggttttgctgctcttcgaccccgagcttcgaaggccgcaacatcaggcgagggccccctcgcgtgtgaccgagatggcgcttccgaatcaagggaccgttgattaccccagcttcaagctcgtcatcgtcggcgatggtggaactggtaaaactacatttgtgaagaggcatctcactggagaggttgagaagaaatatgaaccaaccattggtgtggaagttcattcgttggattttaacactaactgtggttagaacaggttttactgctgggatac

SEQ ID NO: 111846 - DNA, 640 bp, Zea mays
  unsure (1)..(640): unsure at all n locations
  Clone ID: MRT4577_3348C.1
cttgccttctccacaagcatcaccggacaccggccagccgccccaggaaacggaccacctgctggcccctgcccctgcagctgctgtggaaccaactgatacgtcgccgccgccgccgccgccgacgacgacgacgagagaagggccgccgatgcaacagtgctcggcgtccaagaagaagaggccggcacaccgccagccatggttgtgccaccggtggtcgtcaagggcaagcgcagcaagaggcagcgcgtgcacgcgccgccggtcgtggtggaggcggcggcgcctgagtggtcgtcatctgcggcatcggctgccacggcgccgggccgggacgactcggggttagcgaccgccacgtcgccgtccgccgcggacgaggctgcgtccgccgggtattgcctcagcaaggaggacgaggacacggcgctctgcctcatgctcctcgcgcacggcgagcccgcagtggctggcaaggacgatggcggggggacggtagcggtggcggtggcgggcaaggaggccagcaggttcaggagccgccgcctggccgccaacgacggcgctgcctccggcgagtacgtgtacgagtgcaagacgtgcaacaagtgcttnccgtccttccaggcgctgggcg

SEQ ID NO: 111847 - DNA, 266 bp, Zea mays
  Clone ID: MRT4577_33490C.1
tcgcccacgcgttcgcccacgcgttcgtccactcgttcgttgacgcgtgggcggacgcgtgggcggtcgcatttgtgttctcttatttaagtacagtgaattctggtcacgataatatagtgtattaaacataatttatgtttgttgaggttaaattgaatattgttaggaatgtaaagatgtttaataatttaatatatttactaacttataatttgataataaaagataattatatttttgtttaaaataaataatttattaat

SEQ ID NO: 111848 - DNA, 265 bp, Zea mays
  Clone ID: MRT4577_33491C.1
gtagcttcgatccattgctgactgttcactggcgctcaactagtgctgctgctgatgagcctagctagctaggcggtgttgtgatctattcgttaattaaatgatgtttttttttgctgttctcctggggtggcctacatgccaatgcatgtgtgtgttttcaggagaccagctgtggcgtggcagtcagtacaatggccgacctgccatgatgtaacatctctctgtacaatgtaccttttcgtttgttggattttctcctgct

SEQ ID NO: 111849 - DNA, 160 bp, Zea mays
  Clone ID: MRT4577_33492C.1
agtgaagatcaagagagaacacccggatctaagaactaggatgacacctgtgatgccacgggggcggcatgctcccttgagggtcagatatgtacgggtttcacaagttgatcagcttggaggtgaagaacggcctccagaagtgtgcgacgtacccacc

SEQ ID NO: 111850 - DNA, 283 bp, Zea mays
  Clone ID: MRT4577_33493C.1
aaactggaacccctgggccctttgcttgttgattttcgtataagtaacacttgggaaaacaaggaaagaatggaacatttaggccagcacttaatttttgctgccccctgatggattgggtatgggtatttgtatctaggaccatttcaaggctaattctattagtatataaaaaaaaggtcaaaaatgatggggcggacatgtgttggggacaaagacaattctttcgatttctttaaacaagagatcttttttttcggccaaattctcgttttggttttga

SEQ ID NO: 111851 - DNA, 166 bp, Zea mays
  Clone ID: MRT4577_33494C.1
cacacgcgttcgacaaaggcttgtttaatcattattgattaaacgttattcgtgacggtgaggaaacttcatattattagtcttagagcgagtatgaactacacacctggtgttgctgagatcgcgtagttgtctatattactcaataaggtctcgttatatactt

SEQ ID NO: 111852 - DNA, 462 bp, Zea mays
  Clone ID: MRT4577_33497C.1
ggaacaacagacacgggttaaattttaacacccccgcccacgttctttttaggacctcccggccgggggggaaaaacaaaagagggggggggggggctaacaacaatggacaaccatcatgggggcagggcagaggggggacagctggctctaactccctgggccaaatccggtagcaacaactccctgggggggggccgggaaaaacggggggctcgtcggggggctaagcgaggggggggggccaatcccccccacagcatgtggggggggaagggacccggacgggctgtcgtcgtcgtcgttgttgggccccggaaggcaaccgttgtttcgggagcagttgccccgcgccaccgccttgttgtcgccatgggggcaaaagctgttttgcgcggggggggggggggcaactgggggggcactcgccggggggggcgtccgggggtcgatcccccgggc

SEQ ID NO: 111853 - DNA, 1150 bp, Zea mays
  Clone ID: MRT4577_33498C.1
ctcgaggccggccgggacggagctcgagcaactaacaacccaccagccaccacgcagcagctagctagctagctagctagcaaccacctcgatcgcacagaggccggaagctcagccgcgaattcggcaagcaacaaggagaagtcttgggttcctcgccacctctcgatcggtcaggcggatccaagaagagatggagaagaaggcaggacgcgagcatgtgatcgggatcccagtgaacaacagggccttcggcatcgaggagccggatttctccagcaaaggcgccgccaggaacgcagccgccgcgggacgggctgcaaagtccggctggacgaccggggacagggtcgctcaaggcctgaaagaacacgtggctctggggccaaacctgtacgagaccgtgaggggcaagctgtcgctgggggcgaggatcctccgggcaggcggcgtggagaaggcgttccgccggtggttctccgtcgtcggcaagggcgagaggctcctcagggcctcgcagtgctacctgtccaccaccgccggcccgatcgccggcacgctcttcgtgtccacggagaggatcgcgttccggagcgaccgctcgctggcgctgacctctcccaagcgcggcacgggtggtgcttggtgcgggtgccgtacaaggtctccatcccgctgggcagggtcaagacggccacgccgggcgggaacaaggaccggccggaacagaagtacgtgcaggtcgtcacggacgacggcttcgagttctggttcatgggcttcgtcaggtaccaggtgtccctgcacgaactggagaaggccatcaagcaggcgcaggcgcaatgacctgaggcgaacgttcgccgacccctgttcggcggcctcgcgttgtgcttaatttgtggtctgcatcatctgtgtgcatatgtagtagggttcagttttcttgatggattgcttggcgtttttggcatttgagcaagtccggtataccgaatgtataggagaagaagtattagattaattacgtaattggtgatgttgaataaaaaaaaaaaaaaaacaggggcgacccggctcgtctgaagtttacatgtggaatgaaaaacaggcacaaagtatttgtgcgacaaaataaattgtgtcaatt

SEQ ID NO: 111854 - DNA, 126 bp, Zea mays
  Clone ID: MRT4577_33499C.1
ggactacaaacaaatagcttagcttagtcagcagcgcaaatgcacccgcttgtaactgtgatcgtattgtgcgttgcacttcgtcgagtgactctcgctcctagagcctgatgagcccatatatga

SEQ ID NO: 111855 - DNA, 321 bp, Zea mays
  Clone ID: MRT4577_3349C.1
aaaaacagcacccaaggggggtttggcagcatttactttggtgcaacggggggaaatttttggcttcatgtaacaaccctttacagttccttttatttaccactttcaacccccaccggcattttttggtgggcaaggggtcctttaaaatttcagtgccccccacgttggcccacatttgcaaaaaaaaaaaattaaaaaaaaatccccgaattttacggggggcttacgggggttggctcaaaaaacctcaacgatcaaattgttttgccagcatagttctaaaggctttgaaagcattttggtggaaacattttgcct

SEQ ID NO: 111856 - DNA, 2288 bp, Zea mays
  unsure (1)..(2288): unsure at all n locations
  Clone ID: MRT4577_334C.1
tttctagttctagnacgcgagcgggggtcgagaccatgtacagggtgtgcgtgggaggcggcaagatcgagaggaaggaggacgacccgcgcctgtggaggaggtgggattccgacgagcgctacatcttctccatgaacgccgctcacagcatccggaacacgtccagcatcagctacgtgtcgcgcgacggcgccgactcggtccccgcgccgctgcggctgtacgagacggccagggtgacggaggagaccttcgtggtggacaggaagttcaacgtgtcctggcggttcggcgtggaccccggcttcgagtacctggtcaggctgcacttctgcgagctggagtacgggagcgcggagcagcgcaggttcaagatctacatcaacggcaagaccgccgcggagaactacgacgtggtcgccaaggccgggggcaagaacaaggcgttccacgaggacttccttgacgacgacgacgccgcccccgcgtcggagaccgacacgctctgggttcagctgggctccgagtcctccgcgaccagctccgcggctagcgacgcgctcctgaacggcatggagatcttcaaggtcagccggaacggaaaccttgggcatccgacggttaggatcgggggcgtgagtggtggcttggaggacgacagacgaaagcggagccccaggtgggtgctggtcggcgctgctgtgggtctggtgatcttcgtctcggtcgctgctgctgtttacctctgtttctatctgcaccggaaggaaaacacaaacacttcagctgctaataagaaaacgaagacgaagacgaaggacgacaaccttccggctacgacgtcccccggtcttcgcgcagctggaacatttggcagcggcaggatgggccggcggttcagcatcgcggagatcaaagcggccaccatggacttcgacgagtccctggtgatcggagtcggaggcttcggcaaggtgtacaggggcgagacagacacgggcactccggtggcggtgaagcgggggcacgcagagtctcagcagggcgccaaggagttcgagacggagatcgagatgctgtcgaggctgcggcaccggcacctcgtctccctgatcgggtactgcgacgagcaggacgagatgatcctggtctacgagcacatggcgaacggcacgctgcggagccacctctacgggagcgagagcgagagcccacctccccgctctgacgtggaggcagaggctggagatctgcatcggcgcggcgcgggggctgcactacctccacacggggctggaccggggcggcgtcatccacagggacgtgaagaccaccaacatcctgctggacggcagcctcgtggcgaaggtggcggacttcggcatctcgaagcagggcccgccgctggaccgcacccacgtcagcaccgccgtgaagggcagcttcgggtacctggacccggagtacttcatgaggcagcagctgacgcagagctccgacgtgtactcgttcggcgtcgtcctgctggaggtcctctgcgcccggcccgtcatcaacccggccctgccgagggaccaggtcaacctccccgagtgggctctggagcggaagaggcggggcctgctcgagaccgtggtcgaccgtcggctggacggaggctacgacctggagtccgtcaggcagttggctgaggtcgccgagaagtgcgtcgcggatgagggacgggaccggccttccatcggtcaggtcctgtggcacctcgagaccgctctgcagctgcaccaagcgcatctgcagagctcatcagcctcagctgctgcgggtgatctggagccctctgatggcgcgtctgctagcaacagcatcaggcgcgccgaagaggcagcagaaaccgctggtgtgacctatggagatggacatgagatggggaagcggtggaactcagagttgaggtactgtaaacgctgtgtgtgtggttgccccagcaaatatactgaaatccttttggttcttcattccgtcgtactctgcaaagaaaatgcagtgttgagagttgcttttgtttgggtggtcgcatgcaagtataggtgtacatttgggccgggcccggtgggtcggcccgaagcacggaaaaaaaagcacggcccaagcacggcacggcccgttatatcaggccgggtttaggccgaggtcacggcccatgggtgggcacgagcacggcccgtttaagacaggcacgaaaaggcccatatatttattaaaaccacacttcatttcgcactttc

SEQ ID NO: 111857 - DNA, 487 bp, Zea mays
  Clone ID: MRT4577_33500C.1
cgcgagtctagaacaataaaggtccagcgaactccaacatagaggatcttcagcacgagattagaaaatacagacatcaggtcgaagagttggagaagcaaattaggatgttcgagccagatccggcggtgttggtgttgacgaatgaagccgagacgtgcgagaaattcctcatggacacactcacccgcgtcgaggagcgtaagaaatatctgtcgtgcaaccagctgggcccgttcgagccgtcacccaccgacatacacgacgtattcggtgtgtcgcagcagcagcagcagcagggggacctgagcgcattcggggccggcgacgtagtatcgtatttcgctggcggaatggcggcgtcggacatcttctccagtccagccatgacggccgggtccggccgcatcgagtcgaaaatcgtctgctcgctgaaagacgacatcgggcccggacgcgtgggcggacgcgtgggcggacgcgtggg

SEQ ID NO: 111858 - DNA, 649 bp, Zea mays
  Clone ID: MRT4577_33501C.1
aattcggcacgaggccaccacttcacacaaccacctgtgtgtgactttccagtctgtacactcttctctctcaatcccctcccgtttccaaaaatttggccccctctctatctcgcacatctcaccaccaccaccacctcctcctctctctcccatctccaatggcggccgccacccgcacctccccttcccgctgctccgcctccggcaagccctagccctaggcaggctgctccactcccccacgcacacaccacacttctatggccgcgctactcgcgttcctcctcctcctcctcctgctgctgctctccgggggcgccgccggcgacgacgtggcggcgctgctcgagttcaagaagggcatcgcggggcgagaccgggacagggtgctggggtcctggtcgcggcccgcgacgaccgaggccggcagcggcggcggcggcggcgggtgccccgcgtcgtggcgcggcgtcgcgtgcgacggcggcgcggtggtgggcgtggcgctcgacggcctcggcctggcgggcgagctcaagctcgcgaccctcgccggcatgcgcgcgctccagaacctctccctcgccgggaacgccttctccggccgcctgccgcccggcatcggctccctctcctcgctgcgcca

SEQ ID NO: 111859 - DNA, 269 bp, Zea mays
  Clone ID: MRT4577_33502C.1
gggacgcgtcggttcctatctttctatcaagtacatagagctggaagttaactaggtagcgggacatgccacatcaaaaacacaatactcacttaggaggacataatacttgtgcaagtatcgatagttaatgcaaccgacaacaaccacatgcttgaatcccataattatagagtgtccatcttagacaagacatcgcatgaattctgccatgagggcatactgatattttgtcgcgaaacgcatctattgctaccatgctatacaca

SEQ ID NO: 111860 - DNA, 391 bp, Zea mays
  Clone ID: MRT4577_33503C.1
ataggggggtttcctctgtttcttctttcccgcgttttttttttttttttaagaaaaaacttttacccccgggggttattaaaaacatgggtcccaaaatttttttggggggacctttaaggggcctaaccgggccccgaaaacataaaaattcaaaacccatttttatccctgaaggacatgttcctcaatttaaaatatccaaggattcgggcccccttattggctccaaaggttgcgaaaagggggaagttaaacaccgggcaaattcttttgggagaaaaaaagggggtttttaaaccctttggttaaccaaaaaattcttccccccaaaaggttctttgtctttttggcaaacattttggtggaaaaattgggggcctttttgggg

SEQ ID NO: 111861 - DNA, 610 bp, Zea mays
  unsure (1)..(610): unsure at all n locations
  Clone ID: MRT4577_33504C.1
ccttccgggattcgccaagtcctgctcaacttctccttttctcaccaccggccccactcgtcttcgttgcgtacgacaccagaacccggttcgagaatcgccggcggccggctaaaggagagagggtgataataaatcgataaaaggacgagcacggcttttattttttttttcccggagggtgtcgttgaacaggactgcgctgggcctgggacgaatccatttttagggcggtgccggcgcgatcgttccaggatcggcagcagctttttcggggggcgagggatcacggcggcagcggcagcggcggcgacgaccgaccgaccgacccaacccaccaccagtcccccgcggcccgcgccgaggaagaaggaagggataagacggagacggagccggtggtcgcagggatggccgggagcatgcaggcggcggacgcggcgggccggctgagcgcgctgctctcgctgctcgcgctgcgccgcctcctcgccgtgctgcagccgctggccctgctcctgctcctgcccttccggtggcgctcgcgcccgggggccggggccgcggcctccgcgccgggggcttgcggcaagangggggaggcgtcgtc

SEQ ID NO: 111862 - DNA, 438 bp, Zea mays
  Clone ID: MRT4577_33505C.1
gcggcgtggggtttttttttttttactgactgtaccgacctttgtattccctcaaggcaggggcaccaaaaaaccaacttacaagccaacgagatgctgcggcattaacttacttatcaactgcttctgaccctcaagagaggcattcctgggcggggtagccctaacaaagatcggaccaccacatatttttaacaagagtcatcaacagaggccatgtataacatatctattcaatcaggggatcatcaaggtcgggtacgggctgcacaatggcacactacaatctcaggttcatgctgctgctgcagggccatatacaatctgacttctcggggcttgaaaccaacagcttcaacaaagggaaagatctaatcccctgcacagcttcctagcgaggtaaaggaacggcttctaaaaggtggaattgctcttggg

SEQ ID NO: 111863 - DNA, 294 bp, Zea mays
  Clone ID: MRT4577_33506C.1
ttcccctttttttttttcttttgccaagaagcactttacactcaggaatgggtcaggttacgcttacaccctatataggatccattaaattatacctagcataaacttaaatcttagatgcaaccaaactgtattatcctcttgcagcatcatgcggtaggtagtgcatgatgcataaaatctttcaacgcaaacagaagaggctgactgaaaccaaggaacagcacaacattcataaatttgacctgatcaacctgagaccctttaatcctcttgtccggcgaaaaacaacaa

SEQ ID NO: 111864 - DNA, 280 bp, Zea mays
  unsure (1)..(280): unsure at all n locations
  Clone ID: MRT4577_33507C.1
cnnccaacacaatgttcaagcaccacccccccaggacgcacacaacaacggggggaccagaggagcaccgccctgggccacccaacacaaaaccacccgcccagcctatagccctggaagcaccactcgctgagacacatatattaataacatcggaagagctagccaccggaaccgaagccacccgaccaaaccatctctcgtcggccagggcaacatccggcaccaccagcccttcaacctcatgggcttgaccctccgacgggtcaagtcaagggcg

SEQ ID NO: 111865 - DNA, 491 bp, Zea mays
  Clone ID: MRT4577_33508C.1
ggcaaggggggcaagattttatgggtcaaacccgatagcaaaccaaaggggaccacggggggaatttttctcccccaaacattttaaaaaaacgggtaaacgagacaacccctcggggaggggtatgcatgcccgagcctaaaaaaaaagggttggacgggggggaaaaaaaaaccccgccatccgggggagggccttgcctgggccctcgccgggggaaaaccggagcccccgggaggcggcgaaattaaacgggttggacccacccggggggccccggttaaccaaaccccccggggggctcacccgggcgtccttgggcgccaaaaagaacaagggaaaggaaaagcccggaaagggcgcaaacaaccgaacccgggggttaaaggtggggagccccccggtggtccaccccgggcccacatttccaatgttaaccaagaaagagcccggaaaggggtccacgggcacaaacccaccggggggggggg

SEQ ID NO: 111866 - DNA, 303 bp, Zea mays
  Clone ID: MRT4577_33509C.1
attcccgtaggaacagaatgggcacaattttagctaaactaccggacataatttaatcttctattgggacatacacttcttccggttcgaacaagaaaataacggcaacaaaaatttgatttgcatgaacaggtcaggccaacaatttgaacccccaggggctaaaagattaacataacataatggcggaaagggggaacacaaagggatggatactactatggttaacatgctggtcaacatcaacaggacttgagaacgagtgggccaaccccaggggtgaacatattactcaagggcccc

SEQ ID NO: 111867 - DNA, 565 bp, Zea mays
  Clone ID: MRT4577_3350C.1
catcaaggacagcttcaaagatatccaaccgtttacatcgtcagggcagtagagactacaatagtatcacacttataatgttacagagtagtcacactcacatcacagagggcaaaaagaacataaaaaatgggtcaatcacaggttggaactcttctttaattgatcttatacgagtcatcaaagacttctcatattcccaatgttctgaaagacttttctgcttttgcttgagagattctagttcagcttcaagcttgctcagccgttctttggaggccttatctgtatcattcttcaatgagagcttttccatttcaagccttatgatttctctgtctacctcatccaattcaataggctttgatgttatctccattttgagcttggcagctgcttcatcaactagatcaatggctggacacacaaatagagaacattatattagataatgaatagatcagctcgctattcaccgtaacttatccacattatagcatacaaattacctttgtcaggcaaaaaacgtccagtgatgtatcgatcggatagaactgcagcagca

SEQ ID NO: 111868 - DNA, 520 bp, Zea mays
  Clone ID: MRT4577_33510C.1
ctttctcttcatggtcacttaccaaccatctgcagccttccccaatcctctcagctcctcgttcatcaaggaactgaacgatgatggtctgataggcggctgagcgacgaagccacgaataggcatgtcaaggtgctagcccgacatcgtcctcactattctctaatccttaatatccgggaggacgatgcggcggggcggcgtagaagcgcctctcggatctcatctacaaagacacccgtgaagggctcaagatcttccatggagaacgtgatccgcgacgcctactgctacaccgagcactcatgccgtatcaccggaaccgccatggacgccgtccacccccttaagccccaggggcaggacctctctatgcattccgcccatagggctgacgctgtcgcgcctcgtctcgtcgctggtgcagatctggagtagctgcactgcttcagtcctgtttgctcctggaaataatagctatctactgctagaactgcatagtcacaccagcacatggagt

SEQ ID NO: 111869 - DNA, 280 bp, Zea mays
  Clone ID: MRT4577_33511C.1
gcggccacgacgccgcccgtcgccgccgatccctttcgaccgctcgggtctccctgctccttcgcctttcctcctgaaatccagcgaccgaatccgatcgccttggcgcaggcgttcgatgggcaaccactaccagacgctgggtgtccggcaggacgccaccaaggctgaggtcaaggctgccttccgtcgcagcgcgctacgcgaccaccctgaccgccacgccggttccaccgacccggccgccacttagggggttgttgaccccggaattaaattc

SEQ ID NO: 111870 - DNA, 857 bp, Zea mays
  Clone ID: MRT4577_33512C.1
gtacccgtgtggttgagctcggcttcgagctcccatcccccatgcgccgtccgtcacctcgtcctcggcgcgcgcctctgcttcctggtagccgcgcccagcttcctctcttccgcgcgccccctgcttctccttgaccggggcttcatcctctccctgctcgccatggctggtcgagctttttttccagccacgaagctcccatggccgccgagctcagcctttgctcctccctgcgtcgcgcgcctggcttgctctccagctcccgtgcacgctcggatcctcttcctcccaggggctcggccgcatctccatctcccagcaagcgccctaccgaagccctcccatggcgttgttcctccctggtgccgagtctctctctgccaatcgcccatggcgcccagccgcttggccttcctggtatacctagataatgtccaaatacatatatattacaggtaaatctctattctcgttttttgttatgtctctgattttttggcaattatctcttcgagatcgtgcaacattttgctaatgacgaatactaaatattgattgatgcgggaaggtcggaaggtgttgtacatatgtgcttgtggcgttgctcaattctagcctaccggagggtccaccctgataacctacgttgcttaatccaagtttagtttgctgaaattgtttccagaaaatttgctctaatgtatttaaatttgggttactgtgcattttagggttaggctagtttgacaaattaaagtaaaaactcgctctcaaagcaatatagagttatattacataatatgtataattttataactcataaatattgtaacagtctccagtcatatcatttt

SEQ ID NO: 111871 - DNA, 1411 bp, Zea mays
  Clone ID: MRT4577_33513C.1
aaatacaaaaaagggggaaaaaaaaaaaaaaaaatttcaaaaaaaaaaaaaaaaaaaaaaaaaaaaaaaaaaaaaaccatctctcccgttgtcgtcgcctcctcctaaaccactctccctatccccgtgtccagaagctaccccccggctccaatggcggcgaaggaaccgatgcgcgtgctcgtcaccggcgccgcaggacaaatcggatatgctcttgttcccatgattgccaggggagttatgcttggtgcagaccagcctgttattctgcatatgctggatattgaatttgctgctgaagctcttaaaggcgtcaagatggagttgatcgatgccgcatttccacttctcaagggagttgttgcaacaactgatgttgttgaggcctgcactggtgtgaatgttgcggttatggttggtggattccccaggaaggaaggaatggaaaggaaggatgttatgacgaaaaatgtttcaatctacaaagctcaagcatctgctcttgaagctcatgcagcccccaattgcaaggttttggttgttgccaacccagcaaacaccaatgctctcatcctgaaggagtttgctccatctatccctgagaagaacatcagttgtttgacccgcctagaccacaacagggcactcggtcagatttctgagagacttggtgtccaagtttctgacgtgaagaatgctattatctggggtaatcactcgtccagtcagtaccctgatgttaaccacgccactgtgaagactcccagtggagagaagcctgttcgtgaacttgttcaagatgatgaatggctaaacggggagttcattgccactgtccagcagcgtggtgctgcaatcatcaaagcgaggaagctctccagtgctctctctgctgccagctcagcttgtgatcacatccgtgactgggttctgggaaccgccgagggaacatttgtttccatgggtgtgtactctgatggttcgtacggtgtgcctgctggtcttatctactccttcccagtaacgtgcagtggtggtgaatggacaattgttcaagggctcccgatcgatgagttctcgaggaagaagatggatgccaccgcccaggagctgtcggaggagaaggcgctggcctactcatgcctcgcgtaaatccacattcgaagggcagctgctcctctgatgttttgaataaatgaaaccttccgctccttagaaactctcgtctccacccagaacagccgcacatcgcgatgcatgctccttttcgctggttttcccagtgtgtatgaatgaggcttgtagctccccttttgcctgatgatttacaggacagtacatttgctggaaggatgaaacaatttgacacctgattagaatcaacttgtttttctcttagagcatctac

SEQ ID NO: 111872 - DNA, 110 bp, Zea mays
  Clone ID: MRT4577_33514C.1
gggcccaaaatggtaccggacacttgttttatggccatcaggagatagaaaaacgtgttaagtccacgcagaatgttcttcggtccgtgcaagtttacaggtccaggtta

SEQ ID NO: 111873 - DNA, 790 bp, Zea mays
  unsure (1)..(790): unsure at all n locations
  Clone ID: MRT4577_33515C.1
gccggtacccgtgtggttgagctcggcttcgagctcccatcccccatgcgccgtccgtcacctcgtcctcggcgcgcgcctctgcttcctggtagccgcgcccagcttcctctcttccgcgcgccccctgctcctccttggccggggcttcatcctctccctgctcgccatggctggtcgagcttttttccagccacgaagctcccatggccgccgagctcagcctttgctcctccctgcgtcgcgcgcctggcttgctctccagctcccgtgcacgcccggatcctcttcctcccaggggctcggccgcatctccatctcccagcaagcgccctaccgaagccctcccatggcgttgttcctccctggtgccgagtctctctctgccaatcgcccatggcgcccagccgcttggccttcctggtactcgctctccctcagtgccctgtcccttgtacgacgcccttcctgctccagtttgtatttttttatagctggccgttgttcacctcgccgtcatcgacctcccctcgccctcatcctctgcagggccagccctgagggtgtgcagggtatgccaccgctcagggcccccaatatccgtaggaccccgtatacctagataatgtccaaatacatatatgttacaggtaaatctctattctcgttttttgttatgtctctgattttttggcaattatctcttcgaggtcgtgcaacattntgctaatgacgaatactaaatattaattgatgcgggaaggtcggaagggtgtgtacatatgtgctt

SEQ ID NO: 111874 - DNA, 549 bp, Zea mays
  unsure (1)..(549): unsure at all n locations
  Clone ID: MRT4577_33516C.1
atgcacgcgtacgtatttttttgtcctctagacggccgcccctgggtggggtgttttttttttttttataagccaagagggtgatggttcatatccatattaattactcgacacgggtaagctaccctactgcttggcaaaagccaaactgaacgcgacacacaagcgcggtccattgtcagcgtgtatttacctggggggtcaggaggaggttttcttttttttcnnnnannaaccccaagcccaggccagaggacaaacgagacagcgacaacccagnnccccangcgggagaggcagcggangcccncccccnnggccancagggcgaacgccnngnngancncggcgaacgggacgcngngcgngaagaacnncnccaccnccagcnccnnnnncaagnacagcnccaccacannnggcagaacagngcggggcnnaaagnngccaaagaagggccccnncaggggccnnncgnncaggaaggncaacgggngggncnngaacccagcgnccnnangcggcacacccaccagcacggcaacaccc

SEQ ID NO: 111875 - DNA, 447 bp, Zea mays
  Clone ID: MRT4577_33517C.1
ggtcccagagctggaggattgttctttgggggaaaaaatagtcaaaacccggttgcaacacagagcctctaaaaaacaggcataacaagaaccagggcgaaaacatgaaagcctgggcgatggacaaataaagtaacgctataggtaagaagcatctgggcattgacgaatgcaagtggtctgggactgcctgcaacccaaccggaggttggggcctaacaacgatacacgaaaacgaattgaccttttagagggagtctaaactttcggaggacctatatgcctgggggcctggaagcagcccagaaacaatttttgcatgtaactggcaagcaaggccctgctttctttcaaaaagctgaaacgggctagcagcttccctaaccgaaaggaaggggcccctccaaatacccgggatttaacccttgaagaggactcggaaccttg

SEQ ID NO: 111876 - DNA, 357 bp, Zea mays
  Clone ID: MRT4577_33518C.1
cattcttatggaccactggctgtgacctcttacaaggattccgggttctcctcccacaagtgaataccgtctagtgatgcctcatcaagagcaggaagggcatgaaggtaatgatatcagccaatgttacggaccaccactagtacaacttaaccaacctatggaatggaaagaagtttaactaaacaaaacgaaacaatgggaaggataacccgaccatagacattgccatattaaactagattgtccaccgtacgggcgtaaaaacgacacacggcctccctgtcacctcagacggacaaggacgtctgggaggtcagctagaatctagcacccgaccttgaagcgcggggggcc

SEQ ID NO: 111877 - DNA, 145 bp, Zea mays
  Clone ID: MRT4577_33519C.1
tgtacttactacccaaaggtgattattattttttacattgttggtgctattgttatcaccgttttaatggttattaggttatgtataggatttgccatttgttagtatacaatatagtaagtatgaagaaagcatatggttgttc

SEQ ID NO: 111878 - DNA, 401 bp, Zea mays
  Clone ID: MRT4577_3351C.1
cgtttaactcggtggttgccagaacgaagaaggtgatcgaatcaggcgactccactccacaaccgcattgtgttgacctggagaattcagtcaagactattgttgtccagatcgcaaagaccatatccatgattggagcagaggaaaggttcaatgagctctcgatgtttgaccgaaggctcctgtcctcaccagagtcggctaagttcgcctatgagtggaaaaatatttcctgcactacatggaccaactttaaatactgctcctcttcaggtagctaggaacttgcgaattaaattaaggccggcctgaccttactctctagcaagattcagatgttctaatgttcaatgctctaccataaaaggttagaggcttctgggacatgcttcccatgacag

SEQ ID NO: 111879 - DNA, 132 bp, Zea mays
  Clone ID: MRT4577_33520C.1
tgggagggtgtctgcactaaggatttagaaacactttggaagctcataacctcatcagagactgcctttagccacactcctgaccttctagatgagtaacaaatacatgtgataagttcttggaaattaagc

SEQ ID NO: 111880 - DNA, 536 bp, Zea mays
  Clone ID: MRT4577_33521C.1
aagtttcggaatttggctctttgcggtgaagctgggcatcgaggggcacgtctccatcgccaacgtgcttgtcgcgatgtactacaagtgcggcactcccggctgcgcccggaggctcttcgagttcatgggcgagcgcgacgtcgtctcatggaccacggtaatgtccatggacagggaggacgccgtctcgctgttcaacggcatgatgcgagatggggtggcgccgaacgaggtcacctttgtggccattctgtcggctatgccaggacactgcccggcaagggaagggcagatggtccacgcggtgtgcatcaagaccggcctgtctgataagccggcggcagcgaacagcttcatcaccatgtacgccaagctgcggcgcatggatgatgccaagatgatctttggtcttatgcctcacccggaggtcatcgcttggaacgctctgatctccggctatgcccagaacgagatgtgccaggacgcgcttgaggccttcttgtcaatggtgaagatcacgaagcccagcgaga

SEQ ID NO: 111881 - DNA, 466 bp, Zea mays
  unsure (1)..(466): unsure at all n locations
  Clone ID: MRT4577_33522C.1
ggcgcattctgtggaaggccgaggcagtgggaccggatggaaaggagttggattggagtaagattgcctgggtggtggcgtatatgcgccgggtgacggcgcagctggggaggatggaagaggcggatatcgtgatggaattgagtggggcgatgggaaccgagtcgaagatttttggctattcgcctttggatcgaaagatggtagaggggatgaagtgaggggatttttggaagagagagagagagatttcatcaagagacggtcagggaggggacgcacggtttcttgatggcctagccatctttgaaagagggaatctctcggtggtgtgcatgtaattgtactctatagatctattgtttctggtgttttttttgtatgattagggagggatttgttctccattctttttcttttctctgaannaaaaaaaaaaacaacctcccatattattcactatttc

SEQ ID NO: 111882 - DNA, 102 bp, Zea mays
  Clone ID: MRT4577_33523C.1
cataacacgtacaacaactaatatagggcttgcattaaatccagccaatagataatataagggcccatctgtgcgtcaactagctaaatccaaccattcaac

SEQ ID NO: 111883 - DNA, 1662 bp, Zea mays
  Clone ID: MRT4577_33524C.1
ttgggaccctcgaggccggccgggcccgtaacgtaaaacccgccctctctgacagagagtctgacctcgccgccttagaacaccctggccgcgatggcgtcagcggcggcggaagctccgggcgcatcggcctcttccgcggagaacaggctcctgcagtccctcgcagagcgggggtggcgcttccgtgaccccaccgacgaggccatccaagccctgctcctcgcctcccccactccgtcgccggaggccgtggagtccgagctcgtcagcatggacctgaggatgtttggcggaaagtgccttcccgatcgggccgccgccggcggcacgtcgaagcggctttcgtacctccacggccccgtcgtcttgcagatagtctctttaagagatatatatcacagcagcattgatgcgtcctttaagaacccgcagcagcgtcgccttctgcgctttggtctcactgatgggatatgtgaagcagtagccatagagttttctcccatcccattcatcaccgaagagatagctccaggtaccaagattcgccttgagaataaggttccaatcaataatggcatattgtgcttaagcgcgaaaaatgtgactgtcattgggggggctgtccaatcattgtatgaagaatggcagatgaaccagaaatactctggcttatcccgtccatcattgaggttgtctccaagtgatgatggagttgggcctccaccatttgagaagttaggacattgaagcacgcccctgcagggaaaccaaagttcaagcatatcctgctaggaagttggcagttactcatgaccatggaccagttaattctggtggcaagccaatgaatgaggattcaaacgatgagaacagagacaatattgagagtaaggttgaatctaagcaaattactcaagacagcaggccaaaagaggtcagcgaagctgttccagtccagaaccaagctgccgcgcagaagctactgcagaaaatgtcgcaggccgtgcctgaggacaggcgcggtcgcggtcatagattcaagggcaaaggcaaggaagaagatgctcaggtttttaccctcgatgaatgggagaagaggaaagccatcggttcgaagcccgctgcggaaagctacgtgcatgacactagccgagatgaggagctggcgaggcaactgcaggaacaactagacctagaagacttgcatggtggggcaggtgcaggcgttctccatggcggggccgagagctcggatgctgaacggttacggatgagcatgttcagtttcagtggccctgacgaagcaggtggtggtaggagagattttcgaggccgcggcaggggaaggggcggagggcgacgcaggggcagaggaagattttaggcccggccacacagttgtaggtttattggtgtgttgcgtgttcagtgtagtccactggttgtatgggtaaaagtggtgcgatgatatccttctcaaatcctgtttctgaatttctctagcctaatggcgagagcagatgctagtcagattaaggaacagtttgtagacttcctggagttttttttatctgttcttagatgcaggagcacatcgtacattgtttttggaggaacgagttaaaagtctgaaatttacatgacttgtatattcaaaaa

SEQ ID NO: 111884 - DNA, 478 bp, Zea mays
  Clone ID: MRT4577_33525C.1
aacctttgggctgatttatgtgcttggactattggttgctgagtgagtagctctttaaccttatttaacaatcaacaatactcttctgagtgttaggccttccggattatcacacttaggagtgatgaagcgacttatttgttagttacggagacgaagaaggcttctcgtgttgtttctgctgttgttgttctggttattgttgcgtcggttctggctgttcttgaggtgtttcttgaggtgtttgttggtgtggttggcggcgtggtcggtttcagtgtaagtggtgttgttgctgctgttgcgtttgttgctggggtgtctgctgttcatccttctgttcatcattcttatcgagtgatgatgtgtggggtggtaatgccgggacgtactgcgcccggcctacttggacaaccaaccggcgccccccacccatgcgggccgtgaccgggcaaccggccgcccgcctgcctggcct

SEQ ID NO: 111885 - DNA, 240 bp, Zea mays
  Clone ID: MRT4577_33526C.1
tgaagaacagagccgccactgaggaaaccctagcgacggcggcgtgctaccggtgaccttgtctcgaataggggctggtttcctgaaggctgggcccgatgcggcaggaagtcaggctcttttgtggacattgctgggcttgggtggatttcatagattaaagctcagcacaggggggagaagatacagggcacaaacacgaagatcacatcgatgttaatattaatgatgactgggatc

SEQ ID NO: 111886 - DNA, 281 bp, Zea mays
  Clone ID: MRT4577_33527C.1
cccacgcgtccattctgcttgtgaggtcccactcaagggtattatgggctacgtggaggacgatctgtttttcaccaacatcacctgggacataacctcgagcactcttttacaactacgacattatgggcctctacgaccaacttgtttagccaaacccatgggtctactaccaacggcacatcattgacggtgccctctacctgatccgccacatgttcaagacccagtagagagagatattttctgcctccctatcgagggtcagccccaatggcctt

SEQ ID NO: 111887 - DNA, 113 bp, Zea mays
  Clone ID: MRT4577_33528C.1
agattatgtgatgacagattatagatgatggactgcatgtaattgctttacaaaacactgtcattggcccgagctatatttttacatgagtaataacaagattttcaaacctt

SEQ ID NO: 111888 - DNA, 443 bp, Zea mays
  Clone ID: MRT4577_33529C.1
gaaaacggggccgaccacaggcgtccgaaaaaacgccggtttccggaacaaggtcttgttttattaaaacaagttgccaagcggtttggaggggtccaatatatttatggaggagtccctaaaggcgccagtggagacctattcggtgaccttaacgtgtgctgggatcttacgttttttattggaagccgaacaaaggggcaggattggtcggtaggaccccagttaattaatgcttgtttttaattctatgttcttggacttgtatgtacttctccggttgatggttgatgcatccatttttatttgtttttcctcttgtttcaccatttttggtactcttttatttatattatatatttattttataattaattatttaatatttaataggggtgctgttttttaaattttaattttttttatttttttttcttttttta

SEQ ID NO: 111889 - DNA, 595 bp, Zea mays
  Clone ID: MRT4577_3352C.1
ccggccgggggccgccaccatggtcgcgcgctccagccagccgtggatccgttccctgccgtctcggccgagcgccagcacctgagcagaagagagaaaccgaggagagagaaagagcgggaatggaggaagaccggagtggagaaagcgccgccgccggtgaaacctccggcgccggtgttccatcctctgtgcgtagtcgcgtgggtgcgccaacgtccgggggaatccgtccgtgccttcggagcgggctgggcgaccccgaatcgggcggaattccacgccggtgaacgtgccagagcagaactacctcctccccgtggtcggctcgctagcgcagacaatccccggagaagaacaggtggttcaagaggagccacacatcgaggagttcgattcgatctaggtggcatctcccagttgactttttgacgccaaggatggtatttagatattgttatatttatcttttattttgtaaaacttccgctatgtaataaatactctgattattgtgacatttatctttatacactctattattatatatgttgtcttctttggcacagaaaaaaaaaaaaaaaaaaaagcggcc

SEQ ID NO: 111890 - DNA, 442 bp, Zea mays
  unsure (1)..(442): unsure at all n locations
  Clone ID: MRT4577_33530C.1
atccttgaaatcgtcatgcacaccatgatcaattagctacaaccggaatcttacatacagaagatggcttacatgcatgcagctctccaaattaaatcccggcaactaaacgtaattactggtgctaattacctagccagggattgttcgatcgatcgatcgatcttagnacagacttttttagctggagcagcagtagttctagttggcgatcaactatcttttactacaccaaggcaaggcaactgcatggtgcgtggcagctcgcgcgcgcgatctccatctccatcgacgacgagatcgagaccggaccgtccaagtcacaagccgcccggcgcaaggctgagctgcaggtccaggcccagggcgtactccgggccggacacgaccggctccgccaccaccgacatcccaggcccagctggcatgccggggtatctcc

SEQ ID NO: 111891 - DNA, 1279 bp, Zea mays
  Clone ID: MRT4577_33531C.1
tctcggatcatgagcggactgaagacgatgctaatgacactttgttctgcaatatgggatctatatcatctcctgctgaaggaacggcaccgggctctcattcacctcgcaatggattcctttggctacttcgccgcccgcacatcctttacgcagctctggagatttgttcccggagatgctgccctttcgtacaatgcaagcacagggacgagcatagatgaaaacggattcatgctggagttgagggcttatcttcagaaagaggtcgccttgcacaccgataaatggtctgaagagcagattcggctcctggtttctgaggggagagcgctgaagaagctggctgaagtttgttgtgaaattccggttgtcgctgagcctgagaaggcgccggttgccaaggatgccagcacgaagaagaggaagatgccagatgggatctgtgaagggatggcgatgctgcagaacggtctcaaggtcatgcgaggcgcctttggtgaaggggactttgctgatctgaaggatagttttgctgcacacttgtctcgcctcgaggatgcagtttcccagatcgctagtttatccgacgaaatttgatatagtgcactgtatgtcgcgctgttacctttaactgcaaaagagcattcattctagtacagttcacgatcatagcacagctgatctctctcgtggcaagcaagctccagagtcatcgggttgacagatcgttcaacatggccagcacaacttcaaggtttgcaggtcatctccgcgccggcgcttgcgtggcgacggcccttgtggcttgttggcttgtggggcgaaaatgcaagaaaatggatgtgaattatcttttgtataataaccacacgacatcatgtactgctttaatttaacaattggtagtacaccctgcagacgaggcgaatacaatttttgacccatgcaaacactacattgcaattgcatgcatgcatgcatccaccgacgaggcgacgacctcgacacgtccgaaacaacacagcccaggcttcactgcagccacgacagccgacaagcgctggcttactttacggtcacaacttaagcaagatggacggtgatcctcagcagcgtctctgcgccatcggtgacgtgctggccggaagcgatgagcgggcgtacctcggcgaacccgcaggcacccttgaacttgccggtgcctccggtgatggacagccggcacagcggggtgcccaccttgtacaccccgaagaagttgatcgtgtcgccgtac

SEQ ID NO: 111892 - DNA, 519 bp, Zea mays
  Clone ID: MRT4577_33532C.1
agtagtaaatataatagttaaagtcataagcttatgaatcttaagataacttataaaataaacctagtctagaccaagtgagccatataataagctgccctcttgccctagattagcttcacttttgctttgatgctctgatatggacttccaatatcgaggggcagagtccacataacaagcattgttttccatgattgagttattgtttctatagttagagcaggttattaagatcagtatacattagctatagttagagcaggttgatgaatgctctgatatccatagtcacagacgtgtcactagagaatacagagccctttttctgcaatacattcttaccgcctagcgctttctttgcccagggttctgcactgcatcattagcactcttcacggagctgcaaatagtgttcgagatgatatccatcggaaccctgctggtcttctacctggtcgccaatgcactcatctaccaccggtatgtggaaagtcggcacaaaccggcccctgcatg

SEQ ID NO: 111893 - DNA, 217 bp, Zea mays
  Clone ID: MRT4577_33533C.1
tctgtttcttttatctcttgtttttttaaattgactcaacaccgtgaatacacttaataccttattgcaacagccacaatcagctaccatatctatctacataatgtattaaaaaaaaatgactctttacgacaacaacttttgctatcttttaagcaacatgcttttacaatacataccaccttattatatccgaacaccatggggtgcgcagcac

SEQ ID NO: 111894 - DNA, 244 bp, Zea mays
  Clone ID: MRT4577_33534C.1
aaaaaaatgttcgggtaaaaaaaagtacaagcgcctgtaaagacccacgaatgggacgcccgggcaatcccggacctatacttgcgggtaaacgcaagtgatcctaaattgagtaaaataagagcttagcggaatcatgggaataattgttataggtgtgaaattggtaaaagcatacaagtcggaagaatatacaggccagacgggtgaggtgtataagcgggggagcctaaagtgggtgcta

SEQ ID NO: 111895 - DNA, 614 bp, Zea mays
  Clone ID: MRT4577_33535C.1
tcgattgagaccaactagcatcatattaaagcacagtactgtaccaacaatggcacccaaaatattttgctcacttatgctccttgggctctctgcaagtgtagctaccgaaaccatggtaccacaatgctcacaagctcctatgaacacccttgttcccccatacctctgaccagcggagtggtacaatgttgtgaaaccccaattgagggaaccctacagtgatccaacaggcgcagggcaacaggcatcttaccattatcaccctagaaggtccaacagccgacatccctattacagcagaaacctttggtccattggtgggcacaataaatcagggcacaacaagctcatcaactggtgctagcaaaaaatgctggagtgactctgcagcaacataagttgcttacatgtcaaccaactggctgcattgaactctgctgcttatttgccacaacaattaccattcaaacatctagttgctgcctacctccagcaagttcttccattcaaccaactagcagcattgaactctgctgcttatttacagcagaacgactactaccattcatccagctagctgatgtgagccctgctgaccacgtgacacaaca

SEQ ID NO: 111896 - DNA, 1014 bp, Zea mays
  unsure (1)..(1014): unsure at all n locations
  Clone ID: MRT4577_33536C.1
ttgggtacctcgaggccggccgtgatcgggtctctaacagtctattaaaatttttaaaaaatactttttttcaaagcaattactaacaaagaaatacatgattacctgcggggaagaataacacagtagcctctggcgatgatacgtgctctatgtataggtgtgtatatatacacgatgacatttgtatcgttggttggatgttgtcggtgaaaacaatgcaaatattttttccaccattaattaggaaaacacgatcctattgcccttttgctgccaataactgtagttctcgaccataacaatgcaggctttgacttagtaaacatcatcatatctccttgttcacagggggacagctgaatgcccatactgtacacagcccgtgactcaaacaatatacgtgtaatcgaaatgaaacataaaaaagccctagaaatagtgctacccactatgattcatgccattgttgtctagctaaaatttttgaccccacatgcatcgtttcctaacctgactcaaatctaacacatgccagactttcgtggtttctcatgttttgttatttttgttttttcatatatttaaatgcctcacatggccatgcactatagccagattcttagctatgggctagcatgatgcatctgtcaacaagatctccagttttccacgctgttgaatcgccaggtatagcagacaaatacagaaaagggctggcctggttaaaaaccggctcaggttagcaagcagcatggcctgcagtagcttcacgtttgagagaaggtggcttcgaacgagacctgatcgttccttcgtcctgggcgacttggctggctcttgctcaatgngagttgacaggacagcatcacggntagccagtaaggctcgctgcgatgagatccagaagctagcagcatgtacccatgtcactcagctccccaagaggcgatnatgtatacaatgggctccctagttactctggtcgagacttcagggcccacggcgttctcc

SEQ ID NO: 111897 - DNA, 628 bp, Zea mays
  unsure (1)..(628): unsure at all n locations
  Clone ID: MRT4577_33537C.1
cctgtcgtttannnnnngtggcttggacgaagcacttggtcgggaccgaaatgtctgtagagtttcatttggttcagtgccagggtattccatcctcttgattaatgcttggcacctggcaacggttgcataactttacacctaggaatgttagnnnnnnnnnnnnnnnnnnnnnnnacaggtcctctgagtatgggttgcatccatccactaaaataccaggtggtcgtagggcgtgggctgccagtcctcggcgaaggcctccggcggcaactctacctggaccagagcgagcttgggttccaccctctgggtgtatgctcgccctttgccgttcaccgccacccnctgccgatcccaccggaaccgccaaggacggaagatggacggtggatcacagcccggcaccggtagagatgatgagcgcctgtgacacggcgagacccctgcaggacttgatagggtatatgaagatagatttcccagtcnnnnnnnnnnnnnnnnnnnnnnnnnnnnnnnnnnnnnnnnnagccttctccatggccatggcttggagctgcctcggtggcggagagagcagattgggcgtgagtagtattcgacgcggccgcgaattcggatcctcgag

SEQ ID NO: 111898 - DNA, 987 bp, Zea mays
  unsure (1)..(987): unsure at all n locations
  Clone ID: MRT4577_33538C.1
ggcggtggcggtgcggtcgcggcgatggtactcctctacctcgaccagccggnanactgccaggtggcccgcctcaacagctccttcccggtgcagcctcggcggactgcgtctaggccgccaagctccccgccaactaccgctaccttgcggccctaaccgcgaccgccgatgacgagggctgtggcgatggagatgccagcggcaagcgcttgaccaagaaggagatttacgctcgtctgtgccgatccaccctctttgatgccacagaaaggaattctcgattctgaagaacaagggagccctttgcatgagtatatcatcaaaggcaatgactattactgggatagatgatcggaggtactggagccacctcgccatagaggaatcaagcaccctaccctttctatttacggtgcgcttttcactatcggtcatggagcacatcatgatttcagactgggcgaatcatccactgcctcacctgtttgtagactgaagcaggctaagcgaggtgcactccttgaagtctttgaatccaaagttgtccgtgtcaatgggaaatctttggacaagactgccattatggaggagatgaaattatcttctcttcaccagtgaggcatgcttatatatttgagcaacttcatcaggagaaatcaagcactccagcatgatatatgacaacaactcaaagatggtcatgatttgtaagcaaggttgcaggtggctgcgttgctagcaggtgctgatggatcgcaacaaatgggtcaagctggaactgcatctttaccagcacagccttgagatgagcagcctcccgtaacctggacaagaaaattgggtttacagtccaaaactacagttgaaaaacatgacgacctgaatgaagcaagggagaaggtgtgaagagaggattacacaaatgtctgtcttgacttgcagttcagctttgcttcaggtttctgctttggtgcacctggttct

SEQ ID NO: 111899 - DNA, 2991 bp, Zea mays
  Clone ID: MRT4577_33539C.1
aattcggcacgagggtttgattggtccaagttacacattagtagaagtaaatgtcttttgtccatgaattagttacaaaatataactcatgtaaaagacttactacaacaatgaattagttgtaagacttcattatacaatattaaatagtgtagagctaaagagcataagcatagttgcagctcttggcgaggtcgggtcaagttacggttcctgtttgtaatttcctacgggtgcagggggaggtggaggtggtgctctggtactctggtccgatggcggtggcggtgcggtcgcggcgatggtactcctctacctcgaccagccggagatctgccaggtggcccgcctcaacagctccttccacggtgcagcctcggcggactgcgtctaggccgccaagctccccgccaactaccgctaccttgcggccctaaccgcgaccgccgatgacgagggctgtggcgatggagatgccagcggcaagcgcttgaccaagaaggagatttacgctcgtctgtgccgatccaccctctttgatgccacagaaaggaattctcgattctgaagaacaagggagccctttgcatgagtatatcatcaaaggcaatgactattactgggatagatgatcggaggtactggagccacctcgccatagaggaatcaaggtatttcttttctttaaggttgttattttgtatagcttctccttgatgtgtgtatctcatttcctttatatttcttattgctgcaaccacttcaaagtttcaattttagttcaagttttgtagcatcattgtcaagatattacagtgagcaccattagcatttctctcctactacatggcaatgcttttgtattttcaatttgcatcaacatgagcaccattagcaaccaggaaataaagaagttttcacggtgtctcagctaataactttgatggatcatggtcattctgcaagaaaacaaagattaataacaattttcttatatgatgtcgcctgctgaagcaaacaacataacccatcttttaaatataagttagtgtgggtgaaatgtaggaacctatatcttttaaatcagctcctgagggcaatgtatgcattactatatatggtctcaattgccttttaatggatacaagcacatatacattgtagctacattgattcacattgtcttgcttgttttataatgcaaaaattattggtcgaaaccaaaaaaaatctagaatgtccttcttgtctccattattgagtaaaatggcagttgacatcaaagttcatcaacgcagacaaaataaatctagcaacgttatccaatcagacaacaagattataaaggaagaagggagtatttacctgcaataaacatgtctttccatcaatctgaagccgagtaccaccagcttcttattctgcattggctgtttccaattaactggagctattgcagtttaacaatcagaaatggacaccatttatccaactaattaataataaagcaaaaaagaccttacatttactaagaactaatacaaatgtgaatcaattgcatcatactccaaagagaagacatcccagccacgatcaccatccccatgatccatcatctttacctttatccggttcaagatatcaaagtatcttccaagcgactgagatccatttctgataactccaacaagtacaggcactgcagaagtagcgccaatagctgccttcccctctggattgctcatggcctgagaggattgccaatattgcaagggcctcatctaccatccctaccctttttatcatataccaatggattgccatctgctgtattttttttcaacagcaccctaccctttctatttacggtgcgcttttcactatcggtcatggagcacatcatgatttcagactgggcgaatcatccactgcctcacctgtttgtagactgaagcaggctaaggtactatgaatttattttttttgtttttttcctgcatttgtcccccttttattctgacattttgttctagcgaggtgcactccttgaagtctttgaatccaaagttgtccgtgtcaatgggaaatctttggacaaggctgccaaggttaccttaaatggaggagatgaaattatcttctgttcaccagtgaggcatgcttatatatttgagcaacttcatcaggagaaatcaagcactccagcatgatatatgacaacaactcaaagatggtcatgatttgtaagcaaggttgcaggtggctgcgttgctagcaggtgctgatggatcgcaacaaatgggtcaagctggaactgcatctttaccagcacagccttgagatgagcagcctcccgtaacctggacaagaaaattgggtttacagtccaaaactacagttgaaaaacatgacgacctgaatgaagcaagggagaaggtgtgaagagaggattacacaaatgtctgtcttgacttgcagttcagctttgcttcaggtttctgctttggtgcacctggttctaggagggacttggacaatgctgagaggtcatatgctttcagtttcttctgacgccgactccgtgtatttttctgctgaacaaaaaaagattgaaattgtagaacactagcgtcataataaaaagtgaaaggaaatgcaacttatacaaatatgttgatcttgtctgatggattgatctgtaacataatttggtggtggttattgttatgggccaatagtctgggctacatcgagacgcaaaattctgaaagtagtcttccttgtcctttcggggttctagttgtgacccaggtaaataactgataggtgaataggtgatgctatttgtacgaaaattttggctcaaatgcagtcgattgttggcatatttagaacttgtttcaaatttgtgtaaactaaagaatatagtttctatttttttccaggtacttaatgcataattcatttgttataatataaacgacctttggt

SEQ ID NO: 111900 - DNA, 370 bp, Zea mays
  Clone ID: MRT4577_3353C.1
gggtaccctcggagccggccgggaaggaggcgccgcgctcctcttgttctacgccgttcactctctctagtctctcccttcccttctccacgcctccgcccccactcgtgagaccctacctagccctagcgccagcaccacccgcccaacctcccggagagagagagggggggggccttccccggccggccggttcccggcgggccgggggcccaaatggtcgggtaccaaaagggccctggcggccagggggggaccttgggcgcccgccgcccgggcggggcgcgccaggtttacccggggatgcaagaaaaccccgaactggggtgggcgcttattccgaagaactaagggattctctcccttcagg

SEQ ID NO: 111901 - DNA, 112 bp, Zea mays
  Clone ID: MRT4577_33540C.1
tacagtaccgcgtggcatgcagacggtcattagcttctttctatgagggtcacactaaaattccatattcactgggcccggtggtttttacaaacggtcgtggactggggaa

SEQ ID NO: 111902 - DNA, 264 bp, Zea mays
  Clone ID: MRT4577_33541C.1
ctttcccgaaaatgcaatgagaatccccaggaagcagggacaatggaaggcgggctggtctgcaaggccgacatgggtgccccagcctgctgctccgggaaagacgtttacctgctgcccagagctgggactgcagaccctgattggcgagggcttggagagtagctgagaaccttcccttcagctactgaagaccagacagggctttctgtatcacgctgcctgacgatgatgatggtgcagtgactaagagtgcagatgaaa

SEQ ID NO: 111903 - DNA, 270 bp, Zea mays
  Clone ID: MRT4577_33542C.1
caccatctccacgcatcagctgaccgatgacggctggcagctagtgctaccgcgagagcgaccagcgatgggcttcttcttcttgaccttagtgacgcccccttcgggcggcgacgacccgaactgcgccttggtggccgtgcactccaaggccacctacgactagctgcgggcggcccacaggagcagcggctcgctgctggtgatcgacttctcggtgtgctggtgcgggccctgccgcttcatctagccggccttggtggagctggt

SEQ ID NO: 111904 - DNA, 234 bp, Zea mays
  Clone ID: MRT4577_33543C.1
atcatgtggctactaaaccatatgccattgttggcacgaagcccagaatatttccaggtgatacaattctggagactggagaagtaattccacacatcatagacttaaccgataaacatcattgaagagctcttaaaaatttaaaaaacttgtgtaacagcacatgtatgttccataatgctgtatttactgaatctatttcctagaaaagtaattaataaaacttattcctgt

SEQ ID NO: 111905 - DNA, 138 bp, Zea mays
  Clone ID: MRT4577_33544C.1
gaaacgtaatttattattgttattattccaacgaaccactccttgaaatgagaatttggcttacaggggacaaacttaaaatcccaaatagaaacttgctacaaacaactaaagttacaaactcaaagcttaatcccc

SEQ ID NO: 111906 - DNA, 282 bp, Zea mays
  Clone ID: MRT4577_33545C.1
taggggccttttttttttttttttttggggggaagaattgtcaacactgccacattgccgtacatgatacaggtatcatgattatttcgcggataccatccaaaggtccagagcgtgtactcttgtcaaaacacttcccacctggtgctccgaactaactcgatgaaaaaaacgagaggtccccttggcatgagtaaaagaatgccaggtccctactttctcttgcgggcgaacccggcaaccacatcatttaaaaaaggcggaagaagttgttccgcgggc

SEQ ID NO: 111907 - DNA, 217 bp, Zea mays
  Clone ID: MRT4577_33546C.1
gggagacctctcccacctcctcgccatcatcttgctactgctcaaaatctggaagtcccgctcgtgcgccggaatttcagggaagagccaggtcctgtttgctgtggtgttcactgcccgatatctggacctcttcaccaactacatctcactctacaacacgtgtatgaaggtggtctaaatagcctgctccttcaccacggtctggttgatttat

SEQ ID NO: 111908 - DNA, 298 bp, Zea mays
  Clone ID: MRT4577_33547C.1
attggggggggttttaataaattttttgggcttttcccccccaaaaaaaacggcacgagggcccattactttctaaaaaaacaggggcctgcagcctttttaaatgtttcaaagcatttccacctcagccgcaaaacccggaacagccctcatgagcaccacttattcgggcagtacaacacaaaccacaagcggggcgccctccaagaaagaacccccccttggcgcagccatattaaaccatggttaagccccgtaccccccccaaagttttttaccgaaaaaaaaggccccccta

SEQ ID NO: 111909 - DNA, 369 bp, Zea mays
  Clone ID: MRT4577_33548C.1
attcggctcgagggagcttgcaggctaggttttcctgaaccagcagcctattacgacactggggctatcccaaggagtctgtgctgtcgagaatggttgcggacgcggacgcaagaaggatgctagagaggggaacaagctatggttttgaatacacgacttgtgctaccgttaagctctgaacccctccgggccagagcggcagaggtaaacgctccgatggggaagagatcggcgaacagtatcaagtccgggcgtcttaggcgaaaagtcataggacaggttcagatccagctgggcctaggatgtatcgaatggtgccactaacaaagcagtggctgcttgtgctgatggcaaggaacctgcttt

SEQ ID NO: 111910 - DNA, 107 bp, Zea mays
  Clone ID: MRT4577_33549C.1
gacactccctagctcgcagtctctcgtcgtttctacatccgcgaaatgtccgccgtggggtgccggctcaaaacatcaacactgtcgtctcttcatcaccatctgta

SEQ ID NO: 111911 - DNA, 583 bp, Zea mays
  Clone ID: MRT4577_3354C.1
ggccgcttttttttttttttttttagtttttttttttttttttttttttttttttttttttttttttttttttttttttttttttttttttttttttttttttgtttttttttttgtgggaaacaaaacgttctttcttttacatacaaagggcaaacaaagggaagagggacccccacacccccccccccgggggggggcgcaacaaaaaaaaccccaaacaccgccccaaaaaagcccaacctgttgggacgcccgggcattaccccacccacaaatcatgttcagggggggaccccccccggagcccctagggccaaaggagcgcgctagctggggccccaaaacgccaggaacagggcgccaaaatgggcccccaaagacccccaaaccgggcccgttcacggggacggccgcgggagagccgggggcaccccccccaaaacccccggaccccagggcatggaagccacccagggcgggctgggggaaaagatggctagcgaaagactggcgtagaggaaagacagagggggaagcaccctgcacggccatagacaggaaaaacatgtccgctccaccc

SEQ ID NO: 111912 - DNA, 445 bp, Zea mays
  Clone ID: MRT4577_33550C.1
cccacgcgtccgggtattgtttggttgccagcaagcaaatggtcggtatatttctgaccatttgggtgcgcagcgaaataagaaatgatgtgagaaacctgaaagtttcttgcgtgggtagaggactaatgggttatcttggaaataagggttctatatccataagcatgtctttgcaccacacaaccttttgttttgtctgttgtcatctgacctctggtgaaaaggagggagatgaactacggaggaactctgacgttatggaaattctaagaaagactagatttccacaggtccgtggtgctgctgatgtcaagtcaccagaaacgattcttgagcatgaccgtatcatttggcttggggatttgaattatcggattgccctatcgtactgctcggcaaaagctcttgtcgaaatgcataactggaagcaactgttagagaa

SEQ ID NO: 111913 - DNA, 264 bp, Zea mays
  Clone ID: MRT4577_33551C.1
ttatattattttttttttggttttttttttttttccagcggggcactgtcattaattcatagctagaaagggtatgtacaagcacccggtaccttataacatccatatatttttgtttttccccccacccaaaaaaaacaaaaatatgggcatgttatagggctcaaggcctaattgcactcccttttaatccatagcagatacggcaatgcacctatgtttcaataacgacttggactaaataatatcttctgggagggaaac

SEQ ID NO: 111914 - DNA, 210 bp, Zea mays
  Clone ID: MRT4577_33552C.1
gcttcttatgtgatttctggccgggttgcctgcttggtctctttggctgtgctcgctgcaccgccggggagagtagcagatgatgaccgcgtcgcggacacctttctgatcaatcaagcagggcggcagctaagtactggtatatggagtgagcagccgccgagtagcctcaatcagtgatttacagctgtagaccagccacggtgatat

SEQ ID NO: 111915 - DNA, 313 bp, Zea mays
  Clone ID: MRT4577_33553C.1
gagcttacttttcggcggccgcccttgttttgttttgtggggaccacaagaaattgctgaatgattacgataaacaaacgaaccatgtgattaaacgtgtgctcgtctacgtcggactatagcagatcattatgaggcattgccggcattgtgtcgtgggaggatcacgccgcgggcttagcgcatggtgctccttgtccccaggctaacatgacgatattccgtaccacaccatccagaggacggccagggccattccagctacgaattgacggctgaagcaatccttgctgaataaatacgaagcaccagg

SEQ ID NO: 111916 - DNA, 189 bp, Zea mays
  Clone ID: MRT4577_33554C.1
gctgccacagagacatcacagagcggtcctccttgtgagtctgagctgaagaggaggaggaggaggaggagaagcagcacctcacctcgtaggagggagagcgaacatgcgccgtgtacgcgctgttgctcgtccccgtcgtgtgcgcgctgacagcgccatgtggccttttaggtattgacgggcttc

SEQ ID NO: 111917 - DNA, 319 bp, Zea mays
  unsure (1)..(319): unsure at all n locations
  Clone ID: MRT4577_33555C.1
ggtggtttgnggagactttctggaccagttgtcatggtttttcatcagaaagcaccaatcttgaaggggcagatgatgcagttcttctctcactcactgacacagacacaggcacggccactggctttttctgaacaccgggttttgttgggggtggtgaagagggtttgtgtttattgaaaggattgtaagtcttgaagcttttctgaaaaacgacaggggaagggcacaactaaaacccttttggtttgatagctataggaacattcttaatgttgggtaggccttgcacaaccctgaagagcctaatttttgctat

SEQ ID NO: 111918 - DNA, 193 bp, Zea mays
  unsure (1)..(193): unsure at all n locations
  Clone ID: MRT4577_33556C.1
cagagaagcatatggtggccatggctatgctatttaggaacagaatgcaaaaacacatagctaaattcaacaaggaataaacaagacattgtataggaagcttgatacgaaatacaancanancattntggtcanaccagcaccatctctaagggagaacaaagagaangcaagcagagcctgtgcacgtatt

SEQ ID NO: 111919 - DNA, 228 bp, Zea mays
  Clone ID: MRT4577_33557C.1
ggcattattcggcatgcccgcgttatttcatcgaatatatatttatttcaagttctggggcaaggaaaggaaatagcggctagcttatatattatcagccgatgtggggcgtttggggggggagggggacgaagatgcggacacggttggggggataatccgggggcaccacggagccgacgggcagaaccacgatgtgggcgtgcgggtaggccttgagggaaacct

SEQ ID NO: 111920 - DNA, 447 bp, Zea mays
  Clone ID: MRT4577_33558C.1
gcctgccgtccgtccggattcccgggtcgaccagcgtccgtccggtttcgcagtagggtggcgatggtagctgacgcgaaggaagatgggattgagtaagtgagctattaaacttgttgcttatagacagcaatgcaactaccatgattgatccagatagctgatgtgagacctgtagcctttttgacacaacaacagttgaggccgttatacctgtacgctgcatctaacgctgtcaccatattacaactgcaacaatcgctgtcattaaaccaacttgctttgacaaacacaacaacgttataccaacaacccatcattggcggtgccctattttagattgcttatgagttatagttcaataatgaagttttttggaagatgtttgtggcttcccagatataagaaagcacatttctagattctataaataatattaattttttt

SEQ ID NO: 111921 - DNA, 420 bp, Zea mays
  Clone ID: MRT4577_33559C.1
acccggaaagggggagcccaaattaaaaccgtttttatttttttttgaacccatttttaaacccttccaaaaaaaacaaaccgggtccgggtttccgggaaccccccttttttaaattacccccacccccaccaccttttttccctaagtttaaaactttaactccccaaaagcaagcatttcccaaggcccggaaagggacttttttttggaaaccataaaattacccccccttgcagtaaaaaattaacaaggggtgtggttgtgtcccccgaaattagttatcttggtccccccccggccggtactacggtaaaccaaaaaggggggggggctttttttcgccgttggcctcctgggggcccttgggggccttttttttctcggggggctcgggaaatacataccccccggccccca

SEQ ID NO: 111922 - DNA, 235 bp, Zea mays
  Clone ID: MRT4577_3355C.1
gacgcctgatacgaaagcagcggcgatgcccccctcctccacctgtgcaccggtcatagagctgcacaacaaccatcgcggttcccgtgcgcatacaggagtctatgtagctatctagcgtggctcccttgtggttgctcaaggtccgctcgagttaggacgaacatgaagtgctggtacagcttattggacctgtgtctgatcccgcttaacctgttcctccgaatgacgtacc

SEQ ID NO: 111923 - DNA, 215 bp, Zea mays
  Clone ID: MRT4577_33560C.1
caacggacgggtggggccctgctcaattttcccccactaataacccacgcaaaacggggtccggcccgcccttttatcccgttggtcaccgtacaacctgccccccggggtttaacggcacacttttaaatcatcaaggcccattaatcccccagccatcccaaatgggaccctgcggacctacctctaaagcctcctgccaaccggctggtatc

SEQ ID NO: 111924 - DNA, 452 bp, Zea mays
  Clone ID: MRT4577_33561C.1
ggcaaaaagggggggggtttgacccccaaattattttggtcctttcaagcaatacttaaagggccgggattcttatagggggcccccccttttgaaacaaaggggcgccgggacaaaatataggatcggccaaaaacatacttttaaaaaaagtttaattaaaaaaaacctgggggccggaacctagcggactttacaaaaaagcatacttaaaacacccggggtgggttccccatggggcttttggcgtaaaggcatttaaaattttgccagtttttttttggaagggaaacaaggaaggggacccccatcgggagggtcgggggggtctggttttcctcccttgccaagttgccaccgggaacccccatgcaaaaaacctttttgggcgggaacttggggggggccttattcttgttcaccttggcctcggggggatccggggggggaac

SEQ ID NO: 111925 - DNA, 664 bp, Zea mays
  unsure (1)..(664): unsure at all n locations
  Clone ID: MRT4577_33562C.1
ccggtctctccccccaccccaccccgcccctccctatctcctcctcgacgaagcagctgccatcgccgccgcccccgacgtcgacgacagcgacgtgcaggaaggaaaaaggcgagccccatactggataggttaatggctggcactttggtcgaagattatacaggggatggtagatcctcgtcaaccgaggacttgccaagtgatcaacaaagccattctggggaatctttagctgagtggaggtcaagcgagcaagttgagaatggaacaccatccacttcaccagcttattcggacactgaagatgatgattgtgggccaaggcctcctgaactttatggaaagtttacatggaggattgataatttttcgcaaatcaacaagagggagctacggagtaactcctttgatgttggcggttataaatggtacattttgatttatccacaaggatgtgatgtttgcaatcacttgtcactctttctttgtgttgcgaaccatgataaactactcccaggatggagccactttgcgcagtttacaatagctgtaattaatagagatcctaagaaatctaagtattctgatacgctgcaccgattttggaagaaagagcatgactggggttgnaaaaaatttatggagctatcaaattacatga

SEQ ID NO: 111926 - DNA, 918 bp, Zea mays
  Clone ID: MRT4577_33563C.1
cgttgctgtcggatggcacaacctgaccagatgatgcgaagtgctagtggtgtgaaacttgagccacagcagctgcaagcccagatgatgagaagtttaagttcagtcaagatggagcaacagacttctgattcatcagcattcctgcagcagcagcaacaacaacaacatttgttgcagctgacaaaacagattcgaaattgtccggagcttgtatcaataggtggaccaaatgcaattgcaaaccctcaagctgccacagctgctcaactgaccctcttgcagcagcaacggcttctgcatatgcaacagcagcagcaacaacagattctaaagaacttacctttgcagagaaaccagttgcagcaacagcagcagcatcaacaacagcagcagttacttcgtcaacaggttcctggctcataaggagacgactttcctggagttctcatgtttagactctgttgacgaagtaactgctgctgttgttgatgctgctgctgttgctgcaactggtttctctgcaaaggtaagttctttagaatctgttgttgctgctgctgttgcatatgcagaagccgttgctgctgcaagagggtcagttgagcagctgtggcagcttgagggtttgcaattgcatttggtccacctattgatacaagctccggacaatttcgaatctgttttgtcagctgcaacaaatgttgttgttgttgctgctgctgcaggaatgctgatgaatcagaagtctgttgctccatcttgactgaacttaaacttctcatcatctgggcttgcagctgctgtggctcaagtttcacaccactagcacttcgcatcatctggtcaggttgtgccatctgctgctctggtttgatgctaatcatgcttccaccattctcccggccggcctcgagg

SEQ ID NO: 111927 - DNA, 302 bp, Zea mays
  Clone ID: MRT4577_33564C.1
cccatgcttgctgacactgcgtgcgcgcacgctactgcttaggcctgctgagatcatccacagggcgcacgtcacgggagactgtactgggcggtcgactgtgaattcacggcgcgttgcaacgggaccggctcatctatctacccgaggtcatctccgcactacctcgttcctactgacggagcggtgcagggagtacgttctgaccgacgagtgggtgccaactctcatgaacacgctcttatttagtgaaaaccgttacgcgtgggtctctttagatcacatggttgcgctgatgctcc

SEQ ID NO: 111928 - DNA, 579 bp, Zea mays
  Clone ID: MRT4577_33566C.1
cggacgcgtgggcggacgcgtgggttcttacccaatggaggagcagcattcaggattccggcagtggcaatggcagtggcgcctcttctccctcctctcatcccagccggagctgctcccgccgccgcggccggccaaccatgtcaggtgggaggagaccgccgccgcgcacctcttctccgcaagcctcccgggagtgcgcaaggaggagatcagggtggaggtggaggacgccaggtacctcgtcatccgcaccgagctggacgccggcaccggcaccggcggcgccgtcgcggacgcgaggagcttcgaccggaagtttcggctgccggggatggtggacgtggacggcatctcggcggcgtacacccacggcgtgctgaccgtgaaggtcccgcggatgcacacccgggccaggcctgtagttgacatcctcggtgcgggggcggggccggccagcgaccacgcggcccgggcggcctgattcgtgatttatagcatcaagcatgtactcgctctatcctataaaaaaattatatttagagttcaaattttatttcaaaataaatacacatttag

SEQ ID NO: 111929 - DNA, 766 bp, Zea mays
  Clone ID: MRT4577_33567C.1
cttacccaatggaggagcagcattcaggattccggcagtggcaatggcagtggcgcctcttctccctcctctcatcccagccggagctgctcccgccgccgcggccggccaaccatgtcaggtgggaggagaccgccgccgcgcacctcttctccgcaagcctcccgggtaacccaccccactcgatccctgactcgcgcgtgctgctcgccgtcgtcggtctttgcagccagccagctgagctgactgctgagcaaggccttcttcttctgtgtgccgtcaggagtgcgcaaggaggagatcagggtggaggtggaggacgccaggtacctcgtcatccgcaccgagctggacgccggcaccggcaccggcggcgccgtcgcggacgcgaggagcttcgaccggaagtttcggctgccggggatggtggacgtggacggcatctcggcggcgtacacccacggcgtgctgaccgtgaaggtcccgcggatgcacacccgggccaggcctgtagttgacatcctcggtgcgggggcggggccggccagcgaccacgcggcccgggcggcctgattcgtgatttatagcatcaagcatgtactcgctctatcctataaaaaaattatatttagagttcaaattttatttcaaaataaatacacatttagaaataagatcatatggctttagttgtttttcctacttcctctcatctcgaagtgtaattatatttttatagaaaaatagatggaaataatttctcgct

SEQ ID NO: 111930 - DNA, 309 bp, Zea mays
  Clone ID: MRT4577_33568C.1
gtaagctcggaattcggctcgagcaacatccaccttttttttttactgccggcgccctaggctacggggtgggttttaattatgtgcggggggaccgacaaacagccgcaagtcaccatgcatgctgtacaagagcagcacctcgcccattgtcacaaccgtaaaacacaaaatctacttaaatattagaccttatattcctcaaccattaatccaattacattgaacactatactttcaaagacctattgtactggcaacttttacaaacctcccatcaagacctacctagtgaccaggcttaatacc

SEQ ID NO: 111931 - DNA, 946 bp, Zea mays
  Clone ID: MRT4577_33569C.1
aagatgccctgatggtctcccactctacaggctgatgaaaggagattgccagaagtttgctatgcagatatcatgctttcaggaaattgcctcgcatggatgttttagccttgggatgattgctagattcgagcctgtgttgcatgagaaaggtgaatggatgtatcctcgtttgttctgggagactggcattcttggtcaagtgctttaccttgaggcccatgctattgcaatatctgccacaggaatcggatgctactttgatgatactgttcacgaggcacttggcttgaaaggtttggactttcagagcctgtaccattttacagtgggcgctcctgtgcttgacaagaggataatgagtctcccagcttaccctggtcccggaattgacgcatgatatcttgcctcgggggaattttttgtcgacagatcaacaaagaaccgtggagcctgactgttttggtttatgtgtagtggcatgcctgaaatctatgcattgcatgccccggtactacccactcactcgtattttatctagttgttagccacgacgatcctatgttgcaccagcgtacaagtatgtccggatgttccagtgcgattattctggtcctcaaccaggtatatagtttggtatattgtgcaactaattttttttgccacatttactagaataaccagtgcgtacaaaattgtagaagtagagatgcaccaagaaaaaaaaaacagggaatacaagttcgcttggctttaatccgaaaaggcctctaatgtttctacagtgtttgtctatatggattatagttgcagcaatctaaaacagcgggttttaattcgaagcgaaccttgtaaatcctctttgcgactatacaattagaacgaaatttccaaaaaaaaaaaaaaaaaaaaaaaaaaaaagccctctgcgttgttaccactgctt

SEQ ID NO: 111932 - DNA, 437 bp, Zea mays
  Clone ID: MRT4577_3356C.1
ggaaaaaattggccaactacaaacccttggtaggtcaccagaacctagcttaaccaatcccggggggggtcacttgccattttccaaactcccacctctttcggggggaggaaactaattttagtccataatcccccccagcagttaaggcaaaaatagcaaagggggaaaaagggaagctggggcccaacttttttttttaatgagccggctggatgggttcctttcctacccgctgagcccaggttcatcaggggtaactggcgcgcggatgggttttcgaacaaaacccataaaggagggttggtcccccagtttttttccaaagggaacagacgctgcaagggcaacaactttggctgttggctccgagggcaatttagggagagatttccgggggggctttttcgccgaattggcagcaggggcttttttgg

SEQ ID NO: 111933 - DNA, 367 bp, Zea mays
  unsure (1)..(367): unsure at all n locations
  Clone ID: MRT4577_33570C.1
tccnnngtnngcgtggttgggcgtaatgcaaaatcctggcgggggccccnnnncctgggncngtgtttgaccatngtncgagggcgcagctcatccgttctgggtctcttgtcctttancnntctanngctcagtggggggggggggcatcgnctttanctctaggtggccttgtctgccttggtggctgtggctgctggttgtcccctgtgccttcctgtgctgctngcgggggtgagaccnaccttctggcctgggggagcgtttcgggggccagttgaggcgtgaccggtgtgttggtgggttccttctgcgtggggttgctgctgtgggtttatggacactccacgcgccttgggccgggtgt

SEQ ID NO: 111934 - DNA, 275 bp, Zea mays
  Clone ID: MRT4577_33571C.1
aatttggaagcccaacaagttgtaacattgagctacaattagccattgttcaggtcgtccttctctgcttagaaaaagcgcaggagcggagacagctctctgagattgaacttcacctgcttcgctccttgaaggctaaatctttggggctagctgccatgcagaaatcaagagcgaaacaacattcgagattgaaatggatcaaacaaggaacagaaggagatcctattgacaggtcttctggaacagaaatgggaatagtatgtctgtgcata

SEQ ID NO: 111935 - DNA, 312 bp, Zea mays
  Clone ID: MRT4577_33572C.1
tgcgcctgcgcctgctgctgcgggaaagggacaactgggggcggaatgaagaggggtgctacctccaccggctggaccatcctaccactggggctgctgacagacgctctcgcctgaagcgagtgcgacctccccatcccagacctctcgatcctacgaccgctacttcgaacttcctctcggccacggcgctgtgagtccacacgccagcgctcacgcacaccatcactccgcactgtcaccaaccactcaccctcccgatagcggaccctcccgacgacctattacactgaaagtatttgacgcggacac

SEQ ID NO: 111936 - DNA, 1526 bp, Zea mays
  Clone ID: MRT4577_33573C.1
cgccggggctctcagtgttctcttctctcaagcggacaaagcccgtccctctcctacacctcccccaaagttccgttccgttccgttcagttccctcccggctcccgcaggtcaaaaccctcaacctcccacgcggctcgctcgctcgctcgctgggtgggtcggccatggctccccccgcgctcggatctcaggtggccgccgcagcctcggtgcccgtcggctcggactctctcgccaagggcgcggcgctcaagggtaacagcactctaaactttcggaccaaaccatgcatcgggatggcattagcgtggagaaacaggacccagcaaccacggcgtctgaacaaggtactctgcatgtctgttcaacaagcaagcagaagcaaggttgctgtcatgcccttcgagttggagaaggcaaaggagccaccgctccacctctacaaaccaaaggagccttacacggccacgatcgtctctgtcgagaggcttgtaggacccagagctcctggcgaaacatgccacgttgtcatcgatcatggcggcaatgttccgtactgggaaggacagagttacggcgtcattcctcctggagagaatccaaaaaaacctggatctcccaatactgttaggctctattcaattgcttctactaggtatggtgattcttttgatggaaagacagcaagcttatgtgttcgccgtgctgtttattatgatcctgaaactggagaggaagacccctcaaagagaggtgtctgcagtaacttcctgtgtggctcaaaaccaggggacaaagttcagatcacaggcccctcgggcaaaataatgcttcttcctgaggatgatccaaatgccactcatatcatgattgccacggggaccggtgttgctccctaccgtggctacctacgtcgcatgttcatggaagatgtcccaactttcaaatttggtggtctggcttggctcttccttggtgttgcgaactctgacagccttctctatgacgaagagttcacaaactaccttcagcagtatccagacaatttcaggtacgacaaagcgctaagcagggagcagaagaacaagagcggcgggaagatgtacgtgcaggacaagatcgaggagtacagcgacgaaatcttcagactgctagatggcggtgcgcacatctacttctgtggtttgaaggggatgatgccggggatccaggacacgctcaagaaggtggctgagcaaagaggcgagagctgggaccagaagctgtcacagctgaaaaagaacaagcagtggcacgtcgaggtttactaggctataagatggcaaggattgtgattgtttagctactgagctgagaaactggacgtatgattgaacgactgtggctgctgcgatgtaatgtaacattgtagacttggattcataagcttctgctccaaatggtgaataaaatgaagcacgcggtttgtagctgctaaaaaaaaaaaaaaaaaaaaaaaaaaaaaaaaaaaaaaaaaaaaaaaa

SEQ ID NO: 111937 - DNA, 229 bp, Zea mays
  Clone ID: MRT4577_33574C.1
cttctctccaagcggacaaagcccgtccctctcctacacctcccccaaagttccgttccgttccgttcagttccctcccggctcccgcaggtcaaaaccctcaacctcccacgcggctcgctcgctcgctcgctgggtgggtcggccatggctccccccgcgctcggatctcagggtaacatcactctaaactttcggaccaaaccatgcatcgggatggcattagcgt

SEQ ID NO: 111938 - DNA, 925 bp, Zea mays
  Clone ID: MRT4577_33575C.1
acaccccttccaaagttccgttccgttccgttcagttccctcccggctcccgcaggtcaaaaccctcaacctcccacgcggctcgctcgctcgctcgctgggtgggtcggccatggctccccccgcgctcggatctcaggtggccgccgcagcctcggtgcccgtcggctcggactctctcgccaagggcgcggcgctcaagggtaacaacactctaaactttcggaccaaaccatgcatcgggatggcattagcgtggaaaaacaggacccagcaaccacggcgtctgaacaaggtactctgcatgtctgttcaacaagcaagcagaagcaaggttgctgtcgtgcccatcgagttggagaaggcaaaggagccaccgctccacctgtacaaaccaaaggagccttacacggccacgatcgtctctgtcgagaggcttgtaggacccagagctcctggcgaaacatgccacgttgtcattgatcatggcggcaatgttccgtactgggaaggacagagttacggcgtcattcctcctggagagaatccaaaaaaacctggatctcccaatactgttaggctctattcaattgcttctactaggtatggtgattcttttgatggaaagacagcaagcttatgtgttcgccgtgctgtttattatgatcctgaaactggagaggaagacccctcaaagagaggtgtctgcagtaacttcctgtgtggctcaaaaccaggggacaaagttcagatcacaggcctttcaacattttattctacatcacaattatttcttcagcattaatcaaggcccctcgggcaaaataatgcttcttcctgaggatgatccaaatgccactcatatcatgattgccacggggaccggtgttgctccctaccgtggctacctacgtcgcatgttcat

SEQ ID NO: 111939 - DNA, 545 bp, Zea mays
  Clone ID: MRT4577_33576C.1
cgtgaacccgccccgacgcgctcatcgtcaacatcggcgatctgtttcaggcgtggagcaacaacaggtacaagagcgtggagcacaaagtggtggccaacgccaaggcggagcgcctctccgtcgcctacttcctgtgcccgtcgtacgactcgctggtcggcacatgcggcgagccgtcgccgtacaggccgtttaccttcggggagtaccggaggaaggtgcaggacgatgtcaagagaaccggcaaaaaaaattgggctccccaactttctcaaacagtctcccgttgacgccatgaatcacagcctctgtacttaacacgtacagtagtactgttgaaatactcaaatctcaccgtagaagcgtcgtgcgcccgcagtatggatccgggagataatccccccctcccccccccttttttttttaattctttctgtttctattctagttttctttcggcccttttgggcctaggtgataggtactataccacgcgataatgatggaggaatcaatggaatatataacatgatgctatggcg

SEQ ID NO: 111940 - DNA, 152 bp, Zea mays
  Clone ID: MRT4577_33577C.1
agccgcgattgcgcggtgatgtcactcgacccgatcacctcttcagatctccccggccggttcatctgtcggatcctggttgtcgctcccatgtcaagcttggttgacgtgcccgcgacagcgctacgtctaggagctgcactctatcctgg

SEQ ID NO: 111941 - DNA, 112 bp, Zea mays
  Clone ID: MRT4577_33578C.1
atcgtcggagaatcacagaatccagcgcatcgcagagacgactagaggttagatttaggctgaggtaagatggtgtgcatccggtaggcgaccatcgaatacctgctggcga

SEQ ID NO: 111942 - DNA, 350 bp, Zea mays
  Clone ID: MRT4577_33579C.1
gccggccggtctcgggcactatttgctttagaagtagacatgggagcctctaaatctcggagacacaaaagatggtcaccacgacggtgacaccataagccaccaaagttcagttggcccgcaactggttccagtccagagtatttttcatccgtcaccccagataagaagtatcgccaccctacaacattgccaatgtggacatgggcttagatgtctcaaaaaaaaggtattttgtaagacacagtactgtagcactgcaacacaaagagcatggaatttgttccgaacatgaggaactgttgtgacctgtatatttaaacgaaaaaaaaaaaaaaaaaaggccccta

SEQ ID NO: 111943 - DNA, 801 bp, Zea mays
  Clone ID: MRT4577_3357C.1
atgtcgaggggactaagaaacagaagtgcttctaagcttgaaaaagttgaggttgcctcaacttcatcttttggtgcagatgttgatcctagggaaatagatcttgccatgagaatcgccgaaaggatgttcctcaaaatgaaggaagatgaggcgaagaacaagattgaagaagaagaaaatgatcgatggagaccaaacgacgaatccacctcttcacaagaaagccaatcttccattgagctagagatttcaggaattagtgatatttctatcacacaagaaaataaagagctcaaggaagaagttggaaggctaagaaggagcttaactcttttgaagggaaagtgtcatgctcaaccttctcaagataaccgtgataacatggtgaaaaagcttgagaagaggacaaccgtagcatgcacaaaaccccttcaaaagaataccaagctttccaagaagggcatgagaaaaattcatgaccttgcacgatcaagaaagatgaccatcaataaagatgaaagcaaaaggcaaatgcattgcaaggacaagcaccacatttgctacaattgccgtgaaaaaggtcatctattcaagccacataggaaaaatgaagcacttgagaatgaacttaaaagatttcaccttgccttggaaaagatccaattatatgttttaaaaggaaaagagataacaaagaaggaagtctccacaaatgatgaaaagaagaatactaaggtgacaccaccacagataccactaaggaaaaagaagcacttgaggatatacatcagttgttga

SEQ ID NO: 111944 - DNA, 380 bp, Zea mays
  Clone ID: MRT4577_33580C.1
caatgacctgaaggaacaatacttttttcttttcatttcaattgttcattcatctcagtgctgacacttacactgacaagcattgtcatgcatcacacattatttctcaatgattgccgttaaattactcatctattttgcctcccactggttatattactacacatacagatccctacaccaactgatccagcaccctccaacattgccagttctggagctaatgctgcagaagctctggctctggctctcgtgctcacactctctgtggctcaacttttatagccacgcactctcggggctgaaccggatccttatgaacccaagcgagtttatgcaaatctggtaccctacgcttgttaacccattcaactggttcc

SEQ ID NO: 111945 - DNA, 352 bp, Zea mays
  Clone ID: MRT4577_33581C.1
gggtactattttttgtttgaacaagcattgcatacagtttccgttcccaacacctaaggaaagcggccaaaaaaaaatgccccaacacaagagacctaccaacagcacaagccatgcacaggtcaatcacacaaatatcatgggggcacctacttcccaaggttgaataaaaagcaaaaactaaactaaacctaaaacaaaaaacacataataaataaaaagacgcctcaacgtcattagaagcccaaggttttttaagaccccacaccccgggaaaaagcccaaaaagagtagaccaacaggcaccccattggctaattcccggacaggctagccaactagagatcaccat

SEQ ID NO: 111946 - DNA, 481 bp, Zea mays
  Clone ID: MRT4577_33582C.1
gtttcggcggccatacctctagtttataccccggatccccttactttgcgcgcgctagtagtagtacgccgcctgccgccatctcccggcctcgtccgttagactagtcgccggcgccatatggaggactacggcggcgtggcgagcctggtggcgtccggggtggtgttctggtcgacggcgttcctgctgctgcgggcgctgctccccaagcgctcctacgacttctgcaaccgcgcggtctccaccatgcacgccgtcaccggcgtcgccctcggctgcctctccgtgcaggactgggcctcccccgtctcccccgtcgcctcaccctcctcgccgcgccagatgagggcgctggcggtgacgctgtcgtacatgatctacgacggggcttgctgccacctgagccggcgacgcgcggctggacaacgccctgcaccacctcatcagcatcgtcggcctcgccgccgtcctcgcctac

SEQ ID NO: 111947 - DNA, 691 bp, Zea mays
  Clone ID: MRT4577_33583C.1
gggtacctcgccggcggccgggccctctcgcgcgccctgcgcattcctcttagtggcggcagcgccaccgagtcaccttgccgccccagcgtgcagctggggtgtctgtccacgacaaggcgtctgccttgctcgtagcgaaccagcaaacagcgaggggcctgtatgggagtcgcggtagcaagcggagcgcagccgagccccgaacagagtctcgcggaagcgaggaaaaggagggaggggaaccatggtccggtcccgggggcatctggccctgtctacgcggctgatgaacgtaggcctcgcttcgctctgccggggtggctggctcgaccgtgcggagtccgtcctcgtcgacgccatccgcctcggcctgcccccggatgtcgtcacctacaacaccctcctcgccgcgtactgccgggtcgacggactcgacgcggggctagccgtcgtgcaccggatgcgggaggccggggtgagacccgacgccgtcacctacaactccctcatcacgggcgccgatcgcagcggactcacggtccgcgcccttgacctgttcgacgaaatgctgaggtcaggggtcgcccccgattcgtggagctacaacgccctcatgcactgcctattcaggtccggccacccggagcatgcctaccgggtgtttgctgatatggctgaaaggggcgtg

SEQ ID NO: 111948 - DNA, 261 bp, Zea mays
  Clone ID: MRT4577_33584C.1
ctggttcctattcctgaaagtgtcagtgaaaacttagcggttaacattataaattataagcattgatcgataaggaaatacttttgtccaatgataaagctattgatatgatggtcttgatactagaccaaaatgtttgtttttgttgtactgaaattccgtttgtctgatcacgcacattctttaactaatccatccacaggggagaggaagtacagcgtgttcatcgtggttcttgcagttgtgctgcccactctagct

SEQ ID NO: 111949 - DNA, 205 bp, Zea mays
  Clone ID: MRT4577_33585C.1
gaaaaattctattgtcatttttgttttcttttggctggagatttattcaaagtggagatacacgcacgcgataaaaaaaaggaagactcaaggccatgtgcgtttggaacaagctcaaggtttttgagaagcggcacaaaaatttccacaccgaatgaattatgggggtacaaagcaggctataaggaataaccattttgtaagg

SEQ ID NO: 111950 - DNA, 627 bp, Zea mays
  Clone ID: MRT4577_33586C.1
tttatcgtccgcccacgcgtccggcgatcttccagagctgctgtttgcacgcactatactggcaaataagtttggagacgacttcgcaacgatggcaaaggagggcactggcgtcgtcgaccccatgttggtctggaagctatctggcaacaaaacaaacatggaggtcaagaaaaaggtggtgaaagagattgctgccgagaacaatgtgtcggtggacttctctgagcttcaagaagtggttgagcaggatggcagcggcaacgatccgcaccatcattagctcaaccacgaagctataaaccaaactgacatgaatggaagttcagagtcaaactcttggcattctacctctcacatgtttccaactcggatgaagcaaacaatggccatccgaaacaaaagaacatggaagtgcgcacaagaagatgaactttcagagcatccagctcagatgcaacaagccagaatgaggaaatgctacgtttagcttccacacttaccaagttatgggtgtgcacacagcacacgttaaatctgtaactgtaaagcaactaacaatgtccaattacttgagtccatataaaaaattttctttcatcctctctcctcttaatacctcacata

SEQ ID NO: 111951 - DNA, 200 bp, Zea mays
  Clone ID: MRT4577_33587C.1
gctcgctcattcccatttccatccccggacccgctcccctcgtcggagctgcgccgccgccgcgctcccaatccgccggcgccgcccatgtgaaagacgccggggaagacgccgcggccgcccgggcggatcctggagtgctacgccctcgaggggtccggcggcgtgctccgccctgcggacgggtggggctggtgaca

SEQ ID NO: 111952 - DNA, 402 bp, Zea mays
  unsure (1)..(402): unsure at all n locations
  Clone ID: MRT4577_33588C.1
tgtgtaaatccttttagggtttatttgttactctaggattcacctcattctatatatatgaagttgattgaggtagaaatttatacttcagtccacctcaatacatgtaaattgagatgaatactanagtacataaacaagatttggacaggacctacttgagaatgtgtaaaaccaccttcctctctctccgcttctcactttggcgacggcggcggtgcgtcagtgacagaaagagaattaaggaaaaagacgacgtcttgtccaatgcacgtggattaaggttaaaacgaatatttcttagggattgaggagatgttgtgatggattgaaaaagggggaaaaagatgattgagataggatatgctggagcggctcttttcacctaattcggacgcgtgg

SEQ ID NO: 111953 - DNA, 312 bp, Zea mays
  Clone ID: MRT4577_33589C.1
accacagacagaataaaacccccatccttatgttcaaacacaaaatgttttgtgtcaaaaaaaaaactgggacaaaaaaagttcatacccgggggagtttttcaaacacacgtggaaaaaaaaaaggttttttgaaggctggagctgggctacaaaaaaggaaagcgggatcactgttcccccacatttgccagtttggttccaccataaattttttcccccttccaccctaatccaggatgcgacgggcccctttttttgcccttaaaaccacgggcattccggagggggggcttaaaatcgggggaataa

SEQ ID NO: 111954 - DNA, 1359 bp, Zea mays
  Clone ID: MRT4577_3358C.1
atgtcggggggactaagaaacggaagtgcttctaagcttgaaaaagttgaggttgcctcaacttcatcttttggtgcagatgttgatcctagggcaatagatcttgccatgagaatcgccgaaaggatgttcctcaaaatgaaggaagatgaggcgaagaacaagattgaggaagaagaaaatgatcgatggcgaccaaacgacgaatccacctcttcacaaggttcatctttcaaattcacttctcatatgtgctttgtcgctaatgggagtgacagcgaaagcgaaagtgaggatgaggaggagcaagaaagtgatagtgaagatgaggatgatcttcaacaattcttcgctcagctaagcaagaaacatcggatgagctttctcaaactcatgaaaagagcggaagaacaaaaagaaatgcttcataagcaagaagacttcctcatcagaaaaatcgaagacttagagaagttgaccaaagagcatgagaagctaaagtgctctcatgatgatttggtccaaaggtatgaagacatttcaattgagcaaattaaagctgttaatcatttatcatatattgctcaattagaaaataaaaatgctatgttcaagaacacgatagaaaagttaaatattaaaaatctagctttgcaagaaaaacatgatatgcttgtgtgctctcataataaatttatggattcatatatcatgttagaaatggctcatgaggttgtgttaactaatttgaaatcataccaacctcacgtatgcacatgtactcaaatagaaactatattaccatgtgctaacaattgttgttatcaagcaagccaatcttccattgagctagaaatttcaggaattagtgatatttctatcacacaagaaaataaagagctcaaggaagaaaatgagaggctaaaaaggagcttgactcaattgaagggaaaatgtcatgctcaaccttctcaagataaccgtgataatatggtgaaaaagcttgagaaggggacaactgtggcatgcacaaaaccccttcaaaagaataccaagctttccaagaagggtatgagaaaaatccatgaaaaatcaaagagaagcgataggaggtgctatggatgcaaggagaagggccatgaaattgattcatgcccccacatgaagaatcaagaccttgaacgatcaagaaagatgaccatcaaaaaggatgaaagcaaaaggcaaatgcattgcaaggacaagcatcgcatttgctacaattgccgtgaaaaaggtcatctattcaagccacataggaaaaatgaagcacttgagaatgaacttaagagattttaccttgctttggaaaggatctaa

SEQ ID NO: 111955 - DNA, 396 bp, Zea mays
  Clone ID: MRT4577_33590C.1
ttgttctagacgcgagagctcgcccttcgttgagtttttacaatagaagcgccaggagttgttcaacgcattacaatggccagggttccataatttggcgcaggaaaaaggccgggaacagggcttgttctactactaactggcgaagtaggggcgaaacgaagaacttggacctcctcaggctttggacaggttacgcttcgaatgtgacgactttgtacacagatggttcgtgattctcaggatacgcatgctcaacaaggctccaaacaacatgagctcgtgagaatgtgtaatacacacactggtgaacgcacgagaggctcttaataatggttaaaggcaagacaaacttttatgaactatacggactgacccagttttacccctagcctt

SEQ ID NO: 111956 - DNA, 414 bp, Zea mays
  unsure (1)..(414): unsure at all n locations
  Clone ID: MRT4577_33591C.1
ggacctttgggctgatttatgtgcttgtttatgtgcttgaggatttccgtcgatcataatacttagaaggagagtatttcttatccggcgtcgtgctccacgggcggcacgtagactcccgcgaaaatttccatcggtaagattactatctccgaggcggagctcctagacattaccgataacgctaaggttaagacttaggataaggagggtactttgttggattagtagtgctccactcccgttggtaagtagtcggaggacggatgtatttccgtggaccataatacctagaaggagagtatttcntattcggcgtcgtgttctaagggaagaacgtagactcctgcgaaaataccgatcggtaagattactattccggaggccgagagtcctgatattaccgacaacgcg

SEQ ID NO: 111957 - DNA, 278 bp, Zea mays
  Clone ID: MRT4577_33592C.1
atactgctcgatggtggcttgtcccccccagtttctgttcgcccacctcgcgctaccaccaaagagggttcatttggctgaatgagggatttctatcccggcctcctaggtgtaactcatcaagcatgccaagatgttgatattaattctaccacacaagcaatcgcgcgtccagcctgaataacatatgcaactcggaaatggacacaggctaaaggcgaccaaccagtgcctacataggcgccggttggacgacctcctgaccctgcagactaact

SEQ ID NO: 111958 - DNA, 468 bp, Zea mays
  Clone ID: MRT4577_33593C.1
cattgggtacctcgaggccggccgggggaacactcgctccccgacggctcgtggggcgacgcggccctgttctccgcgtacgaccgcctgatcaacacgctggcgtgcatcgtcacgctcaccaggtggtcgctggagcccgagatgcgcggcagagggctctctttcctcggccggaacatgtggaggctagcgacggaggacgaggagtccatgccgatagggttcgagctcgcgttcccttctctcatcgaactagccaagagtctgggcgtccacgacttcccgtacgaccaccaggctctgcagggaatatactcgagcagggagatcaagatgaagaggattcctaaggaagtgatgcacacggttcccacatccattctccacagcctggaagggatgcccgggctagactgggcgaagctgctgaaactgcagtcgagcgacgcgcccttcctcttctct

SEQ ID NO: 111959 - DNA, 1851 bp, Zea mays
  Clone ID: MRT4577_33594C.1
acgcccacgcgttcgcccacgcgtccgaaatgaagaaaataaaaatagttgcaagaaaatttcctcgctccaacatcagctagatttatcatccaaggatcaagaagctcagcaaaatattctttctcagatagaagaagtgaagagggagaatattttactacaggcaaagaacacagaaatggaacaagagctcttaaaagctcaaaaatgtagccatgataatatggacaagttgcacgatgtggaaaagaactatgttcatctccgggataacttgaaaaacttagaggataagatctcaaatttagaagatgagaatcatttattgagacagaaggccttgaatttatctcctaggcacagccgaactgggagttatcactgcggttcttcaccatgcagcccaaaatcattcgttgaatcttcacctgtgaaacttgcacctccccctcataaccagacagaatcaagaaggtcgaggatgaattctgatagatatgaggattaccatgatgtgctccaccgctgcatcaaagatgatatgggattcaagaagggaaaaccagttgcagcctgtatcatttacaaatgccttctctattggggagtatttgaggctgaaagaacaactatttttgacttcataattcacacaatcaataccactctgaaggcagaaaacgagaatgacattttgccctactggctagccaatacatctgctcttctatgcatgttgcaaagaaacttaaggtcaaaaggattcatcatggcagcctctcgatcgtcttcggatactcacttaagtgaaaaggcaaatgaaacattccggactcctttaagagcctttggacaacaaataagcatgtcacacattgatgctcgatacccagccatgctatttaagcaacaactaactgcttccttggagaagatctttggcttaattcgtgacaatctaaagaaagagatatcacctcttttaagcctttgcattcaggcaccaaaacttgctcgaggaggcagtggaaggaggtcgagatcacctgatgtagccttgcagcaaccgataagtactcattgggatcggattgtgaaatttttggactcattgatggatagactacacaaaaattttgtgccttcttttttcacccgcaagctagtaactcaagttttttccttcattaatgtgcagctgttcaatagtatgctcctacgacgagaatgttgcacgggttcaaatggagaatatgtgaaatctgggctttgtgtgctggagaaatggattgtggacactgaagagcatgcaggtgcagcttgggatgagctgcagttcattaggcaagcggttgactttctgatcattccacagaaaagcaaaaagaccattgagcagattaagaaaaatatttgcccggcattaagtgtgagacagatatatcgcttatgtacgatgtactgggacgacaaatatggtactcatagtgtatcagctgaggttgttgccagaatgagggacatggtgagtaatgacatgcaaaatcctgtctctaattcatttcttttagatgatgacttaagcattcctttcacaaccgaggaaattgcagagcaagtaccagatgttgacatgtcaaacatcgaaactcccgcatctcttcgtcatgttcattctgctcagttcttgacgcagcaccttcagccaccttatacgtctcgatgaattgcctaggtttttgctttggtaacaattagtgatgccgaggtagtgaacttagaggatttgataggtcggtggtaactataaccatcattgttgatttaatccatgctaatattcattcc

SEQ ID NO: 111960 - DNA, 779 bp, Zea mays
  Clone ID: MRT4577_33595C.1
attgggaccctcgaggccggccgggcaagtcgtatacacccaacaatttagaccagtgggctattcctcttcaagcccaatctacctcccaccaagcccttaatctgtcgatcaatcacttcgtgaatctttcccccttttttttgtctaggtctaccggcctcgctatccccctcccccaggagtagagccttactgccaccccatacccccgtgccaactagctaggagcgcgagaagaggaaccaaatctgaccccgaacacaaccatcatccccacaaaatacactcacactttcactcgccagatattgacaatctgtaaaccgcactgcctcaatgatactgactgtcgctccaggcctccccatcatatgctcaaacactacgaaccttgtgctagagtcgtccaaactcagccagtactcagccatcgcaggaatccgatcccgtgaactttgtgcattcatccttcattggccaggctgaccaaaacgctgatatgacagaaaagagactgtatcgcgctatacgcgatcgtcaaatcctgcccatcctactccctgaaactacttccgcctcaaaaaggcacctatgccgagtttcttccccgtgtgagagactcggcaaaccgtcagctgtccttctaggtgcacagattgacctggaacgactacattgacactggcattgacgtcatgatctatgtcttcgatcaagcactcctggacggtgtcgataacgctctcaattacctacagaatatggggatgtttaac

SEQ ID NO: 111961 - DNA, 173 bp, Zea mays
  Clone ID: MRT4577_33596C.1
ggctaacccattggattaagtaactgtgcaggggcggcgtttgctgccatacaaccggggtctgtgtgctgtctcctgctcttgtcgcggcgcttccctttgttgggggtgccttctggtgcgtggcttttgttttggccgggttcgtgtcgcccttgtcccgccttgtgttt

SEQ ID NO: 111962 - DNA, 190 bp, Zea mays
  Clone ID: MRT4577_33597C.1
ggagagggggggggctcacgaagagcaccctagtaacgcgaagccaaccgttaacaatctaggtcgctaatcgggctgcccctcccggccgaattgtagtctggagacgtgtcctcagtgacggaccgggcccaagttctctggacaagggactcctgacagggtgagagccccagtccgacccggacca

SEQ ID NO: 111963 - DNA, 270 bp, Zea mays
  Clone ID: MRT4577_33598C.1
ctcacgcgtgcgctgacgcgttggaactcgaagggttactatgcctaggaggctgcccgtttgaccgcccacgccatcatgatgaacaagtctgggcagattgtcaacgcctatgcctgagcgctagactgcgatacctccaacatcgtctgcaaggttgctgagctcattaccaacatcgacaggcgatctgtcacggagctcgcgaaggagtctaagtttctgaagaacggatatgctggtatggtgaagatgatttacaccaagcct

SEQ ID NO: 111964 - DNA, 285 bp, Zea mays
  Clone ID: MRT4577_33599C.1
tatgacgcttgggcatcgtcgtcaccgacaagggacaagggatgcaggtactccaccaaggacttcaagggcagcgggcccggctgcaaggtcgacaccgttgacaccaccggcgccggcaacacatacgcaagcctcactacatcaaaacagacccatgggcgactgactctgacccagctaggagaggctacgaggggctctgatgggctcctactcacgagtgccagtgtggaccatcaagaagggctccatccccgggctgtcgagagtcactatcgccca

SEQ ID NO: 111965 - DNA, 1539 bp, Zea mays
  Clone ID: MRT4577_3359C.1
atggatgctcaatatgatgtgactcaagaatggcttgatagggtgaagatagcaaggaaagggcttcgaggaactaagcgaagtctgcggtcagtctgcgcgtcagtctggcagtcagactggcagacaggctgccagctttggtactacatcgagttctttgtggattcattactcttggagcttgtagctcctagacgactaggtgtctcttatattgatcctagggcaatagatcttgccatgaaaatcgccgaaaggatgttcctcaaaatgaaagaagatgaggcgaagaacaagattgaagaagaagaaaatgatcgatggagaccaaacgacgaatccacctcttcacaagctaatgggagtgacagtgaaagcgaaagtgagaatgaggaggagcatgaaagtgatagtgaagatgaggatgatcttcaaaaattcttcgctcaactaagtaagaagaaccggatgagcttgctcaaactcatgaaaagagcggaagaacaaaaggaaatgcttcataagcaagaagatgtcctcatcgaaaaaatcaaagacttggagaagttgaccaaagagcatgagaagctaaagtgctctcatgatgatttggtccaaaggtatgaagacatttcaattgagcaaattaaagctattaaacattcatcatatattgctcaattagaaaataaaaatgctatgctcaagaacacggtagaaaggctaaatattgaaaatctagctttgcaagaaaaacatgatatgcttgtgtgctctcataataaatttatggattcacatatcatgttagaaatggctcatgaggttgtgttaactaatttgaaatcatgccaacctcacatatgcacatgtactcaaatagaaactatattaccatgtgctaacaattgttgttatcaagcaagccaatcttccattgagctagaaatttcaggaattagtgatatttctatcacacaagaaaataaagagctcaaggaagaaaatgagaggctaaaaaggagcttaactattttgaagggaaagtgtcatgctcaaccttctcaagataaccgtgataatatggtgaaaaagcttgagaaggggacaactgtagcatgcacaaaaccccttcaaaagaataccaagctttccaagaagggcatgagcaaaattcatggtaagaaaattaatgctcatactatttgctctaacaatgtacctatgtgcttcaacaaagaaagatcaaagagaagcgataggagatgctatggatgcaaggagaagggccatgaaattgattcatgcccccacatgaagaatcaagaccttgcaggatcaagaaatatgaccatcaaaaaggatgaaagcaaaaggcaaatgctttgcaaggacaagcatcacatttgctacaattgccgtgaaaaaggtcatctattcaaggattgtcccatgagtaagtatcctaagcctaccatgtcaattctttcatattcgcttaggagacccaaaatgacatttgtgctagaaaggtaa

SEQ ID NO: 111966 - DNA, 477 bp, Zea mays
  Clone ID: MRT4577_335C.1
gttcgttagagtaacatcatttaccacagacttctgagttctggtaaacttcacactttaccttgttcgctactgcttgttgtgactttaatctggctggtggctgcggtttctacgttattttatctctatgaattgcagcgtgtagctatctgactatccgagcatgagtcaccgttgcaagctgatcaggagttctttcctctctctatatatacaagagtctaagcacgatccaaaacaaaagtctatgaaatgagtaaaataaaactgttttatcctacacggctaaactggttggggatggaggacaagagcggacgacggacggagcagtgcagctcaggctccacagcggagcggagtcacccttgcaagctgatcaggagggctccggaggcaccgcgcgcgacggtgccgggcgccaaataaggggggcggcggcgacggaagcccagcttcatgacgaactccttg

SEQ ID NO: 111967 - DNA, 281 bp, Zea mays
  Clone ID: MRT4577_33600C.1
ccggcccccttctctcggtttttttttttttttttttttttttcttgtgttttttttttttattttttgagatgtatggtctacaatcgttacatttcgacgttctccaccatgagcaaccgtagcttttgatgggggcagaatgacgacgactggctcaatctcataactagtggtcataaaaggtgcgacaagcctggcgaaccaaaaacacaaagagagggagtgttattttattacgcttttttattgtgcccctatcgggcccagcaagcatcctt

SEQ ID NO: 111968 - DNA, 315 bp, Zea mays
  Clone ID: MRT4577_33601C.1
aaaaaaaaattgttttttatggttttaccaatttttcaaaaacacaccatccacaaaagttacttttattaccaagacaaaataccccacattaactgctggggcttttttcaacaatttttgtttgggcgtagaaagatcatcgtttgagtcgtgcccaggaccaaggccccccattttgcagaaggaatctctatcatgtgaagaacacagaccccttctggcttgatccccccgttttttatgaaaactcggaccgacttatgggtgctcaaccccattgaaaactggattttggcttacaccccaagctga

SEQ ID NO: 111969 - DNA, 1581 bp, Zea mays
  Clone ID: MRT4577_33602C.1
aattcggcacgaggctctgctttctttgtgctctctttctgccgtaaccatcatcttcttcagttgttcggtcgcccccagtggctcaccgtgaagggtcgttcgcactcctatgtacacaaggtaagggaggagttggaaagtatgggttgccaaattaaaaccagctgtgaaatcaaatctgtttcaagttctgagggaggtttcagggttacagtgtttgatggttcagaggagacgtatgacagaatcatatttggtgtccatgcacctgatgctctaaagattctaggagctgaagcaacacatgaagaattgaggatcctaggagcttttcagtacgtctacagtgatatatacctccactccgataaaagtttgatgccacggagtttgtctgcttggagttcctggaacttcctggggacgacaagcaagggggtttgtgtaacctactggctaaatctgcttcagaacatagaatctacaagcagaccttttctggtgacgctgaatcctcctcatgtcccagaccacgtctttcttaaatggtacactagccaccctgtcccatctgtggctgccgcaaaggcttctcttgagcttcatcacattcaaggaaacagaggaatttggttttgtggggcataccaaggttatggtttccatgaagatggactcaaggctgggaaagctgcagctcaagatttgcttggtaaggagagtgaccttttggtgaacccaaaacagatgatcccatcgtggtctgaggctggggcgcgtcttctggtaacaagatttcttggtcaatatgtgtctgtcggcaacttggtcttgcttgaagaaggaggcactatgttcagttttggtgaagtaggcaaaaaatgccatgtgaaatctgtcctgcgagtacatgaccccatgttttactggaaggttgcaactgaagcagaccttggcttggcagatgcctacattaacggttatttctcatttgtagacaagagagaaggtcttctaaatcttttcctgattctcattgcgaacagggacgcaaacaagagtagtagcagcgctgctggtaaaaggggttggtggacacccctgctattgacagctggggttgcctccgctaaatacttcctgcgtcacatagcaaggaggaattctgtctcacaaacacgtcaaaacatctctcaacactatgatctgagtaatgaattcttctctcttttcctggatccatcgatgacttactcttgtgccatcttcaagacggaggatcaaagcttagaggcagcccagctacagaaagtttgcctcctaatcgataaggctaaagtggagcgagatcaccatgttcttgagattggctgtggttggggcagcttagcaatccaattggtgaagcaaactggttgcaaatacactgggatcacattatcagtggagcaattgaaatatgcacagagaaaggtgaaagaagctggattagaggaccacataagcttcatgttgtgtgattaccgtcaaataccaactcagcgcaaatacgacaggatcatctcttgcgagatgatc

SEQ ID NO: 111970 - DNA, 843 bp, Zea mays
  Clone ID: MRT4577_33603C.1
cctcgaattcggcacgggggccctcccctcccgtcgcgtcttttctcctcccttcccgtattttctgctccccccctcttctcccccgtcgccggcgagagctcgggcggaggcgccacagcacccgcaggagagcgtttctccccgggaaaaaggggggccctccggagcggagggctctttcttcctctattccccaagggctgctgccgctggattgggctgaaagatctcggttctatttccgaaggaaggatttctcgtcgcgaatccggatctgtcggtggtgggaagttgcctcttttatgtggcgaggctgtgagaaacccgtgtgcctcccatggacgtgctgagccctgattggcgcaccaggcgagaaggggcagcaggcagtaggtggtgacagagcaggaagacgagggagaggagacagactgtcggtatagaagacaagcaggcgacaataggaaggacaaaggagaaggagaggagggagctctccatgggggagcccctcctcacctccctctccatggaaaacagcaacagccacccctgcacgctcctctccatggaccctgccggttcacgcccggcctctgctgagtcttcgggtggcggcggcgctgccaccaatggggttggcagtggtggtgatagggaactcttcatcgttccacggcgtgagtcggcgcacccaggcccgccggacatcaacctcccgctctctgcagatcccttaccgccacctccgtcgtggagcctcgacacgtttgacatacttgatgtcactcttggaacacacaactatgagtccgaggtcgcacttacgcttccaagtcg

SEQ ID NO: 111971 - DNA, 2791 bp, Zea mays
  Clone ID: MRT4577_33604C.1
ccacgcgtccgccttcgaggagtactacaaggagcagcaaattgtttctgaggaagagtgggatagcttcatgagcatgctccggaagccattacctgccacttttaggattaatgcgagctgtcaattttttcaagatatctgctcgcaattggaaaacgacttcaggaaatcattagagactgaggtgaccgatgatcatgaagaagatgctattcggcctttgccttggtacccgggtaatcttgcatggcatttgaacttttctcgaatgcagctgaggagaaatcaggcacttgagagttttcatgaattcttgaagcgagagaacgaagttggcaacataactaggcaagaggctgttagtatggtcccaccactgtttctgaacgtgcaacctgatcatcatattcttgatatgtgtgccgctccaggatctaaaactttccagttacttgagatgattcaccagtcaacgaagcctggactgcttccaaatgccctggtggtagctaatgatgttgatgtgcaaagatgcaatcttcttattcaccaaaccaagagaatgtgcacagctaacctgattgtgacaaatcacgaagcacaaaactttcctggttgtaatcttgcaaagttctgttcaaaaatgtgtatggatgaggcaaaggtgcagaggttggagtttgatcgcgttctttgtgacgtgccttgtagtggcgatgggactgtccgtaaggctcctgatatgtggaggaagtggaatgctggtatggggaacggacttcatcacctgcaagtggaaattgctatgcgtggtatgagcttgctcaaagtgggtgggaggatggtttattcgacatgttcaatgaaccctgttgaaaacgaaggcgttgttgctgagattttgcggagatgtggggactctgttgaacttcttgatgtttctaatgaactacctgaattagcccgtcgtcctggacttagcacctggaaggtacgggatagagggtcttggtttggtgttcatgaagatgtacctcgctacaggaagcatgtgatatcagcaagtatgtttccttctgggaaaggcagcaaagatagtggtacggggagcagcagcgttgaggtcaacacagatgtagctgatgcagacatgaaggattcaacagacatgggagagggagaacaagaaacaactgtaacaattgatgacagcaataatggtgacaatctgaaaaccgaagagggaactaaagttgattgcgagtctggtgaagtcacaactagtagtagttataaaaagttaaattctacttccatccgtacggaacattcagattacccactgcatcgctgtatgagaattgttcctcatgaccagaacagtggggcatttttcattgcagtccttcataaactctctcccctgaatgagaaccaggtggtagatggtgtcagaattgaccagaatatctcaaaagacaagactgagaaacttgagaaggatttagtatcacataaggcatcatctgaagaaaatactgtgcatcagcaagtgattgataatgcaaatgttctggatggagaacagaatagagacagggataacaaaagttcagaagataagagctcagaggattctaaggtcaatgttaatgaggcagcaaagggtcaagcaggaacaagggataggaggaggcagcaaaaccaaggcaggtggagaggggttgaccctgtgatattttttaaagatgaagtgacagtcaaaagcattgtatctttctatggtatcacagattcatttccacttgaaggtcatctggtgactagaaaccctgatactagtcatgttaagagaatatactatgtgtcaaaatctgttcaagatgttttggagctcaacataaaaattggcgaaaggctaaagatcacctcactgggcctaaagatttttgaaaggcagtcttcaaaggaaggctccccatgcacatttcggttgtcatcagagggattgccgctcctgcttccatacatcacaaaacagattctatatgcatctgcaattgacttccaacatcttttacagtacaggactattaagtttcctgatttcgtggatgcaaaatttggtgaggaagcttcagctttgcttccaggttgctgtgttgtagttttacgtgaagggcatcaggatataggatccatagctacagatccctcggccattgccattgtttgctggaaaggaaagaccaatttgtgcgtcatggtttctccgctagatggtaaagaattgcttgagaggatttctttgcgccatgggctcaaaatccccaaaggggataaagagaaacccagccaggagattgctggatcagacgagctgcttgattgtgccactgaggtggacgatcaagagtctcttcctgaaagcaaagcatctgacatcgaaatttcagatgctaaggaggctgagtagcttttgttttatgtcactacgcatattacacaggaggtagctgtatcctcgagatggctattagcttttttaagtcacttcggttgccaagggagagagatgatagcccaccacatgggaatgacagactcaaaacaccatctggtaatcgttcacggtgacacagaatctatagacttgtaacttcttggttttatttcttcgagaggatgtattgcatcgattttaatttgttgcactcaacacagaatctagtaaagattgagaaaaacattttttttgagaaaaaaaaaaaaaaaaaaaaaaaaaaaa

SEQ ID NO: 111972 - DNA, 347 bp, Zea mays
  Clone ID: MRT4577_33605C.1
atggttacagtttacggttttgttttttccttcagaaagaaaaccgcccagatttcagggttttaaccacctcgactttcaattttacagccgtttatgttctaacccaaagggtaccattggaatctgtttccttgactggacaagagtttttccacagcttttacaaccatgcgttggctgaacaaacaccaagagccggttcaaacattgtaacctggcctacctttgagacccttttttaagatcaccaaccagagagggggcactggcttacaacacaatttgcaggtacaaaaccattgtttatgtacggggggggtttttccttgacgtcttcaaagagt

SEQ ID NO: 111973 - DNA, 731 bp, Zea mays
  Clone ID: MRT4577_33606C.1
gtggtgtttcaacttatgcccctaattttgttggataattctaccttctaatagtttccccttttttatgaagcactcaaccctggcatatatgaagtttattttcttctaaagtgcctatatatataactggtaaaaaaagtcaataaagactgtaaaatacaaaggcagactatatatagaccattgtaaatttttggtacaggctacagcaaagttcagacaacagtactacaaatgacaacaatttcaaacaggacttgaaaagtgacaagagcttttagtgaagaaacttgcaatcaataacatcataacgtacttcaaaacatgtcaattattattgttctctagtaacatttttgagtaattttcgtcgacttggtttgatgataatgcaggaattgctgaaataagtcaaaaggtacaagtcagtgtgccatatcacaacacaacggtaaaggctatctccagcatatcccgctccctatctcacttcctattttgaacttcattctgtaaacaaaactttgcacacccgtatacacgctcctgctggagatggcctaagatgtgcctgaatcatgatgtggattatcgtacaatttttcccaaatgcctaaaacagcaattgaatgcccaattgcctatgtgtaaatttgagactcagtgatgccacattcaaaactgtaaacatgcgatgtaccatgccctaatttaaaattctgaagtca

SEQ ID NO: 111974 - DNA, 3178 bp, Zea mays
  Clone ID: MRT4577_33607C.1
aattcggcacgagggtcagaactcagaagtaaacccctcctagtctgtcgtctctcttcgcacgccgccaccgagaggacgaaggagcgcgcacgcgcgtgacagagtggtaagatgggaggcgggcggaagcgcgggcgcacgcagcgccgccacttcaagcagggccgcgagaacgtctggaagcacaaccctcagcgtcctcccgccggcgaaggaggagaggcgcgagaggacaatccctcgtggcagcccttcgctaccgagaacccagccttcgaggagtactacaaggagcagcaaattgtttctgaggaagagtgggatagcttcatgagcatgctccggaagccattacctgccacttttaggattaatgcgagctgtcaattttttcaagatatctgctcgcaattggaaaacgacttcaggaaatcattagagactgaggtgaccgatgatcatgaagaagatgctattcggcctttgccttggtacccgggtaatcttgcatggcatttgaacttttctcgaatgcagctgaggagaaatcaggcacttgagagttttcatgaattcttgaagcgagagaacgaagttggcaacataactaggcaagaggctgttagtatggtcccaccactgtttctgaatgtgcaacctgatcatcatattcttgatatgtgtgccgctccaggatctaaaactttccagttacttgagatgattcaccagtcaacgaagcctggactgcttccaaatgccctggtggtagctaatgatgttgatgtgcaaagatgcaatcttcttattcaccaaaccaagagaatgtgcacagctaacctgattgtgacaaatcacgaagcacaaaactttcctggttgtaatcttgcaaagttctgttcaaaaatgtgtatggatgaggcaaaggtgcagaggttggagtttgatcgcgttctttgtgacgtgccttgtagtggcgatgggactgtccgtaaggctcctgatatgtggaggaagtggaatgctggtatggggaacggacttcatcacctgcaagtggaaattgctatgcgtggtatgagcttgctcaaagtgggtgggaggatggtttattcgacatgttcaatgaaccctgttgaaaacgaaggcgttgttgctgagattttgcggagatgtggggactctgttgaacttcttgatgtttctaatgaactacctgaattagcccgtcgtcctggacttagcacctggaaggtacgggatagagggtcttggtttggtgttcatgaagatgtacctcgctacaggaagcatgtgatatcagcaagtatgtttccttctgggaaaggcagcaaagatagtggtacggggagcagcagcgttgaggtcaacacagatgtagctgatgcagacatgaaggattcaacagacatgggagagggagaacaagaaacaactgtaacaattgatgacagcaataatggtgacaatctgaaaaccgaagagggaactaaagttgattgcgagtctggtgaagtcacaactagtagtagttataaaaagttaaattctacttccatccgtacggaacattcagattacccactgcatcgctgtatgagaattgttcctcatgaccagaacagtggggcatttttcattgcagtccttcataaactctctcccctgaatgagaaccaggtggtagatggtgtcagaattgaccagaatatctcaaaagacaagactgagaaacttgagaaggatttagtatcacataaggcatcatctgaagaaaatactgtgcatcagcaagtgattgataatgcaaatgttctggatggagaacagaatagagacagggataacaaaagttcagaagataagagctcagaggattctaaggtcaatgttaatgaggcagcaaagggtcaagcaggaacaagggataggaggaggcagcaaaaccaaggcaggtggagaggggttgaccctgtgatattttttaaagatgaagtgacagtcaaaagcattgtatctttctatggtatcacagattcatttccacttgaaggtcatctggtgactagaaaccctgatactagtcatgttaagagaatatactatgtgtcaaaatctgttcaagatgttttggagctcaacataaaaattggcgaaaggctaaagatcacctcactgggcctaaagattttttggttctcatatacctttgcactctttcaggaaaggcagtcttcaaaggaaggctccccatgcacatttcggttgtcatcagagggattgccgctcctgcttccatacatcacaaaacagattctatatgcgtctgcaattgacttccagcatcttttacagtacaggactattaagtttcctgatttcgtggatgcaaaatttggtgaggaagcttcagctttgcttccaggttgctgtgttgtagttttacgtgaagggcatcaggatataggatccatagctacagatccctcggccattgccattgtttgctggaaaggaaagaccaatttgtgcgtcatggtttctccgctagatggtaaagaattgcttgagaggatttctttgcgccatgggctcaaaatccccaaaggggataaagagaaacccagccaggagattgctggatcagacgagctgcttgattgtgccactgaggtggacgatcaagagtctcttcctgaaagcaaagcatctgacatcgaaatttcagatgctaaggaggctgagtagcttttgttttatgtcactacgcatattacacaggaggtagctgtatcctcgagatggctattagcttttttaagtcacttcggttgccaagggagagagatgatagcccaccacatgggaatgacagactcaaaacaccatctggtaatcgttcacggtgacacagaatctatagacttgtaacttcttggttttatttcttcgagaggatgtattgcatcgattttaatttgttgcactcaacacagaatctagtaaagattgagaaaaacattttttttgagatatctctgtgtaggttcactacgaatgctgaaatctgacattttccaggctatctagttcctatgctaaaaaaaaaaaaaaaaaaaaaaaaaaaaacaaaaaaaaaaaaaaaaaagcggcc

SEQ ID NO: 111975 - DNA, 3057 bp, Zea mays
  Clone ID: MRT4577_33608C.1
atggcgagagtagcgtgtacccttcgtggcaagaggttggacggtggtgtatctgtgctctcggttggcgtgaacccagtctgggttgtccaagatatggcacgtacgaggaaaaccacgcgcaagtccactggaccttttggcgtgcctcgtcatcagttagcccccagacatgaaggaagcagtagcggcggcaacgatccaatcagagatttggaagccaaagtggaacagctttggacagagctacgtcaccgaaatagggtgtgggcacaggacagtcagcgcatagctaaattgtcagctgacatcagacgcttgcaagacaaactttctgaacgggatctggcggttgattgggccgtcaactcacgttcggttgcttgggatcgcgaagcaaaagctcgagctcgtgtgactaagcttagtgcggccctcgatagtctgcaagtatactgcaatactttacatgaggaaatgccatcacggactcgcacgcacgacagtgcggggacttcctgtggtcgggaagatactcccaacccgccgcctgtaccaccgacactggccgaggctatcgctgccttggtcaatgctactgcatataatacccgcttcttgcgcgagatagtgggaaatcagttccagcagcatggcaggagaattcctccacaaggattgcgtgaaacctcttatctggaattctctgagacgtgtcccccgctctttgttaaagcagaagaccctcttgaagctgatgagtggataagagtaatggagcagaagttcggattgatctgttgcaaagagacacagaagccgttatttgctgcccaacaattgagaggccctgccagtacttggtgtgcaaattttgtagcagttcaaccgactggacatcagatcacttgggaggaattcaagctagcatttcgtgaacactatgttccagagggagtgcttcacatgaaacaagaggagttcattcgactaaagcaagggggagatactgtaatgcagtatctcaacaagtttaatcatttgtcccagtatgccatcgatcaagtaaatactgatctgaagaaaaagaattgcttcatgaggggacttaatgacaggcttcagaggaaaatggcaacctgtctggatattccttacagcagagttgtcagcacgacattggctgtggaagccaagaacacagaccatggaaaatcaaagagatttggaggtgacaggtctaatcagggacctgagaagcgaactaggttggtattcattaggcccagttcatcaccttggggatgtcccgcaatttttgtcaagaagaaggatcaaacacttcgaatgtgcgtggactacagacccttaaatgaggtcactattaagaacaagtacccgctccccctgatcgatattttgttcgatcaacttactggagctcaggtattctctaagattgaccttaggtcagcctttgagcagctgaagatattattgaccactgctccggtattggctcaaccggtcattgaaaagccttttgatgtatactgcgacgcatcagatcataaaagtttgaagtatatttttaccaagttagaactaaacatgaggcaaagaagatggcttgagctaattaaagattatgatttggaaatccactaccacccaggaaaagctaatgtggtggcagatgcactaagtcgcaaggcttcctgccattttcttacagtaagggcccctaacatcacattatgtcaagaaatggagaagttaaacctgggaatgaaacaacatggaactttgacccaaataaagcttgagtcagttcttctacaaaagattattgatgcccaaagaagtgacaagtgtatggaacatattcatgagaaaatagaagccggtaaagctagctgctttagaaaagatgaccaaggaatattatggtttaatgatcgcatagttgtgcctaaggatgtgagagtccgccagcaaattttggatgaagctcatcttagtcgatattctattcaccccggaagtactaagatgtatcaagatttaaaacaacactattggtggacaaaaatgaagattgagattgcacgctatgtagcgagatgtgacacctgtagacgtgtcaaagccatacatatgaagaccgctgggccactgcaatctttacccatcccaacttggaaatgggaagacattagtatggatttcattgtaggtttgcccaaaacagccaaaggttttgactccatatgggtcatatttgatcgacttacgaagattgctcacttcctgcccatcaagacaaactatccagtggtcgcatatgcggaactttatattgcccacattctcagtttgcatggaattccaaaaacaatagtatcggaccgtggaccacaatttgtatccaaattttggaatgaattacataaattcttgggtactaaactgctccacagttcagcataccatcctcagacaagtgggcaaactgaaagagtaaatcaaatacttgaagacatgttacgggcatgtgtcctggagtttccacaaaagtgggatgtttgtttgccactggcagagttttcttataataacagctatcaagagagcatcaagatggcaccatttgaagcactgtacgggcgacagtgtcggacacccttaaattggtcagaacctggagaatggtggcatttcaggcctaacttggtcaaggaaacagaagcaaaagttcaatggataagacatcacttgaaagaagctcaagatcggcagaaaaattatgcagacaaacggcatcggcgtttgctctttcaagttaaagatcacgtgtacctgaaagtatcaccaatgaagggtgtaaaccgttttggggtaaaagggaagctagcacctcgatacattggcccatttcccattcttgaacagtgtggaccagtggcataccgacttcatgtgccagaaacattaattgcagtacacaatgtgttccatgtatctcaattgaagaaatgccttcgggttccggattaa

SEQ ID NO: 111976 - DNA, 109 bp, Zea mays
  Clone ID: MRT4577_33609C.1
cccactcatccaatccgccatcctttcatccacactctcaactccatttctatctctttcaaattaaattatgggtaactgctattcttctcttctacaactgctatca

SEQ ID NO: 111977 - DNA, 260 bp, Zea mays
  Clone ID: MRT4577_3360C.1
cggacgcgtgggccgacgcgtgcgttcttggatgatgtatgtcgtcaaccagaaaactgggttatggaattaccactatgaagcggtatgcgtacgtcgacgagcacctgttgtgcgatatcgaaagacagcatgtcagcgtcgacgacatcgtctgtcacgacggcagcgtttgagcgcattccgagagcttccccgagttaaagcctgacgaggatgctggtatcataaaggactttgatgaacctgatactcttgca

SEQ ID NO: 111978 - DNA, 2575 bp, Zea mays
  Clone ID: MRT4577_33610C.1
gacccggaggagcctccgcacccccgccgcgccagatctggccccgcccgcagcccccatgctccagatccgcctggcctagccacgaccggccgtccgctccccgcgcccccgcgtgccatggacgacgtgtccaggtacgcgcacagcccggcgcacctggccgtcctgcggcgcgaccacgcggcgctgcggcggctggtcgccgcgctcccgcgcctgccgcgcgccggggaggtggcgaccgaggaggagtccatcgcgggggaggccgtggcggacgccgtctcggccgtcgtcgaccgccgcgacgtgccgcggagggagaccccgctacacctcgccgtgcgcctccgggaccccgtcgccgccgacgtcctcatgtccgccggcgccgactggtcgctgcagaacgccgacggctggtccgcgctccaggaggccgtctgcacccgcgaggaggccatcgccaccatcatcgcgcgccactaccagccgctcgcctgggccaagtggtgccgccgcctcccgcgcatcctcgcctccatctcccgcatccgcgacttctacatggagatcaccttccacttcgagtcctccgtcatccccttcatcagccgcatcgcgccctccgacacctaccgcatctggaagcgcggcgccgcgctccgggccgacatgacactcgcggggttcgacggcttccgcatccagcgctccgaccagacgttcctcttcctcggggacggcgccaggcctgaggacgccgggggcaaggagctgcacccgggctcgctcatagtgctggcgcacaaggacaaggagatcacggatgcgctggagggggcgggcgtgcagcccaccgagtccgaggtggcgcatgaggtggcgttgatgtccaagaccaacatgtaccgtccggggattgacgtcacgcaggcggagctcgtgccacacttgaattggcgccgccaggagagggcagaagccgttgggcaatggaaagccaaggtgtatgacatgttgaatgtcctcgtcacagtgaagtctcggcgcgtacctggggcgatgacggacgaggagctgtttgccatggatggggaggagaagaacgggaggggcgcggagcttgatgctgagttagacgaagtgttgacagccgaggagaggaagcagcttgattctgcgcttaggatggggaacaatgaagaggaatctgagcagaggtgcgacgaaggtgacactggtgctggtcatatggatgagcatgccgccgccaaagataagaagggatggttcggttggggtggcaagaaaggtgccaagggcgatgacaagccatcaaagatggggagtaaggatgaaacgagtgacccagggaagcaaaaggagaagggcagcgggaagaagaagaagggtggctcacctgctgagtctctaaaacatgaaagcgagtacaagaaggggttaagaccagtgttgtgcacgagctgacaccggatttccctctgaagacagatgaactcatccctctgcttgatgtcctagcaaacaaagtcaaggctgtaaggaggcttagggaactcttgacaaccaaacttcctacaggcacatttccagtcaagattgccatccctattgttccaacgatacgagtcatcgtcacattcacaaagttcgaagaactacagcctctagatgagtttgccaccccaccttccagcccgacacagtttcaagacgcgaaaaccaaagaatcagaaggatcaggctcatggtattcatgggtaaagggtggccgaggcacgcagtccagcgacagcggtgatagccggagctggaaagatgaggtggatccgttccacataccgtcggactacacctgggttgatgccaccgagaagaagcggaggatgaaggcaaagaaagccaagagcaggcggggcccagcccgaaaacagtcctcgaagaacactgcggaaggagcccaccgcccaatgatggatggcttcgaggagtaaaccatgctctcaccggcgttgtaagttgcctctgcattcattcttaagatgttagttgttgatggcagcttcacgcccgaggcagattgaaagttgtgccttggagcaccccccgtggtgttggtgtggcaatggatcggagtcgaatctcattgagaacgtacagatggcttataccccactaatctgtaattcagtcagcgctatttttgtccccacctccgattttcatcttgctggatgtatgcttgacagatgatgatacggccctgttgttgttgttgttgttgaaaaagatgtgttgaggggactgtagtgttcctctcccccctgttgtatggaagattaccaatatgcagcgattttctcgcaaagaggaagctcaatgcacatgcttgtttgttcacattcctttttctgctctgagtttctgctgatgcatgtgtaacgacagtgtaatttgatgtttgtccacgctttaaaaaaaaaaaaaaagggcggcctcgagccgaattccgagcttaggctttaatctaaaatatcttctattgttt

SEQ ID NO: 111979 - DNA, 2658 bp, Zea mays
  Clone ID: MRT4577_33611C.1
ccggccgggaaaaaaaaaaataaaaaaaaaaaaaaaaaaaaaaaaaaaaaaaaaaaaaaaaaaaaaaaaaaaaaaaacccacgcgtccgcttccctcccctccgactccggccaacccgcccctccctcccaccgctcgtccgcccctcgcccgcaccaccggcgccggcaccggcgccggagcgcgacccggaggagcgtccgcacccgcgccgcgccagatctggccccgcccgcagctcccatgcccctccctccccagacccgcctgacctagccacgaccggccggccggacccgccccaccccccgccatggatgacgtgtccaagtatgcgcacagcccggcgcacctcgccgtcctgcggcgcgaccacgcggcgctgcgtcgactggtggcggccctcccgcgcctgccgcgcgccggggaggtggccaccgaggaggagtccgtcgcgggggaggccgtggcggacgcggtctcggccgtcatcgaccgccgcgacgtgccgcggagggagaccccgctccacctcgccgtgcgcctccgggaccccgtcgccgccgacatcctcatgtcggccggcgccgactggtcgctgcagaacgccgacggctggtccgcgctccaggaggccgtctgcacgcgcgaggaggccatcgccaccatcatcgcgcgccactaccagccgctcgcctgggccaagtggtgccgccgcctcccgcgcatcctcgcctccatctcccgcatccgcgacttctacatggagatctccttccacttcgagtcctccgtcatccccttcatcggccgcatcgcgccctccgacacctaccgcatctggaagcgcggcgccgcgctccgggccgacatgacactcgcggggttcgacggcttccgcatccagcgctccgaccagacgttcctcttcctcggggacggcgccaggcctgaggacgccgggggcaaggagctgcacccgggctcgctaatagtgctggcgcacaaggataaggagattacggatgcgctggagggggcgggcgtgcagcccacagagtctgaggtggcgcatgaggtagcgctcatgtccaagaccaacatgtaccgtccggggatcgacgtcacgcaggcagagctcgtgccgcacttgaattggcgccgccaggagaggacagaagccgtcgggcaatggaaagccaaggtgtatgacatgttgaatgtcctggtcaccgtgaagtctaggcgcgtgcctggggcgatgacagacgaggagctgtttgccatggatggggaggagaagaatgggaggggcgcagagcttgatgctgagttagacgaagtgttgacagccgaggagaggaagcaacttgattctgcgcttaggatggggaacaacgaagaggaatctgaggagaggggcgacgaaggtgatgctggtgctgatcatacggatgcgagtggcgtgaccaaagataagaagggatggtttggttggggcgccaagaaaggtgccaagggcgatgacaagccatcaaaggtggggagtaaggatgaaacaagtgacccagggaagcaaaaggagaagggcagtgggaagaagaaaaagggtggctcatctgctgagtctgtaaaacatgagagcgagtacaagaaggggttaagaccagtgttgtggttgacaccggatttccctctgaagacagatgaactcatccctctgcttgatgtcctagcaaacaaagtgaaggctatcaggaggcttagggaactcttgacaaccaaacttcctacaggcacatttccagtcaagatcgccatccctattgttccaacgatacgagtcatcatcacattcacaaagtttgaagaactacagcctctagacgagtttgccaccccaccttcaagcccgacacagtttcaagacgcgaaagccaaagaaccagaaggatcaggctcatggtattcatgggtaaagggtggccgaggtacgcagtccggtgacagtggtgatgggcggaactggaaagacgaggttgatccgttccacataccgtcggactacacctgggtcgatgccaccgagaagaagcggaggatgaaggcaaagaaagccaagagcaggcggaccacagcccgaaaacagtcctcgaagaacacttcttcggaaggaggccaccgccccatgatggatggcttcgaggagtaaaccgcgttctcacaagcatagtaagttgtatttgcattcttaaaatgttagttgttgatggcagctgcacgccagaggcagattgattgatgttgtgcctggagcaccccctcccttggcgtggcaatgaatcggagtcgaatctccttgagaacgtacaggatggcttatacccaccccactaatctgtaattcagccagcgctatttttttttgcccccctccgtgtttcatcttgctggatgtatcatgtatgtttgacagatgatgacgatgatacgaccctgttgttgaaaaaaaaatgtgtttgaggggactgtagtgttccctccccctgttgtaatggaagatttaccaatatgcagaagatttaccaatatgcagcgattttctcgcaaagaggaagctccaatgcacatgcttgtttgttcgcaaaaaaaaaaaa

SEQ ID NO: 111980 - DNA, 315 bp, Zea mays
  unsure (1)..(315): unsure at all n locations
  Clone ID: MRT4577_33612C.1
tttttnttttttttttatatccacatctccgcatctattgaacaggtgttattggttgtttaccgagagcacggatatatggggcatctgaaaagaaagttgatattggtaacaaacgaacaggtgctattcagacttgtttgagccggggggacccaatgggtggaactttgggtttacaagaaacgttttggtccctggaccctgggtctggtcactagagaccgagggggtcgatagcagcactcttgacatctgtagcgtcggcaagttccgctcggcgacgaatgcagctcgccggccgtatcctaaggg

SEQ ID NO: 111981 - DNA, 2185 bp, Zea mays
  Clone ID: MRT4577_33613C.1
ttcgcatgggcctgatctggatgtctaatgcaaatcctttttctggggaagtctggtgtgggaaagagtgccacaataaattcaatttttgatgagaggaaggttgctactgatgctctggttcctgctactcataggataaagaaaattgaaggaacaattaaaggaataagagtcacagtcatcgacacacctggcctggtgtctcattaccatggccaaaggaggaacatgaagattctgaattctgtcaagcacttcattaagcgatccccacctgatatcatcttatactttgagcgtttggaccatattaacagcagatacagtgattacccactgctgaagcttatgactgacatattggggtctccaatgtggttcaatactgtccttgtaatgactcactgttcctcatctcctcctgaaggaccagatggttacccattggaatatgatacttatacgcgttactgcaagaatgtggtgcagcgtcacatccaggctgcagtttccaacacgcagttggataatccatttgtgctcatagacaatcatccaatgtgcagacgaaacaccaagggtgaaagggttttaccaaatgggcaggtatgggtatcagaactgctgctgctgtgtggggcaaccaagttgctgacagaagcaaattccttgcttaagtttcaagatagcttcctactgtcacaagcaaacaccaggctgccttcgctgcctcatcttctttcttcacttcttaagcctcactcttcatccagttcagatgccattgacagtcaattgacagaaatgtcagatgaggaggatgaatatgatcaactaccacccttccgcattctaaagaaatctgaatatgaaaatttgaccaatgaacagaagtctgcatatcttgacgaactggactaccgtgagactttgtacctaaagaaacagtggaaagaaggaatcagaaggaaaaagcttactgaagctcagagtgatgaagttggtgatgattatgatgagagtgcatccccagagattgtgcacatgtcagatatggacattccactaagttttgactctgattatcctgtgcatcgttaccgtcacattataactgatgatcagttgtttagaccagttttggatccccaaggatgggaccatgatattgggttcgatgccatcaattttgaagcatctcaagagttgaaaaagaatgtctctgcggcaattacaggacagatgagaaaggacaaggaagacatgtatatccattcagaatgttcagtaagttacaatgctcagagaggctgctccttgatggggggtatggatatgcagacggcaagcaaagatttggtctgtactgttcatggggatgccaagttccacaatctgccttggaacagtattggaggtggcatttctgttactaagtttggcaacaagtactttgctggggctaagttagaagactctgttaccattgggagacgagttaaactggtagccaacgccggtaggatgtctggctgtgggcaggtggcacatggaggtggtgtggagattacagcaagggggaaagattaccctgtgagggaagggagtgtcactgccgcggtctctgctttgtcatttgaaaaggaaaccgtaattggggccaaccttcagtcagacttccgagtgggccgtggatcaaaaatatcagtcagcgctaacctaaatagtagaaatttgggcaatctcagcgtcagaactagcacatcagaccacgctgagatagctttgataacagttgtctccttgatccagttcattcttaggagaagatcagcagcagataataaagatgagcaacagattggcaccaatttggatgactaaataacaggtacaaggaaaagacaatgattgcatgctttagatgctcatcgtcatcaggatttgctgcaattatgttaacctaaggcgcctgtcaatctagagttccaatttgtacaaaattcttgtatatcaattatgagtataaataatgtatgaaggaggcattttccatgagaagagctccttctgcccataagcgatttttttaggttttaaggatgtaatcagacgccgttttgagttttaacatcacacaaagtttatttaaaagtcaaaaaaaagggcggctgctcgcgat

SEQ ID NO: 111982 - DNA, 672 bp, Zea mays
  Clone ID: MRT4577_33614C.1
gggaagcaaacgccgaaagattccatgcacgtcacagtaagtaaagctctagcagctaccccctcgtcttcgttgtctctccttggatttgcctaacggctagctacctctcctatcctgctcctcctcctcacagtcacagggctagctcaaacactaggcagcactggatcgatcgagctagcgatcttccactgtccacacaccatcaggcatcagcatctggttctatatcacacctcataacgcacgcgccaattcatgcaagccccgcggccggcgtcccgttggcaaaaaagcaagtattgatttagctagctaataagaagctgctagaggacgtcgtccatcgccatgccgtcctggcgccgccgcaacaagccgtcgaggggccgatcatcgtcgacctcggcgtcgccggcctctctcacgatggaggacatgtagctgcagccgcaggccacctcgggggcacggcgtccagctgcgggcgcgcgtggaacttgtggcggcagccgaggcatgtgatctggagaagcgtcgcgttcacctggcgcaaggcgtggtcccggaccgcgtgggcgcggctcagctccacctgcgcctgccgccgcatccgcttggcgctcgccagctcccgctcggccagctccgcgtgccgcttcgcctgcg

SEQ ID NO: 111983 - DNA, 270 bp, Zea mays
  Clone ID: MRT4577_33615C.1
accacacttactactagttctagatcgacagagaccacatgcgctccatcttttttaccaacggagaccgcaccccatccaatgacgggtatggctacaccgacggcttgtcagaggactgcagggcgcttgcagagcgcgcgctggccattgcggccactcgaaacatgttcgaagcggtgggcatcaccataaactacctagcgttccgagcctccgcagtcggagaccaatatcttgatctacgaaacgagcagtgaatacagtacg

SEQ ID NO: 111984 - DNA, 174 bp, Zea mays
  unsure (1)..(174): unsure at all n locations
  Clone ID: MRT4577_33616C.1
catcgtgcgttcgnncatncacgcatacgcgcgctcgtgagctggctataccgctcgaggcggaacatactggacgatgctgtaagtaaaggtgggaagagaacaatctagtaccaatcgattaaaaatctatctatctattaattaattaatgtatttgtggtgtgtgatctg

SEQ ID NO: 111985 - DNA, 719 bp, Zea mays
  unsure (1)..(719): unsure at all n locations
  Clone ID: MRT4577_33617C.1
ccggccgggagccttgcccaaacaataccagaacctgtacttcccaacgatacaacgtaacgcagacgcagcatcaatcatggcgctagcacctagccatgcactcgtcgtcgctccgttcacagcactctgcgccttccttgccctcgctttattatttctgtatagcaaagcaacgtcgtcgtcgaagaaaacacagcagctgctgccgccggggccggctgggctgccgatcatcggcagcctgcactgcgtggtgtcaaaaaggccggtgtttcggtggattcacggccttctcaaggacatggacaccaacgtcctgtgcctccgcttcggggccgtccatgtcgtagtagtcgcctgcccagagacagcccgtgaggttctcagaacgaacgacgctgtcctggcgtctcgcccggagacagtggcctccgcactgttcagcttcgggtacaagggctccatcctgacgccctacggggagcagtggaagaagatgaggcgggtcctcagctccgagatcctgtcggcgtcaatggagcagcggctgcagcgccggcgagcgcaggaggcgactaacctcgtcgggtttcctgtacagccagtgcagcgcatctgcagctgcctgctgctgcagcnnccggtgatgtacgccatgtagcacggcatttctgcggcaacatgaacgggacgctcgtgttcggcaaggacactct

SEQ ID NO: 111986 - DNA, 447 bp, Zea mays
  Clone ID: MRT4577_33618C.1
atgacccacatgttctcaggtagcaatgatgtgttcaagtaccttgatgaacaccattcactaaaatggatgagatgtgacttcaaccaagacatcaagtgtgattatattgctaacaatcttgtacgatgtttcaacaattggattagagacataaatgactttctagtgcctgatcttgttgataagataagggaaatgataatgattctatgggagaagaggagaaaatttggagaacgacttaaagtgaagatactaccaactgtactacaccaattgaatataagaactagagggttgggacacttaaatgctgtgaaagctgacttacatgatgcagacatatgggacagcagcaacaatcaccatgatcgacatgttgttaaggcacatttacatgactgcacttgtgaagagtggcaacatactagcaagccttgctag

SEQ ID NO: 111987 - DNA, 262 bp, Zea mays
  Clone ID: MRT4577_33619C.1
agcaagaatccagctctcagtattaggttcagccacgctgttacatttttgttttcctttcctttctcagttacatattttgaatccaggtgaagaggatttgaggtttagtgcctgccagtctgcgtcgactgcggtcggtcgtcgacgtcgtgctattacatatcgatcgtcgtcgtcgatgtgctattactgatcgtcgtcgtcggccgagtcctactgttagagctgcgaggcgctgatgggcagcggcacgtccttg

SEQ ID NO: 111988 - DNA, 1385 bp, Zea mays
  Clone ID: MRT4577_3361C.1
tccgagtccagggggcaggggcaccattaccgagtagtttaattagtgctagttgtattaccattgttagtgacttaattaccctcacgcgaagcaccttacctctgctagtcctcctacgtctcttctcttcgcttaatcttgtactactgctctgttataatcagcgggaaggaggaagatgacggtgacgccacggatcacggtgagcgacgggcggctgacggtgcgcggccgtacggtgctcaccggcgtgccggacaacgtgtcggcggcgcacgcggccggggcggggctcgtcgacggggccttcgtcggcgcccacgccggcgaggccaagagccaccacgtcttcaccttcggcacgctccgggactgccggttcctgtgcctgttccggttcaagctgtggtggatgacgcagcggatgggcgtctccggccgcgacgtccctctggagacccagttcatgctcgtcgaggtccctgccagtgacggcgacggcgacgacgcccccgcgtacgtggtgatgcttccgctgctggaggggcagtttcgggcagcgctgcaggggaacgaccgcgacgagctgcagatctgcatcgagagcggggacaaggcggtgcagacggaccaggccgcgcacatggtgtacctccacgccggcgacaaccccttcgacaccgtcaccgccgccgtcaaggcggtggagaagcacctgcagacgttccaccaccgcgacaagaagaagctgccgtcgttcctcgactggttcggctggtgcacctgggacgccttctacaccgacgtcaccgccgacggcgtcaaacacggccttcagagcctgtccaagggcggcgcgccgccgcggttcctcatcatcgacgacggctggcagcagatcgcctccgagaacaagcccgaccccaacgtcgccgtccaggagggcgcgcaattcgccagccggctgaccgggatcaaggagaacaccaagttccagaccaagcccgacggcgacggcgacggcgagcaggcgccgggcgggctgaagcgactggtggccgagaccaaggacgcgcacggcgtgaagcaggtgtacgtgtggcacgccatggccgggtactggggcggcgtgacgccgacggcggggacggcgatggagcgctacgagccggcgctggcgtaccccgtgcagtccccgggcgtgacgggcaaccagccggacatcgtcatggactcgctgtccgtcctggggctgggcctggtgcacccgcgccgggtgcgggacttctacggcgagctccacgcgtacctcgcctcctgcggcgtcgacggcgtcaaggtggacgtgcagaacatcatcgagacgctgggcgccggccacg

SEQ ID NO: 111989 - DNA, 297 bp, Zea mays
  Clone ID: MRT4577_33620C.1
tatacatttatgaatcaacgcatgtatacttctagacgctggtctggtaatgctagctaggttgccaaaacaccttgcgcgacacatcttgctaactttcacttctggcaacaatattgtcatcactgcattacttatgcagaccttatggtaaaccaagagcatgcaacataccatcaatctaagcttgctatgcacctatacttgcaccagaccattttatccattgaatgctctctactatgctctatacatcccaattgcactctaacatcgctgcactacctgtgtttagct

SEQ ID NO: 111990 - DNA, 362 bp, Zea mays
  Clone ID: MRT4577_33621C.1
ggcaccataacgaacaaggggttttttggttaaaaaaaaaacgggcatacacacgtttgggggggggacttgggaaccccaactgacaatttacctacacagggggggggacccacaaggggggggccgggaaaccccttcccttaaggattttttattaacaaaaagagtttccgttttgtataacccatcgccaaggttagggtaaacatgcattattggggccaaaaaaaccatggaacattttggaggggccctatgcgacaattggggggggtgcacacctagcaacaccccacatggttttgcccatttccattttgaaggaacccttattgccccaaaaagggccccaagggttt

SEQ ID NO: 111991 - DNA, 315 bp, Zea mays
  unsure (1)..(315): unsure at all n locations
  Clone ID: MRT4577_33622C.1
cagttcatctattaaaacaagtaacaaaatagatgtgctagtaatcttttttttggcacccanaacatccatctcaaccaaggcaaccagtcaagaacctcaccatgttcacctcaacgaagaaaaaaactatgttgcctggaatgaatgtatgttcttatattaaaataacaaaatttatgtatgcatagaattacaaataaattttcaaacattttctcatctcagtaaaaaaacacaatttatgtctcgatagaatcacaaacgaattctgaaacattttctcataaccctgcaaacaacactgaaagaaat

SEQ ID NO: 111992 - DNA, 796 bp, Zea mays
  Clone ID: MRT4577_33623C.1
attggacctgacagatgctgatggtcagggagtgctcaccatggacaagtgccaactgcaggagctgagggtgagaccggtgtcaacatctaggggctcacaccggacgctcatgccagagctttgcatgtggctgtggtatgcaccatgtattgagctgcctggggggttggtgctgaatggtgcaacgctggtggccatcaagccaagtgaggaaggaacaggggacacagtttggaatgaaactgctgatgcagcctgggtgttggatgcattcgaggagccatatagaacagcggtgaagatgcttctcaagcgaaggacctacagccttgagatgaattcattctaatctatgggagatggcattttggaagcttcagatgtgagaggatgttataactaatgttgtggatgcctttcatgcacctacttcggacgtggcaagtatgcgctattgtacgctatcagcaagaacatggatggaatcaaaacagaaattttgttaacttatgatgctggagtcgaaaggcaaaaccatggccgagttgattgtgttctctgagatcagatgtggcatagatagttttttttatatatatgtatccacatcaaggtactaactttatgtaatttctacttttggattgtggcattgtgccgcttgtttgcagaataacatgcaatgcgctctgtacatcaatgtgtgtcaagagtggacccgtagatttgtcattagtggaagctataaaattgttactagcacttcaaacagaaaaaaaaaaaaaaaaaaaaa

SEQ ID NO: 111993 - DNA, 487 bp, Zea mays
  Clone ID: MRT4577_33625C.1
ttttttttttttttttttttttttttttttttgtttttttttttttgtttttttttcttttttgtttgtttgccaaaaaaaacccccaccaaatatttgggttttttaacagggaggcccccccccccggggagggggccaggtttaccaaccccgcggggttggaccaaaaaaagggggccccccaacaatgggtggcttcctttaaaggggaggggttaaaaaaaaaaattgggtggagggaaaaaattggtttctttggcaggagggccccccccaggggggccccccccaaaggggaaaaaaatctggcccccccctggggaggccccccaaaaaatttcccccctttaatgggcgaaaaggaaaaaaccccggaaaaggaccctgagggctccccccaagttggatgactaaaacccgtaccaagctgtggaaaaagctgtggggcagggagaaaccccctttccccccgcccggggggcct

SEQ ID NO: 111994 - DNA, 1192 bp, Zea mays
  unsure (1)..(1192): unsure at all n locations
  Clone ID: MRT4577_33626C.1
ttgggtacctcgaggccggccgggattctctagttgctcttcgttcttccccagcgtttgtcatcgccacggcttctccagagtcgtctgttgactgtgccggaccgacgatataagtcatcagatgacgtgagaagcagtcaggcgttggtgcttgcttatatagctgcgcattcacgccacagcgtcctcccctcccctccctttcctccctcttcttcacaccactcagtcacaggtcctccccctcctcctcctcctcctcctcccgggctgccattgctgccgcccggccagctgattcaagatgccgaccatcatcgtctcggtggacctggaatgcagccgctgccgtgccaagatcgagaaggtgctcaacaggatccaagagaagggtgagttctgcatcgacgacatcgacttggacgagaagagcaacaaggtgaaggtgacggggcccttcgacccggacaagctcgccgacaagctgtgctgcaaggcgtgcaagatcatcaagcagatcgaattccgtggaagcaagccgccgccgccgccgccnggagaagcccnaagaaggaggnaacccgccccgccgnccgccgaagaaagaaaggaggaggccgccccngccnngccgccggcgaaaggtcgagcccggagaagcctcnnagccaccgaagggagaagccccccgccaccgggcaccgaaggagggagccaaagcccgccccggcgcccaagggtggtggaggtcccctacccgtggccgtacccgtgcccgtacccgtaccccggcgtggccgtccgccgactgctgctgccacacggccacggcggctgccactgctgctcctgcggcaaggcccccgaggccccggcgccgcccccgatgccgcagtacgtgccccagccgtacccctgcaacccctgcggcggcggcggcggcggctaccggatcgtctgcgaggaagacccctcctacgcctgcgccatcatgtgattcattgtcccgttacgcgcccacaacccaccagtgtcagtcatctcatcatgccgtgccgtgcagtgccatgcccgtgcctcccgtataatcgcagtacagattcatcatatacacacactcatgtataagcgattcatcatatatgttaggcaaagtgaaagaataaaataagcgatgattatgttggtt

SEQ ID NO: 111995 - DNA, 511 bp, Zea mays
  unsure (1)..(511): unsure at all n locations
  Clone ID: MRT4577_33627C.1
ccccacccgccgcgccaacaaggggcgcaacgccagnacccccgtgcccnnctccagctcggnaaaacccccccngacgaggcccaccgccagcgcgaccgcccnctctcactcacnntcactccgcncnngcccggcccnngccgcgcgnaggcncnnggtcctggtaacacggtctngcgccgcgccctcgtacccccatgccgtgaacgcgccgggacgccggccaacnncgagccgcagctcgtcctcgtccgcgccaccannnatgcacttccnncctcgccgcgccgcccgctcgccatnnggccgcgccnnggcggtcnngcccgccctttcgcctcgctcccgtgggcttcaccccgccttcgacccctcttgcctgctggcctctctgggtaccggtaggcgtgggtcacgtgccgcgccggttgcgtgcggtgntgggcgcgcgtgcttggctgcggtgtccgcccgtcccggcggcctttctgcgccggccgggggttgc

SEQ ID NO: 111996 - DNA, 580 bp, Zea mays
  unsure (1)..(580): unsure at all n locations
  Clone ID: MRT4577_33628C.1
tctaaagacccattctaaaagatttcgtcttttatatcttctctatctccagtgtcctctaaattcggttctctatatttatagtgataacaaaattcttattccaaaaaaaaaaaaaaaaaaaacatgtganttcgtttattatatatcatccctcgaatgagtgtaccggtccgtgtgcgtaccatggccttataattaccatatacccaaccccaccctcaaaaaaaaaaaaaaccagtatgtcgtctcaccgtcattccgtacctcctcctgtataatcgccgtacagattcatcagatatatactctatacatatatagcatcatgtatacaccgccgtaccccctgtcatctctttatgtagatggtgcattatgttctgcgcgcttcgttttggtaattacagtatatgccatgccagtcaggctaagtgagagaataaaataagcaatgatgctgttgttttttaaaaaaaaaaaaaaaaaaaaaaaaaaaaaaaaaaaaaaaaaaaaaaaaaaaaaaaaaaaaaaaaaaaaaaaaaaaaaaaaaaaaaaaaaaaaaaaggggggggccgtt

SEQ ID NO: 111997 - DNA, 1731 bp, Zea mays
  Clone ID: MRT4577_33629C.1
gtccgggtttttgcttccaagttccaaagggcctctctatctaggcatgcatgccttctatctattcctcctctggtggcttcttctcccgtggctgctagctcttctccacccctgcttttgtcatcgccacggctcctccaagatgagtcagatgacgtgggaggcagccaggcgtctgtgcctgctcatatagctgcgtattcacaacacgccggccacggcatcctccccctcccttcctctcccttctcttctcttcttcacttcacagcacgatcgagccagttgcaatcacacagacgatgccgaccatcatcgtctcggtggacctggaatgcagccgctgccgcgccaagatccagagggtgctcaacaggatccaaggtctgttcgcgcttgcttgctactcctctctgttgttcgctcttccctttccgcttgtacaggtaggtctcgagacggttcgcgttgatcgcaactgataagtttcctgggacgacggacggacgcctcggcttgcagagaagggcgagttctgcatcgatgacatcgacttcgacgagaagaacaacaaggtgaaggtcacggggcccttcgacccggacaagctcgccgacaagctgtgctgcaaggcgtgcaagatcatcaagcagatcgagatcgtcgagcccccgcccccgccgccgcccaagcccaaggaggagccgaagaaggaggagcaagccccgccgccgccggagaagaaggaggaggccgccccgcccccgccggcgaaggtggagccgcccaaggaggagccacccaaggagaagcccccgccacccaaggaggagccgcccaaggagaagccacccccgcccaaggaggagaagcccgccccggcaccgcccaaggaggagaagcccgccccgccgccgcccaaggtggtggaggtcccctacccgtggccgtacccgtacccgtaccctgcgtggccgtccgactgctgctgccaccacggccacggcgggtgccactgctgctcctgcggcaaggcccccgagccggccccggcccccgccccggccccacccccgccgcagtacttcccgcagtacatgccccagccgtacccctgcaacccctgcggcgcggcggcggctaccggatcgtctgcgaggaggacccctcctacgcctgcgccatcatgtgattcgtttattatcaatatcatcccttgatgagtgtaccgtccgtgtgcgtaccatggccttaattaccattatacccaaccccaccctaaaaaaaaccccagtacgtcgtctcatcatcattccgtacctcctcctgtataatcgccgtacagattcatcatatatatactctatacatatatagcatcatgtatacaccgccgtaccccctgtcatctctttatgtagattgtgcattatgttctgcgcgcttcgttttggtaattacagtatatgccagtcaggctaagtgagagaataaaataagcaatgatgctgttgttttttttttcttctgtgtgtgtaaagaaaaagggcaaggtgagagagttcatccgttgatggcagcagaaatgtcctaccttgcacaccagcatccctttctttatgttgcacccagggaaaaaaaaataaacagttgcttttatcaacgctaaaaaaaaaaaaaaaaaagcggccaaaaaaaaaaaaaaaaaaaaaaaaaaaaaaaaaaaaa

SEQ ID NO: 111998 - DNA, 1810 bp, Zea mays
  Clone ID: MRT4577_3362C.1
atgtcggggggactaagaaacgaaagtgcttctaagcttgaaaaagttgagattgtctcgacttcatcttttggtgcagatgttgatcctagggcaatagatcttgccatgagaatcgccgaaaggatgttcctcaaaatgaaggaagatgaggcgaagaacaaaattgaagaagaaaatgatcgatggagaccaaacgacgaatccacctcttcacaaggttcgtctttcaaatccacttctcatatgtgctttattgctaatgggagtgacagtgaaagcgaaagtgaggatgaggaggagcaagaaagtgatagtgaagatgaggatgatcttcaacaattcttcgctcagctaagcaagaaacatcggatgagcttgctcaaactcatgaaaagagcggaagaacaaaaagaaatgcttcataagcaagaagacttcctcatcagaaaaatcgaagacttagagaagttgaccaaagagcatgagaagctaaagtgctctcatgatgatttggtccaaaggtatgaagacatttcaattgagcaaattaaagctgttaatcattcatcatatattgctcaattagaaaataaaaatgctatgctcaagaacacgatagaaaggctaaatattgaaaatctagctttgcaagaaaaacatgatacgcttgtgtgctctcataataaatttatggattcacatatcatgttagaaatggctcatgaggttgtgttaactaatttgaaatcataccaacctcacttatgcacatgtactcaaacagaaactatattatcatgtgctaacaaatgttgctctcaagaaagccaatcttccattgagctagaactttcaggaacaagtaatgtttcctatgcaaaagaaaacaatgagctcaaggaagaaaatgagaggctcgaaaggagcttgattcaattgaagggaaagtgtcatgctcaaccttctcaagataaccgtgataatatggtgaaaaagcttgagaaggggacaatagtagcatgcacaaaaccccttcaaaagaatatcaagctttccaagaaggacatgagcaaacatcaagagaagaaagccaaagctcatgacaagtgcctcaactacgcctccacatgctccacacaaggtaacaaacaagtcactcttccaaataagagaagatgcgctagaaagtgttatcaatgtcatgataagggacatgagattaagtcatgtccctacacaaaggatagtgtcttaactttagaaagaaataggctcactaaccatgtagcaaacaagaagcaaggcaaaaaggagtcttgcaaaattaaaaatcagatttgctacacttgccgaagaaagggacacctatgcaaggattgtcccatgagtgagtatcctaagcctaccatgtcaattcattcatattcacttaagagacccaaaaatgacacttgtgctagaaagccacataggaaaaatgaagcacttgagaatgaacttaaaagattttaccttgctttggaaaggatctaagaccgaggtaccatggctaaggtgaagaagagagtacttgcactaagtcgatgaactaatcagctatgaagagttacaacatgttgatgcatcagtaaggtgacttgaagccatgatttgaactcatatatggtgaaatggcacaagtcataggctcgatttgtgtttgcttcaaaaggaatcgtcgtactatcaagggggatccaaaaagaaggttggtgttggtacaaaagctcaaaaatccttgatccaccacttccattttacccttgtt

SEQ ID NO: 111999 - DNA, 323 bp, Zea mays
  Clone ID: MRT4577_33630C.1
ttttgtcgtcttttttttggttggggtttacccaatttcttaaagaagctccttatcgacccaatagaacaggaacccgggtgctttacaattgtcactgacgagtcaacattgggcaccctagcactagaacccagcggggaaagggtgttcacacggacacaaacgttgaaaaggccactacctggcctttttatactaaccaaaacatttggaggtcgtcaacttgagggctctaccagcgtttcttcacattttatgactgaacgaatattaatttggcttccgtggattgacacctcatttcaggtgctctcacatac

SEQ ID NO: 112000 - DNA, 342 bp, Zea mays
  unsure (1)..(342): unsure at all n locations
  Clone ID: MRT4577_33631C.1
cggaannnngggnggancaggcgtccgacaaagcgtccgtaaaaaaagggtcaagatgttcattcttatcgttaacaatcagccattgggatgggcatttgttggtatccttcccatgtctcttgaattgcttcgttactgacatcactctgtgacctgccggcgattttcgcacgagggttcttgtttgtttctaggcgagctgactgcagtgcgcaggaacgctttccgtgaggttactatactgttattaagctggatcagctcgttatgacagctctgtttctaatttcttgttggcctcggcaagcttgttgggagtaaatttaataagcctttgat

SEQ ID NO: 112001 - DNA, 376 bp, Zea mays
  Clone ID: MRT4577_33632C.1
tcagagcattggatactcccctgtcgccaagctgggacctcctgtacggtatttccacgcgcgtcgggcgtccgccgatctaccccgtgcgaggggacaacgagggagtgcgcttcggtgcacgtcgcccacgtctcgatgctgctgcggtcaaggatccagaaggctgtcgaggcgggcgccggcccggcgggctgaccggcgatacgcccggccgcagtcgtactgcgccggcggctgctaggtctcctacctccctttgaggatggggctgccgatggtcatgcctgtcccacgctgccatcgtggggttcatggcgcgggggtcccatcgggatcgagaggcagcagttcaaggggctggcttcgcctgcgc

SEQ ID NO: 112002 - DNA, 1236 bp, Zea mays
  Clone ID: MRT4577_33633C.1
cttgccgggacccccttctccaatccgacactctccaaacaaactagcgacgatgccgtaccaatacgaccccaagaacgattttccgtcccctcggaaacacgggactccgtgtctcgcttctctcgtacggaggatggctcacgaccggcggaacggtcaagggcgaccccgtcgtcgagatcatcaagacggctcttgatcacggagtcaacttctttgacaacgccgaggtctactcgaacggagaatccgagcgagagatgggtcgcgctttcaaggaactcgacgttgaccgctcccaaatcgtcgtcacgaccaagatcttcttcggtactggcaagtcggacccgaaccagcgcggctcgtcccgcaagcacatcatcgagggactcaaagcttcgctcgaacgcctccaaatggactatgtcgacgtcatgtttttgcaccgacccgactacggcaccccggtcgaggagacgatccgcgccgtcaacacgctcatccagcagaacaaaatcttctactgggctacgagcgagtggagtgcggcccaagtcgcagaggcgaatggcatctgcgacaaattgggcttgatccgccccatcgccgaacagtgccaatacaacatgctccaccgagaaaggttcgaagtcgagtacgacatcctcttcaagaactacggctacggtaccactgtttggtcccctctcgcaggtggcatgctcaccggcaagtacaacgatggcatcccggaagactctcggttcaagacttcttcgatgtacgccgacacggtcaaggaactcgaaactgaaaagggtaaagcaaagattgcaaagatgcgcaaactcggagacgttgcgaaacgcctcggcgcttcgaactaggccgcgctcgccctcgcttggtgcgccaagaaccccaacgtttcgactgtcatcctcggagcgaccaagcccgaacaactcgtgcaaaactttgaggccctcgacctcttgcccaaattgaccgacgacgtcattcaagagattgaagagattctcgacaacaagcctactcctctcccgacgtatggacgcgcttaaggaaaaacaacccctttccccccctcaccttcgtcggctctattcgtcgctcctctcctccctctctgtcgtctcttaagaccttgaacatagtgaagtacaaaaaagataacatcaaaatatttagtgttgcaaagttgtcggggct

SEQ ID NO: 112003 - DNA, 385 bp, Zea mays
  Clone ID: MRT4577_33634C.1
cttgcagccgccgtcatggtgacttagtcggtcttggcggctccgatccgggctcctctggcatgggcgggtgcgggtgcgtaggaacagcccctgcccggcgcacaacacgggcgcgggccgactcccggcgtgggcgagcactggcgcggaggacttggacctggcgaccaatgggcgtgtggtgttcctcgaccctggcaggccccagatgcgacagctcgagcgcgtgatcccctgagtgagggcgcgggcactgtccttcagggactccgacacgttcatgttggcggatatggcgcggaccgaagttaggatcaggaacccacaggaaatcccttggagggaggctcgggctccatatatgggggagaccaccggtgta

SEQ ID NO: 112004 - DNA, 325 bp, Zea mays
  Clone ID: MRT4577_33635C.1
cgtaagctcggaattcggctcgagggtcagccagatgattattaaatgactggcgcaacgggctacgtggtagttaatccaagacaaccgactggccacggaaccatgccgggagggcttgaaccataggaagatcgaaacacccgagtactggatttaatgccagacgggagctcgtatcttatgttggtgttgcctaggcgggagataacagtggggggataaaaagaaggctgaacggaaaagttggagaaggaaaatatggaataggacaagcatcaacctgctatcgaaggtgacagaaactgggggtgagccattgtct

SEQ ID NO: 112005 - DNA, 289 bp, Zea mays
  Clone ID: MRT4577_33636C.1
cctttcttttttttttgagttcaatcttctctgtggtccggaggttggcttccattgaaatattcaggagcccaaagatggtacttatcaccgatccatcaactaaacgatgttcgagggcacacgggtgcaccattaatagttgaaagttatacaggagaacggggaacacgaccaaccgttttttggccaaaaggcagcaaggacagacccaaaaaaacccaggccaacagtgcgaatcattttatcatggtgcactcaggcaatggtgacccaaaagggtaccata

SEQ ID NO: 112006 - DNA, 373 bp, Zea mays
  Clone ID: MRT4577_33637C.1
aaaaaaaaaaaaaaaaaaaaaaaaaaaataaaaaaaaaaaaaaaaaaaaaaaaaagaaagaaaaaaaaaaaatattaaaatatattataataaatttaaatatataaaaataataataaaaaaaaacattttaaaaaaataataaaaaagctactataacttactttattaaaacatacatataaccaaaaatgtaataaaatattagaaaacccaattcttaaaaaaatacaagatccaacattttataagaatcacgcattttacctttatgacacttgttcctccaacaacttttaagcctattacagttagttcctttggtgcattttttaaaacaccatattcagggaaaacttgttttaccaccttt

SEQ ID NO: 112007 - DNA, 275 bp, Zea mays
  unsure (1)..(275): unsure at all n locations
  Clone ID: MRT4577_33638C.1
cgtccggcttcgagcaacacagcaggcatagttccacagnaatcattgtttggcaaattgatgactttgaggttggagagcttggcaaacttgtttgggattgatcatgtgagagggggaaagacaaagatgtcttgtttatttttaacctaggttgaagaatgtcgtgagtgtgggggtgtatgatattaagatgagattttttaggggtggngtagttggtaatgtattaaaaaagntttattgtaggttagagctggggttnttaaggattt

SEQ ID NO: 112008 - DNA, 538 bp, Zea mays
  Clone ID: MRT4577_33639C.1
ccggccgggaagtcgaagcaagtagtccccgtgtcgtgtatgcgtacagagcgatgggagagggtgtcgaccgtgccaccgccgtagactcgccgttggtcagcctcccagtcgcggtggtctgtccagggtgtatcagcggactccgccgcgtgtgctggaccaacccctgggtcagttgcgtcttcccatcggcgacaattgctcaccggagctgcgactgccgccaagccacatctccgcgggcatcgagttctccgcgtcgccggacctagtgcgaggtcacgtgtcatccgaagatcatcctggtacctggaatctcaagtcccaggtcaagaacaggtaccgcaggatgaggcgcgtggaggatgctgtgatgtgttcgtgagagatctaggccgtcgtctcccagtcaactttgggttgctggaccgttgtctccttataatgtaattacttatttattttgtatagaactcctgttagatagtaaagatgtgacattcgatccaaaaaaaaaaaaaaaaaatttgcggcc

SEQ ID NO: 112009 - DNA, 267 bp, Zea mays
  Clone ID: MRT4577_3363C.1
cagagttcagaccatggttggttgcgaggcagactgacgaatgctcaaaccggatctgtcagggtaaaacatctggtttgctgactatacgctgcctcttgcaccgcttattatgtacgaccttgcacaccaccggactaaacggaagctgattgatcttgaatagggaaaggagaaagagacggatcaggctaccttcttgtggtaccactacaccgtatctgggagcttgacctattcttggccatctcattagatgcaaagaca

SEQ ID NO: 112010 - DNA, 2146 bp, Zea mays
  Clone ID: MRT4577_33640C.1
ggcgaggcgaaggcgcgcacaatcctgcctcgtttccctccaaattcccaaagctctcgcgcgcggtgccatggcggagcgcctagccgacgccgagaagcccctcgatgccgcgccgccgcccccccgcccgcccgaggcgaaggcgcgcagcaatcctgcctcgcttccctccaaattcccaaagctctcgcgcgcggtgccatggcggagcgcctcgccgcctccctcctccctgccgcctcgccgtccccgtccgcccgccgcgcaacggtcgcagccgcagccgccgcctctttcccctccccatgctccgcccgcgcggggctgcgcctacgctcccgcccgcccctcttctcgcagaaggcggccgggcgcgggtgtggcctgcgggtggtgcggtgcatggcagcgtcggacgcggcgcagctcaaggccgcgcgggaggacatcaaggaactccttaagagcacatactgccaccccatcatggtccgtctggggtggcatgattctggtacctatgacaaggatattaaggactggccacagcgaggtggagctaatggaagtttaaggttcgatgctgagctgagtcatggagccaatgccggcctgattaatgcattgaagcttatccagcctatcaaggacaaatacccaggtatcacttatgcagatttgttccagttagcaagtgctacggcgattgaggaagctggtggtccaaaacttccaatgaaatatggacgtgttgatgtcacagcagctgaacagtgtccgcccgaggggaggcttcctgatgctggcccacgtgatcctgctgaacaccttagggaggtattttatagaatgggccttgatgacaaggaaattgttgcactatctggagcacacacacttggaagagcaaggcctgaccggagtggctggggaaagctagaaacaaaatatactaaggatgggcctggtgagcctggagggcaatcatggacagttgagtggttgaagtttgataatagttacttcaaggagatgagttattttttttgaacgaaattcaggacatgaagtttttgagccagcttccctggaaagagcagaaggaacaggatcttctagttttgcctacagatgctgcattatttgaggacccatcgttcaaggtatacgcagaaaagtatgcagatgaccaggaagcgttctttaaagactatggtgaagctcatgctaagctgagcgatcttggtgcaaagtttgatcctcctgagggattctcactcgacgatgacacaagctcttcaccttccgacgagaagacggaagaactctacactggtagcggtaggagcggcagtagcaacagcgacagcggacgacaacaacggcgcagcttcgcagccggagcccttcatcgctgccaattactcgtatggaaagagggagttgtcggatgcgatgaagcaaaagatcagggcggtgtacgaggggtttggaggcagtccggacaagcccatgcagttcaactactttcttaacataattaacctgattgcggggttggcgttcttgacatctctgcttgggaactgagtgttatatcatcatatgattatgatccgatttctgaagtctacgagtgtccattattgcaaactctgtaaacgtatgaaacatatctacgactagcattagagctacgtacactgtgcaaacagttttttttttttcgcgaattttggagagagacgagcaaaagaaatgtataacgagtgttggagaaataaaaaaaaaaatatcaacacactgttgctgccaaaaaaaaaaaaaaaaaaagaaagagagggggggaagatcaaaaataaaagtgggcggggcgttctaaaggatccaatcttatataccgttacctagatacaatatacttggtctatagttacacctaaattaaatgaaataaccctggcttaacacaactcaagtctggtaaaacaaatccctttccaaactgaatggggttagaagagaagaggccctttacctaagcgcccttaccaacagaaaaggcccgtacaatggcgaatgtccaatcgcattggaaccgtaaattaaaaacggaaggtgacgtggataggcgcattaaaac

SEQ ID NO: 112011 - DNA, 332 bp, Zea mays
  Clone ID: MRT4577_33641C.1
ggccgggtttgctgttaaggcaggaattgatggtctgcttgatgttgctcgtcgatctttctgtgataccagtgaagccatacataacctcgccaaaaagtacagggatgattataatatgccaaatttgaagataacctataatattaggcaaggattttactttattattccccaaaaggacatcaccgataggcttcctaataaatttatccaggttgttagacatgggaagaatctccattgctcaagcttggagcttgcttcactgaatgttaggaacaagtcgtctgctggctgagtgcttctcgcgcacggaactttgtttggga

SEQ ID NO: 112012 - DNA, 146 bp, Zea mays
  Clone ID: MRT4577_33642C.1
gcgtcaaacgtattgcaggcctagacgttgaatcggataccggagcccaccgtccaggttccgccccaccggccgctgtctaccgatttcgccgacgacaacaagcccgccggattggccaagctgacccccgcgagcgagtatcc

SEQ ID NO: 112013 - DNA, 523 bp, Zea mays
  Clone ID: MRT4577_33643C.1
tcccagaaccagaagtccgcgcctcctccgcatctgctccgtgacctccatgaggaaggagaagcacaaccagcgaatgaatactccgaccctgatgtgtgtcgcgcggcggctgtatcatgacgctgcgcgccctccccaagatcttcaggatacgaatattctcgtgtggatagagctccctcgcaggtcagaccttactacctggagtcaggtacgacctgtgctctgtccagctcccaaacccggcgttcataccctcgacctgccatcgcatactcttgaccttattgccgcataacgattgagtgcctgagcactacaaaaggatggaatggccctccacttatgatgaacactttcagcacccatgatggacacaatgacagattgtctaccaaggatcccaagtcctgcatcgagagtcctactttcatgcagagccacgatcctcgcatggctaacgacgagttcttggccctgaccaacgacatcaaagctggctacgaggtgtgccatcctc

SEQ ID NO: 112014 - DNA, 368 bp, Zea mays
  Clone ID: MRT4577_33644C.1
ccggccggggatcctgtgccgtgtgttgagatcttttgggctgttctgatctttatatgtaatcgctctggtcctgcggatcgcgatccacgggactcctcagatcctgctgcgccttgttacctcgacgttcgagttcgagttcatacatagccccgaacagcttgttcgtgcacgagacccagatggatgatggctttgacggactggatgccgtccctgcctgcctcgatgaggattacgcttaccgtactgtgtgccatgacatccctctggaccccaactctattgtatcctgccatctctaccttatctcttgaatagatgataggcataatgtcatcgacgtatatgtcctgatgaactgt

SEQ ID NO: 112015 - DNA, 285 bp, Zea mays
  Clone ID: MRT4577_33645C.1
ccaaagacagcctgcagccctttctgcatggggtgctctgttgacaggcttcccagatccctgagtctctctttccttcctcctcgatctttagttgtccacggtcaattcagtgcttccattgggggacagtcccctccgggatgacctgattcacctccagcccagggaatggaatctagaggaatacgtggggtgggtctggacaaggagcggcaggaatcaccacccatctccagctgtggagccctgtggaggggaaggggaagcttggggttcagaggg

SEQ ID NO: 112016 - DNA, 641 bp, Zea mays
  Clone ID: MRT4577_33646C.1
tcggaagaggatctgagaggagagacatcttcacaaaggacaagatggactacataggatctaccgaccaagatgatcgaaactaggattctgtgatgggtacatctgcgaggctcgtcgctctgaaggccacgtcaaggtgttccatcttaactgtccgaacgaataccaaaatgtttgccaccattaataccgcgaatttgacatagagcccatggatctcttggatcacctcttaaacttctacgattacgaaggaaaagtgacagataatctccaacatgccctatccacaataatctcatgcgtaatttctgacttcttacccataattcaaacctctccatatgcggctcaaccacctcaacgaccccaacgccccctacggcctgcggtctactctacaaatatcgcatcccccgctttgcataaataccatatccgagcttatgccatacacgttgagctcgacactactcccgtctgccaattcctcctatatggacgaatattaatattgttgagtgctcgcagaattaacaaactggaataggtaagatcctgcatttaatgaattctctgctcctgcatatattccccctttcctactgtggtgtgctagcgtagaggcccgcaccgat

SEQ ID NO: 112017 - DNA, 426 bp, Zea mays
  Clone ID: MRT4577_33647C.1
ttattttatagagagaagacataaagaaaaaaaaaaaaatatagagaataaaaagaacattggaataaaatataaaaaaaaataaaaaatatacgggggggcccctttttgggacccctgtgttcgacccactagtttgctgcttcttagctcttgtttgcggctccctaacttcttttctctgcccatgtgtttgcccggccggcctggtatacctcttggcttccccttgttattcaccttgctctgctcctcttttccactctggcttgtaacgatttggccctctccgctcgtgtttgccagctggtgctccattctcttgccatttgggacccacctttttaacgccttttggtggcgtctcatgtgctggtttcacgcatcgttgtccgttttttttgccagcgcctttactcctgctct

SEQ ID NO: 112018 - DNA, 345 bp, Zea mays
  Clone ID: MRT4577_33648C.1
cggatacaaactggattgatttagatttcagcacttacgctggacgatcgggtcaggtacgctcaagacgtggtcatcgctgctgctacggcagctgatgaatatgcctacggttctgcagccatgatagctactggatgtgtcatcgcacgcattcgtcacacaaatcattgtccagtcggagcggctagtcacagagaacagcttcgtgcaaggttttctggagcacctggtcatcttcataactacttgctccttgcaacctaagaagatcaagctccattagcccaggtgggttctgacaaggcgggctacatcagtggacgaacagatttgcctaaacca

SEQ ID NO: 112019 - DNA, 431 bp, Zea mays
  unsure (1)..(431): unsure at all n locations
  Clone ID: MRT4577_33649C.1
ctctatggtttggggctntagcagggttattgatagaaatcaatccgttattcccagatgctntggcattcccttttttttaattctaagtattcctatgccaaaaatagaaatcttcgggacctggccaaaatttcccctttttggaatcctttttaagaaaaggattcctaataagggaaagaagggtaagggatggattccttaaataattccctaaggtttaatacctaaattaccaaattcaaaaattttggcttctattggaatggatttggtcgaatattccaagaattaccaccaaatccttagaaatcacctttttaagtaagaacctccaaggaatttaatcctcctctcctccttgggtcccaaattggagaattaaagaattggtgttagaatttaggtaaggcgatcccaaaagggaa

SEQ ID NO: 112020 - DNA, 1277 bp, Zea mays
  Clone ID: MRT4577_3364C.1
cgcgaagcaccctacctttgctagtcctcctacgtctcctcttcgcttaatcttgcggggaggaggaagatgacggtgacgccacggatcacggtgagcgacgggcggctgacggtgcgcggccgtacggtgctcaccggcgtgccggacaacgtgtcggcggcgcacgcggccggggcggggctcgtcgacggggccttcgtcggcgcccacgccggcgaggccaagagccaccacgtcttcaccttcggcacgctccgggactgccggttcctgtgcctgttccggttcaagctgtggtggatgacgcagcggatgggcgtctccggccgcgacgtccctctggagacccagttcatgctcgtcgaggtccctgccagtgacggcgacggcgacggcgacgacgcccccgcgtacgtggtgatgcttccgctgctggaggggcagtttcgggcggcgctgcaggggaacgaccgcgacgagctgcagatctgcatcgagagcggggacaaggaggtgcagacggaccaggccgcgcacatggtgtacctccacgccggcgacaaccccttcgacaccgtcaccgccgccgtcaaggcggtggagaagcacctgcagacgttccaccaccgcgacaagaagaagctgccgtcgttcctcgactggttcggctggtgcacctgggacgccttctacaccgacgtcaccgccgacggcgtcaagcacggccttcagagcctgtccaagggcggcgcgccgccgcggttcctcatcatcgacgacggctggcagcagatcgcctccgagaacaagcccgaccccaacgtcgccgtccaggagggcgcgcaattcgccagccggctgaccgggatcaaggagaacaccaagttccagaccaagcccgacggcgacggcgacggagagcaggcggcgggcgggctgaagcgactggtggccgagaccaaggacgcgcacggcgtgaagcaggtgtacgtgtggcacgccatggccgggtactggggcggcgtgacgccgacggcggggacggcgatggagcgctacgagccggcgctggcgtaccccgtgcagtccccgggcgtgacgggcaaccagccggacatcgtcatggactcgctatccgtcctggggctgggcctggtgcacccgcgccgggtgcgagacttctacggcgagctccacgcgtacctcgcctcctgcggcgtcgacggcgtcaaggtggacgtgcagaacatcatcgagacgctgggcgccggcca

SEQ ID NO: 112021 - DNA, 447 bp, Zea mays
  Clone ID: MRT4577_33650C.1
gaattgcaaaacaaagctcgactagggagccccagtttgattgccctgatcgccggggttcaatttttacacagtacaagggcgggggttgggcatgtaaccaaacgagctaaagacttggggcacgagccaacacaggcgggtcaagattcataaggggcccaacttctcaagaggatcatgggatcagggcatgggtaaccactgggccacaaaaacaaggtggacccggttaccaacattaatactcctacaaggggaaatctggctaacaaaaggggtgatggccccacagggcaagaacatctgaaaatgacttgacataaccagagcgctcaagggaccataatgccccttgggcggggttctcccgggcaggtttttttttagggttgggggccctgaaacactccataatgggggggaccaggccatccaagggggcgg

SEQ ID NO: 112022 - DNA, 526 bp, Zea mays
  Clone ID: MRT4577_33651C.1
aattcggcacgaggctgacgtcgccacattcgcctcctccctcggcctcctccctggcgctggcgactccaacggcggcttcgacgactcctccttccgcaagtccggccccatgtataaatcctcaaaatttccttccaaacaaccccatcaaaaacctgataacacggcaaacccccatctaaaccctagacctaccaagaagccacaccctctcgagctacgtgactcctatgctgccaccaaacctggtgctgtcaacactaattaccccctgatgaaggcggcagcactctcagggcagtggtacactgatgctgatgagctggaggcgagggtcctgggcggacgtaagcaggtgcctccagctgtggggcttcaggagatgcagggaatagtggagagaaaacgagagctgacaaagaagctcatgttgcagaatgcgagggaatacaatgccgtaaggcgagggcatggtgacctgaagctactgaacatatcaaaaaagactgaaacatcaactaac

SEQ ID NO: 112023 - DNA, 343 bp, Zea mays
  Clone ID: MRT4577_33652C.1
ggcccacaaaaccgaaggacatgtaaaagatgccggaggggaaccagctttttagccaaaaggccaacacaaggcagtttattggggggcccggggggttaatgggaagtacacccctgtgcacatataaggggcttttttttttttttcaaaatggtttcgggttgtttttttagcccggtgggggcgggcctttcaggcgccccccggggcccgcggccctttggttcctttcacccccggggggcggggttccccccagcaacccggccgcctgtgtgtcccgggcccttggtgggctcgtggcttggttttgggccggggggggcgcttctgggggtcc

SEQ ID NO: 112024 - DNA, 199 bp, Zea mays
  Clone ID: MRT4577_33653C.1
acgcgtacgcgcacgcgtacgcgattcgattacgactcgactcgactgctcgttcacggtggacatccactccatggacgagcgcgagcgccagctgcatcaccgtattctgggatacccatgcatgcccaagcaagaatgaccactgacgctagtctcgggggccgtacggcgacgtgcacggccactagcgacctgc

SEQ ID NO: 112025 - DNA, 463 bp, Zea mays
  Clone ID: MRT4577_33654C.1
tctctctcgtccgcggcagaagcgttgaaaacgcgggaatttattgaggctaacgcattgtcccctgcagtcgcgacttctaatgcatctctgcgcaagctgtgccaagatggcaacataagggatgcatacaaactcttgactgagatgagtgaaaggaaaatacaagctcgcaatatcacatgcaacacactaattaatgcttactgcaagattgctgatttgaaatcagctttgaaatttaagaacaagctgttagaagctggattaaaagctgatccatttacatataaagcactgattcatggcttctgcacgacgaatgaactaacaagggcaatacgagtaatgtgcagcatgcttgatgctggatttacccccagatatcgcacaaactaacggattgaccatggctacaattagaaagacaatatggatgcagttttagcacttacatgagttt

SEQ ID NO: 112026 - DNA, 279 bp, Zea mays
  Clone ID: MRT4577_33655C.1
gcgaattgcgaggagtactggtcgcttcagatggcgtaccaggttgtgcagcggcttatctgcctgaagtactcgaaccatggcgacgactacatccgtgaagcactgcagaatctcaaggagagctattctgcgggccggctaacataagaggtctcaacagtgtatgccgctggaggatccataagccaatgtatatattcctccgtcaatgtgatactatcttaggtcctcaaacgcacatctatcgttatcgcacatgccatgtaacatcttatc

SEQ ID NO: 112027 - DNA, 445 bp, Zea mays
  Clone ID: MRT4577_33656C.1
atgcaggccgtgtcatgcccgcaagaatatatctggtgacagagaaggattctctcgatgctgccgtattggggctcaatggctaccacatattcagggcagcacccagacagtatggagtacaactagagagtgtcttggtggagtagtgtggattttatagactccgggatcttttcgacgattgagggatcgtgaggttctatgcagggattgttgtgtgctacggaatgtggatcccctgggattgcattctgtgccacatgtgtgtaagacaaggtgctgcgctcgggggatcactgtgcctgcgttaccagctgactacaccgtgctgttcataccgtgagaaacaggctacagtgagcgctgacaaggaagaaatacagtgtgtgcctgtttacatatagcgttgtattactgtctgaaaccgaaactgtccacctga

SEQ ID NO: 112028 - DNA, 553 bp, Zea mays
  Clone ID: MRT4577_33657C.1
gccaaccagaaataagaagttacatttccagattctaatgtgaaaaaaaaaaaaaaaaaaaaaaaaaaaaaaaaaaaaaaaaaaaaaaaaaaaaaaaaaaaaaaaaaaaaaaaaaaaaaaaaaaaaaaaaaaaaattaaaaaaaaaaaaaaaaaaaaaggtttgaacttgcccggggggcctttaaaaagggcaaattttgaaaaaatccaaaaaactgggggccgttaaaaaatcaattaaaaggcccaaattccccttaaagggagtggaataaaaattaatgggccgtgttttaaaaacgtgggaattggaaaaaccttgggttacccaaattaaatccctttgaaaaaaatccccttttcccaagttgggtaaaaaccaaaaagcccccaaccaatcccctttccaaaaatttgccaaccctaaatggaaaatgaacccccctttaacgggccaataaaccgcggggggggggggggtaaccccaagggtaacctttaaatttgcaagcccctaagcgcccgttcttttggtttttttcctttcttttt

SEQ ID NO: 112029 - DNA, 226 bp, Zea mays
  Clone ID: MRT4577_33658C.1
ttccccggccttgcaacgtaatagtttttttatagggcccccaaaattaaattaatgggccggggtttaaaaacgtggggatgggaaaaaccttggggttcccaaattaaatcgctttgaaaaaaatccccttttccccagttggggaaaaaccaaaaaggccccccccaatcgcctttccaaaaagttgcccaccctaaagggcaaagggaaccccccttgaagg

SEQ ID NO: 112030 - DNA, 511 bp, Zea mays
  Clone ID: MRT4577_33659C.1
ctcgccgggatgtttttttcctcccacgccccgagcatcgatcatccccgtctactgtggaaagtacacagatgagctcatcaagaatgctgtctacattggaacccctggcaagggtatccttgctgctgatgaaggcactggcaccatgggcaagctcctttccaccatcaatgtccacaacggtgaggagaaccgtgcgtgccctccgtgagctcctattatgatgccctggtgctctccacgacatacgcactgtgatcctctacgaggagaccctgtaccagaagaccaacgatcgcctgcctattgttgctgtccatgaggatggacgtgtcctccctggcatcaacgttgacaagggccccatggatgcttgacgccactgattacgagaccaccactctaagtgctgactaccttggctagcgctgccccaagtactacgaggcaggtgcccgcattgccaagtggggcgctgatctcaagacaggcccttatgagccctcac

SEQ ID NO: 112031 - DNA, 627 bp, Zea mays
  Clone ID: MRT4577_3365C.1
atgtgctttgtcactaatgggagtgacagtgaaagcgaaattgaggatgacgaggagcatgaaagtgatagtgaagatgaggacgatcttcaacaattcttcgctcaactaagcaagaaaaattggatgagcttgctcaaactcatgaaaagagcggaagaacaaaaaggaatgctttataagcaagaagacttcctcatcagaaaaatcgaagacttagagaagttgaccaaagagcatgagaagctaaagtgctctcatgatcatttggtccaaaggtacgaaaagcaagaattttcaggaacaagtaatgtttcctatgcaaaagaaaacaatgagctcaaggaagaaaatgagaggctaaaaaggagcttgactcaattgaagggaaagtgtcatgctcaaccttctaaagataaccgtgataatatggtgaaaaagcttgagaaggggacaaccgtagcatgcacaaaaccccttcaaaagaataccaagctttccaagaagcgcatgagcaaaattcaaggtgagaaaattaatgctcatactatttgctctaacaatgtacctatgtgcttcaacaaagaaagatcaaagagaagcgatagaatgtgctatggatgctag

SEQ ID NO: 112032 - DNA, 644 bp, Zea mays
  Clone ID: MRT4577_33660C.1
ttttttttttttttattttttttttttttttttttttttttttttttttttttttttttttttttttgggtttttttttttttttttttttttttttttttttttttttttcccctaaaggccccgagtaaaattcccaaaaaaaaaggggaaaaacaacccctttccaaaattggggggccggggaacttttgggccactggggggggggaacttggggaaaaaaccgggtggcccacctttggggggggaaaccccctagggggcccataaataaaaccccaacccccccaaaaacggggggaacacacccccaaaattggttttaaaaaaggaggcaaaaaacctctaatgggaacagggacagggccccccaaaccttaaaaacctgggctggtaaaaagccttggggaaaaagaaaaaagggggccccgaaccaatcgggggcccccccaaaccacacattttttacccccggcaaaaaatgggggaacaaacccctttgaaccttggaaaacctggggggcccagggcaccctaaacggggttaggcccccgggcctgccaaaggtgaaaaagccttcctttggggggccgggcccatttaaatgcgcctgggctggggccccaggaaactgtggccc

SEQ ID NO: 112033 - DNA, 140 bp, Zea mays
  Clone ID: MRT4577_33661C.1
cggcggaggaggtgtggtaggagatcactggcgcaggtggcagtgagctagccgtgactcccgtggcggctcaggctgacgctcccgatggtcgcgctagcacaagcggaccggatgtgacgctggagcacttcctggcc

SEQ ID NO: 112034 - DNA, 124 bp, Zea mays
  Clone ID: MRT4577_33662C.1
gacccacgcgtcccagcagctctagcgcgactccaactttaactttttccaactccgacactctcacaagagacagcgaattcctacagcagaacaacaacctcctacactcacagcttaacat

SEQ ID NO: 112035 - DNA, 236 bp, Zea mays
  Clone ID: MRT4577_33663C.1
ataaccccaaagcaaaaaaattttaaagagggtccccttgggattcctttttccgacaccacccgggacctgggtttttttgacaaacccattgacatccttcctttgtttaaaccccacccggtggcccaacattacccaaggttggggccacaattcaacattgggcccttcttagaaatttcggacatttttgccaaaacccttattttttggaacccaattttttttacggg

SEQ ID NO: 112036 - DNA, 274 bp, Zea mays
  unsure (1)..(274): unsure at all n locations
  Clone ID: MRT4577_33664C.1
ccggnccggaanaacgcccgggtcgacgagcccacnagncggcggccgcccctnnnntttnnnnncgcgagnanaaanaancggggaggcaaggaaaggcggaggcgaccnccaaaaaacacgcgagaagagggcagaggcaagcacaggcaaaacacagaaaacggcaaagcaagcaccaccccaancgcngaacaagaaacaaccaacgcaccaaaaaacacggacccacaaggcggcccgccgaggcagaccccgcaagaaggcgcggccc

SEQ ID NO: 112037 - DNA, 157 bp, Zea mays
  Clone ID: MRT4577_33665C.1
agccccactagccgtagaaagaattcagatattacgggaatgcaaaggaaaaaaactgcgggggggctatcccccccacggaaaaaaggaacaagagagttagctcttgacagaaatacagggaaccacttggtgacgggcaggacccgcaacacaa

SEQ ID NO: 112038 - DNA, 907 bp, Zea mays
  Clone ID: MRT4577_33666C.1
ctctttttttttttttttttttagacacagtataacatttttttttaactacccaggacacgctgctaacgttaacccgctacgttttcaagaaaggtaacgaaaccacgagttggaaggggatatcaggatttagatagacacatcaagaattacagatactacaagcactatcagtaactgaacaaaaaagagagagagagaagagagagagagagagagacatacagaatcgtaaactgatcttacagcttacattcatggtcatcacatccccggttgatgcgacgatagaattgaccacccagcacccgacgcgagctttggcgcctcaatattgtgcctcctggtccgtccatagcaaggctacacatataatatatataatataatcatcgacgagcctgacaaaaaacatttccacaatccaatcggggatcagcgtcagctagctacatagtgtccgaatcgtccttgttataggccagcgggaactcgtcgaactgctccgtggcgtcgcggccctctccgatgctcttcagggcgtggtagacccggtacatggagtgcctctccctcacgcgaggctgggtgcacgcaaaggctaccttcaagaactcctcgatctctgcctcgtggcccttcccgcgcaaaagtttgtcgacagcatcaccgatccggccagaggccttgagctgataaacccagtccaccaatgtgcccttgaacccttcgcccgtcacgtcgacggtgcccaccgcagcagcagcagcctcctgcccgctaacgagctcgaacagtaccaccccaaacgcgtacgcgtcgcctttcgtcgtgccgaccggattgctcgcgcactctggagcaacgtagccgaactcccccaagtctcccttgaggaatgtgc

SEQ ID NO: 112039 - DNA, 739 bp, Zea mays
  Clone ID: MRT4577_33667C.1
acttcccttcggcgccgcctcgttacagacagcgggagcgaaagagcaagcggcgagagaactccgggagagggcggcgagatggtgcagcggctgacataccgaaagcgccacagctacgccaccaagtcgaatcagactcgcgtcgtcaagaccccaggtgggaagcttgtctaccagtacaccaagaagcgggcgagtgggccaaaatgcccggttaccggcaagaagatccaaggaatcccacacctgaggcctactgagtacaagaggtccagattgtcgaggaacaggaggactgtgaaccgtccttatggtggtgttctgtctggtcctgcagtcagggagaggatcattagggcgtttttggtggaggagcagaagattgtgaagaaggtgcttaagatccagaagaccaaggagaagaccaccaagagctaaacaactgggcgagataggcgtcgcggtgatgttttgtgtttctccgaatttgttttaagcaatcaagaattttctctcttgggatttgcagaatcctggttctagtatgtgaggtttgatgtgcttctctagattttgcgcctggttctctatggatgcttagcctttgatgcaagagctttcgggctccaattcggcttagatgctcttgagctgcttagctcagttaacgctgtcaggctttatttgtcacacgagaacagtttgctgcgccctattctgctttcatgcatttttg

SEQ ID NO: 112040 - DNA, 348 bp, Zea mays
  Clone ID: MRT4577_33668C.1
ggggttggtttaattttttattttttaaatcccccggcaaaaacccaaaccccggggccctattattgaataaaaaaaaacttggaactttttaaacccgtttttagttacaaaaaaataaggccccattgcacccccccacccacccaaaaaccctacctgtgtacaaaattttttaacccccaggcaaaaccgtaaatattctggaagggaaaaaacttttgggcccacaccctgggaagtttttaaagcttccaacacgtgccgtccgaatgcttttccccaccaacaaccaaggaattctaaaggcccatccaagcaacggaaccccatgggagccccaactcg

SEQ ID NO: 112041 - DNA, 178 bp, Zea mays
  Clone ID: MRT4577_33669C.1
cgagtaatgtcaagctaccgttggccaagacagtttcaaaatggacacgatgttaatgattgggttgggccaccaaataataatggagtaattaaagaagctactattaatccagacactacttgtggcaatgactgggtctgtgaacatcgatggcgcaaataaggatcatggttat

SEQ ID NO: 112042 - DNA, 487 bp, Zea mays
  Clone ID: MRT4577_3366C.1
cgtcgttcctggactgtttcggctggtgcacctgggacgccttctacaccgacgtcaccgccgacggcgtcaaacacggccttcagagcctgtccaagggcggcgcgccgccgcggttcctcatcatcgacgacggctggcagcagatcgcctccgagaacaagcccgaccccaacgtcgccgtccaggagggcgcgcaattcgccagccggctgaccgggatcaaggagaacaccaagttccagaccaagcccgacggctacggcgacggcgagcaggcgccgggcgggctgaagcgactggtggccgataccaaggacgcgcacgacgtgatcagcaatgtcggcggcaaggccatggctctcagggttcgcggatgcggtcggatcggcgcttactgctcgcgggagccggcgaggtgtctattggactcgtcggaagtggagttcagctacgatgccgacaccggccttgtgtgcgtcgacct

SEQ ID NO: 112043 - DNA, 263 bp, Zea mays
  Clone ID: MRT4577_33670C.1
gggacgacaccttcgctccgcggccgtgcggcggctggcaaacctccgatgcgtgcgcacattgctgactgagtgagccatcgcgagctagcagcagcaggcacgccgagctcgccaacgatgaacatccagaggcccgatgactaaatactactgactagtacatggatggggacacctgctgacacgggatgaacctgccggacacagttggactgcacttaccgaagcagttaccgaaggtgcagcgcccaatcgaagat

SEQ ID NO: 112044 - DNA, 453 bp, Zea mays
  Clone ID: MRT4577_33671C.1
ccgcttcaccatctttgctgccttcgatacataaacagcacaaatggattactagcagggattatagttctacacccttacgccttcgctcgcgccgccgccgccgacgccgctacgccccgcacctcgcttcatttcgtgtctccaagatgacgaagcgcactaagaaggcatgaattgttggcaaatatggaaccaggtatggtgctagcttgcgtaagcaagtcacgaagatggaggtatctcagctttccaagtacttttgcgagctctgcgggaagcttgctgagaataggatagcagatcgaatctgggggagcaaggactgtgggaatgcgcaggctggtggtgcttacaccatcatcactgctagcgcgctcagcgcaaggagcactatccgccgcctgaggcagtgcactgaggtaggatatcgctctttatagtagtggggtt

SEQ ID NO: 112045 - DNA, 1335 bp, Zea mays
  Clone ID: MRT4577_33672C.1
ggcgtcctcgaatgtggccgggggctcctgctgctgggctgggcggagaaaaactacaacgttttatatataaattaaaacgtagggagcaagatattttgggaaggtttgaggcttgatgcattttagcgaagtcaggtcggcgtatgccaaatgtctcgttaagacaccgctgcagtgcagactgtagagtgcagactcgccgagtacgactcctcacgaactagtccgtttccgtgcgctgctgctgacgagggagtgggagggatcatggtggcgccggacgtgaaggcggagacgatgaagctgatggatcagcggggtgccctagaggcggagatggacgccatcatcgcccgcctcactgcggcaggcggaccgggcatcaccggaggcctcgtcgacgccgagggtttcccaaggtccgacatcgacatcccgaacgtcctcgcccagcgccggaggcttgctgaattgcgaaatgaccacaaggatgttacaaacaaaattggtaaaaatcttgaggttttacactcagcaaagttatcaaggaatgaacaatcaacctcaaggagatctgatacaacagatccttcacactttggatcatctcaaagtgaacctatggaagaggaccatgtgactggacttccttttgccatgattgatgaaatcgctgatggttctcctgcttctgtggatggtttgcaacttggagatgagattgtaaagtttgggaatgtggaagctggtgatcagttgcaggaaaggctcatgtctgaagctctttccaatgaggacagtcaagtatctttagtcatcattcgccagggatcagtggtgaatttaacaattacaccaaggaagtggcatggaagaggacttctggggtgccatttccgaatgctatgaagagcccatcgttcttcagcaggatcgttggtctatcgatgtcatttcagcagcaaagtgaactgatttaaccgaatgtgtgacatcttccaaaatactggttgcgtgtacttaacttgagcgcttgaaacatactggtgtaccaggcggtgttgagacattttacttgtacacatggtcagttttcgttcttcctcgcgtgcgtatcggtatcgcacaccaacttgaaaaccaccgtcaacgttcttctagttcatacggtcaggacccagagtaggttgcatcaatcaacagcttaaaaagggccatatgctagcgatgcaagtttgaatccatgagcagattagggaacctttggtatcagctctacaccttctgtaagggtgtttctgtcacgctaaagaattaatatatgatgctaac

SEQ ID NO: 112046 - DNA, 276 bp, Zea mays
  Clone ID: MRT4577_33673C.1
tctcaacaatgcctcactacgtaggcgtcttgaagcggtttatatttcgccattttcaatattcgatatatgatttgcgtcgattcagcatgtatcatatttgggatacttttgtcttctatcggggcgtttggtttgcgaattgaagcgaggcgtatcacggcgtttacgcatctacatttattgcatcacatagcaacactttcgatttaatcgaaaaatcattgcctaaaagattcccccccaggtttcaaaaaacaagcctggtttcatgga

SEQ ID NO: 112047 - DNA, 109 bp, Zea mays
  Clone ID: MRT4577_33674C.1
cagaggagaatcggcaggatgctgaagcatggtaccttactcagattgatgagctgaacacccaggtcgatgtccacactccgcagatccagataaacaagactgaggt

SEQ ID NO: 112048 - DNA, 623 bp, Zea mays
  Clone ID: MRT4577_33675C.1
ggatcatctcaaagtgaacctatggaagaggaccatgtgactggacttccttttgccatgattgatgaaatcgctgatggttctcctgcttctgtggatggtttgcaacttggagatgagattgtaaagtttgggaatgtggaagctggtgatcagttgcaattcggctccaggtctgaagctctttccaatgaggacagtcaagtatctttagtcatcattcgccagggatcagcggtgaatttaacaattacaccaaggaagtggcatggaagaggacttctggggtgccatttcagaatgctatgaagagtccgtcgttcttcagcaggatgcgttggtctatcatgcttgcactcgtggagagtggagacggctctagcgatgccatttcagccgcaaagtgaactgatttaaccgaatgtgtgacatcttccaaaatactggttgcgtgtacttaacttgtggagcgcttgaaacatactagtgtaccaggctgcctgtgttgagacattttacttgtacacatggtcagttttcgttcaaaaaaaaaaaaaaaaaaaaaaaaaaaaaaaaaaaaaaaaaaaaaaaaaaaaaaaaaaaagagaggggggcggaccggt

SEQ ID NO: 112049 - DNA, 263 bp, Zea mays
  unsure (1)..(263): unsure at all n locations
  Clone ID: MRT4577_33676C.1
cccaagccacccgtcggcagctacgagtaaagatgcacatccattgtttttaaccctgnacgagcgagaccatcacccccgaggagagaaagactgacaccattggcaacggccacgccaacagccaggagagcgagggcatgccccaagagcagcagcgggccatcttgctgggacgagcgtgacgaagggcgcacgcttgctgagtacaggatcgagaaggagagcaccctccaccctgcagctccgaactaagggagagg

SEQ ID NO: 112050 - DNA, 539 bp, Zea mays
  unsure (1)..(539): unsure at all n locations
  Clone ID: MRT4577_33677C.1
gggtacctcgaggccggccgggccgggcttcatgacgtgnagccggcggcgcggcggtcgctgctgctgtgcgcgctggcggcggnncgcgnccctangggccttttttttttttttttttacggaaaaggagcatgatcatgtagctaagctaacccctccatactagtctgattacaatattacttcagttcaaatgaagtttggatggcagataagatgttacggctatttctcaacattaccagtaccagttgcaactaaggattccaatgccgcttaatcatcactcatgcgtgggcttgcctcaatttgcttggcagccaacagggctcgaactccggtgccttggtcagccatatcaacggatgtctgcccgcaagtgttctccttcctgggggacgccccaaccctggagaacaagatcgacaacatccaaatgttctcctccatctacctgatggagtggcgcacccccttcataatccatagcgttgaggcttctcactacgcacccacctttgttggcagcaaagatg

SEQ ID NO: 112051 - DNA, 215 bp, Zea mays
  Clone ID: MRT4577_33678C.1
cacgataagaagaatccccctgcagtgcagtacacataacgagtgaataaaacaactgcacgatgcacattctgctcgacgcccccaagcacgactcggatacctcgcaggctgacggcgatcagtgcatggtgcacgtactactacgtctacactccttcttcgagctatgagaacataggacagatggcacattcaacgccgccgacaccgac

SEQ ID NO: 112052 - DNA, 802 bp, Zea mays
  unsure (1)..(802): unsure at all n locations
  Clone ID: MRT4577_33679C.1
ccggcaatcactaatcaatcactcctttccttccctctactttccattcttctactaatcaatcactcatcaatctctcctttccttccctctactttccatacttctattttcctttctagccactgctttccataagctcctgctgatctcccagatctgcgcgccctgcgcgctcctgtgcgcagcgcctgtcacgggcgcgacgctgcctggcgtacgagcgcccgtacatgacatatactttcctttatgattctatttccttcatgcatcctactttttcaaatgattctattctggtgctgatggtggtgatgacaacagttctgttggcactggttcatccacctagccagcggccacctagaacctccacttctctagggcctctctttgtttgttgtaacacgctggcatggagagactcttatcatcttccagtgtggcagtggcagcatcaaggggtgggaactgagttgggggttcatctgggctatggttggtggattgggctcccaacgcggtctggagaacgtatggggaaatctttggtgtgagttttggggtgtttgtagccgttatttctgctttctcttacgaatataattgcatgcagccctctagggttttcagaaaaaaaaatggggaaatctgtttcaaacatactctaaactacatcctcttgtttcctctcccaccattctttntggacacatgtagtacatggttcacctttnttttctggtgtttacatatacanaaagactcgtttatatcagatgccttatgacttcctttt

SEQ ID NO: 112053 - DNA, 1656 bp, Zea mays
  Clone ID: MRT4577_3367C.1
atgccggctacacgcatagtgtcgcttcgcctccagtccaccctcctgaaaaaaggagatcggctgaacttcaacttcaaccggggtccagagaggttcaaccggggtccagggcaagttcaaccggggtccagagaagttcaaccggtgtctagggaaagttcagccggggtattttcccaggacctcactgatgttgatcctagggcaatagaccttgccatgagaatcgccgaaaggatgtttctcaaaatgaaagaagatgaggcaaagaacaagattgaagaagaaaatgatcgatggagaccaaacgacgaatccacctcttcacaaggtttgtctttcaaatccacttctcatatgtgctttatcgctaatgggagtgacagtgaaagcgaaagtgaggatgaggaggagcaagaaagtgatagtgaagatgaggatgatcttcaacaattcttcgctcagttaagcaagaaaaatcggatgagcttgctcaaactcatgaaaagagcggaagaacaaaaagaaatgcttcataagcaagaagacttcctcatcagaaaaatcgaagacttagagaagttgaccaaagagcatgaaaagctaaagtgctctcatgatggtttggtccaaaggtatgaagacatttcaattgagaaaattagagctattaatcattcatcatatattgctcaattagaaaataaaaatgttatgctcaagaacacgatagaaaagctaaatattgaaaatctagctttacaagaaaaacatgatatgcttgtgtgctctcataataaatttatagattcacatatcatgttagaaatggctcatgaggttgtgttaactaatttgaaatcataccaacctcacatatgcacatgtactcaagtagaaactatattatcatgtgctaacaaatgttgctctcaagaaagccaatcttccattgagttagaaatttcaggaattagtgatatttctatcacacaagaaaataaagagctcaaggaagaagttggaagactaagaaggagcttaactcttttgaagggaaagtgtcatgctcaaccttctcaagataaccgtgataatatggtgaaaaagcttgagaaggggacaaccgtagcatgcacaaaaccccttcaaaggaataccaagctttccaagaagggcatgagcaaaatttatggtaagaaacttaatgctcatactatttgctctaacaatgtacctatgtgcttcaacaaagaaagatcaaagagaagcgatagaaggtgttatggatgcaaggagaagggtcatgaaattgattcatgccctcacatgaagaatcaagaccttgcacgatcaagaaagatgaccatcaagaaagatgaaagcagaaggcaaatgcattgcaaggacaagcaccgcatttgctacagttgtcgtgaaaaaggtcatctattcaaggtttgtccaaagggtaaaattcctaagcctaacttgtcaatacattcagatatgcttaggagacccaaatttgattcttgtgctagaaaggtgatgagttcaccacattctaggaccaaggctatttgggtgcctaagtccttattggctaaccatgatggacccatcatgagatgggtaccaaaatatacttaa

SEQ ID NO: 112054 - DNA, 238 bp, Zea mays
  Clone ID: MRT4577_33680C.1
tacaagaactagagcatcccgtgcgagagaacgcgttttccgcgcctgtgggacacgtgggtcctgtgggataagagcgcgggcagtctatggctggttaggcagacgcctgactcgcagcccttcatattcacgtctcgcggcgctgtgcgagcagtcgtcccagacgttatctgatacctcgtgatgcatttcaccgtgtccagctacgagcagttcgaggcccaccttcgctcca

SEQ ID NO: 112055 - DNA, 146 bp, Zea mays
  Clone ID: MRT4577_33681C.1
aaatacgacaaatgcattattatattacaccaccaggacacgcagttcaacagcgtgacatactttgggagtagacgcctcctagctcatatacagaacatcgctgcagcatgactcacttatctccgcccttataatggatgatg

SEQ ID NO: 112056 - DNA, 473 bp, Zea mays
  Clone ID: MRT4577_33682C.1
ggcaccaaagatgcttcccctttcattggcaagcgattttggcaggaattcaattaattttaatggcgggccaatcaccggccaaaaaagaagagtgggggaagcccggaacacccctggcctgggacgggccgcagtttttggggggaatttttgaatgggggtgggggttctttttttatttaaaacattggggggggaattggtttttgggtgggggagaatttacttgggggctgggttagccaggggttttttcttcggcaggttttgggccgggggattcattttttttcttgggaacctattaattgggagggcctggaccaattttcatttaccccccctggatggtactgggaatgaataaatgggttccaaagggacccccgttggacccttcaaggtcccccccctgggaaccaaaggtcccttaaggggttccagaaccccattaccaatgggggcaccag

SEQ ID NO: 112057 - DNA, 323 bp, Zea mays
  Clone ID: MRT4577_33683C.1
aaaacgctgtttccaaccaccgatttgaagtttaatggagcggggggttaataacaggtttctacaggttatatacagaatccttgccacaagaactgttatccaggggccaaaccggaaaaacgggcgacgtttccacaaataaagacgcctcaatggcaggggttgggcccccacagaccatccaaaatgcaggtaaagatctacgctggggctttaaaacaaattcctttttataggttttggccgtaggctcccaaaccatccatttcctgttccctacattggagtgccgcccggattcgggacgaatccatattatg

SEQ ID NO: 112058 - DNA, 266 bp, Zea mays
  Clone ID: MRT4577_33684C.1
caccacaagcagaaaaaagttattttaaggtcccattttaccgagcggatttgtcacaaatggtagcaggaagggaaacaaaagtgcaaaacttgtccaaattcagcatgaacctggcgacccaaaggcccgccccttccactttttttttgggattacacaagcagcacccttccttgaaaagcaggggggaaaaacccttattgggttttgaacatgtgggggatcaggtcaacaacccggttgttgtacccccattcgttgtc

SEQ ID NO: 112059 - DNA, 377 bp, Zea mays
  Clone ID: MRT4577_33685C.1
gcggcaaaccctagccgacatatctcacgatccactcgagcaccaagccgagggaaggtgaagagcgatggggcgcggcgtggtgtcggcgaatggcggcacgcgtcgcgggcaagaagaaggggtcggattccttgacgatcgactgcacctagccagtggaggacatgatcatggaggtcgcctagctcgagaagtgcctgcaagagcgcatcactgtcgcctgcggctaagctggctacctcggtgactccgtcaccatctctcgcgagaagaccaatgtcaccgtcacctctgaccgacccttatcctagaggtacctgacgtactcgacccttaggtacttgtgtacacacaacgtgcgggattggcttctc

SEQ ID NO: 112060 - DNA, 267 bp, Zea mays
  unsure (1)..(267): unsure at all n locations
  Clone ID: MRT4577_33686C.1
ctccaatttacaacaccagacctcccatccacacttgtttcattcacacatttttgcggtcacacacanccaaagcatccacccatggcgcctctcctcctgctcttcctcctctgcggacactgcgccctcttgtctctcgccacttcctcacgcgccaacgccaagaagcgcgatgacgtcaagagcaacagcaatagcagagactccggccaggagacaagatccatgaactactgctctccagaggagacacagcaacaacat

SEQ ID NO: 112061 - DNA, 756 bp, Zea mays
  Clone ID: MRT4577_33687C.1
ggccgcttttttttttttttttttggagttgctctaaaccttgtaatttagaatatactcagtttggaacagggaaaagtacgtacttgcatgcatgcatgcatatatatatatatatatatatagctagaattattgagacgacacgtctcatctcctgcgcgggcggtactgcatgtggtggcacaagacgacgggccctggcggtgtatagctagctagaattataggaggtcatcctccttgtgcgtctcgatgacgacgtcggaggtggggtacgcagcgcaggtgagcacccagccgtcggcgacctggttgtcgttgaggaagctctggtcggactggtcgacggagccggagacgaccttgccggcgcaggaggagcaggaccccgcgcggcaggagaagggcaggtcgatgccttcctcctcggcgaagtccagtatgtagacgtcgtcgggcacctgcagctccacctccccctccggcgtgatcagcttcacgttgtaggtggcctgcgcgcgcagcagctggcgccgcatgggggccgccagcggcttggcaaccgcgaccctgagcctgagtggggacgagaagcagggcggcggcgcgcggaggatgctcatgctcagggcggtggcggccattggatggcgatggaggatggactcactcgactggccggccgggcgctagctgctgcgactacacactacacgacacgggcggccacaccccggcccggccggcctcgag

SEQ ID NO: 112062 - DNA, 354 bp, Zea mays
  Clone ID: MRT4577_33688C.1
tgaagctgtgtatgggggttaaaggggcggagacgcagtgaagcactaggaatttctcgtcagttgtgcaacctcgccgcggagtcaggggttgtcaggggatgtctgcatcggcgataatagacactgagaacgacgaagaagtaatggttgaagaagaaggagtgtggcgaccaacacctgaagacccacctgcgaggaactacttttatttggacttgtggacagagccgactccctatgggagagcgaggtggcggagcaatttggagagcaagtggtacatggggatctcaagtctaagtatcgaggttaccaatcacgtgaagagcgagcgggtacctggggatccca

SEQ ID NO: 112063 - DNA, 1344 bp, Zea mays
  Clone ID: MRT4577_33689C.1
ggccgcttttttttttttttttttagttgaatcttgtaatttagaatatactcagtttggaacagggaaaagtacatgcatgcatgcatatatatatatatatagctagaattattgagacgacacgtctcatctcctgcgcgggcggtactgcatgtggtggcacaagacgacgggccctggcggtgtatagctagctagaattataggaggtcatcctccttgtgcgtctcgatgacgacgtcggaggtggggtacgcagcgcaggtgagcacccaaccgtcggcgacctggttgtcgttgaggaagctctggtcggactggtcgacggagccagagacgaccttgccggcgcaggaggagcaggaccccgcacggcaggagaagggcaggtcgatgccttcctcctcggcgaagtccaggatgtagacgtcgtcgggcacctgcagctccacctccccctccggcgtgatcagcttcacgttgtaggtggcctgcgcgcgcagcagctggcgccgcatgggggccgccagcggcttggcaaccgcgaccctgagcctgagtggggacgagaagcagggcggcggcgcgcggaggatgctcatgctcagggcggtggcggccattggatggcgatggaggatggactcactcgactggccggccgggcgctagctgctgcgactacacactacacgacacgggcggccaccgccctgagcctgagcatcctccgcgcgccgccgccctgcttctcgtccccactcaggctcagggtcgcggttgccaagccgctggcggcccccatgcggcgccagctgctgcgcgcgcaggccacctacaacgtgaagctgatcacgccggagggggaggtggagctgcaggtgcccgacgacgtctacatactggacttcgccgaggaggaaggcatcgacctgcccttctcctgccgcgcggggtcctgctcctcctgcgccggcaaggtcgtctccggctccgtcgaccagtccgaccagagcttcctcaacgacaaccaggtcgccgacggctgggtgctcacctgcgctgcgtaccccacctccgacgtcgtcatcgagacgcacaaggaggatgacctcctataattctagctagctatacaccgccagggcccgtcgtcttgtgccaccacatgcagtaccgcccgcgcaggagatgagacgtgtcgtctcaataattctagctatatatatatatatatatgcatgcatgcatgcaagtacgtacttttccctgttccaaactgagtatattctaaattacaaggtttagagcaactccaaaaaaaaaaaaaaaaaagcggcc

SEQ ID NO: 112064 - DNA, 416 bp, Zea mays
  Clone ID: MRT4577_3368C.1
aattcagtatttaggccaaattttaggaggggttctatgcattcttcggcggtaaatatttttatttcttcaacgatataaatttataaaaaaacaagggttcgaggttttccaactataaagatgggggggaagcaaagatttccctaggaattaaagataattttggggaatgttattaaaaatattatgaagtttttaaaaaaatttttggataattttttaagaacatgattttctccccacaacaaaaaaggggaaaaaacatccgaatccgttttcgaatagacatcccaattttatatgaattttttaaaaagatatagaaagaatttaatgtttatttgttgggaagataatagtcttaacgcaaaaaaagttataaatttaataccaaatccttatgttagctattc

SEQ ID NO: 112065 - DNA, 201 bp, Zea mays
  Clone ID: MRT4577_33690C.1
tatttaattttttgaaattcacatcttaccagggggggtttgtaggatatgtttggcagaaatggacctggccaccctgagcaaaacaaaaataaaccagagacaacgcaatgcgagcccgatagtgattactggagcaacaaaaaaaaactgggccaaatgacccaccaaggacatctgaggaaaccttgaggcatggga

SEQ ID NO: 112066 - DNA, 414 bp, Zea mays
  Clone ID: MRT4577_33691C.1
atggggggccaaaggtttattccaggggagggccaaaaaattttggttaagaggaaacatttccccccccttgaaaggggggacaaaagtttttcccccccacccaaatttaggacccaaaagatttggtatgggcccccaaaaaacacccgaaaaacaattaagggggtttacagcatttaaaaaacagccccaaacttggaaaaattcggggggttttttttccaaaaatgcgggaggaaacccggtggttcaaaacttgtggcaaaaaaaaaaagcaaactgggaggggaaaatttgggttccccaagggggaaaacttttttaacaaaaattgggcgccctaattgtcttttggcccaacaagggagacaatttttaccaactttgggggggaaaccgaaagagggaaaa

SEQ ID NO: 112067 - DNA, 552 bp, Zea mays
  unsure (1)..(552): unsure at all n locations
  Clone ID: MRT4577_33692C.1
tgcatcgttatcacgctacctagacaccaaataactaaatgctatgtagctcgagccccacctacaaagtagtatcactacatatgtactgactctgataatcgaacacaagccatggtggacatcatgaacgatgtaacaatagagccatgtggtacatgaaccgacatatgatatctgcctgcctctgcataatatcatgcgcaagtttgacgatcgcaaaacgacaatatgcacactggatatggaagagataaaccaccccatcgatgatgccttggaatgcacatgaatgaggaagaatatacagcatacaactcggatactcatactctcttgcatcgaatattggaatcaatatcaactcagagatagtcaaggctcctgcaacagcaaccgccaagccccttccacatgcataaagatcactgctcacgctagaatgncgcaagtgagcctagatgaaggctatagatgatgatctagcaagctacatctcaataacctcaagaagatgtgatcactggctggagcctaacaaaacatatccac

SEQ ID NO: 112068 - DNA, 857 bp, Zea mays
  unsure (1)..(857): unsure at all n locations
  Clone ID: MRT4577_33693C.1
atcaccaagccggtacaatggttaaccacagagtcacctaccgccgccgcaacgggtgagttgccggccgggaacgagcccatctcttccgccagccgtcaccaccaaattttccacgtcgacaacctcaaccaccgcaaagatggccaacatgcgcgttcagtaccgccgacgcaacggctacaacaccacctccaaccgaacccgagtcatcaagactcccggtggtgatatccgtctgcttcacatcaagaagcgaggcactgtccccaagtgcggtgactgcggctccaagctctctggtatccccgctctccgaccccgcgagtactcccagatctccaagcccaagaagaccgtccagcgcgcttacggtggttctcgatgcggtaactgtgttcgtgaccgtattgtccgagctttcctcattgaggagcagaagatcgtcaagaaggtgttgaaggagcaggagcagagccagaagaagaaataaatgcaatcctaatcggatttggctttctgcgtgggaatggcaaggacctctggggattcggttcattgctttggtgttcattaggcaaaaagggactgaatgcatgatacatcgggccgcggccagaatggatggccctctgctgtcttaggactgctactatcctcttggtgacttgaatgacaaaagaacatcaagctggagaaaaaaaaaaaaaaaagcacgagtgatgattctgtggactggtcaatgtgtgtatctcaatgcacattggcgtgatgcgaaataaaagctaccggcgccagacggtcgaaatatacaagcctgaaattttctgacaaaaaaaaaaaaaaaacccgcggnc

SEQ ID NO: 112069 - DNA, 264 bp, Zea mays
  Clone ID: MRT4577_33694C.1
acccttcctttcgaccccccacacaggcaccaagagaaaggagacgatttagacgaacgagcggtgcacccccacagccagagacccagccagcccaacagggcaagccccctacggaaagcacaaagaatgccaaaccaaaagaggcgaagggccacgaaagacaaacaggggaccgccggacacccgagaaaagcacacgccaagggaggcatgccaagatcagagacgaagaaaaacacgaacaggcaaggccccaaaaac

SEQ ID NO: 112070 - DNA, 207 bp, Zea mays
  Clone ID: MRT4577_33695C.1
cgcacgcttttcacctacctcaagattttcatcattcccccaaaagaatccaaccgtgcggccgctttcatacaacttgatggctctacaataaattcacctaaatccatttcactttccctctatatacaacattttatacttaaaaactcttctttacccaacttaattcctctttataacatccctctttctccactttcctta

SEQ ID NO: 112071 - DNA, 655 bp, Zea mays
  Clone ID: MRT4577_33696C.1
ttgccgagtgtcaaaaataaaacactcggcaaagagctttttcgccgagtgttttcttttaccgagggttttttgcgtggcactcggcaaagagctctttgtcgagtgcccgaaataaaacactcgacaaagaatttggcactcggcaaagagccaaattccggtagtgtataaatagcaggccagcagcgatcattccgggggagtccattccatactgccgtgaggctgcctccaaatcaccgcaagacctgctgcagttcatctccaaaaaaaaaaaataaccatcaccctgactctctgccgcaccatcatcagcccagaagaggagttcgtggtgaaggccgccgttgcacgtcggagttcctgtgaaggtgagaaaaaaaacagcatggcgctctcttgatccccttcctctcttcatcttcgtggctccacggcgctcggcagcaagcaaatctttatcaacatctccatgatcaaggccccacgccagatttgccttgcaaaccagacagggaagagcattgttcttatgaacaagagctatgtccaccatcacctccatgatcaaggcctcatttgtggcttcgctccctcgaggaagtcgctgtgagatgtctcaaggccccactccggacttgtcatacaaccc

SEQ ID NO: 112072 - DNA, 669 bp, Zea mays
  unsure (1)..(669): unsure at all n locations
  Clone ID: MRT4577_33697C.1
taaaaccaaggataggaagaaggaaaaaaaggggnanaatgacggcgtcacgctcagctgagcgtctgagcggcaacacgttcaggaaccttcttgtggccgtttgtaagtcacggccgcccacttcacgtcgctgcggtgccgcctctaagcccatatcttttcggaaaaaaaaccccacaaggaaccatttcttctgatcttctcgcgtcgattgcttgcccagctcgcttcctcttcgtcttccttctcccccttctcctcgcctccggttaaccgccacagcctggattcgccttctcccgcggcggcgcggccggccgctgctgctgcgtcggcgcgtgagatggatgattgcggcggcggcggcgaagaggccgttccagctggcgcggtcgctgacgtaccaccaccacccggggcaccggccggcggctgcgtccaggtggcggcggcagcaccagcagcatcagctcgcggacgagccgcgcgcgccccggccgcaggcggtggtgctgtacacgacgtcgctgcgcggggtgcggcgcacgttcgcggactgcgccgcggtgcgcgccatcctgcgcggcttccgcgtggccgttgacgagcgggacgtgtccatggacgcggcgctccggcgggaggtccaggcgctgctggccgcgc

SEQ ID NO: 112073 - DNA, 827 bp, Zea mays
  unsure (1)..(827): unsure at all n locations
  Clone ID: MRT4577_33698C.1
cggccggggccgccgcaccgcgcctcgcaaaaaaaaaaaaacgttcacagccgtcttcccccctcgctcgtctccaaacgaggtcgcttcactcctccaaagtccaaacccggggcattatcgcgcgtgaggtagggcgagatggcggcggcggaggaggaggaggagtgggaggatgggcgttcggtgatgccggaggaggaggacggagacatcgaggacgtcccaccgccgccgctgctaggcaggaacttcggcagcgaggacgaggacgaggacgaggcgggctcgttgaactcccagtcccagtggtggccgcggagcttccgggaagcgactgacacctataccattgccgcgcccccgggcctccgtcacctcgtcgtcggtgactgcaatggcctgggctctgacctgaagctgcctcttctgtcggacaagctagatgggaggcaagattcatccaacaacttgctaccagtagcagaccccttcggttcagtgctaagcgaggggagattctcagatagagtgcaacaagccccaaccactccaggatgcaatctgacgcaaaccgtgttcaatggggtcaacgtgcttgctggcattggcattttctctgctccatacacgattcgtgaggccggatgggccagccttgtggttctggcttttttcgctgtggtgtgctgctacactggagttcttctaaagtactgctttgagagcaaagatggtgtcaaaactttcccagacattgnggagcttgccttttggaggatcggccggtttctcatttctatagntctgtacaccgagctctattc

SEQ ID NO: 112074 - DNA, 459 bp, Zea mays
  Clone ID: MRT4577_33699C.1
cttctctttaatattttccttctacccatttttatttttttggggttttttttatttttttggccggaaatttcccacgggccagcatttgggtttttagcccctatataagttctccccaaaaggacaaaaaggttaaataacctttttcagggtttactagcgctacttaaaacacttcgcgcctttgtttcaggcccaaaaaaaaagggaagagaaaaaaaaatgcctcaaacattacccttgacctcacccccctatggttaggttgcttcaacggactggagggcgttccctgttaaaaatggtggaaccattgttccttggaactgggggcttgctgaaatttaaccttcttttttctcagttgttcagagacaaattaccacctgtaaaaaaggtacacatgaaaaaggggggggtcacgtaaaaaaccttttgtcaaattccaacccaacc

SEQ ID NO: 112075 - DNA, 750 bp, Zea mays
  Clone ID: MRT4577_3369C.1
agcccgccagcatctccctccgagtccagggggcaggggcaccattaccgagtagtttaattagtgctagttgtattaccattgttagtgacttaattaccctcacgcgaagaacccctacctttgctagtcctcctacgtatacgtctcttctcttcgcttaatcttgatcggtgatttgattcttcacttcttgcgcgcattgcagagggtgctcggtctgcagctatcttaggttaaccagtcgtgtgtggtctatcggtttcgatatagtatactactgctctgttataatcagcggccgggaggaggaagatgacggtgacgccacggatcacggtgagcgatgggcggctgacggtgcgcggccgtacggtgctcaccggcgtgccggacaacgtgtcggcggcgcacgcggccggggcggggctcgtcgacggggccttcgtcggcgcccacgccggcgaggccaagagccaccacgtcttcaccttcggcacgctccgggactgccggttcctgtgcctgttccggttcaagctgtggtggatgacgcagcggatgggcgtctccggccgcgacgtccctctggagacccagttcatgctcgtcgaggtccctgccagtgacggcgacggcgacggcgacgacgcccccgcgtacgtggtgatgcttccgctgctggaggggcagtttcgggcggcgctgcaggggaacgaccgcgacgagctgcagatctgcatcgagagc

SEQ ID NO: 112076 - DNA, 101 bp, Zea mays
  Clone ID: MRT4577_336C.1
ccctgaaggtccgggcccgaatttccggggttgcacccacgcttcggttgtgtccagctccctattcttagcgaatatgcacgtaagatcagggcggcata

SEQ ID NO: 112077 - DNA, 345 bp, Zea mays
  Clone ID: MRT4577_33700C.1
gtagcctgggttcttttaaaggggccgcccttgctgttttttttttgtttttttttttttctttttgttgttgtgtttttattttgttttttttttggctagcaaaaaaaaaaacgggttggttgggcttccatttggcaattgaaaatgacccccaccccaagccccagcagaagcccccacccattttcgactgttttaactttggtggggtagccaacccttttttttttttttaaatgtttgttttggaaaaaaccccccaataaaaagttttttgttaaaaggaacaacgtgttgttcccgtggttgggggcaaaaagtcccttctcctaattagaccct

SEQ ID NO: 112078 - DNA, 766 bp, Zea mays
  unsure (1)..(766): unsure at all n locations
  Clone ID: MRT4577_33701C.1
gaggaatggtgagcgcgtcgagcctgctcctcccgacctccgtgcgggacctggcctcctgcgtctccgacggcgccgtccgcgtcgcctgcaccagcccggcgtccacgctcacggtctcctcctcctcctccaccacctcctcgccgccgccggccacgctctccgtcgccatctcctaccgcgccaccccgcaggccccgtcgtcgccgccgctcttgctgcgcctcacctggtcgcactcccggcacgggcccccgacgctttccttcgccgggcccaccgcgtcgtcccccgccgtcctcctccgccgccgcaggggcacctactgcctcccctcctccacctccaccccaccacatccccccgctcgctctcttctgggacctaaccgccgccaggtacggcccggcctcgtcctcgtccccggagccagcctccgggttctacgtcgtcgccgtcgccagcgccgaggtggtgctggccgtgggcgacctggcggcggagttcatcaaggcgaagttcgagggccagatcccctgggcgcggtccatcctccccgtgtcccgcaccgaccgggtcgtagcggcggcgccgcggccgggcgcagcggtgcacacggcgcgggtccggttcggcgagggcgcgccggagcacggggnggccgtgggctgctgccgngccggcgccggcaggcccggggaggaggagctctgggtcancgtggacgggaagcgcgccgngcacgcgcggngcctgcgctgga

SEQ ID NO: 112079 - DNA, 383 bp, Zea mays
  Clone ID: MRT4577_33702C.1
tcgcaaggcgtttttgaaggacttgcgcggcgtggtgaacgcggtgcagctgttggacccgtccgcgcccggtgtggagacgcgccatcaccattaggagctgttggacgtagagcattgccaaagaaggcgtttgcatgaagtgggtgacggtgcataccggcatgtgctgcgagtgttggtctggtgtggccggggctctaggtatcttggattagcgtgacggcccaaaattcctagaaaatgtgtacctaccaactggagactggtccgctcgtcctcgtcaaattcttgaagttgatggaaaaaaagctggtgtgcaagtttttgaaagaacttctggaatataaaaccatttcccatccgttgcagtttcaagggag

SEQ ID NO: 112080 - DNA, 608 bp, Zea mays
  Clone ID: MRT4577_33703C.1
ggcgatccacggcctcctcctcaaggagggctcctccacgccggggcgcacctcccccggcgctgctctcggcctacgccgcgctggggaggccgcggcacgcgcgggacctgttcgacgagatgcccgacccgggcctcgtctcccgcaccgccatggcgcgcgcgcacgcggcgtccgggcaggccgcccaggcgctcgccgtgttcggggacatgatcgcggacggcgtgctcccggacaacgtggccctggcggtcgctctggccgcgtgccacacgacagcctcgctccctgcagcggggatggcggcggcaaggagacctgggaagatggtccatgccctcatcgtgacaagcggcattgtgccggatgtgttcgtctccaccgagctgatcagggtctacggggagtacggcgagctgtcgctctcccggaggttgtttgatgcgatgccggtgaggagcaccgtttcgtggaacgccatggtgcatcagtatatcaggcatagtaatgttggcgatgcttacgagctgtttcttgcaatgccaaggagggatgtagtgtcatggaacacgatgattgccggctattcccttgttggccga

SEQ ID NO: 112081 - DNA, 322 bp, Zea mays
  Clone ID: MRT4577_33704C.1
ggcacgcctttttatttttacttgttctctcccggactctctcacgcttttccacgcgggcgtggagcgatggttgggttggagctaccgcggaggcagctgctgttgaagggactgatcagtggccccatcctgacttcgaccgagttatcttatctatctatactatcgcgtcacgcgccgctgctgtcaccgggtaagtgaccgctctacctttggattaggtgtaggtacacctgttgtaccctttgtttgctcgcgctatgacacgagacgagagagcagtgagcaaggtttttgttcgcaccacaaaaaaataaaa

SEQ ID NO: 112082 - DNA, 325 bp, Zea mays
  Clone ID: MRT4577_33705C.1
cacgcccgcgcccactcacgcccggccctgccccgcgccctcatcgtctcctcccgtgctcccctcaagcccaccaccgctgcccccacgcgacccaccccaccccaccccctaccgcgcggtgcccgagacccagaggccagacccgtttattcagctagttgcgatcgtaatcactagcacctgcatcacgtggcccgacggttggaagggggggggggatcacttcacttcgttaaggagggatggggtcgccaatagtacgcgcgtattgagggagaagggcaacgttgaaggacgatgcagaatgagcacaaattactgc

SEQ ID NO: 112083 - DNA, 1958 bp, Zea mays
  Clone ID: MRT4577_33706C.1
gattcgacgctactggtatccggaagatcttaagaagttcgataagcgctttggctataagtttacagattattacgtctctactcgagcaaaccatccttattctcagctccagcagatcttcaagcaagtgggagtcgtggctgttgttggtgctttgggtgaacttgtcccttatctacaagatcatcaaggaagcctagcaaatatctatgattacccatcactcatcttgaaggatcccgtcatagaacaaataaatcactcagtacagaaactcacacactccacaagctttctgcaatttctagggcagcatgcacttatcgttccgggggatatgcagagcggctcagatctcggtgatgacaaggattaccatttcctgtcactgctgctgaacctagtaaacacgtttctgtacatggttaacacatacatcatcgttccaactgccgatgactattcagtaagcctcggagctgcagcgactgtttgcggtgtgattatcggatcaatggcagttgcacaaatcttctcctcggtatatttcagtgcctggtcgaacagatcgtacttcagacccctcgtatttagctgcatcatgttgtttctggggaacctattgtatgctttggcatacgatctgaattccctaactgttcttattgctggccggctactgtgcggtttgggttcggccagagccgtgaaccgccgctacatcagcgactgtgtacccctgaaaaccaggctgcaggcgtcggctgggtttgtcagcgctagcgctcttggaatggcatgtggtcccgctcttgccggtctgctgcagacaaagtttaagatttatgggcttacattcaatcagaacaccttgcctgggtgggtcatgtgccttgcttggattgcatatttgttctggctgtggatttcattcaaagagccgggccacattgccacagagaattcagtcagcacgcaatcatctgattctggccgtcgagtaagcggtaacttggagggtggcctcggagagcctttgctcatagacgcaaaggcagggcaggatgaggacgacgaggacaatgacgaccccgaagaatctcatacacctgccacatcgcttgctgcagcatacagattgctgacaccatctgtgaaggttcagctactgatctacttcatgctcaagttcgccatggaaatcctactctcggagtcgagtgttgtgaccacgttctatttcaagtggacaactagtaccgtggcaatctttctggcagttcttggcctgacggttctcccagttaatgtcatcgttgggagctacgtcaccaacctgttccaggacaggcaaatcctggtggcctccgagatcatggtgttgatcggcatcgtcatgagcttctgcttcacccctcactactccgtcccccagtatgtcacgtcagctctcatcacgttcgtgttcgccgaggtgctcgaaggggtgaacttgtccctcctctcccgcgtgatgtcgtcgaggctctcccgcgggacctacaacggcgggctgctctcgacggaggccggcacgctggcccgcgttgccgctgacatgaccatcacggccgctggctatctggggcagggccgcctcctgaacgccaccctcctgccgtccttggtgatctgtctagcatctatcgtcgcgacgttctgcacttacaactcactctactgattaccggtcgatgaactcctctccctcttatacacgtttggtgtggagttgccgaattgcgtcttgcagtcacgctgaaaattttcgggctgccgctgctaatgtaaaacagctgcggcctgtgggtggacgagcggtccatgtgtatcgacgcctgtagtgttgcgaacttgctacggctgtaacatgacacgtgcgcgttaaataaaatgccctactgaagtaccctgtc

SEQ ID NO: 112084 - DNA, 479 bp, Zea mays
  Clone ID: MRT4577_33707C.1
tccagggactcgtcggtgccggttgccggcggcgtggcgatcgaacaacaagcttctatgcgagcccgtgctggagtccatcatcggggagcacggcgtatcgccggccgcgaagctgagcctcgcggcaagggtgtcggagctcctgaccaaggggaccgccgcagccacgctgcgggcggagcccgtctcggttaccgcctgagcggtccagcgaaccgcgaggagaaagagacccgatcaagcaatcagatagatgggcggcatggtatctcacgtctgccgccgttgcgtgcttctgctccgaagagatcccgcgacggacggtgacgttgtcgcgcttgtttgcgttgtgggttgtggcgttggcgtcgtgtttctgccttatccgctcgcatgtgttcgttgtggtaacatttgaataaaacaacaagcggattttttcgctgatggtcgttctgggtaacatttgaacaaat

SEQ ID NO: 112085 - DNA, 376 bp, Zea mays
  Clone ID: MRT4577_33708C.1
gctattattttttcactacgcttcaatccgcagtccctgattatttggaatgttccccacacgggaaacagaccacgctaactactccggaacaccggaacgcaccgtgggccgcgtgaagcaggttgaggcggcagcccatggcgcccggactggtgctggaggcagcatacatggagtcgcaaggaagctattcgctggctagagtcggaacaagctagagagacggatatgggtgatcatttaccaagagacacgggcattgcataactacctactagagaacatggtaaaaaactaacataactatagaaatgacatgcgaataagaatgctctgcgggatttgcagcaagaaaaaccttgaaatgaatgga

SEQ ID NO: 112086 - DNA, 158 bp, Zea mays
  Clone ID: MRT4577_33709C.1
atgatgagtaattccaaaataaggccaagcttgtgaaaccactacttctggtggacttaaaaatagagactctgaaaagggaggaacctctaggggtacaatctcaaaactctcaataactaaaaaaggttgtgctgcatagtccataaatttaagaa

SEQ ID NO: 112087 - DNA, 1578 bp, Zea mays
  Clone ID: MRT4577_3370C.1
atgtcggggggactaagaaacgaaagtgcttctaagcttgaaaaagttgaggttgcctcgacttcatcttttggtgcagatgttgatcctagggcaatagaccttgccatgagaatcgccgaaaggatgttcctcaaaatgaaggaagatgaggcgaagaacattattgaagaagtagaaaatgatcgatggagaccaaacgacgaatccacctcttcacaaggttcgtctttcaaatccacttctcatatgtgctttgttgctaatgagagtgacagtgaaagcgaaagtgaggatgaggaggagcatgaaagtgatagtgaagatgaggatgatcttcaaaaattcttcgctcaactaagtaagaagaaccggatgagcttgctcaaactcatgaaaagagcggaagaacaaaaggaaatgcttcataagcaagaagatatcctcatcggaaaaatcaaagacttggagaagttgaccaaagagcatgagaagctaaagtgctctcatgatgatttggtccaaaggtatgaagacatttcaattgagcaaattaaagctattaatcattcatcttatattgctcaattagaaaataaaaatgctatgctcaagaacacggtagaaaagctaaacattgaaaatctagctttgcaagaaaaacatgatatgcttgtatgctctcataataaatttatggattcacatatcatgttagaaatggctcatgaggttgtgttaactaatttgaaatcataccaacctcacatgtgcacatgtgttgaaattgaaactatattaccatgtgctaacaattgttgttatcaagcaagccaatcttccattgagctagaaatttcaggaattagtgatatttctatcacacaagaaaataaagagctcaaggaagaagttggaaggctaagaaggagcttaacccttttgaagggaaagtgtcatgctcaaccttctcacgataaccgtgataacatggtgaagaagcttgagaaggggacaaccgtagcatgcacaatcccgcttcaaaataatgctaagttccctaagaaaggcatgagcaaacatcaagagaagaaagccaaagctcatgacaagtgcctcaaccatgcctccacatgctccacacaaggtaacaaacaagccactcttccaaataagagaagatgcactagaaagtgttatcaatgtcatgagaagggacatgagattaagtcatgtccctacataaaagatagtggcttaactttggaaagaaagaggctcactaaccatgtagcaaacaagaagcaaggcaagaaggagtcttgcaaaattaaaaatcagatttgctacacttgccgaagaaagggacacctttgcaaggattgtcccatgagtaagtatcctaagcctaccatgtcaattcattcatattcgcttaggagacccaaaaatgacacttgtgctagaaagccacataggaaaaatgaagcacttgagaatgaacttaaaagattttaccttgccttggaaaggatccaattatatggtagattgcaagcttatatgtttatattgtga

SEQ ID NO: 112088 - DNA, 1275 bp, Zea mays
  Clone ID: MRT4577_33710C.1
cgggtccttccgggcaagtgaaggctgccattagtgaatttactgattttgctttaatttggtggcgtgagtataaacaaaaacttcccattaacagtgtcattacttggacccaattaaaaactgccatgcgccacagatttgttccttcctattatgctcgtgatttgcttaacaaaatgcagcgttttcaacaaggttcactatatgttgaggaatattaccaggagttacaaaagggtatgcttcgttgtggtttggttgagtcggatgacgctgctatggcgcgttttcgtggtggtttgaacagagaaattcaggatatacttgattataaggattattttgatataaccacattgtttgaatatgcttgcaaagctgaacgtgaagtgcagggacgacgatcaaagacatatactaactcttttgcaggtcggggtccaacacacagctcaactccttccagccctgcaccttctacgcctagcactacatcgcgcacagggacgaccaagccagtggcgccccctgcaaaaggcgccgcttcttccacaggatgtacacgggatattcagtgccatcgttgcagagggtttgggcacatgatttgggactgcccaaacaagcgtaccttgcttatacgtgacaatggtgagtactcttcagccagtgattctgaggaaactagtcatgctatgattgccactaaccatgcagaaaatgaggaagtccacgttgatcccatcgacgccgataggtatgagagtcttgttgtgcagcgtgttctcagcacacaggttgcccaggccgaaaaaaatcagcgacacactctattccataccaagggcgttgtgcacgaacggtcgattcgcatcatcatcgatagtggcagctgcaacaatttggcaagtacagcgttggtagagaaattatccttgcccactcgcacacacccacatccgtatcacattcaatggcttaatgatggtggtaaaataaagctcatatgccctgttacgcacttgagtatgcctgatgtttatcctacggacttaccaccgggtcttcctcccctccgtggcattgagcatcagatcgatctcatctccggcgcttctcttccgaaccgcgccccgtaccgtacaaatccagatgagacgaaggagatccagcgccaggtgcagacgctgcttgataaaggttacattcgtgagtctcttagcccttgctcggttcctgttttactcgttccaaagaaagatgggtcatggc

SEQ ID NO: 112089 - DNA, 383 bp, Zea mays
  Clone ID: MRT4577_33711C.1
cccccctcgggtcgacccagcgtccggtcacatgtatgtatgctagctggaagccaaatgcacactgtgctttgagcctacgtacagatttatatatgcatggattcggcatttaacggccagacggaacagaaggagatttttctccatttaattatctacaaagatacagtatgtcagtatcactttagctgatggtcagttttctgaccagtttaagagaatgatgataataatgaggcgcttgcgatcgaggtgctcttctaaaactgcatgatgcacaagggacctccgttaacagtagttatagacaagtcagccgattgagatggtaccaatgatagacgccattgtgcacaggtggttgtggtggtggtgctgct

SEQ ID NO: 112090 - DNA, 537 bp, Zea mays
  Clone ID: MRT4577_33712C.1
atataccatcgcggcatgttaaaatagacaactaaaatgtgaacatgcatataaaataaagtttgaaaaagcacatatatttcaattaaaataaattgacaaagtaaaaattttgtatactattatctaataataaattatcatatagtttttatcattgatttttataatatataattactatgaaagtcttatttaaaataatttttaattagttaacggcgtattataattaaattatttaacattacattttcaaatatgtataataagtgtcattcggtgtcaactttatcgaaatatgtttttttatacaataaataatgcaagaattgaacttaaatcatgtatctatcctaaccctcgtcactaagacaacctagtgggttacttatgaaagtatgttaaagatgaaaaaaaattaaaatttaattttacattttttttgggtaattgattttacatatatcatgcatgtatataatatatggataataaatagatggcttctggtgcagtagtggtccaccagcacaa

SEQ ID NO: 112091 - DNA, 571 bp, Zea mays
  Clone ID: MRT4577_33713C.1
cccagcgtccgggacgactcgttcttgaataaggaggaccatggtgttgaaccaaggctgaacactatgctgccttcattgatgctcttggtcggaatcaccagctggaagaagcgactgagttcatcaaagatttgccatccaggattggtcctggtacagctggatcctggggagctctcctaggtgcatgtcgccttcatggaaatatcgagcttgcagaagaagtggcagagtttctcttcaggttagagcctgggaacagtggtcggtatgtcatgatgtcaaacatctatgcagctgcaggacagtgggatgatgcacgtcgagtcagggggctcatgaaggagaagggccttaagaaggatcaggcttacagttggattgaggtgcggagtgcaaagcatgtattcgttgctgatgacatctctcattgcgaggcagacaagatatatgagatgttggggaagcttctcgaccatatgagcgtagcagaggatcctactgaacaccagcttaatttttgtttagacttgagtggaactgcccatgtataaaagcattgctcttg

SEQ ID NO: 112092 - DNA, 216 bp, Zea mays
  Clone ID: MRT4577_33714C.1
cccagcgttcgcacactcatcccgcattctttctcgctctcgctctatcactcgcatagccacatcgcggcgaagacagtggcaaacgtaatgccatccctcctgccgtccctgctgctggtggcggcggtgctggcggcagctgtgcttgcatcggcgccgtgctacgtgtgtcgggaccaccggacgttccaggcgagctgccgctcgagagga

SEQ ID NO: 112093 - DNA, 265 bp, Zea mays
  unsure (1)..(265): unsure at all n locations
  Clone ID: MRT4577_33715C.1
gacgaagtctgcttcgngtcccgtgcgatcaancggtacatcgccagcaagtacgcgtcggngggnanggacctgctccccgngacggngtnggcggcgaactggaggtgtggctagangtggagtcgcaccacttctanccgancgngtcgnngntggtgttccagctgctcgtgaggccgctcctgggtggcgcccccgacgnggcggtggtggacaagcangnggacagctcgccaatgtgctcgacgtgtacgaggngnac

SEQ ID NO: 112094 - DNA, 780 bp, Zea mays
  Clone ID: MRT4577_33716C.1
gatacgtttgttctcttgcgctgtccggggattcggtcgtcggtcgtgaccgtgtgttgttttgggttgggtgatcttccatggcgtccacggcgtacgcgcgggggtccaagccgccggtcggtcccggcgagcggaggcagccgcggctggccaaggagctgagcaggatcgagcccaagaagctcgggattgggctcgtcgccggctgctgcctcgccctcctcacctacatctccttcgcccgcctcttcgccatctactcgccggtcttcgagagcacgtccatggtgatgaagaacgccccgcccgcctccacggcggtgcccagcacggaggaggccgtgccggtccagaagaagatcgaagtcgagggcggggaagatctcgctggaggcggcacggagtcgaaagagcccggctttccaccagaaacaacgatcgatgcacccaggaggacgagaccccagcggagacaaaaagcacccacacagatgagaccgcgttaaccatgtcacatggtgcccaccccacccacacttccattgcccccatgacctgctgatacatcgtctcgctcgatgttctccccccaccacctacttttcgccgtccaccccccccccccctcttttctcatcccccttttcccccccctcccccatttctttttcctatctctttcccctatttttctccctttctccttcttcccccctcctctcccccccctttttttcccccccttttcccccccccactcccccctttttttccccc

SEQ ID NO: 112095 - DNA, 1006 bp, Zea mays
  unsure (1)..(1006): unsure at all n locations
  Clone ID: MRT4577_33717C.1
aaaaaaaacgtagaaatgatgttatcactatcttcttctgcagggcaaattggacccagtcgttggtagacaagatcagattgagcgtgttactcagattttgggcaggcggacaaagaacaacccctgcctaattggagagcctggtgttggaaagactgctattgctgaggggcttgctcagcgtattgctaattgggatgttcctgaaacaattgaaggaaagaagagcgtcggctccatggacgaggacgatgacagtcccgcctccggctccggtcgccataagaagaagctgcgcctcatcatgggcctccacgacggatcagcaaaggttcaaacaggaacatctctgaacaccttgggctctctaggctatgagatagatcatggatggagacagagaatagcagtgtgtcattctaaactgggtgatcagccgaaaagatcccatggataatcattaacaatntatatggagtggtggtcaacccaactcagcaggccgctgccgatgcaatgccaacacaaccntcgcggtngtcgctgtgctttctgtgatgctatttggctggcgcacagagttcagtggcgagaagaagtacatgtgggtgaggcaggggttgatatttccatttttagactacatgaaccgatttcaagggcagacagaactaagcagttgcaaacctgctgatttccggagggcagtagaagaggcctttttggctgatcagggattctcagaagtagtggtacattgcagcaccaagggccaatctgtggtgtgtcattctttcccagatgatttacatgaagtgactggttcaaatgaattggagtaccagccacagattaagcagtgcagaagagtgctgcagtgtgagagttgtggaaactgctttcccaacaaggatacaaacaagatggtgtatgtgatggagcaacttgcttgcagactttgtgccaggatcttagcattaaaaaagtactgtgggatttgttt

SEQ ID NO: 112096 - DNA, 1195 bp, Zea mays
  Clone ID: MRT4577_33718C.1
cacgtgccaaggcagttgcgacgccgatccgctcccatctccatggcgcgctccggcagcggcggcaatgccgacccactcccacctccctggtatactcacagacgtagaaatgatgttatcactatcttcttctgcagggcaaattggacccagtcgttggtagacaagatcagattgagcgtgttactcagattttgggcaggcggacaaagaacaacccctgcctaattggagagcctggtgttggaaagactgctattgctgaggggcttgctcagcgtattgctaattgggatgttcctgaaacaattgaaggaaagaagagcgtcggctccatggacgaggacgatgacagtcccgcctccggctccggtcgccataagaagaagttgcgcctcatcatgggcctccacgacggatcagcaaaggttcaaacaggaatatctctgaacaccttgggctctctaggctatgagatagatcatgtatggagacggagaatagcagtgtgtcattctaaactgggtgatcagccaaaaagatcccatggataatcattaacgattatatggttgtttctaatttaacagagggagggaaccagcaaaggcactccatgggggaatggttgtggctagatttattaatggtgttgcggctgcaagcgtcgtgtggcatctgtcgcgacctagaggactagaggcatagaccgtcatctaattttgggctatcgtcaacatcttgagagcatcggggagtggtggtcaacccaactcagcaggccgctgccgatgcaatgccaccacaacctcgcggtgtcgctgtgctttctgtgatgctatttggctggcgcacagagttcagtggcgagaaggttggatatgcattatgctaagctaaaaagactgaggcaggcgcagcaaagcgtgcctcttgtcttatgatattaacagtggtagtgttctttttcttccatctcttatctttctcttgtccatctatctctcactcttctttatgaaaaaaatatgctcagtcgattttcatcctagccttgatgatttatgtagctgcagcaagcttgtttttaatctgtattgcctctcaaccgaacattattgttgttcagttatggtttatggaagatgctcatcattggagataaaaagaaaaaaaaaaaaaaaacctcccc

SEQ ID NO: 112097 - DNA, 306 bp, Zea mays
  Clone ID: MRT4577_33719C.1
attcggctcgaggtgtatgcgcccttttattttgacatcatgccagacaagtgtctggctgcctactcgtccagggggaaagttctctagttaggccggtgcatgtccatcacagggatctgctgcgccaacactacaccggtgtcctttctctctgtattcactaccgccggatccatccttgatcgagtgtctgtgcacatgcgacatcatcttattgtccagtctacatatttctgtacgtcgacaggctcaatctatgctgcatgtgcatgacctcactcgaagactggtgcttctccgacg

SEQ ID NO: 112098 - DNA, 366 bp, Zea mays
  Clone ID: MRT4577_3371C.1
ggaaaaaaaaaaaaagcgacttttatgggtggggcataaaaccaaagggaatggccgggggggaaaaaaagtaacaggattattccaggccccctggacggaaacgcaaacagaaccgacggtggggggaataatttgtccatgggaaccccagccagttgaaaggggcaggccccctgatggagctgggggttgagcatccattttttgaagggggggaaaaggatctctttgaagcaggtgtactgctgggggggggggaaataaaaaaacgtgcctggcccggcggaaaaaaataagagtgggaacaggatgttcttgccaaaggggcccttgctgaattggatcaccgccgtggggtaaaag

SEQ ID NO: 112099 - DNA, 615 bp, Zea mays
  Clone ID: MRT4577_33720C.1
atgtcatatcaattcacagctctagtcagaatgatgacaaataaagccagttttagaggccacaacacagctcacagtcttcaggacagcagcaaagctccttcaggccaccagctccaaggggcagaggcggcaggggcttcggaggaaggtatggggattagcctaggaaaatatattgtttattctatggagaagacaagggccacactacaagaacgtgccagattaccattcagaagcaaaaagagattaccgaagccgaagcccggcagaaccagccgaagcaggttttgcataccgcttcgtgctactctccctacataccagaatatgtgggcaatcaacctgcaacctctgttgcttcggcaagccattcacaagctttctggccctagctccactgccaccatcgttaccacctgctcattcccaaagccagcagccagaagggcgccagcaccctcaacagcaacgcgacttcagggaggactccaaagctcgtacaatcaacaacactgtaccagaatcgaagcacatatactgaggaatatcctacctttgaagtacttttatcttttatgccatttcaatttttgtatgagaaacaagtaa

SEQ ID NO: 112100 - DNA, 661 bp, Zea mays
  Clone ID: MRT4577_33721C.1
gtagctcctccagcacgttcctttttccctacaccccgtgttccttctgtgcactgcttcctctgctccatcttcaagcacgccgacgctccaaatcgcctgctgttcctcttccctagccatggccacgcctagctcgccggcgttcaggccacggcttcctcctacaactccggtcggccaagagcctaattgccccctagtttctctccctccatttcccagcagcgccctgtccctgtacaagcccttctatggagcgcgtggatttatcctactcaatccccatacagcctgcgagctactacctcctccctgcatacatggagctcgacgcccatctccatggctagccctgcgttcagccgccgagcccggctacaagtgcctttcctggccgagttccctgctgcatatctgacctctgccggcgctccagctcctccattcatggccatgccctgctgctcatcggtgctcgccgcgggagacgacgcttggtcgtccaaccttactcctcaccggctgtcgatcccaatcttcagctcatcgactcaccgatcgtgtctcgttgatctccctcgaacgacggcctacccgtggctaagtatgtacaccgtgctatgtgcttaggtctttggacgctgcctgctgctcacca

SEQ ID NO: 112101 - DNA, 361 bp, Zea mays
  Clone ID: MRT4577_33722C.1
acgaaccaggcacgcggtaggcgggcttgtcatgctgttctcaggagcaatactcgcgatcgcatcgtcccacgcacctacgtgcactatggcgaagtgctaacgacgagctctctaaagtcctcctacactcgctcctgtagaggtaacttcgagcgatggctatgtgcttgagagcgggaacatctctccatatagaagtactttagtgcacatgcgatgggaccatgatggctgacagatctgcaaatacactacaacaagtgtatggaataaaaaatgatgctaaaatgaaaaagacaatgcgacggcccctggcatctggtcgcatcagtcctgtacatgctgcaatgtgggctac

SEQ ID NO: 112102 - DNA, 1030 bp, Zea mays
  Clone ID: MRT4577_33723C.1
ggcaggtggccctctgcccctctcgcccgcggacgggagcggcgcagcgcgtgcgtttatttacccccctccgcgggcggcagagtcgccaccaggctcgcatccaccacagttccgcaccgcgccgtgccgtcccgagagaacaagcgagtcagtcgtcaaagagaaggaaagcggaaggcgagccacccgccccgcccaccacctaccgcgaaggcttgaccgtggcaacatcatccatgtcctcgtcgtcgtcgtcgtcgtcgtcgtcgatgggaggctccctcgcgctcgccgcggccacggccgtcgcgttctccggctctctcgtcatcttctcgctctgccgcgcgcacctctcccatgtccccgagccggagccggagccggagccggaggagggcgcgccggagcacgccctgcgcccctgtctcttgtcgtcagagaggcggccgcgcggggcgaaggcgaaggcgaaggcgaggagacgcaggggcgagaagcgcgtgcggttcgcgcccgacgtcgtcgacaatgagggcgccccgcgcccgaccaggtcctccgcgcccgccaccgccgctgcgtcgtcgtcggcggcggccacctgcagggacgcggcggggtcggaggagcgtatgatgcctgccaaccgtgaggcgctctaccgcggcatgctccgggaccgctccgcgcaccgggtcacctgctcctactgacgaccctcaccgccgcccggccgcggccagcctccgcgcgccgtttcgtccgcggcgggagagctcgatcggttgattctctttgtttcgttcgccgttaggcgttagcgttcggtagccgggcggttgacttcgggaggttcatcctttcgcagacggaggattttgttaatattagaattttagtattttttcttttttttgtatatttgtgtttggctgtagattaattaatgtttttcgtttgagcgagggaggaagttctgctctgtaaataaacaaaaataaaaaataaaaaaaaaaggggaggt

SEQ ID NO: 112103 - DNA, 233 bp, Zea mays
  Clone ID: MRT4577_33724C.1
ggtacctcgaggccggccgggatcgctttcctacccgtaagctcgcgctgctcaactcaccacacgcaaccacaggccgaatggcacataagacgtcgccggagctgagtcctacacgccggagtcgaaagcgacatcggcagcgcacactacgcactcgcaagttcatgaccaagagcatgctggtccgctcgccagccgggcttgacgccatgaacatcggccgcaacaac

SEQ ID NO: 112104 - DNA, 376 bp, Zea mays
  Clone ID: MRT4577_33725C.1
ccactcgtcccgctccacgcaccacaccagagagtctgcatgtacgctagctagctatctgatgttttactgcgatcagggcttggttccatggcgcaaaaagtggccactcgaggctgctttgaccttctcttgtgagccttcgccgactcatgcggctgcaggtgcggcggatcctgcgctatcccagctgcggcctacactatctactagagctgaagcaatccttaagtgtatcaacgggtcatctgttacatatttgagtctttgctattgatggtttatctgccaagttatttttatttggcttttttgtggttactaggatttcttttttaaatgtattttattttgatttctttaatattttttttcc

SEQ ID NO: 112105 - DNA, 155 bp, Zea mays
  unsure (1)..(155): unsure at all n locations
  Clone ID: MRT4577_33726C.1
gccatatatcaacatacgatccatcatattataaataaacaatacggtacaaacagattagttccccaaatccacaagtaccaatgtctattatttccacccgtacgacaggngacccgtccggcgacctggggggggatccctcttttttttct

SEQ ID NO: 112106 - DNA, 694 bp, Zea mays
  Clone ID: MRT4577_33727C.1
ctcgaggccggcgggattcactactcctccccctccctccctcccaccgaggactctttcccaagacctgccccgagtcctagttcgggagagaggtcgagggaggcagcccataaattccttgcccgcgaaaatctctcctcgcctctctctctatatatttccgcttatctgcccgcgcaaatttcttgccgcattggtttggttttccggctcggcaaaggagacggcttttctgtctcccgtgacctacatgatggcgagcacggctccagcggcctccaccgccgtggcattcggggcagccgccacgccgacgcccaggtgcgggcggtggccaaggcggccagcgtcgccgcgctcgagcagttcaagatctccgctgaccggtacatgaaggaaaggagtagcatagctgtgataggcctcagtgtgcacacagcaccagtggagatgcgcgaaaaacttgcggttgcagaggaactatggccccgtgctattcaggaacttactagtctgaaccatattgaagaggctgctgtgcttagcacctgtaacagaatggaaatttatgtggtggccctatcatggaaccgaggtatcagggaagtcgtggactggatgtcgaagaaaagtggtattcctgcttctgagcttagggaacacctattcatgctgcgtgacagtgatgcta

SEQ ID NO: 112107 - DNA, 404 bp, Zea mays
  Clone ID: MRT4577_33728C.1
cggacgcgtgggtgaatttattatatacgaactaccgcacttggcaagtttattaccaccagttcgcctacgcgcggatcacaaagctcctgcagctgcctgaagactaatcgtccaaaagcttcgtccgggtggtgtacgagatcatccggaacaggtttaggtcctgatcgccgcctccgcacgcctgtgcgctgagtgtccgaattcttgatgatacaagtcattaggcactgtcattgatgctgtgggatcccgcgggttggtatctgaaactggtggatctttacctagctatgtcggaagggagtgtttgcaccaatatgctacgctgtagggcggggaaaagttagcattgttattatacatgctgagccataatgcctcatttgatgatctatttt

SEQ ID NO: 112108 - DNA, 607 bp, Zea mays
  Clone ID: MRT4577_33729C.1
aattcggcacgaggcaattccacatctcctccccctccctccctcccaccgaggactctttcccaagacctgccccgagtcctagttcgggagagaggtcgagggaggcagcccataaattccttgcccgcgaaaatctctcctcgcctctctctctatatatttccgcttatctgcccgcgcaaatttcttgccgcattggtttggttttccggctcggcaaaggagacggcttttctgtctcccgtgacctacatgatggcgagcacggctccagcggcctccaccgccgtggcattcggggcagccgccacgccgcggggaccggcgtcggcgtcggcggcgctctgcgcgagggtgcctgccgctgccggcggcatgcgtcgctccggggtggccgtgcggtgcgacgccggcgccgacgcccaggtgcgggcggtggccaaggcggccagcgtcgccgcgctcgagcagttcaagatctccgctgaccggtacatgaaggaaaggagtagcatagctgtgataggcctcagtgtgcacacagcaccagtggagatgcgcgaaaaacttgcggttgcagaggaactatggccccgtgctatta

SEQ ID NO: 112109 - DNA, 266 bp, Zea mays
  Clone ID: MRT4577_3372C.1
gggcgtgccgccacgcgtacgccaagaaccacagccaccgcgatggcgcacatcatccatggcaaggccatacgccggcgacgtccgccgccaggtcagccgcgatgtggccgagctctcccccgccccccgactcgagccggggcctgtttctcgcccaggggggggaccacgaaggactccccatacgcaccgtgaacatgaaccccccccggcgtgcccccgagggcgtgcaatccacctcccccgacgctcgcccccccccc

SEQ ID NO: 112110 - DNA, 2429 bp, Zea mays
  Clone ID: MRT4577_33730C.1
cagcgcgtgcgtctctgaaattgactccacgcgagtatacaatgtcaacgacctgaaagaggtggtggaagccaacaaggaataccgtctctaccctcgaggccgggcgggccgggaaaggcctttcttcctcctctgcagccaactcgtcccctcgggccaacgcgaggccaaaaccaatctcacatctcctccccctcccaccaccgaggacccttccccaagaactgctccgagtcctggagcgggagagaggtcgagggaggagcccaataagagtttctcctcgcctctctctctttctgctcgaaaaattattgtcgcattggtttggttcccttgccaaaggaggcggctttctgtcctccctgatctaacatgatggcgagcaccgcgtcagcgaccgccgccgccgccgtggcattcggggcagccgccaagccgcggggaccggcggcggcggcgctccgcgcaagggtgcctgccggcggcaggcggcgctccggcgtggtggtgcgctgcgacgccggcgtggaggcccaggcgcaggcggtggccaaggccgccagcatcgccgcgctcgagcagttcaagatctccgcagaccggtacatgaaggaaaggagtagcgtagctgtgataggtctcagtgtacacacagcaccagtggagatgcgtgaaaaacttgcggttgcagaggaactatggccccgtgctattcaagaacttactagtctaaaccatattgaagaggctgctgttcttagtacttgtaatagaatggaaatttatgtggtagccctatcatggaaccgaggtatcagagaagtagttgactggatgtcaaagaaaagtggtattcctgcttctgagcttaaggagcacctattcatgctgcgtgacagtgatgctacacgccatctgttcgaggtatcagctgggttggactctttggttctcggtgaaggacaaatccttgctcaagtcaaacaagttgtgagaagtgggcaaaatagtggaggcctggggaagaacatcgacagaatgttcaaggatgcaattactgctggaaagcgtgtgcgctccgagaccaacatatcatctggtgctgtttctgtcagttcagcggcagttgaattggccctgatgaagcttccaaagtctgaagccctttcagctaggatgcttttgattggtgctggtaaaatgggaaaactagtgatcaaacatcttattgccaaaggatgcaagaaggtggtcgtggtcaaccgttcagtggaaagggtggatgccatccgcgaggagatgaaaggtatcgagattgtgtacaggcctctttcagagatgtacgaagctgctgctgaagctgatgtcctattcacgagcactgcatctgaaaccccattgttcacaaaagagcacgcagaggcacttcccacaatttccgatgccatgggtggtgcccggcttttcgtcgacatatctgtcccaaggaatgtcagcgcgtgcgtctctgaaattggctccgcgcgagtatacaatgtcgacgacctgaaagaggtggtggaagccaacaaggaagaccgtctcaggaaggcgatggaggcacagacaatcatcgccgaagagctgaaacggtttgaggcgtggcgggactcgctggagaccgttccaaccatcaagaagctgaggtcttacgccgacaggatccgggcctcggagctcgagaagtgcctgcagaagatcggggacgacgctctcaccaagaagacgaggagagccatcgaggagctaagcaccggcatcgtgaacaagctcctccatggcccgctgcagcacctgaggtgcgacggcggtaacagccgcacccttgacgagaccctcgagaacatgcacgctctcaatcggatgttcggcctcgacaccgagaaggctatcgtcgagcagaagatcaaggccaaggtggagaagatccaaaactgaggacaggaagcagtttttcttccacgtgtatacataccataccctccaatctgattcctttttttttttgaccctttcacttactgagctcctcccctgctcgctgagacgtggactgtgccgtgaattagcgccatggcagcagctcaatctgttgagagagagcggcaaattgtctcaactccagctgcttttctttcttcatttttgcttgagctgctgtggcaagagcccccattcttaagctatatacttcattcggacggaacaggaatgtatcaaggtgtcagctgatgccgttttcatttgtcattatacttgtaaggtttactgatactgtaataccttttacgctatccctgtattcagattgtcgagcattatcttttccagagagttcactttgtagcatttttaatgctgttaacattaccggacgctgtggg

SEQ ID NO: 112111 - DNA, 318 bp, Zea mays
  Clone ID: MRT4577_33731C.1
cggaatgacccgggcgacccacgcgttcgtttgtgcatgggggtttacgggagccacatgctgagcggtgatatagccatcattaatacgggctgacctgttagaatatgttgctgatctcgcggagtgtgttatagtttggactcaccacaccggggaggttggttactggtgagcaacctaacatgtgtgcagtgtctaaaccggatcactctcattgtggacacactcagatagtgaaaatttcatcccttaagaaattatcatatacactattgaagagtatgctactctatatctttatgaacaaacagaaac

SEQ ID NO: 112112 - DNA, 147 bp, Zea mays
  Clone ID: MRT4577_33732C.1
tgctacctttctatgccttgctacacatcgggggttgcattcggacagagagcgcttcacacctcggtatatggctgatcacagacgccccatgttgcagttgaggcaccaaccctagatgtcggagagccaacggaccatgattac

SEQ ID NO: 112113 - DNA, 518 bp, Zea mays
  Clone ID: MRT4577_33733C.1
tcgaggagctggctggcactctactgataaatctaggacatactttagtgatcaagaggatgaatggaggaacattcactgcatgcgagaatctctatctctggaacaagatgatgccaagtggcgcaatgcatttatatggtggagcacaataccatggcacaatggctgaattacgtctggtagttcgatagtaccatatgccctccaatatctagggattaaaccgcaaatgcttgaggtgtacaggatatacatgacggaacaaactactccacgactgcttgtgtaattggcgtgtcaaatacacgtgacacgttagagacattccttgatcagagggttttgaagctttcgtacatactagaagagactgatcccaatctttgctgatctggtggagaaagacagggagcactctaatagccatgaagcgcttatcaccgtgtgttcagtaaacattcaacacgttcgttgaatccactgaaccatcatgtcgacacatgagaatggaagat

SEQ ID NO: 112114 - DNA, 373 bp, Zea mays
  Clone ID: MRT4577_33734C.1
cccactcgtccgaacacacatacaaaatttaaaaaaaaaaaaaaaaaaaaaaaaaaaaaagaaaaaataaaaaaaaatataaataaaacatataaaataaaaaaacatataatatataataaaaaaaaaaaaaaaaaaactttttaaaaaaacaaaatttacttccctttttataaaacccaattttttttcttagggtaccttaaattaaatttttttatccggtattttacaattaatttaatttgaaaaacttttacattaccaaatttaataaacttttagaaattcccattttaaccactttgcaaaaaatccaattttcccaaactgattaatttttaaaaaatttcccaaccttaaattttaaaaa

SEQ ID NO: 112115 - DNA, 403 bp, Zea mays
  unsure (1)..(403): unsure at all n locations
  Clone ID: MRT4577_33735C.1
aaaacccgnccgaccgcacgcgtccgttccgcttcctcatctcctcactctccgtttttttgcctcccctttgcttcactccgatccgctgtcttttccattacgggagccaatccatctctccgatgcaacctccttacatttttctccaccatattggccaccgttctgcttttgttattccagcgattctcgccgacggcagctgcggtgaaggtgaggaacatatcgacgttgcgctgggagccgaagtagtgggccacgggcaaggacgaggcgaacattctctcctaggcgtaagctctcgctagcggctaatgagatggtttgctgacggcggacgaaggacgcgagttctcctcgctctacagcatgctgcagtgagcaattgggaactctcatc

SEQ ID NO: 112116 - DNA, 365 bp, Zea mays
  Clone ID: MRT4577_33736C.1
atgaactccttcacacaacatctaccacattagaaacgtttttacccacaattccttaaccacttaatatccttttacactataacccatgctaaaccataccaacaccattccagtacacgtcacattacaataaacttagccgcacacacaagctgaaaaacacgctactcaacaatccatatatccttaaccttcaacacattaatcacatcctatagaagtcctcctacataaatccgatgtacacttttccctactacccttcctcagtaccactcccacttacacctctccttttcctaagcgttccactaacctacctctaaaccttctacacactaccaccgcattctatttacttt

SEQ ID NO: 112117 - DNA, 196 bp, Zea mays
  Clone ID: MRT4577_33737C.1
ggaggaccataatccttggctaaaaagaagggagcggcggccaaaagaagggggcggctggcaaaacaaggaacgattctttcttctctttcacatgcacggaaagttgggtccttattggcgtacaaacaaacaaggcaaaggagcaggagccacgcaaggaaaaggggacctggcggccacaacgggcgaaaca

SEQ ID NO: 112118 - DNA, 284 bp, Zea mays
  Clone ID: MRT4577_33738C.1
gtcaaagccagcatgcgggaagggtttcctgccactaatcacatttgctatgggcgtggttctcgcatcctgccgtttactatcaccttccaggacagcgtaagtgtagatatcttgcaagcgctcattacttgcttgaatggattgttaatggacctgtcttgagatgattatgcgcatcgtcctggtatgctgcttgaatgaatttatgtcgcactcattgagaccgactgtctgaacaacgcaatgtatctcatggttgaaggagccatccgcagtataac

SEQ ID NO: 112119 - DNA, 1301 bp, Zea mays
  Clone ID: MRT4577_33739C.1
gttgagtatgtggtgaacttgaaatttggtgaagaaccaaattatgcgaagtgcatctctctttttgatggcattgttggcccaaatccagacataagaccgataaacacagatggtgcccaaaagctaatatatcaggttggccagaatagaggccggttaatagtggatgaaaatgatgatgagcaacctaagaaaaagatcagaatggggatgccggcaactcagtggattagtgtctacaatgcccgtcgacccatgaaacagaggtaccactacaatgtagccgataatagattgctgcagcatattcaaaaggggaacgaagatggcttgtttattagttcagttgcctccagctcaaacctgtgggctttaattatggatgctggcactggctttacatctcaagtatacgaactttctagttactttcttcacaaggaatggataatggaacagtgggagagaaatttctatatcactgcactggctggtgcgaataatggaagctctttggtgattatgtcaagaggaacacaatatgcccagcagtcctacaaagtaagtgatacatttcctttcaaatggataaacaaaaagtggaaggagggcttctatgtcactgctatggcaacagctggaagccgatgggcagttgtcatgtcccgcaatgctggtttcacttctcaggtagtggagcttgatttcttatatccaagtgagggcatccacatgcgttgggacaatggctatcgcattacggcaacggctgccacatgggaccaggcggcctttatcttgagcataccaaggagaaagcctactgatgaaacacaggagaccctgagaacatctgcttttcctagccagcatgtgaaggacaaatggtccaacaacctatacctagcttccatctgttatggaagatcggtgtcctgaagcccgttttcacgatttggtctggttgctgagaggtatattgatatcaaatacaggtggttttatgatatcaatggggcattttgaagctgaaaactctgctaacctacttacctgcaactaacaaaagatttcattggaatgtcatcgggactggaggagacatgctgacacaaatgaacgacgacagggtcggcagaatcgatatcagctggtgtttcgaaattacaaagatggaatttttagttttttcttcatcagttctaagttacagatcattagctatgtcgtaattcattttgatacatcattcagaaggatacaaaattgcttctatgtatatcgttgtgcagttgtgc

SEQ ID NO: 112120 - DNA, 1514 bp, Zea mays
  Clone ID: MRT4577_3373C.1
aattcggcacgaggctccctccgagtccagggggcaggggcaccattaccgagtagtttaattagtgctagttgtattaccgttgttagtgacataattaccctcacgcgaagaacccctaccttggctagtcctcctacgtatacgtctcttctcttcgcttaatcttggtcggtgatttgattctgcacttcttgggcgcattgcagagggtgctcggtctgcagctatcttaggttaaccagtcgtgtgtggtctatcggtttcgatatagtactactgctctgttataatcagcggggaggaggaagatgacggtgacgccacggatcacggtgagcgacgggcggctgacggtgcgcggccgtacggtgctcaccggcgtgccggacaacgtgtcggcggcgcacgcggccggggcggggctcgtcgacggggccttcgtcggcgcccacgccggcgaggccaagagccaccacgtcttcaccttcggcacgctccgggactgccggttcctgtgcctgttccggttcaagctgtggtggatgacgcagcggatgggcgtctccggccgcgacgtccctctggagacccagttcatgctcgtcgaggtccctgccagtgacggcgacggcgacgacgcccccgcgtacgtggtgatgcttccgctgctggaggggcagtttcgggcggcgctgcaggggaacgaccgcgacgagctgcagatctgcatcgagagcggggacaaggcggtgcagacggaccaggccgcgcacatggtgtacctccacgccggcgacaaccccttcgacaccgtcaccgccgccgtcaaggcggtggagaagcacctgcagacgttccaccaccgcgacaagaagaagctgccgtcgttcctcgactggttcggctggtgcacctgggacgccttctacaccgacgtcaccgccgacggcgtcaagaacggccttcagagcctgtccaagggcggcgcgccgccgcggttcctcatcatcgacgacggctggcagcagatcgcctccgagaacaagcccgaccccaacgtcgccgtccaggagggcgcgcaattcgccagccggctgaccgggatcaaggagaacaccaagttccagaccaagcccgacggagacggcgacggcgagcaggcggcgggcgggctgaagcgactggtggccgagaccaaggacgcgcacggcgtgaagcaggtgtacgtgtggcacgccatggccgggtactggggcggcgtgacgccgacggcggggacggcgatggagcgctacgagccggcgctggcgtaccccgtgcagtccccgggcgtgacgggcaaccagccggacatcgtcatggactcgctgtccgtcctggggctgggcctggtgcacccgcgccgggtgcgggacttctacggcgagctccacgcgtacctcgcctcctgcggcgtcgacggcgtcaaggtggacgtgcagaacatcatcgagacgctgggcgccggccac

SEQ ID NO: 112121 - DNA, 405 bp, Zea mays
  Clone ID: MRT4577_33740C.1
ggggggaaaaaaacacacaaaaccccgggttaataaaaatttttttggcccccgtgggggcaaacatttccccccttaattagaattatataatggagggggaaaaacttggtcaaatatttttccccaccaccttgccgcggaaaaattccttcctcccatattgccccccccaccaagggaccgcctttttttttcctgcccaccaaaaaaaaattgggggccgggcgggccattttttctgcttgcgaaatgaaacccccccccttaatttttaaccccccaccggatttgggggaggaaacaaaagggtgagtgaggacaaccccaaataaaggccacagcttggccatattaccccggttttggcaccacccgttggacctcacacctttggaaccaaaa

SEQ ID NO: 112122 - DNA, 1131 bp, Zea mays
  unsure (1)..(1131): unsure at all n locations
  Clone ID: MRT4577_33741C.1
ggagcacaactgcacaacgatatacatagaagcaattttgtatccttctgaatgatgtatcaaaatgaattacgacatagctaatgatctgtaacttagaactgatgaagaaaaaactaaaaattccatctttgtaatttcgaaacaccagctgatatcgattctgccgaccctgtcgtcgttcatttgtgtcagcatgtctcctccagtcccgatgacattccaatgaaatctgataccgaacaaaagattcaaaccagtagacatgaacgagcaacgatccaccacataataattaaacagcctataccacatctcatctcagtaacacgatcggatgtgcgatagcgattgcgtgggaacaccttacgctctcaaaacgttttttttttttgagacgggggcaaacaatgaaacaaccttgtaaaaaaacagctttatatacatggcaacggttcagcaggtacacttctacatttacaacataacctaatactttggataatttatacacagcccgacaacacaaaaacagaccacaatgttctttgcccaatggaagcgattagcgaaacacagtagacttttctttctttttttctcatatataggttaccttttgttagttgcagtaggttagcagagttttgagcttcaaaacactccatctgatatcataaaaccacctgtctttgatatcaatatacctctcggcaaccaaaccaaatcgagaaaatgggtttcaggacaccgatcttccatagcagatggaagctaggtacaggttcttggaccatttgtcctgtaaatagattgatcataaggtgggaataaatacaaaaccctatacctggagctcacaaaattcagatctaaaaaaagtgacaaaggtcaagctaccttcacatgctggctaggaaacgcagatgttctaagggtctcctgtgtttcatcactaggctttctccctggaatgctcaagataaaggctgcctggtcccatgtggcagccgttgccgtgatgcgatagccattgtcccaacgcatgtggatgccctcactcggatataagaaatcaagctccactacctgagaagngaaaccagcattgcgggacatgacaactgccca

SEQ ID NO: 112123 - DNA, 1003 bp, Zea mays
  Clone ID: MRT4577_33742C.1
cattggtacctcgagccggcgggaccggttccggccggggtttgtgcactgtggcaccttccagcaggtctcgggcgtggttgcggaaaatgaggcggctgaaaacaaagcgtattctctcctcccgcattcacttgttgcaaccatcgccttctccctcgccgcgagagtgctcaacctggtgtcctggataaggcaacgggataggaagcgataattggcggagagtgaaggttcccgtcctaggccgaagtcctcgttgttgccggaagaagtaccgcatgacttcgccgggtagcggcggatcgacgactgcaagttatgtagccaattcgcccccctacttgtagatctgggtttttgtaaagtttatccggaagctacttgtagatctgggtttttgtaaagtttatccggaagatttgtatggattggggtagatccgaagtacatatccatcccacgcttggggttttagggtatgacactcgcacctttggattgtagtagatgttcgtccgtatgcaaccattttgttgttgtcgtcggctgtttcgactagaaaaatacaaaccctaggatattacactacgatttagtttcatatctttcgcttcaaatgcggcaaagtgtagttaacatctttttgaatcactgctagatgtcctacactccaaaagacgccctggaatgggctgttcgggagatggaggaccacacctgtcaaattaggtagcttgtcggcagtgctacaagcacaccaatgccaaccgagcatctgaaatgtgttaacctcaagatttttaagctcgcggactggcttgacaaggtttcaatcctatgcttcgaggttgtcgagaaggatggaagcaaccacctcgatgacaacaccacagaggaagaacttgaagcagctcgtgagatagaacttgaaaggctccccactcccgaaactcttaaaaaccttgaggacttttgtgaggaatggggtatgcagtatgac

SEQ ID NO: 112124 - DNA, 209 bp, Zea mays
  Clone ID: MRT4577_33743C.1
gacagatttgggatactgctggtcaagaacgctttaggaccatcacaggcagttactaccgtggagctcatggcattattggggtgtatgatgtagctgaccagtagagctctaacaatgtgcaccagagcgtgaatgatttcgataggtatgcccgtgcaaatgtgaacaagcttttggtggggaacaagtgtgacccgactgataac

SEQ ID NO: 112125 - DNA, 208 bp, Zea mays
  Clone ID: MRT4577_33744C.1
gcggtcccttgtattggagaagagttatttgatgattggtgggagaagattatttttgttggactacaggggggccttagctctctggggagggttaggatctggaccattttggatcaccgcattatatttgtttttgatagtacacatccctgtttggctagatcctagttattgcttgttagcaaggaaattcagttgtgggttt

SEQ ID NO: 112126 - DNA, 345 bp, Zea mays
  unsure (1)..(345): unsure at all n locations
  Clone ID: MRT4577_33745C.1
gtgagcagcacgacccaaangncaacagtttgtttgcagagtgaggaaacngaaccagacaacccacgaccaaggaccagggagcaaaacgaccacacgcgggggaggcaagcagacagaacgcggagccacagagcagacaaaggacggacacgggaagagcnaaacagcaanggngccgggngggggcgaagacaagagcacnggacagccaagaaaggaacaccaggaagccacaagggcagngggnacccgggcgacgagcaagggaaccnacacacnagagaaagaaanggagacgaaccngggnggagnaacngcacagcgacgaagaagggaagacag

SEQ ID NO: 112127 - DNA, 964 bp, Zea mays
  Clone ID: MRT4577_33746C.1
cccacgcgtccgcgcgtccatcgtgtccgtcagggccaacccctcgttcgtcagctgccaggccggatacagcagctggtaccaccgccgcgctgccaaccccaacctgatcgtcggcgccaccgtcggcgggcccgacgagtatgacaacttcgccgacgagagggacaactacgagcagacggaggccaccacctacaacaacgcgccgctcatgggcgtgctcgctcgactggctgccggtcacggcggtggcggtggcaagtttggtcatcactcgctcgccgccgatgcagtttcttcatcgacatccatcaatgacaccaatcgcacctcactgccatctccttctccggattcagaacacccgtcggcgtggcccatcgagatcgagcagaacgcgacggcgtcgtggacgaagcagggcaagacgtaccgccggtacgcagtgacggtgaccaacaggtcgcccaagaccgtccacgagctccacatcggcatctccaagctctacggccaggtgtggggcgttgacaaggcgcggtacggctacgtgctcccgagctggataccgtcgctgctcgccggcaagagcgccgtgttcgtctacgtccaggctgcgccaccggccgacgtctgggtcaccggctacaagctcatctgagatggcgccctgtggtgaacgtcctgtcctgagtagtgtccctgccccgtgtgtggttgtgtggaaggagtgaaatgaaggtttgctagtttaagaggacaacgagtgatgtggctagtatcaacctcggtcatcctcattgtccgttaatataaaagctaagctgttcactagcagctatagtgttgttcgtatagttgtgtggtgattgaaattggaataattagatggtattgtacgctacaacaacatattggaataatttgagattctgaaaagagtgagtttgggtagatgcgc

SEQ ID NO: 112128 - DNA, 270 bp, Zea mays
  Clone ID: MRT4577_33747C.1
ctgccacatcgcatctgacgccattctcagtcggtgttaacgcgtgtgagaatgatagagacttggcttactttaactccggagggcatccttttcaggccgagtgtccgatgtatctattctatctaatctcagcgctcagttgttagatgcatatcgacagtgcctgttcatcgtgtcttcctatcatctatcacggaatgtgtgggtggtcctatgattaaggggaccatgaagaatgaactctaaggcatacaggctcatgacatt

SEQ ID NO: 112129 - DNA, 601 bp, Zea mays
  Clone ID: MRT4577_33748C.1
acaaaagcaccacattgactttatctccagtttgaagcaagttcaaaagtcccacatttacattgctatatgtttcatatccactccagcagctaattggtcaaaagtccacaactacatcactgtagctggtccggagctgattagtcacaaaagcaccaaagctacgctaatggttcaagcagtgcaaaagccttcagacaaccactccaagtttttgtatgctcctgggttaagggacaagctttctttgtccaaaacaccctaaaaaaaagtacatcaaattagcacacgctgatctaaagcagccttttcactttgaaccttagcacgaacaagaatctccatttgtagtcccgttgcagaataaaaccttaaccctacagtgccaatatgttgaggagctgggcctaaacccaaaacacgaacatatgcttttggctcttccgctccacaaacaacagagaatgcctcacccttttgaattgaccgggactttaactctgggtctactccaagaacaacattaagaaggtcaattattggctttgcctgttctgcaagaactccattttttcttggatggggtaggataaagttt

SEQ ID NO: 112130 - DNA, 335 bp, Zea mays
  Clone ID: MRT4577_33749C.1
aaaaaaaaaaaaaaaaaaaaaaaaaaaagaaccataaaacaaagaaaaaactaaagacaaaattttgcaaaaatacatttcactggaaggacgataaaaacatgcatctggtccctccgcctggggccctcttaggggtggattttcaatttgtcgccccccgtggcgccccttgggggctccatttaccgggcccattcccccctttatggagttgtatcacatttcactgtcccccgttttcgtaaaaaccaagggggaaacccctgtcgtcccccacataaaatgccctgtttggaaggcccttttactcgcccgggggcggggcataaagg

SEQ ID NO: 112131 - DNA, 1539 bp, Zea mays
  Clone ID: MRT4577_3374C.1
atgtcggggggactaagaaacgaaagtgcttctaagcttgaaaaagttgaggttgcctcgacttcatcttttggtgcagatgttgatcctagggcaatagatcttgccatgagaatcgccaaaaggatgttcctcaaaatgaaggaagatgaggcgaagaacaagattgaagaagaagaaaatgatcgatggagaccaaacgacgaatccacctcttcacaaggttcgtctttcaaatccacttctcatatgtgctttgtcgctaatgggagtgacagtgaaagcgaaagtgaggatgaggaggagcatgaaagtgacagtgaagatgaggatgatcttcaacaattcttcgctcaactaagcaagaggaaccggatgagcttgctcaaactcatgaaaagagcagaagaacaaaaggaaatgcttcataagcaagaagatatcctcatcgaaaaattcaaagacttggagaagttgaccaaagagcatgagaagctaaagtgctctcatgatcatttggtccaacggtacgaaaaggtttcaattgagcaatctagtacttcaaatgctttatcatgtgttgctcaattagaaaaagaaaatactatgctcaagaacacgataggaaagctaaatattgaaaatctagctttgcaagaaaaacatgatatgcttgtgtgctctcataataaatgtatggattcacatatcatgctagaaatggctcatgaggttgtgttaactaatttgaaatcataccaacctcacttatgcacatgtactcaaatagaaactatattatcatgtgctaacaaatgttgctctcaagaaagccaatcttccattgagctagaactttcaggaactagtgatgtttccttcgcacaagaaaacaatgagctcaaggaagaagttgggaggctaagaaggagcttgactcttttgaagggaaagtgtcatgctcaaccttctcacgataaccgtgataacatggtgaagaagcttgagaaggggacaaccgcagcatgcacaaacccccttcaaaagaatgccaagctccccaagaagggcatgagcaaacatcaagagaagaaagccaaagctcatgacaagtgcctcaaccacgcctccacatgctccacacaaggtaacaaacaagccactcttccaaataagagaagatgcgctagaaagtgttatcaatgtcatgagaagggacatgagattaagtcatgtccctacacaaaggatagtggcttaactttggaaagaaagaggctcactaaccatgtagcaaacaagacgcaaggctagaaggagtcttgcaaaattaaaaatcagatttgctacacttgccgaagaaagggacacctatgcaaggattgtcccatgagtaagtatcctaagcctaccatgtcaattcattcatattcgcttaggagacccaaaaatgacatttgtgctagaaagccacataggaaaaatgaagcacttgagaatgaacttaagagattttaccttgctttggaaaggatctaa

SEQ ID NO: 112132 - DNA, 528 bp, Zea mays
  Clone ID: MRT4577_33750C.1
atgtcggcgtttcgaccccaggggtccctggaccgacaacccgaggtcgggcgaggcggaggctcctccgaggtcaaggctgagtccgggcccgggggtcgggcgaggcggagtctgtcttccgaggtcgaggctgagtccgagccctggggtcgagcgaggcggagtccgtcatccgaggtcgaggctgagtctgagccctgtggtcaggcgaggcggggttcgtcgtccgaggtcgaagctgagtccgggctcgggggtcgggcgaggcggagaccgtcgtccgaggtcgaggctgagtccgagccctggggtcgggtgaggcggagtccatcttccgaggtcgaggctgagtccgagccctggggtcgggcgaggtggagtccgtcatccgaggtcgaggctgagtccgagccctggggttgggcgaggcggagtccgtcgtccgaggtcgaggctgagtccgagccctggggtcgggcgaggcggagtccgtcgtccggcgtcgaggttgagcacgagctctag

SEQ ID NO: 112133 - DNA, 2658 bp, Zea mays
  Clone ID: MRT4577_33751C.1
agctaggccagatcggcgaagggagtgagtgacgccactcagagcttgctcgagccaccaaagaggccaagagcttagcttttacctaaagcagctgaggtacctcaccatcaccaccaccgacaccaactgcgccgaggccggaggcggagtagagccagaccagaatggtattggggggaggccctctaggcgccatcattggccgctacccctcctcctccgccgccgccggtgacgatgaacaaggggacccgggacccggaggaggcgtcattcgccatgaccgcaagtgccgggactggcccttcctcgtcctcttcgccgccttctgggttgccatgattgtcaactccagcttcggattcaaccagggcaacccactcaggctgacatacggactggactacaaagggaacatatgtggcagcaggcatgccgatcctgatttgtatcagttagatgttcgctattgggtgaaccccaaccaggtctaccaaagtggcctcaaaaccagtcacatcgagctacctgatgctaaaaccatctgcctgatggaatgcccacttcctgccgaagatggcttgaattttgtttgcgattatccagaaggtgacatacgcctctctgtcgacgactggattgacagggactacgattacttcgagtacctcacaccagacatgaggaatagttctcttcagctgcagggtccatgttaccctgtcatatttccaagtgtaaatgtctactggagctgccagtttattgcacgggcatccaatgcctctttaaagcattggaaggacatgggtggtgtcaccatcgacgaaaacatgctaatagacagaacaattcatgatgcaattaatagcaaatctgccgtcatgaagagatatgttgcagatattgggaagtcctggcctgtgttaatcctttgtgggggattactccctttgttcctatctatgatctggttactcatgattcgcttttttgttgctgggatgtcttggataacagtggtggtcttcaatgctcttgtggtatctgttacaatgttcttctatataaaagctggttggattggccatgatcctttgactgttgtaattggtgaaagtgatccttacgttagcataggtggacgagatataaatcaccttcatgctgcttccgtcttgatgacagtgataatgatacttgctttcctgacttcaatagctattgctcggcgcattatgaaagcaacatcagtcctaaaggttgctgcaaaggtcgttggcgaagtgcaggcacttattatttttccagtcgtgccatacttgatcctcgctatcttttacactttctggttttcagcagcacttcatcttttcagcgccggtcaagttatacaaaatgattgcaatacagattgctgttcctacgatctgaaacttggcaaagtaaattgtgacagatgttgtggctacactatccattacaccccacatattggcatcgccattcttttccatctttttggctgttactgggcaacacagtttttcatcgggtgttcttcgactataattgccggatcggttgcttcatactactgggcacgcggtgaaatatcgcacgatatccctttccataccgtggtatcttccctgaagcgcttgttgcgctatagcctgggatctgtggctctgggctcactgatagtgtccatcgtagagtgggtgcgattcatactagaatcactacgccgcaggctgaaatttgttgactctgcccgcggaagccggttcgggaagacggtatcatcctcatcccagtgctgcttaggctgcatcgattggaccctgaaatcggtgaatcgaaatgcctatgtcatgattgccatcacagggaaaggattctgcaaggcttccgtgctagcgactgggctgatcatgaacaacgtattgcgcgtcgggaaggtgaatgtcattggggatgtgatcctcctgttgggcaaactttgtgttagcctgttgtgtgcgctgtttgccttccttatgctggacgagcacaagtacagatctgggcataacaagatctcatcgccgctggtccccgtgctgctgtcgtgggcgctgggctatatagttgcgaagcttttcttcgcagtggtggaggtgtcgatcgacacaatggtcctgtcattctgccaggactcggaagagcatcaggggaacgcgcggtatgctcccccgctgctgatcgagacattggacgaggagagcgagttgcgaaggctgacacaggggccatgatcgatcttccaaataggaggcactgaactgaatggctgtgatgttggttgcatgtcttttttatatgaatcatcactggggttgatggatggagctataggtgcaagcatgtctttttatatgtatcagctaaatacgaggaatagaatagaatagggcttagtgctggaattgaaacccaccgtctgtaatgtatgttcggctttatttgaccatgtctttttggtttaaatattgttagactgtgtgtatggcccggcaccactgttgggctgccgacccattagggttagtgttatgagtctatatattgtaccctatctcctatcaatacatcaaccactttacattattg

SEQ ID NO: 112134 - DNA, 362 bp, Zea mays
  Clone ID: MRT4577_33752C.1
ctgagcaaaagggtatgcatagtggaatctcagataaccttacccgaatttggatgaagaaatacttgtttgagcagaatccaataatgctctatcaacagacatatgctcggcataaatcatgttttcattgtgtctcatcctggaggacagtgaatcatgaggactggagtgcccactggttgttttcagatccactattggattctgctcaaacaagtatttcttctgagcaaaagggtatgcatagtggaatctcagataaccttacccgaatttggatgaagtgcatagagaattgccactccaagacattgcggcaacttctctatgatcatgggaaattaacatctgtcaaagaa

SEQ ID NO: 112135 - DNA, 346 bp, Zea mays
  Clone ID: MRT4577_33753C.1
cggacgcgtgggcaaagaggccaagagcttagcttttacctaaagcagctgaggtacctcaccatcaccaccaccgacaccaactgcgccgaggccggaggcggagtagagccagaccagaatggtattggggggaggccctctaggcgccatcattggccgctacccctacgcctccgtcgccgccggtgacgattaacaaggggacccggtacccggaggaggcgccattcgccatgaccgcaagtgccgggactggcccttcctcgttcatttcgccttcttctggggtgccaagaattggaacttacggatgcgattcaaccagggcaactcactcaggctt

SEQ ID NO: 112136 - DNA, 169 bp, Zea mays
  Clone ID: MRT4577_33754C.1
acgcccacgcgtccggtgcagtggattctcatgttccgtccaggccttctacaagcacgggcacggcgcgcaatttgtttagaaaccctccatccttctttcattcttaccacaattctctcatcgatacctgttccgactttttaatctcacttattccaacttgctt

SEQ ID NO: 112137 - DNA, 594 bp, Zea mays
  unsure (1)..(594): unsure at all n locations
  Clone ID: MRT4577_33755C.1
aattcggcacgagggcgaagtgcaggcacttattatttttccagtcgtgccatacttgatcctcgctatcttttacactttctggttttcagcagcacttcatcttttcagcgccggtcaagttatacaaaatgattgcaatacagattgctgttcctacgatctgaaacttggcaaagtaaattgtgacagatgttgtggctacactatccattacaccccacatattggcatcgccattcttttccatctttttggctgttactgggcaacacagtttttcatcgggtgttcttcgactataattgccggatcggttgcttcatactactgggcacgcggtgaaatatcggtaaacttctcactcagaaacctaactctggtctcaggttaatacagaatagatgtcaattttctgagaattttcatctcctttatggctttaggggggggggggggtacctggttttcgtgtgactgatgtttggtgtcacaattgttatgcagcacgatatccctttccataccgnggtatcttccctgaagcgcttgttgcgctatagcctgggatctggggctctgggctcactgata

SEQ ID NO: 112138 - DNA, 531 bp, Zea mays
  unsure (1)..(531): unsure at all n locations
  Clone ID: MRT4577_33756C.1
ccacgcgggcgcttccaaataagaggcactgaactgaatggctgtggtgttgggtgcatgtcttttttatatgaatcatcactggggttgatggatggagctataggtgcaagcatgtcttttttactttttattgtatcagctaaatacgaggagtggaatagaatagggcttattgctggaattgaaaccctattctattctattcctcgtatttagctgatacatacgaggaatagaatagaatagggcttactgcgggaattgaaacccacgggctgtaatgtgtgtgcagctttatttgaccatgtctttttggggtaaatattgtgagactgtgtgtatggcccggcaccactgtggggctgccgacccattaagggtagggtgatgaggctatatattgtgccctatctcctatcaatacatcaaccactttacattaaaaaaaaaaaaaaaaaaaaaaaaaaaaaaannnnnnaaaaaaaanaaaaaannaannaaaaaaanaaaannnnnnnannnnnnnna

SEQ ID NO: 112139 - DNA, 210 bp, Zea mays
  Clone ID: MRT4577_33757C.1
acatccaatcccctctcaccgcgaacagaacaagaggactgtccaacaaattacccccaccaaggcgggacagaaggctaaactcgcagccccgtccccgtcattcggaacggcctgaagggcagatgcgtcagaccggtcattggctgataccggaagcatgtacccgccgacttaaaaggacgtccggaaaggcgaaacctatcctag

SEQ ID NO: 112140 - DNA, 254 bp, Zea mays
  Clone ID: MRT4577_33758C.1
cttgtctcaggcttcgtggtggcatcatcgagccttcgctcatggctttggctcgcatatacaaccaggacaagaagatttgccgcaaatgctatgctcgtctgcaccctagggctgtgaactgccgtaagaagaagtgcggtcatagtaaccagttgaggcctaagaagaagatcaagtaaattcctgggtgggatattgttggtctctactttcgttgtgttgtcttagaacagtgacttgttggtattatc

SEQ ID NO: 112141 - DNA, 294 bp, Zea mays
  Clone ID: MRT4577_33759C.1
gccaactgacacccaaccatgccagcagacctcagcggtacctggaaccttctcagcagcgataacttcgagggctacatgctggccctgggtattgactttgcaactcgtaagatcgccaagttgctgaagccacagatagtgagtgagcaatacggggactcctttagcatcaacacgtgcagcagcctgaggaactaccttcttaaattcaacgttggagaagaatttgtggaggacaacaaaggactggataacagaatatgcatgagcacagttacctgggagatcgac

SEQ ID NO: 112142 - DNA, 483 bp, Zea mays
  unsure (1)..(483): unsure at all n locations
  Clone ID: MRT4577_3375C.1
ccccgcgtccggnaggaattggatccgaatccgatccgaggcgtgctccgcgctaatccgggtaattaagtagtacaagtagtgcttttaatcctgacttccgtgcaacagtctgtgctcctcctcccgccttttaatggcggctgttgatgggaaaaagggagaagcttttcggttacggctgttttaatgagtgtgtgttagtgtgagagcgccgagcacggcggcggcggcggcgccgggcgcacgcggctttggcgcacccgctcgtcgcacgccgggcgccggcaggggcggatctccgaccggggctgcctgggctgcagctccggtcgcggcccagtaaagtagaggtccatcactgctgcgagtacgcgacccccaggcgcccagcttcagccgtccatttccagccagtcctgtgaagacgtgaacaatcgctcctaaatactttctgttcttacctctttttccctcctcgct

SEQ ID NO: 112143 - DNA, 905 bp, Zea mays
  unsure (1)..(905): unsure at all n locations
  Clone ID: MRT4577_33760C.1
cattgggacctcgaggcggcgggggcggcgggaccaactttttccacccgccggaacactggtaaccctcacgccggcgcagccgcagccgaggcgccatgaacaacctccggaagcgcatgatctcccttctcctccgggcacctggatcaccatacgtcccttgcccccacttcttcccgctcttctatccccaccgcctcctctccgccatcaaatgcgtcgctacaaaaccattcgccgtcgaggactacctcgtcgccacatgcggcctcacccaagcacaggccctcaaggcgtcgaagcatgtctcccatctgaaggatccctcgaaagccgacgcggtcgtcgccttcctctccaacctcggcctgtccagcgccgagatcaccgacgtcgtgaccagggaccccaaagtcctctgctccgacgtggagagatccctcaccgctcgcgtcgccgagctcaccgacctcgggttttcacgtccggagatcgtccgccttctcatcgttggcatgaaccacttccgccatagctcgcttcgcctcaatcttgagttttggatctcggtctttggctctctcgacgagctcattcgggcgctcagaattaacgccgctctcctcagcacaaggattgaggaggtctgcaagcccaacttggagctccttcaagagtgtggtataaatgtttctgatatctccaacagcttcatgtcccgtgtgctcaccagggaccctaagagcctgcaggaagctttggctcgccttcatgagttcagaatccagccgggctctcaacctttcttccgtgggctttatacatttgcaatccttggcagcgggaagataaccaagagcattcagctgnttgagaagcttgggatggtcaaggacatatag

SEQ ID NO: 112144 - DNA, 256 bp, Zea mays
  Clone ID: MRT4577_33761C.1
cttcttctgttccaagcccgttctctttcagggtctttttcgtggttttttggtggctttttatccgatccccggtctcatcgtgcgccgttgtcgttggcgggacactgaaaacgactgccttctctgaagatgcccttcagcatagtggtttaagccatgaggaggagtcctgaccccaacctttgtttgcgcactgagccataattcgttgtgctcaattgactaatccaccatgttggctgttggcatactg

SEQ ID NO: 112145 - DNA, 455 bp, Zea mays
  Clone ID: MRT4577_33762C.1
ctcataacaagaataaccacggtacaaacacgccagcctgtgaaaattccgtcaccgaacaagcaaacaactttgcgtcaaacccgtagcaggtcactaatctgacacagcgaaacggcattctcctgccgggacgcacacaatccaaatgaacgaagagcgggatccacaacttatgatacccgtgcctggatgcaaatatactggacgactggggtggagaggacacagggaatccaccggaaggggggcccggactcaataatggcacaggtgggttccatgggactggctgaccgaaggcgccatgtctcgcggggccatacaagcccacgatgaagattaccaccaccaggctgaacacaggggagatcttgaacccggtggagaagacctggtcttgccgacgaggtccttgagcaaggcctgggtcacgaaatacacggcatagactt

SEQ ID NO: 112146 - DNA, 222 bp, Zea mays
  unsure (1)..(222): unsure at all n locations
  Clone ID: MRT4577_33763C.1
ggcatgctgtcatcgccgccgccaccccggtttccttcgtaagcccgtcgtcctcgcggcgggactgtgcgtctagaaacgagagtatggacacccaagtgaaacttgatgatggggagaaaacaagggcaagtacgnctccaccgaatacggactcggcggaacctacctggacagtcgaacgaaaaaatacataaaattaacaaaaaaaatggggggggg

SEQ ID NO: 112147 - DNA, 331 bp, Zea mays
  Clone ID: MRT4577_33764C.1
ggttccaaattttcaaccccaatcacttacacccacttttaactcttttctgaaaaaattcaagggggaaaaaattattttttaacaccaaaaaatacacctcacacaaacctaaaacccaacttttcaaatttacaaaataacactttcttggacaaacccccaaaaaataaattaaaaccccttaaaaaaacaaaaacccacatcataaggaaatacactttacatttaaaaaccaattttcttctaccaaataaaaaaccttaaatacaaataacactttggtcaaccccggaaattccgacccgtaccttcaaaactaccacctttt

SEQ ID NO: 112148 - DNA, 355 bp, Zea mays
  Clone ID: MRT4577_33765C.1
caggcacgcggcccgtacttaattacttgcttgaccagctttattcccgccggcggccgccctttattaaggggggttttttttaattttttggttggaacccacaaaattctttgatatacatgaaaaacactggcagggcccagtttgtaaacttttacctttacaaaaactgccgttaaattaaaccacaacagcacgttcgccaccatctaaattgcacacaacgacccacaaagatctttgtagagggggttggttggccatgattataccccggaaagcccccactacttgtgcgtctcgacgaccacttcataagcttgttgggcctggcaccataccccccaccccc

SEQ ID NO: 112149 - DNA, 532 bp, Zea mays
  Clone ID: MRT4577_33766C.1
cggacgcgtgggctctacgaccacctgcaccccaaggcctcggcggcgccgtcgcccgtggcgtcgtcgtggaagctgcgcatcaagatcctgctggacgcgtcccgcggcatcgagtacctgcactcctacgccgtgccgcccatcatccaccgcgacatcaagtcgtccaacatcctgctggacggcgggtggacggcgcgcgtgtcggacttcgggctgtcgctgacggggtccccggagccatcgtcggaggagtcgcggtcgcagcagctggcggtgacgacgaaggccgccggcacggtggggtacatggacccggagtactacgggctgcaccacctgacggtgaagagcgacgtgtacgggttcggtgtggtgatgctggagtcgctgacggggcggcgcgccatcttcaaggaggcggagggcgggagccccgtgagcgtggtggactacgccgtgcccagcatcatgggcggggagctcgctaaggtgctggacccgcgcgcgccgtagcccgcagcgcacg

SEQ ID NO: 112150 - DNA, 177 bp, Zea mays
  Clone ID: MRT4577_33767C.1
tttttatatgtaatctaaaacatggcacctccacaatggtttgctgtcacacacatggctcataatcatcaaagaagaactggcacgatcggagaaattgttgctgctatacaaaggcagcgaccaatgaattagccactgccaggggattaagtaatggatgtcgctgatggaggc

SEQ ID NO: 112151 - DNA, 444 bp, Zea mays
  Clone ID: MRT4577_33768C.1
gcgatgagcgcctctcgcgacgccagggcggagagctagccggccgggagcccacacgcagctggaagcaccagaccgatcgtgccggccgagcggcggcgcaggcgcaggcgcttacatgggagtagaggcgggcgggtgcgggcggagggcggtcgtcaccgggttctacgtctggggctgggagttcctcaccgccctccttctcttctcggccgccgtcgccgccgcagactcctactagcaagctaccaaccttctttctttcattcccttaggtagctcagccgtacacacaacaacacacaagtcatcagttactagctagttagtagcctatacaacacatacatacatacaaaggtgagtgaggttcgcgtgcaagcagagccaatcgtgccgatcgagctatatacatagccggcggcgagggatgggaagagc

SEQ ID NO: 112152 - DNA, 217 bp, Zea mays
  Clone ID: MRT4577_33769C.1
cagtcttttttatcactttttactacctacccgtgtgagcttttcatattttatagcactccccacacaactaacaaattcatcttcttccacctgttttttatatcaacatatattccaaatttcctctaattatttaaacaaattcacttcacatttacaccaaacttatccctatttctccataataaaggtcatttttttctatgttacatca

SEQ ID NO: 112153 - DNA, 1508 bp, Zea mays
  Clone ID: MRT4577_3376C.1
gggccgccagcatctccctccgagtccagggggcaggggcaccattaccgagtagtttaattagtgctagttgtattaccattgttagtgacttaattaccctcacgcgaagcaccctacctttgctagtcctcctacgtctcctcttcgcttaatcttggtgatttgattcttcacttcttgcgcgcattgcagagggtgctcggtctgcagctatcttaggttaaccagtcgtgtgtggtctatcggtttcgatatagtattactactgctctgttataatcagcggggaggaggaagatgacggtgacgccacggatcacggtgagcgacgggcggctgacggtgcgcggccgtacggtgctcaccggcgtgccggacaacgtgtcggcggcgcacgcggccggggcggggctcgtcgacggggccttcgtcggcgcccacgccggcgaggccaagagccaccacgtcttcaccttcggcacgctccgggactgccggttcctgtgcctgttccggttcaagctgtggtggatgacgcagcggatgggcgtctccggccgcgacgtccctctggagacccagttcatgctcgtcgaggtccctgccagtgacggcgacggcgacggcgacgacgcccccgcgtacgtggtgatgcttccgctgctggaggggcagtttcgggcggcgctgcaggggaacgaccgcgacgagctgcagatctgcatcgagagcggggacaaggaggtgcagacggaccaggccgcgcacatggtgtacctccacgccggcgacaaccccttcgacaccgtcaccgccgccgtcaaggcggtggagaagcacctgcagacgttccaccaccgcgacaagaagaagctgccgtcgttcctcgactggttcggctggtgcacctgggacgccttctacaccgacgtcaccgccgacggcgtcaagcacggccttcagagcctgtccaagggcggcgcgccgccgcggttcctcatcatcgacgacggctggcagcagatcgcctccgagaacaagcccgaccccaacgtcgccgtccaggagggcgcgcaattcgccagccggctgaccgggatcaaggagaacaccaagttccagaccaagcccgacggcgacggcgacggagagcaggcggcgggcgggctgaagcgactggtggccgagaccaaggacgcgcacggcgtgaagcaggtgtacgtgtggcacgccatggccgggtactggggcggcgtgacgccgacggcggggacggcgatggagcgctacgagccggcgctggcgtaccccgtgcagtccccgggcgtgacgggcaaccagccggacatcgtcatggactcgctatccgtcctggggctgggcctggtgcacccgcgccgggtgcgagacttctacggcgagctccacgcgtacctcgcctcctgcggcgtcgacggcgtcaaggtggacgtgcagaacatcatcgagacgctgggcgccggcca

SEQ ID NO: 112154 - DNA, 113 bp, Zea mays
  Clone ID: MRT4577_33770C.1
aacagaactgaacattagtaagaaactaaaccagcagtagaacaatatcatcgggactggtacctacatagatttgagcagcgattagtatgtttctcgaaatagtgcactgc

SEQ ID NO: 112155 - DNA, 611 bp, Zea mays
  Clone ID: MRT4577_33771C.1
ttttttttttttttttttctttgagtcgggagcaatcatctttatggactcttaatttagacgtcgatctccagtgacgtgaactcatgcacgtcatcgtgcgccgccagctgcttacagtttggcgtcttcatgtcgtggtggtggctgtcgtcgtcctcgtctgcagcttctgcttccggcagccgtccgtattcctccccatgagaccaagctccagccggataccttttgcacacgtacacgtaaatcccgacgacgaggaccatgcaccatccgaactgcaggttgacgacagcaatggcgtggcgcaggctgtcctcgccgcggcagcgcaggtggacgccgctcccgtcgaggtagcatccggcgggaagcatcccggggacccacgcgacgccgatgacgacgcaccagaggccctggaacgcgagcgacgcggagcggacgaggccggcggcgagctggaggtccgcggggaggcgggcggcgccgatcagcgcggcggcgaggcacgcggcggcggaggcctgcaggaaccagtgcaggcgggcctcgacgccggcgtggtcgtcggtggaggagtggacgtggaacacgaacagctcctg

SEQ ID NO: 112156 - DNA, 216 bp, Zea mays
  Clone ID: MRT4577_33772C.1
gtcgactgaacgtccgcccacgcgtccggtgctcggccttcttataagtctcagtactcccttatacttcttactgaggatggtcgattgagctagcatatatttcagacctacacttttgttatcactccgataaaataatataaaatttttgtaacttgtaaacaaagtgccaatggacgtagacgcaaaacggagccgcagcgtctcagtatc

SEQ ID NO: 112157 - DNA, 221 bp, Zea mays
  Clone ID: MRT4577_33773C.1
gctacagggttcatattctccccgttgttgcattgtttgctggctgaaaaaaaagagtcattttcaatttccaagtactattactagtagcttttaacaaacaattacacgtagcttttctaaaaagcgagacagattcaatgttttgacaccaacaagctattatttctgaatcccaaaaggaaagtacaattggactacctattattccaacaggtgcc

SEQ ID NO: 112158 - DNA, 385 bp, Zea mays
  Clone ID: MRT4577_33774C.1
tccattctacttctggatgatcttttttcggacctctttagaccgatcttggtgggggttatattccggtgccttcccttttgaaggccgagttcttttatgaagaaatgcgcttcatcggtctggtggcgattccttgcctggatttttaaattgtcaggcttttgttttttgtatataccatacagcggagctgctcttgtccatgttgacattgtcctgcacatctttcaattaacgcatgtgaagatgttgccacgatatctaacctctctaccatatagttgttgtaacagttcattgtggttattgaaaaaaggagatggaacacctcccatgattcatgtgatcgtggacaatattttagtttgaactcatattctgt

SEQ ID NO: 112159 - DNA, 818 bp, Zea mays
  Clone ID: MRT4577_33775C.1
ggtaccgacaaaacaaaaccaacaaaaagaaaattgggatggggagtcgatctcaacagatcaacgaacatcatcagcacgaattgtttgttgtctctgacgtcaacaggcctttggtcaggcggcgctgctaacacacacctaatcctgactgcaatccctcctctctcaactaatctactacttttttccctttttgttgcgtcgccactcgccactcagccgccaactcgccatccaccaccacctcctgcccccccggcccccgaaaaaggtccaggaattcgaggacacttgctcctcctcggcgatggccacgcccggatccttcccgaaatcctagcacatgtacggcaatttattgttttttttctttccaaaaggaaggattccattccgttccgtggtttggatttgccatcaagcaaaggcaaagcttgtcccgtgatcttcttgtaccttggcgagccgtgcgacggattggttgatccaaggataatgagcggtggcaattcttcgcggcggcaacagcgccgcgtcgtcgctggcggaggagaggccctccttcgccaggaggaccctgctctgggtcgtcggaggccggcaacagagcagagtcgggagctgttcatgatcggcgcaccactgtttgaagacacacaaaacacacacaaaacaaaggcaaaggaattcttttgtgctcttttggcacattggtaagtgcgagtagtgattgcaatagctagaaatttgtaaaacaggaaagactctgaaaaaatttctttctttcccaaaaaaaaaaaaaaaaaaggccccta

SEQ ID NO: 112160 - DNA, 1581 bp, Zea mays
  Clone ID: MRT4577_33777C.1
tcgggtcgacccactgtccgctcccgtcggtcgaggagtagggttctagcgcctatcctccctgcgccgccgccgtggacaaccggagcgtagtgggaggggatgatggagggaggtagccgcgcggatgggcggaatccgaaccagctccggccgttcacctgcaccgggaacccgctccaccgcgcccacggctccgcgcggtgggcgcagggcgacaccgtcgtgctggccgctgtgtacgggcccaagccgggaacccggaagggcgagaaccccgagaaggcctccatcgaggtcgtgtggaagcccaagaccggccagatcggtaccctgctcttcccctcgagttcgcttcgccccacggctgcgcgtgttaccgggtcactgaaatggcgagttgtttttgcaggaaggcaagagagggaatatgagatgacactcaagaggacgttgcagagcatctgcttgctcacagttcatcctaacaccacctctgtcgtgcttcaggttgtgggtgatgatggttctgtatctttccacttgatgtagcagtaatatagtttggctgcttttatgtttatttgtttgttgtcctgcattaatattaaagttcactttactactgactttagcttgatttttgataatttgctggcaattaggtagtacttatagaataatgtatgagcatgagcgaatcggcacataactaggtttggattaagaagtgaatctttgtcggatctttggctcttcctaaatgtagttcgtgcaaaacatatgcgcagctgtggtgtcatgtgcaattaatgcttcttgtgctgctcttgcatttgctggaatccctatgaaacatctcgctgtcgcgattagctgtggagtgatggacaatggtgtggttatcttagacactagcagagcagaagagcagcaagctaggtcgtttgctcacctggtgtttccgaactcgcgcaagtcagtcgaatcgaaggacacgacacagcgagatgaggagtccgagcgaggattgataacttgcatcacgcatggagcaatgtccgaggatgactatttcaactgcatagagaggggtgtcatggcgtcctcgaggatctcggatttcatgaggaagacactgcagaaggaggcttccagggatgcctgacctgagtagcaaatgtattagcacgactgagaagctgcctgcctgtgataggcgatggcgatggcaatggtgtgtagacagcagctgggtctctagttttgacggcatgtagtcgtgttagaatgaaggaggcaagggtgcgatggagtggaggtcaatcggcgtgtgatgccacgtcactagcttagctgcggatggtttggtggacttttgaggaacagataatgagattgtatgcacggcacgctgaaattttacttgaacgccgcccgattaaaacaatatccatactgtacgtgtgtcggtgggctgcaatgtgatgtgtgatatgtgttgagcaaggtgatgcccaagggaagccattcccactcttgtctccattaataaaaatcagctgagcttccgatgtttgg

SEQ ID NO: 112161 - DNA, 548 bp, Zea mays
  Clone ID: MRT4577_33778C.1
caatttcaaaactcagattaataaaattttcgcgttgttcctttctctcaattcatcgacgatgccgagcagatacccaggagcagtaacacaagactgggaaccagtagttctccacaaatcaaaacaaaagagccaagacctacgcgatccgaaagcggttaacgcagctctgagaaacggtgtcgcggttcaaacggttaagaaattcgatgccggttcgaacaaaaaggggaaatctacggcggttccggtgattaacacgaagaagctggaagaagaaacagagcctgcggcgatggatcgtgtgaaagcagaggtgaggttgatgatacagaaagcgagattggagaagaagatgtcacaagcggatttggcgaaacagatcaatgagaggactcaggtagttcaggaatatgagaatggtaaagctgttcctaatcaggctgtgcttgcgaagatggagaaggttctaggtgttaaacttaggggtaaaattgggaaatgattaaacgatgtcgtttatcttgtattttgttgaccaatgt

SEQ ID NO: 112162 - DNA, 959 bp, Zea mays
  unsure (1)..(959): unsure at all n locations
  Clone ID: MRT4577_33779C.1
aataccaatggccgactcgaggccggccggggtcgaagccgaagcagagcacgacggacaaaaatatggcagggaaagccggcggactcaaaggggttgccctcatcggcggcagcgccaacagcacggtcgctggggtcattcacttcttcgaggacccctccaccaggtacaccgaggtgaggggcaaggtcacgggcttgactccgggaaggcatggattccacatccacgtcttcggcgacactaccaatggctgcaactcaaccggtccccattttaaccctcataataaaccccatggagctccatttgacgacgaacgacatttgggcgacctgggaaatatagtagccaatgaagatggagatgcagaagtgttcataagagacttacagatttcattgagtgggcctcattccattctgggaagggcagttgttgtacatgctgatcctgatgacctagggaggggtggccatgaactgagtaagtcaacaggaaacgcaggagctagaattggatgtggtatcattggaattcagtcatcagtttgacaaataacggcttagtagcaccagaaaaagagggggacatgattccacagtccgtgcagtgtcgtggtttagggatatggaaatggtgttcgttgttctggaccgtttgaagactaaatatctccagtcatgtatacaataatcttacagtcggtgaggaaattgcttgtaaaatcttgcattgacttatatcactggttaccagcagcaataagtctatatgtaaaacttctcgatttgtatatgctatgcttcctgtggagcagggaagcgaacacaagtcagccttttgtgagtgcattctgtccagtttttacttggtcnnnnnnnnnnnnnnnnnnnnnnnnnnnnnnnnnnnnnnnnnnnnnnnnnnnnnnnnnnnnnnnnnnnnnnnnnnnnnnn

SEQ ID NO: 112163 - DNA, 1689 bp, Zea mays
  Clone ID: MRT4577_3377C.1
atggttctctcaatggatgctcaatttgatgtgactcaagaatggcttgatagggtgaagatagcaaggaaagggcttcgaggaactaagcgaagtctgtggtcagtctgcgcgtcagtctgccagtcagactggcagacaggctgccagctttggtactacatcgagttctttgtggattcattactcttggagcttctagctcctagacgactaggtgtctcttatgttgatcctagggcaatagatcttgccatgagaatcgccgaaaggatgttcctcaaaatgaaggaagataaggcgaagaacaaaattgaagaagaaaatgatcgatggagaccaaacgatgaatccacctcttcacaaggttcgtctttcaaatccacttctcatatgtgctttattgctaatgggagtgacagtgaaagcgaaagtgaggatgaggaggagcaagaaagtgatagtgaagatgaggacgatcttcaacaattcttcgctcaactaagcaagaaacatcggatgagcttgctcaaactcatgaaaagagcagaagaacaaaaagaaatgcttcataagcaagaagacttcctcatcagaaaaatcgaagacttagagaagttgaccaaagagcatgagaagctaaagtgctctcatgatgatttggtccaaaggtatgaagacatttcaattgagcaaattaaagttgttaatcattcatcatatattgctcaattagaaaacaaaaatgctatgttcaagaacacgatagaaaggctaaatattgaaaatctagctttgcaagaaaaacatgatatgcttgtgtgctctcataataaatttatggattcacatatcatgttagaaatggctcatgaggttgtgttaactaattttaaatcataccaacctcacatatgcacatgtactcaagtagaaactatattatcatgtgctaacaaatgttgctctcaagaaagccaatcttccattgagctagaaatttcaggaattagtgatatttctatcacacaagaaaataaagagttcaaggaagaagttggaaggctaagaaggagcttaactattttgaagggaaagtgtcatgctcaaccttctcaagataaccgtgataatatgatgaaaaagcttgagaaggggacaaccgtagcatgcacaaaaccccttcaaaagaatatcaagctttccaagaaggacatgagcaagactcaaggtgagaaaattaatgctcatattatttgctctaacaatgtacctatgtgcttcaacaaagaaagatcaaagagaagcgataggaggtgctatggatgcaaggagaagggtcatgaaattggttcatgcccccacatgaagaaccaaaaccttgcacgatcaagaaagatgaccatcaaaaaggatgaaagcaaagggcaaatgcattgcaaggacaagcaccacatttgttacaattgccgtgaaaagggtcatctattcaaggtttgtccaaagggtaaaaatcctaagcttaacttaacaatacattcagatatgcttaggagacccaaatttgactcttgtgctagaaaggtgatgacttcaccacattctaggactaaggctatttgggtgcctaagtccttattggctaaccttggtggacccatccaaaaatgggtaccaaagtgtaattaa

SEQ ID NO: 112164 - DNA, 1024 bp, Zea mays
  Clone ID: MRT4577_33780C.1
cccacgcgtccgcccacgcgtccgcccacgcgtccgcccacgcgtccggccggcggacgtcaaaggggttgccctcatcggcggcagcgccaacagcacggtcgctggggtcattcacttcttcgaggacccctccaccaggtacaccgaggtgaggggcaaggtcacgggcttgactccgggaaggcatggattccacatccacgtcttcggcgacactaccaatggctgcaactcaaccgggccccattttaaccctcataataaaccccatggagctccatttgacgatgaacgacatttgggcgacctgggaaacatagtagccaatgaagatggagatgcagaagtgttcataagagacttacagatttcattgagtgggcctcattccatactgggaagggcagttgttgtacatgctgatcctgatgacctagggaggggtggccatgaactcagtaagtcaacaggaaacgcaggagctagaattggatgtggtaatgtcaagccttttaaatttgtagtgttgcaaattattggaaagagactgtcatttttcttaatatcaagttttaaagccaccataactgaaagttcaaaaccagaagtggaaatgcgtagattcttgtgaaatgtaatctgctttattttgcataaataagtcgtatgatcgttgacacttacaaatacatttagctgtcaataatttacaggtatcattggaattcagtcatcagtttgacaaataacggcttagtaacaccagaaaaagagggggacatgattccacagtccgtgcagtgtcgtggtttagggatatggaaatggtgttcgttgttctggaccgtttgaagactaaatatctccagtcatgtatacaataatcttacagtcggtgaggaaattgcttgtaaaatcttgcattgacttatatcactggttaccagcagcaataagtctatatgtaaaacttctcgatttgtatatgctatgcttcctgtggagcagggaagcgaacgct

SEQ ID NO: 112165 - DNA, 300 bp, Zea mays
  Clone ID: MRT4577_33781C.1
gggagggagctttttttgggaatttgggcgaaagccttgggttttttttaagcaaaacgtacaaaaaaggcccaaagggaaaatcggccaaaattacaaacccccacttgggattaaaaaaggaatgggccccccctgaatgttaaaaaaccggattaaaactttgttaactgtccccgtttggaaaaaaatagctaaagaaaaattgggccgggggcataagtctaataccagctatacgggttaaaaaaaaaaaattgggggttgaaacctgaactaaataggaactttgcctttttg

SEQ ID NO: 112166 - DNA, 339 bp, Zea mays
  Clone ID: MRT4577_33782C.1
tgtttttttttttttttttttgggggggcgtgtgggtttgtgactgttccttcgggggggttacttttgctctttcccttgtgccgcggctgcgtttgccagggccgcgtgctctgctcggtggttctgtctgcctttttctgggctcggggtgcttccctttctcttttcccgggggtgcgtggtcttttggtgctgcttcttttgcattctctcttggtcttgatggccttgttctctttgtgccgtttcccctttctgcgtgcttgccggtgctgttctgcttcactgcttcggggctggggcttccttggggtcttctgtgctgctgcctttctg

SEQ ID NO: 112167 - DNA, 132 bp, Zea mays
  Clone ID: MRT4577_33783C.1
ctcgcgaaaagcgcaataaatcccgagtcgtagcacgggactggagcacccaacccaagttcacgatcgcgaggtcttcgtctccgcctgggtccagcactcggatttccgcgcgttccacttccacacaac

SEQ ID NO: 112168 - DNA, 1139 bp, Zea mays
  Clone ID: MRT4577_33784C.1
ggtgagctaagccccttgattcgggcttgagcccttgcttccttagcacaagccagcaaacgggactggactgcccagtcgagcgccaagtcccgatcagcaagctgatcccgcaggtggcggatgtcccttcttaattcatttattctatctccatccgcaacccaagcgttggtcatgtgttgcaactccgcttgaagtcgacttactcgtgcttcaagatctcctattggatcattactcccgctgctactgttctcatgtcgaggggccagttgatgtcggggcacaccgattggtccagttgacttgcgcgccgttttccttgtgcgcggcggcatctttctaagggggaaaactttattagtataattcttagcatgatgcatgtgtaagtacagaatcaatcttagttgattcaaccttctatacattgcactcttcctatctggtctttaagataaactcttcagaatacttaggtaagaagagaaaagagtttttaggtaagacttttaaaaaatccctttgaagatgcctcataatatctgcaaagaagggctacgctccgatacgagctgtgacggaacctcccaagtaattaggcccacctacagttgtccttgtccaacggactccagacaaccctgtaggtgcccctgaactacttgacaagttcggtatcttctttcttaccttaccaggaatgtctcacccgtcttgcagacattacagaacatcggagatatagaaatgcggaagcgattacataaacttacatttatttagaaaaacgatcatgttagcaggaaagttccgtccggccattgttacgggcacttgataggccacttctctagtaaaaatgtgtccccctggtgaatgaattttaaacccttctttgaattcatgacatgaaatgtgatgttgctccacaaatgtcttgctaataaatgtatgtgaagcaccagaatcaaaaagaataattacagggtgactggccacgaggaacgtacccatcatcaccggttcaccttctggtgtagtggccacttgagtatagtatatccgccccgtcttctttgtattcttccccacattatttccctatagaatgagctgatttcccagatccttgc

SEQ ID NO: 112169 - DNA, 511 bp, Zea mays
  Clone ID: MRT4577_33785C.1
attcggctcgaggtccaccgccaggtgttctgcctggctctcaacccgtacaatgaatgggctgcaataactgattctactgacaagactgtcaaactatatgatcttacgaagagacatactttactgcacacctgtgtctgccacaaagaagaagatttttaagttggatggactgcaaagactgaacctatacttgcatactgatatctgggcagaagcactcatggtctgggacctaaacaggatcgagcatgaacaaacaccggaagatgcacaagatcgtcctgcagaactctggttaatccacgaaagccataccagcaagagctctcatgtgtcctgaaaccactgcgaggactgggtgactgctagcgtcattgaagacaacatcctccacatgtggcagatggctgatcacatctaccttgacgaagctgaattgccgacagacgatgagctggagaatctttaatgaagcacacaaagtagaagagtattctgttacata

SEQ ID NO: 112170 - DNA, 427 bp, Zea mays
  Clone ID: MRT4577_33786C.1
aaaaaaaagggaccgcccgaatttgctttaacagggcctttacatacccgattcctccttggtttccaaaggtttcccggggaaaaaaaccccctcccaaaaaccagggggggggggggccccctagcaggtaaacccttgaatcacttgggggggggggcccaaacccccgggattttgacatccttgggccccttggcccccaggggggggtgggacgggtgcccccttttaaaaaccccgaggacccccccgggctccggggggtttttggggaccctcaacgtgatgttgccggggggggaggcggctttcttgaggttttcttttgggagctcctcctggtaacctttgcccccgggggggagcgcgacgggtttttcctacccgggggagccccccgggcccttggggtcaaggaaggagg

SEQ ID NO: 112171 - DNA, 295 bp, Zea mays
  Clone ID: MRT4577_33787C.1
gggagggctaaaaaattgccggtttaaaccccaaaagtttttttttggggccccccaaaaaattccctgtaactaaaccccccagggaaccattttttgctgttctagccccctttaccggttttggcgatccaaacaggggggctcctccaggggggagttggttccccgggggcccttttcccctaaacgtccccaatttgccctaaaaaagccggcccaggaaaaaaacctggatgaccctggccccaatcagggcccccaactcaaaaagggccttggggccccgccccgg

SEQ ID NO: 112172 - DNA, 235 bp, Zea mays
  Clone ID: MRT4577_33788C.1
gagcaatccgtgagaatagcaaacccctatctcttataaagaagaagatagataggtccacgagttgagacagagaagttctgactaatcaagtaggagtttacccacgagagtcagaggctgcatcatcaaaggggtatagaaataattcagaagcactatggcctgaagcgaagggcaggaacgaacggaatcaatgtgttccaatttatccggagtaaggacagcagccgag

SEQ ID NO: 112173 - DNA, 1527 bp, Zea mays
  Clone ID: MRT4577_33789C.1
ctcgaggccggccgggtgggggcctcgcgggccggctagacaccggagcgtggccgtccgattcgttccttctgccaagcacaacacagaccatcgtctgcccgcccaactgcacccgccgccgtcgcctcccaaaacccaaccaaaccctagatccgccgcactcagttccggtgagaccctcctttccagcgaaaatgccgaacctcgagtgccggatgtatgagcagcggttcccggaggtggacgccgcggtgatgatccaggtgaagcacatcgctgacatgggcgcgtacgtctcgttgctcgagtacaacaacatcgagggcatgatcctcttctccgagctctcccgccgtcgtatccgctccatctcctccctcatcaaggttggccgccaggagcccgccatcgtgctccgtgtcgaccgcgacaagggctacatcgacctttcgaagcgtcgcgtctccgaggaggaggcgcacgcatgcgaggacaggtacaacaagtccaagctcgtgcactccatcatgcgccacgtcgccgagacgctcgagatcgacctcgagccgctctaccagcggattggctggccgctctaccgcaagtacggccacgccttcgaggccttcaagctcatagttgccgaccctgacgccatcctcgacgcactcacctatgaggagaaggaggtcggcccggatggccaggaggtgactaaggtggtgcctgctgtcacccccgaggttaaggattctctggttaagaacataaggaggaggatgacaccacagcctctcaagatccgtgctgatatagagatgaaatgcttccagtttgatggagtgctccatattaaagcagctatgaagaaagctgaagctgcgggcaatgataactgtcctgtgaagattaagctagttgctcctccactttatgttttgaccacacagacccttgacaaggatcaaggcatttcagttctcactactgcagtcaaggcttgtacagcagagattgaaaagtacaaaggaaagttagtagtgaaggaaccaccaagagctgttagtgagcgggaagacaagctattcctcgaccagattgattccctaatggagcaaaacgcagaggtcgatggtgatgctgacagtgaagaggaggaagatacaggaatgggggacgtcgacattacaaattctggcgtcgctgcttactaaggctacactggttgatttggatgagctttgctgtacagcaccagctaagttctaagccgttctgtttggaagcagtttctttctgttaggttttggtgaattcgctgaaactcgttacctgcgttgttaatgttttgggctcagccggtgttggggtagcgtttacttctgtcgagaatcaccaattttttcttgggactgaaaacaaagcccgttgctataagtgtttatattcacttcatatacgcaagtttggcttcgtgctgcctattcgaaaaaaaaaaaatcgctaggcttgcggctctgattt

SEQ ID NO: 112174 - DNA, 2668 bp, Zea mays
  unsure (1)..(2668): unsure at all n locations
  Clone ID: MRT4577_3378C.1
cgatcaccggatggtcatccctgcaggggacaaggaggtgcagacggaccaggccgcgcacatggtgtacgctgcacgccggcgacaaccccttcgacaccgtcaccgccgccgtcaaggcggtggagaagcacctgcagacgttccaccaccgcgacaagaagaagctgccgtcgttcctcgactggttcggctggtgcacctgggacgccttctacaccgacgtcaccgccgacggcgtcaagcacggccttcagagcctgtccaagggcggcgcgccgccgcggttcctcatcatcgacgacggctggcagcagatcgcctccgagaacaagcccgaccccaacgtcgccgtccaggagggcgcgcagtacgtgcattgcacgcatcgcatttctctgatcaatcatggctggctgccagcccgccgtagtttccagacgctcaccaaaactggttgatcgcttccagattcgccagccggctgaccgggatcaaggagaacaccaagttccagaccaagcccgacggcgacggcgacggagagcaggcggcgggcgggctgaagcgactggtggccgagaccaaggacgcgcacggcgtgaagcaggtgtacgtgtggcacgccatggccgggtactggggcggcgtgacgccgacggcggggacggcgatggagcgctacgagccggcgctggcgtaccccgtgcagtccccgggcgtgacgggcaaccagccggacatcgtcatggactcgctatccgtcctggggctgggcctggtgcacccgcgccgggtgcgagacttctacggcgagctccacgcgtacctcgcctcctgcggcgtcgacggcgtcaaggtggacgtgcagaacatcatcgagacgctgggcgccggccacggcggccgcgtcgccatcacccgcgcctaccaccgcgcgctcgaggcctccgtggcgcgcagcttcccggacaacggctgcatctcctgcatgtgccacaactccgacatgctctacagcgccaggcagactgccgtcgtgcgcgcctccgacgacttctacccgcgcgacccggcatcgcacaccgtccacgtcgcctccgtcgcgtacaacaccgtcttcctcggcgagttcatgcagcccgattgggacatgttccatagcttgcatccggcggcggagtaccacggcgcggcgagggccatcggtggctgcccgatatacgtcagcgacaagccggggaaccacaacttcgagctgctcaggaagctcgtgctccccgacggcaccgtgctacgcgcgcagcttcccggccggcccacacgggactgcctcttctccgacccggcgcgcgacggcgcgagtttgctcaagatttggaacctgaacaagtgcggtggcgtggtgggtgtgttcaactgccagggagccgggtggtgccgcgtgaccaagcggacgcgcgtgcacgacgcgtcgccgggcacgctgaccggcaccgtgcgtgccgacgacgtcgacgccatagcgcgcgtcgctggtgacggcggcgggtgggacggcgagaccgtggtgtatgcgcaccgcacgcgggagctagtgcgactgccccggggcgtcgcgctgcctgtgacgctaggcccgctccagtatgaggtgttccatgtgtgcccgctccgcgccgtcgtgccggggttctcgttcgcgcccgtcgggctgctcgacatgttcaacgccgggggcgccgttgaggagtgcgacgtgatcagcaatgtcggcggcaaggccatggctctcagggttcgcgggtgcggtcggttcggcgcttactgctcgcgggagccggcgaggtgtctattggactcggcggaagtggagttcagctacgatgccgacaccggcctcgtgtccgtcgacctgcccgtgccggagcaggagctatatcggtggacgctggagattatggtctaggccgtgacgctgtgcgctgacgccaacgcttgccttcgcgtttgagccattctgagccggacgacattgtcatttgctatgtgcacgagagatagatgtattgtggtgttgttgtataattggtatggnngaccggagtatgggcctctcctctgagcggggtaggacctccgccatgccaggcactacgacgcgattgtcgccgacgagccaaacggaaagaacaaggacctgtaccgccccgtcgccaacgccaataaatacacccgcgggtgcgagcccatagaacgctgcaggggcgcgcgctgatcaccaagcatatacatatagcacatcgatttcttattattgcatgcacgtttatataagtgctcattgtcttgctgttgtaagtgccagcacaagcatatatacggcgtttatatatactacatactccgatcgttcattccgttccttagtaaccaggttcccggatcaatgtgatcgaggaacaggaacgtggtacacggtacgctactaaaactaggatttaacgctactggaacgagattgtttccacgttcccggaacagaacgaacattcccggaacgaggaacgtggccaagttccccgtccccggttgctaagttccgttccaacttgtaaattatattaaagtgtccaagagcaaaaaaaaaaaaaaaaaaggggcggcc

SEQ ID NO: 112175 - DNA, 387 bp, Zea mays
  Clone ID: MRT4577_33790C.1
gtcagatttagaataccatataaagtttcttctggatggccgtccaagagatccagggggtgtgcttctacaccttgatggatcgcacgatgttggtcttgacattaacctctagagcttcaactacatgctcatcttcgacgatttattttgaagattttataagctagatcataatagtatgtacatagggactatgcgaataattaccgcgggagattgtgaaacacctgcttggcaccttgtgcgtggaacttgctcgtgtcttgctcaaacatacataaatttcatactcaaactacttggttatctacacgttccatataatacctatctctttatgataaccatttatgagactgaaccattcttgtatacctttttttc

SEQ ID NO: 112176 - DNA, 435 bp, Zea mays
  Clone ID: MRT4577_33791C.1
cttttgtttaaaaatctactgatctagaggcgggccggactcccatgccgccaccgccgcctccaggaccaccttaccagcgccgtcgccgcggggcttcttcgcagattgggcctctggccgtgggatatggtccagtcacggcggtgcagcggcaactaccgttgcccgcgccgcgccgaactgccggcggcagcggtgctgctcttcctactcggcgtcgactggctgctttacgtcttcccgccgccgatagaaaaccacccggtgctcgcttagtgccgccgccgacgttaggaccataccttgctgaacaggtccggcgccaggagcatggaggaaggtcgagcgccgtgagaattccggtgctacgacgagatggctcggccgtagggatgaccttttgggttgaaagctagctagctaattgtatgg

SEQ ID NO: 112177 - DNA, 1087 bp, Zea mays
  unsure (1)..(1087): unsure at all n locations
  Clone ID: MRT4577_33792C.1
acggtggtctttggctttcttccccttcttccaccttctgacgcacagcagctcttacttttcctcttctacatatgcgtagcaatctccatggtaaaatctacgagctcttccttctaactaagcccgctcaccttgtctggcgacatcgccaacattccggcgctttaagaccacaggctttaggatttttctaccacatacccctgagcagtgagtgcttctcctcccggcccagccactaaccatgcgcatcgctcccacacggccacacccgatcgagcggtggacggaccaaggccgaccgggacagaggtcacaagctgcatccccaccgacctctgcatgattgtgtctacgactctgctttgatgcagcaggaagttagatccacactcgatgttgctaaagagtacatgaaagaaaacctacaactatatatgatgatgccatatggatgttgaatgatggatgcgatgaagctattggagctgcatgtgctgccttcggctttggtgtactttgcgtcgctctaaaatcacaggctttcatttctttgagtggacaccatatcagcagagaatgtgtttctgccatatactaatgcccacaaatatcgtttatcaaaaagtcgttgaagccatttattcccttgaaggttgaatgtggttctctccatattctccagatattcccatcctaccaggaggatcagccgtgaaactcaatgatggaattacaatttcaggaggatccttcgtctgtgctgcagaagtgtagaattctgatggatccattgtatcatatggtgtgttctgtagaattaggtatagatgtagttctatgttatgggtgattgcttgtggaataaaaatatttattttatttatggctagttttggcggggcatttgtgaggtcttggcgctgatgtgtattctaggcggcagcttttttacttttttggcgcgctaaggaatgtaacggcgtgagctgtaaataagcaaagggttttagtgggtccnnaaaaaaaaaaaaaaaaaaaaaaaaaaaaaaaaaaaaagaaaaaaaaaataaaaaaagcggcc

SEQ ID NO: 112178 - DNA, 1627 bp, Zea mays
  Clone ID: MRT4577_33793C.1
atcggcgacgctccctcgtccttctctcgctcgctgtcatctatctgctcctcactccccgctccactggagacatgcccagaggcttgggcgccgatcccgtctcgccgcgcctcgctagtctcggaacagtgcggctggcgctgcctctcgagccggcgctgacttccccaacacctggggcaacgcgacggcggtgctctcgtggttccccaacttcaccgacttcgcgaggctgctcgaaggtccactcccgtgaacagcgagctgaccgcaaggacgctactgacgctcctggccgtgtctaacggcaaccggacgaattccccctcgagttctcggagacgaagccgtacgacgaagcctgtcgctgcggtggggaaagctgctggcgacaggtggaaatccctgagcgagtcggacaaggctccctatgtagccaaggctaacaagctcaagctcgagtacaacaaggccatcgctgcctacaacaagggcgagagcactgcagctaagaaggctcctgccaaggaggaagaggaggaagatgaagaggagtctgacaagtccaagtcggaggtcaatgacgaggatgatgaagagggtagtgaggaggatgaagatgatgacgagtgatggagctcctcgagacaatggaccgtgcttcatccaacaatggagcggctacacaaggccccgtggcgatcacaaaaaaggagcctatatccatgtactagaaatattcagtttcatgtccacattgggacctcgaggccggccgggacacgctacgtgtgtaatctcgcttcggcgaagcgcggggcattccttttcctcctccccctttgcggcttctcgcagcgctgcgaatcccaatccgcaccgatccgacgcgaatcgatcgagaggcagggggcagcactaatcgaatcgagactagcgccatgaacccgagaggccatcgtagcaacagaacttctctcttcgatggcattgaggagggtggaatccgagcaacatcctattcttctcatgagatagatgagcaagaaaatgatggagctattgatggactgcaggatcgtgtcagcattctcaagcggttgtcaggcgatatccatgaagaggtggagactcataacagaatgctggaccgaatggggaacgatatggatacttcaaggggttttctgtctgggaccgtggacaaattcaagatggtatttgagaccaaatcaagccggaggatgggaaccctcgtcgcatcattcgtcgccctttttctgctggtttactacttgaccaggtagaagacatgacatgctggaaatggtcatctcatcatctgcgtgccgtgccgtatagatagataccttgaaaacccaccgtcctgagtgccaaagtatatgttgatgtgggtgtttcgtcaactctgcactgtacaacacgactacagcgtgcgtgctgggtcgatcctatgttctcttgttgcgggattcaagtttgttgtccgttccttccctttggcatgtcatgtgtatggtatttagtagcataacaacaacaaaaaaactgtataaagaagctttgattgagcactaaaaaaaaaaaaaaaaaacccgagcat

SEQ ID NO: 112179 - DNA, 324 bp, Zea mays
  Clone ID: MRT4577_33794C.1
cccgggcctgcacggaagttcatgcacgaagggactgcagactgacttcgcaggactaagcagcaacgcgccccagtcagcagcacaagagccgaccacgcagaacccctccgccctccgatcctctcaactagctctctacctgcaccaggctcgaccaccctgcgctcgccgccgacatggggaggggaaagctcaagggaaagcccaccgtccgccacagcttctacacaccagaggagatcgctgctggactagagatcgccctcgcacctttgtgaagacatgccgcagaagaagagaattggaccttcatatggccga

SEQ ID NO: 112180 - DNA, 1217 bp, Zea mays
  Clone ID: MRT4577_33795C.1
cttggagagcaaggacagttttgccaatgaggaaagactgtgaccagaagaatgacagtttgactactagcagccaccattgttaagcgcccacaatcctcaaatccttgacatgacgtgtcctggaactttgtgcaaacttcccatgggtcagcctcatgcaaataataaatccttcattttagtcaatgcaaatctgtaccaagtcagtctcaagttttggataagtagtacctacaggtcgtgtgacgacccagcaaaattaaagaacttccaatgtgcaaaccacagcgcacgaccaatggaggagtagaaaagtacagacatggtggcgaaccaaaacattaccttgttcatcctgtccgtaggccttagtattgctggattcactgctggggacgacgaccaattcgtctacaccggcttcgctagcagcaacctaaccctcgatggtggagcgacagtcacgccgagcggcctccttgagctaaccaatggcaccgttcggcagaaaggccatggattccaccccagttcggtgctcttctacgagtcctctagtggtgcagtgcagtctttctctgtatcctttgtgttcgccattctctctacctatcctgagactgagagtggtcatggcctagctttcttcattgcgccagacaagaatttatcgggttcattcccaacccagtacttgggcctcttcagtgaccagaccaatggtgacccaaacagccacatctttgcagttgagctcgacaccgtccaaaattatgacctacaggacatcaacagttaccatgttggcatcaacgtcaatagtctacgctccatccgatcccatgatgcaggctactatgatgataaaagtggtttgttcaaagatctgtcactcgatagccatgaggcgatgcaaagtgtgggtgaactacaacagagaaaccacacagatcaatgtcaccatagctcccctcaatgtcgccaaaccagtgaggccattgctgtctgctaactacaatctctcagcagtcatcactaatccggcgtatattggtttctcatcctcaacaggctctgttagtgggcaacactatctgcttggttggagctttggcatcaacagtcctgctccaccaatcgacattaccaagctgccagagatgcctcgtcttggtcagaaggctcggtcgaaagcattacagctcgtgccgaat

SEQ ID NO: 112181 - DNA, 186 bp, Zea mays
  Clone ID: MRT4577_33796C.1
ctgtggcgtcgggtcgttccttgtttcgcgcagattattgttcggcgcttgcgtttcgaggccccaaccgctgtcctcgggcgtgatatgcgttgctcgctgttggggccccagcccactgctgcgcggggcggccgtccctgctctcgccaccccgtgcgcgaccccggtgggctttgcgcgcgc

SEQ ID NO: 112182 - DNA, 379 bp, Zea mays
  Clone ID: MRT4577_33797C.1
aggggaaaaaaaacgaatgtttgatttattttaaggggaaaaggtgggtttaaataaaaattgaaacattaaaaaaggggggtgtgagggcaaggaaaaattttaaatgatgggggaccgggaaaacatgggagggtgaaattttttcaaagggaaaaaaaaggattcgaagaaatgtttttacccaagcatgttataaagttcaaaattcattttgaattggtggctaattggatttttggctaaattttttaaggtttcttttgaggcttcaaaagggcttttttttccaattgggcctaaaggggggtttctcggttggtttcctagatgcgggtcctcctgggggggggggggggggtcccgaaggaagcggggg

SEQ ID NO: 112183 - DNA, 366 bp, Zea mays
  Clone ID: MRT4577_33798C.1
gataacaagtgggaaggacaagcctttatttatttgggaataaatgtcactggaaacattacatgtgatgagagtgcatgtgcatgcaatgtacagtacttacgtatacaaataaacagacgagcgtagtgcaagatgattagctataaagcacacatgcttgcatggattagatgacaccaattattaaaagtattagatgcgccatctatactgacatatatgcactttggagctttcaccgctgaattattgttgcacatataaattgattaattgactttggaacagcgagtgcgatccatatatatgacatgtggcgcatagatttattaggcattgattttactctcggagacctaggac

SEQ ID NO: 112184 - DNA, 335 bp, Zea mays
  Clone ID: MRT4577_33799C.1
cccacgcgtccgacttgaccggcggaagttctgcctaaatttgttgtcgaacggatgaacgagtatattgtcggtgctatgccagcaacagagcttattttgtcccgaaaaaaaaaaacagaaagagaaagagaccattgaaaactacgaaatcattaaccacacacctataagcaaggagtacaagatgaaaccaattggtgatactggtcctgtaacttgagcaaaagggataaaaagactatgccccatttacatgaatccaatgttttgaaagctgctttatgaaggaaaggtaaaataatgggaccccaagataaattactatgcatatc

SEQ ID NO: 112185 - DNA, 166 bp, Zea mays
  Clone ID: MRT4577_3379C.1
aattcctgggtcgacgagtacactacccggcggccgccctctccttgggggttttttaagggggaatggcgcaaaacccccaggcagacaaaagcaacgagccagaactagaacccacacgggcaagccaaacgagaccagcctaccgggcccccgaaggagcgga

SEQ ID NO: 112186 - DNA, 449 bp, Zea mays
  unsure (1)..(449): unsure at all n locations
  Clone ID: MRT4577_337C.1
gnagaggaagaatgtantggtgtnagtaaatnaggtgntaggggaatggttngnttgttgtagnagtaaaggnaagttaataattanaatggaaagnaaagttttttttttttgtaagagaattagtggggggggattagaatattnngntgtantngttttaantgttgatgtggaggatatataggattgnnatgtnaaagataataaaggatganagttnnatngttagggtttttnatttaatgangntggnatgtttnaggatgganggaatggngatgtttnttattattgatgngnnngtnaagaatttngtgaagtttaaaaaggngtgttgggtattggaaattatggaggaagtattagaantgaggaaaaatatgaggggnattggtaggataaggtanatgagaantgttagnattggnnnaaagttgttatagaga

SEQ ID NO: 112187 - DNA, 416 bp, Zea mays
  Clone ID: MRT4577_33800C.1
aaactgaaaggtaagatggctggtacaagcagctcaaacagaaccagggtctacagcagcttaacaagttgttgtaccatcagttcatacactttgtgtcaattaaaaaaaaactgaggcatgtaatcaaaacatgcttgtttacattttgtttttccagcattgggagctaccaaacatgacggatgttgcaaaaaaaaaaaaaaggatgctaccctgtactttaaatatgcagggacggtgtacttgcattttatccctgcctccttttctcgcctgggcttgttttttcgccggctcccaatttgcctgaacccattggtcctcgttgatttattactgcttaatttaacaattgaatttatttcttcttccgcaattttgtaaccctttttttactgcctttcttttttttt

SEQ ID NO: 112188 - DNA, 476 bp, Zea mays
  Clone ID: MRT4577_33801C.1
tttcagatagagtacaaatcaatcttttgagtaagaatctaaaacagcacgctagtattcacctcaggacaaacacagcagatcacaccaaatctaaactggaggcgactactgtttacaaatactactcaacaagcacacaaaaaagaccaaatgctgagctcaaaatctcccccaaagaagttcaaatcagtttctcctaaaaagatatacttcaggtcacaactacccaaaatgacaccaaaatttgtgggggtaaatggaaaaggtgaggagagaaggaaccagaggtgtttttttattttgtcaaatactcctgtaagaaactccccgaaaggtcatatcaaatctttgcggaaatgaaagcaagaacgacgcagagcagctttgtagtctataagtcgaatctgggcctggatgcgcggcctcacctgcaagcagcggcaatggcagcgaggccggctgtactgaagccc

SEQ ID NO: 112189 - DNA, 114 bp, Zea mays
  Clone ID: MRT4577_33802C.1
attattattcgtttattgtgcaggcaacacgaaagtcgacggataccaagaataagtatttctgagcatacaccattcgcagtcccgtgtggctaccaaagaggtacgacttgg

SEQ ID NO: 112190 - DNA, 383 bp, Zea mays
  Clone ID: MRT4577_33803C.1
agccaaaaatttttaattttaagttgaccaaaaatgtttatttttttgaaaaccagtggttttagggggccattgttaaaaaaattccttttaaaaaaaaaattgagacgtttttgaaaaaaaaaagggaggaaagtccctttgaaaaaaaaattttgtaagcaaaaaaatccatggttttgaaaaaatttgaccttaaaaaggttgtttttttttacccttaatgaaaccggcaccagtttttaattaaaggaatggggtttttttaggtaagggagttttttaaagcttgaaattggggttggggactttttgcactgacattagggggggaaaaaatttccattttaataaaaccaataaccgggtgaaattgaactttg

SEQ ID NO: 112191 - DNA, 628 bp, Zea mays
  Clone ID: MRT4577_33804C.1
agaggaagttccccacatcatggactgccgcgacttcctcaactcgacccgtccggccaaggcgaccggaatggacaagtacagcttcaccgtcctgcacctagacctcgcctccctggacagagtccgccacttcattgcgagcgtgcgccagttgcagatgcccatcaacaagacgctctgaaacgccgacgaggtaccagctccaccgcccaatagactcgtcgtacacctccgacggattctagattgaggactgggttaaccacctcggacatttcctcctcgcccgccgagctcctcagagatctccaggccgccgactacccctctaagcgcctcatcagcgtcgactcgatgaccgcgaacacaaacaccctggcggataacgagcccgcgaacgacaatctgcgactacctgtcttgcctcgatcggcgggctaaacgccgttggcacgctcgattgtgatctacaccggagagttcaacggcgcctgggcatacaacgacagcatggagtgcagcatgctaactatgccagatttccaccgccgcgaccacgaggatacgggcgtgaccttcgagtccctctacccgagctgcatcggcaccacgtttatgatctact

SEQ ID NO: 112192 - DNA, 275 bp, Zea mays
  unsure (1)..(275): unsure at all n locations
  Clone ID: MRT4577_33805C.1
aaannggggggggaccaccccgtccgcgagtcgcggggttttcttgtttttttacaaaacactctcgaccccacgggtgggtaaggtggggggtgtgccccacaccataatttctccaaaggccggaggcgggaggacataaaatacatgcggtgccagctgtgcgagcggatcgcccacgccatctccgcgcacgtcctcgagaggcacctggcgctgcaaccctctacgaaagtacctgagatcgagatcatggaaggcgtggaaaatgtgtg

SEQ ID NO: 112193 - DNA, 324 bp, Zea mays
  Clone ID: MRT4577_33806C.1
actgtctgcagccatcacaaacagggtcggtacaaacattgagatttttgttgctcacccacgctggaacacacgccttggagcctggcactccaactgctagaggtctatgacatctcacgacgacctggctatcttcaaaagtgtgctcgcaggcaaagtctgctgactctacgttggatgctgttacacgagctacccactactagggtgactacagtcaaattactccctgccagtagcgctgtgtagagggtgggaaggtcacagatgacatcaaaggcattgccgcctataacaaggttcatgttgagacgatgaaca

SEQ ID NO: 112194 - DNA, 344 bp, Zea mays
  Clone ID: MRT4577_33807C.1
aaaattaaaaatcccaaaccagtggtctattatttggatccattcgaccgagacatcagaaagagagagagaagggttttactctacaagaatttcataagagaaaaaaagatgaggtatacgagggggggacaacacgacgacaagaaacgtgatacatgcacggatgcatgcatatgccgagtaaattaagccgcagcctctggcgcaacgacgtggacgaaccgggcgacggtctggatgagctcgccggtggcctgggaccccggctggtgcaggtagaacccgtggggcatgccggcgaactcggcgagctccacgggcttgcccatcgccgccagccg

SEQ ID NO: 112195 - DNA, 347 bp, Zea mays
  Clone ID: MRT4577_33808C.1
ccccttaacaaaaagccccccccttaaggggccccctgaaaggggggccagccaaaaatcccccacggtttggggcctcagcctccctttttatggggtattataatccggggcgaaattttttaaactggggatatggatcggggctaaggaaaatccccccggttaaaaaacggccctgcaaaaatgtgggggtccccccataaaactcccaccctgaaaagggcatggggcccaaaccattgaagccccgatcttccaggttttttttggccagtttgggagggtcccgtatggttgggccggcacattcgggggggtttaaatgccaacgcctccaagggttt

SEQ ID NO: 112196 - DNA, 330 bp, Zea mays
  unsure (1)..(330): unsure at all n locations
  Clone ID: MRT4577_33809C.1
ggttcgccgggaaaaaaaacatcaactttgaaaggcaaaggagctccacaaggaaaggataagagaaacatcgacggagaagaggtccaccgaaacgacccaaatcagacgccaagagaaggcgagagganaagcctgaaccctttttttaaaaagctgttgtgngcccggcgaactcactgcaacaacaacncaccccttccgcgggggggcacgggaagcaaaaaaaccgaaaaaaaaccccccccgcaggaggtaccccagcccgccacgagggccaccaaggaagggagggccacctggagatcgagcccccgcaagagaaaaggc

SEQ ID NO: 112197 - DNA, 125 bp, Zea mays
  unsure (1)..(125): unsure at all n locations
  Clone ID: MRT4577_3380C.1
cgaattacgccctatgaaacagtgngctcgagaacgaggccttagtctgtgcttgtgctttgaggcttgttgttgctcttccaatcttacatctggctttttggataattattgagggcaagctt

SEQ ID NO: 112198 - DNA, 1179 bp, Zea mays
  Clone ID: MRT4577_33810C.1
atgaggggttacttggaatccaaaataaggaaaagaactattttcctagatgataatgagcagcaagaggaggaagaggacgtaatggtggtggatgcagcagctgaatctgttcaagctcaacaagatgcacctatagaatcccaaggctctaaggtacaaccaagttcagggactgcagccaaacacaggcgtgcaacctatctgtacaaggatacaacatcaatcaagaccaaggaaaatcaagcaagcaagaaaaagtcaattgtggagatgcttcggaaatcacctgaagatgtagttgatgaaaggcgtaaagggtgttctcaacccacaattccatccaagatgaagtccaaagagcagaagaattatgtggatatgcaatgggctttgtggttttatgaatgtggtgttccatttaatgcagcaacagcaagacaatttcaggttatagttgaggcaactgcccagtttggttcaggctataagcctccatcaccatatcaacttgggcagccattgcttaaggatgctgtgaaattgacaagtactatgagggaggaacacgagagggcatggaagacaattgaagagattgggaaagaaaaagtggttcaggttatcactaataatggggctaactacaaggcaacatgtaggatacttatggagaggtttccttcactcttttggagcccatgcgctgcacattgcttagatcttatgctagaagacatagggaacttgaaggaatttaagaagcccattgtacgttcaagacgtgtcacaactttcatctatatgcatggtagacttcttagtttaatgagagagaagacaggtggggcagatctggtgagagctgcagccattagattggaaagtttgtacaagcacaaggatcctttgaaggccctatttcttagtgaagaatggaatggaaataagttggcaaaaactgttgcaggaaaattgcatcatctcattcgagatgatgatgatgcaactgttggccagctaacaagttgtttccttgatgtgcttgcaagaatggtggatgatgaagaaacaagggacaagattgatgctcaatctttagactatgaagctcttaaaggagaggccttctcaaacaaaatggccaagaacaacctggagaacaatgaacccatgtaa

SEQ ID NO: 112199 - DNA, 328 bp, Zea mays
  Clone ID: MRT4577_33811C.1
gtatactgtgcggcggatatgtgattagaggaccgaaccaactatccgctccagatagccagacctcccgatgatgctgaattgctgatgactgtgctcaaaggcttcaaaccaactatagagctcgcaatgtcatgacaatcatgaaaccttattatgctagccttgcaaagatgtgatgtgtactgtccgtacaaacaaacaactaatgcgatgtcatgagcaggagactggacactgtcttgctttgagcttcagtggtctgtcagtttggaggatctaatgtgactcgcgcctagatgtacaagctattttataaatggggcca

SEQ ID NO: 112200 - DNA, 880 bp, Zea mays
  Clone ID: MRT4577_33812C.1
caacacttttgctcgctcgccttccctcccacttccacatggccgatctcctccacgcgcgcttcctctcgctccccttggccccgaaccctagccccgccctccccgcgagcggcgcgcggcgggtgcccccggtccccgtgcctcgccaagctcctcctcgccggagaccgagtggtgcccggtgcagccggagcagcgccccgtgaagtgtgaacgagtacgaggcgctcgcggcctcccttcccttctcccgggcggcgggggacctccgatcctactgctcccgcctcgcgctcacgggcgccgccgtcgcgctcttcgtcgggctccccgtcgccgccttcggggcacgcggcggggccggcggcgacgctctgcacctcacgctcggcgccacggggtccgggatcctcgccgtcacgctcgcggtcatgcggatgtacctcgggtgggcctacgtcggcaaccgcctgctcagcgccacagtggagtatgaggagacgggatggtatgatggacaggtcaagcctgtggtaaacagagtgaagttcaccttggtgggtctggcaggctccctcatcctttgcattcttctttacttgggatgcgtaccggtggaaggtctatcccggaagtgtacagtgacgttgccgcaaggtcatttgggcctgatgcgttctgtggagaagctgatctgtcgtagcatcgcaaagcgtggagcatgagaagtttttagatggtggtatatggtctcatagggtaggtatacaagttcccctttgtcttgccttgtggttggtggatggttccatttctgtacggggttttttatccatcagttactgcatcagggtaatgttaataagtaatatttgat

SEQ ID NO: 112201 - DNA, 713 bp, Zea mays
  Clone ID: MRT4577_33814C.1
ccctcgaggctcgcgcgggattagaaattgcaatacccaaaaaaaacatcgtagcatcattgggaaaaaatatcttttacactgctactaaacactgttttccttttttatgctccaggtcaagcctgtggtaaacagagtgaagttcaccttggtgggtctggcaggctccctcatccttttgcattcttctttacttgaacaccgaaaccccaaaggaaccttataggatgcgtagcggtggaaggtctatcccgggagtgcacagtgacgttgccgcaaggtcatttgggcctgatgcgttctgtggagaagctgatctgtcgtagcatcgcaaagcgtggagcatgggaagtttttagatggtggtatatggtctcatagggtaggtatacaagttcccctttgtcttgccttgtggttggtggatggttccatttctgtacggggtttttttatccatcagttactgcatcagggtaatgttaatacgtaatatttgataaaaaaaaaaaaaaaaaaaaaaaaaaaaaaaaaaaaaaaaaaaaaaaaaaaaaaaaaaaaaaaaaaaaaaaaaagggaaaaaaaaaaaaaaaaaaaaaaaaaaaagggggcggccctttttaaaggatcaaattttacttccccttgcttgcaacgtaatagtttttttatggggcccccaaaataaatttaatgggccggggtttaaa

SEQ ID NO: 112202 - DNA, 287 bp, Zea mays
  Clone ID: MRT4577_33815C.1
ggagaggggggggtaaaaaaccccaaaactttttttttttttttaaacccccatttaaaaaaaaaaaaaccccaactttttttaaagaacccttttaattaatttgcttaaactgcaaagaaaaaggggggtgagaaactttaaactaatattgataataggcactattgagtccacgatgtccttaacatctttgacataaagctaaatttggctgaaaatttgtcaaacattaattgagttgtcctgtcagatacaagccctgactttcatcaatgcgaccaatt

SEQ ID NO: 112203 - DNA, 376 bp, Zea mays
  Clone ID: MRT4577_33816C.1
tggcttggaacctttgggctgatttatgtgcttgtttatgtgcttgtggtaacatgtggagaaccgcctcgtgaaggtcgtccgcacggcggtattcaagagtactactcttcatttataggctcggaaagggtaagggctgaggaagcggaagtccgattagagtgatgggcctcctgcgtaacctgaggtattggtgtcgaggaagacacggcccgcgttaagtataaaagagaagggatggataccgcgtaagagtttcgaggttccggatactggtacttacgaagcgtctttttgcacacctaaggaggtagtccaagtttaacaacggaagatcgcttacggaccttcgacttcgtatagtgtccgtcgg

SEQ ID NO: 112204 - DNA, 1273 bp, Zea mays
  unsure (1)..(1273): unsure at all n locations
  Clone ID: MRT4577_33817C.1
attgggacctcgagccggccggaaaaaaattcaaaaaaaaaaaaaaaaaaaaccttccgcctgcccaccgtgcccctgctcgcccttcccgtcgcggtgctcgtccgccctgccgcgccctgcccgccgcgtcgtgaggggatgtgtctagggttattgggagagcaccccttcctatggcgtccacgacaagcactagggcgtcgccatagacgcctcgcggatgccatacacccagttggcaaggcgtggactgtggcgttcggcctggagcaccgcttaagagacactgtacggacgccataacaattaacaagcatggctctagtgcaggtgcgatttactcgtgcagaagctccgacaactatttccgaattacccgggctggtttgtgatgacatctctggagggcaagaaaatattcctattcctgctactaacttggttgatgatccacctgttcctccatctggtttcaagtacttgaaatctctacaaattccaaaggacatcaagattccgtctagtattattaagacagcttcaaaaggatggggagtcaggacttgggacactatcctccctggggctcccatctgtgagtacacagggggtgttgaggaggaccgaagatttggatggttcacagaacaactattgttttgacattgactgtcttcaacccatgagggttttggatggaagggaganaagggctggatccgaaatgcacctgcctaatcttcatcctgagaatgattcagatgcacaccctgcacctgagtactgcatagacgctcactctattggcaactttgcaagatttataaatcacagctgccaacctaaccttttcgtccagtgcgtcttgagctcacacaatgatgttaaactggcgaaagtgatgcttttcgctgctgacaccatacttcctcttcaggagctatcctatgactacggttatcgattggacagtgttgttgggcctgatggaaaaattgtgaagctggcctgccactgtggtgctcctgattgccggaagcgcctctactaacctgcagtgtgtttctttctatttggattttggaggaaacagcttatattgtaggaaaagcagtcatggtacctatgtagttgacatgctctgataatatatagcaaaagaggagcaacttacttatgaggtgtttactttgaggaatgagctagtgtatcatcttctcactactcaatatttttgtttggtttatggaataaaatgatttgatccatc

SEQ ID NO: 112205 - DNA, 1964 bp, Zea mays
  Clone ID: MRT4577_33818C.1
ccggccggatagccgctttctctgcacgcctcacacactcacgtgagggccctggttgaccctctcttcctccctccctccccctcctcctccccctcttgcctcaccttgcctcacgcttctccctcagcaccatccgcctgcccaccgtgcccctgctcgcccttcccgtcgcggtgctcgtccgccctgccgcgccctgcccgccgcgtcgtgaggggatgtgtctagggttattgggagagcaccccttcctatggcgtccacgacaagcactagggcgtcgccatagacgcctcgcggatgccatacacccagttggcaaggcgtggactgtggcgttcggcctggagcaccgcttaagagacactgtacggacgccataacaattaacaagcatggctctagtgcaggtgcgatttactcgtgcagaagctccgacaactatttccgaattacccgggctggtttgtgatgacatctctggagggcaagaaaatattcctattcctgctactaacttggttgatgatccacctgttcctccatctggtttcaagtacttgaaatctctacaaattccaaaggacatcaagattccgtctagtattattggctgtgattgtgaaggaggttgtgctagcaacaaaaaatgtttgtgtgctcagcgcaatggttctgatctgccttatgtatcatataagaacattggcaggttggtggagccgaaagcagttgtatttgaatgtggggctaactgcagctgcaaccatgattgtgtaaacagaacatctcaacaaggtttgcagtaccgcttagaggtatttaagacagcttcaaaaggatggggagtcaggacttgggacactatcctccctggggctcccatctgtgagtacacaggggtgttgaggaggaccgaagatttggatggttcacagaacaactattgttttgacattgactgtcttcaaaccatgaagggtttggatggaagggagaaaagggctggatccgaaatgcacctgcctaatcttcatcctgagaatgattcagatgcacaacctgcacctgagtactgcatagacgctcactctattggcaactttgcaagatttataaatcacagctgccaacctaaccttttcgtccagtgcgtcttgagctcacacaatgatgttaaactggcgaaagtgatgcttttcgctgctgacaccatacttcctcttcaggagctatcctatgactacggttatcgattggacagtgttgttgggcctgatggaaaaattgtgaagctggcctgccactgtggtgctcctgattgccggaagcgcctctactaacctgcagtgtgtttatttctatttggatttttgaggaaacagcttatattgtaggaaaaacagtcatggtacctatgtagttgacatgctcttgatcatatatagcaaaagaggagcaatttatggggtgttcggtttaagaatgagttagtatatcatcttctcatttactatttttgcttggtttatgtaataaaatgagtcgatctatcaccaccttattcctcatagttagttagttagcactaacattagaaatgaagtcatcttatcaaatttaaggaatgagcttatgatgtaccaccttaatttggatgaagtgattcatcaaacaaacaccctattgatataatatagcattcttgttttgtgataattagagatttaaagcggctggtggtcatggtagcatattttgccacgattaactgataggacctgcaacactggataaatatatatacgttacatgttcttatgaggtgtttactttgaggaatgaggcagtggatcatcttctcactactcattatctatgtttggcggatggaattaagtgatttgttccctcgctggatgtccgctggtcctgcagggatgtggtgctgtacagcgtgc

SEQ ID NO: 112206 - DNA, 2721 bp, Zea mays
  unsure (1)..(2721): unsure at all n locations
  Clone ID: MRT4577_33819C.1
ggtgagctcctcgtctctcttgctgagctcgacgcggcggtccggtgctcgctgcgaagctggtggatggcgaatatggattcggttgttgtgatggaggtggcgccggtgccgatcccgacgttcatggacgccactcccctgaaccccccactgccgcttgtggtggaggagctcgtgctgcgccgcagtgctcgttacctcaacaggccaacccggcctaactacgcggaccaggagcctccaaaaaaccccggcggccggggccggggcaagcgaaagagggatgaggagaagccggagctggcggcgcagcagggtaccaagaccccaggcaggaatgactccaatgttgaggcgggtgagaggaagccgatgcccgtgactgcggcggtgccggcctgttgcgctggcgttgctgcggaagacgatgcgacgccgactgggaagagcgccaagctgagggtgaaggagacactgagggcgttcaacagccactacctccactttgtccaggaggagcagaaaagagctcaggctgcgatacaggagattgaggctaagggtggcctcaaacgtcagaccaaggggggtaaaaagaagagcagtaagcaagaggctgaagctgaggagaaagagaaacgcccatcaaagcgacctgacctgaaggcaatcaccaagatgcaagaaatgaatgccgtgctttatcaggagaagacgattgggcatctaccagggctcgatgtcggagatcagttttattctcgcgctgaaatggtagtgttgggcatccacagccattggctcaatggcattgactatatggggatgaaataccaaggaaagaaggagtatgccaacttaactttcccattggccacatgtattgtaatgtcggggatatatgaagatgatctagacaaggctgatgaaattatttatactggtcaaggaggaaatgatttacttggtaaccaccgccaaattggctctcaacagttgaaacgtgggaatttagcattgaagaatagcaggaagaatggtaatcctgtccgagttattcgaggtcatttatcaaagaatagctatactggaaaggtctacacctacgatgggctttacaaggttgtagatgactgggtgcagaacggtgtgcaaggccatgttgttttcaaatttaagttgaagcggcttgagggtcagccatcattgacaacttctgaggtgcgatttactcgtgcagaagctccgacaactatttctgaattacctggactggtttgtgacgatatctctggagggcaagaaaacattccgattcctgccactaacttggttgatgatccacctgttcctccatctggtttcacatacttgaagtctctaaaaattccaaaggacatcaagatcccatctagtattattggctgtgattgtgaaggagattgtgctagcaacaaaaattgttcatgtgctcagcgcaatggttctgatctgccttatgtatcatataagaacattggcaggttggtggagcccaaagcagttgtatttgaatgcggggctaactgcagctgcaaccatgattgtgtaaacagaacatctcaacagggtttgcagtatcacttagaggtatttaagacagcttcaaaaggttgggggagtcaggacttgggacactatcctccctggggctcccatctgtgagtacacgggggtgttgaggaggactgaagatctggatggttcacagaacaactattgttttgacattgattgtcttcaaaccatgaaaggtttggatggaagggagaaaagagctggatctgaaatgcacctgcctaatctttatccagagaatgactcagatgcaccacctgcacctgagtactgcatagacggcagttccattggcaattttgcaagatttataaatcatagttgccaacctaaccttttcgtccagtgcgtcatgagctcacacaacgatgttaaactagcaaaagtgatgctttttgctgctgacacaatacttcctcttcaggagctatcctatgactacggttatcgcttggacagtgttgttgggcctgatggtaaaattgtgaagctgccatgccactgtggtgctccagattgccggaagcgcctctactagacctgcagtgtgtttccattttgattttgcaggaaacaacctatattgtaggaaagcattcatgttatttatgtagttggcatgctctgatatatagcgaaagaggagcaacttaatctccttttagagcattcttattttgtgataattggaggacatgctggtcatggtagcatattttgcaggaaatcaattaactgatatgtctgggcatggaacacttaaactatgtactgtcgtgtttttttaatcacattaattgaatcaagagcatgtcacagcggggccatcattgacaacctctgaggtatacttgaacaaatacaacaaactgagttgttgtattgatagtgcccaccgtcttcttatgatttggatgggtggacttcgcgtgaaaataatatgacacatctcatatttgctatcaattgtcaaaacatttctagttctagtcatggttggtatggcgctaaggtgacctacgagtgatctaggtcctttntatattttaaatgtctaagagtttgtttagaagcactcagttttttaaaaactggtttatg

SEQ ID NO: 112207 - DNA, 2935 bp, Zea mays
  Clone ID: MRT4577_3381C.1
aattcggcacgaggctccctccgagtccagggggcaggggcaccattaccgagtagtttaattagtgctagttgtattaccattgttagtgacttaattaccctcacgcgaagcaccttacctctgctagtcctcctacgtctcttctcttcgcttaatcttggtcggtgatttgattcttcacttcttgcgcgcattgcagagggtgctcggtctgcagctatcttaggttaaccagtcgtgtgtggtctatcggtttcgatatagtattactactgctctgttataatcagcggggaggaggaagatgacggtgacgccacggatcacggtgagcgacgggcggctgacggtgcgcggccgtacggtgctcaccggcgtgccggacaacgtgtcggcggcgcacgcggccggggcggggctcgtcgacggggccttcgtcggcgcccacgccggcgaggccaagagccaccacgtcttcaccttcggcacgatccgggactgccggttcctgtgcctgttccggttcaagctgtggtggatgacgcagcggatgggcgtctccggccgcgacgtccctctggagacccagttcatgctcgtcgaggtccctgccagtgacggcggcggcgacgacgcccccgcgtacgtggtgatgcttccgctgctggaggggcagtttcgggcggcgctgcaggggaacgaccgcgacgagctgcagatctgcatcgagagcggggacaaggcggtgcagacggaccaggccgcgcacatggtgtacctccacgccggcgacaaccccttcgacaccgtcaccgccgccgtcaaggcggtggagaagcacctgcagacgttccaccaccgcgacaagaagaagctgccgtcgttcctcgactggttcggctggtgcacctgggacgccttctacaccgacgtcaccgccgacggcgtcaaacacggccttcagagcctgtccaagggcggcgcgccgccgcggttcctcatcatcgacgacggctggcagcagatcgcctccgagaacaagcccgaccccaacgtcgccgtccaggagggcgcgcaattcgccagccggctgaccgggatcaaggagaacaccaagttccagaccaagcccgacggcgacggcgacggcggcggcgagcaggcgccgggcgggctgaagcgactggtggccgagaccaaggacgcgcacggcgtgaagcaggtgtacgtgtggcacgccatggccgggtactggggcggcgtgacgccgacggcggggacggcgatggagcgctacgagccggcgctggcgtaccccgtgcagtccccgggcgtgacgggcaaccagccggacatcgtcatggactcgctgtccgtcctggggctgggcctggtgcacccgcgccgggtgcgggacttctacggcgagctccacgcgtacctcgcctcctgcggcgtcgacggcgtcaaggtggacgtgcagaacatcatcgagacgctgggcgccggccacggcggccgcgtcgccatcacccgcgcctaccaccgcgcgctcgaggcctccgtggcgcgcagcttcccggacaacggctgcatctcctgcatgtgccacaactccgacatgctctacagcgccaggcagaccgccgtcgtgcgcgcctccgacgacttctacccgcgcgacccggcatcgcacaccgtccacgtcgcctccgtcgcgtacaacaccgtcttcctcggcgagttcatgcagcccgattgggacatgttccatagcttgcatccggcggcggagtaccacggcgcggcgagggccatcggtggctgcccgatatacgtcagcgacaagccggggaaccacaacttcgagctgctcaggaagctcgtgctccccgacggctccgtgctacgcgcgcagcttcccggccgccccacacgcgactgcctcttctccgacccggcgcgcgacggcgcgagtttgctcaagatttggaacctgaacaagtgcggtggcgtggtgggtgtgttcaactgccagggagccgggtggtgccgcgtgaccaagcggacgcgcgtgcacgacgcgtcgccgggcacgctgaccggcaccgtgcgtgccgacgacgtcgacgccatagcgggcgtcgctagtgacggcggcgggtgggacggcgagaccgtggtgtatgcgcaccgcacgcgggagctagtgcgacttccgcggggcgtcgcgctgcccgtgacgctaggcccgctccagtatgaggtgttccatgtgtgcccgctccgcgccgtcgtgccgggggtctcgttcgcgcccgtcgggctgctcgacatgttcaacgccgggggcgccgttgaggagtgcgacgtgatcagcgatgacggcggcaaggccatggctctcagggttcgcgggtgcggtcggttcggcgcttactgctcgcgggagccggcgaggtgcctattggactcggcggaaatggagttcagctacgatgccgacaccggcctcgtgtccgtcgacctgcccgcgccggagcaggagctgtaccggtggacgctggagattatgatctaggccgtgacgctgtgcgccgacaccaacgcttgcctttgcgtctgagccatactgagccggacgacactgtcatttgctatgtgccccaaaaaaaaatgtattgtgggggtgttgtataattggtatggaaaaagaaagcttttgttatgtctgtatctgcataccccgggggctttgaatgttttataaaaccttaaaaaaaaaaaaggagggggttccccaatgttatataaaaccttataaaaaaggagggggctcttttttttcggattaaaaaaaaaaaaaaaaaaaaaaaaaaaaaaaaaaaaaaaaaaaaaaaaaaaaaaaaaaaaaaactcgagagggggcccg

SEQ ID NO: 112208 - DNA, 285 bp, Zea mays
  Clone ID: MRT4577_33821C.1
cgaaggggatgcagttgaactgtctgttgagtccgtgctgtatgtgggtgccatcttggaacaaggggacacctcccggtttaacctggtgttgaggaactgctatgccacccccactgaagacaaggctgaccttgtgaagtatttatcatcagaaacagctgctcaaatcaacgtgattccaccatccacgtggaggagaatgggcagtcctcggaaagccggttctcagttcagatgttcatgtttgctggacattatgacctagttttcctgcattgtgag

SEQ ID NO: 112209 - DNA, 255 bp, Zea mays
  unsure (1)..(255): unsure at all n locations
  Clone ID: MRT4577_33822C.1
cagnaanggagggcatccctcctgaccagcagcggcttatcttcgccggcaagcagcntgangacggacgcncacttgctgacnacaacatccannaggantcaaccctccacttggngctgcgccttangggnngcatgcagatctttgtcaagaccttggactggcaagncaatcacccttgaggtggagtcctcagacancattggacaatgtcaangccnaagattcaggancangaangcntcccnccgg

SEQ ID NO: 112210 - DNA, 207 bp, Zea mays
  Clone ID: MRT4577_33823C.1
gaaaagacacagcgcattcaaaaggaactgtcggctgagataggcgcgcctgggaaggagccctcctttgcctagtcacacctttttaaatttaccctacttatgcgactacgcaggctgtaggatcttgtttattgtggtgtttagtctgttttattaactttattagatttatttttgtttttattttggtatttttttatatat

SEQ ID NO: 112211 - DNA, 849 bp, Zea mays
  Clone ID: MRT4577_33824C.1
gatatggacgataagtatatgctatagttaatgatgcagtataaaccctgtgaacatcaagtaccaagtcagcaaccaagcccatttcctgagaactgtgaactaatcactaatcagtactatgcgtatgcagactgctaccaaacaaactctaaaatcagaaagagatcatcttactgttaggagcgtgggctcaagagaaacaaactcccaccacctaggcatctaccgtcttgagactagtgttttccttccagacttctctgtgaaacttgttagcagcaacctctgtctgaatgtatggtatgcctccaagctagtcccagcccacctctggcaaaaacgctcatctgtgggcacaaaggagctcagaggaaatgggccctttggagctttcttcaaggaaaccagaaaacgatggcggggacggattctttgatcaagagacaaactcaggtacataggatatttcgttaaggattggacctcattcttgaggtcattgaccaagtaaagatactttggcttgagattgtcctccaatgacaaagataacacctgagtaagacttgtcaatactttgagaatgtcagagtttctcataccaatgcttctcaggaaatttagtcgaggtaagattccatcttcaatgctgtagtgaagcagctgagggtgttttgtgaccatcttaacaatgctatgtttgggagcatccagttcttttgacaggaaaagcgatcgagatttccatgcactatcaattttctgcaccagaatctgtgggctagctgcactctttccccacatcactctcctcaatacctacttcctcaatcagcggacgcgtgg

SEQ ID NO: 112212 - DNA, 356 bp, Zea mays
  Clone ID: MRT4577_33825C.1
gggacccaaaaaaaaaaagctaatcggcccttgacgggcggggctttaaatattcacccacattcaatttatctacgcctctcaaaaaaaaaggcccttggggctcacaacccaggcagcccaacgaaacctggggggaaacacattggagggcccccaaaacgggaagagggcccccccaaatttttccccccaccccgggaaaaaccccgggcaaaatagggggacagcaacaaatttttccccaaaccccttagaaaagggcgttcggctggctttttttttttacaaaaccggggggggaccccaccccggtttttcgaaaacccccggaccccttcattaaaacggggtgg

SEQ ID NO: 112213 - DNA, 122 bp, Zea mays
  Clone ID: MRT4577_33826C.1
gggggggacaaacgtcgggacatctgcgtatggtgtttcatacgagcaagtaatgatgttttctgtacatactgttgctttcatgcctacagtggtctgtacaagcccacaaatcggaaaac

SEQ ID NO: 112214 - DNA, 2265 bp, Zea mays
  Clone ID: MRT4577_33827C.1
ttcgtccatgccagagaggaaatcaaggctatgaagaggcagcgtgaggccgctcttgatgatgcagtggagcctgttaagatccctaaagctacatggatggctgatggcactcactggcctggtacttggattcaaccttctgctgagcatacccgtggtgatcatgctggaattattcaggtgatgctgaaacctcccagtgacgatcccttgtacggcagcaccggtgatgaaggcagacctcttgatttcaccgaggtcgacatccgtttgccaatgctggtgtatgtgtcccgagagaagcggcctggttatgatcacaacaagaaggctggagcgatgaatgctctggtccgttcatctgctgtcatgtcaaatggccccttcatcctcaacctcgactgtgatcactatgtctacaactcgcaagctttccgcgaagggatgtgcttcatgatggaccgtggtggcgaccgcattggttatgtccagttcccgcagcggtttgagggcatcgatccatcagatcgctatgccaaccacaacaccgtcttcttcgacgtcaacatgcgcgcgctggatggtctcatgggaccagtctatgttggcactggctgccttttccgccgtgttgccctatatggatttgaccctccgcgctccaaggagcacggtggctgctgcagctgttgcttcccccagagacgcaagatcaaagcttcagccgctgcaccggaggagacccgggctctaaggatggcagacttcgacgaggatgaaatgaacatgtcgtcgttccccaagaagtttggtaactcgagcttcctcatcgactccattccgattgctgagttccaagggcgcccgcttgctgatcaccctggtgtcaagaacggccgccctcccggtgctctcactgtcccccgtgaccttctggatgcatccacagtcgctgaggccgtcagtgtcatctcatgctggtacgaagacaagaccgagtggggccaccgtgttggttggatctatggctcggtgacggaggatgtggtcactgggtaccggatgcacaaccggggttggaagtcggtgtactgtgtcaccaagcgtgacgccttccgcggcaccgcgcccatcaacctgactgaccgtctccaccaggtgctccggtgggctactggatcagtggagatcttcttctcccgcaacaacgcgctgctggcgagccgcagaatgaagttcttgcagaggatcgcgtacctgaacgtgggtatctacccgttcacgtccatcttcctgatcgtctactgcttcctgccggcgctgtcgctgttctcggggcagttcatcgtgaagacgctgaacgtgacgttcctgacgtacctgctggtgatcacgctgacgctgtgcctgctggcggtgctggagatcaagtggtcggggatcagtctggaggagtggtggcggaacgagcagttctggctgatcggcggcacgagcgcgcacctggcggccgtgctgcagggcctgctgaaggtggtggcgggcatcgagatctccttcacgctgacgtccaagtcgggcggcgacgacgtggacgacgagttcgcggacctgtacatcgtcaagtggacgtcgctgatgatcccgcccatcgtgatcatgatggtgaacctgatcggcatcgcggtcgggttcagccgcaccatctacagcgagatcccgcagtggagcaagctgctgggcggcgtcttcttcagcttctgggtgctggcgcacctgtacccgttcgccaagggcctgatggggcggaggggccgcacgccgaccatcgtcttcgtctgggcgggcctcctctccatcaccatctcgctgctgtgggtggccatcaacccgccgtcccagaaccagcagattggtgggtcgttcacattcccgtgaaagctctctgggccaatggcggattcatgcatgcttcgtcgcagtgggatccttgcgttgctctgcatcagttcctggttgcagcggttcactatctgaggacgaagctgctggggggaatgtgggatcctgactgtcgaactggctacttttttgttgtcgaagctgataatactcttatgatgagctatagtagtagttcttttgttcttttgtttttgctatatataaaatacatgttctggtcccataatttggttatgttggacaattaaacgtggagccccaaatttccagtctaaaaaaaaaaaaaaaaaagcggcc

SEQ ID NO: 112215 - DNA, 1748 bp, Zea mays
  Clone ID: MRT4577_33828C.1
tgcttggggtgcaggtaccggactgccagtgtcggaccgacgcatgcgtccaggcgtccgcgaactcgcttctgagagtttccagatgatgatgagtacgacttggagcaagctgaatctcgtgaacataagagatggatggagaggcagaatgcaaagctacaagagaaggccaaaaaggtggaatatgcgcgagtgcgcacacttgtagacaatgcttataagaaagacccaaggatccagaggaggaaagaggaggagaaagctgagaaacagagaagaagggaggcgaagtatttggcaaagaaattacaagaagaggaagcagcaaaagctgttgaagaggaaaggataaggaaagaagaagagtctaagaaagctgcagaagctgctctacatcagaagaagctaaaggagaaagagaagaagctgctccgcaaagagaaaactcggttgcgcactcttgcagcacctgtcattgcagatagccactttggtctgtcagaggcaaatgttgaatcggcatgtgcttcacttgatatggaacagctgaagaagctctgtgatggaatggatggtaaggatgcagctggaaaggccaggttgctgagcaatgtacttcgcaatgaaagttcctcaaaggaagcaaagaaaattgaagggaatggtgtggagccttctgccccaaaatccaactctacaggaggtagagcgacagaaggcagtaacagcatattgaacagctatgagaaaaaagagagaccatggggaaaggaagagattgagatgcttaggaaagcaattcaaaagtatcctaagggaacatcgaggagatgggaggttgtttctgaatttattgggactagcagatcggttgaggaaattctcaaggccaccaagactgttcttctgcagaagccagactcatcgaaagctttcgactctttccttgagaagcggaaaccgacacaatcaattgcttcgcctctttcgacccgagatgaaattagttcaactgagggagctgggactgcatcgtcaaaggctgcagcacaatctgcgaatagccagacagccaatgagaaagctgctgctgatcctgtcacggatggaggaccatccgtgtcagatccagatgcctggacagatgcgcaggtcctggctctagtccaagctttgaaggcttttcccaaggatgcaagccaaagatgggagcgtgtggctgctgctgttccatgtaaaaccgtagtccagtgcaagaaaaaaagtagcggcaatgagagagaatttccggagcaagaaaagtggggagtaggctgaggcattgcctcactggaagtatattttgcaagaaagagtctggacggcaatatttatagaatggattcagcatcttagctagagaggtattgcttggcgaacctttcatctcatgccaccagtggtgaggataattttgttatggagctgtgacagctcatttattgtggctggccaccagggttgttttactttgagcagccgtagcaggatgccatcgaagctcatctattgttgatgggctgatggttggcaattttgccgcagtggttcgtgtgggattttgtttctgcaggctcctggggttgtatatgcgctgctgtaagccaatgaatgaattgtgagctattccaacattcttagagtcaattcatctcaggtttgatcaaatttatataataaaacactaatatttatgataaaaaata

SEQ ID NO: 112216 - DNA, 378 bp, Zea mays
  Clone ID: MRT4577_33829C.1
aaatgatcttatcatagtgactataagcacagatgtacttgacacaaactggcctgagtcgcccatcacatatagggaagcgtggcccacgatgccgtaaggtttgcagggggtaaagtctgtccttggcgccaaacaagttaaccggaggaacaccaactacatccaatattactaaagatagcctggttccttttaagctacatattgttatccttgagctagactgctggtcagaacttccctaccatgtaaccttcacaaacctttgctgattgatcaccaccgacatggtggagactacagctatccaacgctgcagtgtcaagtcctggtgatacccgatccggactggtaacaacttggcgcatgtcatgc

SEQ ID NO: 112217 - DNA, 1844 bp, Zea mays
  Clone ID: MRT4577_3382C.1
gaggctcggccggaaaaaaaaaaaaaaaaaaaaaaaaaaaaaaaaaaaaaaaaaaaaaaaaaaaaaaaaaaaaaaaaaaaaaaaaaaaaaaaagttgcccgcagcttgtcttgggatctgaaccatttttcttctacggcttcaactcactcaaaccattgttggctaacatatataatgaagttggatatagtggattatcaagtgaatgtttttctcaacaactgactgggaaacatggtggtgatatcatagctccacaatcccatgatcaagatcctaataagatgcttccagttggggattacttttcccagaacagttcaatggagttcttcagtggctatgaggacatgcattttgatggtgaccttttgcctcctggttctaatgataaagtatcttctggaattttgggtactgaaaaagattcttctgtgcctgtgctggatgttcctggtcgaaataaagaagaatcccccgctgggacttctggatttatagaacagaaggacaccagcaatgttacgaatatgcttcctgatcttaatttgtatcatttggcttctacggcttcaactcactcaagccattctgttagtattgagtctcttgaggattctgttgctgatgccagaagcaataagaatgatctgttaccttctttggagttggttacaaaaatgatagaggatgttgagcttcttgaagaaaaggctaaagtagccaaacgtgaatcatctgttgctgggacaggcattctaaccaaagttgaggagctcagagaaatgttaactcatgcgaaggaagcaaatgatatgcatgctggcgaggtttttggcgagaaagctattttaaccacagaggcacgtgagcttcaatctcgacttcagaggctttcagatgagaggaataaatatctggtgataattgaagagatacgacaaactcttgatcaaagattggttgctgcacagcaagaaattgcagcagccgagaaagaaaagcttgaaaaggaggttgctgctcagacactactcaatgaacaggaaaatatgatgaattctattgttgaagaatcgagaaaactgcagaaagaagctgaggagaacctgaagttgaaggaattcctggttgagcggagccaaattgttgatatgctacaaggcgagatgactgggatctgtgaggatgtttcgttgctcaagcgagtggtggatgagcgcctatcattgagcaagttgcagccctcagctatgtcaagcctctcttcttcactgcattcttctcatcacaagagctggacttcctctgataggaccaccgaagccaatgggtctctagataagcacacccttgctgaacctgcaagcccagcgcgcaaagatctgaatggcgacgagtgcactgtgcaggtgtcagatggcaacgacactggtaaaggcgttttgaagcgtgtggattccaaggacggcgatggatgggagctttgctgaaggtgttcaggaatagcgcggttgcgagtggatgctgaagcatagaaattactataaactagtaataatggtgaataaacgtttactagtgcgttgctaatctagtcgtaatgtgggaactgtgtcgtggaactgactcactagctcaccgcagtagtatgtgggatgggtccaactgcagcttgacgtggtatatataaatgtgaagaattcagctgccaaaaaaaaaaaaaaaaaaaaaaaaaaaaaaaaaaaaaaaaaaaaaaaaaaaaaaaaaaaaaaaaaaaaaaaaaaaaaaaaaaaaaaaaaaaaaaaaaagggggcgggccgttttaaaaggatccaagt

SEQ ID NO: 112218 - DNA, 407 bp, Zea mays
  Clone ID: MRT4577_33830C.1
tttcttttactcatgggcgtccaggataccagggctgagtatctcctacctaacgaggggggcacaattaaccctttcatggaggtcaagtataacggccagaaataccgcactgtcatcagggacagggacctcaaccctgtctggaactagcagttctacttaaacgtgtttgacccgacccgactcccgaagctgcacctttaggcctacgcgtaccacgcagaccgttccgacaactccaagtcctgcctggacccggttctgatatatggcacgtacttctacagccagcctgatccctaggccctgcactacctcttggagaagcgcacgatcttgtctcgcgcgcgcggacagctttggctaacagtcttccttacggacgatccatcactgagcgtgtt

SEQ ID NO: 112219 - DNA, 358 bp, Zea mays
  Clone ID: MRT4577_33831C.1
cctgggtcgggccacgcgtccggctggatcaaccaatgggagttcatttgtttttatgtccaaaggaactccttaggcggagttatcatacaaggtgagcgaatctttcccttacaaggggatcaataaaaagtggaaagaatggttccatgtaacatctattgccactgctgtaaacccctgacgcgtaattatgtcaaggaactcatgggtttatactcatgttgtagagtaggacttcctgcaccctatcgaaggcatccatctacaattggagactgggtacatgataacttccacagccgccaccaatgaccaacctgctttcatcttgagcatgcctaaccgcaagccgatt

SEQ ID NO: 112220 - DNA, 645 bp, Zea mays
  Clone ID: MRT4577_33832C.1
catcggcatccgcaaccagctgctaaagcacgcggcgtccgcgtacctacagtcggctgtggtcgtggcggccggccgcgaccagggctgctgcctcacccgcctctggcgccgggcacagctccgtgccggcgggcggcgcggtcggggcggccgtggccgcgtgctcatgcgcgcctgctcatggcagggctgtgtcgacgaccccgctgcgttcctcgctcgctccgctcgacgcctcgcctcgttcgtcgccgaccgcgtcagcgccatttgggcatggtagctttggcactgccatccgtggaactccttgccgagttcggaactcgaaaagcactagctatttatatgtatggtcctcatcgatccaacaatggttttgcagttttctctcgcatcgctattgcgtatgcgcaacctaaaacaaccttgataggtgtaaaaatggcagtatgccctttcgccatgaaatgcgaccagaagggatattttatgtgctgttgttggagcgaaccatggcaatcgacggttcgtctccgaatggcatcatttatattcttttgtgaccaatggggtagcaatagcaatatagcatttgatttggatatggttgtatctgaattaatccatactgcaagaact

SEQ ID NO: 112221 - DNA, 684 bp, Zea mays
  Clone ID: MRT4577_33833C.1
gccggccggctccggttccattctggatcgcattcaacactcccctcttcaggtgcgatcctacttggatcctgtctctatgtgaatccctactgaccagatctgcggagcagcggcgcagtgagtgagatccgctccagttcttaaggaccccagttatgacactttatgcttccatgtcgatcgatgtgggccttcgttatctgcataagatgtctactcgcttcacttctcatatacctgactacagcaattctcttattctccccactatggtgaacatgagctgattctccgcgccgagggccgatattcgatcgacgacctagtgatgtccgcctgttgtgcgcacacttctcattcctcgatgacctgatccctgcaacctctgagtcttcatgccagggacccgagttctccaccatttgagtcacgaagtcatatacgatcgctgatctccactccacaacatcattactgccgcaaccctatttatgacccattaaatcgccacgcaaatactaccctttcaacatctgcgcaaccttcatgcagttcctgtactccacccacttctcaacattgacaacagctgattggcaatgcaatgtttgtagatggtaaggtctgaaaaatcgcggtatatgtgtgtaagatcgtgccgctgttcagacatgtaccacg

SEQ ID NO: 112222 - DNA, 499 bp, Zea mays
  Clone ID: MRT4577_33834C.1
ccggccggaactttgaacatctcatcccgcactactaacgccagtgccggaaccctactgcacaacaaaaatgtgtgatcacgagcgagatcgaagtcgagaactccgccctctacgaggtgcttcccaaggatgttgacgaggaggtatgcaacgacaagctcttcaccccgggaactaccatgctgcaggcccgccacatctccgcatgactgactatatcttcgcctcgtcaaaccccaaacgtacgcacaccgcacaccgctgccgcagatatgctcgcccctgcgattccgcgaggcctcactggcctatcattgtcgcgtactttgaccaactcgtctgatgcaccacggacgtctctgctcaaagaatgtcatgactgtgcgaatagtcgccctcgccttcgagatgcatccaactgtatgaccgtatcacaaccctcgtccagctcgctgacgacgccatcgtcaactgcgctgcccacgaagactctacc

SEQ ID NO: 112223 - DNA, 517 bp, Zea mays
  Clone ID: MRT4577_33835C.1
tcgagccggccgggccgtgcttactgagaacgcagagaaggcgcctttttacgagcctatgtccacgtcctaacgcctcctccctttcgctctctccgccggtttccttgggtgcgccgcacccgactctcatttttctccctcgacggtgctcgagccccaccggttcaacgaagccagcgctctatctgtccctcggccgcgccaagagaaattcctcctggacaccgcagaccgaggacggagagaagaaaacacaaaatttgagtgtccactcgtcgacgacgccttcatttcttcgtgagaaagctgctgtattgtgagggaagatagaggcacatccgccacttttttttatctccgcccagcgcggagggctcggatacgcgtatgtgtcgccgcccccccagaatagagaaccaaacgcccctctgcggtggtcgtggccccgcctacacaaccaaagcagctggtgcatcagtgcgtcagccgaggacgcggaccttgctggctggca

SEQ ID NO: 112224 - DNA, 424 bp, Zea mays
  Clone ID: MRT4577_33836C.1
acatacaaccatgggtttcacgagttttatttttaaaaaaataagaatccactgcagcaaagaatattcccccaaaacgtatagtagaaactccctgtaactattctatgcaaagatgtcagcatcacttaaaaaaactggtcataatatttcagagaaaaacctgctgaataacctagaaatcccacgaaggcacaagcaaaatacactaccctagggctccgtataattcacttgcaccgggagtgccactgcatgattgtaacaattcttgctcaaggggagtcacaacattctcaatgtcattgaggacaaagaccgtataagcaagtactggccaatgaacatcagaaccttagagtccgcgaggtgacaccataaaccttggcagccagggatgcaccctgacgagctcttacagcta

SEQ ID NO: 112225 - DNA, 440 bp, Zea mays
  Clone ID: MRT4577_33837C.1
aaaccaaaaaaattaaggcctggggggcaattaaaccgttccaaaccaacttatgggtaattaaacctagaagggggggggacaggaaagcctaaaaaaacgggggccagaagggacccccagataagggtaaggcggggggggcccacacccaaaaacccctgggacgctttaaaaaaagccagctaaagccaggggaagggctcggaaaaaaaccttgggggaaacactttttttccgattaaaggggaaaaaaaggaggggtccgtctcaaaaaccaaggaagttacttgggggcaaaattcttaagggggcaaaattggtcctcccccatgggagaagggacaggcaaaaaaagaaccttcccgttttaaaacccttctttaattggggccaaaaaagtttaaacagggggggggcaaaaaacatccttagggggg

SEQ ID NO: 112226 - DNA, 516 bp, Zea mays
  Clone ID: MRT4577_33838C.1
accgagcctattatgaccacccactgtaaaggggaccctgtacatcaccaaggcacaactacgcttggtcgcttgaacgtgcacaacatcctccgagtggtgcaggaggccttgttcctcgtatcctagtgcacccccgggcgccggggctggctgacatccctaaggcctacaccaacaagatggagggtgccgtgtctgcgacacgcccataaatctgcctggctacatatccgcgccttcccaagcctgccgggactgaatttgttgagcaagtgctgcctgttgcagtgtgaataacagagccctgttctttatgtggctgggggcttcgcatcatgaagtgaggaggctcacctgtttgtggagctgtctggaatcccatccacaactactatgatgggccttggcaactcacacagcgacaacccactgatactgtgcatgctacaaatgcatggcacaaagtctgcgaactatgcagcgcttatggtcgagatggggcttgcgttctgg

SEQ ID NO: 112227 - DNA, 527 bp, Zea mays
  Clone ID: MRT4577_33839C.1
cggacgcgtgggcttcaagagaaagaagacatgaatctaggtgcccttcaatctgaagacgcttctaaagagattggggacaagaaaggtggtactatcgaaggggatcatgtcaaaggaatcagaaggagcagcaggctggaatctaacgacgagatgaagattgatgataaggctacaacgagagcaatggctaaggatgcgtttattaacaaaggtatatcttctaaccctttttctgttctcaatactgataattatgttcttatggatgttgctttaaagttgggagtagaattaggttcctcttttaatgaagctgtggaaaatttagaattgataaaatctctagaactatccaggaaaaatcttgcagttcaatctgtcaagagttcttttgatccaaatcatatggttattcctgactctgatgtggataatattgtccataatgagcaagaggacaacacaaagactgatatagagaatgtgatggttttaagaaaagggcataaaatttgtcacag

SEQ ID NO: 112228 - DNA, 322 bp, Zea mays
  Clone ID: MRT4577_3383C.1
aaaaaaagggggtgcggggccccaatatttacattagatgcttaaaaacccagcaattttcaaaccggggtacatatccaagggggttttgggaggccccgcccattttgatttcatttttaccaaaacaactccaaatttttcgggggtttttatcttttaaactttcccgggccccgggaatggggaatttttgccatccaacttttgcacaatcctgtcttaaaacttgcccttaaagaaacccccccaccccttgttttttaaaaactttttggtccctcgggccctaatagcgaggggcgaccccaaggcgggcaag

SEQ ID NO: 112229 - DNA, 372 bp, Zea mays
  Clone ID: MRT4577_33840C.1
attccctggacaaactgtcggtgatggccggagcctgaaacgtgacaaaacatttttgtccttccctgccagaaaggcctaccggcttggtaacaatacaatctcatatacgccggaactgcactgcactgcactgaactgcactgcacgagagactgcttgttggctatcgactgcgctccctggctctccacccaaaggaaaacccaacaagaacccgaggtgcctcccaagtgccaacccctgtatgtacagtcgagtcgaagcttccgatccgtcccgtgccatcccggtctgttagctgcgcaaaacaacggcgggctagtgcaccagcgacccggtggcctgggcgacaccgtgcgcctcccggtt

SEQ ID NO: 112230 - DNA, 357 bp, Zea mays
  Clone ID: MRT4577_33841C.1
ttcatttatccgggcggattctgctttacaggacctacctggttcaaagagccttgaacggttaaatgcacagaaaggtgtattcaattctagtgacgatgccctttttaagggcttacgttcttgtcgtatgacttgagaaataggtgacagtccgttggatgcttatatggtcggtccaaagcccctatgtgccttactgaagagcagaacagagccagttcctgaaatgcaacatgattaaggcggcatgtacacaggaagcagataactacccacgacgagctgtggaataaataccacccctagcaaatgtctcggttggggacaacatgcaggggattgtatacgatgagg

SEQ ID NO: 112231 - DNA, 675 bp, Zea mays
  unsure (1)..(675): unsure at all n locations
  Clone ID: MRT4577_33842C.1
aattcggcacgagggcggggtgggaaatatcccggacgcacgcaggcaataggccgctcatggattagggcaacagccacgaagggcacgccgcatgcgcgcggcaactgtggcatggagaccggattcctcacacctgctggcgtcgatctcctccggaggctgcttctcaccgattatccctgcaccagttcgagttggagaaaacgaacttccaccgtcttgggaccctatatcctctgctttagggtctgttcctaagtaaggacttaaggaacaagaggaatgttgagggcaaagcttcctagaaagaaataatgaaacttagatccgaagtgtctaggcttcagtttgattttgaagagaaggaaaatctttcaagatcctggaaaatgattttattgacaatcggacncgaagtccagaaaatgcgtgaagagaagaataagctctatgcttacaacgtagaaaaggactggcgaaattgtgtcgcttgaagctgagctggagtgagtgaaagaagagcacgaagctaaaactacaaagctgatgcaagcatcaanccgaagtgggctgtcaaccttagcagcgctcaggtggaagatcgatgacctaaaggatgaaataaatcatttgagaagacttaatgaaaactaccgaatctttctagccact

SEQ ID NO: 112232 - DNA, 307 bp, Zea mays
  Clone ID: MRT4577_33843C.1
acgcgtgccagtcttcgtctcaagctccgtcgttatttgtaatctgaagcttacatgaagatttccgtggatcatggccgggttggcatgcctcttgactgctctgggtggctttggggatcatccttgcgtagcgcgatctccagacgcgtcgattcgtcggtcgtcctacgacttggcgcggggattcttaggacgatcgtgggtagcagatttgtgacccccatctggcactatgagctaactctctgcgttacagatgccagcgtatcgctcgagctgggtgtgtccgacatcagacacgttc

SEQ ID NO: 112233 - DNA, 588 bp, Zea mays
  Clone ID: MRT4577_33844C.1
tttttttttttttttatgaagcaaactgaataaaccgtctagccaagcatattcgtacatagcgtgcctatagacactatacgcgtcgtcttgaacatatctatggtgatcttctcttttacccatacaactataatgctcgtctttcaaatacaatgccattccaaactcaaatcaataaagattcccaggacgccaggttccgtgtcgtgctctgctcgccgatcggtagtattgttacagagcgatcgcgcctcgacggctttctcgagtatggaggaatccttggaagccacaaaagacgaagaaagcgacgtagacgaggacagcaacgaagatggtgtctgaaactgccttgccatcttcgggatcatccacgccacccgtgaattcttcatggttgcttcggtagagacctgcgagggcgctgaggatgacaatggcgaaaacggagagaacggtgcatgaccacgcgttaaaggcgctgacgacgggcttcattatgggcgtatgtgggaagagttcgagtatggttgaccaaccgatgtatcacgatgtgtgtggtggtaatggattattacttgcgac

SEQ ID NO: 112234 - DNA, 266 bp, Zea mays
  Clone ID: MRT4577_33845C.1
cgtgctctcgaccaaatttccccgccgcgtcgcttggtgggagatcagtgtgtgagagagccaccgccgccgtcccttgcatccaccaccgttcggagcatgcggcttagttggggacgttctgccaggcgaatggatcgggcaaggatgagaatcagtgcgtatggggcatcgagagttcctcgcccaacgtcgttcgataccgtggaattgctcctccccgagtgatgggctcaccgtcgccaaataaatttgtggtcgggccc

SEQ ID NO: 112235 - DNA, 1116 bp, Zea mays
  Clone ID: MRT4577_33846C.1
gtaccctgccaggcttgtccggaagaaattgtctgggttgatgagatcaatggggctgcttaatgcaacaagtgatattgaagcttgtaaaattattggcatggattgtgagtggagacctaatttcgagaaaaatactaaatctagtaaggtctcaatcatacaaattgcatcagataagatagccttcatttttgatctgattaaactgtatgaagatgacccaaaagcattggacagttgcttgaggcgtgttatgtgttcatctaagatactaaagctgggctatgacattcagtgtgatcttcatcaactaacgcgatcatacggagaattggaatgttttcagtcctatgaaatggtacttgatatgcagaagcttttcaaaggcgttactggtggcctctctggattgtcaaaggaaatattaggagctggtttgaacaagacccggcgaaatagcaactgggagcaacggccactaacccaaaatcagaaagagtacgctgctcttgatgccgtggtccttgtgcatatattccatgaacacatgcggaggcaagcacagttcggtgtctctgagggaagcagagtcgagtggaggtctcacgttgtttcccgagtgagttgcacgcgtacgcccttgcgtttctagtggtggggttggacagcttggagtgaaattacttctagcatctgcatgtgccgtcttctaacatctatgatgacagttctctggcatggcatcataggctcacagttcatccccagaagttagtgctgcgacttcgttgctcttgccttgtgtatatacagtatattgttacctccaccggagtttttcctttcctgctgtatcgcattcagtgctgagtgcattattagatttggaacccgttttctgttatgaattagtgataatggaagtcaggaagtgtcgcgttatgaattagtgcagggggcaagaaagccagaggattatttccgtattatgtatgggacgtgaacttagcttaatagatagattggggttggagatgtagatgtagatgaatatcctaacaacttatttgggccaagtcctttctaactaaaaaaaaaaaaaaaaaaaaaaaa

SEQ ID NO: 112236 - DNA, 1996 bp, Zea mays
  Clone ID: MRT4577_33847C.1
gtccggagcacgcccgcccggatataaatttatatcgcacacatcccccgttcgccaatctcgcggcggccctgcaaagctgcgatcaggaggtgcagaacagcggtgaagggtggaaaccgagaacactaggcagaggcactagccgagccgcgccgcgccaccacgaccacgagtcgaccggcgagtggttggcgcaagttgtcaggggcgttgccggagccgtgcggcggccggcggccgggagcggggccgatggggcgctacgagctcgtccgcagcgacgacgcgcctgccgtcgccgcggatctggaggccggcaccgccgcgccgtgcgacggctaccccaagcgccgcgtgttcacgccctctccgtctccgtctccggcgccggcgccgacccggtaccggcagcgcctcgtctcgctcgacgtgttccgcgggatcaccgtcctgctgatgatcatcgtggatgacgccggggcattcattccggcgatgaaccactccccctgggatggcgtaacggtggccgactttgtcatgcctttcttcctcttcatcgtcggagtcgccctggcgctcgcgtacaagagagtccctgacaagttggacgcctcgagaaaggcattgctccgtgcgctgaagctgttttgtcttggtcttgttctacaaggtggattctttcatggtgttcgcagtctaagtttcggggttgaccttcaagaaatacggctgatgggtgtactgcagagaattgcaatagcttatctgctgactgccctctgtgagatttggatcagaggagatgaagatgtagactatggatacgatttgctcaagcgataccgctaccaactgttcgtaggcgcagtcgtggcgatcacatacatgtccctgttgtacggtacctatgttcctgactgggagtaccagacatcagctcctggctccacagagaagcatttctttgtgaaatgtggagtaagaggtgacaccagcccaggctgcaatgcggttggcatgatcgatcgtaaaatcctgggcatccagcatctctacggccgacctgtttatgcacgatccaagcaatgcagcatcgactcgccacaaaatgggccccttcctcctgatgctccatcttggtgccaggccccttttgaccctgaagggcttcttagttccgtgatggccatcgtcacatgcttgattgggctccaatacggacacgtcatagtgcattttcagaaacacagggagaggatgatgaactggctaatcccttccttcagcatgctggtcctagccttcgccatggacttctttggactacacatgaacaagccactgtacaccctgagctacaccttaggcaccgccggcgccgcggggctcctcttctccggaatctacacgctggtcgacatctacgggtaccggcggccgaccgtcgccatggaatggatggggatgcacgcgctgatgatatacgtcctgatcgcttgcaacgtcctgcccatattcatccacggcttctactggaaggagcccaagaacaacctgctgaagttcatcgggattggagcgtgaggcgatggactgacgacggtacacgagtacggatattgtttaggagtctatttggacagagatagagaagcgcgtgcgttcagcaggccaagttttgctacacggccagtgctgcagctgcagcgcatcattgttgctgcacagagcgcctttctctgtgagctcttgtatatatgataaaaaagagtgttgcatataatgacgacacgatttgaaagaaaaaatatatacataatacagtagtatagagatcttacgtgaatgacggtggaaattgtcaccgaactagcaaaattagatgacattttaacaggtttagtattacagaacagttactagctatttaaatcctttgctctttataatatatatctatatctgtcaaaaaaaaaaaaaaaaagcggcc

SEQ ID NO: 112237 - DNA, 431 bp, Zea mays
  Clone ID: MRT4577_33848C.1
cattgggtacctcgaggccggccgggaactccttttattctcgctctggatgacacagcgcgccacatcaagtgcctcttcactggctacatgcatgcgctcccacctctgcgttgacgtgcagctctgcacggccatgctggccgtacgacgtcgcacatggcgagttgatggtgccgacttccgtcagccggtggctcatgaggtcgtcattatacaacgtagcgttgctactacgtacgagtgccggttccatcgtgattcatgaagtcgccaatggctgtgattgctgttctggcacctacatcggactggtagaggacaagcgaagcgcgcggtaaaccgcgtcgctggaatatgcaggctgacgactccacccgggagactgtggacgcctccaccttgaccgtcgccatcacgccgtcctgggg

SEQ ID NO: 112238 - DNA, 840 bp, Zea mays
  Clone ID: MRT4577_33849C.1
cattgggtacctcgaggccggccggggccttgatggtgaaatggtagacacgcgagactcaaaatatataccctgctccttgtcctgtgtacattacgactttgcttctgcatctctcttgcttttcataccccatattgcctcccttcgataatctaatatgcttcgcaacggtgcgtcgcgcctcgcgctgagatcagtagccgcgcccaagtcggcacgaccggctgcaagtttcacccgcacaacacctcaactacaatgggcaacacaatttggttccttggctgcgaggagaccacaattagcgcaggcgactgcagtacagctgaagccggcatctgcaatcttgcgccgaagccttgctgataagacattgacggaagggcaaaagcaggcggagagcagatatgcacatgaggagattaagcccaccccggagaccgtgtctagcaccagttcgacacatcccatgttctccgaagttggggcagaacaaccacaaaatgaggtggacatgatggcgggcgtgaagcacgatgtgcacactatcaaagacacattttcccttgctagtgtcccacgagaagcgtactacatgggccttgccggcacacttccctaccttgcaacctccatctccaccgtctacctgtcctgggaactcaaccacagcgtcgctggctatggcatgattttctctgagaagaacgccgcgtatctcctcactctcattgagcccctgcaaatcggatacggagcatccatccctgagtttcctcggcgccattcattggggacttgaatgggctggctacggcggctacaggggatacagcg

SEQ ID NO: 112239 - DNA, 262 bp, Zea mays
  Clone ID: MRT4577_3384C.1
gtcgtatcactcgaaccagaggcgaagagtgatgacgaacacccggagaataaacccggacgagaatgtgaactcgtatcaggtatgactataaacatccctcgtagagcgcagcgtaagcatgatgaaatgcatctccggcaagctgcacacatgcgtacgcaactggaagcaactgaaaaaatgataaattgtacttgtgtcttgcgttgggttggtcttttggatctttctatgtattatgtctatactttgtagacta

SEQ ID NO: 112240 - DNA, 550 bp, Zea mays
  Clone ID: MRT4577_33850C.1
gacagatatagatatatattataaagagcaaaggatttaaatagctagtaactgttttgtaatactaaacctgttaaaatgtcatctggtcagattaaattcaggttgtgcaacggtgttgcgcgcctcgtccccatgcggccccgcgcggaacaattttgctagttcggtgacaatttccaccgtcattcacgtaagatctctatactactgtattatgtatatattttttctttcaaatcgtgtcgtcattatatgcaacactcttttttatcatatatacaagagctcacagagaaaggcgctctgtgcagcaacaatgatgcgctgcagctgcagcactggccgtgtagcaaaacttggcctgctgaacgcacgcgcttctctatctctgtccaaatagactcctaaacaatatccgtactcgtgtaccgtcgtcagtccatcgcctcacgctccaatcccgatgaacttcagcaggttgttcttgggctccttccagtagaagccgtggatgaatatgggcaggacgttgcaagcgatcaggacg

SEQ ID NO: 112241 - DNA, 439 bp, Zea mays
  unsure (1)..(439): unsure at all n locations
  Clone ID: MRT4577_33851C.1
ccggccgggatcctgtatgtattgcctgccgcccctggcgttgtgctcatgggcgctgctgctgcggccaatgaaggggcgttgccggagccgtgcggcggccggcggccgggagcggcgccgatggggcgctacgagctcgtccgcagcgacgacgcgcctgtcgtcgccgcggatctggaggccgggaccgccaagccgtgcgacggctaccccaagcgccgcgtacccacgccctctccgtgtccgtctccgtctccgtctccggcgccggcgccgacccggcagcgcctcgtctcgctcgacgtgttccgcgggatcaccggcctgctgatgatcatcgtggatgacgccggggcattcattccggcgatgaaccactccccctgnggtggcgtgacggtgggcgactttgtgatgcctttcttcctcttcatcg

SEQ ID NO: 112242 - DNA, 230 bp, Zea mays
  Clone ID: MRT4577_33853C.1
acgcgtctagattggcggtcgcttcgttgttctttggtgtctggcggcctttggctcatcgctccctctctgtgctgcgctttgctgtgcggttgctcttgctcttcttggtggacttccccagtctctcccttgccgttttctatcaccttgccggagttttcgtcgtcgtggtcttcggtgcgcgcttgttcatctttctctgctgcttggtagggtgtcatctgtcg

SEQ ID NO: 112243 - DNA, 2184 bp, Zea mays
  Clone ID: MRT4577_33854C.1
aattcggcacgaggtgccgatgccgctcgcgcgcgacgccgcatcactccctcgccactcgcgcgcccgggctccttcccgccacgctcacgacgatgccgtccccgacgtcctatcttctcctgaatccctccaaaccctcctccttccgccgactctcggccccgcgcctgagccggttccatgtctcctgcgacgcgccacggggcggcgggaggcgcgaggtcatccccgccggtgccagcaaggccaagaaacagatcgtattcttcgacgccgccccgccggtgtcccaggagggtggaggcgccgtgaagaaggcggggagcgagaagcttacccaggtgggcagcggcaacgcagcgctggcgttgttgaggagggcaaccaagatgacactctcggtgctgtccaacctcccgctcgctatctccgagatgttcgccattgccgccctcatggctctaggaacggtgattgaccagggagaggcacccagctactacttcgagaagttccccgaggacaacccggtcttcggcttcatcacgtggaggtggatcctcacccccgggttcgaccacatgttctcctcgccagtcttcctcggcctccttgcgctcctcgcgacgtccctcatggcttgcacctacacgacccagctccccatggtcaaggtcgcaagaagatggtcgttcacacattccggagaaagaatacggaagcaggaatttgcggactcgcttccccaagcatccattcaggatttgggagtcatcttgatgggtgctggatatgaggtattcaccaagggtccatctttgtatgctttcaaagggctagctggtcggtatgcgcctatcggcgtgcacttggcgatgctcttcatcatggctggtgccacgctaagtgcgacaggaagctttaagggctccgtggatgtgcctcaagggctgaactttgttataggagatgtcatgaaacctagaggggtcctctctgttgcgccggatgttttcaatactgaagtccatgtcaaccggttctacatggagtactatgacagtggagaggtctcacaattctacagtgacctctccctattcaaccttgatggtaaagaagtgatgagaaagactatcaaagtgaacgatcccctgagatacggaggggtcaccatctatcagacagactggggattttcagcattgcaagtgaagaaaaatggtgaaggccctttcaatttggcgatggcccccttgaaactgaatggggataagaagctctttggaacattcttgccacttgaagattcagactcgtcgaatccaaatgtcaaaggaatatcaatgcttgctcgagatttgcagtctattgtgttgtatgatcaagatggtaagtttgtaggggtccgtcggccaagctcaaaactgcctattgagatcaatggcaatgaaatactcattgaagatgctattggtagtactggactggatcttaagactgatccaggagttcctattgtttatgctggttttggtgcgcttatgttaacgacctgcattagctatctttcacactctcagatatgggcattgcaagatggaagtacagtggtcgttggaggaaagacaaatcgagccaaacttgaattttctgaagagatgaaccggctacttgataaagtaccagagctgatcagcgccgatgagaatctattagataccaaatcgacagccacatgaaacatttttttgtgtgtttttgtttgggattgctgaagatgcagtagctctgttcaggtgaacacacgttcgaattcacaaaacatggccttcaagaatagaaaaactgttacaatctttcagtagaacttcttagatcacacttcaattgagctctttgtacatctttgaatgaggaaactaaactgatagcttgttatattaccaatttaccaattaccatactttagagcaaaataaatatgtaattttggttctgcgggtagagcaacaacgagccagaggagaagacggacacctgataccgcgcctagcggaacatcggaagattgctggacaggttccgactgcccgagaacgccaagacggagcatatcaaggccgacatgtacaacggcgcctattacagacactgtgcccaaggaggacggccacaagc

SEQ ID NO: 112244 - DNA, 487 bp, Zea mays
  Clone ID: MRT4577_33855C.1
gaacagtgaaggagctctccttagtctttgttctgatgtccagataagggtaacacacaagcgtgctaagccaggactggcctaaccaagctctgtaccacttgcgtgcataccctcccatacgagaactataccatctttatgatgctacgctctaagcggaggaggacttatccactcccttcctgaaccccttaaaccaccttttgtttgcgtacttcacgtttgagataactagctgggaaaaaaacaggagaacgaatagagctcaggcttgaccacctcatttcagcgccacattctggacaaactacacacccataactactgttagccaggagagaagggggtaccaatctcctagacgctgccagcaaaaactgccacggcctgtactcctctctcggactaggctttgtcgtttctggcgtggctagccagcatgtattggacctcgaagatgcacttgtggaaagagccgaccatg

SEQ ID NO: 112245 - DNA, 736 bp, Zea mays
  Clone ID: MRT4577_33856C.1
cggtcgcgtgggcaagaaggtaagtttgtaggggtccgtcggccaagctcaaaactgcctattgagatcaatggcaatgaaatactcattgaagatgctattggtagtactggactggatcttaaggtagtctatagattcattttttgcttttgaagaaatttgtgtttgtctgttaatataagtgtcttattgtttttccctttccatcagactgatccaggagttcctattgtttatgctggttttggtgcgcttatgttaacgacctgcattagctatctttcacactctcaggtatgcgtgattgtttgtcacgattcttattgacagccgaattgtaattgccttgcacctatacgaatttatggtttggtacctgctgcactagatatgggcattgcaagatggaagtacagtggtcgttggaggaaagacaaatcgagccaaacttgaattttctgaagagatgaaccggctacttgataaagtaccagagctgatcagcgccgatgagaatctattagataccaaatcggctgccacatgaaacattttttgtgtgtttttgtttgggatggcgcaagagccagtagaccacacgttcgaattcacaaaacatggccttgcaagaatagaaaaggtgtgccaatctttcagtagaacttcttagatcccccttcaattgggccctttgtccatctttgaatggggaaactaaactgatagcttgttt

SEQ ID NO: 112246 - DNA, 422 bp, Zea mays
  unsure (1)..(422): unsure at all n locations
  Clone ID: MRT4577_33857C.1
cgccgcatcactccctcgccactcgcgcgcccgggctccttcccgccacgctcacgacgatgccttcaccgacgtcctatcttctcctgaatccctccaaaccctcctccttccgccgactctcggccccgcgcctgagccggtttcatgtctcctgcgacacgccacggggcggcgggaggagtggcggcgggaggcgcgaggtcatccccgccggtgccagcaaggccaagaaacagatcgtattcttcgatgccgccccgccggtgtcccaggagggcgggggcgccgtggagaaggcggggagcgagaagcttacccaggtgggcagcggcaacgcagcgctggcgttgttgaggagggcaaccaagaggacgctctcggtgctgtccaacctnccgctcgccatctccgagatgttc

SEQ ID NO: 112247 - DNA, 173 bp, Zea mays
  Clone ID: MRT4577_33858C.1
ttactatcagaaggtggatgagagctcagatgaggtgaggtcagtcgcgaaggcatgcttcatccgtcatcgatgcggcctcaagtagcaggtcttcattggagaagtacaaggatgtcgagatgtgtttcacacggggattcaatgaacatcatgacgatcatggtcacgat

SEQ ID NO: 112248 - DNA, 638 bp, Zea mays
  Clone ID: MRT4577_33859C.1
tcgctgacgcgagcgccgccctttttttttttttttttttttttttttttttttttttttttttttttttttttttttttttttttttttttttttttttttttttttttttaaggcaaatggaacaaaaaaataacacggggcatgcaaaacccccgcccgaaaaaacaatttatccggggggggaaacacaatacatcccacgggaaaaggggggggaaaaaaaaaaattggtaaactaggcatcctgctttggctccccaccggctaaacttctccgctgcttgggcccaacgaccttgtagtccaaaacctcacggaacaagcctggggggagctcccaatccttgctcccaaaaacaggggcctggacccttgccataattttcgctattttttttccaaaaaaaccctgggtcctggatgccccctcccggatcaagtcataaaggatgcctttcacctaaattttttggggctggccacggaaaaactggacccagcttttttcatgtttggcaccaactttgattatttacttggccaaatatagcttcaagagcttgaatcgctcattttccccaggcaggggaaaattccaggaccttattaatacggtcagcaacagcagagtcaaa

SEQ ID NO: 112249 - DNA, 394 bp, Zea mays
  Clone ID: MRT4577_3385C.1
ggttgggggtatcccactaaaatcttattggagaaatatttggaaaaagctggaggggctcaaaacactttcgagaaacaacttattttgggggaatttggcctaatgaaacatatttgcccttagttcaatttttggcccatgctgcttggttggtatggcccaggacaacatctaaatattatgttttgacagtaggtttttttttttctgggaagtccttgggctttgaaacaaacaaagcccggtttattaaaggctttaaagctgtttgagcattgaaactattcttctaaaaattaaaatcaaattgttttatgtaaaggcggatagtatcttcagcaaatcccgttcccgaaagccggaagataatccttgacccctcagtgaaaac

SEQ ID NO: 112250 - DNA, 217 bp, Zea mays
  unsure (1)..(217): unsure at all n locations
  Clone ID: MRT4577_33860C.1
aaataaagaacgagagactctgtgggagctatacgtcctctatcatatcaaagaactcagaagactatcactctggtaagagagagaccagcgtccgtgtgttgctacgacatgaagtcatgcagtaagctgacgtatagctgcagtacggacaggtgctggtgcaacgacaacggtgagagcggnggcaggctgcatattgcccccttcagcgact

SEQ ID NO: 112251 - DNA, 265 bp, Zea mays
  Clone ID: MRT4577_33861C.1
gccacgcgtccgcggacggtgggcggaccgtgggcggacgcgtgggctgcactgcgtgcgctccatgtgacgctcacatattactcctgtcagaccgcagctgcatcagctgcctactactactactgctgcttttaccggccggtggatcggatcaccaaaccggttcgactgcgatggaggccgggacgtgggcggcggcggccgtggcggccgtggcgctgtacgtggcctggttctggcggatgtcgcgcgggctcagcgg

SEQ ID NO: 112252 - DNA, 490 bp, Zea mays
  Clone ID: MRT4577_33862C.1
ccggccgggaactcatacgagagaaagcaagtaactatgggtgtttggaagatgcgatgtgctcctcgaactacgatcagtgtcggtcttgctccatggcggcccgtacgggtctgctcctctggcaactcgccaccacggcctacatctgcctgaaaaatctccacctcctcctgagcaccaacaggtccagcaacgacagcaaccccaaaacatgatggcacggcggcatacgtgctacatgatagctgggtgatacgttaatcaaatgcgccaacgccgggggcagggtcgtcaaccaggagaactgacaagcgtgcaccccgacgagcaaggtggtgctgacccacagctagatatagtactcgatagtgcgtccagatactactgttctggacataagtatatatatataccgacagcgtgaccatgcctaccaacatgaatgtgattgcatgcctcacaatatatatatattatccgactcggt

SEQ ID NO: 112253 - DNA, 334 bp, Zea mays
  Clone ID: MRT4577_33863C.1
acccggaacaaaagattacatttgatagaaaaatttgcttaaaaataaaacacatggaaaagccccaacattttggggggggaaatttgaatggaatataaattacttggctttttgggggggatgctgaaattaccaaatttcccggggacacctgtaaattggaacgctttttcttttacgggattagggttaaaaggtgatcttcaacttcttcttggcaaccatggggaaatgggaccctttggggatcacctttttgccgtccgcccttggccgactgaagggttctcacgggctgacatggaacctgacgttgggcccgacccgtggg

SEQ ID NO: 112254 - DNA, 2404 bp, Zea mays
  Clone ID: MRT4577_33864C.1
atgaattcttctgaatactttggaccctcaggctctccgaatattgggtgcattgaacgcggtcattgccaagagcaagaggttgagcagtggcagatctgttactattcacctaactgcgtatgactgtaccaccagctctgcacgttttcaggctcctatcactgtcaaggggcatccatcacgctctcagaaacatatttgccaacttgcctgcagcatgcagctgaagaacgagtcctcctcagtactgaaaaccaagccttccccacgaattctcacagaagcagctccttggaggcagcaggaaagaagtgccaccaatatctgtcgagaagctgaagggaggccaagaattgcatctgtctatgctgatatagagagaagggttgggggcttcgactttttagagtgtaataacaaggacttcagggctctcagaatattgggtgcattgaacgcgagagatgctaaggacaagaatgacagcagtggcagaccaatggctactcacagaacaggatatgacctaaccacctctggaagcttccaggctcctataagcttggcaaaacaggttgatgtcagcattatggatggggtttcacttgcttctgttgcccccatagcaggcctaagaagccttagaaagttgccagctagatattcatctttcactggcacaaatgagaccagcacaaatgagaatattcatcttcggatgtcaagagctcaattgaagtctgaagaaactgtcagcagtgccaactcgccaaggcctacaagctcatcaagtcccagaaatgtgctaaagaatgcagagcctgagaggagatcccgtccacctgtttcaccaaaatctccaagcaagaagtccaatgaagctgtctccccaaaaggaagaacaagatcaaagccttctcaggtgaaaagccaccgtgatgaggtcttacagagtacagggaacagaataagcttagcaaagcaggttgatgtcagcattatagattgtccaaagcctctgggtggcaactcaaccttcgttccaccaagcaatgctgctgcaacagcaagtcataaggctccttcaattctggattcagaccaaaacattcattcactggacaacattccaagccctgtctctgtccttgatacatccttctatcataaaaggatctcggattcattcaaagatggtgagacacattcttcagaggaatgctggaacccaaacagcttgcctgacacaccacagtcaaaagcgagcagtgaagtcaaccagattaaaccagaaaatctggaagttctgatccagaagctcgagcaactgcaatccatgagcgaagaagacgcaagtatcaaagaagtcatggcgtcagtcgctgcgaacaaagatcaccagtatatctacgagataatgttggcatctggtcttctgcacaaagaacatagtgtcacagcactacctggccaactccaaccatcaaactacccaatcaatccggagctcttcctcatccttgagcaaacaaaaccagtctcagttttcgcattccaaactgtcagtggagctaagaaaagctgtaagccttgcgcagggaagcttcatcgaagacttgtgttcgacctggtaaacgaaacaatagctcaaaagatgatcatctgcagatctggaagccagccagtaaagtttcttcaatcaaggaagttaagtgggtggcaactattcaaggatttgtgcactgaggttgacaggcaaataaaatgccccgaggaggaggagaatggaaacatgatatcagatgaggatacagtcaatggaacgaaagactggatgagcttcgacactatgctacatggcatggtttgggagattgaacgatccatcttcaagggtcttatcgacgaggttatcggcggtgagactatagagaagatgcaatttgggcaaaggaaactgcagaggcagctttctttcagtagtataaactgaatatgcgtgtagcagtcatttccatggagaagcttataacaattagtaaatgtgacagtttctatttttttctatgaagactaaactgtacaagtataaatgatcctcaacactagtcttgctgcctgactattgcaattcgagagttgtgcgacatgactattgtttgactctactaccggtcaaggcgattgaattgcacagtaccccgtgtgtgcatggtggacccattatatcaagtgtttataggaatgtcgggtattccacaattgagataaagttctcgttttttttcatttattgttacggacgatgttgcggtcaaaatacgtcactgtaggcggcagatgtaccaagcactatattgtccatgcggctacaacggctactgactgtgtcgtactcaac

SEQ ID NO: 112255 - DNA, 434 bp, Zea mays
  Clone ID: MRT4577_33865C.1
tccggagcaccggcaggcccacgaccgcgagcgggagcgggccggtgaggttgttgttgtagaggtcgagcacgcggagcgcccgcaggcgcgcgagcggcggcgggaaggtgccgttgagcacgttgttggagaggttgaggtgggtgagggactggagccgggacagcggcgccgggatggggccgcagagcgcgttcgcggcgaggtcgaggcgcgcgaggtgcgcgaggcgggacagcgccgtgggcaccgggcccgagaggttgcggccggagaggtcgaggccgatgaccgcggcgcgcgcgttgcacgtcacgccggaccacgcgcaggcgccggtgctggtggcgttcgtccaggacgcgagcgcgccggccgggtccgacagctccgccttcgccgccagcagcgcgtccgcatccgagccagcc

SEQ ID NO: 112256 - DNA, 360 bp, Zea mays
  Clone ID: MRT4577_33866C.1
gaacctatcgcatagtttatttttcaagaagagcacaggaatgctcatttccgaacaattcaatgacgcggggcaagcaagcatgctaacacatacgcgctcagccttcgtcatagtaggacgcttaaatgacacaaacaaacgcccccgggcggacttggctttctcattccccgattgacagggcagccgctacaagcccatggcttcgtcaaggcaccgcccttctgtacagacggcctgtcccttaaaccagaccaccaggcctgcggatgcccaaagaaaccctgcccttaaccggagggcggaacgagcacgcaacgagtgaaagacgcacccaccccgtgaggccggctgagg

SEQ ID NO: 112257 - DNA, 199 bp, Zea mays
  Clone ID: MRT4577_33867C.1
cattgattagccaagtcgatgtcgtatcgtcggacaatctcgaacatagtgctggcaaccgtcatgagcagcgtgctgtcccgcagccgcggaccgaaggacgcttacaccaggtcctcaacgggctggcgcgcaagcagccccacgccaaggacgtcttcctcaagcccggccagaaggtgctcaactggacagaggg

SEQ ID NO: 112258 - DNA, 161 bp, Zea mays
  Clone ID: MRT4577_33868C.1
tcccggccgccgcggcaagactctctgaattgtgggtctccggcgatggcttctctagctccatccaagattctgggcacgaaggtttacaatcgccggctcgtcccgctactccacggcagctcccaccgccttgtctcataatatcgtctccctcttct

SEQ ID NO: 112259 - DNA, 189 bp, Zea mays
  Clone ID: MRT4577_33869C.1
cggacgcgtgggaaaaaaaaaaaaaaaaaataaatataaagaagggccgccccacaagaagaaggatgccaacggacgcctgcaggcgacctaaaagcccaccaagagggccaccaaacagcaaagcaccggccgacggccaacaacgtcacgacagaaaaaccgccggagctacccaaataaaccgcc

SEQ ID NO: 112260 - DNA, 254 bp, Zea mays
  Clone ID: MRT4577_3386C.1
atacaaactaactcccattcaagttttcataaataaacattgccaaacattgcatacataggtgtactctaaatctaactaaaccaactggtgcactaatgtaacctacttatagaataaagctcacactttgcacacaaattgatctatctagttcctgtcacaatggagaaactgcatacataagctcaacacacgggtggctaaagtgcctggctctcctgtttgtgactctaccgccgggttctccgcag

SEQ ID NO: 112261 - DNA, 223 bp, Zea mays
  Clone ID: MRT4577_33870C.1
gacgggaattatttttaacccaatcattgtctgtataggctcacaaaaaaaaatcaaacgtgaataaaacgatgcgaaaacattttttaaaggaaaacaccaaacgggtgacggtttacaaggacaacatacaaagggtgtttctcggttcacagaactaacggggggcaacgcgtattcattatttgtgatgggtgccagcgtaggggcagggctttacatt

SEQ ID NO: 112262 - DNA, 338 bp, Zea mays
  Clone ID: MRT4577_33871C.1
gttgggcttggaaggcggcggtcagtggctagagcgcgagaggaagagcatgaggaggggtcggccatgactgggaaggcgaacccaaagaagcacacggcgaaggagatcgccgacaatattgactcggcgactacgaaccggggtggtggataggctcggcaggtggaccgactggggctggacaagggctggcatgcgaagctggtgtgcccgctttgccgcaaccaggcgcccgacataaagtacatgcagatccaccactaggtcgcgccaccctaagctccccttatcagccggagaagcttctgaacctgcactcctgcgaccccgctgct

SEQ ID NO: 112263 - DNA, 825 bp, Zea mays
  unsure (1)..(825): unsure at all n locations
  Clone ID: MRT4577_33872C.1
attgggacctcgagccggcaggaacgattgacactatctgatggggatccactgtttcgtccgataatacctgcatatcttactcccagtgcacgcaccccacttcaaccggaccgaatccagttagagcggcgtgaagctcataatacccctacgcttctcctaagcgcgttcactttcacacccctcctcaaacacattcaattcctatctgtacatattaatacgctacacgcaaaatgtcggcgcccacctctgccacgagtgaaatgccatcacgcacattcaccaatcgctcaggcgatgatgatgccattccaggagaagatacttcggaggtaaccaggctctttgcagagcggttacaagcctggaaacatgcagtcggctaccttgaagactacattaccgcgaccgagaagacgaaccatgcacacggcaaggagtatgagcgggttttgaagacggtaaaagacccactgaaggagggccaccactttgaccagtcgcttgntgtggggttgcaggcatgtttgaaaacatccgatcaaacacccagggaatctccaaccaacactacgagacagccaagcaactcaagagtgccatcctccctatcttcgagcgtctacacagcgaaattaagaacaagagtaaggagcttacaaaaggggctggcaaaggcagcaaggcagtcgacaaggcccgcttgctcactcagaagcacattgagctcctcggacacattctgccgcatttgactcgcatagcggcagtcagatgaaagctactgacgaccctacatccttaaacgcgggataaaca

SEQ ID NO: 112264 - DNA, 572 bp, Zea mays
  unsure (1)..(572): unsure at all n locations
  Clone ID: MRT4577_33873C.1
gttagttgcgagcgccgccctttttttttttttttttttttttttttttttcccctttttttctagaatcggaagggagccgaaatgaaattgatcacgtatgaataatccaaggatctgtgaattcgcagtagtaatagtataagcgttttgggaacaggcctccagcaggttcttgtatatgtgctgcggtctgacatctcgtagcttggggctgcatctgcaacctgcatggttatgatgatcctgcaattttcacttgatgaatgaaggctcacagaacttgtctgaatactgtctgttttctttcaagtcacctgaggccgtctagtttgcttggccttcctccccttttcgaattcagagtcccctgccacacaccacactcatatggttctgttcgttgcatccgcgttatagtttcccgcgcgcgcggccctcgtctgtgtcggggtccgactccggccccaggaccctgctccagaaccagtgcgcgcgccacacccccgccatctgctcgatgggcacccccttcgtttccggcagcaggaggtacacgaaggcngtcatga

SEQ ID NO: 112265 - DNA, 1151 bp, Zea mays
  Clone ID: MRT4577_33874C.1
gagaacaaccttcccaaatttcgaactcgtattaacggtcggcggtgggtgtggagcgggacggggcggcgagatcacgacgagatggagactgacatctcttcatgcggaggcggcggcgcccaacagcggggtataggacctgtggaggtgcaagcggcgacggcagcactgcggcggtcagaggtgttccacgtcttgaaggagctcgtaggcttcgtcctctacatgcaccaccagatcccctcggttttgccgagtcttgaaaatgaatttgcaagtttaaaggaggaaatgacagaaatggcattacaaccagctgaactcaaaccatctgatcggagaaagtacaacacacgaaaaacggaggttagacgtagaataaagaagcacgagaagttgatgaatggcatctctaccttactctgttctcttcagcacgcacttgatgaagtttctagcattgaaggagttgtcctgatacttggaggaagccttgtacggcccctatttgtttatgacattacaatttctcatggtatctttggtccaggaagtgccaaagaacatgctctaaccaagttagcccaatctgtttctcggaaggctatccgtgctcttgtatcacgtggagctgggagtctgtcctacacaggacctagcaagttgtttttgttggtaagatgctccagtacattaaagctaccactggatttcctgccaaagcttgattttcgttacagcaaaaaggttgtacctcttcaaatgcatataaagtgcagtaaatcagggtgttcagggcataaccagcaccatatgcctcttgttgattccccatgttcgacttcagaatcttctctttcagatgttatttggttccagtgcaagcatacaataagaggtttaccaggcaaggcgtcactagaagggtgatgtgttcatgatatcaaagtttacccaacatgtctttgttgttgtagcgagtaatataacatatatgtacagtagatgatgcttattactttgatgaattgtagcgagtaatatcaaatcagttactacgtaccttgtgtaaagcaacttttgctagttttcaggcaaattaatccgatgttcggttggagcacaaaaaaaaaaaaaaaaaagcggcc

SEQ ID NO: 112266 - DNA, 442 bp, Zea mays
  Clone ID: MRT4577_33875C.1
aaaaccacaacggaaaacattttttaattggggggtcaaaaagaaaatatttatttgggacccccggaaaaaacaaaggggaagggaaaaaacaagccccccacccaggcaaaggaggggggcgggggatcaaaccccaccaaaagtcggcgccccccccataattgtggaacccccccccgaacaaaatttccctttcaaggttttcctccaccctttccgacacccgctcctaaaacttggcctccagggagctcgccccaccggccaaggccagtcctccaaacaccccggccgccgggccaactggcaaccccgttcccatcccaattttgtttttttttttgccgggggcaccaacggggctggttccgtacccaggggtagcaacatcaacgggaggagccccctaagcagcggcaacaggaggagcgcccaaagc

SEQ ID NO: 112267 - DNA, 250 bp, Zea mays
  Clone ID: MRT4577_33876C.1
cccaaccagggttctatgggtccatttggtaacgaccggcccttcaaacaaccaattttcccaaatgggggccccttttttggccaaaaccttgaggtttcaacttttcctccccccgtcccccaaaaaagtttggggggggggggaaaaacctaagcccaatccctgcccccttttgtttttccaccccaaggggaaattggtgggggggccccaccccccccccggggtcccccccgaaattccggcc

SEQ ID NO: 112268 - DNA, 235 bp, Zea mays
  Clone ID: MRT4577_33877C.1
cgcggttcaaaacatcctggcgtacagaatgaagcggagatctctctctctctcacgcgggcaacataatggatagagaggacctagccctgaagagcttcagagctgtatatctatgagcccttgagttcaggtggttcacaagaactctaccatactggtgtgtacgccattctgtacagtttaaaagtgattcacgatttgcaggctttttatcagatcacacgaaaatcag

SEQ ID NO: 112269 - DNA, 206 bp, Zea mays
  unsure (1)..(206): unsure at all n locations
  Clone ID: MRT4577_33878C.1
tcttgncctccaaaattttaaatataatttaaaaaaaaaaccgccgggcgctctggagaatttaaacaaacatacccctccattccacatcatatatcttctataattataactaaattcaattcactcaccctcctttaacaacctctttactaaaaaatccctttcttcacccaacttaatcacctttcaacacaatccccttt

SEQ ID NO: 112270 - DNA, 842 bp, Zea mays
  unsure (1)..(842): unsure at all n locations
  Clone ID: MRT4577_33879C.1
cattgggaccctcgaggccggccgggtcatttcgtagaaatccgtctgttatgaaaataaacccccaccaaattttccagagcaatgtcctgttccagtcttcttgaatatcgtcgttatgttattggagactaaccggcaaaagtgaaatggcatatccctttgtgtgaaatggggttttagcatcagttaccagatggctgagcaaaatagtaacattgggaataatcaagaagggggtcgtaagtcaaggcgcgctcatggaatcctcagtaacgtaaggacgcggttaggaatcctcggtagagtgaggatgcaggtagctggaaagtatcaagattgtacatgggattggagtaacgtgcagattcacataactgccacatcacatgctctttgatttggtaccttccggtcctccacagctactgtctgttcttcacctactctgatcggaacaaacaaagaccatagcatgcatgcgctgtagaaagagtggaatcttgttacctttttcctttcacctaagcatccacctggagttaaggtattaatttatcctttgaagtgtggacagcacattgacaaaggctaaaatgtgtagtatctgaaaaggattgcctcgtcagggtgagatttttcttcttcttctttcccgtttctttcagctgttgccctgtaggaaggtctcaatttcactattattgacagcgaanacaatgaatatccagccaatttgcttgcagtcaaagttcatttcccccctcattacgtccanacgagcaaaaggagtcagggatgcatctctctgactgaatctttgctgcatttgatagtactga

SEQ ID NO: 112271 - DNA, 1051 bp, Zea mays
  Clone ID: MRT4577_3387C.1
tccgtccgcatcccggtcgaccccgcgtccggtagcataaaacttcctggtgatccctcctaccataatcttaagaagatattttcagctgttggaagatccaaaggcactggtcctgcaactaatagatcttccaagttagatatgctttttgctaacaagctgcatgctttcgtggagtacgaaactcctgaggatgctgcgaaggctattttggagctcaatgatgagaaaaactggagaaatgggcttagagttcggttgctgaatacttgcacggtgaagggggcaggcaaaggaaaaaacggaatgaatgaaactgatggaaatagtgaggaggatgtctccactttgaaccattctaacgagaaacagtttgaacaatcctctcaactgttagatgtactgccggaacacttgtttgatgagaatttcaacaaggaagttcccaagcgcggcaaagggcgcggtcgcggtggcagagggcatgggcgtggcaaccatcaatataacaatcaccatcacaataaccagcaccaccagaacaaccagccgcagtacaataaccatggcaacaaccaccttggtgggaaccgtggcagccttcactctgttggaactacaccgcataacctgaaaaccaagcttgagccgcatccgcagctgcctattggggccaacaagcttccaccaggcccccgcatgcctgatggcaccaggggtttcaccaggggcagggggaagccacaggctgtgctacctgggttgtgtgctgttggtgttgagtgaggcatgcagattgctgctcgtatgcttgtattgtatatctttgtggtgggagtatttgtgcgtcacactttgtggacacggcgagctgtcaaaaccagtatattacaatcgctttgtaatcgtgtatctgggcaatttggtcggttggcacggggtatgaatcaattttttttgaattcagtatctatcatagaaaaggacaagcacactaaaatgtagcgtggtgatttagtctgccctcctgttgcgtcattttgttgtc

SEQ ID NO: 112272 - DNA, 1991 bp, Zea mays
  Clone ID: MRT4577_33880C.1
atccgcattccgcaggccgcagcggaagccgccctcctcctcggccgccccgcacgctagctcaccatgctgctccatctcgtcacctcctcccccctaaccccggcatgcccctcgcctaagcggcgtacgtgtgtcgttgcggcggcagttctagtgactgtgagatgtgcggcctcctcctcgtcgagcaccccgtcgtcatctgcatcggaggctgctgctgccgggcagcgggtggcgaaggtgcacagctacgggacggtggattacgagcgtcgatctccactgcgttggggcaccctgtaccggcgcatcgctgtggggcacggcgggcggcccgtggggcgcacgctgggggcgtgggacgagggggagcgccgcctcgacaagtgggagctctgccgcatcgccaaggagctccggaagttcaggaggttcaacctcgcgctccaggtttacgattggatgacagagcgcagagatagatttcctctctcatcgagtgacatggcaatccagttggatctgattgccaaagtacgtggtgttccacatgctgagaaatactttgacgagctccctgatgcgatgaaggacaagcggacgtacggttcccttctgaatgtttacgcccaagctatgatgaaagagaaaacagaagaaacatttgagcaaatgaggaagaaaggatttgcgtctgatacattaccttgtaatgtgctgatgaatttctatgtggattctggagaacctgatgaagtgctggcaattattgatgagatgaaggaaagaaatgtttcttttgatgtctgcacttacaacatttggataaaaagttgtgcggctaaacaagatgctgaagaaatggagcaagtctttagccaaatgattgctgatgagtctgtcgttgccaattggactacttataccactctggctagcatgtatcttaagctaggaaactctgagaaggcagaagaatgcttgaaagatgctgaaaagagaacaacaggccgggagaaaaagtgttttcactatctcatgacgctgtatagccatcttgggaagaaggaagaagtttaccgaatttggaactggtataaggcaactttccctatgattcataacctgggttaccaggagttactgtctgctcttataagaataggagatatcgagggagccgagcttctatatgaggaatgggcatccaaaagctatagttttgatcctaagaccatgaacattttattagcatggtatgctaaagaaggtctgattacaaaggctgagcaaactgtgaatcgatttgttgagaaaggtggaaatcccaagccaaacacctgggaaatccttgccacagcctacatgaatgatgataaaatatctgaagctctgtcatgcatggaaaaagccacggcagttaaaagtgcaagtaaatggaaaccgagacccaccaacgttgagactctcctagcaagtttcaaggagaagaatgacgcagagggtgcagacaggttagtgagtgtccttacaagtagaggatgtgctgaggacgaagaatacaagtcactgattgacacctatgcttttgcgggcacatagcatggagacggtgcatgatatcattgaatcaatgatatgatgagtatgacgcactgaacaatcacattacttgcccataatgtttctaaaatagtaccatgagaacctattgctctcgtaagttcatctggtacagttacatccatcagagaggtcagataaaatgcattcgatcagttgtccccctagacgaaatcagaaaaatgagatacatagatctttccggtcacttggcttagatagaaatcctcaaaatgtttcttcaaattaaaatcctcaaaatgtcaacatgacacttagatggcttctttgtacttcctattgtatatttatattttttttaggattaatcaagcctctcaagtgcaaatacttattttatt

SEQ ID NO: 112273 - DNA, 1944 bp, Zea mays
  Clone ID: MRT4577_33881C.1
gcccgcgcccgctgctgcttgcctgcttccgacgcacgcggggcctgttccgtgctgcagcaaccgcagcatccgcatccgaatccgcacacgatccccgtgccacttgccccgtcacccccacgcggcccgcgcctccgcccgctcgtcggccaatgcccggcgcaggccagctcggcgagatgagatgacgccgccgcgcggcggtgcccggcctcccgtcgctcacgcgcgccagcaccagcaccacccggccccatcgggattcttcatcccgtcctccacctagcgcggtagcgccgcatttattccctccccagcacaacggtcacgtttccatcgccccgtcttctctccctcgtcgcatccggcgctcctcctcgtctcctatttaaagcgcgccgggctgggagccagcgatcatgctattctctaggaggcctctcgccgccgctttccacctcgcgcccctttcgcctccgctgctcctcttcttcgcatccgcgtcctcgtcctgctcgcccgccgcctccgccgccgccgcgtcggtctccggctccaggggttgcactgctgcaaggatggacagcggtgcggtggagacagcgtccactggggcagtatggtcatcaccttcggcagaaccgagaagcatttctgtcgggaaggaggtattctgcaacaggtcactcaacatgaggaacatcacagcagtgggatttgatatggactacactctggcacagtacaagcctgaaaccttcgagtcccttgcttactatggtacaatagagaagcttgtgaaggatctccgctaccctgaagagctgttgacttgggaatttgattggaaatatatggtcagaggactagttctcgataagaagagaggaaatatcttgaagatggatcgacacaagtatgtaaaagttgcataccatggttttaaggaactatcgaaagaagaaaaagttgctgcttatgggagtacattgataagagattcatttgatgaacctgattatgcccttatagatacacttttctcactgggtgaagcttatctatttgctcagcttgttgatttcatagacaagaatcctggaaaagtacctgcaggcacagactatccacttatgtacagagatgtgaggtctgcggttgacttgtgtcatcgtgatggaactctaaagcggatggttgcgaaggatcctgccaggtacatcaatgaggacttggcaattgtaccaatgcttgaaatgatcaggaaatctggacgctcaacattcttagtgacaaatagtttgtgggactacaccgatgttgtcatgaactacctttgtgggccatacacttcaggtgtaggctctggtctcaatcacaagtggcttcaatattttgatattgtaataacaggcaggattgtttgaagttgagcctgattctggaaaacttctgaatgctgatattcagtgaagatcggaagcccaagatcaagtcatcaacactcaacaccagttcagaaagtttatcaggggggcaatgttggtcatctccacagattactttctgttgcttctagttcacagattctctatgttggtgatcacatatacggagatattctgcggagcaagaaagttctaggtatgttttatttatcctgtattatctcattagttaaattgggatctgaataaatttgtgattaagcatgggagttttattaattcgcaggcaacatgacaacttttaatgctgcccccatttcattaagttcatacaagcccacacataattgcagagacacatgtagatccatcacatgtattataacatatatggatacatcatatcatgacacatgtccaaaccataacacatgaccaaacattatccttcgttaacaattaattaagatcataaatggtaagacactttctt

SEQ ID NO: 112274 - DNA, 233 bp, Zea mays
  Clone ID: MRT4577_33882C.1
tcggcgtcctgcccctgcccctgccccggctacttccgtggaccaatttctacaacttgggttccgtaacaagctagcaactgaacgaggtcaactcttacgcccgccgacagagacggaggcagctgctaagacaccggagggtatccgcgcacctgccatcatccaccacccgatacccacgtcttgtaccgcgcagatctgctgctgcccttgagatctaaatcaaagct

SEQ ID NO: 112275 - DNA, 621 bp, Zea mays
  Clone ID: MRT4577_33883C.1
agaatgtttgctctagttacatgaccgctgaatttgttccctgcgcttttttatcttttgaactgtttgctttccattcgagttcagtttcataaggtgtggggacagctcatgaagactgggtaccaaaattccagatttgctcatcaggttgagagatttgcatgcttgtacagcagccaggttacaaacttcggtttgtattcccctgacaaatactatcgtccgagcgaagattacatgccccacgagtttgatgtgcttgggctgtaggagcagcccctactgctggtcggagttcctcgttgtaattgatccatagcaggataggagggtgacatcgtagttgcgcagtggtaacaacgcagggtacgcgggttgtgaaggagagaaggtttataactacagtagatacatttctacttatcagtaagtttacctgtatataaatatgtacataactgatatatgatgcgtgttatttgtgagcaaaaaaaaaaaaaaaaaaaaaaaaaaaaaaaaaaaaaagaaaaaaaaaaaaaaaaaaaaaaaaaaaaaaatttaaaaaaaaaaaaaaaaaaaaaaaaaaaatttctttgggttgttaccactgtttaaggg

SEQ ID NO: 112276 - DNA, 913 bp, Zea mays
  unsure (1)..(913): unsure at all n locations
  Clone ID: MRT4577_33884C.1
attccgcacgcacacgcaacaagccgaatcactgcttcagattaagataggcatctttgtcgcagctgctacaattgagtagtgcgtttatttaagagcatctggaataacccggagcttggcgtctccgcatgtcagctaagagaacttgaaagcaaggcgaaagagcaggacacaaacatgacggcagtggtggagtcccgcgtcgtcgtcgcgactcctgtaaacgcgaaggtgatgagcgagaaggagaaccacgtcctgaggatctcaaactccctgaacaagcagctggctcacgtggagaacactcctgaggcccctgaagcggcttgcaacgagaggaagaggaaaggcgaggcgaggaacgcgtccatcggcggcggcgagcaagagaacactaacaacggtgggaggaagaggagcctgccagccgagcgcgaggcgaggctgaagaggaagtcgacggagcctcctccccaggtgaagaatctggtgaggtcgacggcgtcgtccagggcggctgccaaggcggcggcggcggcggctccgagctccagagccggcggcgccaagcagcaaccgggcggcgggaacaagaccagagggtgggttaggtagacgagatgatgatggtgattgcgtgtgttgtatgtgcaccggtggctggctcaacttttggctgagtcccactcactacattgctgcggtgatgaattagccagcttgtttacattgctcctgtgtctatcccgggggtaaaaaaaaaaaaaaaaaaaaaaaaaaaaaaaaaaaaaaaaaaaaaataaaataaaaaaaaataataaaaaaaannaaaaaaannaaagggcggggccgnncttctagagggnattccaaggncttacgggtacggcgggtggcatgcgacgtc

SEQ ID NO: 112277 - DNA, 777 bp, Zea mays
  Clone ID: MRT4577_33885C.1
tgtgcggcgctcgaggccggccgggtcgggatcacgcacctagggttttcgcgccgccgccgcagccgcaacaatgccgtcgcacaagaccttccggatcaagaagaagctggcgaagaagatgcgccagaaccgccccatcccctactggatccgcatgcgcactgacaataccatcaggtacaacgccaagcgcaggcactggcgccgcaccaagctcggcttctgagcgtcgggattggccggctgctgcgtcggaaggctagggtctaagagctatcttctgttttatcattgtctctgtttctgtaagctagcaagtgatgctgtgatgcttttattaagattctgatgagtggtgacgttaagagaaaattggcagtactgtgttgtaccccaagattccttgcagcattgctatgctaagtaacgaaccctttatcttattatatagaaaaaaaatttttgtgcttcgcctgtgggactgttcctaccgcattaaggaacagtccaaactgtgtcttcttctgttgttagcgtattaaggaacagtccaaactgtgtcttctgttgttagctcatctgtccaggatggtcgtgtaattttggatggaccagactatgagacgaatcagtcctgtattgctgtcaccgtgaacatttccttgtatttccgttcctcttatacatactctagccttaatttattactctttcttgtaaggaggtttcaacttgctaccagtggattgtttaagtgatcatcatcttgttatg

SEQ ID NO: 112278 - DNA, 1491 bp, Zea mays
  Clone ID: MRT4577_33886C.1
tgcttgtgattgatctccgctaccctgaagagctgttgacttgggaatttgattggaaatatatggtcagaggactagttctcgataagaagagaggaaatatcttgaaggcccaacctgcttggaaacaaaaggctctgttgtattatcggctaagggcccagccacaatatggtttacaataatcacatctccacactttttcatattcatatttgaagcttgatgtcggtgattacatgattttggaccaatagaatgcgtcttgtcaaactaattgatgcatgttttgctaagtgttctacctattcttatgtattacattattatagtctgaaccacaagtggcttcaatattttgatattgtaataacaggcagttcgaagccaagggtccatgatgataaccgtgcaggattgtttgaagttgagcctgattctggaaaacttctgaatgctgatattcagatcggaagcccaagatcaagtcatcaacactcaacaccagttcagaaagtttatcaggggggcaatgttggtcatctccacagattactttctgttgcttctagttcacagattctctatgttggtgatcacatatacggagatattctgcggagcaagaaagttctaggctggcggactatgctggtgattccagaactagaacaagagctgaagcttctctcagaatcaaagtctactcgaaaggagcttagacatcttagaatggagcgtgattcgattgaagacaaaatccatcatcttgaatggtctcttaagcttgatgatatctcagaaaaccagaaggagaaattgttctctgaacatgacaatctgctgaaacagagagggcatgttcgtggtcttcatcaagaagctcagaggcaacatcatcagaagtttcataaggtgtggggacagctcatgaagactgggtaccaaaattccagatttgctcatcaggttgagagatttgcttgcttgtacagcagccaggttacaaacttcggtttgtattcccctgacaaatactatcgtccgagcgaagattacatgccccacgagtttgatgtgcttgggctgtaggagcagcccctactgctggtcggagttcctcgttgtaattgatccatagcctaggaggggacatcgtagttgccgtattatataacaggaagcttcacccattgtgaaggagagaaggtttataactatagtagctacatttctacttatcagtaagtttacctgtatataaatatgtacataactgatatatgatgcgtgttatttgtgagcacgcgataagtagtactgactaagtcccccccttctagtcattggtttttttatgatggattagcatgtaattattgtctattaaatgattctaattttttttcctcaataatattattaattgctcactgagaatcaacattattttggaagtatcgagtgttagttatcaatgcgaaaagtttt

SEQ ID NO: 112279 - DNA, 651 bp, Zea mays
  Clone ID: MRT4577_33887C.1
attcggctcgaggtgacttcggccttgcgaggctgtatgaccatggcacggacccgcagacgacacatatggttggcaccatggggtacctggctcctgaactggtgcgcacgggcaaggcctccactgacacggacgtgttcgccttcggcatgttccttctcgaggtcacctgtggcaaaagaccactgatgatgatgatgatgcagagcaccgccgaggggcggcgagaccgtcagtttttcttggtcgattgggttctcgagcactggaagaatgggtcgctcacagaagcagtggatgggagggtccaagatcttgacgacggctacgatgctgacgaggcatgcaccgtgctgaagattggacttctgtgcctgcatccgtttcctagctcaagaccaagcatgcggaaaataatggagtacctcgacggtgacatgccacttcctgagctgactcctaccaagctgaacgctaacgtgctgagagtgatgcagagcaatgctttcagcccaacggtcatgtcgtatccacagctcacgtcaagcttcggtacagtgtcggacctctctggaggacgatgaaatccatggttttagtttcttaaccattatgtaaccatatgttgaagttttcatcaattcatgt

SEQ ID NO: 112280 - DNA, 651 bp, Zea mays
  Clone ID: MRT4577_33888C.1
ctgtgcgtgaactaagccggttttcttttactttttcatttgtaactgtaatacccttgcttctttcttaaggtcgtctaaattaagtttttttgagcttgcgttactatgttggtacagctatccacttatgtacagagatgtgaggtctgcggttgacttgtgtcatcgtgatggaactctaaagcggatggttgcgaaggatcctgccaggtacatcaatgaggacttggcaattgtaccaatgcttgaaatgatcaggaaatctggacgctcaacattcttagtgacaaatagtttgtgggactacaccgatgttgtcatgaactacctttgtgggccatacacttcaggtgtaggctctggtctcaatcacaagtggcttcaatattttgatattgtaataacaggcagttcgaagccaagtttcttccatgatgataaccgtgcaggactatttgaagttgagcctgattctggaaaacttctgaatgctgatattcaggctagtaaatttatcaattctaatccatcttcatgtcatatgtttttccctaaattatatgcaatacttcgtgaagatcggaagcccaagatcaagtcatcaacactcaacaccagttcagaaagttatcaggggggcaatgttgg

SEQ ID NO: 112281 - DNA, 292 bp, Zea mays
  Clone ID: MRT4577_33889C.1
ggcgggaccaaaaaaaaaacattttttttccaatacaaaaaaaagggggaaaaaccaccttgggcctcttaactcccataataataaaaaaagcctttttcaacaaacaaccggggggccgggctgccctttattaaaagggaaaactgcaaagggttttttttttccttaaacaaggtactttttaacccctacataacatgtttgaaacatttaaatacggggatccttgattccttgttcccatgccaacgaaggggggcccaaagcccccccccccttttttggtaga

SEQ ID NO: 112282 - DNA, 2804 bp, Zea mays
  Clone ID: MRT4577_3388C.1
aagtcagctaacctctcccttcaatttttgtggcaacctccttggacagtacaagttcaaagatttgaaactctctcttcaagttcattgatatttactgcatctgaaaaaaggcaaaagatgtcacaattttcttcttgaaacttttaacacattcaaaggttggaccattatttatatttctaaccatgtgaaatgatattgtcaaaatcttcaatgtagcattgaatggtaccgctatgtgaacattttagttctttcaataaagagagcatgcattgtttccaatgtctgataatcacaaggagagatgattttccccagtgaaccaaatgaataaaccatgaaatatccataggattctgaaacactgtcgtcgtactgcaagatagggtgcggcaatttgagttgaccctctcatagaccagaggaagcaactcaagcaaacggacgcaagatatctgacactgtttgagacctattagctcctttccttctcttaggcatgtggaaatgaaaggccagagagttgcagaaagcaaagtgcagaacttctcccagttactaacatccacagcatgttctggtggactagctaggacacttgaatagggttgtcgcaagaaacccccttctggaggtttcgctggctgtgcaatttggggtctttgaacgacaacctccttaagttgtgttggccgactaaagcaccggatcccatcagaactccgaagttaagcgtgcttgggcgagagtagtactaggatgggtgacattgggtacctcgaggccggccggggagaactccccttctccgccactaccgaagcccttgtacccctcaccgccgccgctgctgctagggagcttccacccgcgcgcgcctacaacgagagctagcagcagtagcggccgttatcttgtcgctccggctccgttcgtgtacccaagtcccagcctagatgccgcagatggaggggtccactgatcagatcgccgccggctggttcgctaaggagccggcttccgagcggcccgtgggcttgccgaggaccggctcttccagtcgcctcaacgcgcaggcgccggagttcgtgccgcgggggccgccgccaccggcgccggcggttgtgctgccgcctccgccgcaggtgatccgcatgttcgccgcgcctcccccgccgccgcgtgggggcttcttctccgcgccgcagccccggccgttcgagtactatgcgcctatcggtgaacgcagcggatttgctgccaaggagcaacaggcgccggagctggaagcggagatgctcccgcccgccgcggtgaagacggagccagtggtggatgggctcgacgacgaggtggtgcacaagatcaccaagcaggtggaatactattttagtgacatcaaccttgctactacagaacatctgatgagattcattaccaaggattctgagggatatgtgccaatatcagtaattgctggctttaagaaagtaaaaacttctgtgcgcaataatgtgatgcttgctgcggctctccgaacctcatcaaaacttgttgtaagcgatgacggtaagagagtcaaaaggcagcagccatttacagaatctgatttgcaggagctccagtcccggattgttgtagcagaaaatcttcctggtgatccctcctaccagaatcttaagaagatattttcagctgttggaagtttgatttcaatccgaacttgctatcctcagactccaaatggcactggtcctgcaactaatagatcttccaagttagatatgctttttgctaacaagctgcatgctttcgtggagtacgaaactcctgaggatgctgcgaaggctattttggagctcaatgatgagaaaaactggagaaatgggcttagagttcggttgctgaatacttgcacggtgaagggggcaggcaaaggaaaaaacggaatgaatgaaactgatggaaatagtgaggaggatgtctccactttgaaccattctaacgagaaacagtttgaacaatcctctcaactgttagatgtactgccggaacacttgtttgatgagaatttcaacaaggaagttcccaagcgcggcaaagggcgcggtcgcggtggcagagggcatgggcgtggcaaccatcaatataacaatcaccatcacaataaccagcaccaccagaacaaccagccgcagtacaataaccatggcaacaaccaccttggtgggaaccgtggcagccttcactctgttggaactacaccgcataacctgataaccaagcttgagccgcatccgcagctgcctattggggccaacaagcttccaccaggcccccgcatgcctgatggcaccaggggtttcaccatgggcagggggaagccacaggctgtgctacctgggttgtgtgctgttggtgttgagtgaggcatgcagattgctgctcgtatgcttgtattgtatatctttgtggtgggagtatttgtgcgtcacactttgtggacacggcgagctgtcaaaaccagtatattacaatcgctttgtaatcgtgtatctggcaatttggtcggttggcacgggtatgaatcaattttttttgaaatgagaacacaacaaactgtcaaaaccagtatattacaatcgctttgtaatcgtgtatctgggcaatttggtcgattgacacggggtatgaatcaattttttttgaattcagtatctatcatagaaaaggacaagcacactaaaatgtagcgtggtgatttagtctgccctcctgttgcgtcattttgttgtcat

SEQ ID NO: 112283 - DNA, 312 bp, Zea mays
  Clone ID: MRT4577_33890C.1
gggacccaacaacccttttatctcattttttttttcaaaactattaaaaacccctttgcgtataggacttttttcgatacaaaccaaacaaaacaaaaagccgccccgggtgaccgaacttttaaaaatgccaataccgaaaaccgagcgggttggctaggggccctccttaatgaaaatgtcccaatcctaacaagggccagctaaaaagggtaaaccatgttaaaaaggggcttagggcctggtcgatctggaagttttttttcctctttggccaaccccaacatgggcccaaggcaaatgacaacattt

SEQ ID NO: 112284 - DNA, 1085 bp, Zea mays
  Clone ID: MRT4577_33891C.1
cggacgcgtgggcttttgcgtttgcacaggccactccaccggttctcctattcttcctagcacaaaggggaggaagtaaagccttcccctcgccggagatgctgccgtcggcgaccggatagcctagaaggtgagcgggcgtggaaggagaaatccgggaagcgatgagctttagcgccgcaagagtctcggagcatggcggcgagttcgaggaggcaagggggatgccggcagaggtgagctgggagatgctcgacaagtcgcggttttttgtactcggcgccgcgctcttctctggcgtctccgcggcgctatatccggccgtcgtcctcaagacgcacctccaggttgctgcccccgcacaggccgcggcctcggcggcagcggcggcgattctccggcgcgacggtccccgagggttctaccgtggcttcggtgcgtccctcgcgggcacggtgcccgcgcgcgctctctatatggcggcgctcgaggccaccaagagcgtcgtgggctccgccgccctccgcctcggcgtcgcggaaccggccgcctcggctgccgcctcggccgcgggcggcgtctccgctgccgtagccgcgcaggtcgtctggaccccggtggacgtcgtcagccagcgtctcatgcttcagacggcgcccctcgctgccgcccgctaccgcggcggtaccgacgcgttccggaagatcctactcgcggacggcgtgcgcggcctgtaccgcggcttcggcatctcggtgctgacctacgcgccctccagtgccgcgtggtgggcctcctacgtgaccgcgcagcggctcctctggcgcgccgtcggccccgcggcgcacgacagccgcggcgccgcgatagccctgcagggtgcgagcgcggccgcggcgggaagcgcggcggcgctggtgacgatgccgctggacaccgtgaagacgcggctgcaggttatggacgctggggcgcaggcgccgacgcttgcggccgcggcgcgctgcgcttgttcgggagggaggttggtctgcatgctaccgtgggctcgggccgcggtgggcgatcatgtcgctgtctttggt

SEQ ID NO: 112285 - DNA, 466 bp, Zea mays
  Clone ID: MRT4577_33892C.1
ccgcggccaaggaaatttttcatcaggcagaggaccgggcctagcaggagttttttggccccacaagaccccatacattacaggaaaacggaaaccccaaccacggggttcggaaaaaataaggggcaaacgtaaccctaaagcaaagttccacaaaaataacttaaagctttgcacagggagggtcttggaggtatggcccgggtccaaaaccatctttaaatctgaaaccgcacaaagcctgacgttgggttaaacccacggggaaaattctgtttagttccaggccaccccccccttaaatactggggggcctttcatccttccaaacaggaacggggtggggggacctaaatttaccgagcactgaaaattccaaggctcccagggtaaacgggcccgatcccataaaaaggctctttgactaaaaccgccctttctctgggaaaaacaaggggaaaaccgc

SEQ ID NO: 112286 - DNA, 1145 bp, Zea mays
  Clone ID: MRT4577_33893C.1
ccctcgaggcctggccgaaaaggatttttcccacgcgtccgcggacgcgtgggccactccaccggttctcctattcttcctagcacaaaggggaggaagtaaagccttcccctcgccggagatgctgccgtcggcgaccgggtacactgccggcgacgtccactcggcacgcgagatgttccatcccttctacttctgacttcttgcgcacgcggcctctagtagatagtaattggacacttcatacttggattggatctctagatagcctagaaggtgagcgggcgtggaaggggaaatccgggaagcgatgagctttagcgccgcaagagtctcggagcatggcggcgagttcgaggaggcaagggggatgccggcagaggtgagctgggagatgctcgacaagtcgcggttttttgtactcggcgccgcgctcttctctggcgtctccgcggcgctatatccggccgtcgtcctcaagacgcacctccaggttgctgcccccgcacaggccgcggcctcggcggcagcggcggcgattctccggcgcgacggtccccgagggttctaccgtggcttcggtgcgtccctcgcgggcacggtgcccgcgcgcgctctctatatggcggcgctcgaggccaccaagagcgtcgtgggctccgccgccctccgcctcggcgtcgcagaaccggccgcctcggccgcggcgcgcgcgctagttcgggagggaggttgggctgcttgctaccgcgggctcgggccgcggtgggcgtccatgtcgctgtcttcggccaccatggtcaccgtctacgagttcttgaagaggctctcggccaaggaaggctccctctaagctctggatcaaagtgtatccatggatgatccttgtaagcatccatgtccaaatgcgaatatcctgcactgatctcttgatgggatgttaggaagcaagatttctgctgggtttgtctgttgatggcgatgatgatgaattttgtaaaataaagatttgtgtatatacttctaggaatattgttgtgggtctcattcctccatggtgcgaatgttggcaactgtggccactagaactgctggtgggcatttacgctttcgcgtgtaacaaagatcagaagatatttcgaggg

SEQ ID NO: 112287 - DNA, 381 bp, Zea mays
  unsure (1)..(381): unsure at all n locations
  Clone ID: MRT4577_33894C.1
gattttaaaaggagatctcctatatgtgcccatcacattgattacgagaacgactgtgactcggagcacatagaaacataactagttagtgtctacagtaatcatattaactagaatcacatcaacccgttactcatgcatgcttatgatattcataggcaaaccagntagtactatattgagaacacgtgttcggagagtgacgtaccaacatgccctgcatgagatggacaacataaccatgcagtgacagtgccgatgcgctgcgtgctatcctaccatacatttactgcagagcagtaggcgacgactggagaacatgagacgaagccgatgcattggttatggcctgatctgggctcttgaatgaaggccccgcag

SEQ ID NO: 112288 - DNA, 602 bp, Zea mays
  Clone ID: MRT4577_33895C.1
gccggccggtccgaagacggccgtatctctctcttgctctcactctaggagatcgagagaagggaggaggtcccaacactagcgccgccccggcggcgcatcatagatgctactggccgctcgcctctcctcgcgctcccgacagctatattcggttcgagccactttgttgcaatgcacgagtcactcaagctcgctcctttgccaaggatgcagttccagatgaccgccctcctgtcacggggagatctcctgaagggcatattctattgaggaagagaataagattgagacagctcttgttgctcttaaaaaggaaataatcactattgagccaaatgacccagcggcagtgttctcggtatgcccaagtcatgaagactgtatctggaaaaggagaatcttctctctgactctcatgggattagatataccgattgtgaccttcgccataggcatccctgatgcacggacttacttcgatactcttcaacagttcagaataaagagagctcttatagatcatcttgtaaatgaccctctgatgatggaagctcttgacaagattgagaacgacattcaggtaccactatagaggagcg

SEQ ID NO: 112289 - DNA, 433 bp, Zea mays
  unsure (1)..(433): unsure at all n locations
  Clone ID: MRT4577_33896C.1
tgtgatggatatctgncagattcgcccttagcagtggtacaacgcagagtaccgggcgcgctgcctcgccgtcgccgtcgccggagtataatacttttccagccgccagtataatacttctccatgcatccatatccatctagtattttttttctcttggtttcgtttttttttctttctttctttgtatctcatgatgagtatttgaacaaaaaaaaaaaaaaaaaaaaaaaaaaggactttgcgttgttccccctgtttaggggcgatttccagaccattggcggccgttcttgggggatccgagttcggtcccaacctgggagtaaccatggcataagctgtttcctgggggaaatggtaatccgttaacaatttcacacaaaatacaacccggaaccataaaggttaaagcttggggggcctaaggggg

SEQ ID NO: 112290 - DNA, 266 bp, Zea mays
  Clone ID: MRT4577_33897C.1
ctagaccagcagacttgcagataatcaccagttcataacacgagttcacaactagtacatagataataaagttcgggccatcaagccatcaaacctaggaacttcagtcttcaagttctaacagaccacagaccagacaacaactagatttcattaagaatcttcggccaaatccaaggccccaagatcttcaaacaatctttcttcaagttctggctcatcaagcgacagatcagcttgctcaagaaaatcagcatcaccctcaa

SEQ ID NO: 112291 - DNA, 886 bp, Zea mays
  Clone ID: MRT4577_33898C.1
ccggccgggatctccggccgtccaggcgccgccgtggtggtttccctccgggcccaccgtcccacgcacgctttattacctgccctgccccgcggtcgatccccggctccccgtcctcctccccgacgaagcgaatcgaccggccccaacgcgccgccgcccaacccagctcgccctccccgtccggccgccccccctcgccgtaatgtcaaggtcctgcgagccacgaaaaccggactggggtttccagctgaacccacacgccgctcccttcgttccgtcctcgacgcccagcttcgcattcgcagctgcatccgagacgctcaaccagacgaccggctcccagaacaagaccggcagcacgaccgacgacgaggccactcctgacaagtccgccgacgccgagtaccatctcccggactcgctgtctctggatttccacgcggagagcctgctggcaaagcccagcgtgtccgccgagcctctgtctctctccagagcggaggccgccgccgccgctgctgctacggcgcccgactcgtcggtacgtttgggcggtggttcgggtgttcatcacctccccggcgccgtgtcgtgtctctcccacatgttccccgacgtgtccgtcgacttcatcgtccacgcgctcaggctccaggacttcgacttcgattttaccgtcgacatgctttctcacttgtgtgaagcctatggttatggccattctgctgaatgacaagcgtcagtatcgaggcatccagaagccttctctaccaacttgcaagttcagctaaccgccgaccctcgtcagtcatgatattggatgtagctcctctgaaagaaaaaaagactgtatgtaccccactgagtaagaaactgttgctgc

SEQ ID NO: 112292 - DNA, 358 bp, Zea mays
  Clone ID: MRT4577_33899C.1
ctgtctgttggttctttttttctttgaaacaaagaacatgcgctccgggcgtgcaaaaggccggggcgccccccaaaaccggtctttttttttaaaaagggggcccgttaaaaccaaaccttggggggcccccttcccccaggggggggggggggccaatcttcccgggggggccctttttatcccgggggggcccccgaaccctttttcgggaatggggccccgggctcctgttttttctgcttatacccttaccggggccgtctttgttttggtccccaatgggccggtcccccccgacatcccatgggcaacttccccagaaaccttttttttttttgggaaaaattcccccaaa

SEQ ID NO: 112293 - DNA, 226 bp, Zea mays
  unsure (1)..(226): unsure at all n locations
  Clone ID: MRT4577_3389C.1
cacgcttacataagcgcgtaattcggctcttagccacgatcttttcaagacgaaaaaccgcagcccctagccaccttcgacacttttnagaatccccaaaccatccccgatggcgcaaggcaccgtgccctccgcagccggggccgggcagagcggctgcccctctgccacaccatctaacacacaacaacggtggcgcgctccttcttcaggttttacacagcca

SEQ ID NO: 112294 - DNA, 992 bp, Zea mays
  unsure (1)..(992): unsure at all n locations
  Clone ID: MRT4577_338C.1
ggtcaaaccaaacacgatataactttttaacccaaatttccttccgtatggttcgacaagcatctgtcactttttcacttttgcatctccaatgctgctgcttccagcaaagtgtacataccagtagcatatctatatccgtttgcttttgttttttcaaaaaaatgaaaaagaaaaagaaaaaagactagaaatatcatttctgctacctccaagttatatccagagaaatttggcaggttatattagggtcatcctaaccaatttgacaagttttctttgcgaaatcaccgtgctctctcttctcgcttcagtgatctcatgatagatcatcccgcatgcacgcatatggcttcgttctcacggacaaaatcaagctagggcggggctaggagcagatcctgggcgtgtacggctgccagcagatccggtcgaggacaacgacgaacgccatgaccaaggcgcagtccgcgcccggctggaccacgaggctgaacacgtcgtcgcccagcagcgccgtcgcagccccggcattcttcctcgtgatcctggccacctcctcgccgccgccgccgcggatcttgcagcttctcctcgcgaagcagccctcgacccagaagctgccgcagccgctgccgcacggtccagacatggacacttgcgcttcgtggcctttctgcagaagcgagcatttcctcatggagaagagccgtctgcgtggccttgtcctcttgccctcgccttcttctgacgctgttgctgcgtagcagttccattggtcgtgcatgctgaaaatctgtnnagagagagagagagagagagagagagagagagagagagagagagagagagaggaaggatgtatagcatcagtcggtatagtgtgaatttgcagtacgtcccttcttaaagtactggcgctgctggatttgctgtaacgagtggtggtggggtcacttggtctgaatccaatatttgcaggacaataagcg

SEQ ID NO: 112295 - DNA, 200 bp, Zea mays
  Clone ID: MRT4577_33900C.1
cccatgcgtccggttcgctcgtgtcttcgtctgcgtcgttcgctcacagagactgcgggagggcccaaacaatgagcgagcgctgatgatccatggaccagctccgccatttgggcgatggcctcctcggcatccacactctcatggccgtctacgacgatctccgcatcaacccgcgacaacgccgcatcctcgtagac

SEQ ID NO: 112296 - DNA, 249 bp, Zea mays
  Clone ID: MRT4577_33902C.1
aaaaaagcaatacatcattgtctgcaactacacagatttttctgcatacgcgcattgtgtggaagggggagcaggaagaccgaccacaacggccatctcaacctagatacacggtacaactatcgcttgcaccgtctgtcgctggactgtttaccttctgcacatacttaccgttgacaaccgagtctaccacatgggctgcttccgctgtcacctctgttaggacaccctcaagcttgccaactacaa

SEQ ID NO: 112297 - DNA, 114 bp, Zea mays
  Clone ID: MRT4577_33905C.1
gattgggtttgtgattatctaaggagcaccatccttctaatggtggcccttaggtgtttaaaaaacgcacgggataatggaacttcggcgatgcacaggagatacaatttatga

SEQ ID NO: 112298 - DNA, 597 bp, Zea mays
  Clone ID: MRT4577_33906C.1
gccggccgggttcgcggcctcacactcccatacacacaccacctctcgccgagcctttcgccatctcttctcgcaccaagaacccccagtctcccgactgacacttgttaaactattgcagaggaatgatggtgagttctttcactcatcacaaatcccaggcttgactcattatgcttgctgatcacctgctcagtcgaatttacatcctgtataccaagcattccaagagatgactaggatgatgacaattccaagtccgctgttccccctcactagaatatacacgaactgaagctcgttaaccacattcatgcgctctcgagaattagcggaattactgcacatgcacaatgcgagatcgatgtaatctatacagttccatccgacccaactccacatgatgctgatccacctatcccaagtgctataacacacgatcactatgatgctgaccactatggcgagaataccaaaaatcagaagaaagctgatgaagaccgcgttgaagatgtcaacgtttctgcaaataacaaagaatctgagaagtcctcacctatacttgcatgcgcaacacatgcgacagattagactgac

SEQ ID NO: 112299 - DNA, 634 bp, Zea mays
  Clone ID: MRT4577_33907C.1
gccgagtatgatgccaccaatgatgatgccgagcatggtgtcaccaatgattatgccgaccctgatgctgcagcaactgttggcctcaccgcttcagcagtgccagatgccaatgatgatgccgggtatgatgccaccgatgacgatgatgccgatgccgagtatgatgccatcgatgatggtgccgactatgatgtcaccaatgacgatggctagtatgatgccgccgatgatgatgccaagcatgatttcaccaatgacgatgccgagtatgatgccttcgatgataatgccgaccatgatgtcaccaatgattatgccgagtatgatgccaccaatgatgatgccgagcatggtgtcaccaatgatgatgccaaacatgatgacagtgccacaatgttactctggttctatctcacacattatacaacaacaacaattaccattcatgttcagccccacagccatggcgatcccacccatgttcttacagcagccctttgttggtgctgcattctagatataagcatttgtgttgtacccaaggcatacattgtttaggaataaaacaaaacgaaaaaaaaaaaaaaaaaagcggcctggcccgggcgcacggccaaggggcaggtacaag

SEQ ID NO: 112300 - DNA, 338 bp, Zea mays
  Clone ID: MRT4577_33909C.1
aacgccatttatggcatgaactgtatggagctggacggccgtatcatcaccgagaactaggtcgattcctgttttagccgtgtaggtgtcggctgcagcttgtactgataaaaccaacaatgcggggcatacggaagaatccggcgctgagatttcggtacaggctaccgcggacattgtggctaccgttttgtttgtgaggtactaattggtaatccacgcgaatacgatttgtggttaagtgccagccgctatgggaacttcgacggtaacttattaaactgagcggtggggcccccactgccaatttatgctgatcgataccgagatggttaccc

SEQ ID NO: 112301 - DNA, 426 bp, Zea mays
  Clone ID: MRT4577_3390C.1
caaaagagttacccggggggtggattcaaattggccgttcactgacaaaagacacagggccaaattttttgacaatccccagtttttggaaaccaccccttcccgttttataataaccaagggccgcgggggtttacaaccccctggggtttttttgttgggaaaccatattggaaagaaagggccgccttcattttcaccttagaaccacgggctttttaatgggggagtaaaaaaaaccgctttttaaaaaatgggggctttcctcctctttttggggattcggtaaggttacaggggttcccctgcggggaaacctagcttttgcccttaatggacatcattttgggatcccgccataactttcgcaaagttcccccggaatcagttttatggacacgcaatgggcatcccgaagaggccaaa

SEQ ID NO: 112302 - DNA, 194 bp, Zea mays
  unsure (1)..(194): unsure at all n locations
  Clone ID: MRT4577_33910C.1
tagggaaagcttcacgcctgcaagtacctgnccgcctttcccttgtccacccattctttcttcctcaagccaaaaccctatcaggaagacctcttaaacaaaggaggagacccctnctcttccacttcatactactattacatctaaattcacattatctattcttattaacctccacaaccttttattttttt

SEQ ID NO: 112303 - DNA, 631 bp, Zea mays
  Clone ID: MRT4577_33911C.1
gctcttgcaatctgtttgctatcgagtttctcctaactcctgggattttctgatggtacaggttgattactgaaatattttctttaatattctactccataccttccaaattataaattgttttagatacacagatcttgttatgcacctagatatatataatatatttacaatttcgaatggaggtagtaaaacattgaatatttcctcatttcctaaacaagaccggagagctgtcatatgttagaagtaaaagttatgtcttatccacgtgtgcacaattgaaatggtatgctttacgtagttggtttacatgaaaaaattgtattaatgacaaggctagatttgtgatcaagttatatttcctttttaatgtcattgtttattataatccacatcatatttcgtattttaccgttaacatctctcttcagttacagatgatgcaatatgtaaagataggcttcagcatatgagacaacatagagattagaatttctacatgtgtaaagtcagcaaggactttgtaattgatgcagcttttacagaacacgcttctcgcttttttaaccacagttgtcaacctaactgtcggctggagaaatggaatcagagggtctgctttgggccc

SEQ ID NO: 112304 - DNA, 777 bp, Zea mays
  Clone ID: MRT4577_33912C.1
aattcgcagccgccgcgaaatccgcacccacccgcgcgacctctactgccgcaaggccgcagccgccgcgaaatttgcacccacccgcgcgccgcagccctttgtccgcgccggagcctagcaccgaaccgccgcggattcgccactacatcaccggccatggcttcgggcatgccacccgcgccctcgaggtccgccgccgctctctccgcccgcttgcagcttgcctgcctggtgccggcgcgtactgtttcctgaccccatcgtctccaggtggtgaggcacctggtcaccgcagggcacgacgtgcacgtggtcatcgccgcgcccgagttcgtcttcaccaccgagatcgcctcccccagcctctccgacaagctcgcgtccccgtccacatccgagatgctcgcgcccgcgccttggatggaagcccagaatcgccttccatcgaggattctacaccacgcgtcgcgccccctccccgcacgcaagcccccgcctgcacattctccgccaccccatcccctgtccggcgcgtgtgccacggcctccctcgaccagcggcacgcgtacgccatcaccccctccctactgctcccatccgcggtgctcaccttcgccatcgcgcaatccatcaaggtcctcaccacctggtataaggagaaccggtgggacgcgaagcagctggtgggctccggtgggatggcgtcctcgcactcagccaccgtcacagcgctcgctgtcgccgtcggcctgtaagaggggctcgccagctcg

SEQ ID NO: 112305 - DNA, 305 bp, Zea mays
  Clone ID: MRT4577_33913C.1
gaataattgtttcatattctaaaaaaaagaaatacaaaattaaataaatagaattacaaaaaaaatatataaaataaggaaagagaggcggctcggcggggggattcatgggttccacgcctagggtgccgggcctcctctgttgtatggtttctccgaggttccctaagttgccctgcctgtcccctctttaccaccgggggaactggggcgaccccgtagtttcccactcttgttcgctcatggtcctcttgcccctttggtcagttagggtatggcctacagggcccgccccgtccgccctg

SEQ ID NO: 112306 - DNA, 371 bp, Zea mays
  Clone ID: MRT4577_33914C.1
accgaaccccaacttttaaaaagcaaggtttgggacggcctggttccccacaacattacaaccgggggaaccccgtggggcccccgctcatgggaaaatgataccatcgggtttgggtcatccaaatttttaacgggccctattaagtggtgaacccggtggagcattagcaaccctgccagggagcattagttcctgaaccaactgaagcatgggccagcccaaaattcttatttggggccttgggtggggggggtttaacccccaccttggtttccccttgtgatgacaggaacattgccggactggttttcccccctcaccttggtaaaaatgggggggaagccctcacccgggggggggaatttttt

SEQ ID NO: 112307 - DNA, 392 bp, Zea mays
  Clone ID: MRT4577_33915C.1
ctcacggccgtagacctggtcaccaacacgctgaacgtaacgattccaccttccaaaacgatgacggtgtgaacgctaagctccgtggaccaacacactattgctctccatagagcaccaccctgcatgttcctcatactccccacctatgtggcgagtaaagccaggagggtagcactgcaccaccctgtgacactcattgcgaaacaaccaccgaaacaaaatcccatggtagatcaagttgccaccaactgatccagaaactactcaccaatgatgaatatgggagacttggcgtgaacacagaccctatggctacggaacttgtttttctgcacccagtgactagactgctccgaccgcagtgatctattctattaacacgctgtgct

SEQ ID NO: 112308 - DNA, 542 bp, Zea mays
  unsure (1)..(542): unsure at all n locations
  Clone ID: MRT4577_33916C.1
ggtacctcgagggcggccgggngatgctccaggagatgtatgtaataattttgggcagtgaaatgtaatgagcatagcgtctaaaaaaaaaaaaaaaaaaaaaaaaaaaaaatactcccaaacccccgcttccagaaccttctcgaagctccccgccgcctcctccactcgcaccgatggcgaaggaaccaatgcgcgtgctcgtaactggcgccgcaggacaaattgaatatgacctggttcccatgattgctaggggtgttatgcttggggcagaccaacctgatattctgaaaataattgacattccgcaaggaactgaagaccttaatggtgaaaagatggagntggatgatgatggcgttcctcttctgaagggaaatgtggctaaaactgaagttggggaagactgcactgaggtaaatgagaacaaataagcatgaaagaataaacaacaaaaaaaaaaatggaaaaggaaaaaatgcaatgtaacaaaaacagttatctaacataaaaaaacaaaaaaatctagcaaatagaaa

SEQ ID NO: 112309 - DNA, 371 bp, Zea mays
  Clone ID: MRT4577_33917C.1
ctttttctctatatacaaacgcaccacacactaggggacgggttgtatttgaggaggtcatctcagcactcaccacctttaagaacttcatcacaaaaagcaggagggggacccagagggggcttggacttcaagccgtccccccacccaccttgatgggcaagacacagtcggaactaaaaaaaaggacgcccgcccaacaatgaggcagcggcgggccacaaacacttacagactaagggaaagcccccccggttagcacaaatcgggaaaggggaggaggaacaaagccccccccttgatgtagtaaaaaaaaaaaggggggataagaggaaaaaaaatggggggtccaggatgagaaaccccccccc

SEQ ID NO: 112310 - DNA, 322 bp, Zea mays
  Clone ID: MRT4577_33918C.1
aaaggggcccatggacttcatcctttttataaataatgtggaccaacacccacatctttgataaaaacaaaaaacttgacttccaccctaccgcttgggggactctaatgggtggactatatcgccattcttataaaacacccattccttggaccgaaccaactggggccatcaaaatgctaagtgccaagaacaggctgctgccacacagcctttcatcatctggtgtcaggtggaatcagtaccagaaataaaaaattttgccacacccaagaggttttccggtttaaccataggcaaattcccaatacgaggtcaattt

SEQ ID NO: 112311 - DNA, 640 bp, Zea mays
  unsure (1)..(640): unsure at all n locations
  Clone ID: MRT4577_33919C.1
gtggnaaattctgaagcttatgcagcaattccacagtccagtaatctgtaatgtacagtcacaggtgataatggacctgtggnaaattctgaagctatatgcagcaattccttcaaaaaaaaaaaaaaaaaaaaaaaaaaaaaaaaaaaaaaaaaaaaaaaaaaaaaaaaaaaatgggggggggggggaaaaaaaaaaaaaacaaatcaaaaagaaaaacgcttctattgtgcgggcttgtctgcttcttctggttcgtttttttccaccgtccttaattttaaaaaccctggggtttccaaacttaaccgtgttaaaacactggcgtttttcgccttttttggtttttgccaaatggccttttccgcccgtcctttcttttttttggcctctttcctgtcggattggcctcggtctgtcggtctcttttccctttgggtctttttgttgttctgcgcctttttccctgtcccttgtttgtttcctctcccccgctcctttcccctttgttggtccctttcctcccttcctttgctttccttccttttcttttttttttttgggggttgttttttgtgggtcgcttttgtttttgtttcccgtcctttcttcttgccttttctttgtttggggtgttgtt

SEQ ID NO: 112312 - DNA, 447 bp, Zea mays
  Clone ID: MRT4577_3391C.1
ccggccgggaagggccaggggcaggccgagcgcgtccgcgtgcggctcggctcctcgtgctccgcgactcgtagtgccatccagacagagacgctataagtggagcagcgcgacggcctggtgactcgccacacgtactgttccgtcgacgacaaggcggaggagcccggccggcatggaggggcgcgcgagctcacgtcgcggcgtgctgctgttcttgctcgtcggcgtggcttcgggcaatcctgacggtgagattttcgattccgcaagctgctgctactcccatgccgactacgtgttctttgcataacatgcacattggtgagaatcgatgaggtagcattacgtctatgtattcaactcttgtcgccatgcatgtattattagcctctgcttcaaagttcaaacacattggcaaaaaaaaaaaaaaaaaaggggcggaac

SEQ ID NO: 112313 - DNA, 461 bp, Zea mays
  Clone ID: MRT4577_33920C.1
gagtggaggggttccgatcggatcggggtaaaggcttccacgagctctcgtctcgactgccgccgaccgcccgagatggtgatccgccgtgggtcctcctgcgacgtcctcgccctgctcgcgctcgactccgacgccggcgtcaagggcgacccttctcctagcagacaaagtccagatcatggtcgtcaacgaccccgttatcaccaccaaggacatgacctagatgatctggtaggacaccggacacgcacactggaaaaacggtgacatcatgctcaaggacgacaatacgctgctctttggagaaaaggcagtaaccgatttcggcgtcaggaaccctgatgagataccgggacagagaagctggtgctcgattacgctgtgaagtatgcagcagaagtttgatgtggaggggagggtacgtgatgatgtttggaggggatgttaaaaagaggaaa

SEQ ID NO: 112314 - DNA, 393 bp, Zea mays
  unsure (1)..(393): unsure at all n locations
  Clone ID: MRT4577_33921C.1
cacgcgtntgctcactcttncgtcaactagcaaatcagaaagcacaatagtgtaccaacaatggcagccaagggtattgctctcttatgctccttggtctttctgcatgtgctgttacagctaccatttttccgcaatgctctcaagctactatagcttcctctctttccccgtaccttttaccagcggtgacttttgtatgtgaaaacccaattcttcaaccttacaggatccaacatgtaatcacagttgtcatctcacctatatcacccttgattcttcaacatttatcatccctattacattagaaacctttggtgtcatctattggcacaataacatcatggggtactaacatctatctacaactttgttgcttaataaaacctttga

SEQ ID NO: 112315 - DNA, 364 bp, Zea mays
  Clone ID: MRT4577_33922C.1
acgagtttgagggccccattccggttgaactcggggaatgccggacactcgtgagggtgcggctgcagagcaacaggttgtctggcccagtgccaccaagattttggggattgcccaacgtgggcctgcttgagattcgcgagaatgcgctctcagggtcggttgatcctgccatttctggtgccaagagcctatccaagctgcttctacaggacaaccggttcacaggcactctacctgccgagcttgggaccttggaaaacctgcaagagttcaaggcttccaacaatggtttcaccggacccatacctcggtcgatagtcaacctttcgatactctacaatcttgatctgagcaacaattc

SEQ ID NO: 112316 - DNA, 264 bp, Zea mays
  Clone ID: MRT4577_33923C.1
gctagaagtagctgttagtgttattggttacgaactctgaaattagaagcttgcatggcttatctcctctccttttcattcctggtaagatcgatgtctggagtttaaggaccaacagggtctctttatctccatcttccatcgatccagctgaatatctgtatttggatttattctctgaaattttcagagttccatcttatgtgccaacttgatttctggacatgacttaccattttttgttggtacagttttctcaaactg

SEQ ID NO: 112317 - DNA, 533 bp, Zea mays
  Clone ID: MRT4577_33924C.1
aagtcgatcgagtatacaacaaaacagaaaaatccttgacctcccatcgcaggcagagtgatctagtatcacccgcaccgctcgcacgctaggcaagatcgaccaactcactcactcaccatggaactctccttggcctcatcccttcccctcctcctcctccctctcctccctcttctctactttctctacctgcggccggaccccaagaagcagcctcgtgggcatggcctcaaggtctaccccatcctcggcacgctgccgcacttcgtcaagaaccaggaccgcttcctcgagtggtacaccggcgtcatgcagggcagccccacgcacaccctcgccttcaaggtgcccggccccaccggcggcgccatcaccgccgacccggcatgcgtcgagcacatactcaaggctaactttgggaattaccccaagggcgagctctcggtctccatgctcgaggacttcctcggccacggcatcttcaactccgacggcgagcagtggctgtggcagcgcaaggccgccagcta

SEQ ID NO: 112318 - DNA, 814 bp, Zea mays
  unsure (1)..(814): unsure at all n locations
  Clone ID: MRT4577_33925C.1
ccggccgggccgggagatttgcccccctctgcctgcctgcttctactacctgctgacacggcggtgcgggtcgtgctcggtggacgccagggggctacccctacccgggatccaggatcgtgctgtctgctcgccctctcctgctccttcaatcccatcggagatccgtgctggcgtttcctcccacatatattgaagctcatgcagctcctattctcaaacccagtttcagcgcccaattgtttggtttgaagaaatcaagttcagatgggctccattctaagtgctactagtactacggctaagtctatggatcagcatgaggcatctggaacagatcctaataagagggtgaagatatctacttatgagtatgggtcaaacccaaggataattccaactcttcctgatgagctctcactccagatcctggcaaggtcaccacggatccattaccttaacttgaagctggtttgccgagcctggaaggcagcaatcatcggctatgaactttcccagctgaggagagagcttggtgtaagtgaggaatgggtgtatgtactgaccaaggctgaggcatacaagctccattggtatgccctggatccagtgtttcagaaatggcagaggttgccaccgatgccttctttcgtcaatcaggaggaatccaatcggacagcatcttcggcgttctggatgtggaatgttgtgggatcaagcattaggattgctgattacgtgaggggcttattttggcgcaggaacagtttggaccagtgccccttttgcgggttgntcagtgggtgttgctgat

SEQ ID NO: 112319 - DNA, 1949 bp, Zea mays
  Clone ID: MRT4577_33926C.1
cctcgaggccggccgggatggttctcaaagacgtgtccaccaaccggccacctcccccgctgccggctcgcccctctctgcgccgtgctcagatttgcccccctctgcctgcctgcttctactacctgctgacacggcggtgcgggtcgtgctcggtggacgccagggggctacccctacccgggatccaggatcgtgctgtctgctcgccctctcctgctccttcaatcccatcggagatccgtgctggcgtttcctccctttcagcgcccaattgtttggtttgaagaaatcaagttcagatgggctccattctaagtgctactagtactacggctaagtctatggatcagcatgaggcatctggaacagatcctaataagagggtgaagatatctacttatgagtatgggtcaaacccaaggataattccaactcttcctgatgagctctcactccagatcctggcaaggtcaccacggatccattaccttaacttgaagctggtttgccgagcctggaaggcagcaatcatcggctatgaactttcccagctgaggagagagcttggtgtaagtgaggaatgggtgtatgtactgaccaaggctgaggcatacaagctccattggtatgccctggatccagtgtttcagaaatggcagaggttgccaccgatgccttctttcgtcaatcaggaggaatccaatcggacagcatcttcggcgttctggatgtggaatgttgtgggatcaagcattaggattgctgattacgtgaggggcttgttttggcgcaggaacagtttggaccagatgcccttttgcggttgttcagtgggtgttgctgatggttacttgtatgtcattggcggtttttccaaagctgttgccctgaatcgcgtttgtagatacgacccttttctcaatttgtggcaggaagtgagcccaatgatgactgggcgggctttctgcaaggcggcatttttgaatggcaagttatatgtagttggtggagtcagcaggggtcggaatggcttgcttcccctgcgttcagctgaggcgttcgaccctaaaactggattgtggagcgacctaccagaaatgcctttcgcaagagcgcaggtactccccactgctttcttggtcgatgtgctgaagcctatcgccacaggaatggcaccctacaagggaaagctgtatgtccctcagagcctgtactcatggccattcttttttgacattggaggtgagatctacgacccagatctgaatgcctggtcaacgatgccggatggtctcggcgatggatggccagccagacaggcaggcacaaagttgggtgttgtgatcgatgacagactttacacgctagagccttccagctctttggacagtggtaagataaaaagatacgactccgaggaggacgcatgggtaactatcaccccacaagttccagttaatgatttcactggtgcagaggccccttatttactcgctggcctcggtggaaggctccatgttataacaaaggcggcgaacaacactcttcaagttatgcaggctgtggtgcagaataactcggtatctgaagaaaatgtggtatggacaacagtggcttctaggaactttgggacggctgagcttgtcagctgccaggttctagatgtttaaaatgtgggtcgcaagttacgctttgtagaggatatagtatgccatagaccaacgatttagccaagaaaaatattacatagtttttgctttgtgtgtgtgtggaacaagagttcaatttgacgtggagggagatcaattacagatattcagatatgtataactgtataagctaactcatttgctgggacactgtgtatagacatacgatcgacgtgttaatgtacagtgctcaattctagtttcctttttttgagaaaaatccccctgacccggtat

SEQ ID NO: 112320 - DNA, 277 bp, Zea mays
  Clone ID: MRT4577_33927C.1
gcgccacgcgtccgcaaacagtctgatccaagatcagaatttaaagcgaataatttcaggtgcgggtgggctacaaatgtatggggacgttctcacttctgcgcctgctttgaggaagtgtttgtcttatgagcttgctgtggtggcttattctaatgatgttgctggttatatgttcactgatgctgtgctttatcatgttcttggttagaaagcattttataaatttgtgaagtggttcatctctcttcgtttttcataccatttttcttgatct

SEQ ID NO: 112321 - DNA, 2198 bp, Zea mays
  Clone ID: MRT4577_33928C.1
ccgggacctctctgcgccgtgctcagatttgcccccctctgcctgcctgcttctactacctgctgacacggcggtgcgggtcgtgctcggtggacgccagggggctacccctacccgggatccaggatcgtgctgtctgctcgccctctcctgctccttcaatcccatcggagatccgtgctggcgtttcctcccgatgtgttcattttcaagtattttatcgctttgccagaaatcttttttatgatgacttaaaatgtctgtagtatattaatcacaatttttagacttgtgctccgtcactacatatgccagacatatattgaagctcatgcagctcctattctcaaacccagtttcagcgcccaattgtttggtttgaagaaatcaagttcagatgggctccattctaagtgctactagtactacggctaagtctatggatcagcatgaggcatctggaacagatcctaataagagggtgaagatatctacttatgagtatgggtcaaacccaaggataattccaactcttcctgatgagctctcactccagatcccggcaaggtcaccacggatccattaccttaacttgaagctggtttgccgagcctggaaggcagcaatcatcggctatgaactttcccagctgaggagagagcttggtgtaagtgaggaatgggtgtatgtactgaccaaggctgaggcatacaagctccattggtatgccctggatccagtgtttcagaaatggcagaggttgccaccgatgccttctttcgtcaatcaggaggaatccaatcggacagcatcttcggcgttctggatgtggaatgttgtgggatcaagcattaggattgctgattacgtgaggggcttattttggcgcaggaacagtttggaccagatgcccttttgcggttgttcagtgggtgttgctgatggttacttgtatgtcattggcggtttttccaaagctgttgccctgaatcgcgtttgtagatacgacccttttctcaatttgtggcaggaagtgagcccaatgatgactgggcgggctttctgcaaggcggcatttttgaatggcaagttatatgtagttggtggagtcagcaggggtcggaatggcttgcttcccctgcgttcagctgaggcgttcgaccctaaaactggattgtggagcgacctaccagaaatgcccttcgcaagagcgcaggtactccccactgctttcttggtcgatgtgctgaagcctatcgccacaggaatggcaccctacaagggaaagctgtatgtccctcagagcctgtactcatggccattcttttttgacattggaggtgagatctacgacccagatctgaatgcctggtcaacgatgccggatggtctcggcgatggatggccagccagacaggcaggcacaaagttgggtgttgtgatcgatgacagactttacacgctagagccttccagctctttggacagtggtaagataaaaagatacgactccgagggggacgcatgggtaactatcaccccacaagttccagttaatgatttcactggtgcagaggccccttatttactcgctggcctcggtgggaggctccatgttataacaaaggcggcgaacaacactcttcaagttatgcaggctgtggtgcagaataactcggtatctgaagaaaatgtggtatggacaacagtggcttctaggaactttgggacggctgagcttgtcagctgccaggttctagatgtttaaaatgtgggtcgcaagttacgctttgtagaggatatagtatgccatagaccaacgatttagccaagaaaaatattacatagtttttgctttgtgtgtgtgtggaacaagagttcaatttgacgtggagggagatcaattacagatattcagatatgtataactgtataagctaactcatttactgggaccctgtgtatagacaaacgatcgactgccgagtgccatttctttgagccaagacgcgtcagcgtgccaaatgcaacggacgccctggcttgtgtacagtgcggtgaactgtgtgcgtgcacattgtttgttcttcacttattggtgtgaggcccccgtatttgttgggggcggtaaaagtaatctatttccaatagcttctccaaatggagcggtagaagacaatacattgtttcatttctgc

SEQ ID NO: 112322 - DNA, 179 bp, Zea mays
  Clone ID: MRT4577_33929C.1
ggacgggtgcggcggccagtcttcgtcttcatcgtgacccacgacggagaggacagagagagagagcgagaggcctggctcagggaggaagacgtctcacctcgcctcgtctcgttttcttctgcggcgtccgttcttcaagccctcccccgtcgcccaccagtagcccgcccgccagc

SEQ ID NO: 112323 - DNA, 171 bp, Zea mays
  Clone ID: MRT4577_3392C.1
gcagaagtagcctcttttttacgtcttgtttcaccaccacaacggcgacgcgaatagagaagggcagtggaggcagcaatcctccgccgccaccgcaccacatggaggacatccaactggaggggaagaagcccgtcaagaacccctttgtgcccatcggcgcacaggtta

SEQ ID NO: 112324 - DNA, 581 bp, Zea mays
  Clone ID: MRT4577_33930C.1
gttcttctccgtccgcctgcgctccagccgtgcccttctcgtcgccactaccggcctcgagctctccagccaccgacaaccggaggcggcgccatgtctcagaacaacccctcccagctcctcccctcagagctgatcgaccggtgcatcggatccaagatttgggtgatcatgaagggagacaaggagctcgtcggcaccctctgcgggttcgacgtctacgtcaacatggtcctcgaggacgtcactgagtatgagtataccgccgagggccggcgcattacgaaacatgatcagatcctcctcaatggcaacaacatagccatcttagttcctggtggttcaccgccagatgctgcatgagctagcaagtacttctggaggatatctgtttgaggctaaacgagacgcggtgaagtctgaaccttgtattgtgaaagcgctagatatttcttggtcaaatgtgctttcctctgtatggaacctactgagctgaaagatgcacctgcgattgctgcacttgtatgacttggcattcggcaatgctaattgcgacatgtctctagtcgctgtttatgtgc

SEQ ID NO: 112325 - DNA, 164 bp, Zea mays
  Clone ID: MRT4577_33931C.1
caagatcaaacttagggcaggtttgacggtattcatgctcctaacacaaggggaggttatctcggtggcgcgtaaccaaaacgctcatgacaaacaccaggcccttcctccgcaaatgcttaaacagattggagccgtgggctgtctgcactctctgattaaac

SEQ ID NO: 112326 - DNA, 1037 bp, Zea mays
  Clone ID: MRT4577_33932C.1
ctcgctcgcagtcgcagcaagccgggaacaacacgagcagggggaggggaagaagaggagacctaccataccatagattcggagccagatactcaatcagtatcctgtaccattaccaccaggcgcgcaccaggttaccaaaatctcgtgtggagggaaatggcgcccagcagctacgaggtggcggcttccatcctcctctgcgccgaggacagcagcagcatcctggacctcgaagcggaggccgaggaggaagcgctactggcgcggagcggggagcccggcggcggcgcggagttccccgtgccgtccgaggaatgcgtcgccggtttcctggagtctgaggcagcgcacatgccgcgggaggactacgccgagaggctgcgcagcggggggatggatctccgcgtccggacggacgccatcgactggatttggaaggttcacacgtgctacggtttcggccctctcactgcctgcttggccgtcaactacctggaccgcttcctctcgctctaccagcttccggaaggcaaggcttggatgacacagctgctgtccgtggcgtgcttgtccctggccgccaagatggaggagacctacgtcccttcgtccctggacctgcaggccggggacgcgcggtacgtgttcgaggcgaagacgatccagaggatggagctcctggtcctcagcacgctcaagtggaggatgcaagcggtcacccccttgtcgtacgtcgactacttcctccaccggctccgaggcggcgccgcgccgagcagacgcgccgtcctccgatccgcggagctcatcctgtgcatcgccagagggacgcactgcttggatttcaggccctcggagatcgccttggccgtcgccgccaccgtggccggcgaagagcgcgccgtggacatcgacagggccttcacccaccgtgtacataaggagagggtgtcgcgatgcctcgaagcgatccagcaggccaccgccaccatggccctgccgcagccgctgaaaagtgaaggcccgagcagcca

SEQ ID NO: 112327 - DNA, 159 bp, Zea mays
  Clone ID: MRT4577_33933C.1
gggggttagatttgtttttatgggaccttttttactttaggggacggcaaaacaaatttgacggccacataggaaatagtaatttattatacattaggcgtaccattttatgatgggtgtgggaaaacgaaattaaaggggggcacaaaccttagtttt

SEQ ID NO: 112328 - DNA, 746 bp, Zea mays
  unsure (1)..(746): unsure at all n locations
  Clone ID: MRT4577_33934C.1
cattccattccgatcggtctgacggcgttgctgctaattcggcacgagggggacgcactgcttggatttcaggccctcggagatcgccttggccgtcgccgccaccgtggccggcgaagagcgcgccgtggacatcgacagggccttcacccaccgtgtagataaggtacgcgtcgtgcctgcctcagcgttctcgctagctttgtcgtcggattcgatcggctagcgtctttcatcaatgcagcgcatgcagtccgttagcgtttaccgcatgcaatgcatcgaagccgtaggtttgcggccgtccttgacttgcctgtgcagctactagccactagggcacacctgccgaagcgcgtgtgagccgcatttacaacagccacggcgatttaataatgccttgttgctttgcgctccgctgcatactgcggctgcaggagagggtgtcgcgatgcctcgaagcgatccagcaggccaccgccaccatggccctgccgcagccgctgaaaagtgaaggcccgagcagcagcggccgccgactcctcgtcttcctcggccaccgtgccgcggagcccacncggggtgctggacgctggctgcctgagctacaggagagccngcgccgccgncgccttgcacgcgagctccagctggcgcgacgaggacgacgacgactgccccccggctgtctgcagcagagggaggaagattagcagatgattaaagccaatgatggacggatgaaa

SEQ ID NO: 112329 - DNA, 216 bp, Zea mays
  Clone ID: MRT4577_33935C.1
ctcgaggccggccgggacctcacctccctcctcgtcatcgatatcctcctacccgcatccagaggggttacttctcctaccgcgtggaatgagtcagagaacaggtatggccgctacgcggaagctgagatgcggcctcctgctcctccgaggccacctctcatcctccgaatcggcggccgctgctcagagtttcgagggccttcgcgtcgcatg

SEQ ID NO: 112330 - DNA, 321 bp, Zea mays
  Clone ID: MRT4577_33936C.1
cccacgcgttcgcccacgcgttcgagagcgaaaggggagcactctcatctatccagcaaaagagatcgacacgcgagtaatagtgcccaccgtcagccgccgtggtgaccaccatcattgttgcccgcgccatgatcacgagccataatgttatagtgcttccttcgttgacgacgagcgagagggtgcggtgcaactactccaaggatgccaagaacgcggccccagtcagcaccaagggcgcaggcgcgttgctgctcgccgcagcgggcgcggtgaccgcgtcggcggggccccggctggcgctcgtggacgagcgca

SEQ ID NO: 112331 - DNA, 351 bp, Zea mays
  Clone ID: MRT4577_33938C.1
cccccaacaacatgttctttccccccggagtgtcccaaatatgcatagccccaggcggtgtttgacagggtaatcacctcactggtgaggggcgggaatccctccttgagggtggcctggtcaccactgcctatggattccggcccgtcccacctcaccaggcagttctcttcatacgacgggcaacacatccacgctctcgctcgaattccagaacgctggccgcattatgtccaggtgccgggtataccccttcaggcgctttcttcgacgccgggtggtccccgtcgaacacctggcggatttccttgaaagtgatgcccaacttcttcttcagctcacgctcgatgc

SEQ ID NO: 112332 - DNA, 174 bp, Zea mays
  Clone ID: MRT4577_33939C.1
agttgcaaaaaaaagaccttaggggtagttttggaacccatttttttcaaaaggaatcatgttctagctcttaaaaggatacaaggcccttggcattgaggttaccagacttgccgtagttggggaacctccattggtccacaacttgtgccgaacaatgcaggaccagggggt

SEQ ID NO: 112333 - DNA, 315 bp, Zea mays
  Clone ID: MRT4577_3393C.1
gtcattcgttcatgacctctaacaccataatcgccggaatggccataatttccatgatcacgtggactaccaatgccaggactccttaatgctagctcgcaactgacactggcatgttcacattaaggttgcacctgatgccattgtcaatctctgtgaggacgcggatgtggaagcacgcgcgcttatacgaaaatgtgaaggagccagaagctactgtctcatttcatccataacaggctcatgggtaggccgaacaacacgtatccaatgccgcgacctgtaacacggcggcatcaaccgatgatactacct

SEQ ID NO: 112334 - DNA, 127 bp, Zea mays
  Clone ID: MRT4577_33940C.1
tcgggctcctcgttactaacgtttaactttatccaccagacccaaagaaattgtgctatcaaattttacaccgctcatctgatgtttgccaccgatccatgtgtagcatattgttagatgcgaggac

SEQ ID NO: 112335 - DNA, 691 bp, Zea mays
  unsure (1)..(691): unsure at all n locations
  Clone ID: MRT4577_33941C.1
acaatctcttccgtcaacttggattgagacatatatttgttgttcctaggccttctcgtgttgtaggattgataaccagaaaagatttattacttggggaggataacaacaatgtgatggcggagctccaatcgacgagtgggggcttgctgaacggcaaaatgctcgggggtaatatacatctggaacgtcctcttcttgacaacctagttattgaatagacacgtagcagcatgtatgtcaaaataattttgatagctagcagttaaccttgcactgcatgttgggacatggcccatgggtattatacttcacatgaatgatgaagcagcagtgagcggataatgcagcatggttttggattctgccgactgttgcgcatggatgttggcgttgcgcatcattttttgctccgtcagcagtggctagggaggcgattccccggtgccgtgtgtttagaactttagattaggtgattgtaacttacaaaggcgtccatacatacacaccatccatgtatcccacggaaaatttcgaagactatgtataagtacatatttgttatacgatggtaaagacaatagctatgtaagatttgcgtgctctcatgaaactaggatacgtggctataattacttccggttccccctgannannncaccagnnccgggnntgnggnccnnntcccgcg

SEQ ID NO: 112336 - DNA, 330 bp, Zea mays
  Clone ID: MRT4577_33942C.1
tcagatcatatgttaggtaggttatcactctttttcatcatcttcgatttggagcgcttggtccatacacaacgggagctaccattcttggtcttcacgatcgacacgcaccaccgtaagtgcactgcacactttccgagcctggactttcacgagcgcaattgctacctaaatgtcatgctcaccgtcatcattcatgatcctgccccaaacccaactattgccaaaatcgccttccgttaacctatcagatacaataagcatatccagctattgatagcctgccagggactctacacctgtcacatcatataatgctgcaacaaggcc

SEQ ID NO: 112337 - DNA, 389 bp, Zea mays
  unsure (1)..(389): unsure at all n locations
  Clone ID: MRT4577_33943C.1
cattcattcattcaatcaatcaaacaaaaatacaaatgcttatttgcgtgacattacattggcctgctacagagcagtccataaaactatatatcatcgatggatcaatatcgcttggcgatttattttgagcgtgcaaaaacanttagcttggaaaaatcccaaattaatgggggtgtgtatagtttcgtccatttntatgcccatcaaaantgattgttgcacgcggctagccngtggcgacgatcatcggcttgngttgaatgcnccgcagcgggtgattggagtgcgtgcttgaagctgcaggaggggtgccggacttgttgcggttgggggtgggcgtgttggtcttgtctttggcgggggggttgttgtgtgcgggggtggcc

SEQ ID NO: 112338 - DNA, 383 bp, Zea mays
  Clone ID: MRT4577_33944C.1
ggcgcgggatttccacacgactccctttcgcgtctgcgtgcctgagtgtggatgcaggcaagcggttggcctccgtccgagcatcctcttctggcgaggagctcccccacgccagccgctcgctctcttccacggtcctctgattcgttgcccctcctccgatatcccccaatccgaccaaaccggcagagccggggtgcggagagggagctgcgacctccgctcctcagatgggagcaggtatctttcaaacgcaaggcggcaattgagcaccctcaatcttagatcaagggcagagcctgctcgctgtctcaatggagatgggctttgtcctgctactacatcacttgggaccgcggacgccactacgaggagcacaccac

SEQ ID NO: 112339 - DNA, 170 bp, Zea mays
  Clone ID: MRT4577_33945C.1
ggtcggcccacgcgtctacggtaactcgtattaatgcgtcggatctgagtcgacatctagcgtcgcatcatctttcacttcacagagagtcgtttactggagtttctactgggaggagactagtacttcatagtcctcagcctgtgcatgatcccgttcgtgatccaggt

SEQ ID NO: 112340 - DNA, 354 bp, Zea mays
  Clone ID: MRT4577_33946C.1
ctgctcacgcgtccggttcaacacagaatggggtgtgttatccggcctttggctgacacactgggcaggcgtaatgtcgagaagaggaatcaccgcatactccagagagaggaagatctcacgcacgaagagaagaacatctctgagcagcgacccaagaccatgcgtgagactgttatcgaaagggtccataaccgaggacgcatggatgaagctacaaacgaggacgatgaaatgatgaacaaagatcagacagcagacgtccatgctgaactgcccccagagggtcagataaaactgggcacacttcatacaattggcaaccatggggcaccagcaaaagagggcgatgaa

SEQ ID NO: 112341 - DNA, 2128 bp, Zea mays
  Clone ID: MRT4577_33947C.1
tccagcctcccacctccagcattccaaacctcagatcccccgcacgccgcgcctccgaaattccgaaacccaaatcagagcgccgcccccggcccccgctgcacgcaccgggcgggggcccatgcggccgcgcggctccgcgcccgcgccacaccgttggaaccgagcgggcgcgctagatgcctgagcccggcggccgctgcctcggcgacctcggcggtcagcgccaggtgctcaagggctggcctgacctgtggctggtgggggacaagcccggcctccgcgcgctctccaccgcggccatggccgccgcgccccagccgccgccgctcgaggccgaccaaaccctagcgctcccggacgtgcttctcctccgcgtcctcgcctgcctccctgagccccagctcacgggcgccgcctcgctcgtctgcaggcggtggacgcgcctcgcggggcgcctgcgccgccgcctcgccgtgcgggactgggccttcgtcgcgcaccgactgccataccgcttcccggacctggccgacctcgacctgttcccggcctctatcgccgcgcccaccacggcggtgccccacggcgccgctgcctccccgcttctcacctgcggcgcggtctcgctaaccctagacaccagcgcagacccgccgctcggcgcctgccggttcatcgacgacgacgcgctcgaccggggactcgccgccgtcgccgctagcttccccaacctcagccgcctctcggccaccgccgcctctgagtccggcgggctcatggccatcgctgtcggatgcccgacgcttcaggagctcgagctccaccgctgcaccgacctcgccctccgcccggtttccgccttcgcgcacctccagatcctccgcattgtcgccgcgtcccccgcgctctacggcaccgctgagggcggcggcgtcactgacatcggcctcaccatcctggcccatggatgcaagcggctggtcaagctggagcttcagggttgcgaggggagctacgacggcatcgcggctgtggggcgctgctgtgcgatgcttgaggagctcaccatcgctgaccacaggatggacggtgggtggcttgccgcgctagccttctgtgggaacctcaagaccctgcggctgcagagttgcagtaggatcgacgacgaccctggcccagcggaacaccttggtgcttgtctcacgctcgagagcctgcagctgcatcggtgccagctgcgtgaccgtagcgccctccacgccctctttttggtctgtgagggagcccgtgagatacagttccagaattgctgggggcttgaagatgatatgtttgccttggctggcctatgcaggagagtaaaaatcctgttgttagaagggtgctcactattaacaactcgaggtctagaatcggtgataacctcatggggcgacctccagagtctagaagttgttacctgcaacaaaatcaaggatgaggaaataactcctacccttgcagagcttttctccaatctcaaagagctgaagtggcggcccgacaacaagtcacttcttgctgcaagcctcgttggcactgggatgggaaagaagggcagggtatttttcaaaagggtatgaagtctgatcaccttggtgctccattccctgtgatgcgcttcacctgttatctgccctgtaaggattgtcctctcttgcagcttatcttacctgcccatcaacgaatcaaagggaaggtgctcaacaattcagcaggtgttgctgcttagttggattgctagtcgaaactaggctaccgcacaaagttcctagttcttgacttgatcaaagtcaaccacgtttcttgatactcaaaagccgtacacaatgtggcatctgttcttccacttaagaccaaggacagtcataactagtcagaacctggtagtttgatgatgcacagtttcgggtaccaggcgcctgatttgtgtttgtacctgtgttcatgtgttgtaactgacaagctgaggtttgctcagaggagcctgaccgtagtatttctgtatgaggaaaagcattgcttcataaattatggcagagttaaattatggatagaaccagtagaaccacatgtttacagcacg

SEQ ID NO: 112342 - DNA, 388 bp, Zea mays
  unsure (1)..(388): unsure at all n locations
  Clone ID: MRT4577_33948C.1
nagacagcggaggtggcgatcgtgcaccgccttggggcaaccaanacagagctcctcgccctcgcattccttctggtcgccctcgccgccgccgtggccgccgcggcgacagaggtggtagacgcggcgccggcaccagcgaggacgaggacgacgactgcggggtgccggcgcggcgacctggtggtgcgacagtgcgcgactgtgcgtgtggtggaggggaagtatggtacgtggtgaaagtgggaaacgtgtgcttaggaagaaggtgatgcttggtgttattgtgaggtatggtaaggaatggggatgaaaggatggtgtntagatgtagtttgaagagaatgttggagtgattgtgaacttaaaggagagatgaaaggttttg

SEQ ID NO: 112343 - DNA, 302 bp, Zea mays
  Clone ID: MRT4577_33949C.1
cccacaccccccgcgctttccgcaccaccaatctatcttcgctcactacagtgaccagagcgcgagagctaactagagggccgcgcaaatgcccatcaatacgatcgccctgcggagccaccatgacgtgtaccaccccggcgcactccaagaggggtgcgagcggttgcatgacctatctggcgtagcagacgcagcagcagcatgcgatggctaactttagggaccacatgcagcggatccgcagtagaaacgcctacattcaatctgctccacatcaagaagctcaacctgctacactt

SEQ ID NO: 112344 - DNA, 298 bp, Zea mays
  Clone ID: MRT4577_3394C.1
gccctgcgcaggaggcgatggttctgggtcgtatgctctctctctctccaccttgtactagtgttgccatgacagcatggcttttgtagtttgcatttaacctggggatttctgcatcctgtcagagggtgggtccccacgtgtggaaaagagacagcgtggcttgctgccaggctcaggccaggcctggacagctctcactcttcttaagccagaactaccgaccagccggccggctgtgggcacattactctggctgctggatcctcttccagcatggcatgtggcctgtgtgagg

SEQ ID NO: 112345 - DNA, 408 bp, Zea mays
  Clone ID: MRT4577_33950C.1
cgcacacacacggcatgagcatatgaccgcacatggcacggaccgggcgggtagtgataatgctgatcataccagagctcgtgcttttcggcgtgcaccctgcgcatggtggctccgcggaggatggtacgaagtgctccctggtagctgctactacgagtgcgtgcagatcgtactgatcaccgatatggtgaactgcatcatggcgatcttcgaggacaaggtcatcgaagccctgcatctggcgctcgtgctctagctcgacgcggacaactcatacgacaacacgatctcttggctgcatgggacgctcaagtgtctggtcaacaccgtggaaagttgcgacatcaacgtctggaaggatttggattggcatcacagcatcatctactgcgacaacgacctgat

SEQ ID NO: 112346 - DNA, 252 bp, Zea mays
  Clone ID: MRT4577_33951C.1
atgaaaaatatcaattttttgggtcccttaaatgctcaacctataaatatggccctaaaccaaaatctcaaacaactttttttcaacagggaaatgattggtggggaaaggaaattttgcattacaaaggccaatgggcttttttttttaaccacataatgtgttccctttagaatttctaacccggccattccatttttttaaaaaacaatttttccccaaccctttttttttagggggggggttcaaatt

SEQ ID NO: 112347 - DNA, 359 bp, Zea mays
  Clone ID: MRT4577_33952C.1
gctgcataggatgtgtatcttgtggatgaagcagctgatgtcgcaatatcctctctgcgaccggcagatgcccgggacaggtacctctttacaagtttatattggctcacattcgatggcgagcgaggcatatgatgacacgtttatctgcctctgatccttcacaatcccccacttctctggagactccactagaaggcgaggaagctgaggatggctaagccattggccctgaggatgaaatggaaacagtgtatctcggaaatggaagtgctgaggaggacaaatatgtagcaaaatgtaatgaacagccaaattgatgaactgaggatgagcgcttgcaaaatactgatgggatt

SEQ ID NO: 112348 - DNA, 295 bp, Zea mays
  unsure (1)..(295): unsure at all n locations
  Clone ID: MRT4577_33953C.1
atcaatcattcaaaacagttttatcattaggttggcataatgttttgtacaagctactcagatcactggatattgatgccaacataatgcatctaattgaatgattgatctatactatgttcgagaattcaaaccttcggaggggaggacaatcagccggaagaaaacacactggcgtacaagctcctggcgcgggcactcgtacaacactgttgttcaaacataacatcagtagatagggttcaatgtatgttagggttcataaaggacatcngtttacttcaaaaacaaaagc

SEQ ID NO: 112349 - DNA, 400 bp, Zea mays
  Clone ID: MRT4577_33954C.1
ttttaagtttaatcttcaaacttcataaggattcaagccgtacggctgcataaaagtttttgggcacaacacacaggacacaacatgttcattaaaccaacgaagccactaccaccactcatgacacacaaaccacagatgtttattagacaaccacatccatatggaggtacaccacagggctccagacgacgcagatgccaaaggacagtatttgttaaaatgacccttgttttactgaccaccagggaggcgttcccccagggggaaagggctccccttttaataaaaaagggggggggggggctttcttcctccagctgcttgccaaaaaaaaacagactcttctgttttggggggatgccctctttgcccagaaaacccccccccacggggcccc

SEQ ID NO: 112350 - DNA, 163 bp, Zea mays
  Clone ID: MRT4577_33955C.1
atgagacaaatcttctctcctgggggaggggcggcagctcgatcattgaatagcaacacttgctacggggaacaagaatactcgaagatgctaatcgcactcaatcatcggtgctggtacaagcttggcccagcagtggccaccaaaccatcttatctacctc

SEQ ID NO: 112351 - DNA, 512 bp, Zea mays
  Clone ID: MRT4577_33956C.1
aattcggcacgagggccgggagggacagccagcagccaagccatggacctctgccccccgcgcctgcaataataccacccctcgccgacgccgccaccatgggcaagaaggcgtggctcaccgccgtcaagcgcgccttccgctcgccctctaaggacgacagcagcagccccgccaggaaggcgtcgcgcctccgcgaggacgccgacggcgaagacgacaaggggaagcgggagcggcggagatggctgttccggaggtcctcgtccccgtcgccggccccggcaccacccgcgccggcccccgcggccgtgacggaggagcagcggcacgccatcgcgctggccgtggcgaccgcggccacggccgaggcggcggtggccacggcgcaggcggcagccgaggtggtccgcctcacgcgccccggcggcacgccgccgcccccagcttcgcgcgccgcgaccaccacgccgccgtcgccatccagaccgccttccgcggctacctcgccc

SEQ ID NO: 112352 - DNA, 623 bp, Zea mays
  unsure (1)..(623): unsure at all n locations
  Clone ID: MRT4577_33957C.1
ttcttcctcaaacaggctacatcgccgaacaaacaaccaccgcctccccgatcatcggccagaggaagacccatgccgataccttgcgcatactttcgatggcgaaccaccatcccacacgaagcccgagagccaagaacccttcgacaaaggaaacgccaacatccaaagaccccgaagggataccaagcccaccggcaacaagtgattttctgcgggaaacacctggaggatggacgcagccttgaagaatataacaaacaagaggaagatacgctcgcacacgtacatcatgtacctncttcgaggatcatgtaagcaccgtcgcatgcaggatattggctctctcgtacaaggcacatgccacatcgtgatgtccttcatgatatacatctttgaaaactaggggtggcaactgcccaaactggaagcgtgaccacagaaacctactgttacgccccaagaggaccaagaactgcatgcgcctctgctaccccggttcatgtcgccaagcacgtcggctgctagaccacgatagccgacacatgtatctatgctcctatgcagccgatgggacgtgcactcaactcctcttcctgaagtagtacataccatgacgggct

SEQ ID NO: 112353 - DNA, 470 bp, Zea mays
  Clone ID: MRT4577_33958C.1
ctcatcactggtcggccctccgctgcaaccatcaccccccattcgcgccctcgctcccacggccatcgccgtcgccgtcgccgggcgccatgggcttgagcgacatcctggcggcgctctactcctgcctcccggagaccccgtcctctcccgtcgcctccctccccgccgtcacctctgacgacggcggggaggaccgcatcagcgcgctcccggacgacatcctgcgcggcgtcgtctcccgcctccccgccaaggacgccgcccgcaccgccgcgctctccccgcgctggcgcggcctctggcgctccaccccgctcgtcctcgaggacatccacctcctcatccggccgtcgggccagcgaggcgggttcgagttcgactcgagcgcccttgccggcgccgtctcgcgcgtcctcgcctcccacccgggccccttccactgggtacacatctccagcaactgcatg

SEQ ID NO: 112354 - DNA, 222 bp, Zea mays
  unsure (1)..(222): unsure at all n locations
  Clone ID: MRT4577_33959C.1
gctcctcatagggccgccgccctttnnataattttttttnccgccaagcaatctttgggggggtttttttgctattttttgtcttacaaccacaaggtaacgcgatttgttatacatctaacaagccttcaaaactgtgggtgacatgggacaaacatccgctggaactatgggcacccacaacagaacacacccttactgcgtctgctgccattttttttt

SEQ ID NO: 112355 - DNA, 557 bp, Zea mays
  Clone ID: MRT4577_3395C.1
atgcctgcgaggggcgcggcaccgtcgcgcatcaccacttctcgtacgcagggcattcccacccatctcctccaccgcgcgatcaagctccgaaacgcacgcagccgatggcacggacttgatcatgccctccgctgtgacatccttatgccagttgaaaagaacataggaggaggtgatgacgttcccaacaccctctttggagaaatagaagatgctgactgcgagaccccgggatgtttgtcgtgaacaagcagcctcttgcccgcgatcaccagaagacagctgcctcactgctggctctatccaccgtgacgattgcatgagcggtaaataccatgcagtcacacagctgtggcggcgaggactcacagcattgattcagaaaacgaagacccaggcctagatatactatccagtgttaccgacgactgtaatgaacgaaaaggccacaacgtcttcaacgccggatgcaggaggaacattctctgccactgaggcactcctcctaaatgacctgacatttcgctacgacactgacaccgatgtagctatca

SEQ ID NO: 112356 - DNA, 996 bp, Zea mays
  Clone ID: MRT4577_33960C.1
gacctgtggacagtatcctactaaaggtgtgtagctcaatttccctttctagtaaatccattctgtaaacaagaaatagtgtaccaatcaaacatttactccctaagtgtcatactttgtagcacacgtgccttgtttggtagggctcttctgaggagctgaaacaagagccagagaggagcagatgaggccttagtaccaatatgaaagtctaagcagaacctaaatgtgtcataccaatcttcttatacctataaattcttttgcttgtcttaatggcatgctcgccaacaaaatattggtttactctgttgctattgtgcaattgcaggcttcagacttcaagtatccccccagcccacagaggcataatgttttgagctcagagagatctagcaaccacaatttggtggagtcaacaatggagaagcgtagaacgagccctgctcctgcatacaataacaccaagcagaacaacagcaacaactattccagtatttcatcgtcagcaccagctagagcaatacgggagcaaaagaacactcttttggattctgagaagctagactcagctaggaagaggcttcaggaaaactaccaggaagcgcaaaacgcgaaaaagcagaggacgatacaagtgatggatatccacgacataccgaagccgaagaacaggaacaccttcgtgcgcaagagcggcggcagcgccggattcccggcaaagcaccggtgatctctgcctgaccgccgtcggacctgtaccggactcagcgtatttatttctgtactagcaaaaagaaaaaagaaagaaagaaattttaagaagcaaactcttgttttcccagtttgatttgtagccctgcagtccagctcactgatattataaggatatatactgcctagtccatgaggctacgcttttgtacctctctttaagattggagaacagaaggaaagcaaattgtgttattattcaatgacattcacattcctgcc

SEQ ID NO: 112357 - DNA, 3927 bp, Zea mays
  Clone ID: MRT4577_33961C.1
tttttttttttttttttttgcacgcgctgcccctgccatccgtagtagcggcactgcagcagggcagggcgagcgccatgtgcaaacacagtgcgccactcgagtcgacagcgaaatggcagggaaacttgtttatagatcactaaaacaagtactactactacgagtaataagagttcgttcattcgttcattacagatcactgtacacttgcttgcctcttttactcccatccttgggtgctgcctcaaatcaaatgcctcaacgacaacgaggaggagagcaagacgagaggtatggaggaacggaaccatgatttgaggatccttcactgcggtttcgccggaggcgacccgctggtctcgccgccgccgccgccgagaccagactccaagtcgccgtcttcattctgcggctgctgctgctgctgctgctgcgccggcgggggcgcggccgtggcgccgccgcagccaagcagtcgccgtagggcggcaacactggccgcctccacgaccgccgcgactccggcgatgggccctgctgctgcaaccggctgcgacggcgcggcgccggcgccccgggtgctgacggcgccgtcctgggagccgaagaagaggacgttggtggggaagttgggcgagtccgggtccgcctcgggcgcccgcggcgcggcgtcgtcgccggcgaccgcgcggcggcggcacagcgggcaggtggagtgggagcgcagccacatgtcgacgcactccacgtggaacgcgtggccgcagcggggcagcacccgcgcggcctcccccgcggccagctcgccgatgcacacggcgcagtccccgcccgccgccgccgcctcctccctcggcagcgccgcgatggcggcctcgtccagcccgccgtggcaccccgcgccgcccgcgaacacgaagcggggccgggccctgtcgccgccgatggtcggggcggccccgcggtaccgcttcgcgcacaggaagaggtagaagcagatgacgaaggtgatgaagatggctgccgccgccgccagcatcgtcgccgccgctgccaccgaggttcccgtcaccgccatcgggggctccggctccagatcccttgtcttcctgctcctcgtccaaggaagcagcctgttccccagctttcttggctagtagcactgttcttggccgcggtggagaccggcggcgcgctctgagattgggagtagcgactagcttagctagtggctcgtgccgaattcggcacgagtaccgatccagccggcgagatggacatcgtggtgggtgcgctgtcgggcatagtggacgcgttgccggggaagctcggcgagctgctggagcaggagtatgcgctgctctccggcgtccgcggggatgtcatcttcctcaaggatgagctatcaagcatgcgcgccgccatccactactgcgagtccctcgaccaccacgactcccagaccactggatggatcagcctcgtccgcgaggtcgcctacgacatcgaggactgggttgacctcttcagcatccgcgtccacggcggtgcccaatccacttccgggtttcgtgcctggcttagccgcagcgtggacaagttaacggcgctccccgctcgccacaccatcgcgagcgagctccagggactcaaggagcgcgttcttgagattagccggcagcggaaccgctacaggctgggccaaatggttggcaccacctcgcaacatccccatgatcccagactttctgcgctcttcgtcgaccccggccgcctcgtcggcttcgatgggaaggtggaggacgtgtccaagactgtcatggacgccggaggtagtaatgggctgagaatcgtctccattgtcgggatggccggctcagggaagacgacgctcgcaaatgctgtgtaccggcgtctccaagcagacaacaccttccagtgctctgctttcgtctccatcggaccgaagccggacatggtgaagacagtcaaggatatgctctcaagactcggcgacggccaccgaggaggcgaggacattagccaactcatcccgagggtcagaggaatactggagaagaaaaggtacctcgcttggatcgatgatatatggagtagtgaacaatggggagtaataaggtgttgttttccagacaacagtcttggtagtaggataatcaccacatcaaggaatgatgcgttgcccaccaatcatcattacggttcaagcaaatttgtctacaagatcggcctccttactgacaatgaagccagggagttgtttctgaagaaagctttcagcagccggaatgactgtccacaacatctggtggatgcttttaccaaggttctgagaaggtgtgctggcttgccacttgctgtggttagcgtagctgccaagttagcacacaagcaatcaagagaagaatgggagaagcatggattgaacttgctatacagctcacattcagatgggtcagatgggctgaagcaaatactccatcttagctacagcgatctacagccacaactcaggtcatgtttgctgtacctgagcatatttcctgagaactcagaggttgagacagatcgcctagtgaggcgatggattgccgaaggactcatcgctgcaagcaatgaggatacggcaatcagttccctcaatgagctaattgggagaaacttggtacaaccgttggatctgaaccatgatagtatcccaaggtgttgcagagtccacccagtgatatatgatttcattgtttgcatgtcgatgcaagacaactttgccactgtaacggatgctcaacatgtcccaatcaacaacaaaactgtccgtcggctgtccctgaatttgaagagcaacagcaagcaagatcagcctgcagcacgaaatgagactactgatttgtctcatgctcgctcagtcactgtcttcggtcacgctagtgccacccctcatctgactgatctgaaagtggtgcgtgtgctggatctcgaaggctgcaaaggtcctgtgtgcttggatggcctatgcaagctggtgctgctgaggtacctgagcctcagaggcactgatgtcagtgaactgccagcggcaattggggatctaaggtgcttggagacacttgatgtgaggtcaacgaaggtggaagagcttcctcccagtattgtaaggctgcaaaagctaatgcatttgcttgctgggagtgccaagctgcctgacgggatggataagatgaaagccctgcggtcattgtcatgcgctgctaccacaaagagctctgccaacgtcgtggaagagctcagcaagcaccataacttgagacaactggaactgtattactatgctactgaaacgcctgggaatgagaagcaaatcaagttccccgctgatgggctccagactgtgaaacaactgtgcatccggtgcacatcaccatcggtgacatttgagccccgtgtactgccaaaggtccaagcacttgtcctgagattcgagaaaggccgtgctgatgacacgattggcgtgtctggcttagagcatctgtcgagcctcaagcatttggtacttgagtttgagcagcatgatgcgggtgccatggcgacagttactgcagtgaggatggctgctgaggggctccatctagatcatcaatatataactctaaaggtggatgggaaaaagtactgaggctatcttcagcaaaggcgtgtatataaacgtagaaagcactgttttacaattttttgtttaaccgtgcagtgctatgtaagctactaactttgcgctggtgcggatgctgatttccctccccctagctttttgtgaggctactctacagcttgattcagcttgctaataatgtttgcctctggacataaaaaaaaaaaaaaatagtctgatctgtcttcagctcgtgc

SEQ ID NO: 112358 - DNA, 302 bp, Zea mays
  Clone ID: MRT4577_33962C.1
catgacgtcttcctccaaggaggatcttggaggcggcgcgtacgggtctgccgcggccgtcgcattcgtcggggtggagcaaagccggctggtgttcttggggtagggcgccaggtacagcttcgacctgaaggaacttgtgcgcacgtcggcctatgatctgggcaaagggagcgtgaggacgtcctatacagcggtgctggatgaaggcaccaccgtggaacgtgaagcggctcaaggactgggcagatcagcggcgctagttctacgcccacatggatgctgtcggaagggtggagcac

SEQ ID NO: 112359 - DNA, 368 bp, Zea mays
  Clone ID: MRT4577_33963C.1
gtaaaggccccattggtacaaaaagagctttacacatgttctggggtgccaatggctacaagaccccgaacaattagctccgcgcgaggcacacatcttctggtcaatgcctgacgaaagatcttatactgcactgccatatggggaccgacataggagctttatgaacttaggctgtcagattccctgatgatgggcgtccctaaaccaagtgaacacacgctgggtccactctcctgcgcgaggctttggtaacacatttggagggcttgcctggatgggtttcatgctgatagcggcaggggctgcggggagaacatcggggggagcacaaagacgatcgggatgacattgatgccctaccgtcc

SEQ ID NO: 112360 - DNA, 594 bp, Zea mays
  Clone ID: MRT4577_33964C.1
tcgagcggccgcccgggcaggtacccatatcaaaaaaaaaaaaaaaaaaaaaaaaaaaaaaaaaaaaaaaaaaaaaaaaaaaaaaaaaaaaaaaaaaaaaaaaaaaaaaaaaaaaaaaaaaaaaaaaaaaaggtttccctggggccggaacccccctagggggaatttttgaaaatttccttcacccggggggccgttggaccttgcttttagggggcccaattccccctatgggggggggtttaaaaattcacgggccggggtttaaaaacgtggggacgggaaaaacccgggggttcccaaattaaatcgcttggaagaaaatccccttttcgccagtgggggtaataccaaaaaggcccgccccgatcgcctttccaaaaagtggcccaccctgaagggcaaagggcccccccctgtaggggccctttaagcgcggggggggggggggttacccccagggggaccgttacattggccagggccttagggcccgttcttttggtttttttcccttcttttttcgccacgttggccggttttccccgtaaagctttaaatggggggctccttttagggtcccaatttagggtt

SEQ ID NO: 112361 - DNA, 629 bp, Zea mays
  Clone ID: MRT4577_33965C.1
gggtacctcgaggccggccggggaggcccccgacagcgaactcgggactcgccaaccgagaaggaagaactagtcgcgaggtgaagaggagaacctgaggtggtcccgaatcagagacggaagaaggtgggttcaggagcaagccagcctgccgccgccatgaggcgcacctcgaagaaatcgtcgtcgtctacggcgaccgccagcgctggccctactaaagcagtttccaaggaagtagaacggattgatcaatttttctatacttacgctgataactcatctggcatgattgacccagaaggcattgaaacactctgttctcaccttgaagttccccacactgatgttaggattctaatgttagcatggaaaatgggctgtgataagcaaggttattttaccttggatgaatggagaactggcttgaaagctcttcgagctgacagttctattcctgtggtgaagttgtcatccaaaatgtaattttcaagaatgtaggtgactatatcattgtttgcgtttgtaagacatcaattttggaccacccacatgtatatacttcggcagtagtgcaaactcactgataactccaaaaaaaaagaaaaaaaaaaaaaaaaaaagcggcc

SEQ ID NO: 112362 - DNA, 1161 bp, Zea mays
  Clone ID: MRT4577_33966C.1
tgcgccgctcgagccggccgggttcggccactcgtcattggctcgaggccggccggggggaaaaatcgaatgcccctccgtcttcctcccttttgttctcccacaacgaactcggggctcgcacccagaagggagagaactcgtcgcgacgaggagagaagaacctgaggtggtcccgaatcagacgcagaagagggtgggttcaggagcaagccagcctgccgccaccatgaggcgcgcctcgaagaaatccttgtcgtctgccgcgaccgctagcgctggccctactaaagcagtttccaaggaagtagaacggattgatcaatttttctatacttatgccgataactcatctgtcatgattgacccagaaggcattgaaacactctgttctcaccttgaagttccccacaccgacgttaggattctaatgttagcatggaaaatgggctgtgagaagcaaggttattttaccttggatgaatggagagctggtttgaaagctcttcgagcagacagcatcagtaaactgaagaaagcatttcctgaactggttcaagaggttacaaggccgtcaaatttccaggatttctacatatatgcatttcgttattgcctcacagaggataagaagaagtgtatagaaataccagttgcttgtgagttgctgaatctagtattaggcttgcagttccgccctcaggttgacaagcttagtaattacctcaagtaccaaaatgactacaaggtgataaacatggatcagtggatgggatttatgcggttctgtaatgagataaacttcccatcacttgacaattatgattcagaccttgcttggcctttgattctaggcaattttgttgagtggctaagagaaaataaaagctagatcttctattcatgtggtggtgaagttgtcattcaaaatgtaatattcaagaatgtaggtgactatatatatcattgtttacatttgtaagaccattttttgcccacctacttgtatatactgtcagtaatgcaaacttaggctccaataaacctactatttcacctcttattttaatctccactctgtaaatagtgtacagtgcaaaacaatattttgtacaatcatatgccccccccccctcccccccttccccccccttccccccc

SEQ ID NO: 112363 - DNA, 1264 bp, Zea mays
  Clone ID: MRT4577_33967C.1
aaaaaaaaaaaaaaaaaaaaaaaaaaaaaaaaatcgaatgcccctccgtcttcctccccttttgtcatgcgtccgcgaactcggggctcgcacccagaagggagagaactcgtcgcgacgaggagagaagaacctgaggtggtcccgaatcagacgcggaagagggtgggttcaggagcaagccagcctgccgccaccatgaggcgcgcctcgaagaaatccttgtcgtctgccgcgaccgctagcgctggtgcggaacaagtaaatgaaaaacaaaacagaaaaagaaaaggagtcagtacaaacctgaccagcaggaaagcacaacgtggccctactaaagcagtttccaaggaagtagaacggattgatcaatttttctatacttatgccgataactcatctgtcatgattgacccagaaggcattgaaacactctgttctcaccttgaagttccccacaccgactttaggattctaatgttagcatggaaaatgggctgtgagaagcaaggttattttaccttggatgaatggagagctggtttgaaagctcttcgagcagacagcatcagtaaactgaagaaagcatttcctgaactggttcaagaggttacaaggccgtcaaatttccaggatttctacatatatgcatttcgttattgcctcacagaggataagaagaagtgtatagaaataccagttgcttgtgagttgctgaatctagtattaggcttgcagttccgccctcaggttgacaagcttagtaattacctcaagtaccaaaatgactacaaggtgataaacatggatcagtggatgggatttatgcggttctgtaatgagataaacttcccatcacttgacaattatgattcagaccttgcttggcctttgattctagacaattttgttgagtggctaagagaaaataaaagctagatcttctattcatgtggtggtgaagttgtcattcaaaatgtaatattcaagaattttctgcaccctggaggatgccgattcggcttgtttccggttgcttcggtggaggctgctcccagaaaatttaaagccttctcatgtcatcttttgattttgcatatttttaaaactggaaacggtctgcatctgtctgtaaaatttgtatcaggatgctatatttaatggccatgtcatgttaatcagtcttggtagagttttaagatcttgcaagttgcaaatatttccatagattataaataaaaagaaattaactggcgagttc

SEQ ID NO: 112364 - DNA, 1086 bp, Zea mays
  Clone ID: MRT4577_33968C.1
cattgggtacctcgaggccggccgggcccccccgagggttctactcatccttccccgtctagtcttccactcttcctccccttctctccggctcccccgaggcccccgacagcgaactcgggactcgccaaccgagaaggaagaactagtcgcgaggtgaagaggagaacctgaggtggtcccgaatcagagacggaagaaggtgggttcaggagcaagccagcctgccgccgccatgaggcgcacctcgaagaaatcgtcgtcgtctacggcgaccgccagcgctggccctactaaagcagtttccaaggaagtagaacggattgatcaatttttctatacttacgctgataactcatctggcatgattgacccagaaggcattgaaacactctgttctcaccttgaagttccccacactgatgttaggattctaatgttagcatggaaaatgggctgtgataagcaaggttattttaccttggatgaatggagaactggcttgaaagctcttcgagctgacagtattagtaaactgaagaaagcatttccagaactggtccaagaggttacaaggccatccaatttccaggatttctacatatatgcatttcgttattgcctcacagaggataagaagaaatgtatagaaataccagttgcttgtgagttgctgaatctagtattaggcttgcagttccgccctcaggttgacaagcttaataattacctcatgtaccaaaatgactacaaggtgataacaatggaccagtggatgggatttattcgtttctgtaatgagataaacttcccatcgcttgacaattatgattcagaccttgcctggcctttgattctagacaattttgttgagtggctacgagaaaataaaagctagatattctattcctgtggtgaagttgtcatccaaaatgtaattttcaagaatgtaggtgactatatcattgtttgcgtttgtaagacatcaattttggaccacccacatgtatatactggcagtagtgcaaactcactgataacccccttaccgaattttgtgtttagtagcaaattaggaaaaaaaaa

SEQ ID NO: 112365 - DNA, 1288 bp, Zea mays
  Clone ID: MRT4577_33969C.1
aacgaatccggattccggacacgcctcagcggttctcgtagtctcgcacccaccgctccatcgtctccatccacgcgcccgcgcgcggcccggcaacgggagccaaggaaaccgaagccccgatggcgagcttcttccgggacgcgcgcctcccgcagcagcgcgtcgtcgagggcgtcccgttcccggcggtgctggtcccgagcgcccccgcgggcggcgggctcgacgagttcctggcggccgtgcgctccgagagggcgtcccggctggagccgctggtgcgggacgcgggggccctgctgctgcgcgggttccccgcgacgacggccgccgacttcgaccgcgccgtcgacgccttcgggtacgaggagctgccgtacgtcggcggcgccgcgccgcggaccaacgtcgtgggccgggtgttcaccgccaacgagtcgccgcccgatcagaagatccccttccaccacgagatggcccaggttccaacgtttccgtccaaactgttcttcttctgtgaagtggagccggcggggagacaccgatcgtactgagccattacatctacaagaggatgaaggaagaatttcccgaattcgtggagaaactggagaaggaggggctggtatatacaagggttctgggagagggcgatgacccgtcttcgccaatcggccgtggatggcaatcgacatttctcactaaagataaagccgttgctgaggaaagggccgccaagctcgggatgaagctggaatggaccggcgacggcgtgaggacggtcatggggcccatcccggcggtgaagtgggacgagagccgggggcggaaggtctggttcaacagcatggtggccgcctacacggggtggaaggacgcccggaacgacccggtgaaggcggtgaccttcggcgacggctcgcccctgcccgccgacgtcgtcgccgcgtgcggccgggtcctggaggaggagtgcgtggccgtgccgtggcgtcgcggcgacatcctcctcatcgataactgggccgtcctgcactcccggcgctccttcgagccaccgcgccgcatccttgcctcgctctgtaaatgatgtatgtatgtatgtaagtgccccgccatggtatgggttttttacttggcagtggaactaattctggatgggcgcggatttgctgctccgacgagcgatgaacgcctgaaactgagaataatttcacacgctggagagagcggtgtttatttattagaaattccatagtgaagaaaaccgttcacccgttatgcc

SEQ ID NO: 112366 - DNA, 464 bp, Zea mays
  Clone ID: MRT4577_3396C.1
aaaaaaaaaaattaaaatttcgggtcccaggaaaaaatattccacagagacctcacaggccctatatatatttttttggcgggaaacccatagtgggggggataagcaaaagggatgtttaacctggggaccagccgcacgatctcacgtatttttaaaaaaccattgcattaaggccctccttttggacaggaaaaacctcaaaggggggctttttgggcatgtttaaccgggcggttattcagctaacaggctaattaccccggtcccggaaagcaaaaataaactggatggggggcccttatttgcttcactggggccacacagaatatttgtcaccaaaaacggccagcctccatttgggatcactggggcaccacaagccgcccccgattttaatgcccaacttatcggcaaggatggctgagaacaaatctgacccaccctccaaatttttgatggag

SEQ ID NO: 112367 - DNA, 1085 bp, Zea mays
  Clone ID: MRT4577_33970C.1
atcaaaaaaggatgccgcaggcaatggcggacgccgcgacgctctccgccctcgctctctttgcctcccgcctctcctgtcgcaggtaccacaccccgtggccgcgcgcctgccccaacccacctgccccccctcactcggtgccagtgcgctgcaggttcggggacgaggacctccgggtgctggaggccgcgctgtccgccggcgccgacgtccccgcgctgctcgccacgcgctcggcggcccggcgcctgctgcgatcgagcgcggcggaggcactcgcgttcaccgcggcgggtgcatcgctggatggtggggatgagagacggagcctcgccgtcgccgacttcttctcacgcgccttcgcgcttgtaggcgatgtcgagagctgccttgccatgagatacgaggcactgttgcttcgagatgctaaatactgcaacgaccttcacttgcaagtgtcccgtcaggagtggctaacttttgcaacggattgtcttgataatggcttctacaccattgcctccaaggcttttgcaaatgctcttgcgcacattcatccaagccacacagggcatttggactctgctaattccattgaggagaaggacaagatcattgaaataacaggactccagaacttggccaattcagataaagtctgctgaatacatggaaaggagagcttcaggtgttcatgaaaagtataatttgcaatcaggaaaacaaagttaacaggaagttcaatgttcaggctagggattaaaacgaggaacataaagaaattgcttcgtagccaggaaaggaacttgggggatttaaagcaatcttagcgttgcatcttccaaccgagaggaatgttgtaaaaagatcagttaggtgacaatttatgcaaatggagacatgaagtggagttatggatgggtctttgattcaacattaagacaaatacgttgaagagtagttgcatcctttggtagcatactcactgtgcaagtaagttgctatcttcaatgtctgcagactgtttttcatgtgttgacaataataaaatagtaactccgcctgtccgccatgatcgacat

SEQ ID NO: 112368 - DNA, 652 bp, Zea mays
  Clone ID: MRT4577_33971C.1
ccgcacccaccgctgctccaccttctccacgagcccggcaacgggaaccaaggaaaccgaagccccgatgacaagcttcttcagggacgcgcgcctcccgcagcagcgcgtcgtcgagggcgtccccttcccggcggtgctcgtcccgagcgctcgtgcgggctcctgcgccggcggggtcgacaagttcctggcggccgtgcgctgcgagagagcgtcccggctggagccgttggtgcgggacgcgggggccctgctgctgcgagggttccccgcgacgacggccgccgacttcgaccgcaccgtcgacgccttcgggtacgaggagctgccaatcgtcggcagcgtcgcgccgcggaccaacgtcgtgggccgggtgttcaccgccaacgactcgccgcccgatcagaagatccccttccaccacgagatggcccaggtaatcgactgttgaaccttctgcccctgcagtttggtggcaccacaatagcagcatcgggataactgaaattcatgagacagcacagggcccatgaggccacgacatctgcagcgtgggcttgctttaagcctagtacccgtctgtaatcgatactaggtgacgtgggttcctcgctttcgggcacgtcgccccaatttctctcgtgcgaac

SEQ ID NO: 112369 - DNA, 188 bp, Zea mays
  Clone ID: MRT4577_33972C.1
ctataaaactatgacgccatgcacgctactaactggaccttagagcggcgcctattttttttacatggaacaactttattgagggaggacagttaaacaaccgaacacacaacacgaagtggcggggagatagacacgtcactacaacaggtggtgaggacaaagagtcaaacacatgcgaaaaattt

SEQ ID NO: 112370 - DNA, 579 bp, Zea mays
  unsure (1)..(579): unsure at all n locations
  Clone ID: MRT4577_33973C.1
cgagagccgtagtcaactacaaaatgttgttgcttcacttatgagttatttttgctaccatatcgctaagctgagtttcttcttttcatcataatatagttctcccattaaggggcatattagttttcttctaagttctgtagaattggtcataaagattagcatatttcccattattatgctggctgaagacaatttttaatttaagttgtgactgttttggccccagaaccgattaagttgttgatgaacatttcaatactgtactcctgaactgttatgatgcaattggtataatgcttatgatcagaataattcatcagcaccaggtgaactttgatttaccttataatatgatggagcaccttgtgatttcgacatttatctctactactacttaagaagttattgtaggcgtccacaaaaggttttggtgcacggttctgcccaggatcctcgtacgcgatacaatgcaagtttgccgaggccgncatcaacgccatcctcccgcaatccccgccgactgccttgcctaccccttgcatcctcctccccacccatccgncgactgccttgcct

SEQ ID NO: 112371 - DNA, 462 bp, Zea mays
  Clone ID: MRT4577_33974C.1
tttttttttttttttttcgttatagctccatttggacctattctattttgcattgcgtccgtcgtgacctaaattacacgctagaggaatcgttttacatcgttcatgtttgtaaaaataaatttaatattaatttggttgattgcctaataaacatgctttgtttaatggaaagcgacatagaggagttataagtcgttgctgctggttcgtgttcacgttttctctgaaatttaatttcacccggaaaaattaaacaaatatgccgtgggtatccaaagtactgcaaaagcaataatgtgagagaaattctctaatatacctagatgtgtgctagagtagacacatcgtactagtttgagagtctaaaaaactatagaggataagaggtactaaaatcctttttttatttaaaatttaataagaattgaattttaacccatccaatctattcggttttgt

SEQ ID NO: 112372 - DNA, 396 bp, Zea mays
  Clone ID: MRT4577_33975C.1
ggggtggggggactacacataaatattggattaaatttgaagatacaacaattacataaaaataaataatacatacattattatcgatctcaatatgtaacaaattttttggaacacaaccaatacgtctatacccgacctgacaatgcacagggaagcaaacaaacaaaagaacatgtagataaatagaccatagatgttgacacacttggtagcaagacgggtacacaaactcacaaacgtttatacttgattcgaagcgaattgaagcaaccaaacagaggagcctttcctcccgttattccaaaccaaaacactcacgggcatataggatgatcatacacggactgacgtacgtaggaaaggggagcggttaagcaaactcgtgggggtgcg

SEQ ID NO: 112373 - DNA, 193 bp, Zea mays
  Clone ID: MRT4577_33976C.1
tccgccccaccatcgcgatggcagacgacgccgctgcggcgtgcgttcgcgccctctccctctccaccgccacccggatcgctacctctgtccgtccacccccctccgacgccctgcgccccatcatccggcatccctgcttccggtgcgcagactccgagcctcccgtacaccccgtccttcctagaaccgg

SEQ ID NO: 112374 - DNA, 281 bp, Zea mays
  Clone ID: MRT4577_33977C.1
actccatagggcgattgggttcctcgaggccggccgggccagagcagctaggggagagatgaatcaaccatatacaacaaaaactgcattcattgtataccaggcactgctgatatacctgcacctccagaaacacgaccactatttttttttctcatgcatgtctgtgcattcgcgtggccttgcccagaaatcaaacactgagtaccatcagacaggcagattggactggtgaaatgctatagttggacatctagaaaaaaaaaaaaaaaaaagcggcc

SEQ ID NO: 112375 - DNA, 328 bp, Zea mays
  Clone ID: MRT4577_33978C.1
cggctaccagccgtgcgccaccaattacctctgtgtgttcggcgacacggccggggacttggtgcccgaccgcttcctcggcgaggaggaaagtaagctgatgcagtacgtgtactagtttaacgagtcgacagacctacaaccgatagcgttcaataacaatgtaattgttcctttgaagaacttttttagatgatattaattttattgttttttcttaatgtatattttatttttatttattatttataaattttataactttgtgatttattttattttttacataatagcttatattagtattttattctattaattttttttt

SEQ ID NO: 112376 - DNA, 386 bp, Zea mays
  unsure (1)..(386): unsure at all n locations
  Clone ID: MRT4577_33979C.1
cctagcccaacctttacccacattcttcgggagggtaactttttgtacggtgaggctggacccaacacaatccatattccatcttgtcctaagctcatcagtttttaatgctactctgaaatacaagaatcaaatgcataatactataatcctatctaacaccaactacagaacaccttcctttctgaatttgactacacacctcccacatgcttcanagacataaggctctgatcgcaaagaacttttcaactactcaccacaacaatctttctagcattgtaatcatacctctattcttcaaagcacgagacgatacatacaccctaatcctaacctaccatgatcgctacacggtccatcttcctaccaatataacctagata

SEQ ID NO: 112377 - DNA, 452 bp, Zea mays
  Clone ID: MRT4577_3397C.1
ggaaagtaaaaacaagctggttttcattcctccaggggggcgggagggggggctaattttaaccgggccccacggggacgtttacgggcctgaagggggcaaaaggggatatgccccaggggctcgggggggcaaggttttgggggcccccaaggggcaaaaacttccccacccctaagatcctccggtgggaaccagaaaaaaaattgggggtttcaaccccttttgaaacggcagcccgcccgatttcgttttctgtcatgaccggggggggccctaaaaaggcccccctcacccgcccccaacatccgttttttggggttcgaggaaaacgccgggaaaaaaaagcctttcgggcctcaggtccaaacggactttgttggttttcaaggggggggacctaaacggggaaccgcccttggctttgggggtggcggaaaataccggggggg

SEQ ID NO: 112378 - DNA, 1671 bp, Zea mays
  Clone ID: MRT4577_33980C.1
tacctcgagccggccgggccttccctgccggccactattcctccaccacctccatccagcactctagtttccccactccaccgcagcgacccctaaaatcctcgtcgctacgaccaggggatccctcccccaatgcggctgctcccgctcctcctgctcctcctcgccggcgccggcgcccgcgcctccgacgacccattcctctccggcgcggcgaaccacagctacaacatcgactgcggcggcgcggcggacttcacctcggccttcgggcgccggtggctcgcggaccggttcttctccgcgggcggggccgccggcatggtggcggagccgcaccgcttcccgcagccgcaggagcgcacgctccgcttcttcccgccctcctcggccggcaagtcctcctgctactcgctcccgcttccccccggccgctactacctccgcctcttctccgtctacgacaactacgactccaagctgcgcacgccctccttcgacgtctccgccgccgccacgctcgtgctctccttccgctcgccctggcccgagcccgccgcgcgctacggggcctactccgacctcatcttcccctccgccaccgagcccgcctccgacctctgcttctactcgctctccaccgacgcgcccgccgtcgcctccatcgaggtctcccccgtccacccgttcggctacgacggcgccaccaccggcgccgacctcgtcctcgtcaactacgggcgcgtcacctgcggggacagcctcttcggccccggattcaccagggacgccgacgccttctcgcgggtgtggcaggcggacgtcgatttccggaacaacgacctcagctacgacgccatcactgcgggcgggaggaaggtctttggcagcaaccagccgcccaactacttccccaccaagctgtacgagtcggcggtcaccacgggcggtgacgccgccaatgagatcgagtacctcatgccggtcgacacgaggctgtcctacatggtctggctccatttcgccgagatcgatgctgggatcggctcacctggccagagggtgttcgacgtagtgctggctggggagaacgtcacgaggatcgacatcttcaagcaggtcggaggcttcacggcgttcaagtggacctacattgtcaagaatctgacaagctcgacgttgagcgtcaggcttgtgccagtggtgggacggccgattctgtgcggccttgagaattatgcgatggtgccacttgagatgaggacagtgccgagccaagtggctgcaatgaaggcattgaaggagtcgctgaaaattcctgccaggatgggttggaatggtgacccttgtgcaccgagggcatgggatgcatgggagggagttacttgccatcgcggtgacaaagggcttgtgataacacaactggatctggcgagtcaaggactaaaaggttacatcaccgatgagataagtcatcttaaagacttggtaagcttgtaagtatcattccacacaccagttgaaatcaattttgacccatgtcatccttgattttttagatttttgtgcgtatgtataatcttggctttctgttgataacatagcttacatgcggatttcgattacgtgcatcttagcttagctctgttaggagtctttttctatataaga

SEQ ID NO: 112379 - DNA, 330 bp, Zea mays
  Clone ID: MRT4577_33981C.1
gtgcatgatacatagagccaaaaggcgaaaccacgatctcttgaaagcaatgttaatggactggggagcgaggtaatagacttgttcatttacgggctgaaactgatgcttgaccaagttcatttaaaaggttgtacggggctacccataatgatttacaaaatactttcaaaagctactgatgatctgtctacaagactattccacgggctgactacctaggtggtaggaacagcactggcgtagggtccctggtccgttcacccacaccggatatatctaggggcactacttatttcgttaacacaatacacatggggctgatatctt

SEQ ID NO: 112380 - DNA, 502 bp, Zea mays
  Clone ID: MRT4577_33982C.1
ttttttttttttttttttttttttttttttttttttttttttttttttttttttttttttttttttttttttttttttttttttttttttttttttttttttttttttttttacagggggaaaaaaaaaaaaccaaaaaactgttttaaatttggttacaaaaaaaaaaaactcaaaaaggggacaaatcggaaattgcaaaaatttaaaggaaagctaaacactgaaaaaaatttttttatggataaaaaaaaaatgggtaaaaaaaaaaaaaattcggggccagttttaggaaaaaataaaaaaactggggggaaaaacttgggcatttgaaaaaattggtgccaacattaaaatggaaaaaccaccaacctgaaaggaaaaaccaaccccactttaaaataaattggaaaaaaggtaaccaattttttaacccgtgggactaatttgaaaaaaaaaaaatcccaactgggatttttttggaaattgaaccaagggtttt

SEQ ID NO: 112381 - DNA, 423 bp, Zea mays
  Clone ID: MRT4577_33983C.1
tggcttggaacctttgggctgatttatgtgcttgtagtaagtacctcgtaactcttaggaaggtcgtttttaagaggattcaacacgaaccacggcggaaggcccggaggtggttgcggcggcagaggacacgacgttccggcgggcaaacgcactaaaaccagactcggtttccacaagggacattgcggttgcgccaaagaggcgatcggcgtatctgcatgcgcagagtccgacctaccgacgaagaccgctatagccaaaagagacgacaccgtcgatatattcatagctgtgatgttaccttgcgaattctgccacctaccgggtggcgaaatattaacgtatttgctctgaatattatactacgtccactagatcttaacgtggggatttcggaataataataaactacgacggaac

SEQ ID NO: 112382 - DNA, 270 bp, Zea mays
  Clone ID: MRT4577_33984C.1
aagctcggaattcggctcgagataaactatatgatgcccattttttctgcaatccctgatgttgatatcaaagggggggctttttaagttaaggcacgagaagccataaaagaacttgaaatagggtttctatacgcgcttgccagtttaggcgtacattaaaaaacgacatgctttagacttatccaccgtcatgactcaactaaggacactgctttgcttggtaactgatttgttttccgactacattaattagtcctttccccatgg

SEQ ID NO: 112383 - DNA, 217 bp, Zea mays
  Clone ID: MRT4577_33985C.1
acgcaagacctgcccttgaatttacaggataccccttcctcctctccatgggtataacattccgaggtatggtgaacaaaatccatgcataaagacgcactcgaagccaatatccccgcatttattgctacaccattgctcattctatatcctactcactttttacttattatccatgtataaacagcccagtctaaaccattcattacccatccaa

SEQ ID NO: 112384 - DNA, 184 bp, Zea mays
  Clone ID: MRT4577_33986C.1
cgcacatatcagcaaggtgattttattttggcgaaggtgaactctctcactgccatgtttacataactacccttcaggtactacaaccttccatactgtcaacccagagatggcgttaaaaagagttctgaaaacttatgcttgcttcttattgttgatcaaataaataattcttcctaccgtt

SEQ ID NO: 112385 - DNA, 353 bp, Zea mays
  Clone ID: MRT4577_33987C.1
gccacgcgtgctgcctgcttgatgtgcgatttggccagcaaccaatggcaggagctgcccaagtacgtcaatgccgacggcgaggccagcgagttactgggcggcttgtccttacagcccacagtggaggtcaccggataagcgcttatggctatagcgttactaccattaattgcttcatacattaaggcgcattaattacgggtgggatactactccgagtgaatgatttcttcgagtgtgtgagcatgtacttactgctgtcatgtcatatgacattgacattattggtcttgaataaaatcacagatactgtgcgcatgactactgcactgaactggcggtcgctctac

SEQ ID NO: 112386 - DNA, 182 bp, Zea mays
  Clone ID: MRT4577_33988C.1
atgaatgggaaacacatgctactgtactcgataagttgcttgcatgggagaaaaaactatgccatgaagtgaaggaattcgaggttatcaaagtgacatatcaacgaaagctggctgttcttaacaaaaaaaagcaaagtggtgctagttcttcatcagttgagaaaacaaagtccattgtt

SEQ ID NO: 112387 - DNA, 216 bp, Zea mays
  Clone ID: MRT4577_33989C.1
cctttgtttttttttttgtgggttcataaagagcctgccccctctactctactaacgtacggattggtctatggtccactaacgtaaccgcaggtgaacaactgtctcataggatgcaccaacaacgtttctattttacacatgcaacggacgcaacagtatacgtccaccacccttgcagtcccttatttacgggaacgtcatgccccctgcggg

SEQ ID NO: 112388 - DNA, 770 bp, Zea mays
  unsure (1)..(770): unsure at all n locations
  Clone ID: MRT4577_33990C.1
gtcccgccgtcttttgtggggtgatggtgactaacgccgtggtgcccgcgaccagacgaaatgcccaaaatacgataatttgttgtcaatttagattggcttttagcattttagaagcaaaatcaacagcaaaatgcccaaccgaatacctcaggccaaccgagttatgaactttgttgccaatttgttcgagttcgaccgatacgataatttgtgtgtttaaaaagtttagtctagttaaatcaacaatagattcagatttgtttgtttaacagatgtaggcgctggctctgtaaatgagatggccacccgtggaagatagaattccaccttaaaattttgtctgttctcttatcgtataaccagcaaccaggactttttatcaaatattaaacgtactaaactatgcatcccacatcaaatgtaaatcgtgctgtctcagccatatgtctcagatgacggtggttctcaatcattatatacattcagtatactcactggattcggcagtcggcacagagccattttgattgaacacagcaatcaggtcatataaagtaaataaatgatttgctattgcttgggacgttgtctatatcgtgatccgcccagccctaatcacgatggcatgctcttgaacgcatccctgctgcctgtcagcctgctacggtgctatatagagtgtttggtttgaagaatgagctagtccataatattcttactcctcactatnnnttgttggtttgtggaatggaatgagttgatccatc

SEQ ID NO: 112389 - DNA, 523 bp, Zea mays
  Clone ID: MRT4577_33991C.1
ataatatgaagaaaaaaacacaaaggaaaaaacaaaaaacacaaccgaaaccacaaaacacagacaacacaaaacacaaaaccccaaaaacaacacccaaaacaaaaaaaaaaccccaaaaaaaaacccaaaaccgaggaaacccacaccataccgcggaggcccaaaaaaccacaccgaggaccaacaaagcagcccgacaaaaaaacccaagcaacgcaataagaagagcgccgccgagaaaaaaacgagaagggcacaaaaaaaacccccaacgacgccccacgacaccacggggaaccctccagagcggcccgggaagaccatgcgaagccccggggaggaaaaaagaacccggggggggaacaaccgggcgggccgagaacaagggaaggcccgccaaggaaagggggggccccacaccggaaccaaggcccggtccataacaaccggcacaacgtccgcagaaaataccacctccagaccttgaaccctcggggccaccatcccgtggggcaccgaa

SEQ ID NO: 112390 - DNA, 312 bp, Zea mays
  Clone ID: MRT4577_33992C.1
cggacgcgtggtctcatatctgacacaagactagttaccatttaataccaactggggatcggagaatgtaccatctaatcccagcttctccttcaccgcatctcgttacactgctattctgccaaccacccttgcccgtcttaaatcaaagaaaatggcaactgacaacacatttctcttcacctgggattcttcgaacgagggacacccagacaagctctgttaccagttcttagatgccgttattgacgcttgccttgctgaagaccctgacagcaaagatgcttgtgagacctgcaccaatacctacat

SEQ ID NO: 112391 - DNA, 256 bp, Zea mays
  Clone ID: MRT4577_33993C.1
catcgccaaggcgaccctactaactttgtggctaagagagccttgctagaggcagtctggttgttgtagttttgatggctgattcttctttgggatggagggaaatgaatggctctacagctccagccaggtaaggactgttgctcaatgcctacgcctcccttctgcccttaggaggaatttggctataatgcagagacacaaaagctgctgtgcaagaatggggagacgctgctgggggctgtcaacttcgttg

SEQ ID NO: 112392 - DNA, 958 bp, Zea mays
  Clone ID: MRT4577_33994C.1
cccacgcgtccgcaggaacatcgtgaagctgtggtgctgcttccacagcggcgactgccggcttctggtgtacgagtacatggccaacggcagcctcggcgacctcctccacggcggcaagggaggcctcctggactggccggcgcggcaccggatcatggtcgatgccgcggagggcctcgcgtacctgcaccacgactgcgggccaccgatcgtgcaccgcgacgtcaagtccaacaacatcctcctcgacgcccagctcggcgccaaggtcgccgactttggcgtcgccagggtcatcggcgacgggccggccgccgtcactgccatcgccggctcctgtggctacatcgctcccgagtactcgtacaccctgcgcgtcacggagaagagcgacgtgtacagcttcggcgtggtgatgctggaactcgtcaccggcaagaagcccgtcggggcggagctcggggacaaggacctggtgcggtgggtgcacaccggcatcgagaaggatggcgtggactcggtgctggacccgaggctcgccggcgagtccagcagggacgacatggtcagggcgctccacgtcgcgcttctctgcacgtccagcctgccgatcaaccgcccgtccatgaggatcgtcgtgaagctgctgctcgaggctgcgccgcgcgcgcggcctctggagagcaagccaaaggcggccgaagagaatccgcttgatgtctgacgacatcgtcggacaagatctatcgcgtctcagaaataaggatcaatggcacacgcttcatccacatttcgcaatctatagctctcaaatgtcagtacagaatctagtgcgtagttgcttataaatgaacgcaacacaagcctgagttttccagggtttgacttagaccttgtttgtttcagattgtaatctctccagattatataatccagcgcaaataatccaatagtt

SEQ ID NO: 112393 - DNA, 560 bp, Zea mays
  Clone ID: MRT4577_33995C.1
ccgggcatgcgggttcaaggagcgattggaatgctgacagtacaagcatgagggacatgggtagggacggtaacggtacgtcattccgaaacagctaagtggcaaaacccgggaagagcttgacaaagtcacatggggacctgccaaagaagcatgggagaggagggcagtgaggtatgagagctgctggggtagggagggagaaactgcatacacatgtacgcaaaacgaatgaacttgctacccaggaactcatgaacgccaggccctagcgcacgctacaggcggaagactgattcttgccggtaatgcagacctaaagactgagctaagccaagctgacatgaatagatcagcgagtccaacccaggatacttaaagaggctgatgttcttagaggtggcagaaaacgactaaaagcaaactattgatagatatgctgagaaactagcaaaagagaaatacattcaagaaaagaagctaagaggcgagcatcttgaagagagcagtcaggataccgcgaaatatgccctgtagaggtgatgacacttatgaaggca

SEQ ID NO: 112394 - DNA, 356 bp, Zea mays
  Clone ID: MRT4577_33996C.1
ggccgcttttttttttttttttttgggggggatggggcgtgccttatacacccgcccttggggcgttcgaaaaaaatacaccatcttcaatccgacctgatcattattcccataaagtacccttaccttacctcaactgtccttacctacctactttcactctgcttgaatcaacacaccttgggaagccgagatacaactcagtgtatcatccaatatccatccccctgcctctacaaattctactccacgatcatcactataatttactccatcaacactctcccctgattgaactacgggctcaacctttcactctccttccaaccatctccataacctcactgaacagcacc

SEQ ID NO: 112395 - DNA, 335 bp, Zea mays
  Clone ID: MRT4577_33997C.1
atctcttatccatattcattcatccatacaagcggatctctggcggtttttttgttttttccaatgtctccttcctccctttcgcccttctttccaccacccaaaaaaagcgtctttctttccatcgccgaactccccatctaacacaccgcctatgggctgccggaggccttaggagcatcaccccgctgaaaaaaatacccccagaaccttaaggactttaccccccagaggctcaaagagcccagcatgatatctgatggcgattgttaccccccaaggacctttctgaatacggtctatatcagagcccccggggccaacaccaggttgat

SEQ ID NO: 112396 - DNA, 360 bp, Zea mays
  Clone ID: MRT4577_33998C.1
tggaacttgatcacaggtctcctctttatcataatagagggcagtactgaaccctttatggcttgttaagattggtcaggattggaggggatactcacacaacttgcgagcatgagtgttttaggctgggtatgggatgctttaccaactttgctgtagatatggggcaaataatgtagaggctactatgtaactgtcttcttacatcccatggtttcaaaattttcctgatcaagtttaattattagtagtttcacctattgctggattcaactggtggaatattatctatctgtaccctgatgttggcatgtatagtgcaaaaacaaatagggttaattgaatactttaagcgatact

SEQ ID NO: 112397 - DNA, 1571 bp, Zea mays
  Clone ID: MRT4577_33999C.1
cccacgcgtccgcatccggttcggttccgtcgtccactctcgttccccagttcgctggaccatctcaaaatcctatcctcctctccttccctccgtatctcatccggccgattcgaatctccggtcccatcctctacggcttcaccccgcgcccaatccagtctgtacgtgaatcttgacaggggagagaagaatcggataaggagacctgcaccttcctccgagcaaagcaggagaggaaacaagaatagaggaggagatggccatgcccaccttacgccttgctcctgacctgccgcccgtatcccgcctctgcttcgggacaatgacgatgggagagcagagcggggcggcgtgctcgctccgcctcctcgacgccgcctacgacgccggcgtcaacttcttcgactccgcagagatgtacccagtcccacagcgcagtgagacgcgcgggcgtagcgaggagccccttgggggctggttgcgtgttcgccgggccccacgggacagcgctgtgctcgcaacaaaagtcgcggggccttcagggcagatgacgtggattcgcggcgggccgacatctctcgattcacgtaacatcgcagaggcaatcgatggctgtttgcgcaggctgggtgtggactacatcgacctctaccagatacactggccggatcggtatgttccaatgtttggggagacagagtatgatccgaactgccagtacacgtctgttccaatggaagagcaactggaggctctcggaagagcaatagatgctggcaaggtacattggccttagcaatgagacaccatatggtttgatgaaatttcttcagttgagtaaggattctcagttgcttccaaagctactgacactgcataactcgtataatttgttgtgccgaaattttgattctggattggcagaatgctgccatcatgagagaattagcttgctggcttatagcccaatggcaatgggtatactttcaggaaagtatcacttatctgataattgtggtccgccagacgcaagaatgaatcttttcaaagggagatactctgaaggtgaatcccggtacaaactgcagagccccaaagtgaaagcagctgtgaaggaatacacacagatttctgcaaagtatggcatttctccagtgaccttagcgattgcatttgtcttgagacatccacttgtggcatcggctgttttcggtgcgactaaattgtggcagcttgatgaagttcttcaggcaactacagtccatctttgtgaggaaattgttgctgagatcaatgatgtacatgcaagataccctaacccttgcccataaaattttgcaaaaaaaaaatctttatttagcatcacatggatccttatttatcatcgagagatatttttttccaatataccattgggtatggttttttcccaatatagcaccgccattagatgtggcacttagcatcgtcaactgcaaggagaaaaggtcatttctcccctgtttcacgtgtaggtgtagcactaccaacacgttgacagtgatattttattgcatagattttttgac

SEQ ID NO: 112398 - DNA, 693 bp, Zea mays
  Clone ID: MRT4577_3399C.1
accctcttcccaatagttgcagttctatcaggatgcgttacctcgtaccatcttccaagcacgagcaatctgcacgcacgctgatcgcaataacaattcccgagctgactgagtgccaaggccaaccctcaaggcaggcaagcacatgcgtgacatcgtttcgaatccaggcggaggataaccccacaccgctgcaatgaataccatcctcttccaggtcctcatcacacctatgcttggctcaaccaccgaccacaaaatagagaatgagaaccttgacaaactgaaaaatgcgctataagcggacaatgaacccctgaccaagtgcaagtaccttgctgaacacttcctcaatctcgaccaccagaaccatgcggctgtcactctctgctgtgttccctagcgccctacccatctagtgtctacctctacccttgtgtacaatctctgctggtctgctatgatagagagatcgcctgtccagaaagaccttgacctcgatgatccatctgcttgatacgggtgccctgacaagctattgaatgtaataatccaagtctgatctgcgatgtatgcttgttcagtgaagcgtcttctatgacgaaaaatgagtgcctatgtgagaacatgcttgcttgtcaagatacatttaattgttcctatatgagcattcctgtgcctcttctcgaaaaa

SEQ ID NO: 112399 - DNA, 213 bp, Zea mays
  unsure (1)..(213): unsure at all n locations
  Clone ID: MRT4577_339C.1
gtgctgctaggtagtaggttccgcgatgacgctagtggagtatgtgtcgacaaggacttgtatttcgcttcgtgtctgtcgtcactaggaagagattgttatcgtacctggatgtagtgcgcggcttgtggcaggttactggccactggtagntcttctgcgcatcgctgcacgccgtagtggagccattcgtgctaatccgccatgtgttgg

SEQ ID NO: 112400 - DNA, 186 bp, Zea mays
  Clone ID: MRT4577_33C.1
atgagcggcatcagcttatctgacgctatccgtgactccatccatgcgcttggacctacgatcttcaccaaccaaaacccccaactcgccgaggtcaccggcgactccgtcctcgccgcgccgcgccgtgaggatgtcgttccactaccacgaccacgggctgtccatggacgccgccgcgtcggc

SEQ ID NO: 112401 - DNA, 380 bp, Zea mays
  Clone ID: MRT4577_34000C.1
ggggctttctactgtgtaaaatatggagaaatatgtgctggaattttctatggggggtggggtgttcaggtctttttcagttagctgaaatttagcctttgcgtttccacctcaagtttggtgctctgtaactgaaaacctgttcagggtgttgtttagtcaactttggagctctgtagtaattaataaaaccagaattgggttaagagttctatagaaaggtgaaagaccgagtgtaggagaaccagttttatacaagcagattggcttgttgatgtatggaatttagagaaaagcctgttgcaaaactctctgacaggcattgtaaggtgctgtttcatatcgaggaactgaacttttcagtgttttgctctaacttt

SEQ ID NO: 112402 - DNA, 736 bp, Zea mays
  unsure (1)..(736): unsure at all n locations
  Clone ID: MRT4577_34001C.1
gagaattggagtgcaagcgacgcgtcgagccccatcccgttcccgcgcctcgccgagagatctgcgccgtcgtcggcaccaatccgtacacccgtcagtccgtccgtcgtcggcgccggcgaacgagtagagatggaggagacggcggcagcggcaccggctgagaaggcgtcgtcgtacaggtactgggtgcgggaagccaccggcgacgccgcgccgctccccgtcccgcgcaagctcgaccccgccgccaatgggaacgggaacccgccgcccctcgggtccgtctggaatcaggtgagccacgctcctcatctcgtctcatcccatcatctccacctttccgtctatccctgttggattggagaaggaaccgtgtaagtagttgactagtggcattgtaacaagcttgacgactaaaagggtcacgaatttgtgacgccccttgtgtcctcagtgttcgtccgtgcgtggagtctgattggggagctgacgaatgctagatctggtctgtatttcaacttcctttgcgattattattagtacggctagcggcaaccaaatatgataccttggcacaaatgcaactgtacagtttagagtcaccatttgttcgcaattacccccatttaatgcctcatcagcgaaaaagcattccaatcgatggagctattttccatgaatttgnttgcttggttggccgattgcgcanngacttattgtttctatnatgtcc

SEQ ID NO: 112403 - DNA, 618 bp, Zea mays
  Clone ID: MRT4577_34002C.1
aatttatacaattgttttctttctgaacttcccattgttgaactatggcatttgcagaattagcttgctggcttatagcccaatggcaatgggtatactttcaggaaagtatcacttatctgataactgtggtccgccagacgcaagaatgaatcttttcaaaggtactgtgttctgaaatttttaaaaggtttatagtctggttccaatcctctctttcattttagtttggttccactacgttggcgctcctcctcctttgtagggagatactctgaaggtgaatcccggtacaaactgcagagccccaaagtgaaagcagctgtgaaggaatacacacaaatttctgcaaagtatggcatttctccagtgaccttagcgattgcatttgtcttgagacatccacttgtggcatcggctgttttcggtgcgactaaattgtggcagcttgatgaagttcttcaggcaactacagtccatctttgtgaggaaattgttgctgagatcaatgatgtacatgcaagataccctaacccttgcccataaaattttgcaaaaaaatctttatttagcatcacatggatccttatttatcatcgagagaattttttttccagt

SEQ ID NO: 112404 - DNA, 681 bp, Zea mays
  unsure (1)..(681): unsure at all n locations
  Clone ID: MRT4577_34003C.1
gctccgcctcctcgacgccgcctacgacgccggcgtcaacttcttcgactccgcagagatgtacccagtcccacagcgcagtgagacgcgcgggcgtagcgaggagctcctcggccgctggttgcgggcccgccgggccccacgggacagcgtcgtcgtcgcaaccaaagtcgcggggccttcagggcagatgacgtggattcgcggcgggccgacatctctcgattcacagaacatcgcagaggcaatcgatggctgtttgcgcaggctgggtgtggactacatcgacctctaccagatacactggccggatcggtatgttccaatgtttggggagacagagtatgatccgaactgccagtacacgtctgttccaatggaagagcaactggaggctctcggaagagcaatagatgctggcaaggtacattggccttagcaatgagacaccatatggtttgatgaaatttcttcagttgagtaaggattctcagttgcttccaaagctactgacactgcaggtaagtagcgcagtttgatctaatctgtagtactgtaatcgctctccatatttcttcacctgtgtttttgcagaactcgtataatttgttgtgccgaaattntgattctggattggcagaatgctgccatcatgagaggtatgcttgacacggtcagaag

SEQ ID NO: 112405 - DNA, 580 bp, Zea mays
  Clone ID: MRT4577_34004C.1
aattcggcacgaggggtcctctctatccacggaccgaagcccctctctgtccgggctcgacctctccccgacaggatctaggcctcgcccagctcctcttcgtccttcctgcgccgacccctactctgtcggcgaccacacccaatcttttttctcattggctacctgggcgtgcaccggccgatgccgctgaccaacacgctgcatcggatgggagccggcgaggggctcccctcccaccgccgcgcccgccgggcccgcgccaggtaccatgctggggcacacggggcggacgcaccgtggcgccgccggcgacgagagctacgcgtgcgtcacgcaggacgaggacgcctagggcaacgacggcgcttcgctctgcaggggcctaatgtccggggccgcctacgcgctgcgctccaacatcacgggcctgggcccgcccgtcctcccgctggcggaacagctgcgcttcctggccgccgcctgttccgccgagtcggcggcgcccagccctacctccccggactgcaacctcccgctccgaaacttgtgcatccacgccgcgcgccccggcgtgctg

SEQ ID NO: 112406 - DNA, 475 bp, Zea mays
  Clone ID: MRT4577_34005C.1
aaaagccttcaaccgcccaaaccggtgcccaacccaaaaaccttcctttggggaaaaccggcccggcatttttattccccaaaaaaaaaacccccgggcctcaaaatttacccccggaacctaatggccatgggccccctttttttttaaacccttggggaggggaattcatacctggccacccaaccctggggcaaaataattcctttcccggtttgaaggggctttttttggggcttttccccaaatggcaacttatgtttcaacccggaccggttgaacgggttcccccaatttgaccccccccgggggttttattcccccccccatttttggaaaagccccttccccacccacaagggggggaccccaaaccacccagggccctaccccccagggaaaatcccctggggggggccccgggcccgaaaaggccccaaaccctgcccccggcgtagggccccctggggggggg

SEQ ID NO: 112407 - DNA, 415 bp, Zea mays
  Clone ID: MRT4577_34006C.1
ggaacaaaaaccggggggccctttttaaaaaaaaccataaggggaaaggggacttaaaaagctttcctgggaacggggggggaaaaaaacctgccctttaaaagcgtggccgccctaaaaattattatgcataaggcgcaaatttttcccagggcaaaaaaaacctatttcgccggttaaaggagtccctctcatcaaaggggggacggacaaattttccgttacaataaaaaaaagattggggaacaaagctttggagggggtgatacaattccactttaccaaatatgacctcggggaacacaaaaaaaaaaaatcaggccctggttttaaattcaccctttggggggggggcaggggaaacacctcccgttggggggagcccaaccatcactttgaaggcatggaaaattcc

SEQ ID NO: 112408 - DNA, 2337 bp, Zea mays
  Clone ID: MRT4577_34007C.1
ccacgcgtccgcactgacatgtgggtccctatccgcagctaggattctgggcccctgtggcagccagtggaagagttcctctcacttaacagcatctctctctctcccacggttgcttccaggtcccaccacgtagggaggggattggagacgccgagctccaccggaggcgaaggcggaggcgcgtggcgcgccctcggactcctcgctgtcttgtttttcaggacaaaatggaccttgcacctcagggtttgataacacagcaacaaaaggcaaatgagcgaaggccagttggtagctcacaaatttggacacggtatggtgttctgcttccaagccagcagactcgaaagctaaaagaatggattctgactgatgagcagcaacagcttgttaatgctagtggtcttggacatctggcacttaccactgggtttaccattgaccgttctttgctgacatctttttgtgaaagatggaataatgaaacaaatactgcacatttcatgggatttgagattgcgccttcacttcgtgatgtttcatatattcttggcattccagtgactggtcatgtggtgaccgcagagccaattggtgatgaagctgtgaagcggatgtgcttgcattatttaggagagagccctggaaatggagagcaactgtgtggcttaattaggctgacttggttgtataggaattttcatcaactacctgaacatccaaccatcaataagattgcatatagcacccgagcttaccttctataccttgttggttccaccttgtttcctgacaccatgaggggatttgtatccccaagatatctaccactgttggcagattttgggaagatccgtgagtatgcttggggggctgcagcccttgctcatttgtataggggattgtctgttgcagtaacacctaatgccacaacacagtttctcggcagtgcaactttgctcatggcctggatttatgagtatcttcctattactcaaccacaacagaagaaccagagcacattgctgccccgggcttgccggtggaactttggaggagcaacacgtggacagagaaaaaagtcatggactggagaaaagtttttgagcaacttcaattttccgaggtcaactggaacccttacaaggacatgaatccagcaattgttccggaatattgcattgcagcagataacatctgctactctcgtacttggctaatcagctttaacataaaggaggcgtatgtgcctgacaggtttgctaggcagttcgggagggaacaaggacgcctccatggtgtgccaatgtggacaagaagaacttggagtaagtggaaagactggaggactgagtatgctcgtgagattgaggagttccatcaattggttggctgccatttcacccctcctgcggaaaccaatatcaactcctttccactacatgagtctagtgctggacagaatgatgcaggatgcagtctgaatatctctcataatttttctgcaatggttgaagatttgaaaaatgatctcccagtaattggtcgatatcttgagggaaacttgcttccttcagatgttgcaagcttcctagagagggtgagcacgatgatcaagagttataccccaccacagggcagccgaaggaaagatcgagtaagtcatggccccgctgacccagtcaggtcaaagaacccaagaaaaaggggaagacattcactctttcaagattcttttcctcatcggtatctaggcaccccggtaaacatagtgtttgatggcaccattcctctactaaatgggggtgaggcattgaaggaacaagtggccatggatccctggcgggtctcccagtcccatttgacgatgaccacatcttcttcatctctagactcaagctcaccagaatcaatgaagcggaggcgggaaggtggggatgaaattccaatcacaagggacactgattgcctccaaagtggaaggctctgtgtgcagctgaaaatgttcaagcacagagatggagtgaatgccgaggcagctaatccgattttccgctgacgaagacaaaacttcgcttggtcttcatattgtacaaagtagcaaagaaacatgacttgtttgctgcactgctgacagttagctggccaccaacaccgctctgcggtattgctgtctgcaatttgcgaggattttcctgtgtttatatcgttgtgaaacagttgcctctgtgaaatagatgccttttcagaagcgatagagttgtaactgtttatgacaattaacatggctattaaaggggcaagtcttttggcacaaaaaaaaaaaaaaaaaaa

SEQ ID NO: 112409 - DNA, 762 bp, Zea mays
  unsure (1)..(762): unsure at all n locations
  Clone ID: MRT4577_34008C.1
cattgggtacctcgaggccggccgggaaaaacaatgtgctcgatctcactgcgccactccatccatctcctcgctcccagtccccgggaagctacgaagcatggagtccgtcaccgcccgcgcccccggtcgcgacccttcacgcgtcggaggcatcgctcaaggcggcgtaggccttccttggccactctagccgactcggtcgcaccgcgtcgcccacgatgcgcagcctcaaggcggaggccaagggcgagtggctccccgggcttccctccccctactacctcgacggcagtctggcgggtgacaatggcttcgacccgttgtgactggcggaggaccccgagaacctgcggggattcgagcatgcggaactggtgaacggacggtgagccatgcttggcgtggccgatatgctcatcccggaggtgctgaccaaagccgggctgatcaacgcgccgcagtgatacgacgccgtgaagtcggagtacttcgcgtcgtcgaccacgatgttcgtggacgagtacatcctgatccactactgggagatccggcggtggcaggacatcaagaacacctgcagtgtcaagcatgaccccatcttcaagaggtacagnctgccgccgcacgagagcgtatacccgagaagtgtcttcaacccgctcaaattcgcgcccacgctcgagatcaatgagaaggtgctcgtcaacgggaggctggagatgctggcgttcctgggcttcctgatgcagcacaacgtca

SEQ ID NO: 112410 - DNA, 348 bp, Zea mays
  unsure (1)..(348): unsure at all n locations
  Clone ID: MRT4577_34009C.1
aacttggntcctctaaacggccgccctttggttttgtttttttaaaaaaaaaatttttttttttttttttttttttgtccctgaaagcacttgattggaaacatttttcacaaaacatgggtagaccacagacagataataacttttaccccattcataaaatgtgccaaactaccggggggggggggtttatcacaacaacaaaaaaagccantnccaatccacccaacaataaactttacaacacactttaaaattttaaacaataaattccccctcccaaaccccncccaaaannnnnccccccattaaaaccaaaataaataaataancttctttccatcaacc

SEQ ID NO: 112411 - DNA, 938 bp, Zea mays
  Clone ID: MRT4577_3400C.1
gcgccctttactttttgtttcctaggatgttcatcagatctgcccaagaagacaacaagaaggtgagaaagatttgttgcatttcaacaatgaaatctgttcttgttccaaatgcctgctgcttgtttatgatgttgtctgatttgttatgttgtgatgcatattgcagtatcctagcctccagttggagttcctggggagctacctttctgagctgagcttgctggattatggcttgattcgctccttgccgtcacttgttgcagcctcagccgtctttgttgcaaggctgaccctggatccacacacccatccctgggtataatctcgatctgtttgatctctatacattcctgtctcatcaaatacaaaccaccaactcattttgttatgaacgggttgcagagcaagaagatgcaaacgctaacaggctataagccatctgagttgaaggactgtgttgctgccatacataatttgcagctcaaccggacatgtcaatccatggtggcgatccgggagaaatacaggcaacaccgagtaagcttgggctttgacagctgtacatggttgttagattgtttgcataactctagtgtactaactgtggaaaaatctttgaacagttcaagggtgtatcagctttgctacctcctgttgagatccctgcatcatacttcaatacactgaaggagtaggtgttccttgataatctaagagagccaagcacacagctttcctcaagcaagatgtgcaatgctaaggttgttagggtactgaggttcttggatgctgcatctaggcttggcttggagcattcagagttgatttgtttgaagttcaaactcaatagaaagttcggtgtatcaaatcttgtacttgtgtatcataattatacattacaaccaggtgcctttatttattgggggcacaattcc

SEQ ID NO: 112412 - DNA, 343 bp, Zea mays
  Clone ID: MRT4577_34010C.1
agcctatcaaagctattgatgtgcctcgtatcttgagctatatttgataagatgatgggggaagagaatatagaacaagacaactcactatagggatctattttcaatagtaaaagaattattctaagaagacctattatggtcttgaattatgtcattaattctatgtaatttgcatcaacttcaagaatatcattgtagttatgtccaaataagtccatatatgtgagatccatatgatggacgctattttatccgcttaatatcatattgcatccatatatatagatatcaaatgttaaaaaggtggacctaatctaaaaaagaaaagacctggtaaaac

SEQ ID NO: 112413 - DNA, 687 bp, Zea mays
  Clone ID: MRT4577_34011C.1
tcgggctctcgggcgagctccccacgcccgtcgtgcccctgctcggcgccccatcccctcaccctctcgtcgccctgtcccagctcgatcctgccctctgccctaacgacggcgcccaggcttcctcttcgacgttcttccctgccccaactgcgtctgcccagccgccgaccgacctcaacggtgaggtcctggtgctcgtgttgctccttcgctgtctcgccgagtccctctcgatgccgtggtcgtcgatcccctgctgctgctcctcctcgccgatgcgccagcaagtctgcagcagcgccacttgatctcctctatgcatgaacaacagcagcccggatctcctcgcgtcgcgtgcgccgatccgatctgcgcagccccaacctgcgacatcacaatacccttggtccctcgatgtcctgcacccctcgattcgttaaatatcaaatcaataaaatgtgcatttaaatatgtgtgtaaactcgcagcccttcgtcgatgtcgtgcctcacgtgtcgcgtgttcgacgaaaatcccaagcccgtggacagcacatgtacaactcaaatccgattggccaggttgtttgatgtatgtgtattttactcattgtgatttagttgatggtgtgtttatatgtgtgggggtgatgaaaaaaataaaagagatgtgacgttcaataat

SEQ ID NO: 112414 - DNA, 269 bp, Zea mays
  unsure (1)..(269): unsure at all n locations
  Clone ID: MRT4577_34012C.1
gggccgctttttttttttttttttntgcatcgaccgtcgcaaatttcggtggtatttaaattcgtccatttttcttaatttcaatattaactaaaaacttcccgnagaagccagggatgnggcgctctnccacgaaacaaanaggtaacncttagaaacttgggaacagagnacncaaatttcaagatagaagtgagggataatggtacaagatnntacgcgcccaagatgggggggataagctcaaaagggcgtaaatatgcgaaaat

SEQ ID NO: 112415 - DNA, 938 bp, Zea mays
  Clone ID: MRT4577_34013C.1
ctgggggtaccctcggtcggccgggattttcataaagccggccctagaatggttaaaccctagtagagagaaaggaagagaagggggcggagaagcacgtacgtcgtacatcgcccaccgccctttgcctcgcctcgcctcgcctcgcctgcatatctagcagccggagccggagccggacgccggcgccgacaatcgttccaactgatatggctacgacgccaccaggattcacgggcaacctgaagaaagcacttgcaggtctgagaagaatcagtttagatgggttgcgatggcgcgtatttgatgctaagggtcaggtgctcgggcgattggcttcccaaatagctgttgtgcttcaaggcaaggataaaccgacctatgcaccacatgtagaaaatggagacatgtgcattgtacttaatgcaaaggatatcagtgttacaggaaggaaaatgacagataagatttactattggcatacagggtatgttggccatttgaaggaaaggaggctcaaggaccagatggagaaagacccaactgaagtgattcgcaaagctgtgttgcgcatgcttccccgcaacagactgcgtgatgatagggatcgcaagctgaggatattttctggaaacgaacatccattccatgaccgccctctggaaccttttgtgatgccgccacggcaagtacgcgagatgcgcccccgtgcaaggcgtgcaatgataagggctcagaaaaaacagcaggcaaacagagccaaagaggaggaagatgctaagaatgtcgcagctgaggtcactgcataggctcctgatgtggatttgcatgctgccaatttggatgggcatgcgtccccgcaacagactgcgtgaggatagggacagagccaaagaggaggaagatgctaagaatggtcgcagctgagtcactgcata

SEQ ID NO: 112416 - DNA, 217 bp, Zea mays
  Clone ID: MRT4577_34014C.1
ggagcggggaacccataagcaggttttcagggcgtccattttacatggtaaacatccaaaccgacggttttgtcgaacaaacaacccaaagaagaaaagggggcaccgcctcaccaaacttttccggccccaacaaagatcatcaatttgccaaaggaaaagaaacaccggcattccccaccgaatgacacgtcggtaaaaccaaaaaaaaagaaaa

SEQ ID NO: 112417 - DNA, 1188 bp, Zea mays
  Clone ID: MRT4577_34015C.1
cgaccccgcgttcgcagaggcccattaatcaggcccttgaacggttaatccctacacggcctagagagaaaggaaagaagtgctccggggaagcaccgtgacacccttgctcgcccgcatctctctaaccgccggcgccggcgccggcgccggccatcgttcacatggctgcgatgccaccggccttcacgggcaacctgaagaaagcacttgcaggtctgagaagaatcaatttagatgggcttcgatggcgcgtatttgatgctaagggtcaggttaggattgtttttctagcttgagtagcatggatgaacttatctcaagaaggatagaggctacgaggtaaattttctatgtgatataggtgctgggacgattggcttcccaaatagccgttgtgcttcaaggcaaggataaaccgacctatgcgccacatgtggaaaatggagacatgtgcattgtacttaatgcacaggatatcagtgttacaggaaggaaaatgacagataagatttactactggcatacagggtatgttggccatttgaaggaaaggaggctcaaggaccagatggagaaagacccaactgaagtgattcgcaaagctgtgctgcgcatgcttccccgcaacaaactgcgtgatgatagggatcgcaagctgcggatattttctggaattgagcatccattccatgaccgccctcttgaagcttttgtgatgccaccacggcaagtacgtgagatgcgcccccgtgcaaggcgtgcaatgttaagggcccagaaaaaacagcaggcaaacagagccaaagaggaggaagatgctaagaatgccgcagcggaggtcactgcataggctccttgatgtggatttgcatgctgtcaattttttttgcttggtagcatttcgagtggaataggcactaaaagctgggaatgtgccaactccgttctgaatttattttgtattctattacaatttgtaactggaaccctgcctgtcacagctgcttgaaggttagaaagttaaaatatcacttttgcatcataagtaagctgaaataagctatccaattatttcagcttatttgtggctttaaagtaatattttacctttctactcttttaccataatccaacttatataatttaggagggaacaaacataacctaagaccctctgaattgttg

SEQ ID NO: 112418 - DNA, 352 bp, Zea mays
  Clone ID: MRT4577_34016C.1
aaccgagcgagagtgagcatagacactgtataccatataatgcaaaagtaaccacccaagatacacaaaggcaacttgtgtatgcacgtgaagtaatgcagtcacagaaactttattttgaaacaaacgaagacagtgattgcttctttaaacattgtacaactgaatctccataagattattacttagtcaacctttcagcgcatcaagcaccataatgactgcctccttcatcaattccataccgcgcagctggtgtctgatatgtgagagcctggattttcgtgggtggtactggatcaccacagcgctgtggagccttcgatcatatcaaaggctctgtagcatgcta

SEQ ID NO: 112419 - DNA, 684 bp, Zea mays
  Clone ID: MRT4577_34017C.1
catcagtggtcctttcgataatggaggtaccagcaccaccagcatgggcgtcccccctcgcgacgacgacgacgatcctgctggtcacggccgccctcgtcctcgtgacgacgaccgtcctccgccggcgtgcccaccgccaccggaaacgacaacgacaagcgccgccgggccctcggccctggccggtgatcccaacgtgtgggggcccgacgccggggagttccggccggagcggttcctggacgggagcaagcgtagcaaggtggacgtcaggggccaggacctggagctgctgccgttcggcgccggccgccggatgtgccccgcccacggccttgggctcaggatggtccagctcgtgctagccaacctgctgcacggctacgtgtggaggctccccggcggcatggcgccggaggagctgagcatggaggagaagtttgggatatccgtgtctcgcatgcaccagctcaaggctatccctgacccaaggcttccgcatcacgtctacttcgggccgtgatgctgcataatatccgtgtatgtggtggttggtaacgaagaagagtacgtatagaagccaaccaacgaaataatctttgatgttgatgtatccgtctcagtttattcatggcgtgtgagttgaactgatttaagtataaaattcaaagtgtattctac

SEQ ID NO: 112420 - DNA, 291 bp, Zea mays
  unsure (1)..(291): unsure at all n locations
  Clone ID: MRT4577_34018C.1
tatgctgcagcgtagtaactcggaatcggtcgaggctgagcagcgctttagactcagttcattagcagattagcggcgaaacagatccgcagaatgggcctgaactacatcaaggagaaagcccctgagcttctgtcggtcgtcgcctgcagtgaggtatctgatagcagcaagggcagcgccgagaagatgtgccatgaactcgggagtcctttccttggtaaagtgcccatggatccgcaactgtgcaaagcggctgagnagggaggtcatctttgtgatcagaatgca

SEQ ID NO: 112421 - DNA, 1950 bp, Zea mays
  Clone ID: MRT4577_34019C.1
gacgactctgcatcgtgaggcgaaaacgataacggggtgggacccgcagggccgcagcaagaccaggaggagagggcgagaggccgcccgggaaggcaacgcgccgtcatctcattctccctcgcaccgacgaggtcaggtcagagaccttcgagtactactagtcatggcccgcatctagaaggcagcaagaaagggggcggatggggcgcgcgttcgtgtacgtgatcctgggcggcggcgtggccgcgggctacgccgcgctcgagttcgcccgccgcggtgggtactcccgcggagagctctgcatcatctccgaagaggccgttgctccttatgaacgtcctgcactaagcaaaggctatttactcccagaaggtgctgctcgtcttccaggatttcatacttgtgttggtgctaatgatgagttactgacaccaaaatggtacaaagaacaaggcattgaacttgttcttggaacaaaagtgatttctgctgatgtgaggcgcaagacattgcttacaggcactggtgaaactatcagctacaaaactctaattattgcgacaggtgctcgggctttgaagctgcaagaatttggaatacaaggttcagatgcttcaaacatatgttatttgcgcaacatcgatgacgcggataagttggtgagtgtgatgaaatcatgtcctggtggaaatgctgttgtcattggtggtggctacattggaatggagtgtgcagcggcattggttactaacaagataagggtcaccatggtcttccctgagaaacactgcatgggtcgtctatttacaccaaaaattgcagaattttatgaaaactactacacctcgaaaggggtcacctttgttaaaggaactgtgcttacatcctttgaaaaagatacgacggggaaggtgactgcagtaatactcaaagatggtaggcaccttcctgctgatatggtagtagttggtattggcatccgtgcaaacactagcctttttgaaggtcaactgatgatgtcaacagagaatggtgggataaaggtaaatggacagctgcagacaagcgacagctctgtgtatgccgttggcgatgtggccgcgttccccatcaagctttttgacgatgatatccgacggctcgagcatgtggactcagctcgtagaactggtagacatgctgttgcctccatcttggatccttcaaagacgagggacatcgattacctgccgttcttctactccagagtgttcacgttgtcctggcaattctatggggataatgtcggggaagtggtccactttggagacttcacaagcagcagtccgaggttcggtgcatattgggtcaacaaagggcggatcgcgggtgcgtttcttgaaggcggaagtcgggaagagtacgaggccatatcgatcgctgttcggcgggaagctgtggtcacagacatgggtgaactcgagaaacaaggcctggcactcgccattcaggagagccagaaggaggtgcctgacagtgggcttgctgttgtcggaaaacctacttatgcgtggcatgccacagccggtgtcattgcagctgtgtcgatcgctgcaattgggtattggtatggcaggaagcgccgcaggtggtgaggatttgcattggggcgattccctttggtctgccgggccgaactgctgctggtggaatatctgggacgagtgctattggctgttaatccaagcatagttgtatagcgtgtatgagagtatagtctgtcgcaaacgtatactgaaacacagatgcctcgtgtattatctagtgaagaaaccagtggctgcctctaactcctcaggggttctcttgttgtaaaattgcaactcttttcttaatgagatccgcaattttgtggcaaagctggaaaaaaaaaaaaaaagcggccaaaaaaaaaaaaaaaaaaaa

SEQ ID NO: 112422 - DNA, 467 bp, Zea mays
  Clone ID: MRT4577_3401C.1
gacgacaattctccgaacgagaatgttctgagcggtcactatccaacacccccatcgcattcgtacgccacaccaatatcgcttctgaaggaacaaacgacgcagaccccctccagaacgagaaacggagatcgttaagcgcctctactaagaaccgccaggacaccgattgacaatgcgcatacctgcccatgctgcaactcgtggctgacctgctgatactggaagcgccttgacgaatcgtgacacgcggaacgcacatgaggaatccgtgggcaaaccaccgacacctgggaatgcgctcactgagactatcgatatatactagagcaagcatcgccgacaggaaccgggccgacactgcggaaaggagcacaacatgagggacattgctctatgcgatgaaactgaaacctgcgaaggccaatgcacaggggtgtgctggcacgatgcactatcccattatc

SEQ ID NO: 112423 - DNA, 440 bp, Zea mays
  Clone ID: MRT4577_34020C.1
tacctcgagccggccgggagaggtaccataagagaggtgaggagacccgtttttccgcactcaggctatctccgcagttcggagattattgcatttcctactgtcgcttgtgcacctccaccccctctcgacgataccatgaggcgagccatgtaattccacgtcgtcccagccggccttatatccagaaaccgtggctgagaacctcaactgaacacgaacatggcattcaggctgatggttgtatggacggagaccagaccgatggagggatcgatgatgcttgcgactcatactttgaagtgactgctgatgccggagaggtggtcctgagctgtctgtgtggaccttgaaccaactgatatctgaccaggcgcaggactggcagctactgcagcctgttcaggcctgggcatcttatcaaggtcagcgaggatgca

SEQ ID NO: 112424 - DNA, 519 bp, Zea mays
  Clone ID: MRT4577_34021C.1
atggaccaaaagaaaaagataaatgaattaatagaaaccattaacgagaaggatgatattttggaaagccaagaggacttgctcgttaaggaaaataaaaaatttgttaagttgaaaaatgcttatgctcttgaagtagaaaaatgtgagaatttgactaaagagcttaagatttgtaatgattctatttcttgtcttagaactgagaatgatgatttaattgctaagatagaagaattgaatgctagtaatgtttctacatctactgttgagcatgtcaccatttgcactagatgtagagatattaatgttgatgctatgaatgatcatattgctattattaaagaagaaaatgatcacatagccaaattaaacgctaaaattgccgagcatgatatgctttataatgggagacgccatgggattaaggatggcattggcttccaacaagggagccaaaccaacatcaagcttaatgcctccaagaatagactatctaattttttaagggtaaggtga

SEQ ID NO: 112425 - DNA, 485 bp, Zea mays
  Clone ID: MRT4577_34022C.1
aaaaaagtattgttccaaaaaaaaaaaaaaaaaaaaaaaaaaaaaaaaaaaaaaaaaaaaaaaaaaaaaaaaaaaaaaaaaaataaaaaaataaaaacaaaaccaaaactaagggcaaaattctgcaaatatccttaaccactgaaggggaaataaaccatgcaggtttggggccccggggggccccctttgggggggttttttgggccattgcccccccttgggggccgtctggcctggtattagcggggccttttcccccttatgggggggggattcccttcccttggccccggttttcccattggcgaagggggcaaacccgggggttcccccaattaattgcggggccgcgatttccctttttccccactttgtttaagcccataaaggcccggggggtgtcccttttccccccattgggcccccttcattggcaagggccccccccctggctcctttctttttcggcggggcgttggggg

SEQ ID NO: 112426 - DNA, 1113 bp, Zea mays
  Clone ID: MRT4577_34023C.1
cctgccggaaagacacacttgggcacagcagtgcaggcttagaggtggctcgcaaatgtctcgccttctcccacgccgccgtcacccctcctgcacctctactgcctcccttagtgaactcgcctccctcctcgacgccggccgcttccaccgcgcggtcgaccttgccaaatccctcctctcctcccatccccccgctgccaacgtccccgacctctaccaagctcttgccgccacagccgacaccaaggacggcccacgggcgcgcccccattccttcctctgcgacgcggcctccgccctcgttgtctcctccgcgcgtctctgccaacctgacggcgcgctccgcctgctctccctcctcgccagcgcgggcgacggcgcctgcgccggcgaggtgtgctcgccgctgccgtccctatcgtcctgcaatctccttctcgagtctctcctattcgtaggtcgccacgctgatgtgcgcgccgcgttcggcctcctcgtggcggccggggcgcgcccggacaccttcgcgtggaacaaggtcgtccaggcctgcgttgcggcgggcgacctcgatgtggcactcgccatgctgcggcggatgggccgtagcgaaggcgccccacctcccgacgcgttctcgtacaacgtggtcatcgcagggctttggaggtccgggaagggcagcgacgccctcaaggtgttcgatgaaatggtggacatgggagtcgtgcctaaccggatcacctacaacacgatgattgatgggcatgtcaagggtggggacctggaggctggtttcagactgcgggatcaaatgctacatgatggccctaagccaaatattgtcacttacaatgtgctgctatcagggctgtgccgcactggcaggatggatgagacgagagccttgatggatgagatggcatcacatagcatgtttccagatggtttcacatatagcatattgtttgatggtctcacaagaacgggagagtcacggaccatgctttctttgtttgcggagtctttgaagaagggtgtcatgcttggagcatacacttgcagtatcttgctgaatggtctatgcaaggatgggaaggtcgcaaaggc

SEQ ID NO: 112427 - DNA, 384 bp, Zea mays
  Clone ID: MRT4577_34024C.1
accgacagccaggggaggggggggaaaacacgcgcagagaccccccggcaacaaccgccacgagacccgcgccggcgaccacgaccggcggcggagacacacgccgaagcggcgaggcgacaggcgccgaggcagacgaccacaaccaccgcgaacacaggagcaccgggcggagcgcccggaggcccagcacgcgcccaaacgcgagcagcaccacaccgaacccgggggccgccagcgcgaagccagcgagggggcgcacagggcacacggcagcgcgggcgcggcaccagcggcgcaagccacgggaccggagcacggacaaccaagccaaaggacagcgcacgacggggacaccggcacagaggcgccgaccgccagccc

SEQ ID NO: 112428 - DNA, 2741 bp, Zea mays
  Clone ID: MRT4577_34025C.1
gcgccagcgaactccgctccctctacgcagccgtatcgtcccgactcgacgacgccggcggccggcatcagccccgttcggcgcgccgccgcaccacagggcacctacccagcaagcgccgccgccggggagccggagaggtgggccccggggatgacgatggcctcccggcgcggaaacagtccaggagggtgaggcggcggcgggagctcgctgccaaccccgcggaggggttctcggtcgccggcgacggtgcgcggcggctgcgcacgcacctgtggtatgcgaaaaggttctccatggagaggcggtggacattcatcttgcccgtcggcgcccaggggaggggtaagggctcaaggagtgttctcaagcgtctgaaaaatgggacaactatccatgatgctggctacttcattccaatagagctggatggtccagaggacgccctgttatccgttctcagaatggttctgcgcccatcgcctgcagaaaaaacacccgatttgaagcatctacaggatcaagttatgcgaggtgtttgctatgagaatgctatgctttgggatgttaggagtatgcattctcaaattgttggaccagtaacatatatgtggcgtccattctcaagagcagatgacaaatctgggattgaaggagatcagtgtacttctcactgcattcacgatgaaagcggcaattcctcacgacgccagttgtggatatggattcatcctgctgcacttgatgatggaattagtgcaatacaatttgcatgtgagagacagattcaagattctggtggtgtggtcaaatgttgttcattagagggaaaaattggaagattggaagtcaatggatgcaaggctatgcaatctcttaagaagattttgcatccaaccagttcaagtaagatcaacacgatatcaacaagtgatatctccgcatcaactgatactctcctggattcctgtattgcctctcatcttttgaaagcttctgtcattagtaatgctgagattcttcaacctggtgctatactatccatggtagttcatgaccccagggaagtttcagtcaagggaatagattcttctaaaatagtctcccatgacaaacagagcgaagttttggaggaagatgtagccccaaatgctaatgaggcgtcatcagaagttgcaaatatattgccattgatgtggatgcaccctgggaaacatgatatactcctttctgactgtagggaactgtgggactccaggcaaaccataaatcctcctgtgtcagatgaggttctctgtaaggagaagcactctgaacgtataaagtttttctgcttggattcaggaaatgatcaagagcaaacaacacaagagaaggacaacttcattcgatcctgcccggttattcttttgaaacatgccagagaaggaataccttctctagggtggtccatcattctacctttgagttgggtgaaacctttctggctctttctagtatctcatggtgcccatgcaattggcttaagagagagacggtggattgcagcaaagttgagaatgccatgctttccttatgattatccagatagcaaagcgtatgcatcatacatgtccaaagaagctgctggttttgataaagtagttgagcgccgccctgttgccaagagaccaccaagagttcctgtgcctcctttatggcactgtatcatgacttgttttcgtaaagattatgatggcatattgggtgttcttgaagtagacgacttggtgcgggctaacatggtattacctaaaaactcttctgcacattgcgaatctggagacgcagaaccatcgcaagcaaatgttgcatccttgcaacttcatgtgccaagaaccacccaaatgttgagacagtatgtggaagaatttgataggaagtatctgagctcatcatctgacatgaaagtggattctgatgaacccaacctagcttctgataacactgtcggcatgacacggttcgcgagtgaattatgccttacaagggttctgatccgagctttcaaggaaggttcttttgaagagggtgccgttgtttgtgccccattaccttcagaactttcagcttggaaaatcagatcaaaggaagaagaggaagaatgcgtagaaaaatgggagctccagcttcctcagtcccatgttagttcctatttctcgtggtttgatcccagcacgagcagcctccagttgcctacggatggcgtcgcacgggaggcgttcaggtggccgataggctttgtcaccagtggtttcatccatggaagtaacgggcaagacgcagtggcggtcgcattctgcgaggcaaagcttctggcagcgttgaggcgacagcaatggacgcatggaaacttgcagagccgggaggtgtgcgtccttgtcaggaacgcgagatcggctgcctaccgacgagcgctggccaccaccgtcctggagcatcaggaatcagacctagcgtttctgtagtctagtcgggaacctgttgacgttgattttttctctctctctcccttttggagttccatccatcctccactcatccgttgatgaacctaagtaatttactggtgattacagtttatttgtgcgatgcaaaatcattaaacagaagaagtaaatgcatctatctcatttgacggatttcaatgattaactgttacatagtatgaataataataaagcagctcgaaaagatat

SEQ ID NO: 112429 - DNA, 394 bp, Zea mays
  Clone ID: MRT4577_34026C.1
cacacaatctctattttatctctaactctctatatttttaaaaatactttcaacctcttccttaagaggagttttataatctaaagactcccttcttaataataaatatttaacaacctcacataatttctcacattttattttacaatactacttataattacaaaaaaaaaccttcctataacccacccccatcttttatctactaaccctaccatctattctatgtttgccaccaccaaatcacatccctgtcctcttcttttgttagaacaccatcttcttcccacaaatcaaaattacttatcctattttttatcatataaccatacccttagtctaataaaaataaacttcccttccaattttacttcttttacttttctctccatat

SEQ ID NO: 112430 - DNA, 256 bp, Zea mays
  Clone ID: MRT4577_34027C.1
ttctcatgtacgaccagtagtaggctcactatgagccataccaacacgtcctgttgctgacactgcactgctccaacgaaagccactaggaccaggcaagccagcgcaagaccggtgcctccatgctgctgctgcgcgcacaacgagcactagggggggagcagctgggggtcaaacagctttgctccacccttttagagatgacggaatcctccgagaagcagtggaaccaccagcagcaactactggtgatgtg

SEQ ID NO: 112431 - DNA, 1071 bp, Zea mays
  Clone ID: MRT4577_34028C.1
cgggacgattacgcgtacgcaatgttactttatcctctcctcgtgcagccaagaccgggatgaccgccctcaccccctcggctccctgcccgtgcccgtcatcacctgggcaccatctcctcatctccatggccgcccttctcctatctcactgctcgcccctgcctttccttcattgagccgcgcctccctggtgtgtccacgccgtcggtaagtgctcgcgtgggaccctgtctcacacgtcggtgctcgccctagacactcccgtgtcctcatcccctatagtgctcggattcggtcatcgtctcacagtctcgacccacctccagccgatgcctcctccctccatcttgccctctacaggtcgtccctcacttagtcctccgccttgtctccggaccacgctactctttgtgcagcaccactggtcgtcgatctgtcaacctcgctggtcgtcgtccggtgagccccccaccattcttgccatggcttgcattccttgtgcgcaattaaatgtgtgaaccggtgaatattgtagttcttgtggatgtcgagtcgaattaatagctatggttatatgtgtttttgtgtgtgaggttggaggagataaatccctggttgtcatgtggagaaggctttagtgcggagctcaccgtgtgtttgacgtaatgcttaactaggactcatcgtcgattttgcggattcgagtcaggtcttgtagggagaaacagtttcggctgaagctgtccgcatgtgatgaccgaaggttcctcagtatgaagcttcggaattacaaaccgacttaagagtagaatgaccttacagtccataaatgtttgagtcgttgttgtaattccttataagggacataattgtaattcctcacaggctgtgtcccgtgcctataaatagtgaacagtattcctttactgttcacgcattcctgtaattgcaatcgcatcattcgggaatcaatctttgtcaaggcaaaggtataattgtattcaacatttaaacacattaaatcgatataataagaaagtaatataattcatttataatttgtttacc

SEQ ID NO: 112432 - DNA, 232 bp, Zea mays
  unsure (1)..(232): unsure at all n locations
  Clone ID: MRT4577_34029C.1
aaattttnntttttacgccattgcagttgtttttgaaatgggggcattttaactggacgccccaacaaaacacgaggaaagaccagaagaggaggaccaacacccaacaccaaaaggggaaagacgagatcacacacaccacaacaggaagttaagagggaaagacacaaaaacaaaccacaagggaaagggaggaaaaagaaccccgccgaagggaacggaggatacaggc

SEQ ID NO: 112433 - DNA, 1079 bp, Zea mays
  Clone ID: MRT4577_3402C.1
ccggccgggaataatgaataaaaaaatcaaataataattaataaaaagaaaaaagtgtaaatcaaatagaaatttataaaatctatgatcctagagtagttccctagacaaaatagaagtaagttcacaaacaagattcaagaataagattctctgatgaaaggagagaaatatgtctgaggatccgctgggtataaggagtgaaagaggggatcatttgtttcttgaacagttcttttaaaaaaattttctatcggccctcctccgccctccgcctcctcagtgctccggcgcctagcgacctgctcctgcccccgccgccgccgtgcacgcacagccggagcaggagcagcgctgcccgcctttaccgttgcccatggagaactctgccgccgccgccgccgaacggccgcgcctcacccgcgcagccgccaagcgctcagccgtcgtcacggctgtggccgtcgccgccaagcgcaagcgcgtcgcgctcagccagctgcccacgctccccaacgccgtgctcggcgcgcacgacgacgacgacgacaagcccgtcaggaagcagcgcctcctccccgccgccaagcccaagcccaagcccaaggcagcgcccgcgcctgccgcgcccgccgccgcggatgacacggatgacgacattcagctctgcaagccctacgcttccgacatctactcctacctccgctccatggagtcgcaggccaagcgccgcctcgctgttgactacatcgcggcggtgcagatcgacgtcacgcccaacatgcgtggcatcctcatcgactggctcgtcgaggtcgccgaggagtacaagctcgtctccgacacgctctacctcaccgtctcctacatcgaccgcttcctctctgccaaagttctcaacaggcagaagctgcagctcctcggcgtctccgccatgctcatcgcatccaagtatgaggagatcagcccgcccaacgtggaggatttctgctacatcaccgataacacctacaccaagcaggaggtagttaagatggagagtgatatactgaatgtcctccagtttgaggtgggcagtc

SEQ ID NO: 112434 - DNA, 629 bp, Zea mays
  Clone ID: MRT4577_34030C.1
gtatgtactttccagcaggcgcgacatccttgctccttctcttattttgattttaggtactctccagtattcaatgtgcatgtagaaccgtagagaatcagctagatattttactactgtataaggtgtggagtgctgagagtggcatttatattgctgcaaatgcagtatatgatttatgcagcagagaggaggctgcaaggggagaggaacggtgcattgaggttgaggtacacaggacacatcgggacccgggagctccagaagaggctcgatcgatcttgacaagaacagactatatatagagaagatgaaccatgcaaaaactcaggctggaccaccggggcttcactgctggcggaacagtagagggcttggctgctaccagggtgatccaaatggagcgtgtttgtggcctcttgcactgcatgattaatggtagcttctattacatgacatgatttttgcagctgacatgtttcatgcgagaggacataaatttgcatcctatttttctgtccaattggttccaaatcacaaatgtttgtgctatcagtgacaatttgatggaaaagacgagtcatatatacagccaatgaaagctttcacatcagccgttgctcttgatt

SEQ ID NO: 112435 - DNA, 243 bp, Zea mays
  Clone ID: MRT4577_34031C.1
ggggggttctttgattatatggtgggtttttattgtgacttgaggcgtcccatatgttggggagagctaaagacacccggcagaatacagagtacaagacaattagttagtgttccggggcaaccaagtgcacggaatacactaggagaccggcacagaaaaaaagcccaccggcaggcagctcgctaaggcaagccacgggagcacaccaacaaggcggagacagaaaagggagaacagggg

SEQ ID NO: 112436 - DNA, 562 bp, Zea mays
  Clone ID: MRT4577_34032C.1
ttgggtacctcgaggccggccgggccccgtccagagcgcgagcaacccacgccgccccgctgtctccgccggtccgcccccgtccctcacctcaaccgaatgcctggcaccccgtctcctgatggcgggcaaccctcgacatggtggaggcgcctgagaccgccttcccgacccaaccggctccctcgccgggggctgcggcccctcctggcaaagaacggatcccccttccccacgacctgcaaggccagcgccacccgggaatccacctctacatctgccgagtcgcctactccccctctccagcaccttcaaggctctcctcatcttcctcaggcctactactccctgtggaacagtggtcatcctacttggagggggcataagggctaaaaacacggagtgctcctactaattcaatggtggtccgctccgtatctctgagcatctactaatcccgcagcacctatgcagcgtggagaccagaccaatgttgttgctacatcgacccaactcgacatcactggtgtatatgtcaacaaccttgatgaccatgactttg

SEQ ID NO: 112437 - DNA, 271 bp, Zea mays
  Clone ID: MRT4577_34033C.1
acagacagtcacaagtacgagctcataaggaaggcatatgcaaaagcagccatggcgaactcgtcgtccggccttgcagtgaacgatcagtgcaaggtgaacttccgggagctgacgtcgcggcggagcttctggttcatcatgtgcaggatcgactacacagacatggagatcaaggtggacctcctcggcggaccgaaccagtgctacggccacttcaccgacagcctcccggccaaagaatgccgctacacgatctacgacctcgact

SEQ ID NO: 112438 - DNA, 503 bp, Zea mays
  unsure (1)..(503): unsure at all n locations
  Clone ID: MRT4577_34034C.1
antaaacnannnanccagaagaaaagcccggacaaaacagggagcagagggaacaccaaagtttcctaggttccgcagagggnacaaccccgaaaaaaaaaaaagccggggctggggagcaaaagcccaaggcctggtttgttttttgggggcccccccaaaaaaacctgcgtggaaaacagccgctttttgggggggggggggaggtgaccaaatgggggggagggggggttgttaatttccccccagaaaaaagaggggggggggaaaaagaacgaaaaaggctcccatagcgcctgttttgtttaaaaagaaggaaaaggccccggtggtttataccgccggcccaaaatttggggggggggggcctttttgggcagaaaaaaaaaaaaaaaagcccctggggcccccctgtgggggagagaaattggggtgtttttcccaggggggggggggggtttcaaaaaaacgggggggggtctttaaagggaggaggggggggg

SEQ ID NO: 112439 - DNA, 255 bp, Zea mays
  Clone ID: MRT4577_34035C.1
gactagttctagatcagcagaggcggcttctcacaatctagaacttgtaacaacagggagattgagagctttttcacgctctcccaaaaaaagacgtccccatcattaagcccgggcctgccaatcaaaggcttaccatggcaacacacgtttcctaagtggtggtgccgaatgggagcccgggcgctgtcccctcggtggtgtctcccagaacgaacggcgtcagacataacgtaactcatacgctccctacca

SEQ ID NO: 112440 - DNA, 1859 bp, Zea mays
  Clone ID: MRT4577_34036C.1
ttcacgcgtccgcccacgcgttcgtgcacacctcgagcccggccggggccagcaccgcagagctctcatcttctctctctctctttctcgcgctcgctttgcttcctcgtcgaggtccagttcctgcattgatggcgaccgaggtggctgagactcccgcgccgttggcggaggcggtccccgagacccccgcggaggcaccggcggcgcccgccgccgaggcgaagcctaccaaggccaagaaggcctctgcgcccaagaagcgtgccaacccgacccacccgccgtacgccgaggtaattgcagcctttgtgccacgttagcttgcacccatgtcgtgtatgtcgcgtctggatctgacggaattgtggacggtttgctggtgcgcagatgatctcggaggctgtcacgtcgctcaaggagcggacggggtccagccagtacgcgatcgccaagttcgtcgaggacaagcacaaggacaagctcccgcccaacttccgcaagctcctgctcggccagctcaagaagctcgtcgccggcggcaagctcaccaaggtgaagaactcctacaagctgcccgcacgcgccccggccgccgccaagccgaagcccaagtccaagaccgctgtgaagaagcccaaggccggtgccaagaagcccaaggccgccaccaagcccaagccgaagcccaaggccaagtcccccgccaaggcgaagcccgccgcaaagcccaaggcagccgcgaagcccgccgctaagccgaaacccgcagcggccaagcccaaggcggccgccaagccgaaggccaagccagctgccaaggctaagccgaaggctgccgcggccaagccgaagccagctgccaagaaggccggccgccccgccaaggccgccaagacgtcggccaaggacacgcccgggaagaaagcggcgcccgccaagaagcccgctgctgcggccaagaaggcccctgccaagaaggccgccccagccaagaaggctgcgaccccgtcgcggaaggtgccgtcccgtaaggcgaagaagtagagcggtggtcttggcaggaatctagggtttcgtgctccttcgattttagatgtttactcgtttttgctctagttgtgggtggtgtgcggggtgcggggttactaggttgtaaatttgatgtcggaggctggggtacacataggcattctgtaccagcggtggaaggcgccggcgacgatgacgaaccagtgtgtgttattattattagaagacaacgttgtatttctgtagctgaattgttgagttgcggatatcattgtgctgctaaggttaatgtgacgataaagttaatgtcaagagttaccttccttcgcgtgtatgtactctgattattcaggctgtttttggctgggattaatctggtcttatctgaattccctatctgaaatagagaattgttcggtgtgcattttgtgaccaataaatatttttaatattttatttttttatttaatatttaaaaaagggcggtcgtttttgaggttccaagctttcttcctcttccttcgattttagatgtttactcgtttttgctctagtttttaattgtgcgcggggtgggttactaggttgtaaatttgatgtcggaggctggggtacacatgggcattctgtaccagcggtggaaggcgccggcgacgatgacgaaccagtgtgtgttattattattagaagacaacgttgtatttctgtagctgaattgttgagttgcggatatcattgtgctcctaaggttaatgtgacgataacgttaatgtcaagagttaccttcaaaaaaaaaaaaaaagggcggcgctcgcgatagaactagt

SEQ ID NO: 112441 - DNA, 458 bp, Zea mays
  Clone ID: MRT4577_34037C.1
acccaaactgccatgcatgaaaattgatggacagaaagaacaggaaccaaccaacacaagacacaacaaggtggaacagggggaggcatggggcaccgcgccactgacaccgggccccaccaccattaccacccgacgcacactttatttagcccacgttactcgcagcccggaccggacacgtccacgcgaaagtaactggtagctacgtaccgggctacgttcgagacacacacccccacagagagagacccccgtaataaccgtagcgtactgaacaaaaaaatcccgtgtcatactggcatgtacgcgcgcgagggaataccccgccacgcgcgcacgccgatcccctgggccctggccgcccccgctgggtgcgcacggcctcactcggtggcctttttgggctcctaaagagcaaaaacctcctccgccttggggggcggtttctggggacc

SEQ ID NO: 112442 - DNA, 607 bp, Zea mays
  Clone ID: MRT4577_34038C.1
ggccgcttttttttttttttttttcttttttttttttttttttttttttttttttttttttttttttttttttttttttttttttttttttttttttttttaaaaacaaaaaggcccttcttttttttatttaaaaaaaaaatacctaaggcctgtttaaagtttttttccaaattttatcgggcccagaacaaaccaatttaaaaaaaaccccccccaggggggggggggtaggcaaaacccctggacaggggggccccccaataaaaacacatcagcgtggccccctacccatatccaaaaaaaccatccgttctttttttccggaaaacctgggacggggaaaaaacatcggcaattttaaagatcattttccccccctggggggaaaaaaaaattttttgttttttcccaaaaagggtctaaaaaacttttttttttttaatgggggggggcccaacgtctttgaaatttatcccacagggggggtggctccccttgacttggggaccttttaccgaagttaaggtataaattggggacaaaccacttttttcgcccaacccttggggaacaccttttaatgcttcaccgaaggccctgataa

SEQ ID NO: 112443 - DNA, 2047 bp, Zea mays
  Clone ID: MRT4577_34039C.1
cccacgcccccctgctgtggcctctgctctctcctgccagttcacctgctgcctccggtgcccgctgctgtgcctcgctcgctcaccaccaccaatcgccaccccgtgcggcaccattccactgcacaaacagcgcgccactttcccaattcccgtcgcgtggcctccttccgttcctggcacactttgtgcgtcctgtagcgagggggtgatcggcgatggactgggggaacaggaccaaggccgccgccgccgctgcggcgccgtgacgagagggccgggggaggggaagggctcagaggatacgtcaaggtcatgaccgacgaacagattgaggtcctccgctagcgtgatctcgatctacgccaccctcggatagcgtggttggacaggaccaaggcctccgccgccgccgccgcagcggcggcggacgagagggctgggggagcggaagggctcgcgggatacgtcaaggtcatgaccgacgaacagatggaggtgctccgcaagcagatctccatctacgccaccatctgcgagcagcttgtcgagatgcaccgcgccctcaccgagcaccaggacaccattgcaggagagctgcgtatcattgcattaagaagaaaagccgaatacaaatggcctgcgaggctgcaaccccgggcaaaggagtccgaagaggaaacccaaagaaaatataaagaaactactaaaaaagagaaggccaggtcacaaccactaactacaacttcctaagaatttcctgatccaagagcacgcaaaccagctgctccaacaaaacaccaaagattgcgctcatccataagggaccggagatttgcataaactttttttagctttcattaggtcattttttaaatattccgtattccaatgattcaccctaattacttacattgatggccgcacaacatcccacctgtccctttttagaataatctttaaaacagacttcactgaatttgcccttcctcctgtacaagtgttttaatgctcctttgtaatgtatgcattgtcgatggaatatagtcccttcttttttttcccgatcaactgggtttttgtttcttcttcaggaattaggtttagtaatctgtactgtgatcctcaaattatccctggaggccacaagatcacagcaaggcaacgatggcaaccaacaccaatgcagctgcagatcttggagaacatctttgaccaaggcaatggaacaccaagcaagcagaggataaaggagataacggcagagctctcgcaccatggccaaatctcggagacaaatgtgtacaactggttccagaacagacgggcacggtcaaagcggaagcaggccgcttctttaccgaacaatgctgaatctgaagctgaggtggacgaggagtctctcaccgataagaagccgaagtcagatcggtcgctccaggacaacaaggctatgggcgctcacaacgctgacaggatatctgggatgcatcacttggacactgatcatgaccaaatcggtggcatgatgtatggatgcaatgacaacggcttgagatcgtctggcagttctggccagatgtccttctacgggaacatcatgccgaatccaagaatcgatcatttcccggggaaggtggagagctcccggagcttctcccatctccaacacggggaaggctttgacatgtttggatgacatgatgcggcgctgagttaccgtgtaaaatgtgatggttgacacatcgtgcgttcaatttgctgacatgaaagttgatgttggatgtccgtgttgcttatcacgttctggttaaccacctccgcggatggtagctagcttgaatgaacctactctttgggatagctgtaagaggttgatattatagtttgcccgtagtctatatacgctgaactatcagcatgtaattctccacgtttgcaaatttagcacgggtatgcagcagcctgtggttaaaccttcgtgtgtgtgaaaccatttcttgcttgcttttaagaaaaaaaaaaaaaaaaaagcggcccgctatag

SEQ ID NO: 112444 - DNA, 160 bp, Zea mays
  Clone ID: MRT4577_3403C.1
ttgagcctcttttttggattcccaagcctttcaaccctgattgcgtcccttgattttggaacgccacaacaacaatcaagccggcattgaacccaacgcaacaagaacccgcgggaaaggcaaaaatggccccgccgggcgcaaaggcggccggcccaag

SEQ ID NO: 112445 - DNA, 244 bp, Zea mays
  Clone ID: MRT4577_34040C.1
atgcaaaaaaatggcgctgagccaaccaacagaatgttcagattatggtccgcgagtccaaaaaggaacagccgcaaaaacagaacacaggcgacgccaggcacactcaccaccaacaggaaacgcaccgagatggggcggggggggggaggctgcaagagcactcactaccttcaaaaaagaaagggggaaaaaaagaaaagaacaacccatctaatatgtcaaaacactatgcacaaacaca

SEQ ID NO: 112446 - DNA, 1612 bp, Zea mays
  Clone ID: MRT4577_34041C.1
cccacgcgtccgcccacgcgtcgggctcgaggccggccggggtggccggtgcgcgcgtccacaaccgccgccaccgccttcccacttccaatacgcctgctgccactttccccattcctgtctgaccatccccacgcccccctgctgtggcctctgctctctcctgccagttcacctgctgcctccggtgcccgctgctgtgcatcgctcgctcaccaccaccaatcgccaccccgtgcggcagccgcgctgccatcccgcggaggactggaggagcacgcatatccgagccttccctgccgcgtcgcatggactcatgctgtcgcgggccgcctcccgcatcgcctccaaccgggtgcctgcctagctggccgattttcttcctcgcgtagccccattccgcagcacaaatagcgcgtcactttcccaatttctatcgcgtgccccccttccgatcctgccatttcgtgcatcctgtagcgtctggcagtgcgggggtcatcggggatggagtgggtggacaggaccaaggcctccgccgccgccgccgcagcggcggcggacgagagggctgggggagcggaagggctcgcgggatacgtcaaggtcatgaccgacgaacagatggaggtgctccgcaagcagatctccatctacgccaccatctgcgagcagcttgtcgagatgcaccgcgccctcaccgagcaccaggacaccattgcaggaattaggtttagtaatctgtactgtgatcctcaaattatccctggaggccacaagatcacagcaaggcaacgatggcaaccaacaccaatgcagctgcagatcttggagaacatctttgaccaaggcaatggaacaccaagcaagcagaggataaaggagataacggcagagctctcgcaccatggccaaatctcggagacaaatgtgtacaactggttccagaacagacgggcacggtcaaagcggaagcaggccgcttctttaccgaacaatgctgaatctgaagctgaggtggacgaggagtctctcaccgataagaagccgaagtcagatcggtcgctccaggacaacaaggctatgggcgctcacaacgctgacaggatatctgggatgcatcacttggacactgatcatgaccaaatcggtggcatgatgtatggatgcaatgacaacggcttgagatcgtctggcagttctggccagatgtccttctacgggaacatcatgccgaatccaagaatcgatcatttcccggggaaggtggagagctcccggagcttctcccatctccaacacggggaaggctttgacatgtttggatgacatgatgcggcgctgagttaccgtgtaaaatgtgatggttgacacatcgtgcgttcaatttgctgacatgaaagttgatgttggatgtccgtgttgcttatcacgttctggttaaccacctccgcggatggtagctagcttgaatgaacctactctttgggatagctgtaagaggttgatattatagtttgcccgtagtctatatacgctgaactatcagcatgtaattctccacgtttgcaaatttagcacgggtatgcagcagcctgtggttaaaccttac

SEQ ID NO: 112447 - DNA, 465 bp, Zea mays
  unsure (1)..(465): unsure at all n locations
  Clone ID: MRT4577_34042C.1
gcgcgggggtttttttttttttttttttttttttaaaggactagttcatttcattaaccagcaactcgcacatacaaacatacacatcttaccacttcccctccacattgcccttatccttaaccagaatttctcttgtagatacatattcaggggaccgtattggaggacngncaccggtccaactcaccccctcatctcgggtatatacttgtcaagcgacacgacccatccgagcatgggtttcgacatcatccacccatcgccaagaagtcaatgttagttcactccttcgtcactaggtttccctcctctttaggtactttagccgttcctaatgccatcttgcacctggctttattggcgtggctgagctcggntcggcgcttgagatggagtcccttagtngggagggttggggccacccatgcctggaggggggtagtcttcggggctgcctggtct

SEQ ID NO: 112448 - DNA, 574 bp, Zea mays
  Clone ID: MRT4577_34043C.1
gctgacaaactaaaatagcagtgaactttggttgcaaacgaggtttcagatacatgctaattatcaatccgttacaaccggtagaggccttgaccttgcattgtcgattagctatcttcaactgcaccggatgcacgccctcagcttcttgatgtagacgctcatctgattgattctccccttgaaatcgctcttgcttttgcccttcattttagcaggcgctccacatcctgcctcccactgaacttgatcatgggcgccgcctccatccgcggcacagacgtcgtcccgccgttggcctcggcattgttgagagcccaaagtacgttccggcgcggcatcgccttgtaacccatctcccggcgcgctggtcccgcggtctccttcttctggtaggagctgcgcggcggcagagacgaggcatgttggggattactggtaggattaggggttatagccgctaggtttttcttgtgcacggtgggggagttggagctttctcgttgcggggatggagtgaactcgacggcaaagaatctcgtagctttgaagcgccgacgaactcgccctttgt

SEQ ID NO: 112449 - DNA, 910 bp, Zea mays
  unsure (1)..(910): unsure at all n locations
  Clone ID: MRT4577_34044C.1
ccgaaagttctatttaattggttatcaatcgtttggcgtccgttccgatttccgcgtctctcccgctgcttctccaactccgccgccgccttgcctcgctcccctccggccgtcccgtcggccgtcgcccgcaagctctgcatcgcttctccagcttcagccccagccgccgcctccggatctgttctgtccgcctggtggggtggccttcaccgatccaacaaagggcgagttcgtcggcgcttcaaagctacgagattctttgccgtcgagttcactccatccccgcaacgagaaagctccaactcccccaccgtgcacaagaaaaacctagcggctataacccctaatcctaccagtaatccccaacatgcctcgtctctgccgccgcgcagctcctaccagaagaaggagaccgcgggaccagcgcgccgggagatgggttacaaggcgatgccgcgccggaacgtactttgggctctcaacaatgccgaggccaacggcgggacgacgtctgtgccgcggatggaggcggcgcccatgatcaagttcagtgggaggcaggatgtggagcgcctgctaaaatgaagggcaaaagcaagagcgatttcaaggggagaatcaatcagatgagcgtctacatcaagaagctcagggcgtgcatccggtggtacatggagctggattattctgttgatattctgtagcttgcttagcagttgaagatagctaatcgacaatgcaaggtcaaggcctctaccggttgtaacggattgataattagcatgtatctgaaacctcgtttgcaaccaagntcactgctattttangttgtcagcaatatcggattgttttggatacaaactatatagctctagataaaaaagttcaaaatcttgctttttatatc

SEQ ID NO: 112450 - DNA, 1275 bp, Zea mays
  Clone ID: MRT4577_34045C.1
atggccgcccccgacgtcctcccctccgcgccgcgcccgcccgatccaatgatgaaagcggtgtcgctgccacgggtggaaaaagggagcgtctttgggaagaggttaatgctggcgtacctgaaatgcggcgacctgggcgaggcaaggacggtgttcgatggaatgcctcctcaagctgctgatgtccgtgtccggacttcgctgatgagcgcgtacgccaaggcgggtgatttacagaaagttgttttgctgtttaggcagatgcaagtgctgcggggtcagtccagatgcacatgctgtttcctgtgtcctcaagtgcgttgccagtttgggcagccttacgaacgagcatgcgcggttgcaaatgctctgatcgccgtgtactcgaggtgtggacggatggaggatgcgaagcgggtatttgacagtatgcatccctgggatgccatctcttggaattctatgattggtggatgcttttcaaacggatggcatggtacagctgttgattttttcagcaaaatgtggtctcaaggccttgattctgtacaaagtgggatagatgatgctgctcttggatccaaactggtattcatgtatgtgaaatgtggggacatgggctctgcaagaagggtgcttgatgcgatgtcatcaaaaggtaatgtgcacgtatggaatctgataatgggtggggatggcttggtggctcatggatatatagtaaaattgggtttcagggcagagtgtgcagtttgcaatgcactgatatcattctatgcaaagtccaacatgattggcgatgcagtcttggtgttcgatataatgcctcgtcaagataccatttcttggaattatgtgattagtggatgctcttccaatggactaaacagtgaagctattgagttgttcataagaatgtggacacaaggacatgagctggacttagttacattgctaagtgtttttgccagcttgtgcagtcacgctattggtttgcaggaagggtggttcatgagatttttctcacaactagctgttaggcaacttctatgttttcctgtagtgtatgtgcgcaaccatgggtcggttcctagggcggactggtccacctggaccgtggaggtggcggggctcgtgagacgcctcgccaagttgaccatggagcagctagtgacggagttcgagaccttggaactccccgtgacgctggtatgcgtggccaaccgacacaaggagcataacatggtgtgccaaaaggtgggcttcaactag

SEQ ID NO: 112451 - DNA, 2484 bp, Zea mays
  Clone ID: MRT4577_34046C.1
aattcggcacgaggcggttgcctccaccaccagtccacggctgtcaccggctcaccgccgcactcctccacacaggcaccgtctagagtctaggttccccaggccccacttgccagggtctatcttatgatcttatcccctcctgttatctctgctttccccctttccctcttccgaaccgtcccattcccgcgctctcggcctctcgcccgcccgcccctccgcctgtcaacgcgccggtcgtctcgcctgcaggagaattcgaactcagctccttccagccaccgtcaccatggcgacgcctccgctctcctccgtttccactcaccaccgcgccccaccaccatggccgcctcccaagactgccactagtccgcgaataacctttcggtgtagcgtgctggcggcaccggctggccgagtcctggaggcgcccaccgctgctccaagctcatggagcaccaagaatccgccaagtcaggccctgagctccgacgtgaacctgcgaatccagcgcctctgtcaggcgggtgacctcgcgggcgctctgaggctgctgggctctgacggcggcgtcgacgtgcggagctactgcacggtcgttcagctctgcggggaggagcggtcgttggaggctgccaagagagcgcatgccttaattcgcgcgtccagtgccgctgcaacgggtggaaaaagggagcgtctttgggaagaggttaatgctggcgtacctgaaatgcggcgacctgggcgaggcaaggacggtgttcgatggaatgcctcctcaagctgctgatgtccgtgtccggacttcgctgatgagcgcgtacgccaaggcgggtgatttccagaaagttgtctcgctgtttaggcagatgcagtgctgcggggtcagtccagatgcacatgctgtttcctgtgtcctcaagtgcgttgccagtttgggcagccttacggaaggcgaggtgattcatggattacttgagaagttgggtctcggtcaagcatgcgcggttgcaaatgctctgatcgccgtgtactcgaggtgtggacggatggaggatgcgaagcgggtatttgacagtatgcatccctgggatgccatctcttggaattctatgattggtggatgcttttcaaacggatggcatggtacagctgttgattttttcagcaaaatgtggtctcaaggtacggagatcagttcagtgacagtgctcgtgttctgcctgcttgtgcgggattaggttatggccttattggaaaagcggtgcatggatactccgtgaaatccggattgctttgaggccttgattctgtacaaagtgggatagatgatgctgctcttggatccaaactggtattcatgtatgtgaaatgtggggacatgggctctgcaagaagggtgcttgatgcgatgtcatcaaaaggtaatgtgcacgtatggaatctgataatgggtgggtacgcaaagggatggcttggtggctcatggatatatagtaaaattgggtttcagggcagagtgtgcagtttgcaatgcactgatatcattctatgcaaagtccaacatgattggcgatgcagtcttggtgttcgatataatgcctcgtcaagataccatttcttggaattatgtgattagtggatgctcttccaatggactaaacagtgaagctattgagttgttcataagaatgtggacacaaggacatgagctggacttagttacattgctaagtgtttttgccagcttgtgcagtcacgctattggtttgcaggaagggtggttcatggttactcggttaaaactggattgattggggaaacatctcttgcaaactggattcattgttcatgttgctaatgctagcaatttttcctaccagatttcttggtatatcttttaggaagcctgctaaatctacattggaacttatctttaaaatttgtatgtcatcaagtccaattttatttgtgcaataaaagcagggaggcttttatctataacattttccttttatcttttctgtagagatttttctcacaactagctgttaggcaacttctatgttttcctgtagtgtatgtgcgcaaccatgggtcggttcctagggcggactggtccacctggaccgtggaggtggcggggctcgtgagacgcctcgccaagttgaccatggagcagctagtgacggagttcgagaccttggaactccccgtgacgctggtatgcgtggccaaccgacacaaggagcataacatggtgtgccaaaaagtgggcttcaactagccccgacgccatctccatgtccatgcggtgcggcacgcgcctctacgacgtgttgtgtcactgcggtgtcatgggcaccacggatgacgttgtcaacgtgtgcttcaatactgattctttagaaatactttgtgccatattataatattggttgcacattagtccattctatttaatcacatggatttcac

SEQ ID NO: 112452 - DNA, 131 bp, Zea mays
  Clone ID: MRT4577_34047C.1
agctaactaccctcacgctggctcgccaccgccgcctcagcaggcgtgggaatctgttcgtcgctccctcggagaataggaggcagctctctcttcgtccgccattgctggctcttcctacccctacatgc

SEQ ID NO: 112453 - DNA, 526 bp, Zea mays
  unsure (1)..(526): unsure at all n locations
  Clone ID: MRT4577_34048C.1
gccggccggngtccaaataacgcaaggaaagcctctgctgcttgctctgctcctatctctcctccatttgctcgccgcagctctccgagctcgctcgtcggcgcctcaccgcaagcgcagcacagcacacattcccagagcctgcccttaacacccagcgccagcgaagaaggccgagataatggaggtgtagacgatgctggacgaggacgtgatcttcgccgagctcagcaagcggatatcgctgctcatcaccgacgacgacaagggcgcggacttctccgccgcgcagatcatccccgacgccgccgccgtcgccgcgaccctccatgggatctgtgtcacgcgcccatgtgtcgtcacangcgtcgctgctgtcgccaccggcgtacacgctgtaccacataccaccacggtatcagctacggagtggacgacagcgccatggcgacgcgtcaacagctgcagtgctgaaacaatgtcaccgctctgttcatcccacgatccacgcccgggtccgctcacc

SEQ ID NO: 112454 - DNA, 164 bp, Zea mays
  Clone ID: MRT4577_34049C.1
tgagaatctgtttggcattaagtgaattttaatgtttttgtttttatatccttttagctcttaagtgatgaacactgttgacagtgaagaacctttcgtaatggttttcagtataactaatacggatgtgaagctttttgctctttagtcctgagtatgctaaa

SEQ ID NO: 112455 - DNA, 770 bp, Zea mays
  Clone ID: MRT4577_3404C.1
gtttgccaaagaatcgtgttattggttctggaaccaatttagattcatcacgttttcgttttcttatgagtcaacgtcttaatattgctcctacatcatgtcatggatggatcattggtgaacatggtgattcaagtgttcctgtttggtctggtgttaatgtggctggtgtacgtttgcgtgaattaaatccaaatgttggcactgattcagatccagaaaagtggaatgaattacacaaagaggttgttaatagtgcctacgaagttattaaattaaaaggatacacttcatgggcaattggattaagtgttgcatcacttgcgtcatccatgttacgcaacaccaataatgttcatgctgtttcaacattagtaaatggagaacatgatatcaaagaagaagtttatttgtctttgccatgtgttttgacagcaaatggtgtttcacatattgttaaacaaattcttactgaatcggaaacatctcaattacaaaaatcagctgcattaatgcatcaagttcaacaaggtctcaaatggtaaatcatcaacatcatgcttttttttgtcgtacaacatgacactagaccaacataaccactaccacaccaaactaaactaaaattatcaataatttaaatcatttaaatccaaatataaaaataatttatttgtcgattaataattatcgataagctatgactatgatgtaatttaaaaaaaaatgataagcattaaaatgaaacgaccaaagtcgtatattagatt

SEQ ID NO: 112456 - DNA, 372 bp, Zea mays
  Clone ID: MRT4577_34050C.1
ttctaaaggatccaaacttacataccacatgggtgcgacgttttaaaggttccaagcttacacccacttgaatgcaatggcctaccttttttatagtggcacctaaaaaaaatctagtggcccccattttaaaaccctgggactagaaaaacctttgggtaaccgaactaaatgcgattagggccaatccccttttcctcagctacagttatacagaaaaagcccccaacggtaccccttcccaaaaatggcattacctgaatggggagtgggaccccccctgcagcggaccattaaactcggcaggggcgtaggttccccccatttggatcgcttcacttgctttcgccctacggcccgctgctttccctt

SEQ ID NO: 112457 - DNA, 1035 bp, Zea mays
  Clone ID: MRT4577_34051C.1
atggagtgcacttgtattggacacaaaatcaccaaaacacttagaaatggcccaagggcacatttccctttcagacataaggcgcggctcgtcgtcaagggctatgctcagcaccaagggattggctacaatgaggtgtttgcgtcggtggctcgcttggaagatgtgcggctgctgctggcgttggctgcgtgggaaggatggcaagtccatcatatggacgtcaagacgacattcttgaatgacgatctccaggaggaggtgtatgtgaagcaagcacctgggtttgctcagcctggacaggaacataagaaattcaagtcacaaatgtcagatgtgtttaaaatgagtgaccttggagtattgtcttactatctgagcatagaggtgaaacaagatgagctgggaattacaatttctcaagagagaatacaaaagcttagtgggaaattgatatatttggttaatactcgacctgacttggctttctcagttgggtatgtgagcagattcatggaaattccacatgaggagcatctcatagctgtgaaacatattctgagattcatagctggaacaagggattggggactcttctatcccaagagaaatggaggcaaagctaaattgatgggtttcagtgaaagtgatcttgctggtgatcaagatgataggaaaagcccaagtggagttcttttcttcttgggggatagtccaattagctggcaatcaacaaagcaaaaggctgtctggctagctcggctgctggctgaaatgagtggttcagttgtgagcaagccggtgttaagggtagataataaacctgccatttcatggatcaaaaacccagtgcatcacgagcggtcaaagcatatagatagaagatttcatttgatccgggagtatgcgaattcaggccaaatcgaagtgaggttcatcagaatagaggagcagcttggggacattctcacgaagcctctcggcaaactgaagttcagagaactctgcatgaagattggccttcgatctgtttag

SEQ ID NO: 112458 - DNA, 330 bp, Zea mays
  Clone ID: MRT4577_34052C.1
cgtacgcgtgcgtaaccacgtgctcgtacgtttaggcggacccgtgggccttgacgggtaggacttgatcgacatgagcgacgcgcaccagatatactagatcgcgtcctgattcgagttaggcacatggaccgctgcaaatatgacgacgctctaggtccttataccttagcctaacagctataatacatctagatctaaggacctcacgatgatgtgttctctgtgacacttacgaactcagacctgctagacagacctggccgtccaaatctgcttacatatatgaactgaccctattattgtgcgtatcgagctgcggcatcctct

SEQ ID NO: 112459 - DNA, 373 bp, Zea mays
  Clone ID: MRT4577_34053C.1
acccttccggaaaaggccttttccaagtgaatcattttccttggcggttcttagccttttgtaacggggagggttaaacctgttgcggggaaaatttaatccattttttgttggcagggttccattttttgttgttgttgaaaaatttccagcaccaccaaaggcagttccttttttattccttagagggaccccagggacctgttatttcgtccaattgaccaggggtcttaacggaaggaacctgcccgccattttactgcaaagattgttcctgtttcaaccaaatttgaagatccttccattgaaggggggcgtggtaggtttgccatgtaaccaaccaccaggccacctgcagtggaaattgccaaac

SEQ ID NO: 112460 - DNA, 1053 bp, Zea mays
  Clone ID: MRT4577_34054C.1
atggtgcaaatcgttgagcaccgcgccgagacttcagtggatttcctggtggaggaaggagctgtttcttccatgccactggttgccaaccgcctagtgccaggcactactgttgtgcacgttgcacagcagcatacagctgcgcagacatcccggactctacctaggacagctccgggggcgttgtcggtagccagggagttgctgcaccaacccccgagctccatagcctcactgggggccatgaggcagtggcgtgaagacatcgaccggctgcttggcctagcacactccggctcaaccaagtcaaggccacgggcagcatcgaccaaggacctgagggcagagctcaaccgccggcgcgcggcggaagatgctccagtctctcgggaaaggtctaatgacctgcgggcagaactcaaccgcaggcgagcaggcgaagatgcccgtgtctcactagagaggacacgagagcgccgacacaacatcgagggtcgtaacctcgataaagacttcgctgcggtagcaccgcaaaccccagtgggcgctcggtaccaggtgggtgtcccattggctggcgagggctgcgccacgctcgcagatcatctccgtgcggtgtcctggccatccaagttccggccgcacttgccggaaaagtacgacgcgaactttgccagcgcctaccaacaacacggcatggaggcccacctccacgcagtaaggcaggaggccggggaaaccctccggacatttatctcccgcttcaccaagggagtgcgtgatgaaaagatgttggagaaattggccacgcatgacgtcgaaactgtctccactctcttcgctctggctgacaagtgcgccagggccgctgagggctgcgcgtggcactcggcgccacagaccggggccgcccaggcaggtggcccgggtgccatcgctcaagacggcaaaaagaagaagaaaaagaaccgcggccatgagaagccgtattcctccgctctggtcgttgcagctgcgactgggggccggggcgactgcaacaaacgtccatga

SEQ ID NO: 112461 - DNA, 162 bp, Zea mays
  Clone ID: MRT4577_34055C.1
aaagaagaaggaaaagtggcagtgctgttgcgtggagtgtaacatagcaggttttgtaataattggttcagtcacaaacacgccaaaggaaacattccgaaactattgggatctgtgaaactgttgttgtgggaagaagactagcagctgggtcgtgtgatg

SEQ ID NO: 112462 - DNA, 216 bp, Zea mays
  Clone ID: MRT4577_34056C.1
gcacgaggagaactagtctcgagttttatttttttttttttttttttaatatacaagtaaatagtatagtaatatatgtacaataatacatacaaatgaacagcaataatagttcttgaattgcttcaatcttttgcaaagagagtagttctttccttcatctttataaactatgatttcaaaaaaaagtattcttatattaaattcaaagctgaa

SEQ ID NO: 112463 - DNA, 251 bp, Zea mays
  Clone ID: MRT4577_34057C.1
caccgcgccacatccagctcgccgttcgcaacgaccaatagctctcccgtttgctgggcacggtgaccatcgctagcggtggtgacactgcccaacattcataaccttttgctcccgaagacacgacgagcagcaggcagcgtctcaagggtgcgtgattggtgacaggagactaagtccttgactacacctggaggcaccgttcacaatgctgtcgtgtctacatgtgtctagagtagtacctttggcct

SEQ ID NO: 112464 - DNA, 392 bp, Zea mays
  Clone ID: MRT4577_34058C.1
cgctggaatcgctttcggagacccaacacaaccaaggtcctgtaatttgctttagtcccctactgctataaactcggggggggctgaatcaacggacgttatacgcacagcgctccaccatcaaaacccaaaccttccgaccagtagaactgcctgattatcactgaccgaaagcataacggcctaactcgaaggccatcacacactatcttcaaccacaactaactgcgggtgtttggcagaggtcgtctggcacatcacaggattgctccttcgatactattgttggacttgtcaccgttacttccatactggatgttaggttgtatatccgccctacggcgacctgccgttaaggcaaataacttagcttgcaaggctgaccactattt

SEQ ID NO: 112465 - DNA, 344 bp, Zea mays
  Clone ID: MRT4577_34059C.1
ctatgcgcgtgcagcgcctgctgaggctgaagatggagtaccgctcgcgctcccgctgtgctgccttaggcgccagacgctgggctcccgatctcctctctcctcgccccctatgccctgtgacgcgcgccctcgatccgtgcccttctcgagcgcagctcggcacgtgcatgggccacccggaggacgtagagttgcacagcgcggaagggcggaagcccacgagagtggcggaaatgtagtggtcgacgcggtcttaggaatccctacagaatacagaagaggagtgtgaggccatactcacgctggtacagctaaacatgctacgaaacaagggcaccgag

SEQ ID NO: 112466 - DNA, 234 bp, Zea mays
  Clone ID: MRT4577_3405C.1
attatgggggggaaaattttaatgctacacaccgcaaagttcaaattttctaccaacatttcgctcggtttaccaccccaccacttcttgccagaaaaaaactttagcaccaatttatgaaaaaacaactctggcagcttattcaacaaacttatatggataaaagggaaacaaaaaaaaaaaaaataccccaatgttaaaaccaccccatccccaatacttacttcacaagaa

SEQ ID NO: 112467 - DNA, 169 bp, Zea mays
  Clone ID: MRT4577_34060C.1
ccccgcggacggagctaggtctccatgctgcatcacctgcacagctagccgcagcagctcctccttcctcaagctcggtttggaccaggcggttgtggacgaggcacgctgtatcagggcgtggaggaattcctgcaccggagcgggaagcgcgaacagccacacggcg

SEQ ID NO: 112468 - DNA, 288 bp, Zea mays
  Clone ID: MRT4577_34061C.1
caataaaatcgaccataacattaaacatggtagatgttactaaccagaaatcttaggtatttaaagttatgtttacttattttttttaataagacttggaagtgtcacttaaatcacacttaagaatggatattggctaaaggctgctgagtcttttaagattcctgtgaatttttttcagattgttcctcagtcaattcaggatacttgtcattgctggctatacagcagagtgcagagttagcccttgcagacacacaaagataactcaaggcactgatttctgca

SEQ ID NO: 112469 - DNA, 247 bp, Zea mays
  Clone ID: MRT4577_34062C.1
gttcatttacaaaacaaaggtcaagattagatcgctcaggggctagctgtaaaccgttgacaggttgatgaacgagccagatccgaactcgtgcatctcctcgcattgatgtaatctagtgcgtcgatcggctatcagtcggcacggagtaggtctgtcgaccctgtgcgcctcattaagtcttcgccgttggatctagatccggtggccggttggtgatcgtggttaagagtagtggggatctaat

SEQ ID NO: 112470 - DNA, 340 bp, Zea mays
  Clone ID: MRT4577_34064C.1
gggcccggggcaaattgggttattcttaaaaaaattggggccgaagcccgcccacaaaaccagcttcgggggggcgacgtttacccgcgtacaaaaaaaggggggcacgggtaatggccccttattttttttggggcaaaaccaaaacaaaatttttcctggaaaaaccaaattacttgcccatggaaatggagagccttttccgggcgaaacgggcaaaaggggaattgggagttgctggtgcccccaaatgcatgggttttaatttcggggggggtgggggaccccttggggcattaagggggcgggcacaacaacccaaccccgggtcttaaggaaa

SEQ ID NO: 112471 - DNA, 571 bp, Zea mays
  unsure (1)..(571): unsure at all n locations
  Clone ID: MRT4577_34065C.1
ttgttcgcgtgggnaaaaaaaaaaaaaaaaaaaaaaaaaaaaaaaaaaaaaaaaaaaaaaaaaaaaaaaaaaaaaaaaaaaaaaaaaaaaaaaataaataaaatatttatttaaaataatttatattttattataatatttaaagggagggacaaaccggtattgtttattttttttatggaataaggtaggggggtgtgggggatattgccattgttgtaatttttttttccggaatttgggggggttttcttaaaaatgggggagggtttttcctgtttgtttaaaaaacaaggtgagcgaaattttttgcctcattatcaggtggaaagcaaaggtaataaggttgttattgcgattgggggttttgaatgggtttgaggacaagtgtatgattttggaggattttgttaaattaagtgaggggaataggaaagctttattttgtttgaaggttttggaaaggaatgttaaagttgacaaggatttttaagttttgttttccatttttatacttgaaataaaatgatgaatttttattaaagctgggttcttgaagggttaattaaaa

SEQ ID NO: 112472 - DNA, 191 bp, Zea mays
  Clone ID: MRT4577_34066C.1
ctagtcaagagaagagtcgaggaacaaccttgcattcgcagacggcgatcatggaggcgtgagctactgcggctgcttgtctctcgaggttctcctcgaaaggttagcttcaacctgaccgccagttggtccgtagggcgtacaaggacgctgagtgcgcatctactcaccaagcctctgccgtggtgcgc

SEQ ID NO: 112473 - DNA, 280 bp, Zea mays
  Clone ID: MRT4577_34067C.1
tctgccatggagaagaagcgccatgggataaaaaccattggcgagctttttgacacactaaaggaggcatccgagtcactgcctgacttcaaaaaagatgaccacaaggctgccgattctgctgctgatcaacgctacccaggctgtcctggatctgaaaacctatcttggcgcccggctctctctcatggatggcgacaagccccatgagatggaattctaatctcgctagacatttggagcatcagtcatgaagactcgctttagtctgtgttcttgt

SEQ ID NO: 112474 - DNA, 323 bp, Zea mays
  Clone ID: MRT4577_34068C.1
ggccgggctagcagttcctactcgccttgcaggttagcagcactgcagcggtagccacccaccaagagagaagaaccgcagtcccgctccttccctgccgggtgccggctgccgctgccccgtctctgtctccaactccgaatatgtcggcctcgcccctccccaccacctccggcggggatcacatcttcccgtctccgcctcgaccgcgccaccgacggtgctgccaagtaatcgtcgacgccgtcgctccgccccgttcctacggcgtcggacaccgcgacgagtccctaaacggagacaccgcctggcttgccactacc

SEQ ID NO: 112475 - DNA, 819 bp, Zea mays
  Clone ID: MRT4577_34069C.1
caaacttctctgtgtcgtgctctctcccggagcttcttcctccacgcgctcttctacatccctgtgccctaccgctcctgctcgttcttcaggcagtcgcggcagccgagctcccatggcgcgcgcgaccccctgcttcctctctctctcggctctgctcatcctggcgcccgcgcgtggagctgcttctcccctgctcgcgtgcctgccctactcccagctgccctccctgcttctctcttccccgcggcttccatcctctactcgccattgcaagccgtgctccctcgctgtgggatttccctctgcccggccgagctcgccccggccccttcctgctgcagctcacgacccccagctcctctgctcgcttggagctcaagcttcctcgtgccggtgccctgcgtattccccgtcacatccatggccgcacccagcttgtctcccttgagctcgcccctgcgcgtgcgtcctcttgtgtcgtccctacgtcgcgcgcgatcttttctgtgcgtgccagcagccacgtctctctggtgtttcctccctgcgcgcgcgaaatttccttgctcgctggcgcttggtccgtgctccactgtgccatgctgtttctctgcgcgcgttaagtttccgtgccgagtttgcctgggtcgcaagcctgtgtgtcctcgtcgtgcttgctgctcgccaaaacgtcccatgttgcagcgtccctatttcagtatgtcattccacgtcggtatcgtttctgtcgtgagctcgtcaggcatcaacaaacaaaccggggccgtgttccgtcaagctggtgaaacccgtcct

SEQ ID NO: 112476 - DNA, 956 bp, Zea mays
  Clone ID: MRT4577_3406C.1
gtcagctcgtgattcgcctcgagcgcctagatgagcgccatgcccttgccctccacccatcctcagaagatatcatgccgacggcgtcgacccggtctccagcagatccgagtggagcgccttcttgcctactcctcaaacattgtcgcagtgcctgggccgtcgcgaggagccccatacacaatctcctccttagacgtcgtcggtctcctcgctccctcctcaaacgtcagtcgcgctgccgacattgtctgtcacggctccaaccggagcaccatcccacctcccccgtcaaacgacgctgcgatgcttgggccaccgtcgggagtccgaatctgcctcctcagacatcgccacctcgaaacgcacaggtcgcgcggtagggggcactggtggtccggcgcggtcacctggcgaacgatgacggaggaggtgggcaagtctatcaagaagagacactatgaagagcagtcgccatggctgatggatcagttgccggttgcattcatcgaagatttggccctctccaccaccatgtcgctaccccatacccgttgtccctgcatatctgaatgatgcaccttcaatccaccgctgcccaaggagcgaatggggaaggaccgacctgagcattctgtccggtagctggatagcaagaagcaccagcccttccccctcccaaggtcgaagcaaatgttgcaatcagtccacaacctcaattctgaaacgccgtcttagaaaaccataaataaggtaattcctactacttcctaaggtgttttctaagtcaatagaagctactactttttatatatcaaaatcatctgagcactacacacagctttactgtttatgttgccttcgcctcaaaatactgattacaacatctttatgtagtatgccactaatgtattttgtatgatagcatgtataccctaagacatatgccacatatg

SEQ ID NO: 112477 - DNA, 413 bp, Zea mays
  Clone ID: MRT4577_34070C.1
aaaaaaaaataaaaaaaaaaaaaaaaaaaaaaaaaaaaaaaaaaaaaaaaaaaaaaaaaaaaaaaaaaaaaaaaaaacgggggggaacgggtttatcccagccgccgcctccctcggctactcccactctttctccccctcccttttctctctcccccttctctctcccactcattctctcctcccaccgttctcttggcacggggccacccagaagccagccgagcgcgcccggccccggcggctcgggcgcacgccgagggagccaaacacggggggcgcgggagccgggtggctctgcccgaggggcggggcccgcccaggaaaccctgccgaccggcgcgaggctgcgcaggggaggccggcctggacggccgcgcctgtaggcccaccccgcgcggctccccgctaaa

SEQ ID NO: 112478 - DNA, 258 bp, Zea mays
  Clone ID: MRT4577_34071C.1
ggtacgcgtccgccgttggactctgtgcccatgcgcctgatgctctgctcgatcgaagcccaggcgtgtgacctgctgcagctcgtgatgctgtgcgcggtcgacgacaatggaagttgactacctatacatcacctgactgtggaggcgccacttcgtcggcgtgacgacacgacattgctatatgcaacttctgtatggtacagagatagctgcagcatgcattgcgttgctgtgtatgctaacgacaactgctat

SEQ ID NO: 112479 - DNA, 361 bp, Zea mays
  Clone ID: MRT4577_34072C.1
gggcaaaattgcaccattttcttcttttaaaaaaaacgaaccagggcaaaaacaaaacaagacaaatctgggcacggttaccggcggccgaattgctgaaattttttttttaaaaaactttgctgcttgctgctaggcgaggagcatttggaaaagcatgtcgctccaaaggtagatgggtcccgggaggcaccagcggatgcacccgttgtaaagctgcaccttttggttgggccagtgcccggaccggctgggggggcctgtggcccgcatgaacatcgccgccggggcgtccatgaacatgagccgccgccccttgttgggggtggttttttccggggggcggaaccccacgcgtccg

SEQ ID NO: 112480 - DNA, 1179 bp, Zea mays
  Clone ID: MRT4577_34073C.1
ggtgtggctcgtgccgctatcgccgccgccccccgggccccgtgcgcgggcgcgacgatctccaacgacttatccattcatatctcttattttaaaccacattccataaaaagtgtagtctataatgaaaaacagtatcttgaacagctatataggaaatgctttgaggagagagagagagtacagttctttgtccacagttggtaacgtgtacttatttatgtatatggatggatacacagaaagagaagagaacatcagagctcagagaacattgttcagtcatgtttatttgccacatgcccagaaccagagccgtagccgtagccgtgtccctcgccgtagcctgagcctgaaccttctccgtatcctcttcctgaaccctcaccgtatccagatccttggccatgaccggagccgtaaccttcaccgtagccggatcctgatccttggccagagccggaaccggagccttcgccgtagccggatcctgatccttggccagagccggaaccggagccttcgccgtagccagatcctcgaccggatccacttccctgaccgtatcccgagccagacccagaaccctgtccctggcccgacccatgcccttcgccatatccagacccttgcccttgcccgtaccctgaacccgaacccgctccggacccagctcctgaacccgcaccagagccagagccagagccggcgccggcgccagatccagcatacgatcctgcaccagagcccgcactggacccggaacctgaggccgagccggagccggagccggagccagacgccgagccagagccagagccaccggcaccaccaccaccgcctatgccaatgctaatcccagcaccgatcccgatgcctgccccgctgccaccgccgaggtcgatgcccaggtccttccgagaaacgcggccctcggacgtgagaacgagggcggcaagcacggcgacaaggaaagcggtcatggtcggggctcgaggcatcctcctgagtcctgaccttcctttcctctaggagaggccggaacaacaatgcacctatgcagactgtgtgctgctttctatgggttcagtggtgtatgttcacaggagcatgcgctctgtatcttcttcttccagctccgggactctcctgccggtttttttttttttttttggccgg

SEQ ID NO: 112481 - DNA, 257 bp, Zea mays
  unsure (1)..(257): unsure at all n locations
  Clone ID: MRT4577_34074C.1
ggggggcagcgccgcaaaaccccgggcgacccacacgcccgatgacacagaaaccgaaggcgacagcccggggggactacaagggccacgcggagcgacaccacaaaccccccacgcagaagagcagcagaggcaaagacgagcgcgcccacaggggaccaaaaaaggaagacncgaccaccggcagccacacaaaacaagacccgccacgcgggacgagagcaccagaagaaaggcaccaaacaacacaggcagaa

SEQ ID NO: 112482 - DNA, 693 bp, Zea mays
  Clone ID: MRT4577_34075C.1
ctataatgaaagacattttgtggcacaactatataggataggctttgaggagagagagagtacagttctttgtccacagttggtaacgtgtacttatttatgtatatggattgatacacagaaagagaagagaacattgttcagtcatgtttatttgccacatgcccagaaccagagccgtagccgtagccgtgtccctcgccgtagcctgagcctgtaccatctccgtatcctcttcctgaaccctcaccgtatccagagccttggccatgaccggagccgtaaccttcaccgtagccggatcctgatccttcgccagagccggaaccggagccttcgccgtagccagatcctcgaccgaatccacttccctgaccgtatcccgagccagacccagaaccctgtccctggcccgacccatgcccttcgccatatccagacccttgcccttgcccataccctgaacccgaacccgctccggaactagctcctgaacccgcaccagagccagagccagagccagcgccagatccagcatacgatcctgcaccagagcccgcaccggacccggaacctgaggccgagccggagccggagccggagccagacgccgagccagagccagagccgccggcaccaccaccaccgcttatgaaaacccccatcccagcaccgatcccgatgcctgaacga

SEQ ID NO: 112483 - DNA, 764 bp, Zea mays
  Clone ID: MRT4577_34076C.1
ttgggtacctcgaggccggcctctcgtagatgcaaggaaaggaaaggaaggtcaggaggatgcctcgagccccgaccatgaccgtgttccttgtcgccgtgcttgccgccctcgttctcacgtccgagggccgcgtttctcggaggaacctgggcatcgacctcggcggtggcagcggggcaggcatcgggatcggtgctgggattagcattggcataggcggtggtggtggtgccggtggctctggctctggctcggcgtctggctcaggttccgggtccggtgcgggctctggtgcaggatcgtatgctggatctggcgccggctcgggctctggctctggtgcgggttcaggagctgggtccggagcgggttcgggttcagggtatgggcaagggcaagggtctggatatggcgaagggcatgggtcgggccagggacagggttctgggtctggctcgggatacggtcagggaagtggatccggtcgaggatctggctacggcgaaggctccggttccggctctggccaaggatcaggatccggctacggtgaaggttacggctccggtcatggccaaggctctggatacggtgagggttcaggaagaggatacggagaaggtacaggctcaggctacggcgagggacacggctacggctacggctctggttctgggcatgtggcaaataaacatgactgaacaatgttctctgagctctgatgttctcttccctttctgggaaccatccatatacataaa

SEQ ID NO: 112484 - DNA, 146 bp, Zea mays
  Clone ID: MRT4577_34077C.1
ctcactccagcggtccgtccaaaccagcttccagaactaggtccaacggtatgttgggccgcgtgctttatcccgcgcagtatattccgccgcacatccctcttgctcgtgttggcgactgtggggacgactgggctacatttctg

SEQ ID NO: 112485 - DNA, 511 bp, Zea mays
  Clone ID: MRT4577_34078C.1
gggttttcgtctatcaaagcatatacaactgtgtctcttgtttagctctacgtcttagacacatgtgcaaagacatggctgctggttcaactgttcttcggccatggatccatctatttgtggagaaaaaaaacatgcaaagattgatgaatgtgaattagaacgatatgccagtgcccgctaggctcatgttcttctgtaactatagcaaactgacctcattcgaagtgcccaacccaagctttgagcatttgaaataccaacctacaatactatttactatgtccactttacttgtttttcccttgcatggaaagcccgcttgtatctcattaaataacctcaatggatcatcgcctccgatccaaagccatgtctgagtatactaacatagatgcaaacatattgaaccaacactctatgaccgacctgagacagttgactcactttccagctaaaaaattgaccagactttcatacaatgattggaccggggcattacatgcatgcc

SEQ ID NO: 112486 - DNA, 1088 bp, Zea mays
  Clone ID: MRT4577_34079C.1
gccaaaacggggtttcaacctctaattagttgaaacgtcgtttaaatgtagttgtaagaacactggataatgaagtgcattggttgtatatcaatctgacacactatggaaccccaataatatgcactgctgtataattaggttctgttactgcattttgagattccttttgtttgaagaaatgctaaatttgacatctctcttttgttgacaacttaggtacgactaccatgctggtttttggggtgtcatgggacgggaatgtattggcattgtccctccatttattagagaatttaattatccgatggccaaaaattgtgccggtggggatacaggtgtttttgtcaatggcagagaactgcatcaaagagatttagatttacttgtaggaagaggactaccacggacatctggcatgtcatattctattgagatgtcaggcaatgtaatcgatgaagcaactgggaaaaaactgcgcagtcttggaaaacttgctcctacgattgagaagttgaagcgtggttttggcatgcacgtccctgaagagttcagataagctggttctagtgctgaatattggctttgccaattatccactccacaaggctgaccatggggtgccaaaccaacgatttctgcgattgtgatgttaaatcctgcgattgtgataaatcgcaggtttctctgaattggactggggctctgcgagccaagataatgtggtccagtgacttaaccaccgattatagtatccctcctgctaatttcatcacttcaatggaagcgacgtttgctagtgactctagcctgccaggcagttcttaacttcactgctctgcctgtgcatgttattattcctcaaatgtgtcgtctttatcagtacattgccccatcacaggcacagacatactgttagatgtatgagcaattgtcggcttgtaatttattggtagggctatgcttcccctaacatttatatgtatatatgtgctcatgattcttgaaactctggccgatatgattggctttcggctctcctgaaccctgttagagtcccattttgaagcctgaaaaaaaaaaaaaaa

SEQ ID NO: 112487 - DNA, 232 bp, Zea mays
  unsure (1)..(232): unsure at all n locations
  Clone ID: MRT4577_3407C.1
aaaatattatttaattcctatgtcactctangtgcacccaaaaaaccgttcatttttaaacgccataaagcacctttcctcatatcatctccactaaaaaaaacaataactctcacacccccattatttatcacacctattccccacaacaccaacaacccctttttaccaaaaaccataaccccccaccttctttcaacataaaccaactcgtacccttccccgcaccaca

SEQ ID NO: 112488 - DNA, 447 bp, Zea mays
  Clone ID: MRT4577_34080C.1
atgggcaagagcaagaaaggtggcagctcttcacatcactcgggcgacaagcgcaagcgcgagctgactcctccctcggaggacttcgacaactcggaatactcggaggaggagttctcctccgagtccgagggctctccggctcctgcctctcccccggtgtcgtctgatgattcagacgactcccaggggatcaccgcggaggtatggacctacatccgggccgtcgagagtgccgggctcgagggctcgaatgagtcggagtactcctcggacgaggaggattcctccgactcgtccgaggagggcagcagcggcgacgacgacgaaggcgacggtgacggtggcagcggcaagggcggtgacggcagcggcaagggcggcggtggcgacggcggcagcggcagcaagggcagcagcaagggcagcaacaaggctagtggctag

SEQ ID NO: 112489 - DNA, 924 bp, Zea mays
  Clone ID: MRT4577_34081C.1
gctatctggttctggaaccatccagtgacggccggcggacgtatcacgtggtcatcataaaccggccggcggccccctccatccgacattgttcccgccgtcttccccaattcgccgccaggccagggtaaaaaaaaaagaggaagaaaacctcctgcaattcccattccatcgatccagctccggtccaagccaaagctttcttcgccccaaaccttgttcaactccaatgtcggacttcttcttcgggagcccgttccgccgcctcttccacgcgcgccccttccatgccgtcgactggtcctccgccgcggcggcggccatggactgggtggagaccccgtcctcccacgtgctgcgcgtcaacgtgccgggactcggcaaggacgacgtcaaggtccaggtcgacgagggcaaagtgctcaccatcaggggcgccccgcccgcggccaaggagaaggggaaggaggacgaggaggaggggacggtgtggcacgtggcggagcgcggcaagccggagttcgcgcgggccgtggcgctgccggagaacgtgcgcgtggacgggatcagggccggcttggagaacggggttctcaccgtcgttgtgcccaaggaagtcgccccggcccggcccaagcccaggtccatcgccgtctccagcaagctctgatgagtctgaggcgatgagtggcagagtgtacggtgcagtgttaaaccatgccgcaaatggcgggtacgtctgaattctggtcgtgtgtgtgtccgtgtcacctagaaaacgcgcacctcgtgtaaattgtgatacaatttcatgcaagtaatccgagtgagtgaaaatggctgctagccaaaaacggtcgattctgaatatgcagtttgcaataaactaaattaaaaggaaaaggcatgtttgaatatgttaaa

SEQ ID NO: 112490 - DNA, 589 bp, Zea mays
  unsure (1)..(589): unsure at all n locations
  Clone ID: MRT4577_34082C.1
gtttctctcctctcctacccctcacagaatcgctggatctgcatgatacgcaggctaatgcgagggcgtgacgggaaagagcaccagccatggtgcacgtcaacttgctaccgctactatgcgaagaccttcaacaaaccaaggcgtacttatgagaaggagcgtcttgacgctcaactgaacctgttcgtcgagtatgggactgaggcgcgagcgggagctttggaggctcccgcatgcactgagcaggatccgcattgctgctaggcacttgctcacccttgactataagaacccccgtcgcatctttgaagtggaggcgcttcttcgccgcgtgaaccgctatgtgctgctctgctgagggtcagaactggcttgattatgttcttgccctcaccgctgacaacttcctcgcaaggcggcttctaacgcttgtcttcaacgctgaaatgatcaaatccattcaccatgctcgtgtcttgatcaagcagcggcacatcatgcgttggcaggctagattggccacgtcccatcattcatgcagatcggggagtctgagnagcactttgacttttcactgtcaagccca

SEQ ID NO: 112491 - DNA, 419 bp, Zea mays
  Clone ID: MRT4577_34083C.1
aggaaatcttgaatttacatgcttttagtctggaaccatttcttaaccgcctagttcagtggactacatgttgtgtggcaaactgtcaataaaacttgttggcagaagataaagaaccaaaaaccatagatgcctttgatgttactgaacaaaacaagtcacgagcctcgttgaaccccaatttttggaggttagagtagaaatgaagattaaggatataaaatcacaggttgagaattccgtattgtagtagtgcagattagagttgagagtttggactcttccggaaagattttctttatcgagagttccagatcccttttgcaaactgtaatgtgaaatatttagctgtcgattatgatttcttttttgctttggttgaatgctagttccgatctcaaatcgttgcgcgttcttga

SEQ ID NO: 112492 - DNA, 697 bp, Zea mays
  Clone ID: MRT4577_34084C.1
ggtaccgggcccctcttttcgagttttttttttttttttttttttttttttttttttttttttttttttttttttttttttttttgtttttttttttttttttttttttaggcaacccttttttttttttttttgggaaagcccggttggttccttccaccttgggggagggggaaaaaaaccggggttaacacccggaaccccttggggcctttcccccggccattgggcccttttttttccctaaaaaaaggtgtccaaaaggaacaaaatcaaccttttacccaaccaaaacccgttggcccccgtaaaaaccatttttaaaaaaaaaaaaaccccaggcggcccttttttcccccgtaaaacatagggaaaaaaccccccctgccccaaaaaccttggggttgtttccacccaaaaaacttttaaaccttttgccgttttaaaaacccaaaggggtttgtttttcgggttttttttggcaccctgcccctggaaattccctgggcccagtcccttcaggtgtttgccacccaaggggtttgttttttaggggccttaaatcccggccccaatttaaaggaagtcagaaaactcctccccaaaaactggcttgggtttcggcctctaatttccccccaaaaaaactttttttgctccacggccagggccaaggttggtttaaaaaacccccccc

SEQ ID NO: 112493 - DNA, 342 bp, Zea mays
  Clone ID: MRT4577_34085C.1
ggcaggacgactgatatatttatgttcgaacaagaaatgttccctgcctaatcgtgatagctcatttaccacattatgggcacaacactgttgagtggtggcattgtacatgatcaagctcacacactaggcgggctgggtgcccattcatcacatggatacagtttgaactcagatgacctataaagaatccaaggaacggcttttttctgtaccacaaagcgttgggctaaggcctgtcgtatccttccgcgattaaaccctgctctgtggtgggcatctagaactaaaataggcagagaggacgggtttcttctttaattgccattgcactgctggaac

SEQ ID NO: 112494 - DNA, 291 bp, Zea mays
  Clone ID: MRT4577_34086C.1
atgaaaggttctgccatcactggacccatcggaaaggagtgtgctgatctctggcccaggattgctagcgcggcaaatgcgatcgtgtaatggaagcagctagttgaagtttatttcttgtgttgagacttgagagttcttagttagacagctttcgatggccctaaagatgtttccccgcttgatgtttgtgctgctagatcgtttcctagctttgatgacatctctccatatcgataagttgttgcttagcctgacatttggcagagtttaaatgttataagttttgat

SEQ ID NO: 112495 - DNA, 1662 bp, Zea mays
  Clone ID: MRT4577_34087C.1
atgtatgaaggttggaagaagagaagtgatctatcaagtgagtgggttgtcaagaccgacgcgtttctcgaccgtgattttgctcaatcacagaccggaaccgatgttaggtgcccttgtagcaagtgtcggaacatttattttcttgacaggaggactatgtcgatagatctttacaataacgactatatgtctggctgtgaggtgtgggtgcaccatggtcaggactcacctcttcgtattgtatcggaagatcggtcagatgaagaggcgaactacgataggatggaagagatgcttgacgatgatcctcctacgcttgaggttcataagttctttgaactccttaaagcttccgaagagctgttgcatgaacacacggaagtgttcgtccatattttcatgactcgtcttatggatattaaatccaagtttgcattctcaaacaactgctacatagagcttctgaacttgatcagtgatgtacttcttgagaatcacaagatgccaaaggacatgtacagtccaagaagattctctcgggtctcggagactgtgaatgagaaaaagtgtacaatatgtggtgagcctagtttcgtagaggttgaaaatgatgatggtgtgaccgtgatgactgaggatccgttcaggttcgagaggaatgcttttagaaaggacacgattgtgacaaggggaccacccaagcgtcttagtggtccattgattctcgtgagacttaatgatttgaatctaaatgaacatggaaatcggtttgaaggttttggaaccaagcataattggactcacaaatgtggtctatgggaactcccttatgtgaaagcattgattctgatgcacaacgttgatgtcatgcaccaggaacgaaatatgggtgaaagaattatcaacacttgcctgaatatccctgacaaaacaaaatacaaccctaaggctagaaaagacttggccttaatttgtagtcaaccaactctggagctaggagagaacgagaagaagccacgtgctccatacagtcttaaacctaaaaggaagaaacaattgatgaaatggttgaaaaacttaaagttccttgatggttatgccacaggctttagaaggtctgtgaatttgaggacgagcaagttttctgggttgaagagtcatgactaccacataataatggaaatactccttcctgttatgtttcatggttttgtaaaaaatgaagtgtggaaagcgctagaggagctaagctacttttatagacatctttgtgctaaagaaataaaaaaagagatgatagagaagctggagcaacaaataccagtttttgtatgcaaacttgaaaaaaaaaatttcctccgggtttcttcaatccaatgcaacatctacttgttcacctaccatatgaagctaaggaatgacaatatacacccggaccttcgacaactgtccctaagagcagtaactgtcagaagttatggtcagtatgatttcaatggtttctatttccgttctacaaggttccaagatgctcatcctcttgcagccacaaccaattccagagttgtaactagagctgacgatgatgaaggaaaggtgactaattattatggagtcattaatgatatactcaagtacaaatttttcagagataaataa

SEQ ID NO: 112496 - DNA, 351 bp, Zea mays
  Clone ID: MRT4577_34088C.1
gaatgctcgaggaaacaaaaacttaggaaagctaatgtgatccctttcactgcgggggacctgacaactcaaagcatctcacgatataccaggggcatgattcttcgagcataaatcgcctgacggcgctgtggggactgaacggagcaaaatgatactgcccctgtataaagcacgtttgacttagacctagatttcttgttcaaacccccacgtgatgtcagtgggtaacacactgttgctgtacctactgcctcatttactgcactagcgtatatgtgtctagataaaacattcattttttggtttcaaattcgttcgattttgacgattaaggtatgtattttcgaa

SEQ ID NO: 112497 - DNA, 352 bp, Zea mays
  Clone ID: MRT4577_34089C.1
atacgtactaatgcatgcaaccaggctagctaacatgcaagcaaaagttaacggtgagagtggctggcaacacgcccgcgacgtgaatcaaccagcccatcggagctcgccactgaacacgaggagggaggccgacatggtgggtctagtcggcggcagcacggcgcgcgcggacgcacgtagttcccaacctgcggagcgacagcatgctcgcatcggcccatggacaacatacaacccggccgggcacgcacctcatctccaccactagttaatgacatgaaggacctcatccacctggtctagaagatcctgccgatggtgaggcagcactagtacgacaacgcgcccg

SEQ ID NO: 112498 - DNA, 410 bp, Zea mays
  Clone ID: MRT4577_3408C.1
attcggctcgaggggaatgcatctcagtttttttgatatactgtgactatcgggaaatggagatcaactgctcagggcgtggtccaccatgaccgaacaggtgcgggatgtggggaactgaaagttacttggtcctctgcatctgagttccccttctagtacccgatgactgtgttgggagagaacgggctccacactgatgccagtgtggaggagccagatcatgctactcatacactaggcacgatgcatgaaggaaaattgtgaaatagttactctgtatctgcgctatggatgctgacataccactgtgcaggtggtacgacgctggcagaatccacgctacaatagccgtcaacttctggtctaggcacgacctctggccatagatgcgacaagagatcgatttc

SEQ ID NO: 112499 - DNA, 279 bp, Zea mays
  Clone ID: MRT4577_34090C.1
cccacgcgtactaaaataatgaagagccgtagtatggcatgatcggccgcgctcttggggctagccctcgcactagtgggggtcaccgtcccacatgtagcgtaggtaaagaagaagagagcggccgttagcggcgaggtgtgggacgcgaagaacatccaggacgacttgtgctcgacgctgtgcgagggcaacaaggagaccgacctggacgtgtgcaaagagtgctgcgctctctacgaggaatcaacctgttgctgtactgcaggatccaacaca

SEQ ID NO: 112500 - DNA, 507 bp, Zea mays
  unsure (1)..(507): unsure at all n locations
  Clone ID: MRT4577_34091C.1
cgccagcgccgaccaccaagcagcaggcagaagagcagaaacgagaaaaccagacccaagccacgaagagggcaccccaagcgccggccaagcgacccggcgaacaaccgcagccccggcgcaacaccaggaaactcttcggnnagaagcccaagacaaaggngncaaggccaaaggccaggcccacgccaccagcgccgcgcacaaagaagccaacgccagcagcagcaacccccgcgagagagaaaagagacaccgacaacgggaagaaggccaaacaggagcggaacgaagacaccgcaaaggggcaagcgcagggcaagaaacggaaacaaaaacgagaagcccaagaagagcaaccgcagaaagcggaaaggagagcngaacacccagccccgacagccgcagaagagnncccaaggcagaaaggaggccaggaagccaccagagccccagacacagagcccaagagcaccgcaganagggagcccagcgacgccggcgacg

SEQ ID NO: 112501 - DNA, 1759 bp, Zea mays
  Clone ID: MRT4577_34092C.1
gcttcgatccacccccgcatcgcagggagtcctccacttcactcctcctgcccacttacggcgatggccggccgcctcacgggcgccgccgcgtcctcaccgctttcccgcgcgctcctcctcctcgccgcgctcgggctcttctccatctccttcctctcactccgctccctccgccccgccgcggaccccgccgacaagtcccgccccctcctccggctccactcctcttcgacggtgtatcactctccggaggcgttcgcggtggggtacgcggagatggagcggagcttcaaggtgtacatctacccggacggcgaccccaagacattctaccagactcctcgcaagctcacggggaagtacgccagcgagggctacttcttccagaacatccgagagagccggttccgcaccgatgaccccgaccaggcgcacctctttttcgtccccatatcgccccacaagatgcgcggcaagggtacttcatatgagaatatgacggtgatagttaaggactacgtagaaggtttgataaacaagtatccttactggaacaggacactaggagcagatcacttcttcgtcacctgccatgatgtgggtgtgagagcatttgaaggacttcaattcatggtgaaaaactctattagagttgtatgttcaccaagctataatgttgactttataccgcataaggatattgcccttcctcaagtactgcagccgtttgccctacatgaaggaggaaatgatattgacaacaggataattcttggcttttgggctggccatcgcaattccaaaataagggttatcctagcacgagtttgggagaatgacacagaacttgctatcagcaacaatcggatcagtagagctattggagagctagtttatcagaagcagttttaccgtaccaagttctgtatctgtcctggtggttcacaagttaacagtgcacgtatatctgactcaatacactatggttgtgttcctgttattctgtcagactactatgatctgcctttcaatgatgcccttgactggagaaagtttgcggttatacttagggagagagatgtgtatcaactgaagaatatcttgaaatctatatcacaggaggagtttatttcattgcataaatcgctagttcaggtgcagaaacactttgtgtggcattcacctcccgtctcatacgatgcattccacatggttatgtatgaactgtggttgcgtcataatgtaattaagtactgaagcctctcagcctctgagttttgattgataacccaaatgactgatctatcagaaagacactaccaagtctgacagcttgctgttgctaccttggaaacggcaatttggttagttgctctttgaatatccagctggatggatcattgaataaatgttagctatgcatggtgcaacgaagagcatgttcaagaaagagttggccgctgtccagcatatatgacaaaactgtagtcctggttaattgatagattagctgattcttttaacaatagttagccttctcatatttcaatcttttcttatatttcacagatcagcttggttgattgtatgtagtgtctcgtgcaatttttttgtgttcaatggcttcaggcatgtaaggttgtctccaacaactttcctataccatctcccatttcaaactctaccttgtaaatattgctttctaccgtgtacgttgttttacacggttatatgtaccgctggagacgtcctaagg

SEQ ID NO: 112502 - DNA, 346 bp, Zea mays
  unsure (1)..(346): unsure at all n locations
  Clone ID: MRT4577_34093C.1
gggcgacacgccctatagcgaggcgcgagaaacgcccaagaccgtggtttttttcgtggttctgtttttttaatgtaatggagccgctgactagctacctatagctagttcactcgtttagcggcgatgagtaacggagtgtcacccctcaccttgggctggctgtgtgtgcaatggcgggggggggccgttgttctgcgccggacttctntgtgggggtggcggctgtttggtttcttcccgttttctcgtggcccttcccttgggtggttggggggggggctccgcctttttttttttgttggtcctggggcgggtctcccccggggggggccccggggggggg

SEQ ID NO: 112503 - DNA, 940 bp, Zea mays
  Clone ID: MRT4577_34094C.1
gtatccgtctattttcgcagaaaacccctcaaattctccgttcccttcgatccaccccgcatcccagggagtcctccactacagttcttgcccacctacggcgatggccggccgcctcccgggcgccgccgcgtcctcaccgttaccccgcgccctcctcctcatcgccgcgcttgttctcttctccatctctttcctctcactccgctccctgcgccccgcggcggaccccgcgcttgcgtccgccgccgacaagtaccgtcctcttctccggctccagtcctcctcgtcggtgtaccattctccggaggcgttcacagcggggtacgcggagatggagcggagcttcaaggtgtacatttacccggacggcgaccccaagacattctatcagacgcctcgcaagctcacggggaagtacgccagcgagggctacttcttccagaacatccgagagagccggttccgcaccgacgacccggaccaggcgcatctcttcttcgtgcccatctcgccccacaagatgcgcggcaagggtacttcatacgagaatatgacggtgatagttaaggattacgtagaaggtttgataaacaagtatccttactggaacaggacactaggagcagaccacttctttgtcacctgccatgatgtgggtgtgagagcatttgaaggacttccattcatggtgaagaactctattagagttgtatgttcgccaagctataatgttgactttataccacataaggatattgcgcttcctcaagtactacagccatttgccctacctgaaggaggaaatgatattgagaacaggacaactcttggcttttgggctggccatcgcaattccaaaataagggtatcctagcacgagtttgggagaatgacacagagcttgctatcagcaacacccggatcagtagagctattg

SEQ ID NO: 112504 - DNA, 374 bp, Zea mays
  Clone ID: MRT4577_34095C.1
cgacccactcgtacgcccacgcatccgcccactcgtccgtccacttgttcgatcactcgttcgaccaatcatacagaagaccgtggatcattaatataaagggagtgacatagataactacaaatgatatcactacctcttatctccatgacaattcctcttcttcactctatgtatgatacaccacctttccagttaacaactaccttaattatctataactaacactgtttaacattaaatgattcagctaacattacaaaaatcctggataacaacatatctccaaccataactcatagtttaacaatataccgacctatataatattatcctataacaattccaactttttaactgcacaaatatatttt

SEQ ID NO: 112505 - DNA, 558 bp, Zea mays
  Clone ID: MRT4577_34096C.1
tttttttttttgttttatttttttctttttttttttttttttttttttttttttttttttttttttttttttttttttttttttttttttttttttttttttttttttttttttttttttttttttttttttttttttttttttgggggggggaggtttgtttaaatattttaatatttttttaaaattattaaatgattagaaaaaaaaaaaaaggaatagaactatcttaaaaaaataataaaaaaaaaaaagaaaaaaaaaaaaaaaaaaaaatttttacaaaaaaatagaaaaaaaagactgaaaaaaaaaaaaaaaaaactccctaaaaaaaaataaaaaaaaaaaaaaggcttccgatgggggattcccaaaggggactccaaaaggggggaggaataattgtttggggcaagcaaatgggaccccaccaacagggaaaaaaaaatatgtttgcggaatgattctaaggtttggttaggagccttttgaagcactgcactttttggggggtttttggggaaggccgcaaacgggcggggacaatttgggcac

SEQ ID NO: 112506 - DNA, 291 bp, Zea mays
  Clone ID: MRT4577_34097C.1
ggggggaaaaaatttacactttccccacaaaatagcagcaatctgggggccaatagaagtcctgggaacattgaactttactggtccaccaatttaataaaggcgccccccttttttacagttttgggcggtggcctggggggtcccctcattggaaccggaattgggttcccaaaggaatttaatccccctttaccctggtaaaaacaccctggggttcggttaggggggaaaaactaacccggtgggggggagccaaataaataaatatttccggggtaaaaggccccg

SEQ ID NO: 112507 - DNA, 177 bp, Zea mays
  Clone ID: MRT4577_34098C.1
gatagttagggctgccctactacagtggccatgcggccttacaagtgttgttcgggcaattgaaagctgctgccctgctggcactaggcaggtgctaacgagaaccacaaatatcgctcgcagccagtgctgacattttacaatcttgcgggggcgatggagtgactgacgcacact

SEQ ID NO: 112508 - DNA, 617 bp, Zea mays
  unsure (1)..(617): unsure at all n locations
  Clone ID: MRT4577_34099C.1
ccacatccaccggaagtattacanttgaaacaaaacaattttaatgttttacaattattaacggttcatcacaaccttgtcgatttcggctaacccaacagaaagaggtacctcgcaccatacaaggaacaaaagtatcacataacataatggcaacacgaccgattggtgcaaaagaagtgtttaactatgcacactcattgctaaaaaatgtcatcaagcgatcattcattgtcttgaagatgaagtggcggatcttgcttagtctcccttctttttcgttacggaagcaatcaaaaataattatagcatatatggtattgtataagtttattagggatagtgccacacacaatcgggacttcagaaattttgtatccagtgcgaataaaaatgatgtggagataagagaaagcaatagtggaccaacaaataagttagacatgagtgtgttttgagatttgattgctacagcataagtggcgtgaactaccacttgtattttataaccttgttatgtacttggttgtgttgtatcgtataacgtgagtggatttgtgataattgtgtatttaaatgtatgtccttgcacacttgtcaataaaattgccatgtct

SEQ ID NO: 112509 - DNA, 269 bp, Zea mays
  Clone ID: MRT4577_3409C.1
atacaatgctaattgcggcagacaaagctgaccagctgaagctgagaagtagaaatacaagcaagcgacacatgacagtagcacaggttatgcggcatatgtactgaagctatgatgcttgacgacaaaacttttcgcagcgggtgtgaacctaatcgatcacctaccacatccaaatgcacatcgtctttacaaatgtaacataagcgtaatacacagcatcaccttcgcagggagcatcactctctcaccgaatattgaccatgtca

SEQ ID NO: 112510 - DNA, 274 bp, Zea mays
  Clone ID: MRT4577_340C.1
ttgggtgcctctagggcggggcgccctttttttttttttttttatatcgaggaaaatctcaatcaatatattgattatttttaggaaacacatgccggtatgagggcaccattatcgagtacatctcatatgtaatctaaagatggcaccaccaacgatgggttgctgccacggcgggggaggggtcatcaaagagaactgggtgtatggcaccaattgttgctgctgtacgaaggcagcgaccaatgggttaaccaccgctaggggattaagt

SEQ ID NO: 112511 - DNA, 391 bp, Zea mays
  Clone ID: MRT4577_34100C.1
tcgtccactcgtccgctagatcaaaaaaaattcgttattcgtcttctcttcgaataaaccgcatgtccatcatacgagaagaggagtgagagaagatggggttgtcgttcacgaatctgttcatcaggttgtttgcgaagaaggaaatgaggattctgatggtaggtctcgatgctgctggtaagacaaccatcttgtacaagctcaagcttggagaaatcgtcaccaccatccccaccatcggatttaatgttgagactgtggagtacaagaacatcagcttcactgtgtgggatgttggtggtcatgacaagatccgtcctctgtggaggcattatttccagatcactcatggtctcatttttgtggttgatagcaatgatagggatcg

SEQ ID NO: 112512 - DNA, 302 bp, Zea mays
  Clone ID: MRT4577_34101C.1
cacctctcaccaggagtcaaccacagccctgcacaaaggatgtgaatttaagtttttaaatgtgctaccagagaaaatccagatagatgcaggtcgggagctgcagtcgccagtgcctttgtttacatgaaatggaacgttacgtgaatgggtgccccagcccgcaacccgctcgcaaccatcaactgcctgaccttccagtttgggaggaaaacactgtttgaaaattcccctccctttcctgcctgcacacctcagacacacagttcactaagaccaagtgacgtgtagagtcatctgaa

SEQ ID NO: 112513 - DNA, 174 bp, Zea mays
  Clone ID: MRT4577_34102C.1
cggacgcgtggggttctagatcgccggacgcgtgggctgacgcgtgggcgacaggtggtgagaggcggtccttttcttacaatcagaccgctctttttcagatcatgcaagacgagtgctgtactcacttacggaagccaacaatgcatgatgagaccccagtgtcgaggcaca

SEQ ID NO: 112514 - DNA, 320 bp, Zea mays
  Clone ID: MRT4577_34103C.1
gatcctctagagcggccgcccaccccgcaacaccattttagtttacagccacagcacgggcaccaggggcaggggagcgcgaaaaaaacgagcacaccaccaaccactggaacgaaaagaacgtgaacccgcaaagaacacgcacacaaaccgaaaagggccaccaaggaaaccaccacacggggacccaagtgatcgggacgaaaccaaaacaacgccacaagtaacgaaggcacacgcagggccagacggaacgtgaaaaccccaaccaacaacgaccgcaggcccgccagccgcaaacccacacacaagggaaagaa

SEQ ID NO: 112515 - DNA, 278 bp, Zea mays
  Clone ID: MRT4577_34104C.1
cccggcagagaccggcccggaacccccgggccgacccacgcgaccgtccaaaccgacgcacacgagggacaaacaggggaacttgaacgcagaacccgagaaaccccgacagagccaaccggccggcggcccgcacggggaacgccagacgacaagcagaagagcagacagccagaccggagacagcaagacgagaagaggagaacagaaagagggaacccccgccgagccaaccgagcggaaaggacaagaccaagcacacagccgggagcagggag

SEQ ID NO: 112516 - DNA, 1112 bp, Zea mays
  Clone ID: MRT4577_34105C.1
agaacggcaaggaagctcatcctagcgctgcttacatgtctgtagtttgccccgctgtacaggcagattcagccgctaccgcccaacatacccgagtcgccgggcggcacgcgggtgacgacgaccaggactatggtaaccaacatgtggagactcgcgcgtctggatagccggcagtaggtaagttttaaagacaccggggcctgcgtctgcgtctgcttggccccccccggtaacagcagttatcatccccatctcccgccgtcccgcgtgctgatacttgcttgcattgcctgccgtttcccccgagccaacggcgacgttcgacggccgtagccaagaaggtatctcgcccaaacaaaggccgtcaagccaccatatggccgtgtccggcgagaagccgccaccgccaccgccaccgccaccgccaccggccacggcgtccggcggaacggcaaggaagctcatcctagcgctgcttacatgtctgtcgtcggcgctgctgtacaggcagattcagccgctaccgcccaagatccccggcacgccgggcggcccgccggtgacggcgaccaggacgaggctcagcgacggcaggtacctggcctatctggaaaccggcgtcccgagggagaaggccaagcacaggctcgtctttgtccatgggttcgactcctgcagacacgacgcgcttccgatctccacggagcttgcgcaagagctgggcgtttacatgttgtccttcgatcgccccgggtacgccgagagcgacccgcacccggccaggaccgaggagagcatcgccctcgacatcgccgagctcgccgacaacctgcagctgggtcgcaagttctaccttgctggcttctccatgggcggcgagatcatgtggagctgcctcaagtacatcccacacaggctctccggcgtggccattctcggccccgtaggcaactactggtggcccggcttgccgtcgaacgtgtcgcgggacgcctggtaccagcagctccctcgggaccagtgggcggtctgggtcgcgcatcacctgccgtggctcacctactggtgggacacccagaagctcttcccgggctccagcgtcatcgcct

SEQ ID NO: 112517 - DNA, 126 bp, Zea mays
  Clone ID: MRT4577_34106C.1
gatcatatcgagatgatgcatatattagcaagacatagcttaggagaaaaaacttcatgacttagcatacaaggctgctcaaatgagatactatacccgagtaccataagagctggtttatttagg

SEQ ID NO: 112518 - DNA, 717 bp, Zea mays
  unsure (1)..(717): unsure at all n locations
  Clone ID: MRT4577_34107C.1
ggacgcctgcggtaccggtccggaattcccgggtcgacccacgcgtccgctggtgtccgccgcgtcctggtcgcgtgttgaaaatggctgcatccggcgaccctggcagtgctgaaagttaccgttctccgctggcggcccgctacgccagccgcgagatgtgtttcttgttcagcgacaggtacaagttccagacgtggcggcagctgtggctgtggctggcggaggccgaacagacgctgggtttgcctatcacagatgaacaaatccaggagatgaagtcgaacctgaacaacattgacttccagatggcagctgaggaagagaagcgcctgcggcacgacgtgatggctcacgtgcacacgtttggccactgctgtccgaaagctgcgggcattattcatctgggcgccacctcctgctatgtcggagacaatacggacctgattattctgagaaatgcatttgacctacttttgccaaagcttgctagagtgatctcgaggcttgccgactttgctaaggatcgtgctgatctgcccacgttaggtttcacacactttcagcctgctcagctgaccacggttgggaaacgatgctgcctttggattcaagatctctgcatgggatctccagaactgnaaagcgtgtcccgggatgaagctgcgcttcgaggagtaaagggcaccactggcancgcagccagctntctgcagc

SEQ ID NO: 112519 - DNA, 1583 bp, Zea mays
  Clone ID: MRT4577_34108C.1
cactcgagcggctcgagcggctcgaggacgaacgatacagttggatcattttgcaaagatgtcacggaagactgctcaaaagacatgcagagctctaaaactagaagcagcaggagacaaaagattgcagatctagtggatggttcaacggaccatgacaaggagaacatactagtcgatagtaattttacttccaatacaaaacgtggaaataacagcatgagttccaaatccaacacaaagacattacaaagtagcaaagctgtgcttgatgagagtagtgtgatcaaaaggaatggttatggaaccttggatgtgccagaaccaacatggtttattctaagtggacatcgcctgctgagaaaagagtatagggctatacttagacgtttgagaggtagagtttgcagggattcacatcactggtctttccaagcaacacaccttgtcaccactgagatgcgcagaactgaaaaattcttcgcagctgctgcggctggcaggtggatactgaagcctgattacttgactgctagcaatgaggctggcaagttcttagaggaagagccatttgagtggcacggtgaaggccttaatatcggtgatacgatcagcttggatgctccaaggaagtggcgccagctgcggcagcgtactggctatggcgctttctatgggatgcaggtcatcatatatggggaatgcattgctccaacactggacacgttaaaacgcgcgatcaggtgtggtgatggcaccatcttagcaacctccccaccttacacccggttctttaagtccagtgttgacttcgctgttgtatccgcgggcatgccaagcgcggacgcgtgggtgcaggaattcatgcggcatagcatcccctgcatcagcgcagattacctggtggagtacgtgtgcaagcccgggcaccccttgggcaagcacgtcctcttcaacatgcacgatctggccgagaggtccctgcagaagctcatgaagaaccaagaagatgctcccgggagctgttccgcttgtgggtcagacaaccgggaagtgccgatgctggtgtgcggcggcgacgggaggagccagtcttccggctgtggggtccggacgcatgccgattgctgcaaccctcccgtggaaggctgcgatggtggcgagtggctgtgcggtaggtgcgaccagcagaaatctgcaaagaaggctaagaagaccgctgcgaaaccgagggtgctgaaacagagatgattctggtttggcccgtacaagcgatgcaaaaggtcgtctcccaaggtaacgacgaatgatggcagcgggggtgctcttgctctctacaagttgatgacaactagctcgttgcctttggaaagcacccgtgcatgtgatctgatgaatgaaaacaaagtgatgggtgtaaacgtataaggactttagactggtgccaataaatattacgtatttatgtaaatgcacggatctgatggaatgctgtgatcaacttgaacatatatggtgcccatcaatctgggcattgggcgctgtcgaatgtccggtaaagcgccctaaaaccggaaaaaaaa

SEQ ID NO: 112520 - DNA, 365 bp, Zea mays
  Clone ID: MRT4577_34109C.1
ctaaagctaagcgccttactccctacatgctaaatcacctgtactatgctgcatatctgagcttgcttatcatcatatggaagctcttgcttagtcctgcaaatgacacttcaagtacctctattattagatccatgctatcaaccaatgtattgatcgcgtctgtcatgactccaagcatacactcccactctcatgcttatttacttatctacgtctgaattgtctaaaaaacaggtgaacaaatcctcttcctgctgataaacttgctatccataaacgtcttaattctgctcccaaaattatgacgacacatctaacattaaaatgccacagtcctgcatacatactacattgctacttat

SEQ ID NO: 112521 - DNA, 791 bp, Zea mays
  unsure (1)..(791): unsure at all n locations
  Clone ID: MRT4577_3410C.1
tttcggatgatgaaccactggggccctgatggactcaccattaagtttgctttgattttgaacaaaaagcctgtaaccagtgttacacatcattcttttttaaaaacaaacgatttntaagttctaagcagtaataattctttttataaaacaaggattcaggaatttccatggaatgttaatgcatcaattgtttatcacccaactccaatcacctaatgcatcatataatgtgataaagcatttaaaacacaaggaaggagcaaatgcaccgggcttgccttttgttgcagagaagaggttctagattcttctatcaaaataaccagttagatgctccatccacttgatgaacaggcactggagcaaacacctcttcagctaccacttcatctagaatcttcactccttctgttgggagctctgaaaacttagcgaagacgaaccacggggagatggggacgatcaaactactcgttctatcgagcaggtggcatgcgacggaagatgagcacgcacgcagcgatggaagccggaggaatcgcgcgcacggcacagtagcagagccgagtggaggggcgctgatttgcaagggagcagggatgaccgaacctgagagagttcgatggtaggtgcagagtgttactagggagccggggaggtgctgcaaagtgagcagcaagagagctgatgccgagctctacagctactgctgctctggcgtgctgcgtgggtgacaggaatggtggaggaaaaggagacatgagagataggagtgagaagactcccga

SEQ ID NO: 112522 - DNA, 2335 bp, Zea mays
  Clone ID: MRT4577_34110C.1
catgtccagcggtcacatatggacatgagaattgaatgttgaatcaatctgtaaattcacatgctaatcttacacccccgtaagccagttaacggctacaaggaaaacagcatgtatccacacatgaatacatgctgctcaattaaacaaataatcacatgacatcagcatattctacctcgaatatacacaggaattttacgaactaacaactatgacatgcagagtgtcttcaactagcctgaaggaatgtcatctggaatgcttagaataaatccctgcagcaaattctcagctttgctagcctgctcaggggtaccagatattcgaacaactttctctaagatgtcaggtctgtcctcagctagcgttacagtagcaccagagatctcgcttatttgagcaagcttgctaccagctctcatggtgaggcttgcaacagcactatttggtatgacaacttctagtgtgctcctagttactagaggaacggcaaatctttttgtagcaccttgtctgatctcatcaataatgttgctgccttgatcaaatgagccacttgcactgcctccactatcttttgaatgccatgaagttgccagttgtgatgcttggtgataagcactcattggcatatcatttccgaggttgggtcctccaggtgagcctgctactggagaaatggctccatgtacattaatattgccaacttgaataggaccagacatctcacggtatagaaaactccttaattttgttgttacttgtatcagagcattccgagcagcactaatctctccaacaatctgtatgagttcatctgactctaaagcgcataatggaagatcttcttttggtaatatctgcacgtttgcactagtctgtcgctgtatatcagataatgacccctcccttccatcaaagcaagcaatttcacttgaaggtacaagtagtcttgttgtgataatgttatccttgtctgggccgaggtctacaatatgagtttgaatgtgcagcactgcttcctgagctgggaaaagctcatggtctggtccctctctagatgtgatgattactaccctttcatcagaaccagcaataatatcagatagtctaacatcaacaccaacatcagcctgtagcatctccagtattccatcatttgttgcaactaaattgtcaaccttgtcatttgggcatagaattcgaaaaattatgtcatcgtacaggatatctggatgttcaatcacctatgccatcatttgaatcaaactcatatcctggtggctccatgctagtgttgttcctaatctgatcagatcgtcccagagattcctcgtatgcaggcatctgcgaaacacccaaataatcatcttcctgagaaattcgaggctctggtgaattcattcgcccacggaagggaccacggtcacggtgtaagctttcctttaggcgatcagtgattattgctacagccttcttaacacaatttccatctccaacaacctgtacaacctcctcggacaaggaaacgcagcgcggagtgtgctggtcacgcggcaggatcctaatgtgcgtcttggtctccatcctcatttgctctatgatcttcccacctttgccgagcaagcatccgacgtgcatcttgggcacgatgagtcgtgtggtggtcttccccctgtccctggagtccttgcccctgggcccatactcgccatcctcgtcgccgtcgtcagcgtcggtctcgagaatccggcggtgcaccatgagaagggcctcttgggccggggagaacatgggcgggcggccgtctgcctcgcgcctcgcgccgtccaccgtctcgatgacccggacgtagtcgcccgcgaagggcgggtgcacagtgaaaagcgagccgctgtcgtgccggaccaaggcaacgaagccgggtgggaagccgtaggccttgcactcggggcacaggatgcggaaggaggtggtggtggtggtgggaccagcgccgccacccgccgtggccgacgagggaggaagcggcggtgggggcgggggcgggggcggcgcgggggcagggggcaggaacccgcggcggtcggagccgccgccgccgagggggccgcggcggtgatagctcgagttagcattctggccgccaccgctgcggcggtcgaagcgctgcttggagcggggcggcggggagtcctggtcgtagtggtagccgcgcttggagcgggagcgatccattgctgctggattcaggagctgaagctgaatcgttctgatcgttcgaaccgtttcggattttgagctgaggcgcgatcgatttggttagaagaac

SEQ ID NO: 112523 - DNA, 4128 bp, Zea mays
  Clone ID: MRT4577_34111C.1
atggcctcccgcagacttcggacgctgaaggctatcggcggctgcttactcaagcagctaatcatcttctacccctcgcccatcccccaaagcgacctgcgacacgctatcaacagtcacagagacgcgcgaagctctatcaacgcttcgcgcaaccaacgacacgaaaacgagataaggcaccgagaggagtacgatcaagatcatggcgtcccggctcgaagtcacgccacccgagttgagtcggcagcagcctcaatcaatggcccgattcagggatggtcgagacggcacatcaccgactcccctccccaggaccggcatcatgaacatcaacaagaggacacatgtggagtatccgcacttacttcacgtcttagggccatccagtggcccccgaacttcaaggtctccaatgtcgacaagtacgagtctaagcaggacccgagaggctggttggccgtctatacgacagccgcccgggccactgaggcaactaaagacgtgatgaatgcctacttgcccatcgttcttgggcaagaagcgttacagtggctacgacatctgccgcgacactgcatcgatgattggagatctaacgactcggccttcgtccgagccatactgcagaaagcatcgaccacctccaaacaactgtttcgaaaagcagacctctacatcaccgctgacgagtgggcccaggacctcatcgggggagcgaaacctgcaccaccggcaccgcgacgcgacgcgaaccagcaacccgacaggcgttgggagaagaggcctcgtgaggaggtccatgccgccggaccacccgttgctcgtgcccgaggggcaccccatggaggcgagcagacactggacgacatcctcgacgcccagtgcccataccacaaggacatgcgccacaccttgcggaactgcagagacttcaagcattccgtcgagaatggccgaccattccagcctctaccgcctcccccaccacgaggagggcttggcgagcccaggcagcctcagcaacaagaagggggagggggtggggcattcccacgcgttgacggggaggtcaatgtcatctttggaggacacgggtcgcaggagaatagaaggcagcaaaagctcaatgacggtaggtcctggcggcaatcaccagtgctccagctctctatcggtggtcggagtacacgatcaccttcagtcgagtggatcaatggcttaacttcgaccatcctggcaagtacccgctcctcgttgatccggcttggggtcgcactcaaagacctcaccgagtcagacacccatttcttcggcattgtgccaaccgaaggagagtacccgctcaggcacatctacatgcccatcacctttggaactccggaaaactacagaaccgagttcctgaggttcaaagtggcgagtttcaactgcgggtgcaacgccatcatcggcaggctaggattggcaaaattcatggccattctgcactattcatacatgatattgaagatgccaggaccacaaggaatcatcactgaaagcacgctcgtccggttcctgcaagataaccgagacgtattcacatggcaacctacggatatgctgggagtcctgagagaactggtcgagcacaaattgaaggtctatcctcaagcaaggccgattcgacagaaactgcgtcgtttcacacctgacaaaagagaagctattcgcgccgagttagcccgcttagtggctgtggggttcattagagaagtgctgcatcctgagtggctagcaaatcctattcttgtactcaaaaagaataaagtggattggcgcatgtgcgtcaactatactgatctcaacaaacactgtccgaaggatccgttcgggctccctagaatagatcaggtggttgattcgacagctggatgttctatgttgtccttcctagactgctattctggataccatcagatcagcttggcaaaagaagataaggagaaaactgcattcatcaccccgtttggagccttctgctatgcctccatgccgttcggcctcaagaacatgagagagacctaccaaagagctattcaaacatgcttagtcgatcactggggcaagcgggtggaagcctatgtcgataatgtggtgatcaaaacagaaaaatcagaaaacttcatcgaagatttgcagctggtcttcaacatcttgaggcgataccggtggaagctcaatccagaaaagtgtgtctttggagtaccggcaggaaagttactcggattcattgtcagccatcgagaaattgaagccaacctagaaaaaattgaggccatcatgagaatggaagcgccgcgatcacagaagaaagtgcaaaggcttactgaatgcatggcagtcttgagtaggttcatatcaaggctaggcgaaaaaggcttaccattctacaaattgctcaagaaggtggacaatgaagttctggggccctctaaaaagaagtatccccaagttcaaaaactactgtacgcagtacttctaactgctcgcaaactccgtcactactttaacgaccacaaagtcatagtagtcaccgggtttccaataggggatattcttcacaacaaagaagccattggaagaatagccaagtgggcctgcgagctgggagctcatgacatagaatttcggctgcgcaaagcagtgaagactcaaacattagttgacttcatatcagagtggaccaagcaacaagtccctgacaacccggaggctaccgaagtatggcggatgtatttcgatggctcgctgaaactgcagggagcaggcgcaggaatcctcttcattgcccctagaggtgaacaactcaagtacgcgtttcagctattattcccggcatcgaataatgtagcagaatatgaggcactgatccatgggttgaacatcgccatatcgctagacattaagaggctgatggtatacggagattcactagtggtcataagccagataaataaagattgggattgctcgactgattccatgggcaaatactgtacgaccatccgaaaattggaagacaagtttgaaggcttggaattccatcacgtggaaagagaccacaacgtagcaacagacgcgttgtcgaagctaggattcagtcgagcccgggtcccacctggaatcttcgtccaggaagtgccacgcccaagtattccctcagatcaggcggaagagtgcaacaccttgagccaaccagaatcggactctaatgactggagagaacctatcatcaggtacataaagaatgaagaagaactagatgataaagctacagcagaacgcactgcgagacagtcggcccactacaccctcataggggccgcactgtatagaaggggtgtgacaggagtcctcatgaagtgcatttcctcggttactgggaaacaactattagatgagatccacgctggacagtctggaatacacgtagcatccagaactctagttgggaaagtttccaggtctagtttctattggccaacagcaaagagtgacgcaaccaagttagtccagagatatgaagcttgccaattcttgtcaaagcaaatgctggggactggacatgattggacccttcaagagagctcagggaggctatactcaccaaaggcagtggagttcatacaagacataatattcaagtttgggataccgaatagcatgataactgacctaggatccaacttcactagctctgaattctttgatttcagtgaacaatggagtatccagatcaagtatgcatcagtagcacacccaagagccaatggtcaggtagaaagggccaatggaatgatactggaagcactcaggaagaaggtgttcgacaaaaatgaaaagtttgtaggaaagtggatcagagaattgccctatgtggtttggagcttgataactcaacctagtcgagccctgcatggaaataccccgttcttcatggtctatggttcagaagcggtgctacccgccgacctcaagttcggggcgccaaggctggtcttcgaaagcatagctgaagcagaagctaccaggctagaggatattgatgtgctggagaaaaagcgattgaacacagtaatttag

SEQ ID NO: 112524 - DNA, 421 bp, Zea mays
  unsure (1)..(421): unsure at all n locations
  Clone ID: MRT4577_34112C.1
cggtggccgcccttttttttttttttttattttttttttttcttttttttttttttttttttttttttttgnggcctcaggaaaaatattaaatttggttctaatcccttctaaaaaaaggccacattataaccattataatttcccacaaattttcattaaaaaattatatttatgtgaaaacatggaccaaaaacattgttagcaactaaattaccaaatgtaagggttttccattccttcccttcaagttttttaaaaaaatcttttacgggtaacccctaatttttattgaccctactattccctctggttttttcttttacatttccattcccaccattggtaacatttcaaagggggttaatttattgattgaacctatatcttttttctttaaaaacaccaaaccccttgtttc

SEQ ID NO: 112525 - DNA, 296 bp, Zea mays
  Clone ID: MRT4577_34113C.1
gtgtttccttctatcagcattaaatgctcaggagtgtaccaacactggctggcaagattttttgccttcttatgctccctggtctttcctcaatctctgttacagcgaccattttcgcacactgctcacaagctgctattgctatccatccttcgccggttcatctacaccacccgggtcttctgacagtcaaaacccacttgtcaaccctatgcattccaacccgcaatttcacctggcatcttacgttcatctgccaccgtcgttccatattcatcagccgtattatatgacgt

SEQ ID NO: 112526 - DNA, 203 bp, Zea mays
  Clone ID: MRT4577_34114C.1
tgcccccgcccccgtctcctcccgcccgtcctacggaaaccccgtcgcgatttcatccgcgaacctccgcgagaaccgtccgccgcgaacctcaccgcaaacccagccgcgatcctcaagcccgcaaatccctccacaaatagcgccgcgaccgtctcgccggctcgccggcactaaccagcaaagagttgtccagcgcccac

SEQ ID NO: 112527 - DNA, 394 bp, Zea mays
  unsure (1)..(394): unsure at all n locations
  Clone ID: MRT4577_34115C.1
ggccgctcgcggactagaactagctcccaaaccctcccgatggaagacccgccgccgccgccgctgccgctccttctcccggtctccactaggctgcgaatgctcggcgtccgcgcctcgtgaggggttcatgttccaaatggactgttttaagctnnttgagcgggattgtaggggganaaattnatcaattnatttnnaatttnaacaatntaccanaatntatnaaataaanccantaattnatcacnctcatnnanatnnntnacnatnacaattcttcaanccnaaaattaacacatnatcnttaaaaattttcttttttttttnantctaaacaggggggggggnnnaacccnccattttttttttttnggggggggggggggggggg

SEQ ID NO: 112528 - DNA, 442 bp, Zea mays
  Clone ID: MRT4577_34116C.1
ccggccggggctgatcacactccggaaccgaagccgactatcccctctcccagtcctccatgccggcggcgcatctggacccccactccaaattcatgctccgctagaagatcctcatgtgaagtcatcggatctgctcgtcggatctccaagcacggtccatttgcaagtaagagactttcatttggtactgcttcaaggtgcgtgaatgtttgatggcatgcaaattcattttcatgtcaagtttacattgtaattagtttctaatttatctagatgggtgtgaaggagatgtatcttcaatattacaatagttacaatcagtacctacgaagaagaagggtgcttatttgcactaccatttgcgtggtttttttgtggtataaactggctagattacataagaagagtattaagtaaaaaaaaaaaaaaaaaagcggcc

SEQ ID NO: 112529 - DNA, 398 bp, Zea mays
  Clone ID: MRT4577_34117C.1
aataaaagggtaaaaaattaaaaatttttgaaaaaatcagcaaaaaaattaaaaaggtcaaatattaaaaaggttgagaaatgttcaaactttaaaaaaaaagtaactttaatatagcaggttaaaaaaagcaaaggggaaaactccgaaaatgaggggggaaaaaaattaaaacgggcgaaaaggtaaagcctatgggcgaaaaaaaaccggtgctggaaaaggagctgtagcaacagcaccaggaacagggggggggccttcttgtcaaaaaaaaaggctattcttcctgggcctgaaacgctccggggggttggggtccctgggcttttaaagggaacggacgcggacaaagtgagcgtggatcgcgcaaaaaacgcaagggggcaacttggggt

SEQ ID NO: 112530 - DNA, 352 bp, Zea mays
  unsure (1)..(352): unsure at all n locations
  Clone ID: MRT4577_34118C.1
cccgctcgaccacgcgtccgggcaatttgaagataaatttgacacacttgcacatataggaagggtatgggttcaaatatctttgatatatattaatgtctttggagtgcagatgacaatagtttcacccctccctattcctttacggtgatgtggtaagttgtttatggcttaatgcttgatataatttatttctgaaattttgatattgttttattaatgcggtagatatcgctggtcattggtgagaatgaagttgttattatgcttgtgatatacaagtatgcctatngttgtttcaccatgtttttcatgggtgaagtttattacaataatattggtatatatgctt

SEQ ID NO: 112531 - DNA, 644 bp, Zea mays
  Clone ID: MRT4577_34119C.1
cggccgggccgggatttcacagcagctatagatctacttctagttaactagcacagggggggaaaatggatccgcttctcgctgctgccatgaaccacgctgcagcccatcctggccttaggatccacctagtaggacccactaatgacatattctcacgggaccacctggcgccttcttctcgacagagaacaaaacgaaggtgtaaccttagatttactacacgatctgcaagagtaggtagccaaaatggagatcaaacgttgagcccctcgaaaatcccacaaagggactggttcccctctgacttcaccttctgagccgccacttcagcgtaccatatttaagtgtcgctcgcaatgaagatggaaaggatcaaagaaactgtcatcacttctgccacaatcatcctcaaagagatactgaacgggagcacattcacacattgcaccgaactcctaccatatgtacaaaacggacgtcagcattgctcaaggaaatgcgcatggacgcatataagttctctatctcttgccccagaatactgtcgaaggcaacccaagaatgaggtatcaacccggttgtcatcaagtactacacaaacctcatcaacttgctgctagaaaacgccatagagtccatat

SEQ ID NO: 112532 - DNA, 222 bp, Zea mays
  Clone ID: MRT4577_3411C.1
acaatcaggatcgagtcatttgtttctttatatgcatggacattacctgttacacatgcagcattcgcctcctgtgccaccatagttgcacgtgtttgggactatgcttatatttctggatattattgaggaggtaaagaataagtaagaatagttaaattatcttgtgctttgtagatgatataccaaaattatgttgggtgtagacaatcatgggttagt

SEQ ID NO: 112533 - DNA, 489 bp, Zea mays
  Clone ID: MRT4577_34120C.1
gggctctagcatcggtagaacatttcactccagttccaaagtggctgggctgcttcatggccatctcttctacgatactaggcactgacaggatcaatgggggattcttgattgagggactatttaacatgcctaaagagtctgacagcccaaggtagcctgacttgcaacatgcgaatgaaggcccctcttgggtggagcacaggacctatttgtcctaggtgcaatcgaggtacctaagcaattatgttgcaagttaatactgtcaggtgaacataccttgagtctaatacgaccatccttcaagaatgagttgaaactactgaacaactgagtagctaggcatttcgattaatgtctatgttcataatcaacgctgaatttaatatttgtcaagtatcaactttcctggattccttgccactgcgaggacatcgaatcgatcaaagttatatatgatagatgcaggttggccatggttggctacct

SEQ ID NO: 112534 - DNA, 277 bp, Zea mays
  Clone ID: MRT4577_34121C.1
attgggcttcaatgggtcctccttcactgacgtaaataccgtccaagaattttctgatatctttgttgtggactcgggtactttggtgaatttgagcagcagaagtggtgacgttttcaatgtcatttcctctgagaataatttcatctttgttggctgatcgttcaacaacaactccatcaagcataacagttcgtaaaacgactcgttgaccaatgaaattacgaacttcaaaaatttttccatcctcgctaatgctaacgtttacggggtaatg

SEQ ID NO: 112535 - DNA, 420 bp, Zea mays
  Clone ID: MRT4577_34122C.1
agctcggaattcggctcgagaactctccaaggtcccattttttttttaccgaacccacaacactaactggggggggtttttttatagaatatcagcaactccaacaagcgccctctacttgatccgagacgactacactacggataacatacttttcaacggacaatacacctagccgactgtacatacttgcatgacaatgcgcacattcttacagaaactcaatgaactgggtctccattattgagaggaaactacacaaaaaggatttcgctccatagatgccctactcccaacctgatcgtcctatagatggaagtgtcacccatcaaatccactgggctaggtccaacccaacccgaaccattctatgttggtcctttccttagagaaacactcccaaagaatgcttcaccatgg

SEQ ID NO: 112536 - DNA, 344 bp, Zea mays
  Clone ID: MRT4577_34123C.1
ggcaaacaattccaatttgcaatgatatatttctatatacagggggggggccaaacaactaataaggagttaaaagggccttttgtttttttgcttaagacaccaaacgggaagcacataaaaaaaactggtgcgctttccaagggcgctagaaaaaaaaaacgctgcagacctatattctaaggagagggaaaaagaaaggcgcacaaagcacccaaagggtgctttttaggtggtgggatcaggcagggttacccaaaaagacccattaaaacatggagcgatttcttagagaactacattgggtgcaccatggacattggtaatggacccccatagagaat

SEQ ID NO: 112537 - DNA, 273 bp, Zea mays
  unsure (1)..(273): unsure at all n locations
  Clone ID: MRT4577_34124C.1
gagccgccttgctccgaaccttcagctttttgggctttgagattgtgagaccggggcatcccgttgtcccngagagacccgacgcttgcttcatggcctacacgttcgagagagagtcagcgggagaggaggaggagtagggccgcctcggggctgggcatccggcccctggggccaccccttgtcagccgggtgggtaggaatacgtagattgctcatctcgcctgggtttgtccgcatgttgtaatcgtgcaaataaacgctcactccgaa

SEQ ID NO: 112538 - DNA, 1461 bp, Zea mays
  Clone ID: MRT4577_34125C.1
acctcgaggccggcccaatttcttggtgaggtctacgtgaaggtagtggaacgagatcaccttccgagacgagaaaggaatcactcgttttcctccgggcacattcctccgagttcggacggcaacgccttttatggccgccgttgcctcctccttctcgcggttctccttccgctgcgccgtctgcccctccccgctccgcgtccgcttttcgcagccccatccgcccgcgcggctccgcgtctcctccaccgtcgttgctctccacaagcgcaaccccaagcggctcaagtacgccgccgagcgccagttcacgagaggggatgccgggttgctgcgggtggaggtggagccctccggcggggacttctggaagcttgaccccattatcgacctcatcaatcgcggcgccgtcggggtgatccctactgacaccgtctactccgtcgtctgtgacctgagtaacaatgaatcgattgagcgccttcgcagactgaaaggcattggagactccaagcctctcagcatcctgtgtcgctcattacgtgacatcgatacctacacaacaggatttcctcaaggcactaaccaagggcaagctaacatttttcgtgttgtcaagcgtgcaatacctgggccttacacatttattttacctgcaagcaagcagtttcctaaacaatgtataaagcatggttcttccacaaggtatgcaaaaaggaggcaggttggcgtccgaattccagatgatcccatctgccaggcaatattgcaaaatcttgatgaacctttgatatgcacaagtgtcaaatatctatcggaggatgaatggatacttgatccagtaatcattgcagatctttatgagccactggggcttgattttattgttgatggcggacctagaattgctgacccttctaccgtagtagatatgatgggagcaaaccctactgtaattcgtcagggaaagggtctaaagttggattggatggtagcaaaagatgaagaggaggacgaggcacagtcgatgttttctttcaaatcagcttgaaatttgcttcgcctgacctgtatgggctggcactttgctatggtcccccaaccgaagcgtcttctttcaactgcatataggatgtcagttgttagctgtaagcatagatgtcgaacacgaactgcgtgctgtaaatatgcaaggcgatgtaagcgaactggcagaatttgctcagtagcaacctttgctggaggtgatggaaagtttcctgctggttttcttgaactttgccgtgtacgcctaccagaatttccgtcctggaaggttccatattattccaattcatcctgcttctgtgatgcttttaattcgagaagcataactttttgggataattatgattatatccttcgctaaaaagttatgcttctcgataccctcgaaaaaaaaaaaaaaaaaaagcggcc

SEQ ID NO: 112539 - DNA, 1370 bp, Zea mays
  Clone ID: MRT4577_34126C.1
gcacgagaaccgcccaatttcttggtgaggtctacgtgaaggtagtggaacgagatcaccttccgagacgagaaaggaatcactcgttttcctcgggggacattcctccgagttcggacggcaacgccttttatggccgccgttgcctcctccttctcgcggttctccttccgctgcgccgtctgcccctccccgctccgcgtccgcttttcgcagccccatccgcccgcgcggctccgcgtctcctccaccgtcgttgctctccacaagcgcaaccccaagcggctcaagtacgccgccgagcgccagttcacgtctctttggtggctgggttttgcgcgaacgaagagaggggatgccgggttgctgcgggtggaggtggagccctccggcggggacttctggaagcttgaccccattatcgacctcatcaatcgcggcgccgtcggggtgatccctactgacaccgtctactccgtcgtctgtgacctgagtaacaatgaatcgattgagcgccttcgcagactgaaaggcattggagactccaagcctctcagcatcctgtgtcgctcattacgtgacatcgatacctacacaacaggatttcctcaaggcactaaccaagggcaagctaacatttttcgtgttgtcaagcgtgcaatacctgggccttacacatttattttacctgcaagcaagcagtttcctaaacaatgtataaagcatggttcttccacaaggtatgcaaaaaggaggcaggttggcgtccgaattccagatgatcccatctgccaggcaatattgcaaaatcttgatgaacctttgatatgcacaagtgtcaaatatctatcggaggatgaatggatacttgatccagtaatcattgcagatctttatgagccactggggcttgattttattgttgatggcggacctagaattgctgacccttctaccgtagtagatatgatgggagcaaaccctactgtaattcgtcagggaaagggtctaaagttggattggatggtagcaaaagatgaagaggaggacgaggcacagtcgatgttttctttcaaatcagcttgaaatttgcttcgcctgacctgtatgggctggcactttgctatggtcccccaaccgaagcgtcttctttcaactgcatataggatgtcagttgttagctgtaagcatagatgtcgaacacgaactgcgtgctgtaaatatgcaaggcgatgtaagcgaactggcagaatttgctcagtagcaacctttgctggaggtgatggaaagtttcctgctggttttcttgaactttgccgtgtacgcctaccagaatttccgtcctggaaggttccatattattccaattc

SEQ ID NO: 112540 - DNA, 301 bp, Zea mays
  Clone ID: MRT4577_34127C.1
cccacgcgtcctcccactcgtccgactacttcaagtctagcaacatccacaccctctggtgatagggctcgtacccataactgacatactgctgctcacggctgacactattgatcatgcactgactgacacagataggctaatcatatcatagagcacctgctgccactctgccatatctatgcttgctactattataattccgctccaggataacacgactctcatatcgaaattgctgactactatgcacgatattgaaaccgtactagatctggtcgactacgactacaacgaggaa

SEQ ID NO: 112541 - DNA, 2238 bp, Zea mays
  Clone ID: MRT4577_34128C.1
ccgccctagagccataataattcgttgaagaggagggggttcttagaaccagagggcggctacctgtgaaggatacccgtgctgctggctgctgctgcttgtcccctcgaggcggccgggaaaacccactctcgattggttatctcgaggccggccgggaccgttctcttctccctaatcctggtaatcagtagtagccactagcgctgctgccgttctcttcccctacccgacacaagctccaccacctctatctaccacacgccaccactgtaggagctcctccacgatcatcccgccctagagccataataattcgttgaagaggagggggttcttagaaccagagggcggctacctgtgaaggatacccgtgctgctggctgctgctgttcctcaagctagagccgtgtgtgggctgtgcagattgcagagcgcagcttccagtctcagcattgctttcaatggggaggcactcctgctgttacaagcagaagctgaggaaggggctctggtctcctgaggaagatgagaagctcatgaaccacataaccaagcacgggcatggctgctggagcactgtccccaagcttgcagggcttcagaggtgtggcaagagctgcaggctgaggtggataaattacctgaggcctgaccttaaaagaggcgcattctctgaggaggaggaagacctcatcgtcgaacttcatgctgtactggggaacaggtggtctcagattgcaacaaggttgcctggaagaactgacaacgagatcaagaatctctggaactcgagcatcaagaagaagctccggcagaaaggcattgaccccaacacccacaagccgctccttgtcgaggttgaacgcagcaaagcagctccaacgaccagtaccgagagaacctctgagtccaatgatgttgacccttcaagtggcgccgcacttggcaactcgagccatcttcttctcagcgagacagcacaatcaccacagctgccagcgctcggtaagcatcgcagagaaactactagcctggcacatctaagggtgccgcccaaggagttgttccttgaccagctggcttctggtcatgagaacctcactggctgccgcacagcaggcccagttccaaatttccctttccaacagctgatgtgctacaacaatgaatttggcaacaagaatggtgctagtaacaattcactctggtttaaccacaatgagacaagtggcagcaccatttccactgtgatgccaccagtttcgccatcaactctctcaacatcaacagggctcaataggtcaccagacaacccacactcgggaggcactgccattcagagcacccagttctactgggacactgctaatcctagcagctgcagcagtagaggaagcagcggaagcaacggcttgggatttgagctgcaaagcacaagctcgcttctggagagtagtgttttcccatggacagaattaacaccagataaaaatagccaagttcaccttggggaagaactcaagtggcccgacttgctccacggaacattcacagacacacctgcaaccatgcagaatcttagccagtcactgtacgaagatgttatcaaagccgagagccaattcaacatagagggcctctgtgcagcctggtctcaaaatctgcagccacagcaacatctgcaggtatcagatttgtatgacaaggatttgcaaaggatgtccttgtcttttgagaatatctagacagcatgtttcagcatgcagggaacagagaaatagcagaaagctgagtcaatgaagccttaaaaaatacaatatttcttcacagattcatttgaaggctatgtggaggtgtgttttacgtaggtacattcttatgatgaaacagagatcaatactgataactgttcaccagtgtaaatgaaaaaagggaaaaaatgaatctatattacagcataatgtatagactagagaaagtacatcctaggagtttacctcctttcatttaaaagttgctgtctttatctgtacatgcatgtagctcggctttttttgtataagtgagtcatggttgatctttctctacaaaataaatgaggcaagaatgtgaaatactgcacttgtcagtaaaaaaaaaaaaaaaaaagaaaaaaaaaaaaaaaaaagcggcccaaaaaaaaaaaaaaaaaaaaaaaaaaaaaaaaaaaaaaaaaaaaactcgagggggggcccg

SEQ ID NO: 112542 - DNA, 544 bp, Zea mays
  Clone ID: MRT4577_34129C.1
accccacaaaaaatttgaccccaattgtcaaaataacataatagcaaaggatccgacccaacacagatggaaacaaatgatgtttggtttaaccataaaatgaaccgaggaatcctgattttaaaaggttttacttacccaggcaaaatgtcttccacacaagcttacttaaaatatagggatgaaaaagtccggcaaacagtacccacggaaagctcactgttttccctttcgttcacggttccactggtaaattttggcccttcgctcctcgttgttttccctgactgggctccttgcaccccttggggggctaccatgcctgcgccttcctccataataatacctggaatgtttgccgcctttgcctgctccataataatacctggaatgtttgccacctttgccggttccattatgggacctgtaatacctggtaccttttccccttccaccaccgccgccaccacggtagtcatcacgggcacgggggccccttctttgtgggggggggcttcggtttcggtttctcccatggtacctc

SEQ ID NO: 112543 - DNA, 806 bp, Zea mays
  Clone ID: MRT4577_34130C.1
atgccaccagtttcgccatcaactctctcgacatcaacagggctcaatagtcaccagacaacccacactcgggaggcactgccattcagagcacccagttctactgggacgctgctaatcctagcagctgcagcagtagaggaagcagcggaagcaacggcttgggatttgagctgcaaagcacaagctcgcttctggagagtagtgttttcccatggacagaattaacaccagataagaatagccaagttcagcttggggaagaactcaagtggcccgacttgctccacggaacattcacagacacacatgcaaccatgcagaaccttagccagtcactgtacgaagatgttatcaaagccgagagccaattcaacatagagggcctctgtgcagcctggtctcaaaatctcctttcatttaaaagttgctgtctttatctgtacatgcatgtagctcggcttttttgtataagtgagtcatggttgatctttctctcccattgtaaatgaagtgattcttgtctgcatcccaccagaatatgtgcagttttgttgtttgggtgaggaagtggttctcggggattctccgctccaaggagcacatcatcgaagtagatctagactgatctcgttctttccatagaaatgtggtttcagcaagttgtcaatcaaacatcttgggcgaaccaacccccatcggccatcggcaggcgctcgcgggtcggagccgaagccaaaccggtggggaccgcggagaagacaagaaagggcgtggtgaagaatcaggaggtggggtgactgggt

SEQ ID NO: 112544 - DNA, 173 bp, Zea mays
  Clone ID: MRT4577_34131C.1
ccagtagagacggagcacacacacacacaacacatgatatagcaaattgaagcaacaatgggtgaggaggcaaatgttccgttgctggtaccggccaacaacggtgatgatgatcacctcagactcaccgtcatccatggtgatcaggggaaaactgctgcaggggacacggg

SEQ ID NO: 112545 - DNA, 427 bp, Zea mays
  Clone ID: MRT4577_34132C.1
tttttgttgtggaaaagagaatacttgaatattgagggttcatttgtgagggaaaagaactgagttgaaaacaacatgagcagccaaatgatccatgacagctttagaggacgttagtcacggccgggattaataaggccggtaaaataacacgtcacactagacaacaagagcatgggacacctgccttatgtatttacagcttccttctcaccgatggaccccgaccccattctaacgaacacacgggggtccatgaccacaaggacaacagaattagccgggcgaagcagtagccgctagggaaggcacgtcctaattgttcttgacttagagcccgtaaccgtccctccatgcccaggagctcacacgtttattccattaataagcttcgagaaccaaaagaaccagcgaaagaaaaggagga

SEQ ID NO: 112546 - DNA, 330 bp, Zea mays
  Clone ID: MRT4577_34133C.1
ggaaatccatggagcaaaattactttgcaagattttttgtacaaaatatatatttttttacgggagtcaggaataaaaacccaataaggcttcctcctgtaattctgaacactccctttaattgaaaaaataaccagcgcaaattttttacaaaagcccaaaaaagacaaactccccgcaagattcaaaaacgcccgattttattcaaaagtctttagtagaacccaactgcgtttgaatatgaagctgctgctgaaaactgaaaaccttgaggttgagcccacttttgctctctataaggagcaggggccccccctgctttataaaatt

SEQ ID NO: 112547 - DNA, 310 bp, Zea mays
  Clone ID: MRT4577_34134C.1
cttggcctggaccattggtctgctttatgtgcttgattgaatgcatgagaatgaatccgtaccaacagtgtacggacgggtacgtactcgtatgcgtgtacgctttatgatgagatgggaggacattattgcgcagcataagcacaccaacaacgaacgacagcacgcatattcagggatgacatcagtaacggtcacagacgagggtaaatcaaaaagagcgtagggctaatatacaagacactcagactcatctccatccgtctgactacgtcacgatcccggcgcggcacattgcgctccaaacgta

SEQ ID NO: 112548 - DNA, 113 bp, Zea mays
  Clone ID: MRT4577_34135C.1
gtggctggtcccgagaattttcgtcctggtccggacggccacccagattcccttatagcgggtggaatcaaagcacgcggtgagcatggccatagatgcgcgcatgctgaacg

SEQ ID NO: 112549 - DNA, 506 bp, Zea mays
  Clone ID: MRT4577_34136C.1
attcggctcgagtcaaccgcaaacctcaccgttctggtcgtaggaagaaaaacaaaagaaggtgggaccccaattatccaaagccgaataggagtggctataacttcttctttgctgaaaagcattacactctcaaaactctctacccaaacagagaaagggagtttaccaaaatgattggccagtcatggaacagtcttagcccagaagaaagaatggtttatcagaacattggcttaagagacaaagaaaggtacaagagagaattgacggagtacaaagagaagatgaagcttaggcagacctcagaagttggacgtccatagaatctcattggtacccgtttgtggaggcgaaagaatggcttagaaaatttttataatctgttgacttttacgtgcatattgttgtggataatggtccactggactgtggtctacagaactattgtttttttcttttcaaaagagaaaactagtgtctattgttagtcagagaccctttca

SEQ ID NO: 112550 - DNA, 319 bp, Zea mays
  unsure (1)..(319): unsure at all n locations
  Clone ID: MRT4577_34137C.1
ccccccacanngttttttttttttttttttttttttttttttttttttttttttttttttttttttttttttttttcctttaaaactttttttaatggggggaaccagggcaaatttttttaaatggggctaaagtaaaaccttttccaaataaaaaaaaaagggcaggccgtaaaataaacctgggggccttccaaaaacgaaagggggaggcctggcccctaccccttggaaaaacaggggggggcgtttttcggttcccaaaataaaaccaaacgaacctgggcttttcaaaaaaacccgggttgtctcggttaaa

SEQ ID NO: 112551 - DNA, 837 bp, Zea mays
  unsure (1)..(837): unsure at all n locations
  Clone ID: MRT4577_34138C.1
gtctctccgctctgtcggcacgaggcacgaatactcagaaagctcactctctccagcccatcccaaacctagccgccacgccaagcaccttccctcgcctccgatcctttcctttcccccaccggcgaggtcgccgcccgcccgccgcccaggggtttcctcgccatgcttccgtccaagaggtctgcgagcgccgacggcggcgagcccaagcgggctaagctgggggaatcgccatccgccgcccgcgtgggtaccagcaacggcacccggaatggggcggcgccggagattgacgaggacctgcacagcaggcagctcgccgtgtacggcagggagacaatgcgccgcctctttgccgccgatgttctcgtctctggcctcgatggcctcggtgctgagattgcaaagaatcttgctcttgctggagtcaaatctgtcaccgtacatgatgtcaaaatggtggaaatgtgggacttgtctggcaatttcttcttgtcagagcaagacatcggaaagaacagggctctagcttgtgtctctaagctgcaagagctgaataacgctgttctggtctctgctctgacagaggaattgacgatagagcacctgtctaagttccaggctgttgttttcactgatataagtttggagaaggcttatgaatttgacgactattgtcacagccaccagcctccaatctcttttatcaaagctcaagtctgtggcccttttcggtagtgtcttctgtgattttggacctgagttactggtcttgacgntggatggtgaagatccacatactggtataattgcatccatcagcaacgacactct

SEQ ID NO: 112552 - DNA, 203 bp, Zea mays
  Clone ID: MRT4577_34139C.1
ctggaggctgagctgccaggagcccagcccagctgcatcgagcggagctgatggagcaggagccttatgggtactcggttaggcagcgagctgtgcggctctccgacgaagccaatagccagcgatgacggagctaacacaccacgaaagtaactgatgctggtcgtcacaatgtcaactcacggcctagacattccagacaa

SEQ ID NO: 112553 - DNA, 532 bp, Zea mays
  unsure (1)..(532): unsure at all n locations
  Clone ID: MRT4577_3413C.1
gctgccgccgctgtggacgcgtgggccatcgcgcgcgacccggcgtcgtggcccgacgcgcccgacgcgttccagccggagcggttcctgggtgctgccgccgctgtggacgtgcgcggngcgcacttcgagctgctgccgttcgggtccggccgacgcatctgccccgcgtacgatctcgccatgaagctggtcgccgccggcgtggcgaacctggtgcacgggttcgcgtggcggctgccggacggggtggcggcggaggacgtgagcatggaggagcatgtcgggctatccacgcgccggaaggtgccgctcttcgccgtggctgagcccaggctgccggtgcacctctacagcgcgaccgaatgaaaaccagggtctctatatacaaaactactggtattgtatatttgaaagtctacgttttgtatctcataatgttggagtactagtcaatccgtacattgccacagtttctatatattagatgagtaaactctattttaataagacataatagtatgtgtgtact

SEQ ID NO: 112554 - DNA, 149 bp, Zea mays
  unsure (1)..(149): unsure at all n locations
  Clone ID: MRT4577_34140C.1
ccaaaacccanatctacaactgcaccatcnactgcgcacaagacaccctctaccaccacaaaggccctcactacctcaaaggctgccccatccccggcaaccccaacttcatcttcagcttcccccccaccacctaccaacaccccccc

SEQ ID NO: 112555 - DNA, 534 bp, Zea mays
  Clone ID: MRT4577_34141C.1
cgatgggcaccacaccatgcatgcctcctatatagtctatccataaaaaatgatccacgccatgcatgattccgctacaccatgttctaaatcccagaataaaacaattctacaaaagttacagccagatgttggaacggcgccatttgcccacaacctgtcgtctaccaacctcgcgcgccttcacaaatcctaaacctctgagcacggatgcacgcggtgctttccatccttccgacctcggggcacaaaatgggcgtcagtgtgttcttggccaaacgctactacgccttggcgtacttgccaacatacgcctgcacgagcttgttcagtttctccttggagtaggtcatgtagacgtcgatcttctccttggtcggaggggtgttctccacggtgctcgtcaccttgtccacgaccttcttcacgatggtcttgtggacctccctgctcatctgcccgtctttccacgtcgggcttcagcgcctccttcacgaagtccgcgagcgcgaccttgaacatcttcagctgctt

SEQ ID NO: 112556 - DNA, 1685 bp, Zea mays
  unsure (1)..(1685): unsure at all n locations
  Clone ID: MRT4577_34142C.1
caatgttgccagtcaagttccaccaaacattccaacagctgtgcatgctgggcagactcaggtgacaattgacatgccaaggttgggtcaagacagtggtcctcaaagcatacacaacatggagatgcagccaatgtctccaaacgtgcaaagccaatccttgcaggggttaccccttgtgccggcttccagctcagctgatatggccggagttcctgttcctcacaacgctgtgaaaagcgaagaagtcagccgagttactgcatccctggcacaatactttggaaatactgctttcggcgctggtacggttggattacaaccgtcgcagccgaatatgaacgcaagcctgatggccactccacctgcggtaccaccacctgtccaacccaatccgtggccctgggcgcagcaacaaacaggcatagtccaacccggtctcccggttccacctcagcagcagcagcagcagcaacaggctccccagagcttccagacaccgatcgccgtcggtggcagtaatggcaactctatgctcatacctaacgcaggcgcatcggttggtcccgccgccgtggcggcgaaggaaaccgcgcctccagagagcaagaaaggagagaagaaaaatgcggacgcagaaaagaaaaatggcgacgcggagaggagaaatgccgaagcagaggcacaggaagacggcgacaagggtaagaagggcaaggactccaagcagctgaagatgttcaaggttgcgctcgcggacttcgtgaaggaggcgctgaagccgacgtggaaagacgggcagatgagcagggaggtccacaagaccatcgtgaagaaggtcgtggacaaggtgacgagcaccgtggagaacacccctccgaccaaggagaagatcgacgtctacatgacctactccaaggagaaactgaacaagctcgtgcaggcgtatgttggcaagtacgccaaggcgtagtagcgtttggccaagaacacactgacgcccattttgtgccccgaggtcggaaggatggaaagcaccgcgtgcatccgtgctcagaggtttaggatttgtgaaggcgcgcgaggttggggggggggggtgcctgggcttgtctgcagtttcagagagtttagcgtgtggtttgtgggcaaatggcgccgttccaacatctggctgtaacttttgtagaattgttttattctgggatttagaacatggtgtagcggaatcatgcatggcgtggatcattttttatggatagactatataggaggcggcatggtgtgtgcccatcgacgttctagtgttatagtatcgttgatcggaggaccagaccagtcaaggaacgcacggtgtccctcttgatgagaagtgagttgcttgctcatcgttcctcatgcatggtgtgcagcagcgtactttatcgtctatctatgagtagtaggtggaaagcatgtggaaccaaaccaagtaagaacttggctttctctgcctgattgtngtggttgagccgacgactagccggccaacacagattggtcgagcggcgtaggcacaacggcgctgcatctgccggattgttcgcttcgaatcaaaaacaactatttgaattactgtaactagtctatagaaacaaacactatctgtctacattatctgtttgatttggttgntgtacgagttc

SEQ ID NO: 112557 - DNA, 240 bp, Zea mays
  Clone ID: MRT4577_34143C.1
cgacccacgcgtacgcagaaacacaccaatcgatcgcactattctcaacctaacaacaatggctgccaaaattgttacccttcttgcgcttcttgcccttttagtgagcgcaacaaatgcgttcattattccacaaagctcacctgcttccaaagccatatttccacacatccttccaccaattactttaatgggctttgaacatacaaccctgcaaaactacacgcttcaactatagct

SEQ ID NO: 112558 - DNA, 141 bp, Zea mays
  Clone ID: MRT4577_34144C.1
tcgaaacaaacagaaagcttgcctttttgaagtaaagttcgacaccaaccgtcggagcgagaggtccaaactataaaaaccaataccttgttgccaattcctaagctttcaaggcccctttggtctttacggccggggcca

SEQ ID NO: 112559 - DNA, 295 bp, Zea mays
  Clone ID: MRT4577_34145C.1
ctatctcatgacaaatacatccatacttgcatgctccgatccgcaatattttaacctcatgaccaatatcaagaacggtatcaatgaactcgacatgatcgaaaggctaccatccagagagctcctgcatagagaccatgatgagctcgattgcgataacgaccacatcatcagcaccgactacatgacctacatactcacgaacgacactgtgcacggacagagctagcaccataaagtcaatgtgaacgactccataacccttatatttgatgacaaggaagctgctagtttt

SEQ ID NO: 112560 - DNA, 580 bp, Zea mays
  Clone ID: MRT4577_34146C.1
aatcatactaatatatatagcatatttcatttaatatatgtgattggactattggaggttttcacatttttgtagatactgaagaacattgaacaacactgcgaacataaggaagcattgttagtagagagagccaatagcactgaatgacaggaaaatagtaatacattgaaatcctgcgatgaagaatcttggtaaaggatgaatccttggtggttaccatgctttggaacgtcaaaaaaaaaatctttgaacactcttcatgacgttactctcagtagcaaaaccatagctagaaattgattactttcattttttttggaataacataaggaaagctattcaagtatgaagcaattccttcatataacgcttcaaattactaatgacaatgctaagtctcatatttaggttatgcatgcaaaaaatctgaactttctgaaaactcacacaacagccaaggacactattgatgtcttggcaagaatcatggcacgccactttcagtaacaaaaccagaaatagaaaccgattacttcatttttgaaataacacagggaaaacaattcaagtatgaaac

SEQ ID NO: 112561 - DNA, 240 bp, Zea mays
  Clone ID: MRT4577_34147C.1
gggatgaacagggggttttattactagggggcttgcgatagcaaaagcatgggtgtggggcaagggcaacaaacaacagtttgggtccttcacctggggacaaaaacaccacactcgtccaaattcactcaccaccagatccaaattcacacttttaccacttttttttaaattttacaacccgccatgggtcccggtcctccatgtattttttattggggggggggtttaccatccttg

SEQ ID NO: 112562 - DNA, 1214 bp, Zea mays
  Clone ID: MRT4577_34148C.1
gtacccccggagctggccgggcttattttcactgataattccagctggataagaagccgaaaatttagacttgggttgagagtctcgtcagggttttgtcaaggaattcgtgttatggaagcaaaaacagaggcttttactgttaaagatcacagaggcgaattgtataagaagcattatcctcctgcactaaaggatgaggtatggagattagaaaagattggaaaggatggttcattccacaagagattaaactcaagtggaatctatacagttgaacactttcttcaattccttgttagagaccaacagaaattaagaagtattcttggcagtaacatgtcaaataggatgtgggaaagtcttattgagcatgcaaagacatgtgttttgagtggcaaccattatatatattactcaagtgatgcaagaaatgtgggtgcaatattcaacaacatatatgagttcactggtttgattgctgatgatcaatttatttcagctgaaaatctcactgaaaaccagagggtgtttgctgacacgttggttaagcaagcatatgctgattggatcaatgttctagaatatgatggcaaggcgctattaaagttcaaccagaaaaagaaatatgttacaactagaagtgaaacagcgaaagcttcagcaagctaccctgcatcaaacggtttagtgaactcacagaaagaactgcctggaggtcctgtgaatgctgagcaatcttccctgaacaatgctagccaagatagaactagaatcccatccatgtccatggggaaccaggtagcaagagagtatgcaggcaatcctcagcacatgacaccaagtattaccatgcaatgcgacacgagctcattgatccccggaggccagttcagtggtggttcctccgtgcagactcaaacttcacggagctccaacatgcttgcgctgcggccaacgcagcagcctcaaaacttggacttctctgggcttggtcagtccacacagccttcagggaccaaccctttcgccgactggtctcggttgcaggagagcagcgtcgatgagtacttgatggatgagataagggcgacgagccacgagctattggagaacgatgagatgcagcatatgctgcggttcctgagcgtgggcggggcgccgaccggcctgaacaacgttgacggctttccttcatacgcgtctcctgcccc

SEQ ID NO: 112563 - DNA, 862 bp, Zea mays
  unsure (1)..(862): unsure at all n locations
  Clone ID: MRT4577_34149C.1
ccgggtcgacctcgcgtccgaaaagctgtcgccacgttcagagccaccttcagacccttcgaaatatactgctgctgatgttcgaattactgatcaaaaattacgcctctgtgacatatgtggagcatttctgagtgtatatgacaatgatcgacgtcttgctgaccattttggtgggaaattacacctaggctacatgctgattcgtgagaaacagaaagaacttcaggaattagtccatgttgcgtgattggaatctcatgcgatcatcttcatacccatggatacaacagtcactgtctgttggcaaatgtaagcataggagggtgcagaccatggagcagagaaataaaaggagaccgggcaaagctgaagatgatagacgatcaagagagcacagcaaggatcgcaacggccggtcgtccagggatagagaaccagaaaggagagacagggttgagtctcgagatggtagaagagattatgaaagggatcgtgatagacgtcatgatagggacaggcgccatgaccgtgatcgggatagggattatgaccgctcccgtggacatgattcaaggaggagagagcgttcacgctccagggagcgcagcaggcgccacgagagatactaaatgttacaccatgcctgacagatttaggagtactggcggcgtctgttcaagatatggtttgagcttgtgcttcgtatcttctgaagaccggtctacttgacgctaaattcgcatggagtgttaagcatttattaaacgcatctggaatcaaatgaagttgtacttgcgaacggcttcacttaaaattcgcgccatttctaannnattgtaataagctgtgcttgaacctt

SEQ ID NO: 112564 - DNA, 719 bp, Zea mays
  Clone ID: MRT4577_3414C.1
ctgcccctcatggcatgggcgcatggccacgcctccgggcggcgggtgtgccctcaccgctgccgcatccaccgggcgccacctccggcagatccacgcccacctcgtcacctccggacacctctcttccctcggacccaccctcctgcaccggctcatttcgctgcacccgccgcatctccaacttgcttacgctcaccgccttctcctctccatcccatccccgccgctcgacctcttcaacctcctactgccgccgctcgcctcctcgcccgatcccgccgccgcggccggactctacatccacctccgccgccggggccttggcccggatgcccacacgctcccgcacgtcctcaaggcgctcgcgcgcctcggtccaggatgcctcccgctcgtcgcctgcacccacgcggaggccgtcaagaccggccttgcgcgcgccgtggtgtacgtgccgaacgccctcatgtctgcgtactctgcctgcggccacctccatcgcgccatgcaggtgttcgacgaaatgccgcgttggaccgttgtgtcatggaacaccgtgctcactgcctgcgcggacaacggccgccacgactggtgcgccgggatgttcgtgaacatgttagaggctgggtctgtgcccaatcagacgacgttcgtggtcatgctcaccgctgcggctgagctggggaacttggcgcttggcaagtgggcgcatg

SEQ ID NO: 112565 - DNA, 697 bp, Zea mays
  Clone ID: MRT4577_34150C.1
aatgaactctgactgatggaacctgtttttgactcttattattagctggcgcgacgtccggagccaccttcagacccttctaaatatactgccgctgatgtttggattaccgatcaaaagttgcgcctctgtgatatatgtggagcatttctgagtgtatatgacaatgatcgacgtcttgctgaccattttggagggaaactgcatctaggctacatgctgattcgtgacaaacagaaagaacttcaggtgctgagtgtaatgtaccgttttctgctttaaagagttactctgttttgggccttttggcatctgaattagtccatgtcgcgtgattggaatctcatgcgatgatcttcatacctatggctacaacagtcactgtctgttgacaaattatcgattgttgggcagaagctggaggttgcctttttactgcctgagccatattatgtagaccaggtgacaaataatactggttaagttatcctgaaagcacacttcttttgccaacattttgctgagcagagaaacaaaaggaggacaggcaaaactgaagatgataggcgatctagagagcagagcaaggatcgaaacggcccgccgtccagggatagagattcagaaaggagagacagggttgagtctcgagatggaagaagagattatgatagggaacgcgataggcgtcacgata

SEQ ID NO: 112566 - DNA, 259 bp, Zea mays
  Clone ID: MRT4577_34151C.1
agccgccgccgctgctcatctcacatccctcgagaagacgcctgctcctcgccgatcgatacgatggccgtcttctccgacctccacaccgccgacggcctcaattccctcgaggctcacctcgccggcaaaacctatgtgttggtgactccattactaagggtgacatacaggtcttccgcgcggtgccgtcgaaaccttggcgctgattttctaaagacggccggtgggaacgagacggtccctgcggtgttaactc

SEQ ID NO: 112567 - DNA, 2009 bp, Zea mays
  Clone ID: MRT4577_34152C.1
cattgggaccctcgaggccggccgggggtggatacctcaattcgggacgagacgatccccgacctcatatcaggttcccctccccatcccggagagcaaaagcgcttctctcgctagcgagttcggcagtagaaaccctaaaaaaaaagacaccgccctccccttcgctagcggaaccgccctcccctcgccggggtaggggtttcgggggtagacgcccgccatggacgcgttccggaaacagctggacgtgctcatgggcgccaaccgcaacggcgacgtcgaggaggtgagccgcaactactacgaccgcgacgtctgccgcctcttcctcgccggtctctgcccacacgacctctttcagctcacgaaaatggatctcggtccttgttctaagattcattctcttcaactgcggaaagattatgaagaagcgaaagcaaagggaacagaaaattttgatagagaactcgaggatatgatagaaaggctcattgtggagtgtgacaggaaaattcagagggccctaaaacggcttgcagatgatgatgccaatgctgctattgcgatatcggtctctgaggttactctgacggatgacatactgcagctgtcaaaacagataaaggagaaaatggcagaagttgatgcctttgattttgaagggagaactgatgacaaaataaaggcccaggaagtagtggaagagctaagagctaaaagagctgatatgcaggctaccctcttgcttgatgcttttaacaaggacagagcttcattaactcagcctgctccacctcaagtggcagcagttccaccaccagctccacctgatgctcgtactcaagaaattatcaacgaaaagcttaagaaagctgaagagcttggtgaacaaggcatggttgatgaagctcaaaaagctttggaagaggcagaagctctgaaaaagctggcgccacgttcagagccaccttcagacccttcgaaatatactgctgctgatgttcgaattactgatcaaaaattacgcctctgtgacatatgtggagcatttctgagtgtatatgataatgatcgacgtcttgctgaccattttggtgggaaattacacctaggctacatgctgattcgtgagaaacagaaagaacttcaggagcagagaaataaaaggagaccgggcaaagctgaagatgatagacgatcaagagagcacagcaaggatcgcaacggccggtcgtccagggatagagaaccagaaaggagagacagggttgagtctcgagatggtagaagagattatgaaagggatcgtgatagacgtcatgatagggacaggcgccatgaccgtgatcgggatagggattatgaccgctcccgtggacatgattcaaggaggagagagcgttcacgctccagggagcgcagcaggcgccacgagagatactaaatgttacaccatgcctgacagatttaggagtactggcggcgtctgttcaagatatggtttgagcttgtgcttcgtatcttctgaagaccggtctacttgacgctaaattcgcatggagtgttaagcatttattaaacgcatctggaatcaaatgaagttgtacttgcgaacggcttcacttaaaattcgcgccatttctaatattgtaataagctgtgcttgaaccttagctgtctctgtgtactcgacgtaccactcgctcccacaaatagcttcgaacatcctgtacctgaaacatgacgctgtttggtggaggtggagctgtaagtgttcttttgcacaattcattataaaaatcccaaaaaaaaaaaaacggacgcgtggtaaatcctgcatgctcaagcccgatacaagtaaggtactgagatgaacatagtagacttacaaatgtaatgtaccattttctgctttaaagagttactctgttatggcccttttggcatatgaattagttcatgttgcgtgattgggatcttatgcgatcatcttatacccatggata

SEQ ID NO: 112568 - DNA, 1228 bp, Zea mays
  Clone ID: MRT4577_34153C.1
cattgggtacctcgaggccggccgggtccagcctcccgtcccgtgtggcgtctggcgtgtgcgcacgcacctccccaggccccagtgcctccttccctcctcggctcgaccccgcccggcgctccgccgcagctggctcatcccaatcccctcgtgcagtcgtgctccgcgcccgcttcaccgcctgaacaaagatggaggccttcctagccggcctcttcagggcgcctccacgggccgtccccgcccctcggggcacgcctctccccagccttcctctcttctacggcaggcgccgcaggaggccgtcctcctccgtggtctgcatggcggagccctatctgattgccaagctggactctgcggagaaggcctggaaagaaatgtcggttaggttggcagatcctgacattgtctcggatccaagcgaataccaaaaaatcgcgcagtctgtttctgaactggatcaggtcgtgaccacatacaggcaattcaaggattgtgagaggcaacttgaagagacaaaagctctggaaaaagagaacgaaggtgaccccgatatgttagagatgatagcttctgagttggagactctatctaaccagctcgcagagcttgaagaaaaaatgaagtttctactgcttcccagcgatcctctagattcacgcaacatcttacttgaagtaagagcaggtgctggtggtgatgaagctgggatttgggctggtgaccttgttcgcatgtaccagagatactgtgagcgcaacaattggaagtttaagccagtttcttgctcagaagcagaaatgggtgggtacaagacatacgtgatggaggtcaaggggaaacaagtctatagtaaactgaagtttgagtcaggtgtacaccgtgttcagcgtgttcccttgacagaggctatgggtcgtgttcatacgtcaacagcaactgtagctattatgccagaggctgatgaagttgatgtggttattgatccgaaagatattgagcttaaaacagcaagatctggtggagctggagggcagaatgttaacaaggtggagacggctgttgatcttattcacaagccgacaggaatacggatattctgtacggaagagagatcacagctacagaacagagagcgggcatttcaattgttgagagcaaaactttacgagataaaattaagggagcaacaagaatcatttagaaaccagaggaaattgga

SEQ ID NO: 112569 - DNA, 973 bp, Zea mays
  unsure (1)..(973): unsure at all n locations
  Clone ID: MRT4577_34154C.1
cttaattgtgacgaactgctcatgtgtctgcttagtattatgctgggcagaagccggaggtttcttttctactgcctgagccatattatgtagaccaggtgataaataatactggttaagttatcctgaaagcaaaatgttggcaaaagaagtgtgctgtaagtgacaacttgttctgttttctatctgctacctcctccataagtttgcaagttacattttgctgaagcaaccttgcctgtaaagtatcgcccgccctatcttttggaacgttgtctctgattttaaatatgccaaaatatcattatctgtactgtcaataaacaaaatacactgtggcatcttgcaggagcagagaaacaaaaggaggacaggcaaaactgaagatgataggcgatctagagagcagagcaaggatcgaaacggcccgccgtccagggatagagattcagaaaggagagacagggttgagtctcgagatggaagaagagattatgatagggaacgcgataggcgtcacgatagggaccgtcgccatgaccgcgaccgggatagggattatgaccgctcccgcggatatgactcaaggagaagagagcgttcacgctccagggagcgcagcaggcgccatgagagatactaaatgttactccatggctgacagattttggattgctggcgtctgttctggtttgtgttgtgctttgtgtcttatcttccgaagtttcctgttcctgctcgagaaatccgaaagccaatctgcgttctgcatcatgtcatgtcctagtgtcgtactgtttagttatatgccgagaacatctctttcatcaaatgaatatttggaaacaccaacgcacttgacgctaaatgggaatgaagtgtggagtatttaaacgcctctgaaatcaaatgaaagttgtacttgcccggagggggggncgtgggtatggggtaattatnctgggtgttagga

SEQ ID NO: 112570 - DNA, 2634 bp, Zea mays
  Clone ID: MRT4577_34155C.1
ggtaccctcgggttcggccgggaatcttggtttattcacttatcctcaatctaaatctataaaggtgcaatttatcaggtgctgagtgtaatgtaccgttttctgctttaaagagttactctgttttgggccttttggcatctgtgagttttcttatctcaagagcctcaaggttctcaccttccctctatattatttgatttctcacattgccgggcactatggttattacgatagtcattacaggaattagtccatgtcgcgtgattggaatctcatgcgatcatcttcatacccatggatacaacagtcactgtctgttgacaaatgtaagcataggagcgtgcggaccatggtatgaaaaaaaacatgtttacttaattgtgacaaactgctcatgtgtctgcttagtatcgattgttgggcagaagctggaggttgcttttttactgcctgagccatattatgtagaccaggtgacaaataatactggttaagttatcctgaaagcacacttcttttgccaacattttgctgtaagtgacaacttgttctgttttctatctgctacctcctccataagtttgcaagttacactttgctgaagcaaccttgcctgtaaagtatcgcccgccctatcttttggaacgttgtctctgattttatgtatgccaaaatatcattatctgtactgtcaataaacaaaatacactgtggcatcttgcagggcccacagtccacgaggacacggtccccgacctcatatcaggttcccctccccatcccggagagcgaaagcgcttctctcgctagcgagttcggcagtagaaaccctaaaaaaaaaagacaccgccctctccttcgctagcggaaccgccctcccctcgccggggtaggggtttcgggggtagacgcccgccatggacgcgttccggaaacagctggacgtgctcatgggcgccaaccgcaacggcgacgtcgaggaggtgagccgcaactactacggccgcgacgtctgacgcctcttcctcgccggtctacgcccacgccagccctctcatcttacgaagccgttgcccgcacgaccttttccagctcacgaaaatggatctcggtccttgttctaagattcattcgcttcaactgcggaaagattatgaagaagcgaaagcaaagggaacagaaaattttgacagagaactcgaggatatgatagaaaggctcattgtggagtgcgagaggaaaattcaaagggccctgaaacgatttgcggatgatgatgccatggctgctatggcaacatccgtctcagaggttactctgacggatgacagactgaagctgtccaatcagataaaggaaagagcgtatcttatggaatcactgtcactgagaatgaagaagcgaaaatagtcattagctctactatgaataaacaaaatacacatgtggcatcttacaggagcagagatacataaagacgacaggcaaaacttcaggtgataggcgatctacagagcacagcaaggatcgaaacggcccaccgtccagggatagagattcagaaaggagagacagggttgagtctcgagatcggaagaagagattatgatagagatcgcgataggccggaaggatagggaccgtcgccatgaccgcgaccgggatagggattatgaccgctccctccgatatgactcaatgagaatagagcgttcacgctccagggagcgcaccagtctccatgagagatactaaatgttattccgatgctgatagtctttgtctttctggcgcaaaatatcatctatgctaccttctgtatattaagtaacatgctaacctgcaggagcagagaaataaaaggagaccgggcaaagctgaagatgatagacgatcaagagagcacagcaaggatcgcaacggccggtcgtccagggatagagaaccagaaaggagagacagggttgagtctcgagatggtagaagagattatgaaagggatcgtgatagacgtcatgatagggacaggcgccatgaccgtgatcgggatagggattatgaccgctcccgtggacatgattcaaggaggagagagcgttcacgctccagggagcgcagcaggcgccacgagagatactaaatgttacaccatgcctgacagatttaggagtactggcggcgtctgttcaagatatggtttgagcttgtgcttcgtatcttctgaagaccggtctacttgacgctaaattcgcatggagtgttaagcatttattaaacgcatctggaatcaaatgaagttgtacttgcgaacggcttcccttaaaattcgtgcaatttcttcctttattttatatatatatttataaatatatatataatattataataagctgtgcttgaaccttagctgtgtctgtgttactcgacgtaccactcgctcccacaaatagcttcgaacatcctgtacctgaaacatgatgacgctgtttggtggaggtggagctgtaagtgttcttttgcacaattcattataaaaatcccaaaaaagagtactaggaaatttttagtgagtagaaagtccaattcggatggcagatgacatgtagggcttgatgaaatactcgtggttag

SEQ ID NO: 112571 - DNA, 1750 bp, Zea mays
  Clone ID: MRT4577_34156C.1
ccgggactgcgcgttgcaagctcccacttcctgaggaacaggaactccatgagatccgcggcatccgccgtcccgttcatctgcacaaaaagaccgtaatccttctttttgcgctcctccccatccgcggagtgtaaatcgtctctcgctagcgcgttcagtagaaaccctaaaccccgcctcctcccctcgccggggtaggggctacgggtgtcaacgcccgccatggacgcattccggaagcaactggatgtgctcatgggcgctaaccgcaacggcgacgtcgaggaggtgagccgcaactactacgaccgcgacgtctgccggctcttcctcgccggcctttgcccccacgacctcttccagctcacgaaaatggatcttggtccttgttctaagattcactcgcttcaactgcggaaagattatgaagaagcgaaagcaaagggaacagagaattttgacagagaactcgaggatatgatagaaaggctcattgtggagtgcgacaggaaaattcagagggccctgaaacgacttgcggatgacgatgccaaggctgctattgcgatatccgtctcggaggttactctgacggatgacatactgcagctgtcaaaacagatcaaggaaaaaatggtagaagttgatgcctttgattttgaagggagaactgatgataaaataaaggcccaggaagtagtggaagaactcagaactaaaagagctgatatgcaggctaccctcttgcttgatgcttttaacaaggacagagcttcattaactcagcctgctcaacctcctcaagtggcggcagcgccaccaccagctccacccgatgctcgtactcaagaaatgatcaatgaaaagcttaagaaagctgaagagcttggggaacaaggcatggttgatgaagctcagaaagctttggaagaggcagaagctctgaaaaagctggcgcgacgtccggagccaccttcagacccttctaaatatactgccgctgatgtttggattaccgatcaaaagttgcgcctctgtgatatatgtggagcatttctgagtgtatatgacaatgatcgacgtcttgctgaccattttggagggaaactgcatctaggctacatgctgattcgtgacaaacagaaagaacttcaggagcagagaaacaaaaggaggacaggcaaaactgaagatgataggcgatctagagagcagagcaaggatcgaaacggcccgccgtccagggatagagattcagaaaggagagacagggttgagtctcgagatggaagaagagattatgatagggaacgcgataggcgtcacgatagggaccgtcgccatgaccgcgaccgggatagggattatgaccgctcccgcggatatgactcaaggagaagagagcgttcacgctccagggagcgcagcaggcgccatgagagatactaaatgttactccatggctgacagattttggattgctggcgtctgttctggtttgtgttgtgctttgtgtcttatcttccgaagtttcctgttcctgctcgagaaatccgaaagccaatctgcgttctgcatcatgtcatgtcctagtgtcgtactgtttagttatatgccgagaacatctctttcatcaaatgaatatttggaaacaccaacgcacttgacgctaaatgggaatgaagtgtggagtatttaaacgcctctgaaatcaaatgaaagttgtacttgtacgaatctcttccac

SEQ ID NO: 112572 - DNA, 935 bp, Zea mays
  Clone ID: MRT4577_34157C.1
ccccgcgtccgccccgcgtccgcccacgcgtccgttacgatgcagcctaatttatcctccaatagcaccgattggttctgatgatctctaccctggacctggtgcaggtttttaccctcacagtggcattgggagcggtggtagcatgcatgttggtcctaatgatccgcgcttctttccttctaatcccttctctgccccatttggtgggcttgggagtgttccaccaggtggtcgctatgatccaattggcccacctgacgtcccagggtttgagccatctagctttgttaggcgtccaaggcggcctccaggcgggagcacccacccagacctcgagttcttccagcaaggcccagacttctgagaatcgcgcagaggccggccagagcctcgccctaccctcacgaaataacttcaaaatgctgagccctcgagctagatatcccgctcgcttggtgtgattgcaactgctgtatcgagtatagtcctagtgcgctttggctgtaaagatggatgtgaacatcgtcctagtgtatttactcttaattccaaaccatcgcctgtcatagcctaatatactcttttgtgtataatatcgggtgtaccggagctgaaaaaaaaaaaaaaaaaaaaaaaaaaaaaaaaaaaaaaaaaaaaaaaaaaaaaaaaaaaaaaaaaaaaaaaaaaaaaaaaaaaaaaaaaaaaaaaaaaaaaaaaaaaaaaaaaaaaaaaaaaaaaaaaaaaaaaaaaaaaaaaaaaaaaaaaaaaaaaaaaaaaaaaaaaggggccccttgggggcggccggccccaaaaaaaaaggaccccccccggggggaaaaaatcaaacaaacctttacccccccccccccacaggggggggggccctagaaaaatttcctcaaaaaagggacacaaacaaccccccccctcgg

SEQ ID NO: 112573 - DNA, 700 bp, Zea mays
  Clone ID: MRT4577_34158C.1
gccggccgggtccggacttgcttctattttttcctctcgttaccctagtagaatcattgtcatcttcgttgccctgctagtcccgtagcttctatccctcctcgctcctcggctcctcgcttgtcgctcctcctcagccctcaccgcgttccctcggacccaccttccccgcgaagtaaccaccgctaggacatcggtccacacgctaagcatctagtgcatctaggtctacgcggcgcggacacgcggacggtacagcttccccctgcccccaatcctcctcgtcgccggatgatcgccgccggcgccgcctcgatggggcgcgcagcgactccagcccccgttttccagacctcccggctgcggcgcatgttactcaggaagttgaagttcctaccaccacagctgatcaggaatccacaatttctcccactaaaagagaccccagtgtcgatgttgaacaggcctcagcagacgaagaagaagtacccgaatcagttgctgaaggaaatatgtcatttgaagaagtgcaagtgcatactgaaattactaatgagcctgttcatgagaagacacagacgttgacaccaatgatacagttgttgttaatgatgcaatcgatgtgaattcagacttggcgcctgctgaagtccaggttggtgctacggaagcaagcaaattgaagaacatgaattccccc

SEQ ID NO: 112574 - DNA, 1493 bp, Zea mays
  Clone ID: MRT4577_34159C.1
gcacgagaccagagcgacgctacgcggcgtgacttctcccgaaacctccacatacccaaacccaccgaccgccgcctaggcttccacctctcccgctcaaactccggccactgaggtcgaacccgagcccgcgccgcagcggcacgatggtgaacgacgccgcggcgatggccgtcgtgagggcggcgcgcccagccctccgtggcgcccacgatggcgtcgccttcgccgcccacgccgccttcctcgccgatgggtactcgctctgcgccgtcggccctgccgcgctcgccgacccctcgcccttaggtgatgaggaggtggggattgatggttggaacatcatggagaattgttacgcctttttgtatagcaaggaggagaagggcaagaagaaaagggtactagtgaaatgtctggtgatcggtgaagtacttgcaattgatgtcttggatcttgaggcacaagataaggcgccttataatatccagattaatgtgaaagacttctttgtcgaagagcagccaaagaattatggggatatgtacaagaattttacaagtctcattgagactgtgaactcaaatgtgttgtgcaaattggatggagacggttccggtgctgaggctgctaagagcactgccgccgctgctgctaagaactctgatgggagaagttcaccaatacagagctctggagatccaggtcctagaactgctgacccttccggcctaatttatcctccaatagcaccgattggttctgatgatctctaccctgggcctggtgcaggcttctaccctcacagtggcattgggagcggtggcagcatgcatgttggtcctaatgatccgcgcttctttccttctaatcccttctctgccccatttggtgggcttgggagtgttccaccaggtagtcgctatgatccaattggcccacctgacgtcccagggtttgagccatctagctttgttaggcgtccaaggcggcctccaggcgggagcacccaccccgacctcgagttcttccagcaaggcccagacttctgagagtcgcgcagaggccggccggagcctcgccctaccctcacgaaataacttcaaaatgctgagccctcgagctagatatctcgcttggtgtgattgcaactgctgtatcaagtatagtcctagtgcgctttggctgtaaagatggatgtgaacatcgtcctagtgtatttactcttaattccaaaccatcgcctgtcatagcctaatatactcttttgtgtataatatcgggtgtaccggagctgaaaaaaaaacttgtcgacaagtatcgtgaaagcatgttgcgaagagagagatggatgtgaacatcgtcctagtgtatttactcttaattccaaaccatcgccggtcatagcctaatatactcttttgtgtataatatcgggtgtaccggagctgaaagcgaaactgtcgacaaaaaagaaaaaaaaaaaaaaaaaa

SEQ ID NO: 112575 - DNA, 366 bp, Zea mays
  Clone ID: MRT4577_3415C.1
gtgtcggaggcgtcgtcctcgacgacgtcgctcccttcgctctcctcagcgacgggcggcagcgtcaccgcgtccttggtccacgtcaccacgctcctccctccgtccgcgccgtccgctgccgccgccgtcgcggcggcgggggactccccccacggcctcgtcgtggcccggccggcgtgcgtggcgttccacgacctgtcgacgctggaggcgacgtccaccttcgacgccgcggacggcgccgcggccgcgggctcggtcaagtgcgtgacgcacctcccggggcgcgcggcacggccgccgtgacaggccaccaggacgggcgcctgcgcctgtggcgggcgttctcgcgctcgcgcgcca

SEQ ID NO: 112576 - DNA, 140 bp, Zea mays
  unsure (1)..(140): unsure at all n locations
  Clone ID: MRT4577_34160C.1
aagcagccgccaagcaggacgtggtactgccgtccggctgggaagctcccgccgggtcacaatacggctacagctacncctacaacccgggctacgaggcgccgacacgtcctatacggcgatgacccaagcggtacagc

SEQ ID NO: 112577 - DNA, 1493 bp, Zea mays
  Clone ID: MRT4577_34161C.1
aaaaaactgcacaacatccatcgtccatcgacccacccaacctcctcctccgccccgcgcttcgcctgggtaccggcgtccgccgcgccccgtaccgtctcgtccaggaacaggaagagcaggtacgcatcgcacgacccgttcgccaccacctttgcgcggcaggatccctgtagtcgtagatcgcgctgtctgatgtgatgccaccccttttgtttgcgctctgcctcggtcccgctctagcgtcgcggcaggatgttgggttgcctgccggatctgtccctgatgctgggttcatttttcactcatactagcgtaatagcgttgtcacacgtggtagtgtttaaacaggtgataattcccaagatgtccatacgaattttcgatttccattcgcaattttctgcgccttactaatagcactcggtagtagtactagtagtgatccgaaagttgacaccattctccttgtgctttcttgccagtaacccatccacccatccatcggggatcaccaggggtcaggggagcaagatgtcgactgccaccgccccaagattgcccgctcccagatccggggcaagctatcactatcagacgaccgcggctccggcggccaacaccctctccttcgccggccacgcgaggcaggcggcccgcgcgtccgggccacggctgtccagcaggttcgtggcgtccgcggcggccgtgctgcacaaggtgaagctggtcggcccggacgggacggagcacgagttcgaggcccccgacgacacctacatcctcgaggcggccgagaccgccggggtggagctgcccttctcctgccgcgccgggtcctgctccacctgcgccgggaggatgtcggccggcgaggtcgaccagtcggaggggtccttcctcgacgacggccagatggccgaggggtacctcctcacctgcatctcctaccccaaggcagactgcgtcatccacacccacaaggaggaggacctgtactagagattgggttgctttatgcatcagtggttgttccaaaggtggtggtgactggtgcgttcgttgctattccgtgccaccagcggaaggggggtttcgttgttgagatgggctagttcttgtcatcaatttcggtcattcgatgagatcatgtcatatgagttgtggcaataatgctggcaatatggttttgcaattcaaactgcaaatgtgaccagcaatgtcaaaaactgcacactgtgtctgtgtgcgaacttgtgaaattgacattgagttcaattagctagttggctcgagatttcagttttcatctccatttagaggtaatttgggcctaatttggtgcttagtgtggccggatagaagcccacttatttattcaatccattctaagctagtttgggagccataaaatcggaggagattaaataagaaggggaatctaaccctccagtttcctccaatttctcgtttccaaactatcttttgtgcct

SEQ ID NO: 112578 - DNA, 378 bp, Zea mays
  Clone ID: MRT4577_34162C.1
ataccctagcccgtgcacaggtgggcgcccgccgccacctgcggctcggaggacctaggcatggacaccgatggcccccagcgccggagatcgcaagctctcagcaacgcctgcttggcaggaacccgtgctgaccgactattcttatgcgcagacggtctgcagtttggccgggagatgggcgacgggagctgccgcggctgaaaggaggggcgcgcccaagtacaagagcccgttttagtacacgccctatagctttgaccatgctctagagagcacaatgaggaatgttgggaaacgatattgcgtgaggaagatactagcaagtcagcattgcaagaggaagatacactgcacaccacaggcactgccgaatgt

SEQ ID NO: 112579 - DNA, 375 bp, Zea mays
  Clone ID: MRT4577_34163C.1
tgctaatttgaacttttattttttctgggaccggaaaattccaggggttttttctacatggttatggggtgctaaaattggcacattcatcctatagtactatatcttttatgcgactaataatacttttagtaccccaaaacgaccattggctccatctccaaaatggttgaaatacacaacccttgactcttttcttcaacagagataaacttgtttctttccatcctgtggcacccacccaatgtgcacaaacatctacatctgatgtgcatgaacacaatttatttattgatcaaaatcttttgagcccatcaacttaatatgaaccttctattcagaatagtcacaaaatttcttttcatactttttttt

SEQ ID NO: 112580 - DNA, 279 bp, Zea mays
  Clone ID: MRT4577_34164C.1
caagttgttggtctttgtacttttattgtggataggttttggttttttttgtcccacggggcggtgtatggggttaaaattgggaaaagaagaaaggattcagccccacaaacttttggttaaaatttaaaggctgggggtgtttaacaaagggagccttacggagtgatggtattgcaccagggttctatttttttgaactgggaaaacataagaaggggtggggtggaccttctttccaaaaaggggttggacttaataaaaagttggttaaaaggg

SEQ ID NO: 112581 - DNA, 373 bp, Zea mays
  unsure (1)..(373): unsure at all n locations
  Clone ID: MRT4577_34165C.1
acaggggagcagccggcagcaggcagcgaccacagcagcaagaagcgaggcagcgacgacggcggacaacgcggagggccccgggcggacccaccaggacgagccgggccccgagaacatcccggaccccgggagacgcgccangaaccgggacaacgaggaccaccgctcgccggcggggacggcgctgaccaaggaccggcaggaggacgggaagaagaacaacaagagcacgacgggcacgccccccaggaggccgacgacgggaacgggcgcgcgggagagcccgcagaccaacacgcaggcaccgggcgacaggggcgcagcccgccccaacggacagcacagccggccgcggaacgaccaccaacgg

SEQ ID NO: 112582 - DNA, 394 bp, Zea mays
  Clone ID: MRT4577_34166C.1
cccacgcgttcgactctgttcaccatgtaccagatgctcgcgtcctggctccgcttcgcgtgacatctgctcacccccctcaactagccaatggaagacaagtgctgggaggcgagtgacgattactgctgcatcctgcagcagcgtgtggaagctagctcgcggacgtggtggacctacactctgctgatggacccggacgagttatctacgcttcaggagccagctcgccttacgagcgccgccggggtcagagtgcgcgtacgtatgttttctgtccacggtgcttctgcacgtcgctcgcgactctagggacctgaagaggcttaagccatgcggactgggtatcgaggtgaaccctagcggaagtccatggatgcaggacgcgggcatt

SEQ ID NO: 112583 - DNA, 432 bp, Zea mays
  Clone ID: MRT4577_34167C.1
gcacgcaaacaaaagctcgaaattcgtttcgagggtcaatcccttccacgacttgatccctaacccacaatgtctcctcccgctgctatctacgagcctactgttgcccctaccggcatcaagggcaaggtggtcgtccccgagacggtctccactaccttgaccggccagggccagagcaagctcctggagcagttcggcggcaagtgggatgagttcaagttcgcccctatccgcgagagccaggtctctcgcgccatgacccggcgctacttccaggatctggacaactatgccgagagcgatgttgtcatcgtcggcgccggatcctgtggtctcagcactgcctacgtgctggccaaagcccgcccggacctgaagattgccattcttgaggcctccgtgtctccttgtggtggtgcctggctcggc

SEQ ID NO: 112584 - DNA, 286 bp, Zea mays
  unsure (1)..(286): unsure at all n locations
  Clone ID: MRT4577_34168C.1
gttgttctgttagtcgctaacttagtaagtgcttttcctatagaaccccttctgactgagcaatatgcctccttgtattataaaatctttctgataatgcattaggaggttttttgtgtcgattagtaaaagatgctttccatgttactttattcagcagctaataagtgctttccttaggtttctagtaactacgtgtaaagatcatgtgttgcagctttataggtgttaaaatatgttagataattcttaactatngaccttcttacatcactgtcttgccaga

SEQ ID NO: 112585 - DNA, 383 bp, Zea mays
  Clone ID: MRT4577_34169C.1
gggggggggtaaaaacaatgggggattaaccctcccaattggaaatatgcaggcaaaaaccaaaatttttttggggcccaacaaacccattttgttccaagacaggggaaacttaacattagccggggtgggggatttcactgtcctttaaaggtcgaacccccgttttaggtatgctttaccccattgcccaagcggacataaaaaaacagggaatccccggccaaatcccgttgctttgggaccaacccgctttttttcgttttccccaaaagggatggttgccacatttggggggggagccagtttttgggaaattttcttgggcgccttgttccttctggggttgaaaagccctgttccaacctttggcgggggcttaa

SEQ ID NO: 112586 - DNA, 654 bp, Zea mays
  Clone ID: MRT4577_3416C.1
cgggccccccctcgggtcgacccacgcgtctggcaaccagctgccgagggaggaaccctagcggaacactgtgcaggtgacggcggcgcgctaccggtgacgggggatacggcggcatcgtccccctcggcccctcctccatccccggcgcggcggcgccagcagccggcctgcaggatcaagactacccagccaggttctacagaccctcaaaaccttaatcgttagatcatcgccgttctcatgaaggttttgcaggtttcacacttcttatcatggatgataagaacaaagtcaagaaggaaatagatggcccccttggacccccacctcgcaaggggggacttaaattcgcaccaaaagtacctcagaagaaacctgccaaggttgtcccaaagaaggaaccggttgaagagagaaaggaggatgctttggataaggagttattgatgaaacttaagatgtcgcaaaacaagtatccctcaagaattaagtccgacgaaaagcgtaagaatcctggtttttgttcaccacatgctttatagtctaaatcttatcactgcctgtgaaaattgtaagttcctacttcctatcattgagcatgctcaaggcttgtcatcaattgttattgattagtcacatagcgtgaaaggg

SEQ ID NO: 112587 - DNA, 387 bp, Zea mays
  Clone ID: MRT4577_34170C.1
gaagcaaaaagccttatttcaacaaaatcgaaggggacccgaaaaaaaaaacagggggtaattattattttacgcggggggcggaagccccttgtcgccgggggggggcttaaactgggggggtgacaaaaaaaaaattcccaggggggggttgcccaaggaacaattgcgggggatttttcccccgctgccggggaggaaggccaattgggtaattttaaccaaggacctgggaaaatggtcaaaaaaaggggccttgttaaacccaaaacgggtgggcccccccttggggtcccggtgggtgaaaaagcccttgtcccacttgaaaaaccccttcttgggaaaaaaggcaaaataatactttttgtcaaaagggttgggggtgcc

SEQ ID NO: 112588 - DNA, 427 bp, Zea mays
  Clone ID: MRT4577_34171C.1
aaaagggcccaaaaaaaattcattggcccacccccccatttaagggggcaaaaaaacgagtttaaaaacccaaaacaagccctaaaagggccccaaaggaaaaaaccgctcattttaaaaaaaagctttaggattatacatatacccaaaaaattccggccccgaaaaaaaaaaaaaacggcaaaatttcccctaaccccccacctaaaagatcttcaaaacccaaaaatcccccaccttttggaaaaaaaaaacacgggaatgggacttgaaaaaaccaaatgccttgccatgggcaaaaacaaccctaaaaacggactaatttgaataaccggggaatacggggggagccccaggatccgcaaccattaaaaaaaggcctctaaatataaaggaatgttttgcctcaaaaaccccaggaaaaccc

SEQ ID NO: 112589 - DNA, 1190 bp, Zea mays
  Clone ID: MRT4577_34172C.1
gcccccggcctcgtaacgtcgggtaggttttccccgactcgactgcgcttctcttcgtctccttcgcgaacccgccgtcgcccactgcctcctctccttctacctcgcgcacccgccgccgcttgctgtctcctctctcgcgcgcaccggtgttcccatcgccgtctccttatctccctcgtgcagccgctgttgtctcctctccacccttgtacccgccgccgcctcctcttcagatttcctcttcttcgccctcggtactttccgtgcccactctttatctagctatcaagtatcaccggaacatagtacgagatttccctcattcttattcgtctatggttaccaaaatgccagtgttaccttattctgagatcatccgctgcagagttacaggtcaaaccttcgccggctccggcttctccccatcgaattccgtctccacgttcggcgttatcatcactgacggatctatgattagcgcgtcgccgccgacctcgcggcatcgctcgagcatggactctgattccgcctcccttccaagggcgaggtacagcacgccctggcagaacagagggcgatagtcggcggggtcctcccgcgcaagctcctcgaatgctgcgatcgcctcgtccaacttcccgtccacgaacagaacctgagcggctaggaggcgggcgtagctctctccacatccggctgtggccaggcgcgagcgcgcctcgtccgcgcggccgacgcgcgcgaggcaggcagtctcgattatcagcttctcgaagagtcgggaggcgtctgggatggcgtcgtcgtgggacaccgtgactgtcagaggagtgagcggggacgggggagcggagggggtgcacgcgagtgccggggaagtggcggcgaagagaacggcggcggaggcggccatgcggagggaggagaggatgggatgtgcagaactggcgatggctttgacggcggcggggagtaatcccgggcgccgggaagaggcggctacgtagatgggggtgcggagggaagaggcggcggtcgcgggagctagatatgccatggcagcggctagggtttgcaaggcggagattgccaggggagactggaagcagcagggcgggggcggcggcggagtttgggaggcccgtgagcaggtctggacgtctggtcccggaaggcccgagggtacc

SEQ ID NO: 112590 - DNA, 830 bp, Zea mays
  unsure (1)..(830): unsure at all n locations
  Clone ID: MRT4577_34173C.1
atataccacgccgtgctgcctgcactccaacctcgagcttcctctccacgctcagccgcgacccactaccacgagatcaccgccggcgctgagaaagaaggcaccggtcgtccgtatcgcgcaagtggcgagccgtggcgtttcctggttgcccgccatgctatgtactgctgcctcctggccgtcttctctatcatccccgttacaatttagtcagaagttgacactgaaagagactgtagtatcctcttctatctgtaagcatgggaagtcgaacatgttcaccattgtcaaccgtggaaacaaacctctgggttttagagaggtgaagacaacaccgctctcacaaggtggcaaggccaagctaattcgcctccgtccaccccatggctcgggcaatcttggagcgaatccggcgaactcgtgcccgctcacgccgctgggattcctggagcgtgcggccaccgtcttcagcgactgcccctccgtcgtctatcacgacacggtcttcacctggttccagacacatcggcgatgcctccgcctcgcctcggcgctcgtctccctcggcatcccncccgtggcgacgttgtgtccgtgctattgcccaacgtgccggccatgtacgagatgcagttcggagtgccctggagcggcgccgtgctcaacaacatcaacacgcgcctggacgccggcacggtcgccgtcctgctccaccactccggctccaagctcgtcttcgtcgaccatcgtcgctgcagctcattggcgacgcgctccggctactcccgccggggcacccgattccacacgtgatccccgtcgaggat

SEQ ID NO: 112591 - DNA, 377 bp, Zea mays
  Clone ID: MRT4577_34174C.1
aacaccaaaaaccaagggggacttaaaaaactgggggggggattataaaaattacaaatcaatatcaaaataaatcataaataatcaaaaatatacaccatcaaacataaaccaactaatatacatactcccataatacattaaaaaatcattgaacatacccaacataattatataatatctatataaaaattactccactaacaaatatataatttaaaaaaaccaattaatctatataaactagacatattttataacacatacatcgtatacaaactcatttgtcaaacccctaattcctgaccgtaacctacacacctaccattattatttataaaaaaatctaaaaaaaatcttcttaaaaattgtcatat

SEQ ID NO: 112592 - DNA, 1545 bp, Zea mays
  unsure (1)..(1545): unsure at all n locations
  Clone ID: MRT4577_34175C.1
agctggctctcgccccccgctttggaatgggtggtacacaaccgccgccgctttcccctctgtctgcaaccactcgtcgccccctcctgtacctcgtgcagtcaccagaccctcatttttcgctccatcagctgttactatgaatcaaaccgaagtgtccattatcaagaatgaaagcactaacttttcaatgcagacatactcatcacaaaggccatatgaaatggacatctttactcaccacaaaggcacattctacagaataaggaactttccgtgtcaaattttcctctagctaattagtatcaccggaacatgttctgaaatttccctcattcttattcgtctatggttaccaaaatgccagtgttaccttattatgagatcatccgctgcagagttacaggtcaaaccttcgccggctccggcttctccccatcgaattccgtctccacgttcggcgttatcatcactgacggatctatgattagcgcgtcgccgccgacctcgcggcatcgctcgagcatggactctgattccgcctcccttccaagggcgaggtacagcacgccctggcagaacagagggcgatagtcggcggggtcctcccgcgcaagctcctcgaatgctgcgatcgcctcgtccaacttcccgtccacgaacagaacctgagcggctaggaggcgggcgtagctctctccacatccggctgtggacaggcgcgagcgcgcttcgtccgcgcggccgacgcgcgcgaggcaggcagtctcgattatcagcttctcgaagagtcgggaggcgtctgggatggcgtcgtcgtgggacaccgtgactgtcagaggagtgagcgggggcggaggagcggagggggtgcacgcgagtgccggggaggtggcggcgaagagaacggcggcggaggcggccatgcggagggaggagaggatgggatgtgcagaactggcgatggctttgacggcggcggggagaaaggaacggcgccgggaagaggcggctacgtagatgggggtgcggagggaagaggcggcggtcgcgggagctagatatgccatggcagcggctagggtttgcaaggcggagattgccagggcccaggggagactggaagcagcagggcggcggcggcggcggagtgtcggaggcggtgagcaggtctggacgtctggtcaagaaaagagttccgggccggccggccaccaagcctttagattcctggccttacttattctatgcatcggtttcatctcagaacgccagccagaaggcaacattttgaagactttatattcatctgcatctataccacatagctcctttgatttcaatgttatatcaaatttaacatttgtatntgcgctatcaaggaccttgtataaattagtagtagactggtggatgtgtcaagcattctggtggtattttcaagaacttctattttgttatgtcagatttactttatattcatctgcatctataccacataactcctttgatttcaatatgtatcagatttgagctcactgagat

SEQ ID NO: 112593 - DNA, 1179 bp, Zea mays
  Clone ID: MRT4577_34176C.1
ccggccgggacgtcgggtaggttttccccgactcgactgcgcttctcttcgtctccttcgcgaacccgccgtcgcccactgcctcctctccttctacctcgcgcacccgccgccgcttgctgtctcctctctcgcgcgcaccggtgttcccatcgccgtctccttatctccctcgtgcagccgctgttgtctcctctccacccttgtacccgccgccgcctcctcttcagatttcctcttcttcaccctcgctgctcctcttcgtcctcgctaaacactcctcgaatcgttgagacaactttattcgtctatggttaccaaaatgccagtgttaccttattctgagatcatccgctgcagagttacaggtcaaaccttcgccggctccggcttctccccatcgaattccgtctccacgttcggcgttatcatcagtgacggatctatgattagcgcgtcgccgccgacctcgcggcatcgctcgagcatggactctgattccgcctcccttccaagggcgaggtacagcacgccctggcagaacagagggcgatagtcggcggggtcctcccgcgcaagctcctcgaatgctgcgatcgcctcgtccaacttcccgtccacgaacagaacctgagcggctaggaggcgggcgtagctctctccacatccggctgtggacaggcgcgagcgcgcttcgtccgcgcggccgacgcgcgcgaggcaggcagtctcgattatcagcttctcgaagagtcgggaggcgtctgggatggcgtcgtcgtgggacaccgtgactgtcagaggagtgagcgggggcggaggaacggagggggtgcacgcgagtgccggggaagtggcggcgaagagaacggcggcggaggcggccatgcggagggaggagaggatgggatgtgcagaactggcgatggctttgacggcggcggggagaaaggaacggcgccgggaagaggcggctacgtagatgggggtgcggagagaagaggcggcggtcgcgggagctagatatgccatggcagcggctagggtttgcaagacggagattgccaggggagactggaagcaacagggcggcggcggagtttgggaggccgtgagcaggtctggacgtctgggaagaaaagagtttccgcctcccggccggcctcgaggtacccaatg

SEQ ID NO: 112594 - DNA, 444 bp, Zea mays
  Clone ID: MRT4577_34177C.1
tctcccctccctctctcctgactccgccgcgtcgcgatctcccacctctcctgccgctcccacctccccgcactgccaacccctcgcccccccccctcctcctccgctgcgctccgatccagtctgccgcgtccccggcggcgcgccccgagctcgtcgccccgcgcgcacgcgagttgccctgcccaccctgacccgcgcaggcgagcgagcccccattgaagcgcgccgcctccccctgagcgcggctgcagggctcggagaacgagggcagcggtccgcgcgcgcctggtcgtgatggacagctgccgacggcggaactgatatggagaccgttgtcatgtcgaaagactcgtggtatctcggtggcaatcggattgcgcccgtggaccgagacatcaagcaagctatcagtgtgctccacaaagtagcaaatttactgaa

SEQ ID NO: 112595 - DNA, 437 bp, Zea mays
  Clone ID: MRT4577_34178C.1
ccctaaaaaggtcggaattgttgtcatatatggaatctggtgtggggcgggggtggttaagtacctcatgaagagggaggtatttaagcgttccaggtagttttgcgtgttctgtgttatctttgttgtgaatatgaaagtgtttgaaatttgtgggtgtatggtttgtgccaaggtgatggctggtggtggttacaccttgaatactgctattgtaggctccgtgaggattaagatttttcttcttagggagcagactggaggatgatctatttctttatattattggggtttcctgtagttggtcttctgaggtatgttgtgggggtcttctctactggaaatgtgtaatcactgtactggttgttttgtcgaaaaatgctccttttatttggtttatgttctaggatctaaatgtgtggtgttatgatgtggcc

SEQ ID NO: 112596 - DNA, 1423 bp, Zea mays
  Clone ID: MRT4577_34179C.1
accggccggcaagctagatgcactgacacggtgacccatctcgatcgatcggcttcgctgggacacagcccccatataaatcatccactcctccgtagcaagcacatcctgaagctgcctttcttttccaataagctaagcagcaggtgcaaagggaattcgagatccagagagctagctgatcgatggatccgaaagttggcgttgctctgaccctctccctcgtcggcgggctaagcacctcccttggtgcactgttggctatcctcaaccatgcgccaaacaacagaacactcgggattctacagggctttgctactgggctcatgctcagcatgtctttctttgacttggcttacgatgctgtcaacgccatcggctttctgagagggaacctctggtttttcgctggagcgctgctgttctcaacaatcgcggacgttttccctgagccagactgcagtgcggcagatgaaaatgggaagcagcagggtggaaaggaactcatgatgagacatcgccgaagagttatatttagcgtcattgtcacagcaattgttgctggtgtgagtttgcaaaacttccctgtgggcactgctgcatttcttggaacaacaaagggcttccgtgttggtttgaacttggctcttgctatagcactacactacattccagagggtatttcagtagctctcccagcatactttgccactagcagcaaatggcaagccttcaaattagcaactctatctggttttgcagagccactgggtgtgattattgtggcatacctattcccaagcaatttgaaccctgaaatactggaaggtctacttggattagtgggaggagtcatggcttttctaacattgtatgaaatgctaccactagcatttgaatatgcaggacgcaaggatgctgttaaagcagtatttgttggtatggcctttatgtctatgagcttgtattttctagatgctagcctcccaaaggagatgagcgcttaacataatttgcgcctaaaccaattgatgtgatggtcaagagaatgtcatcataggtgctgcaacaaggtgttagtgggaaggacgtgcatccaactcgagatcatgagagatgagatgtttccagcaacagtacacaatacagcgactgacagatcaagcttttatcaatgtccatgggacatgtgaccaaaatggtttgcaacacaatcatatttatataaaaaagggaagtacaattgtacaaacaggcatatgctaacaacatatcatgtacatttttaattagattcggtcatatcatgtacataaagggtaagattaagtgtatatactgaataaagtaggcacaaaccactgatacgatgtaaaataatggaaataaacggttgcatacatgatgaatgattgaccgacgt

SEQ ID NO: 112597 - DNA, 402 bp, Zea mays
  Clone ID: MRT4577_3417C.1
ctatctatatctattaaaaatgttgttgaatatgttgacataatacaggaaggtatacaaacagatgcatcaattgtgcgcatcctgaggaggcgtacagtgataggctatacaacagctggttgctgactgggttgagcagcttaaacttatgtttaagcgggtctatacaggcatcaaggggaagatcgaggttctcatgacaagggactatcacaagctcgacaaggacaacacccaatacccacaaataccttgacagattgcgtgtttgcgtcaaagaccaaaacagctgcgacactatccgattccacggcaatggcaaacggactgcaatgtggttgagcttccactgctacaatgatctgcagaacttcatggcgatttgcccttggacaatac

SEQ ID NO: 112598 - DNA, 298 bp, Zea mays
  Clone ID: MRT4577_34180C.1
atttttactagttggtcgcgtggtttttgtagatggggtgctttgtaggaagggggaacctacccacctgagaagaagacagggacagagaccaatactgtggaaggaggaacaagcaaccccagggagaaaggaaagggaaacatacacaagcgccgaaacgcctggaaggagccacggggagaagcaaaggctagtccagggggcggatacctaagcgctgcagggatggggacggggacctcggggggaggcatgatccggaaccccgacccacggtgaaaaaggcaggggccac

SEQ ID NO: 112599 - DNA, 409 bp, Zea mays
  Clone ID: MRT4577_34181C.1
ggtttgggttttttaaaaaatttttttttttttttttttttttttttttttttttttttttttttttttttttttttttttttttggggataatgggggggtttattttttagaaggttggaatagggcttaattttttcacaactgggggtttgttggacctttaggtggaggggggaaaaaaaaaaaaaggtggggggcgtaattccaaaaatcaggattttttttgggttggagcaccgtttggcgcctcctccatgggatctggttttggtggatttccttttttggctttcttttttttcccaacaccctttttttttgatttggcccccaaaggaaggcatgcctttatttttgaattgggttaaaggggtttggggggctttaaattggacgggtgggggga

SEQ ID NO: 112600 - DNA, 140 bp, Zea mays
  Clone ID: MRT4577_34182C.1
gatgtcttgtccctgggcatcatatggcacactgcagccaggcacagttacctgcaactgtgcgttaaacggtcacacctgcagataccggtccgcaactaattcgcgagccgacgaacccactattcaacggcggccct

SEQ ID NO: 112601 - DNA, 135 bp, Zea mays
  Clone ID: MRT4577_34183C.1
tcgtcagcgctactatgtcgcatatgggttggggtactcgctcacactagctgagaagcggactgagtcgaacattattaaactggatctgatagcgaggttgtcctagatattaaagctgcttgcattacttgc

SEQ ID NO: 112602 - DNA, 465 bp, Zea mays
  Clone ID: MRT4577_34184C.1
gtcagtgtgagcaatgacctgaatgaacaattgaaatgaaaagaaaaaatattgttccaaaaaaaaaaaaaaaaaaaaaaaaaaaaaaaaaaaaaaaaaaaaaaaaaaaaaaaaaaaaaaaaaaaaaaaaaaaaaaaaaaaaaaaaaaaccaaaaaaaaaaaaaaattttaagaaaaaataataaaactttcgggccaaaatgaccgtaacattcaaaaacccaaatagggccctaaaattggccctatggcgggcccactttccaggggtaataaatggattttaaaaaaaaaggcctgggtttaaccatgtctttactgaggaaaaacttccctttaaaaactttttttttaaaaactaaaaccccttttaaaaaaacccttcattacaaaattgccaccttttccacaactttactcgcaatggaacaccccatttagccaatggttaatatcgtaaaaggc

SEQ ID NO: 112603 - DNA, 272 bp, Zea mays
  Clone ID: MRT4577_34185C.1
gcatggcatacttccagaccagccacggctaatatttgcagggaaaacatttgaggacgggggcagggtctacaactacgacgggcagaaggataacacgatcgacttacagcttggaactaggggcagcatgcagctatactttaaaacagctaccggaacacctatcaccgatgaagatgagcatatagaccacatctaccacacctatggcactattcatgacaaggagggcattcgcacaaaccagaaccatgtcatatatgctggaa

SEQ ID NO: 112604 - DNA, 393 bp, Zea mays
  Clone ID: MRT4577_34186C.1
gggaacaaaacttttttcttttcatttcaattggtcattcagggcattgctcacacggaccctgccccccatggggatgcgggacacattattacccaatcatcgccgctaaatgacccaactagctagctagccaggggctttactacagcacaaagtttcttcagggggggaccccccccgcagcagcgtaggggcatggagtcggttgctgcaggccccacctcgccggcagttggtgggctttttgggccgcccacagcccccggacctggcccttttgcgggtgttgctgcaggatgggctggggggccatccccaaaaacccctggtaccggggccttggggtgtctccgtctgttggggtgtggggggggggggtgcccggggggg

SEQ ID NO: 112605 - DNA, 585 bp, Zea mays
  unsure (1)..(585): unsure at all n locations
  Clone ID: MRT4577_34187C.1
cgggccggcaggacattcggcacgaggcgcccgttcgtctctgggtagcgtagcgccggcgccacggcggccttccggcctcgtgcgcgcgcgcgccgtgtccgggcgagatgacgctgcccaagggactggaggcgcctgaggaagcaggcgagcaagttcaaggagcaggtcgccaagcagcagcaggttccttccggatcccgcttcttcttgacatctgatattcttcgtcccgcgcatctcggttctgtacaaaatgtgcatgatttgggcggtgtttggttgctcaatgtcacgcgaggctgccgccgggatgtgcctgagagattgctttcccggtttagggggtctcggggttgtcatgtagctggatctcagggttccaacgcgaatttgcatttcttngtaccgcgtggatctgcgagccctgggggtcggagagaccctgtttttttaggatgcactatatcttttntgtggttcctgttgtagcttgctaatttgggatgtggaattgtttattaatcattatangctctagtgtcagccggacgtttgcagttcatttgattccatggctgc

SEQ ID NO: 112606 - DNA, 1835 bp, Zea mays
  Clone ID: MRT4577_34188C.1
accaagttgtgctgcaactcatgtgcagctagcgaatttgtatgggagcattgggtgctgggatgatgtggcaagagtgaggaaagtgatgaaggagagagggctgaaaacaaatatcgggtgcagttggatagaagttggcaataaagtttatacatttacagcagaaaacagatcaaagaaccaggtaaacaatgtcctagttgttctcgattgcttgcagtcacatggatcacaagtatgatatactgattgagggtctggattgggatgatcctgaacatataaagttgagtttaaacaatatataaatttgaagatcattgcccgccatgttcagcttcatttgaagaggcactcaataggaattgacatgtgtcattcacacctcaaatatcttcaatctcgatgtaacatttaggagtcttgtttgcataaagtaaagaggaatcgcaccgagggataggcattgtgagtatgacgtgtgctttgcatgggccagcacctgactcagttcctgtgaaatcatgaatccaccaacggaggtcaaatacctgactgcagccagccagaatgtttacagccacacatgatgatcctatagctggctagaagaagaagaaatatttacagccatccagcataaccttagagctggtttgaagaggatgcaaccggtgcagctgcacaaatgacaagagattgtgctgtgtgtggccctctgattcccaaaaaaaaacaccactgagatgcagtccacttgccacaagcaaagaagcttccatttgtgcacattccaacctttgccaaatgctttttgtctcaattggctggctgagacgaaagggacaagggcgaaagaggcagcatatcatattaccaaataaatatccgcgtactgtattattgcagataaatacttgagcaccgaggttgggccggctacatgaggcagactaaaaacagaacatacctacgcaactagcagagcttacagatttgcacccacaggactctgaataaagctggggctttttgcagcacaaggacatggagtacccaagaaggacactgctgcacacccctttctccgggcatccctctggtccaagccagccaatagatggagccacggccacagacggaagcaacttcgacgcgaacgtggtcatgatcctggctgtcctcctgtgcgcgctgatctgcgctctcgggctcaactccatcgtccgcgcgctgcggtgctcgagccgggtggtggtgggtcctgaaccgaaccaggtgacgcggcttgtccagagcgggctgaggaggaaggcgctccgagccatgccggtcctggtctactcgcctgggctgaggatcaatgctgccaacccgacatgcgcgatctgcctctcggacttcgggcagagcatgcagggtcctccccaaatgcaaccacgtccatgtcagtgcaccggtgctgctggcgcggtcgcgtgcccgctgttcggagtgccgctccggctgctcgccgctgcgcctgcgcctgcgcctgctcgcaacacctgtgtttgagcatttgaaacgattagatttgctcagtttacttttatctgagctactgctgatatccataattccatattcattttgtaccaactgtattaacctagattagggtggttgtaattatctaaagtagtgtttggtttaggagctagatggaattgagcggcggagtgactattttcctaatatgctgaatctcgccgactctaaaaggagaatgttcctctctacgttttccgaaaaatatcatatcaggccttttcccctggccgggagcctcc

SEQ ID NO: 112607 - DNA, 1400 bp, Zea mays
  Clone ID: MRT4577_34189C.1
tgatcctgaacatataaagttgagtttaaacaatatataaatttgaagatcattgcccgccatgttcagcttcatttgaagaggcactcaataggaattgacatgtgtcattcacacctcaaatatcttcaatctcgatgtaacattagaatgcaggcaaggtagaaatggccagatgcattcctgtaactatacctggtgtagtggtgagagttgtctcactgagtcaccaagttgtgggttcgaagcaatatctttgcatttacattttatagagggaagacttgcctcggtttatcccttctccagatcctactcatgtgggagcctctggcctagttaggagtcttgtttgcataaagtaaagaggaatcgcaccgagggataggcattgtgagtatgacgtgtgctttgcatgggccagcacctgactcagttcctgtgaaatcatgaatccaccaacggaggtcaaatacctgactgcagccagccagaatgtttacagccacacatgatgatcctatagctggctagaagaagaagaaatatttacagccatccagcataaccttagagctggtttgaagaggatgcaaccggtgcagctgcacaaatgcacaaggacatggagtacccaagaaggacactgctgcacacccctttctccgggcatccctctggtccaagccagccaatagatggagccacggccacagacggaagcaacttcgacgcgaacgtggtcatgatcctggctgtcctcctgtgcgcgctgatctgcgctctcgggctcaactccatcgtccggtgcgcgctgcggtgctcgagccgggtggtggtgggtcctgaaccgaaccaggtgacgcggcttgtccagagcgggctgaggaggaaggcgctccgagccatgccggtcctggtctactcgcctgggctgaggatcaatgctgccaacccgacatgcgcgatctgcctctcggacttcgaggcaggggagcatgtcagggtcctccccaaatgcaaccacggcttccatgtcaggtgcatcgaccggtggctgctggcgcggtcgacgtgcccgacgtgccggcagtccctgttcggagtgccgcagaaggcctccggctgctccgaggcgagccgggctgccgagccagagcctgcgcctgcgcctgcgcctgctcgctctgtccttgtgccgctcagacctgaaggtttggtcactcattatgatttttagaatgttcggttgcttcttagtcgttgcataaatgatgagagggaggctgagaaaaagtagaaacaaaaactgtgagcattagatcttactgccaatctggtttgtacattgttggttgctagagaaaaaaaagatgtgaaggttttctagtttttttttt

SEQ ID NO: 112608 - DNA, 975 bp, Zea mays
  Clone ID: MRT4577_3418C.1
gactcccctcaggccccagctctcgctctccggtctccaccgccgctccggtgctcccttccgggattcccctccggcgagcttgctcagctccgctccaggtgagtcggtgcgcgacccctcccctcctcaggtcgattcccactcccctccacctgcggattcccatggcgcaaggacgtggttcgctgatccgcttgccggatctacgcccttcgctccatccggttaattgtagccttttgtacccaggccgcgcggcgctgccgtaggttcgataccctgctgtacttgtcactgggatagattgcggtggttttacgcctcattggatattcccaaatggttatggaccctactagaggcctgcgattaatagcgactaatcgtccgattagtttaggaacgatcagcctggctggctggattgaaatttcggcccagtggcccacttcacttgcccagcggcccagcccagcttcccttttcccgattcccaccacgtgagcagaagctgcacaaccaagaggcaagagccaacagagcgcagaagctgcacaaccaagaggtaagagccaaccgagcaacgaacgcccaggcacacacgagacacgacacgaaccaggcaaccagctgccgagggaggaaccctagcggaacactgtgcaggtgacggcggcgcgctaccgttgacagctgataccgcggcatcatccccctcggaccctactccatccccggcgcggcggcgccagcagccggcctgcagtttttcagctttataatggatcccaacatgaagcagcttcaagaggctctggttgatattgagactgatgcagaaaaagttcttctggctagacatcagttggtggaaaatgataagataagaaatggtaacagggaggctctgacagcccttcggaaacaagctaggacgtgcaagactagcgtgccatctccctttgaggtcat

SEQ ID NO: 112609 - DNA, 817 bp, Zea mays
  unsure (1)..(817): unsure at all n locations
  Clone ID: MRT4577_34190C.1
ttgggaccctcgaggccggccggcggcgcagcctacggccgaagtcctgccttctgaagccatcctcgctcccaacacgtccactgtggctttaaccctcacgcctgctaatggccagtcgagtcagcagctccccacaactgatgaagagacagctgagcccggccctaatcctcccgaggaactgacccccgcggtggaagctgcctctgaagcggaagcggagcttcctgtggttgctgatccagcaccccagcctctcgaagcccaacttactgctgctgttgagccccaacccgctcaagtagaggtccttgctgctcccgccgccccagtctcatcagatgttgctgatgcagcgcctattgctcctgaacttgacaacgagtcgctacccaagtcgatcacacctgacgtcctcgtgagtgctgaggtcctgacacccaccgcggatgctaagccagcctcgattcgctccaagacctcgcttcactctctgggatcaactagccatctcccggcgcctaatccagtcgagacgactgccgaagaggcaccacaagttgatgaacctacagtcgaagcaccccttccggttctgcaagtggaggctgccaccccagaagtcccagcttcagaggagatggcgcctacaccggaggtgaaggaagccaagcagcccgcgaaagaagaagcggttcggcatctcaccattgaagagtttcacgtcgagcacatcgcnaggagggggcgtcagcgnnacgagtcgccgtcgaccaagccgaagaagaaccaggcgcttgcgggtcgcttcaag

SEQ ID NO: 112610 - DNA, 694 bp, Zea mays
  Clone ID: MRT4577_34191C.1
ttttttttttttttttcgtaaatatgagtaaatattcatattacttatattacattggtaccttcgacttgtcagaaggtgaaaatgcaagagtgacacaagtgcgattacagctcagcgtgaacagtacggtgttactgttcatctatttataggcactggacgcagcctggataagattacacccatgcccctgatatctacacttaatcataatgcaaactatcaaggactaagtagtcttttctcccttaggtcggtttcgtccttcatcttcgttaacatgccaagtcgaagctcctttaaccatcgcttcggcgtgcagcccggggaccgtcggctcgggtccgcgtgttgcgccccgtcgtcctctgccccgagccggcgcgcgtggtggcgacgtaccaggtgcccgggcggtgcccgtactgcggcggcgtggtggtagcggccgacgtggagagcacgccgcggctctgcttcgttccgctctgcttccgcatccgacgccgcttctactgctccctctgctcacgtcgcctcgtctccgtcgcctgaacggtcgccggaacaggaaggcaggcacgcggacgcgacagagctctgtctggcggcgcgttgtcaagcgctctgtacgtatgcgcttatggagtattttagcaaggtacctcgaattccccatgtgctaaaacca

SEQ ID NO: 112611 - DNA, 337 bp, Zea mays
  Clone ID: MRT4577_34192C.1
tccacaaatttcaagacgacatgataggtttagctgacgacatggtggtggtggtgcatctgtaactagcttaacggctttatacatctgtttgcccgtacctacgtgtaaagctagttccgcaacatttgctttttaactatacttccctaatttccagtcacactctgcaaacttttttttaaaaaaaatgtaaattttttccagaaactgatcgagcttggggcaacagacctcctggtgcctggcgttctcccaattggctgcttcccgttgtacctgacgctgtacaacaccagcagcaaagcagactacaacgcccggaccgggtgccttc

SEQ ID NO: 112612 - DNA, 145 bp, Zea mays
  Clone ID: MRT4577_34193C.1
cgtctggcacttggaaggagccctatcttccaatgcagctaatgtagtattctcaagtaggaagagattttccctccagttcccgtcttttaaggcgacaaaatatagaattcaagatttcatgcaaatttaagccccattggag

SEQ ID NO: 112613 - DNA, 2062 bp, Zea mays
  Clone ID: MRT4577_34194C.1
tgacactatagaagagctatgacgtcgcatgcacgcgtacgtaagctcggaattcggctcgagtccacaaatttcaagacgacatgatagatttatctgacgacatggtggtggtggtgcatctgtaactagcttaacggctttatacatctgtttgcccgtacctacatgtaaagctagttccgcaacatttgctttttaactatacttccctaatttccagtcacactctgcaaacttttttttaaaaaaaatgtaaatttttttcacgtcttgccggctctcccccgctccgtctccctccccgcctacagcaagagcagcagattaggccgggtccctcttctcttccgcccacaccgcgcagtttatataaatgggggccgccgggccggccggcggcacacaagcaaagaacttggccccgcctcccgtctcttaccgcacatgcgcgtcgggccgcgtcgacatagctgcttgccgccgacacccgcagccgcaatggccgtcgcccacgcgccgccgcgccggggcgtgctccccctcctgctcgtcgccgcgctcgtggcggcgttgccggccacctgcgccgcggccaggagcaagaagtcgtacacggccatcttcagcttcggggactcgctctccgacgccggcaacctcatcgtcaacggcacgcccaaggcgctcaccaccgcgcgccctccctacgggatgaccttcttccgcaagcccaccggccgctgctccaacggccgcctcgtcgtcgacttcctggccgagcatttcgggctgccactgccgccaccgtcgcaggccaagggcaaggacttcaagaagggcgccaacttcgccatcaccggcgcgacggccctggagtactccttcttcaaggcgcacggcatcgaccagcgcatctggaacaccggctccatcaacacccagatcggctggctccaggacatgaagccgtccctctgtaaatcggagcaagactgcaaggattacttcagcaaatccctgttcgtcgtcggggagttcgggggcaacgactacaacgcgccgctcttctccggcgtcccattttctgatgtcaagacttacgtgccccttgttgcaaaggctatcgccaatggcgttgagaaactgatcgagcttggggcaacagacctcctggtgcctggcgttctcccaattggctgcttcccgttgtacctgacgctgtacaacaccagcagcaaagcagactacaacgcccggaccgggtgccttcggaggtacaaccgcctggccttccaccacaacagggagctgaagcagcagcttgacgagcttcagaagaagtaccccaagacgaagatcatgtatggagattacttcaaggctgcactgcagtttgtcgtcaaccctggaaaatttggttttagcacggccttgcaggcgtgctgcggcgcaggagggcagggcaactacaacttcaacctgaagaagaagtgtggcgagcagggcgcgagcgtgtgctccaacccgtcgtcgtacgtgagctgggacggcatccacatgaccgaagctgcgtacagaaaggtcgccaatggctggttgaatggcccgtatgctcagcccccaattctcaagtcatgatcgagattactaggctgtgcgtaataccgccgcagctgcatgctgcggctagagatatatatgaggagtgtttcaggcaatagatatgctaagttatggtaaagctatttggtctgttcattggaagatctgtataaactgcgccggtatagatatgttcccagctgaaaaaaaaaaaaaaaaaaagcgccttatgctaagttatggtaaagctatttggtctgttcattggaagatctgtataaactgcgccggtatagatatgttcccagctgaaaaaaaaagaaaaaagatgtgcatggcatgttctctgattcttttcatttgttctaaaaaaatattgcggcagtaatatgagttgataaaagtaactaaatttctgcaattttatcaggcttcaaaaaaaaaaaaaaaaaaaaaa

SEQ ID NO: 112614 - DNA, 240 bp, Zea mays
  Clone ID: MRT4577_34195C.1
cgtacgaggatagcgcgggaagacaacatttttaggttttatctcgagaaccaccagctgcggcgcgactgaaacaagaaacaaaacacatacaccacatatcctaaaaacaaacaaactttcctgcagcaagcttaaaaaaacacactagctagctagagtgctgcatcagcatgtatacttaaactgtaacaacatgtaactgccgcgcatttacaaataaataaataaagcgggaat

SEQ ID NO: 112615 - DNA, 1426 bp, Zea mays
  Clone ID: MRT4577_34196C.1
cattgggtacctcgaggccggccagaggccaccgggaaggaaccggttcccgttggctcggctcggcttggcaaggcccgccaccgccctccctccccccgcgaccgcgactctgcgagcacgacgagacccacggacccacctcgatccagatccagccaactgcgcgcgtcggcgttaccccttcctcctcgacgccactgccgtggagcggggatcatccgcctgaaccgggtcgaccgcttcgttccttggtggtgggtagctggttgggggagctcagaaccttacacttacaactatgttctccttgttctatggtctatggaagcacgtcttcagcaaggcagagttccatgtgcttatcctcggagttcataaggctggcaagacgaccttgctagaaaagttgaagtcgatctacttgaagggagaagggcttccgcatgatcgtattgttccaacagttggccttaatattgggcgtattgaagatgcaaatgtaaagcttgttttctgggatctgggaggccagcctggcctacgaacaatatgggagaaatattatgaggaagcccatgctgtaatatatgttatcgactctgcttctgcatcatcatttgaggatgctaaatctgctctcgagaaagttctccgccatgaagatctgcatggagcgccaatacttatatttgcaaacaagcaggattcaccagcagctgtcacggaggaagaattggctagacatctgcatcttaaggagttagacgagaggccatgcatgttccaggctggatctgccttcaatgggacggggatcaaacatggcgttgactggttggtggaagaaatggagaggagtaaacgcaccgaggcactaagggcgcgtacagaagcagctgggaagatttaacacctcaattcagggctatcacctgtgattttccaaatgcaaagcatctgaggaggatggcttctgttaactccatgaatagagacgcttgtccgggtggagccttgtcctttcagtcacgggatccccagaaaagatttcttggttgtgctgctcttgcagttttgtagtagggtgtccattgtagcaatggcaggggtgaccgttgcttgggtttgttgacctgcgtagcacttaagattgtgtatctaaagttgtagggattcatgttcatgcgattatgcttggatatacggagtgacatcgtggagcataaagatgatttgtacattcgtcatgttcatcgagagtcatgtgacttttatcaaaagaaacaaatacattgtgatatcaatcacgatatatgtttttcatatccaaaaaaaaaaaaaaaaaaaattaaaaaaaaaaaaataaaaaaaataaaaaaaaaaaatatataaaaataaatttaaaaaaatataataataattt

SEQ ID NO: 112616 - DNA, 615 bp, Zea mays
  Clone ID: MRT4577_34197C.1
aaaaaaccaaaaaaaaaaaaaaaaaaaaaaaaaaaaaaaaaaatataaaaaaaaatttttaaaaaaaaaaaaaaaagaagaacaaaatggggggcccttttaaagaacccacccttacatccccctcctttctattttaaaactcttctataggggaccctaaattcaatccactggccactcgtttaacaccctcttcactggaaaacccctgtttttacccaccttaatccctttgaaaaaaaaccccctttctccatctgtcttataaacaaaaaggccctcccctatcgccctttcaaacattttcgcaacctgaattgtaaatggtaccccccttttaacgctcttaaagcccggggggtggggggtttacccccacaataacccttccccttgccaactccctatccccccctccttttcctttcttccctccctttttctcccactttttctggtttctcccgttaatcttatattgggggccccctttaggtcccccttatagcctatacggcacctttcccccaaaaaacctcttatggggatttttacacttttggcccctctccccttaacacctttttcccccctttcccttggaaccccctc

SEQ ID NO: 112617 - DNA, 246 bp, Zea mays
  Clone ID: MRT4577_34198C.1
ggcaggcatggggtgtggccctcggagaagttaggagtcccccagctcaagatacagtggcaaagacctagtggtcccctacccccacttctctcagttcctggcatgaggagagaagaccctgctctggtggagctgacaacctttgaggctgggaggagagcagcctctgggcatcgttcccagtgtccctcacactaaaacggcgtagatggcaaccccccacccccaccccgctgctcaact

SEQ ID NO: 112618 - DNA, 1606 bp, Zea mays
  Clone ID: MRT4577_34199C.1
tttcaggtggtgggtagctggttgggggagctcagaaccttacacttacaactatgttctccttgttctatggtctatggaagcacgtcttcagcaaggcagagttccatgtgcttatcctcggagttcataaggctggcaagacgaccttgctagaaaagttgaagtcgatctacttgaagggagaagggcttccgcatgatcgtattgttccaacagttggccttaatattgggcgtattgaagatgcaaatgtaaagcttgttttctgggatctgggaggccagcctggcctacgaacaatatgggagaaatattatgaggaagcccatgctgtaatatatgttatcgactctgcttctgcatcatcatttgaggatgctaaatctgctctcgagaaagttctccgccatgaagatctgcatggagcgccaatacttatatttgcaaacaagcaggttgacatctacctgtacttgtcttggtttatatactccttaaaactccatgcacttgcccaacagtttttttgacggtccacttgctcaatagttgataattatgttttattaggtgaaaatgagtagtactagaaaaatagttatcatccacatgaactaaatggtagatgtaaattaaactgtgtcatggtttacactgtttgataagaagttagttttgtgaagcctggatctaggaaatatcagaaactgacaactgtggatatattctctgggaaacatatagcaaccttgcgcttttttacttctggttaggaactttcttcaaatttaacagtttttctttattctgaaaggtgtggtgcttaacaacatgagcaagataatgaattgacaacattagtcctactttctggagtcctgcccagttcattttgggatatataaatccacacaagaaatcctccacttgtttcatgaatcttatattctatgtttcatggcttatctggatttttcaacaggattcaccagcagctgtcacggaggaagaattggctagacatctgcatcttaaggagttagacgagaggccatgcatgttccaggctggatctgccttcaatgggacggggatcaaacatggcgttgactggttggtggaagaaatggagaggagtaaacgcaccgaggcactaagggcgcgtacagaagcagctgggaagatttaacacctcaattcagggctatcacctgtgattttccaaatgcaaagcatctgaggaggatggcttctgttaactccatgaatagagacgcttgtccgggtggagccttgtcctttcagtcacgggatccccagaaaagatttcttggttgtgctgctcttgcagttttgtagtagggtgtccattgtagcaatggcaggggtgaccgttgcttgggtttgttgacctgcgtagcacttaagattgtgtatctaaagttgtagggattcatgttcatgcgattatgcttggatatacggagtgacatcgtggagcataaagatgatttgtacattcgtcatgttcatcgagagtcatgtgacttttatcaaaagaaacaaatacattgtgatatcaatcacgatatatgtttttcat

SEQ ID NO: 112619 - DNA, 542 bp, Zea mays
  Clone ID: MRT4577_3419C.1
ataaaaaaaaaaacaaaaaaaaaaaaaaaaaaaaaaaaaaaaaaaaaaaaaaaaaaaaaaaaaaaaaaaaaaaaaaaaaaaaaaaaaaaaaaaaaaaaaaaaaaaaaaaagttttttccttttgcccgggaaccaccttaagggctaatttttggatatttccttaaaattgggggccgttttaccttttttttaaggggccaaattccccttttggggggtttttttaaatttaattggccgggtttttaaaacttcctaattggaaaaaccttgggtttccccaatttattgcctttggggaaattccccttttggccagttgggtttttactaaaaaggcccgccccattcgcctttccaaaaatttgccccctttaattgggaattgaaccccccttttagggggcttttaagcggggggggtgtggggtttccccccaggttaacccttaattttgccagggccttagggcccttttttttggtttttttccttttttttttcgccacttttcccggttttcccccttaagctttaa

SEQ ID NO: 112620 - DNA, 1121 bp, Zea mays
  unsure (1)..(1121): unsure at all n locations
  Clone ID: MRT4577_341C.1
cccacgcgtccggggngacacagggtttatgcacactatggatcaagttcaggcatgtaatgtatgtgtttgcttgttgttggaaagattgcactattcatggtaatatataaaaccaagagtccctttcctttttctttaatatatatggngaaaacaaaggcaacatccacggcgtgcacgaagagctaaatttttccacagaaaccatcaaagaaaccacatatagtgatacttacagctccactcttcccatattccaaagcagtttggaatgcaacatccattgcatctggcatctcggtgttatctagaagaaaataagttagttagacacaagaatcaatacaaaaggtgttaataagatcagggttcctaaccatcacttttccgtaatacatgtgatatcttctctgcacgatcatatgccttcataaacccactttcaagccaggaaaaaatagaagccgtcggagtgaaatccaatctttgtactacattcataggtgagtggccactcttagcaaggaaatgttcttgagaagatttagagaaattttcaccatctgatgtatccatgagcaagctacatgcatcaagtgcctctttccagatagttaataatacaagttcaattgataacgcctccaggtacaggcctttagaaagctgaataacacagaaaattaaggacgcataagagacaaaggggttatcatatctgatccatcaaatgacaaataccatttctatgattgttcaaaagagcttttgtggggtgtaacttgtaagtgttgaagtttggaaatgaataaacattaaaaaacaaatatatgtctaatatgtattaaaggagaagagttcgactgaaaataccatggctttattgcaaaagaatattaaaacaatctattttgaagaccataactttgagattacataaaaacacattgtgaagtttaagcctgaccagatattcatactgaactgtaaaagcacacgaagacagaatgatgatgaacatgaagtttagggccacagtcatagtttccagcatagcagtagtggtaccttttcccgagcaagatcctcaagaacaagaacatattgattggacgcgt

SEQ ID NO: 112621 - DNA, 141 bp, Zea mays
  Clone ID: MRT4577_34200C.1
atctgcaacgccaacccaatcctaaccctatctcaccggtgacactctaccattagaccatctgagcggatccagtactagtatgctgtgcttcggtgagtatgtcgttgcctcggtagtacgttgtcggtgatgagatcg

SEQ ID NO: 112622 - DNA, 236 bp, Zea mays
  Clone ID: MRT4577_34201C.1
ggccgggctccgttttctcaggagggcgccgccgccgctgttttccacgcctgctgccgcagccgccatgggggcgaacaagcatgggtcggaactatggaggaggaagcagccggacgcgacgagcttcgagcagcgcgtgcgctgctggcagtaaaggcagcagccgtccatcgccccgcctcaaacaggaccacccgcccccaccaggcccggcgatttcgctaccccgccac

SEQ ID NO: 112623 - DNA, 269 bp, Zea mays
  Clone ID: MRT4577_34202C.1
aatgctttttttctttctcacaacaacatgcacgaggtgcccttgcacgagttacgccactcagcacacatcgccaatgacgtcgtgctgccagacgctggtatcatttaaaaaattatgcagatcccgacccacgcggcttgagcactggccaccatatcattttgcgatcactaacagtcataagggcgcctccgcagcctgcgtccgcttgcacttcttgacactagaccacgacttgtgacagaatactgtgccccaccacttgc

SEQ ID NO: 112624 - DNA, 562 bp, Zea mays
  unsure (1)..(562): unsure at all n locations
  Clone ID: MRT4577_34203C.1
cctcgaggccggccggggggtccttctctctccgccttctacatcatggctgagtcgacgccatcacagatacaccgccgacgccgacacggtcgtcgatcaagatcactcacgtggcgactggcttctaggacatgcttgtcacgtagcgggagctctgagaagccgcgctcggtgccgaggctcaccgaaagcgagctccccaacgtccagcggtcgctcacattgtcgcacctcaatgctgctaagagggacacgacgaatattcatgaagactcacatgaaaatgcggtcgtaattgatcacactgtacggcgacgaaccgctatccgcaaaatagatgctttaaaaggatattacgcacgaaggaagaataggtgtagagcaatgctgatatcatcggcatccatcgataacatgattgacacgcctgttagacaagaactgcaatgtagcgtctgacatcagcacatctacatcgctagtcacgctgctgggagtgcagatctctagcaaattacctgagtacagaacatgaacctcatangtgcacacacaatgt

SEQ ID NO: 112625 - DNA, 450 bp, Zea mays
  Clone ID: MRT4577_34204C.1
ttttttttttttttttttctttttttttttcgttccttgcgaggaatctcccaaattggagtctctcgcccttacacttaaagttcacaaagaagcacgaagtaagggagggaagcaacacacacaaatccacagcaaaatgcgcacacacacggccaagaatcgagctcaaaagactatctcaaagttctcactaaaacggagctcgaatcactgataatgacaaacgaatgcgcaaagactgagtgtggatgatcaagaatgctctaaggttgcttggtcttctcctccatgcgtctaggggtcccttttatagccccaaggcagctaggagccgttgagcacgggcgcaccggacagtccggtgcacaccggacactgtccggggtccgatttccttccttaaatagcgaagccgaccgttggcggccttggagccgttggcgcacc

SEQ ID NO: 112626 - DNA, 1762 bp, Zea mays
  Clone ID: MRT4577_34205C.1
gattaagcgttagcacagttaatgccaagtggctagagaggagtctcaacaaaacacaataccacaagagatcaaacacagagatgacacagtggtttatcccgtggttcggccaaaaccaacacttgcctactccacgttgtggcgtcccaacggacgagggttgcaatcaacccctctcaagcggtccaaagatccacttgaataccacggtgttttgctttgcttttcaatatcccgtttgcgaggaatctccacaaattggagtctctcgcccttacacttaagattcacaaagaagcacggagtaagggagggaagcaacacacacaaatccacagcgaaatgcgcacacacacggccaagattcgagctcaaagactatctcacagtttctcacaagaacagagctcgaatcacttagaatcacaaatggatgcgcaaagactgagtgtggatgatcaagaatgctcaagagttgcttggatgtctcctccatgcgcctaggggtcccttttatagccccaaggcagctaggagccgttgagagcatttcaagaaggcaattcttgccttttgtcgcctggcgcaccggacagtccggtgcaccaccggacactgtccggtgcaccaccggacactgtccggtgcggatttctttccttctttggcgaagccgaccgttggcggttcagagtcgttggcgcaccggacagtccggtgccccttgtgagtgttggctcttgccacgcgtcgcgcgcggattatgtggccgaccgttggcccggccgactgttggctcaccggacagtccggtgcaccaccggacagtcactgtagcatgtccggtgcggatctccttcctaatttggcacagccgaccgttgcaactctgggctggttggcgcaccagacactgtccggtgcaccaccggacagtccggtgccccatccgaccgttggcgcgggccacgcgtcgcccgcggattgcgcggccgaccattgcgctggcggccgttggctcactggacagtcctgtgaattatattcgtacgccgccaagtgttcccgagagcggccagttcgccggaagccagcctggcgcaccggacactgtccggtgcaccaccggacagtccggtgcacccagaccgaagctgtctttgtccaaactgttttatcctgtttctagcacttagacacaatacattagtcttcaaagcaatgtactaagtctagaaacataccttgcaccttgatttgcacttctttagtctttggcacaatttatcacttaaaccatttgtgttggccatttaatcaccaaaatacttagaaatggcccaagggcacatttccctttcaatctccccctttttggtgatttatgccaacacaacataaagcaactcctttttagccatgaggcatgtgtggttgagcttaggcaagatggatgacttgttaaaggccaagctggcgtcaatgacgtgtgcctcctcggctccccgccatgcctcttcttgaaaaatctcctgttcttggcatacccctctgttgggtctttctcttcataaggtccaacattggcgtccacctccggtgaactcaaacgaccaccttcaacaccaggagcttgtgcaaccaccttcgtcatgccaccaaagaaggcaatagcgccaggggctgcccttgcaccgctggacatcaaccaagaagggctccctctgagagaagcccgaaaccagaaaaggaaggtcat

SEQ ID NO: 112627 - DNA, 333 bp, Zea mays
  Clone ID: MRT4577_34206C.1
ccatccggggatttgattttgtgcatagttttcgaacaataattgtttgctttaaattaaacataaaattagaattcattatgcaacaaaaactaccccaaagataaaacttcattattgatttaaattagaatgcgcataccatccaaaaaactagacgttcaaataatcacgtttaagcacactatggtacatacgtatggtacaaataacagtggaaaagagcaatgattttgtgaaataagctgtaagttcttaacaattataaatagagatcataaatttttcaaatgaaacatgataatatgaactgtattgtgaatacacatggct

SEQ ID NO: 112628 - DNA, 1419 bp, Zea mays
  Clone ID: MRT4577_34207C.1
gacacagtggtttatcccgtggttcggccaagaccaacgcttgcctactccacgttgtggcgtcccaacggacgagggttgcaatcaacccctctcaagcggtccaaagacccacttgaataccacggtgttttgcttgctttttctcaatcccgtttgcgaggaatctccacaacttggagcctctcgcccttacaattgaagttcacaaagaacacagagcaaaagggggaatgagcaacgcacacaagacttcaaaagatcagaacaacaacacgcacacaagtcgcaacaagagctcgcaacacaactcaaagagttcgcaactcaacaagagctctagatgctatcacaatgaaacgaatgcgcgagatcgatgtcttggtgcttaggaatgttctaggaatacttggtgtgctcctccatgcgcctaggggtcccttttatagccccaaggcagctaggagccgttgagaacaaatctggaaggccatccttgccttctgtcatcgggcgcaccggacagtccggtgcacaccggacagtgtccggtgcccgattcctttccttaaatggcgaagccgaccgttgcagatctgggagccgttggcgcaccggacatgtccggtgcacaccggacagtccggtgcccccttccgaccgttggcttggccacgtgtcgcgcgcagaatccgcggccgaccgttggcccggtcgaccgttggctcaccggacagtccggtgcacaccgaacagtccggtgatttttagccgtacgccgtcagcaaattcccgagagcggcctcttcggccgaggcagcctggcgcaccggacactgtccggtgcaccaccggacagtccggtgctccagaccgaagcagtcttctggctgtatacagccaactttttttcttttcttttttcttcctgtttccaatacttagacaagtatattagtacacaaaaccaatgtactaagacttagaaacatacctttgctctagatttgcactttgttcatccatgggcattgatttacatttaagcacttgtgttggcactcaatcaccaaaatacttagaaatggcccaagggcacatttccctttcaatctccccctttttggtgatttatgccaacacaacataaagcaactagaacaagtgcaaaatcacttcaaataaaactcaaattgattttgattcaattttggcatatatggatcatcctttgccaccacttggtttgtttttgcaaatcaaactcaaatctctatctctaagtcaaaaacacatgttgaagcataaagagagtcattccaaaagagattgatcaaagatttcaaaaactccccctatttcccataatcaccactaagaagccaacttttgacaagagacacaataaaagagttttgc

SEQ ID NO: 112629 - DNA, 1071 bp, Zea mays
  Clone ID: MRT4577_34208C.1
gatgcctttttttttttttttttttttttttttatcccggggttcggccaagtacaaaacttgcctactccacgttgtggcgtcccaacggacgagagttgcactcaactcctctcaagtgatccaatgatcaacttgaataacacagtgttatgcttttcttttcttatcccgttcgcgaggaatctccacaacttggagcctctcgcccttacacttttgatgttcacaaagaatcacggagtaaggaagggaagcaacacacacaaatccacagcaaaatgcgcacacacacggccaagaatcgagctcaaaagactatctcaaagttctcactagaacggagctcgaatcactgagaatgacaaacgaatgcgcaaagactgagtgtggatgatcaagaatgctctaaggttgcttggtttgctgctccatgcgcctaggggtcccttttatagccccaaggcagctaggagcagctagagatcaacttggaaggcaaatcttgccttctatcgagtggtgcaccggacagtccgatgcaccaccggacatgaacaatacctgtcctgtgctcgatttacttcctagtcaggcacagtcgaccgttgggcctcgggtccggttggcgcaccggacactgtccggtgcatatcagacagtccggtgtgcccaaccgaccgttggcgcgggccacgcgtcgcccgctgattgcgcagccgaccgttggccacgagcgttgttggctcaccggacagtccggtgcaccaccgaacagtccggtgatttttagccgcaacgccttttacttttctcgagagcggccagtttgccgccgggccagcctgggcaccggacagtccggtacgccacaagctggttctggtttggctgaaccgagccattctttctccatctcttttcctcttttcttggctatgtcacggagtgtagtggaagtctttttgtcgtccaggttcactttccctttcaattgtccttcgagactacttcaagtgtactcaaacaaataagttagtctcaaaggagtcaagttgtagctcatctccc

SEQ ID NO: 112630 - DNA, 423 bp, Zea mays
  Clone ID: MRT4577_34209C.1
gaatcgtctgccaactacgcaggccgtggtggtcgtggtgaccgcggcagggggcgtggtgcccgtggccgctggcgcggccgtgctggaccttcgtcccgcatcagcgacaatcgtggtcgtggctcaaacgcacgaccgccctgccagatctgtggcaaggagggtcataccgccatccgttgctggcacaggaatgacgacagctacaacactgatcctcccatggtggcaatggcggccacctcctcgaccaaaattgatccaaattggtacgtcgacacgggagcaacagatcacatcactagtgatctcgatcgactgatgcttcgtgaacgctatcatggtggtgagcaagtccaagtcggcaatggtgcaggaccgtcagacgaagagaaagctcctggaaggacaatctaagaa

SEQ ID NO: 112631 - DNA, 1614 bp, Zea mays
  Clone ID: MRT4577_3420C.1
tccggcgccgccccgcccctcaggtcccagctctcgctctccagtctccaccgccgctccggtgctcccttccgggattcccctccggcgagcttgctcagctccgctccagatcagtaagcctcacacgggctgttctacccatgcgtacaaattcatctcattcgataggttggcacgactgcggtctaccataaagttcatctctcttctcttcctgttcgtactgcgccgccgcgtcgatctccgccaggcgacccgaaagccaagaagctgcacaaccaagaggcaagagccaacagagcgcagaagctgcacaactaggaggtaagagccaacagagcaacgcccaggcacacgcgacatgaaccaggcaaaccagctgccgagggaggaaccctagcggaacactgtgcaggtgacggcggctcgctaccggtgacgggggatacggcggcatcgcccccctcggcccctcctccatccacggcgcggcggcgccagcagccggcctgcaggtttccacgtcgtccatggcgcttgtcgtgatgtgtgggcagccgtgcagcggtaaaacagcagccgccacttgccttgctgtggcgctgcactcctgctcgcctgacctcactgtccgaatcatcgatgagtcatcccttcatctcaggcgcaacgatagctacaaagatatggttgtggagaaaaacttgagagggcttcttagatcagaagttgacaggtctgtgtcacgcgacagcataattattgtcgactcgttgaataatattaaggggtaccgctatgagttgtggtgtcttgcgcgtgcatctggtgtaagatattgtgtgcttttttgtgatacagaagtggaccattgtaaggaatggaacagcaaccgccaggagaaaggagaaccagcatatgatactaatatatttgaagatcttgtaagtagatttgagaagccagatagacgcaatcgttgggattcccctctttttgaattgttcccatctagagatgaattagtggaaacagctcctgttattgctgaagctgtgtcatatttgacaaaaaaagtggattccaaaacaagagatgtaaaagttctccagcctacaatagccactcagacggtgcgaacaacagaggctaattccctctatgagatggacaaggcaacacaggaggtggtcaatgcaattgttgaagcacagtcatgcggtcttgggcttgctgtgaataagatctccattggacccaacttgccaactatcaagcttgagagatctgttggcctacctgagctcagaagcctgcggagaactttcatcaagctggcagggcagtacagtctgagtgggccaccaccaccgacagatgctgacagcgcaaagaggatgtttgtcgactacttaaaccgtgaacttggtgcatgataattttcattcgcctgcgttgcatgaacactatgtagcatgtggttaacttgggggaatagataattgaagacaacttgattgtacttgttccttgttttgtggaaatctttatatgactatcttaacgtccttgacgccttggcggacatgcaacaggaatattttttttcta

SEQ ID NO: 112632 - DNA, 126 bp, Zea mays
  Clone ID: MRT4577_34210C.1
gggtgaggtttgaataaggaggggacggcactctgcaaggactcaaaaaagccttggcggtaagagcttccaggatcaatgtgaatagaaaatggttcatttggcattccgggttcataataacaa

SEQ ID NO: 112633 - DNA, 771 bp, Zea mays
  Clone ID: MRT4577_34211C.1
aatagtggaggatgtcctcatcagtgttctttttactttgctcttttcccgtttgcgaggaatctccacaacttggagtctctcgcccttacaataagaatcaatatgaagcacaagagtaagggagggaagcaacacactcaaaaccacagcaaatacgcgcacacacgatcaaaacttgagctcaaaacaatatctcaaggttctcactagaacagagctcaaatcactaagaatgtcgaattagtgcgcaagagtgaagtgtgaatgatcaacaatgctcaaaggttgcttggtgctttcttccatgcgcctaggggtcccttttatagccccaaggcagctaggagccgttgagagcattccaggaaggcaattcttgccttctgtcgcctggcgcaccggacagtccagtgcgccaccggacactgtccggggcggatttctttccttctttagcgaagccgaccgttggcactttggagccgttggcgcaccggacactgtccggtgcacaccggacagtccggtgcccccttctgaccgttggcttggccacgtgtcgcgcgcagaatccgcggccgaccgttggcccggtcgaccgttggctcaccggacagtccggtgcacaccgaacagtccggtgatttttagccgtacgccgtcagcaaattcccgagagcggcctcttcggccgaggcagcctggcgcaccggacactgtccggtgcaccaccggacagtccggtgctccagaccgaagcagtcttct

SEQ ID NO: 112634 - DNA, 240 bp, Zea mays
  Clone ID: MRT4577_34212C.1
ggagcagaaggcgttttttttatagacgcccctactcttggatgagctgggggcgggggacactatgacaatcatatgaggctgaagcatatgaatccagtaaaatatgaggcaccttttgatgagacttgagagaggcgagtcattgcatttttgctcaaataaacaagtgcacacctcaagcctaacataaatatggggcttagattttctaaaagcacggaaatttgatattgacaa

SEQ ID NO: 112635 - DNA, 1252 bp, Zea mays
  Clone ID: MRT4577_34213C.1
gcgacgggggcgcgagggagttcaaggagatcgtgctcgaggtgatgcaggtgggcggggtgctcaacgtcggcgacttcgtgccggcgctccggtggctcgacccgcagggcgtggcggccaagatgaagaagctgcaccgccggttcgacgacatgatggacgagatcattgcaggttatagggaggccaggagggttgcggcagacggagaggagagcaaggatttgcttggcttgctgctgtcgatggttgacgagcggccgttcgacagcggggaagaagtcaggatcaccgaaaccgatgtcaaggcactcattttgaacctgttcgtggcagggaccgacacgacgtcgaccatagtggagtggtctctcgcagagctgatccgccacccggaaatcctgaggcaagcgcaggaggagatggacgcggtggccgggcgcgggaggctggtcacggagtcggacctccgaagcctcaccttcttcaacgcggtcatcaaggagacgttccgcctgcacccgtcgacgccgctctccctgccgcgcatggccgccgaggagtgcgaggtcgcgggctaccgcgtccccaggggctcggagctgctggtcaacgtgtggggcatcgcccgcgacccggcgctgtggcctgacccgctggagttccggccggccaggttcctgccgggcgggtcgcatgcggacgtggacgtcaaaggcgccgacttcgggctcatcccgttcggcgccggccggaggatctgcgccggcctcagctgggggctgcggatggtcacgctcaccagcgccaccctggtgcacgcgttcgactgggagttgccggcagggcagacgccggacaagctgaacatggaggaggccttcaccctcctgctgcagcgggctgttccgttagtggctcgtccagtacccaggctgctgccgtcggcgtatgagatcgcataggaaggctcgctcaagggcctcagcttggctgtatcaagcacgtacaatggcgtgaaagacgacgtgtgtatgtattgttgttcactttgttgacttttgtaaacactagtaaatgttcttgctatggctaatatctgtaacgaatttttatattttgacatgattacgcttctggcttgtaaccatgcacctttcatgtggatcaatataaactcacaatccacatgcatgaaaaaaaaaaaaaaaaaagcgcctaaaggaataaaaaaaaaaaaaaggcggcc

SEQ ID NO: 112636 - DNA, 1442 bp, Zea mays
  Clone ID: MRT4577_34214C.1
cattgggtacctcgaggccggccgggacctctaggcaattccagctgacaccactcgtaaccagaatcgccgcaagccaatctgtctccgccaggcgccaagccaaccctcaccaccacccgtccacccccatcagtgcatcaccgcccacagcctttattcgccaccgcagcaccccctgctcggccgcccgcccccgagttcccactcggccacttcccacatctctctctctctctctctctctggctctctgctcgccacgcgccgtaccagcgccgcgcgccacatggctccctcgttcactagcctcctctcggccgcgaactccgccgccgccgcgaccgcctcgcggctcccctcggccgccgccggacgggcatccacttttgtgcgcttcccgcatcacccgacgggctgggctggggcctccgtcgcggcgccgcgtacggcgcgcaagcgggcacccggcgtcgcctacgccaccgcagctaccgagaagagcatctacgactacaccgttaaggacattgatggaaaagatgttcctcttaaaaagttcaagaataaggtgttgctgattgttaacgttgcttctcaatgtgggttgacaacagcaaattacactgaactatctcatatctatgagaagtacaagactcaagggtttgagatccttgcatttccttgcaatcaatttggtgcacaagaacctggatcaaatactcagattaagcagtttgcatgtacaagattcaaagctgaatttccgatttttgacaaggttgatgtcaatggacctaatacagctcccatctataaatttctgaagtccagtgctggaggatttttgggtgatctcgtgaaatggaattttgagaagttcttagtggataagaatggcaaagtcattgagagatatccaccaacaacttcacctttccagattgagaaggacatccagaaactgctcgcggcataagtacttccaagtctttcagttgagtatctcagtatctgtatataggtcatatattttttcccctgtattgcaatcattttcgtaaaataattcactcattatctacacgtgattatagatgtaacatgagactatattagattttggactatcaactccgaagtttacctgtacatgaaactctgcccaacggagtagcttgggtgaactggctgcctgggagcatcctgattcctgaatgcttcggctcacctgtagcttcgttgttgcttttatgttgtgctgcaccgactagcaagccctgtccacgaatgctcgtggcaatgctagtttatgccgctattctgtatgctgtctctagccagttagcaacaccgatgctctatcaattaatcaatgtctgaccatttctggcctaatccatgacttaatctccaaaaaaaaaaaaaaaaaagcggcc

SEQ ID NO: 112637 - DNA, 154 bp, Zea mays
  Clone ID: MRT4577_34215C.1
acgtttgcttttgctccgcctaaccaatcccgggggcgggttcaattaaacggggggggggaacactagctactccatctacattgcctgcttcaataccttctcttctgggacacccggtccccctatccctacgctatatgtttacccccaa

SEQ ID NO: 112638 - DNA, 485 bp, Zea mays
  Clone ID: MRT4577_34216C.1
gccctctatatattgtattttcaagcatacaaccccttgagcagagagttcacttttgcttaagaaacaatcccctccacactcatattccacctgtcagccatacaacacttcaacaacttacaaacatacactatcatcgccctcaacacaaaagtcccttcggcaaaataactttaaccacgaccgcctcactatggaatattggattaccaacttcatccgaagcggcatcttcttgccaccggaggctccgttctctttcttttatcctaacaccttttccctcagttctaccagggcttatcttttcgatctccaacctccaaattctagcttctgctgcaccgaccatcacgaacaaccctttccataaatcctcatgacacgaatgacactgcttctctatgccctcgatacaaggcttctgagcccctgttcctcctttgtacaatgatagaactgttgggaatgcaccttaagcc

SEQ ID NO: 112639 - DNA, 405 bp, Zea mays
  Clone ID: MRT4577_34217C.1
ttttttttgacgaaatgaagatcattaacgcggaataaactgacagtgtgggtgcatggtcgtggctcagacgggttgctgggcgcggagcttggctcggcctggcgtcgagactgggcagctgctcggtcggcgctggcgtcctggcgcgtcggggcagtcagggcgcgcctggacgcgtcgggcttggctggggcgctgcgtagtcgggttgcaggggctcggggcggtcctgcgcggggtgctcggcagctggcgacgcgtgtggtcggggacgcgagggagcaggggcgtcgcggctggggcgctgctcggggtcggtgtcgcggtcgctgcacggcggaggagcgcgcgcagggcgggatgcacggaggccgacggtgtctgggcgagcaggtgcctaga

SEQ ID NO: 112640 - DNA, 195 bp, Zea mays
  unsure (1)..(195): unsure at all n locations
  Clone ID: MRT4577_34218C.1
cccacgcgtccgcggacgcgtgggcgtgattttgcttgaccatattactattagtccatagatnaatgtatnatattcaacttcaaccttaattaacttaacaattatatctagatgtcattcaaacaaagttcacaatattgaagaaatgattctctcaatggatgctcaataagatgtgactcaagaatggct

SEQ ID NO: 112641 - DNA, 673 bp, Zea mays
  unsure (1)..(673): unsure at all n locations
  Clone ID: MRT4577_34219C.1
ccgcctttgtgctccatctgccagcacaaggcccccgtgttcgggaagccgccgcggtggttcagctacgcggagctggaggtcgcgaccggcggcttctcccgcgccaacttcttggccgaaggcgggttcgggtccgtccacagaggcgtccttccagacggccgggccgtcgccgtgaagcagcacaggctcgctagctcacagggcgacgtggagttctgctccgaggtggaggtcctgagctgcgcgcagcaccgcaatgtcgtcatgctgattggcttctgcgtcgagaataagaggcggttgcttgtgtacgagtacatctgcaatggatcgctggacacacacctttatgacacaagattgcagtaggagccgccagaggcctgcgctacctccacgaagagtgtagggtgggctgtataatacaccgtgacatgagaccgaacaacatccttgtcacacacgatttcgaaccactggttggagatttcggcttggctaggtggcaacctgatggcgacatgggtgttgagacaagagtcattggcacattcggctatctggcgcccgagtatgctcagagtgggcaaataacggagaaggcagatgtctactcgttcggngttgtactagtggaacttgtaactggacggaaggctgtggacat

SEQ ID NO: 112642 - DNA, 238 bp, Zea mays
  Clone ID: MRT4577_3421C.1
cgacccacgcgcatagctattacctgtgtgcctcccatgttcagttgatatggtgggagtctcaacgtatatcaggagagtagtgcttaatagtaacagaacctcattgctgatgcacacgcgaatctggatcatcacgtgctgtggttgtaccgcacaaaacatacacatgtcagctagtcgattggttgtgaagtatgaaactatcatcatgcgtgattatgagccgttgcgtgac

SEQ ID NO: 112643 - DNA, 670 bp, Zea mays
  Clone ID: MRT4577_34220C.1
cctcgaggccggccgggccgggctcgagcagactaccctctagcgcgagagtgaaacaacactaaaaacggacccgatcgcagctaggaaagctcaagtcgacgaccgagtcatgagatgacctaacggcgctgatgcctgatcgcagcatgaacggactcgtggaggtacccatggtcccaggctccaaggaagggcacttataatccgactccgcaatcctggcactccgggatacgactcctaattgaaaccacacatcggccgactaacgcatgtacatccaccggatgccgctacattaccatacgaggtcaccagaagaaatagcggacacgatgagcatagtcatgctccagactaacgccactcgaggatgatgagtgctgctctgcctccttgtaaagaagcctgaactgctcgttgatgctgctgcctgaaggacgaacgatattcgcgtggtttctgagcatacatgagattgaacctgactgtatcgaggctccgtgtcacgatgccatattgaccgattgatggatgctagagtactcgggtactgctaattacctttaccagtagtccgctatgagctgaacagtacatcgagatgagagagccctctgtgcagcgctggcagcagaaatcctagtgcctaactgccacgtagctt

SEQ ID NO: 112644 - DNA, 242 bp, Zea mays
  unsure (1)..(242): unsure at all n locations
  Clone ID: MRT4577_34221C.1
agcttggatcctctagaagcgggcgccctttttttttttttttttttttcaacatttttttgttttttacagtggttttttttcatgttttgcgcattgcaggcggnggcagggcagttacacaaagaagaaagatcatcgctacaaatgagccaaagacaaaaggttcaaaacaacaaaaagcctacaaaccgtactaaagctgtacagtctggaaaaatacacattttcacgagaacggg

SEQ ID NO: 112645 - DNA, 494 bp, Zea mays
  Clone ID: MRT4577_34222C.1
agcaaatcagcagaatatattataaaatataccgactgattaaattctaacatacaccacacattgagtgaagctcccaaaactggtaactgtatataataacaagcataactctactaccacataataagggattgcataaactagagctatccagatttaaaagcctcaaaaccaccatactagccccaacaaacgcctactacatatcctaaaaagactctccagacagcataagcgactccagtaatggctgggaagcgaggggctgaaacgaacaccttagaaccccatgtcggcacgagactcctccttgcgctctagcttactcttctgtcaacacgggcaataccaaccggaacacccacacgtgccacgtaagcatatactgaagcagatccaacctcagatcccacatggagaaagatatcctcaacgctgaaactgctatacgatctcaatgacaaacaccatacaatccgactcatctatga

SEQ ID NO: 112646 - DNA, 351 bp, Zea mays
  unsure (1)..(351): unsure at all n locations
  Clone ID: MRT4577_34223C.1
gctggtggagcnnaacccattttttttttggtgggggtcgcattctcgttcacggcaggccaaacctacacactggcccccgtggaattgttcttttggtcnctcctnctcgccccgcgcgggaggaggcgggggcccgcnttggtncccggggccctgggttccgtgccgggtcctcatcattttttcttggcngccgcctgggtcgccttgggtcccgtggggggcttcttgttccgctcttttgccgccggccgctccgtctgcctcttgtcgcggcccgcggtgcgccccagtggcggcttctcggggantgtctccccccccctgggcttggtgggggtcctcttg

SEQ ID NO: 112647 - DNA, 563 bp, Zea mays
  unsure (1)..(563): unsure at all n locations
  Clone ID: MRT4577_34224C.1
tttcttcctctctccccctcttggnagtagcatcgatcgattaagagcgcctttacaaccaccatgatggcggcttcgtcatcctcctccaacctcagtgatcacctcgtgcaagatgacctcctccctggccttcttcctcctcctccctgccatttactcctgctgctccccatcacagcgccattattggaggcaacagccagcaatggtgccagcaacccctagcgctaaactgcgctgaccggcatcactccgacgagcttgaggtgctcctctcagcacaaggcagccaccaccacagccacagccaccctgcttctccggtgatccctccgcagctcagcagctctctgctaacgatgcaagaccacctagggttccaatggagcaactgcggcggcggcggcttcctagacacctcaccgtccacgccgccgacgaacgggcagctgcagcacgatggccacgacgacgacaagatcgaggccgagggcacgcttattactaactcgtcaaggccatcgtgtgcgggcacagccacgatagtcgccagcttccac

SEQ ID NO: 112648 - DNA, 330 bp, Zea mays
  Clone ID: MRT4577_34225C.1
ccaggcccggcaaagttggtggataaacaaaccccgggggttccatgaaaaaaaatgccccaacgttgttttttaaacggcattgcaacaaactttgcccccaaaggggggttatcccgtagcattccaaactttaaagcccccttatttttggaacccttctttttagcaaaccccaaaaacagattttaaagggtccccacctttgccggggaggcattttttatgtggcagaaaaaagggatcctccccccgttggggggggggattaagttttttttttcccagttgggggacgggaaaaccaggaaccccccccatgcttaaggg

SEQ ID NO: 112649 - DNA, 431 bp, Zea mays
  Clone ID: MRT4577_34226C.1
ttttatattatatttcttttccaacccacctttttttgggaaaggtttttttttttttaaaacaaactcccttcatccatccaaacactaaaacattttttcccgaaccaaattgggaaaagacctctctaacacaaaaccaatttcggttaaaatcaaaactattacctccatcccccaagcggatggatcaaagaatccctcaaagcccccccccttaaacaattctaacttaaactgctcaaaaaaattggtaaaaaacccccccccccccaatccaatggcatggggacaactgttgacacccggatccccccccacaaaaccctttttctggaccctatccatttggagcaaaacctcaaaaaaccccttaacggctggtcaaccccacctcctttactctaaaaccaaaccccccctctaacggc

SEQ ID NO: 112650 - DNA, 419 bp, Zea mays
  Clone ID: MRT4577_34227C.1
aattccctgtcgaccgactcttcaccccacgcgtccgattacccgatccacgaatttcaacatcaactaaatatcctctttctattgccgcattcaaaacttaggactttctattcaataatttcttaaatatattaccctatccccaaggcttgggtccccttctgaccattcaatccaatctttattcccaaaatcctgattccactaatcatttatttggtaccactcaaggaactggaactaccattctgacccttcttccgggattccatccacaaacacaaactttgttacttacctatatttctcatcatcatttagctatttcatttatttttctcattgccattcatatatatccaactaacttcacaattttgcacattattaaacatctttttataatcacatactcc

SEQ ID NO: 112651 - DNA, 442 bp, Zea mays
  Clone ID: MRT4577_34228C.1
gcctgcgtgaaccgggctgctattacacggtcgacctcagcgttctttactagcatcatataagtcacattaaagtgccatcaatggttgccgagaagtcccgacctttttgctaaaaggtatttttgaacgtgctgttacaggaacaattaagcgggctgctcacaagctggtatggctgtcctattttccccggacctgtaaacaaaggtggttgaagggtgtgaaaacccaaatttttaaccatatgcgatccaacaggccatcgcagttggcaaattacctcaatcacggttgtttctacaacaatcatggagctcctatcacatagctaccttaaggggcatttattgggacacaacataataagcacaacaactacaacaacttgtgctagcaaaccttacaaactactgtgagtaacaacaagatatttcattta

SEQ ID NO: 112652 - DNA, 613 bp, Zea mays
  Clone ID: MRT4577_34229C.1
aattcggcacgaggcttgcacgtcccccctggcacgggcctgctcctacttctctcgctttcgctttatcacctctcgtcgccaccaacactccaacagtcgcttcaccgtcggcgccgtcggagggacgctccagttggctgcccccggcagcggaaagtttcctgcggcccctgctctctttcaccaccgcggtggatgaagactggcaattattggcctgcgctgcggtctcgacgccgtgcagaggcgtcatgtggtttcgtgatccacgcggggatgggaggagccgcatgagatgctgagtgattggacggttagttggcctcctcacgtggcgcgtctctgcacctttgtctctctggctgactgactggctctgctttcgcctgcgcctgggcatatcgtggaaccctgattggcctagctcgatacggccgcagctatcatgtggtgtttgtttcagcttattttcagcttctggcagctgtggaacatttagctttttaactcgtttttgtgagaatcgatttggtaaaaaccgttaaaaatcaatttaaacatataatcggctgattcgtcatccgtcaaaatcaaaaaaaaaaaagcggcc

SEQ ID NO: 112653 - DNA, 270 bp, Zea mays
  Clone ID: MRT4577_3422C.1
gagcttccgggctgcgctcttcgttgcccagtttccgctcagtggtcgcgtctacgaaccgcacccaccagtcccgctgcattctcggccgggctctaggcgccatggctccccgcgggaggaagcgtaaggctgaggccgcggtggtcgccgtagccgagaagcgagagacgctggcgaacggcggggacggaatggaggaggcgaccgttgttatcgagcattgcactagctgacgcgtctatgggcgcaacgcgcggccctgagcca

SEQ ID NO: 112654 - DNA, 718 bp, Zea mays
  Clone ID: MRT4577_34230C.1
ccggccggggtcttcacccgttgtatccctgctagcaaacctattcacgctatcgaaaatcctgctcgtagccatggagatcgtgcactatgctgctgtccaggatgccttctcccaaaatggtggggatgacctggttaataagaataaccgctcgcgactgccggaccttgcgcatgcgcctggacaatgtgatccacataaggacaagcggttcacagcttctgctaacccgccccatatccctcgatcccacatgaatgcgtgcgtgctcggtgatgcccaccatgaacctgaggtctcagaagatgatcacttgccgtacatgcaatgcttatgctctcaagaaaatgaacaacaacaacaacttcgataagaagcttgccaaaaactaccatggtttcttgacatcagaggccatcatcaatcacattccccgtctccttggtactggtctcaacaaggcacgcacactcccaaccctggttactcaccatcaatccctcgagtacaacgtgaacgagactaaagctacagacaagctccagctcacgaaggccctatgcatgggtgtcgccgacgtgaacttggttatgcatgagaatcagatccagcagaacatccagatgagagtaaacttccttgtttctcttctgaagaacaactggcagaatgccagatgcctgtacatctagagcaccatgggggaagccataca

SEQ ID NO: 112655 - DNA, 261 bp, Zea mays
  Clone ID: MRT4577_34231C.1
atataaatccattttattatgggaacgcttttattaaattttacaagtcttaaaacacccacttataaatctaaatttaaactacatataaaaaaaaaaaaaaaaaccaaacatcccaaaaacaaaaacacgacaccttattacatgccaaacaaacagaccccaacctaacacaaaaatatcatccactaaaacaacaccaacataaaaaaacaaaaaactaactcatcccttcacttatgaaggaaaacctaaataccc

SEQ ID NO: 112656 - DNA, 147 bp, Zea mays
  Clone ID: MRT4577_34232C.1
cgctcgagcctcggtcaccggtctctgttccgcaggaccgggtttgttaaagttcgaaagaataaagcctactttacgagataccaagtgtaatttagaagacgaccgtagggtagaactgattattatgctcggaaacgcttggtg

SEQ ID NO: 112657 - DNA, 674 bp, Zea mays
  Clone ID: MRT4577_34233C.1
ctacttctctcgctttcgctttatcacctctcgtcgccaccaacactccaacagtcgcttcaccgtcggcgccgtcggagggacgctccagttggctgcccccggcagcggaaagtttcctgcggcccctgctctctttcaccaccgcggtggatgaagactggcaattattggcctgcgctgcggtctcgacgccgtgcagaggtagctgcagctttgctcattgggtttgttgcttgcttttgtccagagactagggcaggacaggactgtgttaaggcaggcggccgcgttattgcctgtgcttctgttgttaccttgtgctatgctatatgctaatcatttggcaggcgtcatgtggtttcgtgatccacgcggggatgggaggagccgcatgagatgctgagtgattggacggttagttggcctcctcacgtggcgcgtctctgcacctttgtctctctggctgactgactggctctgctttcgcctgcgcctgggcatatcgtggaaccctgattggcctagctcgatacggccgcagctatcatgtggtgtttgtttcagcttattttcagcttctggcagctgtggaacatttagctttttaactcgtttttgtgagaaaaaaaaaaaaaaaaaaaaactcgacctgcagcccgggggatccacta

SEQ ID NO: 112658 - DNA, 513 bp, Zea mays
  unsure (1)..(513): unsure at all n locations
  Clone ID: MRT4577_34234C.1
tttttatcagccattgtgggttccgatgttgcctcagctgcagcgcaagcagctatttctgcacaatcccgtgttgaccttaatgacggcgagattgaaacttcaataaatagcatcaagcaagaaggtatcagcccttctttacatatttgacctattcttttgcaacttgtgtcgttgaattattcataaagattctcctttgcacatcaatgtgcaaaatgcaagcaatgtcgacagtgatggttaatggaagtttgaatgttgtatgggtgcaaataacattctacaggaacaatacgccaaagcatacatgtgtagtattataacattgtgccatgtgcaaatataatatatacacttgcacctgaattttgtgtgcatccactattaaaatacttcctgctcacctcactcgtaccatgctttttagccactaactntaatgccttctttagaatcatctcacacaaatgggctctcagccaacgtgttactgaaagaggcagctgc

SEQ ID NO: 112659 - DNA, 1990 bp, Zea mays
  Clone ID: MRT4577_34235C.1
ctactcctactgcgtacacggcacgtgggctgcagtggcctagccggcgtcgtcctccccctctctcgctcctctgtcctcccctctccacttgagaagaacacaattaggaaaaaaaggcaaaaaacatttaccttttttctatctgtatattatctgaataaatcaagaggaggaagaggggagggagcgagggagggggaggagtagcaaatccagactccatagcaaccagctcgcgagaaggggaaaagggggaggaagagcttcgcttgtgtattgattgctcgctgctccagtccctgcattcgtgccgtttttggcaagtaggtggcgtggcaagcatggtgccgggctatgactgcgccgcctccgtgctgctgtgcgcggaggacaacgctgctattctcggcctggacgacgatggggaggagtcctcctgggcggccgccgctacgccgccacgtgacaccgtcgccgccgccgccgccgaccggggtcgccgtcgatgggattttgacggagttccccttgctctcggatgactgcgttgcgacgctcgtggagaaggaggtggagcacatgcccgcggaggggtacctccagaagctgcagcgacggcatggggacctggatttggccgccgtcaggaaggacgccatcgattggatttggaaggtcattgagcattacaatttcgcaccgttgactgccgttttgtctgtgaactacctcgatagattcctctccacgtatgagttccctgaaggcagagcttggatgactcagctcttggcagtggcttgcttgtctttggcttcgaaaatcgaagagacttttgtgccactccccttggatttgcaggtagcggaggcaaagtttgtttttgagggaaggaccataaaaaggatggagcttctggtgctaagcaccttaaagtggaggatgcatgctgttactgcttgctcatttgttgaatactttcttcataaattgagtgatcatggtgcaccctccttgcttgcacgctctcgctcttcggaccttgtcttgagcaccgctaaaggtgctgaattcgtggtattcagaccctccgagattgctgccagtgttgcacttgctgctatcggcgaatgcaggagttctgtaattgagagagctgctagtagctgcaaatatttggacaaggagagggttttaagatgccatgaaatgattcaagagaagattactgcgggaagcattgtcctaaagtctgctggatcatcaatctcctctgtgccacaaagcccaataggtgtcctggacgctgcagcctgtctgagtcaacaaagcgatgacgctactgtcgggtctcctgcagtatgttaccatagttcttccacaagcaagaggagaaggatcactagacgtctactctaattgtggtacgcttcaggtgtgctcctcaccgctctaggagtttttgattggttcaaacatcttaaatttagtttggccgctggaggattatggtttagtcaagtagttgctgaatggaacaacaaaacacgcacactacttggtccataaagacaagaaaataactggcagcgtcccgcgagccagcgctgcaatccagttcatgcaagaccctagagtccagggggggtgctggtgtaggtagagagggaacaaggcattcacatacgccgtagagatgagagagcctctcgtatgttttgtacttttgctccttcagtttgcaatgaactatataaacaaggattgccttggggcagtgaacatttgtcggatgaaaagaatcaaaaaggatgggggtcggcagaggaatagaacaatttgatatatttccataaactacagatatgtttcctttttcataatgatgagctatcatttttgttgatggtaacatggtatttggcgtcccgttttgtttgcatcaggccattggttgattgcttccaatgtaccttcattgattatc

SEQ ID NO: 112660 - DNA, 281 bp, Zea mays
  Clone ID: MRT4577_34236C.1
agctcatttactccagatcgcacaactctacaccatgaacgttcgactccattccgttgctgttctggctctagctggtggcgccgattgcattacaagaggctgctgtggttaacagacagcatggattaatctaccgactctattagataagacggctgcgctctgtctgctctcgcaccagcaatccaatgcgtggcaataacctactggatcctagtatctaacgcggtgccgctggttcagatcactgctgagccggctgaggcgagagtccttgt

SEQ ID NO: 112661 - DNA, 750 bp, Zea mays
  Clone ID: MRT4577_34237C.1
agagctaaccaacctgagggtgcacagcaaggaatgaaacaggcatatgaaagtttaactgacgggtttggaagaacttcctctgctatcattggcaatcctattaaagtttataaccgaggggctggtgtcggatcagttctggctactgcagtctgtggagcaccagctgctgcagtagctccaatctcagcatctgctcgtgctttacattatgcacttcttgggctaaggaacagccttgatcctgagcacaagaaggaatccatgtacaaataccagggaccctcccaagcatagacgtcattgagaggatagagttggtggtcggttcattctttggcgagccttacaccatctccctgaaactggttttaggagctcctttgcctggttttaggagctcctttgccagtctcgtccaattgtgcacagatcgtaagacagattatatatttggcatcaaagccacacactaaattgacacataagggtttaattagcactcatattttgcaccacgaaggcacgtggaagttttgtaatccctcttcgttgcatgactgcccccgatgtacataatgtggttgctgtgtgggttgtgcggatgtaaatatctgcatgactgtccccaatgtacataatgtggctgctgcgtgagttgtgcggatgtaaatatctcttttgctttggttgcgtgtgcgcgcgcctctggtccgctgttcaagagtggtgacctgtctggtgtca

SEQ ID NO: 112662 - DNA, 669 bp, Zea mays
  Clone ID: MRT4577_34238C.1
gacggcggttcatatcgagcgacacagggaggactataccctcaacgaatattgtagtctgacaagatgaccgactactatctcggggtgggtggcgtgcactctgagcactgtttagtggtatgacaacgctaagcacagaggaatagcgagggctcactcacgaccacaccaccactacggacgactctctacgatcctcctgaggaatctcgcgtacggctacgacgagtgcgggtacatatgcaggcgcagcggcgcgaacaccgaagaaaactcaagcccacgcctctaggaaggctagcggtgcctagccggagaactgctcgagggaggagtatgagcgtcttccgacggagagcctcatgcaacgtgggcgccctagagagcactccttttcatctgtacgagcgccgaccactgccgacaacgacgccgcctttgcctacttgctcaacaactcggccacagtggtcacctgcgacacgctgcgccgcaccttctacgagatgcaccacatcctcgccgtctacgacgagcactacatcaacatggacgaggagcacagggtcgtcctacgccgacgtgcatggctgactaccactactgcgactgaaatgactgtatgtcccatcgaccgagatatgcatgcagaagtcgatatatata

SEQ ID NO: 112663 - DNA, 584 bp, Zea mays
  Clone ID: MRT4577_34239C.1
tacgggacgccaatcccaacgacaagtgccgcaccagcaacctgcgagtgggcagcaccaaagcagacgagaggctctcctcggttgtcccctcgctgagtactgagaactaagaatccacaccggaccttacgaacgccgttacgacgcagttcgtaccagtagttcaacgtgaacaacggtcagttgtgataaggcttgggtgttgacgagcttaggttctggttctctatcaacgagtcaagtgttgtaagtagtgaaatctttatgttctctgtatctgcagtcttttccgccagcgaatttatagaaagtaaaagtcctgacataagccagttctccttattgttgtccgcctctgtttccatctcaaggttctcgaggtcactgaggtgtgcgagggacgaacgtgcaagcaacagctggaggtggagacgtatacgggaggtgttatgggggatcggagaagactacgcccagcggtcccgggagataaacaaccgtcaggtcgtcgtacgagacataggttaccagtactacgaagactttgctattccgggtcacccgaaccccaacatcctgga

SEQ ID NO: 112664 - DNA, 200 bp, Zea mays
  Clone ID: MRT4577_3423C.1
gttgaattaaacgaaaatcatacattgtgcagtacagtcggatcaataccaggggagagatggtcttggtattttagctccttgtgctaactacaatctcatggtccacggatacaaacgtcctatgcgcacagatgcttgatagctcacagttttcatcgaagagcaccagattttgaaattccagattgaaaaacaca

SEQ ID NO: 112665 - DNA, 658 bp, Zea mays
  Clone ID: MRT4577_34240C.1
ttgggtacctcgaggccggccgggactttttctgctcatccgaattcgcaggcaggcaggtcgacgaggagggcaggaagaccgaataccgagccgtgcgggggctcgggacgggaacgggacaggaccccaaaatctcagatccttcctgcccgcccgcccgtgcccgtcgactcgtggatcttgccggccgcgcctcacctacgccctgtcttcctccagggggatcggatacgccacaggctgcgccatggagctgtgggtcttcggctacggctccgtcatctggaacccgcggactcgacttctacgacaaaatccgctgcttcatcgagggctacaagcgcacctttaatctcgtgtgcactgaccacagacgtacaccggagcatccggcgaggacctgcacgctcgaagccatcaacgaggccatatgtgggggaactgcatattgtgacaaggttggtccacaaaaggagctactagcagcgcagtacttggagagaagagagtgtgagtacgaccagaagatattcattgatttctacgaggaaggacatcccttgcaaccagctgtgacatgcgcacttatgttcgtttcggctccatatcctattggctacaagtactatcttggccctgctcctgtgcaggatat

SEQ ID NO: 112666 - DNA, 933 bp, Zea mays
  Clone ID: MRT4577_34241C.1
gttggcttaagctcaaggacgactattgacaaaatatggaacattacaacaaacgtctcagagacagacatctatgaaaccatgcataattttctcataaatacatgaccaacaaaccatctctttgtcaatttgggtgactttagctgctctcatgatgtgcccgtaaaactgagaaaactgtacctaagcacctgcttgccatacaccaaccatgtttctgctcatttgtcgcaaggggcagatagttaatacctcttcccattgccaagcaagagagaaacgcacgcgagccgcgagcagaacagagcagcgcggcgccatcccgatctcgctatttcccttctcccccgatgcgatctcgccgaaccctaatccccacgcccgacgcccggccgtcgccggagccctagccccgaatgcggcggtgacgcgcggcgtgccaccaccaccacctcagcgcccgcgcccgcgcccgcgcccgccaccgaccgtcctgcccggccgacaccagctgccatgggcgccgccgacaagtggctgctcccgctcgtctccgtctccttcgtctcgctcctgctcttcctctccgcgctctcgggcttctccgcctcctccgcactcttcgcgcgcctcccgccaccctcctacgtgcgccgaggcgccgccgcaccgccctccttcgcctacctgctcgcgggcggccggggggacggcaggaagctcctgcggctgctcctcgccgtctaccaccccaggaaccgctacctgctccacctctccgccgacgcgccggcctccgagcgcgccgagctcgccgcggccgtcgcgcgcgccgctcccgccgtgcgcgccttctcgaacgtcgatgtcgtgggcaggcccaccgcgggcaccccaatgggatcctccggcctcgccgccacgctccgt

SEQ ID NO: 112667 - DNA, 368 bp, Zea mays
  Clone ID: MRT4577_34242C.1
actggttctagaccgagagcagcatcaccattgactacagttccgagttcccgctcaacggccagccgcgccacccaactggacatcgagccgcaattccagctggaccgtcgcgccatcatgtcgataaacaaggcagacgtcggctacaactgcatcaccagctgcggcagcccacggccgaggagcgctggggcccttatgcctgctcgttctcgcctaccgtcgactccgacctgagcagaccggcgtatacttttacttggccaagggcctgtaccgatccctcgccacgcacttctgccaagacgagtcccgctcctccagcgccaccgacatcagtcaagcgcgtcgtacggtagcgccgt

SEQ ID NO: 112668 - DNA, 686 bp, Zea mays
  unsure (1)..(686): unsure at all n locations
  Clone ID: MRT4577_34243C.1
ctccccttcccacctcttcccattgccaagcaagagagaaacgcacgcgagccgcgagcagaacagagcagcgcggcgccatcccgatctcgctatttcccttctcccccgatgcgatctcgccgaaccctaatccccacgcccgccgcccggccgtcgccggagccctagccccgaatgcggcggtgacgcgcggcgtgccaccaccaccacctcagcgcccgcgcccgcgcccgccaccgaccgtcctgcccggccgacaccgagctgccatgggcgccgccgacaagtggctgctcccgctcgtctccgtctccttcgtctcgctcctgctcttcctctccgcgctctcgggcttctccgcctcctccgcgctcttcgcgcgcctcccgccaccctcctacgtgcgccgaggcgccgccgcaccgccctccttcgcctacctgctcgcgggcggccggggggacggcaggaagctcctgcggctgctcctcgccgtctaccaccccaggaaccgctacctgctccacctctccgccgacgcgccggcctccgagcgcgccgagctcgccgcggccgtcgcgcgcgccgctcccgccgtgcgcgccttcgcgaacgtcgatgtcgtgggcaggcccaccgtggccaccccaatgggatcctccggnctcgccgccacgctccgt

SEQ ID NO: 112669 - DNA, 732 bp, Zea mays
  unsure (1)..(732): unsure at all n locations
  Clone ID: MRT4577_34244C.1
gggccaggcccgcctactagtaaacaagttggacacccccccggggccttgcaggtacacctcccggcaccgactggngccgaatggtcgccctctgctttccgacctgcgccccgacccccagtcttcgccttgcgtccacccggcatggcctcacccacggtcgcctccccgacccgggcgagccccgccgacatccccaccgccgcaccctcgtcggccccccgnccgcggcgcctcgcgtcggcgccgcccgcagtctacgcgtctgcgtcctcctccccggcctccgcctactccggggaccagctctccgcccccgacgcctcgagcccgctgctcgcgagcaggagcgaggagtacaggcttctgttccggctgccgcccgacgaggttctcgtgcaagattttaactgcgctctccaagaaaatatccttcttcaggtagttcttacataatcgtctccatggtattatggtaaaatatacatttatctgtcatccattatgactccctggtattgtttgtaattgatctgtatttggtgaaagttcatcctcttgtgagaatgtgatcttgaatccaagaattcaacaatgntgagtgtatagtgggcatataaattctgtccaaatattgttctgaacttctgactcattttttctattgcctgntttggtcaaggctgtgacaggccanatatttggcagtctagcattcgctgattacat

SEQ ID NO: 112670 - DNA, 141 bp, Zea mays
  Clone ID: MRT4577_34245C.1
gcgcccacagcagcccgtatacagagcgacagcgcagacgaagagacgacaagggaaaaggacagagcaaacagagacacgaggagcgaccgaggacacccaggcagaccgaggcaacgagacagcagcacgagaccagag

SEQ ID NO: 112671 - DNA, 825 bp, Zea mays
  Clone ID: MRT4577_34246C.1
aattcggcacgaggctttcgtggactcggcggccatggagcgggagcgggagagtgacaggtgcctggacccgcagctgtggcacgcctgcgccggcgggatggtccagatgccggcggtgcactccaaggtgtactacttcccgcaggcagcgtcggagcacgcgcagggccccgtgggacctccccgccggccgggtccccgcgctcgtcctctgccgcgtcgccgccgtccgcttcatggccgatccggacaccgacgaggtcttcgccaagatccgcctggccccggtccgtcccaacgagccgggctacgccgacgacgccattggcgccgcggcggcgtcgggcgcgcaggaggacaagcccgcgtccttcgccaagacgctcacgcagtccgacgccaacaacggcgggggcttctccgtgccgcgctactgcgccgagaccatcttcccgcggctcgactactcggccgacccccccgtgcagaccgtgctcgccaaggacgtgcacggcgtggtctggaagttccgccacatctaccgcggcacgccccggcgccacctgctcaccaccggctggagcaccttcgtgaaccagaagaagctcgtcgcgggggactccatcgtgttcatgcggacggagaacggggacctctgcgtcggcatccggcgcgccaagaagggcggcatcggagggccggagttcatgcaccaccaccaccagcagccgcccccgccgcagggcggcgggtacgccgggttctccatgttcctgcgaggggaagaggacggcggcaagatgatggccgcggccgcccctt

SEQ ID NO: 112672 - DNA, 259 bp, Zea mays
  unsure (1)..(259): unsure at all n locations
  Clone ID: MRT4577_34247C.1
cgaacacgcgtccgacctactcctccactatacgttagtttcccatttcttcatcattccctacaccgaaaaacacccaacantttagcaatcttacaattcaattcattcctaccacttctcttccatcttctacacattcaatcacaacgccaacttcacttactactacaacactctagtcctaacatcattctttatccctacactcatatgcacaacaccccaactatattaacctctttcacgcttgacacca

SEQ ID NO: 112673 - DNA, 147 bp, Zea mays
  Clone ID: MRT4577_34248C.1
aagagacagcagtgggttactttaaagcactggtttatttttaatgcgtttttcggtgttcacttaatcgcaggactagtctgattacccccaatgaatttaatttttacacttttaaagtttataatacggaggaatatactaagg

SEQ ID NO: 112674 - DNA, 191 bp, Zea mays
  Clone ID: MRT4577_34249C.1
gccaaaagggtgtcaaatgacttaatgacagacaagatggtgtttgagtttgtcaacacgcagcctgggagcacaagttcacctcttggaacacagcgaagaggcactcgcaaacacatgccacaaagcagcacatgtatcaccaacatgagggtccgagtgagctcttcaccaccaggacctcctttcca

SEQ ID NO: 112675 - DNA, 383 bp, Zea mays
  unsure (1)..(383): unsure at all n locations
  Clone ID: MRT4577_3424C.1
acaaaacccaaggaaccttctttatgggggaacggaaaaaagccttataacaacagccctaacgaagggactcccgaagggagacctgggtttttggcacaaacccgcccaggggaaacccccccttcagggacgggaccgggaaaccccaaacaactagggggacaaccgaccgccctcatttaaaacaaaactaaaagggaaagccggttggaaaggccctggggggggaccccgggggggccccccttcgggccgggggggtgggggtccccccgggttgnggggcccccccccgggcccccgcgggggcgcgcgcggggcgggcccggggcgggggggggcggggggggggggggcgcggggggcgcccgcgcgcgggg

SEQ ID NO: 112676 - DNA, 494 bp, Zea mays
  unsure (1)..(494): unsure at all n locations
  Clone ID: MRT4577_34250C.1
cagctcgtgtgtgagggataattacattggatcagtgtaagaaacgatatcgaaaaagaaatacatcagaaacggatgaggaactcctcctgtcccatccgaccggcgaggaattgtcggcgaccacaggtcgtgacacaggccagtaaattattctaacattcagcaattatgctgctagcatatatgaaaactgtcatgcggctgtttccagcccaaagacatcttctatgaacaaatcaacatgacaaagcgcaaagaagcattcaattgtgaatttcacgaaatttgtgacaacccaccctccgtttccgcttcctccctccacgtcgtctcggtcttcctctcctgtnatcccgtgacacgggtggctgcgacggcgaatcagatccctacccgtggcgttggtcgtgaattggcgccgtctccccctgccagccggttttcctgctttgttcttcgggttccctggtgtctcgctgcttcgctcccct

SEQ ID NO: 112677 - DNA, 235 bp, Zea mays
  Clone ID: MRT4577_34251C.1
ggaagaaaaacttaagattttttttgataattttgccccacaccctgcagaaaagtcccttacttgttccaccaaaatagtcgcgccccccaatgaattagcaacgaccgtcacttattgccgaccacaatttacatgtttgcatgtatggcgcgcacccacaactcgttctacttgttttttttgcgggtctcgatgaccaaaaaaaaggcgagccccaccaccgaaaaagccc

SEQ ID NO: 112678 - DNA, 320 bp, Zea mays
  Clone ID: MRT4577_34252C.1
actcctatgggcgattgggttcctcgaggccggccggaatcatcacagtcgcacacaatcaacagacatagatgaaactctgccacaatactccaaatgtgtgtcgaggatgtcaataacgcggaggggtacgtctgcaacgaatccgagggggaccggaaggaggacgcgccgatgacacgtcgtgatcggcacgaccaaggcatccgccgatgcaccggaggccgacgactataatgcccttgccatccccgagaaagtctcatatgaagctgctccctgagaggctgcctcctgcaagaaatgcggctactatgaca

SEQ ID NO: 112679 - DNA, 245 bp, Zea mays
  Clone ID: MRT4577_34253C.1
gttctcgcctcgtcgtccccaatcgtcgtctagagtttaccgatccttcttccacgacctggaccgttggtgccagggccggctcgcatactgtgcttgtactgcccccgccccgtcatggattcgtgccgagctcaccatcgaacatgttctgtttagagatatttcatgggttcatttcatgtttactaagctctttttattgaacagttccttttacttttacggtgacattaccactaaca

SEQ ID NO: 112680 - DNA, 797 bp, Zea mays
  Clone ID: MRT4577_34254C.1
gaggaggatgcttttcaggggcacgtcgaattgctcgctctacggagaggaggctacctgcattctctatattgagagagagagatgatataaacgctcctctatcgatttgaatactttaaataaccggttgaggagaactagaatatatacaatacattgaacgagctagcaaatacgtatgtacaaaaaataaaactagaaaacgtatataatatagatatttgagtatagaggacgtgatttagagaacgctgttggacagaaaggagatatagaggataaaatcttttagagcctactgtataagacggatatcgagaatgaatataaaggacggtgctggagacagccttagactgcagaaatggtaggcgaaagctcatgatgattgcatttcgagtattacaatctttgaagcaatgtctttctgaacaagatacagttgcttcttcattgcttgttagccggccatctgtcatgctcatggtcacttggatacacagtactacctccaccctttttaatttgacgctaaatagtgcaaaactgaactacaaaacatcgaataagaaaaatggagggagtacttgctatctactttcacagcatggcgtactactacaatgtacgcacatctgtgcaatagaaataattgcatacatgtcgaagtgtcgatgtaaataatgcgtatgagatggttctagccgtagagaaaaaatacatggcactaaaagttaacaatgcagctagttaaactggtgcacagacaacgaatcatattaacctttttatgt

SEQ ID NO: 112681 - DNA, 350 bp, Zea mays
  Clone ID: MRT4577_34255C.1
cccggctcgccccgcgtcctttcccgcgtccgccccccgttcgcgggggcgggcgctggcctctgccttctcggggcgcgggcggcccgcctggcgtcgtccgtgtcgccgcttgttcctcctcctggcgtgggggctcgttccgccgcttccttcggtgccttgctgggcgcgggtcctccgggctcctcgcggggggggcgtggtgcttgcgtcccttgctgcctgctctgcgctgcgccggtctcttcccttgccccttcttgctgcctctggctctgcttcttgtttgccgcgtctgcggcttccttgctgcccgctctctgctgccttcccccggcggtttcttc

SEQ ID NO: 112682 - DNA, 635 bp, Zea mays
  Clone ID: MRT4577_34256C.1
gctactcccgccgccgtccgccggagatcggacggccgcccttgccccgacgccgtgtctcccgagccagtgccgccgcctcgtcctcatcgccgtcgtcgccttcctcttcttccacccctagcttctccagaggcggccgagtcgccgagtcgccatggaggcctacaaggtctgggtgcggaagaaccgggacctcgtccgctccctcgagtccctcgccaacggggtcacatggatacttcctgagcgcttcgctaactccgagattgccccagaagcagtatatgcacttctgggcattgtaagttctgtcaaccagcatataattgagacaccaaatgatggtcactcactggcctccaaggaacaatctatcccatgggctcttgttgtatctatactcaaggatgtggaagcagttgttgaagttgccgcccagcactttgttggagatgatcgcaaatggggcttccttgctgttacagaagcagtgaaagcatgtgtcaggttagccgctttcagggagagtggctacaggatgctcttacaaggaggggaggtggaaaacgaagaggaggatgttcttgaagacaatcagggagtcaagactaatggagtgccagcaatctatc

SEQ ID NO: 112683 - DNA, 317 bp, Zea mays
  Clone ID: MRT4577_34257C.1
ggggggggaccttcaccattttttttttgtcagggcggggggtgggccctttggtttacggggttccattcagttcccgggggattaattccggtgggtgccgggaaccgggttttctttaaggagccaaatttgtgttggtggcaatttcacaaacaggatttggggacttttaattacccggctggggacaaacaatgggccggctggcttaagatgaaaacaaaacaagggtttaaagttgggcgggattggccaccattttttgtcccaggaagggccccattatattttttacagggggcatgcgccctttt

SEQ ID NO: 112684 - DNA, 287 bp, Zea mays
  Clone ID: MRT4577_34258C.1
agtacacgcgcttcgacagcgacgtgggcgagttccgcgcggtgaccgagctggggcggccctcagccgagtactataacaaacagaaggagtacatggagcagttgcgggccacggtggacacggcctgcaaacacgactacgagatctctgagagcttccttgttccgcggacagttgagcccaaggtgactgtgtacccttcaaagacgcagcccctggaacaccacaacctcctggtctgctctgtgagtgacttctaccctggcagcgttgaagtcagatgg

SEQ ID NO: 112685 - DNA, 677 bp, Zea mays
  Clone ID: MRT4577_34259C.1
cccggttcgacccagcgttcttgcacattggttctacaatgatgctgatgcatcggttgttgccatatatgtttatgacataaacaacagtgcaaatcaacttgaaccaaggcaaaaggagttcctattagctggtaacaacaatagggttcaacaagtatatggcagctcaattgagcaacactctagccaaaacatattcaacggattcttttcttagctactaagtgaggctttaggcatcaacacagtagcagcaaagaggctgcagagccaaaatgatcagagaggagagatcgtacatgtgaaaaatggccttcaattgttgaaaccgactttgacacaacaacaagaacaagcacaagctcaataccaagaagttcaatatagtgaacaacaacaaacatcttcccgatggaacggattggaggagaacttctgcacaatcaaggcaagagtaaacattgaaaatcctagtcgtgctgattcatacaacccacgtgctggaaggatttcaagtgtcaacagccagaagttccccatccttaacctcatccaaatgagtgctaccagagtaaacctataccagaatgctattctctcaccattctggaatgtcaatgctcatagtttggtctatatgattcaagggcaatctcgagttcaagtcgttagta

SEQ ID NO: 112686 - DNA, 711 bp, Zea mays
  unsure (1)..(711): unsure at all n locations
  Clone ID: MRT4577_3425C.1
ctcgaggccggccgggaaacgcccttgaccactgaaacgcccttggcgaccgccgccgctctactcccagttgccctgttcttcgccggacccttcgccggcgacaagcactcaccaacgaccaacacgattccaacatttgaaatccaactccaccatgaccggttgtcggcagtttccttctgatttccatttattcatggttttgttgcgatggggttattcaggggcagcttcactctcttggtgggaatgggatgtggtgtctatatagctcagaactacaatgtgccgaacgtcaagaagctattcaacacatatgtttttctggcaaagcacattgaggaaacctaccgtaagccgaagaaagacgatgattgatccttttacatttgttttccatgttatgcccttggaaagcaagtacagctgacgtaatacagaaaggtgctattttgaaatgaaggcatttttgtttatggtctagtttgaactccagtggtaaatgttagttctggaattcagttgctgtgatagtttttggtcgcgcgggcttttagatcatccccttttggcctttgctcgtgttcctgtgcctgggaaatgcactgaactttgtagtggataatctagcacatattagtgtgtttgtcaagttaactgaggatgngatgatgtgtttagttgaaaaaaaaaaaaaaaaaagcggcc

SEQ ID NO: 112687 - DNA, 190 bp, Zea mays
  Clone ID: MRT4577_34260C.1
agttaactatcaagatcgcgcgccccacacacctacaccactaccttcaaatactaaatcacccccttcaacacctaccacacctacacacgcaaccattatctcaatccacaacctacatcagtcaaccatccacatccactataccaacaccgcaaataacctagctgtaattaacttcactgcaaca

SEQ ID NO: 112688 - DNA, 264 bp, Zea mays
  Clone ID: MRT4577_34261C.1
ttttccgtctagcgagaccgataggcgaggcgagccaccgcggcggcggttgcagccattgtgtccattacgatcggtgccaatttcaagaccacgttcaatgtcccctgtacccctttcattcttcgcattaacggttataggtttacctttaccccttattatccacaatcttcattttaatttaactctatctttttgaatcgttataccatatatgtttctgttctttttaaaagtatgtaattcaatcttttttttatt

SEQ ID NO: 112689 - DNA, 179 bp, Zea mays
  Clone ID: MRT4577_34262C.1
cccacgcgtccgcccacgcgtccgcccacgcgtccgtcaacgcgttcgtccacgcgtccgcggacgcgtgcgcaagcgtcagcaccgtcggctgcctccgtgctatctatacgctgacgatacttccctacgccaggcacgccaagatgaatcttgacaggttccttatgaatctgaac

SEQ ID NO: 112690 - DNA, 213 bp, Zea mays
  Clone ID: MRT4577_34263C.1
tcgagcgttaggccaggaagtttgaggcacgtgaggacttgctcggcgctcgagaaggactaagaagacgtcggcgctgagttcgatgagggtgaagaaggcgacgaaggtgacgagtaatagatgcatatgctgatgacgcagcatcatgccagtgtgcttgtcctacccgtgatctgccgagagttactcctgctatcgtgttatgtgtgt

SEQ ID NO: 112691 - DNA, 152 bp, Zea mays
  Clone ID: MRT4577_34264C.1
cggaccctgggccggacccttggccggacccttggccggacccttggccgtggctaataacgcattgttccaattaagtctggcctggtcatgcatgcaataaataaagtgatgggtttccctgtttcaaaaaaaaaaaaaaaaaaaataag

SEQ ID NO: 112692 - DNA, 624 bp, Zea mays
  Clone ID: MRT4577_34265C.1
ctcggaggcatcgcacagcacgtggtcggcaagggcgtacttgccgaggacgaggaggaagaggcggcgccacttggagaaggatggcgtcgcaaggtcgaggacgacggggacgaggccgcggatgttgaggatgccgagagcctaggcatggagcgcagcgacgggatcggggtcggaaccgtcgcgacgcacgtccctacccggcgcgtcggcggctgggacttcgtcgtgctcgatctcgccgtcgtcggctgcgcaggcggtctcaaggcgttggcgagccacggcgagggcctgctcgtggcgggcgacgtcggcagcaagacggcgacgctcggcagcggcagcagccgcggcgtctgcgcgggtttggagagcggcggctgtctcagcagatcgacgctgggcgccgtcgttagcctcctgctggagtcggcggtcctcggcggcacgaagatcgtcggcagaacgacgggcgtcggcggcgcgacgagcgacgatgtcggcgtcgctgggagcgtcggcggccatgactggaagagggaagcggagggtgggctaggcgaggaacgtagccttctttgataccatgaagacgtgagagtttggttgagcgacagc

SEQ ID NO: 112693 - DNA, 219 bp, Zea mays
  Clone ID: MRT4577_34266C.1
tcttatgcttctactgttggatgttatctactgcgagttatttacatgtggttacaccgtcatcacagcgatggcaaagcttgtggcactaactgctctgcgcttatcccttcatggcaggctgccatgagatgtgttcggctacagcgttgagtatctcgaggctgccgctttggggtggggggcggggctagctctcttgcttcttcacgaactcgg

SEQ ID NO: 112694 - DNA, 2342 bp, Zea mays
  Clone ID: MRT4577_34267C.1
aattcggcacgaggcacctctcctgcaacgtgtccggcgcggacgacaggcatcgccgtcgccgtcacccgatggcctcggtgtccgtcgtgctgctacagcgctcctcctcgcgcgtccgaggatatatacggctccagcgcatcgccagctcttcagttacgttggttttggagggcgaggggcattggtggtggagcaacagccgcggccgcgacgagaggtttggcgcaagaacggtgcaccatatggcgggatcagtagagggggaaaacggcggcgtgccggcgggtggtcaagttgcgatggcgccgggcgtggtgaccggcggtgtggaggatgcctatggcgaggaccgcgcgaccgaggaccagactgtcacaccgtgggccgtctgcatcgcaagtggtcactccctgctgagggatccaaggcacaacaaagggctctctttcacggagaaagagcgggacacgcactacctgcgaggattattgcctccggtagtgctatctcaggacctccaggagaagaggatgttgcagaatgttaggcagttccaggtcccgttgcagcgctacactgcgctaatggaccttcaggagagaaatgagaggctattttacaagctcttgattgacaatgtcgaagaactgcttcctgttgtgtatacaccaacagtgggggaagcttgccagaagtatgggtcgatcttcagacgaccgcagggtttatacatcagcctcaaggagaagggaaggatcttggaggtactgaggaactggacagagaagagtattcaggttattgtggtcactgatggtgagcgcattttaggcctgggagatcttggttgccagggcatgggaattcctgtggggaagcttgcactgtatactgctcttggaggtgtacggccatccgcttgcttacctattaccattgatgtgggaacaaataatgaagacctactgaaggatgaattctacattggcttaaagcaaagaagagcaactggccaggaatactctgaatttctggatgagtttatggccgcagttaggcagaactatggacaaaaagttcttgtccagtttgaggactttgcaaaccacaatgcatttacacttcttgagaagtacaggacaaaccatcttgtatttaatgatgatatccagggcacggctgctgtagttcttgcagggattgttgctgctctgaagtctgttggtgggactctagctgatcatacattcttgttcttcggtgcaggagaggctggtacgggcattgctgaactagttgctctcgagatatccagacaggcaaatgtttcagtagaagaggctcgcaaaaagatctggctggttgattcaaagggactaattgtggcctcacgtgaagagactctccagccatttaagaagcgatatgcacatgagcatgaacctgtcaaagatcttttaggtgctgttaaggctatcagaccaactgcactcataggatcagctggtgtaggtcaaagtttcactaaagaggtgattgaggttatgtcttcgattaatgagagacccattgtccttgctctatcgaacccgacgtcacagtctgaatgtactgctgaacaagcatatacatggagtcaggggcgtgccatatttggcagtggaagcccatttgatccggtgaaatataatgacaagctgtttgtgcctgcccaggcaaacaatgcatacattttccctgggtttggtctaggggtggtgatctcaggagccgtccgggtgtcagacgatatggttcttgctgctgctgaagcactagcggaacaggtaaccccggagcatattgagaaaggcctgatctacccgcccttctccatcatcaggaagatttcagctaacatagctgcccatgtcgccgcaaaagcttatgatctcggaatggctacccagctccctcggccaaaagacctggtgaagtacgctgagagctgcatgtacagccccgtctaccgatcgtacaggtgatgtgagcggacagtgctggatgcacctgaggatatatatgcatacctgctatgcttgttgttcatgtcgtcactgtgacgagtccgctgctgatactgcacgtgcgtactctatgtatgtagctgtgtaataaagttcaggggatgtaaattgacactcctaccaagtatgctgatgtatgttctcatgcgtgtcggggtttcttatacatggtttgtgttagatttagtatgaagatgacctctattttatttgatacaaatcgaataaattgtaggtttatattaaaaaaaaaaaaaccaccggaggagc

SEQ ID NO: 112695 - DNA, 564 bp, Zea mays
  unsure (1)..(564): unsure at all n locations
  Clone ID: MRT4577_34268C.1
ttcaggttattgtggtcactgntggtgagcgcattttaggcctgggagatcttggttgccagggcatgggaattcctgtggggaagcttgcactgtatactgctcttggaggtgtacggccatccgctgtgagctttaacatgtgaatatacagttttaaattagtctatgtgagcatacagttttttattagcagtctcatgatgtaatattctcctccatgttgattcatagtgcttacctattaccattgatgtgggaacaaataatgaagacctactgaaggatgaattctacattggcttaaagcaaagaagagcaactggccaggaatactctgaatttctggatgagtttatggccgcagttaggcagaactatggacaaaaagttcttgtccagtttgaggactttgcaaaccacaatgcatttacacttcttgagaagtacaggacaaaccatcttgtatttaatgatgatatccagggcacggctgctgtagttcttgcagggattattgctgctctgaagtctgttggtgggactctagctgatcatacattc

SEQ ID NO: 112696 - DNA, 112 bp, Zea mays
  Clone ID: MRT4577_34269C.1
cccacgcgtccgcagaggaatctgcagttcaatcagtttcggttttcaggatgattcatgattcctgtgttcttattttccccagtctctgggagcaggatggctcagcttc

SEQ ID NO: 112697 - DNA, 767 bp, Zea mays
  Clone ID: MRT4577_3426C.1
cctcgacggcaacagaaggtcttcgccggactctacggctctacgcccactgaacacgcacttgagggctcacttgacccactgcacacgcccttggcgaccgccgccgctctactcccagttgccctgttcttcgccggacccttcgccggcgacaagcactcaccaacgaccaacacgttttgttgcgatggggttattcaggggcagcttcactctcttggtgggaatgggatgtggtgtctatatagctcagaactacaatgtgccgaacgtcaagaagctattcaacacatatgtttttctggcaaagcacattgaggaaacctaccgtaagccgaagaaagacgatgattgatccttttacatttggtttccatgttatgccctgggaaagcaagtacagctgagcgtaatacagaaaggtgcttttttgaaatggtgaaggcatttttgtttatggtctagtttgaactccagtggtaaatgttagttgtggaattcagttgctgtgatagtttttggtcgcatgggcttctagatcatccccttttggcctttgctcgtgttcctgtgcctgagaaatgcactgaactttgtagttgaactgttgaagtgcggccatggataatctagcacatattagtgtgtttgtcaagttaacttaggatgggatgatgtgtttagttgaatctagatttatctttgtttctttaaattgtttgttcttcgatttaccacgatggatgatgacatttgtatttgcg

SEQ ID NO: 112698 - DNA, 562 bp, Zea mays
  unsure (1)..(562): unsure at all n locations
  Clone ID: MRT4577_34270C.1
ggggcgtgccatatttggcagtggaagcccatttgatccggtgaaatataatgacaagctgtttgtgcctgcccaggcaaacaatgcnatacattttccctgggtttggtctaggggtggtgatctcaggagccgtccgggtgtcagacgatatggttcttgctgctggtaaacacaatctgcaagatttcaggaaggaggatcattcatttctgttcgacagctgtcactgattgattctgcgtctatttgtttgcggattggacagctgaagcactagcggaacaggaatggctacccagctccctcggccaaaagacctggtgaagtacgctgagagctgcatgtacagccccgtctaccgatcgtacaggtgatgtgagcggacagtgctggatgcacctgaggatatatatgcatacctgctatgcttgttgttcatgtcgtcactgtgacgagtccgctgctgatactgcacgtgcgtactctatgtatgtagctgtgtaataaagttcaggggatgtaaattgacactcctaccaagtatgctgatgtatgttct

SEQ ID NO: 112699 - DNA, 1752 bp, Zea mays
  Clone ID: MRT4577_34271C.1
cagggagaaaccagggtagatagcctaagaaaatagttggttgctgcttgcatgcacccaagtgggggggctgcaatcggcgtcgccctcgggtccaaacgcatccagatgtctcccaccgagtcagcacgagagatagcagctccaagggaaggcttcacgaaactaccgtcacacgaggatctcgggcctataaattgtcgacctcgtcgctggccgggagagcacaaacaacgctcatactcatagtcataaaccactcctgcactctcactcgattcacctctaccagcaactcgccacttcctccctgagaaattaaactgagaaatggcaccgcctcacagtcacagaagcttccgcggctggcagaacgcgagccacgtcgcgcttgtgcttgtgctggtgtccgtgctgttcctgagcaaggcacgtccctccgcgggcgccaggagcctgctggagctgtacaagccgccggccagcgcgctcctcacgtaccacaacggcgccgtgctgcagggccgcatcccggtgaccatcctctggtacggccgcttcgcgccggcgcagaaggccgtggtcaccgacttcctccagtcgctcaccaccaccgccacctcgccgacggcgccgccgtccccgtccgtgtcgcagtggtggggcaccatcgaccagctgtacctgtccaaggcgcggagcggcggcggcagcgacgacggcagcgcgcaggtggcgctcgtggggcaggccgccgacgaagggtgctcgctggggaagcgcctcgcgctgtcccagctcccgcagctggcggcgcgggccgggccggcggcgaagggcggggtcgcgctggtgctcaccgcgcaggacgtggccgtggacgggttctgcacgagccgctgcggcctgcacggctccgacgccggggccggggccgcctacgtctgggtcggcaacgccgaaacgcagtgccccgggcagtgcgcgtggccgttccaccagccgctgtacgggccccaggcgccggcgctcgtgccgccgagcggcgacgtcggcatggatggcatggtggtcaacatcgccagcatggtcgccggcgcggtcaccaacccgttccgcgacgggttctaccagggcgacaaggacgcgccgctagaggccgccaccgcctgcacgggggtctacggcagcggcgcctaccccggtttcgcaggcaacctggcggtggacggcaccacgggggcgagctacaatgccaatggtgccaacgggaggaagtacctgcttcccgctctgttcgaccctgcaacctctacgtgttcgactttggtttaacgcccaaggaaacagtcctgtcaactgtgtagtaacgctgtgtatatagtatgagtttgataaggagtgtactgtggttagtgttgatatctgcatcataatacaatataaaaaaacatatgtgtgtggtgcatgagggagcaatctggcctgaaaaaaactttaaaatcatgcgtctaaatattagcgacccttttggttcctaagtcaaaaatagcgtcgttgtaaggcaggccgctacctgtagcagattgtaaccttagcgtaactatatctcgagtagtgtagcagatcgagtctctcgagtgtggatagcttaaatttctgcctacctgaccagatcaaacaccctctgatcgcctcccgagcttttctgagatcgcaccgtccacttttgaagcaaatgatatttgtttg

SEQ ID NO: 112700 - DNA, 146 bp, Zea mays
  unsure (1)..(146): unsure at all n locations
  Clone ID: MRT4577_34272C.1
acccacgcgtccgaggatgagcacctgcacatccatactctacttcgaggttcacacanctatctctagcactgcagacacctgtcaaatctctacaaagacacactcacacatgctcaaagaccatacacctacagaggacacac

SEQ ID NO: 112701 - DNA, 153 bp, Zea mays
  Clone ID: MRT4577_34273C.1
actgaaaagaaaaatagcaaaatgactgcggctcagaaggctttggctaaaggcatcagtacttttcattccactcttgtcaactgtagccaaagccttctgagctgcagttgacaagagtggaatgaaaagtattgatactttttttggggt

SEQ ID NO: 112702 - DNA, 775 bp, Zea mays
  Clone ID: MRT4577_34274C.1
gggttgcccccagggtagtccttggccagtgtcaggggtcgcaccggacagtcccgtgcccctaggtcagcaagcctaagttcttttccttagggtttccatacctgatttccttctaactcgtgagcgtgttatagaatgacacctagcactagttgtgagtgtgaatatgcaccaacactacactagaattttttggtcaaactaatcatccacatcccctctttatagtacgactaaaataaaaatagaagacccaactctataccaagtgtccacaactccttcgacacttggaatatgaagaccttcatcttttgcttcgccctttttcagccgccgcttcaagttctcatctgagggattgttttcatcgttgcagcgcaacttcctgtaatgcggcctaacttaccatttgctctgcaaaacacatgttagtcacatataatcttatgttgtcattaatcactaaaaccaacaaggggcctagatgctttcacacacaccttttactatgcatttggtgctttggtttgctctctaacttggtttgtagagaaagtgcaacatagggccctgtttgaggagaaacgaagaagttggggatatactgagaaagaggtaactttatagtacttagtcagctggattatactctaatcatgtttgtctaagaaacaaaaaagtccttctaaagagttcaagtcaaatggagaaaggatggagaagaaaggactcactgccacctgtctgggtgcattggaccgtctatagc

SEQ ID NO: 112703 - DNA, 581 bp, Zea mays
  Clone ID: MRT4577_34275C.1
cttcaccaccatcccgaggttccgcctctacatgatcctctcctacaagctgcctctccggacgcggcgctgggcgaatctgctgctctgcggactcttctccaagttgtacaaggactccaaccgcaagtacaagtttgtgatgcatctcgttgacgtctacgggcccttcgccttcttcaaaggatgtcatgcatatatatggcgatgaagctttgacgacacgaacatggagcgcctgcggtcgacgatggtgatgcgcagccctgaagatgacatgttcaactacgatcccaagaccatcgactgggacgattatttttacagaatccacatacctggtgttctcaagtacgtctgcaagtgaagctggggaaaactctgttctgtatcaggcacaccttgctccttcacctaatcaccttgttcatatatgcgtgggggaaaactcttttcttttttttcctttttttttcttttttgcccctactggctgtaatcaatcccaaaaacatgtcatccattggcagaacttgttaaacgtatcggtcaactcaagccccatatatggaatgttaccc

SEQ ID NO: 112704 - DNA, 295 bp, Zea mays
  Clone ID: MRT4577_34276C.1
ggctcgtgcacgtgccgggcagcctgtgcctagcggtgacccactgcatcctgcccaacaaggaccgcgacaccgagaccaacgaaagcaccataaagggctgcatcaacagcgtgtgctggaagtggatcacggtcaaagagctccggaggtggcagcaccccgccggagccaccatggacttgcgtcactgcatgctcggcatgacggtcacggcgtggaggaactgcatgggccaactcatcaagtacgaggaggctctgggggctggctcagagtagtgcctggcttgtct

SEQ ID NO: 112705 - DNA, 551 bp, Zea mays
  unsure (1)..(551): unsure at all n locations
  Clone ID: MRT4577_34277C.1
ttttttttttttnnnnnnnncgacgaattgtttgttcattcttgtcatgatttcatgacgacgtgacgagatatgcagacacgcaggctcaacaaccaaacatgcagcaagccggcggcattaagcgaggccagcgatggcgaggctgccaccggcggtagcacgcttgacgaatcggcccttcatccgtggccgcttctcggcgttgagcttgcgcacctcgtaccgtatcttcttggagaagagccgcgtcctccgcttctcccggtaccgcgacacccgggcctcccggccgccgtccatccccagcctaggcgtgcccggcaggtcctcgccgccgtggccgaccactcctcccacaacccacatgttcgtgtagtcgtggggccacctggtgtcgagcttgacgtgtggtcgctcaccgccaccggtccacggcgagctcccccagctctggatgatggcctcgtagttgagggtgagcgagaggctcgtctgcaagaactgggcgtcggctcccgtgtcgctgctggcggctctctcgtccgtcg

SEQ ID NO: 112706 - DNA, 338 bp, Zea mays
  Clone ID: MRT4577_34278C.1
gttgagattgcacagggttcatgcggtgtctgtttagacgacgtcccagaacttaccctggcctagagagcttctgcttcatagacaaagccaatatccttgccctattctcaacgcttgctatggatgccaagaagttcaaagaagagagagaggcctactggaatggccttaaagtgagattggaacatgctgcacaggcggacactattgagggttttgtagctgctaatcctgccgcgaaaaacactgcaccgaagttcctggatgcgccgagagcagatgatttaagcctggaaaaggtttcagatgacccatttggtgtttatccagggccc

SEQ ID NO: 112707 - DNA, 163 bp, Zea mays
  Clone ID: MRT4577_3427C.1
accggaccggcaacaacggcccggcccacgcgccctcaattcagcggacggccacggacaagaggggagggtcaaccaaaaaaagcgggcgaacgccacgcgcccaacccagagcaccaggggaccggacgagcgccaaggaagagacacggaggacgcacac

SEQ ID NO: 112708 - DNA, 320 bp, Zea mays
  unsure (1)..(320): unsure at all n locations
  Clone ID: MRT4577_34280C.1
tttcttattaatgtgcccattataactatatcttttcttttcattcttcaataattcaacattgtcccattttggtcttgtcagggcccttctatcctctcttntctcntctcttatataaaagggggttgttgggtnccactacatacttncatctaaaaaaacacccnnnttctttataacccctcntcctccctcaaaancttcttttttcaataccataatctanttatttttttttcacccaaaaaaaaaaaaaaaaaaaaancctctttcaaaaaaaaaaaaaccacggggggaaaaaaanacccccttttttt

SEQ ID NO: 112709 - DNA, 2226 bp, Zea mays
  Clone ID: MRT4577_34281C.1
cgatgcttctgagaaaacatagggcattttggagcaaaattccttttcttttgtgcacaacattttcaaattctttctaaaatcacgtctgactgtttttaatgctgttggggctatgaaattggcatacagtcaacaacaataacaaagccttttagtaccaatcaagttgggttagtctagaggtgaaacccccccaagtcaaggatcagacacgtggatagctgttttccatgtcaatttcagccttcccctgcttctttccacatgtccaaaccatctcaatcggtgttgaacaagcttttcttcaattggtgctacccctagcctatcatgtatatcatagttttgaattcgttctcttcctatatggcttcaaatccaatgtaactacacatttccacaatactttatttgttgagaatttttttctggacatactatgtggcatggtgcacaatgtttgtctagtcgccatcttataaaacttgcattttagcttctacaagaccctcttgtcacctagaacgctagatgctcaccactttattcactccgctttgattctatggctaacatcttcatcaatatctacgcctctctgtatcattgattttaaacactgaaaagtattcattcttgggcactacttgacctaactagcatctccttcctcatgtgtagtagtgtcgaagtcacatcttatatatttagttttagttctattgagtctaagaggttgtttggcatcgctctagagcaaaactccgaaggggagctggccagagctagccaaacaatgtaactccaaacttgcaaacttcatagagttttgagagctacaatacaaacttttagagtacatcttttgctgctctaaaatccttaaaaaacaacctagatatggagtttgaaggtatttacccgccactaccactagttatgagaaagcaatctagactttggagcagaactgctccatccagagttttggagcagagatgctctagagtggagcggagtcatgctaaacaccccctaactctagggtcttttgctgcaactccaatttcctatttgctcttgcttactttcatcaactagcattacatgattacatcgtccgcaaaaagcatacaccaagagatatcctcttgtatgtcacttgtgacctcatccatcaccaaggcaaaatggtaaggctcaatgatgacccttgatgtagtcctattctaatcggaaagtcattcatgtctacatgacttgtcccatcattgttgtacatgttcttaatgagtctaattcgtgagaactttatgtttgtccaaagtcgatcacataacattccttggtattttgtcataagctttctccaagttaatgaaaaccatgtgtagattctttttttggtccatgtaatgctccattacttgtcttattaagaaaatggcttacatggttgacctttcgtgcatgaaaccaatttggttcatagagatcctcattatttctctcagatggtactcgataactctctcccattgcttcatgtaatcttttaacatttgttaagtttgctcattgttatctaagaatctaggttccacatctgaattataataacttctgcagtcttagaattttattagttatatatggttatgaattcctataccggtgttcatagaatcatacttgaagtttaataacattgctctatgcaactttgcaggctgaagccccgcttacagttactggattgttgaattcgttgggtcttgagaagtatattgttctctttcaggctgaggaggtggatatggctgcattgaggcaaatgggggagagtgacctcaaagacatgggggtacctatgggcccgaggaagaagattctccttgcagttggccctcagtcgaaacaacggcaaatatgagcaacatggtgtgggacttgcgagcatttgttggcaactgaaaatattggtgcaagaacgccagatagcagatattgtatatcaatccatattgtctgtctcaatccactcttttgttgctgatggcgttgtttcgtgccgtagttgacaccatgtaaagtctattcagccagctgttaatctaggttctatcattcagtctgcctgcccactgttattgtttcgaaacgggtggatacgtgtggtttactcgtgacgattagtttggaatggatgctacgttcgattcc

SEQ ID NO: 112710 - DNA, 327 bp, Zea mays
  Clone ID: MRT4577_34282C.1
ggtacctatatgtcttaggagcctatattttacgtcacctttgatcatactagtcgggagggtctacatcagaatatgcgaacaccaggttgacttgtactatgtggtttaagatgatgatgcgtgattgtcaacgggtagcatctcatgtcgagttgtatattgatcaacgcgtgagttattcgttcgtgcaaccctggcggttaacttgtaatgtgtaagtttcgagcacaatgatagcgatctatggttgatgtgaaggccattcagtctcgtgctaattgactatgatcgcacaaggactaattctagttcttgaatgattga

SEQ ID NO: 112711 - DNA, 168 bp, Zea mays
  Clone ID: MRT4577_34283C.1
attcatatcattttgactagatgtccactcagatcaggcagatgcatgagagttgggggctggccacccaaggaaccagaacatttgccattatggacgccctatttattcttaccatccaatgatgcctctctttcctatcaccaaatataattcatctcaatattc

SEQ ID NO: 112712 - DNA, 489 bp, Zea mays
  unsure (1)..(489): unsure at all n locations
  Clone ID: MRT4577_34284C.1
gtgtgggttnnnccgattgggtacctcgaaggccggccgggacncttcacaaaaggcggtnggaagagagagcgtttttcccagaacaaggatccttcctcagcagaggtgatccaagccacaatgtgggatctcgccatgactcgatgcacaggcggccgacacaccgctgcgaaaggagaatgcctgacaggaagaatcgaatctctgagcttgcgccccggccattcaacaccaagttgtcaagcaaaaagactctcaggagtcatctagctcgagacacgcaatgcgaaaaggagggctcttgagattgatactggcaactactcatgttaaagtgaagctgttacccgcaagacccgtatcctcgaggaggtctacaatgcatcaaacaatgcaggtgcgcacgacccaaacccttgtgaacattgccattgcctaagttgatggtgccgcgttcaagaatggggtcctcactcactatggagt

SEQ ID NO: 112713 - DNA, 225 bp, Zea mays
  Clone ID: MRT4577_34285C.1
cggatttggctcggaaggccggaacgttttgttcagtctatgatggctacctctgaacgaatggaaaaaagaaaaaaagaaacatcgtggtgtctgtgccatctgatggagacacaaacgccgaccatcactccacacgtaaaacaaggtttctgtgagagttgacagaaggacggaaacttttttttctctgatggagttttagatgttaatcgccagtcttat

SEQ ID NO: 112714 - DNA, 393 bp, Zea mays
  Clone ID: MRT4577_34286C.1
cacggtagggcctatccctttaatcaaacaaccaaaaccaaccaaaaaagctccgagcatggcatattcagcataaaggtttgtgttcgggggggaaaactaaataaaaaatttctgggtgcgcggattacgaacaacaccccccccctgacgggagaaaggggaaacccctttttttttttttaccggctttccccggaaaaactggttaaaaccctttttgtcttggccccccccgccaaacccccaaagaaaaaaacccccccccttagatgccccccggggcctcgggaaaattggtttccccaatttttaaaaaaacttccccccttcaaaaaaagaaaaaaaaaccattgcccctttggggaaaaaatggttttccaaaaccccccc

SEQ ID NO: 112715 - DNA, 582 bp, Zea mays
  Clone ID: MRT4577_34287C.1
acatcgccgcgcagtgcaatccaggaccgagtagggggcacccggcaccacaccacgactacatcaacctactcgtgcccgaacttgcgtttgcaacgacgtaaaattcggcagcctcaacccatcacacacacgcgcaacacacgtaccgtcgcaccgtacgtgcgcgcagctacacgtacgtacacacgcgaggcaatcagctggcggtactcccgcgcttccaacgtacccggggacaccccgtaccgtactcgcgctgctcgcgccacgtacgcggacgtacgggtgagaacccagaacgcgaacagggggactgcaggtgcaggaacgcgtaacgaacgagagcgttgttgttgatattcaaagtttaattgacactcacgacgatcatctcgagattattacggctaagtagatgaaggagtgtcacaacgatcttcattaagcagagaattatagtaccatgatcctaataactataactataactagtagaaacgtgaacgagttaactaatagtaaaaacgtgaacaagttaactagtagtaaaaacgtaaacgagttgttgttgctcctgga

SEQ ID NO: 112716 - DNA, 442 bp, Zea mays
  Clone ID: MRT4577_34288C.1
gaaaagggtttcaaaatgagtaaatcaattggtaatgtagtggacccagagaaaatcattgttggtggcaaaaaccatagggaagaacctggctatggagcagatgttctccgtctatgggtttctagtgttgattacactacagatgtgttgattggcccacaaatcttgcgccagatgtctgacatgtatagaaaactacgaggcacgatgcgatttcttttgtcgaatctccatgattggaagccggataattctgtgccgtacaatgatctgccaaaaatcgacaagtatgcacttttccatttggagactgtcatgacttccatgaaggataggtatgaaagttatcaatactataaagtataccagattcttcaaagatatgctactgctggtttgttcaattgctatttggatgctgcaaaggatcacctttatg

SEQ ID NO: 112717 - DNA, 590 bp, Zea mays
  unsure (1)..(590): unsure at all n locations
  Clone ID: MRT4577_34289C.1
acctcaagtcgcttgttatctgctcagctcaagtaaaaattgtggcaagatcgatgacaactatcttaatcttagagctgcttaatcttgtcttgcaaaccctgagcacatcgagttattgtaaatattgaactttgttggctttacctgcagaggcaacaatcagggtcaaataataacttgtactattgtatcatctgcgtctccgtgcctgagcctgacgccgccttcgcgacctgaatgtacgcggcgccatgcctcgccttccacagcatccggtagaccgacgcgtccgcgtaccggtggaagtagtcgacgaccttgggcagtgtgacctcttccacctgggccaaggtgacgcctgcgtgcgcgcgacggtgctcgtcatcgctgctgtggtggctcaccaccacggctgatgatgcgctgtcgtcgtccgcagccggacgctggttctgtgaagagccagcgtgcggcgcaaacagcaggccgactgtcaggtactgcagggagccctcatcctgcggacaggaatcgcctncctctccctgcaacgcaacctggcactgcaggtgcactccgatgaccga

SEQ ID NO: 112718 - DNA, 131 bp, Zea mays
  Clone ID: MRT4577_3428C.1
ctgcaacgcaaagcagcttcctttcgcctgctgacaaggactagtcgagcggcgagctaggaggctgaggatggtccgcggccggtgcgtgaggtacgggtgcgtgcagagctcgctgagctacctcttcg

SEQ ID NO: 112719 - DNA, 1122 bp, Zea mays
  Clone ID: MRT4577_34290C.1
agagctcccttcctccctcgcccgcgactctctatggcgcctagcccctgccggcctccttgttgctcggcacccagccccagccccagctcgcccagccccatctcctctatcctccaacccagctcgccctgctgtcctccctgtagatggtgtgctccacctccctaccatgtcgccctacctttcctgcagcaagtatgccgttcttgcttccccatggcgccaaagtcaccagccctctcccatggacgcccctcccttccctgcagcaggctagcgcccctctgctcttttttccccatggctgcgcacctatctgtagcagcccctcgctgccggacatcctcctgtagcctcgcgccatccgcacccgtatggtgtttgacaaaatgcccaagtggatttccatgtagtggacagtcctattagcgtcgtcggatgtttgatgctttgcgcagcccatccgcgacaccatcgaccatcggtgaggattcgttcttgctttgtcgtttcatcgatcgacatctatttgctaatgtgaattgtgtttatgtgcctatgtgtgttgaggagcgaaatccgtgaaatctaggtgaagaagagacagagcacgtcgtcgccatggttgcagctttgcttttgtcgtcgtggagcctccaccagcgccgtgcagcaccaccgtcgttaattgcagccaccgtcgacgtgcctcgcgctacaccaatgcgatgaaatgttttagttgtgtgcgataatatggttgccgttcgagtggaaagtagaattaatctatatatatgtgattacaaagtgccaagcacatgataattataggagtaaattgaatatttgctgtttggacttgctgtttggactgtgttcagttttagtatgcaggtagtttagtgaagtaaatcatgttttccgtgaaagtgttatatataaaagttgtagataacttctttatcttgcttgtgctaaaatttcatgactataggtcttgtagtttttgaagttatgatttttccaagtccagtttcagaatctgtctaaattctgtacaggtttcgaaaattggattgtttggctaagttaaaatgagaatcagacattagcaat

SEQ ID NO: 112720 - DNA, 176 bp, Zea mays
  Clone ID: MRT4577_34291C.1
agcggacgcgtgggcggacgcgtgggatcaaagctatgttatcgggttcagaggcagcttacatatcctatctaaacaactcattagcaaatagttcaagtgtgcaaacactgactatgaaggtgttactatggaggtatttgagatggctctaggttctagatccataatataat

SEQ ID NO: 112721 - DNA, 422 bp, Zea mays
  Clone ID: MRT4577_34292C.1
gccggccgggttgcaatccttttcccaatcccacacctatggcgatcgtcggcggcggcgggagctggagcatccacggccgcgctgatgtcacatcccgcgtgccaccgcgccggcgtcgtgcaccgtgacctgaagcctgagaacctgctcatctccgaagacggggtgctcaaagtcgccgattttggtcaggttaacatctctgaaccttaattagcctcaattcgtcggtcgaactggtgtctttagtcagtatgtggcttgggaaggcttgtagatttgaagtaattagtgtttgcatgtgaatcatctgttttcactcagcagtagtgacattgtttcactggtatatctgttgataattagtggtgggaataatgttaagttatctggaaaaaaaaaaaaaaaaaaggccccta

SEQ ID NO: 112722 - DNA, 291 bp, Zea mays
  Clone ID: MRT4577_34293C.1
tgaacccatcgttctgcccaatgtatccatgccaactcaagaccatcttcgccgtgacataaagttcttgcatgatgctctcctccacccacatacaatgcatccatacaaaccggaaaactgttatgagcatggcaagaggtctgccatggtccttttggactgcaagcaattcacaaagcactatgacctggaacaggagttcttgcctcaaaacccatccatgttgcacctgtggtgtcaagtagaggtgttagaccaggttggcgatccaccttgcataccaccaga

SEQ ID NO: 112723 - DNA, 444 bp, Zea mays
  Clone ID: MRT4577_34294C.1
aaaccgaacataatcccgtttaaagttttaaacctttttttaacgggttccataaaaaaagggggggggtttttaccgcctgaaactgttcccaaataaaattttggggtcgaagttttcttttttgggtcccaagttagggattggggggcccttccccggggggttttttctttgtcggggggggtggtgcccccccaattgttttgcccataaattttacccaactccaattggggttttccccctccccaaaagccccccccaaaagggcccaagatgtcctttcccaaaagtaacccaaatgttttttggtttacgttaaaactttagggttggggggggtttctcaaggttggtaaaattaaggggggggcccttcttcattttacaaaggttcccatggagcccacttttagctttggtttggcccttccccttttt

SEQ ID NO: 112724 - DNA, 416 bp, Zea mays
  Clone ID: MRT4577_34295C.1
ggaaacggggcccgccgatgggcttgtttttttgggccggaggcctaacacataccaaccaactggaaagtcccttggggacttgttgggggggttttttcccgtactttcctttaaagttgcaagtaaaggaaaattcagggccgtttaaattgttctaaaagtagactgggaaactcaaatgactgggttacaaaatgccttttcacattttccgaagggaaagattttttacacttttttcccccaaggaaaaaaacagggggttatttactgggcggggtggggggggacgtttttacacttggattgagcgggggggcccacacccgtccgggggggccggatttaagcgttgtttccgtaggaccccaacttgggggggctggtttttaaaacctactggggggaggggg

SEQ ID NO: 112725 - DNA, 468 bp, Zea mays
  Clone ID: MRT4577_34296C.1
gacactgcgcgtgctacaaggcaacggccaacacggagctgctgatggacctgcacggcgctgacattacgccatgccgcaaacgaccggctgttcgccgagtgcactgagcatattgcagcgtatacccgcgctgatgggcgggtcgcacctcttcgccggtccacggcctgttggtcccctacgaggatgcccaccaacagccagcacactccccgagcaagatcaacgaggcgagtggatctacggatggacgaggctgcgctaggctctggctctgtataccactgaaagagcacttctgatggacggagtggccgatacttattgcaggcaacgacagcgctgatcgatcgactgaaactgattcccatcgtaacaagaaacagcagatgaatcatggatagatgctaatctgggatgaggacactgtcattgctatcaacgcatggagcaattctgctgaac

SEQ ID NO: 112726 - DNA, 664 bp, Zea mays
  unsure (1)..(664): unsure at all n locations
  Clone ID: MRT4577_34297C.1
tgggaccctcgaggccggccggggaccgcgcttcagaattttcagaagagagcagaccgccagcgaagcacacaagcagcgtcgtcagggcgtgaaggcaccaccgaatctcgggagcagcggcgatggcgagattcaacccatacgagaacaacggcggcacgtgcttggccgtcgccggcgccgactactgcgtcgtcgccgccgacacccgcctctccatcggttacagcatcctgtcccgcgaccactctaaaatctctcagctgtcagacaaatgtgttttggcttcatctgggtttcaaggtgatatcaaagctttgcagaaggctctggctgctaaggaattaatctatgaacacaataataacaagaagatgagctgcccagcaatggctcaacttctgtcaaacacactctactacaagagattcttcccatactacgctttcaatgtgttggccggactggacacccaaggtaaaggatgtgtctttacatacgatgctgttgggtcttatgagaggacaggctatagtgctcaggggacaggttcagcgttgatgatgcctgttctttgacaccagttgaaatccccctagtcctctcctactgccagctncggatgcagtgacacccttgtctggatctgatgcggntgatc

SEQ ID NO: 112727 - DNA, 3041 bp, Zea mays
  Clone ID: MRT4577_34298C.1
atgcggatgacgtctgtaaaatttcgcaacctctactttaccaccaaataaccatgctctatcatatcataaagtattgtcatgtgtcaacacagttttttactagaataattcgtacggtaatacgatgctacgacaagtttttactaatttcggcgtttttggattatttacacttaacatccagtcccctataatactctaatctttctttccataccttctacaccacacataatgatttacagaaatatacttaaggattaaagtgaacaccgcctggatggctcaccagtctggggaatcaaattcacgaagttcctactggacatgtttctatactactgaaactaaccgtcgcacaagcccaccccgactttagatcgtaggggggatagcatcacttggacacggctaaactcgtgggattgatgcaatgtgaaccgagttcagcagtggtatttgttatacctattcatcgaatgtttcttctcaaccctccttatgcttttgaaccaaaatcagtgctccattatgggtcattgtagataagtttttgtacattcatggagccctgctcctttgcctgatcaacatttccgtagtcgcttacacttctggctgtgtaacggcagttggtccctaatcacgaccttcgcgaagttttaaatcgctattgaggcagcttgacagttgtccaacttttccctcatttggggctgacaacaaagccccctggaaacaaggccttccgcagctaggactcgagctgctcttgcggggacctcgctccgtcccaactgacgtcatagcgggaactgtaggatacttgaggcatgctctctgcgccaactatgtttaccacagtcttcgcccggtgtgtcttagtcatgcatgccatttcccctcaagtagccccctcggacacatcaaatcttttgctctctgcacagacaaacgcccgtggtacttcaaccttgctcgacggtgaacatccggtttcaacccatccctctccatccttggcttgatgaaactgatcacagccctcacagactcgtgcctttgttttgcgtgcctctttgtgcatatccatatattgtagttactaaactaagtacactgtattcgtgtggacacatttgagagaaactccataccacccatctgttgtgagacaacacatcatcttagggtcattttctgtgaatctactttactcagttgctgaatatagctgtttttctttgtgaaatcagagaggacctcataagctgtttgaagcttgttgaatgattcacaagccaattgattccccatatttttatcaggaccgtacaagcaggaccattctaagattctctttttgatacctctcgttatcaatgcttttattacgaggtacacccaaagcttcggaaacgtctgacgcatccattatcctcttaatctcatccaatgaagtagaatcagatttcactattttactaggaggtacctctttttgtacatgtaatacatcttggatgggtgctgagcagtatggcttcgcgcaagacacggtctcaggttcactgtcaggaactgatgggaattcacaactacgatagaactcatccataactggatcagaatccttcatgtcttcaaactggctttcttcagtgcttccttcgtatccttgccctaacttattaagaagatcatttgtcaagaaagaaaggtttagtgtcaagaagactccgagccacccaacacgaacagccacagaataaacagcatatgacgtcaaaacaggtatcacatatcgagcatgtttcaaagagcacatacaacctccagcaactagaagcattcctgtaatccagaagtagccatacatccacataatgaatatcccaaacagcccaacaatgacaaggccaggtgtatagcccatatagtgaacaactgccgcagcagcccccaggctaagaagcgcgtagagggcgcacgccggcgaggtcatgcacacgaagaagctccagaggatgacgaagacggcggcagggccgaggctcgccaccgccagcaccccgcgcgccgtacacccgcgccattgccgcagcgcggcgagcgcgaggcgcgaggaggtggcgcaggcccgggacacggcgggccagtgcggatcgaccaggaaggcgaggcgctccctgctgccgcacgccgccgtgtgcgcccacgctaggatgtgcttctgggacaacacccacatccacgcctgcttccacagccccaaatcctccatggactggaggccgcacgaaatgtcgaattccaataaagaaatgctcaatccagagaccgcgagagccccattccccccgactgaattcaaaaaattaacatcctcgagaaccgaagcagctgcttgagtgcaagaacctgctttcccccaaaccaatccaagagctccaagaagagggataagcgccgcaaccagctcaagaactagccaagaaccaccgctccccagcccgggtcagagtcagacacgcccgggcacaaaaccggatcgagccctaaacccacttgccgccacttcagctgaattggccgggaacggcaggagctccctggaagccgctctcccgctttaggggccaagcaagaaacgacgagaaacccccggggagcctcagaaaggcgccatctttcaaggggggctgcaggccgccgacacctgcggatggatctcgcgccggtgagtcggcgagggtggggggtaaaatagacgggaatccgaagctttggcgcaggcggcgtcgctctcttttgctggtgcttcgctcgctttatgctgcgctcggcggcttggctcgtgacaaaagagggattccggtggatttaaaaggggaaagagaagacgaaggagagatcttgcaaaagatggcagggagaggaggaagatgaggatagacaggatagggctgcaagtaacttaggagagaggacagaggagacaccgttggttgctactgtcgtctcgcagcccggccggc

SEQ ID NO: 112728 - DNA, 358 bp, Zea mays
  Clone ID: MRT4577_34299C.1
ctactgtgggcggggactgagggacttcgttcttttttctttttttgttttttatgtggtaaataattgcctcctagccgtataagttgtacgtttacagatttcacacttcaatactagaacttggacatagattgtattaaaaagatgcgtttgctgattgaacaaactaacagaaagtgcaatgagctctatgaccctatttaagaatatcattctatgtaaggctatcaggctaactttatctttcatgaaatcgctagagaggtttttctatctaaggggaactttccgtttacaacttgattgtatctatgggttataattaagatctgacattttacagattcccccgctt

SEQ ID NO: 112729 - DNA, 745 bp, Zea mays
  Clone ID: MRT4577_3429C.1
gccaagaacaaaggcacacgacagatgagtaattcagactgaagttaagcagcgcaccaagctctgggcaacctaagctcagaacttcatatgagaatgaagcaccagatggcacaagccatatataggatacaggagtagcgcgctgtacatacccaaaccaaactgtacagtaggcaggaaagcggcaagcccttatactacctacacgcgatccattcaggcctgggatgggagtctcacactcacgatcttggtaggcctcgcctgggaggtggacgacgacgtgccatggtcaggacgatgtcctcctactcgcccatgggaaaccaaccaggagtaccattccgtcggcgatgctgctgctgccgccgcctcaccccggggcggcgcggggcgaccggacgggccagagcggcagcctccagaccgacgacggtcgcttccgccgcggcggcttcggcagcgcgccggccgcggcctccttctccgagctcagcatgttccacatcacctgcacgtcctggtacccgcaggtctgcacgtcccggtggaggctcaggacgccaccacactcgcccttgcggacgcgcgcgcgcgcggcggcgacggcgacggcgagccaggcgcggcgcacggacgcgaccaccctcgcgcgccaccaggccatgacgcgcgtcccgatctgctgatgctgctggtggtggcgccgccgcctacccgccggcgcacggctcggctggcc

SEQ ID NO: 112730 - DNA, 405 bp, Zea mays
  unsure (1)..(405): unsure at all n locations
  Clone ID: MRT4577_342C.1
aagggaagagggttctaaagataagatggaatcaatctcagaaaaaccacttgcccagggaaacccaacacaaaacccggaccaacttggatcatatggggggggggggggggggccttatatatattacatgataagaggaactggatcaaaactcggcagctagcaggggcctagtgacaaaacctataaatttattctttttttttcatggccaacaacaacaaggacacatgcccccacactctagtcaggtctgcagctgatgaatggcaactgcatgcaaaaacagccgtccatttgacgggacgctttcactgatcttttatgccccaccccacatgcattttaaatggctgggnccggagaggttgcttttgcaacaaccctgtgtggtccccgccc

SEQ ID NO: 112731 - DNA, 879 bp, Zea mays
  Clone ID: MRT4577_34300C.1
cctcgaggccggccgggccgggagacccttccattcccagttccctctgcgccccgtaaaccctagccgcgattcatggcccgcaagcgccgcgcgccttcgcctcctccgcctccgcaggaggagtcgtcctctgaggaatctggctccgaagagttggaggagcctcctcgcctccccgagctccgtagtcccccgcaggccgcggccaacaacgccgactcgtcggaggcggacacggactccgacaccgacgctcaagctttccagatgcgccaggtgccccgctccctcactaagcatacgcatccagttccccagccagaatccgatcccgaagaggaggagggcgagtcatcggagtcggagcatgagaaccctgtgcctgtggttcagaagaaggctgcggcggcggccgtgttgtccaaggcagagcaggaaaggaagagacccccctcggatcctgctcctaccgggaaggcaaaaaagatgaaggctgtggctacccctcttgccaaggcgaagaagggcaaggccgagctagagaagccggcgcctgaggccactccagcaggaaatgcaaagaagggcaaagctgagctagagaagccgacgtttgatgccattccagcaggaaaggcgaagaagggcaaggccaaggaggcagctcctgaggccacgccctcaggcaagggggaagaaggatggggacaaactagagaagtcagcagcgctagatccctcacattcagacagcaagtctgagaagcctgtgcgccccacatggggggaaagatgatgagatgaagattttggaggcccttgctgcgcatgtcaagcgtgagggtgagctgccaaagactgatttacttcttgcta

SEQ ID NO: 112732 - DNA, 204 bp, Zea mays
  Clone ID: MRT4577_34301C.1
ctagcgagcgggcgccccggcgaggcgattgttgtccgctccgaccaggcggagccgctgccaccggcgcccgtggcgtccgtgaggccgctgcagatcgaggacaccgcccgcctgaacgcgggggagccgacgtcggcgctgttgcgcacgcttgccgggctgcaggcgctgtccgagggcccgctcgtggacgccgtcacc

SEQ ID NO: 112733 - DNA, 414 bp, Zea mays
  Clone ID: MRT4577_34302C.1
attttgcaatctatgttcttgcgatgtgtaatcttttctctgcaactggtatggttcggtggtcgcatttagttgggagtatagaaaatatgattccattattcgcaagaaatgctacatatgcctgttgataggatagtatccagattaaattggaatttatgtccttcggggcccattctatatcttcaatgtcttatgtgcactacatatgtgcaaataatgatatgttctagtcctccagagattctacatggtaaagccctgtccgaaggagatgaaatgcgatgttgaggtgagctcaaatttaccatacttcctctgagatcctgcaatgggcccttttgtttcagcttttttcggacgagtttttctgataatctggctgtggggagaatctgagtatcgtgagga

SEQ ID NO: 112734 - DNA, 454 bp, Zea mays
  Clone ID: MRT4577_34303C.1
agacggggaaccaaaaacatcccccaaacttgggataacacaaaagaggggaccatgggggaaacaatgggacacttcggtacaacgaaggcaaggccccctcagggacaaaatgggggggaaagccccacgttattgggcacagggcccggggggttcagcaggaaacacccaggactgggaaaacacccgggggggcccgggcaaaacatctgaaaacccacaccatctcatccccggactcatctgggggcccaaaaacggcttcttgcccctctacttccccaggttctgggcctttttttcccaccactttcttttccacaggccatggggataaaacatctcctgaacaaagcccagcttaaactttaactaggggcaaagacatccccgggccaaacccctggagtctgacagcgctttttttgggggcccgggttaaattggcaaa

SEQ ID NO: 112735 - DNA, 2043 bp, Zea mays
  Clone ID: MRT4577_34304C.1
ccggccggggtgcccgtctgctcctcctctctccctcctgctcctcgctgcgctctcttccccgcacacttatctttccagctcatttgtgtccgtccctctcctcgacacgcacatcttccattgctcgcttgcttcctcgtgtcgtctagctctatccgattccaacacagctacctataaatacatctctctctctctctctcccgagcagagctaggcagagggcagaccattgttggagctcggccgagcagagcacgcacagtgtgattgtgtgtgtgtgtgtctgacatggcgtcgctctggctagcgagagcgtcgtcacagctggcgcgccgtgccgccgccaggaggcctcctccgcgtcctgggcgccacggctccggccaacccaccagttcgtggttcttgggctcggtgccgcaggcggcccttgggtcaccagcgctggacacaagccgccggggcttctgctccgtccggcgcttcgcaggggagagcagcgctgctgctgctgcggcggctgtcgtcgacgaggagccggagagcgggttcgcagccggcgatcagcaggcagttgactttccaggagggaaagtatcctttgtggccgaaatgaacttccttccagaatcgacgagggaaaggatcaactgctaccgcgtgcttgacgacgacggcagaacgatatcaggaagtagattccaagaggtcagtcgggagctggctctgaagatgtacagcgagatggtgacgctccagatcatggataccatcttctacgaggctcagaggcagggcacgatctcgttctacctcacttccaacggcgaggaagcgatcaacatagcctctgctgctgcgctcagtatggatgacattgtgctgcctcagtacagggaacctggtgttcttctatggcgtggcttcactctgcaggagtttgcaaaccagtgctttgggaacaagctggactatggtaaagggaggcagatgcccattcactatgggtcgaaccgtctgaactatttcacagtctcgtcacctatcgcaacacagctccctcatgctgttggagctgcctactctctgaagatggacaagaaggacgcgtgtgccatcacatactttggggacggtgggacaagtgagggagacttccatgcagcgctcaacttcgcggctgttatggaggcaccggtgatcttcttctgccgcaacaatggctgggccatcagcactccgactactgaacaattcagaagtgatggggttgtcatccgtggccaggcttatgggatccgtggcatccgagtagatggcaatgatgctcttgctgtgtacagcgcaatccatgctgcccgagaaatggctgtaactgaaggaagaccaattttagttgaggcactgacttaccgagtcggccatcactcgacatccgatgattcgaccaagtacaggccagttgatgagattgagcattggcgaacagcgagggatccgatttccagatacagaaaatgggttcagggtaatgactggtggtctgatgctgaagaatctgagctcaggagcagagtgagaaaagagcttctccaagccatccaggttgcagaaagaatgccaaaaccaccagttactgagcttttcactgatgtttacgacaagatcccttccaacctgcatgaacaagagcaattgctgcgggatacaatcatgaggcaccctgcagactacccaactgatgtacccgtttagttttcttggccttagatgagcagtatcgttgtgtaattattgatgagtcaggtccatagcattttgaataatacagtgattcagccagtgaactgctgattcaacacgttcttaaacaataattcaacctggcagattgccctgttgctggcactcataaaaaaaaaaaaaagcgtccattgcctgcacagcgtaccttataataataatagctactgaagctgcatataaaaaaaaaaaaaaaaaaaaaaagatgggaggggtctcgcggacaccaacatt

SEQ ID NO: 112736 - DNA, 1214 bp, Zea mays
  Clone ID: MRT4577_34305C.1
ccggaattcccgggtcgacccacgcgtacgcggacgcgtgggcggacgcgtgggctttcagctccctcatgctgttggagctgcctactctctgaagatggacaagaaggacgcgtgtgccatcacatactttggggacggtgggacaagtgagggagatttccatgcagcgctcaacttcgcggctgttatggaggcaccggtgatcttcttctgccgtaacaatggctgggccatcagcactccgactactgaacaattcagaagtagcaacagcgtgtcttcatatactgatccatggcagttacaagtaaacaatgcaatgtcgtgttaaaattctagtcgtgttgcaggtgatggagttgtcatccgtggccaggcttatgggatccgtggcatccgagtagatggcaatgatgctcttgctgtgtacagcgcaatccatgctgcccgagaaatggctgtaactgaaggaagaccaattttagttgaggcactgacttaccgagtcggccatcactcgacatccgatgattcgaccaagtacaggccagttgatgagattgagcattggcgaacagcgagggatccaatttccagatacagaaaatgggttcagggtaatgactggtggtctgatgctgaagaatctgagctcaggagcagagtgagaaaagagcttctccaagccatccaggttgcagaaagaatgccaaaaccaccagttactgagcttttcactgatgtttacgataagatcccttccaacctgcatgaacaagagcaattgctgcgggatacaatcatgaggcaccctgcagactacccaactgatgtacccgttggggtcgtgcttcggtatgccgaaggtctcacacgaaaaagcagcttcggccaaagtcgtttttaaaaaatggccgaaggtcccttttcatggagcttcggcgttttaaaccgacataaaggcagaatgacctttttatacatgtatgtccgagtcaatgttgtaaacttccgcaaggggcataattgtaatttgtcacaggctgcgacctgtgtttataaataaatgaacagtacctctgtactgttcacgcgaacttgcttttggccttcgcatcacattcgtactttttgccttccgccagggggggggggggggggggggggggggggggggggggggggtggccgaggggggggcccgggtaccc

SEQ ID NO: 112737 - DNA, 555 bp, Zea mays
  unsure (1)..(555): unsure at all n locations
  Clone ID: MRT4577_34306C.1
tcgagccggccgggacgnattgcctctccgaatnccaggcaggcaggtcggcgaggagggcaggaagaccgaagaccgagccgtgcgggggctcgggacgggtaacgtcacaggaccccaaaatctcatattcttcctggccgaccgcccgcgcttgttcaagcaccactatatggacgaggagcatccctccggcgtgtactgctactccgagatcgaagaggtcaccgcctccggggagggggtgtacgagaggtactacaaggaggataaggaggacaagcacattcagctcctcggagaggacgtcgccattctcgacggctacttgcgactctataatctcacttggattgacaacgaaccgacccggagcatccgacgagaacctggacgattgaaatcgactacgaggccatatgctggggaattgcatattgtgtcaaggctggtccagaaagatagctaaaagcaatgcagtacttggagagagcatagtgtgagtacgcaccataatatatctcttgatttctacatggaaggagatcccttgaa

SEQ ID NO: 112738 - DNA, 951 bp, Zea mays
  Clone ID: MRT4577_34307C.1
ccggccgggattcccgcccatgctcaactcccctagagaccggtcccacgcgccggcggagccctgctttttcgtcgtcgctctcccggcgagccgtgcccgtctgctcctcctctctcctcgctgcgctctcttccccgcacacttatctttccagctcagtgtccgtccctctcctcgacacgcacatcttccattgctcgcttgcttcctcgtgtcgtctagctctatccgattccaacacagctacctataaatacatctctctctctctctctctccgagcagagctaggcagaccattggagagaggatcgttggagctcggccgagctgagcacgcacagtgtgattgtgtgtgtgtgtgtctgacatggcgtcgctctggctagcgagagcgtcgtcccagctggcgcgccgtgccgccgccaggaggcctcctccgcgtcctgcgcgccacggctccggccaacccaccagttcgtggttcttgggctcggtgccgcaggcggcccttgggtcaccagcgctggacacaagccgccggggcttctgctccgtccggcgcttcgcaggggagagcagcgctgctgctgctgcggcggctgtcgtcgacgaggagccggagagcgggttcgcagccggcgatcagcaggcagttgactttccaggagggaaagtatcctttgtggccgaaatgaacttccttccagaatcgacgagggaaaggatcaactgctaccgcgtgcttgacgacgacggcagaacgatatcaggaagtagattccaagaggtcagtcgggagctggctctgaagatgtacagcgagatggtgacgctccagatcatggataccatcttctacgaggctcagaggcagggcaggatctcgttctacctcacttccaaccgcgaggaagcgatcaacatagcctctgctgctgcgctcag

SEQ ID NO: 112739 - DNA, 573 bp, Zea mays
  Clone ID: MRT4577_34308C.1
gggggcccccccctgcccaaaaaaaaaaaatgattgccccccccctcatttccccagaggacaaaaaaacggggggggaaagcaaaccttttcaaaaaccaaaaaaacaataccccccaatttaataccccagaaacaaagggggggaaaaaagtcttcccccggaggtgggacccccccccccccccgataaataaaaccccccaaaaacttaacccggtggggcccccccggggcaaaccacaggatagggggggcacaaaaccccaacaacccccccccaaaaaagcgtttaatactcgccccccttggggccgcccccccccttgaaaaactaaacccccacctccttgaattccttttggggcgcacccaaatccccacaagcctgggaaaacccccccttctccttacccttaccgaggaaccagggcccaaagggccccttggggaacatgagggcaaacttggggccaagggggaaaaaaacccccccaacccggggggggtgggaaaatatgcacccgggcccctgccctttggccagatcccccccggggacaaccctggggg

SEQ ID NO: 112740 - DNA, 381 bp, Zea mays
  unsure (1)..(381): unsure at all n locations
  Clone ID: MRT4577_34309C.1
tttcttttttatcaccaaccatcactttataattaccatcaaatttttacaattatcaatattattaacataattcaaaaatatattccatataaatctcaatcaatatattagattatttcctacaaaacacatgcggtggggttagggcacccattatcgactacatctaatatntaatctaaaaaataacccctccaactatgggttacttcctcgacaacacagcgtttattcaagagaactagttttttgccaccaattgttactactctatgaaggcacctaccaattagttacccactgctagtcaattaagtaactgttttctctgttttaggtacccaccaaagttccacatactcagttggttgaatcaaa

SEQ ID NO: 112741 - DNA, 421 bp, Zea mays
  unsure (1)..(421): unsure at all n locations
  Clone ID: MRT4577_3430C.1
atacccctgaatatgaaaccaaggatactgatatcttggcagcatttcgagtatttcctcaacctggagttccaccggaagaagcgggggctgcggtagctgctgaatcttctactggtacatggacaactgtgtggaccgatgggcttaccagccttgatcgttacaaaggacgatgctaccacatcgagcccgttccaagagaagaaactcaatttattgcgtatgtagcttatcccttagacctttttgaagaaggttcggttactaacatgtttacctcgattgtgggtaatgtatttgggttcaaagccctggctgctctacgtctagaggatctgcgaatccctcctgcttatactaaaactttccaaggaccacctcatggtatccaagttgnaagagataaattgaacaagta

SEQ ID NO: 112742 - DNA, 794 bp, Zea mays
  unsure (1)..(794): unsure at all n locations
  Clone ID: MRT4577_34310C.1
gctcggcgcttgcttttcttctccccttgctcgccggcgtacggattgtggtctccttctccagctccggcacgcgctctgcccctccctcctcttcctcaagtttggccgcgtcgagtttccctccgtccatggccgccagtcgagctcctctcagccgaggcccctgctcccagcatcgcgttcccttcttctctgcgagcccctccctgttcccagccgtttcctgctcgcctggccggagcgccctacgctctgctcgccatcgcaagtcgcggtgttcgctgctgtgtcgtgctccaggccgttagaccatcgttaatcttgtcatgcacaacactgccccgaacctgtcatatccgttgtcggttgttatttacatcgtcgcctgaccggaagtgtcgtcactagttcgctttggacaccgtggatgcttaagtctgtggtcgcgcgtctttctatctcgcgcgcgtgagtttgaagctctgcacgttcgtcgtcctctagtcccagtacgaccccacctcaccagctcgctccaaaaacgatcttgttgtcgttccgtgagtcatcaagaaatttcgagaatcgggtgaagacgaagctagcagcatgttatttcccaagtgctcgacacaagagctgaaccagaatccttgccgtgttcgcggatagcgcgtcagatttaaaatggtacgcttattaatcgcgcgatgtggaagacgacccaggtcgaccccaagcgcgggctactccgcatgggngaagctgaaggacgaacgccagnatggatg

SEQ ID NO: 112743 - DNA, 702 bp, Zea mays
  unsure (1)..(702): unsure at all n locations
  Clone ID: MRT4577_34311C.1
ccggccgggatatttgttcacctccttggtcaactgagccttcttggtcaccacattatccataatcttcttgaccaagatgaaatcctcctgggtcaaagagccaccaccattccacaccccttcctccaaaaccgcccaaagaccagatcccttggcaacctcttccatcagatccatcaccgcacccagctggttaggtagccatgtgatgatggggcttcctcctgtggccgtggggtgaagagtgtgcttgatgatgtactctcgggtaaacatctagtgtcgccatctgaaactgcgaatgtgatccaaaagacgaagatacaacactgcaagaccaagatcgccagattttgtgaggaagtctcgtacaccaacttcagcggctgtttcacggacatacttaaggaatgcgcggtgaggcttgggtcggtactctctaaactcgatgagaatgtccgtcaatgggttcttgggcattgggacctcgcagatatggtccagaagaggaatgatggcatcgttggctcctgattcacctctgaagaactgaggcttatcgtcgtattgtccttcatacaccacactatcggggaacatggattgcttggtgatgcngtagataanagttcggtaggtcatataatcctnttggaagcgattggctccacataaaaaaaaaaaaaaaaaaccgcggcc

SEQ ID NO: 112744 - DNA, 868 bp, Zea mays
  Clone ID: MRT4577_34312C.1
ttagcacatttcaatgatattcaggatcatgtgtcatctaaagggcgcggagcctcatcctttctctttggaagaggtctatcagcagacccacttaatatatgtaaaacgacggagggccggagccagtttatctctgaagataatatatcatctggtcggtgtcagctactaaaggaggatttgattaatgcaacggttgatgtgagtgacatctctgagtcatttgatagttgcccatattatctaagtgagcataccaaacatgctctaatgtcagcagcatttgtacatttacattgcaagaactacttcaagtttacaaaagatatatcttctcttagtcaacgagtgctgctatctggcccaacaggaactgatatgtatcaagaatatctggtgaaggcccttgcaaagtattttggtgctagattgctcactatagattcttccatgctgtttggtgggcaaacttccaaggaatcagaatcatacaaaaagggtgatagagtgaggtatattggttcggtacagtcgacaggcgttatccttgatggacagagccctccagattttggttcacagggtgaaatatttcttccttttgaagaaaacagatcatcaaaggttggtgtaaggtttgataaaaaaattctgggaggaaacaatcttggaggcaattgtgaagttgatcatggtttgttctgttctgttgattctttatgccccgacattccaggatgggaggttacatccaaacatccattagatgtgatatttgagtttatctctgaaaaattccgcatggccctttttatctttttctgaaggacacggagaaaattgtggcaataatgattactatcat

SEQ ID NO: 112745 - DNA, 769 bp, Zea mays
  unsure (1)..(769): unsure at all n locations
  Clone ID: MRT4577_34313C.1
actcctatagggcgattgggattctcgaggccggccgggactacgaccggtcaccgcctgaaggacacctaccagctaaccgcacgtaaggctctttggtacttgtgccagttgattgaatggcacttgggttccacacccatgaagtactttccaccgctggatcgcaatcgtcccgcttgggcggcgcggattcgcaacttggggagtctgggaagcctcgaagcagctgagaaagaccccacgattgtcgctatgtcgggctatttgctcagcctcgatgacccgtgcgagcaattgtgtcgacgtgtgagagccctgactcagcatgctgaggaagtagaagtccgttggaggaagtcaaggttggacttggcccaggcagaagcccgtgtggctaacgccgaaagccgcatcgtccttgcagaagagaaactttgggagcaagctgaccaccatagcaagctcctgagggacatatccttggtggaccgtgtcaagcgcaaagaccctcacccccagaactctgatggaaccaacgtgcttgaaggaaccccggtgtacctgttccaaccccgtagaaggatttgtggaccggnatcacccacacctcctccatcgcctcaaccagatgatgaagaaggccctagagagatcatcgtagggaccgatgtttaagttgtataggtcaccccttagggctggaccgctnaaaaaatgtgtacccctgctgtataaaactatgattggtgtgcttgcttggtgcttg

SEQ ID NO: 112746 - DNA, 345 bp, Zea mays
  unsure (1)..(345): unsure at all n locations
  Clone ID: MRT4577_34314C.1
cactgttctagatcgctacgccccctttttttttttttttaatctaatgcgccggtttttttcaactgttctgggttaacattnccttcttnttntatttacactacttttctcaatgaacaaacacattcattactcttaagaacattcccaatttctttccccacnttttatctcacaaatatttttactactcatactctaattaaacttntttttaaaattccaaaaaaaataatcatacttcaacaagcccctaaaatttcatcacatttctttttctctctttctatttatcatataaacaaacactaactcttacaaaagcaatatctatctcacatt

SEQ ID NO: 112747 - DNA, 417 bp, Zea mays
  Clone ID: MRT4577_34315C.1
cgttccagtaggtacatcaggcgcataccaaaaccagtctcagccttctttcctgatccatgatgcctctcagcctataacattgatgacagtgactagtgatactagtgatcatgctggcgaatgctagacgtcattaccatacagcaggccagcagccagtaaggagctccactttggcagcctgccactctgcttcttccactcctgaaaccgagcctgcaggtgcaggcaatgcggttgcttgctggagtccttatccaatcagtgaaggcactaaactcgcaaagccgttggaatctgcgagcaaggtcatgcacatcttgttggatgaagttaatacagcctgcactgcaactcccgcactctcgcgatcgtgtggaagacgtgggcgccgttgagggtcaaaatcttctt

SEQ ID NO: 112748 - DNA, 262 bp, Zea mays
  Clone ID: MRT4577_34316C.1
cctacaaatagacgtcattttcagcgaataattgttgtgaaaatgtgtatgttgcattgaaattgtggccatacaagaaggaatcgaatgtagaacgatgatgtacgagatagacttggggtagcggtagcaccaattgaagaaaaccttgttcaaaatcaaaaccgattgagatggtttagactttagacatgtccaacagagagatctatagaggcaccattccgtagtgggatcttaacacatgataatactaggaaaa

SEQ ID NO: 112749 - DNA, 238 bp, Zea mays
  Clone ID: MRT4577_34317C.1
aattttatcatattgtaaacataactttttggggtgcactgtaagagagaacacactattacccctctttggttcatctaaagagtttgcctagaatataattcaccacgtaatctgcatccaaatggatgaacatcgttgctagctgtatacataataaaaattgccatggcctagtttgtaatacattacgccatattacgctgtcaatacggttttacaacacatatgccttaaa

SEQ ID NO: 112750 - DNA, 322 bp, Zea mays
  Clone ID: MRT4577_34318C.1
gcgcgtgcgcgcgtgcgtgagctcggggttgggctcgggctttgtttgcgagctcctcgtcggtgcgtcggtggctgcaccggccgggggcaccgcgctcgcaggggctggccgacgagacggcagcagtggcggaccgtgaccgcagcggcgtctgcggcggcgcccacgccgcctgcgggcagcagcagcagcacggagcaggcgggcgcccggtgggtgagcaggtgaagggcgtgctccacgacaaggggccgacggcgtcgcaggcgctggcggtggcggcgctgttcccgctgggcgggctgctgctggtgctgtc

SEQ ID NO: 112751 - DNA, 209 bp, Zea mays
  Clone ID: MRT4577_34319C.1
cccacgcgtccggcaagatgcatgtttgttttagggactaatttttagtccctttttagttcctaaactaccaaacatgccctaagatcacgtgcaagtattttagcaatccccttaaccccttccttttcttttctctctgatcttcctctgatgcagaggttgaagatacaaatttgtcagggagttctcagaccttcctttgtgtt

SEQ ID NO: 112752 - DNA, 627 bp, Zea mays
  unsure (1)..(627): unsure at all n locations
  Clone ID: MRT4577_3431C.1
aagcagcgcaccaagctctgggcaacctaagctcagaacttcatatcagaatcaagcaccagatggcacaagcaagccatatataggatacaggagtagcgcgctgtacataaccaactgtacaacaggcagtcatgcccttatactacctacacgcgatccattcacactcacgatcttggtaggcctcgcctgagaggtggacgacgacgtgccatggtcaggactcaggacgatgtcctcctaactcactcaggacgatgtcctcctaactcgcccatgggaaaccaaccaggagtaccattccgtcggcgatgctgctgctgccgccgcctcaccccggggcggcgcggggcgaccggacgggccagagcggcagcctccagaccgaggacggtcgcttccgccgcggcggcttcggcagcgcgccggccgcggcctccttctccgagctcagcatgttccacatcacccgcacgtcctggtacccgcaggtcatgcacgtncccggtggaggctcaggacgcacaaccacacatcgccccttgcggacggcgcggcggcgcgcggcgggcgacggcgacgnngcgagcccaggcgcgggcgcacggacnngcgaaccacccc

SEQ ID NO: 112753 - DNA, 303 bp, Zea mays
  Clone ID: MRT4577_34320C.1
ttttcgcgtgggcgggcgctgcggtctacgacaaagacatcctgatacgagcggactccgaggagtgatgcattacactattcatcaaccggcattatggcgcgcttagatcccgattacatctgatggtgaacagatccctcttggcgtgctcggatcgtgtaggtgtgatactagtgatgaactccttgcgagtaatggagactctgttgagactgacatggacacagttggacggccaaacaagcgacttggatctgatgagtgtgagataacgtaccgcccaggcttacttatacttac

SEQ ID NO: 112754 - DNA, 379 bp, Zea mays
  Clone ID: MRT4577_34321C.1
cctcactgtttttaaccccaacccgcaagctccggttcaatggccctttcacagaaacaatgcgcgtttttccagagaaacgtgttcaacaaaacaacagcacgtctacaacatgaatgaaaaaaaacacctcaggggccacccagatggatcagccatctctacgacaagcatgactaccaccggaccctgatagcctcacacaacccagtttgcaccaacacggggccttggtgcaaaggggaaaatacccgtctatcccatgcatgcaaggggacaactcctgccacactctccctttacgaacactcgtgtacaatccgttgtcgggacttgcctcgccaaccgcacccatcacctatgcagggggcaaaacttt

SEQ ID NO: 112755 - DNA, 411 bp, Zea mays
  Clone ID: MRT4577_34322C.1
gccggcccgggccgaggagagcacagcatagacacctgtctatctatctactgagagagagaggggaaagcgtagctagactagcatgcgcacgtgcgggagcaagaaagcagcaggaggtgtgctgctgctgctgcttctccacctgtggtaatctccgacgacgaggacggaccgactcctgaaggggtacaccgccgccgggctctctgcccttcatcttcttctccatcctcctcggcttcggctgctacttcctcggcaagcacaggggccgggaggagatgggtacccgcaacccatggcatatctacggatcggccatgtctgcatgatgtgatatctggactagcgctatttgtaatttgcgttgcgagaaacacaaggacggcaccgcggggctcaacttat

SEQ ID NO: 112756 - DNA, 391 bp, Zea mays
  Clone ID: MRT4577_34323C.1
cctttcgggaataaacacgagcctcagtcacgagcgggactagactgcttcatagaagtgactacgccgtgctaccgacggactcatcatggtaccaaccccctgagtgtgtagtaacttagtccgagccatactatggctacataagcagcacaagaaccagggcctggctgatgccatcatcgatcagccggcaccggtaggatgaccaatgagggcgcatggcagctcaatgctggacgaacatcggttataggattcctaacctatgaactgcattcataggctgtggacagaaaaaatgccagaggtagcacggatacccatagtggtcttctctatcctgggcctcgttctgctgcactagctgcctgcgccgatgacgagacaa

SEQ ID NO: 112757 - DNA, 230 bp, Zea mays
  Clone ID: MRT4577_34324C.1
acggctgcctccatccacgcctaaacatacccttttccatctacctctcgctccaatcgatttgatgtaccgcgtcaatatcttcctcagctctttaacttctctgtttcaaacccattatctgttatgacaaatgttcgcaccatcaatgacatcacatatcttgaagcctgcatatataaccatacaaaatctaatctttacatgcatcaagttgattttgaaccttc

SEQ ID NO: 112758 - DNA, 777 bp, Zea mays
  unsure (1)..(777): unsure at all n locations
  Clone ID: MRT4577_34325C.1
cattgggtacctcgaggccggccgggagctgaaaaatccgcaaactgctccttaattgtatacccccagagtagactagtgcattattcctcaccagaaattaattaacgctgttggttgccatggcttcgttcagctacggcggtgctcctcctccatcacactccggtctccgccattaccccaccgtgcatcgaccaggactcctgccggccactgccgcgtgtacgcgtggcggcgctgagctgttgcggcggcagtcacgagctaccaccccgcgcacaaagctggcggagaagatggtcagggagaagctcctgatgggtttgccgccgccgtcgtcgtacgacacggcctggcttgcgatggtgccggcgcccgggagcgctcgggcgtcgcgcttccctcagtgcgtggagtggatcatgcagaaccagcggagcgacgggtcctgggggctgcagggccgccagggcgatgacccctcgcttcttatcaaggacgcgctgtcgtctacgttggcgtgcgtcctggcgctcaagacgtggggcgtcggcgacgagcacgtcgggaaagggctccgcttcatcgggcacaacttgtcatccgtgacgacggacggcgacgttggatcaaggcccggtggggttcaacgtcatcttccccgggatgcttgcacgttgcatcggcatgggcgtggagatgcctcttgccccggncgacgttgacggcatcttccggctgcgtgacaaagagctaccaagcttggccgctgga

SEQ ID NO: 112759 - DNA, 429 bp, Zea mays
  Clone ID: MRT4577_34326C.1
caatgtggtgtttttttttttttttttttttttttttttttttttttttttttttttttttttggggaaacaaccccattcccctttttttgggggatttaccggttacaaaagggaaagtttttcctttttttcaaaggaaaattccctgcaaccccccttaaaaaaacccttggccggggggtttaaatttttttttaaacctaagggtatcccccaacctttaaattaaatggactttttttaaagtggttttccggccctttgaaacaactttgaccgggcatgtttgcgcccaccccttttttgggaacatctgtttatttgtggggatcacccctcagtttaattttgggtttttttgggaacttgagctttcaaaaccccttctttttttttgtaccccctgtcccattttctttttttttt

SEQ ID NO: 112760 - DNA, 771 bp, Zea mays
  Clone ID: MRT4577_34327C.1
ctctctctcaatctccgtgcgagcgcggccggcggttgcagcatggaggacgcggaggccggcgcggcgcggaagcggaagaggggcggcgacggcgaggaggccggcgggggcgcgtacgacggcaaggagaaggagctgctgggcgaggacggcgacgacgggcggtacgagggcatcgcggaggaggccgtggcggaggtgatgcggtggctggaggcggagatcgcggacgacagcgccgccccgcagccggcggcggggttcgtgaccatcaacggcaacgaggagagctgcgggccgtccttctccgccgcggcgtccacggtcatggcctccgtcgacacccgcgccggagcgccgcccccgccgcccgtgccgtggccgtggccggagcccgagccggagcgtctcctccccgcgccgggcgtcggagtggacgtggagacggggacggggacggggacgggcggcgaggcggccgacgaggagtggctggcgcgcctgctcacctgcggggccctgctggagggcgtctagttagcactagcagcgcagcagcaggggtagattgctagactagcctagtgacagcagtagtggtacagtagtagcagcagcagcagcgaaggcctcgctggctctgtctggctttagcctttttttggacgcttgtacagtgcgaactcgccggctgggaccgggagtggttcgttttggcgcgggtcgctccgtcgttttcaagtgttctgctctgctcgtttcgtcgtc

SEQ ID NO: 112761 - DNA, 794 bp, Zea mays
  unsure (1)..(794): unsure at all n locations
  Clone ID: MRT4577_34328C.1
ccggccgggattttccggcatgttgatctcagctttcgttcttaggaacaagacgatctttcctatccggcttgtatgacaagttcggcgtggggtcttgattacggagatgtttataaagacttgcttcctgtcgagcaccgtggatccgtgcagatgaagagaggaaggggatcaagagaacgccatggtattcttttctcagcttcacaggaactctgacgtgcaacggcagtcttcaccgcgaactcctcttttgtgctgatgatgatgcggcagaggcagggtgatggttatttttttgggagatgaactgcagcaggtcttgtggtgatttggaggcagcctgacggcggtatggaaaaaaaatatatccgggatgatcgctgtggtctgctatttatagcgcagggaggccagtagtttctgagcgattttggcgctctttgcatttgattttcttttgctaatgatgtcggcgccagagtttgaattgcagagcgcgttaatcgtgggagcgtgtggaagttgctttcttctgactcaatcagtcaataagaagttgctattctttctccatggcatgtgggccattgctgttatttagattattaaaatcataatcaatttaattaaggaaaatagttgtggatggagtgattggcatangacggcatgtccggcgtacgtatgcatgtacactgtatatacgtttgacaccgtgtatgtggcaatgtatgcacatataagaacgaattttcatctttttcaaaaaaaaaaaaaaatttgcggcc

SEQ ID NO: 112762 - DNA, 268 bp, Zea mays
  Clone ID: MRT4577_34329C.1
tgcagccacttcattcctctcgtctcgaagtacgtactttagaaccctagatgcagcgacctggatggtgtcccatcgctgccgacggcctcgtgcgcgctcctccggtcgaagtcctggccgacaacgatcttgtttctaatgttttaaaactttttacaagaacttgcatatttctatattggatgtcaggtgctcaagtatggaagaacttgtttcgaattaatgttttaaaaccttttacaaaaaacaaagaaaaggggggccg

SEQ ID NO: 112763 - DNA, 533 bp, Zea mays
  unsure (1)..(533): unsure at all n locations
  Clone ID: MRT4577_3432C.1
aataacaagcaaaaatgtattgtatcatcaacatcgtctactaagggctacaacagagtatatatctctcatctcaatctcaatgcctgccgggggtggttaataatgcacagcatataggggtgagtgagggcggctatggtgtgttggcgacagagcaccacaccggcatcgtaaatatatcatcatcatcctcgcgaaccagtcatatgtagggttggttccttaatccttattattgctcccctaaccacatatatatatagtaagaagaaaccgcctctataatcgtgcctgtatgatccgtcagtcacacggtgtaagactgctggatggtctcaatgtccaaacccttctgcttcaccaccgactccatcttccccttcagggtgctcacttctcgcaacctcgccatctcggctctcctacgggcctcttccgcgagctggttcagttcgttgaaagtcgtcttgttctcgaagatggatgcctcangtggctggaggccatggagagtcctctgagcgtgcgcc

SEQ ID NO: 112764 - DNA, 434 bp, Zea mays
  Clone ID: MRT4577_34330C.1
ttttttttttttttttttttttttttttttttttttttttttttttttttttttttttttttttttttgtttttttttttttttttttttgggggggacacgggccaggggcccttggattattgggcaagaccattatgggcgggtccaagggcaaaccgggaaaaaacttccaagggggttctcccgggggcaacgggtcataaacaaaaaaaaaagatcccgggggggggggagttacagggcagaaagcccaaaaaaacaacgggctagggctaaatggttttcgccattttttacaaaaaaagcccaaggggcaaagcgggaccatccgggttaaaggccatgccgggggtcccgactagaccgggagaaacagggggtctaaaagaaaaaaaaaccctgccaagggagccaatcatggggacagggcc

SEQ ID NO: 112765 - DNA, 176 bp, Zea mays
  Clone ID: MRT4577_34331C.1
aaggcgcgccgcgcattgccagaagcaaccctaccatggcctacgctgcgcctcccatggcgtcggccctcttcgcctcaaacccacctcatggcacgcacaaccacccaaccaatccgcataagtgccccgcgcgccccaaaccaccaccaggaactgccccgcgtcaccaagaa

SEQ ID NO: 112766 - DNA, 313 bp, Zea mays
  Clone ID: MRT4577_34332C.1
gggccttaaaaaacacaccccccggggggtaaaatcattttgggggaagggacccatatctaaagaaaggtgtttttttgacccttatgcttccgggaataggagcattaacatcagaaagttaggggcccccccacaaaaacgaaaagcaccttgggcgttaaaatactgtttagggaacaccttgcctcaattcccttttagaacccaaagaaggtttcgttttttttttttcccaaataaaggatccccgccctcggaacaaagccccaaaaattgccttctttttttttttgtacaaaaaaattttttt

SEQ ID NO: 112767 - DNA, 397 bp, Zea mays
  Clone ID: MRT4577_34333C.1
ccggccgggctggcactcgccgcgctcgtcaccggcttccggctcgcctgcttcctcgccaccggctcccggttcccgccgacgcaaccggcatcctactgaccggctggtggtagcttcggcatcggagcactgacaatgtactggtcgtgcgcgcgccagcgtgcgtgcttgtgcttgtgcgtgaacggcgcgtggtagggtgtggaaccttggcaccatcacgagaatgcaagcctaagttaaaacttagggcctatttggttcgtttagtctagagactaaattttagttgagggactaaagtttagtaaatatcatttttagttctagagattaaaggcttagagattaagggcttgtttggtggaaaaaaaaaaaaaaaaaaggggcggcc

SEQ ID NO: 112768 - DNA, 383 bp, Zea mays
  Clone ID: MRT4577_34334C.1
acaacactctatagtgacgtcgtattaagccctcagaatggcatcaacacgtgtgatctccaccttgagtatagcggcagcaactaggcaggaccacggcgatatgcacaaactcgacgggcagcacaaatggttgactcaccgaacttgcatgcttcaaaacactgtctcgactgacgcatctcactacttatcagttatctcacgtccctgcattgcatatcatgtgctatccattggttacccacaacagtataacgtacaacatccagcagctatattatgttctacagtgtaacaccctgaattttacggtacaaaatttcatctttaaatgcaaaccacattcaggtgttacctcttgtctctctctctatcttttc

SEQ ID NO: 112769 - DNA, 482 bp, Zea mays
  Clone ID: MRT4577_34335C.1
taggggccttttttttttttttttttattttttttttttttttttagcaacaatgtacgtacagtcgtagatttccatatgaccatgggcgtgttcggctggctacaagccgacactgttgcagctgtttggactgctgcagctgcaatccatagagagaaaaatactgtagaagccgcagccgcagccggattgcagccgcagcaagccgcagcgaacaagctgcatatcctacgccttgtatagcatagcactatctaatgccagctagctgttgtggccttgtgggggaaaagccaatgatgcatgcgatgcgacgacgcgcgcgaggtctagcgagacggccaggcctagttcttgccgccggcgatctgcttcgcgacgaatgccctgaggttcctctccgacgagccgccttccgacgcggcggcgcgcgccttctccctccacacggcggccttggcctcgagccgaattccgag

SEQ ID NO: 112770 - DNA, 481 bp, Zea mays
  unsure (1)..(481): unsure at all n locations
  Clone ID: MRT4577_34336C.1
gcggcaccagccagtggctgcctcccgtctccctcttctcctacgcgcacggggagggaagaattggtctcgttgagcgttggtccttggtcctcgagatccatgagcagcaggaacagcgtgctggcagtctcgtagatcgacgcgcgggtggttatgtttctttttttgtctgcagaagagtcagaggcgcccangcgcatgcgtgcgcgccggagtggggtgcaacgggccagtaggctgagtgtggtcgccggcagagtcgtcgagcgtagctgcaggcaggctcagggagtgggcaggtaggctgctagagagacgcccgaccggcagtacagccgaagaacgctcgacccttcctaggagggtcccgctgcgagtgctgcgatgagagatgggatggctggcgcagagctccgcactgctgcactcagaagggacggctcagcagtaagcaagccccctcgcacaacagctccca

SEQ ID NO: 112771 - DNA, 187 bp, Zea mays
  Clone ID: MRT4577_34337C.1
ctcgcatctggcctcaagcccctcagggctcagctcaccaccacgaaccaaccgacagaaagagggacgaaaggcgagctctcagtgctgtcggataacccgctcggccctgacccggcctgcggtcgagggcaaggtcgtccacagcttcggcggcgttcaggcctacgtcgcccccccccgagga

SEQ ID NO: 112772 - DNA, 255 bp, Zea mays
  Clone ID: MRT4577_34338C.1
ccgcccacgcgtccgaaaaaaaaaaaaaaaaaaaaaaaaattataataaaaaaaaaaaaaaaaaaaaaaaaaaagaaagaggtctttttttttttaacgatccaaccttacctacccttgcattcaacgatataatttcttttatagtgttaccaaaattaattttattgtccgtctttttacaacttatggattgttaaaactttgtcttttccaaacttaattccttttgagataatctccctttctccagtt

SEQ ID NO: 112773 - DNA, 1172 bp, Zea mays
  Clone ID: MRT4577_34339C.1
ccggaaaagtggcagatttgaacatctcggtccccaacctcacctcgctccttccttgcatatgcaagcggcaacgacaggttcgcagagccctagaaaagattagatccccatctcccactgcccatgcatcagtaaatcaaggcaggtgaaaaaaggcatgtgagccgagagagaaacaggaaagaagacgggaaaaaaaagagaaagaagccgctggggctgtgctgacggctggcgctacgggcagccgtctgcaccagtatccagccgcgaaaaaaaatcagaagatccgagacggagttcgacgaggggaggcgcgacaaagaaatatccaacggaaagatggaggatctgaataagttttatgcttctttctggaagcagtctagcagttcacttagtagcctgcactctgttcatgagcataagctgatgaatttgggttcgaagcgcaatcaaacccaagaagtttccaccaactacaataaacgtaaatcgttgtccggaattgtggaactgagttcagatgttaggagttcaatccggaggaaatctggtgcttatcgcggagggattgacttggagaagccatcggtttatggtgatgccgtggaagctatcggttgctctggccttggcaaccttgccaaccaaaatggcaagtctcaggatgtttctccacagaacaactcacttgcagagtctcttcagttgtgtagagactggaagacatcgcgcgtaagtgttggttcagttggatctagtcacactccggattgccagtcccctaccaaaacaagtaacaatgaagcaagacaatcactatttgacctgaatgttcctccagaagaaagccttcttatgccttctactctatttccttcttcctcaacgtattgtggaaatttttcagacagacctagagaaacttctgaaaaagaacgtgtctctggtattggatcaacgaaaggatcttccatcacggtgatcacgcccgactcagctgcagacagttcagggatgtggtaactgaatcgtcagtccacagaagttcccttttgaccttaacgtgtcacctgaaaacaccaacatggcatcacaaatcaacgattatagagataaggttgtaaataatggtgtaggtaaaggaacagcacccgatcattctt

SEQ ID NO: 112774 - DNA, 426 bp, Zea mays
  unsure (1)..(426): unsure at all n locations
  Clone ID: MRT4577_3433C.1
ggccggccggggttcnnnnnnnnaaaaaaaaaaaaaaaaaaaaaaaaaaaaaaaaaaaggtcctttctcttcgtagccatccattgttgcctagttagacagcggccgagggtgctaggttcagtggccgtctccgtctcattgtttcgtccatgtacgcggcaccgacggcagcgacgacgacgacgatgccgccagccgtgacccacgacgacctgtccctgcgcaaggcgcaggagcggcgcgccacgcggtccagcggccaggtcgccgtgtccctcgtcgcgctctccgtgctctgcggcctcgttgccttcatcctctgcctcgccgccgaggggtcgcgctcagaggtgtcgcactacctcatgagcgtgggcggcagcaaggaccagctggacatgtgcgtgtacaacagcagcggcc

SEQ ID NO: 112775 - DNA, 627 bp, Zea mays
  Clone ID: MRT4577_34340C.1
cctctctttcctcttcctctctcgttatctcggcgccgttcgtcgccgccgccgcgtagcgccggcgagactagaagaggcaggcgccatggcgaccgcttcagtatcgttcaagtctcgtgaggaccaccggaagcagctcgagcttgaggaggcgcgtaaggcggggctcgcccctgccgaagtcgacgaggatggaaacgagattaaccctcacatcccgcagtatatgtcctcggccccatggtatctcaacgccgagaagccgagtttgaagcatcagcggaaatggaagtcggatccgaattacacaaaagcgtggtacgataggggtgccaggcttttccaggccaacaaatacagaaaaggcgcttgcgaaaactgtggagccatgactcacaataagaaggcatgcatggatcgacctcggaatgttggagctaaatataccaatatgaatatagcaccagatgagaaagtcgagtcgtttgagcttgattatgatggcaagcgtgaccgttggaatggttatgacacatcaacccacactcgtgttatccaagattatgaagctagagaagaggccaggaaaaagttcctgaaagaacaacagctcaagaagctcga

SEQ ID NO: 112776 - DNA, 848 bp, Zea mays
  Clone ID: MRT4577_34341C.1
gcgctttccctcacacgcgcgcgtcggcacaggctcactttacgcgcgcgagagagctcaggcacgggcacgactccgctcgctcgcgcggctaggtgtaggtgtagtgtagctagcacgctccagtcccccgggccatgtcgtcgtcggcggcggctccccgtgtgcccggggccgcacggaggctgtctcagtctccgaagccgcctggagccagagacaaggagccgcctccgccccagcgcgaggacggcgacaaggccaggagaaggaatctgctgccgtcgccggcgtcggccaggggcgccgcggcgtccatgctgctgcgccgtgccgcaggcgccggtggtgggcgggggagcagctacgtgcacccgtcgtcctcgctcagcgtctcgtgcgcgtcggaggcgtccaccgagtccttctgcagccgggcgtccacgggccggatcggccgccgccccgcgggcccgcccgcgggggctccccggcggagggcggcgggctctgccggacctccctccgcgcggccggcggcggcggcgtcggcgtccaggaaggtccctagtagcggcgtcgtgccaggcggcggtgcagcggccactactgttcaccatcaggcggtgccgccggtggtagcaggcggcttgttgaacggagaacccaccgcggcggcgtcagcggggccgccgaggtgcccctggattacccctaacagtggtaggtggtcaaaacaaatcattcatgcgcttatttatggctattttcggtaaggtcaagacacatttactagcttatcgtatgtatacgaagacctacaacatatatactagaaactttagacg

SEQ ID NO: 112777 - DNA, 268 bp, Zea mays
  Clone ID: MRT4577_34342C.1
gccaggtcttccggcttttctcctgacgcggcgcccatccgatgcctgacgccgcggtctcctggtccttttccttgtcggtttcgttgctgtctccgccggagtgaacccttcttacggatacttgctctttgtcggtgggtcattatcttcgctggttattatgtttgttgtctttttctggtatttgtgtttcttttgtatttttgggtcttttgttttaattttatttgtttattttgtttattttgttttggttcgggaacat

SEQ ID NO: 112778 - DNA, 579 bp, Zea mays
  Clone ID: MRT4577_34343C.1
gtggaacagcttggtcgcatgttcaagccggacttcaaggcaataaagaagcggattgaggaccttatcacaagggattatttggaaagggataaagataacccgaatgtgtacagatacttggcttgatcaatccgctgcctgtggaccatcctgagcctgatttgtttgtcctacggtgctgccacagtttatcgcaatgtttataactcttgtggtcatcatgggcatttctctgctgcacatccaggttgcctggtggttggcctgtcaatgaagagaacagggatgaagattcacggatgggaatgcatccaaggcatgccagccatgatgcaagttgtagcatcatctatcagatcctgtaccatttgttgtattttcaccattgcatatagccttgtttcatttcattcagttgtttagataaatggagatatgtagtcatgaattggtagcacaccatcttgctctggatggaagacgtcaatgtatgttgtatttgttgtgaatcgtgttcttgtatagtttgcccgatatactgttctaacggtaaaacgcatggcctctaattgtttc

SEQ ID NO: 112779 - DNA, 359 bp, Zea mays
  Clone ID: MRT4577_34344C.1
acgccacgcgtccgcccacgcgtccacccacacgtacaagaacagttgatttcaaaaaaaaaaaacaaaagggccggggttcattggggggcgggcctcgccacaaaaaggaaccaagaaccaggacgaaggcgctgcatcctacgaaggcaccttctactcatacttcactgacggtatgctcaggtgcggcaccaacgagcataaatcccccaacaatctgctcgataatgaaagcctagaatttatcaaccccgatatacgcacatatgatacttaagaataagctatgaatatcaaatcgaaacacgaggacctggatatctacttgaagatgaagcacaaatccataggaacaa

SEQ ID NO: 112780 - DNA, 521 bp, Zea mays
  Clone ID: MRT4577_34345C.1
ttttttttttttttttttttttttttttttttttttttttttttttttttttttttttttttttttttttttaagaacaaagaaattcccctccccctttttttacaggggggggggggggaacaaattacagggtacattacactatttatttctttacagactaaagcccaaacccgggaaaaaaaaaaaaaggggggggggggcccggccctaaaggggcttttaaaaaaaacaccccccctgggttggccaggggcaagttcgctcctaataaacgggctaaacggggccctaaacgaacgggtcgacggggggttacttttggcaggggaaaaaaagggggggcttttggggccctcaacccaaagcccaccgggaccgccgccctgggtcctgggctcaggggagggacccgcgcgggatgccccccggcccgaggaggtgggggtaaaacgggaccccgagagggaaaacgtggggaagcccccccccaaaggggggccccccccccttggggg

SEQ ID NO: 112781 - DNA, 742 bp, Zea mays
  Clone ID: MRT4577_34346C.1
ggccgcgggttttttttttttttttttgcaaattaagtttacttccataagttaatcacgtgagtgtccgagccgctcatgaccatgagcacgactgatatagcagttttacactctacagaggttacacatctttacccacaagccatgctacctatttgccaaggggtctagaagtcccattcatctctaccgaggagacgaggcggggtagcactacgaggcctttccaaagttctactagttctagaaaactcgctacagattcgggaagaaggaagcataggaatccctcgtctagaaagctaaacagacagtccaacccgagagcctccctatactttgtagcgacgcctccctgcttgcccctttcaggtaagataatctctccctggctttcctaattactaggccaagggtgtcccattccacccttgtggtagcactgttttcccgggcccttgatcgcggattcggtgaaccatgttgcgtagcggttcgccgtgggctgaacctaatcccgaccgttcgatcgggatccagcgatccctgggagccctagcactttgcggcgcgcttcttgcataatagccctcaggaaacatagttaatcaacttgccatcctctgttgttgcaagaccattacaccggggtcctttttcttgcagaccaaaccctgactttacagagagcggggtcagtgggaagaaggctcccaaacgcagatggtgggcgcggcgg

SEQ ID NO: 112782 - DNA, 678 bp, Zea mays
  Clone ID: MRT4577_34347C.1
agacccagcatccagcaatctcgtccccaaacaagcaacctccgcctccccgattctcgtcgagaggaagcccaatcccgaaaccgtcgccgtattccaatggcgcccaaggccgagaagaagcccgccgccaagaagcctgcggaggaggagccggcggcggagaaggccacggcggggaagaagcccaaggccgagaagcggctccccgcgggcaagtccgcaggcaaggagggtggcgagaagaaggggaagaagaaggcaaagaagtcggtggagacgtacaagatctacatcttcaaggtgctgaagcaggtgcacccggacattggcatctcgtccaaggccatgtccatcatgaactccttcatcaacgacatcttcgagaagcctcgtcctccccggcgagctcgccaagcacgccgtctccgagggcaccaaagccgtcaccaagttcactagctcctaggcgagcgatgcgacgtgcactcgtctcctcttcttgcagtagtaccatagtagtacggttaggtgtgttgccgcggtggtagttgccgctgcgtttgctttctgggctcggttgatgtcttttatgtaagaaagtaactgtattgtgtctgcagtatcttaccatgcatgttttaagtagcatcccataatctataaggaatatgtttt

SEQ ID NO: 112783 - DNA, 976 bp, Zea mays
  Clone ID: MRT4577_34348C.1
atgtctgggcccccatccaccacgtcagcgatccgcatcgcatccgtcgtccggaacggccgaaccccgtcgaactcctccacgtcagcgatccgcgtcgcatatccacccacaaatggcgtccaacctcccgcactctataaagtggcgcccccagcagccttctttcgcacccagcagcaagcaatctcgtccccaaacaagcaaccaccgcctccccgatctcgtcgagaggaagcccaatcccgaaaccgccgccctattccaatggcgcccaaggccgagaagaagcccgccgccaagaagcctgcggaggaggagccggcggcggagaaggccacggcggggaagaagcccaaggccgagaagcggctccccgcgggcaagtccgcaggcaaggagggtggcgagaagaaggggaagaagaaggcaaagaagtcggtggagacgtacaagatctacatcttcaaggtgctgaagcaggtgcacccggacattggcatctcgtccaaggccatgtccatcatgaactccttcatcaacgacatcttcgagaagctggcggcggaggcggccaagctggcgcggtacaacaagaagcctaccattacgtcccgcgagatccagacctccgtccgcctcgtccttcccggcgagctcgccaagcacgccgtctccgagggcaccaaagccgtcaccaagttcactagctcctaggcgagcgatgcgacgtgcactcgtctccttcttgcagtagtacaatagtagtacggttaggtgtgttgccgcggtggtagttgccgctgcgtttgttttctgggctcggttgatgtcttttatgtaagaaagtaactgtattgtgtctgcagtaccttaccatgcatgttttaagtagcatcccttaatctataaggaatatgttttaatatgttcaaaaaaaaaaaaaaaaagggcggccgctcgcgatctagaacta

SEQ ID NO: 112784 - DNA, 825 bp, Zea mays
  Clone ID: MRT4577_34349C.1
cctcgagggccggcggctggggcccattaatcaatcgaaaacccagcaacaagcaacctcgtccccaaacaagcaaccaccgcctccccgatctcgtcgagaggaagccccatcccgaaaccgccgccgtattccaatggcgcccaaggccgagaagaagcccgccgccaagaagcctgcggaggaggagccggcggcggagaaggccccggcggggaagaagcccaaggccgagaagcggctccctgcgggcaagtccgcgggcaaggagggtggcgagaagaaggggaagaagaaggcgaagaagtcggtggagacgtacaagatctacatcttcaaggtgctgaagcaggtgcacccggatattggcatctcgtccaaggccatgtccatcatgaactccttcatcaacgacatcttcgagaagctggcggcggaggcggccaagctggcgcggtacaacaagaagcctaccattacgtcccgcgagatccagacctccgtccgcctcgtcctccccggcgagctcgccaagcacgccgtctccgagggcaccaaagccgtcaccaagttcactagctcctaggcgagcgatgcgacgtgcactcgtctcctcttcttgcagtagtaccatagtagtacggttaggtgtgttgccgcggtggtagttgccgctgcgtttgctttctgggctcggttgatgtcttttatgtaagaaagtaactgtattgtgtctgcagtatcttaccatgcatgttttaagtagcatcccataatctataaggaatatgttttaatatgttctccaaaaaaaaaaaaaaaaaa

SEQ ID NO: 112785 - DNA, 618 bp, Zea mays
  unsure (1)..(618): unsure at all n locations
  Clone ID: MRT4577_3434C.1
cctcgagccggcgggannctaattcggcacgatccgtcccactcccacggttccaccccaccaccgatggcgaccgccgagcccggcccgtccccgcccgcgcccaagcccacctgcgccgtcacgttcggacgctccaccctcctcggccgctacctggccgcggcgctcgctgcctccggccgctggtccgccgtcgccatcctcgacccctccccaacctcgccgtccccgccgcccggaccgcctgcctcccacatcgtctaccaccacgacgtcgacttctcggaccccgcgcgcctcgtttcagcgcttgccggcgccgcggctgtcttccatgtggacgccaccacagcggccgcctccgggagcgacgggtccttcctctccctccaccgcctcgccgtcgagggcacgaggcggctcctcgcggcttgccgcgcggccggggttgggagggtggtgtacaccggctcagccgacgtggtcgctgctgttgcccgggatgtgataaacgcggacgaggactccgcgccctaccctgacaagttcgggaatgcgatgagcgagctgagggcgcaggtggagatgatggtgctgggtgcggacggngtggac

SEQ ID NO: 112786 - DNA, 813 bp, Zea mays
  Clone ID: MRT4577_34350C.1
ccggccgggatagaaggccggcaaaaaaaaacccagcaacaagcaatcctcgtccccaaacaagcaaccaccgcctccccgatctcgtcgagaggaagcccaatcccgaaaccgccgccgtattccaatggcgcccaaggccgagaagaagcccgccgccaagaagcctgcggaggaggagccggcggcggagaaggccacggcggggaagaagcccaaggctgagaagcggctccccgcgggcaagtccgcaggcaaggagggtggcgagaagaaggggaagaagaaggcaaagaagtcggtggagacgtacaagatctacatcttcaaggtgctgaagcaggtgcacccggacattggcatctcgtccaaggccatgtccatcatgaactccttcatcaacgacatcttcgagaagctggcggcggaggcggccaagctggcgcggtacaacaagaagcctaccatcacgtcccgcgagatccagacctccgtccgcctcgtcctccccggcgagctcgccaagcacgccgtctccgagggcaccaaagccgtcaccaagttcaccagctcctaggcgagcgatgcgacgtgcactcgtctcctcttcttgcagtactacaatagtagtacggttaggtgtgttgccgcggtggtagttgccgctgcgtttgctttctgggctcggttgatgtcttttatgtaagaaagtaactgtattgtgtctgcagtaccttaccatgcatgttttaagtagcatcccataatctataaggaatatgttttaataaaaaaaaaaaaaaaaaaaaaaaa

SEQ ID NO: 112787 - DNA, 393 bp, Zea mays
  Clone ID: MRT4577_34351C.1
atttaattttaatagttgagaattacaacaaattagtactacaaacaactttaccatttgttccagcctatctcagacgacagaacctcgtgagccagccaccaattttgtgctcctcttccatacagaaaagaaggcaagactccagcatgtaaagcactgcttggattgttccacgccacaatcagccctctgtcagagctctccgatgatgaccacttggcactggaatctcctgcagctccataaagctcacttctttgccatctgcttgtacccaatggcttccactgtcagcgagtagcaatggcgtgactctctgcttttgtcggggcgcagaccggacccgcagtccattggtgcagcttcgtggcggagcacgtcgacgcggcc

SEQ ID NO: 112788 - DNA, 378 bp, Zea mays
  Clone ID: MRT4577_34352C.1
atatcctttctctcagtcgcgtcgcctccagcggaacccgattcgtcccagtctcactacagatcaccatggccggggacgaagtagacctctcactggagcctacgtagcgagctcataactttgatgtggcggcgatcgcgaccacgacaccaaactcgacttttatcgactgctccacacctgaccagtactggctggagtgggacctggacaaccagatccacaccaacccggaatctgccgtcagcagtccgactatgatgttcccttccgccatctcgtccgcacataccgtgttggcctagaaagtaatcctaacttccaacaggtcaagtacgcactctctagcttttgacaagccgacctacccctatg

SEQ ID NO: 112789 - DNA, 791 bp, Zea mays
  Clone ID: MRT4577_34353C.1
ccggccgggacccagcagcaagcaatctcgtccccaaacaagcaaccaccgcctccccgatctcgtcgagaggaagcccaatcccgaaaccgccgccctattccaatggcgcccaaggccgagaagaagcccgccgccaagaagcctgcggaggaggagccggcggcggagaaggccacggcggggaagaagcccaaggccgagaagcggctccccgcgggcaagtccgcaggcaaggagggtggcgagaagaaggggaagaagaaggcaaagaagtcggtggagacgtacaagatctacatctttaaggtgctgaagcaggtgcacccggacattggcatctcgtccaaggccatgtccatcatgaactccttcatcaacgacatcttcgagaagctggcggcggaggcggccaagctggcgcggtacaacaagaagcctaccattacgtcccgcgagatccagacctccgtccgcctcgtcctccccggcgagctcgccaagcacgccgtctccgagggcaccaaagccgtcaccaagttcactagctcctaggcgagcgatgcgacgtgcactcgtctcctcttcttgcagtagtgcaatagtagtacggttaggtgtgttgccgtggtggtagttgccgctgtgtttgctttctgggctgggctcggttgatgtgttttatgtaagaaagtaactgtattgtgtctgcagtaccttaccatgcatgttttaagtagcatcccataatctataaggaatatgttttatgtaaaaaaaaaaaaccaaaa

SEQ ID NO: 112790 - DNA, 166 bp, Zea mays
  Clone ID: MRT4577_34354C.1
ctcgaatattgagctccttttatttcaaaaactacactttactgacaaaaatacagcactggacatacacctattgttccattcgatgcgctgtatttttgtcagtaaagtgtagtcttgaaatgaaaaaataagggtatgtccagcgctcatgcaatttttatca

SEQ ID NO: 112791 - DNA, 472 bp, Zea mays
  Clone ID: MRT4577_34355C.1
acggttctagatcgcgagcgccgccctttttttttttttttttaaagcttcaagtacccatcagggactaatattaacatgaagttcaaaccaacatccatcacaaaccaactacccttaactggcactaagtttttagggttcaagaaaagaaagcatctaacagaccaaacataacacactagcagatggagtcccagtagcacaatcaggccctttcacccctgatccggcgagccagctgaatgtctttaggcatgatggtcacacgcttagcatggatggcacacaagtttgtgtcctcaaacagacccacaaggtaagcctctgctgcctcctgaagtgcaaggactgcatggctctggaatcgcacatctgtcttgaaatcctgagcaatttccctgacaagcctctgaaatggcagcttccttatgagaagctctgtgctcttctggtacttcctgatttcacg

SEQ ID NO: 112792 - DNA, 293 bp, Zea mays
  unsure (1)..(293): unsure at all n locations
  Clone ID: MRT4577_34356C.1
ccgaaacaaaaataatgcacagtttcttatctaagcttttgagggagaagtgtangggtttaatgcattctgagtttgtgcagattacactacgtgatatacacatgtctcgaagtaacgcagaagtacatacatatttgacactgaagtggttatttatgtcatagcgattatgagtgccacacattcaccagcttagtcatctttaaaccttgcttctagcccatggtatacttatgtctccaggagcgtacagaggactcatacttggccgtgttagacgatgacatatg

SEQ ID NO: 112793 - DNA, 801 bp, Zea mays
  Clone ID: MRT4577_34357C.1
ggaatggaacatgtcggtctatatagtgtaggaacataccacaaaaagtttggttgggaaaagaaaaaaaaatatacttagccgagtgtacacgaatggcactcgacaaagcattctttgtcgagtgtcagacgtgagacactcggcaaagtagcttatttgttgagtgccaaagcccgacactcggcatagataacgaccgtcagatatagaaggctgctgacgatcctttgtcgagcgccgactttcgccgagtgtttggcactcggcaaaatagtctttgccgagtgtcttcctgtgccgagagtcctcctcttggtaaatgcagtcattaccaagagtggaactttgctgagtgcggcactcagcaaagacttctttgccgagtgcccgatagaaagcactcggcaaagctccgagcactcggcaaagagccggattccggtagtgaaacttggtatccagctattttcaaattttataaatcgcaaatgaagccacaaaatcatgaaacttatctatatgtacaaacctagtaggcctccgtagaagtttcattattccatgtgaaagccgactaggtttgtacaaatagtgtgagaaaactttcatggaacagtgtcaaatttttatcacaatctctacatatgttatcatgatatctcgataagtttcatgattttctgacttcatttgcgctttatacaatttgaaaacaactgaataagtttgtgggcatggttcatgaacatgatgtttgaaaattctaatttgttcttgaatagactgcaacttatgctc

SEQ ID NO: 112794 - DNA, 240 bp, Zea mays
  unsure (1)..(240): unsure at all n locations
  Clone ID: MRT4577_34358C.1
aaatagcaatattcttggtcctcattanatacatgtctgaaactttggtattttctgaagagtggtctgaatcagcagtcttacttgtcctatcaggttcaaaatgctgggctggaaactattggactaagaccggcaaattctnnccaagnntctgtnncaactaattcaggggtttatgagcaattcatgcagaagtaccattagccacagactcaaaattcacttaggttgcagggc

SEQ ID NO: 112795 - DNA, 357 bp, Zea mays
  Clone ID: MRT4577_34359C.1
cgcaagcgcggaacaaggcccgagggcagccagccgggcctgattggcaccgagcgcggacgcgccggagcccaagcggagaaaaaaaaagccggagggaagagaagccccggcggagacgaaggcgggcagccggcaaggaaggaccaacccaaagccgtcaacagaagagacccggcccgagcagaacaccgcagagccggaaggcggaccgcaacaggccaagacggccggaaacgaccgggagggggcgacgaaggacagccacggagcaggggcgaaccccgcaggcgcccagcgccccaaggaagacgggctgcccccccaaaggggggcacagggcaacgacacaaaaag

SEQ ID NO: 112796 - DNA, 126 bp, Zea mays
  Clone ID: MRT4577_3435C.1
atcgatgggcgctcgtacgctcatgaacaagttcctttattgatgtggtcttttgcttatccactacataatcgaagagcacggtctggattactaggttggaggtcacgagtatttaacatgtgg

SEQ ID NO: 112797 - DNA, 403 bp, Zea mays
  Clone ID: MRT4577_34360C.1
gggggcgaaaaaaggcaaaatccttaaaaatgggcgcccccgggtcaaacatacgggggtaaaattgacaaaaccctttggccggcaattttgtggagaaagggcccctccccaccctttccctatgtttcccggggcgcctccctaaccctataacagacaatttttgcttagcgggggggggtccttaaaggtttttttaccttttacacccccggaaccgtcctgttggcccctaccggggggggggggccccgacttggccccattggcggagcccccattttcataaaccgggccggggaggtggcccaaaccaggtggccccaccccggtgtttccgggggccttgggcttaggccaatctgactggggatcggggcttgttttttcccccctaaaa

SEQ ID NO: 112798 - DNA, 391 bp, Zea mays
  Clone ID: MRT4577_34361C.1
gctccacctcggcgtcaacgtcaagatgatcaccggggaccagctggccatcgggaaagagaccgggcggcggctcgccatgggcaccaacatgtacccgtccacggccctgctgggcgacaagaacacggccgtggacggtctccccatcgacgagctcatcgagaaggacgacgggttctccggggtgtgcccggagcacaagtacgagatcgtgaagcggctgcaggacaagaagcacatcgtggggatgacgggcgacagcgtgaacgacgcgccggtgctgaacaaggccgacatggacctcgtcgaggacgacacgactgactcggacctgtcggcgggggacatcatgctgacggagcccgggctgggcgtgatcggtagcgcg

SEQ ID NO: 112799 - DNA, 330 bp, Zea mays
  Clone ID: MRT4577_34362C.1
aaccatccccccagtgcttgctttattggtaggaaaccgaccttcccaccaccggggaggagaaaacggaaaaaggtacccatggagaacatacaatggacaagggctacaaaaaaactatacattaggttttggtttgtgaaaaataacatatcaccgtgcttgtttctcgcataaggggggatgcacagaaccgaaggggtcagacaaataccgggacatgggctaaaaaccgcttaacaaatatactccaggaccccatggcctaagacgctacaaggccgccaccgagtgggtacacatgggagacatcggccctatttagatctt

SEQ ID NO: 112800 - DNA, 268 bp, Zea mays
  Clone ID: MRT4577_34363C.1
agcagtggtaacaacgcagagtacttttttttttttttttttttttttttttttttttttttttttttttttttttttttttttggacccgctgccccaaaatttggaatggcacaaaacagaggcgcggcatattacacaatgggcccagaagaataacaagtctgggttcggaaaaaagcagctcccaactttgaaagaggaagggaagggaactgcccctaacatagtaggggacccccgcgtcccctgggttgttaccactggt

SEQ ID NO: 112801 - DNA, 381 bp, Zea mays
  unsure (1)..(381): unsure at all n locations
  Clone ID: MRT4577_34364C.1
cggcacggaccgggccggaattaattgccggaccggcgagttcgtctgtcggcggccgcccccaatatntgggggttttttttccccaaaaggggggtgccagccccaaagccaaattaacataaatgcgcctaccgaatgaacgacacacagctttgggagcgacatggatccagaaaaagctccccaatggatagggacggggaccacaaacattgcatcttatacacaatttggggaaggcttgatacccgtcctgaggatgccacacgagacaacagctgaggggctagagaaaacacccctgcgaggctggctcctagccacccttaagcgggacatttacaggcaggggcccttgagaaaccgagcacggggcgc

SEQ ID NO: 112802 - DNA, 423 bp, Zea mays
  Clone ID: MRT4577_34365C.1
ttatcaaattctaatgtattgagtttcaaaataatctattcgaaatgtagtgctatacttattataaagttacaactatttattgcatttagaaaataagcatactgaactgaaataacaataattgaccgccaaatttatcatgatgcttgtcacttacttgtagagcttgagttgatatatttcttggtgtaacgaagaactaaaaaaaggcttttattctgaatgctatatatctatatctatatatatatatatatatatatatggatgggttatattacaggctacatgacaagcagaaagctttttgcgaaggattctttcggaaaacgattggatactctaattcatcacgccatcgtagctcacatgaccttgtaaaaatcacacaacagcaggcgatataggctaatgcctatt

SEQ ID NO: 112803 - DNA, 201 bp, Zea mays
  Clone ID: MRT4577_34366C.1
acgcttacaaattttttttcttttggactaaaacgtgtgaaaaacataaaatggatcctaacgagcatatttgcaagaaggcccatcacatcctccaccactaagatgaatgacccccttgtatccaagcagatccagcaaatgatacgtgttatattccaacatgtctaacatatttccaactaaaaatcctgattaaag

SEQ ID NO: 112804 - DNA, 385 bp, Zea mays
  Clone ID: MRT4577_34367C.1
attcggctcgagctgaaaccaacacgctgttcatcgtccagggtttggtgtttcctgtgtctcacgcatgtcgcaatgcgtcccccaccatggcttgcacgacaacgggggcgtgcaacaacctgtggggcgtgtgggtcggcgagctctcgcaggcgctgaatgggacgtggcaggcggtggccgtggccgccacccacgggctcggcgaggacgacgacccgcggctgccgagccagcatcagcagaggccgtggcgaggcgactaccggagcaggaggatcaccaaggcgttgcgaggagccgtggcgtgcgggacagccacgcgggagggggacagtgcgaggtgccgcggtgccctgtccgacaccacgctttaccttct

SEQ ID NO: 112805 - DNA, 144 bp, Zea mays
  Clone ID: MRT4577_34368C.1
cagtgactcgctcgcttttgcgcttcctctgtcactgactcgctgagctcactcaaacgccgtgagcgagcggtatacagatactgagatgccgcatgcaggaacatcacagacataagggcatcacgcagccaagaacatgtg

SEQ ID NO: 112806 - DNA, 492 bp, Zea mays
  Clone ID: MRT4577_34369C.1
ccggccgcgtcgtctcccatcaacataccggctaacgttgcccctcgcgcgcccccgcgttgtcagtttaggacggtgatgaaccgccgttcgtagagaaaaacctgtggttattgcgacattggtcctgtgtgcaattcgccaaaaaaaaaacaggaccgggaggcgttggaaagatcaggtgtgaagaaattcagtggcatttgagggtcagtgggtcactggagctgccgagttctacgacatttcgggtcttcgacctgctgatggtaggattgatatgtggatgtggacgttccctctctctattttcattcgtggttgtaactgatgtactagtagaagattgcttttaaaaaaaacgatctgtgatgtaggaagattgcttttttaaaaataagaatataaatttgcataagcgattatatattctatttatttacaataaaaaagaccaaaggatcgtgcaaaaaaaaaaaaaaaaaagcggcc

SEQ ID NO: 112807 - DNA, 259 bp, Zea mays
  Clone ID: MRT4577_3436C.1
ttgtttttttaattcttgatgttgaatgtcgcttcttgttcttggccacaacaccccacacaattttccgagaatcaactcccagccgggttgaagaaaaacaataaaccgtgcatcctgttggattttacccttttggaagaaaaaaaaaaaaaaaaatggtatatccttgccccgggaagcaaattttttttggccgggggacaaaaacattttttttatttttcggggggttcctttcaattcagtggcaggcccc

SEQ ID NO: 112808 - DNA, 230 bp, Zea mays
  Clone ID: MRT4577_34370C.1
gaacgcccccaatttcccggactgttgacccctcgacaccgctctgtcttcctgacggcttctaaaagttcaccgagatcgcgtggcccaatcccaagcccatcgcggaggacgccaagggcgtcgggaagactcaccacttccgcctgggcaaccttatctgctactgctccgacatctacgaactgctgctcataccccagctcatgctcaacgatacgcctgcgcat

SEQ ID NO: 112809 - DNA, 276 bp, Zea mays
  Clone ID: MRT4577_34371C.1
gaagaagtgatcagcagcttacatgaatccttgaacatttgatatataagaactcctgaaacaactgaatcacaagtaaaagactcttctttgtgtgtttcaggggaaattctggcagcaggtacttcatcacctaaaactgaaggcaagcacgaagaaactgttaataaagaatcggatatgaaggtgccaactgtaagtttgaaagtatctgaaagtgtaattgatgtgaaaacaactatggaaagtatatctaatacgtctacgcagtctctc

SEQ ID NO: 112810 - DNA, 324 bp, Zea mays
  Clone ID: MRT4577_34372C.1
actcctccgaacccatctacgataccatctacaactctagcattaaatgtgacgtttattggggggagtacctgtacggggacattgactctaaattatgtacgaccatgttccctgtcatctctaacattatgagcatagatattactgtccttgctcctagcagcttgaatatcaatgtctatgcgccttctgaaataaaatacattctttgaattgtttactctatccttgtatcgctcatatcgttccattaaatgttaatattcaaggattgattactaatgattctgttccttttatattccacctaaaatgcttttt

SEQ ID NO: 112811 - DNA, 327 bp, Zea mays
  Clone ID: MRT4577_34373C.1
aacaacctatccatcctttgatttctacaagccaagctgacaacaaaactaacaatcccttttagacagacaacgctaaaaccttttgcttggaacctttaaaactaatagttagctactaaaaattagttgttgggtggcaaaaacaccatcggctgatatcatagctaatgattagtttagctttaggagggcgaaacagttccttaaatcacaacaagaaactgggctacaacagtgggcttattaaacttaagacacatcaaagcattgcgacctatgcatggtccatagaccaacatttctttgtcacacgttgttcgatcg

SEQ ID NO: 112812 - DNA, 692 bp, Zea mays
  Clone ID: MRT4577_34374C.1
gtattcttcaccctccgcgcggccactggcggactgcatatgctacatggagagcgcaccatagggcgaaatgcgcccccttctcttctactatcaaacagaacgagatccgactgatcgctgagggcctcctccgatgctatgtctcgtatgctatccttcttcctccggagaagaccacattaaagagatcgtcttcaaggccatggaacacgccctgcgcaacctggtggctgttgccgacatcatcagcaacagggcccctgacttacatccaccatcacacgcatacacctctgtcgcattcctgcatgtctgcgcatagcccatactaacaacgacttggcccattgcagattgactcggcatgatctctatgatatttcttactctgccccccagagagctgaacaagcacactcctggaaaacaagatcctccatttgttgaacatcccaagcttcctgatgtggcacaactgtggcgctcaccttgccgaccatcacgacaacaattccaatggttggactatgaacattcctatccacaggaacgaggaagatggattcgacgctactgatgccaagccatggcataaaggtggctatggtgtgatatggatacactcaacgaggttatcatcaacgtggtgatcattacgacaattatggtggatatggaggatatgatca

SEQ ID NO: 112813 - DNA, 396 bp, Zea mays
  Clone ID: MRT4577_34375C.1
gggggggggagagggccccgaccaatgccccaaggggggcaaataatttttttttcagggcaaaaacaccccggaaattaaaaacttggccatagggagaactaaaaaactttagtttctgaaaaaaaaccaaatactttcaaaaagctgaactgaacaaattggtgttcccggtgactaaaaaaaaaaaaaagggacctttttttgcttccctgaaaaacaaaaccaggccaatatgctattaaagcaaaacccaagaattttaaaataaaaaggcgggggtcaaagctaaaaaaaaacaagcctaaacccataaataaaggaaaggggcagcttctccgggcacttaattgccatacttattcaccaaaaaaacaaagagggcgggaggaaaaa

SEQ ID NO: 112814 - DNA, 222 bp, Zea mays
  Clone ID: MRT4577_34376C.1
tttcaaatatttgacttcaactttattggcccggggttgtgccttaaacttgggttcactggggttcaacctctccactaaggaaaacaaaatcctatcttttttaagagctacgttccttatcgtgatgacctctgatcgaagatattcaagagctatctggcagctctcgtcggcttctttcttttgggccctccaagaattacttagaattaatcccct

SEQ ID NO: 112815 - DNA, 262 bp, Zea mays
  Clone ID: MRT4577_34377C.1
gagctgaggagttccttatatgcagtttatgatgtcacaatagcatacaagcatcggcttggagattttgtggacaaggggtgtggcgttcatccttctgaagtccacatccacgtcagaatgggtgagcttcatcacatccccacaacagaagacaagataacagaatggatgtggaagaggtgtatgcagaaagaccaacttctggcagatatctttatgaatgggcacttttcttgtgaaagaactgaaggagatctgt

SEQ ID NO: 112816 - DNA, 1257 bp, Zea mays
  Clone ID: MRT4577_34378C.1
gaccctcgaggccttccgggtcacagcagagcctctctctcctaagaagtccaaaaggttggggaactgatgagcaaagcagctgggagcaacatgttacaggcagcacctgctgtcaaagctattagtgcagtgtctcagacgaaaccacgtagggctaagcacaggcaagtaaatgctgcagacaaatctccacgtcatatgaaggtaaatcgggggaacagcaaagccgctagtaaggagtctctatcttgtggagaaatgctacggcagatctcattagcagcatgtggtcttaagcagagagaggaaattgctccttcaagtgttaatttctttaccgattttaggaagaactccattttttctagttctgatgtcgatgagaggatgcctgagaaggcaaccaacgccgagtccactccttcagaacagcccattgttgatcatatgcaggatgactattggtccgacattctcattaatgtggaggagccgttatctagcctcaaaaagaagatatataagagtaagaaaagagcaaacaagaaggcacctcaggttaagaaacctcctgttaattcattggcgactgcagaaaatgcggatgagccaaggagtgaaggcaaccaagatacagaaaatggggaacaacttaggaacaaaacgaagctgttttctgcaaatggatctcaacagaatgggacaaaatctggtgaagagatggaaaatagctttctgtctggactggtgctgcacttcagcaggccaagtgatgttccatcatgcagtgaccttatcaagatctttagccaatatggtcctgttaatgaagccaaggcagaggttgcaaacagtaccagctctgctcaggtgatcttcaagaggcgcatggatgctgaggcagcgtttgcaggtgctgggaagatcagtgcccttggaccagcccttacgagctttcgtctcaccgacttcccagcaagtgcttcaggaaataaagcttcacatggtgcatgaaagagcgaatagagtgttgcatggcagtgagggaaaccagatgagggagttagagaaaaaggtatactctactgtatgtggtagctaggttgttgcaggattaattcataggaacagcgatgacacttgtgtcgtccagtgttgtggaggtgtcatatactgcagatcacttgacatgagttgccaagaaccaataggtgttgtaaaagcatgtttgttttaaactgagttttggtactt

SEQ ID NO: 112817 - DNA, 298 bp, Zea mays
  Clone ID: MRT4577_34379C.1
acacacatccaaaggatcccggttatttttttttatttttaaaacacccttcccaataaacgggacccccccgtttttttgtttttcccaacaaaaatttgttacaaaaattttgtggggcgggttcttcacacggaacggggggtgttgggaattaaacagcaaccttttgcacgcaaatgacgggccagagggtttttttcacccccatttggtttttgcgttggcaaccccagggtgtccaaacgcatggtttggggaaacaggttttacccccgggggagggtccatttggggg

SEQ ID NO: 112818 - DNA, 314 bp, Zea mays
  Clone ID: MRT4577_3437C.1
gtttagtttccgcccaacctgaaccagataggacgccgactggatcacttgaagggggtattaaacagctcagaacttactcaagaatctttttggtaccaaagattcatataaacaagaaaaatgcattcaatttcccaaggacctgaaccattcagaggcatttacaggcacttcataaacgtagaatgcctgccaagccattcatgaaccccataaacagcctctgttctcagccgcttattaccacctctgtcaactaaggtctcactgcattttcaaagacctgcaatagtttataatatggaccattt

SEQ ID NO: 112819 - DNA, 346 bp, Zea mays
  unsure (1)..(346): unsure at all n locations
  Clone ID: MRT4577_34380C.1
agcacatatcctccttttcgcgcaggctgggcgtnannatagcgaaaaggcgccgctacacgnatcgcgcctttcctcaaccaagttgcgccagccctgaatgggcgaatggggacgctgctcctgtagcggctgctattaagacgcctggcgggtgggtggttnggttacgctgctagcgtggacccgcttacacannntgccagcgcctcttagacgcccgctccttttcgctttttcttccctttccttttctcngccacgtgtcgcgcggcgtttctctccgtcaagcgttctaaaatctgggggcgtcctctttttagggtgttctgattttagttgcttt

SEQ ID NO: 112820 - DNA, 525 bp, Zea mays
  unsure (1)..(525): unsure at all n locations
  Clone ID: MRT4577_34381C.1
gtctcttgggtagagacgnannanaaaaaaaaagtgggggggggggggggaaaaaaaaaaaaaaaaaaaaaaaagaaaaaaaaaaaaaaaaaaaaaaaaagggcgggcgcgctctaggagggtcccggtttttacgtgccgccgtgctttgccacgctccatagcctctttctttttgttgtgcctcttaatttccatgttcactcggctcgtgggggggggcgagcggtcttgtcttgggaaaaacctctggctgttccccacctttattggcctttgcagttnctttcccccttttcgccagcttggctttattcgcggaggggggcccgccccggatcgcgccttcccacacttttgccctccctttattgggcccntgggcccgggcccttttggcggcgcccttctgcgcgggggttttcgggggttccccccccggtgccccctccttttgcccgcgcccttgcgcccgctcctttggcttttttcccttcctttttcgcgcctttcttcggttttccc

SEQ ID NO: 112821 - DNA, 768 bp, Zea mays
  unsure (1)..(768): unsure at all n locations
  Clone ID: MRT4577_34382C.1
acctaacacacacaagacacacacacacacacgcagtcgaaaggatgtttccagtgacgggctcgccgaaatgcgttgctttccgatcaaagcatacccgcaagtacctaggtagcgtgcaagcagggagcgaggagagcgccggcggaggcaagttcttcgaggagctgagccacggcgccgacgacgtcgatgtccttgcaagcccgtacactagattctacctggagccatccaaggagcacgacgggctcctgcacgtcaggtgctgccacaagaacaagtactgggtggccaaacatgtcggtgaaggcagcggccactggatcattggcatcgtcaatgaaccggaggacgacctgtccaagccgtcatgcacgctttttgagcccatccctctcgcggacacggacaataatctatccatcagattcttccgtcctcagcagacaacaagctctgaatctgatatgaccaaggaaaaggggacaactgaagaagcctacctgtttctgggaaccggagggcatgaaaaagcagttgatcaagttaaatctcttcatgacttctccgccattgatctgtcgaagcaattggtactacctanatatgttgcttttanaggcgacaatgacatgtacctccgggcaaggatcatccagaaacgcaattacctgggattctcatcatctgatattgcagattcaactgtggtcaacactattttcccccnactatgctaatgggaacgtgcgcatanaatctaac

SEQ ID NO: 112822 - DNA, 294 bp, Zea mays
  unsure (1)..(294): unsure at all n locations
  Clone ID: MRT4577_34383C.1
gttccaacctccacctcctccncccgataaagaaactcataaaacttgttagcccttccccnctcctccccttttcccnctatcanaaactnaacaccccatccccccataaatgaagactaaactctccttttctcaactcacctaatgctatttaaacgtctcaacgtaaggcctcctccgcgctcctatttatacaataaacacatcgatcaaatcgcctctctcaaccaatccataaatctgcctattggtccatcaattagagcacggtccacgtcttccttcccttcc

SEQ ID NO: 112823 - DNA, 1043 bp, Zea mays
  Clone ID: MRT4577_34384C.1
cattgggtacctcgaggccggccgggacgagatctcgggaggagaggacacggagcccttcgacgaggcggagctcctggcgctcccaccgtccctcgcgagcctcaccgcctcacttcaagaaatcctactcccaaccaccgctagtacctccagctctcatgtcggctccccacctccgcctacaccgccgctggcgtaggcgacatcgagcgacgaaaccttaacgtccagcccgttctttccccatgacccctccccacacccaccgacgctgccagaagtggatgcgcccgtgtcgccaccgctgcagccgagcgacaccctcgacgacgacaaggacgacgagttcgacccactgttctcggagaccaccggcggcgcgaggtcttcggctggcggctcgcgtggcgcgtgcaggggctcggcgcgaggcggctcggcttcctgctcgggcgtcgagcgcgcgcgggcggggcctggcgcgtagggcgcctggagcgtcgggtcgtcgggcggtcggcgtcgagcgcgcacggcagggcgggtcggggcttcactcgggcgcggtcctagcgcggcttgggcgagcggctcgacgggcaggggcgcagtccttggcggcttcgcgcggtgaagagagcagagagaggaaggtgggggagagggaggagcagaggagagagggaaaagagggagcaggcggcggctgggaggatggcaggggcggcggccacagggaaaatggcggctagggtttaggatgttgggcctaatggcgtcattaaacttgtggacatacccgtttcatcattgttgtccttaaacaactccaaaagtgctgctgccttttcctccccctcctcgcgtcgagtggctccacgcttccacttggttccgaagcactttctgcaatctcctcccatttctggtgtgcttcagctatgcagttcagcagcgtgcttaccctagacggaaaagcgtgtatgagcccagtgaagaaaagcagtggaggttatgggaatgagaggatgaggatcaac

SEQ ID NO: 112824 - DNA, 714 bp, Zea mays
  unsure (1)..(714): unsure at all n locations
  Clone ID: MRT4577_34385C.1
ggagacttcacaaagagagtatagctgtatctctatagctctatagcgccgatagatccatcctctctttccactcctagctagctaacatatccacacatggcggccagttccaaggtcgtgtgcgcatgcattctcatcgttctcgtcatctcaagccacgccgacgcgaggcggctggtggcggcgacgtgcaacggaacggaaggcggagcatgcaagggtggcatcttcgtccaaggatatgcaggcctcagtgcaaggcagaaaatggcggccactgcaacgagcactgagcaggtcgtcggcggcggcggcgaaggcatgccggcgaccaccacggactcccggcctacggctcccggcaacagccccggtattggcaacaaagggaagatcaacaactagtttaattgccgtgtgtgttcttgtatgcgttcttatctaagtaataagcatccaattaagctgagtgctagtagcgcaccggccgtactcgtttattattgtaatctagtgcttgctgccagcgccaccatatttatgtccattttctcttttcatttggcattagtttcgtacgtgctcgtctctgtgtacaatgtccagttcacactgtgcattatgaacttttgtattattatcttgtaaccatgcatatgttcgcataaattaaataaagttctgcgtctagctccnnnnnnnnaaaaaaaa

SEQ ID NO: 112825 - DNA, 277 bp, Zea mays
  Clone ID: MRT4577_34386C.1
aagacgcgtaggaagacacgtagcctgactcgatgccatggccttgcaggggcacacacaatggctgtggcgccatggccatccaactgtacatttgccggctcgacaccaattatggcgaccttaccgtctgactcggcgaccacacctacttgtccggcaaagccccccaaacgccgtgcatggctattcccatatgcgaccacttgaactgcttccaagcggccaccactgatatggggaagaattctaaggggaccagcacgctcgccttcat

SEQ ID NO: 112826 - DNA, 224 bp, Zea mays
  Clone ID: MRT4577_34387C.1
ccacgcgtccgcggacgccttggcgccaccagcacctaatccaaaacggacgaccttacttagatggaggcagtgaccccggacaggaaggcgcgcacacgatcgaaccactggctggaggagtacggaggagcactccgaccttctccgggacacgctgaacaacctgaaggcgaaaatgtacggcaaggccatggagcaattgaccgccgcagggggcgccc

SEQ ID NO: 112827 - DNA, 144 bp, Zea mays
  unsure (1)..(144): unsure at all n locations
  Clone ID: MRT4577_34388C.1
tcgaagcaggcctagtacgccgnctgcgcgttcctcctattacacatacacgcagggaggggccgatatgtgtaataggaggctccatcgaacatcgatggcttgcttctttatcagaacatgtttgaataaacgctatttggt

SEQ ID NO: 112828 - DNA, 385 bp, Zea mays
  Clone ID: MRT4577_34389C.1
ccgccctttttttttttttttgggggggttttttttatttttttcggttttttttacaatttttgttttttttgggactgtaattagttcacttattcattcaaggggtattaaagatattctgcaattattggattgtacaggggaacaacactacaacagggtgtttagggccttatttttacaatggtttggaaggaaacttaaggcccttaccctgtttggtagatgaagaacacaaattccggaaaatttttgcgatgggctttggggggcttaattttcaccgggacatttttggtttttaagggaaggttttggatttataaataatctttatgcttgccatgtccccaccattttttttgcttgggaagggtttttt

SEQ ID NO: 112829 - DNA, 554 bp, Zea mays
  Clone ID: MRT4577_3438C.1
aaattgtaaacagaaacaagtatggcaatggggcttccatctttaccacatctggtgtctcagcaaggaaatttcagacggacattgaagctggccaggtgggtatcaacgtgccaatcccagtacccctgccattcttctccttcacgggcagcaaagcttccttcgcaggagacttgaatttctacggcaaggcgggcgtgcagttcttcacccagatcaagaccatcacgcagcagtggaaggagtcgtctccccagcgcgtttctctctccatgcccacctcgcagaagtgaagtcacccgagctagctcatgtatgtggaaataaacccaggcattgatgtggaatttaagcttcacaggagttgctttcgttaagggtaactcttgtgatgtctttcattgtgctgccgataataagaaagaaaatccagattagacgaccgaatcacacacaaaccaggagagcatgtatttgtacagggaccaaatcaatgtgaacatgcaatggctcaatattacattgtcactgaacttgcagccaaatcgccg

SEQ ID NO: 112830 - DNA, 400 bp, Zea mays
  Clone ID: MRT4577_34390C.1
atcgacagaaacgctcctgttcctgttcagctgcaccacacgatcggtttgcttggatcgtgttcagggacctactggacatgacctactcgtccttctccagtgaccggccggacgcggacggcggtggcgcgaaaaacccgccggggccgtcgccgtcgccgtcggtggaggacgcgatgagcttcgtgcagatggtgaaggaggcgttcaaggagcgacagccggacaagtacggcctcttcctccgcgtcatggaggacttcaggaatcagcggctcgacatcgccgaggtggcgtccaccgccaaggccctgttccaggacaaccctgacctggcgctgaggttcaacgtctttctgcccaagggccaccagatccagctcgggcttgatgagct

SEQ ID NO: 112831 - DNA, 355 bp, Zea mays
  Clone ID: MRT4577_34391C.1
gagcatggcacttctatagcctccttgcagtgtcagcaagcgctaatacactgactgttattccacaacgctcacaacaataccatctatccgcgctacagccgtgggatttcaatacccaactatacaatcctacatggtacaagaggccattcaagccagcatcatactgtcattagcaattaatccttcaacaaccatatgcatctattgcaacagccatccttagggcaatttgtttcttcaaagaattgcagtacaactactacaacatcatatgctaccaacaattaatcaagttgttgtagataaacttgtctgttatctacaacaacaacagatgttatatatcaaa

SEQ ID NO: 112832 - DNA, 212 bp, Zea mays
  unsure (1)..(212): unsure at all n locations
  Clone ID: MRT4577_34392C.1
cacggcagngcacgggcacggaacccaggcaggcggaccccggcaggccgcaaaccgagccagcggagggcagaacaccagcgcgcagggcgcgccccgccgaggccgggcggagcaaaaccnccagggcccccaggaccaccggggaccgccaccaacaccacgcagaccggaccgcgcaccgagacccgaaccgggcgcgcggcccaggc

SEQ ID NO: 112833 - DNA, 230 bp, Zea mays
  Clone ID: MRT4577_34393C.1
ggcgccgaccaggcttctgcacttcaacattcctctcgagtccggggagtacatgtcgaagcacgtcttcgactgaaagtgcccgaccaagggctgcgagctgctggatggaaaggtactgcctgtgatcatacaggtgatcactgatggcctcgatctagctgctcgtgatgttgctcatactagagcccatctacctactcatgtagtacgtgtcccgcagcgtgctc

SEQ ID NO: 112834 - DNA, 464 bp, Zea mays
  Clone ID: MRT4577_34394C.1
cttggccccagaagcaaggagggagccaaaaaacacaaagggagcaaacaaacacccaaaaaggacaaggacgggaacccgaaccaagagaggggaacgggcgccggaaaagaatcaggggggggggaggaaaaaagtcaccaagaggaaaaggccccatagcgggaacaaaaaccaagacaaaaccactaaagagtccattcataaagagagaaccaaaaggaaagacggaaaaaaagacccagaagggaaaagacacacctaaaaaggaacagcccagcaaaaagagacaaagcacaaaattgggccaacaaaaaaaaagggggcaaaacaaaagagcgggacccgaacgcggggggcgacccggaaatccgggcccagcccgagaaggcggaccagttcccccaagagggggcacaattaaaaccggggggaaaaaggggaacaggcgcaacccgggaaaa

SEQ ID NO: 112835 - DNA, 435 bp, Zea mays
  Clone ID: MRT4577_34395C.1
tgtaattcggcacgaggccgcctggccaggcgacaccctcctgcactgctctttccttccagccggcgcagaacccggttgatagcgctatgggctctgaatctccctggcgtggaaggtggtctcgatatggcctgggacccggggacgttcgctttccactttgacaccaaccaggttgtatcgctcatcgtgagcaccttttactccacaccgtgaaaagtttcttagctggctaattaccatatactcctacgcctaggatcatagcacgatcgcgagttcgctagacactaacaagctggatgccctgcacggactgttcatttacatcatggatgacatactcaacctaactatgacaagttgttgagagaggcattggtctgaacaagctacaccttgcgaacaaccatggtaccaatgaacgatctg

SEQ ID NO: 112836 - DNA, 367 bp, Zea mays
  Clone ID: MRT4577_34396C.1
ctcaacaccacggggccatcatgttatcgtgggcaatctgctcatgggaacgtcctactcttggccgtacctgacttgctggctgtggccgtgacagccggattcagcggttgttaccacaactactggccctggggtctgagacttggcacgggctgtacggaacgaggcgagttgctgacgccaggttatatgaaaagaggcactccatgcacttatgttgggcgacaccctgactccaccaatcatcgaatgcacccggactggactcttggttagactcaatgatccactgtggtgactagcatgccatatgcgggttctcaaacgatgatactactgaagctgcggctgatactctactgat

SEQ ID NO: 112837 - DNA, 431 bp, Zea mays
  Clone ID: MRT4577_34397C.1
aaaacccgctaagctgatttaaatccataaagaaaaaaacttccccttgccctactaaaaaaaaccacataaatttgtttatgactcccctaacacaagactcacccagatcaaacccccccccaaactttaaattacgggtacgaaaaaccaccctgaataaaaatcggggggtttacataggaatccctaaaccaaacaggtttttcaaacgctaatttaaccccaactcctgaaccaagcagccaggagttagttacccaatccacctttttttttttttaccaaattttagggaggggtgggttcctatggatagccaaaattgggctagaaaaatttatgggcccaaccaaacggaaaaaattttttaccttggataaggggcggccaaaaactatccataaaaaccaagctggggtgggattttt

SEQ ID NO: 112838 - DNA, 306 bp, Zea mays
  Clone ID: MRT4577_34398C.1
aatatttttttttttttttcaaattttgggggggattaatggagaaaagggagcgtaccaacaacaagccgaaacaggacacaaccaccgggaactcaaagcaactcccacaagaacggacacaagaccacccaagcacaggggacgcaacaacaacccacggacaaaaaacctgcagaacaacgggcccaagcgcagagagcgccaacctggagaagcaaggagccgggcaaccgggcggacatggcccaccgggtacacccccaagggcacagcaccgagggagagaacggtgcaccgctggta

SEQ ID NO: 112839 - DNA, 650 bp, Zea mays
  unsure (1)..(650): unsure at all n locations
  Clone ID: MRT4577_34399C.1
attgggtacctcgaggccggccggggtcctcctcttctacgcgctcacgtccgagttactgaaacgctcgttatcctccaccgtctctccatcgccagccgccgccgccgaagcccaggcgctgctgcgatggaagtctagcctgctaccgcccaactccaccagcagcagcagtagctccccactgtcctcgtggttaccaggggccgcgggctccgtgtgcacgtcatgggccggcgtcacgtgcgccgacggcgagaacggcgcatcaccggtgtcgcgctccagggcgccgggctcgccggcacgctcgaggccctgaacctcgccgcgttcccggcgctcacagcgctcaacctcagggaaccgcctggccggcgccatcccgaccaccatctcgaaactgacgtccctcgtctcgctcgacctgtccagcaaccgcctcaccggcggcatcccgggcggcgctggggacgctgccggcgttgcgggtcctcgttctgcgcaacaactccctcggcggtgccatcccggcgtctctcggncggctgcacgcgctggagcggctggacctcagggccacgcggctggcctccaggctgccgccggaagatgggggggcatggcgagcctcaggttctttgatctct

SEQ ID NO: 112840 - DNA, 367 bp, Zea mays
  Clone ID: MRT4577_3439C.1
gcaggaccggcccggaaaaccgggtcgacccaccccgccgttgaccgacagggcggaagcactaaacagcgggggcctgaagtaagggccacgcgacagaacacgcgaaaagcagcacaagaaacgaagaggaggcaacagccgaagcgcgggacgaaagcggccggggaaccccggaaaataccccacacacagcccgagtaggcgaaagaaccccacaacgaccatgacaacagcgagaaacagacgaatacgcgcagaacaccataaccaaagggcgccaaggggcaaaagggcgctcaaaggagaaaccagaccaaaaaaacgagccaaagaaaaagcccaggcgacgcagaccctgcacgcc

SEQ ID NO: 112841 - DNA, 612 bp, Zea mays
  unsure (1)..(612): unsure at all n locations
  Clone ID: MRT4577_343C.1
aattcggcacgaggaacccgccttctccctccactaccttccccacccaaatgctcctctcattctccccgcacttttctcctctcctcatctccttgccctcgacttccgcctgcaaaccccacgcccgcctccgtcccgtccacgcctccgcctcagcgtccacctcgccggagctgctcggcaagtccgcgctccgccgcatctccgacaagctccgtagcctcggctacctcgagaccgtctccgagccccccactccggccccgaacaagagcggggacgccccctcccccggcgagatattcgtgcccaccccggcccagcttccgcgccaccgcgtcggctccaccctagacccgagctgggccacgggcgacggtgaggctagctccacctcgcggcagcggcggaggggccgcgggcgcgatgcgtcggggtcaccttcggcgccgccgtccgcggcggagttggcgctaccgcgggacgaactgcgacggctgcaggggatcggaatcagggtgaggaagcggcttaaggtggggaaggcgggcatcaccgangggatcgtaaatgggatacacgagcggtggcggaaccgcgaagtcgtga

SEQ ID NO: 112842 - DNA, 2754 bp, Zea mays
  Clone ID: MRT4577_34400C.1
atggccatgatgggttcaacatcggaaaagctgtacctctgccaggtaccaaactttgggtttgaaatgataaagctgagaccagggttgcccaaggtccattggacaaggacaactgtaggtgggcctaatgacttgggaggttccgtcacagctggtatcggagcgaagcctatctcttcagatattataaaacatttcaaaaagaattttcaatacttatccaagaaaatttctttcattcttaccttgtcactttctggaagtactcatcttgtaataccagatatgccgcatacgaggaaaaccgcacataagtccactggacccattggcgtgcctcgtcatcagttggctccaagacatgaagggagcaacaacggcaacaacgatccaatcagagacttagaagcccaagtggaacagcttcggacggagctacatcaccaaaatagggtgtgggcagaagacagtcagtgtatagctgagttgtcagccgaagtcggccgcttgcggtactccgaacgagactcggccattgattgggccattaactcgcgctcgatcacttggcatcgtgaagcaaaagctcgagctcgtgtggatgagctcagcacgaccctttgtaacctgcaagtatattgtaatactctacatgagaaagtacatgtactgtatggtcgactacactcggacgtgcctgctgaccctattgcaatgggagccagaccatcggggacagcaggtgaaggacctgatgcggaactggatctttttaagccccctccttctacgaacctggctgatgagcgatgccatcaaggactcgtgcgcatgacggtgcgggtacttcccgtggccgggaagatactccaaatccaccacctgtaccaccaacgctggccgaggctatcgctgccttggttaacgcgactgtcgataatacccgctttttacgcgagatggcgggtaaccaattccagcagcaaggcagaagggctcctccatagggaccgtgtaaaacctcatacctggacttctctgaaacgcgtcccccacccactctttgttaaagctgaagatcctcttgaagctgatgagtggatcagggtaatagagcaaaagtttggattaatccgctgcaccgaaacacaaaagtcgttgttcgccgcccaacaactaagaggtcctgccagtacttggtggggaaattttgtggcgattcaacaagctggacatcaggtcacttgggatgaatttaaattggcattccgtgagcactatattccagaaggagtgcttcacatgaaacaagaagaattcattcgactaaaacaagcaggggatactgtgatgcagtatctcaacaagtttaatcatttatcccaatatgcgattgatcaagtaaacactgacctgaaaaagaagaattgcttcatgagaggactcaacaatcggctccaaaggaaaatggtcacctgcctagatcttacatacagcagggcagtcaccacggcgctggcagtggaagccaagaatacaggccaaggaaaatccaagggatttggaggtgacaggtccaatcagagacctaagaagcgaacaagttcctcaactggctgcttcaactgtgggaagtctggtcattttattaaagactgcccatatccgaggcagaataaatccaacaatcagcaaaactcggggagctcaaatcaaggcaaagggaacatggcaaataattcagcgggcaaaaatgtgaagaaaactgggcgaatttattacacgcaagtggccactacaccagaaggtgagccgatccgtgttcgacccaaggatatacccaagaccgcatttactacgcggtatggactattcaaatatttggttatgtccttcggattgacgaatgctcctgcccacttaacatatctgatgaactcggtatttatgcccgagttggacaaatttgtggtcttcattgatgatattttgatttattctaggaatgaagaggagcatgctaaacatttacggatcgtattaacgcgcttaagggaacatcaattatatgctaaattcagcaagtgcgcgttttggctggaggaaatccaatttttggggcatgtattgtctgcaaatgggattgcggttgaccccagcaaggtccaggatattctagagtggaaatcgccaaccattgtacatcaagttcgaagtttccttggactggctggctattaccgcagatttatcccggatttctccaagattgtgaagccaatcacaagcctattgaagaatgatattaaatttaactggtcctcaaaatgcaacgaagccttcgagcaactgaagttagaactaaacatgaggcagaggagatggcttgagctgattaaggattatgaattagaaattcattatcacccaggcaaggccaacgtggtggcagatgcactaagtcgcaaggcttcctgccattgtcttacagtaaagacctctgacaccaccttgtgtcaagaaatggagaagttaaacctgggaatgattcaacatggaaccttgatccaattgaagcttgagtcgattcttctgcaaagaattattgatgcacaaaggagtgataagggtatgaaacatattcatgagaaaatagaagccgacaaaacaaattgttttagaagggataatcaaggcatagtatggtttaataatcgcatagttgtgcctaaagatgatgaagtccactag

SEQ ID NO: 112843 - DNA, 246 bp, Zea mays
  Clone ID: MRT4577_34401C.1
gggtaccctcggggtccggccggggacctcttttcttttaccagtggtgcattcattattaggacggtaccggcttggggtaattaaaggggcaccctgcactcgcaacacgagactacaccctcctcactgctatatgcacccgacatacaggatcactgcaggcacacttatgggggcccgggtgcgcagagaggggagcagacccgccctcgcggaaaagggggccgggcatacggggggggg

SEQ ID NO: 112844 - DNA, 268 bp, Zea mays
  Clone ID: MRT4577_34402C.1
caagagttattatagggcaaaacttaaaccagtctgggctgctaccgcacgctatttgtaagtcaagtacatgcacgcattggtctatttaccggtgctattggagcaacgcaaacaaaagctacacatccatcacggctgcggcaatatacatacatgccgccccagcaaggaagaaaattaaaatcctataaaaaaaaattgggccgaaatcataaagaaaacacccgtacccgcgaattaatagcgggccgatacctgcacccaa

SEQ ID NO: 112845 - DNA, 458 bp, Zea mays
  Clone ID: MRT4577_34403C.1
ggccccccgcaagcagttcgccaccaaggtggttaggaagtcggcgccgacaaccggggtgttgaatattcccaataggtgcgggcccggaacagtggcgctgcgcgagatccgcaagtaccagaagagcacggagctcctgatccgcaagctgcccttccagcgctggtgcgcgagatcgcgcaggacttcaagacagacttccggttccagagccactccttgttgtcgctccagtagttcttatttatttttttttctttttatatttttttttatttttttattttttatttttttttaattttgggttgatggttggttgttttttttttttaaataattaatatttattaattattttcttcttttatatatatattattttaaatattttttctttttttctattttttatattttatatatttattttttattaatttatttatttattt

SEQ ID NO: 112846 - DNA, 543 bp, Zea mays
  unsure (1)..(543): unsure at all n locations
  Clone ID: MRT4577_34404C.1
aaaagaaaccacagtggcgggtcgaccatgccattgccattatccatcatatatcatctttgtggcaacaccccctaaaatgggcgggaacatttttacagatcctgccatgataataaagttccacgaaaattttgccgaaacacgaacaaatccccccaaccggggtcgataataaagttcccaagatctcaaaaaaaaggggaaggtccaaaaaaattactgttttttaaaatcagctggattacacctagtaggctttggctagctaggggaccaagggcttgtccccgtcaacaagaagtggcgccaacggcccctccagaagccggaagtccaaaaagctcggcccgttgttgttaaggtaacttcccttgcctccgccgccgccgtgtcctgcatttgccgaagggtcaaccatgtccccaacccccatttcgccgttggaaaggttgccgtccaccaccggatgcggaaaaggctggtggagcggcttnngggggtactccttcttaacctgccaccgttggggaaactggagga

SEQ ID NO: 112847 - DNA, 382 bp, Zea mays
  Clone ID: MRT4577_34405C.1
gcggccgccctttttttttttttttttttttttttttttttttttttttttttttttttttttttttggtttttcccaaaaaataatactggcgggttccaaaaaatatttctgacagatcaagagacccctgggacaggtcacacaacaaacccccttggttttgcaatactttgcatcacatagcatgttttcatccaagcgggttcattttaattttttttataaatattccgggatccaaacatccgggcattcttttaagaggggaatcataaaacatgctctggaacaagaggggcaatctaagcttggggggaatcagttcccctttggggcacccttttttgcagcctggggaggggttttttttgttttattt

SEQ ID NO: 112848 - DNA, 272 bp, Zea mays
  Clone ID: MRT4577_34406C.1
gcagtactaatattgaactttgaagcctagtcagatcagatattaataaattcattgttttatgataatgatactcggtagaggtaaagaaataaagattgttcaagatttaccactatcgttatgcagtcacaaaataaatggtactaatatattgtttgtaaaatagagatctatgctaatgttttggtccacggtaaatacgaaattttggattgcaattaaccttctgcgttggcgctgtgcagaatgctcttctggggttcgagaag

SEQ ID NO: 112849 - DNA, 328 bp, Zea mays
  Clone ID: MRT4577_34407C.1
aaaaggccgcggtcgcaaccgggctctcgccggaactaccccctgggacgagagaaaccagcccgacggaggacgaggaaacccaaccaggcccgccccggagaacggcccagcgaagcggcaaacagggccacggtccgtccggggcggccacccccccaggggggcggtccggagaggcgggccccgcgaccggaccggggccacgcctcgccggacaggaacgcccccgagggggagagccccgcccgagccggaccctgtcggaccaggaggcgccgtcggcgagccgggctgttcgggaaggcagcccaaggcgggcggtgga

SEQ ID NO: 112850 - DNA, 6068 bp, Zea mays
  Clone ID: MRT4577_34408C.1
atggacacgcaacaacaaattcactggtcggttgacggtcctcgtgggtctgaaacgccgacagttggcgcgccaggtaggggctcgctgcgtgttaacgaccactttcccaatcgccccccaaaccaacccggcaggccgccacaagccgcatcacgccgccggccatggaccgggcctcgtgcgacctcccggccgggggcgccgacaagctgctccgcccctcgccgtggatccggcgcgcggctccgcggcccttcgggctgcggcgcacctgcctcgggttcccccccgtgtccgaagaggaccaccccgctctgccccgccaccctcctcctgcgacgagtacgatacggggcaacagtggccatgcaggaggcgtcaccttgtcggctgtcgggccagcgcgagtcagcgccgcccgcacccctgcgggagccatgtcaggtgttgtcctcgcacctgagacaacgacgggtgtcacttccccgcaacgtgccaaccccaagcggactgatgacgccatcaccctcgcaaaggacttgctaggcgttagcctcgtacctgagataacggtgcattccgtccctgacgcgacttcaccaccgtccatcgaccaacaggtaccgtccgttttccaccatgtcccttttagattcagcttcgatccaccaagcgaccccgcttcggtgagcgctttcgcaagggcataccctgaccttccagggtatcatatgtggtcatcttgggaccgactgacgaccgtctcaacctccggacccgcgggttctgaggaagacgatgactccgacttcggttgggatttctccggactcagtgatcccagtgccatgcgagacttcatgtccatgtgtgactatcgccgctgcggttgctctgacgatgtccacggcgtccgtgacgagggtgacgaccctcgccgcgagtgtttccacagcgatcgggggtatcaccgctatgacagccacctcggcgcgccgcgtgctggccaagcccctgtgcctgcttcacaccctaacatctcgcggcagcgaactgtggccaagccctacgaacaagcatggcgactagtggagcttcgacagaactttgagcaggaatgagcatggcgagcacgtgctggaggagcgcgtcatcggctccgagacgtccagcgtctaatcgttgacgaagccagggcagggctgcccccggccttcagcggggtcggccagaatctagctgcagcgtcgatgctactccgaacaatgccggagccatccaccaccgagggacggcgtatccagggcgaactcaaggatctcctggaagatgccgcagtccgacgagccgagagctctgcctcccgaaggcaagggtgccccttggagcatcgcgcaacgccctcccgacgcatacgggaggcctcggttcgcaccgagcgcacgcgggatgggacgcccgcagccccggatcgcctcaatagcgagcagcaccaccgcgaccgtcgagcccgcctcgaagagagggtgcgccgaggctaccaccccaggcgcggtggacgctacgatagtgaggaggaccggagcccctcgcccaaaccgccaagtccgagggtcttcagccgggccatacgacgggcgccgttcctggcccggttccgagccctgactaccatcaccaagtactcaggggagacaaggccgaagttgtggcttgcggattatcgactggcatgccagctgggagggacgaatgacgacaacctcatcatccgcaacctcccccttttcctctccgacgccgcccgagcatggctagagcatctgcctcctacgcagatctccgactgggacgacctggtcaaggccttcgcgggaaacttccaaggtacgtacgtgcgccctaggaactcatgggatctccgaagttgccgccagcagccaagggaatccctgcgagagtacatccggcggttttcgaagcagcgcaccaagctgcccaacatcaccgactcgaacgtcatcggggcattcctcgccggcaccacgtgccgggacctgatgagcaaactggggcgcaagactcccaccaaggcgagcaaattgatggacatcgccaccaagttcgcctctggcaggaccctcggcagaaggtggcaaggaccaaggcaacaacaagaagggggcaacaaggaagaggagttcccggaggtccgccactgcttcatgatctatggcggacaggtggagaacccctcggctcggcaccgcaagcaggagcgccgggaggtctacttggtaaaggtagcggcgccagtctacctagactggtccaacaagcccatcatcttcgaccaaggcgaccaccccgactatgtgccgagcccaggaaggtacccgctcgtcgtcgaccccgtcatcggcaacgctaggctcactaaggttctcatggacggaggcagcagcctcaacatcatctacgccgagaccctaggactcttggggatagatctgtccacaatccgggccggtgcagcaccctttcacgggatcgtccccgataagcgcgtcctgccccttgggcaacttgatttgcccgtctgcttcggaactccctccaacttccgcagagaaaccctcacgttcgaggtggtcgagttccaagggacctatcacgcggtgttgggaagaccgtgctacgccaagttcatggccgtccccaactacacgtacctcaagctcaagatgccgagccccaagggaatcatcaccgtcggatccacgtatcgccacgcttacgagtgcgacatggaatgtgtggagtacgctgaggccatcgccgaatccgaggccctcatcaccgacttggattgcctctccaaagaggcgcctcatgcgaagcgccacgccggcaacttcgaaccagtcgaggcggttaagaccgtcgccctcgaccccagcagcgacgcctgcaagcacgaagcagtgctcgtcgacttcctccgcgcaaatgccaaaatttttgcgtggagtccctcggacatgccaggcataccgagggatgtcgtcgagcactcgctggatatccgagccggtgcccgacccgtgaagcagcacctacgccgctttgatgaagagaagcgcagggccataggtgaggaggtccacaagctgatggctgcagggttcatcaaagaggtattccatcctgaatggttagctaaccctgtgcttgtaaagaaaaaaggtgggaaatggaggatgtgtgtagactacactggtttaaacaaagcatgtccaaaggttccctaccctctgcctcggatcgatcaaatcgtggactccacggctgggtgcgaaaccctatcattcctcgacgcctattcaggttatcaccaaatcaagatgaaagagtccaaccagctcgcgacttctttcatcacaccctttggcatgtattgttatactactataccatttggcttgaggaatgcaggtgcaacctaccaaaggtgcatgaaccacgtgttcggagagcacatcggcagaacggtcgaggcttacgtcgatgacatcgttgtcaagacaaggaaagcctccgacctcctctccgacctcgaagtgactttcgggtgcctgcgtgcaaagggcgtaaaactcaatcccgagaaaggcatcgaggccaacccggagaaaatcgcagccatcaccaacatgggacccatcaaagatttaaaaggagtacaaagggtcatgggatgccttgcggctctgagacgcttcatctcgcgccttggcgaaaaaggattacccttgtaccgcctcttaaggaaggccgagcgcttcacttggacccccgaggctgaggaagccctcggaaacttaaaggcactccttactaacgcgcccatcttggtgccccccgctgcgggagaagccctcttgatctacgtagccgcaaccactcaggtggtcagtgccacgatcgtagtcgagagacgagaagaggggcatgcactgctcatccagaggccggtctacttaatcagtgaggtgctatccaagaccaagatccgctacccacaaatccagatgctactgtacgcagtaattctgacacggcgaaaattgcgacactacttcgagtctcatccggtgactgtggtgtcatccttccccgtaggagagatcatccagtgccgagaggcctcgggtaggatagcaaaatgggcagtggaactcatgggcgaaacaacttcatttgcccctcggaaggccataaagtcccaagtcttggcggacttcctggctgaacgggtcgacacccaattgccgacagctccaatccaggacgaactttggaccatgtacttcgatgggctgctgatgaaaacaggagcaggtgttggcttgctcttcatctcacccctcgggaaacatgtgcgctacgtgcagcgcctccattttccggcgtctaacaatgtggccgagtacaaggctttgggcgactcgcagcttgtcattgaccaagtcatgaagaactcccactgccgcgatcgaaaaatggaggcctattgcgacgaagttcggtgcttggaagataagttccacgggctggaactcaaccattttgctcggcggtacaacgggactgcggatgagctggctaaaatagcctcggggcgaacgacggttcccccggacgtcttctccaggaacatatatcaaccatccgtgaaactcgacgacgcgcccgaacccgacgagacctcggcccagcccgaggtaccctcggccgccgagggtgagaccttgtgcatcgagggagagcggaatggggttgcgccaaaccaacactggcagaccccgtacctgcaatatctcctccgaggagagctgccccttgacaaggccgaagctcggcgactggctcggcgcgccaagtcgttcgttttactgggtgatgaaaaagagttgtaccaccgcagcccctcaggcattctccaacgatgcatatccgtcgcccaaggacaagagctgttacaagaaatacactcgggggcttgcggtcaccatgcagcacctcggtccctcgtcggaaatgctttccgacaaggtttctactggccgaccgcgatggccgacgccactaggattgtacgctcctgccgagggtgtcaattctacgcgagacagacgcacctgcccgctcaagccctgcaagcaatacccatcacttggtcgtttgccgtatggggtctggacctcgttggttccttacagaaggcacctgggggcttcaagcacctgctggtcgccatcgacaaattctccaagtggatcgaggtggtggcgttctttacaaatatcatccatcgctttggggtcccaaactccatcatcaccgacaatggcacgcagttcactgggaagaagttcctggacttctgcgaagaccaccacatccgtgtggactgggccgccgtagctcacccaatgacaaatgggcaggtggagcgcgccaacggtatgattttgcagggactaaagccgaggatctacaacgacctcaataagttcggcaagcggtggataacagagctaccctcggtggtttggagcctaaggacgacgccgagccgggccacgggtttctcgccgttctttctagtctatggggtcgaggccatcctacccacggacttagaatacggttccccgaggacaaaggcttacgacgaccaaagcaaccagaccaaccgagaagattcgttggaccagctggaagaggctcgggacatggccttactacaatcgacgcgatatcagcagtctctgcgacgctaccatgcccgaagggttcggccccgaggcttccaagtgggagacttggtacttcggctgcgacaagacactcgagggcgccacaagcttactcctccctggaaagggcccttcatcatcgccaagattttgaagcccgggacatacaagctagccaacgatcaaggcgaggtctacaacaacgcttggaacatccaacagctacgtcgcttttacccttaa

SEQ ID NO: 112851 - DNA, 394 bp, Zea mays
  Clone ID: MRT4577_34409C.1
gagggaaaaccttatttttttttgggcgttacattttgggggcaaaaattcaacacatactggtcaaggccaaatttcagcgggggggggaccatgaaaaaaaggggttttctaacatccaccctgttttggatgaatgggtaaaaaaaccggtaataccggcttttggacaattatgctttgagagggggcccgggattgaaaagcggggtcacaagatgctgcccaacaaccattggggcccagcccgccagtacaacataagccctaaccttgcttggggccgggtcatcaaaatttggctcccccagacccaaaagggatcgcccctatcaggggtgggcctcccccgagccggaatgaaacccaatttattgggcgatttttttccccc

SEQ ID NO: 112852 - DNA, 487 bp, Zea mays
  Clone ID: MRT4577_3440C.1
cggacgcgtgggcggacgcgtgggttaagaaaggcaggcatgcacaagagctgatatcaacatattgggtgaattattgatctttcgacgagagggtgtgacatgactcaattcatggaggagatgacattcactgctcgactactaccatgttgcatcttagcaattaatacaccacctcatatggttgcgacgatcttgtatagcacaatacctagccattatggcacttgtcctgcaagtaattgaagaactaccaataacaagtaagacaagtactgaattaaggtttcaaactgaatctccaataagatgggattccgaacacaaaaaatgtgagctggtctagcacgtgtgcttacaagcaagtagcaagctaaacttgatctaagcaaaacccaagagttaatgagagtgatgcctactatttagtgttgaattattagacattttccagattaaatttcgaatataattcatgactatc

SEQ ID NO: 112853 - DNA, 2757 bp, Zea mays
  Clone ID: MRT4577_34410C.1
atgccgttcggtttgaggaatgcgggcgcgacgtaccagcggtgcatgaaccatgtgttcggcgaacacatcggtcgcaccgtcgaggcctacgtcgatgacatcgtagtcaagacaaggaaggcttccgacctcctctccgaccttgaagtgacattccgatgtctcaaggcgaaaggagtcaagctcaatcctgagaagtgtgtcttcggggtgccccggggcatgctcctggcgtgcatcgtctccgagcgaggcatcgaagccaacccggagaagatcgcggccatcaccagcatgggacccatcaaggacttaaaaggcgtacagagggtcatgggatgcctcgcggccctgagccgcttcatctcacgcctcggcgaaagaggtctgcctctgtaccgcctcttaaggaagaccgagtgtttcgcttggacccctgaggccgaggaagccctcgggaacctgaaggcgctccttacaaaggcgcctgtcttggtgcccccggcggatggagaagccctcttggtctacgtcgccgccaccactcaggtggttagcgccgcgattgtggtcgagaggcaagaggaagggcatgcactgcccgttcagaggccagtctacttcgtcagcgaggtactgtccgagaccaagatccgctacccacaaggtcagaagctgctgtatgctgtgatcctgacgaggcggaagttacgacactacttcgagtctcatccggtaactgtggtgtcatccttccccctgggggagatcatccagtgccgagaggcctcgggcaggatcgcaaagtgggcggtggaaatcatgggcgaaacgatctcgttcgcccctcggaaggccatcaagtcccaggtgttggcggacttcgtggccgagtgggtcgacacccagctgccgacggctccgatccaaccggagctctggaccatgtttttcgacgggtcgctgatgaagacgggagccggcgcgggcctgctcttcatctcgcccctcggaaagcacctgcgctacgtgctgcgcctccatttcccggcgtccaacaatgtggccgagtacgaagctctggtcaacgggtcgcggatcgccaccgagctaggggtcagacgcctcgacgcccgcggtgattcgcagctcgtcatcgaccaagtcatgaagaactcccactgccgcgacccgaagatggaggcctactgcgacgaggttcggcgcctggaagacaagttcttcgggctcgagctcaaccacatcgctcggcgctacaacgagaccgcagacgagctggctaaaatagcctcggggcgaacgacggtccccccggacgtcttctcccgggatctgcatcgaccctccgtcaagatcggcgacgcgcccgagcccgaggcgccctcggctcggcccgaggtaccctcggctcagcccgaggtaccctcggcccccgagcccgaggcactggacgtcgaggaggagcagagcggggccgcgcctgatcgagattggcaggccccgtacctgcgatatctccgccggggagagctaccccccgaccgagccgaggctcggcgggtagcgcgacgcgccaagtcgttcgtcttgctgggcgacgaggaggagctctaccaccggagcccctcgggcatcctccagcgatgcgtctccatcgccgaaggtcaggaactcctgcgagaaatacactcgggggcttgcggccatcacgcggcgccccgagcccttgtcgggaatgccttccggcaaggcttctactggccaacggcggtggctgacgccactagaattgtccgcacctgcgaagggtgccaattctatgcgaagcagacccacctgcccgctcaggctctgcagacgatacccatcacctggcccttcgctgtatggggtctggacctcgtcggtcccttgcagaaggcgcccgggggctacgcgcacctgctggtcgccatcgacaagttctccaagtggatcgaggtccgacccctgaacagcatcaggtccgagctggcggtggcgttcttcaccaacatcatccatcgcttcggggtcccaaactccatcatcaccgacaacggtacccagttcaccggcaaaaaattcttggatttttgcgaggatcaccatatccgggtggactgggccgccgtggctcatcccatgtcgaatgggcaagtagagcgtgccaacggcatgattctacaagggctcaagcctcggatctacaacgacctcaacaagttcggcaagcggtggatgaaggaactcccctcggtggtctggagcctaaggacgacgccgagtcgtgccacgggtttcacgccgtttttcctggtctacggggctgaagctatcttgcccactgacctggaatacggctccccgaggacgagggcctacaccgatcaaagaaaccaagctagccgagaagaatcgctggaccagctggaagaggctcgggacagggccttactacactcggcgcggtaccagcagtccctgcgacgctaccacgcccgaggggtccggtcccgagacctccaggtgggcgatctggtgcttcggctgcggcaagacgcccgagggaggcacaagctcacgcccccctgggaagggccattcgtcatcgccaaagttctgaagcccggaacatacaagctggccaacaatcaaggcgagatctacggcaacgcttggaacatcaaacagctacgtcgcttctacccttaa

SEQ ID NO: 112854 - DNA, 167 bp, Zea mays
  Clone ID: MRT4577_34411C.1
tgctaaacctgctgccaccctgaaaatggggggaaacagggtcctcctaaacgaaacccaggatgcccttgaggttaccttttgcctgggccttgaccgcagccttgatctcatcataggttgctgacttttcaagcctaacaggcaaatcaacaacaaaaacatgg

SEQ ID NO: 112855 - DNA, 2898 bp, Zea mays
  Clone ID: MRT4577_34412C.1
atgccgttcggtttgaggaatgcgggcgcgacgtaccagaggtgcatgaaccacgtgttcggcgaacacattggtcgaacggtcgaggcctacgtcgatgacatcgtagtcaagacgaggaaagcctccgacctcctttccgaccttgaagtgacattccggtgtctcaaggcgaaaggcgtaaaactcaatcctgagaagtgtgtcttcggggtcccccgaggcatgctcttggggttcatcgtctccgagcggggcatcgaggccaacccggagaaaatcgcggccatcaccaacatggggcccatcaaggacttgaaaggcgtacagagggtcatgggatgccttgcggctctgagccgcttcatctcgcgcctcggcgaaagaggcctacctctgtaccgcctcttaaggaaggccgagtgcttcacttggacccctgaggccgaggaagccctcgggaacctgaaggcgctcctcacgaacgcgcccatcttggtgccccccgctgccggagaagccctcttgatctacgtcgccgctaccactcaggtggttagcgccgcgatcgtggttgagagacgagaagaggggcatgcattgcccgtccagaggccagtctacttcatcagtgaggtactgtccgagaccaagatccgctacccacaaattcagaagctgctgtacgcggtgatcctgacgcggcggaagttgcgacactacttcgagtctcatccggtaactgtggtgtcatccttccccctgggggagatcatccagtgccgagaggcctcgggtaggattgcaaagtgggcggtggaaatcatgggcgagacgatctcgttcgcccctcggaaggccatcaagtcccaggtcttggcggactttgtggctgaatgggtcgacacccagctcccaacggctccgatccaaccggaactctggaccatgtttttcgacgggtcgctgatgaagacaggggcaggcgcaggcctgctcttcatctcgcccctcgggaagcacctacgctacgtgctacgcctccacttcccggcgtccaacaatgtggccgagtacgaggctctggtcaacgggttgcgcatcgccatcgagctaggggtccgacgcctcgacgctcgcggtgactcgcagctcgtcatcgaccaagtcatgaagaactcccactgccgcgacccgaagatggaagcctactgcgatgaggttcggcgcctggaggacaagttctacgggctcgagctcaaccacatcgcccgacgctacaacgagactgcggacgagctggctaagatagcctcggggcgaacaacggttcccccggacgtcttctcccgagacctgcatcaaccctccgtcaagaccgacgacacgcccgagcccgagaaggcctcggcccagcccgaggcaccctcggctcagcccgaggcaccctcggcccccgagggtgaggcactgcacgtcgaggaagagcggagcggggtcacgcctaatcgaaattggcaggccccgtacctgcaatatcgccgccgaggggagctacccctcgaccaagccgaggctcggcgggtagcgcgacgcgccaagtcattcgtcttgctgggcgacgaagaggagctctaccatcgcagcccctcgggcatcctccagcgatgcatctccatcgccgaaggtcgggaactgctgcaagaaatacactcgggggcttgcggccaccacgcagcgccccgagcccttgtcggaaatgctttccggcaaggcttctactggccaacggcggtggctgacgccactagaattgtccgcacctgcgaagggtgccaattctacgcgaagcagacgcacctgcccgctcaggctctgcagacaatacccatcacctggcccttcgctgtatggggtctggacctcgttggtcccttgcagaaggcgcccgggggctacacgcacctgctggttgccatcgacaaacactacaggaaaacgatgtatttccgacggcctccactacttccgacggttcctagggtaccgtcggaaataagtatatttccggcggcccacggccagccctcggaaataagactatttccgacggcttctcaaccccccgtcggaaataagcctatttccgacggctggccaactgggccgtcggaaataagtggacgccccctaacggccgtctcccgcgcggccccccggccgcgcacacagccaacgcacacacgcacgcacacacgcgttctaacgactccgcgccgccgccgccaggacccgccgccaggaccttcgccggccacctgcccggtccgccgcggacgccccgacgcacagggcgccgccgccccgaagccagcgcgccgccgccccgaagccagcgcgccgccgccccgacgccagcgcgccgccgccccgacgccagcgcgccgccgccccgacgccagcgcgccgccgccccgacgtccgcgctcacagagcgccgcagccccgacgcccgcgctcacagagcgccgccgccccgacgcccgctcacagcgcgctgccgccccgacgcccgcacacctgccccgaccccgcacagcgcgccgccgccgccgcgcctcgagccgcccgcgcccggctttgcccaccgccgccgcccggggctcgccagagccatcgccgtccgtcgccgtccggtgcacattggcacgctgcatcgagccgatccggcccggcccggactgcgtgttgcatggctccaacgaaaatagaatagaaccactgctagctaggtcgacaactggcgccaacatgcttggccatcatgccagacacgtaggcaagctagacacagtggcggcctgtgactctaaccgtctccatctaccattagtttaa

SEQ ID NO: 112856 - DNA, 2820 bp, Zea mays
  Clone ID: MRT4577_34413C.1
atgccgttcggcttgaggaatgcaggcgcgacgtaccagcggtgcatgaaccatgtgttcggcgaacacatcggtcgcacagtcgaggcctacgtcgatgacatcgtagtcaagacacggaaggctcccgacctcctctccgaccttgaagtgacattccggtgtctcaaggcgaaaggagtcaagcttaatcctgagaagtgtgtcttcggggtgccccgaggcatgctcctagggttcatcgtctccgagcgaggcatcgaggccaacccggagaagatcgcggccatcaccagcatggggcccatcaaggacttaaaaggggtacagagggtcatgggatgcctcgcggccctgagccgcttcatctcacgcctcggcgaaagaggtctgcctctgtaccgcctcttaaggaaggccgagtgtttcgcttggacccctgaggccgaggaagccctcggcaacctgaaggcgctccttacaaaggcgccggtcttggtgccgccggcggacggagaaaccctcttggtctacgtcgccgcgaccactcaggtggttagcgccgcgattgtggtcgaaaggcaggaggaagggcatacattgcccgttcagaggccggtctacttcatcagcgaagtgctgtccgagactaagatccgctacccacaagttcaaaagctgctgtatgctgtgatcctgacgaggcggaagctacgacactacttcgagtcccatccggtaactgtggtgtcatccttccccctgggggagatcatccagtgccgagaggcctcgggcaggatcgcaaagtgggcggtggagatcatgggcgaaacgatctcgttcgcccctcggaaggccatcaagtcccaagtgttggcggatttcgtggctgaatgggtcgacacccaactaccaacgactccgatccaaccggagctctggaccatgtttttcgacgggtcgctgatgaagacgggggccggcgcgggcctgctcttcatctcgcccctcggaaagcacttgcgctacgtgctgcgcctccacttcccggcgtccaacaatgtggccgagtacgaagctctggtcaacggattgcggatcgccatcgagctaggggtcagacgcctcgacgcccgcggtgattcgcagctcgtcatcgaccaagtcatgaagaactcccactgccgcgacccgaagatggaggcctactgcgacgaggttcggcgcctggaagacaagttcttcgggctcgagctcaaccacatcgctcggcgctacaacgaaaccgcagacgagctggcgaagatagcctcggggcgaacgacagtccccccggacgtcttctcccgggatctgcatcaaccctccgtcaagctcgacgacgcgcccgagcccgaggtaccctcggctcagcccgaggtaccctcggctcagcccgaggtaccctcggctcagcccgaggtaccctcggttcagcccgaggcaccctcggcccagcccgaggtaccctcggcccccgagggcggggcattgaacgtcgaggaagggcagagcggggccacgccagaccaagattggcaggccccgtacctgcaatatctccgtcgaggagagctacccctcgaccaagtcgaggctcggcgggtagcgcgacgcgccaagtcattcgtcttgctgggcgacgaagaggagctctaccatcgcagcccctcgggcatcctccagcgatgcatctccatcgccgaaggtcgggaactgctgcaagaagtacactcgggggcttgcggccaccacgcagcgccccgagcccttgtcggaaatgctttccggcaaggcttctactggccaacggcggtggctgacgccactagaattgtccgcacctgcgaagggtgccaattctatgcgaagcggacacacctgcccgctcaggctctgcagacaatacccatcacctggcccttcgctgtatggggtctggacctcgtcggtcccttgcagaaggcgcccgggggctacacgcacctgctggtcgccatcgacaaattctccaagtggatcgaggtccgacctctgaacagcatcaggtccgagcaggcggtggcattcttcaccaacatcatccatcgcttcggggtcccgaactccatcatcaccgacaacggcacccagttcaccggcaaaaaattcttggatttttgcgaggatcaccatatccgggtggactgggccgccgtggctcatcccatgtcgaatgggcaagtagagcgtgccaacggcatgattctacaagggctcaagcctcggatctacaacgacctcaaccagttcggcaggcgatggatgaaggaactcccctcggtggtctggagcctaaggacgacgccgagtcgtgccacgggcttcacgccgtttttcctggtctacggggctgaagctatcctgcccactgacctggaatacggctccccgagggcgagggcctacaccgagcaaagcaaccaagccagccgagaggaatcgctggaccagctggaggaagctcgggacagggccttgctacactcggcgcggtaccaacagtccctgcgacgctaccacgcccgaggggtccggtcccgagaactccaggtgggcgacctggtgcttcggctgcgacaagacgcccgagggaggcacaagctcacgcccccctgggaagggccgttcgtcatcgccaaagttctgaagcccggaacatacaagctggccaacaatcaaggcgagatctacggcaacgcttggaacatcaaacagctacgtcgcttctacccttaa

SEQ ID NO: 112857 - DNA, 301 bp, Zea mays
  Clone ID: MRT4577_34414C.1
atacgtccggccgcggatgcggcagtcgtcgctgccgccgcaggcgccaggaagaggaggaacgcgtggaggctcgttcgtctacgactgcagcgcgttctgagcgacgcacatcgatcgatcgatcagcctcgcggatgaaccagatcggcaggcgtacgtgccaactttctgcaggtgatccacctcagagatccaaggtcgcgatcttctgtgaactcctgaccaggctctcgaacgtgatcgggctatcagggggcgtcatcacgagacagcgatcgagcatatactgggggctcgt

SEQ ID NO: 112858 - DNA, 2799 bp, Zea mays
  Clone ID: MRT4577_34415C.1
atgccgttcggtttgaggaatgcgggcgcgacgtaccagcggtgcatgaaccatgtgttcggcgaacacatcggtcgcacagtcgaggcctacgtcgatgacatcgtagtcaagacaaggaaggcttccgacctcctctccgaccttgaagtgacattccgatgtctcaaggcgaaaggagtcaagctcaatcctgagaagtgtgtcttcggggtgccccgaggcatgctcctggggttcatcgtctccgagcgaggcatcgaagccaacccggagaagatcgcagccatcaccagcatgggacccatcaaggacttaaaaggcgtacagagggtcatgggatgcctcgcggccctgagccgcttcatctcacgcctcggcgaaagaggtctgcctctgtaccgcctcttaaggaaggccgagtgtttcgcttggacccctgaggccgaggaagccctcggcaacctgaaggcgctccttacgaaggcgcctgtcttggtgccgccggcggacggagaagccctcttggtctacgtcgccgcgaccactcaggtggttagcgccgcgattgtggtcgagaggcaggaggaagggcatgcattgcccgttcagaggccggtctacttcgtcagcgaagtgctgtccgagaccaagatccgctacccacaagttcagaagctgctgtatgctgtgatcctgacaaggcggaagctacgacactacttcgagtcccatccggtgactgtggtgtcatccttccccctgggggagatcatccagtgccgagaggcctcgggcaggatcgcaaagtgggcggtggagatcatgggcgaaacgatctcgttcgcccctcggaaggccatcaagtcccaggtgttggcggacttcgtggccgaatgggtcgacacccagctgccgacggctccgatccaaccggagctctggaccatgtttttcgacgggtcgctgatgaagacgggggccggcgcgggcctgctcttcatctcgcccctcgggaagcacctgcgctacgtgctgcgcctccacttcccggcgtccaacaatgtggccgagtacgaagctctggtcaacgggttgcggatcgccatcgagctaggggtcagacgcctcgacgcccgcggtgactcgcagctcgtcatcgaccaagtcatgaagaactcccactgccgcgacccgaagatggaggcctactgcgatgaggttcggcgcctggaagacaagttcttcgggctcgagctcaaccacatcgctcggcgctacaacgagaccgcagacgagctggctaagatagcctcggggcgaacgacggtccccccggacgtcttctcccgggatctgcatcaaccctccgtcaagctcgacgacgcgcccgagcccgaggcaccctcggctcagcccgaggtaccctcggctcagcccgaggcaccctcggctcagcccgaggcaccctcggcccagcccgaggtaccctcggcccccgagggcggggcactgcacgtcgaggaagggcagagcggggccacgcctgaccgagattggcaggccccgtacctgcaatatctccgccgaggagagctacccctcgaccaagccgaggctcggcgggtagcgcgacgcgccaagtcgttcgtcttgctgggcgacgaggaggagctctaccatcgcagcccctcgggcatcctccagcgatgcatctccatcgccgaaggtcgggaactcctgcaagaagtacactcgggggcttgcggccaccacgcagcaccccgagcccttgtcggaaatgctttccggcaaggcttctactggccaacggcggtggctgacgccactagaattgtccgcacctgcgaagggtgccaattctatgcgaagcggacccacctgcccgctcaggctctgcagacgatacccatcacctggcccttcgctgtatggggtctggacctcgtcggtcccttgcagaaggcgcccgggggctacacgcacctgctggtcgccatcgacaaattctccaagtggatcgaggtccgacctctgaacagcatcaggtccgagcaggcggtggcgttcttcaccaacatcatccatcgcttcggggtcccgaactccatcatcaccgacaacggcacccagttcaccggcaaaaaattcttggatttttgcgaggatcaccacatccgggtggactgggccgccgtggctcatcccatgtcgaatgggcaagtagagcgtgccaacggcatgattctacaagggctcaagcctcggatctacaacgacctcaacaagttcggcaggcgatggatgaaggaactcccctcggtggtctggagcctgaggacgacgccgagccgtgccacgggcttcacgccgttcttcctggtctatggggccgaggccatcttgcccactgacctggaatacggctccccgagggcgagggcctacaccgaacaaagcaaccaagccagccgagaggactcgctggaccagctggaggaggctcgggacagggccttactacactcggcgcggtaccagcagtccctgcgacgctaccacgcccgaggggtccggtcccgagacctccaggtgggcgacctggtgcttcggctgcgacaagacgcccgagggaggcacaagctcacgcccccctgggaggggccattcgtcatcgccaaagttctgaagcccggaacatacaagctggccaacaatcaaggcgaggtctacggcaacgcttggaacatcaaacagctacgtcgcttctacccttaa

SEQ ID NO: 112859 - DNA, 1641 bp, Zea mays
  Clone ID: MRT4577_34416C.1
atgctcctggggttcatcgtctccgagtggggcatcgaggccaacccagagaaaatcgcggccatcaccaacatgggccccatcaaggacttgaaaggagtacagagggtcatgggatgtcttgcggccctgagccgtttcatctcgcgcctcggcgaaagaggcctacctctgtaccgcttcttgaggaagaccgagcgcttcacttggacccccgaggccgaggaagccctcgggaacctgaaagcgctccttaccagcgcgcccatcttggtgccccccgctgccggagaagccctcttgatctacgtcgccgctaccactcagatggtcagtgccgcgatcatggttgagagacgagaagaggggcatgcatttcccgtccagaggccggtctacttcatcagtgaagtactgttcgagaccaaaatctgctacccgcaaatccagaagctactgtacgcggtaattctgacgcggcgaaagttgcgacactacttcgagtctcatccggtgactgtggtgtcatcctcccccctgggggagatcatccagtgccgagaggcctcgagtaggattgcaaagtgggcggtggaaatcatgggcaagacaatctcgttcgcccctcggaaggccatcaagtcccaagtcttggcggactttgtggctgaatgggtcgacacccagcttccagcgactccgatccagccggaactctggaccatgtttttcgacgggtcgctgatgaaaacaggagcgggcgcgagcctgctcttcatctcacccctcgggaagcacctccgctacgtgctgctcctccatttcccggcgaccaacaatgtggccgagtacgaggctctggttaacgggttgcgcatcgccatcgagctaggggtccgacacctcgacgctcgtggcgacttgcagcttgtcatcgaccaagtcatgaagaactcccattgccgcgacccaaagatggaagcctactgcgatgaggttcggcgcctggaggacaagttctacgggctcgagttcaaccacatcgctcgacggtacaacgagactgtggacgagctcgctaagatagcctcggggcggataatggttcccccggacgtcttctcccgagacctacatcaaccctcagtcaagaccgacgacacgcccgagcccgagaaggtctcggccctgcccgagaaggcgcccgggggctacacgcacctgctggttgccatcgacaaattctccaagtggatcgaggtccgacccctaaacagcatcaggtccgaacaggcggtggcgttcttcaccaacatcatccatcgctttggggtcccaaactccatcatcaccgacatcggcacccagttcactggcagaaagttcctggacttctgcgaggatcaccacatccaggtggactgggccgccatagctcaccccatgacgaatggacaagtagagtgtgccaacggcatgattctgcaaggactcaagccacggatctacaacgacctcaacaagttcggcaggcgatggatgaaggaactcccctcggtggtctggagtctgaggacaacgccgagccgagccacaggcttcacgccgttctttctagtctatggggccgaggccatctag

SEQ ID NO: 112860 - DNA, 1641 bp, Zea mays
  Clone ID: MRT4577_34417C.1
atgctcctggggttcatcatctccgagcgaggcatcaaggtcaacctggagaaaatcgcggccatcaccaacatggggcctatcaaagatttgaaaggagtacaaagggtcatgggatgccttgcggctctgagccgcttcatctcgcgcctcggcgaaaaaggcctacccttgtaccgccttttaaggaaggccgagcgcttcacttggacccccgaggccgaggaagccctcggaaacttaaaggcgctccttacaaacgcgccaatcttggtgccccctgctgcgggagaagccctcttgatctacgtagccgcaaccactcaggtggtcagcgccacgatcgtagtcgagagacaagaagaagggcatgcactgctcgtccagaggccgatctacttcatcagtgaggtgctatccgagaccaagatccgctacccacaaatccagaagctactatacgcagtaattctgacgcggagaaaattgcgacactacttcgagtctcatccggtgactgaagtgtcatccttccccctgggggagatcatccagtgccgagaggcctcgggtaggatagcaaagtgggcggtggaactcatgggcgagacaatctcgttcgctcctcggaaggccataaaatcccaagtcttggcggacttcgtggctgaatgggtcgacacccaattgcctacatctccgatccaacccaagctttggaccatgtacttcgatgggtcgctgatgaaaataggagccggtgcaggcctgctcttcatctcacccctcgggaaacatgtgcgctacatgctgcgcctccattttccggcatcaaacaacgtggccgagtacgaggctttggttaacgggctatgcatcgtcatcgagctaggggtttggcgcctcgatgctcgtggcgactcgcagcttgtcatcgacctagtcatgaagaactcccactaccgcgacccgaagatggaggcctactgcgacgaagttcggcgcctggaagacaagttctacgggctggagctcaaccacatcgctcgactgtacaacgagactgcggacgagttggcgaaaatagcctcggggcagacaatggttccctcggacgtcttctccagagacatacatcaaccccctccgtcaagatcgacgacacgcccgagcccgaggaggcctcggcccagcccgaggtaccctcggccgccgaaggtgaggccctgcgtgtcgagggggagcggaatggggtcacaccaaacccgaactggcagaccccgtacctgcaatatctccaccgaggagagctacccatctacaaggccgaagctcggcgactggcgctacgcgccaagtcgttcgtcttactgggggatgaaaaggagctctaccaccgcagccactcaggcattctccaacgatgcatatccatcgccgaaggacaagagctgttgcaagagatacaatcgaaggcttgcggtcaccatgcagcacctcgagccctcgtgggaaacgctttccgacaagttttctactggccgaccgtggtggccgacgccactaggattgtacgctcttgccaagggtgtcaattctacgcaagacatacacacctacccgctcaggccctacagataa

SEQ ID NO: 112861 - DNA, 2679 bp, Zea mays
  Clone ID: MRT4577_34418C.1
atgccgttcggtttgagaaatgcgggcgcgacgtaccagcggtgcatgaaccatgtgtttggcgaacacatcggtcgcacagtcgaggcctacgtcgatgacatcgtagtcaagacaaggaaggcctccgacctcctctccgaccttgaagtgacattccgatgtctcaaggcgaaaggagtcaagctcaatcccgagaagtgtgtcttcggggtgccccgaggcatgctcctggggttcatcgtctccgagcgaggcatcgaagccaacccggagaagatcgcagccatcaccagcatgggacccatcaaggacttaaaaggcgtacagagggtcatgggatgcctcgcggccctgagccgcttcatctcacgcctcggcgaaagagctgatggagaagccctcttggtctacgtcgccgcgaccactcaggtggttagcgccgcgattgtggtcgagaggcaagaagaagggcatgcattgcccgttcagaggccagtctacttcgtcagcgaggtactgtccgagaccaagatctgctacccacaagttcagaagctgctgtatgctgtgatcctgacgaggcggaagctacgacattacttcgagtctcatccggtaactgtggtgtcatccttccccctgggggagatcatccagtgccgagaggcctcgggcaggatcgcaaagtgggcggtggaaatcatgggcgaaacaatctcgttcgcccctcggaaggccatcaagtctcaggtgttggtggacttcgtagccgaatgggtcgacacccagccgccgacggctccgatccaaccggagctctggaccatgtttttcgacgggtcgctgatgaagacgggagccggcgcgggcctgctcttcatctcgcccctcgggaagcacctacgctacgtggtacgcctccatttcccggcgtccaacaatgtggctgagtacgaggctctggtcaacgggttgcggatcgccatcgagctaggggtcagacgcctcgacgcccgtggtgactcgcagctcgtcatcgaccaagtcatgaagaactcccactgccgtgacccgaagatggaggcctactgcgatgaggttcgacgcctggaagacaagttctacgggctcgagctcaaccacatcgctcggcgctacaacgagactgcggacgagctggctaaaatagcctcggggcgaacaacggttcccccggacgtcttctcccgggatctgcatcaaccctccgtcaagatcgacgacgctcccgagcccgaggcaccctcggcacagcccaaggcaccctcgacacagcccgaggcgccctcggctcatcccgaggcgtccgcggtccagcccgaggtaccctcggcccccgagggtgaggcactggacgtcgaggaggagcagagcggggccacgcctgatcgaaattggcaggccccgtacctgcaatatctccgccgaggagagctacccctcgaccaagccgaggctcggcgggtagcgcgacgcgccaagtcgttcgtcttgctgggcgatgaggaggagctctaccaccgcagcccctcgggcgtcctccagcgatgcatctccatcgccgaaggtcaggaactcctgcaagaaatacactcgggggcttgcggtcatcatgcagcgcctcgagcccttgtcgggaatgctttccggcaaggcttctactggccaacggtggtggctgacgccactaggattgtccgcacctgcgaagggtgccaattctatgcgaagcagacccacctgcccgctcaggctctgcagacgatacccatcacctggccctttgctgtatggggtctggacctcgtcggtcccttgcagaaggcgcccgggggctacacgcacctgctggtcgccatcgacaaattctccaagtggatcgaggtccgacccctgaacagcatcaggtccgagcaggcggtggcattcttcaccaacaacatccatcgcttcggggtcccaaactccatcatcaccgacaacggtacccagttcaccggcaaaaaattcttggatttttgcgaggatcaccacatccgggtggactgggccgccgtggcccatcccatgtcgaatgggcaagtggagcgtgccaacagcatgattctgcaagggctcaagccccggatctacaacggcctcaacaagttcggcaagcgatggatgaaggaactcccctcggtggtctggagcctgaggacgacgccgagccgagccacggggttcacgccgttcttcctggtctacggggccgaggccatcttgcccactgacctggaatacggctccccgaggacgagggcctacaacgatcaaagcaaccaagctagccgagaagactcactggaccagctgggagaggctcgggacaaggccttactacactcggcgcggtaccagcagtccctgcgacgctaccacgcccgaggggtccggtcccgagacctccaggtgggcgacctggtgcttcggctgcggcaagacgcccgagggaggcacaagctcacgcccccctgggaagggccattcgtcatcgccaaagttctgaagcccggaacatacaagctggccaacaatcaaggcgagatctacggcaacgcttggaacatcaaacagctacgtcgcttctacccttaa

SEQ ID NO: 112862 - DNA, 1713 bp, Zea mays
  Clone ID: MRT4577_34419C.1
gggtacctcgaggccggccgggacacccgacccaccggcccacatccgaggagccaccgcaaccgcatgcaactgcgccgcctctcgcctctcctagcgagcccgcgccgccgcctgcgattgcgctcccccacaaaccctagctctgccaccatgtccccgggcgccgctcacctggccactgccgccgacccggacgaggacctctgcgcgagcgccggggcgtcagaagcggaggtccccgcgcctgccccgcatcttccaccgctgccggtgtccgcggaggagcggttggaacgcgcttgggcgcactggaggcggctggggtccccacggctgctggtggcgccgatggtggacaactcggagctccccttccgcatgctgtgccgccgctacggcgccgacgcggcgtacacgcccatgctccactctcgcatcttctccgagaacgagaagtacaggtccatggagttcaccacgtgcaaggaggaccgaccactttttgttcagttttgtgccaatgatcctgacattttgttgcaagctgcgaagaaggtcgaaccatattgcgattatgttgatatcaattttggttgcccgcagcgtattgcaagacggggtaactatggagcatttctcatggacaaccttcccctcgtaaaatcccttgtgcagaatctagcagctaatcttcatgttccagtttcagttaagatccgtgtatttccacgactggaagacacattagcatatgcgaagatgcttgaggaagctggtgcttctcttgtggctgtccacggccggacaagagacgaaaaggatgggaagaaatttcgagctgactgggatgccatcaaggccgtgaaggatgcacttagagtacccgttcttgcaaatggaaacattcgccatatggaggatgtgaagaactgccttgaacatactggtgctgatggtgtgctttcagctgaaactcttctagaaaacccagcagtttttgctggtttcaggacaaaggaatggaaagaagatggtgacgagaatggagacggtggcttggaccaggctgatcttgtgattgaatatctgaagctgtgtgagcagtaccctgtgccgtggagaatggttagatcccatgtccacaagatgttgggcgactggtttagggtgcatccagaggtgagggaggaacttaataagcagaacaagctcaccttcgagtggttgcatgacatggtaatgaggctgaaggacctcggtggaagagtgccactttacagaaaggagactgcactaggacaaacattagcctctagcaatgcctgacaggttcttatatatgcagcctatcattattggagaggagcaattgatgaaagctgaagcattttgtaccaattttgacctgttatagtacagactggaagagattgttggactacaattaaacctcgattagtaaagcatattttgagttgagcagctacagtgcaacggctcacctcattgttgtaacagctgatatgtaaaatcatttttacatcattacatggtctcagataatttggatttgctattgaacttatctttgagcgcttcaccaagctatatttccaccatgttcgcgcgcatgttcagctgcgcatattaaaaaaaaaaaaaaagggcaggccgtccgctctatccgaacccaagctcgcgggcgtgggc

SEQ ID NO: 112863 - DNA, 166 bp, Zea mays
  Clone ID: MRT4577_3441C.1
aacattctcaatgaaaaaccccgctttccaaatttgggagctccaggccccacatggaagtccgggggttacagaccccttgctcgttagaggggtttaggaaaagtggacactaccgggattacagacaattgtgggtgcggggacctattgtttacaggggaat

SEQ ID NO: 112864 - DNA, 875 bp, Zea mays
  unsure (1)..(875): unsure at all n locations
  Clone ID: MRT4577_34420C.1
ttgggtacctcgaggccggccgggtcagcatcaagcgtcaattatctatctagacatttcaagaacaggtgtgaaggacaagattcctgattggttttggcatacagtctcggaggccaaatatctttacatgtctggcaacgaattaactggcaatctgccaacacatcttggtgacatggcccttgtacacctcaatctcagttcaaacaatctcactggaccagtacagacatttccaagaaacgttggaatgctagacttatccttcaactcattttctggtacactaccattatcactggaagctcctgtgctcaacgtcttgcttttgttctcaaataagatcggtggcagcattccagaatcgatgtgcaatttgccgttattgtcggacctggatatctcaagcaatcttttggagggcggaattcctcggtgctttgcaaccatgcaactagatttccttctactgagcaataacagtttggcaggaagttttcccacggttctacgaaacagcacgaatctgaagatgttggatctttcatggaataagctctccggacggttacctacatggataggagagctaacaggattaagtttcctgcgacttggccacaatatgttttctgggaatatcccccttgaaattctaaatctcagcagcctccagttcttggatctgtccagcaacaacttgtctggtgctataccttggcatttggagaaattaaccggtatgacgacactgatgggcaatcgtcaggacatatcaagtataccattgngttatataaggggaaacggcgagaatgatatcagtatagacgaacnattcgaggaagtcttctttgatatcacaaaggggt

SEQ ID NO: 112865 - DNA, 2346 bp, Zea mays
  Clone ID: MRT4577_34421C.1
atgcctactcagggtatcaccatccggatgaaagagtccgaccagctcgtgacttctttcatcacgcccttcggcatgtactgctatgtcaccatgccgttcggtttgaggaatgcgggcgcgacgtaccagcggtgcatgaaccatgtgttcggcgaacacatcggtcgcacagtcgaggcctacgtcgatgacatcgtagtcaagacaaggaaggcttccgacctcctctccgaccttgaagtgacattccgatgtctcaaggcgaaaggagtcaagctcaattccgagaagtgtgtcttcggggtgccccgaggcatgctcttggggttcatcgtctctgagcgaggcatcgaagccaacccggagaggatcgcagctatcaccagcatggggcccatcaaggacttaaaaggcgtacagagggtcatgggatgtctcgcggccctgagccgcttcatctcacgcctcggcgaaagaggtctgcctctgtaccgcctcttaaggaaggccgagtgtttcgcttggacccctgaggccgaggaagctctcgggaacctgaaggcgctccttacaaaggcgcctatcttggtgcccccagctgatggagaagccctcttggtctacgtcgccgcgaccactcaggtggttagcgccgcgattgtggtcgagaggcaagaagaggggcatgcattgcccgttcagaggccagtttacttcgtcagcgaggtactgtccgaaaccaagatccgctacccacaagttcagaagctgctgtatgcagtgatcctgacgaggcgaaagttgcgacattacttcgagtctcatccggtaactgtggtgtcatccttccccctgggggagatcatccagtgccgagaggcctcgggcaggatcgcaaagtgggcggtggaaatcatgggcgagacaatcttgttcgcccctcggaaggccatcaagtcccagacgggagccggcgcgggcctgctcttcatctcgcccctcgggaaacacctacgctacgtgctacgcctccattttccggcgtccaacaatgtggctgagtacgaggctctggtcaacgggttgcggatcgccatcgagctaggggtcagacgccttgacgcccgcggtgactcgcagctcgtcatcgaccaagtcatgaagaactcccactgccgcgacccgaagatggaggcctactgcgatgaggttcggcgcctggaagacaagttctacgggctcgagcttaaccacatcgctcggcgctacaacgagactgcggacgagctggcaaaaatagcctcggggcgaacgacggttcccctggacgtcttctcccaggatctgcatcaaccctccgtcaagatcaacgacacgcccgagcccgaggcaacctcggtccagcccgaggtaccctcggctcaacccgaggcgtcctcggttcagcccgaggtaccctcggcccccgagggcgaggcactgcacgtcgaggaggagcagaacggggccacgcctgatcgaaattggcagaccccgtacctgcaatatctccgccaaggagagctacccctcgaccaagccgaggctcggcgggtagcgcgacgcgccaagtcgttcgtcttgctgggcgatgaggaggagctctaccaccgcagcccctcgggcatcctccagcgatgcatctccatcgccgaaggtcaggaactcctgcaagaaatacactcgggggcttgcggccatcatgcagcgcctcgagcccttgtcgggaatgctttccagcaaggcttctactggccaacggtggtggctgacgccactagaattgtccgcacctgcgaagggtgccaattctatgcgaagcagacccacctgcccgctcaggctctgcagacgatacccatcacctggccctttgctgtgtggggtttggacctcgtcggtcccttgcagaaggcgcccgggggctacacgcacctgctggtcgccatcgacaaattctccaagtggatcgaggtccgacccctgaacaacatcaggtccgagcaggcggtggcgttcttcaccaacatcatccaacgcttcagggtcccaaactccatcatcaccgacaacggtacccagttcatcggcagaaaattcttggatttttgcgaggatcaccacatccgggtggactgggccgccgtggctcatcccatgtcgaatgggcaagtagagcgtgccaacggcatgattctacaagggctcaagccccggatttacaacgacctcaacaagttcggcaagcgatggatgaaggaactcccctcgatggtctggagcctgaggacaacgccgagctga

SEQ ID NO: 112866 - DNA, 1347 bp, Zea mays
  Clone ID: MRT4577_34422C.1
atggaggcctactgcgatgaggttcggcgcctggaagacaagttcttcgggctcgagctcaaccacatcgctcggcgctacaacgagactgcagacgagctggctaaaatagcctcggggcgaacgacggtccccccggacgtcttctcccgggatctgcaccaaccctccgtcaaggtcgacgactcgcccgagcccgaggcaccctcggctcagcccgaggcgccctcggttcagcccgaggtaccctcagccccaggggccgaggcactgcacgtcgaggaggagcagagcggggccacgcctgatcgaaattggcaggccccgtacctgcgatatctccgccagggagagctacccctcgaccaagccgaggctcggcgggtagctcgacgcgccaagtcgttcgtcttgctgggcgatgaggaggagctctaccaccggagcccctcgggcatcctccagcgatgcatctccatcgccgaaggtcaggaactcctgcaagaaatacactcgggggcttgcggccatcatgcagcgcctcgagcccttgtcgggaatgccttccggcaaggcttctactggccaacggcggtggctgacgccactagaattgtccgcacctgcgaagggtgccaattctatgcgaagcagacccacctgcccgctcaggctctgcagacgatacccatcacctggccctttgctgtatggggtctggacctcgtcggtcccttgcggaaggcgcccgggggctacacgcacctgctggtcgccatcgacaaattctccaagtggatcgaggtccgacccctgaacaacatcaggtccgagcaggcggtggcgttcttcaccaacatcatccatcgcttcggggtcccaaactccatcatcaccgacaacggtacccagttcaccggcagaaaattcttggatttttgcgaggatcaccacattcgggtggactgggctgccgtggctcatcccatgtcgaatgggcaagtagagcgtgccaacggcatgattctacaagggctcaagcctcggatttacaacggcctcaacaagttcggcaagcgatggatgaaggaactcccctcggtggtctggagcctgaggacgacgccgagccgagccacgggtttcacgccgttcttcctggtctacggggccgaggccatcttacccactgacctggaatacggctccccgaggacgagggcctacaacgatcaaagcaaccaagctagccgaggagaatcgctggaccagctggaagaggctcgggacaaggccttactacactcggcgcggtaccagcagtccctgcgacgctaccacgcctga

SEQ ID NO: 112867 - DNA, 413 bp, Zea mays
  Clone ID: MRT4577_34423C.1
gcatttgataaaaacactcttgtcgagttgatttaaaaccagatgacatcgccataaacgaatcatttggaatgccaaatgggtcatatactagaggactctagttgtaaataggactaaacgcctataaagcccaatacgcaagcctgaatttaagcccatgatccaatgtacagtatcactgaaacgtgtcacatgtaaagcaacttgacatactgctgaactatgctaaggccctgacattattcaccgtagtgcttgacaacgacacaggagcagcctagaaccttacttgcctagccctgggagtgaatctctgaaagcccagaccactcgccaagattcttagcgacacgaacagtgactaggtgaacattgcgttcagaacagaacgccttcaccagcttgacata

SEQ ID NO: 112868 - DNA, 372 bp, Zea mays
  Clone ID: MRT4577_34424C.1
atgccacgtggcagcatcgggggttcgcctgagcggggagcagaaacgtatacggtaaggtccgggcacgtgtcggctctggacccccgtctggccttgattaaggcatgggtattctctatcccagaatcccgggaccctgctgtgagtggcccggaccccacacagaggggtccagaacccatcctaggggtccggtttacgcccatggacgtcctggaccttacccagaggcccggtctgtatatacaggggtccaacactttcccatggggtctggactcactgttgacaccttggagtatatcatcttctctgcccacgtggcggtcccgaagccgtccacgtggtggggtcgggtgctgttgctag

SEQ ID NO: 112869 - DNA, 728 bp, Zea mays
  Clone ID: MRT4577_34425C.1
aattcacctttcgttgtgagtgaaattctcattctctcgagctcgagctcgacagccatggcctcagagctagggttagcgccgccggcgaaacgcccgacaccgtcccccaccacgattaccgccatcggagacgacctcctcctcgagatcttcctccgcctcccctccctcccgagcctcgtccgcgccgccctcgcctgccgcaccttcctcgacgccgtccgttcgtcccccgccttccgccgccgcttccgcgcgctccacccgccccagctcctcggattcttcatcgactcctgccgtagcaatcccttcgtcccgttccgcagccgctccgacccggacctcgccgccgccatccgcggcgccgatttcctcctcacccgcctcccggaggacagcgattcctcccccggatggcacatagagacctgctacggcggctgcgtcgtcctcgtcaacctgtctacataccaggtcgctgcttacaaccccctcacgcaggcactgcatctcttcccctttccgaccaccaacgggatcctcgtcaagggcttgcctgagttcattttcttatccgaagaggaccaggaggcccgtatggtctgtgtccaacaccggaacaagccggagcaagtgccggcgccgtctagctgttttctcaccggccaccaggggagtggcagatcttgccgttgggtggagaccccccagccatctcaacc

SEQ ID NO: 112870 - DNA, 473 bp, Zea mays
  Clone ID: MRT4577_34426C.1
tgctagggaagggccataatcaaacattacctcacctctagtgcttaatggacctttgaacactcagtaggcacgcatataagctacaacaagcacttgggtgagcgtaattagaacaaccaagtgcgcaattacaacaacacacactctggctcatctaacaattcaacaatttgatgcacaaactgacgatgcatcaacccacctagccggggtgaacgctctttgctacttgcaacaacagttgattaaatacaacccacttgctttgggaaacgtatctggataccaacaactacaacacttaccacaggttgtaacagcgctcactgaactagccatggtgaaccctatacgctacctacaacaagaacaactgatgtcatctagtcccgtcgctatgggcaatgcacctacatacctgctacaacagttgttgcaacaacatgttctgcaacaaattgtaccatctt

SEQ ID NO: 112871 - DNA, 236 bp, Zea mays
  Clone ID: MRT4577_34427C.1
cggacgcgtggggtcaacctttcaacttctgcttgtgttttcatgactgctattgggctggactatataacttaacaagaaaactacctttatacttctttttctggattttatgggggtctatcaagattggtggtgggcattaaacaacttttacctgatcaagaagcttaatctttttgtgctaaaaattaaggcaaagggaattccatctctggtggcatggatatccattc

SEQ ID NO: 112872 - DNA, 416 bp, Zea mays
  Clone ID: MRT4577_34428C.1
aatcaccaagcagaaccggttgttgctaaaatacaacgatatactacaaggtgggctacagattatacataccgccagctggcaagctaccgatctacccatacaatatggaccgacccaagctcacggaggctcaagcccctcgaggggaacagctattggagcatgacatgacagggcatcgcgaattgctgccatacggtatggcacggaaactacaaaacctacatagagacttcaacgagataatgactgcgagcgcatttgtgaatgctgagactagcaacttagcttttggtaacaactgcatagcccgggtcggggataagatcacgcatgacccatatttgaagagttgcaccggcagaagtgcactcacaattaagtgatacactgacaattgcgcaaggaacgga

SEQ ID NO: 112873 - DNA, 346 bp, Zea mays
  Clone ID: MRT4577_34429C.1
ataaaaaggaaaccaagtgggtttgaactgccagctaataggggtacaagttttacttttccacaggaatgggaagacctttgggcccgggtttgtatgggtttgttacccatgactatgcattttttttcgcactcggatctggacaaggggggcggccaaaaaaataaaacaatagggttcttggccccttacgaaatgaatgaacgaattgggggttccatttccaccggtgaacttgggagttggagaccaaaattttggccgggtgtaaagataaaatcccccccccccgcgcccaggggttttactccggtatgaggggggggggccttttgaagggggg

SEQ ID NO: 112874 - DNA, 162 bp, Zea mays
  Clone ID: MRT4577_3442C.1
ccagcatgtacatgcggtcattagtcctatgtctacgccagaccgagctgactaaacgtaccctgattgggcttccgatgtaggatcgctaagctacgctcgtgctaagtattagcgcatactgatagactgccactgtcgtctgtgctatgcatgctcttg

SEQ ID NO: 112875 - DNA, 285 bp, Zea mays
  Clone ID: MRT4577_34430C.1
caacatagatagcacaatagcgtaccatcaaaggcaaccaacatattgtgcctcattatgctccttggtctctgcgccagcgctgataccgggaccattttccccgctatgctcggaagctccaatactttcctttattaccccgtacctttaacaaccaacgacttcgtgttgcgaaaacccaattcttaatccctccaggacccatcgggcaatttaaactggcatcttaccttgatcaccctagctcatccaacaatcacaacccttattgcaccatttacc

SEQ ID NO: 112876 - DNA, 251 bp, Zea mays
  Clone ID: MRT4577_34431C.1
tgggaccctcaggccgccggatccccctaaatgtgcgtcccagccatctttaccctctcccctcagaccatatatccagcccccccacctcccttattcttttcactcctctctcttggttctcctcgattgattctgagcgccctatatacctacctctccttccttgttacccactatgacaatcctaagtcaacgatacaggctgctcttgagcgcatagagctggactccatctagccatccatcac

SEQ ID NO: 112877 - DNA, 401 bp, Zea mays
  Clone ID: MRT4577_34432C.1
cggggacccgtgggccggaccccgttgggccgaccccttgggttccgattcccaaattaaagcccccgcccgcaagggaaccaaacgcccccggccaaccgaagggccccgggaagctggacgagggggccccattggcggcttggttgttacggccgccgccgttggcgtcaagttcccgttcattggcgtggccggggccaccctcatcggaacggtccttgtcggggccggaatgccccgccgccgccgtccttggcaaccaggcccctttggtggaggggaaccccgcaccaaaggcaggttgcccggccagcgatggcggaacggacgttaataattgtcggcgccggggtagctggatctgccctggcatacacgctcgaaaaggatggccgtcg

SEQ ID NO: 112878 - DNA, 299 bp, Zea mays
  Clone ID: MRT4577_34433C.1
cgtccgcgcacgcgtgcggccacgcacactgtcctgtcttctttctacgcgggtcaaagggagcgggccaacagccatggctctcctccacttctttctcatggaagcaccgttccttctacatactcccaccctagccgagcccctccagcagccatggccaatcttattctctcccctgctgtcccctgcgcgcaaggagcaccaaggccaaagtgcacttctccctggcttcacttgcgcagcggcacaagaatccatggacgtctcctccccatgcttctatgctagcatggagc

SEQ ID NO: 112879 - DNA, 528 bp, Zea mays
  Clone ID: MRT4577_34434C.1
gccggccgggcatcttctcgtcttcatccctcccaagacgtcccacacattaccttcaagatgaccaagcgaacaaagaaggtcggtgttaccggtaaatacggtacccgttacggtgcttccctgcgaaagcaggtcaagaaggtggaagttacccagcacgccaagtacacctgcaccttctgcggaaaggtcaccgtcaagcgccaggctaccggtatctgggactgcaagtcttgcaagcgcaccgtcgccggtggtgcttacaccgttgccacccccgctgccgccgctatgcgatcgactctgcgacgtctccgagagattgctgaggtttaagggtggactctagcggaagaagaaaatggctttgcttttcggtatggtgtacgggggatatggatttcgtgcctacactacgagttgacgatctggacgtcaacacccgatattcgatcacatagaagccgatcgattagcaatgaacaaaaaagaattgcaaaaaaaaaaaaggcttcagacccattc

SEQ ID NO: 112880 - DNA, 2487 bp, Zea mays
  Clone ID: MRT4577_34435C.1
atgtcgttcggcttgaggaatgcgggcgcgacgtaccagcggtgcatgaaccatgtgttcggcgaacacatcggtcgcacggtcgaggcctacgtcgatgacatcatagtcaagacgaggaaagcttccgacctcctttccgaccttgaagtgacattccgatgcctcaaggcgaaaggcgtcaagctcaatcccgagaagtgtgtcttcggggtgccccgaggcatgctcttggggttcatcgtctccgagcggggcatcgaagccaacccggagaagatcgcagccatcaccagtatggggcccatcaaggacttaaaaggcgtacagagggtcatgggatgtctcgcggctctgagccgcttcatctcacgcctcggcgaaagaggtctgcctctgtaccgcctcttaaggaaggccgagtgcttcacttggacccctgaggccgaggaagctctcgggaacctgaaggcgctcctcacaaaggcgcctatcttggtgcctccagctgccggagaagccctcttggtctacgtcgccacgactactcaggtggttagcgccgcgattgtggtcgagaggcaagaagaggggcatgcattgcccgttcagaggccagtttacttcgtcagtgaggtactgtccgaaaccaagatccgctacccacaggttcagaagctgctgtatgcagtgatcctgacgcggcggaagttgcgacactacttcgagtctcacccggtaactgtggtgtcatccttccccctgggggagatcatccagtgccgagaggcctcgggcaggattgcaaagtgggcggtggaaatcatgggcgagacaatctcgttcgcccctcggaaggccatcaagtcccaggtcttggcggacttcgtagccggatgggtcgacacccagctaccgacggctccgatccaaccggagctctggaccatgtttttcgatgggtcgctgatgaagacgggagccagcgcgggcctactcttcatctcacccctcgggaaacacctacgctatgtgctacgcctccatttcccggcgtccaacaatgtggccgagtatgaggctctggtcaacggattgcggatcgccatcgagctaggggtccggcgcctcgacgcccgcggtgactcgcagctcgtcatcgaccaagtcatgaagaactcccactgccgcgacccaaaggtagaggcctactgcgatgaggttcggcgcttggaagacaagttctacgggctcgagcttaaccacatcgctcggcgctacaacgagactgtggacgagctggctaaaatagcctcggggcgaacaacggttcccccggacgtcttctcccgggatctgcatcaaccctctgtcaagatcgacgacacgcccgagcctgaggcgccctcggcccagtccgaggtaccctcggtccagaccgaggtaccctcggcacagcccgaggcaccctcagctcggcccgaggtgccctcggttcagcccgagacaccgtacctgcaatatctctaccaagaagagctacccctcgaccgagccgaggctcggcgggtggcgcggcgcgccaagtcgttcgtcttgctgggcgatgagaaggagctctaccaccgcagcccctcaggcatcctccagcgatgcgtctccgtcaccgaagaaggcacccaggggctacacgcacctgctggtcgccatcgacaaattctccaagtggatcaaggtccgacctctgaacagcatcaggtccgagcaggcggtggcgttcttcaccaacatcatccatcgcttcgggtcccaaactccatcatcaccgacaacggcacccagttcaccggcagaaagttcttggacttctgcgaggatcaccacatccgggtggactgggccgccgtggctcatcccatgtcaaatgggcaagtagagcgtgacaacggcatgattctacaagggctcaagcctcggatctacaacaacctcaacaagttcggcaagcgatggatgaaggaactcccctcggtggtctggagtctgaggacgacgtcgagccgagccacgggtttcacgccgttcttcctagtctacggggccgaggccgtcttgcccacagacctggaatacggctccccgaggacgagggcctacagcgatcaaagcaaccaagctagccgagaagactcgctggaccagctggaagaggctcgggacaaggccttactacactcggcgcggtaccagcagtccctgcgacgctaccacgctcgaggggtccggtcccgagacctccaggtgggcgacctggtgcttcggctgcgacaagacccccgagggaggcacaagctcacgccccccagggagggaccgttcgtcatcgccaaggttctgaagcccggaacgtacaagctggccaacagccaaggcgaggtctacggcaacgcttggaacatccaacagctacgtcgcttctacccttaa

SEQ ID NO: 112881 - DNA, 2508 bp, Zea mays
  Clone ID: MRT4577_34436C.1
atgaaccacgtgttcggagagcacatcggccgaacggtcgtggcttacgtcgatgacatcgttgtcaagacgaggaaagcctctgacctcctctccgaccttgaaacgacattcaagtgtttgagagcgaaaggcgtgaaactcaatcccgagaagtgtgtcttcggagtcccccgaggcatgctcctggggttcatcgtctccgagcggggcatcgaggccaacccggagaaaatcgcggccatcacgaacatggggcctatcaaagatttgaaaggagtacaaagggtcatgggatgccttgcggctctgagccgcttcatctcgcgcctcggcaaaaaaggcctacccttgtaccgcctcttaaggaaggccgagcgcttcacttggacccccgaggccgaggaagccctcggaaacttaaaggcgctccttacaaacgcgcccgtcttggtgccccccgctgcgggagaagccctcttgatctacgtagccgcgaccactcaggtggtcagcgccgccattgtagttgagagacgagaagaagggcatgcactgctcgtccagaggccggtctacttcatcagtgaggtgctatccgagaccaagatccgctacccgcaaatccagaagctactatacgtagtaattctgacacgacggaaattgcgacactactttgagtcacatccggtgactgtggtgtcatccttccccctgggggagatcatccagtgccgagaggcctcaggagccggtgcgggcctgctcttcatctcacccctcgggaaacatgtgcgctacgtgttgcgcctccatgtcccggcatcaaacaacgtggccgagtacgaggctctggttaacgggctgcgcatcaccgtcgagctaggggttcggcgcctcgacgctcgtggcgactcgcagcttgtcatcgaccaagttatgaagaactcccactgccgcgacccgaagatggaggcctactgcgacgaagttcggcgcttggaagacaagttctacgggctggagctcaaccacatcactcgacggtacaacgagactacggacgagctggcgaaaatagcctcggggcggacaacggttcctccggacgtcttctctagagacatacatcaaccctccgtcaagatcgacgacacacccgagcccgaggaggcctcggcccagcccgaggtaccctcgaccgccgaaggtgaggccctgcgtgtcgagggggatcggaatggggtcacgccaaacccgagatggcagacctcgtacctgcaatatctccaccgaggagagctacccctcgacaaggccgaagctcagcgactggcacgacgagccaagtcgttcgtcttactgggggatgaaaaggagctctaccaccgcagcccctcgggcattctccaacgatgcatatccgtcgctgaaggtcaggagctgttgcaagaaacacactcgggggcttgcggtcaccctgcagcacctcgagccctcgtgggaaacaccttccgacaaggtttctactggccgaccgcggtggccgacgccactaggattgtacgctcttgccaagggtgtcaattctacgcaaggcagacgcacctacccgctcaggccctacagacaatacccatcacctggtcgtttgccgtgtggggtatggacctcgtcggtcctttgcagaaggcacccgggggcttctcgcacctgctggtcgccatcgacaaattctccaagtggatcgaggtccgacccctaaccagcatcaggtccgagcaggcggtggcgttcttcacaaacatcatccatcgctttggggtcccgaactccatcttcaccgacaatggcacgcagttcactgggaagaatttcctggacttctgcgaggaccaccacatccttgtggactgggccgccgtagctcaccccatgacgaatgggcaggtggagcgtgccaacggtatgattctgcagggacttaaactgaggatctacaacgacctccacaagttcggcaagcggtggatgaaagagctaccctcggtggtctggagtctgaggacgacgccgagccgagccacgggtttctcgccgttctttctagtctatggggccgaggctatcttacccacagacttagaatacggttccccgaggacaaaggcgtacgacgaccgaagcaaccagaccagccgagaagattcactggaccagctcgaggaagctcgggacgtggccttactacactcggcacggtatcagcagtctctgcgacgctaccatgcccgaagggtttggtcccgagacttccaggtgggagacttggtacttcggctgcggcaagatgcccgagggcgccacaagcttacccctccctgggaagggccattcatcatcgccaagattttgaagcccggaacatacaagctggccaacgatcaaggcgaggtctacaacaacgcttggaacatccaacagctacgtcgcttctacccttaa

SEQ ID NO: 112882 - DNA, 421 bp, Zea mays
  Clone ID: MRT4577_34437C.1
gcaccattcgcaaaaccctacccaaaccgccgccgccgccgacgccatgccgcacaaacccgacccgacgcagccggaggaggcccgcgcccgggagacggagcggcgaggccggcacggacgacggcccgggcgagcaagagcgggccgaacggccacaccccgaagaagaacggcgaggacaggggggaggagacggacaaggaccggaagggccggcgcgacaacgccaagcacacagaacagaaccgccaggccaagggcgcccgcgcgagccggcacggcgacgggcgcgacaaaaaggcgcacaaggagcccgaaagggacaggaagaagggcaagaacagcaagcacagcggcaacaacaggacccacgacaaggaagagaacgccagaaccaagacgaacaggaccagggcca

SEQ ID NO: 112883 - DNA, 2868 bp, Zea mays
  Clone ID: MRT4577_34438C.1
atgccgttcggtttgaggaatgcgggcgcgacgtatcagcggtgcatgaaccatgtgttcggcgaacacatcggtcgcacggtcgaggcctacgtcgatgacattgtagtcaagacgaggaaagcttccgacctcctctccgaccttgaagtgacattccgatatctcaaagcgaaaggcgtcaagctcaatcccgagaagtgtgtcttcggggtgccccggggcatgctcttggggttcatcgtctccgagcggagcatcgaagccaacccggagaagatcgcagccatcaccagcatggggcccatcaaggacttaaaaggcatacaaagggtcatgggatgtctcgcggccctgagccgcttcatctcacgcctcggcgaaagaggtctgcctctgtaccgcctcttaaggaaggccgagtgtttcgcttggacccctgaggccgaggaagctctcgggaacctgaaggcgctcctcacaaaggcgcctgtcttggtgcctccagctgacggagaagcccttttggtctacgtcgccgcgaccactcaggtggttagcgccgcgattgtggtcgagaggcaagaagaggggcatgcattgcccgttcagaggtcggtttacttcgtcagcgaggtactgttcgaaaccaagatccgctacccacaagttcagaagctgctgtatgcagtgaccctgacacggcggaagttgcgacactacttcgagtctcatccggtaactgtggtgtcatccttccccctgggggagatcatccggtgccgagaggcctcgggcaggattgcaaagtgggcggtggaaatcatgggcgagacaatctcgttcgcccctcggaaggccatcaagtcccaggtattggcggacttcgtagccgaatgggtcgacacccagctaccgacggctccgatccaaccggagctctggaccatgtttttcgacgggtcgctgatgaagacgggagccggcgtgggcctactcttcatctcgcccctcgggaaacacctacgctatgtgctacgcctccatttcccggcgtccaacaatgtggctgagtacgaggctctggtcaacgggttgcggatcgccatcgagctaggggtcaggcgccttgacgcccgcggtgactcgcagctcatcatcgaccaagtcatgaagaactcccactgccgcgacccgaagatggaggcctactgcaatgagcctcggggcgaacaacggttccccccggacgtcttctcccgggatctgcatcaaccctccgtcaagatcgacgacacgcccaagcctgaggcgccctcggtccagcccgaggtaccctcggcacagcccgaggcaccctcagctcggcccgaggtgccctcggttcagcccgaggtaccctcggcctccgagggcgaggcactgcgcatcgaggaggagcggagcggggccacgcctgatccaaattggcagaccccgtacctgcaatatctccgccaaggagagctacccctcgaccgagccgaggctcggcgggtagcgcgacgcgccaagtcgttcgtcttgctgggcgatgagaaggagctctaccaccgcagcccctcgggcatcctccagcgatgcatctccgtcgccgaaggtcaggaactcctgcaagagatacactcgggggcttgcggccatcacgcggcgcctcgagcccttgtcgggaatgccttccggcaaggcttctactggccaacggcggtggctgacgccactagaattgtccgcacctgcgaagggtgccaaatctatgcgaagcagacccacctgcccgctcaggctctgcagacgatacccatcacctggccctttgctgtgtggggtctggacctcgtcggccccttgcagaaggcgcccgggggctacacgcacctgctggtcgccatcgacaaattctccaagtgggtcgaggtccgacctctgaacagcaccaggtccgagcaggcggtgacgttcttcaccaacatcatccatcgcttcggggtcccgaactccatcatcaccgacaacggtacccagttcaccggcagaaaattcttggacttctgcgaggatcaccacatccgggtggattgggccgccgtggctcatcccatgtcgaatgggcaagtagagcgtgccaatggcatgattctacaagggctcaagcctcggatttacaacgacctcaacaagttcggcaagcgatggatgaaggaactcccctcggtggtctggagcctgaggacaacgccgagccgagccacgggtttcacgccattcttcctggtctacggggccgaggccgtcttgcccactgacctggaatacggctccccgaggacgagggcctacaacgatcaaagcaaccaagctagccgagaagacttgctggaccagctggaagaggctcgggacaaggccttactacactcggcgcggtaccagcagtccctgcgactctaccacgcccgaggggtccggccccgagacctccaggtgggcgacctagtgcttccgctgcggcaagacgcccgagggaggcacaagctcacgcccccctgggaggggccattcgtcatcgccaaagttctaaagcccgaaacgtacaagctggccaacagtcaaggcgaggtctataggcaacgcttggaacatccaacagctacgtcgtttctacccttaagatgttttcaagttgttcatatacctcgcacccacgcaaagtttagtcatcaaggaagggtcggcctcgcctcggcaaagcccgaccctccctcgggggctaaaagggggggaaccccctctgcgttgaaattttccttgaagccgaacgatggctga

SEQ ID NO: 112884 - DNA, 333 bp, Zea mays
  unsure (1)..(333): unsure at all n locations
  Clone ID: MRT4577_34439C.1
gaangggaaccctcgagccggccggggggnccancttncctgcacgacacngagggggcggggccgcaccnccaacccaaagccccgccgcccgacagaaagacacaccgcacccggcgacaacaggggcccccaaccgcccgccccccgcccccccccccccgccaccacgagccccaaccccaaccccagacccggcgggggcccgagggggggagcacccccaccgaccccacgccgggagagacgaagccggcgcaccccgacctcgacgcgccgaaccggggcggcaagggaaccccagcagcgcgcacgacccgcaccccgggcgcg

SEQ ID NO: 112885 - DNA, 422 bp, Zea mays
  Clone ID: MRT4577_3443C.1
gccgccagcgccaccgcggaaaaccccaacggcaaggccttacaaagtgagaaggcagcccgtggggagactggcatccatgggcagcgcctgcagcaacagctacaaacacaaccaggggctgcttccttcgcgatgagactcctgccttgcgagacggggagtccccaatctctcggggcagcaccccgggacactctaccagggggggccttgcgctttcgcgatcacgcgcgcaccctcgtaagaagaggaagccacagcatggaccagggccgccgccacggcctcgagcaaagcacagggtcgcaactagtcctgggacgggcaagaggggcaggtaggcacaggcagggcagcaaacgactgcggggcgcactggctgctggaacgacctcacgtgacggagccacggcgtcagc

SEQ ID NO: 112886 - DNA, 2088 bp, Zea mays
  Clone ID: MRT4577_34440C.1
atgccgttcggtttgaggaatgcgggcgcgacgtaccagcggtgcatgaaccatgtgttcggcgaacacatcggttgcacagtcgaggcctacgtcgatgacatcgtagtcaagacaaggaaggcttccgacctcctctccgaccttgaagtgacattccgatgtctcaaggcgaaaggagtcaagctcaatcctgagaagtgtgtcttcggggtgccccgaggcatgctcctggggttcatcgtctccgagcgaggcatcgaagccaacccggagaagatcgcaaccatcaccagcatgggacccatcaaggacttaaaaggcatacagagggtcatgggatgtcttgcggccctgagccgcttcatctcacgcctcggcgaaagaggtctgcctctgtaccgcctcttaaggaaggccgagtgtttcgcttggacccctgaggccgaggaagcccttgggaacctgaaggcgctccttacgaaggcgcctgtcttggtgcccccagctgatggagaagccctcttggtctacgtcgccgcaaccactcaggtggttagcgccgcgattgtggtcgagaggcaagaggaagggcatgcattgcccgttcagaggccagtctacttcgtcagcgaagtactgtccgagaccaagatccgctacccacaagttcagaagctgttgtatgctgtgatcctgacaaggcggaagttacgacactacttcgagtctcatccggtaactatggtgacatccttccccctgggggagatcatccagtgccgagaggcctcgggcaggatcgcaaagtgggcggtggaaatcatgggcgaaacaatctcgttcgcccctcggaaggccatcaagtcccagacgggagccggcgcgggcctgctcttcatctcgccccttgggaagcacctacgctacgtgctccgcctccatttcccggcgtccaacaatgtggccgagttcgaggctctggtcaacgggttgcggatcaccatcgagctaggggtcagacgcctcgacgctcgcggtgactcgcagctcgtcatcgaccaagtcatgaagaactcccactgccgcgacccgaagatggaggcctactgcgatgaggttcggcgcctagaagacaagttcttcgggctcgagctcaaccacatcgctcggcgctacaacgagactgcagacgagatggctaaaatagcctcggggcgaacgacggtccccccagacgtcttctcccgggatctgcatcaaccctctgtcaagatcgacgacgctcccgagcccgaggcaccctcggcacagcccgaggtaccctcggcacagcccgaggcaccctcggcacagcccgaggtaccctcggcccccgagggcgaggcactggacgtcgaggaagggcagagcggggccacgcctgatcaagattggcaggccccgtacctgcaatatctccgccgaggagagctacccctcgaccaagccgaggctcggcgggtagcgcgacgcgccaagtcgttcgtcttgctgggcgatgagggggagctctaccaccgcagcccctcgggcgtcctccagcgatgcatctccatcgccgaaggtcaggaactcctgcaagaaatacactcgggggcttgcggccatcatgcagcaccccgagcccttgtcgggaatgctttccggcaaggcttctactggccaacggcggtggctcacgccactagaattgtccgcacctgcgaagggtgccaattctatgcgaagcagacccgcctgcccgctcaggctctgcagacgatacccatcacctggccctttgctgtatggggtctggacctcgtcggtcccttgcagaaggcgcccgggggctacgcgcacctgctggtcgccatcgacaaattctccaagtggatcgaggtccgacccctgaacagcatcaggtccgagcaggcggtggcgttcttcaccaacatcatccatcgcttcggggtcccaaactccatcatcaccgacaacggtacccagttcaccggcaaaaaattcttggatttttgcgaagatcaccacatccgggtggactag

SEQ ID NO: 112887 - DNA, 398 bp, Zea mays
  Clone ID: MRT4577_34441C.1
ttttatatatttatattttttgcaccacatttttttttggtttgggtacaagtaaggcatcccccaatgttgctttccaaaaaaaaaaaaatcccgggacctgtgctttaaaaaaaaaacatcaaagcccgtgagaaagaggccccaaaaaaaagattaagaagagaagaaaaagagaaaaagcctcccttccccagttgctgatgtgaaacaagaacaatattgatccatgcaaaaaactaagcaatttttatttactgagaatgacacacttcgtgtggggggggatcaagggaggagcttctgctacggggggtatagaaaagggttgtcccctttggggctttccgccaccttccggaaccccaggctggaacgggggatttttttaatccccg

SEQ ID NO: 112888 - DNA, 5769 bp, Zea mays
  Clone ID: MRT4577_34442C.1
atggcggctgacaacacgcccgccgaacaacattcgggtttatcccgtcgcctcccacgccgacggaggaggaggcggggcaaccgaggccaagcaggaggcggcacctcgtcggctgtcgagcgagtcgacggcgtcggcgccccaacgggggacacgtcgggcatcgacttcgcgtctgagacgaagacgagcgccgtctccccgcaacacgccaactccaagcggacagacgacgccagcacgctcgcaaaagacttgctgggcgtcaccctcgtacctgagatgacggtgcagtctgcccctgacgtgacttcgtcaccacccgtcgaccaagaggtactgaccgattcccatctcatgccttttggattcagcctcgacccaccaagtgacttcgcttcggtggacgctttcatagaggcgagtccaaacccttcggggtacggtatgcggtcaccctgggaccggctggcagccgtctcgacctgcgggccctcgggttccgaggaagatgacgagcccgacttttgttgggatttctccagacttggcaaccccagtgccatgcgggacttcatgatcgcatgcgactactgcctttctgactgttccgatgataaccgcagcctcggcgacgaggactgtggcccaagtcgtgaatgtttccacatcgatctagggggtcccggcgaaggcaaccatcttggtataccggagaacggtgatcctcctaagcctgcgcctcgcgttgacatcctacgggagctagctgtggtcccagtccctgcggggggccaacctccggccggagaagcgcgtcatctaccccagggcatccagcaccgcatcgccgacgatgccagggcaaggccgccaccggcttccagtggggtcagccagaacctggctgcagcggcaataaatctccgcgcgatgccggagccatcaaccaccgaggggcggcgtatccagggagagctcaagaatctcctggaggatgccgcggtccgacgggccgaaagctctgcctcccgaaggaggggtacccctcggagcatcgcgccgcgacttcccgatacatgcgggaagccttggtccacaccgggcgcacgcgcaacacagcgcctgcggccccgggtcgcctcggcaacgagcaccctcaccgcaaccgtcgagcccacctcgacgagaaggtgcgccgaggctaccaccccaggcgtgggggacactacgacagcggggaggatcggagtctctcgcccgaaccacccggtccgcaggctttcagctgggccatacgacgggcgccgttcccgacccggttctgaaccccgactactatcacaaagtactcggggggagacaagaccggaactgtggctcgcggactaccggctggcctgccacctgggtggaacggacgatgacaacctcatcatccgcaacctccccctgttcctctccgacaccgctcgagcctggctagagcatttgcctccggggcagatctccaactgggacgacctggtccaagccttcgccggcaacttccagggcacgtatgtgcgccctgggaactcctgggatctccgaagctgccgccagcagccgggagagtctcttcgggactacatccggcgattctcgaagcagcgcaccgagctgcccaacgtcaccgactcggatgtcatcggcgcgttcctcgccggcaccacctgtcgagacctggtgagcaagctgggtcgcaagaccctcaccagggcgagcgagctgatggacatcgccaccaagtttgcctccggccaggaggcggttgagtccatcttccggaaggataagcagccccagggccgccagccggaggatgtccccgaggcgtccactcagcgcggcaccaagaagaaaggcaagaagaagtcgcaagcgaaacgcgatgccaccgacgcggaccttgtcgccgccgccgagtacaagaaccctcggaaacctcccgaaggtgccaacctctacgacaaaatgctcaaggagccgtgcccctatcaacaggggcccgtcaagcacacccttgaggagtgcgccatgcttcggcgccactttcacaaggccgggccacctgcggagggtggcagggcccgcgatgacgataagaaggaggatcacaaggcaggagagttccccgaggtccacgactgctttatgatctatggtgggcaagtggcgaatgcctcggctcggcaccgcaagcaagagtgtcgggaggtctgctcggtaaaggtggcggcgccagtctacctagactggtccgacaagcccatcaccttcgaccagggcgaccatcccgaccgcgtgccgagcccggggaaatacccgctcgttgtcgaccccgtcatcggcaacgtcaggctcaccaaggtcctcatggacggaggcagcagcctcaacatcatctacgccgagacccacgggctcctgtggatcgatctgtcctcggtccgggcaggcgctgcgccttttcacgggatcatccccgggaaacgcgtccagcccctcggacaactcgatctacccgtctgctttgggacaccctccaacttccgaagggagaccctcacggtcgaggtggtcgggtttcgaggaacctaccacgcagtgctggggaggccatgctacgccaagttcatggtcgtccccaactacacctacctcaagctcaagatgtcgggccccaatggggtcatcaccgtcggccccacgtaccgacacgcgtacgaatgtgacgtggagtacagggagtacgccgaggccctcgccaaatccgaggccctcatcgccgacctggagagcccttctaaggaggcgccagacgtgaagcgccacgccggcaacttcgagtcagcagagacggaagcagtgctcgtcgactttctccgcgcaaataccgacgttttcgcgtggagtccctcggacatgcctggcataccgagggatgtcgccgagcactcgctggatatccgagctagggcccgacccgtgaagcagcctctgcgccgattcgacaaggaaaagcgcagagccataggcgaggagatccacaagctaatggcggcagggttcatcaaagaggtattccatcccgaatggcttgccaaccctgtgcttgtgagaaagaaaggagggaaatggcggatgtgtgtagactacactggtctaaacaaagcatgtccaaaagttccctaccctctgcctcgcatcgatcaaatcgtggattccattgctggatgtgaaaccttgtctttcctcgatgcctactcagggtatcaccaaatcaggatgaaagagtccgaccaactcgcgacttctttcatcacacctttcgacatgtactgctatgttaccatgccgtttggtttgaggaatgcgggtgcgacataccaaaggtgcatgaaccacgtgttcggtgaacaaattggtcgaacggtcgaggcctacgtcgatgacatcgtagttaagacgaggaaagcctccgacctcctttccgaccttgaagtgacattccgatgtctcaaggcgaaaggagtaaaactcaatcctgagaagtgtgtcttcggggtcccccgaggcatgctcttggggttcatcgtctccgagcggggcatcgaggccaacccggagaaaatcgcggccatcaccaacatggggcccatcaaggacttgaaaggcgaacagagggtcatgggatgccttgcggctctgagccgtttcatctcgcgcctcggcgaaagaggcctgcctctgtaccgcctcttaaggaaggccgagtgcttcacttggacccctgaggccgaggaagccctcgggaacctgaaggcgctcctcacgaacgcgcccatcttggtgcctcccgccgccggagaagccctcttgatctacgtcgccgctaccactcaggtggttagcgccacgatcgtggttgagagacgagaagaggggcatgcattgcccatccagaggctagtctacttcattagtgaggtactgtctgagaccaagatctgctacccacaaattcagaagctgctgtacgcggtgatcctaacgcggtggacgttgcgacactacttcgagtctcatccggtaactgtggtgtcatccttccccctgggggagatcatccagtgccgagaggcctcgggtagaattgcaaagtgggcggtggaaatcatgtgcgagacgatctcgttcgcccctcggaaggccatcaagacccaggtcttggcggactttgtggctgaatggatcgacacccagctcccaacagctccgatccaaccggaactctggaccatgtttttcgatgggtcgctgatgaagacaggagcaggcgtgggcctgctcttcatctcgcccctcgggaagcacctacgctacgtgctacgcctccacttcccggcgtccaacaatgtggccgagtacgaggctctggtcaacgggttgcgcatcgccatcgagctaggggtccgacgcctcgacgctcgcggtgactcgcagctcgtcatcgaccaagtcatgaagaactcccactgccgcgacccgaagatggaagcctactgcgatgaggttcggcgcctggaggacaagttctattggctcgagctcaaccacatcgcccgacggtacaacgagactgcggatgagctggccaagatagcctcgaggcgaacaacgaccccgtacctgcaatatctccaccgaggagagctacccctcgaccgagccgaagctcggcggttggcgcggcgcgccaagtcgttcgtcttgctgggagacgggaaggagctctaccaccgcagcccctcgggcatcctccaacgatgcatttccatcgctgaaggccaggagctcttacaagagatacactcgggggcttgcggtcatcacgcagcgcctcgagccattgttggaaatgccttccgacaaggtttctactggccgaccgcggtggccgacgccactagaattgtccacacctgccgagggtgtcaattctatgcgaggcagacacacttgcccgctcaggccctgcagacgatacccatcacctggccgtttgttgtgtgggggctggacctcgtcggccccttgcagaaggcacccaggggctacacgcacctgctggtcgccatcgacaaattctccaagtggatcgaggtccgacctctaaacaacatcaggtccgaacaggcggtggcgttcttcaccaacatcatccatcgctttggggtcccgaactccatcatcactgacaacggcacccagttcaccggcagaaagttcctggacttctgcgaggatcaccacatccgggtggactgggctgccgtggctcaccccatgacgaatgggcaagtagagcgtgccaacggcatgattctgcaaggactcaagccacggatctacaacgacctcaacaagttcggcaagcgatggatgagggagctcccctcagtggtctggagtctgaggacgacgccgagccgagccacgggcttcacaatgttctttctagtctatggggccgaggccatcttgcccacagacttagaatacggttccccgaggacgagggcctacgacgaccaaagcaatcgagctaaccgagaagactcactggaccagctggaagaggctcgggacatggccttactacactcggcgcggtatcagcagtccctacgacgctaccacgcccgaggggttcggtcctga

SEQ ID NO: 112889 - DNA, 2253 bp, Zea mays
  Clone ID: MRT4577_34443C.1
atgaaccatgtgttcgacgaacacatcggccgaacggtcgaggcctacgtcgatgacatcgtagtcaagacaaggaaggcctccgacctcctttctgaccttgaagtgacattccgatgtctcaaggcgaaaggcatgaagctcaatcccgaaaagtgtgtcttcggggtcccccgaggcatgctcttggggttcatcgtctccgagcggggcatcgaggccaacccagagaagatcgcagccatcaccagcatggggcccatcaaggacttgaaaggcgtacagagggtcatgggatgcctcgcggctctgagccgtttcatctcgcgcctcagcgaaagaggcctgcctctgtaccgcctcttaaggaaggccgagtgcttcgcttggactcctgaggccgaggaagccctcgggaacctaaaggcgctcctaacgaacgcgcccatcttggtgccccccgctgccggagaagccctcttgatctacgttgccgcgaccactcagttgcgacactacttcgagtctcatacggtgactgtggtgtcatccttccccctgggggagatcatccgatcccgagaggcctcgggtagaattgcaaagtgggcagtggagatcatgggcgagacaatctcgttcgcccctcggaaggccatcaagtcccaggtcttggcagacttcgtggctgaatgggtcgacacccagctcccgacagctccgatccaaccggagctctggaccatgtttttcgacgggtcgctgatgaagacgggggccggcgcgggcctgctcttcgtctcgcccctcggaaagcacctacgctacgtgctacgcctccacttcctggcgtccaacaacgtggctgagtacgaggctctggttcggcgcctggaagacaagttctacgggctcgagctcaaccacatcgcccgacgctacaacgagactgcggacgagctggctaaaatagcctcggggcgaacaacagttccctcggacgtattctcccgagacctgcatcaaccctccgtcaagaccgacgacacgcccgagcccgagaaggcctcggcccagcccgaggcaccctcggctcagtccgaggtaccctcggcacggtccgaggtaccctcggcccccgagggtgaggcactgtgcgtcgagggggagcagagcgaggtcacgcctaatcaaaactggcagaccccgtacctgcaatatctccaccgaggagagctgcccctcgaccaagccgaggctcggcggttggcgcggtgcgccaagtctttcgttttgctgggagatgggaaggagctctaccaccgcagcccctctggcatcctccagcgatgcatttccatcaccgaaggtcaggagctcttacaagagatacactcgggggcttgctgccaccacacagcaccccgaacccttgttggaaacgccttccgacaaggtttctactggccgacggcggtggccgacgccactagaattgtccgcacctgcgaagggtgtcagttctacgcaaggcagacccacctgcccgctcaggctctacagaccatacccatcacctggctgtttgctgtgtggggtctggacctagtcggccccttgcagaaggcacccgggggctacacgcacctgctagtcgccatcgacaaattctccaagtggatcgaggcggtggcgttcttcaccaacatcatccatcgctttggggtcccgaactccatcatcaccgacaatggcacccagttcaccggcagaaagttcctggacttctgcgaggatcaccacatctgggtggactgggccgccgtggctcaccccatgacgaatgggcaggtagaacgtgccaacggcatgattctgcaaggactcaagcctcggatctacaacgacctcaacaagttcgacttagaatacggttccccgaggacaaaggcctacgccgaccaaaacaaccgagccaaccgagaagactcactggaccagctggaagaggctcgggacatggccttactacactcggcgcggtaccagcagtccctgcgacgctaccacgcccgaggggttcggtcccgagacctccaggtgggcgacctggtgcttcggctgcgacaagacgcccgagggcggcacaaacttacgcctccctgggaagggccattcgtcatcgccaaaattctgaagcccaaaacatacaagctggccaacagccgaggcgaggtctacagcaacgcttag

SEQ ID NO: 112890 - DNA, 539 bp, Zea mays
  Clone ID: MRT4577_34444C.1
agaaacagcgcggtggcgagcagcaccatggcacctctcctccacagccttcgccggcaaggcagtgaacgtgccctcgtctctcttcggcgaggcccgcgtgacgatgcgcaagaggcggcgaaggcaaagccggcgccgagctccggcagtccgtggggggggggggaccccgtgctctacctggaccccttgtccggctcgccccctagctacctgacggacgagttcccggactactacggctggtacacccgggcgctgctgctccgaccccgttaccgccgccaagaaccgggacctggacgtcatccactccccgtgggccatgctctgctcatgtgcgctgcttgttcccagagctgctcgcccgcaacggtgtaaaattctgacaggccgtccggttcaaggacctgtcatagatcttcaaggagggtgggctggactacctctgctactcctaccctgatccacccacaaagcatcctcgccatttgggcctgactggtcacgctcatgtgcgccataaaagggtaccg

SEQ ID NO: 112891 - DNA, 2616 bp, Zea mays
  Clone ID: MRT4577_34445C.1
atgaaccacgtgttcggagagcacattggtcggaccgtcgaggcttacgtcgacgacatcgtagtcaagacgaggaaagcctccgaccacctctccgaccttgaaacgacattcaagtgtctcaaggcgaaaggcgtaaaactcaatcccgagaagtgcgtcttcggagtcccccgaggcatgctcttggggttcatcgtctccgagcggggcatcaaggccaacccaaaaaaaatcgcggccatcaccaacatggggcccatcaaggacttgaaaagcgtacatagggtcacgggatgccttgcggctcttagctgtttcatctcgcgcctcggtgaaagaggcctacctctgtaccgcctcttaaggaagaccgagtgcttcacttggacccccgaggccgaggaagccctcaggaacctgaaggcgctccttacaaatgcacccatcctggtgcctcccgctgccggagaagccctcttgatctacgtcgctgctaccactcaggtggtcagcgccgtgatcgtggtcgaaagacgagaagaagggcatgcattgcccgtccagaggccggtctacttcatcagtgaggtactgtccgagaccaagatccgctacccacaaattcagaagctgctgtacgcggtgattctaacgcgacggaagttgcgacactacttcgagtctcatccggtgactatggtgtcatccttcccctgggggagatcatccagtgccgagaggcctcggctcccggcagctccgatccaaccggaactctggaccatgtttttcgacgggtcgctgatgaaaataggggcaggcgcgggcctgctcttcatctcacccctcgggaagcacctccgctacgtgctgcgcctccatttcccggcgtccaacaatgtggtcgagtatgaggctctggttaacgggttacgcatcaccatcgagctaggggtccgacgcctcgacgctcgcgacgactcgcaacttgtcatcgaccaagtcatgaagaactcccattgccgcgacccgaagatggaagcctactgcgacgaggttcggcgcctggaggacaagttctacgggctcgaggtcaactacgtcgcccggcggtacaacgagactgcggacgagctggtgaagatagctttggcgcgaacaacggttcccccgaacgtcttctcccgggacctacatcgaccctcagtcaagaccaacgacacgcccgagcccgagaaggtctcggccctgcccgaggtgccctcgactcagcccgaggcgccctcggctcagctagaggcaccctcggcccccgagggtgaggcactgcgcgtcgagggagagcggaatggggtcccacctgatcgagactggcagaccccgtaccggcaatatctccaccgaggagagctgcccctcgaccgagccgaagctcggcgactggcgcgacgcgccaagtcattcgtcttgctgggtgacgggaaggagctctaccaccgcagcccctccggcatcctccagcgatgcatatccatcgccgaaggccaggagctcttacaagaaatacactcgggggcttgcggtcatcacgcagcgcctcgagcccttgttggaaacgctttccgacaaggtttctactggccgaccgtggtggccgacgccactagaattgtccgcacctgccaagtgtgtcaattctacgcaaggcagacacacctacccgctcaggctctgcaaacaatacccatcacctggccgtttgctgtgtggggtctggacctcgtcggtcccttgcagaaggcgcccgggggctacacgcacctactggttgccatcgacaaattctccaagtggatcgaggtccgacccctaaacagcatcaggtccgaacaggcggtagcattcttcaccaacatcatccatcgcttcggggtcccgaactccatcatcaccgacaacggcacccagttcaccgacagaaagttcctggacttctacgaggatcaccacatccggatggactgggccgccgtggcacaccccatgacgaatgggcaggtagaacgtgccaacggcatgattctgcaaggactcaagccgaggatctacaacgacctccacaagttcggcaggcgatggatgaaggaactccccttggtggtctggagcctgaggacaacgccgagccgagccacgggcttcacaccgttctttctagtctatggggccgaggccatcttgcccacagacttagaatacggttccccaaggacgagggcctatgacgaccgacacaaccagaccaaccgagaagactcactagaccagctggaagaggctcgggacatggccttactacactcggcgcggtatcagcagtccctgcgacgctaccacgcccgaggggtttggtcccgagacctccaggtgggcgacttggtgcttcggctgcaacaagacgcccgagggcgccacaagctcatgcctccctgggaagggccattcatcatcgccaagattttgaagcccggaacatacaagctggccaacagtcaaggcgaggtctacagcaacgcttggaacatccgacagctacgtcgcttctacccttaa

SEQ ID NO: 112892 - DNA, 197 bp, Zea mays
  Clone ID: MRT4577_34446C.1
cccacgcgtccgcggacgcgtgggggaataatttggacttcctcttttttcgctggagggaaaaaaagacattctataaaaaatttccgcgctcactctagattacacccgctttcagtacccatactttcgacgtaccatatttttatatactggacgccccttcaactctactgcgccccggtttacaaccgctt

SEQ ID NO: 112893 - DNA, 2889 bp, Zea mays
  Clone ID: MRT4577_34447C.1
atgggcagtctccggcaacctctccaacccgggacggtgctccgtttcgggagtcttgagttcatgtccctcgacgacagctacgacatgatactccttccgccgccgtgcgacaatgacaatggcggccgacagcccgcccgccggcggcgaaatcgacgacgtcttccccgcgtggcggaagaacaacattcgagctcgtcccgccttcttcctcgccgacggaggggaaggcagggcaaccaaggccaagcaggaggcagcgcctcgtcggctgtcgagcaagtcgacagcgccggcaccccaacgagcggtgcaccgggtatcgacttcgcgcctgagacgaagacgagcgccgtctccccgcgacacgccaaacccgagcaagtggacgacgccagcgcgcttgcgaaaagcttgcaggacgtcgccctcgtacctgaggcgacggtgcagtcagtcctcgacgtgacttcatcgccgctcgatgaccaaaaggtatcgaccgattcccatcctatgtcttttggattcagcctcaacccgcctagcaatctcgatttggcggacgcttttgtggaggcgagtccaaaccctctggggttccgcatgcggtcgccttgggaccggttgatggacgtctcgacctacgggccctctgggtccgaggaagacgacgaccccagcatctgttgggatttctctggacttggcaaccccagtgccatgcgggacttcatgaccgcatgtgacttctgcctctccgactgttccgacggtagccgcagcctcgatgacgaggattgcggcccaagccgcgaatgtttccacgtcgatctagggggtccctccgaaggcaatcatctcggcatgccagagaacggtgatctccctaggccggtgcctcgcgctgacatcccacgggagctagctgtggtccccgttctggcggggggtcacgacccacagctcgagcaactccgcggggcgcaggccaggttcgacgagggagcaggagcgcttgagccaatccgccgggacgtcgggcaggcatgggcgggccaacccccggccggagaaatacgtcacctgccccagggtctccagcaccgcgtcgccgatgacgtcaggttcaggccgccacccgcatccagtggggtcggccagaacctggctgcagcagcgatgctcctccgcgcgatgccggagccatccaccaccgagggtcggcgaatccagggggagctcaagaatctcctggaaggcaccgcggtccgacgggccgagagcactgcctcccgaaggcaaggatacccctcggaacctcatgccgcgacttcccgattcatgcaggaagcctcggtctacaccgggcgcacacgcaacaccgcgcctgtggccccgggccgcctcggcaacgagcaacatcatcgcgaccgtcgggcccacctcgacgagaggggcacatacgtgcgccccgggaattcctgggacctccgaagctgccggcagcagccgggagagtctctccgggactacatccggcgattctcgaagcagcgcaccaagctgcccaacatcaccgactcggatgtcatcggcgcgttccttgcctgcaccacctgccgcgacctggtgagtaagttgggtcgcaagacccccaccagggcgagcgagctgatggacatcgccaccaagttcgcctctagccaggaggcggtcgaggctatcttccgaaaggacaagcagccccagtgccgcccatcggaagatgctcccgaggcgtctactcagcgcggcgccaagaagaaaggcaagaagaagtcgcaagcgaaacgcgacgccgccgacgcggaccttgtcgccgccgccgagtacaagaaccctcggaagccccccggaggtgccaacctcttcgacaagatgctcaaggagccgtgcccctatcatcaggggcccgtcaagcacacccttgaggagtgcgtcatgcttcggcgccacttccacagggccgggccaccctcggagggtggcagggcccgcgacgatgacaagaaggaagatcaccaagcaggagagttccccgaggtccgcgactgcttcatgatctatggtgggcatgcggcgaatgcctcggctcggcatcgcaagcaagagcgccgggaggtctgctcggtgaaggtggcggcgccagtctacctagactggtccgacaagcccatcaccttcgaccaagctgaccaccccgaccacgtgccgagcccggggaaatacccgctcgtcgtcgaccccgtcgtcggcgacgtcaggctcaccaaggtccttatggacgggggcagcagcctcaacatcatctacgccgagaccctcgggctcctgcgcgtcgatctgtcctccgtccgagtaggcgctgtgcccttccacgggatcattcccgggaagcgcgtccagcccctcggacgactcgacctccccgtctgcttcggaacgccctccaacttccgaagggagactctgacgttcgaggtggtcgggttccgaggaacctaccacgcggtactggggaggccatgctacgcaaagtttatggccgtccccaactacacctacttgaagctcaagatgccgggccccaacggggtcatcaccgtcggccccacgtacaaacacgcgttcgaatgcgacgtggagtgcgtggagtacgccgaggccctcgccgagtccgaggccctcatcgccgacctggaaaacctctccaaagaggtgccagacgtgaagcgtcatgccggcaacttcgagccagtggagacggttaaggccgtccccctcgaccacagtggcgacgcctccaagcagatccggatcggttccgggctcgaccccaaatag

SEQ ID NO: 112894 - DNA, 3249 bp, Zea mays
  Clone ID: MRT4577_34448C.1
atgggcagtctccagcaacctctccggcccgggacggtgctccgtttcgggactcttgagttcgtatccttcgacggcagctacgacatgatacttcttccaccgccgcgcgacgacgacaatggcggccgacaacccgcccgccggcggcggaatcgacgacatcttccccgcgtggtggaagagcaacgttcgagctcgctccgttctctcccccgccaacggaggaggaggcggggccatcaagaccaagcgggaggccgcgcttcgttgaccgtcgagcgaatcgacgcccccgacgccccgacggaaggcacgccggacgtcggcctcgcgttcaagacggaggcaagcgccgtccccccgcgacacgctgaccccgagccagaagacgacgccggcgcgctcgcggaaagcctgcaggacgtcgccctcgtacctgagatgacggtgcaaccagtccccgatgtgactacgtcgctcctcgtcgaccaaaaggtaccgactaactcccatcttgcgtcatttcaactcggcctcaacccgccaaacgacctcgctttggcgggtgctctcattgaggcgagtgcaaccccactggggtttcgtatgcggtcgccttgggaccggctgacggacgtctcgacctacgggccctctgggtccgaggaagatgacgatcccaacatctgttgggatttctccggacttggcaaccccagtgccatgcgggacttcatgaccgcatgtgactactgcctatccgactgttccgacggaagccgcggccttggcaacgagagctgcggcccaggccgcgaatgtttccacatcgagctaggggatccctccgaaggcaaccatctcggcatgccggaggacggtgatcttcctaggccggtgcctcgcgccgacatcccacgggagctagctgtggtccccgctccggcggggggttacgacccacaactcgagcaagtccgcgaggcgcaggccaggctcaacgagggaacaggagcgcttgagccgatccgtcgggacgtcgggcaggtgtgggcaggccaacccttggccggagaaatacgtcacctgccccaaggtctccagcaccgcgtcgccaacgatgtcagggtcaggccgccgcccgcctccagcggggttggtcaggacctggcagccacagcgatgctcctccgcgcgacgccggagccgtcaaccaccgagggtcggcgaattcagggagagctcaagaatctcctggaaggcgctgcggcccgacgggccgagagcactgcctcccgaaggcaaggatatccctcggaacctcatgccgtgacttcccgattcatgcgggaggcctcggtctacaccgggcgcacgcgcaacaccgcgcctgcggccccgggccacctcggcaacgagcaccatcgacacaaccgtcgggcccacctcgacaaaagggtgcgccgaggctaccaccccaggcgtggggggcgctacgacagcggggaggatcggagtccctcgcccgaaccacccggtccgcaggccttcagtcgggccatccgacgggcgccattcccgacccggttccggcccccgactactatcacgaagtactcgggggaaacaagaccggaactgtggctcgcggactaccgcctcgcctgccaactgggtggaacggacgacgacaacctcatcatccgtaacctccccctgttcctctccgacactgctcgtgcctggttggagcacctgcctccggggcagatctccaactgggacgacttggtccaagccttcgctggcaatttccagggcacatacgtgcgccccgggaattcctgggaccttcgaagctgccggcaacagccgggggagtcgctccgggactacatccagcgatcctcgaagcagcgcaccgagctgcccaacatcaccgactcggatgtcatcagcgcgttcctcgccggcaccacttgccgcgacctggtgagcaagctgggtcgtaagacccccaccagggcgagcgagctgatggacatcgccaccaagttcgcctctggccaggaggcggtcgaggcaatcttccgaaaggacaagcagccccagggccgcccatcggaagaggctcccgaggcgtctgctccgcgcggcgccaagaagaaaggcaagaagaagttgcaatcgaaacgcgacgctgctgacgcggaccttgtcgccgccgccgagcacaagaaccctcggaagccccccggaggtgcaaacctcttcgataagatgctcaaggagccgtgcccctaccatcaggggcccgtcaagcacaccctcgaggagtgcattatgcttcggcgtcacttccacagggccgggccacccgccgagggtggcagggcccgcgacgacgacaacaacgaggatcaccaagcaggagagttccccgaggtccacgactgcttcatgatctatggaggacatgcggcgaatgcctcggctcggcatcgcaagcaagagcgccgggaagtctgctcggtgaaggtggcggcgccagtctacctagactggtccaacaagcccatcaccttcgaccaggccgaccaccccgaccatgtgccgagcccgggaaagtacccgctcgtcgtcgaccccgtcgtcggcaatgtcaggctcaccaaggtcctgatggatggggacagctgcctcaacatcatctacgccgagaccctcaagctcctgcgcgtcgatctgtcctccgtccgagcaggcgctgcgcccttccacgggatcatccttgggaagcgcgtccagcccctcgggcgactcgacctccccgtctgcttcgggacgccctccaacttccgaagggagaccctgacgttcgaggtggtcgggttccgaggaacctaccacgccgtactagggaggccatgctacgcgaagttcatggccgtccccaactacacctacctgaagctcaagatgccgggccccaacggggtcatcaccgtcggccccacgtacaaacacgcgttcgaatgcgacgtggagtgcgtggagtacgccgaggccctcgccgagtccgaggccctcatcgccgacctggagaacctctccaaggaggtgccagacgtgaagcgccatgccggcaacttcgagccagcagagacggttaaggccgtccttcttgaccccagtggcgacaccaccaagcagatccggatcggttccgggctcgaccccaaatag

SEQ ID NO: 112895 - DNA, 460 bp, Zea mays
  Clone ID: MRT4577_34449C.1
ctgcagtcaccacagatggtaaacggagtgctcaatttgaacatacacttttggtgacagacacattatgcgaagttttgacggacgcgtgggctcatcaccagacgtttttccatggttgaaaccgtgatcgggcacccgaacagcaacaagaaagtgatactctttatcagtcagtcaagctgaatattttcaaaattttcagaccaaacagtgataagcatgctactgctggacagtcgccctaattgtctgtcctgcggaattgtttctgggagtgtgtattgttaagtcggttttctccgagttatacgagacatatggcttgagttgtgtcaccaatatgcttatgccataggactatcagagtttacttttaatttcagagaacataatttccatcaatttcagtaggttcatttttaatgaaaaaaaaaatataattatttattaaattaat

SEQ ID NO: 112896 - DNA, 604 bp, Zea mays
  Clone ID: MRT4577_3444C.1
tttaatgattaatgaataagaatattttctgcagagtttcaagcatccacatctacagaacatgttgtactgaatatttcccacaaatttacccctctaattcgcgacacaaatgcacctaaaaatgtttatctttttttaaaaaaaattctagcagaaaaattacagagacgggaagtttgtacaacaagaatccacccaggcattactaccaacgtccaaccaaataacttagcaataaaccgcaaaaggcggaatatccaaccgctgttgttctaaaacctaagaaaaaaaacgaatatccgggaacacaaggtatcccttcatgaatctgcagtatgaatttgaccttcaagcatgtgctttgtgaaatcattcgtcttaatggttccactgcttttgctgagctttgaactgctctggttcctgtggctgctgctgagcctgctgggcctctgatggccgcttctgtacctgctgcagctgttcgagaatctggcggttcatatgatgatgcgaaccgttcggcacatgaagatcactggcctcgccagccatttgtttcaggcgctgcacttcagctgtcagtgcttcattcagagca

SEQ ID NO: 112897 - DNA, 2931 bp, Zea mays
  Clone ID: MRT4577_34450C.1
atggcgcccgacaacctacccgtcggcggcggaatcgacaacgtcttccccacgtggtggaagaacaacattcgggcttgtcccgtcccctcccccgccgacggaggaggaggcggggcaaccaaggccaagcaggaggcggcacctcgtcggttgtcgagcgagtcgacggcaccgacgccccaacgggggggcacgtcgggcatcaacctcgcatctgagacgaagacgagcgtcgtctccccgcaacatgctaaccccaagcaaacggacgacgccagcacgctcgcaaaggacttgctgggcgtcaccctcgtacctgagacgacggtgcagtctgcccctgacgtgacttcgtcaccacccgtcgaccaagaggtaccgaccgattcccatctcgtgccctttggattcagcctcgacccaccaagcgacttcgctttggtggacgctctcgtagaggcgagtccaaaccctctggggtatcgtatgcggtcaccctgggaccggctgacggccgtctcgacctacgggccctcgggttccgaggaagatgacgagcccgactttagttgggatttctccggacttggtaaccccagtgccatgcgggactttatgaccgcatgcgactactgcctttccgactgttccgacggtagccgcagcctcggcgacgaggactgcggcccaagtcgtgaatgtttccacgtcgatctagggggtcccgacgaaggcaaccatcttggtatgccggagaacggtgatccccctaggcctgtgcctcgcgttgacatccttcgggagctagttgtggtccccgtcccggcggggggtcatgacccacagctcgagcaaatccgcgagatgcaggccaggctcgacgagggagcaggaacacttgagccgttccgccgggacattgggcaggaatgggcgagccaacctccggccggagaagtgcgtcatctaccccagggcatccagcaccgcatcgccgacgatgtcagggtaaggccgccatcggtttccagtggggtcggccagaacctggctgcagcggcaatacttctccgtgcgatgctagagccatcaaccaccgaggggcggcgtatccagggagagctcaagaatctcctggaggatgccgcggtccgacgggccgaaagctctgcctcccgaagacaggggtgcccctcggaacatcgcgccgcgacttctcgattcatgcgggaagcctcggtccacaccgggcgcacgcgcaacacagcgcctgcggccccgggtcgcctcggcaacgaacaccctcaccgcaaccgtcgaacccacctcgacgagagggtgcgccgaggctaccaccccaggcatgggggacgctacgacagcggggaggatcgaagtccctcgcccgaaccacccggtccgcaggctttcagccgcgccatacgacgggcgccgttcccgacccggttccgaaccccgactactatcacaaagtactcgggggagacgagaccggaactgtggctcgcagactaccggctggcctaccacctgggtggaacggacgatgacaacctcatcatctgcaacctccccctgttcctctctgacaccgctcgagcctggctggagcacctgcctccggggcagatctccaactgggacgacctggtccaagccttcgccggcaatttccagggcacgtacgtgcgcccagggaactcctgggatctccgaagctgccgccagcagccaggggagtctctccgggactacatccggcgattctcgaagcagcgcatcgagctgcccaacgtcaccgattcagatgtcatcggcgcgttcctcgccggcaccacctgtcgcgacctagtgagcaagctgggtcgcaagaccctcaccagggcaagcgagctgatggacatcgccaccaagttcgcctctggccaggaggcagttgaggccatcttccggaaggacaagcagccccagggccgcctaccggaagatgtccccgaggcgtcaactcagggctgcaccaagaagaaggcaagaagaagtcgcaagcggaaagcgacggcgccgacgcggaccttgtcgccgccgccgagtacaagaaccctcggaaacctcccgaaggggcccgtcaagcacacccttgaggagtgcgtcatgcttcggcgccactttcacaaggccgggccacccgcggagggtggcagggctcgcgacgacgataagaaggaagatcacaaggcaggagagttccccgaggtccacgactgctacatgatctacggtgggcgagtggcgaacgccttggctcggcaccgcaagcaagagcgtcgggaggtctgctcggtaaaggtggcggcgccagtctacctagactggtccgacaagcccatcaccttcaaccaagacgaccaccccgaccgcgtgccgagcctggggaaatactcgttcgttgtcgaccccgtcatcggcaacgtcaggctcaccaaggtcctcatggacgaaggcagcagcctcaacatcatctacgccgagaccctcgggctcctacggatcgatctgtcctcggtccgggcaggcgccacgccttttcacaggatcattcccgggaagcgcgtccaacccctcggacaactcgatctacctgtctgctttgggacaccctccaacttccgaagggagaccctcacgttcgaagtggtcgggtttcgaggaacctaccacgcagtgctggggaggccatgctacgccaagttcatggccgtccccaactacacctacctcaagctcaagatgtcgggccccaacggggtcatcaccgtcggccccacgtaccgacacgcgtacgaatgcgacgtggagtgcgtggagtacgccgaggccctcgctgaaagtcgcctagagggggggtga

SEQ ID NO: 112898 - DNA, 259 bp, Zea mays
  Clone ID: MRT4577_34451C.1
ccgcgaatcacagacgcggctatataagcttgctgtactgcactaccctgccctgccataagatcgtacgtgagcccgggcgcgcgagagccttggagaggcatggatgatgctaaggttgtgacgctggctctggtcgtgctgctggaggggaccggggttgatccaacagccgcggtgcgcgcgagcaactctcgatccagcgtgtacagcaggctgatgccgtgcctggcgtacttcacatgggcggagccatgcc

SEQ ID NO: 112899 - DNA, 267 bp, Zea mays
  Clone ID: MRT4577_34452C.1
cgtgatccgtgggcgtgacgcgtgggcgtcggccgccgccgcgctctgctcaccgctcacgcgacgcgccgagccacctacgaccgcggccgtgacccgaccgtcgcgccgacctcgcgtgaggctgagtctgtgaccgtgattccgttctctccatgcaggctgttggctgccaatctgccatccgccgctcggcgcccatccctccaggctccagcgatggcataggttgtcaggcatcaccgcgtcagctactcaggtcaggct

SEQ ID NO: 112900 - DNA, 463 bp, Zea mays
  Clone ID: MRT4577_34453C.1
ccctcctttttttttttttttttttttttttggtgtttttttttattagatgggggaaaaacccccattagaaaacccgaatcaaaaccgcagggctagatccctcaaaaaggaacccaaacatgttaatgaatcaagcctcccaaatatataggggggccatccagaaaagggatggttcaaaaaaattaaaggctaatctctcaagaattccctaataggccccaaaggaaaaattccttttcaagccggaaacacctgagggaatccgacttgagcaaccatcccgattatgaaagggaggacccaaaaacatcaacttttatcacaagccggtgccagccaaggcaaaaaggctctcaacctgggctgggaaaaaagtcataaacagggagggaccaaaaaatacaacccccaaggccccagaaaacttcccctgggtgggacaagggcaggtttcccc

SEQ ID NO: 112901 - DNA, 223 bp, Zea mays
  Clone ID: MRT4577_34454C.1
ggaacaaaattttccttaattgccattaaagggggccacaccttacattgttttttcatttaaaaagaacccacacccacccccgttaccagaaacaggcagagctgccactatttacatttagctcaaccaaaattctctccctgccttttgcgattcttcacggtgctcaacccttaaccccttatggaaaggcctgaaacgggtgaccccggcgggattt

SEQ ID NO: 112902 - DNA, 474 bp, Zea mays
  Clone ID: MRT4577_34455C.1
cattgggtccctcgcggtcggccgggagtcgtgacgtgaacagagcctgtgtgtgtgcccgcgctgacgtgcacgggcggcggccatggcgaggattctgctccagcccaacaaagacgatcacgcaaccgcgttccactcccacaccggggcgccggcgacctccctcctcctcctcctcgttgccgccactgccgtagccgctgtcgtcgtgtctctgtgcaccagcggcaagaacgccaggccatggaagcagcgccggtcgtccctcgcgccagcgccgcagcaggaacacgagcaggagcaggacggcggcggcggcatgagcaggaacaagcagctgctcgccagcctcagcggcatcggcgtcaaggcggcccggcgctcgccgccggcgagcgcctggagcagcggcggcggagacgacgcctacgtggacgccgacggcgacggcaccgtggaagaagaagcgct

SEQ ID NO: 112903 - DNA, 343 bp, Zea mays
  unsure (1)..(343): unsure at all n locations
  Clone ID: MRT4577_34456C.1
ccggccgggcgccgctgcttaccgcccatctgggcgtgcgggagaaccaccagagacccattacatagccagcggccctggggggcgctagtgccgatcacaagccgacgcatccagtgatggagatgaagagtatcncctgccccgtcctcnncgccccctccgccaccgcggcgctgnccgcggtgctcccgcccgggggggggacaccgcgggccccagcgcgcccgactgcgccaccgcggcccacgtggccgccacgctctaaggcaccacccccaccgaagcccgcgcaccagcagccggaccccgtgggaagacaccaaggctggcgcgagagaca

SEQ ID NO: 112904 - DNA, 192 bp, Zea mays
  Clone ID: MRT4577_34457C.1
gttcccgtctaaccctagcgcgcgccgccaccctgccgttgctaccgccccgtacctcgcttgctttcccgtcgccgaaatgacgaagcgcaccaagaaggctggacttgttggcaaatatggaaccaggtctggtgctagcttgcgtaagtcaattcataagatggaggtatcccagtactccaagaactt

SEQ ID NO: 112905 - DNA, 577 bp, Zea mays
  unsure (1)..(577): unsure at all n locations
  Clone ID: MRT4577_34458C.1
tagacgccgcctttttttttttttttagaaatagtcgtaccagattcctgtaanatgtccaagttcagcatatttggagggcaaaatcatgaatgaaacaaagtacaatcctaaaacgaatgacacaggatttttttgttcaaatgctttactcttttgttgcgcggggacctatactaccggaaatacaatcaaggccgggtgatctttgcccatgccttgtgtagttatgttacaaacaatgcccatggaggtccaatgtncaacaaaaaaaaagcctttgttggaatcatcaaacaacatctaccttttgctctataaaaacatccttcatggcatggaatcgctctaactcgttttcgatcgcttccatacgataactgtgccatctgaatcagatgaggccagaaaattctccccgtgattccaggcaactccgattactggagaaccatgtccctgtagtttgttcacacacgaattgtttgggcgtgccaaatcatagaagtaaacatttgcgttctcgcttgcagttactatgaactctcctttctcaagggaaaggagtggacagaac

SEQ ID NO: 112906 - DNA, 471 bp, Zea mays
  unsure (1)..(471): unsure at all n locations
  Clone ID: MRT4577_34459C.1
gcacaacgcgaacgcatgatcgccacagcccgacacccggaagacagggagacgcaccggcgaaccggcgcgggagcgcaccaggaaacagccagcaccgcagaagctgcaggctgaccccgaagagaacacgcccgaacaacgggcgcaagcagggccctacggggccaagganactcagaggaggagggggggacgaaagangaacagcangcccgccgacgggcgcggggagaacaacngaaccgngagggcagcccgacggggaccaaagaagaaccggcgcnccggggggcacagcggaaagaggagcnagacgacacgaggcccaagccnggcacaggccggcgncngacaacggcgngaccgggaaaacccngacgagacccaacccaagcgccgggcaacacacccccgccncgacagcgggcggaacagcgaagaggcccgcaccggacggcccccccaaca

SEQ ID NO: 112907 - DNA, 419 bp, Zea mays
  Clone ID: MRT4577_3445C.1
gcgttcttacttctacgttatcaattgcatgaaataaccggctatagcatgtcctggggctcaacgcgaaacttttctgcagtccccagacaatgggtcctgtacaaaccgtgcagtgtacaggaccggtcttctatactgaaaacatcatactggcaggttatactatgcggaccgtcccacacacttttcatatagcctgtgcacagagagaaaatcaagcatcgtacccatctataaaaaaagtgatctaaataactggaaaccatactgctcggatgttcgtttccacactgcaatccacggactgatgcctgtgaggcttacgagatcgacctattgtgctttacacaagagccgggcggattgccggtcgatgatacgatcaagctgaaataggtatgcttttacaagtcgac

SEQ ID NO: 112908 - DNA, 268 bp, Zea mays
  Clone ID: MRT4577_34460C.1
agcgatcgctggagcctgggcactgctcatcgccctcgcggctgccgccacggggctggtcgttcggtccgccaaagcaagcggtatacaccgcgcggccggggctatcatcatgaagacgtacggctctgaccgtgtcactaggacggagacgaagcacgccctcatgatcaaggtgtacgacgcggcgacgacgcttgagatgcacagtaacgcgttcaagaagcgcgggaaatcccttcgaaggctaggcctgggggtggttaag

SEQ ID NO: 112909 - DNA, 253 bp, Zea mays
  Clone ID: MRT4577_34461C.1
tttgggttgaaccacccctccggattagaacgccaataacgctatctagcccttgttctgacttttaaacatgagaggcgatagttagcttaactgggccttgtcaacctgaccatatgccgtgcaaattcattgtgtgtatgagtactgtacaaatgtaaagggaaatatgcaattgttctatgcaagacacatgccaataatgttatagcatcaaaaaggtgaatatgttagcggtcaaacttcaaaataa

SEQ ID NO: 112910 - DNA, 208 bp, Zea mays
  Clone ID: MRT4577_34462C.1
ggtgtgttaaaaataagttacagtgcatttagaacaaggtgaattttatctaacagaactaggggcttatttgatcgcgctactgggacgttatatgataacagtcgatgggctgaaacagaggcgccacggattcgggaaaatcctttgtcagttaggttccaacacaagcaaaaggtgccataaagggtagactacgggccaagaa

SEQ ID NO: 112911 - DNA, 270 bp, Zea mays
  Clone ID: MRT4577_34463C.1
tcatccttccaccaaaaagccaaaagattataatgattcgattttagcccttcttaaaatgtaacctgttctagaacctctttcacactcatatcacttccttgtactacttaaaaaataaccacatactcatatccaatttttcataatcaactacttaacatgctaattaaccatattatgaaatactaacttttaatcattcatcttattaaatactataccatatccataattatattcaacataagacacattcaaatacctcta

SEQ ID NO: 112912 - DNA, 748 bp, Zea mays
  Clone ID: MRT4577_34464C.1
cgggagatatcgcaccaagcccacgtggtagcagacgcgtttctacgtcgggccggcccaccacctgtgtcctttcccctcccgcaagcgaaagccccccattgtaaaatccccccgcacgcctccgcagccgacgatgaccaccgccgcggacgccgccgtcgacgactaccaccactccgacggattcgtcatgcccgacgtcctcgccaagggccgggaggcctgctacaaggcacgggatgccttctacgcgtgcatagagaagcacgcggacaaaaagcccaccgagatcgccaccatgggtctcctctaccccgccgactgcaaaaagtcccgcgccgacttcgtcagcaactgccgccccacctgggtcaagcacttcgaccggcagtactgcgccaagaagcgggtgcagaggttgctcgacggcgatggggaccgccggggccccatgtcgctgccccagccctacaccttcaagcaataggtagtcttcctgtggttcagatcttggtattgagttcaattggatcagtgctacgttggtgtctagatgctatagtattggtttcaggctttgtgtcatttagctggatgcatatgtgatgtgtaccagtacattgctctgaatgctaatggatgagcgaatctgtatgtggatttatcaatatcaggatatccctcattggcaaaaaaaaaaaaaaaaaaaaaaaaaaaaaaaaaaaaaaaaaaaaaaaaagcggcc

SEQ ID NO: 112913 - DNA, 933 bp, Zea mays
  unsure (1)..(933): unsure at all n locations
  Clone ID: MRT4577_34465C.1
cggccgggcccgggagaaatcgcaccaagcccacgtggtagcagacgcgtttctacgtcgggccggcccaccacctgtgtcctttcccctcccgcaagcgaaagccccccaaacaaatccccccgcacgcctccgcagggcctgatgaccaccgccgcggacgccgccgtcgacgactaccaccactccgacggattcgtcatgcccgacgtcctcgccaagggccgggaggcctgctacaaggcacgggatgccttctacgcgtgcatagagaagcacgcggacaaaaagcccaccgagatcgccaccatgggtctcctctaccccgccgactgcaaaaagtcccgcgccgacttcgtcagcaactgccgccccacctgggtcaagcacttcgacaggcagtactgcgccaagaagagggtgcagaggctgctcgacggcgatggggaccgccggggccccatgtcgctgccccagccctacaccttcaagcaatagagtgaacggaacggagcgtgactatgcgagcgggattggaacggagcggctccgtccggttgattttttggagcggaatggttccggatccgaggagaatattccctaattggagccattccgttctagtttctttgtaaccaaacaacaacaaaactgggatagaacgactccgttctacttggatcttcaaccaaacactacctaaagtcctttgaactgatttttgcacatagtgacttgccttttaggtcactgcatttattgggcctcgttaagttgtccagttaagcatacatggactgttatagattgagtattccgttgagggttctatgtattttcattcataatcaataacactgcgtggtgatttattcaacaacaatgacaaagacttttagtctcaaaaaaaaaaaaaaaggcccctnaggc

SEQ ID NO: 112914 - DNA, 2670 bp, Zea mays
  Clone ID: MRT4577_34466C.1
atgactttatcgccgctcgtcgaccaagaggtaccgaccgattcccatcccacgtcatttggattcagcctcaacccgcctagcgaccgtgctttggcgggcgctctcgtagaggcaagtccaaaccctctggggtttcgcatgcggtcgccttgggaccggctgacggacatctcgacctacgggccctctgggtccgaggaagacgacgagcccaacatctgttgggatttctccggacttggcaaccctagtgccatgcgggacttcatgaccgcatgtgactactgcctctccgactgttccgacggtagccgcagcctcggcgacgagggctgcggcccaagccgcgaatgtttccacgtcgatctagggggtccctccgaaggcaatcatctcggcatgccggaggacgatgacctccctaggccggcgccccgcgttgacatcccacgggagctagctgtggtccccgttaaggcggggggccatgacccacagcccgagcaaatccgcgggggcttccagcaccgcgtcgccaacgacgtcagggacaggccgccacccgcatctagtggggtcggccagaacctggctgcagcaacgatgcttctccgcgcgatgccggagccatcaaccaccgagggccggcgaatccagggggaactcaagaatctcctggaaggcgccgcggtccgacgggccgagagctctacctcccgaaggcggggatacccctcggaacctcatgccgcgacttcccgattcatgcgggaagcctcggtctacaccggacgcacgcgcaacaccgcgcctacggccccgggccgcctcggcaacgagcaccatcaccgcgaccgtcgggcccacctcgacgagagggtgcgccgaggctaccaccccagacgtgggggacgctacgacagcggggaggatcggagtccctcgcccgaaccgcccggtccgcaggccttcagccgggccatccgacgggcaccgttcccgacccggttccgacccccgactactatcacaaagtactcgggggagacgagaccggaactatggctcgcggactaccgtctggcctgccaactgggtggaacggacgatgacaacctcatcatccgcaacctccccctgttcctctccgacaccgctcacgcctggttggagcacctgcctctggggcagatctccaactgggacgacctagttcaagccttcgccggcaatttccagggcacgtacgtgcgccccgagaattcctgggatctccgaagctgctggcaggagccgagagagtccctccgggactacatccggcgattctcgaagcagcgcaccgagctgcccaacatcaccgactcggatgtcattggcgcgttcctcgccggcaccacctgccgcgacctggtgagcaagttgggtcgcaagacccccaccagggcgagcgagctgatggacatcgccaccaagttcgcctccggccaggcggcggttgaggccaccttccgaaaggacaagcagccccagggccgcccgtcggaagatgctcccgaggtgtcaactcagcgcggcgccaagaagaaaggcaagaagatgtcgcaagcgaaacgcgacgccgccgacgcggaccttgtcgccgccgccgagtacaagaaccctcagaaaccccccggaggtgccaacctcttcgacaagatgctcaaggggtcgtgcccctatcaccaggggcccgtcaagcacacccttgaggagtgcgtcatgcttcggcgccacttccacagggccgggccacccgcggagggtggcagggcccgcgacgacgacaagaaggaagatcaccaagcaggagagttccccgaggtccgcgactgcttcatgatctacggtgggcaagcggcgaatgcctcggctcggcaccacaagcaagagcgtcgggaggtctgcgcggtgaaggtggcggcgccagtctacctagactggtccgacaagcccatcaccttcgaccaagccgaccaccccgaccatgtgccgagcctggggaaatacccgctcgtcgtcgaccccgtcatcggcgacgtcaggctcaccaaggtcctcatggacggaggcagcagcctcaacatcatctacgccgagaccctcgagctcctgcgtgtcgatctgtcctccgtccgagcaggcgctgcgcccttccatgggatcattcctgggaagcgcgtccagcccctcggacaactcgacctccccgtctgcttcggaacgccctccaacttccgaagggaaaccctgacgttcgaggtggtcgggttccgaggaacctaccacgcggtactgggaaggccatgctacgcgaagttcatggtcgtccccaactacacctacctgaagctcaagatgtcgggccccaacggggtcatcaccgtcggccccacgtacaagcacacgttcgaatgcgacgtggagtgcgtggagtacgccgaggccctcgccgagtccgaggccctcatcgccgacctggaaagcctctccaaggaggtgccagacgtgaaacgtcatgccggcaacttcgagctagtggagacggttaaggccgtccccctcgaccccagcggcgacgcctccaagcagatccggatcggctccgggctcgatcccaaatag

SEQ ID NO: 112915 - DNA, 3144 bp, Zea mays
  Clone ID: MRT4577_34467C.1
atgggcagtctccagcaacctctccggcccgggacggtgcttcgtttcgggactcttgagttcatgtccttcgacggcagctacgacatgacacttcttccaccgccgcgcgactacgacaatggcggccgacaacccgcccgccggcggcggaatcgacgacgtctaccccgcgtggtggaagagcaacattcgggctcgctccgttctctcccccgccaacggaggaggaggcggggccgtcaaggccagacgggaggccacgcttcgccggccgtcgagcgaatcgacgcccccgacgccccgacggaaggcacgccggacgtcgacctcgcgttcgagacggaggcaagcgccgtccccccgcggcacgctgaccccgagcaagaagacgacgccggcgcgctcgcggaaagcctgcaggacgtcgccctcgaaccagagatgacggcgcaaccagtccccgatgtgactacgtcgctccacgtcgaccaaaaggtaacgactaactcccatcttgcgtcatttcgactcggcctcaacccgccaaacgacctcgttttggcgggcgctctcattgaggcgagtgcaaccccactgaggttctgtatgcggtcgccttgggaccgactgacggacgtctcgacctacgggccctccgggtccgaggaagatgacgatcccagcatcggttgggatttctccggacatggcaaccccagtgccatgcgggacttcatgaccgcatgtgactactgtctatccgaccgttccgacggaagccgcagcctcggtgacgagagctgcggcccaagccgtgaatgtttccacatcgagctaggggatcccaccgaaggcaaccatcttggcatgccggaggatggtgatctccctaggccggtgcctcgcgccgacatcccacgggagctagctgtggtccccgctccggcggggggttacgacccacaactcgagcaagtccgcgaggcgcaggccaggctcaacgagggaacaggggcgcttgagccgatccgtcgggacgccggacaggcatgggtgggccaacccctggccggagaaatacgtcatctgccccaaggtctccagcaccgcgtcgccaacgacgtcaggatcaggccgccgcccgcatccagcggggtcggtcagaacctggcgaccgcagcgatgctcatccgcgcgatgccggagccgtcaaccaccgaggggcggcgaatccagggagaactcaagaatctcctggaaggcgctgcggcccggcgggccgagagcactgcatcccggaggcaaggatatccctcggaacctcatgccgcgacttcccgattcatgcgggaggcctcggtctacaccgggcgcacgcgcaacaccgcgcctgcggccccgggccacctcggcaacgagcaccatcgacgcgaccgtcgggctcacctcgacgaaagggtgcgccgaggctaccaccccaggcgtggggggcgctacgacagcggggaggatcggagtccttcgcccgaaccacccggtccgcaggccttcagtcgggccatccgacgggcgccattcccgacccggttccgacccccgactactatcacaaagtactcgggggaaacgagaccggaactgtggctcgcggactaccgccttgcctgccaactgggcggaacggacgacgacaacctcgtcatccgcaacctccccctgttcctctccgacactgctcgcgcctggttggagcgcctgcctccggggcagatttccaactgggacgacttggtccaagccttcgctggcaatttccagggcacatacgtgcgccccgggaactcctgggaccttcgaagctgccggcaacagccgggggagtcgctccgggactacatccggcgattctcgaagcagcgcaccgagctgcccaacatcaccgactcggatgtcatcggcgcgttcctcgccggcaccacttgccgcgacctggtgagcaagctgggtcgcaaaacccccaccagggcgagcgagctgatggacatcgccaccaagttcgcctccggccaggaggcggtcgaggctatcttccgaaaggacaagcagccccagggccgcccgtcggaagaagctcccgaggcgtctgctccgcgcggcgccaagaagaaaggcaagaagaagtcgcaatcgaaacgcgacgccgcagacgcggaccttgtcgccgccgccgagtataagaaccctcggaagcccccctggagggccgggccacccgccgagggtggcagggcccacgacgacgacaagaacgaagaacacccagcaggggggttccccgaggtccgcgactgcttcatgatctatggaaggcatgcggcgaataccttggctcggcaccgcaagcaagagcgccgggaggtctgctcggcgaaggtggtggcgccagtctacctagactggtccgacaagcccatcactttcgaccgggccgaccaccccgaccatgtgccgagcccggggaaatacccgctcgtcgtcgaccccgttgtcggcgatgtcaggctcaccaaggtcctgatggacgggggcagctgcctcaacatcatctacgccgagaccctcaagcttctgcgcgtcgatccgtcctccgtccgagcaggcgctgcgcccttccacgggatcatccctgggaagcgcgtccagcccctcgggcgactcgacctcccagtctgcttcgggacaccctccaacttccgaagggagaccctgacgttcgaagtggtcgggttccgaggaacctaccacgccgtgctagggaggccatgctacgcgaagttcatggccgtccccaactacacctacctgaagctcaagatgccgggccccaacggggtcatcaccgtcggccccacgtacaaacacgcgttcgaatgcgacgtggagtgcgtggagtacgccgaggccctcgccgagtccgaggccctcatcgccgacctggagaacctctccaaggaggtcccagacgtgaagcgccatgccggcaacttcgagccagcggagacggtcaaggccgtccccctcgaccccagcggcgacaccaccaagcagatccggatcggttccgggctcgaccccaaatag

SEQ ID NO: 112916 - DNA, 351 bp, Zea mays
  Clone ID: MRT4577_34468C.1
caacatgcgagcccctcttcatgacaattggggggtactaccagggtactctgccagcgcggctgtgctccttacccttcggatcccgctgcgaggaaggcaactacacctaggatccgttcctaggggcacgccacatactgcttgcccacgcgcttgcagtgtccctgtacagagacagttaccatgctgaccaaggatgacggatcggactcacctttcttgtgtggtgatactagcctgggtcgcaaacttgcgaatatgtcgagggattcgctctgatgaacaactcacagatcggatggatcacgcattctactatgttccctgactacccttcacttgattaag

SEQ ID NO: 112917 - DNA, 2148 bp, Zea mays
  Clone ID: MRT4577_34469C.1
atgggatgccttgcggctctgagccgcttcatctcgcgcctcggcgaaagaggcctgcctctgtaccgcctcttaaggaaggccgagtgcttcacttggacccccgaggccgaggaagccctcgggaacctgaaggcgctccttacaaacgcgcccatcctggtgccccccgctgccggagaagccctcttgatctacgtcgccgcgaccactcaggtggttagcgccacgattgtggttgagagacgagaagaggggcatgcattgcccgtccagaggccagtctacttcatcagcgaggtactgtctgagaccaagatccgctacccccaaattcagaagctgctgtacacggtgatcctaacacggcggaagttgcgacactacttcgagtctcatccggtaactgtggtgtcatccttcccccagggggagatcatccagtgccgagaggcctcgggtagaattgcaaagtgggtggtggaaatcatgggcgaaactatctcgttcgcccctcggaaggccatcaagtcccaggtcttggtggacttcgtggctgaatgggtcgacacccagctcccaacagctctgatccaaccggaactctggaccatgttcttcgatgggtcgctgatgaagacaggagcaggcgcaggcctgctcttcatctcgcccctcggaaagcacctacgctacgtgctacgcctccatttcccggcgtccaacaatgtggctgagtatgaggctctggtcaacggtttgcgcatcgccatcgagctaggggtccgacgcctcgacgctcgcggtgactcgcagctcgtcatcgaccaagtcatgaagaactcccactgtcgcgacccgaagatggaagcctactgcgatgaggttcggcgcctggaagacaagttctacgagctcgagctcaagcacatcgcccgacgctacaacgagactgcggacgagctggctaaaatagcctcggggcgaacaacgcccgaggcaccctcggttcggcccgaggtaccctcggcccccgagggtgaggcactgcgcatcgaggaggggcggagcggggtcacgcctaatcgaaactggcagaccccgtacctgcaatatctccaccgaggagagctacccctcgaccgagccgaagctcggcggttggcgcggcgcgccaagtcgttcgtcttgctgggagatgggaaggagctctaccaccgcagcccctcaggcatcctccagcgatgcatccccatcgccgaaggtcaggagctcctacaagagatacactcgggggcttgcggccatcacgcaacacctcgagcccttgttggaaacgccttccggcaaggtttctactggccgacggcggtggccgacgccactagaattgtccgcacctgcgaagggtgtcagttctacgcaaggcagacccacctgcccgctcaggccctgcagacgatacccatcacctggccttttgctgtgtggggtctagacctcgtcggccccttgcagaaggcactcgggggctacacgcacctgttggtctccatcgacaaattctccaagaggatcgaggtccgacccctaaatagcatcaggtccgaacagacggtggcgttcttcaccaacatcatccatcgctttggggtcccgaactccatcatcaccgacaacggcacccagttcactggcagaaagttcctggacttctgcgaggatcaccacatccgggtggactgggccgccgtggctcaccccatgacgaatgggcaagtagagcgtgccaacgacatgattctacaaggactcaagcctcggatctacaacgacctcaacaagttcggcaagcgatggatgaaggaactcccctcggtggtctggagtctgaggacaacgccgagccgagccacgggcttcacgctgttctttctagtctatggggctgaggccatcttgcccacagacttagaatacggttccccgaggatgagggcctacgtcgaccaaagcaatcaagttaatcgagaagactcactagaccagctggaggaggctcgggacatggccttactacactcggcgcggtaccagcagtccctgcgacactaccacgcccgaggggttcggtcccgagacctctag

SEQ ID NO: 112918 - DNA, 710 bp, Zea mays
  Clone ID: MRT4577_3446C.1
ccggccgggatcgaacggccgccgccacctagatcagttgggaggtttaagtggctagctggtgatccatttccttcaagtggtttgtccattgccatggtgcaaccaatcactgaagagcagaaagggcattcagtattaagcttaattggaggccgataactgctagtttatcagtccttagtttttggtgaagggttgctcgtcacacaatggtgttatattccttgggggaatgctctaacaaactatggctactcatgccaagatgttatgcagagtctggttttataaggaagacaagtgaggagagaatttcgaatcgttagaacaaacactcaagcctggaccaatcctggcagcaactgaaaagagggaaacggaaagtgggtagacgaatccgatgggctgtgcatctgtatggagtcctctgagtttggctactatctgttctacataaggcgcagaaagttggggcttaaaaatgacggcgagcgcgcacgcgatcccgcgggaagggaataaggaaaagcgatgttgacaaagctggatgggaatcctgcgcttttttggaggcgaagatgagaaggaatatatcgcctgtgtcgacctcgccggcctgcttcttctgttccgtggcttggttgtgctcccgctggatcgtgccagccgccagcaggatgatgagcacgtgtgacccctggcgtggg

SEQ ID NO: 112919 - DNA, 818 bp, Zea mays
  unsure (1)..(818): unsure at all n locations
  Clone ID: MRT4577_34470C.1
gccggccgggctgggacagagcttcgctcacctgccttgctagggtttaagccaccacccgccgccgccacctattccagctctcgcgcttcgccttgtggcgacgatgcatccggtctcgttgtcgttgcgagctcctcgcgtctgtcgtcaggcgttgttgttccggcctcgtgtgccatggttgctttcctgaatgcctgcgattcggcctgagttttgttttatacattcattcattcgtattcgtcacacagggatatggtagttgtgaagagcactgctttcttctgacacctcttgtatgagcagggatttcgttccctccgttgagcagatccagcaactctctgagctcctccctagcggtctgtttcctgagtttcatctttgtagttccagcgtaatttttttctactttcaagtaattttactttgctgcatctgcgaactcgtgagatgatagttcacctacgtagcccccgtgaagatctcaagacctaccgataggaagtgccgtttgacactgtaaacagcagctgctgcacacagctgcaggtgttccatctctcgaccataacctnttgtggtttggtcaggctggatctcccatctgcatctgctctgtgtttcagctgtggtgtgtgatttagatcgggtctctgagggactctgcaggactgtcactatgtcttgatttgctngtgttacaccgtgctgnntctcatttacgttttaatagtttgggcctgatgccacgtctctggtagctacatgctttgaccagagatgctatgatcaggccgatacaaagtcgt

SEQ ID NO: 112920 - DNA, 278 bp, Zea mays
  Clone ID: MRT4577_34471C.1
atgcgcgatagccttaacaatggaaacgacgagatgtacttagattcaacggcatgcatgaacactgtttgttcacgcaccctctctatttatgtggttcatacgccaagtcacgcttggcacacagccacatacgtatatgcatgtagagactagatgtgcttagcactggtgcactgtaacggattgaattcaaaggctacacgagctgcaaataggatgaggacctaggatttgatgatctctgactttttgaagagcccacataattgttcata

SEQ ID NO: 112921 - DNA, 354 bp, Zea mays
  unsure (1)..(354): unsure at all n locations
  Clone ID: MRT4577_34472C.1
aactcccgggcagcaacggtcgctccaggctccgtcccgagcgcgccgtaggcctggtcgtaggtctggcctcggccctgtggtcgccggttcctctggcaacggctggtcctgcgacagggtggcgggctntttgcccctcttgctcggcgcgaccatcgcggtcgtcgtgctgggtatcctcactggtgccgttatgctcggcgtcgtcctctgtggcgttctctctggcttcgtctgcagctttntggccctctgttgctgctgtccccgggacggcctctcgcgctgcccgggctgtcgctttgttggcgtgcttctgtngttgtgcttccttcttgttcttgctcgggc

SEQ ID NO: 112922 - DNA, 281 bp, Zea mays
  Clone ID: MRT4577_34473C.1
gtcttttttttttttttttttttttttttttttttgtcaatttttttttttttttttattatcgtttttttttttaatactaccaaggggggccaaacagtgaaccgattcttgttttttagacacccatttatgcccccgctaggataaacctaaaactggccgggcccaccgggttttttgaggaaattgtccgttttatcaccacttcatggagggaaggttttcttcacacaataaagtaaccaattgattgggcccctgtgtagacaaacactgaa

SEQ ID NO: 112923 - DNA, 3099 bp, Zea mays
  Clone ID: MRT4577_34474C.1
atgggcagtctccagcaacctctacggcccgggacggtgctccgtttcgagagtcttgaattcatgtccttcgacggcagctacgacatgatactccttccaccgccgcgcgacaacgacaatggcggccgacaacccgcccgccggcggcggaatcgacggcatcttccccgcgtggtggaagaacaacattcgagctcgctccgtcctctcccccgccaacggaggaggaggtggggcaaccaaggccgagcgggaggccgcgcttcgtcggccgtcgagcgaatcgacgcccccgacgccccaacggaaggcacgccgggcgtcgacctcgcgttcgagacgaaggcaggcgccgtccccccgcgacacgctgatcccgagcaagaagacgacgccagcgcgctcgcggagagcttgcaggacgtcgccctcgtacctgagacgacggtgcaaccagtccccgatgtgactacgtcgcccctcgtcgaccaaaaggtactgactaactcccatcttacgtcatttcgactcggcctcaacccgcctggcaaccttgctttggcgggcgctctcattgaggcgagtgcaaccccactggggttttgtatgcggtcgccttgggaccgattgacggacgtctcgacctacgggccctctgggttcgaggaagatgacgatcccagcatctgttgggatttctccggatttggcaaccccagtgccatgcgggacttcatgaccgcatgtgactactgcctctccgactgttccgacagtagccgcagccttgacgacgaggactgcggcccaagccgcgaatgtttccacgtcgagctaggggatccctccgaaggcaaccatcttggcatgccggaggacggtgatcttcctaggccggtgcctcgcgccgacatcccgcgggagctagctgtggtccccgttccggcggggggtcacgacccacagctcgagcaagtccgcggggcgcaggccaggctcgacgagggagcaggagcgcttgagccgatccgtcgggacgtcgggcagggtcaggccgtcgccgcatccagcggggtcggtcagaacctgacagccgcggcgatgctcctccgcgtgatgccggagtcgtcaaccaccgagggtcggcgaatccagggagagctcaagaatctcctggaaggcgctgcggcccgacgggtcgagagcactgcctcccgaaggcagggatacccctcggaacctcatgccgcgacttcccgattcatgcgggaagcctcggtctacaccgggcgcacgcgcaacaccgcgcctgcggccccgggccacctcggcaacgagcaccatcgtcgcgaccgtcgggctcacctcgacgatagggtgcatcgaggctaccaccccaggcgtgggggacgctatgacagcggggaggatcggagtccctcgcccgaaccacacggtccgcaggccttcagtcgggccatccgacgggcgccattcccgacccggttccgacccccgactactatcacgaagtactcgggggaaacgagaccggaactgtggctcgcggactaccgcctggcctgccaactgggtggaacggacgacgacaacctcatcatccgtaacctccccctgttcctctccgacaccactcgcgcctggttggagcacctgcctccgtggcagatctccaactgggacgatttggtccaagccttcgccggcaatttccagggcacgtacgtgcgccccgcgaattcctgggacctccgaagctgccggcaacagccgagagagtctctccgggactacatccggcgattctcaaagcagcgcaccgagctgcccaacatcaccgactcggatgtcatcgacgcgttccttgccggcaccacctgtcgtgacctggtgagcaagttgggtcgcaagacccccaccagggcgagcgagctgatggacatcgccaccaagttcgcctctggccaggaggcggtcgaggctattttccgaaaggacaagcagccccagggccgcccatcggaagaggctcccgaggcgtctactccgcgcggcgccaagaagaaaggcaagaagaagtcggaatcgaaacgcgacaccgccgacgcggaccttgtcgtcgccgccgagtacaagaaccctcggaagccccccggaggtgctaacctcttcgacaagatgctcaaggagccgtgcccctaccatcaggggcccgtcaagcacaccctcgaggagtgcgtcatgcttcggcgccacttccacagggccgggccacccgcagagggtggcagggcccgcgacgacaacaaaaacgaagatcaccaagcaggagagttccccgaggtccgcgactgcttcatgatctacggtgggcatacggcgaatgcctcggctcggcatcgcaagcaagagcgccgggaggccgaccaccccgaccacgtgccgagcccggggaaattcccgctcgtcgtcgaccccatcatcggcgacgtcaggctcaccaaggtcctgatggatgggggcagctgcctcaacatcatctacgccgagaccctcaggctcctgcgcgtcgatctgtcctccgtccgggcaggcgctgcgcccttccacgggatcattcccgggaagcgcgtccagcccctcggacgactcgaccttcccgtctgcttcggaacgcccaccaacttccgaagggagaccttgacgttcgaggtggtcgagttccgaggaacctaccacgcggtactggggaggccatgctacgcgaagttcatggccgtccccaactacacctacctgaagctcaagatgccgggccccaacggggtcatcaccgtcggccccacgtacaaacacgcgttcgaatgcgacgtggagtgcgtggagtacgccgaggccctcgccgagtccgaggccctcatcgccgacatagaggacctctccaaagaggtgccagatgtgaagcgtcatgccggcaacttcgagccagcggagacggttaaagccgtccctctcagccccggtggcgatgactccaagcaaatccggatcggttccgggctcgacctcaaatag

SEQ ID NO: 112924 - DNA, 743 bp, Zea mays
  Clone ID: MRT4577_34475C.1
ggggtaccctcgggtttgccgggacagagcttcgctcacctgccttgctagggtttaagccaccacccgccgccgccacctcttctagcgctcgcgcttcgccttgtggcgacgatgcatccggtctcgttgcgagctcctcgcgtccgtcgtcatggtttcctgaatgcctgcgattcgttctgtgttttgttttgttcattcattcatattgatcatacagggatatggtagctgtgacgagcaccgctttcttctgacacctcttgtatgagcagggatttcgatccctccgttgagcagatccagcaactctctgagctcctccctagcggtctctttcctgagtatatgcaagcatccaatctcgagctcgagatatcttttcatatacactctttacgtgtttttggatggtaatgctgcatgttgagtttcttctctgtagttccagcgtaattttttctactttcaagtaattttactttgctgcatctgcgaactcgtgagatagttcagctacgtagcccccgtgaagatctcaagacctaccgataggaagtgccgtttgacactgtaaacagcagctgctgcactcagctgcaggtgttccatctctcgacataacctttgtggtttggtcaggctggatctcccatctgcatctgctctgtgttccagctgtgggtgtgtgattaagatacgggtctttgagggactcttcagaaccgtcgtgctgttct

SEQ ID NO: 112925 - DNA, 3171 bp, Zea mays
  Clone ID: MRT4577_34476C.1
atgggcagtctccagcaacctctccggcctgggacggtgctccgtttcgggagccttgagttcatgtccctcgacagcagctacgacatgatactccttccaccgccatgcgacagcgacaatggcggccgacggcccgcccgccggcggcggaatcgacgacgtcttccccgcgtggcggaagaacaacattcgagctcaccccgtcctctcccccgccgacggaggaggaggtggggcaaccaaggccaagcaggaggcagcgcctcgtcggctgtcgagcgagtcgacggtgccagcaccccaacggggggtgcgccgggcgtcgacctcgcgtttgagacgaagacgagcgccgtctccccacgacacgccaatctcgagcaaacggacgacgccagcacgctcgcaaaaggcttgctggacgtcacccttgtacctgagacgacggtgcagtcagtccccgacgtgacttcatcaccgcccgtcgaccaagaggtaccgaccgattcccatctcatgccccttggattcagcctcgacccgcaaagcggcttcactttggcggatgctctcgtagaggcgagtccaaaccctctagggtttcgtatgcggtcaccttgggaccgactgacggacgtctcaacctacgggccctctgggtccgaggaagacgacgtgcccgacttctgttgggatttctctggacttggcaaccccagtgccatgcgggacttcatgaccgcatgcgactactgcctttccgactgttccgacagtagccgcagcctcggcaacgaggactgcggcccaagccgcgaatgtttccacgtcgatctagggggtccctccgaaggcaaccatctcggcatgccagaggacggtgatctccctaggccggtgcctcgcgttgatatcccacgggagctagctgtggtccccgttcaggcggggggccatgacccacagctcgagcaaatctgcggggtgcaggccaggctcgacgagggagcaggagcgcttgagccgatccgccaggacgtcgggcaggaatgggcgggccaacctccgaccggagaaatgcgtcatctaccccagggcttccagcaccgcatcgccgacgatgtcaggatgaggccgccacccacttccagtggggttggccagaacctggctgcagcagcaatgctcctccgtgcgatgccagagccatcaaccaccgaggggcggcaaatccagggagagctcaagaatctcctagaaggcaccgcggtccgacgggccgagagctccgcctcccaaaggcaggggtacccctcggaacatcatgccgcgacttcccgattcatgcgggaagcctcggtccacaccgggcgcacgcgcaacacagcgcctgtggccctgggacgcctcggcaacgagcaccatcaccgtgaccgtcgggctcacctcgacgagagggtgcgccgaggctaccaccccaggcgtgggggacgctacgacagcggggaggatcggagtccctcgcccgaaccacccggtccgcaggccttcagccgggccatacgatgggcgccgttcccgacccagttccgacccccagctactatcacaaagtactcgggggagacgagaccggagctgtggctcgcggactaccggctggcctgccaactgggtggaacggacgatgacaacctcatcatccgcagcctccccctgttcctctccgacaccgctcgcgcctggttggagcacctgcctccggggcagatctccaactgggatgacctgcagccgggagagtctctcagggactacatccggcgattctcgaagcagcgcaccgagctgcccaacatcaccgattcggatgtcatcggcgcgttcctcgccggcaccacctgccgcgacctggtgagcaagctgggtcgcaagacccccaccagggcgagcgagctgatggacatcgccaccaagttcgcctctggccaggaggcagtcgaggctatcttccggaaggacaagcagccccagggccgcccaccggaagatgcccccgaggcgtcaactcagcgcggcgccaagaagaagggcaagaagaagtcgcaagcgaaacgcgacgccgccgacgcggaccttgtcgccgccgccgagtacaagaaccctcggaaaccccccggaggtgccaacctcttcgacaagatgctcaaggagtcgtgcccctatcaccagggacccgtcaagcacacccttgaggagtgcgccatgctttggcgtcacttccacagggccgggccacccgcggagggtggcagggcttgcgacgacgacaagaaggaagatcaccaggcaggagagttccccgaggtccgcgactgcttcatgatctacggtgggcaagcggcgaacgcctcggctcggcaccgcaagcaagagcgtcgggaggtctgttcggtgaaggtggcggtgccagtctacctagactggtccgacaagcccatcaccttcgaccaagctgaccaccccgaccacgtgccgagtccgggaaaatacccgctcgttgtcgaccccgtcatcggcgacgtcaggctcaccaaggtcctcatggacggaggcagcagcctcaacatcatctacgccgagaccctcaggctcctgcgtgtcgatctgtcctcggtccgggcaggcgctgcgcctttccatgggatcatacccgggaagcgcgtccagcccctcggacaactcgacctccccgtctgcttcggaacgccctccaacttccgaagggagaccctgacgttcgaggtggtcgggttccgaggaacctaccacacggtactgggaagaccatgctacgcgaagttcatggtcgtccccaactacacctacctcaagctcaagatgtcgggccccaacggggtcatcactgtcggccccacgtacaaacacgcgttcgaatgcgacgtggagtgcgtggagtacgccgaggccctcgccgagtctgaggccctcatcgccgacctggagagcctctctaaggaggtgccagacgtgaagcgtcatgccggcaacttcgagccagtggagacggttaagtacgtccccctcgaccccagcagcgacgcctccaagcaagtccagatcggctccgagctcgatcccaaatag

SEQ ID NO: 112926 - DNA, 547 bp, Zea mays
  Clone ID: MRT4577_34477C.1
tttaatacaaaagagaaaactttttttttttggttgggttaaattggccccttcacacaaaaaatgttttcattttgttttaagacctttttgaaaattcaaattttttttccagtgttaaaattatttgggttccttttgttgggaggattttttttttcacggcggggggcccaaaacctttttttttaaagggggacatttttgtggtttttttacaccggtccaaaggttcttgttattttttgattcctggaaaattctttttttcaaagggttattattattccttttgggataaagggttttttttaattttttttcccctttttttttttttattgggctttcctttttaatttttttttttatttgattttctttcacccatttttttttttttaatttttttttttttttccccctttttttagttttttttttttttttatttttgtttttttttttctccttttatttttctttttgttttttgttttttgtattttcttttttttcgttgtttttttttttcttgttttttttt

SEQ ID NO: 112927 - DNA, 3250 bp, Zea mays
  Clone ID: MRT4577_34478C.1
atgggtagtctccagcaacctttccagcccgggacggtgctccgtttcgggagtcttgagttcatgtccctcgacggcagctatgacatgatactccttcccccgccgcgcgacagcgacaatggcggccgacaacccgcccgccggcggcggaatcgacgacgtcttccccgcgtggcggaagaacaacattcgggtttgtcctgtcgcctcccccgccgacggaggaagaggcggggcaaccaaggccaagcaggaggcggcacctcgttggctgtcgagcgagtcgacagcgccggcgccccaatgggggacacgtcgggcgtcgacctcgcgtctgagacgaagatgagtgccgtttccccgcaacacgccaactccaagcagacggacgacgccagcacgctcgcaaaggacttgctgggcgtcaccctcgtatctgagactacggtgcagtctggccctgacgcgacttcgtcaccgcccgtcgaccaagaggtaccgaccgattcccatctcgtgccttttggattcagtctcgacccaccaagcgacttcgcttcggtggaagccctcatagaggcatgtccaaaccctccggggtacggtatgcggtcaccctgggaccggctgacggccgtctcgacctacggaccctcgggttccgaggaagatgacgagcccaacttttgttgggatttctccggactcgataaccccagtgccatgcgggacttcatgaccgcatgcgactactgccttttcgattgttccgacggtagccgcagcttcggcgacgaggactgcggcccaagtcgtgaatgtttccacgtcgatctagggggtcccggcgaaggcaaccatcttggtataccggaaaacggtgatcctcctaggcctgcacctcgcgttgatatccttcgggagctagctgtggtcccagtccctgcggggggtcaggacgcacagctcgagcaaatccgcgagatgcaggccaggctcgacgagggagcaggaacacttgagcctttccagcggaacatcgggcgggaatgggcagaccaggctccgaccggagaagcgcgtcatctaccccagggcatccagcaccgcattgccgacgacgtcggggcaaggccaccaccggcttctagtggggtcggccagaacctggctgcagcggcgatacttctccgcgcgatgtcggagccatcaaccaccgaagggcggcgtatccaggaagaactcaagaatctcctggaggatgccgcggtccgacgggccgaaagctctgcctcccgaaggcaggggtacccctcggagcatcgcgccgcgacttcccgattcatgcgggaagcctcggtccacaccgggcgcacgcgcaacacagcgcctgcggccccgggtcgcctcggcaacgagcaccaccaccgcaaccgtcgaacccacctcgacgagagggtgcgccgaggctaccaccccaggtgtgggggacgctacgacagcggggaggatcggagtccctcgcccgaaccacccggtccgcaggctttcagccgggccatacgacgggcgccgttcccgacccggttccgaaccccgactactatcacaaagtactcgggggagacgaggccggaactgtggctcgcggactaccggctggcctgccaactgggtggaacggacgatgacaacctcatcatccgcaacctccccctgttcctctctaacaccactcgagcctggctggagcatctgcctccagggcagatctccaactgggacgacctagtccaagccttcgccggcaacttccagggcacgtacgtgcgccctgggaactcctgggatctccgaagctgccgccagcagccgggagagtctctccaggactacatccggcgattctcaaagcagcgcaccaagctacccaacgtcaccgactcggatgtcatcggcgcattcctcgtcggcaccacctgccgcgacctggtgagcaagttgggtcgcaagacccccaccagggcgagcgagctgatggacatcgccaccaagttcgcctctggccaggaggcggttgaggccatcttccggaaggacaagcagccccagggccgccagccggaagatgtccccgaggcgtctgctcagcgcggcaccaagaagaaaggcaagaagaagtcgcaagcgaaacgcgacgccgccgacgcggaccttgtcgccgccgctgagtacaagaaccctcggaaacctcccggaggcgccaatctcttcgacaagatgctcaaggagccgtgcccctatcatcaggggcccgtcaagcacacccttgaggagtgcgccatgcttcggcgccactttcacaaggtcgggccacctgcggaaggtggcagggctcacaacaacgataagaaggaggatcacaaggcaggggagttccccgaggtccacgactacttcatgatatacggtgggcaagtggcgaacgcctcggctcgacaccgcaagcaagagcatcgggaggtctgctcggtaaaggtggcggcgccagtctacctagactggtccgacaagcccatcaccttcgaccagggcgaccaccccgacccgcgtgccgagcccggggaaatatccgctcattgtcgaccccgtcatcggcaacgtcaggctcaccaaggtcctcatggacggaggcagcagcctcaacatcatctacgccaagaccctcgggctcctgcggatcgatctgtcctcggtctgggcgggcgcagcgccttttcacgggaacgtccccgggaaacgcgtccagcccctcggacaactcgatctacccgtctgcttcgggactccctccaacttccgaagggaaaccgtcacgttcgaggtggtcgggttccgaggaacctaccacgcagtgctggggaggccatgctacgccaaattcatggccgtccccaactacacctaccttaagctcaagatgtcgggccccaacggggtcatcaccgtcggccccacgtaccggcacgcgtacgaatgcgacgtggagtgcgtggagtacgccaaggccctcgccaaatccgaggccctcgtcgccgacctggagagcctctccaaggaggcgccagacgtgaagcgccttgccggcaatttcgagccagcagagatggtcaaatccgtccctctcgaccctagcaacgacgcctccaagcagatccggatcggctctgagctcgaccccaaatag

SEQ ID NO: 112928 - DNA, 2976 bp, Zea mays
  Clone ID: MRT4577_34479C.1
atgggcagtctccagcaacctttccggcccgggacggtgctccgtttcgggaatcttgagttcatgtccctcgacggcagctgcgacatgatactccttcccccgccgcgcgacagcgacaatggcggtcgacaacccactcgccggcggggaaatcgacgacgccttccccacatggtggaaggacgacattcgggcttgtcccgtcccctcccccgtcgaccgaggaggaggcggggcaaccaaggccaagcgggaagcggcacctcgttggctgtcaagcgagtcgacagcgccggcgtcccaacggagggcgcgtcgggcatcgatctcgcgtctgagacgaagacgagcaccgcctctccgcaacacgccaatctcaagcaaatgcacgacgccagcacgctcgcgaaggacttgctgggcatcaccctcgtacctgagacaacggtgcagtcagtcccagacgcgacctcgtcaccgacggtcgaccgaaaggtaccgaccgattcccatctcgcgtcttttggattcggcctcgacccaccaagcgactacgcttcggtgagcactctcatagtggcgagtccaaaccctctggggtatcgtgtgtggtcaccctgggaccgactgacggctgactcgacctacgagccctcggggtccgaggaagatggcgagcccgacctctgttgggatttctccggacttggtaaccccagtgccgtgcgggacttcatgaccgcatgtgactactgcctttccgactgttccgacggcagccgcggcctcgacaacgaggactgcggcccaagtcgtgaatgtttccacgtcgatctagggggtcccggcgaaggcaaccatcttggtatgccggaaaacggtgatccccctaggcccgtgcctcgcgttgacatccttcgggagctagctgtggtccccatcctggcggggggtcctgacccacagctcgagcaaatccgcgagaggcagaccaggctcgacgagggagcaggaacgcttgtgccgatccgccgggacatcgggcaggaatgggcggtccaacccctggccggagaagcgcgtcatctcccccaggacatccagcaccgcatcgccgacgacgtcagggtgaggccaccgccggattccagcggagtcggccagaacctggctgcaacggcaatactcctccgcgcgatgctggagccatcaaccaccaaggggcgacgtatccagggagagctcaagaatctcctggagaacgccgcggtccgacgggccgaaagctctgcctcccgaaggcaggggttcccctcggaacatcgcgccgcgacttcccgattcatgcgggaagcctcggtccactccgggcgcacgcgcaacacagcgcctgcagtctcgggtcgcctcggcaacgagcgtcatcatcacagccgtcgggcccacctcgacgatagggcgcgccgaggctaccaccccaggcgtgggggacgctacgacagcggggaggatcggagtccttcgcccgaaccacccggtccgaaggttttcagccgtgccatacgacgggcaccgttcccgacctggttccgaaccccgactactatcacaaagtactcgggggaggcgagaccggaactgtggctcgcggactatcggctggccttccaactgggtggaacggatgacgataacctcatcatccgcaacctccccctgttcctctccgacaccgctcgagcctggctggagcacctgcccccggggcagatctccaactgggacgacctggtccaagccttcgccggcaatttccagggcacgtaccgcacagagctgcccaacgtcaccgattcagatgtcatcggcgcgttcctcgccggcaccacctgccgtgacctggtgagcaagctgggtcgcaagacccccaccagggcgagcgagctgatggacatctccaccaagttcgcctctggccaggaggcggttgaggccatttttcggaaggacaagcagccccagggccgcccaccggaagatgctcccgaggcgtcaactcagtgcggcgccaagaagaagggcaagaagaagtcgcaagcgaaacgcgacgccgccgacgcggaccttgtcgccgccaccgagtacaagaaccctcggaaacctcccggaggtgccaacctcttcgacaagatgctcaaggagtcgtgcccctatcatcaggggcccgtcaagcacacccttgaggagtgtgccatgcttcgacgacacttccatagggccgcccgcggagggtggcaaggccctcgacgacgcaaaggaggaagatcacaagactatgtgccgagcctggggagatacccactcgttgtcgaccccatcatcggcaacgtcaggctcaccaaggtcctcatggacggaggcagcggcctcaacatcatctacgccaagaccctcgggctcctgcggatcgatctgtcctcggtccggacaggcgccgcgcctttccacgggatcgtccccgggaagcgcgttcaacccctcggacaactcgacctacccgtctgcttcgggacgccctccaactttcaaaaggagaccctcacgttcgaagtggtcgggtttcgaggaacctaccatgcagtgctggggaggtcatgctacgccaagttcatggccgtccccaactacacctacctcaagctcaagatgccgggccccaacggggtcatcactgtcaggcccacgtaccgacacgcgtacgaatgcgatgtggagtgcgtggagtatgccgaggccctcgccgaatccgaggccctcatcgctgacctggagagcctctctagggaggcgcccgacgtgaagcgccacgccggcaacttcgaaccagcggagacggtcaagtccgtccctctcgacccctgcaacgatgcctccaagcagatccggatcggctccaagctcgaccccaaatag

SEQ ID NO: 112929 - DNA, 372 bp, Zea mays
  Clone ID: MRT4577_3447C.1
gtggctagctggtgatccatttccttcaagtggtttgtccattgccatggtgcaaccaatcactgaagagcagaaagggcattcagtattaagcttaattggaggccgataactgctagatgttatgcacagtctggttttataaggaagacaagtgaggagagaatttcgaatcgttagaacaaacactcaagcctggaccaatcctggcagcaactgaaaagagggaaacggaaagtgggtagacaaatccgatgggctgtgcatctgtatggagtcctctgagtttagctactatctgatctacataaggcgcaaaaagttggggcttaaaaatgacggcgagcgcccacgccatcccgcgggaaggga

SEQ ID NO: 112930 - DNA, 238 bp, Zea mays
  Clone ID: MRT4577_34480C.1
cttatttcttttttttttttttttcttatttctcatttttgagtatcatggacactattaaaacgacctaccccacaacccctaccaataatactatcaattcctccaacaatcctttttatccacttccatcataagatgacatagacgcctaagcagttcttctcctcatcaacttcatcctgtccatcgccatttctaaactgtcatccctaatccctatccactaagttaacac

SEQ ID NO: 112931 - DNA, 2421 bp, Zea mays
  Clone ID: MRT4577_34481C.1
atgtccctcgacggtagctacgacatgatactccttcccccgccgtgcgacagcgacaatggcggccgacagcccgcccgccggcggcggaatcgacgacgtcttccccgcgcggtggaagaacaacattcgagctcaccccgtcctctcccccgccgacggaggaggaggcggagcaaccaaggccaagcaggaggcagcgcctcgtcggctgtcgagcaagtcgacggcgccagcgccccaacggggggcgcgtcgggcatcgacctcgcgtttgagacgaagacgagcgccgtctccccgcaacacgccgattccgaacaaacggacgacgccagcacgctcgcgaagggcttgctggatgtcaccctcgtacatgagacgacggtgcagtcagtccccgacgtgacttcatcaccgcctgtcgaccaagaggtaccgaccgattcccatctcatgccccttggattcagcctcgacccgccaagcggcttcgctttggcggacgctctcgtagaggcgagtccaaaccccctggggtatcgtacgcggtcaccctgggacctgctgacggacgtctcgacctacgggccctcgaggtccgaggaagatgacgagcccgactcctgttgggatttctctggacttggcgaccccagtgccatgcgggacttcatgaccgcatgcgactactgcctttccgactattccgacgcctcggtccacaccgggcgcacgcgcaacacagcacctgcggccccgggtcgcctcggcaacgagcaccatcaccgcgaccgtcgggcccacctcgacgagtgggtgcgccgaggctaccaccccaggcgcggaggacgctacgacagcggggaggatcggagtccctcgcccgaaccacccggtccgcaggccttcagccgggccatacgacgggcgccgttcctgacccggttccgacccccgactactatcacaaagtactcgggggagacgagaccggagctatggctcgcggactaccggctggcctgccaactgggtggaacggacgatgacaacctcatcatccgcaacctccccctgttcctctccgacaccgctcgcgcctgctgccgacagcagccgggagagtctctccgggactacatccggcgattctcgaagcagcgcaccgagctgcccaacatcactgactcggatgtcatcggcgcgttcctcgccggcaccacctgccgcgacctggtgagcaagctgggtcgcaagacccccaccagggcgagcgagctgatggacatcgccaccaagtttgcctttggccaggaggcggtcgaggctatcttccgaaaggacaagcagccccagggccgcccaccggaagatgcccccgaggcgtcgactcagcgtggcgccaagaagaagggcaagaagaagtcgcaagcgaaacgcgatgccgccgacgcggaccttgtcgccgccgccgagtacaagaaccctcggaagccccccggaggtgccaacctcttcgacaagatgctcaaggagccggccgggccacccgcggagggtggcaaggctcgcgacgacgacaagaaggaagatcaccaggcaggagagtttcccgaggtctgcgactgcttcatgatctacggtgggcaagcggcgaacgcctcggctcggcatcgcaagcaagagcgtcgggaggtctgttcggtgaaggtggcggcgccagtctgcctagactggtccgacaagcccatcaccttcgaccaagccgaccaccccgaccacgtgccgagctcgggaaaatacccgctcgttgtcgaccccgtcgtcggcgacgtcaggctcaccaaggtcctcatggacggaggcagcagcctcaacatcatctacgccgagaccctcaggctcctgcgtgtcggtctgtcctcggtccgggcaggcgctgagcctttccatgggatcatccccgggaagcgcgtccagcccctcggacaactcgaccttcccgtctgcttcgggacaccctccaacttccgaagggagaccctgacgttcgaggtggtcggattccgaggaacctaccacgcggtactgggaaggccatgttacgcgaagttcatggccatccccaactacacctacctcaagctcaagatgtcgggccccaacggggtcatcaccgtcggccccacgtacaaacacgcgttcgaatgcgacgtggagtgcgtggagtacgccgaggccctcgccgagtccgaggccctcatcgccgacctggagagcctctctaaggaggtgccagacgtgaagtgtcatgccggcaacttcaagccagcggagatggttaagtccgtccccctcgaccccagcagcgacgcctccaagcaagtccggatcggctccgagctcgatcccaaatag

SEQ ID NO: 112932 - DNA, 1758 bp, Zea mays
  Clone ID: MRT4577_34482C.1
atgtcgccgtccgatgagccgagagctctgcctctcaaaggcgagggtgcccctcggaacatcacgcaacgtcctcccgacgcatgcgggaggcctcggtccacaccgagcgcacaagggacgggacgcctgcagccccggaccgcctcggcagcgaacaacaccatcgcgagcatcgagcccgcctcgaggaaagggtgcgccgaggctaccaccccaggcgtggaggacgctacgacactgggagggacggacgacaacaacctcatcatccgcaacctcccccttttcctctccgacgctgcccgggcctggctagagcatctgcctcctacgcagatctccgactgggaagacctagtcaaggctttcgctagaaatttccaaggtatgtacgtgcgccctgggaactcgtgggatctccggagttgccgcaagcagccaggggaatccctacgagagtacatccggcggttttccaagcagcgcaccgagttgcccaacatcaccgactcggacgtcatcggggcattcctcgccggcaccacttgccgggacttggtgagcaaactgggacgcaagactcccaccaaggcgagcgaattgatggacatatccaccaagtttgcctctggtcaggaggcggtcgaagccatcttccggaaggacaagcagcctaagggaagacagaaggaagatgcccccgaggcatccgtccagcgtggcacgaagaagaagactaggaagaaggcgcaagcaaaacgcgacgccgttgacgcggatctcatcgctgctgacgagcacaggaatcctcggaagcctcccgggggggccaacatgtttgacaagatgcttaaggagtcgtgcccctatctcaggggtcccatcaagcacacccttgaagaatgcgacatgctccggcgttacttcaataaggctggaccctcggcagaaggtggcaaggaccaaggcaacaacaagaaggggggcgacaaggaagaggagttcccggaggtccacaaccgcttcatgatctacagtgggaaagtggcgaatgcctcggctcaacaccgcaagcaggagcgtcaggaggtctactcggtgaaggtagcaacgccagtctacctagactggtccgacaaacccattaccttcgaccaaggcgaccaccccgactgcgtaccgagcctaggaaggtacccgcttgtcgtcgaccccgtcattggcaacgctaggctcaccaaggtcctcatggacgggggcatcagcctcaacatcatctacaccgagaccctagggttcttgggggtcgatctgtccatgatccgagccggtgcagcacctttccacgggattgtccccggcaagcgcgtcctgccccttgggcaacttgatttgcccgtctgcttcagaactccctccaacttccgaaatgaaaccctcactttcgaggtggtcgggttccgagggacctatcacgcgctcaagctcaagatgtcaggccccaggggaaccatcaccgtcggttccacataccgtcatgcttacgagtgcgacgtggaatgtgtggagtacgctgaagccctcgccgagtccgaagccctcatcgccgacctggattgcctctccaaagaggtgcccccgaagcggcacgccgacaacttcgaaccagctgaggcggttaagtctgtccctctcgaccccagcaacaacgccggcaagaaagtcaagatcggctccaagctcgaccccaaatag

SEQ ID NO: 112933 - DNA, 2235 bp, Zea mays
  Clone ID: MRT4577_34483C.1
atgggcggtctccagcaacctctccggcccgggacggtgctccgtttcgggagtcttgagttcatgtccttcgacggcagctacgacatgatactccttccaccgccgtgcgacaacgacaatggcggccgacaacccgcccaccggcggcggaatcgacgacatcttcctcgcgtggtggaagaacaacattcgagctcgctccgtcctctcccccgccaacggaggaggaggcggggcaaccaaggccaagcgggaggccgcgcttcgtcggccgtcgagcgaatcgacgcccccgacgcccagacggaaggcacgccgggcgtcgacctcgcgttcgagacgaaggcaagcgccgtccccccacgacacgctgatctcgagcaagaagacgacgccagcgcgctcgcggaaagcttgcaggacgtcgcccttgtacctgagatgatggcgcaaccagtccccgatgtgactacgtcgctccgcgtcgaccaaaaggtactgactaatccccatcttacgtcatttcgactcggcctcaacccgcctagcaaccttgctctggcgggcgccctcattgaggcgagtgcaaccccactggggtttcgtatgcggtcgccttgggaccggttgacggacgtctcaacctacgggccctctgggtccgaggaagatgacgattccagcatctgttgggatttctctggacttggcaaccccggtgccatgcgggacttcatgaccgcatgtaactactgcctctccgactgttccgacggaagccgcagccttaacgacgagggctgcggcccaagccgcgaatgtttccacatcgagctaggggatccctccgaaggcaaccatctcggcatgccggaggacggtgatcttcctaggccggtgcctcgcgccgacatcccgcgggagctagctgtggtccccgttccggcggggggtcacgacccacaactcgagcaagtccgcggggcgcaggccaggctcaacgagggaacaggagcgcttgagccgatccgtcgggacgtcggacaggtatgggcgggccaacccccggccggagaaatacgtcacctgccccaaggtctccagcactgcgtcgccaacgatgtcagggtcaggccactgcccgcatccagcggggttggtcagaacctggcagccgcagcgatgctcctccgcgcgatgccggagccatcaactaccgagggtcggcggatccagggagagctcaaaaatctcctggaaggcgctgcggcccgacgggccgagagcactgcctcccgaaggcagggatacccctcggaaccttatgccgcgacttcccgattcatgcgggaagcctcggtctacaccgggcgcacgcgcaacaccgcgcctgcggccccgggccacctcggcaacgagcaccatcgacgcgaccgtcgggcccacctcgacgaaagggccttcagtcgggccatccgacgggcgccgttcccgacccggttccgacccccgactaccatcacaaagtactcgggggaaacgagaccggaactgtggctcgcggactaccgcctggcctgccaactgggtggaacggacgacgacaacctcatcatccgaaacctccccctgttcctctccgacactgctcgcgcctggttggagcacctgcctccggggcagatctccagttgggacgacttggtccaagcctccgccggcaatttccagggcacatacgtgcgccccgggaattcctgggaccttcgaagctgccggcaacagccgggagagtcgctccgggactacatccggcgattctcgaagcagcgcaccgagctgcccaacatcaccgactcggatgtcatcggcgcgttcctcgccggcaccacctgccgcgatctggtgagtaagttgggtcgcaagacccccaccagggcgagcgagctgatggacatcgccaccaagttcgcctctggccaggaggcggtcgaggctatcttccgaaaggacaagcagccccagggccgcccatcggaagaggctcccgaggcatctactccgcgcggcgccaagaagaagggcaagaagaagtcgcaatcgaaacgcgacgccgccgacgcggaccttgtttttcgacaagatgctcaaggagccgtgcccaaaccatcaggggctcgtcttttcgacaagatgctcaaggagccgtgcccaaaccatcaggggctcgtc

SEQ ID NO: 112934 - DNA, 289 bp, Zea mays
  Clone ID: MRT4577_34484C.1
caaccaaatcgtcgtcgggctgcgctaagacgtctgcctaaacctagctaacgaaacgacacctaagtcgaattggagcacaggactcagactgacagctccaacgaattatacctttgcggcttctaggtgttcggaacgcccaaatggacacattgagcatcacgtctctccaatccaagtaggtgcagtacacgcccgtgcagggttcaaccaaaccccgcttaacaagcttcaaagccggggcagaacagcggaccatcatggcgtggctattcttggcggtcac

SEQ ID NO: 112935 - DNA, 370 bp, Zea mays
  Clone ID: MRT4577_34485C.1
ctccaccaccccgccgagctccgcccccatcgtgccgacggatctccaacccagccaggagcttcccctctcgctggcggatcccccaccctagcaggagctcccctctcccgtcggcggatcccccatcccgctaggagctcagtccgggccactgacggcttcaccaacgaagccgccaccacgctgccagcgccaggttcacccccacctgcgcatcccgctagtagtggaccccacggccaggatctcggcacgcccccgacactgccagccccccacccacccatgctggacggtcgaaggattcgaccccacgcaatcatgcattgctttgacttatcaatgcaacgtttaatcctaatgcatg

SEQ ID NO: 112936 - DNA, 575 bp, Zea mays
  Clone ID: MRT4577_34486C.1
ggcgtataaaatcgctccatacatctggcttcattccagctcaggaaagcacatcgctgatagggtcgatgccttctggtaagctggttgcacaataatgaataatgctgtacatgtgtgtaggaaacttaaagagttaggtgcaccattcccttaggctctagcggttcagtaacttgcgcttctagctttacaggtttcagttaatttcgtaaaatggatatctgcctttttttcaaagataaaaggaaggcctccatttctcggatgctaaatgattctgtgaaatgtatgtacaacaggatcaagcccagccagtcattaggttctcttgttttcttgttttgtttgttctcacaagacaaattgtatctgatcatgaagtttcagtaccgttttcacaaatattctggtctactttcgatacctgtgttcaaaccgtttgcataatttcacctggctatttgtttgcactagatgctttatatttctgcatttatgactgggctcactggaaagaagagttaaattcatagaacatgacaagtcaatttttttctaattgtgctttaatg

SEQ ID NO: 112937 - DNA, 329 bp, Zea mays
  unsure (1)..(329): unsure at all n locations
  Clone ID: MRT4577_34487C.1
ttagattataaatataacgaaaatgtgaaagtatattgacaagcatataaaaatgaatgaatntnnnaaggaagacgatgaaagagaaaatacaaaaggcgggaaaaagaaagaaaaaagttggcggaaaaaaatgaaaggggaagaagggagggaaaaaatattgagaagacaaggaaataatataagggggcgtgacaagagggaaagggggggtaagggcgggatacaaagagaagggaaaggtaagggcccgttaaggaaggatgaataagacgatggggagaaggggggatggaagatatcaaggcacgagagtgggtgactgt

SEQ ID NO: 112938 - DNA, 399 bp, Zea mays
  Clone ID: MRT4577_34488C.1
cccacgcgtccgcccacgcgtccgctatccttgttggtggtagattgtggtgaagtttgaatataaagatgtatatgaataagctgcatgctcaagatagtctaagcaaccaattttgcgatgttttgcgctgttgttgacggatgcgggggtgttgccgaggcgtctgcatttggtgatgttgcagtggttgctgtgaggcagctgtgttaagtaagcgactctatcattttctctatcgctttttgtgacgaagtctgtatgtgttaggttgacgcttttgctgaacaagtggtgtctaaggcgctagtggacctcgcgaccttacatgtgttctgataagaaacggctggagtacaaggttgagcgtctccgaatgcaaaatacagatgctgtcac

SEQ ID NO: 112939 - DNA, 237 bp, Zea mays
  Clone ID: MRT4577_34489C.1
cttcaatcgcaaagaatagtatttttaagccggtgctggctccagacatggagagcctctggggattctcggcatctctaggggcacttggtggggatgctacaaggggattatttgaccatcatcttggagcacaagtcaagttctggctaaatgctctattttgctagggttcattcatgtctggtgggtcaatgagaaggtttatgcctgatgactttttgctcaatgtaaggg

SEQ ID NO: 112940 - DNA, 1590 bp, Zea mays
  Clone ID: MRT4577_3448C.1
ccggccgggaagagtagccatagtttgttagagcattcccccaaggaatataacaccattgtgtgacgagcaacccttcaccaaaaactaaggactgataaactgcaagagaccgttcctatcaggattgtggagtctgcaaccagatatcaatgcataacagaattgaagagatgtatcatcatcaacaacagcttcagagccacagtcatttcctgtcttctaggcagacattccctccagaaaggcacatgcttctgcaaggagggagcattccagcagagccagggcttgtgctttccactgatgctaaacctaggttaaaatggacacctgaactacatgagcgttttgtggaggcggtaaaccaacttggtgggcctgacaaagctacaccgaagacaatcatgagactcatgggtgtccccggactaacactataccaccttaagagtcatcttcagaaatacaggctaagcaaaaacatccatgcccaagctaatggtgtaaatgcaaaaaatgtgattggttgcaccatggcaatggacaaaccacttgaaggaaatgggtcaccagctagccacttaaaccttggaacccagacaaacaaatctgtgcacataggtgaagcccttcagatgcaaattgaagtacagcgccgactgcatgagcaactagaggtacaaagacatttacaactccgcattgaagcacaagggaagtacctacaatctgtgctagaaaaggcacaggagacactttcaaagcagaatgcagggtcagtcggtgtagaaaccgcgaagatgcaactgtcagaattagtctcaaaagtatcgacagaatgcctccagcatgcatttacaggctttgaggagattgatggttcccaaattctacaaggccataccatccaacttggcgatgggtcagttgacagctgcttaactgcctgtgacggctcacagaaagatcaagatatcctgtcaatcagtctttccgctcacagaggaaaggagataggaggcatgacctttgatatacaagagaaagaaagaggaagagaggatttgtttcttgacaagctaagcatgacgcctccaggccaactagacaggcgtgagagaggaagttttagtatgacacggaaggcagcaaaactggatctgaacatcaatgataccactgatgggccacagaactgcaagaaaattgacttgaatgggttcaactggacctaggaagagttagcaaaagaccttgcaaattaaatctgacttgattcatcaagagtgacaagcttataagcttgagattggctccttctgccaagatagcagcaaagagaggaagtgaaaccgaatgagttattccaaagaccagcagcatcgacatatcctccatggcaggacctgggtgatcctcggaacagctgcgctgtcggcccatcacgattcagcgaaataagtgatgaaattacaataagtagggcatgtagattggtagagtgtatttgagagagtctagtgttctcctccggctataccttattgtgattctgtacacaagcatataaatacaacgatttttgtt

SEQ ID NO: 112941 - DNA, 246 bp, Zea mays
  Clone ID: MRT4577_34490C.1
gtccgctgcatttctgctctctcgctctcctagctctcgacacagctgccggcgccgccgacctaatccagggtgctgaggctttccttggcctcttcatcggcagggagcacccaccaacatttctgcaaaaaaggctggtggtgaggacatgcagcctcttggctgcgacattggaaccggaaaggtcaatgatcgtttctcccgctatgatgcacccatggcctgattccctagcctcgttgg

SEQ ID NO: 112942 - DNA, 1953 bp, Zea mays
  Clone ID: MRT4577_34491C.1
ttgggtacctcgaggccggccgggcccccatcgaagactgccccgcccccgcctccatcctctcctccagttcctcctagcgccgccgcccgactccctcctccagcgccggcgcccaactccctcctccagtgccgttgccgactcgccgcccgcgttcatcctccggttccagcttacgtcggtccatcctctcctctgccccctcctccatcctccatcagattcagaaggacgctccgcacgagatggaggtggaggtggccaaatattcacgggggcagggtgctgacctgaaggcgctgggggacaagaagttgaaagggcagctcagtgtaaaagagaagctatatggccaatctgcaaaagctgctgctaatgccgaaaagtggcttatgcctaatgatggaggtattttagagcctggtcatttggagaaaacatatagattttcacaagaggatatattgacagaggtggatcttttgcgttgctgtcgaccatttgatatgatcttacctgtactcggtccttataatataggatacacctcaaacggccgctacatgctagtaggcggacgaaaaggccaccttgcaatgatggatatgttgcatatggatcttatcaaggagtttgaggtgagggaaactgttcgtgacgtgacattcttacacaatgagcagttgtatgcggtcgctcaaaaaaagtatccctacatctataatcgacatggtacagaaatacactgtctgaaggaacatggaaaagcactgaagctccaatttctgtctaaacaattcctcttagcatcgataaacagcttcgggcagctccactaccaagatgtgagcactggcgaaatggttgcaaattataggacaggtctgggccgcaccgatgttatgcggggcaatccttacaatgctgtgattggccttgggcatgctggtggcaaagttaccatgtggaagccaaccagtgtgaaaccccttgttaccatgctgtgtcatcatggcccggtgactgctgttgcatttgacaggggtggcaatctcatggcaacagcaggtgttgacaggaagataaagatctgggacctgaggaagtatgaggttgtgcgttcttacccaatgcgcgctcagtctttggattttagccagaaggggctgttagcctgcagcaatggatctcaggtagagatatacagggatttcggtgggcatgactataggctttacatgaagcacaagatagtgaagggctatcaggtcgggaaggttgtgttccgcccctacgaagacattctggggatcgggcactcgatgggcttctcttccatccttgtcccaggatctggtgagccgaacttcgacacctttgttgacaacccgatggaaactaccaagcagaaacgtgagaaggaggtgcatgctctcctggataaactccctccggagaccattatgctgaacccgaacacgatagccactgtacgagctccgaagaagaaagagaagaagaccaaggaggagattgaggaagagatggcagatgccgtggaggcggccaagaacactgagcgcaagaagaagaccaagggcaggagcaaaccgagcaagcgagccaagaagaaagaggaagacgttttcaaggccaagaggcccttcctggagcaatctgataaggtggatgggcgacctgacaagaagcagcggataggtgaactcccaaaggccttgcagaggtttgccaagaaaccacaatcataatcgtcgtcgttaacacagggttgggatttcacattggtatttccaatatgtagaatttccgcgtgagcacagaagaatgtgccgaaattttgtgctgaactattttggtattccagcgagcatggccgtgtcagctgatttttttaaaaaaaaaaataaaaaaaaaaaaaaaaaagcggcc

SEQ ID NO: 112943 - DNA, 314 bp, Zea mays
  Clone ID: MRT4577_34492C.1
actcgagccgaatcggctcgagcggctcgaggtgacgctgacagattagtttagggaaaaataaaccagccttggaaattgctctctatgttcgattcagtgtttcggccccttgttactttgcttctgtgtggggggctggtacatatacatatagcatacttgcaagacactgaagggctgtaaggaaccaaagaacccccagaacaaaaaaatgaaagcaagggctgtaaaaaaaatctcactatgaactgaatagaagcaagcatcccttggcctctccaaaagagctgttcacatatggcagccaaact

SEQ ID NO: 112944 - DNA, 855 bp, Zea mays
  Clone ID: MRT4577_34493C.1
gggtacctcccggccggccggggtgacaaaaccccaccaccgaagactgccccgccgccgacgcccgcctccatcctctcctccagttcctcctagcgccgccgcccgactccctcctccagcgccggcgcccaaatccctcctccagtgccgtcgccgactctccgcccgcgtccatcctccggttccagcttacattggtccatcctctcctctgccccctcctccatccttcatcagattcagacggtgaagcacccagtcccagttcaggttcaaacacaggacgctccgcacgagctggagatggaggtggaggtggccaaatattcacgggggcagggtgctgacctgaaggcgctgggggacaagaagttgaaagggcagctcagtgtaaaagagaagctatatggccaatctgcaaaagctgctgcaaatgccgaaaagtggcttatgcctaatgatggaggtattttagagcctggtcatttggagaaaacatatagattttcacaagaggatatattgacagaggtggatcttttgagttcaagaaaaccatttgatatgatcttacctgtactcggtccttataatataggatacacctcaaacggccgctacatgctagtaggcggacgaaaaggccaccttgcaatgatggatatgttgcatatggatcttatcaaggagtttgaggtgagggaaactgttcgtgacgtgacattcttacacaatgagcagttgtatgcggtcgctcaaaaaaagtatccctacatctataatcgacatggtacagaaatacactgtctgaaaggacatggaaaaagcactgaagctccaatttctgtctaa

SEQ ID NO: 112945 - DNA, 379 bp, Zea mays
  Clone ID: MRT4577_34494C.1
gccggccgggctcggatcctaatccgcttgctctgccagctagtcagcaagaggcagcagcgccggcccctggccggcctcggctcagctggcgaaggccgtgaccgtgagaagccatgagtagggaacagcagatgccacggcggaggttcatcgccatccccttctcctccggctgccgctcccactccagcaacgactgcggcccaccggcgtcacagctagcgccagacagagcgagaggcggtggtggtacacgcctacgggccttggtgatgggctgggctgggctcgtccgtcagcctggcgtgacaggccgtcggcgtcgtccgtttctgccgccccatgctcggctcggctcccatcccatgtggaggga

SEQ ID NO: 112946 - DNA, 799 bp, Zea mays
  unsure (1)..(799): unsure at all n locations
  Clone ID: MRT4577_34495C.1
ggacctccccggcggcggcggcggcggcaagtacggcttcagcctgcgccgcggggtggccatggaccccgcgcgcgacgtcatcctcgcctacatgcagaacggggagccgctcgcgcccgaccacggcttcccggtgcgcgtcatcgtgcccgggttcatcggcggacgcatggtcaagtggctcaagcggatcatcgtcgcgtccagcgagtgcgagagcgtactaccactaccgtanctccgggtgctgccgtcccacgtcgacgccgacctcgccaatgccgaagcgtggtggtacaagccggagtgcgtgataaacgagctgaacatcaactcggtgatcaccacaccaggacacgacgaggtgctgcccattaacgccctgacgacgcagcggccgtatacgatcaaaggatacgcatactccggtggcggccggaaagtaacccgggtggaggtgacgctggacggcggcgagacgtggcatgtgtgctcgctcgaccacccggagcgtccaaccaagtacggcaagtactggtgctggtgcttctggtccgtcgacgtcgaggtgctcgacgtgctcggggccaaggaaatcgccgtccgcgcctgggacgaggccatgaacacccagccggagaagcttgtctggaacctcatgggcatgatgaacaactgctggttccggntgaagatcaacgcgtgccggncgcacaagggcgagatcggcatggtgttcgagcacccggggcagccgggcaaccagcccggcggcctggatggcgcgccagaagca

SEQ ID NO: 112947 - DNA, 560 bp, Zea mays
  Clone ID: MRT4577_34496C.1
gggaccctcgaggccggccgggccggttcttcctgcactccaaaacttgagcagctactgcctcgtctactacggcgccatgatctctggatccgttacgtgaaactaccgttcccggtcgaacagggaagaacacatgctattccatcctctcgcccagcatactcgctctgcatatctatgggcggaacttgaccggtgccagatcagagaagtgctggatgtgggctggcctatcccaccgaaaaatacaataccactgtcctcgtacccaagcgccatgtacaaccacccgtgctatggatgctcttcaattctcacgggcacgcccagaacctgtgaatgcgccatccgtccacatgattacctcactgcagcaaaaggaggtaggggtctctgacgaggctcaagtactaccatggcgtccgcaccgccgttacataagacctagcgcgatggtatatctgacgctcttaagtgtctgaggatacagactgcacacaagtactcgctcttcgtagacttctctaactactctgcgaggagctacaatgacacca

SEQ ID NO: 112948 - DNA, 270 bp, Zea mays
  Clone ID: MRT4577_34497C.1
gacaaaagactacgtgcatttatgcgtcccttacatggggagaagtcccacatccgtactgcggaaggcccgcatccaagcatggtagataaatatatgtcaagttgtggggccaggaaaggaaatatggggtagcctatatatcatcacacaccgtggggcccatgggcaccccatcagactaaaattctaacacggttagggcatagaccatcgcggacaccagggatctccacagacggctccacgaacacgacccacgggtaggcc

SEQ ID NO: 112949 - DNA, 136 bp, Zea mays
  Clone ID: MRT4577_34498C.1
aggactgtgcgcagggtttcattttagcgggagggcctcactgctatttactgtggatgcaacaaacctaatacacttaccaatgtacctctaattctcatacatggtcctccaacgctgtttatttaacagaaca

SEQ ID NO: 112950 - DNA, 175 bp, Zea mays
  Clone ID: MRT4577_34499C.1
ggaaggccccatacgaggggaagttttaaaaaaacgtcccgtattttcccccaccaccatgatggtaatgagcgataagaagattgtgcaatgggatatgaagccagggccgattacaccttctttttcttactactttaaggcttgtgaacaccataacttttgtggataacaa

SEQ ID NO: 112951 - DNA, 3741 bp, Zea mays
  Clone ID: MRT4577_3449C.1
ggatacttgaaccatcaggtctttttttttaaggcgaacatatggatcaccagttcattacgccaaacaataaaaacagcttatccagcggtctatactctgtactttccaaattccaattcgtaccatttgaagtgttttcgtatttctgcaaccgacacaaatggacgagtttgtacaaataaacaaagaacgactactgagcaaaacactcccagagcaaacaacaacatacccacgccagggttcacacgtgctcatcatcctgctggcggctggcacgatccagcgggagcacaaccaagccacggaacagaagaagcaggccggcgaggtcgacacaggcgatatattccttctcatcttcgcctccaaaaaagcgcaggattcccatccagctttgtcaacatcgcttttccttattcccttcccgcgggatcgcgtgcgcgctcgccgtcatttttaagccccaactttctgcgccttatgtagaacagatagtagccaaactcagaggactccatacagatgcacagcccatcggattcgtctacccactttccgtttccctcttttcagttgctgccaggattggtccaggcttgagtgtttgttctaacgattcgaaattctctcctcacttgtcttccttataaaaccagactctgcataacatcttggcatgagtagccatagtttgttagagcattcccccaaggaatataacaccattgtgtgacgagcaacccttcaccaaaaactaaggactgataaactgcaagagaccgttcctatcaggattgtggagtctgcaaccagatatcaatgcataacagaattgaagaggtatgagatgtaatgtgtgcatgttatttggtttgctcaaacaaaggagaaaaaaagagagatctcctcatgcgtcctaacatttgagactgcaatgtcttcatgccagatgtatcatcatcaacaacagcttcagagccacagtcatttcctgtcttctaggcagacattccctccagaaaggcacatgcttctgcaaggagggagcattccagcagagccagggcttgtgctttccactgatgctaaacctagcagttatcggcctccaattaagcttaatactgaatgccctttctgctcttcagtgattggttgcaccatggcaatggacaaaccacttgaaggaaatggatcaccagctagccacttaaaccttggaacccagacaaacaagtaagagatgaataaatgttttcttcaacatgtttgcataagataacatggatttgtatttttatcagatctgtgcacataggtgaagcccttcagatgcaaattgaagtacagcgccgactgcatgagcaactagaggtacagaagcataaaaaataaatcatattactaactaaattaccatttaaacattccttacaaagacataactgattcatccctagcagagttattgtgtaaaagactggagtagattgtctggacaaatatatagcaaaatttatcccaaaccaggctttaagtagatctaggacactcatcaaatgaaggtttattttgccatgaaagtacctgatgtacagacatccaaataaagaaaaattacgtagcttcaccgtcagttggtaaacttcagggacatggtcagatcatatataatgttacatgtcaaaaaaatggcatcccaatcaccattcctttaagaaaaaaacatcacttataattgctccaatagtccaatcaactcaattgttttagccaagcactagttcctatattaccgatagagtaaaaagtccaagagaaagtatgtaatatatgtaggggtggtaatggatcacgatccaaatatttcttcacaatttgtttgagcctttaatcaattttagttcaaagatgaataaaaatagagccgatccaatctgatttttaaattttatagtgtaaaatttagagcctattgccacccctaaatgtatgcatatctttagctttagagcatccacatattttgtccttcacacaatgaacatctatagctcatttatcaacaaaagtatatgctggacaccagcatatgacttctaagaggctcacaatgcaagagggcctagtcatggtggtctaggaacataatcttgtcatacgtttaactgaacacagttttaaaaagaacaagtaaaaactaatgatgctaaaataagtttaaacaaactgaccaattgtaaatccagattttattcttttcatgtcacaagctctttactgttaatggtcaagtactgataatgtgataccttacacataaacgacgcctttcaacaggtacaaagacatttgcaactccgcattgaagcacaagggaagtacctacaatctgtgctagaaaaggcacaggagacactttcaaagcagaatgcagggtcagtcggtgtagaaaccgcgaagatgcaactgtcagaattagtctcaaaagtatcgacagaatgcctccagcatgcatttacaggctttgaggagattgatggttcccaaattctacaaggccacaccatccaacttggcgatgggtcagttgacagctgcttaactgcctgtgacggctcacagaaagatcaagatatcctgtcaatcagtctttccgctcacagaggaaaggagataggaggcatgacctttgatatacaagagaaagaaagaggaagagaggatttgtttcttgacaagctaagcatgacgcctccaggccaactagacaggcgtgagagaggaagttttagtatgacacggaaggcagcaaaactggatctgaacatcaatgataccactgatgggccacagaactgcaagaaaattgacttgaatgggttcaactggacctaggaagagttagcaaaagaccttgcaaattaaatctgacttgattcatcaagagtgacaagcttataagcttgagattggctccttctgccaagatagcagcaaagagaggaagtgaaaccgaatgagttattccaaagaccagcagcatcgacatatcctccatggcaggacctgggtgatcctcggaacagctgcgctgtcggcccatcacgattcagcgaaataagtgatgaaattacaataagtagggcatgtagattggtagagtgtatttgagagagtctagtgttctcctccggctataccttattgtgattctgtacacaagcatataaatacaacgatttttgtcacaagtgattgttgctgggattggcaaatgcccaggaatgttttgccatcagctaagcgtgcctacaccctgctgccaaatcatgaatctacaagacagcaactggtgcacaaaacataagggacggacggatgcatatgcatcgtacaaaacacctgcaccgtgtccttgttggattatacataatggtttcaatgtttcgtttcatgcggctatgaagcgggaatgggacagatttactcccaacacgcaaatccaataaggtatcacgaccgctcttcgatgacaaggcagataaatcgtaaatcagctgctaagctgcgaaggtaaataaatcgatcgtacctcccaactgatctaggtggcggcggccgttcgatgagtgcagaaggggatcttctcctgctaaacaatcaccgccgccgccgccgcctctttcctcacaaaagctaaacaacatttgctccaaccaatttgtcggtttg

SEQ ID NO: 112952 - DNA, 359 bp, Zea mays
  Clone ID: MRT4577_344C.1
ggcgaaaatagttgtcacagtcgattcgtatgatgaaccggcgatgaaaattatcacaacgactggcaatgaaaaccatttcttacaaaaacagcaccgctacagtaacttaccgagaagctgaggctggcgtgagcggcggttaccaaacacaccacaccctatgagctagcgtgataggagagccttgtggcactggcagctgcggcagtgcttctccggtgcgttcttggcgtggaagtaccatccggagagcatgtcgaagaggatcccggctccgacgccgacggccaggtcgatggtgtagtgtcccctgcacgccagcagcctgaccccctggagcacgttgagcgcgtcgt

SEQ ID NO: 112953 - DNA, 383 bp, Zea mays
  Clone ID: MRT4577_34500C.1
aaaaaaaaggggttggccaaaactagggaaatgtgggaaaaagaccaggggtttgaattccaccgaaaactcgggattacatacggggggcttatatgatttttttaatggaaaattaggggcccagaaaaaaatttggacaaatgccttgacaggggacacaccattccccaaaattatatacttttcaaaaatcgccggggggagagccaactaaagaggttttctttgggggatgcccccccaagcaggaacagggggggggcactgaaaacgggggggattgcccttgaaaggtgttttttgttggcattgacagaaggggttaagaggggatgcctgcgcttaccttaaaggtgggataaagaatcgggggatggggg

SEQ ID NO: 112954 - DNA, 222 bp, Zea mays
  unsure (1)..(222): unsure at all n locations
  Clone ID: MRT4577_34501C.1
ctcnngcaacaagccaaacaacccagnggctgcnagccgagacagggganaganggagagagaggcgcgcagatggcgacgccgncgncggcgctttgcnccagcnncgccncccngcggaccgccnccaacggccacccccgnggcancgccnccnccacgcccaggaaggcannccacgngagggcancagcncgggnggacaagnncncaaagagngac

SEQ ID NO: 112955 - DNA, 3132 bp, Zea mays
  Clone ID: MRT4577_34502C.1
atgggcagtctccagcaacctctccaacccgggacggtgctccgtttcgggagtcttgagttcatgtccctcgacggtagctacgacatgatactccttccaccgccggacgacagcgacaatggcggccgacagcccgcccgccggcggcggaatcgacgacgtcttccccgcgtggtggaagaacaactttcgagctcgccccgtcctctcccccgccaacggaggaggaggcggggcaaccaaggccaagcgggaggcagcgcctcgtcgactgtcgagcgagtcgacagccccagcgccccaacagggggcgcgtcgggcatcgacctcgcgtttgagacgaagacgagcaccgtctccccgcgacacgcctactccgagcaaacggacgacgccggcacgctcgcgaaaggcttgcaggacgtcaccctcgtacctgagatgacggcgcagtcagtccccgacgtgacttcatcaccgcccgtcgaccgagaggtaccgaccgattcccatctcacgtcattcggattcagcctcgacccgcctagcggcttcgctttggcgggcgctctcgtagaggcgagcccaaaccccctggggtttcgtatgcgatcaccttgggaccggctgacggacgtctcgacctacgggccctctgggtccgaggaagacgacgagcccagcttctgctgggatttctctggacttggcaaccccagtgccatgtgggacttcataaccgcatgcgactactgcctttccgactgttccgactgtagccgaagcctcggcgacgagggctgcagcccaagccgtgaatgtttccacgtcgatctagggggtccctccaaaggcaaccatctcggcatgccggaggacggcgggggccatggcccacagctcgagcaaatccgcggggtgcaggccaggctcgacgagggagcaggagcgcttgagccgatccgccgggacgtcgggcaggcatgggcgggccaacctccggccggagaaatacgtcatctaccccagggcttccagcaccgcatcgccgacgacgtcagggtcaggccgccacccgcatctagtggggtcggccagaacctagctgcagcagcaatgctcctccgcgcgatgccggagccatcaaccaccgaggggcggcgaatccagggagagctcaagaatctccttgaaggcgtcgcggtccgacgggccgagagctccgcctcccgaaggcaggggtacccctcggaacctcgtgccgcgacttcccgattcatgcgggaagcctcggtctacactgggcgcacgcgcaacatagcgcctgcggccccgggtcgcctcggcaacgagcaccatcaccgcgaccgtcgggcctgcctcgacgagagggtgcgccggggctaccaccccatgcgtgggggacgctacgacagcggggaggatcggagtccctcgcccgaaccacccggtccgcaggccttcagccgggccatacgacgggcgccgttcccgacccggttccgacccccgactactatcacaaagtactcgagggagacgagaccggaactgtggctcgcgaactaccgtctggcctgccaactgggtggaacagacgatgacaacctcatcatccgcaacctccctctgttcctctccgacaccgctcgcgcctggttagagcacctgcctccggggcagatctccaactgggacgacctagtccaagctttcgccggcaatttccagggcacgtacgtgcgccccgagaattcctgggacctccgaagctgccgacagcagccgggagagtctctccgggactacatccggcgattctcgaagcagcgcaccgagctgcccaacatcaccgactcggatgtcatcggcgcgttcctcgctggcaccacctgccgcgacctggtgagcaagttgggtcgcaagacccccaccagggcgagcgagctgatggacatcgccaccaagttcgcctccggccaggaggcgatcgaggctatcttccgaaaggacaagcagccccagggccgcccatcggaagatgaccccgaggcgtcaactcagcgcggcgccaagaagaagggcaagaagaagtcgcaagcgaaacgcgacgccgccgacgcggaccttgtcgccgccaccgagtacaagaaccctcggaaacccccggaggggcccgtcaagcacacccttgaggagtgcgtcatgcttcggcgccacttccacagggtcgagccacccgcggagggtggcagggcccgcgacgacgacaagaaggaagatccccaggcaggagagtttcccgaggtccgcgactgcttcatgatctacggtgggcaagcggcaaacgcctcggcttttcaccgcaagcaagagcgccgggaggtctgttcggtgaaggtggcggcgccagtctacttagactggtccgacaagcccatcaccttcgaccaagacgaccaccccgaccatgtgccgagcccgaggaaatacccgctcgtcgtcgaccccatcatcggcgacgtcaggctcaccaaggtcctcatggacggaggcagcagcctcaacatcatctacgccgagaccctcgtgctcctgcgtgtcgatctgtccttggtccgggcaggcgctgcgcctttccatgggatcatccccgggaagcgcgtccagcccctcggacgactcgaccttcccgtctgcttcggaacaccctccaacttccgaaaggagaccctaacgttcgaggtggccgggttccgaggaacctaccacgcggtactggggaggccatgctacgcgaagttcatggccgtccccaactacacctacctgaagctcaagatgtcgggccccaacggggtcatcaccgtcggccccacgtacaaacacgcgttcgaatgcgacgtggagtgcgtggagtacgccgaggccctcgccgagtccgaggccctcatcgccgacctggagagcctctctaaggaggtgccagacgtgaagcgtcgtgccggcaactttgagctagcggagacggttaaggccgtccccctcgaccccagcaacgacgcctccaagcagatccggatcggctctgagctcgatcccaaatag

SEQ ID NO: 112956 - DNA, 1755 bp, Zea mays
  Clone ID: MRT4577_34503C.1
atgcaggccaggctcgacgagggagcaggaacacttgagccgttccgccgagacattgggcaagaatgggtgggccaacctccggccggagaagtgcgtcatctaccccagggcatccagcaccgcatcgccgacgatgtcagggctttcagccgggccatacgacgggcactgttcccgactcggttccgaacctcgactactatcacaaagtactcgggggagacgagaccggaactgtggctcgcggactatcggctggcctgccacctgggtggaacggacgatgacaacctcattatccgcaacctccccctgttcctctccgacaccgcattagcctggctggagcacctgcctccggggcagatctccaactgggacgacctggtccaagccttcgccggcaatttccagggcacgtaccgcaccgagctgcccaacgtcaccgactcggatgtcatcggcgcgttcctcgccggcaccacctgtcgtgacttggtgagcaagctgggtcgcaagacccccaccagggcgagcgagctgatggacatcgccaccaagttcgcctctggccaggaggcggtcgaggccatcttccggaaggacaagcagccccagggccgccaaccggaagatgtccccgaggcgtcaactcagcgcggcaccaagaagaaaggcaagaagaagtcgcaagcgaaacgcgacgccgccgacgcggaccttgtcgccgccgccgagtacaagaaccctcggaaacctcctagaggtgccaatctcttcgacaagatgctcaaggagccgtgcccctatcatcaggggcccgtcaagcacacccttgaggagtgcgccatgcttcggcgccactttcacaaggtcgggccacctgcggaaggtggcagggcccgcgacgacgataagaaggaggatcacaaggtagtagagttccccgaggtccacgactgcttcatgatctacggtgggcaagtggcgaacgcctcggctcggcaccgcaagcaagagcgtcgggaggtctgctcggtaaaggtggcggcgccagtctacctagactggtccgacaaggccatcaccttcgaccagggcgaccatcccgaccgcatgccgagcctggggaaatacccgctcgttgtcgaccccgtcatcggcaacgtcaggctcaccaaggtcctcatgaacgggggcagcagcctcaacatcatctacgccgagaccctcgggctcctgcggatcggtctgtcctcggtccgggcaggcgctgcgccttttcacgggatcatccccgggaaacgcgtccagcccctcagacaactcgatctacccgtctgctttgggacaccctccaactttcaaagggagaccctcacgttcgaagtggtcgggtttcgaggaacctaccacgcagtgctggggaggccatgctatgccaagttcatggccgtccccaactacacctacctcaaactcaagatgtcaggccccaacggggtcatcaccgtctgccccacgtaccgacacgtgtacgaatgcgacgtggagtgcgtggagtacgccgaggccttcgccgaatccgaggccctcatcgccgacctggagagcctctctaaggaggcgccagacgtgaagcgccacgccggcaacttcgagccagcggggacggttaaacccgtccctctcgaccctagcaacgatgcctccaagcagatccggatcggctctgagctcgatcccaaatag

SEQ ID NO: 112957 - DNA, 601 bp, Zea mays
  unsure (1)..(601): unsure at all n locations
  Clone ID: MRT4577_34504C.1
gggtaccctccgggctcgnccgggctgtgcatgtctattcttttatgttgatcttgatttagcataaccctggacatgcagaatcaatgtatggcagtgtaatactttccaccattggccttgatgtcttgatatggcttactcaacaattagttgatgtcttgatatggcttactcaacaattagtgttgtttaatggggcaacaagaacggtggaaattgatgtgttagtgtgccataatcagtgtttcctcagggcgcntgatctggcctccagatcagcgcctagcaccgaattgggattaggtaggactaggcaggtttgaatgtttgatcaccactttggtaggctagttggctagcaagatgctgctgcctagataggctaggtggttaccttgttcatcacttcatgtactacactcaggaaccttccttatcaacaatgaatgcttaaatcatttgctaagactgaaccatttgaaatttagcatggacagtgattttcttcaaagtctgctttctgaaagtgtttatctcggcagtattgtagatgttgagaacttgtctctttcttttttattttctttagcatatggca

SEQ ID NO: 112958 - DNA, 286 bp, Zea mays
  Clone ID: MRT4577_34505C.1
gaccaacgcttccgcggaaaccattaatccatttcccgtcaaccaatttttgaattgttagaactggtttgtaaaacttgtttccccaaccttgcccccaaatcgggcaattttttgggccccgggcaattcactttaaaaatccaaatttgaattgtttaataaaggaaattggttccggaacggaataagtcccaaatgatttaccaaagttcaataataattccgccttaaaattaaatttttccaaaagtttgttacttggaaattaatgccgggaatttta

SEQ ID NO: 112959 - DNA, 3235 bp, Zea mays
  Clone ID: MRT4577_34506C.1
atgggctgtctccaacaacctctccgacccaggacggtgctccgtttcgggagtcttgagttcatgtccctcgacggcggctacaacatgatactccttccaccgccacgcgacgacgacaatggcggccgacaacccacccgccggcggcggaatcgacgacgtcttccccgcgtggtggaagaacgaccttcgagctcatcttgccctttcccccgccgacggaggggaaggcagggtgaccaaggccaagcaggaggcagcgcctcgttggctgttgagcgagccgacagcaccggcaccccaacgaggggcgcaccgggtatcgacttcgcgcctgagtcgaagacgagcgccgtctccccgcgacacgcccatcccgagcaagcggacgacgccagcgcgctcgcggagagcttgctggacgtcaccctcgcacctgagacgacggtgcagtcagtccccgacgtgacttcatcgccgctcgtcgaccaaaaggtaccgaccgattcccatcctacgtcatttggattcagcctcaacccgcctagcgacctcgctttggcggacgctctcgtagaggcgagtccaaaccctctggggtttcgcatgcggtcgccttgggaccggttgacggacgtctcgacctacgggccctctgggtccgaggaagacgacgggcccagcatctgttgggatttctctggacttggcaaccccagtgccatgcgggactttatgaccgcgtgtgactactgcctctccgactgttccgacggtagccgcagcctcggcgacgaggactgcggcccaagccacgaatgtttccacgtcaatctagggggtccctccgaaggcaatcatcttggcatgccgaaaggatggtgatctccctaggccagtgccccgcgtcgacatcccacgggagctagctgtggtccccgttcaggcggggggccatgacccacagctcgagcaaatccgcggggcgcaggccaggttcgacgagggagcaggggcgcttgagccgatccgccgggacgtcgggcaggcatgggtgggccaacccccggccggagaaatacatcatctgccccagggtttccagcaccgcgtcgccgacgacgccagggtcaggccgccacccgcatctagtggcgtcggccagaacctggctgccgcagcgatgcttctccgcgcgatgctggagccatcaaccaccgagggccggcgaatccagggggaactcaagaatctcctggaaggtgtcgcggtccgacgggccgagagctctgcctcccgaaggcagggatacccctcgaaacctcatgccgtgacttctcgattcatgcgggaagcctcggtatgcaccgggcgcacgcgcaacaccgcgcctgcggccccgggtcgcctcggcaacgagcaccatcaccacgaccgtcgggcccacctcgacgagagggtgcgccgaggctaccaccccaggcgtgggggacgctacgacagcggggaggatcggagtccctcgcccgaaccgcccggtccgcaggccttcagccgggccatccgacgggcaccgttcccgacccggttccgacccccgactactatcacaaagtactcgggggagacgagaccggaactgtggctcgcggactaccgcctggcctgccaactgggtgggacggacgacgacaacctcatcatccgcaacctccccctgttcctctccgacaccgctcgcgcctggctggagcacctgcctccggggcagatctccaactgggacgacctagtccaagccttcgccggcaatttccagggcacatatccgggagagtctctccgggactacatccggcgattctcgaagcagcgcaccgagctgcccaacatcaccgactcggatgtcattggcgcgttcctcgctggcaccacctgccgcgacctggtgagcaagttgggtcgcaagacccccaccagggcgagcgagctgatggacatcgccaccaagttcgcctccgaccaggaggcagtcgaggctatcttccgaaaggacaagcagccccagggccgcccaccggaagatgctcccgaggcgtcgactcagcgcggcgccaagaagaaaggcaagaagaagttgcaagcgaaacgcgacgccgccgacgcggaccttgtcgccgccgccgagtacaagaaccctcggaaaccccccgaaggtgccaacctcttcgacaagatgctcaaggagccgtgcccctatcatcaggggcccgtcaagcacacccttgaggagtgcgtcatgcttcggcgccacttccacagggccgggccacccgcggagggtggcagggcccgcgacgatgacaagaaggaagatcaccaagcaggagagttccccgaggtccgcgactgctttatgatctacggtggacaagcggcgaatgccttggctcggcaccacaagcaagagcgccgggaggtctgctcgatgaaggtggcagcgccagtctacctagactggtccgacaagcccatcaccttcgaccaagctgaccaccccgaccacgtgccgagcccggggaaatacccgctcgtcgtcgaccccgtcatcggcgacgtcaggctcaccaaggtccttatggacggaggcagcagcctcaacatcatctacgtcgagaccctcgggctcctgcgcgtcgatctgtcctccgtccgagcaggcgctgcgcccttccacgggatcattcccaggaagcgcgtccaacccctcagacgactcgaccttcccgtctgcttcggaacgccctccaacttccgaagggagactctgacgttcgaggtggtcgggttccgaggaacctaccacgcggtactgggaaggccatgctacgcgaagttcatggtcgtccccaactacacctacctgaagctcaagatgccgggccccaacggggtcatcaccgtcggccccacgtataagcacgcgttcgaatgcgacgtggagtgcgtggagtacgccgaggccctcgccgagtccgaggccctcatctccgacttggaaagcctctctaaggaggcgccagacgtgaaacgtcatgccggcaacttgagccagtggagacggttaaggccgtccccctcgaccccagcagcgacacctccaagcagatccggatcggctccgggctcgatcccaaataggaagcagtgctcgtcgacttcctccgcgtga

SEQ ID NO: 112960 - DNA, 2041 bp, Zea mays
  Clone ID: MRT4577_34507C.1
ttgggacctcgagttcgatttgagagccaccgattaacccatccatccacctcgccgccgccggagagtatggttgagcggcggtacaccgaggaggaggaggccctcgagatcaagtccctccgccgcatcatcgccgcctacgccaactatcaagacgctgcagaaagggatgtcgagagatatgagcggtcattcaaaatgcttcctacagcgcacaagaaacttcttttccacctcggtctgaagtaccaaagtctgagatggtgtatatccatgaatgcatcttttatcatgaaaatgcttgaggcgtttgaacctccttttgacatgagtcagtatatagatgctgatgttcatgctcatccatcaatcttgcatgaccatagtcatatggattgcactcattccagcgagaggggtgattgctctataattgctatctccagaagcaatttatcattggatgagcagcatgatagtcccaaagaatataccaagagacatgaaccttcaagagaaactgataataataagggaggggaagatcacatggcaggctgctcccagcctgttggcaacatggggatgtctcaaggtgcaggcattgcatgtaatggtgataaaaatacgggtgcagcagcttatttccaggataaagatgtctctgcatcttctgctattgaaaatgtagcactgcggcactgcacagcttcatcgctcaagttaaatgtacctccaattgatgttgacaaggtaagatgcatagtaagaaatatcgtgagagattggggtgatgagggtcaaaaggaacgtgatgagtgctataagcccattcttgaggagcttaatcgcctttttcctaaccggagcgatcagaggcctccttcatgtcttgtccctggtgctgggcttgggagattggctcttgatatatcttctctgggttttgtaagccaagggaatgaattctcatattacatgctgatctgttcaaatttcatcctgaaccacactcaagaagctaatgagtggtccatatatccttggatacatagcaactgcaattctctttctgacaacgatcaacttcgtcctgtttcatttcctgacattcatccctcaagtgcaggtatcacagagggattttcaatgtgcgctggggactttgtagaggtctacagcgaggaaagccaagaatctgcatgggatgctgttgtaacttgctttttcctggatacggcacacaatatcgttgaatacatcgagatcatatcaaaagttctcaaggatggtggggtctggattaatttgggtccccttctgtatcactttgctgattcatatgggccagatgatgatatgtctattgaattaagtttggaagatgtgaaaaaggttgcttaccattatggatttacaatggaggtggagaaaatgatcgagactacttacactgcaaacatgaaagcaatgatgcagaatcggtaccgtgcagcattctggacaatgaggaaagatgcatctcggtcaaaagcttgtaagcctcgttgaagtgaagatcatccatggcggacgatcaatttgtgccatcattattcactgttgtattcaaactccacacaggccgtgccagactaagttagatagatatatcagatgagctgcctgattcacagaatataattggcttaacataggaaaggaggtgctgagccacgctagctagctcatccttttctcctatattacagatattcaaactgtactatggactctgtaagaatgagcaataaactaagcagacagaagttaaaaatagaagtaacagaaatttaaaagtggcgccgttgccggggatcccgggtcgcccgcgtgacaggcgggagtctcaccactgtaacgactgggatgcctagggtttagtggatgtattgttccacgactaatgtttagtattggaagtatgatatatagtgtaattataaaactaatcgtatgaaggaggaaagataaacgaattgatcaagtctaaaaactt

SEQ ID NO: 112961 - DNA, 3882 bp, Zea mays
  Clone ID: MRT4577_34508C.1
atgtcgggtgttgtcctcgcacctgagacaacgacgggtgtcgcttcccagcaacgtgccaaccccaagcggactgatgacaccggcacccttgcgagggacttgtcggacattagtctcgcacctaagataatgacacattccatccccgatgcgacttcaccaccgtccatcaaccaggaggtaccatcagttttccaccctgttccctttagattcagcttcgatccaccaggcgaccctacttcggtgagcgctttcgcaagggcatatcctgaccttccggggtaccatatgtggtcaacatgggatcgactgacggtcgtttcaacctccggacccgcaggttccgaggaagaagacgaccccgacttcagttgggatttctccagactctgtgatcccagtgccatgcgagacttcatgtccgcatgtgaccattgcctctccggttactctgacgatggccacagccttgacgacgagggttacgacccaagtcgcgagtgtttccacatcgatcaggaggatcacgacgaagacaaccacctcggcatgccaggaaatgacgacgcccatgtgcctgcgtctcgtgttgagatcccgcgggagctagctatgctccgacaaaacatcgagcaggagtgggcaggccgagcactcgccggaggagcgcgtcatcgggcccgggacgtccagcgtaatatcattgatgatgccagggcagggctgcccccggccttcagcggggccagccataacctagctgtagcggcgatgctacttcgaacaatgccggagccatccatcaccgaggggcgacgtatccagggcgaactcaaggacctcctggaaaacgccgctgtccgacgagccgagagctctgcctctcgacggcgaggaggcccctcagagcatcatgcagcgtcctctcgacgcatgtgcgaggcctcggtccacaccgaggacacaggagactggacacctgcagcccgggatcgcctcgtcgacgagcaacaccgctgcgtccgtcgagctcgcctcgaggagaaggacgacctagtcaaggccttcgctggaaatttccaaggtacgtacgtgcaccctgggaactcatgggatctccggagctaccgccagcagccaggggaatccctgcgagagtacatccagcggttttcaaagcagtgcaccgggttgcccaacatcaccgactcgtatgtcatcggagccttcctcactagcaccagatgccgagacctggtgagcaaagtagggcataagacacccaccaaggcgagcgaattgatggacatagctaccaagttcgcctctggtcaggaggcggtcgaagccatcttccggaaggataagcaacctcagggaaggcagaaggaagacgcccccgaggcgtccgtccagcgtggcacgaagaagaagaccaggaagaaggcgcaagcaaaacgcgacgctgttgacgcggatctcgtcgctgatgccgagcacaggaatcctcggaagcctcccgaaggggccaacatgttcgacaagatgctcaaggagttgtgcctttatcacaggagtcccatcaagcacacccttgaagagtgcgacatgctccagcgttacttcaataaggaaggaccctcggcagaaggtggcagggaccaaggcaacaacaagaagggggcgacaaggaagaggagttcccggaggaaaccctcactttcgaggttgtcgggttacgagggaccggtgttgggaagaccgtgctacgccaagttcatggtcgtccccaactacacgtacctcaagctcaagatgccaaaccctaggggaaccatcaccatcggatccacgtaccgccacgcttacgagtgcgacgtggaatgtgtggagtacgtcgaggccatcgctgagtccgaagccctcatcgccgacctggattgcctctccaaagaggcgcccgacgcgaagcggcacgccggcaacttcgaaccagctgaggcggttaagtctgtctctctcaaccccagcaacgacgccagcaagaaaggccatagcgaggaggtccacaagctaatggctgcagagttcatcaaagaggtattccatccagaatggttagctaaccctgtacttgtaaagaaaaaaggtgcaacataccaaaggtgcatgaaccatgtgttcgggcaacacatcggcagaacggacgaggcttacgttgatgacatcgttgtcaaaacaaggaaagcctccgacctcctctctaaccttgagataacattcaggtgcctaagagcgaagggcgtaaaactcaatcccgagaagtgtgtcttcgaagacccccgaggcatgctcctagggttcatcgtctccgaacgaggcatcgaggccaacctagagaaaatcgcggccatcaccaacatgggacccatcaaagatttaaaaggagtacaaagggtcatgggatgccttgcggctctgagctgcttcatctcgctccttggcgagaaaggattgcttttgtaccgcctcgtaaggaaggccgagcacttcacttggactcccgaggtcgaagaagccctcggaaacttaaaggcacttcttactaatgcgcccatcttagtgcccccccgctgcgggagaagccctcttgatttacgtagccgcaaccactcaggtggtcagcgctgcgattgtagtcgagagacgagaagaggggcatgcactgctcatccagaggccggtgtacttcatcagcgaggtgctatccgagaccaaaatccgctacccgcaaatccagaagctactgtacgcggtgattctgatacggcgaaagctgcgacactacttcgagtctcatccgatgactgtggtgtcatccttcccctgggagagatcatccagtgccaagaggcctcaggtaggatagcaaaatgggtggtggaactcatgggggaaacactttcattcgctcctcggaaggccataaaatcccaagtcttggcagacttcctggctgaatgggtcgacacccaattgccaacagctccgatccaggccgaactttggaccatgtgcttcgatgggtcacttatgaaatccgaagcaggagctggcttgctcttcatctcacccctcgggaaacatgtgcgctacgtcatacgcctccattttccggcgtcaaacaacgtggccgagtatgaggccttggttaatgggttgcgcatcgccgtcgagctaggggttcggcgcctcgacgctcgtggcgactcgcagctcgttattgaccaagtcatgaagaactcccactgccgcgatcgaaaaatggaggcctactgcgacgaagttcggcgcttggaagataagttctacgggctggaactcaaccatgttgctcgacggtacaacgagactgcggatgagctggctaaaatagcctcgggacggatgacggttcccccgaacgtcttctccagggacatatatcaaccatccgtcaaactcgacgacgcacctgaacccgaggagacctcagcccagaccgaggtaccctcggccgctgagggtgaggccctgcgtgtcgagagagagcagaatggggtcacgccaaacctaaacttgcagactccatacctggaatatctcctccgagaagagcttcccctcgacaaagtcgaagctcggcgactggctcggtgcgccaagtcattcgttttactgggtgatgaaaaagagttgtaccactgtagcccctcaggcatcctccaacgatgcatatcggtcgcccaaggacaacagctgttacaagaaatactctcgggggcttgcggtcaccatgcagcactgagagcacctagagggggggtgaataggtga

SEQ ID NO: 112962 - DNA, 2700 bp, Zea mays
  Clone ID: MRT4577_34509C.1
atgccgttcggtttgaggaatgcgggcgcgacgtaccagcggtgcatgaaccatgtgttcggcgaacacatcggtcgcacagtcgaggcctacgtcgatgacatcgtagtcaagacaaggaaggcttccgacctcctctccgaccttgaagtgacattccgatgtctcaaggcgaaaggagtcaagctcaatcctgagaagtgtgtcttcggggtgccccgaggcatgctcctagggttcatcgtctccgagcgaggcattgaagccaacccggagaagatcgcggccatcaccagcatgggacccatcaaggacttaaaaggtgtacagagggtcatgggatgcctcgcggccctgagccgcttcatctcacgcctcggcgaaagaggccgagaagccctcggcaacctaaaggcactccttacaaaggcacctgtcttagtgcccccggcggatggagaagccctcttggtctacgtcgccgcgaccactcaggtggttagcgccgcgattgtggtcgagaggcaagaggaagggcatgcattgcccgttcagaggccggtctacttcgtcagcgaagtgctgtccgagaccaagatccgctacccacaagttcaaaagctgctgtatgctgtgatcctgacaaggcggaagctgcgacactacttcgagtctcatccggtaactgtggtgtcatccttccccctgggggagatcatccagtgccgagaggcctcgggcaggatcgcgaagtgggcggtggaaatcatgggcgaaacgatctcgttcgcccctcggaaggccatcaagtcccaggtgttggcggacttcgtggccgaatgggtcgacacccagttgccgacggctccgatccaaccggagctctggaccatgtttttcgacgggtcactgatgaagacaggagccggcgtgggcctgctcttcatctcgcccctcggaaagcacttgcgctacgtgctgcgcctccatttcccggcgtccaacaatgtggccgagtacgaagctctggtcaatgggttgcagatcgccatcgagctaggggtcagacgcctcgacgcccgcggtgattcgcagctcgtcatcgaccaagtcatgaagaactcccactgccgcgacccgaagatggaggcctactgcgacgaggttcggcgcctggaagacaagttcttcgggctcgagctcaaccacatcgctcggcgctacaacgaaaccgcagacgagctggctaaaatagcctctgggcgaacgacggtccccccggacgttttctcccgggatctgcatcaaccctccgtcaagatcggcgacgcacccgagcccgaggtaccctcggctcagcccgaggcaccctcggcacagcccgaggtaccctcggcccccgagggcgaggcactggacgccgaggaagagcagagcggggccacgccagatcaagattggcaggccccgtacctgcaatatctccgtcgaggagagctacccctcgaccaagtcgaggctcggcgggtagcgcgacgcgccaagtcattcgtcttgttgggcgatgaagaggagctctaccatcgcagcccctcgggcatcgtccagcgatgcacctccatcgccgaaggtcgggaattgctgcaagaaatacactcgggggcttgcggccaccacacagcgccccgagccctcgtcggaaatgctttccggcaaggcttctactggccaacggcggtggctgacgccactagaattgtccgcacctgcgaagggtgccaattctatgcgaagcggacccacctgcccgctcaggctctgcagacaatacccatcacctggcccttcgctgtatggggtctggacctcgtcggtcccttgcagaaggcgcccggaggctacacgcacctgctggtcaccatcgacaaattctccaagtggatcgaggtccgacctctgaacggcatcaggtccgagcaggcggtggcgttcttcaccaacatcatccatcgcttcggggtcccgaactccatcatcaccgaaaacggcacccagttcaccggcaaaaaattcttggatttttgcgaagatcaccatatccgggtggactgggccgccgtggctcatcccatgtcgaatgggcaagtagagcgtgccaacggcatgattctacaagggctcaagcctcggatctacaacgacctcaacaagttcggcaagcgatggatgaaggaactcccatcggtggtctggagcctaaggacgacgccgagtcgtgccacgggtttcacaccgtttttcctggtctacggggctgaagccatcttgcccactgacctggaatacggctccccgaggacgagggcctacaccgaccaaagcaaccaagctagccgagaggaatcgctggaccagctggaggaggcttgggacagggccttactacactcggtgcggtaccagcagtccctgcgacgctaccacgcccgaggggtccggtcccgagaactccaggtgggcgatctggtgcttcggctgcggcaagacgcccgagggaggcacaagctcacgcccccctgggaagggccattcgtcatcgccaaagttctgaagcccggaacatacaagctggccaacaatcaaggcgagatctacggcaacgcttggaacatcaaacagctacgtcgcttctacccttaa

SEQ ID NO: 112963 - DNA, 216 bp, Zea mays
  Clone ID: MRT4577_3450C.1
gggcgcgcctttttttttttttttgagacgcactatataatatcccccacacgcgcacataagaaccaccagaggagaagctctgctaaacacatgtgacagagcactaccaacccaatatataagacgcaagccgtcattacatcatgcatctacgccttataaaggagagccacgaggaggccctccaccagctgcagaagggcaaggcggcga

SEQ ID NO: 112964 - DNA, 2409 bp, Zea mays
  Clone ID: MRT4577_34510C.1
atgcgggactttatgaccgcgtgcgactactgcctttccgactgttctgacggtagccgcagcctcgacgacgaggactgcggcccaagtcgtgaatgtttccacgtcgatctagggggtccctccgaaggcaaccatcttggtatgccggagaacggtgatctccctaggcctgtgcctcgcgttgacatcctacgggagctagctgtggtccccgttctggcggggggtcatgacccacagctcgagcaaatccgcggggtgcaggccaggctcgacgagggagcaggaacacttgagccgatccgccgagacatcgggcaggaatgggcgggccagcctccgaccggagaagtacgtcacctaccccagggtatccagcaccgcatcgccgacgatgtcagggtaaggccgccaccgacttccagtggagtcggccagaacctggctgcagcggcaatgcttctccgcgcgatgccggagccgtcaactaccgaggggcggcgtatccagggagagctcaagaatctcccggaggacgccgcggtccgacgggccgaaagctccgcctcccgaaggcaggggtacccctcggaacatcgcgccgcgacctcccgattcatgcgggaagcctcggtccacaccgggcgcacgcacaacacagcgcctgtggccccaggtcgcctcggcaacgagcaccaccaccgcaaccgtcggccccacctcgacgagagggtgcgccgaggctaccaccccaggcgtggggggcgctacgacagcggggaggatcggagtccctcgtccgaaccacccggtcagcaggctttcagccgcgccatacgacgggcgtcgttcccgacccggttccgaaccccgactactatcacaaagtactcgagggagacgagaccagaactgtggctcgcggactaccggctggcttgccaactgggtggaacggacgatgacaacctcatcatccgcaacctccccctgttcctctccgacaccgctcgcgcttggttggagcacctgcctccggggcagatctccaactgggacgacctggtccaagccttcgccggcaatttccagggcacgtacgtgcgccctaggaactcctgggatctccgaagctgccgacagcagctgggagagtctctccgggactacatccgacgattctcgaagcagcgcaccgagctgcccaacatcaccgattcagatgtcatcggcgcgttcctcgctggcaccacctgccgcgacctggtgagcaagctgggttgcaagacccccaccagggcgagcgagctgatggacatcgccaccaagttcgcctctggccaggaggcggttgaggccctcttccggaaggacaagcagccccagggccgcccaccggaagatgtccccgaggcgtcaactcagcgctgcgccaagaagaaaggcaagaagaagtcgcaagcgaagcgcgacgtcgccgacgcggatcttgtcgccgccgccaagtacaagaaccctcggaaaccccccggaggtgccaacctcttcgacaagatgctcaaggagtcgtgcccctatcagcagggggccatcaagcacacccttgaggagtgcgccatgcttcggcgccactttcacaaggtcaggccacccgcggagggtggcagggctcgcgacgacgataagaaggaagatcaccaggcaggaaagttccccgaggtccgcgactgcttcatgatctacggtgggcaagcggcgaacgcctcggctcggcaccgcaagcaagagcgtcgggaggtctgttcggtaaaggtggcggcgccagtctacctagactggtccgacaagcccatcaccttcgaccaagccgaccaccccgaccgcgtgccgagcccgggaaaatacccgctcgttgtcgaccccgtcatcggtgacgtcaggctcaccaaggtcctcatggacggaggcagcagcctcaacatcatctacgccgagaccctcgggctcctgcgtgttgatctgtcctcgaccctcacgttcgaggtggtcgggttccgaggaacctacctcgcagtactggggaggccatgctacgcgaagttcatggtcgtccccaactacacctacctcaagctcaagatgttgggccccaacggggtcatcaccgtcggccccacgtaccgacacgcgttcgaatgcgacgtggagtgcgtggagtacgccgaggccctcgccgaatccgaggccctcatcaccgacctggagaacctctctaaggaggtgccagacgtgaagcgccacgccggcaacttcgagccagcggagacggttaaatccgtccccctcgaccccagcagcgacgcctccaagcagatccggatcggctccgagctcgatcccaaatag

SEQ ID NO: 112965 - DNA, 2646 bp, Zea mays
  Clone ID: MRT4577_34511C.1
atgggtagtctccagcaacctttccagcccgggacggtgctccgttttgggagtcttgagttcatgtccctcgacagcagctacgacatgatactccttcccccaccgcgcgacagcgacaatggcggccgacaatccgcccgccggcggcggaatcgacgacatcttccccacgtggcggaagaacgacattctagcttgtcccgtcccctcccccgccgacggaggaggaggcggggcaaccaaggccaagcaggaggcggcacctcgtcggctatcgagctagtcgacggcgctggcgccccaacggggggcacgtcgggcatcgacctcgcgtctgagacgaagacgagcgccgtctccccgcaacacgccaactccaagcaaatggacgacgccagcacgctcgcaaaggacttgctgggcatcaccctcgtacctaagacgacggtgcagtctgcccctgacacgacttcgtcaccgcccgtcgaccaagaggtaccgaccgactcccatctcgtgcattttggattcagcctcgacccaccaagcgacttcgcttcggtggacgctctcatagaggcgagtccaaaccctctggggtattgtatgcggtcaccctgggaccggctgacgaccgtctcgacctacgggccctcaggtttcgaggaagatgacgagcccgacttttgttgggatttctccgaacttggtaaccccagtgccatgcgggacttcatgaccgcatgcgactactgcctttccgattgtttcgacggtagccgcagcctcggtgacgaggactgcggcccaagtcgtgaatgtttccacgttgatctagggggtcccggcgaaggcaaccatcttggcacgccggaaaacggtgatccccctaggcctgcgcctcgcgttgacatccttcgggagctagctgtggtccctgtcccggcggggggtcatgacccacagctcgagcaaatccacgagatgcaggccaggctcgacgagggagcagaaacacttgagccgttccgccgggacatcgggcaggaatgggcaggccaacctccggccggagaagcgcgtcatctaccccagggcatccagcaccgcatcgccgatgatgtcagggcaaggccgccaccggcttccagtggggtcggccagaacctggctgcagcaacaatacttctccgcgcgatgccagagccatctaccaccgaggggcggcgtatccagggagagctcaagaatctcctggaggatgccgcggtccgacgggccgaaagctccgcctcccaaaggcaggggtacccctcggaacattgcgccgcgacttcccgattcatgcgggaagcctcggtccacaccgggcgcacgcgcaacacagcgcctgcggccccgggtcgcctcggcaacgaacaccctcaccgcaaccgtcgaacccacctcgacgagagggtgcgccgaggctaccaccccaggcgtgggggacgctacgacagcggggaggatcggagtccctcgcccgaaccacccggtccgcaggctttcagccgagccatacgacgggcgccgttcccgacccggttccgaaccccgactactatcacaaagtactcgggggagacgagaccggaactgtggctcgcggactatcggctggcctgccaactgggtggaacagacgatgacaacctcgtcatccgtaaccttcccctgttcctctccgactccgctcgggcctggctggagcatctgcggaaggccgggccacctgcggaaggtggaagggcccgcgacgacgataagaaggaggatcacaaggcaggagagttccccgaggtccgcgactgcttcatgatctacggtgggccagtggcgaacgcctcggctcggcaccgcaagcaagagcgtcgggaggtctgctcagtaaaggtggcggtgccggtctacctagactggtccgacaagcccatcaccttcgaccagggcgatcaccccgaccgcgtgccgagcccggggaaatacccgctcgttgtcgaccccgtcatcggcaacgtcaggctcaccaaggtcctcatggacggaggcagcagcctcaacatcatctatgccgagaccctcgggctcccgcggatcgatctgtcctcggtccgagcaggcgctgcgccttttcacgggatcatccccgggaaacgcgtccagcccctcggacaactcgatctacccgtctgctttgggacaccctccaacttccgaagggagaccctcacgttcgaggtggtcgggtttcgaggaacctaccacgcagtgctggggaggccatgctatgccaagttcatggccgtccccaactacacctacctcaaactcaaaatgccgggccccaacggggtcatcaccgtcggccccacgtatcgacatgcatacgaatgcgacgtggagtgcgtggagtacgccgaggccctcgccgaatccgaggccctcatcgccgacctggagagcctctctaaggaggcgccagacgtgaagcgccatgccgacaacttcgagccggcggagacggttaagtccgtccctctcgaccccagcaacgacgcctccaagcagattcggatcggctccgagctcgaccccaaatag

SEQ ID NO: 112966 - DNA, 2955 bp, Zea mays
  Clone ID: MRT4577_34512C.1
atgggcagtctccagcaacctctccagcccgggacggtgctccgtttcgggagtcttgagttcctgtccctcgacggcagctacgacatgatactccttcccccgccgtgcgacaacgacaatggtggccgacagcccgcccaccggcggcggaatcgacgacgtcttccccgcatggtggaagaacaacattcgagctcaccccgccctctcccccgccgacggaggaggaggcggggcaaccaaggccaagcaggaggcggcaccttgtcggctgtcgagcgagtcgacggcgccggcgccccaacggggggcgcgtcgggcatcgacctcgcgtctgagacgaagacgagcgtcgtctccccgcaacgcgccaatcccaagcaaacggacgacgccagcacgctcgcgaaaggcttgctgggcgtcaccctcgtacctaagacgacggtgcacctcgacccgccaagagacttcgctttggcggacgccctcgtagaggcgagtccaaaccctctagggtttcgtatgcggtcaccctgggaccggctgacggatgtctcgacctacgggccctctgggtccgaggaagacgacgtgcccgacttctgttgggatttcttcggacttggtaaccccagtgccatgcgggacttcatgaccgcatgcgactactgcctttccgactgttccgatggtagccgcagcctcgacgtcgaggactgcggcccaagtcgtgaatgtttccacgtcgatctagggggtccctccgaaggcaaccatctcggtatgccggaggacggtgatctccctaggcctctgcctcgcgttgacatcctacgggagctagctgtggtccccgttcaggcggggggtcatgacccacagctcgagcaaatccgcggggtgcaggccaagctcgacgggggagcaggaacacttgagccggtccgccgggacgtcgggcagcaatgggtgggccaacctccggccggagaaatgcgtcatctaccccagggcttccagcaccgcatcgccgacgatgtcaggatgaggccgccacccgcttccagtggagtcggccagaacctggctgcagcggcaatgctcctccacggagagctcaagaatctcctggaaggcgccacggtccgacgggccgaaagctctgcctcccgaaggcaggggtacccctcggaacatcgcgtcgcgacttcccgattcatgcgagaagcctcggtccacaccgggcgcacgcgcaacacagcgcctgcggccccgggtcgcctcggcaacgagcaccatcaccgcgaccgtcgggcccacctcgacgagagggtgcgccgaggctaccaccccaggcgtgggggacgctacgacagcggggaggaccggagtccctcgcccgaaccacctagtccgcaggctttcagccgcgccatacgacgggcgccgttcccgacccggttccgacccccgactactatcacaaagtactcgggggagacgagaccggaactgtggctcgcggactaccagctggcctgccaactgggtggaacggacgatgacaacctcatcatccgcaacctccccctattcctctccgacaccgctcgcgcctggttggagcacctgcctccggggcagatctccaactgggacgacctggtccaagccttcaccggcaatttccagggcacgtacgtacgccctggaaactcctgggacctccgaagctgccggcagcagccgggagagtctctccgggactacatccggcgattctcgaagcagcgcactgagctacccaacatcaccgatttggatgtcatcggcgcgttcctcgctggcaccacctgtcgcgacctggtgagcaagctgggtcgcaagacccccaacagggcgagcgagctgatggacatcgccaccaagttcgcatctagccaggaggcgaaaccccccggaggcaccaacctcttcgacaagatgctcaaggagccgtgcccctatcatcaggggcccgtcaagcacacccttgaggagtgcgctatgcttcggcgccacttccacagggccgggccacccgcggagggtggcagggctcgcgacgatgacaagaaggaagatcaccaggcaggagagttccccgaggtctgcgactgcttcatgatctatgacgggcaagcggcgacctcctcggctcggcaccgcaagcaagagcgttgggaggtctgttcggtgaaggtggcggcgccagtctacctagactggtccgacaagctcatcaccttcgaccaagccgaccaccccgaccacgtgccgagcccggggaaatacccgctcgttgtcgaccccatcatcggcgacgtcagactcaccaaggtcctcatggacggaggcagcagcctcaacatcatctacgccgagaccctcgggctcctgcgtgttgatctgtcctcggtctgggcaggcgctacgcctttccacgggatcatccccgggaagcgcgtccagcccctcggacaactcgaccttcccgtctgcttcggagcaccctccaacttccgaagggagaccctcacgttcgaggtggtcgggttccgaggaacctaccacgcagtactggggaggccatgctacgcgaagttcatggccgtcctcaactacacctacctcaagctcaagatgtcgggccccaacggggtcatcaccatcggccccacgtaccgacacgcgttcgaatgcgacgtcgagtgcgtggagtacgccgaggccctcgccgaatccgaggccctcatcgccgacctggagagcctctctaaggaggtgccagacgtgaagcgccacgccggcaacttcgagccagcggagacggttaagtccgtccccctcgaccccggcagcgacgcctccaagcagatccggatcggctccgagctcgatcccaaatag

SEQ ID NO: 112967 - DNA, 429 bp, Zea mays
  Clone ID: MRT4577_34513C.1
aaaataaaaaaaaaaacaaaaaaaaataaaaaaaaaaaacaaaaaaaaaaataaataaaagggaaaaacagtgaaatggtgataatcatttaatcattcctcatactccaacaaaaaaaaccaataatattatcaggcgcctccccttttaaattctcccttttttctcacccccctttccaacgttaaatctttttttttgggcccccatatttaattcccctgccctttttttaccacccgcggacctggaaaacccctcgctttccccaatttattcgctttggagaaaatcccctttttcccggttggctttttaaaaaaaacccccttccctacccccttttccaacattttcccccccttattgggtaatggaaccccccctttatcgccccttttatcccgggggttgtgttttttaccccc

SEQ ID NO: 112968 - DNA, 356 bp, Zea mays
  Clone ID: MRT4577_34514C.1
attctttttttttttaatttaataaattttaatatacgattgtttaaggggaaaaaaggaattacccactataaaataaaacaaattactttaagtattttattacacacactataaattaacttaggaaacaagggtaaaaaaataaaacaccctattaataccttcgatagcgggaaaggtataatttttctacaagataaaaactaatgtgacataacactcaaacaaaaaaggaatagaataaaaaaaaataccgaaaggcgcaaaaactaaagttttttcatttataaataacacctagggggggggagtaactcttctgactctttccaaaaaatttttgaaatggggtt

SEQ ID NO: 112969 - DNA, 3162 bp, Zea mays
  Clone ID: MRT4577_34515C.1
atgggtagtctccagcaaccttttcatctcgggacggtgctccgtttcgggagtcttgagttcatgtccctcgacggcggctacgacatgatactccttcccccgccgcgcgacaacgacaatggcggccgacaacccgcccgccggcggctgaatcgacgacgtcttccccacgtggcggaagaacaacattcgggtttgtcccgtcgcctcccccgccgacggaggaggaggcggggcaaccaaggccaagcaggaggcggcacctcgtcggctgtcgagcgagtcgacgacgctggcgccccaacgggggacacgtcgggcatcgacctcgcgtctgagacaaagacgagcgctgtttccccgcaacacgccaactccaagcggacggacgacgccagcacgctcgcgaaggacttgctgggcgtcaccctcatacctgagacgacggtgcagtccgcccctgacgtgacttcgtcaccgcctgtcgaccaagaggtaccgaccgattcccgtctcgtgccttttggattcggcctcgacccaccaagcgaccccgctttggtggaagccttcatagaggcatgcaccaaccctccggggtatcatatgcggtcaccctgggaccggctgacggtcgtctcgacctacggacccttgggttccgaggaagatgacgagcccgactttggttgggatttctccgggctcggtaaccccagtgccatgcgggacttcatgaccgcatgcgactactacctttccgattgttctgacggtagccgcagcttcggcgacgaagactgcggcccaagtcgtgaatgtttccacgtcgatctagggggtcccgacgaaggcaaccatcttggtataccggaaaacggtgatccccctaggcttgcgcctcgcgttgacatccttcgggagctagctgtggtcccagtccctgcgaggggtcaggatgcacagctcgagcaaatccgcgagatgcaggccaggctcgacgagggagcaggaacacttgagccgctccgccggaacatcgggcgggaatgggtagaccaagctccggccggagaagcgcgtcatctaccccagggcatccagccccgcatcgccgacgacgtcagggcaaggccaccaccggcttccagtggggtcggccagaacctggctacaacagcaatacttctccgcgcaatgccggaaccatcaaccaccgaagggcggcgtatccggggagagctcaagaatctcctggaggatgtcgcggtccgacgggccgaaagctctgcctcccgaaggcagggatacccctcggagcatcgcgccgcgacttcccgattcatgcgggaagcctcggtccacaccgggcgcacgcgcaacacagcgcctgcggccccgggtcgcctcggcaacgagcaccaccaccgcaaccatcgagcccacctcgacgagagggtgcaccgaggctaccgccccaggggtgggggacgctacgacagcggggaggatcggagtccctcgcccgaaccacccggtccgcaggctttcagccgagccatacgacgggcgccattcccgacccagttccgaaccccgactaccatcacaaagtactcgggggagagaaggccgaaactgtggctcgcggactaccagctggcctgccaactgggtggaatggacgatgacaacatcgtcatctgcaacctccccctgttcttctctgactccgctcgagcctggctggagcatctgcctccggggcagatctccaactgggacgacctggtccaagccttcgccggtaacttccagggcacctgccgccagcagccgggagagtctctccgggactacatccggcgattctcaaagcagcgcaccgagctgcccaacgtcaccgattcggatgtcatcggcgcgttcctcgccggcaccccctgccgcgacctggtgagcaagctgggtcgcaagacccccaccagggcgagcgagctgatggacatcgccaccaagttcgcctctggccaggaggcggttgaggccatcttccggaaggacaagcagccccagggccgccagccggaagatgttcctgaggcatccactcagcgcggcaccaagaagaaaggcaagaagaagtcgcaagcgaaacgcgacgccgccgacgcggaccttgtcgccgccgctgagtacaagaacccttggaaacctcccggaggcgccaatctcttcgacaagatgctcaaggagccgtgcccctatcatcagggacccgccgggccacctgcagagggtggcatggcccaccacgacgacaagaaggaggatcacaaggcagaggagttccccgaggtccgcgactgcttcatgatctgcggtgggcaagtggcgaacgcctcggctcggcaccgcaagcaagagcgtcgggaggtctgctcggtgaaggtggcggcgccagtctacctagactggtccgacaagcccatcaccttcgaccagggcgatcaccccgaccgcgtgccgagcccagggaaatatccgctcgttgtcgaccccgtcatcggcaacgtcaggctcaccaaggtcctcatggacggaggcagcagcctcaacatcatctacgtcgagaccctcgagctcctgcagatcgatctgtcctcggtccgggccggtgcggcgccttttcacgggatcatccccgggaaacgcatccaacccctcggacaactcgatctgcccgtctgcttcgggactccctccaacttcagaagggaaaccctcacgttcgaggtggtcaggttccgaggaacctaccacgcagtgctggggaggccatgctacgccaagttcatggccgtccccaactacacctacctcaagctcaagatgccgggccccaacagggtcatcaccgtcggccccacgtaccgacacccatacgaatgcgacgtggagtgcgtggagtacgccgaggccctcaccgaatccgaggccctcatcaccgacctggagagcctcaccaaggaggcgccagacgtgaagcgccatgctggcaacttcgagccagcggagacggttaagtccgtgcctctcgaccccagcaacgacgcctccaagcagatccggatcggctccgagctcgaccccaaatag

SEQ ID NO: 112970 - DNA, 381 bp, Zea mays
  Clone ID: MRT4577_34516C.1
agatgactacatcgcctttaaagataagacgacgggggcaaaaaagtactttgtgcggcccaacaccgacatcttgccacctccacacaccatcgatgtcattgtgacaatgcaagcacaaaaagaggcgccacctgacatgcagtgcaaggacaggtttcttgtgcaaagagtcattgctgcgtaagggaccttaatcaaggacatcactgccgatatgttcaccaaagaatcaactaatgtcgtcaatgatgctaagcttaaggtcatatacatgccaccatccaaaccaccatacccagtgcatgaagaatctgaagaaggttcatcacccacaccttcattgtccgatggaattaacttaaattatcaacagacaac

SEQ ID NO: 112971 - DNA, 2574 bp, Zea mays
  Clone ID: MRT4577_34517C.1
atgacgggcgaagtcctcgcacctgagacaacgacagatgtcgtttccccgcaacgtgccaaccccaagcggactgatgacgctagcactctcgtgaaggacttgctgggcgttaacctcgtacctgagatgacggtgcattccgtccccgatgcgacttcaccaccgtccatcgatcaaatggttccgtccgttttccaccctgtgccttttagattcagctttgatccaccaagcaaccccgcttcggtgagcgctttcgtaaaggcatatcctaaccttccggggtaccatacgtggtcatgttgggaccgattgatggtcgtctcaacctacgggcccccgggttccgaggaagaagacgaccccgactccggttgggatttctccgggctccgtgatcccattgccatgcgagacttcatgaccgcatgtgactactgcctctccggttgctctgatgatggccacaaccttgacgacgaaggttgtggcccaagtcgcgaatgtttccacgtagatctaggggatcgcgacgaaggcaaccacctcggtatgccggaggataacgatccccctgggcctacttctcgcgttgacatcccgcgggaactagatgtggtcccagtccctgcggggggtcaggacacacagctcgagcaaatccgcgagatgcaggctaggctcaacgaggaagcagggcaacttgtgcagctccggcaaaacgtcgagcaggagtgggcaggccgagcactcgccggagaagcgcgtcatcaggcccaggacgtccaacgtcgtattgttggccgaaagctttgcctcctgaaggcaagggtgcccccggagcatcgcgcaacgacttcccgactcatgcgggaggatttggtccacaccgggcgcacgcgggacaggacgcccgaagccccggatcgcctcggcaacgagcaacaccatcacgaccgtcgagcccgcctcgacgagagggtgcgccgaggctaccacccccaggcgtggaggacggacgacgacgacctcatcatccgcaacctccccctgttcctctctaactttgcccgggcctggctggagcatctgcctcctgcgcagatctccaactgggacgacctggtcaaagccttcacgggaaacttccaaggtacatacgttcgccctgggaactcctgggatctccgaagttgccaccagcagccagaggaatccctgcgagagtacatccgacggttttcaaagcagcgcaccgagctgcccaacatcaccgactcggatgtcatcggggcattcctcaccggcaccacgtgccgagacctggtgagcaaactggggcgcaagactcccaccaaggcgagcgaattgatggacatagccaccaagttcacctctggtcaggaggcggtcaaaaccatcttccggaaggataagcagcctcagggacagcagcaagaagacatccccaaggcgtccgcccagcgtggcacaaagaaaaaggccaagaagaagtcgcaagcaaagcgcgacgccactgacgcagatcttgtcgctgctgccgagcacaggaaccctcggaagcctcccggaggggccaacctgttcgacaagatgctcaaggagtcgtgcccctaccaccagggtcccgtcaagcacacccttgaagaatgtgtcatgcttcggcgctacttccataaggccgggcccccggcagaagatggcaaaggccaagacaacaagaagaaggagggtgacaaggcagaggagttcccggaggtccacggttgcttcatgatctacggtgggcaagtggcgaacggctcggctcggcaccgcaagcaggagtgccgggaggtctgctcggtgaaggtggcggcgccagtctacctagactggtccgacaagcccatcaccttcgaccaaggcaaccaccccgactgcgtgccgagcccaggaaggtacccgctcattgtcgaccctgtcatcgccaatgccaggctcaccaaggtcctcatggacggaggcagcagcctcaacatcatctacgccgagaccctcatgctcttggagatcgatctgtccacgatccgggccggtgcggcgccctttcacgggatcgtccccggtaagcgcgtcctaccccttgggcaacttgatttgcctgtctgcttcggaactccctccaacttccgcagggaaaccctcacgttcgaggtggtcgggttccgagggacctaccacgcggtgctggggagatcgtgctacgccatgttcatggtcgtccccaactacacgtacctcaagctcaagatgtcaggccccaacggggtcatcaccgtcggatccacgtaccgacacgcgtacgaatgcgacgtggagtacgctgaggccctcgccgagtctgaggccctcatcgccgacatagagtgcctctccaaggaggtgcctgatgcgaagagccacgccggcaacttcgagccggctgaggcggttaagtccgtcgccctcgaccccagcaacgacgcctgcaagcaagtccggatcagctccgagctcgaccccaaatag

SEQ ID NO: 112972 - DNA, 377 bp, Zea mays
  Clone ID: MRT4577_34518C.1
ctcctgatcggctgctctgaatagattacacgacgcacgggagtgtgacggaaagcgatgcgggtcgagcgaggaggtccatggcgaataggggacgcaccgctccaggacccttgttcgccgccgccgtctgtgatctgcgggagggtgtgaggactgaatatggggaccagcacattctgtacttcgtgcactgctggtgcgcattgtcagaacaacggatgcgtcgcagacagcggtgaacacgcatgtcgagctaaactacttcaggctacttacggacgtcgaaggccagaacatctactacgaactggacgggtacccgctgggtcattccgaggtgattcttgacggcggtgcaggagacgagacctagt

SEQ ID NO: 112973 - DNA, 754 bp, Zea mays
  unsure (1)..(754): unsure at all n locations
  Clone ID: MRT4577_34519C.1
gtggagaagaaatctcgccgccccagccatctctatccctagtgccgagctcctgcttctctacgccgacacttctttctctccttcctcagctcgacatgctctgcttggtggaggaattgctgcacgccccagcgtccttcttgctcccgacgctcggcctccagtccatccccatggccgcacccagctcctgctcggtcctgctcgtccctttccctacgcgcaggctcctctctccttcctctcgaagctttcccccatggtggctagcccctgctcggaggtcttcctagtgtcatgtccctttctgttcggtctcttcctcggatggcgctcgggctgcgccctactcccagagctcatcgtcctagccatggccgccgtcgcccttccatggtgcccctgcccggatctcgcgtgtgcccctggttcgagctcttatgccgcgcgcggcttccctgcaccgcaccctcttcagctcgcggccgtgcagctcgtcatggcgcgcctgttccctggcgctcctccctgctgtgcgcaccggctccctgcacgctgacacagctcgatttaccatgctgcgtcgcgcacacctctgctcgaccctgctcgctcctccggccatctccagctcgctggccgcgacccgnncggaggttnttcccatggccggctcattgctcaacccaagcccgagtcgngtacgaagcagcaagcctcagattcttccgcgtcgcatgcatcgactcga

SEQ ID NO: 112974 - DNA, 221 bp, Zea mays
  Clone ID: MRT4577_3451C.1
cgggccgggactcctcatttcccctaggccgccgcccccccctatccacctcctcctgcgtggttgctgcagccaacaaaaccctagccgcccccgcaatcccctactccctatgtgctactcccggccgctcgcatcatctccttttgcggcgaatcgccaatcattgtggcggcaggaagaagggaggaaggaaaaggggagaacccaacgtggggggg

SEQ ID NO: 112975 - DNA, 331 bp, Zea mays
  Clone ID: MRT4577_34520C.1
tagttctagatcgcttatcgaccgccttattttattatatatttatatttttgcaaaggaatttttcactgccaaacagtgcacaatcctaattttacatgccatggtatcctttttcgtacaaatctaaataaattggcaccaaaattatgtacttgcagtgtgtctatttaccattcactcacttactcacgccaataataaggatgcaatttttgagcataactcaactcatcatctacctacctaccttttgcatttcaccgtggctcgtgcgctacaacttgtctcttcatgttcatcttgccgccttatgaccctttcaccacct

SEQ ID NO: 112976 - DNA, 1574 bp, Zea mays
  Clone ID: MRT4577_34521C.1
ccggccgggaaaaaagggtccttcgctccttcggtcgcagcctaggaaaaaaaaacgcataatttcagattgagatcgccatggccgccatgggatggtccgacctcccctccgagctcctcaccgacatcgccggtaggatcaacgagctcgccgacatcgcccggtttcgctccgtctgctcgtcatggcgatcggcggcgcgggacgccgtggccgccccgccgccgcagccgccgtggcttctcctcccgtcgtccccgtctcggctcttcttctgcccccgggaggaccgaatctacccaaacctccgcctgccccgccccgccgcagaggtgcaccaccgccgcccccgcccccacctgtacgcgtccccgcatggatgggtgctcgccatcgacccgacagatctggctgcttccctcgtccatcccttcaccggcgccacccgcccgctcccgccgctccccttcttcttcgcggagacggaggacctggcctgggactggtctccgcacggcgtcatggcgtccagcggcgaaggcctgctcttctgcgccgccgatccgacgacagccgcctcctggtccccgatccgtgcactgtacgattgcaacgccagcagcatcaactacgccggcggcaagttcttcgtcttcgaggaggacgtctgccgcaccaccatcgtcgacgcggtcacccttgccatcgccgccgtgatcccggcccccgccgtcgagctccccgccgaggcgcgcgtcgctgtcgccggcgacgagctcttcctcctcgtcaagtcaaagtggatgtacctcttcagcgacgacgttgacttctcgaaggccttccatgtcaaccaccgcagcgtcaattcagcctggcaggagctcacaggcatcggcgagcgtgcgctattcgtagattcccaccacgggttcgcagtgccgacggcggggtttggcaatctcgagagcaacacaatctattcagtgagcagcaagaaggtgaactacagcgtttcggcatttagcctggagacccgtacctcgaagaaacttgcgtgccgcctcaacgaccaggagatggcgatgcgtggtgagatgccatcgtggatcgtaccaagattggatgaagtctgaatctgcagggttgggagattcatcattgttgtgcaatcactgttgatatatggttctaggtaatttcttcggtatccttgcagttcgaaccagcaataatccctatataagttcactcctgtaaattcttgattctgtcgtttaaagttttcttgataatcatgcagtccagtagatttgggtcatatttgtaggaaaattgccttcaaattcagtatactgtgttgatgttctagtttaataaaggattgtatgttctgttcattctcaagcttaaataaaggtttgccatatcagagttgagcgttttaattgagcttaatatttaatttgagacttgaaatttgattgtaatccactattatgtgaatcaaaagcctttcttttttgttcttacaacagatgcacaaactgaatggcaaatgggacgcgccc

SEQ ID NO: 112977 - DNA, 398 bp, Zea mays
  Clone ID: MRT4577_34522C.1
gaacaccaaaactggaaacgaacacgagcgggggagctcgcggacccgaaaatcctaaccccacgcacccacctggtggaggcaggggagggaatggcagacggcggtggataaggaggacctcctgcggcgtctgacgcgctcaaggaccaagggaatgagcagctcaaggcggtgagatacctaaaggatggcgcgctatacacgcaggccataaagctagaccccgacaacggcaccctgtacagcaaccgagcatgaacattcctagcatttgttaagcttagcaaaacgcttggtgatgcatagacaacagtcacgctgagagcacaatgggagaagggtactttcaggaaaggttgtatcttgaaggccatggagcgctatgaataggcgat

SEQ ID NO: 112978 - DNA, 807 bp, Zea mays
  unsure (1)..(807): unsure at all n locations
  Clone ID: MRT4577_34523C.1
gctcnccctctcgcccgtcgttctcgtccttgtcgtgtgtctcgcgccttgtcctttcggtgggggggggtttgttgtcggcggcgctggcggcgnngctggcgctgttgcgcgccgggtggcgcgtgcggcggcgttcgncttggggcgcggttgctcctctcccggnggtggtggnnngtggctggctgttcgtngttccgcccctcggctttgtntgggtgcctggtggtttccgggcggctcttttncgcccgcctggctggccttccccgccgctctcgcgtcttctggnnggggcttgnttgcgtctngccngtttggccccnccgcgccgggcctcccggncgcgggccttggctttgcgcgctctttcggcgntgnnttttttgcntggnnctccgcnngcnnnnntgnnccccnnggcccccccctccccggntctnnngnctcccttgcctccccctggccccgccccgccttctccctngtncctctcccctcctccctccnctcncccgccccccttcctcccttcctttctctcccnnntcccncttccctgcnnnncccccccccccccccccccngcccccccnncncccccccccttccnncctccnccccccccccnnccccccnntccttccccccccccccccccnncncccccccccccccccccctncccccccccccccnccccccccccccccccccccccccccccccccnnnncccccccccccccccccccccnnnnccccccccccncccccccccctccccccccccnccctccccccc

SEQ ID NO: 112979 - DNA, 1376 bp, Zea mays
  Clone ID: MRT4577_34524C.1
taccggtccggaattcccgggtcgacccacgcgtccgccatggtgtccaatacgctgcacgcggctgccatcctgctgcgcgagggcggtgattgggactggttcatcaacctctccgcctccgactatccactcgtcacccaggacgacctgttgcatgtgctctccgagttgcccaggcagcttaacttcattgagcataccagtgacatcggatggaaggagtaccagagggcgaaaccggtgatcatcgaccctgggctatacagcctgcagaagtctgacgttttctggataacagagaaacggagtgtcccaactgcgttcaagctcttcactggctcggcatggatggtgctcacccaccagtttatcgaatactgcatatggggatgggacaatctcccaaggacagtcctgatgtactacgccaatttcctttcctcgccagagggctacgttccacacggtcatctgcaacgtgccggagttccgcaacaccacagtcaaccatgacctgcatttcatttcctgggacaacccaccgaagcagcaccctcactacctcacgctcgctgacttcgacggcatggttaacagcaacgcgccctttgcaaggaagttcgggagagaagaccccgtgctggacaagatcgaccaggaactgttggcccgccgacctgatggatttgtgcctggtggatggacagacctactgaacacaactgagaaagggaaacccttcacggttgagcgcgtgcaagatctccgcccaggtcctggtgtggacagattaaagaaactcgtcacaggattgctcacccaagaaggttttgatgacaagcattgcctgtgaaactcccagtaagatgattctggggcagtaggttacacgctcaaatttgagggcatcgggccatttgctaggaatgcccctactagctgaggcagcagcacattagcgtcatgtacgcgaggatgcaacgataaggaaggtgctcttacagacaactgcttgagttgagttaccgtacagcaggagaccacggatgtagcagtcggagatgattatacagaactagtagctcattagtttatgttagatgattataatcagcccccccaaccatgaataatgttggaatttttgacatctctgcgcccgagggttgtgcaaggtagcccattctttgtttcgaagccatggcgcctggtgcaccagctggtagcgtgagacttcgttgtattgactagtggatgtttctgggtaaactgatacatttgattgcacacatgtattgatttgtttcttttccgaaaaaaaaaaaaaaaaaagcggctttgatgagtatagcgaaaatgctcgtgctgttttc

SEQ ID NO: 112980 - DNA, 395 bp, Zea mays
  Clone ID: MRT4577_34525C.1
tcgaggccggccgggccgggacatcgctgaccgcgacgcgatcgccatatcgcaatgctctatgtctgcctgcgctgagggagaggaacaagaggatgcgccgtggctacgcccatgacgcggatcccaggcaacacccaggatgcaggcgcgccactgctcggcggatgggcagcgcaagaaggccgaggagcaccacaagaaggaggagggggagcaccacaagaaggacggcggggagcataaggaaggcatcgtggagaagatcaaggacaagatcaccggcgagcacggcgacaagtccggcgaccacaaggaaaagaaaaaaaaaaaaaataaaaaaaaaaaaaaaaaaggtccctagggccctcgagctcgcccttatggccctctaa

SEQ ID NO: 112981 - DNA, 292 bp, Zea mays
  Clone ID: MRT4577_34526C.1
tgggtccctccaggccggccgcgctcgtgtgtctggaaccctagccgccatatctcacgatccactcgagcaccaagccgagggaaggtgaggagcgatggcgcgcgcgctgtccgcgaagggcgccgcggtcgcgagcaagaagaaggggtcggtttccttcacgatcgactgcaccaagccagtggaggacaagatcctggaggacgcctcgctcgtccaactcctgcacgaccgcatcaacgtcgcccgcggcaaagatggcaacctcggagactccgtcaccatctct

SEQ ID NO: 112982 - DNA, 269 bp, Zea mays
  Clone ID: MRT4577_34527C.1
gttacgcgtgcggatacggcaggcgcgggcggcattcttcagggagtgctggttttacgtacgctagacattcaaacggcgcacctcataggccattcacatcggttacctgatcgcgccaatctgaccaatgtgcaaatggggcaaactattgatgtctggagaagggctatctgaccgaaaggtagcgatccgagcatgggggcattccggcagcgtaccttagatgtgctgccagaacacgggtcgtggctgcactagtcggttgc

SEQ ID NO: 112983 - DNA, 762 bp, Zea mays
  unsure (1)..(762): unsure at all n locations
  Clone ID: MRT4577_34528C.1
aattcggcacgaggaccgtttcagcaccaagcaccgtttcagcaagtgccatatcagcaacagcagacacccatgccaaatcagacacatcagtaccacagcgtgcatcctcaacacatgccgtacccgcatggtccttacatgcaacctcagcagcaacagcaggccccaccatattcataccaggcagaccagcagccacagatgccacaaactacctataatcaagctcagcagccaccgatgccgcaaccttcctacaatcaaggtcagaatcagcagccaccgatgccgcaaccttcctacaatcaaggtcagagtcagcagccacccatgccacaaccttcctacaatcaaggtcaagtccagcagccaccaatgccacaaccttcctacaatcaaggtcagcaatccatgatgccgcagtctgcctacaatcaagttcagcagcctcaaattcctcagagttataatcaaagccagcaaccgccgggagttaggattcctcagagtcaggggcagcatcctcaacaatctttgagctttcaccacccttcccaagcttcgcagtcgccacaggtttctcaacctcaaggacttaaaatgacatctcaacaaggccaaccgcagcatggatntggcgttcattcagcatggaaaatcaccactgtcacatgggcaacaaagtccattgntgaaggatgatgatgggcttcatgaaggcaagcggactggattttcattaccacttagccagcagca

SEQ ID NO: 112984 - DNA, 111 bp, Zea mays
  Clone ID: MRT4577_34529C.1
gtcgacgttttgtggtgtgacaatttgggtgctacatacttgagttctaatcctgtgttccatgctcgtaccaagcatatagaagtggatttccattttgttcgagagaag

SEQ ID NO: 112985 - DNA, 768 bp, Zea mays
  Clone ID: MRT4577_3452C.1
gccggccgggcctgggaacgaaagcacgacaaaccacccgatccgcaaccatggccaccgaactcactgtccagtcggagcgcgctttccagaagcagcctcacatcttccttaaccacaaggtcggcggaccgcgcaagaacacccgctccaggagatggtacaaggacgttggtctgggcttccgtacgcccaagactgccattgagggtacctacatcgacaagaagtgccctttcaccggcatggtctccatccgtggccgtatcctcaccggtaccgtcatgtccaccaagatgcaccgcaccttgatcatccgccgtgaatacctccacttcatccccaagtactcccgttacgagaagcgccacaagaacctcgccgctcacgtctcgcccgctttccgtgtcgagcctggtgaccaggtcgtcgttggccagtgcaggcccctctccaagaccgtccgcttcaacgtcctccgtgtcctcccccgaaagggaaaggctgctaagcagttcaacaagttctagatgcattttagaaaagggatggtgtaacggttcatgatcagcaaaggaaagaaatgtggctgaggcggagcgtgaatggttttcgatatggtcgtcaaaactcggcatcagggttgaggaatctggagtccatgggccatgtatgtttcttcagctacgatcaatgaaagtcctcgagtggtcaaacaagcccacgaggcgggtcaaaaagtccaaaaaaaaaaaaaaaaaaggccct

SEQ ID NO: 112986 - DNA, 2856 bp, Zea mays
  Clone ID: MRT4577_34530C.1
atggcggccgacaacccgcccgccggcggcggaatcgacgacatcttccccgcgtggtggaagagcaacattcgggctcactccgttccctcccccgccaacggaggaggaggcggggccatcaaggccaggcgggaggccgcgcttcgttggccgtcgagcgaatcgacgcccccgatgccccgacggagggcacgccagacgtcgacctcgcgttcaagacgaaggcaagcgccgtccccccgcgacgcgctgaccccgaacaagaagacgacgccagcgcgctcgcggaaagcctgcaggacgtcgccctcacttggcaaccccagtgtcgtgcgggacttcatgaccgcatgtgactactgcctctccgactgttccgacggaagccgcagccttggcgacgagagctgcggcccaagctgcgaatgtttccacatcgagctaggggatccctccgaaggcaaccatcttggcatgccggaggacggtgatctccctaggccggcgcctcacgccgacatcccacgggagctagctgtggtccccgctccggcggggggttacgacccacaactcgagcaagtccgcgaggcgcaggccaggctcaacgagggaacaggagcgcttgagccgatccgtcgggacgtcggacaggcatgggtgggccaacccctggccggagaaatacgtcacctgccccaaggtctccagcaccacgtcgccaacgataccagggtcaggccgccgcccgcatccagcggggttggtcagaacctggcagccacagcgatgctcatccgcgcgatggcggagccatcaaccaccgagggtcggcgaatccagggagagctcaagaatctcctggaaggcgctgcggcccgacgggccgagagcactgcctcccgaaggcaaggatatccctcggaacctcacgccgcgacttcccgattcatgcgggaagcctcggtctacaccgggcgcacgcgcaacaccgcgcctgcggccccgggccacctcggcaacgagcaccatcgacgcgaccgtcgggctcacctcgacgaaagggtgcgccgaggctaccaccccaggcgtgggggacgctatgacagcggggaggatcggagtccctcgcccgaaccacccggtccgcaggccttcagtcgggccatccgacgggcgccattcccgacccggttccgacccccgactactatcacgaagtactcgggggaaacgagaccggaactgtggctcgcggactaccgccttgcctgccaactaggtgggacggacgacgacaacctcatcatccgtaacctccccctgttcctctccgacactgctcgcgcctggttggagcacctgcctccggggcagatctccaactgggacgacttggtccaagccttcgctggcaatttccagggcacatacgtgcgccccgggaattcctgggaccttcgaagctgccggcaacagccgggggagtcgctctgggactacatccggcgattctcgaagcagcgcaccgagctgcccaacatcaccgactcggatgtcatcggcgcgttcctcgccggcaccacttgccgtgacctggtgagcaagctgggtcgcaagacccccaccagggcgagcgagctgatggacatcgccaccaagttcgcctctggccaggaggcggttgaagctatcttccgaaaggacaagcagccccagggccgcccatcggaagaggctcccgaggcgtctgctccgcgcggcgccaagaagaagggcaagaagaagtcgcaattgaaacgcgacgccgctgacgcggaccttgtcgccgccgccgagtacaagaaccctcggaagccccccggaggtgcaaacctcttcgacaagatgctcaaggagccgtgcccctaccatcaggggcccgtcaagcacaccctcgaggagtgcgttatgcttcggcgtcacttccacagggccggaccacccgccgagggtggcagggcccgcgacgacgacaagaacgaagatcacccagcaggagagttccccgaggtccgcgactgcttcatgatctatggagggcacacggcgaatgcctcggctcggcatcgcaagcaagagcgccgggaggtctgctcggtgaaggtggcggcgccagtctacctagactggttcgacaagcccatcaccttcgaccaggccgaccaccccgaccatgtgtcgagcccggggaaatacccgctcgtcgtcgaccccgtggtcggcaatgtcaggctcaccaaggtcctgatggatgggggcagctgcctcaacattatctacgccgagaccctcaggctcctgcgcgtcgatctatcctccgtccgagcaggcgctgcgcccttccacgggatcatccctgggaagcgcgtccagcccctcgggcgactagacctccccgtctgcttcgggacgccctccaacttccgaagggagaccctgacgttcgaggtggtcaggttccgaggaacctaccacgccgtactagggaggccatgctacgcgaagttcatggccgtccccaactacacctacctgaacctcaagatgctgggccccaacggggtcatcaccgtcggccccacgtacaaacacgcgttcgaatgcgacgtggagtgcgtggagtacgccgaggccctcgccgagtccgaggccctcatcgccgacctggagaacctctccaaggaggtgccagacgtgaagcgccatgccggcaacttcgagccagcggagacggtcaaggccgtccctcttgaccccggtggcgacaccgccaagcagatccggatcggttccgggctcgaccccaaatag

SEQ ID NO: 112987 - DNA, 447 bp, Zea mays
  Clone ID: MRT4577_34531C.1
cgtacttacttggatccttaacggccggggggggggggttttttttttttttttttttttgttgtttttttttttagaaagggctttcttttggccggtggtgtggggcgttccccagaaataaaaaagggccttttttaaagggggcccccccaagaagggttgtttgtaaaacaggggggggggggggaaaacaagttggttgaatggccacaattgttgccgttgtaagagggggcccccgtttggggccacgtgctggttgaaccggaacaactgggggtgggtcaaaaaaggagcaggggttacacccactaactggctgaaagggagaaattggtgctcgggcccctggggccaccccggaatttcgggccgggacctggaggggttccaactttccctataggggggggtattaaagcttgggggaatcaagggcataac

SEQ ID NO: 112988 - DNA, 2466 bp, Zea mays
  Clone ID: MRT4577_34532C.1
atgcgggacttcatgaccgcatgtgactactgcctctccgattgctccgatgatggccacagccttgacgatgaggactgtggcccaagtcgcgaatgtttccacgtcgatctagggggtctcgacgaaggcaatcgccttggtatgccggaggacggcgatccccctaggcctgcgcctcgcgttgacatccttcgggagctagttgtggtcccagtccctgcggggggtcaggacacacagctcaagcaaatccgcgagatgcaggccaggctcgacgaggaagcaggaccacttgtgcagctccggcaaaatatcgggcaggagtgggcagtccgagcaccacccggagaagcgcgtcatctggcccaggacgtccaacaccgcatcgccgacgatgccagggcaaggctgcctccagcttccagtggggtcggccagaacctggctgcagcagcaatactactccgagcgatgccgaaaccatccaccactgaggggcggcgtatccagggagagctcaagaatctcctggaagatgccgcggtccgacgggccgaaagctctgcctcccgaaggcagggataccccctggagcatcgcgccgcgacttcccgattcatgcgggaagcattggtccacaccgggcgcacgcggaacacagcgcctgcggccctgggtcgcctcggcaacgagcaccaccgccgcgaccgtcgagcccacctcgacgagaaggtgcgccgaggctaccaccccaggcgtgggggacgctacgacagcggggaggatcggagcccctcgcctgaaccacccggtccgcaagctttcagccgggccatacgatgggcgtcgttcccgacccggttccgaaccccgactaccatcaccaagtactcgggggagacaaggccggaactgtggcttgcggactaccggctggcctgccagttgggtggaacggacgatgacaacctcatcatctgcaaccttcacctattcctctccgacgccgcccgagcctggctagagcatctgcctcctgcgcagatctccaattgggacgacctggatctccgaagctgccgccagctgccgggagagtccctgcgggactacatccgacgattttcgaagcagcgcatcgagatgcccaacatcaccgactcggatgtcatcggcgcgttcctcgccggcaccacttgccgtgacctggtgagcaagctgggtcgcaagactcccaccagggcgagcgagctgatggacatcgccaccaagttcgcctctggtcaggaggcggtcgaggccatcttctggaaggacaagcagccccaggggcgccagccggaagacgtccctgaggcgtccgctcagcgcgacacgaagaagaagggcaagaagaagtcgcaaacgaaacacgacgccgccgacgcagaccttgtcgccgccgccgagcacaggaaccctcggaagcctcccagaggcgccaacctgttcgacaagatgctcaaggagtcgttcccctatcatcagggtcccgtcaagcacacccttgaggagtgcgttatgctttggcgctacttccacaaggtcgggcccccgatggaaggtggcagagcccacaacaacgacaagaaggaggatcacaaggcagaggaattccccgaggtccacgactgcttcatgatctacggtgggcaagtggcgaacgcctcggctcggcaccgcaagcaagagcgtcgggaggtctgctcggtgaaggtggcagcgccagtctacttagactggtccgacaagcccatcaccttcgaccaaggcgaccaccccgaccgcgtgccgagcccagggaagtacccactcgttgtcgaccccgtcatcggcaacgtcaggcttaccaaggtcctcatggacggaggcagcagcctcaacatcatctacgtcgagaccctcgggctcctgcagatcgatctgtcctcgatccgggccggcacagcgccctttcacgggatcatccccgggaaacgcgtccaaccccttgggcaactcgatctacccgtctgcttcgggactccctacaacttccgaaaggaaaccctcacgttcgaggtggtcgggttccgaggaacctaccacgcagtgctagggagaccatgctacgccaagttcatggtcgtccccaactacacctacctcaagctcaagatgtcgggccccaacgaggtcatcaccgtcggctccacgtaccgacacgcgtacaaatgcgacgtggagtgtgtggagtacgccgaggccctcgccgaatccgaggccctcatcgtcgacctggagagcctctccaaggaggtgccagacgcgaagcgccacgccggcaacttcgagccagctgaggcggttaagtccgtccctctcgaccccagcgatgacgcctccaagcagatccggatcggctccgagctcgaccccaaatag

SEQ ID NO: 112989 - DNA, 279 bp, Zea mays
  Clone ID: MRT4577_34533C.1
ctgttcgtgggtttcttattgcatttttcttgatttattatcttagtgttttcaaaggggaattgaaagtttggttattctcattctcttggtgtttgaacagaccaggggggggtattacccaattttgacccccaaccctttggtggggggggaaaacaattcctaaaaatttttgcaatagttgaatcctggtgggcggaaacaaaaaaatgctccaattggcaccaggggggctgggggccctttaagaaactggggggggagaaacaagcaaaa

SEQ ID NO: 112990 - DNA, 3042 bp, Zea mays
  Clone ID: MRT4577_34534C.1
atgggcagtctccagcaacctctccgacccgggacggtgctccgtttcgggagtcttgagttcatgtccctcgacagcagctacgacatgatactccttccaccgccgcgtgacaacgacaaaggcggtcgacaacccgcccgccggcggcggaatcgacgacatcttccccgcatggtggaagaacaacattcgagctcgccccgtcctctcccccgccatcggaggaggaggcggggcaaccaaggccaagcgggaggccgcgcttcatcggctgtcgagcgaatcgacgtccccagtgccccaacggagggcacgccgggcgtcgacctcgcgtttgagatgaaggcgagcgccgtccccccgcgacacgccaatcctgagcaagtggacgacgccagcgcactcgcggagagcttgcaggacgtcgccctcgtacctgagacgatggtgcaaccagtccccgacgcgactatgtcgctcctcgtcgaccaaaaggtaccgactaattcccatcttacatcatttcgactcgacctcaacccgcctagcgaccttgctttggcgggcgctctcgttgaggcgagtgcaaccccactggggtttcctatgcggtcgccttgggaccggttgacggacgtctcgacctacgggccctctgggtccgaggaagacgacgatcccagcatctgttgggatttctccggatttgacaacctcagtgccatgcgggactttatgaccgcatgtgactactgcctctccgactgttccgacggtagccgcagccttgacgacgaggactgcgacccaagccgcgaatgtttccacgtcgagctaggggatccctccgaaggcaaccatctcggcatgccggaggacggtgatcctcctaggccggtgcctcgcgccgacatcccgcgggagctagctgtggtccccgttccggcggggggtcacgacccacaactcgagcaagtccgcggggcgcaggctaggctcaacgagggagcaggagcgcttgagacgatccgccgggacgtcgggcaggcatgggtgggccagcctccggccggagaaatacgtcacctgccccaaggtttccagcaccgcgtcgccaacgacgtcagggtcaggccgccgcccgcatccagcggggacggtcagaacctggcagccgcagcgatgctcctccgcgcgatgccggagccatcaaccaccgagggtcgacgaatccagggagagctcaagaatctcctggaaggcgctgcggcccgacgggccgagagctctgcctcccgaaggcaggggtacccctcggaacctcatgccgcgacttcccgattcatgcgggaagcctcggtctacaccgggcgcacgcgcaacaccgcgcctgcggccccgggccacctcggcaacgagcaccatcgtcgcgaccgtcgggcccacctcgacgaaagggtgcgccgaggctaccaccccaggcgtgggggacgctatgacagcggggaggatcggagtccctcgcccgaaccacccggtccgcaggccttcagtcgggccatccgacgggcgccgttcccgacccggttccgacccccgaccactatcacaaagtactcgggggaaacgagaccggaactgtggctcgcggactaccgcctggcctgccaactgggtggaacggacgacgacaacctcatcatccgcaacctccccctgttcctctctgacactgctcgcgcctggttggagcacctgcctccggggcagatctccaactgggatgacttggtccaagccttcgccggcaatttccagggcacgtacgtgcgccccgggaattcctgggacctccggagctgccggcaacagccgggagagtcactccgggactacatccgacgattctcgaagcagcgcaccgagctgcccaacatcaccgactcggatgtcatcggcgcgttccttgccggcaccacctgccgtgacctggtgagtaagttgggtcgcaagacccccaccagggcgagcgagctgatggacatcgccaccaagttcgcctctggccaggaggcggtcgaggctatcttccgaaaggacaagcagccccaggaccgcccatcggaagaggctcccgaggcatctactcagcgcggcgccaagaagaaaggcaagaagaagtcgcaatcgaaacgcgacgccgccgacgcggaccttgtcgccgccgccgagtacaagaaccctcggaagccccccggaggtgctaacctcttcgacaagatgctcaaggagccgtgcccctatcatcaggggcccgtcaagcacaccctcgaggagtgcgtcatgcttcggcgccacttccacagggtcgggccacccgcagagggtggcagggcccacgacgacgacaaaaaggaagatcaccaagcaggagagtaccccgaggtccgcgactgcttcatgatctgcgatgggcatgcggcgaatgcctcggctcggcatagcaagcaagagcgccgggaggtctgctcggtgaaggtggtggcgccagtctacctagattggtccgacaagcccatcaccttcgaccaagctgaccaccccgaccacgtgccgagcccggggaaatacccgctcgtcgtcgaccccatcgtcggcgacgtcaggctcaccaaggtggtcgggttccgaggaacctaccacgcggtactggggaggccatgctacgcgaagttcatggccgtccccaactacacctacctgaagctcaagatgccgggccccaacggggtcatcaccgtcggccccacgtacaaacacgcgttcgaatgcgacgtggagtgcgtggagtacgccgaggccctcgccgagtccgaggccctcatcgccgacctggaaaacctcaccaaagaggtgccagacatgaagcgtcatgccggcaacttcgagccagcggagacggttaaggtcgtccctctcgaccccagtggcgacacctccaagcagatccggatcggttccgggctcgaccccaaatag

SEQ ID NO: 112991 - DNA, 361 bp, Zea mays
  Clone ID: MRT4577_34535C.1
tcaggaatatatgctcggggatcaagattcgttttccatgaggaagagcgggggaagggacaaactagctgattggcgctagtttgaagctgctccaggaaaagcggattccctccctccctcccatactccatagctgagctgttctctctctctctctctctctctcctagttgttggaatattccgataaagccacgacgccccgcccaggagaacatgttctgaaaagctgtcgaggaatataattaccctggtgggggggtcctggatcggctttgaatggatgagccagaggcagagcagagcatgtggtggttggacatgggtcacttaatattgcccggttcggcgccagatg

SEQ ID NO: 112992 - DNA, 714 bp, Zea mays
  Clone ID: MRT4577_34536C.1
atgaaggtagcggcgccggtctacctagactggtccgacaagcccatcaccttcgaccaaggcgaccaccccgactgcgtatcgagcccaggaaggtacccgctcatcttcgaccctgtcatcggcaacgccaggctcaccaaggtcctcatggacggaggcagcagtctcaacatcatctacgccgagaccctagggctcttggggatagatctgtccatgatacgggccggtgcagcaccttttcacgggatcgtccccgataagcgcgtcctgcccctttggcaacttgatttgcccgtctgcttcagaactctctccaacttccgaaaggaaaccctcacgttcgaggtggttgggttccgagggacctatcacgcggtgctgggaagaccgtgctacgccaagttcatggtcgtccccaactacacgtacctcaagctcaagatgacaggccctaacggaaccatcaccgtcggatccacgtaccaccacgcttacgagtgcgacatggaatgcgtggagtacgctgaggccatcgtcgagtctgaggccctcatcgccgacctggattgcctctccaaggaggtgcctaatgcaaagcgccacgccggcaacttcgaaccagctgaggcggttaagtccgtccctctcgaccccagcaacgacgccgacaagaaagtcaggatcggctctgagctcgaccccaaatag

SEQ ID NO: 112993 - DNA, 1770 bp, Zea mays
  Clone ID: MRT4577_34537C.1
ccacccgccgattcactcgctcgcgcggccgcgactccagcctcccctaaatccgctcgctcgcgcccagcgaggaggcggggtcgcagcgagcgaagattccctccgaatcctctcctccaaaaacttccgatccgcttacgatggctacgcagcagcagcacgcggggccggcgtccgggtcggcgtcggcgtcggcgtgagctctagctcggggctgcaccttcccgcctcgccctcggccttcggggacaccacccacaccaaggttttcgtgggcggtctcgcctgggagaccaacagcggcaggctccggcgcttctacgagcgtttcggggacatactcgaggccgtcgtcatcaccgaccgccactctggccgctccaagggatacggattcgtgacattccgtgaagccgagtccgcgaggaaggcatgcgaggaccccacaccagtgatcgacggcaggcgggccaattgtaacctggcttcgttgggtcgagcccagcatcccgtgccccctgggcggccaagttcagctgggtcctactttggtgtcccagttccaagggctttctatttaggaggttatggccacacccgaccgtttccacttgggtactaccaaggatttcctgttccccagtacagttacccttcatatgggaccgaatacatctatccacagggtacattaaactcatattccggtcagcaatatcttcctatttatggagtctcagctgcagcgaacacatccaaccaagcatttagccagctgagtccatccgtttccggtggtggcaatggttatttgtcggttcatagttacaacgtgcctggaaatcaatatgtgcagctcactggatccaacttcagcggtgcatcaccaaccgctcgaccttccattcagacttcttttttagtagcaacacccgttcctgcacatccacacctaataattccagccccctcaccccagtttacacaagctagtggttcagaccaaagtgcaagttgaactgtgcatccaaacatttgtaccttgaggtacccttagattgcagcaggactaaaaagagcagtgttgctgtattcacagcatttgttcttgcctggcaagagatcatccttgcattcataaggttgtcgttatcatggtcaacagatgtacctggaaaccatgaagttgcccctatggatggggcaagtgatccaagagtaacagttgctcttgcagtttcgctcagtttaaatcgcaagcgtgatggaaatgtagcttatgctggaatggagtccagcatatgtaagatggattaatccaatggagatcagccttcaggtgattgtgcatctgaaaattcgtgttggtgtgtggtccctagtcccagtcaccgtgcacagggtctgatgatcaagaagtgtgtcctgtcctgtacaagtctgcagtcatcaactcatcaccccgttgtctgcatgactagggatccaacagcctttggacctaatatgcagtcatcattgtgttgtttacactactggttgtagccagtgatggtcattggtttgccccagtctcccaatttaaggtgtgatttatgtgtgtattgctctgtgtttggtggttccaagcatagagcggttctcttgtacttcaaaataaagccatttaatgggaatcccatgacgctggtgccagtgatatgtgctagactgacaatgtgtacctgtgatttatgaattatgacccttttaccgttccattttatc

SEQ ID NO: 112994 - DNA, 811 bp, Zea mays
  Clone ID: MRT4577_34538C.1
atatccaacatgcgccggccgccggccggcctcgctacttcttgattcctggaaaggccggacctttctccccctcgcactgatcggcggcgccctttgatgcgagaataaggagggttccgttccgtcaggcatttcttccgtcttctctcagccgtgctggttgtcaggggcgagccgatgaggcggcatgggtggcagctcccttaccaccctctccaggtggtcgccgtgtccgtgttcgtggcgctggcgttcgcgttctacgtcttcttcgcgccctttgttgggaggaaggtcttccaggatgccgccatggggctctacactcctctggttttatgtgtattctttctgtacatctggtgtgctgcgacggatccagcagatccaggggtcttcaaatcaaagaagtaccaaagattgtatggaggctgcaagcataggcgcctgaaggagtccatacaaggtgtttcagatgttggattacgactagagggaactggagaaaagagagaacatgaggttgctgatgctaatgaaaagtcaatgactgaactgaagaacaaaagctcatcttgctgcagtgcaattttctctgcatttctccttatattccgccctctttcttttgttttttcctgctgccaatcacgtgaatggtcctctgagcagcaagacagtgaagatgggatgtttttctgcagcctttgtgaagtcgaggtgtttgagtacagtaagcattgcagagtttgtgacaaatgtgttggacggttttgatcatcactgcaggtggctcaacaattgtatc

SEQ ID NO: 112995 - DNA, 3216 bp, Zea mays
  Clone ID: MRT4577_34539C.1
atggtgctccgtttcgggagccttgagttcatgtccctcgacggcagctacgacatgatactccttccaccgccgtgcgacaacgacaatggcggccgacagcccgcccgccggcggcggaatcgacgacgtcttccccgcgtggtggaagaacaacattcaagctcaccccgtcctctcccccgccgacggaggaggaggcggggcaaccaaggccaagcaggaggcagcgcctcgtcggctgtcgagcgagtcgacggcaccagcaccccaacggggggcgcaccgggcatcgaccccgcgcttgagacgaagacgagcgccgtctccccgcaacgtgccgattccgggcaaacggacgacgccagcgcgctcgcgaaaggcttgctggacgtcacccttgtacctgagacgacggcgcagtcagtccccgacgtgacctcatcgccgcccgtcgaccaaaaggtaccgaccgattcccatcccacgtctttcggattcagcctcgacccgcctagcgacttcgctttggcgggtgctcacgtagaggcgagtccaaaccctctgaggtttcgtatgcggtcaccttgggaccggctgacggacgtctcgacctacgggccctctgggtccaaggaagacgacgagcccagcatctgttgggatttctctggacttggcaaccccagtgccatgcgggacttcatgaccgcatgcgactactgcctttccgactgttccgacggtagccgtagcctcggcgacgaggactgcggcccaagtcgcgaatgcttccacgtcgatctggggggtccctccgaaggcaaccatctcggcatgccggaggacggtgatctccctaggtcggtgcctcgcgttgacgtcccacgggagctagctgtggtccccgttcaggcggggggccatgacccacagctcgagcaaatccgcggggtacaggccaggctcgacgagggagcaggagcgcttgagccgatccgtcgggacgtcgggcaggcatgggcgggccaacctccggccggagaaatacgtcatctgccccagggcctccagcaccgcatcgccgacgacgtcaggttcaggccgccacccgcatctagtggggtcggccagaacctggcggcagcggcaatgcttctccgcgcgatgccggagccatcaaccaccgaggggcggcgaatccagggagagctcaagaatctcctggaaggcaccgcggtccgactggtcgagagctccgcctcccgaaggcaggggtacccctcggaacctcatgccgcgacttcccgattcatgcaggaagcctcggtctgccccgggcgcacgcgcaacacagcgccagcggccccaagtcgcctcggcaacgagcaccatcaccgcgaccgtcgggcccacctcgacgagagggtgcgccgtggctaccaccccaggcgtgggggacgctacgacagcggggaggatcggagtccctcgcccgagccacccggtccgcaggccttcagccgagccatacgacgggcgccgttcccgacccggttccgacccccgactactatcacaaagtactcaggggagacgagaccggaactgtggctcgcggactaccgtctggcctgtcaactgggtggaatggacgatgacaacctcatcatccgcaacctccccctgttcctctccgacaccgctcgcgcctggttagagcacctgcctccggggcagatctccaactgggacgacctggtccaagcttttgccgggaatttccaaggtacatacgtgcgccctgggaattcctgggaccttcgaagctgccgacagcagccgggagagtctctccgggactacatccggcgattctcgaagcagcgcaccgagctgcccaacatcaccgactcggatgtcatcggcgcgttcctcgctggcaccacctgccgcgacctggtgagcaagctgggtcgcaagacccccaccagggcgagcgagctgatggacatcgccaccaagttcgcctccggccaggaggtggtcgaggctatcttccggaaggacaagcagccccagggccgcccttcggaagatgcccccgaggcgtcaactcagcgcggcgccaagaagaagggcaagaaaaagtcgcaagcgaaacgcgacgccgccgacgcggaccttgtcgccgccgccgagtacaagaaccctcggaagccccccggaggtgccaacctcttcgacaagatgctcaaggagccgtgcccctatcaccaggggcccgtcaagcacacccttgaggagtgcgtcatgcttcggcgccacttccacagggccgggtcacccgtggagggtggcaaggctcgcgacgacgacaagaaggaagatcaccaggcaggagagttccccgaggtccacgactgcttcatgatctatggtgggcaagcggcgaacgcctcggctcggcaccgcaagcaagagcgccgggaggtctgttcggtgaaggtggcggcgccagtctacctagactggtccgacaagcccatcaccttcgaccaagccgaccaccccgaccatgtgccgagcccggggaaatacccgctcgtcgtcgaccccgtcatcggcgacgtcaggctcacaaaggtcctcatggacggaggcagcagcctcaacatcatctacgccgagaccctcgggctcctgcgtgtcgatctgtcctccgtccgggcaggcgctgcgcccttccatgggatcattcccgggaagcgcgtccagcccctcggacagctcgaccttcccgtctgcttcggaacaccctccaacttccgaagggagaccctgacgttcgaggtggttgggttccgaggaacctaccacgcggtactggggaggccatgctacgcgaagttcatggccatccccaactacacctacctgaagctcaagatgccgggccccaacggggtcatcaccgtcggccccacgtacaaacacgcgttcgaatgcgacgtggagtgcgtggagtacgctgaggccctcgccgagtccgaggccctcatcgccgacctggagagcctctcgaaggaggtgccagacatgaagcgtcatgccggcaactttgagccagcggagacagttaagtccgtccccctcgaccccagcagtgacgcctccaagcaagtccggatcggctccgagctcggtcccaaatag

SEQ ID NO: 112996 - DNA, 622 bp, Zea mays
  Clone ID: MRT4577_3453C.1
cggacgcgtgggcggacgcgtgggcggacgcgtgggcggacgcgtgggcagcgctgtcccctcgcgtggccttcctcgaccaccagcgatcgctgctcaccgtcggcaacagccacctcaagcaacgaatcgcggcgctcgcccaagacaagatcttcaaggatgctcatcaagaggcgctgaagaaggagatcgagcggctacgccatgtgtaccagcagcagcagatgaaggtggccaccaccggcggcgccgacatcgccgcggcggcttccatgcaggccaggcaagagctgctcgcgtgcgagggcgctgccattcgatagcggatcgagggcggaggcgttcaactggcagtgccacaacaacaacaccagcaccgaactttgtgccgggttcctccttttctcagtcagacaagttgttcgtcgtgcgtgggaaatacacgtcgcctgttagtagcctattgattttatttctgtgcagtcttaattaattcgtatatgtgatgtattcgtcctcctcaccctagcaaaaaaagaaaaagaaaagccagtcgtgctgggatggagacttgttgtgaatgaatgaatgaatgtatttggttatttggccgggcttg

SEQ ID NO: 112997 - DNA, 915 bp, Zea mays
  Clone ID: MRT4577_34540C.1
ggccgggcctaataattccagccccctcacctcagtttacacgagctagtggttcagaccaaagtgcaagttgaactgtgcatccaaacatttgtaccttgaggtacccttagattgcagcaggactaaaaagagcagtgttgctgtattcacagcatttgttcttgcctggcaagcagtcatccttgcattcataaggttgtcgttatcatggtcaacagatgtacctggaaaccatgaagttgcccctatggatggggcaagtgatccaagagtaacagttgctcttgcagtttcgctcagtttaaatcgcaagcgtgatggagcatgaagccacagatgcagccttattggtcctgtatctgacaggctcatggaaatgtagcttatgctggaatggagttcagcatatgcaagatggattaatccaatggagatcagccttcaggtgattgtgcatctgaaaattcgtgttggtgtgtggtccctagtcccagtcaccgtgcacagggtctgatgatcaagaagtgtgtcctgtcctgtacaagtctgcagtcatcaactcatcaccccgttgtctgcatgactacattcatcagcggtcagcctttggaccaaactctggaagacccagctactctcttttcctgagagttaccagtaagtgtatccagttctgtatgcagtcatcatcgtgttgtttacaccactgggttgtagccagtgatgatcattcgtctgtaccaaatttttattgttgcaactaaggtgtgatctagcgtgtagtgctctgtgtttggtggtttcaagtatagagcgcttctcttgtacttcaaagtaaacccgtttacccatgatatgttctaaactgatgatgctatatttagtagatttctcttctgattatgctaccct

SEQ ID NO: 112998 - DNA, 264 bp, Zea mays
  unsure (1)..(264): unsure at all n locations
  Clone ID: MRT4577_34541C.1
gggcatgttagattcccacaatggcctgcgctgggtagcaggttttacatcatcttttccatcagtccaatgctcgcttaggaacaatctacttgacagagaccgatttgcacctcctaatagaccagaagactgctcttcagcagaccgctccatgacctctttaagtattcctccctccaaggaagtctaggtacggacatgagaccggccatgactctctcncgcatgaagagaatggctacttgatgctttggaaactgc

SEQ ID NO: 112999 - DNA, 651 bp, Zea mays
  Clone ID: MRT4577_34542C.1
aggggttacggtggccgtggaaggggtagaatgggtggtcgcggacgagggaactagtgcagttctggcgtttccttcaaaatgcatgcctcacctataccaggggaaacgacaagttatctgagcattttatgtttgaagccatgtgactgtgagtgagccgaatcagcattctagctcggttctatgatgagctagctcgcaagccaaacgagccaagtcaagacataacacaagtttgattagttatcgatgtccgacccctaaacaacatcaggttcgaacaggcggtggcattcttcaccaacatcatccatcgctttggggtcccgaactccatcatcaccgacaacggcacctagttcaccagccgaaagttcctagacttctgtgaggatcaccatatccgggtggactgggctgtcgtggctcaccccatgacgaatgggcaagtggaacgtgccaacgacatgatgctgcaaggactcaagccgaggatctacagcgacctccacaagttcggaaggcggtgataaaggaactcccctcggtggtctggagtctgaggacaacgccgagccgagccacgggcttcacaccgttctttctagtctatggggccgaggccgtcttgcccacagacttagaata

SEQ ID NO: 113000 - DNA, 1998 bp, Zea mays
  unsure (1)..(1998): unsure at all n locations
  Clone ID: MRT4577_34543C.1
ctcgaggccggccgggcgccttttccacctcccccattcccacccgccgattcactcaccttggggcctcacgcggtcgcgcctccagcctcccctaccctcgcgcccctcgcgcccagggaggagcccgagtctcggcgagcgaagattccctccgattgctctcctcctagaacttccgatcggctcgtttgtccctatcaacgggacaaggggtccaagagcaagggttgctcttgcctttccactcggtttaaatcgtatacgtgtgatggagccagatgcagccttaatgatcctgtatctgacaagctcgtggaaatgtagcctatgctggaacggagtccagcatatgtaagatggattgatccaacgggggattagccatcatggccttcaggtgattgttcatctgaaaattcatgttgtgtgcggtcctagtcccagtcactgcgcacagggtctggtgaccaaaagtgtatccagttctgtacaagcctgcagtcatcgtgttgtttgggtgactgcatccatcagcctttggacctaatatgcagtcatcattgtgttgtttacactactggttgtagccagtgatggtcattggtttgccccagtctcccaatttaaggtgtgatttatgtgtgtattgctctgtgtttggtggttccaagcatagagcggttttcttgtacttcaaaataaagccatttaatgggaatcccatgacgctggtgccagtgatatataataaaaaaataaaaagtaaaagaaataaataaaaaaaaacacttagccagttcagtccatccgtttccggtggtggcaatggttatttgtcggttcatagttacaacgtgcctggaaatcaatatgtgcagctcactggatccaacttcagcggtgcatcaccaaccgctcgaccttccattcagacttcttttttagtagcaacacccgttcctgcacatccacacctaataattccagccccctcaccccagtttacacaagctagtggttcagaccaaagtgcaagttgaactgtgcatccaaacatttgtaccttgaggtacccttagattgcagcaggactaaaaagagcagtgttgctgtattcacagcatttgttcttgcctggcaagcaatcatccttgcattcataaggttgtcgttatcatggtcaacagatgtacctggaaaccatgaagttgcccctatggatggggcaagtgatccaagagtaacagttgctcttgcagtttcgctcagtttaatcgcaagcgtgatggagcatgaagccacagatgcagccttattggtcctgtatctgacaggctcatggaaatgtagcttatgctggaatggagtccagcatatgtaagatggattaatccaatggagatcagccttcaggtgattgtgcatctgaaaattcgtgttggtgtgtggtccctagtcccagtcaccgtgcacagggtctgatgatcaagaagtgtgtcctgtcctgtacaagtctgcagtcatcaactcatcaccccgttgtctgcatgactacgggcctgtttggtttggtgcctaacttgccatacttttctgcctaaggttagtttttcaattcgaacgactaaccttaggcaaagtgtggcagatttagccaccaaccaaacagcccctacattcatcagcggtcagcctttggaccaaactctggaagacctagctactctcttttcctgagagttaccagtaagtgtatccagttctgtatgcagtcatcatcgtgttgtttacaccactgggttgtagccagtgatgatcattcgtctgtaccaaatttttattgttgcaactaaggtgtgatctagcgtgtagtgctctgtgtttggtggtttcaagtatagagcgcttctcttgtacttcaaaataaacccgtttacccatgatatgttctaaactgatgatgctatatttagtagatttctcttctgattanaa

SEQ ID NO: 113001 - DNA, 945 bp, Zea mays
  Clone ID: MRT4577_34544C.1
atggcggccgtcagcccgcccaccggcggcaggatcgacgacgtcttccccacgtggcggaagaacaacattcgggtttgtcccgtcgcctcccccaccgacagaggaggaggcggggcaaccaaggccaagcaggaggcggcacctcgtcggctgtcgagcgagtcgacggcgtcggcgccccaacgggggacacgtcaggcgtcgaccttgcgtctgagacgaagacgagcgccgtttccccgcaacacgccaactccaagtagacgaacgacgccagcacgctcgcgaaggacttgttgggcgtcaccctccctcgacccaccaagcgacttcgcttcggtggaagccttcatagaggcatgtccaaaccctccggggtacggtatgcggtcaccctgggaccggctgacggccgtctcgacctacggaccctcgggttccgaggaagatgacgagcccgacttttgttgggatttctccggacttggtaaccccagtgccatgcaggacttcatgatcgcatgcgactactgcctttccgattgttccgacggtagccgcagcttcggcgacgaggactgcagcccaaatcgtgaatgtttccacgtcgatctaggggttcccagcgaaggcaaccatcttggtataccggaaaacggtgatccccctaggcctgcgcctcgcgttgacatccttcgggagctagctgtggtcccagtccctgcggggggtcaggacgcacagctcgagcaaatccgcgagatgcaagccaggctcgacaagggagcaggaacacttgagccgttccggcggaacatcgggcaggaatgggcagaccaagctccggccggagaagcacgtcatctaccccagggcatccagcactgcattgccgacgacgtcagggcaaggccgccaccggtttctagtggggtcggctag

SEQ ID NO: 113002 - DNA, 833 bp, Zea mays
  Clone ID: MRT4577_34545C.1
gttcagaccaaagagcaagctgaactgtgcatccaagcatttgtaccttgaggtaccctgagattgcagcaggactaaaaagagcagtgttgctgtatccacagcttttgttcttgcctggcaagagatcatccttgcattcataaggttgtcgttatcatggtcaacagatgtacctggaaatcgtgaagttgtccctatggatggggcaagtgatccaagagcaagggttgctcttacctttccactcggtttaaatcgtatacgtgtgatggagccagatgcagccttaatgatcctgtatctgacaagctcgtggaaatgtagcctatgctggaacggagtccagcatatgtaagatggattgatccaacgggggattagccatcatggccttcaggtgattgttcatctgaaaattcatgttgtgtgcggtcctagtcccagtcactgcgcacagggtctggtgaccaaaagtgtatccagttctgtacaagcctgcagtcatcgtgttgtctgcgtgactgcatccatcagcctttggacctaatatgcagtcatcattgtgttgtttacactactggttgtagccagtgatggtcattggtttgccccagtctcccaatttaaggtgtgatttatgtgtgtattgctctgtgtttggtggttccaagcatagagcggttctcttgtacttcaaaataaagccatttaatgggaatcccatgacgctggtgccagtgatatgtgctagactgacaatgtgtacctgtgatttatgaattatgacccttttaccgttccattttatcaaataagttatatcaatgccg

SEQ ID NO: 113003 - DNA, 332 bp, Zea mays
  Clone ID: MRT4577_34546C.1
acccacgcgcccggcgtaacatagacaattttggttttccagcacagcaaccttcggatcccataggggggaaggaaaagcagaggtcgtgggacacaagcaaacatcgcaggataaactgaaccatatcgctacaagagagctagcacaacaaactctggaaaagtgactgaagagcacatgagtgagagcgcggggagctcctgagaacgccactagggaagagaaagaggcgactataaggaggatccaaatgcaactggaacaagagcaggagatccaaaaccagcaaaaatacatcaggcatagccagcaacggggaatatggaaag

SEQ ID NO: 113004 - DNA, 406 bp, Zea mays
  unsure (1)..(406): unsure at all n locations
  Clone ID: MRT4577_34547C.1
attccagaggccctatagtgagtcaaattatgttgttataactgacaattgtttccaagtggttctaacatcggtgctgtccatggatgcggtgaagttggctgcacaaagtcctgctctgagaaagacttaatctacatgactttactgttcccgagttgcggtatcaggacacataccattcgtttaaggaccagcctaacacctccacatcattctggacggacgttcaactctaggaacttacgacttgttctgcgcttacactttatcatacacttactatgcagacaatttgcgtgagatcactacanactgtagagtgtactttaggcaaactcctgtcacttgaatagttgggagagtatccagctctctctgtatgactgcacatctcagtgcattt

SEQ ID NO: 113005 - DNA, 2115 bp, Zea mays
  Clone ID: MRT4577_34548C.1
atgaggccgccacccgcttccagtggggtcggccagaacctggctgcagcagcaatgctcctccgtgcgatgccagagccatcgaccaccgaggggcggcgaatccagggagaactcaagaatctcctggagggcgccacggtccggcgggtcgaaagctctgcctcccgaaggcaggggcacccctcggaacatcgcgtcgcgacttcccggttcatgcgggaagcctcggtctacaccgggcgcacgcgcaacacagcgcctgtggccccgggacgcctcggcaacgagcaccatcaccgcgaccgtcgggcccacctcgatgagagggtgcgccgaggctaccaccccaggcgtgggggacgctacgacagtggggaggatcggagtccctcgctcgaaccacccggtccgcaggccttcagccgggccatacgacgggcgccgttcccgacctggttccgacccccggctactatcacaaagtactcgggggagatgagaccggagctgtggctcgcggactaccggctggcctgccaactaggtggaacggacgatgacaacctcatcatccgcaacctccccctgttcctctccgacatcgctcgcgccttgttggagcacctgcctccggggcagatctccaactgggacgacctggtccaagccttcaccggcaatttccagggcacatacgtgcgccctgggaattcctgggacctccgaagctgccgacagcagccgggagagtctctcggggactacatccggcgattctcgaagcagcgcaccgagctgcccaacatcaccgactcggatgtcatcggcgcgttcctcgccggcaccacctgccgcgacctggtgagcaagctgggtcgcaagacccccaccagggcgagcgagctgatggacatcgccaccaagttcgcctctggccaggaggcggtcgaggctatcttccggaaggacaagcagccccagggccacccaccagaagatgcccccgaggcgtcaactcagcgcggcgccaagaagaagggcaagaagaagtcgcaagcgaaatgcgacgctgccgacgtggaccttgtcgccaccgccgagtacaagaaccctcggaaaccccccggaggtgccaacctcttcgacaagatgcttaaggagccgtgcccctatcaccaggggcccgtcaagcacacccttgaggagtgcgccatgcttcggcgccacttccatagggccgggccacccgcggagggtggcagggctcgcgacgacgacaagaaggaagatcaccaggcaggagagttccccgaggtccgcgactgcttcatgatctacggtgggcaagcggcgaacgcctcggctcggcaccgtaagcaagagcgtcgggaggtctgttcggtgaaggtggcggcgccagtctacctagactggtccgacaagcccatcatcttcgaccgagccgaccaccccgaccacgtgccgagcccggggaaatacccgctcgttgtcgaacccatcatcggcgacgtcaggctcaccaaggtcctcatggatggaggcaacagcctcaacatcatctacgccgagaccctcgggctcctgcatgtcgatctgttctcggtccgggcaggcgctgcgcctttccatgggatcatccccgagaagcgcgtccagcccctcggacaactcgacctccccgtctgcttcggaacgccctccaacttccgaagggagaccctgacgttcgaggtggtcgggttccgaggaacctaccacgcggtactaaggccatgctacgcgaagttcatggctgtccccaactacacctacctcaagctcaagatgtcgggccccaacggggtcatcaccgtcggccccacgtacaaacacgcgttcgaatgcgacgtggagtgcgtggagtacgccgaggccctcgccgagtccgaggccctcatcgccgacctggagagcctctctaaggagatgccagacgtgaagcgtcatgccagcaacttcgagccagcggagacggttaagtccgtccccctcgaccccagcagcgacgcctccaagcaagtccggatcggctccgagctcgatcccaaatag

SEQ ID NO: 113006 - DNA, 269 bp, Zea mays
  Clone ID: MRT4577_34549C.1
gaagaaaaccagaacctgaagaaccataacttgatgctgtcggtggagcatgataacctgaaagcacttcatcataacttagatattgagtgctgtcaactgaaggcaaccattgcagaaaccaaagctgaaaatgaatcattgaccacagaaaatcattcagctgaaagaaaactccagcaattgagggtagaaatagatggcttgatggctgagaccacagtgataatgaacaatctggacaaggaacgtatactgcagcagagaaa

SEQ ID NO: 113007 - DNA, 264 bp, Zea mays
  Clone ID: MRT4577_3454C.1
tgagagctcgtctgcgccatgggcgtctgggggaacatttagagccaaaatcctctagcaccgtgtaaactgctgccgatctaggttggccccctctcgctaatacttgtgctgttgctgccggtcgacgccatcttctcaggcccagattgcatctccctggtgttcctttgcatctttcggcccgggcagaatgcctcttttttttcttcttccctctactcgcaggctgggggcttatgctcgaaggcgcgatcttttctc

SEQ ID NO: 113008 - DNA, 1773 bp, Zea mays
  Clone ID: MRT4577_34550C.1
atgccggagccatcaaccaccgaagggcggcgtatccagggagagctcaagaatctcctggaggatgtcgcggctttcagccgggccatacgacgggcgccgttcccgacccggttccgaaccccgactactatgacaaagtactcgggggagacgaggccggaactatggctcgcggactaccggctggcctgccaactgggtggaacgaacgatgacaacctcatcatccgcaacctccccctgttcctctccgacaccgctcgagcctggttggagcacttgcctccggggcagatctccaactgggacgatctggtccaagccttcgccgacaacttccagggcacgtatgtgcgccctgggaactcctgggatctccgaagctgccgccagcagccgggagagtctctccgggactacatccggcgattctcgaagcagcgcaccgagctgcccaacgtcaccgactcggatgtcatcggcgcgttcctcgctggcaccacctgccgtgacctggtgagcaagctgggttgcaagacccccactagggcgggcgagctgatggacatcgccaccaagttcgcctctggccaggaggcggttgaggccatcttccggaaggacaagcagccccagggccgccagccggaagacgtccccgagccgtccgctcggcgcgacaccaagaagaagaacaagaagaagtcacaagcgaaacgcgacgccaccgacgcagaccttgtcgccgccgctgagtataagaaccctcggaaacctcctggaggtgccaatctcttcgataagatgctcaaggagccgtgcccctatcaccaggggcccgtcaagcacacccttgaggagtgcgtcatgcttcggcgccacttccacagggccaggccacccgcggagggtggcagggctcgcgacgacgacaagaaggaagatcaccaagcaggagagttccccgagatccacgactgcttcatgatctacggtgggcaagcggcgaatgcctcggctcggcaccgcaagcaagagcgccgggaggtctgcgcggtgaaggtggcggcgccagtctacctagactggtccgacaagcccatcaccttcgaccaagccgaccaccccgaccatgtgccgagcccagggaaatacccgctcgtcgtcgaccccgtcatcggcgacgttaggctcaccaaggtcctcatggacggaggcagcagcctcaacatcatctacgccgagaccctcgggctcctgcatgtcgatctgtcctccgtccgagcaggcgctgcgcccttccatgggatcattcctgggaagcgcgtccagcccctcggacaactcgacctccccgtctgcttcggaacgccctccaacttccgaagggaaaccctgacgttcgaggtggtcgggttccgaggaacctaccacgcggtactgggaaggccatgctacgcgaagttcatggccgtccccaaatacacctacctgaagctcaagatgccgggccccatcggggtcatcaccgtcggccccacgttcaagcacgcgttcgattgcgacgtggagtgcgtggagtacgccgaggccctcgccgagtccgaggccctcatcgccgacctggaaagcctctccaaggaggtgccagacgtgaaacgtcatgccggcaacttcgatccagtggagacggttaaggccgtccccctcgaccccagcggcgacgcctccaagcagatccagatcggctccgggctcgatcccaaatag

SEQ ID NO: 113009 - DNA, 1209 bp, Zea mays
  Clone ID: MRT4577_34551C.1
atggacatcgccaccaagttcgcctctagtcagaaggcggtcgaagccatcttccggaaggacaagcagcctcaggggcgccagccggaagacgtccccgaggcgtccgctcagcgcggcacgaagaagaagggcaaggagaagtcgcaagtgaaacgcgatgccaccgacgcaaaccttgtcgccgccgccgagcacaagaaccctcggaagcctcccggaggcgccaacctgttcgacaagatgctcaaggagtcgtgcccctatcatcagggtcccgtcaagcacacccttgaggagtgcgtcatgcttcggcgctacttccacaaggccgggcccccagcggaaggtggcagggcccccgacaacgacaagaaggagggtcacaaggcagaggagttccccgaggtccacgactgcttcatgatctacggtgggcaagtggcgaatgcctcggctcagtaccgcaagcaagagcgccagaaggtctgttcggtgaaggtggcggcgctagtctacctaggctggtccaacaagcccatcaccttcgaccaagatgaccaccccgaccgcgtgccgagcccggggaagtacccgctcgttgttgatcctgtcatcggcaatgtcaggcttaccaaggtcctcatggacggaggcagcagccttaacatcatctacgccgacaccctcgggctcctacagatcgatctgtcctcgatccgggccggtgcagcgccctttcacgggatcattcccgggaagcgcgtccagccccttggacaactcgatctgcccgtctgcttcgggactccctccaactttcgaaaggaaaccctcacgttcgaggtggtcgggttccgaggaacctaccatgcagtgctagggagaccatgctacgccaagttcatggccgtccccaactacacctacctcaagctcaagatgtcgggccccaacggggtcatcaccgtcggccccacgtaccgacacacgtacgaatgcgacgtggagtgcgtggagtacgccgaggccctcgccgaatccgaagccctcatcgccgacctggagagcctccccaaggaggtgccagatgcgaagcgccacgccggcaacttcgaaccagcagaggcggttaagtccgtccctctcgaccccagcaacaacacctccaagcagatccggatcggctccgagcttgaccccaaatag

SEQ ID NO: 113010 - DNA, 403 bp, Zea mays
  Clone ID: MRT4577_34552C.1
taaccttcatcctctagagccaccgcccttcccttttttttttttttttttttttttttcctcttttccttttttttttagatttgcttttttttctttcccctccacaacccacaccttaccaaaaacaccaaaaccttaaccaaacaatcaaaaaattaacaaaaaaaacattattttacaaaccacaatctcaaatttccaccaacattacccatcccaaaccaaccccccccctatcccataaacaaccccacccaacacaaaaatattccaacctcccaacaaaacaccacttaatcaccaaatttaacccccctttcaaccacaaaccttattaaaaacccctatccctccttaccaaacacactatccataaaccaccaacctcctataaaaattt

SEQ ID NO: 113011 - DNA, 343 bp, Zea mays
  Clone ID: MRT4577_34553C.1
ggaaaccaaaccatttttcataagggctggggggtacattaaagacaggaacttatccccgatctgacaaacctaaaaaaagagcctgagaagggggtattcctttgggctaggaaaattcaactgaaacaactggaaaagccggctttttggtttgttactcgggggggggggggggggggtacccgtgatcaaggaaccggggataaaaaaaacccccgggtggcggaaaaaaccttgggagaggggttttcctggtgcccgggggggggggggttttttaccgggggggaattggcaccaagggagtctgccctgggggggggtgctgggggactttttt

SEQ ID NO: 113012 - DNA, 1625 bp, Zea mays
  Clone ID: MRT4577_34554C.1
ctcacagctgctaggtcttttggagaagacaaggatttttgtgcccaagggaaggtggttgatgggctgccttgatgaacttgggatccttgagcaagggcagtgctttatccgggcatcatctccatcactcaataattgtctggtgaagtatggatcaagattgtctgcagcaaacacaaatgcagagaccattctgggtactatcgtaatggcaaagaatccatgccttcatccaggggatgtccgaatccttgaagctgttgatgtgcctgaactgcatcaccttgttgattgcttggtcttccccaagaaaggtgagaggccgcacgcgaatgaagcatctgggagtgatcttgatggggatctatacttcgtaacatgggatgaaaaccttataccacctggtaaaaagagttggaaccctatggactactccccagctgaagcaaaacaactgccacgcgcagtatcccaacatgatattgttggtttcttcttgaagaacatggtaaatgagaaactgggtccaataagcaatgctcatgttgttcacgctgatatgagcgagtatggagcaatggatgagaagtgtattcagttggcagaactagcagcaactgctgtggacttccccaagacaggcaaaattgtgtcaatgccagcatcccttcgaccaaaattatatcctgacttcatgggaaaggaggatgctatctcctatagatcagagaagatccttggaaggctttatcggtcaatccaagaagcctccagcgatgatttggttccagaagaaacttgcacatctaacaatctgccttatgatgcagatatggaagttgctggtgcagctgattttctctcgagtgcttggcagtgcaagtgctcatatgaaacacaactgaacgcactgctcaaccaatatggcgtgcgcactgaagcagagcttgtgacagagcatatatggtcgcttcccaagtacagcagcagaaggcagggggacataaaggagaggttgaagaatgcatactatgctcttcacaaggagtttaggagcattttcgaaagcattgtgacagatcaaacagagatctctgatgatgagaaaagtcggttttacgagatgaaggcctccgcttggtaccaggtaacctaccatcctgaatgggtccagaagtcaagggaaatgttcaagtctgactgtgaggacatgccagcaaggcttagctttgcatggatcgcggttgagcacctggcacggattaagataaggtgccgtggagaagtgaaagtggacagcccaaggcctgttgagaggctcgcagcctacatatctgggagcatgtgagttgacgtgaagctccaagcaattgtgaagcaagaccactctgccctctttgccatgccatctgaactctgatgcatggctctgtctagtcacttctttttacgaattattacatagttgagacacagccactctataagcggctaaagcgtacgcacatttctacgaacgataatgcttttaagtctgaactgttcaatctctattactaccagaatgtttgtggacataaatattagttcgtggtgtctcaattccaaaacgttttcttggt

SEQ ID NO: 113013 - DNA, 446 bp, Zea mays
  unsure (1)..(446): unsure at all n locations
  Clone ID: MRT4577_34555C.1
ggaggctaggccttaggtgggcgcgngggcgcttctcctcccaagaaggccaaaacaaaccgtcccaccaccaacccaggcgactaccccccaacctaacccaacccggcattggtcttctttccctactctgtgtcagatggtcagagccgacccccccggagcccaaacgcgccggctttcctgaacccattccgcggtagatagatcgattggatggtcacaaccttggacgttaatcatatgaggccccaagagaagaaatctgcccgctgtgggtgaaccccatattccttttcgtcaccgatgccggctttttctcattaggggcctcaacgctgagccctaccacttcgacgccgactccaacgactcgggatcccccaaggacacccctgccgctccatttaaaggatgcaaccgcacgtgacagctgggttcctgga

SEQ ID NO: 113014 - DNA, 828 bp, Zea mays
  Clone ID: MRT4577_34556C.1
atggccgtcaccttccagcacaagatcatcctccgccctggatccatattctgcttcggtactatctcatctgtagcggatgatgaaggaactctgcatcgcctcgcggatccgccagagagaaagccttccttagaaatctccgagaaaatcgaggtgaggcaggaaaaagcgcgacctccagcgctcctaaaaaagattacctccagcaagctaggagccgagggtccttcagcccggagaactccgctgtccacctctccgatgagagaatggacacggatcataaggaaaaaggaagcaaaggatcatcaagctgatctttctgtgcctccgctctcaaaggagaacaaaaagaagatcgccgtgacagttactccattctaccccgacgtcctcttcatcgggagagtggagtcaccccccatctccgacgacgagccgactgcacccggagaggaacctcctcagcgggaatcccgccgacgaaggaaccgacgccaaaatatccggcgacatcacgaggccggagagcgggacccggcgcaacctgtatcacgagacgaggtctcagagataggagaaactccggaggaacgtgtcttcagggaacgaaggaattcccgacgacgcaacctgaacccagacttcgcccgagccatgaacacgccgagtgaagtcggaggggtgttggctcggatagctgatggcctccctcggactcctgacgccgagggctaccggcggctgttcactcaagcagccaatcaccttctacccctcgctcacccaccgaacgatctacgacacgccatcaagagtcgctag

SEQ ID NO: 113015 - DNA, 311 bp, Zea mays
  Clone ID: MRT4577_34557C.1
attgggtacctcgaggccggccgggatcttcctccagcgccggcgctacatcttccgctacctcggcacaggcgacggcgggggcgctcaggctcgggctcgcgctcggagcgacggcgtcagcggcttccccctccgcctcttgccagtcgcctcgcgcccttgcctccggtcctccgcacaccagccggtgaccctgtgtgcgtgcccccctctctctctcctcccgcctccggtggatcgtcaaacggagccaggcctcggcgtctgcgccgcgcgcggcctgagggcagccgggggggggggggggg

SEQ ID NO: 113016 - DNA, 298 bp, Zea mays
  Clone ID: MRT4577_34558C.1
aaagctggcacgcctgcaggagctggtacgcaatagacgggccgacccacccgttcgtttccactttactcctatccaggcggactggacgcgtcagaagggctagaccaagtgtagcaagaagcagcagggatggcgcacaatgaacctttacgggatgccgttgtccacaaacgtcgtgcgcaaaaacaccgtgctcaacgggaagggccttttcttctagaacgcccccttcgaacacaacaccggcccccacaggcagcgcgactttctagccctcaaccctgtcggccagatc

SEQ ID NO: 113017 - DNA, 183 bp, Zea mays
  Clone ID: MRT4577_34559C.1
ttctttatttcatagtcaccataataattggtagtttggtaccatgttgaatcttacactcctcccaacttcaactcgttgcagggttcctctgccatatcaagtgctgatctatttggccatccagcaaacaattctagcgtggatctcagtgcttcagatttgatcaacagaatatcattc

SEQ ID NO: 113018 - DNA, 151 bp, Zea mays
  Clone ID: MRT4577_3455C.1
aacaaatatgtacttatacatagctcttcgaaattttccgtgggatacatggatggtgcgtctgtattgccgcctttgttacctccaatcacctacttttaactctctccacactcggctcacctatacccacatacctacccagtggggg

SEQ ID NO: 113019 - DNA, 324 bp, Zea mays
  Clone ID: MRT4577_34560C.1
gtaatgggttttttttttttggacaaagaattacatgcttcaaaatcaaaaattgggcgggcaaattattgaggcaatgttgcaaccttgcgcccgactttgttggcattcacaatttggttgacttttacaagaaacaaaattgagaaggagggcacgctttatcttatttagaacaaggataagttaaagggtggatttataaaacacgtcttaaataactggaaataaactagaccttatatccggataaggggaaaccttttacaacaatgtcgcctacgcagaaacatgcttaaagctaaacttcaaaaaaagtcaaaa

SEQ ID NO: 113020 - DNA, 451 bp, Zea mays
  unsure (1)..(451): unsure at all n locations
  Clone ID: MRT4577_34561C.1
catcgatcaacagacatacataccnttcttcaactatatgacgtttatacaaggggaaacctgaaaaaatcggggagttgtggagatacaccagcgagcgccccaatcacacggctactagagaccggatgatcaaggagaacgtcacggtggacaacagcagctgcatccgctccatcgccttcatctacatcggagccgacggcaaaccgtacaaggaggggccatggggtttctgccatgctggcaccgagtacaagattgatctgagcaggttataccagagcttgacggatatctccgagaccacgggcccagtctacaacattgacaatctggtcaggtctctcaacatctgcaccaacaaacgctcttacggaccgtactgcagggactagggcaccccgatccttgtcaaggtgatgaacaaacgccacgtcgctggcttctt

SEQ ID NO: 113021 - DNA, 286 bp, Zea mays
  unsure (1)..(286): unsure at all n locations
  Clone ID: MRT4577_34562C.1
ggcaggtgaccgaggactcccagccgcagctgctgaagctcatcgacgccctccagcccggcggcnatacaccaacattcagctgacggcctccatgacgggggctcaagtgtcctacgcacgaccgcatagctagcagctcacggtcgctgtccgtatggcgtcaaatgctcagtgtccgatcggccaagcatgaaccgggtgctgagccagctcgcgtcaacgtcaagattacggcaacgtgccggtgctacacctnntcgggttcggcgcggactacgacccc

SEQ ID NO: 113022 - DNA, 209 bp, Zea mays
  Clone ID: MRT4577_34563C.1
atcgcttgataaaaggttaagcattgccaaaatgaagactgcacttgaacagcctttgttgttatcaatgacccggcaaagaagggggggaattaacaccggtcacaagggtaggggccgggaaatcccagaccggttcctgacagcgacccatatttccatatagggagccacttaagagctagcaggggatatgggcataacactgg

SEQ ID NO: 113023 - DNA, 434 bp, Zea mays
  Clone ID: MRT4577_34564C.1
tagtgaatctactcaaactgcgactgtgcgataaccaaaagaacttgggcctaccttacagctgctaataaaaacgcaggccttagacccgcaatggatcctggagctctgttcatgtctccacatggaccgacccttcacctgaaggaaagctcagtcctcggttagataagacatgctcgtaagccttctccatactcatgatatatcgactgcggcaagtataatacattttgactagtcgtatattctatgcatccactatcgatattatatatcatctattttgtttacactataaatatctttactatacctgttggcgtaacattatagaccgagttgttactctagctgacgttctgatagatatgtccgatatctaggtcttcccctaaatataactcataattaaaaagaagatcgtaattatt

SEQ ID NO: 113024 - DNA, 1929 bp, Zea mays
  Clone ID: MRT4577_34565C.1
atggcggaagagcagcatccgggtctgtcccgtcaccttccccgccgcaggaggaggaggcggggcaaccatggccaagcaggaggcagcacctcgttggctgtcgagcgagtcgacgacgccggcgccccagcgggggacacgtcgggcgttgacctcgcgtctgagacgaagacgagcgttgtttccccgcaacacgccaaccccaagcggacgaatgacgccagcacgcttgcgaaggacttgctgggcgttagcctcgtacctgagataacggtgcagtccgtccccgacgcgacttcgtcaccatccgtcgatcaagaggtaccgcccgttttccaccctgtgccttttagattcagcttcgacccaccaagcgaccccgcttcggtggacgctttcataaaggtataccctaaccttccggggtaccatatgtggtcaacctgggaccgactgacggctgtctcgacctacgggcccccgggttccgaggaatatgacgagcccgactctggttgggatttctccgggctcggtaaccccagtgccatgcgagacttcatgaccgcatgtgactactgcctctccgattactccaatggtggccacagccttgacgacgaggactgtggcccaagtcgcgaatgtttccacgtcgatctagggggtctcgacgaaggcaaccaccttggtatgccggaggacgacgatccccctaggcttgcgcctcgcgttgacatccttcgggagctagctgtggtcccagtccctgcggggggtcaggacacacagctcgagcaaatccgcgagatgcaggccaagctcgacgaggaagcaggacaacttgtgcagctccggcagaacatcgggcaggagtgggacgacctggtcaaagccttcgccggcaacttccagggcacatacgtgcgccctgggaactcctgggatttccgaagctgccgccagcagccgggagaatccctgcaggactacatccggcgattttcgaagcagcgcaccgagctgcccaacatcaccgactcagatgtcatcggcgcattcctcgccggcaccacttgccgcgacctggtgagcaagctgggtcgcaagactcccaccagggcgagcgagctgatggacatcgccaccaagttcgccactgggcaggaggcggtcgaggccatctttcggaaggacaagcagcctcaggggcgccaaccggaagacgtccccgaggcgtccgctcagcgcggcaccaagaagaagggcaagaagaagtcgcaagtgaaacgcgacgccgccgatgcagaccttgtcgccgccgccgagcacaggaaccctcggaagcctctcggaggcgccaacctgttcgacaagatgctcaaggagtcgtgcccctatcatcagggtcccatcaagcacacccttgaggagtgcgtcatgcttcggcgctacttccacaaggccgggcccccggcggaaggaggcaaaggccacgacaacgacaagaaggagggccacaaggcagaggagttccccgaggtccatgactgcttcatgatctacggtgggcaagtggcgaacgcctcggctcggcaccgcaagcaagagcgctgggagttcatggccgtccccaactacacctacctcaagctcaagatgtcgggccccaacggggtcatcaccgtcggatccacgtacagacacgcgtacgaatgcgacgtggagtgcgtggagtatgctgaggccctcgccgaatccgaggccctcatcgccgacctggagagcctctccaaggaagtgccagacgcgaagcgccacaccggcaacttcgagccaacagaggcggttaagtccgtccctctcgaccctagcaacgacgcctccaagcaagtctggatcggctccgagctcgaccccaaatag

SEQ ID NO: 113025 - DNA, 572 bp, Zea mays
  Clone ID: MRT4577_34566C.1
ccagcgtccgcccagcgtccggccatcgccgctccaacccggtcgatgccaccattcgggccggggccgaaccgcagataatgtagagtgcgccgcgccgtgacggcgcggatgagaaagcctccaaacctctctgtttcgggctctccgtccccggcgtccaacacccatactctccccaggttgtgtgccacacccacactcaactatatacgaaaaccgccggcgcctggcccctaggccctagtcacagacccttgttctttcttcgacgcgcccccgggcatggcgaaccgcagtgttgccatgggcgtggccctcgcgttcgtggccatgaccgcgctctgttgcgcgccgggcgccgcggagttgcccaggctggaccacccggccaggagcgacggatcgctgaagctgctcgtcgtcggggactggggacgcaaggggactcacaaccagtcccgggtcgccgaccaggtaagtaacggcagcgccatcttatacattcctagttccgaacttccgattactgcaagtcagtgtgttcagacaccttggccttcaacgccgtt

SEQ ID NO: 113026 - DNA, 1497 bp, Zea mays
  Clone ID: MRT4577_34567C.1
agtacccagtcagggttttgggcatggtgcgcctatatggaggcatgaaatggataaagtggatacagaaataccatgtgtagcattgttgatagtaacatcatctagcaatattgcagaaaaagggtttgcacgcagaagaccataattcatgcaattttcagtgaccaactaaaatcgtgacatttgacattcatgtgatgataggcagtggggtgccaacccttgcagaatgattaaccctagacaaggatccgaggcagaactcagcatggttaacgccactatcttttcaaggggaatggtaataaggagaatgagccgtttattagtgatgtaaccggcatcactgattctgccattctctcaggattaaagaacgacatgcaccaaatacagaggtacagaacctgcaggaatctttatctgatttccaatacgtatgttttgcatacactgaagcgcgcacagaggcagatgcagcactaatctagccagtaaaccaagcacgcacactcacgcgcacgcacacaccaagtgaccataccatcatacaacatgcagtcagggtttttttatcaacagtatgtcgcctcacactattaacaggcctgtgatctacctgaatgcctgagctgacttctgggtccagccttttcttcacagccttgttccccagggacacagacctcaagtctcaatgagcagagaagaatggacaagctatgtgcagcacatcggtggagtgcagaacctgatgggtgggttctattcagcagtctgagaagcaaggatggtcggcttcttcagccagtactgctcgaacctctgcctagcgtaatccttatagtcgaagtcgatatcgttgacatgatccgaaattattccccataggccccaaactaggtggctggcgagggtgtacttctcaatgcttttgatcaggttctctacctcctcttcagattcctcacctgaggagctcaggtatgtccgcacaaattgcttccgctcatcggtatctggatatttgctgtagtccaatatgtgaggcttttctgaatggtagtctgcggccatttcacagaaatggtttgcgatgtcataagcaactgggttaaaacctgcatactcgtagtcaatgatggtcagtagcctcgtctcttcgtcgatcatgatgttcccatactggagatcgttatggcaaaatcctacgcgctcgcactcccctgagaactcgttctccagcgcagcgatctcctcctccatgagccgaatgcagaactcttcggtttcatcagaggaggagtacaggctcttggcagttctgagccagttccttaatctttcccagatgcagcacggattttgaaccaggcatgtcgaggctgtgaaattccctcagtttggaggctatgatggctgaaatccccggatcacgtaggtcaggagctgaaagtgtctgaaaggaatagatgtgtcacttccaaaaatatc

SEQ ID NO: 113027 - DNA, 2655 bp, Zea mays
  Clone ID: MRT4577_34568C.1
gccaattccgagcaaacggacgacgccagcatgctcgcgaaaggcttgctgggcgtcaccctcgtacctgagacaacggtgcagtcagtccctgacgtgactttgtcaccgcacgtcgaccaagaggtacccaccggttcccatctcacgcccattggattcagccccgacccgccaagcgacttcgctttggcggacgctctcatagaggcgagtccaaaccctctggggtctcgtatgcggtcactctaggactggctgacggacgtctcgacctacgagccctcggggtccgaggaagatgatgagcccgacttctattgggatttctctggacttggcaaccctagtgccatgcgggacttcatgaccgcatgcgactactgcctttccgactgttccgacggtagtcgtagcctcggcgacgaggactgcggcccaagtcgtgaatgtttccacgtcgatctagggggtccctccgaaggcaaccatctcggtatgccggagaatggtgatctccctaggcctgtgccacacgttgacatcctacgggagctagctgtggtccccgttccggcggggggtcatgacccacagctcgagcaaatccgcggggtgcaggccaggctcgacgagggagcaggagcacttgagccgatccgccgggacgtcgagcaggaatgggcgggccaacctccggccggagaaatgcgtcatctaccccagggtatccagcaccgcatcgccgacgatgtcagggtaaggccgccgcccgcttccagtggggtcggccagaacctggctgcagcggcaatgcttctccgcgcgatgccagagctatcaaccaccgaggggcggcaaatccagggagagctcaagaatctcctagagggcgccgcggtccgacgggccgagagctccgcctcccggaggcaggggtacccctcggaacatcgtgccgcgacttcccgattcatgcgggaagcctcggtccacaccgggcgcacacgcaacacagcgcctgcggccccgggtcgcctcggcaacgagcaccatcaccgcgaccgtcgggcccacctcgacgagagggtgcgccgaggctaccaccttaggcgtggaggacgctacgacagcggggaggatcggagtccctcgcccgaaccacccggtccgcaggccttcagccgtgccatacgacgggcgccgttcgcgacccggttccgacccccgactactatcacaaagtactcgggggagacgagaccggaactgtggctcgtggactaccggctggcctgccaactgggtggaacggacgatgacaacctcatcatccgcaacctctccctgttcctctccgacaccgctcgcgcctggttggagcacctgcctccagggcagatctccaactgggacgacctggtccaagccttcgccggcaatttccagggcactgcaccggagttgcccaacatcaccgattcagatgtcatcgacgcgttcctcgccggcaccacctgccgtgacctggtgagcaagctgggtcgcaagacccccaccagggcgagcgagctgatggacattgccaccaagtttgcctctggccaggaggcggttgaggctatcttccggaaggacaagcagccccagggccacccaccggaagatgcccccgaggcgtcaactcagcgcggcgccaagaagaagggcaagaagaagtcgcaagcgaaacgcgacgccgccgacgcggaccttgtcactgccaccgagtacaagaaccctcggaacccccccccccggagggccgggccacccgcggagggtggcagggctcgcgacgacgacaagaaggaagatcaccaggtaggagagttccccgaggtccgcgagtgcttcatgatatacagtgggcaagcggcgaacgcctcggctcggcaccgcaagcaagagcgtcgggaggtctgttcggtgaaggtggcggcgccggtctacctagactggtccgacgagcccatcaccttcgaccaagccgaccaccccgatcacgtgccgagcccggggaaatacccgctcgttgtcgaccccgttatcggcgacgtcaggctcaccaaggtcctcatggacggaggcagcagcctcaacatcatctacgccgagaccctcgggctcctgcgtgtcgatctgtcctcggtccgggcaggcgctgcgcctttccacgggatcatccccgggaagcgcgtccatcccctcggacaactcgaccttcccgtctgcttcggaacgccctccaacttccgaagggagacccttacgttcgaggtggtcgggttccgaggaacctaccacgcggtactggggaggccatgctatgcgaagttcatggtcatccccaactacacctacctcaagctcaagatgtcgggccccaatggggtcatcaccgtcggccccacgtacaaacacgcgttcgaatgcgacgtggagtgcgtggagtacgccgaggccctcgccgagtccgaggccctcatcgccgacctggaaagcctctctaaggaggtgccagacgtgaagcgtcacaccggcaacttcgagccagcggagacggttaagtctgtccccctcgaccccagcagcgacgcctccaagcagatctga

SEQ ID NO: 113028 - DNA, 785 bp, Zea mays
  Clone ID: MRT4577_34569C.1
ctggtcccctgcgtccggtccggattcccggtcgcccacctcggtagtgtgagtgagcacggggacactaaggagcttctggaattactacttccagtcctcaaggttacatttcagaagctatctcaatcggtttcaactttcagaaaggtccatgataataacactgtttcttatgggaaaacaatccacaccattcaggacaatggcgtcgacttctacatcaatggacacgatcactgcctggagcacattagcagcagagacagtccactccagtatttcacgagcggaggcggttccaaggcatggagaggagtcttccatccaaacaaggacaaactccggttcttctacgacgggcaagggttcatgtccctccagctgaaccaagaccaggcgcacttcatcttttacgacgttttcgggaacatactgtaccgatggagctcgagacatccccagccctccacctatctcgatgaggaataaattggattgattttgcgccattgatatgtacaaaacaccgcctgccaactgtcatgtatgtgaaatgatgagtgttagacgcaaaaaaatacaccaggttaaaaaaaaaaaaaaaaaaaaaaaaaaaaaaaaaaaaaaaaaaaaaaaaaaaaaaaaaaaaaaaaaaaaaaggggggccgatataaaaaaaaaaaaaataactaaacaaaaagaaaacaaaaaaaaaaattctttatatagagaaacctaaaataaaattaactgggccgaaccttttacaacgcccatctttg

SEQ ID NO: 113029 - DNA, 465 bp, Zea mays
  Clone ID: MRT4577_3456C.1
gtgtacctcgaggccggccgggtattcattccaatctcaatctgagaactgatatgtctaccgccaccagtgaagctaaagaccgtggagtccagtcggagacgagaattctctactgtctcaatggaacaggtggaaagacatggcctcctggtcaccccgatgctggagccgcggtcggcatctctggtcagtgccgggagcgcctacttcttgtggttcgtgtggagccccggacgtgctcatgatgaaggaacctggatccggcgaagtgctcgtctcccgcgcggggtttctcgcgaagaatgagatgtacttcaacctcttgcgtatcggaagcggagcggcggagggcgcagctttgtttttctgtgctgcacaccggtacatgctggtcgagaacgaccggcgagactcgtaggaatcacgttgtatgattgactaacgtggttattaataggtttc

SEQ ID NO: 113030 - DNA, 3099 bp, Zea mays
  Clone ID: MRT4577_34570C.1
atgggcagtctccagcaacctctccggcccgggacggtgcttcgtttcgggactcttgagttcatgtccttcgacggcagctatgacatgatacttcttccaccgccgcgcgacaacgacaatggcggccgacaacccgctcgccggcggcggaatcgacgacatcttccccgcgtggtggaagagcaacattcgagctcgccccgttctctcccccgccaacggaggaggaggcggggccatcaaggccaagcgggaggacacgcttcgttggccgtcgagcaaatcgacgcccccgacgccccgacggaaggcacgccggacgtcgacctcgcgttcaatacgaaggcaagcgccgtccccccgcgacatgctgaccccgagcaagaagacgacgccggcgcgctcgcggaaagcctgcaggacgtcgccctcgtacctgagatgacggtgcaaccagtccccgacgtgaccacgtcgctcctcgtcgaccaaaaggtaccggctaactcccatcttgcgtcatttcgactcggcctcaacccgccaaacgacctcgttttggcgggcgctctcattgaggcggatgcaaccccactggggtctcgtatacggtcgccttgggaccggctgacggacgtctcaacctacgggccctctgggtccgaggaagatgacgaccccagcgtctgtcgggatttctccggacttggcaaccctagtgccatgcgggacttcatgaccgcatgtgactactgcctatccgacggttccgacggaagccgcagccttggcgacgagagctgcggcccaagccgcgaatgtttccacatcgagctaggggatccctccgagggcaaccgtctcggcatgccggaggacggtgatcttcccaggccggtatgggcggaccaacccctggtcggagaaatacgtcacctgccccaaggtctccagcaccgcgtcgccaacgatgtcagggtcaggccgccgcccgcatccagcggggttggtcagaacctggcagccgcagcgatgctcctccgcgcgatgccggagccatcaaccaccgagggtcggcgaatccagggagagctcaaggatctcctggaaggcgctgcggcccgacgggccgagagcacagcctcccgaaggcaaggatatccctcggaacctcatgccgcgacttcccgattcatgcgggaagcctcggtctacaccgggcgcacgcgcaacaccgcgcctgcggccccgggccacctcggcaccgagcaccatcgacgcgaccgtcgagcccatctcgacgaaagggtgcgccgaggctaccaccccaggcgtggggggcgctacgacagcggggaggatcggagtccctcgcccgaaccacccagtccgcaggccttcagtcgggccatccgacgggcgccattcccgacccggttccgacccccgactactatcacgaagtactcgggggaaacgagaccagaactgtggctcgcggactaccgccttgcctgccaactgggtggaacggacgacgacaacctcatcatccgtaacctccccctgttcctctccgacactgctcgcgcctggttggagcacctgcctccggggcagatctccaactgggacgacttggtccaagccttcgctgggaatttccagggcacgtacgtgcgccccgggaattcctgggaccttcgaagctgccggcaacagccgggggagtcgctccgggactacatccgacgattctcgaagcagcgcaccgagctgcccaacatcaccgactcggatgtcatcggcgcgttcctcgccggcaccacttgccgcgacctggtgagcaagctgggtcgcaagacccccaccagggcgagcgagctgatggacatcgccaccaagttcgcctctggccaggaggcgttcgaggctatcttccgaaaggacaagcagccccagggccgcccatcggaagaggctcccgaggcgtctgctccgcgcggcgccaagaagaaaggcaagaggaagtcgcaatcgaaacgcgacgctgctgacgcggaccttgtcgccgccgccgagcacaagaaccctcggaagccccctggaggtgcgaacctcttcgaccagatgctcaaggagccgtgcccctaccatcaggggcccgtcaagcacaccctcgaggagtacattatgcttcggcgtcacttccacagggccgggccacccgccgagggtggcagggcccgcgacgacgacaagaacgaagatcaccaagcaggagagttccccgaggtccgcgactgcttcatgatctatggagggtatgcggcgaatgcctcggctcggcatcgcaagcaagagcgccgggaggtctgctcggtgaaggtggcggcgccagtctacctagactggtccgacaagcccatcaccttcgaccaggccgaccaccccgaccatgtgccgagcccggggaaatacccgctcgtcgtcgaccccgttgttggcaatgtcaggctcaccaaggtcctgatggatggaggcagctgcctcaacatcatctacgccgagaccctcaagctcctgcgcatcgatctgtcctccgtccgagcaggcgctgcgcccttccacgggatcatccctgggaagcgcgtccagcccctcgggcgactagacctccccgtctgtttcgggacgccctccaacttccgaagggagaccctgacgttcgaggtggtcgggttccgaggaacctaccacgccgtactagggaggccatgttacgcgaagttcatggccgtccccaactacacctacctgaagctcaagatgccgggccccaacggggtcatcaccgtcggccccacgtacaaacacgcgttcgaatgcgacgtggagtgcgtggagtacgccgaggccctcgccgagtccgaggccctcatcgccgacctggagaacctctccaaggaggtgccagacatgaagcgccatgccggcaacttcgagccagcagagacggttaaggccgtccctcttgaccccagtggcgacaccaccaagcaggtccggatcggttccgggctcgaccccaaatag

SEQ ID NO: 113031 - DNA, 2021 bp, Zea mays
  Clone ID: MRT4577_34571C.1
tttttaaggttttagatacagtgtgagaaaggctttcataatatatattttacatgttgtaaaaattatatagatttttttttagaaaaaaacaatgttgaagttcacaatatttgacttaggatctaactaatatgtttggcctgagaaatttgcaatcgattcttatgtcattgccacgcgtccggtgatgtacgtaactgatccagcctccccggtcgagggccacccactccacctcgccccttcgccgatgacgcagagcgcgccgcgccgtgacggcgtggctgagacagcctgcaaacctctctgtttcgggctctccgtccccggcgtccaacacccatactctccccaggttgtgtgccacacccacactcaactatatacgaaaaccgccggcgcctggcccctaggccctagtcacagacccttgttctttcttcgacgcgcccccgggcatggcgaaccgcagtgttgccatgggcgtggccctcgcgttcgtggccatgaccgcgctctgttgcgcgccgggcgccgcggagttgcccaggctggaccacccggccaggagcgacggatcgctgaagctgctcgtcgtcggggactggggacgcaaggggactcacaaccagtcccgggtcgccgaccagatgggaagggtcggggagaagctcgatatcgactttgttatatccaccggggacaacttctacaagaacggcctcaagggcgtgcgcgaccaggcatttgaagaatcgttcatggatatctacacagctcaaagcttacagaagccatggtactcagttctaggaaatcatgattacaggggcaatgcgctcgcacagcttagcccagtcttgaggaagatcgacgaccgattcatttgcatgagatcgttcatcgttaacgcagaacttgtggacttcttctttgtcgacaccactccgttccaactggagtattggactcacccgggcaagcatcgttatgactggagaggggtggcgcctcgaggcaagtacattgccaatttgctgaaggatctggatgtggctatgaagaaatcaactgcaaggtggaagattgtggttgggcatcacaccatgaggagtgtgagtgagcacggggacaccgaggagcttctggaattactacttccagtcctcaaggttacatttcataagctatctcaatcggtttcatctttcagaaaggtccataataataacactgtttctgtggaaaaaaattcacaccgttcaggacaatggcgtcgacttctacatcaatggacacgatcactgcctggagcacattagcagcagagacaggtacaagcaccatacgatacagagatgaattcaagtaactttcagtccgtttccaagctacgaaccttgtgaaatttcttcttctgtttcagtccactccagtatttcacgagcggaggcggttccaaggcatggagaggagtcttccatccaaacaaggacaagctccggttcttctacgatgggcaagggttcatgtccctccagctgcaccaagaccaggcccacttcatcttttacgacgttttcgggaacatattgtaccgatggagctcgagacatccccagtcctccatgtatctcgatgaggaatagattagattgattttgccccattgatatgtacaaaacaccgcatgtcaactgtcatgtatgtgaaatgatgagtgttggacgcaaagaaggttatacaccagttagggttaaatcatctggttcggtggtttatgatggatcgaagaatgcgacgattatatcatagatacgtagcgaagaacggaaagatttatgagcaaacctcagtctaaccatcaaagttctcaatcaaagggactatgtgcaaagcgagccgagccaagtctatttctcgagctcattggagtagtgttcaggctcgtgagccgcctcgcaagtgtgccaaattagttagtctacaaaataacaatggatattgaatatatctat

SEQ ID NO: 113032 - DNA, 3135 bp, Zea mays
  Clone ID: MRT4577_34572C.1
atgggcagtctccagcaacctctccagcccgggacggtgctccgtttcgggagtcttgagttcatgtccttcgacggcagctacgacatgatactccttccaccgccatgcgacaacgacaatggcggccgacagcccgcccgccggcggcggaatcgacgacgtcttccccgcgtggtgggagaacaacattcgagctcaccctgtcctctcccccatcgacggaggaggaggcggggcaaccaaggccaagcaggaggcagcgcctcgtcggctgtcgagcgagtcgacagcgccggcaccccaacgaggggcgcaccggacatcgacctcgcgtttgagacgaagacgagcaccgtctccccgcgacacgccaatcccgagaaagcggacgacgccagcgcgctcgcggagagcttgctgaacgtcaccctcgtacctgagacgacggcgcagtcagtccccgacgtgacttcatcgccgctcgtcgaccaaaaggtaccaaccgattcccatcctacgtcatttggattcagcctcaacccgcctagcgatctcgctttggcggacgctctcgtaggggcgagtccaaaccctctggggtttcgcatgcggtctccttgggaccggctgacggacgtctcgacctacgggccctctgggtccgaggaagacgacgagcccagcatctgttgggatttctctggacttggcaaccccagtgccatgcgggactttatgaccgcatgtgactactgcctctccggctgttccgacggtagtcgcagcttcgacgacgaggactgcggcccaagccgcgaatgtttccacgtcgatctagggggtccctccgaagacaatcttctcggcatgccggaggacggtgagccccctaggccggtgccccgcgttgacatcccacgagagctagctgtggtccccgttccggcggggggtcacggcccacagctcgagcaaatccgcgggatgcaggccaggctcgacgagggagcaggagcgcttgagccgatccgccgggacgtcgggcaggcatgggcgaaccaacccccggccagagaaatatgtcatctgccccagggtctccagcaccgcgtcgccgatgacgtcagggtcaggccaccacccgcgtctagtggggtcggccagaacctggctgcagcagcgatgctccttcgcgcgatgccggagccatccaccaccgagggtcggcgaatccagggggagctcaagaatctccaggaaggcgccgcggtccgacgggccgagagctctgcctcccgaaggcagggatacccctcggaaccccatgccgcgacttcccgattcatgcaggaagcctcggtctacaccgggcgcacgcgcaacaccgcgcctgcggccccgggccgcctcgacaacgagcaccatcatcgcgaccgtcgggcccacctcgacgagagggtgtgccgaggctaccaccccaggcgtgggggacgctacgacagcggggaggatcggagtccctcgcccgagccacccggtccgcaggccttcagccgggccatccgacgggcaccgttcccgacccggttccgacccccgactactatcgcaaagtactcgggggagaagagaccggaactgtggctcgtggactaccgtctggcctgccaactgggtggaacggacgacgacaacctcatcatccgcaacctccccctgttcctctccgacaccgctcgcgcctggttggagcacctgcctccggggcagatctccaactgggacgacctagtccaagctttcgccggcaatttccagggcacgtacgtgcgccccgggaatttctgggacctccgaagctgccggcagcagccgggagagtccctccgggactacattcagcgattctcgaagcagcgcaccgagttgcccaacatcaccgactcggatgtcatcggcgcgttcctcgccggcaccacctgccgcgacctggtgagcaagttgggtcgcaagacccccaccagggcgagcgagctgatggacatcgccaccaagttcgcctctggccaggaggcggtcgaggctatcttccgaaatgacaagcagccccagggccgcccatcggaagatgctcccgaggcgtctactcagcgcggcgccaagaagaaaggcaggaagaaatcgcaagcgaaacgcgacgccgccgacgcggaccttgtcgctgccgccaagtacaagaaccctcggaagccccccggaggtgccaacctcttcgacaagatgctcaaggagccgtgcccctatcatcagggggccgtcaagcacacccttgaggagtgcgtcatgcttcggcgccacttccatagggccgtgccacccgcggagggtggcagggcccgcgacgacgacaagaaggaagatcaccaagcgggagagttccccgaggtccgcgactgcttcatgatctacggtgggcatgcggcgaatccctcgtctcggcatcgcaagcaagagcgccgggaggtctgctcggtgaaggtggcggcgccagtctacctagactggtccgacagacccatcacctttgaccaagccgaccaccccgaccacgtgccgagcccggggaaatacccgctcgtcgtcgaccccgtcatcggcgacgtcaggctcaccaaggtccttatggacggaggcagcagcctcaacatcatctacgccgagaccctcgggctcctgcgtgtcgatctgtcctccgtccgggcaggcgctgcgcccttccatgggattattcccgggaagcgcgtccagcccctcggacgactcgaccttcccgtctgcttcggaacgccctccaacttccgaagggagactctgacgttcgaggtggtcaggtttcgaggaacctaccacgcggtactgggaaggccatgctacgcgaagttcatggccgtccccaactacacctacctgaagctcaaggtgccgggccccaacggggtcatcaccgtcggccccacgtacaagcacgcgttcgaatgcgacgtggagtgcgtggagtacgcgaggccctcgccgaatccgaggccctcatcgccaacctggaaagcctctccaaagaggtgccagacttga

SEQ ID NO: 113033 - DNA, 1970 bp, Zea mays
  Clone ID: MRT4577_34573C.1
gcgactatcactccgcctcccgaaggcaggggtacccctcaaaacatcgcgccgcgacttcccgattcatgcgggaagcctcagtccacaccgggcgcacgcgcaacacagcacctgcggccccgggtcgcctcggcaacgagcaccatcaccgcgaccgtcgggcccacctcgacaagagggtgcgccgaggctaccaccccaggtgtgggagacgctacgacagcggggaggatcggagtccctcgcccgaaccacccggtccgcaggctttcagccgcgccatacgacaggcgtcattcccgacccggttccgaaccccgactactatcacaaagtactcgggggagacgagaccggaactgtggctcgtagactaccgactgtcctgccaactgggtggaacggacgatgacaacctcatcatctgcaacctccccctgttcctctccgacaccactcgcgcctggttggagcacctgcctccggggcagatctccaactgggacgaccaggtccaagccttcgccggcaatttccagggcacgtacgtgtgccctgggaactcctgggacctccgaagctgccgacagcagccgggagagtctctccgggactacatccggcgattctcgaagcagcgcaccgagctgcccaacatcaccgattcggatgtcatcggcgcgttcctcgccggcaccacctgccgcgacctggtgagcaagctgggtcgcaagacccccactagggcgagcgagctgatggacatcgccaccaagttcgcctctggccaggaggcggttgaggctatcttccagaaggacaagcagccccagggccgcccaccggaagacgcccccgaggcgtcaactcagcgcggcgccaagaagaaaggcaagaagaagtcgccagcgaaacgcgacgccgccgacgcggaccttgtcgccaccgccgagtacaagaaccctcggaaaccccccggaggtgccaacctcttcgacaagatgctcaaggagccgtgcccctatcatcaggggcccgtcaagcacacccttgaggagtgcgccatgcttcggcgccacttccatagggccgggccacccgcggagggtggcagggctcacgacgacgacaagaaggaagatcaccaggcaggagagttccccgaggtccgcgactgcttcatgatctacggtgggcaagcggcaaacgcctcggctcggcaccgcaagcaagagcgtcgggaggtctgttcggtaaaggtggcggcgccagtctacctagactggtccgacaagttcatcaccttcgatcaagccgaccaccccgaccacgtgccgagcccggggaaatacccgcttgttgttgaccccatcatcggcgacgtcaggctcaccaaggtcctcatggatggaggcagcagcctcaacatcatctatgccgagaccctcgggctcctgcgtgttgatctgtcctcggtccgggcaggcgtcgcgcctttccatgggatcatccccgggaagcgcgtccagcccctcggacaactcgaccttcccgtctgcttcggaacaccctccaacttccgaagggagaccctcacgtttgaggtggtcgggttccgaggaacctaccacgcagtattggggaggccatgctacgcgaagttcatggccgtccccaactacacctacctcaagctcaagatgtcgggccccaacggggtcatcaccgtcggccccacgtaccgacacgcgttcgaatgcgacgtcgagtgcgtggagtacgccgaggccctcgccgagtccgaggccctcatcgccgacttggagagcctctcgaaggaggtgccagacgtgaagcgccacgccggcaacttcgagccagcggagacggttaagtccgtccccctcgaccccggcagcgacgcttccaagcagatccggatcggctccgagctcgatcccaaatag

SEQ ID NO: 113034 - DNA, 3511 bp, Zea mays
  Clone ID: MRT4577_34574C.1
ccgcttgtttccttgcccgcggtgggtagccgagttgtgtacttccctcagggccacagcgagcaggtagcagcatcaacaaacaaggaaatagagtctcagatccccaactatcctaatctgccgccacagcttatatgccaacttcataatgtgacgatgcatgctgatgcagagacagatgaggtatatgcacagatgacactacaaccactcaacccgcaagaactgaaggacccatatttacctgcagaattaggttcggccaataaacagccaacaaactatttctgcaaaacattaacagcaagtgataccagtacccatggtgggttctccgttccccgtcgagcagctgagaaagtgtttcctccactggatttcacccagcaacccccatgccaggagttgatggcaaaagatcttcatggcaatgagtggaaattccgtcacatctttcgtggccagccaaagcggcatcttctaactacaggttggagtgtctttgtaagtgcaaagagactcgttgctggcgactctgtcctttttatctggaatgacaataaccagcttctgctgggaattcgtcgtgcaaatcggccacaaactgtcatgccatcttcagtcttatcaagcgatagcatgcatatcggtcttcttgctgcagctgctcatgctgcttcgacaaatagccgatttacaattttttacaacccaagggcaagcccttcagagtttgtcataccactcgtaaagtatgttaaggctgtgtatcatacccgcatatctgtggggatgcgattcaggatgctttttgagacagaagagtctagcgttaggagatacatggggacaattaccggaatctgtgatcttgattctgttcggtggccaaattcacactggcgttctgttaaggttggctgggatgagtcaactgctggtgagcgacaaccaagggtgtcactatgggagattgaacccctgacaactttcccaatgtatccatctccttttccgctcaggctcaagcgtccatggccaacaggcttgccttctctgcatggtgggaaggatgatgacctggctaactctctcatgtggcttcgagataccgcaaatcctggttttcagtcgttaaattttggtggacttggtatgagcccttggatgcagccaaggctggatgctaccttacttggtctgcaacctgacatgtatcaggcgatggccacagctgcttttcaggatgcaacaaagcaggcatcgcccacaatgctgcagttccagcagccccagaacatagctggccgggcttccccgcttctttcaagtcagattttgcagcaagcacatcatcaatttcagcagcaaccgtaccttcaaaacatctctgagagcacaatccaagcacagggtcagtctgagttcctcaagcagcagatccaacgcagccagtcattcaatgagcagaagccccagatgcaacaccagcaagaatcacagcagcagcagcaaccacagtgtctgccagttcccccaaacatcagcaaatgcaaccaaccggattatgaccaactaccagtctatatctaatgcattatcaccgttttctcagcggtcgccaagtttctcagtcttcacctatggcgattgtagactatattaccgttctctgactttcctctggaccatacactaaattcttcaggctgcttagatgattctgggtacgtcccgccatgttcagataattctgacaaagtgaaccgaccaccagcgaccttcgtgaaggtttacaaatctggaacctacgggaggtcgcttgatatcactaggtttagcagctatcacgagctccgtagggaactggggcgcctatttggccttgagggccagttggaagacccattgagatcaggctggcagcttgtattcgtcgaccgtgaggaggacgtccttctcgtgggcgacgacccttggcaggaattcgtgagcacggtgtcctgcataaagatcctctccccgcaggaggtgcagcagatggggaagcagggcctggagctcctgagctcggcccccgcgcggaggctcggtagcagctgtgacgactacgtcagcaggcaggagtcgagaagcctgagcaccgggatcgcgtccgtcggttcggtcgagttgggatgagcagcaagatagcgcgcacgcagcagcagcagcagcaggttacgcatcctcagcctcagggtaggtaggggactgaagggttggtctgcgacttgatgacccacgagctcctcgttgcgcgcttcgttcgcctccatgcgatggatagaagttcagcgcagaccaagccttagctctgcgagctatgtaccatctaataattctgtccgtgtcgtaccatgtcaactcctaagtagaagaattgaagaaactaccagcagccgctgtctggtatacacgctgaaacattttttttcttgtatggagaaatactaatcatctggatgtagccaggcctatgcaggctaagtagcagctgtgacgactacgtcagcaggcaggagtcgagaagcctgagcaccgggatcgcgtccgtcggttcggtcgagttgggatgagcagcaagatagcgcgcacgcagcagcagcagcagcaggttacgcatcctcagcctcagggtaggtaggggactgaagggttggtctgcgacttgatgacccacgagctcctcgttgcgcgcttcgttcgcctccatgcgatggatagaagttcagcgcagaccaagccttagctctgcgagctatgtaccatctaataattctgtccgtgtcgtaccatgtcaactcctaagtagaagaattgaagaaactaccagcagccgctgtctggtatacacgctgaaacattttttttcttgtatggagaaatactaatcatctggatgtagccaggcctatgctctctaatggttgatcgggtaatacagcccctcgcacacaaattaaaaaaaccaggtgttggagtgggccaatagacaactatgaggctcacatcattgtttgtggggggatagtacaaactaacataaactgctaatgcaagggggcattcctggtctccaaaacgggaatgattcagctgctataccttattccacttacaatttcctcagcccttctcagaatgactttcctctggaccatacactaaattcttcaggctgcttagatgattctgggtacgtcccgccatgttcagataattctgacaaagtgaaccgaccaccagcgaccttcgtgaaggtttacaaatctggaacctacgggaggtcgcttgatatcactaggtttagcagctatcacgagctccgtagggaactggggcgcctatttggccttgagggccagttggaagacccattgagatcaggctggcagcttgtattcgtcgaccgtgaggaggacgtccttctcgtgggcgacgacccttggcaggaattcgtgagcac

SEQ ID NO: 113035 - DNA, 2445 bp, Zea mays
  Clone ID: MRT4577_34575C.1
atgccgttcggtttgaggaatgcgggcgcgacgtaccagcggtgcatgaaccatgtgttcggcgaacacatcggtcgcacggtcgaggcctacgtcgatgacatcgtagtcaagacaaggaaagcttccgacctcctttccgaccttgaagtgacattccgatgtctcaaggcgaaaggcgtcaagctcaatcccgagaagtgtgtcttcggggtgccccggggcatgctcttggggttcatcgtctccgagcggggcatcgaggccaacccagagaagatcgcagccatcaccagcatggggcccatcaaggacttaaaaggcgtacagagggtcatgggatgtctcgcggctctgagccgcttcatctcacgcctcggcgaaagaggtctgcctctgtaccgcctcttaaggaaggccgagtgcttcacttggacccctgaggccgaggaagctctcgggaacctgaaggcgctcctcacaaaggcgcctatcttggtgcccccagctgctggagaagccctcttggtctacgtcgctgcgaccactcaggtggttagcgccgcgattgtggtcgagaggcaagaagaggggcatgcattgcccgttcagaggccagtttactttgtcagcgaagtactgtcagaaactaagatccgctacccacaagttcagaagctgctgtacgcggtgatcctgacgcggcggaagttgcgacactacttcgagtctcatccgctaccgacggctccgatccaaccggagctctggaccatatttttcgacgggtcgctgatgaagacgggagccggcgcaggcctactcttcgtctcgcccctcgggaaacacctacactacgtgctgcgcctccatttcccggcatccaacaatgtggctgagtacgaggctctggtcaacgggttgcggatcgccattgagctaggggtccggcgccttgacgcccgtggtgactcgcagctcgtcatcgaccaagtcatgaagaactcccactgccgcgacccaaagatggaggcttactgcgatgaagttcggcgcctggaagacaagttctacgggctcgagcttaaccacatcgctcggcgctacaacgagactgcagacgagctggcaaaaatagcctcggggcgaacaacggttcccccggacgtcttctcctgggatctgcatcaaccctccgtcaagatcgacgacacgcccgagcctgaggcgccctcggtccagcccgaggtaccctcggcacagcccgaggcaccctcagctcggcccgaggcgccctcggttcagcccaaggtaccctcggcctttgagggtgaggcactgcgcatcgaggaggagcggagcggggccacacctgatcgaaattggcagaccccgtacctgcaatatctccgccaaggagagctacccctcgatcgagccgaggctcggtgggtagcgcgacgcgccaagtcgttcgtcttgttgggcgatgagaaggagctctaccaccgcagcccctcaggcatcctccagcgatgcatctccgtcgccgaaggtcaggaactcctgcgagagatacactcgggggcttgcggccatcacgtagcgcctcgagccctcgtcgggaatgctttccgacaaggcttctactggccaacggcggtggctgtcgccactagaattgtccgcacctgcgaagggtgtcaattctatgcgaagcagacccacctgcccgctcaggctctgcagacgatacccaccacctggccctttgctgtgtggggtctggacctcgtcggccccttgcagaaggcgccagggggctacacgcacctgctggtcgccaccgataaattctccaagtggatcgaggcggtggcgttcttcaccaacatcatccatcgcttcggggtcccgaactccatcatcaccgacaatggcacccagttcatcggcagaaaattcttggaattctgcgaggatcaccacatccgggtggactgggccgccgtggctcatcccatgtcgaatgggcaagtagagcgtgccaacggcatgattctacaagggctcaagcctcggatttacgacgacctcaacaagttcggcaagcgatggatgaaggaactcccctcggtggtctggagcctgaggacaacgccgagccgagccatgggtttcacgccgttcttcctagtctacggggccgaggccgtcttgcccactgacctggaatacggctccccgaggacgagggcctacgacgatcaaagcaaccaagccagccgagaagactcgctggaccagctggaagaggctcgggacaaggccttactacattcggcgcggtaccagcagtccctgcgacgctaccacgcccgaggggtccggccccgagacctccaggagggcgacctggtgctccggctgcgacaagacgcctga

SEQ ID NO: 113036 - DNA, 1644 bp, Zea mays
  unsure (1)..(1644): unsure at all n locations
  Clone ID: MRT4577_34576C.1
ctgtgagcacaatccaagcacagggtcatgtctgagttcctcaagcaggagatccaacgcagccagtcattcaatgagcagaagccccagatgcaacaccagncaagaatcacagncagcagcagcaaccacagtgtctgccagtcccccaacatcagcaaatgcaacaacagaatatgaccaactaccagtctatatctaatgcattatcaccgttttctcagctgtcgccagtttctcagtcttcacctatggcgctgcagactatattaccgttctcgcaggcacagagcttcacagacacgaatgtaggttcattgtctccatccaatggtaacaccatgcaaaacacactgaggccgttctcatcagaagcagtttctcacctcagtatgccgaggcccactgcgatacctgtcgcagacccatggtcgtcgaagcgtgtcgcggtggagtctctgcttccttctcggcctcaggtttcatcccagatggaacaattggaccctgcaccagctagtatacctcatagctctgcgttggcaccacttcccggaagagggtgcttggttgaccaagatgtgaactctgatcctcaaaatcatctcttgttcggtgttagtatagactcgcagtcactgctaatgcaagggggcattcctggtctccaaaacgggaatgattcagctgctataccttattccacttccaatttcctcagcccttctcagaatgactttcctctggaccatacactaaattcttcaggctgcttagatgattctgggtacgtcccgccatgttcagataattctgacaaagtgaaccgaccaccagcgaccttcgtgaaggtttacaaatctggaacctacgggaggtcgcttgatatcactaggtttagcagctatcacgagctccgtagggaactggggcgcctatttggccttgagggccagttggaagacccattgagatcaggctggcagcttgtattcgtcgaccgtgaggaggacgtccttctcgtgggcgacgacccttggcagtaagcactgcatgcgacgttgtttcttttttttttctgcattcttcctcacattgcgttggcaacccaaccccacagggaattcgtgagcacggtgtcctgcataaagatcctctccccgcaggaggtgcagcagatggggaagcagggcctggagctcctgagctcggcccccgcgcggaggctcggtagcagctgtgacgactacgtcagcaggcaggagtcgagaagcctgagcaccgggatcgcgtccgtcggttcggtcgagttgggatgagtagcaagatagcgcgcacgcagcagcagcagcaggttacgcatcctcagcctcagggtaggtaggggactgaagggttggtctgcgacttgatgacccacgagctcctcgttgcgcgcttcgttcgcctccatgcgatggatagaagttcagcgcagatcaagccttagctctgcgagctatgtatcatctaataattctgtccgtgtcgtaccatgtcaactcctaagtagaagaattgaagaaactaccagcagccgctgtctggtatacacgctgaaacattttttcttgtatggagaaatactaatcatctggatgtagc

SEQ ID NO: 113037 - DNA, 2700 bp, Zea mays
  Clone ID: MRT4577_34577C.1
atgggtagtctccagcaacctttccagcccgggacagtgctccgtttcgggagtctcgagttcatgtccctcgacggcggctacgacatggtactccttcctccgccgcgcgacagcgacaatggcggccgacaacccgcccgccggcggcggaatcaacaacgtctttcccacgtggcggaagaacaacatccgggtttgtcccgtcgcctccctcgccgacggaggaggaggcggggcaaccaaggccaagcaggaggcgacacctcgtcggctatcgagcgagtcgacggcaccggcgccccaacgggggacacgtcgggcgtcgacctcgcgtctgagacgaagacaagcgccgtttccccgcaacacgccaactccaagcggacggacgacgccagcacgctcgcaaaggacctactgggcgtcaccctcgtacccgggacgacggtgcagtctgcccctgacgtgactttgtcaccgcccatcgaccaggaggtaccgaccgattcccatctcgtgccttttggattcagcctcgacccaccaagcgacttcgcttcggtggaagccttcatagaggcatgtccaaaccctccggggtatcatatgcggtcaccctgggaccgactgacggtcgtctcgacctacggaccctcgggttccgaggaagacgatgagcccgacctttgttgggatttctccgggctcggtaaccccagtgccatgcgggacttcatgaccgcatgcgactactgcctttccgattgttccaacgcaatactactctgcgcgatgccggaaccatcgaccaccgaagggcggcgtatccagagagagctcaagaatctcctggaggatgccgcggtccgacgggccgaaagctctgcctcccgaaggcagggatacccctcggagcatcgcgccgcgacttcccgattcatgcgggaagcctcggtccacaccgggcgcacgcgcaacacagcgcctgcggccccgggtcgcctcggcaacgagcaccaccaccgcaaccgtcgaacccacctcgacgagagggtgcaccgaggctaccaccccaggcgtgggggacgctacgacagcggggaggatcagagtccctcgcccgaaccacccggtccgcaggctttcagccgggccatacgacgggcgccgttcccgacccggttccgaaccccgactactgtcacaaagtactcgggggagacgaggtcggaactgtggcttgtggactaccggctggcctgccaactgagtggaacagacaatgacaacctcatcatccgcaacctccccctgttcctctccgacaccgctcgagcctggctggagcacctgcctccggggcagatctccaactgggacgacctagttcaagccttcgccgacaacttccagggcacgtactgcaccgagctacccaacgttaccgacttggatgtcatcggcgcgttcctcgccggcaccacctgccgcgacctggtgagcaagctaggtcgcaagacccccaccagggcgagcgagctgatggacatcgccaccaagttcgcctttggccaggaggcggttgaggccatctttcagaaggacaagcagccccagggccgccggccggaagatgtccccgaggcgtccactcaacgcgacaccaagaagaaaggcaagaagaagtcgcaagcgaaacacgacgccgccgacgcggaccttgtcgccgccgctgaatacaagaaccctcagaaacctaccgaaggtgccaatctcttcgataaaatgctcaaggagtcgtgcccctatcatcaggggcccgtcaagcacaccctcgaggagtgcgtcatgcttcggcgccactttcacaaggccgggccacctgcggaaggtggcagggcccacaacaacgacaagaaggaggatcacaaggcagaggagtttcccgaggtccacgactgctttatgatctacggtgggccagtggcgaacgcctcggctcggcaccgcaagcaagagcgtcgggaggtctactcggtaaaggtggcggcgccagtctacctagactggtccgacaagcccatcaccttcgaccagggcgaccaccccgaccgcgtgccgagcctggggaaatatccgctcgttgtcgaccccgtcatcggcaacgtcaggctcaccaaggtcctcatggacggaggcagcagcctcaacatcatctacgccgaaaccctcgggctcctgcggatcgatctgtccttgccccttggacaactcgatctgcccgtctgcttcgggactccctccaacttccgaagggaaaccctcacgttcgaggtggtcgggttccgaggaacctaccacacagtgctggggaggccatgctacgccaagttcatggccgtccccaactacacctacctcaagctcaagatgccgggccccaacggggtcatcaccgtcggccccacgtaccgacacacgtacgaatgcgacgtggagtgcatggagtacgccgaggccctcgccgaatccgaggccctcatcgccgacctggagagcctctccaaggaggcgccagacgtgaagcgccatgctggcaatttcgagccaacagagacggtcaaatccgtccctctcgaccccagcaacgatgcctccaagcagattcggatcggctccgagctcgaccccaaatag

SEQ ID NO: 113038 - DNA, 578 bp, Zea mays
  Clone ID: MRT4577_34578C.1
accccgggggtacaatgtaccaacttcgttgtgggcggagacattgactcaaacactcataactgacctactagcaggcggcgtgggatccccaaaacatggtcatagggtgtgcctagtctgcccttcggtgtagccgcccaacagtccttactatatatcgctctttaatccagtctatagatgagtatcaagacctctgcggtgtgccacgaaacaaacacacaaaataaaataaatcatttgtgatgagctattgaaccaacataaaatttaaggatatgtacaataatttttttactaatgtttgagtggggctgcttattagaataagaatatatcacggatcaactctaagtctttacctttttgccttaacgatgaataaggttataagggacatacaatgacaatatcttttggggtaaaacctttacaaatgacgatgttaatagcttatgaaagtatcccaatattaaataggaaatcaaaattataagatcacctctaaatgttgtatattcaaatgaactaaaactgaatatatgagatgtaactcccactctgctacacattaa

SEQ ID NO: 113039 - DNA, 377 bp, Zea mays
  Clone ID: MRT4577_34579C.1
ccccacttagtaaaagcccagccgtccgtcgcatcggttctcccaggtaagtcagtatgcgtccaccccagtccgtcgtcatgaagcgcaacccccgcgtcacgagctcccgccggaagtgccgaaaggcgcactttacgggcccgtcctccgtccgacgtgtgctgatgtgcgtggggctatcgacggagctgcggcacaagaacaatgtgcgtaacatgccaatccttttttacgacgaggtgcaggtcgcgcgcggcacctacaagggccgtgagggcaaagtggtgcaagtgcaccgtcgctggtgtgtgatccacggcgagcggctgacccgttagaaggccaacgggtgtactcgtttacgttggtgtgca

SEQ ID NO: 113040 - DNA, 286 bp, Zea mays
  Clone ID: MRT4577_3457C.1
ctgctacagctgaggcaagaacatgacatgttatcgagtacccgtcaaatcgcccaaagcagtctgacccttcttttcttcgctagcggtggttcacggattcctaagggacagctggggacccaggcgcacgcagcctagctccagaaacgctgtacgcagttctccgctcatcctaccatcttctcttcctagacctgctggtgatgccgctgcaccctgaagttgctccttccttctgtccctcccttcctcccattctttctttcgttgcttccttcctccc

SEQ ID NO: 113041 - DNA, 3169 bp, Zea mays
  Clone ID: MRT4577_34580C.1
atgggcagtctccgacaacctctccaacccgggacggtgctccgtttcgggagtcttgagttcatgtccctcgacggcagctacgacatgatactccttccaccgccgcgcgacaacgacaatggcggccgacaacccgcccgccggcggtggaatcgacgacatcttccccgcgtggtggaagaacgacattcgagctcgccccgtcctctcccccgccaacggaggaggaggcggggcaaccaaggccaagcgggaggccgcgcttcgtcggctgtcgagcgaatcgacgcccccagcgcaccaacagggggcgcgtcgggcgtcgacctcgcgtttgagacgaaggcgagcgccgtccccccgcgacacaccaatcccgagcaagtggacgacgccagcacgctcgcggagggcctgcaggacgtcgccctcgtacctaagacgacggcgcaatcagtccccgacatgactatgtcgctcctcgtcgaccaaaaggtactaaccgattcccatcctacgtcatttcgactcggcctcaacccgcctagcgacctcgctttggcgggcgctcttgttgaggcgagtgcaacccctctggggtttcgtatgcggtcgccttgggaccgattgacggacgtctcgacctacgggccctatgggtccgaggaagatgacgatcccagcatctgttgggatttctctggatttggcaaccccagtgccatgcgggactttatgaccgcatgtgactactgcctctccgactgttccgacggtagccgcagccttgacgacgaggactgcggcccaagccgcgaatgtttccacgtcgagctaggggatccctccgaaggcaaccatcccggcatgccggaggacggtgatctccctaggccggtgcctcgcgccgacatcccgcgggagctagctgtggtccccgttccggcggggggtcacgacccacagctcgagcaagtccgcgaggcgctggccaggctcgacgagggagcaggagcgctcgagtcgatccgccgggacgtcgggcaggtatgggcgggccaacccccggccggagaaatacgtcacctgccccagggtttccagcaccgcgtcgccaacgacgtcagggtcaggccgccacccgcatccagcggggtcggtcagaacttggcagccgcagcgatgctcctccgcgcgatgccggagccatcaaccaccgagggtcggcgaatccagggagagctcaagaatcttctggaaggcgctgcggcccgacgggccgagagctctgcctcccgaaggcagggatacccctcggaacctcatgccgcgacttcccgattcatgcgggaagcctcggtctacaccgggcgcacgcgcaacaccgcgcctgcggccctgggccacctcggcaacgagcaccatcgtcgcgaccgtcgggcccacctcgacgaaagggtgcgccgaggctaccaccccaggcgtgggggacgctacgacagcggggaggatcggagtccctcgcccgaaccacccggtccacaggccttcagtcgggccatccgacgggcgccgttcccggcccggttccgacccccgactactatcacaaagtactcgggggaaacgagaccggaactgtggctcgcggactaccgcctggcctgccaactgggtggaacggacgacgacaacctcatcatccgcaacctccccctgttcctctccgacactgctcgcgcctggttggagcacctgcctccggggcagatctccaactgggatgatttggtccaagccttcgccggcaatttccagggcacgtacgtgcgccccgggaattcctgggaccttcgaagctaccggcaacagccgggagagtctcttcgggactacatccggcgattctcgaagcagcgcaccgagctgcccaacatcaccgactcagatgtcatcggcgcgttccttgccggcaccacctgccgcgacctagcggtcgaggccatcttccgaaaggacaagcagccccagggccgcccgtcggaagaggctcccgaggcgtctactccgcgcggcgccaagaagaaaggcaagaagaagtcgcaagcgaaacgcgacgccgccgacgcggaccttgtcgctgccgccgagtacaagaaccctcggaagccccccggaggtgctaacctcttcgacaagatgctcaaggagccgtgcccctaccatcaggggcccgtcaagcacaccctcgaggagtgtgtcatgcttcggcgccacttccacaaggccgggccacccgcagagggtggcagggcccgcgacgacgacaaaaaggaagatcaccaagcagggagagttccctgaggtccgcgattgcttcatgatctacggagggcatgcggcgaatgcctcggctcggcatcgcaagcaagagcgccgggagatctgctcggtgaaggtggcggcgccagtctacctagactggtccgacaagcccatcaccttcgaccaagctgaccaccccgaccacgtgtcgagcccggggaaatacccgctcgtcgtcgaccccatcgtcggcgacgtcaggctcaccaaggtcctgatggatgggggcagctgcctcaacatcatctacgccgagaccctcaggctcctgcgcgtcgatctgtcctccgtccgagcaggcgctgcgcccttccacgggatcattcctgggaagcgcgtccagcccctcggacggctcgaccttcccgtctgcttcggaacgccctccaacttccgaagggagactttgacgttcgaggtggtcgggttccgaggaacctaccacgcggtattggggaggccatgctacgcgaagttcatggccgtccccaactacacctacctgaagctcaagatgccgggccccaacggggtcatcaccgtcggccccacgtacaaacacgcgttcgaatgcgacgtggagtgcgtggagtacgccgaggccctcgccgagtccgaggccctcatcgccgacctggagaacctctccaaagaggtgccagacgtgaagcgacatgccggcaacttcgagccagcggagacggttaaggctgtccctctcgaccccagtggcgacatctccaagcagatccggatcggttccgggctcgaccccaaatag

SEQ ID NO: 113042 - DNA, 365 bp, Zea mays
  Clone ID: MRT4577_34581C.1
cctctaccttttttctctctctttctcttcacctccctctcatccatccggcacctttattttaaaattccgctcggcctaccaccacttctactctcacaccttctcttttccatccactacctaccctcatcattctcacaccatccatataatctttttcatctttactaacaaccccacctcccaacttccctactttccttccttcataactaatcaacatttactctccttatcctactctctacccatactcataatcaatctcccacttctttcccatctcttcctctttattacacatctccctccttcctcattttatccttccttattctctccctttacctcttccttactat

SEQ ID NO: 113043 - DNA, 1983 bp, Zea mays
  Clone ID: MRT4577_34582C.1
atggggcccatcaaggacttgaagggcgtacagagggtcatgggatgtcttgcggctctaagccgcttcatctcacgcctcggcgaaagaggtctgcctctgtaccgcctcttaaggaaagccgagtgcttcacttggacccctgaggccgaggaagccctcgggaacctgaaggcgctcctcacgaatgcgcctatcttggtgcccccagctgccggagaagccctcttgatctacgtcgccgcgaccactcaggtggttagcgccgcgattgtggttgagagacgagaagaggggcacacattgcccatccagaggccagtctacttcatcagcgaggtactgtccgagaccaaaacccgctacccacaagttcagaagctgctgtacgcggtgatcctgacgcggcggaagttgcgacactacttcgagtctcatccggtaaatgtggtgtcatccttccccctgggggagatcatccagtgccgagaggcctcgggtagaatcgcaaagtgggcggtggaaattatgggtgaaacaatctcgttcgcccctcggaaggccatcaagtcccaggtcttggcggacttcgtggctgaatgggtcgacacccagctcccaacagctccgatccaaccggagctctggaccatgttcttcgatgggtcgctgatgaagacaggagccggcgcaggcctactcttcatctcgcccctcgggaagcacctacgctatgtgctacgcctccatttcccggcgtccaacaatgtggccgagtatgaggctctggtcaacgggttgcggatcgccatcgagctaggggtccgacgcctcgacgctcgcggtgactcgcagctcgtcatcgaccaagtcatgaagaattcccactgccgcgacccgaagatggaggcctactgcgatgaggttcggcgcctggaagacaagttctacgggctcgagctcaaccgcatcgcccggcgctacaacgagactgcggacgagctggctaagatagcctcggggcgaacaacggttcccccggacgtcttctcccgagacatgcatcagccctccgtcaagatcgacgacacgcccaagcccgaggcgccctcggcccagcccgaagtaccctcggctcagtccgaggcgtcctcggctcagcccgagaaggcacccgggggctacgcgcacctgctggtcgccatcgacaaattctccaagtggatcgaggtccgacccctaaacagcatcaggtccgagcaggcggtggcgttcttcaccaacatcatccatcgtttcggggtcctgaactccatcgtcatcgacaacggcacccagttcaccggcagaaagttcctggacttctgcgaggatcaccacatccgggtggactgggccgccgtggctcaccccatgacgaatgggcaagtagagcgtgccaacgacatgattctacaaggactcaagcctcggatctacaacgacctcaacaagttcggcaagcgatggatgaaggaactcccctcggtggtctggagcttgaggacaacgccgagccgggccacgggcttcacgccgttctttctagtctatggggccgaggccatcctgcccacagacttagaatacggttccccaaggacgagggcctatgctaaccaaagcaaccaggctaatcgagaagactcgctggacctgctggaagaggctcgggacatggccttgctacactcggcgcggtaccagcagtccctgcgacgctaccacgcccgaggggtctggtcccgagacctccaggcgggcgacctggtgcttcggctgcgacaagacgcccgagggcgacacaagctcacgcctccctgggaagggccgttcgtcatcgccaaagttctgaagcccggaacgtacaagctggccaacagccaaggcgaggtctacaacaacgcttggaacatccaacagctacgtctcttctacccttaa

SEQ ID NO: 113044 - DNA, 3649 bp, Zea mays
  unsure (1)..(3649): unsure at all n locations
  Clone ID: MRT4577_34583C.1
ggatcgactgacaccttatcctgacgcgcgctcctattcgacagggccgaagtgtggccacagtcatttcgccgctccactgaccgacctgacaggaaaacagcgccgcctgccccgctccgactgctgtgccacccgccagggtgaggctgacagtagccaagtccagccttgggcgccaaaggaagctccacctcgcccgaccccagggctcggactcaacctcgacctcggacgacgatctccgcctcgcccgaccccagggctcggactcaacctcgacctcggaagacgatctccgcatcgcccgaccccagggctcggactctaccttgacctcggacgacggtctccacctcgcccgacccccaggcccggactcagcctcgacctcggaggagcctccgcctcgcctgacctcgggctcggaccgaccacatcgcaagggggccatcattatcctactcctagctagctcaggctacggggaacaagatcggcgtcccatctggttcgccccagtaaacaagtaatgatggcaccccgcgtgctccatgacgacggcggctctcagccccttacggaagcaaggaaacgtcagcaaggatccaacagccccgacagttgtacttccacagggcttaggtgctccttcggcggccacgacatcacatgaacagggcgccaaaacctctccgacagccacgacagcatgtacatagggctctgcctnccctttgctagacacgttagcacattgctacaccccccattgtacacctgggccctctccttacgtctataaaaggaaggtccagggctctcgtacagaggcttggccgcgcgggagaacaggccgacgcataaggctctcgctttttttttttttcccacgcggacgcttgtaaccccctactgtaagcacacccgacctgggcgcagggcaacacgaaggccgcgggtttccccttttgcctgtttcttcccccccttcgtgctccgtctcgcgccgacccatctgggctggggcacgcggcgacaattcactcgtcggtccagggaccccccggggtcgaaacgccgacagttggcgcgccaggaggaggcggggcaaccacggcaagcaggaggcggcacctcgttggctgtcgagcaagtcgatgacgccggcaccccagcgggggacgcgtcgggcgtcgacctcgcgtctgagacgaagacgagcgtcgtttccttgcaacgtgccgactccaagcagacggacaacaccagcacgctcgcgaaggacttgctgggcgtcgccctcgtacctgagacaacggtgcagtccgcccctgacgcgacttcatcaccgcccgtcgaccaagaggtaccgaccgattcccatctcatgcgttttggattcagcctcgacccaccaagcgactccgcttcggtggaagccttcatagaggcatgcaccaaccctccggggtaccatatgcggtcgccctgggacagactgacggccgtctcaacctacggaccctcgggtttcgaggaagatgacgagcccgacttttgttgggatttctccgggctcggtaaccccagtgccatgcgggacttcatgaccgcatgcgactactgcctctccgattgttccgatggtagccgcagcttcggcgacgaggactgcggcccaagtcgtgaatgtttccacgtcgatctaggggtcccggcgaaggcaaccatcttgctgtggtcccagtccctgcggggggtcaggacgcacagctcgagcaaatccgcgagatgcaggccaggctcgatgagggagcaggaacacttgagcagttccgacggaacatcggacaggaatgggcagaccaagcgccggccggagaagcgcgtcatctaccccagggcatccagcaccacattgccgacgacgtcagggcaaggccgccactggcttccagtggggtcggccagaacctggctgcagcagcaatactactccgtgcgatgccggaaccatcgaccaccgaaggacggcgtatccagggagagctcaagaatctcctggaggatgtcgcggtccgacgggccgaaagctctgcctcccgaaggcaggggtaccccctcggagcatcgtgtcgcgacttcccgatttatgcgggaagcctcggtccacaccgggcacacgcgcaacacggcgcctgcggccccgggtcgcctcggcaacgagcaccaccaccgcaaccatcgagcctacctcgacaagaggctgggtggaacggacgatgacaacctcatcattcgcaatctccccctgttcctctccgacaccgctcgagcctggctggagcatctgcctccggggcagatctccaactgggacgacctggtccaagccttcaccggcaacttccagggcacgtacgtgcgccctggaaactcctgggatctccgaagctgccgccagcagccgggagagtctctccgggactacatccggcaattctcgaagcagcgcaccgagctgcccaacgtcaccgactcggatgtcatcggcgcgttcctcgccggcaccacctgccacgacctggtgagcaagctgggttgcaagacccccaccagggcgagcgagctgatggacatcgccaccaagttcgcctctggccaggaggtggttgaggccatctttcggaaggacaagcagccccagggccgccagccggaagatgtccccgaggcgtccactcagcgcggcgcaaagaagaagggcaagaagaagtcgcaaccttgtggaagggcccacaacaacgacaagaaggaggatcacaaggcagaggagttccccgaggtccacgactgcttcatgatttacggtgggccagtgacgaacgcctcgactcggcaccgcaagcaagagcgtcgggaggtctgctcggtaaaggtggcggcgccagtctacttagactggtccgacaagcccatcaccttcgaccagggcgaccaccctgaccgcgtgccgagcccggggaagtatccgctcgttgtcgaccccgtcatcggcaacgtcaggctcaccaaggtcctcatggacggaggcagcaacctcaacatcatctacatcgagaccctcgggctcctgcagatcgatctgtcttcgattcgggcaggcgcgacgccttttcacgggatcatccccggaaaacgcgtccaacccctcggacaactcgatctgtccgtctgcttcgggactccctccaacttccgaagggaaaccctcacgttcgaggtggtcgggttccgaggaacctaccacgcagtactggggaggccatgctatgccaagttcatggtcgtccccaactacacctacctcaagctcaagatgccgggccccaacggggtcatcaccgtcggccccacgtaccgacacgcgtacgaatgcgacgtggagtgcatggagtacgccgaggccctcgccgaatccaaggccctcatcgccgacctggagagcctctccaaggaggcgccagacgtgaagcgtcatgccggcaacttcgagccagcagagacggttaagtccgtccctctcggccccagcaacgacgcctccaagcagatatggatcagctccgagctcgaccccaaatag

SEQ ID NO: 113045 - DNA, 553 bp, Zea mays
  Clone ID: MRT4577_34584C.1
ccggccgggaaagaaatcttttcagaaaagttattagacatcaagctatggctagtcaggcgctcatcctcatctctcggaaacccatcgcaaatgtcgtgaagtaaccgcaaacgcgaatgcacccgctgatcctcctcatgcattccgggggagatggcaatgatctgtatctgaaggcgtagtcgcactttctgagcttagtgcagcggttcgacaagtctatgatgacgccgacgaggactggaaccgtctgtccgttttcaaggccaatgtgaggcgggtgcgccgggacgagttgatggacgcgtgggcgaagaaagtcgttgctagggtctgcgaactcaaggagttggagttgcgccggaactaggtcgcacactgcaagacccggggtgcgctccaccaagagctcatcaaggcgaagctctatgagtacgtggtcaacaaggatggcattctggactactaccactggaatttcaacttcgtctgcccgaccgagattactgagtttactggcagatacgaggaatttgataaggtgaacagt

SEQ ID NO: 113046 - DNA, 278 bp, Zea mays
  Clone ID: MRT4577_34585C.1
tctttcgggacgccatcattaacgcggtgctcgccgatatcacggcggctcttaactttagggggaaggagaccaccagggaggtggagtccattctctacaagggactcaaccttatccaggccgatctattataggccctcgtcaacctgaacgctcaaatcgattttgctgtgaacgcgcttaacccccacatcgcctggcttattgatcatatctgtaccaatgttcttctataagggttattaaaccaaatccatattgccttataatattac

SEQ ID NO: 113047 - DNA, 566 bp, Zea mays
  Clone ID: MRT4577_34586C.1
ggccggaatctgttccccatcgtgggcgtcagtcgcgctatatctactcatcacgttcatctctcgcctccctctgtccatgtgcttggcatcccaccatacgtccatgcgctacctccttggtcggtaaatttgccaccgccaccggccggttcttctctgtcatccagcaccacaaggctaccggcgtctagcaaggctctggcgttcctggtgtgcatcaatttggtgggagtgcggacggcttcactggagtggtacacccgcgttgattccccgcaattcactgaccagaggaccagcgccacgaatccacaccgaagaaccagtgacagaggattctggtgttcagcaggtagaagttgctgagcatgagctaattaaaggagaagagcaggtggtccaggaggagccatacaacgaggagtacgacttgatctaggtggcgtctcccagtcgactttatggcgccaaggatggacagcagttcactttatatttatcttttattttctgtaagacttccgctatgtaataaatacttttatgatattgtgacatttatc

SEQ ID NO: 113048 - DNA, 211 bp, Zea mays
  Clone ID: MRT4577_34587C.1
acccccggggcctgcaatatcttgaagtgattgagactgtcacgcagcaagctaaggatgctaacattcctgatttagaggttattcgcatcttgtgcgcatgggctcatgtaggctgcccacgctgctgcgggcaagccctacccgactgccgcgggcacccgtccgcaggaacggctccaccgtggtgactaaccgcgtcctgcagggc

SEQ ID NO: 113049 - DNA, 533 bp, Zea mays
  Clone ID: MRT4577_34588C.1
cgccggcgtaagcaaggcaccgaaaaacggccgccctggggctacgggaacttaacctcttcattgaaatggaggagcggctccaattgccgaatgagatcgaggaggataaggctcagagggcacgcgtgaagaggcactttcggaagcgcgctgctaaggccatcaaggatgccatgcacaatgctcgcgtcgggggcgggaactacgactacaagaagatcaaggggcagaaaacgagcaaatcatgaggggccaatgagatctaccttacagaggagccgcacccggagagcggggcggattgactagcgaacgacatggcagcccggaggagggtggctaatagatgcgcggagcctggagggattgcagcaccccacaaacaccaagccaaccatggcactacaggaccggggcacacgagcgggggccggcgggcacgcggggggtgggggcggggtagggggggtgaggaggggactgggggggggcgcgggggggggaggtggggggggagcgggggggggggg

SEQ ID NO: 113050 - DNA, 815 bp, Zea mays
  Clone ID: MRT4577_34589C.1
gtcggccgggactactgcctcgacatcttatcgcagccttttgggcgccgccgtgaacaacagcatcgccctcttcaccgccctggggcctgtcaccttgtttccgttagcacttccgaaataccccgccaaacaagtcgacgaaacattcgcgcgtgtgccgtgtgcttgtgtgctgtgcccgacctgtcagccacccgcccttgtccagtcactgcaagcatccacgggattccttcaccatggctgaccaccacgacggagcctctcctcgagaacttgttctcgaagcctgccgacgcaacaacaccgagctcctcgaggaaacactggccgacctgaatgccgctgccaaaaagtcggacaagaagcctgccgactatgtcgcagacatactgaacaacgcgcgcgatggactcggcaacggctgccttcacattgctgccacctacggaagtttcgaggtcatcgacatgctgctcgaccaagaaggcctcgagattgacgaaatcgaccgcatggaacaggacacgcccctccacaaagccgtacgctacgtcaactcgctcgaaaaagacgtctggccccatggtcaatccattgtcgccatgctcctagacgcaggatgcgatcccagaatacggaataaggcgaagctcaagcccgtcgagctggttgacccacgaaacacggagctgaagagcatgctgcaaaagggcgagtttgccatccaggctggtggagacatcgtcgaggatgacgatgacggccatgcaggcagtgggagtgagagccgatgtagcaacaacattacg

SEQ ID NO: 113051 - DNA, 296 bp, Zea mays
  Clone ID: MRT4577_3458C.1
aggaaacatacacgtatttctgcccgccgttttggcaaggaagcggaagatgcatctggggtgccgatacatggaatggggggtgagaccgaagcagcttccatctcggcttaggcaaaaggtacgcaaatattatcgcgaacgctcggccgccactacgggatactatgagatggaaatgaacactgatctgcctcaaagactgatgcggcacataaatcgctacctctgacatcaactagttaagcaggttccactattacatggcatggacaattctgatcctgcataacatt

SEQ ID NO: 113052 - DNA, 833 bp, Zea mays
  Clone ID: MRT4577_34590C.1
ccggccgggagcgccgcaccctcccgcccaccgccgtcgccgcccagccgcagtaaggaggaaggagcaggaagatgccggcggggcacgggctgcggtcgcggacccgcgacctgttcgcgcggccctttcgcaagaaggggtacatcccgctcaccacgtacctgcgcacctacaagatcggcgactacgtcgacgtcaaggttaacggcgccgtgcacaagggcatgccgcacaagttctaccacggccgcaccgggagcgtctggaacgtcaccaagcgcgccatcggcgtcgagatcaacaagcaggttaatggccgcatcatcaggaagcggatccatgtccgcgtggagcatgtgcagccatcccgctgcacagaagagttccgcctgaggaaggtgaagaatgaccagctgaaggcggatgcaaaggagcgcggtgaggtcatcagcaccaagaggcagccgttgggccccaagcctggcttcatggttgaggggactaccatcgagaccgtcactcccatcccgtacgatgtggtcaatgatcttaagggcggatactaggttgtttgtttggtctttctacctgttctacatctgtgttactctagtgcgtacaattttgctcacactgagcagtagtatgaacctattgtgtgttcatgttgaaaattttcccgttctgtgcaaacctgagtttagaagaacgctatgccttgatctttgcttctgagaacaaagatttgcctttttcaacctcgtacggtaccaattatgtatttatgttgtttgacccgtgaactgtaaattgcccaagtatgtcacact

SEQ ID NO: 113053 - DNA, 315 bp, Zea mays
  unsure (1)..(315): unsure at all n locations
  Clone ID: MRT4577_34591C.1
agcctttgacccacacccaccccccgccgggcggcgctgcagaccatggagcacgcgttcgcctttctcgcgcgcgcgctcaccactccgctcccggcacccgccgtcctcccgcggcgccgcccggctcgcgtggccgtcgccgacgcggcgccggagcgcangccgccgggcgcggtggcgttcaccaccaactacgtcgtgccggtcgacgcggcgctcgccgggatcacgcgcccgctcgtcgagattctccgggacctccacaagcgcgttccggacgccatcttgcgggtcttcctcccggcgcgcctt

SEQ ID NO: 113054 - DNA, 796 bp, Zea mays
  Clone ID: MRT4577_34592C.1
aaaaaaaattacaaaaaagcgccgcaccctcccgcccaccgccgtcgccgcccagccgcagtaaggaggaaggagcaggaagatgccggcggggcacgggctgcggtcgcggacccgcgacctgttcgcgcggcccttccgcaagaaggggtacatcccgctcaccacgtacctgcgcacctacaagatcggcgactacgtcgacgtcaaggttaacggcgccgtgcacaagggcatgccgcacaagttctaccacggccgcaccgggagcgtctggaacgtcaccaagcgcgccatcggcgtcgagatcaacaagcaggttaatggccgcatcatcaggaagcggatccatgtccgtgtggagcatgtgcagccctcccgttgcacagaggagttccgcctgaggaaagccaagaatgaccagctcaaggcggatgccaagctccgcggtgaggtgatcagcaccaagaggcagcccgtgggacccaaacctggcttcatggttgagggtgctacactcgagacagtcactcctattccttatgatgtggtcaacgatctcaagggcggttactagagagaattcttgtaccttcagcagttcaaacgagctggcaaacttatctgaatctttttgataattagctagttcttctgttctggtgttatgaactcatgtgggtgtggctattgctgtcggcgtcaaaagatttttttattgccatggttgattgcaacctgttattttaccttctgttttgagtctgtaaaagaaaaaaaaaaaaaaaaagcggcc

SEQ ID NO: 113055 - DNA, 130 bp, Zea mays
  Clone ID: MRT4577_34593C.1
acatccattcaaacacccctacccttcgcatcgaacctagcatcccaaggcctcactgctcgcagtggccccagaagtcagcacgcatccatcccggcatccctccccttcgcacgtcgcctcatcctcg

SEQ ID NO: 113056 - DNA, 256 bp, Zea mays
  Clone ID: MRT4577_34594C.1
tgttaatatataaagatgtgagctagatgtcattaggtttaccagggaaagtccttcaaagtatttatcatctttattcgaaatttcatattttatagaaattgtagaccaaagtttcacctaaatgacatgtagtttgcatcagagagtacaagagtgctaaagcactataacagttacataattccagaaagaaactgctgatttctctatctttatatcaatacatgtatgcattctctttctctctctttct

SEQ ID NO: 113057 - DNA, 846 bp, Zea mays
  Clone ID: MRT4577_34595C.1
gccggcctggtgccgggaaaaaaaaaaaaaacttcacctatagataagggcgacctccaggcccttgcgaaccctagcgccgcaccctcccgcccaccgccgtcgccgcccaaccgcagtaaggaggaaggagcaggaagatgccggcggggcacgggctgcggtcgcggacccgcgaccgtgttcgcgcggcccttccgcaagaaggggtacatcccgctcaccacgtacctgcgcacctacaagatcggcgactacgtcgacgtcaaggttaacggcgccgtgcacaagggcatgccgcacaagttctaccacggccgcaccgggagcgtctggaacgtcaccaagcgcgccatcggcgtcgagatcaacaagcaggttaatggccgcatcatcaggaagcggatccatgtccgcgtggagcatgtgcagccctcccgttgcacagaggagttccgcctgaggaaagccaagaatgaccagctcaaggcggatgccaaggcccgcggtgaggtgatcagcaccaagaggcagcctgtgggacccaaacctggcttcatggtcgagggtgctacactagagacagtcactcctattccttatgatgtggtcaacgatctcaagggcggttactagagagaattcttgtaccttcagcagttcaaacgagctggcaaacttatctgaatcttttttgataattggctagttcttctgttctggtgttatgaacccatgtggctattgctgttggcgtcaaaggatttttttattgccatggttgattgcaacctgttattttaccttctgttttgagtttgcaaaaaaaaaaaaaaaaggccccta

SEQ ID NO: 113058 - DNA, 877 bp, Zea mays
  Clone ID: MRT4577_34596C.1
ccggccgggcaaacttcacctatagataagggcgacctccaggcccttgcgaaccctagcgccgcaccctcccgcccaccgccgtcgccgcccaaccgcagtaaggaggaaggagcaggaagatgccggcggggcacgggctgcggtcgcggacccgcgacctgttcgcgcggcccttccgcaagaaggggtacatcccactcaccacgtacctgcgcacctacaagatcggcgactacgtcgacgtcaaggttaacggcgccgtgcacaagggcatgccgcacaagttctaccacggccgcaccgggagcgtctggaacgtcaccaagcgcgccatcggcgtcgagatcaacaagcaggttaatggccgcatcatcaggaagcggatccatgtccgcgtggagcatgtgcagccctcccgttgcacggaggagttccgcttgaggaaagccaagaatgaccagctcaaggcggatgccaaggcccgcggtgaggtgatcagcaccaagaggcagcctgtgggacccaaacctggcttcatggttgagggtgctacactcgagacagtcactcctattccttatgatgtggtcaacgatctcaagggcggttactagagagaatttttgtaccttcagcagttcaaacgagctggcaaacttatctgaatctttttgataattggctagttcttctgttctggtgttatgaactcatgtggctattgctgttggcgtcaaaagattttttttattgccatggttgattgcaacctgttattttaccttctgttttgagtttgtagattttactgagatccgtctgcattttcatttaccgatgccgaggctcaatccaagatggatttgatcagtgt

SEQ ID NO: 113059 - DNA, 124 bp, Zea mays
  Clone ID: MRT4577_34597C.1
gggtacacacagcgagcgcaggcgtgccattaaatgatcatgcgacatggactaccgcaaacagaaacaatggctctcaacgggtcatgattactccagtcgtatggacacgaactaataatgg

SEQ ID NO: 113060 - DNA, 899 bp, Zea mays
  Clone ID: MRT4577_34598C.1
gcgattgggtacctcgaggccggccgggctagcgccgcaccctcccgcccaccgccgtcgccgcccagccgcagtaaggaggaaggagcaggaagatgccggcggggcacgggctgcggtcgcggacccgcgacctgttcgcgcggcccttccgcaagaaggggtacatcccgctcaccacgtacctgcgcacctacaagatcggcgactacgtcgacgtcaaggttaacggcgccgtgcacaagggcatgccgcacaagttctaccacggccgcaccgggagcgtctggaacgtcaccaagcgcgccatcggcgtcgagatcaacaagcaggttaatggccgcatcatcaggaagcggatccatgtccgcgtggagcatgtgcagccctcccgttgcacagaggagttccgcctgaggaaagccaagaatgaccagctcaaggcggatgccaaggcccgcggtgaggtgatcagcaccaagaggcagcctgtgggacccaaacctggcttcatggttgagggtgctacactcgagacagtcactcctattccttatgatgtggtcaacgatctcaagggcggttactagagagaattcttgtaccttcagcagttcaaacgagctggcaaacttatctgaatctttttgataattggctagttcttctgttctggtgttatgaactcatgtggctattgctgttggcgtcaaaagattttttttattgccatggttgattgcaacctgttattttaccttctgttttgagtttgtagattttactgagacccgtctgcattttcatttaccgatgccgaggctcaatccaagatggatttgttcagtgtattggtgttttcttgagtgctgtggttaatcggatgcggttgggcattg

SEQ ID NO: 113061 - DNA, 233 bp, Zea mays
  unsure (1)..(233): unsure at all n locations
  Clone ID: MRT4577_34599C.1
gacgccgcgcggcgccgacggcgtcataccgactaccgaagagctgtaactgcagggctcggtcggcgtggcccggagagaaagcttaaaaagcaaggggatttaccagactgaacacttgaatcttgaagcgggggcaataatgagaggtctcgaccttgataagacgctttatggaangcagcagggccccgatatgggcggttgccgagaaagtagacagggggagttga

SEQ ID NO: 113062 - DNA, 386 bp, Zea mays
  Clone ID: MRT4577_3459C.1
cgggcaggtacaagctttttttttttttttttttttttttttcttttttttttttttttaatttttaaatgttcttttttatttttggggagccacaaacattagacaaaaactttattcttgaactatgactcacacacaaattaaaacgagggcaccaccaacgatgggcagaaggataacgctgccggttttgccaaaacaagatggcagaacggcccccactgttgcaggagcaagagggagccaacgtcaggcgcaccgaattgcgagaacaacaacaactgagtttgtgcgaaaaaagcagtaggcctcacaccagctagttggctgaatggaaccacatcctgctgctgtaaataagaaagaaagttcaatgaccacca

SEQ ID NO: 113063 - DNA, 396 bp, Zea mays
  unsure (1)..(396): unsure at all n locations
  Clone ID: MRT4577_345C.1
cccacgcgtncgcccacgcgtncggctcctgtgaaccccttccagcatctaatggcgacgccggtgatggccaacctgtggacgacgacgatggcgagtagcgcaaacgctgtgtcagcaactgccatttctgagactagcatcgagatcgtctcgctttgacacctggctgcaactgaaaatgggcaggacatggtcaaagctttgattagtttgtccaccggtctctttctccttcggtatgctgatggtgcacgactgcacccgaacggtgaacttaactgttaactcttgcgaagctctaaatgtctntgctgcgttgctttgagctctcaagtctgaactgtgaacatgtgttctcatgcctaactttatacgatgatttgattttttttt

SEQ ID NO: 113064 - DNA, 186 bp, Zea mays
  Clone ID: MRT4577_34600C.1
attaaatttggacaccggaaagcgcgatcgggggtatttttgactgggagccagttaaggtacacagaattctacaaacagaatgttgggagtgaaagggagatgacataccattttacaaccccactaggtggattctgtcttcttttctagtttgcgtacgttcgcggtgagcaccgtaacttc

SEQ ID NO: 113065 - DNA, 186 bp, Zea mays
  Clone ID: MRT4577_34601C.1
gcctcccggacaaacacacaccccacctaccccggccggtccggcagcagccagcatggacctcggcctacctaagagaggccctgctgggcctgggccccgctgttggggtggccctcggcgcgaggcaacctgaccgtcaggcggtgccggctcccaccggggcccacgctcgcccccgagcag

SEQ ID NO: 113066 - DNA, 465 bp, Zea mays
  Clone ID: MRT4577_34602C.1
cattgggaccctcgaggccggccgggatagctctaccccaacccagatcgctctatcccagctgatcagaacgagcacctagtaacgacctgctcgatcatcacgtgcacagtgtcgaataggtgtctgtctctcttgatgtctggttgcaacggtcatgacgacgacttctcgtcccctgcccttgctgctgctgtgcctgtgcgcgctggtgtcctgatccttctccgcgacaagcttgaaccacgatctgtacatcacctgaagcacacacgacgggcaaggtccttgacaacgctacgatgctgacgatgtcaatgtaccgcacgtccacctccggcgtccagtcccgcaacgagaacctgtctcccaagataaacatgcagcgtgccacctggtgacgtggcaactccacccgctaccaggcacctgcctactaactgtgaagctcagacaaggagcgca

SEQ ID NO: 113067 - DNA, 259 bp, Zea mays
  unsure (1)..(259): unsure at all n locations
  Clone ID: MRT4577_34603C.1
ccgncctttttttttttttttttttttttttttattgacggttgatgctacgaaggcggaggaaaacaacttatgtttttttcggctcaaccacaaagtgacagctgctggtaacaacacattgtttacttcagccgggcacaacaagaacaaatcaactaactcgtttttggcaaatcttattccgctttattttcctaaaggggaaaaacgctaagcttcctaaggggcgcaaagatttttcagggctttttccttg

SEQ ID NO: 113068 - DNA, 241 bp, Zea mays
  Clone ID: MRT4577_34604C.1
aacagtatattacagtctatttaaaacaaagtgaattataacaaacaggcctacagcctatttgaccgggctactgggaggttatttgataacagtgggctggatgaaacagaggcccgacggactcgggaacttcatatgtgagtaaagtaccaacagaagtaaattgacgatgaaaggattttctacggccaaagaagttctattacgtataaggactgggataatttatggacagtgg

SEQ ID NO: 113069 - DNA, 353 bp, Zea mays
  Clone ID: MRT4577_34605C.1
aaaaaaaatataataatatattaaaacaaaaaagaaaaaataaatttgaccaaaactaaaaaatacatctgcaagtgggagaggaaagaccaaccaaaaactatgcaacacaacaagctgctgcgtatcgccatacacaaattaattaggggggggcccttaccttgaccccctgatctgtccgcctgatcccatgtgttggagcatttatcgggcggatcggatctgatcacgcgggggccgttttcttacgggagccgttgggaatgcccctagatttcccggcttgtgtcctagccgattaatccccttttcatgacgagcaccattgtaggcgagagccggaaccccgg

SEQ ID NO: 113070 - DNA, 352 bp, Zea mays
  Clone ID: MRT4577_34606C.1
gatgacgccgccgccgccgcctggaggtcacggtcgcggtcacggtcgcagcacctgacggtggtgaaggccgccggcacggtggggtacatggacccggagtattacgggctgcaccacctgacggtgaagagcgacgtgtacgggttcggcgtggtgatgctggagtcgctgacggggcggcgcgccatcttcaagtcgggggagggcgggagccccgtgagcgtggtggactacgcggtgcccagcatcgcgggcggggagctcgggaaggtgctggacccgcgcgcgccggagcccgcggcgcactaggccgatgtcgtggagctggtggcgtacaccgtcgtgcact

SEQ ID NO: 113071 - DNA, 1794 bp, Zea mays
  Clone ID: MRT4577_34607C.1
atgccggagccatcaaccaccgagggtcggcgaatccagggagagctcaagaatctcctggaaggcgctgtggtccgatgggccgagagctctgcctcccgaaggcagggatacccctcggaacctcatgccgcgacttcccgattcatgcgggaagcctcagtctacaccaggcgcacgcgcaacaccgtggctgcggccccgggccacctcggcaacgagcaccatcatcgcgacggtcgggcccacctcgacgagagggtgcgccgaggtggaacgaatgacgacaacctcatcatccgcaacctccccctgttcctctccgacaccgctcgcgcctggttggagcacctgcctccggggcagatctccaactgggatgacctggtccaagccttcgccggcaatttccagggcatccgggagagtctctccgggactacatccggcgattctcagaagcagcgcaccgagctgcccaacatcaccgactcagatgtcatcggcgcgttccttgccggcaccacctgccgcgacctggtgagtaagttgggtcgcaagacccccaccagggcgagcgagctgatggacatcgccaccaagttcgcctctggccaggaggcggtcgaggctatcttccgaaaggacaagcagccccagggccgcccatcggaagatgctcccgaggcgtctactccgcgcggcgccaagaagaaaggcaagaagaagtcgcaagcgaaacgagacgccgctgacgcggaccttgtcgccgccgccgagtacaagaaccctcggaagccccccggaggtgccaacctcttcgacaagatgctcaaggagccttgcccctatcatcaggggcccatcaagcacacccttgaggagtgcgtcatgcttcggcgccacttccacagggccgggccacccgcgaagggtggcagggcccgcgacgacgacaagaaggaagatcaccaagcaggagagttccccgaggtccgcgactgcttcatgatctacggtgggcatgcggcgaatgcctcggctcggcatcgcaagcaagagcgcggggaggtctgctcggtgaaggtggcggcgccagtctacctagactggtccgacaagcccatcaccttcgaccaagctgaccaccccgaccacgtgccgagcccggggaaatacccgctcgtcgtcgaccccgtcgtcggcgacgtcaggctcaccaaggtccttatggacaggggcagctgcctcaacatcatctacgccgagaccctcaggctcctgcgcgtcgatctgtcctccatccgagcaggcgctgcgcccttccacgggatcattcccgggaagcgcgtccagcccctcggacgactcgaccttcccgtctgcttcagaacaccctctaacttccgaagggagactctgacgttcgaggtggtcgggttccgaggaacctaccacgcggtactggggaggccatgctacgcgaagtttatggccgtccccaactacacctacctgaagctcaagatgccgggccccaacggggtcatcaccgtcggccccacgtacaaacacgcgttcgaatgcgacgtggagtgcgtggagtacgccgaggccctcaccgagtccgaggccctcatcgccgacctggaaagcctctccaaagaggtgccagacgtgaagcgccatgccggcaacttcgagccagtggagacggtcaaggccgtccccctcgaccccagtggcgacgcctccaagcagatccggatcggttccgggctcgaccccaaatag

SEQ ID NO: 113072 - DNA, 3099 bp, Zea mays
  Clone ID: MRT4577_34608C.1
atgggcagtctccaacaacctctccaacccgggacggtgctccgtttcgggagtcttgagttcatgtccctcgacggcagctacgacatgatactccttccaccgccgcgcgacaacgacaatggcggccgacaacccgcccgccggcggcggaatcgacgacatcttccccgcgtggtggaagaacaacattcgagctcgccccatcctctcccccgccaacggaggaggaggcggggcaaccaaggccaagcgggaggccgcgcttcgtcggctgtcgagcgaaacaacgtccccagcgccccaacggtgggcgcgtcgggcgtcgacctcgcgtttgagacgaaggcgagcgccgtccccccgcgacacgccaatcccgagcaagtggacgacgctagcgcgctcgcggagggcctgcaggacgtcgccctcgtacctaagacgacagcgcaatcagtccccgacgtgactatgtctctcctcgtcgaccaaaaggtactgactgattcccatcctacgtcatttcgactcggcctcaacccgcctagcgacctcgctttggcgggcgctctcgttgaggcgagtgcaacccctctggggtttcgtatgcggtcaccttgggaccgattgacggacgtctcgacctacgggccctctgggtccgaggaagatgacgatcccagcatctgctgggatttctctggatttggcaaccccagtgccatgcgggactttatgaccgcatgtgactactgcctctccgactgttccgacggtagccgcagccttgacgacgaggactgcggcccaagccgcgaatgtttccacgtcgagctaggggatccctccgaaggcaaccatctcggcatgccggaggacggtgatctccctaggccggtgcctcgcgccgacatcccgcgggagctagctgtggtccccgttccggcggggggtcacgacccacagctcgagcaagtctgcggggcgcaggccaggctcgacgagggaacaggagcgctcgagtcgatccgccgggacgtcgggcaggtattgacgggccaacccccggccggagaaatacatcacctgccccagggtttccagcaccgcgtcgccaacgacgtcagggtcaggccgccacccgcatccagcggggtcggtcagaacctggcagccgcagcgatgctcctccgtgtgatgccggagccatcaaccaccgagggtctgcgaatccagggagagctcaagaatcttctggaaggcgctgcggcccgacgggccgagagctctgcctcccgaaggcagggatacccctcggaacctcatgccgcgacttcccgattcatgcgggaagcctcggtctacaccgggcgcacgcgcaacaccgcgcctgtggccccgggccacctcagcaacgagcaccatcgtcgcgaccgtcgggcccacctcgacgaaagggtgcgccgaggctaccaccctaggcatgggggacgctacgacagcggggaggatcagagtccctcgcccgaaccacccgactaccgcctggcctgccaactgggtggaacggacgacgacaacctcatcatccgcaacctccccctgttcctctccgacactgctcacgcctggttggagcacctgcctccggggcacatctccaactgggatgatttggtccaagccttcgcctgcaatttccagggcacctgccggcaacagccgggagagtctcttcgggactacatccagcgattctcgaagcagcgcaccgagctgcccaacatcaccgactcagatgtcattggcgcgttccttgccggcaccacctgccgcgacctggtgagcaagttgggtcgcaagacccccaccagggcgagcgagctgatggacatcgccaccaagttcgcctctggccaggaggcggtcgaggccatcttccgaaaggacaagcagccccagggccgcccgtcggaagaggcccccgaggcgtctactccgcgcggcgccaagaagaaaggcaagaagaagtcgcaagcgaaacgcgacgccgccgacgcggaccttgtcgccgctgccgagtacaagaacccttggaagccccccggaggtgctaacctcttcgacaagatgctcaaggagccgtgcccctaccatcaggggcccgtcaagcacaccctcgaggagtgcgtcatgcttcggcgccacttccacaaggccgggccacctgcagagggtggcagggcccgcgacgacgacaaaaaggaagatcaccaagcaggagagttccccgaggtccgcgactgcttcatgatctacggagggcatgcggcgaatgcctcgactcggcatcgcaagcaagagcgccgggaggtctgctcggtgaaggtggcggcgccagtctacctagactggtccgacaagcccatcaccttcgaccaagctgaccaccccgaccacgtgccgagcctggggaaataccagctcgtcgtcgaccccatcgtcggcaacgtcaggctcaccaaggtcctgatggatgggggcagctgcctcaacatcatctacgccgagaccctcaggctcctgcgcgtcgatctgtcctccgtccgaacgggcgctgcgcccttccacgggatcattcctgggaagcgcgtccagccccccggacggctcgaccttcccgtctgcttcggaacgccctccaacttccgaagggagattttgacgttcgaggtggtcgggttccggggaacctaccacgcggtgctggggaggccatgctacgcgaagttcatggtcgtccccaactacacctacctgaagctcaagatgccgggccccaacggggtcatcaccgtcggccccacgtacaaacacgcattcgaatgcgacgtggagtgcgtggagtacgccgaggccctcgccgagtccgaggccctcatcgccgacctggagaacctctccaaagaggtgccagacgtgaagcgacatgccggcaacttcgagccagcggagacggttaagaccgtcccactcgaccccagtggcgacacctccaagcagatccggatcggttccgggctcgaccccaaatag

SEQ ID NO: 113073 - DNA, 2673 bp, Zea mays
  Clone ID: MRT4577_34609C.1
atgggcagtctccagcaacctctccaacccgggagggtgctccgtttcgggagccttgagttcatgtccctcgacggcagctacgacatgatactccttccaccgccgtgcgacaacgacaatggcggccgacagcccgcccgccggcggcggaatcgacgacgtcttccccgcgtggtggaagaacaacattcgagctcaccccgtcctctcccccgccgacggaggaggaggcggggcaaccaaggccaagcaggaggcagtgcctcgtcggctgtcgagcgagtcgacggccccagcgccccaacggggggcgcaccgggcgtcgacctcgcgtttgagacgaaggcgagcgccgtctccccgcgacacgccaatctcgagcaagcggacgacgccagcacgctcgcgaaaagcttgctggacgtcaaccttgtacctgagacgacggcgcagtcagtccacgacgtgacctcatcaccgcccgtcgaccagaaggtaccgaccgattcccatcccacgtctttcggattcagcctcgacccgcctagcggcttcgctttggcgggtgctctcgtagaggcaagtccaaaccctctggggtttcgtacgcggtcaccttgggaccggctgacggacgtctcgacctacgggccctctgggtccgaggaagacgacgagcctagcatctgttgggatttctctggacttggcaaccccagtgccatgcgggacttcatgaccgcatgcgactactgcctttccgactgttccgacggtagccgtagcctcggcgacgaggactgcggcccaagtcgcgaatgcttccacgtcgatctagggggtccctccgaaggcaaccatctcggcatgccggaggacggtgatctccctaggccggtgcctcgcgttgacatcccacgggagctagctgtggtccccgttcaggcggggggccatgacccacagctcgagcaaatccgtggggtgcaggccaggctcgacgagggagcaggagcgcttgagccgatccgccgggacgtcgggcaggcatgggcgggccaacccctggccggagaaatacgtcatctaccccagggcttccagcaccgcgtcgccgacgacgtcagggtcaggccaccacccgcatctagtggggtcggccagaacctggctgcagcagcgatgcttctccgcgcgatgccggagccatcaaccaccgaggggcggcgaatccagggggagctcaagaatctcctggaaggcgccgcggtccgacgggccgagagctctgcctcccgaaggcaggggtacccctcggaacctcatgccacgacttcccgattcatgcgggaagcctcggtctacaccggacgcacgcgcaacacagcgcctgcggccccgggtcgcctcggcaacgagcaccatcactgcgaccgtcgggcccacctcgacgagaggcgcaccgagctgcccaacatcaccgactcggatgtcatcggcgtgttcctcgccggcaccacctgccgcgacctggtgagcaagctgggtcgcaagacccccaccagggcgagcgagctgatggacatcgccaccaagttcgcctccggccaggaggcggtcgaggctatcttccggaaggacaagcagccccagggccgcccttcggaagatgcccccgaggcgtcaactcagcgcggcgccaagaagaagggcaagaagaagtcgcaagcgaaacgcgacgccgccgacgcggaccttgtcgccgccgccgagtacaagaaccctcggaagccccccggaggtgccaacctcttcgacaagatgcttaaggagccgtgcccctatcaccaggggcccgtcaagcacacccttgaggagtgcgtcatgcttcggcgccacttccacagggccgggccacccgcggagggtggcaaggcccgcgacgacgacaagaaggaagatcaccaggcaggagagttccccgaggtccgcgacagcttcatgatctatggtgggcaagcggcgaacgcctcggctcggcaccgcaagcaagagcgccgggaggtctgttcggtgaaggtggcagcgccagtctacctagactggtccgacaagcccatcaccttcgaccaaaccgaccaccccgaccatgtgccgagcctagggaaatacccgctcgtcgtcgaccccatcatcggcgacgtcaggctcaccaaggtcctcatggacggaggcagcaacctcaacatcatctacgccgagaccctcgggctcctgcgtgtcgatctggagaccctgacgttcgaggtggtcgggttccgaggaacctaccacgcgatactggggaggccatgctacgcgaagttcatggccgtccccaactacacctacctgaagctcaagatgccgggccccaatggggtcatcaccgtcggccccacatacaaacacgcgttcgaatgcgacgtggagtgcgtggagtacgccgaggccctcgccgagtccgaggccctcatcgccgacttggagagcctctcgaaggaggtgccagacgtgaagcgtcatgccggcaactttgagccagtggagacggttaagtccgtccccctcgaccccagcagtgacgcctccaagcaagtccggatcggctccaagctcggtcccaaatag

SEQ ID NO: 113074 - DNA, 384 bp, Zea mays
  Clone ID: MRT4577_3460C.1
aagggagtacataccgaaaaaatttaacatttttctgtttcatgtttcttggataaattagttattagctggctgaaattggatagcagttatgttcagctttcattagtttttttttctctcgtacagcattatcgtttctcatggcagaaaattaccactctgccagtaacgaggcagatggttctgtaggctccgaatgaatctggtttatataataacatttgaaatggcaacgtggaatatggattaacagtgtggtttgacctggtttccaccctttttttgtaactgaaaccttcgaactttctcaattggtgctatattctgtttactcctcccgtttgttttccattttcctgtgttttcaatcaaaaaaaacac

SEQ ID NO: 113075 - DNA, 211 bp, Zea mays
  Clone ID: MRT4577_34610C.1
ggggacccccccgggaggggggacaaaagcccggcggctgaggtggaaacccccagggggaccgttacccttgccagggcccaaacgcccgcccccatcgccaaggccccccccgtatagcccaaggtgggcgggctatccccgacaagcacaaataagggggcccccctagggggcccaaaaaaggcttaacgggccccccaccccaaaa

SEQ ID NO: 113076 - DNA, 4365 bp, Zea mays
  Clone ID: MRT4577_34611C.1
atgacggtgcattccgcccccgacgcgacttcaccgtccatcgatcaaaatgtaccgtccgttttccaccccatgccttttagattcagcttcgatccaccaagcgaccccgcttcggtgagcgctttcataaaggcatatcctaaccttccagggtaccatatgtggtcatcttgggaccgactgacgaccgtctcaacctacgggcccccgggttccgaggaagaggacgaccccgactccggttgggatttctccaggctccgtgatcctagtgccatgcgagacttcatgaccgcatgtgactactgcctctccgattgctctgacgatggccacaaccttgatgacgagggttgtggcccaagtcgcaaatgtttccacgtcgatcttggggatcacgacgaaggcaaccacctcggtatgccggaggatgacgatccccctgggcctacttctcgcgttgacatcccgcgggagctagctgtggtcccagtccctacggggggtcaggacacacagcttgagcaaatcccaacgagcaacaccatcacgacagtcgagcccacctcgatgagagggtgcgctaaggctaccaacccaggcgtggaggatgctacgacagtgaggaggatcggagtccctcgcccgaaccaccaggtccgcgagccttcagtcgggccatacgatgggcgccgttcccggctcggttccgagccccgactaccgtcaccaagtacttgggggagacaaggccggagttgtggcttgcggactaccggctggcatgccagttgggagggacggacgacgacaacctcatcatctgcaacctccctctcttcctctctgacgctgcccgggcctggctggagcatctgcctcctgcgtagatctccaattgggacgacctggtcaaggccttcgctggaaacttccagggcacatacgtgcgccctgggaactcatgggatctccgaagctgccgccagctgccaggggaaaccctgcaagagtacatccgacggttttcaaagcagcgcactgagctgcccaacatcaccgactcggatgtcattggggcgttcctcgcaggcaccacgtgccgagacctggaggcggtcaaggccatcttccggaaggacaaagcctcaagggaggcagaaggaagacgtccccaaggcgtccgcccagcgtggcacgaagaagaaggccaagaagaagtcgcaagcgaagcgcgacaccgctgacgcagatcttgtcgctgctgccgaggacagaaaccctcggaaacctcccggaggggccaacctgttcgacaagatgctcaaggagtcgtgcccctaccaccagggtcccgtcaagcacacccttgaagaatgcgtcatgcttcggcgctacttccataaagccgggtccccggcgggagatggcaaaggccaagacaaccacaagagggagggcgacaaggcagaggagttccccgaggtccacgactgcttcatgatctacgatgggcaagtggcgaacgcctcagctcggcaccgcaagcaggagcgccgggaggtctgcttggtgaaggtggcggcaccagtctacctagactggtctgacaagcctatcacctttgaccaaggcgaccaccccaactgcgtgtcgagcccaggaaggtacccactcgttgtcgatcctgtcatcggcaatgccaggctcaccaaggtcctcatggacggaggaagcagcctcaacatcatctacgccgagaccctcgggctcttggagatcgatctgtccacgatccggatcggtgcggcgccctttcacgggatcgtccccagaaagcgtgtcctgccccttggtcaactcgatttgcccgtctgcttcgaaactccctccaacttccgcagggaaaccctcacgttcgaggtggtcgggttccgagggacctaccacgcggtgttgggaaggccatgctacgccaagttcatggccgtccccaactacacatacctcaagctcaagatgccaggccccaacggggtcatcactgtcggatccacgtaccgacacgcgtacgaatgcgatgtggagtgcatggagtacgctgaggccctcgccgagtccaaggccctcatcgccgacctagagtgcctctccaaggaggtgcctgatgcgaagcgccacgccggcaacttcgaaccggatgaagcggaagcagtgctcatcgactttctccatgcaaacgccgaaatttttgcgtggagtccctcggacatgcccgacatactgagggatatcgctgagcactcactggatatccgggctagagcccgacccgtgaagcagcacctgcgtcgctttgacgaagagaagcgcagggccataggcgaggaggtccacaagctgatggctgcagggttcatcaaagaggtattccatcccgaatggttagctaaccctgtgcttgtgaaaaagaaaggttatcaccaaatcaagatgaaagagtccgaccagctcgcgacttctttcatcacaccttttggcatgtattgttatactactatgccatttggcttgaggaatgtaggtgcaacataccaaaggtgcatgaaccacgtgttcggagagcacatcagccgaacggtcgaggcttacatcgatgacatcgttgtcaagacgaggaaagcctccgacctcctctctgaccttgagacgacgttcaagtgtctgggagcgaaaggcgtgaaactcaatcccgagaagtgtgtcttcggagttccccgaggcatgctcctagggttcatcgtctccaagcggggcatcgaggccaacccggagaaaatcgcggccatcaccgacatggggcctatcaaagatttgaaaggagtacagagggtcatgggatgccttgcggctctgagccgcttcatctcgcgcctcggcgagagaggattgcccttgtaccgcctcttaaggaaggccgagcgcttcacttggacccccgaggctgaggaagccctcagaaacttaaaggcactccttaccaatgcgcccatcttggtgccccccgatgcgggagaagccctcttgatctacatagccacaaccactcaggtggtcagcgccgcgatcatagtcgagagacgagaagaagggcatgcactgctcgtccagaggccggtctacttcatcagcgaagtgctatccgagaccaagatccgctacccgcaaattcagaagctaatgtacacgcttgtcactgaccaagtcatgaagaactcccactaccgcgaccggaatatggaggcctactatgacgaagttcggcgtctagaagacaagttctacgggctggagctcaaccatatcgctcgacggtacaacgagactgcggatgagctggcgaaaatagcctcggggcggacaatggttcccccggacgtcttctccagagacatacatcaaccctccatcaagatcgacgacacgcccgagccgaggaggcctcggcccagcccgaggtaccctcgaccgccaagggtgaggccctgcgcgtcgagggagagcggaatggggtcacgccaaacccgaactggcaggcctcgtacctggaatatctcctctgaggagagctgccccttgacaaggccgaagcttggcgactgtcgcggcgcgccaagtcgttcgccttactgggtgatgaaaaggagctctaccactgcagcccctcaggcattctccaacgatgcatatccgtcgccgaaggacaggagctgttgcaagaaatacacttgggggcttgcggtcaccatgcagcacctcgagccctcgtggggaatgccttccgacaagaaggcacccaggggctgctcgcacctgctggttgccatcgacaaattctccaagtggatcgaggtccgacctctaaccagcatcaggtccgagcaggcggtggcgttcttcacaaacatcatccatcactttggggtcctgaactccatcatcaccgacaatggcacacagttcactggaaagaagttcccggacttctacgaggaccaccacatccgtgtggactgggccgccgtagctcaccccatgacgaatgggcaggtggagcgtgccaacggtatgattctgcagggacttaaaccgaggatctacaacgacctcaacaagtttggcaagcggtggatgaaagagctaccctcggtggtttggagtctgaggacgacgccaagccgagccacgggtttctcgccgttctttctagtctatggggccgaggccgtcctacccacggacttagaatacggttcctcgaggacaaaggcgtacgatgaccgaagcaaccagaccagctga

SEQ ID NO: 113077 - DNA, 2382 bp, Zea mays
  Clone ID: MRT4577_34612C.1
atgccgttcggtttgaggaatgcgggcgcaacgtaccagcggtgcatgaaccatgtgttcggcgaacacatcggacgcacagtcgaggcctacgtcgatgacatcgtggtcaagacaaggaaggctcccgatctcctctccgaccttgaagtgacattccgatgtttcaaggcgaaaggcgtcaagctcaatcctgagaagtgcgtcttcggggtgccccggggcacgctcctggggttcatcgtctctgagcgaggcatcgaagccaacccggagaagatcgcagccatcaccagcatgggacccatcaaggacttaaaaggtgtacagagggtcatgggatgcctcgcggccctgagccgcttcatctcacgcctcggcgaaagaggtctgcctctgtaccgcctcttaaggaaggccgagtgtttcgcttggacccctgaggccgaggaagccctcgggaacctgaaggcgctccttacaaaggcgcctgtcttggtgcccctagcggatggagaagccctcttggtctacgtcgccgcgaccactcaggtggttagcgccgcgattgtggtcgagaggcaagaggaagggcatgcattgcccgttcagaggccggtctacttcatcagcgaagtgctgtccgagaccaagatccgctacccacaagttcagaagctgctgtatgctgtgatcctgacgaggcggaagttacgacactacttcgagtctcatccggtaactgtggtgtcatccttccccctgggggagatcatccagtgccgagaggcctcgggcaggatcgcaaagtgggcggtggaaatcatgggcgaaacaatctcgttcgcccctcggaaggccatcaagtcccaggtgttggcggacttcgtggccgaatgggtcgacacccagatgccgacggccccgatccaaccggagctctggaccatgtttttcgacgagtcgctgatgaagacaggagccggcgcgggcctgctcttcatctcgcccctcggaaagcacctgcgctacgtgctgcgcctccatttcccggcatccaataatgtggctgagtacgaggctctggtcaacgggttgcggatcgccatcgagctaggggtcagacgcctcgacgcccgcggcgactcgcagctcgtcatcgaccaggtcatgaagaattcccactgccgcgacccgaagatggaggcttactgcgatgaggttcgacgcctggaagacaagttctacgggctcgagctcaaccacatcgctcggcgcttcaacgagactgcggacgagctggctaaaatagcctcggggcgaacaacagtccccccggacaaggcgcccgggggctacacgcacctgctggtcgccatcgacaatttctccaagtggatcgaagtccgacccctgaacagcatcaggtctgagcaggcggtggcgttcttcaccaacatcatccatcgcttcggggtcccaaactccatcatcaccgacaatggtacccagttcaccggcaaaaaattcttggatttttgcgaggatcaccacatccgggtggactgggccgccgtggctcatcccatgacgaatgggcaagtagagcgtgccaacggcatgattctacaagggctcaagcctcggatctacaatgacctcaacaaattcggcaaacgatggatgaaggaactcccctcggtggtctggagcctaaggacgacgccgagtcgtgccacgggtttcacgccgttcttcctgatctacggggccgaggctatcttgcccactgacctggaatacggctccccgaggacgagggcctacaccgatcaaagcaaccaagctagccgagaagaatcactggaccagctggaggaggctcgggatagggccttactacactcggcgcggtaccagcagtccctgcgacgctaccacgcccgaggggtccggtcccgagacctccaggtggggatctggtgcttcggctgcggcaagacgcccgagggaggcacaagctcatgccccctgggaagggccattcgtcatcgccaaagttctgaagcccggaacatacaagctggccaacaatcaaggcgagatctacgacaacgcttggaacatcaaacagctacgtcgcttctacccttaagatgttttcaagttattcacatacctcgcaccaacgcaaagtttagtcatcaaggaagggtcggcctcgcctcggcaaagcccgaccctccctcgggggctaaaaggggggagaccccctctgcgtcgaattttttcctcgaaaaaggatctctttttagcaggatttctttcgtgcttcttgactacttcggaaagcggatcctggaaacgacggagtacacgtaa

SEQ ID NO: 113078 - DNA, 3078 bp, Zea mays
  Clone ID: MRT4577_34613C.1
atgggcagtctccagcaacctctccgccccgggacggtgcttcggttcgggactcttgagttcatgtccttcgatggcagctacgacatgatacttcttccaccgccgcgcgactacgacaatggcggccgacaacccgcccgccggcggcggaatcgacgacgtcttccccgcgtggtggaagggcaacattcaggctcgctccgttctctcccccgccaacggaggaggagacggggccgtcaaggccaggtgggaggccgcgcttcgtcggccgtcgagcgaattgacgcccccgacaccccgacggaaggcacgccggacgtcgacctcgcgttcaagacggaggcaagcaccgtccccccgcggcacactgaccccgagcaagaagacgacgccggcgcgctcgcggaaagcctgcaggacgtcgccctcggaccagagatgatggtgcaaccagtccccgatgtgactacgtcgctcctcgtcgaccaaaaggaagatgacgatcccagcatcggttgggatttctccggacttggcaaccccagtgccgtgcgggacttcatgaccgcatgcgactactgcctatccgactgttccgatggaagccgcagccttggcgacgagagctgcggcccaagccgcgaatgtttccacatcgagctaggggatccctccgaaggcaaccatcttggcatgccggaggacggtgatctccctaggccggtgcctcgcgccgacatcccacgggagctagctgtggtccccgctccggcggggggttacgacccacaactcgagcaagtccgcgaggcgcaggccaggctcaacgagggaacaggagcacttgagccaatccgtcaggacgtcggacaggcgtgggtgggccaacccctggccggagaaatacgtcacctgccccaaggtctccagcaccgcgtcgccaacaatgtcaggatcaggtcgccgcccgcatccagcggggttggtcagaacctggcaaccgcagcaatgctcatccgcgcgatgccggagccgtcaaccaccgagggtcggcgaatccagggagaactcaagaatctcctggaaggcgctgcggcccggcgggccgagagcactgcctcccgaaggcaaggttatccctcagaacctcatgccgcgacttcccgattcatgcgggaagcctcggtctacaccgggcgcacgcgcaacaccgcgcctgcggccccgggccacctcgacaacgagcaccatcgacgtgaccgttgggctcacctcgacgaaagggtgcgccgaggctaccaccccaggcgtggggggcgctacgacagcggggaggatcggagtccctcgcccgaaccacccggtccgcaggccttcagtcgggccatccgacgggcgccattcccgacccggttccgacccccgactactatcacaaagtactcgggggaaacgagaccggaactgtggctcgcggactaccgccttgcctgccaactgggtggaacggacgacgacaacctcatcatccgtaacctccccctgttcctctccgacactgctcgcgcctggttggagcacctgcctccggggcagatctccaactgggacgacttggtccaagccttcgctggcaatttccagggcacatacgtgcgccccgggaattcctgggaccttcgaagctgccggcaacagccgggggagtcgctccgggactacatccggcgattctcgaagcagcgcaccgagctgcccaacatcaccgactcggatgtcatcggcgcgttcctcgccggcaccacttgccgcgacctggtgagcaagctgggtcgcaaaacccccaccagggcgagcgagctgatggacatcgccaccaagttcgcctctggccaggaggcggtcgaggctatcttccgaaaggacaagcagccccagggccgcccatcggaagaggctcccgaggcgtctgctccgcgcggcgccaagaagaagggcaagaagaagtcgcaatcgaaacgcgacgccgctgacgcggaccttgtcgccgccgccgagtataagaaccctcggaagccccccggaggtgcgaacctcttcgacaagatgctcaaggagccgtgcccctaccatcaggggcccgtcaagcacaccctcgaggagtgcgttatgcttcggcgtcacttccacagggccgggccacccgccgagggtggcagggcccgcgacgacgacaagaacgaagatcacctagcaggagaattccccgaggtccgcgactgcttcatgatctatggagggcatgtggcgaatacctcggctcggcaccgcaagcaagagcgccgggaggtctgctcggtgaaggtggcggcgccagtctacctagactggtccgacaagcccatcactttcgaccaggccgaccaccccgatcatgtgccgagcccggggaaatacccgctcgtcgtcgaccccgttgtcggcgatgtcaggctcaccaaggtcctgatggatgggggcagctgcctcaacatcatctacgccgagaccctcaagctcctgcgcgtcgatctgtcctccgtccgagcaggtgctacgcccttccacgggatcacccctgggaagcgcgtccagcccctcgggcgactcgacctccccgtctgcttcgggacaccctccaacttccgaagggagaccctgacgttcgaggtggtcgggttccgaggaacctaccacgccgtgctagggaggccatgctacgcgaagttcatggccgtccccaactacacctacctgaagctcaagatgccgggccccaacggggtcatcaccgtcggccccacgtacaaacacgcgttcgaatgcgacgtggagtgcgtggagtacgccgaggccctcgccgagtccgaggccctcatcgccgacctggagaacctctccaaggaggtgccagacgtgaagcgccacgccggcaacttcgagccagcggagacggtcaaggccgtccctctcgaccccagcggcgacaccaccaagcaggtccggatcggttccgggctcgaccccaaatag

SEQ ID NO: 113079 - DNA, 454 bp, Zea mays
  Clone ID: MRT4577_34614C.1
ccggccgggagtgacagttttccctccgtacgcacatccacgcaggaggagcggcctcccagtggacgccgtggcgaacaataaccgtcgtcctcgacgcatgcctcctcctactcctcctcctgaacgttaactcgcccgccgccgacgaggaatactgaacgaatacggactacaccgagagcctgaaccgcgagctcatggcggccctatccccccttacgcgcaaactccggctcttgtcacacttcccgtactactgaagcgaggatccagaaggacaaggtggacatcaacaaaatcatttacttcttctcagtgcaatcgtacagccgttgcttctgccaacatgcttgctgttcttcgatggcgaactctcctgtgcttcatctcttcacggtgccatccttcctctgtgggagtactatgcgatctacatggatgttgagtggat

SEQ ID NO: 113080 - DNA, 551 bp, Zea mays
  unsure (1)..(551): unsure at all n locations
  Clone ID: MRT4577_34615C.1
tccacncgttcgcccagcgtccgttccattcctgcctatctcctttcctgtgaatctgtcctcaagagctgtggatccgttcttgcaccgcggcttgacaatagcggtaacgcacgcgatctctaagggagcgaggtgtctccatgcggcaatcgagcggccccgggcttccttgacagacctaggggtgccgtggcagcgcgcatggcaccgtcagctggcgcggcatcggcggcttcttgaagaagaacgcgtttgctgcaccgaggctaaccctgatgaccaggacattcaacgccaacttacctacgcacatgaacatgaaccttgtgcttgacaaatctatgaacaggggtgagaaggaggagaagcccatcatgagtgagatcgattacaatcaagaccttactgatgctttgaccaaacccagcgacaggatcgtcgtcttaaacttgttattcactgtctgcagcagatgacgtgctatttaccccacaatttgtaaaactgcggagcagaatacatatgtgctgttcttgcagccgaactac

SEQ ID NO: 113081 - DNA, 2985 bp, Zea mays
  Clone ID: MRT4577_34616C.1
atgggcagtctccaacaacctctccaacccgggacggtgctccgtttcgggagtctggagtttatgtccctcgacggcagctacgacatgatactccttccaccgccgcgcgacaacgacaatggcggtcgacaacccgcccgccggcggcagaatcgacgacatcttccccgcgtggtggaagaacgacattcgagctcgccccgtcctctcccccgccaacagaggaggaggcggggcaaccaaggccaagcgggaggccgcgcttcgtcagctgtcgagcgaatcgacgtccccagcgccccaacggggggcgcgtcgggcgtcgacctcgcgtttgagacgaaggcgagcgccgtccccccgcgacacgccaatcccgagcaagtggacgacgccagcgcgctcgcggagggcctgcaggacgtcgccctcgtacctaagacgacggcgcaatcagtccccgacgtgactatgtcgctcctcgtcgaccaaaaggtactgactgattcccatcctacgtcatttcgacgcggcctcaacccgcctagcgacctcgctttggcgggcgctctcgttgaggcgagtgcaacccctctggggtttcgtatgcggtcgtcttgggaccgattgacggacgtctcgacctacgggccctctgggtccgaggaagatgacgatccccgcgtctgctgggatttctctggatttggcaaccccagtgccatgcgggactttatgaccgcatgtgactactgcctctccgactgtttcgacggtagccgcagccttgacgacaaggactgcggcccaagccgcgaatgtttgcacgtcgagctagggaatccctccgaaggcaaccatctcggcatgccggaggacggtgatctccctaggccggtgcctcgcgccgacatcccgcgggagctagctgtggtccccgttccggcggggggtcacgacccacagctcgagcaagtccgcggggcgcaggccaggctcgacgagggagcaggagcgctcgagtcgatccgccgggacgtcgggcaggtatgggcgggccagcccccggccggagaaatacgtcacctgcaccagggtttccagcaccgcgtcgccaacgacgtcagggtcaggccgccacccgcatccagcgaggtcggtcagaacctggcagccgcggcgatgctcctccgcgtgatgccggagccatcaaccaccgagggtcggcgaatccagggagagctcaagaatcttctggaaggcgctgcggcccgatgggccgagagctctgcctcccgaaggcagggatacccctcggaacctcatgccgcgacttcccgattcatgcgggaagcctcgatctacaccgggcgcacgcgcaacaccgcgcctgcggccccgggccacctcggcaacgagcaccatcgtcgcgaccgtcgggctcacctcgatgaaagggtgcgccgaggctaccatcccaggcgtgggggacgctacgacagtggggaggatcggagtccctcgcccgaaccacccggtccgcaggccttcagtcgggccatccgacgggcgccgttcccggcccggttccgacccccgactactatcacaaagtactcgggggaaacgagaccggaactgtggctcgcagactaccgcctggcctgccaactgggtggaacggacgacgacaacctcatcatctgcaacctccccctgttcctctccgacactgctcgcgcctggttggagcacctgcctccggggcagatctccaactgggatgatttggtccaagccttcgccggcaatttccagggcacgtacgtgcgccccgggaattcctgggaccttcgaagctgccggcaacagccgggagagtctcttcgggactacatccggcgattctcgaagcagcgcaccgagctgcccaacatcaccgactcagatgtcatcggcgcgttccttgccggcaccacctgccgcgacctggtgagcaagttgggtcgcaagacccccaccagggcgagcgagctgatggacatcgccaccaagttcgcctctggccaggaggcggggcccgtcaagcacaccctcgaggagtgcgtcatgcttcggcgccacttccacagggccgggccacctgcagagagtggcagggcccgcgacgacgacaaaagggaagatcaccaagcaggagagttccctgaggtccgcgactgcttcatgatctacggagggcatgcggcgaatgcctcggctcggcatcgcaagcaagagcgccgggaggcctgctcggtgaaggtggcggcgccagtctacctagactggtccgacaagcccatcaccttcgaccaagctgaccaccccgaccacgtgccgagcccggggaaatacccgctcgtcgtcgaccccatcgtcggcgacgtcaggctcaccaaggtcctgatggatgggggcagctgcctcaacatcatctacgccgagaccctcagactcctgcgcgtcgatctgtcctccgtccgagcaggcgctgcgcccttccacgggatcattcctgggaagcgcgtccagcccctcggacggctcgaccttcccgtctgctttggaacgccctccaacttccgaagggagattttgacgttcgagtgttgggggaggccatgctacgcgaagttcatggccgtccccaactacacctacctgaagctcaagatgccgggccccaacggggtcatcaccgtcggccccacgtacaaacacgcgttcaaatgcgacgtggagtgcgtggagtacgccgaggccctcgccgagtccgaggccctcatcgccgacctggagaacctctccaaagaggtgccggacgtgaagcgacatgccggcaacttcgagccagcggagacggttaaggtcgtccctctcgaccccagtggcgacacctccaagcagatccggatcagttccgggctcgaccccaaatag

SEQ ID NO: 113082 - DNA, 2130 bp, Zea mays
  Clone ID: MRT4577_34617C.1
atgccgttcggtttgaggaatgcgggcgcgacgtaccagcagtgcatgaaccatgtgtttggcgaacacatcggtcgcacagtcgaggcctacgtcgatgacatcgtagtcaagacaaggaaggcttccgacctcctctccgaccttgaagtgacattccgatgtctcaaagcgaaaggcgtcaagctcaatcccgagaagtgtgtcttcggggtgccccggggcatgctcttggggttcatcgtctccgagcgaggcatcgaagccaacccggagaagatcgcagctatcaccagcatggggcccatcaaggacttaaaaggcgtacagagggtcatgggatgtctcgcggccctgagccgtttcctctcacgcctcggcgaaagaggtttgcctctgtaccgcctcttgaggaaggccgagtgtttcgcttggaccccagaggccgaggaagctctcgggaacctgaaggcgctcctcacaaaggcgcctatcttggtgcccccagctgatggagaagccctcttggtctacgtcgccgcgaccactcaggtggttagcgccgcgattgtggtcgagaggcaagaagaggggcatgcattgcccattcagaggccagtttacttcgtcagcgaggtactgtccgagaccaagatccgctacccacaagttcagaagctgctgtatgcagtgatcctgacgagggtcagacgcctcgacgcccgcggtgactcgcagctcgtcatcgaccaagtcatgaagaactcccactgccgcgacccgaagatggaggcctactgcgatgaggttcggcgcctggaaaacaagttctacgggctcgagcttaaccacatcgctcggcgctacaacgagactgcggacgagctggcaaaaatagcctcggggcgaacgacggttcccccggacgtcttctcccaggatctgcatcaaccctccgtcaagatcgacgacacgcccgagcccgaggcaccctcggtccagcccgaggtaccctcggcccagcccgaggcaccctcagttcggcccgaggcgccctcggttcagcccgaggtaccctcgccccccgacggcgagacaccgcacgtcgaggaggagcagagcggggccacgcctgatcgaaattggcagaccccatacctgcaatatctccgccaaggagagctacccctcgaccaagccgaggctcggcgggtagcgcgacgcgccaagtcgttcgtcttgctgggcgatgagaaggagctctaccaccgcagcccctcgggcgtcctccagcgatgcatctccatcaccgaagaaggcgcccgggggctacacgcacctgctggtcgccatcgaaaattctccaagtggatcgaggtccgacctctgaacagcatcaggtccgagcaggcggtggcgttcttcaccaacgtcatccatcgcttcggggtcccaaactccatcatcaccgacaacggcacccagttcactggcagaaaattcttggacttctgcgaggatcaccacatccgggtggactgggccgccgtggctcatcccatgtcgaatgggcaagtagagcgtgccaacggcatgattctacaagggctcaagcctcggatttacaacgacctcagcaagttcggcaagcgatggatgaaggaactcccctcggtggtctggagcctaaggacaacgccgagccgagccacgggtttcacgccgttcttcctggtctatggggccgaggccgtcttgcccactgacctgaaatacggctccccgaggacgagggcctacagcgatcaaagcaaccaagttagccaagaagactcgctggaccagctggaagaggctcgggacaaggccttactacactcggcacagtaccagcagtccctgcgacgctaccacgcccgaggggtccggccccgagacctccaggtgggcgacctggtgcttcggctgcggcaagacgcccgagggaggcacaagctcaagcccccctgggaggggccattcgtcatcgccaaagttctgaagcccggaacgtacaagctggccaacagtcaaggcgaggtctacggcaacgcttggaacatccaacagctacgtcgcttctacccttaa

SEQ ID NO: 113083 - DNA, 3009 bp, Zea mays
  Clone ID: MRT4577_34618C.1
atgggcagtctccagcaacctctacaacccgggacggtgctccgtttcgggagtcttgagttcatgtccctcgacggcagctacgacatgatactccttccaccgccgcgcgacaacgacaatggcggccgacagcccgcccgccagcgacggaatcaacgacgtcttccccgcgcggtggaagaacaacattcgagctcgccccgttatctcccccgccgacggaggaggaggcgtggcaaccaaggccaagcaggaggcagcgcctcgtcggctatcgagcgagtcgacggcgccagcaccccaacggggggtgcaccgggcatcgacctcgcgcttgagacgaagacgagcgccgtctccccgcaacacgccaatcccgagcaaacgggcgacgccggcgcgctcgcgaagagcttgctggacgtcacccttgtacctgagacgacggtgcagccagtccccgacatgacttcatcaccgcccgtcgaccaagaggtaccgaccgattcccatccctcgtcttttggattccgtctcaacccgcctaacagctcagctttggcgggagctctcgtagaggcgagtccaaaccctctggggtttcgtatgcggtcaccttgggaccgactgacggacgtctcgacgtacgggccctctgggtccgaggaagacgacgagcccagcatctgttgggatttctctggacttggcaaccctagtgccatgcgggacttcatgaccgcatgtgactattgcctttccgactgttccgacggtagccgtagcctcggcgacgaggactgcggcccaagccgcgaatgtttccacgtcgatctagggggtccctccgaaggcaaccatctcggcatgccggaggatggcatgggcgggccaaccttcggctcgagaaatacgtcatctacccagggcttccagcaccgcatcaccgacgatgtcagggtcaggccgccgcccgcatctagtggggtcggccagaacctggctgcagcagcaatgctcctccgcgcgatgccggagccatcaaccaccgagggacggcgaatccagggagaactcaagaatctcctggaaggcgccgcggtccgacgggccgagagctccgcctcccggaggcaggggtacccctcggaacctcatgtcgcgacttcccgattcatgcgggaagcctcggtctgcaccgggcgcacgcgcaacacagcgcctgcggccccaggtcgcctcggcaacgagcaccatcaccgcgaccgtcgggcccacctcgacgagagggtgcaccgaggctaccaccccaggcgtgggggacgctacgacagcggggaggatcggagtccctcgcccgaaccacccggtccgcaggccttcagccgggccatacgacgggcgccgttcccgacccggttccgacccccgactactatcacgaagtactcgggggagacgagatcggaactgtggctcgcggactaccgcctggcctgccaactgggtggaacggacgatgacaacctcatcatccgcaacctccctctgttcctatccgacaccgctcgcgcctggttggagcacctgcctccggggcagatctccagctgggacgacctagtccaagctttcgccggcaatttccagggcacgtacgtgcgccccgggaattcctgggacctgcgaagttgccgacagcagccgggagagactctccgggactacatccggcgattctcgaagcagcgcaccgagctgcccaacatcaccgactcggatgtcatcggcgcgttcctcgctggcaccacctgccgcgacctggtgagcaaactgggtcgcaagacccccaccagggcaagcaagctgatggacatcgccaccaagttcgcctccggccaggaggcggtcgaggccatcttccgaaaggacaagcagccccagggctgcccgtcggaagatgcccccgaggcgtcaactcagcgcggcgccaagaagaagggcaagaagaagtcacaagcgaaacgcgacaccgccgacgcggaccttgtcgccgccgccgagtacaagaaccctcggaaaccccccggaggtgccaacctcttcgacaagatgctcaaggagtcggccgggccacccgcggagggtggcagggcccgcgacgacgacaaaaaggaagataaccaagcaggagagttccccgaggtctgcgactgcttcatgatctacggtgggcaagcggcgaatgcctcggctcggcaccgcaagcaagagcgtcgggaggtctgttcggtgaaggtggcggcgccagtctacctagactggtccgacaagcccatcaccttcgaccaagccgaccaccccgaccatgtgccgagcccggggaaatacccgctcgtcgtcgaccccatcatcggcgacgtcaggctcaccaaggtcctcatggacggaggcagcagcctcaacatcatctacgccgagaccctcgggctcctgcgagtcgatctgtcctccgtccgggcaggcgctgcgcccttccatgggatcatccccgggaagcgcgtccagcccctcggacaactcgaccttcccatctgtttcggaacaccctccaacttccgaagggagaccctgacgttcgaggtggtcgggttccgaggaacctaccacgcggtgctgggaagaccatgctacgcgaagttcatggccgtccccaactacacctacctgaagctcaagatgctgggccccaacggggtcatcaccgtcggccccacgtacaagcacgcgttcgaatgcgacgtggagtgcgtggagtacgccgaggccctcgccgagtccgaggccctcatcgccgacctggagagcctctctaaggaggtgccagacgtgaagcgtcatgccggcaactttgagccagcggagacagttaaggccgtccccctcgaccccagcagcgacgcctccaagcagatccggatcggctccgagctcgatcccaaatag

SEQ ID NO: 113084 - DNA, 300 bp, Zea mays
  Clone ID: MRT4577_34619C.1
ccgttcggattccgccagcgccgctgtcggtgcctgctctgcagtgtacgcccggcaggaaagccctcggtggcgggctgaggctggacggactgcgccggctgacgacagatggcgccggcggctgtaccctacgcggatacctgagcagcgcagtgcatcccgctgcggcgggccctactacgccggtgtgggcagccgacgccatgtccaccgctcggcaacatgctgcagcagcagatgagatgatggacgtgcagccgtccgcacagctgagatgagatgcacttgagcgtgccg

SEQ ID NO: 113085 - DNA, 194 bp, Zea mays
  unsure (1)..(194): unsure at all n locations
  Clone ID: MRT4577_3461C.1
atattttacatntttcgctccatgatgcgttatctgggtctggaaacccaaaccctcaaggatggcctggcgcatgggggaaccagcctgctggggcagggggctacccaggggcttcctatcctggggcctaccccgggcaggcacccccaggggcttatcctggacaggcacctccaggcgcctaccctgga

SEQ ID NO: 113086 - DNA, 353 bp, Zea mays
  Clone ID: MRT4577_34620C.1
aaaaaaaaaaaaaaaaaaaaaaaaaaaaaaaaaaaaaaaaaagaaaaaaaaaaaaaaaaaaaaaaaaaaaaaaaaaaaaaaaaaaaaaaaaacaagaaaaaaaaaaaaaaaaatgaaaaaaaaaaaaaaaaaaaaaaaaaaaaaaaaaaaaaaaaaatagcgcgtcgcatatgaaatcacaatcagcacgcactttaataaagaaatatgctcacagggggccacacattaccgtaactcgggcacataaaaaataaccccggaccggtaaaaagagaggtcacagcgataaatatagtgagcgctaaaaagagctcgaaataatcatggccatagttattccctgtgagcaa

SEQ ID NO: 113087 - DNA, 2301 bp, Zea mays
  Clone ID: MRT4577_34621C.1
atgtcgttcggcttgaggaatgcgggcgcgacgtaccagcggtgcatgaaccatgtgttcggcgaacacattggccggacggtcgaggcctacgtcgatgacatcgtagtcaagacgaggaaagcctccgacctcctttctgaccttgaagtgacattccgatgccttaaggcgaaaggcgtgaagcttaatcccgagaagtgtgtcttcggggtaccccgaggcatgctcttagggttcatcatctccgagcggggcatcgaagccaacccagagaagatcgcggccatcaccagcatggggcccatcaaggacttgaaaggcgtgaagagagtcatgggatgccttgcggctctgagctgcttcatctcacgcctcggcgaaagaggcctgcctctgtaccgcctcttaaggaaggccgagtgcttcacttggacccccgaggccgaggaagccctcgggaacctgaagaggccagtctacttcatcagcgaggtactgtctgaaaccaagatccgctacccacaaattcagaagctgctgtacgcggtgatcctgacgcggcggaagttacgacactacttcgagtctcatccggtaactgtggtgtcatccttccccctgggggagatcatccagtgccgagaggcctcaggtagaatcgcaaagtgggcggtggaaatcatgggcgaagcaatctcgttcgcccctcagaaggccatcaagtcccaggtcttggcggacttcgtggctgaatgtgtcgacacccagctcccaacggttccgatccagccggaactctggaccatgttcttcgacgggtcgctgatgaagacaggggccggcgccggcctactcttcatctcgcccctcggaaagcatctacgctacgtgctacgcctccacttcccggcgtccaacaacgtggctgagtacgaggctctggtcaacgggttgcgcatcgccatagagctaggggtccgacgcctcgacgctcgcggtgactcgcagctcgtcatcgaccaagtcatgaagaactcccactgccgcgacacgaagatggaagcctactgcgatgaggttcggcgcctggaagacaagttctacgggctcgagctcaaccacatcgcccgacgctacaacgagactgcggacaagctggctaaaatagcctcggggcgaacaacggttcccccagacgtcttctctcgagacttgcatcaaccctccgtcaagatcgacgacacgcccgagcccgaggcaccctcggcccagcccgaggaaccctcggctcagtccgaggcaccctcggttcggcccgaggcaccctcagctcggcccgaggcaccctcggcccccgagggtgaggcactgcgcgtcgaggaggagcgaagcggggtcacacctaatcgaaaccggcagaccccgtacctgcaatatctccgccgaggagagctacccctcgaccgagccgaagctcggcggttggcgcggcgcgccaagtcgtttgtcctggtgggggacgggaaggagctctaccaccgcagcccctcaggcatcctccagcgatgcatttccatcgccgaaggccaggagctcctacgagagatacactcgggggcttgcggccatcacgcaacacctcgagccctcgtcggaaacgccttccgacaaggtttctactggccgacggcgaaggcacccgggggctacacgtacctgttggtcgccatagacaaattctccaagtggatcgaggtccggcctctaaacagcattaggtccgaacaggcggtggcgttcttcaccaacatcatccatcgctttggggtcccgaactccatcatcaccgacaacggcacccagttcactggcagaaagttcctggacttctgcgaggatcaccacatccgggtggactgggcagccgtggctcaccccatgacgaatgggcaagtagagcgtgccaacggcatgattctacaagggctcaagcctcggatctacaacgacctcaacaagttcggcaagcgatggatgaaggaactcccctcggtggtctggagcctgaggacaacgccgagccgagccacgggcttcacgccgttctttctagtctatggggccgaggccatcttgcccatagacttagaatacggttccccgaggacgagggcctacgtcgaccaaagcaaccaagctagtcgagaagactcgctggaccagctggaagaggctcgggacatggccttactacactcggcgcggtaccagcagtccctgcgacgctaccacgcctga

SEQ ID NO: 113088 - DNA, 294 bp, Zea mays
  Clone ID: MRT4577_34622C.1
ggggaaacctttaaattccaaaaaatttccttccaggttttggtttttagggtttcctttttaatttttttgggccggtttttgggctttttttgagcccccccttccgggggaagggttccggcattccgggcggtccaccgattttttccaattccactgtttgggtcccccgggtattcctaaggcccggttcccctccagggccgtggtggggcttacctccggttttcggaaacccctggggcttttatttcctttttttggaaaaattttttccttttttaaccattt

SEQ ID NO: 113089 - DNA, 207 bp, Zea mays
  Clone ID: MRT4577_34623C.1
tttacgcgtggatccacatgctcagcgcgtccgcgccgctgacggcggagaggacgaaggtctcctccaccctggtgtgcaggagccggtaacatgtacgcggtgtacctatcaagaaaccagactatgtgttcacagcaaagactatctgcaaaacctacattaccgtggattgacactcgatacaggctgctccccatgataacc

SEQ ID NO: 113090 - DNA, 310 bp, Zea mays
  Clone ID: MRT4577_34624C.1
tgaaagggtaatagaaaacaggcagccctcagccgcgcccgcgcgtgcggtcgatgttaccaatgggcgaccccctcgccgccctccttcgcagtggcggcaatcctcactccgtacacggtgtggccatcaagcttggctgcattgtctccacctttctttgcaacaatcttctatatgcctacctgaggcgccaggtccccgcggacgcccgcaggctgctcgatgaaatgccccgccgcaacctggtgtactggtccgttgtgatatccgggttcacccaccatgggggtctttcataagcgatggg

SEQ ID NO: 113091 - DNA, 533 bp, Zea mays
  Clone ID: MRT4577_34625C.1
ggagaggggagttctgtatttttattccaaaactgtctttctcagtacaagggctactatttattacaaccagctattaagcgccggcccacccttcaacggatccactcggcaccggaccatttgctattgggcttccttgttcgccggcccatcacttcatcagttcctgctctcctgtcgtcccccaactccaggtcgcctacaggaatactgacagtatgacatgtacatttgttcttacttggaggtacaatatgtgtttggcaaagtaaaagtaaaacaacaagagccaatatttttcatgagtaaaaaggcgaccagatgacataccctctgaaacagaggcaaaaaatactacctcctaactgtcgagcaagtatttctggggtgtttggttcgagtaatgagctcgtgtatcttctcactcctcgcttttttatgttgtttataaaatagaatgagatgatatctatcaccatctaatttcttataattagttagttaatactaatataaggaatgtattgatt

SEQ ID NO: 113092 - DNA, 1575 bp, Zea mays
  unsure (1)..(1575): unsure at all n locations
  Clone ID: MRT4577_34626C.1
cggaaactcccgggtgnagtggnagtactggggtatgtgtatctggnatttaagtcgctgggatgggggctttttntggggngaaaaacatgaaatcatngacaaggaacataacannattcgtcgaagcttctgcnccttttagttaattcaacnnttaaaataaaaaaaacatgttttntttcacggggatcaatttgccaatttaatcatttcataagcgggtgacttgggggggcgcttgcttccttatggcgacaatcgagtaataatactagtgcaatattgctagctaaaaggtgtttggtttaaggaatcactagtggtgtattatgagtccattattaaatttggtggaatcaatacattccttatattagtattaactaactaattataagaaattagatggtgatagatatcatctcattctattttataaacaacataaaaaagcgaggagtgagaagatacacgagctcattactcgaaccaaacaccccagaaatacttgctcgacagttaggaggtagtattttttgcctctgtttcagagcgtatgtcatctggtcgcctttttactcatgaaaaaattggctcttgttgttttacttttactttgccaaacacatattgtacctccaagtaagaacaaatgtacatgtcatacgcccaggagccttatcctccatctgtcgacatgctcatcttctctccttcgtccgttcagccggcgcaagattttcctgtgtcttagttgttctcatcctctccttagccgccgtacctcactgcgtgatatttttgccgccgcccctgttcgctttatatgcgcgctatgcgtgctcgtgcggcagattgctcggctgtttcgggcagatgctggggcactcgattccctagcgcccagacttccttcttctccctgaagctcgcctagctcggccgtcctccaagtttcgcccagcccagtcgttcctcctatgctcggcgccggatttctgctcgcccggctctgctccttcgcggcggcagcttggaccaggatgtcagtattcctgtaggcgacctggagttgggggacgacaggagagcaggaactgatgaagtgatgggccggcgaacaaggaagcccaatagcaaatggtccggtgccgagtggatccgttgaagggtgggccggcgcttaatagctggttgtaataaatagtagcacttgtactgagaaagacagttttgggaataaaaatacagaactcacctctccttaaaaaaaaaaatctccctctcgttcctctctgcaacgagcagcgttcgccatcagaaatgtcagtattcctgtaggcgacctggagttgggggacgacaggagagcaggaactgatgaagtgatgggccggcgaacaaggaagcccaatagcaaatggtccggtgccgagtggatccgttgaagggtgggccggcgcttaatagctggttgtaataaatagtagcacttgtactgagaaagacagttttgggaataaaaatacagaactcacctctccttccaaaaaaaaaaaaaaaaaagcggcc

SEQ ID NO: 113093 - DNA, 2393 bp, Zea mays
  Clone ID: MRT4577_34627C.1
gcacaatagccgcccacagtccccaccaaattctcgtaggaacccccaaatatccaccctcgaaaggttgcggggccacgcaggttctaggtctgggcaaacggtgccctatgcacatctttggtgaatcgctgttgatgtcgatcgctccggaggccgcacccacccttcgcagagccccgcgtgcaaacagtggccaggcacttcgaccgcgctaaacccaatcaggtcttcttacacggtcattactgaaccacatgggctttttctgctgcataccatcttgtagccggaaacgacgtgtgcactttcttcgaggacctccctgcagaactttagaaaagtgttgcacataatttatgggcctaattagtgggctcctcgtttaagaatacagggagcatctgatgattttgctgagggaaaaatcaataccctggatgagttatatagaactggagccaaggtaccttctgaagtgtttgtcaatagcaagttaacaccaaagcttgctcggcaaatgcaggacgttctcgcactatgtagtggcagtttaccttcttggtgttatcaaatgaccaaggcctgcccattcctgtttccttttgagacaaggaggcagtacttctattccacagcctttgggttgtcacgagcattgaatcgactccagcaacagcagagtgataatcacagctctggtggtgaaagagaggtcaggtttggcaggttacaacgccagaaagttcgtgtttcccgtaaccgtattctagattctgctgctaaagttatggagatgttctccagtcagagggctgttcttgaggtggaatactttggcgaagttggaactgggctggggcctactctagagttttatactctcttaagccatgaactacaatgtgctcaactgggattatggagagctacttcttcatatgattcaggattgcacactgatatgaaggatgtgatccgtttagatcctgaagatgggtcgtcaggaaaagaactcaacacagatctaccaggtgatggcatgtatttgatacaagctcctcttggattgttccctcgaccttggccacctaaagttgatacttcagaaggtagcagattcttcaaagttttggagtatttccgcttaataggtcaagtgatcgcaaaagtcctgcaagatggcagacttttagatttgcctttatcaacagcgttttataagcttatacttggacaggaacttgatttgtttgacatagtgtcatttgattctgagtttgggaagacattgcaagaactgcaagttcttgttgaacgaaagcagttccttgaatccacttctggcaagaaccagctacaagttgcagatttgtgtttccatggcgcttctattgaagatttgtgtttagattttactcttccaggttatcctgattatgtgcttaaagagggtgaaggaggcacaattgttaatatttataatttagaagagtatattactttggtggtggatgctacagttaagtcagggataaagcgacaggttgaggcatttagatcagggtttaatcaggtgtttgacatgtcatccctccacatattttcacctcaagaacttgactatctaatatgtggtcgacaagaaatttgggagtcggaatccctggtggataacataaaatttgatcatggatatactgctaaaagtcctgcgatcgtgaatctactcgagattttgtcagaattcacccctgagcagcagcatgcgttctgccagtttgtaaccggtgctcctcggcttccacatggtggattggctgcccttagccccaagcttactatagttaggaagcatccttcaagtgctgtgaatacttcaaattcaactggggcagtagagtccgctgatgatgatttgcctagtgtgatgacgtgcgccaattatctgaagctgcccccctactccacaaaagaaatcatgcgcaagaagttgctttatgcgatcctggaaggccgaggatcatttgatctttcataagaaatatacaatatccgaactaacatacaggggtcagttttattctggagatttagtttcttggtccatgtataacactgagttgaggttaccagctcactcagcaaacggcttcaagggcgagagccccagtcctcactcggatgcaggctaagctatagtaattgaggatgtgcgccttgagtgaggatgtgcgccaacaagaacccccgtttgtttcagtacatgtaaataaaagggattttttgttccagaattgttatctgtaacaagaacatctacatctgtgatgactgaccattaataaatgtgtcccggtgtaccatttgtttttaaaaaaacacacccacac

SEQ ID NO: 113094 - DNA, 222 bp, Zea mays
  unsure (1)..(222): unsure at all n locations
  Clone ID: MRT4577_34628C.1
nccacgcntttttctacactttttcagacccaattctacactccctcgtcaaatagagtaacatttttgatgactccactgattttttgcaagaatttatgactgcttggaaacaaaaatatggggagaaagtgcctattacaattgagagattttaccccccataataattttgatctttctgcaggatatgggaccactcacattgtattcactgatgat

SEQ ID NO: 113095 - DNA, 975 bp, Zea mays
  Clone ID: MRT4577_34629C.1
gagtcggaatccctggtggataacataaaatttgatcatggatatactgctaaaagtcctgcgatcgtgaatgtaagctcattcgtcctcacatgctacatctcttacatacatccagttgtggtttttgagaagtgtggttccttgattcttgctcttgtttgtagctactcgagattttgtcagaattcacccctgagcagcagcatgcgttctgccagtttgtaaccggtgctcctcggcttccacatggtggattggctgcccttagccccaagcttactatagttaggaagcatccttcaagtgctgtgaatacttcaaattcaactggggcagtagagtccgctgatgatgatttgcctagtgtgatgacgtgcgccaattatctgaagctgcccccctactccacaaaagaaatcatgcgcaagaagttgctttatgcgatcctggaaggccgaggatcatttgatctttcataagaaatatacaatatccgaactaacatacaggggtcagttttattctggagatttagtttcttggtccatgtataacactgagttgaggttaccagctcactcagcaaacggcttcaagggcgagagccccagtcctcactcggatgcaggtgctgctgtcgatttctcccttcttttacatttgttcagctactgtattctcttcgagggttgcccttgtcacctgcaattatgaatctacagcttttgtcatcgaggaagtttaacagattttggtttctctaccatgatctgtttccattgggcaggctaagctatagtaattgaggatgtgcgccttgagtgaggatgtgcgccaacaagaacccccgtttgtttcagtacatgtaaataaaagggattttttgttccagaattgttatctgtaacaagaacatctacatctgtgatgactgaccattaataaatgtgtcccggtgtaccatttgttttt

SEQ ID NO: 113096 - DNA, 423 bp, Zea mays
  Clone ID: MRT4577_3462C.1
gatcttgagctccaggacagggtaactaagtaccaggatgatctgaggcacatggttttggagacagcagaaaggctgaaggaccaaggcccggaggaatttctgaagggaatggattgaccccttttgaagccctggctctggggcctgggaggaatacgaatatatgggtcggcgataactcagtccactcgattatggtttaagatcgggagtcatcaaaaagatactttaaggactagttccggagctacaaaacctgaggggattgggggctagaatctccgtgactcttagagctgttttgatgaccaagaatcacgaagggatccataggcttggctgccttattcagtgattttagcctctctaatcccatgcggttttgtggttttcaaactagccctacttaggcttggctgc

SEQ ID NO: 113097 - DNA, 399 bp, Zea mays
  unsure (1)..(399): unsure at all n locations
  Clone ID: MRT4577_34630C.1
attcccaagacaagccacgcctccannaacctccacntccccttacctaattcacattcccgccacatcaacannaaaaaaccagagttcacccttcttttagttaggctccnnccccananaacaaaacccatttcccatctttctaactcctccaaatatacaattattacaccccactatccctattacaacaactactctcaactcccttacanaaacaaaataacctcaacaaaaactctacccctcttataactatctctccaccaaactctatttctccttccacaaccactacatcacaccatcaattttccaatatctctcccccttccacatttncatttacttatatccctatctctccctccactatacacatatcactcttctaca

SEQ ID NO: 113098 - DNA, 565 bp, Zea mays
  Clone ID: MRT4577_34631C.1
aaacgaagtttgttccaacagtgtctaaaacatttgaaggataaacaatttattatttatccctgtacaaacgataatatctgtttcatgaaaggaatagaacaaacagctccaagtacaaatcatcaacactcacgcgggcgtggggcactggccaccaaatgcgaaacctgttccacgtactggagtgcagaaacggacccagatctcacaaagacgcaaactgcacgggcgacagccgacaccctgacgatctatactgctgaagtactgcacatgtttcttcatgtagtaccatcaatcgactttaccaccttgcacaatgctccatggccaacagctcttcaatatccagaaagaacgaagaatgctagcgagaccacgggacaaacttgcatcccaactaactgaaaatgcaagcaacagatatactgctccagaaattcagaagcatttcatgtggactatgcccggaccagattcgtcatactcttccttggagatccacatctgctgaaaggtactgagggaggccagaatggaaccaccaatccaaacactgtac

SEQ ID NO: 113099 - DNA, 547 bp, Zea mays
  unsure (1)..(547): unsure at all n locations
  Clone ID: MRT4577_34632C.1
gggtacctcgaggcncggccgggcccgggataaaaaaaaaaaaaaaaaaaaaaattgaagagctgttggccatggagcattgtgcaaggtggtaaagtcgattgatggtactacatgaagaaacatgtgcagtacttcagcagtatagatcgtcaggtcagtttagtttttttttcaacaacagtgccatattaggatgttcctgatgtgcgcagttggtctgggtttttacacaacgcaagggtgtcggctgtcgcccgtgcagtttgcgtctttgtgagatctgggtccgtttctgcactccagtacgtggaacaggtttcgcatttggtggccagtgccccagcgtggcgtgagtgttgatgatttgaacttggagctgtttgttctattcctttcatgaaacagatattatcgtttgtacagggataaataataaattgtttatccttcaaaaaaaaaaaaaaaaaaaaaaaaaaaaaaaaaaaaaaaaaaaaaaaaaaaaaaaaaaaagggaaaaaaaaaaaaaaaaaaggcccctagggcc

SEQ ID NO: 113100 - DNA, 717 bp, Zea mays
  Clone ID: MRT4577_34633C.1
atgctttcttagaggagggttggattctcctccccccccgaatcgggatcgccctcgagaggatctccggatctcgatgtcgaagctgagcggatccagataggtgagccggatgttgagtaccgctgcttcgacggcgatctcgcctgagccacggacgaccactccctccacaacgcctttctccacctactgcgaggtcctcaaaaccaagatcatcctcgatcgaaagacgtacaggacccgcggtttcggtttcatcaccttctccacggaggatgcgatgcggaacgccactctaggccatgaacggcaaggagctggacaggccgtaatactcaccgtaaactacccacagacccgcggtgcgcgaggacgccgcgcccgtggtgatctcgatggccgaggaggcgcccaactacaacggttctcaattcttcgtctgcaccgtggagaacccctgtgtggatggctagcacgtcgtcttcggccacgtcgtcgagggcatggaggacgtcaaggccatcgagaaggtgggctcccgcagcggcgacacctccaaggaggtgaaggtcgctgactgtggccagctctagatctctggtctgtgcgggtggcctccctccgtcatcgtcgactccgcctgcgtccgtcccttttcatttccttcgatctgaataagatgatggcgatctgagtggtggtcttagttgaggc

SEQ ID NO: 113101 - DNA, 618 bp, Zea mays
  Clone ID: MRT4577_34634C.1
aaccaaggtcggacagcccatttttcgttgcagttattggcccctctttttttcggctttcagggttttagatccacccggtggcgtccgaccttccagctccaaattcctttggttaacagtttgggcggttgaaccaaaccaccggaatttaaccgatccttgacttatttttccaaattttcccatgaccgagtcttttatgattaactggccctcaccaccaaaaaaaattgggccctgcctccagataattccgggaaaagggccacgaggccaatctgttcatttaattcaaagctgccctggccaaattttgggaccactgatcaacgatcagggtttcaggggaaagcatttttgttttagaccgggcccaaggtctttgctgaaatacgggggaaaagttcgcgaggaaaaatccgaaccattgcccatgcaaaatcgagtgactggaaaatgtcccgggggccatatgctccttgggccacaaacttcctttcaaacttgtcagggaactctaagtaaagcaaatcctaaaacaaaagggcctcctttccaacaacagccttaatggcctgaacatcctttccaatagcatagtgggcataaagctga

SEQ ID NO: 113102 - DNA, 274 bp, Zea mays
  Clone ID: MRT4577_34635C.1
gccaccctcacacacacagctgggcaaagccacaaggtgggccagcaaggcaggttggatgggagtgggcacctcagaaagtcaccaggacttggggtcaggaacagtggctgggtgggcccagaactgcccccactgtccccctacccaccgatggagcccccagatagagctgggtggcctgtttctgcagcccttgggcagttctcactcctaggagagccaacctcggcttgtgggctggtgccccacagctacctgagacgggcatcgc

SEQ ID NO: 113103 - DNA, 950 bp, Zea mays
  Clone ID: MRT4577_34636C.1
cattgggtacctcgaggccggccgggatctacgaacgggggccgggaaaagatcggctacagacagatgaggctctgtctccggcaagcggcggccaccagctcacccctcgcagctaccctccgcggcaagacttctacgagcaccctcgccccccatggccggctcagcttcagccacaccacgtcgctgcagacggcgcccgggcaccgcgggctccgagcagggtgggcggtgcgcgtgctcccgctgacggaggagaacgtggagaaggtgctggacgaggtgcggccgagcctgatggcggacggcggcaacgtggcgctgcacgagatcgacggcctcgtcgtcgtgctcaagctgcagggcgcgtgcggctcctgccccagctccaccatgacgctcaagatgggcatcgagacgcgcctccgcgacaagatccccgacatcctcgaggtcgagcagatcgtcgacaccgagaccggcctcgacctcaccgccgacaacgtcgacaaggtgcttgatgagatcagaccgtacctctccggcactggaggtggaagcctcgagcttctccagattgacggatacgtcgtcaagatccggatcggcggacctgcagccggtgtaatgacagtacgagtagccgtgacacagaaactgagggagaaaataccttccatcttggctgttcagctcacagaatagaaatgcgagagctcacttgtgcatcatcacgacgaaactctggctttcaggcgaatgtgcagtgttcatcagtcttatatttctgtccttacagtacgtacagtgagttgcagaactgattaatacaattttcatgcaagaaaaaaaaaaaaaaaaaaaaaaaaaaaaaaaaaaaaaaaaaaaaaaaaaaaaaaaaaaaaaaaaaaaaaaaaaaaaaaaaaaaaagggggcggccggtttta

SEQ ID NO: 113104 - DNA, 845 bp, Zea mays
  unsure (1)..(845): unsure at all n locations
  Clone ID: MRT4577_34637C.1
agcgctcagccgcacctctgattctctgctcggcgccctgcctctctctctccctcgcggcttcccttcccccaagttccccctgccatggcgcgctgctccctagcactcggccttatctcctccctcagctcgcctctctctctctgcacgcacgcagctcgtccagatcctcccagccatggcgccagccgccacgccctccgctgcttttcttgtcttcccagccggcgctctccatctccagtccgagctccttcctttcccttcccatggccacgcgcccctagtttttccctgcgtgcagccgcgtgctccaccgtgtcgtgctccctagagctcgcccagctccctctactcgcttgcgtctagtcgttggacctcgcctccaatccatggcgctcggcacccatatttcatggtcctcggcgcgttcctccctcaccggcatgcatatctctgctccgctgctccaccaaatggggcgctcaccgcctggaacctgcaacagaccatgactgaccagcatcgctcgcgccgtgacgagaattggggccggctgtctggtctcgtgaattgactcgttgtggatggatggctggatgggggcaggcaaatccggatccgttgcgctactcgtaaaggcgtgtgggggcctcgccggccaccgtccgtgatcgaacgacagctgcgactcgccggccgctgcccccttcttctcatctccttccatcagttcagagctcggcgtcaatctccacctgcacgtcgttctccatggcgagcccctgctctcctccccagncgcgcgttccctcagttctagctccagctcactgcgcacc

SEQ ID NO: 113105 - DNA, 1845 bp, Zea mays
  Clone ID: MRT4577_34638C.1
cattgggtacctcgaggccggccgggatgttgttccccaggcgcagcagcacggcagtcctccgttttctcctcgtcgctcgccccggttgtctcctcctcgacctcccccgtcgcgacaccgcccgatctctctagcgcacggcggccggagaagaggaggagggggggacgatctcattcatcggaccggcgtgcctgtgtcgtctgctgttttcgtttttttctttactctttttttttcttcctcctttgcttgttcaattcaatcagtataataagatttctgatttgggggcggctcgccatgggattcggaatggggaataataacaacggggcgagctcctcgtcgtcgcggctggacccggcgggcgccgctgctgccgcgccacggcagcagcgggggccgcgagggtggtggcctgtcgtcgcagcccaagacgttcgccaacgttttcatcgcggtggtcggcgccggcgtgctggggctgccgtacaccttctcgcgcaccgggtgggcggcgggctcgctgctgctcttctccgtcgccgcgctcaccttctactgcatgatgctgctcgttgcgtgccgccgccgcctcgccgacgagcaccctaagatcgcctcgttcggggacctgggggacgccgtcttcggcgcgcacgggcggttcgccgtggacgtgatgctggtgctcagccaattcagcttctgcgtcggctacctcatcttcatctccaacaccatggcgcacctctatccgattaccgccgcggcctcgtcctcctccgcgctcctctcccccaaggcgctcgtcatctgggcgatgctgcctttccagctggggctcaactccatcaagacgctgacgctgctcgcgccgctcagcatcttcgccgacgtcgtcgacctcggcgccatgggcgtggtcctcggccaggacgtcgccgcctggctcgccaagcccgtgcccgtggtcgccttcggcggcgcaggcgcgcttctctacgggctcggcgtctccgtgtacgcgttcgagggcatcggcatggtgctgccgctggaggcagaggcggcgaacaagagcaagttcggcgtcacgctcgggctgtccatggcgttcatcgccgtcatgtacgggctgttcggcgtcatgggctacgtcgcgttcggcgacgccacgcgggacatcatcaccaccaacctcggagccgggtggctgtcggccgccgtgcagctggggctctgcatcaacctcttcttcaccatgccggtgatgatgaaccccgtgtacgaggtcgccgagcgcctgctccacggcaagcggtactgctggtggcttaggtggctgctggtcgtcgtcgtcggactcgccgccatgtacgtgcccaacttcacggacttcctggcgctcgtcgggagcagtgtctgcgtcctcctcgggttcgtgctgccggcctcgttccacctcaaggtattcggcgccgagatggaatggcccggagtgctgtccgatgtcctgctggtcgtgatcggcctcgcgctcgccgtgttcgggacgtacacgtcgctgctgcaaatcttccaatcgtcgatcatcgcattctccagggcaactacgatacatgtgttgagtgttgttcgtgagtggcttgtattggacgggggaaatctgtacgcttttcgtaccacagatttcagttactcccggtagcagtgtatgtgtatgcgtcctagatgttcctcctgctgtgcacgatgggggatacgatgaaaggacaagattttcacttcgtggaaaaaaaaaaaaaaaaaaggaaaaaaaaaaaaaaaaaagcggcc

SEQ ID NO: 113106 - DNA, 246 bp, Zea mays
  Clone ID: MRT4577_34639C.1
gttgtcttagtgttttcggggaaacaactgccttgcactgggcggggggtctgaccaaatacaaggaaaaacccggcgggggtacgggatcttttttttaaaccggggaacaccggcaaaacaaaaaagggggcccttataatctcccacgctataatctaaattgacaaaccccgtgacccgccccgaatcaaaggatcgccaagccttggatcccttgggccccctccttggggaccttggtag

SEQ ID NO: 113107 - DNA, 499 bp, Zea mays
  Clone ID: MRT4577_3463C.1
aaagtattctgagctacttatttattttgtacaataaagaatccgatgcatccataattatacaatacgatttgaccctatcttcgtactttgcatatatatatgtgcataatgtgcttggtttgcatctataaggggttcttgtagttctgttcttttccctcctcgctccctgtccgggctccccattccctacggcgaccaactctcctcctcgtcgtcatcgtctcctcttgcatgctggccgtacattctcaggttcgccattgccgtggccgctgacatgcggaaggacctcgcggacccaaccaccgtcctgtcctgctggctgacctccctgcagacacggtccagcgtggacaggaagtccctgagcaccacgaagatcctcagagggtgcgcctctttttttccggcgtcactcgggggttacacggtgatctccttcactctccccagggcccttttcttgtcgcgcctgactcgtccgatctccgcc

SEQ ID NO: 113108 - DNA, 2199 bp, Zea mays
  Clone ID: MRT4577_34640C.1
gcaccccccattcgaacgccggagctcgacaaggacgaccgacgacgcacgcggagatccggcgtactgcaaattttgaaaactgaactgtaagatggcatcagcagagctttcccgtgaggaaaatgtgtacatgttccccaggcgcagcagcacggcagtcctccgtttcctcctcgtcgctcgccccggttgtctcctcctcgacctcccccgtcgcgacaccgcccgatctctctagcgcacggcgggccggagaagaggaggagggggggacgatctcattcatcggaccggcgtgcctgtgtcgtctgctgttttcgtttttttctttactctttttttttcttcctcctttgcttgttcaattcaatcagtatattaagatttctgatttgggggcggctcgccatgggattcggaatggggaataataacaacggggcgagctcctcgtcgtcgcggctggaccccgcgggcgccgctgctgccgcgccacggcagcagcgggggccgcgagggtggtggcctgtcgtcgcagcccaagacgttcgccaacgtcttcatcgcggtggtcggcgccggcgtgctggggctgccgtacaccttctcgcgcaccgggtgggcggcggggtcgctgctgctcttctccgtcgccgcgctcaccttctactgcatgatgctgctcgttgcgtgccgccgccgcctcgccgacgagcaccctaagatcgcctcgttcggggacctgggggacgccgtgttcggcgcgcacgggcggttcgccgtggacgtgatgctggtgctcagccaattcagcttctgcgtcggctacctcatcttcatctccaacaccatggcgcacctctatccgattaccgccgcggcgtcctcatcctccgcgctcctctcccccaaggcgctcgtcatctgggcgatgctgcctttccagctcgggctcaactccatcaagacgctgacgctgcttgcgccgctcagcatcttcgccgacgtcgttgacctcggcgccatgggcgtggtcctcggccaggacgtcgccgcctggctcgccaagcccgtgcccgtggtcgccttcggcggcgctggcgcgcttctctacgggctcggcgtctccgtgtacgcgttcgagggcatcggcatggtgctgccgctggaggcggaggcggcgaacaagagcaagttcggcgtcacgctcgggctgtccatggcgttcatcgccgtcatgtacgggctgttcggcgtcatgggctacgtcgcgttcggcgacgccacgcgggacatcatcaccaccaacctcggagccgggtggctgtcggccgccgtgcagctggggctctgcatcaacctcttcttcacgatgccggtgatgatgaaccccgtgtacgaggtcgccgagcgcctgctccacggcaagcggtactgctggtggcttaggtggctgctggtcgtcgtcgtcggactcgccgccatgtacgtgcccaacttcacggacttcctggcgctcgtcgggagcagtgtctgcgtcctcctcgggttcgtgctgccggcctcgttccacctcaaggtattcggcgccgagatggaatggcccggagtgctgtccgatgtcctgctggtcgtgatcggcctcgcgctcgccgtgttcgggacgtacacgtcgctgctgcaaatcttccaatcgtcaagcgcttgatcgacgcgcgttccgctgcgcgtcgatcatcgcattctccagggcaactacgatacatgtgttgagtgttgttcgtgagtggcttgtattggacgggggaaatctgtacgcttttcgtaccacagatttcagttactcccggtagcagtgtatgtgtatgcgtcctagatgttcctcctgctgtgcacgatgggggatacgatgaaaggacaagattttcacttcgtggaaaaagcttattttgctgttaagtgccaacgtacttcatgcatccagtgctaatttcaattgtgaattggcccgttggcccttcgagacaggccaagcagctaggacaaacggatcaattcgagtttgtacgctcgtaatttcggttcccttttcatttggaaggccaatttggatacgcaactgggacgagttgtatcaccacttgtcaaggtgtactcaattcagttccccagaataaaaatgtgacttcacacgac

SEQ ID NO: 113109 - DNA, 692 bp, Zea mays
  Clone ID: MRT4577_34641C.1
cctcgagccggcgggaaactttccatatctataccgccggcagcttactaaacagagcgaatccatcatcagcatgatcgatctctgtgcaatcatacttatcaatcatgaggcgattctcctggtacactgcggacgtgctagctcatatcgagtcctcctctacgacaacgacagatgggacgacgaggacctcctcccaatcgcccaaatgtaagccaggaagatgttcaggaactattagtaggactgtaacaaggcgacaaagatggttggttccgccctcaaatcgatacacactcctgatggggaagaacaacacctggaattctcggtcttctcattagagaggtgggcgatgggctctgtaaaaaattgttagactcctgggagatgcctacaactacaacgccacggccaccaagcgaacaacgctcttagtcgctgttgaagaaggttataatacgcggagacttttcaagtgacactggacgcataaagtgtggcgccgaaagaaaagaaagaacaggctgtatcggggtgctgctgtgacacacgaaatgatgatgactgggtgctaagatgattcttaagagcatggacgatgccatgttttctgaaaatactacagtgctgcccgctgcgatgtcttcatcatgcagtgaaagaagaatggtctgcggacatgccga

SEQ ID NO: 113110 - DNA, 569 bp, Zea mays
  Clone ID: MRT4577_34642C.1
ttggttgtagaggccagcgttcgtccttttttttttttttttttcaaggtgcaatggcacaggccgttggttgcatgctttattcactgtagatgattcatgcctttgtgcttatttaacatttaccgcttgacagccggcggccttggtcgttgattgctgagcacacatgaatcttgagcgtatgccgcatgttgtaactacttcacacctacgatctgaacatgcagagaacaccagaatgcacactgttcagtcggcggaccgactaactagtggttggatttgatggtatgacacatgtacggcattgattaatcagttagttgccagggacgaagtttgtggcgaatgcccagtggttattgggtacgggatctggtacatgaggtaataggttgtggattgggcccttgccatggactatgggatgaacgaaaaatgcgaaaatatagaacatgggaaggtgttgagttttgtaatctttaactttgagctggggtgcggtttccgggtcagggccaagggctagaaggtccaaggcgcgtacaggttacacattgtttagc

SEQ ID NO: 113111 - DNA, 2238 bp, Zea mays
  Clone ID: MRT4577_34643C.1
atgtcgggtgttgtcctcgcacctgagacaatgacagatgtcgtttccccgcgacatgccaaccctaagcggactgatgacgccagcactctcgcgaaggacttgctgggcgttagccttgtacctgagatgacggtgcaatccgccctcgacgcgacttcaccaccgtccatcgatcaagaggtaccgtccgttttccaccctatgccttttagattcagcttcgatccgccaagcgaccccgcttcggtgagcgctttcgtaaaggcatatcctaaccttccggggtaccatatgtggtcatcttgggatcgactgacggccgtctcaacctacgggcccccaggttccgaggaagaagacgaccctaactctggttgggatttctccgggctccgtgatcctagtgccatgcgagacttcatgaccgcatgtgactactacctctccggttgctctgatgatggccacagccttgacgacgagggttgtggcccaagtcgcgaatgtttccacgtcgatctggggggtcacgacgaaggcaaccacctcggtatgccggaggatgacgatccccctgggcctgcgtctcgcgttgacatcccgcgggagctagctgtggtcccagtccctgcggggggtcaggacacacagctcgagcaaatccgcgagatggaagccaagctcgacgaggaagcagggcaacttgtgcagctccggcaaaacatcgagcaggagtgggcaggccgagcactcgccggagaagcgcgtcatcggtcccgggacgtccaacgtcatatcattgacgatgccagggcaaggctgcccccggcctccagcggggtcggccacaatctagctgcagcagcaatgctactccgagcaatgctggagccatccaccaccgaggggcggcgtatccagggagaactcaagaatcgcctggaggatgtcgtggtccgacgggccaaaagctctgcctcccgaaggcaagggtgccccccggagcatcgcacaacgacttcccaactcatgtgggaggcctcggtccacaccgggcgcacacgggacagaacgcctgcagccccggatcgcctcggcaacgagcaccaccgccgcgaccgtcgagctcgcctcaaggagaagatctccaactgggacgacctggtcaaggccttcgctggaaacttccagggcatgtacgtgcgcccagggaactcatgggatctccgaagctaccgccagcagccaggggaatccctacgggagtacattcggcggttttcgaagcaacgcaccgagctgcccaacatcaccgactcggatgtcatcggggcgttcctcgccgacaccacttgccacgacctagaagacgtccccgaggcgtccgcccagcggggcacgaagaagaatgccaagaagaagtcgcaagcgaagcacgacgccgctgacgcagatcttgtcgctgttgccgagcacaggaaccctcggaagcctcccggaggggccaacctgttcaacaagatgctcaagaagtcgtgcccctatcaccagggtcccatcaagcacacccttgaggaatgcgtcatgcttcggcgctacttccataaagccgggtccccggcgggagatggcaaaggccaagacaacaacaagaaggagggcgacaaggcagaggagttccccgaggtccacggctgcttcatgatctacggtgggcaagtggcgaatgcctcggctcagcaccgcaagcaggagcgctgggaggtctgctcggtaaaggtggcggtgccagtctacctagactggtccgacaagcccatcaccttcgaccaaggcgaccaccccgactgcgtgccgagcccaggaaggtacccgctcattgtcaaccccgtcatcggcaacgccaggctcaccaatgtcctcatggacggaggcagcagcctcaacatcatctacgccgagaccctcgggctcttggggattgatctgtccatgatccgggccgctcaagatgccaggccccaacggggtcatcaccgacctacatcgccgacctacatcgccgagtccgaggccctcatcgccgacctagagtgcctctccaaggaggtgcctgatacgaagcgccacaccggcaacttcgaaccagatgaggcggttaagtccgtccctctcgaccccagcaacgacgccgacaagaaggtccggatcgactccgagctcgaccccaaatag

SEQ ID NO: 113112 - DNA, 323 bp, Zea mays
  unsure (1)..(323): unsure at all n locations
  Clone ID: MRT4577_34644C.1
ccggagcggggggggggtttaaaaagaaagacccccgggacccccccgaagccgnaagggatggggcggcgcaagagcccaggggagacgcaggcgccgcggaccggcgggcaggagcaggccacacagatccagtgcagaaactgggacacggtagaaggagcgcaaggggacacgaaggctagcggcgggcagaccaagccccgggccgacccgtaggaggccaggtgcaggccgcggacagctatgcaagaacgcacaaagaagcgcagaaaaccacaaggaacgaacagatggcaacggcagaaaggcgaaagacggag

SEQ ID NO: 113113 - DNA, 3162 bp, Zea mays
  Clone ID: MRT4577_34645C.1
atgggcagtctccagcaacctctccagcccgggacgatgcttcgtttcgggactcttgagttcatgtccttcgacggcagctacgacatgacacttcttccaccgccgcgcgactacgacaatggcggccgacaacccgcccgccggcggcggaatcgacgacgtctaccccgcgtggtggaagagcaacattcgggctcgctccgttctctcccccgccaacggaggaggaggcggggccgtcaaggccagacgggaggccacgcttcgccggccgtcgagcgaatcgacgcccccgacgccccgacggaaggcacgccggacgtcgacctcgcgttcgagacggaggcaagcgccgtccccccgcggcacgctgaccccgagcaagaagacgacgccggcgcgctcgcggaaagcctgcaggacgtcgccctcgaaccagagatgacggcgcaaccagtccccgatgtgactacgtcgctccacgtcgaccaaaaggtaacgactaactcccatcttgcgtcatttcgactcggcctcaacccgccaaacgacctcgttttggcgggcgctctcattgaggcgagtgcaaccccactgaggttctgtatgcggtcgccttgggaccgactgacggacgtctcgacctacgggccctccgggtccgaggaagatgacgatcccagcatcggttgggatttctccggacatggcaaccccagtgccatgcgggacttcatgaccgcatgtgactactgtctatccgaccgttccgacggaagccgcagcctcggtgacgagagctgcggcccaagccgcgaatgtttccacatcgagctaggggatcccaccgagggcaaccatcttggcatgccggaggatggtgatctccctaggccggtgcctcgcgccgacatcccacgggagctagctgtggtccccgctccggcggggggttacgacccacaactcgagcaagtccgcgaggcgcaggccaggctcaacgagggaacaggggcgcttgagccgatccgtcgggacgccggacaggcatgggtgggccaacccctggccggagaaatacgtcatctgccccaaggtctccagcaccgcgtcgccaacgacgtcaggatcaggccgccgcccgcatccagcggggtcggtcagaacctggcgaccgcagcgatgctcatccgcgcgatgccggagccgtcaaccaccgaggggcggcgaatccagggagaactcaagaatctcctggaaggcgctgcggcccggcgggccgagagcactgcatcccggaggcaaggatatccctcggaacctcatgccgcgacttcccgattcatgcgggagacctcggtctacaccgggcgcacgcgcaacaccgcgcctgcggccccgggccacctcggcaacgagcaccatcgacgcgaccgtcgggctcacctcgacgaaagggtgcgccgaggctaccaccccaggcgtggggggcgccacgacagcggggaggatcggagtccttcgcccgaaccacccggtccgcaggccttcagtcgggccatccgacgggcgccattcccgacccggttccgacccccgactactatcacaaagtactcgggggaaacgagaccggaactgtggctcgcggactaccgccttgcctgccaactgggcggaacggacgacgacaacctcgtcatccgcaacctccccatgttcctctccgacactgctcgcgcctggttggagcacctgcctccggggcagatttccaactgggacgacttggtccaagccttcgctggcaatttccagggcacatacgtgcgccccgggaactcctgggaccttcgaagctgccggcaacagccgggggagtcgctccgggactacatccggcgattctcgaagcagcgcaccgagctgcccaacatcactgactcggatgtcatcggcgcgttcctcgccggcaccacttgccgcgacctggtgagcaagctgggtcgcaaaacccccaccagggcgagcgagctgatggacatcgccaccaagttcgcctccggccaggaggcggtcgaggctatcttccgaaaggacaagcagccccagggccgcccgttggaagaagctcccgaggcgtctgctccgcgcggcgccaagaagaaaggcaagaagaagtcgcaatcgaaacgcgacgccgcagacgcggaccttgtcgccgccgccgagtataagaaccctcggaagccccccggaggtgcaaacctcttcgacaagatgctcaaggagccgtgcccctaccatcaggggcccgtcaagcacaccctcgaggagtgcgttatgcttcggcgtcatttccacagggccgggccacccgccgagggtggcagggcccacgacgacgacaagaacgaagaacacccagcaggggggttccccgaggtccgcgactgcttcatgatctatggagggcatgcggcgaatacctcggctcggcaccgtaagcaagagcgccgggaagtctgctcggtgaaggtggcggcgccagtctacctagactggtccgacaagcccatcactttcgaccgggccgaccaccccgaccatgtgccgagcccggggaaatacccgctcgtcgtcgaccccgttgtcggcgatgtcaggctcaccaaggcgctgcgcccttccacgggatcatccctgggaaggcgcgtccagcccctcgggcgactcgatctcccagtctgctttgggacaccctccaacttccgaagggagaccctgacgttcgaagtggtcgggttccgaggaacctaccacgccgtgttagggaggccatgctacgcgaagttcatggccgtccccaactacacctacctgaagctcaagatgccgggccccaacggggtcatcaccgtcggccccacgtacaaacacgcgttcgaatgcgacgtggagtgcgtggagtacgccgaggccctcgccgagtccgaggccctcatcgccgacctggagaacctctccaaggaggtcccagacgtgaagcgccatgccggcaacttcgagccagcggagacggtcaaggccgtccccctcgaccccagcggcgacaccaccaagcagatccggatcggttccgggctcgaccccaaatag

SEQ ID NO: 113114 - DNA, 3123 bp, Zea mays
  Clone ID: MRT4577_34646C.1
atggtgctccgtttcgggagccttgagttcatgtccctcgacggcagctacgacatgatactccttccaccgccgtgcgacaacgacaatggcggccgacagcccgcccgccggcggcggaatcgacgacgtcttccccgcgtggtggaagaacaacattcaagctcaccccgtcctctcccccgccgacggaggaggaggcggggcaaccaaggccaagcaggaggcagcgcctcgtcggctgtcgagcgagtcgacggcaccagcaccccaacggggggcgcaccgggcatcgaccccgcgcttgagacgaagacgagcgccgtctccccgcaacgtgccgattccgggcaaacggacgacgccagcgcgctcgcgaaaggcttgctggacgtcacccttgtacctgagacgacggcgcagtcagtccccgacgtgacctcatcgccgcccgtcgaccaaaaggtaccgaccgattcccatcccacgtctttcggattcagcctcgacccgcctagcgacttcgctttggcgggtgctcacgtagaggcgagtccaaaccctctgaggtttcgtatgcggtcaccttgggaccggctgacggacgtctcgacctacgggccctctgggtccaaggaagacgacgagcccagcatctgttgggatttctctggacttggcaaccccagtgccatgcgggacttcatgaccgcatgcgactactgcctttccgactgttccgacggtagccgtagcctcggcgacgaggactgcggcccaagtcgcgaatgcttccacgtcgatctggggggtccctccgaaggcaaccatctcggcatgccggaggacggtgatctccctaggtcggtgcctcgcgttgacgtcccacgggagctagctgtggtccccgttcaggcggggggccatgacccacagctcgagcaaatccgcggggtacaggccaggctcgacgagggagcaggagcgcttgagccgatccgtcgggacgtcgggcaggcatgggcgggccaacctccggccggagaaatacgtcatctgccccagggcctccagcaccgcatcgccgacgacgtcaggttcaggccgccacccgcatctagtggggtcggccagaacctggcggcagcggcaatgcttctccgcgcgatgccggagccatcaaccaccgaggggcggcgaatccagggagagctcaagaatctcctggaaggcaccgcggtccgactggtcgagagctccgcctcccgaaggcagggggaagcctcggtctgccccgggcgcacgcgcaacacagcgccagcggccccaagtcgcctcggcaacgagcaccatcaccgcgaccgtcgggcccacctcgacgagagggtgcgccgtggctaccaccccaggcgtgggggacgctacgacagcggggaggatcggagtccctcgcccgagccacccggtccgcaggccttcagccgagccatacgacgggcgccgttcccgacccggttccgacccccgactactatcacaaagtactcaggggagacgagaccggaactgtggctcgcggactaccgtctggcctgtcaactgggtggaatggacgatgacaacctcatcatccgcaacctccccctgttcctctccgacaccgctcgcgcctggttagagcacctgcctccggggcagatctccaactgggacgacctggtccaagcttttgccgggaatttccaaggtacatacgtgcgccctgggaattcctgggaccttcgaagctgccgacagcagccgggagagtctctccgggactacatccggcgattctcgaagcagcgcaccgagctgcccaacatcaccgactcggatgtcatcggcgcgttcctcgctggcaccacctgccgcgacctggtgagcaagctgggtcgcaagacccccaccagggcgagcgagctgatggacatcgccaccaagttcgcctccggccaggaggtggtcgaggctatcttccggaaggacaagcagccccagggccgcccttcggaagatgcccccgaggcgtcaactcagcgcggcgccaagaagaagggcaagaaaaagtcgcaagcgaaacgcgacgccgccgacgcggaccttgtcgccgccgccgagtacaagaaccctcggaagccccccggaggtgccaacctcttcgacaagatgctcaaggagccgtgcccctatcaccaggggcccgtcaagcacacccttgaggagtgcgtcatgcttcggcgccacttccacagggccgggtcacccgtggagggtggcaaggctcgcgacgacgacaagaaggaagatcaccaggcaggagagttccccgaggtccacgactgcttcatgatctatggtgggcaagcggcgaacgcctcggctcggcaccgcaagcaagagcgccgggagcccatcaccttcgaccaagccgaccaccccgaccatgtgccgagcccggggaaatacccgctcgtcgtcgaccccgtcatcggcgacgtcaggctcacaaaggtcctcatggacggaggcagcagcctcaacatcatctacgccgagaccctcgggctcctgcgtgtcgatctgtcctccgtccgggcaggcgctgcgcccttccatgggatcattcccgggaagcgcgtccagcccctcggacagctcgaccttcccgtctgcttcggaacaccctccaacttccgaagggagaccctgacgttcgaggtggttgggttccgaggaacctaccacgcggtactggggaggccatgctacgcgaagttcatggccatccccaactacacctacctgaagctcaagatgccgggccccaacggggtcatcaccgtcggccccacgtacaaacacgcgttcgaatgcgacgtggagtgcgtggagtacgctgaggccctcgccgagtccgaggccctcatcgccgacctggagagcctctcgaaggaggtgccagacatgaagcgtcatgccggcaactttgagccagcggagacagttaagtccgtccccctcgaccccagcagtgacgcctccaagcaagtccggatcggctccgagctcggtcccaaatag

SEQ ID NO: 113115 - DNA, 448 bp, Zea mays
  Clone ID: MRT4577_34647C.1
acgcgtgctcatgacttaaaaccgcgtcagactcataccggagatcgacggcacgggattgctggtgatggtctgcatcggtgacctagctcgcacggaagttgtctagtacagagaagagcttttctggctcaaagacttcttagatgggcgctacgacgactgtttgtgcactaactatggcatgaaatcctttctgttaataggattggtctatgaaagaacgatgactcaccactctctaaatgtggcagatctattgcgctattgttggactatagaatataatgtcggcttggtttaccatagccttgaaattgctctgcatgatgaatggatcagctgtgctaagcatgtctacgctatacattagattgtgcgctaggagctttcatatttctaagcacatccatatcagatgtgcaacagactgactggataactatta

SEQ ID NO: 113116 - DNA, 295 bp, Zea mays
  Clone ID: MRT4577_34648C.1
ggagtggcggttgccatagtaatagctgctacatgcttgactgttatagttctaaggtctgtgtattttaaagtctcccgaatgaagtatttagatcgaaacggtgctcaaacctttgatccaggaactaacactgctactttaaagcttcaaccccagcctcagtcagggtacctttggaaaggtcctgactttcctgcatatcctgtttctccgtcaactactgcctttgaaagtactcacaaacccgtttgaaattgcccgatctcattttgagaagttgttccattttccc

SEQ ID NO: 113117 - DNA, 2733 bp, Zea mays
  Clone ID: MRT4577_34649C.1
atgtccctcgacggcggctacgacatgatactccttcctccgccgcgcgacaatggcggccgacagcccgcccgccggcggcggaatcaacgacgtcttccccacgtggcggaagaacaacattcgggtttgtcccgtcacctcccccgccgacggaggaggaggcggggaaacgaaggccaagtaggaggcggcacctcgtcggctgtcgagcgagtcgacgacgccgacgccccaacgggggacacgtcgggcgtcgacctcgcgtctgagacgaagacgagcgtcgtttccccgcaacacgccaactccaagcggacggacaatgccagcacgctcgcaagggacttgctgggcgtcaccctcgtacctgagacgacggtgcagtccgcccctgacgcgacttcgtcaccgcccgtcgaccaagaggtaccgaccgattcccatctcgtgccttttggattcagcttcgacccaccaagcgatctcgcttcggtggaagccttcatagaggcatgtaccaaccctccggggtaccatatgcggtcgccctgggatagactaactgccgtctcgacctacggaccctcgggttccgagggagatgacgagcccgacttttgttgggatttctccgggctcggtaaccccagtgccatgcgagacttcatgaccgcatgcgactactgcctttttgattgttccgacggtagccgcagcttcggcgacgaggactgcggcccaagtcgtgaatgtttccacgtcgatctagggagtttcggcgaaggcaaccatcttggtataccagaaaacggtgatccccctaggcctatgcctcacgttgacatccttcgggagctagttgtggtcccagtccctgcggggggtcaggacgcacagctcgagcaaatccacgagatgcaggccaggctcgacgaggaagcaggaacacttaagccgttccgccggaacatcgggcaggaatgggcagaccaagctccggccggagaagcacgtcatctaccccagggcatccagcaccgcattgctaacgacgtcagggcaaggccgccaccggcttccagtggagtcggccagaacctggctgcagcatcaatactactccgtgcgatgccggaaccatcaacctccgaagggcggcgtatccagggagagctcaagaatctcctggaggatgccacggtccgacgggccgaaagctcttcctcccgaaggcaggggtacccctcggagcatcacgccgtgacttcccgatttatgcgggaagcctcggtccacaccgggcgcacgcgcaacatggcgcctgcggccccggggcgcctcggcaacgagcaccaccaccgcaaccgtcgagcccacctcaacgagaagatctccaactgggacgacctggtccaagccttcgccggcaacttccagggcacgtacatacgccatgggaactcctgggatctccgaagctgccaccagcagccgggagagtctctccgggactacatccggcgattctcgaagcagcgcaccgagctgcccaacgtcaccgactcggatgtcatcggcgcgttcctcgccggcaccacctgccgcgacctggtgagcaagctgggtcgcaagacccccaccagggcgagcgagctgatggacatcgccaccaagttcgcctctggccaggaggcggttgaggccatcttccggaaggacaagcagccccagggccgccagccggaagatgtccccgaggcgtccactcagcgcggcaccaagaagaaaggcaagaagaagtcgcaagcgaaacgtgacgccgccgacgcggaccttgtcaccgccgccgagtacaagaaccctcggaaacctcccggaggtgccaatctcttcgacaagatgctcaaggagccatgcccctatcatcagggacccgtcaagcacaccctcgaggagtgcgtcatgcttcggcgccactttcacaaggccgggccacctgcgaaaggtggcagggcccacaacaacgacaagaaggaggatcacaaggcagtggagttccccgaggtccacgactgcttcatgatctacggtgtgccaatggcaaacgcctcggctcggcaccgcaaagcaagagcgtcgggagggcgaccaaccccccgacgcgtgccgagcccggggaaatatccgctcgttgtcgaccccgtcatcggcaacgtcaggctcaccaaggtcctcatggacggaggcagcagcctcaacatcatctacgccgagaccctcgggctcctgcggatcgatctgtcctcggtccgggtaggcgtgacgccttttcacgggatcatccccgagaaacgcgtccagcccctcggacaactcgatctgcccgtctgcttcgggactccctccaacttccgaagggaaaccctcacgttcgaggtggtcgggttccgaggaacctaccacgcggtgctggggaggccgtgctacgccaagttcatggccgtccccaactacacctacctcaagctcaagatgtcgggccccaacgggtgcgtggagtacgccgaggccctcatcgccgacctagagagcctctccaaggaggcgccagacgtgaagcgccatgccggcaacttcgagccagcagagacggttaagtccgtccctctcaaccccagcaacgacgcctgcaagcagatccggatcggctccgagctcgaccccaaatag

SEQ ID NO: 113118 - DNA, 508 bp, Zea mays
  Clone ID: MRT4577_3464C.1
gaaaggcaaaacaccaacctccaaaggggtccaaccccaccgggggaaaaaaagtttggggaccacccaaagggccccaacgggcccttaaaaccaacaaacccccccccccattttgggaccccaaacccccgggggttttttaaccccccccccccttaaaggggccccccaaggggcccccaacgccccaaaaccccggggcccggggcgctttaaaggaaccggggtttacggcccccccgggggggggacccccggggggaaagggcccccccccgggggggggaaacccgcaaggggggggcccccccccaggggtttgccaaaaaaaaaaaaaccctgggggccgggggggaaccccccttggcccgggatttttgcccccccgggggaaagggggggggacccccccccccccggggtttgggtttggccaacaaaggttcccaaaaaaatcggcaacccccccccaaagggggccccaccgggggggggcccccccccc

SEQ ID NO: 113119 - DNA, 3402 bp, Zea mays
  Clone ID: MRT4577_34650C.1
atgccgaaaccatccaccaccgagggacggtgtatccaaggagagctcaagaatctcctagaggatgccgcggtccgacgggccgaaagctctgcctcccgaaggcaggggtaccccccggagcatcgcgccgcgacttttcgattcatgcgggaagcctcggtccacaccgggcgcacgcggaacacagcgcctgcggccctgggtcgcctcggcaacgagcaccaccgccgcgatcgtcgagcccacctcgacgagaagatctccaactgggacgacctggtcaaagccttcgccggcaacttccagggcacatacgtgcgccctgggaactcctgggatctccgaagctgcgaggaacgcgccgatgacatccggcgattttcgaagcagcgcaccgagctgtccaacatcaccgactcagatgtcatcggcgtgttcctcgccggcaccacttgctgcgacctggtgagcaagctgggtcgcaagactcccaccagggtgagcgagctgatggacattgccaccaagttcgcctctagtcaggaggcggtcgaggccatcttccggaaggacaagcagccccaggggcgccagcaggaagacgtccccgaggcgtccgctcagcgcggcaccaagaagaagggcaagaagaagtcgcaagcgaaacgcgacgccgccgacgcagaccttgtcgccgccgccgagcataggaaccctcggaagccccccggaggcgccaacctgtttgataagatgctcaaggagtcgtgcccctatcatcagggtcccgtcaagcacacccttgaggagtgcgtcatgcttcggcgctacttccacaaggtcgggcccccggcggaaggtggcagagcccacgccaacgacaagaaggagggccacaaggcagaggagttccccgaggtccacgactgcttcatgatctacggtgggcaagtggcgaacgcctcggctctgcaccgcaagcaagagcgctgggaggtctgctcggtgaaggtggcggcgccagtctacctagactggtccgacaagcccatcaccttcgaccaaggtgaccaccccgaccgcgtgccgagcctggggaagtacccgctcgttgtcgatcccgtcatcggcaacgtcaggcttaccaagatcgatctgtcctcgatccgggccggcgcggcgccctttcacgggatcatccacgggaaacgcgtccaaccccttgggcaactcgatctgtccgtctgcttcgcgactccctccaatttccgaaaggaaaccctcacgttcgaggtggtcgggttccgaggaacctaccatgcagtgttggggagaccatgctacgccaagttcatggtcgtccccaactacacctacctcaagctcaagatgtcgggacccaacgggtacgctgaggccctcatcgccgacctggagaacctctccaaggaagtgccagatgcgaagcgccacgccggcaacttcgagccagcagaggcggttaagtccatccctctcgaccccagcaacgacgcctccaagcaggttccctaccctctgcctcgcatcgatcaaatcgtggattccactgctgggtgcgaaaccctgtcgttcctcgatgcctactccggatatcaccaaatcaggatgaaagagtccgaccagttcgcgacttctttcatcacaccttttagcatgtactgctacatcactatgccatttggtttgaggaatgcaggcgcgacataccaaaggtgcatgaaccacgtgttcggagagcacattggccgaacggtcgaggcttacatcgatgacatcgtagtcaagacgaggaaatccttcgacctcctctctgaccttgaaacgacattcaagtgtctcaaggcgagaggcgtgaaactcaatcccgagaagtgtgtcttcggagtcccccgaggcatgctcctagggttcatcgtctctgagcggggcatcgaggccaacccggagaaaatcgcggccatcaccaacatggggcccatcaaggacttgaaaggagtacagagggtcatgggatgccttgtggctctgagccgcttcatctcgcgcctcggcgaaagaggcttacccctgtaccgcctctttaggaagaccgagcacttcacttggacccccgaggccgaggaagccctcgggaacttaaaggcgctcctttcaagcgcgcccatcttggtgccccccgctgctggagaagccctcttgatctacgtagccgcaaccactcaggtgaggccggtctacttcatcagcgaggtactgtccgagaccaaaatccgctacccgcaaattcagaagctactgtacgcggtaattctgacgcggcgaaagttgcgacactacttcgagtctcatccggtgactgtggtgtcatccttccccctgggggagatcatccagtgccgagaggcctcaggaacgggcgcgggcctgctcttcatctcacccctcgggaagcacctccgctacgtgctgcgcctccatttcccggcgtccaacaacgtggccgagtacgaggctctggttaacgggttgcgcatcgccatcgagctaggggtccggcgcctcgacgctcatggcgactcacaacttgtcatcgaccaagtcatgaagaactcccattgccgtgacccgaagatggaagcctactgcgacgaggtttggcgcctggaggacaagttctacgggctcgagctcaaccacgtcgctcgacgatacaacgagactgcggacgagctggctaaaatagcctcggggcggacaacggttcccccggacgtcttctcccgagacctacatcaaccctccgtcaagaccgacgacacgcccgagcccgaggaggcctcggcccagcccgaggcaccctcggcccccgagggtgaggcactgcgcgtcgaggaagagcggaatgggacacgcctaatcgaaactggcagaccccgtacctgcaatatctccaccgaggagagctacccctcgatagagccgaggctcggcgactggcgcggcgcgccaagtcgttcgtcttgctgggtgacggaaaggagctctaccaccgcagcccctcaggcatcctccagcgatgcatatccatcgtcgaagaaggcacccgggggcttcacgcacctgctggtcgctatcgacaaattctccaagtggattgagatccgacccctaaactgcattaggtccgaacaggcggtggcgttcttcaccaacatcatccatcgctttggggtcccgaactccatcatcaccgacaacggcacccagttcactggccgaaagttcctggacttctgcgaggaccaccacatccgggtggactgggccgccgtagctcaccccatgacgaatgggtag

SEQ ID NO: 113120 - DNA, 343 bp, Zea mays
  unsure (1)..(343): unsure at all n locations
  Clone ID: MRT4577_34651C.1
cgtacgaaaccagaggcatctatgagcaaccgttttccacacttctcacgcgtcagnctgtcagcaatgccctcgcctgccaccataggcagatggtctctccagcggcgnatgcgcgcgggaccgcccgatcaaggatgcggttctctgtcggccgtatgggccgcgatcacacatgcgacaacgaccgatggagcaagccacaaggatgagcggtcgtcctggcagccctccgtggaacgggtcccggacgcgcgatcaaagtaccatacgggccacttgctccggcggagcgccccggagactacgcatcaccgtgcgtagttgccccgtgcggactacg

SEQ ID NO: 113121 - DNA, 1545 bp, Zea mays
  Clone ID: MRT4577_34652C.1
atggaggcctactgcgatgaggttcggcgcctggaagacaagttctacgggctcgagctcaaccacatcgctcgacgctacaacgagactgcggacgagctggctaaaatagcctcggggcgaacaacggttcccccggacgtcttctcccgggatctgcatcaaccctccgtcaagattgacgacacgcccgagcctgaggcaccctcagcacagcccgaggcaccctcggctcggcccgaggcgccctcggttcagcccgaggtaccctcggcccccgagggcgagacgctgcacgtcgagggggagcaaagcggggtcacgcctgatcaaaactggcagaccccgtacctgcaatatctccaccgaggagagctacccctcgaccgagccgaggctcggcgggtggcgcggcgcgccaagtcgttcgtcttgctgggcgatgagaaggagctctaccaccgcagcccctctggcattctccagcgatgcatctccatcgccgaaggtcaggaactcctgcgagagatacactcgggggcttgcggccatcacgcagcgcctcgagcccttgtcgggaatgctttccgacaaggcttctactggcctacggcggtggccgacgctaccagaattgtccgcacctgcgaagggtgtcaattctacgcgaggcagacccacctgcccgctcaggctctgcagacgatacccatcacctggccttttgctgtgtggggtctggatctcgtcggccccttgcagaaggcacccgggggctacacgcacctgctggtcgccatcgacaaattctccaagtggatcgaggcggtggcgttcttcaccaacatcatccaccgcttcggggtcccaaactccatcatcaccgacaacggcacccagttcatcggcagaaagttcctggacttctgcgaggatcaccacatccgggtggactgggccgtcgtggctcatcccatgacgaatgggcaggtagagcgtgtcaacggcatgattctacaagggctcaagcctcggatctacaacgacctcaacaagttcggcaagtggtggatgaaggaactcccctcggtggtctggagtctgaggacaacgccgagccgagccacgggcttcacgccgttctttctagtctatggggccgaagccatcttgcccacagacttagaatacggttccccgaggacgagggcctacaccgaccaaagcaaccaagctagccgagaagactcgctggaccagctggaggaggctcgggacaaggccttactacactcggcgcggtaccagcagtccctgcgatgctaccacgcccgaggggtccggtaccgagacctccaggtgggcgacccggtgcttcggctgcgacaagatgcccgagggcggcacaagctcacgcccccctgggaggggccgttcgtcatcgccaaagttctgaagcccagaacgtacaagctggccaacagtcaaggcgaggtctacggcaacgcttggaacatccaacagctatgtcgcttctacccttaa

SEQ ID NO: 113122 - DNA, 885 bp, Zea mays
  unsure (1)..(885): unsure at all n locations
  Clone ID: MRT4577_34653C.1
cgggccttttcctcctcccctttgcggcttctcgcagcgctgcgaatcccaatccgcaccgatccgacgcgaatcgatcgagaggcagggggcagcactaatcgaatcgagactagcgccatgaacccgagaggttagtctctcttcgtctattgattgtatgccctgttcctattggaaaatttatgcactttgtgcagccatcgtagcaacagaacttctctcttcgatggcattgaggagggtggaatccgagcaacatcctattcttctcatgagatagatgagcaagaaaatgatggagctattgatggactgcaggatcgtgtcagcattctcaagcggttgtcaggcgatatccatgaagaggtggagactcataacagaatgctggaccgaatggggaacgatatggatacttcaaggggttttctgtctgggaccgtggacaaattcaagatggtatttgagaccaaatcaagccggaggatgggaaccctcgtcgcatcattcgtcgcccttcttctgctggtttactacttgaccaggtagaagacatgacatgctggaaatggtcatctcatcatctgcgtgccgtgccgtatagatagataccttgaaaacccaccgccctgagtgccaaagtatatgttgatgtggcctgtgggtgtttcgtcaactctgcactgtacaacacgactacagcgtgcgtgctgggtcgatcctattatctgttgttgcaggattcaagtttgttgtccgttccttccctttggtatttagtagcatatgtggctggactccttaaaaaaactgtataaagaagctttgattgagcaaaaaaaaaaaaaannnnnnnnnnnnnaaaattttagggggggcccg

SEQ ID NO: 113123 - DNA, 2157 bp, Zea mays
  Clone ID: MRT4577_34654C.1
atgaaagagtccgaccagctcgcgacttctttcatcacacctttcggcatgtactgctatgttactatgtcgtttggtttgaggaatgcgggtgcgacataccaaaggtgcatgaaccacgtgttcggcgaacacattggtcgaacggtcgaggcttacgtcgatgacatcgtagtcaagacgaggaaagccttcgacctcctttccgaccttgaagcgacattccggtgtctcaaggtgaaaggcgtaaaactcaatcctgagaagtgcgtcttcggagtcccccgaggcatgctcttagggttcatcgtctccaagcggggcatcgaggccaacccggagaaaatcgcggccatcaccaacatggggcccatcaaggacttgaaaggcgtacaaagggtcatgggatgcctggcggctctgagccgcttcatctcgcgcctcggcgaaagaggtctacccctgtaccgcctcttaagaaaggccgagtgcttcacttggacccccgaggccgaggaagccctcgggaacctgaaggcgctcctcacgaacgcgcccatcttggtggtcagcgccgcgatcatggttgagagacgagaagaggggcatgcattgccggtccagaggccagtctacttcatcagtgaggtactgtccgagaccaagatccactacccacaaattcagaagctgctgtacacgatgattctgacgcggcggaagttgcgacactacttcgagtctcatccgatgactgtggtgtcatccttccccctgggggagatcatccagtgccgagaggcctcgggtaggattgcaaagtgggcggtggaaatcatgggcgtgacaatctcgttcgcccctcggaaggccatcaagtcccaagtcttggcggactttgtggctgaatgggtcgacacccagctcccaacagctccgatccaaccggaactctggaccatgtttttcgatgggtcgctgatgaagacaggggcaggcgcgggcctgctcttcatctcgcccctcgggaagcacctacgctacgtgttgcgcctccatttcccggcgtccaacaatgtggccgagtacgaggctctggtcaacgggttgtgcatcgccatcgagctaggggtccaatgcctcgacgctcgcggtgactcgcatctcgtcattgaccaagtcatgaagaactcccactgtcgtgacccaaagatggaagcctactgcgacgaggttcggtgcctggaagacaagttctacgggctcgagctcaaccacgtcgcccgacgatacaacgagactgtggacgagctggctaagatagcctcggggcaaacaacgaaggcacccgggggctacatgcacctgctggtcgtcatcgacaaattcttcaagtggatcgaggtccgacccctaaacagcatcaggtccgaacaggcggtgtcattcttcaccaacatcatccatcgctttggggtcccgaactccatcatcaccgacaacggcaccaagttcaccggcagaaagttcctagacttctgcgaggatcaccacatccgggtggactgggccgtcgtggcccaccccatgacgaatgggcaagtagagcgtgccaacagcatgattctgcaaggactcaagtcgcggatctacaacgacctcaacaagttcggcaagcgatggatgaaggagctcccctcggtggtctggagtctgaggacaacgtcgagccgagccacgggcttcacaccgttctttctagtctatggggccgaggccatcttgcccacagacttagaatgcagttccccgaggacgagggcctacgacgaccaaagcaatcgagctggccaagaagactcactagaccagctggaagaggctcgagacatggccttactacactcggcacggtatcagcaatccctgcgacgctaccacacccgaggggttcggtcccgagacctccaggtgggcgacttggtgcttcggttgcgacaagacgcccgagggcggcacaagctcacgcctccctgggaagggccgttcgtcatcgccaaggttctaaagcccgggacatacaagctggccaacagtcaaggcgaggtctacagcaacgcttggaacatccggcagctacgtcgcttctacccttaa

SEQ ID NO: 113124 - DNA, 949 bp, Zea mays
  unsure (1)..(949): unsure at all n locations
  Clone ID: MRT4577_34655C.1
ttctttgtcgcgctcttggcgcccctctcggcgatttgcttgactctgatgggtttggggtgtggtgcgtgcaggcagggggcagcactaatcgaatcgagactagcgccatgaacccgagaggttagtctctcttcgtctattgattgtatgccctgttcctattggaaaatttatgcactttgtgcagccatcgtagcaacagaacttctctcttcgatggcattgaggagggtggaatccgagcaacatcctattcttctcatgagatagatgagcaagaaaatgatggagctattgatggactgcaggatcgtgtcagcattctcaagcggttgtcaggcgatatccatgaagaggtggagactcataacagaatgctggaccgaatggtacacttgtcccccatcctttgcttgttgtaagatctgaatctactatcctactcacgtggacaaattcaggggaacgatatggatacttcaaggcgttttctccgcgggcgcgtccgtaaattcatgcaggtatttgagaccaaatcaagccggaggatgggaaccctcgtcgcatcattcgtcgccctttttctgctggtttactacttgaccaggtagaagacatgacatgctggaaatggtcatctcatcatctgcgtaccgtgccgtatagatagatacccaccgtcctgagtgccaaagtatatgttgatgtgggtgtttcgtcaactctgcactgtacaacacgactacagcgtgcgtgctgggtcgatcctatgctctcttgttgcaggattcaagtttgttgttgtccgttccttccctttggcatgtcatgtgtatggtatttagtagcatatgtggctgtactccttttttttaaaaaaaaacaaaaaaactgtataaagaagctttgattgagcaaaaaaaaaaaaaaaaaaaaaaanaannag

SEQ ID NO: 113125 - DNA, 882 bp, Zea mays
  Clone ID: MRT4577_34656C.1
atgagaaggagctctaccaccgcagcccctcaggcatcctccaacggtgcatctccgtcgccgaagaaggcgcccgggggctacacgcacctgctggtcgccatcgacaaattctccaagtggatcgaggtccgacctctgaacagcatcaggtccgagcaggcggtggcgttcttcaccaacatcatccatcgcttcggggtcccgaactccatcatcaccgacaacggcacccagttcaccggcagaaagttcttagacttctgcgaggatcaccacatccgggtggactgggccgctgtggctcatcccatgtcgaatgggcaagtagagcgtgccaacggcatgattctacaaaggctcaagcctcggatctacaacgacctcaacaagttcggcaaacgatggatgaaggaactccccttggtggtctggagcctgaggacgacgccgagccgagccacgggtttcacgccgttcttcctagtctacggggccgaggccgtcttgcccacagacctggaatatggctccctgaggacgagggcttatagcaatcaaagcaaccaagctagccgagaagactcgctggaccagctggaagaggctcggcacaaggccttactacactcggcgcggtaccagcagtccctgcgacgctaccacgcccgaggggtccggccccgagacctccaggtgggcgacctggtgcttcggctgcgacaagatgcccgagggaggcacaagctcatgcctccctgggaggggccattcgtcatcgccaaagttctgaagcccggaacgtacaaggtggccaacagtcaaggcgaggtctacggcaacgcttggaacatccaacagctacgtcgcttctacccttaa

SEQ ID NO: 113126 - DNA, 2286 bp, Zea mays
  Clone ID: MRT4577_34657C.1
atgggtagtctccagcaacctttccagcccggaacgacggtgctccgtttcgggagtcttgagttcatgtccctcgacggcggctacgacatgatactccttcccccgccgcgcgacagcgacaatggcggccgacgacacgcccgccggcggcggaatcgacgacgtcttccccacgtggcggaagaacaacattcgggtttgtcccgtcgcctcccacgccgacggaggaggaggcgaggtaaccaaggccaagcaggaggcggcacctcgtcggctgtcgagcgagtcgacggcgccggcgccccaacgggggacacgtcgggcatcgacctcgcgtctgagatgaagacgagcgtcgtttcctcgcaacacgcgaactccaagcggacggacgacgccagcatgctcgcaaaggacttgctgggcgtcaccctcgtacctgagacgacggtgcagtctgcccctgacgtgacctcgtcaccgcccgtcgaccaagaggtaccgaccgattcccatatcgtgccttttgtattcagcctcgacccaccaagcgacttcgcttcggtggatgctttcatagaggcgagtccaaaccctccggggtacggtatgcggtcaccctgggaccggctgacagtcgtctcgacctacgggccctcgggttccgaggaagatgacgagtccgacttttgttgggatttctccggacttggtaaccccagtgccatgcgggacttcatgactgcatgcgactactgcctttccgattgttccgacggtagccgcagcttcgacgacgaggactgcggcccaagtcgtgaatgtttccacgtcgatctagggggtcccgacgaaggcaaccatcttggtataccggaaaacggggagacgaggccggaactgtggctcgcggactaccggctggcctgccacctgggtggaacgaacgatgacaacctcatcatccgcaacctccccctgttcctctccgacaccgctcgagcctggctggagcatctgcctccggggcagatctccaactgggacgacctggtccaagccttcgccggcaacttccagggcacgtacgtgcgccctgggaactcctgggatctccgaagctgccgccagcagccgggagagtctcttcgggactacatctggcgattctcgaagcagcgcaccgagctgcccaacgtcactgactcggatgtcatcggcgcgttcctcaccggcaccacctgccgcgacctggtgagcaagctgggtcgcaagacccccaccagggcgagcgagctgatggacattgccaccaagttcgcctctggccaggaggcggttgaggccatcttccggaaggacaagcagccccagggccgccagccgaaagatgtccctgaggcgtccactcagcgcgacaccaagaagaaaggcaagaagaagtcgcaagcgaaacgtgacgccgccgacgcggaccttgtcgccgccgctgagtacaagaaccctcggaaacctcccggaggcgccaacctctttgacaaaatgctcaaggagccgtgcccctatcatcaggggcccgtcaagcacacccttgaggagtgcgccatgcttcggcgccactttcacaagggcgaccacctcgaccgcgtgccgagtccggggaaatacccgctcgttgtcgaccccgtcatcggcaacgtcaggctcaacaaggtcctcatggacggaggcagcagcctcaacatcatctacgccgagaccctcgggctcctgcggatcgatccatcctcggtccgggcaggcgcgacgcctttccacgggatcaaccccgggaaacgcgtccaacccctcggacaactcgatctacccgtctgcttcgagactccctccaacttccgaagggaaaccctcacgttcgaggtggtcgggttccgaggaacctaccacgcagtgttggggaggccatgctacgccaagttcatggccgtccccaactacacctacctcaagctcaagatgtcgggccccaacggggtcatcaccgtcggccccacgtatcgacacgcgtacgaatgcgacgtggagtgcatggagtacgccgaggccctcgccgaatccgaggccctcatcgccgacctggagagcctctccaaggaggcgccagacgtgaagcgccattccggcaacttcgagccagcggagacggttaagtctgtccctctcgaccccagcaacgacgcctccaagcagatccggatcggctccgagcttgatcccaaatag

SEQ ID NO: 113127 - DNA, 759 bp, Zea mays
  Clone ID: MRT4577_34658C.1
atgggcgagacaatcccgttcgcccctcggaaggccatcaagtcccaagtcttggcggactttgtggctgaatgggtcgacacccagcttccagcagctccgatccaaccggaactctggaccatgtttttcgacgggtcgctgatgaagactggagcgggcacgggcctgctcttcgtctcacccctcgggaagcacctccgcaacgtgctgcacctccgtttcccggcgtccaacaacgtggccgagtacgaggctctggttaacggattgtgtatcgccatggagctaggggtcagatgcctcgacgctcgtggcgactcgcagcttgtcatcgaccaagtcctgaagaactctcattgccgcgacccgaagatggaagcctactgcgatgaggttcggcgcctggaggacaagttctatgggctcgagctcaaccacatcgcccgacgatacaacgagactgcggacaagctggctaagatagcctcggggcggacaacggttcccccggacgtcttctcccgagacctacatcaaccctcagtcaagaccaacgacacgcccgagcccgagaaggtctcggccctgcccgaggcgccctcggctcagcccgaggcatcctcggcccccgagggtgaggcactgcgcgtcgaggaagagcggaatggggtcacgcctaatcgaaactggcagaccctgtacctgcaatatctccaccgaggagagctacccctcgatagagccgaagctcggtga

SEQ ID NO: 113128 - DNA, 840 bp, Zea mays
  Clone ID: MRT4577_34659C.1
ctgtgcggcgctcgaggcggccgtttgggacgatcctcacccggcgccgctccttcgtccgcctccgccctccgccgccgctcctcagtccgtctccaccctctgtcgtacttccgccgccacagcgccgccctccctcctccgcctactgcagcggagatctacagatgataagcgaactagaaaaccacaggcatcaactacctttacgcggaacaaaagtttgaggttcccatatctccctttggaaatgcatccccctctgactttacataggcatcctatgtgtgctgagattattgaagaattccagaagtgccatctggatcaccctatcaagaagttattcggagagtgcacagaccttaaaatcaagctagaccgctgcttccgacaggagaaagctttgaagagaaaggcaaactttaaagagagcaagaaatttaaagaacagctgcaggcttacaaaagggaaattgctgagaaaaacgaggaataataacttgggaacagaggacaaggccctagaggctcttagttttcgattgtctgcccttgatttgtgaaggatttgtcgagtgtttttgaactgcatgtttctaaaaaatatcctactatttttcgagtagcatccaaacttcagcaacttaaaaagtttcttccttgactacggaatatgtttccagtttgttcatgcatgcttgtgtaacagtgttttgtatcagatatggaaaactcactcttattgcctagtatagtataagcagtttattctcaggttccttttatccgcaccatttatttcatgttgatgtaatttgcatgtaaaatccaattaaa

SEQ ID NO: 113129 - DNA, 334 bp, Zea mays
  Clone ID: MRT4577_3465C.1
gaccaagccgtccgatcttgcgagcgcggttggggggccgcgaacatgtcggtgacttggggtcctgacatgggtggtgaacactagctgcgcgcggagggcactgaaatctgttaacctacgtcaagcgcctaatacacagagactgtggtcaccggctgttacaggactagactggagttgacaccacctccatctatcgtggagctgctcatagaactactactgaggagagtctgcatcacaattttcaagactactgaagcacgtgtacgtctacatcgacccgatggccgatgctaagctgactaccaacaaggaggctgaaaactct

SEQ ID NO: 113130 - DNA, 207 bp, Zea mays
  Clone ID: MRT4577_34660C.1
tcgaccagatactggtccaacatataaaaacagttttggcggggcttaagtcacgcataagcactcagttgactgctgttgctaaagagcttgctgtgtatggtgaacctcttgattcaaaagctggccaaagtgctaagcttttgaacatactatctaaaaactgtgaagcgttttcctcaatgggggggggagaaaatgaagata

SEQ ID NO: 113131 - DNA, 174 bp, Zea mays
  Clone ID: MRT4577_34661C.1
gccgatcgcccttgccaatctagattgaaggtggcgatgccgaagccatacgcctacttctgccatacggctcagcccaactagggtctactctcgctaacctacccgatctagcaccgattgtgcaggaacacctacctcatcaactagatgagcaattacaccttctacaac

SEQ ID NO: 113132 - DNA, 319 bp, Zea mays
  Clone ID: MRT4577_34662C.1
gacgcggccacgacgctagtcgtcgtcgtcgtttcgcaactcgcggcgccggctgccggctgcccctactgtccgacgccgacaccgacacctacgacaacgaacacacacacagcggggaacccgccgccgtcgatcacgccgggacctccgtcttcatacttgccattcacgccaacgggcaagcgccacaaggacacgctgaatctgctggagtgcgaggacgcactcaacggcctagtgcacaccatcgaaaggaccaacgacaacgacaactgctgtacactgctgaacaaagaggcagatctatactccaaac

SEQ ID NO: 113133 - DNA, 304 bp, Zea mays
  Clone ID: MRT4577_34663C.1
gccggacatgcgggcatgtgagcaaggacttcttatctacaggaatcatcaccatacccggctactgggacggatcagaacagcacttgcaatggctactagcacactcaagagagctcatcgctctggagcgtagcaagctgtagctgctgcaccaaatggcgccgccataagatactcctagatgctactgcctccagagctcgacgacatcgatacgtccggcactcgccatgcggatatacaacaccgggcagtgatcttacacacgcatggcatccagctctcttgacgactcactata

SEQ ID NO: 113134 - DNA, 600 bp, Zea mays
  Clone ID: MRT4577_34664C.1
aaccatcattccacgagcatatcgacaggaccgggaagagcaagttaggagcgaccaacgaacgatgaagagtagcacgctggtggcggtcctacttctccagaccgtcatggtcatggggatcctcgcacactcacagcccgcggacgcgcacgacgatttccccaagtgctgcgaccactgcaactcctggtcgggggcccaattctgcgacgacgtgggccccaagtgccgcgacggctgcgtcaactgccgcgtggtgcagacgcgccccgtgaagacgttccggtgtggagatggacgctccgccttcccgtacattccctgcccgccgccgtgcaaaaagaactgatcgctccacctcatcacacagtgacatcgatgtccggccggaaaatataaaataaacagcaacaactgtcgtcgttctctctactttgagagaaatatacagtatatagttgatgttgctccgtaataaataaataaataagctttgtaaaacctggttccatgtcgcgctggtaggctcggagttagttgagactgtttaataaattacagtgattcaaaaaaaagtttatgtatggtctctgcttt

SEQ ID NO: 113135 - DNA, 327 bp, Zea mays
  Clone ID: MRT4577_34665C.1
gaccacgcgtcaactacgagtccggtccgtccagcgtccagtcgcccagcgtttcagcgccatctgcgggtcccacatcatcgttcgacacacgagcaccgagcattcaatccgtcatcgggggcgatgacggcgacagtgattatacatgcagcggctctcgcagtcctccagctggcgtcatcgtcgtctaaaacggcacgcatggccagcgtcgcccaggacgaactctcagcattcgtagcagtggccgttacttcttcacatcacctgcataaagattgatccgaagctgcagatgaacggaatgggactgataaggagtgc

SEQ ID NO: 113136 - DNA, 308 bp, Zea mays
  Clone ID: MRT4577_34666C.1
gcaacccaaaagccattcaaattacccaaaccccggggcatattttgcagcatgtatcgctttcttcccctttaaaaactaaaaaccttaaattacccgggacatcatttcaggcccgaaaccatttggtacaaaaaacattattccatgtgtatgaggggatacaggccccctgcattaccagcgcccattaagatggcggccccacaaggggacttccttacccccattttccagattgggggtggcccccaccggggggggggcaccatttggtgtaaccccagggctcactcccgtggggctgg

SEQ ID NO: 113137 - DNA, 398 bp, Zea mays
  Clone ID: MRT4577_34667C.1
tcgatccttttcaagtgatgtttctaggcagacttgcagccctgtcgaacagctttcattgggtaccatgcttgggatagctttcatcactctacagaaagttgcagacatgtctagctggccacacatgttttgtcttgtatggattgatggggtattaagatatcttgaagtcttaggaagtgcatttacattgtctgaggtcaatattttaatagaactgtatactcagattataaatgctttattgcgggctgttggtaaatgcatcttacttcaacagacgaatgctactctccctactcatgagattggctaaagcactaaaacactgcaataacagaatgcatctggctatgctttttctaaagattccattgttacacagaatagattaa

SEQ ID NO: 113138 - DNA, 208 bp, Zea mays
  Clone ID: MRT4577_34668C.1
cacggtccccggcctccgactgctcccctatccctcctcttcccccgcctagagctcttcagctccggcccctccacgggcctcgtcgacggcggcgtcggatgccgttttgaaagagggggttgaagaacctatagagctaaggccgtcgaagccgaccccgaaaaagggaaagatgaggagcatgaggcccacggcggtgcgcacg

SEQ ID NO: 113139 - DNA, 336 bp, Zea mays
  Clone ID: MRT4577_34669C.1
gggggggaaccacaattataccaccccacgaaacaaaacacgggatattattcctccgactgaaaaaaaaaaaaaaggcccaaacaaaaaaaaccgggggggggggttcaaaaaataaagagaaaaagagacatttttatccccaccagaagaaataaaacggggggatctacattaccacacaccaaaggggaaacctacgggggggataaaaggagttttggcaggcccacagtaaaggggaaaaaattttggggggggttgacagggggcacgttaggtcctgggatttcttaaaggctggcctttattatatttacaaagggaccaaccatt

SEQ ID NO: 113140 - DNA, 885 bp, Zea mays
  Clone ID: MRT4577_3466C.1
agcgtctgggaaacgcccagccaagctctgtccccgccgctaccagcccaacgccctgttccacgtctgccccgccgccgaggacgaggcggccaactcgtccgccctccggatccggtcctgcgctcagccgccgaggcaggccgagctcttcctcgcccccgccctatcgagctccgcctacaccagaatccagattccaggttccagatgatcatgaatacaactcagaaagctaattcggtggaacaagatgctaaggtttttgtgaaacaagccccacagttcaaaaggtgggggcgaaaacatccatttgttcggtatgggttaccactcatttccttgacagtgtttggtgcagtgggacttgctcaccttatacagggcagcaaagaagtgaccaaggaaaaggaggatatggaatgggaggttgtagagacaacaaaagctctaagtcgaacagggccagtggaaggagcctataagcctaagaaactctctctagaggacgaactgaaggctttgcagcagaaggttgacataaacagctacgactacaagcccatcccaagacccagtgagaaataagtgaagatgaagaccgtttgctagtgcgtcgagtggatgtttgtttcttgatactttcgtcgtctcgtcttgtcacaagttttgtatgaatgtacggagctgattcaagtttgaaattagaataggaataggaataagtgaagctgtagagaactggtacgaggatccttgaaccgtttgcatatgtttgttttttttccccttttttgggttagtaaattctgatgtgtcttatcagttttctagtgtctatttacagaggaaaatatataaaggtacagtgcatcgtgttgatcg

SEQ ID NO: 113141 - DNA, 168 bp, Zea mays
  Clone ID: MRT4577_34670C.1
gagggccggagcagccgctttctcggcgatcccgccacccgtccccccatacttcctccgaactgccttcgcttctctttccaacatatcagatgagccgtggcgtgagcgcgggtggtggtcaaagttctctgggttacctctttcaaagcgctgagcaccccaaac

SEQ ID NO: 113142 - DNA, 246 bp, Zea mays
  unsure (1)..(246): unsure at all n locations
  Clone ID: MRT4577_34671C.1
ccgncgccaacgtcgcctggcngccgtctgcnnctccgcgcctctgctcngaagttggtnaaggtttctgangctgagaagatggtgctgaagacagcactncngccgcttcagcggnccagaagatttattcctgggaaangncatccgaattnatccgtgcngnttccacaggagcttnccgctttgncnaggtcgaaaaagtcnaangggagnttnncaaangncngngangacaggaangtg

SEQ ID NO: 113143 - DNA, 2538 bp, Zea mays
  Clone ID: MRT4577_34672C.1
atgggcagtctccagcaacctttccagcccgggacggtgctccgtttcgggagtcttgagttcatgtccctcgacggcagctacgacatgatactccttccccggccacgcgacgacgacaatggcggccgacaacccgcccgccggcagcggaatcgacgatgtcttccccacatggtggaagaacaacattcgggcttgtcccgtcgcctcccccgccgacggaggaggaggcggggcaaccaaggccaagcaggaggcggcacctcgtcggctgtcgagcgagtcgacggtgccggcgccccaacgggggacacgtcgggcatcgacctcgcgtctgagacgaagacgagcgtcgtttctccgcgacacgccaactccaagcggatgaacgacaccagcatgctcgcgagggacttgctgggcgtcacccttgtacctaagactacggtgcagtctacccctgacgtgacttcgtcaccgcccgtcgaccaagaggtaccgaccgactcccatctcgtgcctttcggattcagcctcgacccaccaagcgacttcgcttcggtggacgctctcgtagaggcgagtccaaaccctccggggtatcgtatacggtcaccctgggaccggctgacagccgtctcgacctacaggccctcgggctccgaggaagatgacgagcccgactttagttgggatttctccggacttggcaaccccagtgccatgcgggacttcatgactgcatgcgactactgcctttccgactgttccgacggtagccgcagcctcggcgacgaggacagcggcccaagtcgtgaatgtttccacgtcgatctagggggtcccggcgaaggcaaccatcttggtataccggagaacggtgatcccccaaggcctgcgcctcgcgttaacatccttcgggagctagttgtggtccccgtcccggcggggggtcacgacccacagctcgagcaaatccgcgagatgcaggctaggctcgacgagggagcaggaacacttgagccgttccgccgggacatcgggcaggaatgggcaggccaaccgccggccggggaagcactccaagccttcgccggcaacttccagggcacgtacgtgcgccctgggaagtcctgggatctccgaagctgccaccagcagccgggagagtctctccgggactacatccggcgattctcgaagcagcgcaccgagttgcccaacgtcaccgactcggatgtcatcggcgcgttcctcgccggcaccacctgccgcgacctagtgagcaagctgggtcgcaagacccccaccagggcgagcgagctgatggacatcaccaccaagttcgcctccggccaggaggcggttgaggccatcttccggaaggacaagcagccccagggccgccagccggaggatgtccccgaggcgtccactcagcgcggcaccaagaagaaaggcaagaagaagtcgcaagcgaaacgcgacgccaccgacgtggaccttgtcgccgctgctgagtacaagaaccctcggaaacctctcgggggcgtcaatctcttcgacaagatgctcaaggagccgtgcccctatcatcaggggcccgttaagcacacccttgaggagtgcgccatgcttcggcgccactttcacaaggccgggccacctgcggagggtggcagggctcacgacgatgataagaaggaagatcacaaggcaggagagttccccgaggtccacgactgctacatgatctactgtgggcgagtggcgaacgcctcggctcggcaaagcaagcaagagcgtcaggaggtctgctcggtaaaggtggcggtgccagtctacctagactggtccgacaagcccatcaccttcgaccaagacgaccaccccgaccgcgtgccgagcccggggaaatacccgctcgttgtcgaccccgtcatcggcaacgtcaggctcaccaaggtcctcatggatggaggcagcaacctcaacatcatcaacaccgagacccttgggctcctgcggatcgatctgtcctcggtccgggcaggcgctgcgccttttcacgggatcatccccgggaagcgcgtccaacccctcggacaactcgatctacccgtctccttcgggacatcctccaatttccgaagggagaccctcacgttcgaagtggtcgggtttcgaggaacctaccacgcagtgctggggaggccatgctacgccaagttcatggccgtccccaactacacctatctcaagctcaagatgccgggccccaacggggtcatcaccatcggccccacgtaccgacacgcgtacgaatgcgatgtggagtgcgtggagtacgccgaggcccttgccgaatccgaggccctcatcgccgacctggagagcctctctaaggaggcgccagacgtgaagcgccacgccggcaacttcgagccagcagagacggttaaatccgtccctctcgaccccagcaacgacgcctccaagcagatccggatcggccctgagctcgatcccaaatag

SEQ ID NO: 113144 - DNA, 531 bp, Zea mays
  Clone ID: MRT4577_34673C.1
atcgcagacactgggacttcttggatcgtatgcacattacctgaacatttagtgggcagatgaatataccatctgcagatgtgaaaagcctacgtgcagctgacttgaccgacaatgacacacaatcccgccccaaaagggaacgccgtggggttgtttgataattaggaatccacgatgcgaggaaccatatattgaagagatacgaggattttggtgagctggtgacatgcatattgcactttctctacgaacaatcttgattatctacatcgaccttccacatcacgatcatacttactacataagactctaataggctgctacagtgggatgataattttaacgctggaccatgcatcaaatgaataccgcatcccatgaccaacaatgggaatgcaagaataagggtggtgacctcactaaatccatggatcttaccaagtgcactttatgtaggctaccaatccagagctatggatatcgctaacttcttgggcatgtggattctacccgcttgacactgaaaaa

SEQ ID NO: 113145 - DNA, 2037 bp, Zea mays
  Clone ID: MRT4577_34674C.1
atgggtagaccaagctccggccggagaagcgcgtcatctaccccagggcatctagctctgcatcgccgacgacgtcagggcaaggccaccaccggcttccagtggggtcgaccagaacctggctgcagcagcgatacttctccacgcaatgccggaaccatcaaccaccgaagggcggcgaatccggggagagctcaagaatctcctggaggatgccgcggtctgacgggccgagagctctgcctcccgaaggcagggatacccctcggagcaccgtgccgcgacttcccgattcgtgcgggaagcctcggtccacaccgggcgcacgcgcaacacagtgcctgcagccccgggacgcctcggcaacgagcaccaccaccgcaaccatcgagcccgcctcgacgagagggtgcgccgaggctaccaccccagacgtgggggacgctacgacagcggggggatcggagcccctcgcccgaaccacccggcccgcaggctttcagccgagccatacgacgggcgccattcccgacccggttccaaaccccgactaccatcacaaagtactcgggggagacaaggccagaactgtggctcgtggactatcggctggcctgccaactgggtggaacggacgatgacaacctcgtcatctgcaacctccccctgttcctctcccactccgctcgggcctggctagagcatctgcctccggggcagatctccaactgggacgacctggtccaagccttcgccggtaatttccagggcacgtatgtgcgccctgggaactcctgggatctacgaagctgccgccagcagccgggagagtctctccgggactacatccggcgattctcaaagcagcgcaccgagctgcccaacgtcaccgactcggatgtcatcggcgcgttcctcgcaggcaccacctgccgcgacctgcgcggcaccaagaagaaaggcaagaagaattcacaagcgaaacgcgacgccgccgacgtggaccttgtcgccgccgctgagtacaagaaccctcggaaacctcccggaggcgccaatctattcgacaagatgctcaaggagtcgtgcccctatcatcagggacccgtcaagcacactcttgaggaatgcgccatgcttcggcatcactttcacagggtcgggccacctgcggagggtggcagggccccccacgacgacaagaaagaggatcaccaggcagaggagttccccgaggtccgcgactgcttcatgatctacggtgggccaatggcgaacgcctcggctcggcaccgcaagcaagagcgtcgggaggtctgctcggtaaaggtggtggcgccagtctacctagactggtccgacaagcccatcaccttcgaccagggcgatcaccccgaccgcgtgccgagcccggggaaatatccgctcgttgtcgaccccgtcatcggcaacgtcaggctcaccaaggtcctcatggacggaggcagcagcctcaacatcatctacaccgagaccctcgagctcctgcacatcgatctgtcctcggtccaggccggtgcggcgccttttcacgggatcatccccaggaaacgtgtccaacccctcggacgactcgatctgcccgtctgcttcgggactccctccaacttcagaaggggaaccctcacgttcgaagtggtcgggttccgaggaacctaccacgcggtactgaggaggccatactacgccaagttcatggtcgtccccaacaacacctacctcaagctcaagatgccaggccccaacggggtcatcaccgtcggccccacgtaccgacacgcgtacgaaagcgacgtagagtgcgtggagtacgccgaggccctcgccgaatccgaggccctcatcgccgacctggagagcctccccaaggaggcgccagacgtgaagcgccatgccggcaactttgagccagcggagacggttaagtctgtacctctcgaccccagcaacaatgcctccaagcagatccggatcggctccgagctcgaccccaaatag

SEQ ID NO: 113146 - DNA, 157 bp, Zea mays
  Clone ID: MRT4577_34675C.1
agctgttcagtcagcttctatagaattcgattgagtcaaaccattcaaaattaacataaacatataatcggttgagtagacgctatagtagtaatccgtcactttatagatcctaaaccccatggtcaactttatcttcccccgatacatacaatgg

SEQ ID NO: 113147 - DNA, 1989 bp, Zea mays
  Clone ID: MRT4577_34676C.1
cctcgaggccggccgggcccctctatttcccgccgctggccgtttcccttccccccaatccaaaccctagagagagagagagagagtgtgtagtgtgtgtgtgtgagagagagggggattggaggcgaaggcagcgggctagcgctagcggaggaggagagatccgctgaggtggaacgcccgatcggcggagccccatccaccaccactccacaagatgcggggcgggacgctgcagatcaactggcacgaccagcagccggtgctcagcctcgacttccaccccgtctcccgccgcctcgccacagccggagcggaccacgacgtcaagatctgggaggtagcgtcggacggcaagctccccaccgccaccttcaagaccggcctcgtccccaacaccaccgcccacagctccgcggtcaacgtcctccggttctccccttcaggggagtatctcgcctccggtgctgatggtggcggcatcaccctctggaaactgcatcccgctgacgacggcgaggcatggaaaattcacaagacgttactattccatcacaaggatgttcttgaccttcagtggtcgcatgacggcacatttcttgtttctgcatcagtcgacaacacttgcataatttgggaagctagtaaaggcacagtgcaacaaaagctagagggacatctgcattatgttcagggtgtggcatgggatcctttgggccagcctacgcctccacccacgcgtccgagaacctgtaaaatatatgcaaaaaagcctcagggcagatccaagaacgcggagaggttgaactttgtttgccagcatacactagtgaaggtagaataccagaatcatgatgaatctaagccaccaaccaaatctcatttgtttcatgatgagacactaccatctttcttccgaaggttggcatggtcacctgatggatcttttctagtattgccagcaggcctttctaaacactcctccgaggtgattaatacagcttatgtaatgtccaggcgtgacctctcaaggcctgcgatacaactccctggggcaagtaaagctatagtggtagtacgcttctgccctgtactattcaaaccacgtggttctaactcagatggtttcttcaagcttccttatagagttgtctttgctgtggctactttgaactttctgtatcatagacatacagagagtgttcctccaattctagtccatgctggtctacactatgctgccattaccgatattgcatggtcttctgatgctaagtacctggcagtgtcatcacgagatggctactgtactataatagagtttgagaatgaggaactgggacagcctcacatactccccggatcaaaggaagttgctaatgggaatctgacacctgagaccaagaagcctgtatgtgcagatagcatgaaggttgataatagtgccaacaagcttaagatggaagccagtcctgttgctgtaggagttagagcaccactgctgccaactgagaacatcaagagaacaggagagcttgccgaaggaaatgtaacctgtgaaaacaaggagccggtaacaatagacagtatggaagtagatgccgatgataccaaaggcaaggaggcaaccatacccgtggcagctgaagtgacaccgccaccagcggtaccggcagcgaagaacagcgcatctagtaagcctgctaagaggcgaattactcctatcgcaatcgactaggtagtagacgcagcagttagggttttgatgtgttatgtagtgatggcaagtactggatactatgtttaggctaccctgtaaagtcgtttgtgctgcggtgctcatcttctgctctagtcctcctgctcttgacacaattggggagaatgtgaacagaagggctgtgtgtatgtatgagcacactttgttatggcgcaacatgcaagccactaaccgacatcttaagatgtggagttcattacttaggagtg

SEQ ID NO: 113148 - DNA, 1503 bp, Zea mays
  Clone ID: MRT4577_34677C.1
atggggctcggtgtatgcggctcgctctgccaagtttgggtggttatgagattgatggttccggttatgattatggtgctggatgacctggtcaaagccttcaccggaaacttccagggcacgtacgtgcgccctgggaactcctgggatctccgaagctgccgccagcagccgggagaatccctccgggactacatccggcgattttcgaagcagcacaccgagttgcccaacatcaccgactcagatgtcatcgatgcgttcctcgccggcaccacttgctgcgacctggtgagcaagctgggttgcaagactcccaccagggcgagcgagctgatggacatcgtcaccaagttcgcctctggtctggaggcggtcgaggccatctttcgaaagaacaagcagcctcaggggcgccagccggaagacgtccccgaggcgtccgctcagcgcggcaccaagaagaagggcaagaagaagtcgcaagtgaaacgcgacgccgccgacgcagaccttgtcgccgccgccgagcacaggaaccctcggaagcctcctggaggcgccaacctgttcgacaagatgctcaaggagtcgtgcccctatcaccagggtcccgtcaagcacacccttgaggagtgcgtcatgcttcggcgctacttccacaaagccgggccaccggcggaaggtggcagagcccacaacaacgacaagaaggaggatcacaaggcggaggagttccccgaggtccacgactgcttcatgatctacggtggccatgtggcgaacgcctcggctcggcaccgcaagcaagagcgtcgggaggtctgctcgtccgacaagcccatcaccttcgaccaccccgaccgcgtgccgagcttgggaaagtacccgctcgttgtcgatcccgtcatcggcaacattaggcttaccaaggtcctcatggacggaggtagcagcctcaacatcatctacgccgagaccctcgggctcctgcagatcgatctatcctcgatccgggccggcgcggcgccctttcacgggatcatccccgggaaacgcgtccaacccctcagacaactcgatctgcacgtctgcttcgggactccctccaacttccgaaaggaaaccctcacgttcgaggtggtcgagttccgaggaacctaccacgcagtactggggagaccgtgctacgccaagttcatggccgtccccaactacacctacctcaagctcaagatgtcgggccccaacggggtcatcaccgtcggctccatgtaccgacacgcgtacgaatgcgacgtggagtgcgtggagtacgccgaggccctcgccgaatctgaggccctcatcgccgacctggagagcctctccaaagaggcgccagatgcgaagcgccacgccggcaacttcgagccagctgagacggttaagttcgtccctctcgaccccagcaacgacgcctccaggcaagtccggatcggctccgagctcgaccccaaatag

SEQ ID NO: 113149 - DNA, 444 bp, Zea mays
  Clone ID: MRT4577_34678C.1
taggaaaaaagtggtatatagatcttaatagaatgaaaagtttacatatgcttattacctcactaaacgaaaaaaaatgactaatgtctacactatactctacagttaacactagtgattcacttaaaacatatagtattagagaatgtaaattgtatattactcagacaccacaatcgtgtacatataggaagatggggaacctcgtatggtaagcccatcgtccgtgatatgtttacattctaacactccccctcagttggaacttggagcactgcgaacattcagactgttcctaaactcgatgaagaccgaagtcggaaggcccttggtgaatatgtcggcgtactgagatgttgtgggcacatgcagaacacggacctctccaagggcgacacggtcacgcacgaagtgtagatcaatctccacatgcttggtccgctg

SEQ ID NO: 113150 - DNA, 619 bp, Zea mays
  unsure (1)..(619): unsure at all n locations
  Clone ID: MRT4577_34679C.1
tgctaatgggaatctgacacctgagaccaagaagcctgtatgtgcagatagcatgaaggttgataatagtgccaacaagcttaagatggaagccagtcctgttgctgtaggagttagagcaccactgctgccaactgagaacatcacgagaaccggagagcttgctgaaggaaatgtgacctgtgaaaacaaggagccggtaacaatagacagtatggaagtagatgccgacgataccaaaggcaaggaggcaaccatacccgtggcagctgaagtgacaccgctaccagcggcaaagaacagcgcatctagtaagcctgctaagaggcgaattactcctatcgcaatcgactaggtagttacgtagtgatggcgagtactggatactatgtttaggctaccctgtaaagtcgtttgtgctgcggtgctcatcttctgctctagtcctcctgctcttgacacaattggggagaatatgaacagaagggctgtgtgtatgtatgagcacactttgttatggcgcaacatgcaagccactaaccgacatcttaagatcgaagtggagttcattactgnnnnnnnnnnnnnnnnnnnnnnnnnnnnnnnnnnnnnnnnnnnn

SEQ ID NO: 113151 - DNA, 1068 bp, Zea mays
  unsure (1)..(1068): unsure at all n locations
  Clone ID: MRT4577_3467C.1
ccggccgggactatccncggctcncattctgaaaaaaaaaatcgcagtagcctgtagaagacttacttgctagttgaatcccagacggactgcatggtagtggaggttgacaacgacggctgtaacataaaactatcaactttttttatgaagtgcaagctttaacttaattagtagtagaaagtttatcttagcagcttagagcaggttatatcacaccatcagtttttacctccactacttttttttttgtgtaacttgaagtgaactgcggatcttggtggattagttgttctaaatctcaatttcatggcaagtagtagtattacaatctcttgcaagtgttaccttatgattaagatgctggcaagtgtcacttgttaaagaaaaaacggtagcaggtatataaggcataggcattaaggataacggtgacacataggacttgatcatgttttgaatagcttatcatgacagcctacacttccttgaatcctagcatcccgccacctcctgtcacttgcaatgctttctcagtggcctcatcattttgttcacaccctattgcgctacccctgtttctgctgttacttacaatgttttctccatggcctcacatcattttattcacatcctgttctccttttttttttcaggaataaaaaaggggtggagctgagcttggtttgtcataatagtgttggaactgttgatgcgagccgttaggcatggatcgaaagtaatagctgtaatccggtcggtggaggcagtatttagatgcatcatcacacctggacagacgtggatgtaggctgcgtccttttgtgttcctgttttcgctaagtgtgttcttgtggttttagatgtgcagccgtgcagtgctgaacttactaatgaactggtaggtcagcctgaagtagttttgataaaagcagttgccaaagagtctgcagctcgcaggatcacctgctatatgtgcatgttcctgctatctttcggaaagatttgggttgtgcataatctgtccttacccttcttttaaaaaaaaattatgttcctactattctt

SEQ ID NO: 113152 - DNA, 5691 bp, Zea mays
  Clone ID: MRT4577_34680C.1
atgcctcgcccgaccccagggctcggactcaacctcgacctcggacgatggtctccgcctcgcccgaccccagggctcggactcaacctcgacctcggacgacggtctccgcctcgcccgaccctcgggcctggactcagcctcgacccaggaggagcctccgcctcgcccgacctcgggctcggaccaaccacgtcacagggggccatcattaccctactcctagctagctcaggctacggggaacaagaccggcgtcccatctggttcgccccgaggaggaggcggggcaggcatggccaagcaggaggcgacacctcgtcggctgtcgagcaagtcgacggcgccggcgccccaacgggggacacgtcgggcgttgacctcgcgtttgagatgaagacgagcgtcgtttccccgcgacacgccaaccccaagcagacggacgatgccagcacgctcgcgaaggacttgctgggcgttagcctcgtacctgagataacgatgcagtccgtccctgacgcgacttcgtcaccatccatcgatcgagaggaccgactgacggccgtcttgacctacgggcccccgggttccgaggaagatgacgagcccgactctagttgggatttctccgggctcgataaccccagtgccatgcgggacttcatgaccgcatgtgactactgtctgtccgaatgctccgatagtagccacagcctcggcgacgaggactgtggcccaagtcgcgaatgtttccatgtcgatctagggggtctcgacgaaggcaaccatcttggtatgccagaggacggtgatccccctaggcctgcgcctcgcgttgacatccttcgggagctagctgtggttccagtccctgcggggggtcaggacgcacagctcgagcaaatccgcgaggtacaggccaggctcgacgaggaagcaggacaacttgtgcagcttcggcaaaatatcgggcaggagtgggcaggccgagcgccggccggagaagcgcgtcatctggctcaggacgtcaggcaccgcatcgccgacgatgccagggcaaggctgcccctggcttccagtggggtcggccagaacctggctgcagcagcaatactactccgagcgatgccggaaccatccaccaccgaggggcggtgtatccagggagagctcaagaatctcctggaggatgccgcggtccgatgggccgaaagctctgcctcccgaaggcaagggtaccccccggagcatcgtgccgcgacttcccgattcatgcgggaagcctcggtccacaccgggcgcacgcgggacacagcgcctgcggccccgggtcgccttggcaacgagcaccaccgccacgaccgtcgagcccacctcgccgagaaggtgcaccgaggctaccaccctaggcgtgggggacgctacgacagcggggaggatcggagccctcgcccgaaccacccgggcacatatgtgcgccctgggaactcctgggatctccgaagttgccgccagcagccgggagaatccctccgggactacatccggcaattttcgaagcagcgcaccgagctgcccaacgtcaccgactcagatgttatcggcgcgttcctcgccggtaccacttgccgtgacctggtgagcaagctgggtcgcaagacccccaccagggcgagcgagctgatggacatcgccaccaagttcgcctctggtcaggaggtggtcgaggccattttccggaaggagaagcagcctcaggggcgccagccggaagatgtccccgaggtgtccgctcagcacgacaccaagaagaagggcaagaagaagtcgcaagcaaaacgcgacgccgccgacgcagaccttgtcaccaccgctgagcacaggaaccctcggaagcctcctggaggcgccaacctgttcgacaagatgctcaaggagtcgtgcccctatcatcagggtcccgtcaagcacacccttgaggagtgcatcatgcttcggcgctacttccacaaggtcgggccaccggtggaaggagagagtgcccccgacaacgacaagaaggagggcctgcttctccttcaccgagcagagcagttccccgaggtgcacgattgcttcatgatctacggtgggcaagtggcgaacgcctcggctcggcaccgcaagcaagagcgccgggaggtctgctcggtgaaggtggcggcgccagtctacctagactggtccgacaagcccatcaccttcgaccagggcgaccaccccgaccgcgtgccgagcccggggaagtacccgctcgttgtcgatcccgtcatcggcaacgtcaggcttaccaaggtcctcatggacggaggcagcagcctcaacatcatctacgccgagacccttgggctcctgcagatcgatctgtcctcgatccgggccggcgcgacaccctttcacgggatcatccccgggaaacacgtccaaccccttgggcaactcgatctgcccgtctgcttcgggactcccttcaacttccgaaaggaaaccctcacgtttgagttcatggtcgtccccaactacacctacctcaagctcaagatgccgggccccaacgaggtcatcaccgtcggctccacgtaccgacacgcgtacgaatgcgacgtggagtgcatggagtacgccgaggccctcgccgaatccgaggccctcatcgccgacctagagagcctctctaaggaggtgccagatgcgaagcgccacgccggcaacttcgagccagcagaggcggctaagtccgtccctctcgaccccagcaacgacacctccaagcaagaagcagtgctcgtcgactttctccacgcgaacgctgaggtttttgcgtggagtccttcggacatgcctggcataccgagggatgtcaccgagcactcgctggatatccgagctggagcccgacccgtgaagcagcctctacgtcgattcaacgaagaaaagcgcagagccataggcgaggagatccacaagctgatggctgcagggttcatcaaagaggtattccatcccgaatggctagccaaccctgtgcttgtgagaaagaaaggcgggaaatggtggatgtgtgtagactatactggtctaaacaaagcatgtccgaaggttccctaccctctgccttgcatcgatcaaatcgtggattccaccgctggatgcgaaaccctgtctttcctcgatgcctactcagggtatcaccaaatcaggatgaaagagtccgaccagctcgcgacttctttcatcacaccctttggcatgtactgctacgttactatgccattcggtttgaggaatgcgggtgcgacgtaccaaaggtgcatgaaccacgtgttcggagagcacattggtcgaacggtcgaggcttacatcgatgacatcgtagtaaagacgaggaaaacctccgacctcgaaacgacattcaagtgtctcaaggcgaaaggcgtaaaactcaatcctgagaagtgtgtcttcggagtcccccgaggcatgctcttagggttcatcgtctccgagcggggcatcaaggccaacccggagaaaatcgcggccatcaccaacatgggctccatcaaggacttgaaaggagtacagagggtcatgggatgccttgcggctctaagccgcttcatctcgcgcctcggcgaaagaggcctacctctgtaccgcctcttaaggaagaccgagcacttcgcttggacccccgaggccgaggaagccctcgggaacctaaaggcgctccttacaagcgcgcccatcttggtgccccccgctgccggagaagccctcttgatctacgtcgccgctaccactcaggtgtctcatctgttgactgtggtgtcatccttccccttgggggagatcatccagtgccgagaggcctcgggtaggattgcaaagtgggcggtggagatcatgggcgagacgatcttgttcgcccctcggaaggccatcaagtcccaagtcctggcagactttgtggctgaatgggtcgatacccagcttccagcagctccgatccaaccagaactctggaccatgtttttcgatgggtcgttgatgaaaacaggagcgggcacgggcctgctcttcatctcacccctcgggaagcacctccgctacgtgctgcgcctccatttcccggcgtccaacaacgtggccgagtacgaggctctggttaacgggttgcgcatcgccatcgagctaggggtccggtgcctcgacgctcgtggcgactcgcagcttttcatcgaccaagtcatgaagaactcccactaccgcgacccgaagatggaagcctactgtgatgaggttcggcgcctggaggacaagttctacgggctcgagcttaaccacatcgcccgacgatacaacgagactgcggacgagctagctaagatagcctcggggcggacaatggttcctccggacgtcttctcccgagacctacatcaaccctcagtcaagaccgacgacacgcccgagcccgagaaggcctcggctcagcccgaggcgccctcggctcagcccgaggcaccctcggcccccgagggtgaggcactgcgcgccgaggaagagcggaatggggtcacgcctgatcgaaactggcagaccccgtacctgcaatatctccaccggggagaactacccctcgacagagtcgaagctcggcgactggcgcggcgtgccaagtcgttcgtcttgctgggtgacggaaaggagctctaccaccgtagcccctcaggcatcctccagcgatgcatatccatcgctgagggtcaggaactattgcaggaaatacactcgggggcttgcggtcatcacgcagcgcctcgagcccttgttggaaacgccttccgacagggtttctactggccaaccgcggtggctgacgccactaggattgtacgcacctgccaagggtgtcaattctatgcaaagcagacccacatgcccgctcaggctttgcaaacaatacccatcacctggccgttcgctgtgtggggtctggacctcgtcggtcccttgcagaaggcacccgggggctacacgcacctgctggtcgccatcgacaaattctccaagtggatcgaggtcagacacctaaacagcatcaggtccgaacaggcggtggcattcttcaccaacatcatccatcgcttcggggtctcgaactccatcatcaccgacaacgacacccagttcactggcagaaagttcctggacttctgcgaggaccaccacatccgagtggattgggccgccgtagctcaccccatgacgaatgggcaggtagagcgtgccaacgacatgattctgcaaggactcaagccacagatctacaacgacctcaacaagtttggcaggcgatggacgaaagaactcccctcggtggtctggagtctaagaacgacgccgagccgagccacgggcttcacgccgttttttctagtctatagggccgaggctatcttgcctacagacttagaacacggatccccgaggatgagggcgtacgacgaccgaggcaaccagaccaaccgagaagactcactggaccagttggaagaggctcgggacatggccttactacactcggcaaggtatcagcagtccctgcgacgctaccacgcccgaggggttcggtcccgagacctctag

SEQ ID NO: 113153 - DNA, 706 bp, Zea mays
  Clone ID: MRT4577_34681C.1
aatgcttttcttgtttcgctcgcagaacattctgacggtcctaggggggagcagacaggtaatgcggggtatccttcctcagttcctcgcttgcaacgaaagacactactccagcagcgcataatcatgcagaactcctaccgaggatgacctctccaactctgaactcctaccgagctactactgctaacgacgtcctgctgctcttcatgttccaggtctacggaaaagcggcagagggagagctgttgggagaggttggggtcatgtccaacaagccacagccattcaccttccggaccacaagattgtctcagattctgaggatcgccaggtccaagctgatggacatcatgcgagagaacggagaggacggacagatcatcagaagcaactttcagcaggtaggtgcttaagagcacgatcatgcctaatgttctgtaagtttaggagcttcgaatactctacaaacagcttctcgatctgcttcaaacgcgcagagactccgcgcggagcaaagactgtacatcgcaatgcatcaagaaggtacggtccctgcatttgagcggaggatggatccctgagacccgtcggctgtcaaagcacgcacgcagcgtggtgaattatttgctcggctatactgacaatatgtattgggtgaaatcgacaaataagtttaagtaggggagaagaaggattttgctgt

SEQ ID NO: 113154 - DNA, 3138 bp, Zea mays
  Clone ID: MRT4577_34682C.1
atgtggcttgcggattaccggctggcgtgccagctaggagggacggacgacgacaacctcattattcataacctcccccttttcctctccaacgctgcccgggcctggctggagcatctgcctcctgcgcagatctccaactgggacaacctggtcaaggctttcgctggaaatttccaagcacaggaatcctcggaagcctctcggaggggccaatatgttcgacaagatgctcaaggagtcgtgcccctatcacagggtcccgtcaggaacactcttgaagagtgcgacatgctccgacgttacttcaataaggcgggaccctcagcagaaggtggcaaggaccaaggcaacaacaagaaggggggcgacaaggaagaggagttcccagaggtccacaaccgcttcatgatctacggcgggcaggtggcgaatgctttggctcggcaccgcaagcaggagcgtcgggaggtctgctcggtgaaggtagcagcgccggtctacctagactggtccgacaagcccatcaccttcgaccaaggcgaccaccccgactgcataccgagcccaggaagcaagcgtgtcctgccccttgggcaacttgatttgcctgtgtgcttcggaaccccctccaacttccgaaaggaaaccctcactttcgaggtggtcgggttccgagggacctatcacgcggtgttgggaagaccgtgctacgccaagttcatggtcgtccccatctacacgtatctcaagctcaagatgccaggccccaagggaaccatcaccgtcggatccacgtaccgccatgcttacgagtgcgacgtggaatgcgtggagtacgctgaggtcatcgccgagtccgaggccctcatcgccgacccggattgcctctccaaggaggcgcctgatgcgaagcgccacgccggcaactttgaactggccgaggcggttaagtctgtccctcttgaccccagcaacgacgccagcaagaaagaagcagtgctcgtcgactttctccacgcaaacgccgaaatttttgcgtggagtccctcggacatgcctggcataccgagggatgtcgccgagcactcgctggacatccgagccggtgcccgacccatgaagcagcacctgcgccgtttcgataaagaaaatctcagggccataggcgaggaggtccacaagctaatggttgcagggttcttcaaagaggtattccatccagaatggttagctaaccctatgcttgtaaagaaaaaaggtgcaacgtaccaaaggtgcatgaaccacgtgttcggagagcacattggtagaacgatcgaggcttacatcgatgacatcgttgtcaaaacgaggaaagcctctgacctcctctctgaccttgagataacattcaggtgtctaagagcgaagggcgtaaaactcaatcccgagaagtgtgtcttcggagtccctcgaggcatgctcctagggttcatcgtctccgaacgaggcatcaaggccaacccggagaaaatcgcagccatcaccaacatgggaactatcaaagatttaaaaagagtacaaagggtcatgggatgccttgcggctctgagccgcttcatcttgcgccttggcgagaaaggattgcccttgtaccgcctcttaaggaaggccgagcacttcacttggattcctgaggccaaagaagccctcggaaacttaaaggcactccttactaatgcgcccatcttggtgccccccgctgcgggagaagccctcttgatttacgtagccgcaaccactcaggtggtcagcgccgcagtcatagtcgagagacgagaagaagggcatgcactgctcatccagaggccggtctacttcgtcagcgaggtgctatccgagaccaagatccgctacccacaaatccagaagctactgtacgcagtaattctaacacggcgaaagttgcgacactacttcgagtctcatacggccataaaatctcaattcttggcagacttcctggctgaatgggtcgacacccaattgccaacagctccaatccaggccgaactttggaccatgtacttcgatgggtcacttatgaaaatcagagcaggtgctggcttgctcttcatctcaccccttgggaaacatgtgcgctacgtgatacgtctccattttccggcgtcaaacaacgtggccgagtacgaagccttggttaatgggttgtgcatcgccgccgagctaggggttcggtgccttgacgctcgtggcgactcgcagcttgttattgaccaagtcatgaagaactcccactgccgcgataaaaaaattgaggcctactgcgacgaagttcagcgcttggaagataagttctacaggctagaactcaaccatatcgctcgactatacaacgagactacggatgagctggctaaaatagcctcggggcggacgacggttcctccgaacgtcttctccagcgacatatatcaaccatctgtcaaactcgatgatgcgcccgaacccgaggggcccttggcccagcccgagaaggcacccgggggcttcacgcccatgctggtcgtcatcgacaaattctccaagtggatcgaagtccgacccttaaccagcatcgagtctgagcaggcagtggcgttcttcacaaatatcatccatcgctttggggtcccaaactccatcatcactgacaatggcacgcaattcactgggaaaaagttcctggacttttgcgaaggccaccacattcgtgtggactgggccgccgtggctcacccgatgacaaatgggcaggtggagcgcgccaatggcatgattttgcagggactaaaaccgaggatctacaacgacctcaacaagtttggcaagcggtggataaaagaactaccctcggtggtttggagtctgagaatgatgccaagccgagccacgggcttctcgccgtttttcctagtctatggggccgaggccatcttacccacggacttggaatactgttccccgaggacaaaggcatacaacgaccaaaatgtggcggaactgcccgaattattccaacttaagtgcctaagccctgccttagaggctagaccacacttaaatgggaataacccgtcaatccctcggatctag

SEQ ID NO: 113155 - DNA, 2685 bp, Zea mays
  Clone ID: MRT4577_34683C.1
atgccgttcggtttgaggaatgcgggtgcgacgtatcagcggtgcatgaaccatgtgttgggcgaacacatcggtcgcacggtcgaggcctacgtcgatgacatcgtagtcaagacgaggaaagcttccgacctcctctccgaccttgaagtgacattccgatgtctcaaagcgaaaggcgtcaagctcaatcgcgagaagtgtgtcttcggggtgccccggggcatgctcttggggttcatcgtctccgagcggggcatcgaagccaacccggagaagatcgcagccatcaccagcatggggcccatcaaagacttaaaaggcgtacagagggtcatgggatgtctcgcggccctgagccgcttcatctcacgcctcggcgaaagaggcctgcctctgtaccgcctcttaaggaaggccgagtgcttcgcttggacccctgaggccgaggaagctctcgggaacctgaagacgctcctcacaaaggcgcctatcttggtgcctccagctgacggagaagccctcttggtctacgtcgccgcgaccactcaggtggttagcgccgcgattgtggtcgagaggcaagaagaggggcatgcattgcccgttcagaggccagtttacttcgtcagcgaggtactgtccgagaccaagatccgctacccacaagttcagaagctgctgtatgcagtgatcctgacgaggcggaagttgcgacactacttcgagtctcatccggtaactgtggtgtcatccttccccctgggggagatcatccaatgccgagaggcctcaggcaggattgcaaagtgggcggtggaaatcatgggcgagacaatctcgttcgcccctcggaaggccatcaagtcccaggtattggcggacttcgtagccgaatgggtcgacacccagctaccgacggctccgatccaaccggagctctggaccatgtttttcgacgggtcgctgatgaagacgggagccggcgcgggcctactcttcatctcgcccctcgggaaacacctacgctatgtgctacgcctccatttcccggcgtccaacaatgtggctgagtacgaggctctggtcaacgggttgcggatcgccatcgagctaggggtcaggcgcctcgacgcccgcggtgactcgcagctcgtcatcgaccaagtcatgaagaactcccactgccgcgacccgaagatggaggcctactgcgatgaggttcggcacctggaagacaagttctatgggctcgagcttaaccacatcgctcggcgctacaacgagactgcggacgagctggcaaaaatagcctcggggcgaacaacggttcccccggacgtcttctctcgggatctgcatcaaccctccgtcaagatcgacgactcacccgagcctgaggcgccctcgatccagcccgaggtaccctcggcacagctcgaggcaccctcagctcggcccgaggcgccctcggttcagcccgaggtaccctcggcctccgagggcgaggcattgcacgtcgaggaggagcggagcggggccacgcctgatcggaattggcagaccccgtacctacaatatctccgccaaggagagctacccctcgaccgagccgaggctcggcgggtagcgcgacgcgccaagtcgttcgtcttgctgggcgatgagaaggagctctaccaccgcagcccctcgggcatcctccagcgatgcatctccatcgccgaaggtcaggaactcctgcaagagatacactcgggggcttgcggccatcacgcagcgcctcgagcccttgtcgggaattctttccggcaaggcttctactggccaacggcggtggctgacgccacaagaattgtccgcacctgcgaagggtgtcaattctatgcgaagcagacccacctgcccgctcaggctctgcagacgatacccatcacctggccctttgctgtgtggggtctggacctcgtcggccccttgcagaaggcgcccaggggctacacgcacctgctggtcgccatcgacaaattctccaaggggtcgagggtcccgaactccatcatcaccgacaacggatcaccacatccggtggactgggccgccgtggctcatcccatgtcgaatgggcaagtagagcgtgccaacggcatgattctacaagggctcaagcctcggatttacaacgacctcaacaagttcggcaagcgatggatgaaggaactcccctcggtggtctggagcctgaggacaacgccgagccgagccacgggtttcacgccattcttcctggtctacggggccgaggtcgtcttgcccactgacctggaatacggctccccgaggacgagggcctacagcgatcgaagcaaccaagctagccgagaagactcgctggaccagctggaagaggctcgggacaaggccttactacgctcggcgcggtaccagcagtccctgcgacgctaccacgcccgaggggtccggccccgagacctccaggtgggcgacctggtgcttcggctgcggcaagacgcccgagggaggcacaagctcatgcccccctgggaggggccattcgtcatcgccaaagttctgaagcccggaacgtacaagctggccaacagtcaaggcgaggtctacgacaacgcttggaacatccaacagctacgtcgcttctacccttaa

SEQ ID NO: 113156 - DNA, 936 bp, Zea mays
  Clone ID: MRT4577_34684C.1
atgccgttcggcttgaggaatgcgggcgtgacgtaccagcggtgcatgaaccatgtgttcggcgaacacattggccggacggtcggggcctacgtcgatgacatcgtagtcaagacgagaaaagcctccgacctcctttccgaccttgaagtgacattccgatgtctcaaggcgaaaggcgtgaagctcaatcccgaaaagtgtgtcttcggggtgccccgaggcatgctcttggggttcatcgtctccgagcggggcatcgaagccaacccggagaagatcgcagccatcaccagcatggggcccatcaaggacttgaaaggcatacagagagtcatgggatgtcttgcggccctgagccgtttcatctcgcacctcggcgaaagacgcctgcctctgtaccgcctcaaggcgaataacggttcccccggaagccttctcccgagacctgcatcaaccctccgtcaagatcgacgacacacccgagcccgaggcaccctcggcctagcccgaggtacccttggcttggtccgaggtacccacggttcggcccgaggtaccctcgacccccgaggaccccgtacctgcaatgtctccaccgaggagagctacccctcgaccgagccaaagctcggcggttggcgcggcgcgccaagtcgttcgtcttgctgggagatgggaaggagctccaccaccgcagcccctcaggcttcctccagtgatgcatttccatcgccaaaggccaggagcccctacgagaggtacgctcgggggcttgcgaccatcacgcagcaccccgagcccttgttagagacacccgggggctacacgcacccctgggaagggccgctcgtcatcgccaaagttctgaagcccggaacaaacaaattggccgacagtcaaggcgaggtctgcaccaacacttggaacgtctaa

SEQ ID NO: 113157 - DNA, 178 bp, Zea mays
  Clone ID: MRT4577_34685C.1
ctgcatcacatgcatcggtacgcggctacaagctttgtatcagttagatgttcgctcttgggtgcatcccaaccaggtctaccaagtggactcccaacatcacatacgagtaactatgctaaaaccatctgctctagatggacatgcccactatcctagccgacagcatggctatgaa

SEQ ID NO: 113158 - DNA, 3006 bp, Zea mays
  Clone ID: MRT4577_34686C.1
atgggtagtctccagcaacctttccagcctgggacggtgctccgtttcgggagtcttgagttcatgtccctcgacggcagctacgacatgatactccttcctccgtcgcgcgacagcgacaatggcggtcgacaacccgcccgccggcggcggaatcgacgacatcttccccatgtggcggaagaacaacattcgggcttgtcccgtcccctcccccaccgacggaggaggaggcagggcaaccaaggccaagcaggaggcggcacctcgtcggctgtcgagcgagtcgatgaagctggcgccccaacggggggcacgtcgggcatcgacctcgcgactgagacgaagacgagcgccgtctccccgcaacacgccaactccaagcaaacggacgacgccagcacactcgcaaagaacttgctgggcgtcaccctcatacctgagacgacggtgcagtctacccctgacgtgacttcgtcactgcccgtcgaccaagagcctcgacccaccaagcgacttcgcttcggtggacgctttcatagaggcgagtccaaaccctctggggtatctgccatgcgggacttcatgaccgcatgcaactactgcctttccgactgttccgacagtagccgcagcctcggcgacgaggactgcgacccaagtcgtgaatgtttccacgtcgatctagggggtcccggcgaaggcaaccatcttggtataccggaaaacggtgatccccctaggcctgcgcctcgcgttgacatccttcgggagctagctgtggtccctgtcccgacggggggtcatgacccacggctcgagcaaatccacgagatgcaggttaggctcgacgagggagcaggaacacttgagccgttccgccgggacatcgggcaggaatgggcgggccaacctccggctggagaagcgcgtcatctaccccagggcacccagcaccgcatcgccgatgatgccagggcaaggccaccaccggcctccagtggggtcggccagaacctggctgcagcggcaatacttctccgcgcgatgccggagccatctaccaccgaggggcggcgtatcgagagagagctcaagaatctcctggaggatgccgcggtccgacgggccgaaagctctgcctcccgaaggcaggggtacccctcggaacatcgcgccgcgacttcccgattcatgcgggaagcctcggtccacaccgggcgcacgcgcaacacagcgcctgcggccccgggtcgcctcaacaacgaacaccctcaccgcaaccgtcgaacccacctcgacgagagggtgcgccgaggctaccaccccaggcgtgggggacgctacgacagtggggaggatcggagtccctcgcctgaaccacccggtctgcaggctttcagccgggccatacgacgggcgccgttcccgacccggtttcgaaccccgactactatcacaaagtactcgggggagacgagaccggaactgtggctcgcggactaccggctggcctaccacctaggtggaacggacgatgacaacctcatcatccgcaacctccccctgttcctcttcgacaccgctcgagcctggctggagcacctgcctccggggcagatctccaactgggatgacctggtccaaaccttcaccggcaacttccagggcacgtaccgcaccgagctgccaaacgtcaccgactcggatgtcatcggcgcgttcctcaccggcaccacctgccgcgacctggtgagcaagctgggccgcaagacccccaccagggccagcgagctgatggacatcgccaccaagttcgcctctggccaggaggcggttgaggccatcttccggaaggataagcagccccagggccgcccaccggaagatgcccccgaggcgtcaactcagcacagcaccaagaagaaaggcaagaagaagtcgcaagcgaaacgcaacgccgccgacgcggaccttgtcgccgtcgccgagtacaagaaccctcggaaacctctcggaggtgccaatcttttcgacaagatgctcaaggagccgtgcccctatcatcaggggcccgtcaagcacacccttgaggagtgtgccatgcttcggcgccactttcacaaggtcgggccacgtgcggaaggtggcagggcccgcgacgacgataagaaggaggatcacaaggcaggagagttccccgaggtccacgactgcttcatgatctacggtgggcaagtggcgaacgcctcggctcggcaccgcaagcaagagcgtcgggaggtctgctcggtaaaggtggcagcgccagtctacctagactggtccgacaagcccatcaccttcgaccagggcgagcatcccgaccgcgtgccgagcccggggaaatacccgctcgttgtcgaccccgtcatcggcaatgtcaggctcaccaaggtcctcatggacggaggcaacagcctcaacatcatctacgccgagaccctcgggctcctgcggatcgatctgtcctcggtccgggcaggcgctgcgccttttcacgggatcatccccgcgaagcgcgtccagcccctcggacgactcgatctacccgtctgctttgggacaccctccaacttccgaagggaaaccctcacgttcgaggtggtcgagtttcgaggaacctaccacgcagtgctggggaggccatgttacgccaagttcatggccgtccccaactacacctacctcaagctcaagatgtcgggccccaacggggtcatcaccgtcggccccacgtaccgacacgcgtacgaatgcgacgtggagtgcgtggagtacgctgaggccctcgccgaatccgaggccctcatcgccgacctggagagcctctctaaggaggcgccagacgtgaagcgccacgccggcaacttcgagccagcggagacggttaagtccgtccctctcgaccccagcaacgacgcctccaagcagatccggatcggttccgagctcgaccccaaatag

SEQ ID NO: 113159 - DNA, 343 bp, Zea mays
  Clone ID: MRT4577_34687C.1
tttgggctgattttgtgcttgtggatgtgcgggtccggttttgttccttgctctccattgtatacgtgtgctggggtgtgcggatacagtcgtccggtggttatatttggaagtggaacgggtgctggttaagtgttggtgggtttgggtgcgtctttttcctcggctgctggtgggtctgcgggggtgccggtgggtaatcgggttgggggtaggaattagaagctggctttgggtactcctaagcctgggggatctggctcctgaaggtgggtaatccaatgctaaatggatggttaaaggggccaataatgggtggttcctttcatgggaggattccccc

SEQ ID NO: 113160 - DNA, 1825 bp, Zea mays
  Clone ID: MRT4577_34688C.1
gggaccctcgagtaccctcgggggcgggccgggagttctagagcccaccaaagaaaaaacaaataccggattagatattaaagcattttcctcgtcgacttaaaaaatagaacaaaaaggttcttccttttcgcagctccatcgtccaccaacctcctccgattcggccgtcgtagcgtatagccgaattgccccactccaggactctcgccagcttctccggccgactagaggctgtttccggcgagtgctcggctgatctcctccgcgcggctgaggagatcacgcggtctcgctcgggggggctggggcgtgcatgatgggactttggttgattccgacgatggagactccggcgaggcttctgtggagcaccagcttcttccgccacaaaatcgccgacatgcttgcatcctcctcctgcttcttatagatcccacccctcgacgtcgtcgccggcagctagctcgctagcttctgtacatacgtcgacgccatatctagtcctcctcatccagtcccgataagtgataactaataattaaggcaaagaatctccaagcttgcttcgacgaccttgcattgatccatggagtccggacggctcatcttcaacgcgcccggctccggcgccgggcagatgctcttcctggactgcggcgcaggcggtggtcccggcggcggcttgttccatcgaggcgggagaccgatgcttggccttgaagaagggcgcggcgtaaaacggcccttctacacctcgcccgacgagctcctcgaggaggagtactacgacgagcagctgccggagaagaagcgccgcctgacgccggagcaggtgcacctgctggagaggagcttcgaggaggagaacaagctggagccggagcgcaagacggagctggcgcgcaagctgggcctgcagccccggcaggtggccgtgtggttccagaaccggcgcgcccggtggaagaccaagcagctggagcgcgacttcgaccgcctcaaggcctccttcgacgccctccgcgcggaccacgacgcccttctccaggacaaccaccgcctccgctcacaggtggtgtcgttgaccgagaagctgcgagagaaggaggcgacggagtggcgacgccagtgtcgcgccgcggcggcgttgccggcggtgggcgttgtcagggcttctcgcgtgaccgatgacgtcgaggaaccggagccggagccggagccggaggcagaggcggcggcgttcgaggagcggcaggtgaagtccgaggacaggctgagcacgggcagcggcgggagcgcggtggtggacgcggcggacgcgctgttgtacaacggcaggatcggcggcgcggccgtcgatagcagcgtcgagtcgtacttccccggcgccgaggtccaggaccagtaccacggctgcgggacgatgggtccagtaacccacggcgctggaggcatccagtcggacgacgacgacggcgccggcagcgacgagggatgcagctactacgccgacgaagaagccgccgccgcgttcctctccgaacacacccaccacgcggacggcgacgacgaggacgccggccaggtcagctggtggtggatgtggaactagcagagcaatcttcccgcggggaccgaccgccaaatctcgtgccaaaaaaaaattactgtatgcattttcgcatgtgtaatagctgtgagtgaaagtgaaaccgatagcgcgttctgtccgaattttttgtttttttagctccttttgcgataaaaatttacgtttagaccccagaaattttatttgcgagtttagacctaaaaactcgag

SEQ ID NO: 113161 - DNA, 1743 bp, Zea mays
  Clone ID: MRT4577_34689C.1
atggacttgctgggcgtcacccttgtacctgagacgacggtgcagtctacccctgacgtgacttcgtcaccgcccgtcgaccaagaggtaccgaccgactcccatctcgtgcctttcggattcagcctcgacccaccaagcgacttcgcttcggtggacgctctcgtagaggtgagtccaaaccctccggggtatcgtatgcggtcaccctgggaccggctgacagccgtctcgacctacgggccctcgggctccgaggaagatgacgagcccgactttagttgggatttctccggacttggcaacaccagtgccatgcgggacttcatgaccgcatgcgactactgcctttccgactgttccgacggtagccgcagcctcggcgacgaggactgcggcccaagtcgtgaatgtttccacgtcgatctagggggtcccggcgaaggcaaccatcttggtataccggagaacggtgatccccctaggcctgtgcctcgcgttgacatccttcgggagctagctgtggtccccgtcccggcgggaggtcacgatccacagctcgagcaaatccacgagatgcaggccaggcttgacgagggagcaggaacacttgagccgttccaccgggacatcgggcaggaatgggcaggccaaccaccggccggggaagcacgtcatctaccccagggcctccagcaccgcgtcgcagacgatgttagggcaaggccgccaccgacttccagtggggtcggccagaacctggctgcagcggcaatacttctccgcgcgatgccagagccatcaaccaccgaggggcggtgtatccagggagagctcaagaatctcctggaggatgtcgcggtccgacgggccgaaagctctgcatcccgaaggcagggctacccctcggagcatcgcgccgcgacttcccgattcatgcgggaagcctcggtccatactgggcgcacgcgcaacacagcgcctgtggccccgggtcgcctcggcaacgaacaccctcaccgcaaccgtcgaacccacctcgacgagagggtgcgccgaggctaccaccccaggcgtgggggacgctacgacagcggggaggatcggagtccctcgcccgaaccacccggtccacaggctttcagccgggccatacgacgggcgtcgttcccgacccggttccgaaccccgactactatcacaaagtactcgggggagacaaggccagaactgtggctcgcggattaccggctggcctgccacctgggtggaacggacgatgacaacctcatcatccgcaacctccccctgttcctctctgataccgctcgagtctggctggagcacctgccttcggggcagatctccaactgggacgacctggtccaagccttcgccggcaacttccagggcacgtacgtgcgccctgggaactcctgggatctccgaagctgccaccagcagccgggagagtctctccgggactacatccggcgattctcgaagcagcgcaccgagctgcccaaagtcaccgactcggatgtcatcggcgcgttcctcgccggcgccacctgctgcgacctggtgagcaagctgtgtcgcaagacccccaccagggcgagcgagctgatggacatcgccaccaagttcgcctccggccaggaggcggttgaggccatcttacggaaggacaagcagccccagggccgccagccggaggatgtccccgaggcgtccatttag

SEQ ID NO: 113162 - DNA, 388 bp, Zea mays
  unsure (1)..(388): unsure at all n locations
  Clone ID: MRT4577_3468C.1
ccaccaccggtacaaggcacgcactcccagaaatcgcgacacgtcgaaccacgcacggtcgcacgcacgcagacgcaggcgaagacggcatgcgcgccctgatgccggagcagaggaagggtcggtcgcggctcgccgccgtccgggtggggcggtcgccggcggcggcgtcgccgtcccgccgccgccgcaagagcgggagcggctggacggcggcgcgcccggcgccgacgccgggcccgtcgcggtcgcggacgcggacgcggcgggaggggaagaggcgggcgctcgcgcgctccgcgtncgagccgctgctctggttcggcgacgcgcggntccacgacgtgccgncgcacgggcccgggctcgggctcggcctcgattgccc

SEQ ID NO: 113163 - DNA, 2871 bp, Zea mays
  Clone ID: MRT4577_34690C.1
atggggggcgcaccgggcatcgacctcgcgcttgagacgaagacgagcgccgtctccccgcaacaccccaatcccgagcaaacagacgacgccagcacgctcgcgaaaggcttgctgggtgtcaccctcgtacctaagacgacggtgcaatcagtccccgacgtgacttcatcaccgcccgtcgaccaagaggtaccgactgattcccatcccacgtctttcggattcagcctcgacccgcctagcggcttcgctttggcgggcgctctcgtagaggcgagtccaaaccctctggggtttcgtatgcggtcaccctgggaccggctgacggacgtctcgacctacgggccctctgggtccgaggaagacgacgagcccagtttctgttgggatttctctggactgggcaaccccagtgccatgcgggacttcatgaccgcatgtgactactgcctttccgactattccgatggtagccgtagcctcagcgacgaggactgtggcccaagccacgaatgtttccacgtcgatctagggggtccccccgaaggcaaccatctcggcatgccggaggacggtgacctccctagactggtgcctcgcgttgacatcccacgggagctagatgtggtccccgttcaggcggggggccatgacccacagctcgagcaaatccgcggggtgcaggccaggctcgacgagggagcaggagcgcttgagccgatccaccgggacgtcgggcaggcatgggcgggccagcctccggccggagaaatacgtcatctaccccagagcttccagcaccgcatcgccgatgatgtcagggccaggccaccacccgcatccagcggggtcggccagaacctggctgcagcagcaatgctcctccgcgcgatgccggagccgtcaaccaccgaggggcggcgaatccagggagagctcaagaatctcctggaaggcgccgcggtccgacgggccgagagctccgcctcccgaaggcaggggtacccctcagaacctcatgccgcgacttcccgattcatgcgggaagcctcggtctacaccgggcgcacgcgcaacacaacgcctgtggccccgggtcgcctcggcaacgaacaccatcaccgcgaccgtcgagcccatctcgacgagagggtgcaccgaggctaccaccccaggcgtgggggacactacgacagcggggaggatcggagtccctcgcccgaaccacccggtccgcaggccttcagccggcccatacgacgggcgccattcccgacccggttccgacccccgactactatcacgaagtactcaggggagacgagaccggaactgtggctcgcagactaccgcctggcctgccaactgggtggaacggacgatgacaacctcattatccgcaacctccccctgtttctctccgacaccgcccgcgcctggttggagcacctgcctccagggcagatctccaactgggacgacctagtccaagctttcaccggcaatttccagggcacgtacgtgcgccccaggaattcctgggacctccgaagctgccgacagcagccgggagagtctctctgggactacatccggcgattctcgaagcagcgcaccgagctgcccaacatcaccgactcggatgtcatcggcgcgttccttgctggcaccacctgccgcgacctggtgagcaagctgggtcgcaagacccccaccagggcgagcgagctgatggacatcgccaccaagctcgcctccggccaggaggcggtcgaggctatcttccgaaaggacaagcagccccagggccgcccatcggaagatgccttcgaggcgtcaactcagcgcggcgccaagaagaagggcaagaagaagtcgcaagcgaaacgcgacgccaccgacgcggaccttgtcgccgccgccgagtacaagaaccctcggaaaccccccagaggtgccaacctcttcgacaagatgctcaaggagccgtgcccctatcaccaggggcccgtcaagcacacccttgaggagtgcgtcatgcttcggcgccacttccacaggaccgggccacccgcggagggtggcagggcccgcgacgacgacaagaaggaagatcaccaggcaggagagttccccgaggtccgcgactgcttcatgatctatggtgggcaagcggcgaatgcctcggctcggcaccgtaagcaagagtgctgggaggtctgctcggtgaaggtggcggcgccagtctatctagactggtccgacaagcccatcaccttcgaccgagccgaccaccctgaccatgtgccgagcccggggaaatacccgctcgtcgtcgaccccgtcatcggcgacgtcaggctcaccaaggtcctcatggacggaggcagcagcctcaacatcatctacgccgagaccctcgggctcctgtgggttgatctgtcctccgtccgggcaggcgctgcgcccttccatgggatcattccctggaagcgcgtccagcccctcggacaactcgaccttcccgtctgcttcggaacaccctccaacttccgaagggagaccctgacgttcgaggtggtcgggttccgaggaacctaccacgcggtgctgggaagaccatgctatgcgaagttcatggccatccccaactacacctacctgaagctcaagatgccgggccccaatggggtcatcaccgtcggccccacgtacaaacacgcgttcgaatgcgacgtggagtgcgtggagtacgccgaggccctcgctgagtccgaggccctcatcgccgacctggagagcctctctaaggaggtgccagacgtgaagcgtcaagccgacaactttgagccagcggagacggtttag

SEQ ID NO: 113164 - DNA, 2179 bp, Zea mays
  Clone ID: MRT4577_34691C.1
cattgggtacctcgaggccggccgggattctgttcgccgtgcagcgcttcggcacccacaaggtgggctacctgttcgcctccgtcgtcctcctgtggctgctcctcatcggcggcgtgggcgtgtacaacctgctcaggcacgacgtcaccgtcctccgcgccttcaaccccaagtacatcctggactacttccggcgcaacggcagggacgcctgggtctccctcggcggcgtcctcctctgcttcaccggcaccgaggcgctgttcgctgacctcggctacttcagcatccgctccatccagctcagcttcggcttcggcctcgtccccgccgtgctgctcgcctacatcggccaggccgccttcctccgccggtacccggagcaggtgtccaacgccttctaccagtccacgcccgagtccatcttctggcccaccttcgtgctggcgctggcggcgtcggtcatcggcagccaggccatgatctcctgcgccttcgccaccatctcccactcgcaggcgctgggctgcttcccgagggtcaaggtgctccacacgtcgcgccagtaccggggccagctctacatcccggaggtgaacttgctgctcgccctcgtcgcctgcgtcgtcacgctcgcgtccaagaccacggccgtcatcgccgaggcgcacggcatctgcgtcgtcctcgtcatgctcatcaccacgctgctgctcaccctggtcatgctcctggtgtggcgcgtcaacgccgcctgcgtcgcgctcttcttcgccgtcttcgccgccgccgagtccgtctacctctcctccgtgctctaccggttcgcgcacggcgggtacatccccgtcgccatgtccgcggtgctggtggccgtcatggtgctgtggcactacgtgcacgtgaagcggtacaagtacgagctggagcgcacggtgtcgcaccgacaagcgtggtgcgggacctgctgccgcgctgccgcaccgtccccggcgtcggcctcttctacacggacctggtgcagggcatcccgcccgtgttcccgcacctggtggacaagatcccgtccatccacgccgtcctgctcttcgtctccgtcaagcacctgccggtgccgcacgtggacgcaacggagcgcttcctcttcaggcaggtggcatcgtcgtcggagtcggacacagctgcaggcccacgggtgttccggtgcgtggcgcgctacggctaccgggacctgctggaggaggccagtgacttcgcgggcagcctggtggagcgcctccagtactacatccgcgacgtcaacctctacggcgtggagcaccagcagccgggcgccaaggtgagctacccgagctcgcgctgcgacagcatgatattgatggcgcggcagaggtcgtcggtcatgatgctgcggcagtcgtcggcggcatcctactactcgtcgtacgcagcggcagcggagacccagcagctgcagctggcgagggccaggtccacgtcgggggcggggggcatcctcctccactcggcgtcggagagggccgagcagctggcccgcgccaggtccacgggcatcttcgcggaggagatgctgacgccggcggagtcgttctcggagctgtcgaggatggggagcatcggcggcggaggaatgcaggcggtgaagatcagcctggaggagatggcgcggatcgaggaggagcagcggtttatcgagcgggagatggaaaaagggggtggtgtacatcctcggggagagcgaggtggtggcgcggccccactcgtcgctgctcaagaagctgctcgtcaactacgcctacgccttcctgcgcaacaactgccggcagggggagaagatgctcgccatccccaagtcgcagctgctcaaggtcggcatgtcctacgagatctgatctgatctgatctgattctgatggcgcgcgcgtcaccgatcgatctcccagctccatcatgccgtcgtcctcctttcgtctgcttattagcacatatatatatgacccagactccatatagtatagtacactactagtcttcagacagatttgatttcgtatgctttctctgcagtgatgctactagctacctagctagctagtacaattaattgtggcacacttgttagctggcgcagtagcataattattaagtaatttgc

SEQ ID NO: 113165 - DNA, 371 bp, Zea mays
  Clone ID: MRT4577_34692C.1
tttattttttttatgaacttaataacaaattgattaatgaattcatcctcatgtgcattacacatactgtcggccccggccacggtccaacactcccaattatttacatccagtatatcgtgcattatgtacaaacacgtgatctatgtcattatatgattctgcaggtggcgtgatctatgttattacgttggagatcatgtcaacctacttacaaggctgtcgatttgctataacatgagctagctattttttcataagatctacgtagttgaattcagcagcttgtgcatgatccgagagttgaatcacggtgcggttggatcataaactcgttgttaaagccatcgaacgatattttggcccttgtg

SEQ ID NO: 113166 - DNA, 644 bp, Zea mays
  Clone ID: MRT4577_34693C.1
ccggccgggaacccttcacttcgatcggtcttaggcgtttaggacaggatctagaggtatctagccatgggggaggaagcgtcatgctgcctgcggaaggggacggatagcgccttcgcgttaatatgacaatggtggaaggctgctacaactagtgaccacagcttctacgcgctgctgtgcgctgtgcaccacttcttcccgtcgtgacactcttatcactaccgactgctccttgtcaccgaccagcccaccgccgcctccatcgtccgcctcgctcctgccaacgacagtatatgtggtgcctatacagtggaggtggatcttgagcgctccgccctgtgcgtcgtcaaacaaatcaaatgtcatctgacactacaccgagagcgacgctgtgattgatgcgctgttggggaacactaggaacgtgcctctgtcatgctgtacatagggacggccgctatatgctcgtttctacctagccatggtctacatatcatgtatgaggcctgaatatcggaaggtgattcattactgtgcccatcacgcgcactgcaccgcgatgattccaaataatgccccctttacaagcactgatctatgccgactgatcactacgggtactgcatgtaatctgtactact

SEQ ID NO: 113167 - DNA, 264 bp, Zea mays
  Clone ID: MRT4577_34694C.1
cttctattttcttaaaaactacatactatcgggtgggactacttactatatgttgctatcaccactccaaatatctatcactggcacattctgttcttccacaacttatcgattatttcattcactccaatttcacttcaaggatgtatgctatgattattctttaacatataggaaaatctctaacctgtttcaactttcattactccactgtataaaaacacatgcatttcaaactctttaatcattcgtgtaaagcctcta

SEQ ID NO: 113168 - DNA, 652 bp, Zea mays
  Clone ID: MRT4577_34695C.1
ccggggccaaaaagggaaaatttttggggggctacaagctaaaaactacgggaggagtagaaccgggggaaattaacagggaaaatatggggctttttttaacaaacccgcgcgaaaactttaacgggagttactttatcggaaaaaaattcaggatttgaaagggtttattggccactagaccccaggcaaccttgaaaaggcggggccaattaaaaaggggaatatgcagttaattaccaggggaaaaaaaaaggttaaaaacccttaaaaaccagggaggcggccggcattagcaaaaaaaatgggggctttaatggctggggcaggaaaccaaattttccttttggcaaaaaaaaaaattccaaattatttggccatagggaaggcaaaaaaatccaaaagagggcggctaaaaagggggggggggggtttcaaaagccggggctagaatattaacttttatgggatcctaaaaaccaactatcaacgggggctggccagaattcatgcccagggatttcggaaattaatttttaacggcccccacctcctggggcaggaaacggaacatggtttaaacaaaaacaggctccagggacaggaggggccccaaaccaaggttccaatccccatacttaggctttacctt

SEQ ID NO: 113169 - DNA, 221 bp, Zea mays
  Clone ID: MRT4577_34696C.1
ggcacgcttctgctaactcaccggttcgggtttgattttttgaggaacttcgatgggcacgtacatggtaaagctctaactagatggcgtcgtaggatgttgcgtaccgatacttcattatcggactctgctgggccacggtcgaacactgattttacaacgcctacagcacataccgtgaggtactagagttcaaaatcatactctatcgtgtgacgcac

SEQ ID NO: 113170 - DNA, 300 bp, Zea mays
  unsure (1)..(300): unsure at all n locations
  Clone ID: MRT4577_34697C.1
gccgaccacgcgtccgagtggctattatcccttccatgtgnctttctcacaagatcgccggcttttccagccatgtcatgaagcggatccagaagggtcccgttcgtggcatctctttgaagctccaagaagaagagcgtgagcgtcgcatggatttcgttcccgacgaatccgccatcaaggttgatcaaatcgaagtcgataaggaaactctcgatatgctttctgttctcgggatggctgatattcccggccttgttaaggtcgatccggttgctgttgctgttcctcatatctggt

SEQ ID NO: 113171 - DNA, 1073 bp, Zea mays
  unsure (1)..(1073): unsure at all n locations
  Clone ID: MRT4577_34698C.1
attgggtacctcgaggccggccgnngannannnnnnnnannaaaaaaaaaaaaaaaaaaaaaaaaaccgaggccacaagcagcgccgcgagccacagctagcaccaccaccttgcaccgcacccgcaccgagacgaacagatctatcgatcgatagctagatccatggctgccggcggcgacgacaccaccatcgcgcaggtccacagcggcatcgacagcagcaacaagacgctgctcaagagcgaggccctctacaagtacgtgctggacacgtcggtgctgccgcacgagccggagagcatgcgtgagctgcggctggtgaccgacaagcacgagtgggggttcatgcagtcgtccccggacgaggcgtcgctgctgcggatgctgatcaagctgagcggcgcgcggcggacgctggaggtgggcgtgttcacgggctactcgctgctgcggacggcgctggcgctgcccgccgacggcaaggtcatcgcattcgacgtgagccgcgagtactacgacatcggccgccccttcatcgagcgcgccggggtggcgggcaaggtcgactttccgggagggccccggcgctgggccagctggacgagctcctcgccgacccggccaaccacggcgcctttcgacttcgcgttcgtcgacgccgacaagcccaactacgtcaattaccacgagcagctgctccgcctggtgcgcgtcggcggcaccatcgtgtacgacaacacgctttggtgcgggaccgtggccatgccgccggagacgcccatgtcggacatcgacaggaggttctcggccgccatcagggacctcaacgttcgcctctccgcggacgagcgcgttgaggtctgccagctcgccatcgccgacggggtcaccatctgccgccgcctcgtctgatgcagccagtgcgtgcccagggcatgcatgcatggctcgcgtgtggatattccgtcgaccagttctccacccgatccgtttgttgttgcatgatgctttcaataaagatctgttttcctttcaaaaaaaaaaaaaaaaaaaaaaaacaaaacaaaaacc

SEQ ID NO: 113172 - DNA, 631 bp, Zea mays
  Clone ID: MRT4577_34699C.1
ttgggtacctcgaggccggccgggggaacataccctcctctccccgcggggacatgatactccggcaaaaccctcgacctagacggtgcagcgccgccggcccgccgccgcggtctctgcctctgcctcgtcatggcgcggacgatgctgccgtctccttcgcctcacaccgccgtcaagagagaaatcgaggacgcagagcccaccgctcacacgccggcgtcactgcctcgcaagaagcgccgccgtggaggccgcctcccagtgactcccacccagcttcccctaagccctcccctcgtcacgccccagaccatcccatcggtggcatcaggggacgcgtccttcgccggcctaacgccgacgcccgtgttctctgccgtcaaggacgagtccggcgcggacaccggggtggggagcaacgggagggcgtccgggaaacggaatgactcgcaggacctccgctccgtcccgaggcccgcggcagcggagcctcccactctctggctcaaccgccggcgtctgggcctcatcctccacgagctcgcgggagcgcaccggtggcgcgacgcgggcagcgtcgtctcgacgctccttagcgggaaccgaaagcccgactcctacgaggaga

SEQ ID NO: 113173 - DNA, 268 bp, Zea mays
  Clone ID: MRT4577_3469C.1
attacctgaataaaaactcgggattagggaccggatcctgcaattctcatgtgacatattctaatgcgactcaggattaaatttatgccctacacctaatattactcatttttttattgaaccatctttacaaccctacttcttcgaaatttactcatctgctattgaaccttataacaaccctactacagcccccacacatactgcatttgtctttcctttttgttcctcggcaaaatgctaaccttcgtcccgggagattattttt

SEQ ID NO: 113174 - DNA, 193 bp, Zea mays
  Clone ID: MRT4577_346C.1
aaaaccctccctccctcctccattggactgctttttccctgttgaccattgggggggctgaaccatcgagccatggctgccaagctgaggggcctccacagtcttcgcgaacgccttggtgccaccttatcctcccatcctacagaactgatagcactctttccaggcatgatgaccagggcaagctgacccc

SEQ ID NO: 113175 - DNA, 1287 bp, Zea mays
  Clone ID: MRT4577_34700C.1
aaggctagtatgatggaagcctcggggggggccgggccggggataggcaacttcgccgtcgccggctcttctgcttctacgtactctactcccctccccgtctctctccggcctccgaccggctcataaatagacggtgtcaccgcttccaggccggacgaaggaccttagcagagctcaagtacctgcgccggccagctatagacaagaggcggcttggagaggcaggcaccatcatccatggcgccctccggtgacaccattgccctcgtccacagcggcatggacagcagcaacaagacgctgctcaagagcgaggccctctacaagtatgtcctcgacacgtcggtgctgccgcacgagccagagtgcatgcgtgagctgcgcctcgtgaccgacaagcacgagtgggggttcatgcagtcgtcgcccgacgaggcgcagctgctgcggatgctcatcaagctcaccggcgcgcgccgcaccctggaggtgggcgtgtacacgggctactcgctgctggccacggcgctggcgctccccgacgacggcaaggtcatcgccttcgacgtgaaccgcgactactacgacatcggccgccccttcatcgagcgcgccggcgtggcgggcaaggtcgacttccgcgagggccccgcgctgggcaacctggacgagctcctcgccgacgaggccaacctcggcgccttcgacttcgccttcgtcgacgccgacaagcccaactacgtcaattaccacgagcagctgctccgcctggtgcgcgtcggcggcaccatcgtgtacgacaacacgctctggtgcgggaccgtggccatgccgccggagacgcccatgtcggacatcgacaggaggttctcggccgccatcagggacctcaacgttcgcctctccgcggacgagcgcgttgaggtctgccagctcgccatcgccgacggcgtcaccatctgccgccgcctcgtctgatggagtcagtgcgtgcccagggcatgcatgcatggctcgcgtgtggatattccgtcgaccagttctccatccgatccgtttgttgttgcatgatgctttcaataaagatctgttttcctttccttcgttctgttttcttttttcacttttggagttgggagcgtcaggtcgacagatgctgtgctcatttatgttacctggtttggaacaactacaccacattaaggccttatttggttattcacaatacacatgattggatgaaattagaaaaaattaagaagaattttaacttgtttgggattc

SEQ ID NO: 113176 - DNA, 1506 bp, Zea mays
  unsure (1)..(1506): unsure at all n locations
  Clone ID: MRT4577_34701C.1
gacgttaagtaccgttgcttcgttggcggcctcatctgggccccccggcgtggcgggcagcggcagctggcgattgggtccctcgaggccggccggggaacgaagccacaagcagcgccgcgagccacagctagcaccaccaccttgcaccgcacccgcaccgagacgaacagatctatcgatcgatagctagatccatggctgccggcggcgacgacaccaccatcgcgcaggtccacagcggcatcgacagcagcaacaagacgctgctcaagagcgaggccctctacaagtacgtgctggacacgtcggtgctgccgcacgagccggagagcatgcgtgagctgcggctggtgaccgacaagcacgagtgggggttcatgcagtcgtccccggacgaggcgtcgctgctgcggatgctgatcaagctgagcggcgcgcgccgcaccctggaggtgggcgtgttcacgggctactcgctgctggcgacggcgctggcgctgcccgccgacggcaaggtcatcgcattcgacgtgagccgcgagtactacgacatcggcaggcccttcatcgagcgcgccggggtggcgggcaaggtggacttccgggagggcccggcgctggagcagctggacgagctcctcgccgacccggccaaccacggcgccttcgacttcgcgttcgtcgacgccgacaagcctaactacgtccggtaccacgagcagctgctccgcctggtgcgcgtcgggggtaccgtcgtgtatgacaacacgctgtgggcgggtactgtggcgcttccccccgacgcgccgctcagcgacctcgaccgcaggttctccgccgccatcagggaactcaacgtccggctttctcaggatccccgcgtcgaggtctgccagctcgccatcgccgacggcgtcaccatctgccgccgcgtcgtctgatgtgatgatgatccgacgaccaagatcgtatatcattcgctcgtcgtctctgtcatctttcaactgcctgcccgctgccgtcgtcaactaataatgcatggttctgctggttctttttttttattttcttttgtgcttgcattgtgtgtgttgagttgaacatcccccgcgatgtactgcaacaactggaatgcaatgcaacatcatgcgtgcagctataactaaaaaaaaaaaaaaaaagcaannnnnnnnnngtgcaaaaaaaaaaaaaaaaaaaatagtcagtgcgtgcccagggcatgcatgcatggctcgcgtgtggatattcagtcgaccagttctccatccgatccgtttgttgttgaatgatgctttcaataaagatctgttttcctttccttcgttctgttttcttttttcacttttggagttgggagcgtcaggtcgacagatgctgtgctcatttatgttacctggtttggaacaggtaccccacattaaggccttatttggttattcacaatacacatgattggatcaaactagaaatgattaagaagaa

SEQ ID NO: 113177 - DNA, 1501 bp, Zea mays
  unsure (1)..(1501): unsure at all n locations
  Clone ID: MRT4577_34702C.1
ccaaaaaaaaaaaaaaaaaaaaaaaaaaaaaaaaaaaatcccatggtccgcgtgctgctggtctcccgtgagcagtgaacgcagacgaatgcctgatgacaaggatgcaggagatgtccctggactaccacttcgcagtggagcaggaagtcggctcctccacctacgccttcttcggcttcaacggaaccgctggcgtgtggcgcatatccgctttgaacgaggccggagggtggaaggacaggaccacggtggaggacatggatctggcagtccgagcaagcctcaaaggggtggaggtttctatacctcggtgacctcatggtgaaaagcgagctcccgagcacgctcaaagcgtacaggtaccagcagcacaggtggtcgtgtgggccggcaaacttgttcaggaaaacgctggtggagatcgtcagaaacaagaaggtgacgctctggaagaaaatccacgtcatctacaacttcttcctcgtgcgcaagatcgtagcgcacgccgtgnacgttcgtgttttactgcantcgtgatccccacgacggtcctggttcctgaggttcaagtgccaaagtgggggttccgtctatatcccaaccccgggaacccttctcagtgctgttgccactccaaggtcagctcacttagttgtcttctggaccctcttcgagaatgtgatgtcgctgcatagaaccaaggccactttcatcggcctactggaggcaggcagggtgaacgagtgggtggtgacagaaaaactcggtgatgctctcaggaccaaagtgccaggcaagaaaccccgcatgaggataggagacaggttgcacgttctggagctcggtgtcgcagcttacctcctcttctgtggatgctatgacattgcgttcgggaacaaccgctactacatattcttgttcctccaatccatcgctttcttcatcgtcggcattggctatgtcggaacattcgtccctcactagctagctcgtagcagaatcattctgagaggctacccatcctgatgatgcatggttgtcttcaaccccttccggtttcatttcatggaaatcagttggtagataagatcgagcaaaccttctcttgtatgtaatgttgtcatgggaaaaaaaagaaaatacagtgtaaaggcacactggcagacaagccatagatatgagtaggtatgtgtgttgttgaaggaatgtgctgtgatgcgcatggggggattggtgatgacaagcaggccgttttgagtctccatgtcacctatgcagaatcagctgtagaaaaaaaggtagcaaattgtggaagtcgaaccaattgttttgcaaacataaaaaaaaaagatgaatgtttgttggcgagttcgttgtgagaacattgtaaagttgtacatgttttgttgtctcctcttacccttctttatttgtttcccatgtttatatcaactataataaacagattgtattgaaaaaaaaaaaaaaaaaagcggcc

SEQ ID NO: 113178 - DNA, 657 bp, Zea mays
  Clone ID: MRT4577_34703C.1
gattagcccaccatccggccgcagccggccaaggttctccaaatcctccacacccgctcaaggttcccctgttctctttttaatcccctctccaatctcactggcaaacagaacgcacacaccctagtgggtccattccagcccactcaaccttgagttgggcctctttcacgtcttggcctgctcctcactgttggttcattagatgtcatgacattctcccctccttcagtgacggcttgtccccaagccgcgacttccgggaatctggcgatgatcgcagcttcgtcttcccatgttgcaagttcttcaggccagtcagtccattgtatcagcagttggggtaccactcctgtgtgtgtttgcatctggcgacgctgcaaaatcctcacaggtttctgtaatgaatctggtaaaggtggtagagtggagcttacttgcatattggaccccaaagcctttttcagaagtgaaacatggaataccgggtgtatagatgaagaaggtgggagacccaatttataagcgactgacccgattttggcaattactggatatggaccaaaaaacttgaatgccaatttgtgatttgcccgcttgaccaaagacgattggacgtaaggttgtagtttcaaatataccatatcacccaccatg

SEQ ID NO: 113179 - DNA, 398 bp, Zea mays
  Clone ID: MRT4577_34704C.1
ggaggaccatatcccacacacgcatatgatcggtgcgctgtgtgtgtcgtctccaccccccggccccttcttctcctcttcctcctcccgctgtccgctcttgcataagccaactcgaaccagcgaaggctagctagcgcttccgccaagcctgcaggccacgccggccggaaccgagtgctctgattgattggtcaatcagtcatcagtccgcaatcgtatagctcatcagctgagcgaagacactgctgctagctgcagggcgggcgagagctcatctccaccggccggccgtcggcggctcagcgctttgcaggggcggcgcgcgcgctccggccgacggcgaagcgaagcgaattaagcggccgagaggcgggttgttgttgtcccatcgttag

SEQ ID NO: 113180 - DNA, 554 bp, Zea mays
  Clone ID: MRT4577_34705C.1
acccggtccccgtttaatatgggttgtttttatcgggcttttttttttaaagggaacccaaaaaaaaagagggggttccaccgggggccaaaaaaaaccaaaagggggggggggcccttcccccccaggaccgctatcaaattccacccagcccgccccttccccagacccccaaaaattacccaaaacttaaaaatgggcccaaaaaagaaacccccaggaccctgggaaggttggccccccccaacagaaaaaaaaccccggacgaggaaaaagcaaaagccccccctggaaacaaacttccctaaacgggaaacggaaagcattttggcctgggttggcttcgggaccacccttaggggggcttccccccctcccaaaaagggggcaagggggcaaagggttatggttaaaactccccccaaaaacccccgaaccccaaaaagcaccgggggcggcctcaccccaaagaaaaccacctccacccgaaaaagggaggccccctggtttgggggggggggcggcgggcccaaaatggaaggccccggggaaaa

SEQ ID NO: 113181 - DNA, 504 bp, Zea mays
  Clone ID: MRT4577_34706C.1
gcgcccaaacacgcccttccaccctgacatacttcacctgctacccaatactgactgagggcccaacaacagagactttacatcttaccaggcaatcacctccaccatttacaccatacaatgtttaagctaatcgtgcctgactttcaatatccatgatccagtctttcgggtcacattccactgtaggctaccttttttttccatggcgcgctgcttgacttatttagactttgtacatattactccacttggcggaccgactagtcttttcaccttcctatttccttaccttatttcatagcctggagtttacacggcatggtgagtacatacatacatataccggaacatgttccttttcacatggcggcatcgctagattagactgtgcggggaacgatccaatagggaggcaactgatcatactttagtatgcatgcagatgcgggacatagatcaatgaaggacttattccacaaaaaaaaaaaaaaaaaagcggcc

SEQ ID NO: 113182 - DNA, 298 bp, Zea mays
  Clone ID: MRT4577_34707C.1
attttgtctcattctcgctgactttatctcgttattttgctcgatctgatatctccacatttttttggtatctccgggttctgatttgggaagttagctatggcgccgagttcacccccgatgcggagtgtgggtacaccgtcattttacagatgacaaggtaggtgcctgctaacgaggtaccgatcatgaagggtagcttcatggcaggctagctcggcaaacttgttctaactgttaacaaccctgcatccaagatgaagacgctcctttacagatcgaaggggaagagcaccag

SEQ ID NO: 113183 - DNA, 312 bp, Zea mays
  Clone ID: MRT4577_34708C.1
gccgtgaactgtgcatagtgctgggatggatgggagtgttgggcatgtgatcacgcctggctaataatgctttagtgtatttatgtatttattctttgtatttgttgttcattcatcccattaatcatttccccataactcaatggcttgaaactggcctgacttgggggaacgatgtgactgtatttcatgtggctgtagatcccaagatgactggggtgggaggtcttgctagaatgggaagggtcatagagagggccttgacatcagttcctttgtgtgtactcactgaagcctgcgttggtccagagc

SEQ ID NO: 113184 - DNA, 170 bp, Zea mays
  Clone ID: MRT4577_34709C.1
cccacacgtacgtggacgcgtgggcagacgcgaaaaaatacctgggccagcagacacgggcacatccgccaactctacaccctcttctgtcatggagcaataattttttattttgctggcgcccctcaccagggaagcgtccttcttttaaacaaattatatattttttt

SEQ ID NO: 113185 - DNA, 247 bp, Zea mays
  unsure (1)..(247): unsure at all n locations
  Clone ID: MRT4577_3470C.1
ccctcantaccntcctaattcccagtcgaccccgcgtcctnannttttctgttttttatgatactntaatttncttcnccatcggggcctcccatcatatgcggcggccatattttggcgagctccctcccccacccttccccttactcaaatctgcaccctctaccatccacactcctcccgctctattcggcaaacccccctcccttatctctccctatccaacacaaaaccgaacaaataacct

SEQ ID NO: 113186 - DNA, 1458 bp, Zea mays
  Clone ID: MRT4577_34710C.1
atgggcgagacaatctcgttcgccccttggaaggccatcaagtcccaagtcttggcggactttgtggctgaatgggtcgacacccagcttccggcagctccgatccaaccggaactctggaccatgtttttcgatgggtcgctgatgaaaacaggggcaggcgcgggccttctcttcatctcgcccctcgggaagcacctccgctacgtgttgcgcctccatttcccggcgtccaacaacgtggctgagtacgaggctctggtcaacgggttgcgcatcgccatcgagctagggcttgtcattgaccaaatcatgaagaactcccactgccgcgacccgaagatggaagcctactgcgacgaggttcggcgcctggaggacaagttctacgggctcgaggccaaccacatcacccggcggtacaacgagactgcggacgagctggcgaagatagcttcggcacgaacaacggttcccccgaacatcttctcccgggacctacatcaacccttagtcaagacaaacgacacgcccgagcccgagaaggcctcggcccggcccgaggcaccctcggcccggcccgaggcaccctcggcccggcccgaggcaccctcggctaccgagggtgaggctctgcgcatcgaggaagagcggaatggggtcacgcctaatcgaaactggcagaccctgtacctagaatatctccaccgaggagagctacccctcgatagagccgaagctcagcgactggcgcggcgcgccaagtcattcgtcttgctgggtgacgggaaggagctctaccaccgcagcccctccgacatcctccagcgatgcatatccatcgccgaaggccaggagctcttacaagaaatacactcggggcttgcgggtttctactggccgaccgcggtggccgacgccactagaattgtccgcacctgccaagggtgtcaattctacgcaaggcagacgcacctacccgctcaggctctgcaaacaatacccatcacctggccgtttgctgtgtggggtctagacctcgtcggtcccttgcagaaggcacccgggggctacacgcacctgttggtcgccatcgacaaattctccaagtggatcgaggtccgacccctaaacaacatcaggtccgaacaggcggtggcgttctttaccaacatcatccatcgctttggggtcctgaactccatcatcaccgacaacggcacccagttcaccggcagaaagttcctggacttctgcgaggatcaccacatccgggtggactgggccgccgtggctcaccccatgatgaatgggcaggtagaacgtgccaacggcatgattctgcaaggactcaagccgaggatctacaacgacctccacaagttcggcaggcaatggatgaaggaactccccttggtggtctggagcctgccacgggtttcacgccgttctttctag

SEQ ID NO: 113187 - DNA, 2286 bp, Zea mays
  Clone ID: MRT4577_34711C.1
atgccgttcggcttgaggaatgcgggcgtgacgtaccagcggtgcatgaaccatgtgttcggcgaacacatcggtcgcacggtcgaggcctacgtcgatgacatcgtagtcaagacgaggaaagcttccgacctcctttccgaccttgaagtgacattccgatgcctcaaggcgaaaggcgtcaagctcaatcccgagaagtgtgtcttcggggtgccccgaggcatgctcttggggttcatcgtctccgagcgaggcatcgaagccaacccggagaagattgcagccatcactagcatggggcccatcaaggacttgaaaggcgtacaggagggtctacctctgtaccgcctcttaaggaaggccgagtgcttcacttggacccccgaggccgaggaagctcttgggaacttgaaggcgctcctcacaaaggcgcccatcttggtacctccggctgccgaagaagccctcttggtctacgtcgccgcgaccactcaggtggttagcgccgcgattgtggtcgagaggcaagaagaggggcatgcattgcccgttcagaggccagtttacttcgtcagcgaggtactgtccgaaaccaaggtccgttacccacaagttcagaagctgctgtatgcggtgatcctgacacggcggaaattgcgacactacttcgagtctcatccggtaactgtggtgtcatccttccccctgggggagatcatccagtgccgagaggcctcgggtaggattgcaaagtgggcggtggaaatcatgggcgagacaatctcgttcgccccttggaaggccatcaagtcccaggttttggcggacttcgtggccgaatgggtcgacacccaattaccgacgactccgatccaaccggagctctggaccatgtttttcgacgggtcgttgatgaagacgggggccggcgcgggcctgctcttcatctcgcccctcgggaaacacctacgctatgtgctacgcctccatttcccggcgtccaacaatgtggctgagtatgaggctctggtcaacgggttgcggatcgccatcgagctaggggtccggcgcctagacgcccgcggtgactcgcagctcatcatcgaccaagtcatgaagaactcccactgccgcgacccgaagatggaggcctactgcgatgaggttcggcgcttggaggacaagttctacgggctcgagctcaaccacatcgctcggcgctacaacgagactgcggacgagctggctaaaatagcctcggggcgaacaacggttcccccggacgtcttctcccgggatctacatcaaccctccgtcaagatcgacaacacgcccgagcctgaggcgccctcggcccagttcgaggcaccctcagctcggcccgagggagagctacccatcgaccgagccgaggctcggcgggtggcgcggcgcgccaagtcgttcgtcctgctgggcaatgagaagaaggcgcccgggggctacacgcacctgctggtcgccatcgacaaattctccaagtggatcgaggtccgacctctgaacaacatcaggtccgagcaggcggtggcgttcttcaccaacatcatccatcgcttcagggtcccaaactccatcatcaccgacaacggcacccagttcaccggcagaaagttcttggacttctgcgaggatcaccacatccgggtggactgggccgccgtggctcatcccatgccaaatgggcaagtagagcgtgccaacggcatgattctacaagggttcaagcctcggatctacaacgacctcaacaagttcggcaagcgatggatgaaggaactcccctcggtggtctggagcctgaggacaacgccgagccgagccacgggtttcacgccattcttcctagtctacggggccgaggccgtcttgcccacagacctggaatatggctccccgaggacgagggcctacagcgatcaaagcaaccaagctagccgagaagactcgctggacctgctggaggaggctcgggacaaggccttgctacactcggcgaggtaccagcagtccctgcgacgctaccacgcccgaggggtccggtcccgagacctccaggtgggtgacctggtgcttcgactgcgacaagacgcccgagggaggcacaagctcacgcccccctgggagggaccgttcgtcatcgccaaggttctgaaacccggaacgtacaagctggccaatagtcaaggcgaggtctacggcaacgcttggaacatccaacaactacgtcgcttctacccttaa

SEQ ID NO: 113188 - DNA, 2985 bp, Zea mays
  Clone ID: MRT4577_34712C.1
atgggcagtctccaacaacctctccaacccgggacggtgctccgtttcgggagtctcgagttcatgtccctcgacggcagctacgacatgatactccttccaccgccgcgcgacaacgacaatggcggccgacagcccgcccgccagcggcggaatcgacgacgtcttctctgcgtggtggaagaacaacattcgagctcgccccgtcctctcccccgccaacggaggaggaggcgaggcaaccaaggccaagcgggtggccgcgcttcgtcgggcatcgacctcgcgtttgggacgaaggcgagcgtcatcctctcgcgacacgccaatcccgagcaagtggacgacgccagcacgctcgcggaaagcctgcaggacgtcgccctcgtacctaggacaacgacgcggtcagcccccgacgtgactatgtcgctcctcgtcgaccaaaaggtacttaccgactcccatcctacgtcatttcgactcggcctcaacccgcctggcgaccacgctttggcgggcgctctcgttgaggcgagtgcaacccctctggggtttcgtatgcggtcgccttgggaccgattgacggacgtctcgacctacgggccctctttgtccgaggaagatgacgatcctagcatctgctgggatttctctggatttggcaaccccagtgccatgcgggactttatgaccgcatgtgactactgcctctccgactgttccgacggtagccgcagccttgacaacaaggactgcggcccaagctgcgaatgtttccacgtcgagctaggggatccctccgaaggcggccgtctcggcatgccggaggacggtgatctccctaggccggtgcctcgcgccgacatcccgcgggagctagctgtggtccccgttccggcggggggtcacgacccacagctcgagcaagtccgcggggcgcaggccaggctcgacgagggagcaggagcgcttgagccgatccgccgggacgtcgggcaggtatgggcgggccaacccccggccggagaaatacgtcacctgccccagggtctccagcaccgcgtcaccgatgtcgtcagggtcaggccaccacctgcatccagtggggtcggtcagaacctggccgcagcagcaatgctcctccgcacgatgccggagccatccaccaccgagggtcggcggatccaaggagaacttaaaaatctcctggaagacgccgcggtctgccgggccgagagctctgcctcccgaaggcagggatacccctcggaacctcatgccgcgacttcccgattcatgcgggaagcctcggtctacaccgggcgcacgcgcaacaccgcgcctgcgaccccgggccacctcggcaacgagcgccatcaccgcgaccgtcgagcccacctcgacgaaagggtggaacggacgacgacaacctcaatcatccgcaacctccccctgttcctctccgacaccgctcgcgcctggttggagcacctgcctccggggcagatctccaactgggatgatttggtccaagccttcgccggaaatttccagggcatgtacgtgcgccctgggaattcctgggacctccgaagctgccgacagcagccgggagagtctcttcgggactacatccggcgattctcgaagcagcgcaccgagctgcccaacatcaccgactcagatgtcatcggcgcgttccttgccggcaccacttgccgcgacctggtgagcaagttgggtcgcaagacccccaccagagcgagcgagctgatggacatcgccaccaagttcgcctccggccaggaggcggtcgaggctatctttcgaaaggacaagcagccccagggccgcccgtcggaagatgctcccaaggcgtctactccgcgcggcgccaagaagaaaggcaagaagaagtcgcaagcgaaacgcgacgccgccgacgcggaccttgtcgccgccgccgagtacaagaaccctcggaagccccccggaggtgccaacctcttcgacaagatgctcaaggagccgtgcccctatcatcaggggcccgtccagcacaccctcgaggagtgcgtcatgcttcggcgccacttccacaaggccgggccacccgcgaagggtggcagggcccgcgacgacgacaaaagggaagatcaccaagcaggagaattccccgaggtccgcgactgcttcatgatctatggagggcatgcggcgaacgcctcggctcggcatcgcaagcaagagcgccgggaggtctgctcggtgaaggtggcggcgccagtctacctagactggtccgacaagcccatcaccttcgaccacgctgatcaccccgaccacgtgccgagcccggggaaatacccgctcgtcgtcgaccccatcatcggcgacgtcaggctcaccaaggtcctgatggatgggggcagctgcctcaacatcatctatgccgagaccctcaggctcctgcgcgttgatctgtcctccgtccgtgcgggtgctgcgcccttccacgggatcattcctgggaagcgtgtccagcccctcggacggctcgaccttcccgtctgcttcggaacgccctccaacttccgaagggagattttgacgttcgaggtggtcgggttccgaggaacctaccacgcggtattggggaggccatgctacgcgaagttcatggccgtccccaactacacctacctgaagctcaagatgtcgggccccaacggggtcatcaccgtcggccccacgtacaaacacgcgttcgaatgcgacgtggagtgcgtggagtacgccgaggccctcgccgagtccgaggccctcatcgccgacatggagaacctctccaaagaggtgccagacgtgaagcgacatgccggcaacttcgagccagcggagacggttaaggccgtccctctcgaccccagtggcgacacctccaagcagatccggatcggttccgggctcgaccccaaatag

SEQ ID NO: 113189 - DNA, 2949 bp, Zea mays
  Clone ID: MRT4577_34713C.1
atgggcagtctccagcaacctctccagcccgggacggtgctccgtttcgggagtcttgagttcatgtccctcgacggcagctacgacatgatactccttcccccgccgtgcgacagcagcaatggcggccgacagcccgcccgccggcggcgggatcgacgacgtcttccccgcgtggtggaagaacaacattcgagctcactccgtcctctccccagccgacggaggaggaggcgaggcaaccgaggccaagcaggaggcagcgcctcgttggctgtcgagcgagtcgacagcgccggcacctcaacggggggtgcgccgggcatcgacctcgcgtttgagacgaagacaagcgccgtctccccgcaacgcgccgattccaagcaaacgaacgacgccagcacgctcgcgaatggcttgctgggcgtcaccctcgtaccagagacgacggtgcagtcagtccctgacgtgacttcatcaccgcccgtcgaccaagaggtaccgaccgattctcatctcacgccccttggattcagcctcgacccgccaagcgacttcgctttggcgggcgcccttgtagaggcgagtccaaaccctctcgggtttcgtatgcggtcaccttgggaccggcagacggacgtctcgacctacgggccctctgggtccgaggaagacgacgtgcccgacttctgttgggatttctccggacttggtaaccccagtgccatgcgggacttcatgaccgcatgcgactattgcctttccgactgttccgatggtagccgcagcctcggcgacgaggactacggcccgagtcgcgaatgtttccacgtcgatctagggggtccctccgaaggcaaccatcttggtatgccggagaacggtgatctccctaggcctgtgcctcgcgttgacatcctacgggagctagcagtggtccccgttcaagcaggggtcatgacccacagctcgagcaaatccgcggggtgccggccaggcttgacgagggagcaggagcacttgagccgatccgccgggacgtcggacaggaatgggcgggccgacctccggccggggaaatgcgtcatctacccagggcttccagcaccgcatcgccgacgatgccaggatgaggccgccacccgcatcccgtggggtcggccagaacctggctgcagcggcaatgcttctccgcgcgatgccggagccatcaaccaccaaggggcggcaaatccagggagagctcaagaatctcctggagggagccgcggtctgacgggccgaaagctccacctcccgaaggcaggggtacccctcagagcatcgcgccgcgacttcccgattcatgcgggaagcctcagtccacaccgggcgcacgcgcaacacagtgcctgcggccccgggacgcctcggcagcgagcaccatcaccgcgaccgtcgggcccacctcgacgagaggactaccggatggcctgccaactgggtggaatggacgatgacaacctcatcatccgcaacctccccctgttcctctctgacaccgctcgcgcctggttggagcacctgcctccggggcagatctccaactgggacgacctggtccaggccttcaccggcaatttccagggcacgtacgtgcgccctagaaactcctgggacctccgaagctgccggcagcagccgggtgagtctctccgggactacatccggcgattctcaaagcagcgcacagagctgcccaacatcaccgattcaagtgtcatcggcgcgttcctcgccggcaccacctgtcgcgacctggtgagcaagctgggtcgcaagacccccaccagggcaagcgagctgatggacatcgccaccaagttcgcctctggccaggaggcggttgaggctatcttccggaaggacaagcagccccagggccgcccaccggaagatgcccccgaggcgtcaactcagcgcggcgccaagaagaagggcaagaagaagtcgcaagcgaaacgcgacgccgccgacgcggaccttgtcgccgccgccgagtacaagaaccctcggaaaccccctcggagggtcgggccacccgcggagggtggcagggcccgcgacgacgacaagaaggaagatcaccaggcaggagagttccccgagggccgcgactgcttcatgatctacggtgggcaagcggcgaacgcctcggctcggcaccgcaagcaagagcgtcgggaggtctgttcggtgaaggtggcggcgccagtctacctagactggtccgacaagcccatcaccttcgaccaagccgaccaccccgaccacgtgccgagcccggggaaatacccgctcgttgtcgaccccttcatcggcaacgtcaggctcaccaaggtcctcatggacggaggcagcagcctcaacatcatctacgccgggaccctcgggctcctgcatgtcgatctgtcctcggtccgggcaggcgctgcgcctttccacgagatcattcccgggaagcgcgtccagcccctcggacaactcgaccttcccctctgcttcggaacgccctccaacttccgaagggagacccttacgttcgaggtggtcgggttccgaggtacctaccacgcggtactggggaggccatgctacgcgaagttcatggtcgtccccaactacacctacctcaagctcaagatgccgggccccaacggggtcatcaccgtcggccccacgtaccgacacgcgttcgaatgcgatgtcgagtgtgtggagtacgccgaggccctcaccgaatccgaggccctcatcgccgacctggagagcctctctaaggaggtgccagacgtgaagcgtcacaccggcaacttcgagccagcggagacggttaagtccgtccccctcgaccccagcagcgacgcctccaagcagattcggatcggctccgagctcgatcccaaatag

SEQ ID NO: 113190 - DNA, 2178 bp, Zea mays
  Clone ID: MRT4577_34714C.1
atgtcgtttggtttgaggaatgcgggtgcgacgtaccagaggtgcatgaaccacgtgttcggcgaacacattggtcgaacggtcgaggcttacgtcgatgacatcgtagtcaagacgaggaaagcctccgacctcctttccgaccttgaagtgacattgcgatgtctcaaggcgaaaggcataaaactaaatcctgagaagtgtgtcttcggggtcccccgaggcatgctcttggggttcatcgtctccgagcggggcatcgaggccaacccaaagaaaatcgcggccatcaccaacatggggcccatcaaggacttgaaaggcatacagagggtcacaggatgccttgcggctctgagccgtttcatctcgcgcctcggcgaaagaggcctgcctctgtaccgcctcttaaggaaggccgagtgcttcacttggacccctggagccgaggaagccctcgggaacctgaaggcgctcctcacgaaggcgcccatcttggtgcctcccgccgccggagaagccctcttgatctacgtcgtcgctaccactcaggtggttagcgtcgcgatcgtggttgagagacgagaagaggggcatgcattgcccgtccagaggccagtctacttcatcagtgaggtactgtccgagaccaagatccgctacccacaaattcagaagctgttgtacgcggtgatcctgacgcggcggaagttgcgacaccacttcgagtctcatccggtgactgtggtgtcatccttccccctgggggagatcatccagtgccgagaggcctcgggtaggattgcaaagtgggcggtggaaatcatgggcgagacgatctcgttcgcccctcggaaggccatcaagtcccaagtcttggcggactttgtggctgaatgggtcgatacccagctcccaacagctccgatccaaccggaactctggaccatgtttttcgacgggtcgctgatgaagacaggagcaggcgcgggcctgctcttcatctcgcccctcgggaagcacctacgctatgtgctacgcctccacttcccggcgtccaacaatgtggccgagtacgaggctctggtcaacgggttgcgcatcgccatcgagctagggctccgacgcctcgacgctcgtggtgactcgcagctcgtcatcgaccaagtcatgaagaactcccactgccgcgacccgaagatggaagcctactgtgatgaggttcggcgcctggaggacaagttctacgggctcgagctcaaccacatcgcccgacgatcaacgtcgtgcccgagcccgagaaggcctcggctcagcccgaggcaccctcggctcagcccgaggcaccctcggcccccgaggaaggcacccgggggctgcacgcacctgctggtcgccatcgacaaattctccaagtggatcgaggtccgacccctaaacagcatcaggtccgaacaggcggtggcgttcttcaccaacatcatccatcgctttggggtcccaaactccatcatcactgacaacggcacccagttcaccgacataaagttcctagacttctgcgaggatcaccatatccgggtggactgggccgtcgtggctcaccccatgacgaatgggcaagtagagcgtgccaacggcatgatcctgcaaggactcaagccacagatctacaacgacctcaacaagttcggcaagcgatggatgaaggagctcccctcggtggtctggagcctgaggacaacgccgagccgagccacgggcttcacgctgttctttctagtctatggggccgaggccatcctgcccacaaacttagaatacggttccccgaggacgagggcctacgatgaccaaagcaatcgagctaaccgagaagactcgctggaccaactggaagaggctcgggacatggccttactacactcgacgcggtaccagcagtccctgcgacgctaccacgcccgaggggttcgttcccgagacctccagatgggcgacctggtgcttcggctgagacaagacgcccgggggcggcacaagctcacgcctccctgggaagggccgttcgtcatcgccaaagttctgaagcccgggacgtacaagctggccaacagtcaaggcgaggtctacaacaacgcttggaacacccgacagctacgtcgcttctacccttaa

SEQ ID NO: 113191 - DNA, 2979 bp, Zea mays
  Clone ID: MRT4577_34715C.1
atgccgttcggtttgaggaatgcgggcgcgacgtaccagcggtgcatgaaccatgtgttcggcgaacacatcggtcgcacagtcgaggcctacgtcgatgacatcgtagtcaagacaaggaaggcctccgacctcctctccgaccttgaagtgacattccgatgtctcaaagcgaaaggcctcaagctcaatcccgagaagtgtgtcttcggggtgccccggggcatgctcttggggttcatcgtctccgagcggggcatcgaagccaacccggagaagatcgcagctatcaccagcatggggcccatcaaggacttaaaaggtgtacagagggtcatgggatgtctcgcggccctgagccgcttcatctcacgcctcggcgaaagaggtctgcctctgtaccgcctcttgaggaaggccgagtgtttcgcttggacccctgaggccgaggaagctctcgggaacctgaaggcgctcctcacaaaggtggttagcgccgcgattgtggtcgagaggcaagaagaggggcatgcattgcccgttcagaggccagtctacttcgtcagcgaggtactctccgagaccaagattcgctacccacaagtccagaagctgctgtatgcagtgatcctgacgaggcggaagttgcgacactacttcgagtctcatccggtaactgtggtgtcatccttccccctgggggagatcatccagtgccgagaggcctcgggcaggattgcaaagtgggcggtggaaatcatgggcgagacaatctcgttcgcccctcggaaggccatcaagtcccaggtattggcggacttcgtagccgaatgggtcgacacccagctgccgacgactccgatccaaccggagctctggaccatgtttttcgacgggtcgctgatgaagacgggggccggcgcgggcctgctcttcatcttgcccctcgggaaacacctacgctacgtgctacgcctccatttcccggcgtccaacaatgtggctgagtacgaggctctggtcaacgggttgcggatcgccatcgagctaggggtcagacgcctcgacgcccgcggtgactcgcagctcgtcatcgaccaagtcatgaagaactcccactgccgcgacccgaagatggaggcctactgcgatgaggttcggcgcctggaagacaagttctacgggctcgagcttaaccacatcgctcggcgctacaacgagactgcggatgagctgacaaaaatagcctcggggcgaacgacggttcccccggacgtcttctcccgggatctgcatcaaccctctgtcaagatcgacgacacgcccgagcccgaggcaccctcggtccagcccgaggtaccctcggctcagcccgaggcaccctccgctcagcccgaggcaccctcggtccagcccgaggtaccctcggctcagcccgaggcaccctcagctcggcccgaggcgccctcggttcagcccgaggtaccctcggcccccgagggcgaggcactacacgtcgaggaggagcagagcggggccacgcctgatcgaaattggcataccccgtacctgcaatatctccgccaaggagagctacccctcgaccaagccgaggctcggcgggtagcgcgacgcgccaagtcgttcgtcttgctgggcgatgagaaggagctctaccatcgcagcccctcgggcatcctccagcgatgcatctccatcgccgaaggtcaggaactcctgcaagagatacactcgggggcttgcggccatcacgcagcacctcgagccctagtcgggaatgctttccggcaaggcttctactggccaacggcggtggctgacgccactagaattgtccgcacctgcgaagggtgccaattctatgcgaagcagacccacctgcccgctcaggctctgcagacgatacccatcacctggccctttgctgtgtggggtctggacctcgtcggtcccttgcagaaggcgcccgggggctacacgcacctgctggtcgccatcgacaaattctccaagtggatcgaggtccgacctctgaacagcatcaggtccgagcaggcggtggtgttcttcaccaacatcatccatcgcttcggggtcccaaactccatcatcaccgacaacggcacccagttcaccggcagaaaattcttggacttctgcgaggatcaccacatccgggtggactgggccgccgtggctcatcccatgtcgaatgggcaagtagagcgtgccaacggcatgattctacaagggctcaagcctcggatttacaacggcctcaacaagttcggcaagcgatggatgaaggaactcccctcggtggtctggagcctgaggacaacaccgagccgagccacgggtttcacgccgttcttcctggtctacggggccgaggccgtcttgcccactgacctggaatacggctccccgaggacgagggcctactatggtcaaagcaaccaagctagccgagaagactcactggaccagctggaagaggctcgggacaaggccttactacactcggcgcggtaccagcagtccctgcgacgctaccacgcccgaggggtccggccccgagacctccaggtgggcgacctggtgcttcggctgcggcaagacgcccgagggaggcacaagctcacgccccccctgggaggggccattcgtcatcgccaaagttctgaagcccagaacgtacaagctggccaacagtcaaggcgaggtctacgacaacgcttggaatatccaacagctacgtcgcttctacccttaagatattttcaagttgttcatatacctcgcacacacgcaaagtttagtcatcaaggaagggtcggcctcgcctcggcaaagcccgactctccctcgggggctaaaaggggggaaaccccctctgcgttaaaattttcctcgaaaaaagatctcttttaccagaatatctttcgtgctttttga

SEQ ID NO: 113192 - DNA, 1653 bp, Zea mays
  Clone ID: MRT4577_34716C.1
atggcgctggcttggctcgggcgcggcgctaggcatgcgggggcgcgcgcgagcgtgctctggcgcgggcagaaggcgtcgaacacgtggaggtgtttttcttctagtgttcaaacgtctccagagatcgcaaaccttctagtgccaaggtgggctctagccaaggctttcagccgagccatacgacgggcgccattcccgacccggttccgaaccccgactaccatcacaaagtactcgggggagacgaggccgaaattgtggctcgcggactaccgactggcctgccagctgggtggaacagacgatgacaacctcatcatccgcaacctccccctgttcctctccgacaccgctcgagcctggctggatcatctgcctctggggcagatctccaactgggacgacctggtccaagccttcgccagcaacttccagggcacgtaccgcaccgagctgcccaacgtcactgactcggacgtcatcggcgcgttcctcgccggcaccacctgccgcgacctggtgagcaagctgggtcgcaagacccccaccagggcgagcgagctgatggacatcgccaccaagttcgcctctggccaggaggcggttgaggccatcttccgaaaggacaagcagccccagggccgccagccagaagacgtccccgaggcgtccgctcagcgcggcaccaagaagaagaacaagaagaagtcgcaagcgaaacgcgacgccaccgacgcggaccttgtcgccgccgctgagtacaagaaccctcggaaacctcctagaggtgccaatctcttcgataagatgctcaaggagttgtgcccctatcatcaggggcccgacaagcacacccttgaggagtgcgtcatgcttcggcgccactttcacagggccgggccaccagcggaaggtggcagggcccacaacaacgacaagaaggaggatcacaaggcagaggagttccccgaggtccacgactgcttcatgatctacgggcgacaccccgaccgtgtgccgagcccggggaaatatccgctcgttgtcgaccccgtcatcggcaacgtcaggctcaccaaggtcctcatggacgaaggcagcagcctcaacatcatctacgccgagaccctcgggctcctgcagatcgatctgtcctcgatccgggccggcgcggcgccttttcacgggatcatccccgggaaatgcgtccaacccctcggacaactcgatctgcccgtctgcttcgggactccctccaacttccgaagggaaaccctcacgtttgaggtggtcgggttccgaggaacctaccacgcagtactggggaggccatgctacgccaagctcatggccgtccccaactacacctacctcaagctcaaaatgtcgggccccaacggggtcatcaccgtcggccccacgtaccgacacgcgtacgaatgcgacgtggagtgcgtggagtacgccgaggccctcgccgaatccgaggccctcatcgccgacctggagagcctctccaaggaggcgccagacgtgaagcaccacgccggcaacttcaagccagcagagatggttaagtccgtccctctcgaccccagcaacgacgcctccaagcagatccggatcggctccaagctcgaccccaaatag

SEQ ID NO: 113193 - DNA, 559 bp, Zea mays
  Clone ID: MRT4577_34717C.1
tatttaggtttgaattgtagaatcactggtgctggtgcccctttgtcactcgtgtcaaatagtaaaaggaaatgtgccgttatcgatcggaattgtagaatcacattactgtacgattatcaatcgaattactgttacaatagtaacttgcagtgcagtatattcaatttggtagtaattagcaacttggtgacattgttgttcgtgcttggcataatgtagacgatctatgtttcttctgtcggatgacatgcttggatatgcgggattcttgtagatggtggatgtgcctgggtgccgactactgtttgaacgaactgatcgtgccttgctcattttctaccggcatcggatgtttttgaccgactccagggcacctcatatctaccgttgctgaggtttaaattgtaaaattcccgtcctgtagttctttaattacaactaatgcaccaggcgaacgaaaattcttgtaatgtattcacaaatatttctagagaagtttgcagtgtaaatataacaatgttcgtttcaatggagtgcacctactaattaatgtacc

SEQ ID NO: 113194 - DNA, 301 bp, Zea mays
  Clone ID: MRT4577_34718C.1
ggttcgcgctccagccagtccctctcctacctcggttgcacgctgtccggcgactatggcttcgacccgctgcgcctctcggacccggagggcaccgggggctttctcgagcctcaatggctggtctaaggtgattgtgatcatacggccgctacgccatgctgggctcggagggcgccatcgcctcggagatcttagggaagatgggcatcatccacgtcgtagtacctgctgacgatgttcaagagcttcgtatatcctgccctcggtcaccttacactactggtccgattactacatt

SEQ ID NO: 113195 - DNA, 2652 bp, Zea mays
  Clone ID: MRT4577_34719C.1
atggcggccaacaacccgcccgccggcggcggaatcgacgacgtgttccccacgtggcggaagaacgactttcgggtttatcccgtcgcctcccccgccgatggaggaggaggcggggcaaccaaggccaagcaggaggcggcacctcgtcggctgtcgaaggcaagtccaaaccctccggggtatcgtatgcggtcaccttgggaccggctgacggccgtctcgacctacgggccctcgggtcccgaggaagatgacgagcccgacttttgttgggatttctctggacttggcaaccccagtgccatgcgggacttcatgaccgcatgccactactgcctttccgactgttccgacggtagtcgcagcctcggcgacgaggactgcggcccaagtcgtgaatgtttccacgtcgatatagggggtcccggcgaaggcaaccatcttggtataccagagaacggtgatccccctaggcctgcgcctcgcattgacatccttcgggagctaggtgtggttcccgtcccgacagggggtcatgacccacagctcgagcaaatccgcgagatgcaggccaggctcgacgagggagcaggaacgcttgagccgttccgccgggacatcgggcaggaatgggcaggccaacctccggccggagaagcgcgtcatctaccccagggcatccaacactgcatcgccgatgacgtcagggcaaggccgccactggcttccagcggggtcggccagaacctggctgcagcggcaatactcctcctcgcgatgccggagccatcaaccaccgaggggcggcgtatccagggagagctcaagaatctcctggaggatgccgcggtccgacgggccgaaagctctgcctcccgaaggcaggagtacccctcggagcatcgcactgcgacttcccgattcatgtgggaagcctcggtccacaccgggcgcacgcgcaacacagcgcctgcggccccgggtcgcctcggcaacgagcaccatcaccgcgaccgtcgagcccaccacgacgaaaaggtgcgccgaggctaccaccccaggcgtgggggacgctacgacagcggggaggattggagtccctcgcccgaaccacctggtccgcaggctttcaaccgggccatacgacgggcgccgttcccgacccggttccgaaccccgactactatcacaaagtactcgggggagacaagaccggaactgtggctcacggactaccagctggcctgccacctgggtggaatggacgatgacaacctcatcatccgcaacctccccctgttcctctccgacaccgctcgagcctggctggagcacctgcctccggggcagatctccatctgggacgacctggttcaagccttcgccgacaacttccagggcacgtacgtgcgccctggaaactcctgggatctccgaagctgccgccagcatccgggagagtctctccgggactacatccggcgattctcgaagcagcgcaccgagctgcccaacgtcaccgactcggatgtcatcggcgcgttcctcgccggcaccacctgccgtgacctgcgcggcaccaagaagaaaggcaagaagaagtcgcaagtgaaacgcgacgccgccgacgcggaccttgtcgccgccgccgagtacaagaaccctcagaaacctcccggaggtgccaacctcttcgacaaaatgctcaaggagccgtgcccatatcatcaggggcccgtcaagcacacccttgaggagtgcgccatgcttcggcgccactttcacaaggccgggccacctgcggaaggtggcagggcctgcgacgacgataagaaggaggatcacaaggcaggagagttccctaaggtccatgactgcttcatgatctacggtgggcaagtggcgaacacctcggctcggcaccgcaagcaagagcgtcgggaggtctgctcggtaaaggtggcggcaccagtctacctagactggtccgacaagcccatcaccttcgaccagggcgaccatcccgaccgcgtgccgagcccggggaaatacccgctcgttgtcgaccccgtcatcggcaacgtcaggctcaccatggtcctcacggacggaggcaacagcctcaacatcatctatgccgagaccctcgggctcctgcggatcgatctgtcctcggtccgggcaggcgctgcgccttttcacgggatcatccccgggaaacgcgtccagcccctcggacaacttgatctacccgtctgctttgggacaccctccaactttcgaagggagaccctcacgttcgaggtggtcgggtttcgaggaacctaccacgcagtgctggggaggccatgctacgccaagttcatggccgtccccaactacacctacctcaagctcaagatgccgggccccaacggggtcatcaccgtcggccccacgtaccgacacgcgtacgaatgcgacgtggagtgcgtggagtacgccgaggccctcatcgccgacctggagagcctctccaaggaggcgccagacgtgaagcgccatgccggcaacttcgagccagtggagacggttaagtccgtcccactcaatcccagcaacgacacctccaagctgatccggatcggctccgagctcgatcccaaatag

SEQ ID NO: 113196 - DNA, 1802 bp, Zea mays
  Clone ID: MRT4577_3471C.1
gccggccgggtctggattaaacgttccccactggatataaaagttccttttgagacagtgtttagcaacgaagaatcaaagattaggagcagtatgttatctgaaggtttcatgtcatttgcgtctggatggaactccgttgatgttgactctgaagttagctggttacctgattacgctgataaagcacatgatcacaaacttagctgtgaacttgacactataagtggctcgttcctacccaattgtgctcgaatgcgctacttagaagcattgctagacagaggatcgaaagatgggttagtactgattaaaaaatggcttattgaagccttgcagcatgggaagctaacatctgcatccaaaggttggcaaggagccacttctgtttcagagattcgatctatggtgcaaatgctttcccgagaccagttgtcattgttaaaaaacaggggtgttatccagttagcactagctgctgaaatgactctacgggagcctcaaagttctcgctgggacgcctttacaagtgccgagagaatattaagtgtgacatctgcagagacacctcaaagtcttgccagtgagcttcgtgatttcatcaacactagcactttagttgaatcacacacacaaactacttcaatggagtcttcacagggcctacttagtttccaggacgtactgcttctaacgattatagggtatatcttagctggtgaaaatttccctacatctatggctggtggtccattttcttgggaagatgagcggtctcttaaagatgttatagtggactctatccttgaacgaccatcatctgtgaagttgcgcttccttgatggcctggatagtgaacttgaagctaaagctagatctaaagatggtgagaggaataaaaactccagcgaggtagcacccagtactgatgatgattttgatgatgaatggggtacctgggatgacagtgataatactgatcaccaaaaggaggaagcttatggggacatgcaacttaagttggaagtgcgagatagagttgatcagcttttcaaattctttcacaaattatccagtatgaggttaagaaatcaagcccttggtgaaggtctagcagcattaagtagattcgagactgacggttactcgaggaaatgcttgctttataagttactattagctctcttgtcgaggtacgatgtacctggcctcgagtatcattcatcaactgttggtcgtctattcaaaagtggactaggtagattcgggcttggacagtctaaaccagccttcggtgatcaatctgttcttatcatttttgttcttggaggtattaatactcttgaggtccgggaagtcatgacagcgatatcggagagcagcagaccagatgtggagcttattctgggtgggacaacccttcttaccccagacgacatgtttgagttgatgttgggatcgtcaagctttgcttaggctcaaccttcactcttgagtcatgtgcgggacttggaaagaaatcggagcatatttttttcttattctccagaatagttacttgtctgatgtagcagaagcattcagactcggaagaggatactaccagaagaaagcagtccattcagagtcaaaatagtttgcaagatgaacctacgagtattgctggaaggtgtaagaaacagtgtgtctagttatcagtggctgactcttgttgtaaaacatgtagcagagatatatcaagcaaaagatgcgtaagaactcaagtaatttgttttgtcactaacatgagcaaaaaccctttt

SEQ ID NO: 113197 - DNA, 1869 bp, Zea mays
  Clone ID: MRT4577_34720C.1
gaagagttcagctaccctaccatccacactttattcatctcagggcagtagccagtagctagctgtagagggagttatcggccatgtcggaggaggcgacgctggaggacacgcctacgtggatcgtggcgtccgtgtgctccgtcatcgtcctcatctccttcgtcttcgagcgcgcgctccaccacctcggcaaggcactggagcgccggaggaagaccctgtacgaggcgctgctaaagctcaaagaagagctcatgctgctgggcttcgtctcgctgctcctcgtcgtctcccaggacttgatacagaagatctgcatcgacgacagcctcatggagcactggatgccgtgccggggtgcgagcgccaccgcctcggctcattacggtgtctcctcctcctcctcctcctccgcggtcggtggcgggaggaggatgctcaaaggcggcggggcagctttcgggcactgttcaagcaagggaaaagtcccgttgctatcacttcacgccttggagcaggtacacattttcatcttcgtcctagctatcacgcaagtcgttctcagcgtcgccaccgtcctcctgggacttctgcagatgcggatatggatgcactgggagaacaccattcagcaagagggcagctctgctcccaagatgatcgcccgtgtgcagaaaatcaggttcatccaggaccggtgtaaggggtacgagaaggccgcctgggttataatatggctgcgttctttcttcaaacagttctacggatcagtgtccaacgacgactacattgcgatgagactcggtttcgtcatggagcactttagggggcaccccaagttcaacttttacgactacatgatcaaagctctcgagaaagatttcaagcgagtagttagtataaaatggtattactggatttttgtgatgatctttctgctgctcaatgtcaccgggtggcactcctacttctggatctcattagttccactggctctgctgcttctgattgggacgaagctggagcacatcataaacaggctggcctacgaggtggcctcgaagcacgccgccgggcaaggcgaagggggcatcgtggtgagcccttcggacgagctgttctggttccgcagcccacggctggtgctcgtgctcatccacttcatcctgttccagaacgcgttcgagttcgcgtatttcttctggacactggcgatgttcggcgccaactcctgcatcatggacagtctaggatacagcgtctcgcgaatcatcatatgcgtcgtcgtccaggtgctctgcagctacagcacactcccgctctacgccatcgtgtcccatatggggagttcgttcaagagcgctgtgttcgtggacgacgtcgccgacaatctcagagggtgggccgacggcgcccggaggcgcgtgcggagatctgccacgggtgtcgacgccagttgcctgggtacgccggcggcggcgggacggggctgggaaggcgccgccggctggagattgattgccgggaggccgagccgcccaactcagcagcctcggagcatctccttctgagttctgtctagtttctgaagaaggaatcgaaagccgcgcaatctgcagcacgcgtatgctgtcgctgcccgtcttcatttgggtattattgggtttgagttgacactgaccaactgccgaattttgcggaaacttttatggtcatgcctcttgtgccactattacgaccgtggcggtgagcacggagtgtaatagagtagtaaagatatgtagctcgcatatatatatatatactgtacctccgcccgtgatgctagcagtagcagcggcggatggggctctagcggcattgttg

SEQ ID NO: 113198 - DNA, 2427 bp, Zea mays
  Clone ID: MRT4577_34721C.1
atggcggaagagcagcatccgggcctgtcccgtcaccttcctcgtcgcgagagaaggaggcggggcaaccatggccaaacaggaggcgacacctcgttggctgtcgaccgagtcgacgacgccggcgccccagcgggggacacgtcgggcgttgacctcgcgtctgagacgaagacgagcatcatttccccgcaacacgccaaccccaagcggatggatgacgccagcacgctcgcgaaggacttgctggacgttagcctcgtacctgagataacggtgcagtccatccccgacgcgacttcgtcaccatccgtcgatcaagaggtaccgtccgttttccaccctgtgccttttagatttagcttcaacccaccaagcgatcccgcttcggtggacgctttcataaaggcatatcctaaccttccggggtaccatatgtggtcaaactgggaccgactgacgaccgtctcgacctacgggcccccggtttccgaggaagatgacgagcccgactctggttgggatttctctgggctcgataaccccagtgccatgcgagacttcatgaccgcatgtgactactgcctctccgattactctgagggcggccacaaccttgacgacgaggactgtggcccaagtagcgaatgtttccacgtcgatctagggggtctcgacgaaggcaaccaccttggtcgagcgctagctgaagaagcgcgtcatctggcccaggacatccagcatcgcgtcgctaatgatgccagggcaaggctgtccccggcttccagtggggtcggccaaaacctggcagcagcagcaatactactccgagcgatgccagagccatccaccatcgaggggcggcatatccagggagagctcaagaatctcctagaggatgccatggtccgacgggccgaaagctctgcctcccgaaggcaggggtaccccagagcatcgcgtcgcgacttcccgattcatgcgggaggcctcggtccacaccgggtgcacgcgggacgcaacgcctgcagccccgggtcgcctcggcaacgagcaccaccaccgcgactgtcgagcccacctcgacgagaaggtgtgccgaggctaccaccccaggtgtgggggacgctacgacaacggggaggatcggagtccctcgcccgaaccacccggtccgcaagctttcagccgggccatacgacgggcgccgttcccgacccggttccgagccccgactaccatcaccaacagaccgagctgcccaacatcaccgactcggatgtcatcgacgcgttcatcaccggcaccacttgccgcgacctggtgagcaagctgggtcgcaagactcccatcagggcgagcgagctgaaggacatcgccaccaagttcgcctctggtcaggaggcggttgaggccatcttccggaaggacaagcagcctcagggacgccagcaggaaggcatccccgaggcgtccgctcagcgcggcacgaagaagaagggcaagaagaagtcgcaagcgaaacacgacgccaccgatgcagatcttgtcgccgccgccgggcacaagaaccctcggaagcctcccggaggggccaacctgttcgacaagatgctcaaggagtcgtgcccctatcatcagggtcccgtcaagcacacccttgaggagtgtgtcatgcttcggcgccacttccataaggtcgggcccccggcggaaggtggcaaaggccatgacaacgacaagaaggagggccacaaagcagaggagttctcggaggtccacgactgcttcatgatctatggtgggcaagtggcaaacgcctcgactcggcaccgcaagcaggagcaccgggaggtctgctcggtgaaggtggcagcgccagtctacctagactggtccgacaagcccatcaccttcgaccaaggcgaccaccccgaccgcgtgccgagcccagggaagtacccgctcgttgtcgatcccgtcatcggcaacgtcaggcttaccaaggtcctcatggatggaggcagcagcctcaacatcatctacgccgagaccctcgggctcttgcagatcgatctgtccacgatccgggctgtgctggggagaccgtgctacgccaagttcatggccgtccctaactacacctaccttaagctcaagatgtcgggccccaacggggtcatcaccgtcggatccacgtaccgacacgtgtatgaatgtgacgtggagtgcgtggagtacactgaggccctcgctgaatccgaggccctcatcgccgacctggagagcctgtccaaggaggtgccagatgcgaagcgccatgccggcaacttcgatccagcagaggcggttaagtccgtccctctcgaccccaggaacgacgcctccaagcaagtccggatcggctccgagctcgaccccaaatag

SEQ ID NO: 113199 - DNA, 442 bp, Zea mays
  Clone ID: MRT4577_34722C.1
tgggtctggacctttgggctgatttatgtgcttgtttggtcagtccgtgcgttgatgaacaactctcctcctattctatcaatattagtcagtaatctccctctcttcgtaacaacggttgtctgtcttcttcttctttagttgtagtcggctgtggtggtggtggcttcggtagtggtgtcgtcgtcgtcggtggtgggggttgggatggtgctggtggtggcgagtcgtggtgaggcgatgctgctggcggtgttgcgttctgggcatgtgacgggtagtgtggtgctgtttcttgtggtgcgtcgtagtggggcgtgtctgtctaatagttgtgtgctgctggtggtggattggtaggttattcgtaatcgttctaagagtacgatgggttggtctggtggtggtgctagtacggttaatgttgataatacttttggta

SEQ ID NO: 113200 - DNA, 1299 bp, Zea mays
  unsure (1)..(1299): unsure at all n locations
  Clone ID: MRT4577_34723C.1
atgatctacggtgggcaagcggcgaacgcctcggctcggcaccgtaagcaagagcgtcgggaggtctgtttggtgaaggtggcggtgccagtctacctagactggtccgtcaagcccatcaccttcgaccaagccgaccaccccgaccacgtgccgagcccgggaaaatacccgctcgttgtcgaccccgtcatcggcgacgtcaggctcaccaaggtcctcatggacggaggcagcagcctcaacatcatctacgccgagaccctcgggctcctgcgtgtcgatctgtcctcggtccggggcaggcgatgcgcctttccatgggatcacccccgggaagcgtgtccagcccctcggacaactcgaccttcccgtctgcttcggaacaccctccaacttccgaagggagaccctgacgttcgaggtggtcgggttccgaggagcctaccatgcggtactgtgaaggccatgctacgcgaagttcatggccgtccccaactacacctacctcaagctcaagatgtcgggccccaacggggtcatcaccgtcggcccacgtacaaacacgcgttcgaatgccgacgtgaagtgtgtgggagtacgccgaggcccctcgtcgagtccgaggccctcatctccgaccagggagagcctcctctaaggagggtgcagaacgtgaaagcgtcatggccggcaacttcgaagccaacgggaaatggtttaagtccgtccccctcgactccagnagcgacgcctccaagcaagtccggatcggctccgagctcgatcccaaataggaagcagtgctcgtcgacttctccgcgcgaacgccgacgtcttcgcgtggagtcccttggacatgcccggcataccgagggatgtcgccgagcactcgctggacatccgagccgggagcccgacccgtcaaagcagcctctgcgccgattcgacgaagagaagcgtagagccataggcgaggagatccacaagctaatggcggcagggttcatcaaagaggtattccatcccgaatggcttgccaaccctgtgcttgtgagaaagaaaggagggaaatggcggatgtgtgtagactacaatggtctaaacaaagcatgtccgaagattccctaccctctgcctcgcatcgatcaattcgtggattccactgctgggtgcgaaaccctgtctttcctcgatgcctactccgggtatcaccaaatcaggatgaaggagtccgaccagctcgcgacttctttcatcacgccttcggtttgtactgctatgtcaccatgtctatag

SEQ ID NO: 113201 - DNA, 864 bp, Zea mays
  unsure (1)..(864): unsure at all n locations
  Clone ID: MRT4577_34724C.1
gccggggtgaaaaaaaaaaaaaaaaaaaaaaaaaaaataccagaagatcaccagtccttgtacaagtataaatcagggggaagcctgaaacatgctatcgagctttgcaactcatttacagggtgcacactctctgtaggtgctgcagtagcctggaagtgatgacagacatatatggaggctttcttcgactggtgtttacacagccaagtcagcttatgggggtttcttcattggagccacggtttttggtccttcggatctaatctggaaatcgtgggccccaaagaaatgtcgttttttcccctatggctggttgctcttggcaaatgttggagtgccgaccgtctagccagacggggtttacaggcagcaccctttgtgttgtttgttttgtgaccaagacgaggaaaccattaaccatcttctggtctcttgctccttctctcaggcaattttggttcgtgctgttacaagtggtgggtcttcaacgcctatctccacagccagacacgtccttcttcctagaatggtggtcaggttctgctgcagtggtggatgagcaatttcagcagggtttctactacatcatcctgcttggtgcttggctcctttggaagcaccgtaaccgatgtgtcttcgatgggattgggatcaaacccgatgtgcagcatgtgttgtccttagccacagaggaaatgagactttgggggctagctggtgcgaagggaattaggatgttgacttgttggcgagtaatcctctngcttgatccgggtcatgtttctttgttctggtcgagaattgtgagtgtgttgtttttctattctttttctttttccttttgtagtctgttttggggtt

SEQ ID NO: 113202 - DNA, 460 bp, Zea mays
  Clone ID: MRT4577_34725C.1
aacgaggaaaatccttggaggctaaggccaaattaaaaaaaaggtcccaaaacctctcgggaagaacacaggaagggctttgggccgtattctgaagttatcgctcggctccaaaaataaaatgaaaagggggggcgggaccacaaaaaacggggacataaacagcctcgttttttcccggggggagaacgacctgaatgccttttgggaggcacaaaactccgaaccgcctcctttatagaggtcaatatatccacaatctttgcaaatggggggcttaaagcaggatctttttgccagcatttttggggtagctcaccgggcataggaggagtttcaacagcaatagggggcctcaaatccttttgaacaaaaaaaactggtgcctgaaaagggggcatgttttcatatgggagctttccgggcaggagctcccaaaaaactatcccaaaactgaaaa

SEQ ID NO: 113203 - DNA, 737 bp, Zea mays
  Clone ID: MRT4577_34726C.1
ctcgaggccggccgggccggggtaaagtatatcttgcccgcaaggaaaggagggaagaaaatagaggcggagagagaggcgaggcggagggaaaaaatcgaagaaatcgccgaggggattggattggactgcgactgtggtttgattctcccttccacgccgcggtcctcctccagagtccagacccaatcccaagtccctagtcttgcgagggaagggatcccaaatccggcgtccagtccagtccaacctatagtcgatataccccccgccggcttggacgtatccttgccccaattctgattgacaggagaggagttggatcacggagcattggaatggctgccgccgcataggatggagctggattcctccggccgcttctcggctgcccccgtggatgctgtgaccgtcgcgattggaggttgaggcggaggcgaaggctttcttcagtaagagattgaagagctggggtgtagctggttgggtatggaggggagtgagttcctctcccctgtcgacagccgggaggacacgccgccgccgtggaggccgagcgagcccttggcgttcggccgttttgcggcggcggctgcttcgctggagccgtccccgtcggctccgcccaatgggggctgctgcccgtgtcagcagcctccatggggtcaggcgggaaacggtttgttgcaagattaacagcaggcatcattcagacatatctagaatgtgatccctga

SEQ ID NO: 113204 - DNA, 133 bp, Zea mays
  Clone ID: MRT4577_34727C.1
attttctccaactactttaaatataaaactaagcttcctcacagcccaacacattctcctatcaatctactaagacgtcacacaactcatatgaatcaaaacactgtgagaactactgtactagcaagacaca

SEQ ID NO: 113205 - DNA, 369 bp, Zea mays
  Clone ID: MRT4577_34728C.1
gaatacaacacaccccatcacaatggcaataggcaggtatatcggtggatcagttgcaacagggccaactggtcttttggatgacaccgcgctaaagcctttgaccggaaacaaaaaggatattggctgacagaaaccccacatagattccccattggggattgggaagcattttcctcctgaaggacaggagtcccacgaccgaaggccaccgacaggaatggaatcaatcacaatgaagcactctcccgaggacggttcctggacgacgacggactggagcggccgggggagctgagacttgggaataaagatgcgggccgccagctgcatggccaggaaatgctcgccctagcagaaggcacggga

SEQ ID NO: 113206 - DNA, 499 bp, Zea mays
  Clone ID: MRT4577_34729C.1
gaaaatattatcgctgtttatttccgtgttcaaccgtaaagaagaatatcccaccggagggcgccgggctaaaaagaatgccaaacattcaacctaacgtctaagagccaaaaaaatacggcacaagaatccacaaagggagagatcatcacttcaaatccggcccagaatacaaaggggacctgagcatactacgaacaatatgtacagttaggtacaaaccggacagcaagtcacacaaagccaaaaacaggatcaaatgggtggagggcataccggaaagcaacaaaccgtcataattgtttacagcatccaaacgagcgacgctgtcaggcccagttattccccccagaccagagccgaaccagtttgggcccccatgacccagaaaccccggagcccaattagatagccgcaacgagcaggggcctcaccagaccaaactctagagcctccacacaggactgtccaaaacggctgaaaagcttgggaaataaca

SEQ ID NO: 113207 - DNA, 350 bp, Zea mays
  unsure (1)..(350): unsure at all n locations
  Clone ID: MRT4577_3472C.1
gaaataaagcagacaagaaattgaagggaaaaaaccctcctcttgctcggccgtgggcaaaggcccccggccgacgttcctgcccatcgatacccctctctaatccctcaccgatctagcgaccataacagagatgcttttcaggtcgtctcaaataggctagcactcctggcttgtggttgttggttgccagtttgctgcctctgttttctccttaagttatgttagtggtgtatcttgtaagtgtgtcttgggcgtgtgtttttagggttactttacttcccattgtactctcttctttcttaatgaaatgatacacaattctcttannnaaaaaaaaaaaaaaaata

SEQ ID NO: 113208 - DNA, 548 bp, Zea mays
  Clone ID: MRT4577_34730C.1
ccaaaaatagcgggggccggaaccttttttttttgtttcaaagctttcccacttaggccggaaacccaaaaccggcccttttaaccccctttttttggggcggtccaacccaaacgatagggggggggcaaatcaaaaaaaaccccccccttttgaaacccttttaaaagcttgtttaaccccaggaaacccccaaaggtttttttctgaaaaaaaggcccccttaggcaaaaggtttccccaccttggggggcttccccccctcccaggggaagcggggggccccccttccaaaggggccgtaggccccccttttggggtaacccccgttgcccctttttttgggggcagggtttataataatcatccccggcctaaaataaaatttttccttgacaattttggggatccccttggggggaatccccccgggcccgtcctttgtaacaaacccggaaagaggctcggccccccctttgggttaaaacccctgaactatggcccggaaaacaaggcccttgacaacaattcttttggaaccctgcctt

SEQ ID NO: 113209 - DNA, 974 bp, Zea mays
  unsure (1)..(974): unsure at all n locations
  Clone ID: MRT4577_34731C.1
ccccgcgtccgcccagcgtccgcggacgcgtgggtagctagccgccggggcaaagaacaggtgaacacgccacactcctagtcctagtatatatatacctagtatgtagtaccaaattaacatcgtcagagacacgcgtccaaacatacagctagatagcctctgcatgcctacgtacagcatggccaaggccgagctgctcctcgccctcgtggcttcgctcgtcgtgctgccattctcctccctcgccgtgtaccaggacttctgcatcgccgacctatccgccgccgccacgccgggcggctacccgtgcaagcccccgaaggacgtgaccgccgacgacttccactatggcggcctcgccacccccggcacggcgctgaaacccttcaagatctccctgggctcggccgtcgtcaccacgttccccggcctgaacgggctgggcatctctgccgcgcggatggtgatggtcccgggcggcgtcgcgccgctgcactcccacccgggaggcaccgagctcatcttcgtcatcgagggcagcgtcgtctgcggcttcatcagcgccacgctcaacagggtgtacaccaagacgctgtacgccggcgacctgatggtgctcccgcagggccagctccacttccagtacagccacggcaacaccncggcggtgacgctgtcctcgttcagcagcgacaaccccggcctgcagatcctcgacttcgcgctcttcgccaacgacctgcccacggaggtcgtgaacaaggtgaccaacttggangaattgnagattgtcaagcttaaggngctgtttggacccccccgctagacgcatatgtactccgtgtataggaacagtcaacggtattgagccttgaattgtgtgtattattctatactgcttgtgcattgtgatggatgtttgtcttgtcattctataaaaaaaaaaaaaaaaaaaaaaaaaaccccaaccc

SEQ ID NO: 113210 - DNA, 1156 bp, Zea mays
  unsure (1)..(1156): unsure at all n locations
  Clone ID: MRT4577_34732C.1
aacgcctccgggcagttagctagccgccggggcaaagaacaggtgaacacgccacactcctagtcctagtatatatatacctagtatgtagtaccaaatttgcatgggcccccacgggtaccctcgaggccggccgggccgggaacatcgtcagagacacgcgtccaaacatacagctagatagcctctgcatgcctacgtacagcatggccaaggccgagctgctcctcgccctcgtggcttcgctcgtcgtgctgccattctcctccctcgccgtgtaccaggacttctgcatcgccgacctatccgccgccgccacgccgggcggctacccgtgcaagcccccgaaggacgtgaccgccgacgacttccactacggcggcctcgccacccccggcacggcgctgaaacccttcaagatctccctgggctcggccgtcgtcaccacgttccccggcctgaacgggctgggcatctccgccgcgcggatggtgatggtcccgggcggcgtcgcgccgctgcactcccacccgggaggcaccgagctcatcttcgtcatcgagggcagcgtcgtctgcggcttcatcagcgccacgctcaacagggtgtacaccaagacgctgtacgccggcgacctgatggtgctcccgcagggccagctccacttccagtacagccacggcaacaccacggcggtgacgctgtcctcgttcagcagcgacaaccccggcctgcagatcctcgacttcgcgctcttcgccaacgacctgcccacggaggtcgtgaacaaggtgaccaacctggacgaactgcagatcgtcaagctcaaggcgctgttcggagggaggggctagacgcatatgtactccgtatataggaacagtcaacggtgttgatcattgaattgtgtgtattattctatactgctgtgatggatgtttgtcttgtcattctataaaataaattgtaacgcgcgcagcaggcgtgagagcgaatgtagctgccacatttgatgtactaatatttacatctccattgttgataataatacattattggccctaaaaaaaaaaaaaaaaacccgcggcctttgcccccgatcgcgctcagctttagaggtatctcaagcttccgcacgcgtgcatganacgtcata

SEQ ID NO: 113211 - DNA, 1002 bp, Zea mays
  Clone ID: MRT4577_34733C.1
aaacaactggtaactgttttataggtagcatttagttccggagccggttggaatggaacggctccgttccgggagcggctccattcaagagattttgaacagctaaatggttgaacatttaaatataattttctatcttaaaaccactccgttctacatataatcaatctaaacacaacaaattatgagccgagtggctctatcccagtatggagctgcgcgctcgcccccctgcgcggactatcgtgacaattttgcgacttcggggagaatttcgccgtcattcacgtaagatctctatactactatatttttccttccaaacggtatcgtcattatatacagcaggctttttatcatatacaagagacgcactctgtgcgcagcaatgatgcattggccgtatagcaaaacttggcctgaatgcacgtgtttctctatctctgtcggagtagactcctaatatccgcattcgatgtaccgtccgtcatcagttcatcacctcatggtccaattccgatgaacttcagaaggttgttttggggctccttccaatagaagccgtggatgaatatgggcaagatgttgcaagcgatcaggacgtatatcatcagcgcgtgcatccccatccattccatggcgacggtcggccgccgatacccgtagatgtcgaccagcgtgtagattccgcagaagaggagccctgcggcgccagcggtggctaaggtgtagcttagggtgtataatggcttgttcatgcgcagtccaaggaagtccatggcgaaggctaggaccagcatgctgaaggaagggattagccagttcattatcctctccctgtgtttctgaaaatgtacgatgacgtgtccgtattggagcccaatcaagcatgtgacaatggccatcacggaactaagaagcccttcagggtcgaagggggcctggcaccaagagggagcatcaggaggaagggggccattttgtggcgagtcgatgctgcat

SEQ ID NO: 113212 - DNA, 293 bp, Zea mays
  Clone ID: MRT4577_34734C.1
aaaaaattaatcaccaaattataataaaacacaaataaagtcgtattatctactaactcaacaccttaatcatacaaccactaactttcacatcacatcattactaaatctctttaaaacataccacacttttaattcctctaaccaacattataacatcctctactatacaacacactcatctaacatacctctaactattacacactcatacttctttatatccataatccttcctaccacaataactcctaaacataattacactcctaaaaacattagaacctcatata

SEQ ID NO: 113213 - DNA, 280 bp, Zea mays
  Clone ID: MRT4577_34735C.1
ggcggccatgagttgctgatttttgttgcccttcgtgaagcctagacgggggagatgaatttggatccagcagggtgcaacatgggagaagatgacggtcattatggaggttcatacaaggtgaccaaaggtttggcagctatgttctgtgatctacggttacttgatacccctatctgcgctaacttctttattgaaatgggcacttgatcacaaatgaatggtctgaggcctgttgtggaaggcatatacatgagatttcattttcttacctacaatc

SEQ ID NO: 113214 - DNA, 353 bp, Zea mays
  Clone ID: MRT4577_34736C.1
tcatggctcaccgctcagcgcgcgccgtgactcaccaccatctgctgcccgccccgcgaacgccagacccaatgctctagggcttgctgcgctaatggcgaggagcgagagggtgcggtgcaactactccaaggaggggggcggggggagcaccaatggcgcaggcgtgtccttgctcgctggagcgggcgcggcgaccactttgttggggtccgcgctggcgctagtggacgatcgcatgtccacggagggcacccggctgagcctttggctcaggaacaacttgctggggaggatactggtggggggctctgacctaatctgttttttctacaccatctacacctctgacc

SEQ ID NO: 113215 - DNA, 258 bp, Zea mays
  Clone ID: MRT4577_34737C.1
gggggccccaaaatcttttttggggtatttttaaaatccttaccgggcccccaaaatctggcacaagttttcaccatagtcccatccatcccggaacccgttttttttaccctttaattaatccccgcggggggttttttaaaacaacaaccattctttggggggccttgtaaaccttggggggtggggaatatatctgttttttgagcctttcaaattccttagcccaatataaacccccctttttgtcgggggggg

SEQ ID NO: 113216 - DNA, 1613 bp, Zea mays
  Clone ID: MRT4577_34738C.1
cggcgccggcctgccgctggcctgcggcctgccgctgctcgagtgcgtctactgcctcgcttgcgcgcgctgggcatggaagcgctgcctccacagcggcgaggtcgacagcgccacctggggcctcgcctccgccgacgacttcgagcccgtgccgcgcatgtgccgcctcgtcatggccaactacgaacccgatctctccccctccgccccgctcctcttcgcgccgcccggcggctacggcatcgaccccgcctgcgtcctccgccgccggacctacgccgacacacgcggccgcgtcacgccctacctcctctacctcgatcacgcccacgccgacatcgtcctcgcgctccgcgggctcaacctcgtcaaggagtccgactacgcgctccttctcgacaaccgcctcggcaagcgccgcttcgacggcggctacgtccacaacggcctcctcagggccgccggctgggtgctcgatgctgagtgcgacctcctcagggaactcctcgagacgtaccccgactacacgctcaccttcacgggtcattctctgggcgccggcatcgccgccatgctcaccatggtcgtcgtcctcaacctcgacaagattggcaacatcgacaggacccgcacacgctgctacgccatggcgccggccaggtgcatgtcgctcaacctcgccgtcagatatgctgacgttatcacctccgtgtccgggcaggacgacttcttgccccggacggctactcctcttgaagacattttcaagtcgatcctctgcttgccttgcctcctaggtttgagatgtttgagggatacatgtatacctgaagacgctatgcttaaggatccaaggaggctttatgcaccaggccggatttatcacatagtcgaaagaagaacgtgcaggtgcggaagatatccaccggtagtcaaaacagctgtgccggtggatggtagatttgagcacatagttctttcctgcaatgccacagcggaccatgccattatttggattgagagggaggcccagaaggctttggatctgatgctggaggaggagaacacgctggcagtgccgtcggagcagcggatggagcggaacgaaaccctgcagagggagcatgtggaggagcacagggccgctctgcgccgggccgtcacgctgtcggtgccagacgggcggcgaccgtcgccgtacggtacgtttgacgacgtggagcagcatcgccagcagccggagaggagcgagagcttcccgccggcggggcccaggcagcgcatgagctggaacgacctgatcgagcgagtgttcgacaaggacgaggacggccagatcgtgctgcgcagctcggttcttctctgacgggcggctgggccgttgtaaattcctttggtcttgtagctgtgctgcctctccctgtagtacccccatttttcctgtgttattattggttgttcaatgtaattccttcattcattgaagaggattctttttctcatgcgcggttcatttagcgacatcagctccgtgcagacaagttttgtgaataaattatcaaggtagagtagatcaatttttgaaaaaaatttcctgaaaactcttcaaa

SEQ ID NO: 113217 - DNA, 217 bp, Zea mays
  Clone ID: MRT4577_34739C.1
ggcatgcgccaccatgcccggtcggcttatgctttacaacatgaattgtttatttctggaatattgcacagaatatcggacctacaaggttagctgaggtagcagactacagaaagtgatgttgcagatagagggggaaagtgcgcctctgctgtagaataggtgtatgggtgatcagaagcaggtagctaaggggaagagaagttctgtgtgataa

SEQ ID NO: 113218 - DNA, 702 bp, Zea mays
  Clone ID: MRT4577_3473C.1
ggccccccctcgagtttttttttttttttttttttttttttttttttttttttttacctcaacccatgcacgattttttttatcgggcgcgaatcttttatcttttatataatcctccaaaacacgatgctaatttacaaagcacggccttcattgtttttttaaaaagcattaactaacgggtactacaggactacaaactctgtttcatcaacactgaccctccatgagtccgctcaacatcttcaatcacggcgcgtcgaccccgattgacctggcagcaaagctagctattcgacaggcgacaactctgggccggcggggtctctgctgctgctctggtatgtgccgctccacaatcccgagctagttgagccgccgctgctttccatgaaataatggaacgggttcacgggcgggacaatgggcatctccccctccagcatccgcaccacgctgttcatcgtcggccgcgccgacggctggaactgcacgcaccacagcgccaccttgcacatgatctccgccttctctctgtccgcccctccgacgatcccgtcgcaggagcaggacacgacgtgctcgatctcgccctgctcgtacttctcccacacccatctcgggaaccactccttgctctcgccctcaaggcaggggtcgtagttccggcgccgtcccaggatctcgaacagcaccatcccg

SEQ ID NO: 113219 - DNA, 1057 bp, Zea mays
  Clone ID: MRT4577_34740C.1
tacctttggcattgggtacctcgaggccggccgggggagccctatccttttccccactcccgggtctccagcattcctatcctctccccgcccgcccgtgccgccgccgccgccgcggcttcccttcctctcccgagccaagatgaatgttgaaaagctcaagaagatggcaggtgctgtgcgcaccggggggaagggtagcgtgcgcaggaagaagaaggcagtccacaagactacaaccacagatgacaaacggcttcaaagcaccttgaaaagaataggagtgaacagcattcctggtattgaagaggtcaacatctttaaggatgatgttgttattcagtttgtaaatcctaaagtgcaagcgtcaattggtgctaatacatgggtggtcagtggaactccacagacaaagaagctgcaagatctgcttccgtcgattatcaaccagcttggtcctgacaacctggacaatctgcggaggctcgcagagcaattccagaagcaggcctctggtgcttctggtgcagaggctggtgccagcgctggggctgttcaggacgatgatgatgacgttcctgagcttgtccctggagagacatttgaggaggccgcggaagagaaaaaggagtcctcatgattttgctacatgcctgctgttgttaaaccatgccattagaagggacctgttgagaactctgacctaccttatttgtgcctgtgggactggttatgtcatgatcgagaatttggtagggcgtgctggtgggattttacatgaagtatgcctcttttttttcatccatatctcccttgcttttgtgtggtaaaagtcctgttaatggtaaaggccacactttagaccaaatcaaggcaccgtgatgcatgaagataaatacaatatatcgattcaccttgcatttaaaaaaaaaaaaaaacggcccctaaaaaaaaaaaaaaaaaaaaaaaaaaaaaaaaaaaaaaaaaaaaaaaaaaaaaaaactcgggctttccctgggctgcagaaaatatatctttaagactaaaaaagttaaaa

SEQ ID NO: 113220 - DNA, 521 bp, Zea mays
  Clone ID: MRT4577_34741C.1
caagcacatcaactttatggccaaacaatatcacgggggcagaaggggggaccttactcccactaaagggggaaaaaaggggacttaggtatcacctacgacggcccagggggccggcatggtaaacaaagagcttcccctactcattatcaaaaaagacctaaatctacttctttggggcgggcaattccaacaatggggggttcccctatccatgggggcagcacaagggaaacagaagtccggttggccccggcaatttataaacaggcccccagattttggggaaacatacatccggcactgggggcaccttggccatttctcctgggcagaaggtttctaaagcataaaataattcccccccttctgggaatccccaagcttccaaaattcctggcactcgaccccatggggccagggcacagggcagggagcacaaaacagcctgggacaggggggacactctgtttcccggatcttggccgaatcatcatttagaaacagggccgagcattcct

SEQ ID NO: 113221 - DNA, 574 bp, Zea mays
  unsure (1)..(574): unsure at all n locations
  Clone ID: MRT4577_34742C.1
cccacgcgtccgagcctcccgagccctatccttttccccactctcgggtctccagcattcctatcctctccccggccgcgcgtgccgccgccgccgccgccgccgcggcttcccttcctctcccgagccaagatgaatgttgaaaagctcaagaagatggcaggtgctgtgcgcaccggggggaagggtagcgtgcgcatgaagaataaggcaagccacaagactacaaccactgatgacaaacggctacaaagcacctcgaaaagaataggagtgaacagcgttcctggtattgaagaggtcaacatctttaaggatgatgtggttattcagtatgtaaatcctaaagtgcaagcgtcaataggtgctaatacatgggtggtcagtggaactccgcagacacaaaagctgcaagatctgcttgcgtcggttatcaaccagcttgccactgaccacctgcacaatctgcggaggctcgcagagcaattgcagaagcaagcctatggtgctattggtgcagaagactttgtcaaccgctgngctgttcacgacgatgatgatgacgttcctgagc

SEQ ID NO: 113222 - DNA, 477 bp, Zea mays
  Clone ID: MRT4577_34743C.1
ctttgggctgatttatgtgcttgtatagatataagctgctgcaggtagtgagtcctctcttctctttatgtactgtgttaagggagagagagagactgttgtcttttcctctggtgctggcggcgtgggcgtttctttcttctgagtgagactcgctcggctatagactcactcgataaaacggcgaagactcgtcgtactggcgtcggtcacgctggcggtttaattacggttgctaccgtttctaagcgtttagataccgaagctgctgctgccgatactcttaagttttgtaccgaggttcggaatagcgatatttcgttaactcatgagttcggctctgacgacgccgcgaagtagcgtaggggtaggaattctcctcctagtatcgacgccgagaagtatgctgtcgaggtcgataccactcccgctctggcgaatatttttattaagatttgcgggtccggagtcggtaag

SEQ ID NO: 113223 - DNA, 950 bp, Zea mays
  Clone ID: MRT4577_34744C.1
gccggccaggcccgagccctatccttttccccactcccgggtctccagcattcctatcctctccccgcccgcccgtgccgccgccgccgccgccgccgcggcttcccttcctctcccgagccaagatgaatgttgaaaagctcaagaagatggcaggtgctgtgcgcaccggggggaagggtagcgtgcgcaggaagaagaaggcagtccacaagactacaaccacagatgacaaacggcttcaaagcaccttgaaaagaataggagtgaacagcattcctggtattgaagaggtcaacatctttaaggatgatgttgttattcagtttgtaaatcctaaagtgcaagcgtcaattggtgctaatacatgggtggtcagtggaactccacagacaaagaagctgcaagatctgcttccgtcgattatcaaccaacttgagcaattccagaagcaggcctctggtgcttctggtgcagaggctggtgccagcgctggggctgttcaggacgatgatgatgacgttcctgagcttgtccctggagagacatttgaggaggccgcggaagagaaaaaggagtcctcatgattttgctacatgcctgctgttgttaaaccatgccattagaagggacctgttgagaactctgacctaccttatttgtgcctgtgggactggttatgtcatgatcgagaatttggtagggcgtgctggtgggattttacatgaagtatgcctctttttttttttttcatccatatcttccttgcttttgtgtggtaaaagtcttgttaatggtaaaggccacactttagaccaaatcaaggtaccgtgatgcatgaagatgaataccacatatcaattcaccttccatttatttgtctgggctgcagaaaatatatctttactacatgatatgttaaaaacactatctgctaaattcttctttat

SEQ ID NO: 113224 - DNA, 246 bp, Zea mays
  Clone ID: MRT4577_34745C.1
tggtttttatttttctctttgtttttatcttttcttctttttctgagggggctttaaacaattgccttccctatctccctctatacaccctggggggaaaaaaataccccctagtgccaccccccttttcaagggactttctttttttctttaactcccccccctaaagggaacctctttagtttcttcccctgttttcttagatcgggaggtgcttttttttcaaaaaccccttgtaaaataact

SEQ ID NO: 113225 - DNA, 273 bp, Zea mays
  Clone ID: MRT4577_34746C.1
cccccccatatgaccttcggagcgggtagaagatgctgatcggcgacgtgtacgtgtctggccgagcgctcccccaatggccttttttgcggaagtatagatcttgttttctttcgaaaacctgacacgcgtatatgaaaaaaaattggatgctcgcccacacacgtagataaaagagaggatgctgtgtcgtgagaaaaggaaaataggtttgcgccctcttgcttgagcagaagctagtccttgttataaaaaaaaaccctgcgaggtgtt

SEQ ID NO: 113226 - DNA, 413 bp, Zea mays
  Clone ID: MRT4577_34747C.1
ctcttcactccctttcattctccctcgcctcacacgcacacgcacacttgttattctcaaaacacgcccaacttcgaatcaaattagggttaggggttccaactcccctcgaattatccctgtaatgcagtttaattcccgggtcctactaccatggagccatcagcaatgtacggacactcccagccccttagcatgccctcgcagatcggcggcggcgaaagcgacgacggctccggaaactagcactccgtctacggtcaccaccaccacattcagtacgaaacgcacgcgctcgaggacggtgccgccgacttcgtcgaggatgttacctaggatgcggtctatgtctccggcggaggaggccccgtagagtccagccagcttaccctgtcgtttcgtggccaagtgta

SEQ ID NO: 113227 - DNA, 423 bp, Zea mays
  Clone ID: MRT4577_34748C.1
tcggtctgggacaccgcggtgctgtcggcttaccctgagactttcgccaagaacctttatcgttttgtcatccactctcgctgggccatgctgttctcgttggtctgcgtgttcccggagctgctcgcccgcatctgcttcaagttcggctagtccctattttttatgtctcatttctcttatttttcatctttttttttcctttttcttctattttcttctttctttttcatcttttttatcttttttcttttcttaatttttacttctttcttttttcttcttacttttttattttttttttcttttgttttatttatttttttttttattctatattttatctttttttctttatcattattattctattttttttattctttttactttatattttttttatattttatttaatttttt

SEQ ID NO: 113228 - DNA, 276 bp, Zea mays
  Clone ID: MRT4577_34749C.1
cacacgccacgcagcgcacgcgacccacaaattacacgcgcggttagaggatggcgatgaagcgtccacttgggcaattgaccccaccagcgaccgctgctgcttcgtttctagctcgagagagtttagagggctgcttgattccgaagctccgagctcgagggattgaattgagcccccccaagatcagaatctggagcaacgggatttggcttcccgcttggtgcccctgattggagtacgcttcttttagggcggatgagaagctgctcggct

SEQ ID NO: 113229 - DNA, 217 bp, Zea mays
  Clone ID: MRT4577_3474C.1
gcggccacgagccccgcgtcggcgcgcgcgcgcgccgccgcctcgcgcagcagcgccccgcgcggcggcagcggcgcggacgacggcggcacgagctggaccgcgcccacgaccagcgtcacggccaggaggtgcggaaccaatcattatagcgggggggagttctgggtatgatgatatagtgatgaatatcctgtattaaaggatgtgtatttat

SEQ ID NO: 113230 - DNA, 2658 bp, Zea mays
  Clone ID: MRT4577_34750C.1
atgttctttatacctgaggagtttgttggtgacaacatccgggtggttagagattttccggatgtctttctagaggagttaccaggaatgccacctgatagagaagttgagtttgttattgatctcttacctggaaccgcccctatttctaaacggccgtataggatgtccgtagaggagttgaaggaactgaagaagcagttaactgaattacaagaagttgggtacattcgtccgagttcctcaccttggggagcaccggtcttgtttgtacagaagaaggatggatcgcagcggatgtgtgtggattatagatctcttaatgatgttacagtgaagaacaagtatccgttgccccgtattgaggatttatttgatcagatgagaggtgcaagagtattttcgaagattgatctccgatcgggataccatcagatgaggattagaccatcggatatccccaagacggctttctcgacccgatatggattatatgagttcatcaagctacaagataatcaactctacgccaagtacagtaaatgcgagttttggattggcaaggtgccatttcttggtcgtattatttctaatggaggaatttcagtggatcctgctaaagtcaaggagataatggagtggagagtacccactacggttacggagattcggagtttcttgggattaacaggatattatcggagatttattgaaggattttctaagattgctaagcctatgacttcacttttggagaaaggaaaagaatttaagtgggacgagaagtgtcaaaacagctttgatctattgaagaagaggttgatgtcgccaccgggcttaggatgtgtgctcatgcaagaaggacatgtgattgcctatgcatctcgtcagttgcggaagcatgaactgaactaccccactcatgacttggaactagcagcagttgtgcatgcacttaagatttggagacattatatcatggggaccaagtgccaagtatatacggaccataagagtttgaagtatatattcactcagaaggatctcaaccttaggcaacgtcgttggttggagcttattaagggttatgatttggagattcactatcacccgggcaaggcaaatttggttgcagatgccttgagtcgaaaggagcatgttcattcagttattgttgcccagctacccgatgagattgttgaggatttcaggagacttaacctggggatagttgctcatactgaaggagttactattgatgtggaacctactttggagcaagaaatccgcaaaggtcaacttgacgatgctaaaataaaagatattaaggagctgattactgaaggtcgaggtccggaattcacggaagatgagcagggcactatatggttcaaggatagaatgtgtgttcctgatattaaaagccttcgagagactatattgaaagaggcccatgactcggattattctattcatcctggtagtactaagatgtaccaggatttgaagcgaaagtattggtggtatggattgaaaagagatgtggctgcacatgtggctatgtgtgatgtatgtcaaagagttaaggctgaacaccagaggccagctggactattgcatccactgaagatacccgagtggaaatggaaagagattggtatggattttattactggattgcctcgcacccagaaaggatatgatgctatatgggtgattgtggatagattgactaaagtggctcactttattcctgtcaagactacttataaaggttctcagctagcagagttatatatggctcgaattgtgtgtttacatggagtaccaaagaagatcgtgtctgatcgaggttcgcagtttacctcaagattttggagaagctttcatgagaacatgagtacaaagttgaattttagtacggcttatcaccctcagactgatggacagactgaaaggactaatcaagtattggaagatatgttgagagcatgtgcccttcagcatggaggaagttgggataagagtctgccttatgctgagttctcgtataataatagttaccaggccagtctgcagatgtcaccttttgaagctttatatgggaggaagtgcaggactcctctatattgggatcagactggagagagacagttctttgggcctgaactgattcaagaagcagaagaacaagttcgtataattcgagagaatttgagagtggctcaaaccaggcaaaagagctacgctgataatagaagaagaccactggaattcgaagaaggagattatgtgtatctcaaggtgtcaccacttcgtggaatgaggagatttaaagttaagggcaaattgtcccctcgctatattggaccattcttgatctttaggagagttggagagatggcatatcaacttgagttacctgctagtctatcagatgtgcataatgtgttccacgtatctcaactcaagaagtgtctccgtgtccctgaggaacatttacccatggaagagctcggtgttcaaggtgatttgacttacacggaataccctatcaagattttggatactttgactcgagttacgaggaataaggcgtcggtgttggatcgtgcggccgagattgtaagatacctcttcggccgtgctttttgctaa

SEQ ID NO: 113231 - DNA, 343 bp, Zea mays
  Clone ID: MRT4577_34751C.1
tttggttagggcaaaaaccggagcccgaggtcctgtttatgcatacaagaaaacatggaactatctacacacgtactcatttcccaaacattatggaaccattgtacgcacacccccccgcaaaaaccctacctgcttgcgaaggttttgcgccctcccaccacaccatgaatcatttgggtggggcgaaacatattggccggcaccccgtggagcttcttaacatttcttccatttccggccggatgcttatcgacgactgcaagatcggcatgctgattgtcctgccaacgcacggaaccgccgtcgagcggctaatgatcttctggttggggttcatcag

SEQ ID NO: 113232 - DNA, 2832 bp, Zea mays
  Clone ID: MRT4577_34752C.1
atgggtagagaatttggagctactgctataatattagagtcaagcagtatagatctgatccttggtatgtcatggctaagaaaggcaaaggccgttatagcatgtggtagaggtaccgtagaactcactaccactaaaggagaaagatttcaagttaatattgcagtaacctcctcacccatgcgtgcaatgttctttatacctgaggagtttgttggtgacaacatccgggtggttagagattttccggatgtctttccagaggagttaccagggatgccacctgatagagaagttgagtttgttattgacctcttacctagaactgcccctatttctaaacggccatataggatgtccgtagaggagttgaaggaacttaagaagcagttaactgagttacaagaggctgggtacattcgtccgagttcctcaccttggggagcaccggtcttgtttgtacagaagaaggatggatcgcagcggatgtgtgtggattatagatctcttaatgatgttatagtgaagaacaagtatccgttgccccgtattgaggatttatttgatcagatgagaggtgctagagtattctcgaagattgatctccgatccggttaccatcagatgaggattagaccatcggatattcccaagacggctttctcgactagatatggattatatgagttcactgttatgtcgtttggattaaccaatgcactagcttattttatgaacttaatgaacaaggtgtttatggagtatttggacagattcgtcgtggtattcatcgacgatattcttatctattccaagagtgatagtgatcacgaggaacatctgaggatggtgctacagaagctacgggataaccagctatatgccaagttcagcaaatgcgagttttggattggcgaggtgccatttcttggtcatattatttctaatggaggaatttcagtggatcctgctaaggttagggagataatggagtggagagcacccactacagttactgagattcggagtttcttgggattagcaggctactatcggagatttattgaaggattctctaagattgccaagcctatgacatcgcttttggagaaaggaaaagaatttaagtgggatgagaaatgtcaagagagctttgatcaattgaaggagagattgatgacacctccagtgttggtaatgccagacttacagaaaggatttgatatctattgtgatgcatgtgaccaaggattgggatgtgtgctcatgcaagaaggacatgtgatcgcctatgcatcccgtcagttgcggaaacatgaattgaactaccccactcacgacttggaactagcagcagttgtgcatgctcttaagatttggagacattatattatggggactaagtgccaagtatatacggatcataagagtttggagtacatattcactcagaaggatctcaaccttaggcaacgccgttggttggagcttattaaggattatgatttggagattcactatcacccgggcaaggcaaatttggttgcagatgccttgagtcgcaaggagcatgttcatttagctattgttgcccagctacccgatgagattgttgaggatttcaggagacttaacctggggatagttgctcatactgaaggagtcactattgatgtggaacctaccttggagcaagaaatccgcaaaggtcaacttgaggatgctaaaataaaagagattaaggatctgattactgaaggtcgagttccggaatttacggaagatgagcaaggcactatatggttcaaggacaagatgtgtgttcctgatattaaaagccttcgagagactatattgaaagaggcccatgattcggattactctattcatcctggtagtactaagatgtaccaggatttgaagcggaagtattggtggtatggattgaaaagagatgtagctgcacatgtggctatgtgcgatgtatgtcaaagagttaaggctgaacatcagaggccagctggactactgcatccactgaagatacccgagtggaaatgggaagagattggtatggattttattactggattgcctcgcacccagaaaggatatgatgctatatgggtgattgtggatagattgactaaagtggctcactttattcctgtcaagactacttataaaggttctcaactagcagagttatatatggctcgaattgtgtgtttacatggagtaccaaagaagatcgtgtctgatcgaggttcgcagtttacctcaaggttttggagaagctttcatgagaacatgagtacaaagttgaattttagtacagcttatcaccctcagactgatggacagactgaaaggactaatcaagtgttggaagatatgttgagagcctgtgcccttcagcatggaggaagttgggataaaagtctaccgcaaaagagctatgctgataatagaaggaggccactggaatttgaagaaggagattacgtgtatctcaaggtgtcaccacttcgtggaatgaggagattcaaagttaagggcaaattgtcccctcgctatgttggaccattcttgatctttaggcgagttggggagatggcataccaactcgagttacccgctactttatcagatgtgcataatgtgttccaagtatctcaactaaagaagtgtctccgtgtccctgaggaacagttacccatggaagagctcagtgttcaaggtgatttgacttacacggagtacccgatcaagaatttggatactttgactcgagttacaagaaataaggtggtaaagatgtgcaaagtttaa

SEQ ID NO: 113233 - DNA, 266 bp, Zea mays
  Clone ID: MRT4577_34753C.1
agtaaccgtgcgttccatgcgggacctggtcgattccttatattgagtgactctacattgtatcgctcgtagccttcgtgctcggatctctcctgctgctctcactcgccatcagcgcattctcgcgtgtctttataacacttcacgccatcacggcattagtgccctgccgatttctgtaacagtgttctgtgctcgcaaccatcataacatttgagcctgagcttatggttgggtcaacttgtcgaatcctggggtaccgactc

SEQ ID NO: 113234 - DNA, 2002 bp, Zea mays
  Clone ID: MRT4577_34754C.1
tcaaggttgtctagaaaagagttcagggtatctggctttcaaatcatcttctctttcccaggttgcttcttcttctgagtgatggccccatttgactttgcacatcctgatggtacttctctgagtgacccgatctgctgtttccagaatttgagttggcttctcaatatatgttagatcttcttgaacttcaagatcctttgttggcaactgttcttctggcactcttaagcatttcttcagctgagacacatggaacacatcatgcacagctgacagattctttggtaaactgagttgatatgccacttctccacgccttgcttgaatctggtacggtccgatgtatcgaggtgctagcttgcctttgactctgaaccttttgattcctctgattggtgacacctttaagtagacatagtctcctacttcaaaacttagttctcttcttcgggtgtcagcataacttcgctgtctggactgtgctgccttcagattctctcggaccattctgatgttatcttcggcttcaagcaaaatatctggaccgaacacctgcctttcatcgggttgatcccaatgcaatggagtcctgcaattcctcccataaagcgcttcaaatggtgacatcttcagactggcctaagaactcagcataaggtagactcttgtcccaacttcctccatgctgaagggcacatgctctcaacatatcttccaatacttgattaattctttcagtctgtccatcagtctgagggtgataagctgtactaaaattcaacttcgtactcatattctcatgaaagcttctccaaaatcttgaggtaaactgtgaacctcgatcagacacgatcttctttggcactccatgcaaacacacaatccgagccatatataactctgctagctgagaacctttataagtagtcttcacaggattaaagtgagccactttagtcaatctatccacaatcacccatatagcatcatatcctttcacatcaatagtaactccttcagcgtgagcaactatccccaggttaagtctcctgaaatcctcaacaatctcatcgggtagctgggcaacaacagctgaatgaacatgctcctttcgactcaaggcatctgcaaccaaattcgccttgcccgagtgatagtgaatttccaaatcataatccttaataagctccaaccaacgacgttgcctaaggttgagatccttttgagtgaatatatacttcaaactcttatgatccgtgtacacttgacacttggttcccataatataatgtctacatctcttaagtgcatgcacaacggctgccagttctaagtcatgagtggggtagttcagctcatgtttccgtaactgatgagacgtgtaggcgatcacatgtccttcttgcatgagcacatatcctaagcctccattagaaatgatatgttcaaggaatggcacctcgtcaatccaaaactcgcatttactgtacttggcatagagttgattatctcgtagcttttgtagcaccaatctcagatgttcctcataatcactatcactcttggaataaaaatattgtcgatgaaaaccacgacgaatcatatcgggtcgagaaattgtcttgggaatatttgatggtctaatcctcatctgatggtaaccgaatcggagatcaatcttcgaggatactctagcacctctcatctgatcaaataaatcctcaatacggggcaacggatacttgttcttcaccgtaacatcactaagagatctataatccacacacatccgctgtgatccatccttcttctgtacaaacaagaccggtgctccccaaggtgaggaactcggacgtatgtacccagcctcttgtaactccgttaattgtttcttaagttcctttaactcttctacagacatcctatatgaccgtttggatataggggtagttccaggtaggagatcaataacaaactcaacttccctatctagtggcat

SEQ ID NO: 113235 - DNA, 337 bp, Zea mays
  Clone ID: MRT4577_34755C.1
aacacgcgtactcccacgcgtcctggcactcgtccggctaattgactagacatgagagtgcggatcaggtatatgatacgagacagagaggcatttacgatgattgagagctgcatggtcatcatggatatgatccagggctgcacgaaacgcgcatttaagatcctatgggctacgtacatgacatcagcatgcacatgtaaccatgagatgtataggataggtcagattaacctaatctatgatcatatatactagaatacctgaacaaatcttaagatcttgctaaacaactgtatcctttacataaaccattacacgatgcacgatcatcaca

SEQ ID NO: 113236 - DNA, 2121 bp, Zea mays
  Clone ID: MRT4577_34756C.1
atggctacccctataatgttagaagagagcagtatagacgtgatccttgtaactacctccaccagactagcggcattcttagtagatgggaagtttgttggtgtcaacatccgtgtggttagagatttttcagatgtcttcccagaagagttaaagggactaaagaagcaattaatggaattacaagaggctgggtacattcgtttgaattcctcaccttggggagcgtcggttctgtttgtacagaaaaaggatggatcgcagcggatgtgcgtggattataggtcccttaacaatgtcactatgaagaacaaattcgtcgtggttttcatcgatgatactcttatttattccaagagtgatagcgatcatgaggaacatctaaggttggtgctacagaagctacgagataaccagctatatgccaagttcagcaagtgcgagttttggattggcgaggtgccatttcttggtcatattatttctaatggaggaatttcagtggatcctgctaagaaaggaagagaatttaagtgggacgagaagtgccaagacagctttgatcaattgaagaagagattgatgtcgccaccaatgttggttatgccagacttacagaaaggatttgatatatattgtgatgcatgtggccaaggcttaggatgtgtgctcatgcaggaaggacatgtgatcgcctatgcgtctcgtcaattgcggaaacacgagttgaactaccccactcatgacttggaactgacagtcgttgtgcacgcacttaagatatggagacattacattatgggaactaagtgccaagtatacacggatcataagagtttgaagtatatattcactcagaaggatctcaaccttaggcaacgccgttggttggagctcattaaggattatgatttggagattcactatcagccaggcaaggcaaatttggttgcagatgccttgagtcggaaggaacatgttcactccgcttttgttgtccagctacctgatgaattagcaaaagactttgagagactcaatttgggagttgttactcatactaaaggagtcaccatcgagttggaacctaccttggagcaagagattcgtaaaggtcaggttggtgatgctaagattcaagagattaaggatctgattacggaaggtcgagttccaggattcacggaggatgagcaaggtactatatggttcaaagatcggatatgtgttccggagatcgatagcctccgtgaggctatattgaaagaagctcatgattctgattactccatccaccctggaagcactaagatgtatcaaaatttgaagcaaaagtattggtggtatggactgaaaagagatgttgctgcccatgtggctaagtgtgatgtgtgtcaaagagttaaggctgaacatcaaagacccgttggactattgcacccattgaagatacccgagtggaagtgggaagagattggtatggattttattactggattgcctcacacccagaaaggatatgatgctatatggttaccaggccaatctgaagatgtcactgttcgagactctatatggcaggaaatgcaggattcctctacattggatcagactgggggaagacagttctttggatctaaacttattcaaggggcgaaagaacaagtccgtataattcgggagaatttgagaattgcacaatcaaggcagaagagctatgctgataataggagaagactactggagtttaaggagggtgatcacgtgtatctgaaggtgtcaccaatccgggtttttaggcgagttggggagatggcataccaactcgagttacctgatagtctatcggatgcgcataacgtgttccacgtatctcagctaaggaagtgtctccgtgtccctgaggaacggttaccgatggaagagctcagtgttcagggtgatttgacttacacggagtatccgatcaagattcttgatactttgactcgagttataagaaataaagcgataaagatgtgcaaagtacaatggagtcaccatgatgaagatgaagcaacttgggaaagagaagaaaagcttcgcatagattttccccatcttttccctcgttctccttaa

SEQ ID NO: 113237 - DNA, 2328 bp, Zea mays
  Clone ID: MRT4577_34757C.1
atgggctacccctatagtgttagaagagagcactatagacgtgatccttgttccaaaggagaaagatttgaagttggaattgcagtaactaccgccaccagactagcgacattcttagtagatgggaagtttgttggtgtcaacatccgtgtggttagagattttttggatgtctttccagaggagttaccagggatgccaccagatagggaagttgagtttgtcatggatctcttacctgggactgctcctaattctaaacggccatacatgatgtccatagaagagctaaaggaacttaagaagcaattaatggaattacaagaggatgggtacattcgtccaagatattatcggagatttattgaaggattttctaagattgctaagcctatgacttcgcttttggagaaaggaagggaatttaagtgggatgagaagtgccaagacagttttgatcaattgaagaaaagattgatgtcgcccccagtattggttatgccggacttacagaaaggatttgatatctattgtgatgcatgtggccaaagcttaggatgtgtgctcatgcaggaaggacatgtgattgcctatgcttctcgtcagttacgcaaacatgaactgaactaccccacgcatgacttggaattggcagccgttgtgcatgcgcttaagatttggagacattatatcatggggaccaagtgccaggtatatacggatcataagagtttgaagtatatattcactcagaaggatctcaaccttaggcaacgctgttggttggagcttattaaggattatgatttggagattcactatcacccgggcaaggcaaatttggttgcagataccttgagtcgcaaggagcatgttcattcagctattgttgcccagctacccgatgagagtgttgaggatttcaagagacttaacctggggatagttgctcatactgaaggagttactattgatgtggaacctaccttggagcaagagattcgtaaaggtcaggttggtgatgctaagattcaagagatcaaggatcttattactgaaggtcgagttccggaatttaccgaagatgagcagggcaccgtatggttcaaggacaggatgtgtgttcctgatattaaaagccttcaagagactatattgaaagaggcccacgactcagattattctattcatcctggtagtaccaagatgtatcaggatttgaaacggaagtattggtggtatggattgaaaagagatgtagctgcacatgtggctatgtgtgatgtatgtcaaagagttaaggctgaacaccagaggccagctggactattgcatccactgaagatacccgagtggaaatgggaagaaattggatatgatgctatatgggtgattgtggatagattgactaaagtggctcactttattcctgtcaagactacttataaaggttctcagctagcagagttatatatggctcggattgtgtgtttacatggtgtgccaaagaagatcgtgtctgatcgaggttcacagtttacctcaagattttggagaagctttcatgagaacatgagcacaaagttgaatttcaatacggcttatcaccctcagactgatggacagactgaaaggactagtcaagtattggaagatatgttgagagcatgtgcccttcagcatggaggaagttgggataaaagtttaccttatgctgagttctcttataataatagttatcaggccagtctgaaaatgtcaccttttgaagctttgtatggaaggaagtgcaggactcctttgtattgggatcagactggagaaagacagttctttgggcctgaacttattcaagaggcagaggaacaagtctgtataatcaaggagaacttgagggtagctcggaccaggcaaaagagctacgctggtaatagaagaagaccaatggagtttgaggaaggtgatcatgtgtacctcaaggtgtcaccacttcgtgggatgaggagatttaaagttaaggacaaattgttccctcactttattggaccatttagagtttttaggcaagttggagagatggcctatcaactcgagctaactgataatctatccgatgtgcataatttattccatgcgtctcaacttaagaagtgtctccgtatacctgaggaacagttaccaatggaagagcttaacgttcagggtgatttgacgtacacggagtacccgatcagatttcttgatacattgacccgatttacaaggaataaagtggtaaagatgtgcaaagttcaatggagctaccacggagaagatgaagcaacgtag

SEQ ID NO: 113238 - DNA, 813 bp, Zea mays
  Clone ID: MRT4577_34758C.1
ttaagaagaacgagggaaaagatggggaaaatctatacaaagctcttcttctttttcccaagttgcttcatcttcaccgtggtgactccattgtactttacacatatttatcaccttatttcttgtaactcgagtcaatgtatccaaaatcttgatagggtactccgtgtaagtcaaatcaccctgaacactgagctcttccatgggtaactgttcctcgggaacacggagacacttcttcagttgagatacgtggaacacattatgcacatccgataaagtagcaggtaactcgagttggtatgccatctccccaactcgcctaaagatcaggaatggtgcaatatagcatggggacaatttgcccttgactttaaatctcctcattccacgcagtggtgacaccttgaggtacacatagtctccttcctcaaattccagtggtcttcttctattatcagcatagctcttttgcctggtttgagccactctcaaattctctcgaattatacgaacttgttcttctgcttcttgaatcaattcaggcccaaagaattgtctctctccagtctgatcccaatatagaggagtcctgcacttcctcccatataaagcttcaaaaggtgacattttcagactggcctgataactattgttgtatgagaactcagcatacggtagacttttatcccaacttcctccatgctgaagggcacatgctctcaacatatcttccaatacttgatttgtcctttcagtctgtccatcagtctgggggtgataagccgtactgaaattcaactttgtactcat

SEQ ID NO: 113239 - DNA, 4113 bp, Zea mays
  Clone ID: MRT4577_34759C.1
atgctgaatattgcacaatgcactgatcgggagaaggttttatatgcttctggacgtctgacaggtcctgctgctgactggtgggattcatatactgctgcccacgatgctgctgatactatcacttgggcagagttcagtacacaattcaggaactaccatattccagctggtatgataaagatcaagaagaaggagtttctgtcgctaaagcaaggaagtatgtcagtcagcgagtaccgcgacaagtttattcagttatccagatatgcccctgaagaagttgctgaagacgagaggaagcaggagcattttattgaaggacttaatggaccactgcagtatgctctagtggcacacacatttccatcatttcagagactgttagataaggctcttgctattgaacacaagcgtgttcagctgggagatttgaagagaaaggcaatatctcaaggacaaggaagcagcagtgttcgtcctcgctacagttcaccacagagtacaccgactcgaccaggaggaccacgcccagttcagcaatcaccactgaggactccacctcctcgacaggctacccctactggcaccccgacgaagttttcaggacagagtccaggcaccacatgtttcaagtgtgggaagaatggtcattatgcaaatgtctgcccacagaggatggctactactccagttcagaacaggcagcaaacaccaggttctggcaagggatattctattgccaaggttaatcaagtcagcgttgatgctactccggatggaggggacctcgtaattggtatgttttatgttaatgcaattcctgcaaccatattatttgattctggtgctacacattcattcatgtctgctcgttatgccaacacaaatgaaataccactgctaaatatgagaaaaccaatgatagtagtcacacctaaagggcctgttgaggcgaatcaaatgacacgtagattgacattgaccattatgggtagagaatttggagctactgctataatattagagtcaagcagtatagatctgatccttggtatgtcatggctaagaaaggcaaaggccgttatagcatgtggtagaggtaccgtagaactcactactactaagggagaaaggtttcaagttaacattgcagtaacctcctcacccatgcgtgcaatgttctttatacctaaggagtttgttggtaacaacatccgggtggttagagattttccggatgtctttccagaggagttaccagggatgccacctgagagagaagttgagtttgttattgacctcttacctggaaccgcccctatttctaaacggccctataggatgtccgtagaggagttgaaggaacttaagaagcagttaactgagttacaagaggctgggtacattcgtccgagttcctcaccttggggagcaccggtcttgtttgtacagaagaaggatgaatcgcagcggatgtgtgtggattatagatctcttaatgatgttacagtgaagaacaagtatccgttgccccgtattgaggatttatttgatcagatgagaggtgcaagagtattttcgaagattgatctccgatcgggataccatcagatgaggattagaccatcagatattcccaagacggctttctcgactcgatatggattatatgagtttactgttatgtcgtttggattaaccaatgcaccagcttattttatgaacttaatgaacaaggtgtttatggagtatttggacagattcgtcgtggtattcatcgacgatattcttatctattctaagagtgatagtgatcacgaggaacatctaaggatggtgctacagaaactacgagataaccagctatatgccaagttcagcaagtgcgagttttggattgacgaggtgccatttcttggtcatattatttccaatggaggaatttcagtggatcctgctaaggttaaggagataatggagtggagagtacccactacagttactgagattcgaagtttcttgggattagcaggctattatcggagatttattgaaggattttctaagattgctaaacctatgacttcacttttggagaagggaaaagaatttaagtgggacgagaagtgtcaagacagctttgatctattgaagaagaggttgatgtcgccaccagtattggttatgccagacctacagaaaggatttgatatctattgcgatgcatgtggccaaggcttaggatgtgtgctcatgcaagaaggacatgtgattgcctatgcatctcgtcagttgcggaagcatgaactgaactaccccactcatgacttggaactagcagcagttgtgcatgcacttaagatttggagacactacattatggggactaagtgccaagtatatacggatcataagagtttgaagtatatattcactcagaaggatctcaaccttaggcaacgccgttggttggagcttattaaggattatgatttggagattcactatcacccgggcaaggcgaatttggttgcagatgccttgagtcgcaaggagcatgttcattcagctattgttgcccagctacctgatgagattgttgaggatttcaggagacttaacctggggatagttactcatactgaaggagttactattgatgtggaacctactttggagcaggagatccgcaaaggacaaattggtgatgctaaaataaaagagattaaggatctgattactgaaggccgagttccggaattcacggaagatgagcaaggcattgtatggttcaaggatagaatgtgtgttcctgatattaaaagccttcgagagattatattgaaagaggcccatgactcggattactctattcatcctggtagtactaagatgtatcaggatttgaagcggaagtattggtggtatggattgaaaagagatgtagctgcacatgtggctatgtgtgatgtatgtcaaagagttaaggctgaacatcagaggccagctggactattgcatccactgaagatacccgagtggaagtgggaagagattggtatggattttatcactggattgcctcgcacccagaaaggatatgatgctatatgggtgattgtggatagattgactaaagtggctcacttcattcctgtgaagactacttataaaggttctcagctagcagagttatatatggctcggattgtgtgtttacatggagtaccaaagaagatcgtgtctgatcgaggttcacagtttacctcaagattttggagaagctttcatgagaatatgagtacaaagttgaattttagtacggcttatcaccctcagactgatggacagactgaaaggactaatcaagtattggaagatatgttgagagcttgtgcccttcagcatggaggaagttgggataagagtctgccttatgctgagttctcatataacaatagctatcaggccagtctgaagatgtcaccttttgaagctctatatgggaggaagtgcaggactcctttgtattgggatcagactggagagagacagttctttgggcctgaattgattcaagaagcagaagaacaagtccgtataattcgagagaatttgagagtggctcaaaccaggcaaaagagttatgctgataatagaaggaggccactggaatttgaagaaggagattatgtgtacctcaaggtgtcaccactgcgtggaatgaggagattcaaagttaagggcaaattgtcccctcgctatattggaccattcttgatctttaggcgagttggggagatggcataccaactcgagttacctgctagtctatcggatgtgcataatgtgttccatgtgtctcaactgaagaaatgtctccgtgtccctgaggaacagttaccgatggaagagctcagtgttcaaggtgatttgacttacacggagtacccgatcaagattttggatactttgactcgggttacgagaaataaggtgataaagatgtgcaaagttcaatggagccaccacggtgaagatgaagcaacttgggaaagagaagaagagcttcgcgtagattttccccaccttttccctagatcttcttag

SEQ ID NO: 113240 - DNA, 605 bp, Zea mays
  Clone ID: MRT4577_3475C.1
ttcgtgcaacaccttgttttttttcattaacaccaattatgagacaacaatgtggtgatcgatactcccttacattttttttctttcttttatttttttgttgggccaaattttgagggccttttaaacccattcccaaaaacccaatttttcataaaccgtttttgggaaaaagatccttgtttgtcttatcaaactttttcttgcactgtttttcaggaggcgtgttctttaccataagccacctccctgatcagaggctcgtgtttcatcttttcaactttagcttccatgccgagaacaaaaacctcccttctcagaggatacaaccccttttgctttttgtgggggattttttttaaaaaacatttttttgggactaaaaaaaaaaaaccttttgggggctttccaaattcaaaaattgggggaaacccccccggttttttttttgggtgagaagcctactcactgaactgagttgttaaatttgcaataattacaaatacaaggctcttatatggaataagacaaaaattatttttaaaaaattccgcgcttgccataaccaacctttattgcaagctgagcaaggactttttgggcct

SEQ ID NO: 113241 - DNA, 162 bp, Zea mays
  Clone ID: MRT4577_34760C.1
gtccggtagattcgcgactggtttcctctagggcttagttctgttggcaaggcctcaatttagcgagatgtttagtcatgagttgcgcacacactataccaacctcccaagtacaaagcataccagtatattttgtgggtagtggcactcgtctagctgtta

SEQ ID NO: 113242 - DNA, 1455 bp, Zea mays
  Clone ID: MRT4577_34761C.1
tcagtatgagcaactatccccaggtttaagtctcctgaaatcctcaacaatctcatcgggtagctgggcaacaatagctgaataaacctgctcctttcgactcaaggcatctacaaccaaattcgccttgtccgggtgatagtgaatttccaaatcataatccttaataagctccaaccaacggcgttgcctaaggttgagatccttctgagtgaatatatacttcagactcttatgatccgtatatacttggcacttggtccccatgatataatgtctccaaatcttaagagcatgcacaactgctgctagttccaagtcgtgagtggggtagttcaattcatgtttccgcaactgacgagaagcgtaggcaatcacatgtccttcttgcatgagcacacatcctaagccttggccacatgcatcaaaataaatatcaaatcccttctgtagatctggcataacccatactggtggtgacatcaacctcttctttaattgatcaaagctgtcttggcacttctcgtcccacttaaattctcttcctttctccaaaagcgaagtcataggcttagcaatcttagaaaatccttcaataaatctccgataatatcctgctaatcccaagaaactccgaatctcagtaactgtagtgggtactctccactccattatctccttgactttagcaggatccactgatatccctccattagaaataatatgtctgagaaatggcacctcaccaatccaaaactcacatttactgaacttggcgtagagttgattatctcgtagcttcagtagcaccaatatcagatgttcctcatgatcactatcactcttagaatagataaggatatcgttgatgaatactacgacgaatctgtccaaatactccataaacaccttattcatcaaattcataaaatagggatccatctttcttctgtacacacagatccggcgctcccaaggtgaggaatccgaacgaatgtacccaacttcttgtaattccattaattgcttcttaagttcctttagttcttctacggacatcatgtatggccgtttaggaataggggcagtcccaggtgagagatcaatgaccaactcaacttctatatctggtggtatccctaataactcctttggaaagacatccggaaaatccttaactgcacgaatgttgtcacccaccaacttctcatctactaagaatgccgctagtctgatggtggtagttactgcaacttcaacttcaaatccttgtcctttggaactggtgagttctacggttcccttagcacagtgtataaactgtctttgcctttcacgcaacccgacagtcgagtggcccatacggtagcctcccagacacgaattgctccaccacggcttgcagattgcgtgcgcctgggaatagccgcaagcggcccgccgcttttcacccat

SEQ ID NO: 113243 - DNA, 247 bp, Zea mays
  Clone ID: MRT4577_34762C.1
acgcctacattctccttactgccacatactacagttgtatctctcccgattattctactaacacccgcccgctttaaaaaggggaggctgctataactaaaaaacttctataagatttaccccatcaattttgctcccatgataattatccctctattctacaaaacaggggatgattcttacaccctgtgcctaaccccccatcatctctacaccttccaccttccaaccaatgttagtgatatca

SEQ ID NO: 113244 - DNA, 4485 bp, Zea mays
  Clone ID: MRT4577_34763C.1
ttaagatgaactagagaaaaggtggggaaaatctatacgaagctcttcttctctttcccaagttgcttcatcttcactgtggtgactccattggactttgcacatctttatcaccttatttcttgtaactcgagtcaatgtatccaaaatcttgatcgggtactccgtgtaagtcaaatcaccttgaacactgagctcttccaagggtaactgttcctcgggaacacggagacacttcttaagttgagacacatggaacacattatgcacatccgatagactatccggtaactcgagttggtatgccatctccccaactcttctaaagatcaagaatggtccaatatagcgaggggacaatttgcccttaactttaaatctcctcattccacgcagtggtgacaccttgaggtacacataatctccttcttcaaattccagtggcctccttctattatcagcatagctcttttgcctggtttgagccactctcaaattctctcgaattatacgaacttgttcttctgcttcttgaatcagttcaggcccaaagaactgtctttctccagtctgatcccaatatagaggagtcctgcacttcctcccatataaagcttcaaaaggtgacatcttcagactggcctgatagctattattataagagaactcagcataaggtagacttttatcccaactccctccatgctgaagggcacatgctctcaacatatcttccaatacttgattagtcctttcggtctgtccatcagtctgagggtgataagctgtactgaaattcaacttcgtgctcatgttctcatgaaagcttctccaaaatcttgaggtaaactgcgaacctcgatcagacacgatcttctttggtactccatgtaaacacacaatccgagccatatataactctgctagctgagaacctttataagtagtcttgacaggaataaagtgagccactttagtcaatctatccacaatcacccatattgcatcatatcctttctgggtgcgaggcaatccagtaatgaaatccataccaatctcttcccatttccactcgggtatcttcagtggatgcagtagtccagctggcctctggtgttcagccttgactctttgacatacatcacacatagccacatgtgcagccacatctctcttcaatccataccaccaatactttcgcttcaaatcctggtacatcttggtactaccaggatgaatagagtaatctgaatcatgggcctctttcaatatagtctctcgaaggcttttaatatcaggaacacacattctatccttgaaccatacagtgccttgctcatcttccgtgaactccggaactcgaccttcagtaatcagatccttaatctcttttattttagcatcaccaatttgtcctttgcggatctcctgctccaaagtaggttccacatcaatagtaactccttcagtatgagcaactatccccaggttaagtctcctgaaatcctcaacaatctcatcgggtagctgggcaacaatagctgaatgaacatgctccttgcgactcaaggcatctgcaaccaaattggccttgcccgggtgatagtgaatctccaaatcataatcctttataagctccaaccaacgacgttgcctaaggttgagatccttctgagtgaatatatacttcaaactcttatgatccgtatatacttggcacttagtccccataatgtagtgtctccaaatcttaagtgcatgcacaactgctgctagttccaagtcatgagtggggtagttcagttcatgcttccgcaactgacgagatgcataggcaatcacatgtccttcttgcatgagcacacatccaagtccttggccacatgcatcacaataaatgtcaaaccccttctgtaggtctggcataaccaataccggtggcgacatcaacctcttcttcaatagatcaaagctgtcttgacacttctcgtcccacttaaattcttttcccttctccaaaagtgaagtcataggcttagcaatcttagaaaatccttcaataaatctccgataatagcctgctaatcccaagaaactccgaatctcagtaactgtagtgggtactctccactccattatctccttaactttagcaggatccactgctattcctccattagaaataatatgaccaagaaatggcacttcgccaatccaaaactcgcacttgctgaacttagcatagagttgattatctcgtagcttctgtagcaccatcctcagatgttcctcgtgatcactttcactctgagaataaataagaatatcgtcgatgaataccacgacgaatctgtccaaatactccataaacaccttgttcattaagttcataaaataggctggtgcgttagtcaatccaaacgacataactgtgaactcatataatccatatctagtcgagaaagccgtcttgggaatatccgatggtctaatcctcatctgatgataaccggatcggagatcaatcttcgagaatactcttgcacccctcatctgatcaaataaatcctcaatacggggcaacggatacttgttcttcaccgtaacatcattaagagatctataatccacacacatccgttgcgatccatccttcttctgtacaaacaagaccggtgctccccaaggtgaggaactcggacgaatgtacccagcctcttgtaactcagttaactgcttcttaagttccttcaactcctctacggacatcctatatggccgtttagaaataggggcggttccaggtaagaggtcaataacaaactcaacttctctatcaggtggcatccctggtaactcctctggaaagacatccggaaaatctctaaccacccggatattgtcaccaacaaactcctcaggcataaagaacattgcacgcatagatgaggatgttactgcaatattaacttgaaacctttctcctttagtagtagtgagttctacggtacctctaccacatgctataacggcctttgcctttcttagccatgacataccaaggatcaaatctatactgcttgactccaatattatggcagtagctccaaattctctacccataatggttaatgtcaatctacgtgtcatttggttcgcctcaacaggccctttaggtgtaattactatcaggggttttctcatgtttagcagtggtatttcatttgtgttggcatatctagcagacatgaatgaatgtgtagcaccagaatcaaataatatggttgcaggaattgcattaacataaaacataccaagtacgaggtcccctccatccggagtagcatcaacgctgacttgattaactttggcaatagaatatcccttgccagttcctggagtttgctgcttgttctgaactggagtagtagcaatcctctgtgggcagacatttgcataatgacccatcttcccacacttgaaacattgagtgcccggactctgtcctgcaaacttcgtcggggtgccagtaggggtagcctgccgaggaggtggagtcctcagtggtgattgcggaactgggcgtggtcctccgggtcgagtcggtgtaccctgtggtgagctatagcgaggacgaacaatgctgcttccttgtgcttgagatattgcctttctcttcaaatctcccagctgaacacgcttgtgttcaatagcaagtgccttatccaacagtctctgaaatgatggaaatgtgtgtgccactagagcatactgcaggggtccattaagtccttcaataaaatgctcctgcttcctctcgtcttcagcaacttcttcaggggcatatctggataactgaataaacttgtcgcggtactcgctgactgacatacccccttgcttcagcgatagaaattccttcttcttgatctttatcatcccagctggaatatggtagttcctgaactgtgtactgaactctgcccaagtaatagtatccgcagcatcatgggcagcagtataagaatcccaccagtccgcagcaggaccagtcagacgtcccgaagcatataaaaccttctcccgatcagtgcactgtgcaatattcagcatcttctcaacagacttcagccaatcatccgcgtccagtggatcaggtgagctagcgaatgtaggtggcttatgactcatgaactctctatgcttgtcccggggtggaactggtggtggtggtggaggcagtggcacttgttgctgctgttgctgttgttgttgctgctgttgtgccctcctttcctggcgtatctcatcccgctcctggcgcaactcttgccgtatatcttctctttcctgacgcatctcttggcgttcctgctgcatctgggcacgcatatcagccatagtgtctgccatttgctgcatcaccgccatctgagcagcaaccagtgggtcaactccgcctggtggaggattaggaggatccat

SEQ ID NO: 113245 - DNA, 389 bp, Zea mays
  unsure (1)..(389): unsure at all n locations
  Clone ID: MRT4577_34764C.1
attcttacgcggcgcaggcgcaggcacaggtttttagcgctgatcgcaggtcaaggacgctagtggggcacctgctgccttgcttctcacgaagagcagaagtagacactgnctgtcaccttgacggttgaatcgttcctcaccatggttgtccagggatccgtacgtctattggcgtactggaagaggccccggaggaccccatcctcggagtgactcactgcctacaccaaggatcccagtcccatgaaggcaaacctaggggcaggcgcctaccgacaccaaggaagggaagactgtagtgctgaacgtgggcaggcgcaccgagcaaatgttgagcaataatccagcaacgtgtaaggaacacctaccaatcaccggcctggctg

SEQ ID NO: 113246 - DNA, 353 bp, Zea mays
  Clone ID: MRT4577_34765C.1
gatgaagggtggtagaacgatcaaacaccgtggatcggagaacgaggtgagggagtttggcgcgcgcgcggcagtggcgagggagataggggtcggtgacgggcgatggccagcaggagtagccgagtaggtaagcagcattggccgggttttcgcgtatccatcttgttgttaaccagctggggtgcaatggcgccccaccactttcatatatgctccagtttgattatattttctccatgacaaaacaagagtgctagctggggcatcgagagtagtactagaattgacatgtattagtaacattattacctttgtcaccgttccattaattgcaagatttttattaagag

SEQ ID NO: 113247 - DNA, 260 bp, Zea mays
  Clone ID: MRT4577_34766C.1
cattcagaaaacggccagggatttcaccgccagctttacacaatcaaaccgacgggctggggttttatcccaatcgtagagtccacgggagtaattcgtacaatcgggggagccgccccttcgggccgggggtcgtccttgcttttccggggttccgttgccggggggaagacatgaactctgaagcgaggaggcgggggtccctgctcctaaaatttggtccttgagcttatcgcccttgtcaactgggttggcgcgcc

SEQ ID NO: 113248 - DNA, 122 bp, Zea mays
  Clone ID: MRT4577_34767C.1
cgctatttgaattgtatcgagcagaacaatagggggaacaggtgaggatatgtcgcgagcaccagcatatgtaatagaaaggagcagccacggaattgacatataaagatagtttacaaagt

SEQ ID NO: 113249 - DNA, 176 bp, Zea mays
  Clone ID: MRT4577_34768C.1
gtctgtattgggggacaagtcacttattccttgttatggcagaaagaagtgtggccatgtattaatcaacaagtgtgagagtggcctacaaatcgaaaacaaaaactccaactttcacaactccgggtcagttgaaacattaccttcactatagggagaaccatcacggttggcgg

SEQ ID NO: 113250 - DNA, 327 bp, Zea mays
  Clone ID: MRT4577_34769C.1
cctgcagtcatctcctgtactatcttcaccatgttcaacagctgccagctcgcgaaaatgatggagagccgcagcatggcatcatcggctgtgctcttggtgctagcccttgcgcgagtggcggtcaccgacccacaggtagcggaggcaaagaagaagagagcggcggagagcggcgaggcggcggaggcgaagaagatccaggacgacttctgatcgacgcgtttcgagggcaagaaggggacggacctggtcgtgtgcgaggagttgctcgctcttttccagcagtccaacctggtgctgtacggcaggatccagtgcaagggc

SEQ ID NO: 113251 - DNA, 607 bp, Zea mays
  Clone ID: MRT4577_3476C.1
ggtaccctcggagctcggccgggtggatactgataggagctcaatatgcagcccgcggcggtggctggcccggacttacatggaacgccgtggtcacccacgcggagcgccaacggctggcttcggtctggtcacgcagcgctcaggcgttgaggccgtgccacatcacggaggtaactttcctagggtaggcgctactaagcagaatactctttccctacacgctatcgaagacctccacaagcaaggcgcacgctgaggcaagcgtgtgaacaggcgggtgtatgacacctgctgctgggccatgctagtgcagagcgcactcactgaactcgacaacataccgctggcaagcccaaccacgcactcatggtaccagcacagcaacaaatgcaatgcacccgagcattgaagctacaggttgataacttcaacacatccatggacactggacgtatgcaaccagccctggctcatactcaattgaattaacgaactcagctacgaagtcatgctcgacactttattggatcttcaaatagtgcgatgctcaatgctccaatctcaactaaagactgagagccgagagaaagatagaattcggcat

SEQ ID NO: 113252 - DNA, 440 bp, Zea mays
  Clone ID: MRT4577_34770C.1
ccggggggggcgggccccaatttaattcccagcaaaaaaagaaagggccgggggagccacacaaggaccattatcccaacggaataccgaaaaaagccccaagggagggacaggccaaagtggcagcccaaccaaaaaaaaaggggttaaaaaaaggggggaaaaacccccggggcccaaagaagatttaaaacaaccaaaaaaattggggggggcggggcccaacgggcaaaaggggagggaacccgggacccccgggggcccgaaaaaaagggccccccccccaggtcaattggggcccggggaaggaggaaccaggcccaaaaacaggaagccgccggaacccaaaaagaaagcggggttggggggggcccaaaaaaccggggggtaaagtttccccaaccccgaaaaagcccctggcaaccccccggaccccaccc

SEQ ID NO: 113253 - DNA, 463 bp, Zea mays
  Clone ID: MRT4577_34771C.1
ggaagcggagaaaaggtggtggtgcctgagagacaggacccgatgctggtactcaaattcatctggatggagaagaacatcggcatagcacttgaccaattggttcctggctatggcagcatcccgctaagcccatactacttttggccgcggaaagacgcgtgggaggagcttagagcgaagttggaagagaaagagtggatctcgcagaagcagatgatcatccttctcaaccaggccaccgatatcatcaacctctggcagcagggtggcgggagcctgtcgacatgagttgcaagcttgcattttgttggtttcattacatgccctctctgttgttgatgttaaagtcatggtacgtggccttgtagatcggttcaatctgttctcacgttttttttcccatggaaacgatcttgtgatttattttagttattatgtgtatcagtcgtttttcgttggg

SEQ ID NO: 113254 - DNA, 410 bp, Zea mays
  Clone ID: MRT4577_34772C.1
aattcccggctcgacctacgcgtccagttcttcgcatcagctggtgtttcgctaccttatcgccctccgactgctggtgggctgtcggcaccggcgcctccaaactccatgtgctgaggcctacgccagtgtcttctacgactacgagcacgttctatcaccaaacatgatgtctgaaagaagtcaacatgctgaaccatagatcgataacctcagtaaatgttaccatgcagtcctcataggaaggatccacgatgatgacctggatgtctcaaatttggaattcgttaaaacagcttttaccttgaccatgtgaaagctggtaacttgaatggttacacgtaccttttctttgagactagggtagctattatagaatcttccttatgctcatacttctgcgccttttc

SEQ ID NO: 113255 - DNA, 1566 bp, Zea mays
  Clone ID: MRT4577_34773C.1
caaaattggaggcttgagtggaagcttctaggaatttcatcacgtaagtcattagctgatgctgctgtactggctcttgagaagaatcttacagaacagaactatcttcttgccaaatgtaagttgttgaatctcccctgcataatagatgccctaaatgacctatttggttatgaaatcaatgaatatgtactaagtacaagtcagatgtggtttcagtacatgacatgcaccccactacggagggataaatacaaagaaatactgtcacggctgcaaataaaccgaccttcttttggttcgcagagatggtacttaattttccactcattggaagctgctttgcagtttaacaatgagctgccagaccctcaacagatagactccagatattatccagctaagccatcttttgcacagctaaaagcagcagagaacttctgtgatcttgtaagggcgatttaccatgcagtaaacaggaattcggcaccaggcaatggggccttgaattcacaatttcacgcaatttggaacttgaagatggctctgctccgttcatctacaaaggaaaacatcgaccaagtttttaatattgaacaaatgaagctgaaatttgaccagctttggaggaaatggtacctatggctgtcgttagctgttgttctagatcccagatataaattcaggtttcttcttgtttgctttaaggaagcctttggtagtcatgccaaaaggtacatctttgaagtgcgaggaaagctgtacgagcgctttcttcagtactcttgtcatgttgatcaacaaaatagtgacagctttgatcagagaaccaatgatttacagttggatacacgtggtagcacaccagtgcatgccacaagtcaaaatttcattgagcaagcagcacatgaggaactgggagaagtcattagataccttgaagcagagcttattcctcaaaatgccaattttgatattttgaaatggtggaaggaaaatgctttgacatatccagctcttgccaggctggcttgcgacatcttagcaattcctggatctgcggtctctgctgaatctgcatttgatgaaactgatgaacgggtgggacttttcaatctgaagctgagtcctgaattagttgaggccctcgtctgcacccaggattggatcaaatcttcagaaataatttctgacgaagttggtggaaatataaatatgcctgcctagtgcacagcaagctccctcggccgtttcattggttcaataaaaaaatgaagagccctttagaccttctcagtataatgcgtgacggagtctaattggcaatgcttgttttgttgtgctattcagcgtgcaaaaatatgaacaatattagtcttttattaagtcaattgtgcagtacatggctgaaatatggaatgtgtactatgtgatgactatgtgaatggctgaaatatattaaaaaaaacttcaaaacccaataattgtttttgctgacggatcagatttgaggtgagatgtgccatatatatttatctttgaagaacgtaataaggttcgtcgctt

SEQ ID NO: 113256 - DNA, 308 bp, Zea mays
  Clone ID: MRT4577_34774C.1
ggggaccgggggcaaatataaaacctcggaagggcccacactggatgggggccgggaaaaaataaagggccccccccaaaacctttttaactaaaaaaaaaattttggccatttaaaaaggctttcataaccataaaaaggggccaaaaaaacaataatttgagaaacatttttaacaccagggggggcaaaaaaaaaccccccaacatttcacccccccccttgggtggggaacccggaaaactttttggtaaccacaatttccatttggccaaaaccctcaaaaattttcttggccttgggggggg

SEQ ID NO: 113257 - DNA, 802 bp, Zea mays
  Clone ID: MRT4577_34775C.1
ccggccgggacgcacacaggtacacagccgccgccgcccgcctgttcatgttcctgtgccgctgtgcgagacggcgactgcgagtggctgagacggcgaacggcgaggcgtctccgaagtctggactgcggctgtggacagcgacgctgtgacggcgactcggcgaagccccaagctgccaagcccccagattcatctaaaatggcacctactcctggtgatggtgaagaactagatgcatccctaccagtaccagggctcccatctgagaggcacctgctgccaccaccacatccgtcgttatgttcaggttcaaagaggaagaccattgcagttggtactggagctgcacctatcgttgctggatcatcttcttcaagtcattcccagacatcaccttcagttgctagtgctgataaggatattgttaatccttcaaatgttgttgaggttgatgatagtaatgaagttgatgttagtgggaagaggcataagagatgtgcttgtcatgtgctgaatttggtagctagagatggtatgaacgtgattgctagcaccattgaaaaagttaaatctcttgtgttgactgtaaaagggtctccactgcagtgggaagagctcatgaattcagctactgagtgtggtttggaaacaacaagaggcatccatcaagatgtttcaactcgatggaactcaacttatatgatgctaagtgatgtactgtactacagtgatgcatttgtgaggctcaagtctaaagatcgccgaaggtatgaaaagatttttccttctgatgatgaat

SEQ ID NO: 113258 - DNA, 161 bp, Zea mays
  Clone ID: MRT4577_34776C.1
attcggctcgagctcgtgccccctgtttatttgcccctcgcagccacgtataccatggggggctataatacctcgacgggctaattaataacggagagcccaaactcctgttcacaggcatcctggacttccacatcatgttgtacgaccgttactgactt

SEQ ID NO: 113259 - DNA, 931 bp, Zea mays
  unsure (1)..(931): unsure at all n locations
  Clone ID: MRT4577_34777C.1
gcacatgcccacgcaaccaaggtccaaggcagtaaggctggcaacctggcaccacgcattgacgcaaccaaggtcgaaggctgacagcctggcaccacgcattgacacaggcacacagccgtcgccgcccgcctgttcatgttcctgtgccgctgtgcgagacgacgactgcgagtggctgagacggcgaacggcgaggcgtctccggagtctggactgcggctgtggacagcgacgctgtgacggcgactcggcgaagccccaagctgccaagcccccaggtccccatccatctctgcctctctggtcatctccttcccatggtcgatctgcaggcgccagccgcagcggtccggtccggtcaggaggggcgggaagagaaaccgcggctcgcacagtcgcacgcatcgaagccgctatggtctacgctctgcggtggtgggaagattgttttctttgtctttggataatgctagtgctaatgaagtggcagtgggtgatattattactaatcttaaggatgttcgtgctgctttggtatgtgatggaatctttttccatatcagatgtgcttgtcatgtgctgaatttggtagctagagatggtatgaacgtgattgctagcaccattgaaaaagttaaatctcttgtgttgactgtaaaagggtctccactgcagtgggaagagctcatgaattcagctactggagtgtggtttggaaacaacaagaggcatccatcaagatgtttcaactcgatggaactcaacttatatgattgctaagtgatgtactgtactacagtgatgcatttgtgaggctcagtctaaaaaatcgccgaaagtatgaaaagattttcctnctgatgatgaatggacatggctgcaacatagtcagtgcttagagatatttataaccttacacactactatc

SEQ ID NO: 113260 - DNA, 438 bp, Zea mays
  Clone ID: MRT4577_34778C.1
ggccacaaaatagtggagatcaactctattttcatagtttacagtttttgggtattacaatatgacccagtttggcacagctaagtagaatctatgccaaacaggcaacttatgcattagcttactagttcaattgctgttcagaatgaactaaaagcagtcatcaaccagaagcaaataagttgtttgttcacaatcagcagctgtcctaaacaaagccatagaccaaaggcttttggccctgcgtatgctgaaagcactcaacacacagatgcgcctttaattccacgttctgcgatcactagctcagcgcctgctttgagttaggccgctatatgagagtgcatacgcagcgtgacccctgcccctgcttggacacggtcatcctcacctcccagtgcaacgatctcgcaatgctctggacctccttgaccgtcg

SEQ ID NO: 113261 - DNA, 430 bp, Zea mays
  unsure (1)..(430): unsure at all n locations
  Clone ID: MRT4577_34779C.1
gccaaaaaaaaaaataaatttttggtttaaaaaagggaaagttaaccaaaaaaaaagggtattttaaatgtttgtttaacgcccataaacccaaaaaaaaaaaagaaaaaaccaaactaaaaaactggatccaaaaacccttttaccttgggcggaaccaccttaaggggaaattccaaaaaaagggggggccttttttggggatcccccttcggccccaagttttggttattcttgggccttgctttttccctggcgaaatatgtattccccccctttcccccncctttcgaaacccgagtttaaggggaaaaccggggggcgccttgggggtgcccccccaactattttgggtgcccttccggccccttttccggggggaaacgctcctccccctcgttttatgaatgggccccccccgggggggggg

SEQ ID NO: 113262 - DNA, 135 bp, Zea mays
  Clone ID: MRT4577_3477C.1
gaacaagcggcggcacaacacggaaagttgcatccccataaagctgaacctgtaggtgcaatctaatactcaattactccggaaaaacgaagggattaccataagatggcccgcgcccatagaaattcatttatc

SEQ ID NO: 113263 - DNA, 480 bp, Zea mays
  Clone ID: MRT4577_34780C.1
gcgttcctccgattacccacagttgacccccattcggtcactgcgacgacgcccgtcgccccgtccccggcccacgcgcgcctctcgttcccagagcccgaggcggaccacacaaccaagacgaagccagcgcgcgcgctgccgcccggcccgacgccaccagcctacgagcgagccaccgccattcccggctcgcaaaacccaacaccgtctgaccaccactcccccgttcgccgccagtgattccccccgagccgtccgatctcatggccgtcgcgaggctggtggccgcgccattccccctcgccgccgcccgcgcccgcggcccgcgggcgcggctgctgttcgcgccgctctctgcgctcccccgtcgcgcggccgcgcccgccatgcgcgtggcgtcggacggcaacggcggcggccttgtccccgcccgcccgggccaggaggcggaggacgccgcggtgacggcgcggggcg

SEQ ID NO: 113264 - DNA, 490 bp, Zea mays
  Clone ID: MRT4577_34781C.1
cccgggctgcgctccttttttgaacgccatgcactaaccccccgggccggcggagagcccgcttttcccgatcagaactgcgggagtagagaatcacttcctggaacccttacaggcgtaaccggagccacgcggctccttcgagcctaacctacagccgggccgggtttaagaaaatactcggggtacgcggggcgcggggacgattttgccccaggacaagattttctttcactatttctgggcacaaggaactggtgctgcatgagtatcagaagaagatattctttattatgcagcacattgtcggataacaggcacaccctggaggaattacatactctagtggcttagacaggagctggtaccttagacccccatgaactgaaggtgcgattacttgtccgaggaaaggactgtgtgccgaccttgacataactatacagcgctcgctccagtaccggactacatttacaagggtgcacattaa

SEQ ID NO: 113265 - DNA, 575 bp, Zea mays
  Clone ID: MRT4577_34782C.1
cattggtacctcgagccggcggggtgcacttatggattgctcttctctcttgcgctccgaataaagagcagcagcgtgataggtcggcagagcgagaagaaggcaatggcggcctatagcttcctgttcacctcggagtcctggaacgaggggtaccccgacaagctgtgccaccagctgtcggacgacgtgcttgactcatgcctcgagcaggaccccgacagctatgtgggctgcgatacctgcacctataccaacatgtctgatggtgttctgttagatcacgacctacgcgaccgtgtactaccaaaagatcgtgcgcgatacctgctgcgagatccgctttacctccgactgcgtgtatctcgagggccaccgttgcaaggtgttggtgaacatcaagtgagattcccccgacatctatgagggagagcacggatgcttcacgaagcaatactccatgatagtcactgcgttcgacacaagccacatgtgcgggtacatcaccgacgatacccccgagctgatgccgctcattcacgtgctgagcaccaagttgggtgatcgcctcaccg

SEQ ID NO: 113266 - DNA, 1382 bp, Zea mays
  Clone ID: MRT4577_34783C.1
gggtccacacacgcgtccgaccacgcgtccgccgtgtgcacggcactgcttagttctttccaaagagagagagaaacaatcaggggtccatccatttttgtcagccatgacgaacggctatctgttccgcgagtacatcggcgcgcagtccaccggcgtccagttctccgacgtgcccatcaacgccttcgttagcttccacttcatcctctccttcgccatcgactacacgcccgtggggcagcagccgaagccggtgccgaccaacggggtgttcagcccgttctgggacacgggcaacctgtcccccgccgccgtggccgctataaaggcctcgcaccctaacgtcgccgtcatggcggggctcggcggcgacagcgtgcaggacatcgtcaaggccttcttcaccccgacctccgtcgacacgtgggtggccaacgccgtgacgtcgctcacgggcatcattaacaggtacgggctggacggcgtggacgtggactacgagcacttcgccgacggcgccgacgtgaatacgttcgtcgagtgcatcggccgcctcctgacacagctcaagcagacgatgcccaacatcgccacctccatcgcgccgttcgaggacccagtggtccagaagtactaccaggcgctctggagcaagtactccggcgtcatcgactacgtcaacttccagttctacgcctacggcgacaacaccgacgtgcccacgtacgtcatgttctacaacaaccagttggcgaactatcccggcggcaaggtcctcgccagcttcaagaccggcaacgtgaccggactgctctcgccggaccaaggtatcagtggggccaaggagctgcagcggcagaacaagctgccagggctgttcatctggtcggcggacagctccaagaagagcagctacggcttcaagtacgagaccgaggcgcagcagatcattgccaaccactgatcgatctgcgatcaggacttagcttaacaagggatcacacattttacaataaataaatgataacctctcaggtcaacaacaattacttgcaggttaaggagttcggctgttgatttaaggacagaatgatggtgagtgaaaatgcaagtttaaagaaaatcgtcattattctgtcctttaaacttgtactagcaaagtaccagtgtgttgttacgatttacatttatgtttaagtatacaataaaaacataaacacatgtgtgttatgttggttggatatatgtaaatatgagtttagagccaacaatcatggtttaaatctccatttatgtataattttagcatttttactatttaaatgtgggcagcacaatgacaatgaaaaaaagaaaaaaaaaaaaaaaaaaaagcggcc

SEQ ID NO: 113267 - DNA, 948 bp, Zea mays
  Clone ID: MRT4577_34784C.1
ggccgcttttttttttttttttttcggcaacatgttctatttcaatgtctcatgaatttataatttataattcaataacaccaaccaatttaatagacaaatatatgacttcacatgtacagccaaaaatgtaacgtacctcacaagagcaattacggatgacggagataattctactctaattacacattgcaataaagaactactaacccatgcccaacgatcccctctccaacatcacctggaggccctggactggaacagctcaagcctccctttcgcatctggaagcaatgcctcaacacgtgtgtcctgcaccatttgagcctgctttgatgcccaaagcagcacggccagcacaccagcttgcgcgagttcctcgctctcaggcacatacaatgcaatgtaacagagtagtatgagcgcctcaatctgcacctcatcaccaaggtagacaagctggacaaggtggcgcgcaccaccatcatcaacaatggctttgcagtggttcacatgtagatggttctcagtgcacgcaaacttggtgagcgcaacaacagcctcctttatgactggaggctcgcgctcatcgagaagctgcacaagaggggccactatcctggtctcacttgctgtgaaggtacgggcaaggcatccaaggccagtgatgcatgggagaagcaatgtatcgtattcacccctgcaggacgaatttggggattcctcgtgggggttttggggatggtagtggtggtggtgggtttggttggggttggggaagagtggaggaagcaaagggaggcggctgcggttggagctggactgctgaagcctggagtgatgtgcggggcctggaccggggcagcggctgagtcgacgctgcggtcagcgcgtgagaccgagacaggggtaggtcgaggtccgtaggtgggccgacccgagggtacc

SEQ ID NO: 113268 - DNA, 750 bp, Zea mays
  Clone ID: MRT4577_34785C.1
aatctcctgtctgcacactgagagagagacatgtggcttccatggacacgtgtgtactagctggctagtaaccagctagtttggtgggtaccaggcagcaatgatgccttgtgcttcgcacctgcgcttcgtcaaccatcacaagaaggttgaggagctggccgacggcgagtctgggtagtccgacaccgatgtggtcatggtctccgaggtgggcgagtacgacaggcacgagattgaggagaacgagcacaagcaccatgagcacctccgagaggtcttcggcatcgcctgcggcgccttcgaactctacgacagagactgggagaagtaatcgacccctgagattgctcacatgcacaatataaactaggaggtactatggcgctgcgatcgttggcgccggaggctacgtattcctcgagaacctcgatactgacactgtaccacaagtgcgtggagtagtctagtggttggatgaagtaccgccgcctcttaggctgatcgcactaccgatcgacacacgagcgagctagctatcttcggtgtccaccattgcagagcatgattagttctgtactgcatgcgagagtaatttgatgactcacaataatgactacgtctccgaaccttggtatgtgcttgcttgcggtgactgacagtgtgagactgaataagaagatgtggagatcgctttgctaccatcagagaggtgcgatcctgcactctgttcgttatctctgcatgcgt

SEQ ID NO: 113269 - DNA, 128 bp, Zea mays
  Clone ID: MRT4577_34786C.1
ctaggggttgttcttcgtctgcggccgtggccttggtgagcgggagtgccctttcccctccggagaaggctcatgagaaaagctgacgacggttttttcaagtggtaagtacaaaagccttctctccc

SEQ ID NO: 113270 - DNA, 319 bp, Zea mays
  Clone ID: MRT4577_34787C.1
gcgggggggggaggccccagcagcgcctagccctacttcgacctcgcgaggcgagggcgcctccacggcgccgcctggtgtcgctgctgcgctccacgaccgcagcgcatcccggtgatagaaatcacctatagccagctagaagagagtcctttcgcaggtgagcaggtgccgtctcactcgcgagagagagaacccactacgagccagagacacctcacaagcagttctcctgctgcacggggaggaacagagccgacgcgccggaagccctctttggattcgaacccgaacagagccaggactacgagggccagcc

SEQ ID NO: 113271 - DNA, 136 bp, Zea mays
  Clone ID: MRT4577_34788C.1
gccactcggccagaatcaatccgcgccggggtttattataaaggggcagacgctaatacagaacacatccattagggagagcggtaaccgcctcacccgcgcccccaaggtgctggagcaactcacgaggcatacc

SEQ ID NO: 113272 - DNA, 217 bp, Zea mays
  Clone ID: MRT4577_34789C.1
acagtcggcataaaatttgcgtgctcattatttttctaggcggacaactcatagttacatacatgcaatccgggtagacttaaaacacaagattaaaccgctcctgacatggtggttgctacacactattccagccttctggatgaaatgcttctaaccccagaggtttatgctgtggcctaacaatgattgatgtacaaccaaaccaaacccgggg

SEQ ID NO: 113273 - DNA, 270 bp, Zea mays
  Clone ID: MRT4577_3478C.1
gacggtcctcgaggatgctgacgcaatgtgatttctgctcagtgctctgaatgttgtcagcataaattaggtggttatccctaatcaggatattaagttgcaaagataattgaattaataaatgttgtaccgtgcccgatgtgttaaataaataaaatagaaattaaaaaaaaaataaataaaaatgaagaaaaaaaaaaagaagaacaaaccgatattaattttataacatgtgctcatcacttaattgctaatgggacggctccttgt

SEQ ID NO: 113274 - DNA, 409 bp, Zea mays
  Clone ID: MRT4577_34790C.1
aaataacagcaaaataaaaggaacaaccccacggggggcaaacaaaaaacaccagcggcacaaactcgggcccccacccacaaccccctaaaaaaaaacgggggcaacccgaaaaacggaggaaaacgggacggctacgggacccccatgcaaacaaaaagcccccgctaaattgccggggaccaaatggggggccaaagcccaggccttgttgttgaccgggcccgcaaaggggccggcgagggtcccgggggggcccctgccggggaccaaagcccgcacaaaaaaacccaacaaggaaaacaaggggggggggccctccttgatcccccccaccctgagcccggcaaacccccccgggtcctcggcaagccccaacgggttaaaactccccccagggaacaagggg

SEQ ID NO: 113275 - DNA, 446 bp, Zea mays
  Clone ID: MRT4577_34791C.1
ggcttccaaaaaccaacccccatttttttaggtcccaatacaggtacattacaacacaacaggggcagctactttaaaaaagggcactctacaaaaaacacacccaaacggggaccattgccccaagagcaaaaaccttagaaagaaaaattaaacacccccccccccaaaataaccccatatgcttcctacccggttcttgcagggggcaagaaatatacattacaatgcccgggcgttctccatcaattattttgcccttgaggggcccccttccctttcggggggcctctgggctgaaaccaattgttgccttttgacaaaggcctatcctccggcttttgcttggcatccaacaactccgatggaaactcgggggggggttcaagccatggaatgcgctttgcggggaccaccacttccaaaggggctcaattacccaccct

SEQ ID NO: 113276 - DNA, 274 bp, Zea mays
  Clone ID: MRT4577_34792C.1
cggatcacctaaccactcaagcctcctctttactattttcccagctctcacgcttctcacgggcgaggaaaatcttggaatgaccttcataaaaacctgtcccttcttctaaaggacacgaacatcctcatgactcagcgacatatgcttccttcagacagcatgccgcttccaaatacacaacctattttcaagctcaataaatcattgccccgtataaatcatcccttcactgtgacggctgtaaccgatcccgacccaacgagatcttctg

SEQ ID NO: 113277 - DNA, 137 bp, Zea mays
  Clone ID: MRT4577_34793C.1
cccactcgtacgcggagaccggcccacacaccctgagaagctatacggaggcagtgcccactggttacattctagatgagcggtaacttgggccatggcggccgtgtcggggtgcagtttgactgccactaggggct

SEQ ID NO: 113278 - DNA, 741 bp, Zea mays
  unsure (1)..(741): unsure at all n locations
  Clone ID: MRT4577_34794C.1
ccnggccggggattcgcctctatcacgaccaccttactctcgtgcgctctccgagggcatcgaggacccgtaggcggcgcatcggcagtattctcctatatctccgggatcatcatgaacaaatgggtgacggcgaggacattcatccccttgcttgtgacaatgcaactggtatggacaaggctcgtatttgctggagacgatgcgccaagggctgttttcccaagaattgcccgacgcccccgtcacactgttgtgatggttgacatggctcaaaatgatacatatgatagagaccaggcccagtccaagagaggtatcctgactttgaaataccccatctaacactggtattgttagcaaatgagatgacatggagaagatgctggcaccacaccttctataatgaactccgtgtggagcctgaacagcaccctgtgctgctgaacgaagccccatctcaaccccatagctaacagcgcagaacatgacccagatcatgttagagaccttcaatgttcctgacatgtatgtcaccatccaggctgcgctttccctgtaagccgctgaccgtacaactgatattgagctggactctggagatggtgacagccacaccgtgccaatctacgaaggctatgtgcttcatcatgacatcctgcatcttgaccttgctgagagtgacctgactgacagactgatgaagatcctcaccgagagaggttactccttcaccaccac

SEQ ID NO: 113279 - DNA, 323 bp, Zea mays
  unsure (1)..(323): unsure at all n locations
  Clone ID: MRT4577_34795C.1
agggaaagcttgcaggccggcaggtaccgnncctcctttccctcttccaccctttcttttttagagattgaanaangaaagcagaaagaattttttaatatgaagacagaacnatanccttctcatacttaaacatatataggatcattcctataccaccttgatgatagacagttggcaatttctcttttttattttcctttaattatccaaatccgtttctgatttccctattattaattccacaaatttaatcatcacccttcttttattaaaactttttaaacgccctacatcttttcatttttctccacctactctca

SEQ ID NO: 113280 - DNA, 490 bp, Zea mays
  unsure (1)..(490): unsure at all n locations
  Clone ID: MRT4577_34796C.1
gttaggtatgtccttgggnagatccatgtgactccactgncatcttagcataattgtttggtccctctttgcaaggaggcgcgaggaagcaggagatggaagtaagcaaggtagagaggagcttaggttcccataaggcccttctcctagtgcttaccatgtcctcttaaagaagatatgtttttctggcaatgtcctctgatgcaagcatatggtcaccgattttatggttgaggcctcattgatgcgctctatttgcctgctgtttatccttaaaaacaatcttaagtagcttttccctctaatgattcacatcctgccataaacttgcactgaagcctttgcctctgcatatagcatgaccgataaagaccggtgctaaccatctacggggactggtgatcatatgtaacatggttattgatgctcatcgttgacaacggctattgctcacagccataacataactttacatgacgaacctgatcaa

SEQ ID NO: 113281 - DNA, 401 bp, Zea mays
  Clone ID: MRT4577_34797C.1
gggaagcccaaaaaagcaaaaatttttttttaaagggaaaccatcgatccccgcgaatacctgcctacccattatttgatttttcccctataaaccaaggcgcaggttaatttatttatctggctgggtggggaaacctgctacccccacaatttcttttcgggggggggacaaaaaccttattccccccggggggggcccaacaaacttttgacgttgtcccaccccctgggcaaaatgggccccccgcacaaagggcaggggggcgccccctcgcccctgggggcccaaacttttttgcagggggggggaaaaccgtgggaacagccctacaatttccccaccgcctggaaattttcctgtttcaaaccccccaaaaaaattgggcaaaagggcccccc

SEQ ID NO: 113282 - DNA, 261 bp, Zea mays
  Clone ID: MRT4577_34798C.1
gtctagttctagatcgcgctcgttccctgcccgccgaaccactccccctcgtcgagttcatccctgcgcatgaacgaaatcacaaggttgaagacaaccccaaaatatttattttctaaatcatgttttgaatttattgtgaactattgttgtaatattgagatgatgcgatttggcgattcacgtatatgattttagagattcgatatatacgtgtaaccgaaatcgaaccccacgacaacgctttaatatgtgtatgat

SEQ ID NO: 113283 - DNA, 261 bp, Zea mays
  Clone ID: MRT4577_34799C.1
gttgagaattggacgaagaccttaaagcacaccaagattttgcacattttgaaaccggatttggtgggaaaataccccggatagggacccttgcgccttcacaacaaggttttacttttacccattccaatttcttaccaaatggccacaacccaagggacccccagttggcatttgaaaagcttgccaaccttggttcatgccctgggcccggatttggttgcttatttgactcttgtctttaatagggaggttattttg

SEQ ID NO: 113284 - DNA, 126 bp, Zea mays
  Clone ID: MRT4577_3479C.1
cggactatgagaacggacgggcgatactcaataaccaggtgcttggcaaaatcgagcgggacattggcatgaagctggggggaaaggacattggcaagcccatagagaatgtgcatagggcgatat

SEQ ID NO: 113285 - DNA, 1712 bp, Zea mays
  Clone ID: MRT4577_347C.1
cctcgagccgccgggacactgagtaccgcagagacaggcgtcttcgtactcgcctatctccgcgactcaaagctttccccaattcccccccttctcccatttctcaccaccgccgccgctccccccgttcaacaacaccatgagggagtgcatctcgatccacatcggccaggctggtatccaggtcggaaacgcgtgctgggagctgtactgcctcgagcatggcattcaggctgatggccagatgcccggtgacaagaccattgggggaggtgatgatgctttcaacaccttcttcagtgagactggcgctgggaagcatgtcccccgtgctgtttttgttgaccttgagcccactgtcatcgatgaggtgaggactggcacctaccgccagctcttccatcctgagcagctcatcagtggcaaggaggatgcagccaacaacttcgctcgtggtcactacaccattggcaaggagattgttgacctgtgccttgaccgcatcaggaagcttgcagataattgcactggtctccagggcttcctcgtcttcaacgctgttggtggaggaacgggctctgggcttggttctctcctcctggagcgcttgtctgttgactatggcaagaagtccaagctcggtttcaccgtgtacccatccccccaggtctccacatccgtggttgagccatacaacagtgtcctgtccacccactctctcctcgagcacactgatgttgccgtcctcctcgacaatgaggccatctatgacatctgccgccgctcccttgacattgagcgcccaacctacaccaacctcaacaggcttgtgtcccaggtcatatcatccttgactgcttccctgaggttcgatggtgctctgaacgttgatgtgaacgagttccagaccaacctggtgccctacccgaggatccacttcatgctttcgtcctacgctccagtcatttctgctgagaaggcctaccacgagcagctgtcagtggccgaaatcaccaacagcgccttcgagccatcctccatgatggccaagtgcgacccccgtcatggcaagtacatggcatgctgcctcatgtaccgtggtgatgtggttcccaaggacgtgaacgctgctgtggccacaatcaagaccaagcgcaccatccagttcgtggactggtgcccgactggcttcaagtgcggaatcaactaccagcctcccagcgtcgtccccggcggtgacctggccaaggtgcagcgtgccgtgtgcatgatctccaactccaccagtgttgtggaggtcttctcccgcattgaccacaagttcgacctcatgtacgccaagcgcgccttcgtgcactggtacgtcggtgagggtatggaggagggcgagttctccgaggctcgtgaggatctggcggcgctcgagaaggactacgaggaggtcggtgctgagtttgacgagggtgaggacggcgacgagggtgatgagtactagacgctctactggcgcggcgtcgtcgggcctgcgtgcctctgctatcctgtgatctgccctgagtggctcctatcgtgttatgtttctgtcggttcttatctatctgtcgttgtgtggtttacaacttatgttgtaaagactttattcccccgcattgcaactgggtttaagtttggcgttatggttatcttgatctctgagatgcttttctttcacc

SEQ ID NO: 113286 - DNA, 313 bp, Zea mays
  Clone ID: MRT4577_34800C.1
aattatgagcattttttattttttgtttttttttttcatttgttgggggaggagccctcataatgaaaaatgtgagatttcctgacatagctttaaaccatgtgtatgatccaacttgaaattttgtaacaaatgctccgggtccttgtgagattcccgtggtgctatcctgcctgacttgaaaggggaaacaaaaaatttactccccatttactcgaattttttttcgccagtggaaaagtttaaaaaaatgccaggcctgaacatacaaaggtatgccggaacaaaaaaaactgttttccaggtttccgag

SEQ ID NO: 113287 - DNA, 464 bp, Zea mays
  Clone ID: MRT4577_34801C.1
tttggggtgtttttgctctgacaatgtcgttgtttcagcatgagatcgaacacttgcacacccaagcaacaaaagtgtgtacaaatatgtttcagcatctgcactcagccttgctgtcctgctagatgctttagagtctacgactacgagtggagggtgcaaatccgtgcacttgtcttctactatatatatatacaaaatctaaacgcaagcagcgcaccgacccaccagctccgcatcacggttgcctgatcaccagaagctgtccaggtagtagtctctggcagcctcgtcgccgacgccgattccggagaagccggccgttgttcgggtcgcgtgcgagcacgacctcctcggcgcctgctcgtgctcggcgtccgccgccgtccgccgctgcctcggcgcgctgtggcatcgcgtcctggccgcggacgacgcggtgccggccatgtaccgcgggctga

SEQ ID NO: 113288 - DNA, 502 bp, Zea mays
  Clone ID: MRT4577_34802C.1
aactggacggcgggcttcggccgcggccccacgccgcccgcgctcgtgggcatccgccccgcggggcccggccgcggcgcgcgccgcctcctcgtgctggaggagttcaagaccgagaagaggctgtgcaagatgttctacgccgtcaccctgctcttcctgctgctctgggggccctacgtcgtggccagctacctgcgggtcttggtgcggcccggcgccgtcccccaggcctacctgacggcctccgtgtggctcaccttcgcccaggccggcatcaaccctgtcgtgtgcttcctcttcaacagggagctgcgggactgcttcagggcccagttcccctgctgccagagcccgcagaccacccaggccaccctcctttttttccttttcctttctcttcttttttcttttctttttctttctttctctttctttctttctttctttctttctttctttctttctttctttctctttctttctttctttctttctttca

SEQ ID NO: 113289 - DNA, 463 bp, Zea mays
  Clone ID: MRT4577_34803C.1
gcacgagatcatgccgcccaagaaggacgcgaagggagctgcttccaagcagtcggcgaagcccgccaagaagaaggaaggaggcggaggtggcaaggccaagaagaagaagtggtccaagggaaaagtccgtgacaagcttaacaaccaggttctcttcgataaggccacatatgataaacttcttaaggaagtccctgcttacaaacttattaccccctctgttgtgagtgaaagactgaagatcagaggttccctcgccaggagagcactggacgagcttctccagaagggtatgattaagcaagtcatcaagcaccacgcacaggtgatctacacaagagctaccaagggtgatgaccccgcgtaaatttaattttgttaattttgtaatggtgttatttaagtaactaaatagcattattactaaaaaaaaaaaaaaaaaaaaaaaaaaaaaaaaaaa

SEQ ID NO: 113290 - DNA, 530 bp, Zea mays
  Clone ID: MRT4577_34804C.1
gccggcagttgccgtcatcgatcgatcgccggaaaataaccccttacatgtctggagcctgcgaggaggacaagaagcccctggtgggcggcgcccacatcaaccttaaaggtaaaggacaggatggcaatggggggttctttcgcataaagaggggcaccccacctgaacaagccgatgaacccttattgtgaccccccgtctggggacatgaatgcccttgcgttcctgtttgatggcccgatgcttcccggggagcaaacccctgatgagcttgagatggaggacagccacaagatcgaccccctgcttgaccagaccggagggagcgttcctagcaccacctaaaagcctcggtttgctctccgtcctgcgtcgtactaaacaaaagggaaaaagtctttttaaggaacttgtgaggctctggctccttgtgccattgctgagggacatccttagcctttgtttattagtatgggttggtactttgttctgtaataactcgtttatgtatacctaatacatgccgc

SEQ ID NO: 113291 - DNA, 437 bp, Zea mays
  Clone ID: MRT4577_34805C.1
ggacacacaaaccacagatgtttattagacgacgacatccatatagagggacaccaggggggaccagacgacgcaaatacccaggtacagcagcagcttaaatgaaccatgggttactgaccaccggggggggggagcaccagggggagagggctctccttttgggatgttggaatctgctagggggggggcatcctccaactgtttgccggggaaaaaaaaccctgctggtctggggggaagccctctttggcctggatcttcgccttcacgttgtcgatgggggcggagctctcaacctccaggggtatggtcttgccagtcaaggtcttcacaaaaatctggataccacctcccaagcggagcaccagggggggggggctctccttctgggtggtggaatcggggaggggacgggcatcctccagctggttgcc

SEQ ID NO: 113292 - DNA, 220 bp, Zea mays
  Clone ID: MRT4577_34806C.1
gccgggcttccatctaccagccctgagtgctcgagctcttccaagagagggacatgccgtacatgacgactgaggccaacttcgccatagatgagaaagtaaaccatcttatgtgttcgatggggagtgttctgcagatgtgatgagaataggatcgattcttatgaaaggcttcctgtctggaatgactgagatgtagctggagtttattgacaagatt

SEQ ID NO: 113293 - DNA, 299 bp, Zea mays
  Clone ID: MRT4577_34807C.1
ctaagcgttgcttttcttgtgggtgttttttttctggggagagctctttttttctacggccccgagtttttttggggggggcgcggtctggccctctggcccccaggcggaatatggcggccgcggcggcgatgcgtcccagcccttgatcaacacgggcaggtcttccgccgccatcctccggcccttgtagatctctcatctcgggccaagcagcccaaaaggcgcccctggccgatccggacgcgcttgctgagaggatgcctgccgtgcccctcgtcggccggcggtggtttccc

SEQ ID NO: 113294 - DNA, 466 bp, Zea mays
  Clone ID: MRT4577_34808C.1
ccccttccttagcctgggttcctttgagccggccgcccttttttttttttttttttttttttttttttgttttggttttttttttttgggccaccggtaaactggccttttacccggttttaaaaaattaccttttttgggtggtttacccaaaataacttggcttcccttggacatttttttgcccttcaaagggacccttggagaaacttttttttcttgcaacaatgttggggggcaccattgcttgccttaccattgcccccatgggctgggccttgactttcattccgggttaccatgcccgcccaagagcttgggttttttattagacttgttcccagaattcacattgactggagctttacccggattgacagcgggttttttttcataacccttttttttcacctgggccttcttgatttaagggtttttttctttgcctggcattttttggcacatt

SEQ ID NO: 113295 - DNA, 203 bp, Zea mays
  Clone ID: MRT4577_34809C.1
caagagtggggctacaccaaccgcgtcgtcgacctgatccgacacatgttcaagacccagtaagagagaatatttctgcctccctatcgagggtcgtccccgcatggcctttggacgcataccatccttgctgcttgtctatgcttcgcataaatgtgaacggttcccctggacgctggtaccatgcttgccctgaacacagt

SEQ ID NO: 113296 - DNA, 154 bp, Zea mays
  unsure (1)..(154): unsure at all n locations
  Clone ID: MRT4577_3480C.1
tggcgccgcctccgagacagccgncggagcgcatggacaccaccgacggggcgggtaccgcactcactggcaccactaccgctgcgcccaaggcgaggcgccgggcgcacctcatgggcacccgacgagcccttgtctttcccataaggagctt

SEQ ID NO: 113297 - DNA, 3291 bp, Zea mays
  Clone ID: MRT4577_34810C.1
ccgtcgtgtccctggccatcggcctccgagggacccttttgcggatcgccattgtgcaggcggctctaccgcaagggatcgtgcccttcgtgttcgcgaaagaatacaacgtccacccggccatcctgagcactatggtaatttttggcatgctgatagcgctgccgatcaccttgatctactacatccttcttggactgaagccagtgtagtgtagctgcttcgttcgtcctgctccacacatgatgaggcatgagcgaggtagtagaccaccatggacgacgctgagctggttgcactcgagcgtggcccacatgcatggctggagccttgtaattttgagtcagctccagtgttccctttgtggggtgaggtgattagtagacatgcatgcggtttttgttgcttattactaatccattcttgggacctcgagccggcgggacttccttcacaagaccggaggagcccactcctgcatgtaactcagatactccacccgagagtccgcaccaactcacatcacacctcaccttccactccagaagaagaagccagaccggaatcccgagagccctgcccctgctccctcggttcctcctccgttgggcgtttggccgccgggggtggtgggccgagaccgagatgatatcgtggaacgatgtatacacggtgctgaccgcgatggtgcccctgtacgtggccatgttcctggcgtacgggtcggtgcggtggtggcgcatcttcacggcggaccagtgctccggcatcaaccgcttcgtggccatcttcgccgtgccgctgctgtccttccacttcatctccaccaacgacccgtacgccatgaacctccggttcctggccgcggacacgctgcagaagctggtcgtcctcgcggggctggccgcgtgctcgcgcctgccctccaggctggcggcgccgcggctggactggtccatcacgctcttctccgtgtcgacgctgcccaacacgctggtgatgggcatcccgctgctgatcgccatgtacggtccctacgccgggtccctgatggtgcaggtggtggtgctccagtgcatcatctggtacacgctgctgctgttcctcttcgagttccgcgccgcgcggacgctcatcgcggaccagttcccggacaccgcggcggccatcgcgtcgctgcacgtggacccggacgtggtgtcgctggagggcgggcgcgccgagacggaggccgaggtggcggaggacggccggctccacgtgacggtgcgccggtcgtcggcgtcgcggcggtcgctgctgatggcgacgccgcggccgtccaacctgacgggcgcggagatatactcgatgagctcgtcgcggcagcacagcccgcggggctccaacttcaaccacgccgacttcttcgccatggtcgacggcgcgccgcccccgccggcgcccggcgcgcgcgcctcgagcttcggcgccgccgagctgtactcgatgcactcgtcgcgggggccgacgccgcggcagtccaacttcgacgagcgctcggcctcggcccggtcgtcgaggcccgcggccgtgcccagccacgacgccaaggagctccacatgttcgtgtggagctcgggcgcctcccccgtctcggacgtcagcggcctgccggccttcaacggtggtggcgcgggtggcgtcaacgtcggcgccaaggaaattcgcatggttgtccccgccgagatgccgcagaacggctcggccggctcagagaacgagaacaacggtgcagcagcagcagcgacgggggaagccgagggtttcggcttcagatcaggcggcaagacgacggcggaggacgccgaggcgggagaagcagcagggcccgagcagctaacgaagctggggtccaggtgctcgacggccgagctgcgcgcgaaggacgacggcggtggtggcgcgggctcggcggcgcagcagatgccgccggcgagcgtgatgacccgcctgatactaatcatggtgtggcgcaagctgatccgcaacccgaacacgtactccagcctcatcggcctcgcctggtccctcgtcgcgttccggtggcacatctccatgccggcggtcgtggccaagtccatcgccatcctctcggacgccgggctggggatggccatgtttagcctgggattgtttatggcgctgcagccgaagctcatcgcgtgcggatggcgcgccacaggcgtctccatggccgtccgcttcctcgccggccctgccgtcatggccgccgcgtccctggccatcggcctccgagggacccttttgcggatcgccattgtgcaggcggctctaccgcaagggatcgtgcccttcgtgttcgcgaaagaatacaacgtccaccctgccatcctgagcactatggtaatttttggcatgctgatagcgctgccgatcaccttgatctactacatccttcttggactgaagccagtgtagtgtagctgcttcgttcgtcctgctgcacacacatgatgaggcatgcatgagcgaggtcctagtagaccaccatggacgacgctgagctggttgcactcgagcgtggcccacatgcatggctggagccttgtaattttgagtcagctccagtgttccctttgtgggggtgattagacatgcatgcggtttttgttgcttattactaatccatcttgtcgtttgaggattgcatgtagtgtcgtccatgcccatataaaccctagtttaagctttgagggccctctatcctagagatctcgatttgcccgtagcgagaaatgaaccatacatgcgtgacgatatttgctcgctgcattgggatttgggaaacggatatactgcgaagacgagaagtttactgtgcgcatcatcggtttgtgcgaagctgagttcaaaggaaaatacagtcaatatatactccctcctatttgcattcacaattgatctcgtcttgtattcttgaagccagtgtagggtagctgcttcgtcctgctccccccataattaggcatgagcgaggtagtagacccccatggacgacctttagctggttgaactcgagggtggcccccatgcatggctggagccttgtaattttgagtcagctccagtgttccctttgtggggtgattaaacatgcatgcggtttttgttgcttattactaatccatcctgtcgtttgaggattgcaaaaaaaaaaaaaaaaaaaaaaaaaaaaaaaaaaaaaaaaaaaaaaaaaaaaaaaacaaaaaaaaaaaaaaaaaagcggcc

SEQ ID NO: 113298 - DNA, 182 bp, Zea mays
  unsure (1)..(182): unsure at all n locations
  Clone ID: MRT4577_34811C.1
tcggccgggacaagctcgaccaccacccagctcgctcgtccagctgataggtcgagnacctagtagcgacctgctcgatatcagtgtagagtgncggtaggcgtccgtctctcttggtggctggntgaaccggtatggcgacgccgnctcgtcgcgtgcccttgncgctgtcgtgcctgggc

SEQ ID NO: 113299 - DNA, 645 bp, Zea mays
  Clone ID: MRT4577_34812C.1
ccggccgggattccttctcgaggagaagccgccgccgtctcaatccagcagtccggagaacggccagctccgacaagatgcagatctttgtgaagacgctgacagggaagaccatcaccctcgaggacgagagcgaggacaccatcgacaatgaccaggccaggatacaggacaaggaagggatcccgccggaccactaagcggctgatctttgccgagaagcagatgaaggatgaccgcacccttggggactataacatccaaaaggagccaactctccacctcgagatcaagatccgcggtgccatctatgagtcctcgctgcaggagctcgctcgcaagtacgaccagtacaagatgatctgccgcaaatgctatgcacggctgcaccctaaagctgtgaactgccgcaagaagaagtgcgtgcacagcaaccagctgaggagctagaataagagcgagaactgacgtgttgttgctaatcagatccatggacgatgttgtttgggtggtgaaccgtgtgagagtacgaactgtattcttgctagcttgtagaaacgtgtaggtctaccgaacatattggactgatgctatggaataccatgatgacgatgacgctatactatatgacgatagcaactatgc

SEQ ID NO: 113300 - DNA, 332 bp, Zea mays
  Clone ID: MRT4577_34813C.1
acccacgcgtacgtggacgcgttatcggatggatttcccaagcacacttttgccatttgtctgcagtctgcaagcatgcatcggcgttgcgcagtcgaaatggctgttactgcagtatatgccttcctggtgccttttattcgcggttgctctttgttgtttcctgatcgtgggctgtggtcggacggcgactttcaccatttgcgaacaatctgttgctacacggtgtggtcggggttgctgaacagcgcgggcttcgcgccgttgttcaccacggggatagatctggggtccttgggagttccttgccgtggatgctccccgctgagtgg

SEQ ID NO: 113301 - DNA, 473 bp, Zea mays
  unsure (1)..(473): unsure at all n locations
  Clone ID: MRT4577_34814C.1
cccacgcgtncgcatccgcatacatagcgatccggagacgtgttctagccttgattgatagtggtaggtcacatacattcttgcatgagaaatttcgcccattgttcaagaatgtggatttggtgagtgccccactatttgttcgtgtggctaatggtgaattgttacattaccaacacaagatactgtagataccatggcaaattcaggactgcactttatggtcagatatggcatttttgcccattccttgctatcatattattgttgacatggactggttgcaggccttcaatctaatgcgtgtggattgggctcaaaaatggttgtctattccttataatggcactactgcaactttgtatggacagtcatctcaagtgccagtatgcaccgtggtggaacttcttctggttgctgccacagtatcagttaatgaccattcaccaatccccgatgcagtccaagagcta

SEQ ID NO: 113302 - DNA, 702 bp, Zea mays
  unsure (1)..(702): unsure at all n locations
  Clone ID: MRT4577_34815C.1
acacacattgcgcctgccttcccttccttccccagttgagttccccccgcggccccgcccccggtccccttccaccgacccaccatgtcggcgatgaggtgaggttgaggccaggtctactctccgcgaccgtcgccgacgccatcgccaacgagcagtttgctccatcttcgccatctcgcacacgaatacaatacactagttttggtagagatggaggacggcggcaaggcgccggccggcctgggcaccctgcgcgcggtgctcgccatcctccagtggtggggcttcaacgtcaccgtcatcatcatgaacaagtggatcttccagatcacggactagagacttggattgggtgggaaacagggtcaaatagacttatagcgtgtttggtctgagaaacgagaaactggatttcaagttccctctcaccgtgtcctgcgtccacttcatctgctcttccattggagcttacattgcaatccatgtcctcaaggcgaaacccctgattcaagttgaaccggaggaccgctggaaaaggatatttccaatgtccttcgtcttctgcataaacattgtgctgngaaatgtcagcttgcgctacatcccagtctccttcatgcagacattcaaatctttcactcctgcaaccacagttattctgcagtggctagtctggagcagcatttcgagtgcgcatat

SEQ ID NO: 113303 - DNA, 570 bp, Zea mays
  Clone ID: MRT4577_34816C.1
gtttttcagcccagttacagcatgccatcaatgagcatagaaaaggctggcttgcgcgagatgaagatgatggagaggtggcaagagaggaccgccgagatgatgagagaagcaaactccgcgtggcacaagggcggcgacagcagcagcagctcgatgccgcaaggggagggcggggacgaggatgccgaggaggccaaggcacgagcgtgggacgactggaaggacgacaaccctcgcggcgctggcaacaagaagctcacgccctgtggctagactgcaaatcgaagcacgctcgctgtgtgatcgtacggtgtttgactcgaccagtatttagtttgtatctgacgatcagtgtatttattatataggctgcttctgtaacagtgtgtttatacaccatccactgcagcttcttcacacaggtgtttccgaagttaactgggttagacaaactgtgttgtccaagcaagagtatctaacaaatagctacgtaactacttcatccgtttctttttcaaaaaaaaaaagggcggcggccgacaactagtcagctcgacccacccagtt

SEQ ID NO: 113304 - DNA, 679 bp, Zea mays
  Clone ID: MRT4577_34817C.1
ggccgcaaatttttttttttttttttttgtgcttaattcaatttcacattctgatgctggcgaatagtgtcacaaatggaaggaggaaacgatgcttgtacgaagttccagtttactaccctcaccacacacgcacgctgtcaaacttgtatccatggagtagggactctgccaagatggtctttgtagacgtagccaggcagccaaccatggcagcacagaaaccgaaaatgttgaagctaagctctgtcaccgaagtcaggagtattccgccaactatagggaccagcgaagcccatatgcgccactcgaaatgcttgctccagactagccactgcagaataactgtggttgcaggagtgaaagatttgattgtctgcatgaaggagactgggatgtagcgcaagctgacatttcccagcacaatgtttatgcagaagacgaaggacattggaaatatccttttccagcggtcctccggttcaacttgaatcaggggtttcgccttgaggacatggattgcaatgtaagctccaatggaagagcagatgaagtggacgcaggacacggtgagagggaacttgaaatccagtttctggaagatccacttgttcatgatgatgacggtgacgtttgagccccaccactggaggatggcgagcaccgcgcgcagggtgcc

SEQ ID NO: 113305 - DNA, 6403 bp, Zea mays
  Clone ID: MRT4577_34818C.1
ctcacacacacattgtcgcctgccttcccttccttccccagttgagttccccccgcggccccgcccccggtccccttccaccgacccaccatgtcggcgatgaggtgaggttgaggccaggtctactctccgcgaccgtcgccgacgccatcgccaacgagcagtttgctccatcttcgccatctcgcacacgaatacaatacactagttttggtagagatggaggacggcggcaaggcgccggccggcctgggcaccctgcgcgcggtgctcgccatcctccagtggtggggcttcaacgtcaccgtcatcatcatgaacaagtggatcttccaggtttacccgcattatattctagcttccccatccatcttccgccgcggatctggatgtcagatgcttctcctgcccggctgctacttttctcctttggaatatctaactaaattcgtccatactgcttaccattatagatcacggactagagacttggattgggtgggaaacagggtcaaatagacttatagcgtgtttggtctgagaaacgaggtagttatcatcttttcactactcactttttttgtttgtttttggaatggaatgaattgatccatcatttcaatccttgtaggccaataattagtaataatacgagaaatgagttcattccactaaatttgtggaatgaacatatgatgcacccacaccacctcatctgtaatagattggctcttcgaaccaaacaccccattagattgttactacgtactttggtttggttggtggttagtcaagcagggttcagcagctgtctagtccaggagagttgagagttgctgctcttatgcattttttatgtatttctgggtgatagcagattgtgtatatgaacgtgtaaaatactgttagactactgtttagagagtataatttgagataggagatgagatgagtaggacttctgtagatagcctaacaataagaggttacctactcatctcccatcatcttatgggtggtgtcaagactcaagagccgtgcccttttgatataataagtaagttgctctctcttctctgcagaaactggatttcaagttccctctcaccgtgtcctgcgtccacttcatctgctcttccattggagcttacattgcaatccatgtcctcaaggcgaaacccctgattcaagttgaaccggaggaccgctggaaaaggatatttccaatgtccttcgtcttctgcataaacattgtgctgggaaatgtcagcttgcgctacatcccagtctccttcatgcagacaatcaaatctttcactcctgcaaccacagttattctgcagtggctagtctggagcaagcatttcgagtggcgcatatgggcttcgctggtccctatagttggcggaatactcctgacttcggtgacagagcttagcttcaacattttcggtttctgtgctgccatggttggctgcctggctacgtctacaaagaccatcttggcagagtccctactccatggatacaagtttgacagcattaacacggtgtactacatggcaccctttgccaccatgatactggctctaccagcgatggtgcttgaaggaggaggtgtaatgaactggttctacacacatgattccatcgttcctgcgctgactatcatcctaggttcgggggtgcttgcgttctgccttaacttctccatcttctacgtcatccattcaacaacagcagtgacgttcaacgttgcaggcaaccttaaagtcgcggtggcagtgttagtgtcgtggtcgatcttccggaatccaatctctgcaatgaatgcaatcgggtgtggaatcaccctggttggttgcactttctatggctacgtgaggcatctgatctcgcagcggcaggctgcagccccagggagtctaggaacagcgcaagcaaggaatcagacggagatgcttccccttgttgtggacgagaagcaagaaaaggtttagcaatggtgctaggccttctcttcacttgttgaagagagaattatatatgtactcgtgcgtgcgtgtgtggtgagggtagtaaactggaacttcgtacaagcatcgtttcctccttccatttgtgacactattcgccagcatcagaatgtgaaattgaattaagccccccccaggaggattgggcttggatgctggggcttcactcccggcaactcgccggggggggcacaggactcccaggccaccgggggccgactttccgggctccactcgtcgggaactgggaggaagggcttgctcatgaacttcctgaacctttttttgtaatcccttggggaaatcaccgttggcgattcatttttgggcaccaccaaaaacgctttcaccatcgtctccagctgcttgtcccatgtatactgcctcaggtagtcgatgatgccgaataccagctcacgcttttgcctgtccactccaaccagcaaagagtagtccatgacattgatggacgtgagaaaagacgtgtcgttccaaattgcccgctccaagagatgctttgctcttccaccaatatagattggaaaaacacgcatgtcatccacaaagttctggtccaagtagacagtgccagcatggtcatttgggtcggagacataacgtgaaaagatggcgcctttcagatcatatgtccgcgacacattgtgtccaaacaagatgttctccatcaccatcagatccatcttgatctccttgccatgtcttgtctgcttcacctgatagatccctaagattttggcaaggcaagtctggctccccgtgtccagagaatggttgacatgcctgaagtaatcaggcgcaaattttatgaaggactcaaactctgtcttctttatttgctttatgatgagcctgccatccattgttcttgcaaagaatgccttgctcttcccgccctgagcatcccacctcttgcaacggctcaatgaggcaacgtatgcaagctccgatgggcagcatttccttcggaggttgtagaactggttagagtgtacacagatgaccgagtacctccctttgagagctgttatcccgttgacagctatttctggatggagagaggacgatagaagaagcgaggtatcatagctggagaggtcgtcagacgaaatgcttgcctcagaatccgaagaccacagagaagcagatgaactttcagataaagagctgtaagacttgtccattgttttactcctggtggtatctgctggttcagtctcagcgacagcatccatcagtaagtgccgacgttcctcggatacagcaagagctcgtgatattatactggatatctcatcctctgatacacacaagatactgccacctggacctactgtgaactgtggagatccccccatctcctcgccagattctctgtgtttgtgcaagggggataaatgacttggacagtagtggttaacgacctcaaaccttttcaaacatccaacttccacttcctgcctgaaagccaatctggactcattcactgggttccaaatccatttttcttcccccccgtcacactcacagtttgtgttgtgctgatcattgcaatgcttatcattccatgcatcatcgagcaaggctgatgcagtccctgcttcaatgaacttctctggttccttgatacatctattctcaaaaggtgctatgctgctcatgcgctcaccgattctgcctgcttcagcggctgctgcagtttggccatttgccgctattgccttttcagctggtgtacaacctacaagttggtgcagccggcggtcccacacataaagttccagcagaagatcctgatagagccagtttacattaaggatatcatccacagagcttgattccctatttcgatcaacagtctttgctagagaatccatgaactcagccttctctttaatcaacatctcttcaagttgggaaaggtatttaacaggaaactgatccttgagcttctgtagtgcgcttgtgacttccgagaaaagtgtaactcctgtagcaagaacctcttgcccgtaccactcgtgcatatcggaattgtgaaactcaagagtaggctgtggtttgcaggcattgtaaatttcgactgaggaatactggaacattgcaactttggagcccaacccaaaaaagcgcagacaatcggtattgagtgaatgcccgcatattgacagccttctagcggttgagtggcttgaaaaactgagttcaaggaacttcccaaatgaaaggtagtgtgcttcagctgacattatcacccttcgtgatgatctggagatcccactttcacgttcacaccttaagcatctagtccacatccaaatctttccttctgattcaccaggtaaacgatatttaggcagcaagtgcctcacaagaacagtcagattcccattgcggtgagtgtaggaatacatgtgagcctctggaggctctccacatgaggaacagctgagattctgcttctgcaaaatgtcttgcaaatagcgtcctaaggaaacatcaaaattcccgtagtatcttatacgggataggcggctctgctcgcagataacctgctttgtgatacactggctagacagcaaaataagtatgctctgagactccaacacatcgtccacctcatctgtatcagatgttttaatattttccaatgactgctcatgtttttcactaaccgaagggccgtccaatgccatttgctgattggtttcagaggatgcttgttcctggggatcgcttaaatgatccacactctcaacagaaccaattggtactccaacgtttgggctgatatggatactgtcttgtatctgatgatcagttgcctcttgagaagaagtgaccggcaaataaatattatgataacggagtatatcaatgaatcttctgggtgattctgggactgctgatactactagtccttcagaagggagtagtgcttgattagggaagcccttgtcgagtggatttagagcattggaatcagtagtttcctgtactgatcctagtgacgatggtccggccttcctagcaacagaaacttcttctttggaagaatccttattgttcaagattagtctctgatcttcgaagaaggatgtctcaagaacgaggcggtacgctgcaaacactgtgtagttcatgacctgcttgattttcttcagttcttgagtatttgctccccttagcaatatcgtgcatcccagtggcttgtgaaagccttccaggaacattaatgttttagatggcctgcttccaactccagcgctgcaggtaatcaggttgtgctcctccgtcaccttttcgatgtggaagtagtcgcactgcttcagctttggcttgctgagaacctctgaaaacgagactatgggggcgccggagcagcgagcaaccctctgcagccggttgagcttcatgtcaagcactagagtgacaccttccttgagaagaagctcctgtatgtcgcgtgaaaccgttctctcgaccaagacgacatctgggcggcagatctccatcatttcgcagacagacttgtccagatggtctttctcctgctctatggaactgaacgatgaaaagccaacataggaatggccgaggagtccactaagaagcagcagcctgggattgtgacacttggtgggcatgtgcttatgagcgacgttcttcctgaagactaggcccttgacgacctcacattggcggggtgtcccagatgctaggcacttaaccttgatgtaagaggaagggtccatttggttgcctacagcagtgccaacatcaggcttgatggcaagggcagcttcccaggacagggagatgacgatatcaagccagctgctggtatcaatgccagccgactctagaaagcgagcggcgagcatcctgagctgcccattcatggctctcagcatggctttctgccgctcctccctgtgggcggcggactgatgatcagagtcatggcgccacctgcagatactgctggtagcatcatcgtcgtcctcgtattcgtcatcctcctctccggctccggcatggtaatcatcatcatcatcatcatcatcttgcatcatgctgtctgctgctgctgctgcctcatcaggcggtacccagatggcgtcgtcgtccgattcagcggtggccatcatgcgaacctcatcctgcttggcatcgtcgtcccttgtgtgcagcagaatcatggtaatattaatcgagctccaaatcacacgacagcaagcagctgggcatctctctctctctctctcgcctgacgagctgaagcctgaactgacgatgaatctgacgaggaggaagaagaaaggcttggagtagcctcgtgccgaatt

SEQ ID NO: 113306 - DNA, 374 bp, Zea mays
  Clone ID: MRT4577_34819C.1
gcacgcggcggaggctcggaattcggctcgagctgtcaccaaaatcggtttttctgaacggggggtgggtgagacgcgggggggttttaagagtgttttggttttcaccctccacttggtgttgctagctaatggatgcatgcatgccagcctatctcctttgatggggattggggcttttcgatgcgcactgtaatccatcttcaaagagagagagagagatagagagagacagatagttggtttgcatggggtgtgcgacctccaaggagtacagacgactacctccgggatgcgaggatcccaacaccttaccttgagagagcacgttttcttggcaaccaaggggaggcccgttacaagctgtacaagag

SEQ ID NO: 113307 - DNA, 295 bp, Zea mays
  Clone ID: MRT4577_3481C.1
gtcgctgcagcgaggaatgctcaagtgacaagataagctctacctagccaaacacttatgcacagagcgatgataaagaaagaccacccggacagaatcaaactcatcttgcggcttatgctcctgccgatttacaatatttgatcgtgtctgtatcatcagtaaacccaacttgcgtcagtaaagtcctcgaatcttgaacactatcactgccaagactttgtgagacgtggaaagagcctatagagagacttaatgggtcatggtaaaacctatagttctcaagtagaaaggt

SEQ ID NO: 113308 - DNA, 481 bp, Zea mays
  Clone ID: MRT4577_34820C.1
ggaaaacaaacatgtccaggtggcaaaaaagaaaacaaaaaatatttacagcaaatttcatggatcagccccaccccacagggggcaaacaaaaatacactagggggacaatctttttgggcccccaaagctcccttaaaaaaaacgggggcaacctgcagggtttacgggacacccatgcaagcataatgccctcgctaacttgccggggacaaaattgggggcgaaagcccaacccttttttttaacggggccggcaaaggggccggcaaggttctcaagggggcccttgccggggacaaaagcctgcacaaaaaaacccaacatggaaaacaaagggagggggccgttctaaaaccccttcaccttgagcccggaaaacccccccgggtcgtcgggaaacccaagcgggtcaaaactgcccccagggaacagggggtcaaccacctttccaagcgggcccccgggaacccggtacccc

SEQ ID NO: 113309 - DNA, 205 bp, Zea mays
  Clone ID: MRT4577_34821C.1
tgcatatgccgtgttaggctgcggccagtcgactgtttgcgtagtggatgtagttgcaaataggagatgggatgcgtaaggctgctggagatcatagctttagcaagactttctgagatggacctttactctgcgccgagcctttaaccttgttccagcccagaccggcacatcttgacaaggggactgcacccctacttccgct

SEQ ID NO: 113310 - DNA, 166 bp, Zea mays
  Clone ID: MRT4577_34822C.1
gtcgattcacgcgtccggccgacgttgcgaatactacgtaaaaacccaattacatgttcatcttttctctttctacctcactacaatatatcaaggagaatgggaagtcaatagagaatcttatcctgaccttcctgcccatgaggaaccaattaatcctataaaa

SEQ ID NO: 113311 - DNA, 373 bp, Zea mays
  unsure (1)..(373): unsure at all n locations
  Clone ID: MRT4577_34823C.1
gtggggggcaccccacttttgtttacttattttncaccaaataccgattccagtaaaaagaaaaagaaaaggagttcctgtggtttcaaaatcaccaactagctgtgaggtttgcatccaccaacagcaattcctaaaccaacaacgaccggttctttttggacatttcaatcccagcttcttatttcaaaaaattaggatttcaattaaccgctacaaaattttttttaatgggagaggcccgattaccggatcaccccgcgcgagccgaatacacaattaaattggctgctttacactacatgagatgagatgacagcccttccttatgataaacctgaatgcatgccatgcaaccccggaaaaactaccg

SEQ ID NO: 113312 - DNA, 203 bp, Zea mays
  unsure (1)..(203): unsure at all n locations
  Clone ID: MRT4577_34824C.1
ctctactacttttttataaggcttgcgtcaaacttctagatcgcgggtgtggaataaatactcaaagcttgctggagcacattttgtgtccacaacacaacctatgtcacattcttactcaactctaccaagtttggcgcacgcaaaaaaaaaaaaaaaaaatattttaaaacaacaaaaaaaaagggggtttatgctnnggg

SEQ ID NO: 113313 - DNA, 652 bp, Zea mays
  Clone ID: MRT4577_34825C.1
gcgccgaggtctctccccctggctccctcctctagctccggcgcccggccggatctcccagcgtcgcgcccagctctgcttcctttcccatggcggcctcccttcccctccagctccctcctccagccgagcggttccctggcgcacgcttgcttcctgcgcgtgctcgccggccggagctctctagcgcgctcgcccatgccgcgcgcagccaagctcgccctgcacgtccatctccctgctctagctctgttgccacgcgagctcgccctggctcagatccggcgctcggcgcctgtttctctgcttctctccctgcgcccaaggcttttccagtccgcgccctccttgctgcagctcgccccgcgccccttatgcatgcgcggctgaacgctgtgccgggtactaagcagtgcttcgtgaggcgtcgagcttagctcggtctttgtttctctgcagcgtcgtacacgacaagccgtcgctgctccccaccgcgccgagctgctcacattcctgctcccttcgatcaccgtctaatgaggacatcacttctatacatacaatgaatggaccgataacacgatcgcgtgcacgacagctaaatctctaggtacgttctaccctagtcaattttgttttagagcttacgctt

SEQ ID NO: 113314 - DNA, 988 bp, Zea mays
  Clone ID: MRT4577_34826C.1
caacgggagagtaatcaaattaagttatggattgacaaaggcgtcacaaggtgtgcttgttagtttcgtactgcgcccattcggtcgtgaacaccggagtgagctgccacagcctcttgctcctcctggcaacgtcgtcgtcgacgccgtcctcgtcgtcgcccccatcgtccagccgcagctcgggcgtgctgccgtccgtggcgaagggcaccgccagcacggccctctcagcgagctccctaaggaacggctggctcctgcggaacgactcggcgacgaactcggcggggcccgccacgatgacgagccgcgtggtgccccgcagctcgccgagcgtgaacggcctgttgctacccgcgccctcggcggcgccggcgcggagccggagcctgagcctggacaggcgctcctcccgcgcgagcctggccacctgggcgtccttggccttgctctcgcgcgagtagaggaaggcgaagagcgagacggccgcgacgtcgatgcccaggcccttgagcgtgctggccgcgctcgcggagtcggacccggacaacgccgggaggagccgcgtgagcgcgatgaggccccccagcgtgccgctggccatgaacgcgaggtagaagaacatccgcaccgaccggaacggggagaggacctcactccgtatcttcgcaatggagcttacctcgctgctatccggagtggtcgggggaggaggggagggcttgtttgcggcggagcagcggacgccggcgcggcatgccctgttacaggggaatgatggcttacggggaattcgccgcgacatgggaagaggagcgcgtagccgtagggcgtagggaacgggaagggtcgccgccatctcaggacgccggcagctttgcgtgcttgcctgcctgcggagtgcagactagagctctggtccgtgtctccccgaccgatggtggggctcccgaggatttcatccggacgcggggcggacgcgggg

SEQ ID NO: 113315 - DNA, 354 bp, Zea mays
  Clone ID: MRT4577_34827C.1
gcataagcaagaaccagcaagaaaggggagagagaaagccgaaggacttttcctcggattgcatccttcgcttttgagggaaggagaaggaccctctctgtcctcgcggggggcggcaggaggagcagatgtttcccgcctggcctgatccaccaccgccctgaccctacccgtcccggcaatggcccacccccctccgcccccgtgggcccaaccctttacctaccggcgaccccaaacccaagcttccggtgaccggccaccttcaacaaccgtttcttgaccccctggcccaacttggccgaccccagaaagccacacccaaaaactatcttaaggacgatgggtgtcaag

SEQ ID NO: 113316 - DNA, 486 bp, Zea mays
  Clone ID: MRT4577_34828C.1
gccggccgggccgggattgaagggtcatatacaaagaattcgtgagaggtggctgtagtttagtggtgagaattccacgttgcctgaacgaaaccacccgagcaaatttctcgctagacaaccaacataatcactggcttgcaatgcttcatcatccagacttaaaaaaaaaccagtaaaacaatttttgctatatcatttcacattgcagataccagaacgatatgatcctcaagtttgaagggagagtccactattggtttattttttcaggtgcattggactttttcttgcttttcaattggccaactgtctgttgaatactttatattagctggatcattttcttcacaacaaacctgtttccaatatagtgttttcacatggacaactatacttagagtgattgtcgttatcttcctccaacatttgcttttaaataaacctctcttttactctcaaaaaaaaaaaaaaaaaaggccccta

SEQ ID NO: 113317 - DNA, 416 bp, Zea mays
  Clone ID: MRT4577_34829C.1
gcagcgaccaggtcccggtccgcaatttcgggccagacctacgcgttcgggtacgaccaggcactagctaaagcacgcgaagctaggcgcctgagccgcgcggccggttacatcctctccacggagacaagaagctgctcaaggcggtgctgggccagctacgcagcgacccagcgccaccagaacaagacctgccacacgagatggccgcaggcgctggtcgcgatttatcccctcggatgaatcacttgtaggggacattagttgagcagcgaacctaagtatgtgattgggtgcgtatattatgggaaatacatacatatttacataattggggggggaaacatgtgtgtgtgaggcaaggagttaagatcgcctatttttttgggtgctgcggacgaattggactaagccat

SEQ ID NO: 113318 - DNA, 495 bp, Zea mays
  Clone ID: MRT4577_3482C.1
cgaacattaagagcgcgtcttgctgaaacctgtctttttatcaattattcctagagggctcgaacccaccacgcttattaaacataattagcattcttttacttacccgccggggggaggtactaccaaggaataaacacaaggagactacggggtgcacccgcagggacgacgaacacacaactggagctgcttaaatcgaggtggagctcgctgcggcatgttggttggatacttcgaagcgcgacacgatggggttccatgtttgttgctcgctcatggcaaggaaaaggatggcgtgcatgtggcggcttcgatgacagagcgggggacgagcgcacccatgggggctggacaaacaccgcgagggagacgggaggacgcagggaccaagcacaccaaccgtgatgccgaaccgcgagggactcaagcaaggtaggaccgactcaaggccagtggggagcgcaggacgtactggaccataaacctaaggga

SEQ ID NO: 113319 - DNA, 289 bp, Zea mays
  Clone ID: MRT4577_34830C.1
ggaaacagagggggttttttttagagcccttcaaaccccaaaaaactcaagggcaagttccccaagggggataacaaacccattggcctgaaaaactgtttattgatcacactgaaacaccaaagggcaaaataacccccccccttttgtaaaaatttgcaacttatatacaaatttactgagagctaaagcgacttttttgatgggataatgtggcccaatgacccttattataaaaccctgccgagcatgaccacatagggttaaacctttgagcccttattgattt

SEQ ID NO: 113320 - DNA, 536 bp, Zea mays
  Clone ID: MRT4577_34831C.1
tgggaccctcgaagccggccgggccgggatacagaaaacataataacatagactatctatgtataagacagaggacagcaaaagtatctaactagcatggagggcggacgcaagaaagcagcaggagctgtggtggcgctactgtttctccggctcgggcgtagtccgacatacgagacactgcctcgcctcctgcgacgctgatacctgcgccgggccggcatcgtagcactatactgctccgaggacaagtagagcatcgagtaagagacctcctccgagtccaaaccggtggcttcctaacatgtcatactacacacctggctgggcaacgcctagtccatagctgcactgaggtgtaatctgcagctgaccgatatctctgcaactgtgtggcgctaccatagacaccagcaccctactcgaccaggtcgactcattagcatgagcatggcgatctaagaagcaaagtataataatgatggatcatcgttcgtatgcggaaacaaaagaaaaaaaaaggaccctagggcccg

SEQ ID NO: 113321 - DNA, 700 bp, Zea mays
  Clone ID: MRT4577_34832C.1
ccggccggacgcatctgatcgatactctcatcccctgcagctcccgcccacccacccacaggcgtcgctctcgccggagctgcagcggcgacgcgggcctcggcgcagcgggatctcccaccctccgcccaccgtcgccgcctcgccggccgacccaggcagcgcagcgcaacgatcggtcacaaacaagaacgaccaaggcgcgcccctcaagcggcgtcgtcgtcctcgtcctcgtcccccccgagaccccgagcgcgtaggaaaaagtcaacccggatccatccacgagaatagatggggtcgttcaaggggcacgggctcccgggcacgttgttcctggcggtggggctgtggcgggtgtggtcttcggcgtcgcgacacgccgcggatccgtcgtcattccgtctgcgcgcgtgtagtcccgcgccggcgcgcggaccgccacgtttgctggatctctacgtttgggcgctccttgcgtatgtcgcacatgtgacaggaagcactctattcagctctacatgagcgacccatctggcaactacggagcgtggaaagccgccgctgctggggccaacaggcaggccgcgcaggccatgctcaagcaggactactaggacgccttgacccgcgaggaggacgtacttctcgcgctcagggtcccactaagacttggactccaccagcttgactgccg

SEQ ID NO: 113322 - DNA, 404 bp, Zea mays
  Clone ID: MRT4577_34833C.1
ggattcccggctcgacgccacgcgtccggcgaaccgcactatcaacgttctaaccttaatggctaccacgatattatccgtctttgggcttcttgccctttttgtgagcgcaacaaatgctttcattattacacaatgctcacttgctcctattgccattattccacacttcctccctccagttacttcaatatgcttgcaacacccagctgtgcaagcctacaggctacaacaatctcttgcagcgagcgtcattacaacaaccaattgtccaattacaacatcaatccttggcacatctaaccatacaaaccatcgcaacgcaacagcgacaacaatttctaccatcactgatccatctacctgtgctgaaccctgtcgtctacttgcacagcaattgcttg

SEQ ID NO: 113323 - DNA, 208 bp, Zea mays
  unsure (1)..(208): unsure at all n locations
  Clone ID: MRT4577_34834C.1
ggngattaacagatattatanaaccccctatttatatgttctactaaaaaacatctcatatgaatcgaattaaacaaacaaagggggaaaacaattgaaggaaaggaatgaactttggtcagcttgattctttgagccagcagtgaccgtcgatagattatgccaccatttgtttctgcttcgaccactgcgcaaatatttcgccggc

SEQ ID NO: 113324 - DNA, 488 bp, Zea mays
  Clone ID: MRT4577_34835C.1
cgggcgcgtgggcggtctgtaccgtcgtcgagaccaggcggctgtgtgtgcccgctccgtggtactgtgcccgaccgcgtcctgtcctctgtccgttctgcggggagccaggacgctgcctcagcgttgatttccccggcgactacggttgtgactccgctggtcttgtccgtcggcccggagactatcgtctgccacgcgccgagctgcgtgtgtaccctttcctgctgtgccgtgctcggtgcgctctgctaccacttgcacgagctgttctaccgctgcagcgacgatttcggcgcgatcgtctgcttctagggctgcttccacctgttcagggagggcggcctggtctacctcggctccctcagcctggtcctcgtgcacaggatgctccgcttctgggcctgcctgttgttgcttttcggtgcccaccccggctgccggtttggccgcggcctcgatggcctaggtcctggtcacggtccccc

SEQ ID NO: 113325 - DNA, 274 bp, Zea mays
  Clone ID: MRT4577_34836C.1
cccacgcgtccggtgagagacgccgtggaaaggaatctttcagctcacacctccctatccctccctccctccctcccttctcctcctactgctactgctcgccaggtcccctcgctcgctcgtcgtcttcaacctcacacaattatttgtgctcccgctccttccgtccgtccttcctccctcctcccctctccctcttccaaccgccgctcctgctgccttgcctctcagccgagggacgtcaaggtctctctcaggatggtgtaggccgtgc

SEQ ID NO: 113326 - DNA, 197 bp, Zea mays
  Clone ID: MRT4577_34837C.1
acccactcatccgtccacacgttcccgaacatgtacatgcttttcaacgacctgaccaattcctcgaccagggacactttcaacaccaatcgcatccacattggcaactaaatcggcatcacaatcaccaacaccatcatcaacatcggtaacgactgcatctacatctgcccctgcacctgcaacgtgaacatcaa

SEQ ID NO: 113327 - DNA, 455 bp, Zea mays
  Clone ID: MRT4577_34838C.1
cttttgacgagagccagctctcccaggacacgaggggatggtgtccaccaccctagggggtgtctagatgctcgtgattgagtacgcagagccggtgcagacttgatcaactcgcgacatgcaaccgttgatgagcgagaagcaggtgctagggaacccgacaacgctaccgacatggaccccaaagatgaaccactgctgctcgtgggaccacctccggggcaacgacgcttgacgcgagaacaacgcgcttaaagacggcacggacgacgtgagcggccaaatacaccacgaagtgggcggactgacggaggtgatgacgctgaccatgtatcggatggcggggctgacgggccctatcccagtctgcctgggggtgctggacaacctgcaggtgctgacctgtttccacaccaacgtgtccgacgccatgcagcagtgcctgaagaggctgt

SEQ ID NO: 113328 - DNA, 294 bp, Zea mays
  Clone ID: MRT4577_34839C.1
cccacgcgtacgggcgtcccggagctttcgttttcactagcgatcaagtcgcaaaggggggtcctttttatcttgctcagggcatcctccaacatgaccctttcgaggtcctggaccagaggggtgtggtcaagctgttaaatgttttttcataaggggcctcaaagtttgtcctaatttttaatgtttttcttttttggtataacatgtttgtaaattctctttctttgttgaccttttttttttaaaatgctctttactattttattctttattttttgttactcatatttt

SEQ ID NO: 113329 - DNA, 361 bp, Zea mays
  Clone ID: MRT4577_3483C.1
gggccaaacagccggggtttttttataaatcaataaatgtaaacagggacccagggtgggaggctcttttccatacatgttttattagcagagcaaagggattttttttggagccctactcctacccagggaagccaaccaaagcaaaggaagcgaggacctgaggcctcacgggaggcctcacccttttctcgcggaggaaggcaacgggggcaacaacaaggagcccgaggaggtctcggtaaacccaaaaaacaacctggttaatgcccaccttgaggacggacttggcgaggacctggtaaccgctgttggcaaacatgacgaggaccatcccggggtgggcccgccaccgtttgcc

SEQ ID NO: 113330 - DNA, 662 bp, Zea mays
  Clone ID: MRT4577_34840C.1
gccaaccaactaaagtaccttcatttcctgaaaaaaaaaaagaccttcatctgattgacgtgtcctagttatctcccacttccctctttttcccctcgagtttttcctcactcttttctctggtggcctctggtttgggaagctcgctcgcatcagcaaggtggggattattttgcccagagagctccggggccatgaggccgatgcatctcttgggggtcacttgcctatggatcctctcatgcgccttgctgctcggcggcgcttgctccgatgggttgctgaggatcaacctgagcaagaagaggctggacaaggaaaccctagcagccgcaaaatcggcgaggcaggagaccaacctgctgaggcccgacgatggatctcgccactctctcggcctgtcagacgatgacatagttcctctggacaactacctagacacccagtacttcggaggaggaatcggcgtcggcacgccgccgcagaacttcacggtcatatttgacaccgggagctcaaacttgtgggttccgtcgtcgaaatgctacttttcgatagcatgctacttgcaccacaaatacaagtcgaccaaatcgaccacttacaagaagaatggagaaacttgcacaattagctatggctctgggtcaattgctggcttc

SEQ ID NO: 113331 - DNA, 377 bp, Zea mays
  Clone ID: MRT4577_34841C.1
aaatgaaatcaaagatgaaacacaggccaaaaagagacccaagaagcaaaaaaagggcaaacagggcaacttagccaggaaaaggaaacagagcggagaaaaaatccaagcaggaaaaaaatcgggggaaaaggaaaccctgagccagaaagggggtgcccgggggcggcaagggcacacggggctgcaacggggccggatgcggccgaagaacccgggcggggacagaaaaaggggaaaaaacgggaaccggaagggcaaaccggcagccggagggggaagattgccgggcaggtagcacccgagggaacagtggaaggggtcgaggacaccgggctcgccgggaaggtccaagagggtccgaaacggaaagcaaa

SEQ ID NO: 113332 - DNA, 236 bp, Zea mays
  Clone ID: MRT4577_34842C.1
ctagcaccatcgttcgagtgtgcgagcaagacactgagagatcttgcaacgttggttgacagtcttatgtaagtaaataatctatggcgcgccaacaggggagcagcgggcgtcacgcgggctgggagctatgcaggctgtcgttccgagctatatcggtatatgaacaccagacgcaagacaagcacgacaagccggatgcctctgatactaaattttactgccacccaggccca

SEQ ID NO: 113333 - DNA, 302 bp, Zea mays
  unsure (1)..(302): unsure at all n locations
  Clone ID: MRT4577_34843C.1
gcntcnacntgnacgacaacacataatgagccaccaatcacatgcctatcatatagtanaacccagnncatncanccctaanaggggccctctcagcccncnnaatgacctcnggcctagccatgtganttcacttccantccataacgctccncatacgaggcctactnancaacacactaancatataccantgatggngcnannnnngggaganagcacataccaaggccaccacacaccacctgtccnanaaggccttcgatacgggataatcctatttattacctcagaagtnttgg

SEQ ID NO: 113334 - DNA, 308 bp, Zea mays
  Clone ID: MRT4577_34844C.1
cccacgcgtccgcctacgcgtctactgtttcatggacctacacgagtacgttcccatggcggggaccgtcatgttcagagagctgcttcataactatcctgattcatactacataaaatctctatctaactcagtaaatatctacttgagtcatatcattgatatagatgaattacaaaagatacaatgagctctactgaagaatgcatcacgtcgaagtcatttgttaaagatatgtaatacaaggatactctacatcttacatcagctatctgatatggacataattaatatcaatactaacgtat

SEQ ID NO: 113335 - DNA, 493 bp, Zea mays
  Clone ID: MRT4577_34845C.1
gaaaccgggaaacccctcccttttttttttgcgtgcctgacaaggcccgactgaattgggacaatgcctttttagccacggggctggaaagttttcctccaaaaccttttgtgggggaaaaaaacaaaaaatttttggttcgaaaccacacaccaattttttatgggctgcacccacattatgaggccccccatttttaaactggcgtaagaatttttttgctgggctttttcgcggggttgaactgtttcaaccacttggcaaactcctttatgtagcgcgtgcagtttttgttgcggtcgacgtaaacaatgccataacgttcggggaagcccgcgaaccattcaaagttgtccaacaaaaaccaagcgaagtagccttgcccatttgatcccaagttttttgattccttaaaaataaccatgtggccctggatttaatctaaccttttgtaggcatttaaggcatcccccatgggtagaggggtctcctt

SEQ ID NO: 113336 - DNA, 699 bp, Zea mays
  Clone ID: MRT4577_34846C.1
gaaaaaataattgggtccccagcaagcggacgctagagtgtagacggactgagggagagccctcctcgtctcctccgcccctcctccaggtttgcgtgagatcggcgagcgaatcacgcacacagctgtaggatggagtggggatttgctgtctctccctcttgattgcagtttaatcctttccatttcatccgtccgttcctcgtccacccgagtccgttgaccgttgaagtacagtgggacagggagcaaccgccatcatccctgttcgtcatctctcccaccatcaacaccaacatgggcagcaacacggaaagggccaggaaggcgttgggcgccatgaagctgatcggtttctctaagaagcaggccatcccagtactcaaggaactcctcaaaatcttcaacaacaactgggagcccattgaggatgagagctaccgtgccctcgcagatgccatcctcgataggcaagacagcaagcaaacccctccctcccaacagggcacccaagcagcccatgcggacttggagcctcttagatcaacaagggacgatcggcaacaatatctttctgctagccttgatgacacatgtgaagatgataatgaaacacccctggtcaagaggcccaggatgggcaccgctaatttcagacagagctgcagccaccacagcaatccagtgtttcaacccaag

SEQ ID NO: 113337 - DNA, 330 bp, Zea mays
  Clone ID: MRT4577_34847C.1
attcttattttcttggtgtttctttggttttttttcttttacaatcacacaccaacagacaccttctattactttctttctcccacccaccacctatgtacaattgcccactcgaaagggaaaactttaactcctccaaaaatttgacgagaagacctaaaaaaaacgcgcgcccactactccctactcccgagcacatgcaccatggctggactacatatccaaccgctaccttacgctctccttggaacgacagctgcgtacccaaggacacacaaaaaaccagttaggtttcccaacaaggccacgacgcaaatcctcggtagaaag

SEQ ID NO: 113338 - DNA, 538 bp, Zea mays
  Clone ID: MRT4577_34848C.1
ctcatatgtaacctgcagcatcttcggtgttcccatcggtacctgtcgaagcatcttgtagtgttcagacagttcagttggctatcagtgcgaaggagacacattggtcaagcagaactgcagaggaggtgtacctgggcagacaagttagagttagcaactgacccacttcactttgattttacgttattgagttgctctgcgatgtacaggtttggatctccttatgttgacccaagttctatatcctacaggtttgttttaaatttggtatactttcataaatgcaattctcacttttcgagaagtaggacaatttaaagtctgactaaaattattttaaaaaggtattaatattgaggatacagaataaatatcattatattgattataaaatatattttggtagtaaacttagttgaagacataaatgttaatgttcctctatagttttagttaaattgaatctagtttgatttgcacacatcccgtagtttggacgggagagtaagctcttgtttttccctgaattgctctg

SEQ ID NO: 113339 - DNA, 471 bp, Zea mays
  Clone ID: MRT4577_34849C.1
aggagcttacataacacttattattcatattactgacaacattacaggacacaaagcacagctagacacatgattcagccttataacataaaatgagcgtcctctcatgcacactgaccgacagaacataggagatgattttagtaccgaacagcgcaccgttattggaggaaaccaggactagttatagaatccggagcgggcggccttatttttttgagtcgtcttaacagtcttgggttttccggtatatggtattacaactcttgctaaacggtttcccactcataacggcctacaacttacgacctggacacataaagcgttaaaccacgacgcctttacaaagaccactagcttacattacaagcaacgcgctgactgtgcgcttatcaaaaactaaaacccgtttgcctgtttcatgaaataatccatcgacagacaggctgagaccagtgtgcttattcttga

SEQ ID NO: 113340 - DNA, 1118 bp, Zea mays
  Clone ID: MRT4577_3484C.1
acacggagctggtgacgggcgtgcaggccatcttctcccacttcgtcccaactctgccggcgttccaccaggtgctggtcttcgtgtgcgtcaagtccgtcccggtaccgtacgtgcccatggatgaacggtacctcatcgggcggatcggccccagggagtaccgcatgtcccggtgcatcgtcaggtacggggacaaggacgtgcagaaggacgacgaccgcgtcccgaaccgtctggtcatgagcatcgcccggttcatccaattggaggccgaggagtcggcctcgtcggggacggggaggagctacgagtcgtcgacggagggcaggatggcggtcgtgcacaccaccggcacgacggggaccgggctggtgatgatggcctccgccgaggacgcggaaggcacgtccctgtccaggagcagcaagtcggagacgctccggagcctgcagtccatctacgagcaggagtccgccggcaccgtcagccggcggcggaggagggtgcggttccagatcgacgaggaggagcggatcgagccgcaggtgagggacgagctgtccgacctcctggaggccaaggaggccggcgcggcctacatcatcggccactcgtacgtgaaggcgaggaagaactccaatttcctcaagacgttcgccatcaactacgcctactccttcctccggaagaactgcagggggccgtcggtgacgctgcacatcccccacatcagcctcatcgaggtcggcatgatctactacgtgtaagtgtaacccaggcggcctgccctcaaagtcaaagcagcacggggggattttcattttctttcgggtgatacgatatgcttgttttggacccagacttactgctggagatactctctccgtttctttttatttgtcgctggatagtgtaaaattacagtatccagcgacaaaaataaaaagaaacagatgaagtaattagttagttttgtctctgctctgcaccgtatctgtatcgtagtttcatcaaggtggtggcataaggcacacagtagccgaatcggccggttgccaccgtttgttcaccagagctttcggtaaccctttgtaaatagattctgttcatcatgg

SEQ ID NO: 113341 - DNA, 1491 bp, Zea mays
  Clone ID: MRT4577_34850C.1
gcgtttgcccagcgtccgcggatacccctccgggcccttgctcctcatctacttttctcctccgccttccactcatccttgctcctgcctgccgtcgtgcatcatcatctccggccagggccagggcattcgtctccgcctccggtccggcctcctccacaccgcgccccccagacgcgtcgctgcgtagctgctggccgccatggccaccgtcatggccgcggccgtctcgtccttcccgtcctcctcggccgtcgtcgtcaaggcgtcgccggcgtccccctgtgccgccccgcacttccgcccgagggccgtgcgggccgctatccgggcgcaggcgtccgccgtcgaggcgcccgccacggccaaggccaagaaggagtccaagaagcaggaggagggcgtcgtcaccaacctatacaagcccaaggagccgtacgtcggcaggtgcctcctcaacaccaagatcaccggcgacgacgcgccgggggagacgtggcacatggtcttcagcaccgaaggcaagatcccgtacagagagggccagtccatcggcgtcatcgccgatggcgtcgacaagaacggcaagccgcacaaggtcaggctctactccatcgccagcagcgcgatcggcgacttcggcgactccaagacagtctcgctgtgtgtcaagaggctcatctacaccaacgatgccggagagatcgtcaaaggagtctgctccaacttcttatgtgatcttcagccaggtgataacgtccagataacaggaccagtcggcaaagaaatgctgatgcccaaagaccccaacgctaccattataatgcttgccaccggtacaggtatcgctccgttccgatcgttcctgtggaagatgttctttgagaagcatgacgactacaagttcaacggtctgggctggctcttcctgggtgttccaacgagcagctcgttgctctacaaggaggagttcgggaagatgaaggagagagcgccggagaacttccgggtcgactacgccgtcagccgggagcagacgaacgcggcgggggagaggatgtacatccagacccgtatggcggagtacaaagaggagctgtgggagctcctgaagaaggacaacacctacgtctacatgtgtgggttgaaaggcatggagaagggtatcgatgacattatggtgtcactggctgaaaaagacggaatcgactggttcgactacaagaagcagctgaagaggggagatcaatggaatgtggaggtctactaaccgctgaattttgcagctgacattttgtgttgtgcgtatctgtaagtgaggccagggtgtactacgtatataatgtagatagtgagtgtgttctgcgtttttttttactattgccgtctctgtttatagatttgtataagtactcttaatattatgcctattcgattttttatatgagtaatgtgatcaagtgcccaagaaaaaaaaaaaaaaaagcggcc

SEQ ID NO: 113342 - DNA, 595 bp, Zea mays
  Clone ID: MRT4577_34851C.1
acggcttccctccacaaccacttgctcctcatctacttttctcctccgccttccactcatccttgcccctgcctgccgtcgtgcatcatcatctccggccagggccagggcatcccggtccggcctcctccactctgcgccccccagacgcgtcgctgcgtagctgctggccgccatggccaccgtcatggccgcggccgtctcgtccttcccgtcctcctcggccgtcgtcgccaaggcgtcgccggcgtccccctgtgccgccccgcacttccgcccgagggccgtgcgggccgctatccgggcgcaggcgtccgccgtcgaggcgcccgccacggccaaggcgaagaaggagtccaagaagcaggaggagggcgtcgtcaccaacctatacaagcccaaggagccgtacgtcggcaggtgcctcctcaacaccaagatcaccggcgacgacgcgccgggggagacgtggcacatggtcttcagcaccgaaggcaagatcccgtacagagaaggccagtccatcggcgtcatcgccgatggcgtcgacaagaacggcaagccgcacaaggtcaggctctactccatcgccagc

SEQ ID NO: 113343 - DNA, 709 bp, Zea mays
  Clone ID: MRT4577_34852C.1
ggccgcttttttttttttttttttggacataaattctggggcacttgatcatattactcatataaaaaatcgaataggcataatattaagagtacttatacaaatctataaacagagacggcaatagtaaaaaaaacgcagaacacactcactatctacattatatacgtagtacaccctggcctcacttacagatacgcacaacacaaaatgtcagctgcaaaattcagcggttagtagacctccacattccattgatctcccctcttcagctgcttcttgtagtcgaaccagtcgattccgtctttttcagccagtgacaccataatgtcatcgatacccttctccatgcctttcaacccacacatgtagacgtaggtgttgtccttcttcaggagctcccacagctcctctttgtactccgccatacgggtctggatgtacatcctctcccccgccgcgttcgtctgctcccggctgacggcgtagtcgacccggaagttctccggcgctctctccttcatcttcccgaactcctgaataatgcacaagagcaccttgtagagatcgatgtactgacctcctagcttgtacagatcgatgtactgacctccttgtagagcaacgagctgctcgttggaacacccaggaagagccagcccagaccgtgaactgtagtcgtcatcttatcaaagcccggccggcctcg

SEQ ID NO: 113344 - DNA, 2262 bp, Zea mays
  Clone ID: MRT4577_34853C.1
cgcttctataaaaggataagctccctgggcaacctccaggccgccgggacagaacgagtgaggccaggcgacttcatactgctcgcctcgccgtctttcccccaatctgttgctcctccaagctgcgggcgatcgccgtaccccggccgccgcagggaaccccctcgccatggccttgcaggggaagaagctcatcaacaaccccgacgatgtggtgacggagttcatcgaagggttggtggagacttacccgggtctgcagtacctcgacgggttccctcagattaaggtcgttcttcgtgctgatgtcgagcgcggttcctatgacaaagttgcagtcatctcgggtggtggaagtggccatgaaccttcccatgctggatttgttgggccagggatgttgacagctgctgtttctggagatgttttcgcctctccacctgttgattctattttagctgctattcgagctgtaactggtcccatggggtgccttctaatagtaaagaactacactggtgatagactcaattttggattagctgctgagcaggcaaaatctgaaggctataagatggagatggtcattgttggagacgattgtgcccttcctccacctagagggatagctggtagaagaggtttagctggaacaattcttgtgcataaggttgctggggccgcagcagatgctggtttatctcttgcagaggttgccgcagaagcaaaacatgcatctgaggttgttggtacgatgggagttgcactttctgtttgcacattgcctgggcaaataacttctgatcgtctaggtccaaggcaaatggagcttggccttggaattcatggagaacctggagttgctgttgttgaactccagccagttgacgtagtggtagaacatgtccttaaacagatattgtcacaggaaactcagtatcttcctgtcacaagaggttgcaatgctgttctcctagtgaatggattaggagccactcctatcatggaacttatgattgcagcgagaaaagcagttcctgagttgcaattggtgtatggcattgctgttgacagagtctacactggcacacttatgacatcacttgatatggcaggattatctattaccattatgaagtccggcgaaagcattttgaagagacttgatgctcccactaaagctccagcttggcctgttggttctgaaggaaaccgtccaccagcaaagtttcctgttcctctaccaccatcaccttcaatgaaggatgacgagattcttgctccatctcaggagctgagcaagcaagggtgtatcctggaggctgttattgaagcaagtgctactgaaattatcaatctcatggatagcctaaatgaatgggacagtaaagtgggcgatggtgactgtggaagcacaatgtatagaggtgcaacagctattcttgaagatatgaaaaagcgttaccctatgaatgatgcagcgggaacaataaatgaaattggggcaacaatccgaagggtgatgggtggaacaagtggaatcttgtatgccatactctgcaaggctgcgtatgcaagcttaaagcagagctcaactgtcactgcgaataaatgggctgatgctttagaggcctccattgctgctgttagcaaatatggtggtgccagcgcaggataccgcacaatgttggatgccctaattcctgcttctgctgttctgaaacagagacttgaggctggggatgatcccgtgactgctttcatcgcgtcttctgaagcagcatcagctggcgctgaatccaccaaacaaatgcaagcgaaggctggacggtcatcatacatcgctccagatctcctggcctcaatccctgatcctggtgcaatggctgcagctgcatggtacagagctgctgcccttgcagtgaagaacaaagtgcacggttcaaagagctagtagcatacgcaatgcttcattgctagacccaaaatagactgacaggaaaaatcactggggcattttctcactccccttagatttggtttccgcttgtgcttttgcatgggccgagaaaaaaaatgacttccatattgtctcacccttctcacatcatacaaagagatgttcaaagagttcgtcgtccgtacaagttaagggaagctatgcttttgcactgccgtgatatctcagcatgctgtcagtgttggaatgaccaaaaaaaaaaaaaaaaaagcggcttgtttaatttgcccgagtttcgtttt

SEQ ID NO: 113345 - DNA, 865 bp, Zea mays
  Clone ID: MRT4577_34854C.1
cattgggtacctcgaggccggccgggaatcttcttcgaaattgtgtcatcccacaccgtgttccctcctcacacggtctagagtcaagtcaactcactctcctagtcttcgatccagatcccatcgggttggactgtgtacactcttaaaacttcatcagctcccgagcaatctcagcccgtacatcaggttcttggatctctcccgagctgggatccgtcaagttttctgctccagcggcgacaattcgtcaggaatggccaacaagccgagtcttctgagcactctgccgactaacccaccagcacagtttctgaaagatatcacggacggcttctctgaaactcaaatgcttggtgaaggtgcatttggaactgtttacaagggcattctgcaagatgggcagccaattgcggtgaagaagcttgcagagaatgcgccggtggcacctgagaagcagttcaagattggggttgggaaccttatggccatgcagcatccgaatatagtcaggatactcggctactgccgtgaaccgcaaaggaaagtgattgagcagagtggaagatacattattgtagacgtggttgagagcttactgtactatgaatacgttcctaacggaaaccttgaaaagtatatttccgatgcatcagcttctagacctgattggaagacatgcttcgagataatcaagggcatctgccagggcttacgttacctacataaggaaatggataggccaattgttcatttggatcttcatcctaccaacatattgttggatgagaacatggtgccgaaaatcacggatttcggcctgtccagactctttggtgaagacaaccagaataacacattatgt

SEQ ID NO: 113346 - DNA, 2243 bp, Zea mays
  Clone ID: MRT4577_34855C.1
gaaaggataagctccctgtgcaagcaaaagcccacagaacgagtgaggccaggcgacttcatactgctcgcctcgccgtctttcccccaatctgttgctcctccaagctgcgggcgatcgccgtaccccggccgccgcagggaaccccctcgccatggccttgcaggggaagaagctcatcaacaaccccgacgatgtggtggcggagttcatcgaagggttggtggagacttacccgggtctgcagtacctcgacgggttccctcagattaaggtcgttcttcgtgctgatgtcgagcgcggttcctatgacaaagttgcagtcatctcgggtggtggaagtggccatgaaccttcccatgctggatttgttgggccagggatgttgacagctgctgtttctggagatgttttcgcctctccacctgttgattctattttagctgctattcgagctgtaactggtcccatggggtgccttctaatagtaaagaactacactggtgatagactcaattttggattagctgctgagcaggcaaaatctgaaggctataagatggaggttgatagacacaaatattactatgttgtgtggcagatcatattagttttaatgcctatgtatcatttatcttccaattgtagatggtcattgttggagacgattgtgcccttcctccacctagagggatagctggtagaagaggtttagctggaacaattcttgtgcataaggttgctggggccgcagcagatgctggtttatctcttgcagaggttgccgcagaagcaaaacatgcatctgaggttgttggtacgatgggagttgcactttctgtttgcacattgcctgggcaaataacttctgatcgtctaggtccaaggcaaatggagcttggccttggaattcatggagaacctggagttgctgttgttgaactccagccagttgacgtagtggtagaacatgtccttaaacagatattgtcacaggaaactcagtatcttcctgtcacaagaggttgcaatgctgttctcctagtgaatggattaggagccactcctatcatggaacttatgattgcagcgagaaaagcagttcctgagttgcaattggtgtatggcattgctgttgacagagtctacactggcacacttatgacatcacttgatatggcaggattatctattaccattatgaagtccggcgaaagcattttgaagagacttgatgctcccactaaagctccagcttggcctgttggttctgaaggaaaccgtccaccagcaaagtttcctgttcctctaccaccatcaccttcaatgaaggatgacgagattcttgctccatctcaggagctgagcaagcaagggtgtatcctggaggctgttattgaagcaagtgctactgaaattatcaatctcatggatagcctaaatgaatgggacagtaaagtgggcgatggtgactgtggaagcacaatgtatagaggtgcaacagctattcttgaagatatgaaaaagcgttaccctatgaatgatgcagcgggaacaataaatgaaattggggcaacaatccgaagggtgatgggtggaacaagtggaatcttgtatgccatactctgcaaggctgcgtatgcaagcttaaagcagagctcaactgtcactgcgaataaatgggctgatgctttagaggcctccattgctgctgttagcaaatatggtggtgccagcgcaggataccgcacaatgttggatgccctaattcctgcttctgctgttctgaaacagagacttgaggctggggatgatcccgtgactgctttcatcgcgtcttctgaagcagcatcagctggcgctgaatccaccaaacaaatgcaagcgaaggctggacggtcatcatacatcgctccagatctcctggcctcaatccctgatcctggtgcaatggctgcagctgcatggtacagagctgctgcccttgcagtgaagaacaaagtgcacggttcaaagagctagtagcatacgcaatgcttcattgctagacccaaaatagactgacaggaaaaatcactggggcattttctcactccccttagatttggtttccgcttgtgcttttgcatgggccgagaaaaaaaatgacttccatattgtctcacccttctcacatcatacaaagagatgttcaaagagttcgtcgtccgtacaagttaagggaagctatgcttttgcactgc

SEQ ID NO: 113347 - DNA, 311 bp, Zea mays
  Clone ID: MRT4577_34856C.1
cacgcgtgcgtgtaccgggctcctattacagggtcgacctcagcgttcttctactagcatcataaaagcacatagttgtccaacagtggccgccaacatattcgataacttatgcttcgagctctttctgatagggtagctaccgcaggcgctcctcccacgaatggtcacaagctactaatcacttttgattttttcaacatcacagtttgaccgaaggcgtctttagtgggagaaaacccagggggccaacccttacggataccagacgcgcgtatgcaacggcaggccatctgtacgcatgtattcac

SEQ ID NO: 113348 - DNA, 645 bp, Zea mays
  unsure (1)..(645): unsure at all n locations
  Clone ID: MRT4577_34857C.1
atattgaaaggtgctgtgtagccatgaaaaggttgaagaggcttactctttgtttgttgagatggtggataagactgagttgaggccttggcaaggcacttgccagcatttaattggtgacttgctgagggtaaacaaacttgaggaggcactgtctcttctgaagacaatgaaaacctgcaagttcccacctttcgccgatccattccctccttacattgccaagtatgggacggttgaagatgcaaggaacnnnnncaaggccatgacagtgaatacttctccagaacctgttgcctacctgcatgttctcaagttgttctttgcggagggaagatattctgaagctcaagatctactgtatggatgccctaatcacatccgcaagcaccccgatgtcattaaactgtttggatcaataaaagttgagagtgcctctgcttctagattgggttcaagaaagcaataattgaagcgaaaatgatgggacttgatagatacatacgtatacgtatcatattaaattgtatgagtggccctcaaggtttgaaggagtttggccaggcatgatgtagattggtaacagaaagcacttgtatgagtataccattgtgtctcttctttggaagatgctgcttcccttgt

SEQ ID NO: 113349 - DNA, 778 bp, Zea mays
  Clone ID: MRT4577_34858C.1
aaaagcgccgatggacgtcccacctaatcctttctcgcactcgcaccgtctgtggagaagcgagaggaggaaggagacaaagaaaggaagggaggggaatcttcgtagagcactaggcagcgacggagtcagcgcagcttcgtctccttccttccttcccctttcgctggccgctggccgtcggcaccatcacctacggccacgggcgcagcgcggcgccgctccataccgggtccgcgggcctctcgccaaggaaacccgataagcctccgctgctctgctgctctgtgctcttgccttctctcccgtccacggtccacttagctagaaacacacaacaaacaaggagaaatcgcaaggaggagcagcgcctgccgccgcgccgtatccagcgaggcagcccccccgccccgatctgccggcccgacacgctgggatcttcctttccttagccgaccggtcaacgccgcagatattctccttccctgcggctctggaggtttccgtaaacccgtcgcccccctccttctattccttgcaggtatcgacgatcagacggagcagttgcttcaatctcgacttcgacctccatctgcattgaacccatttgggattttggagaggggggtgcttgcttgtattgcacagcatctgcatcagttcacattctttgggcatttgctatcttgtcaggcttgctgactatacagttctggttcaaggaacgcctttctgaggtctcttggattatgggagctttctgttcatgtctgcaacc

SEQ ID NO: 113350 - DNA, 408 bp, Zea mays
  unsure (1)..(408): unsure at all n locations
  Clone ID: MRT4577_34859C.1
ccggccggggctccataccgggtccgcgggcctctcgccaaggaaacccgataagcctccgctgctctgctcggctgctcttgccttctctcccgtccacggtccacttagctagaaacacacaacaaacaaggagaaatcgcaaggaggagcagcgcctgccgccgcgccgtatccagcgaggcagcaccccgggcccgatctgccggcccgacacgctgggatcttcctttccttagccgaccggtgaatccaccgtcgcccctttcctcgttcctccttcccttcgtctccccccaggatctcgccttcgctcggcgcttcccgattcgcggccggcggggcggactccggctgtgtgggtggacgcaaggtagccggcgaaaggtatngacgatcagacggagc

SEQ ID NO: 113351 - DNA, 807 bp, Zea mays
  Clone ID: MRT4577_3485C.1
gccggactctccccggcgcccccaccacttgctcgcctttgccccttctgtctcccttcgtccgtagcagaccaggaacgcccaaggcgctagcgtctccaagatggtgctgcaaaacgacattgacttactcaatccaccggcagagcttgagaagctaaagcacaagaagaagcggctagtccagtcccccaactccttcttcatgaaccactgtgttcagccactcccagactgtggttgtgtgcccaggctgccaaactgttctctgccaacctaccggtgggaaggccaggctcaccgaggggtgctccttccgtcgcaagggcgattaggtcctgcttctcttaacgtgagaagagataaatttggtgttttgcaactttctcaggatatgtactgtactcggtgaggattttgttaattattatggctgttagcgtggcctgacaatgcttgtgtgtaaacctgcactttgtttgagcgtagtgacatctaatatggtgctgtttggcttttgctgagggagtggcaatgcaaatgaaatcaactggtggcgttatttgggggggttggacgcgtaattttgaacggggacggcaccggggagtgcgccggagtcacccacagcctttcacaggaatccgtctttgggggcttgctcctcggcctttctgttggccgtctgcacggccttgaaccacagaaacccggaggtcgggatgccggggaaaacaaaaaaacccaagagcggggcgtacagggcgctgtcggggccgacaatcccgaacaccggccggtggttgg

SEQ ID NO: 113352 - DNA, 273 bp, Zea mays
  Clone ID: MRT4577_34860C.1
gccagatcagttgggaagggagcttcgaggctggtcgtcctgacacgtggttcaagcgcgcggagctaatggcactggccgttggggcgcatacgccctaacatggatcgaatcgttcggtaagcagaagctccatatgctagattggattctcacttaaaggcatatatatctaatacctctcacaggagctacgcaccactttatgttgaatctagcgcgatgaccaatagtgtgaatcaactgttgctatgagactacgtggaatcacta

SEQ ID NO: 113353 - DNA, 2413 bp, Zea mays
  Clone ID: MRT4577_34861C.1
caccgtctgtggagaagcgagaggaggaaggagacaaggaaaggaagggaggggaatcttcgtagagcactaggcagcgacggagtcagcgcagcttcgtctccttccttccttcccctttcgctggccgctggccgtcggcaccatcacctacggccacgggcgcagcgcggggccgctccgtaccgggtccgcgggcctctcgccagggggacccgataagcctccgctgctctgctcggctgctcttaccgtctctcccgtccacggtccacttagctagaaacacacaacaaacaaggagaaatcgcaaggaggagcagcgcctgccgccgcgccgtatccagcgaggcagcccccccgccccgatctgccggcccgacacgctgggatcttcctttccttagccgaccggtcaacgccgcagatattctccttccctgcggctctggaggtttccgtaaacccgtcaccccccctccttctattccttgcaggtgaatccaccgtcgcccctttcctcgttcctcctcctcctcctcctccccttcgtctccaccccccggatctcgccttcgctcgtcgcttcccgattcgcggccggaggggcggactccggctgtgtgggtggacgcaaggtagtcggcaaaaggtgcgattttgatcttgtattcttgtttccgaggccagctgcgttgcgtgatggctggtccgtcgaaccttcgctgctcatggttttccgtgatatacgattgagtagttcgattcaatagacactagaatcgatttgggtgccgccgacctgattcttccgtcccgaatgctgttgggttggatgggggactacggggatggtattttggtgcgcggtgctgccggggcccaaagctttgcgtccaaagtcccaaattgcaggaagaggaaactttgttgtcaatttcagatttcttttctctgtggacgtgtgtgtctgtccaacaacgccttctctggagttacctgattttgctgcctgccattgataggtatcgacgatcagacggagcagttgcttcaatctcgacttcgacctccatctgcgttgaacccatttgggattttggagagggggggtgcttgcttggattgcacagcatctgcatcagttcacattctttgggcatttgctatcttgtcaagcttgctgactatacagttctggttcaaggaacgcctttctgaggtctcttggattatgggagctttctgttcatgtctgcaacctgattattcggaccaccatggaaaccaagcttcttcggcgtttaggaactgcatgtgcctcagatgctttacccagcagctgatcaatgcgtatactgttttgttccgagctggagcagtgcattctgtttcccccgctattgaagccactcctgttgattcaactgaaagctccttcgatacatatcgttcgccgccaagacctctgccctatgatgatccacgattttcccctcctgctcgtgactggttaaggagtgagaacccaagccattccccagaggaatcggaaccacttagagcaaatgaggatgatgaagaaatggaaacaccaagtataatacagaaggcaagtaaaacaaactacaacacaaaaatgaaaatctgcagctctacttatggtgataaggtgccaccaagggaacatggaaattacttcagctatttttccccatctgctgaagatgaagatgtttgtccaacttgtcttgaagattatgattctgagaatcctaggatagtaatgcagtgctcacaccatttccaccttggctgtatttatgagtggatggaaagaagtgaggcatgccctgtctgtggaaagaagatggagtttgacgagacaacataatcctctggctggactctacaccatggcccatggattaacaacaaaccttctcatatgacattctgaaaatacagatggtctagcccagcaagttctctgtaaatacgccctgtaaatattggactggtagtgtgggtccctcttggccatacgagtgctctccaaatgctggaacggtgcacataaacattcttttccgatttgttacaaatagtcggcaggggaaggttgccccccctctgcctgtctgcgcctctgcctctgccttgtcgaggcttagaggtgcattggttgtccggtgatagattcatcggaagcctgtaaattaaagacctaggctcatataataatcatatggagtcccgtggttctgaaagttcttgcaatgataactatttggcttcagagactgaaattctgtcatagtagtggtgtttatcatgccaacatttgtttccgtggtgttgctaattgtgactcatggacacatatgaagagttatttattacacttattgtc

SEQ ID NO: 113354 - DNA, 489 bp, Zea mays
  Clone ID: MRT4577_34862C.1
agcataataatccagttatccccccatttcagtattgaatgtctttatgattgaatggacaaaactgaagcatgtcccgtctgcgaaaataagatgtgagttttttgataccacatcttctcctgaatgaactccacgccatggcccatggattaacaaaccttctcatatgacattctgaaaatacagatgggttagcccagcaagttctctgtaaatacgccctgtaaatattggactggtagtgtgggtccctcttggccatacgagtgctctccaaatgctggaacggtgcacataaacattcttttccgatttgttacaaatagtcggcaggggaaggttgccccccctctgcctgtctgcgcctctgcctctgccttgtcgaggcttacaggtgcattggttgtccggtgatagattcatcggaagcctgtaaattaaagacctaggctcatataataatcatatggagtcccgtggttctgg

SEQ ID NO: 113355 - DNA, 2070 bp, Zea mays
  Clone ID: MRT4577_34863C.1
gaacaagcgtcgatggacgtcccacctaatcctttctcgcactcgcaccgtctgtggagaagcgagaggaggaaggagacaaggaaaggaagggaggggaatcttcgtagagcactaggcagcgacggagtcagcgcagcttcgtctccttccttccttcccctttcgctggccgctggccgtcggcaccatcacctacgggcgggcgcagcgcggcgccgctccataccgggtccgcgggcctctcgccaggggaacccgataagcctccgctgctctgctcggctgctcttgccttctctcccgtccacggtccacttagctagaaacacacaacaaacaaggagaaatcgcaaggaggagcagcgcctgccgccgcgccgtatccagcgaggcagcccccccgccccgatctgccggcccgacacgctgggatcttcctttccttagccgaccggtcaacgccgcagatattctccttccctgcggctctggaggtttccgtaaacccgtcgcccccctccttctattccttgcaggtgaatccaccgtcgcccctttcctcgttcctcctcctcccccttcgtctcccccccggatctcgccttcgctcgtcgcttcccgattcgcggccggcggggcggactccggctgtgtgggtggacgcaaggtagtcggcaaaaggtatcgacgatcagacggagcagttgcttcaatctcgacttcgacctccatctgcattgaacccatttgggattttggagaggggggtgcttgcttgtattgcacagcatctgcatcagttcacattctttgggcatttgctatcttgtcaggcttgctgactatacagttctggttcaaggaacgcctttctgaggtctcttggattatgggagctttctgttcatgtctgcaacctgattattcggaccaccatggaaaccaaacttcttcagcgtttaggaactgcatgtgcctcagatgctttacccagcagctgatcaatgcgtatactgttttgttccgagctggagcagtgcattctgtttcccccgctattgaagccactcctgttgattcaactgaaagctccttcgatacatatcgttcgcccccaagacctctgccctatgatgatccacgattttcccctcctgctcgtgactggttaaggagtgagaacccaagccattccccagaggaatcggaaccacttagagcaaatgaggatgatgaagaaatggaaacaccaagtataatacagaaggcaagtaaaacaaactacaacacaaaaatgaaaatctgcagctctacttatggtgataaggtgccaccaagggaacatggaaattacttcagctatttttccccatctgctgaagatgaagatgtttgtccaacttgtcttgaagattatgattctgagaatcctaggatagtaatgcagtgctcacaccatttgcccaccttggctgtatttatgagtggatggaaagaagtgaggcatgccctgtctgtggaaagaagatggagtttgacgagacaacataatcctctggctggactctacaccatggcccatggattaacaacaaaccttctcatatgacattctgaaaatacagatggtctagcccagcaagttctctgtaaatacgccctgtaaatattggactggtagtgtgggtccctcttggccatacgagtgctctccaaatgctggaacggtgcacataaacattcttttccgatttgttacaaatagtcggcaggggaaggttgcccccctctgcctgtctgcgcctctgcctctgccttgtggaggcttagaggtgcattggttccggtgatagattcatcggaagcctgtaaattaaagacctaggctcatataataatcatatggagtcccgtggttctggaagttcttgcaatgataactatttggcttcaaaacggccactgaaatgctgtcatagtagtggtgtttatcatgccaacatttgcttctgtggtgtcgctaattgtgactcatggacacatatgaagaggttatttattcccctt

SEQ ID NO: 113356 - DNA, 1214 bp, Zea mays
  Clone ID: MRT4577_34864C.1
gaattctcggtgcgacccacccgtccgctgttttgttccgagctggagcagtgcattctgtttcccccgctattgaagccactccagttgattcaactgaaagctccttcgatacatatcgttcgcccccaagacctctgccctatgatgatccacgattttcccctcctgctcgtgactggttaaggagtgagaacccaagccattccccagaggaatcggaaccacttagagcaaatgaggatgatgaagaaatggaaacaccaagtataatacagaaggcaagtaaaacaaactacaacacaaaaatgaaaatctgcagctctacttatggtgataaggtgccaccaagggaacatggaaattacttcagctatttttccccatctgctgaagatgaagatgtttgtccaacttgtcttgaaggtattatcgcagtaatcatttttttctctaagtgtattggaaagatgccctgatatttttcaaaagctacagtaaaatttccatgacataagactttggtacatgtgaattgaacaaaggtgttcaaaactatgagcattacattttttttctggtgatactgtataatcacattctcactatggttatatattaatgtaactaaaatgcagaatatgattctgagaatcctaggatagtaatgcagtgctcacaccatttccaccttggctgtatttatgagtggatggaaagaagtgaggcatgccctgtctgtggaaagaagatggagtttgacgagacaacataatcctctggctggactctacaccatggcccatggattaacaaaccttctcatatgacattctgaaaatacagatggtctagcccagcaagttctctgtaaatacgccctgtaaatattggactggtagtgtgggtccctcttggccatacgagtgctctccaaatgctggaacggtgcacataaacattcttttccgatttgttacaaatagtcggcaggggaaggttgccccccctctgcctgtctgcgcctctgcctctgccttgtcgaggcttagaggtgcattggttgtccggtgatagattcatcggaagcctgtaaattaaagacctaggctcatataataatcatatggagtcccgtggttctggaaaaaaaatattaggccggaaaaaatgcgaataaagaagttcctcaagaaataaaaaaaaagggcggc

SEQ ID NO: 113357 - DNA, 215 bp, Zea mays
  Clone ID: MRT4577_34865C.1
ggcaaaaccaaccaggtttaagctacaaaagattttattatttagattttagaaacaaccgccataccatgggcctacaaatgggagttaaccaaattggtgggacggaaggttcaacctcccatttaagtgctgctgtacttgaaggggggaagacatgctttttggggcctattaacatatgccttcaaaagttttctgattttgggcccaac

SEQ ID NO: 113358 - DNA, 268 bp, Zea mays
  unsure (1)..(268): unsure at all n locations
  Clone ID: MRT4577_34866C.1
ttcagngaggatgctttttcccattaagtctggtccgtgtttatcaccaaagtgacacagctcttgagttcaagtccctctaaatccgttccccattcactacttcagtttccacgccgtgacctgctagtggtgaccatatccgcagctcacatcctcaccatggtaaagatccgtcggaggttgactccatccgtgtggtgcccgatccttgctcttcacacaattcccaaaataatatgcatgaaattctataattgttttctga

SEQ ID NO: 113359 - DNA, 584 bp, Zea mays
  Clone ID: MRT4577_34867C.1
tgaattcggcacgaggctctctctctctctctctctctctctatctctctctctctctgtctctctctctctctctccctccctccccctcccgctccccccacggccaccgcccgccccagcgacagccacagccgcagggcgccaccggcggcgagcgcgcgagccactgcgggggggggggggcgaccaggttttttttcaggagcgctgagaagatggctgagaaacgcgggggggggaagccaacgggaaaaggagagaagggaaagcagggaagggtcaagcacacagaggcgagatactctgcaaacacggacgacaacacgatacacacaccaataaataccagacaatgtgctaacacaggcaagatagcggaatacaagaacaagaaccggacgcttgagggccagtactcgataaagcgcgagcaagagatagaatgagagcgcgcgtaaaataaagtgagggacggtgatgaccaccagaacaaagttgacggggacactccgtacagctagagtgtctggaccagaaaaatgcggtactcaaacaaagaagctgcctcatatactcactga

SEQ ID NO: 113360 - DNA, 1867 bp, Zea mays
  Clone ID: MRT4577_34868C.1
aaaaaaaaaaaaaaaaaaaaaaaaaaaaaaaaaaaaaaaaaggcggggacatgacccgtggtgagatagatggagaaatgtgggagaacggttggagacgacgattttggatccaagcaaatccaggcacaaaacgcgtcggcacgcgcgttgccgaattcgtggagtgcggactccgcgtgaatccctatccggtttcaatatactccaagagatttaaatctttttaacgaaccgagcagatccgcgccccaccttatatatatatcaactggactcgaacgtcctgctctctgctctcccccgcagacaaaaaaaccctagaattcccagccgccgctctcctttccctcgatccgccgttcctccaagcgcgcacgcatcctcacgcctgcgcaccgccgcccaacgatctacgagctgccatggctaactcagcggcaccgggaggagtgaggtcgttcctgcaggccgtgtctacggtcaccgaggagacgcggacgccgctccgtgtcgtccagatggagggcctggctgtactgaagatcattaagcactgtgaggagtttgcgcctgctttagttacaggtcaattgcttggtttggatgtcggtagtgttctggaagtgaccaactgttttccattccctatgagggaagaggatgatgaagcagatgcagatggtgccaattatcagcttgagatgatgaggtgtttgagggaagttaatgttgacaacaatactattggatggtatcagtcttgcttgcttggatcttttcaaactgtggaactgattgaaacatttatgaactatcaggagagcataaggagatgtgtgtgcattgtctatgacccatctagatctagtcaaggcgtgctagctctcaaagccttaaagcttacagactcgtttatggatctttaccgtaacaatggtttaactggggagaagtacaacctcttttctgtagctcatcattgtactagtttgtacaaatattttttatacaatgattttttgctgttgcaggttaagggagaagaaattgtcctgggttgatatctttgaggagataccattaaaaagttccaactcagcgcttgtcagtgcctttatgaaagagctggaacctgagtcacctgtaacccagtgtgacctggaccgacttaaattgtcaaccgccccctttatggaaaggaacttggaatttctgattgggtgcatggatgatctttcatcagagcagaacaagttccaatattataaccgcaatctctcaagacaacagtcacagcagcaggcatggcttcaaaagagaaggcaggagaacatggcgaggaaagcagctggtgaggagccactaccagaagaagatccatccaatcctatatttaagcctattcctgagccctcacgattggagggctatctagtaactaatcagatctgcagttactgcaaccatatcaacggggttgctggtcagaatttcgacaggctatacctgatgaaggccttacatgaggattagaagactgggctgtgatgaatgctgttagaattagcttgtgatactgctcaaaatcgtaattttgtgatgtacctttacatgggcgtgcctgtcctctacttaatgtttccatggaccagatggttagctcgtgatacttaatgtacttgcatatgtatgcgttgccgtataaaccaattttctccattagtatttttgtgacgctcagtttgaagaccatagagtagaaaaaaataatacaaaaaaggcccgcccccccattagtgccccccccggccgggaatttatttcgggaccggtccaggggggggtcccaccttccccaaagggg

SEQ ID NO: 113361 - DNA, 594 bp, Zea mays
  unsure (1)..(594): unsure at all n locations
  Clone ID: MRT4577_34869C.1
cggacgcgtgggcggacgcgtgnggatttttatatatattcccttatatgtttgctcgtttatttttttagagtctgcttcccttcattcctggccaccttagtcatctagtttcaccagtgttttggttggagggaataaagatgccatgttgtcagttgatgctcgatgcaattatgtctatgaatcatgctgccaccagcacaccatcatggttgcgtcgtttgcatgcgaaaaaaggaatatctgtgccatccaacctacaaattgatgacgtcatctatggagatggatcccaaccttcactatgcttgcctgtaccaacttcttctgaccaccaccataaaaatcttcttgacacttccaaaaaccaacatcaaaaggctactgagaccaaacaatgtaaaccacctaatagtgagacacaacaaagcccaagatttgaaaaacctcacatgtcacaaccacaacccaacgccgtgatttctaatgacttggggaccccttccattgatcccatggataccttgcccctcaaggcttttcgcaagaaaaagcaatccaccagcagcacattgcgcaacaaatccatcc

SEQ ID NO: 113362 - DNA, 272 bp, Zea mays
  unsure (1)..(272): unsure at all n locations
  Clone ID: MRT4577_3486C.1
acctggggnggggactggcttgagcgtgctgttctgctcgcttttggtccttgctgggggttccgggctcggctcctggcgttgtgtcgccgtggccctggctggtcgttcttccctgcccttcccgggggggggttcgtgcttgcctttcgggggccccgttccccttctcgtggggggttttgctgttccttggccggctttttctgctgttggcctgggctggccctggcgtttctcccctttctcgccttgctgcctttccccctttc

SEQ ID NO: 113363 - DNA, 283 bp, Zea mays
  Clone ID: MRT4577_34870C.1
ccggaaaaatcttttttaaaaaacaaaacttattttcacaagcaacacccaaaagcatgtggattccacagcgatctgatgataacaacaaggggcgatttttgaatttagaactatgacctccattcctaagggggaagggatcaacacaaaccttacttgttcatctccgagttcaaaaacaaccctgacatcatattggcgatcctcttttttgttcatcccaatcagggctttaagatcatcaaactttttacaatggggacctccttcgaagtttaag

SEQ ID NO: 113364 - DNA, 323 bp, Zea mays
  Clone ID: MRT4577_34871C.1
ttaaacaaccctgacctgccaatctcgtggttccacccaccgccttgttccatgggtcagtgaggatgaaagggaaggaggaaccgaggtacccgccgcaccgctaagaacgtgcaggctgggcagcagatcgcgagttccgacttccgatgtggctcctaccatccctgctccatttctctgtctccacacagcgggatcccttcgccgctcgccgcttctcccttggtagaccgaccgtccaaccatggatagcatttaccggcatgctccctacatgacatatcctcccgcagattttccaacctgtccaggttgacaat

SEQ ID NO: 113365 - DNA, 286 bp, Zea mays
  unsure (1)..(286): unsure at all n locations
  Clone ID: MRT4577_34872C.1
agtgcaaacacctgaaaaccagcgtttttgtatttgaagtttattaggttccaacagttattcccaaagttttggattaattggggaggggggggggggggggggggttttatnttttctctctccctctttttacaatacttcttcccggagggaatttaggtaaaacatttacagtgccggagggcatgccagggtttttatacctcaaagagggttatctgaaaaaaaagacggctacgacatttttcaaaaccctggtggaaatacaaaaacatgggggctt

SEQ ID NO: 113366 - DNA, 255 bp, Zea mays
  Clone ID: MRT4577_34873C.1
ttgttctccttcaccgaggcatatctgttgtagaacgggaaccggagcacacacagaaccaagcttgcctggactcgtggccctgccaccaaacagggcccccgggctcaaaacacaagtacaccccctgcttaacgttttattcaaacataagggaccccgccaccgaaagtgggatcgctaaaacccgtgcaaaatgcttaggctcaaaaacaacaaacggccaccaaccgccatggtcatagccaccaaaaa

SEQ ID NO: 113367 - DNA, 422 bp, Zea mays
  Clone ID: MRT4577_34874C.1
cttcttctgccgggttttcccagaaagaccaacctcgtggacgtgcttttgcagcctgctcctacgaccctgtctgcgcgagctgctacggcttctaacgccccccccaccaagatcaagttgcggaccggctgctctactcccacacctctgtctcgccacgccgacaacgatggaccggctgctctactcccatacatctgtctcgccatgccgacaaagatggatggcactggcaggtggttgtaggcaagagcacgaggtgtttgttgcttagtatggatcagtttttatattcctgtttttggcctccgtaagtggcctctctttgtatttgtccattttagaccttctttaccttcattattaatgtaatgaagtgcagttcacttgcgtgttcgagaaaaaaattatgtcagtat

SEQ ID NO: 113368 - DNA, 216 bp, Zea mays
  Clone ID: MRT4577_34875C.1
ggcctgagtttcttgtgcattactcctatccctccttcgttagaataggtctatcagctgtgtaaatagagcaagaccacagtaatctgcatctgaggcatttatgtagagttgcagttgtgtactgctgcatatgcaggctattgtaacagtgtggtacttactgatgacctcatgacaagtaccacaatgtattttagctattttagtcgtatt

SEQ ID NO: 113369 - DNA, 677 bp, Zea mays
  Clone ID: MRT4577_34876C.1
aattcggcacgaggacacacacgcaaccagatctcccccaaatccagccgtcggcacctccgcttcaaggtacgccgctcatcctcccccccccctctctctaccttctctagatcggcgatccggtccatggttagggcccggtagttctacttctgttcatgtttgtgttagagcaaacatgttcatgttcatgtttgtgatgatgtggtctggttgggcggtcgttctagatcggagtaggatactgtttcaagctacctggtggatttattaattttgtatctgtatgtgtgtgccatacatcttcatagttacgagtttaagatgatggatggaaatatcgatctaggataggtatacatgttgatgcgggttttactgatgcatatacagagatgctttttttctcgcttggttgtgatgatatggtctggttgggcggtcgttctagatcggagtagaatactgtttcaaactacctggtggatttattaaaggggtcgttctagatcggagtagaatactgtttcaaactacctggtggattattaaaggatctgtatgtatgtgcctacatcttcatagttacgagtttaagatgatggatggaaatatcgatctaggataggtatacatgttgatggcgggttttactgatgcatatacagagatgc

SEQ ID NO: 113370 - DNA, 263 bp, Zea mays
  Clone ID: MRT4577_34877C.1
acggaagcatgaggcggacccatcaagtacatggtcatccaaagcgagcccggcactgtcatccgcgggaagaagggatccgcatgcataactgtcacgaacacagggcaagcgatggtggacagcatctacgacgagcccatgacccccggccagtgcaacatggatggtcgagaggctcggcgactacctcgtaaagcaaggcctgtgaatggcttcagttaacctcgcacgctcgcgtgtccatggatcgagcatccagc

SEQ ID NO: 113371 - DNA, 328 bp, Zea mays
  Clone ID: MRT4577_34878C.1
aacacgcgtccgcccacgcgtccgtcttaacccaagccctcaccatgacaagctggggctttccttgccgaaaggcgctcagcaagatcgctggcaatacgctgcagatggaactcgtcaagtggcaactcaacatccctgctggattcaagcacatggtctccaataacctacaaacgtgggtaattgaggtcactggagcagccggcacggtttacgccacccagacctaccagttgcatgtagacctgcctgagcattatcctatggaagcaccacacgtcatcttgctcaatccagtaccaatgcatccacacatttacagcaa

SEQ ID NO: 113372 - DNA, 319 bp, Zea mays
  Clone ID: MRT4577_34879C.1
ctcctatatagcgcaatatatatagaagattctctcttacgttctcacccatgcgaggtgatatttcttctatggtgatacatataaccaatacactgtcctccattttacaacatctgtactaggaaaacccactcattacctaactttatctccttacattacattcccctttcaccagactgctgtaatatctaataggcccgaaccgatcgaccttcccaacattttcgcatccttaattgctaatggtacactccctgtttccgctcattaaactcgatagttgttgatgttactctcagcttttccttttaca

SEQ ID NO: 113373 - DNA, 595 bp, Zea mays
  unsure (1)..(595): unsure at all n locations
  Clone ID: MRT4577_3487C.1
ggccgctcgggccggccgggccgggaaaaatccgatccgcgccacgccttgcgccgcctggctggtatggccccctccgccggcgatgccgccggcgacgcttcccccgtttctcggtaccctgcttgggttctcctcgaaaaggaggggtacgacgacgaccgcgacgacgccaccagcgctgcgtgcaagacgaccgccggccgcgacgtcagggtgggcttctacctcgtgcccccgccggagatctcctacttccacgtccacctctccaagctcgaaggcgaggacgaggacgacttcgacttcacgcccctgtttctcttctcggccaagggcctcgtcctcttccgtctcctcttcgtcacaggaagcgacggaagcaatctcgtcgagtacttcatctataaggccgggcgcggcggcggcccgtcgctcgaacccatcccgccaactcctctgggcagcagcagggattcggtgtccgtgagcatcgtcccctgccccgacggcgacgaccggnngaggaanntacgnnntcgccgatctctctgtggcgagcgaaattgcgcactacgacctccacatttactcg

SEQ ID NO: 113374 - DNA, 401 bp, Zea mays
  unsure (1)..(401): unsure at all n locations
  Clone ID: MRT4577_34880C.1
catcctactgccgacggcttatgtggtnctgacgggtacgcttccactgtggtccctttggatgcgaggataatttaagcctttagccatgggtttggagaagtgccaaatttggaattttgctgtttgcaatcgtatttttttttggtgctccagcttaccgtttgcccgccttccgacttggcccctataactagcttctggatttacaatgggctccaatcttcccattcttaaggccttggggccgggccccgttgttggaagtctgttcagggctgttcagccagctaccggtatggtggtcctttttaccagatcttggtttttgataggcattgtaatgatacccttttatgttttagtaggattacaatcgcttttcaaattatattaatcca

SEQ ID NO: 113375 - DNA, 469 bp, Zea mays
  unsure (1)..(469): unsure at all n locations
  Clone ID: MRT4577_34881C.1
gctgacacaaacgctacgaccacgaacgctggcgctcctgtgtggaacgcacaacgaggcgctgactggggggcctcacggtcctattctgttggaggactaccacctgattgacaagtggctgcacttctcgcgggagcgcatcaccggagcgcgtggtgctacgcgcgcggggcctacgacaaggcttctttctagtgcacccactacgtgacaactgtgacgtgcgccgacttactgcgcgcgcccggtgttcgcgaacccgtgatcgtactcttctcgcggagatccactacgagggnctcggagacaaacggacccgagcgtttcaacagaaatttacagcgagagccaactgcgacctgttggacaacaactttcccgtgttcttcatgcgggacagcataaaaatccgccacgtgatccacgcgatcaagcccaacctgaggacaaacctaacaagaatact

SEQ ID NO: 113376 - DNA, 334 bp, Zea mays
  Clone ID: MRT4577_34882C.1
tggttttggaggttatgcaacgaccagatatacttgcacttgaaaatggagtacatgttgatgaagtggcaaggagacttggaatgccaagcgcacaaattctggccaccgcccagcgtcttgtcaatttggcatgcctctgttccactattgatgattatcatttcaagtctattaaatgattgatcaatgttaccatcttcaagacttggcattttagattattggcagtttttaggcccctttttatttttttctcgaaaggcgtaggaaaactgcacccccatatattaagaagaatgaaagaaggttatgcttatgagttatgaactaa

SEQ ID NO: 113377 - DNA, 528 bp, Zea mays
  Clone ID: MRT4577_34883C.1
cgcacgctcgcaaacacacataacaagcgcgcgcaaacagaggccgcaatctacggggatgtacccgcgcgggcaacttcattcttgaaaaagaagaggatatgaccatgacgaagaagaagttccacattggttacatacgctacaagactgctggtatcattcgacctgcggggagcacgctcacgacgatctataaaacgactgcttatcgatatagccaagtcatgaatgctttgacgcaacggtcagcgggccagccgttctgcctgccagaaatgcatgcaagatccgatatgaatatctttctgacaaaacgcaacagataccctccatgttctagtacagacactatataccaacttaccagacgcaccacaacaaccgcaaactgaatgatctctaggacgctctggattccataccaatgggggatattaccaaatcgtgttagcagaactcatgaactcaataagaaactgtgtgaatgcaactttccattaatggtgcattcattctggcaatgac

SEQ ID NO: 113378 - DNA, 245 bp, Zea mays
  Clone ID: MRT4577_34884C.1
aaaaatcctaaaaggtgacttaatttgatgccttaaattcacaagtgaggaagctaaggcctagaaggttaaggatgtccccagggtcacacagtgagcggggctcagagcttgagtgtctttgtgctttgtgtacattgtgttctccctagggtgctttagaccctgtttgttttcttctgcatgaggctgatttccagtttgtcatcaacctctttatcttataatttaggatagagttgaac

SEQ ID NO: 113379 - DNA, 228 bp, Zea mays
  Clone ID: MRT4577_34885C.1
attattatatcataccacctggtggaaacagcaagatattagcgcttacggttccccaatctacacagcctggaaaggtcaagccataacatttttaacagaaaagtccggtcctacaccaaaccggaaaaaacgggggtgcaacctatcgcaagaaaatgcaatattgggcaaccaccaacattgggagaagtccaagctttcatactaaaaaaaatgttgcttaaa

SEQ ID NO: 113380 - DNA, 746 bp, Zea mays
  Clone ID: MRT4577_34886C.1
gccggccggttcgagaagttgtggcactttgcatatatataaatgcaagtaccccgatcatcctctcttgagcatccccaaccccaacccgtcgccggaaaattccaccgcacacgagaccagcaggcgaagaaaggcagctaactaggagaagcaaagatgccgtgcctccaggcgtccagccccggcagcatgccttaccagcaccacgggcgcggcgtcgggtgcgcggcggaggcgggcgcggctgttggcgcgagcgcggggacggggactcggtgcggggcgcacgacggcgaggtgcccgcggaggcggcgcggcaccacgagcacgcggcgccggggcccgggcggtgctgctccgcggtggtgcagcgcgtggcggcgcccgcggaggcggtgtggtcggtggtgcggcggttcgaccagccgcatgcgtacaagcggctcgtgcgcagctgcgcgctgctggcggccgacggcggcgtgggcacgctccgcgaggtgcgcgtggtgtcggccctgcccgcggcgtccagccgcgagcgcctggaggtgctggaccactagagtcacgtgctcaccttccgcgcggtccccgggcgagccccgtctccctgaactaccccccccggacccctgtccatctttttccgctcgcgtccgacgccctcccccccctcttgccatccttccctgtcgctccttccctcttttcactcccccttttcccccccctttccccc

SEQ ID NO: 113381 - DNA, 710 bp, Zea mays
  Clone ID: MRT4577_34887C.1
cgaattcaccccggacccgcctgcgccctgactctctcgagccaggccgggccggggtaaaaaaaaaaaccttgacaagaacgaattcgcctccggctctcctcttctcgagcgttttcggcaccacggcgcagtaggatggcggcggcggccccgacgagagcagaggtgctgtcgctcttccgttccttactccgcacggcgaagaagttctcggactacaacatccgcgagtacacgcgccgacgcgccgcggactccttccgcgaaaaccgcgccctcgccgatgcgtcggccgccgccgcggcgttctcggaggggaagaagcagctagaggttgcgaagcggcaagcggtggtttactctctctacgcccccaaggccaagagcgtgatggagttgaaggtgcagtgatggctgcgaccttttcttccccaccgttcccgttccagattcgttgcttttgtgtgatgatgaaactataaactgctccgttgtcgcattttctggatgattgtcatgatatagtttcgttctgtgcaataaattactaaattctaccgccaaaaaaaaaaaaaaaaaaaaaggcccctagggcccggatgatgaaatccaatgaaggaccctcgtagtcaaccacaaaaaaaaaaaaaagggggccctgggcccccagttttggggcccctcgaactccattttttgtttccttt

SEQ ID NO: 113382 - DNA, 451 bp, Zea mays
  Clone ID: MRT4577_34888C.1
cccggaaaaagaatggtacagtgtttcaattccctaaaaacggagtcctagcactctttgggttgtttgtgacgcctgcaccaaaaaagtcaaggtataccccaaacgaacaaccctcccttttgtgcgggaggcggccttgggcacgcaacttgccatttcacatgttctcggcattcgggaaaaccttcgggctacgccaacacagaaacaggttcttcactccgcaggttacaggcacaggtccgtggcctttcctttgattaaggcgacggcctgagattcatgctcctgggccagtaaggccacgctccctttgttaattgaaaccttcgccgctggggttaaatattccaatggaccaaaaccctcctgcagttaaccgggtggcgttacaaccacaaactggggcccttcaatgattgatacctcccggcctgcctggtgcgac

SEQ ID NO: 113383 - DNA, 371 bp, Zea mays
  Clone ID: MRT4577_34889C.1
cggagacgtcttatgtaagaacctttgtggagtatctatagtgctaagtggggtgggtatggacaactcataatagggctttgaagaaagaataaaaattgcaaaaagttctaatttatacgagctggaaacaataaacaacaccttgattatcacaaactgcctcatggatattgagaaacaacatgatctacttttggatcccgtgctgggtacagacaactatgtgtcaatacaaaccgacacttattatataatataagtgaactagaggagctcataatctttgtcaatattatataaactcctaaacggattcagtttatctgcaagctcattacttctgtcaagattaccacatgaagaaattg

SEQ ID NO: 113384 - DNA, 720 bp, Zea mays
  Clone ID: MRT4577_3488C.1
gccggccgggccgggggccggccgggccccgggaaaaaaaaaaaaaaaaaaaaaagactccccgccgccgccaccacttgctcgccttcgccccttctgtctcccttcgtccgtagcagaccaggaacgcccaaggcgctagcgtctccaagatggtgctgcaaaacgacattgacttactcaatccaccggcagagcttgagaagctaaagcacaagaagaagcggctagtccagtcccccaactccttcttcatggatgtcaagtgccagggctgtttcagcataaccactgtgttcagccactcccagactgtggttgtgtgcccaggctgccaaactgttctgtgccaacctaccggtgggaaggccaggctcaccgaggggtgctccttccgtcgcaagggcgattaggtcctgcttctcttaacgtgagaagagataaatttggtgttttgcaactttctcaggatatgtactgtactcggtgaggattttgttaattattatggctgttagcgtggcctgacaatgcttgtgtgtaaacctgcactttgtttgagcgtagtgacatctaaaatggtgctgtttggcttttgctgagggagtggcaatgcaaatgaaatcaactggtggcgttatttgtcagggtttaactgaaaaaaaaaaaaaaaaacgaagccaagcgcccaaaaaaactaaaaaaaaggcccctagggcc

SEQ ID NO: 113385 - DNA, 523 bp, Zea mays
  Clone ID: MRT4577_34890C.1
tccatgatcatgatgatctttggagacagtatctacccaggcacctcctgaatgttgtgctatgtcgacctctgcttcgacagagagttcaccaccgacgcgccaaggggaaccagtagcggccattggcagagcgctaacttatgactgttggagatctcgggtgaagggagatgaaactgtagacgcgctccctaagatttgatctagtattctgaagatcatgtgatatcatcaccgccacatcatggttgatatgtgcgcggaggtaaccgatctcctttgtgaagggcagttccatggtgaccttgaccagcaggtacaattgtggtcgatacctgctcagctggtcttacaacaggcgaatcatgttaacattgataaaactgaccagacgtttttatgtgcatttaaaggagacatatattcctacagagagactgatcaaggtgaattgttggcaatgtcacttcccatgaactgtgatggacaaagcgccacccaacatggaatggctgcaaca

SEQ ID NO: 113386 - DNA, 177 bp, Zea mays
  Clone ID: MRT4577_34891C.1
gtagagactggcaaatacaaaatccatcttacgtatctcatttggctacaggatgcggtcaagagggtttcaaatgtgagaaccacatgtcggtggagcaaatcaagttacagaggggtaaaaccaagacatggcggttgggcaaatcaggttacaggggggtaaaaccaagacaag

SEQ ID NO: 113387 - DNA, 454 bp, Zea mays
  Clone ID: MRT4577_34892C.1
cggatttcccggtcggccccacccgtccggttaactttttccccttcggcctggccttttattccagtggaggaaggaagcaggcctggggaggttatttcgggccccaaaggttttcagccagttccttggggaattgaccctagcgaccggggggctcgttctgattgctgcaccgggggccagacctgcacctcaattgttgattcagaaaaaggggtcctgaaaccaagatgtcgtccttgggttggggttcctatggattcaaataagcctagtcctccaggaattaagaaggcccagcctgttcctgatggtggctgctgccaaatggttaagtttggcttgggagaaaggaaatcttgctgttaaccttctaagaccaatgttggtccagggggagctgggcttcgttatgctttgcccctgcaatttttgggcccctccaagaaaa

SEQ ID NO: 113388 - DNA, 1647 bp, Zea mays
  Clone ID: MRT4577_34893C.1
aggccggccgggagtagattaattctttcatagaaataggagacataatttacatggatatagtaagtctcacttgggctgctttaatggtagtctttacattttctctttcgctagtagtatgggggaggagtggactctagggatactaccaattgattgagtagtcgaattgtagtatcaactcttttctttaattgatcgttttgcattaataattttgctaaactttattttttctctctttctttagttttgtttcactcttgtaagaaactcttttaagaaagtaagaaagagtcgttctattccagtataatagaatagaaagggcgattatagtaattcataacttctattctactagaaattatgagtaaaaagaaagttctatacataagaaaattagaacataagaaaattagactttcttacacgaagctattcacaatatatcgcacattttccatttatactattttcgccgcgcaccgcccgcgcgccacacaacacaaatcacaaaatgcggtcgctccacctctccccggcgccaccaaggccgcccctcccgacgctgaggcggcggccggcgccgaagccccacttctccgctcccagtcgtggggctgctgtcggtggtacctcattctattccgccggccgaatctctttgccgcgccacctcgccgccgcggctccagaggctggggcggcggcatccggtcctcctgaccccagccctctctccgcggaggccgaggccgaacgcgccaagctggctcaggttagcaaaaagctagagaaaacagcacggcatttcaagaatgtgggcaccctggggttctggtcccagttggtgtgtacggtcgtttcggccgggatcctgtcgttctctgcggtcgctacagggaatgtaacagctcccttcacattcagtgcgactgcggttggcatcgtcgtggccttcatctgcgtcttccggtcatttggttacatccgcctttctgaaaggcttaagagaacagcaaatgatccttctaaggctcctccacgcgccgatgtggtcaataatctgagaaacagtatcgtgcttaacgttgttggaatggctgctgcagttctgggcctgcaggcaactgtaggtgctttggtaggcaaggcactgactacctcattagtgccctactaccaggggataccacctggacagagtcccgttcttgctttagatatcttccttgttcaggcttcagccaacacgatcctttcgcatttccttgggctatccagctcactggagctactacggtctgtaacattgtctcagacagaagctgccccagtgccaaaaccgccattgcggtctgtaacattgtctcaaacagaagctgccccagtgccaaaaacggcatgagcgagcccgcaaatcctcctgacctgaagagtatatcaccagttttgttgttgttctcatactgtagtccaatgcggatctattgtgtccatggatctccgctcgttttgaactacactagcttaaaacaatctaatggtctttttggttgtatcgtggctgtgaaaaaagttattgtggaccgaaaaaaaaaaaaaaaaaaaaaaaaaaagggcggccgccaccgcggtgga

SEQ ID NO: 113389 - DNA, 981 bp, Zea mays
  Clone ID: MRT4577_34894C.1
tcctcgcgtccgcggcagtggcggacagcaacgggcgctcaacgccatcgcgcctcctgcgaacccatggtgagatgtgtggtctcgatctagagtcgaaggacttccccaacaccctttcctccatcggcgcgacatcggccagctcatctgcgacgatgaggcatcttcgaccgacttcccaacaccccatcctccatcaatgcggctccagtaccccttcctccatcggcgcgacagcatccagttcatattgaatttcctctcaattgtttttaactttctaatttattaatcgctggtgttagaacaggtaggtggcggctaagaaaaatgaagatggtggcagctaagaaactctaaagccacttctgattcacatatgatgcgaccacagaaattgaagatgtcgtgacctgggaatagattcagaggaagtagattattcgcgacatcaatcgatatggaatgtgctaaatatggcattgctgctgaggtgatgtatggtcccctttaagttaggctacatgcagggaagcaagcaaaggtcttgaaccagattgtgtatgagcttccatcagaacatccactggctgaaacaagaccgctgcgagagctactagggcacacacctccacaggtatttgctagcggagtgcttggatttgcagtagccacatttacaacgatgatcgctgggcttggtagttgactctgcatttgaagaaatggtcaacattcacattgaagttctggaattcaaattggacacatgttttctagccagcttatgatagataatgtgttgtgtataggtgtatttaatatgcaaattgctgtcaatttgttgaagagaaacttgcgtcattcttttgtagttaatcgacgagtgaactatatgttgtattcgttcctgtccaaagtatttggagggattgaaagtacctcttgataaagcattcatgagatttccgcacagcc

SEQ ID NO: 113390 - DNA, 676 bp, Zea mays
  unsure (1)..(676): unsure at all n locations
  Clone ID: MRT4577_34895C.1
aacggcggcacgcacttctccagtcggtgtcgtgcgcatgtgagatctagggagaggaagaggaggaagggttgtggggaccgggggtgcaagatggcggattcacctgcaactacaagaaaagaaagagcgagagatttacagaaaccttcagagccgcggaggaggagaaggagattaggaggatctctacggcgctgacggattagttaaggaacgaaatatcacatcgtgtccggtaaccagattcagatgtgggcaccatgcgtgggtgcagggccaggccgaggtgaaagagatgaagagcgtgaccaagaatttcccgattttccatcatttattccattcttacctcctctgagtgcagctaacctaaaggtctactatgccaccgtttcaccatcatagttgggataatggtgttcggttggttttcttgcaccaatcattgctttgaatgcttaccaagttgatgtgctctcatgcggctggaagttaaacttggtctaggggcacatcttatgaagactccatctgcagcgttcatctgtcgacgtagttgagaagtgcactcaggttatacatccagtanagagcaagacatttgaaagcttatgggccaactgtgttgctattgatgcaagcgaaagttggctgatgaattctctatgcctac

SEQ ID NO: 113391 - DNA, 1041 bp, Zea mays
  Clone ID: MRT4577_34896C.1
cattgggaccctcgaggccggccgggtatgatttcttctgcccggccgcatacattctcatctttggcattgaaagaattgaaccatagaaaaaataaagacaggagcacttctccagattcaatgctaatgaaagaacttatcgttgttgcacaagctagaaggtgttctcgataaacttcctttccggataacttcctaaatgccaagtatattcctgaaacatcaataaatataccttctaaggaaggcccacacaggcagttgtcaccctcaaatcggataatcaggtctacttctggaaatgataatgtcaattccaggagtccgtttgataatattcaacagaagaaattagcagcgcttggagccaatgcagcgcgaaggcctttcaaagattttctcagtacattgacaagaaccaaagaaagtatatcgcgcgcgacacgtcttgctatggaatgtgctaaatttggcattctggtgaggtgatgtatgatgcctttggtgttaggctacatgtagggaagcaagcagaggtcttgaaccagattgtgtatgagcttccatcagaacatccactggctgaaacaagaccactgcgagagctgctagggcacacacctccacaggtatttgctggcggagtgcttggatttgcagtagccacatttacagcgatgatcgctgggcttggtagttgactccgcatttgaagaaatggtcaacattcacattgaagttctggaattcaaattggacacatgtttcctagccagcttatgatagataatacgttgtgtataggtgtgtttaatatgaaaattgttgtcaatttgttgaagagaaacttgtgtcattcttttgtagttaatcgacgagtgaactatatgctttattcgttcctgtccaaagtatttggagtgattgaaagtacctcttgataaagcattcatgagatttccgcacagccattgcgattgatttccaaacctcatgttcaagtgcaacatcatcaatatgtgagatattgaggatccc

SEQ ID NO: 113392 - DNA, 190 bp, Zea mays
  Clone ID: MRT4577_34897C.1
gcgtacacgtgttggcagccacaggaaaccacccgcttacggcacacggggctagaccacctgactccataaccgggcctgtctggggcgtagggacaagaagagcagagatgtacaggcaacaagccagaggcgggagagaaaaggatgagcaccacaacggtcgtggcgatagaccccaacgcgccgg

SEQ ID NO: 113393 - DNA, 1474 bp, Zea mays
  unsure (1)..(1474): unsure at all n locations
  Clone ID: MRT4577_34898C.1
cggtacgggatttaaagcccaaagcattccagattgtttccaatgcagcaatgcttgttcctgctccatacaaactaatattgttattacccttgacacaattcatataacggggcggccggaacacagttcatacttgctcataaccttcagttcagttctgatttctgtatgaagatattataggattgaaggttccatgatttgttcggaagatagttattttgattccaggaagcatcattgtgactggtaaaataacctgccggtaaattgatgcctcttttgatggtattcacaattcagtgcttctgagaatcacagagcaccaacaagccagctagggcatatacnnnnnnngtggctgctgaaggcccaaccatcttcacccatgcaggatgtgatcacaaggggtggaccaaaatattgctatcgcaaggtttcataccaagtgatcaagccatcatatgaagactcaactaccgacgaggctgaggtgaggatggttgatcaggagacgaatgagaggaaccgcccctatatggaccacgtctttgcccataaaacccattaggcattatttggcgtgtcgaccttggtatgtcatcaccatctgctgcaggaagtggcccaagagatccaaattcaattggttcagatgaggtagcagtagcaccatgatttgagccttgttcataagagtacaccatnnnnnntggtggtcctggagggccagataaagcactgggaccatttgaagacgtagatggtggtgtataaaccccatgtgatgtgtttccttgtttgcgcatagaacttgtggatccaaaaggttggccctgcacaagatactgagaacttgcctcatgccggtacgagtcagttcgtggtgatgtatgatgcctttggtgttaggctacatgcagggaagcaagcagaggtcttgaaccagattgtgtacgagcttccatcagaacatccactagctgaaacaagaccgctgcgagagctgctagggcacacacctccacaggtatttgctggcggagtgcttggatttgcagtagccacatttacagcgatgatcgctgggcttggtagttgactccgcatttgaagaaatggtcaacattcgcattgaagttctggaattcaaattggacacatgtttcctagccagcttatgatagataatgcgttgtgtataggtgtatttaatatgcaaattgctgtcaatttgttgaagagaaacttgcgccattcttttgtagttaatcgacgagtgaactatatgctttattcgttcttgtccaaagtatttggagtgattgaaagtacctcttgataaagcattcatgagatttccgcacagccattgcgattgatttccaaacctcatgttcaagtgcaacatcatcaatatgtgagatattgaggatccatannnnngccaagtgccgaattggattttcat

SEQ ID NO: 113394 - DNA, 529 bp, Zea mays
  Clone ID: MRT4577_34899C.1
ttaaaaaaaaaaaaaaaaaaacaaaaaacaaaactataaatttttttttttttttttttttttaaaatttttttttttttttttttttttttttttttttttttttttttttgttttaattttgaatatctcaaaaaacttgaggctggtggagcatttatctatggggcccaattccccttttattgagtgggataaaatttcactttccggggttttacaacttttagattggaaaaattttaaaattttcccaatttaaaaatttttgggcttatccaattttccccatttgggggattaccaaattagccaagaaccgattaatctttccaaaatttctaaccattctgaattttaaatggacacaccctctaccttgtaattaaacactaacgttgagggggttataaaaaacgagaacgttacactttccacttacctagaccccaaaacttgcgattttttcatttcctttttcgttaggtgagacggttttcccctttaacctttaaatagggggttccct

SEQ ID NO: 113395 - DNA, 906 bp, Zea mays
  Clone ID: MRT4577_3489C.1
ctttttaaagagaagggaaccaaaagcaggacgagagacgggcagcagcagcggcctgacctgcgcaaaaccccgccgctctcatcttgccaaaaccccaagaagccgcagggggacggaactccctccccagctttttccccagaggaagcaaccgcagaggaggagaagctgcgcagaaggggaagcgccgccacttgctcgcctttgccccttctgtctcccttcgtccgtagcagaccaggaacgcccaaggcgctagcgtctccaagatggtgctgcaaaacgacattgacttactcaatccaccggcagagcttgagaagctaaagcacaagaagaagcggctagtccagtcccccaactccttcttcatggatgtcaagtgccagggctgtttcagcataaccactgtgttcagccactcccagactgtggttgtgtgcccaggctgccaaactgttctgtgccaacctaccggtgggaaggccaggctcaccgaggggtgctccttccgtcgcaagggcgattaggtcctgcttctcttaacgtgagaagagataaatttggtgttttgcaactttctcaggatatgtactcggtgaggattttgttaattattatggctgttagcgtggcctgacaatgcttgtgtaaacctgcactttgtttgagcgtagtgacagctaatatggtgctgtttggcttttgctgagggagtggcaatgcaaatgaaatcaactggtggcgttatttgtcagggtttaactgaaagtgccatttgtttggttagcttggataatgctctttccatttaggtgatgtttggtttaaggatgtaaatggtcggtaaaattcggtaaatttccggtaccgtttaccaaaaaaaaaaaaaaaaaagcggcc

SEQ ID NO: 113396 - DNA, 1766 bp, Zea mays
  unsure (1)..(1766): unsure at all n locations
  Clone ID: MRT4577_348C.1
cgcagagatacggcgtcttcgtactcgtcctacctctcgcgtggtcaaaacctttcccccttctcgccaattccttccgcgcggccggcgctccactccgtacgatcgacanctcatgagggagtgcactttccgatccacaaatcggccaggccggtatccaggtcggaaaccgcgtgctgggatgctgtacctgccttgagcataggcacttcaggctgatggtcagatgcccggtgacaagaccattgggggtggtgatgatgctttcaacaccttcttcagtgagactggtgctgggaagcacgtgccccgtgctgtttttgttgaccttgaacccactgtcatcgatgaggtgaggactggcacctaccgccagctcttccaccctgagcagctcatcagtgggaaggaggatgccgccaacaactttgcccgtggtcactacaccattggcaaggagattgttgacctgtgcctggatcgcatcaggaagcttgccgacaactgcactggtttccagggcttcctcgtcttcaacgctgttggtggaggaacgggctctggccttggttccctcctcctagagggcctgtctgttgactacggcaagaagtccaagcttgggttcactgtgtacccttccccccaagtttctacttcggtagttgagccatacaacagtgtactgtccacccactccctcctcgagcacactgatgtggctatactgctggacaatgaggccatctacgacatctgccgccgatcccttgacatcgagcgcccaacctacaccaacctcaacaggcttgtgtcccaggtcatctcatcccttactgcctccctgaggttcgatggtgctctgttcgtggatgttaacgagttccagaccaacctggtaccctacccgaggatccacttcatgctttcttcgtacgctccagtcatctctgctgagaaggcctaccacgagcagctctctgtggctgagatcaccaacagtgccttcgagccatcttccatgatggccaagtgcgacccacgccatggcaagtacatggcctgctgcctcatgtaccgtggtgatgtggtccccaaggatgtgaatgctgctgtggccaccatcaagaccaaacgcaccatccagttcgtggattggtgcccgactggcttcaagtgcggcatcaactaccagcctcctagcgttgtgcctggtggcgacctggccaaggtgcagcgtgccgtgtgcatgatctccaactccaccagtgttgtggaggtcttctcccgcattgaccacaagttcgacctcatgtacgccaagcgcgccttcgtgcactggtacgtcggtgagggtatggaggagggcgagttctccgaggctcgtgaggatctggctgcgctcgagaaggactacgaggaggtcggtgctgagtttgacgagggtgaggacggcgacgagggtgacgagtactagacgctctactggcgcggcgtcgtcgggcttgtgtgccactgctatcctgtgatctgccctgagtggctcctatcgtgttatgtttctgtcggttcttatctatctgtcgttgtgtggtttacaacttacgttgtaagactttattcccccgctttgctactgggttattaagtttggcgcaaaaaaaaaaaaaaaaaaaaaaaaaaaaaaaaaaaaaaaaaaaaaaaaaaaaaaaaaaaaaaaaaaaaaaaaaaaaaaaaaaaaaaaaaaaaaaaagggggcggcc

SEQ ID NO: 113397 - DNA, 3690 bp, Zea mays
  Clone ID: MRT4577_34900C.1
cttgcagtcgcagtgggggtcggtgtcaatggatcaatgcagtttccgtcgctacgtttttctgtcgaatggaaacgaggaagattgacacggataacttttttactcgtgccttaagagtaaattctggagtcatccctcccttcagcacgagaatccgtttcctacgattcacttgattcatagtgcatctaagtgaaaagtttgctgtgttacatgagcttaatcctacctaaaaacggtacgggatttaaagcccaaagcattccagattgtttccaatgcagcaatgcttgttcctgctccatccaaactaatattgttattacccttgacacaattcatataacgggacggccggaacacagttcatccttgctcataaccttcaagttcagtttctgatttctgtatgaagatattagtaggattgaaggttccatgatttgttcggaagatagttattttgattccaggaagcatcattgtgtgtggtaaaataacctgcgggtaaatttattgctgttgagatggtattaaggcttaaacgattatgtgtatgacattgctgcattaaaccagctagattataaacgtatttagtggctgctgtaggcccaaccatctacacccttgcacgatgtgagaacaaggggtttaccagaagaccactatggaaaggtgacagatggagaaagaaagatttcgaaggataactcaataagctacacctctacggcgaagttgggtgatttgtatatgaatgctagatgccaagcctgcatctaatatatcatacggtgtttataggagtttacattaagtagatggttttatacttgttgatgagattcttgtgtcttttttagtgatttattcgggggatgtataataagcatactacttgaatgtttaaagtatgtgttttcctgccaagtgcttggcgatttttgcttcagctaacagttgccaattcgaaaatagtcgttctccccctgattctgggaattcatctctctcctaccagcggcaattttctctcatctttagatcctagtgttttttgtagcagacacgataacaacctgagatgttgtacctattcatgttacgtagaacttcagattacccgatattggtcacatttcaaagctgtgagtttcttgtactcacacattctaatcactttcatcacatttaccctgactggacagtaggatcatattttttgatcttgggcaaatacctaataagctactccatttgctttatttggtaattaattaagttttacaaccatgtcatattgcatatcaattgccaactttttctacacagatgcacatgctcaattatgataatgtcatatggtctgtcaaccatatgtggtcaatgcaaactaaattgttttattctttatatgttttgatttgattttttgtatttgtcactgggatcatatttttctctcaacggttttgctggttgctgtttcaattcaggtctgcactagggcacacacctccacaggttcaatcttttgctcctcctggattgagctgttgggaacaaggaatgtctgaattaaattttgttaaccaattggtttctcctcaaatcatttcactggaaaatctattgtgtgtggatatttggtattcttctcacgtgctgcacggtatcattaattccaagttctgtcaccaggtatttgctggcggagtgcttggatttgcagtagccacatttccagcgatgatcgctgggcttggtagttgactccgcatttgaagaaatggtcaacattcgcaatgaagttctgggatacaaattggataggtttcttcccgacccagcatatgatagaaaatgcgttgtgtatagatatattattttgcaaattgatgttcatatgttgaagagaaacttgggccattcatgtttagttaatctatttctgaattctaacattgatatgtttctcttgaacctcctcgctgacacgtcgccccgcccccgagccgacttcccgatgccaccctcgcacaagatcccaatgtggcaatggcgaccagcgacgggcggtcaacgccaccgcgccgcctgtgaacccatggtgagaagtgtggtatcgatctagagccgaaggacttccccaacaccccttcctccatcggcgtgacatcggccagctcatctgcgacgacgaggcatcttcgaccgacttcccgacaccccattctccatcaatgcggctccagtaccccttcctccatcggcgcatcaacatccaattcatctacgacgacaaggcatcttcgacaaaccacgccctactacaagtggtgtcagtccatctcagccgatgtcgtgcgcatgtgagatctagggagaggaagaggaggaagggttgtggggaccgagggtgcgagatggcggattcacttgcaactacaagaaaataaagagcgagagatttacagaaacctccagagccgcggaggaggaggagattaggaggatctctacggcgctgacggattagttaaggaacgaaagatcacatcgtgtccggtaaccagattcagatgtgggcaccatgcgtgggtgcagggccaggccgaggtgaaagagattcgacgattgagaatacatcaaagaataaaaatgtggaactcggattttcagatgaagagcgtgaccaagaacttcctgattttccatcatttattccattcttacctcctctgagtgcagctaacctaaaggtctactatgccacacgtttcaccatcatagttgggataatggtgttcgatggttttcatgcaccaatcaagttaaacttggtctaggggcacatcttatgaagactccatccgcagcattcatctgtcgatgtagttgagaagtgcactcaggttatacatccagtaaagagcaagacatttgaaagcttatgggccagctgtgttgctattgatgcaagcgaaagttggctgatgaattctctatgcctacttctagagtgatgttcaaagaggttgacgctccttcaccatccccagctttgtgaaatggaccacgggtagccatttaggatgacaaagccacaagggtgtccttcatcaaggctatgctagaagcctcagacttgtgtctgaggaaaattcataaaaatggtacacagaaggctgggaagaaagtggaagaggaatttagcacttgccctctgtcggtcctaatgatgagcgttaagaacaacaccaagatactgaaagcaaacatggcttgttcaatcgggcagcggcagcagaggggtggggccaatgacggagacggagaggagaacccatcgatttggtggcataagtgggagctcatcgaggccggtgcgtttgggcaggtctaccacaggatttatttgcccttctagggatcagcagatcccacacctattacatgatctgtccttctagaatagaatctgctctctatcttctgaaccagtactgccttcttcaatatcagccaccggccggtccacctcttcaataatcgtccttcatcgcccttcagttgtgagttgtgacatactatttatattcggatctgatctattacaaatatacatgcatattatagggtgtgcatctgcatattacaaatttaactacaacggctggattt

SEQ ID NO: 113398 - DNA, 1560 bp, Zea mays
  Clone ID: MRT4577_34901C.1
ctttccttagccggtgtcgtgcgcatgtgagatctagggagaggaagaggaggaagggttgtggggaccgggggtgcgagatgacggattcacctgcaactacaagaaaagaaagagtgagagatttacagaaacctccagagccgcggaggaggaggaggagattaggaggatctctacggcgctgacggattagttaaggaacgaaagatcacatcgtgtccggtaaccagattcagatgtgggcaccatgcgtgggtgcaagggccaggccgaggtgaaagagattcgacgattgagaatacatcaaagaataaaaatgtggaactcggattttcagatgaagagcgtgaccaagaatttcctgattttccatcatttattccattcttacctcctctgagtgcagctaacctaaaggtctactatgccacacgtttcaccatcatagttgggataatggtgttcggtggttttcttgcaccaatcttaaacttggtctaggggcacatcttatgaagactccatccgcagcgttcatctgtcgacgtagttgagaagtgcactcaggttatacatctagtaaagagcaagacatttgaaagcttatgggccagctgtgttactgttgatgcaagcgaaagttggctggtggagcctataaaaacagctctgaggtcactcaccgcactatccgagccaatatgatttcttcttcaatgctaatgaaagaacttatcgttgttgcacaagctagaaggagtccgtttgataatattcaacagaagaaattagcagcgcttggagccaatgcagcgcgaaggcctttcaaagattttctcagtacattgacaagaaccaaagaaagtatatcgcgcgcgacacgtcttgctatggaatgtgctaaatttggcattctggtgagtttcagggcgccatcttgtttgagccttgtgaacggatttggaaatctagggcccctcccaaatgtaattttttcatgtggttggtggcgcacaatcgctgttggacagcagatcgactggaaaaatgtggcctcccacacccagctcgataactctgtgactaggtggatgcaaatctccaacacctactcatcaagtgtgtctttgctaggtgatgtatgatgcctttggtgttaggctacatgtagggaagcaagcagaggtcttgaaccagattgtgtatgagcttccatcagaacatccactggctgaaacaagaccactgcgagagctgctagggcacacacctccacaggtatttgctggcggagtgcttggatttgcagtagccacatttacagcgatgatcgctgggcttggtagttgactccgcatttgaagaaatggtcaacattcacattgaagttctggaattcaaattggacacatgtttcctagccagcttatgatagataatacgttgtgtataggtgtgtttaatatgaaaattgttgtcaatttgttgaagagaaacttgtgtcattcttttgtagttaatcgacgagtgaactatatgctttattcgttcctgtcc

SEQ ID NO: 113399 - DNA, 355 bp, Zea mays
  Clone ID: MRT4577_34902C.1
cacggcttgagccacgcgtccgctaataacactgttcgattaggattccctgcaaacccttctacaaaccgggtaactgagaagagcgcaagatgttcgatttacagcaccacggtcacacacagacagaacccgtcggctcactgaatggtgcaccagcccaccttgaagatcttctgcaaggcctacgaggagtactggcttacctgtcgcaacggcaacgtagggctaccccctggcaacccgcgcgactagcaccatcactagtactagtacatgcgcttcaacacccatgtcaaggactaggaggccaaccctgcgtttaccctgaactacaaagccactgggctcgcca

SEQ ID NO: 113400 - DNA, 310 bp, Zea mays
  unsure (1)..(310): unsure at all n locations
  Clone ID: MRT4577_34903C.1
aacaactgtagtaaacccccccccgacggaacanaaaagggggggaaccaaaccggggacagaaggggaacgggcccacggaaaaaacaaaacaggtcaaacccggggccaacgaacaaaaaccccgccccataaaacacatggaagggactccgatggcacccggagggggccaaggacccaccgagacctgggaagggaggcagccaggaaagccaagcctaaatggcacgggccaagagcagggggcttaaagccccccccagaaggagaagaagaaaaaaagggggggcaggcaccaccgaaaaag

SEQ ID NO: 113401 - DNA, 245 bp, Zea mays
  Clone ID: MRT4577_34904C.1
aagccggcgacgccgcccagaggcgtggctatcttcaagctctcccgcgccgagctcgtccgcctccgttcgcatgtccccgcgcgcgaaaggcgcgcctcggttcagcacgtacgctgtgctggcagcgcacatgttgccgtgcgcgtccctgacgcgcggcctgccggtgcgaccagcccaccaagctatactgcgccaccgacgggccgcatacggtgcagccgccgcttccggagggctac

SEQ ID NO: 113402 - DNA, 300 bp, Zea mays
  unsure (1)..(300): unsure at all n locations
  Clone ID: MRT4577_34905C.1
ggaanncccgggcgagcacgcgtccgtggtcgcgtgggcttactcttttttttctcgttgtcccactcctggggggaggcgtagtctttcgcgtattgtacctcgtgttcgttataccacccacttgttctggagagggtttggtgaaagaccgaggataagatctacgtgcctgtctctttaacttactacaggtacatccagctgcggttcagtctgctattgcctggcatgacttgaagcttcaaggattctgaacctcaacaactaccaatactttttcggaccatactgagagga

SEQ ID NO: 113403 - DNA, 468 bp, Zea mays
  unsure (1)..(468): unsure at all n locations
  Clone ID: MRT4577_34906C.1
aanacttcgtacatgcacaaaactgtacgagctgtgtgtgtgtgtgttcgtcatttcctctgacatggcgatagctcaggcgcatgtggcggtgaggttcatgatggatgcgccgccgccgcacgtggtgttggtcatgcgtgtggagaaggcgccgcggagcctgatcaccatcaccgaggaccacatggagatgcttgcgccgtgcgtgtcaccgtcggtccacggccacgtacatacacataactagagcgagttaagataccgggtcttactctgtgtgtgtgtgttatgtttatcaactcctcgattcatgtccaatgcgcatgcactggtggcgggcacgtttacgactgaagtggacccaccaccagtggtgatgatgattctacaaaagaaggggccgcatatcctggacaccatccccaaagacgacagggagcaccaactagcgctctgatcatgcat

SEQ ID NO: 113404 - DNA, 498 bp, Zea mays
  Clone ID: MRT4577_34907C.1
aatggtaacacacgtgtttatatgcacggatatggacaactggggacccaaacatttgattattcagtttttcgatttgccggcccggaataatagcgtgcacacagtgttaagccaggaaaccaaatacttttttcacctaacaaccaatctatatataacaaacaacctggcgctttatcatttctaaataaactatttatttatactcgggcatacgagggttaattgacaagagtttaagtccttcatggttaaacgcacaaatagactgtattttttttaggacttatacaaggactggatatgctttatcacttgctggaaatggcttcaactggagtcttcacttgaggatcggtttcaaacagctgaggggaagaggctccaactttgatcttttgctgacatctttgaaagattaccagatctgtactggagggattaagactattgtccttgacatttaggctgacaacaaatccaagctttcatgaa

SEQ ID NO: 113405 - DNA, 406 bp, Zea mays
  Clone ID: MRT4577_34908C.1
ataagattgtgggagcacaccctggtttattgaaatacaaccgttctttctcctggatccaaacaagaggctggtatttaccatgagtgacctggacgatctgctgtattcctggtgaatattggctccagccaagacaaatttgtcgatttccaggacaggggaaactggcttcctgcgtgggaagcagaaatcattcttgctgccggaatgcggtggtcaagactgtcaacgagctatgtcccaactctatgggggacatggatcccgaaaacttcgaacatcaaaaactgagcgatggagcattttctaagacagaacagggatattgtgtacaaaagaccttgcccggaaaggatcttgtggctcctattgatacgcacaaaggaatcgcccggatatctat

SEQ ID NO: 113406 - DNA, 341 bp, Zea mays
  Clone ID: MRT4577_34909C.1
ccacttttggagcgacccgcactgcgccacgcgtggtcaataactggtactgcgcgctgccaaaaaatggcaaggtcatcgacatccagtgcgtgctgtcggtcaacacggaggccacccccaaggcgcaaggcgtcttacacaccaacatgatcatgctcgagcacaaccccatgctacaaagaacggtaccagcgcaagtaacaagagctcgcaaagggcgccggcttttacgctgtcaaggacacctacatctacgccaaaacctggtccatacagttcatcaagtgaaccaccgacgccgccatgagatgtcatggctgacacatactttgcttgct

SEQ ID NO: 113407 - DNA, 283 bp, Zea mays
  Clone ID: MRT4577_3490C.1
gaccacgcgttcgcaacgcttttcttccacttctcctactgttttttttttcccgacccatcaactgatagcacagatgcttttcttccaataggatgaaccaaacaaatatcaatcatagattacttgccctactcagtccatgctctcctccagctactgcatcttccttaggagcaagcctcatgcatcatcccaagttcgatgagtcatcatcgacttataccttaacaacaagccattcctgctcacctacaactcttactcttttccttacccttcc

SEQ ID NO: 113408 - DNA, 454 bp, Zea mays
  unsure (1)..(454): unsure at all n locations
  Clone ID: MRT4577_34910C.1
gtcgatggcgtggaacagatggctgatgttcgtcacggggatgttcgcgaacggaccctacgcgctgatcacgacagcagtggcggccaacctgagcacgcacagttcgatcaacggccactaacaggtcgctggccaccgtgactgagatcatagacagcacgagagactgacgtagccacactctgacacgntggtgacagacataccaatagaagatgatctgaatcgccatgttgaccatgctactcagcagctgatctcctcgctgggcatctctagagcaagcaactgtgcgccactctccagggcttaacacttacaatcgatagcaaggacgcaccacggtgaacatggtgcctactgatataaagtggaatgtctgaagcccttgctagtaagcccacactagctagctgaagatgaacccgcagagattagcctgctgcatgac

SEQ ID NO: 113409 - DNA, 239 bp, Zea mays
  Clone ID: MRT4577_34911C.1
aaaaaaaaaaaaaaaaaaaaaaaaaaaaaaaaaaaaaaaaaaaaaaaaaaaaaatttgtaaaaaataaaaaagagtcttttccctcgggccggaacccctctttggggcgtgtctcttgggcttttgccttccccctgggtggtctctcccccctctcccttctgggggcccattttctccctttattggtggccttttcccttttccttggcgcggggttttacaccgcgggggctgg

SEQ ID NO: 113410 - DNA, 152 bp, Zea mays
  Clone ID: MRT4577_34912C.1
ccaggaaggcaatccaacaatgctgcttgttttaaagagtggcgagttgctgcaacgaggagactcaaagaaaacaatatcggtcccacaggcttattggcttaaccgcagctgattacatgacatcgaccgtttgaaccgctgttcaacct

SEQ ID NO: 113411 - DNA, 396 bp, Zea mays
  Clone ID: MRT4577_34913C.1
ccttaaataaatccccctaaggcaaacatcacatcgggggtattttgtacataagagcgggataccccccgcggccacagtccaaaaaacacaacgacacccaagggctaaagccacacaccacaaaagaaccaggaggaaaacccccaaaccggggcttggaacaagagccccaaaaacaacaggcgaatcccggccccgcgaggggggcggggcacacggacccgaacacgccaccggcaaaccgggaaacaagggcccaacaacaaaagccggggacgagcaagggggaaaaaaccccccccgggagaaaaagacacatgggcccaccggaaagcagacatggggcccaaccaccgggaaaacccgaacccgccaaaaaaaggggggcccccc

SEQ ID NO: 113412 - DNA, 312 bp, Zea mays
  Clone ID: MRT4577_34914C.1
cataggggttttatgatataaagttgatccaacccaacatgcccggacactccaaaaaatgtcggaatatcctataatacggtatacatccaaaaattcgcgatgcggtacgaatttaaaaggaagcatgctatcggaactccaatcccggagcaaaatgcaacaggcccaaagaacatccaacagcctagcagggtagaataaacgctgaaccgaaacatgagaacatattccaaacaaaaagactatagggccggtagaagacacctaacaagaagaagaggcgatggtcccataaataaccatgatgca

SEQ ID NO: 113413 - DNA, 561 bp, Zea mays
  Clone ID: MRT4577_34915C.1
ccggattcccgggcgatgatagacggacaccaacactgggcttttctattaacgccaggcatagaaaacccatctccaactttcgcgcccagatgatgcataataaggggggatcccgctggcagcaggctttggcagtactccctactctacagagcgctccatgccaagccacggcctccagcgctatctcaccgactatgtcttaacgcgctgtgctagtaatctctatgaaatgactctgatcacaccagccacagctaacgaagcccacatgcacatgaaagccccagcaggtcctggatcaaacacacgtttgactacactggacagaaatgtccgcaaaacccaccagaatacatagagacacacagctgctgatgctagtcgcaatatgcactatctgttgcgagtgcgaaagcaccactagcctcctggaaaccctgtatgcagtacctatagtatattactaaatagtatgctcatgaggacttgcctaatctatatgtgacgttatacctactctttactatttaaatgtatgtacttcaagcgtgagcc

SEQ ID NO: 113414 - DNA, 842 bp, Zea mays
  unsure (1)..(842): unsure at all n locations
  Clone ID: MRT4577_34916C.1
ggtagtccgggctgtgagaggaggggcgcttatccagctcgcggagcttcttctcgccgcgctcctccctgcagctcgctctctctctccctcaagctcatctcgcacgctagcccctgctcatcttctctccttccctgcgcagcttttttttctctcccgacattttcactctgctcgctcctctctgccggcgtccaagctccctgctcggccgcttattttcctgtgctcaatctccagctcgccggtcttccctgtctgtgcgcccggccgtagctccgagctcgcccttacgctcgcccatggcggctccctgagctcgctcccaaccacagccacgcccttgccaagttccctgcgcgccgtggtgctccagctcggctactcggcgcccatctccctggcagcgcgccctgctctctctgtttccctgtccctggctcgccggctgagatccctgctgctccctctatcccctgttagatttatagtcatttttcgtatcattttaattccataaattaacattataatgatgacgtatgaataattaaccatagaaattgttgggaccatgcttcgtcgccgaaggtactgcaggaagaaatagcttcggctgaagctgtctgcacgtgatgatcgaaggttgctgttcatgaagcttcggaatggcaaaccgacttaaaagtaaaatgaccttttagtccacaagtgtttgagtcattgttgtaatcttttatgaggggcatgattgtaattcctcacaggctgtgtcgtgtgcctataaatagtgaacagtattcctttactgttcacgcattcctgtnnaaaaaaaaaca

SEQ ID NO: 113415 - DNA, 323 bp, Zea mays
  Clone ID: MRT4577_34917C.1
tcgcccacgcgtccggtgttgttcggagcgggcttcagcgcacagccccatcccgatcctcgtcggtcttggttccctcctcaagaaaagatgctgtaccatggggaagagaaagtcagctgcttagccaccttctaagaagcggatggacaatcttgacactgatttttcctgcccattctgcaaccacgggagtagtgttgagtgccgaattgacatgaagaatctgattggcgaagcatcttgtagaatctggtcttgaaaacttcaccacaactgtttatgcactcactgagcctatttgaatatatagtgaatggatt

SEQ ID NO: 113416 - DNA, 262 bp, Zea mays
  Clone ID: MRT4577_34918C.1
cttcggcgccacgcccggcgggctctgcgcattccctcgatacaaacgctctaaaccggatagcaacaatcaactggaggctcacacactcaccattgtccatacctccgtagataaccgccatgtttgcatacacatgatttacaacgcatttgaccgaaatatctgctgtaacacacggcagagcaattctctacaacgctatatgggacgaactccatagcactgttcatgctgtgcaccatatgactaccaaaacgcc

SEQ ID NO: 113417 - DNA, 284 bp, Zea mays
  Clone ID: MRT4577_34919C.1
acccctaacaagcaatccaattttggacagtttttttcttaaaaaaaacctttgggttcagttcaggcgggacagcttttgttggggcttttccaattgaaccttttttggccccaacatgggtaactaatctagcccttggtctccttaagaccctgggagaaattggggaatgtcggattaggggccccatccttggtataggcgaatcccacggaagctttggcctttatgcttctaccaacaaaaaattggagggccttcagcttgctaaggagaaactt

SEQ ID NO: 113418 - DNA, 420 bp, Zea mays
  unsure (1)..(420): unsure at all n locations
  Clone ID: MRT4577_3491C.1
aaaaccaaatgatttttttatcactnaantncnncaaatccatattacatatnaatatnaacatcaancatggaccatcaaactcatccaccatttttctttttctttattcatcaccaancccccaaattttttgggggggtgatnnatnnccccaacatattnantttttctcaaagagaaaaattctcattaccaagtagtagtagtagtatgccaatcaacatgcttcacttagggtcagtgaagaacttgttaactgcaggcatgatctcaggagtcttgtcgtgcacaaagcttgttaggccatgcatggcttttcttttcccctcctcattgttcttaagcacaccaactggcctccctgcctttgttaccctgacttcccggttgccagtgatgttccaaaaaaaataaaac

SEQ ID NO: 113419 - DNA, 335 bp, Zea mays
  Clone ID: MRT4577_34920C.1
atcttacttccgcggactagttttttctgaagattcggcgatggcggcgacgatccaatcgcgtgaaggcggcgccagatcgtttgacagcgcgcggcaacccctacagtaccaggtcgacgtggttctgctcagatggaactttttcaggggcgggtggtcccagaggagcatcaactgtggtatatgaagctctggagttgacggatgggggctatgactatttgggaaggggccctccaggctgagaacaatgggaattgtgggatggggcctgctgtgattggcgaggcccctacgggacagactgagatggatcactgcttggttgaaca

SEQ ID NO: 113420 - DNA, 337 bp, Zea mays
  Clone ID: MRT4577_34921C.1
atggtgggttctatcccggcagacgagaccgggaaacacagagcaacttaccaaaaaggggggaggaaaaaaggggacaggcaaaaagagagaggaaaagagggggggaaaaaaatagacggaaaaaacaaaaggaaaaaaaaaaacggaaagcataaatcaaaaaaaaagggaagcgggaaaaaaaaaggggataacacaaaaagaaaagggcggagaaaaaaaaaaaaaacaggcagggggaccaatgcagcagcacaaaagaataaacaggccggtccacaaaaggggggcgaaaatggaccgcggggggggaggaactttgcaaacaacccga

SEQ ID NO: 113421 - DNA, 382 bp, Zea mays
  Clone ID: MRT4577_34922C.1
gggggaaaacctgggttttcttggtttgttctagggggttcacagcttattaattgctggaacccacaaaacaacgccctggctgggcaaatcaacagacctccagggctccacaatccaaacaccaatggggccctccaaccctgaagatggcgagccaaaaactagatctagccaaaggggataggctgggggaacagaccaactctctggatgtcccccccccgcacaggaacgggggcctttaatgaaagacccccaccaaaagtgccggacgggctcactatcccaaagaaaaacagagggcagagggggggtatttcgagccattggtcaacacattcctagggggacccccctgcaccaggaatttcacggggct

SEQ ID NO: 113422 - DNA, 266 bp, Zea mays
  unsure (1)..(266): unsure at all n locations
  Clone ID: MRT4577_34923C.1
cnttccactccacgttttcgcggttcgcacgcgccccaccgggggcgccggggactatccctagaatcttcgagaagcacccnncgaatagcgcgctgccacggcgctttccggaaacttctcggagagagagagagagagagacggcccctcagcggcggaggcggagatgggggcgtcggatctagaccggcagatcgagcagctgaagctgtgcgagccgctcacagaggcggtagtcaaggcactgtgcctcaaggccatgg

SEQ ID NO: 113423 - DNA, 603 bp, Zea mays
  unsure (1)..(603): unsure at all n locations
  Clone ID: MRT4577_34924C.1
gcggacccacgcgtncgcccacgcgtccgcggacgcgtgggtcccagcgcacagctctcctcatcggcgcacccgagctcgccctctccttccacatcgaggcccgagtcctgctctgatggcgaccgacgtggctgagactcccgcgccgttggtggatgcggcccctgaggcgcccgcggacaccccggcggcgcctgctgctgacgcgaagccggccaaggccaagaaggccacagcgccgaagaagcgcgccagcccgacccatccgccgtacgccgagatggtctcggaggcaatcgcgtcgctcaaggagaggacagggtccagcagctttgctattgccaagttcttggaggacaagcacaaggacaagctcccgcccaacttccgcaagcttctgaacgttcagctcaagaagctcgtcgccggcggcaagctgaccaaggtgaagaactcgtacaagctgtcgtccgccaccaagccgaagcccaagccaaaggcggccacgaagaagcccaagaccggcgtgaagaagcccaaggccgctgccaaaccgaaggccaagtcccccgcgaagcccaagcccgccacaaagcccaa

SEQ ID NO: 113424 - DNA, 304 bp, Zea mays
  unsure (1)..(304): unsure at all n locations
  Clone ID: MRT4577_34925C.1
cgtcgactgacccatctctctagttataatttttctctcgtccttgcattgcatattagttgctatccattggtaacgcacaacagtaaaacgacaaacatccaacagctatattatgttcgacggtgtaacaccctgaattttagggtataaaatttcttctctaaatgcaaaccaaattcaggtgttaaaaaaaaaaaaaaaaaaaaaaaaaaaaaaaaaaaaaaaaaaaaaaaaaaaaaaaaaaaaaaaaaaaaaaaaaaaaaaaaaaaaaaaaaaaaaaaaaaaaaaaaaaaangggggg

SEQ ID NO: 113425 - DNA, 801 bp, Zea mays
  Clone ID: MRT4577_34926C.1
gggtaccctgggcctccgaactaaccgcacacagctctcgccttctctctcccatcggcacacccgagctcgctccctccttccacgtcgaggtccgagtcctgctttgatggcgaccgacgtggctgagactcccgcgccgttggtggatgcggccccagaggctcccgctgacgccccggcggcgcctgctgcggacgcgaagccggccaaggccaagaaggccgccgcaccgaagaagcgcgccagcccgacccacccgccgtacgccgagatggtctcggaggcggtcacgtcactgaaggagaggacggggtccagcagctatgcgattgccaagttcgtagaggacaagcacaaggacaagctcccacccaacttccgcaagcttctgaacgttcagctcaagaagctcgtcgccggcggcaagctgaccaaggtgaagaactcgtacaagctgtcgtccgccaccaagccgaatcccaagcccaaggccgccccgaagaaggcccctgacaacgcaaggcccctccctcgaagaagccgacgaccccggtgcggaaagcgccgcccgccacgtaaagcggccaagcccggccgcgatgctaaaatttgatatcggagactcgggtacactgctcattcagtatccgagaccgatagctgaggctagtggcgatggaggactgtgttattactactataaactggtgggttgtggtttctgtaactggtgaatgatcaagttggaagcttttagtctatcttagatatatcaggggatagtggtttttggatttt

SEQ ID NO: 113426 - DNA, 573 bp, Zea mays
  unsure (1)..(573): unsure at all n locations
  Clone ID: MRT4577_34927C.1
gcatgcaccgcgtnaccgtaagttcttggcatccctctagaagcggccccgccctttttttttggttttttttttttttntttttttttttttttttttttttttttttttttttttttttttttttttttttttttttttttttggcccccaaaaacaggcaggcaggggattcccaatttcccattccccccaactatgggggcaaggaaattgggcaaaaatttggcccccccaccaaaggacaacagctaaaaaccggggaaaccccccaaaaggggaaccccgttctgcaaaccccaaaacgggaaaagggggggccccgggtttgaacacaaccctatttaggggggggggattggtttccccaaaccggaaaaacaaaaccccaaagggtcccccaaaaaagaaaggccccattttatcccccggggaagggggggggcctgggcccccccccaaggggggggcccccccagaaaaaactttgggggccctcccaaaagccgggaaggcccgccccccccaccccctaaactgggaaaccctggggattcttccaaaacaaatagg

SEQ ID NO: 113427 - DNA, 837 bp, Zea mays
  Clone ID: MRT4577_34928C.1
gctgggattcggcttggtggcggacgacagcttgtacgagttcttcaccttggtcagcttgccgccgtacgccgagatggtctcggaggcgatcacgtcgctcaaggagaggacggggtccagcagctacgcgattgccaagttcgtggaggacaagcacaaggccaagctcccgcccaacttccgcaagcttctgaacgttcagctcaagaagctggtcgccggcggcaagctgaccaaggtgaagaactcgtacaagctgtcgtccgccaccaagccgaatcccaagccagacccggccccgaagaagcccaagaccggcgtgaagaagcccaaggccgctgccaaaccgaaggccaagtcccccgcgaagcccaagaaggccaagacgtcggccaaggccacgccaggaaagaaggcgccggtgaccaagaagcccgcggcccccgcgaagaaggcgccggtagccaagagggccgctccggcgaagaaggcggctgcccctgcccgaaaagcgccgtctcggaaggcgaagaagtagaggaggggtaggcgtcggagaaatgtagggtttggttctcgtattacgctagatgtttgctctccctttagcctaggtggtgtctgtgtgtgcaatgttgtaaatttgatatcggatgctgggaacactagtcaatctttcagtacctgttgtgaatgggcggtggcgaacgatgacgatggagtgtttgttattttttctcgggaggattcatttccgtggatgatggtggatctgttcctcgttgaggtaaggcttatgtggtgataaatttttttgaaaaaaaaaaaccgagc

SEQ ID NO: 113428 - DNA, 633 bp, Zea mays
  unsure (1)..(633): unsure at all n locations
  Clone ID: MRT4577_34929C.1
ggccttcagttccatcccttcagggtctcgcctctcaagaaaccagcagcagcagcgtgcagagtgcaganccnagctccaaccacacaaaagttaggtcgtctctcccatgggatcgcctcccggccggtgacggtgagccgttgggagcgcggtggttgtgtggcggcttcttgtagttgtagcaacaggttggagctggaaggcgctacggggctggagggacacgcgacgcgacgcgaacgcagctgcctgcgccgctggcccgttgcgcgtcgggagtggcaacgcgagtacgaaagagatgggctcggctcggtcgggcaatataagattggctgatgggaaggtttggaagggagcgggttttggtgtgattaggccataattcggtcgcctggcaacggcgccaaaaatggggcgtccggcatcggcaaagggagaacagattgatggagacatatggactattcagcttcagcgggtgaaaacgatttgtgccaaaattattcagcttcagctgttgtgaaacggagaggctcagaacgggattctaacaaaacccttttgggtttaactaaatttatagaaaaaaaacatcggttctgcgatcagaataattattattgtgat

SEQ ID NO: 113429 - DNA, 585 bp, Zea mays
  Clone ID: MRT4577_3492C.1
ccggccggaggagcctcatcgtgcgcgaggcacagtgcctggtagtacgttctgcgataaggtgaccagccgctgcgatatgggcgcgtgtgaaccccgtcgagtcacacgggatggtatatgagtaaagggaaccttttcgacgaaccccccctcgtgaaggatggcggtgttggattccaggggcatctgcgtctagaaaccgggctccaaatgcaggatggacagggaagcgacctacttcaccctgccgaacggtggtggagccgaggcccccgcgcgccaaagtcgtcgaggatatctgctcctactcctgctacgacaagctgccagcagagctcgacgttgaggaccgtttctgacgctgcgtcgatacagacgaccaaaaagagcaaatgccgcctcatgctgaagcacgcaagctactacgtctcagagtacgacgttgcggcggctgagtcgtctaccgtggagaacaccttgatacggaagaaggacgacggcacataggcactggcttcgcgtgatgagtcgttcaaccggaagcaggcggacactgatgatcacatgattgagaatgagctc

SEQ ID NO: 113430 - DNA, 326 bp, Zea mays
  unsure (1)..(326): unsure at all n locations
  Clone ID: MRT4577_34930C.1
actcaaaaacacactatactaatctcattatcaacaacctaacaccaatttctaccactcgtatttttaaaaacatctcgtctcccccatatnatcaacacaacatattctttcattattccacacttctcactttctcctataaccaatattccacaatccctcccaccacttacttcaactatcttcaaacatccaaccatacaaacctacaatctacaactatcacttacttatatccccttacatcaaccaaattcccaacttctacaacattcctttttacatttaaccctacaaaccatatcatctcaacaacatcaact

SEQ ID NO: 113431 - DNA, 359 bp, Zea mays
  Clone ID: MRT4577_34931C.1
gtcgaagagaaaaccgtctctcactatcagcccgatacgcgatgcgcataagagaccgtcactggcctgcctccacgacgtcccgactgcgaaccgcgtgcgatgaccaaaattagtaggatggcgagacatccgactttcgctgggtgccttaccagccaagaaggcagcagctatagcccttctgaaccgtcgggcacgatgaatggcaaatggaaatcgaaagcgcgacagtgtgagatacatccggcccatacactgctacaccaccgcataggaataacgaatacgtcgcaataacattaatccctcaaaaatcttgataatagaagctgatatgcatgggtgttggaacaaga

SEQ ID NO: 113432 - DNA, 1378 bp, Zea mays
  Clone ID: MRT4577_34932C.1
cccacgccgcccagctcacctcattgctccctcgacccggcgggcatacccaccccacagctctcgccttctctctcccatcggcacacccgagctcgctccctccttccacgtcgaggtccgagtcctgctttgatggcgaccgacgtggctgagactcccgcgccgttggtggatgcggccccagaggcgcccgccgacgccccggcggcgcctgctgccgacgcgaagccggccaaggccaagaaggccaccgcgccgaagaagcgcgccagcccgacccacccgccgtacgccgagatggtctcggaggcgatcacgtcgctcaaggagaggacggggtccagcagctatgcgattgccaagttcgtggaggacaagcacaaggacaagctcccgcccaacttccgcaagcttctgaacgttcagctcaagaagctcgtcgccggcggcaagctgaccaaggtgaagaactcgtacaagctgtcgtccgccgccaccaagccgaatcccaagcccaaggccgccccgaagaagcccaagaccggcgctaagaagcccaaggccgctgccaagaccaaagctaagacccccgccaaggcgaagcccgccacaaagcccaagcccgccgcgaagccgaaagccgtagtgaagccgaagacacccgccaagcccaaggccaagccagctgccaaggcgaagcccaagaccgccggcgctaagccgaagccacttgctaagaaagccggccgccccgccaaggcggcgaagacgtcggccaaggacacgccagggaagaaggcgccggtggccaagaagtccgctgctgccgcgaagaaggcccctgccaagaaggccgctccctcgaagaaggcggcgaccccggtgcggaaagcgccgtcccgtaaggccaagaagtaaagcggccaagaaggggggcgcgatgctgtaaatttgatatcggagaggctcgggtacactggtcattcagtatccgagaccgatagctgaggctagtggcgatggaggactgtgttattactactataaactggtggttgtgtttctgtaactggtgaatgatcaagttggaagcttttagtctatcttagatatatcagtggatagtgttttttgtattttcgttttcttttccaatgtgtgttgggtcttgtggattatcctttttttctaatctaatacaatgaagaggcatgtcttttgaagcttccataaaaaaaaaaaaaaaaataggctgagaaaaaaatggtattatctgaattccctatctgaaatagagaattgttcggtgtgctagctgaaatgaatggtcggtggcgaacaatgacgatggagattttttaaaaaaaaaaaaaaa

SEQ ID NO: 113433 - DNA, 1294 bp, Zea mays
  Clone ID: MRT4577_34933C.1
cccacgcgtccgcccacgcgtccgcccacgcgtccgcccacgcgtccgcccacgcgtccgcagctctcggcttctctctctcatcggcacacccgagctcgcgccctccttccacgtcgaggtccgagtcctgctttgatggcgaccgacgtgactgagactcccgcgccgttggtggatgcggccccagaggcgcccgccgacgccccggcggcgcctgctgccgacgcgaagccggccaaggccaagaaggccaccgcgccgaagaagcgcgccagcccgacccacccgccgtacgccgagatggtctcggaggcgatcacgtcgctcaaggagaggacggggtccagcagctacgcgattgccaagttcgtggaggacaagcacaaggccaagctcccgcccaacttccgcaagcttctgaacgttcagctcaagaagctcgtcgccggcggcaagctgaccaaggtgaagaactcgtacaagctgtcgtccgccaccaagccgaatcccaagcccaaggccgccccgaagaagcccaagaccggcgctaagaagcccaaggccgctgccaagcccaaagctaagacccccgccaaggcgaagcccgccacaaagcccaagcccgccgcgaagccgaaagccgtagtgaaaccgaagacacccgccaagcccaaggccaagccagctgccaaggcgaagcccaagaccgccggcgctaagccgaagccacttgctaagaaggccggccgccccgccaaggcggcgaagacgtcggccaaggacacgccagggaagaaggcccctgccaagaaggccgctccctcgaagaaggcggcgaccccggtgcggaaagcgccgtcccgtaaggccaagaagtaaagcggccaagaaggggggcgcgatgctgtaaatttgatatcggagaggctcgggtacactggtcattcagtatccgagaccgatagctgaggctagtggcgatggaggactgtgttattactactataaactggtggttgtgtttctgtaactggtgaatgatcaagttggaagcttttagtctatcttagatatatcagtggatagtgttttttgtattttcgttttcttttccaatgtgtgttgggtcttgtggattatcctttttttctaatctaatacaatgaagaggcatgtcttttgaagcttccattgaaaaaagttactttttaacgattgttcagactgttttgtgcgggtgcaagatcctgtagatctgaattccaacaaaaaaaaaaaaaaaaaagcggcc

SEQ ID NO: 113434 - DNA, 1274 bp, Zea mays
  Clone ID: MRT4577_34934C.1
ccccgcgtccgccccgcgtccgcccacgcgtccgcccacgcgtccgcggctcctctctcccatcggcacacccaagctcgcgccctccttccacgtcgaggtccgagtcctgctttgatggcgaccgacgtggctgagactcccgcgccgttggtggatgcggccccagaggcgcccgccgacgccccggcggcgcctgctgccgacgcgaagccggccaaggccaagaaggccaccgcgccgaagaagcgcgccagcccgacccacccgccgtacgccgagatggtctcggaggcgatcacgtcgctcaaggagaggacggggtccagcagctatgcgattgccaagttcgtggaggacaagcacaaggacaagctcccgcccaacttccgcaagcttctgaacgttcagctcaagaagctcgtcgccggcggcaagctgaccaaggtgaagaactcgtacaagctgtcgtccgccgccaccaagccgaatcccaagcccaaggccgccccgaagaagcccaagactggcgctaagaagcccaaggccgctgccaagcccaaagctaagacccccgccaaggcgaagcccgccacaaagcccaagcccgccgcgaagccgaaagccgtagtgaaaccaagccgaaggccaagccagctgccaaggccaagccgaaggctgccgcggccaagccgaagccagctgccaagaaggccggccgccccgccaaggccgccaagacgtcagccaaggacacgcccgggaagaaagcggcgcccgccaagaagcccgctgctgcggccaagaaggcccctgccaagaaggccgccccagccaagaaggctcccaccccgtcgcggaaggtgccgtcgcgtaaggcgaagaagtagagcggtggtcttggcaggaatctagggtttcatgctccttcgattttagatgtttactcgtttttgctctagttgtgggtggtgtgcggggtgggttactaggttgtaaatttgatgccggaggctggggtacacatgggcattctgtaccagcggtggaagggcggaggcgccggcgacgatgacgaaccagtgtgtgttattattagaagacgaagttgtatttctgtagctgaattgtggagttgcggatatcattgtgcttctaaggttaatgtgacgataaagttaaatgtcgagagttaccatccttctcgtgtatgtattctgattattcaggctgtttttggctgggattgatctgatatctgaattcccgatctg

SEQ ID NO: 113435 - DNA, 423 bp, Zea mays
  Clone ID: MRT4577_34935C.1
ctggtgtatatacgcgacatcaaataggatgaatggggcaatatgtatgacgaggaaaagggggggacattggttggggaaatggttatctaccaaaatggggcggtggagatcattggaacgctacaaatccaccaaatattcaatcttgaagtatcagtaacagcaccaaatcatatggccaaaatcagtcttccacttggaataatccaaaagataacaaaccatctgtttgttaacatggtgatccttgtacaaacaatgtgtcttctactgaacgttaatgactacacaatgattctcggtcaagtaagatgacttcttatgacactgagaataccactcattgctgtgacagcaatgagatagcatcttgcttctatgatgtctgttaatgaatacaaattgatccatggactaaca

SEQ ID NO: 113436 - DNA, 936 bp, Zea mays
  Clone ID: MRT4577_34936C.1
cgaaatcaccagcgcacagcactcctcatcggcgcacccgagctcgccctctccttcctcatcgaggcccgagtcctgctctgatggcgaccgacgtggctgagactcccgcgccgttggtggatgcggcccctgaggcgcccgcggacaccccggcggcgcctgctgttgacgcgaagccggccaaggccaagaaggccacagcgccgaagaagcgcgccagcccgacccatccgccgtacgccgagatggtctcggaggcgatcgcgtcgctcaaggagaggacggggtccagcagctttgctattgccaagttcttggaggacaagcacaaggacaagctcccgcccaacttccgcaagcttctgaacgttcagctcaagaagctcgtcgccggcggcaagctgaccaaggtgaagaactcgtacaagctgtcgtccgccaccaagccaaaggccgccccgaagaagaccaagaccggcgtgaagaagcccaaggccgctgccaaaccgaaggccaagtcccccgcgaagcccaagcccgccacaaagcccaaggcggccgccaagagtgagctcccaagacccccggcgttaagccaaagccccttgctaaaaaggccggccgccccgccaaggcggcgaaaacgtcggccaaggacaccccagggaaaaaggcgccggtggccaaaaagtccgctgctgccgcgaaaaaggcccctgccaaaaaggccgctccctcgaaaaaggcggcgaccccggcgcggaaagccccgtcccgtaaggccaaaaagtaaagcggcccaaaagggtgtgccatgttgtaaatttgatatcggaggggctcgggtacactggtcattcagtatctttgccccttcctcgtacctctgctgtacgtcctatggtttctttcccagataatagtcttcccccc

SEQ ID NO: 113437 - DNA, 455 bp, Zea mays
  Clone ID: MRT4577_34937C.1
caaacatcaaacttattcagggttgggcatagttcggggggggccgcacacccaacacaaccgggccatttttaaaccaaccctggcccgactcaggacccgaacaggagatcctttgacaacccccatagggggggggggccccagacgacgcaggcccatggggggcttaaacgacccatgacttactgacccccccggggacggggcccaagggggggggggccccccttttggagggtgaagcctgctagggggcggccctcccccagctgtttgccggcgaaaaacaaaccctgctggcccggggggaggccccccttggccgggatcttcgccttcacattggcgaggggggccgagctctcaacccccaggggtatgggttttccaggcaggggctttacaaagatctgcataccacctctgggggggaaaacaaggggaagggggcc

SEQ ID NO: 113438 - DNA, 1227 bp, Zea mays
  unsure (1)..(1227): unsure at all n locations
  Clone ID: MRT4577_34938C.1
ccccgcgtccgccccgcgtccgcagctcccggctcctctctctcatcggcacacccaagctcgcgcccaccttccacgtcgaggtccgagtcctgctttgatggcgaccgacgtggctgagactcccgcgccgttggtggatgcggccccagaggcgcccgccgacgccccggcggcgcctgctgccgacgcgaagccggccaaggccaagaaggccaccgcgccgaagaagcgcgccagcccgacccacccgccgtacgccgaggtaattggtgccctccctttgatccttctgccgtgccgtgctgtgcgtgcctctccgccgcgtctggatcttactgaatagtggatggtcggtgcgcagatggtctcggaggcgatcacgtcactcaaggagaggacggggtccagcagctatgcgattgccaagttcgtggaggacaagcacaaggacaagctcccgcccaacttccgcaagcttctgaacgttcagctcaagaagctcgtcgccggcggcaagctgaccaaggtgaagaactcgtacaagctgtcgtccgccgccaccaagccgaatcccaagcccaaggccgccccgaagaagcccaagactggcgctaagaagcccaaggccgctgccaagcccaaagctaagacccccgccaaggcgaagcccgccacaaagcccaagcccgccgcgaagccgaaagccgtagtgaaaccgaagacacccgccaagcccaaggccaagccagctgccaaggcgaagcccaagaccgccggcgctaagccaaagccacttgctaagaaagccggccgccccgccaaggcggcgaagacgtcggccaaggacacgccagggaagaaggcgccggtggccaagaagtccgctgccgccgcgaagaaggcccctgccaagaaggccgctccctcgaagaaggcggcggccctggtgcggaaagcgccgtcccgtaaggccaagaagtagagcggccaagatggggggcgcgatgttgtaaatttgatatcggagaggctcggggtacactggtcattcagtatccgagaccgatagctgaggctagcggcgatggaggactgtgttattactactataaactggaggttgtgtttctgtaactggtgaatgatcaagttggaagcttttagtctatcttaaatagatcagtggatagtgttttttgtaaaaaaaaaaaaaaaaaaaanacc

SEQ ID NO: 113439 - DNA, 460 bp, Zea mays
  Clone ID: MRT4577_34939C.1
aaattccaaacaacaaacttattcaggattgggcaaagttcggggggggacgcacacacaacacaacggggccattattaaaccaacccgggcccgactcaggacacgaacaggagatcctttgacaacccccatagggggggggggccccagacgacgcaggcccatgggggggttaaacgacccaggacttactgaccaccacggggacggggcacaagggggggggggccccccttttggaggggggagccggctaggggggggccatcccccagctggttgccgggaaaaaacaaaccctggtggcccggggggaagccccccttggccgggatcttcgccttcacattggcgaggggggccgagctcccaacccccagggttatgggttttccaggcagggtctttacaaagaaccgcaaaccacctctgagggggaaaacaggggaagggggcc

SEQ ID NO: 113440 - DNA, 259 bp, Zea mays
  unsure (1)..(259): unsure at all n locations
  Clone ID: MRT4577_3493C.1
catatatnccataataaaacgggggcctggttttatttttatttcatctatacgacatacatatacatttcaatattcgtgttgttgtttttcacactccttatatccttttattaaataaaaaataaaaaataaaggtctatcaattgtgccactttatacctattattatttggttaccttatttggcggtgtaagctatctttgacttccacccggcagggatgacatcctcctatacgctcttattgcctccctc

SEQ ID NO: 113441 - DNA, 1707 bp, Zea mays
  Clone ID: MRT4577_34940C.1
aattcggcacgaggctctcctctaatcctgatttttgtatgcgtggtggtcgctcttccgtctctcccagcccagcagccagcagtcgtctccttctctacctccctcgcatatcctgctcctctgtaaccactgtactaaaactagcctgtacctgtactgtgctgacattatatacagccccttctctttgcttcttgctcgtgccaattggcagttgccattgccaatcaccacgtagagctgcattattgcttgcttcgaggccatgggaactgcaagagttcgcttcgtggtccttgttctgatctctacgtttctcggagttagagaaggcagagccgcgacattcacgttcgtgaaccggtgcacggggacggtgtggccgggcatccagtccaacgccggaagctcgaggctggacacgacgggcttcgtgctgccgccgggcacgtcgcgcgcggtcccggcgccgtcggggtggtccggccgcgtctgggcccgcaccggctgcgggcaggacggcagcggcaaggtggtgtgcgcgacgggcgactgcgggtccgggtccctggagtgcaacgggcagaacgcggcgacgccggcgacgctggccgagttcacgctggcctccgcgggcggcaacgacttctacgacgtgagcctggtggacggctacaacctgccgatcctggtggagcccgcgggcggcgccgccaccggcgccagtgccacgacgtgcgccgcggccgggtgcacggcggacctcaacgagcggtgccccgcggagctgcgcgccgagggcggcgccgggtgccgcagcgcctgcgacgccttcggcaggcccgagtactgctgcagcggcgcctacgccaaccccaacacctgccgccccaccgcctactcgcagctcttcaagtccgcctgccccaactcgtacagctacgcatacgacgaccccaccagcaccttcacctgcgccggcggccgcgactacaccatcaccttctgccccgtcgccaccccaagcgtgaaatcgtcgagtggccctggagcggcaacaacgacggcggcaccgacaggcccgacgccgacgctgccgggggcgacgccgcggtcggcaggcggcggcccggaggggcagggcgtgatgctgggcgacaactcctggctcgccagcctcgccacgggcgacgcatcgtccgcgccggcgctccgggccttgcccctcgcgccgctcctgctcgtcggcctgctcctgcttgtgctgctatagcaccagcgggaaacccaggcaacaaccgaccgcgtcacgggcgtgtgaggcgaaagcttttaggtctcggacagcctaccgaacgcgcgcgctcctgctacgtttgatgaatcatctcctagtcacggtgcaggcgtgcagtgcggcggatgattttgacggctagccgaatgcgcgcacccccatccccagtcagcagctgaaggaaaaaaagtttaagtggcctactcatggatgaggtggctgcagcatggactagacacaaatactattagtgctgatggtgtatagtaccgctgccgctttaaagtagtgtacagtgcagtgcagctctgatggcgctgtccctcggcacatgggaggagatgtgccatgccatgccatctgatctgtgcttgcggatcaatcaaatactacgtacgtgtctacgt

SEQ ID NO: 113442 - DNA, 179 bp, Zea mays
  Clone ID: MRT4577_34941C.1
ggaaactgaaagtgcaagaacttttttctcatggcatacttccgtcctctacttatcttagaactagctactctcatggggtgttttttggtgcattgggcttcctaataactatagatgctaaaatctattgcaaatattattaactatccatagtatctgtggtaaattcttggtat

SEQ ID NO: 113443 - DNA, 522 bp, Zea mays
  Clone ID: MRT4577_34942C.1
gtgaaaagcttgatgataatacaaagggaattaaactctgtatcttgattcacccatacatgggtacggacgcagagcatgaacctagcagggactccttccttcctctctctttctctccattattcttctttcttcttcctaataaaaagctacggagggggttcaaggagggcttttgtttgagaggcagtaggggtgggctaatcaagctccatccgtcctacagctagatctgcccctaaccatacatgagtacaaatattcacacacacacacacaaaaaaaaaaacagccttgtgcatcactgcataacagactaacagtcgttcctgtcaattaatccgttaactgcaatggggccatcaagtactacgccaccgccggagtcctcagctcctccgccgactgcctccttgcctcccgcttctccggcgcacggaacccgtcgggctcgtccgcctctctgcccgggtgttcaggtctgagcgcgtggtacctgctcgcctcccgccgtacgct

SEQ ID NO: 113444 - DNA, 406 bp, Zea mays
  Clone ID: MRT4577_34943C.1
gagctctctattcggcggccgcccttaaattataagggcgggtttaatttaaaattgggttccctaacccacccgtattacatattaattaaaatccctcccggcaaaaggcccaaaacccattccaaaattccggggcaaaaaaccccaaaaaaaaaaaaaacccctccccaaaccaaaaagggaaaaaccgggttttccaaaaaacccaacccccaactaacacaaccccccggaaattcgtttaaaaacacccaaggacccccgggggtaggcaccaaaaaccctcgaaaaaagggcccaaaacccctttcccggagccaaaaaaaaaacccccccccttgaccaaaaaccaaacccgttcccccaccgtgggcgggccccctccaacaggcaaccaattagg

SEQ ID NO: 113445 - DNA, 840 bp, Zea mays
  unsure (1)..(840): unsure at all n locations
  Clone ID: MRT4577_34944C.1
ctcgaggccggccgggccattcgctgtgcagaggacattcaaacccaattcctcttatcacttcgccgttctgtcacgccacaccccaccacagcacaatgaagtactccactgtttgcgccgccttctttgccgctgtcgttgctgcttccgatgtcaagcagctgaagacagacgacttcaagggcttcattgaggagcacgacctcgtcctcgcagaattcttcgccccatggtgcggtcactgcaaggcgctcgcccccgagtacgagacggccgccacaactctcaaggagaaggacattgccctggtcaaggtcgactgcacagaggagcaggatctctgccaggagtatggtgttgagggctaccccactctcaaggtcttccgcggcctcgagaacgtgtcgccatacggtggtcagcgcaaggccgacagcttgatctcatacatgaccaagcaggccctccccgctgtctccgaggtcacaaaggacaccctcgaggagttcaagactgccgacaaggttgtcctcgttggctactttgccgccgacgacaaggcctccaacgagacctttaccgccgtcgccaatggcctccgcgacaactacctgttcggtgccaccaacgacgctgctctcgccaaggctgagggcgtcaagcagcctggtctcgtcctctacaagtcgtttgacgacggcaaggacgtcttcaccgagggcttcgacgccgacgccatccgcacattcgccaaggtcgccgctacccctcttattgggcgaggttggncctgagacctactccgactacatgggctctggncttcccctcgcatac

SEQ ID NO: 113446 - DNA, 135 bp, Zea mays
  Clone ID: MRT4577_34945C.1
ctctgtctgacgtattagacactacctgcttgtgctgcttgcttgtgcggcatacgctacagtgcatgacggtgcgaagaggagagcatctagaatgtgatgaatgaagagattgtggtaggactgtattctcca

SEQ ID NO: 113447 - DNA, 189 bp, Zea mays
  unsure (1)..(189): unsure at all n locations
  Clone ID: MRT4577_34946C.1
ccaccaaccgtcncacgtcactgggttcangangttccccnnaagtacnncgacancttccaggganacnatccgtgagcaanntcncgtcgttcatngaaaccagagggctgcccaagggnctggtgctcggnagctgnaccgtacctcgaggccgccgggcagggnngacttggcccatgtaccanc

SEQ ID NO: 113448 - DNA, 311 bp, Zea mays
  Clone ID: MRT4577_34947C.1
gctatgcatgctccaaacgaccaggctcaggcatccgacaacgtcactgttctatggcgtgggctaaattcaattgatgaggacaacaaagaccaacataacgactgggaaaaccatgacgagaccgcaggatcatacgccttgcagcgcctacgattaccgccagctgacataatagacttcagagcccgaacgcatccagctacacaacgatctcacagcctgaatcgccaacgtgacgcacactctcacgtctcattaaccgccatccggtgtcgtgcatacagcgcagctggctccgctacacttgc

SEQ ID NO: 113449 - DNA, 270 bp, Zea mays
  unsure (1)..(270): unsure at all n locations
  Clone ID: MRT4577_34948C.1
ccctggnattgctgcatttttttcatgtgggaggcctgcaaaattgaacatgggtaacaggctgccctcacccatcgtttcttatgcctcctgctgttcacacgttgtcgtggcgtcctgttctgcntggaccgggctcaggccataacatgtgttgtgactggctgcatgtctcctcgccctctgttcgttgtggcctatctcctccgggggcgggcttggctcccgctcgttccggtgccctttgcctgtctgctcccccccttcgtt

SEQ ID NO: 113450 - DNA, 421 bp, Zea mays
  Clone ID: MRT4577_34949C.1
aacaaaatgccccagctgaatgcatgtgtatatacaaactttaatacaattccaaaaggcttggataagggattaatattttccataataaggcgctacgggctcatccggagtataaagctgggtgccacaaaaccgaattagttcacaacaacaggtggggggccggtacctccggagccttaacggggggggggggccccttttgtgccttgtggggggggggggccttaagggtttgccccggggcaaccaccggcgggtggaacttggggacgtaataactgagcggggggcccttttagggggtttccggcacctgggggacctggtttttgttcacctggatgaggatggacaaagccccggcttccgggataaggaccacccccccggggatggggggcgggtttttggggcc

SEQ ID NO: 113451 - DNA, 391 bp, Zea mays
  Clone ID: MRT4577_3494C.1
tcggtttctctaatatgcactgttactccagcatcaagcaattcagaagagactcgtaacacattaaaatttgcccaccgtgcaaagcacattgagattcaagtgtcacaaaacaagattatggatgagaagtctttgataaagaagtaccagaatgaaatttgccaattaaaggaagagctagaccaactgaaaaggggtatactttctggcactccttcaaaagatgtcatagaagacaatgtcattctttggaaacagaagctagaagatggtaatgtcaagctccagtctagactggaacaagaagaggcagctaaagctgctttgcttgcaaggatacaacgtctaacaaagctaatcctggtttccacataagcaactcagactc

SEQ ID NO: 113452 - DNA, 385 bp, Zea mays
  Clone ID: MRT4577_34950C.1
ggctgactgtgccgtccttatcattgactccaccactgggactgtgacgctggcatatccaaggatgggcacacccgtcaacatgctctgcttgcgctcactctgggagtgaatcacacgatttgctgatgcacaggatggatgcaaccactcacaaatactccgaagcacgccatgaatacattgagaacgaagactcattctacctcaagaacgttgatacaaccgtgattagatcgcctttgctcaccattcttggctgtgagggcgacgacatgattgacaggtccaccaaccttgactggtacaaaggcccatccctgcttgaggctcttgagcctatcatacgagcccatgaagccttctgacaagcctctgcgtctgg

SEQ ID NO: 113453 - DNA, 446 bp, Zea mays
  Clone ID: MRT4577_34951C.1
gtcgatacaagactctagattgagtcgtattaggactgtccatgtgtcgccgacttgacaaatggtccttagttgatgtcaattcgtcgatgcattttcctgcttctccaggagcacatagcacaacagaggatccgattgcgtgaaacccttcaacatattgcacgactgcattaacgcacatccagacgcagtctccaacgagattttggacgaagacgacaatgacgacgacgcagatgagtccaacctgagagttagagctcgatcatggtccagataatccaaccctaacgtttgagattgcatgatattaaatgatactcgtatagaacttctcaagtactggagtatcggaatgattttaaagagcacaaaggcatcatatattgaatggcagtcatatccatattatctttggtacaaaactcccacgtttttttttt

SEQ ID NO: 113454 - DNA, 646 bp, Zea mays
  Clone ID: MRT4577_34952C.1
ccggccgggtatgttctatggttagaaatcttagttatggttctctttgtgtgacaatgtgaacaataagattgcttatgcatgaataatcaacaaaataaaaaaaaaaaaaaaaaaaaaaaaaaaaaaaaaaaaaaaaaaaaaaaaaaaaaaaaaaaaaaaaaaaaaaaaaaaaaaaaaaaaaaacctcaccgccccgggaagccccattctggggggctccaacccttacctcttatttgggccccgggggtaatggttccctaaggacccccccgggtttgggttcccgaagaaaaatagggctcccccgttcccaagttgattaaaattcaacgggggggggccccccccggaattcccctgggggaaccccctattttggggggtttttggttttggggggccttccttaggggggtttcggggggcccgaccccggttttccgggattttgaaagcggagggcaataattggggcaattcaggggtaccccccatcccgggggtttcccggttgccaaaggcgaaagggttcggcccttcggggggggataaaatttttccgggcggggcgcggttggggtctcccgaaccggtgtagacctggaccccaggaccccacaaggggggggaaaaccaaaaa

SEQ ID NO: 113455 - DNA, 104 bp, Zea mays
  Clone ID: MRT4577_34953C.1
aaatttggatatcagtggtttccgtggcagtcgtgggcacagtggcatctagatacacacgtacagtgtacaccagggtctcctccatcatatcagacgcagcg

SEQ ID NO: 113456 - DNA, 341 bp, Zea mays
  Clone ID: MRT4577_34954C.1
tcgcccacacgtgcgcgtatccttctgatggcccatttttaaagtatctccacgattaccaaaccacaaaaattatctattcatctagattcctaaccctgtcgagggccaacaggaggcggaatttatcgttctcctaggcctcctcgacagatgcagcaaaggacgctcaaaactaaatttataaaatcttcgaagaccagcggagcaccgaggaaggcaatcttttatataataataacacttaacatcgaaggctcctgaactgctactaaaatcttaagataaccttcacacattgtaatacattcttcttaaggaaaagaacatgctaatgacac

SEQ ID NO: 113457 - DNA, 434 bp, Zea mays
  Clone ID: MRT4577_34955C.1
ggtaccctcggagctctcctcgccctcacgacggcgtcgtcctcgctgggccggctgctgcagcggcggcgccggcgtcaagagacggcggcgatcagtgtggcagcggcgcgctcattgacctaggactggacgagcactacacctacaacagcctgctgcagatgtgatatatcacgtgtgcggatcagtgctccaaacaagcaggcgatctcgtcatctgattttattattcgttggtgcagtggtctagctctctgcctctctctgtgtgcacaccgattccgtttgtgcatatgtgctgcactcgtaccgtcgtacgtgtagttaatctacatatcagtagtgctgtcaatctgttgtgtttgattcaaataggtgctgtgagtaatgtacatgcatatttgtttgtggatcagttcctgttgcttgag

SEQ ID NO: 113458 - DNA, 367 bp, Zea mays
  Clone ID: MRT4577_34956C.1
aaaagggttgttttttgggttttttttttttttcaattcctactttttttttgtttcagaaaaaccgggaattcctacgagatttccaaatccacctgggcaaatggtactgaggaaataaacaacttgttttccttggcacggttgttgatagggggcacaacatgacatgcctgccccaatagggggcccaaaaaaacctggcccagccactggcggggaattaaaaggggggttcctccccattctgcaagatcaactggctcgccgaatatttaatcaccgccaggaatacaaatgggggcctcccccttcagctgatctttaggtgcccttaccatggggaaaccggcacctgctttggggg

SEQ ID NO: 113459 - DNA, 205 bp, Zea mays
  Clone ID: MRT4577_34957C.1
gggccggggacacaccattccaaacgctacactcccggcggcggcggcggtggcgcagcagcggcagcagcatccgaagatggtgaagttcctcaagcccggcaaggccgttattctactacagggccagattacacggcaggaaggcaaatatagtgcgcgtgtaacaggagggcacccttaaccgtccctatggccactgtct

SEQ ID NO: 113460 - DNA, 138 bp, Zea mays
  Clone ID: MRT4577_34958C.1
cgaccactacgctacgcctaccctcgatgtactactagctgccttcctacccgcttcccctctcctcccgacgcagtctcactacactcactacgtctccgacgtcgccgacgggacacgcgaagcttcaagatcttg

SEQ ID NO: 113461 - DNA, 429 bp, Zea mays
  Clone ID: MRT4577_34959C.1
aaaaaaaaaacaaaaaatttattcaaaattgggggccaaactttttattttttccaaaaggggaaaagactttgggggaagcttaagggttttttttaacggggggggtattggggaaataaacctttttaaaaggggggttaattttcccaaaaggtcttttttttttttaaaaactgggtgggttcctaacaaaaccataaaaaaggaaaggggacattctggcatggaagggaggctttttcccggaacccaagttaaattgggtgggaaaaaaaaaaggtttccccacggacagggcatttgaaaaataactcttttaaacaggggaagctattttccccaaacaagaaagaccatgctcttaaaccacttggaggggcttttttggccaaccaggaagaccccacaaatagagggggggggcaa

SEQ ID NO: 113462 - DNA, 258 bp, Zea mays
  Clone ID: MRT4577_3495C.1
tcggcagcgaagatggagcttgcacgggccaacgcacacacaacacagctcgtggagatggcgcgggggctagggtgctggcgctggacgcgcactgcatcgcgtggcgtccgggcggcggctactgaacgcgaaagacggatgcgctgaccactgggggcctgcgccgagctgcatacgtgcggggcagcccgcgcgccgacgccgactgctgggccgatgcgccagagctgggaagaccccaagtgctgtgcgtgc

SEQ ID NO: 113463 - DNA, 302 bp, Zea mays
  Clone ID: MRT4577_34960C.1
atgttcagtttttgcttattttgtttagcagcagaaggacctttataggtttatcgatacctcatatacctgacaaactatgtgctacagagtgctgatccaaccactagggtaccattacacgagttataggttatatagaatgcagacaagaaaaatatattctaggaggcacttacggtgaagaaacacaactctctttggattttttcatcaatccttggaggcttgcaacagtctgtccatgtacttggcgcagaagatgaggcggatcacagtcgaccactcgggtgctggatccc

SEQ ID NO: 113464 - DNA, 229 bp, Zea mays
  Clone ID: MRT4577_34961C.1
ggtacggagggccaatcaccagccctatctttggggccggaattggttcaaaccatgacggcacacgctctgcggccgctcccgctacctgtgatcgaacaagtcgcctgtggcaaaccttgctccctactctgcgccaccaacagtttgcactcattggacccactgcttacactgggccctgctggtcattgctgccaacaactcttaccattgagccaggtctgta

SEQ ID NO: 113465 - DNA, 211 bp, Zea mays
  Clone ID: MRT4577_34962C.1
ttaaaaggaccgccatttgaccaccgcacaccacccgacatgcatcacacacccttccagtgatcccatcctcccgcacaaccgataccctcaacagcgtcccgttaaacagaaaatataactattcccgatgcctccgccggcgtctccatacatactaaacacgcccactgccaatacctcccatctctggaaatcctaaccatattcc

SEQ ID NO: 113466 - DNA, 479 bp, Zea mays
  unsure (1)..(479): unsure at all n locations
  Clone ID: MRT4577_34963C.1
cggaattcccgggtcgacccacgcgtccgctttaacttaaaactggttcgagaaaagagaactgcaatttcattagttcgtaaagttaacagagcttgcagagaaaaaacatatgtccggaatgtgctgtcagctttgaactgtgctaataatataagtacccccaacacacagaagcttctgtgttgaaatagtatagctgtattccattctctgtctattcataagtggggaaaaaacgtacctgcatttncatatgcagtttctatttacgacagtttgtgaacagctcatattattgttcctatatatatatatatatatttctcgtgtctaacaatcatgacgtctacatttcagccagagcactcgagttcattcatatatagccagcatantatatagttaaggtttttttttgtcagctacataaataccaactgacacagacatttgaaactgtttttttttgtgtgttc

SEQ ID NO: 113467 - DNA, 388 bp, Zea mays
  Clone ID: MRT4577_34964C.1
attcggctcgaggctcctcttcatttttttttgtcgtctgccagggaggcgattggcgagggcattattaccccgagagctgcagccgcacgaccctgaacccttagtcttggacgtcccgcctcgggactaaaggggcgacggaacacaccgagcagtctggagacaggaaccgggggatcgagtatggaggatgactcgcggatgaccaaaactatgaagggtgcggtgacaggactcgcgggggggaccatctggggcacggttgatacaacctggtacaatgtgccccgtgtggagcgcatcgtcgtgctacctggccttattcggacgctcaagaagggcagaacctactgggccagttttgtcaccatatggggcctctaca

SEQ ID NO: 113468 - DNA, 344 bp, Zea mays
  Clone ID: MRT4577_34965C.1
ttcgacccacgcgtacgcccacgcgttcgcccacgcgtccggtcagtgccggccctaccgatgggtcacacgaacagcgtctgcgataccatcatgatgacaatgtaagcgaccgagaagggcttacactccgctcctaccgatctcgccaaggacactgacgacttccataacgacttcatcttgcagacctcgcacctggactacattaacctgtatgacgactttcaagaagttatcgtccatatatacgcggtccatgtcagtaacgctcaccccatctgtaactaccattgcgtgcaccgcagatgtgatactatctatcgagaacgcagctgacgaag

SEQ ID NO: 113469 - DNA, 574 bp, Zea mays
  Clone ID: MRT4577_34966C.1
aaatgctcctcgctgcggtttgatcgcgcccgcggcccccccgaaccctcgcctccccctcccgccgccgtcatggacgacgaccgcgaccacgaccaggaccccgatgcgtcgtcgccggccgcgccgtggcggcggtccgtgaagcggaagctgggcgcggaggcgggggacgaggcgggccccgcggcgcgggtcgaggcggaggacgagcgcgcggcgctgcgggaggcagcggcggcggcccagtccacggcgtcggcgctgcgggtcgaggtcgaggaggagcgcctcgccgcggccagcgccgccagcgaggccatggccatgatgctccgcctgcagcgcgacaaggccgaggtccagatggagctccgccagttccgccgtttcgctgacgagaagatggcgctcgacgcctccgaaatcgaccagctccgcgtgctcctcgcccagcgcgcgcgtcgcctgctgcgcctgcgctccaggctccgcgagtacaggctgcagtgccttcacctcggcatcccgcttcccgagggcgaggacctcgtcgcccagaacgccgccgagg

SEQ ID NO: 113470 - DNA, 702 bp, Zea mays
  unsure (1)..(702): unsure at all n locations
  Clone ID: MRT4577_34967C.1
ccccttgtatcccacactccgccgccacccaccacctcctagcctccctcctccatagctcaccgccggccatcccccgcccctcttctcacctcgcagattcagcagctgccagatccaccgcatccccaacccatccacccctctcgcaacccatctctctcgctctctctctcggcgaccaacatccggtgattccagcgatgactgccgccgcgcagcaaactaacgagctggtctacgacccctccgtcctccattctggctggatccgctgctcccggtctatggcgctctcccgtgacccctagacatggctagggtttcagctgctgcgtagcatccatcgccgtttcatctctggcggatcctcgccgtcgcacagcgcggccctcacgccctatccgcctcctggatggcgctccctagctcggtgcgctcgtgcgtgttgggctggacagcggcgacctcgacctcttctgccacgtctccgccccggccgtgtatctatggcgacctcctctgccgcacgccggcggtggccggcttgcactgcaacccgtgcatcatctacaaaccacttcagcactgcnggttgtgattgttatgctgggtacgatgctcctcatggtcccagtaatgcggntagtatggaagaggcactaggatccttgtggtcacattccttgagctctcgctgat

SEQ ID NO: 113471 - DNA, 301 bp, Zea mays
  Clone ID: MRT4577_34968C.1
gcgtactcccacgcctgctgatgcattcattcacagctgctgttgcaacacatgttaacccagcttgggtggggtgaaaggacgggtgccgggtgaacgtggacataccccaacacgagagccttttttattgaggaacaaactagcaaccgtgatgacccagctttctgaatcagcaatatggcgaaagagggagcccagataaagacaggccaccatataagggagagactcgtgcaccacaagaggacgcttacaaaggacaaagatgcaccccctgcacaagaatgggcagaaatga

SEQ ID NO: 113472 - DNA, 831 bp, Zea mays
  unsure (1)..(831): unsure at all n locations
  Clone ID: MRT4577_34969C.1
aatttctntgggtctcttcagtctaccattgaacgtgtttgtgcgctttcctcagacacacttgacagtgttgttgaattagcacttctacttcttgagtgcccacaagatttagctagaaaaaatgtggccatctttttcgctgctgcttttgtgttcaaagctgttctggatctatttgatgcccggaatgggatgcaaaagcttctcgatatcctttgtggatgcgcgtctggaaggtctggtagtaattctggaggagcaggatcctccaatgtaaatcaagggaatgatcggtcgcctgctgaagtcttgactgcatcagagaagcaagttgcataccatacatgtgttgctctacggcaatactttagagctcatctccttcagctcgttgattccattcggccaagcaaaagtatccgtagtattgcccggaacacttctagtgcaagagctggctgcaaaccttttgacatcagcaatgaagctatggatgctgtctttcgtcagatccagcgggacaggaagttaggccttgctcttgtgagagttcgttggcctgtgttagacaaattttttgcctcaaatggtcacgtgactatgctggagttgtgtaagtttcaggcacatggtgatcgctatttgcgtgatttaactcaatatgcaattggagttcttcacatcataacacttatgccacaaccacatgtccgcaaatcaatagtgcagggaacattaagcaacaatcgtgctggtatggctgtcttattagacacggtgaaaagttttgactatattgatcatgangtgatctgtccagcactgaat

SEQ ID NO: 113473 - DNA, 277 bp, Zea mays
  unsure (1)..(277): unsure at all n locations
  Clone ID: MRT4577_3496C.1
cacgcgnccgggnagancnncgnncaaccacgccnaanaaccgctcggggnnnncncagacgngaaaaaaanggggcngncnnncaccaagcnanncagccggctatnngccaaaaaggagaagcgcanaccganggnngggcnngangccgcnnggaaaaccaccanncnnnacaagcngaagnngggagagaaagncactactattcccaccatcggnttcaatgttgagaccgttgaatacaagaacatcagcttcactgtttgggatgttggc

SEQ ID NO: 113474 - DNA, 214 bp, Zea mays
  Clone ID: MRT4577_34970C.1
acgcccacgcgtgcgcggacgcgtatttgctctttttagcgtcggccccatagctgaaggggtccactactaggagatagtggccatgcacactctttttctaaagacaactcacgtccttttggaatgcttatagaaatacatctcagtaccactggacgaatatgtgttgccatgattcaaacatttttgcttgacaagtccatatttgtgc

SEQ ID NO: 113475 - DNA, 246 bp, Zea mays
  Clone ID: MRT4577_34971C.1
tgcatttctatatccttgaacttgttaaatgatgtaccacacatccctaaacatataaaaatggtgcatcacaggcccacttttggaccatagtgaccactgcggtgtgctacttaacaagttcaaggacctaaaaatgtattttcaaagtttgtggacttcagtgacatctgttgacaagtcagaggttgctcatgcatttaacacttttttgtattactatataattaaggagtttgctcgcct

SEQ ID NO: 113476 - DNA, 610 bp, Zea mays
  Clone ID: MRT4577_34972C.1
cctccggccgggaaaaaaccgccttcttctcaccagcccctctcgcctcacgaaaaggcgcaggccaaggccaaggccaagccgccccctccctcctctcgtctccactctctgccagccaaaggggaggcccgagatccggcgcgcggaggatgccttccaggtccatgagccggctgtccgtcgagtccgcctcgggcagcggcggcggcggctgccgggaggccgagccggtgctctgcgcgcctcggccgcgcagggcccagcagcagctggtccacgtccacccccgcggcgccgacctcatcctcggcccgccgcccttcctgctcaacgagagcggcgaggagggtcggtgcagctgggcggcgttcggcggcgggtcgccgccggcgcgcgcgggcaacccgctggtgcacgaccctagcttcctgctgagccagcgccaccccgcggcggacccgccgctggagctcggcttcttcgaccacctgatccgcaccagcagctacgtgcgccggccgacgccgacgacgacgtcgtataccagcagcaccagcggcagcggcagtagcagcaagagcagttttgggccgtcgtcgttcgcgcc

SEQ ID NO: 113477 - DNA, 722 bp, Zea mays
  unsure (1)..(722): unsure at all n locations
  Clone ID: MRT4577_34973C.1
cattgggaccctcgaggccggccgggaccgccttcttctcaccagcccctctcgcctcacgaaaaggcgcaggccaaggccaaggccaagccgccccctccctcctctcctctcctctcctctcctttcctctccactctctggcagccaaaggcgaggccgagatcctgcgcgcggaggatgccttccaggtccatgagccggctgtccgtcgagtccgcctcgggcagcggcggcggcggctgccgggaggccgagccggtgctctgcgcgcctcggccgcgcagggcccagcagcagctggtccacgtccacccccgcggcgccgacctcatcctcggcccgccgcccttccttctcaacgagagcagcgaggagggtcggtgcagctgggcggcgttcggcggcgggtcgccgccggcgcgcgcgggcaacccgctggtgcacgaccccagcttcctgctgagccagcgccaccccgcggcggacccgccgctggagctcggcttcttcgaccacctgatccgcaccagcagctacgttcaccggccgacgccgacgacgtcgtataccagcaccagcagcagcggcagtagcagcaagagtagttttggcccgtcgtcgttcgcgcccgccgtgaggatccaggggttcgacgtcgccgcgtgccggagctcccacagcggcggcggcggcgcgggcggccgccgactngagnactc

SEQ ID NO: 113478 - DNA, 533 bp, Zea mays
  unsure (1)..(533): unsure at all n locations
  Clone ID: MRT4577_34974C.1
tacgcctgacgtccggtccgacttccgggtcgaccacgcctccggcttccacctcctcgtccacgcgtgaggccccctagccaccgaccatcgcgttgctcccgcccaccgccctcgcgccctcctcttccaccccgccggcgtactccgctgccgctgctgccgcgcctccccgacgtccccagcgccataccgcgggccccccaccggccatgtcgaacacgcccgacttcgtcgtctctaacgtggaccacctgatcaactgggccgctaacggctcgatctggcccataaccttcgggatccatgctgctcgctggagattatgcacccgccctccccccctactacctctaccccctcggcgtcatcctcacccccccgcccccccaccaccccctcatcattctancccccgcccccccacccaacaatatacccccccccccccccccaacctctatataccaatccccccccccccccccccccactctaatcccccccccgcccgcccacccccccccgccccc

SEQ ID NO: 113479 - DNA, 513 bp, Zea mays
  unsure (1)..(513): unsure at all n locations
  Clone ID: MRT4577_34975C.1
ggaatnctcgggtcgacccatcgcgtccggctgggagtatgatttaaagagaggtattttcccgggacttagtctatagtttgtacactaaatgtgtttgtctaagtcacaggaaggtcctctcaaaagttgaagtcaaaaggtgtaagttacgaggaatgcacataagagagtagctgattgggtagcacaccggacaatctggtgccctctaccttgtctcgggtgtctctgctaaaaatgtcagacagtatgggccatgcatcatacagttttgaccctccaacgactatcttcaaacggctactcgaaggcaacgacttgctggtgcaccagacagtccggagctggtcaatcattggtgtcaggctgccggaggtgtgccaccggacaccgaacagnctggagcacccgcagnagaggcaatttttcctagatttggatcttctttgaatggaaaggggcaacaactaagggatcctttggggttataaaatggacccctatgcgccc

SEQ ID NO: 113480 - DNA, 487 bp, Zea mays
  Clone ID: MRT4577_34976C.1
actgcccacgcgtccgaggatgcagaactgatcagagcgatgcgtggagataagcgggttgtaaactgtgtcgaacagcacccttctggtattgttctagcaagtagtggcattgagaatgatatcaagatttgggaacctggtgaaggtgaaaaccgctccatcgttcaagctgacgaggtatgtgcatgttgtacttgattctcttatccttcttcttcctggtttcttattatgttcttggtatgcacatcctgtcataaaatcacctaatgtattggacaggcatgacaaaaaaattctaacaacatttgcataacgatttagcttgcttggtgtttgtattgtgaatctgaagtatccactgtaagctgtgtaaaggaaaagaccagagtggatcagttttgcattagaaaacaacttgagttaggaatgacggtctcttgttggagtcgctattgaactaccagaatctaacgttatgaaa

SEQ ID NO: 113481 - DNA, 282 bp, Zea mays
  Clone ID: MRT4577_34977C.1
aatatgggtttttaaatacatttttttttttggagggcacacacacgtttttgttttcacgggttccccggggccgagaacacaagctaaaaccctagattttcttttttgggaaaagaatcccaatctaactaatttcggtaggtccttgttcgtgttagtacaatagaggccgcggactataaaaagctccacaccattgttaccaacaacagaaccacggacttgtgccaggggaatttccattcggggggtatgtcaagtgatacgacagtataggga

SEQ ID NO: 113482 - DNA, 261 bp, Zea mays
  Clone ID: MRT4577_34978C.1
tcgtttatgcgtgcgccaacccttccggccgagggctacgttccgaggctggacaccttgcggacgttcataccaatggacgggacgctgcttaacaagacgctgatcgcgaataccctcatgaagcacgacatactggtcccgcagcccatccaggctggggccgctgtccaccaaatgctgagcggggtgccgaggaagctgcctaacagtgaggacgtgtgactgaagaacgggacgcaggctctaacgtggccttaa

SEQ ID NO: 113483 - DNA, 848 bp, Zea mays
  Clone ID: MRT4577_34979C.1
cggacgcgtgggcggagacggagaaggagggtcccgtcgtcgtcgagcctgggcccgagcccgagcacgcggcgcacatggagcggagcaggtcggagtcggcggcggcggcggcggaactgccgcggctcccggcgcgcctgcacaagtcggcgagcgacaagtcggcgttcgcgcacttcggcgccgaggaggtggaggagaccgtgcgcgcggtggaggcgcggcgcccggccacgacgagggagacccgtggccgccggcgcttccccgtggcggagccggagccggagccggagccgccggcgtccgagtccgaggatgatgaggaggaggaggaggccgtcagcggcggggaggtggacgcgcgcgcggacgacttcatcaaccggttccgccaccagctgaagctgcagcgcatcgactccttcatccgccacagggagacggtccgccgcggccaggcccaagcggcggcggcggcccggggcgtgtagctagccgaggggagcgagatgctgctgcaagagtcttgaggtgaggccgtgacgagaggagaggttggaatggatgaagagggagatgcagagaaggcaggcatgctggaggatcggtcgggagggaaggaaggagatggtaattcctgccgtgcgtcctcctcctcctccttcttcttccccgtctgctggtagctttggttggttttcccgtttgctgtgtttccccttcctggtgcggcgagcatcatgtcgaagctctgctccatgcgcttttttggatacaagaaccttgcgcaatgtggcatgccatcacatcgcatcatacttatatatatatatattcataat

SEQ ID NO: 113484 - DNA, 182 bp, Zea mays
  Clone ID: MRT4577_3497C.1
gcctgcacgtaccggacctgaagtttcgagtcagagccacccgtcagccgtacccgtgaccctaagcttcggtaatagatgtctcccgccttccgatgtcctttgcgggtagtcccctctccgctatcgcggatgactgcatatgaccatgcctgatcactctgctcaagaccgttctcaag

SEQ ID NO: 113485 - DNA, 414 bp, Zea mays
  Clone ID: MRT4577_34980C.1
gcccatccaacacgctgcatttgagcgccagagacgtgtcatcgtcaggctgactcagtgaagccacagtgcacacggatacgaactcgacgcccttctaggggatttctgcgcctgctgagaagccaatgattgctgtccagcacaagggggaggacaagcagtctgcatcagaagagatctactctatgggtcttatcaacatgcccgagattgctgaagcttaccttggcatgcacgatcaagaatgctgtgggcacagaccctgcctacttgaatgactcacagaggcacgccacacaggatgctggaggtgattgctggccttaatgggctgcgtatcatcaacgagccaacagcagcagctatcggctatggtcttgacaagaaggctaccagtggccggtgagaaga

SEQ ID NO: 113486 - DNA, 428 bp, Zea mays
  Clone ID: MRT4577_34981C.1
atcagaacaaaagggtaataacaggggaacacacatttttttgtttgggcaactgggtgggaacaaaaggggaatagcccaacacaaaggacacagggccagggcttataaaaaaaggggagaagtttgcattgggtctaaaacaaccggaggaggcagtctccccaaccgacatttccaaaacagtttttccttccttcgaaaaggaaaaagggaaacccgggcggggacttgaagggggcgctaacagttccctcagggggggggaaagcaacctcctggaaaggaccagccattttgccacgcgggaaccaaccaaaaactccaccttttttccctgaggggcattcaaaaaactcttgggctaccttaacaaactcaggcgggaggaactttgcccccattattcagccatccatcctggaact

SEQ ID NO: 113487 - DNA, 308 bp, Zea mays
  Clone ID: MRT4577_34982C.1
acgcccacgcgtacggtggctctcggacatcggctgacactatttcttgagacagcgatgcaagttatggaggctcccaggcacctgaaagaggatatggggcttacagtgggtacagggctcgctaatataatagtgggtgatctggacatagctctcttcactatggaaagcgtcacggatattaggatttagattgcttgataaagcttctatctgaggcacactggattataaccttggacacccctgctttcctcacgtactataaaaacagacaatacatggaagctgggatgctgcttatt

SEQ ID NO: 113488 - DNA, 309 bp, Zea mays
  Clone ID: MRT4577_34983C.1
cccacgcgttcgttcgcattgcactgttattgtgcttctgattggtggaaataaagagtgggggaaatctgatggcctgagcgatagccatatatctgagcgtgagtggaggtcctaaatcttattttgggatcaattttaaataagaaggagaatctagcccctccggcttatcgctcccaatctagaactgaatgttcacaagcccccatttgaatttagccgggctcaccccattaatgaccacgcctattgacgcgttcttatggctatgtgaatagattttgagactctaaacgaatttatatt

SEQ ID NO: 113489 - DNA, 173 bp, Zea mays
  Clone ID: MRT4577_34984C.1
tcgtgcggttctgcgtctcgcctagattcggcctctctcccttgaaaggtaactcttcagcgtcacgcatgcttgaaggtagaataagcacgtcaacattgtgatcattggacacgaagactctggagagtgggccaccagccgggcacctggtctacatgcttgaagggatt

SEQ ID NO: 113490 - DNA, 792 bp, Zea mays
  Clone ID: MRT4577_34985C.1
tgggcggggaagcaacgaattcttcttgcagggaagatacatatttgggcctgatgtgagatctgtgtttctcactatgttcctcatcatcgcaccagtggttgtcttctgtgtgttcgtcgcaaggcatctcataaatgatttccccgatagctggtttaatctcagagatggtagtagcggttgtcttcactgtttatgatttgacgctgcttctttgtaccttgggacgagccaaggacggcagctgatatcagggacttggaagcagggttcggcggcatgtttgacgagaaagagggcagagtagcccccgcctccccagatctgagcagagatctcccaccagagtttgtggaagggcgaactgtcatgccctcgaggcatacaagttgtgttcaaagaggaggccatgcgagtgaagcgtcgggggtgcaaatggctacggcccataccgccgaagatagcaaccatgtcccctggagtggcacacgttagcctgacaaaaaggcggggaaaaaaaaaggagaggaactacggtgtgtttcggttgtgggcttgttcgctgcggctttaatccgactgcggctgcggcttctacagtattttctctctagggattgcagctgcaacagtattttgcagctgcaacagtggtttttgtagtgcagccgaacgcgctcgtgtctcgaggtgggtgctggtggcgatgtcgtctcgaagtgaactgccatgtgtttattaccacgtgtgccagggcaaggccctggatcattttgtaatccgaaacac

SEQ ID NO: 113491 - DNA, 759 bp, Zea mays
  Clone ID: MRT4577_34986C.1
aattcggcacgagggcggcaggccgcgtggatcctgcacagccgaaccacaaaaccccgccccaccaggccaccacggacaaccacacccctccagtctccaccctgctccgctcttgctcccgctagttgcagttcgtcgccggccgcaacccctctcccccgccgtttggggttcgcctctgtcgctgctgcaggagctagggtttccggcgtgggcaaccggggtatgtgcagcagctgccgcactgcaggatctagggttccgacgactccgctcacggatggagggtggtagaagggcgagcgaatccctctcggcatacacccatggatcatgatgatactgattttcagagccaaaactttcaactagctggtgaaggcagtaacaaattcccatcagtgtacaagggcacgggaatagttggattgaggttctgtccactggaagcagtgttgttgattttagctctagcgcagcagaatcttgctcaatatctaaaactaataatgtctggtcagaggcaacatccactgaatctgtcgaaatgctattgaaatcggtgggagaaaatgagacaactggtgacatggataataatgcccaccttaagttaagtggtatggacagtcaaattgatcaatcgagtgtccatcctaaatctagtaactccctgccagatagtactgtagtgccaactgaggaagatcagtctttgagtactcattctagaatgacagacgatcttgatcggtc

SEQ ID NO: 113492 - DNA, 2382 bp, Zea mays
  unsure (1)..(2382): unsure at all n locations
  Clone ID: MRT4577_34987C.1
ccggccgggaaaagccaactcccagagcgaggaggtggaggacggacgggaggaggagaggagagagcccaccacccgcgaccgcgaccgcgacctaacccggagacctccctaggctagctcccctcccagaccccaggctctcccacccacctttcccctctccctccctcctccccgtcccacgccgccgcacccccgcctggctgcttgggtggcaatcggccgtagaggaggagggtgtaggagcttgatccgggccacctgccccctgcgccgtcgggatgtacgtgccgccgccgcccaccggcggcgccggcgagcagcctagggtttaccaggtctggcggggaagcaacgaattcttcttgcagggaagattcatatttgggcctgatgtgagatctgtgtttctcactatgttcctcatcatcgcaccagtggttgtcttctgtgtgttcgtcgcaaggcatctcataaatgatttccccgatagctggggaatctcagtgatggtagtagtggttgtcttcactgtttatgatttgacgctgcttctttgtacctctggtagagatcctggtataatacctcggaatactcatcctcctgaacctgaatccattgatgggatcaatgatacaggtgttcagactccacaacaatttcgtttgcctcgcacaaaggaagttgttgtaaatgggatcagtgtacgggtaaaatactgtgatacttgcatgttgtaccgaccacctcgatgctcacactgttccatttgcaataactgtgtggaacggtttgatcatcactgtccatgggtcggccagtgcataggactgcgtaattatcggttcttctatatgtttgtatcctcgacaacattgctctgcctgtatgtatttgccttctgttgggtgtatgtgatcaagattagagcagctgagcacttgtcaatttggaaggccttgttgaagacaccagcatcaattgttctgattatctactgttttctttgtgtatggtttgtgggtggtttatctgtcttccatttgtacctgatgggcactaaccagacaacatacgagaatttcaggtatcgctatgaccggcgcgataatccatataacagaggtactctgaacaattttctagagatattctgcaccgctatccccccttcgaagaacaatttccgggcaagggtgacagtagagcaagggctgcagcaaacgcgctcacagtctaggggtttcatgagccccagcatgggcaagccaaccatcggagagcttgagatgggcaggaagccagtagtaccttgggacgagccaaggacggcagctgatatcagggacttggaagcaggtttcgggggcatgtttgacgagaaagagggcagagtagcccacgcatccccagatctgagcagagatctcccagcagagtttgtggaagggcgaactggcatgcactcgaggcagtcaagttgggttcagagaggaggcgatgcgagtgaagcgtcggcggtgcaaatggctactgtccataccgccgaagatagcaaccatgtcccctggagtggcacacgttagcctgacaaaaaggcgggggaaaaaaaaaaggagaggaactacggtgtgtttcggttgtgtctcgaggtgggtgctggtggcgatgtcgtctcgaagtgaactgccatgtgtttattaccacgtgtgccagggcaaggccctggatcattttgtaatccgaaacacaagcttgctgctgtagtctcatctcatgcctggtagatcaccagatccctgctgtggttgttttttttttgtttttggtttggcttgttttgttttgcttgtttgtctgtttgggtgtgtgtttcaacaaaatgaagtagccgacgagcctaagctcccgccaggtctggataatgtatatgtatataactatattattagcaggttgcgacgaaggaaacacaaaaaaatgctgtgcatggtttgccacattgttgtatttgcagatgtggacatggtacttgctagtgtagaagaatgacattgctgagaaaaaaaaaaaaaaaaaaaatataaaatgaaaaaagaaaaaaaaaaataaaaaaaaataaaaaaataaaaaaaaaaaaaaatataaaagaaaaaaaaaaaaaaaacaaaaaaaaaaaaaaaaaagaatttnnnnnannannnnnnnggtggggccctttaaaaggacccaagtttacttccccgggctggggaggatatagttttttttttgggcccccaaaaataaattcacggcccgcgttttaaaaacgtcgggacgggaaaaaccctgggatatcccaattaaattgctttgaaaaaaatcccctttttc

SEQ ID NO: 113493 - DNA, 2000 bp, Zea mays
  Clone ID: MRT4577_34988C.1
tcgcgagagcgtggagagtcgagagcccaccgcccgcgacctaacccggtgacctctctcccctcccaggctctcccacccacctttctcctctccttcattcctccccgtcccgcgtcgcgtcccacgccgccgcacctccgcggcagcgctactcctcgccgtgacgtcggggaggcctcgctcgggggagggctgcctgcctgcctggctgggtgtcagtcggccgtagaggaggaggggggcggaggagcttgatctggggcacctgccccccctcccctgcgccgtcgggatgtacatgccgccgccgccgcccaccggcggcgccggcgagcagcctaggctttaccaggtctggcggggaagcaacgaattcttcttgcagggaagattcatatttgggcctgatgtgagatctgtgtttctcactatgatcctcatcatcgcaccagtggttgtcttctgtctgtttgttgcaaggcatctcataaatgatttccccgatagctggggaatctcagtgatggtagtagtggttgtcttcactatttatgatttgacgttgcttctttgtacctctggtagagatcctggtataataccccggaattctcatcctcctgaacctgaatccattgatgggatcaacgacacgggtgttcagactccacaacaatttcgtttgcctcgcacaaaggaagtaattgtaaatgggatcagtgtacgggtcaaatactgtgatacttgcatgctgtaccgaccacctcgatgctcacactgttccatttgcaataactgtgtggaacggtttgatcatcactgtccatgggtcggccagtgcataggactgcgtaattatcggttcttctatatgtttgtattctcgacgacattgctctgcctctatgtatttgccttctgttgggtgtatgtgatcaagattagagctgctgagcaatcgtcagtttggaaggccttgctgaagacaccagcatcagttgctctgattatctactgttttctctgtgtatggtttgtgggtggtttatctgtcttccatttatacctgatgagcactaaccagacaacatatgagaatttcagatatcgctatgatcggcgcgataacccatataacaaaggtgttctgaacaattttctagagatattctgcactgctatccccccttcgaagaacaatttccgggcaagggtgacagcggggcaagggctgcagcaaacgcgctcacagtccaggggtttcatgagccccagcatgggcaagcccattggagatcttgaaatggacaggaagccagtagcaccttgggacgagccaaggacggcggctgatatcagggacttggaagcagggcttggggtcatgttcgatgagaaagagggcagggtagctcatgcatccccagatctgagcagagaccttccagcagagttcgtggaaggccgatctggtatgcactcgaggcagtcaagctgggttcagagaggagacgcaatcgaagcgtcggcggtgcaaatggctaatgcgcgcaccacggaagctagcaacaatgttgcctggagcggtacacattaacccaaaaaatgataaaaagaaaaggaggaactatggtgtgttggcgatgtctccaagtgaacccccgtgtgtttgttgccacgtgtgctgctccgggtaaggccctggatcattctgtaatgtataaatcctaagcacaagcttgctgctattgtttcatccctggtagcgtaccaggtccctgcggctgctgctgctgtcttgtgtgtgtttgtttgggtgacaaattgatgaagtggccgacgagcttaagctcccgccaggttcggatgatgtatacaaaattgttgtcaggttccaacggatgctgtgcttggtttgccacaccagcgctgcgtgctttgggtactcgcaagtggcatctgggcaccccgctcccatgcaaacttgttcttggtgt

SEQ ID NO: 113494 - DNA, 1093 bp, Zea mays
  Clone ID: MRT4577_34989C.1
cgattggggacctcgcggttgctctgtcgcgatctagaacgagcaactcgaatagcagctccaacaaaagctcaacgcaccagcagcaatggcgtctcgccgtttcttctacgacgacccctacgactactactacacctccccgtaccactacgcctacccctattaccggtaccagcaccccgatccgtcccgcggcgtcggcgggttcttcccggccgccgcagaagccgcgccggaggcggtgaaggtggacccgcggcccagggtcgagtcttcgaggtcggtctccgttcccgtccgcttcgtcggttccgacccggagccggtgcgcggggcggccaggatgccaccggcggcggtgccgaggaagcgggcgccgtcggcggaagcggcggcgatgctgctgcaggccgcggcgcgcgggttcatggcgaggaagtcggtgcgtgctgttcgtgaggtggagcgtgaggcggcggaggtcggagagaaggttgcgcgcgaggcggaggcgctgcgcggggacgcgagggcgcggatcgccgtcggggagacgctgatgaagatgctgctgcggctcgatgcggtgcgaggcgcgcgggaataccggaagagggtcaccaagcgggtcctcgcgctgcaggatgctgttgacgccctcgaaccaaagccggcgccggattcggaggtcgtggcggaggagaacgagtctgaggtgacgtccgagatggtggacgacagcgcggaggcgacggagatgccggtcgccgctgagcacagcggcggggttggggtgaatgcggcggctgagacggttgccgatatggaggtggacgggggcaaagctgacagcgaggcggtgccagaagcggtgaaggaatccgaaaataagcaggacgacgggcacattaacggcgaccagacggaagtctccaatgagggcgaatgggaaatggtggcggatgaagcggagcctacaactgcggcgacgggttccaccggggcgcccctgcagacaccgatgacgagcgaggtgacgaggccgacaggggaggccggagctgccgacagcgccctggacactcggaag

SEQ ID NO: 113495 - DNA, 361 bp, Zea mays
  Clone ID: MRT4577_3498C.1
gccacgcgtgcgaaacacctctgggaccgtgagaaccaccagggaggtgctgctgttgcgtgcatgccgagcaagcagcgcgcaaagagaagaaccatcgctctgggcggctgctgcgatgccggcatggcagtggcgtgtgtgcagctgcccctgtgcggtggaggggaatctgcatgagcactgtcagcccggagccgccagcatagcatctgggcgtatcggagctcttgctttctcgtcggaatcgggcagtacacgtgtcgcgcatggccgcagatatatagccctgcacggtgcaattggtggttagtagctccctatcgtacccgacatatgcttcgttttgtttgtgcatcgc

SEQ ID NO: 113496 - DNA, 289 bp, Zea mays
  Clone ID: MRT4577_34990C.1
atggcgggcggcgaccgttagcgagacgcggacgagggagacgaggaatcatatgatgcagaaccttttcggagaccagtcggaagacgaggacgatgcggacgacgacgacgtcgccgagatggtcgatgaggacaacggtcaccagccgcagtcgcctttagtagtgggtgtgggagcgccaccaggagctggacgacgatgcctacgacgatgaggaggaggacgcccgcagccactgcgcccgccgtgcaagcggataccactccgaggaagtggatggtgaggc

SEQ ID NO: 113497 - DNA, 384 bp, Zea mays
  Clone ID: MRT4577_34991C.1
aaaacaaaactgggttaaaaacccattccccatttaaactggggggaacaaaacgtttaagtaagggtgaaaaaggggcacattccccatttttgttaaaacagggcggggggggatataagggcctttggaacatcagggaacccttcgggggggtggggtttatgggcggccccccggggggaaacctcggttttttggggggggcccaacctttcccccggaaggttggccttgggcctagggctggttttccaaaaaaaatccccccccccccttaaagggggggttttatgggcccccttgggggatcccgctttattttggggggcttttcatttccgggggggccatggccccttgggggggggcccaaatggtggg

SEQ ID NO: 113498 - DNA, 191 bp, Zea mays
  Clone ID: MRT4577_34992C.1
acggccagtccaaccaagtcagcaccctcgcgcttcaaggagttcacgcccatggcgagcaccaagattgcttcaaacagctggcgggtcatgcttgccgcgggcgttcccactgccaatagctgcagctgccgtgtcaacttcgcctcagcgcccaaccggctttgcaagaatcttgtggtccgggccca

SEQ ID NO: 113499 - DNA, 346 bp, Zea mays
  Clone ID: MRT4577_34993C.1
atattgtcatttgggggaaggaaagagtcacataaacgggaacagggtggttggaccaattaccaaaagttttttagggtcacagacagggcagcaaaattaactctggaaacgggaccaaaccacccttttggggagcgcaatgaaacacgcaactttagtagaaaagggggaaccccttgtgggggccactaagtttgttgacgtattccttcttgtactccttgggagcctggggggaaggaccacgggatgcaggagaaacaacggcggcaccttcggtcaccattatgggacaaccaccggcaggacccacaatcacctggaaaacgggggaactgggggt

SEQ ID NO: 113500 - DNA, 232 bp, Zea mays
  Clone ID: MRT4577_34994C.1
ctgacacttggtcaggctctgggcctccatctgcctcaatgtctactacaagtgcgacggggccgttgtcgaacgtgcctaagctgatgtcattctgggacgatgaactcatcatgtgtcacagctacaagatagacgagccgtggatatccgtgctgaacacacaatacagcctgtggaacaacgctaaccaccatcatcgtgctaacctccgtacatcactagcgcgcga

SEQ ID NO: 113501 - DNA, 163 bp, Zea mays
  Clone ID: MRT4577_34995C.1
gccagacaaaaaactttttttttgacctatgcctcataagaagtttaaaggagggcaccaccaatgacgggttctagccagaatgctggtgggtttgacaaaaacagttggatgaatggcacaaattgttgactgtttacaagggtgccagcgttaggcgcaa

SEQ ID NO: 113502 - DNA, 285 bp, Zea mays
  Clone ID: MRT4577_34996C.1
aagaagtaacgcatctaccagtccggaattaacgcatggatccggtgatacgtcaacaagcgcctgaaacgtgcaaagcctacctggagagcaatgtacaggaagcagcacaagcaggatatccatgctgaagcagtaaacaagaggcgccgcgccaccaagaagccatactccaggtcaattgtgggtgcttccttcgaagtaatccagaagaagagagctgacaagccagaggtcagcgatgctgctagagaagctgctcttcgtgagatcaaggagcgcatc

SEQ ID NO: 113503 - DNA, 246 bp, Zea mays
  Clone ID: MRT4577_34997C.1
actaactatattattcagggaggggccaaaccattggtcaaacactttttctaatgcacggaaaaaccatctgggaccaaagtgttttctgtgccttatataaataaacaggtgttcatgtcggctctggaatcttgtattaagattgaaatgcttatattcagccgttgccggtgtgcataacacataatagacagcctggacttttggaggggtgcttccaaacaattttcttaagcacccttt

SEQ ID NO: 113504 - DNA, 261 bp, Zea mays
  Clone ID: MRT4577_34998C.1
tagaaacatcaatatattcttttatctttattatgtacacatgtactgttgtattgaataaatggcaacctgcggcagtatacatataacggatcacatattggttccagttccaccctccactgtatctaggcaacctaacctaaaacatttcagttgctaaggctctaggttacttgcataagtgtaaacttacaaaaaaaactgttgtaatgtatgagtaaatagcatagagacatttcttttacaatggactacaaa

SEQ ID NO: 113505 - DNA, 277 bp, Zea mays
  unsure (1)..(277): unsure at all n locations
  Clone ID: MRT4577_34999C.1
cgcgtgcgtcgctctcgcgtctgccctcgctctctcactcgtggagacgactgggccgccgtcgttgctgccctacgcggctacacgcacgtcttcttcgggcgcttagccgcgacgagcgccacanggagtagaagacgtnagcttctggtnngaacgatgtacttcgaggctatngcttcgtcgcagtacttcgagcagcatatcgctgtatctgcgtcttcatcgacagcacaactgaggcggtgacagatatatgcacatcagtctgatcgct

SEQ ID NO: 113506 - DNA, 2529 bp, Zea mays
  Clone ID: MRT4577_3499C.1
atggaccgaggttggatgtataatgtgccaagaccaaatccgtcgtatattcgaaatttgagaagctttattgaagcggccaacaagcacgcgaatttgcgaaagagcaaggagatattatgtccgtgcatcgattgtgataataagatagcttggagagatacaagagtaatccaatcacatctgctaaaaagagggtttaaaaacaattacacgatatggtcagaacatggtgagttggatccgtgtgaagtgcctggtaatgacgagagagttgtcggaattttagaacttaaagttgatggtaaagtggataatgtggatgctaatcaagattttgatgaagaatttgattgcgaagagatgttgcgccatatggaaccagaaatgttgagttctgtgggatcgcagaaagggctatctaaaatggagggactggaaagtgcctcaaaagaacctttatatgatgaatcaaagggttgtgacaaagagtttactacactgcgtacagttctagaacttctgaagttgaaggctagcgccggatatcgatacaagaagagctacaatcaagactgtgtaaaaaaattcccgaagaaaaataaaaacaagaaatccactattggacctgaaagtgacgatgacactttttatgacatggatgggaaaaagaagtcaaagatcccagctttggtgatgtggtatcttccagtaattgatcgcttaaaacgtttgttctcaaatcctagggaggctgagcttatgtgttggcatgctgaaaatcgcaagcagaataacaaacagattcgacaccctgctgatgcatcacaatggaaaaatttcgatcttatgtatcctgagtttgccaaagaaaccagaaatgtaagatttgctttgggtacagacggaatgaatccatttggtgaaaaaagaagtgtacatagcacctggcccgtgactttaacgatgtacaaccttccatcatggatgtgtcacaaaagaaagtacattatgttgactattcttattcaaggtccgaaatcagctggtgttgatattgatgtgttcctagaacctcttatggaagatatgacaaagctttggaatgaaggagttagaatatgggatgagtattgccatgagtatttcaacttaagagcaattatatttgttaccatccatgattctcccggtggcgccacactatcagggcaaaagactaaaggaaagaatggttgtgtagtgtgtgtcgatggaactgcttccatgtaccttaaatcatccaagaagttggtgttcatgggacacagacggttcttgatgaagcagcataagtaccgaaagatgaaagaggaatttaacaatgaactggaaagtaaagggaaaaacaaaggagaaaagagaaagagaactgacccttcaacttacacaactttcaagaagcaatcaatttttttcaagtacctcccatactggaaggatatggaaatttgccacagcattgatttgatgcatgtaacaaaaaatgtttttgacagcatcattggaaccttgctgggcatgccgagtttctcatccaatatcagcaaactagtcaggatgaaggacttgtctctatttggctacaactctcatgactgccatgtgatgatgacggtgttcctcccaattgcggtaagagccctcgaaacagagcatgtcaaagttgtcatcacacgcttgtgttactttttcaatgcggtttcacaaaaagtaatagctttagaagacttggactatctaaaggcatacatcatcgagactatgtgcaagcttgaaatgtgttttcctccatcattttttgatatgcaagtacacctaatcatacatctcgtggatcagataaaaatattagggccactatatttacatcatatgtttcagttggagcgatacctgggagtattaaaaggttatgtgcgaaatcgcgctcacccagagggttcaatcatggagggatacactacagaagaagtgattgagagctgtatatattacatcagtgacggaacaatgataggtgtgcctgtacctaaacatgagggtaaactatgtgggagagggagaatgggcaagaaaacttttcgcgttgaggattacaagctagtacattgtgctcatggtagtgtactacaacatctcacgatagccgagccttacatagaggaacacctggatgagcttcgtaaagaaaatcagaaccgcacagaggactggatcatgagggagcacaaacatcgtttcagcgaatggttaatggataaaaacatcccattcggagactctttggaagagaaaacaatgaagaatttggcttctaggccatcgtgttttgtgacatcatggcaagcatatgacatcaatgggtacacattctatactaaatcaaaagacatgaaaagtgttgcacaaaatagcggtgttcgtatcgatgcttttgacctacatggacacaagaccacatattttggattcatagaggaaatatga

SEQ ID NO: 113507 - DNA, 360 bp, Zea mays
  Clone ID: MRT4577_349C.1
tcgactcaagccacgcgtacgacgactatagaagtacgacccttcgctttgatgaggcacaatcaaaagatgggtcgaggcgctctgctgcagctggatcagcgagatgtactacaactaggcacgcaatttgcggttatttaactctactgctattggtgatatacttccggaacacgattatagagctactctgccacagacgttgcttttactctcggcacagcaatctacgaaaattattacatgagaccttagctggaaacaaccccgtgaaagtgttgcatgaagccatggttaaatcctggacgccagcttacgaccaaccacgcggcagtaataaatacagcgatcggatga

SEQ ID NO: 113508 - DNA, 685 bp, Zea mays
  Clone ID: MRT4577_34C.1
tttttttttttttttttgatcatgaaacagctagcttttgcttattatatttattgttttgcacattgtcacacccgggttctaggggcaccaaaacccgggcgtaaaaataatcaccaagtatgctgggatcaagcctcacacatatgatggctcatgctacagaaacgaatgtcacatctttactataggagttctatacaaaataaataaataaatacatcatacgaatacatcgatccagcaaccatagttgactgggagacgatggtctagaccactcatgaactcatcacaacatccttcatgcgcatcatcctgcggtacctgttcttgaccgacggtggagcagtggataacttcccccatggcgagatgtggctccacagggaggcctactcgacggcgagcgcgcgcgccaccccacgaccatcccagagcttggcaaggcccagaatacgcgtggacctatcccgagggccagatgctggttagccggagtttggacgacggatccaactctctctatctcttttcttgccagcgattgatcctcagttctcgcctatatagccatggctatggaccagataacgacggggttggtggcagatcccgacacacgcggcgtggaatcagatttggttaggattctgtttgagttgcgctcgatgggaagaagaac

SEQ ID NO: 113509 - DNA, 2301 bp, Zea mays
  Clone ID: MRT4577_35000C.1
atatacatgaatttcatttctccttttagattttcttacaaagtaggtattacatgtaattaatttttcaaggaaggaaatgcatcaacggtttagcacacaactcctatcacctaatgcatcaaacaaggtgataaaaattttaaaacatcaaggaggtggcaaatgcaccggggcttgcctgaataacactaggttagtgttgttagacgacgaccacttgacgatcatccttgtcctagcacttgatcaggcaggttcatccatcagcattatcctgcggattagtccacgcttggggtcgacttggctcgtcttccgcatcacacgatcaattaacgtacctcatgggatgcacgatgcacatgtatgagcatgagtataaagagtataagatagataatctacactaaaaaggatgaaacacttaaaaccaagcattaaaatcaattaacaagcattaagcatcatgaatatcacagcagggcatcgactccatacaattagacgaaacccgccacatactatccttcgacaagacactagaaacacaaacacaagacctactttccacaacgttacttcgaccactccttagatacgaagcaccgatttaattcttctcgctactaattctcctcacaccacaacaaagaaccaatttaagcctaatcgacatgcgcgtccaccacaacattcccttgtatgatttatatttcaatcctaagcttcacgcgacacaactacttcaccatcacgaacacaatcatactatatatatacctaccaatattctttttactgaaagtagcgatcaaatttttgttcctatatcaaacattttttatcgtaaatatatacacctctttataagtgattaaaatatttcatgatcacacatgcctactaatattctactcactccaccaattcagctaactgactgaaatagcgaaataactcgccataactgaatctagcttgataattgcaaagatcatgaagtcacgagagttccgtgactcacacaaataatcgagcaccctaatgagcttcgcactaacacattaatttattccacgatcgaactattctgaataattcattaatttaccgtttcaatagtcgactcgaatccgcgagatcggtagtgattttccgatccaggcaattggtcgagcgcttggggaatattgcgctgctagcttcgtcttcatccgattcttggcattcttgatgacgcgcggaacggcgacgatcttcgattgaagtcttcaaccgagtacttgataagcaatacacaggggcctcacttatttttgtctaatatccgggattcggtgttcgacgaaagcgagcagagaagaacgaggttcgacgagcttgacgacgatacgggagggtgctgtatatagagttacaggtctggcgagctgacgcggtcaagataactgtggctaacgagcttgcgatagaagcgatgatagtgcgggagctcgacacgctgtggcgagcagataaaattcgtgcgctcggcaaacaaggaaagaacgagctgagcgtgcgcagagagctcgacaactcgcagcaggggctagcagggcgtgagctgcgcgcaggcacgcgacgaccacggcaagggagcagagaaaattgtgcggatgactggaacagagacgacgaacacacgcgcacaaaaagcggagcgcgcataggatagggaactgcggcgatgaagcgccatagctggagcaagagcgggacgcgaactaggcgacggcagcgcgcaaggacgatcttggctaggggaaaaactccgcgggcagggatccgagctgaaaggagccgggggagatgggcgcgcagaacgccgagcagagactggagcagggaccgagctcgacacagggagtttcacggcgcggtggccatgtctgggaccaggggcgcgacgatgggaactgggggaaaaaatggagctctagccagacgtcaggaagacgaccgagcagggcaccgaggaggaagtccagggcgtggcgattttggctgccgcgtcaactgttgccctctgttcccaccggaagaaacgccgaatggtggcgagcaggcacggctgggttggaaggtgcacagcgcgcaggtaaaaaggaaccgtgggcggcgagattttatcccctggcgactggagatcttttctccatgagcggcggccggatgaagatgatgacgcgcaggaaatatcccagggagataaacgatctcgagccgaattccgagcttacgtcgcggcatggagtc

SEQ ID NO: 113510 - DNA, 385 bp, Zea mays
  Clone ID: MRT4577_35001C.1
ggttagtccagtgaaggatcacctacccccggttcgagcgctgctaagcaagagagcacgcctgcggcaacgaggactaggctgtacctctagaggaactacacagtgctggaaccttcataatggagcaagctcgcttacaagctataatgggagacttctcgctagacaatctcactacggccagcactacgcacgtctgcactcgcgtcatgggcaccttcggttacctaacaccggagtacgcctccagcggcaagctcacggacaagtcggatgtcttctccttcggcgtcatgctgctggagctgctcactgggcgccgtcccatcgataccattaacttcattgaggacagtctcttggactgggcgcgcccgctgct

SEQ ID NO: 113511 - DNA, 544 bp, Zea mays
  Clone ID: MRT4577_35002C.1
aaaggcggggaaattatcccgctttttttaaggaacaaaaaacaaacaatttttgaagaacagccccgtttttgtcaaaaaacacgtaaaaccccgtatacgggggggggggtgggtaaaaccatggggggatcactcattttttgaccctgggaaacaggcccctgtaaatcctggacaagaaggacctttgggccttccccttcccgggtccccgcccgcgggggggccctggggggtcgggcaaaaacagaatttttgggggttgcacgggcggggggggggcggtcctggcctcctccggggggggcttcaccttttaaaactgcaccggaaatccctgcccccccatgggggggttttgtttgtcccacaccccaaaccttggaacggccaacgttttgttggggcccggcggaagcgggggcttttgggggcccggcggcaacggaaacgggaagggggaccccggccttggcccaccgggggggtattgggccccggggccggggttgcccccttggggctgggggggaaaccttcg

SEQ ID NO: 113512 - DNA, 270 bp, Zea mays
  Clone ID: MRT4577_35003C.1
acgagcaacccccacatccagccggcacactacccctaatgaacagctcacgtcggggcgaacgcacagcccagcggagctaaacgaccgcgccttcggcagagccgacatgctgttgaagccgagcgacgctacgacccacctgcgcccggggttgaggggcctgagccgctccggctgagccgctcgctcagcttcggctgcggcggcgcccccgaggaggcgctgcacctcgtgctcggctacgcggacgacccgcgcgagcgggag

SEQ ID NO: 113513 - DNA, 248 bp, Zea mays
  Clone ID: MRT4577_35004C.1
agttatttctctttctcttttttcattgggggtttttttattttttttcggggaacacacccaacacatttcatataactttttaaacacacaaaatttgggcttgaaaggcatcataacaactgcctaccaaaaacaaaagaataaaaccgggtgtacctccctcacataaaaactgactcctccacaatgtcttttatttgccaaccttacagctcaactttattcaaaatccttcccccttggat

SEQ ID NO: 113514 - DNA, 700 bp, Zea mays
  Clone ID: MRT4577_35005C.1
ctcgagccggcgggcgggaactccttgagcaccatagccacgacctcttctcccctgtttcctctcgtgcgttctccgcatgagcgaggatggctcgcgatatcgtcagtatctccgatgtttttgatccataatctgaatcaaatggatgagggctagtacatccatccccttgattgccacgatgaaactggcatgctatatgctggttttgctcgctgacgatgtcctcaatggtgtgtgtttcccagaccatgtgatggacgcccacgtcacactcgtggtgatggttgtaatgctgcataaagatgcttatgttgcatatcaggctcaatccaagagtggtatcctgacttctgaagaacccgatcgaacatgtatttgtcaacaactgagatgatatgtagaagatctgtcaccacaccttctataacgaactccgcgttgcccctgaagagcaccctgggctgctgaccgaagccccactcaacccataggctatcaatcataagatgacccacttcatgtttgagactttcaatgttcctgccatgtatgtccccatccactctgagctttccctgtactccagtgtacgtacaactggtattgtattggactctgctgatgcagacatccacacagtgccaatctatgatgggtatgcccttcctcatgacatcctgcgcctagaccttgc

SEQ ID NO: 113515 - DNA, 811 bp, Zea mays
  unsure (1)..(811): unsure at all n locations
  Clone ID: MRT4577_35006C.1
aaatgagccccatccaaaatttcccctcgctcctagcactcgagcactcaactgtcgcaccatcgggacgccgcggcggcggccagcacgttcgaggctgcggcggcgaggtgggctgtcgtgcgaggtcagcgaggacaggtcgtcttggagcacctgaggctgtgcgaggtgccggcaggctatgacatttctagagtaagtaatactctgggggcatctcccgctcgcttagctgtgcccgccaggccatggagcgtgaggacgccgacggcgctctcgattcgtgggctcaattctgcactctttccaacgagcttctcgccggagacggtgatctcgccgtcggcccacgcctagctcccgtcgttggtgacctctgcacacgcggcctcgccacgctcgtccgcgactacttcctccactccctcgaggaaacatttcgaaaccatgcagtcaagaagttctggcagcactttcatccttattgcagtgcctcaaccgtagacagaattaagttctgtgttaaggaacattggcctgaagaaatcttaagtaaagcactggaggacatatgcttggaaaggggttaccaggaaaaatgtgttcttgttcttgtccaagttttacaatcatatgaggataggatgccacgaaaaaaaatcaaagaagaggtctgtagctccagcttaatgcctaggtatcagttaatggtatcatcagtacttctgacacactgcccttgagctttcctggttagnataatttcttctctgntttgcatgcagagaaagcctttctattgctgtat

SEQ ID NO: 113516 - DNA, 2886 bp, Zea mays
  Clone ID: MRT4577_35007C.1
atgtctgaggataagatagttgctggtgctttgaagctaagcctttctgaggaaatgcacctgggttttcttgagttaatgtcgaagaccaatacggaaaagattgtcaaggaaactttggagggtttatctgaagatactagcgacagtgatagttatgatgtggatagtggtggagaggactccgaagatcgcccgtggcggcctaatgacggagaaaaaactacgccgacccccgaagataatgaagtcgtgatcttccgaagctttttaaaggctgggctacgattccctctaagcaggtttgtggtagttctgaaaatatatcaaatttaccttcatcaacttacccctgaggcagtgataagattgggaatcttcgtctgggccgtgaggagccagggcctggagccaagtgcaaaaagcttttgcaatatacacgagctagtatatgagacgaaaccttggggtaaggagcaatatcataataattttggttgctatagcttcggtgcccgctctgggtcaagctgtcccgtgccaacctttcggaagagatggcccggggaatggatgaaggaatggttctatgtgaagaacgatttgaaggttcgggaagatatcaaagatatcatcatgcgccctatctggcagcgcttcggactccggaaaccaaaggtagaaatggacgaagcagatgaagaatgtcagagggccttcggcgtagtctgttcttttattgggaccagggatttaatgcaagagcacattgccttcagagtgtggccacttgcagataactgggaaatgccgaaggagaccgttaaagaaactgacgagggtggactaattaggctgaaatatacattcaagtacggagataagtttgttgaaccggatgatgattggctgaaaagcattgagaatgtaagtgatgaattgcttggggcatactcaaaggccgaaaacactgcattatcagcggctttcggaggccgaaagaagaagagactcaaccgagtatttgatgcaattaggtttatctatcccgactactattatccaatgcgaggtcaaaagagaaaaaatacttctcctgcaaaggacactgcttcggctgctcccggggagccagcgccgaagaggaagaaggtaaaagtgttcacacaccctccacgctgtattgagccggccacagtgcccgagtttattggcgaggcctcttcggccaccgaagccagagaaccaactccagcgctaaaatccgaagaaatggccgaagcaccagcaatagaaaaaacaggagaagagagaactaaagaaagaaaaacactagatgctttaagtccttcatcaaaagttgaggcagctaaaagccagaaggggccagcagcgaccccgaaaagaaaaaggatggttaatgtgctggatgttttggagacaattaaatcttcaagcacaactccaaagaaaactgttgaagtgtctactgaagcctttgttgctgaaacttcgaagcaacaatttgaaactgaagctgggccttcggaatccaccaagatacaacctttggaggtcgaaaaaatgtcaaaggcaagtttagaaacagaaaaagcaaaaataacagagccgattctgactgaggaaattggcactgccacccccaaagcatcttccaaaatacatgattatattgtgcgacatgcttcggggaagaaactatctgaagaagagatttttgaggccaatcactatgcccgagaactgaagtatccgagagggcctgtagtgttcaatgggacaaacgaagatgatttcctgtactgtcttccagacaataaagaattatccgtgtgctgggagatggctagaagcatggggttcccgaaactcgaagctggcctttgcgccatgacgaaggacgatcttgcggatagcctggcatacaatagtctgaaggtcttaatactcagcaatgccttaagggctcagaagaatgccgaagatgagagctgcaccattgctcttaacaaccttcgaacagaggttatcaggctaagaaatgaagccttggagaaggacaaaattctgcttacattagtggaaaaaatgaaggaagacgaagctaactctaaaactcaagccgaagctcagaagcgtgaaatcgaagatcttcgtaaacaactagcccgagccaaagaagaacgcattcttgaagaaacaaaacgagaattaagcgatcaatgggcagatcatttggaagtaaatgttaaagagcttcgtgcttcgaagaagaggtgctacgataaatccatagaatgtgttaagaaaataaaatccagtttcgccagcgttggcgcgttctctagtgaagaaaatttcacaagaggaaatccagaaggcccgattgaatggattagtcgcgaagctgatgtcttcgacgaaatcttgaatagtcgcggggacatttgtgctttttcgggcgccaggggaatcgttaccattttagagaagaaagggtgcgagcatgtgaaatctttggcgcagtctgaagctactttatcctctgaagatatcaaagacccttcagccgaagtaagccaggttggtggaaaatttttcactgacatttgggacaatggcggccgaaaaatggctcaagagatcattcagagaagtgaaaaaggcatccatgatgctagggaggtagcgagagctgctgaaaaaaacacagggcccgaagggcaactagaacctgctgaggcatctgcggaccctcccccgaagggagacgacgaaattagacaaatggccgaagccatcatggacgaagttgtcaatcagctgctaaacgaagctgcagaagtagttcttagggaagattaa

SEQ ID NO: 113517 - DNA, 311 bp, Zea mays
  Clone ID: MRT4577_35008C.1
atattacctacttgagctgggataaggccagagaaggacattcagatgagagaatggtggagagccggctagcatcacataagcccaataaagtagcgagttagttgaacagtttgtaggagaagtcggtcagccatatggctatttataagccgcatggcaccagggaataaatcaaacaagatcattatcaaaccaatctctctctcccttgcagtgaccctctccagcgcctagggctgcttccctagaaccaagcctatagctgcggcgtttaacctccccatgaaagacaactatccccatggacc

SEQ ID NO: 113518 - DNA, 346 bp, Zea mays
  Clone ID: MRT4577_35009C.1
acgcggccttagcgagaaaagaaggacgaggaaacaaaactaaaaaaaaataaaaaaaaaaaaaaaaaaaaaaaaaaaaaaaaaaaaaaaaaaaaaagtttttgcttgcgggcgcgcccccccctggggcgattggggcgggttttctgccatggggggggggggggggggttgttctggggggcccaaggggccctatagggggtgtgattacaattttttgcccgccctgtcccacgctctaaagggggaaatacccggatatccctcacactgacggccgttcgggcatgccctctttggcccctttgcgccctatggtgaggggccttacagttcgctcttc

SEQ ID NO: 113519 - DNA, 128 bp, Zea mays
  unsure (1)..(128): unsure at all n locations
  Clone ID: MRT4577_3500C.1
gnaggagcacgctgcaaagctcatggagtaccaggtatcatttgaccctctggtccgttccattctgctacatgccaatacgtgctgtgcggtactgacgggacaatgcgcctgccagaacatgcgtg

SEQ ID NO: 113520 - DNA, 653 bp, Zea mays
  Clone ID: MRT4577_35010C.1
gcagtgtgtgaaacaaattaaatggcttcctctatgctctccaacgccgcggtggctaccaccgttgtcaaccgcaatgctggtgctcaagctagcatggttgggttgaaatctgttgcagctttcccacttaccaaagaagtctaccaatgacctctcttccctcccaaccaacggtggaagagttcaatgcatgaaggtatggccaacacaaaacatgaagaggtacgagactctatcgtaccttccacctcttaccacagaccagttggcgcgacaggtcgattaccttcttaacaataaatgggttccttgcttagaattcgagactgaacatggatttgtataccgtgagcaccacaattccccagggtactatgacggtcgttactggacaatgtggaagttgccgatgttcgggtgcactgacccggcccaggttttgaatgagctcgaagaatgcaagaaggagtaccccaacgccttcatccgtatcattggattcgacagcaaccgtcaagtccaatgtgtcagtttcattgcctacaagcctgaaggctactaagtaaggagtactatactccgtgtatttgattctttttttcccgcaatttttgttgttgaattgcataatgtatttggagagaattctt

SEQ ID NO: 113521 - DNA, 870 bp, Zea mays
  Clone ID: MRT4577_35011C.1
gccggccgggaagcaacaacttggtactagataacatgaaagagtagcttcgacgtagaagaaactttggcgcccttcaaatcccatggccgcactcggttcttctgtcacctccagaggcttggcactccatacctccgtgtgtgtggtttttcttcatcgtcgccacgggaatccagtgatcccggccgcaccgtctcgtcaccagcgaagtcttgcgactgggttaacgacgagttcttcaggcatgaacaatgccttccctattatcaaaggaactacacgaattcctgcggttggtcctggccctgcaaatccggcaggaggaaacctgccaatacccagcagcatgcctccgtgggccaagtgggtggccggggccgtcatacttgcgatacctatctacaggaggttcagaactttagaagacaagatagagaagacgacggaggtggccatcgaggtggtcgacacggtggcggaggctgcggagaaggtcgccggcgaggtcgccggcgcgttccccggcaacgacggtctcagggaagcggcctcgaagattaagacggtcgcggatgagatcgaggaagacgccgagaaagccgaggccctaatcgagaaggttgacgagatcaagaaagaggttgattcaattgtggatcctataatcgacaaggttgtcaaggacaaagaaatatagagacaggtggtgaactgaagatgtaaacatttgttgggctggtctggttaggaatggatccggatatttattcagatgttaaattactttcgattgcaaacaaatatgatatataatttgttatgtaaatttatattggtgattttagtattaagcttatcaagattcat

SEQ ID NO: 113522 - DNA, 247 bp, Zea mays
  Clone ID: MRT4577_35012C.1
gcggcgacaaaagcatcccaagaagatgtggagaagcaatcccctagtcgatacccaagtactcggcgaaaggccagaacaagaattgtcgccatgtggagttctagttaatatggagagattccaagaattgtggatggaagagagagtgaagctcagttcaatgctcgccaggtgctcgatcgaagattttattcagagactgtcgacgctctcgcaggctttgagtcggacttactttagatga

SEQ ID NO: 113523 - DNA, 204 bp, Zea mays
  Clone ID: MRT4577_35013C.1
gcggccactgcgtgcgcccaggcatacgctcacacagtgcagtcagtcacacagaggctactagccagcacttacctaccaagcagttcgctccaagagtgcaaactgcaaagcaagcaatggacatggtcttctacaagcacgccagcaggggcggcggcatcaaacacaagggcgtcgcgaagcccttataccccatgaaac

SEQ ID NO: 113524 - DNA, 620 bp, Zea mays
  Clone ID: MRT4577_35014C.1
cttttgaagaaatgcaaagttcacagtgcctttaccaacacgcatacacactatcggcttcttatgaagaaaaaggagataaatatcatgtttgaacatgctgattgttttgttccttcaaggatcaaggcagatgtttgagaggcacaagtagcagacagtggatgaccttatagattgtgtaagcagatattgtatgaagcattgctttggtggaactagaggtaccaaaggaaaaaaaacccgagtactatatgatggtagcagaagcaagaggtcgttgtaactgtaagtaaccattttattttattctattgatgcatgctgagtgtcacatcagtgatccaaatgcaagcatggaaacatacatagcatgtacgtacttcatgcctaaggacattagctgtgtacgcagtgctagaaatgctccccaaattggctgaggcgtgtatgttttccatctttttcctgtcacaaaaacattagctgtcgacgggggacaagtgtttccctgcgattacagcagcttttgtatatttgtggacaaatgttagtgtgtgtttaaatgcactagaactaatagttagctgctaaaaaaaaaaaaaaaaaaggcggccgct

SEQ ID NO: 113525 - DNA, 572 bp, Zea mays
  unsure (1)..(572): unsure at all n locations
  Clone ID: MRT4577_35015C.1
ctccgtaaaaaaaaaaaaaaaaaaaaaaaaaggaaaaacgaatataaaagaaacaaaaattacaaacaaaatgcatacaaaaaaaataaaataataatatagaagaaaaaataaaagggggggcacgtgtttagaggttccacaacttacttacactgggcatataccctgtcttaccttcttctttaagggccctcctaaaacaaatccattggccccagctttaaaaactgncgagacatggggaaaaccttgccggtctctccaaataaatgcccttggctagaatatgcccctgtttacccggcctgtgtaaaatacgcaaaaaggccccgcacgctgtggccttttaccaacagttgggacaccttcaatggccaaggggctaccccctgttcctgccctttaatcccgtgggttgtgggggtttccccccgggtgcccgttacatttgctcagcgccttagccccctttcttttccttttttaccctttttttgtacccactttccccggttttcctcgtgaggctttaaacagggggctccttttagggtttccaattaagggtt

SEQ ID NO: 113526 - DNA, 271 bp, Zea mays
  Clone ID: MRT4577_35016C.1
cattatgtggatgctctactagatgaaacacgccctcctaacactgagtgccttcgacctattcattctttcctacggattgaatcttgcagcgctctttcaccgcagatagtactgaacaagctttaatatagatactcatcacacaatccatcaaaggatatcttgctcaagcatggcacgttgatgccataatcaatgggatttaagacacacaattcctattatcatatgagggtggaaggtctaaatgccgagcagactagagatt

SEQ ID NO: 113527 - DNA, 525 bp, Zea mays
  Clone ID: MRT4577_35017C.1
gggacggcgatggaggggacggcttttatttgacggtggagcgtcgtacgtggagaaggggtcgcgactgaccgatggggccggtctgccagtgagggaaagcgcgcgagtgagaggggctggcgggtggggttggcgtgtcagcgagagcgggtgaggggagtgcgcgggcggcttcgtgcgcgagcaggccggctaatgggccgagggaggggaatgcgcaggcgcgcgggaggggaggcggtcgcaacatgggccagaattggcccagcagggggggagctcctttccttttttctttttattttctataactcatttcatttttgtttctttttgcacaaaattatttagtggatattctaggtgttggaaaataaaatctaagtgaggtgcttgtgatcaaacaaagtgtatgcatatgatgggaaaaatctaagggagttttttgagtagatggaaaaagaggggaggggtagattatggttttaaaacacctataatattccctaaataattttgtgc

SEQ ID NO: 113528 - DNA, 608 bp, Zea mays
  Clone ID: MRT4577_35018C.1
cttgtattctccatgccagttgggattgtggttcaaagtggtgcttttgggcagttgtgtggtgcacgggacttctgcgacttgagaggaggaacggagggagaaagcgcatcctggcgaccaattgcgacgcatcaggagctgcaaggcatctgtcgaaggatcctcccgcctcttgtcggcgcacggcctgacgtcgaagatgtggtctactgcataggctaccactcatagacgtgactctccatgcatccatatctcgtcggcgttgcactctgtttgctcctattcactttacatctcggagtataccagttgcgacactaccccaggacgcattcaagaacatggataaccagccgaatatcctgagcgacgggagcatctgacttgatatcatgaaggaggaacgaagacctgcacatgacagctgctaagagactcgctcatctgtttgtgcccatatgactgaccctcaccctcggccactcgttggtcccgaagactgctcagttgtaccaaactgatctcgagaatgcgaatcgactgctagcagctggactctgaaatatgctgcgggctgataagctatggcatatctcgtacaa

SEQ ID NO: 113529 - DNA, 298 bp, Zea mays
  Clone ID: MRT4577_35019C.1
aaaaatacaaccataaaacaaaaaaaattccaatcaaaaaaaaaaataaaaacaacaaggagaaaggacaaattcaataaaacaacagccaatacttaaaaaacctctatcactacacggccctcctcctattctgaccctttttaccttccccacccttccaactacttagcttttccttgccacaacttccttcacttccattgcccccccttttacaactccgggcctcgaaaaccctatggacctcaaaccttattccctttccagactatccccttttctccaactcacttat

SEQ ID NO: 113530 - DNA, 252 bp, Zea mays
  Clone ID: MRT4577_3501C.1
aggggatattttttaaattatatggggggtaaccaaaaaaggcaaaaaccctgctgatctggaatctggtggtcttcaaggggccaaaaccaaaaaccctcggtttccacaggggttaccctttagcccgaaacaaccattcggggggtacataaaaggcccctcccttttaccggtttttttcaaaaacctgcccagcccaatggcatgtgggggactgaactagcgggctaaaaccggcccgggggtccc

SEQ ID NO: 113531 - DNA, 305 bp, Zea mays
  Clone ID: MRT4577_35020C.1
acatacattctccagaggagggagtttagttgctacagagggaacaaaaaatggacttcacgttcggcccttgccgtaaaaaaaaatagttttagcttcacattggtcaaaactgaacctacattatgccaatattttttgattgtttcacgaatggtatgcaggttttatacaccttgttgggggttcagccacaaattttattaacctatgggggcggggatccttttacttaaagaaattttgttacatcccttttaattagtcgttattcttggtgccattgaggtggcccttttcttcta

SEQ ID NO: 113532 - DNA, 232 bp, Zea mays
  Clone ID: MRT4577_35021C.1
cccacgcgtccgccgacacgtctgtcgagtaacagactagcaacatccaatcggtctggggagagatctcatacgcataactaacacactggtgctcactgctgactctataccgcatggttcgacccacacagatgtactcagcatattatagcttacctactaccagtgtgccatatctatgcttagccactatcataattccgctcatcgataacctgtatctcttgtt

SEQ ID NO: 113533 - DNA, 365 bp, Zea mays
  unsure (1)..(365): unsure at all n locations
  Clone ID: MRT4577_35022C.1
cttggcaagataattatttattttttatcattaactattatatgagaaacatcgtcacatgtaagtttaacgggtccacgcggggaacggggatggggaatnctttttttttttttttcccgnttacccgtcgggggggggggggggcctttttttttccccangggggaagtaaattgcgcagggcggggccgttgtagaggaattccccaatgttaatcgttgatcgggtccccattggcatctgtcctggggagggacatccattcaatcttctgaaccaacagcttcagcaacagaccttattaacctttgtttgtggcaaggtagttcgacagcttggcgacagtatggatcttctttaa

SEQ ID NO: 113534 - DNA, 1145 bp, Zea mays
  Clone ID: MRT4577_35023C.1
acgacgcgtgggcggacgcagggtaccatgcaccggaattttttttttttcccatttccagacgtatacgaggagaatatatacatgttacatgtatacactttacaactatatatacatgaagccttgaactacagagatcactgcctgaagtagaatgctatgatatgaaccatcctgtttccaaacatataaaaggagtaccatgagtacgaaactgaggctacttacacgtacgtacctacagcacacgcgcaaatcacattcacgaatcacgaatccagctgagaagggcatttaatttgcttcttctcgatcgatcgaccccctcgttcccatgcgcgcgctcgatcacaccgcctcgaactccctcccgcgcgtccgtcctgcggcggcgccgtagcgcatgtgcatggtggccccgagctccgccgtcacggcgtccgcttcgtcctccgccttcttgctctccctgccaggcccgccgaagatggagtgccgaggctgctgatgagcagtagagactcggtcgagcgccccgtcgccgccgccgtagatgtcgctgaagtcggaggacgcgacgctggtgcgcttggcggagtagttgaggtcgaagctggccttggccatgtcgaagctgaggctggccctggtgtagaagctgatgcgggactcggacgacagcgggccgaggtagtagagcgcggcggcgtccgggtcggcgggcgagaccttggcccggaagtcgttcctggacggcgggatcggcgagaagaagatctcagcgatgttgtggccggcgccgcggttgaaggggttggccttgcgctcgtaccggtaccggaagttctcgtacgtggtctggttggtgcacacgaggtaggagtggaacgccgtgagcccgccgacgaaccacgccgtgacgaaggtgtagacgatgaggcagcccgacacgggggactccgcgacggcgctgccgaagctgacgccgtagcgccgggagatgagcagcaggttcacccagcagaagccgaacacgtagaggcacaggaacgtggtggacgcgatgaagaggaaccaacgcgtccgcggacgcgtgggccgacccaggggcagtggtggtcgaagcgctccacgcagttgtt

SEQ ID NO: 113535 - DNA, 475 bp, Zea mays
  Clone ID: MRT4577_35024C.1
gatgaaaaaagctgtatctattgatctatgactcataagcactctaacagagggcaccaccactgatgggctgctgttagaacgctgctgggttggccaaaacaagctggctgaatggcaactatggtggttattgtaagagggtgccaacgctaggctcagcgcgcacagtataacgactacccttgttgctgtgttacaaaggcccaacgactcacagtaaattgttgtgtgtatggtcagaattgtctgctgcgaccatacgcacgagagtctactgctactccctggtgtgattggaaaacattgctgggggtaggcagcactatctgtgccttaatgcctatcctaggtgctgtctgacatctgcagcaaatgctaacgctcatccttgttggtatgacaaaccctgttgtggtttacagtcagcacataagtggggtagcactatttgatatagctgatgagccctaat

SEQ ID NO: 113536 - DNA, 358 bp, Zea mays
  unsure (1)..(358): unsure at all n locations
  Clone ID: MRT4577_35025C.1
acttgttccagctagctaggagagagagctttgtctaggccgcggaatgatgaacagggagccaggagactggcactgcagggcgcgccagcaccttaacttcataccgtcgggatgcatgccagcgctgcagtgaaccacgtggagttggtgatcgtagcggcggcggtggccacttgcgtgggcgtggcgggacctccttcgtccgtgtgtatagtgctggctctgatgtcccccctggggactggtaccncttctgcggcgcacacatcttggacagccggtccaactgcttgatgtgctctgcctacattgatgaggctgacggcacctgtgatagtgacatgtcacgctcacg

SEQ ID NO: 113537 - DNA, 961 bp, Zea mays
  Clone ID: MRT4577_35026C.1
ttgggtacctcgaggccggccgggaattttaatacgtcagatataagcacgacggccagtcagtttctttttctttcacctctctctctccccgaccttaccttctccctcacacattccaatttccaccgaacaacgaccgccattctctccctctctcttaatttctccatccacgaacgacacgcaccagctagctagctagctactagcctactactcctgtcctgacgacgactccaccgccatagacctgcgcattcgcgataatgggatgcacaggaacccagacccagcagcagcgactccgactccggccgccccgaggcagaggcagcagctacagcttcgtcttcgtcctccgcgcgctcacgctcaccctcctcatattgctcgccgtcttcgcacagcctgcttccagccgcaggcctctgccgctcgtcgacgaccaccacaacaacggcgtcgtcaaggccgccgccgccgccgccgccaccgacgtcatactgctgctgcctcctctacacgccgacgccgagaaggctatggtcgtcgcggcaccgtcgtccgtactgccgcccgtagaggaggacgaggatcggcggcggcattggctcgccggtggccgccaccagtggctgctcaacaagaagccccgggggaaggcgccgccctccgcccccagcaaacgcaccaactgatctcaacacttcatcttgcatcatacattcatacacgatgttttccctctttttttctctctctctcttcttttatttccctttctctatacccttatggcctcatccaattcttggacgcctgcgcgtgtgtccggtagatggcacactgatgcctgtagtttatctattctattcattcttttgggtttgagcttgactaaggtctaaaaacatagaatgttggactgtgttcagcaaaaaaaaaaaaaaaaaaaaaa

SEQ ID NO: 113538 - DNA, 514 bp, Zea mays
  Clone ID: MRT4577_35027C.1
caagtgaagtgtctgctaatagattgacaatcgacacacatatgagggagatcgcacaaggcagggcctcctacatacataccgtttactaccaaacacttgtttttgtgtctgaaccacaagggccatgagcctacacactctaagccttgggctgcagagatatcgcatctgccaccgaaagaagctacgacggcccccaccgcttatgtgccggggaatacagcgatccggactagcccgtgcggtgggacgcgccaccacggcaacaagtgcagaccttacctagctacctagctctaaggacttcatgacagagcccttaacagagcgttcccgatcaccgtcgggcgcttgttcgaataacaacccgatctgccctatgaacttcagcacgttacctgcacgcacaacaactttctgtataaccagccagattatagcctgccgtaattactgtcctagctggtccctgcccgaaatggttatccacttacaatgccacacagaatac

SEQ ID NO: 113539 - DNA, 294 bp, Zea mays
  Clone ID: MRT4577_35028C.1
cgagagacagaacaagaacataagggagtccgcagcggcgcgtaacagaagagcaagcagagaatgggtcgagtgagaacgaagacggtgaagaaatcctctcggcacgtgatagagcgtcactactcgcgcatggaccctggacttccacacgaacaagaagcgtctggaggacgtggcgataatcacgtcgcagaggctaaggaacaagatcgcggggttctcgacgcacctgatgaagcggcatccagaagggacctagtgcgcggcatctccctcaagctccaggaggga

SEQ ID NO: 113540 - DNA, 508 bp, Zea mays
  Clone ID: MRT4577_35029C.1
ttggaataccggcaccttaacactttctagagacaagtgtgtagcgaggatagtttgcttaatatcggtatctgtccattcgttctcttatggttattgatattgtttatgcgcttgatgctccatacgatcccgctgatgagcctccctggaccatgtcactagtccgaacgaaaattatagtgcaaggggccattgcccactgcgacacgtatcaggaagggtgtatgtatcagcacactgatgattcgtgtctagttgacatactattgcatcctcttgctaatggcccataggtatcgatgccttctgtggaaacctgatatacaggctctcttgccgcaatttatgcatccagttactcctatgtttcattgtgttagccttacttcctatcttgaatacctgtaggtgcgtagcatctcatctaacatacattgaatctgaaagccgattcctcggttggttgtgaatgagctctgctcaagcagatgttgatagtgataca

SEQ ID NO: 113541 - DNA, 2283 bp, Zea mays
  Clone ID: MRT4577_3502C.1
atgcctgaatcatccgtttcacataagcggaaacgagggcgacgaggtcccaatcagatgaaagaaggtgcagttatgtacgtaacaaaactaaatacagaggggtttcctgaagaaccacttgacgtggttacaaagtttcgaaattcctgcgggtctactgttagagatatagtgccaatcacacttcaaaaatggaaggatttagatgaagacacccgcaataagctatgggctaagttgtctgagtcattcaagttcccaaaaggcatagaggatgcagtaaggaagtcgatgctctctactatggccaagatgtttcgtgggtggaaggccgagatgaatagggaatttgttaagaagaataaggttcctccgcccaagaaaatggggaaaatcactcaagctcagtgggaggaatttgttcgtcagaagaccgaactgaaggccaaagaactgggcgaaactaattctcagagagcgaagatgaacaaacactcccatcgcctggggataatcgaggaagctatagctaacggcactttggacccaatattaaaagatatcgatgagcgagctattcgttggatcttaggtcgggcagcactaggcaatcctgaacacaatggacgggctcggggaatctcttctaagatttcctggagagaggcgtttccagagtatgcgtcgtcatataggaaacacgagaagtcaaaaaggacccttgaagagactattgatgaaagggtacaaaaggctattaatgacgtgatgaacaaaatgaagaaaacagaatgcatatcatttgaactcaagccaggccacatgagtccatctatagtccctagctgcgtaggatctgtgcaagacttcaccaagtaccctgtagacgatattgttgaggacaagccttgctttcttcatattccaatcaatcgatctgggacaaaaacaaaacaagctgctactggtttggtaaaaccaggacttgttaactacaaggataatcctatctcgtcacactatgctgtggtccaagttctagaaatcacagacagtggttgtcaagattgggagatagactttccagttgaggggatcataactttgcaggaggcaatgaacgagttggtcctttggcatcgacgcgacatcaagttgggtgatgagccgatcttaagccaatcaacaccaatgcaacagaaagatagttcgatcattccataccccatggtgcaggaaaatatgacaccgacctccacaaaaatcgttgaaactttcatatcacctcttgcgaaggaactcgacgagggggacgtggacaaaattgttcctcagaatgtcgacgcaaacatcaaaaaggaaggaaaggttgacaccaatgttgaagggccaactatttcaaagaaaattcatcagcgaatcgccactggcgatgtcaagaaaccgtcagaatcagtggcacgctacctgcataaattgcggagagttatgacaaatcaatcaaaagcggaatcagcatctcatggagtacgcacacggtcccaaatagacaatttcgaagtatgggaagaagatggaatgatttatactcgagaatcattacgtcttaaaaccaatatctcgatatacaagaaggaggatgttcctcctaaatttgtgaatgggaggccgttcttgacgacggtgcaactttctaagttgtcgactccgaagattagaatgcatgagtggtacatggtggctagcaacaaatacaaactcgaggacttcacatttgttgtgccagaagatgcattttggagcaatgataatatagatcctgtgcggcatttattctttgacgatctctggtcgttgtaccaccgacaaaggatggaaaccaactacttaaccctctttgcttctcgctacaaagaagttgcttggagacatggagaagaatacaaagacttggatgatgctgaatttgagaaagccgtcaaacagaatcagagaaagaaaatgaagaaaggtcttggcggcgaacatccagaggacaagcctaatttgtcaatatcattatttccatatggtgataaacaacctccaggtactgtcttgtgcgattattatgtatgcgaatggtgtcgtgtcacctttcattacatggtcaatcgtgaggatgttcctaaatccaagatcaatgatgaatggttagaaagagatatggtttccgtcggcgtggctaaggttgtaaaagacctgctttactttatgcgccgtgaagttcttcatcaataa

SEQ ID NO: 113542 - DNA, 370 bp, Zea mays
  Clone ID: MRT4577_35030C.1
ctcgagccgcccgtcgcctccctctccccttgacgtgcgggtgcggctcctcctcgccgacggcgccagcgccgcctccctcgccctctcggcatagaccggcgacggtagctgcatcttcgagtccgcaggtgctggcttctcactcggcagcccccctccccgctcctcttcctcgcacgtcttcgcgttctaacggatgtgacatttcctcgcgaatccacggctcctcggatgggatgagtttttctgactgctccacgcgctgttccccttggaaatttcgaccgctttctcgatcgccacctacacgtctgtgaaaactagaagggaagaacagcctcctaatggataggaacaacgaactgga

SEQ ID NO: 113543 - DNA, 251 bp, Zea mays
  unsure (1)..(251): unsure at all n locations
  Clone ID: MRT4577_35031C.1
gtcgccggcgaggtctccggctcgttccccggcaacgacggtctcatggtagcggtctggangattaatacggtcgcggttgatatcgaggaagactccgagaaagtcgaagccctaatcgagaaggttgacgtgatcaagaatgatgttgattcaattgtggatcctatcatcggcaaggttgtcaagtgcaaagatatttagagacaagtggtgaactgaagatgtgagacattagttgggctggtctg

SEQ ID NO: 113544 - DNA, 2467 bp, Zea mays
  Clone ID: MRT4577_35032C.1
gaccctcgaggctggccggggtctgtcgttccctccttaatccttatcccctccccacgtttccctcttcacttcccgcctgcatacggtacagtggtacacccaccgccggtgagccatgcctcccccggcggggctgcccccctggccgacgccgtccaccacgcgcctcgcgaccccgaccccgacgcggcctcctcctcgcaccacccacgttcagccgccgcctccaccttacactcgcgtccgccttcctccgcctccgcctgctacgacgccactgccgccccgcctggagcccgctgcgccaaaaccagcggccgtcgccacactcctgcctccctccactgcctctgcagcgtcttcttcgtccacctgcctcgactgcgtccattttggcaagtgctcagggtgcacgcacgaggtggacctcgacaagccgccggtgctgcaggaggtggcgaatttcttcaagggacacggggtcggagatttcaccttcagcaggggcaggctgtcccaatggcggtgccgagcaaagctagctgttcgtggaacaccagagaacccgttgattggtttataccaggaagggacgcattctgttatagatattccagagtgcagagctcatcacccaagcattaatgctgctgttaagttgttaaggcaaggtataactgagctaagtattcagccatttgatgaagatgctggagctggtgaactcagatatgttcagatggccgtgacaacatataacacatctattccggttgataaaagatacgagcaagggaaagttcaagtttcattggtttggaattcaagagacgagcgctcccagaacgcagagaagcggaattcaataatagaatacttgtggacaaatggtgggccaaaaagtagtgtccatctcattcattctatatgggccaattttcagacatcaaccagcaacataatttttgggcataaatggagacatcttaagggggagagggacatgtgggagcgttatgggggagttgatatttctctggatccttgtagctttggccaggctaatactctgtcatttaactctttgttgcataagctgaacaagtatgtaccacgtagttcaacagttgttgatttgtactctggggctggtgttattggcctatcagttgctgcttcaaggaaatgtaggtctgtgaaatgtatcgagattaacaaacagtcaaagatgtcttttgagacatcagcaagccgacttccagcgaacctgggttgcaccattacttggcacaataccgatgcttcagttgaaccttcgcactggcttgaagggtcaagtgttgttattgtggatccaccaaggaaagggttgcacccatctgttatcagcggtttacagaaagttgctttgtctgagcgcaaggcatacaaggctaaaagttcgcttgcaaaggtcaaggatgagaagagaccatggatcttacgggcaagggaggctgcagttcatgttgataatacaacaactgaagagggcaatgaaacgtggcctgaaactctcatatacattagctgtggatgggaaagttttaagagggactgcaaaagcttgatatccagcaaggcctggcagttggaaaatgctcatgcttttaacttcttccctggcacagatagcattgaaattctggctatcttcaaacgggaatcagaagctggtcaaaagaaaaagaagaaagcaaaaaagaagaaggctaagtagattaacaaaaggctgatccaccttgcggattttgtatttttgtggatcttaggcattgatccagaacttcagaatgagtgctcatgtctgttatgaggaattttgcatcgtccgaaccaatcaagtgaacaatatgacacagggtaattacagaaactttctcagctagaccaagtttttgcctgcacaggaaattatacgatagatcagcaacttcagttctgtagtatgaaataaaaataaacagaaaacacgcatatttcaatggttagacgactcttctgataaaaaaaagaaaaaaaaaaaaaaaaaaacggccaaaaaaaaaaagtaaaaaacttagttagaccaagtttttgcctgcacagaattatcatagatcaacgtgtagtataataataatacagttaacccgcagatttcaatggtttaaaaaaagaaaaaaaaaaaaaaaaaaaaaaaaaaaaggggcgtccaaaaattaaaaagggggcggccccggaatttaattccgggcggccccgtattaatttccgtcctttccctggaaggagacccacttttccttatgggaagcaggataaaagctgggcccagtaagaaaaaaacctgctctccgtttaaaatgatcttccgctccaaattgccaaagtgtaaagcccgggggcctaaaggagaaacctggggggcccaatggggggagca

SEQ ID NO: 113545 - DNA, 315 bp, Zea mays
  Clone ID: MRT4577_35033C.1
tggggcggagaagagaaagacgacccacagctgattgatggtgtagcaatcgtactagacgagatgagcatgcctaggagtacttatgcattcacaaaacggatccacggcgattgtggagcggttgacataacggtatcacgccttgactttgcaggtgaggcgacgatacaacttcacgtatttgaagtagagggcagcttcagtttgcgtgcgggctgttttaccagtgggttatgggaagaaatccagatctttaagggcaccattagtgagccgcgtgccttgaggagatgtgttgttgctgcagaacat

SEQ ID NO: 113546 - DNA, 292 bp, Zea mays
  Clone ID: MRT4577_35034C.1
gaaagggatgggaaaatttggatgtggcacagatgtctgaaatgtccttggagtaatggatttcctccagcaactcagaggattgtcatgtctgatgctgcctggggtttgtcacttggtaaatttttggagcttagcttttcaaaccatgcagctgcaagtagggtagccagttgtggtcattctctccacagggactgcctccggttctatgggtttggcaaaatggttgcatgcttccgatatgctcctattagtgttcactctgttcatttaccacctcataaacttg

SEQ ID NO: 113547 - DNA, 247 bp, Zea mays
  Clone ID: MRT4577_35035C.1
gtaagctctcgctcgtattgcatggctgtgaaaagctgatgtccctactatggcacagcttgaagagttccattcgatgcagaggatgatgattcctccttattcagatgataacatcgatctactgttgagcattgatctgttgaggttacaaggagcatgtatagcttttccaggcaacattgttttcgatgctaagcttgtgtaggctagcacacaataattctgctgatggagatattccagt

SEQ ID NO: 113548 - DNA, 2526 bp, Zea mays
  Clone ID: MRT4577_35036C.1
attcggctcgagatatcgcagtctggaaaacaaaggcaccatgttccatatcgtgattccaagcttacatttctattacaagaatcccttggaggcaatgccaaactggcaatgatttgtgctgtttcaccgtcccaaagctgtaagagtgaaacgttaagcacacttaggtttgctcaacgtgcgaaagctataaaaaacaatgccgtagttaatgaagagaaaattgaagatgtaaatgcgttgcgtgagcaaatcaggcaattgaaggatgaacttcaccgaatgaaatctaatggaggcatagaagggaacagcggcagctttgccactggatggaaccctaggcgcagtttgcatctgttgaaaatgagtttgggtcatcctacaacattccaatgtataaaagaagatagtgacgaggaaatggaaattgatgagaatgatgttgagaagccctacaatcatgaaaatatggcaatgtcttctattaatgttaaagaatccaaacgtttccaagcttcaatgaatgtaagtgctggaacttcacaggttgaagatcttgacagggataagattttgatatccataaaaaggtcctgctgtagtgctaataaatttaatactggtactgatgttggagatggaaaatgcaaattaaacattgccgccagtatacagaggggacttcaagtcattgaaagtcaccaaaataatagtgcatggaagagagcatcggttggattaaatgctagaatcatggatattcaaccttgcaaggttgatgttgcaattcagactgatcctgaagaatacgaaactagagataaccctctagctctggttcctagttgtctgcttgaagcttctgcaaatgagagtagggatcccagtacttgcagggacctacaactagtaccagttgatgtgacagtaccatctgatgaccaaaagcagcgacattttctgaaagctgtggagaaggtcttggctggagctatcaggcgagagatggctcgtgatgaacagtgtgcaaagcaagctgcagaaattcaacaactgaatcgtctggtgcaacagtacaagcatgaacgcgaatgtaatgctgtaattgcacaaacacttgaaggaaaaattgctaggcttgagagcctcatggatggaactttaccagctgaagaattcatgaatgaagagtttttatcacttatgaatgagcataagatcctccaaaagaaatatgaaaaccatcctgatgttttgcatgctgaaattgaggtaaagagactccaggaggaattggacatgttcaggaactctgtggacgagaaagaagttctacaggaggagatacaagatctgaaaaatcagttgcattatatgctttcatcatcgtcatcaatccgtaggctctggcctccagtgccgttgtctcagggaagtaattctgaacgtggaacaaaagatatagatggagatactaattttgtggacactcccaattggactgaggctgagagtaaatggattacactcactgaagagcttagagttgaacttgaagcaacaaaatcccttgttggaaagttgcagtcagaactggattctgagaagaaatgttcagaagaactaaaggaggcactacaaacagctatccaaggagctgcaagacacctggaacaatatgctgatcttcaagagaatcattttcgtttgcttgctctgcataggaggatgcgcgagggtgttgaggatgtgaagatgagggcagaaaaagctggtatcaaaggtgctgagttgcggttaattaactcccttgcagctgaaatctcagttataaaagctcaaaatgaaggccttcagggccagctaagggatactgctgaagctgttcaggcagctggtgaattgcttaatcggttgaaggatgcagaggaagcagaaacactagccaagaagcaagctttagtggcagagcaagagacggagaaagcttatcaggagattgataacttgaaaaagaactacgaccaggaaatcctcgctctaaagcagcgtctcgctgagccctctccgtgcaaggacgatatggtacagccacaagaaccgaacaatcttgagcctcctatgtatgacacagctggtagccacagtaggcagaattggaaggagttcaataccttgcaacaaggaggatcatttgaggtctccaagagcacagacctcaactcgtggttttacggatacgacaaatgtaacatttgatgctggagtgtttaattcgttcagtcctagtttgtaccattgaaatagtgataatataatgttgtacaccgggtaagcagagggaaaggatactattgaatgctggcggctcctcatggtcttatgaggtgtataccgattcttcagatccttggcgaagttgtattctgtcttgtaaatctagatgaaccttttttttcttacaacgaagtggtggcaccaatattctgttaaaaaaagaacagtaaaaaaaaaaaagta

SEQ ID NO: 113549 - DNA, 113 bp, Zea mays
  Clone ID: MRT4577_35037C.1
ctttttctgagggggactggagacgcatgtcgctgtggctacactgagcctatgctaacacaccgggcggaagggtgattcccaccacccgaattgtcaccccatgcatctcc

SEQ ID NO: 113550 - DNA, 398 bp, Zea mays
  Clone ID: MRT4577_35038C.1
gctagacgccctggcgcgtgcccgtgccgagccgcctcgcgtggaccactgcctccaccttcgcttccatagcaggctaggaggtgagcgaggacaacacttccgccggcggagagaaagggagggagcggggaagagacgggagggacgccgcggacctggcatcagacaccacccgacacagcggggggggacgaccggggcagatacggtgttgcccttgcgatcgaaaacaaagctatcggtccggtggggaggcggcagggcagcacccgcgcgcaggcggcacgagaggacagcgaacacgcggaagagcacgaacccgaaggacctgggcgcggcgaacgaccaaaccacccaacagcctcgagcaaggtcaataacaacagggcgcccgg

SEQ ID NO: 113551 - DNA, 401 bp, Zea mays
  Clone ID: MRT4577_35039C.1
ggtgatagaagccccaaccttggcccgatcagttgcaaaggaaagacgacagtgccgggctggcgtgtacggaacactgaacttgccatgtgagcacattgcctttcctattcataagcacacaatctttacaggcgttaccagcctgaggtagatcggcagtgccgtctatgcctgcgccatcctaaaacctgttcctctggtgccatagaacaccatcgccgtactacctacttccacacagctctctgccaggtacaataccacggcgcgcgatggtgccaagcgctggaacgccgtggccacctatgtcccggtggtacccactgattgttttagccgtgtgtttaggcaccccgtgggtgaccttgctgccgcaccatatatgccaaccattcctt

SEQ ID NO: 113552 - DNA, 1338 bp, Zea mays
  Clone ID: MRT4577_3503C.1
atggaccgaggttggatgtacaatgtgccaagaccacatccgtcgtacattcaaaatttgagaagctttattgaagcgaccaacaagcacgcgaatttgcgaaagagcaaggagatattatgtccgtgcatcgattgcgataataagatagcttggagagatataggagtaatccaatcacatctgctaaaaagagggtttaaaaacaattacacgatatggtcagaacatggtgagttggatccgtgtgaagtgcctggtaatgacgagagagttgtcggaattttagatcttaaagttgatggtaaagtggataatgtggatgctaatcaagattttgaagaatttgattgtgaagagatgttgcgccatatggaaccagaaatgttaagttctgtgggatcgcagaaagggctatctaaaatggagggactggaaagtgcctcaaaagaacctttatatgatgaatcaaagggttgtgacaaagagtttactacactacgtacagttctagaacttctgaagttgaaggctagcgccggatggtctgatactagcttcacagatcttttgaattttctgtctcaattactaccaaaacccaacaaactaccaacaagcacttataaagcaaagaagcttatatctcccatagctctgggtgtgcaaaaaattcatgcatgtccgaaccattgtattctgtatcgtggcgattttgagaacgcatcaagatgcccagtttgcaatgtcagtcgatacaagaagagctacaatcaagactgtgtaaaaaaattcccgaagaaaaataaaaacaagaaatccactattggacctgaaagtgacgatgacacttttgatgacatggatgggaaaaagaagtcaaagaacccagctttggtgatgtggtatcttccagtaattgatcgcttaaaacgtccgaaatcagctggtgttgatattgatgtgttcctagaacctcttatggaagatatgacaaagctctggaatgaaggagttagaatatgggatgagtattgctggaaaaacaaaggagaaaagagaaagagaactgacccttcaacttacacaactttcaagaagcaatcaatatttttcaagtacctcccatactggaaggatatggaaatttgccacagcattgatttgatgcatgtaacaaaaaatgtttttgacagcatcattggaaccttgctgggcatgccgagtaagacaaaagacggacttaaatcacgcaatgatctagtagatcttcaaatcagaccggaacttcatccagtggatagtggcaaagggaagccttacctccccccaagctag

SEQ ID NO: 113553 - DNA, 3205 bp, Zea mays
  Clone ID: MRT4577_35040C.1
cgggcttcggcgtctgcgtcaagaagtcctccttcaccaaggccggcctctgccgccgcctcgtcctcgtctgcaacaagtggggcaacggcaaggaggacgcctgctaccaggccaggcccacggccaagaccaactgccaggccaccgtcgtcgccagactcctgggggacgacttgctgcacctcacggatgtgaacctggagcacaaccacgcgctcaacccatccgccgcacgcttcctcaggtgctacaagacgctgcctagcgggttgagcaaagatctcgtggtgagggctgccagaggggaatgctcggtggcgggtgacatcgatgtcccgatatttgatgaatgggggcggcttaagaccgggcaagctgatgtcctggccatcaacgctttcttcacccagatgcaggcaaagcttccaaactccttctatgtcatggacttctatgtggagggccatctgaggagtgttctctgggctgattccagatccagggcagcgtatcagtatttcagcgacgctgtttggattgatacggcatgcttaaggaacaagtatcatgtcccgcttgtttcgtttctgggtgtcaatcatcatggtcagcttgtattgctaggctgtggattgctgtcagatgagagcacagagagcttcttgtggctgttcaagtcatggttaacttgtatgaagggacagcctccaaatgccatagttaccgatgaatgtgtggcgataaaagccgcagttcgagaagtgtttccgaagacacgccatagaataagtgattggcatgtagtgagaagtatttcagaaaaaataggtgacttgccagaatatgaagcgatgagaaccaatttggttactgtaatatatgattctttaaacgacaatgagtttgaggcaaggtggaagaactggattgatagatttagccttcaggataatgaatggatcacctttctgtatgagaatcggcacttgtgggcccctgccttccttagggacactttctcagctgggctctgtactgttagccagcgtgaaagtccaagtacattttttgaggatgcagtcagttcagagaccacattggtgacgttccttgccagctacatgacacttttggataacaaatacaaaatggagcaacaagatgattttgattcattaaatagcagcaggctcctgatatcaaagtaccaaatggaagaacagctatccagattgtacaccttgaatatgtttatgaagttccaggatgagctaaaggcaaccatgcattgtcaagttcagctggatgggtcagcatcttcttttatagttattgatttgactgaagcagggagtgaaatgctgaataaaaagtacgaggttgttcactgcatggcgacaaacaggatggagtgtaactgtggcctatttcagtttcatggtatcgtttgtcggcatgcattatctgtgcttaaatggcagcaagtatacgacatccccccttgctatgtacttaacaggtggcgggctgacttcaagcagttgcactacctagataatccatcaaaggatttagcaacaagtaatcatgtcgagcgttatgattatatttctttgcagtttcttcgtctcgtcgagattgggatggtatccgacgagaagtataggcatgcagtaaggcttcttaaagacatgaaagagactcttcttgatgataatctgtgccgtgatttggagcagaagcttacaccagctgagcgtgcaattgtgaatggtgacaaccatacacaacctggttcatctgagggcggtgctgcaaaaaagcggcgaggccgtcctcctaaaaagaataaagagataaacatggattccatggtaaacccgtatggaaataaggaccctttactagtatcctcggatgtaactcagaaggacacttttcattctgcttcaactacctcaaaccttggcactcatgtccggacgcatggcattgttgatctcatggaagaagtcaatccaagcgagctgtcatttgatagccgttacggggtgcaatctggccactcgcaccattttggtaataaccaactaaatacaggaaacacactgcggtttggccaatctacatcagcagcagagcagtctagggttcagtgggtgtttcataatggcatgtatcaggatgaccaagtgacttacggcagacggacatcataacaattggacttgttaggctccagggtttgccgtttcaggtttctttctcttgagattttattcccgtgtgtgccatgatgaggtgatagatagatcatgtctttcttgcaagttaatatactagccattgcttctacagatagaggagtgactgaaactttgttgagaaaatatagcattttacataagaaccctgtggaacaggaagtcaggaaggccatgaaaatctgcttaataagagctccatcggcatacagtatttgttatggaagctttatgtgtttaggccttgttcgtttaggaggtggatcgaggggaattagaggaattgaataggaagggatttgatccccctcaattcgctccgatccccatacaaccgaacatggcctgagtagaaagttttcgtctaagcggcattcagtgatgagctatatttccaaatttatatctgtccattttctgacgattttatttcatgccacatgtcctgcatggaatgtgcaggaaatcgggtcaggggtcctcggtttggactttggagcaccgatgacttaagtgatcctccattgtgcttcgaacgttgagccttgggagatgcatgctggaactggctgctggtgatggtggtggtggcggcggcggcatctgaaggcaggatacactgtagaaacagaagtttgccactaagccagccgaacgcttaagccatcaatgttagccaactaactgacatgtgtatatacacacacatcatctcagaaagaagccgtcattccgtgggaagtgctgcgtaaactcctgataataggcgtggtcagcgtcggacaagaaattgagagcttcattttctttctttcacgtgggaaagatacaattttgttgcctcctgacgatcagctaaaagggggaggaaatatccatgctcttcatctgggaaagatgcaaaaaccatccagctttatcatctttgctccttcagt

SEQ ID NO: 113554 - DNA, 486 bp, Zea mays
  Clone ID: MRT4577_35041C.1
gtgcggcgctcaggcggcggttccggtgatagcagcagcaaatagtggttggcctgttggtactctatatcgtcccttccagtgtacccgtcctccagcccattatacattatacttagctccaccaccatcacgctccagaccccgggcacgcactacttcatctgcaacgtccccggccactgcgccagcggcatcaagctcgcgctcttctgacggagcacggccgggtcgtctcaggggagagacagtgcatgcaggctacgttcttggcggttcatagttttccgctggcgattgttcgccgcgcagttcatgtatgtagtgtatgcatgtgtgtatgctactctgcggtggcgagtgctttttctgatgcctctgtcgttgtgtgttcatcaccgtcgtgtgcgattgttctttgggatgtctttgcctcaataaaactgcttcattctccaataaaaaaaaaaaaaaaaaaggccccta

SEQ ID NO: 113555 - DNA, 913 bp, Zea mays
  Clone ID: MRT4577_35042C.1
cctcgaggcggacgcgtggccgggcgtgtgcatagcagcagcaaatagtggttggcctgttggtactctatatcgtcccttccagtgtacccgtcctccagcccattatacattatacttgctccagataagaccaagagcgtcatggccaacgccttgcctctcatcgtcgcgctggtcgccgccgccgggtgcgcggcgctggcttcggccacgtcgtacaccgtcggcgactcgcagggctggacgaccaccggcgtcgactacagcagctgggccagccgcaacactttcgtcgtcggagacacactagtgttcaactacgtgagcaaggcgcacacggtgacggaggtgagcaaggccggctacgacgcctgctccggcgccaacgcgctcagcgacgacgacaccggctccaccaccatcacgctccagaccccgggcacgcactatttcatctgcaacgtccccggccactgcgccagcggcatgaagctagcggtcgccgtctccgcctcgccctcgggcacggccccttccaccggagccctgcaggttccggcgatggcatccgtcgtcgccgcggccgcgggcgctgccatcaagctcgcgctcttctgacggagcacggccgggtcgtctcaggggagagacagtgcatgcaggctacgttcttggcggttcatagttttccgctggcgattgttcgccgcgcagttcatgtatgtagtgcatgtgtgtatgctactctgcggtggcgaatgctttttctgatgcctctgtcgttgtgtgttcatcaccgtcgtgtgcgattgttctttgggttgtctttgcctcaataaaactgcttcattctccaaaaaaaaaaaaaaaagcacgagctcgtgcgcccaacgccgaacagagtacaaaa

SEQ ID NO: 113556 - DNA, 538 bp, Zea mays
  Clone ID: MRT4577_35043C.1
aagctctatcatatcactctagtcgcccgctcactcttggagatccacgcttaatcattcagctgtagggtctgatctctatgctctacctaatcacgacacacctttgggttgccatcagcattttcatccccacgaatgtccactgctgagggctataccccaagcgtcctgtcctgcaaggaagcctccaagaggtactatcaccacgacggtcggaacgcccgatgactctgtggtccattatgtcaagggttacactgatgcgcaagctgatgtaccgggtgattccataagaatgtacgctgactttaaagtactccatcgcacatgcctgtgccactggtaatgattggatagcgaaagaacttgcttgcttccatactctcgtggacgactatgatgctcaatgcgagtgcctctgctggtgtccagagttccatcagtagacaatcgtctgggatttggcatgacctaaagtatgtgtggaactttcaatcgagcttttatgtgtgtaagtatcggataattgcgctcc

SEQ ID NO: 113557 - DNA, 415 bp, Zea mays
  Clone ID: MRT4577_35044C.1
acgaaccaaaaacaacgggggggacaccaaagaaatacccccaaaccggccaaaggggttggagccatacccccaaaagggggaataacaaggggggaaaaaaaaaaattcccaaatttcctatgggacgcctttactttggccaggcgggaaaaacccccggggggggggctgggggaaaaaggaggggtgggccaaatggggcttggggggaccggacctaaaaaaggaacgagcgggtgggactttgggggtcaaggctttttaaaggtgggaacaacaaaccaaggggggcccaaaccaccaaatttgaaaaaatatttgaaaaacgggtagggcccgggggggaaaatgaccaggttaaaaaaacccaaaaagggactggtcttaggggccaaaaaaaaaaaaaggggtc

SEQ ID NO: 113558 - DNA, 736 bp, Zea mays
  Clone ID: MRT4577_35045C.1
cattgggaccctcgaggccggcctggaagacccgggacctcgtcgtcgcttccccccactgattccgagtccatctttccccgccgccggccgtgatccctcctcgccgctgaccgccccgcctgccccggcattctcccgctccagatccagcccgcgccgccggcgccacctgggctcgcgccgagccggaatccgcccggttgccggggccctcatagagcctccgctcgatctgcccccggatcggattggccgccgcgcatctcatgggtgaggaagctgtccacttcagcgtcgtcgacgccaaggactgcaaacagagtgcctttgaagtcggcgataagacgtatgttatttgtagatcagatgatgatttgaaaacatctgctgttaaaattcacgacaagctcactcagacttggctctcacccacaatacttggggaacagccacttctaaccaagtcacagtctgtgattcctgtcagtgatgagaagatattagttatcgagaagggtgttcccttgaatgagtccatctggttccttgagatagacaccccctttgttaagcaacaacggaaaatcaaggaaacagaagttgtttcttggagcaagggagtaatcggcgttggccaaaaaccagttgtgattagtggtccttctggtgttggtaaagggacattgattgcaaagttgatgaaagactatccatcgaagtttggtttttctgt

SEQ ID NO: 113559 - DNA, 835 bp, Zea mays
  Clone ID: MRT4577_35046C.1
acctcgagccggcgggcggaattcggcacgagcctggggctgaaccgccgaactatgccgttgtcgtctttctccttcctccgccaccacctgccgctccctcttcagctcccgccaacttcaaatcgtcagccaccacacccccgcctcttccacctcctcctccctccgttcacaccgcgccgcaccttcgtctgccagccgctcaccgcggccacggacgatatggctgctgcggccgcggcggcgtcgccccccacactgctcgagcacatgggccaggcgggcacggccgctgacctcactgtccttgtggcccatatccagagcgcgtgcaagcgcatcgcggctctcgtggcgtcccccggcaacgccgagctgtcgcgggccaaggcgaggggtggggctatggcggcagggcgtgacgcgcctaagccgctcgacgaattgtcgaatgatatcatcttgtcagcgctccaaagttctggaaaggttgcagcgctagcatctgaagaaaacgatctgcccatttggatatctgatggcggtccatatgttgttgttactgatccgcttgatggttctcgcaacattgaggtctccatacctaccggaacaatatttgggatctacaataggctggtggaggtcgaccatctccctttggaggagagagctcagctcaactcactgcaaagtggaactcgccttgttgctgctggatatgtcctgtactcatctgccaccatcttgtgtatcaactttggtgcaggtacccatgccttcacattggattggtcgactggagaattcatccttacacatccttcccatc

SEQ ID NO: 113560 - DNA, 1867 bp, Zea mays
  Clone ID: MRT4577_35047C.1
taaatagtactaatagggaaccgggcagaaggcggataaagagaccgggacctcgtcgtcgcttccccccactgattccgagtccatctttccccgccgccggccgtgatccctcctcgccgctgaccgccccgcctgccccggcattctcccgctccagatccagggccctcatagagcctccgctcgatctgccccccggatcggattggccgccgcgcatctcatgggtgaggaagctgtccacttcagcgtcgtcgacgccaaggactgcaaacagagtgcctttgaagtcggcgataagacgtatgttatttgtagatcagatgatgatttgaaaacatctgctgttaaaattcacgacaagctcactcagacttggctctcacccacaatacttggggaacagccacttctaaccaagtcacagtctgtgattcctgtcagtgatgagaagatattagttatcgagaagggtgttcccttgaatgagtccatctggttccttgagatagacaccccctttgttaagcaacaacggaaaatcaaggaaacagaagttgtttcttggagcaagggagtaatcggcgttggccaaaaaccagttgtgattagtggtccttctggtgttggtaaagggacattgattgcaaagttgatgaaagactatccatcgaagtttggtttttctgttagccacactacaagatctccaagggaaaaggaaatagatggtgttcactaccacttcacagaacgaatcaagatagagaaagatataagcgagggcaaatttcttgaattcgctcatgttcatggaaatgtgtatggcacaagtatcgaagcagtcgaatctgtaactgatgagggaaagaggtgtattctcgacattgatgtccaaggagctcgatccgtgagggcttcttctcttgaagcaatattcatctttgtatgccctccatcattcgaggaactagagaagcgccttcgggcacggggtactgaaacagaggagcaaatccagaaacgactcagaaatgctcaggctgaacttgatcagtccaatgaaccaggtctctttgatcatcttttggtcaacgatgaccttgagacatgctatgagaatttgaagaagttgctttctctggatgatgaccaagaagattcagatgatttttttaacaaggaggacaaagaaactgcaagttactctatcgtgtccaaaactgactcagaaattttgttgcaatctgagactaacgaaggcaaaaatggagccatacacttgctggcacttgatttgtcgtctctctcaggcggtgcgcctggacgaacaaggggccttaagattggctcagttaactccttttgacaagggcttatattggcgttttagatgacccaaagcattcttcaaaatgatacagcagaagcactgacttgaattttggatcaattcccatgagctgatatcttcaaaaacatcttagttaggaaaaagaaggaaacgaaaatggaatttatttccatttgttatttgtttgggtgccacaaggaggcaaaatcatagcaaggaattgtaccttatttttttagggattgtgtacttttctgctgttgagaggtatttggtggttggataatgtgatggagcctatctaaatgttctttcatagtggtctgaataacattgagctcattgctggattatgttgagattctttcaactcttgggtcatgttgcacagaactaactcatagttctgaccaaagagaaatgtttttttatgttaagtacgccctgccgtaagcaagtgtaaactttggggacaaattgcttttcatgtatttgagtttgatatttgaa

SEQ ID NO: 113561 - DNA, 771 bp, Zea mays
  unsure (1)..(771): unsure at all n locations
  Clone ID: MRT4577_35048C.1
tgaaaatagtgtttggatacaatatgtgatgtttgtctcattcttaaccataattggatgacatgcttgatttattctctggtaaattggtcatacaggggtactgaaacagaggagcaaatccagaaacgactcagaaatgctcaggctgaacttgatcagtccaatgaaccaggtctctttgatcatcttttggtcaacgatgaccttgagacatgctatgagaatttgaagaagttgctttctctggatgatgaccaagaagattcagatgatttttgtaagttcaagaaatatttttacttccactgtgtactgatgcttcattgtgttttttctgatggtggatcccattatccttcagttaacaaggaggacaaagaaactgcaagttactctatcgtgtccaaaactgactcagaaattttgttgcaatctgagactaacgaaggcaaaaatggagccatacacttgctggcacttgatttgtcgtctctctcaggcggtgcgcctggacgaacaaggggccttaagataggctcagttaactccttttgacaagggcttattttggcgttntagatgacccaaagcattcttcaaaatgatacagcagaagcactgacttgaanttntggatcaattcccatgagctgatatcttcaaaaacatcttagttaggaaaaagaaggaaacgaanatggaatttatttccattntgtatttggtttgggtgcacaagggaggcaaatatagcagggaattgacctt

SEQ ID NO: 113562 - DNA, 832 bp, Zea mays
  unsure (1)..(832): unsure at all n locations
  Clone ID: MRT4577_35049C.1
ctcgaggccggccgggccgggactgattccgagtccatctttccccgccgccggccgtgatccctcctcgccgctgaccgccccgcctgccccggcattctcccgctccagatccagcccgcgccgccggcgccacctgggctcgcgccgagccggaatccgcccggttgccgggtgcgtctcgatgatccctgcgcttgatatttccttgcttgcgcggggtgctcgttttggttgtttcattcatttttgttcgttgctgtgcctgtgagccgtggaaccccagggttcctccctctcccggatccggctggttcgcgtgtggctctgttgttaaatgcactcgttcgttcgctgtgatgtggtcctaagcaacttcttttaccgtgctcaacagggccctcatagagcctccgctcgatctgcccccggatcggattggccgccgcgcatctcatgggtgaggaagctgtccacttcagcgtcgtcgacgccaaggactgcaaacagagtgcctttgaagtcggcgataagacgtatgttatttgtagatcagatgatgatttgaaaacatctgctgttaaaattcacgacaagctcactcagacttggctctcacccacaatacttggggaacagccacttctaaccaagtcacagtctgtgattcctgtcagtgatgagaagatattagttatcgagaagggtgttcccttgaatgagtccatctggttccttgagatagacaccccctttgttaagcnnacacggaaaatcaaggaaacagaagttgtttcttggagcaagggagtaatcggcgttggccaaaaac

SEQ ID NO: 113563 - DNA, 225 bp, Zea mays
  Clone ID: MRT4577_3504C.1
gggggttataaaataatgatgggtgttatttgatattgttttgttttttaccgatggacagcggagggccttttcataccaaagaacaaaaaggagcagctagacagaaaaatgaacgggaactagataggataacaataaaaaaaggggggttaacctagggccccttaaagaacgaatcccaggcggaaaagcaattgccaagggcgcaaaactcccaaagcc

SEQ ID NO: 113564 - DNA, 153 bp, Zea mays
  Clone ID: MRT4577_35050C.1
catataacaatacaccatctatcttataaaaaagataatttttaatttctacataactcatcccaaactatacctttaccccaattcaacttttaaaacaaccaatcctcatactccctactactataatatcaaccacctaccatcacattt

SEQ ID NO: 113565 - DNA, 722 bp, Zea mays
  Clone ID: MRT4577_35051C.1
aattcggcacgctgctccgctccctaccccctactccccttgtagagtagagtagcgtagcgtagcttgcccgacgccgcgacctccgggggcttggctttgggaaatggaccagccgctcactgccccccagtcagtggccgcgcgccgcaccaagtgagctagctactctctaggcggagtgaagcgaagctagcttagctgcctcgagcttgagctgagcttgctcactcttctcccctcttcttctagtaccggcacacacaccgcagctgcgaaaaaggaagctctctctctctggtggtgccggtgcgccgtgcttgcttgcttgcttgcggctgcatccatggacgcctacgaagccaccaaggtggtgttctcgcggatccaggcgctggacccggaccacgccgccaagatcatgggcttcctgctcatccaggaccacggcgagaaggagatgatacgcctcgccttcggccccgaggcgctgctgcacaccgtcatggccaaggcgcgcaaggacctgggcctgctcccgtcgccaggcccggggacgcccacatccgtcaccgccgccgcaacgcactcgccgttcctcctctcgcgccagaaaccgggggcgctgcggcgccggcaccgcgccgtcgccgctctcggtctcgtcgcccctcgtcgtgggcgccgccgcccctcttctccaggacaacagcgtcgtcagc

SEQ ID NO: 113566 - DNA, 310 bp, Zea mays
  Clone ID: MRT4577_35052C.1
aaaaaaaattgacaacggggagatgccatttgaacaagctgaaggggttcaacgtaacagcagcggctcatcataagctcataacacaagggggtcactggttaaaactgggaccacctaatttttaatttaaacctggcccttccccccatccatatccatatccctacacctacatgaccatgcattcacaattggaagattattttggtactgacacaaagttaacaatacttgcatgaacaggagtcaacgcaaagggagggagggtgcacacaaggggggcagagcagaacttgggcaaccgggc

SEQ ID NO: 113567 - DNA, 107 bp, Zea mays
  Clone ID: MRT4577_35053C.1
tattttgagtgtcctggcgcgtcggtacctcccctcatgctgtattactttaggaactcagtcttagacacgcacatgatgcgcccatgctgagttaagcgcatttg

SEQ ID NO: 113568 - DNA, 304 bp, Zea mays
  Clone ID: MRT4577_35054C.1
ccctaaaaaaaaaaaagggccccccccccctttggatcgattcttcccctaaggactaacctggggggggggattaatttccatttccccgtcatcagagggccctccttgtattggggggggaacccccccctattctttttaccttcccccgggggggacacctcccccccccatctattggaataaggggggtccggggaaaaccatcttttttatttttcggacgtagggcaggacggcaatatggggggccttaaagtttaccccattgccgggggtccctacaattattattccccgg

SEQ ID NO: 113569 - DNA, 684 bp, Zea mays
  Clone ID: MRT4577_35055C.1
cggccgctcgagccggcgggcgggaccttccccccttcaccttcgatctcctctcctctccccccgattctctagggtttctcccgacacccgccccccgcagcccccagccccgccgactccgacccgctccctcccgctcgctcgccgcaggttttagcgttcagccgtagcactttcatcaaaggttttgtgcaaaattatgcgatcttcatgggctgattcagttgcgaacgccgaggaatcggcgcccgcgactggtgctgctcccgcccctgttgctaatcaccagaactcgcgtcccactcgcagctcttacgtccctcctcacctccgtggtggtggccgctcaccagagaaccaagtgccagctgcagctccaacaccagctggcgcatacccctcaggtgctgtgcagcctgctggtgggtacgcagccgctgttggtggcactcgctgggctgcccctcctggtgctcctagcgctggcgtaggtgttgtccgccagggtggtggtggacgtggtgctgttggtggcggcggtggtggctggaactcccgccctggtgggtggggggaccgcagggaccgtgaaccaaacccttttggcgatagtgagccggcggctgttgatgttgactttgagagtcaacagaacacaggtatcaattttgatgcctatga

SEQ ID NO: 113570 - DNA, 710 bp, Zea mays
  unsure (1)..(710): unsure at all n locations
  Clone ID: MRT4577_35056C.1
gaaagttagctttcctcctgtgcaagcagttccatcattcccttcttcatttcccaaacacttttctggcaatgaccaactacggtgcctgataccttgcgcaatagaccaggatccttatttcaggatgacccgtgatgttgctccaagaattggttaccagaagccagcactgattgagtcaagatttttccctgctcttcagggggagaacacgaaaatgtcagctagtgatccaaattctgctatatatgtgaccgatagtactaaagatataaagacaaaggtgaataaatatgcattctcaggtggccaggactctgtagaacttcacagaaaacttggagctaaccttgaggttgatgtctcaattaaatacctgaacttcttccttgaagacgatgatgagctcgagcgcataaagaaggcgtacaaggaaggaaggatgctgacgggtgaagtgaagcagcttctggttacggttctttctgagatggttgaaaggcacaaaagagctagagcttgagtcaccgaggagatggtcgacgccttcatggctgtgaggcctcttcccaacatgtttggctgagcattggngtgggaagttcataccctttctctgtggattttattgaattccaggagcaacatatggagtttcaggatttagttgtaactattaatgtgaacctggtcgctcaatcctgtat

SEQ ID NO: 113571 - DNA, 322 bp, Zea mays
  Clone ID: MRT4577_35058C.1
gactagttcttgatcccttaatcaaaaaaaaaaaaatttaaaaattccaattttaataaataaaggggatctctcaccaaagagcacagccttatataaaaacatttctcatattaaataaaaaaatcaaaaatatgcgggctccccctttaaaagttaaaaattcccaacccctttcttccccccctatatctcttttaatagccccactaaattaaattcttttcccttttttttccaatttttcacctaaaaaaatctatgttttccccaacttaattattttttaaaatatcccccttttgcaacttgtctttacatc

SEQ ID NO: 113572 - DNA, 441 bp, Zea mays
  Clone ID: MRT4577_35059C.1
aaaaaaaacaaaggtttttccttaaaaatattctttggtttcccgccccttggccaaaaaaaaacaagatcgggctggggaaatcaaggggagggggcgggggaaacaaaatcgggaaaccgatttttttgctttgggccccccccccggccccccaaattaggcccctcgctggatgggacagggccccccgctcctggggggggctcggcaaaatcatcgaagctcaagcttaaagttggcagctggaacccccctccctggatagcttccaccaggttcggggctcccccagtagctggcacaggggtctcctttgttaacacaacacttccgaggcctttttaaaggagcccccccagggccttgactccctccataccctaaaaaaattctgggatcttgggaagggccctctcctccatggggccggacccgggg

SEQ ID NO: 113573 - DNA, 2718 bp, Zea mays
  Clone ID: MRT4577_3505C.1
ctaaacactgtgtgatatcgtgtacaaacttagttctgggaatttttgcaaatttccatttgtattgtagaatagcccttgttgatgaagaacttcacggcgcataaagtaaagcaagtctcttacaaccttagcaacgccgacggaaaccatatctctttctaaccattcaacattgattttggatttaggaacatcctcacgattgaccatgtaatggaaggtgacacgacaccattcgcatacataataaccgcacagaacagtacccggaggttgtttgtcaccatatggaaataatgatattgacaaattaggcttgtcctctggatgttcgccgccaagatctttccaataaaaacggtatgcattctctaaaatcttcaagaagtcattatacgtagccttttccattctcagtgagtcgaagaccatgactttaccatcctttggaaagatcatgatacaaatgtagtggtcattaaagtggtgcggagctattattaagtccttgccatgttgtacatgattatacatggctcgtccaatgtatgccgccattaccttcattttctttctctgattctgtttgacggctttctcaaattcagcatcgtccaagtctttgtattcttctccatgcctccgagcaactactttgtagcgagcttgggatatcatcaacgggtcaagaaaccctgtcttaagttgtttcttcttatcatccatgtattgcatcaagcaaaagagggttaagtagttggtttccatcctttgtcggtggtacaacgaccagagatcgtcaaagaataaatgctgcacaggatctatatgatcattgctccaaaatgcatcttctggcacaacaaatgtgaagtcctcgagtttgtatttgttgctagccaccatgtaccactcatgcattctaatctccggagtcgacaacttagaaagttgcaccgtcgtcaagaacgacctcccattcacaaattttggaggaacaccctccttcttgtataccgagatattggttttaagacgtaatgattctcgagtatgaatcattccatcttcttcccatacttcgaaattgtctatttgggaccgtgtgcctactccatgagatgttgattccgcttttgattgatttgtcataactctctgcaatttatgcaggtagcgtgccactgattctgatggtttcttgacatcgtcagtggcgattcgcttatgaattttctttgaaatagttggcccttcaacattggtgccaacctttggtttctttttgatgttgacgtcgacattctgaggaacaattttgtctacgtccccctcgtcgagttccttcgcaagaggcgatatgattgtttcaacgatttttttggaggtcggtgtcatattttcctgcaccatggggtgtggaatgatcgaactatctttttgttgcattggtgttgaattcggctcatcacccaacttgatgtcgcgtcgatgccaaaggaccaactcgttcattgcctcctgcaaagttatgatcccctcaactgggaaatctatctcccaatcttcacaaccactgtctgtgatttctagaacttggaccacagcatagtgtggcgggacaggattatccttgtagttaacaagtcctggttttaccaaaccagtagcagcttgctttatttttgtcccagatcgattgattggaatatgaagaaagcaaggcttgtcttcaacaatatcgtctacaaggtacttggtcaagtcttgcacagatcctacgctgctagggactataggtggactcatgtggcttggcttgagttcaaatgatatgcattctgttttcttcattttgttcatcacgtcattaatagccttttgtaccctttcatcaatagtctcttcaagggtccttttcgacttctcgtgtttcctatatgacgacgcatactctggaaacgcctctctccaggaaatcttagaagagattccccgagcccgtccagtgtgttcaggattgcctagtgctgcagttagtatgtcattctccctccgaggcttaaattctcctttttttctcttatctgcatattcttgattttttgtcgaaacttcgcctatcaaacctgcccgacctaagatccaacgaatagctcgctcatcgatatcttttaatattgggtccaaagtgtcgttagctatagcttcctcgattatcctgttccactgcacaactttatggtgatatccggttgaccccaggcgatgggggtgtttgttcatcttcgctatctgagaattagtttcgcctagttctttggccttcagttcggtcttctgacgaacaaattcctcccactgagcttgagtgattttccccattttcttgggcggaggaaccttattcttcttaacaaattccctattcatctcggccttccacccacgaaacatcttggccatagcagagagcatcgacttccttactgcatcctctgtgccttttgggaacttgaatgactcagacaacttagcccatagcttattgcgggtgtcttcatctaaatccttccatttttgaagtgtgattggcactatatctctaacagtagacccgcaggaatttcgaaactttgtaaccacgtcaagtggttcttcaggaaacccctcggcatttagttttgttacgtacataactgcaccttctttcat

SEQ ID NO: 113574 - DNA, 302 bp, Zea mays
  Clone ID: MRT4577_35060C.1
acgaccgcgtgccgcttcatcactcagttcctttttttggtccccgcacgcgacggcgatctgcccgagtgggacctccatgggcctagatggtgactgcgaacgagtttgtgcggatcgagacgaccgcgaagaacaagcaggacaacggcgtggggtacgacgacaggtcgtcggcggggcgcgcgtagaccatactacgcagctgcactccctgccgcgtatgcggtcggcgaccatgacgcgccagcggtcgtagtgcatcacgcccatcacggggggaggcgactcgcccatcggcg

SEQ ID NO: 113575 - DNA, 455 bp, Zea mays
  unsure (1)..(455): unsure at all n locations
  Clone ID: MRT4577_35062C.1
cttccttttntttttttttttttgttataacaaaactactgggggttttgagcggaaaaacagggggcatggccaactcggatccttatcctttgaaggcttttccttttggggtagaatttcagacagattatcaaccacacacatactactgggaactgggatgggcgaccaaacaaggttttaataaatacccaaacgggaacctaaacgatgggagggtaagacaaggaaaattttagcagtacatcggcttgagggtgaattcccctcctttttggatgctcgctactccaagaaaagagaagattagggaagggagggctcccgttttactagaactttttgaagagggaaaggccgttgaacatctttttgaacttttcgcccccgggggcgccgacgaacctggcggcggacttgagggaggggacaagcgcgggggcctccccctt

SEQ ID NO: 113576 - DNA, 1044 bp, Zea mays
  Clone ID: MRT4577_35064C.1
gttgctgctgctacccagcctgctgctatggccggcgccggagctcctgccgctggcctcactgtcaatcagcaccagctgacggcgaagagctacgccacgggtgcgactgacccttgctctctgcaatataacagggaactggtgaacaaacagaatgagagcgaaaacatgcaggactccgacaacctctcgatgctgacttccatgaacacaggaaacacaggcagcgtgttcccattctcgaaacaaaacaccaatccttttgaagtgaccagctcaaggctagagttcggcctcgtttcatcggattcactgatgagttcccctcacagttccttggagaacgtcaacctgctcggctcacagagtatgaacgaacaccagaacccagcctccctgcaacacttcgtggactggcccaggacgcctgcccagggaggcctttcatggcccgaggcagaagacatgcaggctcagaggtcacagctctcgatatctgctccgatggcatcctcggagctatcgtcggcctccacatcccccatccacgagaagctgatgctgtcgcctctgaagctgagccgcgagtacagtccgactggtctcggcattgcggcgaaaagagacgaggttagccagctagaagcgacctgggcgacgatgttccgtgactcttcgacgggcggcccattgggggaggttctggccaagaacacagcaacgcggaagcaagaagttgcccgtcggcggcgctcacctctaaccgactactactgctgggattcaggccacggcatgcagtcgtcccccgtgggagttctgcagaggacgaccgccttcggatcggtctccagcagcacgggcagcagccctagggtcgagagccacggcgcctgctgcgatggtaccagcaacctgatggatgatgatctcggctcagttgtagtgagccaccccagcatccgcctcttgtgagcccgctgggttctgagttcttctttcgttgcccttatacctggctttgtaactctcaccttcgtt

SEQ ID NO: 113577 - DNA, 622 bp, Zea mays
  Clone ID: MRT4577_35065C.1
tcgaggccggccggggctcattctctgctcatgttttcctctgctcgcctctgcttattcaccgtgtcgtgctgctgctgtcagcgccgcatcgccgagcactagcacctcgccagctcgtgccaccagagaacctccgctctgcttgctgctacctcgttgccaagttctctgctagctcgtcgattgccgcgccctgctcgctgtcgtgcctcgacggagccccacctgctgtcgaacccctgcccacgtcgtgcccagttcatcgccggactgtccgcgcagcacggggatcgcgtcgttccctgctcgacaccaaacccactgtcgctcccctgcacggtcgaaaccccctcgacgacgttcatccctacacatgagcgaactcaagtggttgatctagttaataatcaagatatattccgtggaagaacctcgagttttcaataagcaagaagttgcagatgaagatatgatgctgaactccatggatgctagtctagtgatacccccggtcaccttcctgtggatggatgtccatgtttcgctgtactttgatgaataaaggttaatacattatgtctattcgaagtgtaatatgttaatataatcgttatttacg

SEQ ID NO: 113578 - DNA, 424 bp, Zea mays
  Clone ID: MRT4577_35066C.1
ctctggtcaaaccctatgcaaggagttgaattattcgctgctatcctgagtaaacttcagtctgagtctgtcaagggtgcctttggcaaatggtcgcggatcccaggggtaacatgggaattctctgaactggggactttgattggtctgaaaatatgatcacataagacacgcgatgacatggctctgttaagctgtcccatatacctcgttccaagatgaacgagtgcatgcttggtgatgctcagcatgttcaggaggccgagacaatcggacttgactacattgatgttgatgctctcaagagattgaacaagaacaagaagcttcgtaagaggcttgacaagaattaccatgctttcttagcctcagatgccatcatcaagcataatccccgagttcttggtcctggtctgaacaaggc

SEQ ID NO: 113579 - DNA, 302 bp, Zea mays
  Clone ID: MRT4577_35067C.1
tcttacgcgagtacggtccggaatccgggtcaccacggccgggacctggccttcctgtcctgccttctcttctctcgccttctcctcctctcagcacagcagcatctgtgaccacatcaccacacacacacacatatatacttggtcatcatccagcttccagcagtcagctgcccgccgattaacgtgtatgcggttcaaagggaaatctgctgatggatatggcgcacgatagatcagacgccagcagcgaggaggaggtgatggccggctagctgcggcgcggtgtctcgacggttgag

SEQ ID NO: 113580 - DNA, 742 bp, Zea mays
  unsure (1)..(742): unsure at all n locations
  Clone ID: MRT4577_3506C.1
acctcgagccggccgggaaaactatctccgccgcggctccgttgcatggtataccatgctgccggcggctgccaccgctgcagcgccggacccctcgtgctccaccttcccctcctcccgccgcgctccccctgtcgcttcgcgtcacagcttcgttgttgcaacaagagccaccggcagctcgggtctcttctctctccggtgtcacggtcgccttccctgccactctcgctgtcgctgccgctgccgcgcctggtggaacaatgagcgagcgcgccgggtatccggcgccagccgtggccgccattgccgggccgtcgcgtcggcgccggaccacatggacgagcagccggcgagggggaggtaccacccgttcgaggagatctccgaggcggtgcagctggacgacggcgagccggcccacctgaccgacgccgagtcagcccgaacaatcgtcgaggtgaacaacaaggcgacggtgatgatctccacgctcgtcggcgacggtgtgcacgagcggatcatcctgccggagttcccctacctcaccgacgagaacggagatatctacttcgaggtcgacaacgaggacgcgctgctggagagcatcatggnggaggacaagatcgcggtgacgcctncgatttcctcccctgtttcatccaccttatgactctgtcggtgtgtgacaccttggtaatctggcgttggtgttgattgatgcgtgcagcacgttatcatc

SEQ ID NO: 113581 - DNA, 2387 bp, Zea mays
  unsure (1)..(2387): unsure at all n locations
  Clone ID: MRT4577_35070C.1
ccctcccagcttcccatcccgcgccgcatggacgcgagcagcactagcgcgggggcacacagcacggcgagcgggcgggggcgcgacgatggacctgggcgggtcggtggtgatggacgcgggcgcctcggagctgggcctgctcggcggcggatctagcaggctgctcaagcacgggcgggggcccaatgcggcggggggagacgacgacgtgtggggcggcggcagcagggccaagcagcccaggacagggacagcgcccgtcgtcgctggggacgtggcggctgccacaagggcggggggnggcgccgttcctgctgggctcgtgcagcccaggccacggcggggagcagatgctcagcttctcgtccgccgccgccgccgccgccgccgcctcgtgcgccgcctccaccgccgcggctgatggcggcggggccatgccgctgtactacgggaccccggcctcttgctcaggattgagctcggtgagcttgagcaccagcatgcagggggcaatggccagggtgagggccccattcacgccgtcccagtggatcgagctggaacaccaggccctgatctacaagtacctggccgcgaacagccccatacctcacagcctcctcatccccatcaggaggagcctcgctgcgtctccctacccgccttcatacttcggcacgagcacattggggtggggctctttccagctgggctactccggcaatgcggatctggagcctgggcggtgccgccggacggacggcaagaaatggcggtgctccagggacgcgatcgcccctcagaagtactgcgagcgacacatgaaccggggacgccatcgttcaagaaagcatgagctggcggcgactggctacgccacgggtgcgactgacccttgctctctgcaatatgacacggcactcgtgaacaaaccgaaggagagcgaaaacatgccggactccgaccacctctcgatgctgacttccatgaacacaggaaacacaggcagcgtgttcccattctcgacacaaaacaccataacattggactggtgaacaaacagaatgagagcgaaaacatgcaggactccgacaacctctcgatgctgacttccatgaacacaggaaacacaggcagcgtgttcccattctcgaaacaaaacaccaatccttttgaagtgaccagctcaaggctagagttcggcctcgtttcatcggattcactgatgagttcccctcacagttccttggagaacgtcaacctgctcggctcacagagtatgaatgaacaccagaacccagcctccctgcaacacttcgtggactggcccaggacgcctgcccagggaggcctttcatggcccgaggcagaagacatgcaggctcagaggtcacagctctccatatctgctccgatggcatcctccgagctatcgtcggcctccacatcccccatccacgagaagctgatgctgtcgcctctgaagctgagccgcgagtacagtccgactggtctcggcattgcggcgaacagagacgaggttagccagctagaagcaacctgggcgacgatgttccgtgactcttcgatgggcggtccgttgggggaggttctggccaagaacggcaacgtggaagcgagaaattacctgtcggcgcctctgaaccttctcaccgactactgggattcaagccacgggatggagtcctccccttgtgggcgttctgcagaagacgaccgtccttcggatcggtctccagcagtacagggagcagccctagggttgagaaccacggcgcctacgacggtttcggcaacctgcgggatgatctcggctcaattgtagtgcgccatccaagcatccgccttgtgtgagcttttctgagttctgaccatgaaaaactgcaacaagacggcggcccgcagccatagaagtgggcatatgggctactatgctaatcctcaaagcgtgagggggggcatttacctcgtagtttgtcatttgagactgatctcctgttttttgtcacttcagttcttcttttgcttccctttttaacttggctttgtaactttcaccttccttggatcgtgaaaagcgctgtggtgtgtgactgtgtggatggatttggtgcgccgctgatgcatatcatcatgtgatagaagaagccagtatccgtcgaggattactgcgagtatcgcctgtttgttgttcatacgtcatactgctgcactgcacttcactgtttgtgtgcccgttgttgcattgtatggttcggttatattaattaaccaccaggtcgtgaggctgcacatttnnagattcaaaaaaaaaaaaaaaaaaactnnnnnnnnnnnnnnnnnnnnnnnnnnnnnnngtgggt

SEQ ID NO: 113582 - DNA, 468 bp, Zea mays
  Clone ID: MRT4577_35071C.1
gctatctcgtgctctccactattattctgcacagaaacgcatcagacttctggtgaccatctcgccgccgccacaccacattccacacaccgtggaacccaagcaagctctcggccggagtcggatcgaaggccctcgccggtgccggcgttctggcggccgtctccttctgggtggccggcgcggccgaagcgcccgcgccctaacccgtatcctgccccttcagcggggtggtgcgcccttactccgcaggtacttgaagactccacctgcgtcttactcttccgcgtcctccgcactgaggaggtgcggcctggtgccttgaggctacctattagaagttcccacctctgcggcgtcgcacgcctagatgtatttcttggagcgctatgccatactactagtactcctgatatttggccagagctcccgattgctcctctcattttcggcggatctggtgttcct

SEQ ID NO: 113583 - DNA, 416 bp, Zea mays
  Clone ID: MRT4577_35072C.1
cacgcgtccggctcatccatctcactctccgctggtcgctcactctttctttttccacccttcactcagtcttagacggttaggagctctaggctctagctagccgccccactccttcgtgtagccatcagccttctcatcgccaccaatggccactgccgaggtccacaccccgaccgacctggcggccgaagaagcgcccgtggtagagaccccgcctccgaccggcgggcccgaggagtatgccccctccgaggccgaagccaaggccgaggctgctgctcctgctgaccccgaggagcttcccgcggacgatcagcaggcatccgccgaggccgaggccgcggctcctgctggagccgaggagcccgtctcggccgaaccgatctccgaagtagaagctgctgcttctgctg

SEQ ID NO: 113584 - DNA, 228 bp, Zea mays
  Clone ID: MRT4577_35073C.1
aatggggtactataactaatttgatggggttcatcaaggatacacacattaaacttaggggaatgactttttggcacatattaattttatacaactaattaactacagccaaacttcgggtttataaaggagagcatgctacattattgatctttcataatgtcaattgaatataattaaatggcacgtcgcttacaattctcgtgactgagaaaacattggtggtac

SEQ ID NO: 113585 - DNA, 179 bp, Zea mays
  Clone ID: MRT4577_35074C.1
cgggcagctactatacgtctaaggggcgacgaaactggctccaacgaccgccaccaaggtagacactagctacggcgacgagcgccgtcgcgagctgcaggcgttcgacgacacgaagctggcggtgaaaggcctggtggactccggcgtcaagtccatcccgtccatcttccacacaa

SEQ ID NO: 113586 - DNA, 232 bp, Zea mays
  Clone ID: MRT4577_35075C.1
atcgctggatctcgataaggacgaccgatgacgcacgctgagatccggcgtactgctaattttgataactgatctgttagatggcatcagctgagctttcccgttatgtaaatgtgtacttgtcgaactcgctgagcaggcggagaggtacgatgtgatggttgatttcatggagatggtagccaagactgttgactcggaggagctcactgtggaggagcgatacctcttg

SEQ ID NO: 113587 - DNA, 662 bp, Zea mays
  Clone ID: MRT4577_35076C.1
gcagaagacgccgcagtggcgcgcgggccccgagggcgccaagacgctgtgcaacgcgtgcggggtccgttacaagtccgggcggctgctcccggagtaccgtccggcttgcagccccaccttcgtgagcagcatacactccaactcccaccgcaaggtgctggagatgcgccgcaagaaggatggcgaccttggtcagctcccgctcccagtcccggccgcgcttctgcttgggccggccgtcgagtcgttctagccggcgctgtacattttttcgtccgcgggtggagctgtttaacctgctgtaccgtacttggtttttttttctttctcttccacttctatatttagtagttgtgctgtactatttagctagagctctgaattgtagaagctttattaggtcgagttaggtagtagagattaagatttccatggttgattaggattgttagggtatgtatggccatagtacttgtggtagtagttaagaacttggtgaggtgtttggcctgacctacgaggaatgatgttgtcatgtcgaggcgctgctggcaccagtgacaagaaagttaggcgtgccttggcgcggaacatggaactgtctgccttgttgtaatcgagagtgtcaggcgagtaagaaagtgattgtttgcattgcc

SEQ ID NO: 113588 - DNA, 173 bp, Zea mays
  Clone ID: MRT4577_35077C.1
aacgaggcgagccaccggaaccggagacgtgagcaatcgcacaaccccgtcgatccggctgcagtgcagcgtgctagatcgctaccgcccatggtggtggaggacatcgccagcgcggtgaagaacctaagcgtcaccggagctgcggcagcttcacaccgatacgcgcagag

SEQ ID NO: 113589 - DNA, 1178 bp, Zea mays
  Clone ID: MRT4577_35078C.1
cccacgcgtccgccctcctccaacctcgtcgacctcgtccgatccctctcgcacctattcggcctcgacccgcccctcttcaccaggaaccctcctgccgccgctcaggctccgccaccgaatccctcgccgacccagcccccaccacggctcgccgcctccccttccccctcctacaggaggcttgggggtgccgccggcttcccggcgtcgccccagctcgccccccgcccgccccccacggaggaccccgccgaggtcttcaagcgcaacgccgtcgccaagctcgtcgacatggcctacgccgacgccgccgcactgcgcaccgcacgggaggctgaggtcgacgccctcttcgccgtccaggccgagctgcggcacaggggaggcatcgtcgctcaaggtgtgcgcaacatgggggaggagatggaagcgctcgagcggcgcctgcaggacgtcatgatggccaccgatgttgtggaggactgggtcaggcagaacaacaggagaggcagcaaccaagccaccgaggacgacgaagccatcgagccggcggatgtgctgtccaggcagatgatccagtgcacagcggcagatttggcgctcgaggacaccatctacgcgctcgacaaggcaatccaggaaggatccgtgccctttgacggctacctcaggagcgtgcgtgcactgtcccgtgaacagtttttccaccgcgccctatctgccaaggtgcatagcgcgcagcagcaggctaaggttgctagcatggcagcacgggcgccaccgcagtacgcatcatagggatcatggtcagtatgcttgcttggtttgctatttcctccgattttgtcttctcgtcttattaagtacctgtgtctgtgtaaagtttctaccccatgcttgtttactgcttataccagggaaggggaagatgattcaatgctgcctgtcacatttacttagtaagactggatggatatgaaaggacttgtctctataatagcttgagtttgaatgtatgcatatatggcttttgagcttgcagttcacattgcatgcttcatttctgtctattacaataacttgacaattccatcttctcaaaaacatttggatgtcttgttcttctttggagacaaaaggataacaaagcgtggccactatagaggatccgagct

SEQ ID NO: 113590 - DNA, 242 bp, Zea mays
  Clone ID: MRT4577_35079C.1
cccgcggacgcgagggatcggggggatttttttcatggtggggtcttttatcatgtccgcgccgacctagagcttggctcatcgggcagcttgccgcactgctcgtggctgccgtcgtggcggtgtccgtcttggtggtgggcgcggcggttgtgtgcgacatgagcaacttgcattttaatgtcgttgctgcttcgtggcggctaagaccgactgacccttctggcgcgccgtcttatgct

SEQ ID NO: 113591 - DNA, 583 bp, Zea mays
  Clone ID: MRT4577_3507C.1
tccgagaacggccgcgccgagaacgagttcgcgcagccgacgctgtggctgccggccctggggtacgacttcaagctggccacggtggcccggaacctcctggtgctggagtacgacgaggagcagagcaagccgatcacgcgctacttccagatgatgaacgagatcgtcgaggacgcggccgacgtgcggatcctccgccgcgccggcgtggtccgcggcgggcaggaggtgcacgagctcatcaagaacatcgacagccgtgccatgtacccgtccgtgtacatggccatggaccgggagatcgacaaggtgagagagtaccacgacaagaggatggccagcttcttcgtccgcaaccgccccggcgtgatctgggcctcgtccgtggccgccatctcgatggcggctgtcgtcgcctcgatgaggaaacggggctaaagcgaacaacggagggatcagctgccaatttattgatgtacgtatatatctacatgcacatgtattgcaacttattgatgcgttgtaaggcgtatcatggtccgaacgcgcaatacgactgtgtaagcgaactgatgattga

SEQ ID NO: 113592 - DNA, 374 bp, Zea mays
  Clone ID: MRT4577_35080C.1
aaaaaacaaaggtaacaatttttcagggaagcccaaggcttaacagtccaaaccatccaagtcttgatacctcaaaattacgaattgggggcaacttaaaaacaacacacctgccctaaattccctttcaggctctaacgtttgggttcacaactttttttagcatggaaaactgcaaaaactaaaaagtccttgcaatatagggggttctaacctttaattttttttccagcttttagtaaaaatcccacactgagtccagcaacacttgtcccccaacagggccatatcaacatatcaaaattttccgggcttgggacccccaaatttttttttgaggttgagcaaaacccccctgatggcaccctgggtat

SEQ ID NO: 113593 - DNA, 495 bp, Zea mays
  unsure (1)..(495): unsure at all n locations
  Clone ID: MRT4577_35081C.1
tttctgtggngggctccttttgtgacgtgacctaatgggagaggcctggccgtggatcgccaaggacgttaccgagtttatcgggaacacgccgttggttttctgtggggaggggagcgtgggtgctttggtcgggtcgccgtcaagctgtagtccatggagccttgctccagcgtcaaggataggtattggctactgtatgatcacgggcgcaggatgagaaaggggtgattgctgctggcgtgagtgttctgattgaaccatctagcgggtacacaggcattggactggtctttatgggtggtggcgagggtctggcaagcttgctgcttgagcaatgggctggggctggcatgtgagctgtggggggagggtgggttgcatgtgggggagggcttgggtgggtggcgtggggttgtgttggtttgactggggcgccagttctgtggtgaattgagtgtgttgtgttgtgggggtggaatgggggggggggag

SEQ ID NO: 113594 - DNA, 141 bp, Zea mays
  Clone ID: MRT4577_35082C.1
ttgtaccggtatccggattggcggatatgtttccaaaattggtctgttttctactccacaaacagaagtcgacgacttttaatcaccatactgggaacaaacaatgtatcgactgactcaagatgaaaacaaggcaaggtg

SEQ ID NO: 113595 - DNA, 987 bp, Zea mays
  Clone ID: MRT4577_35083C.1
tctagaagactctcgagttttttttttttttttttatctctttcttgcatcatacgagtccacaaagctgagacaaggaatagcacacgcgtaccggggatcatcaaacaagaaataataaatgacgtgatgaagaaacgactaagcaataagctaatggaagagaaccaagaggatcagaagaactgctgctagtagtgctgggccgctagctagctctcatggatggatggataagttcatagcttgagggacaggtcaataatctcctccccgtcctctccgccggccctcgatgcaccggacgaggcttgggcaccccccgccggggccgggcgcggataaaggtagtgttgacggcggtggtgccacgcatcggcgcccgggtggtccgccctggagcgcggcgtcggcgcgctctcgctgccggacgccctgctgatgccctggtcggctaccggcggcggcgcggctggcgccgaggcggcctcccggcctcgcctcgccaggttgcgctgcaccttgtgcgcgttctggtggccgccgagcgcctgcgagctgcggaacttcctggggcagtagcagcaggcgaagaccgcctggaacctgggcggcgacgacggcaacgggtgcagcgagaggctgagctccagcccctcgtcttcccgttccgccgcctccatgcccggtatacaggaggcgaggagcctgtccatcctcctgtccatggggctcgggctagctaactaattgaccaggctgctgctaccgtacgtaccgcgcctcaggtcagggtctcatggaagccagaaccagcaggatggatcggaccggagctagccaatgcaacgcgcggggagggggaaggccgcaggtgccagccggacacgcaaggtgatccgggtagaggaatgcgcctgcccccctccggacgagggaggcgcggcgggcgggcgggcgggctgtcaaaacccagagctgcgtgta

SEQ ID NO: 113596 - DNA, 157 bp, Zea mays
  Clone ID: MRT4577_35084C.1
ggaggggcacacatcacatccatccatttggctacattttacaattaaaaatacaaggggggagtttgcagcaggctcccaccctctagggagcgaacagggacggcacaccatacccgctgcagttggggagggccattattctctgtttcttttt

SEQ ID NO: 113597 - DNA, 374 bp, Zea mays
  Clone ID: MRT4577_35085C.1
gggaaaaaaaaacaacatttgggaacaaaagagccctaggccccatttaaaatcttctttgcccttttgcaaaaaaaataggccccctattcccctcccccaaaagcaaaggcaatcaacggggggggaaaaaaaaaaaaaatcactccccgggaggggaccctgatctcccccccccgcccggggagcgggctgatgctccccattttgaccatggccccccgaaaaccggcccccccctggccggcgttggacccgtaggggctaaccaagccgtcccgcgcgcccccgccccccccaaaaaacccccggtcggaggggaacaaccccccccggaaaaacaggccccccaaaaaggggttgtcaaaagcccc

SEQ ID NO: 113598 - DNA, 860 bp, Zea mays
  Clone ID: MRT4577_35086C.1
ccggccggggaaaccagagcccacccggaccgggtacatcgcccaacttcctcaagacgtacaggtacagctgacggcagaaaccctctgatccgccgcacacacacctcgcaatcacaattcacaagatgaccagctccgccggctactcgcgggttgcgagttgcagaccgcaggagctcgcgctctgcaaaccttcatggcctccgaggcggtcgtcgttcacaccggcggttgccactgccggcgcttgcggtggcaggtcgaggcccccgcgagcgtagtggcgtggatctgcaactgctccgactgttccatgcgcgcgaacacccacttcatcgtccccgccgccaagttcaagctgcaggccggcgctgacgagttcatcaccacctacaccttcggcacgcacacggccaagcacaccttttgcaagacctgcggcatcacctccttctacaccccgaggtccaacccggacggcgtggccatcaccgtggcctgcgtcgaccccggtaccctgaagcacgtcgagtaccggaagttcgatgggaggaactgggaggattttttcaggaccagcgacatcgctggattctccaaggacgatgcagaggcggcggagtagcgggcaggtcagttcgtgttcttaccctcatgattcatgaggatcagttggaaacttggaattgcaaactgtgattttgtacacgaattgcaaacttgattagtcgcaattcctcgtgtttccattcgtgtttgtgcaattgcaaacttgattagtcgaaattgtagaagcaaaaaaaaaaaaaaaaaatttgcggcccgggtgtgacaactgttgccaaggtggatttttc

SEQ ID NO: 113599 - DNA, 440 bp, Zea mays
  Clone ID: MRT4577_35087C.1
gggaaggcaaaaacagggggccctttaatttctagcaaaacaaacaaaataccaacccccaaaaaaggggggggcacgaggtaaaaaaaagttccaagccagaaacccccaatgggttaaaaaaacccccacacggaaacccccggggggggggggtgaaaacaaaaaaaaaacaccagctttcggggggaaggaccccacccaaacgccaaagggggcaaagggcccgggcccgaaacccaaaaaaacccttttgttttcccaaacccccagggggggcctaaaccacttttgggaaattttgggggggaaaacccaaaaagcaagagccccctgggtttccttccaagcccttgccaaaacaggggtatgcacgcaataaaaaaaaaaattcccagccaaaggggctttatcagggcaaaggcccaaaagaaaccccg

SEQ ID NO: 113600 - DNA, 1941 bp, Zea mays
  Clone ID: MRT4577_35088C.1
ggccgggccgggtataaaaaaaaaaaaaaaaaaaaaaaaagtccccgcttctgattcactcccccacatcgccatatgtcgccggaggccggaccaatcatgcggcccgccgaccagttactcctcccgttcctcctcctggccgttgcctccgtcgctgccgccggcggctcgtgggagaatggatatgggagcatcctccgcctcccctcctcgtctccgcgccggttcccccgctccgcggccgtcgacctgatccacgcgctcaacctccaccccgccgacgcgtcccctcccctctccaccgccggcgtagagggcgccctcgcccccgcggggaccctcgtcgagaggcccatccgcatcgcgtccttcgcgaacggaggcgccgccacgtcggtggaggacctcggccaccacgcggggtattaccgcctcgccaacacccacgacgccaggatgttctacttcttcttcgagtcgaggggccacaaggacgaccccgtggtgatctggctcacgggcgggcccggctgcagcagcgagctcgcgctcttctacgagaacggccccttcaacatagcggacaacttgtcgctcgtctggaatgattttggttgggacaaggcatcaaatcttatctatgtcgaccagcccactggaactgggtttagttacagctcggattcgcgtgacactcgccacaacgaagctactattagcaatgatctatatgatttcctgcaggccttttttgctgagcacccaaagtatgctaaaaatgatttcttcataactggggaatcatatgctgggcattacattcctgcctttgcaagtcgtgtgcaccagggaaacaagaacaatgagggcattcacattaacttgaagggttttgctattggcaacggactaacagatccagcaatacagtacaaggcataccctgattacgcgttggatatgggattaattacaaaaacacaatttaacaggatcaataaaatagttccaacttgtgaattcgctgtcaagctttgtggtacttctggaactgtatcttgccttgctgcgtactttgtctgcaatacaatattcagtgccatcaggacaatcataggcaataaaaattattatgacatcaggaaaccatgcatcggaagcctatgctatgatttctctaatttggagaaatttctcaacctcaaatctgtcagagagagcctaggggttggagatatagagtttgtttcatgcagcccaactgtctatgaggccatgctattagattggatgaggaaccttgaagttggaatccctgaactccttgagagcgacatcaaagtgttgatttatgctggagagtatgacctcatatgtaactggcttgggaactcaaggtgggtaaactctatggaatggtctggaaaggaagcttttgtgtcctcatccgagaagcccttcacagtcgacgggaaagaagctggcgttctaaagaaccacggtcctttgagtttcttgaaggtccacgatgctggtcacatggtacctatggatcaaccgaaggctgctctggagatgctgaagaggtggacttctggaaacctttcggagccatcttcaagctcccagaggcttgattttacaatgtaacaaaacacacatgctgtacctctggatgtttgtaggctcagaaaaggtcctggtcttaggctctgaaaagctcatctggcgaccatacgttatttaccttgtatgggcgctccgcttgctggtgagacacggtgttacgagttacgactcgatgaacatgtaataaagcttttcagagaattgctaggccaggcatagatctgaagtaccttttgtgatgacttgcgtcgatacgtatggaccgtacaagtcatggtatgctactaagtgcaaaaggcaacagcacag

SEQ ID NO: 113601 - DNA, 434 bp, Zea mays
  Clone ID: MRT4577_35089C.1
gtcgaatactcagtgaatactatgatgcatactctgtacaggtatcgaatgacgcaggcaatacgatctatctggcacgcacgttggttacgcatggcaaagatgaatgtgccatggcctcatcttctaaagagaaagcaagaccagtgacgcataaacctacgcctgctctgcgtgctgtgcatacactactccatgaatgaactcaccaattctgctgaacgaatcgcgttgatatatactacatactagaccgactcacggacatgttttcatatattaacgcactgccactcaacgtcatgatggatctgatattgcgactacgaacattaatgcgcgtcactatgtgtatgcccaatcagcgttatcagacctacatgttatgtacaaatacatcgatatatataaacattgatgatcattccacatat

SEQ ID NO: 113602 - DNA, 422 bp, Zea mays
  Clone ID: MRT4577_3508C.1
ccgccagcgtgatggaatctgcagattcgccttagcagtggaacaacgcagagacttttttttcttttttttttttttttttttatttttttttttttttttttttttttttttttttttttttttttttttttaaaaaaaagggagaaaagattaaatagaagaaattcccagatatcacaacgggacaacagaggtaaactaaaagcaccgaagctaattaccagagctaacacaccatcctgacaaacgacatcaacccagggggactaaaagaccccggccctacaaagggcccacattaaacaaaaaagaccaggcccgcgccccagggggtccgcgcaccactgaaaccgggcagggcgccaagttgactacaaagttgctgacactcccaaggagaaccctttacaggggccccc

SEQ ID NO: 113603 - DNA, 328 bp, Zea mays
  unsure (1)..(328): unsure at all n locations
  Clone ID: MRT4577_35090C.1
accaaggagcgccagaggagcagacccaagggaagagacgccacaaacnacaggagcgccaaccagcaggcagccaggcacccaaacngagagaccaggcagggggggggagancnagagngcaagacaacagnggnaagacaaacgcnggcagaaagccaagaagagacgcaaggnaaagggaaacacgggaagcagcngaaaggcagggcggcaccgaancaagcaagcanacgcannaacccagnccagcccgcggcagggaanccaagacaaggaggcncacacaaaaaaacaggcaanagngagnggcgcgaacacgcaagag

SEQ ID NO: 113604 - DNA, 2108 bp, Zea mays
  Clone ID: MRT4577_35091C.1
gggtacctcgtggccggccggtttggttcgccgggaaaatctataacgcggcggctggctcttctcgcgctacctctctcttgaaggaagtctccgcccccgcttctgaatcactccccccacatcgccatatgtcgccggaggccggaccaatcatgcggcccgccgaccagctactcctcccgttcctcctcctggccgttgcctccgtcgctgccgccggcggctcgtgggagaatggatatgggagcatcctccgcctcccctcctcgtctccgcgccggttcccccgctccgcggccgtcgacctgatccacgcgctcaacctccaccccgccgacgcgtcccctcccctctccaccgccggcgtagagggcgccctcgcccccgcggggaccctcgtcgagaggcccatccgcatcgcgtccttcgcgaacggaggcgccgccacgtcggtggaggacctcggccaccacgcggggtattaccgcctccccaacacccacgacgccaggatgttctacttcttcttcgagtcgaggggccacaaggacgaccccgtggtgatctggctcacgggcgggcccggctgcagcagcgagctcgcgctcttctacgagaacggccccttcaacatagcggacaacttgtcgctcgtctggaatgattttggttgggacaaggcatcaaatcttatctatgtcgaccagcccactggaactgggtttagttacagctcggattcgcgtgacactcgccacaacgaagctactattagcaatgatctatatgacttcctgcaggccttttttgctgagcacccaaagtatgctaaaaatgatttcttcataactggggaatcatatgctgggcattacattcctgcctttgcaagtcgtgtgcaccagggaaacaagaacaatgagggcattcacattaacttgaagggttttgctattggcaacggactaacagatccagcaatacagtacaaggcataccctgattacgcgttggatatgcaagtcgtgtgcaccagggaaacaagaggattgagggcattcacataaacttgaagggttttgcaattggcaacggactaacagaaccagcaatatagttcaatgcgtaccctgatcagccataggatattcagtgccatcaggacaatcataggcaataaaaattattatgacatcaggaaaccatgcatcggaagcctatgctatgatttctctaatttggagaaatttctcaacctcaaatctgtcagagagagcctaggggttggagatatagagtttgtttcatgcagcccaactgtctatgaggccatgctattagattggatgaggaaccttgaagttggaatccctgaactccttgagagcgacatcaaagtgttgatttatgctggagagtatgacctcatatgtaactggcttgggaactcaaggtgggtaaactctatggaatggtctggaaaggaagcttttgtgtcctcatccgagaagcccttcacagtcgacgggaaagaagctggcgttctaaagagccacggtcctttgagtttcttgaaggttcacgatgctggtcacatggtacctatggatcaaccgaaggctgctctggagatgctgaagaggtggacttctggaaacctttcggagccatcttcaagctcccagaggcttgattttacaatgtaacaaaacacacatgctgctcatgacatttcgagcatgtacctctggatgtttgtaggctcagaaaaggtcctggtcttaggctctgaaaacctcatctggcgaccatacgttatttaccttgtatgggcgctccgcttgctggtgagacacggtgttacgagttacgactcgatgaacatgtaataaagcttttcagagaattgctaggccaggcatagatctgaagtaccttttgcgaaaaaaaaaaaaaaaatgtgcccctagggccctcgatgaacatgtaataaagcttttaagagcattgctaggccaggcatagatctgaagtaccttttgtgatgacttgcgtcgatacgtatggaccgtacaagtcatggtatgctactaagtgcaaaaggc

SEQ ID NO: 113605 - DNA, 731 bp, Zea mays
  Clone ID: MRT4577_35092C.1
cattgggtacctcgaggcggcgggactccccccacatcgccatatgtcgccggaggccggaccaatcatgcggcccgccgaccagctactcctcccgttcctcctcctggccgttgcctccgtcgctgccgccgccggctcgtgggagaatggatatgggagcatcctccgcctcccctcctcgtctccgcgccggttcccccgctccgcggccgtcgacctgatccacgcgctcaacctccaccccgccgacgcgtcccctcccctctccaccgccggcgtagagggcgccctcgcccccgcggggaccctcgtcgagaggcccatccgcatcgcgtccttcgcgaacggaggcgccgccacgtcggtggaggacctcggccaccacgcggggatgttctacttcttcttcgagtcgaggggccacaaggacgaccccgtggtgatctggctcacgggcgggcccggctgcagcagcgagctcgcgctcttctacgagaacggccccttcaacatagcggacaacttgtcgctcgtctggaatgattttggttgggacaaggcatcagatcttatctatgtcgaccagcccactggaactgggtttagttacagctcggattcgcgtgacactcgccacaacgaagctactattagcaatgatctatatgacttcctgcaggctttttttgctgagcacccaagtatgctaaaatgatttcttcataact

SEQ ID NO: 113606 - DNA, 178 bp, Zea mays
  Clone ID: MRT4577_35093C.1
ttttctaggcaagatgcaccatatgctcttgcacgacatactccatcaaggacaatggcgcatgacgtggaggggccagtggcgtttatttattaaaaaggtatgccgataccgaacacgtacgcttgagcaaaggtcaccggattaatttgcgatcgatcaacgttacaagggcgcc

SEQ ID NO: 113607 - DNA, 135 bp, Zea mays
  Clone ID: MRT4577_35094C.1
ggacctgggtttattaaatttgcttgtttggtttaaaaaacttcattaacaaagctaaacttagatagttgggcgaccataaagtaccaagcttagctttgtgtaatgaagttattaaatttgcttgtttggttt

SEQ ID NO: 113608 - DNA, 1221 bp, Zea mays
  Clone ID: MRT4577_35095C.1
aattagtattgcacaatgatagatccacatcacataaaccatcaacaagcaccacaacaaaatcattcacaaaacctacacatgttattatgttttgcacatatttacaaacactttacaaaatcattcacaaaagtactaacgcttcaagtgattcgcaaaagccttcattgagcaactcaacaggattttccatagatctttctctgcagcttttgccgcttcattgagcaactcaacaggattttccagataacttatgtattcagaagagagacgtggagaaatgtttatatccagctgaacatctttgtatggtactgggactaggcaaaactgatcaaccatgtaagatgcatctcgcaatactgagaagtggtcaactctactgatgcaaccatcaggctcctgttattccagatcccatcgttattagtcgttcaggagaacgaataatgatcttccgtcgctatcagcccacgcgccgttttcttctgccgtccagagccgttcttctctcttcaaggttcttctctctcccgtcaagcctcttccttccatctcattttcttcaatctccatttccctcccctgctagtctcctcccctgctgcccggagatctgctgcccgtggtcccgcgccaaagcaggtggcggcggcgctgcacctccttctctccaaactccgcgtcttctcccttgctgctcgcggccccgcgccaaagcaggtggcggcggcgctgcgaccacaaccctagtccgcgccaaagcaggtggcttgtcgttgctgcaaatgaagtagaagcaccaatagtcgaagctgcaaatgaagtagaagcaccaatagtcgaagctgcaaatgaagatgaagcaccaatacttgtagctggaaatgaagatgaagcaccaagccgtgaacttgtcgttgctgcaaatgaagatgaacacacgactgctactacgccacctagaagtgtcaaatgggtagttaagaaaattacccctagaaagaaactgaaaaaccatagatctgaaatgtgagcttgtgaaactgctacctgttttttgctcccagaaatgtgagcttgtgtgatagcttgtgaaactgctacctgtgtattgctcccagaaatgtgagcttgtgtaatagcttgtcaaactgctacctgtgtattgctccattgaaatgtgagcttgtaactagcttgtaactaacccgc

SEQ ID NO: 113609 - DNA, 2927 bp, Zea mays
  Clone ID: MRT4577_35096C.1
cacaaatcaccaatttttatacacataatcacatagatatacaaatttaattagtattgcacaatgatagatccacatcacataaaccatcaacaagcaccacaacaaaatcattcacaaaacctacacatgttattatgttttgcacatatttacaaacactttacaaaatcattcacaaaagtactaacgcttcaagtgattcgcaaaagccttcattgagcaactcaacaggattttccatagatctttctctgcagcttttgccgcttcattgagcaactcaacaggattttccagataacttatgtattcagaagagagacgtggagaaatgtttatatccagctgaacatctttgtatggtactgggactaggcaaaactgatcaacacgagcaagtagttcagaataggaattatcttcttgaccatgtaagatgcatctcgcaatactgagaagtggtcaactctactgatgcaaccatcaggctcctgttattccagatcccatcgttattagtcgttcaggagaacgaataatgatcttccgtcgctatcagcccacgcgccgttttcttctgccgtccagagccgttcttctctcttcaaggttcttctctctcccgtcaagcctcttccttccatctcattttcttcaatctccatttccctcccctgctagtctcctcccctgctgcccggagatctgctgcccgtggtcccgcgccaaagcaggtggcggcggcgctgcacctccttctctccaaactccgcgtcttctcccttgctgctcgcggccccgcgccaaagcaggtggcggcggcgctgcgaccacaaccctagtccgcgccaaagcaggtggcttgtcgttgttgtagctggaaatgaagatgaagcaccaagccgtgaacttgtcgttgctgcaaatgaagatgaacacacgactgctactacgccacctgttttttgctcccagaaatgtgagcttgtgtgatagcttgtgaaactgctacctgtgtattgctcccagaaatgtgagcttgtgtaatagcttgtcaaactgctacctgtgtattgctccattgaaatgtgagcttgtgaactagcttgtgaactaaattgtggtacctgggaactaaattgtgaactagcttgtgaactgaaatgtgagctgcgaattttgttctgggatggcagtttattgctcccagattttgttctacctgttcaacctgtttattgctcccagattttgtgaactaaattgtgctcccagattttgtgaactaaattgtgctacctgttcactgggaaaatgagtttgttcccagatttttgtgttcagcgaatggacagtgaaatggacagcgaatgatatgggagcaataaactctggtagccaaaggcagattttgttcccagatttttgtgttcccagattttgttcccagattttgttcccggactctggtagccaatgacagtgaaaatgaaatgtgttcccagatttttgttcactgtccggaatactgcttcactgtccagaaacaacagcagcgaatggcagattcagcgaatggcagattcaagaacggcgcgattctctctgtacaaagactgggtgcgtctagtgcgggtaacggatgtgagacagcgtctgtttcagtgtaataaacatcatccttccctggtaatagaggattcatgtccattttagagtgtagtatcttctctggtttttcataatgtcgaatccctcgcctacgcctccgtttcgtcgaagccacgtctgcggtgtttcataatcccaaaattctcccatttccatgtagctatgtgcaaagcagtatttcccttcttgtcccgcacattgagaatggaaacatcagccatcagtaactcttccactacatctgtgttcttgcctttcacagccatgtgaagtgcagtttgtcccttcctatccttgatcggaacaattcctggatccctctctatgagtgccttgacaatacgatggtatccaatccttgcagcagtatgtagggatgtcttcccgttttttcgcacaatccttatgcagctatcatcagtgtccagtatagcatttaccacatccaagtgatccttgacaatatacaagtcacaaccccaggagagaagtgtacaggattccttgcttaagtgttatggtaggaacctcttctcgtcttctgttttgtctgacttgtcttccttcttctcttgctgtttaagaagagaaataaggaaaccttcatatttccacatacatatattactagactagtcaagattcgtaaatacaggatagcagttcatgtgaactgggttttgttgctttgggcatatttcattttcaccaaaccagtgtatccagaccacaaatgggtacacaacaatttgactcaatacctgctttgtataaggtatttgtgtgctctcaccaaggaatgttctactatttccattccataagatcaattgtgcttgtggaacataaagaactccatatgctatcctaaacagcaggggcagagctcagaaatcagatacttagacacaacaaccatggatacctataacttaaagtgacgaatagaaatactttaactagattttagagttactaatctagattatcgggcatagcacatcgactaaatcaagcaccacaccacttaatttaacaagtagagccttatcaaataacatagagttttgacaagtccacaatttttaaatctaaagacctaaaacactaatggatgatacttgctgattttaaatactaatcgacttccgttgtttaaaaaaaacttgttgtttatgacaagatttggtcaaacttaaaaactaaaacttgtttcgaagaccatgcacagtcaaataagtgtttttgaaaac

SEQ ID NO: 113610 - DNA, 328 bp, Zea mays
  Clone ID: MRT4577_35097C.1
tttcctccctttttttacaccccaaagagcgcccaaatatatggggggttatttctttcattaaaggggaaatatacagatgaagagaaagcttttattctcaaagcgttgataaaaagccccacccaaaacccacgtgcacacatatattgacacaccacatatatcctatatcagaagagagagaaaaaacgcaaagtaggaaaaatgtccctgcagaggctcacacaccacacattgatcacccaacaccccgatctaagttcccctgcacccacatccctcagtaacttcccatgatttaccattgccggccattcaaaccccc

SEQ ID NO: 113611 - DNA, 575 bp, Zea mays
  Clone ID: MRT4577_35098C.1
agtattgcacaatgatagatccacatcacataaaccatcaacaagcaccacaacaaaatcattcacaaaacctacacatgttattatgttttgcacatatttacaaacactttacaaaatcattcacaaaagtactaacgcttcaagtgattcgcaaaagccttcattgagcaactcaacaggattttccatagatctttctctgcagcttttgccgcttcattgagcaactcaacaggattttccagataacttatgtattcagaagagagacgtggagaaatgtttatatccagctgaacatctttgtatggtactgggactaggcaaaactgatcaactatatttttagtaatctgaaggactagccaaacagctttaactatccttcgagtactctgaagattctaattacaataatgtgcacccgtgatgaatcaagcaaagaatagactggcttgaaaggaggacatgataaggagacttgtacacgaacccgagcaagtagttcacaatcggaattatcttcttgaccatgtaagatgcatctcgcaatactgagaagtggtcaactc

SEQ ID NO: 113612 - DNA, 426 bp, Zea mays
  Clone ID: MRT4577_35099C.1
gaactatttcatgtcatttcgcattgacatgagaatccattgtttgtgcaggaggagactagcaggggagggaaatggagattgaagaaaatgagatggaaggaagaggcttgacgggagagagaagaaccttgaagagagaagaacggctctggacggcagaagaaaacggcgcgtgggctgatagcgacggaagatcattattcgttctcctgaacgactaataacgatgctgtctatcttgtttttcagggatctggaataacaggagcctgatggttgcatcagtagagttgaccacttctcagtattgcgagatgcatcttacatggtcaagaagataattcctattctgaactacttgctcgtgttgatcagttttgcctagtcccagtaccatacaaagatgttcagctggatataaac

SEQ ID NO: 113613 - DNA, 855 bp, Zea mays
  Clone ID: MRT4577_3509C.1
atgggggtgtttgttcatcttcgctctctgagaattagtttcgcccagttctttggccttcagttcggtaaactatgtgggagagggagaatgggcaagaaaacttttcgcgttgaggattacaagctagtacattgtgctcatggtagtgtactacaacatctcacgatagccgagccttacaaagaggaacacctggatgagcttcgtaaagaaaatcagaaccgcacagaggactggatcatgagggagcacaaacatcgtttcagcgaatggttaatggacaaaaacatcccattcggagactctttggaagagaaaacaatgaagaatttggcttctgggccatcgtgttttgtgacatcatggcaagcatatgacatcaatgggtacacattctatactaaatcaaaagacatgaaaagtgttgcacaaaatagcggtgttcgtatcgatgcttttgacctacatggacagaagaccacatattttggattcatagaggaaatatgggaacttgattatggcccaagcatgaaaatacccttatataagtgccaatgggtacaacatcccgtgggggacttaaagaaagtaggatataaagatgacccgtgggttctcgccgaatgtgttgcacaagtgttctatgtactcgatccagcagatgagaagatgcatgtagttatttctggaaagcaaaaatttgttggagttgagaatgtgggagaccaagatgaggaatacaataagtatgaagagatgttcgtctttaacggtacagagagaatcaagcgtgtggaaaagaaaattgataagaacttaaagccatacatgcggaaaaatggtagttaa

SEQ ID NO: 113614 - DNA, 1703 bp, Zea mays
  unsure (1)..(1703): unsure at all n locations
  Clone ID: MRT4577_350C.1
cctcgaggccggccgggaactgagtatcgcagagataggcgtattctgtactcggctacctccgcggttcnacctttcccccttctcccaattcccgccgccgctccataccgtaacgcgacccatgagggagtgcatttcgatccacatcgggcaggacggtatccaggtcggaaacgcgtgctgtgagctgtactgccttgagcatggcattcaggctgacgatcaaatgcccggtgacaagaccattgtgggaggcgatgatgctttcaacaccttcttcagatgagactggagctgggaaccacgcgccccgtgctgtttttgttgaccttgaacccactgtcatcgatgaggtgaggacgtggcacctaccgccagctcttccaccctgagcagctcatcagtgagaaggaggatgcagacagcaactttgaccgaggacactacaccattggcaaggagatagttgacctatgccttgatcgcatctagaagcttgccgacaactgcactggtctccagggcttcctcgtcttcacgctagtggtggatggaacaggctctggccttggttccctcctcctatagcgcctgtctgttgactacggaaagaagtccaagcttgagatcactgtgtacccttccccccaagattctacttcggtagttgagccatacaacagtgtactgtccacccactccctcctcgagcacactgatgtggctatactgctggacaatgaggccatctacgacatttgccgccgatcccttgacattgagcgcccaacctacaccaacctcaacaggcttgtgtcccaggttatctcatcccttactgcctccctgaggttcgatggtgctctgaacgtggatgttaacgagttccagaccaacctggtaccctacccgaggatccacttcatgctttcttcgtacgctccagtcatctctgctgagaaggcctaccacgagcagctctctgtggctgagatcaccaacagcgccttcgagccatcttccatgatggccaagtgcgacccacgacatggcaagtacatgtcctgctgcctcatgtaccgtggtgatgtggtccccaaggatgtgaatgctgctgtggccaccatcaagaccaaacgcaccatccagttcgtggattggtgcccgactggcttcaagtgcggcatcaactaccagcctcctagcgttgtgcctggtggcgaccttgccaaggtgcagcgtgctgtgtgcatgatctccaactcccccagtgtcgtggaggtgttctcccgcatcgaccacaagttcgacctcatgtacgccaagcgtgccttcgtgcactggtacgtcggtgagggtatggaggaaggtgagttctctgaggcccgtgaggacctggcggcgctcgagaaggactacgaggaggtcggcgctgagttcgatgagggcgaggatggcgacgagggtgacgagtactagagaagtttgctgatgacgcagcatcaggccagtgtgctgcccttatcccgtgatctgccgtgagttgctcctgctatcgtgttatgtgtgtctgttatgaagtattgtgtggtttacaacacctgatgtgtaagagtcgttattccccgcattgctccgggtattagaatattaggcgtttacgttgtgcttcaaaaaaaaaaaaaaaaaactcgcgaggg

SEQ ID NO: 113615 - DNA, 484 bp, Zea mays
  unsure (1)..(484): unsure at all n locations
  Clone ID: MRT4577_35100C.1
gaacanaacattgaggttttttgtttgggatgctcttactgctgaaaaggtttctagattgggggctggcctcactggcgcacctagggggctcgcccattccaaaaaaaatctctttttcggttttccccggaaaccatgtatggaaaaaattcccctttccccccgaatccgcttgtacaaaaaccctctcttttgaaaagagtgtgaaaaaactattactgtttcaggaggtttttcctaatgngactatagttgtttatccacaaatatgagaatctgccatttttgggggaaagtgcatcctctctaggaagacctaatggcccatcccaggaaatttccccctttttcaaaaagagcttttttcacactaaaaccttttttttttttttttaaaacaaggcccctatttcgagattacccccccgggggtaaaaaagctttcccttcttttgggggcccctaatttcttttttttggg

SEQ ID NO: 113616 - DNA, 386 bp, Zea mays
  Clone ID: MRT4577_35101C.1
ggacgccgtgggctgtcgcgtgggcggacccgttggcggacccctgggcggacgcctgggtccagacgcgtgggctccaagtgcaagggcaagggctcgaagtctggtgcctcaatgaggtgccctggttgccaggggtcaaggcatcaagatccctgttctcaaggggtaccctcacatgatcctgcaagatccagcgtctcttttattgagttcaaggtgactggacaaaccattattgagaaggaccgctgcccatggtgcaaggggaaaaaggccgtcatagaaaaaagggttctcgatgttcatgttaagaaggggatggaccacaaccagaaaaccaccttccctggtgagactgatgaaccgcctgatactgccactgg

SEQ ID NO: 113617 - DNA, 1417 bp, Zea mays
  Clone ID: MRT4577_35102C.1
ggttggttgctaaaaacttttagcgacccataaggatggtcgctgtaagtgccgtcgctaaaggctttagcgaccgacatctttttagcgaccgaccgtccgtcgctaatattgtatatttagcgaccaaccgtgggttgttgtactatagatttagcaaccaatcgtgagtcgctatactatacatctagcaaccaacagaaagttgcccctaattatagtcgttaataatgataatataccattaattagtattcaacaactgttatatatacaaaagcatcacaaatcaccaatttttatacacataatcacatagatatacaaatttaattagtattgcacaatgatagatccacatcacataaaccatcaacaagcaccacaacaaaatcattcacaaaacctacacatgttattatgttttgcacatatttacaaacactttacaaaatcattcacaaaagtactaacgcttcaagtgattcgcaaaagccttcattgagcaactcaacaggattttccatagatctttctctgcagcttttgccgcttcattgagcaactcaacaggattttccagataacttatgtattcagaagagagacgtggagaaatgtttatatccagctgaacatctttgtatggtactgggactaggcaaaactgatcaacctgaaagagttgaagcaatcctgtcagaattatcatgggcaatagcatgtcatgcagaacttatagctagaacttagctaagaaattacttgattgcttttataaagaaaagcaatcatccccaatagttgtactgttggaaatcgaaatagcaaaatacaaatgttcttaactatatttttagtaatctgaaggactagccaaacagctttaactatccttcgagtactctgaagattctaattacaataatgtgcacccgtgatgaatcaagcaaagaatagactggcttgaaagggggacatgataaggagacttgtacacgaacacgagcaagtagttcagaataggaattatcttcttgaccatgtaagatgcatctcgcaatactgagaagtggtcaactctactgatgcaaccatcaggctcctgttattccagatcccatcgttattagtcgttcaggagaacgaataatgatcttccgtcgctatcagcccacgcgccgttttcttctgccgtccagagccgttcttctctcttcaaggttcttctctctcccgtcaagcctcttccttccatctcattttcttcaatctccatttccctcccctgctagtctcctcccctgctgcccggagatctgctgcccgtggtcccgcgccaaagcaggtggcggcggcgctgcaccttcttctctccaaactccgcgtcttctcccttgctgctcgcggccccgcg

SEQ ID NO: 113618 - DNA, 167 bp, Zea mays
  Clone ID: MRT4577_35103C.1
aacagggctaacctgattgcaccacctctgacagtacctcaaatgacgatgaataacctgcggcttgcctaacgaatcctgggggcgcctgtgtgcgaacaaacacccaagactctgattgctctgacactgattctgaagaggatgactcagatgatgatctttct

SEQ ID NO: 113619 - DNA, 502 bp, Zea mays
  Clone ID: MRT4577_35104C.1
gccagcgacacagccctagctaattctggctgtcggtaaacattgcgcaggcggccggaacatgggataatgtctttgcttggtcatatgggaacaagtggatccctggatgcacggcataggctccttatagagaaggaagatgagcgccgagcaagtagtgaatcctacttaggagatatatgagaaagtctgtattatgtactgcatgctagaggaccagtaccattgttactacatagaacacgctcttgttgatccgatgcgacccctgagcgtccgaccacgcgctgtggttccttcaaggatggcatttctgcccacagtgggccgtcgaacaggctggttcttaagctacctaatacttgactagaagctacttctcgacggagagggggcactctagtgaggtgctgcacataaatcatcttagtcctttcatgtgcacctacacattgcactgggtttctgatgtgcgctttactatacaacgggctgagaa

SEQ ID NO: 113620 - DNA, 418 bp, Zea mays
  unsure (1)..(418): unsure at all n locations
  Clone ID: MRT4577_35105C.1
ccggtccgattgcggagcgtccgccaccgtcgccaccgtcgccaccgtcgattgatccactagcaacatcatatggatacactacacatttacaccaatggcagccaaattttgcctcttgccctccttgctctttcagcaaacgttgctaccggactattattcacaatgctcacaacaatacctcttccggtgacagccgcgagatttgaatacccaactatacaatcctacaggctacaagaggccatcgcacaagcatcttacggtcgtagcattgactgttcacaccatatgccctattgcaacaaccatcctaatgaatctatatcntccaagaatcgtagcacatcaactacaacaacaattgcttccacaatncaaacaagagtttcagcgaacttgagcttacctcagc

SEQ ID NO: 113621 - DNA, 579 bp, Zea mays
  Clone ID: MRT4577_35106C.1
tctctcgagtttttttttttttttttttttttttttttttttttttttttttttttttttttttttttttttttttttttttagaataaaacattcaatatcccattacaacaaaaaaaaggggttgcatattgggaaaccccaaaagacaaattgtttaaaaggggggaaatcatgcggggggcaatacaaacggggaatattataatcaaaaacttcccccccaggggttattggtccccaccaaaaacataatcaaaaatttacctgccaagccctcccgattttgggcaaagcgaaacaaaaaaggggggcaccccaaccaggggaaacttgcttgggggagccgatgcaaattcatccaaaaaccgggcttccacccaagggcaaaaaacacccaagctgccaagggcagttttcaactgacatgaccccaggctttggatcaacaatttcgatgacctccaagggggaaaaaggtgtaaaaacaaaaaactggaagttgcaacatcggaacagcccaaacatggaaggacccaaaaaagggccggcttttttttccaccaaccacgggaaagg

SEQ ID NO: 113622 - DNA, 204 bp, Zea mays
  Clone ID: MRT4577_35107C.1
gacaggggtggtggctgcttcgagagttaataatttgtttatgtccagaacatcatagattggcgcagcagcagactagcaaattactcatatcatataagaagatggcccgttctctctcgcaagccagacgtattggtgtccttgttgctcaatctatctccctaattcacgttcatcggcgaggttacgcagtggcatccg

SEQ ID NO: 113623 - DNA, 642 bp, Zea mays
  Clone ID: MRT4577_35108C.1
ggccggccgggccccgggaatggtacacatcatactcttcccgatccctgcaggaagtccccaattcctcggaggtcgagcgaccatgcctactggtggcactgccgtcatgggactgtccaaaagcggcgtgaacggtcacctcaaggttctccgcgacgacatccgggtcatcccgaacccggccatccggaggctggcggaggaggcacgctgtgatacgcatctcagagttgcatctacgatgagacgctgtcgctgcggtcaagatcttcctcgtagaacggcatccgtcaggtcgtaacctactagtagtgcggccggcgcaagagcgactccgccatggacgtcgtctacgctctctggcgccagcgacgaaccctctactgattctgcggatgatatgcgctaccgacgctggtggccgtggctacaggcttgcttcgcggataagaaaactagagaattctggatgacaagcttacatacggaggagtattatcactaacgcttattggtagcggaagatgggttcgaccactctaagccgctgtgcaacagtaatatatgagtagcgcatttccgcgtttcgaacttctaatatatcacaatcttacgaaaaaaatgaaaaaaaaagggccc

SEQ ID NO: 113624 - DNA, 474 bp, Zea mays
  unsure (1)..(474): unsure at all n locations
  Clone ID: MRT4577_35109C.1
agcagtggtaacaacgcagagtactttttttttttttttttttttttttttttttactttttttttttttttttttttttttttttttttttttttttttnnannggnngtnaaaattatatttgtttgttaatngttaaaaaaaacaaattatttaacctttgattacttaaggggttttttttttttgcctttgaaaaacagggcttttttttttttgatgatccggagggaggttcccttacaaaaggattttaccccccggtttttttttttttttaccattgtttaggggggatttttgaaaatttccttaacattggcggccgttgaagcttgcttttaaagggcccatttngccttttagggagtggatttaaatttcattggccgtntttttaaaannnngggattggaaaaaccttggggttccccaatttatncgctttgganaaaatcccctttttnccagtt

SEQ ID NO: 113625 - DNA, 193 bp, Zea mays
  Clone ID: MRT4577_3510C.1
tcggccgccatagctgcatagatatttaggcctcttacgaccctttctctttgtccagacgcaccatccgaccaccataagacagactgctaaacctgtcctatagctccacttatttactatatactcttaccaaaagagtcttctgtcttacaaaaacaaactttttaacgctgcataatccaacacacat

SEQ ID NO: 113626 - DNA, 255 bp, Zea mays
  Clone ID: MRT4577_35110C.1
atttaataatactaaagttagaagcttaggatcaaagccatatatagatctaaatattgcttttcttaaggtacataagtttttgaatgagtaatttaataatatttttagaagtgatttgtcagtttaattactttaaataaaatataaaacgctttttaaatgatcttatttataaacagttataattaaagaattagtagatataaatttttttttaattttttttagtttttgatcaacgaaaatcttttt

SEQ ID NO: 113627 - DNA, 260 bp, Zea mays
  Clone ID: MRT4577_35111C.1
gcacaagaagaccaggtggaacatatgcaagcaggggcgatgagaagaccccatgaatccagatcccaaacgcgcatgagaagaccccatgaatccagattggggggggggtctgcatctacatggccgtgtactccgcaccactcccctccggccccgaccgtcgtgcgctcgctgtagccgaggtcggcctcaaccacgacgacgatgcggtctcctcgccccaggctcgacctcctcgctgacctcgccctgctcca

SEQ ID NO: 113628 - DNA, 347 bp, Zea mays
  unsure (1)..(347): unsure at all n locations
  Clone ID: MRT4577_35112C.1
cctacctcgacaagccaatatgaattgagcttcgccaccaataaaaactcgttttttatccaattttttgggtacaaancaaaacatcccacggctacctatcattaccacaccaaacccccaacgacgaacaatccgagactcctcacgccatacatgaggcgcccgggaaagagaaaataccacatcaaatagtgaagctacaacacgacgtgaacctgcatgaaaaagctccatgcgcgcacttcatcaatcaggagcatagaatacatgcttacatgtaggaggacgtgctcagaatagtacctgtgcaataattacaggttcatagaacgggtcaactagac

SEQ ID NO: 113629 - DNA, 212 bp, Zea mays
  Clone ID: MRT4577_35113C.1
attcccggtcgaccacgcgtcgccacgcgtcgccacctccgaaaaatatattatcactaaacaaaaaaaaaaagggggtttaatttaaggtgacgataaatctcatcttcaaactgtaatatactatagtgtacctaatttaattactagtcatcgtttacaacacgactatcgaaaaactttggaatacccaattaatatttctaagcata

SEQ ID NO: 113630 - DNA, 903 bp, Zea mays
  unsure (1)..(903): unsure at all n locations
  Clone ID: MRT4577_35114C.1
ctgaaaactgggagagaactcactaaattttagggtccaagtcctatgtttcctaagcaacagaatttgctgactgaggttcctctgaaatcaacaatagtttgaaaacaacacctgtgtgaaaagaaggtaggacaccctataaactcctagtggaactgtggtagggaatcaccatccacttgttggactttcatcggactataacactgcaaccagtccatacccaccatcaaatcaaatgaaggtagggtaaaaaaacttgggttttttaagctagtgccatcggttttgccggtgtactcatttttaaccatagttgtgttttccgccacaaagtcacaggtcgacgtactccaagtggctgttggaatatagtgagtacacttgagtacctgaccattcgccacattcaccgtcattggctgcctcaacaccattctagttgctgaatgtggccttgaagacgaagtgttgcagcaccatcagaacccgaccaagcagctgcagataaagccatcaagagttgatcattgttttcaggaaccagctccgaagaatcctcgggtgtcaatagatcgcagacttcgatagcatgtagttgcaccgtactggcacatttgttgccagatgaccatttctctgcacaacggtcgcagagaccgcgtgatgcaattcatcgagcactttgtcggcggtggtgtcagggtattccatggcaaccgatctggggcgcctggggcagttgccgagtggatccaggattgttgtcttactgtctttgataccaaatgttagcaccacagatagaggatcgggggaaaaatggtgcttggaggaagaagaggattggagaagaaggcagcgggaagagacagtttgtttttcnagccggacgcgggg

SEQ ID NO: 113631 - DNA, 456 bp, Zea mays
  Clone ID: MRT4577_35115C.1
aaaaaaaacaattgctcacacaaacaccgccacccctggcaaagcaagccccaaaaaaacccaacccccgccccaaaaagacccaccaaaccaaacaaccccccccaaaaccacaacaaaaaccccccaaaccccccccggcccccccccccaagggccaaccccaacccaccggcgcccccacccagggggacccccccccgaaccaagccgggccaaaaaaaggccaaaccggccccccgggacaaatccacaaccccacacaaggccccacaacaaacaagccggacccccaaagggaaaaccccgcgggcccaaaggagggaacaaacaaaaaccaagggcctcgcactaaaagcccggttcccaaaagggaaacctgaccccccaacccccttaaaaaaacagccaccccccggcgagaggcgatttgggaatggccccccctcccccaaa

SEQ ID NO: 113632 - DNA, 414 bp, Zea mays
  Clone ID: MRT4577_35116C.1
cccacgcgtccgccaccctcgctcagctcatctacaaggaccctgaggtcaaggagcatttccatctactaaagtgggtaactgtgtcagatgattttagtgttcttaatcttgccaacaagatatgtaatgcctcagagagagtcctcgaggatgcagtgaagaagcttcaggaacatcttaaaggaaagaggtattgctggagcttattagctattactaactctactttcttgcatgcctcctatgatgtttgtaagttattgtctactaaatcctcaatacgtcgtgtcatatcgtgtgttcctaatggacttgtttgctaatatttagtacaagtccatgtgtgtgagctgtaaaattaaagtagaacataattaaaagcgccttgtttgtaaaattattattatctcc

SEQ ID NO: 113633 - DNA, 391 bp, Zea mays
  unsure (1)..(391): unsure at all n locations
  Clone ID: MRT4577_35117C.1
cccacgcgtccggttaccctgtgagaactcatggtaatgatgagcacaaagctccactggaacaaatgctctgactaatttctgatttcagcatccttgttcctcaattgctctgattcaccctggtggtttgataagatggacttctgctgctgatgatgtcgggaaaacacataaagcaaaaagataaagagtacccttgaggtgcttctttcgacatttgatcttttgcgaggagtcccatgctgaagcaggaccgttgattttcaggataaaagaagttggaaccatctgaagtgtcttctctttaccgaataataggcaatgaaacatcatcaggctgcantcgggaagtatcatgcatcaggtgatctcttggcttgaatctact

SEQ ID NO: 113634 - DNA, 723 bp, Zea mays
  Clone ID: MRT4577_35118C.1
gcaccacgcagtcatcctcgctcgtgggccgtggcgtctgcctgactgcctgtcttgcagttgcagaccgtccaaaacctggtggcctagtggcgatcggcggccggagcagctaaatctaccggcccggcggctgaatcgatcggcgcagcgaccaaatctacggccggcgggcgggaggtggtcccctggaggccggatcggcaagtggggacttgggggcgtcgggctgctggtggggtttcgctggaggctgccgtcgtggagcaccggccaccggggctggcaggcgggcatcagcgatggagtaaagggtgcagcacgacagcacgccagcggccagcagggggcaccgggcaggtgggcagcagcaggggacaggctgcaagcagaaatggacattaaaggtcttgaggcagataaactggagtgcaggctctatgtagggaacctagacttcaggatgtcagagtccgatgtaatcaagatgttttccccttttggaaagattacagccgaggattttctgtggcacacacgcggtccaaagagaggcgaaccccggggctatgcctttgttcagtacaccactaaagagcattcgaagctcagttagcaaaggagaagatgaatggaaagttaatctgcggacgcccaatggtagttcaccttgctagtgagagaagttctctaggctcttcaagttcacatagagcagtcaaa

SEQ ID NO: 113635 - DNA, 275 bp, Zea mays
  Clone ID: MRT4577_35119C.1
gttgctggctactactacgactacaacccagcaaggagagacgacgacgagccgaattcaccagcatggggggccagcagcctcgccggtgttcttcgtgagctcgtccacttgcaggcgtccgggaatgctgctgtcgccgaatgatctcgtggagcttggatggaatggctcatggcatggactgaaaaggagacggaagaagcgtcacacgcaggagatacagcgctgctgctagctcgcacagtcgagatatgctcaggaaggctccgtgg

SEQ ID NO: 113636 - DNA, 3141 bp, Zea mays
  unsure (1)..(3141): unsure at all n locations
  Clone ID: MRT4577_3511C.1
tcgatacaagaagagctacaatcaagactgtgtaaaaaaatttccaaataaaaataaaaacaagaaatccactattggacctgaaagtgacgatgacacttttgatgacatggatgggaaaaagaagtcaaagatcctagctttggtgatgtggtatcttccagtaattgatcgcttaaaacgtttgttctcaaatcctagggaggctgagcttatgcgttggcatgctgaaaatcgcaagcagaataacaaacagattcgacaccctgctgatgcatcacaatggaaaaatttcgatcttatgtatcctgagtttgccaaagaaaccagaaatgtaagatttgctttgggtacagacggaatgaatccatttggtgaaaaaagaagtgtacatagcacctggcccgtgactttaacgatgtacaaccttccatcatggttgtgtcacaaaagaaagtacattatgttgactattcttattcaaggtccaaaatcagttggtgttgatattgatgtgttcctagaacctcttatggaagatatgacaaagctctggaatgaaggagttagaatatggaatgagtattgccatgagtatttcaacttaagagcaattatatttgttaccatccatgattctcccggtggcgccacactatcagggcaaaagactaaaggaaagaatggttgtgtagtgtgcgtcgatggaactgcttccatgtaccttaaatcatccaagaagttggtgttcatggaacacagacggttcttgatgaagcaacataagtaccgaaagatgaaagaggaatttaacaatgaactggaaagtgaaggtgcaccaaagccttatagtgggaaacttgtttttgaaattgtaaagaacattcatgttgtattcggaaagggaaaaaacaaaggagaaaagagaaagagaactgacccttcaacttacacaactttcaagaagcaatcattttttttcaagtacctcccatactggaaggatatggaaatttgccacagcattgatttgatgcatgtaacaaaaaatgtttttgacagcatcattggaaccttgctgggcatgccgagtaagacaaatgacatacttaaatcacgcaatgatctagtagatcttcaaatcagaccggaacttcatccagtggatagtggcaaagggaagccttacctccctccagctagctacaacttgtcagttgaggagagaacaaagatttgcaaatgtttgcgtggggtcaaagtgcccacaggtttctcatccaatattagcaaactagtcaggatgaaggacttgtctctacttggctacaactctcatgactaccatgtgatgatgacagtgttcctcccaattgcggtaagagccctcgaaacagagcatgtcaaagttgtcatcacacgcttgtgttactttttcaatgcggtttcacaaaaagtaatagctttagaagacttggactatctaaaggcatacatcatcgagactatgtgcaagcttgaaatgtgttttcctccatcattttttgatatgcaagtacacctaatcatacatctcgtggatcagataaaaatattagggccactatatttacatcatatgtttcagttggagcgatacctgggagtattaaaaggttatgtgcgaaatcgcgctcacccagagggttcaatcatggagggatacactacagaagaagtgattgagagctgtatagattacatcagtgacggaacaatgataggtgtgcctgtacctaaacatgagggtaaactatgtgggagagggagaatggacaggaaaacttttcgggttgaggattacaagctagtacattgtgctcatggtggtgtactacaacatctcacgatagccgagccttacatagaggaacacctggatgagcttcgtacagaaaatcagaaccgcacagaggactggatcatgagggagcacaaacatcgtttcagcgaatggccatcgtgttttgtgacatcatggcaagcatatgacatcaatgggtacacattctacactaaatcaaaagacatgaaaagtgttgcacaaaatagcggtgttcatatcgatgcttttgacctacatggacagaagaccacatactttggattcatagaggaaatatgggaacttgattatggcccaagcatgaaaatacccttatttaagtgccaatgggtacaacatcccgtgggggtgatagtggataactacagactcacattggtagacttaaagaaagtaggatataaagatgacccgtgggttctcaccgaatgtgttgcacaagtgttctatgtactcgatccagcagatgagaagatgcatgtagttatttctggaaagcaaaaaattgttggagttgagaatgtgggagaccaagatgaggaatacaataagtatgaagagatgttcgtctttaacggtccagagagaatcaagcgtgtggaaaagaaaattgataagaacttaaagccatacatgcggaaaaatggtagttcatgaaaaattgtataaatcaaattgtatttgttatcatgtatgatcgactatgaattgtggttgccaattaatttaaaatctctctagttatctatgtgtgctattataattcatttaaattgtatttgcatatttctgttaaaaattaaatattaattcatttaaattgtatttgcatatttctgtaaaaaattaaaattattttcatatttaaattgtattttcatatttttacaatcacatgcggttttttcttagggtccgtttgggaaaaggatagagcaccacaggcggtcctaaacaaaaaccgcttatgatactattacatcacaggcgtactgaaccgcctgggacatcacaggccggttttttaaccgaaccgcctggggggtaaaaagcctaccgattatatagagccaaattgtcctaggtgaagttgaacttggcacacattnggatgtacataataacggcctgggcctgcttatcgcgttctttttctttgatcgcaacatggaatgttggcctttgtattgagcagcatccttggagctttctttactgcgacgatgagcatgttctggaccagatcgaactcttgg

SEQ ID NO: 113637 - DNA, 272 bp, Zea mays
  Clone ID: MRT4577_35120C.1
aggggacaaccccatggagaggaaataggggccatacctcatacaaggaaacaacatagtttacacattacagacgggtacaaaaaagggggggatttttgacagttccaatggaacgaaatacccatacacaaaggggggctccacttaaaaatggattttacaaaacaaggggggtcaatatttaccctttacacatgtattatgtaaaaagggatgctttttcaaaggaaaaaaggaaagcccttttgtgaatgagggttggggcaaac

SEQ ID NO: 113638 - DNA, 1134 bp, Zea mays
  Clone ID: MRT4577_35121C.1
agcagctattctaccggcccggcggctgaatcgaccggcgcagcgaccaaatctacggccggcgggcgggaggtggtcctctggaggccggatcggcaagtggggacttgggggcgtcgggctgctggtgcggtttcgctggaggctgccgtcgtggagcaccggccaccggggctggcaggcgggcatcagtgatggagtaaagggtgcagcacgacagcacgccagcggccagcagggggcaccgggcaggtgggcagcagcaggggacaggtatacgccatccacccctggatgtattttcactgaattggctatcgtaggctgcaggcagaaatggacattaaaggtcttgaggcagataaactggagtgcaggctctatgtagggagcctagacttcaggatgtcagagtccgatgtaatcaagatgttttccccttttggaaagattacagccgaggattttctgtggcacacacgcggtccaaagagaggcgaaccccggggctatgcctttgttcagtacaccactaaagaggaagctcagttagcaaaggagaagatgaatggaaagttaatctgcggacgcccaatggtagttcaccttgctagtgagagaagttctctaggctcttcaagttcacatagagcagtcaaagacaagaaattggcaggtggttcaggtgccaaatcacaatatactgatacagctgcaaagatagctgctataaaaaataagttgaaatctctggaggatgggggatgtagcacaaaaaaaccaagacttaatccagacaacttgacagaaatcagggaacagtctcataagaagttttgaagcgaggattttttttcgttctctggaacattgagtgcttttgccctctcatactggtgacacttctaaagctgctgctattctataattctagcttcagttagtcaagtgagtcacaagtgtagtgtttccacagtgtatcaaatatgtacaatagtttgtaccgatcatctttttcctgaatgaattgcccttttgatgggggaatcattgtgactacatactgttttgttattgacaacatattctcagtgtgcccctgttgaacaggaaaaaaaaaaaaaaaggccccta

SEQ ID NO: 113639 - DNA, 353 bp, Zea mays
  Clone ID: MRT4577_35122C.1
attcggctcgagccatatcagattatcgtttgcctagtaccacttgcgtggagatcgttgccggcgtgatgaacgcggtctcggtctcgaccggccacgtttggcgggcgtcgaatgtgatcggcctagaggacaagctcgcgcatacaccgtgcataacgatcccagagatcaaggtggaatgcaccatgctgaaagacgtacacatggtagcaaacgacggctgcgttacgaatgcaaaacaattactacacggggccgatgaatggagcgattcgcttgcacaaggaggatgataaagctgaagccaatgccctagatcaactcatgagatggaaaaaagtcaatggaac

SEQ ID NO: 113640 - DNA, 359 bp, Zea mays
  Clone ID: MRT4577_35123C.1
gagcaactaacaatggtaactaggatgagcccgaccttatttacacatgcgcctaaaatgtgcctgcactagggctctagagcctacttaacccgaaaaaccaatctaagcacacacttacatcttctaccactcctaactaaagataatcatccgaattgtcattagaccacggcactcaccaactaaatttctgcctcttaatcttcatgtcgggaacgaggacttactaaccagggcttcagacttacacttcatctgagaaggcaccatgttgaccgactgccaccttactaacgctggaatgcggttttccttgcagctggcctcacacgagcttgctcaagaggagtccacct

SEQ ID NO: 113641 - DNA, 1886 bp, Zea mays
  Clone ID: MRT4577_35124C.1
cattgggtacctcgaggccggccgggactcccgtccgcttctcccctctcctcctcctcacgtcacgcaccccatctcttctctccccctctcgtctcgtccagtcgtcccccactctacccagctgccctgctctgcgtcgctcgccatggcgtcctccacggggagcttggagcacggggggttcacgttcacgccgccgcccttcatcacctccttcaccgagctgctctccggcgcaggggacatgctaggagccggcgccgatcaggagcggtcgtcgccgagggggctgttccaccgcggcgccaggggcgtgcccaagttcaagtcggcgcagcctcccagcctgcccatctcgccgccgcccatgtcgccttcctcctacttcgccatcccgccggggctcagccccgccgagctgctcgactcgcccgtcctgctccactcgtcctccaacatcctggcgtctcccaccaccggcgccatcccggcgcagaggttcgactggaagaaggccgccgacctgatcgcgtctcagtctcagcaagacggcgacagccgggctgccgccgccggcttcgacgacttctccttccacacggccacctccaacgccgtgcgcgcgcacacgacgacgacgtccttaccttccttcgaggagcagcagcagcaagtcgaaaaagccgccgtcccgtcgagcaacagggcgagcggcggcgggaacggcaacactaagctggaggacgggtacaactggcgcaagtacgggcagaagcaggtgaaggggagcgagaacccgcgcagctactacaagtgcacgtaccacagctgctccatgaagaagaaggtggagagggccctggccgacggccgcatcacgcagatcgtgtacaagggcgcgcacaaccaccccaagccgctgtccacgcgccgcaactcatccggcggcggtgcggcggcggaggagctgcaggccggcaacagcagcctctcggccgtagcggcggccggctgtactggaccggagcactccggcgccaccgccgagaactcgtctgtcaccttcggcgacgacgaggcagagaacgggtcgcagcggagcgacggcgacgagcccgacgccaagcgctggtacgtacgtgatcccgcccgagcgagcgagcgagattcattattcgctacccgcgggccgcggttcacaagttgagcgtgtattactactgtttcctcgtgttcctgcaactcatgtatatatgtctgcttgatcaggaagcaggaggacggcgagaacgagggcagctctgcaggcgccggcggcaagccggtccgcgagccccggctggtggtccagacgctgagcgacatcgacatcctggacgacgggttccggtggcgcaagtacgggcagaaggtggtgaaggggaacccgaacccgcggagctactacaagtgcaccacggcggggtgcccggtgcggaagcacgtggagcgcgcgtcccacgacacgcgcgccgtgatcaccacgtacgagggcaagcacaaccacgacgtgcccgtgggccgcggcgccgccagccgagctgctgctgctgcggcggcgggttccggggccttgatggccaccggcggcggccagctcggctatcagcagcagcagcagcagtagccatacaccctggagatgctgagcagcggatcgtacggcggcggcggccccgtgggccgcggcgctgccagccgagctgctgctgctgctgcggcggcgggttcgggggccttgatggccacggccgtcggccagctcggctatcatcatcagcagcagcagcagccatacgccctggagatgctgagcagcggatcgtacggcggcgacgacggct

SEQ ID NO: 113642 - DNA, 1528 bp, Zea mays
  Clone ID: MRT4577_35125C.1
gcggcggcagcaccaagcttgaggacgggtacaactggcgcaagtacgggcagaagcaggtgaaggggagcgagaacccgcgcagctactacaagtgcacgtaccacagctgctccatgaagaagaaggtggagcggtccctggccgacgggcgcgtcacgcagatcgtgtacaagggcgcgcacaaccacccaaagccgctgtccacgcgccgcaactcctccggcggcgtggcggcggcggaggagcaggccgccaacaacagcagcctctctggctgcggcggcccggagcactccggcggcgccaccgccgagaactcgtccgtcaccttcggcgacgacgaggcggagaacgggtcgcagcggagcggcggtgacgagcccgacgccaagcgctggtacgtgtgatgatctcaccagatcgattcgctgctcctccgatccttcacgagttgaggcgcgcggcgccgtgtgtttcctgtgttcgtggaagtggaactcatatatacaccaccatgtatgtccgctttattattgatcaggaaggcggaggacggtgagaacgagggctgctcaggcgccggcggcggcaagccggtgcgcgagccgcggctggtggtgcagacgctgagcgacatcgacatcctggacgacgggttccggtggcgcaagtacgggcagaaggtggtgaaggggaacccgaacccgcggagctactacaagtgcaccacggcggggtgccccgtgcggaagcacgtggagcgcgcgtgccacgacgcgcgcgccgtgatcaccacgtacgagggcaagcacaaccacgacgtgcccgccggccgcggcgccgccagccgcgctctaccggcccgcgccgccgaccgcggacaccgccggccaccactacctcgccgcggctcggccgggcgtggcctaccagacggggcagcagtacgggttcggtgaccagctgggctcgttcggcctcagcggcgccccggcgcagagcggcggcggcggcttcgcgttctcctccggcttcgacaacccgatgggctcgtacatgagccagcaccagcagcagcagaggcagaacgacgccatgcacgcgtcgagggccaaggaggagccccgggaggacatgtttttcccgacgtcgttgctgtacactgactgaaggacaaggacggcaggacatggcgtggtgtggtgtccataaactgttcctttggcacacggattgttgttgttgttgttgttgttgttgtatctaggataggttgaacagatttctttatttgtttggaggcctccatgttggcagtggcagatgcttgccgtgccgcaggggtgtctcccttaacacgtgaaaggggggaaagaaagggatttaggatactagagtctaggacacgtggcaattacacagaaggggtaaagaagttttgttcctcaaagacaaattcacacatgagacttgttgtagtcaggattggacataatttcatgtcacagaacatttgttaagattc

SEQ ID NO: 113643 - DNA, 386 bp, Zea mays
  Clone ID: MRT4577_35126C.1
ggctggtggtccagacgatgagcgacatcgacatcttggacgacgggttccggtggcgcaagtacgggcagaaggtggtgaaggggaacccgaacccgcggagctactacaagtgcaccacggcggggtgcccggtgcggaagcacgtggagcgcgcgtcccacgacaagcgcgccgtgatcaccacgtacgagggcaagcacaaccacgacgtgcccgtgggccgcggcgccgccagccgagctgctgctgctgctgcggcggcgggttccggggccttgatggccaccggcggcggccagctcggctatcatcatcagcagcagcagcagccatacaccctggagatgctgagcagcggatcgtacggcggcggcggcggctac

SEQ ID NO: 113644 - DNA, 2120 bp, Zea mays
  Clone ID: MRT4577_35128C.1
ccacggcggccgccggcgtccgctctcccgcttccggggacgcacgcaccctcacgcatccgatctgatctctccccctctcgacccgtcccctggtcctccgctctgcccagctcgctcgccctggcgtcctcgacggggagcttggagcacggcgggttcacgttcacgccgccgcccttcatcacctccttcacggagctgctctctggggcagcagcggacatggtaggagccgcgggcgccgatcatcaggagcggtcgccgagggggctgttccaccgcggcgccaccaggggcggcggcgtaggcgtgcccaagttcaagtccgcgcagccgcccagcctgcccatctcgccgccgccgatgtcgccctcctcctacttctccatcccgcccgggctcagccccgccgagttgctggactcgcccgtcctgctccactcttcctcgaacttcttcgcgtcgcccaccaccggcgccatcccggcgcagaggttcgactggaagcaggccgccgacctgatcgcgtctcaatctcagcaagacgacagccgggctgcggtcggcagcgccttcaacgacttctccttccacgcgcccaccatgcccgcgcagaccacgtccttcccttccttcaaggagcagcagcaacagcaagtcgaagcggcgactaagagcgccgtcccgtcgagcaacaaggccagcggcggaagcggcggcagcaccaagcttgaggacgggtacaactggcgcaagtacgggcagaagcaggtgaaggggagcgagaacccgcgcagctactacaagtgcacgtaccacagctgctccatgaagaagaaggtggagcggtccctggccgacgggcgcgtcacgcagatcgtgtacaagggcgcgcacaaccaccccaagccgctgtccacgcgccgcaactcctccggcggcgtggcggcggcggaggagcaggccgccaacaacagcagcctctctggctgcggcggcccggagcactccggcggcgccaccgccgagaactcgtccgtcacgttcggcgacgacgaggcggagaacgggtcgcagcggagcggcggtgacgagcccgacgccaagcgctggaaggcggaggacggtgagaacgaaggcagctcaggcgccggcggcggcaagccggtgcgcgagccgcggctggtggtacagacgctgagcgacatcgacatcctggacgacgggttccggtggcgcaagtacgggcagaaggtggtgaaggggaacccgaacccgcggagctactacaagtgcaccacggcggggtgccccgtgcggaagcacgtggagcgcgcgtgccacgacgcgcgcgccgtgatcaccacgtacgagggcaagcacaaccacgacgtgcccgtgggccgcggcgccgccagccgagctgctgctgctgcggcggcgggttccggggccttgatggccaccggcggcggccagctcgggtatcagcagcaccagcagcagcagccatacaccctggagatgctgagcagcggatcgtacggcggcggcggctacgtgccccggcgccgccagccgagctgctgctgcggcggcggcggcttcgcgttctcctccggcttcgacaacccgatgggctcgtacatgagccagcaccagcagcagcagaggcagaacgacgccatgcacgcgtcgagggccaaggaggagccccgggaggacatgtttttcccgacgtcgttgctgtacactgactgaaggacaaggacggcaggacatggcgtggtgtggtgtccataaactgttcctttggcacacggattgttgttgttgttgttgttgttgttgtatctaggataggttgaacagatttctttatttgtttggaggcctccatgttggcagtggcagatgcttgccgtgccgcaggggtgtctcccttaacacgtgaaaggggggaaagaaagggatttaggatactagagtctaggacacgtggcaattacacagaaggggtaaagaagttttgttcctcaaagacaaattcacacatgagacttgttgtagtcaggattggacataatttcatgtcacagaacatttgttaagattca

SEQ ID NO: 113645 - DNA, 529 bp, Zea mays
  Clone ID: MRT4577_35129C.1
gtgtatcttcgcccccggcgaaggcgctatcctcccgaccacccggcggtgccggtacgccggtaaggcaggttgccagaccccgcgaccccgatcccgtgacctaccccggctcatcctctcaagccagacggtctggctgctgtgcatccccgttttggcggctaccttacctctggcaaggcaatcccccctcacccctggcaagcacgggagaacatggagagtgcttcagatgtacaaatgcaacatcgtgctgaagattccgagactacaattgagatcaaaatcaagacattggattcccagacatacaatttgcgtgtgaataaatgtgtgccagttcctctgttgaaagagaaaattgctactgtaactggaatattgtctgaacagcaacgcttgatttgtcgggggagagtcttgaaggatgatgaactcttgtctgcttatcatgtcgaagatgggcatacattacatcttggtgttagacatccaggccaggcagctacatttggaaatgcagcaa

SEQ ID NO: 113646 - DNA, 669 bp, Zea mays
  unsure (1)..(669): unsure at all n locations
  Clone ID: MRT4577_3512C.1
gggcgattgggtatacaanaaggggccgggataccactgttttcccctgtagctcgccggagatccatgcctttgtgagctcgagtggagaaaaaaaaaaaaggagcagcgaagagcgaacgaccgagatgctggagaagctgtgggacgacgtggtggccgggcctcgcccggagacgggcctcgagaagctccgcaaggccaccaccgcccgcccgctcgtcgtcgtcgacaaagaaataactacatgcatcttctcatctgctggatcgagtacatagaacacttgtgcaacacattcggcgagaacccacgggtcatctttatatcctactttctttaagtctaccagtgtgagtccgtagttatccactatcacccccacgggatgttgtacccattgacacttaaataagggtattttcatgcttaggccataatcaagttctcatgttttctctatgaatccaaaatattctgtccctgtaggtcaaaagcatcgatacgaacaccgctattttgtgcaacactttttatatcttttgatttagtgtagattgtgtactcattgatgtcatatgcttgccatgatgtcacaaaacacgatgccccagaaatcaaattcttcattgttttctcttccaaaaaaaaaaaaaaaaaggggcggcc

SEQ ID NO: 113647 - DNA, 1592 bp, Zea mays
  Clone ID: MRT4577_35130C.1
gtagccgccccgccgccgtacgatccgctgctcagcatctccagggtgtatggctgctgctgctgctgctgctgatacccgagctggccgccgccggtggccatcaaggccccggaacccgccgccgccgcagcagcagctcggctggcggcgccgcggcccacgggcacgtcgtggttgtgcttgccctcgtacgtggtgatcacggcgcgcgtgtcgtgggacgcgcgctccacgtgcttccgcaccgggcaccccgccgtggtgcacttgtagtagctccgcgggttcgggttccccttcaccaccttctgcccgtacttgcgccaccggaacccgtcgtccaggatgtcgatgtcgctcatcgtctggaccaccagccggggctcgcggaccggcttgccgccgccgcctgcagagctgccctcgttctcgccgtcctcctgcagcgcttggcgtcgggctcgtcgccgtcgctccgctgcgacccgttctctgcctcgtcgtcgccgaaggtgacagacgagttctcggcggtggcgccggagtgctccggtccagtacagccggccgccgctacggccgagaggctgctgttgccggcctgcagctcctccgccgcaccgccgccggatgagttgcggcgcgtggacagcggcttggggtggttgtgcgcgcccttgtacacgatctgcgtgatgcggccgtcggccagggccctctccaccttcttcttcatggagcagctgtggtacgtgcacttgtagtagctgcgcgggttctcgctccccttcacctgcttctgcccgtacttgcgccagttgtacccgtcctccagcttagtgttgccgttcccgccgccgctcgccctgttgctcgacgggacggcggctttggtcgtcgcttcgacttgctgttgcttgaaggaagggaaggacgtggtctgcgcgggcatggtgggcgcgtggaaggagaagtcgttgaaggcgctgccgaccgcagcccggctgtcgtcttgctgtcgtcttgctgagactgagacgcgatcaggtcggcggcctgcttccagtcgaacctctgcgccgggatggcgccggtggtgggcgacgcgaagaagttcgaggaagagtggagcaggacgggcgagtccagcagctcggcggggctgagcccgggcgggatggagaagtaggaggagggcgacatcggcggcggcgagatgggcaggctgggcggctgcgcggacttgaacttgggcacgcctacgccgccgcccctggtggcgccgcggtggaacagccccctcggcgaccgctcctgatgatcggcgcccgcggctcctaccatgtccgctgctgccccagagagcagctccgtgaaggaggtgatgaagggcggcggcgtgaacgtgaacccgccgtgctccaagctccccgtcgaggacgccatggcaagcgacgcagaggcagagcggagcagccaggcggaggtcgagatccagggggagagatcagatcagagatggggggtgcgtgcgtcaccgatagaggagtggctgaagggagtcccggccggcctcgaggtacccaatg

SEQ ID NO: 113648 - DNA, 382 bp, Zea mays
  Clone ID: MRT4577_35132C.1
attatcctatttttgatctattgattgttcttgtttggcctaaagaccaacctatgaggccccaaatgccctattgggccatgtaaggaactatatgcctgctggatcgctggatttatccgggggttttaattggcaactgggcccaagctatgagcacactatcccgtaattcaaaatcaaaaggactctcatttttccctgacaaaaaatatgacggctgcaacagtcttgtgcccatctgttgaagcttgagcatatctgagaataactctggaaaccaacgggttttatcgcacgcacttttttaataggccatttccggacaacggaatattgaaaaagggagcaaatcccctttctattaaattgtcaggggcca

SEQ ID NO: 113649 - DNA, 504 bp, Zea mays
  Clone ID: MRT4577_35133C.1
ggggtctcttccacaagtgagctaggcatccggcgacgtaataagagagagaaacgtctctctcctctcggcgtccccgctcctcaacctctcggctgctgactgccagcctgactgcctggaaaaaggagattggcatggtggctaagcgcatcctcaaggagctgaaggacctgcaaaaggacccccccacatcatgcagtgcacgccactgctgacgaggacatgtttcattggcaagaaacaattatgggaccacctgacagcccctatgctggcggcgtttatttaaagaacattcatttcccgccaaattagcccttcaaacctccaaaggtttctttccagacaaaggccttccatcctagtatcaacatgactggaagtatatgccttgacattctcaaacagcagtggagacctgctttgacaatttctaagggcctgctctccatctgctctctgctgaccaacccaaacccgaacgaccctcttgtcccggac

SEQ ID NO: 113650 - DNA, 459 bp, Zea mays
  Clone ID: MRT4577_35134C.1
aatcaatgaggtcgatcaatattatgttttgcgtgctcatgttccatatcaacaaggaatctatgctgttcaatggctcacactgcagcacgcatggcatacacatagtcactacgaggcacatatgcgactgacttctcagagttgacaaagcccttggaccatgcaatgaggccatgcacagagaccacctcagtatccgactcatctacgttgaggtgaacgaccccgcactataagcacgttcatcctctatgtggggactaacaccatgacaggcaccctggttctggctactttaggacacgcgaaactcataggcctatcactaaggaaagcacccaaagtaggtgagatgaaaagcattccagctatgggaccagttgcggttgaaaaatatcacaggaaagccttgcgcggggcttgagcggtcttaagtgcaaagcattctttgaagac

SEQ ID NO: 113651 - DNA, 252 bp, Zea mays
  Clone ID: MRT4577_35135C.1
ccataaaagactgcatcccaatccacatcctcctaccactttcaccacgtcgcaaacccctactgctacctctactcccttgagcatgacaatcaacctcacgattacatacaagacgacaagaccatttacgaatcttattacgctcccaacaccatcttcaagaaaactgatgctaacaaacactttcaaattactgtttttgacgaccttgaaaccaatctcatacatgagctcaaaacagaattctac

SEQ ID NO: 113652 - DNA, 1991 bp, Zea mays
  Clone ID: MRT4577_35136C.1
aattcggcacgaggtagcaacgttgtcgttgggcttggaagcatcgtcccgtgcgcgcacgccgatggatgaccactactacgtctacctcggactggcgctggtgtcgctgctcgttgtcgtgctcgcgaagcgccggcgcggcccggtggacggccacggcctgcggcttccgccggggccgtggcagctgccaatcatcggcagcatgcaccatctcgcgggccagctccctcaccgcgcgatgcgcgacctggcgcggcgccacggggccgtgatgctgctccgcgtcggcgaggtgccgacgctggtggtctcctcccgcgaggcggcgcgcgaggtgatgaagacgcacgacaccgcgttcgcgtcccggccgctgagcgccacggtgcgcgtgctgacgaacaacggccgggacatcatcttcgcgccctacggggagcactggcgccagctgcggaaggtggccatcacggagctcctgagcgcgcgccgggtgctctccttccgcgccatccgcgaggaggaggtcgcggccacgctgcgcgcgtgcgccgccgccgcggcggagtcgccgccgcgccccgtggagatgcgcgcgcggctgtccgcgctcgtggccgacgccacggtgcgcgccgtgatgggcgaccggtgcagggaccgcgacgtgttcctgcgggagctcgaccgctccatcgggctgtcggcggggttcaacccggccgacctgtggccgtcctcccgcctcgtcggcctgctgagcggcgccgtgcggcgcgccgaggagtgccgggacacggtgttcgggatcctcgacggcatcatcaaggagcacctgcagaggatggacagcgccggcgccggcgccggcgccggcgaggctgcaggcgaggaccttctcgacgtgctgctcaagatacacaaggatggcagcctccaaatcccgctcgacatggacgtgcttaaagccgtcatctttgacatcttcggcgccggcagcgagacgtcggcgaccacgctggagtgggccatggcggagctgatccggaaccccaaggcgatgcagcgggcgacggccgaggtgcgcgaggccttcggcgcgcgcggcgcggtggccgagcacgagctgggcgagctgcggtacctgcacctcgtgatccgggagacgttccggctgcacccgccgctgccgctgctgctcccgcggcagtcccaggagccgcgccgcgtgctgggctacgacgtgcccgcgggcaccaccgtgctagtgaacgtctgggcgctgggccgcgacggcaggtactggccgggcgaccccgaggagttccggcccgagcggttcgaggccgaggccagcgcggtggagttcaagggcgccgacttcgagctcctgccgttcggcgccggccggaggatgtgcccgggcatggcgttcgggctcgccaacgtcgagctcgcgctcgccagcctgctgttccacttcgactgggaggcgcccggcgtgtctgaccccgccgagttcgacatggccgaggcgtttggcatcaccgcgagacggaaggccgacctcctactccgccccatcctccgcgtgcgcctccctgttcccggtgtctaatcgccgctctcgccgcgccgataatggtttgctagctcgctacttgtgtcatgtgaattcacgtgatcgacaagctgatctggctgaggatttggccaccggcgagccccggcaggggacatggtgtgtcgtttcccccctatggcctactataagctagtagtttaagaacgctaggtccaagcccatctacattatgggcctacctgttggctttcaaaggaggacacaacctctaattttatgtcttttatgtagcgatgacaaaaaaaaaaaaaaaatgtatacctgcggttacgtatgtaatgggtgtgcacggtatcgtaaatatgtgggtacggtgaagctatcaaattttccgccattg

SEQ ID NO: 113653 - DNA, 336 bp, Zea mays
  unsure (1)..(336): unsure at all n locations
  Clone ID: MRT4577_35137C.1
gagggacgacccacgcgctgcgnaaccaccacatcctactcgcggctaacccaactatcaacccctaatccaaaccgccacgagacgacctacaaccctgacccagatcctcactacaagcaacatacttctcctcgctaccacagttaaactccgggatataatgatagtgacaaccataacccagctcctccataccaacgtgaccacactccttatcatggcggaagcccaccacctccttaccaacgaagaaacccaccacctgtctaccaggcaagaaacagaccaccttcttagcaacgaactacgccaccagctccaccacctctttat

SEQ ID NO: 113654 - DNA, 387 bp, Zea mays
  Clone ID: MRT4577_35138C.1
gtccccttcttcaaccctggtcaaaccttctacggtttcgactctcataatgctaatgagtctggtatcgctctgccgactctagcgactagcttctacccaggagctgtgggcgctcaacaggctgcgtcaaatatttcatctccttccgacctcagccggcccatgtctgcgcttgcacttgacgcccatcaaatgcaacagatgcaatttgctgcaccagcccccgttcacggagacccgaacgctttcctgcagccgtggtcgatgccgttcaattcccgcatgtccatctccaacccccaaaccatccttggcttgggtcttcgacgtgcttcggcgacttccggcattcagaacgttcgccacaaataaccagcagttcca

SEQ ID NO: 113655 - DNA, 521 bp, Zea mays
  Clone ID: MRT4577_35139C.1
ccggccgggctgacgccgatttatcgatgaagtgccgagcgtcgcggacgtccccgaggtgatccatgtgttcgtggattaggagggttgtgccccttgctctaggatgaggccatgtgcgggccatagctgcatgtgctagtggccaactacccatcaattttggcttgctgtaccactgctttctctactaagttgcaaaggtttcggtacatcgccctggcctatggtttgtctggcttggggatggatcgaagcatcatggctgttgtggccatgttttatccgaggttgaggaaggactgcgccccatcgttgctctcagcgagctagtcacataccttcctcgtccgaggtttctcggcttcaaggcgtttccatccgaggttctctaagtactagacgcgactaataaacttgctcatttatgtgggttgtatgactagaactatatatagacttaaagaactgtgctagtcacataaccaataagcaaaaaaaaaaaaaaaaaacccgcggcc

SEQ ID NO: 113656 - DNA, 734 bp, Zea mays
  Clone ID: MRT4577_3513C.1
ccgggccggcggatgggtgctgcgcggtggtacgtcaccgcatttgcacccagctttcctcccatcccatggcttccctcctctgccccgcctcttcctgcccctctgcttcactgcgccgcacagccgcctcccccgctgcaccatccttcgcctcaagtcggcactacggagccccgcttacgttccgagtcgcctctcagccgccgcaggcccttgccgcggccccttacggctacggcagcgacctgctcaggcccatcgacacacagacgatcatcatagccgccgccgtcgtatccgcagtctccctctctctcgtcctcggcctcaagggcgacccggtgccgtgcgacaggtgcgctgggaatgggggcacgaagtgtgtgttctgcaacgatggcaaaatgaaggtggaaaatggagtcgttgagtgccgtgtatgcagaggagcagggctaatactttgcaagaagtgtgctggttctggatactccaagcggttgtagcggaatcccggtttggctggcattctgtgcagttttacatccgaaagatggactttgtacagatgtatagactctcttctcttctctatcagcaaatacgtatgtccaggcagagatgagcttgaagggaagctgatctacagtctgctgatatattatcagttgcagttcattgatgatgcgcttcttctctttatatcaaactgaaaacacaagtctgctgat

SEQ ID NO: 113657 - DNA, 453 bp, Zea mays
  Clone ID: MRT4577_35140C.1
gtgcttgggtttttatttcatttttcggggaccaccaaaccctgaaaaaccaataccccctaaaaaacgcttttccctttacccattttccccaaaaaaaattttgggcctaaacccattcccctccccttaatttgaccccccaacccaaaccctttgtctaaaagggaaaaacaaaatgccaaaccccatggtaaaatttttgcaacccccaaaaattcttataaaaaatttatcaactgttttttcccaaataaaatctttttcctccctagcccaacggggccaaaattgtttgttcccccccccttacccataaaccttaaggccctttaaagggttttcaaatcttttcaaaatatttttttttttccccccccctaccctcaaatattattgtcaacccaccccccccctttttttggtactttacccccaaacccccccaggcca

SEQ ID NO: 113658 - DNA, 435 bp, Zea mays
  Clone ID: MRT4577_35141C.1
tcgggagtctgatgaagttgatgaagaagggactgacaatggaggtgccaagcgacaagtcaagctttcaagcctaggcttcactggtttcaaaaggaaaaccgaggatatcgaatcaagcggaaaaggtcgttgcaaattcttccaggcttgcaaacttgagttggtcaggaagtttcagtgatgtgtcctaatttggtagtacgtacttatatttgtggtagctggagtgtttggtttagtttgttgtagagcctaatttgaaactggtctaaattggatgttgagattggaatgggaagataatgattttctcgagggatggtcaaagaaatggtttattttcacggcactagacggcacctttatgagtgcgtataagcttgctttaaagctagagcgtgcatctaaaatagtttcatatccctttccctc

SEQ ID NO: 113659 - DNA, 193 bp, Zea mays
  Clone ID: MRT4577_35142C.1
ggcacacagtggcgcgcaacaacaacgtggtgctgcccgggtacattgtccgctcgcccaggggggaagacatgccctcatcaatagcgccgacatagactgcgcgtcctcgacggccgcggcggtccctggctgctggtgaagaaccactacctatccagcgacccttacatgcgcggcacgatgcagaatt

SEQ ID NO: 113660 - DNA, 326 bp, Zea mays
  Clone ID: MRT4577_35143C.1
taccctaaaaatcttaatctagcattgctttgagatctaatggtataacatgtagatatactaggacacccttgaatactaacatatatatgcacccatattacaacacactaacatgctctctgcatacttaccttaacccaaagacatacatacagatatattagtcaaattatattcacaactttccatgttcctaccatgtacgttgcaattcaagcatgtctttcactctatgccattggacttactactattattgttctcgactctggtgatagtgtgagtcacactgtacccatttattaaagatattccctttccca

SEQ ID NO: 113661 - DNA, 322 bp, Zea mays
  Clone ID: MRT4577_35144C.1
ggctctccactctctgtggatgacgcttacgtgagacccaaaagtgggaaccaatacaaaccatcagaggacacttaagagtgatgaggaactgattgagagattgaagtcagaggggggtaacacctcttacagccggtaagaaccctggacgggggggccctagacattatttgcaagcagcgaaatcctcatctatcagtaaaagctgaagacttttattaccagccaaggagggattcgaggagccacgaatatgcgctgaaatcactcacgtcggaggtttccctcgagcccgagccaaccgggggtttcacgccca

SEQ ID NO: 113662 - DNA, 200 bp, Zea mays
  Clone ID: MRT4577_35145C.1
tagcgttcttcagcgcgctgtctgcaggccagtcttcctcgatccccggccgggagaagaagacgacgccgacgatgaaggtgtcggagctggcgctgtggtcggcggcgcttctgctggtggcgcaggcgccgtcggcggcggaggcctcccaccacggcggagtgggcctaatgctggggtactactagaagatctgt

SEQ ID NO: 113663 - DNA, 540 bp, Zea mays
  unsure (1)..(540): unsure at all n locations
  Clone ID: MRT4577_35146C.1
ccggccgggcccgcccgaatcgccgcggccacactgcgtgcgctgtgcccccgccctggctatcctcagtcgctggtggagatggtcggcacgaacctgttccgcgcaatgccgccgcgcgtacccggcgctgcccttgacagcgtcgacgaggaggcgccggcgatggcgttggcgtgcgcgatcgagcagcaaaccagcgcgcacgggcgggcggtggtgcttcgtttgctttctcacgtacggcgaccgtcacacagggaagctagtgagtcccggagaaccaacattggacgagaaatttcagtatttgggatccaattcaccagcctttcagtatttgggacccgattagcttgccttcattcaattgacactgaggcacgcgaattcttcgtttcaagtgtttttctcctcctttattcgttttatgtttttttctattttctttcgcctccggggccttctgcttttcctaccttcttttgctttaanaaagtagaagctaaaacgaaaaaaaaaaaaaaaaaatttgcggcc

SEQ ID NO: 113664 - DNA, 465 bp, Zea mays
  Clone ID: MRT4577_35147C.1
gaacagaccaacaagagctatatgcacattgcagacagcagggaagctcggtccagaatcatcacgctcaagctgacaaaaaaacaaggctgcaggcacaacatcgccgtatgtcctagcgaagctctagaaaaaactcttaacacagaacattcagaggattaatgcgtgatcaggagcctgggcagggggatcccgatccctttgatcatgtatgatgctaagatggagtccattgcccttgaggacgctcacccacggatgattaaccttgccgagggacaacactgtacgcataaggggggcgaattggtggtcaagcgcagtcctccacttgcaatgggctcaaaggtgcccttgcgatctcgtccctggtaacagataacacccacgcggccagtgctcatcttcaggcagtgagcatgaccacatggacaacatcaaactgccctaagaccacaatct

SEQ ID NO: 113665 - DNA, 557 bp, Zea mays
  Clone ID: MRT4577_35148C.1
ttttttttttttttttttttttttgaagaaaactacacgtttatcagaaactatcacacggacgagtacaccccatactcttatctagatccctgtatgagctcgatcagtaccaagcctgtttttgttgcacatgacatgcatgctgtcaacctatgctgctccgatctctacaagccaagagcccccaacattatatactgaaaaaaaagagaggataatttccagctactgatacaaacaacggactaaattgacacatcaaatcctaccgacctacatgatccatacaccaacattacgtcgttgttacgtttgtcggctgcatgcatgccattgccaagccacgccactactccgatccacagctactagctagacttggtacccgccggcaggccagtacctctccaccagctgctccacgtccaagccctggtaccgggccccggccgccgagtccgcgccgaaccctccgtccgcgccgggcacgatcacgcagccgccgagccccgccgcagccgccgtcgccatctgcttctgctggtggtgttcac

SEQ ID NO: 113666 - DNA, 189 bp, Zea mays
  Clone ID: MRT4577_35149C.1
ggacacatgggcatggtgatcgcccaaatctcgaacactgctactgcgacactaaaaaacgatatcgcgcgacacctgccggtagatcgattacatcttctacgactaggggctagactccctccgctacctggtgctggtgatcattgtgccatcgaaccacgacatccaccagggagtgcaccggca

SEQ ID NO: 113667 - DNA, 914 bp, Zea mays
  Clone ID: MRT4577_3514C.1
atggaagagaaaacaacgaagaatttggcttctgggccatcatgttttgtgacatcatggcaagcatatgacatcaatgggtacacaatctacactaaatcaaaagacatgaaaagtgttgcacaaaatagcggtgttcgtatcgatgcttttgacatacagggacagaagaccacatattttggattcatagaaaaaatatgagaacttgattatggcccaagcatgaaaataccctttatttaagtgtcaatgggtacaacatcccgtgggggtgataatgaataactacggaccacactggtactcacactggtatacttaaagaaagtagaatataaagatgacccgtgttctcgccgaatgtgttgcacaagtgttctatgtactcaatccagcagatgagaagatgcatgtagttatttctttgtcgacgacgacgagcgggcgggcggtggtggccttgcggagcttctcgaggcccgtctccgggcgaggcccggccaccacgtcgtcccacagcttctccagcatctcggtcgttcgctcttcgctgctcctttttttttctctccactcgagctcacaaaggcatggatctccggcgagctacaggcgagtacagtggtgtgcccggcccgggccggcctccggctttttgacgatccacagcctataaaaacatagagcgacacagctgtagtagtactgtacaagtcgggcagtgtgggactgcaacatcaattgtcatgtgttgtgtggttggcacttgcaagtggtggtgtaaccatgtgctgtgatgttgcagccatgtgcgcgcggtggtcatggtcgattttgctctctgccgtttgaacattccgaccatgcctgaactggataaagatttcagtatataatagtgtactgttact

SEQ ID NO: 113668 - DNA, 520 bp, Zea mays
  Clone ID: MRT4577_35150C.1
ttcatgcgtgagcccacgcttacgtccacgcgggggcgggcagcacacccagaaccccacggcccacgggggcgagcaccagctcacttttaagatcttatcttaggccgagtagggctactgtctcactgtacgtgccagacacggggcgcgtggcgccggccaacccgcgcgaccagcactagcactgatacacggacatgcgctcaagcacctaagttaaggacgaggtgggctgccctgagctcgctgtattcaacaaagccaatgagctcggcattaagcacttcctaggccagtctcacccgatggagctggttcggttcaacccggagtactactgcgagtcgccgctgtggacttggagcttcgacatgagcaagggcttacgctgcatccgcatggtgaacaacattcgcctcaacttcgacgccttccacagcgacaagggccacggcggcgtgcacgacagctccaccgtggtgctgtgggagtggtccaagggctacaaccagagctg

SEQ ID NO: 113669 - DNA, 616 bp, Zea mays
  unsure (1)..(616): unsure at all n locations
  Clone ID: MRT4577_35151C.1
gggaacaccgacatcgaagcggcgaaccaaccgccgcaatcgggccacaccaatcaccgccgcaaccacaggcatgccgcggcccccgccgccgggccgcgggaccccaggcgcaaggcggccgatccgggacttcttcgccacctggctcgccaccctccgctcaccgctcctcccgctgctccgccgcgcgctctccacctcctcctcgtccggctcctgggacgacccgctctcctccgccgccgcggctgtcgaggctcacttccaggcgcactggtccgcgctcgacgctgccgcacgccaggacccggcgcgggtcatcgccgcgggggactggcggtccccgctcgagctccccttcctgtggcttggggatgtccacccctccctccttacctcgctcctccgcacgctctcgccctcgccgcgactcctcgctgccgtcgaccgcgtcgaccgccggatccgcaccgncgtccctgccgtctncgaccgcctccgccaggcccaggaagctttcgtggccgccgaggcaaccggcgccgcagacgtggaggcgttcttggcggagctaaagggcgttgctcttgaaaccaaccggctccgtcggggc

SEQ ID NO: 113670 - DNA, 466 bp, Zea mays
  Clone ID: MRT4577_35152C.1
gtcgacccgcccgtccgatgatggtcagccacaagattgccaagaacggccccgctgatgagatcgagctctctgttgctcaggctctcttcgatttggcgaacaacgtcgctgacttgaagaaggagctcaagccccttcagatctccagcgccaaggaggttgagaccggcaacggcaagaaggccattgtcatcttcgtccccgttccccagctgaaggccttccacaagatccagcagagactcacgcgcgagctcgagaagaagttctctgaccgccacgtcgtctttgttgcccagcgtcgcagcatggctaagcccatccgcacctcccgtgccaagcagatgcgtctccgctcccgcaccctcacctcggttcacgagaagcttttggaggacttggtctaacccaccgagattaccggcaagcgtacccgtgtccagactgaacagaagcgcatcat

SEQ ID NO: 113671 - DNA, 397 bp, Zea mays
  Clone ID: MRT4577_35153C.1
ccggccggggcagggatgttggcggaatgcgggctcgggctgctttttagattttgtggccgatgggctcttggtgggccgacctgtccgcgggctgacgtgcccacggttcaggtttttttccctccgtgttccgtttgggcgagcaaggaaaggaaccatgctgtgctggtgcagtgatgctgatgcaaatagtaggctgctctacgtatgtgtttttgtccctttttgggatgtcctgaaaactcatgatgtatagcacggtagctcctgcctacttggtagcaggacctctctggctgccacgcatgtttatgcactttcctctttattattatatcaatctattattacaaaaaaaaaaaaaaaaaaaaaaaaaaaaaaaaaaaaagcggcc

SEQ ID NO: 113672 - DNA, 524 bp, Zea mays
  Clone ID: MRT4577_35154C.1
aggtaccagctccagtgaggctttcttgcttggaacggttgcctcagaaaagatgcttgagaaactgaaacataaatctggaagatgtgagcctgctttagaaaaggctactgtggaactggagcatggtatagacggtttgaagtactttgtttgccttgatccatgacaggaaacgacacaagattggtgaggtgatcgccaaatcttgcctggagaaagggatctccaaagttgtcctagattgaggcagattcctctaccatggcataaatgatagaactcggtgctagaagcagttccgcatgttgtccaccccaaggacgatggcttgataggatggccttccatttggagcagatgatattgtgctctgatgcttaagagtgagtcgtagggtgacacacgataaaatttatgtatgataaaatcacaaacggattacgaaaccttttcttttttacagtatatcacatttgtacataaattatcttggtattatatataagttatctttgtattat

SEQ ID NO: 113673 - DNA, 474 bp, Zea mays
  Clone ID: MRT4577_35155C.1
tttctttttatttctttttctttttctttcttttatttttcttttttctttttttttttttggggagcaacaaaccccaggcccaggattttatccgggtccattaaaccccggggggggggggatcactatttatcggataggacagctaaattcaacggggggggggggggccccaaacaaaaagaaaaggatgcgggggttctcaaaactgacaggcagggaggggtcaaagggaaatccaagggccacggacccaggctcccaaaccattgggaagatttaccctggggaaaatccaaacacaatacacatggggccccactttaccctaactactattccttgggaaagggaaaacaactatgttaaaccggggggtattaacaccagttaacccccgggtctggacaggaactacctgaccacgggagaagcaaagggccctttgcgcggggaactgaaaccgaaagc

SEQ ID NO: 113674 - DNA, 351 bp, Zea mays
  unsure (1)..(351): unsure at all n locations
  Clone ID: MRT4577_35156C.1
tccctaatagtgagtcgtattacttgntgaccatgtttccgtgaaagtgcgtagtacatgtcaccacaggttttccattaacctctctgtctgcctcctgaagttactcaaccgggtgttcggtgttgccaagattaccttgttcattctctacacatgttgtcaactagggtcacacggaaagtttatatattatcataccattagagttatagaattggttcccaaacctggagtagtatgtcattctaattcattcgttcctgcagctttgactttcgggaccgcacctcgtcaaagttcatctgttatcaagttcaaataataggagtttccttacgttaacacatt

SEQ ID NO: 113675 - DNA, 637 bp, Zea mays
  unsure (1)..(637): unsure at all n locations
  Clone ID: MRT4577_35157C.1
tcgcgatctagtagtggttttttttttttaaatttttggaggctgctcaaataaaatatatatactctgtacgttattcttacactgcatgcattgctgcgcaccgcggattgtgctccacttgcactatccaacgaagagtctggacgacaaacatgtacgattgcgataaagaaatgcgccgtggcaacgaggattgtggtttggaagaggcacgcgagaccgatccgtgaatccgtcccgtcctcaccttcacggccataacgtgccaagccctttcatcgtctaaagaggagagaccatctcgtactcacccaacctcctccgcgaacggaacaagggtgccgccgagccaaccagctgctgcaagaacaccagggccgcaagcacgatcgccgtgcacggcacgatgacgtcccaggcgacgccgtaccggtcgtaacgcgggctcgcgaagacgatggacggcctggagctcggcacgtagccctgcgccctgatcacgtcgtacacgtggggcatcgcgcggaccacggtgctgccgatgtagaaccacggcgtcagggctccggccctgacgccgccgggcgagagcgcgttcatgacgacctgcgggagcaggaacgcgtnctgcgcc

SEQ ID NO: 113676 - DNA, 333 bp, Zea mays
  Clone ID: MRT4577_35158C.1
gaaatgtataatctggaggtccactctgagaatatgggagcacagacctttgatggggcttccattcagaaacaatgtgagctccagaatagcgattactcccgattcaacgctaccgagacatcgcccatcgtctttgacgttgatcctctaagagacgctagtctctgaaaacgcgaatgatgcatgaggttgatcatacccaagctgagatacttgttcatataataactgatgggctggctccggacgcagaattacaatttttatgccacgtagtggtccaagagcaattacagactttgggtctgtaggacctgaaggcggctgtat

SEQ ID NO: 113677 - DNA, 199 bp, Zea mays
  Clone ID: MRT4577_35159C.1
aaactggtgctcacatcatacattgatcacaatagaacatacaggcgtcgagggtggcacaagggagcatgttcaaacccatctagctggtaaccatgcacaatgacgactccctacgatacctcatgactgtcaaaacaaaggtacaatggttcaggcctctgaatcacgtactcaacgtgacgggacaaccacccct

SEQ ID NO: 113678 - DNA, 287 bp, Zea mays
  Clone ID: MRT4577_3515C.1
gttagggcagcgatccatacccacccgagccaacggcccatgggcgacgagacgccgcgtctcctgcttgaggacgggggccttaccctcgacgaacttgccgccggaggatcgccgtctgtgggggtggagccgccagtgctgcaagaccaggtcgagctcctgctgattgcaaggagccggacttcgcggactgaatggtctgcgtgcggacgatgatccactagaacacggagctggtatacgaggagctgcagacacagctagctcgtgcgccgggagctcca

SEQ ID NO: 113679 - DNA, 588 bp, Zea mays
  Clone ID: MRT4577_35160C.1
cttcattcaaattagatagagcccatcctcaagataccgcaagccattggtacacatatttcctatcgaaagaatatcactatactgagatggttctgttactgagatctcattgcaatgcacacaatacggtgtcaaagaagctttctaacacgtactgcaaggctccatctgatgtattgtgaactttccagatctcattttaaatggaccaaactctctcaagacgacaacattacaaagtctatactatacctaccggagatagccgcgatggcatcattcatctagcattatatttaacgtaataatagctagaacatgatatccagtgatcgtatcattatctagaaaactcattacccaacaaattgtctctactagacttgcactcaatcgtaccactgctgagctgactgatgatcagatagctcttatatacctagatttgagaacaacatgcagaatcacaccaaggggaactgtacgaccagccacgtatatatatgtatcgcaattcttatcgtcgatgatgaagagatagattcctgcagcgagccggatcatataaccatacgacatctggtg

SEQ ID NO: 113680 - DNA, 507 bp, Zea mays
  Clone ID: MRT4577_35161C.1
gggaccggcgcccccctcggatttttttttttttttttttttttttttttttttttttttttttttttttttttttttttttttttgggggggggaaggaaaaaagaaaggaaccttaaggttcctcgatttggccaaaaaaaaaaaggggggcccaaaggacaaacagcccgggcccaaccttagggggggaaattttttttaacggtttttcccaaaaaaaaaaaacccacgaaggcctaaaaaaagcacccaagggtgggggccaaaacccggggcctcccagaaaacccgaaggccccccccccctttttttttagaaaattttccccccaagccccgcggggcccccccccccaaccatatgggggggaaaaaatatatatattcccccgggataaacttgaagggcaacacaagcccaaaattccttaaggatttggtttccccgaacccctgtttggggaaaaacccccccccatttttttacatccctcggcgcccctt

SEQ ID NO: 113681 - DNA, 1638 bp, Zea mays
  Clone ID: MRT4577_35162C.1
cattgggtacctcgaggccggccggggcagaaacgggaaacctgccggcccgttcttcccctggccttctcgagtcctctccctgctcgctgtcgctgcccctgtccctgtctcgggtatcgtcgctggtcgctgccgcagccttcgtcctccctctcccactcccgatcgcatccaccctggaaccctagcggcccagcccgcgaccatggcgcggcggtcgacccctctcctacgccgccttctcgccccgtcaccttccctctccactcccctagccgacgccgtatcccgccgcaccgtcacctacatgccccgcccgggggacggcgctccgcgcggcgtcaccctcatcccgggcgacggcatcgggcccctcgtcacgggcgccgtgcggcaggtgatggaggcgatgcacgcgccggtctatttcgagacgtacgaggtccacggcgacatgcccacggtccccgccgaggtcatcgagtccatccgccgcaacaaggtctgcctcaagggcggcctcgccacccccgtaggcggtggtgtgtcctccctcaacgtgcagctccggaaggagctcgacctctacgccgcgctcgtcaactgtttcaacctccctggcctgcctaccaggcacgacaacgtggacatcgtcgtcattcgggagaacagtgagggcgagtactcggggctcgagcatgaggtcgttcctggcgtcgtggagagtctcaaggtgataacaaaattctgctctgaaagaattgcaaagtatgcttttgagtatgcataccttaacaatcgaaagaaagtgacagcagtgcataaagccaatatcatgaagcttgcggttagttccaaattgggttagagacctgccgtgtctttaataccactggaatttaatataatgaaatcattgaacaagtcctgtcaagcagcttgttccaatcctgaacaatttgatgttatggtcaccccaaatctttatggcaatctggtggctaatgtagctgcaggtattgctggaggcactggtgtcatgcctggaggcaatgtgggtcaggaccatgctatcttcgagcaaggtgcttctgcaggaaatgttggaaatgagaaaattgtggagaagaagagagctaaccctgttgcgctgctgctatcttctgccatgatgttgaggcacttgcaatttccatcatttgctgaccgtttggagacggcagttaagcgtgtcatagcagaaggcaagtacagaaccaaagatttgggcggcaccagcacaacccaggaagtgatagatgctgtcattgccaaactgggttaaacacaaaccgtgtgtttaatacaatttttttcctcatggactaggtaactagtcgactaggtaactagtccttactaaatgtttgttcttcgtataggtttagactttagaccaccattttgttcggcaaattcttgtacaatcttcaggtatcttgtttctggcctggtttgggtgtgtggtgtaactgagcaaactcgtattaatttttacgcaattttttgtgaccttaattcttaactggaaataagagaaaaatatggaacagttctcctttctgaaaaatgtcaaggccggccgttttaaaggat

SEQ ID NO: 113682 - DNA, 653 bp, Zea mays
  unsure (1)..(653): unsure at all n locations
  Clone ID: MRT4577_35163C.1
ggcggcctgttcttccccttgccctactcgatctcgagttctgtccctgcccctggcatcctcgctcgtaccgcggccttcctccccctccctccccctcccctgatcgcatccaccctgaaaccctagcggcctagcccccggtcatggcgcggcggtcgacccctctcctacgccgcctcctcgccccatcgccttccccttccccctccccctccactcccctcgccggcgccgtgtcccgccgcaccgtcacctacatgccccgcccgggggacggcgccccgcgcggcgtcactctcatcccgggcgacggcatcgggcccctcgtcacgggcgccgtgcggcaggtgatggaggcgatgcacgcgccggtctacttcgagacatacgaggtccgcggcgacatgcccacggtccccgccgaggtcatcgagtccatccgccgcaacaaggtctgcctcaagggcggcctcgccacccccgtcggcggcggtgtctcctccctcaacgtgcagctccggaaggagctcgacctntacgccgcgctcgtcaactgcttcaacctccctggtntacctaccatttacgacaacgtggacatcatcgtcattcgnggagaacactgagggcgagtactcatggcttgagca

SEQ ID NO: 113683 - DNA, 495 bp, Zea mays
  Clone ID: MRT4577_35164C.1
acttaataattttagttaatctgttattttaaacaggaagggccacgaagttgccgttcttctccaaaacacccaaaaatgagccggggggtaacgatctattggcaactaggtgacgacctctgcttttccttgggcaaatgccccacttagacgccttggtccccctgggacgcgccagccttgctagtggagacagagaaccgtaaaagttgctgaacgactagattaatggacagccggaaccgctcttatttcccggcgcaaaggaccttgagcttgaacatggccactgagaaaacaaggttaacggtcctgtcctgtatggactcgaccacgacaccggggagagtgtcccccttcttgtacatgattcacccccacttcaccaataaacatttaacgaacggcttgctggtgtttttgtttaccctacccgtgggcagctccagaggcccacgcctaagctgaacacgtatatcttgtgggtcacct

SEQ ID NO: 113684 - DNA, 1346 bp, Zea mays
  Clone ID: MRT4577_35165C.1
aaataacatccaccccttccttctccttccccatctcagcctccgctcatccttctggacacggcgccgatcgcatccaccccgaaaccctagccggactgaccatggcgcggcgatccgcccctctcctccggcgcgtcctctccccggcccctccatcccccctcgctggcgccgtgtcccgccgtaccgtcacctacatgccgcgccccggagacggcgccccgcgcaccgtcacgctcatcccgggcgacggcatcgggcccctcgtgaccggcgccgtgcgccaggtgatggaggcaatgcacgcgccggtctgcttcgagacgtacgaggtccacggcgacatgccatcggtgcctcccgaggtcatcgagtccatccgccgcaacaaggtctgcctcaagggcggtctcgctacacccgtcggcggaggtgtctcctccctcaatctgcagctgcgcaaggagctcgacccctacgcttccctcgtcaattgcttcaacctccctggcctgcccaccaggcacgacaacgttgacatcgccgtcatcagggagaacacggagggcgagtactcgggtctcgagcacgaggtcgttcctggcgtcgtcgagagcctcaaggtgatgacaaagttctgctctgaaagaattgcaaagtatgcctttgagtatgcataccttaacatcgaaagaaagtgacagcagtgcataaagccaatatcatgaagcttgctgatggtttgttcttggagtcttgccgtgaggttgcaaagaagtaccctggaattaaatataatgaaatcattgtggacaactgttgtatgcagcttgttgcaaagcctgaacaatttgatgttatggtcaccccaaatctttatggcaatctggtggctaatgtagctgcaggtattgctggaggcactggtgtcatgcctggaggaccttcgtacaggggaagtgattgggactggccgtcgccgtagagctgctcctcgcctctacatcttggactctttgcggcttccttccttggctacatctccagcgcatgtgctttcagctacccttgcttctgttgcgtcttttgcccagtggcatcatcgtctaggtcatttgtgtggatctagattgtctactctaataaagtcaggttgcttaggtcatacttcggttgagtctgattttcattgtaagggttgtcatcttggaaaacaaatacaacttccatattttactagtcattctcattctgttcaaccctttgatttggttcactctgatatttggggtcctgcaccttttgtgtcaaaaggtggatataaatactatgttgtttttatt

SEQ ID NO: 113685 - DNA, 445 bp, Zea mays
  unsure (1)..(445): unsure at all n locations
  Clone ID: MRT4577_35166C.1
cggtcgcgtgggcggacgngtgaggtggggggggggggggggagagaaaatganatcagggngagaggtagttagagggttgtgtaatatgttgattaatatgatgggtttggggagttattaggaggtgtactaattgggagcggtaaaggtggtttttgttgagttaatatacagggggagggggggggttngncggccaggggtccggcatggccttcagcaagctgaccggcggcgggccgacgacccctgcgggcctgatcgcggcggcggtggcgcacgcgttcgcgctgctcgtggcggtgtctgtgggcgcgaacatcttcggcggtcacgtgaaccctgccgtgaccttcggcgccttcgtgggcggcaacatcaccctggtccgggggctcctgttctgggctggcgcatctgctcgggtccaccggggcgtgct

SEQ ID NO: 113686 - DNA, 1914 bp, Zea mays
  Clone ID: MRT4577_35167C.1
attgggtacctcgaggccggccgggctctagaaagcgacaccaaagtcttctccctctccctcccgcggttccgcccgccacgcctcctctattccaggagtcttctagaggtgaagagggaccacaggtccacagccgcggcagcaccgccacctacgccggcagaatccttgatcgagacaggagcggacgtggcctagggtttctgagccaggccggcgccatggtgggctgctctaggggctccctccccacctggatgaccgccgccgccgcgcgggtcgacctctctggcggcgtaacgccttcgcaccagggctcgccctctccacctcactcctcctcgggtcccgctccggccgcgggggcggaccagcagcttgggttgttcgagcgcgcgctctccgccgccggcgccgccttcgtctcagctatcatcgtcaaccctctcgatgttgccaagacgaggctgcaggctcaggccgcaggggtgctgtaccaccagcctgcccagatggcggcgctcggccccgatgcaatcctgtctgaattcagatgttctccttcatgcacacgtggtctcttactaggaagtgagccagtttgtcctcctgattgcttccagtacaagggaacacttgatgtattcttgaaagtggttagacaggagggtttcagtagactatggagaggaacaaatgcaggcttagcattagctgtacccactgttgggatatacttgccttgttatgatatattccgcaacggcattgaggatttcacaagaagtaatgctcctggcttgacaccatatgccccactagtagcaggatcagttgcacgttcgttagcatgcattgcttgttctccaattgagttggcaaggacgcgtatgcaggcatataaagagtttcgtcctggattaaagcctcctggaatgtggaaaaccttggttggtgttctcccaccacttgcaggttctagtcagaatgtacaaaattatcgtgttctgtggactggggtgggtgcacaactggctcgagatgttcctttctccgctatatgctggtcaactcttgagcctattcgaagacaactgcttggtcttcttggagaagacggcaatgcagccagtgtattgggtgcaaattttgctgctggttttgtagcaggcagtcttgctgctggtgctacatgcccgttggatgttgcaaaaacaaggagacagatagagaaggatactgaaaaggcaatgaggatgactacaaggcaaacgttaactgagatatggaggtctggaggcttgaaagggctgttcaccggcgtcggcccacgtgttgcacgtgctggtccatcagttggtatcgtcgtttccttctacgaggttgtcaagtatgctattcatcaaaggcacacctcatgatccagtttttagttgaaaaagggatggaagccctttcactttgtaaaaacaacaccgaccccggtttccgaaagtaggcctcgttactctgaccttttggacggtcagggctaggtgtaacatcagagtgctcaacagtcgactcaacagcctttttcgtcgacaatgtccatctcggtggaggataacatatcagttttgcctggcaggttttggatcattgcctaatcttatgtttgggcggatctgaagctgctttgtttaacttgttaggtagtctctgtaattgaaggtgtagtagcgcatacgctgatcaaataataataccctcggaactacagaagaaatcttgcacatcctgccctgatgctttctcccaaccatgtcttagtttcaagtttgcaactaggttattttgtcggttagatgttatatgcgtgtacgatcgttgttcaacaaagtttatattgcttaaagaagcgtttgcagc

SEQ ID NO: 113687 - DNA, 1556 bp, Zea mays
  Clone ID: MRT4577_35168C.1
ttgggtacctcgaggccggccggggacaaaatagtaaaaagctcgtccctgtctcgggtatcgtcgctggtcgctgccgcagccttcgtcctccctctcccactcccgatcgcatccaccctggaaccctagcggcccagcccgcgaccatggcgcggcggtcgacccctctcctacgccgccttctcgccccgtcaccttccctccccactcccctagccgacgccgtatcccgccgcaccgtcacctacatgccccgcccgggggacggcgctccgcgcggcgtcaccctcatcccgggcgacggcatcgggcccctcgtcacgggcgccgtgcggcaggtgatggaggcgatgcacgcgccggtctatttcgagacgtacgaggtccacggcgacatgcccacggtccccgccgaggtcatcgagtccatccgccgcaacaaggtctgcctcaagggcggcctcgccacccccgtaggcggtggtgtgtcctccctcaacgtgcagctccggaaggagctcgacctctacgccgcgctcgtcaactgtttcaacctccctggcctgcctaccaggcacgacaacgtggacatcgtcgtcattcgggagaacagtgagggcgagtactcggggctcgagcatgaggtcgttcctggcgtcgtcgagagtctcgaggtgataacaaaattctgctctgaaagaattgcaaagtatgcttttgagtatgcataccttaacaatcgaaagaaagtgacagcagtgcataaagccaacatcatgaagcttgctgatggtttgttcttggagtcttgccgtgaggttgcaaagaagtaccctggaattcaatataatgaaatcattgtggacaactgttgcatgcagcttgttgcaaggcctgaacaatttgatgttatggtcaccccaaatctttatggcaatctggtggctaatgtagctgcaggtattgctggaggcactggtgtcatgcctggaggcaatgtgggtcaggaccatgctatcttcgagcaaggtgcttctgcaggaaatgttggaaatgagaaaattgtggagaagaagagagctaaccctgttgcgctgctgctatcttctgccatgatgttgaggcacttgcaatttccatcatttgctgaccgtttggagacggcagttaagcgtgtcatagcagaaggcaagtacagaaccaaagatttgggcggcaccagcacaacccaggaagtgatagatgctgtcattgccaaactgggttaaacacaaaccgtgtgtttaatacaatttttttcctcatggactaggtaactagtccttactaaatgtttgttcttggtataggtttagactttagaccaccattttgttcggcaaattcttgtacaatcttcaggtatcttgtttctggcctggtttgggtgtgtggtgtaactgagcaaactcgtattaatttttacgcaaatttttgtgaccttaattcttaactggaaataagagaaaaatatggaacagttctccttgcaaaaaaaaaaaaaaaaagcggcc

SEQ ID NO: 113688 - DNA, 509 bp, Zea mays
  unsure (1)..(509): unsure at all n locations
  Clone ID: MRT4577_35169C.1
ttgttttcttggagaagacggcaatgcagccagtgtattgggtgcaaattttgctgctggttttgtagcaggcagtcttgctgctggtgctacatgcccgttggatgttgcaaaaacaaggagacagatagaggtttgtgtattatttggtactctgtatacttcacgttccattatttttcacctgttacctgttccttatgcgagcatactctacatatattgccatttcttgtccctctttctattttttttaatttattgccatttctttttcgtgtttctattttttgttccttcctgtttaaatttcagaaggatactgaaaaggcaatgaggatgactacaaggcaaacgttaactgagaatnggaggtctggaggcttgaaagggctgttaccggcgtcggccacgtgtgcacgtgctggtcatcgttggatcgtcgtttctttacgaggtgcaagttgctattataaaggcacacctagaccagttttagtgaaaaggat

SEQ ID NO: 113689 - DNA, 508 bp, Zea mays
  Clone ID: MRT4577_3516C.1
cccgggtaccgaacgataagatgagctagctggtgcacaccggcctggcggtcacggcggactccgaggcgctcctcgggggcacgcgcctgcccgacgagtccaagctccgtcctcctccctgggagcatcgtgtgccaacttacattccaagtatgcaccgtagctctccctggtccgagcgaaggccgcttcctaggacacatgggcctccggcgacaagccgatcaaagaccttaaatcgaagagagacgccgatgaagacaaacccaccggactcttgtaccgcagggagaccaccgtctgcctatggctgacgtgcgtggccgggggcgccatcaactccgagcctctgctaccaaaaatactggagctcgttaggctcggctacacctgctgggtagtgtacaggtaccctgtgtttaacgaaagcaggaaagagttggccggcgacattgataccttgcaagaaaaaaatagctcgaacagaataaacgctcatggcaaa

SEQ ID NO: 113690 - DNA, 1300 bp, Zea mays
  unsure (1)..(1300): unsure at all n locations
  Clone ID: MRT4577_35170C.1
ccggccgggcagcagaacgcgggaacctggcggcctgttcttccccttgccctctcgcatctcgagttctgtccctgcccctggcatcctcgctaccgcggccttcctccccctccctccccctcccctgatcgcatccaccctgaaaccctagcggcctagcccccgggcatggcgcccgctctttacaggagcgctttttcactgaaagtggaacgtgttgcaagttcttttagtacactatttactatcactttgttgatttgctaggtgataacaaagttctgctctgaaagaattgccaagtatgcttttgagtatgcataccttaacaatcgaaagaaagtgacagcagtgcataaagccaacatcatgaagcttgctgatggtttgttcttggagtcttgccgtgaggttgcaaagaagtaccctggaattcaatataatgaaatcattgtggacaactgttgcatgcagcttgttgcaaagcctgaacaatttgatgttatggtcaccccaaatctttatggcaatctggtggctaatgtagctgcaggtattgctggaggcactggtgtcatgcctggaggtaatgtggggcaggaccatgctatcttcgagcaaggtgcttctgcaggaaatgttggaaatgagaaaattgtggagaagaagagagctaaccctgttgcactgctgctgtcttctgccatgatgttgaggcacttgcaattcccatcttttgctgaccggctggagacggcagttaagcgtgtcattgcagaaggcaagtacagaaccaaagatttgggcggcaccagcaccacccaggaagtcacagatgcggtcattgccaaattgggttagaaaccaaccgtgtctttaatacaacttttttttatctcttggactaggtaactagtcctgtcaaaacatttgctcctctcgtaggtttagttcaccattttgttcggcaaatccttgtacaatcttcaggtatctcgtttctgaccaggtttgggtttggggtaactgagcaaactcagtattaatttttacgcaaatttttgcgaccttaattcttaactggaaataagagaaatatggaacagttctcttttgggcttgctggttgctgtcatgctaccatgtaaccttctgtattccagtgtgtcatacatacgcatattaaggttcccnacaaaaaacaaaaaaacaaccccaaaaactcaacaccacctctacaccacccacttttccttccatttataaacaacaccccaaaaccaaaccccctttgggg

SEQ ID NO: 113691 - DNA, 927 bp, Zea mays
  Clone ID: MRT4577_35171C.1
actacaaaagaaaactaacgccctcccggcctcccctctcccctctcacccccgcctcctctattccaggagccgcctccttctagagggagagagggagggaccacagccgcggccgcaccggcgcacaccacctacaccgcccgaattcccgatcgataccggagctggacgtggcctagggtttccgagccaggccggcgctatggtgggctgctctaggggctccctccccacctggatgaccgccgccgccgcgcgggtcgacctctcgggcggcgtaacgccttcgcaccagggcccatcctcttcgtccccctcctcgggtcccgctccggccgcgggggcggaccaggagctcgggatgtacgagcgcgcgttctccgctgccggcgccgccttcgtctcagctatcatcgtcaaccctctagacgtcgccaagactagattgcaggcgcaggcggcaggggtgctgtaccaccagcctgcccagatggcggcgctcggccctgatgcgcatttccagatcctgtctgaattccgatgctctccttcgtgcacacgtggtcttgtattaggaagtgagccagtttgtcctcctgactgcttccagtacaaggggacacttgatgtattcttgaaagtggttagacaggaggggttcgttagactatggagaggaacaaatgcaggcttagcattagctgtacccactggttgggatatacttgccttgttatgatatattccgcaactgggattgaggatttcccaagaagtaatgctcctgggttgacaccatatgccccgctagtagcaggatctgttgcacgctcgttagcatgtattgcttgttctccaattgagctcgcaaggacgcgtatgcaggcatataaagagtttcgtcctgggcgtaagcctcctgga

SEQ ID NO: 113692 - DNA, 230 bp, Zea mays
  Clone ID: MRT4577_35172C.1
cctccgaggccgggccgggctcatgctcatgtgccagagcccactcggaacatccgagttcgccgcctccccgtcccaagagcacgagtcagctgatggtcgctaggaccaacttgtggcgacacccatgcacaggctctcgcggaccattcccccgctgcagagagggcggactgtccgcgttgactgggtactttgcatcccgcgcgactgtagatacggaaggtgcc

SEQ ID NO: 113693 - DNA, 709 bp, Zea mays
  unsure (1)..(709): unsure at all n locations
  Clone ID: MRT4577_35173C.1
ccggccgggctgccagncctggagtctggctcctcccctcctctgtctccctcctaagcaccacgcccttggtccctgctcctagctccctcatcgtcaatcccatgaccgccctccccagcgacgcgcctccaagtctcaggccagctcggcctcctcccacatctcccccacaccgtcgtcacctagctccttgctcccatggccgcaccccctccacggcttcttccagctggggctcaccggacgtcgcttcctggacgggctcccctgcagcgcgccctcatcccttccccaagctcggctcggtgtggaagctagccatcggatgccgcacggcaacctcgccatttcagagcccgaccccgccatggagctcatggtgcctcctgctgctcagccttgggcgccgggacgctgctccctactcgtcctcaactctctggtgcggagtccctccatcggcaacctcctctagaaccagctcgcgcgctccctcttctccttttccctgttcggatgtggcgctcttcttctcacattgcgtgcgccttgcccagccagcggacccaccctgctccaactgtcggacatcgctagcccctgcgccgaccatcccatctcatgggtgcgcagtcgttctcctcaagctccgtcaccgcgtcatggtgtttgactgcgctncactgtctcgtcgcactgactgtcg

SEQ ID NO: 113694 - DNA, 234 bp, Zea mays
  Clone ID: MRT4577_35174C.1
gcaaaggtaagcactaggatcctgctcttattagaggaaaaagggctccaacgccactacgattcttattcaaaggagcaacatcccatccaggaaacaaagggagcaccactcctgactggacacacacgaccaccaccaacgttgcctgtaaatcgacgcagcgcaaacttctaacagtccttgcaaactactaaaaaagcgacccccggatcaattaagaaacaaaacctt

SEQ ID NO: 113695 - DNA, 426 bp, Zea mays
  Clone ID: MRT4577_35175C.1
atggaggaggcggcctcgaaggtggatcacgcgcccaagggcaaggaggatgccgcgccggcgtcggtggtggacgtggatgcggtggagctggaggtggccgacattctgcccaacatgaaaaggctcatgcggtcgcgggaccggcgggaccggcggcgggagcgacgggaacggcgggagaggcggcgcgagcgcaagcaagcaagcgccgcggccgaggccgcagccgccgtccctagcgctgacagcccgctcgcgtacccgcagagcggcagggacgacgcgccgacgaaggacgccgccgatcggccacgggaccaggcgagctcgggccagcaccgggcgaagaggatagtttggagactcaaattccctcccggatccaaagtgattaagggaaaacttagttcgtttctctcctag

SEQ ID NO: 113696 - DNA, 334 bp, Zea mays
  Clone ID: MRT4577_35176C.1
cgtctttagattgagctgtcctagggcgttttgcccgttcttatggtcttccaaaccgaaaataaccatccaagcccaactccgcctgctaggataaaggagtttttccacaagaccaaacaaaccggcgcactcatctagacaatgaccgcgctcggagccgaggtacaatgaaaaacctgcaacatcttatccacacaggaccacgccgccggcgtcatcgatcgctactcagaaaaagaaaacagctggaagggtgagaccctcgatgagtactaacgatacaaaaagcgctgactcgactggggctaggcaaacggacccgacccaaaaa

SEQ ID NO: 113697 - DNA, 324 bp, Zea mays
  Clone ID: MRT4577_35177C.1
actcacgggtcgacacacgcctctagagggactcacattagagacaggatgtccaccgcgcacgcgctgcacaccctcccgccgctgccgctgcagaacggcaccgccggtgacgacgaccgcgacgaagacgttgatgaggacgaagtgggcgatggcgaagccatggaggaggatgacaacgaccatgaggacgatccgccggtcaagtatcagcggctaagctgcaacgtggcgcgaatggtctccatggacgcagctgttgacatcgccgtcgccgaacgcattgtcgcgctcggcactcacagaggaactctccacatc

SEQ ID NO: 113698 - DNA, 350 bp, Zea mays
  unsure (1)..(350): unsure at all n locations
  Clone ID: MRT4577_35178C.1
atgtcgagaatgcaggccttagcgtggcatggcaccctcgcgcgcgaaaccgagcaatagtgacaatgcaataaaacgccggggctagctgagcctgtttgttcgacttcgacctgaataatgaagcagctgtgataaaaaaaaaaaaaaaaaaaaaaaaaaaaaaaaaaaaaaaaaaaaaaaaaaaaaaaaaaaaaaaaaaaaaaaaaaaaaaaaaaaaaaaaaaaaaannnnnaannnnaaaaaataaaggaaaaatgtngagagatagaacacacttgggggggttcaagtttgccttaagggggcccaatttgaacttacagagggggattataaaaaaccgggcc

SEQ ID NO: 113699 - DNA, 519 bp, Zea mays
  Clone ID: MRT4577_35179C.1
gaccctcgaggcctggccggggccccagtggtggtcagccttgagtcggcagactgtccctgcatgcttgccctcggacgtacaggcacacacgccgcggtcagaactcagagggcacggcgccggacaagcacgtgctgccttgccacgcatccggggggccgtcggccgcactttgcattggcttggcacagtagtaggagtatcctggccgcgacttgcattggcttggcacagcgctcggctcgacgcgacgggacggtgacgagtacgtaacgaccagcgacagcgagcgcagccccatgtgacgtactgatgcgacgatcgccaaatctaccgcccggcactccggccgcccggtccgacctatcggtttccttcccctcgcgcgccgcgtgcgtggtcggcggctcggccgggccgggacactggggcaggggacggccgaccgggcgccgcaagccgaggactttgcgtgggcccccatgtcgtgcgggctctctctctatctcttttgga

SEQ ID NO: 113700 - DNA, 4486 bp, Zea mays
  Clone ID: MRT4577_3517C.1
ctactttaggactgaaaagccacgggcgtagaagttatgcgatgagcttgcccagggtagtgatggagcccaatacttcctcaaccccgggtagaacatgtccacaccagtaatgatgctctggtccatcctcgagccagtcgagccagaggcagggacaaagtgacagaacctctgcaacctggtagagagagccaccgtagaacatgttgtcattccacaaagcatatagtgatcttcaatcttgattctgagacagcatgcaatacaatggagtgagatgacagtcttgccatgcatcccgtgtttggcttctctaggaaatcaaataagagcgtcaacctcatatttaactctggttcgtctaatatgttgggcatacctatggggatcactatgcctaagttcagaaatttccttcagctaatgaacaatacaatttatagaatgtgcgcggcgatggtggccgttagtatcatctctaggctcgatcgcgaaagaagcactgccaccgcgaccttctatacaggctgtcgaaatatccgctccacaggcggttccaggaaccgcttgtggtgcaccgcttagttctgggaatttttgcaaatttccatttacattgtagaatagcccttgttgatgaagaacttcacggtgcataaagtaaagcaagtctcttacaaccttagccacgccggtggaaaccatatctctttctaaccattcagcattgatcttagatttaggaacatcctcacgattgaccatgtaatggaaggtgacacgacaccattcgcatacataataaccgcacaggacagtacctggaggttgtttgtcaccatatggaaataatgatattgacaaattaggcttgtcctctggatgttcgccgccaagatctttccaataaaaacggtatgcattctctaaaatcttcaagaagtcattatacgtagccttatccattctcagtgagtcgaagaccacgactttaccatcctttggccagatcatgatacaaatgtagtggtcattaaagtggtgcggagctattattaagtccttgccatgttgtacatgattatacatggctcgtccaatgtatgccgccattaccttcattttctttctctgattctgtttgacggctttctcaaattcagcatcgtccaagtctttgtattcttctccttgccttcgagcaactactttgtagcgagcttgggatatcatcaacgggtcaagaaaccctgtcttaagttgtttcttcttatcatccatctatatcgtaaagcagaagagggttaaggagttcgtttcccactaaatcaaaagacatgaaaagtgttgctcaaaatagcggatgttcgtatcgatgcttttgacctccatggacaaaagaccacatattttggattcatagaggaaatatgggaacttgattatggcccaagcatgaaaatacccttatttaagtgccaatgggtacaacatcccgtgggggtgatagtggataactacggactcacactggtagacttaaagaaagtaggatataaacatgacccgtgggttctcgccgaatgtgttgcacaagtgttctatgtactggatccagcagatgagaagatgcatgtagttatttctggaaagcaaaaaattgttggagttgagaatgtgggagaccaaaatgaggaatacaataagtatgaagagatgttcgtctttaacggtccagagagaatcaagcgtgtggaaaagaaaattgataagaacttaaagccatacatgcggaaaaatggtagttcatgaaaaattgtatgaatcaaattgtagttgttatcatgtattatcgtctatgatctgtggttgccaattaacttcatccccctcgtcgagttccttcgcaagaggcgatatgattgtttcaacgatttttttggaggtcggtgtcatatcttcctgcaccatggggtgtggaatgatcgaactagctttttgttgcattggtgttgaattcggctcatcaccaaacttgatgtcgcgtcgatgccaaaggaccaactcgttaattgcctcatgcaaagttatgatcccctcaactggaaaatctatctcccaatcttcacaaccattgtctgtgatttctagaacttggaccacagcatagtgtggcgggacaggattgtccttgtagttaacaagtcctggttttaccaaaccagtagcagcttgctttgtttttgtcccagatcgattgattggaatatgaagaaagcaaggcttgtcctcaacaatatcgtctacagggtacttggtcaagtcttgcacagatccaacgctgctagggactataggtggactcatgtggcttggcttgagttcaaatgatatgcattctgttttcttcattttgttcatcacgtcattaatagccttttgtaccctttcatcaatagtctcttcaagggtccttttcgacttcttgtgtttcctatatgacgacgcatactctaaaaacgcctctctccaggaaatcttagaagagattccccgagcccgtccagtgtgttcaggattgcctagggctgcagttagtatgtcattctccctccgaggcttaaattctcctttttttctcttatctgcatattcttgaatttttgacgaaacttcgcctaccaattctggatgcacaagtttgccgtcctcactcaaacctgctcgacctaagatccaacgaatagctctctcatcgatatcttttaatattgggtccaaagtgccgttagttatagcttcctcgataatcttgttccactgcacaactttatggtgatatccgcttgaccccaggcgatgggggtgtttgttcatcttcgctctctgagaattagtttcgcccagttctttggccttcagttcggtaaactatgtgggagagggagaatgggcaagaaaacttttcgcgttgaggattacaagctagtacattgtgctcatggtagtgtactacaacatctcacgatagccgagccttacaaagaggaacacctggatgagcttcgtaaagaaaatcagaaccgcacagaggactggatcatgagggagcacaaacatcgtttcagcgaatggttaatggacaaaaacatcccattcggagactctttggaagagaaaacaatgaagaatttggcttctgggccatcgtgttttgtgacatcatggcaagcatatgacatcaatgggtacacattctatactaaatcaaaagacatgaaaagtgttgcacaaaatagcggtgttcgtatcgatgcttttgacctacatggacagaagaccacatattttggattcatagaggaaatatgggaacttgattatggcccaagcatgaaaatacccttatataagtgccaatgggtacaacatcccgtgggggtgatagtggataactacggactcacactggtagacttaaagaaagtaggatataaagatgacccgtgggttctcgccgaatgtgttgcacaagtgttctatgtactcgatccagcagatgagaagatgcatgtagttatttctggaaagcaaaaatttgttggagttgagaatgtgggagaccaagatgaggaatacaataagtatgaagagatgttcgtctttaacggtacagagagaatcaagcgtgtggaaaagaaaattgataagaacttaaagccatacatgcggaaaaatggtagttaatgaaaaattgtatgaatcaaattgtatttattagcatgtatgatcgactatgtattgcggttgccaattaatttaaaatctctctagttatctatatgtgctattaaaattcatttaaattgtatttgcatatttttgttaaaaattaaaatattaatatatggtaatcaaatcacaatcgggtctaattaagaatcgcatgtgatacgaatcgcgcatcacagacggtttttatattatagaccgtttgtgaaacgaatcgagcaccacaaacggttgttatttcggaccgtttgtgatagaatacatcacatatggtccgaataggctgggacatcttagatggttttctatccgaaccgtatgagatataaaaaatctaccgcttatatagagccaaattgtagccgtggatgtagagatcgattcattaatttctctaattattagccgctattacttctcttggttcgactgcatagcccacatccgatgccgatgacgacgagctgagtacgtacctttgtcgacgacgacgagcgggcgggcggtggtggccttgcggagcttctcgaggcccgtctccgggcgaggcccggccaccacgtcgtcccacagcttctccagcatctcggtcgttcgctcttcgctgctcctttttttttctctccactcgagctcacaaaggcatggatctccggcgagctacaggcgagtacagtggtgtcccggccgg

SEQ ID NO: 113701 - DNA, 1082 bp, Zea mays
  Clone ID: MRT4577_35180C.1
cgggtcgaccacgcgtccgtcgaggctctcttcggcactgcagcagcaaaccgcaagccgaaaccttcagacaaggaatcgggcgaatcgtcggccagcctcgggcgctcaaacacaccggagcaaatattcctgctcgagccgcgcaagtcacacaatatttccatcatcctcaagtccctcacggtggggcgggatgaaataatcgacgctctccgtgacgggcaaacagaactcggcactgacgtcctggagaagctttcgcggctccacatctccaaggaagaagagtccaccatcttgaggttctccggggaccccgacaggctcgcccccacggaggccttcctcctccgcctcctcctcgacgtgcccaatccgatcgcgcgcgtcaatgcgctgcttttcaaggtgaactatggtgcggaggtcgcgcagctcaagcactcgcttcggacgttggaattggcgagccaggagctgaggacaaagggcctgttctttaagctgcttgaggcagtgctcaaggcgggaaacaggatgaatgccggaacggcacgtggcaacgctcaggccttcaaccttacggcgctccgcaagctctctgacgtgaagagcactgatgggagcaccacgttgctgcacttcgtcgtcgaggaagtcgtccgctccgagggtaagcggctcgccatcaatcgcaactacagcatccgccgctcgggcagtctcgcgaggtctggccacgagggaggcagctcggcagcaggcttcgcaagccaggggccatcgcgggaggaaaggcagagcgaatacatgaacctggggctaccaattgttggaggtctcagcacagagttcgccaacgtgaagagggccgcactggtcgactacgacgcagttgtcagcgagtgcgccattctagacggccgactcaatgagatcaagagactcttggagacctgcagtgatgatggatttgcgcgggggctgcgaggatttgtcagggctgcagaacaggagctgaaggcgctaagaggggagcaggaaagagtacttgagctggtccagaagacaacagagta

SEQ ID NO: 113702 - DNA, 312 bp, Zea mays
  unsure (1)..(312): unsure at all n locations
  Clone ID: MRT4577_35181C.1
ggaaagagggatcctttgctttggagttttttaagggggcattttacctccaagggggggggggggcaaacaacaaaaaaagtttttttcgttttcgcttttgtttggtgggggccccaaaattttaaaaaaaaaaaagggggggggaagaagaataaaagtttgggaaccggcttgtttaacaaagggtttgattttggcatgggctaaaaagccgaatgggggggttgttcatttgccgaaccaaacggcctctttttttttaagggccaccccgntcttgggggttaattactacttaatacccccgct

SEQ ID NO: 113703 - DNA, 600 bp, Zea mays
  Clone ID: MRT4577_35182C.1
ccaggatgatcaaggggatttttcgtcagtgagcatggatacagcagtggcgattcggacactagaagcaacatacaaacaatcagctgactctgttgcagttgaatcaatgattgcaaagttgacagagaaggaaggtccttgcttaaaaggtaaaggcagggccagtgatgcagcaagaatcgtggttctgacctggagatcgttgctaattatgtcaagagattggaagtacttctggatcaggcttgtcttgtatatgcttattgctgtgtcaattggcacgatatttaccgatattggccattcactatcatctgtaatggtgaggatttctgcgatatttgcatttgtatcgtttgtcatccttctaagtgcttctggagtacccgctcagatcgatgaggtcaagatttattcccacgaagaagctaatcggcattcagggacaatggtgttcctgttagggaacttgctatcaagcattcctttcctattcctggtctccatcctgtcgtagctggatttctacttgctgatagggctgaagaacgagttcagctgcctgatgtactttgtgaccaccatctatgtatgcct

SEQ ID NO: 113704 - DNA, 639 bp, Zea mays
  Clone ID: MRT4577_35183C.1
acgcttgagtacagcgtgagtcaggtggcacattgcatcgatagaccgcactagtgcgtggtactgtgggggtcggtcatggtgcctcgcttgtcctcgcgcgcctgcgatggtgcactggtttgcctggtggcggctacagcgtaacgatggaaccaggcacaacagaaacaatggcggaggtagaggcagttacagcagcagtatgagccacaagcaaggcggagggggacgagcccatgccgcgcagacgacaccgtgtccgtttccgtatccgtttccggcgggtgacaacaacagcagcagcgaccacgggtggctgaacgcccgcgcgagatggtacggtgccccgaacggtgctggtccggacgacaagcggaggctcgtgcgggtgcaatgtcatgaacatgccagctttatgggagaagacgctgtgcgagaacgagccaatcttcaaggacatgcaaagatgcttgctgctgctaccagatgccgagcatggcccaccctgtgagctccagcgaggtggagacagtgatgatcacggtcatgaactagtacccggtggcccgctaccaattgaacctgagacggactgccttcagagccatggcaaaagacaagcacaactacgagcta

SEQ ID NO: 113705 - DNA, 271 bp, Zea mays
  Clone ID: MRT4577_35184C.1
gcgacctctggagcttgtgaaggaccagcggcgggcaggatgagtttcaacactccaatcggcctgcggccatgttctcaagtgcaaatctcgaacgggtcgggtcatagggaggaggaatctaacgagactcctgatcataaggatcaaggtgctacatcactacataagcactggcagaacgacaaccggtatcattgcctatcgaacaatgtcaatggggcatttggtagagaacctaaggcgccatactactagctatatattgttc

SEQ ID NO: 113706 - DNA, 599 bp, Zea mays
  unsure (1)..(599): unsure at all n locations
  Clone ID: MRT4577_35185C.1
attggttcccatagnatgatcactatancctgtatgatgtgacttgtatttagcagatctgggagattaaaagaagctgaggagttcataaagcagatgccaatgcaccctgatgcaattggatgggggacattgctgagtgcttgcaggttgcggggcgacatggaaattggccaatgggctggtgagaatctcttagagatcgatccccagaatccagcaagctacgtgttgctatgcagcatgcatgctactaaaggtaactggaatcaggttgcccagctaaggcgtggaatgagggacaggcaagtgaagaaggagccaggttgtagctggatcaaatataagaataaagttcacatattttctgctgatgaccagtcccaccccttctccaagggaatttatgaaaagctcgagtggctcaactccaagatgcttgaagaaggatacaaacctgatgtcagttcagtgctgcatgatgttgcagatactgataaggttcacatggtcagccatcacagtgagaagcttgcgattgccttcggattaatgtttgttccacatgaaatgccaattcgtattgtcaagaatctgcg

SEQ ID NO: 113707 - DNA, 298 bp, Zea mays
  Clone ID: MRT4577_35186C.1
ctctgaggaacatcagcttctgccaggcaaccagactggctgctattgaactctactagctaatatgcaacaacagttaccattcagccagctattttttgcatagcggggaggaaagccttccattcaaccaactgacagttaagaactctcctgctaatttacagcagcggacaactactaccattcaaccagctagctaggaggagagccctgcaacctccttgacacaaccacaggttggggccgtactaccagtacgctacacctaccgcagacacccttttacaactgcaac

SEQ ID NO: 113708 - DNA, 321 bp, Zea mays
  Clone ID: MRT4577_35187C.1
gggcgggcaaattggaggggaaagggggtgttttgggggtgactacagaagatacatgaaccattcaagcttgagggggaataggtgccccatggatgtgaaagttcctaaaaccccggccgtgggaggaaactgccaaggcgcatgcatgagtgtatcccaagtggaactgatcggatccacaactggggtaccgggggctgggggagctgcctgctcttagaaagtagcacttggtggcatgcagcaagagggcatgaatggagaaccggtttctcaaataatgttttgaagatgttcttcacggggttacctaagtca

SEQ ID NO: 113709 - DNA, 253 bp, Zea mays
  Clone ID: MRT4577_35188C.1
tcagtatatcgtctaccaacgagcttgggagcgccctctcccgcccctgcccgccgtcgaccacgactaccaccgacaagagacgccgctccggcttccgacccggtcccagatcacgcacgaaacatggcgctctgctgaagcctacacatcctgaattgaatcgggtgaggggaacgtagattgcacgcaccaaccaaacactgccttgttagtttttgctgctgcatctaggtgctccttgctgctggaa

SEQ ID NO: 113710 - DNA, 474 bp, Zea mays
  unsure (1)..(474): unsure at all n locations
  Clone ID: MRT4577_35189C.1
actgccacgctcaagcgcacaaaaaaagcagggctgcctccaccagaccatggcctccacggtgacggccgttacccccatgaagggggaacgctccggcgagggccgccttaccatgcgcccgaccgagggcacgcccaaggggggggaatgccgggccccctggggcggccccgaccgcgtggggcggggcggccccttctccggcgcgcccccgagctacctcaccggcgagttccccggtgactgcggctgggacaccggcgggctgtccgcccaccccgggaccttcgcgcggaaccgcgagctggnggtgatcccgtcccgctgggccgtgcccggcgcgctcgtctgtcgtttgcccgcgctgctctcccgttgcggcgtcgtgtctcggcgaggccggctggtgccaggccggctgccctggtctccggcgggggtcggctggtctcccccgggcggcccccgccc

SEQ ID NO: 113711 - DNA, 608 bp, Zea mays
  Clone ID: MRT4577_3518C.1
ggtaccggcgcccttcctcgagttttttttttttttttttttttttttttttttttttttttttttttttttttttttttttttttttttaattctggcttaccccccttccccaggggttcaaaaaaaaagccccggcccaaagttcgggggagaaccttttttgagccatggttttttttggtccacccaagggaaccaaattggggttttcccaaatgggaaaaaaaaaagggggccctttttgtcaattttttcgggcccttttgggttaaagggaataaattaaaatttttttttctaggtttttcgttccgccaaggaccaaaccgcaaaaatttccctggcctggaaaaaaaccgggaatgggggggttaaagggaccatgattttttttccccccaggggcccttttgtttttaaaaaaaagggggggttataaagcccttacggaggggcccccctttccaattttaaggctttaaaaaccgttaaaaacgggggggattttcaaaaaaaatcccccccatttcaaaaaattcgggttcttaaaaatgggcccttctccaaccccaaaaaacaaccgggtttttgggattatcctttgg

SEQ ID NO: 113712 - DNA, 494 bp, Zea mays
  Clone ID: MRT4577_35190C.1
gtgctctccatagtcgaccatttggaggccactctggcattcgtgttcctaataggcagatggagagtgtctttgctcgggaacaatatgacgaccacagacaaccacttgttctactcgttgacagtgctacgagctggcaatacagatcgggtcaggttaccacggcatactgctcccttcactagtttgatgtggctcctgcgaaacgatcacaatgcagtttattagtagggctcacttcatcaggcgatgccaactggctgttactggttgggtttaagttgacgaaggatgtttactagatgatttcatcactttcttacctggccaggtttgttgctcactcattctttgtcaagctgcacttgttccatggggtttcttctgacatcatttaagacggggaccaagtctttaccagctactcctggcagcgtatattctaaatgactggaacggatctgagagtgacttcgtcctaccacccctaa

SEQ ID NO: 113713 - DNA, 512 bp, Zea mays
  Clone ID: MRT4577_35191C.1
gaggagatatcttttttttggatggccctctcgaagaatccttggcaggatatcaattagaattgcaccgtagagcacggaccccttttctttttttccccagggggtccatgacctggggatccgctcctgatgtctggaaggtagaggccctctgttccccccctcttctcggatgtggccctctgcccccaaaggaaggcgaaatgcgacccctctgcctgcccaggttattcagggataggcccagtgacccaagatcacccaccttcttatgccttccactaggccagtgttcccccggccaaatcctgaatccttacccgtgccctccccgggttttccaaacccccggtatcatcaccccctgggcctccaacccttgcctgaccccccccctccgcaaatcactctttccctcctcttccccccgccccagtgggccccctcttccccgccgcgtgggtccccccccacccctcctgcccacctctcccgcccccgggctcccc

SEQ ID NO: 113714 - DNA, 559 bp, Zea mays
  Clone ID: MRT4577_35192C.1
gccagacgggacttgctgtgtcataatacgctcgctgcattgtgctagaaccaaaaacaaaggaagggcataaccaacgaaccaaacagagcctgaacttaaaacggaaagcaaaatggaggaatgaaagaactcatagaagattacaacataacaaaaggggagcacccttcacctggtgctccgtctcaggggtggcatgcagatctttgagaatacattgactggcacgacatcaccttggaggcggagttttctgacacaatgcgattgtgaaaaacccaggatccaccacaatgagggcatttcaccggaccaccatttcctgatctttgctgacaagcaaatggaggatggccgtaccctctcccactacaacatccagaaggagagcacactgcacctggcgctccgcttgcgatgtagtatgcagatctttgtgaataccttgactgggaagaccataactctggaggttgagagctccgacaccatcgactacgtgaatgcgattatccacgacaaagagggcattcccccagaccagcataatctgagc

SEQ ID NO: 113715 - DNA, 562 bp, Zea mays
  Clone ID: MRT4577_35193C.1
tctaaatcggagcaattcctcttgagtagctttacctacagcgtcattacttaaaccccaccatctaccaaaaccattaatttgtttttgataaattttttctagactttcaatcatgcgatcgcgcaaatcttgagtaacagctaaattatctttagactcacttctagaaccgccataaaccatttggtataacattccctgtgcttgtaattctccccatattttttgatactgtttaaattcctgtggtgcattaaatgctgtttcaatgactgtgcttaattccaatctatcaattgaagagtcctcttctaattcctctttaagactagctattacccattgggtttgggatggaattaagacataagcttgatactgttgaaagcctccatgacgacctaaacgccctaatctttgaataaccgttgcggaatcactactttcacaaatgagtacatgaattttaaaatcaacacctacatccactgccgatgttgcaacgactaggacagatttttctgacttctgcaaataagtttgggtttgctgacgttct

SEQ ID NO: 113716 - DNA, 400 bp, Zea mays
  Clone ID: MRT4577_35194C.1
cgcacgtaaccagctggagacgtacgtgtacaacatgaagaacacgctgggcgacagggacaagctcgtggacaagctggaggccgaggataaggaaaaggtggaggaggccctcaaggatgctctggagtgtctggacgacaaccagtccgccgagaaggacgactaccaagagaagcttatggatgtggaggccgggtgcaaccacattgtgtctaccgtgtaccactggtctaacagtgcccctggccttgacactgacagcggtgttgacgacgaccactactagctgtagatggttgtagatggtactggtcacgtgaattgccatatgccgaaccacaattagtaacggggtttatcggatgacaatacttattactaatcttggtgctgctct

SEQ ID NO: 113717 - DNA, 266 bp, Zea mays
  Clone ID: MRT4577_35195C.1
cccacgcgtccgcaggcttaccccaccaacagtaagcgattatctcccgatcccctgtggtctccgcggcgaatatgtctgttgcgcggcaagggacgggaaggtgcctgggcaagggctggtgcgaagcgccaccggaaggtgctccgcgataacatccatgggatcacgaagccggtgattcggcggctggcgcgcatgggcggtgtgaagcgcatcttcgggctcatctacgaggagagccgcggtgttctcaagatcttctt

SEQ ID NO: 113718 - DNA, 234 bp, Zea mays
  Clone ID: MRT4577_35196C.1
agcagggaagtacggctgcgagggggcggtcccccccgcgttgatctcaaaccccacccacaaacggaccaccgcccgcgggcaggcacaaaagcacagagaggccggcccccaccaccaacgcatctcgaaggaagctgcaccgacgagcaaacctacctgtacaagggcaggaccgtcacgacccaacaagagcgaaccaaatacccgcggcacagcaagtgggcagacgag

SEQ ID NO: 113719 - DNA, 447 bp, Zea mays
  Clone ID: MRT4577_35197C.1
gcaacatcatgccccatattattatcattgcaaaaaaaacaatccaatggtaaaaagatagattagtttgcctatttttatcagctattcagctggtcccactttcataaataaataataaagaggcctttccctaatggggaaatgctctgacatttccacgaccccagggacctacgggggggttcactaatttgaaccaagaaagggccaaaacaagacccgcaaaatctaattcccatgaaaaaaaggggggggttcacatttaaacacttcatcttggaatagcttaatatacaaaaaaagaccccctgcccctctgcaattaggggggcatatatcaccccatgtataatcatcgccacccttattactggccacaacctgccggatagggttggctttctccaaaattgctgcaaccttggaaccggctgtaaattggga

SEQ ID NO: 113720 - DNA, 226 bp, Zea mays
  Clone ID: MRT4577_35198C.1
gactgcgttcaatgggtgaagccttcgcttccctggccactagggtgtcctgcgtggctgggtccatacacttactagctcgtcctggcccgtctcggatctgattcggtttagtactcccttctgtctctcccctggggggcccgctcgggcggagttccctggcttcggtcctgatggtgcgcggtcccttttcccttgtgggtggcgtgcggctctgcttggc

SEQ ID NO: 113721 - DNA, 460 bp, Zea mays
  Clone ID: MRT4577_35199C.1
cctcgaggccggccgggacgttcattcacagctcgttacatacgactccatactctcgtacacgtgtacctagcacgaatcagcaaaggagtgatcatcacccatgcatgtgatgcacaagtggacacgcctgacgtcaaagctggaaggatgctcttcctcgtggatcatggtgcacgaaactgcctcccacgcggtgcttcaaagtaacaagctctatcaactgggggaatgaggtcgactctctcttcacaccttaccgggagataaccatctccgagcacggcgcctggtgcatacgcccttcccaattcttcctcaacgcccatgactacgtctcctgcgccagctctcggcacagtggtcaggttcggtcccacctcaacaaggacaaccagaagctcccgcactgcgtcgagcaccacgatgatggcaccaaggccttctccgggcccaccat

SEQ ID NO: 113722 - DNA, 212 bp, Zea mays
  Clone ID: MRT4577_3519C.1
cgaatatttgattcatccgtgagtcatcgtcacccaacacggattgatcccgaatatttgattcatccgtgagtcatcgtcacccaacacggattgatccaaaccataagtgaaaaaacaagtgctacatgctatggcaaccatcccatgggagtccactagcccactactggtgggctgcttactcttcgttaccctcttcttccttggta

SEQ ID NO: 113723 - DNA, 506 bp, Zea mays
  Clone ID: MRT4577_351C.1
ataaacaatatgggtttacagatttttttttatacgttcatgcttattgaggtagacgcagctgaccaccaagagctgcatacttactcacacagactgatccaccatgtggcggcgggggaagtacacatgcttacagacgacaaatattcataacaagggccaggctgggcagattcacagagtaacgcaacgacaaccacgcaaaggcgacggtttttagtaaacgggcgagaagcaaaagggccccagaagccggggggactcattaagcactcccgccttctcctacatggtatccggttccttctgccaaaatacaagatagggcgggaggccgaaccactggataggaggaggagcactctgcacctgctcggcgtcaaagcagcggaaaacagatttgggcgacgcagcaacagcgtcttcagcagtacagaagctctggtgcacgaggagcccgcctccaggcaactcctgctgcaccatgttgttgcagccaaagg

SEQ ID NO: 113724 - DNA, 479 bp, Zea mays
  Clone ID: MRT4577_35200C.1
gccggccgggtccaataaagacagagagcctctctctattttcccgtacccaagctcgcccctctctcactctgttgctcgccgtcgtacgtcgtcgccggagctcgctgttcctcgccggagcttgtaccccaccgtcagaacgctcaccaacgaccacgtccggaatccctgcccacgcgcgcgcagcagcaccccggcaaccgtgcccacgccgttcgccgtcatccgttcatcccaaggtcgaagacaacccgaaatatttattttctaaatcatgttttgaatttattgtgagttattgttgtaatattatgatgatgcgatttggtgattcgtatatgattgtagggattttgttttatacgtgtagtcaaaatcgaaccccgcgacaatgctttaatatgtgtatgattttataattttaatgagtacagtcactattcactatcgaaaaaaaaaaaaaaaaaaggccccta

SEQ ID NO: 113725 - DNA, 689 bp, Zea mays
  Clone ID: MRT4577_35201C.1
agcagtggtaacaacgcagagtactttttttttttttttttttttttttttttttgcccttggtcaagtgagttggtgtttgggccggatattttgcggtgaagcttttgccggagttctaaattccaatgtcctggaggaaactgttcctgtgagtaattgcagagagaccattccattttgtctccgagggtgtgttgcaagctgaccggctcacgtcctcacacaggcaccgccgcattgacggatggatggcactggagcgctggagaattttgtagctttattcaatcatccattcattcaacatcaccatagataattgaataatgtagcaacactagaatagtaccacatagcacaatacatgttttcattacatgttaatcaaatacttgttaagccttttatgacattatcgttcacaaaggttgttaaatagtcaaaagagatggatgactgaaagtccaagttcatgattttggaccaagtttatactggatattttatacacatgtgtaagggcagaatattctaatacccatttatctatggagtgaaggtttttggctcgattgttagaattttagcccatatatataccctaatggagtaaatactgatggtcgcaggtatctagagatgacaatagatcccgcgtactctgcgttgttaccactgcttaaaaa

SEQ ID NO: 113726 - DNA, 310 bp, Zea mays
  Clone ID: MRT4577_35202C.1
ttttttttttttttttttttttttttttttttttttttttttttttttttttttttttttttttttttttggccccccaccccagggcatgggtatatttttgggttttcaactttaccttttttctaccccaaatttaaacccacgccacccttgtttttaagtttgggacgggaaaaaaactggtgaattaaacacccgggcccggaaacgaaagggatttccttaagttccagggggaacccccaaggttgctggggaaaaaggcggggggcgaatccactaggcagggtgggggcccgggcccggg

SEQ ID NO: 113727 - DNA, 1465 bp, Zea mays
  Clone ID: MRT4577_35203C.1
ctaactcccggttgacgccccacccgctaacggcgacgacgcggcgacgacgactgcttccccagtgggagacctgcaatcctcagccacctgcccctccccctcccccatctccgttcacctcttccccttcttccctaccttcctgtattcgcggcgtcgagtgccgccgcccttcgccggcgccgagcacggagcaacgcaccagtttcagtacctggattcgaactgagagtggattacgaagtcatggcaaggttatgttgcttcggcgccggttgctccgatttcacggggcaagggtcaatagcatccggtaaagggaaaggctgtcaagggcaagtcaagatctgctatggatataaccttgtaagagggatgacgaatcatccaatggaggactatcattttgccgaacttgttgatgtcaaaggaaacgagcttggtctttttgctatttatgatggtcatttaggggacaccgttcctatgtatttacagaagaatttatttacaaatattttgaatgaggaagagttttgtacacacacagatagagcgattataaaagcgtatgaaaaaacagaccaagctattctgtcacatactccagatctgggacaaggtggctccactgctgtaaccgccattcttgtgaacggcaggaagttatgggtagctaatgttggcgattcaagagctgttcttttgaaaggtggtgagcccatacagatgtcgatagaccatgatccgaatgttgagcgcagtgtaatcgaaaataggggtggttttgtttcaaatatgccaggagatgttccccgagtatgtggtcagttggctgtctccagagcttttggagacaggaatctaaaatcactattgagatcagagcctgatataaaagtcgaagacatagatcacactgccgagctacttgttcttgcgagtgacggtctttggaaggtgatgaacaatcaagaggttgtcgatttggccaaaaggtacaaggatccctatgctgctgccaagcaattaaccgtcgaagcacaaaaaagagatagtaaggatgatatatcatgcatcgttgttcggttcaaggcgtaaatcggtctcgaaggattttcatcgagagcaaaaaaacaagtgaattaggctgcctgacgatggtagtgataatctgatggttgaataatgactggggtgttggctgtaaatgatttgtctgctccaatgtaaagttcatatataagtatgctaggattatttggtttggcgatttcaaaggtacaggtgcgagggcccgagagctactaaatagctaccatctgtaaataatggttatattggatgttgaatttgtaagagtagactgagcaaaagacatctggatagttcctaaaagaacagcaaggtactctttatgttcagaaagttccacaggtgtgtatgtacttcacttcctttt

SEQ ID NO: 113728 - DNA, 215 bp, Zea mays
  Clone ID: MRT4577_35204C.1
aatgagctcggcatgctaccagcaaattaacaccatgcttacgatacctcagccgatggacttaatactgtactaacattggaactgaccctgcggcagttcatctcacaaccgcttgagcgactcctcgcttcaactgtgatgatcaatgacaatcatagtgcagcagaccatcggaaccatgatacacgacgtacagtacatgctagaagaca

SEQ ID NO: 113729 - DNA, 202 bp, Zea mays
  Clone ID: MRT4577_35205C.1
ctgctgtcggcgttcgtgatgtcggagatcaggacagtgtacgtgacggattgcccgggtgagcacgtccgccttgctccaaggccggcatctgccttcgctggtcagcctgtgccttggactcggaggtgcagagcgcgctgagcaacccgacactgcaggcccgcagcacgcacgaggtcatcgggctgctcaacgtgtg

SEQ ID NO: 113730 - DNA, 128 bp, Zea mays
  unsure (1)..(128): unsure at all n locations
  Clone ID: MRT4577_35206C.1
tnttgggggaaggaaaacaggattggatatatattcaatcactgggccaattggttcaggggcattggtacacaaactggggcaaaggggttaaaggtgcatgggggggtaacgtggccttccgtttc

SEQ ID NO: 113731 - DNA, 418 bp, Zea mays
  unsure (1)..(418): unsure at all n locations
  Clone ID: MRT4577_35207C.1
ccccggggctctcacacgagagctcaaaactcttctcgagaagtttacaaaacctccccancctacacggcgaggacttcaaaagtattgggcactaacaaccccaccccttcacacccacctgcacaggccgacaccgagcacccccaacgccgttgcaacgaccccagtcatatctcccgcccacaacaaagacaaagggggacttggcctcgaagtaggcgcacgccaacgtccacagatcggccactccactaacctcaccgactctatcacgccgcccaatactgctagcacaccgaggggcgctgtgcgcacacctccgcccaagtctcagcactcggatttctctacacccacccgacagaagatagccccgtggaccttcccatcttcctctccgtagaaacacaacagc

SEQ ID NO: 113732 - DNA, 207 bp, Zea mays
  Clone ID: MRT4577_35208C.1
tcatccatgtgagactgcatccaccaagtgcagggttactagacgcggctgttatgccctaaatgtccttttacctcatcctatacaggctgtagctctttatcttgtacttgttcttaataatgtcttaagcttttaatccgtacacttatagtaactaatctgagctaaggaaatataccttcacaatctttcaaacgatccatt

SEQ ID NO: 113733 - DNA, 119 bp, Zea mays
  Clone ID: MRT4577_35209C.1
gccacggcgctctccccagaccctccgtgtcctagcagaacgcacagatgacgaacgaggcgacgaaaggggcgatgaccacaataagactactcaagcgctagcgacaggagccgagg

SEQ ID NO: 113734 - DNA, 460 bp, Zea mays
  Clone ID: MRT4577_3520C.1
ggaaagaaaaacgggggggggattatttaaaaaaacaggttctaattcctgctaaaatacagccccccgggaaaacgaacattttatttacatacaatcccccaaggccagcagttttttaaagggcaaagccttttccgggaacatccacaggggagtctcctaaggggtaaaaacaaattatccgggaaagcaacccctttgcttccgaatggggacatacaaacattaaatattgggcaaaaaattaggccttttcatggggaacccattttgaaacccaggctcataagaagttggtggagggccttccaaccccaaagcaaatcatgttcataagcaggggttaacccattctaaataaaaacgccatcctaaaacaaaatatcatctcctccagttttttcagcaaaattctcatcagggctcaaaaaaccgctgttctccatgttttcttttc

SEQ ID NO: 113735 - DNA, 356 bp, Zea mays
  Clone ID: MRT4577_35210C.1
gggagaagggcgctgtcgtctaataagggaggaagccagcagcagcaaagcgccctaaggattcgccagctgctggtgtactgcctgttcggcgtcctggcaggactcgtgggcggcctgctaggcatgggcggtggcttcattatggggccactcttcctggagctcggaatccctccacaggtgtctagtgctacagccacgttcacgatgatgttctcgtcgtccatgtcggtcgtggagtactacctgctgcaccgcttcccagtgccttatgctgcttacttcacgggcgtggcgttcgtgggcgccatcacggggcagcactgcgtgaggcagctgatcgcgtggctggg

SEQ ID NO: 113736 - DNA, 636 bp, Zea mays
  unsure (1)..(636): unsure at all n locations
  Clone ID: MRT4577_35211C.1
atccaagccgcacccactagctcccagctgcagcaagcaagcgaagctcgtgcgtgtgcaggcgagcgagctcagaaaccaccctacaaagctccggctgagccacccgaccggccggcgacgatgccgatgctcatccccgacgacgttcgcgccaaggcggagatctacaccggcgacgcggcggggcaggagaagacgcggctgatgctggcggagacggagctccccagcggcctcctgccgctcaaggacatcatcgagtgcgggtacgtggaggagactggcttcgtgtggctcaagcagaagaagcgggtggaccactacttcgccaaggccggccgccatgtctcctacgccaccgaggtctgcgccatcgccgagaagggccgcctgaagaagatctccggcgtcaaggccaaggagatgctcatctgggtcaacctccacgagatctgcgtcgacgacccgcccaccggcaagctccactgcaaggccatcggcggcctctcccgcagcttccccgtggaggcattcgaggccaccgacgccctgcccgtgccgntcaccggacgtctcaagaagaagacagagaaggagagcgccgaccagagacgagaagaagaaggaggagga

SEQ ID NO: 113737 - DNA, 1075 bp, Zea mays
  Clone ID: MRT4577_35212C.1
ctccccgggctagtgctgtcctctgcagtttagaaaatagaatgatatcagtggaaagaatgttgcagtatacgactattccttcagaaccaccacttacaatatcagaacgccaaccaaatagacagtggccaacaaagggcgaaattgagtttcttaacctccatgttcgatatgcaccgcagctgccttttgttttaaaaggcctgacgtgcaccttactcggaggaaagaagacaggtattgttggtagaacaggtggtggcaaatcaaccttgattcaggcactatttcgcattgtggacccatgtattggccaagtgtttatagatggcactgacatctgcaccattggactacatgacctccggacaagattgagcatcattccacaagatcctgttatgtttgaggggaccttgcgaaccaatattgacccccttggggagtacagtgacgagaaaatctgggaggcattggattcatgtcatcttggggatgaagttagaaagaacgagcttaagcttgactctacagtgacagaaaggggcaaaaactggagcacaggtcagcgtcaacttgtgtgtctgggaagggtgattctgaaacggaggaagatcttggttttggatgaggcaacttcatccgtggatccaattacagacagcttgattcaaaaaaccttaaagaaaccttaaagtcttgcttctggataacggtgaaattgcagagcatgacgccccagcaaaactgctagaggacagttcatccctattctccaaacttgtatctgagtataccatgggatctgataagtggcgaatgcaagaaagcagctaaatcaatactctacagataatacaggacaaacgccctaggaagtgtgagtatctacgtgttaccaattttatagcttaataaaaagatttttttttaaaaaaaaactatgaatatccatattccccaaggcccttggaagtgtgaaatatttgtttcattgtaaaaacatgaaacttctctccttggatatttccggagccagaattcagagcaaaaaaaaaaaaaaaaaaaactc

SEQ ID NO: 113738 - DNA, 637 bp, Zea mays
  unsure (1)..(637): unsure at all n locations
  Clone ID: MRT4577_35213C.1
tgtttgaggggaccttgcgaaccaatattgaccccttggggagtacagtgacgaganaatctggnaggcattggattcatgtcatcttggggatgaagttagaaagaacgagcttaagcttgactctacagtgacagaaaagggcaaaaactggagcacaggtcagcgtcaacttgtgtgtctgggaagggtgattctgaaacggaggaagatcttggttttggatgaggcaacttcatccgtggatccaattacagacagcttgattcaaaaaaccttaaaacaacaatttctcaaatgcacaatgattacaatagctcaccgtatcacatcagttcttgatagcgacaaagtcttgcttctggataatggtgaaattgcagagcatgacgccccagcaaaactgctagaggacagttcatccctattctccaaacttgtatctgagtataccatgggatctgataagtggcgaatgcaagaaagcagctaaatcaatactctacagataatacaggacaaacgccctaggaagtgtgagtatctacgtgtcaccaattttatagcttaataaaaagcaaatttttaaaaaacaaaaaaaaaaaaaaaaaaatcttcctcgcgacaagttacgacg

SEQ ID NO: 113739 - DNA, 1979 bp, Zea mays
  Clone ID: MRT4577_35214C.1
tgtctatttggttggcgttctgatattgtaagtggtggttctgaaggaatagtcgtatactgcaacattctttccactgatatcattctattttccaaactgcagaggacagcaatagcccacccttgtagcatattgaggcttagtccataagtgaccgcaagaccagcagtctttgggtcaattaaagcagatggtgaagagaccagaagtatcaatgtgaaggaaaaaacaaaggatgaaagcatatccaaacgaaagcacaaccattccattgcggctgcattatacaaacttggtcgagataaattatccaccaaatatccaatataacggataaattgtctttccttttgaaagcatctaattatatttgagccagccattgattcagaaaaatgttgaagcacgggggacctgcaaactccaaccaacctttgcaactctctagctgcatctatgtagtattgctaaaagttggagtgtgtgaacatcaatgagaaaattggcaccatcagttttaaaaatagaaaaccaatacaattataatttatatataatttacctgataccacagcgatgcagtaataatggggacaaaaactatgaagacttgccatgcaacatgtgacatcagaataactgttcctagaatctcaatagcaggaaatagaaggtagcccatcaggtcaaaaattcttgtatccactgtgctttgatctgtggaagcaattgtgtacagagttgcatgaaatgcgtggctttagcctcgttgaatcggcacataagcatcagcatgcaaacagctgacagaatcaccagattgtagcattggcaatcctcagtaaaagggtattcagatcctcttctacaggaggtgcaaggaaaatggaagtgaccattgccaatcaagcgaccaagatcaattaatgggatatggtataaaaataatgctttccaagtcccaaccaaacgatcaatctaactcctagtttttcacataagcggctcacattcatttgttggaggaaacacgactgtaatattcagtgaagtcaaggcggaagagaaggaacttcaaatcgacgtgctgttgcatgggcagctgcgtaataaaagcatcaagagaagctgtataatcctttgcgatgctatccaggtcttcacccattttccagaaaagttctccagctagttggatcatagcttttctgccgccatcaaaccatgaacctgtatcctttgattttgatttaccctttccccttagctgcaactcatatatcctttcaaaccatcgatcagcatggcttcgaaactgtaaaataatgtcaaacagttcaaacagattcctcaaaagtccttgggaatgttcaccaagcagggccttctccagtatcgagttgagatatttatcgtgtgctaagagaaggtcatctaaatcctttgctgcatccatttcatcagaaaaacgggcccacgaaacctccaggacctcaaacataatgtagtattggaaattggtcacaaagtgattcatctcattgaatagaacttgacatttacgaagaactgatacaaattgagctctgatgcttgttccttccttgtaaaatggagaagaaacaatgcagttaggtttcatagtcttccacactccggtaagggagtgatctacgcgtttgagcttccacaagaagttgaaaaccttgagatacatcttcataactgaagctgtgaacacagtgtccagggggaccctagcatcatactccaaagagaagacatcccagccacgatcaccatccccatgatccatcatctttacctttatccggtccaagatataacagtcatcatattgtgcattggatgctcggattgcagtctcaagcaagccagccaattggaaggagctaatcctatttgctggctctgataactcggggccaacaacgtccataagatactggacaaaa

SEQ ID NO: 113740 - DNA, 181 bp, Zea mays
  Clone ID: MRT4577_35215C.1
cagagacaccatcccgcccctccattgcttataccaattcttcaagagcgacacattttgatattgtctgtaagaagctcgagtgcacttacgagcataaccccaacaacgacgtcaacttgacgcatttgcacttatcactactaaaactatcacaactcactaacagacccaacagatt

SEQ ID NO: 113741 - DNA, 458 bp, Zea mays
  Clone ID: MRT4577_35216C.1
aacaaaccaaacaatcccgcagtttttttttttttggacctgaatgaacagaatcacaaaatccccccaatttcccagcttctgggtcggaaagtgaataaacagaattaaaaagcttcccccgattccccaccttctggtccgggaagtgaataaaccgaaatacaatacagggcattatggccactttgcccccaagggacccacccgggaaaccagatctgacaggccccaattgcccacaaggcaaaaaaaggcgtccaccttggcccccaggggccccccgacgcccccgaggggggcggcagccgccccatccttcaaggggatcaaccctgggaccccctagagcccgaacccggggcccaccctccacgggtgcccccaagcgggccaagaggccttgtccccgcccaaggcccccaggaccaccccctccttggcctccagagcctcca

SEQ ID NO: 113742 - DNA, 493 bp, Zea mays
  unsure (1)..(493): unsure at all n locations
  Clone ID: MRT4577_35217C.1
gaaccaacccngaccggggggaggccgggaggaacacaaaaagacgcccgggggaacagacgngcaaagcgancgccggaccggggaaaaggggcaccaaccnggacggggccaacgggcgaccacaaaggcncgnggccaaggccaagggcccacacagcacnngcngggggggagaggggaccanccccccaagngaaagagngcacgacaaaanncgggggaaagggggcacgcgnccgcgcggccccaaaaaaaagaaaaaaaaaagaaaaaaaaaaaaaaaaaagcggccccacgagcaccagcnncngcccccncaagagaggaaaaagggcgcgccnggccaaaacaggggcagagccgccccccgagagaaaaggaaagccgaccacaacnccacacaacagaccacccggaagcaaaaagggaaaagccggggccgcccaaaaagaaaaccaacccaacaaaagggcggagcgcacaccgcccc

SEQ ID NO: 113743 - DNA, 552 bp, Zea mays
  Clone ID: MRT4577_35218C.1
cccacgcgtccgccactcgtccttagaaacagtacaacgagaacaggaatgcaaataagggtgatgtcgagccaaagaataatgcgaaaaacgtccccagcaccaacaacccgtctgctgaacgtctgccgaacaaagagagctcgaacaacagcgcggtcccaaggcaagatcaaacatcagacggcgattcaggatacagcagggacactcggtctcctaagcgcgacaccaccgtcagcgcaccatcagatgggagcccatcgagtgacaccctcaacagcaaggcgtccggctggagctcgtcacggttccacgactgcacggacagacagcttgatgacacaccggcgccatgcagcatcgcggacatagagagtgtcctgcaggcgctgcaacgcgccaggatatccctgagcgccaagctgagcaagccagtcccccccagccaggtgacgctggcgctcccggcgccctgagacgagcacagagagtacgacgacgacgacctgccgaccgacgacggctcgtacggtgatgaaaagctgagcg

SEQ ID NO: 113744 - DNA, 654 bp, Zea mays
  Clone ID: MRT4577_35219C.1
gcggccggaaaaaaaaaaattaccaaaaaaaaaaaaaaaaaaaaaaaaaaaaaaaaaaaaaaaaaaaaaaaaaaaaaataaaacaaaaaaaaaaaaaaaaaaaaaattttaccccaacggggaaacccccccccgttgaagggcccataccccccgaagaaaattgaaagggggggttttgtaaaaacccaaaaaacaaaggggtatttaaagggtttccagggaaatttaaaaaaaaggggcgttggaaaaaaaaataacggggccagaaaagggttgtttacccaaaaaaaaaacaggtccaatccccccaaaaacaattttttttttttttttcccaacagggacttcacagaaaaaattttttttgttaaaaaaaaaggggaaagggttttggtttcggttaaccccaatgagtgcccacaaaatggttttaaagtgggtttaacaaattatgaagttgccaactgaattggccttttgtgggctccccgggggctaaaaacccgggttttaaaaaagaaatatgagggaaatgttaaggcccctggggagaacttctctgttaacccatttaaaaaaagaaggcctttccgggctctctggaatgtggcccttattaggacaacaactggaaaccgggtttttggggcc

SEQ ID NO: 113745 - DNA, 808 bp, Zea mays
  Clone ID: MRT4577_3521C.1
gcgcactgtcttcccaacagccgagcagtcaactgaacggcagcccaccaagcgtcccagccggtcattgagaggcgctgccgcggggcctgggcgtcccgggaactgcaggaacgatgcagtcgctgcaggacaaggcgtcggagtggagcggcgtcgcggccgccgacgccttcgccatcgacgaagtcaacgtcttcgaggcgctcggcggcaccccgcagcccttcgtcgacctctccaccaacttctacaccagggtttatgaggacgaggaggagtggttccgggagatattctcggggtccaagaaggaggacgcgatccagaaccagtacgagttcttggtgcagcggatgggcggcccgccgctattctcccagaggagaggacatcctgccttgataggacgacatcggccattcccagttacccaccgagctgcggagcgatggctacaccacatgcagcaagctctggaaaccaccgaaagcataaacccagatacaaaacccaaaatgatgaattttttcaggcacactgcatacttccttgtcgccggtaatgagatgacaaggcaaacccaaagtgtacctccctgcaaacatgcaacgagcaaaccagccgagtaaccgctcaagcttaaccagttgaataacggtttcagctcccatattcctataggattcccatgtgcaatgggatcaaggttgtttatgcattatgcattataggaaacgacacgcctgatgttgtatgggcagagacactcgtgcagagagcatctcaaaattgataaattgcttac

SEQ ID NO: 113746 - DNA, 460 bp, Zea mays
  Clone ID: MRT4577_35220C.1
taaccctttttttttttttttttttttttttttttttttttttttacaaatcgtccaaatccctttttgagttgctaaactgacaaatcaatttgaattcttgaccttacaacaaaaacgtttttgtgggattccacccacatcgcacaaaggaataatccctcctttccaaaaaaaaaacaatccgataaaaaaattttaaatagggggcaacacaacaccacaccacaacacctattttaggatttacccacgacgcaccgttggtttttgctccagcacggtcgtcgtcgggtggttcgccgcctaatttccttgccagccatcccgatcaccaaacagttgatttacccacgcgtgtgcacgcaccgttgccgccgccgccgccggaaaggccctggtcgtggcgctcgacccactggaggatgtacttgaaggcctcggtctcccaggggatggc

SEQ ID NO: 113747 - DNA, 643 bp, Zea mays
  Clone ID: MRT4577_35221C.1
gaaacatcaagagtcacacagccctagcaagtttagcagatccagagccgaagatgagcggggtgaagaaggtgacggacgttgcggccaaggccgggaaggcgatcgactgggacggcctggccaagatgctcgtctccgacgaggcccggaaggagttcgccaacctccgccgcaccttcgaggatgtcaaccacagctccagaccaagttctcccaggaaccaaagccaattgactgggaatactacaaaaagggaatcggatcgaaagttgtggatatgtacaaggaggcttatgatagcattgagatcccaaagtatgttgacactgtcactcctgagtacaagccaaagtttgatgctctgttaatcgaaatgaaggaagcagagaagacatctctgatggaatcagagaggatagagaaggagattgctgaattgaaagagatgaagaaaaagatcagcacaatgacagcagacgagtacttcgcgaagcaccctgaactcaagaagaagtttgatgatgagatccgtaatgattactggggatactagataacggcgaaagtccaagttcttttactagaacatgcaataatacttatttgtccctctggaatctcatcatccatacttgggtga

SEQ ID NO: 113748 - DNA, 287 bp, Zea mays
  unsure (1)..(287): unsure at all n locations
  Clone ID: MRT4577_35222C.1
taccacacctacgctaaccatcacgcactcccttctaccattcaacccttacactcagggcggaccaaccttaggtanccacatttcacaaccctaacttcatatactacctaattctcactttcaataacttcatcaatatcaccaccaaattcacctacatcaccctacaacaacatctcaactctctccaaacacaccttacatatcacacttgtccataatatcaatcttctatacaaataaccaacacttcacatcattcctcatcaaagaacaccacttac

SEQ ID NO: 113749 - DNA, 322 bp, Zea mays
  Clone ID: MRT4577_35223C.1
aacggatcccagctcccgccggccactcgtctagactcgagagcggcacgatgcctccttctctgcaccctccccacctccacttccacaagctcaagcgccgccaccaccccgccgccatggccaagaagggcctggccgccatcctctacaagctccgcgacgagcactgcccgccctccgcctcgctgccgccgtcaaccccgctgcgtgcaccacttgcagcgctgcgagacgccgacgctgagctctcggaggtatccgaagtgattttcaccgacgatgatagcttgcaagggtccattgaacacttgcaggaggc

SEQ ID NO: 113750 - DNA, 343 bp, Zea mays
  Clone ID: MRT4577_35224C.1
attaaaaattaaatcctgggaatgagaaacaccagcgcggaaaccatgcatggatgctgcaaaactgcatagcttaacatgcttatatctgggggcgggcatgaatacagatagactgctgcctctgaggccactctggttgcttacgaactaggggaccattaggtgtgtgcctgaaagggagacagcacagattattgcttgttgcgagagaagggggtgcggctgggattgcttttggcgctgaacattgcgcgcgccttgccgtccggggggggcgggggggcctttttatctccgcctggggggcggtgtgggcgctgcggcgcccaggtggtgccgc

SEQ ID NO: 113751 - DNA, 332 bp, Zea mays
  Clone ID: MRT4577_35225C.1
cgccggttcgaccccttcgaccttcccgacgcgccgcccgaaaccctagctccaccgatctatctctatccagcccaggcagggggaggagatggcggcggcgccagcggccggagggcagggaggcaggggtatggacgccgtgctcctcgacgacatcatacgccgcctgctcgaggtgcggaccgcgcgccccgggaagcaagtgcagctctgcgagtcggagatccgtcagctctgcaccgactgccgcgagatctttctcaaccaaccaaaccttctcgagctcgaggcgcccatcaagatctgcggagacatccatggtcaataca

SEQ ID NO: 113752 - DNA, 190 bp, Zea mays
  Clone ID: MRT4577_35226C.1
acctagggtgctgggcgtccaacgcaactagggggggcctgacgttctggctggacacgatacactattagatgatgaggggtacgactacgagcaaggtgctacttttgtccatacaacctgtctactcggttcgtgcaaggttttcgtgattcagggtcaatgcgttcactgcagcaacttgcccatg

SEQ ID NO: 113753 - DNA, 448 bp, Zea mays
  Clone ID: MRT4577_35227C.1
tcggcatccacacaagcacttttacgtcgcacggtctctgtacacaaacacaccaagcgtttgcaccaatggcttactaccaggaagtggactactggccggaagaagggaagtccgtggcccctgccggcttctgcccccacagaagcggggtccaacaacacggcgtcaaagagaagttcgaggaggtcgacacggtcttacgcgccggcgccaaccaccaccaccaccaccatggtcaccactgcggccactgctttttggtgctcgagacacatgtcgaggaggacatcaacacctgcaccggcgaggtccacgaacgcagggagagctttcttgccagggctaactgaaccgcccggcggccggcattcacacccgttctgtgccttcctgcgtgccttatttatatctgtggtttgactgggtgttcaaggtcatcgtactt

SEQ ID NO: 113754 - DNA, 478 bp, Zea mays
  Clone ID: MRT4577_35228C.1
gggggaatataaacgggggatccccttcccatgggggggtaaaaaaaagaccggcaggggggggcgccctccagggaacgggactttggaggaccaacaaaaggggaaaccctgcctcaaatacagggggggacggggcccccccaaaaaggtcctagaactaaaacgggtttgaaaaaaaaaccactcccgccccccaggaattgaaacccctaaaaccactaggtcaggggaaccaccaaagggatatgggcgggaaccccgggggggaaatggcccgcaacaaggaaaccggggaggacccattcgaggcaaacaccctaattgattttgaactaaaaaaaggccttgggccccttggccttgaatttgggggagggaaccctgaacaccccgtttttaaaggcaaccttgaactggcccactttgaaagcctggggagaaaggcccatggggtatttgtacccccccgggccct

SEQ ID NO: 113755 - DNA, 272 bp, Zea mays
  Clone ID: MRT4577_35229C.1
aaacaaaaaactggttttggccaccgatggaggggttcaattttcgccatttccctttttaccggagtttttggtccaagactgggggagtccctttaacagcgaccatccaggcaaccaaaacccccattcttggggttaaaccccctctaattgggaaaaaaaccaaaatgggctggttcccgccatctgggtggggggggggggtccagctcaaaccacggcttggggggccctttcaaagggcggttttgatgctgccccattcttaa

SEQ ID NO: 113756 - DNA, 339 bp, Zea mays
  Clone ID: MRT4577_3522C.1
tctgaacctgatctggtcctaacaacctcggtggctagttgacatatgcgcgggttaagcgctagatatgtcgagcgattgaagatactcatatgagtataatacgattcggatacgcgtaccttcgtggctatgaatacttggtcactgccgtacacttatcactccacggaagatgaagggatgatgaaaagaccgctagtataggccacgtgcttgaactatggtagcaagagctctagacgcaggtgactgtacttaacctggtaagccgaattggatcgtcaaggtacactcatagtaagctattatgcaatacatagtctatgattcttgata

SEQ ID NO: 113757 - DNA, 273 bp, Zea mays
  Clone ID: MRT4577_35230C.1
gtctgataaacaggagatttatgaccttctttcacagcaacctatggacgatgacaccctgggcaacacaaaaaacatcgcttgtgcaaccgacaataaaccttgcgaacacaactccgtcttctaagaacaacagaaactgggacctggccaccatcctaaccggtgctattgaccactccctataaccaaaccatcatgcgctcggtgagaatcacacacataagccccaaagacccttctgaagctgctttaatatcatcaatgaaccac

SEQ ID NO: 113758 - DNA, 483 bp, Zea mays
  unsure (1)..(483): unsure at all n locations
  Clone ID: MRT4577_35231C.1
atctttattcttcacaatttgtgagaggagaaggctaggttctagatgggctgccgatgtaaccttgatnnnntnatcctttnttnntnttntnccnanttntnacaaaatcatctctatctactatncttncanatnntnnnnantnntnttncctttncccttaatatnttnattccacccaanaanaattntttanacataaaataannnatttnccctttaccctaattatccaacanattattcactttattnnacatcatnaaattantantccaanttattnatccaattataccctanntcacttcattnnatcatcttttccattaatntatcaatttaatatattntattttccaaatataataaactatataataacatctaaataaattcaacttattctncaatnatntatcttntntctaatcanccactaacatnttnattntatnttcctttcttcancttctcaat

SEQ ID NO: 113759 - DNA, 385 bp, Zea mays
  Clone ID: MRT4577_35232C.1
ctcccccaaccaaaaaaatggggatattaaaaatccattggggggcaaaaaaatcggagcggcattcccttttcctgttggggacaaaaattgggcatctaatgggggtttattttaacagttccccaaggcaaaatccatcacatgtccctttacataaaaagggacccaaaatatccgggggccttagggaaaaaaaatgctccaatggggaactaaaaaaaggcccccccaacaatggattaaaacagggcattggtgggggccccctgcccctttcaccccttaaaagcataatttgccccaagccttgctttaggagttagccctaaccccgctgaaagggcttcggaaaactccttggttcaagggaaaacttaaccca

SEQ ID NO: 113760 - DNA, 528 bp, Zea mays
  Clone ID: MRT4577_35233C.1
acctcatgtggcgccgccacctcctccgccgcctcctcccatctccggccacggccggcaccccctccccgttggttcgccacctctccacgacacccaccccctcctccaccaccgataccacctccatcgcctcctccctcgccgccgcggtcaccaagctctcatccaccccgccccccgccacctccccggacgcctacttctccctccacttctccgacgtccgccctaccaacgcgctcctcgccgagacgctctccctctcccctcccgccacctcgcgcgccgccgctgaccttttccgcttcctcgtccgccgctcgctccacccctccgacggtgctctcgccctcgtcgtccgccatctcgcccgccgccgcgactttcccgccgtccgcacgctccttcaggagttcccctccgcgctagggccagacacagtcgacgcctacctctttcatctggcgagagctgggcgcgccacggacgcgctcaaggtgttcgacgaattgcctggggagcttc

SEQ ID NO: 113761 - DNA, 247 bp, Zea mays
  Clone ID: MRT4577_35234C.1
aaccgcggcaagaccctaacaaatgcatttttataaagaactttgcatttcccttcctagaacaggtttttcaaaaagaagggaaaaaagggggcccccaaattgcacaattttttggccccaaccataagggttttttgagaaaactgggaacccaggctggggcaaatcttattgtaggcgctttttttaattgcgatctatttgattaacgcttctcatttttcggggatgggaccaggaaatg

SEQ ID NO: 113762 - DNA, 384 bp, Zea mays
  Clone ID: MRT4577_35235C.1
gaaaaaagggggggggggggtttaaattacccttcccggggggcggaagtgaaaccccccaccttttttgcccctccgggccaacccttgggcaaaaccaaacagggccccttggggggccccccaaaacccgggggcctattttcccatttttccaaaaaagaaaaaaggcccaaaaacccccccccctaaaaaatatttttgatcggccccctcccaatataaatattccccccctcccgttggggccccccaacccttatttttggaccaaaaaccctcctttcgggcctattggcccccccaaaaaaggaatttgcccgccccattagccccccccataccctggctccggaaaaaaggccccctttggccctatggggg

SEQ ID NO: 113763 - DNA, 418 bp, Zea mays
  unsure (1)..(418): unsure at all n locations
  Clone ID: MRT4577_35236C.1
tgtaaagctggcatagaggaactatgcaatctatacagcatagttgacaaagggaaacttataatccagaactgcattgagtgtagtagtctttatttggctattacaggagaagcaacagcaatgcgatgcgaaaggattagaaactcgatgaggcggagcttgttcctgattcagaatatggtcccgtctatgttggctgatcaggttgctgatgtacataatganntctccgaaatatgaaattccttgttgatccagcagaagaagaagctggaaaagcggtcttgaagatgcttcgacattcggatgcaactgaagaacttgaaatgcatacattccttctagcatgttcaaagttaaatctgacatcacagaaagctatgttaatcgaaagacgggcaatccagaaattact

SEQ ID NO: 113764 - DNA, 421 bp, Zea mays
  unsure (1)..(421): unsure at all n locations
  Clone ID: MRT4577_35237C.1
aacatccnttcccccttattctatataaccagatgcctgaacaccatgaatgaacttttttaaaacatgatgagccaccccaatttnncnnaacaaaaatatttatctaataaagaccctcatattctccaatcaagtccatcaacttagattacaacatcccacaaaanttcattatattaccaccctttttttcaattccaccccttcttcctactttgtcttgcaatcttttaacttttttatccaaacttccttctttcatcccatcttataacgttaacgaacctccttaaataaacatcatcaaccataccaacaatacaaaccaaataaaaaaagcccattatttatgttcgttcgctcaagttcccattgcttagacaaaaatataagcttcaaatcaatnttaaacttctta

SEQ ID NO: 113765 - DNA, 658 bp, Zea mays
  Clone ID: MRT4577_35238C.1
gggtacctcgaggccggccgggccggggattcattggtattatcctgcaacagtcttattccgcatcggaaatgacctagcgtgcattgtgcctaacctgctattgctaactcacatcttagaaagaaaacatttaaaactgttgtggcccgtgaaagggcctctagtgtaatggttaaggcttccgagtagcacctccaggtcccggatacgatccccctcgggaggcgaattttcgggcttggttaaaaaaatcccctcgttgtgccccgtccgctcccgagttgtcctgtgtgccaccctccggctgggccattgcatgggtggtgatgacccgctagtgatggggggccagggttcagaaattttcttggtcgagactatgttttcaatctcttcttaatataataccgggagggcgatctttccctcttcggtcgagtttttaactgttgtggcccaaaacagaaggactttgttcggactgataagtgttgttagaatgacttgctagagcaattgagaggaggcagagatctgcctggtgtcatcgctgatgataggccgaacgatgagataactaatttaggtactaagatgatcataaaaagaatctgcattcgagagaatgagcataaaagacatgaagcatgaaaga

SEQ ID NO: 113766 - DNA, 397 bp, Zea mays
  Clone ID: MRT4577_35239C.1
cacattaacaacaacttaacttcaatgcctaccaacatcttatcgcggtctggtccttcttgcactttttgcgagcgctacaaatacattcattattacacaatgctcactcgctccaagttccatcattacacacatcctaccaccagttacttcaatgggcttccaacacccaactgtgcaagcctataggctacaacaagccatttccgccagcgtcttacaacaaccaattttccatttgcaacaacaatccttggcacatctaacaatacaaaccatcgcaacgcaacaacaacaacaattcctaccatcacttaaccacctaaccattgtaaaccctgccgtctacttgcaacagcaattgcttgcatcacacccactttctcttgcaaac

SEQ ID NO: 113767 - DNA, 475 bp, Zea mays
  Clone ID: MRT4577_3523C.1
aggacatcacagtcatagtatattgacccacaaaacatgggaagaaaatacggggcccgtttttacatcgataggaggagccccaaccaagctatacacatttaggggggagaaaacttacatttgctcaccatagggtataagaattgacccactttttgcctaaaaagtgggggaacaaaaaaaaaattaaactgggattaaagaaaaaggggaactgggggaccctatagggagttttactcggcttatttattttgaaaaaaaccgccaaacactttttgtaaaaaaagcacccgctcatcttccatgggtatagaagccccttttgccttgggggccgatctggacgcctacttttttatactcggaaggaaaaaggaagatcctttctcgacagtgttttcctgccaaaagttttttgtggcaaacgaagatcttgtccttggcggccttgttctcgctggtgggcttc

SEQ ID NO: 113768 - DNA, 698 bp, Zea mays
  Clone ID: MRT4577_35240C.1
ccggccgggaaaacaaccatcaacatctcgtcgcgtcagaatcagatggcattttttcccctcctcccctcgtcgacgaatcgagtttggatccgtggcgtaaccaatcccaataaaaatcgccgcctccaattcttcaacctcggtgacaccagaagcagaggggtcgcgaattgatcgaggctttctgcagcccacttgtccactccaacacaagagccggggcggcggatcggccatggcgccgccacggcaagggggggagcaggcggaggcgggtgttcgcgattcggcgccggcgctgcgggcccccgcacacgtgatggcgcgggtgttctcgcagctcgactgcgtcgacctccttagctgctccctcgtctgcaagcaatggtaccgtgactccgcggagctgagagaggactggaggatggagtacctggacgcttggaaccagttcgggttgtcggtgacgcgcgagccgcagccgctgtgcgctacttgcgcgatcagaagcctgcgtagcctgtgcccttgaccttggcttggcaccttgctgctctctgcatccatgcgcctgtaattttgatcaggcaggttgttggtgcgctcatgagctgcttgtgtcgagctcgtcgttgtgtaattgcaatttgtagctacattggtgcatacttgtgggtgtccagttgcaagtgtaa

SEQ ID NO: 113769 - DNA, 1313 bp, Zea mays
  Clone ID: MRT4577_35241C.1
taccccgtctctgtccgccgagatatttttctcttctctcctgtgcggccactgccacccgccccgttcgttattatatatacaacaacaggctgccagtctccctcgttgacatcggttcaccgtccgcccaggtaccttccgtacgtacaagaggcggtcgcgacgctctagcttgcattgcaccagcgcgcagagcggaaggaggtggaaagcgcccagagagatctcgagagagagagagaggctggtcggcacagactagttcattccgtttggatagagacgcacgcaacgcaggccaccacaacgtgaggagcgggaggaggagggagagggaggatgcaggcgcatcaccgtcagtcgtactacgcggtgctcggcgtgcagccgggcgccaccgccgccgagatccgcgccgcctaccaccgcctcgccatgaggtggcacccggacaagatcgccagcggcggcggcggcgccgatccggcgcgcgcggaggaggccaagagcaggttccagcagatacacgaggcgtaccaagtgctgtcggatgacaagaggagggcgctgtacgacgccggcatgtacgacccgctggacgacgacgacgaccaggaggacgtcgagggattccacgacttcgtgcaggagatggtctcgctcatggccagagaggagcccgtgtacagcttggccgagctgcaatccatgctggacgggatgatcaaggatttcaccgcgccacagccttggcctagcggcttctacactggtggtggtggcggtggcggtggggcgtcgtcgccgtcgccgctcggcaaaccaagcagccaagagcagagtacggcttcgtcacgcttgcatccctacgggttcggggacgcgccgtgcttcagccgcacggcgttctcacaatgatggcgatgatgaataaataaatttatacatggatcgagcttttatccttctggcagcaatgggggttttctcgctcgtggaggtggagggagagtaagaacccgtgaaagccatcgtccgccagggtcagactctgattggcagttgcaattgctttggactgcggctgcagggatgaaagaaggtgaggtgggaagatagaccacaaggggcacgtagtcgcctagaatctccacccacaaggggtgtttgtttgtttgtactgtttggtttggtttggttttcgtctcttgcctggcatggtagagatgagttatgccagagcatttgtatacaagggtatgccattgccatcaagaataagttacgtcaatacaatttgtacatcaaaa

SEQ ID NO: 113770 - DNA, 826 bp, Zea mays
  unsure (1)..(826): unsure at all n locations
  Clone ID: MRT4577_35242C.1
cctgcaggtatcggtccggaattcccgggtcgacccacgcgtccgccaagaatgagcccgaggaccccgaggacaaagaggggagtcgggtggacaaagaggcccctgccatcaaaaggaagcccaaacccacaaaccaggtagaggtcaaagaggaagcgaagagcaactctcctgtcagcgagaagccggaccccacacccgccaaggacaaggccagcccagagcctgagaaggactttgtagagaaagcaaagccatcacctcatcccacaaaggacaaactgaaaggaaaggatgaaacggattctcccacagtgcacttgggcttggattcggactcggagagcgaacttgtcatagacttaggagaggatccttctgggagggagggtcgaaaaaacaagaaagatcccaaggtgccgtcgcctaagcaagacgctataggtaaaccgccaccgtcgtccacttcggcgggcaaccagtctcccccagagacaccggtactcacccgctcagccacccaagcacccgcggctggggtcaccgtggccgccgccaccaccagcacgatgtctaccgtcacagtcacggcaccggccaccgccgtcacgggaagcccggtgaagaagcagaggccgctcttaccgaaggagactgtcccagctgtgcagcgggtcgtgtggaacgcatcaactgtccagcagaaagaggtcacccagagcccatccacgtccaccatcacgctggtgaccagcacacagncggcagccctggtcagcagttcgggctcagcaagcaccctggcgtctgcaatcaatgccga

SEQ ID NO: 113771 - DNA, 324 bp, Zea mays
  Clone ID: MRT4577_35243C.1
tcccggtcgacccactcgtccgttaattctcacccaaattaagcaatgggttgtactgtttcagtatcaaaaggtcatagcacaatgtaaagttcttagatcaagatacatactgatggcaataacctctctatagaatcatcaaagttacacctccagatccttagtatcacatgccatatgtataccatttatgatgctagaatgtaccgatataaactatcctaccattcgcagaaaacctaattatgaacctctgtatttacattaactgatttcaatcaaatatatatctaattctatataatactcaaattgttcata

SEQ ID NO: 113772 - DNA, 543 bp, Zea mays
  unsure (1)..(543): unsure at all n locations
  Clone ID: MRT4577_35244C.1
ctagcggcttctacactggtggtggtgccggtgncggtggggcgtcgtcgccgtcgccgctcggcaaaccaagcagccaagagcagagtacggcttcgtcacgcttgcatccctacgggttcggggacgcgccgtgcttcagccgcacggcgttctcacaatgatggcggtgatgaataaattgatacatgggtcgagcttttatccttctggcagcaatgggggtttcctcgctcgtggaggtggagggagagtaggaacccgtgaaagccattgtccgccagggtcaggctctgatttgcagttgcaattgctttggactgcggggatgaaagaaggtgaggtgggaagatggaccacaaggagcacgtagtcgcctagaatcgccacccatcagcaaaagaaggggtgtttgtttgtactgtgtttggtttggtttggttttcgtctcttgcctgccgtggtagagatggtgttatgccagagaatttgtatacaagggtatgtcatcaagaataagttacgtcaatacaatttgtacat

SEQ ID NO: 113773 - DNA, 340 bp, Zea mays
  unsure (1)..(340): unsure at all n locations
  Clone ID: MRT4577_35245C.1
cgagcgaggacctacgacctcaaccatttttattttttnnncagcagncaccacgacagagcnaagataacgttcaaccaaccggacaaccacccaccnctaaggcctgaggggaccgacaacataaaggacaacgcaaaggcgccggagaaggcacaagctatcactggaggcacgctagactgactgctgatggaaccccatgagctgagagcacgcgcacgttgaacatcgtcttcccactcgacatcacttgctgtattggttggcgaagtgatgatgaaaacccatggcatatatcatcatcatcacgtcatgtgtaacaaagacgattactctc

SEQ ID NO: 113774 - DNA, 293 bp, Zea mays
  unsure (1)..(293): unsure at all n locations
  Clone ID: MRT4577_35246C.1
ctctctctctctcccgcaagaccggaaggagcggagccgccgagccgggaagagccaccaccccatcttcctcgcctccgcttccgaagggtgagttcctccgcgcatggccgcccactcccctccctagctatttctggctttgtggcgagccgtggtcgtccgtgctcgcggcgtatatatagatccgcctccccgttggtcgagtagatccatttgtgttcgttccgcttcggttcaactcggtctggcgcttagtcnttcgcgtcctcggtgattagatnccgtgcctc

SEQ ID NO: 113775 - DNA, 328 bp, Zea mays
  Clone ID: MRT4577_35247C.1
gggggtggggttttttttttttgggggttgttttttttttaaaaacaactttattttaaattgcttcatccaaactttttccaggacccgggtcatacaaatcccttaaaacttctttttaaacttgttgaaacaacctttttcctttctttaacattgcccacagtttataatggagggctcccccaaactttgcccaaagatgaaatttagggccaaacctttaccattacctaaagggcttctccccatttccttcaccttttatagtcctaaggcttttgggaggtgcaaatttcccttctaaatttccataaaattctgggag

SEQ ID NO: 113776 - DNA, 395 bp, Zea mays
  unsure (1)..(395): unsure at all n locations
  Clone ID: MRT4577_35248C.1
ggcccaaattttcacatttttatggggaacccaacgggaaaaattacagggaccccgggaaaaaaggggttcccgccagccccagtcccccaaggaatacccggggcccacccaactacaaacttttttattaccccccttttctttctggaaaaaaaggaacggggggacatacggaaacccccgttagctttgtttttttgggggaaaacgctggccaggactcgatcgaatcaaaggaaaatgctgtgggggatccccttgggggggaccccggggttatcccccttgccggaggggtggggaaaaaccagggggtagggaaacgggcccgccctggggggggtctgcgngcggggccgccgggggggggggtgccgggggggtgggcgggg

SEQ ID NO: 113777 - DNA, 454 bp, Zea mays
  Clone ID: MRT4577_35249C.1
accctagccgacctcttctccttgcgccgccgccgctgctgccgccgccatgtcgaagcgcgggaggggagggacggcggggaacaagttccgcatgtcgctgggtctccccgtcgcagcgaccgtgaactgcgcggacaacacaggcgccaagaacctctacatcatctccgtcaagggcatcaagggtaggctcaaccgcctgccgtccgcctgcgtcggtgacatggtcatggccaccgttaagaagggtgagcccgacctgaggaagaaggtcatgccagccgttatcgtccgccagcgcaagctgtggcgccgcaaggacggagactacatgtacttcgaaggatctgctatcactggacctattgggaaggagtgagctgacctttgacccaggattggtagggcagaaaatgctattgcctgatgctgctgggcgggataggggatg

SEQ ID NO: 113778 - DNA, 291 bp, Zea mays
  Clone ID: MRT4577_3524C.1
cggacgcgtggggagcttgtattcacgcatgctgctgctgttgccaaacttgtgtaccgggggattacccatcggcgtattccatatgctggtggacacgctcgtgctgtctaacgggctatcgattgtcagacacctgacaacctgggagaatccctaggcaatgatgccggagctgaccatgcgagacgcttgtgacaagctcggcatctacagtctcttcaatttaagactccttctgagcatcgctatgatcgggatctgtactggggctaacttgggaattgacaa

SEQ ID NO: 113779 - DNA, 762 bp, Zea mays
  Clone ID: MRT4577_35250C.1
ccggccggtgcaaaccctagccggcctcttctcctcgcgccgccgccgccgccgccgccatgtcgaagcgcgggaggggagggacggcggggaacaagttccgcatgtcgctgggtctccccgtcgcagcgaccgtgaactgcgcggacaatacaggcgccaagaacctctacatcatctccgtcaagggcatcaagggtaggctcaaccgcctgccgtccgcctgcgtcggcgacatggtcatggccaccgtcaagaagggtaagcccgacctcaggaagaaggtcatgcccgccgtcatcgtccgccagcgcaagctgtggcgccgcaaggacggagtctacatgtacttcgaagataatgctggagtcattgtgaaccccaagggcgagatgaaaggatctgctatcactggacctattggcaaggagtgcgctgacctttggcctaggattgctagtgcagcaaatgctattgtctgataccaccggttgggaggctagttgagatagttttcttgtgatccattttaaccttttctgtacttaaacatctgtggaaatttacttgattaatgtactaagggaaaagatgcttaggcgcacaattaaaataggccgaactgtgcacttctgtagtcagtttagtgatgtgctggcgctgtgatcttgtttggatttgtgcttttgtatgatcgttccagtattaagccctgtaccactatttttttttggccgaactgtaccactattcttttttagg

SEQ ID NO: 113780 - DNA, 853 bp, Zea mays
  Clone ID: MRT4577_35251C.1
tgggaccctcgaggccggccgggctctttccaatcccggcccactacaacacttctctcttcttagaaggaacagattcatcgagccagtgcaaaccctagccgacctcttctccttgcgccgccgccgctgctgccgccgccttgtcgaagcgcgggaggggagggacggcggggaacaagttccgcatgtcgctgggtctccccgtcgcagcgaccgtgaactgcgcggacaacacaggcgccaagaacctctacatcatctccgtcaagggcatcaagggtaggctcaaccgcctgccgtccgcctgcgtcggtgacatggtcatggccaccgtcaagaagggtaagcccgacctcaggaagaaggtcatgccagccgtcatcgtccgccagcgcaagctgtggcgccgcaaggacggagtctacatgtacttcgaagataatgctggagtcattgtgaaccccaagggcgagatgaaaggatctgctatcactggacctattggcaaggagtgtgctgacctttggcccaggattgctagtgcagcaaatgctattgtctgatactactggttgagatagttttattgtgatccattttaaccttttctgcacttcaacatctgtggaaatttacttgattaatgtactaagggaaaagacgcttaggcgcacaattaaaataggccgaactgtgcacttctgtagtcagtttagtgatgtgctggcgttgtgatcttgtttggatttgtgcttttgtatgatcgttccagtattaagccctgtaccactattcttttttaaaaaaaaaaaaaaaaaaaaaaaataaaaaaaaaaaaaaaaaagcggcc

SEQ ID NO: 113781 - DNA, 895 bp, Zea mays
  Clone ID: MRT4577_35252C.1
cggccgggaatacacacttctctcttcttagaaggaaagattcatcgagccagcgcaaaccctagccggcctcttctcctcgcgccgccgccatgtcgaagcgcgggaggggagggacggcggggaacaagttccgcatgtcgctgggtctccccgtcgcagcgaccgtgaactgcgcggacaatacaggcgccaagaacctctacatcatctccgtcaagggcatcaagggtaggctcaaccgcctgccgtccgcctgcgtcggcgacatggtcatggccaccgtcaagaagggtaagcccgacctcaggaagaaggtcatgcccgccgtcatcgtccgccagcgcaagctgtggcgccgcaaggacggagtctacatgtacttcgaagataatgctggagtcattgtgaaccccaagggcgagatgaaaggatctgccatcactggacctattggcaaggagtgcgctgacctttggcctaggattgctagtgcagcaaatgctattgtctgatactactggttgggaggctgggttgagatagttttattgtgatccattttaaccttttctgtacttcaacatctgtggaaatttacttgattaatgtactaagggaaaagacgcttaggcgcacaattaaaataggccgaactgtgcacttctgtagtcagtttagtgatgtgctggcgttgtgatcttgtttggatttgtgcttttgtatgatcgttccagtattaagccctgtaccactattcttttttaagccgaactgtaccaccattcttttttaggaatgtttgaagtaagatttttcttgattcaaaaaaaaaaaaaaaaaaaaaaaaaaaaagggcgcccacgcgtccgcccacgcgtccgcggacgcgtgg

SEQ ID NO: 113782 - DNA, 387 bp, Zea mays
  Clone ID: MRT4577_35253C.1
gggggtacaaaactgaaaaccccacaaaatggaaaacggcaaacgccagggacaaagaaaggaagaccgaacagggcaacggcttctcacggatgggaaacccataaaaaaacggaaagcatttgtccaacagatactgtctacagaaagaggcctttgataactcatgtcgagcacaacggccacatgtgcaattgtagatcgggaagacccattggggccagggaacacaagaacccactgaccatacaaacaaaacggctggccgccccagacaagactgcgcccaaagagggaaacccagcccatccgactgccagtacgaagaccccctccgcgagagtaaacaagatgaaaacaattgcctaccacactcaaccaggccga

SEQ ID NO: 113783 - DNA, 710 bp, Zea mays
  Clone ID: MRT4577_35254C.1
atctcaccacttcccctcgcgcttccttctcctccgcctcctcgacccgatcccactcgcggcatcctccgccgccgcggagcgatggcagcccgctccccttacttcgcccccgaggaaggcgcccggtgcatccgcccaggggagtcacctgccgcggcgctccgccggatcctggcgacgccaggcgcccaccaggcgccctgctgcttcgacgcgctcggcgcccgccttgtcgagcgcgcggggttcccgatctgcttcatgggcggtttctgtgtttctgcctcacgacttggattgccagatgttggattaatctcctatggagaaatggttgatcaagggcgtctaatcaccgaagcagtttcggttcccgtgattggtgatggagacaatggttacggaaattctatgaacatcaagagaactgtaaaaggatatattaatgctgggttggctggaatcatgcttgaagatcaggtggcaccaaaagcatgtggacacactgaaggaaggaaagtcatctcgagggaggaagcggtcatgcacataaaagctgctatagacactaggaaggagagtgcctctgacattgttattgtggcgaggacagattcccgtcaagctgtttctcttgatgaagcattatggagagttcaggcttttgctgatgctggagcagatgttctatttattgatgcccttgc

SEQ ID NO: 113784 - DNA, 1670 bp, Zea mays
  Clone ID: MRT4577_35255C.1
cgacggaggtagtaggagacgagctcctcgtcggtgggcgatgggcggtccaccagcgggggcgcagggcggtggaggctggcaagcggcgggggccgcagggcggtggtggccgcgggtggaggcgagcaaggagcgggagcgctggaggccgccagggtgctggagattagggttttcatttgtcgtgggagatgggcctcgtacaaattggcagatgggcctcatatggcacatgtgtctttgtcttcatggtttgcaagttaaaattagtaccacattgcccaccggttggtgtttaaatctgcttatatgcctacctgtgcgcgtagtagtactgttgtggtcactggatgcgttgtgggatgtatttttttggctgaaccaggagcatgcacggggaacttgtcagagaccgggatcatacgcagagatgggttatgtgggctttacctgtcagagaccgaaccggtagaacacaaaaaggcaggctactattgtagccttaataagtagtagagattaagctagcctttttagttgtgaaagaatttaagatacctaagaaaagaaataaactaggctaatctaaaatttatggtaacagttaagacgtacgatataatctaccttggatcattgattgttaattttttctctatccgtttaggaagatcatgtgcgcgcacgaacccgctccggctctccatcacatgggttggccactctggaaattaacatgatgggcctcacattgtcgctttcacggccctctttccaaatccaggcccaactacaacacttctctcttcttagaaggaacagattcatcgagccagtgcaaaccctagccgacctcttctccttgcgccgccgccgctgctgccgccgccatgtcgaagcgcggtacgtacgctccggtcccccattcgcttcggacgatccgactcgttttcctgttgcttctctcgcttatcggcaaactcagcccgcttcagcgtcgaaatggatgaactgccgcagggaggggagggacggcggggaacaagttccgcatgtcgctgggtctccccgtcgcagcgaccgtgaactgcgcggacaacacaggcgccaagaacctctacatcatctccgtcaagggcatcaagggtaggctcaaccgcctgccgtccgcctgcgtcggtgacatggtcatggccaccgtcaagaagggtaagcccgacctcaggaagaaggtcatgccagccgtcatcgtccgccagcgcaagctgtggcgccgcaaggacggagtctacatgtacttcgaaggtaactctcgccactttccctagtactacaacgcccgacatcgatgtacccaacccaatccgttctggtgtattgcttgacgctatgcgtctgatttgtcatctagcttgtagtgttgctgttgcttgtagcgtattgcgttgtctgacgccttaatcctatttagaatgtatttatgcaaatctcaacttttatcccagttttccaacagtaacaatgcttattgaatccagctagttgcttatttgtggatcctctctctttgttgttggccacctttatctcgtgatgtttgtgtgcatgtgaatactctgaatgtgcatttcgaagtttgagaagttacgacgcgttactgccattcc

SEQ ID NO: 113785 - DNA, 636 bp, Zea mays
  Clone ID: MRT4577_35256C.1
ttttttttttttttttgaagcaatgaaaatgtattttactcttaggatatatttttacaggagcgggacaccgttttgttttttttttggaggaggggggacaactatcacgagggatacaatacaacttaccaaggccgcgaggtaacaaactaacacggggcccatcgaaacagtaaattgtttcccggcccgctcggccgaacaagtgacgtccccattctaaatctaagcccacttctgactaaccacagcgcaacgaacaaagcgacaacatgagaggcagacgaaggccgccttccacttttcgatggcgccatggaacagcctgaactgcgatgtgagacgtacggcgccgcgccggtgcaggcacacatcgacgacgcagctagaaaatcgggggcggggggaggccggcggcggcgtgggcgtggctcccccgtgcctggtggcagagctggcgcaacctggtgggcacgtaccagatggtgaggcgcgggtgcgcggcgaagacggcgtcgatgtcgaagccgtggcgcgcggcgatctcgacgagcggcgcgtagcaggcctgcctccaggcaccgacgttctcgccacgggccttgtacgcccggcgcagcgcgttggaggcct

SEQ ID NO: 113786 - DNA, 2271 bp, Zea mays
  Clone ID: MRT4577_35257C.1
cattgggaccctcgaggccggccgggagtgttcttttctctctccagcggacaaagagcccgtccctctcctactcctcccccaaagttccgttccgttccgttccgttcagttcctctcccgcacgtcaaaaccctcaacctcccacgcggctcgctcgctcgctcgctgggtgggtcggccatggctccccccgcgctcggatctcaggtggccgccgcagcctcggtgcccgtcggctcggactctctcgccaagggcgcggcgctcaagggtaacagcactctaaactttcggaccaaaccatgcatcgggatggcattagcgtggaaaaacaggacccagcaaccacggcgtctgaacaaggtactctgcatgtctgttcaacaagcaagcagaagcaaggttgctgtcatgcccgtcgagttggagaaggcaaaggagccaccgctccacctctacaaaccaaaggagccttacacggccacgatcgtctctgtcgagaggcttgtaggacccagagctcctggcgaaacatgccacgttgtcattgatcatggcggcaatgttccgtactgggaaggacagagttacggcgttattcctcctggagagaatccaaaaaaacctggatctccgaatactgttaggctctattcaattgcttctactaggtatggtgattcttttgatggaaagacagcaagcttatgtgttcgtcgtgctgtttattatgatcctgaaactggagaggaagacccatcaaagagaggtgtctgcagtaacttcctgtgtggctcaaaaccaggggacaaagttcagatcacaggcccctcgggcaaaataatgcttcttcctgaggatgatccaaatgcgactcatatcatgattgccacggggaccggtgttgctccctaccgtggctacctacgtcgcatgttcatggaagatgtcccaactttcaaatttggtggtctggcttggctcttccttggtgttgcgaactctgacagccttctctatgatgaagagttcacaaactaccttcaacagtatccagacaatttcaggtacgacaaagcgctaagcagggagcagaagaacaagagcggcgggaagatgtacgtgcaggacaagatcgaggagtacagcgacgaaatcttcagactgctagatggcggtgcgcacatctacttctgtggtttgaaggggatgatgccggggatccaggacacgctcaagaaggtggctgagcaaagaggcgagagctgggaccagaagctgtcacagctgaaaaagaacaagcagtggcacgtcgaggtttactaggctataagatggcaaggattgtgattgtttagctactgagctgagaaactggacgtatgattgaacgactgtggctgcgatgtaatgtaacattgtagacttggattcataagcttctgctccaaatggtgaataaaatgaagcacgcggtttgtagctgctaaaaaaaaaaaaaaaaaaaaaaaaaaaaaaaaaaaaaactagccggcctcttctcctcgcgccgccgccgctgccgccgtcgtcatgtcgaagcgcgggaggggagggacggcggggaacaagttccgcatgtcgctgggtctccccgtcgcagcgaccgtgaactgtgcggacaacacaggcgccaagaacctctacatcatctccgtcaagggcatcaagggtaggctcaaccgcctgccgtccgcctgcgtcggcgacatggtcatggccaccgtcaagaagggtaagcccgacctcaggaagaaggtcatgcccgccgtcatcgtccgccagcgcaagctgtggcgccgcaaggacggagtctacatgtacttcgaagataatgctggagtcattgtgaaccccaagggcgagatgaaaggatctgctatcactggacctattggcaaggagtgcgctgacctttggcctaggattgctagtgcagcaaatgctattgtctgatactactggttgggaggctggttgagatagttttcttgtgatccattttaacctttttctgtacttcaacatctgtggaaatttacttgattaatgtaccaagggaaaagacgcttaggcgcacaattaaaataggcggaactgtgcacttctgtagtcagtttagtgatgtgctggcgctgtgatcttgtttggatttgtgcttttgtatgatcgttcaagtattaagccctgtaccactattcttttttaaaaaaaaaaaaaaaaaaaaaa

SEQ ID NO: 113787 - DNA, 163 bp, Zea mays
  Clone ID: MRT4577_35258C.1
cttcaataaactatagtgtcaacactatagatgcgggtaatcatacccataacgatacataagagaaaaagggtccactcacaattcgacgcaacatacgagacaaaggcatagagtgtaaagccgaggatgcatgataaataaacgaactcacattaagtgc

SEQ ID NO: 113788 - DNA, 141 bp, Zea mays
  Clone ID: MRT4577_35259C.1
aagactgagagtctgcgagatagagagacggatagtggagaggagtcccctgcacacaaagacgttgcttttgatggggatgaggctttactccatccccgcattggtaatagaagcctatacccctgttccaaaaaacat

SEQ ID NO: 113789 - DNA, 340 bp, Zea mays
  Clone ID: MRT4577_3525C.1
ctctggatctaggatctcactaaacgtgagggcaccactgagagtctgtcagcattgcatggaactcccaatttacttgaccctagtctgaatgtgcatgtacttctatcgaaccacaggagcatgacggggaaactgcaacgagagaatatgctcaaattctgccactatcatgtccacaccactaaccgatcgcttagagccacctgaaaacatcatcctgctcacaagagatcgatccctagctctagcatagagacacccttaggggagacctcgaacgggaactgatatgccctgcgatcccatgctacctgatccatgagcacatcagggcgtg

SEQ ID NO: 113790 - DNA, 756 bp, Zea mays
  Clone ID: MRT4577_35260C.1
accgccgccgccgcaggctcccagcacaaacaactgctaagcccactttgatggtgaatcgagccgttttgccgcagcaccatcgtcgacttgtagggatcaagggccagcgtcaacgcctttgaaagaaatcgaaggaattagggctactaataattcaggtggtgcgtagatcacaagaaggcgacggttaaggaagatcgaggatgccaaagcagcggcacgggaaacgcctaggcgctcttgagctagagcctcggcctcggcaggatcacctgtaccttgtctttgatgactggtcgttcggatataccatccgcaaggtaaatacgtcgaatcgcttcaatccccccgtgcagcgcttgcctcggcctttcttcaaattggaggcgccgcacgagtctccggagtacttcgcgtcagcctttggcactaggattttgctgatgcatcccagggatcctgcgggtcataacttgtccggcagcttcttccccatgttggacgtccgctcgcggagtctcacctttggccctgggctcgagtttccgattcatcccgtctatctcgccgtcggcaataagctattcattattgccgaagcctcttttgagatgctctacttggatccacaatctggctccgagtggtcgtgggaactgctcccacatccgccattccagatttacgacgtctgctcgtacgctttgtacggacattctctccttgtgagcaccgagaacgaagcctttgctg

SEQ ID NO: 113791 - DNA, 201 bp, Zea mays
  Clone ID: MRT4577_35261C.1
agccacgcttccggtttgttttcctgtaacatgtgtcacaagctgtgctatgtaccagtaaaccagtgttgtgcgatatgtagtgcctcagaatctagtcaagggaaagcagatgtaatagcatacttgtcgtctcacttgtgtgaatgtacaactaccaccaacagaccatagttgcgagtgccaaaaggcagcagaagc

SEQ ID NO: 113792 - DNA, 255 bp, Zea mays
  unsure (1)..(255): unsure at all n locations
  Clone ID: MRT4577_35262C.1
cgtccgtaggctcggaattcggctcgagccatgggggcggcgtatcagccgccgccgcagggaggaggaggaggacaggtttgctactactaccccngcagccgggcaggagaggganaccaaacgcagangnanccaccgngncgncccggcaccaccgggccaaggancggccgcgggaggcnnacgaaggcccgggaggacgccgcggggaggccgangangcgccggcggacggagccccaggagcgcagc

SEQ ID NO: 113793 - DNA, 435 bp, Zea mays
  Clone ID: MRT4577_35263C.1
atgtaactacctctattttgagcgctcacgggggaccactatgtgtgaggtagcgtcactagaaaactgtggtttcacagcgtgcacttattcatgtacccaaaataccattggctgttttgtgtcggacaacgaggccctgaaagtaggccatgcaaagattcttgaaggtttagctggatgccatttttggaactcatttactttaaaccgggtccatccactttttgctgctgacctaatgggttatagcgcccctgggagatcggtggtcaccattatgcccaaccgtgttcatctttttgtactccaaagggacagcgcaagcatcctagggtttgagagccaattcaagtaaaataaaaaccctaggagagctttgccctgtaagaaattgctctttaacatgcaaagaacgaagctgagctacaagtg

SEQ ID NO: 113794 - DNA, 321 bp, Zea mays
  Clone ID: MRT4577_35264C.1
atgggagctgggccacgcagtggaggtgtagctggctacacgcgctgggccgagaggaagggctgggtcgcgggcgagatggagatgggccacgagcgcaggccggcgggtggggaggggtcagggtgttacaaatctaacccccttaacaggaatctcgcccccgagattcaagaagaagctagcaagaaaacaagatattcacgaccactgatgcaattcttgaggatctcttggacctggttagcggctaacccccttaacaggagcgttgatacgcaattgatgaagatgctgccgactctgatcttgattgattaa

SEQ ID NO: 113795 - DNA, 142 bp, Zea mays
  unsure (1)..(142): unsure at all n locations
  Clone ID: MRT4577_35265C.1
ccggggccgcacccacgccgnnccggnncactgttcggttagnattctggcactaggcgctgtgcgggagacacttttgacagcaactccaattgtcggatccccaaagctacaatcggcgtcgctctctgatgaggatcaa

SEQ ID NO: 113796 - DNA, 606 bp, Zea mays
  Clone ID: MRT4577_35266C.1
gtacggatgatcctggagttgaaacctttcaactacaccaagtggtcgacgacgttgcaggccacgtgtgggaaatttgggctgatgcatgacctctccaccttgcgccccaccgatgcggtatgggcacaggctgacttctgcgtgcgcggatggatgtacagcaccacctccgacgccgtactcaacctcgccatgaccgacagtacccagacggcgagcgccctttggaaggccatcggcgaggtgttccaggcaaacaaagctccccgtgccgtcttcctgaatcacgagtttcactcgatgactcagggggacctgaccattgacgcctactgcgttcgcatgaaggagaaggccgacgaactacgcgacgttgggcagcccgtatctgagcccaacctcgtcctcaacctgctgcgtggacttaacgaggtctactccggcgtcgccgacaacatcggcggacagcagcccctgacgctggccaacgcacgccatgagcgtctcctcaaagagctgcggctggcgaacaccgagaagacgcgtgctggtgctgccctcctagctaatgttggtggttcgcagcagcagcaccaggagggc

SEQ ID NO: 113797 - DNA, 334 bp, Zea mays
  Clone ID: MRT4577_35267C.1
ctcacgcgtgcgccgagtcacaccgttagtacgattgctttgtgatcggccatgcaatcaatcgagcatcatgagttgcagactcattgtgtcacaagcttgatgtcgcacaagttctggtgctcagatcaagaggaggacatagtgttgcccgtttactgggaaatgctctacacgttgacgtccagggagttcgtttgctggccgaccgagcttgacgactactccaagtactccgtatccagctccggcttggaccgcttcgaaaagtccggtctcatgacgcagctgcctatgttcaagcggtgtctgagcatgatgttcgacagcaagt

SEQ ID NO: 113798 - DNA, 573 bp, Zea mays
  Clone ID: MRT4577_35268C.1
agaatataggttgaggtcgttcagactccctgaacacacctccccctctctcttttattggcattttatgcatttgggtccttacaaaatcttctaataacacacacacacatacaccaacagagatgaatagggttattgagagagcaactgaacccgccttcttagaccatctccagcagcactccgcatgcggctccgtatccgtattttgcggagtctagcacactattcatcagtccagcaggctccgtatccggctccgtaaaacgcacggcgtgtacccagactccccatttccacgctttctctctcctctccgcagctctctcgcgggcgcgcgcgcctgctggcgggccccaggtgtcatagactgcatgcggagtgggatggggaagtgttgctggaaacggagccggatacggagaggagagagaatgtgtcggccacgcgttttagggatacggagtcgcacactgctggagttggtcttagctcttcaaaggcatgcattgcttcgcagtcaagtcccccagcaaactggtggactctgtaggtgaagcgcacgctctg

SEQ ID NO: 113799 - DNA, 105 bp, Zea mays
  Clone ID: MRT4577_35269C.1
atcattattggaatgttttctaatcattatggggctacacgcataggtacttgggttactgattacacaagggatcattcttacgtatctccggggaggggacac

SEQ ID NO: 113800 - DNA, 257 bp, Zea mays
  unsure (1)..(257): unsure at all n locations
  Clone ID: MRT4577_3526C.1
ntttttttttttttaattcaaaacatcaattttagggggggggggtattattttttggttttttttctttcggggtaactaaaaccttattttaaagaaaagattagccttaaaaggccccacgcatatttttacttagatggctgggttaaacacccccaaaaattttttaaacattggagttttcttgtgtacttacaaaataaaaagcctggtcaagtaataaaccggggtttttggggccaatactttgggcc

SEQ ID NO: 113801 - DNA, 765 bp, Zea mays
  Clone ID: MRT4577_35270C.1
attggaacatctcttgtggaagaagataaacttgaggttgcaacttcccttattgagaaggcaaaggcaaagggggtttctcttttgcttcccagtgatattgtagtagaatgtctttgtgccttctaaaatgtgtatgtcaacgtcctctttagggactcattctccacatatataacattgtcatgtgtgacatattgtgttttacttaaaacacagaagggatacaactggtttaactctggtgccaaaatctcatatttgcggcgattagcatcgttgtcgacgagctatacctcctcggcacggactgcagcaggagtcgagaggcatcagaatgcatatggctttttatctgcacgaaacctcggcatgggcctcccgcgcgacgcttggcgctgcgatgttgtgtccctggtcttccgcgtcgccgctgactcggactaggtatggcgcaccttcctcccccggtagctcgaggacctgtagcagtggggcagcaactgcgtgtctctgtcgtcgtcgtcgcaggagggtcacccagcggcggccacgcacggcaacaacagcaaaaatgacccctacctcagcccctgcaatgccgccggtgccgtggccgttgagtggtgggggctaggggcagggtgcagggcttggctggagaggggcgggtgcaggggcgtgggaggagactgggatccaagagggcgggcgacgaggataatgtgccgccagaggtgcggtgccgggggacgtgatccgctg

SEQ ID NO: 113802 - DNA, 276 bp, Zea mays
  Clone ID: MRT4577_35271C.1
cttataagtgtttagcagcagctttgatagttctgacggagtctggcaggtctgctcaccaggtggccagataccgcccacgtgcccccatcattgctgtgacccggaatccccagacagctcgtcaggcccacctgtaccgtggcatcttcccttgctgtgcaaggacccagtccaggaggcctgggctgaggacgtggacctccgggtgaactttgccatgaatgttggcaaggcccgaggcttcttcaagaagggagatgtggtcattgtgct

SEQ ID NO: 113803 - DNA, 144 bp, Zea mays
  Clone ID: MRT4577_35272C.1
gcgtctgttctacaaggttggggtaacctggcttgcatgtcctgctttaatagcattagttgaggggatctttctgcagcatcagctcgtctgcttctatggctactgactcactctatggacagaaagcattgtctatggcca

SEQ ID NO: 113804 - DNA, 684 bp, Zea mays
  Clone ID: MRT4577_35273C.1
ccggccaccggccgggctgttcctcaattcctccatcgggcattggcttcgaccaaggctgatgatccatctttgaccatgcacatcctccgtttcttgccactcatcatcgccactctcctatccctcttgtcgttggcgctgaccgcagatgaggcgtcatccattgcccatgaccacgatcagctggtcgccttcgaggacgagctccagccaaacgaccacgtccacatcgacatcggcatcgacatcaagatcaacaacccgcgcctcctcggggcgcacaaggcgctgcaagcgttgaagcaagcgctctactctgatccaaacaacttcaccggcaactgggtgggccctgacgtgtgcgcctacaacggcgtgacctgcgtcccgtcgttgcacaaccagtcggagagcgccgtggcgtcgctcgacatgaacgccgcggacgttgcggggtacctgcccaaggacatcggcctcatggcggacctcgccgtgctccacctcaactccaaccgcttctgcggggtcatccctgaggagatcaggaacatgacagagctctacgagctcgacgccagcaacaaccgcttcgtcgggcccttccctgccgcggtgctcggcatcccaagctcagctacctagacatccggttcaacgacttcgatggccccatccgcc

SEQ ID NO: 113805 - DNA, 388 bp, Zea mays
  Clone ID: MRT4577_35274C.1
gaatttctattaccaggcacacaaggaacagctgggggatggacaaaccaacagcaaccgggtgcacgagctagaaattgagccacaaaatgactccaatccacgacccacatgttgaagtccaacggaaaatggagagcaattcctaaaccgacacctgccgaccaagttgacccaggacaaggagagacagcacccacagctgaacatcctcaaggaccataactacaagggcacgacgaagatgacgaaagacagataccaaagcctacgaggacaacacaaattcctgagaaaggcagaggagaaacaactgagagctcctaaagacaaatcctacttggagggaaaacataggatccaagagcctggttaggaaaagggatgg

SEQ ID NO: 113806 - DNA, 432 bp, Zea mays
  Clone ID: MRT4577_35275C.1
ttcctaaaaaaaaacaaaaagatatcgcacgtcacctagactagcttttgggtcgccagctaacgacctgcagccaaccatctaccaccgactcagcgagcgagagcagcacacacgcgcatacctatgagcatcacaagcggcggcggcgacggggccctccatgagctcctcgccagctctggcggtggaacctcacggactgccgcaccctcgaacgccgcgcctcctccttcgtcgtcgtcggctccacgaagaagaacaagaccaacaacccctacgggattgggggcggcctgaccaccgacgacgacgccaacggaagaaaaggcaacgggaaggaagtgcaccagttcgccgacaatcactgcgtcaaacgtcgactgatacagcccaatctacaacgaggatgactgcgctcccaccggagga

SEQ ID NO: 113807 - DNA, 872 bp, Zea mays
  unsure (1)..(872): unsure at all n locations
  Clone ID: MRT4577_35276C.1
aagggccaacataagaaggtaccctggttaatatctgggtancttaatgtgtttgaacccatcnaacatattgttttctctgttgtattaagttgagagatgacatctatattgaattttataccattcatatgtcctgactgttgtctttctattagcatatgtacaatattaaatctattgttaaattttttggatagttattgccaaatttaggcacccatagtttcttatctaatcctcccagatttgtaactacatatggccacacacttgtagatcagtagtggatggacagaaagtaaatgtatgtaaagtaatcaaatacaagcacatgaaccagtgtttacattctgtttgcaccattaaagtagaacagttctttgagaatttgtttgctttttctaaattagttgtaacaaagcttctaatatttttacctacttatcttcatggagtatcaattgaaaatcggttttgcttttatgttattgaggtcctgggatggaggtcgctggaccctctactcacttgccatggtaaatcctctcaactctggatgtcttccatttttttcttattaaagagttttcacctaatagttgattatgggttggtacatcaaggctgattcagttcaattttagcaacctttactgtttattaggtgcatttccaatattttgtgtttcggttagtaatttcttttgccagtttcatcaaacattgatcttctaaacaatttgtttgttttttgtgtgcctgccaaacttctcatattaatgggttatgagattcaagtactattgctttacatgaaagctgtattctctaccattcagcgaaatgtgcgaaacatgagaatacatttt

SEQ ID NO: 113808 - DNA, 898 bp, Zea mays
  unsure (1)..(898): unsure at all n locations
  Clone ID: MRT4577_35277C.1
gtgaagggaaccaaacctccattgtcccatcctcagcgtcttctccccgagcccagcaccaccctcctcgatcccaaagaccagaaagattttgcctttcctcttatcttctcctcaaattcaattcctcgtaatctcccttattggcatcgattccttcgatcttctccgctaccccctcccgtttcccgctgcttattgagttttggactctgcatgagtctatcaactcgcccttgttaaaggattcattgtccaattgcggtagctcgcgcggcaagattcggtttttgagtcggtgcgcgacggtagtggtccagattgctgagcccggctcgacgttctggcctgagacctaattcggtggcattgtggtgtggtgatggagcaggggaggaatcaacagcacccgcagcagttgtcgagtccgcctgttttggtcgccgcgagcgagataaaggcccctgcggtgccttcgcaacagcccaagccggcggcccccgtgatgtcggtgcctagacagtggccgatagctttcaaccccctgaagtcctccaccgaagaaaaaagtgttactccaaagaaaaagaagcattgtaattgtagaaactcaaaatgtttgaagatgtactgtgaatgctttcaagaacttcaatactgtgatggctgcaactgttcaaattgtggaaacattgttgggaatgagaatgccagaaacgaagcaattgaggcaattcgtcagcgtaatccgtctgcttttcagcctaaaattggaaatgactcaaatacactcaacgttcgaaaggataattctggagcagtccctctcgtagcaagcaccataaaagttgtcattgcaagaagtcagnatgcctaaagaagtactgtgatgctacca

SEQ ID NO: 113809 - DNA, 158 bp, Zea mays
  Clone ID: MRT4577_35278C.1
ggcggcggcgttgtctctgacgatgaacaccgccgtcctgggcttcttgggagcgggcggacacgccaccgcctccgccgtatttctgcaccctttccccctctgagaagccaaattgcagctttgagcttcgacaatgccataggccacgccacact

SEQ ID NO: 113810 - DNA, 425 bp, Zea mays
  unsure (1)..(425): unsure at all n locations
  Clone ID: MRT4577_35279C.1
ccttcacncacccagccaccattcccgaatccacccaggcgtccacttttctttcaatccatctagctactcaactcagttaatccatctattanctcaattgattataggtgcattcattggaggctctgcaatacacacagtaaaaacaccttttaatcgattttcagctcccctctacaattcgattcgataaagtacagctattactccaaccctcatcctccatgcattggctatcactgacatgaactacttctcttaattactaaaggagaaacaccatctctttctcaatcttaaccaacactagcttcatcaaatgaaaagcattcctctccattattcttgcatccttaacataccaacaactcaaagtatttataaaaactcaaaacctttttaatagatggtatctttgacca

SEQ ID NO: 113811 - DNA, 258 bp, Zea mays
  Clone ID: MRT4577_3527C.1
tttatcatcagctaagtttacactgtttttttttttttatgtttcatcttctttgttttttgttggagctaaaataagaggaaattagcatcccttcatcatttactggcttccatccttacaccattttttccactccagggtgggccacctcccccttttatgaaataacattaaggggtttactaacactcaccaggggggggtggaaccctgccttgtggatggaaaacgctatgcgaggccagaatctcttta

SEQ ID NO: 113812 - DNA, 357 bp, Zea mays
  Clone ID: MRT4577_35280C.1
gccggccggttcggggactctgatccaccgtctgcattttcaggctctgagccccggaagaggagacgcatcatcatcctcatggctgcaaggggtttccagctgaggctttcgcgctggtttcagcgatcccatgcaagtgtttcccagtcccaggacgaagacgaccgcggcggcgagaggaacggcttgatgaggagccacttggaccagatcgtgccagtcacggatttcgccggcacgtccaactccaaggcgttagcggttcgtgtggaaccagcaaagaccgtggcgctgaaggtgtccatgcactgctatggctgcgcagggaaggtcgagaagcaagtgaagaagctg

SEQ ID NO: 113813 - DNA, 179 bp, Zea mays
  Clone ID: MRT4577_35281C.1
cccgttcgacaccttttttttgttgttgggaacaatacttttttcttttcatttcaatagggccatcagacccatccgcaccagcagtcccaatgccggccacccgcggcggtttatgtagcgccgatagcgcatcaaccagactgcggtttacctgcctgcttcagtgcatttcatac

SEQ ID NO: 113814 - DNA, 170 bp, Zea mays
  Clone ID: MRT4577_35282C.1
ctgccggccgttgtagaccgaggtcggcgaggaacacggttctaatggggatccgtttggtctactgaactaaggacaaacaaagctcgttgcggtgcccgctatagtggctgcgtacgtcaaacatatgccttgagcctgtggttgttctgtcccggcacggcagggct

SEQ ID NO: 113815 - DNA, 1195 bp, Zea mays
  Clone ID: MRT4577_35283C.1
aaaggaagcctttagcattaatattattgaatattaatttggccagacccacattaattcaacaggcaaggtccccaaatcctagccggtttccagtcaatccaaattcagttctgtcacctgacctctcactgctggaacagactactttgactttgactgaaatctcagtttatcaaatttctgtagctaaatcagtgaaaagcagcagccaaaacaattgtcgaataggtacgtagccaatacccggcccggttactatatactgagatctaggatttattcctgatcttgcaaggagaatcacatacaataaatattttttgtgcaaccaaattaacctccacatcaatatgtactgcacacatccactgatccaccacagctgcatcatcatcatcatcataactggactggactggaaagccgatgcatggctagggagcctgcaagatctccgcatgcttcgtcaccttacacacgcactccaggacgtccgtggggctaacgtctccgacgacggtcagcctcttgctctccagctccactctgatggacaccactcctgcacacgtatacgggggcacagaccagacggccagcacccagcagcagcaaattaagagaagtcatcagaatgcatgctgatctgcatctgcacacgcaagaaccgaaggcggacgaacaggagcggcctgggttgaacagcagtgccgtgttggcgtgttctcagcgcctgtgcctaccttgcagcttcttcacttgcttctcgaccttccttgcgcagccatagcagtgcatggacaccttcagcgccacggtctggacatctcatcaagatcgaggcagaagagtgagagacagacaggagacagcaccaccagacaccagaagacgcatgtgcttcgcgtctccaaggctacgttttctggttccacacgaaccgctaacgccttggagttggacgtgccggcgaaatccgtgactggcacgatctggtccaagtggctcctcatcaagccgttcctctcgccgccgcggtcgtcttcgtcctgggactgggaaacacttgcatgggatcgctgaaaccagcgcgaaagcctcagctggaaaccccttgcagccatgaggatgatgatgcgtctcctcttccggggctcagagcctgaaaatgcagacggtggatcagagtcat

SEQ ID NO: 113816 - DNA, 776 bp, Zea mays
  Clone ID: MRT4577_35284C.1
cggggagaaaccgttgtcgccctcgaccccgaccttttcctcccctcttctctagatcgcgacgaggcggactccccactcctgctgcccggagcgaagcggaccgcgtccccgccgcgtggcctgatcgatccctcagctctggcggtcgggccaatgctgcgtgcatcgagctgccgctgatcacgattatagggtttaatacttgtatattttgattgtcacaaatgttggatgaagtttgacttatctatggaaatggatgactcacatggcaccatggttaataaaagtgaagagaatgactttgaaaagaaaggcacttctgatcctgtggtttatcagctagttcgggttgaaggtgatggaacacttgttcctgctacagaggatgatgttttgcagtttgaacatttccttcacaacgagaaggttgatcttccttctattgaagatgcagaccatgtggaagagtttttcaacaatgactgcatgttactgaagaagcctgacttggaaggtggatcttccaaattggagactgtggaagcacacacacaaaaattgggtgccaacttagaggacaatgcttcaactgagactacaaaatcgacagtgttaaatgactcttgctgtgctgaaaaatataaggctgatgcctgctcaagatctgtatgcgacacatctacagatccatctgtttcgggagttaatagttccatgcctgatttttccatattaagaggagaagtctgtttggatgatcttactattag

SEQ ID NO: 113817 - DNA, 2539 bp, Zea mays
  Clone ID: MRT4577_35285C.1
actacatctcgtcgtcgtcatccccgcccgtccctcgacacccagccgtacgatccgcatcccagatccatcccagccgcccgccggctctgccacccctccccggctggatcccctttcccttttcgaaaccacccttcctccgttcctcggctcctccttgcggtgagaaacacggtgtcgccctcgagcccgaccttttcctcccctcttctctagatcgcgacgaggcggactccccactcctgctgcccggagcgaagcggaccgcgtccccgccgcgtggcctgatcgatccctcagctctgccggtcgggccaatgctgcgtgcatcgagctgccgctgatcacgattatagggtttaatacttgtatattttgattgtcacaaatgttggatgaagtttgacttatctatggaaatggatgactcacatggcaccatggttaataaaagtgaagagaatgactttgaaaagaaaggcacttctgatcctgtggtttatcagctagttcgggttgaaggtgatggaacacttgttcctgctacagaggatgatgttttgcagtttgaacatttccttcacaacgagaaggttgatcttcctcctattgaagatgcagaccatgtggaagagtttttcaacaatgactgcatgttactgaagaagcctgacttggaagatggatcttccaaattggagactgtggaagcacacacacaaaaattgggtgccaacttagaggaaaacatattacagtcattggatgattcccttagtcctccctcagactttagaattcatagtcagcattcagataaattgcttacagaacaaggggcaaacgtcactcgacaggacaatgcttcaactgagactacaaaatcgacagtgttaaatgactcttgctgtgctgaaaaatataaggctgatgcctgctcaagatctgtatgcgacacatctacagatccatctgtttcgggagttaatagttccatgcctgatttttccatattaagaggagaagtctgtttggatgatcttactattagagaacttcaggaggcgtttagagccacgtttggccggcagactaatgtcaaagacaagatatggctcaaaagacggattacaatgggcttgactaattcctacgatgttccaagttcaagttgtgtactaaaagactacaaaattgaaggttaggatgccaaaaatgatatgtcagatctggatgaaagagctaagactgggcttagagctacttctgtggttatatatcaaggaaacgaaggggactctccatctagctcttactatcagagcgaggaccaggaagattcttccaagagggtgccgatccataatgatgaaccacaaggaaatctgctaggcgagcaatgcactgacaagcgaactagaaagccaacaaaaagatacatagaggagctatcagacattgagactcatgactcaactgtaaaaaattcttcaccagcaaaaaaggcctgcacatgatgaactgttaatgaaaccgcgagtagcacctttcaatgagactggttctctgggcacaatctatcctactagaaaggatacctttggaggatttagtgtacacgttccttacgtttcaaggatgagaagggggcgccctaggaaggacttcatttcatttgcggataagggaccctcggttgaacctaaagggattcagccatcagttgagatgatattagtgaaggatggtgacaagggaaaccacctgaggaaagtacctgaggttccactaaaggtaagttctgagaacgggcatgtagaagcagttgatagcaaaggggttcggaacctacaagcaaaggtctgcagtgctgtttccaagcctaaaataaagcatggtttaacgcggaagcatcatcgagcatggacattgagtgaggtcgtgaagctggtggatggtgtggctcggtatggagctggcaagtggtctgagattagaaaactgtccttcgcctcgtattcctaccgcacttcagtggatctcaaggataaatggcgtaatctgatcagagcaacccagacacagcttccggcgcaaaaagatggtgcctgtccacggaagactaacccttctatcataccaataccaccatccattttgttgcgagtgaaggagctacatgagctgcagtcgcaagggggtggcttcacagccccagtcaagttctctgggcaggacggcaaggttctacagggaaaaggctcgggtttttttgtgatccgtgtaatgcagatatacgtgtacgcttctggacgatgtggtatatatacgagtaaatattatttgaagtaggtgtaaccacgttatccatcacaatgttctctacacgctggaacatgtgtaactcaggacgtcccagaaaatattgttatacttagataagggcagacgtctgtcgccatgtattacaaacgtgtcaggcgtacacaatttaaaaggcaaatgcaaatctagacaaaaaaaaaaaagttagagt

SEQ ID NO: 113818 - DNA, 249 bp, Zea mays
  Clone ID: MRT4577_35286C.1
aaaacacgttgacggacgacttcgttattcatcgactttacaggggggagctccatcatagacatggcttcttccaaagatggatctgtcctccgaccaagtggattgcgatttatgatatctactagctctagacactgtctgcgtgtcacgacaatatatgatgacctgtcacatacttccttcctaatatcagcatcgctatttggtgatttgactgtaaccgtttgatttaaataaacgtcattt

SEQ ID NO: 113819 - DNA, 214 bp, Zea mays
  unsure (1)..(214): unsure at all n locations
  Clone ID: MRT4577_35287C.1
ggaaaacccccggcggacccaaccnaancgccccgcagcacaaccccccnncgccagccggcgnaaaagcgaagaacgcgcaccgancgccccncccaacagnngcgcagcccgaanggcgaangggacgcgccccggagcggcgcaaaaagcgcggcgggngnggnggnaacgcgcagcgngaccgccacaccngccagcgccccagcgcccg

SEQ ID NO: 113820 - DNA, 750 bp, Zea mays
  Clone ID: MRT4577_35288C.1
tcgtaggttaaggtgcttccaatggaaataggaaagctatggtttttgcaagtcctggatattggtcaaacaagtataaaagaaatacagtcgagtgttgttggacttacacgtctgatgtactttgaggttggctgtggcgtgaagctcccttctgggattggtaacttacattccctagaagtgctagtgggactaacagtgggcaaatatgacgcttgtttggacagttgtaatcaccatcttgtgaaagagctagggagtttgaccaagctgagggtgctccaggttttctggggagttttggatgagagcatagctacaactttggtggaatccctaagtaatctgcaaaaattgcaagtgctagatattcgtggtaacaaaggtggaaatgtcaatctcatgcatgaaggttgggtgccctctcaacaactccgtagtgtcaccattatgttttgctcattatggacactgccgacatggattaatctttcatcgctttctctcctgtcgtgcctggtaataattgtgagtaaagtgcgatcggaggacatcaagcttcttgggatgttgcgcggccttcgtatgctcagtctacgcattgatgtatattggtccccaggagagctgctggtagtaacggaaatggaaaagtctgttgttactgctgatgcatttccatggtgtggaaaagtgcgccgtctatatttccacgaggagccgcaccaaggcttaacgaacttcgct

SEQ ID NO: 113821 - DNA, 119 bp, Zea mays
  unsure (1)..(119): unsure at all n locations
  Clone ID: MRT4577_35289C.1
gcaagaaatagagtacaatggtatctgctgcgaccaccacgcctaggaggcacaacantcggcccatagacgtatttaaagcgttctatgcgtgacattcacagcttatacgacatgta

SEQ ID NO: 113822 - DNA, 517 bp, Zea mays
  Clone ID: MRT4577_3528C.1
ccacgcgtacgtgcagatgttggggacagatatgcatagaagagaacagacagaactaatccgggcacagagtaaggccttgttcgtttgagtcggatcacacccggaatcgttccagctaatcaaagtttatataaattagagaaaaaatccggttaggaatcgttccgacccatcaatccagcacaaacgaacagagcctaaagaattctccactctcttgacttgacgaggctatgtaactagatgccatcagaggagaactgaagactgagagcattctctgcttataatctttatattcctctatattctaaattattttttcagtccccttccatcagatcgatagggcattgaaagagtcattcctagagactctatggaaggacacaacggagatggaacagtctgcttgagaagaggcggcgaaggagaaggaagcgctcaaccctgactcgtggcccgtcgccagcatgcgccttgccgacctcttgtttgatcaattatctgattt

SEQ ID NO: 113823 - DNA, 632 bp, Zea mays
  Clone ID: MRT4577_35290C.1
attggattttcttgcggttgcgagttgtgactcagctcgagaaaggcaaagcagttttggggttttggtattgggtcttccccggtaggacccacgtaccagtctgtgggtcacccgtcactgccggcggcggcgccgtggaagcccggcgagcgccgctgagtccgccgtgtcccgctcgtagcttcccggtgactgtggcgtctgttgattgtgatggcagcgtgacggcccctcggcaggcagcttgtcgcctcgcctccaacgaataggctggagttgtcagttctacagcttcaacatggtttgtcaggtctgccatggggacgcaatgatcgtcaactgctcggcatcctttgctatgctttgtttgtggagctgctgagtggtggtgtttggagaagtcttgaccctgaatatatagctgaatcaaagagtaaggaatcttgtcgagtgggattattggcaagggacaaggtcatgaggacatggatgcagtatgtgcatacatttgatttgagagccctttctctgcttggattgagcacatcctatgcagccatgctgagcggtttagtggggaaggggcacgaggaccccatggccatgtggaacgggagcaacatgaattg

SEQ ID NO: 113824 - DNA, 498 bp, Zea mays
  Clone ID: MRT4577_35291C.1
tccggccgagctagcgacggtaggttcgtcgaagccttccttggtccctgtcccacactcaacgacttccacttcggttcatccgagggagcgatggacgcttcgtcgatgggttccttggcccccagtacgaacactcaggcagtggccacctcggcgtagacaacgagcagtccgaggttcctgagtgtgttgttggagacctccctgagcaacaacctggtgaaggttgtccccactgttctcagtgctcaggaggttaagctggcaacatggatgactttgaggagttccaggaatacgatgagttctagtttagcttagtggcaaacccccaattagctgcctgtgtaggcttacattctacgtttcattactctgcactttgatgttattgtcaaacactatgtttatgtaatagattctgtggacgtctcagacatcttgatgtaactaagtacctttccgctatttaaaaaaaaaaaaaaaaaagcggcc

SEQ ID NO: 113825 - DNA, 448 bp, Zea mays
  unsure (1)..(448): unsure at all n locations
  Clone ID: MRT4577_35292C.1
ctcgcatactccccacgccgccgccgctcgacggagccaggctcgcagccgctccgccgcaaggtgtcagcacccatcgtggtcaactctatcttcgtctccccatgcgtgctcgccagatccccctctgtctccagtccaccaccgtggtcgggcccgctcgcctcctccgtcgacctcatccgctggctcccttcctcctcgtcgtcgccgtcatcagccacggccccacctccggccccttcgtctctcacatcctcctccccttctccgaccccgtcttccggctcgcctccgtcccgctcccgttcgtgagcgagagggcaacttatgtgttatttcaggcagtgtaaatttgtcagttccgatgtgggaaaagaatttttcaacggatgctngtgctatcccctgggctaaactgtgtgagaccaaaggattgatgtctctg

SEQ ID NO: 113826 - DNA, 390 bp, Zea mays
  Clone ID: MRT4577_35293C.1
atcaagaggctgtggctttgaagcgccaagaggaactcattcgtgaagaggaagcagctgggctagctgaaattgaacttaaggcaaagcgtagtgctgctgaaaaggaaaaacgtgccaagaaaaaacaggcaaaacagaagaaaaatagtcgaagaagtaataaagggaagagtggcaagtctgacatcaataaggaaatacttatgtacagcagtccttcaggtgatagaatcctggatgatttttctggacaaacggaagaaatgtcctcaaatgctgacaaccctgaagaagtttctgatatatctgacagcagagacgataattcagatgcgcttcatgttgatattgaagaccgtgaaagtagccctgttaattgggagacag

SEQ ID NO: 113827 - DNA, 479 bp, Zea mays
  Clone ID: MRT4577_35294C.1
gggcttagacaaaactttcattaattttttcttaataacaaccacaaacattaactcccactttggcatgctttacatggtacgagcccccccttctttgaaatcccaactcatattctcacattgttgggccctgcttgggacttcaagggtttcccaaaaatcttgatcctcaaaaataattttccacaaactctttggctcaaattcatcattggaatcattttcggggcaggcatttagagggtaacatttttggggcgaggatctgttgactcgaaaacaaccaaaaaagggcttggggctaaattttgtttgcaaactaaagaagtttcctcaagaactttacaaacatgggcaagatgattcacaacattttttgccttcggaccttgcactttataagggatggggcataacctaaacaccctgtgtaagagagttttttgacgcctcatctcttgtatggcatagcccaa

SEQ ID NO: 113828 - DNA, 247 bp, Zea mays
  Clone ID: MRT4577_35295C.1
cggctcgaggtttctggctttctgcgtgcaatttgcatttgtttcaggtaatcaggcatgcaccacatggattcccaagtgaaactgcttttgcttttagttgtatgctttgcaatgaaattattggtaatggacatgagtgcaacatttgtgattataagtttcgaagatctcactgagtagcaggaccaaagagacctgttctttcaataatacgtagaataattctgtaataataatttaagtt

SEQ ID NO: 113829 - DNA, 241 bp, Zea mays
  Clone ID: MRT4577_35296C.1
ttctaacgccaacaataatccttgcacattaacacagggggaaaagagataatctaagtgtgggagtacccattccctgaatcaaatgataatgaaatcggtttgactcatctccacttttctaaaggtgcgtctcttatgtgcattccatcacaacattattaagagtaacatggccttttttttaagaatctctaccctatattttcctttatttttgaagtcggatgtggggtgattt

SEQ ID NO: 113830 - DNA, 110 bp, Zea mays
  Clone ID: MRT4577_35297C.1
tcgacggtgggcgcgacgcgtgggtgttgaaggcaagacaggctttagggtgatggcgtaaactagcgtgcatcctggtttttgtttccacccaaccgaacttgagctcg

SEQ ID NO: 113831 - DNA, 333 bp, Zea mays
  Clone ID: MRT4577_35298C.1
ttttgttttgctcaggccacatgtcaatccccacattggataccaaattggtcgcaaaactgctgtacagatcagctacatttttctggcaaggaacaagaatcaggatacctctttgagtgccgacatggttggtttctgctgcagcagtaaactcaagtctaaatctattctgcgattgtgagacttatttcaccagcgcattggactggaaacgttttgctaccccgttggtggagggttggctatctcactagcttcaagctgtgcccatgcggctcttggtgagccactacggctcagcatgttagatggggggtgcgatgaacaagt

SEQ ID NO: 113832 - DNA, 540 bp, Zea mays
  Clone ID: MRT4577_35299C.1
ggccgccctcttttcttttttattttttttttattttttttattttttttttttttttttttttttttttttgatggggctaatgaaccataaaaaatgaatgaaggaattcaacagaggagaaaccccccctacaaacaggagcagcctgaaccaattacatttcaggccgcttggaacaaagaaccagataaacacgaggggaccaggaaaaaaatgaacactatgtaattgccaaaggctcgcctgagccctaaaaaacaaacactatttgcagaattaacaaggagaaccaagccctggactaaagctgtaggaaaattgcaaggctaaatagctcaaaaagcctacacaaccggggaaatatcgggaggtgtgcaaccgaacattgaacagttaggggattccggcaaaaccaatacacacggccccgggaattgggagtcccacaaaggcatgggcaggcatccactggtaaaagcttttgccaggaaaaaaaggcgagtccctctaccacaggaatatcttgggacgcggggg

SEQ ID NO: 113833 - DNA, 684 bp, Zea mays
  unsure (1)..(684): unsure at all n locations
  Clone ID: MRT4577_3529C.1
aaaaaaaatactcctgcttaacttggttaactacacattctaggagacgttacattagcgacactgaacgtcgtggagcacaaacgttcagccatcggaacatgttccactaccaaatcgcatgtcaaagatactataaactgctctagagatttatcacataaaggacacttttcaatagtgtattaaggtccatgattaaaattgcacatggagctgcagagcatgacacgacacgaaggaactggatagatattgaacattcgaacctaaaatataacannnaaataataatgctcgtcaggtactcgatatcttccaccctgctgctctgaacattctgtagccaaatggttccatcagaatcatgccttttaaaccttttggaagtgaaatcaccgtccatagggtcctgctccttgtggatcctgaacgtgcgctatgaacggatgatggaggtatacttgtcataagaggccgtaaattgtttggaatgctgcgccttatgtccatatgtcgaagtgccatgtccagtgatttcttcgacaaagtcctaccaaagcccgagctatctggggaatttgaagttttaccagatacactgttcaggctagatctttgatcatcatgctttggaggaactagctgtcaatgtagggcgtccagttggtgttgaaggccttg

SEQ ID NO: 113834 - DNA, 783 bp, Zea mays
  Clone ID: MRT4577_352C.1
ctaagtacagtggggaaaggcgtcttcgtactcgcctctctccgcgcaaccgagccttcgccctcctccttccccatttcgccagcggcgcagcccaccaaccacccccacccgccgccatgagggagtgcatctcgatccacatcggccaggccggcatccaggtcgggaacgcgtgctgggagctctattgcctcgagcatggcattcagcctgatggccagatgcccggtgacaagaccgttgggggaggtgatgatgctttcaacaccttcttcagcgagactggtgctgggaagcacgtcccccgtgctgtcttcgtagatctcgagcccactgtgattgatgaggtgaggactggcgcttaccgccagctcttccaccctgagcagcttatcagtggcaaggaggatgcagccaacaacttcgcccgtggtcattacaccattggcaaggagattgttgatctctgcctagatcgtatcaggaagctttcagacaactgcactggtctgcagggattccttgtcttcaacgctgttggaggtggaactggctctggccttggttcgcttctcctggagcgtctctctgttgactatggaaagaagtccaagcttgggttcacagtttacccatctccccaggtctccacttctgttgttgagccatacaacagtgtcctgtccacccactcactccttgagcacaccgatgtctctatcctttcttgacatgaggccatctatgacatctggcgccgctcccctgacattgagcgcc

SEQ ID NO: 113835 - DNA, 483 bp, Zea mays
  Clone ID: MRT4577_35300C.1
taccgggccccccccctcgagttttttttttttttttttttttttttttttttttttttttttttttttttttttttttttttttttttaaaaaaaaaacatcttcgccaccctagcaggaccagcctccgggggaaaaaaaaacccccccaacaggtttttttttatttggggggggaacgggcccgggacaaacaaacggggcccaggcccgtttacccagatagccaaaaccccccatccaccccccccgggttattattcaaaaaaagctatccaagcggggccggccggctgggggaaaaaaccccagccccctgcaagctacaggaaaggcccgtcccaggggccccagggggggttagcccagtggggcgggacctctaacgggggcccgggggccagcccagccctcaccaaggcccccgggcttcattgggtatctggaggggaggggggccgggcaaacttccatcccttttt

SEQ ID NO: 113836 - DNA, 243 bp, Zea mays
  Clone ID: MRT4577_35301C.1
caaaaaaagccttggcttgactaaaaaatagagctcaacaactgagcagtacattgaattataaatagcggaaaacaacccttacaacatgccgtgttttattgatcaaacatccaactggagagggggggggggccttcttgctcggccaattcagattgggcgggggtgcgatcattaccatcctggaaagggtgcggcaatgcctgccccagcttatgaactgggcgttctctgcaggct

SEQ ID NO: 113837 - DNA, 588 bp, Zea mays
  Clone ID: MRT4577_35302C.1
aaaagttcaatccttgtgcttattagtttcttctgcatggccacacaatctagtcaccaattacacaccattattagagcatctccaacaatgcctcaaactagtgcctcaaattgaaatatggggctctacacaagaaaaactactccaacagtgccccatttcataaaattttgtcaaaaaactatagggcaccctctcaagtgactcaaatatactacaccgtagtgagctgtcctataatctagatttggggctttactgttggagcggggtgttttgttggtgccctaaattctataaaatatacttattttcaaattatagggcatttttataggtcatattgttggagatactcttatgtatcctcggctcttattgtaccaacaaattaaccaacatatacaaacacatcgtgaacacgaaaactagtccaaacaagtcaccaagctatatataaactcccaaggaacgcatgcgtcaatttgcaccatcttcgatcatgtatgcaggaaagatgctcacttgacgtccatgttttcgatcgtaggtggtggtcatcaagtttttaccttccgtaacccc

SEQ ID NO: 113838 - DNA, 131 bp, Zea mays
  Clone ID: MRT4577_35303C.1
cagggatgctctcatttctcagtggtgccacagtggatgtgaacattgaaatccccttgcatttacaacaggctgagcctgatcaaatctcagtttccgtgaagagttgccggacagtattcactgggctc

SEQ ID NO: 113839 - DNA, 453 bp, Zea mays
  Clone ID: MRT4577_35304C.1
ggaacagagaggatgcctccaccatcgattgaagacttcgtcgtcgattctacctctgcacggggacatggaacgccaccgggagtacctgtgcatgggcgaagatgttccaggcaagaagatcctcggtggcatgtcaattgctcaccggagttgggcgggtatgataggtctgcaccgttgcgtggccgacccttgcaccgttgtcgtcatctgggtactacaggataaggcatatgaaggatgtcgcgatgagttcatgagaagtctagaccgccgtctcccagtcaactatggttgctggatcgttgtctatgcatgatgtaattatttagttattttgtacagaactcctattatgtagtaaagacattcgtttctattccatgagtcatcatatgtgtgagacttgatcctagcacacatttgattcgcgcccgggtttgtccctta

SEQ ID NO: 113840 - DNA, 347 bp, Zea mays
  unsure (1)..(347): unsure at all n locations
  Clone ID: MRT4577_35305C.1
gggcgacaaggcccagancagcacccacgacccccaggngacggaggaccagcaccagcgggacccagccaggaacaagcgcgacaggcaccacccgaagcaccgcgcagccgacgagcccggcggccgggaagcaggagagccgggggagggacgcgnaccaggccaccaagggggggggggggcggagcanaaggcccgagggagaagagaaaaagacgggcggccgccacaggggacccaagcngacgcacgccggcaggcgagggganaacggccgganagcggcaccaaaagagaagccacgggccgaggcnncacaaccgcaggacggggaaaacccgggc

SEQ ID NO: 113841 - DNA, 502 bp, Zea mays
  Clone ID: MRT4577_35306C.1
gccagtgggcggaatacggcctaagcgtggtcccggccgaggtacttcggtgagcaattatctggttttgcgttcactgccaacggatgggtgcaatcttatggatcacgttgtgtgaagccacccattatctatggcgatgtcagccggccgaaccccatgactgttttctggtccaagacggcacagagcatgaccgctcgtcccatgaagggaatgttgactggtccagtcacaatcctcaactggtcatttgtcaggaacgatcagcctatcgagcggccgcccgggcaggtacccgccgccggcgagccgctcctcctgctcctcgtccttcttgtggtggaacaggtggtggtggtggtgcttctcctccgccatggataatgaaacgagctagaagagggatgaccggccttaattagcttgttggagggagagcaagtgacaattggatcgacagctgttcttgcttcccgcgtacctcggccgcgaccacgct

SEQ ID NO: 113842 - DNA, 1518 bp, Zea mays
  Clone ID: MRT4577_35307C.1
gcgcccacgcgtctggtggggacctgccattggatggcgctggatgcccttcactcccgtcccagattcatcgtcctgcagctcctcttccatctccgatctgctgccataccactaccacaccatggatagccaaactccactgcataacccgctgcgaagaaaccttctaaagtgactaagtgatcgatctccttgtcctgaaaggctgaaacctaaggcgagagaggccacgggagagcgccatggttctcctgctcctgggctgctctcctgcatcgtcgcgcccagactgctctccagcttccaggagaagatgcagcaccgccggacagaaaatggtcaggtgctctctgaatgaagaaacgcagctgaacaaacatggactagtatccaagcagttaatttcatgccttgctgcttcgcttgtgttcgtctctccacctagtcaggctattcctgcagaaacctttgcccgtccaggcttgtgccagattgcaacagtggcagccattgacagtgcttcagttcctctgaagtttgacaacccttcagatgatgtcagcacagggatgatgatgaggggtatgaccgccaaaaacttcgatccagttcgctactctggtagatggtttgaggtagcctcgttgaaacgtggatttgctggtcagggacaagaagactgtcactgtactcagggagtgtattcttttgatgagaaggcacgctcaatccaggtggatacattctgtgtccacggtggacctgatggatacatcaccggcattcggggcagggtgcaatgcctatctgaagaggacattgcaagtgctgagacagatcttgagaggcaggagatggtccgtgggaaatgctttctccggttccccacactgccattcatacccaaggaaccctatgatgtccttgcaacagactatgacaattatgcaattgtgtctggagctaaggatacaagctttattcagatatactcaagaacacccaaccccgggccagaattcattgacaagtacaagtcttatgttgccaacttcggctatgacccaagcaagatcaaggacactcctcaagactgcgagtacatgtcctcagaccagattgcgctgatgatgtcgatgcccgggatgaatgaggccttgacgaatcagttcccagacctcaagctaaaggcaccggtcgcacttaacccattcacaagcgtgtttgataccctgaagaagttgcttgaactgtacttcaagtaaaaaacagtgtagcattgtccagtagccaatagccaattgcccaacttctcgacttggatcttcaatggaatgaagttcagtttattctgacgtttgctagtcagttagttctttttaagtacattgtttttttgtctattatataagagtgggatatgtaagattaagatctgttcagctgttctcggttactgtttgtacaattgttctttttccttgatgtttttatacaccattgcgattgtctgtc

SEQ ID NO: 113843 - DNA, 281 bp, Zea mays
  Clone ID: MRT4577_35308C.1
atccagtgctattttgctaaggatacagtcagcaggctgctgccagttatgactatgacggttggtgcctagttgaaggctagttgtaccatatcttatgctggttgctctctcttcaactgggcactccggagctagagagtacacatgcctcgactttaagtcctgcatttttttgtgatgctacctggtttgcttcattatgcgctttgtctgcattagaagcttgttttcataaattgcattgttgttctcctcccaggaatcctcacctactatag

SEQ ID NO: 113844 - DNA, 232 bp, Zea mays
  Clone ID: MRT4577_35309C.1
gcggccgcccttttttttttttttttttttttttttttttttttttttttttttttttttttttgagccctcaatgggaatttttaacatcaacacttgcatagttaccacaggaaggacaagttattttattacccaaggcaaatgggggggtaatggtggactaaaactcggatcctaaaaatggatcggagaatgcccaaggaacaaaaaaacattcgtccccgataac

SEQ ID NO: 113845 - DNA, 542 bp, Zea mays
  unsure (1)..(542): unsure at all n locations
  Clone ID: MRT4577_3530C.1
tcganaagnaggccagcggcggcgtggtgaagcacatcctgctggcacgcttcaaggaggacgtgacgcaggagcgcctggacgagctcatccgcggatacgccgcgctcgtcgccgccgtcccctccatgaaggccttccactggggaactgatgtgagcatagaaaacatgcatcaagggttcacgcatgtctttgaatcgacatttgaaagcacggaaggaatcaaggagtacattgagcaccctaaacatgttgaattcgcaaatgtgttcttgcctgtgttggacaaggtcatcgtaatcgactataagccaacttcggtcaactagtggtggaccctgaaccagcaggcggagcttttttgcagttctcattatctatatatctataataatcctctgtcctgttcgtgggaggattccatttgactctacactttctgctgtntaaataaacttgttagctttgttccttgttgagaatgaactttgagttttctgtgactgcccttgttgtgacttggcgtgtttcttattggt

SEQ ID NO: 113846 - DNA, 589 bp, Zea mays
  Clone ID: MRT4577_35310C.1
ggtgagctaacattgtgagaggaatgatgtcctggctggtggtcagtgtcagcttgctgtctcagacggctctgctaaggaaagtgatgtagctgaagctgagaggatagttgaagaaaaggcaacaaaatcagatgagaattctgtacttaatggcaaagatatccagtctgctgtctctgaagtatctcctgaggatggcgatacagatgaaatgaaagaggtaacagagaaaccagcattgactgcagatggagatgagtcaagtggattagcagcagacaagggtgagtttctgatgaaagatcagcctcaggcatgtggctcaaaggagtcatgcaatgctgatcttgctgtagcacaacaatgccagagcccagagtcaggatgttctatcaagacagtaatggtggatggtggagctgatccacatggcgcaccagagaggcatgattctgtggcttctcttggtggcctactgcttgatgtgggaatgatcagcaagccttctgaaccttctattggctcacccttatcagcagagggaatgtctggttgtgttgcacatgctgaatcagggttgagtaaa

SEQ ID NO: 113847 - DNA, 603 bp, Zea mays
  Clone ID: MRT4577_35311C.1
atgatctacggcggacaagtagcgaatgcctcggctcggcaccgcaagcaagaacgccgggaggtctgctcggtgaaggtagcaacgccagtctacctagactggtccgacaaacccattaccttcgaccaaggcgaccaccccgactgcgtaccgagcccaggaaggtacctgcttgtcgtcgaccccgtcatcggcaacgctaggctcaccaaggtcctcatggacggaggcagcagcctcaatatcatctacgccgagaccctagggctcttgggggtcgatctgtccacgatccgagccggaagactgtgctacgccaagttcatggccatccccaactacacgtacctcaagctcaagatgataggccccaagggaaccatcaccgtcggatccacataccgccacacttacaagtgcgacgtggaatgcgtggagtatgctgaagccctcgccaagtccgaagccctcatcgccgacctagattgcctctccaaagaggtgcccgacgcgaagcggcacgccggcaacttcgaaccagctgaggcggttaagtctgtctctgtcgaccctagcaacgacgccggcaagaaagtctag

SEQ ID NO: 113848 - DNA, 222 bp, Zea mays
  Clone ID: MRT4577_35312C.1
gacaggcaaaacccgagtttgctgttgtctatatcaaaacccaaaattaaacataacctcatggtgaaagcaggtcctcttctacgacaatatagagaaaaacccccagttccacaagacaaaattgcccattgttagaaaaaaaatttcttatataaaacaaaaaaggccacaatgataccattaaaaaacctcttatccacaaatataatgacaccaaca

SEQ ID NO: 113849 - DNA, 3075 bp, Zea mays
  Clone ID: MRT4577_35313C.1
atgtccttcgacggcagctacgacatgacacttcttccaccgccgcgcgactacgacaatggcggccgacaacccgcccgccggcggcggaatcgacgacgtctaccccgcgtggtggaagagcaacattcgggctcgctccgttctctcccccgccaacggaggaggaggcggggccgtcaaggccagacgggaggccacgcttcgccggccgtcgagcgaatcgacgcccccgacgccccgacggaaggcacgccggacgtcgacctcgcgttcgagacggaggcaagcgccgtccccccgcggcacgctgaccccgagcaagaagacgacgccggcgcgctcgcggaaagcctgcaggacgtcgccctcgaaccagagatggcggcgcaaccagtccccgatgtgactacgtcgctcctcgtcgaccaaaaggtaacgactaactcccatcttgcgtcatttcgactcggcctcaacccgccaaacgacctcgtcttggcgggcgctctcattgaggcgagtgcgaccccactgaggttctgtatgcggtcgccttgggaccaactgacggacgtctcgacctacgggccctctgggtccgaggaagatgacgatcccagcattggttgggatttctccggactcggcaaccccagtgccgtgcgggacttcatgaccgcatgtgactactgtctatccgactgttccgatggaagccacagccttggcgacgagagctgcggcccaagccgcgaatgtttccacatcgagctaggggatcccaccgaaggcaaccatcttggcatgccggaggatggtgatctccctaggccggtgcctcgcgccgacatcccacgggagctagctgtggtccccgctccggcggggggttacgacccacaactcgagcaagtccgcgaggcgcaggccaggctcaacgagggaacaggagcgcttgagccgatccgtcgggacgtcggacaggcatgggtgggccaacccctggccagagaaatacgtcatctgccccaaggtctccagcaccgcgtcgccaacgacgtcaggatcaggccgccgcccgcatccagcggggtcggtcagaacctggcgaccgcagcgatgctcatccgcgcgatgccggagccgtcaaccaccgaggggcggcgaatccagggagaactcaagaatctcctggaaggcgctgcggcccggcgggccgagagcactgcatcccggaggcaaggatatccctcggaacctcatgccgcgacttcccgattcatgcgggaggcctcggtctataccgggcgcacgcgcaacaccgcgcctgcggccccgggccacctcggcaacgagcaccatcgacgcgaccgtcgggctcacctcgacgaaagggtgcgccgaggctaccaccccaggcgtggggggcgctacgacagcggggaggatcggagtccttcgcccgaaccacccgcggactacccccttccctgccaattgggtggaacggacgacgacaacctcatcatccgcaacctccccctgttcctctccgacactgctcgcgcctggttggagcacctgcctccggggcaggtttccaactgggacgacttggtccaagccttcgctggcaatttccagggcacatacgtgcgccccgggaattcctgggaccttcgaagctgccggcaacagccgggggagtcgctccgggactacatccggcgattctcgaagcagcgcaccgagctgcccaacatcaccgactcggatgtcatcggcgcgttcctcgccggcaccacttgccgcgacctggtgagcaagctgggtcgcaaaacccccaccagggcgagcgagctgatggacatcgccaccaagttcgcctctggccaggaggcggtcgaggctatcttccgaaaggacaagcagccccagggccgcccatcggaagaagcccccgaggcgtctgctccacgcggcgccaagaagaaaggcaagaagaagtcgcaatcgaaacgcgacgccgccgacgcggaccttgtcgccgccgccgagtataagaaccctcgggagccccccggaggtgcaaacctcttcgacaagatgctcaaggagccgtgcccctaccatcaggggcccgtcaagcacaccctcgaggaatgcgttatgcttcggcgtcatttccacagggccgggccacccgccgaaggtggcagggcccacgacgacgacaagaacgaagaacacccagcaggggggttccccgaggtccgcgactgcttcatgatctatggagggcatgcggcgaatacctcggctcggcaccgcaagcaagagcgccgggaggtctgctcggtgaaggtggcggcgccagtctacctagactggtccgacaagcccatcactttcgaccgggccgaccaccccgaccatgtgccgagcccggggaaatacccgctcgtcgtcgaccccgttgtcggcaatgtcaggctcaccaaggtcctgatggatgggggcagctgcctcaacatcatctacgccgagaccctcaagctcctgcgcgtcgatctgtcctccgtccgagcaggcgctgcgcccttccacgggatcatccctgggaagcgcgtccagcccctcgggcgactcgacctccccgtctgcttcgggacgccctccaacttccgaagggagaccctgacgttcgaggtggtcgggttccgaggagcctaccacgccgtgctagggaggccatgctacgcgaagttcatggccgtccccaactacacctacctgaagctcaagatgtcgggccccaacggggtcatcaccgtcggccccacgtacaaacacgcgttcgaatgcgacgtggagtgcgtggagtacgccgaggccctcgccgagtccgaggccctcatcgccgacctggagaacctctccaaggaggtgccagacgtgaagcaccatgccggcaacttcgagccagcggagacggtcaaggccgtccccctcgaccccagcggcgacaccaccaagcagatccggatcggttccgggctcgaccccaaatag

SEQ ID NO: 113850 - DNA, 350 bp, Zea mays
  Clone ID: MRT4577_35314C.1
ccttcccctcccttttattcttaggggcttttttatttccatttttcttttttttccccacataattttccatgggcccgcccgggaaccactttttgaacaaatccaattttttccagggattatttgattcgggggtcctcctgaaaaaacaaaatggaaaaaaaaaggccaaagggcccataacaaaaattggacaaaagtagcttccttttccgccaggtggctccaacctacaaggggccgggaaaaaaaaaaaaaaaaaatatggcctgatggagggtcccattagggggactggggtttattggggaacagcccaagaatatgctccggtatgaaaacggccc

SEQ ID NO: 113851 - DNA, 2667 bp, Zea mays
  Clone ID: MRT4577_35315C.1
atgccgttcggtttgaggaatgcgggtgcaacgtaccaacggtgcatgaaccacgtgttcagcgaacacattggtcgaacggtcgaggcctacgtcgatgacatcatagtcaagacgagaaaagcctccgacctcctttccgaccttgaaacgacattccggtgtctcaaggcgaaaggcgtaaagctcaatcgcgagaagtgtgtcttcggggtcccccgaggcatgctcttggggttcatcgtctccgagcggggcatcgaggccaacccggagaaaatcacggccatcaccgacatggggcccatcaaggacttgaaaggcgtacagagggtaacgggatgccttgcggctctgagccatttcatttcgcgcctcagcgaaagaggcctgcctctgtaccgcctcttaagaaaggccgagtgcttcacttggatccctgaggccgaggaagccctcgggaacctgaaggcgctcctcacgaacgcgcccatcttggtgcctcctgccgccggagaagccctcttgatctacgtcgccgccaccactcaggtggttagcgccgcgatcatggttgagagacgagaagaggggcatgcattgcccgtccagaggccagtctacttcatcagtgaggtactgtccgagaccaagatccgctacccacaaattcagaagctgctgtacgcagtgatcctgacacagcggaagttgcgacactacctcgagtctcatctggtaactgtggtgtcatccttccccctgggggaggtcatccagtgccgagaggcctcgggtagaattgcaaagtgggcgatggaaatcatgggcgagacgatctcgttcgcccctcggaaggccattaagtcccttgtcttggcggattttgtggctgaatgggtcgatacccagctcccgacagctccgatccaaccggaactttggaccatgtttttcgatgggtcgctgatgaagacaggggcaggcgcgggcctgctcttcatatcgcccctcgggaagcacctacgctacgtgctacgcctccacttcccggcgtccaacaatgtggctgagtacgaggctctggtcaacgagttgcgcatcgccatcgagctaggggtccgacgcctcgacgctcgcggtgactcgcagctcgtcatcgaccaagacaagttctacgggctcgagcttaaccacatcgtccgatgctacaacgagactgcagatgagctggctaagatagcctcggggcggacaacggttcccccggacgtcttctcccgagacctgcatcaaccctccgtcaagatcgatgacgcgcccgagcccgagaaggcctcggctcagcccaaggcaccctcggcccccaagggtgaggcactgcgcgtcgaggaggagcggagcggggtcatgcctaatcgaaactggcagaccccgtacctgcaatatctccaccgaggagagctacccctcgaccgagccgaagctcggcggttggcgcggcgcaccaagtcgttcgtcttgctgggggacgggaaggagctctaccaccgcagcccctcaggcatccttcagcgatgcatatccatcgccgaaggtcaggagctcttacaagagatacactcgggggcttgcgatcatcacgcagcgcctcgagcccttgttggaaacgccttccgacaaggtttctactggccgaccgcggtggccgacgccactagaattgtccgcacctgcgaagggtgtcagttctatgcgaagcagacacacctgcccgctcaggctctgcagacgatacccatcacctggccgtttgaggtgtgggggctggacctcgtcggccccttgcagaaggcacccgggggctacacgcacctgctggtcgccatcgacaaattctccaagtggatcgaggtccgacccctaaacagcatcaggtccgaacaggcggtggcgttcttcaccaacatcatccatcgttttggggtcccgaactccatcatcaccgacaatggcacccagttcaccggcagaaagttcctggacttctgcgaggatcaccacatccgggtggactgggccaccgtggctcaccccatgacgaatgggcaagtagagcgtgccaatggcatgattctgcaagggctcaagcctcgaatctacaacgacctcgacaagttcggcaggcgatggatgaaggagctcccctcggtggtctggagtctgaggacaacgccgagccgagccacaggcttcacaccgttttttctagtctatggggccgaggccatcttgcccacagacttagaatacggttccctgaggacgagggcctacgacgaccaaagcaatcgagctaaccgagaagactcactggaccagctggaagaggctcgggacatggccttactacactcggcgcggtaccagcagtccctgcaacgctaccacgcccgaggggttcggtcccgagacctccaggtgggcgacttggtgcttcggctgcgacaagacgcccgagggcggcacaagctcacgcctccctgggaagggccgttcgtcatcgccaatgttctgaagcccgggacgtacaagctggccaacagtcaaggcgaggtctacagcaacgcttggaacatccgacagctacgtcgcttctacccttaa

SEQ ID NO: 113852 - DNA, 247 bp, Zea mays
  Clone ID: MRT4577_35316C.1
acactaccttatatctctccacaaaaacttatataatcttattcatcaatcaccacttatcttttctctttttcaatcatcatcattcatatcattactctcaatacaacttcacctttccttcattcacctcaattacctccactttattacattattacatcatctaaagcactattatatcctactctatctaactattctcatctcattaacattaataatatcataaaaactcttacttaat

SEQ ID NO: 113853 - DNA, 1443 bp, Zea mays
  Clone ID: MRT4577_35317C.1
atggacgacgacaacctcatcatccataacctccccctgttcctctccgacactgctcgcgcctggttggagcacctgcctccggggcagatctccaactgggacaatttggtccaagccttcgctggcaatttccagggcacatacgtgcgccccgggaattcctgggaccttcgaagctgccggcaacagtcgggggagtcgctccgggactacatccggcgattctcgaagcagcgcaccgagctgcccaacatcaccgactcggatgtcatcggcgcgttcctcgccggcaccacttgccgcgacctggtgagcaagctgggtcgcaagacccccaccagggcgagcgagctgatggacatcaccaccaagttcgcctctggccaggaggcggtcgaggctatcttccgaaaggacaagcagccccagggccgcccatcggaagaggctcccgaggcgtctgctccgcgtggcgccaagaagaaaggcaagaagaagtcgcaatcgaaacgcgacgccgctgacgcggaccttgtcgccgccgccgagtacaagaaccctcggaagccccccggaggtgcaaacctcttcgacaagatgctcaaggagtcgtgcccctaccatcaggggcccgtcaagcacaccctcgaggagtgcgttatgcttcggcgtcacttccacagggccgggccacccgccgagggtggcagggcccgcgacgacgacaagaacgaagatcaccaagcaggagagttcctcgaggtccgcgactgcttcatgatctatggagggcatgcggcgaatgcctcggctcggcatcgcaagcaagagcgccgggaggtctgctcggtgaaggtggcggcgccagtctacctagactggtccgacaagcccatcaccttcgaccaggccgacgaccccgaccatgtgccgagcccggggaaatacccgctcgtcgtcgaccccgttgtcggcaatgtcaggctcaccaagcgcgtccagcccctcgggcgactcgacctccccgtctgcttcaggacgccctccaacttccgaagggagaccctgacgttcgaggtggtcgggttccgaggaacctaccacgccgtactagggaggccatgctacgcgaagttcatggccgtccccgactacacctacctgaagctcaagatgccggggcccaacggggtcatcaccgtcggccccacgtacaaacacgcgttcgaatgcgacgtggagtgcgtggagtacgccgaggccctcgccgagtccgaggccctcatcgccgacctggagaacctctccaaggaggtgccagacgtgaagcgtcatgccggcaacttcgagccagcggagacggttaaggccgtcccactcgactccagtggcggcaccaccaagcagatccggatcggttccgggctcgacctcaaatag

SEQ ID NO: 113854 - DNA, 227 bp, Zea mays
  Clone ID: MRT4577_35318C.1
gcacgaggctcgatgagccacccactctctacagatctgggcttcggcgacttccctgcctacgcaccgccgccctccatggatccgctaggggcccccgctgtctcgtcggcgactcggatccagcctccactctacggcggctcaagctccagcttgctggtgctcgaactcgacgatcgcttcttgctgtgcctacgacgagctcgacgagccgcacgccctac

SEQ ID NO: 113855 - DNA, 3261 bp, Zea mays
  Clone ID: MRT4577_35319C.1
atgcgggaggcctcggtccgcaccgggcgcacgcgggacgggacgcctgcagccccggatcacctcggcgacgagcaccaccaccgcgaccgtcgagcccgcctcgaagagaaggtgcgccgaggctaccaccccaggcgcggaggacgctacgacagtgaggaggaccggagcccctcgcctgaaccgccaggtccgagggtcttcagccgggccatacgacgggcgtcgttcccagcccagttccgagccgcgactaccatcaccaagtactcaggggagacaaggccggagttatggcttgcggattaccgactggcatgccagttgggagcgacaaatgacgacaacctcatcatctgcaaccttccccttttcctctccaacgctgcccgagcatggctggagcatctgcctcctacgcagatctccgactgggacgacctggtcaaggccttcgcgggaaacttccaaggggaatccctgtgggagtacatccgatggttttcaaagcagcgcaccgagctgcccaacatcaccgactcggacatcatcggggcattcctcgccggcaccatgtgccgggacctggtgagcaaactggggcgcaagactcccaccaaggcgagcgaattgatggacatcgccaccaagttcgcctctgctcaggaggcggtcgaagccatcttccggaaggacaagcagcctcaaggaagacagaaggaagacgcccccaaggcgtccatccagcgtggctcgaaaaagaaggccaagaagaaggcgcaagcaaagcgcgacgccattgacgcggatctcatcgctgctatcgagcacaagaatcctcggaagcctcccggaggaatcaacacatttgacaagatgctcaaggagtcgtgcccctatcacaagggcgggaccctcggcagaaggtggcaaggaccaaggcaacaacaagaagggggcgacaaggatgaggagttcccggaggaccgcaactgcttcatgatctacagcggacaggtggtgaacgcctcggctcggcaccgcaagcaggagcaccgggaggtctgctcggtgaaggtagcgacgccggtctaccttgactggcccgacaagcccatcaccttcgaccaaggcgaccaccccgactatgtgccgagcccaggaaggtacccgctcgtcgtcgaccccatcatcggcaacgctaggctcaccaaggccctcatggacggaggcagcagcctcaacatcatctatgccgagaccctagggctcttggggatagatctgtcgacgatccgggctggtgcagcaccctttcacgggatcgtccccggtaagcgtgtcctgccccttgggcaacttgatttgctcgtctgctttggaactccctccaacttccgcagggaaaccctcacgttcgaggtggtcgggttccaaggaacctatcatgcggtgctggggagaccgtgctatgccaagttcatggccgtccccaactacacgtacctcaagctcaagatgtcgggccccaacggaatcatcaccgtcggatccacataccgccatgcttacgagtgtgacgtggaatgcgtggagtacgctgaggccatcgccgagtccgaggccctcatcgccgacctagattgcctctccaaggaggcgccggatgcgaagcgccacaccggcaacatcgaaccggccgaggcggttaaatccgtctccctcgaccccagcaacgatgccagcaagcaaaaaaaaggtgggaaatggaggatgtgcctagactacactggtctaaacaaagcaagtccgaaggttccctaccctctgcctcgcatcgatcaaattgtggactccactgctgggtgcatgaaccatgtgttcggggagcacatcggcagaacggtcgaggcttacgtcgatgacatcgttgtcaagacaagaaaagcctccgacctcctctctgacctcgaagtgactttcgggtgcctgcgtgcaaaaggtgtaaagctcaatctcgagaagtgtgtctttggagtcccccgaggcatgttcctagggttcatcgtctccgaaagaggcatcgaggccaacccggagaaaatcgcagccatcaccaacatgggacccatcaaggatctaaaaggagtacaaagggtcatgggatgccttgcggcctttagccgcttcatctcgcgcctcggcgagagaggattgcccttgtaccgccccttaaggaaggccgagcgcttcacttggacccctgaggccgaggaagccctcgggaacttaaaggcactccttactaatgcgcccatcttggtgccccccgctgcgggagaagccctcttgatctacgtagccgcaaccactcaggtgaggccggtctacttcatcagtgaggtgctatccgagaccaagatcctctacccaaaatctcaaaagctactatacacagtaattctgatgcggcgaaagttgcgacactactttgagtctcatccggtgactgtggtgtcatccttccccatgggagagatcatccagtgccgagaggcctcgggtaggatagcaaaatgggcagtggaactcatgggtgaaacaatttcatttgccccttggaaggccataaagtcccaagtcttggcggactttttggctgagtgggtcgacacccaattgccgacagctccaatccagcccgaactttggaccatgtacttcgatgggtcgctgatgaaaacaagagcaggtgctggcctgctcttcatctcacccctcgggaaacatgtgcgctatgtgctgcgcctccattttccagcgtcaaacaacatggccgagtacgaggctttggttaatgggttgcgcatcgccatcgagctaggggttcggcgccttgacgcttggggcgactcgcagcttgtcattgaccaagtcatgaagaactcccactgccgcgatcaaaaaatggaggcctactgcgacgaagttcggcgcttggaggataagttccacgggctggaactcaaccatgttgctcgacggtacaaagagatcgcggatgagctggctaaaatagcctcggggcgaacgacggttcccccggacgtcttctccagggacatatatcaaccatccgtgaaactcgacgacgcgcccgagcccgacgagacctcggcccagcccaaggtacccttggccgccgagggtgaggccttgtgcatcgagggacagcggaatggggttgcgccaaactaa

SEQ ID NO: 113856 - DNA, 1456 bp, Zea mays
  Clone ID: MRT4577_3531C.1
caaatcgcatgtcactataaactgctctagagatttttttttttttttttttgttttcacataaaggacactttcaatagtgtattaaggtccatggttaaaattgcacatggagctgcagagcatgacacgacacgaaggaactggatagatattgaacattcgaagaacctaaaatataacaaaataataatgctcgtcaggtactcgatatcttccaccctgctgctctgaacattctgtagccaaatggttccatcagaatcatgccttttaaaccttttggaagtgaaatcaccgtccatagggtcctgctctatcgctgcacaactcatcatccatataaataccgtccaggcacatcaggttgttgttgacgctcggctcagagctagcgttgctgcttgttgcgagcggtgagtctgagacactcattggtctgctccttgtggatcctgaacgtgcgctatgaacggatgatggagggatacttgtcataagaggccgtaaattgtttggaatgctgcgccttatgtccatatgtcgaagtgccatgtccagtgatttcttcgacaaagtcctaccaaagcccgagctatctggggaatttgaagttttaccagatacactgttcaggctagatctttgatcatcatgctttggaggaactagccttctcatgttcacaaccctttcaaccatcttattacccatttgaactggattcacactgtcacctccattgagatgtgaccttctcactgctggcatggagctccctgaaggcacgctgccacttaaagtccttcctctggagggagagcaagactgccgtcttggtcgaccagctggcccactctcaacagagcaagatctagaactaggtgccccaggtctgcccctagtggcagaggttggtctttctggtagcgatgtccttaggtttggaggtgcatcaagagagaaaccaggcatttcagatggtttccatggtcttgatttgacagtaggtgagctgcctcttgaaggtgttggcgctgcagttttcgctggtgaagaacctttgggcattgtagaacctggtttggagattgaggacgatctaactggtgcagccaagttaccatgctgggccgaaggggcagaaggtcgccttgttggagttgacgcccttgatgtaggcttgctttgtgctggtatggagggtctggatgatggtgttgttgacctggtagcaggtattgatcgcgtgggagtaggtgttgatgacctactagcaggggcagatgctctgcctataggagctgaagtcctgctagcaggaccaactgccctgcttgaaggggtcgttgacctggctgatggaagtgttgatctcaaagtcggtgttgacgaccttgacacagaagctccagttttggcaggaacagttgtccgggaagtgggggtcgaaggc

SEQ ID NO: 113857 - DNA, 2817 bp, Zea mays
  Clone ID: MRT4577_35320C.1
atggcggccgacagcccgcccgccggcggcggaatcgacgacgtcttccccgcgtggtggaagaacaacattcgagctcaccccgtcctctcccccgccaacggaggaggaggcggggcaaccaaggccaagcgggaggcagcgcctcgtcgactgtcgagcgagtcgacggccccagcgccccaacggggtggcgcgtcgggcatcgacctcacgtttgagacgaaggcgagcgccgtctccccgcgacacgccaattccgagcaaacggacgacgcccgcacgctcgcgaaaggcttgctggacgtcaccctcgtacctgagacgacggtgcagtcagtccccgacgtgacttcatcaccgcccgtcgaccaagaggtaccgaccgattcccatcccacgcctttcggattcagcctcgacccgcctagcggcttcgctttggcggacgctctcgtagaggcgagtccgaaccctctggggtttcgtatgcggtcaccttgggaccggctgacggacgtctcgacctacgggccctccgggtccgaggaagacgacgagcccagcttctgttgggatttctccggactcggcaaccccagtgccatgcgggacttcatgaccgcatgcgactactgcctttccgactgttccgacggtagccgtagcctcggcgacgaggactgcggcccaagccgcgaatgtttccacatcgatctagggggtccctccgaaggcaaccatctcggcatgctggaggacggtgacctccctaggccagtgcctcgcgttgacatcccacgggagctagctgtggtccccgttcaggcggggggccatgacccacagctcgagcaaatccgcggggtgcaggccaggctcgacgagggaacaggagcgcttgagccgatccgccgggacgtcgggcaggaatgggcgggccagcctccggccgaagaaatacgtcatctaccccagggcttccagcaccgcatcgccgacgacgtcagggtcaggccgccacccgcatccagtggggttggccagaacctggctgcagcagcaatgctcctccgcgcgatgctggagccatcaaccaccgaggggcggcgaatccagggagagctcaagaatctcctggaaggcgccgcggtccgacgggccgagagctccgcctcccgaaggcaggggtacccctcggaacctcatgccgcgacttcccgattcatgcgggaagcctcagtttaccccgggcgcacgcgcaacacagtgcatgcggccccaggtcgcctcggcaacgagcaccatcaccgcgaccgtcgggcccacctcgacgagagggtgcgccgaggctaccaccccaggcgtgggggacgctacgatagcggggaggatcggagtccctcacccgaaccacctggtccgcaggccttcagccgggccatacgacgggcgccgttcccgacccggttccaacccccgactactatcacaaagtactcgggggagacgagaccgaaactatggctcgcggactaccgtctggcctgccaactgggtggaacgaacgatgacaacctcatcatccgcaacctccccttgtttctctccgacaccgcccgcgcctggttggagcacctgcctccggggcagatctccaactgggacgacgtagtccaagctttcgccggcaatttccagtgcacgtacgtgcgccccgggaattcctgggacctccggagctgccgacagcagcctggagagtctctccgggactacatccggcgattctcgaagcagcgcaccgagctgcccaacatcaccgactcggatgtcatcggcgcgttcctcgctggcaccacctgccgcgacctggtgagcaagctgggtcgcaagacccccaccagggcgagcgagctgatggacatcgccaccaagttcgcctccggccaggaggcgttgcaagcgaaacgcgacgccgccgacacggaccttgtcgccgccgccgagtacaagaaccctcggaaaccccccggaggtgccaacctcttcgacaagatgctcaaggagctgtgcccctatcaccaggggcccatcaagcacacccttgaggagtgcgtcatgcttcggcgccacttccacaggaccgggccacccgcggagggtggcagggcctgcaacgacgacaagaaggaagatcgccaggcaggagagttccccgaggtccgcaactgcttcatgatctatggtgggcaagcggcaaacgcctcggctcgacaccgcaagcaagagcgccgagaggtctgttcggtgaaggtggcggcgccagtccacctagactggtccgacaagcccatcaccttcgaccaagccgaccaccccgaccatgtgccgagcccggggaaatacccgctcgtcgtcgaccccatcatcggcgacgtcaggctcaccaaggtcctcatggacggaggcagcagcctcaacatcatctacgccgagaccctcgggctcctgcgtgtcgatctgtcctcggtccgggcaggcgctgcgcctttccatgggatcatccccgggaagcgcgtccagcccctcggacaactcgaccttcccgtctgcttcggaacaccctccaacttccgaagggataccctgacgtttgaggtggtcgggttccgaggaacctaccacgcgatactgggaaggccatgctacgcgaagttcatggtcgtccacaactacacctacctgaagctcaagatgccgggccccaacgaggtcatcaccgttggccccatgtacaaactgatagtcgcctag

SEQ ID NO: 113858 - DNA, 1506 bp, Zea mays
  Clone ID: MRT4577_35321C.1
atgacttctcgactcatgcgggaggcctcggtctacaccgggcgcacgcgggacatgacgcctgcagccccgggtcgcctcggcaacgagcaccaccgccgcgaccgtcgagcccgacttgacgagaaggtgcaccgaggctaccaccccaggcgtgggggacgctacaacagcgaggaggatcggagcccctcgcccaaaccaccagatgtcatcggagcgttcctcgccgacaccacctaccgagacctggtgagcaaactgggccgtaagactcccaccaaggcgagcgagttgatggacatcgccaccaagttcgcctctggtcaggaggtggttgaagccatcttccggaaggacaagcactctcaggggcgccagcaggaagaagtccccgaggcgttcgcccagcggggcacgaagaagaaggcgaaaaagaagtcgcaagcgaagcgcaacgccgccgacgtagatcttgtcgctgctgtcaaacataggaaccctcggaagcctcccagaggggccaacctgttcgacaagatgctcaaagagtcgtgcccctatcaccagggtcccgtcaagcatacccttgaggaatgcgtcatgcttcggcgctacttccataaggctgggctcccgacggaaggtggcaaaggccaagacaacgacaagaaggagggcgacaaggcagaggagttccccgaggtccacggctgtttcatgatctatggtgggcaagtggcaaacgcctcggctcggcaccgcaagcaggagcgccaggaggtctgctcggtaaaggtggcggtgccagtctacctagtctggtccgacaagcccatcaccttcgaccaaggcgaccgccccgactgcgtgccgagcccaggaaaatacccgcttgtcgtcgaccccgtcatcggcaacaccaggatcaccaaggtcctcatggatggaggcagcagcctcaacatcatctatgatgagaccctcgggctcttggaaatcgatctgtccacgatccgggccggtgcagcgccctttcacgggatcatccccgggaagcgcgtcctgccccttggacaactcgacctgcccgtctgctttggaactccctccaacttccgaaaggaaaccctcacgttcgaggtggtcgggttccgaggaacctaccacgcggtgctggggagaccgtgctacgccaagttcatggccgtccccaactacacctacctcaagctcaagatgtcaggccccaacggggtcatcaccgtcggatccacgtaccgacacgcgtacgaatgcgacgtggagtgcgtggagtacgctgaggccctcgccgagtccgaggccctcatcgccgacctggagtgcctctccaaggaggtgcctgatgcgaagcgccacgccggcaacttcgagccgaccgaggcggttaagaccgtcgccctcgaccccagcaacgatgcctgcaagcaagtccggatcggctctgagcttgaccctaaatag

SEQ ID NO: 113859 - DNA, 2457 bp, Zea mays
  Clone ID: MRT4577_35322C.1
atgtgtgtagactacactggtctaaacaaagcatgtccgaaggttccctaccctttgcctcgcatcgatcaaatcgtggattctactgctgggtgcaaaaccctgtctttcctcgatgcctactcagggtatcaccaaatcaggatgaaagagtctgaccagctcgcgacttctttcatcactccttttggcatgtactgctacgttactatgccatttggtttgaggaatgcgggtgcgacataccaaaggtgcatgaaccacgtgttcggagagcacattggtcgaacggtcgaggcttacgtcgatgacatcgtagtcaagacgaggaaagcctccgacctcctctctgaccttgaaacgacataccggtgtctcaaggcgaaaggcgtaaaactcaatcctgagaagtgcgtcttcggagtcccccgaggcatgctcttggggttcatcgtctccgagcggggcatcgaggccaacccggagaaaattgcggccatcaccaacatggggcccatcaaggacctgaaaggcatacagagggtcatgggatgccttgcgactctgagccgtttcatctcgcgcctcgacgaaagaggcctacctctgtaccgcctcttaagaaagaccgagcgcttcacttggacccccgaggccgaggaagccctcggcaacctgaaggcgctccttacgaacacacccatcctagtgccccccgctgccggagaagccctcttgatctacgtcgccgctatcactcaggtggtcagtgccgcgatcgtggttgagagacgagaagaagggcatgcattgcccgtccagaggccggtctacttcatcagtgaggtactgttcgagactaagatccgctacccacaaattcagaagctgctgtacgcagtgattctgacgcggtggaagttgcgacactacttcgagtcgcatccggtgactgtggtgtcatccttccccctgggggagatcatccactgccgagaagcctcgggggcaggcgtgggcctgctcttcatctcgcccctcgggaagcacctccgctacgtgctgcgcctccatttcccggcatccaacaatgtggctaagtacgaggctctgatcaacgggttgcgcattgccatcgagctagggcttgtcatcgaccaagtcatgaagaactcccactgccgcgacccgaagatggaagcctactgcgacgaggttcggcgcctggaagacaagttctacgggctcgaggtcaaccacgtcgcccggcgatacaacgagactgcggatgagctagctaagacctacatcaaccctcagtcaagaccgacgacacgcccgagcccgagaaggcctcggcctagcccgaggcaccctcggctcagcccgaggcgccctcggctcagcccgaggcacccttggcccccgagggtgaggcactgtgcatcgaggaagagcggaatggggtcacgcctaatcgaaactggcagaccccgtacctgcaatatctccaccgaggagagctacccctcgatagagccgaagctcggcgactggcgcggcgcgctaagacattcgtcttgctgggtgacgggaaggagctctaccactgcagcccctccggcatcctccagcgatgcatatccatcgccgaaggccaggagctcttacaagaaatacactccggggcttgcggtcatcacgcagcgcctcgagcccttgttggaaacgctttccgataaggaggcacccgggggctacacacacctgctggtcgccatcgacaaattctccaagtggatcaaggtccgacccctaaacagcatcaggttcgaacaggcggtggcgttcttcaccaacatcatccaccgcttcggggtcccaaactccatcatcaccgacaacggcacccagttcactggcagaaagttcctggacttctgcgaggatcaccacatccgggtggactgggccgccgtggctcaccccatgacgaatgggcgatggatggaggaactcccctcggtggtctggagtctgaggacaacgccgagccgagccacgggattcgcaccgttctttctagtctatggggttgaggccatcttgcccacagacttagaatacggttccccgaggacgagggcgtacgacgaccaaagcaatcgaacaaaccgagaagactcactggaccagctggaagaggctcgggacatggccttactacactcggcgcggtaccagcagtccctgcgacgctaccacgcccgaggggttcggtcccgagacctccaggtgggcgacttggtgcttcggctgcgtcaagacgcccgagggcggcacaagctcacgcctccctgggaagggccattcatcatcgccaaggttttgaagcccgggacgtacaagctggccaacagtcaaggcgaggtctacagcaacgcttggaacatctga

SEQ ID NO: 113860 - DNA, 1429 bp, Zea mays
  Clone ID: MRT4577_35323C.1
tcgaggccggccggggtgccattcgctcgatactgcttcatctgcggctcatcaatccgtgcagtcccagagcaccccgtctccccgctactcccgcaaggagcacgcgatggacccccggcccgaggccatcgtccaggactacaaggccgccaacaagctcaaggacaaggtggcgctcgtgaccggcggcgactccggcatcgggcgcgccgtgtgcctgtgcttcgcgaaggagggcgcgacggtggccttcaccttcgtgagggggcaggaggagaaggacgcggaggagacgctgcgtgcgctgcgcgacatcgggtccgagacgggcgcgcgcgagccgatggccctgcccgccgacctcgggtacgaggccaactgccgggaggtggtggagcgggtggcgtcggcgtacggcgggcgcatcgacgtggtggtgaacaacgcggcggagcagtacgagcgggagagcatcggggacgtgacggaggcggacctggagcgcgtgttccgcaccaacatcttctcctacttcctggtgtccaagcacgcggtgccgcgcatggagcccggcgcctgcatcatcaacacctcctccgtcaacgcgtacaagggcaacaagacgctgctggactacacggccaccaagggcgccatcgtggccttcacgcgcgcgctctcgctgcagctggccgacaggggcatccgcgtcaacggcgtcgcgccgggccccgtctggacgccgctcatcccggcgtccttcggcaaggagaaggtggagcagttcgggtcccaggtgcccatgaagcgcgccgcgcagccggccgagatcgcgcccagcttcgtcttcctcgccagcaaccaggattcgtcctacatgtccggccagatcctccacgtcaacggaggcgtcatcgtcaatagctagatacggaagctgttttgctgtcgtgtccaagtctaagggaacaaagcgagtgtccgtgtgtaccaggtagcagtgtcagtacgtgcacgcaggaaggcaaggcagggttcagttgtagcggtgtgtagtgctgtcagcacagcacttgtaaagaaggaacgtgtctgaataaatatgcgtccaagcatgaagacttcctccgtacgtggtttgcacaaaataaattcgaaaccaaggttcaaagttggtttagcaacaaaaaaaaaaaaaaaaaaaaaaaaaaaaaaaaaaaaaaaaaaaaaaaaaaaaaaaaaaaaaaaaaaaaaaaaatataaaaaaaaaaaaaataactatctaaatttatattttttattggggcggccttctttaaaggttcaaatttttctttcgcttcttttcaactttatatttttttttttgggtcttcttaatttcattcccactgcctccgtttttttaaacgctttctcatttggg

SEQ ID NO: 113861 - DNA, 360 bp, Zea mays
  Clone ID: MRT4577_35324C.1
aaaggggcaacaggggctatatgtccattggaaccaaagaggggggcaatggacacctacccccccccacacgttaaaaaagcaccacctggaggcacctgccggccgggggggcaaacaaaggtgctgagtctgatcttaaaaaccaccacctagggatctaacccaaaaactgggcaagggcccccgggttttttaaccccaacacaaagcccacccccaggatggggcccacgggcccccaagccaacgtgttggcaagggggaacccggggggggaacccctttgaaggccggaattgcgcccctccaatttaaacccccccgtggccttgggggttgccgaaggggccaacccaa

SEQ ID NO: 113862 - DNA, 1563 bp, Zea mays
  Clone ID: MRT4577_35325C.1
atgggcggtggagatcatgggcaagcaatctcgttcacccctcggaaggccatcaagtcccaggtcctggcagacttcgtggccgaatgggtcgacacccagctaccaatggctccgatccaaccggagctctggaccatgttcttcgacgggtcgttgatgaagacaagagccggcgcaggcctactcttcatctcgcccctcgggaagcacatacgctatgtgctacgcctccatttcccggcgtccaacaatgtggccgagtatgaggctctggtcaacgggttgcgaatcgccatcgagctaggggtccgacgcctcgacgctcgcggtgactcgcagctcgtcatcgaccaagtcatgaagaactcccactgccgcgacccgaagatggaggcctactgcgatgagatcgacggcacgcccgagcttgaggcaccctcggttcggcccgaggtaccctcggcccccgagggcgagacgctgcgcgtcgagggggagcaaagcggggtcacgcctgatcaaaactggcagaccccgtacctgcaatatctccaccgaggagagataccctccgaccgagccgaagctcggcgggtggcgcggtgcgccaagtcgttcgtcttgctgggagatgagaaggagctctaccaccgcagcccctctggcatcctccagcgatgcatctccatcgccgaaggcttctactggcccacggcggtggccgacgccactagaattgtccgcgcctgcgaagggtgtcagttctacgcaaggcagacccacctgcccgctcaggctctgcagatgatacccatcacctggccttttgctgtgtggggtctggacctcgtcggccccttgcagaaggcacccgggggctacacgcacctgttggtcgccatcgacaaattctccaagtggatcgaggtccgacccctaaacagaatcaggtccgagcaggcagtggcgttcttcaccaacatcatccatcgttttggggtcctgaactccatcatcaccgacaacggcacccagttcaccggcagaaagttcctgaacttctgcgaggatcaccacatccgggtggactgggccgtcgtagttcaccccatgtcaaatgggcaagtagagcgtgccaacggcatgattctacaagggctcaagcctcggatctacaacaacctcaacaagttcggcaagcgatggatgaaggaactcccctcggtggtctggagtctgaggacaacattgagccgagccacgggcttcatgccgttctttctagtctatggggccgaggccatcttgcccacagacttagaatacggttccccgaggacgagggcctacaccgaccaaagcaaccaagctagtcgagaggactcgttggaccagctggaggaggctcgggacaaggccttattacactcggcgcggtaccagcagtccctgcgacgctaccacgcccgaggggtccggtcccgagacctccaggtgggcgacctggtgcttcggctgcgacaagacgcccgagggcggcacaagctcacgcccccctag

SEQ ID NO: 113863 - DNA, 2154 bp, Zea mays
  Clone ID: MRT4577_35326C.1
atgccgttcggcttgaggaatgcgggcgcgacgtaccagcggtgcatgaaccatgtgttcggcgaacacatcggtcgcacggtcgaggcctacgtcgatgacatcgtagtcaagacgaggaaagcttccgacctcctttccgaccttgaagtgacattccgatgcctcaaggcgaaaggcgtcaagctcaatcccgagaagtgtgtcttcggggtgccccgaggcatgctcttggggttcatcgtctccgagcggggcatcgaagccaacccggagaagatcatagccatcaccagcatggggcccatcaaggacttgaaaggcttgcgacactacttcgagtctcatccggtaactgtggtgtcatccttccccctgggggagatcatccagtgccgagaggcctcgggtaggattgcaaagtgggcggtggaaatcatgggcgagacaatctcgttcgcccctcggaaggccatcaagtcccaggttttggcggacttcgtggccgaatgggtcgacacccaattaccgacggctccgatccaaccggagctctggaccatgtttttcgacgggtcgttgatgaagacgggggccggcgcaggcctgctcttcatctcgcccctcaggaaacacctacgctatgtgctacacctccatttcccggcgtccaacaatgtggctgagtacgaggctctggtcaacgggttgcggatcgccatcgagctagggttccggcgcctggacgcccgcggtgactcgcagctcgtcatcgaccaagtcatgaagaactcccactgccgcgacccgaagatggaggcctactgcgatgaggttcggcgcttggaggacaagttctacgggctcgagctcaaccacatcgctcgacgctacaacgagactgcggacgagctggctaaacccgaggtaccctcggccctcgagggtgaggcgttgcgcgtcgagggggagcgaagcagggccacacctgatcgaaactggcaggccccgtacctgcgatatctccaccaaggagagctacccctcgaccgagccgaggctcggcgggtggcgcggcgcgctaagtcgttcgtcctgctgggcgatgagaaggagctctaccaccgcagctcctcaggcatcctccagcgatgcatctccgtcaccgaaggcttctactggccgacggcggtggccgacgccactagaattgtccgcacctgcgaagggtgtcaattttatgcgaagcagacccacctgcccgctcaggctctgcggacgatacccatcacctggccctttgctgtatggggtctggacctcgtcggccccttgcagaaggcgcccgggggctacacgcacctgctggtcgccatcgacaaattctccaagtggatcgaggtccgacctctgaacagcatcaggtccgagcaggcggtggcgttcttcaccaacatcatccatcgcttcggggtcccaaactccatcatcactgacaacggcacccagttcaccgacagaaagttcttggacttctgcgaggattaccacatccgggtggactgggccgccgtggctcatcccatgtcaaatgggcaagtagagcgtgccaacggcatgattctacaagggctcaagcctcggatctacaacgacctcaacaagttcggcaagcgatggatgaaggaactcccctcggtggtctggagcctgaggacaacgccgagccgagccacgggtttcacgtcgttcttcctagtctacggggccgaggccgtcttgcccacagacctggaatacggctccccgaggacgagggcctacagtgatcaaagcaaccaagctagccgagaagactcgctggacctgttggaggaggctcgggacaaggccttgctacactcggcgaggtaccagcagtccctgcgacgctaccacgcccgagaggtccggtcccgagacctccaggtgggcgacctggtgcttcggctgcgacaagacgcccgagggaggcacaagctcacgcccccctgggagggaccgttcgtcatcgccaaggttctgaaacccggaacgtacaagctggccaacggtcaaggcgaggtctatggcaacgcttggaacatccaacagctacgtcgcttctacccttaa

SEQ ID NO: 113864 - DNA, 413 bp, Zea mays
  Clone ID: MRT4577_35327C.1
ggggggggggggttttttttttttttttttttttttttttcatgctgggacgcatatttattcaaacaccttccttttttacaagggctgggctgacagcattacacaccgctacaactgaaccctgccttgccttcctgcgtgcacgtgcggaggggggtacttttttcacacggacactcgctttgttcccttagacttggacacgacagaaaaacagcccccccatctagctattgacgatgacccctccgttgacgtggaggatctggccggacatgtaggacaaatcctggttgctggcgaggaagacaaagctgggcgcgatctcggccggctgcgcggcgcgcttcatgggcacctgggacccgaactgctccaccttcttcttgccgaaggacgccgggatgagc

SEQ ID NO: 113865 - DNA, 248 bp, Zea mays
  Clone ID: MRT4577_35328C.1
cccacgcgtgcgctcatgttggcccacgccgcttagctcccggaagccttctcctatgcgtcgggttctctttgaaatatctcacgtcgtggatgctctgattcttcttgaatcttatccttccaccggcggaccgcccctgactgctttttatgcgcgccgggtgctcatacctggcttgctgcgcccatagccgaacggctcccatggcgagctggccgggatgcccctgctccaagttcctccct

SEQ ID NO: 113866 - DNA, 2326 bp, Zea mays
  Clone ID: MRT4577_35329C.1
gaaaaaaaatacaaaaaaaaaaaaaaagttgggcattgggacctcgccccggcgggggtgccccccgctccagccgccatgcgcgcgctactgcatctgcggctcatcaatccgtgcagtcccagagcaccccgtcttcccgctactcccgcaagggcgctcgtcgcttccttctccggggcgtggcaggcaccttctggtagagcgagagcgagagcagcgccgccggcagttcgcgctatggcgtcccagcaggtgttccgggctcagcagcagcagcagcagcagttcccggctcagcagcaggagtcccagccggggaaggagcacgcgatggacccccggcccgaggccatcgtccaggactacaaggccgccaacaagctcaaggacaaggtggcgctcgtgaccggcggcgactccggcatcgggcgcgccgtgtgcctgtgcttcgcgaaggagggcgcgacggtggccttcaccttcgtgagggggcaggaggagaaggacgcggaggagacgctgcgtgcgctgcgcgacatcgggtccgagacgggcgcgcgcgagccgatggccctgcccgccgacctcgggtacgaggccaactgccgggaggtggtggagcgggtggcgtcggcgtacggcgggcgcatcgacgtggtggtgaacaacgcggcggagcagtacgagcgggagagcatcggggacgtgacggaggcggacctggagcgcgtgttccgcaccaacatcttctcctacttcctggtgtccaagcacgcggtgccgcgcatggagcccggcgcctgcatcatcaacacctcctccgtcaacgcgtacaagggcaacaagacgctgctggactacacggccaccaagggcgccatcgtggccttcacgcgcgcgctctcgctgcagctggccgacaggggcatccgcgtcaacggcgtcgcgccgggccccgtctggacgccgctcatcccggcgtccttcggcaaggagaaggtggagcagttcgggtcccaggtgcccatgaagcgcgccgcgcagccggccgagatcgcgcccagcttcgtcttcctcgccagcaaccaggattcgtcctacatgtccggccagatcctccacgtcaacggaggcgtcatcgtcaatagctagatacggaagctgttttgctgtcgtgtgatcgtgtccaagtccaagggaacaaagcgagtgtccgtgtgtaccagtcagtaccaggtagcagtgtcagtacgcgcacgcaggaaggcaaggcagggttcagttgtagcggtgtgtaatgctgtcagcacagcacttgtaaagaaggaacgtgtctgaataaatatgcgtccaagcatgaagacttcgtacgtggtttgcacaaaataaattcgaaactcccggtgcagtggtacttgctagtgcaccattctcaccctctcttttggacgaggtttatcccggccgggacacgttcagtagaacactaaattcgaaaccaaggttcaaagtggtttagcaacatattaaattcgcatatgcatttgagccaaatgaatcacgtcgatcatggttacaaccggacgtatagcagtatagaacttcaacattcaccacgctaatgagtcagcctttacctttatatattctaaaagcaaaatcacatgtcaacgcttatagcgctgatgttctctcgacactgtttagaaaacaaaaacaaaatatgcaaacaaaaaagacgaagctatcatcttcagccacggcgaagccatctgcttgcttgcgagtcaaaactggagacatcatcttaaagctccctcaaccttggttcttgctagcatcccgtatatggaacataagcttaacgcccacgtagaacgtagtaaatatgaaggcaagggaaggcagggcatccttcccagccattcttgatatcagaactttaatcccggatggccccacgacgtaaccaacaagatttgccaccataagacagctgattgtcactgcaccagcaattgctttaaattcacggtgaacaagcatcccaagggaactagttgcctgaaatttgctggacagagatttaaccaatatctctggaatgaaaaataagcaagtcaaccatgcccatgagataagtttccattctagatcatgccacactgctacaaacgtgaatatcacccagatactcagtagttttctttgagaaccaccaagaggaatgtataagtacctaaccaaccatttattaaaagaagcatgccagcttttccagaaactctccagatcaggcaatacccgccggctcgaggtaccc

SEQ ID NO: 113867 - DNA, 338 bp, Zea mays
  Clone ID: MRT4577_3532C.1
gggcaaggggcaaactataattcccggccaaagggaaattcccaattccgacagggggggtaaggatgtatcattcttgaaaagcaaagggcatgtttgaaaattttattgaacctgggaaaaaaacttaaaagttgcccccaccggggggcccaattcataaactggattcagggttccctttgaaagccaaaagctgacaaaatctgggggccccccaacagaagccactaaaaaaaacttgggttcaggcattcaaagcatatttaacggtcgcaggggccaaaccacaagaaggcgccctactgggggcaacaataaccggttttgcatccaaa

SEQ ID NO: 113868 - DNA, 318 bp, Zea mays
  Clone ID: MRT4577_35330C.1
cctactcggcggcggcgcgaccgcatgttgctgaccgaaggaggaccaggaccaccggacacaacgcagaccggggagcacggatgaaggaaagagctccccacggggggaaacacacgaaaagagcagcccacaggaccaactaccactgaaagccgggagcccaaccagctccagaacatgcaccgcctgctgaagctgaacaaactcctaaccagattcaagagaagagaccacgtgctacactatcggagaaggcactgaaaagtttacctgcaaccctttcgaggagcccgatagaaactccttcagaaagga

SEQ ID NO: 113869 - DNA, 345 bp, Zea mays
  Clone ID: MRT4577_35331C.1
atcctctcggctagctagctagctaggacagatgagggaggggaaggcgctggctatggcgactgctgcggcggcggcaacgtctgccatggacgatccggacgtactgaactgccgcgacatatcttgctggatcacttccggagtgttgctaccgtcgaccgccattgtgattgtgccggcaccgttcgactagtgcatttaccacatgctgaaccgatcctgactttaccatgcagcgaagcttgagacgtgtgactaggatgacaatgcggtgacgaccagtcgtgtggactgtgaactgtcggacttgtacaataacttcaacagcacactgcacgggac

SEQ ID NO: 113870 - DNA, 883 bp, Zea mays
  unsure (1)..(883): unsure at all n locations
  Clone ID: MRT4577_35332C.1
cggccgctcaggcggcgggcgggttttcagaaaggaccaacgggactggtggtctaagatctaccctgcctacggaacggacggaaggaaggaggaagaggcggacgccggcgaagagatggcgtggcggctggcgctgccgctgctcctcttctactcccccatcctcctctgctcctcctcccaagaagtccaagacaatgatccctccaaattgttcaagagcgcctccgagatgatgagcctaaggaaatacgacggagcgctcggtctgctgaacgctgtccttgagctcgaccccaaccattccgaagcttacaggcagcgcgcaacggtgcttcgtcacagatgcagacacaaggaagctgagagtgactataacaaattcctggagctcaagcctgggactgcttcagtggaaaaggaactagctcagctgctgcaggctcagaatgcattagaatctgcttatagccagtctgatgctggagaattttccaaagtcctggagtacgtcaacaaaatcgtgctcgtcttttctccaggttgcttaaaggcaaagcttctcaaggctaaagcattgctagcactgaaagactattcgaatgttatttcggagacgggatttattctcaaggaagatgaagataacctggatgcgctgttacttcgtggtcgagcatactattaccttgctgatcatgatgttgccaacaggcactaccagaaaggactgcgtctagaccctgaacattcagaattgaagaaggcgtattttgggttgaanaaacttctgaagaaagaccagagcgcagaggataatgctgccaagagcaagttccgcgtggctggtgaaagactacaggcagcactagcaatggat

SEQ ID NO: 113871 - DNA, 2733 bp, Zea mays
  Clone ID: MRT4577_35333C.1
tcgaggccggccgggccgggatcccaccacacttgacccatcgccgtcatcccagaccacggcgatcgccgtcgtccacgccgacgcacccgcatccctctctcgcctgcgccgcagctatgtcgggctgggacgagggcgccgtgttctacagcgaccaggcgcaattcccccgcggcggccctggcggcgacccagccgccgacctcacccgccactccgccctccgcaaattcaaggagtttctccgcggcttcactggccccaccggcgacttcccctaccgtgagagcctagtacacaaccgcgaccatgtcaccgtcgctattgaggacctcgacgccttcgatgccgagctctctgacaagatccgcaagtcgccggccgattatcttcctttgtttgagacggctgcggccgaggttctcgcaagtctccgttcgaaagtcgccggcgaggccggagagatggaggagcccgtcactggagatgtccagattttcctctcctccaaggagaactgcctgtccatgagatctgttggggcggattacatgtcgaagctggttaagatagcgggaatagcaattgctgcatcgagagtaaaagctaaggccacccatgtaactcttatctgcaagaattgccggagtgtgaggacagtgccttgcagaccaggcctcggcggggctattgttccacgttcgtgtggccctgccgctcaacatgcaaaccacggatgtcctgaaaaagcagctgagatgctgcagaacaaatacatcgagattagacagaaaattcaaaagcaagctcacgagacagggagggctgcagtaatacccatccctgtgaggcagcttgaagccatcatacgtttgagtgaatctcttgcaaagatgagattgacaagcgtggctacaccagagcatgtcgaagaggcattcagactgttcaatgtctccacagtcgacgctgcgagatccggaatcaacgagcgacagcaacgcaatctcgagacaataactcaaatggcccctcaaacttcactcttgatgaggaaatggaattcaaagaatttgcacagaggccagatgcatatgccaagctatgctcaatgattggtccttcaatttatggtcattctgatgtcaagaaagctattgcatgcttgttcaaactatggtctaagaagaggctacctgatggtgtacgtttaagaggggacattcatgtcttgcttctgggtgatccctccacagcaaaatcacagttcctaaaatttgtagagaagactgcacctattgcagtatatacatctggcaaaggatcgtctgcagctggtcttacagcatctgtaactcgtgatagtagctcgcgtgagttttatttggaaggaggagccatggttttggctgatggtggagtagtttgtatcgatgaatttgacaagatgagacctgaagacagagttgcaattcatgaggccatggagcagcagacaatatctattgccaaagctggcattacaacagtactcaattcaaggacttcagttcttgcagctgccaatccaattgcaggacgctatgatgatcttaagactgcacaagataatattgatctacagaccaccattctttctagatttgatctaatctttattgtcaaagatatcagaatgtatgaccaagataagcgaatagcaagccacattatcaaggtgcatgccagtggtgcagcagcgtcatccgcaaacacagagggaagtgaaggagagaattggcttaaaaggtacattcagtactgccgcgccacatgcaaaccacggctttcagaaaaagcagctgagatgctgcagaacaaatatatcgagattagacagaaaatgaggcagcaagctcacgagacagggagggccgcagctatacccatcacggtgaggcagcttgaagccatcatccgtttgagtgaatctcttgcaaagatgagattgacaagtgtggctacaccggagcatgtcgaagaggcattcagactgttcaatgtctccaccgttgatgctgcaagatccggaatcaatgagcatttgaacctgtcaccggagatcgcaaatgaaatcaagcaagcggaggcacaaataaagagaagaatgggcatcggcagccacatatccgagcgacggctgattgatgagctaaaccggatggggatgaatgaatccatcgtcagaagagcccttctgatcatgcatcaaagggacgaggtggagtacaagagagagcgccacgtgatcgtccgaaaggcttgaggtggagaggccagtcagattcacggcatacaacgtacactggaggcggtccttcctcttcggacgtgtgtataccttcactgaaactgcacctttgtctgtccagaggacgaggcatgccttagttgatctctgacatgactcttgtaatctgcacacgagtggatgcaaccttttgcttcgtgcaaatggagctttgtagctgtaccacagtagtctgttgctgcctgtgatcctaaaccatagtgttgtgagcatgaagacttcgtttttttggaagtaaccataggttctgaactgcattgtgctgtgtagctcgtcaatcaattctggaatgcgaactttaaaaaaaaaaaaaaaaaaaaaaaaagaagggcggccgccggatggtgagctcgtagacccaggaattaatgccggaccgg

SEQ ID NO: 113872 - DNA, 283 bp, Zea mays
  Clone ID: MRT4577_35334C.1
taacattattggaccagcaattgttggaggggacctcactgtgcaggaggggatttacaactacatgatcctacacctagacaaaacctccaatgagtggaccatctgctaacagaagctcacactaaataccatgcttacgctttcacttgctaagtgcaaaattaaacctatcgtgcagaagattattttttaccagcacattggaaatgtttacttgatcaaaactatcagaatactctgcctctccttaatgcgattaatggaagcaacatgctgaaaa

SEQ ID NO: 113873 - DNA, 443 bp, Zea mays
  Clone ID: MRT4577_35335C.1
tttttttttttttttttttttttttttttttttttttttttttttttttttttttttttttttttttttttttttttttccaattttttttttttttttttttttttttctttttttttttttctttttttgttttttggttttttaggccaggaaaatctcggttttgtttttttacccgccaaaaaggccgaagggggggcccacccccaggggggtgggggaaaaaacccgggggtccgaaaaaaaaaccggggtgggagggaccatggtcgtagctgttaaaagggggacccggttatgcgcccacagttgcaaaaaaatacaaaaccggggggtgaaaaaaaaagggctggggggcccaaccagtgagcggactaaaaggaaaagcgttgcgctcgctgacaaattcccaaaaagaaaacctgccccgccggctgaat

SEQ ID NO: 113874 - DNA, 193 bp, Zea mays
  Clone ID: MRT4577_35336C.1
gagcggcgtgggcagcgtcatccatggtgcacgtgaacttctatcgcaactatggtaagactttcaagaagccaaggcggccttatgagaaggagcctgaggtgcaagcgtgagctgtggcgtgtgcagtattcacccactaatttcaactcagcatcaaggcgctccttctcataaggccgccttggcttct

SEQ ID NO: 113875 - DNA, 513 bp, Zea mays
  Clone ID: MRT4577_35337C.1
ccccagggcccccctaaacaaaaccccggccctttataggatttttatatagccaaagaagggaacaaccaccggctcgatttaacaaaaccagggctggtttggtccgtaaaaaaagccccttggcacccttttttcccttgaaagccccggccgggattttggccccgtaccccccccgaaataaaaaatttagctaaccaatccggggggaccacggggaaaatatcctttaggggaacggttccttcccaaacagcccaaaaatggttgggccagggttttccggggtaaggggggcctctcctcccaaacccggaaaacccccagtttttggcccatagcccccgtcttggggggggaacagcccaaactcgccaacaaccggaattcgcttccggtaaaggaggccccccccctttttaacaacaggttggggttggcgggggccccttcaaaggccccaaaacgggggtggtggaccccaataacccccaccccgtttatttgggg

SEQ ID NO: 113876 - DNA, 271 bp, Zea mays
  Clone ID: MRT4577_35338C.1
caggcgctgtgcttctgtgaggtggtttagcttttgctttcgaactggccagctgcggccaccaggtctcagcacaagagcgcttcctttgcacagaatgagcttcgagctttgttcagactaaatgaatgtatctgggaggggtcgggggcacgagttgattccaagcacatgcctttgctgagtgtgtgtgtgcggggagagtcagagtggatgtagagcgcggttttatttttgtactgacattggtaagagactgtatagcatctat

SEQ ID NO: 113877 - DNA, 198 bp, Zea mays
  Clone ID: MRT4577_35339C.1
cttggttttttctttttttttttgatactcaacagctatataattatttggctatgaagtgctcagagtgaccgggcctgttgccacaaaagaaaacaacgggaaagtgatctcaatacacaaccaccgttggcgcgtctagctgggtcggaagattttttttctctggggcgggagcccgcacagcaaatgcagggg

SEQ ID NO: 113878 - DNA, 214 bp, Zea mays
  Clone ID: MRT4577_3533C.1
gaattccaactgggacggggtttcgaattaaagcaaattaactctgggactgggacattcgactcggataggatccaaaaaactcacgggaatatcactggccacacaaagcagacatatagctatgggtaaattagggtgggggattgcccagccaccaccatcggcagcaccccaggggaaggagctgtcggaagtcacgcctagatcttgg

SEQ ID NO: 113879 - DNA, 319 bp, Zea mays
  unsure (1)..(319): unsure at all n locations
  Clone ID: MRT4577_35340C.1
gtgcgtgtcgcgatagaacgctgaccggcgactatggattcgacccgatgggcctctcggacccggacggcaccctgggctttatcgaacccaagtggctggcctatggcaaggctgatcaacgggcggtacgccatgctgggcttcctcgttcgccatggtgtcggnaatcttgggcacgatgggcatcatccgcccagagactgggctgacatggtgcaagacagccatcttaccgacagcgggcacctacaactactgggccgactgctacactctcttcagattaaacatgacgctcatgggcttcgccgatcac

SEQ ID NO: 113880 - DNA, 384 bp, Zea mays
  Clone ID: MRT4577_35341C.1
attgaagtctgacactcttgctctacactgtatgtttcgggttggggggaaaatgaccaagtatttcctaaggttaggataacgcaatactgggattttcagatgcgcagagcacgccaaaacctcagcactttcttcttttctggtgaagtggatttacgctacttgggcatttcccccctgttcgatccattatgaagtgctcgtgggtgatgcatagagatggtagctcaactatagatggtatgtatttgtgttataggctataccgctatagaattcaggagctgatttgtttattgcaattcattgggacattatatatgctccacaaggtcagtaatttgtttgaaaccttttgttgcttcatttgaatgagggtag

SEQ ID NO: 113881 - DNA, 529 bp, Zea mays
  Clone ID: MRT4577_35342C.1
ggaaggcggtgccagccctaagtgacccctttgctgatgcaagtaagggtgatgacctgcttcctgctggcactgaggattatatccatataagaattcaacagagaaacggcaggaagacccttactactgtccaagggatcgctgatgattacgataaaaagaaactagtgaaggcgtttaagaaaaagtttgcctgcaatggtactgtaattgagcatccggaatatggagaagtaattcagctacagggtgaccaacgcaagaacatatgccagttcctcgtagagattggactggctaaggacgatcagctgaaggttcatgggttttaagtgcttgtggctcactgaagcttaagtgaggatttccttgcaatgagtagaatttcccttctctcccttgtcacaggtttaaaaacctcacagcttgtataatgtaaccatttggggtccgcttttaacttggactagtgtaactccttcatgcaaataaactgaaagagccaaaaaaaaaaaaaaagggcgtc

SEQ ID NO: 113882 - DNA, 2583 bp, Zea mays
  Clone ID: MRT4577_35343C.1
atgtggtcaacctgggaccgactgacagccgtctcaacctacgggcccccgggttccgaggaagatgacgagcccgactctggttgggatttctccgggctcggtaaccccagtgccatgcgagacttcatggccgcatgtgactactgcctctctgattactccgatggtggccacagcctcgacgacgaggactgtggcccaagtcgcgaatgtttccacgtcgatctagggggtctcgacgaaggcaaccaccttggtatgccagatgatggcaatccccctaggcctgcgcctcgcattgacatccttcgggagctagctgtggtcccagtccctgcggggggtcaggacgcacagctcgagcaaatccgcgagatgcaggccaggctcgacgaggaagcagggcaacttgtgcagctccggcaggagatcgggcaggagtgggcaggccgagcaccggccggagaagcgcgtcatctggcccaggacgtccagcaccgcatcgctgacgatgccagggcaaggctgcccccggcttccagtggggtcggccagaacctggctgcagcagcaatactactccgagcgatgccggagccatccaccaccgaggggcggcgtatccagggagagctcaagaatctcctggaggatgccgcggtccgacgggccgagagctctaccttccgaaggcaggggtaccccccggagcatcgcgccgcgacttcccgattcatgcgagaagcctcggtccacaccaggcgcatgcgggacgcaacgcctacagccccgggtcgcctcggcaacgaccaccaccgccgcaaccgtcgagcccacctcaacaagaaggtgcgccgaggctaccaccccaggcgtgggggacgctacgacagcggggaggatcggagcccctcgcctgaaccacctggtccgcaagctttcagccgggccatacgacaggtgccgttcccgacccggttccgaaccccgactaccatcactaagtactcgggggaaacaaggccggaactgtggctcacggactacctgctggcctgccagctgggtggaacggatgatgacaacctcatcatccgcaacctccccctgttcctctccgccgccgcccgagcctggctagagcatctgcctcctgcgcagatctccaactgggacgacctggtcaaagccttcgccggcaacttccagggcacatacgtgcgccctgggaactcttgggatctccgaagctgtcgccagcagccaggcgaatccctgcgggactacatcagacgattttcgaagcagcgcaccgagctgcccaacatcaccgactcagatgtcatcggcgcgttcctcgccggcaccacttgtcgcgacctggtgagcaagctgggtcacaaatctcccaccagggcgagcgagctgatggacatcgccaccaagttcgcctctggtcaggaggcggtcgaggccatcttccggaaggacaagcagcctcagggacgccagcaggaagacgtccctgaggtgtccgcccagcacggcacgaagaagaagggcaagaagaagtctcaagcgaaacgcgacgccaccgacgcagatctcgtcgccaccgccgagcacaggaaccctcggaagcctcccgggggggccaacctgtttgacaagatgctcaaggagtcgtgcccctatcatcagggccgggccccggcggaaggtggcagagcccacgacaacgacaagaaggagggcaacaaggcagaggagttccccgaggtccacgactgcttcatgatctacggtgggcaagtggcgaatgcctcggctcggcaccgcaagcaggagcgccgagaggtctgctcggtgaaggtggcggcgccagtctacctagactggtccgacaagcccatcaccttcgaccaaggcgaccaccccgaccgcgtgccgagcccggggaagtacccgctcgttgtcgatcccatcatcggcaacgtcaggcttaccaaggtcctcatggacggaggcagcagcctcaacatcatctacgccgagaccctcgggctcttgcagatcaatctatccacgatccgggccggtgtggcgccttttcacgggatcatccctgggaagcgcatccaaccccttgggcggctcgatctgcccgtctgcttcgggactccctccaacttccgaagggaaaccctcacgttcgaggtggttgggttccgaggaacctaccatgcagtgctggggagaccatgctacgctaagttcatggccgtccccaactacacctacctcaagctaaagatgtcgggccccaacggggtcatcaccgtcggctccacataccgacacgcgtacgaatgcgacgtggagtgtgtggagtatgctgaggccctcgccgagtccaaggccctcatcaccgacctagagagcctcttcaaaaaggttccagatgcgaagtgccacgccggcaacttcgagccagcagaggcggctaagtccgtccctctcgaccccagcaacgacgcctccaagcaagtccggatcggctccgagctcgaccccaaatag

SEQ ID NO: 113883 - DNA, 2238 bp, Zea mays
  Clone ID: MRT4577_35344C.1
atgtcgttcggtttgaggaacgcgggcgcgacgtaccagcggtgcatgaaccatgtgttcggcgaacacatcggtcgcacagtcgaggcctacgtcgatgacatcgtagtcaagacaaggaaggcttccgacctcctctccgaccttgaagtgacattccgatgtctcaaagcgaaaggcgtcaagctcaatcctgagaagtgtgtcttcggggtgccccggggcatgctcttggggttcatcgtctccgagcgaggcatcgaagccaacccggagaagatcgcagctatcaccagcatggggcccatcaatgacttaaaaggcatacagagggtcatgggatgtctcgcggccctgagccgcttcatctcacgcctcggcgaaagaggtctgcctctgtaccgcctcttgaggaaggccgagtgcttcgcttggacccctgaggctgaggaagctctcgggaacctgaaggcgctccttacaaaggcgcctatcttggtgcccccagctgatggagaagccctcttggtctacgtcgccgcgaccactcaggtggttagcgccacgattgtggtcgagaggcaagaagaagggcatgcattgcccgttcagaggccagtctacttcgtcagcgaggtactgtctgagaccaagatccgctacccacaagttcagaagctgctgtatgcagtggtcctgacgaggcgaaagctgcgacattacttcgagtctcatccggtaactgtggtgtcatccttccccctgggggagatcatccagtgccgagaagcctcgggcaggatcgcaaagtgggcggtggaaatcatgggcgaaacaatctcgttcgcccctcggaaggccatcaagtcccaggtgttggcggacttcgtagccgaatgggtcgacacccagctgccgacggctccgatccaaccggagctctggaccatgtttttcggcgggtcgctgatgaagatgggagccggcgcgggcctactcttcatctcgcccctcgggaaacacctacgctacgtgctacgcctccatttcccggcgtccaacaatgtggctgagtacgaggctctggtcaacgggttgcggatcaccatcgagctaggggtcagacgcctcgacgcccgcggtgactcgcagctcgtcatcaaccaagtcatgaagaactcccactgccgcgacccgaagatggaggcctactgcgatgaggttcggcgcctggaagacaagttctacgggctcgagcttaaccacatcgctcggcgctacaacgagactgcggacgagctggcaaaaatagcctcggggcgaacgacggttcccccggacgtcttctcccaggatctgcatcaaccctccgtcaagatcgacgacacgcccgagcccgaggcaacctcggtccagcccgagaaggcgcccgggggctacacgcacctgctggtcaccatcgacaaattctccaagtggatcgaggtccgacccctgaacagcatcaggtccgagcaggcggtggcgttcttcaccaacatcatccatcgcttcggggtcccaaactccatcatcaccgacaacggtacccagttcaccggcaaaaaattcttggatttttgcgaggatcaccacatccgggtggactgggccgccggggctcatcccatgtcgaatgggcaagtagagcgtgccaacggcatgattctacaagggctcaagccccggatttacagcgacctcaacaagttcggcaagcgatggatgaaggaactcccctcggtggtctggagcctgaggacaacaccgagccgagccacgggtttcacgccgttcttcctggtctacggggccgaggccatcttgcccactgacctggaatacggctccccgaggacgagggcctacaacgatcaaagcaaccaagctagccgagaagactcactggaccagctggaagaggctcgggacaaggccttactacactcggcgcggtaccagcagtccctgcgacgctaccacgcccgaggggtccggccccgagacctccaggtgggcgacctggtgcttcggctgcggcaagacgcccgagggaggcacaagctcacgcccccctgggaggggccattcgtcatcgccaaagttctgaagcccggaacgtacaagctggccaacagtcaaggcgaggtctacggcaacgcttggaacatcaaacagctacgtcgcttctacccttaa

SEQ ID NO: 113884 - DNA, 231 bp, Zea mays
  Clone ID: MRT4577_35345C.1
gtcaatatgggtctatcttggagctccaaactctgaaagaacagctcttgcctcctacattgacaaaaactgatgacacagtaactatcaatggttcggaggagaaaggttcatcatggcatctaaactccaatgccgcgtgaaacctaaaacagtgcaccagcgtttctgaacagactgcctcacaagtccaccttccagagaggcagacatggagcatacatcaaatat

SEQ ID NO: 113885 - DNA, 2286 bp, Zea mays
  Clone ID: MRT4577_35346C.1
atgccgttcggcttgaggaatgcgggcgcgacgtaccagcggtgcatgaaccatgtgttcggcgaacacatcggtcgcacggtcgaggcctacgtcgatgacatcgtagtcaagacaaggaaggcttccgacctcctctccgaccttgaagtgacattccgatgtctcaaggcgaaaggcgtcaagctcaatcccgagaagtgtgtcttcggggtgccccggggcatgctcttggggttcatcgtctccgagcgaggcatcgaagccaacccggagaagatcgcagctatcaccagcatggggcccatcaaggacttaaaaggcgtacagaaggtcatgggatgtctcgcggccctgagccgcttcatctcacgcctcagcgaaagaggtctgcctctgtaccgcctcttgaggaaggccgagtgtttcgcttggacccctgaggctaaggaagctctcgggaacctgaaggcgctccttacaaaggcgcctatcttggtgcccccagctaatggagaagccctcttggtctatgtcgccgcgaccactcaggtggttagcgccgcgattgtggtcgagaggcaagaagaagggcatgcattgcccgttcagaggccagtatacttcgtcagcgaggtactgtccgagaccaagatccgctacccacaagttcagaagctgctgtatgctgtgatcctgacgaggcggaagttacgacattacttcgagtctcatccggtaactgtggtgtcatccttccccctgggggagatcatccagtgccgagaggcctcgggcaggatcgcaaagtgggcggtggaaatcatgggcgaaacaatctcgttcgcccctcggaaggccatcaagtcccagctgccgacggctccgatccaaccggagctctggaccatgtttttcgacgggtcgctgatgaagacgggagccggcgcgggcctgctcttcatctcgcccctcgggaaacacctacgctacgtgctacgcctccatttcccggcatccaacaatgtggctgagtacgaggctctggtcaacgggttgcggatcgccatcgagctaggggtcagacgcctcgacgctcgcggtgactcgcagctcgtcatcgaccaagtcatgaagaactcccactgccgcgacccgaagatggaggcctactgcgatgaggttcggcgcctggaagacaagttctacgggctcgagctcaaccacatcgctcggcgctacaacgagactgcggacgagctggctaaaatagcctcggggcgaacaacggttcccctggacgtcttctcccgggatctgcaccaaccctccgtcaagatcgacgacacgcccgagcccgaggcaccctcggcacagcccgaggcaccctcggctcggcccgaggcgccctcggttcagcccgaggtaccctcggcccccgagggcgaggcactggacgtcgaggaggagcagagcggggccacgcctgatcgaaattggcaggccccgtacctgcaatatctccgccaaggagagctacccctcgaccaagccgaggctcggcgggtagcgcgacgcgccaagtcgttcatcttgctgggcgatgaggaggagctctaccgccgcagcacctcgggcatcctccagcgatgcatctccatcgccgaaggtcaggaactcctgcaagaaatacactcgggggcttgcggccatcatgcagcgcctcgagcccttgtcgggaatgctttccaacaaggcttctactggccaacggcggtggctgacgccactagaattgtccgcacctgcgaagggtgccaattctatgcgaagcagacccacctgcccgctcaggctctgcagacgatacccatcacctggccctttgctgtatggggtctggacctcgtcggtcccttgcagaaggcgcccgggggctacacgcacctgctggtcgccatcgacaaattctccaagtggatcgaggatcatcacatccgggtggactgggccgccgtggctcatcccatgtcgaatgggcaagtagagcgtgccaacggcatgattctacaagggctcaagcctcggatttacaatgacctcaacaagttcggcaagcgatggatgaaggaactcccctcggtgatctggagcctgaggacaacgccaagccgagccacgggtttcacgccgttcttcctggtctacggggccgaggccatcttgcccactgacctggaatacggctccccgaggacgagggcctacgaggaccaaagcaactaa

SEQ ID NO: 113886 - DNA, 3105 bp, Zea mays
  Clone ID: MRT4577_35347C.1
atgggcagtctccagcaacctctccgacccgggacggtgctccgtttcgggagtcttgagttcatgtccttcgacggcagctacgacatgaaactccttccaccgccgcgcgacaacgacaatggcggccgacagccctcccgccgacggcggaatcgacgacgtcttccccgcgtggtggaagaacaacattcgagctcgccccgtcctctcccccgccaacggaggaggaggcggggcaaccaaggccaagcgggaggccgcgcctcgtcggctgtcgagcgagtcaacgtccccagcgccccaacggggggcgcgtcgggcgtcgatctcgcgtttgagacgaaggcgagcgccgtctccccgcgacacgccaaacccgagcaagtggacgacgccagtgcgcttgcgaaaagcttgcaggacgtcgccctcgtacctgaggcgacggtgcagtcagtcctcgacgtgacttcatcgccgctcgacgaccaaaaggtaccgactgattcccatcctacgtcatttggactcagcctcaacccgcctagcgaccttgctttggcgggcgctctcgtagaggcgagttcaaaccctctggggtttcgcttgtggtctccttgggaccggctgacggacgtcttgacctacgggccctctgggtccgaggaagatgacgaccccaacatctgtcgggatttctctggatttggcaaccctagtgccatgcgggacttcatgaccgcatgtgactactgcctctccgactattccgacggtagccgcagcctcgacgacgaggactgcggcccaagccgcgaatgtttccacgtcgatctagggggtccctccgaaggcaatcatctcggcatgccggaggacggtgatctccctaggccggtgcctcgcgctgacatcccgcgggagctagctgtggtccccgtttcggcggggggtcacgacccacagctcgagcaagtccgcggggcgcaggccaggctcgacgagggagcaggagcgcttgagccgattcgccgggacatcgggcaggcatgggcgggccaacccccggccggagaaatacgtcacctgccccagggtctccagcaccgcgtcgcctacgacgtcagggtcaggccgccacccgcatccagtggggtcggtcagaacctggctgcagcagcgatgctcctccacgcgatgccggagccatccaccaccgagggtcggcgaatccagggggagctcaagaatctcctggaaggcgccgcggtccgacgggccgagagcactgcctcccgaaggcagggatacccctcggaacctcatgccgcgacttctcgattcatgcgggaagcctcgatctacaccgggcgcacgcgcaacaccgcgcctgcggccccgggccacctcggcaacgagcaccgtcatcgcgaccgtcgggcccacctcgacgagagggccttcagccgggccatccgacgggcaccgttcccgacccggttccgacccccgactactatcacaaagtactcgggggaaacgagaccggaactgtggctcgcggactaccacctggcctgccaactgggtggaacggacgatgacaacctcatcatccgcaacctccctctcttcctctccgacaccgctcgtgcctggttggagcacctgcctccggggcagatctccaactgggatgacctggtccaagccttcgccggaaattttcagggcacgtacgtgcgccccgggaattcctgggacctccgaagctgccggcagcagccgggagaatctctccgagactacatccggcgattctcgaagcagcgcaccgagctgcccaacatcaccgactcggatgtcatcggcgcgttccttgccggcaccacctgccgcgacctagtgagtaagttgggtcgcaagacccccaccagggcgagcgagctgatggacatcgccaccaagttcgcctctggccaggaggcggtcgaggctatcttccgaaaggacaagcagccccagggccgcccatcgaaagatgctcccgaggcgtctactccgcgcggcgccaagaagaaaggcaagaagaagtcgcaagcgaaacgcgacaccgccgacgcggaccttgtcgccgccgccgagtacaagaaccctcggaagccccccgaaggtgccaacctcttcgacaagatgctcaaggagccgtgcccctatcatcaggggcccgtcaaacacacccttgaggagtgcgtcatgcttcggcgccacttccacagagccgggccacccgcggagggtggcagggcccgcgacgacgacaagaaggaagatcaccaagcaggagagttccccgaggtccgcgactgcttcatgatctacggtgggcatgcggcgaatgcctcggctcggcatcgcaaggaagagcgccgggaggtctgctcggtgaaggtggcggcgccagtctatctagactggtccgacaagcccatcaccttcgaccaagctgaccaccccgaccatgtgccgagcccggggaaatacccgctcgtcgtcgaccccgtcgtcggcgacgtcaggctcaccaaggtcctcatggacgggggcagcagcctcaatatcatctacgccgagaccctcgggctcctgcgcgtcgatctgtcctccgtccgagcaggcgctgcgcccttccacgggatcattcccgggaagcgcgtccaggagactctgacgttcgaggtggttgggttccgaggaacctaccacgcggtactggggaggccatgctacgcaaagtttatggccgtccccaactacacctacctaaagctcaagatgccgggccccaacggggtcatcaccgtcggccccacgtacaaacacgcgttcgaatgcgacgtggagtgcgtggagtacgccgaggccctcgccgagtccgaggccctcatcaccgacctagaaagcctctccaaagaggtgccagacgtgaagcgtcatgccggtaacttcgagccagtggagacggttaaggccgttcccctcgaccccagtggcgacgcctccaagcagatccggatcggttccgggctcgaccccaaatag

SEQ ID NO: 113887 - DNA, 575 bp, Zea mays
  unsure (1)..(575): unsure at all n locations
  Clone ID: MRT4577_35348C.1
ccggngtcgacccaacgcgtccgcccacgcgtgcgcttcaggctgcccagcaggtacacatgcgtttgaggatgcagcgggtggggtcatgtgagctacgaggtgctgactccctcgcgttgcacttctgcggactgggcacgcacggcgcccacgactactatgaccagctggacggttacgacgaggccatatgtccaatggtactcatatccaggaagggacccatcctggaccacgagatcaaccaaactatggtgcgtccgctcttccacggtgtgaagctgcacgcccccttggactcctggcacagtaccaccggtctaaaactcctgttctggtgcctcatgtccagacacacaagatggcactggaaagacgagagccccctgggcgcatcataccagtgcacaagctgctgataggcgatgctcatcaattggtacagtgactgataaaactattccagcttgtccagtgcatataaactggcagcctgtactaccatgggggccttgacgcacattgtgatcacgatgctggaactcaagccgcacggtgtcacctacgggcgc

SEQ ID NO: 113888 - DNA, 1311 bp, Zea mays
  Clone ID: MRT4577_35349C.1
atgtttttcgacgggtcgttgatgaagacgggagccggcgcaggcctactcttcatctcgcccctcgagaaacacatacgctatgtgctacgcctccatttcccggcgtccaacaatgtggctgagtatgaggatctgatcaacgggttgcggatcgccatcgagctaggggtccggcgcctcgacgcccgcagtgactcgcaactcgtcatcgaccaagtcatgaagaactcccactgccgcgacccgaagatggaggcctactgcgatgaggttcggcgcttggaagacaagttctacgggctcgagcttaaccacatcgctcggcgctacaatgagactgcggacgagctagctaaaatagcctcggggcgaacaacggttcccccggatgtcttctcccgggatctgcaccaaccctccgtcaagatcgacgacacgaccgagcctgaggcgccctcggcccagtccgaggtaccctcggcccagcccgagaaggcacccgggggctacacgcacttgctggtcgccatcgacaaattctccaagtggaccgaggtccgacctctgaacaacatcaggtccgagcaggcggtggcgttcttcaccaacatcatccatcgcttcggggtcccgaactccatcatcaccgacaatggcacccagttcaccggcagaaagttcttggacttctgcgaggatcaccacatccgggtggactgggccgccgtggctcatcccatgtcaaatgggcaagtagagcgtgccaacgacatgattctacaagggctcaagcctcggatctacaacgacctcaacaagttcggcaagcgatggatgaaggaactcccctcggtggtctggagcctgaggacaacgccgagccgagccacgagcttcacgccgttcttcctagtctacggggccgaggccgtcttgcccacagacctggaatacggctccccgaggacgagggcctacagcgatcaaagcaaccaagctagccgagaagactcgctggaccagctggaggaggctcgggacaaggccttactacactcggcgtggtaccagcagtccctacgacgctaccacgcccgaggggtccggtcccgagacctccaggtgggcgacctggtgcttcggctgcgacaagacgcccgagggaggcacaagctcacgcccccctgggagggaccgttcgtcatcgccaaggttctgaagcccggaacgcacaagctggccaacagtcaaggcgaggtctacgacaacgcttggaacatccaacagctacgttgtttctacccttaa

SEQ ID NO: 113889 - DNA, 722 bp, Zea mays
  Clone ID: MRT4577_3534C.1
cattgggtacctcgaggccggccaggaattccacttcaacagctcaccaccaccaccatggcgctcccgccgcacatcatggcgctcagcaaggggcagcgcctctacgacgcctgcgacgtcgtcttctcctcgccgccggtggcgcccacgctcggggacatcacatggctgcagaacatcctcgatggcgtggaagcagccgacgtcgggatcgacgacggggagaagccgacgtcgtcctcgtccgacgacgacctcctcctgccggcgccggcgttcacgcggatcacctacgtgcacatacaccagtgcgacgatttctcgattggcgtcttctgcttcccggccggcgcgacgctgccgctgcacgaccacccggagatggtagtgctcagcaagctgctgtacggctccgtgcgcgtgcgctcctacgactgggtcgccgcgccgcctgataattcgccgtcgccgcccaggaggaggaaacgtggcctggccagggtggtggccgcggacgtggtgcgccgggcgccctgcccggcgtccgtcctcttcccgcgcagcggcggcaacctgcacgccttctccgccgtcacgccctgcgccatcctcgacgtgctcacgccgccctactcggaggaccacgggcgcccctccacctacttcaccgacgttcccgtcccgtccctcccgggcttcgctgtcttggaagagacgga

SEQ ID NO: 113890 - DNA, 3216 bp, Zea mays
  Clone ID: MRT4577_35350C.1
atgggcagtctccagcaacctctccggcccgggacggtgcttcgtttcgggactctcgagttcatgtccttcgacggcagctacgacatgacacttcttccaccgccgcgcgactacgacaatggcggccgacaacccgcccgccggcggcggaatcgacgacgtcttccccgcgtggtggaagagcgatattcgggctcgctccgttctctcccccgccaacggaggaggaggcggagccgtcaaggccaggcgggaggccgcgcttcgtcagccgtcgagcgaatcgacgcccccaacgccccgacggaaggcacgccggacgtcgaccttgcgtttgagacggaggcgagcgccgtccccccgcggcacgctgaccttgagcaagaagacgacgccggcgcgctcgcggaaagcctgcaggacgtcgccctcgaaccagagatgacggcgcaaccagtccccgatgtgactacgtcgctcctcgtcgaccaaaaggtaacgactaacttccatcttgcgtcatttcgactcggcctcaacccgccaaatgacctcgttttggcgggcgccctcattgaggcgagtgcaacctcactgaggttctgtatgcggtcgccttgggaccgactgacggacgtctcgacctacgggccctctgggtccgaggaagatgacaatcccagcatcggttgggatttctccggacttggcaaccccagtgccgtgcgggacttcatgaccgcatgtgactactgtctgtccgactattccgatggaagccgcagccttggcgacgagagctgtggcccaagccgcgaatgtttccacatcgagctaggggatcccaccgaaggcaaccaccttggcatgccggaggatggtgatctccctaggccggtgcctcgcgccgacatcccacgggagctagctgtggtccccgctccggcggggggttacgacccacaactcgagcaagtccgcgaggcgcatgccaggctcaacgggggaacaggagcgcttgagccgatccgtcgagacgtcggacaggcatgggtgggccgacccctggccggagaaatacgtcatctgccccaaggtctccagcaccgcgtcgccaacgacgtcaggatcaggccgccgcccgcatccagcggggtcggtcagaacctggcaactgcagcaatgctcatccgcgcgatgccggagccgtcaaccaccgagggtcggcgaatccagggagaactcaagaatctcctggaaggcgctgcggcccggcgggccgagagcactgcatcccggaggcaaggatatccctcggaacctcatgccacgacttcccgattcatgcgggaagcctcggtctacaccgagcgcacgcgcaacaccgcgcctgcggccccgggccacctcggcaacgagcaccatcgacgcgaccgtcgggctcacctcgacgaaagggtgcgccgaggctaccaccccaggcgtgggggacgctacgacagcggggaggatcggagtccttcgcccgaaccacccggtccgcaggctttcagtcgggccatccgacgggcgccattcccgacccggttccgacccccgactactatcacaaagtactcgggggaaacgagaccggaactgtggctcgcggactaccgccttgcctgccaactgggtggaacggacgacgacaacctcatcatccgcaacctccccctgttcctctccgacactgctcgcgcctggttggagcacctgcctccggggcagatttccaactgggacgacttggtccaagccttcgctggcaatttccagggcacatacgtgcgccccgggaattcctgggaccttcgaagctgccggcaacagccgggggagtcgctccgggactacatccggcgattctcgaagcagcgcaccgagctgcccaacatcaccgactcggatgtcatcggcgcgttcctcgccggcaccacttgccgcgacctgggcgagcgagctgatggacatcgccaccaagttcgcctctggccaggaggcggtcgaggctatcttccgaaaggacaagcagcccagggccgcccatcggaagaagcccccgaggcgtctgctccgcgcggcgccaagaagaaaggcaagaagaagtcgcaatcgaaacgcgacgccgccgacgcgggccttgtcgccgccgccgagtataagaaccctcggaagccccccggaggtgcaaacctcttcgacaagatgctcaaggagccgtgcccctaccatcaggggcccgtcaagcacaccctcgaggagtgcgttatgcttcggcgtcatttccacagggccgggccacccgccgagggtggcagggcccacgacgacgacaagaacgaagatcacccagcaggggggttccccgaggtccgcgactgcttcatgatctatggagggcatgcggcgaatacctcggctcggcaccgcaagcaagagcgccgggaggtctgctcggtgaaggtggcggcgccagtctacctagactggtccgacaagcccatcactttcgaccgggccgaccaccccgaccatgtgccgagcccggggaaatacccgctcgtcgtcgaccccgttgtcggcgatgtcaggctcaccaaggtcctgatggacgggggcagctgcctcaacatcatctacgccgagaccctcaagcttctgcgcgtcgatccgtcctccgtccgagcaggcgctgcgcccttccacgggatcatccctgggaagcgcgtccagcccctcgggcgactcgacctcccagtctgcttcgggacaccctccaacttccgaagggagaccctgacgttcgaagtggtcgggttccgaggaacctaccacgccgtgctagggaggccatgctacgcgaagttcatggccgtccccaactacacctacctgaagctcaggatgccgggccccaacggggtcatcactgtcggccccacgtacaaacacgcgttcgaatgcgacgtggagtgcgtggagtacgccgaggccctcgccgagtccgaggccctcatcgccgacctggggaacctctccaaggaggtcccagacgtgaagcgccatgccggcaacttcgagccagcggagacggtcaaggccgtcccccttggccccagtggcgacaccaccaagcagatccggatcggtcccgggctcgaccccaaatag

SEQ ID NO: 113891 - DNA, 307 bp, Zea mays
  unsure (1)..(307): unsure at all n locations
  Clone ID: MRT4577_35351C.1
gtagcccgcgaaggnagggcaaccacaggggggagaatacagggaaaccgccggagccaacaccgccaacgaagccagcaagccgaacgaggaagcgagggacggccgcccacacaaggcggcaccggacaggaccaacgcgccagggaagaggcagccaccagggggaggccacaacaccgagcagggacacgaccacangaggccgcaaggagaggccaaagggcgaagggaaaaaccccaaaaagcgcagcccgcgaagacctaaaaaaagaagcgcggagaccacgaggcaaaacaagcacga

SEQ ID NO: 113892 - DNA, 4665 bp, Zea mays
  Clone ID: MRT4577_35352C.1
atgacgacgggcgtcgtttccccgcaacacgccaaccccaagcggacagatgacgccagcacgctcgcgaagggcctgctgggcgttagcctcgtacctgagataacggtgcagtccgtccctgacacgacttcgtcaccgtccatcgatcgagagtggtcaacctgggaccgactgacggccgtcttgacctacgggcccccgggctccgaggaagacgacgagcccgactctggttgggatttctccgggctcggtaatcctagcgccatgcgagacttcatgaccgcatgtgactactgcctctccgattgctccgatgatggccacaaccttgacgacagaggttgtggcccaagtcgcgaatgtttccacatcgatctgggaggtcacgacgaaggcaaccaccttggtataccggaggacgatgatccccctgggcctgcgcctcgcgttgacatcctgcgggagctagctgtggtcccagtccctgcggggggtcaggacacacaactcgagcaaatccgtgagatgcaggccaagctcgacgaggaagcaggacaacttgtgcagctccggcaaaacatcgggcaggagtgggcaggccgagcactagccggagaagcgcgtcatcaggcccaggacgtccaacgtcgtatcactgacgatgccagggcaaggctgcccccggcttccagtggagtcggccagaacctggctgcagcggcaatactactccgagcgatgccggagccatccaccaccgaggggcggcgtatccagggagagctcaagaatcttctagaggatgtcgcggtccgacgggccgagagctctgcctcccgaaggcaagggtaccccccgaagcatcgcgccgtgacttcccgattcatgcaggaagcctcggtccacaccgggcgcacgcgggacgcgacgcctgcagccccgggtcgcctcggcaaagagcaccaccgccgcgaccgtcgagcacacctcgacgagaaggtgcgccgaggctaccaccccaggcgtgggggacgctacgacagtggggaggatcggagcccctcgcccgaaccacccgactaccggctggcctgccagctgggtggaacgaacgatgacaacctcatcatccgcaacctctccctgttcctctccgacgccgcccgagcctggctggagcatctgcctcctgcgcaaatctccaactgggatgacctggtcaaagccttcgctggaaacttccagggcacatatccaggggaatccctgcgagactacatccagcgattttcgaagcagcgcaccgagctgcccaacatcaccgactcagatgtcatcggcgcgttcctcgccggcaccacttgccatgacctggtgagcaagctgggtcgcaagactcccaccagggcgagcgagttgatggacatcgccaccaagttcacctctggtcaggaggcggtcgaagccatcttccggaaggacaagcagcctcagggacgccagcaggaagacgtccctgaggcgtctgcccagcacgacatgaagaagaagggcaagaagaagtcgcaagtaaagcgcgacgccgccgacgcagatcttgtcgtcgctatcgagcacaggaaccctcggaagcctcccggaggggccaacatgttcgacaagatgctcaaggagtcgcgcccctatcatcagggtcccgtcaagcacacccttgaggaatgcgtcatgcttcgacgctacttccataaggccggggccccggcaaaaggtggcagaggccacgacaacgacaagaaggagggcaacaaggcagaggagttccccgaggtccatgactgtttcgtgatctacagtgggcgagtggcgaacgcctcggctcggcaccgcaagcaggagcgccgggaggtttgctcggtgaaggtggcggcgccagtctacctagactggtccgacaagcccatcaccttcgaccaaggcgaccaccccgaccgcgtgccgagcccaggaaagtacccgctcgttgtcgaactcgtcatcgacaacgtcaggctcaccaagatcgatctgtccatgatccgggccggtgcagcgccctttcacgggatcatccccgggaagcgcgtccagccccttggacaactcgatttgcccgtctgcttcgagactccctctaacttccgaaaggaaacccttacgttcgaggtggtcgggttccgaggaacctaccacgcggtgctggggagaccgtgctacgccaagttcatggtcgtccccaactacacctacgtcaagctcaagatgtcgggccccaacggggtcatcaccgtcggatccacataccgacgcgcgtacgaatgcgacgtggagtgtgtggagtacgctgaggacctcgccgagtctgaggccctcatcgccgacctagagagcctctccaaggaggtgccagatgcgaagcgccacgccggcaactttgagccagcagaggcggtttttgcgtggagtccctcggacatgcctggcataccgagggatgtcgccgagcactcgctggatatccgagctggagcccgacccgtgaagcagcctctgcaccgttttgacgaagaaaaccacagagccataggcgaggagatccacaagctgatggctgcagggttcatcaaagaggtattccatcccgaatggttagccaaccctatgcttgtgaaaaagaaaggtgggaaatggaggatgtgtgtagactacactggtctaaacaaagcatgtccgaaggttccctaccctctgcctcgcatcgatcaaatcgtggattccactgctgggtgcgaaaccctgtcattcctcgatgcctactcagggtatcaccaaatcaagattaaagggaatgcaggcgcgacataccaaaggtgcatgaaccacgtgttcggagaacacatcggccgaacggtcgaggcttacgtcgatgacatcgtagtcaagacgagaaaagcctccgacctcctctctgacctggaaacgacattcaagtgtctaagggcgaagggcgtgaaactcaatcccgagaagagtgtcttcggagtcccccgaggcatgctcctggggttcatcgtctccgagcggggcatcgaggccaacctggagaaaatcgcggccatcaccaacataggccctatcaaagacttgaaaggagtacagagggccgaggaagccctcggaaacttaaaggcactccttacaagtgatcccatcttggtgcccctcgctgcaggagaagccctcttgatctacgtagccgctaccactcaggtggtcagcgccacgatcgtagtcgagagacgagaagaagggcatgcactgctcatccagaggcctgtctacttcatcagcgaagtgctatccgagaccaagttgcgacactacttcgagtctcatccggtgactgtggtgtcatccttccccctgggggagatcatccagtgccgagaggcctcgggtaggatagcaaagtgggcggtggagatcatgggcgagacaatctcgttcgctcctcggaaggccatcaagtcccaagtcttggcagacttcatggctgaatgggtcgacacccagctaccaacagctccgatccaaccgaaactctggaccatgtacttcgatgggtcgctgatgaaaacaggagcagatgcgggcctgctcttcatctcacccctcgggaagcacctccgctacgtgttgcgcctccatttcccggtgtcaaataacgtggccgagtacgaggctctggttaacgggttgcacatcaccatcgagctaggggtttggcgcctcgacgctcgtggcgactcgcagctcgtcatcgaccaagttcggcgcctggaagacaagttctacggactcgagctcaaccacgtcgctcgacggtacaacgagactgcggatgagctggctaagctagcctcggggcgtacaacggttcccccggatgtcttctccagagacatacatcaaccctccgtcaagaccgacgacacgcccgagcccgaggaagcctcggcccagcccgaggaggcctcggcccagcccgaggcacccttgaccaccgagggtgaggaactgcgtgtcgagggagagcgggatggggtcacgcctaatcgaaactggattgtacgctcctaccagaggtgtcaattctatgcaagacagacgcacctgcccgctcaggccctacagacaatacccatcacttggtcgtttgctgtgtggggtctggacctcgttggtcccttgcagaaggcacccgagggcttctcgcacctgctggtcgccatcgacaaattctccaagtggatcgaggcccgacccctaaccagcatcaggttcgagcaggcggtggcgttcttcaccaacatcatccatcgcttcggggtcccgaactccatcatcactgacaatggcacccagttcactggcaagaagttcctggacttctgcgaggaccaccacatccgggtggactgggccgccgtggctcaccccatgacaaatgggcaggtggagcgtgccaacgacatgattctgcagggacttaagctgaggatctacaacgacctcaacaagttcggcaggcggtggatgaaggaactaccctcggtggtctag

SEQ ID NO: 113893 - DNA, 760 bp, Zea mays
  Clone ID: MRT4577_35353C.1
ctcgaggccggcctggccgggacatcaatcggatagagatcagatcgtctatcatagaatgaggttctacaaggaatcgagcgctgcggagctggacatactggtgtttcggcgcctcctgcccgtccaccaacgcactggacgaccgctcgcctcgtgcagccgtgccgtgattggctcccgtcgccacgacgtcaccaagtggacgatggtgccggccactgtgtgactactctgcgaagacttggatgtagactccctgcttcactcctgctagctcctgattttttaacgatcacctctgctactatgtattcactcctgttgcttgaggttgatgcctgtacactgcgaaaccatcacgtcttacatgcagtgctccgtccgatcgactagctatcgctgaccatctcatgagctgctgttcaagagatgcgtgtgtcaaagcatccatgaatgctctacccataggctaattactcagccgcgccacctaaccgaacaaaagtgcaatgaagcttccacgacgatctaccgactatatcccacatttccttactatattttccgttgcttaattcagtcaagattgtgtcgttcagagtccagagcatgcatgtggtgcgcacgaattactagtattattgcacttctccatatgcatatggaaaagtgcactgtgctagcttgtgtacgtgtgccttttctggcatgcatgtgtggtctatcagtgtctactctagctagtaggacgcatatg

SEQ ID NO: 113894 - DNA, 2019 bp, Zea mays
  Clone ID: MRT4577_35354C.1
atgggatgtcttgcggctctgagccgcttcatctcacgcctcggcgaaagaagcctgcctctgtaccacctcttaaggaaggccgagtgcttcacttggacccctgaggccgaggaagccctcgggaacctgaaggcgctcctcaccaacgcgcccatcttggtgcctcccgctgccggagaagccctcttgatctacgtcgccgcgaccactcaggtggttagcgccgcgattgtggttgagagacgagaagaggggcatgcattgcccgtccagaggccagtctacttcatcagcgaggtattgtccgagaccaagatccgctacccacaaattcagaagctgctgtacgcggtgatcctgacgcggcggaagttgcgacactacttcgagtctcatcctgtaactgtggtatcatccttccccctgggggagatcatccagtgccgagaggcctcgggtagaatcacaaagtgggtggtggaaattatgggcgaagcaatctcgttcgcccctcggaaggccatcaagtcccaggtcttgtcggatttcgtggctgaatgggtcgacacccagctcccaacaattccgatccaaccagaactctggaccatgttcttcgacgagtcgctgatgaagataggagcaggcgcaggcctgctcttcatctcgcccctcggaaagcatctacgctacgtgctacgcctccacttcccggtgtccaacaatgtggctgagtacgaggctctggtcaacgggttgcgcatcgccatcgagctagggatccgacgcctcgacgctcgcggtgactcgcaactcgtcatcgaccaaacttggcccgaggcaccctcggttcagcccgaggtaccctcggcccctgagggtgaggcactgcgcgtcgaggaggagcgaagcagggtcacgcctaatcgaaactggcagaccccgtacctgcgatatctccaccgaggagagctacccctcaaccgagccgaagctcggcggttggcgcgatgcgccaagtcgttcgtcttgctgggggatgggaaggagctctaccaccgcagcctctcaggcatcctccaacgatgcatccccatcgccgaaggtcaggagctcctacgagagatacactcgggggcttgcggccatcacgcagcacctcgagcccttgttggaaacgccttccgacaaggtttctactggccgacggcggtggccgacgccactagaattgtccgcacctgcgaagggtgtcagttctacgcgaggcagacccacctgcccgctcaggctctgcagacgatacccatcacctggccttctgctgtgtggggtctggacctcgtcggccccttgcagaaggcacccgggggctacacgcacctgttggtcgccatcgacaaattctccaagtggatcgaggtccgacccctaaacagcattaggtccgaacaggcggtggcgttcttcaccaacatcatccatcgttttagggtcccgaactccatcatcaccgacaacggcacccagttcaccggcagaaagttcctggacttctgcgaagatcaccacatccgggtggactgggccgccgtggctcaccccatgacgaatgggcaagtagagcgtgccaacgacatgattctacaaggactcaagcctcggatctacaacgacctcaacaagttcggcaagcgatggatgaaggaactcccctcggtggtccggagcctgaggacaacaccgagccgagccacgggtttcacgccgttctttctagtctatggggccgaggccatcttgcccacagacttagaatacggctccccgaggacgagggcctacgccgaccaaagcaaccaagctagtcgagaagactcgctggaccagctggaggaggctcgggacatggccttactacactcggtgcggtatcatcagtccctgcgacgctaccacgcccgaggggtccggtcccgagacctccaggtgggcgacctggtgcttcggctatga

SEQ ID NO: 113895 - DNA, 4326 bp, Zea mays
  Clone ID: MRT4577_35355C.1
atgggcagtctccagcaacctttccggcccgggacggtgctccgtttcgggagtcttgagttcatgtccctcgacggcagctacgacatgatactccttccaccgccgtgcgacagcgacaatggcggccgacagcccgcccgccggtggcggaatcgacgacgtcttccccgcgtggtggaagaacaacgttcgagctcaccctgtcctctcccccgtcgacggaggaggaggcggggcaaccaaggccaagcaggaggcagcgcctcgtcggctgtcgagcgagtcgacagcgccagcgccccaacggggggcgcgtcgggcatcgacctcgcgtttgagacgaagacgagcgccgactccccgcgacacgccaatcccaagcaaacgggcgacgccagcacgctcgcgaaaggcttactggacgtcaccctcgtacttgagacgacggtgcagtcagtccccgacgtgacttcatcaccgcccgtcgaccaagaggtaccgaccgattcccatctcacgcctttcggattcagcctcgacccgccaagcggcttcgctttggcggacgctctcgtagaggcgagtccaaaccctttggggtttcgtgtgcagtcaccctgggaccggctgacggacgtctcgacctacgggccctcagggtccgaggaagatggcgagcccgacttctgttgggatttctctagacttggcgaccccagtgccatgcgggacttcatgaccgcatgcgactactgcctttccgactgttccgacggtagccgcagcctcggcgacgaggactgcggcccaagccgtgaatgtttccacctcgatctagggggtccctccgaaggcaaccatctcggcatgccggaggacggtgatctccctaggccggtgcctcgcgttgacatcccacgggagctagttgtggtccccgttcagacgggggccatgacccacagctcgagcaaatccgcggggtgcaggccaggctcgacgagggagcaagagcgcttgagccaatccgccgggacgtcgggcaggcatgggcgggccaacctccggccggagaaatgcgtcatctaccctagggcttccagcaccgcatcgccgacgatgaagcctcggtctgcaccgggcgcacgcgcaacacagcgcctgcggccccgggacgcctcggcaacgagcaccatcaccgcgaccgtcgggcccacctcgacgagagggtgcgccgaggctaccaccccaggcgtggaggacactacgacagcggggaggatcggagtccctcgcccgaaccacccggtccgcaggccttcagccgggccatacgacgggcgccgttcccgacccccgactactatcacaaagtactcgggggagacgagacccaagctgtggctcgcggactaccggctggcctgccaactgggtggaacgaacgatgacaacctcatcatccgcaacctccccctgttcctctccgacaccgctcgcgcctggttggagcacctgcctccggggcagatctccaactgggacgacctggtccaagccttcgccggcaatttccagggcacgtacgtgcgccctggaaactactgggacctccggagctgccggcaacagccgggagagtctcttcaggactacatccggcgattctcaaagcagcgcaccgagctgcccaacatcactgactcggatgtcatcggcgcgttcctcgctggcaccacttgccgcgacctggtgagcaagctgggtcgcaagacccccaccagggcgagcgagctgatggacatcgccaccaagttcgcctctggccaggaggcggtcgaggctatcttccggaaggacaagcagccccagggccgcccaccggaagatgcccccgaggcgtcaactcagcgcggcgccaagaagaagggcaagaagaagtcgcaagcgaaacgcgacgccgccgacgcggaccttgtcgccgccgccgagtacaagaaccctcggaaaccccccggaggtgccaacctcttcgacaacatgctcaaggagccgtgcccctatcaccaggggcccgtcaagcacacccttgaggagtgtgtcatgctttggcgccacttccacagggccgggtcacccgcagagggtggcagggcccgcgacgacgacaagaaggaagatcaccaggctggagagttccccgaggtccgcgactgcttcatgatctacggtgggcaagcggcgaacgcctcggctcggcaccgcaagcaagagcgtcgggaggtctgttcggtgaaggtggcggcgccagtctacctagactggtccgacaagcccatcaccttcgaccaagccgaccaccccgaccacgtgccgagcccggggaaatacccgctcgttgtcgaccccgtcatcggcgacgtcaggctcaccaaggtcctcatggacggaggcagcagcctcaacatcatctacgccgagaccctcgggctcctacgtgtcgatctgtcctcggtccgggcaggcgctgcgcctttccatgggatcgtccccgggaagcgcgcccagcccctcggacaactcgaccttcccgtctgcttcggaacaccctccaacttccgaagggagaccctgacgtttgaggtggtcgggttccgaggaacctaccacgcggtactgggaaggccatgctacgcgaagttcatggtcgttcccaactacacctacctcaagctcaagatgccgggccccaacggggtcatcaccgtcggccccatgtacaaacacgcgatcgaatgcgacgtggagtgcgtggagtacgccgaggccctcgccgagtccgaggccctcatcgccgacctggagagcctctataaggaggtgccagacgtgaaacgtcatgctggcaacttcgagccagcggagacggaagcagtgctcgtcgactttctccgcgcgaacgccgacgtcttagcgtggagtccctcggacatgcccggcataccgagggatgtcgccgagcactcgctggacatccgagccggaggccgacccgtcaagcaggctctgcgccgattcgacgaagaaaagcgcagagctataggcgaggagatccacaagctaatggcggcagggttcatcaaagaggtattccatcccgaatggcttgccaatcctgtgcttgtgagaaagaaaggagggaaatggcggatgtgtgtagactacactggtctaaacaaagcatgtctgaaggttccctaccctctgcctcgcatcgatcaaatcatggattccacagctgggtgcgaaaccctgtctttcctcgatgcctacttcgggtatcaccaaatcaggatgaaagagtccgaccagctcgcgacttctttcatcacacccttcggcatgtactgctatgtcaccatgtcgttcggcttgaggaatgcgggcgcgacgtaccagcggtacgtgaaccatgtgttcggcgaacacattggccggacgatcgaggcctacgacgatgacatcgtagtcaagacgaggaaagcctctgacctcctttccgaccttgaagtgacattccgatgtctcaaggcgaaaggcgtgaagctcaatcccgaaaaagtgtgtcttcggggtaccccgaggcatgctcttggggttcatcgtctccgagcggggcatcgaagccaacccggagaagatcgcagccgtcaccagcatggggccatcaaggacttgaaaggcgtacagagagtcatgggatgtctcgcggccctgagccgtttcatcccgcacctcggcgaaagaggcttgcctctgtaccatctcggggcgaataacggttcccccggaagcctttttccgagacctgcatccaccctccgtcaagatcgacgacacgcccgagcccgaggcaccctcggcctagcccaaggtacccttggctcggtccaaggtacccacggttcggcccgaggtaccctcggcccccgaggaccccgtacctgcaatttctccaccgaggagagctacccctcgaccgagccaaagcttggcggttggcgcggcgcgtcaagtcgttcgtcttgttgggagatgggaaggagctccaccaccgcagcccctcaggcttccttcagcgatgcatttccatcgtcaaaggccaggagcccctacgagaggtacacttgggggcttgcgaccatcgcgcagcaccccgagcccttgttggagacacctgggggctacacgcacccctgggaagggccgcttgtcatcgccaaaattctgaagcctggaacaaacgaactggccgacagttaa

SEQ ID NO: 113896 - DNA, 384 bp, Zea mays
  Clone ID: MRT4577_35356C.1
cccacgcgtccgagagtacaaggtctatggtctcccgactttgattttcttcaagaatggacgagaggtagcagatagccggcgagaaggggcaatgacaaaagacaagttcaagcaatacctggaacctctcttgactacgacagtcacttaagaccattgcctgcagcttcagcaccgaccaccgaggatgccaatgggattgttgaaggaatttccttttatgagtttagcttgtaattaactatgatgcggggtcatggtcgtcatttgcgtatatttggtacattatacatgaagagctaattttgatacaagcaagtttgtttttcgaaaaaaaaaaaaaaaaaaaaaaaaaaaaaaaaaaaaaaataaaaataaata

SEQ ID NO: 113897 - DNA, 2019 bp, Zea mays
  Clone ID: MRT4577_35357C.1
atgccgttcggcttgaggaatgcgggcacgacgtaccagcggtgcatgaaccatgtgttcggcgaacacattggccgcacggtcgaggcctacgtcgatgacattgtagtcaagacgaggaaagcttccgacctcctttctgaccttgaagtgacattccgatgtctcaaggcgaaaggcgtcaagctcaatcccgagaagtgtgtcttcggggtgccccgaggcatgctcttggggttcatcgtctccgagcggggcattgaagccaacccggagaagatcgcagccatcaccagcatggggcccttgaaaggcgtacagagggtcatgggatgtctcgcggctctgagccgcttcatctcacgcctcggcgaaagaggtctacctctgtaccgcctcttgaggaaggccgagtgcttcacttggacccctgaggccgaggaatccctcgggaacctgaaggcgctcctcacaaaggcgcctatcttggtgcccccagctgccggagaagccctcttggtctacgtcgccgcgaccactcaggtggttagcgccgcgattgtggtcgagaggcaagaagaggggcatgcgttgcccgttcagaggccagtttacttcgtcagcgaggtactgtccgagaccaaaatccgctacccacaagttcagaagctgctgtacgcggtgatcctgacgcggcggaagttgcgacactacttcgagtctcatccggtcttggcggacttcgtggctgaatgggtcgacacccagctaccaacagttccgatccagccgaaactctggaccatgttcttcgatgggtcgctgatgaagacaggagccggcacaggcctactcttcatctcgcccctcggaaagcatctacgctatgtgctacgcctccacttcccggcgtccaacaatgtggctgagtacgaggctctggtcaacgggttgcggatcgccatcgagctaggggtccgacgcctcgacgctcgcggtgactcgcagctcgtcatcgaccaagtcatgaagaactcccactgctgtgacccgaagatggaggcctactgcgatgaggttcggcgcctggaagacaagttctacgggctcgagctcaaccacatcgcccggcgctacaacgagactgcggacgagctggctaaaatagcctcggggcgaacaacggttccctcggacgtcttctcccgagacctgcatcaaccctccgtcaagatcgacgacacgtccgagcccgagaaggcacccgggggctacacgcacctgctggtcgccatcgacaaattctccaagtggatcgaggtccgacccctgaacagcatcaggtccgagcaggcggtggcgttcttcaccaacatcatccatcgcttcagggtcccgaactccatcatcaccgacaacgacacccagttcaccggcagaaagttcctggacttctgcgaggatcaccacatccgggtggactgggccgccgtggctcatcccatgatgaatgggcaggtagagcgtgccaacggcatgatctacaacgacctcaacaagttcggcaagcggtggatgaaggaactcccctcggtggtctggagtctgaggacaacgccgagccgagccacgggcttcacgccgttctttctagtctatggggccgaagccatcttgcccacagacttagaatacggttccccgaggacgagggcctacaccgaccaaagcaaccaagttagccgagaagactcgctggaccagctggaggaggctcgggacaaggccttgctacactcggcgcggtaccaacagtccctgcgacgctaccacgcccgaggggtccggtcccgagacctccagacgcccgagggcggcacaagctcacgccccccctgggaggggccattcgtcatcgccaaggttctgaagcccggaacgtacaagttggccaacagtcaaggcgaggtctacgacaacgcttggaacatccaacagctacgtcgcttctacccttaa

SEQ ID NO: 113898 - DNA, 352 bp, Zea mays
  Clone ID: MRT4577_35358C.1
caacatctaacattctcccagagcgcgataaacattattgtttgtggatccactctcaccaaagactctaattgccacaattaatgtatgagtcaaatgcgcgaaagcgcaattgatacagcggcgtttttgcatacttctctcttcagataaaaaatgtaaccaaccctttgaaacatttcgtcccggatgttcacttcatcgtgatactgaaagggtgaagtacttttcttgagacacaacgatgcgctcaaatataccatcattcgtttataaatagagtttatataatttcttttttgcttgagccccttcctgatgtttttttttcttaatgacaacctcccaaaat

SEQ ID NO: 113899 - DNA, 297 bp, Zea mays
  Clone ID: MRT4577_35359C.1
cggcaaaagccccaaaaaattgggttgggggggaaaaaaaagggggcctttttttaaaaaaaagggggggtttccgggggttccccccccaaagaaatttcaaattggcccccgttttggccaacccaaactgggtttccccaggccctgggggggggggcaaaccctaacatttattcctggggaggaacctggccaattgggcacagggggtctccagcccatacccggggataaagctggaaaaacggggccgggggtaaaaaaaccctcggatttcttaaagggggggctttt

SEQ ID NO: 113900 - DNA, 370 bp, Zea mays
  Clone ID: MRT4577_3535C.1
cagcggccgcatttcagcggccggaaattaaaggcttatcttcgctaggcagagacgaacctgttagcgaccactgtgtgtgatgatgacggcgcttcgaggaagaagaagaaatacacatgttagggaggaagagagcaggaatccaaatgttacttcgtttcctcctacttggcttttaataagtgggtcaaaattatatctccacgacaccatatttgactgggagatcatgcctagatctcatcgatctcgtcgtagtagtcctcctctggtgctacttgctctccaccttcaacgagctcctgcttagaatcttcgacctgcggtcctttgggttcctcgatcacttgttcgtctactagcaacc

SEQ ID NO: 113901 - DNA, 374 bp, Zea mays
  Clone ID: MRT4577_35360C.1
gcgcattctgttctagatcgcgagcggccgccctgtcaaaaaagtttttttttttttttttttggggttgagggtttaagaaaaaagggccactccctttactttaaaagaagaaagattagatccgcactctttctaaacaagaaaaaaaaaccctgaatttggtcttaccaagccctgaaattctcccaagaaagaaaaaacacttccaggcccaacaaaaggccacctcctggactcaacaaaagaaaggggattaaccaatgctagaacgccaaacacttgctgccaagaaacagtccctgttgaaaatccccccggaagattgtgaacatccaaaaagacaaacatgctacactaagctggggtcggca

SEQ ID NO: 113902 - DNA, 398 bp, Zea mays
  Clone ID: MRT4577_35361C.1
ccggccgggtaaaagattttactgcagatggctcacgattcttcttcagaggccagcgtatctgggaagcagttatgaacgaacttgtagttaaggggctcaggaatgctaaacaggtcattccttgcgagtagaatcaattgccttttcttaagggaaaaattgtatgtattacaatattactagtcttatttactttggcattcactctaagggtatgtttggttgcaatggcgggacgagagtacgggataggatgagacgatcctttagataaggttgtttggttcacggtcggcggctgcgacgtgaccctcgcagttttagcccaccctgcccccacagtccaccaagacgagagcgactgtcagctacatcctcctcttctcccctgagca

SEQ ID NO: 113903 - DNA, 141 bp, Zea mays
  Clone ID: MRT4577_35362C.1
gacccacgcgtgccgttcacattcaaatcccaactggcttcgatcccttcacttaggccaatgcttgggactcttgtgcggcagcaaggtcaaaggactacgtacacgttcccattcaacaacgtaatggtcgcaagaacc

SEQ ID NO: 113904 - DNA, 400 bp, Zea mays
  Clone ID: MRT4577_35363C.1
atttcagaatctctctaggggcacaaggactcaaggggttcagcctccattttcaaggaaaggcagtatggtctcagttctgagtggcaggaccaccctgagcttggagtgttgagaagcaagtggtggcaccttctggtgtcattaagacttaatgagcccatcacaggtcagggaatggaactaggagtcgggtggaggtaatcgagtggggtgaataatgcctgctgttcaacagcagctgcccagcgtcccaggggactcccatgggccactttaacctaaaggggaactgcctttatgggcctgtcgtgtctcatcacagcacatttctaagttggaagagcctcaacttccacggctaaatctgaacttactgtttgctcagtgcttggttcca

SEQ ID NO: 113905 - DNA, 272 bp, Zea mays
  Clone ID: MRT4577_35364C.1
ggattttcggatgatctcaccaataatgtgcatggaattggacactccaaagagaacatcaccaccaacaacgtgtcacgtcccttcacaagtgggttctcaattggatcatgctaggattcagattctattgagttttccaacctagcaaacaaaacaggaatacacaataatgatgacatcatagacaatattagttagtcttatgaactacagtttggtgtggcaaaggaaatggcaggcctactacagatgcaacaagaccaggttcc

SEQ ID NO: 113906 - DNA, 133 bp, Zea mays
  Clone ID: MRT4577_35365C.1
ttgcccaccgcttcgctttctctctgactcgctcccactcccatactaccgtctcgtccgcgccgtcgcgttgatggccgccgcaccggatgatcgcctctacgtcctcaacgccgctgtttaccatatcggc

SEQ ID NO: 113907 - DNA, 311 bp, Zea mays
  Clone ID: MRT4577_35366C.1
ccccagcaatggcgggggtcaaccgataaaacactttctgtaagtggcctaatggccgtatgatttttaaagaagacgtatcagaattaaccgtggttgggggtcccaggacaaattctagctccaaccaaacccatttataagttaaaaaaaccctggggggctataggactaggaggcagtagcagtggttttgatctcgtttttttgctcgcattatgtcgagcccgtccttggcgggcggtgagaccggggtactccaatccgtgaagttttttcttcacttgggccgttttctttgggaagcctag

SEQ ID NO: 113908 - DNA, 316 bp, Zea mays
  unsure (1)..(316): unsure at all n locations
  Clone ID: MRT4577_35367C.1
accgattcgcngttcgtcccacgcttcctaagacggctcgtcagtaacgctagggtttttgtttactccgcctccgtattacctcctggggtgcgctactttaccgatctctccgtgctcttagccctgcaaatatctgaaattgagtgaaactagcttttcattgatatggctcttgtactgcatgctggcagtttaaacaaaaatgcttctcaaacactacttgtcgcgcattacagccgcattaatgtttgacgggtcaaagacctttcaaatgggggctttcaaacaaacattgacatctctcaagatgaac

SEQ ID NO: 113909 - DNA, 339 bp, Zea mays
  Clone ID: MRT4577_35368C.1
aaacaaagcaagaaatagaataatgttcttgactcaaaggccaaatgtacaacagggggacattcatgagataaaagggtggaagtgttgaatatgctaatgaaagccgctagggaaagactgcactgatttgatcacgatccttctattatcatttctgcactgtgattcattatcttgctgcttgtggtctcatactgcatcaccattatcattatcatgcatgctgatgtggcctataggcatgttatacaaacagcgatcactatgatgccttagcagcttttgctcagtcaatctcgtgattgttgctcgtgcatgtggttataaatcttgatt

SEQ ID NO: 113910 - DNA, 214 bp, Zea mays
  Clone ID: MRT4577_35369C.1
cttccctctttcacgaatgacctgatgcagcttgctatgggaaatctgactggtcgtgagcatctgttgtctatggaggcttagaactgaggctgagactatcgggccatgaaatcctggagatgattgctgcggtggtctgcactctggaatatgcgatacgcgctacgtcaccctacgaccagtttatatacagtcgcgacagcagaacttg

SEQ ID NO: 113911 - DNA, 650 bp, Zea mays
  Clone ID: MRT4577_3536C.1
gggtcaggggctgaaagaaccatccactgcactgaagcagcatacacacacaaacaccagttagtcctgccagcgatcagcagtacagtgctcttgagatggcaggcatggccaggaacgccgtccttgtcctcgttcttgccggcgtcctgctacagctgtgctccgtcatgcctcccgtggccggggccgatcgcagggcgctgttggtggacacgcagcttgtgcatggcggcgggggtggaaacgtgaaacgagaggcgagcggcacctgcgtcaacggcggcgggaacgctggcccaggggaggccacagccatcgaaggcgcagcgtattgccatgacagacagcagtacgtgagcatgaccacagtcggcggcttgaccgagactgagagcgtacatgaagcgccgtaaccccccctctaatttggtctcacgtctcttgttgttttccaattacactttcttttgtttccttgatttgtggatcgatttccacttacactttcatctcatatacgcgcatgcactgtgcacagtggtgtttgtatgtgttcagctgtgcatcgatatgcctgtatttcagtttgtatgcacaccatggtcgatcgtctcgtctctgagagcgttaatttattaagtttggtg

SEQ ID NO: 113912 - DNA, 101 bp, Zea mays
  Clone ID: MRT4577_35370C.1
aatctgatctcgatcgcgagccgacgctttacagttagagacttacgtcctcctgtgggccaccgcgtacggcttatatggtgtcaccttaatttaattca

SEQ ID NO: 113913 - DNA, 154 bp, Zea mays
  unsure (1)..(154): unsure at all n locations
  Clone ID: MRT4577_35371C.1
cctcgagacggccgggctccgtttctacagagcacgcnctcgcacgaacacgatttaccatgaacagccaccgcaaagcgcgcgncaaccacccggactgccgcggagaccgccgtcctccccgcccacaccaccngacacccacaaggagcac

SEQ ID NO: 113914 - DNA, 930 bp, Zea mays
  unsure (1)..(930): unsure at all n locations
  Clone ID: MRT4577_35372C.1
gaaccaagacggtaggtaagtgccagcgtaaagtctatctaaaggcggaccaccgctgtccacctgggcggcgatggcgaccgccgcgagggagaggcgcctgccgccggcgctgcccctggcgactctcatcggccgggagctccgcgcggggggctccgagcgcccggccctgcgctacggccacgccggctttgccaagcgtggcgaggactacttcctcgtcaagcccgactgcctccgcgtccccggggaccccgcatccgcgttctccgtctttgccgtgttcgacggccacaacggcgtgtcggcggcggtctacagcaaggagcatctgctcgagcacgtcatgagcgcgctgtcgccggacatcggccgcgaagactggctgcaggcgctgccgcgcgcgctcgtcgccggcttcgtcaaggccgacatcgatttccagcgcaagggggaggtgtccggaaccacggcgacactggtggtcatcgatgggttcacggtcacggtggcgtcggtgggtgactcgcgctgcatcctggacacgcagggcggcgagttgcagctgctaaccgtggaccaccgcctggaggagaatgcagaggagcgggagcgcgtcacggccagcggtggggaagtaggccggctcaatctctttggcggccaggaggtgcgctcttactagagaaggatgttgtcaagttggactccattgctcagaaagtcaatacccattgtctaagctcaggttgttggaaaatcattaggaattattgcatngaaataatctaagagcggacttcattagccttcctgaggatagtggtcactggaccaatcttccatggttatgcaaggnaacataacatttactgactatgagtggttcaaatttgttcacttgcttttgaagatagcttctggttc

SEQ ID NO: 113915 - DNA, 2667 bp, Zea mays
  Clone ID: MRT4577_35373C.1
atgggtagtctccagcaacctcttcaacccgagacgatgcttcgtttcgggagcctggagttcatgtccctcgacggcagctacaacatgatactccttcctccgctgtgcgacaacgacaatggcggctgtcagcccgcccgccggtggcggaatcgacgacgtcttcccctcgtggcagaagagcaacatccgggtctgtcctgtcaccttccccgccgacggaggaggaggcggggcaggcatggccaagcgggaggcgacacctcgtcagctgtcgagcgagtcgacgacgccggcgccccagcgggggacacatcgggcatcgacctcacgtctgagacgaagacgagcgccgtttcccagcaacgcgccaactccaagcggacggacgacgccaacacgctctcgaaggacatgctgggtgttagcctcgtacctgagacaacggtgcagtccattcctgatgcgacttcgtcaccacccgtcgatcaggaggaccggctgacggccgtctcgacctacgggcctctgggttccgaggaagatgacgagcccgactctggttgggatttctccgggctcgataaccccagtgccatgcgggacttcatgaccgcatgtgactactgcctctctgattgctccgatagcagccacagcctcggcgacgaggactgtggcccaagtcgcgaatgcttccacgtcgatctagggggtctcgacgaaggcaaccatcttggtataccggaggacggtgatccccctaggcctgcgcctcgcgttgacatccttcaggagctagatgtggtcccaatccctgcgggggggggggggggtcaggacgcacagctcgagcaaatccgcgaggtacaggccaggctcgatgaggaagcaggacaacttgtgcagcttcggcaaaatatcgggcaggagtgggcaggccgagcaccggccggagaagcgcgtcacctggcccaggacgtccagcaccgcatcgccgacgatgccagggcaaggctgcctccggcttccagtggggtcggccagaacctggctgtggcagcgatactactccgagcgatgccggaaccatccaccaccgaggggcgacgggccgagagctctacctcccgaacgcaggggtaccccccagagcaacgcgccgcgacttcccgattcatgcgggaagcctcggtccacaccgggcacacgtggaacaccgcgcctgcggccccgggtcgtctcggcaacgagtaccaccgccgtgaccgtcgagcccacctcgacgagaagggcacatacgtgcgccctaggaactcctgggatctccgaagctgtcgccagcagccgggagaatcccttcgggactacatccgacgattttcgaagcagcgcaccgagctgcccaacatcaccgactcggatgtcatcggcgcgttcctcgccggcaccacttgccacgacctggtgagcaagctgggtcgcaagaccctcaccagggcgagcgagctgatggacatcgccaccaagttcgcctctggtcaggaggcggtcgaggctatcttccggaaggacaagcagcctcaggggcaccagccggaagacgtccctgaggcgtccgctcagcgcggcgcgaggaagaagggcaagaagaagtcgcaagcgaaatgcgacgccgccgacgcggatcttgtcgccgccaccgagcacaggaaccctgggaagcctcccggaggcaccaacctgttcgacaagatgctcaaggagtcatgcccctatcatcagggtcccgtcaagcacacccttggggagtgcgtcatgcttcagcgctacttccacagggccggaccaccggcggaaggtggccgagcccacaacgacgacaagaaggagggtcacaaggcagaggagttccctgaggtccacgactgcttcatgatctatggtgggcatgtggcgaacgcctcggctcggcaccgcaagcaagagcgccgggaggtctgctcggtaaaggtggcgatgccagtctacctagactggtccgacaagcccatcaccttcgaccagggcgaccaccccgaccgcgtgccgagcccagggaagtacccgctcgttgtcgatcccgtcatcggcaacatcaggcttaccaaggtcctcatggacggaggcagcagcctcaacatcatctacgtcgatctgtcctcgatccgggccggcgcgacaccttttcacgggatcatccccgggaaacgcgtccaacctcttgggcaactcgatctgcccgaaaccctcacgttcgaggtggtcgggttccgaggaacctaccacgcagtgctggggaggccatgctacgccaagttcatggccgtccccaactacacctacctcaagctcaagatgtcgggccccaacagggtcatcaccatcggctccacataccgacacacgtacgaatgcgacgtggagtgcgtggagtacgccgaggccctcgccgaatccgaggccctcatcgccgacctagagagcctctccaaggaggcgccggatgcgaagcgccacgccggcaacttcgtgccagccgagactgtcaaatccgtccctctcgaccccaacaacgacgcctccaagcagatacggatcggctccgagctcgaccccaaatag

SEQ ID NO: 113916 - DNA, 2859 bp, Zea mays
  Clone ID: MRT4577_35374C.1
atggcggccgacaacccgcccgccggcggcggaatcgacgacatcttccccgcgtggtggaagaacaacattcgagctcgccccatcctctcccccgccagcggaggaggaggcggggcaaccaaggccaagcgggaggccgcgcttcgtcggctgtcgagcgaatcgacgtccccagcgccccaacggggggcgcgtcgggcgtcgacctcgcgtttgagacgaaggcgagcgctgtccccccgcgacacgccaatcccgagcaagtggatgacgccagcgcgctcgcggagagcttgcaggacgtcgccctcgtacctgagacgacagtgcaatcagtccccgaccctcaacccgcctagcgaccttgctttggcgggcgctctcgttgaggcgagtgcaacccctctggggtttcgcacgcggtcgccttgggaccggctgacggacgtctcaacctacgggccctctgggtccgaggaagatgacgatcccagcatctgttgggatttctctggatttggcaaccccagtgccatgcgggactttatgaccgcatgtgactactgcctctccgactgttccgacggtagccgcagcctcgacgacgaggactgcggcccaagccgcgaatgtttccacgtcgagctaggggatccctccgaaggcaaccatctcggcatgccggaggacggtgatctccctaggccggtatgggcgggccaacccccggccggagaagtacgtcacctgccccacggtttccagcaccgcgtcgccaacgacgtcagggtcaggccgccacccgcatccagtggggtcggtcagaacctggcagccgcagcgatgctcctccgcgcgatgccggagccatcaaccaccgagggtcggcgaatccagggagagctcaagaatctcctggaaggcgctgcggtccgacgggccgagagctctgcctcccgaaggcagggatacccctcggaacctcatgccgcgacttcccggttcatgcgggaagcctcggtctacaccgggcgcacgcgcaacaccgcgcctgcggccccgggccacctcggcaacgagcaccatcgtcgcgactgtcgggcccacctcgacgaaagggtgcgccgaggctaccaccccaggcgtgggggacgctacgacagcggggaggatcggagtccctcgcccgaaccacccggtccgcaggccttcagtcgggccatccgacgggcgccgttcccgacccggttccgacccccgactactatcacaaagtactcaggggaaacgagaccggaactgtggctcgcggactaccgtctggcctgccaactgggtggaacggacgacgacaacctcatcatccgcaacctccccctgttcctctccgacactgctcgcgcctggttggagcacctgcctccggggcagatctccaactgggatgacttggtccaagccttcgccggcaatttccagggcacgtacgtgcgccccgggaattcctgggacctccgaagctgccggcaacagccgggagagtctctccgggactacatccggcgattctcgaagcagcgcaccgagctgcccaacatcaccgactcggatgtcatcggcgcgttccttgccggcaccacctgccgcgacctggtgagtaagttgggtcgcaagacccccaccagggcgagcgagctgatggacatcgccaccaagttcgcctctggccaggaggcggtcgaggctatcttccgaaaggataagcagccccagggccgcccatcggaagatgctcccgaggcgtcaactccacgcggcgccaagaaggaaggcaggaagaagtcgcaagcgaaacgcaacgccgccgacacggaccttgtcgccgctgccgagtacaagaaccctcggaagccccccggagggcccgtcaagcacaccctcgaggagtgcgtcatgcttcggcgccacttccatagggccgggccacccgcagagggtggcagggcccacgacgacgacaagaaggaagatcaccaagcaggagagttccccaaggtccgtgactgcttcatgatctacggtgggcatgtggcgaatgcctcggctcggcatcgcaagcaagagcgccgggaggtctgttcggtgaaggtggcggcgccagtctacctagactggtccgacgagcccatcaccttcgaccaagctgaccaccccgaccacgtgccgagcccggggaaatacccgctcgtcgtcgaccccatcgtcggcgacgtcaggctcaccaaggtcctgatggacgggggcagctgcctcaacatcatctacgccgagaccctcaggctcctgtgcgtcgatctgtcctccgtccgagcaggcgctgcgcccttccacgggatcattcccgggaagcgcgtccagcccctcggacgactcgaccttcccgtctgcttcggaacgccctctaacttccgaagggagactttgacgttcgaggtggttgggttccgaggaacctaccacgcggtactggggaggccatgctacgcgaagttcatggccgtccccaactacacccacctgaagctcaagatgccgggccccaacggggtcatcaccgtcggccccacgtacaaacacgcgttcgaatgcgacgtggagtgcgtggagtacgccgaggccctcgccgagtccgaggccctcatcgccgacctggagagcctctccaaagaggtgccagacgtgaaacgtcatgccggcaacttcgagccagcggagacggttaaggccgtccctctcgaccccagtggcgacacctccaagcagatccggatcggttctaggctcgaccccaaatag

SEQ ID NO: 113917 - DNA, 2553 bp, Zea mays
  Clone ID: MRT4577_35375C.1
atggcggccgacaacccgcccgccggcggcggaatcgacgacatcttccccgcgtggtggaagaacaacattcaagctcgccccgtcctctcccccgccaacggaggaggaggcggggcaaccaaggccaagcgggaggccgcgcttcgtcggctgtcgagcgaatcgacgtccccagcgccccaacggggggcgcgtcgggcgtcgacctcgcgtttgagacgaaggcgagcaccgtccccccgcgacacaccaagcccgagcaagtggacgacgccagcgcgctcgtggagggcttgcagggtgtcgccctcgtacctaagacgacgtgccatgcgggactttatgaccgcatgtgactactgcctctccgactgttccgatggtagccgcagccttgacgacgaggactgcggcccaagccgcgaatgtttccacgtcgagctaggggatccctccgaaggcaaccatctcggcatgctggaggacggtgatctccctaggacggtgcctcgcgctgacatcccgcgggagctagctgtggtccccgttccggcggggggtcacgacccacagctcgagcaagtccgcggggcacaggccaggctcgacgagggagcaggagcgcttgagtcgatccaccgggacgtcgggcagggtcaggccgccacccgcatccagcggggtcggcagaacctggcagccgcagcgatgctcctccgcgcgatgccggagccatcaaccaccgagggtcggcgaatccagggagagctcaagaatctcctggaaggcgctgcggcccaacgggccgagagctctgcctcccgaaggcagggatacccctcggaacctcatgccgcgacttcccgattcatgcgggaagcctcggtctacaccgggcgcacgcgcaacaccacgcctgcggccccgggccacctcggcaacgagcaccatcgtcgcgaccgtcgggcccacctcgacgaaagggtgcgccgaggctaccaccccaggcgtgggggacgctacgacagcggggaggatcggagtccctcgcccgaaccacccggtccgcaggccttcagtcgggccatccgacgggcgccgttcccggcccggttccgacccccgactactatcacaaagtactcgggggaaacgagaccggaactgtggctcgcagactaccgcctggcttgccaactgggtggaacggacgacgacaacctcatcatccgcaacctccccctgttcctctccgacactgctcgcgcctggttggagcacctgcctccggggcagatctccaactgggatgatttggtccaagccttcgccggcaatttccagggcacgtaccgcaccgagctgcccaacatcaccgactcggatgtcatcggcgcgttccttgccggcaccacctgccgcgacctggtgagtaagttgggtcgcaagacccccaccagggcgagcgagctgatggacatcgccaccaagttcgcctctggccaggaggcggtcgaggctatcttccgaaaggacaagcagccccaaggccgcccatcggaagaggctcccgaggcgtctactccgcgcggcgccaagaagaaaggcaagaagaagtcgcaagcgaaacgcgacgccgccgacgcggaccttgtcgccgccgccgagtacaagaaccctcggaagccccccggaggtgctaaccttttcgacaagatgctcaaggagccgtgcccctaccatcaggggcccatcaagcacacccttgaggagtgcgtcatgcttcggcgtcacttccgcagggccgggccacccgcagagggtggcagggcccgcgacgacgacaaaaaggaagatcaccaagcaggagagttccccgaggtccgcgactgcttcatgatctacggtgggcatgcggcgaatgactcggctcggcatcgcaagcaagagcgccgggaggtctgctcggtgaaggtggcggcgccagtcttcctagactggtccgacaagcccatcaccttcgaccaagctgaccaccccaaccacgtgccgagcccggggaaatacccgctcgtcgtcgaccccatcgtcggcgacgtcaggctcaccaagcccctcggacgactcgaccttcccgtctgcttcggaacgccctccaacttccgaagggagaccttgacattcgaggtggtcgggtttcgaggaacctaccacgcggtactggggaggccatgctacgcgaagttcatggccgtccccaactacacctacctgaagctcaagatgccgggccccaacggggtcatcaccgtcggccccgcgtacaaacacgcgttcgaatgcgacgtggagtgtgtggagtacgccgaggccctcgccgagtccgaggccctcattgccgacctggagaacctctccaaagaggtgccagacgtgaagcgacataccggcaacttcgagccagcggagacggttaaggccgtccctctcgaccccagtggcgacacctccaagcagatccggatcggttccgggctcgaccccaaatag

SEQ ID NO: 113918 - DNA, 1562 bp, Zea mays
  Clone ID: MRT4577_35376C.1
ccacgcgtccgtgatactgttgctattgctccttttgtaaaggatgtattggacagtatagaatttgcaagggggagtgcaaattcaacatggggctctgttagggctgcaatgggccaccctgaaccattcccagtgaaatatgttgcaataggaaatgaagattgtgggaaaaaattttaccgcggtaactacctcaagttctacaatgctataagacaggcctatccagacattcaaatgatttcaaactgcgatggttcatctacaccacttgatcatcctgctgatttatacgacttccatgtctataatgattctaagactttgttcaacatgaagagcacatttgacagaacatctcgtagtggacccaaggcttttgtaagtgagtacgctgtttggagaggtgatgcaggtagaggaagtcttcttgcttcattggcagaagctgctttccttactggactggagaagaatagtgacattgtttccatggcaagttacgcgccactattcgtaaacgacaatgaccagacgtggaacccagacgcaatcgtcttcaactcctggcagcattacggcactcccagttactggatgcagacgcttttccgcgagtctagtggtgctatgttccatccaacgacaatcagctccagctactcaggttcacttgcagcgtctgcgattacctggcaggactccgagaacagcttcctaagagtaaaggtcataaacttcgggtcagatgctgtgaccctgacaatctccacaagtgggctccaggccagtatcaacgctctgggatcaaccgccactgttctcacatcagcagatgtgatggatgaaaactccttcagcaacccaaccaaggttgtgccggtaaagagcgatctgagcaatgctgcagagcagatgcaggtcacgctggctcctcgctccttcagctcgttcgatctcgccctggctcagtccaagcttgtagcggagatgtgagctaggctggtacactagtatacaatacaacgtgtgaagtgtggtacacaaataccagcaaccacaggggttgccaagctgttgttagcatcttgaacacatggctttgtattgtgtataatgacatgatgctgatactaatctctattatataaagcactagtttctaaaaaaaaaaaaaaaaaaaaaaaaaaaaaaaaaaaaaaaaaaaaaaaaaaaaaaaaaaaaaaaaaaaaaaaaaaaaccaaaaaaaaaaaaaaaaccccgggccccccaagccccagtttttgtccctttaagggggggtaaatggccccttgggggaaaccagggcaaaagtggttcccgggggaaaatggtaaccccctcaaattcccacaaaaaaaacaacccgaaaaaaaaaagggaaaacccgggggggccaaaggagggaccaaccccccttaattggggtggcgcccatggcccgttttcaagcgggaaaaccggccgggccagttgattaaagaaaccgcccaacgcccgggaaaaggggtttggctaatggggggtttttccgtttc

SEQ ID NO: 113919 - DNA, 322 bp, Zea mays
  Clone ID: MRT4577_35377C.1
agatggctcaagatcgcacgcacaccatcaagccggcatgcatgcgctgtgctgtcgcggccctggtgaccgtgaccatctgccaaggctacgtcgagcggcagatgctcatggacctgcagtgctggcaggaggtccaggagagcccgatcgacgcgtgccgtcaggtcctcgaccgccagttaaccggcagctgcatcagcggcccgttccagtggtgcaccgggctccggatgcagtgctgcacagcagctccagtacatgagccgcgagtgccgatgcgccgacatccggagcatggtcaggagctacgaggaagcca

SEQ ID NO: 113920 - DNA, 992 bp, Zea mays
  Clone ID: MRT4577_35378C.1
aattcggcacgaggccagcgtgcccgccgccgaccgcctgcacaagcctgcggcgagctccggcgtcgccggcgagcttcagcaccggcacgtgctccggaaggaaatagcttccggtgacgtacgctaccctctccgcggcgtcccggagagcggggacggggagcgctttttgctgtcacccgcacacgagcgacgagctccaccacctgcccagggttagttgtgtatggaacaatgaagaacatggcaccacggcagggacccgtcactcagtgctgttgattctggaacatcgcctcgctaccacccatggcaggtagcaactgtgttccctgtgctgcgctcctccgagtacttcacaagtccgtcaattgatgagctggtagagagggaggtggctgatcctggctactgcagcagggttccaaacttcatcatagggagggctggatatgggcaggttaggttcttgggcaacaccgatgtgaggggcattgacctgaatgaaattgtcaggtttgaaaaacactatgtggtggtttatgaggatgagacttgtaagccacctgtagggcatggtcttaacaaagcagcagaagtatccttgctgctgaatctgaaggatcatccggagcccagtatccttgttgaagtgctaaggtgtcgtgcaagaaagcaaggttctaggtttctttcattcaatccagtgaatggaaaatggaaatttgaggttgatcattttagtagatttgggcttgtggatgaggacgaagagaatgctgtgatggacgaggcagctgttcggcagccaattactgaagtaagagaaagagatccaccttcaaatagttatgaaattgagctctcacattcattgcctgctcatctcgggcttgaccctgcaaaggtgcaagaaatgaggatggtgatgttttccaatgaggaagaagagaatactggaggatgggttcccttctgacaagagtacc

SEQ ID NO: 113921 - DNA, 659 bp, Zea mays
  unsure (1)..(659): unsure at all n locations
  Clone ID: MRT4577_35379C.1
ggccgctttttttttttttttttcaaaaaaagttgtatgtatcttcgtttcgcaaaaccatgcgtgatgaattggaggcaatgcatgatctctgcctcaccaatctcggcgcgcctaagctactacgtactagactgcatacacagacgccaagctcgcggcacattatatacaaacaaaccccccgatacacggctccggccgtacgtccagccctgttcgacgatcgatcaacgattcaagccagcttggacgacgcgctcctccgccgcgacgctgcgccggcgcccttgacctcggcgcgaacgaccttggcgctccggtggccggcgccagtcgcggtggcggcggcggcgggccagaggccgacggcgacggccatgtccttgagcccctgcagcttctcgagcgcttcgacgacggccgccatgcgcggcctgtcccgcggctgctgcgccgtgcactgcaccgccagctgcgccacggcgcgcgcgcccttgacggagtagtggcccgccagcctctggtccacgatgcagcgcagcctgcggctgccgccgctgaggtagggccgngtccagtccaccagcttcacctgctgctccgcgtgcgcgctgcggacccggacgtgctccatggggcgccgccctgtcaggagc

SEQ ID NO: 113922 - DNA, 274 bp, Zea mays
  Clone ID: MRT4577_3537C.1
taatgtacgaggataaagagattttgatacaactaaaggggcgtatatttgaaaaggaaaaaatgaggcataaaatctggaaatggaaaattatcaacattaggaagggatgccaaaaaaacccccatttgatcccagttaagggtatatttcgtgttatggtgaaactcccatgcggctggggtattgacacagggccaatggagtggcttcgggacttatcgcttgacttgctggattagatttcaaggccttgaagcattagtgtaggcgg

SEQ ID NO: 113923 - DNA, 3123 bp, Zea mays
  Clone ID: MRT4577_35380C.1
atgggcagtctccagcaacctctccaacccaggactgtgctccgtttcgggagtcttaagttcatgtctctcgacggcggctacgacatgatactccttccaccgccgcgcgacaacgacaatggtggccgacagcccgcccgccggcggcggaatcgacgacgtcttccccgcgtggtggaagaacaaccttcacgctcatcccgccttcttccccgtcgacggaggggaaggcagggcaaccaaggccaagcaggaggcagcgcctcgtcggctgtcgagcaagtcgaccgcgccggcaccccaacggggggcgcaccggatatcgacttcgcgcttgagacaaagacgagcgccgtctccccgcgacacgccaatcccgagcaagcggacgacgccagcgcgcttgcgaaaagcttgctggacgtcacccttatacctgagacgacggtgcagtcagtccccgacgtgactttatcgccgctcgtcgaccaagaggtaccgaccgattcccgtcccacgtcatttggattcagcctcaacccgcctagcgaccccgctttggcgggcgccctcgtagaggcgagtccaaaccctctggggtttcgcatgcggtcgccttgggaccggctgacggacgtctcgacctacggggcctctgggtccgaggaagacgacgagcccagcatctgctgggatttctctggacttggcaaccccagcgtcgtgcgggacttcatgaccgcatgtgactactgcctctccgactgttccgacggtagccgcagcctcggcgacaaggactgcggtccaagccgcgaatgtttccacgtcgatctagggggtccctccgaagacaatcatctcggcatgccggaggacggcgatctccctaggccggcgccccgcgttgacatcccacgggagctagttgtggtccccgttcaggcggggggccatgacccacagctcgagcaaatccgcggggtgcaggccaggctcgacgagggagcaggagcgcttgagccgatccgcctggacgtcgggcaggcgtgggcgggccaacccccggccagagaaatacgtcatctgccccagggcttccagcaccgcgtcgccgacgacgtcagggtcaggccaccacccgcatctagtggggtcggccagaacctggctgcagcagcgatgcttctgcgcgcgatgccggagccatcaaccaccgagggccggcgaatccagggggagctcaagaatctcctggaaggcgccgcggtccgacgggccgagagctctgcctcccgaaggcaggggtacccctcggaacctcatgccgcgacttcccgattcatgcgggaagcctcggtctacaccgggcgcacgcgcaacaccgcgcctgcggccccgggtcgcctctgcaacgagcaccatcaccgcgaccgtcgggcccacctcgacgagagggtgcgccgaggctaccaccccaggcgtgggggacgctacgacagcggggaggatcggagtccctcgcccgaaccgcccggttcgcaggccttcagccgggccatccgacgggcaccgttcccgacccggttccgacccccgactactatcacaaagtactcgggggagacgagaccggaactgtggctcgcggactaccgtctggcctgccaactgggtggaacggacgatgacaacctcatcatccgcaacctccccctgttcctctccgacaccgctcgcgcctggttggagcacctgcctccggggcagatctccaactgggacaacctagtccaagctttcgccggcaatttccagggcacctgccgacagcagccgggagagtctctctgggactacatccggcgattctcgaagcagcgcaccgagctgcccaacatcaccgactcggatgtcatcggcgcgttcctcgccggcaccacctgttgcgacctggtgagcaagttaggtcgcaagacccccaccagggcgagcgagctgatggacatcgccaccaagttcgtctccggccaggaggcggtcgaggctatcttccgaaaggacaagcagccccagggccgcccatcgaaagatgctcccgaggcgtcgactcagcgcggcgccaagaagaaaggcaagaagaagtcgcaagcgaaacgcgacgccgccgacgcggaccttatgctcaaggagccgtgcccctatcaccaggggcccgtcaagcacacccttgaggagtgcgtcatgcttcggcgccacttccatagggccgggccacctgcggagggtggcagggcccgcgacgacgacaagaaggaagatcaccaagctggagagttccccgatgtccgcgactgcttcatgatctacggtgggcaagcggcgaatgcctcggctcggcaccgcaagcaagagcgccgggaggtctgctcggtgaaggtggcggcgccagtctacctagactggtccaacaagcccatcaccttcgaccaagccgaccacctcgaccacgtgccgagcccggggaagtacccgctcgtcgtcgaccccgtcatcggcgacgtcaggctcaccaaggtccttatggacggaggcagcagcctcaacatcatctacgtcgagaccctcgggctcctgcgtgttgatttgtcctccgtccgagcaggcgctgcgcccttccatgggatcattcccgggaagcgcgtccagcccctcggaaaactcgaccttcccgtctgcttcggaacaccctccaacttccgaagggagaccctgacgttcgaggtggtcggtttccgaggaacctaccatgcggtactgggaagaccatgcaacgcgaagttcatggccgtccccaactacacctacctgaagctcaagatgccgggccccaacggggtcatcaccgtcggccccacgtacaaacacgcgttcgaatgcgacgtggagtacgccgaggccctcatcgtcgacctggaaagcctctctaaggaggtgccagacgtgaaacgtcatgccggcaacttcgagccagtggagacggttaaggccgtccccctcggccccagcggcgacgcctccaagcagatccggatcggcttcgggctcgatcccaaatag

SEQ ID NO: 113924 - DNA, 951 bp, Zea mays
  Clone ID: MRT4577_35381C.1
atgggcgagacgatctcgttcgcccctcggaaggccatcaagtcccaggtcttggcggactttgtggctgaatgggtcgacacccagctcctaacagctccgatccaaccggaactctggaccatgttcttcggtgggtcgctgatgaagacaggagcaggcgcaggcctgctcttcatctcgcccctcgggaagcacctacgctacgtgctacacctccatttcccggcatccaacaatgtggccgagtacgaggctctggtcaacgggttgcgcatcgccatcgagctaggggtccgacgcctcgacgctctctgtgactcgcagctcgtcatcgaccaagtcatgaagaactcccactgccgcgacccgaagatggaagcatactgcgatgaggttcggcgcctggaagacaagttctacgggctcgagctcaaccacatcgcccgacgctacaacgagactgcagacgagctggctaaaatagcctcggggcaaacaacggttcccctggacgtcttctcccgagacctgcatcaaccctccgtcaagaccgacgacgcgcccgagcccgagaaggcctcggcccagcctgaggcaccctcggctcagtctgaggcaccctcggctcagcccaaggcaccctcggctcggcccgaggcaccctcggctcggcccgaggcaccctcggctcggcctgaggcaccctcggcctccgagggtgaggcactgcgcatcgaggaggagcggagcggggtcacgcctaatcgaaactggcagacctcgtacctgcaatatctccaccgaggagagctacacctcgaccaggccgaagctcggcggttggcgcgccgcgccaagtcgttcgtcttgctgggagatgggaaggagctctaccaccgcagcccctcgggcatcctccagcgatgcatttccatcgccgaaggctag

SEQ ID NO: 113925 - DNA, 2268 bp, Zea mays
  Clone ID: MRT4577_35382C.1
atgctcctggggttcatcgtctccgagcggggcatcgaggccaacccggagaaaatcgcggccatcaccaacatggggcccatcaaggacttgaaaggagtacagagggtcatgggatgccttgtggctctgagccgcttcatctcgcgcctcggcgaaagaggcctgcccctgtatcgcctcttaaggaagaccgagcgcttcacttggacccccgaggccgaggaagccctcaggaacttgaaggcaccccttacaagcgcgcccatcctggtgccccccactgccggagaagccctcttgatctacgtcgtcgctaccacacaggtggtcagcgccgcgatcgtggccgagagacgagaagaagggcacgcattgcccgtccagaggccggtctacttcatcagtgaggtactgtccgagaccaaaatccgctacctgcaaattcagaagctactgtacgtggtaattctgacacggcgaaagttgcgacactacttcgagtctcatccggtgactgtggtgtcatccttccccctgggagagatcatccagtgccgagaggcctcgggtaggattgcaaagtgggcggtggagatcatgggcgagacgatctcgttcgcccctcggaaggccatcaagtcccaagtcttggcagactttgtggctgaatgggtcgacacccatcttccaacagctctgatccaaccggaactctggaccatgtatttcgatgggtcgctgatgaaaacaggagcgggcgcgggcctgctctttatctcacccctcgggaagcacctccgctacgtgctgcgcttccatttcccggcgtccaacaacgtggccgagtatgaggctctggttaacgggttgtgcatcgccatcgagctaggggtccggcgcctcgacgctcgtggtgactcgcagcttgtcatcgaccaagtcatgaagaattcccactgcagcgacccgaagatggaagcctactgcgacgaggttcggcgcctggaggacaagttctatgggctcgagctcatccacgtcgctcgacgatacaacgagactgcagacaaactggctaagatagcctcgaggtggacaacgattcctccggacgtcttctcccaagacctacatcaaccctccgtcaacaccgacgacacgcccgagcccgagaaggcctcggccctgcccgaggtgccctcagctcagcccgaggcagcctcagccccgcccgaggcaccctcggcccccgagggtgaggcactgcatgtcgaggaagagcggaatgaggtcacgcctaatcgaaactggcagacctcatacctgcaatatctccaccgaggagagctacccctcgacagagccgaagctcggcaactggcgcggcgcgccaagtcgttcgtcttgttggatgacgaaaaggagctctaccaccgcagcccctcagggatcctccggcggtgcatatccatcaccgaaggtcaggagttattgcaagaaatacactcgggggcttgcggtcaccacgcagcacctcgagccctcgtgggaaacgtcttccgacaaggtttctactggccaaccgcggtggccgacgccactaggattgtacgcacctgccaagggtgtcaattctatgcaaggcagacacacttgctcgctcaggccttgcaaacaatacccatcacctggccgtttgctgtgtggggtctggacctcgtcggtcccttgcagaaggcacctaggggcttcacgcacctgctggtcgccatcgacaaattctccaagtggatcgaggtccgacccctaaacagcatcaggtccgaacaggcggtggcgttcttcaccaacatcatccattgcttcggggtcccgaactccatcatcaccgataatggcacccagttcaccggcaggaagttcctggacttctgcgaggaccaccacatccgggtggactgggccatcgtagctcaccccatgacgaatgggcaggtagagcgtgccaacggcatgatcctgcaaggactcaagccgaggatctacaacaacctcaacaagttcgacagacgatggatgaaggaactcccctcggtggtctggagtctgaggacgacgccaagccgagccacgggcttcacgccgttttttctagtctatggggctgaggctatcttgcccacagacttagaatacggctccccgaggacgagagcatacgacgcccgaagcaaccagacgaaccgagaagactcactagactag

SEQ ID NO: 113926 - DNA, 2334 bp, Zea mays
  Clone ID: MRT4577_35383C.1
ggcgttacactttccgaccttgaagtgacattccggtgtctcaaggcaaaaggcgtcaagctcaatcccgagaagtgtgtcttcggggtgccccgaggcatgctcttggggttcatcgtctccgagcggggcatcgaagccaacccggagaagattgcagccatcaccagcatggggcccatcaaggacttgaaaggtgtacagagggtcatgggatgcctcgcggctctgagccgcttcatctcacgcctcggcgaaagaggtctgcctctgtaccgcctcttaaggaaggccgagtgcttcacttggacccctgaggccgaggaagctctcgggaacttgaaggcgctcctcacaaaagcgcctatcttggtgcctccagctgccggagaagccctcttggtctacgtcgccgcgaccactcaggtggtcagcgccgcgattgtggtcgagaggcaagaagaggggcatgcattgtccattcagaggccagtttacttcgtcagcgaggtactgtccgaaaccaagatccgctacccacaagttcagaagctgttgtatgcggtgatcctgacgcgacggaagttgcgacactacttcgagtctcatccggtaactgtggtgtcatccttccccctgggggagatcatccagtgtcgagaggcctcgggcaggattgcaaagtgggcggtggaaatcatgggcgagataatctcgttcgcccctcggaaggccatcaggtcccaggtcttggcggacttcgtagccgaatgggttgatacccagctaccgacggctccgatccaaccggagctctggaccatgtttttcgacgggtcgctgatgaagacgggagccggcgcaggcctactcttcatctcgcccctcgggaaacacctacgctatgtgctacgcctccatttcccggcgtccaacaatgtggctgagtatgaggctctggtcaacgggttgcggatcgcgatcgagctaggggtccggcgcctcgacgcccgcgatgactcgcagctcgtcatcgaccaagtcatgaagaactcccacagccgcgacccgaagatggaggcctactgcgatgaggttcggcgcctggaagacaagttctacgggctcgagcttaaccacatcgctcggcgctacaacgagactgcggacgagctggctaaaatagcctcggggcgaacaacggttcccccggacgtcttctcccgggatctgcatcaaccctccgtcaagatcgacgacccgcccgagcctgaggcgccctcgacccagtccgaggtaccctcggtccagcccgaggtaccctcggcacagcccgaggcaccctcagctcggcccgaggcgccgtcagttcagcccgaggtaccctcggcctccgagggtgaagcactgcgcatcgaggaggagcaaagcggggccacgcctgatcgaaactggcagaccccgtacctgcagtatctccaacaaggagagctacccctcgaccgatccgaggctcggcgggtggcatggcgcgccaagtcattcgtcttgctgggcgatgagaaggagctctaccaccgcagccccttaggcatcctccagcgatgcatctccgtcgccgaaggtcaggaactcctgcgggagatacactcgggggcttgcggccatcacgcagcacctcgagcccttgtcgggaatgcttttcgacaaggattctactggccgacggcggtggccgacgccgctagaatcgctctgcagacgatacccatcacctggccctttgctgtgtggggtctggacctcgtcggccccttgcagaaggcgcccgggggctacacgcacctgctggtcgccatcgacaaattctccaagtggatcgaggtccgacctctgaacagcatcaggtccgagcaggcggtggcgttcttcaccaacatcatccatcgcttcggggtcccgaactccatcatcaccgacaacggcacccagttcaccggcagaaagttcttggacttctgcgaggatcaccgcatccgggtggactgggccgccgtggctcatcccatgtcaaatgggcaagtagagcatgccaacggcatgattctacaagggctcaagcctcggatttacaacgacctcaacaagttcggcaagcgatggaagaaggaactcccctcggtggtctggagcctgaggaccactccgagccgaaccacaggattcacgttgttcttcctagtgtatggggccgaggccgtcttgcccacagacctagaatacgactccccgaggacgagggcctaccgcgatcaaagcaaccaagccagctga

SEQ ID NO: 113927 - DNA, 191 bp, Zea mays
  Clone ID: MRT4577_35384C.1
caaacagagcatgcacgcggacgccgcttacaatacctctcgagccctttccagctatttttatatctcatcaatctccaatagggcaaactggggtgcaaccggacgatcagaaaaccctgcatgaaactatcttattatatgattatctagtctatattatatgtctcctgaagcctatacattattgc

SEQ ID NO: 113928 - DNA, 2661 bp, Zea mays
  Clone ID: MRT4577_35385C.1
atgccgttcggcttgaggaatgcgggcgcgacgtaccagcggtgcatgaaccatgtgttcggccaacacattggccggacggtcgaggcctacgtcgatgacatcatagtcaagacgaggaaagcctccgacctcctttccgaccttgaagtgacattccgatgtctcaaggcgaaaggcgtgaagctcaatcccgaaaagtgtgtcttcggggtgccccgaggcatgctcttggggttcatcgtctccgagcggggcatcgaagccaacccggagaagatcgcagccatcaccaggatggggcccatcaaggacttaaaaggcgtacagagagtcatgggatgtcttgcggctttgagtcgtttcatctcacgcctcggcgaaagaggcctgcctctgtaccgcctcttaaggaaggccgagtgcttcacttggaccctcgaggccgaggaagccctcgggaacctgaaggcgctcctcacgaatgcgcccatcttggtgccccccgctgccggagaaaccctcttgatctacgtcgccgcgaccactcagctgcgacactacttcgagtctcatccggtaactgtggtgtcatccttccccctgggggagatcatccagtgccgagaggcctcgggtagaatcgcaaagtgggcggtggaaatcatgggcgaagcaatctcgttcgcccctcagaaggccatcaagtcccaggtcttggcggacttcgtggctgaatgggtcgacacccagctcccaacagctccgatccaaccggagctctggaccatgttcttcgacgggtcattgatgaagacaggagccggcgcaggcctactcttcatctcgcccctcgggaagcacctacgctatgtgctacgcctccatttcccggcgtccaacaatgtggctgagtacgaggctctggtcaacgggttgcggatcgccatcgagctaggggtccgacgcctcaacgctcgcggtgactcgcggctcgtcatcgaccaagtcatgaagaactcccactgccgcgacccgaagatggaggcctactgcgatgaggttcggcgcctggaagacaagttctacgagctcgagctcaaccacatcgcccgacgctacaacgagactgcggatgagctggctaaaatagcctcggggcgaacaacggttcccccggacgtcttctcccgagacctgcatcaaccctccatcaagatcgacgacacacccgagcccgaggcaccatcggctcagcccgaggtacccttggctcagtccgaggcatcctcggcacgacccaaggcaccctcagctcggtccgaggcaccctcggttcagccctcggcaccctcggcacccgagggtgaggcactgcgcgtcgaggaggagcgaagcggggtcacgcctaatcaaaactggcagaccccgtacctgaaatatctccatcgaggagagctatccctcgatcgagccgaggctcggcggttggcgcgacgcgccaagtcgttcgtcttgctgggagatgggaaggagctctaccaccgcagcccctcgggcatcctccagcgatgcatttccatcgccgaaggtcaggaactcctacaagagatacactcgggggcttgcggccatcacgcaacacctcgagcctttgttggaaacgccttccgacaaggtttctactggccgacggcggtggctgacgccactagaattgtccgcacctgcgaagggtgtcagttctacgcaaggcagacccacctgcctgcccaagctctgcagacgatacccatcacttggccttttgccgtgtggggtctggacctcgtcggccccttgcagaaggcacccgggggctacacgcacctgttggtcgccatcgacaaattctccaagtggatcgaggtccgacccctaaacagcatcaggtctgagcaggcagtggcgttcttcaccaacatcatccaccgtttcggggtcccgaactccatcatcatcgacaacggcacccagttcaccggcagaaagttcctggacttctgcgaggatcaccacatccgggtggactgggccgccgtggctcaccccatgacgaatgggcaagtagagcgtgccaacggcatgattctacaaggactcaagcctcagatctacaacgacctcaacaagttcggcaagcgatggatgaaggaactcccctcggtggtctggagcctgaggacaacgccgagccgagccacgggcttcacgccgttctttctagtctatggggccgaggccatcttgcccacagacttggaatacggttccccgaggacgagggcctatgctgaccaaagcaaccaagctaatcgagaagacttgctggaccagctagaagaggctcgggacaaggccttactacactcggcgcggtaccagcagtccctgcgacgctaccacgcccgaggggtccggtcccgagacctccagacgggagacctggtgctccggctgcgacaagacgcccgagggcggcacaagctcacgcctccctgggaagggccgttcgtcatcgccaaagttctgaagcccggaacgtacaagctggccaacagtcaaggcgaggtctacagcaacgcttggaacatccaacagctacgtcgcttctacccttaa

SEQ ID NO: 113929 - DNA, 2880 bp, Zea mays
  Clone ID: MRT4577_35386C.1
atgggcagtctccagcaacctctccggcccgggacggtgctccgtttcgggagtcttgagttcatgtccttcgacggcagctacgacatgatactccttccaccgccgcgcgacaacgacaatggcggccgacaacccgcccgccggcggcggattcgacgacatcttccccgcgtggtggaagaacaacattcgagctcgctccgtcctctcccccgccaacggaggaggaggcggggcaaccaaggccaagcgggaggccgcgcttcgtcggccgtcgagcgaatcgacgcccccgacgccccgacggaaggcacgccgggcgtcgacctcgcgttcaagacgaaggcaagcgtcgtccccccgcgacacgctgatcccgagcaagatgacgacgccagcgcgctcgcggaaagcttgcaggacgtcgccctcgtacctaggacgacggtgcaaccattccccgatgtgactacgtcgctcctcgtcgaccaaaaggtactgactaactcccatcttacgtcatttcgactcggcctcaacccgcctagcaaccttgctttgacgggcgctctcattgaggcgagtgcaaccccactggggtttcgtatgcggtcgccttgggaccggttgacggacgtctcaacctacgggccctctgggtccgaggaagatgacgatcccagcatctgttgggatttctttggacttggcaaccccagtgccatgtgggacttcatgaccgcatgtgactactgcctctccgactgttccgatggaagccgcagccttgacgacgagggctgcggcccaagccgcgaatgtttccacatcgagctaggggatccctccgaaggcaaccatttcggcatgccggaggacggcgatcttcctaggccggcgcctcgcgccgacatcccgcgggagctagctgtggtccccgttccggtggggggtcacgacccacaactcgagcaagtccgcgaggcgcaggccaggctcaacgagggaacaggagcgcttgagccgatccgtcgggacatcggacaggtatgggcgggccaaccctcggccggagaaatacgtcacctgccccaaggtctccagcaccgcgtcgccaacgatgtcagggtcaggccgccgcccgcatctagcggggttggtcagaacctggcagccgcagcgatgctcctccgcgcgatgccggaaccatcaactaccgagggtcggcgaatccagggagagctcaagaatatcctggaaggcgctgcggcccgacgggctgagagcactgcctcccgaaggcagggatacccctcagaacctcatgccgcgacttcccgattcatgcgggaagcctcggtctacaccgggcgcacgcgcaacaccgcgcctgcggccccgggccacctcggcaacgagcaccatcgacgcgatcgtcgggcccacctcgacgaaagggtgcgccgaggctaccaccccaggcgtgggggcgctacgacagcggggaggatcggagtccctcgcccgaaccacccgatctccagctgggacgacttggtccaagccttcgccggcaatttccagggcacatacgtgcgccccgggaattcctgggaccttcgaagctgccggcaacagccgggagagtcgctccgggactacatccggcgattctcgaagcagcgcaccgagctgcccaacatcaccgactcggatgtcatcggcgcgttccttgccggcactacttgccgtgacctggtgagcaagttgggtcgcaaaacccccaccagggcgagcgagctgatggacatcgccaccaagttcgcctctggccaggaggcggtcgaggctatcttccgaaaggacaagcagccccagggccgcccatcggaagaggctcccgaggcgtctactccgcgcggcgccaagaagaagggcaagaagaagtcgcaatcgaaacgcgacgccgccgatgcggaccttgtcgccgccgagtacaagaaccctcggaagccccccggaggtgctaaccttttcgacaagatgctcaaggagccgtgcccctatcatcaggggcccgtcaagcacactctcgaggagtgcgccatgcttcggcgccacttccacagggtcgggccacccgcggagggtggcagggcccacgacgacgacacgaaagaagatcaccaagcaggagaataccccgaggtccgcgactgcttcatgatctacggtgggcatgcgacgaatgcctcggctcggcatcgcaagcgagagcgccgggaggtctgctcggtgaaggtggcggcgccagtctacctagactggtccgacaagcccatcaccttcgaccaggctgaccaccccgaccacgtgccgagcccggggaaatacccgctcgtcgtcgaccccgtcatcggcgacgtcaggctcaccaagcccctcggacgactcgacctccccgtctgcttcggaacgccctccaacttccgaagggagaccttgacgttcgaggtggtcgggttccgaggaacctaccacgcggtactgggaaggccatgctacgcgaagttcatggtcgtccccaactacacctacctgaagctgaagatgccgggccccaacggggtcatcaccgtcggccccacgtacaaacacgcgttcgaatgcgacgtggagtgcgtggagtacgccgaggccctcgccgagtccgaggccctcatcgccgacctggagaacctctccaaagaggtgccagatgtgaagcgtcatgccggcaacttcgagccagcggagacggttaaggccgtcccactcgaccccagtggcgacgcctccaagcagatccggatcggttccgggctcgaccccaaatag

SEQ ID NO: 113930 - DNA, 253 bp, Zea mays
  Clone ID: MRT4577_35387C.1
ggcaggaccggccggaataactctggaccgcggtctatcgacggggccgcccaaaaaaaggggggttaaaagaaaagcggcgaacccccacggccaacaaaacctgaccggccccaggagagcaacacgcagccggggcagggcacagcccccaaaagaagaagagcacgcccacacgcacgacacacacggacgcgcaaccaaccaaacagcacaccggagaacgaacgcggcacacgcaccggacaaacac

SEQ ID NO: 113931 - DNA, 2919 bp, Zea mays
  Clone ID: MRT4577_35388C.1
atgggcagtctccagcaacctttccagcccgggacggtgctccgtttcgggagtcttgagtttatgtccctcgacggcagctacgacatgatactccttcccccgccgcgcgacagcgacaatggtggccgacaacccgcccgtcggcggcggaatcgacgacgtcttccccgcgtggtggaagaacaacattcgagctcgccccgtcccctcccccgccgacggaggaggaggcggggcaaccaaggccaagcaggaggcggcacctcatcggctgtcgagcgagtcgaggacgccagcgccccaatagggggcacgtcgggcatcgacctcgcgtctgagacgaagacgagcgtcgtctccctgcaacacgccaaccccaagcaaacggacgacgccagcacgctcgcgaaggacttgctgggcgtcaccctcgtacctgagacaacggtgcagtctgctccggacgtgacttcgtcaccgcccgtcgaccaagaggtaccgaccgattcccatctcacgccttttggattcagcctcgaccctccaagcgacttcgctctggtggacgctctcatagaggcgagtccaaaccctctggggtatcgtatgcggtcaccctgggaccggctgacggtcgtctcgacctacgggccctcggggtccgaggaagatgacgagcccgacttctgttgggatttctccggacttggtaaccccagtgccatgcgggacttcatgaccgcatgcgactactgcctttctgattgttccgacggtagccgcagcctcggcgacgaggactgcggcccaagtcgtgaatgtttccacgtcgatctagggggtcccgacgaaggcaaccatcttggtatgccggagaacggtgacctccctaggcctgtgcctcgcgttgacatccttcgggagctagttgtgggcatccagcaccgcgtcgccgacgatgtcatggtaaggccgccaccggtttccagtggggtcggccagaacctggctgcagcggcaatacttctccgcgcgatgccggagccatcaaccactgaggggcggcgtatccagggagagctcaagaatctcccggaggacgccgcggtccgacgggccgaaagctccgcctcccgaaggcaggggtacccctcgaaacatcgcgccgcgacttcccgattcatgcgggaagcctcggtccacaccgggcgcacgcgcaacacagcgcctgcggccccgggtcgcctcggtaacaagcaccatcaccgcaaccgtcgggcccacctcgacgagagggtgcgccgaggctaccaccccaggcgtgggggacgctatgacagtggggaggatcggagcccctcgcccgaaccacccggtctgcaggctttcagccgcgccatacaacgggcgtcgttcctgactcggtttcgaaccccgactactatcacaaagtactcgggggagacgagaccggaactgtggctcgcggactaccggctggcctgccaactgggtggaacggacgatgacaacctcatcatccgcaacctccccctgttcctttccgataccgctcgggcctggctggagcacctgcctccggggcagatctccaactgggacgacctggtccaggccttcgccgacaatttccaaggcacctgccgacagcagtcgggagagtctctccgggactacatccggcgattctcgaagcagcgcactgagctgcccaacatcactgattcggatgtcatcggcgcgttcctcgtcgacaccacctgccgcgacctggtgagcaagctgggacgcaagacccccaccagggcgagcgagctgatggacatcgccaccaagttcgcctctggccaggaggcggttgaggccatcttccggaaggacaagcagccccagggccgcccaccggaagatgtccctgaggcgtcaactcagtgcggcgccaagaagaaaggcaagaagaagtcgcaagcgaaacgcaacgccgccgacgcggaccttgtcgccgccgccgagtacaagaaccctcggaaacctcccgcaggagccaacctcttcgacaagatgctcaaggagtcgtgcccctatcatcaggggcccgtcaagcacacccttgaggagtgcgccatgcttcggcgccattttcacaaggccgggccacccgcggagggtggcagggctcgcgacgacgataagaaggaagatcaccaggcaggagagttccccaaggtccgcgactgcttcatgatctacggggggcaagtggcgaacgcctcggttcggcaccgcaagcaagagcgtcgggaggtctgttcggtaaaggtggcggcgccagtctacctagactggtccgacaagcccatcaccttcgaccaagacgaccaccccgaccgcgtgctgagcccggggaaatacccgctcgtggtcgaccccgtcatcggcaacgtcaggctcaccaaggtcctcatggacggaggcggcagcctcaacatcatctacgccgagaccctcgggctcctgcggatggatctgtcctcggtccgggcaggcgctgcgcctttccacgggatcatccccggaaaacgcgtccagcccctcggacaactcgatctacccgtatgctttgggacgccctccaacttccgaagggagaccctcacgttcgaggtggtcgggttccgaggaacctaccacgcagtactggggaggccatgctacgctaagttcatggtcgtccccaactacacctacctcaagctcaagatgtcggaccccaacggggtcatcaccgtcggccccacgtaccgacacgtgtacgaatgcgacgtggagtgcgtggagtacgccgaagccctcgccgaatctgaggccctcatcgccgacctagagcctctctaa

SEQ ID NO: 113932 - DNA, 649 bp, Zea mays
  unsure (1)..(649): unsure at all n locations
  Clone ID: MRT4577_35389C.1
caaccatcaaagtcagcttcgcccagttacagttatgggcagggtacgcccacaaagtgtagtccccagatgactggcatcttacgtgattttcttgagagttctggggttgtggttggaagcactgatgatatcttgctgtatactctatctgaggaagaattgtttgaactatttcaaattgtcagcagccaactctcatttatatggaatgagttcttgaaattccataggacacataaagacaaggtaatgggttatttgcatgatatgtgggatattaatcggaaagcagaatggtcaatatggattattcattcaaagattgagattccacatcgctatttgagaagcatgaatgacgactctcctcgccatttgattcggatttccagttcaagaaaggtccatcatgatcctatacaaaattcgatgtcacaggctgaactgcacaggaaaagtatagcacaaatgaagagcagcatgtcatggttattccgcaacattgttctagcaaggattttctaacagatgcttcagaaccagctcgtactattgtgccaccacctctactacaaggacaatcattgggggaagaaacttgtggttncaagagtggacgcattntacgagctgtcatttttgtgca

SEQ ID NO: 113933 - DNA, 367 bp, Zea mays
  unsure (1)..(367): unsure at all n locations
  Clone ID: MRT4577_3538C.1
ccggcccggaaaacccgggacgacccacgcgggctcattggaaacaccaggcaagagaccaagggggggacaaaaagaaggggacaccaacaggaaaaagaacaaggaacccaggaaagaagcggcaaccgacagcaccaggacaccaaggaagacacggcgcgcacgcaacaacaaaccaaaggagaccacgcgacccaggcaaggaaaaaaggaaacggacgacacacgggaancaccgaaagcgcngcaaacaagggagaaacgcaggccaggacacgaacgaaacagaaggaaangcngaaggggaagcccaaggcggagacgccggngagaacgcccacgacggaggcgaaggggaagagca

SEQ ID NO: 113934 - DNA, 425 bp, Zea mays
  Clone ID: MRT4577_35390C.1
ggccgccatgtgctggcaatacgccctatgacaatctcgcaggaacgcggccttagcgtaataatgtaacggagccgctcactagctacctatagctagttcactcgtttagcggcgatgagtaacggagtgtcacccatcaccatgggtggcagtgtgagcaatgacctgaatgaaccattgaaatggaggggggggggatatagggaaaaaaaaaaaaaaaaaaaaaaagataaaaaaaaaagagaaaaaaaaaaaaaaaaaaagtaaaaaatatgtaaaaaattggaaaaaaaaaaaaaaaaaaataaattggggtttggtcttggggggtgccacccctaggggcaaattcggaagattgcaaacacacggggggatggtaagccattctttggggggggcaaattggccctaaagggggg

SEQ ID NO: 113935 - DNA, 306 bp, Zea mays
  Clone ID: MRT4577_35391C.1
attttggttggttaactttaagagttacttgcaacacttatgccctgttttgatgcaaagtattttaaggaatggaggaattacaataccaccaacaacaacaaaaaaccatttgtcccaagcaagttgggggtaggctggagttaaaaacccaatagaacccacaaatcatggttcgggcacatggatagctgctttccatgcactcctattcaaggcgaaatctttgggtatattacatcctttcaagtctttttttactgcctcttcctatgtcaactttggtcttcctcttacttctcatta

SEQ ID NO: 113936 - DNA, 598 bp, Zea mays
  Clone ID: MRT4577_35392C.1
ttgggtacctcgagccggccgggagaagaaaatctttcaaagaaaaaaggagagtgcttagagagagagcaaaacatattattttcattttcatctttttttgagtatcaacaaatggcaaccactgtgatgaccactctcccccaattcagtggtcttagaccccaattctcagctgcccctgtgaagaacttggttgctgtgcaacccatgagtcgcaaggggaagggtgcattgggagctcgatgtgactacattggttcatccactaatctgattatggtggcttctacaaccctgatgctgtttgctggaaggtttggattggctccatcagcaaacaggaaagccactgcagggctaaagctggaggtgggggactcaggcttgcagactggtgaccctgctggcttcacccttgctgacaccttggcctgtggatctgttggccacatcattggggttggggttgttcttggtctcaagaacattggtgccctgtaaaaagcaactatataagtttagtgcttgatgcatctgtaatcaatgttattatgtacttcattttcacaacaaaaaaaaaaaaaaaaaagcggcc

SEQ ID NO: 113937 - DNA, 452 bp, Zea mays
  Clone ID: MRT4577_35393C.1
ttttcacgttgggggacatcctaccaactattggattatcaggacctacatgtttggtgccgatgattgacacagcacatggcattgtagacagtaaccggttctcaattaaatgttcttaagttaatcgactgtgggcattttaccctaagggtggattcacaatatggaccgtggagtaatgaggagcaggaaactattgatgcaatagtaagagcaagacagctaccattgttgaactagttcttgccgggtatggagatgaaccatgggaacatggtctaacattttgaagacaatatatcctgttgggaaatatgacaattttgagcttgtgaattttaaggatgttaatggtctgaggatagcaactgagagaatggtggcaaaatttaaattgccagcgctgatggaaaaccgtaccacagtacagagatcaagtggtttttaac

SEQ ID NO: 113938 - DNA, 536 bp, Zea mays
  Clone ID: MRT4577_35395C.1
ctcgaggccggccgggatcacggtccccactattgaacacgtttacacgtgtgctccctgacgcatgtccctcccttttttgaaaggtcaccgtccaccactaaatgacggcggtactaccaaaccgtttgctgccatccctgatgccggcgacatggaggggagagggataccgccgcctattcccagtggccttcctggaactgcacctgggtgagtccaacagcatcaatgcccgccggctgagagacgcccgtatcaccaccgtcgacctcggcgtcgtgtcctccgcagatgagctccgctctcgtccagctatggagacaccgccatgctcctaacggtgaagatcgaggagatgccgacctcacacgagaagccagacaaacgatccatctctgcctgaggtccacttgcctcccctctggtcccagctggttaggccaagactgatctgcgcttgcgctcccagtgcatctccgaggagccttgaagacttttggatgatgtacataatgctaaatttgaaggaactc

SEQ ID NO: 113939 - DNA, 442 bp, Zea mays
  Clone ID: MRT4577_35396C.1
ggcccaccccactagattgcaaacatgggaaacaggaatcaggggctacaagaacagagtcagcttgcctgcatagaatcatcacccaacagaaactagcaaccagcctctttattttctaccacatgccagtcggtacccaagaaaactcccatcgaacctcttattagacaatccacaatatggagactgcactgcaggctggtccaggagacccagagcccaagtctccactcccaaaactgtaaaaacaaaacaaagggatggacgcgtatctataactcagcaccgagttccagcatcaaggcgaagctcgagtaataccttccagggccagctcaactggatagccccacgactgatgtatatgttcttgaggggcccttcatccctaaacgaggcatattccttggaaggtgcagcatcaagttccaccatagcc

SEQ ID NO: 113940 - DNA, 488 bp, Zea mays
  Clone ID: MRT4577_35397C.1
accaagcttcaaaattccaattgaataatcccgcacaggaaatctcggaacaacccagggtcggtcaactaaatggctcagcatggttgctaacgaaaagaaattccaataccaaactactggaggggccaagactccaaggggggaaaaaccttggggggtaacgacaatttttagctgggctaatttagggaacagattatcagatccgggttttaagggggccgggggggggctgccatttatttagaatctgaaacaccaattggccgggtaaattatgggtgatgacatgtctggacaaaaacgttggtttccttccggggaaaaaccccagctgggaaaataagcccgcatgggtccagctgatggtgcaaaggaatctccaggaagaaaggaacttattttcccacttggccaggagggttcaagaggaagaggttttccgagctgcataaacccgggaaggagttaggccaacaactgga

SEQ ID NO: 113941 - DNA, 679 bp, Zea mays
  unsure (1)..(679): unsure at all n locations
  Clone ID: MRT4577_35398C.1
cattgggtacctcgaggccggccgggcccttctctgcttgcttgctgctgcagtgctgcctccccctcgcccagcagcagggagcagccatgccaggggaccacggctccaagggcgacatctccttcgccggacgcttcacggccagcgccatcgcagcatgcttcgcagagatatgtaccatcccgctcgacacggccaaggtcaggctccagctgcagaagaacgtcgtcgccgccgccgcctccggggacgccgcgccagcgcttcccaagtaccgcggcctgctcggaactgccgccaccatcgcntagggaggaaggggccgcagcgctctggaagggcatcgtcccgggcctccaccgacagtgcatctacggagggcaagcttgcgcctggtgtgccacgccgctacactggcgcaatggatgcttattccaagattgctagacaggaaggggttgccgctctgtggactggccttggaccaaatgtagcgcggaatgctatcatcaatgctgctgagttggccagttatgatcaagtcaagcagtcaattttgaaactccctgngttcaaagatgatgtggtcacccacctttttgctggtcttggtgctggcttctttgctgtttgtgttggttccccagttggtgtggtttaagtcgagatgatgggt

SEQ ID NO: 113942 - DNA, 162 bp, Zea mays
  Clone ID: MRT4577_35399C.1
cgctggcagacaacacctcagcgatatgcagagccgcatgccctgcccacctcacaatgccatcccagcctgctcccggagatccggggggtcctggaaacaagtcctatccccgccgcctacaccggccgttcgcgctcacctaatcacgacattctttct

SEQ ID NO: 113943 - DNA, 185 bp, Zea mays
  Clone ID: MRT4577_3539C.1
ggggaaccaaaaaaaaacaccgttaaaaatggttccccgttttggggaaatgaactaccaattggttaaccctggaaattttgttgggaatggaaaaccaaactgtgccaaattcaataaacgggcttttttttaggggtagacataaaatgggccattccgtttttttttttgttaaaataaat

SEQ ID NO: 113944 - DNA, 414 bp, Zea mays
  Clone ID: MRT4577_353C.1
ggaaaaacgagatgaagtagcataaacgaagcctgaattcagtttacaaggtgtggggagtaagtcttagccaaaggtccttgaaagtaaccaatcttagccactttttgatttggtttaggaataagtgattcatatttgctgaaggtcactagtacaagttgaagagaggaggaagcttctacatcagtgtttagtcgaagcatcttatggcacatgaagtaggcaacggagaaacgaagaagggattgagctacgtgctcatcatgtttacaaggggaaaagacggtgatgtctttaatgtaccttacaattcctatgtgtaggattcaaggccgtggttataatttcgtatgaagttgtacattgtgctacccctataaataggtgagaaatgtccattgttcattgtgc

SEQ ID NO: 113945 - DNA, 800 bp, Zea mays
  Clone ID: MRT4577_35400C.1
ggggccggcagatccccctcctgctcatccgccttcctttctcgaagcgcccaatttattaccttcccctaatcccgcagccttgccagaagccaaattggtgctcctcttatctcgccgcgccgccaccgctccatttccgctcccccagcccccccaaaagaacctcgtaaccctactcgcgggattccgcaggccgccgcttgcttagggttcatcactcctgttcacacccgatggccgtggacgaggcgagcagcagtggcggtggggaggaggggtgcgggtcgtggacccgcgagcaggagaaggcgttcgagaacgcggtggcgacgatgggcggggaggaggacggggacgcgaggtgggagaagctagcggaggccgtcgaggggaagacgccggaggaggtcaggcggcactacgagctgctggtggaggacgtcgacggcatcgagtcgggccgcgtcccgcttccggcgtacgcagctgacggcgctgccgaggaagggggcggtggcgggaagaagggaagtggcggaggagggacccatggggacaaggggtcggcgaagtccgccgagcaggagcgtaggaagggcatcgcctggacagaggacgagcacagattgttcctccttggacttgaaaagtatggcaaaggtgactggcggagcatctcgcggaactttgtgatctcaaggacgccgactcaagtagctagtcatgcacagaagtactttatccgtctgaactcaatgaacagagaaaggcggcgatcaagtatacatgacatcacc

SEQ ID NO: 113946 - DNA, 822 bp, Zea mays
  unsure (1)..(822): unsure at all n locations
  Clone ID: MRT4577_35401C.1
cgattgttttgtgaagacgctaaagaatgatgcttcctgccaaactttgcaagactgggatcttggaatgtgattatgttcttgacattggagcaggttcaaaagctgtttgtgaggaaagcgacaagctgaagatagagtttttgcagtcaggtggcgtacaattgacgcacagggtttttcttctatagacaaaaggggagaaatgacacctncccccctcgagaattggggaacaaggacagatctgacacctcgattgcgagaaataaaaataacagccgacagttgcatgatccctgaacgaataaattcagaactagaaaacagatgtcagtaaacaacatgtggtgaatgttggaacttgaactgctctagttcagtgggcatctgttgttgcatgtttgggatggatttaatgtttcgttttttttcttccttgtactgatgctgatcggtaacgatcactgtgtgtgaagtgcttgattgttatgtggtatcatgagaatgaataaacataaaaaaaaaaaaaaaaaaaaacggaaaaaaaaaaaaaaaaaaaaaaaaaaaaaaaaaaaaaaaaaaaaaaaaaaaaaaaaaaaaaaaaaaaaaaaaaaaaaaaaaaaaaaaaaaaaaaaaaaaaaaaaaaaaagggggggggcccttttaaaggatccaagtttacttccccgtgtttgcaacgtataattttttttttggggcccctaaaataaaattccctggccgctttttaaaaacgtcggactgggaaaaaccctggctttccccaatttaatgcctttggagaaaatcccctttttc

SEQ ID NO: 113947 - DNA, 3091 bp, Zea mays
  Clone ID: MRT4577_35402C.1
cctcgaggccggccggggggcctagttgggtccgatgggaagcgatgggagacacggccctcccacaatccggtccaacaccaacacacgctgccatgccatgaaatatccccgcagttaaacagctcagttcagctgatacctcgccggcagatccccctcctgctcatccgccttcctttctcgaagcgcccaatttattaccttcccctaatcccgcagccttgccagaagccaaattggtgctcctcttatctcgccgcgccgccaccgctccatttccgctcccccagcccccccaaaagaacctcgtaaccctactcgcgggattccgcaggccgccgcttgcttagggttcatcactcctgttcacacccgatggccgtggacgaggcgagcagcagtggcggtggggaggaggggtgcggatcgtggaacccaccagcaggaaaaggcgttcgagaacgcggaggcgacgatgggcggggaggaggacggggacgccggccgggtgtatcgtagtggacttagactgctcttggtgagatcttgaggtcgattcctcgaatcgcattgaatttactgcgtttttttaaaaaaaaaaaaaaaaaaaaaaaaaaaaaaaaaaaaaaaaaaaaaaaaaaaaaaaaaaccgtccgatctctcctttccttttgcgattgggtctgtccctcccggccgcgacaaccctttcccttctctgcttgcttgctgctgcagtgctgcctccccctcgcccagcagcagggagcagccatgccaggggaccacggctccaagggcgacatctccttcgccggacgcttcacggccagcgccatcgcagcatgcttcgcagagatatgtaccatcccgctcgacacggccaaggtcaggctccagctgcagaagaacgtcgtcgccgccgccgcctccggggacgccgcgccagcgcttcccaagtaccgcggcctgctcggaactgccgccaccatcgctagggaggaaggggccgcagcgctctggaagggcatcgtcccgggcctccaccgacagtgcatctacggggggctccgcattggcctctacgagcctgtcaaatccttctacgtcggcaaagaccacgttggggatgtccctttgtccaagaagatagccgccggcttcacaactggtgccatcgctatcagcatcgccaaccctactgaccttgtcaaggtcaggctccaggccgagggcaagcttgcgcctggtgtgccacgccgctacactggcgcaatggatgcttattccaagattgctagacaggaaggggttgccgctctgtggactggccttggaccaaatgtagcgcggaatgctatcatcaatgctgctgagttggccagttatgatcaagtcaagcagtcaattttgaaactccctgggttcaaagatgatgtggtcacccacctttttgctggtcttggtgctggcttctttgctgtttgtgttggttccccagttgatgtggttaagtcgagaatgatgggtgactcagcctacaaaagcactctcgattgttttgtgaagacgctaaagaatgatggccctttggcattttacaaaggcttcctgccaaactttgcaagactgggatcttggaatgtgattatgttcttgacattggagcaggttcaaaagctgtttgtgaggaaagcgacaagctgaagatagagtttttgcagtcaggtggcgtacaattgacgcacagggtttttcttctatagacaaaaggggagaaatgacacctcccccctcgagaattggggaacaaggacagatctgacacctcaattgcgagaaataaaaataacagccgacagttgcatgatccctgaacgaataaattcagaactagaaaacagatgtcagtaaacaacatgtggtgaatgttggaacttgaactgctctagttcagtgggcatctgttgttgcatgcttgggatggatttaatgtttcgttttttttcttccttgtactgaagtgctctgatcggtaacgatcactgtgtgtgaagtgcttgattgttatgtggtatcatgagaatgaataaacataataatggagctgtttttttattttttactgaaaaaaaattttttgataagatgcggtctcgagccgaaggaaagtggcggaggagggacccatggggacaaggggtcggcgaagtccgccgagcaggagcgtaggaagggcatcgcctggacagaggacgagcacagattgttcctccttggacttgaaaagtatggcaaaggtgactggcggagcatctcgcggaactttgtgatctcaaggacgccgactcaagtagctagtcatgcacagaagtactttatccgtctgaactcaatgaacagagaaaggcggcgatcaagtatacatgacatcaccagtgtgaacaatggagatccatcaactgcacagggtccaatcacaggccaaacaaatggtcaggctgcaaatcctggaaaaccatctaagcaatccccgcagccagcgaatacacctccaggcgtcgatgcttatggcacaacaattggacagccagttggtggcccccttgtctcagctgttggaactcccgttacactacctgtttccgctccacctcatctggcctatggcatgcgtgccccggttccaggagccgtagtacctggtgctccagtaaacattgctccgatgccctatccaatgccacccccaccatctcatgggtgacagggtgagggacacatttcaaatgctgtgtagcgtctaaacaaacccataatctccccctatgccagcattttgcgggtgtgctgctatgtctcaataaagcaatgccaataaacccttgtacattacaaactgttgtcacatgttgcattgaggacattgcagattgtgtactttgtgttgcatgcaaactttttcatgtacatctccaaaatccaagtgtttctcgttatggcagcttgtacttcagtcagtacctgtgatatgtaaatgtgtaccagctggaacaagagtaagatactgtcgcctgtttctcatgtc

SEQ ID NO: 113948 - DNA, 432 bp, Zea mays
  Clone ID: MRT4577_35403C.1
attcggctcgagcatcataggccacggtttttgctgcaggtccgctcttcattttatctgggggccatgactacaagaaaagggggatgaatgagccaggggctgtagaggagcttgcgtgtatgctgaccaaggggtcagcacggggaaagaaagactcagatggggctttgttcaacctctcaacacacccagaaggctgaggacggatgcttgagcaatttgcagtagcatctataattgggtcactgaggaatgatacccatggggaggaagctgctggtgctctgtctctgctgctgaatcaccctatcatcgcgcaccttgttggaagctctgaaacagagaccactagcctagttgggttcaatacgaatgggactccaatgggcaaggagaacgcattgtcagctttgactgatatatgccgga

SEQ ID NO: 113949 - DNA, 353 bp, Zea mays
  Clone ID: MRT4577_35404C.1
cgcctgcaggtaccggtccggaattaattcccgggtcgacgagctcactagtcggcggccgccctttttttttttttttttttttttttttttttttttttttttttttaatttcgaattcgaactatccgttttgtattcgtatccgacagtattcgtattcgtatccgtattcgaattaaaatatgggaaataggggcattcgaatccgttttacacgtatccgatccaaataaatagcgccgctgccccggtcccgtgagccgggggggaggagttactccaatgaccatgtccgtcacggagggcggaggcggaaccgcatgccttttgcatttcgagaccgctgaaaa

SEQ ID NO: 113950 - DNA, 372 bp, Zea mays
  Clone ID: MRT4577_35405C.1
aacaggcaaccaggaacttgggttcatccattaactcgtttttaccagcggaagaaataacttttgccaataaaaaaacataacataattttcctaacacctcacattacaacaaaaattttcatcccataaccccaacccaaacttttggtggcacccgattttacaaaaaaaacactttgggtttaaacccaacagggttttgaacgaaccaagaaaataacaaggggaattggactttaattattatggggaaggcttcacagccttgaatgctggatgaagcaacccaagctcatcctttgtctcaagggggggggtgggctcggtcctgatccttttcactcttctggttggtaaggaactgggggg

SEQ ID NO: 113951 - DNA, 286 bp, Zea mays
  Clone ID: MRT4577_35406C.1
ctccgcactatcaatcgagagtggactgataatctcattgagggttacgcaaaaacatcttagtttgcatgactttgccataggtacactaccccacacacaaacgtggtttaagcgttcactgaagctaacctaaaaagcacaccctatccatggacactatatccccgattatacctaccatgtgcacgtgcacctgctacaacattgatgtgaactcaacgcgtaagatacacacccacacggaggcattagttctactgcatacaaaggctcgatgagaccg

SEQ ID NO: 113952 - DNA, 574 bp, Zea mays
  Clone ID: MRT4577_35407C.1
gggtgggggttttttttttttttttttttttttttttttttttttttttttttttttttttttttttttttttttttttttttttttttttttttttttttttttttttttttaaaaaaagcccctttttaattttttcttttttaacggggggggggggggggccccaaaaattacttggttgccaggaaaaaccacccctaaccttttttccccccttttttgttaaaagtcccttaaacccgtttggggggccagggaataaaacccccccccctaaaattaaaggccccccccaccggtttttggggcttttttttccaaaagaaaaggggcccccaaaacccccccgggagaaaactaatccttttgggggggaaaacttttttcggccggaaactaccccaatcccaaaaaaaaaaggggggggggctgccttttgacggttttaaactttaaaaacggggatctagccccaattaaccaaaaccccttcctgggtttaaaaaaatgttaaaaaggggcctaaggaaatttccggaacccggttttgggttgaaaaaacccaaaccca

SEQ ID NO: 113953 - DNA, 271 bp, Zea mays
  unsure (1)..(271): unsure at all n locations
  Clone ID: MRT4577_35408C.1
ggnacaccgncaacnaccgcgaggccnacggcgnanccgccggcaacggcgngcncagggggcacaaaaccccgcgccggggcgggggcgnggagccgcacaagancgaggaaccggccnggcggnagcgcaggggcccgcgcgacaggcggacggccacgaggaggcggagcgcccccgcggcggcgacgncggcggcggagacggggaccncgaaggagacggcgacgngcgacggcgcggcgagggcngacaccgcgccgggggagaa

SEQ ID NO: 113954 - DNA, 3888 bp, Zea mays
  Clone ID: MRT4577_35409C.1
atgccggagccatccaccaccgaggggcgacgtatccagggcgaactcaaggatctcctggaaaatgccacagtccgacgagccgagagctctgcctcccgaaggcgagggtgccccttggagcatcgcgcagcgtcctcccgacgcatacgggaggcctcggtccacactgggcgcacaggggacgggacacatgcagctctggaccgcctcagcagcgagcaacactgccgcgaccgtcgagcccgcctcgaggaaagggtgcgccgaggctaccaccccaagcgtggaggacgatacgacagtgaggaggatcagatcccctcacccgaaccaccaggtacatacgtgcgccctgggaactcatgggatctccggagttgccgtcagcagctagggaaatccctgcgagagtacatccggcggttttcaaagcagtgcaccgagttgcccaacatcaccgactcggacgtcatcggggcattcctcgccggcagcacttgccgggacctgcgtggcacgaagaagaagaccaggaagaaggtgcaagcgaaacacaacgtcgttgatgcggatctcgtcgctgctgccgaacacagaaatcctcggaaacctcccgaaggagccaacatgttcgacaagatgctcaacgagtcgtgcctctatcacaggggtctcgtcaagcacacccttgaagagtgcgacatgctccgacgttacttcaataaggctggacccttggcagaaggtggcaaggaccaaggcaacaacaagaaggggggcaacaaggaagaagagttcccggaggtccacaactgtttcatgatctacgacggacaagtggtgaatgcttcggctcgacaccgcaagcaagagcgccgggaggtctgctcggtgaaggtagcaacgccagtctacctagactggtccgacaaacccattaccttcgaccaaggcgaccaccccgactgcataccgagcccaggaaggtacccgcttgtcgtcgaccctgtcatcggcaacgctaggctctccaaggtcctcatggacggaggcagcagcctcaacatcatctacgctgagaccctagggctcttgggggtcgatctgtccacgatctgggccggtgcatcaccttttcacgggattgtccccggcaagcgtgtccttcccctcgggcaacttgatttgcccgtctgcttcggaactccctccaacttccgaaataaaaccctcactttcgaggtggtcgggttccgagggacctatcacgcggtgctgggaagaccgtgctacgataagttcatggccgtccccaactacacgtacctcaagctcaagatgtcaggccccaacggaaccatcaccgtcggatccacataccgccacgcttacgagtgcgacgtggaatgtgtggagtacgccgaggccatcgccgacctggattgcctctccaaagaggcgcccgatgcgaagcggcacgccgacagctttgaaccagctgaggcggttaagtctgtctctctcgaccccagcaacaacgccggcaagaaagaaacagtgctcgtcgactttctccgcgcaaacgccgaaatttttgcgtggagtccctcagacatgcccggcataccgagggatgtcgccgagcactcgctggacatccgagccggtgcccgacccgtgaaacagcacctgcgccgttttgatgaagaaaagcgtagagccataggcgaggaggtccacaagctaatggctgcagggttcatcaaagatgtattccatccagaatggttagctaaccctatgattgtaaagaaaaaaggtgggaaatggaggatgtgcgtagactacactgggttaaataaagcatgtccaaaggttccctaccctctgcctcgcatcgatcaaattgtggactgcatcgctgggtgcgaaaccctgtctttccttgatgcctattcaggctatcaccaaatcaagatgaaagaatccgaccagctcgcgacttcttttatcacaccttttggcatgtattgttatactactatgccatttggcttgagaaatgcaggtgcaacataccaaaggtgcatgaaccacgtgttcggagagcacatcggcagaacggtcgaggcttacgtcgatgacatcgttgtcaaaacaaggaaagcctccgacctccactctgatcttgagataacattcaggtgtctaagagcgaagggcgtaaaactcaatcccaagaagtgtgtcttcggggtcccccgaggcatgctcctagggttcatcgtctccgcacgaggcatcgaggccaacctggagaaaatcgtagccatcaccaacatgggacccatcaaagatttaaaaggggtccaaagggtcatgggatgccttgcggctctaagccgcttcatctcgcgccttggcgagaaaggattgcccttgtaccgcctcctaaggaaggccgagcgctttacttggactcccgaggccgaagaagccctcggaaacttaaaggcgctccttactaaagcacccatcttgcgaggtgctatccgagaccaaaatccactacccacaaatccagaagctactgtacgcagtaattctaacacggcgaaagctgcgacactacttcgagtctcatccggtgactgtggtgtcatccttcccctgggagagatcatccagtgccgagaggcctcaggtaggatagcaaaatgggcagtggaactcatgggggaaacactttcatttgcccctcggaaggccataaaatccgaagtcttggctgacttcctggctgaatgggtcgacacccaattgccaacagctccgatccaggctgaactttggaccatgtacttcgatgggtcgcttatgaaatccggagcaggagctcgcttgctcttcatctcatccctcgggaaacatgtgcgctacgtgatacgtctccattttccggcgtcaaacaatgtggccgaatatgaggccttggttaatgggttgcgtatcgccgtcgagctaggggttcggcgcctcgacgctcgtggcgactcgcagcttgtcattgaccaagtcatgaagaactctcactgccacgatcgaaaaatggaggcctactatgacgaagttcgacgcttggaagataagttatatgggctggaactcaaccatgtggctcgacggtacaacgagactgcggatgagctggctaaaatagcctcgggacagacgacggctcccccgaacgtcttctccagggacatatatcaatcatccgtcaaactcgacgacgcacccaaacccgaggggacctcggcccagcccgaggtaccctcggccgccaagggtgaggccctgcgcgtcgagagagagcagaacggggttacgccaaacctaaactggcagaccccgtatctggaatatctcctccgaggagagctgcccctcgacaaggccgaagcttggcgactagctcggcgcgccaagtcgtttgttttactaggtgatgaaaaagagttgtaccaccgtagcccctcaggcattctccaaagatgcatatccgtcgcccaaggacaagagctgttacaggaaatacactcgggggcttgcggtcaccatgcagcacctcgagccctcgtaggaaacgctttccgacaaggtttctactggccgaccgcggtggccgacgccactaggattgtacgctcctgccgagggtgtcaattctacgcgagacgaatgcatctgaccgctcaggccctactaacaatatctatcacatggctgtttgccgtatggggtctggacctcgttggtcccttgcagaaggcacccgggggcttcacgcacctgctggatgccatcgacaaattcttcaagtga

SEQ ID NO: 113955 - DNA, 373 bp, Zea mays
  Clone ID: MRT4577_3540C.1
cacaggacagaactacggagatacttaaaaggaatatgaatggctatcacaagcagggcccatccacggtaactaacagtataactactcagctgctatgtgtgaatgtacctggaaaaacgtacggctcaaaacatttcattaattcatttaatcgcactgttctttttaaggaaatacttctaatgtgacaagagtcttagcaatatacttgtagggtgcaccaacacaaggcacaaataggctgaggaaggtacaatcaagttctcttcactgggcacaacttgagtagcccaggtggaggaatagacaccgagctgggcaaagtgcatgtgaatccttcacgtgttttatgaggctaagatcaagtgat

SEQ ID NO: 113956 - DNA, 1170 bp, Zea mays
  Clone ID: MRT4577_35410C.1
atggggttgcgccaaactgaaactggcagaccccgtacctggaatatctcctccaaggagagctacccctcgacaaggccgaagctcggtgactggcgtggcgcgccaagtcgttcgtcttactgggtgatgaaaaggagctctaccactgtagcccctcaggcattctccaatgatgcatatctgtcgcccaaggacaggagctattgcaagaaatacactcgggggcttgcggtcaccatgcagcacctcgagccctcgtggggaacgccttccgacaaggtttctactagccgaccgcggtggccgacgccactaggatttgtggggtctagacctcgtcagtcccttgcagaaggcacccgggggcttctcgcacctgctgttgccattgacaaattctccaagtggatcgaggtccgacccttaaccaacatcaggtccgagcaggcagtggcattcttcacgaacatcatccatcgctttggggtccgaaactccatcatcaccgacaatggcacacagttcactaggaagaagttcctggacttctgcgaggaccaccacatccgtgtggactgggccgccgtagctcaccccatgacgaatgggcaggtggagcgtgccaacggtatgattctgcaaggacttaaaccgaggatctacaacgacctcaacaagtttggcaagcagtggatgaaagagctaccctcggtggtctggagtctgaggacgacgccgagccgagccacgggtttctcgccgttctttctagtctatggggctgaggctatcttacccacagacttagaatatggttccctgaggacaaaggagtacgatgaccgaagcaaccagaccagccaagaagactcactagaccagctcgaagaggctcgggacgtggccttactacactcggcacggtatcagcagtctctgcgacgctaccacgcccgaggggtttggcctcgaggcttccaattgggagacttggtacttcggctgcggcaagacgcccgagggcgccacaagcttactcctccctgggaagggtcgttcatcatcgccaagattttgaagcccggaacatacaagctggccagcgatcaaggcaaggtctacagcaacgcttggaacatccaacagctacgtcgcttctacccttaa

SEQ ID NO: 113957 - DNA, 265 bp, Zea mays
  Clone ID: MRT4577_35411C.1
gaaaaaaaatcgttatgcatcacttttttttttttttacgaaaaaaaaggggagggcaacacttttgtgcctgtgaacccccttttagaggggggaatataaacgtgtgtatgtccctgattttttccaaagaccaaaccaatggggggtgatcctctcacacaaaaccggtgaaggatccggccgcagggtcactctaacaggggcctttgtccggggttcggccgtccggccaaaaaggagccggtttttgggaacggggttc

SEQ ID NO: 113958 - DNA, 1110 bp, Zea mays
  unsure (1)..(1110): unsure at all n locations
  Clone ID: MRT4577_35412C.1
cgttgctgtcgcccatggcctcaccaccgtgaggatcgagaaggttgccctgtaccccgggaatgtcatcgccattcacatgagcaagccgcatgggttcagctacaagagcgggcagtacatctacgtcaactgcggcgaggtctcgcccttcgagtggcacccgttcaccatcacctcggcgcccggcgacgactacctgagcatgcacatccggtgccgcggcgactggacggccagcttcagggcgctcttcgcgcaggtgtgccggccgcccgccgccggccagagcggcctcctgcgggccgacttcgcgtcctccacggcggccggcggcggcgggaagctgccgaagctgctgatcgacgggccctacggcgcccccgcgcaggactaccgcaagtacgacgtgctcctcctcatcggtctcggcatcggcgccaccccgctcatcagcatcgtcaaggacgtgctcaacaacatctccgacaacaaagacgaagagcagccggcggagttcatgacgcggcgcgtgtacttctactggtgcacgcgggaggagggctccttcgagtggttccgcggcgtgatgaacgaggtggcggagcgcgacgcccgcggcgacgtggtggagctccacaaccactgcaccagcgtgtacgaggaaggcgacgcgcggtcggcgctgctggtgatgctgcaggcgctgcaccacgccaagagcggcgtcgacgtggtgtccgggacgcgggtgcgcacgcacttcgcgcggcccaactggcgggacgtcttcaagcgggtggcctgcaaccaccagggccagcgcgtcggcgtcttctactgcggcgaccagaaggtcacgccggagctccgacgcctgtcgcaggacttctcgcacaagaccaccaccaagttcgtcttccacaaggagaacttctgatgtggaccaccacgaagcaggacatgatagtttcattcgtgaagcaagttattcctggtgtgttttagggtaggtcaaaaacgcttgacatatgtatatgtggataataacgtatgtagtatctagtaattaagcaagattaaaatttatcttttacggaggagngggaa

SEQ ID NO: 113959 - DNA, 1689 bp, Zea mays
  Clone ID: MRT4577_35413C.1
atgccggaaccatccaccaccgaggggcggtgtatccagggagagctcaagaatctcctggaagatgccacggtccgacgggtcgagagctctgcctcccgaaggcaggggtaccccccggagcattgcgccgcgacttcccgattcatgcgggaagccttggtccacaccgggcgcacgcggaacacagcgcctgcggccccgggtcgcctcggcaacgagcaccaccactgcgaccgtcgagcccacctcgacgagaagggcacatacgtgcgccctgggaactcctgggatctccgaagctgtcgccagcagccggaagagtccctgcgggactacatgcgacgattttcgaagcagcacaccgagctgcccaacatcaccgactcggatgtcatcggcgctttcctcgctagcaccacttgccgcgacctggtgagcaagctgggttgcaagactcccaccagggcgagcgagctgatggacatcgccaccaagttcgcctctgggcaggaggcggtcgaggccatcttccggaaggacaagcagcctcaggggcgccagctggaaatcgtccccgaggcatccgctcagcgcggcgcgaggaagaagggcaagaagaagtcgcaagcgaaatgcgacgccgccgacgcggaccttgtcgctgccgccgagcacaggaaccctcggaagcctcccggaggcgccaacctgttcgacaagatgctcaaggagtcgtgcccctatcatcagggtcccgtcaagcacacccttgaggaatgcgtcatgcttcggtgctactttcacaaggccgggccaccggcggaaggtggcagagcccacaacaacaacaagaaggaggatcacaaggcagaggagttccccgaggtccacgactgcttcatgatctatggtgggcatgtggtgaacgcctcggctcggcaccgcaagcaagagcgtcgggaggtctgctcggtaaaggtggcggcaccagtctacctagactggtccgacaagcccatcaccttcgaccagggcgaccaccccgaccgcgtgccgagcccagggaagtactcgctcgttgtcgatcctgtcatcgacaacattaggcttaccaaggtcctcatggacggaggcagcaacctcaacatcatctacgccaagaccctcgggctcctgcagatcgatctgtcctcgatccgggccggctcggcgccttttcacgggatcatacccgggaaacgcgtccaacccctcgggcaactcgatctgcccatctgcttcgggactccctccaacttccgaaaggaaaccctcacgttcgaggtggtcgggttccgaggaacctaccacgcagtgctggggagactatgctacgctaagttcatggtcgtccccaactacacctacctcaagctcaagatgtcgggccccaacggggtcatcaccgtcggctccacgtaccgacacgcgtacgaatgcgacatggagtgcgtggagtacgccgaggccctcgccgaatccgaggccctcatcgccgacctggagagcctctctaaggaggcgccagatgcaaagcgccacatcggcaacttcgagccagctgagacggttaagtccgtccctctcgaccccagcaacgacgcctccaagcagatccagatcggctccaagctcgaccccaaatag

SEQ ID NO: 113960 - DNA, 524 bp, Zea mays
  unsure (1)..(524): unsure at all n locations
  Clone ID: MRT4577_35414C.1
atagtcccaaagaatataccaagagacatgaaccttcaagagaaactgataataataaggtatgacctgtctgaatccttgttttatacatacatatgtgggttcctgggaagtttggaagcaccggaattcttgtttatttgaaggaactctgcctattatccatgcgctccttcagaccataggagatgagtgcagtttatggtgcatggctggagcatcaaagtttagtgaattactcgcaaggtcgttggtctagattgtctaatatatagagtagtttatttgatcagcagatcaggttctggtcatgtatagaaccactcaccccttcctttttcggttagggtgggtgtgtggtgtttgtttttcggcttgggtttctttctaactccagcatgtcttgtatttctctatcttaattaaatgtcacacagatctcctgcatagtccgagaaaaaaatatgggtgctttcatgcagaaacatcttttagatcaattcactggtcaaatgctgttggng

SEQ ID NO: 113961 - DNA, 1908 bp, Zea mays
  Clone ID: MRT4577_35415C.1
atgcaggccaagctcgacgaggaagcaggacaacttgtgcagctccggcaaaatatcgagcaggagtgggcaggccgagcactagccggggaagcgcgtcatcaggcccaggacgtccagcaccgtatcactgacgatgccagggtaaggctgcccccggcctccagcggggtcggccagaacctggctgcagcggtgatactactccgagcgatgccggagccatccaccaccgaggggcggcgtatccagggagaactcaagaatctcctggaggatgccgcggtccagcgggccgagagctctgcctcccgaaggcaagggagccccccggagcatcgcgcagcgacttcccaattcatgcgggaggccttggtccacaccgggcgcacgcgggacgcgacgcctgcagccccgggtcgcctcggcaacgagcaccaccgtcgtgaccgtcgagcccgcctcgacgagaaggtgcaccgaggctaccaccccaggcgtgggggacgctacgatagtggggaggatcggagcccctcgcccgaaccaccaggtccgcaagccttcagccgggccatacgacgggcgccgttcccgacccggttccgatccccgactaccatcaccaagtactcgggggaaacaaggccggaactgtggcttgcggactaccggctggcctgccagctaggtggaacggacaatgacaacctcatcatctgcaacctccccctgttcctctccgacgccgcccgagcctggcaggagcatctgcctcctgcgcagatctccaactgggatgatctggtcaaagccttcgctggaaacttccagggcacgaggcggtcgaggccatcttccgaaaggacaagcagcctcagggacgccagcaggaagacgtccctgaggcgtccgcccagcgtggcacgaagaagaaggcaaaaaaggtcacaagcgaaacgcgacgccgccgacgcagatcttatcgctgccgccgagcacaggaaccttcggaagcctccaggaggggccaacctattcgacaagatgctcaaggagtcatgcccctaccaccagggtcccgtcaagcacacccttgaggaatgcgtcatgcttcggtgctacttccataaggctgggcccccggtggaaggtggcaaaggccaggacaacgacaagaaggagggcgacaaggcagaggagttccccaaggtccacggctgtttcatgatctacggtgggcgagtggcgaacgcctcggctcggcaccgcaagcaggagcgccaggaggtctgctcggtaaaggtggcggcgccagtctacctagactggtccgacaagcccatcaccttcgaccaaggcgaccaccccgactgtgtgccaagccttggaaagtacccgctcgtcgtcgaccccgtcatcggcaacgtcaggctcaccaaggtcctcatggacgggggcagcagcctcaacatcatctacgccgagaccctcgggctcttggaaatcgatttgtccacgatccgggccggcgcggcaccctttcaagggatcatccccgggaagcacgtcctgctccttggacaactcgatctgcccatctgcttcggaactccctccaacttccgcagagaaaccctcacgtttgaggtggtcggaccgtgctacgccaagttcatggtcgtccccaactacacctacctcaggctcaagatgtcgggccccaacggggtcatcaccgtcggatccacgtaccgacacgtgtacgaatgcgacgtggagtgcgtggagtacgctgaggccctcgccgaatccgaggccctcatcgccgacctggcgtgcctctccaaggaggtgcctgatgcgaagcgccacactggcaactttgagccaacaagaggcggttaa

SEQ ID NO: 113962 - DNA, 1773 bp, Zea mays
  Clone ID: MRT4577_35416C.1
atggggcccatcaaggacttgaaaggcgtacagagggtcacgggatgccttgcggctctgagccgtttcatctcacgcctcggcaaaagaggcctgcctctgtaccgcctcttaaggaaggccgagtgcttcacttggacccttgaggccgaggaagccctcgggaacctgaaggcgctcctcacgaacgcgcccatcttggtgcctcccgccgccggagaagccctcttgatctacatcgccgctaccactcaggtggttagcgccgcgatcgtggttgagagacgagaagaggggcatgcattgcccgtccagaggccagtctacttcatcagtgagttgcgacactacttcgagtctcatccggtgactgtggtgtcatccttccccctgggggagatcatccagtgccgagaggcctcgggtaggattgcaaagtgggcggtggaaatcatgggcgagacaatctcgttcgcccctcgtaaggccatcaagtcccaagtcttggcggactttgtggatgaatgggtcgatacccagctctcgacaactctgatccaaccggaactctggaccatgtttttcgacgggtcgctgatgaagacaggggcaggcgtaggcctgctcttcatctcgcccctcgggaagcacctacgctacgtgctacgcctccacttcccggcgtccaacaatgtggccgagtacgaggctctggtcaacgggttgcgcatcgccatcgagttagggctcgtcattgaccaagtcatgaagaactcccactaccgcgacctgaagatggaagcctactgcgatgaggttcggcgcctggaggacaagttctacgggctcgagctcaaccacatcgcccgacgctacaacgagactgcggacgagctggctaagatagcctcgggccaaacaacggttcccccggacgtcttctcccgagacctgcatcaaccctccatcaagactgacgacacgcccgagcccgagaaggcctcggcccagcccgaggcaccctcggctcagcacgaggcaccctcggcccccgaagcacctcgagcccttgttggaaacgccttccgacaaggcttctactggccgaccgtggtggccgacgccactagaattgcccgcacctgccaagggtgtcaattctatgcaaggcagacccgcctgcccgctcaggctctgcagaccatacccatcacctggtcgtttgctgtgtggggtgtggacctcgtcggccccttgcagaaggcacccgggggctacacgcacctgctggtcaccatcgacaaattctccaagtggatcgagatccgacccctaaacagcatcaggtccgaacaggcggtggcgttcttcaccaacatcatccatcgctttggggtcccgaactccatcatcaccgacaacggcacccagttcaccggcagaaagttcctggacttctgcgaggatcaccacatctgggtggactgggccgccgtggctcaccccatgacgaatgggcaagtagagtgtgccaacggcatgatcctgcaaggactcaagccgcggatctgcaacgacctcaacaagttcggcaagcgatggatgaaggagctcccctcggtggtctggagcctgaggacaacgccgagccgagccatgggcttcacaccattctttctagtctatggggccgaggccatcttgcccatagacttagaatacggttccccgaggacgagggcctacgacgaccaaagcaaccgagctaactga

SEQ ID NO: 113963 - DNA, 1473 bp, Zea mays
  Clone ID: MRT4577_35417C.1
atggggggagagggtgagggcgagtggggctcggggcacaagtggccgagggcgaggtggggcgagtcccacgcgcgacgtgggcgcggggaaggcgggcgcgagcagctcggcggcggttacgcggggacgacggggctgacaagccgggcccgcaacgcagagagagagaagaaagcgggtgcgggcgcgagagaagcggggctgacgggttgggcccacgggcagagagagagcgagggagcgggcgcgcggggggaagcggcagcgccgacgggtggggccgggcgagcagtgagagagggaggcggggtgttacacctactcctcatctcgcccctcgggaagcacctaggctacgtgctacgcctccatttcccggcgtccaacaatgtggctgagtacgaggctctggtcaacgggttgtggatcgccatcgagctaggggtccgacgcctcgacgctcgcggtgactcgcagctcgtcatcgaccaagtcatgaagaactctcactgccgcgacccgaagatggaggcctactacgatgaggttcggcgcctggaagacaagttctacgggctcgagctcaaccacatcgcccggcgctacaacgagactgtggacgagctggctaaaatagcctcggggcgaacaacgaaggcacccgggggctacacgcacctgttggtcgccatcgacaaattctccaagtggatcgaggtccgacccctaaatagcatcaggtccgaacaggcggtggcgttcttcaccaacatcatccatcgttttggggtcccgaactccatcatcaccgacaacggcacccagttcaccgacagaaagttcctggacttctgcgaggatcaccacatccgggtgaactgggccgtcgtggctcaccccatgacgaatgggcaagtagagcgtgccaacggcatgattctacaaggactcaagcctcgtatctacaacgacctcaacaagttcggcaagcgatggatgaaggaactcccctcggtggtctggaatctgaggacaacgtcgagccgagccacgggcttcacgtcgttctttctagtctatggggccgaggccatcttgcccacagacttagaatacggttccccgaggacgagggcctatgtcgaccaaagcaaccaagctagtcgagaagactcgctggaccagctggaagaggctcgggacatggccttaccacactcggcgcggtaccagcagtccctgcgacgctaccatgcccgaggggtccggtcccgagacctccaggtgggcgacctagtgcttcggctgcgacaagacgcccgagggcggcacaagctcacgcctccctgggaagggccgttcgtcatcgccaaagttctgaagcccggaacgtacaagctggccaacagtcaaggcgaggtctacagcaacgcttggaacatccaacagctacgtcacttctacccttaa

SEQ ID NO: 113964 - DNA, 2049 bp, Zea mays
  Clone ID: MRT4577_35418C.1
atgccggagccatccaccaccgaggggcggcgtatccagggagaactcaagaatctcttggaggacgccgcggtacgacgggccgagagctctgcctcccgaaggcaagggtgccccctggagcatcgcgcaacgacttcccgattcgtgcgggaagcctcggtccacaccgggcgcacgcgggatgcaacgcctgcagccccgggtcgcctcggcaacgagcaccaccaccgcgaccgtcgagcccgcctctatgagaaggtgcgccgaggctaccaccccaggcgtgggggacgctacgacagcggggaggatcggagcccctcgcccgaaccacccgtaccgcaagctttcagccgggccatacgacgggcgccgttcccgacccggttccaagccccgactaccatcactaagtactcgggggaaacgaggccgaaactgtggcttgcggactaccggctggcctgccagctgggtggaatggacgatgacaacctcatcatccgtaacctccccctgttcctctccgacgccgcccgaacctggctggagcatctgcctcctgcgcagatctccaactgggacgacctggtcaaagccttcgctggaaacttccaaggcacatacgtgcgccctaggaactcttgggatctccgaagctaccgccagcagccgggggaatccctgcaggagtacatacggcggttttcgaagcagcgcaccgagctgcccaacatcaccgactcggatgtcatcggggcgttcctcgccggcaccacttgccgcgacctggtgagcaagctgggtcgcaaggctcccaccaaggcgagcgagttgatggacatcgccaccaagttcgcctctggtcaggaggcggtcgaagccatcttccggaaggacaagcagcctcagggacgccagcagggagacgtcaccgaggcgtccgcccagcacggcacgaagaagaaggccaagaagaagtcgcaagcgaaacgcaatgccaccgacgcagatcttgtcgctgccgccgagcacaggaaccctcagaagcctcccggaggggtcaacctgttcgacaagatgctcaaggagtcgtgtccctatcaccagggtcccgtcaagcacacccttgaggaatgcgtaatgcttcggtgctacttccataaggccgggcccccggtggaaggtggcaaaggccaagacaacgacaagaaggagggcgacaaggcagaggagttccctgaggtccacgactgtttcatgatctacggtgggcaagtggcgaacgcctcggctcggcaccgcaagcaggagcgccaggaggtctgctcggtgaaggtggcgacgctagtctaccttgactggtccgacaagcccatcaccttcgaccagggcggccaccctgactgcgtgccgagcccagggaagtacccactcgtcgttgaccccgtcatcggcaacgtcaggctcaccaaggtcctcatggaccgaggcagcagcctcaacatcatctacgccgagaccctcgggctcttgcaaatcgatctgtccatgatccgggccggtgtggcgccctttcacgggatcatccccgggaagcgtgtccggccccttggacaactcgatctgcccgtcttcttcgggactccctccaacttccgaaaggaaaccctcacgttcgaggtggtcgggttccgaggaacctaccacgcagtgctggggagaccatgctacgccaagttcatgatcgtccccaactacacctacctcaagctcaagatgtcgggccccaacagggtcatcaccgtcggatccacgtaccgacacgcgtacgaatgcgacgtggagtgcgtggagtacgctgaggccctcgccgagtccaaggccctcatcaccgacctggagtgcctctccaaggaggtgcctgatgcgaagcgccacgccggcaacttcaagccagcggaggcggttaagtccgtccctctcgaccccagcaacgatgcctgcaagcaagtccggatcggctccgagctcgaccccaaatag

SEQ ID NO: 113965 - DNA, 2607 bp, Zea mays
  Clone ID: MRT4577_35419C.1
atggcggaagagcagcatccgggtttgtcccatcaccttccccgccgcaggaggaggaggcggggcaaccatggccgagcaggaggcggcacctcattggctgtcgagcgagtcgacgacaccggcgccccagcgggggacacatcgggcgttgacctcgcgtctgagacgaagacgagtgtcatttccccgcaacatgccaaccccaagcggacagatgacgccagcacgctcgcgaaggacttgctcggcgttagcctcgtacctgagataacggtgcagtccgtccccgacgcgacttcgtcaccatccatcgatcaagaggtaccgtccgttttccaccctgtgccttttagattcagcttcgacccaccaagcgaccccgcttcagtggacgctttcataaaggcataccctaaccttccgaggtaccatatgtggtcaacctgggaccgactgacggcagtctcgacctacgggcccccgggttccgaggaagatgacgagcccgactctggttgggatttctccgggctcggtaaccccagtgccatgcgagacttcatgaccgcatgtgactactgcctctccgattactctgatggtggccacagccttgacgacgaggactgtggcccaagtcgcgaatgtttccacgtcgatctagggggtctcgacgaaggcaaccaccttggtatgccggaggacgacgatccccctaggcctgtgcctcgcgttgacatccttcgggagctagctgtggtcccagtccctgcggggggtcaggacacacagctcgagcgaatccgcgagatgcaggccaagctcgacgaggaagcaggacaacttgtgcagctccggcagaacatcgggcaggagtgggcaggccgagcactagcccgagaagcgcgtcatctggcccaggacgtccagcaccgcatcgctaacgatgccagggcaaggctgcccccggcttctagtggggtcggccagaacctggctgcagcagcaatactactccgagcgatgccagagccatcgaccaccgagggcggcgtatccagggagatctcaagaatctcctggaggataccgcagtccgacgggccgagagctctgcctcccgaaggcaaggatatcccccggagcatcgcgccgcgacttcccgattcatgcgggaagcctcggtccacaccgggcgcacgcgggacgcaacgcctgcagccccgggtcgcctcggcaacgagcaccaccaccgcgaccgtcgagcccacctcgacgagaagctgccgccagcagccaggagaatcccggcaagactacatccggcaattttcaaagcagcgcaccgagctgcccaacatcaccgactcagatgtcatcggcgcgttcctcgccggcaccacttgccatgacctagtgagcaagctgggtcgcaagactcccaccagggtgagcgagctgatggacatcgccaccaagttcgcctctggtcaggaggcggtcgaggccatctttcgaaaggacaagcagcctcagggacgccagcaggaagacgtccccgaggcgtccgctcagcgcgacacgaagaagaagggcaagaagaagtcgcaagcaaaacgcgacgccaccgacgcagatcttgtcgccgccgccgagcacaggaaccctcggaagcctcccggaggggccaacctgtttgacaagatgctcaaggagtcgtgcccctatcatcagggtcctgtcaagcacacccttgaggagtgcgtcatgcttcgacgctacttccataaggtcgggccctcggtggaaggtggcaaaggccatgacaacgacaagaaggagggccacaaagcagaagagttccccgaggtccacgactgcttcatgatctacggtgggcaagtggcgaacgcctcggctcggcaccgcaagcaggagcaccgggaagtttgctcggtgaaggtggcggcgccagtctacctagactggtccgacaagcccatcaccttcgaccaaggcgaccaccccgaccgcgtgctgagcccagggaagtacccgctcgttgatgatcccgtcatcggcaacgtcaggcttaccaaggtcctcatagacggaggcagcagcctcaacatcatctacgccgagaccctcgggcttttgcagatcgatctatccacgatccgggccggtgcggcgccctttcacgagatcatccccgggaagcgcgtccaacctcttgggcaactcaatctgcccgtctgcttcgggactccctccaacttccgaaaggaaaccctcacgttcgagttcatggccgtccccaactacacctacctcaagctcaagatgccgggccccaacagggtcatcaccgtcggatccacgtaccgacacgcgtatgaatgcgacgtggagtacgctgaggccctcgccgaatccgaggccctcatcgtcgacctggagagcctctccaaggaggtgccagatgcgaagcaccacgccggcaacttcgagccagcagaggcggttaagtccgtccctatcgaccccagcaacgacgcctccaagcaagtctggatcggctccgagctcgaccccaaatag

SEQ ID NO: 113966 - DNA, 504 bp, Zea mays
  Clone ID: MRT4577_3541C.1
gtcctgtgaggaagccgaggaataccgataaccgaccactcgggggctggttactacaaacacaaacagcacttcaaactatcacatcctgcttgagatgacgaccgtacccttctagactgggttattgggttgctcacggaaaataactgtatagtctggtacgacgaagatctagcaccacaactacatcgaaggggaggtggaatctctgatccaggggtcgctcctttgcactcagagcaaccccttggaacatactaagatgtcgtaggttgtgaggatgcttgaacgttaaagtctcgtcgagaggtgcaaggagtggcacaaggtcaaactggtacggcaagaggttgagctaagccctcatcagaaccttgtaatggataattgactacaccgacaacgttcacgctgaacagatgccaagaccaatgcagaagttagctagagaacagactgacactaatcatagaacatacgtagatttctgcagggcacaat

SEQ ID NO: 113967 - DNA, 313 bp, Zea mays
  Clone ID: MRT4577_35420C.1
gaacttaattagttttgtctaaattataattattaaaatggaattcaattccaacgaaacaaacagggcctaagagaatttgatgtgctagatcccataaactctttattttcatctttgatttgaaataaaaatttcaggtaaaccttgagtatcttgcccgagttgtcttcaacgaagatggcattctttacttcgacagcgtggttggcacagactcacacaccactatgattaatagtcttggagttgctggttggggagtaggcggtatcgaagcaagtcgtgcaatgcttggccagccaatgggcat

SEQ ID NO: 113968 - DNA, 486 bp, Zea mays
  unsure (1)..(486): unsure at all n locations
  Clone ID: MRT4577_35421C.1
cagactcctgacgcagtcggctgccgcagactggtagtagccggcgcgcctgtcaccgttattccttcagtattncatgncgggggnncccttgnntnntggtgggtggggtctctcctctttgttttgtgtttggtctgtttctgttatttattctgttngaatattgttctcttgtcctcctctctgcgccacataaaaccccaattttccttttattttgngaaaacccgcccccccgggatatgcgtgggaggggccccccctttttggtggggtgttttttttaatagggggggggggggggggggaaaaaggtagatatttttttttttaattaccttttttttttcaaaaaatacccccttttttttttttgtgtggtgtgggggggttcttcccatttttttttttttttgggggggccccccctccttttgtttttttttttttttcttgcgggcgtatattttttttttttttttt

SEQ ID NO: 113969 - DNA, 1260 bp, Zea mays
  Clone ID: MRT4577_35422C.1
atgggcgagacaatttcattcgctcctcggaaggccataaaatctcaagccttggcggacttcctggctgaatgggtcgacacccaattgccaacagctccgatccaggccgaactttggaccatgtacttcgacgggtcgcttatgaaaaccggagcaggcgctggcctgctcttcgtttcacccctcggaaaacatctttgctacgtgatttgcctccatttcccggtgtcaaacaacgtggccgagtacgaggctttggttaacgggttgcgcatcgccgtcgagctaggggttcgacgcctcgacgctcgtggcgactcgcagcttgtcattgaccaagtcatgaagaactcccactgccgcggtcggaagatggaggcctactgcgacgaagttcggcgcctggaagacaagttctacgggctggagctcaaccatatcgctcgacggtacaacgagactgcggatgagctggcgaaaatagccccggggcagacgacggttcccccgaacgtcttctccagggacatacatcaaccctccgtcaagatcgacgacacgcccgagcccgaggaggcctcggccgccgagggtgaggccctgcgcgtcgagggagagcggaatggggtcacgccaaacctgaacttgcaggccattcccttgcagaaggcacccgggggcttctcgcacctgctggtcgccatcgacaaattctccaagtggatcgaggtccgactcctaaccaacatcaggtccgagcaggcggtggcattcttcacaaacatcatccatcgctttggggtcccgaactccatcatcaccgacaatggcacacagttcactgggaagaagttcctagacttctgcgaggaccaccacatccgtgtggactgggccgccgtagctcaccccatgatgaatgggcaggtggagcgtgccaacggtatgattttgcagggacttaaaccgaggatctacaacgacctcaacaagtttggcaagcagtggatgaaagagctaccctcggtggtctggagtctgaggacgacgccaagccgagccacgggtttctcgccgttctttctagtctatggggccgaggtcgtcctacccacagacttagaatacgattccccgaggacaaaggcgtacgacgaccgaagcaaccagaccagccgagaagactcactggaccagctcgaagaagctcgggacgtggccttactacactcggcacggtatcagcagtctctgtga

SEQ ID NO: 113970 - DNA, 589 bp, Zea mays
  Clone ID: MRT4577_35423C.1
ccggccgggcaggttgagttcgagactatgagacgttcaatttgtcggttcccaagacatgtcccaacgtccccgacgagctgctcaacccggctaagagctggaacggcacagccgacttaagggcgaggttgagaagcttggtactcttttcatcgaaaacttcaagaagtacgaggatgaagctacaacagaggtcctcaaagctggtccccatgtatgctgttcctgcaagcactaggcccaccgcttccgactgaggggtggatcagtgtccctttcttttttcaacctttcttacacaaacaggtgaactaaattcttgtacaccaacgcgcggtcgatcgatccttcgaacgacgtcagcgacctttccccctttttcctctttgatatgatagcataattgccccatccatatggatgttttgttttcctgaacactacgaatacctggactcggagtttgtatttttcacagcagattgagatgggatgttgcttgcatgactatgggagagatttggacaatggaagtgaacaacgaatatgaattgtatcttcgaaaaaaaaaaaaaaaaaagcggcc

SEQ ID NO: 113971 - DNA, 885 bp, Zea mays
  Clone ID: MRT4577_35424C.1
atggccgagtacgaggctctggttaatgggttgcgaatcgccatcgagctaggggttcggcgcctcgacactcgtggcgactcgcagcttgtcattgaccaagtcatgaaaaactcccactgtcgcgaccggaagatggaggcctactgcgacgaagtccgatgcctagaagacaagttctacgggctagagctcaaccacatcgctcgacgatataacaagactgcggatgagctggctaaaatagcctcggggcggacaacggttcccccggacgtcttctccagagacatacatcaaccctccgtaaagaccgacgacacgcccgagcccgaggaggcctcggcccagcccgagaaggcacccgggggcttctcgcacctgctggtcgccatcgacaaattctctaagtggatcgaggtccgacccctaaccatcaggtccgagcaggcggtggcgttcttcaccaacatcatccaccgctttgggttcccgaactccatcatcatcgacaatggcacccagttcactgggaagaagttcctggacttctgtgaggaccaccacatccgtgtggactgggccgccgtagctcaccccatgacaaatgggcaggtggagcgtgccaatggtatgattctgcaaggacttaaaccgaggatctacaacgtcctcaacaagttcggcaagcggtggatgaaggagctaccctcggtagtctggagtctgaggacgacgccgagccgggccacgggtttctcaccgttctttctagtctatggggccgaggctatcttgcccacagacttagaatacggttccccgaggacaaaggcatacgacgaccgaagcaaccagaccagccgagaagactcactggactag

SEQ ID NO: 113972 - DNA, 208 bp, Zea mays
  unsure (1)..(208): unsure at all n locations
  Clone ID: MRT4577_35425C.1
gccatgatcgagtagtagagggcagcagtgttggtacttggtaggaacaagggcaggaggagcaacgctttgttttgctcttttctcctctatatgctgtgtgttgttcgggatccttataatggtttcatttttttccaaaaaaaaaaaaaggacncacgaagggcacccgcccatacactacatacatgcacactaataagcatag

SEQ ID NO: 113973 - DNA, 604 bp, Zea mays
  Clone ID: MRT4577_35426C.1
gggggagattgaaacacgggaaacccctcactttttttattgcatgcctgacaaggcccaactgaattggaacatggcgtttttaaccacggggcgggaaagaatgcccccaaaacccttcgggggggaaaaaaacaaaaaattttggggtcaaaaccaccccccacgttttttaagggtggggccccacataaagaggcccccgatttttaagcggggggaaaaaattttttggggggcttttttcggggggggaaccggttcaaccccttgggaaactcctttttggagcgcgggccgttattggtgggggcgacgaaaacaaagccctaacggtgggggaaaccggggaacccttcaaaggtggcccccagaaacccagcgaaggaaccctgcccctttggccccaaggttattggttccctaaaaaaaaccagggggcgccggggggaaacaacccttttggggcctttaaggcaccccccacggggagagggggggccttggtatcaacaaccccccaactcgttctccgggggggaaaaggggggggctcccgctttctgttctcccggccctaaggggagctctcttagccccccgg

SEQ ID NO: 113974 - DNA, 805 bp, Zea mays
  Clone ID: MRT4577_35427C.1
atcccattcccacctccattcgaaagcggaaacctcccagatttccccatctcctcccactcccccaaaaccctagctccgctcctccttccccatgtgatgggatgccgcccaaaccctacccccggtccctgaccgccgctgcctccttccccgcgacctggatgtccgcatggacggcttccgggccctgatcgccgccgcggccaccgccgtctgctgcgtcgtctgcgccatctgggcattccgctccccttccccccctccccccaagaagcagcagcccattccttcaggctgctgcagctgcgcttcctgtggttgctgcgccaataccactttccccagcgccaacggcgagatggccgtcggcggggagatgaacaaggcgccggcgccagcacctgcaacgacgggcgcctccatgatggagcagctcgtgcctgagatcaccacccacgcgctcagctacctcgactgtactagcctctgccgcctctcgatgaccaactcagccatgcgccgtgccgccaacgacgacggggcttggaaggcgctctaccacaaggattttacagcggagcaggatactataactccgcctaacggatggaaggcatactatgcagctacaaaggccatcatgaatgtgaatgccgagttctataatatcatcagggaaggatccttgccagcaatgagtcacttctggcttaactcagactatgtaaaatgtgtacatgctactggagaactttttaccggatacaatgcagtgatgaacagctggggcttgttattcact

SEQ ID NO: 113975 - DNA, 323 bp, Zea mays
  Clone ID: MRT4577_35428C.1
tgtggtgctgatcaagtggcaacggtatcagagaaggtccacggcccctggtacaaagctctgatagtctgatgtgagcatgaatgtgaatggtttggcttttgtgaatacagacggtgaaagtgtaaatccttgttccactgggtgggatgggagatatggtgttgtacagcaatttatagttgttggtcagtaggcagttcaggatttagtcaggctcgatggatggatgctaaaacgcgtctggaaatgtaaattgtggcaccttgtttgattttcgaactgaaataatgtaaataattgattgcaagttatttgtgctc

SEQ ID NO: 113976 - DNA, 2164 bp, Zea mays
  Clone ID: MRT4577_35429C.1
gcgcgcgcacaattcatgtgaaccaacacgtgatgcaatgtgtatgttctagtctgcccatacatgcgtgggcgaaatatcctagagggagttgccatactgcacgaaaccattcatgagttgcataggaaaaggctaagtggggttattcttaaaatttattttgagaaggcatacgacaaggtcaaatggccattcttattccaaactcttcggatgaaaggatttgcgcccaagtggatttcttgggttagatccttcattatgggaggtagtgttgcggttaatgtcaacgacgacgtgggaaaattcttccaaacaaagaagggattacgccaagtcgatcccctgcctcccatcctgttcaacatcgtagcagatatgccagcgatcttgattaacagggctaaagaacatgggcaagtcagtggggtagtgcctcacttaattggaggcttatctattctgcaatatgcagatgatacgatcattttcatggaaaacgacttagagaaggctcgtaatatgaagttgttgttaggcgcttttgaacaaatctcaggtctcaaaataaatttccataagagtgaagtattatgctttggagatgcccaagattctttagagagttatttggaattgtttggctgcaaacatggggattttcctctaaaatatctagggctacctatacacttcaaaaagcttagaaactcagattggaagataatagaggaacgtgtggaaaaaagattagccagttggaaagggaaacacctttcaattggaggtagactgacattgattaactcggtgttgaacagccttccgttatacatgatgtcttttttcgctctcggttcttagaaaacttattttcgctctcggttcttttggcaaggagatgagagcaagaagaaataccgccttactagatggactatcttatgtcagcccaaagaccaaggtggccttgggatccatgatctaaatattaagaacacaacgctcctaagcaaatggttattcaagcttttaacatcggacgacacttggcaacaacttattaggaacaaatatctaggctctaaacctctagtcgaagttgattggaaaaccggagactcacattttttgtctagtttaatgaaggtaaaacaagattttctatgttttggaaccttcaaaataaaaaatggatcacatgtgagattctgggaagatacctggcttggagggcaggggttgaaagatcagtaccctaggctatataacatcacaagagcaaaatttaaaactattgttgaggtgctaacaaataatgaaaccattttttcttggagacgtactttatttggatctaggctaacggagtggaatgaacttcgttagcgcattgctaacattcaattaacacaagaggatgatgtttttcattggaatctgacccaatccgggcagttctatgtgaaatcacattatcaagcattaataaaaatgaggtgcccaatctaaacaaaagactatggaaattaaaagctccgctaaagatcaaagttttcctttggtaccttaggaggggagtaatcctaactaagaataatcttgccaaacacaattggcatggaaacaaatcttgttgcttttgtcataagccagagataattaagcacttgttctttgaatatcgatttgctcgtagggtctggggtgtaatttttttagcctttgggatacctccaccttctagtgtttttaatatgtttcaaactggctagaggggtttgagcacaatcttaggaacatcattttgctaggggcggcaagcacttgttgggctctttggctaagaagaaatgatattgtttttgagaaaaaatcaatttactctcctttgcaggtgatttatgccatttcccattggctccgtacatgggcggtgctacgattgttggtgcaggtggtcaaggacttttatttccaggcctatgggtggcgacctagtcatcggattgattgccactagagtgtctgtatttctttaattttaggctgtgtgattcttgatgagcagaggcaggaagaattttcaaaaacttgtattaacttgatacaatgcgtttgaaattaataaagtcttcctattccaaaaaaatatggatat

SEQ ID NO: 113977 - DNA, 427 bp, Zea mays
  Clone ID: MRT4577_3542C.1
ggaaaacccccctttcctttttttaattcaaacattttttccgaaaacggggtcacttaaaaaggggggggggaaaaaaataaaaattcccggggacccgcccatgccactggaaaaaggttatgggggggcacaaaaaaattttgttccgatttggacgtccagccagccgtccaaaggtagaactgcccttatgcataacccctccattttatttgaaaacaggacggggtaactgaaaacccccgcgtacccccccgggatccttgaaccataacctccatttcgggggggggcatatgggccggcaaccggtctgggggttagctggccgaaaaaaaaaaaaacccgcgcgtgcatgcgggggctccctccccatggggggttccccaaccgccttcagttccagggggggggttttttttcc

SEQ ID NO: 113978 - DNA, 237 bp, Zea mays
  Clone ID: MRT4577_35430C.1
ggattagtgttctgttcttatttattgcgcttataaaagcaaaacctagggcaaagtattgtgcaccttttgacatgatgagttctttgtagtgtcggaactcaacatcaaggcctggtgaatgttgatccaataagacctctaaatcacttgtatttgggccctagagtgataataatgcttgacttgcaaagagtttgcgcccttcgttgtttgagtcttttagcacatcggcca

SEQ ID NO: 113979 - DNA, 3921 bp, Zea mays
  Clone ID: MRT4577_35431C.1
aaccacacttctgctgccaaggcaacgggaaggaggtagaagagggagagtaaagtagcgcgccgcagccgcagcgcggatgaaaggcaagggcggcgagggaacacgcggttgcttgcggaaacccgctcgactcggtctctccgcccgcgagttgggttgatcggagggtttgatgacgggggcgcgggagccggtggccatggagataccagcggaggaagggccagcggcggcgagggcgccgccgcggcggattaggaggaggctggtggagggggcgcgcggcggtggggcgccggcgagcgtggaggagatcgaggccaggcttagggaggccgagctccggacgcagcaattccgtgaatggttggcctgcaaagcaaggaagaagccacggagcccgtcgtggtcctctcaagaggaaggccaagggcagcgccttggatcgacgcgtctggctgctgaatagaaaaggctaagcctcttggcaatggcacagaaccgactcgcccagttggagaaactcagacaagctgctaagaattatgtaggaatgtggtttaagaattagacaggctagctggatgcatgagttgagtcttgtggcagacaggcataggagaaccggattcgccttctgcatgccgatatgcagaagcgggccgcactgaaggagaggacagcgaggtccctggtgcagaaggcaaaatcagagaccacgcgcctggagcaggtgcgctctgcaatttctctgaagcgcgctgctgctgagaagaaacgactgaggttgctggaagctgaaaagaccaaggctcaagctaggcttttacgcatccaaaaagctgccatgactgtatgcagccggagagaatcagagaggagaaaactgaaagaacagctggacaacaaacttcaaagggcgaagaggcagagggctgagtatttgaaacaaagaggaagtcctcgtggttcaacccatgctgattacttaaagcatgcatatgccctttcaagaaaactagcaagatactggagaatatttgtgaagtccaggaagacaacatttgctttggctcaagcttatgatgccttggggattaatgagaagtctgtgaaaaatatgccttttgaaaaattggccatgtcaatggaatctcctgtagttcttcggagcacgaaggcattactcgaccgattggagaaacgccttgtcatttctcattcagtagcatcttcatcagtagaaaatgttgatcatctactgaaacgccttggttctcccccaaggaggagggctcctcctagcagagaaggaaaaactcgggcagtggtaaaaagaccagctaaaagttctgaggcaagcatcaaattgcccagatactcactgagggtggtgctctgtgcttacatgatactggctcatcccagtgctgttttaagtgggcaaggtgagcgggagaaacagcttatcgagtcggcagcaaactttatcaaggagttcgagctgttgattaaggtaatccttgatggaccagggcagtcatctggtgttactggccagaggaagttcagggcacagttggctaattttgacaaggcgtggtgttcgtatctttacagctttgtggtgtggaaggtaaaagatgcaagattattggaggaagatcttgtcagggctgcatgcaagcttgagttgtcaatgatgcaaacatgcaagctaactgcagacaggcactcgcaaaacaatcttacacatgacatgaaggcaattcagaaacaggttattgatgatcaaaagcttttacgtgataaggttcaacacctgagtggcgatgctggccttgagcggatgaactctgctctttccgatacgagatcaaagttctttgaagcaaaggagaatgggagtccattgacagcacctgttgcaaatgtgtctacccctttgagcatcaattcgtctgggaaagcaccactttctgaggttcctgaaagttccaggacaaatgttgttgggacaagctctgtagtccgttctttgttcagtgcttcttcgtcatcagtcagttcatcaccagaaaagcagccgacagagaatgaaaaaatggtcaatgaaatgcttcatgaggatgccagtgcttttgctggcaggtctgatagtgctagtactgctgaggaggagttccagaacaaagtgagagaaaccatggagaaagctttctgggatatggtcaccaactccatgagaggagaaagacctgattatagtcaattgatcaacctagtaaaggaagtgagggattcgttgcatgacctggctccaaaagaatggaaggagaaaattcttgagaacattgaccttgaaattctgtctcaggtacttgggtcaggttcccaggatgcacaatacttggggcagattttggagtattctctggatatggttcgcaagctctctgctgctgcaaaggaggatgagatgaagaaaaaccatgataaattattgagtgaattgtctacgaattctgaagttaacggcgatggcatcaactcatttgtcattgctgttatcaagggccttcgtttcatcctggaagaaataaaggaactgaaagcagaagtgagtaaagcacgtatccagatgatgcaacagatcataaaagagtcggctggggttgagtacctgcagaaggcttttgctgatcgctatggacctcctgagacggcaccagcttctcttcccctaactctgcaatggattttgacatcgaagaacattgcggaagaagaatggagtgaacattcagactgtctttcagtaatgccagcagcagggcaggctcctgctcttgttccggtactccgatctggtcatggagctccagtagggcaaccatctccttctgcaggagacacctctggtcaaccagagtgcaagggtgagaagcttgacaagctaataaggattggcctgttgcaactcattagtagtgtggagggcttgcaattgcagtcaactcctgaaagttttcagattaatctgctgaggctgagggccgtgcagagccaattccaacaggtgatcgtgatcgccacaagcatgctcgtcctgcgccaaattctgatgagcgagaactcgagggccactcctctggaactggaaaatgccatctcagaactcgtcaaggctctcgcggacatactgcacagctcacccgattccggcacggaagagattgtgcaggcgatggtcaatgcatcagcctcagttggctcaccatcagaggagaaggttcaggccaggatgcagatgatcacccgggtgttcctcaagagcctccagcctggtgacgtggtcttcaagaaggtatcccgtgcggtctactgcgccttccgtggcatcatcttaggtggcagtggtcccaagggccagaagctggcggacgcggcattgcgccgcatcggcgccaccaatgttgtcgacagggtgttgaaggctgctgaggtgctgatcaaggtggcaacggtatcagagaaggtccacggtccctggtacaaagctctgatagtctgatgtgagcgtgaatgtgaatggtttggcttttgtgaatacagacagtgaaagtgtaaattccttgttccactgggtgggatgggagatatggtgttgtacagcaatttatagttgttggtcagtaggcagttcaggatgtgaagaattctggtgagctgggcgaatatggatgctctttcaccaggatttagtcaggctcgatggatggatgctaaaacgcgtctggaaatgtaaattgtggcaccttgtttgattttcgaactgaaataatgtaaataattgattgcaagttatttgtgctccgcacatattggttgtttcgcgttgttaccactgcttaagga

SEQ ID NO: 113980 - DNA, 1075 bp, Zea mays
  Clone ID: MRT4577_35432C.1
ttggaacctcgagcccatgggccgggccctcgaccgcgtcgccctctttccggcgccaccacgaaccactcctcctacagaaatcacctgccggcctggcctttccgtagctacaaccgaagccaccaccagcagtccagcacgactagcggaataatatccaccggcgacgggaacgggaggcggcgcggccggagattcgaagcgatggcgttcacgatgcgggcagtgaaggtgcctccgaactcggcctcgctggaggaggcccggcaccgcgtcttcgatttcttcaagcaggcatgccgctctatccccaccgtcatggagatctacaacctcgacgacgttgtcacgccctctcagctccgctcgaccatcgctaaggagatccgtaaaaaccagaacgtcaccaaccccaaggtgattgatatgcttctgttcaacgcgacggaggagctgaacaacatagtcgaacatgcaaagcagcgccatcatgtgattgggcagtatgtgatcggccaagagggcctggtgcatgagctggggtcgaaggatctagggaactctgacttcctgaagaaattctacacaagcaattacttctgatctgtgttgcagatttacaacatctggtatactccgggtggtgctctgaataagacgacactgaggacctatcaggaccgattgtttcgcactggaggttttgatctatttggcccttgaatcctctgttcaatgtgatactgctgtcagctgtttgtcttgtttactgttgtacttatcaaattgatgttgatgttttagtcgattcgagtaatcgagtctacaagattgaactttgttgctacagagagtaccgaccagtggccccccccccctttttttttgttgagaaacagccctcaacctttagcagagaaagggactaaacatgtcttccaacataaaaactaagggcctgtttgtttttgtttgtttttgttttttgttaagcctgtttgtttaggtttaatttgtacagacttcaactgtttctacagtgttttttattgtgtccccaggatttgaagct

SEQ ID NO: 113981 - DNA, 405 bp, Zea mays
  Clone ID: MRT4577_35433C.1
cccacgcgtgcgcccacgcgtgcgcgcacgcgtgcgcccactcgtccaagctcacgttcgaggctaacgagttgtatatacctggctctaactcaatagcttctgctgctcacccattagtactgacggcacatgttctgctgggacatcactgattaatagagggagctgctgtggatagatttgtctaggctcatcacaaataattcagctctgtacacaagacatcggaagctgccactggctgcgctcccaccccagcgcttgcctgatcatactcagacaaactagttgccgactagcttgttgacagagatctacttatgagcagctgcaatgaagtccttgatcgctgccaccactgtgatggtactcaaagtgaacgatcgccgaatgcgcattcct

SEQ ID NO: 113982 - DNA, 297 bp, Zea mays
  Clone ID: MRT4577_35434C.1
ggaagttccaatcaatcgggggggataaatcaagatttcaaagccccaaaggaatttcataattccatcccattttgaataaaaaaataaatgtgatggttgtcttgataaaacaagggaaagatggcccccaaaacccaccaggttgcccacattttgggctgaagctttttttttggctttttttttctttaacaatttggggggcaacttttgttttaggagggaagtaaagggggttttacaagatgccctcaaccttccatggggggccattgccttggcaaaaaatttggg

SEQ ID NO: 113983 - DNA, 300 bp, Zea mays
  Clone ID: MRT4577_35435C.1
aaaaaaaggccccttcaattttttaaaaaaaaacatgggcaaaaaagggatacataaggggcctttaaatttaaactaaaatccaacgggtgggactaagggtaagcctaactttttttgaataaaaggctccacactttggggacccccaaattggaatttttttttttggtttccgggccaacaaatgggggaaaactgggctttgcaaaaggctccaaggagcacgggggggggttaaaaggggccctggggcttttccctggtttgggggacccctaaacgcccggggtttctccc

SEQ ID NO: 113984 - DNA, 343 bp, Zea mays
  unsure (1)..(343): unsure at all n locations
  Clone ID: MRT4577_35436C.1
cccccnaannngaggacgaccccaganccgcgagagcgaccaggaccgagcgacccaccaagccgagcgcgagggcgcaagcgcgaaaaaagccgaaaaaaccncccgggcgaggggaggaggcgacgccggcgcgggccgccggggggcccaacgggggcccgggcgccgcccccgcggcggggccgccgggagccgncggcgcggcccagccccccccgaccaccccgcgccacgggggcgaccgggagggggccgncccggacccgcagccgnacgaacgccncagccaggcggggccggnggggncgccgcgcgnccgcaggganggcaccccgcgccg

SEQ ID NO: 113985 - DNA, 277 bp, Zea mays
  unsure (1)..(277): unsure at all n locations
  Clone ID: MRT4577_35437C.1
cccacgcgttcgntgacgcttgtttttacgcgtggggacnancgngggctggggcccatgtacgtttttgggtccacccaccacnncngtcacactcgcggccactacccttaccgtcactctatgattcacataaacctactcttttttctctcctcactaaccacaacgatcttgtaactctcttcgcataactcgaagcaccaccacatccaatttcagttccatatcaaccttaccctacagccctacaatctaaatacaccggccctaccat

SEQ ID NO: 113986 - DNA, 134 bp, Zea mays
  Clone ID: MRT4577_35438C.1
tccggaattcctcgacccacgcgtgcggcatccaggcctaattcaaacacgaaagacacagcgctcgaccggaggggattattcagaaggcggagtcgctttgcccacacagagcagcatacggcacagatcca

SEQ ID NO: 113987 - DNA, 229 bp, Zea mays
  Clone ID: MRT4577_35439C.1
gcggacctacaaactaactatctgttccactacgtgcatacgtcagacactgcgaaagccatcgtctggatggacgagtcgaccatgacagatctaatcacagacagagccggacgtgccaggtgacagatgggacagtcttttttgagaggggggtgcacacccggaacgtgcagaggagtaagtgaactgcagcaagaggtgtacgctatgctgggctaactcaagg

SEQ ID NO: 113988 - DNA, 851 bp, Zea mays
  unsure (1)..(851): unsure at all n locations
  Clone ID: MRT4577_3543C.1
ctcttgcgcgctcagagcagaagcccacccatccgccgatggctgacgcggcggcgcagaacagtaccgagcagctgctccacctcaagctcgcgttcctcgctggggagcctccctcctgcgtgctcgcgctcgccaggtagaaagatgtcaagactctacttatacaacaattatttttaaaaagattatatctgaggttgaattatcttcaaatgttgtgattgatgaactttatgaggagtttgctcaacaaagtttcatttttagacaagacaagtcatatttataaagaaatatcttttctatctcctacatatgataatattttcccaaagcgagtaagtgttgtggcccgactatcatgttcttctaatatgcttgaaggcgatacagggtgttcaatttggccatcaagtttattcttgtctgaatttgttctttcataccctaaaattttctccacaaagtgttgcttcgagctaggttccggtgtcggtctggtgggcatttgtcttaatcatgttggtgcctctaaggttattcttactgatggtgacccatgtacactcagaaacatgaaggaaaatatggaactgaataacttatgcattgagcaggaagattctagagcgctaaaagaaagcaagaataaggtcgagtgcaaatatctttcttgggaagaagtgtccgaaagtgatttatggggctaccagccggacgtaattcttggcgcagatataatctatgatccggtttgtgtgccgcaccttgtccgagtgctctcaatgctgntgagacgagatggtagacaaggnggaaacaacggaacatctgctgacgaattgtat

SEQ ID NO: 113989 - DNA, 3033 bp, Zea mays
  Clone ID: MRT4577_35440C.1
atgggcagtctccagcaacctctccagcccgggacggtgctccgttttgggagtcttgagttcatgtccctcgacggcagctacgacatggtactccttcccccgccgtgcgacagcgacaatggtggccgacagcccgcccgccggcggtggaatcggcgacgtcttccccgcgtggtggaagaacaacattcgagctcaccccgccctctcccccgccgacggaggaggaggcagggcaaccaaggccaagcaggaggcggcacctcgtcggctgtcgagcgagtcgacggcgccggcgccccaacggggggcacgtcgggcatcgacctcgcgtctgagacgaagacgagcgccgtctccccgcaacacgccaaccccaagcaaacggacgacgccagcacgctcgcgaaggacttgctgggcatcaccctcgtacctaagacgacggtgcagtctgcccctgacgtgacttcatcaccgcccgtcgaccaagaggtaccgaccgattcccatctcgtgccttttggattcggcctcgacccaccaagcgacttcacttcggtggacgctctcatagaggcgggtccaaaccctctggggtatcgtatgcagtcaccctgggaccggctgacggccgtctcgacctacgggccctcgggttccgaggaagatgacgagcctgactttagttgggatttctccggacttggtaaccccagtgccatgcgggacttcatgaccgcatgcgactactgcctttccgactgttccgacggtagccgcagcctcggtgacgaggactgcggcccaagtcgtgaatgtttccacgtcgatctagggggtcccggcaaaagcaaccctcttggtataccggagaacggtgatccccctaggcctgtgcctcgtgttgacatccttcgggagctagctgtggtccccgtcccagcggggggtcctgacccacagctcgagcaaatccgcgagatgcaggccaggctcgacgagggagcaggaacacttgagtcgttccgccgggacattgggcaggaatgggcgggccaacatccggccggagaagtgcgtcatctaccccagggcatccaacaccgcatcgccgacgatgtcaaggtaaggccgccaccggtttccagtggggtcggccagaacctggctgcagcggcaatacttctccgcgcgatgccggagccatctaccaccgaggggcggcgtatccagggagagctcaagaatctcctggaggatgccgcggtccgatgggccgaaagctctgcctcccaaaggcaggggtacccctcggaacatcacgccgcgacttcccgattcatgcgggaagcctcggtccacacctggcgcacgcgcaacacagcgcctacggccccggatcgcctcggcaacgagcaccatcaccgcaatcgtcgagcccacctcgacgagaaggtgcgtcgaggctaccaccccaggcgtgggggacgctatgacagcggggaggatcggagtccctcgcccgaaccacccggtccacaggctttcagccgggccatacgacgagcgccgttcccgacccggtttcgaaccccgactactatcacaaagtactcgggggagacgagaccggaactgtggctcgcggactatcggctggcctgccacctgggtggaacggatgatgacaacctcatcatccgcaacctccctctgttcctctctgacaccgctcgagcttggctggagcacctgcctcggggcagatctccaactgggacgacctggtccaagccttcgccggcaatttctaggcacgtacgtgcgccctggaactcctgggatctccgaagctgccgccagcagctgggagagtctctccgggactacatccggcgattctcgaagcagcgcaccgagctgcccaacgtcaccgactcggatgtcatcggcgcgttcctcgccagcaccacctgccgcgacctggtgagcaagctgggtcgcaagacccccaccagggcgagcgagctgatggacatcgccaccaagttcgcctgtggccaggaggcggttgaggccatcttccggaaggacaagcagccccagggccgcctaccggaagatgtccccgaggcgtcaactcagtgcggcaccaagaagaaaggcaagaagaagtcgcaagcgaaacgcgacgccgccgacgcggaccttgtcgccgccgccgagtacaagaaccctcgcaaacctcccggaggtgccaatctcttcgacaagatgctcaaggagccatgcccctatcatcaggggcctgtcaaacacacccttgaggagtgcgccatgcttcggcgccactttcacaaggccgggccacctgcggaaggtggcagggcctgcgacgacgataagaaggaggatcacaaggcaggagagttccccgaggtccgcgactacttcatgatctacggtgggcaagtggcgaacgcctcggctcggcaccgcaagcaagagcgtcgggaggtctgctcggtaaaggtggcgacgccagtctacctagactggtccgacaagcccatcaccttcgaccggggcgaccatcccgaccgtgtgccgagcccggggaaatacccgctcgttgtcgaccccgtcatcggcaacgtcaggctcaccaaggtcctcatggacggaggcagcagcctcaacatcatctacaccgagaccctcaggctcctgcggatcgatctgtcctcgttcatggtcgtccccaactacacctacctcaaggtcaagatgccaggccccaacggggtcatcaccgtcggccccacataccgacacgcgtacgaatgcgacgtggagtgcgtggagtacgccgaggccctcgccgaatccgaggccctcatcgccgacctggagagcctctctaaggaggcgccagacgtgaagcgccacaccggcaacttcgagccagcggagacggttaaatccgtccctctcaaccccagcagcgacgcctccaagcagatctga

SEQ ID NO: 113990 - DNA, 2043 bp, Zea mays
  Clone ID: MRT4577_35441C.1
atgccgttcggtttgaggaatgcgggtgcaacataccaaaggtgcatggaccacgtgttcggcgaacacattggccgaacggtcgaggcctacgtcgatgacatcgtagtcaagacgaggaaagcctccgacctcctttccgaccttgaagcgacattccgatgtctcaaggcgaaaggcttgaagctcaatcctgaaaaatgtgtcttcggggttccccgaggcatgctcctggggttcatcgtctccgagcggggcatcgaggccaacccggagaagatcgtggccatcaccagcatggggcccatcaaggacttgaaaggcgtacagagaatcacgggatgtcttgcggccttgagccgtttcatctcgcgcctcggcgaaagaggcctgcctctgtaccgcctcttaaggaaggccgagtgcttcacttggacccctgaggccgaggaagcccttgggaacctgaaggcgctcctcacgaatgcgcccatcttggtgccccccgctgccggagaagccctcttaatctacatcaccgcgaccactcaggtggttagcgccgcgatcatagttgagagacgagaagaggggcatgcattgcctgtccagaggccagtctacttcatcagcaaggtactgtccgagaccaagatccgctacccacaaattcagaagctgctgtacgcggtgatcctaacgcgacggaagttgcgacactacttcgagtctcatccggtaactgtggtgtcatccttccccctgggggagatcatccagtgccgagaggcctcaggtggaattgcaaagtgggcggtggaaatcatgggcgagacgatctcgttcgcccctcggaaggccatcaagtcccaggtcttggcggactttgtggctgaatgggtcgacacccagctcccaacagctccgatccaaccggaactctggaccatgttctttgacgggtcgctgatgaagacaggagcaggcgcaggcctgctcttcatctcgcccctcgggaagcacctacgctacgtgctacgcctccatttcccggcatccaacaatgtggccaagtacgaggctctggtcaacgggttgcgcatcgccatcgagctaggggtccgacgcctcgacgctcgcggtgactcgcagctcgtcatcgaccaagtcatgaagaactcccactgtcgcgacccgaagatggaagcgtactacgatgaggttcggcgcctggaagacaagttctacgggctcgagctcaaccacgtcgcccggcgctacaacgagactacggacgagctggctaaaatagcctcggggcgaacaacggttcccccagacgtcttctcccgagacctgcatcaaccctccgtcaagaccgacgacacgcccgagcccgagaaggcctcggcccagcccgaggcaccctcggctcggcctgaggccgaagctcggcggttggcgcggcacgccaagtcgttcgtcttgctgggagatgggaaggagctctaccaccgcagcccctcgggcatcctccagcgatgcatttctatcgccgaaggccaggagctcctacaagagatacactcgggggcttgtggccatcacgcagcacctcgagcccttgttggaaacgccttccgacaaggtttctactggccgacggcggtggccgacgccactagaattgtccgcacctgcgaagggtgtcagttctacgcaaggcagacccacctgcctgctcaggccctgcataccatacccatcaccttgccatttgttgtgtggggtctagacctagtcgaccccttgcagaaggcacccgggggctacacgcacctgttggtcgccatcgacaaattctccaagtggatcgaggtccgacccctaaacagcatcaggtccgaacaggcggtggcgttcttcaccaacgtcatccatcgctttggggtcctgaactccatcatcaccgacaacggcacccagttcaccgacagaaagttcctggacttctgcgaggatcaccacatccgggtagactag

SEQ ID NO: 113991 - DNA, 182 bp, Zea mays
  Clone ID: MRT4577_35442C.1
tcttctagcgttctgccgtttactcttcactttggcctcctctcttgcaagtttaagcttcgcctccagccatgggtaaggagaagtctcacatcaacattagtggttattaggccacggtcgactctcggtaacgccaacaaccacctggccaccatgatctatatgcattgagtggccta

SEQ ID NO: 113992 - DNA, 3165 bp, Zea mays
  Clone ID: MRT4577_35443C.1
atgggcagtctccagcaacctctccggcccgggacggtgcttcgtttcgggactcttgagttcatgtccttcgacggcagctacgacatgatactccttccaccgccgcgcgacgacgacaatggcggccgacaacccgcccgccggcggcggaatcgacgacatcttccccgcgtggtggaagagcaacattcgggctcactccgttccctcccccgccaacggaggaggaggcggggccatcaaggccaggcgggaggccgcgcttcgttggccgtcgagcgaatcgacgcccccgatgccccgacggagggcacgccagacgtcgacctcgcgttcaagacgaaggcaagcgccgtccccccgcgacgcgctgaccccgaacaagaagacgacgccagcgcgctcgcggaaagcctgcaggacgtcgccctcgtacctgagatgacggtgcaaccagtccccgatgtgactacgtcgctcctcgtcgaccaaaaggcgagtgcaaccccactggggtttcgtatgcggtcgccttgggaccggctgacggacgtctcgacctacgggccctctgggtccgaggaagatgacgatcccagcatctgttgggatttctccagacttggcaaccccagtgtcgtgcgggacttcatgaccgcatgtgactactgcctctccgactgttccgacggaagccgcagccttggcgacgagagctgcggcccaagctgcgaatgtttccacatcgagctaggggatccctccgaaggcaaccatcttggcatgccggaggacggtgatctccctaggccggcgcctcacgccgacatcccacgggagctagctgtggtccccgctccggcggggggttacgacccacaactcgagcaagtccgcgaggcgcaggccaggctcaacgagggaacaggagcgcttgagccgatccgtcgggacgtcggacaggcatgggtgggccaacccctggccggagaaatacgtcacctgccccaaggtctccagcaccacgtcgccaacgataccagggtcaggccgccgcccgcatccagcggggttggtcagaacctggcagccacagcgatgctcatccgcgcgatggcggagccatcaaccaccgagggtcggcgaatccagggagagctcaagaatctcctggaaggcgctgcggcccgacgggccgagagcactgcctcccgaaggcaaggatatccctcggaacctcacgccgcgacttcccgattcatgcgggaagcctcggtctacaccgggcgcacgcgcaacaccgcgcctgcggccccgggccacctcggcaacgagcaccatcgacgcgaccgtcgggctcacctcgacgaaagggtgcgccgaggctaccaccccaggcgtgggggacgctatgacagcggggaggatcggagtccctcgcccgaaccacccggtccgcaggccttcagtcgggccatccgacgggcgccattcccgacccggttccgacccccgactactatcacgaagtactcgggggaaacgagaccggaactgtggctcgcggactaccgccttgcctgccaactaggtgggacggacgacgacaacctcatcatccgtaacctccccctgttcctctccgacactgctcgcgcctggttggagcacctgcctccggggcagatctccaactgggacgacttggtccaagccttcgctggcaatttccagggcacatacgtgcgccccgggaattcctgggaccttcgaagctgccggcaacagccgggggagtcgctctgggactacatccggcgattctcgaagcagcgcaccgagctgcccaacatcaccgactcggatgtcatcggcgcgttcctcgccggcaccacttgccgtgacctggtgagcaagctgggtcgcaagacccccaccagggcgagcgagctgatggacatcgccaccaagttcgcctctggccaggaggcggttgaagctatcttccgaaaggacaagcagccccagggccgcccatcggaagaggctcccgaggcgtctgctccgcgcggcgccaagaagaagggcaagaagaagtcgcaattgaaacgcgacgccgctgacgcggaccttgtcgccgccgccgagtacaagaaccctcggaagccccccggaggtgcaaacctcttcgacaagatgctcaaggagccgtgcccctaccatcaggggcccgtcaagcacaccctcgaggagtgcgttatgcttcggcgtcacttccacagggccggaccacccgccgagggtggcagggcccgcgacgacgacaagaacgaagatcacccagcaggagagttccccgaggtccgcgactgcttcatgatctatggagggcacacggcgaatgcctcggctcggcatcgcaagcaagagcgccgggaggtctgctcggtgaaggtggcggcgccagtctacctagactggttcgacaagcccatcaccttcgaccaggccgaccaccccgaccatgtgtcgagcccggggaaatacccgctcgtcgtcgaccccgtggtcggcaatgtcaggctcaccaaggtcctgatggatgggggcagctgcctcaacattatctacgccgagaccctcaggctcctgcgcgtcgatctatcctccgtccgagcaggcgctgcgcccttccacgggatcatccctgggaagcgcgtccagcccctcgggcgactagacctccccgtctgcttcgggacgccctccaacttccgaagggagaccctgacgttcgaggtggtcaggttccgaggaacctaccacgccgtactagggaggccatgctacgcgaagttcatggccgtccccaactacacctacctgaacctcaagatgctgggccccaacggggtcatcaccgtcggccccacgtacaaacacgcgttcgaatgcgacgtggagtgcgtggagtacgccgaggccctcgccgagtccgaggccctcatcgccgacctggagaacctctccaaggaggtgccagacgtgaagcgccatgccggcaacttcgagccagcggagacggtcaaggccgtccctcttgaccccggtggcgacaccgccaagcagatccggatcggttccgggctcgaccccaaatag

SEQ ID NO: 113993 - DNA, 274 bp, Zea mays
  Clone ID: MRT4577_35444C.1
aatctttccactcgccaattcgctcgatctccaatccggcaaatcccctcatctctcacacaacctccgaatcaaacgctgaatcgcgccaaatttactcttgatctatctccaaacccgccgctatctctcatcctgctattgcaatttcatccaaaacttgctccctcggaagccatcgccatggccgcggaggcgggcagtcggcgcggcgcggcggcgcggaggaaggcgaaggaggcggcggtgggcgccgcgcgagggttctcttcta

SEQ ID NO: 113994 - DNA, 2855 bp, Zea mays
  Clone ID: MRT4577_35445C.1
cccgggattcggctggcagcacgccgcaaccgaccgctgcacaatgtgggttcggaaaactcaccggtggcgctagtagttccgagttaaagtttggctgctggtatgaatgaaagcgttggcgctgatccttacaccataggtgatcgtgctcattagaagggttgtggaaagcacggaagctgttgactctggatttggggaggcgagcaaagtgctgtagatgcccaatattaaagaattgaggttgctaatttgatatagttaagggaagagggccagtgtcacactaatgttggtggatgtgaatcaattgaggaaccaggatctatacaatgcgggctctgaaagtacaaccaatgatactttggtaactctggttcaggagaggactgtagaacataatgagcttgcggagcctgttcacattggggagaaggaggaaatgatcgaaggatggaggtgaacccgaatcccatttctcagtaatgtagatgtcctgtactcctgtatattatgatacaacaatataccattagtatgctttcaagcttaccaattgcaagagataaatggcttacgcccgaggggcttaacattccttggcatgtgcgttgctgacacaacaattgatgcttctaggattttgtatccagctcttgcaagacttggaatgcagtgtattggtgccacaacactggaagagtataggaagcatatcgagaaagatcctgccttgagaaagaaggtttcatccagttaaggttcctgagcctactgttgatgaaacaatacagatcttaagagggctccgtgagagatatgaactccatcacaaactgcgatacacagatgatgctttaattgctgctgcacagctgtcttatcagtatatcagtgatcgtttcctgcctgacaaggccattgacttgattgatgaagctagatcccgtgttaggctgagtcatgcccagctacctgatgaagccaaagagatggacaactggctgcgacagataaccaagcagaaaaacgaggctgtacgcggccaggattttgagaaggctggtgaattaagggaccgagaaatggaactgaaggctcaaattacggccattattgacaagagcaaggaaatgattaaagcagagactgaatctggtgatgtcggtcctcttgttactgaggcagatattcaacatattgtctcctcttggactggaattcctgtggagaaagtgtcgtctgatgagtctgaccgtctcctaaagatggaagagacactgcatacacgtatcattggccaggacgaggctgtcaaagctattagccgtgctatccgccgtgctcgtgttggcctgaagaatccaaataggccaattgccagcttcatattctctggaccaactggagttggcaaatcagagctagcaaaggctctggcagcctactactttggctcagaggaggctatgattaggcttgacatgagtgagttcatggagagacatactgtctccaagcttattggatcacctccaggttatgttgggtacactgagggaggccaactaactgaagcagtccgtcgccgcccatacacagttgttctctttgatgagattgagaaggcacatcctgatgttttcaacatgatgcttcagatattagaagatgggcgattaactgatagcaaggggcgcacagttgacttcaaaaacacactattgatcatgacatctaatgtgggaagcagtgtcattgagaaaggaggccgcaagatcgggtttgaccttgactatgatgagaaagacaccagctataacaggatcaagagcctggtgaccgaggagttgaagcagtatttccggccagagttcttgaacagattggatgagatgattgtattccggcagctgactaaattggaggtgaaggagattgctgacattatgctgaaagaagtgtttgacaggctgaaggccaaggagattaatctccaggtcacggagaagttccgagatagagttgttgacgaaggttataacccgagctatggtgccagacctttgcggcgtgctatcatgaggcttctggaggatagtctggcagagaagatgctggctggtgaggtgaaagaaggtgactctgccatcgttgatgtggattcagatggcaaggtgatagtcctgaatggtggtagcggtgttgctgagccactggaacctgctctcagtacctaaccgaggtcaaaatcatcattggtccgaaatatggccttctttacaagtcagctgggtttctcgtgatggtaaaaactagactgacattacttggccgcccattagttgctttatctttcgtttattttcttttttgttggaagtgaggcagtagggttgctatggaaatgaatagatggagaagcatttagcagacatataatatatgctagacttttgagttgccttgttttgggaagaaacttggaattttcagtttgatgcacttgtattattattaggccttggtagcaacaagatacggatgtcgtctctacgtttgctgttgtacttcagtgtaacttgcctcccgaatgtatgagtattatttatcaagtcccaaataacagtgacggattgctacataaaaaaaaaaaaaaaaaaaagcaaccaaaaaaaaaaaaaaaaaaaaaaaaaaaaaaaggtatataaaagttttaatttaaataaaaaaaaaaaaaaaaaggggggcgcctttttgggggttccaagtttacttacgggggcttgcgacttcttagtttttttttgggggcccctaatttaaattaggtggccggggttttcaacctg

SEQ ID NO: 113995 - DNA, 3204 bp, Zea mays
  Clone ID: MRT4577_35446C.1
atgggcagtctccagcaacctctccggcccgggacggtgcttcgtttcgggactctcgagttcatgtccttcgacggcagctacgacatgacacttcttccaccgccgcgcgactacgacaatggcggccgacaacccgcccgccggcggcggaatcgacaacgtcttccccgcgtggtggaagagcaatatttgggctcgctccgttctctcccccgccaacggaggaggaggcggagccgtcaaggccagacgggaggccgcgcttcgtcggccgtcgagcgaatcgacgcccccgacgccccgacggaaggcacgccggacgtcgacctcgcgttcgagacggaggagagcgccgtccccccgcggcacgctgaccttgagcaagaagacgacgccggcgcgctcgcggaaagcctgcaggacgtcgccctcgaaccagggatgacggcgcaaccagtccccggtgtgactacgtcgctcctcgtcgaccaaaaggtaacgactaactcccatcttgcgtcatttcgactcggcctcaacccgccaaacgacctcgttttggcgggcgctctcattgaggcgagtgcaaccccattgaggttctgtatgcggtcgccttgggatcgactgacggacgtctcgacctacgggccctctgggtccgaggaagatgacgatcccagcatcggttgggatttctccggacttggcaaccccagtgccgtgcgggacttcatgaccgcatgtgactactgtctatccgactgttccgatggaagccgcagccttggcgacgagagctgcggcccgagccgcgaatgtttccacatcgagctaggggatcccaccgaaggcaaccatcttggcatgccggaggatggtgacctccccaggccggtgcctcgcgccgacatcccacgggagctagctgtggtccccgctccggcggggggttacgacccacaactcgagcaagtccgcgaggcgcaggccaggctcaacgagggaacaggagcgcttgagccgatccgtcgggacgtcggacaggcatgggtgggccaacccctggccggagaaatacgtcatctgccccaaggtctccagcaccgcgtcgccaacgatgtcaggatcaggccgccgcccgcatccagcggggtcggtcagaacctggcaaccgcagcgatgctcatccgcgcgatgccggagccgtcaaccaccgagggtcagcgaatccagggagaactcaagaatctcctggaaggcgctgcggcccggcgggccgagagcactgcatcccggaggcaaggatatccctcggaacctcatgccgcgacttcccgattcatgcgggaagcctcggtctacaccgagcgcacgcgcaacaccgcgcctgcggccccgggccacctcggcaacgagcaccatcgacgcgaccgtcgggctcacctcgacgaaagggtgcgccgaggctaccaccccaggcgtggggggcgctacgacagcggggaggatcggagtccctcgcccgaaccacccggtccgcaggccttcagtcgggccatccgacgggcgccattcccgacccggttccgacccccgactactatcacaaagtactcgggggaaacgagaccggaactgtggctcgtggactaccgccttgcctgccaactgggtggaacggacgacgacaacctcatcatccgcaacctccccctgttcctctccgacactgctcgcgcctggttggagcacctgcctccggggcaaatttccaattgggacgacttggtccaagccttcgctggcaatttccagggcacatacgtgcgccccgggaatccctgggaccttcgaagctgccggcaacagccgggggagtcgctccgggactacatccggcgattctcgaagcagcgcaccgagctgcccaacatcaccgactcggatgtcatcggcgcgttcctcgccggcaccacttgccgcgacctggtgagcaagctgggtcgcaaaacccccaccagggcgagcgagctgatggacatcgccaccaagttcgcctccggccaggaggcggtcgaggctatcttccgaaaggacaagcagccccagggccgcccatcggaagaagctcccgaggcgtctgctccgcgcggcgccaagaagaaaggcaagaagaagtcgcaatcgaaacgcgacgccgccgacgcggaccttgtcgccgccgccgagtataagaaccctcggaagccccccggaggtgcaaacctcttcgacaagatgctcaaggagccgtgcccctaccatcaggggcccgtcaagcacaccctcgaggagtgcgttatgcttcggcgtcatttccacagggccgggccacccgccgagggggggttccccgaggtccgcgactgcttcatgatctatggagggcatgtggcgaatacctcggctcggcaccgcaagcaagagcgccgggaggtctgctcggtgaaggtggcggcgccagtctacctagactggtccgacaagcccatcactttcgaccgggccgaccaccccgaccatgtgccgagcccggggaaatacccgctcgtcgtcgaccccgttgtcggcaatgtcaggctcaccagggtcctgatggacgggggcagctgcctcaacatcatctacgccgagaccctcaagcttctgcgcgtcgatccgtcctctgtccgagcaggcgctgcgcccttccacgggatcatcccagggaagcgcgtccagcccctcgggcgactcgacctcccagtctgcttcgggacaccctccaacttccgaagggagaccctgacgttcgaagtggtcgggttccgaggaacctaccacgccgtgctagggaggccatgctacgcgaagttcatggccgtccccaactacacctacctgaagctcaagatgccgggccccaacggggtcatcaccgtcggccccacgtacaaacacgcgttcgaatgcgacgtggagtgcgtggagtacgccgaggccctcgccgagtccgaggccctcatcgccgacctggagaacctctccaaggaggtcccagacgtgaaacgccatgccggcaacttcgagccagcggagacggtcaaggccgtccccctcgaccccagtggcgacaccaccaagcagatccggatcggttccgggctcgaccccaaatag

SEQ ID NO: 113996 - DNA, 206 bp, Zea mays
  Clone ID: MRT4577_35447C.1
caaaatctcaaaaaccattcctatttatacaaccatacttcaccccaccctacctgacgcctataaactcactcatgtcataacaaaatacagtctccaaatatacccttctcattcatacaattctaatcttataatcttttacacatacaaccaataattcccatatatataaacttcatataattttccaaatacccaaaacc

SEQ ID NO: 113997 - DNA, 3765 bp, Zea mays
  Clone ID: MRT4577_35448C.1
atggacatcaccaccaagttcgcctttggtcaggaggcggtcgaggccatcttctggaaggacaagcagcctcagggacgccagcaggaagacatccccgaggcgtccgctcggcgcggcacaaagaagaagtcgcaagcaaaacgcgacgccgccgacgcagatcttgtcgccgccgccgagcacaggaaccctcggaagcctcccggaggggccaacctgttcgacaagatgctcaaggagtcgtgcccctatcatcagggtcccgtcaagcacacccttgaggagtgtgtcatgcttcggcgctacttccataaggccgggcccccggcggaaggtggcaaaggccatgacaacgacaagaaggagggccacaaagcagatgagttccccgaggtccacgactgcttcatgatctgcggtgggcaagttgcaaacacctcggctcggcaccgcaagcaggagcaccgggaagtctgctcggtgaaggtggcggcgctagtctacctagactggtccgacaagcccatcaccttcgaccaaggcgaccaccccgaccgcgtgccgagcccagggaagtacccgctcgttgtcgatcccgtcatcagcaacgtcaggcttaccaaggtcctcatggacggaggcagcagcctcaacatcatctacgcagagacccttgggcttttgcagatcgatctgtccatgatccgggttggtgcggtgccctttcacgggatcatccccgggaagcgcgtccaacctcttgggcaactcgatctgcccgtctccttcgggactccctccaacttccgaaaggaaaacctcacgttcgaggtggtcgggttccgaggaacctaccacgcagtgctgaggagaccatgctacgccaagttcatggtcgtccccaactacacctacctcaagctcaagatgtcaggccccaacagggtcatcaccatcggatccacgtaccgacacgcgtacgaatgcgacgtggagtgcgtggagtacgctgaggccctcgccgaatctgaggccctcatcgccgacctggagagcctctccaaggaggtgccagatgcgaagcgccacgccggcaacttcgagccagcagaggcggtttttgcgtggagtccctcggacatgcctggcataccgagggatgttgctgagcactcgctggatatccgagctggagcccgacctgtgaagcagcctctgcgccgattcgacgaagaaaagcgcagagccataggcgaggagatccacaagctgatggctgcagggttcatcaaagaggtattccatccccgaatggttagccaaccccgtgcttgtgaaaagaaaggtgggaaatggaggatgtgtgtagactacactggtctaaacaaagcatgtccgaaggttccctaccctctgcctcacattgatcaaatcatggattccactgctgggtgcgaaaccctgtcattcctcgatgcctactcagggtatcaccaaatcaggatgaaagagtccgaccagcccgcgacttctttcatcacaccttttggcatgtactgctatattactatgccatttggtttaaggaatgcaggcacgacataccaaaggtgcatgaaccacgtgttcggagagcacattggccgaacggtcgaggcttacatcgatgacatcgtagtcaagatgaggaaagcctccgacatcgtctccaagcggggcatcgaggccaacccggagaaaatcgcggccatcaccaacatggggcctatcaaggacttgaaaggagtacagagggtcataggatgtcttgcggcactgagccgcttcatctcgcgcctcggcgaaagaggcctacccctgtaccgcctcttaaggaagaccgagcgcttcacttggacccccgaggccgaggaagccctcgggaacttaaaggcgctccttacaagtgcgcccatcctggtgccccccactgcaggagaagccctcttgatctatgtagtcgcaaccactcaggtggtcagcgccgcaatcgtcgtcgagaggcgagaagaagggcatgcattgctcgtccagaggccggtctacttcatcagtgaagtactgtccgagaccaaaatccgctacccgcaaattcagaagctactgtacgcggtaattctgacgcggcgaaagttgcgacactacttcgagtctcatccagtaactgtggtgtcatccttccccctgggggaaatcatccagtgtcgcgaggcctcgggtcggattgcaaagtgggcgatggagatcatgggcgagacaatctcgttcgctcctcggaaggccatcaagtcccaagtcttggcagactttgtggctgaatgggtcgacacccagcttccagcagctccgatccaaccggaactctggaccatgtatttcgacgggtcgttgatgaaaacaggagcgggtgcaggcctgctcttcatctcacccctcgggaagcacctccgctatgtgctgcgcctccatttcccggcgtcaaacaacgtggccgagtacgagactctggttaacgggttgcgcatcgccatcgaggtaggggttcggcgcctcgacgctcgtggcgactcgcagcttgtcatcgaccaagtcatgaagaactcccgctgccgcgacccgaagatggaggcctactgcgacgaggttcggtgcttggaagacaagcgggctcgagctcaaccacatcgctcgatgaccgatgacacgcccgagcccggggaggcctcggcccagcccgaggcaccctcggccgccgagggtgaggcactgcatgtcgaggaagagcggaatggggtcacgcctaatcgaaattggcagaccccgtacctgcaatatctccaccgaggagagctccccgtcgacagagccgaagctcggcgactggcgcggcgtgccaagttgttcgtcttgctgggtgacgaaaaggagctctaccaccgcagcccctcaggcatcctccaacgatgcacatccatcgccgaaggtcagaagctattgcaagaaatacactcgggggcttgcggtcatcacgcagcacctcgagccctcgttggaaacgccttccgacaaggtttctactggccaaccacggtggtcgatgccactaggattgtacgcacctgccaagggtgtcaattctacgcaaggcacacacacctgcccgctcaggccctgcaaacaatacccatcacctggccgtttgctgtgtggggtctgaacctcgtcggtcccttgcagaaggcacccgggggcttcacgcacctgctggtcgctatcgacaaattctccaagtggatcgaggtccgacccctaaacagcatcaggaagttcttggacttctgcgaggaccaccacatccaggtggactgggacgctgttgcccaccccatgacgaatgggcaggtagagcgtgccaacgacatgattctgcagggacttaagccgaggatctacaacgacctcaacaagttcggcaagcgatggatgaaggaactcccctcggtggtctggagtctgaggacgacgccaagccgggccacgggcttcacgccgttttttctagtctatggggccgaggctatcttgcccacaggcttagaatacggttccctgaggacaagggcgtacgatgaccgaagcaaccagaccagtcgagaagactcactagaccaactggaagaggctcgggacatggccttactacactcggcacggtatcagtag

SEQ ID NO: 113998 - DNA, 978 bp, Zea mays
  Clone ID: MRT4577_35449C.1
atgagccgagccctcaaggaacatgcccaggtagtagccgcgggtggtgtgggtgggcagctcgtgcaacgacagactgtgcctcctaccgatgaactcgctcaccttgctgtcgctgtcgcaggtgaggttcgagaggaccccatcagagacagtttttgcacaagattgcccagaacacctgtgtattacacttcaaatagagcagtgtgtgacgaaaatgacaataaacctgtggggctggcgaccgaggccgaggccaccacgccggaggtacgcctggcccggcacacgcccgcgggggactccacgacgaagctggcgaacggcgcgacgagatcatcgaacgcctccttgagtagctcgaccttctcaggtgggaggtcaacggtcgactctgcgccaaccaggaggccctccacctgcggcggcagatccagcacgacgacgcggaggcacacagaaagctccggcgagatggcgctcaacctggcaacgttcctcggcgtggacacgaagactcagctagtacttttggcaaccaaacccctcagccaaacagtttcatggtctagaggtgaaacaactagaagtccttcggaggaggctgcaaaagaggataccaaaccacatgttgaagacatccctcatatgaaacaccgaattgggaaggttatgaaggccattttgaagactcctccaagtgtggtgaagaaaagcgccttggttgccgagaaggatgttgaagcagctttaactgtcgaggcagagttttttgataagcaaagccttgaaacttcaacaagaatcaaaagatcaaaaaatgactttattatctctgagttagagaagaaagttgaagattttaaagggttaatcaaggaaaaggacgttatgattctttcccttaagacagatctggctgaagctcaaaaattagacaaagacaatgcgttagaaacaaaaaatgaaggatga

SEQ ID NO: 113999 - DNA, 876 bp, Zea mays
  unsure (1)..(876): unsure at all n locations
  Clone ID: MRT4577_3544C.1
ggccgggaaacatctacaaaagagaaaccgccgcctccgcgtcctcctcccgtgcgcgctcagagcagaagaccacccagccgccgatggctgacgcggcggcgcagaacagtaccgagcagctgctccacctaaagctcgcgttcctcgctggggagcctccctcctgcgtgctcgcgctcgccagagaagctgggggaggttctatcacaccgcatgtccaaaatttccttttggagacttgcactggctcaaacgtagaaagatgtcaagactctacttatacaacaattatttttaaaaagattatatctgaggttgaattatcttcaaatgttgtggttgatgaactttatgaggagtttgctcaacgtatgttgtccgaagcaaaagtttcatttttagacaagacaagtcatatttataaagaaatatcttttctatctcctacatatgataatattttcccaaagcgagtaagtgttgtggcccgactatcatgttcttctaatatgcttgaaggcgatacagggtgttcaatttggccatcaagtttattccttgtctgaatttgttctttcataccctaaaattttctccacaaagtgttgcttcgagctaggttcccggtgtcggtctggtgggcatttgtcttaatcatgttggtgcctctaaggttattcttactgatggtgacccatgtacactcagaaacatgaaggaaaatatggaactgaataacttatgcattgagcaggaagattctagagcgctaaaagaagcaagaaataaggtcgagtgcaaatatctttcccttgggaaaaagtggtccgaaagtgatttatggngctaccagccggacgtaattcttggcgc

SEQ ID NO: 114000 - DNA, 2529 bp, Zea mays
  Clone ID: MRT4577_35450C.1
atgggcagtcttcaacaacctttccatcccgggacggtactccgtttcgggagtcttgagttcatgtccctcgacggcagctacgacatgatactccttcccccgccgcgcgacagcgacaatggcggccgacagcccgcccgccggcggcggaatcgacgacgtcttccccgcgtggtggaagaacaacattcgagctcgccccgtcccctcccccgccaacggaggaggaggcagggcaaccaaggccaagcaggaggcagcacctcgtcggctgtcgagcgagtcgacggcgtcggcgccccaacggggggcacgtcgggcatcgacctcgcgtctgagacgaagacgagcaccgtctccccgcaacacgccaatcccaagcaaacggacgatgccagcacgctcgcgaaggacttgctgggcgtcaccctcgtgcctgagaagtcggtgcagtcagcccctgacgagacttcgtcaccgcccgtcgaccaagaggtaccaaccgattcccatctcacgccttttggattcagcctcgacccaccaagcgacttcactttggtggacgctctcgtagaggcgagtccaaaccctctggggtatcgtatgcggtcaccctgggaccggctgacggccgtctcgacctacgggccctcggggtctgaggaagatgacgagcccgacttctgttgggatttctccggacttggtaaacccagtgccatgcgggattttatgaacgcgtgcgactactgcctttccgactgttccgacggtagccgcagcctcggcgacgaggactgcgacccaagtcgtgaatgtttccacgtcgatctagggggtcccaacgtaggcaaccaccttggtatgccggagaatggtgatctccctaggcctgtgcctcgcgttgacatccttcgggagctagttgtggtccccgtcccggcggggggtcatgacccacagctcgagcaaatccgcgagatgcaggacaggaataggcgggccaacctccgggcggagaagtgcatcatctaccccagggtatccagcatcgcatcgccgacgatgtcagggaagcctcggtccacactgggcgcacgcgcaagacagcgcctgcggccccgggtcgcctcggcaacgagcaccatcaccgcaaccgtcgggcccacctcgacgagagggtgcgccgagggcacgtacgtgcgccctggaaactcctgggatctccgaagctgccgacagcagccgggagagtctctccgggactacatccgacgattctcgaagcagcgcaccgagctgcccaacatcaccgattcggatgtcatcggcacgttcctcgccggcaccacctgccgcgacctggtgagcaagctaggtcgcaagacccccaccagggcgagcgagctgatggacatcaccaccaagttcgcctctagccaggaggcggtcgaggccatcttccggaaggacaagcagccccagagccgcccaccagaagatgtccccgaggcgtcaactcagcgcggcgccaagaagaaaggcaagaagaagtcgcaagcgaaacgcgacgccgccgacgcggaccttgtcgctgccgccgagtacaagaaccctcggaaacctcctagaggtgcccacctcttcgacaagatgctcaaggagccgtgccctatcatcaggggcccgtcaagcacacccttgaggagagagttccccgaggtccgcgactgcttcatgatctacggtgggcaagtggcgaacacctcggctcggcaccgcaagcaagagcgtcgggaggtctgttcggtaaaggtggcggcgccagtctacctagactggtccgacaagcccatcaccttcgaccaagacgaccaccccgaccgcgtgccgagcccggggaaatacccgctcgttgtcgaccccgtcatcggcgacgttaggctcaccaaggtcctcatggacggaggcagtagcctcaacatcatctacgccgagaccctcgggctcctgcgggtcgatctgtcctccgtccgggcaggcgctgcgccttcccacgggatcatccccgggaagcgtgtccagcccctcggacgactcgatctacccgtctgctttgggacaccctccaacttccgaagggaaaccctcacgttcgaggtggtcgggttccggggaacctaccacgcagtactggggaggccgtgctacgctaagttcatggccgtccccaactacacctacctcaagctcaagatgccgggccccaacggggtcatcaccgtcggccccacgtaccgacacgcgtacgaatgcgaagtggagtgcgtggagtacgccgaggccctcgccgaatccgaggccctcatcaccgacctggagagcctctctaaggaggcgccagacgtgaagcgccacaccgacaacttcgagccagcggagacggttaaatccgtccctcttgaccccagcaacgacgcctccaagcaaatccggatcggctctgagctcgatcccaaatag

SEQ ID NO: 114001 - DNA, 2748 bp, Zea mays
  Clone ID: MRT4577_35451C.1
atgccgttcggcttgaggaatgcgggcgcgacgtaccagcggtgcatgaaccatgtgttcggcgaacacatcggtcgcacagtcgaggcctacgtcgatgacatcgtagtcaagacacggaaggcttccgacctcctctccgaccttgaagtgacattctggtgtctcaaggcgaaaggagtcaagcttaaccctgagaagtgtgtcttcggggtgccccgaggcatgctcctagggttcatcgtctccgagcgaggcatcgaagccaacccggagaagattgcggccatcaccagcatgggacccatcaaggacttaaaaggggtacagagggtcatgggatgcctcgcggccctgagccgtttcatctcacgcctcggcgaaagaggtctgcctctgtaccgcctcttaaggaaggccgaatgtttcgtttggacccctgaggccgaggaagccctcggcaacctgaagacactccttacaaaggcgccagtcttggtgccgccggtggacggagaaaccctcttggtctacgtcgccgcgaccactcaggtggttagcgccgcgattgtggtcgaaaggcaggaggaagggcatgcattgcctgttcagaggccggtctacttcatcagcgaagtgctgtccgagactaagatccgctacccacaagttcaaaagctgctgtatgctgtgatcctgacaaggcggaagctacgacactacttcgagtcccatccggtaactgtggtgtcatccttccccctgggggagatcatccagtgccgagaggcctcgggcaggatcgcaaagtgggcggtggagatcatgggcgaaacgatctcgttcgcccctcggaaggccatcaagtcccaagtgttggcggatttcgtggccgaatgggtcgacacccaactgccgacgactccgatccaaccggagctctggaccatgtttttcgacgggtcgctgatgaagacgggggccggcgcgggcctgctcttcatctcgcccctcggaaagcacttgcgctacgtgttgcgcctccacttcccggcgtccaacaatgtggccgagtacgaagctctggtcaacggattacggatcgccatcgagctaggggtcagacgcctcgacgcccgcggtgattcgcagctcgtcatcgaccaagtcatgaagaactcccactgccgcgacccgaagatggaggcctactgcgacgaggttcggcgcctggaagacaagttcttcgggctcgagctcaaccacatcgctcggcgctacaacgaaaccgcagacgagctggctaagatagcctcggggcgaacgacagtccccccggacgtcttctcccgggatctgcatcaaccctccgtcaagctcgacgaagcgcccgagcccgaggtaccctcggctcagcccgaggtaccctcggttcagcccgaggcaccctcggcccagcccgaggtaccctcggcccccgagggcggggcattgaacgtcgaggaagggcagagcggggccacgccagaccaagattggcaggccccgtacctgcaatatctccgtcgaggagagctacccctcgaccaagtcgaggctcggcgggtagctcgacgcgcttactcattcgtcttgctgggcgacgaagaggagctctaccatcgcagcccctcgggcatcctccagcgatgcatctccatcgccgaaggtcgggaactgctgcaagaagtacacttgggggcttgcggccaccacgcagcaccccgagcccttgttggaaatgctttccggcaaggcttctactggccaacggcggtggctgacgccactaggatcgtccgcgcctgcgaagggtgccaattctatgcgaagcggacacacctacccgctcaggctctgcagacaatacccatcacctggcccttcgctgtatggggtctggacctcgtcggtcccttgcagaaggcgcccgggggctacacgcacctgctggtcgccatcgacaaattctccaagtggatcgaggtccgacctctgaacagcatcaggtccgagcaggcggtggcattcttcaccaacatcatccatcgctttggggtcccgaactccatcatcaccgacaacggcacccagttcaccggcaaaaaattcttggattttttgcgaagatcaccatatccgggtggactgggccgccgtggctcatcccatgtcgaacgggcaaggctcaagcctcggatctacaacgacctcaataagttcggcaggcgatggatgaaggaactcccctcggtggtctggagcctaaggacgacgccgagtcgtgccacgggcttcacgccgtttttcctggtctacggggctgaagctatcttgcccactgacctggaatacggctccccgagggcgagggcctacaccgaacaaagcaaccaagccagccgagaggaatcgctggaccagctggaggaagctcgggacagggccttgctacactcggcgcggtaccaacagtccctgcgacgctaccacgcccgaggggtccggtcccgagaactccaggtgggcgacctggtgcttcagctgcgacaagacgcccgagggaggcacaagctcacgcccccctgggaagggccattcgtcatcgccaaagttctgaagcccggaacatacaagctggccaacaatcaaggcgagatctacggcaacgcttggaacatcaaacagctacgtcgcttctacccttaa

SEQ ID NO: 114002 - DNA, 359 bp, Zea mays
  Clone ID: MRT4577_35452C.1
gaaagaagacgtctaaatctttcgatcgaattaggagccttcttgttgccacgctgcggatagatcagggatgagaagattacaagagcattcgacaggatcacggacggattgggtggcctcgcggaagatgaggtggtgaggggcatcaaccttgcctaccgagacgcaagaggcagagacgcgaagggaacctacgactcgtcaggaagaaactataatactagcgtgaagaagagaactgcgatcaccatgtggaacgaggagctaactatgaccgacacaaagaccagcgtagctatgaagctggaggagttccacaaggacgcaggcatcatggacgacctgatgggggacac

SEQ ID NO: 114003 - DNA, 1683 bp, Zea mays
  Clone ID: MRT4577_35453C.1
atgaagacgggagccggcgcgggcctgctcttcatctcgcccctcggaaagcacctacgctacgtgctacgcctccatttcccggcatccaacaatgtggtcgagtacgaagctctggtcaacgggttgcggatcgccatcgagctaggggtcagacgcctcgacgcccgcggtgactcgcagctcgtcatcgaccaagtcatgaagaactcccactgccacgacccgaagatggaggcctactgcgatgaggttcggcgcctggaagacaagttcttcaggctcgagctcaaccacatcgctcggcgctacaacgagactgcagacgagctggctaaaatagcctcggggcgaacgacggtccccccagacgtcttctcccgggatctgcatcaaccctctgtcaagatcgacgacgctcccgagcccgaggcaccctcggcacagcccgaggcaccctcggcccccgagggcgaggcactgaacatcgaggaagggcagagcggggccacgcctgatcaagattggcaggccccgtacctgcaatatctccgccgaggagagctacccctcgaccaagccgaggctcggcgggtagcgcgacgcgccaagtcgttcgtcttactgggcgatgaggaggagctctaccaccgcagcccctcaggcgtcctccagcgatgcatctccatcgccgaagcaccccgagcccttgtcgggaatgctttccggcatggcttctactggccaacggcggtggctgacgccactagaattgtccgcacctgcgaagggtgccaattctatgcgaagcagacccacctgcccgctcaggctctgcagacgatacccatcacctggccctttgctaaggcgcccgggggctacacgcacctgctggtcgccatcgacaaattctccaagtggatcgaggtccgacccctgaacagcatcaggtccgagcaggcggtggtgtttttcaccaacatcatccatcgcttcggggtcccaaactccatcatcaccgacaacggtacccagttcaccagcaaaaaaatcttggatttctgcgaagaccaccacatccgggtggactgggctgccgtggctcatcccatgacgaatgggcaagtagagcgtgccaacggcatgattctacaagggctcaagccccggatctacaacggcctcaacaagttcggcaagcgatggatgaaggaactcccctcggtggtctggagcttgaggacaacgccaagccgagccacgggtttcacgccgttcttcctggtctatggggccgaggccatcttgcccactgacctggaatacggctccccgagggcgagggcctacaacgaacaaagcaaccaagctagccgagaagactcactggaccagctggaggaggctcgggacaaggccttactacactcggcgcggtaccagcagtccctgcgacgctaccacgcccgaggggtccggtcccgagacctccaggtgggcgatctggtgcttcggctgcggcaggacgcccgagggaggcacaagctcacgcccccctgggaggggcctttcgtcatcgcccaagtcctgaagcccggaacatacaagctggccaacaatcaaggcgaggtctacggcaacgcttggaacatcaaacagctacgtcgcttctacccttaa

SEQ ID NO: 114004 - DNA, 213 bp, Zea mays
  unsure (1)..(213): unsure at all n locations
  Clone ID: MRT4577_35454C.1
ccgcccacgcgtnngtggangnntgggcggacgcgtgggcggacgcgtgggccggccgtattttattcttgatagaagctcaaacttgcggaggccgggctctagcatctgcggatctgactccagactacctccagtcacgtcactcgagcgatcgccaccttatctctatctctctctctctaatccaacgacgaccggtcggtccaggag

SEQ ID NO: 114005 - DNA, 2130 bp, Zea mays
  Clone ID: MRT4577_35455C.1
atgggcgggccaaccttcggccggagaagtgcgtcatctaccctatggtatccagcaccgcatcgccgacgatgtcagggtaaggccgccctcgacttccagtggagtcggccagaacctggctgcagcggcaatgcttattcgcgcgataccggagccatcaaccaccgaggggcggtgtatccaaggagagctcaagaatctcctggaggacgccgcggtccgacgggccgaaagctccgcctcccgaaggcagggtacccctcggaacatcgcgctgcgacttcccgattcatgcgggaagcctcggtccacaccgggcgcacacgcaacacagcgcctgcggccccgggtcgcctcggcaacgagcaccatcaccgcaaccgtcgggcccacctcgacgagagggtgcatcgaggctaccaccccaggcgtgggggacgctacgacagcggggaggatcggagtccctcgcccgagccacccggtccgcaggctttcagccgcgccatacgacgggcgccgttcccgacccggttccgaaccccgactactatcacaaagtactcgggggagacgagaccggaactgtggctcgcggactaccggctagcctgccaactgggtggaacggacgatgacaacctcatcatccgcaacctccccctgttcctttccgacaccgctcgcgcctggctggagcacttgcctccggggcagatctccaactgggacgacctggtccaagccttcgtcggcaatttccagggcacgtacgtgcgccctggaaactcctgggatctccgaagctgccgccagctgctgggagagtctctccgggactacatccggcgattctcgaagcagcgcaccgagctgcccaacatcaccgattcggatgtcatcggtgcgttcctcgccggcaccacctgtcgcgacctggtgagcaagctgggtctcaagacccccaccagggcgagcgagctgatggacatcaccactaagttcgcctctggccaggaggcggtcgaggccatcttctggaaggacaagcagccccagagccgcccaccggaagatgtccccgaggcgtcaactcagcgcggcgccaagaagaaaggcaagaagaagtcacaagcgaaacgcgacgccgccgacgcggaccttgtcgccgccgccgagtacaagaaccctcggaaacctcctggaggtgccaacctcttcgacaagatgctcaaggagccgtgcccctatcatcaggggcccgtcaagcacacccttgaggagtgcgccatgcttcggcgccactttcacaaggccgggccatccgcggagggtggcagggctcgcgacgatgataagaaggagaatcacaaggcaggagagttccccaaggtccatgactgcttcatgatctacggtgggcaagtggcgaacgcctcggctcggcaccgcaagcaagaacgtcgggaggtctgcttggtaaaggtggcggcgccattctacctagactggtccgacaagcccatcatcttctaccaaaacgaccacctcgaccgcgtgccgagcccggggaaatacccgctcgtcgtcgaccccgtcatcggcaacgtcaggctcaccaaggtcctcatggacggaggcagcagcctcaacatcatctacgccgagaccctcgggctcctgcagatcgatccgacctccgtccgggcaggcgctgcgcctttccacgggatcatccccgggaagcgcaccctcacgttcgaggtggtcgggtttcgaggaacctaccacgtagtactggggaggccctactacgccaagttcatggtcgtccccaactacacctacctcaagctcaagatgtcgggccccaacggggtcatcaccgtcggccccacgtaccgacacgcgtacgaatgcgacgtggagtgcgtggagtacgccgaggccctcgccgaatccgaggccctcatcgccgacctagagagcctctctaaggaggcgccagacgtgaagcgccacgccggcaacttcgagccagcggagacggttaaatccgtccctctcgacctcatcaacgacgcctccaagcaaatccggatcggctccgagctcgatcccgaatag

SEQ ID NO: 114006 - DNA, 2931 bp, Zea mays
  Clone ID: MRT4577_35456C.1
atgtccctcgacggcagctacgacattatactccttcctccgccgcgcgacaacgacaatggcggccgtcagcccgcccgccagcggcggaatcgacgacgtctttcccacgtgatggaagaacagcatctgggtctgtcccgtcaccttccccgtcgacgggggaggaggcggggcaaccatggccaagcaggaggcggcgcctcgtcggctgtcgagcgagtcaacggagccggcgccccagcgggggacacgtcgggcgttgacctcgcgtctgagatgaagacgagcgtcgtttccccgcaacacgccaaccccaagcagacggacttgctgagcgttagcctcgtacctgaaataacggtgcagtccgtccccgacgcgacttcgtcaccgtccgtcgatcaagaggtaccgtccgtttcccatcctgtgccttttagattcagcttcgacccaccaagcgaccccgcttcggtggacgctttcataaaggcatatccaaaccttccggggtaccatatgtggtcaacctgggaccgattgacggccgtctcgacctacgggcccccgggttccgaggaagatgacgagcccgactatggttgggatttctccgggctcgataaccctagtgccatgcgggacttcatgaccgcatgcgactattgcctctccgattgctccgatgatagccacagcctcggcgacgaggactgtggcccaagtcgcgaatatttccacgtcgatctagagggtctcgacgaaggcaaccaccttggggtcaggacgcacaagctcaagcaaatccgcaagatgcaggccaggctcgacgagggagcaaaacaacttatgaagctccgaccgaacatcgggcaggagcgggcaggccgagcaccagccggagaagcgcgtcatctggcccaggacgtccagcaccgcatcaccgacaatgccagggcaaggctgcccctggcttccagtggggtcggccagaacctggctgcagcagcaatactactccgagcgatgccggaaccatccaccaccgaggggcggcgtatccagggagaactcaagaatctcctggaggatgccgtggtccgacgggccgaaagctctgcctcccagaggcaggggtaccccccggagcatcacgccgcaacttcccgattcatgcgggaagcctcggtccacaccaggcgcacgcgagacacagtgcttgcggccccgggccgcctcggcaacgagcaccatcgccgcgaccgtcgagcccacctcgacgagaaggtgcgccgaggctaccaccccaggcgtgggggacgctacgacagcgaggaggatcggagcccttcgcccgaaccacccggtctgcaagctttcagccgagccatacgacgggcgcggttcccgacccggttccgggccccgactaccatcaccaagtactcgggggagacgaggccggaactgtggctcgcggactaccggctggcctgccagctgggtggaatggacgatgacaacctcatcatccgcaacctccccctgttcctcttcgacgccgcccaagcctgctgccgccagcagccgggagaatccctgcaggactacatccggcgattctcgaagcagcgcaccgagctgcccaacatcaccgactcagatgtcatcggcgcattcctcgccggcaccacttgccgcgacctggtgagcaagctgggtcgcaagactcccaccagggcgagcgagctgatggacatcgccaccaagttcgcctctggccaggaggcggtcgaggccatcttctggaaggacaagcagcctcaggggcgccagccggatgacgtccccgaggcatccgctcagcgcggcgcggagaagaagggcaagaagaagtcgcaagcgaaacgcgacgccgccgacgcagaccttgtcgccgccaccgagcacaagaaccctcggaagcctcccggaggcgccaacttgttcgacaagatgctcaaggagtcatgcccctaccatcagggtcccatcaggcacacccttgaggagtgtgtcatgcttcggcgctacttccacaaggccgggcccccggcgaaaggtggcagggcccctgacaacgacaagaaggaagcccacaaggcaaaggagttccccgaggtccatgactgcttcatgatctacggtgggcgggtcgcgaacgccttggctcggtaccacaagcaagagcgccgggaggtctgctcggtgaaggtggcggcgccagtctacctagactggtccgacaaacccatcaccttcgaccatggcgaccaccccgaccgcgtgccgagcccggggaagtacccgctcgttgttgatccagtcatcggcaacgtcaggcttaccaaggtcctcatggatggaggcagcagcctcaacatcatctatgccgacaccctcgggctccttcagatcgatctgtcctcgatccgggccggcgcggtgccctttcacgggatcattcccgggaagcgcgtccagccccttggacaactcgatctgcccgtctgcttcgggactccctccaacttccgaaaggaaaccctcacgttcgaggtggtcggaccatgctacgccaagttcatggccatccccaactacacctacctcaagctcaagatgtcgggccccaacggggtcatctctgttggccccacataccgacacgcgtacgaatgcgacgtggagtgcgtggagtacgccgaggccctcgccgaatctgaggccctcatcgccgacctggagagcctccccaaggaggtgccagatgcgaagcgccacgctggcaacttcgaaccagcagaggcggttaagtccgtccctctcgaccccagcaacgacacctccaagcagatccggatcggctccgagctcgacaccaaatag

SEQ ID NO: 114007 - DNA, 255 bp, Zea mays
  Clone ID: MRT4577_35457C.1
cttcaatcctcttcgggattagggtgtattaaaggctagtttgggaatctccttttcttaagagaaattagtttattttctcttgagaaaataagaatcattcggaaaaatgtagttcccaaactagccttaaacgtggaaattagttcatttctctttaaatccccttcaatcctggaatggatttgagtttttaaactggtgtagtttggagactcaaatccccttcgggatcttcgggattgaaggggattt

SEQ ID NO: 114008 - DNA, 205 bp, Zea mays
  Clone ID: MRT4577_35458C.1
ctgaaaccgtcaaataataatcgttgtatacgtgtaaataataataataataaggtaataataataataataataataataataataataataataataataataataataataataataataaactttgcagggaacaagaccctggccggtagctgcatctgctgcattagggacacgcatgagatgatcaacgtggcggcca

SEQ ID NO: 114009 - DNA, 411 bp, Zea mays
  Clone ID: MRT4577_35459C.1
accgtatggagaaaatgtctgtgaacccaattttgtttatgaataagatttgttttttttcgagttaaaaaaaaaaaaaaaaaaaaaaaaaaaaaaaaaaaaaaaaaaaaaaaaaaaaaaaaaaaaaaaaaaaaaaaaaaaaaaaaaaaaaaaaaacagggggagagaaaaaaaatttttaaaccaaaaaaaaaaaaaaaaaaaaaaaaggttcctttggccgggacccttttaggcggaaatttgggaaatttccaaaaaaatgggggccgtttgaccctctctttaaggggccaaatctcccctatacgagctttattaaatatcaaggggcccgcttttaaaaacctgggggcgggaaaaacaggggggttcccaaattaattccctttgaaaaaaaaccctttttgg

SEQ ID NO: 114010 - DNA, 632 bp, Zea mays
  Clone ID: MRT4577_3545C.1
tcgcgatctagaactagcctcatcccctaggcctccacttctctgattggggcgacttcatggcgagcgggcacaaatccgacatgggcgcctctgctccgacgaccgctctctcctctgcgcctccactgcccctctccctgttaggcggcgacagcaaggaggaggaggaggaagggttggctgggccaccgtcggcaccacgcgaggcacgagcgcaaccgcgcctatgagttccatagctccgagccgtcgacgctaggcggcagtgccctcgtctggacctgcccgcgcccaggcggagccgccgccgacccgagatctgcctaggtcgcccgcctgctctggatgaccaaggtcacctccgcggacgctgagcagctgagctcctcccgcgaaggcgtgaacccgcccccagccgaggcactgagctccgccctgccccgctcgggcgtgcccctgcacaggcccagccgcctcgctcctgtttgccgccacagttccagtaacgacgaggctgagcgacaactccagtgtcccgatgtgtgataagtgaacgtcgatgagttcgtcgtggaaggagacagtgtgttgtgatacactgttaccttcccgcactggatctcgcatga

SEQ ID NO: 114011 - DNA, 359 bp, Zea mays
  Clone ID: MRT4577_35460C.1
ggagggggttgttggattaaataaatgataatatattaacctacatggtataaaggaatatatattatttgtttgttaattgtatatagacagttttgtattgtatgtattggaaagatgttaaatattcaagcagatcatttgtattttctgagcttgagcatttgtcttcttttccagttaccctttctggaggttctgagggacttagccttgttacccttgactttaaaacctttaccctttttaccagcggaggtaagaccttttaattctctgggcttttgagaagcttaacagatccagttgattctggggtcgtttctgatagcgttgtgggagggatcagcgaggatgac

SEQ ID NO: 114012 - DNA, 250 bp, Zea mays
  unsure (1)..(250): unsure at all n locations
  Clone ID: MRT4577_35461C.1
atgctcgagtttttttttttttttttttttttnaaggacttacaggatcgttatcagaacttgataagcatagcgtctctgattttttttaaacaataatatgcaaacaaaggcgcttcttaggtttcaagcctgctgattcgtttcgtttagatcaggagtacctgtgaaggaaacacatgccttttttttagaagggggtagctaagaaagcatgcattggcatcttagcagggggttgcgatcaagg

SEQ ID NO: 114013 - DNA, 827 bp, Zea mays
  Clone ID: MRT4577_35462C.1
tgctattgatgttatttgtaaacgcgaatggccaaacagaactcaagttccactcctacactgcctggcgcctgccacagatcgaggatatctcaaggtcaaagtagattcccaaatcctaaccagccgtgcgcccgtgcctcagagatggacgacgtatccgtgaagcagatcgccgttctgtaccccgtcggcggcgtcgggcacatcgggcccatgacgcagctcgccaaggccttcctccaccacggctacgacgtcaccatggtgctcatcgagccccccatcaagtcgaccgactccggcgccggcttcatcgagcgcgtggccgcctccaacccgtccatcaccttccacgtcctgccgccgaccccggcacctgacgtggccagctccaccaagcaccctttcctcctcatactggagctgatgcgccagtacaacgacaagctcgagagcttcctccgctccatcccccgggagcgcctgcactccctcgtcatcgacctgttctgcacccacgccatcgatgtggcgacgaggctgggcgtccccgtattcaagttcttcgcctcaggcgcggggactctggcgatcttcacccagctgccggcgctgcttgccggtaggctgacgggcctgaaggaacttggggacaagccgcttcagttcctcggggtgccgcccatgccggcgtcccatctcgccacgtcgctgctggagagtccggaggacgagctgtgcaggaccctcgatggagatcttggagcgcaacgcgggcacccacggcgtactggtcaacacgttcgagtcgctggagcagcggg

SEQ ID NO: 114014 - DNA, 181 bp, Zea mays
  Clone ID: MRT4577_35463C.1
attcattttaaaaacgtgataaggggggttttcgcattttttcgaccatcctctaaaaactggacggtatacaaaaggacaaaaggtgccctccacacagaaaccatctgtaggccaaaaacattctaaaatttttcaaaccggacaatgtgcgcctctctgtggcaaaaaacgggaagag

SEQ ID NO: 114015 - DNA, 126 bp, Zea mays
  Clone ID: MRT4577_35464C.1
tctttcaggctgccgcctgaaagagtgcttgacgccaccgatgctctcctgcttcgagttcagatcataggtcttgtttttctagcgaggagttagaagccgctacatccattcaatgaccacctt

SEQ ID NO: 114016 - DNA, 593 bp, Zea mays
  Clone ID: MRT4577_35465C.1
gtcgacccagcgttcggcaaatgcaaggccaagtgtgccatttcatcatagatggtgggagctgcaataatattattagtgctttgcttgttgagaagcttggtttgcagccacgtcgccatccacatccgtaccatatgcaatggctgaataattctgggacagttaaggtttcacccatgattcgtttgtcattttccattggtgattatcatggagaggtggattgtgatattgtccccatgcaagcatgccatttgctgcttggtcggccctggcaatttgatgtggactcggtgcattttggacggtctaacaaatacactttcattcacaatgacaagaaggtggttcttgttccattatctcagaggagatacatacttcagatatggctcgcaagaaaagagaggaatcagacaaaagaaaattgagtgagacccccaacccaagtaagggagagagttctaaaccatccagccacataaagcctcatgccaatcctaaacagccacgccaactgagtgtctctttgtgagcaagagtgatttgagagaagtgagaaacaccacagccccattctttgtgctctt

SEQ ID NO: 114017 - DNA, 368 bp, Zea mays
  Clone ID: MRT4577_35466C.1
ggcgggtgctacttcgggctcttcctcgccgggtgggcgggccgttttgtcgcggacccgcggttccctcccaaggtgctcatggaggagctcgtgggcgtcaccgcgagcgtgctgggcgacatgtcctgccgccaaaacttcggtctcaacgagctcgacttcgtcttctccaccctcgacggggggtccatgctcaacttcgaactcaagtacctcctggcccccaccgtcgccgcgttgaacgccgcctccgcgctccccagccacatgttccagcccggtgcctaggcgctcggatcccgcgaagccacgctagaatccaagggcgccaccttggcggtggccggcttaaccgacgggctcgc

SEQ ID NO: 114018 - DNA, 1031 bp, Zea mays
  Clone ID: MRT4577_35467C.1
ccgcatggtgataacatgtcaagcaggtgcataccttcattttgaagagatcattgatgtcgctaaacttctgggattaagaagtgaagaggaagtagcggatgtggaggaggctattgccagagaagctgtggtaaatggtgatcttcaacttgcccttgatatctgtttaaatttaacaaaaaagagtcatggtgcagtgtgggatttatgtgctgcaattgctagaggccctccacttgacaatttggatactggtacccgtgaaaagctattgggtttcgctctcagccattgtgatgacgattctgttggggaattgttgaatgcttggaaggagcttcatgctcagggtacttttgagaaattaatgattacaaccgcaacaaatcctcccaatttcttgattgatggatcttcaatcacaccacttcctgtacaaagtgtgcaagacatacttgacctgagagatgacaatggccatgatagacgtagcgaccttgtgggaattgttaaagacatgctgtcaaaagtttgcttggacttttctaatggagacacacataattgggagtctatgttggaagaaaaccggaaattgttgtgctttggagcactggtattaccatggcttttgaaattgttcagtaatgaagcatgtgatggtgaaataatggatcatctcactaggagatgtcgattttcaacaaaagtaaaagcagcaaccagcatcatatattggttagttataaatggtttggcccccaatgataatataatcatgattcttgcaaagtctataatggagcctcccattgatgaagagtttgatgtacttggctgctcggttcttttgaatctcatggaccctttcaatggagtgaaaataatagaggaagagctaaaaagacgagaatcttatcaagaaattagcagcataatgagtgtaggaatgttatatagttccctcaataattctaagaaagagtgctccactcctgaacagaggagaaacctgttcgacagcaacg

SEQ ID NO: 114019 - DNA, 252 bp, Zea mays
  Clone ID: MRT4577_35468C.1
atggcttgggcagcgacaggtcttccggcgcgtacaacggggctgtgtgcccggacgagccactaccgctcgacatcgggttcggttaggcaacccgcagtggcacccataacgtggtatggaggtggcatcccgaaggcgtggggcggaggcatctcaaagacgcgaagggtgacgcaacctgccggtgtggaggtggaggcagcggcggcgaggcctccggcatggaagtggcctgacagggggcgctga

SEQ ID NO: 114020 - DNA, 1305 bp, Zea mays
  Clone ID: MRT4577_35469C.1
atccctcgcgccgcggcttcgcctccctattctggcacgttcccggccgggacctctcgaggccggaccgggacgacgcattcccgtcccccaactcagcagaaataacacgccgagggcgcaaatccccgcgatccccacgccaatcggagaagcgagccgtcgccgatcgattcaccaccgggacccaatcacaagtaaacctgcgccgggaaaccaaatccttctcaattccttcgcgacgcggaccgcaagccgaaggcgcgacgatgtccggagcggcggactaccaggagatggtggcgtcggtgccgccctcgctgaaggccatcacgctgacgcacgttcgctacagccggggcgacccgctgggtctcttcctcgcgtgggtctccctcgtcccggttttcatcagcctcggcggtttcgtctcccacttcctcttccgtcgggagctccagggcctctgcttcgccgcagggctcctcgtctctcaggccctcaatgagctcatcaaacactccgtcgcgcagtcccgcccctcgtactgcgagctgctggaggcctgcgactcccacggttggccgtccagccactcgcagtacacgttcttcttcgccacatacctgtcgctcctctccctccgccggtcgcgcgcgcgccaggtgatcgccgccgtgccatggccgcttgccttcctcaccatgctgtccagggtctacctaggttatcataccgtcgcgcaggttttcgcgggagcagtagtgggcctcgtgtttggtgctatctggtactggattgtcaataccatgcttgttaattacttcccaatgattgaggagagtgcaatcgggaggtggttgtacatcaaggatacatctcatattccagatgtgctcaaatttgagtatgataacgcaagggcagcacggaagaaagttgctactgattgatcttgttatgcttctggattgcattttgctgttgttaaggcgccttataagaattgtgcatgatatttccttcagttatgctacacacgggcacatctgcacatgtagcagcagcaacattcagagaagaaatgctcaccggagcttgtttgatttagctcttcctgggcatacgccactttgtttttccccgtatcagtcactagccagacattattttattaaaggttgttcgactataacttgataattgcttacatttgaaaaatgacgtgaacaatacatgagttcatctctgcagtctagtgtctatacgtaactaaaaaaagagatctgcgggcaatttgtgtgg

SEQ ID NO: 114021 - DNA, 327 bp, Zea mays
  unsure (1)..(327): unsure at all n locations
  Clone ID: MRT4577_3546C.1
tttaaaaaaacccggggtggggggggncnnnaggttctccggggttcggtttcccgggtgggcggctcgtgatggcggcgcctgttgtctgtgcaccgctgcttcggcggcgggccaaacaagaaaaaaaattttcgctcgcttttcaacgccnccantatttttttggggggcgcnccnccaanacatcctctatccttatacccgggggggggggtgtgccctccccccgggaaaaaataacactgaggaggcgatgcgggaacgccttccccggcatgaactgcgaggggctggacggccgcttctataccgtgaacgaggccc

SEQ ID NO: 114022 - DNA, 729 bp, Zea mays
  Clone ID: MRT4577_35470C.1
gggggatggccatgaacttggcgtagcatggcctcctctcacagcgtggtaggttccccagaacccgacgccctcgaacgtgagggtttcctttcagaagttggagggagtcccgaagcagacggacagatcgagtcgcccaaggggttggacgcgtttcccggggatgatcccgtgaaaaggcgccacgccggcccggatcgaggacagatcgatgggaggagcccgagggtttttttttagatgatgttgaggctgctacatctgtccatgaggaccttggtgagcctgacgttgccgatgacggggtcgacaacgagcgggtatttccctgggctcggcacacggtcggggtggtcgccctggtcgaaggtgatgggcttgtcggaccagtctaggtagactggcgccgccacctttaccgagcagacctcccggcgctcttgcttgcggtgccaagctgaggcattcgccacatgcccaccgtagatcataaagcagtcatggacctcggggaactcctctgccttgtgatcctccttcttgaagtcgttgtgggctcggccaccttccgccggcggcccggccctgtgggagtggcaccgaagcatgacgcattcctcaagggtgtgcttgacgggaccctgatgataggggcacgactccttgagcatcttgtcaaaaagttggcgccttcaggaggcttccgagggttcctgtgcttggcgg

SEQ ID NO: 114023 - DNA, 1062 bp, Zea mays
  Clone ID: MRT4577_35471C.1
tttttttttaaagaaagggccttcaatcgtgaggcattcattttgattgttcgaaatgacagactttgacatttgttacgattgttaagttgattcttgatagtaacactaaataatgatctatgcgtgtataagtgtcgtccgttgcaacgcacgagcatatacctagttaagcttaagaaaaaagatttagtttcccaaactaaaagaaactaaacgaggaaatcttggatttgtcttaccgtaactgttgaccccaacaagtcgttgaactcctcagcgaagctgcggaagaaggcctcgtaggcctggagcggcgacctgccgacgagcactgggagctcgtcgacggcgaaggagatgcacccgacgcggcggcgcccggagcggtccgtgaagagcacgtcggggtcggcggcggcagcgtcggccacccactcggggagcgcgtcgccgtcggtgcggagcgagacgcggaggtcgagccccgcgtcgcggaccatggcggcgacggcgcggtacccggcccactcgaaccaggccccggacccgggctgcacggcggcccaggacaccggcagctccacgccgtcgacgccgagcagcttgagcgcgcgcagcgccgccgagacggccctggagcggctcaccccgcggccgtcggagaccaccgcgtccgcggggaggcccacgaacagcctcaccgcgccatccgccgcccgctcggcggcggcctcggactcggactcggagacgagcgcccgcacggggcccggcagcctgctgccccggaggacagggagagccccgctggctgcacgccgcgccgcgccgagccggacgacgccggctagctgctggccgcggccagcccgcgacgcgtcccccacgcaccgccacctcgcaggcaccgttgccgccgtctggtgcatcagcgcggcctccattattggctgctgtcctagtgccctgtgtctgccgcgtcagcagctggtcgggacgcgtcggtcgctgcgctttgcacttttctggttggttcgcttggcggtagtaggggtccgg

SEQ ID NO: 114024 - DNA, 268 bp, Zea mays
  Clone ID: MRT4577_35472C.1
aagtagggtgattcttaaccttgtgggcagtggccgcatagcgggcgttagcacgcgccccaatgacctccactggttggcaactgattcgggtaccacagcgagctgagttggcaacttagcaaactcacaaattgtcacttgctgtgtacggccctgcttaaaaattagcagtactgcggctacaagcccgtgagctgccacggtaactgggagtactggtacgggcggcaaagaggcgttaaacctacgaccccgcaccttaaac

SEQ ID NO: 114025 - DNA, 1689 bp, Zea mays
  Clone ID: MRT4577_35473C.1
atgctcctagggttcatcgtctccgagcggggcatcgaggccaacctggagaaaatcgcggccatcaccaacatggggcctatcaaggacttgaaaggagtacagagggtcatgggatgtcttgcagcactgagccgcttcatctcgcgcctcggcgaaagaggcctacccctgtaccgcctcttaaggaagaccgagcgcttcacttggacccccgaggccgaggaagccctcgggaacataaaggcgctccttacaagcgtgcccatcctggtgcccctcgctgcgagagaagccctcttgatctacgtagccgcaaccactcaggtagtcagcgccgcaatcgtggtcgagagacgagaagaagggcatgcattgcttgtccagaggtcggtctacttcatcagtgaagtactgtccgagaccaaaatccgctacccgcaaattcagaagctactgtacgcggtaattctgacgcagcgaaagttgcgacactactacgagtctcatccggtaacggtggtgtcatccttccctctgggggagatcatccagtgccgagaggcctcaggtaggattgcaaagtgggcggtggagatcatgggcgagacaatctcgttcgctcctcggaaggccatcaagtcccaagtcttagcggactttgtggctgaatgggtcgacacccagcttccagcagctccgatccaaccgaaactctggaccatgtatttcgatgggtcgctgatgaaaacaggagcgggtgcgggcctgctcttcatctcacccctcaggaagcacctccgctacgtgctgcgcctccatttcccggcatcaaacaacgtggccgagtacgaggctctggttaacgggttgcgcatcgccatcgagctaggggttcggcgcctcgacgctcgtggcaactcgcagcttgtcatcgaccaagtcatgaagaactcccactgccgcgacccgaagatggaggctcctggaagacaagttctacgggctcgagctcaaccacatcgctcgacgaccgacgacacgcccgagctcggggaggcctcggcccagcccgaggcaccctcggccgccgagggtgaggcgctgcgcgtcgaggaagagcggaatggggtcacgcctaatcgaaactggcagaccccgtacctacaatatctccaccgaggagagctacccctcgacagagccgaagctcggcgactggcgcggcgcgccaagtcgttcgtcgtgctgggtgacgaaaaggagctctaccaccgcacccctcaggcatcctccaacgatgcatatccatcaccgaagaaggcacccgagggcttcacgcacctgctggtcgctatcgacaaattctccaagtggatcgaggtccgacccctaaacagcatcaggtccgaacaggcggtggcgttcttcaccaacatcatccatcagtttggggtcccaaactccatcatcaccgacaacggcacccagttcactagcaggaagttcctggacttttgcgaggaccaccacatccgggtggactgggccgtcgtagctcaccccatgacgaatgggcaggtagagcgtgccaacgacatgattctgcagggacttaagccgaggatctacaacgacctcaacaagttcggcaagcgatggatgaaggaactccccttggtggtctag

SEQ ID NO: 114026 - DNA, 1308 bp, Zea mays
  Clone ID: MRT4577_35474C.1
atctccgactgggacgacctggtccaagctttcgccggcaatttccagggcacgtacgtgcgccccgggaattcctgggacctccgaagctgccgacagcggtcgggagagtctctccgggactacatccggcgattctcgaagcagcgcaccgagctgcccaacatcaccgactcggatgtcatcggcgcgttcctcgccggcaccacctgccgcgacctagtgagcaagctgggtcgcaagacccccaccagggcgagcgagctgatggacatcgccaccaagttcgcctccggccaggaggcggtcgaggctatcttccggaaggacaagcagccccagggccgcccatcggaagatgcccccgaggcgtcaactcagcgcggcgccaagaagaagggcaagaagaagtcgcaagcgaaacgcgacgccgccgacgcggaccttgtcgccgcggcgagtacaagaaccctcggaaaccccccgagggccgggccacccgcggagggtggcaaggcccgcgacgacgacaagaaggaagatcaccaggcaggagacttcctcgaggtccgcgactgcttcatgatctacggtgggcaagcggcgaacgcctcggctcgacaccgcaagcaagagcgtcgggaggtctgttcggtgaaggtggcggcgccagtctacctagactggtccgacaagcccatcaccttcgaccaagccgaccaccccgaccacgtgccgagcccggggaaatacccgctcgtcgtcgaccccgtcattggcgacgtcaggctcaccaaggtcctcatggacggaggcagcagcctcaacatcatctacgccgagaccctcgggcttctgcgtatcgatctgtcctcggtccaggcgggcactgcgcctttccatgggatcatccccgggaagcgcgtccagcccctcggacaactcgatcttcccgtctgcttcggaacaccctccaacttccgaagggagaccctgatgttcgaggtggtcgggttccgaggaacctaccacgcgctcaagatgccgggccccaacggggtcatcaccgtcggccccacgtacaaacacacgttcgaatgtgacgtggagtgcgtggagtacgccgaggccctcgccgagtccgaggccctcatcgccgacctggagagcctctctaaggaggtgccagacgtgaagcgtaatgccggcaatttcgagccagcggagacggtcaagtccgtccccctcgaccccagcagcgacgcctccaagcaagtctggatcggctccgggctcgatcccaaatag

SEQ ID NO: 114027 - DNA, 1508 bp, Zea mays
  Clone ID: MRT4577_35475C.1
ctcgagttagcccatgcttcacaccatgaagctgaagagcacagacttggggcagctatggccaaagagcaggatttcctggcttgggagaaagagctagaagaggcacaagcagagctaaaccagctcaacgaacaaattgcatccaaaaggaatgtggagtccaaagctcatgaaaacgagtgcaaactacttggcctgaaaagtgagctagctgcctatgtggaaaacaaattgaatgaagaggctggaatggttcaggagcaaggttccgacgaagcaaaagaaattagtaggtcaatcaagcaggctctagcttcaaagaggaaggagcttgctgaatttaaagggaaattagaaaacgcaagaattgaagccaatttagtaagagttgttgtagaatcactcagctcagagcttgatagggagaaagcttcacttgctacattgcagcagactgagggtatggcatgcatcacagttgcttctctagaagctgagctcgacaggacagagcaagagatagaattggtacataagaaagaagcagaaactcgggaaatgatggcggagcttccaaggatgttgcagcaagcagcccaggaggcagacgatgccaagatggcagctcatttggcacaagaagaactgagaaaggccaaggaagaagctgagcgaactaaggcttctgcgacaactgcagataccaggttgcgtgcagttctgaaagaaatagaggcgtctaaagcatccaaggggctagccatagcggcagttcaagcgatgcaagagagcaatgacgcaggaagcgctggtgcttctcctcgaggagtaacgcttcctataagcgagtaccatgctcttagcaagagggttcacgaagccgaggaacttgcgagcgagagggtggcagccgcgtttgcacaaatagagttggcaaaagagtccgaatcaaggaacctagagaggctgcaagaagcatccaaggagatggatgaaaagaagagtgatctccaaatcgcgctggagagggctgagagtgcaaacgaggggaagctcggtgctgagcaggagctgagaagatggagagctgaacatgtgcagcgccggaaagcccacgaggctacacaacatccagtcagtcctgtgagaactccaccgaggatgcttgtcgagcagaagggctcttaccgggaagaaaatgaacttcccacagatccgaagttgcacaagtcaaatggtagtatggatcagtttgtttccagcgagaaatcgcggaaaaagaagtcgttcttcccccagatgtccacacttttgtctagaaaggcacagacacaaacataagactataagagtgattgttctgaagaaaagagttcgttcatgtatctttgtaaaatgtaaatggtgtaaattttaatttttgcccatgctcttgtaaattgtctatttgtctcatacttgaagaagactgagtgtatgtctttgtatgatgttcttggagagac

SEQ ID NO: 114028 - DNA, 3198 bp, Zea mays
  Clone ID: MRT4577_35476C.1
atgggcagtctccagcaacctctccggcccgggacggtgctccgtttcgggagtcttgagttcatgtccttcgacggcagctacgacatgatactccttccaccgccacgcgacaacgacaatggcggccgacaacccgcccgccggcggcggaatcgacgacatcttccccgcgtggtggaagaacaacattcgagctcgccccgtcctctcccccgccaacggaggaggaggcggggcaaccaaggccaagcaggaggccgcgcttcgtcggccgtcgagcgaatcgacgtccccagcgccctaacggaaggcacgccgggcgtcgacctcgcgttcgagacgaaggcaagcgccgtccccccgcgacacaccgatcccgagcaagaagacgacgccagcgcgctcgcggagggcttgcaggacgtcgccctcatacctgagacgacggtgcaaccagtccccgatgtgactacgtcgctcctcgtcgaccaaaaggtactgactaattcccatcctacgtcatttcgactcggcctcaacccgcctagcgacctcgctttggcgggcgctctcgttgaggcgagtgcaaccccactggggtttcgtatgcggtcgccttgggaccgattgacggacgtctcgacctacgggccctctgggtccgaggaagatgacgatcccagcatctgttgggatttctctggatttggcaaccccagtgccatgcgggacttcatgaccgcatgtgactactgcctctccgactgttccgacggtagccgcagccttgacgacgaggactgcggcccaagccgcgaatgtttccacgtcgagctaggggatccctccgaaggcaaccatcttggcatgccggaggatggtgatcttcctaggccggtgcctcacgccgacatcccgcgggagctagctgtggtccccgttccggcggggggtcacgacccacagctcgagcaagtccgcggggcgcaggccaggctcgacgagggagcaggagcgcttgagacgatccgccggggcgtcgggcaggtatgggcgggccaacccccggccggagaaatacgtcacctgccccaaggtttccaacaccgcgtcgccaacgacgtcagggtcaggccgccgcccgcatccagcggggtcggtcagaacctggcagccgcagcgatgctcctccgcacgatgccggagccatcaaccaccgagggtcggcgaatccagggagagctcaagaatctcctggaaggcgctgcggtccgacgggccgagagctctgcctcccgaaggcagggatacccctcggaacctcatgccgcgacttcccgattcatgcgggaagcctcggtctacaccgggcgcacgcgcaacaccgcgcctgcggccccgggccacctcggcaacgagcaccaccgtcgcgaccgtcgggcccacctcgacgaaagggtgcgccgaggctaccaacccaggcgtggggggcgctacgacagcggggaggatcggagtccctcgcccgaaccacccggtccgcaggccttcagtcgggccatccgacaggcgccgttcccgacccggttccgacccccgactactatcacaaagtactcgggggaaacgaggccggaactgtggctcgcggactaccgcctggcctgccaactgggtggaacggacgacgacaacctcatcatccgtaacctccccctgttcctctccgacaccgctcgcgcctggttggagcacctgcctccggggcagatctccagctgggatgacttggtccaagccttcgccggcaatttccagggcacgtacgtgcgccccgggaattcctgggacctccggagctgccgacaacagccgggagagtcgctccgggactacatccggcgattctcgaagcagcgcaccgagctgcccaacatcaccgactcggatgtcatcggcgtgttccttgccggcaccacctgccgcgacctggtgagtaagttgggtcgcaagacccccaccagggcgagcgagctgatggacatcgccaccaagttcgcctctggccaggaggcggtcgaggctatcttccgaaaggacaagcagccccagggccgcccatcggaagaggctcccgaggcgtctactccacgcggcgccaagaagaaaggcaagaagaagtcgcaatcgaaacgcgacgccgccgacgcggaccttgtcgccgccgccgagtacaaaaccctcggaagccccccggaggggcccgtcaagcacaccctcgaggagtgcgtcatgcttcggcgccacttccacagggccgggccacccgcggagggtggcagggcccgcgacgacgacaagaaggaagatcaccaagcaggagagtaccccgaggtccgcgactgcttcatgatctacggtgggcatgcggcgaatgcctcggctcggcatcgcaagcaagagcgccgggaggtctactcggtgaaggtggcggcgccagtctacctagactggtccgacaagcccatcaccttcgaccaagctgacccccccgaccacgtgccgagcccggggaaatacccgctcgtcgtcgaccccatcgtcggcgacgtcaggctcaccaaggtcctgatggacggaggcagctgcctcaacatcatctacgccgagaccctcaggctcctgcgcgtcgatctgtcctccgtcccggcaggcgctgcgcccttccacgggatcatccctgggaagcgcgtccagcccctcagacgactcgaccttcccgtctgcttcggaacgccctccaacttccgaagggagaccttgacgttcgaggtggtcgggttccgaggaacctaccacgcggtactggggaggccatgctacgcgaagttcatggccatccccaactacacctacctgaagctcaagatgctgggccccaacggggtcatcaccgtcggccccacgtacaaacacgtgttcgaatgcgacgtggagtgcgtggagtacgccgaggccctcgccgagtccgaggccctcatcgccgacctggagaacctctccaaagagctgccagacgtgaagcgtcatgccggcaacttcgagccagtggagacggttaaggccgtccctctcgaccccagtggcgacgcctccaagcagatccggatttgttccgggctcgaccccaaatag

SEQ ID NO: 114029 - DNA, 2478 bp, Zea mays
  Clone ID: MRT4577_35477C.1
atgccgttcggtttgaggaatgtgggcgcgacgtaccagcggtgcatgaaccatgtgttcggcgaacacatcggacgcacagtcgaggcctacgtcgatgacatcgtagtcaagacaaggaaggcttccgacctcctctccgaccttgaagtgacattccgatgtctcaagacgaaaggagtcaagctcaatcccgagaagtgtgtcttcggggtgcctcgaggcatgctcctggggttcatcgtctccgagcgaggcatcgaagccaacccggaaaagatcgcagccgtcaccagcatgggacccatcaaggacttaaaaggcgtacagagggtcatgggatgcctcgcggccctgagccgcttcatctcacgcctcggcgaaagaggcctgcctctgtaccgcctcttaaggaaggccgagtgtttcgcttggacccctgaggccgaggaagccctcgagaacctgaaggcgctccttacaaaggcgcctgtcttggtgcccccagctgatggagaagccctcttggtctacgtcgccgccaccactcaggtggttagcgccgcgattgtggtcgagaggcaagaggaagggcatgcactgcccgttcagaggccagtctacttcgtcagcgaggtactgtccgagaccaagatccgctacccacaagttcagaagctgctgtatgctgtgatcctgacgaggcggaagttacgacactacttcgagtctcatccggtaactgttgtgtcatccttccccctgggggagatcatccagtgccgagaggcctcgggcaggatcgcgaagtgggcggtggaaatcatgggcgaaacgatctcgttcgcccctcggaaggccatcaaatcccaggtgttggtggacttcctggccgaatgggtcgacacccagctgccgacggctccgatccaaccggagctctggaccatgtttttcgacgggtcgctgatgaagacaggagccggcgcgggcctgctctttatctcgcccctcggaaagcacctgtgctacgtgctacgcctccatttcccggcgtccaacaatgtggccgagtacgaagctctggtcaacgggttgcggatcgccatcgagctaggggtcagacgcctcgacgcccgcggtgattcgcagctcgtcatcgaccaagtcatgaaaaactcccactgccgcgacccgaagatggaggcctactgcgatgaggttcgacgcctggaagacaagttctacgggctcgagctcaatcacatcgctcggcgctacaacgagactgcggacgagctggctaaaatagcctcggggcgagcaacggttcccccggacgtcttctcccgggatctgcatcaaccctccgtcaagatcgacgacgcttccgagcccgaggcaccctcggcacagcccgaggtaccctcggcccccgagggcgaggcactggacgtcgaggaggggcagagcggggccacgcctgatcgagattggcaggccccgtacctgcgatatctccgccgaggagagttacccctcgaccaagctgaggctcggcgggtagcgcgacgcgccaagtcgttcgtcttgctgggcgatgaggacgagctctaccaccgtagctcctcgggcatcctccagcggtgcatctccatcgccgaaggtcaggaactcctgcaagaaatacactcgggggcttgcggccatcatgcggcgcctcgagcccttgtcgggaatgctttccggcaaggcttctactggccgacggcggtggctgacgccactagaattgtccgcacctgcgaagggtgccaattctatgcgaagcagacccacctgcccgctcaggctctgcagacgatacccatcacctggcccttcgttgtatggggtctggacctcgtcggtcccttgcagaaggcgcccgggggctacacgcacctgctggtcgccatcgacaaattctccaagtggatcgagggtcccaaactccatcatcaccgacaatggtacccagtcaccggcaaaaaattcttggatttttgcgaggatcaccacatccgggtggactgggccgtcgtggctcatcccatgtcgaatgggcaagtagagcgtgccaacggcatgattctacaagggctcaagcctcggatctacaacggcctcaacaagttcggcaagctatggatgaaggaactcccctcggtggtctggagcctaaggacgacgccgagtcgtgccacgggtttcacaccgttcttcctggtctacggggccgaggccatcttgcccactgacctggagtacggctcctcgaggacgagggcctacaccgatcaaagcaaccaagctagccgagaagaatcgctggaccagctggaggaggctcgggacagggccttactacactcggcgcggtaccagcagtccctgcgacgctaccacgcccgaggggtccggccccgagacctctag

SEQ ID NO: 114030 - DNA, 1339 bp, Zea mays
  Clone ID: MRT4577_35478C.1
cattgggaccctcgaggccggccggggggcgtggaacgttgactttttcactgtctgcccctgatgtccgttggctcccgacggaggccgccgccgccgcatcaccaccgtcgcgccatgacacctgcctcctccgtctccgtccccgtccccgcgcccgttcccgcgccccctaagcctctctacctccggggcccggtcatcgcaggcgccgtcgcgctggccgcgtttctcctcctcgccgccgcctacgccaccaggcgagcagggtccccgccggccgccctcctcgcccacccagctgtttccaccaggttcttctccttcgacctggtgcgcgagtaccctcacgacccggccgccttcacccagggtatcttgtacgccggaaatgacacgcttttcgagtccactggcctctacggcaggtcttcagttcgaaaggttgagcttcagaccggaaaagttttggttaaccaccaaatggacggagatgtgtttggagaaggtttaactcttcttggtgacagattgtttcaggttacctggttgaagaacgacgggtttatatatgaccggcataacttctgccaaatgcacgagttttacccataaaatgcgagatggttggggtctggcgactgatggaaaagttctttttggcagtgatggcacctcaatgctgtataagctggattcaaagtcacttgaagtcatgaaagtggtgactgtcaagtatcacggtaatcaagtcccctatcttaatgagctggaatatatagatggtgaagtctgggcaaatgtctggcagacagattgcatagctagagtgtcccctgaagatggcctagtggtgggttggatctttcttcatgagctgaggcggcagttgtggaactcaggcaacacgaatattgacgtcttaaacgggatagcttgggatgaaagaaggcacagattatttgtgacagggaaactgtggccaaagctatatgagatcaagctacgggcagtagatggtccagcagatggatctgtagaaaagctttgtccaaaagccagcttctatcgctgaagagtgtagaaccgcatatacactgggtgtgctaacatgggccttcatttgtttaaacgcacgatgcgaaggatgtggagatgtgagtacgtacatgtttgatctggtaccactgtcatatatatatatatatatacacccatgagttagtagatgtagctgtacattgttgtgacctgtatgaattttgatgatggctgtgttgtttgtgttaagagtgaattgcaacagattttgatgcattcaatgcaacttaatagcttg

SEQ ID NO: 114031 - DNA, 3006 bp, Zea mays
  Clone ID: MRT4577_35479C.1
atgggcagtctccagcaacctctccaacccgggacggtgctccgtttcgggagtcttgagttcatgtctctcgacggcagctacgacatgatactccttccaccgccggacgacagcgacaatggcggccgacaacccgcccgccgacggcggaatcgacggcgtcttccccgcgtagtggaggaccaacattcgagctcgccccgtcctctcccctgccaacggaggggaaggcggggcaaccaaggccaagcgggaggcagcgcctcgtcggctatcgagcgagtcgacaacgccgacactccaacggggggcgcaccgggcatcgacctcgcgcttgagacgaaggcgagcgtcgtctccccgcaacacgctaatcccgagcaaacggacgacaccagcacgctcgcggaaggcttgctgggtgtcaccctcgtacctgagacgacggtgcagtcagtccccgacgtgacttcatcaccgctcgtcgaccaagaggtaccgaccgattcccatcccacgtcattcggattcagcctcgacccgcctagcggcttcgctttggcgggcgctctcgtagaggcgagcccaaaccctctggggtttcgtatgcggtcaccttgggaccggctgacggacgtctcgacctacgggccctctgggtccgaggaagacgacgagcccagcttctgttgggatttctctggacttggcaaccccggtgccatgtgggactttatgaccgcatgcgactactgcctttccgactattccgacggtagccgtagcctcggcgacgaggactgcggcccaagtcgcgaatgcttccacgtcgatctagggggtccctccgaaggcaaccatctcggcatgccagaggacggtgatctccctaggccggtgcctcgcgttgacatcccacgggagctagctgtggtccccgttcaggcggggggccatgacccacagctcgagcaaatccgcggggtgcaggccaggctcgacgagggagcaggagcgcttgagccgatccgccgggacgtcgggcaggcatgggcgggccaacctccggccggagaaatacgtcatctaccccagggcttccagcaccgcatcgccgacgacgtcaggcctcggtctacaccgggcgcacgcgcaacacagcgcctgtggccccgggtcgcctcgacaacgagcaccatcaccgcgaccgtcgagcccacctcgacgagagggtgcgccgaggctaccaccccaggcgtgggggacgctacgacagtggggaggatcggagtccctcgcccgaaccacccggtccgcaggccttcagccgggccatacgacgggcggcgttcccgacccggttccgaccccccgactactgtcacaaagtactcgggggagacgagaccggaactgtggctcgcggactaccgtctggcctaccaactgggtggaacggacgatgatgacctcatcatccgcaacctccccctgttcctctccgacaccgctcgcgcctggttggagcacctgcctccggggcagatctccaactgggacgacctggtccaagctttcaccggcaatttccagggcacgtacgtgcgccccgggaattcctgggacctccgaagctgtcgacagcagccgggagagtctctccgggactacatcctgcgattctcgaaacagcgcaccgagctgcccaacatcaccgactcggatgtcatcggcgcgttcctcgctggcaccacctgccgcgacctggtgagcaagctgggtcgcaagacccccaccagggcgagcgagctgatggacatcgccaccaagttcgccttcggccaggaggcggtcgaggctatcttccgaaaggacaagcagccccagggccgcccatcagaggatgcccccgaggcatcaactcagcgcggcgccaagaagaagggcaagaagaagtcgcaagcgaaacgcgacgccgccgacgcggaccttgtcgccgccgccgagtacaaaaaccctcggaaaccccccagaggtgccaacctcttcgacaagatgctcaaggagccgtgcccctatcaccaggggcccgtcaagcacacccttgaggagtgcgtcacgcttcggcgccacttccacaaggccgggccacccgcggagggtggcagggcccgcgacgacgacaagaaggaagaccaccaggcaggagagttccccgaggtccgcgactgcttcatgatctacggtgggcgagcggcgaatgcctcggctcggcaccgcaagcaagagcgccgggaggtctgctcggtgaaggtggcggcgccagtctacctagactggtccgacaagcccatcaccttcgaccaagccgagcaccccgaccatgtgccgagcctggggaaatacccgctcgtcgtcgaccccgtcatcggcgacgtcaggctcaccaaagtcctcatggacggaggcagcagcctcaacatcatctacgccgagaccctcgggctcctgcgtgtcgatctgtcctccgtccgggcaggcgctgcgcccttccatgggatcattcccgggaagcgcgtccagcccctcggacaactcgaccttcccgtctgcttcggaacactccccaacttccaaagggagaccctgacgttcgaggtggtcgggttccgaggaacctaccacgcggtactgggaagaccatgctacgcaaagttcatggccgtccccaactacacctacctgaagctcaagatgccgggccccaacggggtcatcaccgtcagccccacatacaaacacgcgttcgaatgcgacgtggagtgcgtggagtacgttgaggccctcattgccgacctggagagcctctctaaggaggtgccagacgtgaaacgtcatgccggcagcttcgagccagcggagacggttaaggccgtccccctcgaccccagcggcgacgcctccaagcagatccggatcggctccgggctcgaacccaaatag

SEQ ID NO: 114032 - DNA, 314 bp, Zea mays
  Clone ID: MRT4577_3547C.1
aacaaaaagaggggggggtttcataaggaacatgcctgcctgggacaaatttaaagggggtcccaggaacccccgtccatggaaataaataaagcccgcttgaccccaaaaataaaccaaacaaaccgccaaaggggcatggccgggtttccgtctcctttttttttcacacccccaaacccaagggccatgtgcccggaaaggtttttttattcagtagtagtccctaccagtagtaaacattcaagtagggaccatccctagggaaatatgggcataacgggcccatccgggggccccccccacccgtcccg

SEQ ID NO: 114033 - DNA, 4831 bp, Zea mays
  Clone ID: MRT4577_35480C.1
atcggaagtgtccggcaacgtcaccagcccgggacgctgctgcgatgggggaaggtggagttcatggcagtcggggaggcctgcgagatggtagcaggggatccgccgcgcgaggacgacagcgaggaggggcagagcgcccgacggcggtgggcaggaggggcgggggagcgataggcaggcggggggcggccgagggaactagtgcagttctggcgtttccttcaaaatagcctgcctcacctgtgccaggggaaacgacaagttatctgagcattttatgtttgaagccatgtgactgaggtctgttattttttcccctgagggtcgaggtttggttgtgagcataatgcatttgcaaagttttaccttcaaccccaacctttcacatttcaccatctagctcgtgcatgaattgttgggcgttaaactcgttcctgagataacggtgcagtccgtccccgacgcgccatcgtcaccatctgtcgaacaaaaggatgcgtccgctttccacgctgtgccttatagatacaacttcgacccaccaagcgaccccgcttcgttggacgctttcataaaggcatatcctaaccttccggggtaccatatgtggtcaacctgggaccgactgacgaccgtctcaacctacgggcccccgggttccgaggaagatgacgagcccgactctggttgggatttctccgggctcagtaaccccagtgccatgcgagacttcatggccgcatgtgactactgtctctccgattactctgatggtagccacagcctcgacgacgaggactgtggcccaagtcatgactgtttccacgtcgatctagggggtctcgacgaaggcaaccaccttggtatgccggaggacggcgatcccactaggcctgtgcctcgcgttgacatccttcgggagctagctgtggtccaagtccctgcggggggtcaggacacacagctcgagcaaatccgcgagatgcaggccaggctcgacgaggaagcagggcaacttgtgcagctccggcagaacatcggacaggagtgggcaggccgggcaccagccggagaagcgcgtcatctagcccaggacgtccagcactggatcgctgacgaagccagggcaaggctacccccggcttccagtgggctgggtggaacggacgatgacaacctcatcatccgcaacctccccctgttcctctccgacgccgcccaagcctggctagagcatctgcctcctgcgcagatctccaactgggacgacctggtcaaagccttcgccggaaacttccagggcacatacgtgcgccctgggaactcctgggatcttcgaagctgccgccagcagccaggcgaatccctgcgggagtacatccgacgatttttgaagcagcgcaccgagctgcccaacatcaccgacttagatgtcatcggcgcgttcctcgccggcaccacttgccgcgacctggtgagcaagctgggtcgcatgactcccaccagggcgagcgagctgatggacatcgccaccaagttcgcctctggccaggaggcggtcgaggccatcttccggaaggacaagcagcctcagggacgccagcaggaagacgtccccaaggcgtccgctcagcgcgacacgaagaagaagggcaagaagaagtcgcaagcgaaacgcgacgccgccgacacagatcttgtcgccgccgccgagcataggaacccttggaagcctcccggaggggccaacctattcgacaagatgctcaaggagtcgtgccctatcatcaggaccgggcccccggcggaaggtggcaaaggccatgacaacgacaagaaggagggccacaaggcagaagagttccccgaggtccatgactgcttcatgatctacggtgggcaagtggtgaacgccttggctcggcaccgcaagcaggagcgccgggaagtctgctcggtgaagatgtcgggccctaacggggtcatcaccgtcggatccacgtaccgacacgcgtacgaatgcgatgtggagtgcatggagtacgctgaggccctcgccgaatccgaggccctcatcgccgacctggagagcctctccaaggaggtaccagatgcgaagcgccacgccggcaacttcgagccagcagaggcggaagcagtgcttgtcgacattctccgcgcgaacgccgagggttttgcgtggagtccctcggacatgcctggcataccgagggatgtcgctaagcactcgctggatatccgagctagagcccaacctatgaagcagcctctgcgccgattcgacgaagaaaagcgcagagccataggcgaggagatccacaagctgatggctgcagggttcgtcaaagaggtattccatcccgaatggctagccaaccttgtgcttgtgaaaaagaaaggtgggaagtggaggatgtgtgcagactacactggtctaaacaaagcatgtccgaaggttccctaccctctgcctcgcatcgatcaaatcgtggattccactgctgggcgcgaaaccctgtcattcctcgatgcctactcagggtatcaccaaatcaggatgaaagagtccgaccagctcgcgacttccttcatcacacctcttggcatgtactgctatattactatgccattcggtttaaggaatgcaggcgcgacataccaaaggtgcatgaaccacgcttacgtcaatgacatcgttgtcaagacgaggaaagcctccgacctcctctctgaccttgaaacgacattcaagtgtctcaaggcgaaaggcgtgaaactcaatcccgagaagtgtgtcttcggagtcccccgaggcatgctcctggggttcattgtctccgagcggggcatcgaggccaacccggagaaaatcgcggccatcaccaacatggggcctatcaaggacttgaaaggagtacagagggtcatgggatgccttgcggctctgagccgcttcatctcgcgcctcggcgaaagaggcctacacctgtaccgcctcttaaggaagaccgagcgcttcacttggaccctcgaggccgaggaagccctcgggatcttaaaggcgctccttacaagagcgggcgcgggcctgctcttcgtctcaccccttggaaagcacctccgctacgtgttgcgcctccatttcccggcgtcaaacaacgtggctgagtacgaggctctggttaacgggttgcgcatcgccatcgagctaggggttcggtgcctcgacgctcatggcgactcgcagcttgtcatcgaccaagtcatgaagaactcccattgccgcgacccgaagatggaagcctactgcgacgaggtttggcgcctgaacgacaagttctacgggctcgagctcaaccacattgcccgacggtacaatgagaatgtggacgagctggctaaaatagcctcggggcggacaacggttcccccggacgtcttctcccgagacctacatcaaccctccgtcaagacagacgacacgcccgagcccgaggaggcctcggccctgcccgaggcaccctcggtcgccgagggtgaggcactgcgcatcgaggaagagcggaatggggtcatgcctaatcgaaactggcagaccccgtacctgcaatatctccaccaaggagagctacccctcgacagagccgaggcttggcgactggcgcggcacgccaagtcgttcatcttgctaggtgacgaaaaggagctctaccgccgcagcccctcaggcatccttcagcgatgcatatccatcaccgaaggtcaggagctattgcaagaaatacactcgggggcttgcggtcatcacgtagcgcctcgagccctcgttggaaacgccttccgacaatgtttctattggccaaccgcggtggccgacgccactaggattgtacgcacctgccaagggtgtcaattctacgcaaggcagacacacctgcccgctccggctctgcaaacaatacccatcacctggccgtttgctgtgtggggtctggacctcgtcgctcacttgcagaaggcacccgggggctacacgcacctgctggtcgctatcgacaaattctccaagtggattgaggtccgacccctaaacaacatcaggtccgaacaggcggtggcgttcttcaccaacatcatccatcgctttggggtcccgaactccatcatcaccgacaacggcacccagttcactggcaggaagttcctgtacttctgcgaggaccaccacatctgggtggactgggccgccgtagctcaccccatgacgaatgggcaggcgatggatgaacgaactcccctcggtggtctggagtctgaggacgacaccaagccgagccacgggcttcacgccgttctttctagtctatggggccgaggctatcttgcccacagacttagaatacggttccccgaggacaagggtgtacgacgaccaaagcaaccagaccagccgagaagactcactggaccagctggaagaggcttgggacttggcctgactacactcggcacggtatcagcagtctctgcgacgctaccacgcccgaggggttcggtcccgagacctccaggtgggggacttggtgcttcggctacgacaagatgcccgagggcgccacaagctcacacctccctaggaggggccattcatcatcgccaagattttgaagcccggaacatacaagttggccaacagtcaaggcgaggtctacaacaacgcttggaacatacgacagctacatcgcttctacccttaagatgttttcaagtcgttcatatacctcgttctctttacatacacaaataa

SEQ ID NO: 114034 - DNA, 293 bp, Zea mays
  Clone ID: MRT4577_35481C.1
agtacgtgttgcaggcggaagaagcgctaactgaggagctacttttgatacggacagggatgactcatatagtgcctccactgattccacgagatcgcatgatcgtatctagtcagatgatgagcttgctatgtcgacaacaagactgtctgctaatgcagcgaatacatacgatgctgcattgtacgcataggccgatgctgctatatccataaacgcggacactttctgtgtactgttagcaactgcatgatactagatcagagtatatatacgtagtgtgacatcgtgct

SEQ ID NO: 114035 - DNA, 242 bp, Zea mays
  Clone ID: MRT4577_35482C.1
ataaaaaaaacttcctcaccgggttacaacaaaaaattcctttagaataataggacgcttacgggtcattacaacttaaagttacctcggggggggggaaagacaactttcctcggggggaataagaggaaaacatctaatatccccggtttttgggcatacatctagaaaaatcttataattgaaacggagggggggcattttagggggattcttaagccccaagttgcccggacgcgggg

SEQ ID NO: 114036 - DNA, 4938 bp, Zea mays
  Clone ID: MRT4577_35483C.1
atggcggaagagcagcatccgggtttgtcccgtcgccttcctcgccgcaggagaacgaggcggggcaaccgtggccaggcaggaggcggcacctcgtcggctgtcgagcgagtcaacgacgctggcaccccagcgggggacatgtcgggcattgtcctcgcgcctgagacgacgacgagcgtcgcttccccgcaacgtgccaaccccaagcggacagatgacgccagcactctcgcggaggacttgctgggcgttagcttcgtacctgagataacagtgcagttcatccccgacgcgacttcgtcaccctccatcgatcaaaaggtatcgtccgttttccaccctgtgccttttagattcagcttcgatccaccaagcgaccctgcttcggtgagcgctttcataaaggcatatcctaaccttccggggtaccatatgtggtcaacctgggaccgactgacggccgtctcgacctacggtcccccgagttccgaggaagaagacgagcccgactctggttgggatttctccgggcttggtaatctcagtgccgtgcgagacttcatgaccgcatgtgactactgcctctccgattgctccaatgatggccacagccttgacgacgagtgttgtggcccaagtcgcgaatgtttccacatcgatctagggggtcacgacgaaggcaaccaccttggtatgccagaggatgacgatccccctgggcctgcgcctcgcgttgacatcctgcgggagctagctgtggtcccagtccttgcgggggggagaactcaagaatctcctggaggacgtcgcggtccgacgggccgagagctctgcctcctgaaggcaagggtgcccccggagcatcgcgcagcgacttcccgattcatccgggaagcctcggtccacaccgggcgcacgcgggacgcaacacctgtagccccgggttgcctcggcaacgagcaccactaccgcgaccgtcgagcccgcctcgacgagaagggcacgtacgtgcgccctgggaactcttgggatctccgaagctgccgccagcagccaggggaatccctgcgagagtacatccggcggttttcgaagcagcgcaccgagctgcccaacatcaccgactcggatgtcattggggcgttcctcgccggcaccacttgtcgcgacctggtgagcaaactgggtcgcaagactcccaccaaggcgagcgagttgatggacatcgccaccaagttcgcctttggtcaggaggcggtcgaagccatcttccggaaggacaagcagcctcagggacgccagcaggaagacatccttgaggcgtccgcccagcgcggcacaaagaagaaggccaagaagaaggcgcaagcgaagcgcgacgccgctgatgcggatctcgtcgctgctgtcgagcacagaaaccctcggaagcctcctggaggggccaacctgttcgacaagatgctcaaggagtcgtgcccctatcaccagggccccgtcaagcacacccttgttgaatgtggcaaaggccaagacaacgacaagaaggagagcgacaaggcagaggagttccccgaggtccacgactgtttcatgatctacggtgggcgagtggcgaacgcttcggctcggcaccgcaagcaggagcgccgggagatctgctctgtaaaggtggcggcgccagtctacctagactggtccgacaagcccatcaccttcgaccaaggcgaccaccccgactgcttgccgagcctaggaaagtacccgcttgtcgtcgaccccgtcatcggcaacactaggctcaccaaggtcctcatggacggaggcaggagcctcaacatcatctacgccgagaccctcgggctcttggagatcgatctgtccacgatccggcccggaacctaccatgtggtgctggggagaccgtgctacaccaagttcatggccgtccccaactacacctacctcaagctcaagatgtcgggccccaacggggtcatcaccgtcggatccacgtaccgacacgcgtacaaatgcgacgtggagtgcacggagtacgctgaggccctcgcagagtccgaggccctcatcgccgacctagagtgcctctccaaggaggtgcctgatgcgaagcgccacgccgacaacttcgagccagtagaggcggaagcagtgctcgtcgactttctccgcgcaaacgccaaagtttttgcgtggagtctctcggacatgcctggcatatcgagggatgtcgccgagcactcactggatacccgagccggtgcccgacccgtgaaggagcctctgcgccatttcgacgaagaaaagcgcagagccataggcgaggagatccacaagctgatggctgtagggttcatcaaagaggtattccatcctgaatggttagccaaccctgtgcttgtgaaaaagaaaggtgggaaatggatgatgtgcgtagactacactagtctaaacaaagcatgtccgaaggttccctaccctctgcctcgcatcgatcaaattgtggactccactgctgggtgtgaaaccctgtcattcctcgacgcctattcaggctgtcaccaaatcaagatgaaagagtccgaccagctcgcgacttctttcatcacaccttttggcatgtactgctatactactatgccatttggcttgaggaatgcaggtgcgacataccaaaggtgcatgaaccacgtgttcggagagcacatcggccgaacggtcgaggcttacgtcgatgacatcgtagtcaagacgaggaaagcctccgacctcctctctgaccttgaaacgacattcaagtgtccgagagcgaagggcgtgaaactcaatctcgagaagtgtgtcatcggagtcccccgaggcatgctcctggggttcatcgtctctgagcggggcatcgaggccaacccagagaaaatcgcggacgtcaccaacatggggcctatcaaatatttgaaaggagtacaaagggtggtcagcgccgcgatcgtagtcgagagacgagaagaagggcatgcactgctcgtccagaggtcggtctacttcatcagtgaagtgctatccgagaccaagatccgttacccgcaaattcagaagctaatgtacgcagtaattctgacgcggcgaaagttgcgacactacttcaagtcccatccggtgactgtggtgtcatctttccccctgggggagatcatccagtgccgagaggcctcgggagcaggtgctggcctgctgttcatctcacccctcgggaaacatctccgctacgtgctgcgcctccatttcccggcgtcaaacaacgtggccgagtacgaggatctggttaatgggttgcgcatcgccatcgagctaggggttcggcgcctcgacgctcatgacgattcgcagcttgtcattgaccaagtcatgaagaactctcactgccgcgaccagaagatggaggcctactgcgacgaagttcgacgcctagaagacaagttctacgggctggagctcaaccacacaacggttcccccggacgtcttctccagagacatacatcaaccctccgtcaagaccgacgacacgcccgagcccgaggaggcctcagcccagcccgaggtatcctcggccgccgaggatgaggcattacgcgtcgaaggagagtggaatggggtcacacctaatcgaaactggcagaccctgtacctgcaatatctccaccgaggagaactacccctcgacaaggccgaagctcggcgactggcgcggtgcgccaagtcgatcgtcttactaggtgatgaaaaggagctctaccaccgcaacccctcaggcattctccaacgatgcatatccatcaccgaaggacaggagctattgcaagaaatacactcgggggcttgcggtcaccatgcggcacctcgagccctcgttgggaacgccttccgacaaggcttctattggccgaccgtggtggccgacgccactaggattatgcgctcttcccaagggtgtcaattctacgcgagacagacacacttgcccgctcaggccctgcagacaatacccatcacctggtcgtttgctgtgtggggtctggacctcgtcggtcccttgcagaaggcacccgggggctacacgcacctgctggtcgccatcgacaaattctccaagtggatcgaggtccgacccctaaacagcatcaggtccgaacaggtggtggcgttcttcaccaacatcatccatcgctttggggtcccgaactccatcatcaccgacaacggcacccagttcaccggcaaaaagttcctggacttctgcgaggatcaccacatccgggtggactgggccgccgtggctcaccccatgacgaatgggcaggtggagcgtgccaacggcatgattctgcagggactcaagccgcggatctacaacgacctcaacaagttcggcaagcggtggatgaaggagctaccctcggtggtctggagtctgaggacaacgccgagccgagccacgggtttctcgctgttctttctagtctatggggccgaggctatcttgcccacagacttagaatacggttccccgaggacaaaggcctacgacgaccaaagcaaccagaccaaccgagaagacttactggaccagctggaagaggctcgggacgtggccttactacactcggcgcggtatcagcagtccctgcgacgctaccacgcccgaggggttcggccctgagacctccaggtgggcgacctggtgcttcggctgcgacaagacgcccgagggcggcacaagctcacgcctccctgggaaaagtcgttcgtcatcgtcaaggttctgaagcccgggacatacaagctggccaacagtcaaggcgaggtctacagcaacgcttggaacatccgtcagctacgtcacttctacccttaa

SEQ ID NO: 114037 - DNA, 228 bp, Zea mays
  unsure (1)..(228): unsure at all n locations
  Clone ID: MRT4577_35484C.1
tgcggncaaaaacccggggggagagccaaaatttaatccccgggtctttcaaaaacattggtgtctttcttgtacaagagagcctaatacattgcaagttgcttcccaagcccgttactattgaccaaaatcccctttggttaagaccaattcccccgccccctcattaaaaagggctatcaagactctttttgtgccacgaatcatgcgtttttatgataataaaaa

SEQ ID NO: 114038 - DNA, 1524 bp, Zea mays
  Clone ID: MRT4577_35485C.1
atggaagcctactgcgatgaggttcggcgcctggaggacaagttcttcgggctcgaactcaaccacatcgcccgacgatacaacgagactgtggacgagctggctaagatagcctcggggcgaacaacggtccccccggacgtcttctcccgagacctacatcaaccctcagtcaagaccgacgacacgcccgagcccgagaagcccgaggcaccctcggcccccgagggtgaggcactgcgcgtcgaggaagagcggaatggggtcacgcctaatcgaaactggcagaccctgtacctgcaatatctccaccgaggagagctaaccctcgacagagccaaagctcggcgactggcgcggcgcgccaagtcgttcgtcttgctgggtgacgggaaggagctctaccaccgcagcccctcaggcatcctcaagcgatgcatatccatcgccgaaggtcaggaactattacaagaaatacactcgggggcttgcggtcatcacgcagcacctcgagcccttgttggaaacgccttccgacaaggtttctactggccaaccgcggtggccgacgccacaaggattgtacgcacctgccaagggtgtcaattctacgcaaagcagacccacctacccgctcaggctctgcagacaatacccatcacctggtcgtttgctgtgtggggtctggacctcgtcggtcccttgcagaaggcacccgggggctacacgcacctgctggtcgctatcgacaaattctccaagtggatcgaggttcgacccctaaacaacattaggtccgaacaggcggtggcattcttcaccaacatcatccatcgattcggggtcccgaactccatcatcaccgacaacggcacccagttcaccggcagaaagttcctggacttctgcgaggatcaccacatccgggtggactgggccgccgtagctcaccccatgacgaatgggcaagtagagcgtgccaacggcatgattctgcaaggactcaagccatggatctacaacgacctcaacaaattcggcaagcgatggatgaaggaactcccctcggtggtctggagtctgagaacgacgccaagtcgagccacgggcttcacgccgttttttctagtctatggggccgaagctatcttgcccacggacttggaatacggatccccaaggacgagggcgtacaacgaccgaagcaaccagtccaaccgagaagactcactggaccagctggaagaggctcgggacatggccttactacactcgacgcggtatcagcagtccctgcaacgctaccacgcccgaggggttcggtcccgagacctccaggtgggcgacttggtgcttcggctacgacaagacgcccgatggcgcctcaagctcacgcctccctgggaagggccattcatcatcgccaagattttgaagcccggaacatacaagctggccaacagtcaaggcgaggtctacatcaacgcttggaacatccgacagctacgtcgcttctacccttaa

SEQ ID NO: 114039 - DNA, 2347 bp, Zea mays
  Clone ID: MRT4577_35486C.1
atcgcaggagcagaaaagaaaccaatttttttttgttttctcttacagaagagaacaaacaaaggcttgagagcggtgtacagctagcgcctgcgtcttgacgatacgcgttagcaagtagcaagactcaagactcaagagggatcccttagcaaaaccggtctcgcaaagggacacaattccctaggaaccgcacaaaagcttcctgcaatccggcggctttggcgttgaacctccccccttgatcagtagtagaatcggctgctaaagatttctatttttatttttttctcggttcggaaggtgccgtgcggcgagcgaaataaatcgctgcggcgagaatcctgtggagatgagttgcgttaggtggcaggaccactcataaattctgcctgttcattcagatctgctccgtgctgtgcttcttctgctgctgccttgcagcgaccagcgagaagaaatccattcgctaggccggcccacccacccacgatagcggttgtggtcactcatgcgtcgtcgccggagtccaatctcgccgctcggagtttcttgacttttctggtcggagtttccatttcctcctggaggagattatttctttctcctctttcaccccgagaatctcgtctcgggtcgcgctggtttgattcctcctcgcctgagtccaccgctttcgcttccagtggagaagcttgtccgtgaagcagcgctcgtctcctgcttaaaatttcttccttctgccttggtttctttgctcgcgcccgccgatttgcttgctgcccagtccacactcctccgttcgtgtctcgcggctttccgcactcgttttcccggtctcggatttcgttaccaatgggcaacgcgttcgcgtgcatgccgcgcaaggagcagcgaggcgcggccgcggtgtcgcgcagcaagcggatggggagcgcgcggtcggcgcgcggcgggcccaagctgacgcccgcggaggaggagctcctccaccgccaggctctggccatggccatccaccagcacctcgacgccggcggctccatgtcccgccgcatcgacgccggggcctccctgtcccggcgcatggccccgggctccaccagctcccgccgccgcggcgacctgccggactccgtcacgaatgccaagcccgccccaattgttctggagaatttggaaacaaagaaaattgtccttgttcatggagaagggttcggtgcttggtgttggtacaagaccatctcacacttggaggaagctggtctagatcctgttgccttagatctcacaggctctggcatagaccatactgatacaaacagcatagctacgttagcagattactccaagccattgattgattacctcgacagacttcctgaagatgagaaggtcattttggtcggccatagttgcggaggtgcgagtgtctcgtatgcactggagcagtacccccgaaagatctcaaaggcggtgtttcttactgctacaatggtaaaggatggccagaggccctttgacgtgttctcggaggaactccggtcggcggatgttttcttgcaagagtcacagtttctagtctatggaaatgggaaggacaagcctcctactgggctgatgttcgataagcagcagatcaaggggctgtatttcaaccaaaccccttccaaggatatggcactagcagcggtgtccatgaggcctatccctctagccccaatcatggagaagctctccctcaccccggagaactacggctccgtccgtcgctacttcatccaggcactcgacgaccacatgctgtcgccggatgcccaggagaagctggtccgcgagaaccctcccgacggcatcttcaagatcaagggcggcgaccactgccccttcttctcgaagccgcagtccctcaacaagatcctgctggagatcgcgcagatccaagctcctgcggcgctgctcaaggcgagctcccccgaggagaccgccgccgccatggtgacagggccagccaagtcatgactgcatgtatgtagtgtacacgaaaagagaaatgagtaagcacataggttgcaaaagggagggggaggaggtctggggattaactgaagccaagctgtgtcggataataatgtagggaggtcaaagtgtttctttctttcttctgtgatcagatcagatcatatagagaatgagaggtggtcagcagataattgcatttctttttcctttttaccttgtgaatgaatgagatattcagtgaccaatgtcaacgcggaaagcctttgtggtgatgctcactcaacaccaaggttcctgctacaacaggggtatcttagaacgtgag

SEQ ID NO: 114040 - DNA, 2481 bp, Zea mays
  Clone ID: MRT4577_35487C.1
atgccgttcggtttgaggaatgcgggcgcgacgtaccagcggtgcatgaaccatgtgttcggcgaacacatcggtcgcacagtcgaggcctacgtcgatgacatcgtagtcaagacgcggaaggcttccgccctcctctccgaccttgaagtgacattccggtgtctcaaggcgaaaggagtcaagcttaatcctgagaagtgtgtcttcggggtgccccgaggcatgctcctagggttcatcgtctccgagcgaggcatcgaagccaacccggagaagattgcggccatcaccagcatgggacccatcaaggacttaaaaggggtacagagggtcatgggatgcctcgcggccctgagccgcttcatctcacgcctcggcgaaagaggtctacctctgtaccgcctcttaaggaaggccgaatgtttcgcttggacccctgaggtcgaggaagccctcggcaacctgaaggcgctccttacaaaagcgcctgtcttggtgccgccggcggacggagaagccctcttggtctacgtcgccgcaaccactcaggtggttagcgccgcgattgtggtcgaaaggcaggaggaagggcatacattgcccgttcagaggccggtctacttcatcagcgaagtgctgtccgagactaagatccgctacccacaagttcaaaagctgctgtatgctgtgatcctgacaaggcggaagctgcgacactacttcgagtcccatccggatcgcgaagtgggcggtggaaatcatgggcgaaacgatctcgttcgcccctcggaaggccatcaagtcccaagtgttggcggatttcgtggccgaatgggtcgacacccaactgccaacgacccgatccaaccagagctctggaccatgtttttcgacgggtcgctgatgaagacgggggccggcgcgggcctgctcttcatctcgcccctcggaaagcacttgcgctacgtgctgcgcctccacttcccggcgtccaacaatgtggccgagtacaaagctctggtcaacggattgcggatcgccatcgagctaggggtcagacgcctcgacgctcgcggtgattcgcagctcgtcatcgaccaagtcatgaagaactcccactgccgcgacccgaagatggaggcctactgcgacgaggttcggcgcctggaagacaagttcttcgggctcgagctcaaccacattgctcgacgctacaacgaaaccgcagacgagctggctaagatagcctcggggcgaacgacagtccccccggacgtcttctcccgggatctgcatcaaccctccgtcaagctcgacgacacgcccgagcccgaggtaccctcggctcagcccgaggtaccctcggctcagcccgaggtaccctcggcacagcccgaggtaccctcggcccccgagggcagagcactgaacatcgaggaagggcagagcggggccacaccagatcaagattggcaggccccgtacctgcaatatctccgtcgaggagagctacccctcgaccaagtcgaggctcggcgggtagcgcgacgcgccaagtcattcgtcttgctgggcgacgaagaggagctctaccaccgcagcccctcgggcatcctccagcggtgcatctccatcgccgaaggtcgggaaccgctgcaagaaaaggcgcccgggggctacacgcacctgctggtcgccatcgacaaattctccaagtggatcgaggtccgacctctgaacagcatcaggtccgagcaggcggtggcattcttcaccaacatcatccatcgcttcggggtcccgaactccatcatcaccgacaacggcacccagttcaccggcaaaaaattcttggatttttgcgaggatcaccatatccgggtggactgggccgccgtggctcatcccatgtcgaatgggcaagtagagcgtgccaatggcatgattctacaagggctcaagcctcggatctacaacgacctcaacaagttcggcaagcgatggatgaaggaactcccctcggtggtctggagcctaaggacgacgccgagtcgtgccacgggcttcacgccgtttttcctggtctacggggctgaagctatcttacccactgacctggaatacggctccccgagggcgagggcctacaccgaacaaagtaaccaagctagtcgagaggaatcgctggaccagctggaggaagctcgagacagggccttactacactcggcgcggtaccaacagtccctgcgacgctaccacgcccgaggggtccggtcccgagaactccaggtgggcgacctggtgcttcggctgcggcaagacgcccgagggaggcacaagctcacgcccccctgggaagggccattcgtcatcgccaaagttctgaagcccggaacatacaagctggccaacaatcaaggcgaggtctacggcaacgcttggaacatcaaacagctacgtcgcttctacccttaa

SEQ ID NO: 114041 - DNA, 423 bp, Zea mays
  unsure (1)..(423): unsure at all n locations
  Clone ID: MRT4577_35488C.1
cctcgaggcnncggccgggatggctcttaacagcagtcgccactcccttgcagtatcgagtcctacgagaacgtctcacgcaggcgtcaagagacgaaacggtcgacatggttcgctcgcaatctgccgtatgcgtgacccgtgctggacgcagagctgctgctggcaccgccgccgacgacgcatctcaaggctgcatcacctgcgcgcaggtgagctccggcatcacgccctgcctctccttcccccgcggatgggggaccagccccctcctcgtcctgctgcatcggggtcaggaaccacaatagagacatccccacctccggcgacacgtccgccgcccgacaacatgcctctacatcgcccccaggggagtcatcaggcttaacgccggtgacgtcgacagcatcccctccaagtgag

SEQ ID NO: 114042 - DNA, 245 bp, Zea mays
  Clone ID: MRT4577_35489C.1
ggccaccaggagtggctggatctcagtctctctgtctctctttctctccttttccttttggtgtatcaaatatttgattgacaaagtaagggccttgattaggaccaaattctcgtgtgttgctatggtctttatttaggacaacaattaacaatgcagtggcccattcttgtcatctacacatatgactatacgggacatatgtaatatataaatatatatataacacattcccctctgtcccc

SEQ ID NO: 114043 - DNA, 680 bp, Zea mays
  Clone ID: MRT4577_3548C.1
ctcgaggccggccgggttgtatcatcctgtgcaatagtgtggacgctctatatgcatgatatatctattaaaaaaaaaaaaaaaaaaaattggaaaaatcaaaaaaaaaaaggaaactacccccacagcagtcaaaatggtcgccgctaagaagcacgtcccgatcgtcaagaagcacaccaagcgcttcaaccgtcaccagtcggaccgcttcaagtgcgttgacccatcatggcgcaagcccaagggtatcgacaacgccgtccgcaggcggttcaagggccgagctgctatgcctaagattggatacggctccaacaagaagacccgccacatgatgcccagcggccacaaggcttttgttgtcaacaacgtcgccgatgttgaccttctcctcatgcacaacagcaccttcgccgcagagatcgcccacgccgtatcagcacgaaagcgcatcgacatcattgcccgcgcgaagcaactcggtgtcaaggtcaccaacggcaaggcccgcgtcaagaccgagtcgtagatgtgtgtggatttactttagggcggggcatacaaggcgtctctctgattagttacgatctcaatgggaaggcttttcatcttctttgcaaaaaaaaaaaaaaaaaagcggcccgaggagaaacatgcacttcaaaaaagattgcgac

SEQ ID NO: 114044 - DNA, 948 bp, Zea mays
  Clone ID: MRT4577_35490C.1
atggcgcctgcattgtcattcccgatcatcgacatggggctgctcgccggggaggagaggccggcggcgatggagctgctgcaagatgcgtgcgagaactggggcttcttcgagattctgaaccacggcatctcgacggagctgatggacgaggtagagaagctgaccaaggagcactacaagcgggtgcgcgagcagaggttcctcgagttcgccagcaagacgctcggggacggccgcgacattgcgcagggcgtgaaggcggacaacctggactgggagagcaccttcttcgtccgccacctcccggagcccaacatcgccgagataccggacctggacgacgagtaccggcgcgtcatgaagcggttcgccggcgagctggaggcgctggcggagcggctgctggacctgctgtgcgagaacctcggcctcgacaggggctacctggcgcgcgcgttccgcgggcccagcaagggcgccccgacgttcggcaccaaggtcagcagctacccgccgtgcccgcgcccggacctcgtcagcggcctgcgcgcgcacaccgacgccggcggcataatcctgctgttccaggacgaccgggtgggcggcctccagctgctcaaggacggcgagtgggtggacgtgccgccccatgccccacgccgtcgtcgtcaacctgggcgaccagctgcaggtgatcaccaacggcagcccagcgggaacaggatgtccatcgcgtccttctacaacccgggcagcgacgcggtcatcttccccgcgccggcgctggtcaaggccgaggaggcggccgcgggggcgtaccccagcttcgtcttcgaggactacatgaagctgtacgtgcggcacaagttcgaggccaaggagccacggttcgaggccttcaagtccatggagacggacagctccaatcgcatagccatcgcgtga

SEQ ID NO: 114045 - DNA, 1219 bp, Zea mays
  Clone ID: MRT4577_35491C.1
aggccggccgagattgcctcgcgcccgccgtatctggcttcggctgccgtcgcctccctccccgccctgcgcaacccctcctcgccgcgccgtcaagacgcctgtcttcttctcatctcgtcggcgctcgtcctccctccctccctcccccaggtcctgcttcctccccatggcgtggatctggatggtcctcgcggcgggagccgtgctcctgtgggcgatctctctgggaaggatcttctcctccgccgcgccgtcctgtgtgcccctgagcccgcagttcatgccccctctccgcggcgacaggaggacccggaacgtgatgctcgtcgtcgcccaccccgacgacgagtccatgttctttgctccaactatccttttcctcaagtcaaaaggtcacaacattcacattctgtgcatgtctcgaggtaatgctgatggtctcggagatactcgtaaataagaattgtaccatgcctgtgaaacccttaagattccacatgaacaagttgaagtcttggaccacccgaaattgcaggatggatttcatgagaaatgggaccatgaactagtatcagaacttgtcatggagcatgtccaactatgggtcattgacatgattgtgacatttgattcatatggagtatcgggccacccaaaccacagagatgttcattacggcatatgcaagtttctccatgcgaataggcaaggaaatgttgaagcttgggaactagcaagcctgaatattcttcgcaagtacagtggtccggttgacatttggctttcttcgctgatctccgtctcaaggtcaaagcagtcaatctatactctagttaacagtagcccgcccagaagctatgaggcaatggctgcacacagaagtcagtgggtttggtttagaagagtgttcgtcatgctctcaagttatacctacataaacatgctacagaaaatttagcacgtgatacgacgtcatatcagagcgagccgccattgtcgtctccaatgtcgtacttgtgcgttgtcaattgtatatttgtactgtatgtatcaatgattttataggcagtgctcatagggtgactgtacggcttcttgttcccaattctctaccatagtatatttgtaagttcttgggtgtggtcaaacgatttctggttcgatttaacgtccttgacgaactgacctgctaactaatcaatccttccgttctatg

SEQ ID NO: 114046 - DNA, 1483 bp, Zea mays
  Clone ID: MRT4577_35492C.1
ttgtcacccgtcgacccggcgcgtggggacaagctagctagctagctgacagcagaatgcggtgcgagccccgtagctatgacaaggtcgatcgaatcgccttttcagcaggcgacagcgctatttgtccggtggaattattccggccgtgtcttatagccttggttccgtacgtgtcgctgcaggcaggtgatggagccgttcgcatcgggcggccacgcgtccggcgttcagcattagacacgagagctcctagactcctagtagccagaccagtagtcccgcgaccctgtcgagagaaacagacagagcaacatggcgcctgcattgtcattcccgatcatcgacatggggctgctcgccggggaggagaggccggcggcgatggagctgctgcaagatgcgtgcgagaactggggcttcttcgagattctgaaccacggcatctcgacggagctgatggacgaggtagagaagctgaccaaggagcactacaagcgggtgcgcgagcagaggttcctcgagttcgccagcaagacgctcggggacggccgcgacattgcgcagggcgtgaaggcggacaacctggactgggagagcaccttcttcgtccgccacctcccggagcccaacatcgccgagataccggacctggacgacgagtaccggcgcgtcatgaagcggttcgccggcgagctggaggcgctggcggagcggctgctggacctgctgtgcgagaacctcggcctcgacaggggctacctggcgcgcgcgttccgcgggcccagcaagggcgccccgacgttcggcaccaaggtcagcagctacccgccgtgcccgcgcccggacctcgtcagcggcctgcgcgcgcacaccgacgccggcggcataatcctgctgttccaggacgaccgggtgggcggcctccagctgctcaaggacggcgagtgggtggacgtgccgcccatgcgccacgccgtcgtcgtcaacctgggcgaccagctggaggtgatcaccaacggcaggtacaagagcgtcatgcaccgggtggtggcgcagcccagcgggaacaggatgtccatcgcgtccttctacaacccgggcagcgacgcggtcatcttccccgcgccggcgctggtcaaggccgaggaggcggccgcgggggtgtaccccagcttcgtcttcgaggactacatgaagctgtacgtgcggcacaagttcgaggccaaggagccacggttcgaggccttcaagtccatggagacggacagctccaatcgcatagccatcgcgtgaaacaccggacctgcgccgagctctggcttactgttcgagatgtacgtgcggcgtactgtactgctcttcttcgttcgctacttggccagcttgctagttatatgtgtcgcgccctctgtattactactactacaaaactatatctctactatattaaaatatcagtttcaacgataatcccgcctcc

SEQ ID NO: 114047 - DNA, 420 bp, Zea mays
  Clone ID: MRT4577_35493C.1
gaatggaattaaagggctgggctaatgatgagttaagctagttggggggaaaaaaggactttacaaaaaccttttttgattgccacaaaactgttttcattaagggggtaagaggaaaaaaaagggaaaaaggggggggaaaaggaaaacacattaaaggggcaaagccacaggggaatactttttaatttctagggatttccttgaaagggaacattggcacttttgcccttgggaaaaaacctgagggcaatccaatttggacaccactgggcaaaaaaaatccgattttatccggaccggcctggtggagttggtcttccctgataattgtccgaaaggatatggatcccggcttcgttgaaaggtaaaaattcccctcgatttttcggaaactttggttggccacaagcgaagggc

SEQ ID NO: 114048 - DNA, 241 bp, Zea mays
  Clone ID: MRT4577_35494C.1
acaagcttttttttttttttttttttttttttttttttgtttttttttttttttttttttttttttttctttttttttttattggcctaataaaggaattccttcccattgcaacggttgatgaagggagacgctcccactcccacccagggggaggggggaaactacgtaactaagggccgagaaaggggtaaactaacaagctaagaggcccgccggcgggtccattacattgttacaa

SEQ ID NO: 114049 - DNA, 340 bp, Zea mays
  unsure (1)..(340): unsure at all n locations
  Clone ID: MRT4577_35495C.1
acgtacagattattgattgtggaaatgtaagcgattacgaattgatctgttgngaaatcagtgctgaattaacattaatgtaactccagtgaaaaaaatgaatttgatcaattattatcaggaataaacattaagccatgacggtgctcaagttatcttctgatgacactgctgtattaaatgtacttttcctatgagaaccttagaaaaataaaaatttctgagtagatcatctttatcttttctttttatatatttatagccatattttaatataataggccatgaggtgatatgtaaacatacataatttcaacaaattttgtcaaataaaatcata

SEQ ID NO: 114050 - DNA, 317 bp, Zea mays
  unsure (1)..(317): unsure at all n locations
  Clone ID: MRT4577_35496C.1
gggagccccaaaaagcccctttttttttttaaaattatcttaaaaaaaagcctgggggggggttttttnntnncntgggtcccnnnnccttggtgtttggggccggggttttctcaacccgggggtgaaccccgcttttacaactggcccaggggggcttttgaattaaaaacaaagggggggcccccccacccccacccggacggagataaaccctttgggtttgggaaaacatcacgggggagaaaaggtatttttgggcgcgggggccccacggtttatttttttagttccccggggggttgcgctaacccccc

SEQ ID NO: 114051 - DNA, 514 bp, Zea mays
  Clone ID: MRT4577_35497C.1
aaaaaaaaaaaaaaaaaaaaaaaaaaaaaaaaaaaaaaaaataaaaaaaaaaaaaaaaaaaaactaaaaaaaaaggctttttcttctagatatacatcctttttgggggcccttttcccccttttttggctaacttttggggatttctatcacacttgtggaggctccccattgccctttgggggcccattttgccctttggtgggccgttttttatacccactgggattgggttaaccccgttgttactggaaaaacctgggttttacccaatttaccctttttcaattgggttcccttttagaaggccgccctaattggcaattggccccacccgttcgcccttcataacaattgggcaccctctttggtgaggggcttccccctggggcggtgttttaaccccccagggtgagtggtttactctgcgagggccccatatccctggcctttcccttttttccccttcttttcgttaacttccgtgcctttttcccccgatacgctgtatttc

SEQ ID NO: 114052 - DNA, 301 bp, Zea mays
  Clone ID: MRT4577_35498C.1
ttattaaccttgcacagggtttggggatttcacgtccctgggagaaagatcctttgaccagttttcttatatgtgcatacatgcatcttatcatggctactatgctatcaaaacactcagggggatattgattacctgtaaataagccaattgaacatggcggtgaaaccaaggggtttaataaccaagagtggggagccaaaggggtcatagagccctactgcaatacctgggccaaggttgtccaaagagagagtttttgcttatacagggggcggaatatctggtatttagcatcccg

SEQ ID NO: 114053 - DNA, 496 bp, Zea mays
  Clone ID: MRT4577_35499C.1
atgaaggacagcgacccaggcccaccagtggggtgcggtagagggacggccgccggagccccaggggcaacaagagaaaaccacgcacaggccatcagaacaagaccgcaagctcaacaagccaaggcagaaaccgcccacagaggaatggccgacgacgactggagaaccctacacgacgagggcgccgccggagcccacaagggaagaccaccaaatcccctgaaaggggcgccggccgcaaggacaaccgacccagcaaacgaggcgaggaagaaaaacagggccccagagaaaaccgcggagcagccggggggaaaaacagccaacagcagcggcacggctgaccgaagagacaacgacgacacacgaaaagaaccggacgaacagaaccacccagaagaaaaagacggtgcccgcaagaaagaaccagaagcaacggcggcaagacccaaccaaccacgaaccaccagaaaggaaaggaaaaaatgagaac

SEQ ID NO: 114054 - DNA, 343 bp, Zea mays
  Clone ID: MRT4577_3549C.1
atattttttttttttttttttatttactcctgtaagagacatggcaataatttttataacaacacacttacgcaagtgggcgtgatgcacttggatacaacagggacactcaggtatacactgtcagataccatggttcaacaggttgagatagtaaatagtgggagcgtcagcaagaggagggatatcagatcaagcacggcgcacaggggcaaatatagggtctggacttgcgaaacgaaacgagtgagggatgtacgacacatgaccatatgcggggacagcagatgtaggcctgtcttcaaaagaactgaccaaattgggcactgggctaagcactggg

SEQ ID NO: 114055 - DNA, 1730 bp, Zea mays
  Clone ID: MRT4577_354C.1
cggccgggccgggatactgagaaccgcagagacaggagtcttcgtactcgcctatctccgcgacccatagcgttcccccttctcccattcttctctcatttctcaccaccgccgccgctaccccctttcgacaacaccatgcacggagtgcatctcgatccacatcgaccaggccgctatccaggccggaaacgcgcgctgggagctgtactgcctcgagcatggcattcaagctgatggacagatgcccggtgacaagaccattgggggaggtgatgatgctttcaacaccttcttcacagagactggcgctgggaagtacgtgccccgcgctggttttgctgaccttgagtccactggcatcgacgaggggaggactggcacctatcgacagctcttccatcctgaggcagctcatcagagggaacgaggatgcagccaacaacttcgctcgcggtcactacacccttggcaaggacattggttacctgtgccctgaccgcatcaagaagattgcagataattgcactggtctccagggcttcctcgtcttcaacgctggtggtggaagaacgggctctgggcttgcttctctcctcctggagcgcctgtctgttgactatggcaagaagtccaagctcggtttcaccgtgtacccatccccccaggtgtccacatccgtggttgagccatacaacagtgtcctgtccacccactctctcctcgagcacactgatgttgctgtcctgctcgacaatgaggccatctatgacatctgccgccgctcccttgacgttgagcgcccaacctacaccaacctcaacaggcttgtgtcccaggttatctcatcccttactgcctccctgaggttcgatggtgctctgaacgtggatgttaacgagttccagaccaacctggtaccctacccgaggatccacttcatgctttcttcgtacgctccagtcatctctgctgagaaggcctaccacgagcagctctctgtggctgagatcaccaacagcgccttcgagccatcttccatgatggccaagtgcgacccacgccatggcaagtacatggcctgctgcctcatgtaccgtggtgatgtggtccccaaggatgtgaatgctgctgtggccaccatcaagaccaaacgcaccatccagttcgtggattggtgcccgactggcttcaagtgcggcatcaactaccagcctcctagcgttgtgcctggtggcgacctggccaaggtgcagcgtgccgtgtgcatgatctccaactccaccagtgttgtggaggtgttctcccgcatcgaccacaagttcgacctcatgtacgccaagcgtgccttcgtgcactggtacgtcggtgagggtatggaggaaggtgagttctctgaggcccgtgaggacctggcggcgctcgagaaggactacgaggaggtcggtgctgagttcgatgagggcgaggatggcgacgagggtgacgagtactagagaagtttgctgatgacgcagcatcaggccagtgtgctgcccttatcccgtgatctgccgagagttgctcctgctatcgtgttatgtgtgtctgttctgaagtattgtgtggtttacaacacctgatgttgtaagagttgttaattcccctgcattgctaccgggttattgagaataattatggctgtttacgttgttgcttcaaaaaaaaaaaaaaaaaaaaaaaaagcggcc

SEQ ID NO: 114056 - DNA, 453 bp, Zea mays
  Clone ID: MRT4577_35500C.1
acggcatgacaatcactatgtagcgaactgaaccacgcaaatactctttgtggcgacgcccccccaaaagacgagggaacgatgagcgcccctggcttatatttctttgccctccagctaacacacagcctgagtggcaccttttttttatggaactgggccacacgaaccatctagataagtaagctgcatgaagccgcgaaacaaactgaagaacggttcacatggcagcggtgaaaacagacacgtgtggagcctaccatggtgtacattttacttttcccctaaccggggggtactcgtcctttatggcgtgaactatgtgagtctagactttcgtttaacgcactatctaatggtggtgataaatcattttcatgaaaagtaacatccacactgcctgtatccacttgattaagcatgtgcatactgggtgcttacacgcttgatctt

SEQ ID NO: 114057 - DNA, 389 bp, Zea mays
  Clone ID: MRT4577_35501C.1
aaaaggcagcagcagcacagagcaagaccgcaaagaaagcaagcgggctgcgggcaagcctccttcaccattaccgcgcatgtgctctgcgccggtcatctgccttcggtgtaggacctcttgtctgttgcttggtcatggacaggcacacctgcaagctctgctcccgtcggttccacaatggccgcgcgctgggcggccacatgcgctcccacgtcatggccgcgtcgtcggctgcagcgtactactcgccgccgccgccgctctccctggcgtccacctcgtcgacagagatggacgacgacgacggtccggcgcggcagaagccacccacgccgtgcgttgcacgcgaagaaggcgccaagaaagcgttcggctttcccgaactc

SEQ ID NO: 114058 - DNA, 233 bp, Zea mays
  Clone ID: MRT4577_35502C.1
ggtgtgtgggagtccatcgatatggaacgcttacagggaagccaccgcttgttggtggatgccgagacagcattcatccgtggatattaaatgagaatctagagctgcgatcatatttatcctagtgacgttcactcagtgttgagacgattattgcgcagagtttctggcagtcggctcggatgcggaccaggcggcagtgacgcaatctggaaccacaagtcgttcaagtc

SEQ ID NO: 114059 - DNA, 273 bp, Zea mays
  unsure (1)..(273): unsure at all n locations
  Clone ID: MRT4577_35503C.1
tccgaattccagntttttcttttctttttttttttttttttttttttttttttttttttttttttttttttctttatttttttttacggctggttctttttgttttgggctacgtccttttttcaattcaccttccaatatttccaattctcaccactctaaaccccccttctcgtgcaaatccaaggggtgaacacacaacaggaccgtccaacgtaccctcacaagcacaaggcgcacatcgaccaagccaaacccacaaccaccacaccc

SEQ ID NO: 114060 - DNA, 2406 bp, Zea mays
  Clone ID: MRT4577_35504C.1
atgctcttggggttcatcgtctccgagcggggcatcgaggccaacccggagaagatcgcggccatcaccagcatggggcccatcaaggacttgaaaggcgtacagagagtcacgggatgccttgcggctctgagccgcttcatctcgcgcctcggcgaaagaggcctacctctgtaccgcctcttaaggaaggccgagtgcttcacttggacccccgaggccgaggaagccctcgggaacctgaaggcgctcgtcacgaacgcgcccatcttggtgcctcccaccgccgtagaagccctcttgatctacgtcgccgcgaccactcaggtggttagcgccgcgattgtggttgagagacaagaagagggacacacactgcccgtccagaggccagtctacttcgtcagtgaggtactgtccgaaaccaaaatccgctacccacaaattcagaaactgctgtatgcggtgatcctcacgcggcggaagttgcgacactacttcgagtctcatccggtgactgtggtgtcatccttccccctgggggaggtcatccagtgccgagaggcctcgggtagaatcgcaaagtgggcagtggaaatcatgggtgaaacgatctcgttcgcccctcggaaggccatcaagtcccaggtgctggcggacttcgtggctgaatgggtcgacacccagctcccaacggctccgatccaaccggaactctggaccatgttcttcgacgggtcgctgatgaagacaggagcaggcgcgggcctgctcttcatctcgcccctcggaaagcacctgcgctacgtgctgcgcctccacttcccggcatccaacaacgtggcagagtacgaggctctggtcaacgggctgcgcatcgccatcgagctaggggtccgacgcctcgacgctcgcggtgactcgcaactcgtcatcgaccaagtcatgaagaactcccactgccgcggcccgatgatggaggcctactgcgatgaggttcggcgcctggaagacaagttctacgggctcgagctcaaccacatcgcacgacgctacaacgagactgtggacgagctggctaaaatagcctcggggcgaacaactgttcccccggacgtcttctcccgagacctgcatcaaccctccgtcaagatcgacgacacgcccgagcccgaggcatcctcggctcagtccgaggcaccctcggctcagtccgaggaaccctcggcccagcccgaggcaccctcggcccccgaggatgaggcactacgcatcgaggaggagcggaacggggtcacgcccaatcaaaactggcagaccccgtacctgcaatatctccaccgaggagagctacccctcgaccgagccgaagctcggcggttggcgcggcgcgccaagtcgttcgtcttgctgggagacaggaaggagctctaccaccgcagcccctcaggcatccttcagcgatgcattcccatcgccgaaggtcaggagctcctacaagagatacactcgggggcttgcggccatcacgcagcaccccgggcccttgttggaaacgcctttcgacaaggtttctactggtcgacggcgaaggcacccgagggctacacgcacctgttggtcgccatcgacaaattctccaagtggatcgaggtccgacccctaaacagcaacaggtccgaacaggcggtggcgttcttcaccaacatcatccatcgctttggggttccgaactccatcatcaccgataacggcacccagttcaccggcagaaagttcctggacttctgcgaggatcaccacatccgggtggactgggccgccgtggctcaccccatgacgaatgggcaagtagagcgtgccaacggcatgactctacaaggactcaagcctcagatctacaacgacctcaacaaattcggcaagcgatggatgaaggagctcccctcggtggtctggagtctgaggacaacgccgagccgagccacgggcttcacaccgttctttctagtctatggggccgaggccatcctacccacagacttagaatacggctccccgaggacgagggcctacgccgaccaaagcaatcaagctaatcgagaggactcactggaccagctggaagaggctcgggacatggccctactacactcggcgtggtacgagcagtccctgcgacgctaccacgcccgaggggttcggtcccgagacctccaggtgggcgacctggtgcttcggctgcgacaagatgcccgagggcgacacaagctcacgcctccctgggaagggccgttcgtcatcgccaaagttctgaagcccggaacatacaagctggccaacagtcaaggcaaggtctacagcaacgcttggaacatccaacatctacgtcgcttctacccttaa

SEQ ID NO: 114061 - DNA, 1521 bp, Zea mays
  Clone ID: MRT4577_35505C.1
atgccgtttggtttgaggaatgcgggtgcgacataccaaaggtgcatgaaccacgtgttcggcgaacacattggtcgaacggtcgaggcttacgtcgatgacatcgtagtcaaggcgaaaggcgtaaagctcaatcccgagaagtgcgttttcggggtcccccgaggcatgctcttggggttcatcgtctccgagcggggcatcgaggccaacccggagaaaatcgtggccatcaccagcatggggcccatcaaagacttgaaaggcgtacagagagtcacgggatgccttgcggctctgagccgtttcatctcgcgtctcggcgaaagaggcctgcctctgtaccgccttttaagaaaggccgaatgcttcatttggacccctgaggccgaggaagccctcgggaacctgaagacgctcctcacgaacgcgcccatcttggtggtcagcgccgcgatcgtggttgagagacgagaagaggggcatgcattgcccgtccagaggtcagtctacttcatcagtgaggccatcaagtcccaagtcttggcggactttgtggctgaatgggtcgatacccagctcccaacagctccgatccaaccggaactctggaccatgtttttcgacgggtcgctgatgaagacaggggcaggcgcgggcctgctcttcatctcacccctcgggaagcacctacgctacgtgctacgcctccacttcccggcgtccaacaatgtggctgagtacgaggctctggtcaacgggttgcgcatcgccatcgagctaggtgtccgacgcctcgacgctcgcgatgactcgcagctcgtcatcaaccaagtcatgaagaactcccactgtcgcgacccgaagatggaagcctactgcgatgaggtttggcgcctggaagacaagttctacgggctcgagctcaaccacatcgcccgacgctacaacgagactgcggacgagctgactaagatagcctcggggcaaacaacggttcccccggacgtcttctcccgagacctgcatcaaccctccgtcaagaccgacgacacgcccgagcccgagaaggcctcggcccagcccaaggcaccctcggcccccaaagacctcgtcggccccttgcagaaggcacccgggggctacacgcacctgctggtcgccatcgacaaattctccaattggatcgaggttcgacccctaaacagcatcaggtccgaacaggcggtggcgttcttcaccaacatcatccatcgctttggggtcccgaactccatcatcaccgacaacgacacccagttcaccggcagaaagttcctggacttctgcgaggatcaccacattcgggtggactgggccgccgtggctcaccccatgacgaatgggccagtagagcgtgccaacggcatgattctacaaggactcaagccgcggatctacaacgacctcaacaagttcggcaagcgatggatgaaggaactcccctcggtggtctggagtctgaggacgacgccgagctga

SEQ ID NO: 114062 - DNA, 2340 bp, Zea mays
  Clone ID: MRT4577_35506C.1
atgccgttcggcttgaggaatgcgggcgtgacgtaccagcggtgcatgaaccatgtgttcggcgaacacatcggtcgcacggtcgaggcctacgtcgatgacatcgtagtcaagacgaggaaagcttccgacctcctttccgaccttgaagtgacattccgatgcctcaaggcgaaaggcgtcaagctcaatcccgagaagtgtgtcttcggggtgccccgaggcatgctcttggggttcatcgtctccgagcgaggcatcgaagccaacccggagaagattgcagccatcactagcatggggcccatcaaggacttgaaaggcgtacagagggtcatgagatgtctcgcggctctgagccgtttcatgtcacgcctcggcgaaagaggtctacctctgtaccgcctcttaaggaaggccgagtgcttcacttggacccccgaggccgaggaagctcttgggaacttgaaggcgctcctcacaaaggcgcccatcttggtacctccggctgccgaagaagccctcttggtctacgtcgccgcgaccactcaggtggttagcgccgcgattgtggtcgagaggcaagaagaggggcatgcattgcccgttcagaggccagtttacttcgtcagcgaggtactgtccgaaaccaaggtccgttacccacaagttcagaagctgctgtatgcggtgatcctgacacggcggaaattgcgacactacttcgagtctcatccggtaactgtggtgtcatccttccccctgggggagatcatccagtgccgagaggcctcgggtaggattgcaaagtgggcggtggaaatcatgggcgagacaatctcgttcgccccttggaaggccatcaagtcccaggttttggcggacttcgtggccgaatgggtcgacacccaattaccgacgactccgatccaaccggagctctggaccatgtttttcgacgggtcgttgatgaagacgggggccggcgcgggcctgctcttcatctcgcccctcgggaaacacctacgctatgtgctacgcctccatttcccggcgtccaacaatgtggctgagtatgaggctctggtcaacgggttgcggatcgccatcgagctaggggtccggcgcctagacgcccgcggtgactcgcagctcatcatcgaccaagtcatgaagaactcccactgccgcgacccgaagatggaggcctactgcgatgaggttcggcgcttggaggacaagttctacgggctcgagctcaaccacatcgctcggcgctacaacgagactgcggacgagctggctaaaatagcctcggggcgaacaacggttcccccggacgtcttctcccgggatctacatcaaccctccgtcaagatcgacaacacgcccgagcctgaggcgccctcggcccagttcgaggcaccctcagctcggcccgagggagagctacccatcgaccgagccgaggctcggcgggtggcgcggcgcgccaagtcgttcgtcctgctgggcaatgagaagaaggcgcccgggggctacacgcacctgctggtcgccatcgacaaattctccaagtggatcgaggtccgacctctgaacaacatcaggtccgagcaggcggtggcgttcttcaccaacatcatccatcgcttcagggtcccaaactccatcatcaccgacaacggcacccagttcaccggcagaaagttcttggacttctgcgaggatcaccacatccgggtggactgggccgccgtggctcatcccatgccaaatgggcaagtagagcgtgccaacggcatgattctacaagggttcaagcctcggatctacaacgacctcaacaagttcggcaagcgatggatgaaggaactcccctcggtggtctggagcctgaggacaacgccgagccgagccacgggtttcacgccattcttcctagtctacggggccgaggccgtcttgcccacagacctggaatatggctccccgaggacgagggcctacagcgatcaaagcaaccaagctagccgagaagactcgctggacctgctggaggaggctcgggacaaggccttgctacactcggcgaggtaccagcagtccctgcgacgctaccacgcccgaggggtccggtcccgagacctccaggtgggtgacctggtgcttcgactgcgacaagacgcccgagggaggcacaagctcacgcccccctgggagggaccgttcgtcatcgccaaggttctgaaacccggaacgtacaagctggccaatagtcaaggcgaggtctacggcaacgcttggaacatccaacaactacgtcgcttctacccttaa

SEQ ID NO: 114063 - DNA, 208 bp, Zea mays
  Clone ID: MRT4577_35507C.1
tctatcaacaagttctttactgaccccaagagaagcaaagcagcgctggttggccgtttatgacgatggcgctgctactagttgccctaggcgcaacaaatccgttcattatgccacaatgctcactgagctcagagtgccattatttcacagatcctcccaccagtttcttaaaatgggcattcaacacctagttgtgcaagccaac

SEQ ID NO: 114064 - DNA, 1875 bp, Zea mays
  Clone ID: MRT4577_35508C.1
atgcgggacttcatgaccgcatgcgactaccgcctctccgattgttccgatggtagccgcagcttcggcgacgaggactgcggcccaagtcgtgaatgtttccacgtcgatctagggggtcccggcgaaggcaaccatcttggtatgccgaaaaacggcgatccccccaggcctgcgcctcgcgttgacatccttcgggagctagctgtggtcccagtccctgcggggggtcaggacgcacagctcgagcaaatccgcgagatgcaggccaggctcgacgagggagcagaaacacttgagcacttccggcggaacatcgggcaggaatgggcagaccaagctccggccggggaagcgtgtcatctaccccagggcatccagtaccgcattgccgacgacgtcagggcagggccgccaccggcttacagtggggtcggccagaacctggctgcagcagcaataatactccgcgcgatgccgaaaccatcaaccaccgaagggcggcgtatccagggagagctcaagaatctcctggaggatgccgcggtccgacgggccgaaagctctgcctcccgaaggcagggctacccctcgaagcatcgcgccgcgacttcccgatttatgcgagaagcctcggtccacaccgggcgcacgcgcaacacggcgcctgcggccccgggtcgcctcggcaacgagcaccaccaccgcaaccgtcgagcccacctcgacgagaggggcacgtacgtgtgccctgggaactcctgggatcttcgaagctaccgccagcagccgggagagtctctctgggactacatccggcgattctcgaagcagcgcaccgagctgcccaacgtcaccgactcggacgtcatcggtgcgttcctcgccggcaccacttgctgcgacctgatgctcaaggagtcgtgcccctatcatcaggggcccgtcaagcacacccttgaggagtgtgtcttgcttcggcgccactttcacaaggtcgggccacctgcggaaggtggcagggcccacaacaacgacaagaaggaggatcacaaggcagaagagttccccgaggtccacaactgcttcatgatctatggtgggccagtggcgaacgcctcggctcggcaccgcaagcaagagcgtcgggaggtctgctcgataaaggtggcggcgccagtctacctagactggtccgacaagcccatcaccttcgaccagggcaaccaccccgaccgcgtgccgagcccggggaaatatccgctcgttgtcgaccccgtcatcggcaacgtcaggctcaccaaggtcctcatggacggaggcagcagcctcaacatcatctacgccgagaccctcgggctcctgcagatcgatctgtcctcgatccggacaggcgcgacgccttttcacggtatcatccccgggaaacgcgtccaacccctcggacaactcgatctgcccatctgctttgggactccctccaacttccgaagggaaaccctcacgttcgaggtggtcgggttccgaggaacctaccacacagtactggggaggccatgctacgccaagttcatggccgtccccaactacacctacctcaagctcaaaatgctgggccccaatggggtcatcaccgtcggccccacgtaccgacacgcgtacgaatgcggcgtggagtgcgtggagtacgccgaggccctcgccgaatttgaggccctcatcgccgacctggagagcctctccaaggaggcgccagatgcgaagcgccacgccgacaacttcgagccggcagagacggttaagtccgtccctctcgaccgcagcaacgacgcctccaagcagatctggatcggctccgagctcgaccccaaatag

SEQ ID NO: 114065 - DNA, 600 bp, Zea mays
  Clone ID: MRT4577_35509C.1
atgggtagtctccagcaacctttccagcccaggacggtgcttcgtttcgggagtcttgagttcatgtccctcgacggcagctacgacatgatactccttcctccgtcgcgcgacagcgacaatggcggccgacaacccgcccaccggcggcggaatcgacaacgtcttccccacgtggcggaagaacaacattcgggcttgtcccgtcgcctcccccgccgacgaaggaggaggcggggcaaccaaggccaagcaggaggtggcacctcgtcggctgtcgagcgagtcgacggcgccggcgccccaacgggggacacgtcgagcgtcgacctcgcgtctgagacgaagacgagcgccgtttccccgcaacacgccaactccaagtggacggacaacaccagcacgctcgcaaaggacttgctgggcgtcaccctcgtacccgagacggcggtgcagtctgcccctgacgcgacttcgtcaccgctcgtcgatcaagaggtaccgactgattcccatctcgtgccttttggattcagcctcgacccaccaagcaacttcgcttcggtggaagctgaaagtcgcctagaggggggtgaatag

SEQ ID NO: 114066 - DNA, 421 bp, Zea mays
  Clone ID: MRT4577_3550C.1
ggggaggggcctcatttaattgggaagcaatttggaggggggggcttttaaaaagcattttttacaatttcaaaaacattcaaactggaacaaaaaaacttaccctttgaaccggggggccataaaaaatttaaggggagacccaagtttcaacgacgaaacaacttggtgtacacaaaggaagggaatttttttttttttttaaaagccacttaaccctttaaacccttatccggtttttggtttttacccccctaaaggtttacaggggggggctccaaaccccacaaagggggaggggcatttttttaaaagaacccttggcctttgaaagtgttttaatggaggcacaacctgatccatgggaggcctgcattgggcggccattgaaaaacattgcagccccaggggtgccaccttt

SEQ ID NO: 114067 - DNA, 3441 bp, Zea mays
  Clone ID: MRT4577_35510C.1
agcctggtccgacaaagcccatcaccttcgaccaagcggaccgccccggaccgcgtgccgagctcggggaaatacccgctcattgtcgacctcgtcatcgaggacgtcaggctcaccaaggtcctcatggacggaggcagcagcctcaacatcatctacgccgagaccctcggactcctgcgtgttgatctgtcctcggtccgggcaggcgctgcgcctttccacgggatcatccccgggaagcgtgtccagcccctcggacaactaaacaaaaaagtctgctttgcccccccctccaacttacgaagggagaccctcacgttcgaggtggtcgggttccgaggaacctaccacgcagtactggggaggccatgctacgtgaagttcatggccgtccccaactacacctacctcaagctcaagatgccgggccccaacggggtcatcaccgtcggccccacgtacaaacacgcgttcgaatgcgacgtggagtgcgtggagtacgccgaggccctcgccgagtccgaggccctcatcgccgacctggagaacctctccaaggaggtgccagacgtgaagcgccacgccggcaacttcgagccagcggagacggttaaggccgtcccactcgaccccagtggcgacacctccaagcagatccggatcgggtatcaccaaatccggatgaaagagtccgaccagctcgcgacttctttcatcacgccgttcggcatgtactgctacgtcaccatgccgttcggtttgaggaatgcgggcgcgacgtaccagcggtgcatgaacgatgtgttcggcgaacacattggtcgcacagtcgaggcctacgtcgatgacatcgtagtcaagacaaggaaggcttccgacctcctctccgaccttgaagtgacattccgatgtctcaaggcgaaaggagtcaagctcaatccagagaagtgtgtcttcggggtgccccgaggcatgctcctggggttcatcgtctccgagcgaggtatcgaagccaacccggagaagatcgcagccatcaccagcatgggacccatcaaggacttaaaaggcgtacagagggtcatgggatgcctcgcggccctgagccgcttcatctcacgcctcggcgaaagaggtctgcctctataccgcctcttaaggaaggccgagtgtttcgcttggacccctgaggccgaggaagccctcgggaacttgaaggcgctccttacaaaggcgcctgtcttggtgcccccagctgatggagaagccctcttggtctacgtcgccgctaccactcaggtggttagcgccgcgattgtggtcgagaggcaagaggaagggcatgcattgcccgttcagaggctagtctacttcatcagcgaagtgctgtctgagaccaagatccgctacccacaagttcagaagctgctgtatgctgtgatcctgacgaggcggaagttacgacactacttcgagtctcatccggtaactgtggtgtcatccttccccctgggggagatcatccagtgccgagaggcctcgggcaggatcgcaaagtgggcggtggaaatcatgggcgaaacaatctcgttcgcccctcggaaggccatcaagtcccaggtgttggcggacttcgtggccgaatgggtcgacacccagctgccgacggctccgatccaaccggagctctggaccatgtttttcgacgggtcgctgatgaagacaggagccggcgcgggcctgctcttcatctcgcccctcggaaagcacctgcgctacgtgttgcgcctccatttcccggcgtccgataatgtggctgagtacgaggctctggtcaacgggttgcggatcgccatcgagctaggggtcagacgcctcgacgcccgcggtgactcgcagctcgtcatcgaccaagtcatgaagaactcccactgccgcgacccgaagatggaggcctactgcgatgaggttcgacgcctggaagacaagttctacgggctcgagctcaaccacatcgctcggcgctacaacgagactgcggacgagctggctaaaatagcctcggggcgaacaacggttcccccggacgtcttctcccgggatctgcatcaaccctccgtcaggatcgacgacgctcccgagcccgaggcgccctcggcacagcccgaggcaccctcggcacagcccgaggcaccctcggctcagcccgaggtaccctcggcccccgagggcgaggcactggacgtcgaggaggagcagagcggggccacgcctgatcgagattggcaggccccgtacctgcgatatctctgccgaggagagctaccccccgaccaagacgaggctcggcgggtagcgcgacgcgccaagtcgttcgtcttgctgggcgatgaggaggagctctaccaccgtagcccctcgggcatcctccagcggtgcatctccatcgccgaaggcttctactggccaacggcggtggctgacgccactagaattgtccgcacctgcgaagggtgccaattctatgcgaagcagacccacctgcccgctcaggctctgcagacgatacccatcacctggcccttcgctgtatggggtctggacctcgtcggtcccttgcagaaggcgcccgggggctacacgcacctgctggtcgccatcgacaaattctccaagtggatcgaagtccgacccctgaacagcatcaggtctgagcaggcggtggcgttcttcaccaacatcatccatcgcttcggggtcccaaactccatcatcaccgacaacggtacccagttcaccggcaaaaaattcttggatttttgcgaggatcaccacatccgggtggactgggccgccgtggctcatcccatgtcgaatgggcaagtagagcgtgccaacgacatgattctacaagggctcaagcctcggatctacaacggcctcaacaagttcggcaagcgatggatgaaggaactcccctcggtggtctggagcctaaggatgacgccgagtcgtgccacgggtttcacgctgttcttcctggtctacggggccgaggctatcttgcccactgacctggaatacggctccccgaggacgagggcctacaccgatcaaagcaaccaagctagccgagaagaatcgctggaccagctggaggaggctcgggacaaggccttactacactcggcgcggtaccagcagtccctgcgacgctaccacgcccgaggggtccggtcccgagacctccaggtgggcgatctggtgcttcgcctgcggcaagacgcccgagggaggcacaagctcacgcccccctgggaggggccattcgtcatcgccaaagttctgaagcccggaacatacaagctggccaacaatcaaggcgagatctacggcaacgcttggaacatcaaacagctacgtcgcttctacccttaa

SEQ ID NO: 114068 - DNA, 237 bp, Zea mays
  Clone ID: MRT4577_35511C.1
cccacccacaagtcgatcttcccgaaacgcatcctcctgcttttgtgcttcttgacgcagaaccacgcggaaacccaccctgacaagactatcaccctccaggtggactcggttgacaccatagccatcgttaaagacacgatccacgttacggacgccatccacccagaccagaagcgggtcatctctgctggcatacagattgaggatgggcgcacgctcgctgactacaacatc

SEQ ID NO: 114069 - DNA, 474 bp, Zea mays
  Clone ID: MRT4577_35512C.1
cacctactaacttggaccttaacggcgcctttttttttttttttttttttttttttttaacggggggaacttctataacttaccaggggactgtcaattccacaatatatttgctaaaagtgaaggactaaactgcgatggcgatgcctgataatgctgcaaaaaagccaggacataactctcccgaaaacctccagagaaacacacaggatcatggcagtgagctcatgaaaccctggcctccttcctggagcggctctcatacttggtgatttttcgaccaatatattggcttgaacagtaggaacttgccagtaagtatgaggagaggtgtgtttccttaaaaagtcatttggaattttggattcctaccggaccttcttaaagcttgaactgctaacacgaatgccttggaagtcacctttttgcatggaacagatctgtggaaacacgaccctgtttgagctttgaggc

SEQ ID NO: 114070 - DNA, 2598 bp, Zea mays
  Clone ID: MRT4577_35513C.1
atggcggccgacaacccgcccaccggcggcggaaccgacgacatcttccccgcgtggtggaagaacaacgttcgagctcgccccgtcctctcccccgccaacggaggaggaggcggggcaaccaaggccaagcgggaggccgcgcttcgtcggccgtcgagcgaatcgatgttcccagcgccccaacggagggcacgccgggcgtcgacctcgcgttcaagacgaaggcaggcgctgtccccccgcgacacgctgatcccgagcaagaagacgacgccggcgcactcgcggagagcttgcaggacgtcgccctcgtacctgagacgacgtgccatgcgggactttatgaccgcatgtgactactgcctctccgactgttccgacggaagccgcagccttgacgacgaggactgcggcccaagccgcgaatgtttccacgtcgagctaggggatccctccgaaggcaaccatcttggcatgccggaggacggtgattttcctaggccggcgcctcgcgccgatatcccgcgggagctagctgtggtccccgttccggtggggggacacgacccacagctcgagcaagtccgcggggcgcaggccaggctcgacgagggaacaggggcgcttgagacgatccgccgggacgtcgggcagggatacccctcggagcctcacgccgcgacttcccgatttatgcgggaagcctcggtctacaccgggcgcacacgcaacaccgcgcctgcggccccgagccacctcggcaacgagcaccatcgacgcgaccgtcgggcccacctcgacgaaagggtgcgccgaggctaccaccccaggcgtggggggcgctacgacagcggggaggatcggagtccctcgcccgaaccacccggtccgcaggccttcagtcgggccatccgacgggcgccgttcccgacccggttccgacccccgactactatcacaaagtactcgggggaaacgaggccggaactgtggctcgcagactaccgcctggcctgccaactgggtggaacggacgacgacaacctcatcatccgcaaccttcccctgttcctctccgacactgctcgcgcctggttggagcacctgcctccggggcagatctccaactgggatgacttggtccaagccttcaccggcaatttccagggcacgtacatgcgccccggaaattcctgggaccttcggagctgccggcaacagccgggagagtcgctccgggactacatccggcgattctcaaagcagcgcaccgagctgcccaacatcaccgactcggatgtcatcggcgcgttccttgccggcaccacctgccgcgacctggtgagtaagttgggtcgcaagactcccaccagggcgagcgagctgatggacatcgccaccaagttcgcctctggccaggaggcggttgaggctatcttccaaaaggacaagcagccccagggccgcccatcggaagaggctcccgaggcgtctactccgcgcggcgccaagaagaagggcaagaagaagtcgcaatcgaaacgcgacgccgctgacgcggaccttgtcgccgccgccgagtacaagaaccctcggaagccccccggaggtgctaacctcttcgacaagatgctcaaggagccgtgcccctaccatcaggggcccgttaagcacactctcgaggagtgcgtcatgcttcggcgccacttccacagggccgggccacccgcggagggtggcagggcccacgacgacgacaagaaagaagatcaccaagcaggagagttccccgaggtccgcgactgcttcatgatctacggtgggcatgcggcgaatacctcggctcggcatcgcaagcaagagcgccgggaggtctgctcggtgaaggtggcggcaccagtctacctagactggtccgacaagcccatcaccttcgaccaggctgaccaccccgaccatgtgccgagcccggggaaatacccgctcgttgtcgaccccatcgtcggcaacgtcaggctcaccaaggtcctgatggatgggggcagctgcctcaacatcatctacgccgagaccctcaagctcctgcgcgtcgatctgtcctccgtccgagcaggcgctgcgcccttccacgggatcatccctgggaagcgcgtccagcccctcggacgactcgacctccccgtctgcttcggaacgccctccaacttccgaagggagaccttgacgttcgaggtggtcgggttccgaggaacctaccacgcggtactgggaaggccatgctatgcgaagttcatggtcgtccccaactacacctacctgaagctcaagatgccgggccccaacggggtcatcaccgtcggccccacgtacaaacacgcgttcgaatgcgacgtggagtgcgtggagtacgccgaggccctcgccgagtccgaggccctcatcgccgacctggagaacctctccaaagaggtgccagacgtgaagcgtcatgccggcaacttcgagccagcggagacggttaaggccgtccctctcgacccctgtggcgacacctccaagcagatctggattggttccgggctcgaccccaaatag

SEQ ID NO: 114071 - DNA, 5886 bp, Zea mays
  Clone ID: MRT4577_35514C.1
atgtccctcgacggcagctacgacatgatattccttcccccgccgcgcgacagcgacaatggcggccgacaatccgcccgccggcggcggaatcaacgacgtcttccccacgtggcggaagaacgacattcgagcttgtcccgtcccctcccccgccgacggaggaggaggcggggcaaccaaggccaagcaggaggcggcatctcgtcggctgtcgagcgagtcgacggtgccggcgccccagcggggggcacgtcgggcatcgacctcgcgtctgagacgaagacgagcgccgtctccccgcaacgcgccacctccaagcgtacggacgatgccagcacgctcgcaaaggacttgttgggcgtcaccctcgtacctaagacgacggtgcagtctgcccctgacgcgacttcgtcaccgcccgtcgaccaagaggtaccgaccgactcccatctcgtgccttttggattcagcctcgacccaccaagcgacttcgcttcggtggacgctctcatagaggtgagtccaaaccctctggggtattgtatgcggtcaccctgggaccggctgacggccgtctcgacctacgggccctcgggttccgaggaaaatgacgagcccgacttttgttgggatttctccagacttagtaaccccagtgccatgcgggacttcatgaccgcatgcgattactgcctttccgattgttccgacggtagccgcagcctcggcgatgaggactgcggcccaagtcgtgaatgtttccacgttgatctagggggtcccggcgaaggcaaccatcttggtacgccggaaaacggtgatccccctgggcctgcgcctcgcgttgacatccttcgggagctagctgtggtccccgtcccggcggggggtcatgacccacagctcgagcaaatccgcgagatgcaggccaggctcgacgagggagcaggaacacttgagccgttccgccgggacatcgggcaggaatgggcaggccaacctccagccggagaagcgccggcaatacttctccgcgcgatgccggagccatctaccaccgaggggcggtgtatccaggtagagctcaagaatctcctggaggatgtcgcggtccgacgggccaaaagctccgcctcccgaaggcaggggtacccctcggaacatcacgccgcgacttcccgattcatgcgggaagcctcggtccacaccgggcgcacgcgcaacacagcgcctgcggccccggatagcctcggcaacagacaccctcaccgcaaccgtcgaacccacctcgacgagaggggcacgtacgtgcgccctaggaactcctgggatctccgaagctgccgccagcagccgggggagtccctccgggactacatccggcgattctcgaagcagcgcaccgagttgcccaacgtcaccgactcggatgtcatcggcgcgttcctcgccggcaccacctgccgcgacctggtgagcaagctgggtcgcaagacccccaccagggcgagcgagctgatggacatcaccaccaagttcgcctctggccaggaggcggttgaggccatcttctggaaggataaacagccccagggccgcccaccggaagatgtccccaaggcgtcaactcagcgcggcaccaagaagaaaggcgggaagaagtcgcaagcgaaacgcgacgccgccgacgcggaccttgtcgccgatgccgagtacaagaaccctcggaaacctcctggaggtgccaatctcttcgacaagatgctcaaggagccgtgcccctatcatcaggggcccgtcaagcacacccttgaggagtgcgccatgcttcggcgtcactttcacaaggccgggccacctgcggaaggtggcagggcccgcgacgatgataagaaggaggatcacaaggcaggagagttcctcgaggtccgcgactgcttcatgatctacggtgggctagtggcgaatgcctcggctcggcaccgcaagcaagagcgtcgggaggtctgctcagtaaaggtggcggcgccggtctacctagaatggtccgacaagcccatcaccttcgaccagggcgatcaccccgactgcgtgccgagcccggggaaatacccgctcgttgtcgaccccgtcatcagcaacgtcaggctcaccaaggtcctcatggacggaggcagtagcctcaacatcatctacgccgagaccctcgggctcttgcggatcgacctgtcctcggtccgggcaggcgctgcgccttttcacgggatcatccccgggaaacgcgtccagcccctcggacaactcgatctacccgtctgctttgggacacccttcaacttccgaagggagaccctcacgttcgaggtggtcgggtttcgaggaacctaccacgcagtgatggggaggccatgctacgccaagttcatggccgtccccaactacacctacctcaagcttaaaatgccgggccccaacggggtcatcaccgtcggccccacgtatcgacacgtgtacgaatgcgacgtggagtgcgtggagtacgccgaggccctcgccgaatccgaggccctcatcgccgacctggagagcctctctaaggaggcgccagacgtgaagcgccatgccggcaacttcgagccggcggagacggaagcagtgctcgtcgactttctccacgcaaacgccgacgttttcgcgtggagtccctcagacatgcccggcataccgagggatgtcgccgagcactcgctggatatccgagctggagcccgacccgtgaagcagcctctgcgccgattcgatgaagaaaagcgcagagccataggcgaggagatccacaagctaatggcagtagggttcatcaaagaggtattccatcccgaatggcttgccaaccctatgcttgtgagaaagaaaggagggaaatggcggatgtgtgtagactacactggtctaaacaaagcatgtccgaaagttccctaccctctgcctcgcatcgatcaaatcatggattccactgctgggtgcgaaaccctgtctttcctcaatgcctactcagggtatcaccaaatcaggatgaaagaatccgaccagctcgcgacttctttcatcacacccttcggcatgtactgctatgttaccatgccgttcggtttgaggaatgcgggtgcgatataccaaaggtgcatgaaccacgtgttcggcgaacacattggtcgaacggtcgaggcctacgtcgatgacatcgtagtcaatacgagaaaagcctccgacctcctttccgaccttgaagtgacattccgatgtctcaaggcgaaaggcgtaaagctcaatcccgagaagtgcgttttcggggtcccccgaggcatgctcttggggttcatcgtctccgagcggggcatcgaggccaacccggaaaaaatcacggccatcaccaacatggggcccatcaaggacttgaaaggcgtacagagggtcacgggatgtcttgcggctctgagccgtttcatctcacgcctcggcgaaagaggcctgcctctgtaccgcctcttaaggaaggtcgagtgcttcacttggacccctgaggccgaggaagccctcgggaacctgaaggcgctcctcacgaacacgcccatcttggtgcctcccgccgccggagaagaccttttgatctacgtcaccgctaccactcaggtgaggccagtctacttcttcagtgaggtactgtccgagaccaagatccgctacccacaaattcagaagctgttgtacgcagtaatcctgacgcggcggaagttgcgacactactttgagtctcatccagtgactgtggtgtcatccttccccctgggggagatcatccagtgccgagaggcctcgggtagaactgcaaagtgggtggtggaaatcatgggtgacacgatctcgttcgcccctcgaaaagccatcaagtcccaggtcttggcggactttgtggctgaatgggttgacacccagctcccgacagttccgatccaaccggaactctggaccatgtttttcgacgggtcgctgatgaagacaggggcaggcgcgggcctgctcttcatctcgcccctcagaaagcacctacgctacgtgctacgcctccacttcccagcgtccaacaatgtggccgagtacgaggctctggtcaacgggttgcgcatcgccatcgagctaggggtccgacacctcgacgctcgcggtgactcgcagctcgtcatcgaccaagtcatgaagaactcccactaccgcgacccgaatatggaagcctattgcgatgaggttcggcgcctggaagacaagttctatgggctcgagctcaaccacatcgcccgatgctacaacgagactgctgacaagctggctaagatagcctcggagcgaacaacggttcccccggacgtcttctcccgagacctgcaccaaccctccgtcaagaccgacgacacgcccgagcccgagaaggcctcggcccagcccgaggcatcctctgctcggcccgaggcaccctcggctctgcccgagacatcctcggctcagcccgaggcaacctcggcccccgaagttgaggcactgcgcgtcgaggaagagcgaagcggggtcacgcctaatcgaaactggcagaccccgtacctgcaatatctccaccgaggagagctacccctcgaccgagccgaagctcgacggttggcgtggcgcgccaagttgttggtcttgctgggggatgggaaggagctctaccaccgtagcccctcaggcatcctccagcgatgcatatccatcgccgaaggccaggagctcttacaagaaatacactcgggggcttgcggtcatcacgcagcacctcgagcccttgttggaaacgccttccgacaaggcttctactggccaaccgcggtggccgacgccactagatttgtgcgcacctgcaaagggtgtcaattctacgcaaggcagacccacctgcccgctcaggctctacagaccatacccatcacctggccgtttgctgtgtggggtctggacctcgtcggccccttgcagaaggcacccgggggctacacgcacctgctggtcgccatcgacaaattctccaagtggatcgaggtctggcccctaaacagcatcaggtccgaacaggcggtggcgttcttcaccaacatcatccatcgctttggggtcccgaactccatcatcaccgacaacggcacccagttcaccggcagaaagttcctggacttctgcgaggatcaccacatccaggtggactgggccgccgtggctcaccccatgacgaatgggcaagtagagcgtgccaatggcatgatcctgcaaggactcaagccacggatctacaacgacctcaacaagttcggcaagcgatggatgaaggagctcccctcagtggtctggagtctgaggacgacgccgagccgagccacgggcttcacaccgttctttgtagtctatggggccgaggccatcttgcccatagacttagaatacggttccccgagggcgagggcctacgacgatcaaagcaaccgagctaaccgagaagactcactggaccagctggaggaggctcgggacatggccttgctacactcggcgcggtatcagcagtccctgcgacgctaccacgcccgaggggttcagtcccgagacctccaggtgggcgacctggtgcttcggctgcgacaagacgcccgagggcggcacaagctcacgcctccctgggaagggccgttcgtcatgtccaaagttctgaagcccgggacgtacaagctggccaacagtcaaggcgaggtctacagcaacgcttggaacatccgacagctacgtcgcttctactcttaa

SEQ ID NO: 114072 - DNA, 4083 bp, Zea mays
  Clone ID: MRT4577_35515C.1
atgcaggccaggctcgacgagggagcaggaacacttgagcagttccggtggaacatcgggcaggaatgggcagaccaagctccggccagagaagcgtgtgatctgccccagggcatccagcgccgcattgcagacgacgtcagggcaaggccgccaccggcttccagtggggtcggccagaacctggctgcagcagcaatactacttcgcgcgatgccggaaccatcgaccaccgaagggaggcgtatccagggagagctcaagaatctcctggaggatgccgcagtccgacgggccgaaagttctgcctcccgaaggcaggggtacccctcagagcatcgcgccgcgacttcccgatttatgcgtaggggacgctacaacagcggggaggatcggagtccctcgcctgaaccacccggtccacaggctttcagccgggccatacgacgggcgccattcccgacccggttccgaaccccgactaccatcacaaagtactcgggggagatgaggccggaactgtggctcgcggactaccgactggcctgccagctgggtggaacggacgatgacaacctcatcatctgcaacctccccctgttcctctccgacaccgctcgagcctggctggagcatctgcctccggggcagatctccaactgggacgacctggtccaagccttcgccggcaacttccagggcacgtacccgggagagtctctccgggactacatccagcgattctcgaagcagcgcaccgagctgcccaacgtcaccgactcggacgtcatcggcgcgttcctcaccggcaccacctgccgcgacctgcgcggcaccaagaagaagaacaagaagaagtcgcaagcgaaacgcgacgccaccgacgcggaccttgtcgccgccgctgagtacaagaaccctcggaaacctcctggaggtgccaatctcttcgataagatgctcaaggagtcgtgcccctatcatcaggggcccgtcaagcacacccttgaggagtgcgtcatgctttggcgccactttcacaaggccgggccacctgtggagggtggtagggcccacaacaacgacaagaaggaggatcacaaggtagaggagttcaccgaggtccacgactgcttcatgatctacggtgggcaagtggcgaatgcctcggctcggcaccgcaagcaagagcatcgggaggtctgctcggtaaaggtggcggcgccagtctacctagactggttcgacaagcccatcaccttcgaccagggcgaccaccccgaccgcgtgccgagcccggggaaatatccgcttgttgtcgaccccgtcatcggcaacgtcaggctcaccaaggtcctcatggacggaggcagcagcctcaacatcatctacgccgagaccctcgggctcctgcagattgatctgtcctcgatccgaacaggcacggcgccttttcacgggatcatcctcgggaaacgcgtccaaccccttggacaactcgatctgcccgtctgcttcgggactccctccaacttccgaaggttccctaccctctgcctcacatcgatcaaatcgtggattccactgctggggtatcaccaaatcaggatgaaagagtccgaccagctcgcgacttctttcatcacaccctttggcatgtactgctacgttactatgccattaggtttgaggaatgcgggtgcgacgtaccaaaggtgcatgaaccacgtgttcggagagcacattggtcgaacggtcgaggcttacgtcgatgacatcttagtcaagacaaggaaagcctccaacctcctctccgaccttgaaacgacattccaatgtctcaaggcgaaaggcgtaaaactcaatcccgagaagtgtgtcttcggagtcccccgaggcatgctcttagggttcatcgtctccaagcggggcatcgaggccaacccggagaaaatcgcggccatcaccaacatggggcccatcaaggacttgaaaggcgtacagagggtcatgggatgccttgcggctctgagccgcttcatctcgtgcctcggcgaaagaggcctacctctgtaccgcctcttgaggaagaccgagcgcttcacttggacccccgaggccgaggaagccctcgggaacctgaaggcgctccttacgaacgcacccatcctggtgcctcccgctgccggagaagccctcttgatctacgtcgccgctaccactcaggtggtcagcgccgcgatcgtggttgagagacgagaagaagggcatgcattgcccgtccagaggccggtctacttcatcagtgaggtactgtccgagaccaagatccgctacccacaaattcagaagctgttgtacgcgttcgagcctcatccggtgactgtggtgtcatccttccccctgggggagatcatccagtgccaagaggcctcgggtaggattgcaaagtgggcggtggaaatcatgggcgagacaatctcgttcgcccctcggaaggccatcaagtcccaagtcttggcggactttgtggctgaatgggtcgacacccagctcccggcagcttcaatccaactggaactctggaccatgtttttcgacaggtcgctgatgaaaacaggggcaggcgcgggcctgctcttcatctcgcccctcgggaagcacctccgctacgtgttgcgcctccatttcccggcgtccaacaatgtggctaagtacgaggctctggtcaacgggttgcgcatcgccatcgagctaggggtccgacgcctcgacgctcgcggtgactcgcagcttgtcatcgaccaagtcatgaagaactcccactgccgcgacccgaagatggaagcctactacgacgaggttcggcacctggaggacaagttctacgggctcgaggtcaaccacgtcgcccggcggtacaacgagactacggacgagctggcgaagatagcttcggcgcgagcaacggttcccccaaaagtcttctcccgggacctacatcaaccctcagtcaagacaaacgacacgcccgagcccgagaaggcctcggcccggcccgaggcaccctcggcccccgagggtgaggctctgcgcatcgaggaagagcggaatggggtcacgcctaatcgaaactggcagaccccgtacctgcaatatctccaccgaggagagctacccctcgacagagccaaagctcggcgactggcgcggcgcaccaagtcatttgtcttgctgggtgacgggaaggagctctaccaccgcaacccctccggcatcctccagcgatgcatatccatcgccgaaggccgggagctcttacaagaaatacactcgggggcttgcggtcatcacgcagcgcctcgagcccttgctctacaaacaatacccatcacctggatgtttgttgtgtggggtctggacctcgtcggtcccttgcagaaggcacccgggggctacatgcacctgctggtcgccatcgacaaattctccaagtggatcgaggtccgactcctaaacagcatcaggtccgaacaggcggtggcgttcttcaccaacatcatccatcgctttggggtcccaaactccatcatcaccgacaacggcacccagttcaccggcagaaagttcctggacttctgcgaggatcaccacatccgggtggactgggctgccgtggctcaccccatgacgaatgggcaggcagaacgtgccaacgacatgattctacaaggactcaagccgaggatctacaacgacctccacagtctatggggccgaggccatcttgcccacaaacttagaatacggttccccaaggacgaggacctacgacgaccgacgcaaccagaccaaccgagaagactcactggaccagctggaagaggctcgggacatggccttactacactcggcgcggtatcagcagtccctgcgatgctaccacgcccgaggggttcggtcccgagacctccaggtgggcgacttggtgcttcggctgcgacaagacacccgagggcggcacaagctcacgcctccctaggaagggccgttcgtcatcgccaaggttttgaagcccgggac

SEQ ID NO: 114073 - DNA, 380 bp, Zea mays
  Clone ID: MRT4577_35516C.1
ggggttgtgttttttttattattggaaaccccaaggcaatacgaaaaatctggaacttggagttgaaaaaaagacattttccctgggcctgttgtaagggcctttgtaccaaaaaggcgtgtgccaaatgttcttccagaacaacccaaacgggccgacttttgggaccgggaagcttttctggggccactcccttttcggcgaccgggggaactgggggtttctgggcaccccgctaaaccccacattggcattaaaccccaagggcttttggtggggtttccacaaaacacttggggacggccccccccgtattttttaaatcgggtgcgaaccaagcgggggcaagtacaaaaagtggggttccacaaaaacccgta

SEQ ID NO: 114074 - DNA, 232 bp, Zea mays
  Clone ID: MRT4577_35517C.1
aacactctccatctttaatattagatacggcagatatggatatgattggccaagattgagattgattgtttgatcgctctgtttggcaattatttttggatggaaggcgcaactcgttggctttttcctgcggctctggttgaaccgtgtcccttgctcctgcgcgttggtgttgccctatatgatctcctcgatctctatggacctgttgcgcgcgcgcgcgccctgttgt

SEQ ID NO: 114075 - DNA, 1959 bp, Zea mays
  Clone ID: MRT4577_35518C.1
atgaagcatttgagaacaagtgaacaacacatcttacgctcttggcacttcgaagatgtagactcggcgccggatgtggaagaaaacagcgccgcttgcgtcgctccgactgttgtgccactcgacagagtgagtctgacagcagctaagtccagcctcgggcgctataggaagctccgcctcgcccgaccccagggctcgggctcaacctcgacgctggacgacgaactccgcctcgcccgaccccagggctcggacaccgcctcggcctcggaagacggtctccgcctcgcccgacccagggctcagactcaacctcgacctcggaagacggactccgcctcgcccgaccgcaggggtcggacacagcctcagcctcggaagacggtctccgcctcgcccgaccccagggctcgggctcaacctcgacgctggacgacagactccgcctcgcccgaccctagggctcggacccagcctcggctccggaagacgacggactccgccttgcccgaccccagggctcggactcagcctcggctccggaagacgatggactccgcctcgcccgaccccagggctcggactcagcctcggctctggaagacgatggactccgcctcgcccgaccccaaggctcagactcagcctcggctccggaagacgatgggctccgccttgtccgaccccaaggctcagactcaacctcgacctcggaggaatcgccacctcgcccaaactcgggtccggaccggccacgtcaccaggggggccatcattgccctgcccctagctagctcaggctacggggaacaagaccggcgtcccatctggctcgccccgatgggtagtctccagcaacctttccaacccgggacgatgcaccgtttcgggagtcttgagttcatgtccctcgatggcagctacaacatgatactccttcctccgccgcgcgacagcgacaatggcggccgtcagcccgcccgccggcggcggaatcaacgacgtcttccccacgtggcggaagaacaacatccgggtttgtcccgtcacctgccccgccgacggaggaggaggcggggcaaccatggccaagcaggaggcagcacctcgtcgactgtcgagcaagtcgacgacgccgacgccccagcgggggacacgtcgggttttgaccttgcgtctgagacgaagacgagcgtcgtttcccctcaacacgccaaccccaagcagatgaacgacgccagcacgctcgcgaaggacttgctgggcatcgccctcgtacctgagacaacggtgcagtctgcccctgacgcgacttcgacaccgcccgtcgaccaagagtcgtggtcccagtccctgcggggggtcaggacgcacagctcgagcaaatccgcgagatgtaggccaggctcgacgagggagcaggaacacttgagcagttccggcggaacatcgggcaggaatgggcagaccaagctccggccggagaagcgcgtcatctaccctagggcatccagcaccgcattgccgacgacgtcagggcaaggccgccaccggctttccagtggggtcggccagaacctggctgcagcagcaatactactccgcgcgatgccggaaccatcgaccaccgaagggcggtgtatccagggagagctcaagaatctcctggaggatgccgcggtccgacgggccgaaagctctgcctcccgaaggcaggggtacccctcggagcatcgcgccgcgacttcccgatttatgcgggaagcctcggtccacaccgggcgcacgcgcaacacggcgcctgtggccccgggtcgcctcggcaacgagcaccaccaccgcaaccgtcgagcccacctcgacgagagggtgcaccgaggctaccaccccaggcatgggggacgttacgacagcggggaggatcggagcccctcgcccgaaccacccggtctgtag

SEQ ID NO: 114076 - DNA, 259 bp, Zea mays
  Clone ID: MRT4577_35519C.1
aggttttgctgctctccgaccccgagttccgaagaccgtatcatcaggagtggtccctgtcgcgtgtgactgagatggcgctgacgaatcacgggatcgttgattagaccaacttgaagctcgtcatcgtcggcgatggaggccctggtatcactacgtttgtgaccaggcatctcactggagagtctgagaagaagtatgctcaatcaattggtgtggaagttcatccgtaggatttcaccactacctgtggtacgat

SEQ ID NO: 114077 - DNA, 255 bp, Zea mays
  unsure (1)..(255): unsure at all n locations
  Clone ID: MRT4577_3551C.1
cagccttttaggccaccgtactacggacgccggagcggcagacatggcatccacgatcatggcgcggcgcctcccgcgccggtgtcgccaagacgccgctcctgactgggcagggccgtgccggcagcgccagccccctgcgcgacgttgncggcgccgtcggcgtgggcntgacgatgcccaacgaggggggggtcggccgggaccggcgggggggccgtgcgcggggcgccgctcccacggggcgcgcggggg

SEQ ID NO: 114078 - DNA, 420 bp, Zea mays
  Clone ID: MRT4577_35520C.1
aaggggaaaaccccggggggacatgggaattctaaaaggggccccggggaacaacccccaaaggaaacccgggggggggaccaacccgggggggggggggcaatggggaccccatccgggggcctttggaaaaaaaacccaaaccccccccttatttttgaagggggggggggggggaagggccagggccccccgcccccccaaaagaaaaaacatgggaacagggagaccttgccccccaggggaggcaggcccccccctgggatttaaggccccaaaggggaaacccagggtggggaaaggggggggaaaacctccccaccgggacctggggggtcccaaagcccttggggtcacccagccccttgggaaaaccctgggagagcccgccgcccccctttgggaggtcaaggcaaaagg

SEQ ID NO: 114079 - DNA, 458 bp, Zea mays
  unsure (1)..(458): unsure at all n locations
  Clone ID: MRT4577_35521C.1
cgntcgtgggagcgtggacgacaacccctgtgacaaatgctggccgcttggcttcgaccaaccaaccaggaaggcacgctgccttcttgggggaggcccaaacaacctccgcacccaattcagggagcacggcgtccacggataaagaacttttgccgcaagctgggcctactgtgggaccgcaggggctggagcttattggctcggccccctcggcacggtttgtctgtcgcaccaacgactggttcactagcccgacggagtctaggagcctaaacaccgggatcgcgtccgtgggttctgttgagttctcaaacacaagtaggagctcgttacgcgccccgagcttattttatggctgtgcctgtgacggaccccctagctatggtcgcgcttccgatgttttttgcagctcatggcgtcgaggtggtagcagcaccacacccaccattaactct

SEQ ID NO: 114080 - DNA, 725 bp, Zea mays
  unsure (1)..(725): unsure at all n locations
  Clone ID: MRT4577_35522C.1
cctgccccctagacgccgctgctgacacgcctcncgagtcccgattgattgatttcctccagccagcgttaaagcaactacgaggggtagcgagtgagagaggtctcatcatctcatcgttcccatggagaaccgcaaggaggtacgaccgtacgagttagttatcagggaatgttattttctcgagacatttggggaagaagtctcgcctggattctgactttctgagctgcttgttggcgctcgctccgcatttgcaggggcagcagggcgccacggtcgggtggatgaccgtgccggcgttcggcgagtgggacgttaagaacggcgccgtgccggactactccatggacttctccaagatccgggagatgcgcaggcagaacaagcgcgagctctccagggccagcctcggcggcgacgaggacctcctccagcagcagcagcagcagcagcagcagcagagtgccaaggctcagccgcccaagtcccccgccgccgccgtcgccgacgacgacgaccaccaccgcctgccgctgcacgacgactcccctacgggaaggaagaagttcctgagctacttccagtgctgtatcagagcatgaagagttgcaaaccttcctgtggtgtcactgtcactgttagaattatagtcattttctgtattattttaattccatgaattaacattatgatgatgatatataacaaataaataaccatag

SEQ ID NO: 114081 - DNA, 1574 bp, Zea mays
  Clone ID: MRT4577_35523C.1
ctgcagcgaggcattgggacctcgaggccggccggggatttctgctgcaccttctttttttttatgcccggcactgcagcgaggcaggagggcgaccggaatttcccatctctccttctcatcattcctttcgggatttcccctcctggttcccatcgatcagagggcccggcgctgttgcctttcgcattcgattcctttcgggtcggatttgtggcggagctcttgatttgctccgtccctgccagaggaggagggcttgctggatcagggatcgagcaaggaagcagccatgagcggcggcggaagcgtgagtttcctcgagatccagccgtcggagctcgcattcccctttgagataatgaggcagagctcgtgttccatgcaactgaccaataagactgaccattatgtagcattcaaggtcaaaacaaccaacccaaagcagtactgtgtgcgtcctaatattggtgttgtattacctggctcaacttgcaatgttacagtgacaatgcaagcacagaaggcttcaccacctgacatgcagtgcaaggacaagttcctagttcaaagcgttgtggccgagaatggtgtgacagctcaagatattaatgcagcaatgttcaataaggagccagggaaagttgtcgatgaattcaagctgcgtgtggtttatgtgccaacaactatgcccaacccaatccctgaagaatctgaactagggagttccactccctcattttcacaagaaaacgggatcgatcattccatgacgccactatctgtatctagatcgtctgctgaaacagcaaaggagaagccctctgaggcaacttctgtgatctccaagctaactgaggagaaaatgtctgctgttcagcagaaccagaaattacgccaagagctggagcttctacggaaagagagcagcaaaaccggcggcggtttctccatcaccttcttgtttgtcgtgggcctcctgggcatcgtcgttggctacatcctcaagagaacatagtggaacggtgtctccagcagatctctactactcccattaaaggacacccacccaccccacaggtggggtggtatgcctctctctccccatgtgttttcgctcctaatcggagcgccctgttctaacgtgtaacaacagcagcactcctagaggctagaggccttcggtttgtgtacatcattatggtggtccatacttattttttttcttccagaattcatttcggagttggtagacttgttttaacgggaatgtttgaactgttgccagtctgatgaatttgccagaaaaaaaggatcgtatgcctctctccacatgtgttttcgctcctaaccggagcgccctgttctaacgtgtaacaacagcagcactcctagaggctagaggccttcggtttgtgtacatcattatggtggtccatacttatttttttttcttccagaattcatttcggagttggtagacttgttttaacgggaatgtttgaactgttgccagtctgatgaatttgccagattttttgcatcgtttcacctgaaaaaaaaaaaaaaaaaaa

SEQ ID NO: 114082 - DNA, 372 bp, Zea mays
  Clone ID: MRT4577_35524C.1
aacaaaacaaaggtggattttgaaaacagatgggagcaaggaattaacatgcatggatctcgggggacgcccaaaagctgagtagctagaaaccccgtttatttaatcggacaggatcgtccttttacaggcccttacataaaaaggatcatgcagcagcttggttacggggaggcctcgatgaccccacgaggtccgatttttttgacaaccttgtagtcggagaagccagccttggaaaaaatggggccccagtctgtctttgcccggctgcctgcccctgggggtcacccttatgagcatgcccatgaagagctgggctctcatcaatgaccggccccaagtccgggccccggaggttcccaaaggggg

SEQ ID NO: 114083 - DNA, 1085 bp, Zea mays
  Clone ID: MRT4577_35525C.1
attgggtacctcgaggccggccggtatgcccgttactgcagcgaggcaggagggcgaccggaatttcccatctctccttctcatcattcctttcgggatttcccctcctggttcccatcgatcagagggcccggcgctgttgcctttcgcattcgattcctttcgggtcggatttgtggcggagctcttgatttgctccgtccctgccagaggaggagggcttgctggatcagggatcgagcaaggaagcagccatgagcggcggcggaagcgtgagtttcctcgagatccagccgtcggagctcgcattcccctttgagataatgaggcagagctcgtgttccatgcaactgaccaataagactgaccattatgtagcattcaaggtcaaaacaaccaacccaaagcagtactatgtgccaacaactatgcccaacccaatccctgaagaatctgaactagggagttccactccctcattttcacaagaaaacgggatcgatcattccatgacgccactatctgtatctagatcgtctgctgaaacagcaaaggagaagccctctgaggcaacttctgtgatctccaagctaactgaggagaaaatgtctgctgttcagcagaaccagaaattacgccaagagctggagcttctacggaaagagagcagcaaaaccggcagcggtttctccatcaccttcttgtttgtcgtgggcctcctgggcatcgtcgtcggctacatcctcaagagaacatagtggaacggtgtctccagcagatctctactactcccatgaaaggatacccccaccccacaggtggtgggtggtatgcctctctccccatgtgttttcgctcctaatcggagcgccctgttctaacgtgtaacaacagcagcactcctagaggctagaggccttcggtttgtgtacatcattatggtggtccatacttattttttttcagaattcatttcggagttggtagacttgttttaacgggaatgtttgaactgttaccagtctgatgaatttgccagatgttttgcatcgtttcccaaaataaaaaaaaaaaaaaaagcggcc

SEQ ID NO: 114084 - DNA, 671 bp, Zea mays
  unsure (1)..(671): unsure at all n locations
  Clone ID: MRT4577_35526C.1
catcactcaactcctatcacctaagcagcatataagtgataaaagttttataacaacaaggaggtggcaaatgcaccggggcttgcctgggataacactaggttagtgtggttagatgacgaccacttggtgagcatcttccgtcctagcacttgatcagatcatccattccgctggttcgttcaccagcatcattttgagatcaactcggctcttgtcctccgcatcacgtgtaacgaaccataactaaaccaaactcgaaatcacgagatcgacgatgatttttggttcgaaccttctaccgaacatttagcaaacgtcgaacgggcctcacttcttcatcatcggtcccaagggttccccaaggttcgatgatntgcggccgggttggcatagatcaaggtggagctcgctgcagcatatcattgagcatgctgagggcgcgtcccagaggggtttccatggttactgctacatggggggccatgggaggaagagcagggagcagaggaaagcgtccttgctgcagggagtggagacgccagccatcagggagaggagggcgacatccatgggaagctggggctgatccacgccatggagagggatccagggggcgccccatgggagggagcaaggggcagccagcaggaggggctcggacgcgtggg

SEQ ID NO: 114085 - DNA, 876 bp, Zea mays
  Clone ID: MRT4577_35527C.1
ggaacccttctcttgatggtatgcctagtgtcttcccctcttttttcacgcaactcattgctgggtgtccacgtgaatttgttctacttcaattaaaaagagaggatcaggccatctatgaatttgagatctaaaccatcaatggtaataatgcagttttactgtctacgaccctgactttttgaattcttgatgctgcgaaggctgtgagattgatcaactagcgagagtccgaagtccttagttagcaactcaaaacttaaaagggcttcctgacgatgatgaatttgtcttttcttgtttcaccttgaaagcttctccgcagcaagggtagcttggcaggatgctgagccggttcggaagcgctttgctacgacttgtttctccgacgggcatgctgttcaacaaaaacttcaaccaggtcgagtacattgaggcaaaaacgacatgaagatgcactgtacccatcacaagaggtgggatgatgaagatgtagaaaatgaggcacagaaacctggaaagatgaatagatgcaaaaggattcgcaaaaaccatgggaagatcatttgggcaaatcacttccgtccagaaggggatcagagttggctacgatcacttccattcgtcctaggaactatatacctcacagattcatggaagctgagaactgtagtagtggctacgctttccaacacttggcagtttgcgcccgtagaatggagttaaactgagtgctaaattttgtttcttgttactaaccgttaagaatcacgagatggttaatgatggttgagcttgtccagaaaacatggataagtgaggtctcaaaaaatggagcatcttttccaatattatcgtttcttatgccatcatcac

SEQ ID NO: 114086 - DNA, 323 bp, Zea mays
  unsure (1)..(323): unsure at all n locations
  Clone ID: MRT4577_35528C.1
agcccgagaacgtgctcctccggctcgactgtcacgtaacgctggccgacttcnacctgtcccgtctgctccaccccagcaggtcgtccgcggagacgtcgtctcccccgcggccagcgtcatgcgcgggcaccacaaccggcggtcgcgcgtccccgcgcggagcgactcggtctcaatcaccaggtcaagtcatactccaactccaacaactacaggccccctcaccagccctggtgcgctgcgtcgactccgagcagcagatccagagcctggtccgctacatcatgtggagcgtcaactggacccttgtgggcatgaag

SEQ ID NO: 114087 - DNA, 283 bp, Zea mays
  Clone ID: MRT4577_35529C.1
tgccccacgagagcacgctactcaccctcgctcgctagcgcccgctgatgtgggaagcggccctgcatccgctgactggccgctcatggctatggttcacctctaccgcacgggggggtgggccggggctctcgggctcgccgcccctggcttggtgggtgtccgcgcgatgctgcctgacgcgtgtcccgcgcctacgcctccccgtgcgccgctgcacggctctcgcgtgcagggcgatctttctgcgtggcgcctgactctctcgcggtctgaggaaccc

SEQ ID NO: 114088 - DNA, 492 bp, Zea mays
  Clone ID: MRT4577_3552C.1
cattaaattacacggagctttggggaagccagtttgataatttacagggttttaacacaatttgcgaaaaaaaaggggaatccaaacagaagtttttttcttaagccccgggggggctttatttttgccccccaaatttcaggaaaaccgggacgggttttttttagttgaaaacttggtttttttaggggctttatttttttaggggtcaaaaggcccccctggcatgtacttgtttaacctgtttggaaaaatcgccctccccgccgaattggtaaacctgctttttttggaaaacttcgcttgggcagcttttgtaagctttttggggaaattttttaggaaccaggggggagtcctaaactccctaatggttattttttttgcaggatttgggacaaaaatcctaacaaggaggggtttgcaatcctgggatatggggacataccctggtatttggtattgaatagacactattttcccaaccgtttt

SEQ ID NO: 114089 - DNA, 545 bp, Zea mays
  Clone ID: MRT4577_35530C.1
gtaattaagccaaaaaaagcaggtagacggaaacgtgctctttacatatggggcctttttttaccctaaaactctacattcttcattctctttcttatttccagacgcccgggcgggacccgggggcagaccccagggtcaacccacggaaaaccggaccgggacccgagggggacccaacctaccccacaagggaaaaatatacaaccgcggcgaaaaaacaacaaaacctccctccggggggaaaaagaaacccccgccaaatcaacaacaaacacaacccccccggaaaaaaggaaaaccccggggggccaaaaaagaaaggcaacccaaacaaaaaaaggcgccctaccgggcccgcctcaaaggggggaaaccaacctgccaggggcatcaaaaaaacccccaacccacggagaaaggcgcgctgcgcaacaggcagcaaaagaaggctaacaatcaacaagaagacgggcaacaacttgatgcccccaaaaccccgccccaaaaaagagaagaaagaaaacaacattagcccccccccc

SEQ ID NO: 114090 - DNA, 1931 bp, Zea mays
  Clone ID: MRT4577_35531C.1
cattgggtacctcgaggccggccgggaggtactgggagtgggagggggaggcacaggcaccataacgcgcgcttcagttccggaggccctcaccgcctcacgcaggcacgcacatcacacaacgccagcgagaaagagctctcgtccgcaccacggcgcaaccaacggggagaagaggaaggcagtgagctgtcccgcgcgtgcgcgccccgcctcccgcccgcccgtctgatgaggaagctctgcccgaacctcgagcgcgacgacgcgctggacacggtgctggaggtgcccatccccgaggagatgttctccggcggcggcggctcccgcggctccaccaggttcggctgcaccaacgtcaaggcttggatgcggtcgcacgccgccgaccggtccggcgcgggcgagccgtgctccatgacccgcggggagctgcagctcatgctgggcgtcatcggcgcgccgctcatcccgctgcccgtctaccacgccaaccagtcgccctgctccgtcctctgcgagcagctcaaggccgatcccatcgagtcgtcctccgccaagtacatcgtgcagcagtacatagcggcgtcgggcggggagtgggcgctgaacaaggttaagagcatgtacgcgatgggcaaggtgcggatgacggccgcggagctcaacagcagcgacgccgacggccacggcggaagcaccggaaacgggcaccaccgcggcgggaagaagggcagcaagggagggggcggcggcggcgagatcggcgggttcgtgctgtggcagaagaagccggagctgtggtgcctggagctcgtcgtgtccggctgcaagatcagcgccggcagcgacggcaaggtggcgtggcgccagacgccgtggcaccagtcgcacgcatcccgcggtcccccgcgcccgctccgccgttcgctccagggcctcgatccgcagctgaccgcgagcctgttcgcggactcggtgtgcatcggcgagcggagcatcgacggcgaggactgcttcgtgctcaaggtggaggcggaggcgtccagcctgcgcgcgcgcaacagcagcagcgtcgagatcatccggcacacggtgtggggctacttcagccagcgcacgggcctgctggtgcagctggaggactcgcacctgctgcagatcaggtccagcggcggcgccggagggagcgtcttctgggagaccaccatggagtcccgcctcggcgactaccgcgccgtcgacggcgtcaacatcgcccacgccggccgcaccgccgtctcgctcgtcaggttcggcgactgccaggacggcaacaccaggacgcgcatggaggaggagtggaacatcgaggaggtggacttcaacatctggggcctctccatggactgcttcctgccgcccagcgacctcagggagggcaaggagagccaggacgtcgccgtcgtcaaggccgacgcgcgcccgccgccgctgaggataccggcggtcaccgtgcgcgtcgggccctcgcaggtggctgccgtcaacatggacgactcggactcgctcgtcgcgaggtcatgactactcgtcacgtaccgtacgtacgtacgtacgtacttgcagtgctgagtgaagagcatgtatttgtacgtgacacttgtgttactataagatcatacatgtcgcaagatctgtaaatatattggaggttgagatcttcttttccccgcttcgagaggtgtgtgtttacctcagctagaattgaggccagaaatagtgcgatcgataatccgagctacatattccgcgtagctgtgttgtaaattctaatgaactagtaatacctgtaactctgaaagagcatcccagttctgtccagtcccaaaaaaaaaaaaaaaaaaaaaaaaaaaaaaaaaaaaaaaaaaactcgaggggggccgcgg

SEQ ID NO: 114091 - DNA, 157 bp, Zea mays
  Clone ID: MRT4577_35532C.1
ctacttcgatagatgttgtcttctgacgaggctgttgccatcaaggtctcatggattgtggagaaagagagcggctgacacagacacagaggccgacatagatggactcttcttgatgactatgatgagatcatggagctacagatcgaccgatagt

SEQ ID NO: 114092 - DNA, 1972 bp, Zea mays
  Clone ID: MRT4577_35533C.1
aaatgacggcacgaggctccccaaattccccatttttacggacaccagcaagccacgccacactcccaatcgccgccgcagctggtcccctgctcggctcgtctgatccagcggctgaatccgcaggccatggggttcgacaaggaggcgagctcctcctcctcgcggctcgacgcggcgccgctgctcccgcagcacggcggcggcgcgggcgggcacctgtcgtcgcagcccaagacgttcgccaacgtcttcatcgccgtcgtcggctcgggcgtgctgggcctcccctacaccttctcccgcacgggctgggcggcggggacgctgctgctcctcgccgtcgccgcgctcaccttccactgcatgatgctgctcgtcgccgcgcgccgccggatcgcggacgcgcaccccaagatcgcctccttcggggacctgggccacgccatctacggcgcgcccgggcgccacgcggtcgacgccatgctcgtgctcagccaggccagcttctgcgtcggctacctgatcttcatctccaacaccatggcgcacctctaccccatcgccatcggggcccagtccccggcgtcgccgctcctcacggccaaggcgctcttcatctgggccatgctgccgttccagctcggcctcaactccatcaggacgctcacgctgctcgcgccgctcagcatcttcgccgacgtcgttgacctcggcgccccatgggcgtcgtcctgggccaggacgcctccgtctggctcgccgacaggccccccgtgttcgccttcgctggccccgcccagctcctctacggcctcggcgtcgccgtctacgccttcgagggcatcggcatggtcctgccgctggaggcggaggccgccgacaagcgcaggttcggcgccacgctcgcgctgtccatggcgttcatcgccgtcatgtacgggctgttcggcgccatgggctacctcgccttcggcgccgccacgcgggacatcatcaccaccaacctcggcaccggctggctctcggtcctcgtgcagctcggcctctgcatcaacctcttcttcaccatgccggtgatgatgaacccggtctacgaggtcgcggagcgcctgctctgcggcaagcgctacgcctggtggctgcgctggatcctggtcgtgctcgtcgggctcctggcgatgctcgtgccaaacttcgcagacttcctctcgctcgtcggcagcagcgtctgcgtcgtgctcggcttcgtgctgcccgccgtgttccacctcaaggtcttcggcaccgagatcgggtgggccggcctcgtcgccgacgtggccgtcatcgtcatcgggattgcgctggcggtgtccgggacatggacgtcactcgtacagatcttcagttcttccgacctgtaagcatcgacagtctgatatgtgcaatgggagcgctcaaattggttccaatagattgagacccaattcagcgaccgggataacactgcatgcatttgtggacgtccgatcccgcaggcgatggttcagatccgatggttgaacagcaatttcttaaacactagccgcagtaccgactgcattttatccagctgccatgtcgatttgagcattttatccgatggtaaagtatgggaacaaactattgttgggagctctctgaaatctacattggtttggttcagatagagccatatagattctagctgtaccaggcagcagatccatgtgtaaagcctatatgatgttgtattgaattgaatcgatgactgctttatgcaagattcttttgtccaagagtgactgctttatgcaagattcttttgtccaaggggtttgtagttctctattgttagtatcaccttataagatgttttagtttttctaaatatttttttactacacatctaaacataatgtacaagttacacaatacaagagtgactgctttatgcaagattcttttgtcc

SEQ ID NO: 114093 - DNA, 618 bp, Zea mays
  Clone ID: MRT4577_35534C.1
ccggccgggccgggatcgcacagagcaggcatggcatgactgaataccacttcctgcactcactgtgactatactgctcgaagctcatgagcagcaaccaatcaccactcatggctccctacgttgcgctcttccttgccctggagcctcgtgtttgctgccaacgaccatgactggctaaccctgctgttatggcccagctgtgccaacaccactatgacagcccagtcccgcaccctacagacatcggggctgcccgatcgacgagctcaagctcaaggtagagcgccaatcttctacagcctcatccaggctgcacctaccccactgctatcaatgagtgcctcgctagctgtagggttctgctggaccatcgacgccggcatatgtgcctctgacaacgacatcaaggcccaacaactcgtcatccacctcaacctgccccttagactccacttcatctgccactagactgagcgcctgatctgccgataggacttcgcttgacataacttaacatcgccatacatagcgcgctccatctcgcgatactattcaccagcatggcgctctcgtgcaatattaacaaataaacctgccacttcaaattatttctgt

SEQ ID NO: 114094 - DNA, 145 bp, Zea mays
  Clone ID: MRT4577_35535C.1
gtcgtccatctacggcatctgcagaatacttactgcgcttatcttacaaggcggtcagaagaaagataccaccatgggctccaccccaaactggacactgaggaacctggtagaaaagagcatccggaccccatgagcgtggcat

SEQ ID NO: 114095 - DNA, 378 bp, Zea mays
  Clone ID: MRT4577_35536C.1
gggcctgttaaaccacaattggaacttttttcctggccattatacggccagaacaaaaaagtttaactcgtggcccccttaattggttccacgcaggaatcacaaaaatttcgacccaaaacagtaaagattggggggacacccaggggggtttcttatttaaaggggggaaagcccccgctggaattctaagggcgggagaattccagcccctaaattgccgtttttgttgggcttggtggcccccggttacaccgggtaagctgtcgggacccattggtgggaggaagggtttcccctgcaagaagcatgcccctccttggatatggggaccttcaaacagtttgaagggggcccccggacccgggggtaaccccg

SEQ ID NO: 114096 - DNA, 1170 bp, Zea mays
  Clone ID: MRT4577_35537C.1
atgtacttcgatgggtcgctgatgaaaacaggagaaggtgctggcctgctcttcatctcacccctcgagaaacatgtgcgctacgtgctgcgcctccattttccgacgtcaaacaacgtggccgagtacgaggctctggttaatgggttgcgcatcgccatcgagctaggggttcggcgcctcgacgctcggggcgactcgcagctcgtcattgaccaagtcatgaagaactccaactgccgcgataaaaaaatggaggcctattgcgacgaagttcggcgcttggaggataagttccacgggctggaactcaaccatgtcactcggcggtacaacgagactgcggatgagctggctaaaatagcctcggggcgaacgacggttcccccggacgtcttctccaaagacatatatcaaccatccgtgaaactcgatgacgcgctcgaacccgacgagacctcggcccagcccgaggcaccctcggccaccgaggcgcctcggaccctcgtcggaaacactttccgacaaggtttctactggccgaccgcagtggccgacaccactaggattgacctcgtcggtcccttgcagaaggcacccgggggcttcaagcacttgctggtcgccatcgacaaattctccaagtggatcgaggtccgacccttaaccagcatcaggtccgagcaggtggtggcattttttacaaatattatccatcgctttggggtcccgaactccatcatcaccgacaatggcacgcagttcactgggaagaagttcctggacttctgcgaagaccaccacatccgtgtggactgggccgccgtagctcacccaatgacaaatgggcaggtggagcgtgccaacggtatgattttgcagggactaaagccgaagatctacaacgacctcaataaattcggcaagcggtggataaaggaactaccctcggtggtttggagtctgaggatgacgccgagccgagccacgggtttctcgccgttctttctagtctatggggccgaggccatcctactcactgacttagaatacggttccccgaggacaaaggcttacgatgaccaaagcaaccagaccagccgagaagactcgttggaccaactggaagaggctcgggacgtggccttactacactcggcgcagtattag

SEQ ID NO: 114097 - DNA, 1212 bp, Zea mays
  Clone ID: MRT4577_35538C.1
ccgcccgtcctcgccgacgacgtctggaggctggagcggtgcggccgggaaggcgcgttccacaggaagctcaggcgcagcaacgtcggcaccgtgcaggagttcgtcaggatgctgatggtgaagcccgacgagttgcgcgcgattctgcacgagggcatgaccgaccgcatgtgggaggcgacgacgaaccacgccaggacctgcgccaccgacgacaaggtgtacgcgcacagcacgccccacggcaccatctacgtggactccgtcttcaacgtcgtgagggtcgacatcggcggcgcggagtggccgctgcaccagctgaacagaggccagacgatggtggtgcagcagatgctgcaggacgcgtacgagcaccgccacagcctccaggaggccgaacccttcatggtccatggccacgccgccagcgacgtcccactgctgcagaacgcggtgccggcgctggtggacacaccgccgctctggttcccgaacgccgcggagatggacttccccgtcgacgacgtggtccccgttccccaagccaacagcagcttcggctaccagtggactggccaagcgttccacatgccaggttaacccagtggtcccgatgaagataaacaagtgacccaagtgaagatcacttgcaaggttccagttccagcaataggatgtacattaacaaaatactgctacgcggttatatgtccacgatcagggtcggtcggtcggtctgtctatctgtctgtctgtccaagtagcagcagggtttaagggtaggtgaaacttgagcggcccttccctgcattcgccggacgcgccgagcgtccgcgggcagcgagaagcggcgaccaagtgcaagattcttttgtttgattcgtatcctttgtttttgttgtaacttctcaagtttttccgttctgcctggccaagtactagcgtcctgctcttctcccaagattgggttgcattgcatgtaaaaaaaaatgtaacgccggagcagcgacgctttgtgggctggcgaacaggtgtggtatgcctacaatacaaaggctagcaagcagaactggctgggtaaacacacagctctgctttcttcttcttcgacattttcgcaagttttttttgtgtgtgtgtcctgtaaacatcaaggtctcaataaagaaagggaaccgctttttttgtttaaaaaaaaaaaaaaaaaaa

SEQ ID NO: 114098 - DNA, 3237 bp, Zea mays
  Clone ID: MRT4577_35539C.1
atgggcagactccagcaacctctccaacccgggacggtgctccgtttcgggagtcttgagttcatgtccctcgacggcagcggcgacatgatactccttccaccgccgtgcgacagcgacaatggcggccgacagcccgcccgccggtggcggaatcgacgacgtcttccccgcgtggtggaagaacaacattcgagctcaccccgtcctctcccccgccgacggagggggaggcggggtaaccaaggccaagcaagaggcagcgcctcgtcggctgtcgagcgagtcgacggcgccagcgccccaacggggggcacgtcgggcatcgacctcgcgtttgagacgaggacgagcgccgtctccccgcaacgcgccgattccgagcaaacggacgacgccagcacgctcgcgaaaggcttgctggacgtcaccctcgtacctgagacgacggtgcggtcagtccccgacgtgacttcatcaccgcccgtcgaccaagtggtaccgaccgattcccatctcacgccccctagattcagcctcgacccgccaagcgacttcgctttggcgggcgctctcatagaggcgagtccaaaccctctggggtttcgtatgcggtcaccttgggaccggctgacggacatctcgacctacgggccctctgggtccgaggaagacgacgtgcccgacttctgttgggatttatctggacttggcaaccccagtgccatgcgggacttcatgaccgcatgcgactactgcctttccgactgttccgacggtagccgcagcctcagcgacgaggactgcggcccaagccgcgaatgtttccacgtcgatctagggggtccctccgaaggcaaccatctcggcatgccagaggacggtgatctccctaggacggtgcctcgcgttgacatcccacgggagctagctgtggtccccgttcaggcggggggccatgacccacagctcgagcaaatccgcggggtgcaggccaggctcgacgagggagcaggagcgcttgagccgatccgccgggacgtcgggcaggaatgggcgggccaaccttcggccggagaaatgcgtcatctaccccagggcttccagcaccgcatcgccgacgatgtcaggatgaggctgccacccgcttctagtggggtcggccagaacctggctgcagcagcaatgctcctccgtgcgatgccagagccatcaaccaccgaggggcggcgaatccagggagagctcaagaatctcctggaaggcgccgcggtccgacgggccgagagctccgcctcccgaaggcaggggtacccctcggaacatcatgccgcgacttcccgattcatgcgggaagcctcggtccacaccgggcgcacgcgcaacatagcgcctgcagccccgggtcgcctcagcaacgagcaccatcaccgcgaccgtcgggcccacctcgacgagagggtgcgccgaggctaccaccccaggcgtggggggcgctacgacagcggggaggatcggagtccctcgcccgaaccacccggtccgcaggctttcagccgggccgtacgacgggcgccattcctgacccggttccgacccccgactaccatcacaaagtactcgggggagacgagaccggagctgtggctcgcggactacccgctggcctgccaactgggtggaacggacgatgacaacctcatcatccgcaacctccccctgttcctctccgacaccgctcgcgcctggttggagcacctgcctccggggcagatctccaactgggacgacctgatccaagccttcgccggcaatttccagggcacgtacgtgcgccctgggaattcctgggacctccgaagctgccgacaacagccgggagagtctctccgggactacatccggcgattctcgaagcagcgcaccgagctgcccaacatcaccgacttggatgtcatcggtgcgttcctcgccggcaccacctgccacgacctggtgagcaagctgggttgcaagacccccacccgggcgagcgagctgatggacatcgccaccaagttcgcctctggccaggaggcggtcgaggctatcttccggaaggacaagcagccccagggccgcccaccggaagatgcccccgaggcgtcaactcagagcggcgccaagaagaagtcgcaagcgaaacgcgacgccgccgacgcggaccttgtcgccgctgccgagtacaagaaccctcggaaaccccccggaggtgccaacctcttcgacaagatgctcaaggagccgtgcccctatcaccaggggcccgtcaagcacacccttgaggagtgcgtcatgcttcggcgccacttccacagggccgggccacccgcggagggtggcatggcccgcgacgaagacaagaaggaagatcaccaggcaggagagttccccgaggtccgcgactgcttcatgatctacggtgggcaagcggcgaatgcctcggctcggcaccgcaagcaagagcgtcgggaggtatgttcggtgaaggtggcggcgccagtctacctagactggtccgataagcccatcaccttcgaccaagccgaccaccccgaccacgtgccgagcccgggaaaatacccgctcgttgtctaccccgtcatcggcgacgtcaggctcaccaaggtcctcatggacggaggcagcaacctcaacattatctacgccgagaccctcgggctcctgcgtgtcgatctgtcctcggtccgggcaggcgctgcgcctttccatgggatcatccccgggaagcgcgtccatcccctcggacaactcgaccttcccgtctgcttcggaacaccctccaacttccgaagggagatcctgacgttcgaggtggtcgggttccgaggaacctaccacgcgttactgggaaggccatgctacgcgaagttcatggccatccccaactacacctacctcaagctcaagatgccgggccccaacggggtcatcaccgtcggccccacgtacaaacacgcgttcgaatgcgacgtggagtgcgtggagtacgccgaggccctcgccgagtccgaggccctcatcgtcgacctggaaagcctctctaaggaggtgccagacgtgaagcgtcatgccggcaacttcgagccagcggagacggttaagtccgtccccctcgaccccagcagcgacgcctccaagcaagtccggatcggcgccgagctcgatcccaaatag

SEQ ID NO: 114099 - DNA, 315 bp, Zea mays
  Clone ID: MRT4577_3553C.1
atggggcgctcgctcgctcgcgtgacggccgcctgtcgccagctcgccgtgccatggatgctggacgctcccacgctcggcgtcgcgggcctcgcctctgtgccggctgcgcgcgctgtcatgccatggcatgggcgccaggctcctgccggccgatacacgaaccgggggtcgggcgttcagcacggccggcagcaaaagcccccgcgtcagttcctgcttttgtggcgccgtcgtgggggcagccgagcatggcagtgcagcactggcactgcagcccacccaggacaggtgagagttgggatcggtttgtag

SEQ ID NO: 114100 - DNA, 2664 bp, Zea mays
  Clone ID: MRT4577_35540C.1
atgccgttcggtttgaggaatgcgggtgcaacgtaccaacggtgcgtgaaccatgtgttttgcgaacacattggccgaacggtcgaggcctacgtcgatgacatcgtagtcaagacgaggaaagcctctgacctcctttccaaccttgaagtgacattccgatgtctcaaggcgaaaagcgtgaagctcaatcccgaaaagtgtgtcttcggggttccccgaggcatgctcttggggttcattgtctccgagcggggcatcgaggccaacccggagaagatcgtagccatcaccagcatggggcccatcaaggacttgaaaggcgtacagagagtcatgggatgccttgcggctctgagccgcttcatctcgcgcctcgacgaaagaggcttgcctctgtaccgcctcctaaagaaggccgagtgcttcacttggacccctgaggccgaggaagccctcgggaacctgaaggcgctcctcacgaacgtgcccatcttggtgccccccgttgctggagaagccctcttaatctacgtcgccacgaccactcaggtggttagcgccgcgatcatagttgagagacgagaagaggggcatgcattgcccgtccagaggccagcctacttcatcagcgaggtactgtccgagaccaagatccgctacccacaaatccagaagctgctatacgcggtgatcctgacgcggcgaaagttgcgacactacttcgagtctcatccggtcttggcggactttgtggctgaatgggtcgacactcggctcccaacagctccgatccaaccgaaactctggaccatgttcttcgacgagtcgctgatgaagacaggagcaggcgcatgcctgctcttcatctcgcccctcaggaagcacctacgctacgtgctacgcctccacttcccggcgtccaacaatgtggctgagtacgaggctctggtaaacggtttgcgcatcgccatcgagctgggggtccgacgcctcgtcgctcgcggtgactcgcagctcgtcatcgaccaagtcatgaagaactcccactgccgcgacccgaagatggaagcctactgcgatgaggttcggcgcctggaagacaaattctacggactcgagctcaaccacatcgcccgacgctacaatgagactgcggacgagctggctaaaatagcctcggggcgaataacggttcccccggacgtcttctccagagacctgcatcaaccctccgtcaagtccgacgacacacacgagcccgagaaggcctcggcccagcccgaggcaccctcggctcggcccgaggtaccctcggctcaacccgaggcaccctcggctcggcccgaggtacccttggcccccgagggtgaggcactgcgtgtcgaggaggagcgaagcggggtcacgcctaatcgaaactggcagaccccgcacctgcaatatctccaccgaggagagctacccctcgaccgagccgaagctcggcggttggcgcggcgcgccaagttgttcgtcttgctgggagatgggaaggagctctaccaccgcggcccctcgggcatcctccagcgatgcatttccatcgccgaaggtcaggagctcctacaagagatacagtcgggggcttgcggccatcacgcagcacctcgagcccttgttggaaacgccttccgacaaggtttctactggccgacggcggtggccgacgccactagaattgtccgcacctgcgaagggtgtcagttctacgcaaggcagacccacctgcctgctcagtccctgcagaccatacccatcacctggccatttgctgtgtggggtctggacctagtcggccccttgcagaaggcacccgggggctacacgcacctgttggtcgccatcgacaaattcttcaagtggatcgaggtccgacccctaaacagcatcaggtccgaacaggcggtggcattcttcaccaacatcatccaccgctttggggtcccgaactccatcatcatcgacaacggcacccaattcaccggcagaaagttcttggacttctgcgaggatcaccacatccgggtagactgggccgccgtggcccaccccatgacgaatgggcaagtagagcgtgccaacggcatgattctacaaggactcaagcctcgaatctacaacgacctcaacaaattcggcaagcggtggatgaaggaactcccctcggtggtctggagtctgaggacaacgtcgagccgggccatgggcttctcaccgttctttctagtctatggggtcgaggccatcttgcccacaaacttagaatacggttccccgaggacgagggcctacgccgaccaaagcaatcaagctaatcgagaggactcactggaccagctggaagaggctcgggacatggccttactacactcggcgcggtaccagcagtccctgcgacgctaccacgcccgaggggttcggtcccgagacctccaggtgggcgacctagtgcttcggctgcaacaagacgcccgagggcgacacaagctcacgcctccctgggaagggccgttcgtcatcgccaaagttctgaagcccagaacgtacaagctggccaatagtcaaggcgaggtctacagcaacgcttggaacatccaacagctacgttgcttctacccttaa

SEQ ID NO: 114101 - DNA, 320 bp, Zea mays
  Clone ID: MRT4577_35541C.1
atttttatttctattatacgcagggtctataatttcttgcggaaaaacaacgacatattttacaatgaaccgaccaggaccaaaccaggatcttcgcgccccacaccgacatattcatttacgaaacggggacacctccaaggactcaccggggtccaaagatcagatgatgcccgacaaccgcgaggcgctataaagcgtcatgctccaggaccgatccccgcaccggctaaactgctactactaaccaccctcaacaaaaaccggccgcggtcacactcctagcgcagacccctccaataaaaaaaagctccatcggt

SEQ ID NO: 114102 - DNA, 607 bp, Zea mays
  Clone ID: MRT4577_35542C.1
ctcgagtttttttttcttttttttttttttttttttttttttttttttttttttttggtttttttttttttttttttttttttaaaaaaggccaaaagctttgtttttatttgatttttgattttgccccccaaagcttttcaaattacttggaaaaaaaaaaaacaggggggccctaccggttacaacaacaataccagtttccaggttttttgggcttttatccaaaaaaaacagggctaaattaattactggtgaaccctccaaaacttgacatggaaaccaccctcctcgttggggttttaaacgcccaggtccttgctgggggggggcccgtccttgtttcctcccccggtggagttaaccaccacccttaccccgtccgcaaggggggggcaaagcttttcaagggaggccagcccgggggaggtctccagggcagggatgatgccctccaaccgaaacacccccttgaaagcatccagggcctcctgggcagtcacactattgtattcggcacgtccaatggccttaaaaaaactgggctggggtccaaccccaggggaatcccccccaacactgaggggggggggttcgaaaacttggc

SEQ ID NO: 114103 - DNA, 489 bp, Zea mays
  Clone ID: MRT4577_35543C.1
aaatcagcagtctgaatcttgctacctaaatctactacctgctagttggtcttgagataatgtcatcgagcaaccacaatcatgacgataatgtcaatgaatcgtagactcgtagtcacagcagggttttttatcatctgttattgactctgaagcagtaggaggaaatgcggaagtggaagagattgaagtttctgatgatgaagaccagaaagatggtgttggttcaaagagaaagttgacttcagctgtttggaaaggattcaagagggttaaagtagaggataaaattaaagcaaagtgcaactggtgcgcaaagaaacttggagagacaaaaaatggaaccaaacatctacacgatcatctcaagacatgtccataccgtaagagcaaaatgaccggacaaagcaagacatttagtcaaagctcattgaggtttggttgtcatgatacagggaaagtgtcagtggagtactatacttttgatca

SEQ ID NO: 114104 - DNA, 466 bp, Zea mays
  Clone ID: MRT4577_35544C.1
ggccgggctattgttccatcgcacagataggcgtcttcgtactctgcctacctccgcggctcaaacctttcccccttctcccaattccgttccgcacggccggcgcctccacccgtgacgacgcacaccatagagaggagtgcattttcgatccacatcgcgccagggcggtatccacggccggaaacgggtcgctgggagctgtactgccttgagcatggcattcaggctgacgggcacatgaccggagacaagaccactgggggaggtgatgatgctttcaacaccttcttcagcgagactggcgctgggaagcccgcgccccgcgctgtttttgttgaccttgaacccactgtcatcgatgatgtgagaactggcacctacccgccgctctctccacccctgagcagctcatacgtggcaagcacgatgcagccaacaaccttcgccccgacgtccctacccc

SEQ ID NO: 114105 - DNA, 2175 bp, Zea mays
  Clone ID: MRT4577_35545C.1
atgtcgtttggtttgaggaatgcgggtgcgacataccaaaggtgcatgaaccacgtgttcggcgaacacattggtcgaacggtcgaggcttacgtcgatgacatcgtagtcaagacgaggaaagcctccgacctcctttccgaccttgaagcgacattccggtgtctcaaggcgaaaggcgtaaaactcaatcttgagaagtgcgtcttcggagtcccccgaggcatgctcttggggttcatcgtctccgagcggggcatcgaggccaacccggagaaaatcgcggccatcaccaacatggggcccatcaaggacttgaaaggcatacaaagggtcacgggatgccttgcggctctgagccatttcatctcgcgcctcggcgatagaggcctgcctctgtaccgcctcttaagaaaggccgagtgcttcacttggacccctgaggccgaggaagccctcggcaacctgaaggcgctcctcacgaacgcgcccatcttggtgccccccgctgccagagaagccctcttgatctacgtcgccactaccactcaggtggtcagcgtcgcgatcgtggttgagagacgagaagaggggcatgtgttgcccgtccagaggccagtctacttcatcagtgaggtactgtccgagaccaagatccactacccacaaattcagaagctgctgtacacggtgatcctgacgcgacggaagttgcgacactacttcgagtctcatccggtgactgtggtgtcatccttccccctgggggagatcatccagtgccgagaggcctcgggtaggattgcaaagtgggcagtggaaatcatgggcgagacaatctcgttcgcccctcggaaggccatcaagtcccaagtcttggcggactttgtggctgaatgggtcgacacccagctcccaacagctccaatccaaccggaactctggaccatgtttttcgacgggtcgctgatgaagacaagggcaggcgcgggcctgctcttcatcttgcccctcgggaagcacctacgctacgtgctatgcctccacttcccggcgtccaacaatgtggccgagtacgaggctctggttaacgggttgcgcatcgccatcgagctagggcgcgacccgaagatggaagcctactgcgatgaggttcggcgcctggaggacaagttctacgggctcgagctcaaccacatcgcccgacgatacaacgagactacggacgagctggctaagatagcctcggggcggacaacagttcccccggacgtcttctcccgagacctgcatcaaccctccgtcaagaccgacgacgcgcccgagcccgagaaggcctcggcccagcccgaggcaccctcggcccctgagggtgaggcactgcgcgtcgaggaggagcggagcggggtcacgcctaatcgaaactggcagaccccgtacctgcaatatctccaccgaggagagctacccctcgaccgagccaaagctcggcggttggcgcggcgcgccaagtcgttcgtcttgctgggggacgggaaggagctctaccaccgcagcccctcaggcatcctccagcgatcgccccgagcccttgttggaaacgccttccgacaaggtttctactggccgaccgcggtggccgacgccactagaattgtccgcacctgccaggggtgtcaattctacgcaaggcagacccacctgcccgctcaggctctgcagaccatacccatcacctggtcgtttgctgtgtggggtctggacctcgtcggccccttgcaaaaggcacccgggggctacacgcacctgctggtcgccatcgacaaattctccaagtggatcgaggtccgacccctaaacagcatcagatccgaacaggcggtggcgttcttcaccaacatcatccatcgctttggggtcccaaactccatcatcaccgacaacggcacccagttcaccggcagaaagttcctggacttctgcgaggatcaccacatccgggtggactgggccaccgtggctcaccccatgacgaatgggcaagtagagcatgctaatggcatgatcctgcagggactcaagccgcggatctacaacggcctcaacaagttcggcaagcgatggatgaaggagctcccctcagtggtctggagcctgaggacaacgccgagctga

SEQ ID NO: 114106 - DNA, 622 bp, Zea mays
  Clone ID: MRT4577_35546C.1
ccggccgggctcctatttaaccagccgggccctcgcgatctcctctctcctctctcccctctcatctcatcttcttgcgccactgcaggcacataagcataagggacgccgctgcagggaccatgggggtgggcgaaggtccgccatcgtgggcctgctcgtccaccgacattgggacaccggtgatcattcgtgggtgcttggccgggcgtgtggtgcatgccagaagaattgtggtgtgcgcgggttcgtagtacccttggagttcgtcgccggtaatcgggcgtattccaccatccacaccttcccgcggctggctatatccccgccgtttctgtctgaaagtgaggtcacgaggatctgaagaatcatcctgatacctagaatctcaagtgccaggtcaagaataggtaccgcaggatgaggcgtatggaggatgctgtgatgagttcgtgagaggtctaggccgtcgtctcccagtaaactttgggttgttggatcgttgtctccttatgctgtaattatttatttattttgtacagaactcctattatatagtaaatatgtgacatttgtttgaaaaaaaaaaaaaaaaatttgggggcctccaagtccaggtttt

SEQ ID NO: 114107 - DNA, 2493 bp, Zea mays
  Clone ID: MRT4577_35547C.1
atgccgttcggcttgaggaatgcgggcgcgacgtaccagcggtgcatgaaccatgtgttcggcgaacacattggccgcacggtcgaggcctacgtcgatggcatcgtagtcaagacgaggaaagcctcccacctcctttccgaccttgaagtgacattccgatgtctcaaggcgaaaggcgtcaagctcaatcccgagaagtgtgtctttggggtgccccgaggcatgctcttggggttcatcgtctccgagcggggcatcgaagccaacccggagaagatcgcagccatcaccagcatggggcccatcaaggacttgaaaggcatacagagggtcatgggatgtctacctctgtaccgcctcttaaggaaggccgagtgcttcgcttggacccctgaggccgaggaagccctcgggaacctgaaggcgctcctcacgaaggcgcctatcttggtgcccccagctgccggagaagccctcttggtctacgtcgccgcgaccactcaggtggttagcgccgcgattgtggtcgagaggcaagaagaggggcatgcattgcccgttcagaggcctgtctacttcgtcagtgaggtactgtctgaaaccaagatccgctacccacaagttcagaagctgctgtatgcggtgatcctaacacggcggaagttgcgacactacttcaagtctcatccggtaactgtggtgtcatccttccccctgggggagatcatccagtgccgggaggcctcgggtaggatcgcaaagtgggcggtggaaatcatgggcgagacaatctcgttcgcccctcggaaggccatcaagtcccaggtcctggcggacttcgtggccgaatgggtcgaaacccagctcccaacagctccgatccaaccggagctctggaccatgttcttcgacgggtcgctgatgaagacaggagccggcgcaggcctactcttcgtctcgcccctcgggaagcacctacgctacgctctggacaacggattgcggatcaccatcgagctaggggtccgactcctcgacgctcgcggtgactcgcagctcgtcatcgaccaagtcatgaagaactcccactgccgcgacccaaagatggaggcctactgcgatgaggttcggcgcctggaagacaagttctacgggctcgagctcaaccacatcgctcggcgctacaacgagactgcggacgagctggctaaaatagcctcggggcgaacaacggttcccccggacgtattctcccgagatctgcatcagccctccgtcaagatcgacgacacgcccgagcccgaggtgcccttggcacagcccgaggcgccctcggctcggcccgaggcaccctcggtccagcccgagataccctcagcacagtccgaggcaccctcggctcggcccgaggcaccctcggttcggcccgaggtaccctcggcccccgagggcgagacgctgcacgtcggggggagcgaagtggggtcacgcctgatcaaaactggcagacctcgtacctgcaatatctccaccgaggagagctaccctccgaccgagccgaagctcggcgggtggcgcggcgcgccaagtcgttcgtcttgctgggagatgagaaggagctctaccaccgcagcccctcaggcatcctccagcgatgcatctccattgccgaagaaggcacccgggggctacacgcacctgttggtcgccatcgacaaattctccaagtggatcgaggtccgacccctaaacaacatcaggtccgagcaggcggtggcgttcttcaccaacatcatccatcgcttcggggtcccgaactccatcatcaccgacaacggcacccagttcaccggcagaaagttcctggacttttgcgaggatcaccacatccgggtggactgggccaccgtggctcaccccatgtcaaatgggcaagtagagcgtgccaacggcatgattctgcaaggactcaagcctcggatctacaacgacctcaacaagttcggcaagcgatggatgaaggaactcccctcggtggtctggagcctgaggacaacgccgagccgagccacgggcttcacgccgttctttctggtctatggggccgagaccatcttgcccacagacttagaatacggttccccgaggacgagggcctacaccgaccaaagcaaccaagctagtcgagaggactcattggaccagctggaggaggctcgagacaaggccttactacactcggcgcggtaccagcaatccctgcgacgctaccacgcccgaggggtccggtcccgagacctccaggtgggcgacctggtgcttcggctgcgacaagacgcccgagggcggcacaagctcacgcccccctgggaggggccgttcgtcatcgccaaagttctgaagcccggaacgtacaagctggccaacaaccaaggcgaggtctacggcaacgcttggaacatccaacagctacgtcgcttctacccttaa

SEQ ID NO: 114108 - DNA, 816 bp, Zea mays
  unsure (1)..(816): unsure at all n locations
  Clone ID: MRT4577_35548C.1
cattgggtacctcgaggccggcgggaggccgtctccttcccaacggcgcctccaactccgagcgccgcctctgcctcgaaaactcttactcgcggcgctgcagccaggggggcgaccggtgtgtgaaccgctgccgctatggctgctgcttccgttccgccaacatcttcctccggcggctgggacttcacctgtaaccttgaagtcgattatgggtctgaagaaaatgcatccatagtctacagaacgttagcagttgacaaggagttgcagcctgacaaggtgaagagggagatgactctatcaggcagcaagctggccgtccacttcgcagccgtggaggcccgcttcctgcgagcatcgttcagctcatttgtggatcttatgggactcgtgacgaagctcgtcgaagaatatggtgtggccacggcagggcattcttgaatcttgatgaacaatctcatacacggcattgcggagttgattttagttcgcctgtgagcaatttggagttttggacagtctttaccagtggaactgctcttgatctgtgtcaagctaatgtagtatttgcccttgattggtcaaatcctattcggaacagttaattcttttcggcaatgccgttgcgaaatgtatagatgaggaataagtaaaaattatctatagatcctcaggctttctccaaaaaaaaaaaaaaaaaaaggccctannnnnnnnnnactcgccgtcgtcttctgcggttctgccgtctacgcctccaatttggcctctctcccttgcaagccatgggtaaggagaagtcccacatcaaca

SEQ ID NO: 114109 - DNA, 1080 bp, Zea mays
  Clone ID: MRT4577_35549C.1
atgtacttcgatgggtcgctgatgaagacaggagcaggtgctggcttgctcttcatatcacccctcgggaaacatgtgcgctacgtactgcgcctccattttctggcgtcaaacaacgtggccgagtacgaggccttggttaatggactatgcatcgccgtcgagctaggggttcgatgcctcgatgctcgtggcgactcggagctcatcattaaccaggtcatgaagaactcccactgccgcgatcaaaaaatggaggcctattgcgacgaagttcgacgcttggaagataagttctatgggctggaactcaaccatgttgctcgacggtacgacgagactgcagatgagctggcgaaaatagcctcggggcggacgacggttcccccgtacgtcttctccagggacatatatcagccatccgtgaaactcgacaactcgcccgagcccgacgagacctcggcccagcccaagaaggcgcccgggggcttcaagcacctgctggtcgccatcgacaaattctccaagtgcatcgaggtgcgacccttaaccagcatcgggtccgagcaggcggtggcgttcttcacaaatatcatccatcactttggggtcccaaactccatcatcaccgacaatggcacgcagttcactgggaagaagttcctggacttctgcgaagaccaccacatccgtgtggactgggccgccgtagctcacccaatgacaaatgggctggtggagcgcgccaacggtatgattttgcagggactaaaaccgaggatctacaacgacctcaacaagtttggcaagcggtggataaaagaactaccctcgatggtttggagtctgaggacgacgccgagccgggccatgggcttctcgccgtttttcctagtctatggggccgaggccatcttacccacggacttggaatacggttccccgaggacaaaggcttatgacgaccaaagcaaccagaccagccgagaggattcattggaccagctggaagaagctcgggacgtagccttactacacttggcgcgatatcagcagtctctgcgacgctaccacgcctga

SEQ ID NO: 114110 - DNA, 245 bp, Zea mays
  Clone ID: MRT4577_3554C.1
gcgacgcatacggcgacgcatgcgagcacgcgtgactattagtacagatattgtcacagctgagattcagtacctacaactgatgactaacagcagatagcagcactcacagacatatgagatctcgattatagctactggatcctgggccattgaggtcaccgattgaagctcacacggacctgattctatcagaatgctatatctaacggagattgatgatgctgacaagctgactggagtta

SEQ ID NO: 114111 - DNA, 2358 bp, Zea mays
  Clone ID: MRT4577_35550C.1
atgccatttggcttgaggaatgcaggtgcaacataccaaaggtgcatgaaccatgtgttcggagagcacatcggccgaacggtcgaggcttacgttgatgacatcgttgtcaagacgaggaaagcctctgaccttctctctgaccttgaaacgacattcaagtgtctgagagtgaagggcgtgaaactcaatcccgagaagtgtgtcttcggagtcccccaaggcatgctcctggggttcatcgtctccgagcggggcatcgaggccaacccggagaaaatcgcggccatcaccaacatggggcctatcaaagatttgaaaggagtacaaagggtcatgggatgccttgcggctctgagtcgcttcatctcgcgcctcggcgaaaaaggcctacccttgtaccgcctcttaaggaagaccgagcgcttcacttggacccccgaggccgaggaagccctcggaaacttaaaggcgctccttacaaacacacccatcttggtgccccccgctgcgggagaagccctcttgatctacgtagccgcattcactcaggtgttgcgacactacttcgagtctcatccggtgactgtggtgtcatccttccccctgggggagatcatccagtgccgagaggcctcgggtaggatagcaaagtgggcggtggagatcatgggcgagacaatctcgttcgctcctcggaaggccatcaagtcccaagtcttggcgaacttcgtggctgaatgggtcgacacccaattgccaacgactccgatccaaccggaactctggaccatgtacttcgatgggtcgctgatgaaaacaggagctggcacgggcctgctcttcatctcacccctcgggaaacatctctgctacgtgctgcgcctccatttccctgcgtcaaacaacgtggctgagtacgaggctctgcttgtcattgaccaagtcatgaagaactcccactgccgcgaccgaaagatggaggcctactgcgacgaagttcggcgcctggaagacaagttctacgggctcgagctcaaccacattgctcgatggtacaacgagactgcggatgagctggctaaaatagcctttggacagacaacggttcccccggacgtcttctcccgagacatacatcaaccctccgtcaagaccgatgacacgctcgagcccgaggaggcctcggcccagcctgaggtatcctcggccgccgagggtgaggcactgcgcgtcgagggagagcggaatggggtcacgcctaatcgaaactggcaggccccgtacctggaatatctcctccgaggagagctacccctcgacaaggccgaggctcggcgactggcgcggcgtgccaagtcattcgtcttactgggtgatgaaaaggagctctaccaccgcagcccctcaggcattctccaacgatgcatatctgtcgccgaaggaccgcagctattgcaagaaatacaatcgggggcttgcggtcaccatgcagcacctcgcgccctcgttgggaacgccttccaacaaggcttctactggccgaccgcggtggtcgacgccactatgattgtacgctcctgccatgggtgtcaattctatgcgagacagacgcacctacccgctcaggccctgcagacaatacccatcacctggtcatttgctgtgtggggtctggacctcgttggtcccctgcagaaggcacccaggggcttctcgcacctgctggtcgccatcgacaaattctccaagtggttcgaggtccgacctctagtcagcatcaggtccgagcaggcggtggcgttcttcaccaacatcatccatcgctttggggtcccgaactccatcatcaccgacaatggcacccagttcactgggaagaagttcctggacttctgcgaggaccaccacatccgtgtggactgggccgccgtagctcaccccatgatgaatgggcaggtggagcgtgccaacggtatgattctgcagggacttaaaccgaggatctacaacgacatcaacaagttcggcaagcgatggatgaaagagctaccttcggtggtctggagtatgaggacgacgccaagccgagccacgggtttctcgccgttctttctagtctatggggctgaggctatcttgcccacagacttaaaatacggttccccgaggacaaaggtgtacggcgaccgaagcaaccagaccagtcgagaagactcactggaccagctcgaagagactcgggacatggccttactacacttggcgcggtatcagcagtctctgcgacgctatcacgcccgaggggtttggctctgtggcttccagttgggagacttggtacttcggctgcggtag

SEQ ID NO: 114112 - DNA, 1878 bp, Zea mays
  Clone ID: MRT4577_35551C.1
atgggcgagacaatctcgttcgcccctcggaaggccatcaagtcccaagtcttggcggactttgtggctgaatgggtcgatacccagctcccgacagctccgatccaaccggaactctggaccatgtttttcgacgggtcgctgatgaagacaggggcaggcgggggcctactcttcatctcgccccttgggaagcacctacgctacgtgctacgcctccacttcccggcgtccaacaatgtggccgagtacaaggctctggtcaacaggttgcgcattgccatcgagctaggggttcgacgcctcgacgctcgcggtgactcgcagctcgtcattgaccaagtcatgaagaactcccactgccgtgacccgaagatggaagcctactgcgatgaggttcggcgcctggaggacaagttctacgggctcgagctcaaccacatcgcccaacgatacaacgagactgcggacgagctggctaagatagcctcggggcggacaacggttcccccggacgtcttctcccgagacctgcatcagccctccgtcaggaccgacgacgcgcccgagcccgagaaggcctcggcccagtccgaggcaccctcggcccccgagggtgaggcactgcacgtcgaggaggagcggagcggggtcacgcctaatcgaaactggcagaccccgtacctgcaatatctccaccgaggagagctacccctcgaccgagctgaagctcggcggttggcgcggcgtgccaagtcgttcgtcttgctgggggacgggaaggagctctaccaccgcagcccctcaggcatcctccagcgatgcatatccatcaccgaaggccaggagctcttacaagaaatacactcgggggcttgcggtcatcacgcagcgccccgagcccttgttggaaacgccttccgacaaggtttctactggccgaccgcggtggccgacgccactaggattgtccgcacctgccaggggtgtcaattctacgcaaggcagacccacctgcccgctcaggctctgcagaccatacccatcacctggtcgtttgctaaggcacccgggggctacacacacctgctggtcgccatcgacaaattctccaagtggatcgaggtccgacccctaaacagcatcggatccgaacagacggtggcgttcttcaccaacatcatccatcgctttggggtcccaaactccatcatcaccgacaacggcacccagttcaccggcagaaagttcctagacttctgcgaggatcaccacatctgggtggactgggccgtcgtggctcaccccatgacgaatgggcaagtagagcgtgccaacggcatgatcctgcaaggactcaagccgcggatctacaacgacctcaacaagttcggcaagcgatggatgagggagctcccctcggtggtctggagcctgaggacaacgccaagccgagccacgggcttcacaccgttctttctagtctatggggccgaggccatcttgcccacagacttagaatacggttccccgaggacgagggcctacgacgaccaaagcaatcgagctaaccgagaagacgcactggaccagctggaagaggctcgggacatggccttactacactcgacgcggtatcagcagtccctgcgacgctaccacgcccgaggggttcggtcccgagacctccaggtgggcgacttggtgcttcggctgcgacaagacgcccgagggcggcacaagctcacacctccctgggaagggccgttcgtcatcgccaaagttctgaagcccggaacgtacaagctggccaacagtcaaggcgaggtctacagcaacgcctggaacatccgacagctacgtcgcttctacccttaa

SEQ ID NO: 114113 - DNA, 1236 bp, Zea mays
  Clone ID: MRT4577_35552C.1
atgtacttcgatgggtcgctgatgaaaacaggagcaggtgcgggcctgctcttcatctcacccctcggaaagcatcttcgctatgtgattcgcctccatttcccggcgtcaaacaacgaggtcgagtatgaggctttggttaacgggctgcgcatcgccgtcgagctaggggttcggtgcctcgacgctcgtggcgactcgcagcttgtcatcgaccaagtcatgaagaactcccactgccgtgaccggaagatggaggcctactgcgacgcagttccgcgcctggaagacaagttctacgggctggagctcaaccatatcgctcgacggtacaacgagactgcggatgagctggcgaaaatagcctcggggcggacgacggttcccccgaacgtcttctccagggacatacatcaaccctccgtcaagatcgacgacacgcctgagcccgaggagacctcggtccagcccgagtggatcaaggtccgacccctaaccagcatcaggtccaagcaggcggtggcgttcttcacaaacatcatccatcgctttggggtcccgaactccatcatcaccgacaatggcacgcagttcactaggaagaagttcctggacttctgcgaggaccaccacatccgtgtggactgggccgccgtagctcacccaatgacgaatgggcaggtggagcgtgccaacggtatgattttgcatggactaaaattaaggatctacaacgacctcaacaagtttggcaagcggtggatgaaagagctaccctcggtggtctggagtctgaggacgacgccgagccggtccacgggtttctcgccgttctttctagtctatggggccgaggccgtcctacccacggacttagaacacggttccccgaggacaaaggcgtacgacgaccaaagcaaccagaccagccgagaagactcactggaccagctcgaagaagctcgggacgtggccttactacactcggcacggtatcagcagtctctacgacgctaccatgcccgaagggttcggccccgaggcttccaggtgggagacttggtacttcggctgcgacaaggcgcccgagggtgccacaaacttactcctccctgggaagggccgttcatcatcgccaatattttgaagcccgggacatacaagctggccgacgatcaaggcgaggtctacagcaacgcttggaacatccaacaactacgtcgcttctacccttaa

SEQ ID NO: 114114 - DNA, 264 bp, Zea mays
  Clone ID: MRT4577_35553C.1
agcaggaaataacagcaggaaattctatgtgcttgaatccacataaagtaggaattaacagctgtccaaaactgaactgtcagagtgactgtgactgaattttattcagttagctgaaatagcagttcagtgtgggggtaactttggggtacaatagaatttgctctgaatgttttcaatcatgggttgttataccaagttggtaaagctaaagtcggagtataactttggctaagaagttttggtctgtaccattgaaattgt

SEQ ID NO: 114115 - DNA, 485 bp, Zea mays
  Clone ID: MRT4577_35554C.1
cacccgtcacgaagaaaaggaggtagcagcagcgactgcgacgagcttcacaacgcttcgagctcggcgtgagcgattatcccgtcttctacacgtaatctgagatctaaaccgagattttcttcatcttcatctctcagagcttctctttcgaatggctttctttcgccgtataccggaggaagcatctctagtgacttatgcggcgctaagcttcgtgcggaatcgcttaatccgttaaatttttccagttccaagcctaaacgcggagttgtcactatggttatacctttctcaaagggaagtgcacacgaacaacctcctcctgatttggcatcatatttgttcaagaaccgaattgtatatttgggaatgtctctcgtaccttcagttactgagttgatacttgcggagtttctttaccttcagtatgaagacgaggaaaagcctatttacctttacataaactcgactgggacaaccaa

SEQ ID NO: 114116 - DNA, 300 bp, Zea mays
  Clone ID: MRT4577_35555C.1
atggtcgacctttccgagacatgtgccactgttggcgaagtggtcgccaacgggcttcgtggtggagcaggtagccgaggccgatctcgggtggggtggagacgtcacccgaggacaagcccagtgtcgggcgaggcggagattgcgcccgagggtgtgcgcattaaatgcgagtgtcccctgctggcattcgggcgtgccttgtccgctttggctgagaccggctcgggcgagacagatagggcgattatagaacgaggtgacttcgggcaaagcagaattgggagttgtaagatgtga

SEQ ID NO: 114117 - DNA, 489 bp, Zea mays
  Clone ID: MRT4577_35556C.1
ggtaccggcgccctctccctcgagttttttttttttttttttttttttttttttttttttttttttttttttttttttttttttttttttttttttttttttttttaacccagaaaaggggggggactttccccccttaaatatcggggggaaaaaaaaccgggggctttcgttttaaaaggctggcgtttatccccgccacacaaaaaattttagccgtttgtccggaacaatataaggatttgttgggaagaccaccaggggggggggaggacccccaaaaaggggtggtttaataccaaaagaaaacttttgggtggaaactacattaacgggccggaaacaaaatgcttaaaaaaggaaagcctttaaattcggggtttttaaaaaaagggagggcgggccatccgggcccttgaactcactccctgaatacttggaggacaacacttggggtgcccccccacactggaagggggtgttttttgc

SEQ ID NO: 114118 - DNA, 336 bp, Zea mays
  Clone ID: MRT4577_35557C.1
cacaaaacccctctttttttttccccaaaagggttgccttttggtcccccaaaaaacccaattttttttcttctcccaaaaattgcccaaattcttttggagcctttcaagagttaattccggtcaaaaacccattttccaattcgggttaccctggggttttttcgagctccaaaccccaaccccccttccttttgggttccccgccctatttttacccccatttttcattccttggaaacccatcccaggggttgaaaaaaaaatttcattatccccacggccccttaaactagggttgtttttctttaaaatattaaccctttttttttttac

SEQ ID NO: 114119 - DNA, 399 bp, Zea mays
  Clone ID: MRT4577_35558C.1
catttctacacgccatgaatacatgcttatacctccatatcgcagatatgctggcgctggtcaccagctgcgctgctggcgcgagccccagcactggttcgttggaccgatgggtcgtctttcagctctattagctcccgacgacgtgcttgcacaacggtcttctgttggatgccgagctgcgatacctctatcgcgctggccaaggacacgctagataagtctatggcagcggacaacaagtcctctaagagtgtccagagtgaggcgcgcaccagttcctgcatgttcctcgagaagaagcacgatgaagtaccaacgacgatataggagaggatatctgcttggacattacattcaccagactaatggcgatagccattcagagattacactacc

SEQ ID NO: 114120 - DNA, 617 bp, Zea mays
  Clone ID: MRT4577_35559C.1
gctgacaaccaacgcggtcctttggattcttgatgaggctgtaatccgtaagttccagcgatcaatcatggcttgtccgccatctttgggaagtcgggacactcataatgcggctacttctgttaacggacaaagttgctgaagggctggactttacgcatctagcgaccatgacagatggatatagtgtaagcgatctcaacaacctgtgcgcgacggcagcatattgccctgtgtgggagctaattcatatagaaagaaagaatgagcttgagaatctgaagcgtgagaaaggacaaactacaccctatccttctatgaaggaaaatgaggacaccatcattataaggcctgtgaacatgacagatctgaatgaagctaagaaccatgtggttgcaaaactcgctgctgaatgcaccataatgagcgagctgaggcaatggaactagttgtacggtgaatgcggatgcagaaagagcatcatttgacatactttctgtgagcaatatgaacattacgcgcaatactgtatggacatgatttgcgaagtatagtaaagcacaaagcattcatgaggaaatagaccgaacatgttatcttgtataagaagacatgac

SEQ ID NO: 114121 - DNA, 260 bp, Zea mays
  Clone ID: MRT4577_3555C.1
attcggctcgaggtcgattccctggcagttttgtttttcgagcgctacaacgggactgcggttgcaagcgactgccattgccgcactgctggtgtctgcatgcgggtgatgttgacggaggccctgacggggtttcacaccccgcctttctatgggttggttggcacctccgctaatctgatcttctaatgcatgctggcggttttcggaacagtgaacactggcaaatgcattgcgtctattcgggtcgtgcacgcaca

SEQ ID NO: 114122 - DNA, 447 bp, Zea mays
  Clone ID: MRT4577_35560C.1
gccacgcttcctcccactctttcggcctcccaggattctgacacggagggaggtgaacggtctgcgccagacagatggtgccgcactatttgcccaagatgtttagcatcaaggagcagagcgctgcctacctccattgtttaggcctcgtcgagcaagacggctatggccgtctgacgggtaacgatgcgctcaagttcttcggcatgtccaacctatgtactcccgagctgaagcatgtttgttcgatcggtggacccagacaccgaagctatcttggattctacgagttcatgactgccatacaactggtttctctcgcccaagctgggagctaaatcagtcaggacacccttgcatatgcagatgctcgatagttgcagctccccacgatggacggtgtcggtaaaaaactcataaagatctttggcagcatggtcgatcctg

SEQ ID NO: 114123 - DNA, 554 bp, Zea mays
  unsure (1)..(554): unsure at all n locations
  Clone ID: MRT4577_35561C.1
ttgttcgttttgctctcaatccatgtggattgggggggattagatgagtttcaatcctaaacaagttaaaatctttcataattttttccaatctcatccaatctacataggataggaataaccgaacaagccctcaaggagaacaataatgcctatatacggtaactttgtggaagtgggacacgaggggttgccaccaccaaaaggtcggaacgccgtggcgtagcaatcccaaatgcctcggtcatgtccagctcctccgccgttagccctcccggcaaactccagtcgaagtggaacagcaacgcggcgagcgcgatctcgatatgagccagcccgaacgtcatgccggggcagatccgccgcccggcaccgaacggtatgaactcgaagtctgcccccttgaagtccctggtactctgctcgaacctttccggcaagaacttgncgggctcgtcccagggggccgggtccctgccgatcgcccacgcgttcacgatcaccgtgatgcccgccggcacgtcgtacccgagcacctggcacgcgctctggca

SEQ ID NO: 114124 - DNA, 230 bp, Zea mays
  Clone ID: MRT4577_35562C.1
gtgcctggctcgcaggcaactgacggtcgcgaacacgggggaccgcccttcgattctgagccgaaacgctgaggccatctagaagatctaggacgaccacacgaaccacctggtgtagctcacgaggctggccaattcggtcggcctcattctggacggttaccctaacggagtgttgtagttctcccgtcctccgtacgactgggacacgtaggctaactgctcgtacg

SEQ ID NO: 114125 - DNA, 441 bp, Zea mays
  Clone ID: MRT4577_35563C.1
atgggtaaaagtaagaagggtagcggttcttctcctcgctctggcgataaacgcaaacgtgagccgactcctccttcggaggacttcggcgactcagagtactcggaggaggagttctcctccgagtccgagggatccccggctcccgtctctcccccggcgtcgtctgatgatttagacgactcccaagggattgccgcggaggtctggacctacatccgggccgtcgagcgctccgggctcgaaggctcggatgagtcggagtactcctcggatgaggaggactcctcggactcgtccaaggaggacagcggcagcgacgatggtgatggcggcgacgacgggggcgacggtgacggcggcggcggcaagggcagcgacggcggcagtaagggcgaccatggcagcggcagcaagggcagcaacaagaccaatggctag

SEQ ID NO: 114126 - DNA, 1583 bp, Zea mays
  Clone ID: MRT4577_35564C.1
ggccggccgggattttcgttttatagtatactacagtatagagcccattagacacagtcccgcaaatgttgcgagcggcggcgtcgagttgcgcccgcggcgccgtccggcggctgtcgtcgtctgcggtgatggaggcttcaccagtcgccgtggggtcgcggtggcagtctctcctcgacgagggtgactggtcgtaccatcgggagtggtggggcaaggaggacggccccggcgagggcgtgcagaccgtcttccgccgccactccgagtgcggcaacggcgtcgtctccgtctccgcctaccctgcttcccttccggctagtgagcattggccagccatggagagatggcttcaagagagtaattcaagactatacccagaatcagccagctctgaccagtttaaggtactaggctaccagtggcgagtgatgcgttttaatgaccatacacggcaaagcactgcaaaagtgatgacatgttataggacttcgggtcagagatcattattcttgatgcagcaaccacatgttttagctgttccttatgtcaagagtatggtatcagcaggattgacagcgctctcatgttcttcgtatgatctaccacaagcagcatctggacagaacactatgaaaattctgtgcatcggccatggtggcggcagcttaccattgtttttggctagcaagttcagaggtgctaccatccacattgtggaaatcgatccggtggttgtttcggcatcagttgaatccatgggtttccccacgtcacccgttaataaaggcttatcccccgagtccatgctaccttccgacgccgatgacctattatggggaggcatacacgaccgcatcttcctgcacacagcagacgccgaggattttattggcagcgacggcaacgagtatgacatcgtcttcatcgacgcttacgacggagacgacgtgtttcctcgcaagctctgggacgtggacggggcgttcatgaagaacctagagaagagagtgcaccccgtccacggcaccgtggtcgtgaacctgcactccgactcagactccggggcagcggaaggcaacgccgacttccagagcgcgcttcccatgggcaggcacgtctcccaggtctgcagggcttacatgcagcacttcggggtggccttcacggccgcggtcccgtggctctgcaacatcacgctcgtcgcctgccgcgccggcgggatggcgggcggcgcgcgccgggggctgagccgcagggatctcgtccttggcaagcttctgtccaagtccgacacggtggagcgcgcgctgggcctgccgttcccgtgtctgccctacatcaagaacggcttcacgatggttcactgacttgcatgggttttctgtggaatttggttattttgaacggtatattttggactttggaaaccgccttgttttgtgctctaaaatgaatttggggtgatgatgcaaaaaaaaaaaaaaaaagggcggccgccaccgggttggagcggctgctgcggtgctgccgccgtttcgggtcctggttccgatgtcgtcgcggttcacaaaagactc

SEQ ID NO: 114127 - DNA, 128 bp, Zea mays
  Clone ID: MRT4577_35565C.1
tctcgccttctccttctcttcctagtctagaggcgtttgctccccaatcccttcggaccgaccgcccggccggtcgacgtgatgccaccggcagacatggatccatacacggaccgcccgactagagg

SEQ ID NO: 114128 - DNA, 675 bp, Zea mays
  unsure (1)..(675): unsure at all n locations
  Clone ID: MRT4577_35566C.1
tgcacggggctccgccgcgcctcgnaattccccccacnncttccaccaggccagnncaccatggccactnannncgccctcctcctnnccgcacctcacnncaccatcnnncctgcaagnnccgccggcnnngccgcgccgccgtccgtnacctctnngccgcgcccacnnggcggggaatgggcnntgggccnnggcgtcggccccgcggcgcttttgcggtcccctgnngccccgcccacnngcggccggnagnnctgctgnntcgctcgnacccctgccccgctnacgnanncccagcgcgcgcccnncgccccttggnaccctcgcncnngtggtggggcgnngcgggcccnnngcgggcctncnngctgtggcgccagnncgcgtcgcggnaggcccgggccctgtcggtgntgccgccatnncgacccgtcccccgcggnntcgtgtggccccaacaactacgngcgtnngtgggtggacgaaagttcgaggccatggngcctnnctcccactgcctnncgacaccgtctnnggccctcctgcctccgtncnnttcatcgacgaaatggcggcgccaagnntcgctcgacccgcccctnacccgcccgcgtcgcgccgcccgccaagctcaagtnccaccatgnatggnacnncgctgcgtcgcccaac

SEQ ID NO: 114129 - DNA, 3186 bp, Zea mays
  Clone ID: MRT4577_35567C.1
atggaggctgcaaaaccaggtttcaaggaagttgagaaatggagtgaaaatgctttgtggagtgtatctgagcttcatgttggcgatgagaagcagactggggataattatcttaactttttcattaattggttataccgtaccatatcaaggttagccgaggatacgaccgctatgacatttgttggcagaaatcataacaagacacggggtaccctcaaggctcctaattctcagctgctacgacatggtactccttccaccgccgcgcgacaacgacaatggcggccggcagcccgcccgccggcagcggaatcgacgacgtcttccccgcgtggtggaagaacaaccttcgagctcatcccgccctcttccccgccgacggaggggaaggcagggcaaccaaggccaagcaggaggcagcgcctcgtcggctgtcgagcgagtcgacagtgtcggcaccccaatgggggcgcaccgggtatcgacttcgcgcttgagacgaagacgagcgccgactccccgcgacacgccgatcccgagcaagcggacgacgccagcgcgctcgcgaaaagctcgctggatgtcaccctcgtacctgagacgacggtgcagtcagtccccgacgtgactttatcgccgctcgtcgaccaagaggtaccgaccgattcccatcccacgtcatttggattcagcctcaacccgcctagcgacctcgctttggcgggcgctctcgtagaagcgagtccaaaccctctggggtttcgcatgcggtcgccttgggaccggctgacagacgtctcgacctacgggccctctgggtccgaggaagacgacgagcccagcatctgttgggatttctctggacttggcaaccctagtgccatgcgggacttcatgaccgcatgtgactactacctctccgactgttccgacggtagccgcagcctcggcgacgagggctgcggcccaagccgcgaatgttttcacgtcgatttagggggtccctctgaaggcaatcatctcggcatgccggaggacggtgatctccctaggccggcgccccgcgttgacatcccgcgggagctaactgtggtccccgttcaggcggggggccatgacccacagctcgagcaaatccgcggggtgcaggccaggctcgacgagggaataggagcgcttgagccgatccgccgggacgtcgggcaggcatgggcgggccaacccccggccggagaaatacgtcatctgccccagggcttccagcaccgcgtcgccgacgacgtcaggggcaggccaccacccgcatctagtggggtcggccagaacctggctgcagcagcgatgcttctccgcgcgatgccggagccatcaaccaccaagggccggcgaatccagggggagctcaagaatctcttggaaggcgccgcggtccgacgggccgagagctctgcctcccgaaggcaggggtacccctcggaacctcatgccgcgacttcccgattcatgcgggaagcctcggtctacaccgggcgcacgcgcaacaccgcgcctgcggccccgggccgcctcggcaacgagcaccatcaccgcgaccgtcgggcccacctcgacgagagggtgcgccgaggctaccaccccaggcgtgggggacgctacgacagcggggaggatcggagtccctcgcccgaaccactcggtccgcaggccttcagccgagccatccgacgggcaccgttcccgacccggttccgacccccgactactatcacaaagtactcgggggagacgagaccggaactgtggctcgcggactaccgtctggcctgccaactgggcggaacggacgatgacaacctcatcatccgcaacctccccctgttcctctccgacaccgctcgcgcctggttggagcacctgcctccggggcagatctccaactgggacgacctagtccaagctttcgctggcaatttccagggcacgtacgtgcgccccgggaattcctgggacctccgaagctgccggcagcatccgggagagtctctccgggactacatccggcgattctcgaagcagcgcaccgagccgcccaacatcaccgactcggatgtcatcggcgcgttccttgccggcaccacctgccgcgacctggaggcggtcgaggctatcttccgaaaggacaaacagccccagggccgcccatcggaagatgctcccgaggcgtcgactcagcgcgacgccaagaagaaaggcaagaagaagtcgcaagcgaaacgcgacgccgccgacgcggaccttgtcgccgccgccgagtacaagaaccctcggaaaccccccggaggtgccaacctcttcgacaagatgctcaaggagccatgcccctatcaccaggggcccgtccaccacacccttgaggagtgcgtcatgcttcggcgccacttccacagggccgggccacccgcggagggtggcagggcccgcgacgacgacaagaaggaagatcaccaagcaggagagttccccgaggtccgcgactgcttcatgatctacggtgggcaagcggtgaatgcctcggctcggcaccgcaagcaagagcgccgggaggtctgctcggtgaaggtggcggcgccagtctacctagactggtccgacaagcccatcaccttcgaccaagccgaccaccccgaccacgtgccgagcccagggaaatacccgctcgtcgtcgaccccgtcatcggcgatgtcaggctcaccaaggtccttacggacggaggcagcagcctcaacatcatctacgtcgagaccctcggtctcctgcgtgtcgatctgtcctccgtccgagcgggcgctgcgcccttccatgggatcattcccgggaagcacgtccagcccctcggacaactcgaccttcctgtctgcttcggaacaccctccaacttccgaagggagaccctgacgttcgaggtggtcgggttccgaggaacataccacgcggtactgggaagaccatgctacgcgaagttcatggccgtccccaactacactgttggaacttgctctcggtcgcaaggggggccaacaagggtgaacagtgacgttaacagggtttacgcgctagatggcaatagctctgttaatctggcctctcacgtgcactgtgcgggggtatttataggtatctga

SEQ ID NO: 114130 - DNA, 384 bp, Zea mays
  unsure (1)..(384): unsure at all n locations
  Clone ID: MRT4577_35568C.1
gccggccgggtcagcaatattcatttcccatctctctctgtgccgtctcgtgctccctcggttagatatcccgattacttcctcgcctcctggggcgcctcctcccccagagagggagagacgcatggtatctgacggcgccgactcccatgcctgtccgcctcctaggccatgaatcgcgaaaacgacgacctctttgagcctgactcctcatcggccactccgagcagcgaagtcttgtctggtgatgacagctgcgtattgattcatatgtgaagagctatatgagcactattgaagttgntttgagaatccgcgccgtcgagcaagatgnnaagacaataagnctacggatttgtgatactggtggncaagaacgcttta

SEQ ID NO: 114131 - DNA, 434 bp, Zea mays
  Clone ID: MRT4577_35569C.1
cggacgcgtgggtttctgctttagtcgttctggttccgtctgcctcccaaatttcttcgcagcacacataacagagcccttccccatgatgaccccgaatcaaatgggccctggatgtgtgctcccgaatgatctcccatcaggaccccgaatccaatcagggtctgcgtgttcttgagggtggagaagaaatcggtgccctcgcctttcgggattgagtttaaaaacacgaagacacgagttcagtgaaaccagtccactcgttggcacttgaaagcatggcaaggagaggagccctgctgtggccacgtggatagtttcttgacgagaagggaggcaaggagccatggggtggatcattaatttaatttcggatgagaagggagggagggaggccggccactggtgggtaatgaacctgaatctctactacc

SEQ ID NO: 114132 - DNA, 485 bp, Zea mays
  Clone ID: MRT4577_3556C.1
ccgggtccggatttccggggtggcccacacccgtccgaaaaaaaaaaaaaaaaaaaaaaaaaaatttatataaaaaaaaaaaaaaaaaaaaaaaaaaggggaaaaaaaaaaaaaaaaaagaaaaaaaaaaaaaaaaaaaaaaaaaaaaaaaaaaaaaaaaaaaaaaaaaaaaaaggggggggcccttttaggggtaccaaggttacgtccccgggggtggcggcttaaaactttttttttggggcccccaattttaatttatgggccggttttttaaaaccgtttgggggggaaaaccctggggtcccccaaataaaatttctggaaaaaattccccctttacccggggggggtattaactaaaggggccctcctgtaccccctttcaaaaattgtccccccctttttgggtattgggcccccccctttttcggtcttttaaaggcggggggttgtgggttttcccccatatgtgcccctttttt

SEQ ID NO: 114133 - DNA, 912 bp, Zea mays
  Clone ID: MRT4577_35570C.1
atgccggaggacggtgatctccctaggccagtgccccgtgttgacatcccacgggagctagctgtggtccccgttcaggcggggggccatgacccacagctcgagcaaatccgcggggtgcaggccaggttcgacgagggagcaggggcgcttgagccgatccgccgggacatcgggcaggcatgggcgggccaacccccggccggagaaatacgtcatctgccccagggtttccagcaccgcgtcgccgatgacgtcagggtcaggccgccacccgcatctagttgcgtcggccagaacctggctgctgcagcgatgcttctccgcacgatgccggagccatcaaccaccgagggccgacgaatccagggggagctcaagaatctcctggaaggcgccgcggtccgacgggccgagagctctgcctcccgaaggcagggatacccctcggaacctcacgccgcgacttcccgattcatgcgggaagcctcggtctacaccgggcgcacgcgcaacactgcgcctgcggccccgggccgcctcggcaacgagcaccatcaccgcgaccgtcgagcccaccccgacgagagggtgcgccgaggctaccaccctaggcgtgggggacgctacgacagcggggaggatcggagtccctcgctcgaaccgcccggtccgcaggccttcagccggaccatccgacgggcaccgttcccgacccggttccgacccccgactactatcacaaactgccggcagcagccgggagagtccctccgggactacatccggcgattctcgaagcagcgcaccgagctgcccaacatcaccgactcggatgtcatcggcgcgttccccgcctgcaccacctgccgcgacctggtgagcaagttgggtcgcaagacccccaccagg

SEQ ID NO: 114134 - DNA, 182 bp, Zea mays
  Clone ID: MRT4577_35571C.1
gtcctccgtcttctcctcgtcgctcgcccggggtgtttgctctctctacctatacccgtcgggacaccggcggatctttctagcgcacggcggcctcggagaagaggatgaggggggggacgatctattcgtagtaccgtcggaaacgcgtgctgtgagctgtactgtcttgagcatggcat

SEQ ID NO: 114135 - DNA, 5628 bp, Zea mays
  Clone ID: MRT4577_35572C.1
atggcgaccgtcagcccgcccgccggtggcggaatcgacgacgtcttccccacatggcggaagaacaacatccgagtttgtcccaccacctcccccgctgacggaggaggaggcggggcaaccatggccaaacaggaggcggcacctcgtcggctgtcgagcaagtcgacgacgccggcgccccagcgggggacacgtcgggcttcgaccttgcgtctgagacgaagacgagcgccgtttccccgcaacacgccaacaccaagtagacgaacgacgccagcacgctcgcgaaggacttgctgggcgtcgccctcgtacctgagacaacgcttcgacccaccaagcgacctcgcttcggtggaagccttcataaaggcatgtaacaaccttcccgggtaccatatgcggtcgccgtgggacagactaacggccgtctcaatctacggaccctcgggttccgaggaagatgacgagcccgacttttgttgggatttctacgggctcggtaaccccagtgccatgcgggacttcatgaccgcatgcgactactacctctctgattgttccgatggtagccgcagcttcggcgacgaggactgcgacccaagtcgtgaatgtttccacgtcgatctagggggtcccggcgaaggcaaccatcttggtatgccggaaaaaggcgatccccctaggcctgtgcctcgcgttgacatccttcgggagctagctgtggtcccagtccctgcggggggtcaggatgcacagctcgagcaaatccgcgagatgcaggctaggctcgacgagggagcaggaacacttgagcagttccgccggaacatcgggcaggaatgggcagaccaagctccagccggagaagcgcgtcatctaccccagggcatccagcaccgcattgccgacgatgtcagggcaaggccgccaccggcttccagtggggtcgaccagaacctggctgcagcagcaatactactccgcgcgatgccggaaccatcgaccaccgaagggcggccctcggtccacaccgggcacacgcggaacaccgcgcctgcggccccgggtcgcctcggcaacgagcaccaccaccgcaaccgtcgagcccaccttgacgagagcgtgcgccgaggctaccaccccaggcgtgggggacgctacgacaacggggaggatcggagtccctcgcccgaaccacccggtccgcaggctttcagccgggccatacgacgggcgccgttcctgacccggttccgaacctcgactaccatcacaaagtactcgggggagacgaagccgaaactgtggctcacggactaccgactggcttgccaactgggtgggacggatgatgacaacctcatcatccgcaacctccccctgttcctctccgacaccgctcgagcctggctggagcatctgcctccagggcagatctccaactgggacgacctggtccaagccttcgccggcaacttccagggcacgtacgtgcgccctgggaactcctgggatctccgaagctgccgtcagcagccgggagagtctctccgggactacatccggcgattctcgaagcagcgcaccgagctgcccaacatcaccgactcggacgtcatcggcgcgttcctcgccggcaccacctgctgcgacctggtgagcaagctgggtcacaagacccccaccagggcgagcgagctgatggacatcgccaccaagttcgcctctggccagaaggtggtcgaggccatcttccggaaggacaagcagccccagggccgccagccggaagacgtccctgaggcgtccactcagcgcggcaccaggaagaagggcaagaagaagtcgcaagcgaaacgtgacgcggccgacgcggaccttgtcgccgccgctgagtacaagaaccctcggaagcctcccggaggcgccaacctgttcgacaagatgctcaaggagtcgtgcccctatcatcagggacccatcaagcacacccttgaggagtgcgtcatgcttcggcaccactttcacaaggccgggccaccggcggaaggtggcagggcccacaacaatgacaagaaggaggatcataaggtggcggcgccagtctacctagactggtccgacaagcccatcaccttcgaccagggcgaccaccccgaccgcatgccgagcccggggaaatatccgctcgttgtcgaacccgtcatcggcaacgtcaggctcaccaaggtcctcatggacggaggcagcagcctcaacatcatctacgccgagaccctcgagctcctgcagatcgatctgtccttgatccggacaggcgcgacgccttttcatgggatcatccccgggaaacgcgtccaacccctcggacaactcgatctgcccgtctgcttcgggactccctccaacttccgaagggaaaccctcacgttcgaggtggttgggttccgaggaacctaccacgcagtactggggaggccatgctacgtcaagttcatggttgtccccaactacacctacctcaagctcaagatgtcgggccccaacagggtcatcaccgtcggccccacgtaccgacacgcgtacgaatgcgacgtggagtgcgtggagtacgccgaggccctcgccgaatccgaggccctcatcaccgacctggagagcctctccaaggaggcgccagacgtgaagcaccacgccgacaatttcgagcaagctgagacggaagcagtgctcgtcgactttctccgcgtgaacgccgaagtctttgcgtggagtccctcagacatgcctggcataccgagggatgtcgccgagcactcgctggatatccgagctggagcccaacccgtgaagcagcctctgcgccgattcgacgaagaaaagcgcagagccataggcgaggagatccacaagctgatggccgcagggttcatcaaagaggtattccatcccgaatggcttgccaaccctatgcttgtgagaaagaaaggagggaaatggcggatgtgtgtagactacactggtctaaacaaagcatgtccgaaggttccctaccctctgcctcgcatcgatcaaatcatggattccactgctgggtgcgaaaccctgtcattcctcgacgcctactcagggtatcaccaaatcaagatgaaagagtccgaccagctcgcgacttctttcatcacgccctttggcatgtactgctacgttaccatgccatttggtttgaggaacgcgggtgcgacgtaccaaaggtgcatgaaccacgtgttcggagagcacattggtcgaacggtcgaggcttacgtcgatgacatcgtagtcaagacgaggaaagcctcagacctcctctctgaccttgaaacgacattccagtgtctcaaggcgaaaggccggggcatcgaggccaacccggagaaaatcgcggccatcaccaacatggggcccatcaaggacttgaaaggcgtacagagggtcatgggatgccttgcggctctgagccgcttcatctcgcgcctcgatgaaagaggcctacctctgtaccgcctcttaagaaagaccgagcgcttcacttggacccccgaggccgaggaagccctcgggaacctgaaagcgctccttaccagcgtgcccatcttggtgcctcctgctgccggagaagccctcttgatctacgtcgccgctaccactcaggtggttagcgccgtgatcgtggttgagagacgagaagaagggcatgcattgcccgtccagaggccggtctacttcatcagtgaggtactgtccgagaccaagacccgctacccacaaattcagaagctgctgtacgcggtgattctgacgcggcggaagttgcgacactacttcgagtctcatccggtgactgtggtgtcatccttccccctgggggagatcatccagtgccgagagcctcgggccattaagtcccaagtcttggcggactttgtggctgaatgggtcgacacccagctcccggcagctccgatccaaccggaactttggaccatgtttttcaacgggtcgctgatgaaaacaggggcaggcgtgggcctgctcttcatctcgcccctcgggaagcacctccgctacgtgctgtgcctccatttcccggcgtccaacaacgtggctgagtacaaggctctggtcaacgggttgcgcatcgccatcgagctaggggtccgacgcctcgacgctcgcggtgactcgcagcttgtcatcgaccaagtcatgaagaactcccactgccacaacccgaagatggaagcctactacgacgaggttcggcgcctggaggacaagttctacgggctcgaggtcaaccacgtcgcccggcggtacaacgagactgcggacgagctggcgaagatagcttcggcgcgaacaacggttcccccgaacgtcttctcccaggacttacatcaaccctcagtcaagacaaacgacacgcccgagcccgagcccgagaaggcctcggcccggcccgaggcaccctcggctaccgagggtgaggctctgcgcatcgaggaagagcggaatggggtcacgcctaatcgaaactggcagaccccgtacctgcaatatctccaccgaggagagctacccctcgacagagccgaagctcggcgactggcgcggcgcgccaagtcattcgtcttgctgggtgacgggaaggagctctaccaccgcagcccctccagcatcctccagcgatgcatatccatcgccaaaggccaggagctcttacaagaaatacattcgggggcttgcggtcatcacgcagcgcctcaggcacttgttggaaacgctttccgacaaggtttctactggccgatcgcggtggccgacgccactagaattgtccgcacctgccaagggtgtcaattctacgcaaggcagacgcacctacccactccggctctgcaaataatacccatcacctggttgtttgttgtgtggggtctggacctcgtcggtcccttgcagaaggcacccaggggctacacgcacctactggtcaccgtcgacaaattctccaagtggatcgaggtagaacgtgccaacggcatgattctgcaaggactcaagccacggatctacgacgacctcaacaagttcggcaagcgatggatgaaggaactcccctcggtggtctggagcctgaggacaacgccgagccgagccacgggcttcacgccgttctttctagtctatggggccgaggccatcttgcccacagacttagaatacggttctcgaaggacgagggcctacgacgaccgacgcaaccagaccaaccgagaagactcactggaccagctggaagaggctcgggacatggccttactacactcggcgcggtatcaacagttcctgcgacactaccacgcccgaggggttcggtcccgagacctccaggtgggcgacttggtgcttcgactacgacaagacgcccgagggcgccacaagctcacgcctccctgggaagggccattcatcatcgccaagattttgaagcccggaacatacaagctggccaacagtcaaggcgaggtctacagcaacgcttggaacatccgacagctacgtcgcttctacccttaa

SEQ ID NO: 114136 - DNA, 599 bp, Zea mays
  Clone ID: MRT4577_35573C.1
cggtctagaaagtactctcgagttcatggccattgacggcagctaagacatgatactccttcctccgccgtgcgacaacgacaatggcggccgtcagcccgcccgctgcctggggaatcgacgacgtcttccccccatggcggaagaacagcgtccgggtctggcccgtcaccttccccgccgacgaaggaggaggcggggcaaccatggccaagcaggaggcggcacctcgttggctggcgagcgagtcgacgacgccggtgccccagcgggggacacgggggacgttgacctcgcgtctgaggcgaagacgagcgtcgtttccccgcaacacgccaaacccaagcgggcgaatgatgccaacacgctcgcgaaggacttgctgggcgttagcctcgtacctgagataacggggcagtccgtccccgacgcgacttcgtcaccatccgtcaatcaagaggtaccgtccgttttccaccctgtgccttttagattcagcttcgacccaccaagcgacccgcttcggtggacgctttcataaaggcatacccaaacctttcggggtaccatatgcggtcaacctgggaccgactcacgac

SEQ ID NO: 114137 - DNA, 559 bp, Zea mays
  Clone ID: MRT4577_35574C.1
gatgcgagagcgacaaaaaacggcctcggcggcgccggcgtcttcggattctccgcccgacgcgcgccttatttccttccctctcagtctccgcgccgtcctgccaccctgcgtttcatcacgctcgcaggtttctaacaccaaggcacctgccaataaattttgcctactggcactccatatattagaagcaatatgaatccgtatttcttgggattcattctcccttttgtggcatctctgctgcttaccaagagaaagtccgagaagaagaggggggtgccagtcaatgtgggtggagagcctggctgcgccatccgtaaccacagatttgaaagacctgtcaagacgcgctgggaggggatttccacgcttgctgagctatttgagcaatcgtgcaagcagtttgcctctacacccctgtttggcaccaggaagctcattgcaagagaaatggtagtggctgctgatggaagatcctttgagaagctccatttgggaaactatgagtggagaagctatgctgatgcattcaaaactgtctgcaatttcgcttctg

SEQ ID NO: 114138 - DNA, 4884 bp, Zea mays
  Clone ID: MRT4577_35575C.1
atgacgccagcactcgtgcccgggacgacggcgagtgtcgtttccccgcaacgacagatgtcaggcgttgacctcgtgcccgggacgacggcgagtgtcgtttccccgcaacgtgccaaccccaagcggacagatgacgccagcactctcgcggaggacttgctgggcgttagcttcgtacctgagataacggtgcagtccgtccccaacgcgacttcgtcaccgtccgtcgatcaagaggtaccgtccgttttccaccctgtgccttttagattcagcttcgatccaccaagcgaccctgcttcgatggacgctttcataaaggcatatcctaaccttccggggtaccatatgtggtcaacttgggaccgactgatggccgtctcaacctacggacccccgggctccgaggaagatgacgagcccgactctggttgggatttctccgggctcggtaatcccagtgccatgcgagacttcatgaccgcatgtgactactgcatctccgatcgctccgatgatggccacagccttgacaacgagagttgtggcccaagtcgcgaatgtttccatgtcgatctagggggtctcgacgaaggcaaccaccttggtatgccggaggacgacgatccccctaggcctgcgcctcgcattgacatcctgcgggagctagctatggtcctagtccctgtggggggtcaggacacacagctcgagcaaatccgcgagatgcaggccaagctcaacgaggaagcaggacaacttgtgcagctccggcaaaacatttggcaggagtcggcaggccgagcactagcagaagaagcgcgtcatcaggcccaggacgtccagcaccgcatcgctgacgatgccagggcaaggctgcccccggcttccagtggggtcggccagaacctggctgcagcggcaattctactccgagcgatgccagagccatccaccaccgaggggcggcgtatccagggagaactcaagaatctcctggaggatgccgcagttcgacgggccgagagctctgcctctcgaaggcaagggtacccccccgaagcatcgcgccgtgacttcccgattcatgcgggaagccccgccccgggtcgcctcggcaacgagcaccaccgccgcgaccgtcgagcccacctcgacgagaaggtgcgccaaggctaccaccccaggcgtgggggatgctacgacagcggggaggatcggagcccctcacccgaaccacccggtctgcaagctttcagccgggccatacgacaggcgtcgttcctgacccgtttcagagccccgactaccatcactaagtactcgggggaaacgaggccggaactgtggcttgcggactaccggctggcatgccagttgggtggaacaaacgatgacaacctcatcatccgcaacctccccctgttcctctccgacgtcgcccgagcctggctggagcatctgcctcctgcgcagatctccaactgggacgacctggtcaaagccttcgctggaaacttccagggcacatacgtgcgccctgggaactcttgggatctccgaagctgccgccagcagccaggagaatccctgcgagactacatccggcgattttcgaagcagcgcaccgagctgcccaacatcaccgactcagatgtcatcagcgtgttcctcgccggcaccacttgccgcgacctggtgagcaagctgggtcgcaagactcccaccagggcgagcgagctgatggacatcgccaccaagttcgcctctggtcaggaggcggtcgaggccatcttctggaaggacaagcagcctcagggacgccaacaggaggatgtccctgaggcatccgcccagcgcgacacgaagaagaaggccaagaagaagtcgcaagcgaaacgcgacgctgccgacacagatcttatcgctgccgccgagcacaggaaccctcggaagcctcccggaggggccaacctgttcgacaagatgctcaaggagtcatgtccctatcaccatggtcccgtcaagcacacccttgaggaatgcgtcatgcttcggccctacttccataaggtcgggcccccggcggaaggtggcaaaggccgagacaacgacaagaaggagggcgacaaggtagaagagttccccgaggtccacgactgtttcatgatctacggtgggcaagtggcgaacgcctcggctcggcaccgcaagcaggagcgccgggaggtctactcggtgaaggtggcgacgccagtctacctagactggtccgacaagcccatcaccttcgaccaaggcgatcacctcgaccatgtgccgagcccaggaaagtacccgctcgttgtcgaccccatcatcggcaacgtcaggctcaccaaggtcctcatggacggaggcaacagccttaacatcatctacgctgagaccctcgggctcttgcagatcgatctgtccgcgatccgggccgtgctggggagaccatgctacaccaagttcatggccgtccccaactacacctacctcaagctcaagatgtcgggccccaacggggtcatcaccgtcagatccacgtaccgacacgcgtacgaatgcgacgtggagtgcgtggagtacgctgaggccctcaccgaatctgaggccctcatcgccgacctggagtgcctctccaaggaggtgcctgatgcgaagcgccacgccggcaactccgaaccagcggaggcggtgtttgcatggagtccctcggacatgcccgacataccgagggatgtcgccaagcactcgctgaatatccgagctggagcccgacctgtgaagcagcctctgcgccgattcgatgaagaaaagcacaaagccataggcgaggagatccacaagctgatggctgcagggttcatcaaagaggtattccatcccgaatggctagccaaccctgtgcttgtgaaaaagaaaggtgggaaatggaggatgtgtgtagactacactggtctaaacaaagcatgtctgaaggttccctaccctctgcctcgcatcgatcaaatcgtggattccactgctgggtgcgaaaccctgtcattcctcgatgcctactcgggttatcaccaaatcaggatgaaagagtccgaccagctcgcgacctctttcatcacaccctttggcatgtactgctatattactatgccatttggtttgaggaatgcaggtgcgacataccaaaggtgcatgaaccacgtgttcggagagcacatcggccgaacggtcgaggcttacgtcgatgacattgtagtcaagacgagaaaagcctccgacctcctctttgaccttgaaacgacattcaagtgtctgaaggagaaaggcctaaaactcaatcccgagaagtgtgtcttcggagtcccccgaggcatgctcctggggttcatcgtctccgagcagggcatcgaggccaacccggagaaaatcacggtcgccaccaacatggggcctatcaaagacttgaaaggagtacagagggtcatgggatgccttgtggctctgagccgcttcatctcgtgcctcggcgaaagaggcctacccttgtaccgcctcttaaggaagaccgaggccaaggaagctctcaggaacataaaagcgctcctcacaagcgcgcccatcttggtgccccccgctgcgggagaagccctcttgatctacgtagccgctaccactcaggtggtcagcgtcgcgatcgtggtcgagagacgagaagaagggcatgcattgctcgtccagaggccggtctacttcatcagcgaagtgctatccgagaccaaaatccgctacccgcaaattcagaagctactgtacgcggtaattctgacgcggcgaaagttgcgacactacttcgagtctcatccggtgactgtggcgtcatccttccccctgggggagatcatccagtgccgagaggcctcgggtaggattgcaaagtgggtggtggagatcatgggcgagacaatatcgttcgctcctcggaaggccatcaagtcccaagtcttggcagactttgtggctgaatgggtcgacacccagcttccaacagctccgatccagctgggactctggaccatgtatttcgatgggtcgctgatgaaaacaggagcaggtgcgggcctgctcttcatctcacccctcgggaagcacctccgctatgtgctacgcctccatttcccgacgtcaaacaacgtggccgagtacgaggctctggttaacgggttgtgcatcgccatcgagataggggttcggcgcctcgacactcgtggcgactcacagcttgtcatggaccaagtcatgaagaactcccactgccgcgacccaaagatggaggcctactgcgacgaggttcggcgcctggaagacaagttctacgggctcgagctcaaccacgtcgctcgacggtacaacgagactgcggatgagctggctaaaatagcctcggggcggacaacggttcccccggacgtcttctcccgagacttacatcaaccctccgtcaagaccgacgacacgctcgagcccgaggaagcctcggtccagcccgaggaggcctcggcccagcccgaggcaccctcggccgccgaaggtgaggcactgcgcatcgaggaagagcggaatggggtcactcctaatcgaaactggcagacctcgtacctgcaatatctccaccgaggagagctacccctcgacagagctgaagctcggcgactagcgcggcgcgtcaagtcgttcgtcttactgggcgacgagaaggagctctaccaccgcagcccctcaggcatcctccaacgatgcatatccatcgccgaaggtcaggagctatttgatagtcgcctagagggggggtga

SEQ ID NO: 114139 - DNA, 421 bp, Zea mays
  unsure (1)..(421): unsure at all n locations
  Clone ID: MRT4577_35576C.1
ccccgggcngctttggggcggcacgaggccagagacgccgcgncgacggccgacgcaccggaggagcgccacgacgaccncaacgccgcgggggacaagagcggcgnccccaagcccaggccggaggcgcacagggacggcgacaagcaccgggcggagcacgagggganccacagcgagagcaccggggagcagcagccgcattttttttttgacagcaaggacncgggggccggacagcgggacgtttgcaacgccggcccacccccggcggcgaagacaagcncgncncggcacacagggagcaggaggaagaacnagacaccaacaccccagccgaggcggncgagccgagaaccgagaagcaaccaggaagagcgagagcaacaaggggacagacacaaacaaggagaacaacgag

SEQ ID NO: 114140 - DNA, 4962 bp, Zea mays
  Clone ID: MRT4577_35577C.1
atggcggaagaacaacatccgggtttgtcccgtcacgtcccccaccgacggaggagggggcggggcaaccatggccaagcaagaggcggcgcctcctcggctgtcgagcaagtcgacgacgccggcgccccagcgggggacacgtcgggcttcgaccttgtgtctgagacgaagacgaacaccgtttccccgcaacacgccaaccccaagcagacgaacgacaccagcacgctcgcgaaggacttgctgggcgtcgccctcgtacctgagacaacggtgcagtccgcccctgacgtgacttcgtcaccgcccgtcgaccaagaggtaccgaccgattcccatctcgtgccttttggattcagcttcgacccaccaagcgaccttgcttcgatggaagccttcatagaggcatgtatgaaccctccggggtaccatatgcggtcgccctgggacagactgacgaccgtctcaacctacggaccctcgggttccgaggaagacgatgagcccgacttttgttgggatttctccgggcttggtaaccccagtgccatgcgggacttcatgaccgcatgtgactactgcctctccaattgttccgatggtagccgcagcttcggcgatgaggactgcggcccgagtcgtgaatgtttccacgtcgatctagggggtcccggcgaaggcaaccatcttggtatgccggagagcggcgatttccctaggcctgcgcctcgtgttgacatccttcgggagctagctgtggtcccagtccctacggggggtcaggacgcacagctcgagcaaatccgcgagatgcaggccaggctcgacgagggagcaggaacacttgagcagttccagcggaacatcgggcaggaatgggcagaccaagctctggccggagaagcgcgtcatctaccccagggcatccagcaccgcgttgccgacgacgtcagggcaaggccgccaccggcttccagtggggtcggccagaacctggctgcagcagcaatactactccgcgcgatgccggaaccatcgaccatcgaagggcggcgtatccagggagagctcaagaatctcctagaggatgttgcggtccgacgggccgaaagctctgcctcccgaaggcaggggtacccctcggagcatcgcgccgcgacttcccgattcgtgcgggaagcctcggtccacaccgggcgcacgcgcaacacggcgcctgtggccccgggtcacctcggcaacgagcaccaccaccgcaaccgtcgagcccacctcgacgagagggtgcgccgaggctaccaccccaggcatgggggacgctacgacagcggggaggatcggagtccctcgcccaaaccacccggtccgcaggctttcagccgggccatacgacgggcgccgttcccgacccggttccgaaccccgactaccatcacaaagtactcgggggagacgaggccggaactgtggctcgcggactaccgactggcctgccagctgggtggaatggacgatgacaacctcatcatccgcaacctccccctgttcctcttcgacaccgctcgagcctggctggagcatctgcctctagggcagatctccaactgggacgacctggtccaagccttcgtcggcaacttccagggcacgtacgtgtgccctgggaactcctgggatctccaaagctgccgccagcagccgggagagtctctccgggactatatccggcgattctcgaagcaacgcactgagctgcccaacgtcaccgactcggacgtcatcggcgcgttcctcgccggcaccacctgccgcgacctggtgagcaagctgggtcgcaagacccccaccagggtgagcgagctgatggacatcgccaccaagttcgcctctggccaggaggcggttgaggccatcttccggaaggacaagcaaccccagggccgccagccggcccacaacaacgacaagaaggaggatcacaaggcagaggagttccccaaggtccacgactgcttcatgatctacggtgggcaagtggcgaacgcctcggctcggcaccgcaagcaagagcgtcgggaggtctgctcggtaaaggtggcggcgccagtctacctagactggtccgacaagcccatcaccttcgaccagggcgaccaccccgaccgcgtgccgagcctagggaaatatccgctcgttgttgaccccgtcatcggcaacgtcaggctcaccaaggtcctcatggacggaggtagcagcatcaacatcatctacgccgagatcctcgggctcctgcagatcgatctatcctcgatccggacaggcgcgacgccttttcacgggatcatccccgggaaacgcgtccaacccctcggacaacttgatctacccgtctgctttgggactccctccaacttccaaagggaaaccctcacgttcgaggtggtcgggtttcgaggaacctaccacgcagtactggggaggccatgctacgccaagttcatggtcgtccccaactacacctacctcaagctcaaaatgtcgggccccaacggggtcatcaccgtcggccccacgtaccgacacgcgtacgaatgcgacgtggagtgcgtggagtacgccgaggccttcgccgaatccgaggccctcatcaccgacctggagagcctctccaaggaggcgccatatgcgaagcgccacgccggcaacttcgagccagctgagacggaagcagtgctcgttgactttctccgcgcgaacaccgaagtctttgcgtggagtccctcggacatgcctggcataccgagggatgttgccgagcactcgctggatatccgagctggagcccgacccgtgaagcagcctctgcgccgatacaacgaagaaaagcgcagagccataggcgaggagatccacaagctgatggccgcagggttcatcaaagaggtattccatcccgaatggcttgccaaccctgtgcttgtgagaaagaaaggagggaaatggcggatgtgtgtagactacactggtctaaacaaagcatgtccgaaggttccctaccctctgcctcgcatcgatcaaatcgtggattccactgctgggtgcgaaaccctgtctttcctcgatgcctactcagggtatcaccaaatcaggatgaaagagtccgaccagctcgcgacttctttcatcacgccctttggcatgtactgctactatgccatttggtttgaggaatgcgggtgcgacgtaccaaagtgtctcaaggcgaaaggcgtaaaactcaatcccgagaagtgcgtcttcggagtcccccgaggcatgctcttggggttcatcgtctccgagtggggcatcgaggccaacccagagaaaatcgcagccatcaccaacatggggcctatcaaggacttgaaaggcgtacagaggttgcgacactacttcaagtctcatccggtgactgtggtgtcatccttccccctgggggagatcatccagtgccgagaggcctcgggtaggattgcaaagtgggcggtggaaatcatgggcgagacaatctcgttcgcccctcggaaggccatcaagtcccaagtcttggcgaactttgtggctgaatgggtcgacacccagctcccggcagctccgatccaaccggaactctggaccatgtttttcgacgggtcgttgatgaaaacaggggcagacgcgggcctgctcttcatctcgcccctcgggaagcacctccgctacgtgctgcgcctccatttcccgacgtccaacaacgtggctgagtacgaggctctggtcaacgggttgcgcatcgccatcgagctagggcttgtcatcgaccaagtcatgaagaactcccactgccgcgacccgaagatggaagcctactgcgacgaggttcggcgcctggaggacaagttctacgggctcgaggtcaaccacgtcgcccggtggtacaacgagactgaggacgagctggcgaagatagcttcggcacgaacaacggttccctcgaacgtcttctcccgggacctacatcaaccctcagtcaagacaaacgacacgcccgagcccgagaaggcctcagcccagcccgaggcaccctcggttaccgagggtgaggctctgcgcatcgaggaagagcggaatggggtcacgactaatcgaaactggcagacctcgtacctgcaatatctccaccgaggagagctacccctcgacagagccgaagctcggcgactggcgcggcgcgccaagtcattcgtcttgctgggtgacgggaaggagctctaccaccacagcccctccggcatcctccagcgatgcatatccatcgccgaaggccaggagctcttacaagaaatacactcgggggcttgcggtcatcacgcagcgcctcgagcccttgttggaaacgctttccgacaaggtttctactggccgaccgcggtggccgacgccactagaattgtccgcacctgccaagggtgtcaattctacgcaaggcagacacacctacccgctcaggctctgcaaacaatacccatcacctggccgtttgctaaggcacccgggggctacacgcacctgctggtcgccatcgacgaattctccaagtggatcgaggtccgacccctaaacagcatcaggtccgaacaggcggtggcgttcttcaccaacatcatccatcgctttggggtcccgaactccatcatcaccgacaacagcacccagttcaccggcagaaagttcctggacttctgcaaggatcaccacatccgggtggactgggccgccgtggctcaccccatgacgaatgggcaagtagagcgtgctaacggcatgattctgcaaggactcaagccacggatctacaacgacctcaacaagttcggcaagcgatggatgaaggaactcccctcgatggtctggagtctgaggacaacgccgagctga

SEQ ID NO: 114141 - DNA, 2388 bp, Zea mays
  Clone ID: MRT4577_35578C.1
atgccgttcggtttgaggaatccgggcgcgacgtaccagcggtgcatgaaccatgtgttcggcgaacacatcggtcgcacagtcgaggcctacgtcgatgacatcgtagtcaagacaaggaaggcttccgacctcctcttcgaccttgaagtgacattccgatgtctcaaggcgaaaggagtcaagctcaatcctgagaagtgtgtcttcggggtgccccgaggcatgctcctagggttcatcgtctccgagcgaggcatcgaagccaacccggagaagatcgcggccatcaccagcatgggacccatcaaggacttaaaaggtgtacagagggtcatgggatgcctcgcggccctgagccgcttcatctcgcgcctcggcgaaagaggtctgcctctgtaccgcctcttaaggaaggccgagtgtttcgcttggacccctgaggccgaggaagccctcggcaacctgaaggcgctccttacgaaggcgcctgtcttggtgcccccggcggatggagaagccctcttggtctacgtcgccgcgaccactcaagtggttagcgccgcgatcgtggtcgagaggcaagaggaagggcatgcattgcccgttcagaggccggtctacttcgtcagcgaagtgctgtccgagaccaagatccgctacccacaagttcaaaagctgctgtatgctgtgatcctaacaaggcggaagctgcgacactacttcgagtctcacccggtaactgtggtgtcatccttccccctgggggagatcatccagtgccgagaagcctcgggcaggatcgcaaagtgggcggtggaaatcatgggcgaaacgatctcgttcgcccctcggaaggccatcaagtcccaggtgttggcggacttcgtggccgaatgggtcgacacccagttgccgacggctctgatccaaccggagctctggaccatgtttttcgacgggtcgctgatgaagacaggagccggcgcgggcctgctcttcatctcgcccctcgggaagcacttgcgctacgtgttgcgcctccatttcccggcgtccaacaatgtggccgagtacgaagctctggtcaacgggttgcggatcgccatcgagctagggctcgtcatcgaccaagtcatgaagaactcccactgccgcgacccgaagatggaggcctactgcgacgaggttcggcgcctggaagacaagttcttcgggctcgagctcaaccacatcgctcggcgctacaacgaaaccgcagacgagctggctaaaatagcctcggggcgaacgacggtccccccggacgtcttctcccgggatctgcatcaaccctctgtcaagctcgacgacgcgcccgagcccgaggtaccctcggctcagcccgaggtaccctcggctcggcccgaggcaccctcggcacagcccgaggtaccctcggcccccgagggcgaggcactggacgtcgaggaagagcagagcgaggccacgccagatcgtgattggcaggccccgtacctgcagtatcttcgccgaggagagctaccccccgaccaagtcgaggctcggcggaaggcgcccgggggctacacgcacctgctggtcgccatcgacaaattctccaagtggatcgaggtccgacctctgaacagcatcaggtccgagcaggcggtggcgttcttcaccaacatcatccatcgcttcggggtcctgaactccatcatcaccgacaacggtacccagttcaccggcaaaaaaatcttggatttttgcgaggatcaccatatctgggtggactgggccgccgtggctcatcccatgtcgaatgggcaagtagagcgtgccaacggcatgattctacaagggctcaagcctcggatctacaacgacctcaataagttcggcaagcggtggatgaaggaactcccctcggtggtttggagcctaaggacgacgccgagtcgtgccacgggtttcacgccgtttttcctggtctacggggccgaagctatcttgcccactgacctggaatacggctccccgaggacgagggcctacaccgatcaaagcaaccaagctagccgagaagaatcgctggaccagctggaggaggctcgggacagggccttgctacactcggcgcggtaccagcagtccctgcgacgctaccacgctcgaggggtccggtcccgagacctccaggtgggcgatctggtgcttcgactgcggcaagacgcccgagggaggcacaagctcacgcccccctgggaagggccattcgtcatcgccaaagttctgaagcccggaacatacaagctggccaaaagtcaaggcgagatcttcggcaacgcttggaacatcaaacagctacgtcgcttctacccttaa

SEQ ID NO: 114142 - DNA, 249 bp, Zea mays
  Clone ID: MRT4577_35579C.1
gatcgtgctaattctacttctacttcggaatttccgtcggtcccggtgcctcggattgtcaacgaccggatgaagtcgctgcagcaggatctgtggttcatcgtgcgatggcggcggagcctaccgtgcggggctacggtccagacgacgccgtcgacgtcgtccgtggggctgtctcagacgctatctgcggtgccctgagcgatcgtgcccatgacgacccggacttaggcgccgtatgtgcgcctg

SEQ ID NO: 114143 - DNA, 331 bp, Zea mays
  Clone ID: MRT4577_3557C.1
tatttatttctctctctggattgcttcttctcccgtggctgataactattctccaccccttcttttataataatcacgtcttctccaaaatgaataatattacttgggaggcatacaatccattaagcctttttatatatctgtgtattcacaacacgccacggaatttctacccctccctttctctcccttctcttatcttcttcacttcacagcacgatcgatccagttgcaatcacacattgcatactattccgaccattatcatctcggtgaacctttaatgcatcctctgtcacgccaagatccatattttgctcaacaagatcca

SEQ ID NO: 114144 - DNA, 2748 bp, Zea mays
  Clone ID: MRT4577_35580C.1
atggcggccgacagcccgctcgccggcggcggaatcgacgacgtcttccccgcgtggaggaggcggggcaaccaaggccaagcaggaggcggcacctcgtcagctgtcgagcgagtcgacggctccggcgccccaaccggggtcacatcgggcatcgacctcgcgtctgagacgaagacgagcaccgtctccccgcaacacgccaatcccaagcaaacagacgacgccagcacgctcgcgaaggacttgctgggcgtcaccctcgtacctgagacggcggtgcagtcagtccctgacgtaacttcgtcaccgcccgtcgaccaagaggtaccaaccgattcccatctcacaccttttggattcagcctcgacccaccaagcgactccgctctggtggacgctctcgtagaggcgagtccaaaccctctgggttatcgtatgcggtcaccctgggaccggctaacggacgtctcgacctacgggccctcggggcctgaggaaaatgacgagcccgacttcggttgggacttctccggacttggtaaccccagtgccatgcaggacttcatgaccgcatgcgactactgcctttccgactgtttcgacggtagccgcagcctcggcgatgaggactgcggcccaagtcgtgaatgcttccacgtcgatctagggggtcccaacgaaggcaaccatcttggtatgccagagaacggtgatctccctaggcctgtgcctcgcgttgacatcctacgggagctagttgtggtccccgttccggcgggggttcatgacccacagctcgagcaaatccacggggtgcaggccaggctcgacgagggagcaggaacacttgagctgatccgccgggacatcgggcaggagtgggctggccaacctccagccggagaaccatccaccaccgaggggcggcgaattcagggagagctcaagaatctcctggaggacaccgtggtccgacgggccgaaagctccgcctcccgaaggcagggatgcccctcggaacatcgcgccgcgacttcccgattcatgcgggaagcctcagtccataccgggcgcacgcgcaacacagcgcctgcggccccgggtcgcctcggcaacgagcaccatcaccgcgaccgtcgggcccacctcgacgagagggtgcgccgaggctaccaccccaggcgtgggggacgctacgacagcggggaggatcggagtccctcgcccgaaccacccggtccgcaggctttcagccgagccatacgacgggcgccgttcccgacccggttccgaaccccgactactatcgcaaagtactcgggggagacgagaccagaactgtggctcgcggactaccggctagcctgccacctgggtggaacggacgatgacaacctcatcatccgcaacctccccctgttcctctccgacaccgctcgcgcctggttggagcacctgcctccggggcagatctccaactgggacgacctggtccaagccttcgccggcaatttccagggcacggcgagcgagctgatggacatcgccaccaagttcgcctctagccaggaggcggttgaggctatcttccggaaggacaagcagccccagggccgcccaccggaagatgcccccgaggcatcaactcagcgcgacgccaagaagaagggcaagaagaagtcgcaagcgaaacgcgacgccgccgaagcggaccttgtcgccgccgccgagtacaagaaccctcggaaacctcccggaggtgccaacctcttcgacaagatgctcaaggagccgtgcccctatcatcaggggcccgtcaagcacacccttgaggagtgcgccatgcttcggcaccacttccacagagccgggccacccgcggagggtggcagggctcgcgacgacgacaagaaggaagatcaccaggcaggagagttccccgaggtccgcgactgcttcatgatctacggtgggccagcggcgaacgcctcggctcggcaccgcaagcaagagcgtcgggaggtctgtgcggtaaaggtggcggcgccagtctatctagactggtccgacaagcccatcaccttcgaccaagccgaccaccccgaccgcgtgccgagcccggggaaatacccgctcgttgtcgaccccgtcatcggcgacgtcaggctcaccaaggtcctcatggatggaggcagcagcctcaacatcatctacgccgagaccctcgggctcctgcgcgttgatctgtcctcggtctgggcaggtgctgcgcctttccacgggatcatccccgggaagcgcgtccagcccctcggacaactcgatcttcccgtctgctttgggacaccctccaacttccgaagggagaccctcacgttcgaggtggtcgggttccgaggaacctaccacgcggtactggggaggccatgctacgcgaagttcatggccatccccaactacacctacctcaagctcaagatgtcgggccccaacagggtcatcaccgtcggtcccacgtaccgacacgcgttcgaatgcgacgtcgagtgcgtggagtacgccgaggccctcgccgaatctgaggccctcatcgccgacctggagtgcctctctaaggaggcgccagacgtgaagcgccacgccggcaacttcgagccagcggagacggttaaatccgtccccctcgaccccagcagcgacgcctccaagcgggtctggatcggctccgagcttgatcccaaatag

SEQ ID NO: 114145 - DNA, 210 bp, Zea mays
  Clone ID: MRT4577_35581C.1
tcgacctatgcgttcggcagaccgcaccctgtcgggcagaaacgatgctgatcaatatcagtggaataaagtaacagacttacgttttttctacttatattaagacactacaacaccaggatctgcaccttataagggtgtgatcgcagctatccataaataatacatgtagaaatggtaaaatgcctgggccaaaatggcttcaacaaa

SEQ ID NO: 114146 - DNA, 145 bp, Zea mays
  Clone ID: MRT4577_35582C.1
aactgaaaaactcattggaaaacttgagaagcagataactgattttaacgcggataatgtagcatgcctaaagactttgcaactgatgaagaaagcaatcgcccttgttctacatgtggctgaagaataacagatctcgattgaa

SEQ ID NO: 114147 - DNA, 2883 bp, Zea mays
  unsure (1)..(2883): unsure at all n locations
  Clone ID: MRT4577_35584C.1
atgccgttcggcttgaggaatgcgggcgtgacgtaccagcggtgcatgaatcatgtgttcggcgaacacattggccggacggtcgaggcctacgtcgatgacatcgtagtcaagacgaggaaagcctccgacctcctttccgaccttgaagtgacattccgatgcctcaaggcgaaaggcatcaagctcaatcccgaaaagtgtgtcttcggggtgccccgaggcatgctcttgggtttcatcgtttccgagcggggcatcaaagccaacccagagaagatcgcagccatcaccagcatggggcccatcaaggacttcaaaggcgtacagagggtcatgggatgtctcgcggctctgagccgcttcatctcacgcctcagtgaaagaggtctacctctgtactgcctcttaaggaaggctgagtgcttcacttggacccctgacgccgaggaagccctcgggaacctgaaggcgctcctcacgaaggcgcctatcttggtgcccccagctgccggagaagccctcttggtctacgtcgccgcgaccactcaggtggttagcgccgcgattgtggtcgagaggcaagaagaggggcatgcattgcccgttcagaggccagtctacttcgtcagcgaggtactgttcgaaaccaagatccgctacccacaagttcagaagctgctgtacgcggtgatcctgacacggcggaagttgcgacactacttcgagtctcatccggtaactgtggtgtcatccttccccctgggggagatcatccagtgccggaaagcctcgggtaggattgcaaagtgggcggtggaaatcatgggtgagacgatctcgttcgcccctcggaaggccatcaagtcccaggtcctggcagacttcgtggccgaatgggtcgacacccagctaccgacagctccgatccaaccggagctctggaccatgttcttcgacgggtcgctgatgaagacaggagccggcgcaggcctactcttcgtctcgccccttgggaagcacctacgctacgtgctacgcctccatttcctggcatccaacaatgtggctgagtatgaggctctggtcaacggattgcggatcgccatcgagctaggggttcgacgcctcgacgctcacggtgactcgcagctcgtcatcgaccaggtcatgaagaactcccactgccgcgacccgaagatggaggcctactgcgatgaggttcggcgcctagaagacaagttctatgggctcgagctcaaccacatcgctcggcgctacaacaagactgcggacgagctggctaaaatagcctcggggcgaacaacggttcccccggacgtcttctcccgagatctgcatcagccctccgtcaagatcgacggcacgcccaagcctgaggcaccctcggcccagcccgaggtaccctcggcacagtccgaggcgccctcggctcggcccgaggcaccctcggtccagcccgaggtaccctcggtccagcccgaggtaccctcggcacagtccgaggcaccctcggctcggcccgaggcaccctcggttcggcccaaggtaccctcggcccccaagggcgagacgctgcacgtcgggggggagcgaagtggggtcacgcctgatcaaaactggcagaccccgtacctgcaatatctccaccgaggagagctaccctccaaccgagccgaagctcggcgggtggcgcggcgcgccaagtcgttcgtcttgctgggagatgagaaggagctctaccaccgcagcccctcaggcatcctccaacgatttatctccattgccgaaggtcaggaactcctgcgagagatacactcgggggcttgcagccatcacgcagcgcctcgagcccttgtcgggaatgctttccgacaaggtttctactggccgacggcggtggccgacgccactagaattgtccgcacctgcggagggtgtcagttctacgcaaggcagacccacctgcccgctcaggctctgcagacgatacccatcacctggccctttgctgtgtggggtctagacctcgtcggccccttgcagaaggcacccgggggctacacacacctgttggtcgccatcgacaaattctccaagtggatcgaggtccgacccctaaacagcatcaggtccgagcaggcggtggcgttcttcaccaacatcatccatcgcttcggggtcccgaactccatcatcaccgacaacggcacccagttcaccggcagaaagttcctagacttttgcgaggatcaccacatccgggtggacttggccgccgtggctcaccccatgtcaaatgggcaagtagagcgtgccaacggcatgattctgcaaggactcaagcctcggatctacaacgacctcaacaagttcggcaagcgatggatgaaggaactcccctcggtggtctggagcctgaggacaacgccgagccgagccacgggcttcacgccgttctttcgggtctatggggctgaggccatcttgcccacggacttagaatacggttccccgaggacgagggcctacaccgaccaaagcaaccaagctagtcgagaggactcgttggaccagctggaggaggctcgggacaaggccttacaacactcggcgtggtaccagcagtccctgcgacgctaccacgcccgaggggcccggtcccgagacctccaggngggtgacctggtgcttcggctgcgacaagacgcccgagggaagcacaagctcacgcccccctgggaggggccgttcgtcatcgccaaagttctgaagcccggaacatacaagctagccaacagtcaaggcgaggtctacggcaacgcctggaacatccaacagctacgtcgcttctacccttaa

SEQ ID NO: 114148 - DNA, 2382 bp, Zea mays
  Clone ID: MRT4577_35586C.1
atgggcagtctccagcaacctatccagcccgggacggtgctccgtttcgggagtcttgagttcatgtccctcgacggcagctacgacatgatactccttcccccgctgcgcgacagcgacaatggcggtcgacaacccgcccgctggcggggaaatcgacggcaccttccccacgtggtggaaggacgacattcgggcttgtctcgtcccctcccctgccaacggaggaggaggcagggcaaccaaggccaagcaggaggcaacacctcgtcggctgtcgagcgagtcgacggcgccggtgccccgacggggagcgcgtcgagcatcggcctcgcgtctgagacgaagacgagcgccgtcaccccgcaacacaccaacctcaagcaaacgaacgacaccagcacgctcgcgaaagacttgctgggcgtcaccctcatacctaagacgacggtgcagtcggtccctgacgcgacttcgtcaccgcccgttgaccaaaaggtaccgaccgattcccatctcgcgccttttggattcggcctcgacccgccaagcgactccgctttggtggacactctcatagaggcgagtctaaaccctccgaggtatcgtgtgcggtcaccctgggaccggctgacggccgactcgacctacgggccctcggggtccgaggaagatggcgagcccgacctctgttgggatttctccagacttggtaaccccagtgtcgtgcggggcctcatgaccacatgcgactactgcctttctgactgttccgacgggggtcccggcgaaggcaaccatcttggtatgccggagaacggtgatccccctaggcccgtgcctcgcgtcgacatccttcgggagctagctgtggtccccatcccggcggggggtcctgacccacagctcgagcaaatccgcgagatgcaggccaggctcgatgagggagcaggaacgcttgtgccgatccgctgggacatcaggcaggaatgggcgggccaacctccggccggagaagcgcgtcatctcccccagggcatccagcccagcgccgcatcaccgacgacgtcaggctgccgccagcagccgagagagtctctctgggactacatccggcgattctcgaagcagcgcaccgagctgcccaacgtcaccgatttggatgtcatcggcgcgttcctcgccggcaccacctgccgcgacctggtgagcaagctgggtcgcaagacccccaccagggcgagcgagctgatggacatcgccaccaagttcgcctctggccaggaggcggttgaggccatcttctggaaggacaagcagccccagggccgcccactggaagatgttcccaaggcgtcaactcagcgcggcaccaagaagaagggcaagaagaagtcgcaagcgaaacgcgacgccgccgacgcggaccttgtcgccgccgccgagtacaggaaccctcggaaacctcctggaggtgccaacctcttcgacaagatgctcaaggagccgtgcccctatcatcaggggcccgtcaagcacacccttgaggactgtgccatgcttcgacgccacttttacaaggccgggccacccacggagggtggcaaggctctcaacgacgctaagaaggaagatcacaaggcaggagagttacccgaggtccgcgactgcttcatgatctacggtgggcaagtggcaaacgcctcggctcggcaccacaagcaagagcgtcgggaggtctactcggccgaccatcccgaccatgtgccgagcctggaaacatacccgctcgttgtcgaccccatcatcggcaacgtcaggctcaccaaggtcctcatggacggaggcagcaacctcaacatcatctatgtcgagaccctcgggctcctgcggatcgatctgtcctcggtccggatgggcgccacgcctttccatgggatcatccccgggaagcgcgtccgacccctcggacaactcgatctacccgtctgctttgggacgccctccaactttcgaagggagaccctcacattcgaagtggtcgggtttcgaggaacctaccacgcagtgctggggaggccatgctacgccaagttcatggccgtccccaactacacctacctcaagctcaagatgccgggccccaacggggtcatcaccgtcgggcccacgtaccgacacgcttacgaatgcgacgtggagtgtgtggagtacgccgaggccctcatcgccgacctggagagcctctctagggaggcgccagacgtgaagcgccacgccggcaacttcgagccagcggagacggttaagtccgtccctctcgacccctgcaacgacgcctccaagcagatccggattggctccgagctcgaccccaaatag

SEQ ID NO: 114149 - DNA, 1812 bp, Zea mays
  Clone ID: MRT4577_35587C.1
atgggcttcagcgtcctgctctcaccgccgccccttccgctcccgagcgccaccgctgcggccgacttgtacctaatattcggcggccacgatcgccgccgccgccgcccgctggaacacggctgccgctgcggccgccccccggagacggcgctcggcggcagctcaggccgccgcggctcgtacgatgacgacgggacggctccaggctccctcggcctcgacggcagcagcacgtcctcctcggtccgtcggacgggtgagccgcgctggcttattagctatatcgtaattgtaaagcaattctgtgtggtaactgactgttgcaggaatttcttatggtcatccagaaaacattcaggagaccccttttttctaagcctggactaccaagggagtgcaaaaccaagatatcaagtaacttcgaaagaagaggacacacaaaatgcagaccgcgaggggtggcaatatagtacagaaggcctttcaaagagcatgtccaagtcaaggtacatcaaagtatttggggttgatttgtcccctgataatgtggctgttgctattgtttacttcgtgcaaggagttttaggcctttcgaggcttgctgtcagcttctacttaaaagataatcttcatcttgagccagcagagactgcagttatatctgggttctcagccttgccatggttggtcaagcccctctacggttttatcagtgattccatccctctctttggatatcgaagaaggtcgtacctatttctatcaggcatccttggagcactttcatggagtttgatggccgctgttgtggatgataaatatagtgcagcactctctattattcttggatctcttgcagttgccatatctgatgttgtggttgattctatggtggttgagagagctcgaggtgaatcacagagtacatctggatctctccagtcgctatgttggggatcctcagccttcggaggagtcgtgagtgcatacttcagtggttctttagtggatacttatggtttcactgatcatgtgtcccatgaatgcagatttgtttttggtgttacagcacttctgccactgatgacatctgctgttgcagttcttgtaaatgaagaacgcttacctttggggaaaagttcagtctcactttcagtttcagatttgggattcagtaaagcaacccagcatactcctacccaccttgttcatattcctttggcaagcaacaccgcaatcagactctgccatgtttttcttcatcgctcgccatccacgcccacgcaggccgcagctgccaccggccactcgctcggagatttgatctgctccaaccagcaaccaccacccctgggggaaaaggcgtcagcggtgcggttgctggcggctggccagcaaccaaaccacaccctaaaatgcatatttcctcaggttcttcttgtcactgggctcaaccggaagcttggcataagcgacgaatggttctccattggggattctttgattatcacagtccttggccaggcttcctttatgcctgtcctggtgttggctgcaaagttgtgccctgtgggagcggaagcaactttatttgccactttgatgtccatctctaacgccggaggtgttgccggaggtctggtgggcgcgggtctgacgcagttactgggagtcagcagagacaacttcgaaaaccttgctctgctgatcgcgatttgcaatctcagttccctgctacctctgcctcttctgggtctcctgccagatgaatcccgtaatgcagatggtgcacagaccaaaaatgactga

SEQ ID NO: 114150 - DNA, 1551 bp, Zea mays
  Clone ID: MRT4577_35588C.1
tttggggttgatttgtcccctgataatgtggctgttgctattgtttacttcgtgcaaggagttttaggcctttcgaggcttgctgtcagcttctacttaaaagataatcttcatcttgagccagcagagactgcagttatatctgggttctcagccttgccatggttggtcaagcccctctacggttttatcagtgattccatccctctctttggatatcgaagaaggtcgtacctatttctatcaggcatccttggagcactttcatggagtttgatggccgctgttgtggatgataaatatagtgcagcactctctattattcttggatctcttgcagttgccatatctgatgttgtggttgattctatggtggttgagagagctcgaggtgaatcacagagtacatctggatctctccagtcgctatgttggggatcctcagccttcggaggagtcgtgagtgcatacttcagtggttctttagtggatacttatggtgtaagatttgtttttggtgttacagcacttctgccactgatgacatctgctgttgcagttcttgtaaatgaagaacgcttacctttggggaaaagttcagtctcactttcagttccaagttcagaattaattgagagctctaagaaacgtatcatgcagatttgggattcagtaaagcaacccagcatactcctacccaccttgttcatattcctttggcaagcaacaccgcaatcagactctgccatgtttttcttcataacaaataagctcgggtttactccagaatttctaggacgcgttacgcttgtcacatctgttgcatccttactgggaatcggagtgtataatttgtttctgaaggaagttccattgaggaaaatctttcttgtgacaacagtcttaggttctgctctcggaatgacacaggttcttcttgtcactgggctcaaccggaagcttggcataagcgacgaatggttctccattggggattctttgattatcacagtccttggccaggcttcctttatgcctgtcctggtgttggctgcaaagttgtgccctgtgggagcggaagcaactttatttgccactttgatgtccatctctaacgccggaggtgttgccggaggtctggtgggcgcgggtctgacgcagttactgggagtcagcagagacaacttcgaaaaccttgctctgctgatcgcgatttgcaatctcagttccctgctacctctgcctcttctgggtctcctgccagatgaatcccgtaatgcagatggtgcacagaccaaaaatgactgatgcttgtatatctccacgcgtctttacaagacgaaagggcatacacatacactcatcggcacaaagcagcgcagctgatgacgtgaacaaaacatggaagctgatgtataggatgtattatctatgatgtatagtaagtaacgttagattaattatgaaacatatttgtaataaatttaattgaaagtataaatactccttttcataaaacaaggtttaaatttttttcgggcccacggtccg

SEQ ID NO: 114151 - DNA, 399 bp, Zea mays
  unsure (1)..(399): unsure at all n locations
  Clone ID: MRT4577_35589C.1
ccggncacggaaacccggggcgacccacgcgaacgagaccacaagcaagaacgacaccagagcgcagaagaacccgancgacaccaagaggggggggggcgaagcccacggggggggggcacccgcaacaagcgccacccccacgcaaacaaacggcgggagcggcagacagccaccgccgccggaacaacaaccgccgacggagcagccgccaacaccgggacaccagccacctacggagcagcgcccaccggcggaccaactgccgccgccgggccaccagccaccgacggaccaagagccgccgacggaacaacaggcgccgacaccaggccaccacccgaacaaaccgccccggccagagacaaagccccagccacacccaagcccaggccaaca

SEQ ID NO: 114152 - DNA, 333 bp, Zea mays
  Clone ID: MRT4577_3558C.1
gagaggccatgtatgcgcacaactaattttatcggcgggaagatacacccacaatcgcgcagattttcccgccaccacgtgtgcaacacgcctccactaccgcaccacaaaaccccgcaccactaagtactcctataaatgcctacgagcgtgcaggcactaacactaccaatcaggacaagactcgaagcccgcacaacgaaacgcgatttacagcagctaaagctcctgtggacattatgatcatgcgcctcctcctgtcaattctcgaagtgcaaccccaagccacgagcagacactgctccacagacacaccttccttggttctctccc

SEQ ID NO: 114153 - DNA, 263 bp, Zea mays
  Clone ID: MRT4577_35590C.1
accgccaatccgggcgacccacgcgtcagaaagggaatccatacaacaatgacactggaccaaatatttcctcttactccttgctcttctgatggtgtaacgcgacaatttcctaatgctacgcttatcttccttttcccataccttcaaagatgtcagatgtgaaaacccactttaaccctatagctcaacagcatgagagacatcctataccctgtcaacaatcgcgcctatttgggcagcatgtcaaaccatagccacac

SEQ ID NO: 114154 - DNA, 631 bp, Zea mays
  unsure (1)..(631): unsure at all n locations
  Clone ID: MRT4577_35591C.1
atacgncacttaccagcagtcaccactcctcataccagtaccgagtcctacgagcagtcgcacgcaagtgtcaagagacgaaacggtcgacatggctcgcacccaatctgccgtagcggtcgccgtggtggccgcggtgctgctgctagaaccggcgtcgacgacatctcaaaccgccatgacttgcaaagcagcgatgtcctacaaaactacctacctcaacttgttctgtgagaggagcaagtacacgctcataactccctccttcctatccgagcacccctggatcaatgcctccctggatcatggcattatcaattacctgatgattgtttgttgctcatcctaactgaacttggttcactcgtatcacaagaaatacaccttggtaataaatacaaaaggataggatacctttgtatccattctctagaagatctagatttctttacaagagatgacatatcaataaagacttctgtaatgctatatgagatcatataagataagctattgatattaaaggtatagccccttaatacagttttttctataataactcatgctatgaaacataatgattcgagattatgcgaatatatctaaaatactggtatgattcagagagtct

SEQ ID NO: 114155 - DNA, 789 bp, Zea mays
  unsure (1)..(789): unsure at all n locations
  Clone ID: MRT4577_35592C.1
attgctatcttcgccatccgctcctatctccatctttctgctcctccgcctcctacatgaccccggcgatcagaggtcgccatagtcaggattctcctatatgaccaactacctcctgaacgccgacattcgcctacaacgagatctacaccgacgaccttgggcacacgtccgagaggaacgtgcttcacccacatccctgaccgatcgctgacattggtgggcgagccatctcagcctcaggagagtggaagacatgagcatgcctgatgcacactgtgaatgcgtatacttatgctgagacgtatacagcttgcaaggatattgcctcctcttcacacgactgcgatattgcgctatcgtgaaccgaaatgtcaaccatctgactgatgtatcagaggctgaaaatgtgagtcatcttactatacgatggcaacactaaaatgatcttatactcacaccgtagagactctctcgagttctcagatgatggaaccattagaaatcatgaggatcttgatgcgactgtccacgactgctatgccacaagagcaaatctgctcgatgaatgacgtgggccccaagaaacttacctgtcttggaatactgtatctcaaaacctatatcgaaaacagaagtgtatccaggtatgctaccganacatccatctggcttgagctggctattgctatggcaaacacaagtgcaggaatcgctgcgagatgcaccgtgtctgcattatctgaggttacattctggacctgttattttctatgggtttatgccccc

SEQ ID NO: 114156 - DNA, 305 bp, Zea mays
  Clone ID: MRT4577_35593C.1
caatcaatctctaccaacagccacctacgattgagtacctccgcagagctagaagcagcgtggcgtatctattatgcacgtccacactgagggagggacaagggtcaaactcataaaaacagcgctactacatagacacccctaggcaagatccgcacgctgctgaatagggccagcatggcatccatggccaggatcttgccagtttaactactgagaaacaagagcgaagaacacctcaagccatacgtgagctgcgattcagcagcactgacgctactgaccacatcatatgtggtagccta

SEQ ID NO: 114157 - DNA, 310 bp, Zea mays
  Clone ID: MRT4577_35594C.1
ttcttttctggtattctttctgcaagaattctctgtgatctacctactacctgcttagtgagcttgggttcttctaatggcggggcgagctgcttactcttggcttattcaattgttcaactagtaccgcaaaattgttaattctacggctgtctatgattgagaaacctggcgctcacgaagattccgttttgtaaccattgtgtctaatgaggaacttgactaccctatctctgccctggattgacaagaattggaccggcggcctcttcgggtgaacctttcatcaaaacgaccacagaagggcttt

SEQ ID NO: 114158 - DNA, 124 bp, Zea mays
  unsure (1)..(124): unsure at all n locations
  Clone ID: MRT4577_35595C.1
cccctaagcagtctgcgtcttgtgtctgctgctgtagcggtagagcagagagagatcaaatgtaaattacatttttttcgcagaaaggacaaccaatttgtcgtgaatttgagcttnnnaaaaa

SEQ ID NO: 114159 - DNA, 2969 bp, Zea mays
  Clone ID: MRT4577_35596C.1
aaaaaaaaaaaaaaaaaaaaaaaaaaattcgagagagagacaacaaaaaatcaaacaggcatccaaaaagaagggagaggaagagggagggattgaaaagctagggttttcgccatggccattgcccacctcgagctcccctctctcgaatccacccttcccaagctctcctagctcccgcatctcgtatcttcacaaaaagcagacgcctttgattccccttcccgctgcgtcgcccccattcgagggttttccctccttccccaaatcgaatcgcagcattaccgaccgagcaagcaacccaccaacccacccgctttcaagggtccgagccgagcgacggcgctggcgatccagctgggcgtgagggcggcggaggcggccggataatcaatgtgtacgctgtgcgccgtgcagcggtggtcgcggcgcgtcgccaccatgctcccgtggctcgtcgtcccgctcatcgtcatctgggccgccactcagctgctcctcccggccgcctaccgcttcgaggtcacctccccgcgcctcgcctgcgtctccgtcctcctcctcaccctcttctggtacgagatcctcctcccgcgcctctccctctggcgctcccgccgctccgcgcgcctccgcgaggagcgccgggcccacgctctcgagctccataagctccgcaagactgcaacacggcgctgccgcaactgcagcaacccgtacagggaccagaaccctggcggtggtaagttcatgtgctcttactgcggtcatgtctccaagcgccccgtgctcgacctcaattcagccgggaaggcccctaccggatggccttgtgctcaggattgtggatattggctggacctgcgctgctcctctagcaataacagctccttcttgggattctcgtggcgcttactttcgtccttttgctcgacagcaatgaggtggttattaaggaatatattcagatttacattgtcaggggatggtgagggcttgagcatagatggtaaaaggttggcaaagagtggggagaatggaggaaaaaccgaggagagcaggaccaacaaggcgagaaggaaggcagaggagaagagactggcaaggctggagcgagaaatgctggaggaggaggaaaggaagcagcgagaggagatggctaagctagtagaggaacggaggaagctgagggatgaaaaggcagaggctgaagagcggtcaaaaagcgctacccctgttggggagaaggatgctaggagggaggtagagaagcggcgtcaggagaggaagaagaaagaggacaaggggtcaagtaaaagcaattcagattgtgaggacattgatagaagattggtccaagaaggcgatagaaagcgagactttgacagaaagagcgacttggacaggcgtgagagttacaagcctcgttacttcgatgctaacagtcacagtaataaaacaggtgagagcagatcgagatactttggccgtatgacaggtggttttttatcttcttcaagagggtttggcagcagttcattctttggcagaagtgctcaggcccctgcccctcaagttagcaaggttagtagacctgtagttcctgcaactgaccagggtaatacagtcaaaagagatgtccctcatgcagccacacaagctacaggcaaatctgctacagctggagaaactagaaatgcatggactaattttaatcgacctgttagtccaaatgtgcatccataccctactggccttaaaaagtcatggcatcagttatttagtcgttcagcatcagtgtctccttgtcctgacgttacaacttcagctcatgatatgattcggaaggcagaaccaaatggagctcaaatatacaatgctcatacatttctctctcagtatccgcctctggactacaagccaagttcaagccagtctatgcaatttccaggttttccaccgcttaatggagcacctcccagtaacccactacctcattttcctgctggacatatgcctttctatgatgatgcagaatcaacactacttgaagaaccagagcaatttgaggacccatgctatgatccagatgcaattgcattacttgggccagtttcagaatctctagataacttcccgtcggacttagattgtggatttttctcgagtgatgttgctaaagagtcacatgggtggccttcaccaattgagtctcctctctcaagatctcgtacggttgaagaaaagcctatcaagccctcgcactcatcagttgcaagaggttctggtggtcccattctgcctgtgactagcagtgaacaaggcacatggcaaatgtggagcacgccattggttcaggaaagtttaggtttgcaaggtcctcagagtcagtggtttcaacaaaacacaaatcaatttaaccatagtgctaaccttttcagtagtggaggcagggcaagaagtcccctgggtactggtttgaatgacagtgatccatggcttcagaaagcacctttccaacaattgccacctgatacatcaagcctgttcctttcacatgaaatgccaggaaaattgcacaatgacttggctttcgggtctccaaacaaatcagcccgcgaacacccctttgggccacctggttatttgttgcctaaggaggaactggtgctggatggagctcaggaaggcggcggcgggcatgttctgtcgccgtccggtgcacatgttggcttgttttctccaacaagtcctgatgtgcagccactgtggccattcagtgaaaaaagagagcatagaacgaacagacttttgtaatagaaggaagggaaaatgtggagccaaggcttccttgcctcctctcatgtagggtttacggtcggatataagctggactgtgttcctcttttttgcactgcattgggccttgtttcacctgatgatgttttatgcgcattgtttccgtcgct

SEQ ID NO: 114160 - DNA, 657 bp, Zea mays
  Clone ID: MRT4577_35597C.1
cgtcaaagtctgcagcacaatctgcgagtagccagacagccaatgagaaagctgctgctgatcctgtcacggatggaggaccatccgtatcagatccagatgcctggacggatgcacaggtcctggctctagtccaagctttgaaggcttttcccaaggatgcaagccaaagatgggagcgtgtggctgctgctgtcccaggtaaaaccgtagtccagtgcaagaaaaaagttgcggcaatgagagagaatttccggagcaagaaaagtggggagtaggcaagtgcaagaaaagcattgcctcgctggaagtacatttttcaagaaagagtctctggatggcaatgtttatagaatgtgttctgcatcttagctggcgaggtattgcttggcgaacctcatgccatatcaaatggagggagtatcttgcattagtgcactggttccgtagcaaactagagagccatatctgtttttattcatttatatttatatataactataagaatagataggaatatacattgtgagacctgttatcgaagtgagcattgtttttccgggccacactttgtagtggctagctacgtctgttcttgtagcatcttaaatgctacttaacacaattgctaatggccaggtcctgttccttattcct

SEQ ID NO: 114161 - DNA, 554 bp, Zea mays
  unsure (1)..(554): unsure at all n locations
  Clone ID: MRT4577_35598C.1
atgcttcgtggctgattcaggttcggttaaccgggtttcgtagggagtgtcggtgggagtgtcggtcatgtatgatatatatattttaagaaaaacttaantcttgtacttagttagaattctatggatatgtgaaatatgcctattgccgtggtgtaaaggggataggcgtgtggtggggcccggggcggtgttgtcgtcggcgtgagtgcgcggtacggaatactcacaatgcttttatattaaaggtgtagaattctgatgatccgactaggaccaggttgtggatctataattcctgggccgattgagctaaatgcatctaccttgagccttaattatgcccctagccgccgcacaaggaaggcgattcccgctcttcgaacagcgttgacgccttatacaccccgaagatacacaaataaggctactgctacactacaacttcttaattaacacgtgaacccctgaactacgcagatttctacggcgattacaccttgaactgccccgacacgacttgagactaaatggttggagaactctctaaccca

SEQ ID NO: 114162 - DNA, 168 bp, Zea mays
  Clone ID: MRT4577_35599C.1
atccactatgagagctagagcatcgcacgctgcactcttcttgctgggagcagctgcaattggggcgagggcgcctctcatgacctccttatcacctctggcgatggctccttatggcctgcaggacctctgtcgccgcgcgtattccttgactgatttttggtgcca

SEQ ID NO: 114163 - DNA, 1153 bp, Zea mays
  Clone ID: MRT4577_3559C.1
cattcctcgtgtagaaatcgcagcccttttgctataccaatagcaatagcatacctcttgtgccactctaataagcttgccgacttgtcaaataaatgccactcgagagaattgttgcatatatactcatacaccaagatgttatagctttctttgcagcagtacccaagcagcatgacaatatttcggtgtcgagcaaaactgagaacttgcacttccgagaagaattcagtataaccctgtgagctagcttctttgtgcaccttggctgcaatgacctgaccatccttgagctggcccttgtacacatgcccaaatccaccctcacccagcaaattttcacttgaaaaatccgatgttgcagtttgaatctccgagaatgggaatttcatggattcctttatgtacagaactgattttagaccgcagccaatgcacaaaactggcctttctgatgaatcatattgggagctcattttatcttcgtatttttcattaggtagggattccatatcgtcaattgtgagagacatgccactgaagtatggcatgctgcatgcagccacgctggaggtctcatggatctcgtgcttgttcagagaggcaaggtagcttacaggcgacgacctgattgataccttgcgagtgtcaccatttactgtttcagaactcagatccatcgtgaccgcaaaacgttgcaggtcctccaattcatatgtgcttttgtttgatggatttgttcgtattgacctcaaggattgcacttgtaagtgatcctgaaatgtcgcaactttgcaagctatgtgtttttctaagtgcttgaaatctctccggaagtgcctatctaggacaacccaagaagctttgctggaatttacttcatggataatgaaaacctttgcaggtgctcccggggttatcttgagggtcacagtaatcttaacattgtggagcatctctataacttgttggagcttatttttgtaggattcagctatgttcgccacctgatcaagtaggtatctgtcgcttgtcccgacaaaagattcagtaaacggtttggtttggtagcccattggatgggtgatggagtgaagcacgcccagcacgagcagcgaatccctcgcgcggagtatgtccctcgtgccgaatt

SEQ ID NO: 114164 - DNA, 672 bp, Zea mays
  unsure (1)..(672): unsure at all n locations
  Clone ID: MRT4577_355C.1
ttcaaatagaacgtggcaagtggctcctaaagcaagctcgattgttgcaagcttgtcaaacacattaaactcttacctttgggaaagcgagaagaatacatccagaaaggttgctccaaacattgcaagtagaaagaaactcctagataaacttgtccgtgaaccaattgatggaaatgcttggcatgcagatcacatgatacctggttataaaggaggaggggaatgtaaactcgagaacatgagaacactgtgtgtggcttgtcattatgaggtcaccagaactcagcacaaggaactaaaagaaataagaaagaaggctaaagagcacttgaaaaacgccttgaataaacaaaaggataaaccaagtgaagcaacagaagaactagatgacgaatcgttgctgatagctgtcccgggtagtgcctactccttcgcatttcctggcaacggatctgatgaaaaggctgctgaatagggcatgtttcatttaccttgattattgttcaaaaagggcgctggtattttttagctcgcgtcctttttttgtacatgttaaatgctaccaagcgtttgtaagctgttcggctgctcttataagcagcactgataagctncantatcgcccctgcagagctagaaccatcacaaaaaaaacacaanccaaactaa

SEQ ID NO: 114165 - DNA, 253 bp, Zea mays
  Clone ID: MRT4577_35601C.1
acgcccgcggttccggtccggaattcccgggtcgacccacgcgtccgcagatgttaagtagcactcaacagcacagtcaaatgtaacaggtacttttctgctaaattagtagactcaagcatagtaggccttcgccgagggaaaccgagtttcccttcagcacacaggctctccacactgttgacccagggccagcttcatactttgggtttagcactgtcgtctggttcttggacacacgctactgtagatt

SEQ ID NO: 114166 - DNA, 986 bp, Zea mays
  Clone ID: MRT4577_35602C.1
cctcgaggccggccgggagcagactccgctagcttcagacagaccaaaaaccgtctctccgtcgatagccgtgcgctcatgtacccgcgcgtgaactcagacgcgctgccggccctgggcagccttgagatggggcacgccgcccacgctgttgcgtatccgccgctgccgccggtggagatcattcccgtgaccgtgatccagcagcggcacggcgggcgggcgccggacccggacaggagcagctgcgaggaccatgtcccccgcacgctggtggtggcggccacgctgatcacgatgctcgccttcctgctcggctccagcgtccccggcgggtactggccgcaggacacaccgtcgagggacggcggcaagctgtaccgcgccggggaccccatcatgcgcgacctgcaccggccgaggtactgggtgttcagagtggcgagctggttcggggtcgcgagctcgatggtgctcacgctgagcctgctgctgaggatggccgcgacctcgcgccacgtgcggtggtcgttcgcggtggcctacgctagcttgctcctcaccttcgcggcgtcgcagaccaagacgcacctgtcgctggacatcatcctctgcctcgtcgtcctctttgtctcctggctcatcaccagcgtccgcgaggagaaccgcgcgtgcatcatgaaggtgctctgctgcagcagccgggacaactgagcaaaacatatttccagcaccagcaccgttcattcctctttcttaacttttgcttgttcataggtgatgcgatacttgcttaattttaactggtttttctcagctagtagcctagtacccatgagaaagtcacaaagatattttacgtgcaagcagtgttatgtactctatctgtccttgctattgctgtgagagaaattagcatggctatgtaaatctaagaaaataagagtttgtagaaattatttggatctgttattctttgatctagc

SEQ ID NO: 114167 - DNA, 404 bp, Zea mays
  Clone ID: MRT4577_35603C.1
cccacgcgtccgcggacgcgtggggtgatccccacctccgcgcggttagtaaatcccattgatagattcgagcgcgctgttgatgaggtcgccgtggctgcgcatgtgcctcttgccgcgcgcccctcctgcggcttccacctacaccgggtgttctccgccgcgcatccgccaccaccggcggcgccgaggacatccccgtcgcttcaatagccgcgcgaggacacgtgtcatctgaaaagcaagttggtaactggaatctcaagtgccaggacaagtacaggtggttcaggaggagccacaaggcgaggagtttgttctgatctaggtggcgttcccagttgactttggcgccgatgatccttagttcgttttatgtttattcttttattttgtaataagtc

SEQ ID NO: 114168 - DNA, 2949 bp, Zea mays
  Clone ID: MRT4577_35604C.1
atgggcagtctccagcaacctctctggcccgggacggtgctccgtttcgggagtcttgagttcatgtccctcgacggcagctacgacatgatactccttcccccgccgtgcgacagcaacaatggcggccgacagcccgcccgccggcggcggaatcgacgacgtcttccccgcgtggtggaagaacaacattcgagctcaccccgtcctctcccccgccgacggaggaggaggcggggcaaccaaggccaagcaggaggcagcgcctcgtcggctgtcgagcgagtcgacggcgccagcgccccaacggggggcacgtcgggcatcgacctcgcgtttgagacgaagacgagcgtcgtctccccgcaacacgccgattccgagcaaacggacgacgccagcacgctcgcgaaaggcttgctggacgtcaccctcgtacctgagacgacggtgcagtcagtccccgacgtgacttcatcactgcccgtcgacaaagaggaccggctgacggacgtctcgacctacgggccctcggggtccgaggaagatgacgagcccgatgtctgttgggatttctccggacttggtaaccccagtgccatgcgggacttcatgaccgcatgtgactactgcctttccgactgttccgacggtagccgcagtctcggcgacgaggactgcggcccaagtcgtgaatgtttccacatcgatctaggggtccctctgaaggcaaccatcttggcggggggtcatgacccacagcttgagcaaatccgcggggtgcaggccaggcttgacgagggagcaggagcacttgagccggtccgccgggacgtcgggcaggaatgggcgggccaacctccggccggagaaatgcgtcatctaccccagggcttccagcaccgcatcgccgacgatgccaggatgaggccgccacccgcttccagtggggtcggccagaacctggctgcagcagcaatgcttctccgtgcgatgccggagccatcaaccaccgaggggcggcgaatccagggagagctcaagaatctcctggagggcgccgcggtccgacgggccgagagctccgcctcccgaaggcaggagtacccctcggaacatcgcgccacgacttcccgattcatgcgggaagcctcggtccacaccgggcgcacgcgcaacacagcgcctgcggccccgggtcgcctcggcaatgagcaccatcaccgcgaccgtcgggcccacctcgacgagagggtgcaccgaggctaccaccccagacgtggaggacgctacgacagcggggaggatcggagtccctcgcccgaaccacccggtccacaggccttcagccgggccatacgacgggcgccgttcccgacccggttccgacccccgactactatcacaaagtactcgggggagacgagatcggagctgtggctcgcggactaccggctggcctgccaactgggtggaacggacgatgacaacctcatcatccgcaacctccccctgttcctctccgacatcgctcgcgcctggttggagcacctgcctccggggcagatctccaacggggacgacctggtccaagcattcgccggtaatttccagggcacgtacgtgcaccccagaaattcctgggaccttcgaagctgccgacagcagccgggagagtctctccgggactacatccggcgattctcgaagcagcgcaccgagctgcccaacatcaccgattcagatgtcatcggcgcgttcctcgccgacaccacctgccgtgacctggtgagcaagctgggttgcaagacccccaccagggcgagcaagctgatggacatcgccaccaagttcgcctctggccaggaggcggttgaggctatcttccggaaggacaagcatccccagggccgcccaccagaagacgcccccgaggcgtcaactcagcacggcgccaagaagaagggcaagaagaagtcgcaagcgaaacgcgacgccgccgacgtggaccttgtcgccgccgccgagtacaagaaccctcggaaaccccccggaggtgccaacctcttcgacaagatgctcaaggagtcgtgcccctatcaccaggggcccgtcaagcacacccttgaggagtgcgccatgcttcggcgtcacttccacagggccgggccacccgcggagggtggcagggctcgcgatgacgacaagaagggagatcaccaggcaggagagttcctcgaggtggcggcgccagtctacctagactggtccgacaagcccatcaccttcgaccaagccgaccaccccgaccacgtgccgagcccggggaaatacccgctcattgtcgaccccgtcatcggcgacgtcaggctcaccaaggtcctcatggacggaggaagtagcctcaacatcatctacgtcgagaccctcgggctcctgcgtgtcgatctgtcctcggtccgggcaggcgctgcgcctttccatgggatcatccccgggaagcgcatccagcccctcagacaactcgaccttcccgtctgcttcggaatgccctccaacttccgaagggagaccctcacgttcgaggtggtcgggttccgaggaacctaccacgcggtactggggaggccatgctacgcgaagttcatggtcgtccccaactacacctacctcaagctcaagatgccgggccccaacagggtcatcactgtcggccccacgtacaaacacgcgttcgaatgcgacgtggagtgcgtggagtacgccgaggccctcgccgagtccgaggccctcatcgccgacctggagagcctctctaaggaggtgccagacgtgaagcgtcacaccggcaacttcgagccagcggagacagttaagtctgtccccctcgaccccagcagcgacgcctccaagcagatccggatcggctccgagctcgatcccaaatag

SEQ ID NO: 114169 - DNA, 5631 bp, Zea mays
  Clone ID: MRT4577_35605C.1
atggactccgcctcgcccgaccccagggctcggactcagcctcggctccggaagacgacaaactccgcctcgcccgactccagggctcggactcgggctcggcaccggaagacgacgaactccgcctcgcccgaccccagggctcggactcagccttggcctcggacgacggtctccgcctcgcccgacccggggctcggactcgacctcgacctcggaagacagactcaacctcaacctcggaggagcctccgcctcgcccgacctagggctcgggccgaccacgtcacaggaggggccatcattaccctacccctagctcgctcaggctacgggggacaagaccggcgtcccatctggctcgccccgcttcccgtcaagctccagatgggtagtctccagcaacctttccaacccgggacgattctccgtttcgggagtcttgagttcatgtccctcgacggcggctacgacatgatactccttcctccgccgcgcgacagcgacaatggcggccgacagcccgcccgccggcggcggaatcaacgacgtcttccccacgtggcggaagaacaacattcgggtttgtcccgtcgcctcccccgccgacggaggaggaggcggggcaaccatggccaagcaggaggcggcacctcgtcggctgtcgagcgagtcgacggcgccggcgctccaatgggggacgcgtcgggcgacgacctcgcgtctgagacgaagacgagcgccgtttccccgcaacacgccaactccgagcagacgaacgacgccggcacgctcgcgaaggacttgctggacgtcgccgtcgtacctgagacgacagcacagtccgcccctagcgcgacttcgtcaccgcctgtcgaccaagagcctcgacccaccaagcgactttgcttctttggaggccttcatagaggcatctccaaaccctccgggtaccgtatgcggtcgccctgggacagactgacgaccgcctcgacctacggaccctcgggttccgaggaagatgacgagcccgacctttgttgggatttctccaggctcggtaaccccagtgccatgcggaacttcatgaccgcatgcgactactgcctttccgattgttccgacggtagccgcaacttctgcgacgaggactgcggcccaagtcgcgaatgtttccacgtcgatctagggggtcccggcgaaggcaaccaccttggtataccgaaaaacggcgatacccctaggcctgcgcctcgcgttgacatccttcgggagctagttgtggtcccggtccctgcgggggtcaggacgcacagctcgagcaaatctgcgagatgcaggccaggctcgacgagggagcaggaacacttgagcagttccggcagaacatcgggcaggaatgggcagaccaagctccggccggagaagcgcgtcatctaccccagggcatccagcaccgcattgccgacgacgtcagggcaaggccgccaccggcttccagtggggtcggccagaacctggttgcagcagcgctacttctccgcgcaatgccggaaccatcgaccaccgaagggcggcgtatccagggagagctcaagaatctcctggagaatgtcgcggtccgacgggccgaaagctctgcctcccgaaggcaggggtaccccctcggagcatcgcgccgcgacttcccgatttatgcgggaagcctcggtccacaccgggcgcacgcgcaacacggcgcctgcggccccgggtcgcctcggcaacgagcaccaccaccgcaaccgtcgaacccacctcgacgagagggctttcagccgggccatacgacgggcgccgttcccgacccggttccgaatcccgactactatcacaaagtacacgggggagacgaggccggaactgtggcttgcggactaccgactggcctgccagctgggtggaacggacgatgacaacctcatcatccgcaacctccccctgttcctctccgacaccgctcgagcctggctggagcacctgcctccggggcaaatctccaactgggacgacctggtccaagctttcgccggcaacttccagggcacgtacgtgcgccctgggaaatcctgggatctccgaagctgccgccagcagccgggagagtctctccgggactacatccggcaactctcgaagcagcgcaccgagctgcccaacatcaccgactcggatgtcatcggcgcgttcctcgccggcaccacctgccgcgacctggtgagcaagctgggtcgcaagacccccaccagggcaagcgagctgatggacatcgccaccaagttcgcctctggccaggaggcgggccgccagccggaagatgtccccgaggcgtccactcagcgcggcaccaagaaaaagggcaagaagaagtcgcaagcgaaacgcgacgccgccgacgcagaccttgtcgccgccactgagtacaagaaccctcgaaaacctcccggaggtgccaatctcttcgataagatgcttaaggagccgtgcccctatcatcaggagcccgtcaagcacaccctggaggagtgcgtcatgcttcgacgccactttcacaaggtcgggccacctgcggaaggtggcagggcccacaacaacgacaagaaggaggatcacaagacagaggagttccccgaggtccacgactgcttcatgatctacggtgggccagtggcgaacgcctcggctcggcaccgcaagcaagagcgtcgggaggtctgctcggtaaaggtggcggcgccagtctacctagactggtccgacaagcccatcaccttcgaccagggtgaccaccccgaccgcgtgccgagcccggggaaatatccgctcgttgtcgaccccgtcatcggcaacgtcaggctcaccaaggtggtcgggttccgaggaacctaccactcagcactggggaggccatgctacgccaagttcatggccgtccccaactacacctacctcaagctcaagatgtcgggccccaacggggtcatcaccgtcggccccacgtaccgacacgcatacgaatgcgacgtggagtgcgtggagtacgccgaggccctcgccgaatccgaggccctcatcgccgacctggagagcctctccaaggaggcgccagacgtgaagcgccatgccggcaacttcgagccagcagagacgcagcctctgcgccgattcgacgaagaaaagcgcagagccataggcgaggagatccacaagctgatggctgcagggttcatcaaagaggtattccatcccgaatggtttgccaaccctgtgcttgtgagaaagaaagaagggaaatggcggatgtgtgtagactacactggtctaaacaaagcatgtccgaaggttccctaccctctgcctcgcatcaatcaaatcgtggattccactgctaggtgcgaaaccctgtctttcctcgatgcctactcagggtatcaccaaattaggatgaaagagtccaaccagctcgcgacctctttcatcacaccttttggcatgtactgctacgttactatgccatttggtttgaggaatgcgggtgcgacataccaaaggtgcatgaaccacgtgttcggcgaacacattggtcgaacggtcgaggcttacgtcgatgacatcgtagtcaagacgaggaaagcctccgacctcctctccgaccttgaaacgacattccggtgtctcaaggcgaagggcgtaaaactcaatcccgagaaatgtgtcttcggactcccagaggcatgctcttgggaagctgctgtacgcggtgattctgacgcggcggaagttgcgacactacttcgagtctcatccggtgactgtggtgtcatccttcccctgggggagatcatccagtgccgagaggcctcgggtaggattgcaaagtggacggtggaaatcatgggcgagacaatctcgttcgcccctcggaaggccatcaagttccatgtcttggcggactttgtggccgaatgggtcgacacccagcttccgctgatgaaaacaggggcgggcgcgggcctgctcttcatctcgcccctcgggaagcacctccgctacgtgctgcgcctccatttcccagcgtccaacaacgtggctgagtacgaggctctggtcaacgggttgcgcatcgccatcgagctaggggtccgacgcctcgatgctcgcggtgactcacagcttgtcatcgacgaagttatgaagaactcccactgctgcgacccgaagatggaagcctactgcgatgaggttcggcgcctggaggacaagttctacgggctcgagctcaaccacattgcccgacgatacaacgagactgcggacgaactggctaagatagcctcgggacggacaacagttcctcccgatgtcttctcccgagacctacatcaaccctcagtcaagaccgacgacacgcccgagcccgagaaggcctcggccctgcccgaggcaccctcggctcagcccgaggcaccctcggcccccgagggtgaggcactgcgcgtcgaggaagagcggaatggggtcccgcctaatcgagactggcagaccccgtacctgcaatatctccaccaaggagagctgcccctcgaccgagtcgaagctcggcgactggcgcggcgcgccaagtcgttcgtcttgctgggggacggaaaggagctctaccaccgcagcccctcaggcatcctccaacgatgcatatccatcgccgaaggccaggagttattacaagaaatacactcgggggcttgcggtcatcatgcagcgcctcgagcccttgttggaaacgctttccgacaaggtttctattggtcgaccgcggtggccgacgccactagaattgtccgcaccagccaagggtgtcaattctatgcaaggcagacccacctgcccgctcaggctctgcagacaatacccatcacctggtcgtttgctgtgtggggtctggacctcgtcggtcccttgcagaaggcacccgggggctacacgcacctgctggtcgccatcgacaaattctccaagtggatcgaggtccgacccctaaacagcatcaggtccgaacaggcggtggcgttcttcaccaacatcatccatcgcttcggggtcccgaactccatcatcaccgacaacggcacccagttcaccagcagaaagttcctggacttctgcgaggatcaccacatccgggtggattgggccgccgtggctcaccccatgacgaatgggcaagtagagtgtgccaacggcatgattctgcaaggactcaagccacagatctacaacgacctcaacaagttcggcaggcgatggatgaaggaactcccctcggtggtctggagtctgaggacaacgccgagccgagccacgggcttcacaccgttctttctagtctatggggctgaggccatcttgcccacagacttagaatacggttccccgagggcgagggcgtacgacgaccaaagcaatcagaccaaccgagaagactcactggaccagctggaagaggctcgggacacagccttactacactcgacgcggtatcagcagtccctgcgacgctaccacgcccgaggggttcggtcccgagacctctag

SEQ ID NO: 114170 - DNA, 3114 bp, Zea mays
  Clone ID: MRT4577_35606C.1
atgggcagtctccagcaacctctccggcccgggacggtgctccgtttcgggagtcttgagttcatgtccttcgacggcagctacgacatgatactccttccaccgccgcgcgacaacgacaatggcggccgacaacccgcccgccggcggcggattcgacgacatcttccccgcgtggtggaagaacaacattcgagctcgctccgtcctctcccccgccaacggaggaggaggcggggcaaccaaggccaagcgggaggccgcgcttcgtcggccgtcgagcgaatcgacgcccccgacgccccgacggaaggcacgccgggcgtcgacctcgcgttcaagacgaaggcaagcgtcgtccccccgcgacacgctgatcccgagcaagatgacgacgccagcgcgctcgcggaaagcttgcaggacgtcgccctcgtacctaggacgacggtgcaaccattccccgatgtgactacgtcgctcctcgtcgaccaaaaggtactgactaactcccatcttacgtcatttcgactcggcctcaacccgcctagcaaccttgctttgacgggcgctctcattgaggcgagtgcaaccccactggggtttcgtatgcggtcgccttgggaccggttgacggacgtctcaacctacgggccctctgggtccgaggaagatgacgatcccagcatctgttgggatttctttggacttggcaaccccagtgccatgtgggacttcatgaccgcatgtgactactgcctctccgactgttccgatggaagccgcagccttgacgacgagggctgcggcccaagccgcgaatgtttccacatcgagctaggggatccctccgaaggcaaccatttcggcatgccggaggacggcgatcttcctaggccggcgcctcgcgccgacatcccgcgggagctagctgtggtccccgttccggtggggggtcacgacccacaactcgagcaagtccgcgaggcgcaggccaggctcaacgagggaacaggagcgcttgagccgatccgtcgggacatcggacaggtatgggcgggccaaccctcggccggagaaatacgtcacctgccccaaggtctccagcaccgcgtcgccaacgatgtcagggtcaggccgccgcccgcatctagcggggttggtcagaacctggcagccgcagcgatgctcctccgcgcgatgccggaaccatcaactaccgagggtcggcgaatccagggagagctcaagaatatcctggaaggcgctgcggcccgacgggctgagagcactgcctcccgaaggcagggatacccctcagaacctcatgccgcgacttcccgattcatgcgggaagcctcggtctacaccgggcgcacgcgcaacaccgcgcctgcggccccgggccacctcggcaacgagcaccatcgacgcgatcgtcgggcccacctcgacgaaaggggtgcgccgaggctaccaccccaggcgtgggggcgctacgacagcggggaggatcggagtccctcgcccgaaccacccggtccgcaggccttcagtcgggccatccgacgggcgccattcccgacccggttccgacccccgactactatcacgaagtactcgggggaaacgagaccggaactgtggctcgcggactaccgcctggcctgccaactgggtggaacggacgacgacaacctcatcatccgaaacctccccctgttcctctccgacactgctcgcgcctggttggagcacctgcctccggggcagatctccagctgggacgacttggtccaagccttcgccggcaatttccagggcacatacgtgcgccccgggaattcctgggaccttcgaagctgccggcaacagccgggagagtcgctccgggactacatccggcgattctcgaagcagcgcaccgagctgcccaacatcaccgactcggatgtcatcggcgcgttccttgccggcactacttgccgtgacctggtgagcaagttgggtcgcaaaacccccaccagggcgagcgagctgatggacatcgccaccaagttcgcctctggccaggaggcggtcgaggctatcttccgaaaggacaagcagccccagggccgcccatcggaagaggctcccgaggcgtctactccgcgcggcgccaagaagaagggcaagaagaagtcgcaatcgaaacgcgacgccgccgatgcggaccttgtcgccgccgagtacaagaaccctcggaagccccccggaggtgctaaccttttcgacaagatgctcaaggagccgtgcccctatcatcaggggcccgtcaagcacactctcgaggagtgcgccatgcttcggcgccacttccacagggtcgggccacccgcggagggtggcagggcccacgacgacgacacgaaagaagatcaccaagcaggagaataccccgaggtccgcgactgcttcatgatctacggtgggcatgcgacgaatgcctcggctcggcatcgcaagcgagagcgccgggaggtctgctcggtgaaggtggcggcgccagtctacctagactggtccgacaagcccatcaccttcgaccaggctgaccaccccgaccacgtgccgagcccggggaaatacccgctcgtcgtcgaccccgtcatcggcgacgtcaggctcaccaagcccctcggacgactcgacctccccgtctgcttcggaacgccctccaacttccgaagggagaccttgacgttcgaggtggtcgggttccgaggaacctaccacgcggtactgggaaggccatgctacgcgaagttcatggtcgtccccaactacacctacctgaagctgaagatgccgggccccaacggggtcatcaccgtcggccccacgtacaaacacgcgttcgaatgcgacgtggagtgcgtggagtacgccgaggccctcgccgagtccgaggccctcatcgccgacctggagaacctctccaaagaggtgccagatgtgaagcgtcatgccggcaacttcgagccagcggagacggttaaggccgtcccactcgaccccagtggcgacgcctccaagcagatccggatcggttccgggctcgaccccaaatag

SEQ ID NO: 114171 - DNA, 1839 bp, Zea mays
  Clone ID: MRT4577_35607C.1
atgctattggggttcctcgtctccgagtggtgcatcgaggccaacccggagaagatcgcggacatcaccagcatggggcccatcaaggacttgaaaggcgtacagagagtcacgggatgccttgcggctctgagccgtttcatctcgcgcctcggcgaaagaggcctgcctctgtaccgcctcttaaggaaggccgagtgcctcacttggacccctgaggccgaggaagccctcgggaacctgaaggcgctcctcacgaacgcgcccatcttggtgccccccgctgccggagaagccctcttgatctacgtcgccgcgaccactcaggtggttagcgccgcgattgtggttgagagacgagaagaggggcatacattgcccgtccagaggccagtctacttcatcagtgagttgcgacactacttcgagtctcattcggtaactgtggtgtcatccttccccctgggggagatcacccagtgccgagaggcctcaggtagaattgcaaagtgggcggtggaaatcatgggcgagacgatctcgttcgcccctcggaaggccgtcaagtcccaggtcttggcggactttgtggctgaatgggtcgacacccagctcccaacagctccgatccaaccggaactctggaccatgttcttcaacgggtcgctgatgaagacaggagcaggcacaggcctgctcttcatctcgcccctcgggaagcacctacgctacgtgctacgcctccatttcccggcgtccaacaatgtggccgagtacgaggctttggtcaacgggttgcgcatcgccatcgagctagggatccgatgcctcgacgctcgcggtgactcgcagctcgtcatcgaccaagtcatgaagaacacccactgccgcgacccgaagatggaagcctactgcgatgaggttcggcgcctggaagacaagttctacgggctcgagctcaaccacatcgctcgacgctacaacgagactgcggacgagctggctaaaatagcctcggggcgaacaacggttcccccggacgtcttctcccgagacctgcatcaaccctccatcaagaccgacgacacgcccgagcccgagaaggcctcggcccagcccgaggcaccctcggctcagtccgaggtaccctcggctcagtccgaggtaccctcggctcagtccgaggctccctcggctcggcccgaggcaccctcggctcggcccaaggatcaccacatccgggtggactgggccgccgtggctcaccccatgacggatgggcaagtagagcgtgccaacggcatgattctgcaaggactcaagcctcggatctacaacgacctcaacaagttcggcaagcgatggatgaaggaactcccctcggtggtctggagtctaaggacaacaccgagccgagccacgggcttcacaccgttctttctagtctatggggccgaggccatcttgcccacagacttagaatacggttccccgaggacaagggcctacgccgaccaaagcaatcgagctaatcgagaagactcactggaccagctggaagaggctcgggacatggccttactacactcggtgcggtaccagcagtccctacgacgctaccacgcccgaggggtttggtcccgagacctccaggtgggcgacctggtgcttcggctgcgacaagacgcccgagggcggcacaagctcatgcctccctgggaagggccgttcgtcatcgccaaagttctgaagcccgggacgtacaagctggccaacagtgaaggcgaggtctacagcaacgcttggaacatccaacagctacgtcgcttctacccttaa

SEQ ID NO: 114172 - DNA, 1479 bp, Zea mays
  Clone ID: MRT4577_35608C.1
atgggatgtctcgcggctctgagccgcttcatctcacgcctcggcgaaagaggtctgcctctgtaccgcctcttaaggaaggccgagagcttcacttggacccctgaggccgaggaagccctcgggaacctgaaggcgctcctcacgaatgcgcctatcttggtgcccccagctgctggagaagccctcttgatctacgtcgccgcgaccactcaggtggttagcgccgcgattgtggtcgagagacgagaagaggggcatgcattgcccgttcagaggccagtctacttcatcagcgaggtactgtccgaaaccaagatccgctacccacaagttcagaagctgctatacacggtgatcctgacacggcggaagctgcgacactacttcgagtctcatccggtaactgtggtgtcatccttccccctgggggagatcatccagtgccgagaggcctcgggtaggattgcaaagtgggcgatggaaattatgggcgaagcaatctcgttcgcccctcggaaggccatcaagtcccaagtcttggcggacttcgtggctgaatgggtcgacacccagctcccaacagctccgatccagccggagctctggaccatgttcttcgacaggtcgctgatgaagacgggagccggcgcaggtctactcttcatctcgcccctcgggaagcacctacgctacgtgctacgcctccatttcccggcgtccaacaatgtggctgagtatgaggctctagtcaacgggttgcggatcgccatcgagctaggggtccgacgcctcgacgctcgtggtgactcgcagctcgtcatcgaccaagtcatgaagaactcccactgccgcgacccgaagatggaggcctactgcgatgaggttcggcgcctggaagacaagttctacgggctcgagctcaaccacatcgcccgacgctacaacgagactgcggacgagctggctaaaatagcctcggggcgaacaacggttcccccggacgtcttctcccgagacctgcatcaaccctccgtcaagaccgacgacacgcccgagcccgaggcgccctcggcccagcacgaggtaccctcggctcagtccgaggcaccctcggctcggcccgaggtaccctcggtccccgagggtgagacactgcacgtcgaggaggagcgaagcggggtcacgcctagtcaaaactggcagaccccgtacctgaaatatctccaccgaggagagctacccctcgaccgagccgaggctcggcggttggcgcgacgcgccaagtcgttcgtcttgctgggagatgggaaggagctctaccaccgcatcccctcaggcatcctccagcgatgcatctccatcgccgaaggtcaggaactcctacgagagatacactcgggggcttgcggccatcacgcagcacctcgagcccttgttggaaacgccttccgacaaggtttctactggccgacgtga

SEQ ID NO: 114173 - DNA, 2721 bp, Zea mays
  Clone ID: MRT4577_35609C.1
atggcggaagaacaacatccgggtttgtcccgtcacctcccccaccgacggaggaggaggcggggcaaccatggccaagcaggaggcggcacctcgtcggctgtcgagcaagtcgacgacgctggcgccccagcgggggatacgtcaggcttcgaccttgcgtctgagacgaagacgagctccgtttccccgcaacacgccaaccccaagcagacgaacgacgccagcacgctcgcgaaggacttgctgggcgtcgccctcatacctgagacaacggtgcagtccgcccctgacgcaacttcgtcaccgcccgtcgaccaagaggtaccgaccgattcccatctcgtgccttttggattcagcttcgacccaccaagcgacctcgcttcggtggaagccttcatagaggcatgtaccaaccctccggggtaccatatgcggtcgccctgggacagattgacggccgtctcgacttacggaccctcgggtttcgaggaagatgacgagcctgacttttgttgggatttctccgggctcggtaaccccagtgccatgcgggacttcatgaccgcatgcaactactgcctctccgattgttccgatggtagccacaacttcgacgacgaggactgcggcccgagtcgtgaatgtttccacgtcgatctagggggtcccggcgaaggcaaccatcttggtatgccggagaacggtgatccccctaggcctgcgcctcgcgttgacatccttcgggggctagctgtggtcccagtccctacatgggatcaggatgcacagctcgagcaaatccgcgagatgcaggccaggctcgacgagggagcaggaacacttgagcagttccgacggaacttcggggcaaggctgcaaccggcttccagtggggtcggccagaacctggctgcagcagcaatactactccgcgcgatgccggaaccatcgaccaccgaagggcggcgtatccagggagagctcaagaatctcctggaggatgccgcggtccgacgggccgaaagctctgccccccgaaggcaggggtacccctcggagcatcgcgccgtgacttcccgattcgtgcgggaagcctcggtccacaccgggcgcacgcgcaacacggcgcctgcggccccgggtcgcctcggcaacgagcaccatcgccgcgaccgtcgagcccaccttgacgagagggtgcgccaaggctaccaccccaggcgtgggggacgctacgatagtggggaggttcggagcccctcgcccgaaccacccggtccgcaggcttacagccgggccatacgacgggcgtcgttcccgacccagttccgaaccctgactaccatcacaaagtactcgggggaaacgaggccggaactgtggctcgcagactaccgactggcctgccagctgggtggaacggacgatgacaacctcatcatccgcaacctccccctgttcctctccgacaccgctcgagcctggctggagcatcttcctctggggcagatctccaactgggacgacctggtccaagccttcgccggcaacttccagggcacgtaccgcaccgagctgcccaacatcaccgactcggatgtcatcggcgcgttcctcgccggcaccacttgccgcgacctggtgagcaagctgggtcgcaagactcccaccagggcgagcgagctgatggacatcgccaccaagttcgcctctggccaggaggcggttgaggccatcttccgaaaggacaagcagccccagggccgccagccggaagacgtccccgaggcgtccgctcagcgcggcaccaagaagaagaacaagaagaagtcgcaagagtgcgtcatgcttcggcgccactttcacaaggccgggccaccggcggaaggtggcagggcccacaacaacgacaagaaggaggatcacaaggcagaggagttccccgaggtccacgactgcttcatgatctacggtgggcaagtggcgaacgcctcggctcggcaccacaagcaagagcgtcgggaggtctgctcggtaaaggtggcggcgccagtctacctagactggtccgacaagcccatcaccttcgaccagggcgaccaccccgatcgcgtgccgagcccggggaaatatccgctcgttgtcgaccccgtcatcggcaacgtcaggctcaccaaggtcctcatggacggaggcagcagcatcaacatcatctacgccgagaccctcgggttcctgcagatcgatctgtcctcgatccgggaaggcgcgacgccttttcacgggatcatccccaggaaacgcgtccaacccctcggacaactcgatctgcccgtctgcttcgggactccctccaacttccgaagggaaaccctcacgctcgaggtggtcgggccatgctacaccaagttcatggccgtccccaactacacctacctcaagctcaaaatgccgggccccaacggggtcatcaccgtcggccccacgtaccgacacgcgtacgaatgcgacgtggagtgcgtggagtacgccgaggccctcgccgaatctgaggccctcatcgccgacctggagagcctctccaaggaggcgccagatgcgaagcgccacgctggcaacttcgagccagctgagatggtcaaatccatccctcttgaccccagcaacgacgcctccaagcagatccggatcggctccgagctcgaccccaaatag

SEQ ID NO: 114174 - DNA, 454 bp, Zea mays
  Clone ID: MRT4577_3560C.1
aatggttaagaatactattggattattttctcatagaaagctatctgtatcggtgggctatgcaacagcagcatttgttttagcagttcttgagggcagcacacagcctggcgtatggtttccagaggagccagagggagtagcaattgaatcaaggaaggtgcttcttgagcgggcgtctcaaggaacaacgatcttcgtgatgaacaagccttcctggatgatagagactgatccaaaggaagttggcctgggaatatatgtgtaggggaatagtatgtttccctcactatatgtctatattgaagtttacagctcctaattataattttgacggtgaaatcttagcacttactacaaaagttcttgggtatggagtagagcaagagcgacaaataggacaggggcaatgaacaaggaaaatcttatccattttcaacaaggcacctttgtc

SEQ ID NO: 114175 - DNA, 2556 bp, Zea mays
  Clone ID: MRT4577_35610C.1
atgccgttcggcttgaggaatgcgggcgcgacgtaccagcggtgcatgaaccatgtgtttggtgaacacattggtcggacggtcgaggcctatgtcgatgacatcatagtcaagacgaggaaagcctccgacctcctttccgaccttgaagtgacattccggtgtctcaaggtgaaaggcgtgaagctcaatcccgaaaagtgtgtcttcggggtgccccgaggcatgctcttagggttcatcgtctctgagcggggcatcgaagccaacccggagaagatcgcagccatcaccagcatggggcccatcaaggacttgaaaggcgtacagagagtcatgggatgtcttgcggctctgagccgcttcatctcgcgcctcggtgaaagaggcctacctctgtaccgcctcttaaggaaggccgagtgcttcacttggacccctgaggccgaggaagccctcgggaacctgaaggcgctcctcacgaacgcgcccatcttggagccccccgctgccggagaagccctcttgttctacgtcgccgcgaccactcaggtggttagcgccgcgattgtggtcgagagacgagaagaggggcatgcattgcccgttcagaggccagtctacttcatcagcgaggtactgtccgaaaccaagatccgctacccacaagttcagaagctgctgtacgcggtgatcctgacgcggcggaagttgcgacactacttcgagtctcatccggtaactgtggtgtcatccttccccctgggggagatcatccagtgccgagaggcctcgagtaggatcgcaaagtgggcggtggaaattatgggcgaaacaatctcgttcgcccctcggaaggccatcaagtcccagcatctacgctacgtgctatgcctccacttcccggcgtccaacaatgtggctgagtacgaggccctggtcaacgggttgcgcatcgccatcgagttaggggtccgatgcctcgacgctcgcggtgactcgcagctcgtcatcgaccaagtcatgaagaactcccactgccgcgacccgaagatggaggcctactgcgatgaggttcggtgcctggaagacaagttcgacgggctcgagctcaaccacatcgcccggcgctacaacgagactgccgacgagctggccaaaatagcctcggggcgaacaacggttcccccggacgtcttctctcgagacctgcatcaaccctccatcaagattgacgacacgcccgaggcaccctcggcccagcccgaggtacccttggctcagtccgagacaccctcggctcggctcgaggcatcctcggttcagcccgaggtaccctcggcccccgaggacgagacactgcgcgtcgaggaggagcgaagcggggtcacgcctaatcaaaaccggcagaccctgtacctgaaatatctccaccgaggagagctacccctcgaccgggccgaggctcggcggttggcgcgacgcgccaagtcgttcgtcttgctgggagatgggaaggagctctaccaccgcagcccctcgggcatcctccagcgatgcatttccatcaccgaaggtcaggaactcctacgagaaatacactcgggggcttgcggccaccacgcagcacctcgagcccttgtcggaaatgctttccggcaaggtttctactggccgacggcggtggccgacgccactaggatcgtccgcacctgcgaagggtgtcagttctacgcaaggcagacccacctgcctgctcaggccctgcagaccatacccatcacctggccttttgctgtgtggggtctggacctcgtcggccccttgcagaaggcacccaggggctacacgcacctgttggttgccatcgacaaattctccaagtggatcgaggtccgacccctaaacagcatcaggtccgagcaggcggtggcgttcttcaccaacatcatccatcgcttcggggtcccgaactccatcatcaccgacaacggcacccagttcaccggcagaaagttcctggacttctgcgaggatcaccacatctgggtggactgggccgccgtggctcaccccatgacgaatgggcaagtagagcgcgccaacggcatgattctacaacgactcaagcctcggatctacaacgacctcaacaagttcggcaagcgatggatgaaggaactcctctcggtggtctggagtctgaggacgacgccgagccgagccacgggcttcacgccgttctttctagtctatggggccgaggccatcttgcccacagacttagaatacggttccccgaggacgagggcctatgctgaccaaagcaaccaagctaatcgagaagactcgctagaccagctggaagaggctcgggacaaggccttactacactcggcgcggtaccagcagtccctgcgacgctaccacgcccgaggggtccggtcccgagacctccaggtgggcgacctggtgcttcggctacgacagacgctcgagggcggcacaagctcacgcctccctgggaagggtcgttcgtcatcgccaaagttctga

SEQ ID NO: 114176 - DNA, 278 bp, Zea mays
  Clone ID: MRT4577_35611C.1
tgcgcttctcgacatgtccaccgacgacctcttccagctctttcccgcgcgcgcctacacaaggttccggaaacatctgaaaagggagcccattgcactcatcaacaaacttcgccaagcgcaaaatgatcctcctcctggtcaaaaacctgagccagtcaagacacatcttcctaacatgatcattgtccccgaaaagaatggaagcatttgtggggtctacaacagccatacccatcaccacgtttagatcaaacctgacatgatacgtcactacc

SEQ ID NO: 114177 - DNA, 437 bp, Zea mays
  Clone ID: MRT4577_35612C.1
agcgtccgccatccctcatctcctacgaagccatcggcaggtgccagcctcccggactctaggggcagaagctgcagcgtccagatggggaaagggcccaccggggccacgcgtgaggcttttacttccgggcaccctccttgggtacaagcggtgccaagcgaaccaataccagaatacggggggggtgcaaaacgagggggggaacacccaggaggacgtctcgtggtacttggggaagagggtgggctacatatacaagggcaagaacaaaagaagcggcacccactaccgctgcatttgggggaaggggggccgcccgcatgggaactaccgcgtggttcgcgccaagttcaagagcaacctgccgcccgaatacatgggccggaaggggaggggggtcatgtaccccaccaccctctaaagataaaatgaat

SEQ ID NO: 114178 - DNA, 2076 bp, Zea mays
  Clone ID: MRT4577_35613C.1
atgaaactcaatcccgagaagtgtgtcttcggagtcccccgaggcatgctcctggggttcatcgtctccgagcgtggcatcgaggccaacccggagaaaatcgcggccattaccaacatgggccccatcaaggacttgaaaggagtacagagggtcatgggatgccttgcggccctgagccgtttcatctcgcgcctcggcgaaagaggcccacctctgtaccgcttcttgaggaagaccgagcgcttcacttggacccccgaggccgaggaagccctcgggaaccttaaggagctccttaccagcgcgcccatcttggtgccccccgctgctggagaagccctcttgatctacgtcgccgctaccactcaggtggtcagcgccgcgatcgtggtcgagagacgagaagaggggcacgcattgcccatccagaggccggtctacttcatcagtgaagtactgtccgagaccaaaatccgctacccgcaaatccagaagctactgtacgcggtaattctgacgcgacgaaagttgcgacactacttcgagtctcatccggtgactgtggtgtcatccttccccctgggggagattatccagtgccgagaggcctcgagtaggattgcaaagtgggcggtggagatcatgggcgagactatctcgttcgcccctcggaaggccatcaagtcccaagtcttggcggactttgtggctgaatgggtcgacacccagcttctagcagctccgatccaaccggaactctggaccatgtttttcgacgggtcgttgatgaaaacaggagcgggcgcgggcctgctcttcatctcaccccttgggaagcacctccgctacgtgttgcgcctccatttcccggcgtccaacaatgtggccgagtacgaggctctggttaacgggttgcgcatcgccatcgagataggggtccgacgcctcgacgctcgtggcgactcgcagcttgtcatcgaccaagtcatgaagaattcccattgccgtgacccgaggatggaagcctactgcgatgaggttcggagcctggaggacaagtttttcgggctcgaactcaatcacatcgcccgacgatacaacaagactacggacgagctggctaagatagcctcggggcggacaacggtccctcccgacgtcttctcccgagacctacatcaaccctcagtcaagaccgacgacacgcccgagcccgagaaggtctcggccctgcccgaggcgccctcggctcagcccgaggcactgcgcgtcaaggaagagcggaacggggtcacgcctaaccgaaactggcagaccccgtacctgcaatatctccaccaaggagagctacccctcgatagagccgaagctcggcgactggcgcggcacgccaagtcgttcgtcttgctgggtgacgggaaggagctctaccaccgcagcccctcaagcatcctccagcgatgcatatccatcgccaaaggtcaggagttattacaagaaatacactcgggagcttgcggtcaccacgcagcgcctcgggtcctcgttggaaacgcattccggcagggtttctactggcctaccgcggtggccgacgccactaggattgtacgcacctgccaagggtgtcaattctacgcaaagcagacccacctgcccgctcaggctcttcagacaatacccatcacctggttgttcgctgtgtggggtctggacctcgtcggtcccttgcagaaggcacccgggggctacacgcacctgctggtcgctatcgacaaattctccaagtggattgaggtccgacccctaaacagcatcaggtccggacatgcggtggcgttcttcaccaacatcatccatcgcttcggggtcccgaactccatcatcaccgacaacggcacccagttcaccggcagaaagttcttggacttctgcgaggatcaccacatccgggtagactgggccgtcatagctcaccccatgacgaatgggcaagtagagcgtgccaatggcatgattctgcaaggactcaagccgcggatctacaacgacctcaacaagttcggcaggtga

SEQ ID NO: 114179 - DNA, 2101 bp, Zea mays
  Clone ID: MRT4577_35614C.1
aattcggcacgaggctcccactgtcgccctctcccaagaacccgcccaaagaatcctagaatccaagaagaaaggcagcaacaaaaaacaaggggcggggggctgcaggtctgagggagggccggagggggaggaggtggtgctggaggggaaggaagaccagtgtgtgaagaccacacagtctctcgctcgcacacccggtgtgctgtggtcttcctctttgaccgccttctcggagcggggagtttggccatggggaggtggtggccggctgccctgctgggctgcgcagtggcggcggtggccgttctggcggccgccgtggtggaatgcgcggtcacgtacgacaagaaggcggtgctcattgatgggcagaggcggattctcttctccggatccatacactaccccaggagcacccctgatatgtgggaaggactgattcagaaggctaaagatggaggcttggatgtgattcagacctatgtcttttggaacggacatgagcctacgcctggaaattactatttcgaagagaggtacgatttggtcaggttcataaagacggtccagaaggccggcctgtttgtacatctccgcatcggcccctacatctgcggcgagtggaacttcggtggcttccccgtttgtcttgagtttgtaccaggcatcagcttcaggacagacaacgaacctttcaagacggcaatgcagggtttcactgagaaaattgttggaatgatgaagagcgaaaacctctttgcatcccaaggtggcccaattatcctctctcagattgagaatgagtatgggccagaaggcaaggagtttggtgccgcaggtcaggcatatatcaactgggcagcaaagatggcagtgggactggacactggtgtgccgtgggtgatgtgcaaggaggaggatgcacctgatccagtgatcaatgcgtgtaatggtttctactgtgatgcattttctcctaacaaaccttacaagcccacaatgtggactgaagcttggagtggctggttcacagaatttggtgggaccatccgccaacgaccggttgaagatctcgcatttgctgttgctcgatttgtacaaaagggtggctcttttatcaattactacatgtaccatggaggaacaaattttggacgcactgctgggggtcccttcatcacaacaagctatgattatgatgctccaattgatgaatatggacttattagagaaccaaagcacagtcatcttaaagaactccacagagctgttaagttatgtgaacaggctttggtttctgttgaccccacaatttctacccttggaactatgcaagaggcccatgtcttccgatctccatctggttgtgcagctttccttgcgaactacaattctaactcccatgcaaaagttgtgttcaacaatgagcaatacagcctcccaccttggtcaattagcatccttcctgattgcaagaatgtagtttttaacagtgccacagttggtgttcagacatctcagatgcaaatgtggggagatggtgccacatcgatgatgtgggagaggtacgatgaggaggttgattctctggcagctgctccattgctcaccacaactggtttgcttgagcagcttaacgtcaccagagacagcagtgattatctgtggtacattaccagtgttgacataagcccatctgaaaactttctacaaggcggtggcaagcctccgtctcttagtgtgcagtctgctggtcatgccttgcatgtctttgtcaacggacaacttcaaggttcttcgtatggtaccagggaggatcgaagaattaaatataatggcaatgttaaccttcgagctggtactaacaaaatcgcactactgagtgttgcttgcggattgcccgaatgttggagtgcattatgagacgtggaacaccggcgtcggtggtcctgtcgtgctacatgggttggatgaaggttcgcgagaccttacttggcatgacctggtcctatcatgttgggctgaaaggcgagcagatgaatctgaactccatagaaggctcaggctcacttgaatggatgcactggtcactgatagc

SEQ ID NO: 114180 - DNA, 341 bp, Zea mays
  unsure (1)..(341): unsure at all n locations
  Clone ID: MRT4577_35615C.1
ttcttcttctctcggcatacggcctctagagacggggttctttctagagacgagggggcgtgccncccatccnccctctgccctctccccacccatctactatctccatcctccctcctccctcgtcccacccgtcgactacctcgtctccttcgtgcgcggtcctcggctagctccttcttggcgctgggtaacgtgctcttctgtgctgtgcatatccacccgctcccctccttgttctgtgcttccacttgtcccttcgtcactgaccaagggcgtgcctgccttccctcctactgtcaataccacattttgcattacccttgctgctttcttttatc

SEQ ID NO: 114181 - DNA, 3665 bp, Zea mays
  unsure (1)..(3665): unsure at all n locations
  Clone ID: MRT4577_35616C.1
aattctcggcacgcagctactcctcccagtcccaggctcactgtcgctcctcccaagaacccgcccaaagaatcctagaaatccaagaaagggagcaaccaaaacaggaggaggtctgcaggaggaggagcaggaggaggtggtgctgaaggggaagatctcacaagtgtgtgaagaccacacagtctcgcgcactcgcaaacccagtgcgcgctgcggtcttcctcttcgcccaccttcttggagcggggaggttggccatgaggaggtggtggccggctgccctgctgggctgcgcagtggcggtgtccgttctggtggccgccgtggaatgcgctgtgacttacgacaagaaggcggtgctgattgatgggcagaggcggattctcttctccggatccatacactaccccaggagcacccctgatatgtgggaagggctgattcagaaagctaaagacggaggcttggatgtcattcagacctatgtcttttggaacggacatgagcctacgcctggaaattactatttcgaggagaggtacgatttagtcaggttcataaagacggtccagaaggctggcctgtttgtacatctccgcatcggtccctacatttgtggcgagtggaacttcggcggcttcccagtttggttgaagtatgtaccggactaccgggcatcagcttcaggacagacaacgaacctttcaagacggccatgcagggtttcactgagaaaattgtgggaatgatgaagagcgaaaacctctttgcatcccaaggtggcccaattatcctctctcagattgagaatgagtatgggccagaaggcagggagtttggtgccgcaggtcaggcatatatcaactgggcagcaaagatggcagtcggattgggtactggtgtgccgtgggtgatgtgcaaggaggaggatgcacctgatccagtgatcaatgcatgcaatggtttctactgtgatgcattttctcctaacaaaccttacaagcccacaatgtggactgaagcttggagtggctggttcacggaatttggtgggaccatccgccaacgaccggttgaagatcttgcatttgctgttgctagatttgtacaaaagggtggttcttttatcaattactacatgtatcatggaggaacaaattttgggcgcactgctgggggtcccttcatcacaacaagctatgattatgatgctccaattgatgaatatggacttgttagagaaccaaagcacagtcatcttaaagaactccacagagctgttaagttatgcgagcaggctttggtttctgttgacccagcaattactacccttggtaccatgcaagaggcccgcgtcttccaatctccatctggttgtgcagctttccttgcaaactacaattctaactcctatgcgaaagttgtgttcaacaatgagcaatacagcctaccaccttggtcgattagcatccttcctgattgcaaaaatgttgtttttaacagtgccacagttggtgttcagacatctcagatgcaaatgtggggagatggtgcctcatcaatgacgtgggagaggtatgatgaggaggttgattctctggcagctgctccattgctcaccacaactggtttgcttgagcagcttaatgtcacgagagacagcagtgattatttgtggtacatcaccagtgttgacataagctcatctgaaaactttctacaaggtggcggcaagcctctgtctctcagtgtgcagtctgctggtcatgccttgcatgtctttgtcaatggacagcttcaaggttctgcatatggtactagggaagatcgaagaatcaaatacaatggcaatgctaaccttcgagctggtactaacaaaattgcactgctgagtgttgcctgtggattgccgaatgttggagtgcattatgagacgtggaacactggtgttggtggtcctgttgtgcttcatgggctggatgaaggttcacgagaccttacttggcagacttggtcctatcaggttggcctgaaaggcgaacagatgaatctgaactccatagaaggctcaagctcagttgaatggatgcaagggtcattgatagctcaaaaccagcagccattggcctggtatagggcttacttcgagactcccagcggggacgagccattggctttggatatgggtagcatggggaagggccaaatctggataaatgggcaaagcattggacgctactggatagcatatgcagatggagactgcaaagaatgcagttacacgggaaccttccgggcacccaagtgtcaatcaggctgtggtcagcccacacaacgttggtatcatgtgccaaagtcctggctgcagcccaccagaaacctgctggtagtcttcgaggaacttggtggggattcatcgaagatcgccctagtgaagaggtcagtctcaagtgtctgtgctgatgtatctgaggatcacccaaacatcaagaactggcagatcgaaagctacggcgagcgcgagtaccacagggccaaagtgcacttaagatgtgcacgtgggcagtccatttccgcaatcaaattcgcaagctttgggacacctacgggaacctgtggagatttccagcaaggagattgccactcagctaactctcacacagtcctagagaagaaatgcattggactccaaagatgcgtcgtcgccatctcccccgagagctttggaggagacccctgcccgagcgtgacgaaaagggtggcggtccaggcagtatgttctcccgtcgcgtagccttacttctccaagcaatggatttggaaggcggtcgacaaaaaaaaaaataaaaaatggtcgaaaccagtgcagggtgagtggaactgtaagtatcgtcgactttgattattagatgtggctggcttgagaggttagcagcattcattgtcggattccagattaggatttgtagtctgctgcatctccatgaattgttcaaagcggccggctggataatgttgtagctggtccaggaatgcagctgtagagagagagagagagagagagagagagaggagtggaggcagaagagtgactgattatgcattcttttgctgtggtgttagtagctgtgtacccgtgacacatgtcgtctttcttggaacggagaaagatgcaggtgaagtgtgcattgtgcccttttgttctactgctactgctagtggtaaggcaggagccttgcaattgtcggggggagaattgtctgtaagattgtaactgatgagaacagtgccttcttttctgaaggaaaatcccgtgtggaatcgcttggaattagtcttggctcttgataacacatactaatantatgggtgcggtggccgcggggaattggtgaagggaaacaaaagcctgagccctgaggaattgatttccacgctgatatgtatgtatatataaagaaacgtgtggtggcatattgatgcaatccacattggatgcacttactgctgccaagccatcattctcgcacaaatctgtgtcaggcaggacaggaccagcgctggagatgttttcctctgccaatccaaccggacctataattatcgaaggaactgtggctgtgagaaccatagggccaagcatgtgttactccgcaaagaga

SEQ ID NO: 114182 - DNA, 3168 bp, Zea mays
  Clone ID: MRT4577_35617C.1
atgggcagtctccagcaacctctccggcccgggacggtgcttcgtttcgggactcttgagttcatgtccttcgacggcagctacgacatgacacttcttccaccgccgcgcgactacgacaatggcggccgacaacccgcccgccggcggcggaatcgacgacgtctaccccgcgtggtggaagagcaacattcgggctcgctccgttctctcccccgccaacggaggaggaggcggggccgtcaaggccagacgggaggccacgcttcgccggccgtcgagcgaatcgacgcccccgacgccccgacggaaggcacgtcggacgtcgacctcgcgttcgagacggaggcaagcgccgtccccccgcggcacgctgaccccgagcaagaagacgacgccggcgcgctcgcgaaaagcctgcaggacgtcgccctcgaaccagagatgacggcgcaaccagtccccgatgtgactacgtcgctcctcgtcgaccaaaaggtaacgactaactcccatcttgcgtcatttcgactcggcctcaacccgccaaacaacctcgtgttggcgggcgctctcattgaggcgagtgcaaccccactgaggttctgtatgcggtcgccttgggaccgactgacggacgtctcgacctacgggccctccgggtccgaggaagatgacgatcccagcatcggttgggatttctccggacatggcaaccccagtgccatgcgggacttcatgaccgcatgtgactactgtctatccgaccgttccgacggaagccgcagcctcggtgacgagagctgcggcccaagccgcgaatgtttccacatcgagctaggggatcccaccgaaggcaaccatcttggcatgccggaggatggtgttctccctaggccggtgcctcgcgccgacatcccacgggagctagctgtggtccccgctccggcggggggttacgacccacaactcgagcaagtccgcgaggcgcaggccaggctcaacgagggaacaggggcgcttgagccgatccgtcgggacgccggacaggcatgggtgggccaacccctggccggagaaatacgtcatctgccccaaggtctccagcaccgcgtcgccaacgacgtcaggatcaggccgccgcccgcatccagcggggtcggtcagaacctggcgaccgcagcgatgctcatccgcgcgatgccggagccgtcaaccaccgaggggcggcgaatccagggagaactcaagaatctcctggaaggcgctgcggcccggcgggccgagagcactgcatcccggaggcaaggatatccctcggaacctcacgccgcgacttcccgattcatgcgggaggcctcggtctacaccgggcgcacgcgcaacaccgcgcctgcggccccgggccacctcggcaacgagcaccatcgacgcgaccgtcgggctgccgaggctaccaccccaggcgccttcagtcgggccatccgacgggcgccattcccgacccggttccgacccccgactactatcacaaagtactcgggggaaacgagaccggaactgtggctcgcggactaccgccttgcctgccaactgggcggaacggacgacgacaacctcgtcatccgcaacctccccctgttcctctccgacactgctcgcgcctggttggagcacctgcctccggggcagatttccaactgggacgacttggtccaagccttcgctggcaatttccagggcacatacgtgcgccccgggaactcctgggaccttcgaagctgccggcaacagccgggagagtcgctccgggactacatccggcgattctcgaagcagcgcaccgagctgcccaacatcaccgactcggatgtcatcggcgtgttcctcgccggcaccacttgccgcgacctggtgagcaagctgggtcgcaaaacccccaccagggcgagcgaactgatggacatcgccaccaagttcgcctccggccaggaggcggtcgaggctatcttccgaaaggacaagcagccccagggccgcccgtcggaagaagctcccgaggcgtctgctccgcgcggcgccaagaagaaaggcaagaagaagtcgcaatcgaaacgcgacgccgcagacgcggaccttgtcgccgccgccgagtataagaaccctcggaagccccccggaggtgcaaacctcttcgacaagatgctcaaggagccgtgcccctaccatcaggggcccgtcaagcacaccctcgaggagtgcgttatgcttcggcgtcatttccacagggccgggccacccgccgagggtggcagggcccacgacgacgacaagaacgaagaacacccagcaggggggttccccgaggtccgcgactgcttcatgatctatggagggcatgcggcgaatacctcggctcggcaccgcaagcaagagcgccgggaggtctgctcggcgaaggtggcggcgccagtctacctagactggtccgacaagcccatcactttcgaccgggccgaccaccccgaccatgtgccgagcccggggaaatacccgctcgtcgtcgaccccgttgtcggcgatgtcaggctcaccaaggtcctgatggacgggggcagctgcctcaacatcatctacgccgagaccctcaagcttctgcgcgtcgatccgtcctccgtccgagcaggcgctgcgcccttccacgggatcatccctgggaagcgcgtccagcccctcgggcgactcgacctcccagtctgcttcgggacaccctccaacttccgaagggagaccctgacgttcgaagtggtcgggttccgaggaacctaccacgccgtgctagggaggccatgctacgcgaagttcatggccgtccccaactacacctacctgaagctcaagatgccgggccccaacggggtcatcaccgtcggccccacgtacaaacacgcgttcgaatgcgacgtggagtgcgtggagtacgccgaggccctcgccgagtccgaggccctcatcgccgacctggagaacctctccaaggaggtcccagacgtgaagcgccatgccggcaacttcgagccagtagagacggtcaaggccgtccccctcgaccccagtggcaacaccaccaagcagatccggatcggttccgggcccgaccccaaatag

SEQ ID NO: 114183 - DNA, 640 bp, Zea mays
  Clone ID: MRT4577_35618C.1
cataactcatccttcgccttcgcttcaagcaactctgcgataagggggagaaaacttgagcaccaagcaaaaggacttcgactgtggtataatcttaactcatttattaatgaccaaaggggaagaaagcacttcgagggctctaatgattccgtgttcggcgattcatgccaaagggggagaaagtaagagcccaaagcaaaaggaccgcaccaccaccaattaaaacttagtgctttccaaaagtctttatcatttgggatcctattgtgttcccaaaagggggagaaaggtgtttgaaaaatggtatatcaaaaccctcttgaacactaagaggaggatctcttttagggggagttttgtctagtcaaaggaaaagcgtttgaaacagggggaggaaatttcaaatcttgaaaatgcttttgcaaactcttatttatttacctttgactatttgcaaaagatctatgaaatggatttacaaaaagaatttgcaaaaacaaaacatgtggtgcaaacgtggtccaaaatgttaatatagaacaactaaaaatttaaataaaacgtaaatatagacaaaaacacatacgcacaaaaacagaaaaatccaaactgattaaatcaactaagaataattttt

SEQ ID NO: 114184 - DNA, 1683 bp, Zea mays
  Clone ID: MRT4577_35619C.1
atgcgggaggcctcggtccacaccgggcgcacgcgggacgcgacgcctgcagccccagatcgcctcggcaacgagcatcaccgccgcgaccgtcgagcccgcctcgacgagaaggtgcgccgaggctaccacgccaggcgtgggggacgctacgacagtgaggaggatcggagcccctcgcccgaatcaccaggtctgcaagccttcaaccgggccatacgacgggcgccgttcctgacctggttccgagccccgactaccatcgccaagtactcgggggaaacaaggccggaattgtggcttgcggactaccggctggcctgccagctgggtggaacggacgacgacaacctcatcatccgcaacctccccctgtttctctccgacgccgtccgggcctggctggagcatctgcctcctgcgcagatctccaactgggacgacctggtcaaggcctttgctggaaacttccagggcacatacgtgcgccctgggaactcctgggatctccgaagcttccgtcagcagccaggggaatccctgcgagagtacatctgcgttcctcgccggcaccacttgccgcaacctggcgagcaaattgggccgcaagactcccaccaaggcgagcaagttgatggacgtcgccaccagttcgcctctggtcaggaggcggtcgaggccatcttccggaaggacaagcagcctcagggacggcagcaggaagacgtctctgaggcgtccgcccagcgtggcatgaagaagaaggccaagaagaagtcgcaagcgaagcgcgacgccgccgacatagatcttgtcgctactgccgagcacaggaaccctcggaagccccccggaggggccaacctgttcgacaagatgctcaaggattcatgcccctatcaccagggtcccgtcaagcacacccttgaggaatgtgtcatgctttggcgctacttccataaggccgggcccctggcggaaggtggcaaaggccaagacaacgacaagaaggagggcgacaaggcagaggagttccccgaggtccacggctgtttcatgatctatggtgggcaagtggcgaacgcctcggctcggcaccgcaagcaggagcgccgggaggtctgctcggtaaaggtggtggcaccagtctacctagactggtccgacaagcccatcaccttcgaccaaggcgaccaccccgactgcgtgccgagcccagaaagtacccgctcgtcgtcgaccccgtcatcggcaacgccaggctcaccaaggtcctcatggacggaggcagcagcgtcagcatcatctatgccaagaccctcgggctcttggagatcgatttgtccacgatccgggctggtgcggtgccctttcacaggatcatccccaggaaccaagtcctgccccttgggcaactcgatttgcccgtctgcttcggaactccctccaacttatgtagggaaacccgcacattcgaggtggtcgggttccgaggaacctaccacgcggtgctggggagaccgtgctacgccaagttcatggccgtccccaactacacgtacctcaagctcaagatgtcaggccccaacggggtcatcaccgtcggatccacgtatcgacacgcgtacgaatgtgacgtggagtgtgggggacagatatcccccgggtccactggaaggataa

SEQ ID NO: 114185 - DNA, 164 bp, Zea mays
  unsure (1)..(164): unsure at all n locations
  Clone ID: MRT4577_3561C.1
cctcctttttttttttcacttgtacccttaatcattacatcacatattttttcccatctacacagcacactggataagaaagtaacttcaaaaattagacaaatagtaggacagctaccgcccagatctctatgtgactnccctcggaggctgttctttttgcg

SEQ ID NO: 114186 - DNA, 262 bp, Zea mays
  Clone ID: MRT4577_35620C.1
gaacacacaccgcttctagtagctatagctaggatccaacgatcgatcgatccatcgacgacatggacaggccagatcaccagcagcagcagttcttcatgccgacgacggtgccggtgccacagccacagcagcagcagcagcagctctgcgtcccgatgctcgacgagccgccgtcctcgtttttggcggggagaggcggaggcggggcgtcgaggaggggggagaggaagcggcggttcacggaggagcagatacggtc

SEQ ID NO: 114187 - DNA, 428 bp, Zea mays
  Clone ID: MRT4577_35621C.1
cgctcggatcccttcttcctccatttcactccaccgtcgcctccgcctgcaaatccattgctagactcgagctgtagctgcgagcgagctcagcttggggctcaggcctgtagggtgatagccttactgctcctggtgctcatcgcctaggaccttggtctgtctgtttagggctgtcgcggctgcaggagccgatgatcgtcggatgcagccgatgctgctagcgtacgcatatagtgaggactgaacggctcgctgggcacgcgatctgatgagtggatgctacagcgattgacgtagacgcactatccatcatgcagggcgccatgcttcggaacctcactgacaagctattctagaagaggaataacgcccagctcgagattgaggggattgttaagcaacttgcaatggctgaagaacattag

SEQ ID NO: 114188 - DNA, 369 bp, Zea mays
  Clone ID: MRT4577_35622C.1
gagtttagaaagtaattcttatctatcattttgggggggcagccgtaggcatttatttaagtggagcaagaatggagaatgtggagtgtcaaatactggtgcacgacgagaaagcagagtaatggagcatcgttcaaaagctgtgagaacccggggtataaaaaggagatatccagagccacctgccagaagaaagcagaggaagaaaaaagcaaaaaaacaaattattaacaggtgtatggatatacagtggtatacggccagaaaagtggaagaagagcacccgtacaagcatctacggatgaccaaattggcatggccacaagcactgaagtttattaggattattgttcatttagattaaattag

SEQ ID NO: 114189 - DNA, 389 bp, Zea mays
  Clone ID: MRT4577_35624C.1
ggcaaccacaagcccccaatatttttcacgcgggaaactgccttaagggtccaaatgaaaaaaaaaaaggggaccaaaagagggtcccactggatcaaaaaatgtgttggacggactggaggacggcctcggccaccatccccaaatggggtagcccgggcacgggggacacggggaccctggccagcaccaggggggggacgggaatggccacccccggcctggggcccatgaacagaaactgtagcgcccccacgaggttaaaccccttggaaacctaggcggggtaaaaccgttttttccacggggcccacttggggggggcctctgtgtggggttccaccattcacccctcccggatccccccccccaaaaagggcattcccttt

SEQ ID NO: 114190 - DNA, 834 bp, Zea mays
  Clone ID: MRT4577_35625C.1
ggttggggtttttttttttttttaaaaggaactatttattcccttcctgaaattccctttgaaaccatgggtattacaataatgatgctgaatcgcctttgtcctcgtcgcattcgcctccaacagcccccgtttcgcgccagcttatataagtggacaaattattactgtcagtatatgtaacaagaaaacaaaatcccggccagtggccagcaaataacgccaccaaataagtcaatatttggaaaaccacatgtacaaaacaccccagatacagcggcgctacctgcttcttttacatccaaggtaatctaaaacctcctcggtttccctatcctagcatattctaatggaaagcaaatgggcttccggcaacaaagtctgttacacgctaggctagcgaaacatggcaacagatgacgttgcgctcggtgtctcgtccagtcagcagcaaaggctgagaggcagcgcgtttccccacatgaacagcaggtggtcactgctgtgcttcagcggatgtcaaacctcaaggggagaactctacctgccataatcacggcaatgggttgagcgagaacaggtcctaagctgcacacggggaaaaaggtttcatcgcttccggccctttgatcttgaagcaatcaagcggatggcctgcttccccagctccacgttctcagacctgccattgtctaactgaatacacagtgtgccacccatgacattcgacaccatcccttgatgccatttgccatcagaagttagatggacttcaatcctctttccgatagcatccttgcccaacttgcgaggatccaatttgcgtccatcact

SEQ ID NO: 114191 - DNA, 183 bp, Zea mays
  Clone ID: MRT4577_35626C.1
ttttggtgcttatttgacactgaactcgcatgacccacgacccacaaggagcgaaactaccctgaaaaaaaaaaggacttgacactggcacttagtgaggccccgactgcctcccacttcagggcgacacaatttttcggaagcccacctaccagcctagcgacagctgctagcgcaaagacc

SEQ ID NO: 114192 - DNA, 882 bp, Zea mays
  Clone ID: MRT4577_35627C.1
ggtcggccggggattgttgttttatctttcctctttctctatcgaaaacggagcgcctgatacgatagtagcagcacagctagctctcctccccagaatctcgccggattccgccccccgccgcgccctcgcttccgccgcaggttcgcgtctgtgcccgcgcgtgttgtactaccggcggacggcggtgttggtggtggttggtggagttgccgacgacggtaggctatggactaccggccctccgacagcagcggaactgatgatgatcttccacaatttccacataagagtatcagaggcagcggacgtgtcagtggtaatgggcgagctgttgttcctgctggttcatatgctagggcaccaactgatatggtagcacaagttcaacaacttgagcaagaagcatatcgctcagtccttcgtgcattcaaagcccagtctgatgccattacatgggagaaggaaggtctcatgactgaacttaggaaggagctaagagtatctgacaaagcacacagggaactgttaaatagagtcaacaacgataatattatatgtagcataagggaatggagatcaacaggagggcttcaggcaagcttgtctaataacccacaactgattcatgactctgttcccagtcctaccacctctggccgtaagaggcaaaagacatctcaatctgttcctgctttacctgcaccgcctcctgcgatgcattcacaacagctggctacaccaacacagccatcatcttcaactgctaggaaagcagtacccccaggccataaaggcaaaaagatgaaaccaggtcagaaggtaccaggtggctctgcagccaagcctataccatcttcagcaggtccctagtggaagaga

SEQ ID NO: 114193 - DNA, 2088 bp, Zea mays
  Clone ID: MRT4577_35628C.1
atctttcctctttcttatcgaaaacggagcgcctgatacgatagtagcagcacagctagctctcctccccagaatctcgccggattccgccccccgccgcgccctcgcttcgccgcaggttcgcgtctgtgcccgcgcgtgttgtactaccggcggacggcggtgttggtggtggttggccgcggggccggtctctatttttcactctagaccgaaatcggagcgcccgataccataccaatagcagcagagcagtagcagcacagctccctcccccgtcctctccaaatctcgccggattccgtccaccgccaagccctcgcatctgccgcaggttcgcgtctgtgcccgagcgtgttgcactgccggtggtgttggtggtggttggcggagttgccgccgagggtcggtcatggactacgggccctctgacagcagcggaactgatgatgatcttccacaacttccacataggagtatcagaggcagcggacgtgttagtggtaatgggagaactattgttcctgccggttcatatgctagagcaccaactgacatggaagcacaaattcaacaacttgagcaagaagcatattgttcagtccttcgtgcattcaaagcccagtctgatgccattacatgggagaaggaaggtctcatgactgaacttaggaaggaactaagagtatctgacaaagcacacagggagctgttaaataaagtcaacaacgataatattatatgtagcataagggaatggagatcaacaggagggcttcaagcaagcatgtccaataacccacaaccgattcatgaccctgttccaagtcctaccacctctggccgtaagaggcaaaagacatctcaatctgttcctgctttacctgcacctcctgcaatgcattcacaacagctggctacaccaacacagccatcgtcttcaactgctaggaaagcagtacccccagtccctaaaggcaaaaagatgaaaccaggtcagaaggtaccaggtggctctgcagccaagcctataccatcttcagcaggtcctagtggaagaggaccgcacatgaataggaattttccaggtggttctgctcctgaagctcaagctcagaatgtcgatccattggttggtcgtaaagtgatgagccggtggcctgaagataatagtttttatgaagcagtcatatctgattataatgctgaaacgggcctttatgtgctggtttatgacattaatacggcaaatgaaacctgggagtgggttgatcttaaagagatgggacctgaagacataagatggaaagaggatgactctgggatagaccctgtggtgtatctgcgcagccgaggtgccccaagtagtggggtcaggaagccaacaggtcgcggtgggcccatgccaggttctggaacgaggaagaggattaccgaaaaacatgtctaggaaagattttccacctccacaaaatggtgttggcaagagaagttccgatgacattgatatccttcatactgagagcctaataaaagaggtggagaaagtttttagcgttagcaatcctgatccacaggaagtagaaaaggcaaagaaagcactgaaggagcaagaacagtcattgattgacgccatagcaaggcttgctgaggcatcagatggtgaaagtgatgggctcaatcgtgggcgaaggaacttgtatgctggtaaccagcatcaagcaaactatgttgatgacatgcccgttggtgaccaagctgatgccatgtaaacactgcatgaacatgtatacacaacataatataactgtctgttgtacaatccattgcaaatatttgttctggatttaggtctctgtaagctaagtatcgttcgtttcgggaaactaatttttttagaacagtaattcagaatgctgacaagtaaagcttgtagatgtttgtttctttctctagtttttttgttagtgtggtctcatgttctatatgcatgataaaaggaaaaagaaaaagatcacatttgttaacaggtgtttcaccattttaatgcagcaatcattcgacaaaaaaaaaaaaaaaaaagcggcc

SEQ ID NO: 114194 - DNA, 973 bp, Zea mays
  Clone ID: MRT4577_35629C.1
cggagctggccggggacgtgtgcgtacctgccgtgtgcgccaattgtggccaccacgggacgggacggggacgcacacaagaaccgtcacgaggaagccggattgggatacggaggagatcaggagaagcgaccaagtccgaaggacgcatgcccggtgctttcggctttcccatatatatatctcggcctcgcacatatcccgttcgccaatctcgcggcgaccctacaaagctgcggtcaggtgtagtcgtgtagagcggcggcggcgtcgtccgcggatcgctgtggtgaagggcgaactgagaacactaggcagccagaggcactaggccactagccgagccgcgagtcgacaggaggatcggaggccggcgagtggttggcgcaagttgtcaggggcgtcgccggagtcgagcggcagcgggcggcctggagcgggggcgatggggcgctacgagctcgtccgcagcgacgacacgcctgccatcgccgtggatctggaggctggcaccgccgcgccacgcgacgactaccccaaacgccgcgggtccgcgccgtctccggcgccggcgccgactcggcagcgcctcgtctcgctcgacgtgttccgtgggatcaccgtgctgctgatgatcatcgtggatgacgccgggtcattcattccggcgatgaaccactccccctgggatggcgtaacagtggccgacttcgtcatgcctttcttcctcttcatcgtcggagtcgccctggcgctcgcgtacaagagagtcccggacaagttggacgccacgaaaaaggcagtgctccgtgcactgaagctgttttgtcttggtcttgtcctacaaggtggttttttttcatggtgttcgcagtctaactttttggtgtcgaccttcaagaaatacgtctgatgggtatacttcagagaattgcaatagcttatctgttgactgccctatgtgaattttgct

SEQ ID NO: 114195 - DNA, 140 bp, Zea mays
  Clone ID: MRT4577_3562C.1
atgatgcagcactcatgacaacttaggtttttttatttacacgcaatacggacaccagtcgctatattgctttgaaactgggaagaatgagtgaaatgggaagagaaaagagagtaacgcctgaatttgatgagtattaa

SEQ ID NO: 114196 - DNA, 196 bp, Zea mays
  unsure (1)..(196): unsure at all n locations
  Clone ID: MRT4577_35630C.1
tcgcggacgcgtgggcggacgcgtgggcggacgcgtggtcggacacnnggnagcaatnagagagattcagctccactttgttgactgtgtgtaccagtatgaagctgtttttcctctagggttcttactgctgctcgcggccgctttctttggctactatgcttgcagtggtccaacgcctagtgttagggatgaa

SEQ ID NO: 114197 - DNA, 669 bp, Zea mays
  Clone ID: MRT4577_35631C.1
tcgaggcggcggtcgggacgcggtgacaacgcgcctcccgacatccgtccaattgctgctgctgcacgcgacgaatttctcataccaacacaactatcaccatcaccccaattcaccatggtccacaaggtcctcttctggagcgggctcggtgttgccgcgaggctatggcagctgggcattgagatgcgccccctcttcaacaagaagtccctctgggtctaccccatctacgccggcgctggtggcagcttcggctactggctcactggtgttgagcaacggcaattccgactcctggccgaccgacgagacgccctactcgagaagagacagcgaaggaaggagcgtgaggaggctaccggtacctcctaaggtgctgtcacctgcaatggcatgacgcgggtgtgtgaggggtagatgaagctgggagctggcagcggtatacacgtctagagcgtcatcgcaatcatgccgggacctgagatatcatacgctgcattcagtcttcatgatgggctaagtttggcggtgccatatccgtgggggctgcatctgcgctgagagcagctttctaccaaatcttggctggtgactcgatttgtacatatcccatttgaaaatcaaccacaaatgcaaaaacaaaaaaaaaaaaaaaaaaggccccta

SEQ ID NO: 114198 - DNA, 129 bp, Zea mays
  Clone ID: MRT4577_35632C.1
gggacgtgctgcgggccctgggccagaaccccagcaacgcagaggtgctgcgagtcttgggcaaacccaaacctgaagagatgaattccaagacactggacttcgagatgttcctgcccatcctaaagc

SEQ ID NO: 114199 - DNA, 219 bp, Zea mays
  Clone ID: MRT4577_35633C.1
cggttcggacattcccgacctcgacccacccgtcgcgcgggcccatggaagaacactcttttattgctcatgttgcgcggcttccacgcgtgcgagtaatgtagaagtcgggtgggcaggtattctcataccgtcattagtggatcattgaatttttctgtaagaaggttattgcaatgcaccttctctggccatgaataacacaaaggagacctgctt

SEQ ID NO: 114200 - DNA, 459 bp, Zea mays
  Clone ID: MRT4577_35634C.1
agctgtgggagcaccagtacaagagcgtgacgccggcgctgccgtggcagcagcgcctcgagacaccatcggcctcgagcggtgcctgaactacctgcacactggcgtcaagtacaccatgatccacagggacgtgtatacgaccaagttcctgatggcatacaactcgggcggctacaggtatactatcttcagctggtacatgaccagtccgaaggccatgaaccagacgcacgtctaaaccatggtgaaggggatctactggtacctacacccggagtacttcaagcgtgctccactcacggagaagtactacgtgtactcctacgagatgatgctcttagaggtgctctgcgcactgccggcgctgaactcgagcctgccgagggatcaggtcatactccccgaccatgcactgagctgtcataggaccgggactcttgatgacataatccaccc

SEQ ID NO: 114201 - DNA, 214 bp, Zea mays
  Clone ID: MRT4577_35635C.1
ggggaagcacaggacaggcggcatctcaactcaagctagctaggtagcaacctggccggattgggcagcttcctgcaagaagctcatccaaagttccaccagactaccagagggagggagagctagcgcgagagagaaagagagcagcttctccatctagctagtagttagagagatgtagtactagctagctagctagtactataccaccggc

SEQ ID NO: 114202 - DNA, 260 bp, Zea mays
  Clone ID: MRT4577_35636C.1
taaatcacaaattgtttacagggcccccccaaagtaacagccctttgggggttttgttggcaccgagcacaaaaaaaacaaaaacttcgggacttgaatccaaaatgggggccactaggttaaacccaaaagaactcccggggtccaaaaccactttgtgtccaccgtccaggggcccccttccaatttattcttagcttaaacaagccgtagaagtggtgttggcccaaaggcctcttgggcgcccctcgagggggggg

SEQ ID NO: 114203 - DNA, 643 bp, Zea mays
  Clone ID: MRT4577_35637C.1
cgggccccccctcgagttttttttttttttttttaggacaacagcagatattatcaatacattggactagagctcaatcgcttttagaaaacagtgtactaatcaggtctgaaaacatggcataacgctctgaacttgagacgactaaccaaaaaaaagtgtactcatcaggacacacatttcggtgcaagacaatccatgagaatgctctaagctacagcgctcttgcccttcttcctctgtagcttcttcatgtagaactcagcattatccttctttgcagcaggggttttcttcttcctaccaatgtcaactccatagtgagtgaggtaccactgcttgaatggggcagcatcaacttgcacaatggcactcttcacaagggtttgtgtcctcacaagctcattgtttgatgcattgtagaccacgtcgaggatacgggtcttgcgggtaacagcttcacttccccatgagtagttaccagtatcaaggcgaagagccctccacttcacgttacctccacgaacacggaccctcctcactgtcttattgcttgacaacttggtgttggccggctggcgaccaagctcatactttcgcttcttcctccaggccttctgctttccaccggtggcacggcgct

SEQ ID NO: 114204 - DNA, 817 bp, Zea mays
  unsure (1)..(817): unsure at all n locations
  Clone ID: MRT4577_35638C.1
cattgggaccctcgaggccggccgggctccttctctgacccaccagaagagcgtcggtgcgttcggacaaggagcaggcggaggaggagctgcgccaagacacaatgggtatctcgcgtgactcgatgcacaagcgccgagccaccggtggaaagcagaaggcctgcaggaagaagcgaaagtatgagcttggtcgccagccatgctacaccaagttgtcaagcaataagacagagaggagggtccgtgttcggggaggcaatgtgaaatggagggctcttctgcttgatactggcaactactcatggggaagtgaagctgatacccgcaagacccgcatcctccacgtggtctacaatgcatcacacaatgagcttgtgaggacacaaacccttgtgaagagtgccattgagcaagctgatgctgccccattctagcagcggtacctcactcactatggagttgacattggtatgaagaagaaaacccctgctgcaaagaaggataatggctgagggacaagaggttgacgcagcagctgaagaaaccaaaaagagcaaccatgtcacgaggaagcttgataagcgcaaggagggacgtacccttgacccacacattgaggagcaatttggcagtggacggatgctggcatgcatttcttcccgtcctggacagtgaggccgagctgatgggtactccnttgagggtaaagagcttgaattctacatgaagaagctactgaggaagaagggctagagcgctgtagcttacagcgatcccatggattgtcttgcaccgaaatgtgtgctctgatgag

SEQ ID NO: 114205 - DNA, 156 bp, Zea mays
  Clone ID: MRT4577_35639C.1
gtccaattcccgtgacccactcccacgagccgcgcgcccagagcactccgtgtgcacgagtttacctcaccctttgcgcgcgaagactgtgtgccttcgcgtccctacagaagccaagaggacgcgaggaagcgaagcacacccgcagcgacagca

SEQ ID NO: 114206 - DNA, 286 bp, Zea mays
  Clone ID: MRT4577_3563C.1
agcagaactacccgcccgtccaagagcaccagcagaaagagcctcgagccccagacagcacggcctacacgcagctcgtgtacctggatgacgtggaacagagtggtagcgaatgtgggaccacggtctgtacccccgaggacagtgccctgcgatgcttgttgaggggtcgagtcggagaagtggtggccagctgcccagcctgcaggaggagacgaccagacggactgcggatgccccctcggagccagcagccagcccccaccagagaagatctgcccacgag

SEQ ID NO: 114207 - DNA, 1006 bp, Zea mays
  Clone ID: MRT4577_35640C.1
ttggacgcgtgggcccaaccagaagtgcggcggcgcaggcggaccatgaggaggcggaggagaagcagcggagccaagccaccgccgccaccatgggtatctcgcgtgactcgatgcacaagcgcagggccaccggtggaaagcagaaggcctggaggaagaagcgaaagtatgagctcgggcgccagccggccaacaccaagctgtcaagcaacaagacagtgaggagggttcgtgttcgtggaggtaatgtgaagtggagggctcttcgcctggatactggtaactactcatggggaagtgaagctgttacccgcaagacccgtatccttgatgttgtctacaatgcatcaaacaacgagcttgtgaggactcaaacccttgtgaagagtgccattgtgcaagttgatgctgccccattcaagcagtggtacctcactcactatggagttgacatcggtaggaagaaaaaggctcctgctgcaaagaaggaagctgctgagggacaagagggtgaggcagcagctgaggaagcaaagaagagcaaccatgtgaagaggaagcttgagaagcgtcaggagggacgcgagcttgatgcgcacattgaagagcaatttggcagtggaaggttgctggcgtgcatttcctcccgccctggacagtgtggccgagctgatgggtacattcttgagggtaaagagcttgagttctacatgaagaagcttcagcgcaagaagggcaagggcgccgcagcttagagcattctcatggatggtcttacgccgaaatgtgtggcctattaaatattactcttgcttttttgttagtcgtctcaagttcagagcgtctatgtcatgttttgcagacctgagaacactattttctgaaaatgaatcaactctatctagctcttaagaattgagattttccggttgtattttcgtgatgcttattttgcttgtttactagctgcaacagttcctgttaaagcaggtttggtttcgcg

SEQ ID NO: 114208 - DNA, 475 bp, Zea mays
  Clone ID: MRT4577_35641C.1
tggggccgactcaacttgcacaatggcactcttcacaaggctctgtcacctcacaggttcagtgtttgatgcattgtcgaccacgtcgaggatacgggtcatgcgagtaacagcttgacttccccatgagtagctaccagtatcaaggcgaagagccctgtagcttagagcattctcatggattgtcttgcaccgaaatgtgtgtcctgatgagtacactttttttggttagtcgtctcaagttcagagcgttatgccatgttttcagtcctgattagtacactgttttctaaaagcgattgagctctagtccaatgtattgataatttctgctgttgtcctattgcggtgatgtttatttgccctgttcgctagctgcaatagttcctatttgagcactgagcagggtatgattatttgttgatgaatttgtttaaagcataaacacagaagcgggtatgattatttgttgatg

SEQ ID NO: 114209 - DNA, 2033 bp, Zea mays
  Clone ID: MRT4577_35642C.1
aaggggattttttttcaaaaaatttattttgggtattcccaggtttttccacatcccgcgttttttaaaatgcggcagaggtttttattttgggtggtcttaaaaaaaaatattttgtttgaattccggggtttttaaagttgttacctttaaaagagccccccccttttttttttttttttttttttttttttttttttttttttttttttttttttttttttttttttttttttttttttttttttttttctttttttttttttttttttttttttttttttttttttttttttttttttttttttttaaacatcaccgcaataggacaacagcagatattatcaatacattggactagagctcaatcgcttttagaaaacagtgtactaatcaggtctgaaaacatggcataacgctctgaacttgagacgactaaccaaaaaaagtgtactcatcaggacacacatttcggtgcaagacaatccatgagaatgctctaagctacagcgctcttgcccttcttcctctgtagcttcttcatgtagaactcaagctctttaccctcaaggatgtacctgttatataaaaagaaaaggctactaaggagctgcaggtaacgttataggtggtgaaacaaggagataacttgaagccaagaaggataacatgacaagatatctaaaacaaaacgaccattatgatttaagcaacaaaagtttgtagtacacacacagatatgctgctctaaaaatactaagaaagtctggtggaggtccattatttcgtacccatcagctcggccacactgtccagggcgggaagaaatgcatgccagcaaccgtccactgccaaattgctcctcaatgtgtgggtcaagggtacgtcccctccttgcgcttctcaagcttcctcgtgacatggttgctctttttcgtttcctcagctgctgcctcaacctcttgtccctcagcattatccttctttgcagcaggggttttcttcttcctaccaatgtcaactccatagtgagtgaggtaccactgcttgaatggggcagcatcaacttgcacaatggcactcttcacaagggtttgtgtcctcacaagctcattgtttgatgcattgtagaccacgtcgaggatacgggtcttgcgggtaacagcttcacttccccatgagtagttaccagtatcaaggcgaagagccctccatttcacattacctccacgtggtctacaatgcatcaaacaatgagcttgtgaggacacaaacccttgtgcaagagtgccattgtgcaagttgatgctgccccattcaagcagtggtacctcactcactatggagttgacattggtaggaagaagaaaacccctgctgcaaagaaggataatgctgagttattgtttgatataatatccatccagggacaagaggttgaggcagcagctgaggaaacgaaaaagagcaaccatgtcacgaggaagcttgagaagcgcaaggagggacgtacccttgacccacacattgaggagcaatttggcagtggacggttgctggcatgcatttcttcccgccctggacagtgtggccgagctgatgggtacatccttgagggtaaagagcttgagttctacatgaagaagctacagaggaagaagggcaagagcgctgtagcttagagcattctcatggattgtcttgcaccgaaatgtgtgtcctgatgagtacacttttttttggttagtcgtctcaagttcagagcgttatgccatgttttcagacctgattagtacactgttttctaaaagcgattgagctctagtccaatgtattgataatatctgctgttgtcctattgcggtgatgatgatttgccctgttcgctagctgcaatagttcctatttgttgatgaatttgtttgaagcataaacgcagaacatgtcgtaaagaaaacctttctgtaatattagcttgtaagatcgtcatggcatcactgcatatatagttttccctttttaggtgtcaaaaa

SEQ ID NO: 114210 - DNA, 251 bp, Zea mays
  unsure (1)..(251): unsure at all n locations
  Clone ID: MRT4577_35643C.1
cggagggcgcccgaaangaaagagtgttttatttaaggagnccaacgatgtaaacccgaaagcacaagtagtgaaagaatccaaagatgtggaaatgaaagagaagcccgggcaggactcaaaagatgtcaaccccaaagagagggcaaggcaagagtccaaagccctggatgtgcaaggggaggcaggggaagaatccacacatggctaagcgaagaagcctgggacggactcaaaagacgtaaaaacga

SEQ ID NO: 114211 - DNA, 294 bp, Zea mays
  unsure (1)..(294): unsure at all n locations
  Clone ID: MRT4577_35644C.1
acngtggctttaacatatctgatcacacaatatgctaagnacccaaactgggattagataccccactatgcttagccctaaacctcaacagttaaatctccaaaactgctcgccagaacactacgagccacagcttaanaactcaaaggacctggcggtgcttcatacccctctagaggagcctggtctgtaatcgataaaccccgatcaacctcaccacctcttgctcagcctatataccgccatcttcagcaaaccctgatgaaggctacaaagtaagcgcaagtcccacnt

SEQ ID NO: 114212 - DNA, 595 bp, Zea mays
  unsure (1)..(595): unsure at all n locations
  Clone ID: MRT4577_35645C.1
gagtcagtgatgtacgtaaagaatcncctaattctttcgatcgaattatgcgccttctttctcccttcttctcccttctatccgacttggtggatcacaggcgaccaatcaacgtagcatagcacagcgcgagttacctctcgcataacgaagcgcaaagcattcttcggaccaacgctcaccgcggtctaccagagacttctgccaatcccataacatgcttcttccatgtgctattctatgcggaggcgctaaccttctacatcctcttctcgctctttgtgaagagcttcctcatcatcttcgtgatcacagagctcctcttatcgttcgacttctgggtgatgaacaacgttactggcacgatactagtcgggctgcggtggtcgactgagatcaattatgacgtaaacagtgcgtgcaactttgaatgcctcgatgaggactctctctctcggatgagcaagaaggattcctggctgttctgctggactctttacttgactgctgctgcatgcatcgttcttgcaatattttcactcctcccgcttgaagctgattacattcttgttgttgaaggttgcttgagtctaag

SEQ ID NO: 114213 - DNA, 776 bp, Zea mays
  Clone ID: MRT4577_35646C.1
atctctcggctcagcccctctgtgataagaggcgccgggcgagagatgctcccatgggcggccacggcctcctcctcctccgccgccgccgccgccgccgccgctcttctccatgcctctccactccccgcttcccaccgcgctgcactacctcgctaccgtccgtctccctctcttccgccgccgctctcagttgccttccgttccccggcacgtgccctccctcgcggcggcgacgccttctgggaggagccagacgacggctccgggggcgactacgaggatgacggaaagcaagcgaccggacaaagaagctctcctttccctccccccttccctctctccaggctcgttgcaacgcggcagcaggagcgtcaagagcaggatctccggagagaaatcgagcttctcttaacgccggaagaagaggctatcttggatcagaatgagaccgctgatgtcaccaaaatatcatcaccgaaatggcatccgcttcatacatatgcgttggcgctgcagatacctctcatggacaagctgctggacaatggtgttgatatcgatttagttgataaagatggtttcactcctcttcacaaggtgataataggcaaaaaggaggctgtcattagccatctcctaagaaaaggagcgaatcctcatgtcacagatagggatggagccacaccattacattatgcaggtcaagttggggccctgcaaacgtaaagctgttgattaagtacagggttgatgttaacgttgttgatgttgat

SEQ ID NO: 114214 - DNA, 340 bp, Zea mays
  Clone ID: MRT4577_35647C.1
ctccaatcttttttttttttttctttttaaaaaaccaaattgaatgtaccttcccggtcgaacgatcaaagggcgaatcccgcccagggggggcctttaaaggggggggcgagccacactccaggccttggctaaggaaccccatatcgggtcccagtgggaaaaagttatccccttacaatttcccacagcaaacaagccggccgcctaaaatgcaacccctggggcgccccaggagcgaactaactcaaattgggggggcctaacgaactgcccaccttccaataaggaaaccgcgctccccgcccgcattaaagaagggaaccccgcgcggccaaag

SEQ ID NO: 114215 - DNA, 471 bp, Zea mays
  Clone ID: MRT4577_35648C.1
attcggctcgaggcaccgtataatactaattactgcatttttatttgctcaatcatcgaaacgctaatcagggaggcaggcctagataaacgaattctgagtcaaatcaatctaatgaacgtatcccatacctgatttgaatctcatacgcctttacctgaggatctgcttgtaagtcttccacatactaacccataatgactgtgtccatttaatccattgagctaatgcctattgaataggacatgtattactatcatatacactatatgaatccatccactttagataaaagagagtaattttaatcgattaaagtccatgattgagtagataattgaacaggatcttccgcttcatacacatgacattaaccattttagcttaatattactgcccattaggatgggtataatgatcatcccattataatctctattaaacatcctattgtaattacgttctaattca

SEQ ID NO: 114216 - DNA, 489 bp, Zea mays
  unsure (1)..(489): unsure at all n locations
  Clone ID: MRT4577_35649C.1
cncggccggggaaaaaattttcaaaaaaaaaaaaaaaaaaaaaaaaaaaataaaaaaaaaaaaaaaaaaaaaaaaaaaaaaaaaaaaaaaaaaaaaaaaaaaaaaaaaaaaaaaaaaaaaaaaaaaaaaaaaaattttcccttttccgggggaccggacaccccgcctcccgggttaaaaaaaatccttttccgccttttccccccaagggaaaagccgcctttttttctggtgggaaaaaaaaaggggggcccggggaaagggattgggggttggggccccaaaaaaggaaacgccagggggttccaggggggggttgaattttcccgtgggagggatcgttgggttccccaaggcttttttttaccccaaggggggggggccgggcccccttgttatacctcgaagttgtcctcgaaaacccccccgttgaggccctggattttgtgggaaacccacggggggataaaaaaaaaacccgattggggc

SEQ ID NO: 114217 - DNA, 754 bp, Zea mays
  Clone ID: MRT4577_3564C.1
caacttccccgaggacgcgcgcctctacccggcgtccacggcgggcgcggcggcgcctctcgccgcggcggcctcgacctccccacctgtctactccggtggcgtccagggctcgtcggactacctgaggtaccaccagatgcttctgcaagcgtccacgggcagccagggcaccctgctcccgttctatggcggcggcatgagcaatccctacggcggcggtgccgccatgaccggttcctacggtggagccggcggcggcaacacgagtggttccttgggctcctactactcgttcccggcctcctctgtttctgtcgccaccgtgccgtcctctacttcctctgcttcggggtactactactcgtcgccgcacgactcgcaacacagcgaggcgtccgcggcggcggactggaactgggagagcgcgctggcctggcccgactcgagccagtacccgccgccacctcacactcagtagcagcagccagtagcggtcttcttcttttctctgtaacaataagtaaggtgagtacggttgcgcggagggagacgcgcggcaacgcaaagcaaaacaaagcagatcaacaagaggaggatgctttcatttctttcgtgttatgatgatgacacccgagtggtctttgtttgttgatttttagttttggtcgacgatgtggctggcggctatccccattgtttccatttaatcttggctgcgaatttaagagatgaaagctccaccccgttctcc

SEQ ID NO: 114218 - DNA, 337 bp, Zea mays
  Clone ID: MRT4577_35650C.1
accacgcgtacgcccacgcgtccgcccacgcgtccggtgaagtgttcggatcgcggtgacggcatctcgtaaattataggagaaaattctgattgtactacgatccatagctacattattatcctgtataatatgcacatatgcatgggatccgtattttatagctgatgggttctgttgctcacaaccttttgtatatctcaccatcatatatatagatagtgcatattaccctatgatactattatccacgctggaatggattatcaaatcttcattaaatggttatccaatcaatcttttttttaatctatttttttaattattatcattactt

SEQ ID NO: 114219 - DNA, 153 bp, Zea mays
  Clone ID: MRT4577_35651C.1
tcttacacgtgtgcatttttagagacctgtgcgactcatggtcaccgccgcctagtcaacgagctaaaggaggtcgacggtttcaccagcgcgttgatgaccgggagtgccttttatacttgtaactttaaagggatcgggctagaggtgtgc

SEQ ID NO: 114220 - DNA, 571 bp, Zea mays
  Clone ID: MRT4577_35652C.1
atctccggcctcaaccgcaagcgcaagcaagcgaagcgcagaggctgcctgaccagagctagctgagctacggccaacagcagctgggctgactgacatgggcaaaggacatcgaggcatcggggtccgaggcgggcgagttctcgaccaaagactacaccgaacctgcgtcggggccgctgatcgacgcggaggagatcatccagtggacactgtaccgagcggacatcgccgagttcatagccacgctgctcttcctctacatcaccgtgtccaccgtgatcggagtacaagcaccagacggacgcgtcggagtcgggacgcgacggggcgggcggcggagacggcatactcggtatagtttgggacttcgagcgggatgatcttcatcctcgactactgcaacgacgggatctcaggaggactacatcatacccggtcgtgaccttcggactgatccatggacaggaaggtgcccctacgaccgcgcgatgctctacatcatcgcgcagtgcctgggtcgacatattgcggagtgggactctgcaagggctatccagagcgatctact

SEQ ID NO: 114221 - DNA, 475 bp, Zea mays
  Clone ID: MRT4577_35653C.1
agcaacacccgaccaatcagggtcacggggagaacgggggaagaggggaggccaaaaaaagaaaaagggaaaaccacattctcgggccttttccaggccgcggaaagggaacacgaaagaaccgaaccggggggggaaaaaatttgccttttaagaagggcacgcccccccgtacattgccaccccgggggagcaaaagaaaaaaaaacccacgcgtacaaagaggtacccttactacccaaaaaacgccccaccccgggggcaaacggcggggggggcgggcggtctttttgggccctgggggcctgccccccccccccggttcccggcctgaaaaggaggaccctcggcccaccgggctggcacaattcgtcaagcaacccgggggggggaaaaaaaacgttgtcccaaatctcggcaaaggcccccaagaaggcctctggggggggcggccccttgagggggagaaaacccc

SEQ ID NO: 114222 - DNA, 337 bp, Zea mays
  unsure (1)..(337): unsure at all n locations
  Clone ID: MRT4577_35654C.1
cccacacnttctnagatgcgttctagtatatccatcaacaatcgtaaggggccggggaattattcatattttcacatacccctaacaactacttgagcatcactgctaaccataatgttatcaacaaaaatcttgctaccaacaacaatctttcaaactgttaaaatacccatcaagtgcatttatccaatcatttccgcaaatagaacatccaagaccggtctaacctaacccctcattttctatattacataccacataaactagcgtatgcacaagaataactatttctgcattaaaattaaatacagccacaacatattctatggaattaacc

SEQ ID NO: 114223 - DNA, 409 bp, Zea mays
  Clone ID: MRT4577_35655C.1
ctccttatgctccttggtctttctggaagggctgctacagcgaccattttcccgcaatgctcacaagctcctataggttgccttgttcccccgtaccttgtcaccagtgatgtcttcaggatgtgaaaacccaattcttcacccctacatgatccagcatgcagtcggatcaggcatcttacctttatcacccttggtgctgcaacaatcatcagccctattacagccgtgtccctttggggcttgataggcccgaaacatcagggcacaacgacatcgtgctagcaaaccttgctgcctactctcagcagcaacagttacctttggtgcatctgctggcccaaaacatcgcggcgcatcaactacaacaactcgtgctagaagaccttggtgcctactctcagcaaca

SEQ ID NO: 114224 - DNA, 266 bp, Zea mays
  unsure (1)..(266): unsure at all n locations
  Clone ID: MRT4577_35657C.1
actaaaatatgtttatgtgagggtctattgaaacacagtgttaagcttttaatttaaagaacaaggggcattncgaattatttttaatatttttgttcctccaaacctattgggaaacaataatggaggggattaccataatggtatgaaaaacatgtggatactataaattaattaagctggcctgtcatgccaagaaccatagtgtttggctaaatattactgtccatctggcccatactttcatagggttatgattgatttgt

SEQ ID NO: 114225 - DNA, 284 bp, Zea mays
  Clone ID: MRT4577_35658C.1
attctaccatcaacaacaatttctgcaccatttaataccaatatctcattcagcgactccatggagaattcttccgtatacctacaactacttaaatatattccgcactcgttttaaacttcacctacatacttactacatcatttattatatcaatttttaccatctcttacgcaactatctacttcatacctttttacttacttacaacataatatactattaaaaacaattttctttatcctaatattttttaatattcacttctaatatccactttcaat

SEQ ID NO: 114226 - DNA, 818 bp, Zea mays
  unsure (1)..(818): unsure at all n locations
  Clone ID: MRT4577_35659C.1
atttctctcgccgtcgcgtccaaacgcagaacgcatcgaccgatcgaaccaatggcgatggtgaccgcgaagctcagctccccggccgccgcccggctcgcgccctccgccgagcccgcccgccgcgcctcgcgcgtccgcgtccgcgcctccggcggctcctacgccgacgagctcgtctccaccgcgaaaactgttgcttcccctggccgtgggatccttgcgatcgacgagtcaagtgcaacatgtggaaagagattggcatccattggtttggacaacaccgaagttaaccgccaggcttacaggctgctgttgctgaccactgctggtcttggtgaatatatctctggtgctattctctttgaggaaactctctaccagtccactacagatggcaagacctttgttgatgtcttgaaggaccagaatatcatgcctggtatcaaggttgacaagggtttggttccattgcccggatccaacaatgaatcctggtgccaaggtcttgatggtttggcctcaaggtgtgctgagtactacaagcagggtgcacgcttcgcgaagtggcggactgttgttagcatcccttgtggtcctactgcattagctgtcaaggaagcggcatggggacttgctcgctatgctgctattgctcaggacaatggtttagtgccaattgtggagccagagatccttctggacggtgaccatggcatcgagagaactcttgnagtggcagagaaggtgtggtcagaggtggtcttctacctggggcgaaacatgttctgttgagggcatcctgctgaaaccagcat

SEQ ID NO: 114227 - DNA, 290 bp, Zea mays
  unsure (1)..(290): unsure at all n locations
  Clone ID: MRT4577_3565C.1
ccttaaaaacacaaccccatccatccatggcaaactaaaaacaacaccttttaaaacatttncntcccccgataacaatagtaggcatttcctaacactaatcggggaatacatatatgtctccacattgatacccatttaactttacaaaacccaactaattagtcccatccctaaaaatgaacaacccctttttgccaacccaaaaaagatcctaacccccccactttttaaaaattggtttcacccacacccttggggacataaaaaacagaaacggccaactcccc

SEQ ID NO: 114228 - DNA, 121 bp, Zea mays
  Clone ID: MRT4577_35660C.1
aggagatgatgacaaagcaagggttgtttcttgacatttgcagtagccacccaagagctttctccctgctaggcttgagagctagtcctgctaattccttgcatgggatgtctgagccatc

SEQ ID NO: 114229 - DNA, 192 bp, Zea mays
  Clone ID: MRT4577_35661C.1
gccattcctgcggacatttctagtgcagtagacattcaactatttttacagcgatataggtctcatggaaggttaagggataggttttcaaatatggactcaaactaggacttatgtcaatgttatttttcaaatgacattgtcaaccatatttttaacctaaattcatgttttaattcctcatattaacat

SEQ ID NO: 114230 - DNA, 345 bp, Zea mays
  unsure (1)..(345): unsure at all n locations
  Clone ID: MRT4577_35662C.1
accggttctcggaannntcccggcgtcgacccaacgcgtcgcgccgcacgccgtctcgtcccccgcgaatccaatttcagctctngccgccgctgccgtcagcaaggcaggggagcgagcaaggggatgccgtngctggccacgngtngctgcgcnntcgcggacccgcgcgacnnctgttcgcgccgcnctccttccgcaagaaagggggctacatnncccgctcaaccaacctaacctnnccgcacctaccaagaatcggcgaactacgtnncgacgtcaaagggtgaaccggcnngccgtccccacaagggggaatnngccgcacannagttctaaaccacg

SEQ ID NO: 114231 - DNA, 876 bp, Zea mays
  unsure (1)..(876): unsure at all n locations
  Clone ID: MRT4577_35663C.1
cttggcctcatgcccactccattaaccatatattgcaatccctataggaaccccngattgtctcatatccaagtataacactgtcgttgaattatactccatacacaaaacaatatgaccataggagttgtgccagccaaaactagcataagtttaaccaagtttgtagtaaatagtgattaacatttatgtatctagctacgtttacaatngaaaatatacttcacaattgatttaaaacatatttattttatatcatagatgttagtaccccttccatcccatattattattcgttgtaactcctaatttatatgtctatattcaaataaaagataatgaatctagacacatgaaacttatacatcaagtattgtatgcatttcttaaaaatccaaaacgaattttaatatgggacagagggagtacctttttatataattttgatcaaacttcaaattatttgacccctcaaaaagtgataattgtattttttgtgtggagagagaacctataataaaataaaatgagttatgaacaggacggttccaaaatttgtgggctatgaattttgtcttctttttgttatattttatatatacatctgatgttatggttaattagtcttttttttatttgtgcttaaacagctccctcggccgtttcattggttcaataaaaaaatgaagagagccctttagaccttctcagtataatgcgtgacggagtctaattggcaatgctttgtaataacttgttttgttgtgctattcagcgtgcaaaaatatgaacaatattagtcttttattaagtcaattgtgcagtacatggctgaaatatggaatgtgtactatgtgatgactatgtgaatggctg

SEQ ID NO: 114232 - DNA, 461 bp, Zea mays
  Clone ID: MRT4577_35664C.1
aaaaattcaacaccggcggttggaaacgaggcccttcaatagattacaggattacaatattacacaactgggactccaaacttaaaggatggcggacaaccacctcagagaacagcatcagctcagacaccacagcactatacaccaccataacacaagacaatcgaaaccgccaacttgtttttctacctccgggcagaggggaatacctaactggctaaaccaacaagggtgccttcttgtggcttgagagcttaaacaaagcccatggcggtgacatttttccagtaaacgtgctcttgagaaggtcactgctaaagggctaaccaacactaagaatatgttgataaagctgaggttcttccagttcattaatcggaagatgcgcttgatgacactcctcatattcaatctaaggatacccgtttacaaaatcccctcgatgttgcaaattcaaatgc

SEQ ID NO: 114233 - DNA, 2369 bp, Zea mays
  unsure (1)..(2369): unsure at all n locations
  Clone ID: MRT4577_35665C.1
ctctacccaggatgtttaaaaccgaaacgcccaaccccctgacggagggcactattaatggaaagaggtccaatgctctctcccactattttggataccaggccaggggtgccctgccttctaaatttgattgcgattatggctacctaggtttgagtttctctttcactgtattttctcagaaaattgctacgctattaaatctccattgaattgctttgtcttgggctcgaccccggccggggcagaggcttaggctgggagtaatcgatcgagccggcgatgggcagcgtggccatggacgccgactacggcgcgccgcgcgagctgtcgccgctgcagaaggcgcgcgcgctctaccgaccggagaccccgccgtgcctccagggccccacagtcagtgtggaatatggtgatgctgcgatcgcggccgacgtcgcgggtgctcacgttatcagccacgccttcccccacacctacggccagccgctggtacactttctcacgaagacggccaacgtgcatgacgctaccatcgtaacagagcaccctgttgtcaggattggcgttgtcttcagtgggaggcaatcccccggagggcacaatgttatatggggcctctatgatgttgtaaaggctcacaactccaacagcaaaattattggttttcttggaggaaccgatggattatttgcacagaaaactattgaaatcactgatgaagctcttccatcctataaaaatcaaggtggttatgacatgcttggtcgtacaagggatcagatcagaacaactgagcaggtaaaggcaacaataggtacatgtcaagcattgaagttggacgctcttgttataattggaggtgtcacatccaacacggatgctgctcagcttgctgagacatttgctcagttgaaatgtccaacaaaggtagttggtgttcctgtaactctaaatggagatctcaagaaccaatttgttgaaacaacagttggttttgataccatatgcaaggtgaactcgcagttaataagcaatgcatgcatagatgccctttctgctgaaaagtattactactttattcggatgatgggacggaaagcatctcatgtagcattggaatgtgctcttcagtcacatccaaatatggttatcctaggcgaggaggtttctgtgtcaaaacttacaatatttgatattacaaagcagatatgtgatgctgtgcaggcaagagctgaaaaagacaaatatcatggagttgtacttattcctgagggccttgttgagagtattcctgaactgtatgctttgctccaggaaattcatggactgcataataaaggtgtttctgttgagaacatctcttctcatctttcaccttgggcatctgcactatttgaatttttgcctccatttattagaaagcagctgcttctccatcctggatctgacgattcagctcaactgtcccagattgaaattgagaagcttctagcacaattggttgagaccgaaatggacaaacgcctagttcttggacatgtatgttatcacatcgtagcggctggtttgaacggctacatggccactgtgaccaaccttaagagtccagtaaacaaatggaaatgtggtgctgctcccattacatctatgatgactgtgaagagatggtcacgtggtgctgccaccagtcaaatcggtaagcctgctgtccacatggcgagtgttgacttaaaaggaaaagcatatgagttgttgagacaaaattcttctagcttcatgatggaagacatctaccgaaaccctgggccacttcagttcgaagggtcaggtgctgatacaaagcctatttcattgtgcgttgaagatcaggattacatgggaagaatcaagaagttgcaggagtatttggagaaggtgaaaagcattgtgaagcccgggtgctcgcaggatgtccttaaagcagcggtaagcgccatggcttctgtgacggagatgttgaccatcatgtcttccctttcatttagtggacaggcgaccatctgaaggccaagctgaagatgtcatatgctgttgcgctctcatgtcccgaacatatttgtgtttttttgggaaagaaacatacaatttttgttctcattctagtatcgtctacctatgtcaaactacaatatgataggacccttgctaaataattgtttcgtttgctggtatttctcatctttgatgctagtagcatgttggaaagttaaaaaaaaaaaaaaaaagggtgcacatcacaccaatatnnngattttgataattaaaacccttttataaatgaatcggctttttctagttcaagctgaactcaaagaaaactaaaaatt

SEQ ID NO: 114234 - DNA, 2205 bp, Zea mays
  Clone ID: MRT4577_35666C.1
gcggccgccgccggggttcgcacctccaccgttgccgtcgccaccaccgtcgtcgtccccaccagtgccctcccctccggcggcacagccgatggcccagtccccgccggggacgcctattcctccgccgcggccacccgcggcacgtgtcgagatgccggtgtaccatccaccgcttcttcaccgcgacccacggcacgtccatccgatggtgacgcggcacgcggctgggaccctgccgccccgagccctggcgaccacgaccgaagactcccaggtttctctggtaccctcctctgtccgcaccaccctgctggacccccactggcgtcgggcgatggaggagtacgtggcgctcgtcgccaaccagacatgggatctggtgccacgggtgacccagtcgaggaccccaccgggtacaagagtcttgccggtgctcttcagtacctcaccttcactaggccggacatctcctacgccgtgcagcagatctgtctccatatgcacgacccctgagagccccacctagcggctctcaaacgcctcctccgctacctccggggcaccgtcgactacgggctgcttcttcaccggtctacctcctccgagctcgtcgtctacaccgacgctgactgggccgggtgcccagacactcggcgctccacctccggctacgccgtcttcttaggcggcaacctggtgtcctggtcttcgaagcgccagccggttgtctctcgctcgagtgccgaggcggagtaccgtgccgtggccaacggcgtggcggaggctgcctggctccggcagctcctcgccgagcttcacagtcccctctccaggagcacggtggtctacaacgacaacgtcagcgcggtctacctctccaccaaccccgtgcagcaccagcggaccaagcatgtagagatcgaccacttcgtccgcgattatgtcgccgccggtgctgttcgggtcctccacgtccccaccacctcccagtttgctgatatcttcaccaagggccttccgtcctcgaccttcgccgagtttcgctccagcctcaacatcagtagtggctagttgcggctgtggggggatcctatggtgtaatgttcggtgtaatgtactcttccttttttgagtccagtctgtgaactccgctgcgtcggaagttcagactgcggggggtgttagagtatatggtaggcccatgtggcccatgtataacactatatagctacccattagggttagcattaattaacactgtaatacccagactgggaactaccaggccctggccctggccagtggtgcctaggtcaagggtggctaggctagggacggccagaccaagggcagcaagatcaggggcgaccgaacccccactgcagaggaaggtgttgccaatgacgggaggtggagcggggcgggcgagccaagctccaccttaggcagggaggatggtgagcaggcgtcagccaaggcatcagggccgaccgcgacgcctgcagagggcgtggcgacggctacaaacgccaagtgacaagggtcgaggggaggagaggaggggaagaggatagaaggggaggcatgcgtgtcatggtgcctgcaggccagaaggcacggtgactagaaagggagaggctgattctggctaaaaaagcattgcttcctattgtcctccttcaagcgcaccatggcaagactaagatctagaatcacatggctcaaagaaggtgatgctaacacgaagtttttttcatttgcatgccagacaccgtagaagaaaaaaatatcgtagctaaaattgtggatggaggtcggttttatcacaaccttattggtcagtgcaaaggtagggacagggttattgacctagaggcccttgcaattcctagggacatcctgactgattggactttcctttctctgagcaagaagtatgggaaaccattagagatatgccttcagacaaggtcctagggcccgatggtttcacagggcagttttacaaatcttgctggggtattattaaaaatgatgtgatggctgcggtttcagcggtctggagtagaaaattctgtaatttcagcaagctaaacactgcgtacatcaccatgatcccaaagcatgaaggggcggatcaggtaaaggattttcggccaattagtcttgtacaccgctttgctaaattgatcacaaaaattc

SEQ ID NO: 114235 - DNA, 551 bp, Zea mays
  Clone ID: MRT4577_35667C.1
acgcgcacgcccacgcgtccgcttcctcgcagcctcctagctccctcctctcccttttatggttcttggacttctccttctcggccatctggagcggtgcgcccagcccagccgcgccgagtttcgccctcgccatggccggtgccttctttgctctcctctccagccgcgccgagctcgacctctgcttctcttgcgtcgcgcgccgagctccatccatggcgggagctccctccctgctcggatttcgccaggcccgcgcagctccctggcgcccctctcctcgtaactccctcctctcgctccagctcgccgcgcactcctctgctcggcgcctttcctgctccccatgtctggtgccctgctgcccagcgccgcgcccctgctcctgttcattctagcagccgagtttcttcttccccggcacgtcgctctctctcccttgtcttctctcccctgcgcgctagtcgctcgtcttcctgcgagcgcccctgctccctctgccctctcgctgacgcgcgccctctctgcttctctccacgccgctgtca

SEQ ID NO: 114236 - DNA, 534 bp, Zea mays
  Clone ID: MRT4577_35668C.1
cacgcctgcgtgtaccgggctcctaattacacggtcgacctattctttcttttcagtcacataggaaagtgtaactcattattcataagagggcacctacgtcagccaaaatattttatcatccttatgctccttgctctttctgtatgagaggtaacgccacacattgtttctcaatactgcaaaggctcttatatctgcaattcttgtcgccatacatggccatcaactgactcgcatttgtaatgagaaaacccagtctttcaacccttcatgatccaacaggcactcttgacaggcaactaacattgatcacacctttgctttcaacaattggccaacctatctttggtgcagctattggaacaaaccataagggctaaaacaggtgcatcaactcaagctaccaaagatcagccaattagcatctggcaaacctttccccctactctgagcaacaacaatttctttcattcaaccaactgtgtatactgaaccctgctgcttatttgcagcaacaacaactactaccat

SEQ ID NO: 114237 - DNA, 669 bp, Zea mays
  Clone ID: MRT4577_35669C.1
gtcgtctacactgacgctaactgggccgggtgcccagacactcggcgctccacctccggctacgccgtcttcttagggggcaacctagtttcctggtcgtcgaagcgccagccggtcgtttcccgctcaagtgcagaggcggagtaccgtgccgtggccaacagcgtggcggaggctgcttggctcaggcagctcctcgccgagcttcacagtcccctctccaagagcacgttggtctactgcgacaacgtcagcgcagtttacctctccaccaacccattgcagcaccagcggaccaagcatgtagagatcgatctacacttcgtccgcgattatgtcactgccggtgctgttcgggtcctccatgtcctgaccacctcccagtttgccgacatcttcaccaagggtcttccgtcctcgaccttcgccgagtttcgctccagcctcaacatcagtagtggctagttgagtctgtggggggtgttagagtattcctattgtgtgatgtacttctttttgagtccagtctgtgtactccgctgcgtcggtagtccagactgcgggggggtgttagagtattaggcctgttaaggctaggcccatgtggcccatgtaaacactatatagctaccctgttgggttagccctaatacatagaatattcactcc

SEQ ID NO: 114238 - DNA, 731 bp, Zea mays
  unsure (1)..(731): unsure at all n locations
  Clone ID: MRT4577_3566C.1
gggtgcacagatgacattagattgtagacagtcccacacagcatcatggaacgctctcttggctgctctactgaggaatggcctaattcgtgaagcaagggagctgtttgatgatatgcctgaaagggacactgtttcttggagtacaatgatttctgggtatgtgcagacaggacgttcagacatggctttgaagctattctattcaatgttgaatacgagcattgaaccaaatgaggtcacgttggccagtgctctacctgcaattgctggttctggcacattggaccaaggtaaatggatccatgactatataatgaacagaccagtccagcttactgataacctgagttctgggttgatagatatgtatgccaagtgtggcagtattgctgatgcagtgcagtttttcaatcacgtcaatgataagttctcttccgtttcaccatggaacgctatgatttgtagtttagccatacatggttatgcacatatgtcgcttgacctgttttcacaattacagaggactagtattaagcccaattcaatcacattcataggtgttttaagtgcatgttgtcatgctggcacggtaaccaagggaaaatattattttgagtccatgacgagggatatgggatccagccaacgatcaagcactacggttgcatgggntgatctcctcggtcgagctggatacttggaagagctgaacagctttgttcatgatg

SEQ ID NO: 114239 - DNA, 238 bp, Zea mays
  Clone ID: MRT4577_35670C.1
tccatgcgtccgtatttgttacctgtcgccagatagccggccctagggtccatagacaaacccggccaccctccgattttctgccagctccacactccctagatccgtttcttgcaccgggagattgtagcaaatacgctaaccaatttacctgtcaagaaggcggcggctgagccggctgccaacgaagccatatgcccatccttcgaggtgtctaaccagaaggagtctgcttcaa

SEQ ID NO: 114240 - DNA, 1898 bp, Zea mays
  Clone ID: MRT4577_35671C.1
gccgaccaccgtccgcacggtgctctcgctggcccttgctcgctcctggccaggtcaccagctcgatttcaagaacgccttcctgcacggcgccctcaccgagaccgtctactgctgtcagccggtggggttcgtggactcctctcgccctgacatggtctgccgactcaacaggtccctctacggcctcaagcaggcccctcgggcgtggcactccagacttgctacgttcctggtgaccctgggcttcgtggaggccaagtcagacatgtctctgttcgtccaccatcatggaacagagactgcctacttgcttctctacgtggatgacattgtcctcactgcctccagtcagtctcttcttcgccgccttgtcgacgcgcttcagcgggagttcccggtcaaggatctgggcgtgcttcaccatttcctgggggtcactgttgaggctcgtccctccggactcctacttcaccagcggcagtacactcttgaccttctggagcgggccaagatgattgcctgcaagccctgctctaccccagtcgacacgcaggcgaagctctctgaggcccagggtgacccagtcgaggaccccaccgggtacaggagtctcgctggtgctcttcagtacctcacctacaccaggccggacatctcctacgcagtgcagcagatctgtctccatatgcacgacccccgggagccccacctcgcggctctcaagcgcctcctccgctacctccggggcactgtcgactacgagctgcttcttcaccggtctacctcctccgagttggtcgtctataccgacgctgactgggccgggtgcccagacactcgacgctccacctccggctacgccgtcttcttaggcggcaacctggtgtcctggtcgtcgaagcgccagccggtcgtctcccgctcgagtgccgaggcggagtaccgtgccgtggccaacggcgtggcggaggctgcctggctccggcagctcctcgccgagcttcacagtcccctctccaggagcacattggtctactgcgacaacgtcagtgcggtctacctctccaccaacccagtgcagcaccagcggaccaagcatgtagagatcaatctacatttcgtccgcgattatgtcgccgccggtgctgttcgggtcctccacgtcccgaccacctcccagtttgctgatatcttcaccaagggtcttccgtcctcgaccttcgccgagtttcgctccagcctcaacatcagtagtggctagttgcgtctgtgggggatcctatggtgtaatgtgtcttccttttgcgtccagtctgtgaactccgcttcgacagaagttcagactgcgggggggtgttagagtatatggttaggcccatgtacaaacaatatatagctaccctctagggttagccctaataatcaagtcatttacgctgacacttgtagtacaattcctagtccagttaccaacatcaaaaaaataatcacttactctctccatacaaatatatgacatattttccgtccattcttaggctttgccaaataattgctacttaataagttcactatgtgatgcaaaatcgcaatcgtaagtcagcacttgtaaaaatcaatctaataacaccacaaaaaatatgcactaaggttgtccgcagtagaccatgtaaaatagtgaatctgcaatgtaaattactgtttgcagagtaaagtttgaaatagagaacatgataggggtaggataggatagctgctgaagacagccgaatagagtaattgttgttcgggtttggtgcggggaaggctggtttcggtttagcccttccctcatatcccactcatgtggtagcctccagcaatgggtctacccttttttagagtaattgttggtc

SEQ ID NO: 114241 - DNA, 353 bp, Zea mays
  Clone ID: MRT4577_35672C.1
cccaacgcgagcagcagttgcattggaggcgaggaggacccaccccgggcctcaaggaatggccgttttccgccacctcgccgccggcccaacctgccaccaccaccaccacggcgtcgcggcagccaccgcctccttccggctccatcgcctccccctacccttcgcccccttcgctccgctccgtcccgtcccgctcttaccaggttatgcgactcagcatgacataggtcgaccacgtcagtcacgcgcccatggaagtctaagtctcactaacctgaaaggcctgttcgcagacaaacgctactatgtactgcacacgcgaaaacctcggctgaagacctcagaccatc

SEQ ID NO: 114242 - DNA, 308 bp, Zea mays
  Clone ID: MRT4577_35673C.1
ccctttgacaatgaaagtaaactatgggatgatgaaaggatgcacgcgctcgcaccgtacgttattgagaacgacctctcgacgtgcaatggccatggactgtgtaacttgagggaatagcagaaatctagatctaatatgtgttcagtaaaggggcacgctcgatacgtacacacacagagaagtaacgcactagacatctgcacatatatatacatggaaaaggattagattcagccaacacaatcaagctgttctctacaaacatgtagcttctctagctatgcaagccgagagagagaaatcgt

SEQ ID NO: 114243 - DNA, 656 bp, Zea mays
  Clone ID: MRT4577_35674C.1
cttcttgcctattccctgctgctattttcgtgtttgttagaatggtaaggcctcgtcttatgatcgtctaggcgaggcgtggcctagttgactcaaatgagtagctcgctacatctcatgttgctgccttaaaagttaaaaccagggtactatagtatcactataagaagaatatttgtttgtacgtgcaacgtgatgcatgcacatgggatagaatgattagttatcctgttattttcttttctttcaaatggattccgtgcatcagaaaactgttcttggtcttgtagaagccatgttaaccagtctcattgaaatcaggcactgaaagtctctagtttccttcccttctcatccaggattttgagccttgacccctggcatgggagaagagtacccagccagctgcactacaatgagtcatggcccttgttctaaggcccacacagatctatgtccacaatagagatatgttctttttatatatactataaataaaattttgtattttttttttgccattttcacttgagccctggttggcaagtttagggggggtgcttagttgggtgtggggatgacccacctcttgtaaatgaactttctttaattgaatggcagagctcctgccttttcatttaaacactctgcgtaca

SEQ ID NO: 114244 - DNA, 931 bp, Zea mays
  Clone ID: MRT4577_35675C.1
gcaacaaatacatttgcgtaggagacatcgctaccccctgggccctggctccattcggcacgctgctcagtctgacacggaaccgagcggaaaacccaggccagctcccgataagaaatcctcgagtcgaccccagtcccccataggccgtagaccagagcagtagaccgccatggcgaaccgcagcaagcagctcgttaccaccgcactgccgctcgcggcggcagcagcagcctcgctcgccgtcgtgctcctgctctgctccacgggctcatcggaagacgacggatacctcgggcgcgtgggtgcgccgtggggccgtaccctcacggtcctcccattcagccccgcggacctgctgcccctcctgccgcggggcgtcgccatggccgcgctccgggcgctccgcggcgtctcggacatcttcccggtgttcgtcggcgccgcgtcggccggcgggtcgggctcggtgcccggcagcggggggacggtgagatggaagggggcctgcttctacgagaacgaggcgtggctggtgttccacaacgagaccgggtccaagtacggcggcggcacgctccatatcaagacatccaaagcgcacagctggacttgcatagatctgtatgtatttgcaacaccatacagagttacatgggattactactttttggggcgagagcacactcttgatatcaaagaatgggaaagcgatgctgagtatgagtatgtgaaacgtaatggtgtgtccatcttcctcatgccatctggaacaattggcacacttcgagcactctgggatgtcttccctctgttcacaaatactgcatggggtgagaacgcgaatcttgcttttctcgagaagcatatgggtgccacctttgaggacgcccaaaaccttgggtctcagagttaaatcctgatgatatca

SEQ ID NO: 114245 - DNA, 2848 bp, Zea mays
  Clone ID: MRT4577_35676C.1
cccacgcgtccgttctgttatgactgtatggagcaagcttcaaccagagtatgctgctaatatgtggaaagaagcccttaacaaacggcttggaactaaggtttgcttaaatttgttttttggtgtttctgctagatgttctcctgtacaagttattgttccctttggatttatagacagtttatttctgcatggcatgatgccttacctttgttttcataccatttgaggttttaccattttagacatgggttgaggttgctggaaaattttaactttgtcaaccatgctcacaaggcctgctatgtgagcattaggggctataggtagaaatgcaaatgttattgtgtgctagacatttgtgttcggactaaggggtcaagtactgaagctgtatctgggttccttgtatctataatacaactgccattgcttattgtttaataccttctggtattactgttttgtagtttcactctttgaggcctatcgacaattttacactgtgttaattattcacatacagaaatcttggacttaatttcattttattgtgcactaggttatttagttctttttttttattttcaaaaaaaaaaaaaaaaaaaaaaaaaaaaaaaaaaaaaaaaaaaaaaaaaaaaaaaaaaaaaaaaaaaggggctcgaggccggccgggaagcaacaaatacatttgcgtagcagacatcgctgcccgtgtctccattcacctcgctgctcagtctgacacggaaccgagcagaaaacccaggccagctcccgataagaaatcctcgagtcgagtcaccccagtcccataggccgtagaccgccatggcgaaccgcagcaagcaggtcgttaccaccgcactgccgctcgcggcagcagcagcttcgctcgccgtcgtgctcctgctgtgctccacgggctcatcggaagacgacggatacctcgggcgcgtgggtgcgccgtggggccgtaccctcacggtcctcccattcagccccgcggacctgctgcccctcctgccgcggggcgtcgccatggccgcgctccgggcgctccgcggcgtctcggacatcttcccggtgttcgtcggcgccgcgtcggccggcgggtcgggctcggtgcccggcagcgggggcacggtgagatggaagggggcctgcttctacgagaacgaggcgtggctggtgttccacaacgagagcgggtccaagtacggcggcggcacgctccatatcaagacatccaaagcacacagctggacttgcatagatctgtatgtatttgcaacaccatacagagttacatgggattactactttttggggcgagagcacactcttgatatcaaagaatgggaaagcgaggctgagtatgagtatgtgaaacgtaatggtgtgtccatcttcctcatgccatctggaacaattggcacacttcgagcactctgggatgtcttccctctgttcacaaatactgcatggggtgagaacgcgaatcttgcttttctcgagaagcatatgggtgccacctttgaggaacgcccaaaaccttgggtctcagagttaaatcctgatgatatccactcgggagatttcttggttttatcgaagattcgcgggcgttggggtggttttgaaacactggagaagtgggttactggcgcttatgctggccatactgcggtttgcctgagggactccgatggaaagctttgggttggggaatctggtaatgaaaatgaacagggagaagatgttattgctatcctgccctgggaggaatggtgggagtttgaagtgacaaaggatgactcaaatcctcagattgcactgcttcctttgcatccagatctgcgggcaaaatttaatgagacagcagcttggatttatgcaaaaagcatggaggggaaaccttatgggtatcacaatatgatatttagctggattgataccatcagtgataattatccaccaccattagatgctcatgtggttgcttctgttatgactgtatggagcaagcttcaaccagagtatgctgctaatatgtggaaagaagcccttaacaaacggcttggaactaagggtcttgacctttctgaaatcatagtggaatcagagaaacgtgggataacatttgacaagttactatctgttcctgagaacgatagctgggtctatgaagatggtcagtcagcatcttgtgtggctttcgtccttatgatgtacaaggaggctggactctttgaccctattaccagctctattgaagttactgaattcacaataaaagatgcttatatcctcaacttttttgaggacaactcgacccgacttccggagtggtgcaacaaggatgacgatgtgaagcttcccttttgccagatcaagggcaagtaccggatggagctgcctggatacaacaccatgaaaccctatgcccacatgaacgagagatgtccatccctgcctccagattacaacaggactaagggctgctagtgctaaccagatatgcgtgtgcattttattcacgctcccttgtagccattgcttcagctgtaaatattatacatttatactagtataatagtactatgggggtatgtactgcttgcccttgagaagcgtgtattgattgtaggcaacttatgtgagacttcctcgaataaggaagaacatgaatcacacaaatgtacagtaaccatgcttgatctttttatcagtgtttacttatgtaacagtaaaaaatgtataatgtatgtgcgcctttggactgagctgattacatgatccccatgcccaactcgagactagttctctctctctctctctcctcgtg

SEQ ID NO: 114246 - DNA, 511 bp, Zea mays
  Clone ID: MRT4577_35677C.1
cccacgccgtatttctcaatctatctatacggttcaagggaccgaagaaggtagagagagaaacttgaaggggagaggaaggagatacaggttcatgttcatttaggtgtcagttcatctgatttctcagaagcaaaatgttgtttggagctcagtgacaccatcttgtaatgcatgtgccttttacgggaaatggaggatcattctgtccatcccaagtctaagtctaaccatggctccttgtcaggaaatggttatgagatgaaaaatccaggccatgaagtttgtgatagggattcatcatcagagtctgatcgatctcacccagaagcatcagcagtgagtgaaagcagtctagatgaacacacatcaactcaatcagacaatgatgaagatcatgggaaggataatcaggacacattgaagccagtattgtccttggggaagggaaggtctgcctttttggccccaaaaatagattacaacccgtcttttccttatattccttata

SEQ ID NO: 114247 - DNA, 128 bp, Zea mays
  unsure (1)..(128): unsure at all n locations
  Clone ID: MRT4577_35678C.1
gtatgccagacttntatattgcactgctcanatcagctttcagatgacaaaacattccatacantcaaaaggcgncacggcncttaaggacctactcgaaaggngcttangacgaggtgaaacttggc

SEQ ID NO: 114248 - DNA, 670 bp, Zea mays
  unsure (1)..(670): unsure at all n locations
  Clone ID: MRT4577_35679C.1
ataccctgctgctgggtagtactagtatattgctgttcaaacctgcaaatgtaagttttaaacaaacctgccatttctatctactgtactatgcacttgcnacttgaaacatataactttcattcatgttcagttagcatataagtatatgcattaatgattaagttcatgcaccggccgattcacaacactgaaatactgatgccacagatctgggatcagctgatggatgaaagaacaatcagtagtctctgggtaaaatatcatgcctgcgcaagcgagcggacatgagtgacaagaagcggtgagtgcctgcctgcctccatttaagggcctgttcgttctcatcttaatacatgtggattagatgagattagacgaaatggaagcagagcattgtggtcagaccaccaccatctccaagggagaacaaagagaaggcaagcagagcctgtgcacgtattggttggttcagttgtgcggttgctctttttggctcttatcttcgtcgccattcttgtatttgtaggattgtgctgtttacattaacaaatagataacgttcttcctcattagtgattgcaaccaaaggcagtctggcctaatgctgtggtttgtaagggcaaagtggataccctgctgctgggtagtactagtgtattgctgttga

SEQ ID NO: 114249 - DNA, 2621 bp, Zea mays
  Clone ID: MRT4577_3567C.1
gaaaaaaatgaaacattcatctgatgcaaaagtcaagggaacttctcagctttcatcatttatcaaaagaactcgtcaagctataaaccacctcatcggatccattgtttatctcatcaacatcactaagattaagttggcttacataccagcatcactaaggttctctaaacaaaagggccacaaccatgccttggtattacaaggcaggataaaaaccgaaagggttgcctagtcaagctagaaaccacctcagcagatccataagttccttacatctcatcaacatcactaagcttcagttagcttatattttagcatcactaaggttctctaaccaaaaagtacatagccacgccttggcattcacctgcagcaaaagaatgaaggtgttccactgcagcaaaagaaccaaggcgttccactgtaagaaaagaacaagaaggctttccaaaagggaccgtagcaacgcttcggtgttccaccactgtagtaaaagaatgaaacagcttgcgacttttttgcaattttactatccctgttagcctctcagcctggatgaaaacatttaagaacaaaccaatcaacgttgtgattacatgcttcgtggggatgatggcaatgctccagcatgcatggaatgaagtatgccatattgacatgccatgtctacaaaatttcctcgtcaaaatgccatgacatgatggaatgaatcatccaagatttcagaattgttagtaaaccagcgaaaccacatcaactattataatgaaaacacaacgttgcaactgcacaaagggaaatacataatacgaatactacacagtgcaatggccataaagggaaatacataatacgaatactacaaagtgtaatgttcatgacaaacgccaaatgcacatctagaagactaggatggccttcacaagctacaaagataatgtaaaaaaaagtaacaccagcatgttttggtgacaatgcaatgtcagccagatgatgatcatgcccctgaaactccacctaataaagatgatagatgatgatcatgtcccagatactccaccaaatgaagatgatgatgccacgtgagagagcgtgcattcagcagaagtatgcagatcataaataagatgtggtagtatgaaatccatgatggcatgctaaagttcaagatacatcccctcaggctgcaatcaatttgcaggagccccatttagaacgctcgcaaggccagcagctgaatccttccttcgcccaaagggattctttgaaaattgaattcgcattccaccacgaccagaactaggaataacagcaccctgcagagtttggtgcacagatgtagcagcattcacatcctcaaattcaataaagcaaacagtgttcctatcttgacgtaacactttcatttgcttgaatccaggttgcacactgaagaggcttcgcaattcctcttcgactacagtatcaccgagattaccaatgaaagtgttacgtcaagataggaacactgtttgctttattgaatttgaggatgtgaatgctgctacatctgtgcaccaaactctgcagggtgctgttattcctagttctggtcgtggtggaatgcgaattcaattttcaaagaatccctttgggcgaaggaaggattcagctgctggccttgcgagcgttctaaatggagctcctgcaaattgattgcagcctgaggggatgtatcttgacttttagcatgccatcatggatttcatcctaccacatcttatttatgatctgcatacttctgctgaatgcacgctttctcatgtggcatcatcatcttcatttggtggagtatctgggacatgatcatcatctatcatctttattaggtggagtttcaggggcatgatcatcatctggctgacattgcattgtcaccaaaacatgctggtgttacttttttttacattatctttgtagcttgtgaaggccatcctagtcttctagatgtgcatttggcgtttgtcatggacattacactttgtagtattcgtattatgtatttccctttgtgcagttgcaacgttgtgttttcattataatagttgatgtggtttcgctggtttactaacaattctgaaatcttggatgattcattccatcatgtcatggcattttgacgaggaaattttgtagacatggcatggcaatatggcatacttcattccatgcatgctggagcattgccatcatccccacgaagcatgtaatcacaacgttgattggtttgttcttaaatgttttcatccaggctgagaggctaacagggatagtaaaattgcaaaaaagtcgcaagctgtttcattcttttactacagtggtggaacaccgaagcgttgctacggtcccttttggaaagccttcttgttcttttcttacagtggaacgccttggttcttttgctgcagtggaacaccttcattcttttgctgcaggtgaatgccaaggcgtggctatgtactttttggttagagaaccttagtgatgctaaaatataagctaactgaagcttagtgatgttgatgagatgtaaggaacttatggatctgctgaagtgggttctagcttgactaggcacc

SEQ ID NO: 114250 - DNA, 1499 bp, Zea mays
  Clone ID: MRT4577_35680C.1
gcacgagctcacttgcttcgacgtatttacctatctatctatccggataaaggacgcggaggaaggtaaagagagaaactcgaaggggagaggacagaagagggagatacaggttaatttttaggtaccagatcatctgatttctcagaagcaaaatgttgtttggagctcagtgacaccatcttgtaatgcctgtgcttttacgggaaatggaggatcattctgtccatcccatgtctaagtctaaccatggctccttgtcaggaaatggttatgagatgaaacattcaggccataaagtttgcgatagggattcatcatcggagtctgatcggtctcaccaagaagcatcagcagcaagtgaaagcagtccagatgaacacacatcaactcaatcagacaatgatgaagatcatgggaaagataatcaggacacattgaagccagtattgtccttggggaaggaaggctctgcctttttggccccaaaattacattacagcccatcttttgcttgtattccttatactgctgatgcttactatggtgccgttggggtcttgacaggatatcctccacatgccattgtccatccccagcaaaatgatacaacgaacactccgggtatgttacctgtggaacctgcagaagaaccaatatatgttaatgcaaaacaataccatgcaatccttaggaggaggcaaacacgtgctaaattggaggcccagaacaagatggtgaaaggtcggaagccataccttcatgagtctcgacatcgtcatgccatgaaacgggcccgtggctcaggagggcggttcctcaacacaaagcagctccaggagcagaaccagcagtatcaggcatcgagtggttcattgtgctcaaagatcattggcaacagcataatctcccaaagtggccccacctgcacgccctcttctggcactgcaggtgcttcaacagccagccaggaccgcagctgcttgccctcagttggcttccgccccacgacaaacttcagtgaccaaggtcgaggaggcttgaagctggccgtgatcggcatgcagcagcgtgtttccaccatgagaagtgggcacgacaccattcccaggcgcactgcctgtggcaactcatccttggctcttgaaactttgaatatgcaatcgacatgtagcttgagatcctcagaataaaccaaaccttcagttatatgcaagccccttttgaggttgctgttgctgtacctgagaactgtggttaggttatgagtttgttcctgaagactgacccatacatgacatgctaccttgtgctgagtttctgagacaaagccatcgaaacatgatcttgtggttcagtacttgctgccttcagtgtctgataagctagctctccagtttgcagtttctctgaattccagcatgtctagtctctgcttatcttttgcatgtaacgtgatggtgacttagcatacacatctattcatccatctatgttct

SEQ ID NO: 114251 - DNA, 1169 bp, Zea mays
  Clone ID: MRT4577_35681C.1
tgggaccctcgaggccggccgggatacgattccgaagaaggtagagagggagaggacagaagagggagatacaggttaatttttaggtaccagatcatctgatttctcagaagcaagatgctgtttggagctcagtgacaccatcttgtaatgcctgtgattttacgggaaatggaggatcattctgtccatcccatgtctaagtctaaccatgcctccttgtcaggaaatggttatgagatgaaacattcaggccataaagtttgcgatagggattcatcatcggagtctgatcggtctcaccaagaagcatcagcagcaagtgaaagcagtccaaatgaacacacatcaactcaatcagacaatgatgaagatcatgggaaagataatcaggacacaatgaagccagtattgtccttggggaaggaaggctctgcctttttggccccaaaattacattacagcccatcttttgcttgtattccttatactgctgatgcttattatagtggggttggggtcttgacaggatatggtccacatgccattgtatgttcactcttaatttttcagtttctgtcttcctggccacattctgtccatccccagcaaaatgagacaacgaacactccgggtatgttacctgtggaacctgcagaagaacaaatatattttaatgcaaaacaataccatgcaatccttaagaggaggcttacacttgcttgatgctgatttggtaagatgactttcattaatcttcagcatttgctgcatacagagctttgattatcaatacagtagatttttcttgggtcttgaccatattcagagggaggtcacaaaagaccctctggctacaatttcagtgggtttgtcataggcttaatttttttattagcaaattgttctggacttgtgtcaccaagcatttttgtaagggtgagagtaataattattttgtaactagctaacatcaagcattttcttggcttcttcaacattttttcatctgttcttttctgatctgaaagctgcatgaattagtcctgcattcctatacaggcaatagttctgttacttcagctatataatttatatggcaaatacacgttacaaagttgcatttcttcacagccatatcttcatgagtcccgacatcgtcatgccat

SEQ ID NO: 114252 - DNA, 242 bp, Zea mays
  Clone ID: MRT4577_35682C.1
ctcacgcgtacgcctaattgtgcgcacagtcgtcaggccacgcgtcctgccacgcttgcggtaccgtacttccgtgcatacatacaaacatccgtcacgtcgcagcattggatagaggaattcgaaagacgaggtggacactatagatggggagcggccgtggcatgggacgacgcgtggtctatggcggtgggatgggtgacatgcgcaagccagggcttgtccgatatatgaccatgggc

SEQ ID NO: 114253 - DNA, 448 bp, Zea mays
  Clone ID: MRT4577_35683C.1
cacatcattcttcatcccttttatttttaatcaatcacattactacaattcctttcaactctattcttcactttccactgtgtggaggaaacaaacactatgttcataatgtccctccaacaaattctacaccccatctggttttacttctttgaaccatgtgtaaagtcctccttccagatggcacacgttccttttgccattcaagaccaacattttcgcaaatatcatgtacccatattgcttcccaaaaaggaaattttgctttaactacactgtacatactgtccagcatacaacaaaaatctttgcatctttcccaacctcccaatcaacactctttattaactcacgattcttttctccaacaaaaaatattccgaataacgcaaacgctccacgcctaacaatatcccacactttccattccttgatcaaaccctatatt

SEQ ID NO: 114254 - DNA, 319 bp, Zea mays
  Clone ID: MRT4577_35684C.1
ctgccgcccctacgctccacaaactcttttcaaaacccactcccactccttcgaggtaggatctttatccccaggcgttcgacacctaagcctaccccgtctacgttcactccaagcctcaaacctacgacgcccaagcctacctcacacgacgtacacttattcccacaagtcttctacacctaagccgacccatcctacgtacactccaaaccctaagccaccggctaccaagcctaccacgctcaaaccgaccccgtcaacgtacaccccttcctcaaacccttcgacactcaagccgacctacacgacgtacact

SEQ ID NO: 114255 - DNA, 374 bp, Zea mays
  Clone ID: MRT4577_35685C.1
ggcgcagaggtcgctgccacgcgggcgccatctaagcccgctaacctcgacgccaatgatgacgatgtcgagcttagagcaactccagtagttctctaaaatactctcaactcccgaaacataaaatctggcacacttcttttatttggacgtcttttccacattcagagcccatgcgtcggcaggtctgctattactcacaatacaaacactaaaaacaaccaaggacaactgtattatgatttgctgatgttcctttcactgcatttgtagactatatttatgtcagggtatttgaggatcgcatggatctcttgagagccgtgattgttggagcaagtggaacaccctaccaagatggccttttcttcttt

SEQ ID NO: 114256 - DNA, 204 bp, Zea mays
  Clone ID: MRT4577_35686C.1
acacaagaatcttctaaaatggggtatattaccaacaattgaaacgaactcaaggaaaaggttcccaagaatcttctaaaatctgttttattaccacccatagtatagaatacatggaaatggattacatgaattttttaaattttgtttttttaccaaccctataaaagatccatggatattgttctcatgaatcatacaatt

SEQ ID NO: 114257 - DNA, 222 bp, Zea mays
  Clone ID: MRT4577_35687C.1
aatgctcttgggttacgaccgcttcaaactgtattctaaattattacctctgtttacgaatgtttggcgccggcttgttctctgagaacgaaaaatacaccgcgagcaggaacaatgccggggacaacgactaccaaggcggccgagacgaccgagaagactccctcagtatctacacaggggggggcggactcgaggacccaacttgcttaccggatcatg

SEQ ID NO: 114258 - DNA, 394 bp, Zea mays
  Clone ID: MRT4577_35688C.1
gccgcccttcctttttttttttttttctacctaatactataatccaacccaaatacaaaaatagtgtcgcgtatattatatattccgagcaaaaccactcctcacaacaaattcaaattacatcccttcatttaatttataatattcaaaacccccttttatattactaaaaggatttttctttcactccacatccacaagctaatatataccctccaatgcctttgatatgtttaaaccaattcattcctttggaaaaaacatactctttatcttgtgaattccccatgctactcttgaacacttttaccctgtattacatgaccttacttaaaggacttagaatcttttagcaaaaccgtacttaaacctatcaccattatctaaccacata

SEQ ID NO: 114259 - DNA, 400 bp, Zea mays
  Clone ID: MRT4577_35689C.1
gctacattatacaccattctgttgtactttgtctaatttttttttttttttttttgggacggaagaatccttcggtggctcaaaatctcaggggctcaagaacacaagaacgattattttttagatcttgataccctgagtcgataccgttaactaacaacgtggttaccccttggaattccaccccaaagaaaaggcggggcggcccgggtgtttccctggatgagggggtgaccacaccttttcctggttttaaagacaatgctcttattttttttccatggggtggcccaaatttaaccgggcccacgtgggtggcctctattgggggagtgataatcgtgattcttattgcctgacagggctttgacaccctgggggccatgggcacaacccggcc

SEQ ID NO: 114260 - DNA, 477 bp, Zea mays
  Clone ID: MRT4577_3568C.1
ggggtaaggttggaccgggcaaattgggacgggagcctgggggaaaccgagaattccgaaaggggggcggaaggagggccaggggtccccatggggggagggggtaacggggggaaaattcaaggcaataacagatcccgagaaaaaaagagccaagcgcgaaaagtcaaaagagggagcgacccaaaaagaaaaggaataaacacaaggggggctaaggagagggcaaacttacaaaaagggaaacctgaaaaacgcccccaatcaaggaagaaaaccggtcggggcaagaggcgcaaggaatcttgcaccccaggggggggggacgtttaacaagggagagcccgaaaaggttttttcctaaaaaaggaggaggaaaaaagaaaagtggccttcacccaccgggccaaaaaccaatcaggcgaaagtccagcgcgggggaggccaaaagcgggaaaaaacagggggggggggggg

SEQ ID NO: 114261 - DNA, 374 bp, Zea mays
  unsure (1)..(374): unsure at all n locations
  Clone ID: MRT4577_35690C.1
ttttttttttttttggagaggtacatacaactatggggggcggcatcataaaacaacgngtaacgggcgaccccccaatatacttacacaccgatactctaacaaaaacacaaactaccccggttctaagtcccaacagcagataaaactttcaagtgggccaacacctacccttggaatgacttttcaaaaaaattatactttttttaataaaacgtgttttaaaaacccctttatacaaaaaaaaagggccattttttatagacccaaaaaaaatgccttttttttttgaaagagaaccacaaaagagttttgaaaaacacaaaatcccttttatataccccttttttttttttaaaaaaggggggggggtg

SEQ ID NO: 114262 - DNA, 556 bp, Zea mays
  Clone ID: MRT4577_35691C.1
tccacctgtgcttgccgctctgctcgcctctctctatgattctccctttgatccgctaatatgtcaggcgagacgtcgaacgtggcggtgccggtgtcggtgctccacaagcggctgcgcaaggaacagcgcgccgcccagaagaacgccaaggctatagtcaaggatataaactccatagaagagccgcatgctcatcttcaccctcacattgccctccgccgaggaatacgatgcccaatacaatgcactggagcaggttatgcgccaggtccatctcaagggccgtttgtatggtagttcttatgcaaagcttgtctttgaggtgctctttctgggtcttaatgccatgctccctgccatccgcactatcttccagattatgttattgatgctgatcttgaatggcgtgtttcttagagtgttcatggctactattaacattcttctcaacattctgccatatgttgcatcttgtttcccatacttgtacactgtcttggagattgtctacaagatgagctatggaaagctctacaggcagatgatccctctg

SEQ ID NO: 114263 - DNA, 264 bp, Zea mays
  Clone ID: MRT4577_35692C.1
aaacgtggtcaccttcgagtagagaggcccgccagcccaccgtgggcagtgccacccgcagatgacacgcgctctccactacccaacccaaaccatgagaatttgcaacaggggaggaaaaaagaaccaaaacttccaaggcactgctttttttcttaaaagtactttaaaaaggaaatttgtttgtattttttatttacattttatatttttgtacatatggttagggtcagccatttttaatgatctcggatgaccaaacca

SEQ ID NO: 114264 - DNA, 239 bp, Zea mays
  Clone ID: MRT4577_35693C.1
agaaaaaaaacacacatagatatttataaatataataaaaagggcggtcgctcgcgatctagaactagcgtacgcttggtctcgcccacctcctctgctctttcctctcccccacctctgcgtccgttcgttgtgtttgtttagtcggcaaccgcgaggcgcaatggcgtccgggctagatctggtgttgagtttctgctatatgttgatagatttctttcctatcgtggcgttgttct

SEQ ID NO: 114265 - DNA, 272 bp, Zea mays
  Clone ID: MRT4577_35694C.1
gagctctcctgactgcggccgcccttcttttttttttggggttttttttttacatttggggcttttaaacaaaactatagaacttccaaatctcgcaccaccaaatgccagtaccactctaccaaaaaaaccaaaaaaaatttcaacatcctcctcaaaaaggaaacatatcattataagctacctaactccctatccaaagacaatttcaacttagacaaggcccctaaatggccagtattgcataaacaattgcaaacctaaaaatcctt

SEQ ID NO: 114266 - DNA, 285 bp, Zea mays
  Clone ID: MRT4577_35695C.1
cctgtacacgcctccgccaccctaccaactactcaataaccctagctaaaccccacgccggcggggggaccttcttcggcggcaggatggacaaccctaagggaaccaaatttcccggccttcccaaaggccggaatgccctcgttaaggtggcccttcttcgcggcgccgggctttaccccgttcttaacaagttctacaacgttgagggccgacaccgggccattgttttcaaccggcttgaggggatcaaggacaaggtgttccccgaaggaacttacctta

SEQ ID NO: 114267 - DNA, 354 bp, Zea mays
  Clone ID: MRT4577_35696C.1
tggttagatttttgttttttggactgccactgatagtgcccccagagggaggcgacaactgctatgccgagcactgcttatgtatcacgtgctggtagggccaagattaaccagtcccttcgcacatgttgagcaggaagggctgccaatggcgagcaacgagcaatgcctagcattgctacaacacgggagctatgccctcctgttaaggatcatgtggccaaaaagacacgcagtggcacacactatggtgatactcaacacaagcgcgcgggtcaaactactccggatattgtgtatgaaccacgcggctctgtttccatgttatcacacaacaaaagcacggccatttcg

SEQ ID NO: 114268 - DNA, 261 bp, Zea mays
  Clone ID: MRT4577_35697C.1
gggcctgctattagcttcttcttcttccgaagggggtggacgcagcactatgccagcagaggaagaaagcttgcggtcgttttggtgcgaatacagcgaacgttcttacagaggagaacaggagaaggtctggtgtctccttctgctgcctgtgtgagcaccaccatggcgtgatatgcattactcgagagaggtggcacatgcactccgtctggcagcggcgagctagctgacgaccacagcggaggttggagcgctctg

SEQ ID NO: 114269 - DNA, 584 bp, Zea mays
  Clone ID: MRT4577_35698C.1
gggggggggggggggtcctgcgagcgctattttgggttcggatgcgaaattgacgaggagacctccaacaaactcgaaggtgacttgtttggttccttgttcaagagtaaattttttttttttttttcatcttttgtttcagttcatgtgggggggggggcgctataatgttgatagttgcatagtgtgatggatgggagtggaaaattaagatttctgcttgagcagaatgcctagttatgttgaactgttacgatgttgcagtctatttatgattcggtccatgacacattacttggtttagcttaggtactaattgtattttattatggtctggtacattacttggttgagcttaggtactacttgtatgttattatgttcattgagcaattatatcaggtaaagtgacgtgttgacttctaccactagaaatgtactatgcttattctctcttaggtgacatgatatgtacgtgcttgtttctaaagcattcacagatataaatcttatgaacttttagtgcactacatgtatcactagatgcactaactgtggtttgtgtttggataaaacaggccttc

SEQ ID NO: 114270 - DNA, 165 bp, Zea mays
  Clone ID: MRT4577_35699C.1
tatccactcactttagggataacatttaaaacaacatggcacctaaacgccaaaaactggattaaaccgataaaagacgtattggtccattttcctcatagactgcttctccctctctagcattacaaaaacagactctttaataatagactcttaatccaaact

SEQ ID NO: 114271 - DNA, 508 bp, Zea mays
  Clone ID: MRT4577_3569C.1
ctgctccctccctccgccgtcgcgcgcaccctccccctcgctctggaactcccaaagagttggagttctccgtccccacgcctcgccggacccgccatcaccgcctcctcgttgggccacgaaacgctagcggcgcctgcagcccctggatactgcgtcccgctcccttgcgcctccgcccgtgccctgctcccaccgacgtcgcattagtgtatgatgatctcatttttcgctatttttttagctccctacaccaaagaccagagtcagatccgaggctacccgccgccccggcaaggattttacccggccgaagctctgcaacatcggtgggatcgatggctgcgacctccacgagctccggtgcccacgaatcgaagtcagcagcgccgtgtggactgaggcacgtgcctggttcgccgtcctgtccgacgcttctcacctcgagagcccgtcgcggttgcctcggactcgagggagctggcggcgcaaacgccgtgcggccaaa

SEQ ID NO: 114272 - DNA, 1963 bp, Zea mays
  Clone ID: MRT4577_356C.1
cctcgaggccggccggggaaaaacaccgccccccttccctcgcttgcgctgtcactccatcgtgggctcgtggcccaggctgtcgttctgttctataaagcgagccgagtgggagcaggcgtaaccctaattgagcatcgcagagataggcgtcttcgtactcgcctacctccgcggctcaaacctttcccccttctcccaattcccggccgccgctccatcccgtaacgcggacaccatggaggggagtgcatttccgatccacatccgggccaggccgggtatccaggtcggaaacgcgtgctgggagctgtactgccttgagcatggcattcaggctgacggtcagatgcccggtgacaagaccattgggggaggtgatgatgctttcaacaccttcttcagtgagactggtgctgggaagcacgtgccccgtgctgtttttgttgaccttgaacccactgtcatcgatgaggtgagaactggcacctaccgccagctcttccaccctgagcagctcatcagtgggaaggaggatgcagccaacaactttgcccgtggtcactacaccattggcaaggagattgttgacctgtgccttgatcgcatcaggaagcttgccgacaactgcactggtctccagggcttcctcgtcttcaacgctgttggtggaggaacgggctctggccttggttccctcctcctagagcgcctgtctgttgactacggcaagaaatccaagcttgggttcactgtgtacccttccccccaagtttctacttcggtagttgagccatacaacagtgtactgtccacccactccctcctcgagcacactgatgtggctatactgctggacaatgaggccatctacgacatctgccgccgatcccttgacattgagcgcccaacctacaccaacctcaacaggcttgtgtcccaggtcatctcatcccttactgcctccctgaggttcgatggtgctctgaacgtggatgttaacgagttccagaccaacctggtaccctacccgaggatccacttcatgctttcttcgtacgctccagtcatctctgctgagaaggcctaccacgagcagctctctgtggctgagatcaccaacagtgccttcgagccatcttccatgatggccaagtgcgacccacgccatggcaagtacatggcctgctgcctcatgtaccgtggtgatgtggtccccaaggatgtgaatgctgctgtggccaccatcaagaccaaacgcaccatccagttcgtggattggtgcccgactggcttcaagtgcggcatcaactaccagcctcctagcgttgtgcctggtggcgacctggccaaggtgcagcgtgccgtgtgcatgatctccaactccaccagtgttgtggaggtgttctcccgcatcgaccacaagttcgacctcatgtacgccaagcgtgccttcgtgcactggtacgtcggtgagggtatggaggaaggtgagttctctgaggcccgtgaggacctggcggcgctcgagaaggactacgaggaggtcggtgctgagttcgatgagggcgaggatggcgacgagggtgacgagtactagagaagtttgctgatgacgcagcatcaggccagtgtgctgcccttatcccgtgatctgccgagagttgctcctgctatcgtgttatgtgtgtctgttctgaagtattgtgtggtttacaacacctgatgttgtaagagttgttaattcccctgcattgctaccgggttattgagaataattatggctgtttacgttgttgcttcatctcggagatgctttacatttaccaccttgttcatcttttgtcatcagtaaaatcgagtcggcggatgattttcttgcgtcttgtcatgagtattgagtagtatggattgtttgatgctttatattgtaaaaaaaaaaaaaaaaaaggcccctagggcc

SEQ ID NO: 114273 - DNA, 397 bp, Zea mays
  Clone ID: MRT4577_35700C.1
gtatggtgttccactttggcagagtcacagagggacctgctggggcaatgattaaccactgggggtctggctgagctataatgggggtatacggtgtgagcagagacactgctgtgggactattacagggaccgtgatatatgattgcgtatggacaaaatttgctaccaatgtcgtccacctgagagcagagcctattggcgcattgtacacaccttgcttgccaatggtgtccatcccactcccatgtgttggcaaattgagataacacagctcgtaggctgttacgctttgtgaactatctggatgaccatcttatgaagcatgataatgcaatcatgagtaggccgatcaacttgactaacccatctgaattcaacactctggtacttggttg

SEQ ID NO: 114274 - DNA, 210 bp, Zea mays
  Clone ID: MRT4577_35701C.1
tgtgtaagctctgtgtggtaaaagcatacaatttggctggtggtacggtaaagctagcagtggggtgctacctagaacctacagttagtatatcgggtaagtatgtaaagaacctttggcatgggaccctgcaataggtaaaactccgaataatccaaggttaacatccgttctccaaaaaaaaaaatattgggccggccgtttaaaagg

SEQ ID NO: 114275 - DNA, 277 bp, Zea mays
  Clone ID: MRT4577_35702C.1
atcatattttgaaatcacctaacgatgcaattgatggaaggcttaatgggtgttttcaacctacaatcccagccaagatgaagtctcaaagaggagaaggattatgtggatatgcaatgggcttttgtggttacatgaatgcggtgagccatttaatgcaccatcatctacataattttaatgatgttgttgaagttgaaagggaaatgcgctcttgtgccatttctattatgttttggtgattatatgtccaacacatagagattattactttatt

SEQ ID NO: 114276 - DNA, 284 bp, Zea mays
  unsure (1)..(284): unsure at all n locations
  Clone ID: MRT4577_35703C.1
cggcccgccaaccccgggaacggtacataaaaaggcccggccgcaccccccccaagagcaccgnacanngngcggcgcccggggcgcccccggcggcccacgaaaacccggaggaccgaaaaccgcccacgcccggccgaacccaaaaccgcacaaggcaacaaaggcgaacagccccacggccaaaggaacaaagcaggcaagggaagccggccaaacggaaccggaacaccgggaaaaggcacggcccagagggacgggcccgggggacccggccccgaacc

SEQ ID NO: 114277 - DNA, 360 bp, Zea mays
  Clone ID: MRT4577_35704C.1
atacccgtgggaccaggcagccatacaccgagggcctccttaagcaagcgcaaggcgtaaccaacccagagagaaagaaagcacgcggccccaaagccaagaagacccagggaaccaagcccgtcaccgcgctcagcagaaccgaaaccagcaccggcggaaagaggaaggccgcggacgaccgaccgaggcgcagggacaccaacggcatcgcaaaactgcgaacgagaaggacaacacggaccgcgagcaggccaacacgcagaacgccaacaccaagcgcaccgagcgcagcaacaaccaccagctaacctaccgccacaagggcaagaccgccaggaccgacaaagaggcaaacaa

SEQ ID NO: 114278 - DNA, 314 bp, Zea mays
  Clone ID: MRT4577_35705C.1
caattttccttccaaaaaccctaccaaagaaattttggaaattttaatactcccttctcctcttccccttttaacaaacacaaccaaatctttccttttttcccaaagctcaatatcttccaaaaccattatttcacaattgcttacaccatttacttcaattgccctccaacaccccactttccaaacccaattcctacaacaaactattctcctcaacctttttacataaaacaaataccccatttctacaactattccttttatattctaacatacaaaccatcccaacgcaataattacaacagttccta

SEQ ID NO: 114279 - DNA, 219 bp, Zea mays
  Clone ID: MRT4577_35706C.1
aattcggcacgaggccgcggggaagggccgaggaaacaagattcgcgagggggagaaaaggaaaggagagtaggagacaacacgaggcgccgaatcgaaacagggaaagccaaggcccctcccccgcgtacgcgtcactgtgcggcgcctcccccttcctcgctccgctttctgctctgttcgtgtgtgattcgttgtttaaaccccaagtgcatgtgg

SEQ ID NO: 114280 - DNA, 288 bp, Zea mays
  Clone ID: MRT4577_35707C.1
aaaaaaaaaaaaaaaaaaaaaaaaaaggaaaaacaatataaaaaaaaaaaaaattaaatacacataaaatcaaaaataataaactatactatagagtaaactaaatgtcaattcactgaacggggggggcgctttttggggtctgagattttccctggcgtttctcaacttaataattttttttttttatgcccctttataaaattttcgggggcccttttataaccgcgcggatgggaataaccttcggttgcccaaccttattggcttttgggacactcccttttt

SEQ ID NO: 114281 - DNA, 254 bp, Zea mays
  Clone ID: MRT4577_35708C.1
gatcgagcatatatatattatttatttagaaggtatcttttcttttaacttattcatgacaacgaatgcataagttggatatgcaatgcatctcctgagattttagtatatttggttggtcacctaggtacctaacaatgtcgctgacgcgtgttgctttcgtgcaagagcagcctttgtacaagtcaatttagtttttctttgctctaaactacagagaaataagatgcggtagagataattcttatatttgc

SEQ ID NO: 114282 - DNA, 398 bp, Zea mays
  Clone ID: MRT4577_35709C.1
aaaaggaaaaaaaaaaggccggcctaaattttttccttatcagcaaaaacagaaccccatagtagggcagggaccaaaaatccccccgccccctacctggaccaaccgaaaccaatagggaaatcctttggaaaaaattccagagcagtaatcccagttaataaataccaaaaggaccgggggaatgacaagtcctcaaaagccaaaacaataattttgttctgaaacccctccagccctttttgccgaaaacttccccggaacccccccccggtccagtgcgcccaaaaaaaaaaacccagtcatttttacttccagttttggatccccaacatggtcgcctttccacgctttacctccacacacacacaaaaaaaaggtcccctacacaaaccctt

SEQ ID NO: 114283 - DNA, 310 bp, Zea mays
  Clone ID: MRT4577_3570C.1
aattcggcacgagggctgctccaaaagtttctctgtccttgcctcgcacgccaggtcctgctggtatctgattccggcggtcgctggtgctcatggcgccgattcccgccctaggagattttgcgtggggtgccgctcgatatagtactcgacctgcgtgctgggcagcaggcggagggcgtccgcttcgtttactgccctctgaccgaggaaggctttcttgcactgatacgcgggctacggtttgtccgaaagggcgtgaaccgtggtcggtactaccatcaactacctttgctcggtcctcccctga

SEQ ID NO: 114284 - DNA, 309 bp, Zea mays
  Clone ID: MRT4577_35710C.1
tgaaaatgatttcatatacattgagggtcttacaggtatgggtaaagttctataaattgcaacaagatgatacccaatttcattttatcctttttgtattgtgaaactggaaactttatgacattgtaaattatcagctggtttttctgaatataaagtgtgaaaacacagaacagtattttgatctatttgataattttgtgggttttttgaagaattaatgagcatgtacatagaaatagtgactgcttgaatactgtatttacttgcactctttcagtacatcaagattcctgtatattttagagt

SEQ ID NO: 114285 - DNA, 817 bp, Zea mays
  unsure (1)..(817): unsure at all n locations
  Clone ID: MRT4577_35711C.1
aaaaaaaaagcgagagggggccagccattcctctcttctctaccacctactcccctctctctcctccccttctctctaggatcgccagccagccagccagcgccagccaatcgcgcacccacagcgcgcgcgcctcccaactgagccccgagaaagaagaagaagaagaagcagaggaacagagacagagaaagagcaatcactcgtcagaaagtgaagaacaagtgttcttggcctccgctcctctccgcccgccatgtccattgatgaaggctatggccctacctgggacagcgacgacgagtacgacaacttcatacgcaagatgaacccgccaagtatcatcatcgacaacgattcgttggcggacgcgacgattgtcaaggttggcagtgcaaacgagtatgggattctgctggaagtgatccaagtcctcatggatctcaatcttgtgataagcaaggcatacataacctcagatgggggggtggttcatggatgttttcaatgtgactgataaggaagggctgaaattgaaagacaaggctgctattgcggagattgagggctacatccggaagtccttgggcgcagattcaagatacatgcctgctaaacggagatcggntgggtgtcgccgcttcaaccgaccacaatgtcattgagctgacagggnagcgatcgtccaggcctgctctctgaagtcagcgcggtgcttgcgagcctcaaatgcaatgtggtcagtgctggaatttggacccataacacagnagttgcagccgtgatgcgagtcactgatgaggacaccatgctagcc

SEQ ID NO: 114286 - DNA, 579 bp, Zea mays
  Clone ID: MRT4577_35712C.1
aaaaaaaaacgccgccggcagcgacaagcccgtggtgctcatgtgcaccgaccctaccaagtcgtccctgaacccgaacctgtaccgcccgacatttgcaggatttgttgacacggacatctcgaacggcaagatatccctgagaagcctgatcgaccggtcggtcgttgagagcttcggagccgggggcaagacctgcatcctctccagggtctacccgtcgctggccatcggcaaggacgctcgcctctacgtgttcaacaacgggagggcgcacgtcaaggtgtcccgtctcaccgcgtgggagatgaagaagccggtcatgaacggggcctgaagatcttgaataaatatatcacccatgcatgacatatagtggcgcctgagaaatcttccctttttgatatatattttagatatatcgtttaagaattcattttctacactaaaagggcgccctcgttatgttacaatggtaccagctgcacttctagttaacaaagacaaattgactgttttgttgttcacttgcaccgttgcacaatgtttaaaagtacttttcaatttcagatgcctact

SEQ ID NO: 114287 - DNA, 312 bp, Zea mays
  Clone ID: MRT4577_35713C.1
cactagtcgcaaccgcccttttttttttttttttttaatccctaatcaatacatcatattaaaactaccatcatagtgtatttttatcatcacactcttccattccccctaaccaactaattttactaccaacctccatgagatgcccactttttattcagctatacatactacacccacacacctactaaatccttctcgcattctctctacctaaactttaaccttcttcactcacctgccatactcttaccaccgttccccaccattcacccttaatcttcctaccaccacgaactccttcattctcaa

SEQ ID NO: 114288 - DNA, 2130 bp, Zea mays
  Clone ID: MRT4577_35714C.1
ctcgaggccggccgggatccttctagcttcgatctctatatacctctgtatgtgagtgaggccaatgagagccctcgtagtcgtaagtttcgcttcggcgtgcttgctgctgctgttgcagctcgcaggagcgtcgcatgtcgtctacaactacaaggacctcgaagccgaggctgctgcggcgacggaccaggtgccgccgtccatcgtcaaccccctgctcaggacggggtaccacttccagccccccaagaactggatcaatgatcccaacgcgcccatgtactacaaggggtggtaccatttcttctaccaatacaatcccaagggcgccgtatggggcaacatcgtgtgggcgcactcggtgtcgcgagacctcatcaactgggtggcgctagagccggcgctcagaccaagcatcccgggcgacaggtacggctgctggtccgggtcggcgacggtgctgcccgacggcggcggcccggtgatcatgtacacgggcgtggaccacccggacatcaactaccaggtccagaacgtggcgtacccgaagaacgtgtcggacccgctgctccgggagtgggtgaagccctcgcacaaccccgtcatcgtccccgagggcggcatcaacgcgacgcagttccgcgacccgaccacggcctggcgcggccccggccccgagcagtggcggctgctcgtcggcagcgcggcggggtcgtcgccccgcggcgtggcgtacgtgtaccgcagccgcgacttccggcggtggaggcgggtgcggcggccgctgcactcggcgcccacggggatgtgggagtgccccgacttctacccggtgagcaagggcggcgcgccgcgcgcggggctcgagacgtccgtgccgcccggcccaagggtgaagcacgtgctcaagaacagcctcgacctccggcggtacgactactacaccgtgggcacgtaccacccgagggccgagcggtacgtgccggacgaccccgccggcgacgagcaccgcctgcgctacgactacggcaacttctacgcgtccaagacgttctacgacccggccaagcggcgccgcatcctgtggggctgggctaacgagtccgacaccgccgccgacgatgtggccaaaggctgggctggaatccaggcgattccaaggacggtgtggctggaccccagcgggaagcagctgctgcagtggcctatcgaggaggtggaggcgctgagagcaaagtcggtcactctcaagaacagggtaatcaaggcaggacatcacgtcgaggtgaccgggatacaaacggcacaggctgacgtggaggtgagcttcgaggtgtcgccggcggccctggccggtgccgagacgctggacccggcgctggcctacgacgcggagaagctgtgcggcgtgaagcgcgcggacgtgaggggcggcgtggggccgttcgggctgtgggtgctggcctccgccaaccgcaaggagagaaccgccgtgttcttcagggtgttcaagcccgccgccggcagcgacaagcccgtggtgctcatgtgcaccgaccctaccaagtcgtccctgaacccgaacctgtaccgcccgacatttgcaggatttgtcgacacggacatctcgaacggcaagatatccctgagaagcctgatcgaccggtcggtcgttgagagcttcggagccgggggcaagacctgcatcctctccagggtctacccgtcgctggccatcggcaaggacgctcgcctctacgtgttcaacaacgggagggcgcacgtcaaggtgtcccgtctcaccgcgtgggagatgaagaagccggtcatgaacggggcctgaagatcttgaataaatatatcacccatgcatgacatagtggcgcctgaggaatctttcctttttttaaaaaacatattttagatgtcgtttattaagagttgattgtccatactaaagggcgccccgttatatgttacaatggtaccagctgcacttctagtaacaaagacaaattgactatttgttgttcaaaaaaaaaaaaaaaaaaaaaaaaaaaaaaaaaaagggatgttcgattcagatgccaataaacccggcaatcactatattctaattcatgattt

SEQ ID NO: 114289 - DNA, 834 bp, Zea mays
  Clone ID: MRT4577_35715C.1
aaagatggcctcggagtcggaccgagcagagagcactgcacgggctctccgtcagttccattcgcccgtgcgcgccatcaccgctgtcgccatggcgtcgcccaagactgccaagaagcaccacgcgcgcctcaacaaccccttcccgcgcgccgtaccgacggccgccatccgcgacggcgacgcggccctgcgcctgtcgttcgcgtcgacctccaagctcgcccacgcgcacgacttccccgtggggacccgtttccgcctccgctgggacccgtcccgcggcggcgaggtctcgctgtccagggttcctccgtcgtcgggcggcggcgcgatgtgggagaccgtccccggcgtggcgttcctctccgtggcctccgtggccaccgaggccgacgagtgccgcggctccttcgcgctccgcgacggcggcgcccgcctcgtccccgatcgccagcacgtcgacaagatcagggctttctaccgctgcgacgccgaggcaggcggctccgagcccgacctgctgcgcgccgccgcattccggccgtccgacgcgacgcggttcccggtgctggtggtgaccgggctcgtgtccgccgccaagaaggccggcgcgtcgccgtcgtgcacctgctgcgggttgcgcttgcgcgcggcaggtcgccgcgcccggagcgcggcggcggcgaggcccgtgctctcggcgcggtactggatccttctcgaggagaagacgacacgcaggttaggttcagcgtcaagatcggcgactaccaatggacctgctcgcacgctgaccctgccaagtcgcccccggcgacggcgacgaccacg

SEQ ID NO: 114290 - DNA, 252 bp, Zea mays
  Clone ID: MRT4577_35716C.1
aaaaaaaaaaaaaaaaaaaaaaaaaaaaataaaaaaaaaaaaaaaaaaaaaaaaaaggggggggggaaaaaaggaagggggggggcctctctaaaaggttccaagattactgtcccgtctttcggactagatagcttttattaagagagccagaaatttatttacccgcctgcggtgtaacactacgcccactggaaaaaccctggactaacccaacttaatgcagttgaaggacaacccgttttaatcagg

SEQ ID NO: 114291 - DNA, 137 bp, Zea mays
  Clone ID: MRT4577_35717C.1
gggagggggttgtactagagaaggtcgaacaccggacccacactgataatcaaggggataccctgcagcacattatttcatgattgcggcgcaggcacacacacttacgttttgttgctcccgcggactgcacaagc

SEQ ID NO: 114292 - DNA, 373 bp, Zea mays
  Clone ID: MRT4577_35718C.1
gacggttgcagacgactccgcgtgcgactagccaagcgcagtaatcggcgcagcacattgctgtcttgatcatcagccatggcggggggggagcagaacacaggacacgccgaagctgttcaaccgctggaccttggatgatgtccaggtgaacgacatctccgtgaatgactacctcgctgggaacgcgacaaagcacgcgatgtatctgccgaacaccgcggggcgctgctgcaagaagcggtgacgcaaggcgcagtgcccgatcgctgagcgccttacaaactgcatgatgatgcacgggagcgacaacggctggaaggtcatggctgagacggacatcaagcatactgtggagatcattcacctgctg

SEQ ID NO: 114293 - DNA, 373 bp, Zea mays
  Clone ID: MRT4577_35719C.1
agaatctaaaaatgtacttgattaattctgggaagccacatgcgtcatgcaaaaaactttatttttgaactatgacggataagctaacgaaaagagggcactatcaaggaagggatgcaggtataacactggtggcgaagtcaaagatagggcctagaatggcacctattgttgcgcaaggcataagggactatatataggtattccgtgctagtcgaaggcctacgaatgttgtagtgacatgaaagcagtcgggctcacattagagtggttcgttaatggaaggaatcgatgatgatctgaataagcacgagcaatgaatgcttcctgataggctcatggaataaactggtggcggtgaggaacggctact

SEQ ID NO: 114294 - DNA, 347 bp, Zea mays
  Clone ID: MRT4577_3571C.1
atatgtgtggttttataaattgtatggggttttaattttatttatttttttttatttttttttttttaaagagccattctaattatcaatatatatccccctggcaaaaacatgccttatgggaaaaaaaaaaatactatctcttatacaaacacaactaggaacccaaaaataataactctaggaggtacggacaaaataaataaactcccatatatacgtaaaaaataactgggtgtaccccaacctaacaaaaataatttatctaaaacacagactttttattttgggggtgctctcctcctataaaacccccccagcttaaaaaaaaccccctggacccccaa

SEQ ID NO: 114295 - DNA, 763 bp, Zea mays
  unsure (1)..(763): unsure at all n locations
  Clone ID: MRT4577_35720C.1
ttctntaaggatctaaacttgaatattttttcaaaagaagagttaaaatacaaaaagttcggtcgacgaaacaccaagtgnccactgatcctggtccgatctctggtccatgtttagtgtgtagacaccgtggacttacaaaccaaaacaagctcttaggtgnggtagcgaatttacagcgggtataggcgtgtagcatacaggaagattgccaatacacatgatgtctttggttttacgtccacgtgctattgtggtactgtaattactatataagtagtgcttaatttctcaatttcaactctgcttatggacaagcaagtaaaacatccttataagcaccggttacatctagctaaactaggcacggcaaaaatgggggtccttatcaattatcacgttgttggcctagagcaccctgccgtccatcccgtcaagaagacccgaccacatccctttcaccggcggtagctgcgccacgaacgcttgccacggcgggtaccccacgccgctgccgcggacgcgcccgtccattcggagggagaggtacacgggggaatcagatggcacgccggccagcttcttctggtcgtctaaccattgcgcccattcggtcgtgaacaccggagtgagctgccacagcctcttgctcctcctggcaacgtcgtcgtcgacgccgtcctcgtcgtcgcccccatcgtccagccgcagctcgggcgtgctgccgtccgtggcgaagcccggccggcctcgaggtacccaa

SEQ ID NO: 114296 - DNA, 205 bp, Zea mays
  Clone ID: MRT4577_35721C.1
tcgtccgccaactcctatgtaagtcacccatacctctcttacgacatcaatgtgactagagagtaaagccgtactctgtgagagcgcacaagctacgtcatcacgaatgacactctcaaccgtagcgaccctcctctcataacgtgacagaactactggcaagcacaacgactaccaaaatagcgtcttaacattcatattcctt

SEQ ID NO: 114297 - DNA, 174 bp, Zea mays
  unsure (1)..(174): unsure at all n locations
  Clone ID: MRT4577_35722C.1
ggataccaggtcagacgcttatgttatcatatagatctgtcgccnaaggaggatgggtcntgggtgccggctcgggcgctttgcncaccggcgttgggttccttttgggtcctcgggttcattcttgggggggggggtggctcggtgctttnnnccttttagctctctgtgctg

SEQ ID NO: 114298 - DNA, 264 bp, Zea mays
  Clone ID: MRT4577_35723C.1
aataaccaaaccaaaccaaccggggaggggatttttacagtttcaattacaacaacaccccaaacaatagaaaaattccaaaataaaacccttaccacaaactcatacaaagccaggtcaacactccgtataattgacaagcagaaaacactcctcaccatttaacccatatggagcccaaatatacaacagcccatcatatcctccaatttacaaacaaacaacgttttctacctttactgactgcacagcaacaggagggag

SEQ ID NO: 114299 - DNA, 445 bp, Zea mays
  Clone ID: MRT4577_35724C.1
accccccaaaacaacaaatgggttttaaattttttactgcccctatgggcggggtgaagtgtatcaaggtgtccataccctcccttatggttaaggaaccggttcatgtgttcacgttccccgtttttacttaatactcttaatttatacccaaaccgtttattatttccagtaccggttctggccacaaatacgggccgccaaaacaaatactagaaattttaagccttgtggggggcgacggttcaaaattacttcgtccaaagattttgtacgtacgggccttttcttttgttgttcgggctaaagggggtttgggttcacctattgggtttaaagcggttgggtggacctacaggtgcgtgggtgcttagaattggatttgggggttctcccttcccttgtggttgggggccattttctttcttgggaatggtatttttct

SEQ ID NO: 114300 - DNA, 309 bp, Zea mays
  unsure (1)..(309): unsure at all n locations
  Clone ID: MRT4577_35725C.1
agcgtgttcctcaccacgaggggaggctgngacctctcccgagctaccgagggagggtatctcccctgacccgcatccagaagagcatattcgacccctgataaacctccgcctcctgggcaacatctccctgcccaccaggcctctagacgacccctaatgccgcagcttcgaggctgccgaatgcgggcgccccagtatgctatatctacaacgtggacatgctgctatcgaaacattcttcgctggggggacccacacaactgttccgagcgagatgtgactcgagaccatcttgaaaggggtccg

SEQ ID NO: 114301 - DNA, 373 bp, Zea mays
  Clone ID: MRT4577_35726C.1
cccacacatacgtcctaaccttctgaattcccatggcactatcccagcggggggtgataaaacttatcctaccacatctctcgctccccggaacccaccctgcgcattgtggattctctgaaaaggctaaaaagtcaactctgtagatttactacgaaaggatgcagatttaatgctcaacatatacaatgaacaacatcactactatcgtattatcacaatgcttaaaaagcacttacaatgacgctcatactcatattaaacgcacactactcatacaacaacttgatctctgtcctgcatagacaacttcatgtacttagtcaatatcattgaaatcttatacatataagcttgtcttaatttaaatgtg

SEQ ID NO: 114302 - DNA, 263 bp, Zea mays
  Clone ID: MRT4577_35727C.1
gggcagcgatgggcatggacattttattgatagatggtatttagctgtctactttggcatttgattcgtgcagagaattctttaagagctgtaaaattttttacacatatttctgtgtttacacatgcttcttgttttttacttgacccaaataattttgatggacttataactgctagtacaaaagtaaatatttttcaaactttcaaatattgggtgctctatgatatattttgattgttcattaattaatttaggtttgg

SEQ ID NO: 114303 - DNA, 348 bp, Zea mays
  Clone ID: MRT4577_35728C.1
cactcatacctacacaaccaacaacttcattgcattacttgatcacattcttcgttatgatttgtcagttttacatgccttcttgcttaacactttacattaaaacacctttaatactcatattattaattacacaaagactatctatccatatctaaaatgtaacaattttccaaccattttaacattatatactacttctaatacttactcccaaattaataccaatattatcactgatacactatccacattaacatactaacacttatccaatcttatcgctatacactctattcacattacatcttaatactcatttcaaacacattcaaattctacacttat

SEQ ID NO: 114304 - DNA, 291 bp, Zea mays
  Clone ID: MRT4577_35729C.1
accactgcgtacgcatcgttcttctttggatacataggagagaaggtcgtaaggatatgggcatttggctagtgaaaggggcactgaaccatatattacaatgaactctctagaacgcacggaaaagtatcttcaaacatctggagacgcatgcgcttttctatttgaagaatccaccgtcggaaaaaaggcgggataatctgtccgaccagatcagaatcgcacccatcatcccacccatataaaaacgctaacgaaacaataacccctgtgtactactgtaaaaggaag

SEQ ID NO: 114305 - DNA, 363 bp, Zea mays
  Clone ID: MRT4577_3572C.1
actatactatgcttcacatgcactcctccctgaccttggatcctatactgtggaccgcccttccttttttttttttttttttaaaaaggattatatatgtgccggttcttgagttataaccctattattaaacaaagttacaagtcttcaaattacctaccactcaagccgttaaattcaccttggcaacatcttacgccaaattgaaattaaatctcattatggaaacaccagattataacacgttatggactgattatagccgaactactttcggacccttcaataattttgccaatactgaacgttaattggaagccgatttcacatcccagaatggcctttttatgacatgagagggta

SEQ ID NO: 114306 - DNA, 245 bp, Zea mays
  Clone ID: MRT4577_35730C.1
caaaagatcaaatggccgacgcagattcagccgatcaacgcggaggacgcggtggtagaggtttcggacgtggacgtggacgtggtggattcggtggcgatcgtgctgctggtgaaggatgccgtggaggccgtggtggacgtggtggccgtggaggcaatcgctcaagaggagataaggatgatagaggagaatgggtcccagtcaccaagttgggtcgtctcgtcaaggctggcttcatcaag

SEQ ID NO: 114307 - DNA, 533 bp, Zea mays
  unsure (1)..(533): unsure at all n locations
  Clone ID: MRT4577_35731C.1
ttcttcaggnagnagnaaagccaagccattgcgggggggggggggggaaggcttggaagcttggnttctacccatcctcttctctttccccnntccgtcgtctctcttctctnnctctatttggtgttggcttggctgtgcgctctactagnacnntctagtcgtgcggggtcccggcgcatgggcccaccatccctgggagnaaccatccagnaggggcggaggggtgcctgctcgtaccagggccccgctcaagggaccgagctgcgcctnaccttccgaggggcgggcggcaagagcaaggggaggagagccccacctcatgggccctgaggagagcggctgtccagcgttctccggcaangatccagcgcccatctccctccgcgntcggcccgccgagtggggcgttccgnccgcttccaagtgcggcgcccctccctttcggcgccgccccttcgcgcgcggggggccggctcnncctgaggcannntggtggcagtgggggcgtccggcttggcttcctgtgccaa

SEQ ID NO: 114308 - DNA, 399 bp, Zea mays
  Clone ID: MRT4577_35732C.1
gtgaggtgaggagactagtccaactaaacgccgaccggaggccggatagaccggctcagcctcgctccgccgccgctggcgaacatgtccatggcggctatctgtctcttcctcatcgtgtacgctctgcaactgctcgatcgctaccttccacctggggcaggagagagcggaggacttattgatagagcaaatcaaattgcggcttgaaatcaagcaacttctcaaggacactgatcaaagtgtcaaaaccgcccacatttgcacaagctgataaacttaatctcctgaatgctcaacaagataatgaactggcaaaaagaacatgaccttaaatggaagcaatccttataccacatatacacaagaattttgtttgttactaacagtaataactta

SEQ ID NO: 114309 - DNA, 677 bp, Zea mays
  Clone ID: MRT4577_35733C.1
gccggcgaaatggggacgcgggaggtgtacgaggagaagctccgcagcggcgcgcacctccaccgcgaccccaccatcaaccccggcctcggctccgcccgctgcccccgctgcctctccctcctcaaccccgccaccagctccggagggcgcgactgggccatcacctccgtcctgcacgacgccaccgccgtgactggttccggcgccggcgcgatgctcagtgcggtgcacgggttcaatacagggatcccgttcgtccagaagcatgtgaagggccccaagtggctgcacttactcgttggggtccctcctttggtcttattctctggtgccagtgctttatttggggcttacgcgctcccaacgtttgctcagctcactgtgacatcctattatgctgcatcaagtgcctctcactacgcaatttcacagatcacccgccagatcgagaaggcccatttgtcaggcgccgaggagaaatcttgattagctgctgcttgcaatcagtcagtttgtttggtgcacatgccatgtacacggcatatacggactccctccttctccatgttgcagtggtctgatagttttgctgagtttcaggctcaaacctgttctaccataaagtataatgtgtagctttgctaattgctactcatgtcacttttaagaccaaa

SEQ ID NO: 114310 - DNA, 466 bp, Zea mays
  Clone ID: MRT4577_35734C.1
actcctatgggcgattgggaccctcgaggccggccgtgatcaccgtaccattatgtctgcctcctgtatgatgacggcacaacctctcctgatgttactgctggttgccgttgctagcggtggcctccgatgtcgcctatcgcccgcctcgcatatcacctaaatgctggcggacgagtgcacacaactacaaccacgctaagtttactgccggacacctagaaacccgcccacgcaaacttatatgccggcggtgacggttctggtaccacgcgacacacttgccgagactatgacgcgcgtacccaccgatacggcgtgcacacgggggacgagagacactgtgtctgatctagtcgacccatctgcgtggactgcttgaaggcacgtagcgtgatcatccctacggtgatctacgtcaacgaggataaactggtggtgctcttgtacgacatgtgcgactaca

SEQ ID NO: 114311 - DNA, 369 bp, Zea mays
  unsure (1)..(369): unsure at all n locations
  Clone ID: MRT4577_35735C.1
ccggaanggacgggccgactcaagccacccatactctaccaactgaaacaaatagtgatagttatactgcacagacaagactggggaaattgtagcaggatgagcaggcgaattctaataaggagcatgcaacccaccatgaatgaggagtcagcaatgatattggtggcagcaactagaagggtaactcaacagaagtaaccaacatcaaaagagatgtctccatacagcaaggagagcacaaagattggatcttgtccaagtggtcacaaccactagagttcacggaagaacctcacatcaaggatggggacccatcacatagatggataacatgaaaacaagaaagggatgggctgctttaaagtt

SEQ ID NO: 114312 - DNA, 803 bp, Zea mays
  unsure (1)..(803): unsure at all n locations
  Clone ID: MRT4577_35736C.1
cattggacactccgttaacggggggagaacctcgcttccatctgccctcccgtgtccccctccctgtccgattccccacagtagcgcctcgccctcgtcctcctcctcctcctccagtccggatcgccatttcccaccgatccgtcccggcatcggcatggctgcgcccacgccaaaggcgccggcgcccagtgcttcggcagcctagcgtttgtttgcctccgaggatttccgcctatcgcgttaccggatcttcggtgggccggcgaccctctacgccactatgagctccgacgggcgcctccgccgcgcgctggccgcgttcggcggcgacgtgtgggacctcgtggacgcggcgctcgccgccgccgcgcgggacagccccggcgacctgcgcgcgcgccgcgacggcatcgtccagcgcctctacgcaggggcagcccgctgccgcaactgcgacgccgacgcaaccccggcgcctgctcagccgaggaaggcgaatgacgccgtcgctgctgctgcttctcctgcggcggcggcgtcggcgtttccggcctcgcctgaacaggaggtcgacgcggacggcctcgacgacgtcgacgacgcggccgacgctggcatggagagcaagattctggcgatcagggatttcctggaggacccggaccagtctgaggacgacatagtgagcctactgcagaacctagcagacatggatatcacttacaaggctctccaggacacggacatcggccgccatgtgaatggnctgcgtaagcacccatccagcgaggtccggcaac

SEQ ID NO: 114313 - DNA, 138 bp, Zea mays
  Clone ID: MRT4577_35737C.1
gggtcgacgagctgttatgtcggcgggcgccgcacatcttgttacacaggctttgttaggaagaaatggatcgaccgaccccacaaaactggctggtggacaaacactcgccaagctgcttgatctgttgcgcgacga

SEQ ID NO: 114314 - DNA, 257 bp, Zea mays
  Clone ID: MRT4577_35738C.1
ggattaaaagggtggggtgtttgtggtaaaaacggtttttttaccatgttcggctaaaataaaatgagttttctataaaaaaaaggggagttcatcaaactttaaccaacgttttgttgaatttcaaagggacctgcaggactccattcccacgttaggtttatgcagttctaaaatggggcaacctccgagggtgccaaaaaaaaaggggtggtttaaacaaaacactgacttttgttttagggaccaacaagggg

SEQ ID NO: 114315 - DNA, 373 bp, Zea mays
  Clone ID: MRT4577_35739C.1
tttttatctagtaacaatacccacggcatgggcctggggtggggggatacataattaactagctgcaccgaacacattgtctccgactataacctagctagctagtcgaatgcatgcatgcaagcattccgtgatttatcgcaccatgaatgaaagggccttccaacacaacacaatatgagaagagagcgaaccttatttgtgactgagtgccaagccaaccaaccataggcagcgtaccactccaagccactgtcggaagcccatgcatcaaattaaaacagcatcatcaccttctgccagtgccagcccaagcacagcgtgccaaatggcaactagcaaatcagaaaccgccaccgatgcctttttgttt

SEQ ID NO: 114316 - DNA, 659 bp, Zea mays
  unsure (1)..(659): unsure at all n locations
  Clone ID: MRT4577_3573C.1
tttttatttctttttttttttttttttttttttttttttttttttttttttttttttttttttttttttttttttttttttttaaggaaaaaaaccttattccttttccaggcgggggaaacaaacattgcaaggatcgggatcaggattaggtatccccccctcccaaaaaagcccaaaaaggtatccccttcccttatggccctccccacacaaaggggcttgtccaatactaaagtataccagttcccccccctcctgcccaattctccccaggaagtaataacaatcccccaaccccccccaatattaaaaaaaaaaaanttcccccccccctcccccttttttttccctccccccccccccaaaaaaaaaaaaaaaaaaaaaaaaaattttttgtgggggtgaaaaaaaaaaaaaaaaaaaatattgggggggggcccccccccccaaacaccaaaaaaaaaaaaaaaaaggcgggggggggcggccccccccccccccccccccccnncnnnnttttatttaattatatttttttgttttttagaaaaaaaaaaaaaaaaaaaaaaaaatattgttcattttgttggggggaggggggggagaaaaaaaaaaatatttttttttttgttggggggggggggaggggggggggg

SEQ ID NO: 114317 - DNA, 343 bp, Zea mays
  Clone ID: MRT4577_35740C.1
ttttctttgggctcattggtttttttttgatttttttggccttttttttttctttttttttttttaaaacaggggcaaaccctttttttttgggcttgcacccccattccctggaaaaactgagtggccgcctaaatatggaaagatggttttttatactatacgtgcgcccctctcaaatgccaacaaactaaccctcaaacaatttggctttttcctggcctcctcccaattgaaccccggagagcccttctccgaaaaacccacaaatggtatccatataaaatccccaagatcgtttttttttactggaaaaagcacatgaagcttgtctcctcccccc

SEQ ID NO: 114318 - DNA, 288 bp, Zea mays
  Clone ID: MRT4577_35741C.1
gggccccagcccgattcacaaaatcaattttttaacatggggatttccatcagttggattccaaactcggtctatggccagtttcatagaacacatttgctgggtgcaacagggcacaggggggtgtgtaaaaaacaatttagccccctattatatttatatatatttaggcgggcgcagtaataatatgccgggttattcatttcatccttactgggaaaatgcttagttccggggcgccgccggggcctccaccgcccccgttttaatgggggccgttcccgccct

SEQ ID NO: 114319 - DNA, 151 bp, Zea mays
  Clone ID: MRT4577_35742C.1
tatttttctatagaagcctcaagtataaaaatgttgttaataactactttttttggctataaaaagaaacatccccttgtaccttgtgatgatttgagatatgtctacgaccatttctattatctcaatattattgataaattgacaccac

SEQ ID NO: 114320 - DNA, 771 bp, Zea mays
  Clone ID: MRT4577_35743C.1
ttgggaccctcgaggccggccggggaaagcctgcgttgctcgcccacacgacgccacgcatgcaggaggagccagggcgtcgtcccgtgccgccgcgcccaaggccacgaagcggtcgaagaactccaagcgccgccgcgtcgcgcctgccccggaccccgccgcgcccggcacggacgcctccaccgccgacgtcgcgagcacggcaccgtccgcagcgacggtgactgcctcggagaagccgagcgcgacggagcacgcagcggcggctgtcgccacggagaagccgccggccgcgcttccggtgtccgtcggcgctttcgcggacacgtccccggcgccagatgctgggagcggcggcgttagggagctgctgccgcacccgagccgcttcgagtggccgtcgggctgcgacctggggccgccctactggggctggggcaccagcgtgttcgccgacaccgacccggcgctgttcctcaatctgccgtgagtgacccgtgacaacgccatggcgcccatggttaactaatcaaccatgatcacacggtcgacgagatgagaggaacagagcacgcagtgcgtcgggctcttgaagctaggcgctgtagtagtctcctaagcttactgttgtctagaccgatagtctcgcgtacttgtgtagttgtgttgatggtttttaatcgccgctttgtactgcaattctagtaaaaaggctaacatatgggatagccgggctctgcatggaaaaaaaaaaaaaaaaaagcggcc

SEQ ID NO: 114321 - DNA, 1207 bp, Zea mays
  Clone ID: MRT4577_35744C.1
aagctcgaggtcgcggctgggctgaaactgaaacagcccgtcatctaccattcgcccgccgcaacgctccctgctcggaacagcctgcgttgctcgcccacacgacgccacgcatgcaggaggagccagggcgtcgtcccgtgccgccgttcgcgggcgtggacctccgccgccccaagggctaccccgtggcggttgccaaggaggaggagaggccggcgccgggcggcgacccgtgcccgcggtgcgggtcgcgggacaccaagttctgctactacaacaactacaacacgtcgcagccgcgccacttgtgcaagtcgtgccgccgctactggaccaagggcgggtccctccgcaacgtccccgtcgggggcggcacgcgcaagagcagcagcagcagcagctcctcatcatcctcggcgacgacgacgtcaacctcgcccggcgccgcgcccaaggccacgaagcggtcgaagaactccaagcgccgccgcgtcgcgcctgccccggaccccgccgcgcccggcacggacgcctccaccgccgacgtcgcgagcacggcaccgtccgcagcgacggtgactgcctcggagaagccgagcgcgacggagcacgcagcggcggctgtcgccacggagaagccgccggccgcgcttccggtgtccgtcggcgctttcgcggacacgtccccggcgccagatgctgggagcggcggcgttagggagctgctgccgcacccgagccgcttcgagtggccgtcgggctgcgacctggggccgccctactggggctggggcaccagcgtgttcgccgacaccgacccggcgctgttcctcaatctgccgtgagtgacccgtgacaacgccatggcgcccatggttaactaatcaaccatgatcacacggtcgacgagatgagaggaacagagcacgcagtgcgtcgggctcttgaagctaggcgctgtagtagtctcctaagcttactgttgtctagaccgatagtctcgcgtacttgtgtagttgtgttgatggtttttaatcgccgctttgtactgcaattctagtaaaaaggctaacatatgggatagccgggctctgcatgaatctgtgcttgctttgacagtttgacctgattgtggtgctttcttagtttaaggccatgagaatcgcaagaacagggaacggcgaacttcgaagaaaaaaaaaaa

SEQ ID NO: 114322 - DNA, 810 bp, Zea mays
  Clone ID: MRT4577_35745C.1
gatggggtgcgcggcgtcagccgccgacggggccgagctccggcggcgggggtgggcgcgggcgggggagccggggcacagcgaggcgtccacctcgggtctgctggcgccgccgcaccagcaggaagggcaggaggccgagtcgtcgtccgggggcaggaggcgagggtgcaaggtggcgccggagcccaaggagctggaggaggggaccgccgcgctcccgtcgatgcccggctcgccgagcttcaggtactactgccagaagaagacggcggccgtcgataggatcgtggctgatgccatcgacgccgatgacaccgtcaggatcagagcgacggcgcgacagctgagcaataggagcgaaatcacggcaaacaaggcacaggactccaacgaggtctctcaacctaaagggggaaccaaatggcttaggttcagtggcttgtcgatcgtcgctgccgcttggcacaagcacaacttgttcagccgccaaagaagcaagccttcgccgcctcctgctgccacttcagatgcaagctcccaaccctgatcaggcagcgctgtatgggatcttctacattttactacgtctcagcttataaaaacacacacgcatggctcattcagtcatcgtttatgatgcatcgatgctggctttgcatcattaactgatatttttcagacttggttagtccctgtaagctaaagctgattctgtaaatggtgcaaattagtgttaagaaaggagggcaatctggaaatccaagctttgcgtcatttggttaaaaaaagaaaaaaaaaaaaaaaaaa

SEQ ID NO: 114323 - DNA, 558 bp, Zea mays
  Clone ID: MRT4577_35746C.1
aaaaaggggttattcccttttttatttggggaaaaagggctttacgtgaggggttttgaaacatttgccaacacgaaaacaactttttacccgggggggggggtgctttttaaaattaccataccagggtcccctcacattgataaaaacatatgacacttggcctaacttatgcatgaaaaaaattggcgggggggcctggcttgttaaattttaaaaaaatacaaaggcctgcctttacctttggggggaatttttttgaaagccccccccttggggattataggcaacccttgctcttggggggggacaatttttttcaagagggccggccctggagcctaaaggatttttttgattgggggagggacttcccttttttttgaaacacggactggtggaatgttgaaccttttgggaattgccacaaaatggggatatatctcactttcgctctttgggtttcccaaaaaggggtgggctttatgggccttataaaacctgttctcccagtggaccaccattcggggggggtggttgtttaacacaaaaaccttg

SEQ ID NO: 114324 - DNA, 354 bp, Zea mays
  Clone ID: MRT4577_35747C.1
tccggccgggaagaaaggcaggtttcgtgcagtggttgcaatggtgagagttgtctcactgagtcactaggtcacgggttcgaagccgccactccgtatttatggagaaatgtgtgtcttgaactatctctttctcagcccccactcatgtgggagtctttggcactgggcctatattcagaaaattagatgctaacgtaattctgagagtggggatctttggcgctgggccaatattcagagaattagatgctaatgtaattctgagagtggggggctttggcactggacctatattcagaaaattagatgctaatataattctggcagaaaaaaaaaaaaaaaaaagcggcc

SEQ ID NO: 114325 - DNA, 449 bp, Zea mays
  Clone ID: MRT4577_35748C.1
cagtgcgatacagaggatcgttcgaacaaaacaccatgatagatggtcatcgctctcgtcgagtgcctggctctgtcagctgccagcgcctctgcaatgcagatgccctgcccctgcgcggggctgcagggcttgtacggcgctggcgccggcctgacgacgatgatgggcgcccgcgggctggacccctacgctgagcacctgaggcaggcggagtgcaccccggtggcggaggtgccctactacgccgatggtcggcagcctgacaccatgttccacccgctcctgctacagtgcttgcatcagaacatgatgatgatggacgttcatgccggcacgcagcagctgaagatgattattcatcttgagcttgccgctgacgccatcaacatcctgtacgatccagctctgatgcagcaactgcagcagctgctggcagcccatggtct

SEQ ID NO: 114326 - DNA, 299 bp, Zea mays
  Clone ID: MRT4577_35749C.1
tttcggtattagatccaatcagaaaggaggagcatgattgtcgtaagtaacaatatatggatagttagtgtctgtaatacctcgccattaagtgttttatttctcttttgcgtagatgcgtaatatcttgtgttattcttcttatgttcatacatgtgcattatgcatctcattaggtacgctagtttatcacgtgatgcagaaaacgagtcaactcgactgtaagatgatgtaatgggtgggctactccacaaggtaatgctgatggatcaacctgaagaagaaccgactgaacaagt

SEQ ID NO: 114327 - DNA, 1241 bp, Zea mays
  Clone ID: MRT4577_35750C.1
gcggtggggaagaggaagagaaagagaaagaggaagagaaagagaaagagaaagggagaaaaatagcaggccgccttgagctggcataggatgcgacggtccggcaggggcagggctcggcggtcgacggaggccaattctttaacttccttcctccgtcgatcatccagcaccagcaggagaatcccgtcgaatccccctccccaacccaagggagcgcgcgcgtatgcctcctccagatccaaagcaacaagcaacagacagcgaggggcaccggggtccgccgcatgtgtgtggttcatggaggatcatgctttcctgcttactgcattagctcctgacgcgccaccctcccctcgcgttcattgatttctgttataattactcacattattattggtaaagaaagatagggcaccgcttctaatttgatgggcattccgttaccgtctcaacgtcaacaacagttgatgctactatggttggaaatcgggcatggtttgcaggtcttttcagcggctcgggcaaaaggcgacaagtcagtgcagagaagatagtgtttgatctaaccccactacaggaacagaggctgcaaagtctgaaggaaaggctaaatgtgccatatgacgaaactcggacagatcatcaagggctgtgggtttgtttcgctcgagaaccttttgttttttgcaagaacatacccggcttctttcaagaggctgatgctgaagcagcaaggaatgcgaactacatgggagtacccatttgcggtcgcgggtgtagatatctcatacatgttgattcaactgctggagctcaactcagtgcgcccgaagtctttgccagggattaacttcatcaaagtgttgacagaacacgaggatgcattcgacgtgctgtactgcatagcgttcgagatgatggacgcccagtggctagcaatgcgagcctcgtacatgcagttcaaagaggtgctggaggccacaaggcagcagctcgagagggagctctccctggaggatctcaatggcatccatgacctccctgcctgcaacctcttgtacaaatagtgctactggtagttagattatattactgggatgcagtcaaaggaaaatttgatcaggttacatcgtaaccagcatcatcagcctgtaaaaaagaaaaaggaaaagaaaaagagagaagggagacacacatctctggtcgtcagcaaaaaaaaaaaaaaaaaatttgcggcc

SEQ ID NO: 114328 - DNA, 702 bp, Zea mays
  Clone ID: MRT4577_35751C.1
gccttattataatataatgcatgctcatcgtccaacagtcgtgatcaaatccaaagattccacatcttgagaaagcaaacaaaacctgatactatacttgcaatgtgacatgtgaattcttatcagatgccatgcccggccacaaagcgtattatatatatatatatatatatatatatatatatatataatacctgagttgagctccagcagttgaatcagcatgtatgagatgtttacacccgcgaccgcaaatgggtactcccatgtagttcgcattccttgctgcttcagcatcagcctcttgaaagaagccgggtatgttcttgcaaaaaacaaaaggttctcgagcgaaacaaacccacagcccctgaaatcagttgctgggttcacgccctgccaccccatgtctttccactgttctgaaactaagctagtgagctccgtatcgggaaaggaggcattccatagagccctaagcgattcttgatgatctgtccgagtttcgtcatatggcacatttagcctttccttcagactttgcagcctctgttcctgtagtggggttagatcaaacactatcttctctgcactgacttgtcgccttttgcccgagccgctgaaaagacctgcaaaccatgcccgatttccaaccatagtagcatcaactgttgttgacgttgagacggtaacggaatgccc

SEQ ID NO: 114329 - DNA, 476 bp, Zea mays
  unsure (1)..(476): unsure at all n locations
  Clone ID: MRT4577_35752C.1
gaaacccaaaccanacggncaccnccggcggaccgacgcccacccggccgccacagcacccaccagccgccgcngccgcacgaaagcaccgccggcagcggcgccggaccnccgcgacgcccccgggcacccaagccaaggcaggaaggaacnggacaccannacaccggcaacagaagggcgccgaacaggaaaccgccaacccccgaggcaagggaggaccccgacgcccagcgaagaagcgcggaaggagggcgcggaaaagcgccggancaaacacaaacggcaacggaggcggcggagggccccccagaggaaccgcagacacggaagaagccgagccgccggacacacaaggggaaccgggaccacaacgccccggagcacgaccgccgcgacacacccgacgacgaaaacaagcgaaaacaaaccgagcgaaaggagagagcagaagaccaagaagaagaaggacccca

SEQ ID NO: 114330 - DNA, 1322 bp, Zea mays
  Clone ID: MRT4577_35753C.1
tgtgtctcccttctctagacctcaacagtagtcagttcagcttaatacaattttcacatattctctttttacaggctgattgatgattctggttacatgcaacctgatcatcatacaaatttccttttgactgtatcacagtaatctaactaccattagtactatttgtacaaaaggttgcaggcagggaggtcatggatgctattgagatcctccagggagagctccctctcgagctgctgccttgtggcctccagcaccttctgcacatgcatctttgaactgcatgtacgaggctcgcattgctagccactgggcgtccatcatctcgaacgctatgcagtacagcacgtcgaatgcatcctcgtgttctgtcaacactttgatgaagttaatccctggcaaagacttcgggcgcactgagttgagctccaacagttgaatcagcatgtatgagatgtttacacctgcgaccgcaaaggggtactcccacgtagttcgcattccttgctgcttcagcatcagtctcttgaaagaagccggatacgttcttgcaaaaaacaaaaggttctcaagcgaaacaaatccacagcccctgaaatcagttgctgggttgacgccctgccaccccatgtctttccactgttccgaaactaagctagtgagctctgtatcgggaaaggaggcattccatagagccctaagcgaatcttgatgatccgtccgagtttcgtcgtaaggtacatttagcctttccttcagactttgcagtctctgttcctgtacaggggttagatcaagcactatcttctctgcactgacttgtcgccttttgcctgagccgctgaaaagccctccgaaccatgcccgatttccaaccatagtagcatcaactgttgttggcgttgaagttgagaaggaaacggaatgcccatcaaattagaggaggcgccctttctttctttaccaataataatgtggagatagtagctcggtagtaattataacagaaatcaatgaacgcgaggggagggcggcgcgtcaggagctaatgtagtaagcaagaaagcatgatcctccataaatcgcaaacatgcggcggaccccggtgccccctcgctgtctgttgctttggatctggaggaggcatacgcacgcgcgcgcgcccttggttgagagggggattcgacgggattctcctgctggtgctggatgatcgacggagggaggaagttggagaattggcctccgtcgaccgcccagccctgcccctgcgagaccgagaccgtcggccccacgcgtccgtgccagctcccggccgg

SEQ ID NO: 114331 - DNA, 282 bp, Zea mays
  Clone ID: MRT4577_35754C.1
aaaatgttgaacacattttatgtcatttaatcctcaccacaatcccacgtagtgagtactatcagcactcccatcttaaaaatgatgaaagtgagattttaagagggtaagtaatttgtcaagatcacacagatcagaaatggcaagtctgggacctcattaattcaacaaatatttttggagcaagtcctgtggcccaggctctgtgttagactctgggagtaaagcagtgaatgatatggacaaatatgccgaaatccttgccctcgtgcagcttatatg

SEQ ID NO: 114332 - DNA, 688 bp, Zea mays
  unsure (1)..(688): unsure at all n locations
  Clone ID: MRT4577_35755C.1
ctcgagggcccggccgggaaaaaaaaaaaaaaaaaaaaaaaaaaaaaaaaaaaccgtangcctgtagctttcattccgttgcggctgccgcccgggttcccttcgccgcgggtgcggaattttaatcattggccgtcgccggagggtgggtggtcagacggcgtcgttcttccacgccggtggccccgcccggccgggctttccgccggcttcgcactttctcttcggcggccgacaggcgtgccgnanggcgtcgagactcggaggcaactttcatcatagttacacggccattcggcggtgtaccctggagagaccgcggccgtgccccgcgcttggccaagaaagtggggcgggcataaaacggccgacgatgctcgctctccgacgccgnccttctttccgcgacgtcgtcancgggcgactttcgaagaagttcacagaggggtgacgatgatccctcccgcttgacgggcagagcagtacgccggagaaagtgancggagaacttgcgtggncgttcttgagaaggccgccggctctgtacatcggacccgccgagggcgtcnngccgtggagaagttcnagggaggtgttacaagccagagacttttcgcgccgggccgcctccatcctnttcacgcactcgcccgccggagtcctcaccgtcgccttctccaaggactcg

SEQ ID NO: 114333 - DNA, 373 bp, Zea mays
  Clone ID: MRT4577_35756C.1
tcctggctctcagcttactggactggctttaagtcaccagagcaaatatcacgtgttcgcaacactggggtgaagcctgaaatactgaaacgtgtaggtcaggcaattactacactgcctgaaaactctctaccagactacgcaatgcagaaggagagcaccctccacttggtgctgcgcgtgaggggaggcatgcagatcttcgtgaagaccctgaccggcaagactattaccctggaggtggagtcttcagacaccatcgacaatgtcaaggccaagatccaggacaaggagggcatcccaccggaccagcagagtttgatcttcgctggcaagcaggtggaggatggccgtaccgttgcggattacaaca

SEQ ID NO: 114334 - DNA, 635 bp, Zea mays
  Clone ID: MRT4577_35757C.1
cccacgcgtccgcggacgcgtgggcgggagcgcacacctccgccagctttacggcgtcgttcgggcccgccacggacgaggacggcggcctggatggcgcggcgccggggagctactgcgtgtggcgcccgggtccgtccgcgtccgcgtcgccctccccgccgccgcccaggaagagtgggtccacggggtccatggcgcggtggcgccgcatcagcgacctcgtcgtgggccgcagccacagcgacggcagggacaagttcctcttcctcgccgccgcgcccaggagggggcccaaggacaaggagcctgccgccactgccccgcccgcggtcgccgcccaccagatggcggcgtacctcgccaggggcgtcccaccgcggcgcacgttcctgccgtaccgcgaggagctcgtgggcttcttcgccaacgtgaacggcatcagtcggagccaccaccgtccgccgttctgacgtcttgtcagtggcctatgccatcggttaattaccctgattaattattcggtaatgtgattagcacttttcttagcagtagtggataagtaggcggtttgtataggtaatgttttgggtggatcacgcgacgcgatgaatggagaggcttttctgtcgaca

SEQ ID NO: 114335 - DNA, 336 bp, Zea mays
  Clone ID: MRT4577_35758C.1
ctctactgctgttcgtccacttctgttcgtccacgcgttcgtccacgtgttcgtccatgcgttcggtttgttatgcgcaaccgcacatcccttttgagggctctgtggttactgttaatgagacaataaaagtcctgctggtggacagtaatgatgaaataaacgcgcgttgatggggcgtttatctacctttatgagaccacataggagaccttgttcatcacaatgacacataacaataccccccaatttggaatgtgagttggcccaaaaaaaaccggacccgtgggcggacccgtgggcggacccttgggcggacccgtgggcggccccggg

SEQ ID NO: 114336 - DNA, 154 bp, Zea mays
  Clone ID: MRT4577_35759C.1
ccgaccggaacaagcccgcccgaccgcacactagacgcggcccccaaaagcagaattcttaacaacaacaaccggcaggagcagcacatcactgagtcaccacgaccaccgaagccatgacaacaagaatctcgaaagcaaccccaggtgctag

SEQ ID NO: 114337 - DNA, 481 bp, Zea mays
  Clone ID: MRT4577_3575C.1
cccacccctccatttttcccagccgccaccttctttcttccctgcctcttcttcttcacggcagcaacagccaccagcgacgccctccctgctccatgggcgcgggtctctctgctccaaccatggccacccagcaacagcgccattcttccccctcggctccctgggatgcagcaccacgccatcgcgggagcagggcccccatgggagcgcccccttatccacgacgtcggcagcagggagctttttcttccccgtgcgcaggagctccatggccgagctcacccaggccccaatgcctctgctcggtcgcagctctgcaggctctctccaccgcgcctgctccttcctcggcgcgctgaagctcctcagccatggcgcccaagcccttcttcttcctctgcccacgccccctcttctccactgcgttaagagcaaggagccttttctccctgcgcgcagggagcagttcccttggccg

SEQ ID NO: 114338 - DNA, 333 bp, Zea mays
  Clone ID: MRT4577_35760C.1
tccggctcgcctataaaagacgacaaggtgaagcttagttgtacatggacagcttgctccatggtggcaggtccgatctaaattcttgtcctcacatcgtatcttcctaaaattgttcaattttgcagatgtttgtgaatgcaacagaacttgccactgataaactagaccaggatagtaatgtctgagacgtttccacatactttgcctcctgattatcttcatcgacgtatccaactcgcaaccgtatcaacagctactgctacagtccatcttgccgacatagctgtttttctgccactgcaaggtcgcggcttgatatttttcttgatg

SEQ ID NO: 114339 - DNA, 282 bp, Zea mays
  Clone ID: MRT4577_35761C.1
tgtaattagacgtatggagtcaagtgtagtgagtacaggagagtacacgatccacaaatattcagtctgcagggtagtgactcatcgagtagcttctctgcatactaatatctagattgctctaggtactcaagcgaggcgaggttacactggtatctatgtgtcaagacatccattagtattgctctctcagcccgtcatgagtggtgttctcatgaaataggatcgaaggttcttatactcaaaccacggggtactacattattcatacgagattacagt

SEQ ID NO: 114340 - DNA, 190 bp, Zea mays
  Clone ID: MRT4577_35762C.1
attatttttttgtacatcagcgtgaagtttttacatattttttctattgttctccagcaggggggcacacatttcacaccatagaagattccaaacggtattgtatgaccattcatccacggctataaaattatcgctgtcaacaagaatcaaagggacagcctacccctgacatgttgggtggtgaccc

SEQ ID NO: 114341 - DNA, 244 bp, Zea mays
  Clone ID: MRT4577_35763C.1
caaccagcacaagatgatctgcctgagatgctctgcacgactgcacccaagggctcgtagctgccggatgaagaagtgcggtcacagcagccagctgatggacacgatgaagatcatgaactgaggcgacgctgctcgtcagttccatggacaatgttgcgaggttgtcgaaccgtgatggtttacgaactggattcgcgatagattgatgtaccgcagtttgcttgctgaacatattggtctt

SEQ ID NO: 114342 - DNA, 312 bp, Zea mays
  Clone ID: MRT4577_35764C.1
tggttgccttgtctgctattttgacttatgcattatgagtgggatcaagatgtttagcaagcgttaagttgatgtcgcatttacatgaagtgcactgcagctgaatatttatatattcaattccatatccatacactacatatgatgctaagctaataaaaagtagatgtgtatgtatgagtgtcatattgaagtttatggtccaaaatatctttatagcctactatatataatctctacaatactttgctgaactacggcagttgatactcaatctcctcgaactcaacctaaacaacatgatcacgatct

SEQ ID NO: 114343 - DNA, 249 bp, Zea mays
  Clone ID: MRT4577_35765C.1
gacttcttggtgcccgtaaggatagctcacaagacgataagcacaccaagcgtgacgcctgggatctcttcgtcttcttggtgcccgtaaggatagctcacaatttggcgaactgtgtacagttttgtcattttgtgggcacagatgatgctcccagtaatgtgcacaataaagaaaaaaaaaatcaactcgataaaaaaaaggaaaattgtgaacaatggaaaaatgaaaaatacaaaaaaagaataa

SEQ ID NO: 114344 - DNA, 250 bp, Zea mays
  Clone ID: MRT4577_35766C.1
cctctttttttttttttttttttttttttttttttttttttttaaagtggttcgttttttataaagcttcagttataagtaagctggacacatctttatattttggactttggttccaataattccggacattgggggctggaaatggaacacccggacgggagcgtgtgtgagggaggatggcataaaaaggagccgggggaagcgaacataaattgattcgcaaacacttgtgtgggccatatatctc

SEQ ID NO: 114345 - DNA, 595 bp, Zea mays
  unsure (1)..(595): unsure at all n locations
  Clone ID: MRT4577_35767C.1
ttnaatataaactctgctcagacatcatctatctaaatatataaagcctgttcggtcatatgaacaaatgaggctccctccatcacattattatatgtaattattctacacccaaactacagcaatattattaactacaacaaaataaagaatggaataactacatttatcgactattattaggactagtttgggagtccaaaaatcggaggggattagaggggctaaaatcattttttgttcggggtgggggaaagaggagattgtccggcctctaaatccctggcgggggggggccctcttttttggggaggccgcgcccggggggggcggccgtgcccccgggggggggggggtnnnnnnnnnnnnnnnnnnnnnnnnnnnnnnnnnnnnnnnnnnnnnnnnnnnnnnnnnnnnnnnnnnnnnnnnnnnnnnnnnnnnnnnnnnnnnnnnnnnnnnnnnnnnnnnnnnnnnnnnnnnnnnnnnnnnnnnnnnnnnnnnnnnnnnnnnnnnnnnnnnnnnnnnnnnnnnnnnnnnnnnnnnnnnnnnnnnnnnnnnnnnnnnnnnnnnnnnnnnnnnnnnnnnnnnnnnnnnn

SEQ ID NO: 114346 - DNA, 519 bp, Zea mays
  Clone ID: MRT4577_35768C.1
cggccgccctttttttttttttttttaacttgggggggacccaaaccaccttttgggggaagaaaaaagggaattagtcctccccttttactttttaagggggataatccggggaactttcataaaaccaaacaaactttttttgtgaaaaaaaaggtaatagggaacccgaagggtccttttttggggacaaaaccgggggaaactaacaacaccttgggaccaaatattttttcaaaatcccttcccggctgagaggggggggccattttttaagttccaacctggaaaaaagctttcatactggccggacaaatttttttacctgaatgggaaaaaaattgtggggaacataaatattctccaaaatccaccttcagttattttcacaaagcaccaattcataaagggaaaaaaattggaaacctggtaaaaaaaaactaaaaacaacatttcttctttgggtttcctccacaattatatttgtcttaaaaaagagaaaaaaatttgtttggccat

SEQ ID NO: 114347 - DNA, 614 bp, Zea mays
  unsure (1)..(614): unsure at all n locations
  Clone ID: MRT4577_35769C.1
cccgggnattgacatgtttttaaagtatccagtgctggctcgtaatagcacactgaaaggnaaatcactgaaaggatattgctacgagaaaatgagtttgtaaaagaggcttctctgcagatgttaatccctccacatgaaaatcggtgttaccgtttgaggacatgtggagctttaggaaagtgtcacaagatactactgcaagggagttagttgatgctgtccttatgctaaagtacctgcaacttttataacctgaggacaacttattgaagcctgtgtaaaggcaatttatacttatttggctccactctggtacttggtgaagacaatgctntgctaaggctggtggcaacttgaggctaggtgctaatttcatgaaacatatgcgatgtacaagacatctacttacaacagtggcttagatgaaaggatgaaaaattcgtggaaagcttgtttttatcacgtggcaaagtaaaattgcttccaagtgataatttgtggaggaccgaggtgtgatggggatgactgggaaatgtgggaagaaccctgaaagaacattgaattcatgcgtatagatgataaaatggaatttattggtgatactgggattg

SEQ ID NO: 114348 - DNA, 768 bp, Zea mays
  Clone ID: MRT4577_3576C.1
cattggtaccctcgaggccggccccgccgctctccgcccgccgaccgtttcctcggcctattctcctctccgtcccactccctccccgcttcctcgccctccgccggggacgagctcgtcgaaggcgacttcctcttccccgcgccaccctcctcctcggacccgccgcccgatgcctccaagaatccgggccgcgtccagggcggccacctcggcctgctcgccgcgctccacgaaagcgacaggaaggtacgtgggcgtggcggagctgctgctgtggccgcgtccacggccacggccacggctggaacctccgggacgctgctccgccgcaaggcgaccatcgccgcagccgcagccgcggcctcggcttcctcagtgacgccttcagtgtcccctacgtccgcgtcgcgtgccataccggtggcaccgaggccaagggaccctgagctgccggccgcggcgccgtaccaccagtcggctcccgtcctagttcccgtccctccaccctggagccgcgggcgcaaatgggataaagtcgccgccggtcctggcgaaggggacgacgacgacgaggagctctttcatggggacgccgccatgctacccccgcacgagatggtggcgcgcgcttccgcaggcggcggatacggtgagccagggaaaccgtcctcgatggtgggagggcgtcggccgcacgctcaagggtcgcgacctccaccgcgtgcgtgacgccgtgctgcggcagactggctttcttgactgaat

SEQ ID NO: 114349 - DNA, 440 bp, Zea mays
  Clone ID: MRT4577_35770C.1
aaaaagggaaaaaattttttgttgggggcatttgtttggttaaaggggagaaaaaggtttatggggtttgttttgtttttaaaaaaaggggaaaagttcctggccaggttttgttgttttgaaaacctaggggcggtcaaaattttacaaagccctttaaagaaaacaagacgggggggggaaaccactgaaattcagcaagggtaaaaaaaaaaggggtttaagaagttttttttgaaaaaaataatctgtggggaggaaaaaacctaattttttaaaaagggttgaactgaactggaccatgatttttaagatgtgggggatggcattagatcttgaaaaattcttcacaaacaattttgatgggggtcgggttgatttgttttttaaaaggggggataaacctcccaaagaagatggggggttgtatccctttttgt

SEQ ID NO: 114350 - DNA, 215 bp, Zea mays
  unsure (1)..(215): unsure at all n locations
  Clone ID: MRT4577_35771C.1
cttgggaaagataaaatttttttggggagcaatttatgcaacatgccancatgcattataacaaaagctcaaaacacctacaatcgcccgtaaagggggccccaggttaaaaaaaaattttttttaaaaggaggggggaaattgccaaatttaaaaattggtcgacccttttgtaccgtcccctaataatttatccaacacccccccccggccgg

SEQ ID NO: 114351 - DNA, 590 bp, Zea mays
  unsure (1)..(590): unsure at all n locations
  Clone ID: MRT4577_35772C.1
aattcggcacgaggaaactatatttattataaaatagctgaaactagttttatccgcgtgaaaatatatgtcaacatatttccaaggtattagaaagcgcgtgaagccaccattatattgagattagtttatttcattttcatctatttcatctattcctattggttatttttagatgcaacatttaagtcacatgttattagcctatgaaattgtattatgaaactcttcattgagagagtatatttcattttatctcactcttattgacgtgacaatcttgggaatgcatggtgtgtaccagtgagaaaatgacttccattccacctcgatgcacacaaactagttttaatacatagagagtacactcactctaagatgaagaagtcttaatccagctatgaatgcgcgccggtatgttgtcggttccattgggaannggtggttagcgttaattaatgtttaagaatttctcatgcgctccacaagttatatttggctatgaactgggcatgtacngcgccgttggtccattaatgcnaaatatgggtagcatgaagaactttcttaatttattatcatgctctctc

SEQ ID NO: 114352 - DNA, 405 bp, Zea mays
  Clone ID: MRT4577_35773C.1
gctttcgttctttttttttttttttttggtttttttttgtgttttttttttttttttttttttttttttttttttttttcccggcccccgcttgaaaaaaatagttttttttccccgtcactttaacgggcctgttccatgcctagaaaaattgtttttcactagaagggttttttcccgggggaaagaaccctttggggccgttgaaaaaattggtgttggggcctttttgggcttttccacaacgattggttgggtggtcagcccctttccacccccgggggcgggtttttgcaggggccccctattcactttgggggggtcgttccccccagcctccaccaggttttttggcttttcccccatggggtttaaaccaaactcccccttgttttcccgggtttt

SEQ ID NO: 114353 - DNA, 318 bp, Zea mays
  unsure (1)..(318): unsure at all n locations
  Clone ID: MRT4577_35774C.1
tctcataactaaacctcttatcactaaaccggtcgtttttatcaccaacaaacttcacacaaatccatctccccatctatacactaaaacatccaatcatcatcatccatcacaacttacattctatcctttaaatcctaaaccaaaactaacctcacctcactattaacttctataaacaccacttcacataatccctntaatatgcaaacaaacataatctaccagttccacattcaaaaaaatcaatatacagccaaaacctaaacaagagccaccttaaccaatatctttacatcctttagaacccaccaaatc

SEQ ID NO: 114354 - DNA, 381 bp, Zea mays
  Clone ID: MRT4577_35775C.1
atattatattttttttttttttttttttccagggccggggttgttttaaaattgaccattaattaccggcggtattccaaacacaagagttttttacaacacaaccttgcattgttaccaacgatccccaatgaagaaagctgcaccctaaaactgcacacccactaacactttctgcccacccggtaattgaacccccccgcgtacctggtgaacgaatcggtgtactggccccccttggcctggatgagggaaaacctttcttacttgccctcgttctggccccccgactgtttgaaaaaggcccccttaaagaacaagttcttctgcgacttccacacccaaatttttgactccctggactgcgcgtacccccccttg

SEQ ID NO: 114355 - DNA, 211 bp, Zea mays
  Clone ID: MRT4577_35776C.1
gggggccctttatcgggggggcggggggggttacagaggttccatacaaggggggaggctctcatcttactcgctttattagtcttctgttcctaataacaatcaccggaatagggcttacaagggccgctagaaccaggatccggcgaggcttcccttggtgtgctaaagctggggccgacgcggatgctcattttttttttcaccccca

SEQ ID NO: 114356 - DNA, 1090 bp, Zea mays
  Clone ID: MRT4577_35777C.1
gggtacctattgggcgcctcgaccccggccgggacaccacaccacgttgctctcaccggtggaaggaagtggaagtagaaggctggaagcggaagcattcgatttccatcgtggggcatggcggcggaggggaagaggaagggcgtcccggcgctagggtggtggctgatgctagtcggctccctccgcctcgcctccgtctggttcggcttcttcgacatctgggcgctccgcgtcgccgtcttctcgcagacggagatgactgatgttcatggccgtacatttggtgtctggactcttttgacctgcaccctgtgcttcctttgcgcactgaacctggaaaataggcctttgtacctggccaccttcctatcattcatctacgctcttggtcatttcctcacggaatacttgatataccacaccatggctgcagcaaatctgagcacagttggcttctttgcaggaacgtcgataatatggatgcttctgcagtggaattctcatgggaacccccggggttcctatgctgggaagcagtcatgactgatgctcgggttgttcgcttgatgtggtctgggcccgctaggggaagaaggatggttgaagaaagctcgctggaaagccgcctgatgatggctctgcgccatttgtacttcagttttcaacttttcatcatgttatttcattgcatgagacgttcgtccgactgagcagggagatttccgaacagttatgccactggttgggaatgagaatttttgaacactgaactccggctgaatcatgtagtcaggagctgtaatagctttcaggcgtacctgagaaacagattgccattcagatagtcaccggttgggggctgagatgccaataaggcgggtatagaaaagaggtgggcgtatcatgtgctttcgttgcagccaaagggtgtatgtacttactctgaaacttttgttgtactgatgctgcatcttttgtccttgaaataaaccgtacgttagtacagtagagtcgataaagtttttatgtattgcgatgattgttcaatcacttttttttgtttacctcatgttcagttacttttttt

SEQ ID NO: 114357 - DNA, 174 bp, Zea mays
  Clone ID: MRT4577_35778C.1
cgtctatatgcagatcagtcgccgactggcgagctcgtcgaactcctatttcatgcagcaccgggacctagaggcctaccagctatccctatcgtgagtcaaattccagcttggcgtcatcacggtcatagctacgtgctgcatgatattgtaatccgctcagaactctacaca

SEQ ID NO: 114358 - DNA, 628 bp, Zea mays
  Clone ID: MRT4577_35779C.1
atcattcatctacgctcttggcatttcctcacggaatacttgatataccacaccatgcctgcagcaaatctgagcacagttggcttctttgcaggaacgtcgataatatggatgcttctgcagtggaattctcatgggaacccccggggttcctatgctgggaagcagtcatgactgatgcttgggttgttcgcttgatgtggtctgggcccgctaggggaagaaggatggttgaagaaagctcgctggaaagccgcctgatgatggctctgcgtcatttgtacttcagttttcaacttttcatcatgttatttcgttgcatgagacgttcgtccgactgagcagggagatttccgaacagttatgccactggctgggaatgagaatttttgaacactgaactccggctgaatcatgtagtcaggagctgtaatagcattcatagtcaccggttgggagctgagatgccaataaggcggcgggtatagaaaagaggtgggcgtatcatgtgctttcgttgcagccaaagggtgtatgtactctgaaacttttgttgtactgatgctgcatcttttgttcttgaaataaaccgtacgttagtacagtagagtcgataaagtttttatgt

SEQ ID NO: 114359 - DNA, 206 bp, Zea mays
  unsure (1)..(206): unsure at all n locations
  Clone ID: MRT4577_3577C.1
gaggaaaattacactaatagaacaacactggaaaataaatacaangnggaacatttctaaaaaagaaaccacacataggggatttagatcgacacagctcatgagtctgatacagtgcaatgcacgacacacgggggacgctattgctagaggatttctaagcagacacatgtaggggagaataactggtatacatgctttctaag

SEQ ID NO: 114360 - DNA, 392 bp, Zea mays
  unsure (1)..(392): unsure at all n locations
  Clone ID: MRT4577_35780C.1
tttttttttttttttttttttttttttttttttttttttttttttncaaaaatctgcccagggcattgtttttgataggtttgattccgggaatgggaaatccctttccaggagttcacataaatttaatcaaggggcttttttttttttgtttttgacagcccaccccatttaaactttcaaatttacaaagcttatccctgcaattaaccaaaaaaaccgggggggatggccttcattcaaatggtcagggatccatccaggatctcctccctgagttgtaaggcccgaccccaatgtcagtttgatggagcttttttagttccccagggagactgtattaagtgcaagggccctacataacctcctcatggcatctggggccctgatcg

SEQ ID NO: 114361 - DNA, 318 bp, Zea mays
  Clone ID: MRT4577_35781C.1
cgcccgagtacgactccaacacgaatggactgcacctactggacaagctctacctcggggggccctacgacatgctggggttggcccgcgacctctgctaggcctccatcctcaccggactcgacaacaagaacggccgcgtgctcatggtgatcatgttgcgcaaggagagtgaagcacttcacgaactacaaagcccccgtgagaaccacgtcaaggcagctcacgacgcgctgcataacatcctactcactctaatttgcgagcatcgccaccaaacacttagtgtagaactacttactgcacgcgaccgagcaa

SEQ ID NO: 114362 - DNA, 423 bp, Zea mays
  Clone ID: MRT4577_35782C.1
cccacgcgtccgcccacgcgtccgttaaagtgttccacgggtggtggtgtaccagtacgcgcccaacgggtcgctggacaagtacctgttcgccggcggaggcgcaggcggtgggagcgccgaggaggattcttccgctgtgcagcagcagcagcagccgctgctggaccttcacacccgttaccgcatcgccctgggtgttgcccgcgccatcgcctacctccacgaggagtgcctggagtgggttctccactgcgacatcaagcccgagaacatcctgctggaggacgacttctgccccaaggtgtccgacttcggtctgtccaagctgacgagcaagaaagaaaaggtgaccatgtcgcgcatccgcggcacccgcgggtacatggcgcccgagtgggtgatccaccgcgagcccatcac

SEQ ID NO: 114363 - DNA, 277 bp, Zea mays
  Clone ID: MRT4577_35783C.1
ggcaaaactaatgtaccaggatattatttttgcaaattgtaaaactgacaaagctggaaacataagcaaaaaaaaaaaatgttgggggccagaggtaggcaacaggtactgagctcacacatttgctatttgctcgaagttgctagccgccagctgcaaaagatctaatttgcggttcctaatctcaaacgcacttgttctacagattcatggaattgctctttgctagcagccaggaatatttgacttgacaacaacctcagcagttaccatagac

SEQ ID NO: 114364 - DNA, 302 bp, Zea mays
  Clone ID: MRT4577_35784C.1
cgtggagaagttgcacttcccccaaaccaaacccatttccccgaatttcaaagtgaaaactatcaggcttccagctctagatcatacgctgactgaaacagatctcagttctgaacgccgcgtaaagcaatccgaaattgacgttcaaaccagtactaaagaaatgaataaggaaattaagaaaaccgaagtgagcacacagtgtgataataagcaatctgtggctgaaaaatattttcaattacctaaaacagagaaacgggtgacggtacaaatgcccaaagactatgcagcgaaaagtc

SEQ ID NO: 114365 - DNA, 1056 bp, Zea mays
  unsure (1)..(1056): unsure at all n locations
  Clone ID: MRT4577_35785C.1
attaattttttttatacactttttatataancaaaatatttttttaaaaaaaacacccatttttttttttttttttttttttttttatttttttttttttttccctttatttctttttttttttttttttttttttttttttttttttttttttttttttttttttagtagcattataattacaattagtattcttattcaaatatcatagtacaaacatcataatgtatggtactttattgcttaacaccgttataggagtataacggctaggtagacacaattcttcaattgcaaacaccactaatgtcattgctgctgcatggattattttggtagtatgagtggtacaagccgcacattgatggtaggtattgtgctgctgtcaaaatatgccaccgcactttgagtagcttgttgagatccacataactcacatggttgctgttgttgctcctcctggattatggattgaaccatgttgtagattgcatggtgaatgtattgtggcttaatccataatccaggatgagcaacagcaacaaccatgtgagtgatgtggatctcaacatgctactcatagtgcggtggcaatcttgacagcagcacaatacctaccatcaatgtgcggcttgtaccactcatactaccaaaataatccatgcagcagcaatgacattagtggtgtttgcaattgaagaattgtgtctacctagccgttatactcctataacggtgttaagcaataaagtaccacacattatgatgtttgtaaaaaaaaaaaaaaaaaaaaaaaaaaaaaaaaaaaaaaaaaaaaaaaaaaaaaaaaaaaaaaaaaaaaaaaaaaaaaaaaattaaaaaaaaaaaaaaaaaaaaaaaaaaaaaaaaaaaaaaaaaaaaaaaaaaaaaaaaaaaaaaaaaaaaaagggggggcccttttaaaagaaccaaatttaattcccgggggtttgaaaggaaaaattttttttttggggccccaaaaataaatacagcggcccgggttttacaacccggggatggggaaaaccctggggt

SEQ ID NO: 114366 - DNA, 961 bp, Zea mays
  Clone ID: MRT4577_35786C.1
ctgctcaaaccgaagagatatcaataaatgatgatgagtggaatgatggtttactggcaaccatccgtgagaaggttcatatggaggctgataggaaggccatgtccaaccaagttatatattgcttggatggagctaggattggcatacagtatgagacattctttgctggagagccttgtgaaatttttcattgtgttttggaaagcaagtcattcctggaaaagatgattatgattgaacacaccttacctttctttctgcctgtacgtgaattagaaagtgatctgttgtcatctaattcaattaaattcattgatcatcttgaagaaattttacaggcttatattgacaggagagagcaggttcgtcttatcaaggagctctacgggaaccaaattggcgagctgttccatagtcttccttataatatgatagagtttgtattggaggattttgagtgcaaggttacaatcagtatccgatattcggatctactgcagaccctgccgagtcaggcaagggtcttggcttggccacttcgctcggccaagaaaatatctacaagaagcagcagtgcatcagctgcgcaaccagtaccctttcacctttcatatgccgaggaagcactcaaaaccttgtgtctaccagaagcatacgcagacattgtgctggagctaccccatgctttgaagaggattttatcctctcgggacagtgactaaatcgtgacctcaagatgtccagttttgttgtgcataagattcacatctcaatcgtggggcatgtttttgaagatattgttcagaatcttgtggtagtatagcctgcagttgtggactgcaattcctgtgaaagcaaggcagacatttgcgtgggccgctcgaaatattccggctacagttcctgttaaaagaatcaaaatcctaggaaggccttatggtcgaggcataatcttgcc

SEQ ID NO: 114367 - DNA, 1320 bp, Zea mays
  Clone ID: MRT4577_35787C.1
cacgtgcaaggctgtcaaatatcctcaaaaggcatgaagatctgaaagagcgcctttcacgggattctgataagctcatttttgagcgcctacagaaagaatttgaggctgcacgggctgctcaaaccgaagagatatcaataaatgatgatgagtggaatgatggtttactggcaaccatccgtgagaagaccaggttcatatggaggctgataggaaggccatgtccaaccaagtaaatgttccagcagatctttcatttcaatcgaggactacatataggattagaaataaggttatctattgcttggatggagctaggattggcatacagtatgagacattctttgctggagagccttgtgaaatttttcattgtgttttggaaagcaagtcattcctggaaaagatgattatgattgaacacaccttacctttctttctgcctgtacgtgaattagaaagtgatctgttgtcatctaattcaattaaattcattgatcatcttgaagaaattttacaggcttatattgacaggagagagcaggttcgtcttatcaaggagctctacgggaaccaaattggcgagctgttccatagtcttccttataatatgatagagtttgtattggaggattttgagtgcaaggttacaatcagtatccgatattcggatctactgcagaccctgccgagtcaggcaagggtcttggcttggccacttcgctcggccaagaaaatatctacaagaagcagcagtgcatcagctgcgcaaccagtaccctttcacctttcatatgccgaggaagcactcaaaaccttgtgtctaccagaagcatacgcagacattgtgctggagctaccccatgctttgaagaggattttatcctctcgggacagtgactaaatcgtgacctcaagatgtccagttttgttgtgcataagattcacatctcaatcgtggggcatgtttttgaagatattgttcagaatcttgtggtagtatagcctgcagttgtggactgcaattcctgtgaaagcaaggcagacatttgcgtgggccgctcgaaatattccggctacagttcctgttaaaagaatcaaaatcctaggaaggccttatggtcgaggcataatcttgccaactgctgtccttgtccttgatgtgtgctccttttttttctccactctggctatgtttgtttccttttagaattatactagcgcgttacgcgcgcctgcacgcgcgtgttgacaaacctattttatttcaaatatcaagtatctaagaagaccggggccgctcgatatattccggct

SEQ ID NO: 114368 - DNA, 330 bp, Zea mays
  Clone ID: MRT4577_35788C.1
ctcccactcttctagcatcttgaagcttaaatctcaggcgtccgatcatgccgatcagaaacatcgccattggccgtccagatgaagccacccgtcccgatgccttaaaggcggtgttggctgagttcatttcaactttgatctttgtcgtcgccggttcaggctctggcatggctttcaacaagctcactgaaaacggagccaccactccttctggcctagtagctggtgcagtggctcatgcctttggactcttgaacactgtgtcagatggagccaacatctgtgggggacacagatgaccctgccgcaactttcggtgcttttatt

SEQ ID NO: 114369 - DNA, 139 bp, Zea mays
  Clone ID: MRT4577_35789C.1
aatagcaaaaatgccgtgactatgaggagcatactgtagatttagcccttacaattacacggcctagggaggctagtcggatcatcgcattggaagcagagctctactactgtgcccaaccgggacgacagacgcatgc

SEQ ID NO: 114370 - DNA, 365 bp, Zea mays
  Clone ID: MRT4577_3578C.1
acaagagcaaggggaagttctccggcattctgcacaagggcttcaagcctgacaagcggagatgcacacgccgccgtccgcgagccacgatgcgctccaccctcgaccgccaatcccgtctcagcatagcgcaactgccgccgccccgcgacgctcgcgtcgtcatcctcgcgagacagccgccatccttcccccgccccgtgccgctcgcgatgccaacgccacgcgctctccgacgccatcccacgggagctcaccagctgcgcctacctcaacgtcatagatctccatggcaaccagctgtccggtcccatccccgacgagctcggcctcctcgtccgctatcaaccttcgatgtctcccac

SEQ ID NO: 114371 - DNA, 605 bp, Zea mays
  Clone ID: MRT4577_35790C.1
ccggggaatcctcgaccgcgtgaaccgaagccacgacgccgggaaccgccgaggccgccgtcccacgacccaccacctgctgctctgccacatctacctcgccgctggcagctgcaggtccgccgccaggccaagttccacacgggccacacccgacccaaccaccgcgccacgagcacggacaaggcgcaaccgccgccgccgccgctacgggctagccacgcgcacggacgccgccaccgcgggctagccacggccatgcgagcgcgcgggcgccggcgccaggccacctgcctaggtcggcgcagagggagaggggtggggagtggcggagcaagggggagcatctccctgccaccgccgtccttgcagagcgtgcgggaagcgccgcggccctgctctggcagcagtgaggccaaggcggcggcggcggctaggatttgctgcccgagccgcccaagcaaggcgacgtgagcgggtctggggctttttcctaatttcatgtcaaacttgtaacattattgtttgaattctagttgggtcaaataagtaagaaaaaaaagaaaaacttaaggttggggaggctgaaaaaaaaaaaaaaaaaa

SEQ ID NO: 114372 - DNA, 441 bp, Zea mays
  Clone ID: MRT4577_35791C.1
ccccgaaaacccccatttttttttttctttaaaagggggggaatttaaaaaaaaggggggggggggtacaaaaccccatttacaggggggggccaacccaaacagggtcctattgggcccccctttaaaggggggacccccccgggggggggaaaaagacccccggcccggccattgggggggggttcagttccagggggaaaaaaaaccggccctggttgggggggggaggaaaatgtaaccgttgaggcggccctggaaaaggcaaaaaaattcgggtgacggggccccggggggattaaggggttttacccggggaccgggggttccattcaaacccgttggggggaaaaaacgtcctcccctttttgggcccccccccaaaattccgggggggcttccctgagggggggggggctctccaaggggggggccccccct

SEQ ID NO: 114373 - DNA, 661 bp, Zea mays
  Clone ID: MRT4577_35792C.1
ggccgcttttttttttttttttttctttttttttttttttttttttttttttttttttttttttttttttttacacatactgatatataggcaaaaaaagaccaagactaaacacgacaagaaaaaaggcgaacaccaggccaaacggaggcgaacggaacacacaagcacaaccacaaacaaagggaaacgggggggcaaacagacacaacgagaaaaaaagcaaacaagaaaaaacgggccgaccgagggggaccccaagaacccagggagccaggacccaaccgcgcgcccgcgggcgcacccactccaacggaccgagggggaaaccccgggcgcccccgggcgccagggctaaaccgcccaaaccggaaaagcccgccggcccccaaacgaaaaggcccggaagcgcaccccctttgaacgggcgggcacccaggcagccgggccggaacgggcggccccacaaaacggctgagaggcgagaaggggaaaagaaagggggaagcattactttaaccaaaaaaccgaaggcgaaaaagggggaaaaaacggcacgcaccaacccaagaaacggaaaagggcagaccccgcctggaacaaaagcccactacggcacaaggggggccggagggcacacgggggaaaaagcgacaatcag

SEQ ID NO: 114374 - DNA, 326 bp, Zea mays
  Clone ID: MRT4577_35793C.1
cacgatagactgccaacaagaaaagggcagtgatggcaatacattgccaacaagaaagtacccagtgatggcaatgtatggccacgatacacggcaactcagtgaacggctaccaatgacaatcctgatctaagacttggccttctcattaatggcacgcttgttgtgccaagttgcgctcttatcacccttcagttggttctttcttgttggtcgtacgtgagattttattttcactgaatccgggtctaggtggaggttttcagtattgacagatgtcagatgttcaactttatgtggttatacaaccggcaacaacaggcacc

SEQ ID NO: 114375 - DNA, 291 bp, Zea mays
  Clone ID: MRT4577_35794C.1
acccacgcgtccgtataaacacaccaatcgaatttttgtattctacatacctaacaacatatggctggcagggatattattcccttctttgcacattctagcacatttttgctagctactacaaattctgtttattatttccacatttcttactctactccaattttccatttattacacagtattcctcccaccagtttacttcaatacgctttctaacaccctatttgttcaatctctataattatacaactaatcatttgctgctaatctactttacaacataccata

SEQ ID NO: 114376 - DNA, 423 bp, Zea mays
  unsure (1)..(423): unsure at all n locations
  Clone ID: MRT4577_35795C.1
ggtgggtgggtgtgttgggagccaaggaggtntttgccccaacggtttatgtagtctttccgttgtccgtgccacatgacagtcgcgcgtgctccggcccggtctcaatggtttgctgtcgattggaggaatctatctgtggatctatcgatctggggggtgaatctcaagtggagagctgcgttcgtgctgactaatcaatcgtgcagcatcatggatcagctgctgctcggtgctggcaaacgccagcgcactcacggtaccagtggccacgggctgccagcggggtacaatctagcgcgcgattttatccctggtggaaaggaagaaacgggcgagaatgggccatcgagagcgcgatcgggaggacaccagctgtggttggttgcgtgtgaggttggggggctgggcgccttcacacca

SEQ ID NO: 114377 - DNA, 293 bp, Zea mays
  Clone ID: MRT4577_35796C.1
atggccgggaggcgcccggcaccggtggccatcctccttctcctcgccgcggcattcgcccccatctcctccgccgttcgcccagtctccgactcacacagatccacttccggggaggggggggccctctcccctaacaaaccctctaaccatcacaacacaacatattacccattaaacactatccacatactttttctaaaaaactataataccctctccccaaatgcttccaaatttttcccccacaatctccctccccctttttttattataaaacatctcttccatgc

SEQ ID NO: 114378 - DNA, 275 bp, Zea mays
  unsure (1)..(275): unsure at all n locations
  Clone ID: MRT4577_35797C.1
gggggggtgtttttttttttttttttaccaggacaatacaatatactgcagtgttttaaaaatatcaacatggaccaaacttacaatcttttgggtacataaaaaatcacaaaataattgctagactacttgtcttgcaaatcttcgtacaggggggggggggatattnccatattgattctggcattcttcaaatctacaatgacatcattgaaattgttcaaagatacatcctctgttctaaattataagctaggtgcatagttttgctatgc

SEQ ID NO: 114379 - DNA, 433 bp, Zea mays
  Clone ID: MRT4577_35798C.1
gccgctgcggaccggcttcctacacggcgccccccaccgtgtctacggcgacgacggccgggggccggtgggagagggagaaggcggagggcaacactaacagggtcctataccacggctaaagacaacgcgaatcgcgggtttaacacccgatgaccagtcccgtgcggggaccacagatgcggacctgaccccatccatcaaggccggcgtgcagcgatgcagtgtagggtaacttaccaggaaggagatgctctctctagaacaactgtgcagtactttgttaatcagagtacaactaccactattgtgcggggacatgcttggaagaatatggagggtggcaggaagcaccgaccagcgggcatagcctgacacgagcatcttcaggggacggcactgaggcaacggtgttatgacacatgaacacaat

SEQ ID NO: 114380 - DNA, 414 bp, Zea mays
  Clone ID: MRT4577_35799C.1
gagtagtaggcctgctcatccgagcgagatagaggccgaccacaccgaccgacaggagctcgctcgctcgcaactccggaatggagaccatcatcgggcaagacgctggagatcctcctggacgtgatcgcctgtcggcctgggagtcaccgccgagcagagccagagtcgagccaccgtcaccccgtgaaggcgacaaagagtactactactgcgcctacgactccgacatcgcctcggggtacggtgttggggtgactgtgcctcctccgcggcgatgcagtgccgttcatgttcaccagacgctgattgtgctaggctcgtgtggtcaaacagaaggttgctcccctctacgcacttatcctggtccgcgttgcacgcggggcattccacatgcccgagggtgacctgctg

SEQ ID NO: 114381 - DNA, 472 bp, Zea mays
  Clone ID: MRT4577_3579C.1
gacaataaactttttatttcccattcaccattgaaggagcaaagtcgttcactttatccccccgacttacgtggttaaaaccattaaaagtggcgggagctgcaccagccaaaaccatgcacatcgcaagccatggcgtggcaggtgggggaacacaacaacattcacatgaactttagctactggaacagggcagcggtgaatatagagttctgctgctagtatgatcgaaacagcacttcccaacgaccttgaaacgctactgttttgagctgctatacttttgtttgccttatgaatacattgtttttctctgctggtgcagcttaccatagcggtatgggctccccgtttcacttcttgaggcactccagcagcgggtctaagagcttgcgctggttgacggtcactagcaccttgttgaactcctctccgggcgacctttttttatcgccggtcagggacttggtgc

SEQ ID NO: 114382 - DNA, 1809 bp, Zea mays
  unsure (1)..(1809): unsure at all n locations
  Clone ID: MRT4577_357C.1
ggccgcttttttttttttttttttaagaaaatcatccgccgactcgattttactgatgacaaaagatgaacaaggtggtaaatgtaaagcatctccgagatgaagcaacaacgtaaacagccataattattctcaataacccggtagcaatgcaggggagaattaacaactcatacaacatcaagtgttgtaaaccacaaaatacttcagaacagacacacataacacgatagcaggagcaactcacggcagatcacgggataagggcagcacactggcctgatgctgcgtcatcagcaaacttctctagtactcgtcaccctcgtcgccatcctcgccctcatcgaactcagcgccgacctcctcgtagtccttctcgagcgccgccaggtcctcacgggcctcagagaactcaccttcctccataccctcaccgacgtaccagtgcacgaaggcacgcttggcgtacatgaggtcgaacttgtggtcgatgcgggagaacacctccacaacactggtggagttggagatcatgcacacggcacgctgcaccttggccaggtcgccaccaggcacaacgctaggaggctggtagttgatgccgcacttgaagccagtcgggcaccaatccacgaactggatggtgcgtttggtcttgatggtggccacagcagcattcacatccttggggaccacatcaccacggtacatgaggcagcaggccatgtacttgccatggcgtgggtcgcacttggccatcatggaagatggctcgaaggcgctgttggtgatctcagccacagagagctgctcgtggtaggccttctcagcagagatgactggagcgtacgaagaaagcatgaagtggatcctcgggtagggtaccaggttggtctggaactcgttaacatccacgttcagggcaccatcgaacctcagggaggcagtaagggatgagataacctgggacacaagcctgttgaggttggtgtaggttgggcgctcaatgtcaagggatcggcggcaaatgtcgtagatggcctcattgtccagcagtatagccacatcagtgtgctcgaggagggagtgggtggacagtacactgttgtatggctcaaccactgaggtcgaaacttggggggaagggtacacagtgaatacacagcttggactttgtagctgtagtcaacagacagacggatttaggaggagggaaccaagcatcagtagcctgttcccgcactgcanccagccgtgaagacgaggaagccctggagaccagtgcagttgtcggcaagcttcttgatgcgatcaaggcataggtcaacaatctctcttgccaatggtgtagtgaccacgggcacagttgttgactgcatcctccttgctcactgatgagccgctcagggtggaagagctggcggtaggtaccagtcctcacgtcatcgatgacagtgggttcaaggtcaacaaaaacagcacgggccacgtgctttccagcagcagtatctctgaagaaggtgttgaaagcatcatcacctcccacaatggtgttgtcgccggacatatgaccgtcagcatgaatgtcatgctcaaggcagtacagcttacagcacgcgttttcgacctggataccgacctgtccgatgtggatcgaaatgcactccctcatggtgtcgcgttacgggatggagcgacggcgggaattgggagaagggggaaaggtctgacacgcggaggtaggagagtatgaagactcctatctcggtgatgatacaattatcccggccggcctcgagggtcccaatg

SEQ ID NO: 114383 - DNA, 167 bp, Zea mays
  Clone ID: MRT4577_35800C.1
gggttggggggacagccacgcagttacatttttgttttcctttccttttttaggtacatatctgtaatccaggtgaagaggatttgtggttaatttcatacccgcgggatcggccccggcctggaaaggtacataaaaaagttactgttttcaagcttcccaagggt

SEQ ID NO: 114384 - DNA, 528 bp, Zea mays
  Clone ID: MRT4577_35801C.1
aagagcggcccgcatacaacatatcagattgccggagcatgctgcaacgctttttgagctgataagatgtacggtctcactcacccttgtatgacggcgtccaagtagcaagggaaggatcacatgatgtacttgaagaactagacaccctacggcatgtcttgactgacgatggaaccggccgccttacgagaaatgccagacctgcttcagatacagagcgtgaacctgatgctctaagaggaatcctaacatatgcgagccttaaaatggatctgaacatttctgcgaaaagaacacgccccgtacagatacaggcactctgtctcatacccctgcaactccattgacgctgatgcagccaccacatgtgtaccatgttctcctagagagaatatcacgacgcagtgccctgatagtgactcagcgactgatgaacacggactatggttgctatgtggcaaactatgcacgcctagtatgaaaccatgctgcaggactggaagatgccataatcatgcattgcaa

SEQ ID NO: 114385 - DNA, 229 bp, Zea mays
  unsure (1)..(229): unsure at all n locations
  Clone ID: MRT4577_35802C.1
ggggggggggnaaaaaaacagcngccnnggcaangccgggaagacccaccgcagggnacggccgaagaaaggangccacaggccacgaacagaagaccgcacaccaggacgacgccaggaacccaagngcgcaaaacgacacgcccggggggggaccaggacagacnacacacccacccaaaagacccaacacagagaagcaggagcagagccaccggaagaaccagcc

SEQ ID NO: 114386 - DNA, 342 bp, Zea mays
  Clone ID: MRT4577_35803C.1
acgcgttccagggcacggtgaagcttctgttccagccggcggaggagtcgggctgcggcgcgaagcggatgatcgaggacggcgcgctggagggcgtggaggccatcttcgccgtgcacgtgtcgcaccagcacccgacgtccgtggtcgggtccaggacgggggccctcctcgccggctgcggcttcttcaaggccgtgatacgcggcggcggcggcggcggcgaccgggcgtccgaccccgtcgtcctggccgccgccttcacctgtattaagcctgcagggcattcgactcccgcgaggcggacccgctggactctcaggtggtgttcgttgcggtggt

SEQ ID NO: 114387 - DNA, 604 bp, Zea mays
  Clone ID: MRT4577_35804C.1
aaaaaaccaacccttctatactacagctatgcaggggatttcgttcgtatgggctatcgctatgtatgtaccttccatccactagaaccaccatttacagttacagttccgcctggtcgccgaggtcgggctccccgcagaaggcgtcgggctcgaacgacctcgcggcggcgtcgctgtacaccccggggacggccctcccgccggaggggttctcgagcggctcccgaggcttctcggtgttggcgtagaggaggatgcagagggtcagcgacaccgccaggcccaccagggtgaacttcactctgttcagcaccggcttcacctgaagaagaagaagaagaagcatgtgctaccataaggtggccagcacggcgccgcttgttcgagacgggatactggaaatagacaccatcatcagggagaagacttgagacgatgtaaagatcaactgtttcttattgctttgtctcgtcagctatgatgcgtagcctgttacaccggacaaactactaaggaaagattcctaatgcatgatttaggagctcccagtggccccttgggatggtctttttaaaatgaaaatggttttggtgcttggttg

SEQ ID NO: 114388 - DNA, 267 bp, Zea mays
  unsure (1)..(267): unsure at all n locations
  Clone ID: MRT4577_35805C.1
gggggaacttgaggnnaacacacacaacaaaacacaaaccttcncccgctttttcccggagagcttttctttttaaaccccggggaaaccccgcacacatatgaggggggtggggggcgccacagaaaaatactatatggggggcaacacctttttgaaaagggggaaactgtgccccatatgtgggggccccccgcgcacccggatgtgtataagagagactttcttgtgtcccccaaaaacaggggggggtccctttttttgggg

SEQ ID NO: 114389 - DNA, 315 bp, Zea mays
  Clone ID: MRT4577_35806C.1
aatctcatcacagtactgttttgtttctcgtattcgcttacggtaagggggcaggtaattttaaaaagaagggggggccaagaaatggccatgactgcacattccttccagccctactaaaggcggacttcttgctactgtttctagcatactttccacgagttggcacacgcctcactgtactcaataacctggcgcatattgcaatgtctgttgacgctaatgacacaactattctgttgtgcctctttctctactgcaaatgcgatgctcaaatccttggtggatctgactctgaatatactgtacggtcaa

SEQ ID NO: 114390 - DNA, 542 bp, Zea mays
  Clone ID: MRT4577_35807C.1
ggagtgcaacaatgcaacaaaagtacgcgctttaatggtttgtaccacctaccctaggccagacaccttccaaaacatagtacgtggcctactaactggggcccgaaccactagcttacgacattgtaaaattatgagatcggcagacctcgacagctgttgaactgcgcctacatttttgcaggcggagacttggcagcaacggttgagggaaacagccctagctggaatggcaagagcagatgccaaatgccctcgacggtttaacactgcgactgcgggattactatataggcttgacagaccaccccatcttctgccactgcccacagctgtcctcagagcttacatcagtttccacaaaatttttgggattaagggaatactgggacctggccttaagcttagtaattatcttagaaatattcattgcatgaaccactgcaaatgaaaacttcataatcttctttctttttttaaagtggatgaagagcaatcccaaccttggcaatttcaccttttttctgcttacattttaaaca

SEQ ID NO: 114391 - DNA, 853 bp, Zea mays
  Clone ID: MRT4577_35808C.1
atcttccaccgcgacgtcaagtccagcaacatcttgctcgacgccgcgctgcgccccaagctggccgacttcggcctgtcccgcgccgtggaccgcctggaggccgcgcgctcgcacgtgtccaccgcgccgcagggcacacccgggtacgtggacccggagtaccaccagaacttccacctctccgacaagagcgacgtgtacagcttcggcgtcgtgctgctagagctcgtcaccgctatgaaggtcgtcgacttcgaccgcccgcccgccgaggtcaacctcgcctccctcgcgctcgaccgcatcggcaagggccaggtcgccgagatcgtcgacccggccctccttggcgccggcgaggactgggtcatgggctccgtccgccacgtcagcgagctagccttccggtgcctggcgttccagaaggacgtccggccgtccatgcgcgaggtggccgccgagctgcagcggatccggtccgccgccccggacggcgccgatcccgaggagcccgcggggtctaggctccggcctgtgagtatgatggacatccagatcgacgtgagcttgggcggcccggacacggcggcaaagaaggcggcttcgcccgtgtcggtgcaggaggtgtgggtcagcgaccggagctcgccgtccaccaacggctccatgccgcgctttgctgcgtagcttaagctagctagctcttgtacactgatgagaaaaaccaatgtaatttagcaaaaaaaaagaacattttttgtctagtaaaattttctctataaaaaaaccactgtacaagatgccatccattgttgtaacggaaacgtaatttactgtatagcattacctt

SEQ ID NO: 114392 - DNA, 480 bp, Zea mays
  Clone ID: MRT4577_35809C.1
gaacaaaaagtttcatttttataatttaccaaacctgtgccactattaaatgcatcacaggactaaacacagatgccagttgagtaaacccgaggttcattgaggtgctgctatgctagcgcacgttctactgtatgtgacgtgcgaggttcactgactacgaccatgactaggacaacaactactgccaacggatggactagacgaagtgatgactaatgggtgcatgatctacttttttattatgagccacattgtccttctgaggacacacacctaacttggacatctgctaggacgacgaccacaaccgaatgctgatgatggccacgctgtcattcaacgagcatgcagaggcatagatacctccactacggtccatagatcaggtgatcttgttgcaaccaaccgtggggcttatgggcaccccgacaggaacgccgcacttgaccaggatgttggtggcgttagccatgctga

SEQ ID NO: 114393 - DNA, 242 bp, Zea mays
  Clone ID: MRT4577_3580C.1
ataaacggcacattttacagtacaaaacatgttttttgcggggccatatgagtccaaacctgtgggcgtgttaaaacaccaaagctaggataacatggcatgtgcagaggggattttacaacatagacacgcattaaccgcaatggaaaatgcttgttaaattgccagggggctctccgataataaaaaaagacggctttacaccaggctattaaagacaacctgaaattgtgcctcaagga

SEQ ID NO: 114394 - DNA, 883 bp, Zea mays
  Clone ID: MRT4577_35810C.1
acctacactgcctaaggattccgccgccggcaccttgccagctgacgccaccaatcaacgcttccctttatggccggagcagtagttggcagactcggccgccatcccacctccttgctcctcctaacactgccccgtcacgccgccgcacaccaccggctgcactctccttcctcctcccaaggtcagtattcaaaaatgggtgatccaagtgagaggaatggacacggcgctcttacccgggtgctattctgtggtccatattggcctgcttctactaactacaccagggagtatttgcaggactatccattcattcaggttgatgaagtaggtcttgagcaggtacctgatgttattcacagctatcatatatgtgtagtaaaaaataagcgtatagattcagatattattgccaaggcaactcagatgaagattataatgcagtatggtgttgggttagaaggtgttgatgtaaatgctgctacagaacacaaaatcaaagttgcacgaatacctggaagtacgacaggaaatgctgtctcttgcgcagaaatggcaatctatcttactctaggcattctgcgtaagcaaaaggagatggatactgctgtgaaccggaaagaccttggtgttccagttggagatacattatttggcaaaacgatccttatccttggatttggggcaattggcatcgaggttgccaagaggctaagaaccctttgggggtaaaaattcttgctaccaaaagaaattggtcatcggacacttgccatcctgatgtcgatgagctgttgacaagaaaggtggccggagaattgattggagtttgttggtgaagctaacattgtatagcatgcatgaccttaccagcgagaca

SEQ ID NO: 114395 - DNA, 1894 bp, Zea mays
  Clone ID: MRT4577_35811C.1
ccctttatggccggagcaatagttggcagactcggccgccatcccacctccttgctcctcctaacactgccccgtcacgccgccgcacaccaccggctgcactctccttcctcctcccaaggtaccgtcccccaccttcccctctttctcagaccctggcgcttcccatccttttgccctgccgctgctgtcctgcacgggcgtcccctgatttacaaccctttggctgcagttgcaagagccggattgccaggtgcttgtttcgtttcgggctgtgtcagtattcaaaaatgggtgatccaagtgagaggaatggacacggcgctcttacccgggtgctattctgtggtccatattggcctgcttctactaactacaccagggagtatttgcaggactatccattcattcaggttgatgaagtaggtcttgagcaggtacctgatgttattcacagctatcatatatgtgtagtaaaaaataagcgtatagattcagatattattgccaaggcaactcagatgaagattataatgcagtatggtgttgggttagaaggtgttgatgtaaatgctgctacagaacacaaaatcaaagttgcacgaatacctggaagtacgacaggaaatgctgtctcttgcgcagaaatggcaatctatcttactctaggcattctgcgtaagcaaaaggagatggatactgctgtgaaccggaaagaccttggtgttccagttggagatacattatttggcaaaacaatccttatccttggatttggggccattggcatcgaggttgccaagaggctaagaccctttggggtaaaaattcttgctaccaaaagaaattggtcatcggacacattgccatcttatgttgatgagctagttgacaagaaaggtgggccggaagatatgtatgagtttgctggtgaagctaacattgttatagcatgcatgaccttaaccagcgagacagttaatgcttctcttggtgtacttagttataaatattccttcaagatggcctctacttgaccttgattaggacgtgaccatcttttacagattggaattgtggatcataagtttgtttcatcaatgaaaaaggtacatgcttgtttctgtcatactggtctccatgttatcagatctgtgggctcatttcgctgactccatccttttggttttagtgttgtgcataaataatagagaaggaatgatccatgagtcatggtatcagttgagaacatttttactagaaaacattttctggagaataatgttattgggttaacttgaattgcttcaatcttaagtaggggtcatatctggtcaacattgctcggggacgcctgctggactacaaggctgtgtttgatcacctggaatcgggccatctagctggtctggggattgatgttgcttggatggagccatttgatcctgaggaccctgttctgaaattcccaaacgtcattctaacgccccatgtggccggcgtcaccgagtattcctacagaactatggcaaagtctgttggtgacaccgcccttcagcttcatttaggcgaggcgttcacggaggtagagttcgtcaactaaaaaaccgtccaggcggcagccgtagacgcatgccattcgtcggctatcggaaccgctgatgcgacaatttgtagagaataatggatccgcgacttgtaagaataaacatgtagccagatgtttgatggtgatctccatgagaaccctgccactggctaccttagctggtagtggtagcaagtcattttctcaaacattgccttctctttcgccttctctttctctgtatcactgatgttgtcatgatcacaactttctttgtgtaacacctaaattatagtaaataatggt

SEQ ID NO: 114396 - DNA, 296 bp, Zea mays
  unsure (1)..(296): unsure at all n locations
  Clone ID: MRT4577_35812C.1
ctcacctcagaccaaactccaatttaccctgatcttccatctaaatatggcatgcataatcgtttttaacaagtttgagtcaaggaatttaagagaaaccagtgtggattctatatgtactaactcatgttgtcagtgatgataattttggtgtctttctgttggattctgagcattgtgttgactgtagtaaagatgcatagttctgctgggctgttcggtagcacctccaggtgttngttatgctggtacttgcacactcatggccaggaattgcaatagagatcttgaaatgg

SEQ ID NO: 114397 - DNA, 203 bp, Zea mays
  Clone ID: MRT4577_35813C.1
atgcattcattcaatcacatcggtatggtttttaataaatatgcaaaaattcctctaataactcttatttcaactctgcactatttctaaccatatcccatggaacttgccacaactactgatgccatttactaccatgaacccatggattcaatactccatgaagcaacatcctgttgccaacttgctaacgtaaaccaccc

SEQ ID NO: 114398 - DNA, 1160 bp, Zea mays
  Clone ID: MRT4577_35814C.1
cttcgcaattgatttcccaagcttcctttgatggtgacatagatggggcaagcctagttacaaactctaatgtcatagaagatgatgattttcaaggcaagccaaccaacagtggcacatcaaaggaactgtcagacgatgatggtgaccttgaagagaatactgaccccgctaacgccaagaagatgaggagaatggtgtcaaaccgggaatcggctaggcgatcaagaaagaggaagcaagcacacttgaccgatcttgaatcacaggttaacgtctgagaatgcatctttgctgaagcgactggctgatatgactcagaaatacaaggacgcttccgttgacaataaaaatctaacagttgatgttgagactatgaggagaaaggtgtgaggagttgtaaaacgaaacaaaacattaaaagcgcacataccatgccgcaatgcgccaagtgtgtgtcccattaagcctgtggggtgttgcccttgccttgccttgtggatgggctgctctatctcaaatgataccgagaggagtccaaacagaatactaccatacaaacatttcttaatgcttgtgtgtgaacatagccgaggaagctgtcaggaggctaactgggatcaccctcatgctaccgaccgcttttgagaagcccacgagcagcgcgcccctgtcatcatgtccatctgatgcagcttctgcttctgcttctgccgccattgaagacagcgtgaagcatttcctccaggcgccacttgaaacagttggggatcattcccaaacgcagcagtttttcagaccaagccagcttctctgcaccgtgttgctagcctggagaacctgcagaagaggatcgtcggggatgcaatgtattccgagaccgcgtcaacgacattctcagatcctgaagctcttgccgataggtaaaggttgctcctgttctgtcctgtgatgaacagccgtgtgatgctctagcggcctaagtgcttctggtaatggaagttgtacactattttgaaggttaataataattgttgagaaatgatctcatccctttaaggcatctcttgggtgtagacacacctcttgggttggctccttcaaggcacccctttgtaagtaaagtattccattaataaaccgaatagagttttcactcc

SEQ ID NO: 114399 - DNA, 342 bp, Zea mays
  Clone ID: MRT4577_35815C.1
gtccggccactcatattgaacaagatactgtagtactgtcctcaactacggcacgactacaacagcggctcttactagacgagctggctatctactatcgcatgctacaggttcttccatgcaatcagctagcttacaagaactctgctagatgattgccacactagacacgatacatgtatctctctcactgactacaaccaaacactccactccaataaccgcataggatggttcaactctaacgtttaatatcggtcaaaggatttcatccgatacaccaagattagtggtacgatcaatattgccattttagagcaccagcatcactgatcaacacat

SEQ ID NO: 114400 - DNA, 174 bp, Zea mays
  Clone ID: MRT4577_35816C.1
gatcaaacaaaacattaacgtccaaatcttaatatacccagtagtcaaagacggtgggagataaagaacttacaacgttaatttgtataaccacacatacgacagttacgataaggaaccgaacagaaacataacacgaataggtagccactccaggggcaggatcacaggtat

SEQ ID NO: 114401 - DNA, 364 bp, Zea mays
  Clone ID: MRT4577_35817C.1
ctcaacacaatagatgaatcaggcctgttaatatgcttctatttgtacaagaaactttagagaaactcaatccactcctcttggacatcatccaatatattctccttttggacatcatgaacatcttaatcctatcttaatcctttcagtttcttggttatatttttcatctagtatctatacggtttacacaaataaaacatagtagagtgtaaatgcatgagtacagaattggctcctccacttggtacctttgatttcgatcgtgggaaaggtttggttcctccatttcatacctttgatttggatcatttcccactgcatttggagtgatgttccacgacattcgtatacctcatttggg

SEQ ID NO: 114402 - DNA, 1025 bp, Zea mays
  Clone ID: MRT4577_35818C.1
gaggccacttgctcagctgctcccaactcccatcctccccctcccggagtacgaagtactagaaagagagcggctttcctctaagaatggcgggtggcggcgccggcgacgacgacgtggtggtggtgagctgcggcggcagaggcggcggcgaccccggcgcatacgccgcggtgctcaagaggaagctcgacctgtactgcgccggcggcgccaaatccatggaagctaaatcacaagaacattcgttgggctaccccaactcacaagcttcagatgcttcgcaattgatttctcaagcttcctttgatggtgacatagatggggcaagcctagttacaaactctaatgtcatagaagatgatgattttcaaggcaagccaaccaacagtggcacatcaaaggaactgtcagacgatgatggtgaccttgaagagaatactgaccccgctaacgccaagaagatgaggagaatggtgtcaaaccgggaatcggctaggcgatcaagaaagaggaagcaagcacacttgaccgatcttgaatcacaggtttccaggttaacgtctgagaatgcatctttgctgaagcgactggctgatatgactcagaaatacaaggacgcttccgttgacaataaaaatctaacagttgatgttgagactatgaggagaaaggttcgttcgtcttgaatgcatcacagacctttttcttcttttttttgttgtacgagaactcttaactgcatccatttatcgatcataacatttttactgggctctgtgtatactcaccgtaatcaacgtttacatctctctagatggctgcaaagggcagtgaaagtaatatgattgttcatagttcttattttagaacctgcaagttcagttttagtttctaatggtttttaactgcacacaaaaggtatggcagcattttcatttgattttctgaaattctgcataccttctacaagtgtgataggaataatttagttccttggttttgttttcttgcagtatcatttc

SEQ ID NO: 114403 - DNA, 1306 bp, Zea mays
  Clone ID: MRT4577_35819C.1
tccggatacaacatttcttaatgcttgtcgggaaggccacattgctcaggctgctcccaactcccatcctccccctcccggagtacgaagtactagaaagagagcggctttcctctaagaatggcgggtggcggcgccggcgacgacgacgtggtggtggtgagctgcggcggcagaggcggcggcgaccccggcgcatacgccgcggtgctcaagaggaagctcgacctgtactgcgccgccgtcgccaaatccatggaagctaaatcacaagaacattcgttgggctaccccaactcacaagcttcagatgcttcgcaattgatttctcaagcttcctttgatggtgacatagatggggcaagcctagttacaaactctaatgtcatagaagatgatgattttcaaggcaagccaaccaacagtggcacatcaaaggaactgtcagacgatgatggtgaccttgaagagaatactgaccccgctaacgccaagaagatgaggagaatggtgtcaaaccgggaatcggctaggcgatcaagaaagaggaagcaagcacacttgaccgatcttgaatcacaggtttccaggttaacgtctgagaatgcatctttgctgaagcgactggctgatatgactcagaaatacaaggacgcttccgttgacaataaaaatctaacagttgatgttgagactatgaggagaaaggtgaacatagccgaggaagctgtcaggaggctaactgggatcaccctcatgctaccgaccgcgtttgagaagcccgcgagcagcgcgcccctgtcatcatgtccatctgatgcagcttctgcttctgcttctgcttctgccgccattgaagatagcgtgaagcatttcctccaggcgccacttgaaaacagtgggatcatcccaaacgcagcggtttttcagaccaagccagcttctctgcaccgtgttgctagcctggagaacctgcagaagaggatcgtcggggatgcaatgtattccgggaccgcgtcaacgacattctcagatcctgaagctcttgccgataggtaaaggttgctcctgttctgtcctgtgatgaacagccgtgtgatgctctagcggcctaagtgcttctggtaatggaagttgtagcacccatgcgcctgggtggggtctacacagtgatttgtacactattttgaaggttaataataattgttgagaaatgatctcatccctttgtacctatataagtaaagtattccattaataaagagaatagagttttcactcttcaaaaaaaaaaaaaaaagcggcc

SEQ ID NO: 114404 - DNA, 450 bp, Zea mays
  Clone ID: MRT4577_3581C.1
gacccggggaatccggccgggttcccggagggggaccagctggccctaatagggagccgaatgagagcggggcgaaaacatgggaaggggggggggcagagcaaaaccgtaagccgatcacaaggccacacaacaaaccagacgaaagaataaagggtaaagccgggggggcaaaaagagggagcaaaggaaaaaaaaaagcgaaaagaaaaggggccggtaaaaagacgggaaaccaggggggaaaccggggggaaaaaaagggcaaaagagcggggagaggcggggggagaaaagggcacaaaagggggcgcccgggggaccagggaaacgggaaaaaggggaggggacagaagggccgggcccaaagagaggggcagaaagcggtccacccaggggggccccaaaaggcgaaaaaccgggtggaaaggcggttaacggggggaaaaa

SEQ ID NO: 114405 - DNA, 2397 bp, Zea mays
  Clone ID: MRT4577_35820C.1
gcgtccgatgaggagaaaggtgtgaggagttgtaaaacgaaacaaaacattaaaagcgcacgtgccatgcccaaatgcgggggggtgtgtcctattaagcctgtggggcttttctcttggtttgtcttggtgatgggctgaaactaaattaaatgatactgagaggagtgcaaactgaatactaccatacaaacatttattaatgcttgtgtggccggggctcaggctgctcccaactcccatcctccccctcccggagtacgaagtactagaaagagagcggctttcctctaagaatggcgggtggcggcgccggcgacgacgacgtggtggtggtgagctgcggcggcagaggcggcggcgaccccggcgcatacgccgcggtgctcaagaggaagctcgacctgtactgcgccgccgtcgccaaatccatggtgacatagatggggcaagcctagttacaaactctaatgtcatagaagatgatgattttcaaggcaagccaaccaacagtggcacatcaaaggaactgtcagacgatgatggtgaccttgaagagaatactgaccccgctaacgccaagaagatgaggagttaaatttcggtgttgtgatcagaatggtgtcaaaccgggaatcggctaggcgatcaagaaagaggaagcaagcacacttgaccgatcttgaatcacaggtttccaggttaacgtctgagaatgcatctttgctgaagcgactggctgatatgactcagaaatacaaggacgcttccgttgacaataaaaatctaacagttgatgttgagactatgaggagaaaggttcgttcgtcttgaatgcatcacagacctttttcttctttttgttgtacgagaactcttaactgcatccatttatcgatcataacatttttactgggctctgcgtatactcaccgtaatcaacgtttacatctctctagatggctgcaaagggcagtgaaagtaatatgattgctcatagttcttattttagaacctgcaagtacagttttagtttctaatggtttttaactgcacccaaaaggtatggcagcattttcatttgattctctgacattctgcatacattctgagagaggtgaacatagccgaggaagctgtcaggaggctaactgggatcacccttatgctaccgaccgcttttgagaagcccaggagcagcgcgtccctgtaatcatgtccatcttatgcagcttcagattctggttctgctgccagtgaaaacagcgtgaagaagttcctaaaggctcaactggaatacagttcggatcatccacaacgaaccagatcctcacaccaagcgcgcttctctgcaccgtggtgtcagccgggagagcctgcacgcggcgggtcgtccgggatcgacatcaaactgaccctgaagcatcacataccagcgcgcattgcgcccagtgtgagtcccattcatcacgcggggcttttgctgaccaagccagtgtggatggactgctctatctccaatgataccgagaggagtcggaacagaatactaccatacaaacatttcttaatgcttgtgtgtgagtatatgcacaactctgtactcttgtatcattagtaaaactgtgtttttttaaatatccatgctgaagggttctaacataatcatgttaagtttttatgaaaaaaatttgcttaaactatgactgttccaatcagttttttacctaaagaaggtattcacaagaatcttggcatttaacagacctgcacaccttgactttatgaaaagggacatgtcttcaggaacacagtactgttttaattccaggtgaacatagccgaggaagctgtcaggaggctaactgggatcaccctcatgctaccgaccgcttttgagaagcccacgagcagcgcgcccctgtcatcatgtccatctgatgcagcttctgcttctgcttctgccgccattgaagacagcgtgaagcatttcctccaggcgccacttgaaaacagtgggatcatcccaaacgcagcagtttttcagaccaagccagcttctctgcaccgtgttgctagcctggagaacctgcagaagaggatcgtcggggatgcaatgtattccgagaccgcgtcaacgacattctcagatcctgaagctcttgccgataggtaaaggttgctcctgtcctgtgatgaacagccgtgtgatgctctagcggcctaagtgcttctggtaatggaagttgtagcacccatgcgcctgggtggggtctacacagtgatttgtacactattttgaaggttaataataattgttgagaaatgatctcatccctttgtacctatataagtaaagtattccattaataaagagaatagagttttcactcttcg

SEQ ID NO: 114406 - DNA, 844 bp, Zea mays
  Clone ID: MRT4577_35821C.1
agataaccacccctgtacacgaacccttaaccctccccccctccctccccagacgccgcctcactgccgccgcgtcctcgctctcgcaagcaccaccggcgacacccccgtctccggcgaccggcttcctagcgccctccccgctcgccccctctgcgcgcagcgcatccacgtgcgcggcgaccctcctcgtcgcgttaagcacacccagctcgacggtcctccaacccaagtttcaatcatggcgcgccgaggattgatggagcaggacctaaccaagcttgatgttaccaagctgcacccgttgtcgcctgaagttatctcgcgccaagcgacgatcaacattggtacaattggtcacgtggcccatgggaagtctactgttgtgaaagctatatctggagttcagactgttcgcttcaagaatgagcttgaacgtaacatcactatcaagctgggatatgctaatgcaaaaatctataaatgcgaggatgacagatgtccacgaccaatgtgttacaaggcttatggaagcgggaaagaagatactcctgcctgtgatgttcctgggtttgaaaacactaggatgaagctcctgagacatgtttcctttgttgattgcccgggccacgacattctcatggctacaatgcttaatggagcagccatcatggatggagccttgcttctgatagcagcaaatgaaagttgcccacaaccccagacatctgagcatctagcagctgttgaaatcatgcgtctccaacatctcataattttgcagaataagattgatcttatccaggaaaatgcagcaatgaaccagcatgaaagcatccaaaaa

SEQ ID NO: 114407 - DNA, 829 bp, Zea mays
  unsure (1)..(829): unsure at all n locations
  Clone ID: MRT4577_35822C.1
aataatgaacgatgaatggcaattgaaaagaaaaaaaagtaatcaacaacatctcatcgccgtcatgtcgccttgtgcccatgcagagcagcaagagcctaacgctccgcctctccacaacgaccaccatcgccaccaaacatacgtggagctgtaccaccacggccttcaccacgtgaagtcgtcggcgctgctatgcgcggttggactaggcatccccggcgccatccaccgccgcggcggcgcagcaacggtctccgacctcgtcagcggcacgggtgtccacccggccaagcgcgcgcagctccggcggctcatgcgcatgcttgcctgcttcggcatctttggtgcagccggcggcgacagcggcgatggtgagagcgagaccgtctacacgctgacccccgtgtccagcgtcctcgtcggtgacaaggacaaggaggcatcagcatcagcatcaggcgcctctccctcgcctgacatgtcggcactgctccggctcctggcgcgcccgagcacgtccgtgtccaccttcttcgacatggaggagtggttcagagacggcgggaccacgacgctcttcgagacggcactcggcgtggccccatggagcttgacgaagagcgacgccgcgtacaacagagccatgaacgaagcctgcgtcgcggacaccagcctgtccatggacatgatgctgaaagacaccagcggaggcgccagcagtggtcttcggcggcgngcggctcacctcgctggtccgatgnntgnaggngnccatggcgccgccgctatttgcatcgctaacgnctttccgcacatcagctgcact

SEQ ID NO: 114408 - DNA, 335 bp, Zea mays
  Clone ID: MRT4577_35823C.1
tttattttatatgtatatgggatttccctagaaaaaggttgtcattatttctgcccaaagtgtcagatggaaaattgacggcaattcaagcttttgagttttatctgctctgtacgttgatgcacgtaagctccaaaattaggacaagggtattacactaatactataccgacacaaacttgttccatataaaacaagcaacacattaatcactgcggcttgcttcggctttaatccgactgcaactgaggtttctatagaaatttgtttctatagattacagctgcagcagtccaaacacctgaagccagccagccgaataatatattaaactc

SEQ ID NO: 114409 - DNA, 1098 bp, Zea mays
  Clone ID: MRT4577_35824C.1
gctcgccccagggaacaagttctcaaagatcgtggagtggatgttttggccagtgatctcgagaagacttcaccagttggcaggcctaaaggtgaattttcaaaggttgagcagaaggttgaagctatgtccattaactctcatgtctttcaacagaagggttaatggacatgagagttttgcagctggtcatagaggcccaaggaatggtgataagaaagatcataagtgggatactgacagggctgatccatataggcttactcgacgagaggacaacaggagggtcgctagagatatggaaaagccacaggagcaaccacgcctagagcctgagacctggcgtaagccggtggagcctccaaagctagagccggccgggcctcgttttgggaaagcagcaaccgcgttggagctcgcccaggccttctcaacgtctatgtctgatactgcaccacagagccggttgaccagtgctcccagtccaagagttcctcctagcccaggggctagtagggatcagtctggcttttcaaggctcactgacagcaggacgttacactcgggcccttcccagcgaaagataaatggctactgatcgcttggcacacatattacatgtgcctcgatgatagcccccaggcatcatggcctcgatgaagcgcccagctgtatcttcatactcaactgtccctgcgtggagaagtccagttgttgctctgtccaatggtggtacgcgagggtctctaatctcattgatggcaagcaaaatgctcctctcccctaagtttctggtcagtgatttataactgacggttcgtttcctctcttgataacgagagatgtgaatttgtgaactgtttctgcttatgttcaccagccgctatttattgctggggaataattgcagctacctgtgcaccgtagttggttgcacttgcagacgctgcaaaatcgggattttatcgtgctagttttttttggggggtccagaagaaactattgatactttgtagtcttgtttactttacggtgatattatgatttagaggatacgaccttcgttcttggttgtctaaaaaaaaaaaaaaagcggcc

SEQ ID NO: 114410 - DNA, 560 bp, Zea mays
  Clone ID: MRT4577_35825C.1
agcagatgctgagagcagggtagcagagcgaccacggctgaatctgaagcctcgttcctatgtaacaggacagtctgatgaaattgctgtcaaggaaaggccatctctctttggtggtgctcgccccagggaacaagttctcaaagaacgtggagtggatgttttggccagtgatctcgagaagacttcaccagttggcaggcctaaaggcgaatttgcaaaggttgagcagaaggttgaagctatgtccattaacccttctgttgaaagacatgagagttttgcagctggtcatagaggcccaaggaatggtgataagaaagatcataagtggaatactgacagggctgatgcatataggcttactcgtcgagaggacaacaggagggttgctagagatatggagaagccacaggagcaaccacgcccagagcctgagacctggcgtaagccggtggagcctacaaagctagaggttgcaacacctcgttttgggaaagcagcaaccgcgttggagctcgcccatgccttctcaacgtctatgtctgatactgcaccac

SEQ ID NO: 114411 - DNA, 781 bp, Zea mays
  Clone ID: MRT4577_35826C.1
gccggccgggtccgggagggtcgacggacgcaccaggcacacaaacccttcccctcttcctcgggtcctttagaagcaggacgcgggcgcgacacacatcgatcaggcgcgccgaagcagcagcagcagcagcagctgacgcgcatcttccggcgccggccagctcctcggccaccccgccggccgcggccatgtcgaagaagaaggcggtcacgacgatgacgctcaaggacttccacggtggctccatcccctccgagctcccgctcccctccgcccccggcgtcaccccgcgccccgcggaccgcaccgtcgcctccgcgtcccccggcgcggccgcggtcgcacggccacgagtacctgtcgcttcgcctaccgccgctgcggcggcggccgcgatgccttccttcctcaccaacccgtcccgcatcggccgtcacttcgacgaggacgagcgtacccctttcgagcccgccgcgccacgccgtccggcgccgtccccgacatcgtacgcacccgctcccgtggttgcgcccaccagatccgggtccgggaacgcgtggggcccgagaaaggaggcctctccggcgtcttcccctgtgggtcctgctcccgcctccgccggcggccagatctggtccgcgacacgcatcgcccaggccagcgcagtggagaaggtcatctctgggagatggcacacgtcgaagccctcgtctccgccggcgccagtgacagtgccagcctccggtgttgattaccgtggcccccgccggaggttgag

SEQ ID NO: 114412 - DNA, 1455 bp, Zea mays
  Clone ID: MRT4577_35827C.1
aattcggcacgagggtcctacctatgtcgaagagaagcaggtgcaccaggtccaggttactgctggcctcatgaaggctgaggttaatcatgatctgcaccagaatgcaagggctgctaaaacaggagttttgggagcagatgctgagagcaaggtagctgagcgaccacgtttgaatctgaagcctcgttcctatgccacaggacaatctgatgaaatggctgttaaggaaaggccatccctctttggtggtgctcgcccccgtgaacaagttctcaaagaacgtggagtggatgttttggccagtgatcttgagcggatttcaccagttggcaggtctaaaggtgaatttgcaaaggtcgagcagaaggttgaagctttgtccattaacccttctcttgaaagagctgatggtttttcagctggtcatagaggcccaaggagtgttgataagaaggattacaggcgggatactgagaaggctgatgcatataggccttctcgtcgggaggataacaggagggtcgctagagatatggagaagccacaggagcaaccacgcccagagcctgagacatggcgtaagccagtggagcctccaaagccagaggttgcaacacctcgttttgggaaagcagcaaccgcgttggagcttgcgcaggccttctcaacgtccatgtctgatactgcaccacagaaccggttgaccagcgttcccagcccaagagttcctcttagcccaggggctagggatcagtctggcttctcaaggctcactgacagcaggacgttacgctccagcccttcccagcgaaagataaatggctactgatcgcttggcacacatattacacgtgtcacgatgacagttggcctcgatgaagcgccccgctgtatcttcatactcaactgcccctgcgtggagaagtccaattgttgctctgtcagatggtggcacgtgagtggtgataatctcattgatagcaaacaaaaggctcctcttccacaagtttctggtcagtgatttatgactcagggttcatttttcctctattgataacaaagatgtgaatttgtggactatttctgcttatgttcgccagccagccctgatttgttgctggggaataattgccacctgcgcatcttagttggatgtgctctgccgtgcttggttttatgatgttgccagatcggtgatcggtggtatgtagcctgcgtcataatgcaattttcaggccttctcttcataagctgcaaaattgggattttactgcgagaacaaactattggtcttgtacggttgaatcatgattaaaggatataactttcaatctcggttgtctagtttatataaaccgcgtttggatcactggattccaatttgaattttaaacaagttacgttgaaaatcttgtgtaattagtgtcacccaatgacccaattggggttctg

SEQ ID NO: 114413 - DNA, 568 bp, Zea mays
  Clone ID: MRT4577_35828C.1
agtcaaagttgcactaactacatggaaatggatcgaagggagaaagtacctgattttctggatgttcttgatgaacttctggccgtacttcttccactcgtacccgtcctcgggcaccaccatcagctggctgccgttgccggcctctgcctccgccgccgccgtctcctcgtcgtcgtcctcctccctcctttggtttctctcttctcctccgctcactctgcatgcatcactacagttgtggctagaaacgttagctacgcataaatcgtcgtcgtcgagaacctaacctatctgttgggtgcttaattactttataatccgcttcgtctacagtgatgcagaactagtagtatatagcagcgtaaactaggcggttcatacttagatctatttatttgctccaagcagccagggatgatatttgagacgtatacataggaaagtgagtctatatatagttcatatatagtattaggccacgcatacatatatcatgaacttgaacgacatctgtttgtggacgacaatatatatacatctccatgttgctgcatgagaatttgac

SEQ ID NO: 114414 - DNA, 281 bp, Zea mays
  Clone ID: MRT4577_35829C.1
attattattattactatggtgagggtacttgaagctagctagcttgtactaatcactagtaaactattgtttaaaagagggcgcagaccccccaaattattgaaaaaaaaatattggggggggttggccaaaaaaaagaggttgtaaaaaaagttgaaggggtgcttcttgcaaaacagacgggagagaccacgcgcgcaattatttgccccacgatttataaaaaaaaaaaatatgggggggcccaaaagcctgtttttttttttacaaaaaagccccat

SEQ ID NO: 114415 - DNA, 210 bp, Zea mays
  Clone ID: MRT4577_3582C.1
agttctctcaaacgtgccgctacctctcttcattcagcaatgattacagccgctccttcacgtgatgtccatcaccaattagacatgcacgtgggaaattcaatgcggtcagacacatcacctgctttgtccatctgatcgaacaatggtgaccgcgataacatcacgggaactgatactgcatctggccagctttgcaggattttcaca

SEQ ID NO: 114416 - DNA, 2520 bp, Zea mays
  Clone ID: MRT4577_35830C.1
ttttcaaattggaatccaagcgcggcttatataaactagacaaccgagattgaaagttatatcctttaatcctgatttaaccgtacaagaccaataatttgttctcgcagtaaaatcccaattttgcagcttatgaagagaaggccagaaaattgcattatgacgcaggctacataccaccgatctggcaacatcataaaaccaagcacggcagagcacatccaactaaaagatgcgcaggtggcaattattccccagcaacaaatcaggggctggcgaacataagcaaaaatagtccacaaattcacatctttgttatcaagagaggaaaaatgaaccctgagtcataaatcactgaccagaaacttatggaagaggagccttttgtttgctaccaatgagattatcaccactcacgtgccaccatctgacagagcaacaattggacttctccacgcaggggcagttgagtatgaagatacagcggggcgcttcatcgaggccaactgtcatcgtgacacgtgtaatatgtgtgccaagcgatcagtagccatttatctttcgctgggaagggctggagcgtaacgtcctgctgtcagtgagccttgagaagccagactgatccctagcccctgggctaagaggaactcttgggctgggaacgctggtcaaccggttctgtggtgcagtatcagacatggacgttgagaaggcctgcgcaagctccaacgcggttgctgctttcccaaaacgaggtgttgcaacctctagctttggaggctccaccggcttacgccaggtctcaggctctgggcgtggttgctcctgtggcttctccatatctctagcgaccctcctgttgtcctctcgacgagtaagcctatatgcatcagccctgtcagtattccacttatgatctttcttatcaccattccttgggcctctatgaccagctgaaaaactctcatgtctttcaagagaagggttaatggacaaagcttcaaccttctgctcgacctttgcaaattcacctttagacctgccaactggtgaaatccgctcaagatcactggacaaaaaaattccttatatctcttaaaagaaagatttttggaaacaattggaggaacccaactttttttaaccacatagagaattcattgatttaccaattgtctttttaggaactcttgaagatgctctaaccccctttgaaatccagatccaatatataaactataacttatgccctgccacaattgaaatgcatctatcaatgttaacatgatgcatcacaacatataacaacgtgccaactggtgaagtcttctcgagatcactggccaaaacatccactccacgttctttgagaacttgttcccgggggcgagcaccaccaaagagagatggcctttccttgacagcaatttcatcagactgtcctgttacataggaacgaggcttcagattcaaacgtggtcgctctgctaccttgctctcagcatctgctcccaaaactcctgtttcagtagtcattgcattctgatgcacatcatgatcaacctcagccttcatgaggccagcagttacctggacctggtgcacctgcttctcttcgacatatgtaggaggctgttcaggagcctcaattggcttggaccgaggaagtagcttcaacttgggtctctctggcacctccccggctctcccttccccaatccttccttcatgtgacgcgggtctcactggtgcggcgcccctctccaccccactatccagctctctcaccccaacagacctaggcctctcaatctctggcggggccacgggagtctccaacaccggaactgacaccggcgccggcggagacgtgggcttcggcgggtgccatcttccggagatgaccttctccactgcgctcgcctgggcgatgcgtgtcgcggaccagatctggtcgccggcggaggcaggagcatgacccacaggggaaggcgccgaagaggcctccttcttcgggccccatgcgttccccggacctgatctggtgggcgccaccacgggagcgggtgcgaacgacgttggggacggcgccggacggcgtggcgtggtgggctcgaagggggtgcgctcgtcctcgtcgaagtgacggccgattcgggacgggtttgtgaggaaggaaggcatcgcggctgccgccgcagcggcggcaggcgaagcgaccggtacgcgtggccgtgcgaccgcggctgcgacgggggatgcggaggcgacggtgcgatccgcggggcgcggggtgacgccgggggcggaggggagcgggagctcggaggggatggagccgccgtggaagtctttgagcgtcatcgtcgtgaccgccttcttcttcgacatggccgcgaccggcgccgggagatgaccgtcggctgcggacgctgcttcggcgcgcctgatcggtgtgtcgtcgagcccgcgtcctgtttctgaagtactgtgttgtgtacttgcgcccacgcgtccggc

SEQ ID NO: 114417 - DNA, 592 bp, Zea mays
  Clone ID: MRT4577_35831C.1
cattgggaccctcgaggccggccggctctattctgtcgtcgtcgtcataagcttctgcttgctttgtggggcaatgacacagagagagagcgagagagatatctagtacagaggctattaggtggtcctcgaacgaatatgttggcggtgttcacccgacatgtggtgtatgagacgacgtagctggtggagacgagcggacggacgccgtcacccaagactatggagatcgcatgatcgcggtgagcttcctgtgcgcctccgaacctggcgcgtccttgcacctcgcagaactcgtacctcctcgcttactcccacaccatccaggtgctcctccgccccaagtatctcgagaacacagcactatgtgttatgcctgtctcgaatgcgcgttggatgacctgatcccgatgaaccaatggcacgatcctgtcaagcaaggcgtgcatacgaggagttcctcgtcatctacgcctacaagaagatgctcgaccagcgtcgacctacacgatgcatgttcttgctcaaccaaatcatacggctcctaccacttcgtactcttcttactagcccaccaactactctgctcgtc

SEQ ID NO: 114418 - DNA, 404 bp, Zea mays
  Clone ID: MRT4577_35833C.1
cctgtatcgaggatattgtgcgcacactcgagaaagacgaacgagactcccttgatcatattcgttggctacctgaatcccgcccacagccatatgcttgggcccatttgctattgccaactgaatcgactctctatgcattatcttacactctgcttacccatattccatgctatgtacactaagtcaaagcttgtaatgctcccataacaaaaactcaacttcttgatgatgaatgccctgactactcatcaagggtttagatcctctctgttagttcacacattactcttgagccactctgttatgaatgcaagaagagaaacctcctaccgttgattactcaattcttggagcatacattgagtgaagactgccaagatatacatatccacaatgctctt

SEQ ID NO: 114419 - DNA, 364 bp, Zea mays
  Clone ID: MRT4577_35834C.1
atcccgtacacgaacggatagaatatcgtataattcgggggtcatgactgtcctcggcttgctcaacatcgtcagcggcggcccattctaacattctggcgggatcccacctctgatgctgttgcacattcgcccgcacgatgaggcgctgcgacagggacgcatgattcatatgtgactggggatccagccattgccttgaaatacatggatggagcgttcattgcatgtgacactggggcctgttatgggtgaactttgatatacaggagagtgcaacgcattacatccgttacctagtatagagcgattggatcaagacggacgttcagtgcctatcaaaaaaagttgcgctatttggatg

SEQ ID NO: 114420 - DNA, 177 bp, Zea mays
  Clone ID: MRT4577_35835C.1
caccacgaccagatattcttctccgacaattctatgataaccttgttactactaatcctagaatacatggaacattgttagaaggaatagtcaaaagccatagatacgaaagcgtcctcacctgttggatctatccacatcactaagttcagcacctgcgacaatggcaacacagac

SEQ ID NO: 114421 - DNA, 406 bp, Zea mays
  unsure (1)..(406): unsure at all n locations
  Clone ID: MRT4577_35836C.1
gcagcgacaagcttatgtataactcatattaacaagagtattatcccatagaagaaaatgaataagataggaaatatagtctagagaacgtgccggctctggaggggggtgtgggaagctactgcaatgtgcgaacgcggatgcctttttgatgggccgtgaaagacgatgatggtttactgggccgggctttgcatttcttctgttgcctgagcttaagtcgcaatccttatgaggtctgagtagcaacctttgctcccaccgcattttgctcagggccacctccatcgctatgttccgtcgtcggatggtccactgttatcattggctcacctttaacaagaataggcccttcactcaccggcttagatccacgagctttaattttcttngggatatttgaaag

SEQ ID NO: 114422 - DNA, 421 bp, Zea mays
  Clone ID: MRT4577_35837C.1
aaaatattcaacatttacatatatatggattttatcaaattgattcccaaacaacccaccgccatatacctaggggtgacataacctaccaaattaattattacccctaaacaacccgcatcttcttgaataagtgaaaatccctctgctaaacccctaccggtccttcttccattggcttgctaaaaaaaatcctctggatccatgcaatgccaccgcacccattcattcactccttaaaaaaacccttcatcttaaaaaccaagttcccaacctcccgaaagtctccccctttaaacctcccccccttgccaacccacattgagtaggcccccttccggccccccaccaaccttcttcggcgggcaaaaaaaacctgcgggggcacaacttcccagccctggttcccaatcctcccttt

SEQ ID NO: 114423 - DNA, 549 bp, Zea mays
  unsure (1)..(549): unsure at all n locations
  Clone ID: MRT4577_35838C.1
gnctagttctagaacgcgagcggccgccatgtacttttaccgcactacattttggttctatagagagaggatttgtgtatattctcgtgcattatttctatggccgttgaataaaaaaaaaaaaaaaaaaaaaaaaaaaaaaaaaaaaaaaaaaaaaaaaaaaaaaaaaaaaaaaaaaaaaaaaaaaaaaaaaaaaaaaaaaaaaaaaaaaaaaaaaaaaaaaaaaaaaaaaaaaaaaaagggggcccccccccctcggggtgtgcccccccgggggccccccccccggggtccccccccttggggggaaaaaaattccccgggggggtggcccccccctttggaaaaacccccccaaaattgggccccttttttcccttgaaaaaaaaaccctaaaaaaaccccctttcggggggttttgggggggccccccccccggggggcgggtgggttcgttgggccccaaacccccaggggaaaggttttgcccgcccccaaccccctggggcccttgggggggccggggcccggtccccccccttggcgaac

SEQ ID NO: 114424 - DNA, 297 bp, Zea mays
  unsure (1)..(297): unsure at all n locations
  Clone ID: MRT4577_35839C.1
gggggggggcgggnagatgggtgctgggggggggtcttnttaagggcttgtngagactgctcagcgaggtccatgtgctcgatggtgagcagtcgagcacagaagcactgtttttttttttttttgcacgaccccngnngcttggtggggggtgttcatcaacnaggnnggacagtgcccgcgccgcgagcaggatgacgtcgcgcctggcaccagcggttgcaggctcgtcctcgcggccgtgcatcccttcgaggattgggacanaagcatcgcccgggttggcggcgagcgagt

SEQ ID NO: 114425 - DNA, 101 bp, Zea mays
  Clone ID: MRT4577_3583C.1
gcccgaaattccgggttcgaccacacgggtccagcagcccaaacttacctactctgcgactcaagcggctctctatctgcatcgagaatccgaactttgtg

SEQ ID NO: 114426 - DNA, 366 bp, Zea mays
  Clone ID: MRT4577_35840C.1
atgcagctggatctgaacgtgaccgaggtgccaccgccggtggagatggaggcgagcgactcagggtcgtcggtgctgaacgcgtcggaagcggcgtcggcgggcggtgcgcccgcgccggcggaggggtccagctcaacgccggttgtgctggagttcagcatcctcatctggagcgacagtgacgcggccgacgcgaacgaggacgaggaagccacgccgtcaccagccaagaagagccaccacggcccgcgctcccgtagctcgcagtactgcggcgtcaccttctaccgccgcaacgactcgacactctcctgctcggtggtgacctgcttgcttggtggtgacctcggcggagcgaggtga

SEQ ID NO: 114427 - DNA, 156 bp, Zea mays
  Clone ID: MRT4577_35841C.1
agaagccatcctttaaagaacatcttagggctgagatgagccagtactattacctagtggctaacataggaccttctcagcctgagctcctaccttcacatcataggactagtcaacttctgccttctagagagcctacatgccaggcctagatag

SEQ ID NO: 114428 - DNA, 306 bp, Zea mays
  Clone ID: MRT4577_35842C.1
atatttgcgatttatttatgaacattatcgcctctttaaatcgtgtaaacgaacaagcggactttcccgagggatcacaatctcctgttcttgggctggacgatgggacttataacgaaacaacccatacctctgcatgtaaagaacatttttggtctacttatgcctcgtacatgtggaatccgaatccgccgagcccttccgatgtaaggtctttaggattcaggctcggcttctggagagagcatatggttccaattcctatatgaacatttaagcctccttatttgcggagagtgaggcatt

SEQ ID NO: 114429 - DNA, 383 bp, Zea mays
  Clone ID: MRT4577_35843C.1
gagcttattagtcggcggccgccctggccttcttggttagtgcgtccgaaaaactgaaaacttgatggacttatgaccatgggctaattctgcgcctggactggctcgagaggaacacgtcctttctgggttgaaagactcagtgggactacccgcccagcgaataactgagcaacgggtacctgacttgctgagagacacaagctgataaagacgaagacgacaacatcatgtcaccgtaactgtcatgaaacaaacgcggtggatggctggtgagccattgctccgacggagctatgttgagactgcagcacgaatccaagactacacacttttggatgtgcaactaacagttttacatcaagcaacgtatgcccatacca

SEQ ID NO: 114430 - DNA, 343 bp, Zea mays
  Clone ID: MRT4577_35844C.1
gttatggccgggccaccagacgccgagcctgctgtaaatttcgagctgaaggactagtgcttccatgctcacagcgacgagattggggcatgtgcgcacgccaaggagtacgcaccaggcacagggcaccagctccggacgttaggtggatcaagatcgttaccgtgagcacgcggatgtggattggtaagtgattacatggcctccgacgaccttagaacattggtcaccacacaggaaagtacatggaatggacagatttgttcacgtagaggagaatgcgaaagcaacggcagtaagattagctgaagatgacatacttagtgccatgaagcgaaacatc

SEQ ID NO: 114431 - DNA, 616 bp, Zea mays
  Clone ID: MRT4577_35845C.1
ttttttttttttttttttttttttttttttttttttttttttttttttttttttttttttttttttttttttttaaggaggaccgttttttttttttttgaccccaaggggggcccccattgggaaaggcaattgcccggccaaaaaaacatcccgggggggggggccacaaaaggatggacaaaagtcccccatgctgaaaatggccaacatttttttaacaaaaaaggcccttcccccggggtaaaacccccaaaaaacatgggggcattttgcttcaaaggcttaccggaaaaaaagggacccctttttttttttggcacccaaaaattaatttttggatttaaggggctttttcccaaaaccaattgggggaaattgttttgcaaattcccctacctcagggggaagctttgcaatcccaactggggggctttcaaatggcaaaggggcaacaaagcccttcagctttggccccccggggggggcacccttaattttcaaggccaaattcactggtgcatcgaaaaagccaccacctttagcgaaatttttttcaacaaatcctctcgacggaggggcgtgggggtcccatcctgaggcccccgggccccat

SEQ ID NO: 114432 - DNA, 138 bp, Zea mays
  unsure (1)..(138): unsure at all n locations
  Clone ID: MRT4577_35846C.1
taatcttttnangtgtaggaggctcggatatcggctcgagctcgagctcagcttagctccactccagctccaatcacagtcgtgaccagagcgcgagatgtatctagaggtccgtgaaaatgccgatcaataggatcg

SEQ ID NO: 114433 - DNA, 688 bp, Zea mays
  Clone ID: MRT4577_35847C.1
gggtacctcgaggccggccgggccggggttggatgcacaggataccgttcacctcaagtaaaacgccacacgccactatattttgatttcccagatctacaacacgatgcgggctgtgttatctttaaattgcttgcggacttccctgcctctgccgacgacattccctgagcttgagaactcaaactcgcggaatcctccttaggcgtcttgactggcttggacgaatataatcacgtcgcactactatgctgatacatatgagatgataaacatcggcagactctcaacgtgtatagtgtatgtgaggtcgacctacatgccgaccatcagatggtaaccgtccctacatatgattgatgtaacctactgtttctacatgccgtcgggccacctccagctggtgctacagatacctgatgactattttctttactgcgtccgcagactcggatgcatcccgcctaatgcatcagatgacccctgtctgaaggatgtatggattttacctgtaaaatttctggaaattcatctctttttttaatgtataatatccggaaattccattcgatcgcactccaccacactgccatctacatgtgtcgatacctggattgggacctgaattattgtatagagccaagaacttgcattgacaaaaaaaaaaaaaaaaaaggcccctatggcc

SEQ ID NO: 114434 - DNA, 345 bp, Zea mays
  Clone ID: MRT4577_35848C.1
tttaacctcaccaggcgaagcgcactaccaacttcctaacagcaatggttaccaagaattagccctcttagcgctccttgccactatatgtgagcgcaacaaatgcgttcattattccacaatgatcacgtgctcctagtgccgtaattccacagtgtgctccacctgtttcttaaaagggctttgaacaccgtgctgtgcatgccttcatgcaacaacaagcgcctgcggtgtgcgtgtttcaacaaccaagtgcccatactgcgacatcaagacatgccacttcttacaatacaagccataacaacgcatcagcaacaacagctactaccatcactgctccac

SEQ ID NO: 114435 - DNA, 491 bp, Zea mays
  Clone ID: MRT4577_35849C.1
aaacaacaaaacagggaagaaaaccagaggggcaaacattttttgggcccccggcccacgatcaaacccaagcacaggcaaacccccccgtaaacaaacgaaagattacggacccccgctaattcgggcaaaacacgagcgcaaacaaacgaacgcgcgcacaaaagggggggcgctcgaaatcactctcacacccccgcgaaacacacggggggggaccacaaaccgggaggaacaatcagccgaaaaaggggggctttttttcgccgccggcctcctgggcctcctggggggccttttttttctcggggggcccggggaagggaaagccgccggagccgacggccgccgccgccgggacctcctccttgattttgggggggggcgcgggccccgggccctttttcgcctggggcttctcgaaaagggcaaaggccccggcggcaatggccccgccccccccgaggggctgcttgggcttgggctccttc

SEQ ID NO: 114436 - DNA, 761 bp, Zea mays
  Clone ID: MRT4577_3584C.1
gggggaagaatgggtttttggttaaagaagagcacccgatcacaaaatgcagctgccatcttgtgtaataagtttaaagcaaagttggaggagctagcatgcaagacacacatcagagctcccagtcatgtaccaagaaaactaaatcccaccggataatgggtcacttgagagaagcagtatgaagctagtaataatgtgtgagtccacccactgtccgcacaattaaatagtccattcccacctgggacacatgtcttcatcatcaaaaccgtatactgtgtgcattgtgctgcgcagaaaactattcggagcggcctgtctgctggattgactagggccgttctctggatcctttcaggcggtggatcgacgccgtccacggagggttttatgtacaggttgaacatgacgttggtgaagatggtgaggatgccgagtccaagcgtcgagaacgccacgtgcgtcggagaaaactctggcagctcgtcggctgatgatccccgcccagttatcatcgtggctcggtccaggtacggatccggaggaggaggtggcgttggcggccgcatcttgggctcgaccagcccctccagcagcgcgtccaattcctccagccgcttccgcgtctcctccggcgtctcgcgccgcgccgcctcctccccctccactcacgcacggaccggacaagaccggccgaaaacgcacctcctcctccgacggcgctcggagcgagcgggcggactggcacctgctcgaac

SEQ ID NO: 114437 - DNA, 775 bp, Zea mays
  unsure (1)..(775): unsure at all n locations
  Clone ID: MRT4577_35850C.1
gagcattagcaacccacccgaccccgcgaccatggacatgcgggccctcaacttgaaggccgccgggccctccttcctcgcgccgcggccgaggcgccacccgccggcgacctgggcgcccctccccgccggggagatcgggaggaggcggcagccggcgcggtggcccaagctggcggtgagcgcgtcggggaagaagagcaggagcggccgcgacggggacgaccccaagagcaagccctcctcttccggaaagggtgatgcatctactcccattggagatgatgatgccgatgcagtaagccaaaatcacggggaactgaaatccagtgacacgatgtatgtaccaagcaacctgtcatattggcgagatgtgagagcaagctttgtgattccaaagtcggagcaagcagtcgatgtaaatacactaccacagacatcattcgatggaccagtacactgtcttcctcggaaatgggcccattctatttctgcaccagagtctggctgtgtgctggtcgccacggaagagcttgacgggaacggtaccttcgaaagaaccgtcatcctcctcctcaaactaggttcaagagacgcctacgacggcccattcggcgtcatcctgaaccggccactctacacgaagatgaaacacgtgaacccatccttccgcgaccaagcgacgcctttcggcgactgctccctcttcttcggaggncccgtcgacatgagcatattcctgatgaggaccaacgagggcaggcccatcaagggg

SEQ ID NO: 114438 - DNA, 781 bp, Zea mays
  Clone ID: MRT4577_35851C.1
gcatctctcttcttcccttccgacaggttccaaccctagctccccgccaatgtgagcgtcgccggagatccccaaaccgccggagactgtcctcttcaactgcaagcgaccgaatcgggtcgccatcctcccccatcgacgaccgggccactagaccctgaagagtcaagaactgcatcatggaggctccacagtcttggccttggtcagatcttcagccggaactcctgggccttatcctcaagcgcctccccgtcctggctgatcgtgttcgtctgagagcagtatgtcaaccatggcgctctaatagtttggagcagcaccttcccctcccattcccatggctcactctccccgatggtaccttcctcaacattcccggtggtgaaattcaccgcatgcccgcttgtttccaaggctccattgacaactggctatttctcacgcacaatgatgatgtatgctcattgatgaaccctttctccaataccacgctggagcttcctaagctagccagagaatggaagcgtgtgataggtccctgctccagatttgagccagttttttataagttggcggtgccctcagcgctggactcatctcccaattccttggtcgctgcactaatcacggataattctaattgcagcacactttgcattagccagcccccgattgctactgactcactcagaggtgacaggtatccattaactagcctttcagatattgcattctttgatggaaagttgtacacatttgggcggatttggcaagcttt

SEQ ID NO: 114439 - DNA, 236 bp, Zea mays
  Clone ID: MRT4577_35852C.1
taaaaaaaaaaaaaaaaaaaacaaaacaataaaaaaaaaaaaaaaaaaacctacccatacaaagggaggccatattaaggacggcgggcgtacctacacttacatgcactgtccggcctcttacatcgagttgactggctaaactttacctgcccccaatttactaggcttgtactggaaccccctttagttagctggccttatatcccttatgccccatccgtttttcttcccca

SEQ ID NO: 114440 - DNA, 1461 bp, Zea mays
  Clone ID: MRT4577_35853C.1
cggtccgggtcgccccacgcgtccgcatctttctaggttcatggaacaattcatgcatggtattgtctcagtgaagcatcttttgttcttgtggacctatgatgtagttagcagaacatgtgagctccgggtatctattgcctttgttttgttaagccattgagtcaagctgcaattcttaatgaccattttacttcaatcccgttttcttcagttctgtgtttgttctgactaacgatttgtattcaatgtttttttctgtctttcctaaagctcttaaaggcaagaaaaaattgcacaaggaaaagcacaagtctcgatctgaaaggcctcaccgccaatctaatatcaccgaactggataaaggcaaaaaacgacctgcacaatcctccaagtccgatctgcctaataaaagatctaagaaagaagggtcccaagttccttctaggaaaaaggatactggtggtaggatggcaaagaaaaatggtccctgccaagataagagcatttgtactggccagaacagctctctatgcaaagacaatagggagaagcacagtcatgctacctttcagaaaaagtgtcacgctgaacctctcaacaacggtccatctggttctgggtggaacagaactgctggcggacacagccaattcgaaggaagacacataactccagcttctcacgtcgaggcaaatcatggaaattttgtttctgtacagcatccttgcgtcgagaggcttcaacggcctactcaatcgcgtgaagttgctctggctcaccccggcggcggctatccatacgtactgtccagcgctgcaatgggcctccgacatcaaaatggagcaacggccggtgtgcacgcaccggcatatttcaagggatttccactcagtcaacagagggcaggatttccttcagccagcatgccgcaaactgggtaccatcctcatccagaagaattatttgttgcgtcacacttcagatatcctagagggagtgctggtttccgccgataagacagtctggttggcgcctgctgcattttggtaactgcattggtggtaagacatgcggtcttcggcttattttcattgatgccatttcgttgccatgactcatgagcaaggagtatttgagtcttacctaatgtgcagagaggccagaactttgtttcatcttgagataaagcttccttcgtatataagaaaaaggaagatcctcacctcaattgaaggacttgattttctttgctttttttggggggcaggatgtgatggaaaaacagtgttaccatcgagtcgcataatcagggctctgcgtgcttcagacgggggaagggtttaatacaaacatgaatgctgcttttttttgtcgatctgagtccttagctgcaagattgacgcgagacatcggcttccaatatatgtacaccaatggtttctggaatttgagctagta

SEQ ID NO: 114441 - DNA, 246 bp, Zea mays
  unsure (1)..(246): unsure at all n locations
  Clone ID: MRT4577_35854C.1
tgcgccgccacctgcaagaactgcgtncccgtgtccacggacaagggggccatcaagtacaggtgccgcgacttcctccccgaaaactgcggctgcaagatccactagagactcatccaattccaccatggccgcgcgccacagggcacagcgatggatcctccatgttcctcgccgccgctgtacaagagagcaacataagtactctgtgtgttgagttatgggcctccacggagtaataacaca

SEQ ID NO: 114442 - DNA, 321 bp, Zea mays
  Clone ID: MRT4577_35855C.1
cattgggtacctcgaggccggccgggatcacctgatccaccaaagcacgggaaagcagaggaagcggagcagagctttgtgggagcgtcaatggcaggaacttgggtgaagatggagcagaagggcgccggtccgggagcacggagctcccacgccatcacgctgctcgggggcacggcctactcgttcggcggcgagctcaccccgcgcgtcccggttgacagcaccatgtacgccttcgacctcaacacccagacgtggtcggcgctggacgcgacgggcgacgtgccgccgccgcgcgtgggcgtgaccatggcggcc

SEQ ID NO: 114443 - DNA, 511 bp, Zea mays
  Clone ID: MRT4577_35856C.1
tgggcctccgacatcaaaatggagcaacggccggtgtgcacgcaccggcatatttcaggggatttccactcagtcagcagagggcagcatttccttcagccagcatgccgcaaactgggtatcatcctcatccagaagaattatttgttgcgccacacttcagatatcctagagggagtgctggtttccgccgataagacagtctggttgcattggtggcaagacatgcggtcttcggcctattttcattgatgccatttcgttgccatgactcatgagcaaggagtatttgagtcttacctaatgtgcagaaaagccagaacgttgtttcattttgaactaaagcttccctcgtatcaaagaaaaaagaagatccgcacctcaattaaaggacttgattttctttgctttttttttttttttttttgcttccatcgagtcgcataatctgggctctgcgtgcttcagacgggggaagggtttaatgcaaacatgaatgctgttttttttt

SEQ ID NO: 114444 - DNA, 352 bp, Zea mays
  Clone ID: MRT4577_35857C.1
caaaggaaattataccatcctttatttttcaagcaaatacacaaccaatcccatggccgtttccaaggaaatacatgacccatgtcattaaaaaaatccacttcacacataatcaatcaagatcactttcgaggaaatatttgaccattttaaaaaaatagagccaaatgtagataacacataaactacatcacttgggttcatctccctgttcaatgtgattttagactaaaaaccacaaatttaacaagccctgcaaatgcttgtaatcatttggctaaacaagacctgttttttccgtacttaaacaactcacgtttacctactgttgggttggaaggattggacaaac

SEQ ID NO: 114445 - DNA, 242 bp, Zea mays
  Clone ID: MRT4577_35858C.1
cgtcggagaccagcttttaacatatatagttgttttttcgacaaaacaatagagcgggcgggggcttaccaagatattttccctatcttccttccttgctctatctacatgtgttgctaacacatctattcttaatgcttacaagacaagcttctatagctttcctttttcccccatacccttcatcaattatagcttcagtatgtgaaaacccagctcttcaaccatataggcttcaacaa

SEQ ID NO: 114446 - DNA, 164 bp, Zea mays
  Clone ID: MRT4577_35859C.1
gcgttcacgcgtccggcacacgcgacgcgcgctgtgccttctctctcgctgctgccgagctccagactccaaggcaaagcctacaaacacatggagccgtcctcagtgactagaaattgcactagctgatgcataggtagcaaggaaagaacgcctttacgctg

SEQ ID NO: 114447 - DNA, 256 bp, Zea mays
  unsure (1)..(256): unsure at all n locations
  Clone ID: MRT4577_3585C.1
acggttggttggaatctcttctggtgcatctgcttctgcggcagttaggcttgctaagaggccggaaaaccccgaaaggctatttggtttcnttttcccaacctccggcaacccctacctttaatcggggctgttccagtccatcaaaaaggaaccggaaagcttgttgttcaacccttaaaccacaaaattctggctctttgccaaactatttcctgaaacgttcaccatttccataacaaaaaaataaacctcg

SEQ ID NO: 114448 - DNA, 505 bp, Zea mays
  unsure (1)..(505): unsure at all n locations
  Clone ID: MRT4577_35860C.1
cacgtctgtcaatgaagtcatttgccatggaattccagatgccaggatactagaggngtgtgctnnacatccgatctactaatgagtggtatggagggcggtatctgtactggtagactgacacgagagtgagctgatcgtgcagtccctttggatctcagacacatgatgtactggtgctacaggtcggatgaaacctctacctacaataccaagggccccttctatgagatagaaagtgacattggatactagatcgagaaggtgcgtacacgacctgtgactagatgcgtgttagtgactatgtaggcatggggggtggcccagatgaatgagcacatcacgcaccttatcatgcgatgggggccgaccggtttctgaagatctcgacacagatcacgcgtctctactcagaattgacacaagacatctgtgagtgacgctccaggacgagagacacactggtggttacagagctgctacgggggattggagagatactgga

SEQ ID NO: 114449 - DNA, 1524 bp, Zea mays
  Clone ID: MRT4577_35861C.1
cggacgcgtgggcggacgcgtcaactgttctctcgccgccgttctagttccgttttgccttgaggtgcacgtggcggtggaagcttcccgggcggtggcggttgttggttcatgtcgatggcgcaggtgtgctgcgactcggccgtagcggcggcaccggtggccgggccggaggcggaggccagggccagggcgcgcgccgagaggcgccgccgggccgcggaggccgggaggtggaagcacgcggcggccgctggcacgagccgcagatgccacgaggaagcggagcctcgaggccggggagctgctcgtggcgcggaagcacggggccgcgtcggtggccggccgccggagggagatggaggacgccgtgtccgtgcgcgagtccttcgccgcggagggcaacgccgacggcggcgggaggcgcgacttctacggggtgttcgacggccacggctgctcgcacgtggccgaggcgtgccgggaccggatgcacgacctgctcgccgaggagctcgccgctgccgacggttccggctccggctccgcggcgacctggaccgccgcgatggaacgcagcttcgcgcggatggacgccgaggcgatgtcggccggcgggagcgccgcctgccgctgcgacccgcacaagtgcgaccacgtgggctccaccgccgtggtggccgtcgtggaggagcgccgcgtcgtggtggccaactgcggcgacagccgcgcgctgctgtgccgcgggggcggcgcgccgccgctgccgctgtcgtcggaccacaagcccgaccgccccgacgagctggagcggatcgaggccgccgcgcgcgttctgggcgtcctcgccatgtcccgcgccgtcggggacggatacctgaagccgtacgtgtcgtccgttcccgaggtgacggtgaccgaccggtccgacggcgacgagtgcctcatcctgggcagcgacgggctctgggacgtggtgagcaacgaggccgcgtgcgaggtggcgcgcgcctgcctccgcaggggccgggccaagtggtgtgccgaggccgccgcgttgctcaccaagctggccctcgcgaggagaagctccgacaacgtctcggtggtcgtcatcgatctccggaggaggaatcactagttctgtgcagttgtcagctagtactagtactccctccgaaggatggctggtcgcacaagggatttcgcgggggtgcctaattgggttttttttcttccattttcattcaaaaagtttttttttttttgctgtactctccctgaatcaaaaagttcagaggagcccttagattaattattgtggtagagccggaatttggtccggataccattcggagaggtggtcgcgtagaaaaaactcagaggagagacggtctcacaagaaaatcagtctgtgtattgtatcatctagacatctaatgaaatagcaaccgaaacaaacaccacctccggtgtctggatgttctcgaaaaaaaaaaaaaaaaaaaaaaaaaaaaaaaaaaa

SEQ ID NO: 114450 - DNA, 1469 bp, Zea mays
  unsure (1)..(1469): unsure at all n locations
  Clone ID: MRT4577_35862C.1
aaagttcagaggagcccttagattaattattgtggtagaaccggaatttggtccggataccattcggaaaggtggtcgcgtaaaaaaaactcaaaggaaagacggtctcccaaaaaaatcagtctgtgtattgtatcatctagccatctagtgaaatagccccccnccccnnnnnnnnnnaaaaaaaaaaaaaaaaaaaaaaaaaaaaaaaaaaaaaaaaaaaaaaaaaannntctctcaactctcgtttcgccggagtatttagcttgcttcagggagcacgtggcggtggaagcttccctaggggtggcggaggcggtggtggtgcttggttgatgtcgatggcgcaggtctgctgtgactcggccgtagcggcgacggcggcaccggtggttggtgcggaggcggaggccagggccagggcgcgcgccgagaggcggagccgggccggagagtctggggcgtggaagcacgcggtggccgctggcacggccgatgctacgaggaagcggagtctcggggcaggggagctgctggtggcgcggaagcacggggcggcgtcggtggccggccgcaggagaaagaagaagaatctgtaactcgcaagaaggaaaacagggacaataaccagtgcggttcgccattgttgatgcgacacgaggtacatcagtcatccatcatcattattaaggctagaaaattgcctctgatgcatcatgtcgccaagaactcgaagagacgccgtgcacgctcgctgtggccaccggggcccgcgctggggctgccagggccacgcccaaacatcgggccagaggcgctcgccatgccacgcgcccgcgccggccgctggtccgcaccagcgacggtttccggatgcacgacctgctcgccgaggagctcgctgccgccgacggctccggctctgcggcgacctggaccgccgcgatggaacgcagcttcgcgcggatggacgccgaggcgatgtcggccggcgggagcgccgcctgccgctgcgacccgcagatgtgcgcctgcgcccgcgggatcggaacggttgcgcccgggccaacgtgctggaggacgcgcgtcgcgccctagcagcagccgcacacaccaaggcctgagcgcccgagccgctcctgcacgcccaccgcccggggctgctgggcctcgcccgtgcgcgcgtaggggcagcgcgctcgcgctgccaacctcgacggggcaccatggtcggacagccgtgccgccgagccgggggccgcgtgccggtgctcgtgcaccgaacagccgagggcgtcgcgggcccgcgccgggcaagcggaacgccgtcaaggggctgcctgcccgctctgccgcggggcctcacgcctgggcctccacgccgccgaccagggctgctggggactcgccctcgcgccgtcggggctggccgccgccaggaagaaagggaaatggttagggccgcggga

SEQ ID NO: 114451 - DNA, 1152 bp, Zea mays
  unsure (1)..(1152): unsure at all n locations
  Clone ID: MRT4577_35863C.1
gccggcgtatttagcttgcttcaggggggcacgtggcggtggaagcttccctaggggtggcggaggcggtggtggtgcttggttgatgtcgatggcgcaggtctgctgtgactcggccgtagcggcgacggctgcaccggtggttggtgcggaggcggaggccagggccagggcgcgcgccgagaggcggagccgtgccggagagtccggggcgtggaagcacgcggtggctgctggcacggccgatgccacgaggaagcggagtctcggggcgggggagctgctggtagcgcggaagcacggggcggcgtcggtggccggccgcaggagggagatggaggatgccgtgtccgtgcgcgacgcgttctgcgcggagggcacggccgacggcgggaggcgcgacttctacggagtgttcgacggccacggctgctcgcacgtggccgaggcgtgccgggaccggatgcacgagctggtcgccgaggagctcgccgccaccgccgccgacagctcagtctccgcggcggcggcctggaccgtggcgatggaacgcagcttcgcgcggatggacgccgaggtgacgtcgcccggcgggcgcgccgccgccgccagaagcagcacctgccgctgcgacgcgcacatgtgcgcctgcgcccgcgggatcggaacggttgcgcccgggtcgacgtgctggaggacgcgcgtcgcgccctagcagcagctgcacacaccaaggcctgagcgcccgagccgctcctgcacgcccnccgcccggggctgctgggcctcgcccgcgcgcgcataggggcagcgcgctcgcgctgccaacctcgacggggcaccatggtcggacagccgtgccgccgagccgggggccgggggccgcgtgccggtgctcgtgcaccgaacagccgagggcgtcgtgggcccgcgccgggcaagcgaaacgccgtcaaggggctgcctgcccgctctgccgcggggcctcacgcctgggcctccacgccgccgaccagggctgctggggccggagtcgtcgtgcccaggccgctccatggccggatcccgtgtctagccgcatgccgcgccatcggtagtggccgccggggcttggccggagcaaacaccatggcggcggctgcaagaaggtag

SEQ ID NO: 114452 - DNA, 628 bp, Zea mays
  Clone ID: MRT4577_35864C.1
gccccttttcgagtttttttttttttttttttttttttttttttttttttttttttttttttttttttttttttttttttttttttttaagggcctggaacctaaatatttaacaaaaccaaaaccttttttttaaagggattagggcccatcctataatacttgccgggggggcaaaccccaatcacaatttcaaacccttcccttttaaagggataccccgaccagtataaaccctaaaaaaacaaaaaaaacatccccccggccccccacaattaaaaaaattgcccgttccccctaaaaaggacgggccccttttggccaaccggggctgttttgttgctcaacccccgggttggaaaaaacatcaggcaccaaactattcaaaatgtttttcggggaaacccacttaagttcccaaaggttggcccccccaatcgggctccttttcaaaaggatccctttttttttaataaaaaaaaaaatttttttgagaaggtccggaaccccctcttgaagccggtcgttccgtttgcctggaaccttgaccttgacgaacttttccatccggttaagaacccccacccaaattttgaaaaaactgtttaacccaaaaaggcccggaaaa

SEQ ID NO: 114453 - DNA, 230 bp, Zea mays
  unsure (1)..(230): unsure at all n locations
  Clone ID: MRT4577_35865C.1
agcagtgtaacaacgcagagtacttttttttttttttttttttttttttttttggaccacgcttgcaccacatgttttgtttttgcaaattcttttgtaaattcttttcaaagttcttttgtttagtcaaaggaaaagcatttgaaacagggggagaaaatttcaaatcttgagaaggcttcgcaaaatctcattcatttacctctgactatncgcaaaagaacctcgca

SEQ ID NO: 114454 - DNA, 389 bp, Zea mays
  Clone ID: MRT4577_35866C.1
ggaacaacaaaacacgggtttttttttttcccgccctctcaggaaagaaacggaaccgacaaaacaaaaaagctccctggggccacaaggaaaagacacaaaagccgggggaccagacgggctttttataacagccggccccaaaccagagcaaagtcgggggttcatttcctgaacctaaaaaggggggccccactaaaaaacatgggaaaaaccggctggtcctgtccccttcgagaaaaaacccttttttttttggggactttttggggggggatcgaaaacggggtccaaggggggggaaactcaattcccccccccaaagaaaaaccccccttgaaaaaaacgtttttttgggcccctagggccccgggagggatgggcccccc

SEQ ID NO: 114455 - DNA, 186 bp, Zea mays
  Clone ID: MRT4577_35867C.1
aaagataaatgaaaacgagaaagggtttgttccgaccaattccgtccgtttacagccctaaataagatcctcctactccctaactcctggccatagacccatagggcaccaaatctaccaaacccatgaataataccaaaatttccatggtctccgatctcggcgtacctatctgcaagaatttga

SEQ ID NO: 114456 - DNA, 361 bp, Zea mays
  Clone ID: MRT4577_35868C.1
gtccaggccctgttgtaacctgtatgggtcatgatttctaatatatatcacgtattatatgtttggaaaaaaaaaaaagagaaaaaaaaaaaaaaaaaaaaaaaaaaaaaaaaaaaaaaaaaaaaaaaaaaaaaaaaaaaaaaaaaaaaaaaaaaaaaaaaaaaaaaaaaaaaaaaagaggaaaaaaaaaaaaatataaaaagattaagaaatgagaaaggggaggaaaaaaaaaaaaaatatttggggggggggggcccttctatgggataaactttttcttcgggggggggggggaaataccgtttggtttgcaaggtgcatgctggcgagaatgccccgccttttgaaaagattgagt

SEQ ID NO: 114457 - DNA, 512 bp, Zea mays
  unsure (1)..(512): unsure at all n locations
  Clone ID: MRT4577_35869C.1
gccggggggggggtgggtgtaaaaaatttttttttggtttttttttttttttttttttttttttttttttttttttttaggggcggcccaaaaaaactgcatgtttttattggaaaaaaaataatcgggtctgttacaaacccaccccacgggggggggggggagggggtttcattccccccctaaacatgaatatccccactaaacctccaacttgcctagggaccttgcccccgcccccaaccaaaagggtgcttactggctgggcaggacttatgggccccttacattttaccgggacattacaaatgctccagccccaaactcaaaagggggctaccaggcccgggctcccgcctgcctttaaccctaaacgcagcaacctcctgcaaacagattattgttgggcgggatctccccgggggnngggaaaatttccccgggggggccccaaaacctggggcacccacccctccttttccggggggttgcccaactgcacccggggcact

SEQ ID NO: 114458 - DNA, 511 bp, Zea mays
  Clone ID: MRT4577_3586C.1
tcgaagccggccgggccgggatccacttttacttcctcttcagatcagcgacttagccgccctaatggccaccgacataggtcacccaccacccagaggtgctgacaggaacaggcgacctgaggcgaagatgtctctactagcctcgacatccatggagactcacccgcttcttcggatttctcagtgccgaccgcgatcctcaacttatcatggatgtgccacgctgacggaactcctgagagcgctgtccctgtcagcgcgcatagctgccatgcctccggagctcgatatgaatgctgtccaggccgtgcgcattcctggcgtgctacgaatctaaggactcattagtacccgctgtcactcggctggtggagcaagccctggaggaagacctactaccccattgaaaggaattcccgctgttcaccggctctcgccagtagtgtcaggtcggcatgtacctggcctgactcgatctcaataaggaggaggagcaggacccccagct

SEQ ID NO: 114459 - DNA, 542 bp, Zea mays
  Clone ID: MRT4577_35870C.1
gaggaaaggaccaaccatctaagcaacgccacaaaaatgggaactttcattgacctgctagaccataattttggactcaataattcaagttcaagaacatggaattgaatgaaagaggccaactacctttaaattaagatcaactcacctaaaagaacaagaaaactgggcacaaggtagaactacttgcagctatcacttgagcctctctgaatgaaatatccaactatataccattaatgctttcattcttagatgctccaagagcaaggcatttcgagtagtcatctgtcgtgtgttgttttgctatacctgagaccgcatcatgatgctgggcaattgccattgggtcttccaagctggtcgtgaacagccctaaggaactcctcctacctactaaaaattctattttacgtgcatccttgttcacgcgatagataagtttgtccatattccggaaccaagattctgttctatggctgcagcaacaaaatcattaacttgttcttcaacattatagtcaaacatcggcatgtcatcct

SEQ ID NO: 114460 - DNA, 523 bp, Zea mays
  Clone ID: MRT4577_35871C.1
gttggtcgaagcttttgttatttgcgctaagctgagggagctggtaaaccaggacgtcgctgtcggtacaacgatgtcaacaagtccgatgacagggaaaagatcgttgttattgagaacacgggtgatctgataaacacccacaactcgttttgtcggccccgttggatctgtgcccacacatacaaggcccgtaacggccacctctatcgttacatccatgatgcccatggagctttcgcacagacggccttctatgaagcgtgcgcactcaccgctgctgaggccatgagctgtggacttgatactctcgcgacactccatggagggccacctgagatcatagagcatgacctctgggggtgccacattgacccggaccatccctagcaggccgctaataagagggccgactaattctagcggggcgcgcgagacccacatcactgtctgacaatatgtggagcaaggctgcagcgcgggtacaagatgtacacatgggagatatgctcagagaggctga

SEQ ID NO: 114461 - DNA, 282 bp, Zea mays
  unsure (1)..(282): unsure at all n locations
  Clone ID: MRT4577_35872C.1
tcggaattcggctcgaggaggtgtttgaatgcgctagagctaatagtgactaaaattagttagacatccaaacaccttatctaatagtttaactattacctattttaaagtaaattagttaatagtaagctatctatttgttagctagctaattttactagtaattttttagctaactaactattagctctagtgcattcaaacaccctctaaactttttcatggctttaatccanaaaaaaaaaaaaaaaaaataatatataaatatataaatattatttt

SEQ ID NO: 114462 - DNA, 275 bp, Zea mays
  Clone ID: MRT4577_35873C.1
aattacatggggagggcgggcaacaactttgggtggttttgacatccattttttttggaaccaacccctcttttttttggatgggggccggtttcacctcgggtacaaaactccttgaattgcaaggttaaagcccccctggtgcttccccattcaggggaattatcccaaactacccctggctgggtttcctttttttacaaacggttaaaaccttttacacggggctctggcccaatgttgccccccaagaagaagactggaatttttagccc

SEQ ID NO: 114463 - DNA, 345 bp, Zea mays
  Clone ID: MRT4577_35874C.1
acgcgacggttgatggagtctctcctcgcctcgcgagccattaggtcttacttctccgccggtgccagcaccaggggcgccgcttcccccatgccctcgcgcgttgccaccctcgccagcgccggcgcccgctcccgcgcgctccatgctcagcactcggactaaatccttgaagttcttgcacaggacgactttctgtacccacaggacctgctccaattgcagaatggcttggcattctatgacattatgtctaggctcgggatttgaatgctgagacactgactgccgacttcctccttgaaggagatagaggacgagctcataaccgcctttaacatccta

SEQ ID NO: 114464 - DNA, 319 bp, Zea mays
  Clone ID: MRT4577_35875C.1
gccaaaaccctaaatctcctccctcccttcctccaagcacctagctgccttcggatgcgggcgttgggagggtgggggcgcaaattgaaacgctcccgtactaaggtccgtgtggggctttcccgccggaaacccaatgaatttaaggcggccttcgaactccccgaggcactcgccgccgacgtcgtggccggggcgggctgtgacgctgagggcagcgtattgaagaactacaccgcgttctaggtggtggccaaaccaaacctactttgtgcgcacttctttcgggacgtctttgctccttcatgagcgcggttct

SEQ ID NO: 114465 - DNA, 351 bp, Zea mays
  Clone ID: MRT4577_35876C.1
cccacgcgtacggtgatgaacatgataatgcatattcttgcgctttataagggaaggtgagcatcttatagtaacttataaagcgcaagaatataaattactatgagatgctcatattcctttaaaaaacaccatactacatacctagaacagcactgacatccagcctgacaacaaaaataggcacgacgcctattctacacgatccaagattacctcaggcatcctgcgagcatcacgctgtcgtatagcgccatactactctcaattgtgtgcccactatcttcaaacaccaggcgggccaaaaacattgcttcacacaacttactaggattatagacattcaacctt

SEQ ID NO: 114466 - DNA, 353 bp, Zea mays
  Clone ID: MRT4577_35877C.1
tcgggcaagcgtacctgtattaacaggacatttgtctgttgcttcagctgcagtctgtacccacgaggactcctctgccgtttcgtaagccctccaatataccgagcgcaccaagtcaaaagcatctgatatctatgcccacacctagatcaacctgtctgttgccatacacgcagaggctttacaacagactttgaaagagaaagctcgtctattgcaggaacagacatggttcgctacgaaatcacacgactactcacacaatgatgatgtatctagcgctgagaaggctgctggtaaacaggacctgcttagcatagaccacaaggctaacgccaaggacgtccaagaca

SEQ ID NO: 114467 - DNA, 345 bp, Zea mays
  Clone ID: MRT4577_35878C.1
attcccataggctaattaatggaaccgcaaatcagggggccggtaattttaaaaggaatttggaccaattaattggagggagggttcctttcctgggttggaatttattcctccttaaaatgggatttgcctaaagtcttccaatactttcctataaggccggaaccaattttctccatatggcaaattcttatttaatttgaggtttttaactaccttttccattatctaatttgatccatttaaattaaattcgaaaaattctttggaaaaaaaaaaggaaggggtatatattttaccgggatattcttttctataatcctaaatatagtgcccctttctttt

SEQ ID NO: 114468 - DNA, 651 bp, Zea mays
  Clone ID: MRT4577_35879C.1
acagaaggagcgctattgctacaatcgggggaaagcagtaattccgmastgataaataagaccacaaacaccagstcatacagcgarcacaacgcrccgtcgacaccaacgasragatgcccagaacatgttgrcasmccgagccgcktcacgscgktaagcttcaggcgsssgtcsctcakacscttcsrgcaaaycmymcccgcgtcttgcccsagcgcctgtgcagcccaacagtctcagtccaccatggatgacgcgccagtcaccckcctcasraacccstaaaccrcagtcctggactcacccgacarcatctagactraaccccccaacaccaacaccaccctcactcacgcgakgsacacacctcrgcgcccaagcgcgcccaacgcagggcaataaactattgaaaacascgacgstgsgatgcacccttggatcgctaaaaccctcacgccracctaccsacccaaaacrgsggccccagtcatgcgsrgscagccatcaagtagagactccsttgsagcatgsggggatccgttggttggccagtgcacccacccagccaaatmmctgggtrgcsggagcaartbgcggcatggkgcctktaaaccykkggaggsaaaaccaactttgaaaaaaaacccc

SEQ ID NO: 114469 - DNA, 366 bp, Zea mays
  Clone ID: MRT4577_3587C.1
gacagcacaatagcgtaccaaccacggtagtctacctactttggctgcctatgcttggtggcctctctgcctgcgctgctactgcgaccattctgccacagtgctcacaagctcctatagcttacattcttccacagtacctcttaccagcggtgtcttctgaatgtgaaaacccaattcttgaaccctataagatccaacacgctatcggagctggcatgttacctttatcacccttgtaccttcaacactcatgagccctataacagcatttaccttttacgcatttatccgcacaaaacatctagtgacaacaactacaacaacttgtgctcgccaacctcgctggctactatcacaacaaca

SEQ ID NO: 114470 - DNA, 171 bp, Zea mays
  Clone ID: MRT4577_35880C.1
ccggtgaaaaaccgggtcgaaccacagccttccgcaaaatttaactgaagtttaaaaccttacataagtgaacttttttttggcgatgtaacatggatattatgcattttttcatgtttaattgtactaatgttgtctcatgatatgttcatatgaggtcagttgtgtgtt

SEQ ID NO: 114471 - DNA, 773 bp, Zea mays
  Clone ID: MRT4577_35881C.1
acttcccaccacgacccatctcagcagtgtgttcgatctagcaagaaggacgatccatggcgcgacaactggttgctgcgctggccgctctggtggccgtgtgcgccctgacggcggccgctggcgtccaggcccagccgccgaggaagctgccccccaactcccacatgatcagcccgggcaagttcgggcagaggagccagcagctgtcgtgcaaggacaccaacggcaggaaggcggggtgcatgggcaagtgcgacaagcgctgccccaaccagtgcatcgtcctctgccccagctgcaagacctactgcatgtgcgacttctacgccggcgtgtcttgcggtgacccgcgcttcaccggcggcgacggcaacaacttctacttccacggcaagaaggaccaggacttctgcatcgtctccgacgccgacctccacatcaacgcccacttcatcggcaagcgcaacccctccatgagccgcgacttcacctggatccaggccctcggcatccgcttcgcgcaccaccgtctcttcatgggagcccagaagaccaccagctggaacggtgacgttgatcacctcgagatgtccttcgacgatgcggccatcgagatcccgatcgaggccggcgcacggtggcagtcggccgcggttccagggctgaccgtcacgaggacggcggcgaccaacggagtgagggtgcacctgaggggcgtgttcgacatcatgggcaacgtggtgcccatcaccgagggagactcgcgcatc

SEQ ID NO: 114472 - DNA, 839 bp, Zea mays
  Clone ID: MRT4577_35882C.1
aaggttcgcctcctgatccacgtagtttatatgcagcagggctaataaatcgtttcatcagctggccgagcaaatcgttcgtgggggcatcgcagatttttgtacagcgccacgcctcgatccgcgatggccttgcgggtgttgctgaagaaatcctactcccagctggccggatctttctcggaaggcggtgttgcgtctctcagtaatgctcttagtggaggtctccatcctagactggcgatccccaataacaatgggctccatggctttacagcaaggtacttgaacacctctccatgtcctcgtgagcttgttacaagaagctgctcaaggactggtgtgaactcagtaaacataaatcacatcatgaagtcagcatctgtgcgtccagctacaggggctgggcgaactttctcttccaagacgaccaccagtgacgaaccttcaattgaatcacagatcaaagcgaattgagtcgcgtttcgaaggaaaataaggattacttccaatgcatttgttgctttcggcgttctgtattgtggcgcacttattcataaacatttaggttaagattaaagacgctggtgccagggttgtggtggaagcgctgaaccctcgaactccagatagagcagagcgggatggagtcattataaaggacatcaaagtgtaaaatggtgctgggtgtgcttctgcattgtatatagagatgtctagtggagttgctcattagttggctcaaattgctagtaggagttgcattgttagttctttatgtctacacgattgtgtttttcttttgagggcactcctctgtttaaacagggggagtaccc

SEQ ID NO: 114473 - DNA, 300 bp, Zea mays
  unsure (1)..(300): unsure at all n locations
  Clone ID: MRT4577_35883C.1
gacgncgcagcacgcgnacgaaagcangganccccgagagacgacccacgcgaccggancacacgcacncgcgcaagcggggggccccgcgccnaaaggcaaaccgaggcgccggcgacaccgcgncagcgcaaccgagggccagaaacccgcacggcaacaacgaaaaggacggcccgcacacagacacggagggcaacaacacggaggagcaagagaagaaccnagcgagggacgacaaggggagcgaccggacgcacaaagccaagaagaagggcaagaaagcggacgaggcagccc

SEQ ID NO: 114474 - DNA, 747 bp, Zea mays
  Clone ID: MRT4577_35884C.1
gtgggcctgccctgtcagctctgccctccccgtcctcgccgtggaccggcgagtgcgcactcgcgcacgtcgccagatttctcggccacgacgcccgcccacgcgcccagctcccttcttagagccccgccagtgccacgcgcttgcccctcgcctcatttcgcacaacttcaccctctctcgtgctctgcccacgccgccagcagccaccggagacccgcgcccgcgttcccgaccatgcaggccgccggagaccacgccatacctcctcgagctccgccccaaggtgagacagctgtccccgtgcccaattttccctattgcgctctgtgctcagctaatttcgacctcgccggtgctcggccacggtggaccaccgtgctcgcgcggtgaccggctgatttagcccggtctagtttcccggagtaggtccctaaggtgcctcggcctctgctgaagctagcacaggccttagcgtaccttatgccccttccccgtgatcggaatgcctcgccggagctccttcggtctgcccgagaccttctcaccgccgttctcccctctctgcccatggattcatggcctcttccccgccattgagttcgtcgtggcgttctctccctctctgcccaactccggcgaccccggagccaccctagctcgcgccagcctcaactcccacgaccccaccgccacggagagggacatcactgtctacagccgttcgttctccccggtctgatcccc

SEQ ID NO: 114475 - DNA, 150 bp, Zea mays
  Clone ID: MRT4577_35885C.1
tgcctgctcctgcatttccgtccctcgccgacgcaatggcccacccaggcttaccgtttacgtgatgcgtggcagcagctacgggaaccccgtcaggacctccgcgccctcgccggtgaccagcacgggtgtggctccgaacctgcggcg

SEQ ID NO: 114476 - DNA, 192 bp, Zea mays
  Clone ID: MRT4577_35886C.1
acaatattatccggggggggggcagaactttgcccactttttacacgcaattgcgcaaaagatgtgggggaaaaggctgatggcttgggcggcggggtcatcaggcggggggggggatcgtcctgggacgcggggagggggtaaaacttggagaaatgtgcggcctgtgaaagcgtcactgtgggggggggg

SEQ ID NO: 114477 - DNA, 531 bp, Zea mays
  Clone ID: MRT4577_35887C.1
ctcgaggccggccgggagaaatttcccaaacgcaaaaacgaggcctcccaataactatccttccaatgtccgcaccagaactcaacccatggcaaaggacggcaacgacagggtgccgcctcccctcatggagttcgacaaggaaaccgaccacctcggcatgccctgtgacaatgacggaccgcaatacaatccacacccgtgcgctcagctgacacgtgatcggcaacatcaccttgatcttcctctcgtacctcctcaagctcctctacatcccacatcaacaacactgtcctcgcatcccgctaagcttaccggagaacacgaggactaccatgagagcagcgagatactctagtcagcaatagacaacgacaacgctggcctccccaattgtaatgataaagaaaatactctgccgggtgagaacccagcgctgtccaacaactgaataaacctgaagaataacggattctagagtagaacttgaatccatgaagtagcagccaatctccaaaaagaagactccaa

SEQ ID NO: 114478 - DNA, 793 bp, Zea mays
  unsure (1)..(793): unsure at all n locations
  Clone ID: MRT4577_35888C.1
gccggccggttcgggacgcgctcagcgctcagctcatcctcactcggccatcgcatggccgcatgccttctctggccgtccctgttcccctcgcccctccctggtgaccgcgcgccgggcgccttgtcctgttcggccagaacaaactgccaaccatggcattggtcctcaacatctaggcgtcggtcgccccagttcatcttcctcagctcgcccctgcgcgcgctcctcccccatggcgaacttaccctcaactccctgcctgctcgagctcgcccaggctgcgaccttgcctaactgcacagtccctgctctctttctccagccgtgcatacaccagtccagctcccttgccatcacccatggttgcctctccttagcccccttcctgcagcaagccccatctctgctggcgccctgatcttcagtcatccccttggccggcgtcctcctcattttctacaggtgcgctagttgaccacgtgatgcggaagtcaagctgagtcgaccacgagatgctgttaagcgtgtgtttcttcgcaagggatactgatgaataaacttgaagatttgcctgatcggatcaagcgctaggatgtgagatgctcgccaagtggacgtcatctaacaacactaacctagtgttatcccaggcaagccccggtgcatttgccacctccttgttgttataaaacttttatcacttatatgctgcattangtgataggagttgagtgatgaaacaattgatgcattgccattccttggaaaaaaaaaaaaaaaaaggccccta

SEQ ID NO: 114479 - DNA, 663 bp, Zea mays
  Clone ID: MRT4577_35889C.1
atatcccatcccctttaatttaatggagaagtgtgactgctgttcgtgatggttttgtatgcgcaaatgtaatgtaatccatttgtccaaaaaaaaaaaaaaaaaaaaaaaaaaaaaaaaaaaaaaaaaaaaaaaaaaaaaaaaaaaaaaaaaaaaaaaaaaaaaaaaaaaaaaaaaaaaaaaaaaaaaaaaaaaaaaaaaaaaaaaaaaaaaaaggggggggccctttttaagggaccaaattttcccccccgggcaagcgaaaaaaatcttttttttttggggccccaaaatttaattccctggcccgttttttaaaacgggggaattggaaaaaccccggggttccccaattttaaccgctttgaaaaaattcccttttccaaaaggggggaaaataaaaaagggccccaccccgtgcccttttcaaaaatttggccccccctaatgggaaaggggcccccccccttacgggccctttaaaccggggggggggtgggtttcccccccagggggcccttttctttggaaagcccctaaaccccggttttttgggttttttccctttcttttttgcccaggtccccggttttccccaaaaaaatttaaatggggggccccccttttgggccccaatttaggggtttccgggcccctcccccc

SEQ ID NO: 114480 - DNA, 2057 bp, Zea mays
  Clone ID: MRT4577_3588C.1
aaccgccggaaaaacaagggaagctccgaggggagcggtagcgccgcggccaaggacaccaccgcggccgcgccggaggaggtggcggcgtcgcggacgcgtgggttctagatcgcgagcggccgtggactagaactagttctctattttttgaggagcacgagtctcgttcaagatttcgtatataaactaatactttgggcgggatatataaatctgtctcactcatttatatcatatgtattatatatgcgtttttgttatgcaatatatatatgcagctcaatgcgtgttttcagagcgtaaaagaccctcgtcaacgaggcgccgtggctgctcaccgtgggcgccagcaccaccgacaggaggttcttggcctccgtaaagcttggggacaacgtccagattgacggcgagtcgctcaacgaccctaacaccaccatgggcgacctggtcccgctggtgcgcgacgtgtccgatggcctgtgcgtcaacgggaacgtgctgaaggcacaaaacgtctccggaaagatcatcatctgcgaagccggcggcgatgtcagcaccgcgaaggccaagatgctaaagggcatcggcgtggtcggaatgatcgtggtgaccccggagttgttcggtccggtaatcatcccgaggccgcacgccatcccgacggtgcaagtctctaacgcggcggggcagaagatcaaggcctacatccacaaggcgcggggcccgacggcgacgttcgtcttcaaaggggcagcgttcaacaccccaaggtcgccgatggtggcgcccttctcctcgcggggcccgaacaggaggagccgtgggattctgaaacccgacatcatcggccccggggtgaacatcatcgccggcgtgccctcgatcgaggacgtggacctgctgcgcaacgcggaggtgcccaggttcgacatcaagtccggcacgtccatggccgcgccgcacctgagcgggatcgccgcgctgatcaagcacgcgcacccgacctggtcgcccgcggtcatcaaatcggccctgatgacgacggcggagcctaacgacaacctccggaagccgatccaggacgtcaacggcaggccggcgaacttggtcgccattggcgccggccacgtgaacccgaagaaggccatggaccctggcctcgtgtacaacatgacggccatgggctacgtgccgtacctgtgcgggctcaactacacggacgacaaggtgagcacgatcatctacccggagccgccggtgtcgtgcgccaagctgtcaaggctcgaacaggacgacctcaactacccgtccatcaccgtcatcctcaaccagccgcccttcaccgcgaaggccaaccgctccgtcacgaacgtcggcgcggccagctcgacgtacaccgtggaggtgaacgtgccggcgtcggtgacagtggaggtgaacccgccgaagctgactttcaaggcgctggaagaggtcctgaactactctgtcacaatcaagtcggccaacggccaggcgcttaccggccctgtcgagggggagctcaagtggttgtccggcaagtacgtcgtgcgcagcccgatcctcgtcactaacgaagccgggccctcgccggcggagacacgcaaaccgtaaccctcgatagcagctggcaaatgcctacttattacgtacatggtaacgattagtttgccatttgagccagcgcttgaaatcgatgggattgtgagcttcattcacttttgattcggtagactaaattaggcatgcagatgcagagcaaatccctccatttgtggtggaagtgagagatacataattacctccttgttttttatatatttattattaagaaattcctgacgaatttattacaagtttaacaacctcgtggttctaccattaacaatgtcgagtaattcatattttatattgcatgaccaactttggtcacaggctatggggcaaagccgggtacgaaaaccaaatgtatcctcatttaccaattgtggtttatccggtttttatcataacatgattaattgaac

SEQ ID NO: 114481 - DNA, 1174 bp, Zea mays
  Clone ID: MRT4577_35890C.1
tcgagcggccgcccgggcaggtacaagctttttttttttttttttttttttttttttttatgcagcggaaataaattatttattacaaaatggttacaagttacaacatttacaagttatagcaagattacaatatatatcatcggagttggttacaaaagaaattgattcaaaaagattacaatttgaatgtataaaacatttataagttttaaaatacatgctagcttaagtgacaatcctcaataaagaagctaaagatgggatacacctatataagaaggccgagcccaccggcacttagcagcatccacaacagaacaaaattataacctgggataacactatgttagtgttgttagatgatggccatttgacgatcaacttttattctgacacccgcttagtccatctagcttcaggatcatcggtcgacatcgtcttgtgggttgctttgatccacacccttcgcttcgcacgattttcagctagcgtacctgtagaaaatggggaggacgtcggccaagggggatgactgaagatcagggtgccagcagagatggggtttgctgcaggaagggggccaaggagaggcaaccatgggtgatggcaagggagctggactggtgtatgtacggctggagaaagagagcagggactgtgcagtttggcaaggtcgcagcctgggtgagctcgagcaggcagggagttgcgggtgagttcgtcatgggggagaagcgcgcgcaggggccacctaaggaagatgaagctggggcgaccgacgcctagatgttgaggaccaacgccatggttggcagtctgttctggccgagcaggacaaggcgcccggcgcgcgatcaccagggaggggcgaggggaacagggacggccagagaaggcatgcggccatccgatggccgactgaggatgaaaaaagcgttgagccgcgtgaataacagagggtgcacgatggggataaggccacagcctggacgttcaagcggtggaaaaaatcaatgaccagggagccgacgtggtacacggagggagcaggagatgtggacatgtgcctgaattgaggagaggtggcgtgaggagatagaaacggtgaaaatatccacaaggagatggactggagaaaggcgaggctagaagctggtggtcgacgtgagca

SEQ ID NO: 114482 - DNA, 963 bp, Zea mays
  Clone ID: MRT4577_35891C.1
cattgggtacctcgaggccggccgggaactctattcttatcctctggtcaccgatgttggcatcttcacaaagccaaaaatttccacgccatggcatctccctgcgccatcttcctccctggtgatcgcgcgccgggcgccttgtcctgctcggccagaacagactgccaatcatggcgttggtcctcaacatctaggtgtcggccgccccagcttcatcttcctcagctcgcccctgcgcgcgctcctcccccatggcgaactcaccctcaactccctgcctactcgagctcgcccaggctgcgacctcgccaaactgcacagtccctgctctctttctccagccgtgcatacaccagtccagctcccttgccatcacccatggttgcctctccttggcccccttcctgcagcaagccccatctctgctggcgccctgatcttcagtcatccccttggtcggcgtcctccccattttgtacaggtacgttagctgaaaatcgtgcgaagcgaagggtgtggatcaaagcaacccacaagacgatgtcgaccgatgatcctgaagctagatggactaagcgggtgtcagaataaaagttgatcgtcaaatggccatcatctaacaacactaacatagtgttatcccaggttataattttgttctgttgtggatgctgctaagtgccggtgggctcggccttcttatataggtgtatcccatctttagcttctttattgaggattgtcacttaagctagcatgtattttaaaacctataaatattttatacattttaaattgtaattcttttgaatcactttcttttgtaatcactccgataattgtataatgtaaacttattgtaacatgtaatcattttgcaataaagaatttattttcgctccaaaaaaaaaaaaaaaaaaaaaaaaaaaaaagcttgtacctgcccgggcggccgctcga

SEQ ID NO: 114483 - DNA, 511 bp, Zea mays
  Clone ID: MRT4577_35892C.1
gaaagaaaaaaattaaacattttgatattggccgggttttacattaaaaatataaaaaccaaatcggcctaagggggggaaacaaaaggggcctgcccccggaacggggtcaagaacccccagtggaatttaaaatttttttttggggggggggagatttcacgtttaaaggcccccacaaaaatttcagggttcaaactgggtccagggaaaacacagttggggggtcttaacaacgggatcgggaacaaggcccaaaaaacacaaggggggggggaaaaagggtcataagtgttaacgggtaaaaagggcgggaaggatttcatccctccctccccctaccagaaaaaggggggccgggttaccaaaaccacccggggctaattttatgagtcctaaaaaaaagggaactggggggcggccttggggccccaggaaacggggggcttggcaagctcaccgggggggaccagggccccccgggtttggatcttgggggggggggcggggg

SEQ ID NO: 114484 - DNA, 170 bp, Zea mays
  Clone ID: MRT4577_35893C.1
ccgaacattttttttaattccccttccccttcccaacgcgggggaaaagaccaaagtttggggggccccaaacccttaaatgcttcccaaattggccttcggggccaactttttttctacggcttttccgttccaaatgcgcgcgttcccttaattttaaagctgttacc

SEQ ID NO: 114485 - DNA, 184 bp, Zea mays
  Clone ID: MRT4577_35894C.1
attccaatcccacccggaagcggggttccctttgtttccacctacccagttttggccgcttcccgattccccgccggggccgggttgaacagaaggaccctctcttctaccaggaacggatggcatgggctggacttttccaacttttctggggtaagcccgggttaaggctctcgaggcgttt

SEQ ID NO: 114486 - DNA, 155 bp, Zea mays
  Clone ID: MRT4577_35895C.1
cgatgggacctccagtcgggccggggtgttatctatctcatgtgcagatactgaagaggtactgaggagaggtcataccccttctgtgccgatattctcagccagtcacaggactggcgagcctgctgaggccatatcatcggatgacgccagaa

SEQ ID NO: 114487 - DNA, 712 bp, Zea mays
  Clone ID: MRT4577_35896C.1
cctcgaggccggccgggccggtagacatttcataccgcctcggctatctttctctccacctcgagacaggacagttaactagctgtcaggctctgccctcgccacacatgagcaccggatggggcgccctcgtcgctgcatcgacctggaggttctctcctccgcttccgcgctcggcgtctcgcgacctcatacttccatccgtgccgggcgtgaacatactccggcgacggagtctgtccactgcatgagtacggatactgtatgccgcctattcgcccgctgctatcgtgctatgcggcagacctggcatcgactggaatggcgccgatgtgcctggtgtgatatcaggagtactgcttcatcgaaatggagaagcccagaaacacagggacccaacgaggaggaaatgattgattgatacgtccagagccttgaacagtagctaagaagagaaaaggatgtgatgaatgagatttacaatgtgtcctgcgagcgctatattggcctcggatgtccaaattgatgaacacgacctccgacaaactctagggtgttcgaggggatcttgttgagattcgtgactcgtatgttgatgctgtagaactcggattatcgacgctgatatattcctgaacgatgaaatcgttcagcggtcgccacaaaggagagaacgaacgcaccagtgcctcttagcagctcagtgtcggcc

SEQ ID NO: 114488 - DNA, 365 bp, Zea mays
  Clone ID: MRT4577_35897C.1
tgaaataagtcaaaaataaaaaaaaaaaaaaaaaaaaaaaaagaaaaaaaaaaaaaaagataaaaaaaaaaaataaacgaaaaaaaaacgaaaaaaatacttcataaaagacagggggggcccccctaaaggttcgtcgcttaagtacgtttgaatgcaacataatatcccttttatggtgcttcctcactttgcttcacggcccgtttttttaaactgtcgtaatgggaaaaacgctggctttcctcaccttacccaccttttaccaaacccccttttcgcaaggtgcggtacctgtaacggggccttaaccgttgccgcttccgaagttttgcgcagcgtgactgccaaaggggccaccccct

SEQ ID NO: 114489 - DNA, 906 bp, Zea mays
  Clone ID: MRT4577_35898C.1
ggtcttcttcatcaatagaaacattttcactatagatgcactcgcactagtatagcagacaaactagacagagcccgttttttttcccccgcggggcaaaaaatatgcaccagactttggactccaaggccataacataagacttgatgatcgaattgggaacgaagaagaaacgctagcttgtggggcgcacgcaagttacaactcagtacaagtcgcgacacataagaataaataagcaagaagaacacacgtctcttctgccgctcaagctcaaacagccgtcggtagccgcagcgtggcggcggcaggcgcgccggcgagaggcccgccgcgcgcgagtatggacctgtagatctccaccagcgccttctcgtcgtactccttgagctgcgccggccgcgcgaaggccgccgccgccgccgcgccgtgggtcgccgtggcgcagaagggcgcgccggcgccgtacccgacggcgggggaggaggccagccgcagcatggcggacacgtacgcgtcgcggagccgcatgagccaccggcgaggggacagcgcgcggagcagccgccgccccagctggccgcggcgcacgcgccacccgcggcaccggcggcgccggcccgagccatcccccgccggcggctgggcctgggcctgggcctgggcgacgccacttccgagctccacggtggggagcggctggcggcgccgcgcggcgtcgccgtccatgcggtagtagccccggcgcttccagtacgccttgatgccgcccttgtaggtgcggtcgtccatgcctagttgcttcttgattcagaggtggacgaagctaggcttgtggttgcggcagactgtcctctatcacacgggactgcacccgggccggcctcgaggaatccaatggccgcg

SEQ ID NO: 114490 - DNA, 743 bp, Zea mays
  unsure (1)..(743): unsure at all n locations
  Clone ID: MRT4577_35899C.1
tcctacatgggctaaaaactatggcacttaaagctgaaaagaagcccactggaggaaaggctcccgctaagagcatcgaaaagaaggccaagtctggtgatgccaagaagagaaaggctagccgtaaggaaacctactcttcctacatctacaaggtcttgaagcaagtccaccctgatactggtatctccaacaaggccatgtccatccttaactctttcgtcaacgatatctttgagcgtattgctggtgaagcttccaagctcgctgcttacaacaagcgttccaccatctcatctcgcgagattcaaaccgctgttcgtctcattcttcctggtgaattggccaagcacgccgtctctgaaggtactaaggctgtcaccaagtacaccagctccaaataaatgaattctggctgggctgaaatggggttgcagaatttgtgtgaacttggcttcaaaaaaagaaaaatatccatcttgcaactctttttttttcactttgttgcgcgcatacaacttattttgcacgcctttcagtttcacccaatctcattcacaagaaattcatccatgttttgtcagtctcgtttacaaacaactgacaatttgggcaacgcactatttatcccttcaactcgtttcatctgtacagactccccttttttctttaccgctgtttgtttctttaataacaattcctatatcatctgtnaaaaaaaaaaaaaaaagggccctagggcc

SEQ ID NO: 114491 - DNA, 425 bp, Zea mays
  Clone ID: MRT4577_3589C.1
cggccgcccttttttaccaacggttttaagcattttccacaccaaaaaagaagaacaccaggggggactacatgagaaaaaaaacaaaggcacacgataaaagaaaaaacgacaagaaaaaaaaacaccacatcaacctggggcaaaaattacctttggcccggaccaaagcagaaaccaatacgcacaaaggatagacggacctaaaaaagggctaatgagaccaactaccaacagaccagaccaggcgaccaccacgacaaaaaaagaggaaagagctggacacaacacaaaagggagggaaagcttccggcccacaagcaaaaagaacagaggccgcctataaatccagaaacaccttagagagagcaaaaaaaaaacaggggtgcggaaacctacaagccaaacgaaagaatccataccca

SEQ ID NO: 114492 - DNA, 2616 bp, Zea mays
  Clone ID: MRT4577_358C.1
gggtacctcgaggccggccggttcatggacgttgataagatccttccaggtcgcaactcgcaacacagtcacagacgccgccgccccaaagaaagacgtcaactccaggagacaagacagtgagaactgaagagaaggatgggcttcgagaagcagatcctgagatccggcaccggccccaagccgataaagggccagaaggtcaccgttcactgcaccggctacgggaaggatcgtgatctgtccaagaaattttggagcaccaaggaccctgggcagcagccattcagtttcagcattggtcagggttcagtgatcaaaggatgggacgagggagttatgaccatgcaagtgggtgaagttgctcgtatccagtgcacgcctgattatgcttatggagccggcgggttcccagcctggggaattcaaccaaactcagtgcttgtgttcgagattgaagtcctcagtgcccagtaattcgcatctgtcagctatggaaacgttggccatgcttctcaagtaatgaaataattccgttgtcacctcatgctacatacagcagattggtgttacgagttaaatcctgtgaaactttagcattctgtaaccgtggatgtcgagtttatggagttccttgtgtggcgcctcaagtcaagttctcgtcaaagattgtaatctgatggcttccattgtgacttgtaggcggctgcaataaacttacttgatgcaaaaaaaaaaaaaaaaaaaaaaaaaaaggccagtactctgcaaaaaaaaaaaaaaaaaaaaaatcgagcatcgcagagataggcgtcttcgtactcgcctacctccgcggctcaaacctttcccccttctcccaattccctccgtcggccgccgctccatcccgtacgacgacaccatgagggagtgcatttcgatccacatcggccaggccggtatccaggtcggaaacgcgtgctgggagctgtactgccttgagcatggcattcaggctgacggtcagatgcccggtgacaagaccattgggggaggtgatgatgctttcaacaccttcttcagtgagactggtgctgggaagcacgtgccccgtgctgtttttgttgaccttgaacccactgtcatcgatgaggtgaggactggcacctaccgccagctcttccaccctgagcagctcatcagtgggaaggaggatgccgcgcaacaactttgcccgtggtcactacaccattggcaaggagattgttgacctatgccttgatcgcatcaggaagcttgccgacaactgcactggtctccagggcttcctcgtcttcaacgctgttggtggaggaacgggctctggccttggttccctcctcctagagcgcctgtctgttgactacggcaagaagtccaagcttgggttcactgtgtacccttccccccaagtttctacttcggtagttgagccatacaacagtgtactgtccacccactccctcctcgagcacactgatgtggctatactgctggacaatgaggccatctacgacatttgccgccgatcccttgacattgagcgcccaacctacaccaacctcaacaggcttgtgtcccaggttatctcatcccttactgcctccctgaggttcgatggtgctctgaacgtggatgttaacgagttccagaccaacctggtaccctacccgaggatccacttcatgctttcttcgtacgctccagtcatctctgctgagaaggcctaccacgagcagctctctgtggctgagatcaccaacagcgccttcgagccatcttccatgatggccaagtgcgacccacgccatggcaagtacatggcctgctgcctcatgtaccgtggtgatgtggtccccaaggatgtgaatgctgctgtggccaccatcaagaccaaacgcaccatccagttcgtggattggtgcccgactggcttcaagtgcggcatcaactaccagcctcctagcgttgtgcctggtggcgacctggccaaggtgcagcgtgccgtgtgcatgatctccaactccaccagtgtcgtggaggtgttctcccgcatcgaccacaagttcgacctcatgtacgccaagcgtgccttcgtgcactggtacgtcggtgagggtatggaggaaggtgagttctctgaggcccgtgaggacctggcggcgctcgagaaggactacgaggaggtcggcgctgagttcgatgagggcgaggatggcgacgagggtgacgagtactagagaagtttgctgatgacgcagcatcaggccagtgtgctgcccttatcccgtgatctgccgtgagttgctcctgctatcgtgttatgtgtgtctgttatgaagtattgtgtggtttacaacacctgatgttgtaagagtcgttaattcccctgcattgctaccgggttattgagaataattatggctgtttacgttgttgcttcatctcggggatgctttacatttaccaccttgttcatcttttgtcatcagtaaaatcgagtcggcggatgtttttcttgggtttaaaaaaaaaaaaaaaaaaaaaaaaaaaaaaaaaaaaaaaaaaaaaactcgagagaggggcgccggtacc

SEQ ID NO: 114493 - DNA, 401 bp, Zea mays
  Clone ID: MRT4577_35900C.1
aggctcggaggaggccaaggtgcaacttccttcggtcgtcccgaatccgggttcatccgacaccagccgcctccaccatgccgccgaagttcgaccccaacgagatcaaagtcgtatacctgaggtgcaccggaggtgaagtcggtgccacttctgccctggcccccaagatcggccccctgggtctgtctccaaaaaaagttggtgatgacattgccaaggcaacgggtgactggaagggcctgaggattacagtgaaactgaccattcagaacagacaggcccagattgaggtggtgccttctgcctctgccctgatcatcaaagccctcaaggaaccaccaagaggccgaaagaaacagaaaaacattaaacaccgtgggaatatcacttttgatgag

SEQ ID NO: 114494 - DNA, 394 bp, Zea mays
  Clone ID: MRT4577_35901C.1
cttttctgcgaccatggttacaactttctttgggctcgatctaaacatccggagctagaacgggaggagtatgaggaggctattgctgtggtcgcctataacgctgactacatctagagggttgagcttattggaggatacgctgtaccaaaagaccaaatacttgaaggcttttgccgatgtgatcatagagtgaggtggactgcctggcttgaaggccggctcgggaatcattcagtttgtatggaccaccaaggtgaccacgagcaaatgtcacactcacctgggcaagagatgtattgagtattaccaagcccctactccctatgccgattggcaggtttgtttgactattggatccaacaagccctgacagcttgccatataccttgat

SEQ ID NO: 114495 - DNA, 450 bp, Zea mays
  unsure (1)..(450): unsure at all n locations
  Clone ID: MRT4577_35902C.1
ctcggcaacgactattcactcctccacggtggagtactgtctgacacacacttgacatactgtcaactgctagagatggcgaggacaatggatgggcatgccctctctgacccagcatacgcccttatacttcagccggcaagacagctatgagagacggtcagcacacattgctagactacacacatccacgaaggtagtcaacgccttcatattggtgcctcgcgccttactgggacngcattgcacgatctattgtcaatgacccttgcactggcagagacaactcacgccttgtcagtggagtcctacagacaccattgacatatgtcaagcgctaactatcacaggacaaaggagtggcatccctctctgaccaagcaactagcttatctatctccggcaagcacgcttgaggacggtacgcacaccttgctgactacaacatcc

SEQ ID NO: 114496 - DNA, 1347 bp, Zea mays
  Clone ID: MRT4577_35903C.1
cggacgcgtgggcggacgcgtgggcggacgcgtgggcggacgcgtgggcggacgcgtgggcggacgcgtgggcggacgcgtgggcggacgcgtgggtttccccttccccgcaccgcaccgcacccaacccccgtcggagagagagatggcatcggtggcggagatgcagcccctcgcgccggcggggtaccgccgcgcgccggagatgaaggagaaggtggaggcgtcggtggtggacctggaggccgggaccggggagacgctgtacccggggatctcgcgcggggagagcgccctccgatggggcttcgtccgcaaggtctacggcatcctcgctgcgcagctgctcctcaccaccgccgtctccgccctcaccgttctccaccccaccctcaacgccacgctctccgactccccgggcctcgcgctcgtgctcgccgtcctgcccttcatcctgatgatcccattgtatcattatcagcacaagcacccacacaattccgttttcctgggtctgttcacgttgtgcttgagcttcagcatcggcgtggcttgtgctaacacccaagggaaaatcgttctggaggctttagtgctgacggctggcgtggtggtttctctgactgcgtatgctttctgggcgtcaaagaagggcaaggaattcgggtacctggggcctatcctgtcttccgcgcttactatcctcgtcctaactagctttcttcaggtaatgcctacgacaagctctgaaagaaacgcgctctgtatatccgcgaatgatgctttgttaccagacgagcaatccactgcttgcacaataaacttttatttggttctgtgtggaattctgcgctgcaggttttcttcccactgtgacccgtgtcggtgggcttgttcggtggtctaggggctctggtcttctcaggcttcatcctgtacgacaccgagaacctgatcaagcgccacacctacgacgagtacatctgggcgtcggttgggctgtacctcgacatcctgaacctgttcctctccatcctgaacatgctcaggagcatgcaatccgacaactagccggtcaaagcaccgcaccgcggcctcttgatatcgaacacggtatacccccatggtaaatgcggtcctgtgctctggttgttaagaggacgggatcgaagtgcgacatatgtattgtctattgtgtgagcccactcgtgtcaacactgcaaacaattgtggtcatgtcaccttgtatgttcttcgtcactttgcaaacaattgtaagtacctgatatcgttttgcgctcgtgctattcgcgctaaaaatcacaatgatccagtaacaggttgtca

SEQ ID NO: 114497 - DNA, 269 bp, Zea mays
  Clone ID: MRT4577_35904C.1
cccacgcgtccgaggactcctgagttttttttttaatataaacattttctttcaataggttggactcttttacttttttggaaccaacaaacaaaaatccataacttcttttgctctatcatataaaataaacataccgttcgcaaaaactacacaccacaatgcaacttttaagatccgaaactaaaacaatacctaacttttacataaagctgcactattacgaatatctaagaaaaaactcatatatcctaaactcaaatttactt

SEQ ID NO: 114498 - DNA, 368 bp, Zea mays
  Clone ID: MRT4577_35905C.1
cctttgccttggcaaaggtataaatgtatctaaatattatgttttaatattcaggtttgcataataaaatatatgtataataatatttatctttggtataaatttctttaatgtttcatattttgttattgcttacatagttttatagagttgattacgaaggtaagaccttcgtgatattttgcttatgacctttgtccgaagttcattatatcctaagggagataatgcttcagcggacgaagggcattaacatttaacattttatgttgccttgttcttaattcatagcatttgagaacaagtccccaacagcctcggtatattgaaatggccagggtgccgtagcttggcgagggggcttcttc

SEQ ID NO: 114499 - DNA, 413 bp, Zea mays
  Clone ID: MRT4577_35906C.1
agcctcaaaaaatcaaactacctttctcttcttcatattcactctttgtcgcagtgcgactttttaccatctcacacacccgtttcgacttttccttgaactaccgcgactgcaactctactcgaatactctcgaacccaaccgtaatcacctaaacactattttcaaaatgaagttcaccattgtcgccaccatcatctccatggctgctgttgccattgctgctcccattgctagcgagcaagtcgctgcccgtcagaaccacggcatgtgtgtcaagtccgacgcaaatggcgagattacccagatccccaactgctagatatgatacccaagagtggaaggataagatggagtgtggcgacaagggggattgtggtggaggtagacaaagagtagagacagcctgcaac

SEQ ID NO: 114500 - DNA, 542 bp, Zea mays
  Clone ID: MRT4577_35907C.1
cacagcgttcttagagaagcatctgatgagcacagaaagtgctgatgaagcacctgctgaatgaactggacaggaagctattcagactagtcattaaacgcgcctagactggcctctgagctgcacaggcaaatggatagtcaagacggctacacaagcgtcctcacactcatattcaacccaatatacgacgaagtagaagaagaaggaacacaagatctgcagcgatgtttggggctaggtgagcctaggggcgatccttggcgcttgcattggatcgtgaagagcatggatgcgtagcaagaatggctccagcaacgtgaagatgctcgagaacctaaaatgctgtgaaaattgctttaacatgcccgcatatatacgcgcctgatgaatggcatctttccaggtattttttcaccatgtagaggagaaagtggagtatacatacgggttggaatactggttgatgctattttttataatcgcaacgttaataccaactttaaggctgataacaaggttaacaactgcataattatgca

SEQ ID NO: 114501 - DNA, 272 bp, Zea mays
  Clone ID: MRT4577_35908C.1
gatcaatcatcattttgtgtcttataaataggtagcgctaacacaagcaatataatccacctcatctagtatggagtgagtggttcatggaaccatacaccagtctgcatccctatttatactcaacttaaaacccagtgacactaaaggggataagtaccagcagcccatgcttcaccgctttttaaactcgatacacttgtccttttcagggtttttcgaagtcactgattccacactccgcctcctttcacttgttccaccccatatac

SEQ ID NO: 114502 - DNA, 345 bp, Zea mays
  unsure (1)..(345): unsure at all n locations
  Clone ID: MRT4577_35909C.1
ccctgccccgcgccctcatcgtctcctcccggcctcccctcnangcccaccgccgctgcccccacgccacccaaccgacaggagggccgcctctaccgtgcggagatcaggcacagacagcacatagaaccgtgcaagcactaaggatcccatcagcagtccacaagagtcccccgctagcaggcttgcgtgcagaggcgtggcttctccggacggctcagcgcgggtgatcccatacagagcagaagcactgggagctgatctgcgcacgagcacggcatcgacaagcattgccgatacgaagtctactccaacatccagatcgagtgcgtctacgcctactac

SEQ ID NO: 114503 - DNA, 445 bp, Zea mays
  Clone ID: MRT4577_3590C.1
ggggggggggaaaaaaaaaaaaaaggggggggacccaacacaaaagggcacaagggtaacccgttaagggggggaacccaaaaaaaaaaaaaaaatggttgccaaaaaccccccaagaggccaggggaggaaacaaaccccccattaaccattattattattttaaacccaaaacatgccatgggacccaactgactgactgactcgaaacaaacacagggacccccgtaaactttaaaaaaccttaaaaaaaagtaacttcccccggccggcccgcaggggggaacacccaactcaattgccccaattggaaggggcccacttggcattgcccgccaacttggaccccccggccttaattccggggggcgccttaaacccccccctggggggccccttgggagggggcaaacccaagaacaaaacccggggggggggggggggg

SEQ ID NO: 114504 - DNA, 790 bp, Zea mays
  Clone ID: MRT4577_35910C.1
ttttatttttatgcaataaattcaaaagataaataagaataatccaaggaaaatcatgcacacagaaatataagatttatcttgagattcagcccaccacctaggtgtctacgttctagttgctgagaaccggccaatctgcaagttttcatcagtgtacactggtgatatgaatttactcattctctggagactcctggtaatattcaaagatcatcggcttggacggtgcttggagagtgatagtatcgccaccgagcatcatcacaaccgacgacatggccggccgggccgccgggtctccctgcacgcacaggagcgctacgtggatgcatctcagcacgtcgccttcagggaagccgccgtccatgcacgggtccaccgtctccaccaccgtcccagcctcccagtgctgccatacagtgtcgaggagatcgtcaggctttccaccgttgtagatcgcgctgttcttcctccccgagatgatctccagcaccgtgacgccgaagctaaaagcgtcggatttgacggagtagttcccccgcagcgcgtactccggcgccatgtatccataggtgccgacgacgccttgcgagacgacggcctgcgtctgctggtcccgcccgacgatcctcgccaggccgaagcccgagatcttggggtccatgtttgcgtccagcaggatgttgctggggttgaggtcacggtgcactaccttgagctgggagtcttcgtggaggtactgcaagccacgagctatgccgttatgatctggtgcctgtgcctccag

SEQ ID NO: 114505 - DNA, 255 bp, Zea mays
  Clone ID: MRT4577_35911C.1
ctcaaaaaacacccaatcaattgggggggggaaaaaccaaaaagggcctaatggtaccaacactttggtataaaaaaccgcccaaaaaaaggacatttataaatttttttaaaaggcgaaagcccttgtttttaaaccaaaacaggatttggttggttaacacaacacaaatgccctgttcaaccaaaaaaaacctttctaaaatatggcctggtgtttttaaatatccgccctcaataaatcctaaattttttc

SEQ ID NO: 114506 - DNA, 443 bp, Zea mays
  Clone ID: MRT4577_35912C.1
gaggttgggtttttttttttttataggcttctttattttttttttttttttttttttttttttttttttttttaaacccaccctcattaacccgtttcccccccaaatttctcctttttttcattattttaacaaaaacctcttaaaacctgttatcacccctaaaataaaaaccccccttttttaggttcattaaaaaaactcccctcccccaaaaaaaatttttttatcattttctttcctctttcccgttttttttgttacaaaccgaacatatccttattttaaaacaacccatcacctggtcttaaattttttctctactacaaaataacaaaaaccccttgtaacaattcaaacataactaaatttccctaaacccacccttaaaatcttggtatttttttctccaaaatttttcgaaaatatacaagcaccctttt

SEQ ID NO: 114507 - DNA, 414 bp, Zea mays
  Clone ID: MRT4577_35913C.1
cccactcgtatgcgctcacttaagtgtgatcattgacgacctgcttaaagaaactcttgggatcgatcgacttccctcacatggacaagatacaatctgattgcccttatactgcatgtttcttattgtgcacatgaacgatgcgcaccctactaaacgaacagcaagtgtgttaaaatactttacgtaacttccttcccatgacgatgatggtcaacatctccctattagtgctctctgtaacacatcattgtctcacccaaatgatccttacttcatcaacttgcgcatattagaatgcatggcatctcttatatggaatggctagcaaaacactcgttctcttgcacatgatcagaatatacacatgccatatcatgcagctcacataattggatcatacacaatgacata

SEQ ID NO: 114508 - DNA, 534 bp, Zea mays
  Clone ID: MRT4577_35914C.1
ccggccgggatgcctgtcccactgttcattctgacgatctatgtccccgcgacggcggcaccgaccggctgagcggtcacatctccggagagcacatcgaccacaggaaacacgaagtagccaaagcagagacggatgcgcctgccaaggaaccacctgctgcagccaccgaaggtcctgctgccatagcgcccatgacatggccagatgacggacctgacttcgacaagatgggcatccacaaccccttctttacaagagcacctccatatggtagcgaagacgctctacccatagacccccctccacaacgcggcatgaactcactaaaataccaattacaagaccgcccagatatgcatgtagcatgccagaatgttgccgaacgaatacctgctatgtgtgtgcacctgtaaattacacaaaaaaaaaggggcggccctcgagctccccatgaagttccccttatcgtcccttcagtgagcgcttgatgaacacatggacatacctgcttcctgcgtgaacccggtatcc

SEQ ID NO: 114509 - DNA, 482 bp, Zea mays
  Clone ID: MRT4577_35915C.1
atataaagataaatctcaatcaatatattgattatttctaggaaacacatgccgggatgagggcaccattgttgagtccatctcatatgtaatctaaaagatggcacctccaacgatgggttgctgcatggcagggttcatcaaagagaactggttgtatggcagcaattgacgctgctgcaggaagttatcgaccaatgggttagccactgctagtggatcaagtaactgttgtcgctgttgtacgtacacagcacagttcgacacaaccagttggttgaatggaagcaactgttgcaagtacgcaataaggtttgccacaattatctgagtcagagctggcacaatctgttgcatcaactgttgttgactgtacgtaggtgcattgtgcacagcgagcgggctatatgaaaacaattgttgctgtctgacgtaggcgacagggttcaccatgtctagcagactgagcgctggtataaact

SEQ ID NO: 114510 - DNA, 387 bp, Zea mays
  Clone ID: MRT4577_35916C.1
accttaaattacatctttgaagtataaaaaaactgggttctttgaggaaaaaaaggaatttaggaccacgagacaaggggggggggggcaagagtccaaagaggcaccggcaacaaaacccggaaaaaaaaggaacccaaaaacgggaggcggaaaataacaagaaaaagcttcacgcaaaaaaaacccctacgaaacagggaccaaaaggaagcgggcgaaaaccccagggtcccaggaaaggactgatcgggcaaagaaaggggctaaccaaaaaccggggggcaggaaaacagggaagcggaaccaagaccgggcgggaaaagaaccaaaaaaccgacgccggggcggaccccggggccgacccctgggccgacccttggggcc

SEQ ID NO: 114511 - DNA, 192 bp, Zea mays
  Clone ID: MRT4577_35917C.1
attatgcttattattccaacgaaccactgcagaaatgaaacttggtttacagagcacaatcttaagatccggtatagaaacttgctacaaacaactaactgttcagacttaaaacttgatcccgtggaagagaaaaacggaacaaaagaaatgtattcactcagcacaggcctatcacttggatcaagctgc

SEQ ID NO: 114512 - DNA, 432 bp, Zea mays
  Clone ID: MRT4577_35918C.1
cccacgcgtccgcggacgcgtgggttctcaaactagcggaactttggaaaggccttgtagtgctaccctgcctctcttcctcggtagaggtgtatggggtccgatcaaccccatggcaaatgggtaacacgacttgtgggtaaagatgcgcaacctctacagagtgtaaaactggtatatcagacatgctcacgtgcatgagcgactcagacactcacatggttaacttatagaattaaactcaaattgtcatttgcattgcattgtgggtgttattatcaattgtgatctcatatttaattgggttggtatctacttataccaggtaactgctaatacaattttgacgaacactaaaagcaatgctcagctttaaccatctcctttggtaagccttacacttacatgagttcccaccttttttgagttcat

SEQ ID NO: 114513 - DNA, 272 bp, Zea mays
  Clone ID: MRT4577_35919C.1
tcttttttttatattgtctactactgcacgggcatttttccaccgttgtccgttataacaattagcacacatggcattgtgaagcacctgggaggggatttcaccttcgcgacggggggtaacggcaagctgtatcttccagacaaactatcatggttacaaacaatcaaactacggccgaacagtgcatggaacagcatatttgcccccttgctcttaatgaatcaaagggaaatcctggaaagggtcatacatggcctggctccattcaa

SEQ ID NO: 114514 - DNA, 609 bp, Zea mays
  Clone ID: MRT4577_3591C.1
ggggttaccaccgctctcgcctttagcatttatcctcacagccttctcacgtagctcaccttcccgccgtcctgggcgacaacacggagtgcgtggtcgccgacccgacagccgccattccctgctcggtcatggcaactggccgtcgcgcccctgctcccagtcctccctgtgctcgacgcccagctcgccatggacgcgcgcagctccctcgagtcggccgtgcaggtgctagtcgcctcgctcaccgatgactccccagctagacgcacgagcttgatcctgcgtcaacctcgtcgtcgtctcggacatcgcatcgccgtggtgcatcagcaggacgccggagcagtatatgtgtccttgcctcgcgggttcgcccttcgctatcgtcgggtgttcggtaaaaatcttcaagcaggaagtcatcgccgttcgcgtgaaatttctaatcgcttggacgctggtgatgcggatggacgaacctgaggaagggcagactgaacgagtgttgggataaaagctgatcgccaagtggatgtcatctaacaaacactaatgtagtgtttattccaggcaagccctggtgcatttgccacctccttctgttcg

SEQ ID NO: 114515 - DNA, 465 bp, Zea mays
  Clone ID: MRT4577_35920C.1
gagctcattagtcggcggccgccctattctttacattgttttttttaataaaagatgcactaggcaccgaacaaagctgatggcatactatatgcaacaggtggcacatcagcatatatgggactataagcaatgctgaattgacactcaaacagaatcatcggcagatatatcagaagcaacatgaacctttcaaatatgaggttgatccaaaaaggggctggatgttataaacccttgtaagcaattcggaggtgggatagatttggctgaacgttcaaaagacaaatgcttaaaatgaaatcccatattcaaattcttgccatttaaggattgatttccacgaccgctcggatatttgggtatctccactactttgtttccgatggctgatattccgcttaggcgatgaactggtgatctgaccatagataaaaatggaacaaggtgcacggcaacctgatt

SEQ ID NO: 114516 - DNA, 632 bp, Zea mays
  Clone ID: MRT4577_35921C.1
acagagaccgctcgctggccgcccaccggaggatcagccatctcgccacaaagctcatacgaaccccgcacgccgccgtcgtcctccgttcgcccattggctgtgtccttcttgcccgcgccgtcgctcagcactggtgtccatcgtctccgcaccgggcgctgccgtccatacttgcgcaaaagaaatgacgacagactacatagctggctcactggtcaggaacgttcagccactatgcatacctgctggacacattgattatctagaacgaaggcatgcgcaggcaacaccgacacagactgacactggagagggagagggggaaaaacacagacactatgtctgaccactgtgctggcactggtgaaccaacggttgctatgaaccccataaatcgacagaacacgatcgagaaggccactgggcaggaggagcacggagaagctagcgctgagaattgcagccgacatgaagccagagatccttaagaaacggcgtacctaattgacatacaacgaaatacagaagcgatttttttgagattcttaattgatctgcgagcgaacaatgggtatttcaccatgtaagccaatgtggtctgatcattggtgaaatcttccaccctgcag

SEQ ID NO: 114517 - DNA, 665 bp, Zea mays
  Clone ID: MRT4577_35922C.1
gtgcacgtcgtggagtgcgagaggctcaccgacggccgcttcttcctcacctgcgtgggcagggaccggttccgggtcgtcgagaccgtcaggacgaagccctacgcggtcgcacgggtccaggtctttcgggaccgtgaccacagccaccaccaccaccatcgcgacctgatgcagcaggtggagcggcacctcgggaacgtggccgcgctcgcggacaagctgggccagaagccgccgccgctgccgtaccgccagggcgaccggcggctgcacaccgccgcctcgctctcgttcctcgtcgcgcgcctgttcgtcgacgaccgccgggagcagcaggcgctgctgcggatggacgacgccgcgcagcggctggcgcgagagggggagtacctggagcgcaggagcaagtacctggcggccttggcggcgatcaaggacgcgttccagcacttctcctgcaacgagaagtagattttaagttccctggagaggtctgaccgtctgagagagtgtcttgtctgttaatacctaagggtttgattagtgagatggtctgtttttgtatgttggtttattcctggaaaagattgggacgatgctctaaagctctaaaaaaatttaaaaataacaagggcaataagcgaccagactatgtcctgatt

SEQ ID NO: 114518 - DNA, 1546 bp, Zea mays
  Clone ID: MRT4577_35923C.1
ctcgaggccggccgggagtactatagattattattattatcataggggtcggatcctcctctgctcttatccactcgcctactacctcctctttctccgcccacctccacccccttccctgctctctcccactactgccccctttcgccgtctcccttctcccatcccttccgccgtttctgcctgctgcgaacccggcggcaaccgacctcgatcgtcgccgttcgtccgccgaccaccgccaagaggcagagttgatatggccctcaagaccccgcacctcccatccaatttcgcgaggcggccaagcagccaccacagcttcagccagtggcactcgcctccgcaccacccaaagcttcctccaaggcccgacccgcagacaagagttgccattgccacgaagccgccgccgccgccgcatgtcgtccgcaagaggagcacgacgtcgacgttgatgaggtgcagggacggcctaggcctacacggcttcacggacgacgaggctgttcatcagaccccggaaccggaagaccaccagaccaccgagctccccgtcgtgacgcacccgtcggtcgtcttccccggcgccacgctgcagctgcacgcgttcgagttccggagccgcatcatggcgcacaccctgctgcagcagggcctcagcttcggggtcgtctgccgcgggggggtagcggacgtggggtgcgtcgtgcacgtcgtggagtgcgagaggctcaccgacggccgcttcttcctcacctgcgtgggcagggaccggttccgggtcgtcgagaccgtcaggacgaagccctacgcggtcgcacgggtccaggtctttcgggaccgtgaccacagccaccaccaccaccaccacgacctgatgcagcaggtggagcggcacctcgggaacgtggccgcgctcgcggacaagctgggccagaagccgccgccgccgctgccgtaccgccagggcgaccggcggctgcacaccgccgcctcgctctcgttcctcgtcgcgcgcctgttcgtcgacgaccgccgggagcagcaggcgctgctgcggatggacgacgccgcgcagcggctggcgcgggagggggagtacctggagcgcaggagcaagtacctggcggccttggcggcgatcaaggacgcgttccagcactcgtcctgcaacgagaagtagatcgcggacctgtacattttcaagggtagaagaactgtacaagttccctggtgaggtctgaccgtctgttaatacctaagggtttgattagtgagttggtctgtttttgtatgttggtttagtccttggtgtttcctggaaaagattgggacgatgatctaaagctctaaaaaaataataagaagggcaataagcaaccagactatatgcttgctgttggtattgcttcagctacgaccagccctgctgctgcctgtacattcttgcatggcctttctgtgctgccacttctgctgctatttctaataaagaagtgctgctatttctaataaactgatgtactcattcgtgtgtaaaaag

SEQ ID NO: 114519 - DNA, 385 bp, Zea mays
  unsure (1)..(385): unsure at all n locations
  Clone ID: MRT4577_35924C.1
acctaatttttttnnnnacaannnnttttttttttgtttttttttaggggttttttggcgtaaaacccaaaccacccaagttcagttttatttcgttccaaacaaaggggcaacagttttaaaaattttggctggctttttcaatttatttcagttccccggggtattggacatggttaattccccccaaccaaaaacattcccttgggggggactggtaaggaccaccccccccctttggagggccccacctcaatgcttgtttaatccaagaactcccttttcgggcatggggccttttttagagcaaagggggaacaaaatttccccagttcttgtttggcggagggaacaaggggttcaccccactaaaggaccttttttt

SEQ ID NO: 114520 - DNA, 262 bp, Zea mays
  Clone ID: MRT4577_35925C.1
gcggcgtatctctcgctactgttacaaaactcgggtatcattagagaaatattgatggtcaagacggatacatgtatgacccgcgtaaaatctcttcatactctgatagacgctcctaggttccataccgaaagcgtacgggatgacggactggatgtgctcctttgctgagcagggctcatagaaacatctcgatctgtaccggttatactctactttaagctagatgttctaatactccgaagccacaattactgatggg

SEQ ID NO: 114521 - DNA, 798 bp, Zea mays
  Clone ID: MRT4577_35926C.1
gggacaagttcttcggttcctgcgtgccttccttatcccacaatcccggcaacagcttcttcacgccgttcttccctccagcttgccgagtcctagccatggcagcggttctttcctgctcgccttgctccgagctcccggcactggagttttctacggcgcccgctcccttctctgctacccctgctcgttcctatggggcgcgcccatatcctctgctcgtcgccctttcccctgccgggcagctcgcctgcgcgctcctctgcgtcgagctccctgcgcagtggtttccattccccgctacagctctagtcttcttccctgcgcacagcttcttgctccctcgtgtcttcttccgctgggcgcagctagccgtggagcttcttcttccctgctcgcgccgccgcgtagcttcctgtgctcgcccttggcagccgtgcctgctccctggagtctcctcgctgtgcgtcgctgctccatggctgagcttgtcctgcgcgcgtccctcggcccagctcggatctcatccagcgccgcgcgctcagttgccatggccgccgaacaccctcagctcgtctgctcctctccgctcagcccgtctgctcctctccgcttagtttcaagcccctgcgccgcggtttctcagcgcgccacgttctgctcggttccgtttgccgcgcccctgcacttgtcgcggtgctcctgctcggattcagtcctgcgcgcagccgcttttcatctctctgctcgctcgcgcacagctcgcagaacttttcctcgtcggcccagctcagtcag

SEQ ID NO: 114522 - DNA, 125 bp, Zea mays
  Clone ID: MRT4577_35927C.1
gggggcaaaagttttttaatcttaaaattgggttttggctgaagggggttgaacccccccagaaaggcccgagccccttaaaaggggcatcccctgaaacctactaaacctcaccttacatttta

SEQ ID NO: 114523 - DNA, 534 bp, Zea mays
  Clone ID: MRT4577_35928C.1
gggcgctgacctcgatgcctcctccacgtcccgctgcgagagccgaacgggggtgatgagagcttgcgtccacttgccctggcagaagtgatcacagggccaggggtcctgtcccgaacaccccaccacgttcaacttccgggcccgccgccgccgtaagggccagggtaatttggtgggggccaatcccaccaagcacaactttccggccggccccgttggcttcaacgcccgcgacatgggcttggttaacccggcgcaatccaagctgacctcgatgtcccagcccatggccgcgccgatgcgcttcacacttgttcgccaaggccttcgcgcggggggacacccgcaccgccgcgttcgcgcccagagaccttgccacaggcaagcggtgctctttcacattcacaaccaccacacgcggggcgccgaaagacccgcgccgccagcagcgacaccacgccgatgggggcggcgcccaccacgagcacacccgtctcgggccccacccccgcgcggcgggacgcgtgcacg

SEQ ID NO: 114524 - DNA, 741 bp, Zea mays
  unsure (1)..(741): unsure at all n locations
  Clone ID: MRT4577_35929C.1
cctcgaggccggccgggacagcgcatctcctattctcagctaagagatgagtgcgacaatataaaaacagctctctaattagatgcgctcaccacaataacctggcttacggatagcctgaaagcacataaggacaattgaactgctacagtgacatcaacgatcgcggcttccgtgcactgacgaatacgccgtgcccatgtaacacctttgccctaaatttgcccacaactgttacaaccccggcaaggaaggtggatccgacggaggagcctgtgatcaccagggtgccgtccaccaacctccgctctcgccaatgatcaccgccggaagccaatacatcttcacaggacggcaatgcaatgagcacctgctaccaggtgtaaggcaacggacacgaatagggctccgctacgccggcgacagtggttatcacctacctgtgcacagactctacttgccagttggagcccgtccacttagacctgagcgggacacccttcggtggcatgtggacatccggccaggccgacatgatacgaaacagcggccgcctacaagtacagaacactcgggtgacgtgcaactggaacggtttggacatcgccttcagggtggacacctgctcaaacgccaactacctgggcatgaccatctagtacgagtccggagacggggacctgcgcgccttgcagctgaagcacagcgggncggcgacatgtgcttccatgcaacgctcct

SEQ ID NO: 114525 - DNA, 791 bp, Zea mays
  Clone ID: MRT4577_3592C.1
gaaaaatatgatggctagccaataaataaaataccagatctaacgttcacgtcaccaatttaaatagacatcgcatatgtgacgcattagcaaatgtttaatacagtcacaatgcattctaaccacgacaaagaaattatcgcaactaatatatttaaccgttctacttataaaccaaaaaacaggagtagcgagcatccaagcgattagaaatttcacgcgaacggcggtgacttcctgcttcaagatttttaccgaacacccgacgatagcgaagggcgaacaggcgaggcaaggacacagatactgctccgacgtcctgctgatgcaccacgatgatgcgatgtccgagacgacgacgaggttgacgcaggatcaagctcatgcgtccagctggggagtcatcggtgagcgaggcgactagcaccagcacgaccgactagtgagcaaggtcaaatccaagagcaatgggagatagggttcggtgattcaacggtggccgctaagagataaaccagagcgcgagcttgagggaggggaagacggagcacggccatggagaggaacctcgagggagctgcgcgcgtccatggcgagctgggcgtcgagcacagggaggactgagagtaggggcgcgacggcccagctgccatgaccgagcagggaatggcggctgtcgggtcggcgaccacgcactccgtgttgtcgcccaggacggcgggaaggtgagctacgtgagaaggctgtgaggataaatgctaaaggcgagagcggtggtgaaccccggccgg

SEQ ID NO: 114526 - DNA, 561 bp, Zea mays
  unsure (1)..(561): unsure at all n locations
  Clone ID: MRT4577_35930C.1
tcccctcctcttcccattctgcagaaatcccgccatggccgccctccctggtgctcgccccagccgaggtctctccatggccggctgcagctccctggcgcccctgctcctccctgttctagcttggtgctcagagccccatcgtcggccgcccttctgctcccttccccatggcgtgcctgctccctagacggcgctcggattcctccttctcggccatctccatcacgccctgctcgcccagcggcgacgagctcggcctctgctcctcccctgctcctatggtggcgccggtcggatctccctggcgcctcaccctactctctgtctgcccatggagtcgcccagcccaaccgtgcctgctccctccctgtgctcgccatggtcgtcgcctccaagcttctccctgctgcgcgcgcggccgtgcccctctgctcgccacggcgcgtcgagctcccgccccgagtccttttcctgttcgcccgtgacgcccggngtnctgcctgctntgntcgnncggcgaccatgtgccatgcgnggagcaacgggggaaaatgtaga

SEQ ID NO: 114527 - DNA, 1280 bp, Zea mays
  Clone ID: MRT4577_35931C.1
agttccggggccgggtgcagttcctgctgagcgggatgaagccgtggtgggtggccaagttcacgcccttcttccggcagctgacccggtacgacgtcatcgacgtggacaacgaccaggaggtgcactgcttcccccggatcgtggtcggcgccaccttccacaaggacatgggcgtggacccgcggcggtcgccgggccacgtctccgtggtggacttcaagcgcgcgctgcgccgcgccttcggccttccgcgcgaggccgcctcccgcggcggcgccacggggcgcggcaagccccggctcctgatcatctcccgccgcggctcccggcggttcctgaacgagcgggagatggcgcgcgccgcggcgggcgccgggttcgaggtgcgcgtggcggagcccgaccagcacacggacacggccgcgttcgcggcgctggtgaactcggcggacgtgatggtgggcgtgcacggcgccgggctgaccaacatggtgttcctgccccgcggcgccgtgctcgtccaggttgtgccgttcggcgggctggagtggctcacgggcgtcacgttcaaggaccccgccgcggacatggaggtgagctacatgggctacgacgtgacgctggaggagagctcgctgatcgaccagtacccgaggaaccaccaggtgctcaccgacccctacgccgtgcacaagcagggctgggacgcgctcaaggcggcgtacctggacaagcagaacatccggatggatctcgacaggttcagggccacgctgagggaggccatgagccggttgccgccggctccgtgacccggccgccgtgccccggcccggaggtagataggttggtgtatctatcgtccccgttgtcatgctctcaacaagttgacttaatcttctttttcttctccgtcccccctttttatttttattatgtcactagcaagattcttttggtccgttgttttgttgtgttgtttactgctgctacataaggaatcaatatcatgggaagatgatgagcaaaagcaaagcaagaccaggttgctgttataaatttatataaaaaaaaagaaaaaaaggccagctgaatccggcactggtgttgatttgttaaccaatactagtacaagccagcattttgtgattattgatagctttgatgccatgatcaagatgtaaaagtacgccagcaaggatcatgcatgatgcatgaaactttttatgtacccccatattatgaaatattgtactaaaagagtaaaagtcggctat

SEQ ID NO: 114528 - DNA, 319 bp, Zea mays
  Clone ID: MRT4577_35932C.1
aattataactaagaagataatcattccaaagcctgtgctggcaagaccgtatctggagcttcttctgtggcttagatatttagagtcatttctcatttggaaaataatttttgaactctacttttaaagcaatgatgaaaataattagcattcatattcataatttgcaatcaactcaggctttggaatgattatctacttagttatgatcaggtagaagtcttttatcttccactggcatgtaaagagccagggctgttgtctgtttccttatgggccttctttctaaagtgatttggactctgctacagtggttagt

SEQ ID NO: 114529 - DNA, 618 bp, Zea mays
  Clone ID: MRT4577_35933C.1
agcaaatacgtatcctccaaaccgcggaaaacaagaatattgatgtggtaatccaaacatatgactcacaggggaaaaaaaaactccatcgtcagtgcctagaacgacaagctactcttctcacaggaaatcatcctacgcaaaacaaaatcaagtttatcttgtcctggtaaaatgaacccaaagtctacggggggataagatgcaccacgtgaaagaaccagggtaagcaacctcatcttttcctgacaaaaaaacgaactcaaagctctgaggctcttggagctctgggggcttctggtcttgggtccgcctgtggggcgagggtgaacattgccatcataaacccagctgggggtgggcggtgcggaagttctagtggccggcagcagcttggctcgcagcagcagcttggctcccagcggcttggctcgcagcagcatcttggcggatcggcggtggcggtacgttgctggccctaacttggcaagcgcctggcgtcttgaaccgaaccagtatgacagtcatgttgtccctccctctaggttgtgccacgcagtgagcaaggagggcctcgcagatggacgccagccctacgtcagcaaatgagtatatcct

SEQ ID NO: 114530 - DNA, 163 bp, Zea mays
  Clone ID: MRT4577_35934C.1
cctttaaaataactttcccccccacgaccccacaaagggcgaatttctataatatgagggtcttttaataacagttcattgatctctttatggaagttcaacatgcaaatgggaagcggaatatattgtttttcaactgctttatgctgtcataggtgcattt

SEQ ID NO: 114531 - DNA, 223 bp, Zea mays
  Clone ID: MRT4577_35935C.1
ccacgcgtccgcgtcgaagaaaaatctttcgttaggtgatgagatgtctggaggaagaaagcaatggagagcaggctcattttgttccatgtgcctgcctgcgcatactgcctctctgtgcaaattggccgtactccatgaatcacactgcaattctaaaaacgcttagcgaaacgagaatgcaacacgtaataaacgaaaaacaccggttggctttacaatg

SEQ ID NO: 114532 - DNA, 192 bp, Zea mays
  Clone ID: MRT4577_35936C.1
atatatatcttttttattgggggtttttttatattaaatatagtatagggcaaatgccctgattgatagatgggagaacacaagacttgtgggataaaactagatgtttgaactgtaccaaatggggaatctaaaagagggcccccccaatgggggcttgttggtgaaacaccaacgggtttggtaaaagag

SEQ ID NO: 114533 - DNA, 246 bp, Zea mays
  unsure (1)..(246): unsure at all n locations
  Clone ID: MRT4577_35937C.1
caacgaggcctgacacgatttttggtgcaacatatcttgttgtggcacctgagcatgttttactgtcatctctaacatctgaggaacaacgagcacatgtagaggaatacagagaactttcagcaagaaagagtgaactagaaaggactgaacttcagaaggaaaaaactggggttttcagtggttcttatgctaagaacccagcaaccggggnaatcantccaatatgggtggcagattatgttc

SEQ ID NO: 114534 - DNA, 681 bp, Zea mays
  Clone ID: MRT4577_35938C.1
atggctccaagcgccaacggtcgtttgcaacggtttttgaccccagatggtcccaaggcaggcatggatatggatggacatgcaagggatggagagtttcttttgtattcagtgaactgtgtggtactgcgtacacactgtagttccttttgtattaagtgtagtgatgaggccctgagaaggctcgcgcagaacacaaaggctgcccagaagattcgcctgcggaagaaggtgtccacaagatcttcaccagtcttgtggtgcctacatccagtagctagagacaagccgcatgaagctatcgcaggctcgcagctagagctggagcttcaacgggcgcgacagcagacttatatatttggggccctagattttgtgggggccctgttcgagcgtacaggttgcacacgccctggcacgggcctgaatgggagcatgggagactcgactctcggctacacatgcccgatagatccaaatcaggctcttccttctgcgctggtcgtttgtccaatggcatggcaagttcaggttcaggcagcccctctaacggcgcgctggccagtgtgcgtggtttcaggtgttgctgcgttcgagatcgactacagccactggatggacgagcagaagaggcacaccgcggagctgacgtcgacgctcctgggcagcagattcaagtga

SEQ ID NO: 114535 - DNA, 1005 bp, Zea mays
  unsure (1)..(1005): unsure at all n locations
  Clone ID: MRT4577_35939C.1
atcatttctgcatgatgctgagaaccaagtcatatatcgtgatttcaaggcatcaaacattctccttgactcggagttcaatgcaaagctttcagactttggcttggcaaaagcaggtccaactggggacaggacccatgtttctacacaagtcatgggcacacgaggttatgcagctccagaatatgttgcaacaggtcggctctcagtgaaggcggatgtctacagcttcggcgtggtgctactggagctgctgacgggacggcgggcgctagacaagtcgaaaccattaaccgagcagaacctggtggagtgggcgagaccctacttgagcgacaagcgccgtctgtaccgcatcatggactccaagttgggcgggcagtaccctaagaagggcgcccacgccgtggccggaatcgccctgcagtgcatccgcaacgaagggaagatgcggcctgccatgtccgaggtcgtggagaagctagagcagctgcaggatcccaggtacaacgtggcggcgccgccgcaggtgaacacggcgtcgtcgtcgtccgctctggctcggtagtccccaggtcgcccaggaaggcacagccttctcccaggcgcctgtcgggttcggcctccccgttgccagcaccagcaacaggctccccgctgccggggtcgtcgaggagtagtagtaggactgcgcaggtgcactaggcgtgcgacagaaaggatgaaagggagcggctatacgtgtgtgtgtgactgtgttgttgtcgtaggcatgtagctgttggtttcattccatgtgtactagctgtatatttttgctgtattcactaccggaatccaaggctttgccgagtgttgaatctttgccgagtgccttttgtcgggcactcggcaaagacgtctttggccgagtgccgcactcggtnaagctaggttttcggaaacgaggctttttaccgagtgccggacacctcggtatagtgttgcacctcggacagctggttt

SEQ ID NO: 114536 - DNA, 315 bp, Zea mays
  Clone ID: MRT4577_3593C.1
ttgagtctcatacaagaattttttaggtggaggggaatgggtgtccaaaacacatgtgttggtatctttacatgtccatgtatcataggctccacatttttccctcattccagacgcttgcatcttctatttctggtctttacatcgcctggcttactgacgtggaatgctccacattgaattccttttgatgacttgaccacccacgacatcgatctaaaataaaatttatgatgctatatagtgatgccaggcataaccaccttctcctgacatcaataacacggactggatttttattaccccttaaccagc

SEQ ID NO: 114537 - DNA, 612 bp, Zea mays
  Clone ID: MRT4577_35940C.1
gcaaaagatgatacataggagtgaaaacaagaaaaactattggagcagtgacttatgtatatatttttttaaaggaacgaatggatctttcggagcctcggtttacaattacatacatgcatcgatctcactgacttactactgaatcaaacattactcagataccatgagtcacactgctcactgacttatgtgctgcaagagctatatagggacatcttaaaaaaaaagctactaatggttgataaggttgaagcaaattttggtgagtggccaataatgaacaatactggaatataaagatgatactgggaaaagggacacgttttagacgcagaagagacaagacatgctggtgaaattgatcagattctgctatctgttctgacttgatgtatcgacacagctgaacatgacttgtactgttgactagtgcaaaggctttacagcctgtttggtatcgacaccccctcactctttactttttgtatgatttgtggaatggaataagttgttccatcactatctgtaacgcataaaattctattttgggatctgtaagagtttctctaaaaagattaagatgactcttaatatggattcctcactttg

SEQ ID NO: 114538 - DNA, 374 bp, Zea mays
  Clone ID: MRT4577_35941C.1
ttagttaaatgcttcaatgcggaaaaatacttgatgattgccatgataattgttcattacggccattgttgacactgacacagccaaccatggggatgcctcacacattcttactcaactgttgccgttgaatgactcaactagatatgttgccagcggctctactacagcatataatttacttccattcaaccggcgtgctgcattgaacttctgatgcttattagcaacaacaataaccattcatgcaggatagttgctgcctacccccaataatgtcttccattcaatcaaatagcaataatgaactctgctgcttatttacagaagcaacaactactaccattcaggcagctagctgatgtgagccctgc

SEQ ID NO: 114539 - DNA, 1487 bp, Zea mays
  Clone ID: MRT4577_35942C.1
agcggcagcaaggcgttggcaatcccagtccagtcgtcggagcactcgcaatttcccgtcacagctggccaccgccccaccctcacggcctcacctcctcccgctacacgcacgcgcccacctacccaaaacgaccgcgcgcggcgccctcctcccgcggtgccaccaccaccaccacctcgtcggaccatcaccacaccgatcggcagctaagcagctcccgcctccagcaccgcgagcggcgatggcaatggacgcggccgtggccgtgaagagcggcggtggcggcgccggatcgaccggggtcaccgcggcggcctcgcagtccccgcaggcggcgactaacggcggcgagcggcggtcccggttccagcgcatctgcgtgtactgcggcagcgccaagggccggaagcctagctaccaggacgccgccgtcgagctgggcaaggagctggtggagaggggcatagacctggtctacgggggcggttccatcggcctcatggggctggtctcgcatgcagttcatgacggagggcgccatgtgattggggtcatcccgagatccttgatgcccagagaggtcactggcgagcctgttggggaagtaagggccgtctccggcatgcacgagaggaaggccgagatggcccgcttcgccgatgccttcatagcgttacctggtggctatggaactctggaagagctgctggaggtcatcacctgggcgcaactagggatccataagaagccggtcgggcttctgaacgtggacgggttctacgacccgctgctgtccttcatcgacatggccgtcaacgaagggttcatcaaggaggacgcccgccgcatcgtcatctcggctcccacggccaaggagctggtcctcaagcttgaggagtacgttccggagtacgaggtaggcctggtgtgggaggaccagatgccaccgtccgccgtcgccgtcgccgccgccgcgcacgggttcgccccggagctggtggagcccgggatcacctcctcgtcctgatctggactgacggggacgtcggccgggcctgcctacctacgctaaccccagattctgaccgacggccggcccggcggcaccaagtagaaaggctatctatactagtaccacctaattaataccgtaatctactactactactactaacaaagaagattgttgggatggaggatgacagctagctagcgtctgctcagttagcagcatatcgtcgttagccgcgcagtgtgcagctgcgtcagctctgccattgctgctcctagcttttgggcttttgtgttgtgctctcctagaagtagggaggaaggaaggaaggcatgctatgtatattccccgggtatgtggttgtggtctagcgattggatttgtctcgctcgcagcctcgcacgtgtgatggatggatcgtggaacaaaagctagttgcaatgcaaaagcgattcatttctatcccccagtc

SEQ ID NO: 114540 - DNA, 362 bp, Zea mays
  Clone ID: MRT4577_35943C.1
caaaaacaaatccacacacacataccaccggtaatcataaaaaaaacaaacagggggggggaaagacccagcgaccgcacactccttgaggggaaatcactgaccggggccagccgtcaaaccggacccgccagcggcaccaatgaaggggaacaacgcgcgcagagaggcgccctggggaaaatggcgctcctccgctaactcccccaatgactcgatgcggaaggaaaaagggaaaagccgggggggcccaagggacgaacaaacccaaataaagtggggcgcacaaactggccgttttccaggagggaaacctgaggcgccggccggcttaaggactcggccaacccccggggagaggc

SEQ ID NO: 114541 - DNA, 456 bp, Zea mays
  Clone ID: MRT4577_35944C.1
gctcacccaaattgcaaattctattcctgggatcatgtgattaagtcttaaccacattgcacagctcaacaaaccaggtccgattacaaaatgtactcttcagcctgcaagatctacggaccacgagctttaacaattacagaggaaaaggcacccaaccctttttgcctttttggcggacttggccttcttttagggccacttgatctgctttgccaacatcttatcagcggtcttcttgagaaagaccaccgcattgaaggtgtggaggactcgcttctgggctaaggtgactccccacaacagctatcccagcttctcgtcactacataatgcaaataccacttgctctcgtgatgaagcatacttaattaaactccttagacttgtacccgggcaaattcagaaacttggatgccagatacttagagaccggggaccacatgactggggctc

SEQ ID NO: 114542 - DNA, 682 bp, Zea mays
  Clone ID: MRT4577_35945C.1
aacccgtctcccgtctccgctcgctcgccgccgctcgccggcggccctccgtccccgtggtcgctcctcgagaagaataaggcgagatggcaatggcgacgtcgtcggcgtaccctccgcctcctccgttctaccggctgtacaaggacttcgagcaggacccctcgtctgcgccggagcctccaccgccgatcgaggggtcgtaccagctctttggtgctacctacacaacggatgtggtgctgccaagtctggaggatcaaggtgttcgccagctttacccaaagggtccagatatcgacttcaagaaggagctaaggacactcaacagagagcttcaactccatatcttggagctagcggatattttagtggagagaccatctcagtatgcccgcagggttgaagacatttcactcattttcaagaacttgcaccatcttcttaattccctacgaccacaccaggcaagagcaacattgattcacctccttgagagccaaatacagcgtcgtaagcaagcgattgaggatataaaacagaggagagaggaggcacaaaggctgcttggggaatcactggttattattgaggggagccagcagcaggttatgactccaatgtgaaggcctctgatatcctgggtttcaggttatgactccagtgtgaaggcctctggtat

SEQ ID NO: 114543 - DNA, 242 bp, Zea mays
  Clone ID: MRT4577_35946C.1
acccacacatacagacacatttgcactctatttgtgacagttaaaataaacaaagacaaatatgggaaaatagaaaaatttaaaaaggtctggaagccttaacgtcatacaagtttagctagcacaaccatgatacgtaatggaacatgctatatggaccgcaaaataaagtccagtgtactacattcttaaacactatgaccgtaaaaaccatggtgatcccaaacttaatctcgttgcga

SEQ ID NO: 114544 - DNA, 792 bp, Zea mays
  Clone ID: MRT4577_35947C.1
atggcgaaatcggcgacagccgatgccagagcacacggcgaggaagcttcgcagtttgacgagaccgtggccgagcgaattatatggcacagacaggggaaggactcggcgagcagcgacacggagagcaaagcgaggttgcggccgagcatgctcgggcgcaagcgcacccagcgtttcaccgtgtccaacacgcacatcacgggctcgatgtcgactccgagcagttccgcacggaagaacgacgagctgggagagcttcacgtgacctcggcacgcagggatgagctcggcgaggaagcagagcgcgcacaagggagcaggccgggcacagcagtaggcgcggctgtggcagcaaggcgaggccgtgaccacgagttcggcaaggggcgcgctgctgcacggtgcgcgacgcagggagcagtgcttgcagaagaactcgcgcgcgccagggaactaggaacggtgcgacacgtagggagcgagcagggcgctggggattggagccgagaaggattgcacgcggcagggagatgggtgccgcccgatagggagatgcagagaggagagagggagctgggcatgaccgagatccgagcagagggaagggatccgagcaggacgcggccatggacagggcaaggaaccgggcgcgacgctgggcgtgggggggtcgagcagggccgaacgccatgggagcaagacgcgagaggagcagggaagttggtcggacaccataggagcgggcagaggagttggggggtcacgaccagggagatgggcaggggttga

SEQ ID NO: 114545 - DNA, 470 bp, Zea mays
  Clone ID: MRT4577_35948C.1
gagacacaaaccactttttttttggggggcgggacaacagatttacattttggcttttacaaattccggggaactagacagaatggttcagccccgactaatccccattacaggtttgccaaatcctaaagacactggcatttttttttttttcctaggttccataaatcggggacgaattttacacgaggcccaaaaaggaaaccttaatttttggaaaatgactttaaatgcccctatacatccaggggccattttggggacaaaaaaaaaaaattggtgctcgggtcggggcgatgcacggattggaacacattgaggaaacaaccagttttttgacacaatggaaacgaaatgtaacacgctgggggtttccccatacaagaactaaataatggaagccagcctgttccttgggacccggagcatattcctaaagggttccaaacgctggggggggcaactaccaa

SEQ ID NO: 114546 - DNA, 547 bp, Zea mays
  unsure (1)..(547): unsure at all n locations
  Clone ID: MRT4577_35949C.1
cggncgcgtgggnaaaaaaaaaaaaaaaaaaaaaaaaaaaaaaaaaaaaaaaaaaaaaaaaaaaaaaaaaaaaaaaaaaaaaaaaaattaaaaaaaaaaaaaaaaaaaaaaaaaaaaaaaaaaaaaaaaaaaaaggggcgggccggttttagagaggaacccaagctttcacttccccgtgcttgccaacgtaataactttttttttggttgccccctaaatttaatttcactggggcgggttttaacaacgtcggggattgggaaaaaccttggggttccccaatttaatcgctttgaaaaaaatccccttttccccagttgggttaataccaaaaaggccccccccgatcccctttccaaaaatttgcccaccctaaatggcaaatggaaccccccttttaccggccctttaaccccggggggtgggggggttccccccaggggaaccgttacatttgccagccccttagcccccgttcttttcgtttttttcctttcttttctcgccactttcccgggttttccccgtaagtttttaattgggg

SEQ ID NO: 114547 - DNA, 259 bp, Zea mays
  Clone ID: MRT4577_3594C.1
ggtgggcgcaccgcagctgagcctgtagagcacgagcgcgcccgtgagagtggaaaagagagggctggccccgccggcctgatcagatcagcggaaggcacaccgagctcttgcctgcctccactccacccaatggcgatgccgagggcggcgggcgcggggtcgctccgcttcctgggcctgctgaagcagccggagtccgacgccccaccgagctcgactatgcaaacttcatgctgatctccccattgccaggagg

SEQ ID NO: 114548 - DNA, 387 bp, Zea mays
  Clone ID: MRT4577_35950C.1
gggcgacaatcaggggcgggggggggctccaaacattttataacaaagtacgggatgggaacacacaaattctgaacgcattggcatggacccatacaaagtttgctcaaaataactcaaccatgtaaggcctatgcaaataattataagcgcgggtactaaatagagctcccccaaatgaccctaggggtttgcaccctctacacccacttctttatagtccttttcaaaagcagccaaagcatcacgggcctgggagaactaaccgtcttgcatacatttacatacctaccaacgaacaaaactgcatttggaaaacataagggcgaatttgtgcctgatgcggaggaccgctcaaaaacaggtgtggtgctgccgtgcaatgcc

SEQ ID NO: 114549 - DNA, 234 bp, Zea mays
  Clone ID: MRT4577_35951C.1
tccacccacccgtaacacaagcactagcattattgtcatgccacttttgaaagccaaaggctatgctggctcatttgagcccgctggagaggcagctccatttgtgacacccgacggtgacacactcagattttctcattgagtcccgcactatttgatgagcggcactgaaaaagaatgcattccaagcagagctcttggacctagacctgcatgggctgccttcaacataga

SEQ ID NO: 114550 - DNA, 209 bp, Zea mays
  Clone ID: MRT4577_35952C.1
caagagagcgcccgacagaaccaaagcaatgggcctagtgttaacaaaagcaagggatcgagcgggcgacagcgaggaaacgacccagcctttgatagcaacgcgccaggcaccagaagagcaggaccggagcccgaagaagcagagcacctgcctgagccagctaggcaagaagacaaacccaaaaggcaaccaccggccgaccaagc

SEQ ID NO: 114551 - DNA, 318 bp, Zea mays
  Clone ID: MRT4577_35953C.1
gaaagacgccctggagatcaagggggatgccggacaaggacctagagggcgacgacgacaagggcccagagcgggacagttgccgtataggactctcttgccaggctttcaagatggaccagatcaaggctgacatgaataacggcgtgctaagggtcaccgatctgaatagcaaagacgaggaacaccatgacgtattcgagatcaagatcgactatggggtgtgcatcggatggggcctactaggtgtcctatttgcaatccatatatgtccatatccgtaatgcagtgcatattcatatcggaaatgccatgagc

SEQ ID NO: 114552 - DNA, 574 bp, Zea mays
  unsure (1)..(574): unsure at all n locations
  Clone ID: MRT4577_35954C.1
gccaaaacatcctgcaagtggccgctctatactggaaaatcatttacatccatactggatatggcntgggttatgtctggnnacctnttngagactgtggngcggnggtgcgtggnctgggctggngcgggcgggcctgcgccggtgccgccggcttcccgnggctgttggtgggggggggggggttttggggntcctgngttgggttggtgctcggtgcggtgggctggtctggtttcgggcccggntggaattggtggggntgcnggattggngggtgcgtgngttngnngggtggttgcctggtgagtttggccgcgggggtggcggcgggcgtgggggtggngttgnggcttgtggtgtgggtggttgtgggtggttggggggtgggggtgggtgtgggggggtgcggggtggggtgcccggtggcggtgggtggggttcgctggggtgggtttgcggggcgtgcggcgtgcgggcggggggttntgccgttggtgtgnggctggggtgggggctggctggggggctggtttgggcttgnctttgggggnggggggtgcggtggctgggg

SEQ ID NO: 114553 - DNA, 273 bp, Zea mays
  Clone ID: MRT4577_35955C.1
aattcctggttcgacgagcccctcagtcggcggccgcccttaattttttttgggggggcttttataagagtttcggccttttcaccccattgtacaacaaacattagtgttgacaccagatggcccatgaagggaacaacaacaattaaataaagcagtgcaaacagaaccggatgccacaagtaccgatgaactgcggctgggcccaacatggatcctgtgtccatcatgcgtcggaaagtagggaatatggactaccttagggtaatgcaa

SEQ ID NO: 114554 - DNA, 1020 bp, Zea mays
  Clone ID: MRT4577_35956C.1
gttgcaatacagtggtgcggaattaacgtaaatttagtgtgctctctttggaagagactcttcgtccgagagaaggaagaacacggaaggagggacagaagtaaattaaagaaatacaaatatgcaagagagatagagctcagatctctcgccacagttcaacgccccaatcctgcctcttagtccaacccggcaaccccaacctcttggtgcttcccaaattccaactcccaagcccttggtgctcaccaagattcatcttctccccccaatctcctccgcagggaaatagttgttttggtttccgactcccctgctgcatagcataggcactcattcctccctttcgacagcaagcaattttgtgttctcagttgtagattgggcgagattttccttccatccgtgggtgattcaggcattaggattcaatcggcacaatttgttcctgtatccgctcttgccaagaatttcccatctccctgtttgctttctgatccatcttcgatgcgctaagaggcgagatgaatacgaattactcggctctcccattgacttccccctccatcgagctccaacccaacggggccaaatctagcgccgccgccaatggcgtcctcaacggccacgctaagatctccaggcaggattcgttcttgggcgaggtggaggacgacggcggcggggccggtgagcacgacgagctgccgctcatcgggcgacggccctgccgggccgccagaggggtccgacgtgaccgccgccgtgttcaacctcgcgacatccatcatcggggccggcattatggcgctcccggctaccatgaaggtgctcggagtcgccgctgggctcgtctcgatcctggtcatgggggtcctgtccgagatcaccgtcgagctgctcgtgagattctcggcccactgccgcgcgctatcgtcggcgaggtcgtgcacagggcgatgggccgcccggcgagcatcgtggcggcaaatgtgcgtcatcatcaacaacgcaggggtc

SEQ ID NO: 114555 - DNA, 356 bp, Zea mays
  Clone ID: MRT4577_35957C.1
gcttcttacatttgttgcgtatttttttttgatcatttttcattttctttttttttttttctaattttttgttatgacttgtttttttttttttcaaacaacattaaccccgggggaaaaaaaaaaacaacaggggccccaatcaaatgggggggactgttaccccttcacctggggatagacagcaaccaatggcacccgtctgatttttttctgcggtgataactattaaaaaatttaaaggggcgggctccacgatgtgaaccccctggggatcgggctgtccctaaagaggaagggggggagctctttttaaaaaccccccaccgccgtggcccccgccagggatccccctg

SEQ ID NO: 114556 - DNA, 284 bp, Zea mays
  Clone ID: MRT4577_35958C.1
acgcaggcgaggacaggcaagcttgcgtttgggtcaccatggctgcgatggaacggggcggggctggtgtgtcctgcaacgcgacgaggtgcccaactggttctggaggaggctggctatgactacaagatcgggccgatgaatttcggcaccggccagcacaaggggcaatcgcaccacaggcggaacccgtgttggtcaccttccaactcaggaggatggggttgctccccattagaagcgaatcactgtgcttctgtacgctggcaaggacaaccgtgccc

SEQ ID NO: 114557 - DNA, 801 bp, Zea mays
  unsure (1)..(801): unsure at all n locations
  Clone ID: MRT4577_35959C.1
cctcgaggccggccgggctacctttctttgacccccccaccacgcccattttcacactgcacactgcaaacagctcatatcaacacaaactaggtgtacgccaagttcctggaacggaccggcaacggtcccacgaaagcaattgatatttctgggcggtcgcggttgtcttgtacccctaggcgcaactgctcacgccatgccttcagcagctacccccgccatttcaaaggctggcatcacaacatcagccaccggtgaacgtcatattccgtcctctgttcgtccagatggctccatacgcaaagaaatccgggttcgcccaggctaccgcccacccgaggatgttgaactttacaagaaccgtactgctgagggatttcgaaaccgaggcaagagcggcgtgccaggtgctgagaccatcaccaaggaggatgagaccaataaaatgagccctgctgcaaataagaatgccaagcgcagggaagccaggaagaaagcagcagcttctgcaagcgacagcaaggaagagccgaagcctggttctaccgagaacaaggacaaggacgaggcgaacccggagcctgggaaagtctttgatccagaagccgagaaagagaaggaagccaagaagcttgctaagaagttgagacaggctcgcgagctcaaagataagaaggagaagggcgacaaattgcttccggagcaatttgagaaggtcatcaagatcaacgagctaatccgccaattggacactcttgngttcgacccacagggagagaggaagaagagcgagacttg

SEQ ID NO: 114558 - DNA, 588 bp, Zea mays
  Clone ID: MRT4577_3595C.1
accattcggcgcggatgggccgaactttcagagccgcaaacattacttacgtggcgtgacaaactgccatattgagccctgctgaactgctcgcacagggctagcactgctcctacccaactcttaatccacaggtggagccttacagtgtgcaccgtaagatgctcttagcgcaatctaagactgcggagctcctccacctaccgtactggcatcactacacgagattaaggctacgtgggggaccaaccggtattataaacataagaaacattaccaagtggacaaacagaacgaagcaagtgactgctgaatctgcctatgatggctgatagagcccatggcttaatttgaccccacatgctgctcttacaacggacaagatgcacgaccacccttattcatggacaagcgtaatgaaacgctgcgcagctcctattacatgataacatttaactactgcaccttattgcgctcctgatacagctgatggtctcaacaaactactaacctgtgctcaaactaacatacatgccccttgagaggctaccgtcctgacgggaagcccattggtcctcctatgggaaa

SEQ ID NO: 114559 - DNA, 331 bp, Zea mays
  unsure (1)..(331): unsure at all n locations
  Clone ID: MRT4577_35960C.1
tttgttttttctcccctctcgttctgccggccgggccttcgataaggggggggggggtcggccatacgcacaaccggtttctcttcctctcgaagcgacgcagaaccgctcgccagggtcgcagacgccttctgaccctcttctctctatttgccggtgccctcctataagcagttcccnnngtcgagccctcctgtgaaagcacttgttgggcccccaccgccgcatatgcattctataatcgcctacgccattgccgccgccttcggggccttatcgctcagactagactggtcgctcatctacaccgaggcggcttctcacccccgcc

SEQ ID NO: 114560 - DNA, 210 bp, Zea mays
  Clone ID: MRT4577_35961C.1
agacaagctttttttttttttttttttttttttgttttttttttttttttttttttgtcttttttttggtctatttctatcacactgtgtgtcgtgactaaaggagccgagcgcggacccaacctgggcgtaagcaaggccggagcgggccccggggagaaagaggtacccactcacaaggccacacaacagacggagccgaaagcagaa

SEQ ID NO: 114561 - DNA, 1123 bp, Zea mays
  unsure (1)..(1123): unsure at all n locations
  Clone ID: MRT4577_35962C.1
cggccgctcgagccggcgggcgggagttctgacccacctttgggcgctgctcacgcacgcgggcattgttgaccgtccagacatcaacgctgcatcacatgcttgagctgccgacgtgtcaagcgtacgacacttaacccactgcctttgttaattattttgtcgacaacactgtactaccttttcgatcatacaagtagtgatactagtgtgtaacttcgttgtaatctttatctttattacctactaacaataaatcacgcattgcttcggtcgggttgaaaaaaaaaaaaaaaattatcgtgcactcttcttcctccttcccccaaatatccagagagaaggcaggaggaccaaaccctagccgccgccgccccgatccgatggcgccgtcgccgtccccgccgccgccggcgagcggagcgcagtacgcgcaccagttcctcaacaccgccctctcccagcgcggtccctcggcgctcccctacgcggaggacgtcaagtggctcatccgcaaccacctcgtcgccctcgccgacgccttcccctcgctccaccccaaggcggccctcttcacccacaacgacggccgcgccgcgcacctgctccaggccgacggcaccgtccccatccaccacgccggggccacctacaacctgcccgccgtcatctggctgcccgagacctacccgcgctccccgcccctcgtcttcctctcccccacccgcgacatgctcatcaagccccaccacccgctcgtcgaccgctccggcctcgtcgccaacgcgccctacctccgctcctgggtcttcccctcctccaacctcctcgacctcgtcagatccctctcccacctcttcggcctcgacccgccgctcttcaccagatccgtcgcagccccgtctcccactcctcctcccgctcatcctgctcctcctcccgccgccgcctcccccgccatgcgccccgaggccgtctacgctcctgtccctcgcccatacaggttcccggnatcgccccagctcgccgcgcgccagccgcccacagaggacccagccgaggtcttcaagcgcaacgccatctccaagctcgtcgacactgcctatgctgatgctgctgccct

SEQ ID NO: 114562 - DNA, 294 bp, Zea mays
  Clone ID: MRT4577_35963C.1
cctcgaggccggccggggacgtgacgatctcgccatgctctccttcttctctgcggccgccactaaccattccttcgccggacagcgccagaccgagaagaggtcataaggaggcgatatctcgctgtttcacctctctccgcaaggacacagggacccccgacaaggtgatgcgagcaagcgccctgcttgtgcttgagccatggctcacgcaggagctgcacagcaaaggggactgcgagatctgcttcaagaccaaccagttgatggtgtatcggcgagacaccatcacat

SEQ ID NO: 114563 - DNA, 131 bp, Zea mays
  Clone ID: MRT4577_35965C.1
gcacgggcagtggtcttcagtcgtcttgggacctgggaaggtttgcagccctttgtcatcattcttcatggactcctttcactcctgtaacaaaagcgctgcttcctgatcccacctgatcccagtctgaa

SEQ ID NO: 114564 - DNA, 199 bp, Zea mays
  Clone ID: MRT4577_35966C.1
ggggaaacaagaggttactccacattcgtgtgccacgcagcgcaccgactaaaccagcgggtcttgtctcgtaggacgcaccatgaccatcaggacttcaagccaccaccaaaggggccttctaggcctgcagaagaagatgtgcgcttaaacaaatccccgtttaaacgggagccagtgaatgcaatggatgggaaac

SEQ ID NO: 114565 - DNA, 736 bp, Zea mays
  Clone ID: MRT4577_35967C.1
cattgggtacctcgaggccggccggaactggtcgccgtgcaccccctcctagagaggaatcacattccacggctctaaaggcatggcaccatggaccctcgcaacatcgtgtcctacgccgacaccgcttccagctcttcctctcctctctcctctcatgtcctccgcgtgctctgatcctcgacgcccgctcccctcctcgcggcgtctcactgcgtcacctcatccacggagtacaccaccgtcggtggcttcctgtggtcatataccccggcgtactcctccacgtatccttcgaaccacaagctgaggagcatcggccagattgacatcgatggcagtgaccacgcagacgacatcagcgccgaccagtacattgatctaccacaggacttcacttttgagatcataaacaatcctgctgatctgacaataaccctccaaagggagattcgtcggggacacaattatagctgctatatacaccaactttgatacagatgaacatttggatgatgaagatgacaacagtgggacagaggaagaatctttcaaatcactacttcatatgagtggcactattaaaaagccagaacggccaatcctagaagtttgactgcaactttaatgatgatgaactaaccactgaaaatatgacggcgctgaaccgtgataacgccgatgctaagaatgagtatgacgcgccacaattatcggacctggataatagcttgca

SEQ ID NO: 114566 - DNA, 464 bp, Zea mays
  unsure (1)..(464): unsure at all n locations
  Clone ID: MRT4577_35968C.1
cgcagccgcgtcgtaagctggaccctagacggncgcctggtttttttttttttttttttttttttttttgttttttttttttatttttgtgttttaaaaccgaacccccagcaccgaaaaccttcaaaccccaaacaagaaaacgggcacaaccaagccacacaccaataaaggggggggggggaaaaggcagccgggagaaaaaacgcaaaaacacgggccggaacaaagaggggagccgcccgaaaaacaacagccggggaaaaccagaacggcccccaaagaccacccggctggcacaagagggccggggaatacagcaccgggcacagcaggcgaccaggggtccctagggggagacggatacgagcacggcgccacacagcacacaacccggacccgtgaaaaatagacccccgggcgcaattccacacgaacatacacagccggaagcgtaaagcgca

SEQ ID NO: 114567 - DNA, 258 bp, Zea mays
  unsure (1)..(258): unsure at all n locations
  Clone ID: MRT4577_35969C.1
ccggaanacccggggcgacccnnnnnagtctggggaagcggacggacaaagcaggaaagcccccaaaacaaactgcgagaacacgggaaagggaaagccacccgcaacggacgcccagcgtaaaggagaggcaaaacgcacaaaacaaaaaaaacacccacccaaagaggcacgcccaagcccaggggcgacagccgagcccgcaagggaaaggaagaggagaagcccgcaaccaccaacagccacaaagggaggaag

SEQ ID NO: 114568 - DNA, 382 bp, Zea mays
  Clone ID: MRT4577_3596C.1
cagaccattagctttatctactccagagcgcagaagaacccgatcgacaccatgagggtgttgcttggtgcccttgctcttctggcttttgctgcgagcgccaccttcacgcatacaagcggggggtgggggtgccagccaccggcggcggttcatctaccggcggcggtgcatttgccaccttcggttcacctgccaccttcggtgcattttccaccggcggtccacctggcggcggcggtccaactggcaccgcggtccatgtgccgccgccggttcatttgccgccggcaccatgccactaccctacttaaacggcccgggcttagccttattcccaggcacacccatgcccgtgccaacaggcgcattcaagcccgtg

SEQ ID NO: 114569 - DNA, 753 bp, Zea mays
  Clone ID: MRT4577_35970C.1
gccggccggtttcggggacaaacactccacacctagcgaacagctatacacccaaccaggtggagagctgcaagccaccaagaccaaagtgatcgcaacctgtgcggcggcggcggcggcgacgatgagcaggaacaacggcaaggcgtcgaagctggagctcctgaggatgggcctgtcgagggcgaggggcgggccctcggcgacggcgcggcccggcggcggggacagcggcagcaacggccgcgcgacgacgtcgccgcgccgggtgtcctcctcgtcctcgtccaccgcgtcgccgccgagctcgtgcgtgtcgtccgagggcagccccgacgcggccgccgccgcgccggcgcccatggtcctggccgggtgcccccggtgcatgatgtacgtgatgctgtcccgcgaggacccccggtgcccccggtgccacaacgccgtgctgctcgacttcagcgagggcgaccagcgccgcccgcgtcagcgccggtgaaatggaaccaccacgagcgatcgagcacgtctgagttcgtcgttgccttcaagaagtcgtcgtcgtagcttcattttcccattcgcggccggagtttgtttcgattacccaaggaattattgcatagacctgtttcttccgagcggcacggtgccaaagggatcggtctaggtaataatttcatgctttgttagacaataataataagaataataatttcgtcttcctactagtactacgcgatgtgctagtgt

SEQ ID NO: 114570 - DNA, 1281 bp, Zea mays
  unsure (1)..(1281): unsure at all n locations
  Clone ID: MRT4577_35971C.1
catacatattgtctattaaatgtattcatattctaaaatctcagtgttgtatcatatattttattaactgtctcccgtatttgaaaaactgaacctcatcttagagttctacatgtccttacactacactatgagccacaatataatgcatgcacatgcatttcatcaatcgcattgcattgcatgtggctgcagcatatttatgcaccgtccgccggtactacgagaaatgtttttttttattttcgcgtgtggggaacaagagcgcaacttcagttattagcaaaaatagaacaatgcttgtacactagcacaacgcgtagtactaagaagacgaaattattattcttattattattgtctaacaaagcatgaaattattacctagaccgatccctttggcaccgtgccgctcggaagaaacaggtctatgcaataattccttgggtaatcgaaacaaactccggccgcgaatgggaaaatgaagctacgacgacgacttcttgaaggcaacgacgaactcagatgtgcttgtgctcgatcgctcgtggtggttccatttcaccggcgctgacgcgggcggcgctggtcgccctcgctgaagtcgagcagcacggcgttgtggcaccgggggcaccgggggtcctcgcgggacagcatcacgtacatcatgcaccgggggcacccggccaggaccatgggcgccggcgcgccgccgcccggcgcggcggcggtcgcgtcggggctgccctcggacgacacgcacgagctcggcggcgacgcggtggacgaggacgaggaggacacccggcgcggcgacgtcgtcgcgcggccgttgctgccgctgtccccgccgccgggccgcgccgtcgccgagggcccgcccctcgccctcgacaggcccatcctcaggagctccagcttcgacgccttgccgttgttcctgctcatcgtcgccgccgccgccgccgcacaggttgcgatcactgaggcgcacagttcacacgacgttagttatagcgtcgcggctcacacgtctcgtgctgcgtttggacggagcgcgcaccatgcactaggcattacctttggtcttggtggcttgcagctctccacctggttgggtgtatagctgttcgctaggtgtgagtgtttgtcaggcggctcgccgctgttcctcgtgttctataatgacgggggcctcggcccggnttcctgcggcccgggggntccgctggttctggngcggccgcgccgcggtggcgctccggcttttttcccttt

SEQ ID NO: 114571 - DNA, 291 bp, Zea mays
  Clone ID: MRT4577_35972C.1
cgtcggcctgacagtcactagagggatgcctgtttcacgcgcgtgaccagtggcttacctgtgggccccaggcgtcaaccgacggcatgtgcgcgaggtggaggaactaataggccacgaagtgagaaagccctagttagttgggtcgagttgatctggtggcccgactgaattcttttctttttttccttttatattttcatttcccttttccttttagattttcaaattcaaatttaaattctaggttaaattcaaacttgtgaccaatttatccttagattatattgt

SEQ ID NO: 114572 - DNA, 712 bp, Zea mays
  Clone ID: MRT4577_35973C.1
tctcgagcctgacccttacgccttcgctcgcgccgccgccgccgccgccgctacgccccgcacctcgcttcatttcgtgtcgccaagatgacgaagcgcactaagaaggcaggaattgttggcaaatatggaaccaggtatggtgctagcttgcgtaagcaaatcaagaagatggaggtatctcagcattccaagtacttttgcgagttctgtgggaagcttgctgcgaagattatctaactcttcacctccccatctcccctccccccactcactatatacccccctacctcgtcccccatactaccaaattatattatacgcccttacactattctcttcccccccccttctcctttatcccccccctctcttatcaccaccttacctcctcacccccccccccttttcccctcctattccctccccgcccccccctttttttcccccacccccctttatctcccccctcttacttcttatacccgcacacccttctctctatttttatccacccccctatatccgacccctccctcccccttacttacccatatatccccacccccccccccccttactcttctccctcccctccctccttccccccctttcctttttttttttctttcccccccctttcccctttacattcacccattttaccatccccccaaccctccctcccccccgaccccctccccccaccact

SEQ ID NO: 114573 - DNA, 770 bp, Zea mays
  Clone ID: MRT4577_35974C.1
agttctcagacgatttcgaatacctacgcaaatggcagaagacacagaaccttctggattccagatctcctcgaaaccctaacccctcgaacttctagaacctccatggacggcctcgcggcgccctcaccctcccactccggcgccacgtcgggcggcggcgcctcccaccgcaagcggaagcttccgccaccatccctctctgacgccaccgccgacgaggacgacgacaccacggcgccgtcgtcccccgccacctccctatcctcgccttcccgcccgtcgtctccgtcctcctcccattctgacgaggatgacgacgactcccttaccaccttcaccgccgctcgcctcgatgccgcacctgcatcctcatccggcaggcctccgaagcccgactcgtcgtccgcatctgccgtcacagcggcggctcctaagcccgatgccgcgtccgcggcggctggagacgggaaggaggactccaaggggctgttcacggacaatatccagactagtggcgcttacagcgcccgcgaggagggtctcaagcgtgaggaagatacagggaagctgaaatttctctgttattctaacgatggagtcgacgaacatatgatctggttggtaggtttgaagaatatctttgcacggcagctccctaatatgcccaaggagtatatagtccgacttgttatggatagaactcacaagtcaatgatggttatcaggaataataatggtgtaggaggcattacttaccgcccttatgc

SEQ ID NO: 114574 - DNA, 551 bp, Zea mays
  Clone ID: MRT4577_35975C.1
ggacctcgagccggcggggcctttctctacattgccatctcgtcttcgagctcccgaacctataaaggtcgcttccacctggatgctaccggctaggaggaggtatctgatagattcccggggacgcatgctcgtcctcgctcgtgttcctcctcggcgcagcgcttgcggcgaaggccgtatgcgggtggggagcttccgaaattccggaaagatccggggttacgccactcggcagactgcgcggacgcgccgcacaatccagatcgcgatgactttggaccccacctacctgaggagatccctctgcggcgtcctctacgtgctccgccacggcacctggccggagtcctcccccttccacttcttcgcctgcacggcttccccagcgggcgagctcgcctctctccatcgtgagctggcggctgcattccccactctcccggcacatcgggcatcgcttcgactgcacgcctcgtccaggggcaacatcctcctcgttgcggcgatcaggcggtcaacaagaccctcagctactaccgccatctaca

SEQ ID NO: 114575 - DNA, 283 bp, Zea mays
  Clone ID: MRT4577_35976C.1
ccgaggccgggggaagttcctgcggagtgctcaagggcagaagaggtgccgcgtcccgaagaggggaagcggagaagtttgctgctgcccgggtcgcctcgcgacgctgagagaatcgcccagccctccgcagccgcccagcgagaaccggagctgcggccccgcaccggcgtgagtccagctgagctgacacgccgagccggttgtgcctttccgagggaggaatgtgccgtggaatccaactttggaaacgtcgcaccgaattcccgcgagcagcaggaga

SEQ ID NO: 114576 - DNA, 285 bp, Zea mays
  unsure (1)..(285): unsure at all n locations
  Clone ID: MRT4577_35977C.1
ctcgtctactccggcgcccgagggctcctcccagctagacttcatctcccgcgccaaggccctgaggngcgttcgcgctcgccacgcgccgtccctggcgcgagctctgggacccgcgcgcgctcttcgttccgcgcgggttttcagacggctaccggcgggcgcgcgccaacctcgcgcacttgggcgacaatacgcgctcgtggtcctgctcgtcgacttcgcatcatggtctggcgggcgggctccatgctagagtgtctcgcctgcttcgccggctggctc

SEQ ID NO: 114577 - DNA, 524 bp, Zea mays
  Clone ID: MRT4577_35978C.1
tttttttttttttttttttttttttttttttttttttttttttttttttttttttttttttttttttttttttttttttttttttttttttttttgggggaaaaaaaggggttgaatttaattttaggctttgttttaaaccgaggggggtaaaaaaggtttgtttttttagaggaaaaaattcattccaaaaagcaaaaggcggattaatttttggggggggaaaaaaaaaaagcatccgaccattaagttataaaaagggggggggcttgggggggaaaaaattttccccttaaaagcaaatttcggaaaatttttatggtagggaaaaacgtttttttttaagggggccaaaaatttattgattaggggggggcaaacaccttttttggaaaaggggggtaggtgaggaaaaattggttaaaaaaaataaaaaaaatgggcccatgtattccgggaaaatggtttattatgccttacctggaaaaattgggaccaggggtaaaagagagggcagtttcttt

SEQ ID NO: 114578 - DNA, 437 bp, Zea mays
  Clone ID: MRT4577_35979C.1
cgacacgctcgccggcgtcgccatcaagtacggcgtcgaggtggcggacgtgaagcgcgccaacggcctcaccatcgacctgcagatgttcgcgcacaagacgctgcgggtcccgctccacggcaggcacgcgccgccgtctcctccctcctcgtccccaagccacgccgccagagaatggactaaaaatgctgcttccctggacccgctccttaaccttaaaccaccacggagcacagtttcgccatccatgagccttctactacaggggtgccatggcctgacgccggctccaaagggggacctgaacctgaccgatgaatgcgctcaaggccatcacaggaaagccggaagcttatcgagcacctttgtgccgaggagaagccggcaagggctggccctgaggccaaagtctggcggtcgggcagacacgaacg

SEQ ID NO: 114579 - DNA, 281 bp, Zea mays
  Clone ID: MRT4577_3597C.1
gcacaaaaaaacaaaatcaatctggcaatcgccacaaacctatgtcctcatgtcaattggggattgctacaataagggaaaaatagaacaaaagaggtaggctatgtacggcggggggggggataagaggcactgcaaaataaactaccgaagggaagatatctactggaaacttcaaccagtactagttagtggcatgtcaagaaaacggaaacgatgcccctttatgtacaagtttgtttttgggaatcctgagcttcctaatttcaaagaccaatctg

SEQ ID NO: 114580 - DNA, 1215 bp, Zea mays
  Clone ID: MRT4577_35980C.1
cgacacgctcgccggcgtcgccatcaagtacggcgtcgaggtggcggacgtgaagcgcgccaacggcctcaccatcgacctgcagatgttcgcgcacaagacgctgcgggtcccgctccacggcaggcacgcgcctttttttcctgcctgctggtgcccaagccacgccgcaatatatggactaaaatataataaaatagaggtactaaaaattagtccagacatccgtttattgtttaatgcatgctccaccataagattcttgatggcgctaacacacgtgagtgacgtacgccctttcacaacatggttttgtttcagagaatggactaaaaatgctgcttccctggacccgctccttaaacttaaaccaccacggagcacagtttcgccatccatgagccttctactacaggggtgccatggcctgacgccggctccaaagggggacctgaacctgaccgatgaatgcgctcaaggtctactacaggggtgccatggcctgacgccggctccaaagggggactgaacttggcacccctggatgacccacctccaggccatcacaggaaagccggaagcttatcgagcaccttgttgccgaggagagccgggcaagggctggccctgaggccaaagtctggcggtcgggcagacacgaacggcatccagcaggatctgttggctgcgtgggtgccctcgtacggggacgggttgcgcgcggtgaagagatcgtcgagcgctccggagttccaggattcggacagcgtcagcctcgcctcggcgtggctgaagagcaagtggaacctgaaaccggattatgccttcaccctggcgctgttcgacggcatctccaagcctctcctggacagcatccccaagcctctcctcgacaacatccccaactcgatcgttgcttggagaaacaaggcggccagagattagcagcttcgtttcgtctctttacagccaacaaaaaaaaaggcctcgaacggttggacacactgtgctgaaatggcgcgatggatacagtgacacattacttgcacatacatactgtgctgaatctattgtgccaaagcagcagcagcagcagattgggagctgggagatgagcctgggggtgtattcttttcatttttgtacgtacacatctaggaatgaaggcaaacgcctggcaacattcccatgacctaataaagaaatagcttgttc

SEQ ID NO: 114581 - DNA, 368 bp, Zea mays
  Clone ID: MRT4577_35981C.1
ccacccacgcgaccggatacacgaccggcatcaagatgtgtactgcccagtatcctgatcatttccctaaggactaacttagtggccatttatggagcagtttactcagcggtagacacattgggcgaccgctacgacgaacgcaaaggtaagggatcacgcagggcatctcactggcccgttcggtagggcttacatgagagaggaaatgcgactggcatgcctatgcgcctgcatgtggcgctgcaggcggatcgtaaagagccaggtgaacactcaccgcatccctcgctcctgctgctgggcatgctgccagggagacgctgctggacagactacctaactgcacagctgagcagagagacgag

SEQ ID NO: 114582 - DNA, 217 bp, Zea mays
  unsure (1)..(217): unsure at all n locations
  Clone ID: MRT4577_35982C.1
cacccgggnaaaacgtgctaccacaagcgtttanatgggacctcccttacactgaccactcccctacttcccttgccccttttgggtaaggtagtcatccactagctttcctagttaatcagncaagggcgtnccattaaatgcttggggtagcactgttttnnngggtggttntntatgttnttattaataggatgctttgattatggaagcgtgg

SEQ ID NO: 114583 - DNA, 124 bp, Zea mays
  Clone ID: MRT4577_35983C.1
atttgaaacagttcagaattcatctataagattgcctacatatatatatgattctggcaaggcaaacgtgatgcagtcttgacgcatgttccattcggacatcatcatgcttgtcctgctgatt

SEQ ID NO: 114584 - DNA, 340 bp, Zea mays
  Clone ID: MRT4577_35984C.1
tgatcaattcacacatataggatggacacttctgacgtgcgggataccagctgattatgtggatcagcactaacatacacatattcacaacaaagatgggaatgcacctgttgaaagtgttctagcatcggataatctacccagaaggttcaagagtctttctatatggacaagagacttacatgttgtaaaacccaatctgttgcgcagttcaaggatgtacgggactacattttgtcagaatgcccgattgaactttcaactctcttatctgaggtcaaacaagaaccattcaacctttctgaccactatgaatgggttacttgtgacataaactttg

SEQ ID NO: 114585 - DNA, 217 bp, Zea mays
  Clone ID: MRT4577_35985C.1
aaggactacttcacgctatcggccgttcggtgcctgttcctgagcggcccgttgacattgtcgtgactggtatttgcctggcgttgccgttcttttttgtcttgcagcacatccctattttgtcgggtggggggttatcctccttgcccgcgttgatcttttttcccggtgggggggcagcctcgatgtcgattgctctcgccctgttttttcgctt

SEQ ID NO: 114586 - DNA, 237 bp, Zea mays
  unsure (1)..(237): unsure at all n locations
  Clone ID: MRT4577_35986C.1
cccacgcgnccggaggcagatgccgcaacaggctcaacgcgaacgcgcacacagaggggagagccgcctaccacagaagactttcggtcccagcaagcagacgtggcggtgaccttaggagcccccaactacaacgggcgacacccttgctcggacacgactgacaattagcaccgcggggatctcgaagtcaagcacatcgacccggactgtacggactcgccagcaccaatagcg

SEQ ID NO: 114587 - DNA, 762 bp, Zea mays
  Clone ID: MRT4577_35987C.1
ctcatcatttggtacggcgattgaccttctcgaggccggccggggaaaaaatccacaagccacttcagtgcttgcgatcgcgtcggccacgatctcttgcgaaaaagcttaccctgtgtctgtctgtccgaccgtcagtccgtctaacaatcgatttccatgacgacgtccccgcgcgtgtggctgctcgccatggcactggcgctcgcctgcgtgctgctcgtgaggtccgccgacgctgctgccgaggcgtccccgactccaggcggctccacctacgggtgcaacccggccacggacaagtcgtgcaagcccgagggcgtgggggtggtgctgccgggcggcggcatcgacctcgacggcgacggtgacgaggacgagctgccgcagttccagccccacctcatgatcctcggccatggccactgatgagtgtaaatggttggttggttggtcgtcctcagccgatctactggacgacacgatggcggtcacatttgcgtccgaatttctcttgttaaattgaggccagagtgattaaatgagcatatgatggtaatttattcaccgtgtattgcctgttcaaacatgaaagtgcactgatacaattttaaaaaacttatgcaaaaaaaaaaaaaaaaaaaaaaagcagcggccccgcccagattgctggtttgaaaaaatgaagctggagatagttttacataagcaaacataatcttcagttataaaggaatataaaagccattgctattcatgaac

SEQ ID NO: 114588 - DNA, 478 bp, Zea mays
  Clone ID: MRT4577_35988C.1
cccgaccactatttttaacaggctggttacattttgacttttttgtacataatccatccgtatacatacgtacgtacgtacacggatgggagtcgactttcctaccacaagtcctaactacaacggaagatctgtttttaacaatttccacagaaacattaactaaataagaaaaaaaaacttttgcccaaacaagagggaaaaaagctacttatttatgctacaaacaaaaggaaaaaaacgagcagtacgcacaccaaccacgagtttgcagcaaacagttagcgtacgcggcacgggggcccgcgggtcagcggtcatcggggaagcactcaagccagcggttacgggggggcgccccaaagcacctgggggagcacgggggcctcctccgccggggacacggtcgttttccgaacccgccgaaggatctccagtttcgcctaacgcttttcccgggggtttaaccccacgccca

SEQ ID NO: 114589 - DNA, 364 bp, Zea mays
  Clone ID: MRT4577_35989C.1
caattaaaaatcttcaaggtgctcatgggtttacccttttcagtctgtacaaaaattgcacccaaaaaaagttagggaaaaagggttttaaagaagaaaagggaaaaaaagggaagaaaccgaggagaaagaaccccttcaagctttggcaagggtttgccacaaaaaagaagaaaaagaaaaatggtcaatccttaatttcaggttacgcatttggatcgaacttcaaacaggatgagcttgagataatctggattacagacccttttgcacgcaggagaggcctctactaatgggtgaagggagggcaaactcttttgatcttttcgttctttcccgttttcacccctagccttcccagctt

SEQ ID NO: 114590 - DNA, 472 bp, Zea mays
  Clone ID: MRT4577_3598C.1
tttatgcggacgcgtgggcggcagcggcgcccgggccgtcgcagccggcggcggcgacggcagcggcgcccgggccgcggagctcgaggcggggtacacggccgggctccgtggcatggatgcgtgcaccgggggcatgctcagctacccggcgtcgcccttgtacgccaggaacctcgccgaccgcaacgtgaccttgctcgccgcgttgctctgcagcctcgtgcctgcgccgctggcttgaggacgccgtggttgatgtgttaatagtcctagtcacttggctagccagagagtattcggttgcagtgtatgtaccagtagcactgttaatcggtggaaccagacaagcgattaaatgtgccaaatggtttgccatttttgggttcttctctgatgaatatgaactggttggatttactaaaaaaaaatgcggcagtggaaccgagaattttgtagcgggggttaatct

SEQ ID NO: 114591 - DNA, 188 bp, Zea mays
  unsure (1)..(188): unsure at all n locations
  Clone ID: MRT4577_35990C.1
ctcgaggccggccgggccgggagtgacctnccctctggcggtctggcctccgtccccacaccaaactgcgcgagcgcgaacgagcacggacagcacagcggcacagcgcagacgcggcggcggcccaatccggagggcgcgaccgttcctttttctgggggtcccttcctccctcccttcgttcggtg

SEQ ID NO: 114592 - DNA, 372 bp, Zea mays
  Clone ID: MRT4577_35991C.1
atggccctgtttggatccaaggagaaggaccggcgccgccgtcctcgaaccgaagaaacgccgccgtcctcgagcagcctcaccgttgccatggacggcgatgccttcgacctcaactcgcaggcgccggagactgatggtttcccggggcttcagctatacggcaacatcctgtccgactctgatggtctgttcgatggccgtgccagcggctctgtgcttccttcgtatcgcccaccgcgtgccacacaagagtttatttgtgttatttgtgtgtgggagaagccacacaagagtttgccacacaaaatccggataaggaaagatttaaatgagacaaatgattataaaatagcatttattgtaaactag

SEQ ID NO: 114593 - DNA, 124 bp, Zea mays
  Clone ID: MRT4577_35992C.1
gaaaagttttgggtactacagaggggacacactgggttggttaacagaagcaacccacgacagaggatggtggagggccaacaaaatggcctgatgctacgacgccatcaatcttgagtagccc

SEQ ID NO: 114594 - DNA, 472 bp, Zea mays
  Clone ID: MRT4577_35993C.1
cactatatgtgaagctggaacccctgccgggcgcgggtccaatatacggggcgcgccacacgtgcgctttttattaactgcaaccatagcgctgatgctaccatgtctcacaatgctcgaagcttaacagctgtctagaaattccggttcactagaatgaataatactacctgcaatgagaaactctatgctgttgttatgagaccatcggcatcagaaatgcagactgtgtgcggtgtaacacaagttgctatagtataccttactaccatgatggtctctttcatatgcacacaagggggatataatagatcatgactggatcatatgctggctcagcactagctctgggtttgcatctgtcaaattaactttccgatagcattattcaggactggcacaatccccaggaacatgttcaatcgtcgacagcattagatggaccatggcccacacctggtatagttgcagt

SEQ ID NO: 114595 - DNA, 225 bp, Zea mays
  Clone ID: MRT4577_35994C.1
ctcacgcatccggagcaactgctccatattcttgtatacctactgtaaactcgttgctaggctggcgaatcaacaatggcgcgttcataagcaactgtaaacggatgcgacactcggaaatacagttgcttacaaacaggcgcagacttcttcaccggaatgctagctgttacctactgatgtgcaacttcaagcaattcacgccttgcctgatattgctgaact

SEQ ID NO: 114596 - DNA, 299 bp, Zea mays
  Clone ID: MRT4577_35995C.1
ccaggcgtacgggcaggcgtgcagacaagccttcgcacactcgcgttctatgaccgccacatgagcatcggctcaggcgagggacatcagtgccacatcaacatctcgttcaacgcgggaaacctgtaccaagtcacgtacacttgcaatgcgcggaagtactccgtcttcacttgctacccacaagaaaggcccggactacttgttggatcatacgcacatgacacaccctgaaacgatcaccaatcacactagcttgacatacactgtcctgacaactagatctatggcattggttg

SEQ ID NO: 114597 - DNA, 170 bp, Zea mays
  Clone ID: MRT4577_35996C.1
agcagttgcatagattggcctcaatgccttattctgcgctagccaaactgaaatttcccccctctttaacctacctatagcagaagctcttaccccactccttacacggtaccgcgcctcacttccacacttacccaaaaacttcttccctccacaattgggccaataac

SEQ ID NO: 114598 - DNA, 153 bp, Zea mays
  Clone ID: MRT4577_35997C.1
tccatctgttccaaattaaaattgggtttatcctggtgggtgcgtgcgcgctctgtgctgtgtggttccttcggtggctgtgcctcggctgtcctgtcgctcggggcgggtccggcttctcttcggctctcttgttggggggggggggggggg

SEQ ID NO: 114599 - DNA, 735 bp, Zea mays
  Clone ID: MRT4577_35998C.1
gggaaagacctcgtttcctggttcgactctaccgtcggatcgcgcccaacccactgcgtgaacgggcccaggcggccatggccaccgccgaagcaggcccgcctacccgttcagctatttcgcacgaggcactccgcgctgacgatgcttcttcgagtccaagcgcgtcgcctctcgtcaacgtttcaggccctgtgctgcactcacaacccctcatgaagatgccaatgcagtcccaccagcacgcacaaggttccacgcttcgcttcgtaagtagattgagataaacgcggcagatggccctactacttgttccttgtccgctaatattgttgcagctatacacttcgtcccttgtacatcttgatttttgttttaaccgtgtatctagatataatataaacctaagagcttagggggtgtttggtaacaaagtttttctgcagtattgaagcaatattgtagtattgagtaatactgtgatattatatactttgaggtgtttggaaactcatttgaaatctttgtatactaaactgtagtattgtaaatactgcactttttgcagttttggaaactttggcctcaaccaaagtttttctctgtaaagagagcgccagctgggttccgctctggctgattggtctaaccaaagtttttctcaacaccttgatgtattggatactgggtgtattcgaaagctgaagcattgtaaactatagtaatatcatgact

SEQ ID NO: 114600 - DNA, 185 bp, Zea mays
  Clone ID: MRT4577_35999C.1
ggccgacggaccctgacatagcttttgcctctcacaagcacaacgaccacccctgctgtgcctactgcaggatgatacaggctgattgatagccccaggagcaactgattcaacagcggcatagacaggacatccgttgtgactcaaatgacctcatgctcgtctcacaccgtacattcatcgct

SEQ ID NO: 114601 - DNA, 250 bp, Zea mays
  Clone ID: MRT4577_3599C.1
aactttcttatttgttcacttaacaaacacatccttacattctcattcttcaatttggggttttgaggtcattgtgcaagggggatcaccatttatttacacatctttcttattctttctcaaatattgaacattaaccaaatatttttctaacatatgcattaatacatctatcataaaatatatcatcccttttttaaaaataatacaaaaatctttattgcactcttaacctcctttactttgtaac

SEQ ID NO: 114602 - DNA, 209 bp, Zea mays
  Clone ID: MRT4577_359C.1
tcgcccacgcgtccggcgggaccggagcctggccgctcgcgttcggtggaatcgccttcccgtcgacaccgagcgagggaagcgaggccgtttctgatgctccagtccctttcataattcctcggatgccgtactaaattaataaaccatttgcttctacaagggaggtacttgtccaggttacacatttaatgccatcctacaagata

SEQ ID NO: 114603 - DNA, 843 bp, Zea mays
  Clone ID: MRT4577_35C.1
gccggccggtccgggacctttagcgttagcacagacacacacaggtaaggagagcgagaggtgggttgggtttgatcggagacagggacgaggcagagcatgggtagggggccatcaacagaattccaaatttgatttctgtttgctcgctcacaaaatggagggactcaccacaaacacactcaggcgttgttgctccctcccctgcactgcctcttccctggctcctcaccgtctcccatccacctatcctctctctttctctctctcgttatggttttgtataattttttttcctgcattcttttctcagtacaagtcctacactaatttggctgtctttgcaccagtactaataaacaccgcaggtccctgcaatagggtttacaacaattctattgtaatgactgctgtaaaacatccgcatcatttaattcaactttccggtttcagtcagccctgcaaaagtgctcctccgttcgtccgcgtttggtgttggcttctgcggctccggtgcccagagttgctgccggcggaggccgagcaggagcgcaactaacaagagcggccaaggcgccagtgatcctcaccatggacaggagatcgatggagatgagcgtgagcttccgatgcttcggtacccgaagaaaagaacgggaacaaaggcgagaaacatgatccacctctatgcttttttggcaacatatcctatgcttaaacagttatggtgttcaaatgtacacattaatagagcgtttggtttgaagaatcacaccatctaaattgaggtggtgcatcatgaatttattccttaaaaaaaaaaaaaaaaaaaaaaaactcttc

SEQ ID NO: 114604 - DNA, 995 bp, Zea mays
  Clone ID: MRT4577_36000C.1
ttgggtgcctccctcgggccggcggatctccattcgttctccctccggcctcccacatcgcgcgcttcttttttttctctcccattcctatcccatcctatctggtcctaccattcctcgcacgaagtcgacggtggaccgactcgcacatcgtctccgacgtggcggtggtggtactacgcagcacacgctacgcgcaatggcgaggaccacgcggtcggcggcgacggagcgcgcgtacctccacttcgcgccggcgccgcacggaggaggcgtcgtcgtggtgccgacgagccccctagcgggcacgggcgaggacttcgacgagtcggacatctggggcgcgttcgccccgagcgccgctgctgcgcctgctgccgaggcgccgccgccgcgggcgcgcccgtttgtgctggccgcggccgggaaggcgacgacgaagccggcggctcctgcgcacgggtccctgccggtgaagatcccggactggtccaagatcctgggcgacgagtaccggcccgcgggataccaccacggctgggactgggaggtggacgacgccgacgacgacggctccgtggacgcgctggtgcccccgcacgagctcgcgtgccggcgccgcaccgggtcgtcgtcagtacactgggtcgtcggtaacacggtctaggtccgggacgcggggttccaggactgactgaccgtccacagctgactcgacggcggcggcgacttggtcggggcgcggacgccattttgcactcgctatagccggcgtgtgcttcgctatagctttggcagaggaatttaggtttcgatgaaatttaattgagtcgggaatagttgatcgttgcttcaggtagtggtgcaggaagttgatgggtgttgtcttttagtgagtgagttttttgttttgttttgcgagagctagcgttttagctagtccaccccttttgctgtgcgctaatttaatttagcggtgtttgatttgaccaaaa

SEQ ID NO: 114605 - DNA, 668 bp, Zea mays
  Clone ID: MRT4577_36001C.1
ctacacgacctctgctcctctccttgctaatccctctcctctgctgatctccaaggcaactaaatccccctctccactagctgcaagtcacatcggtgtgaaggaaggggcacggggggtgctggtacgggagttggggcgagcaggagattgtgggggcggcggccagcgagcttcaacaggccggtcggcgaggttggtgatggtcggcgacgacgctggtaacagccgagctacaaccgcaagctgacgagctaccaccggctggtgtggatgctacaacccttgttgggcgagctgcaacctgcaaggagttgttactacctcgaccggcaggcgcgacggcggagcacacgagatgctacaaccgttgaggcaggagctgcaaccgcccccggattttgctggaaccagtgacagcggcgagctgcagggtgaccatggcggggagtgctgcaaccacgaccaggtttgctggaaccgactgggcgatttgctggaaccagcgcccaaaagtgcttccactggaattcgttctttttgtaccagcgattttttgctaccaccacagttttgttttgctggaaccaacatccaaaaatgcttccatcagaatttgttcttcttgtaccagcgattatttgctacaaccacaattttgttttgct

SEQ ID NO: 114606 - DNA, 140 bp, Zea mays
  Clone ID: MRT4577_36002C.1
cgcaagttgcttaaaaagagaagaggcccctaaaggtcgactgtaaaaagaatggggaaacattgaagggcaaatggaaattagaaagctttgaaaatttggtcaaaatttcgaacaaaatatgtcgaaaaccggctaat

SEQ ID NO: 114607 - DNA, 984 bp, Zea mays
  Clone ID: MRT4577_36003C.1
ttgggaccctcgggccggccggactatctccattcgttctccctccctccggcctccacatcgcgcgcttcttttttttctctcccattcctatcccatcctatctggtcctaccattcctcgcacgaagtcgacggtggaccgactcgcacatcgtctccgacgtggcggtggtggtactacgcaggcagcacacgctacgcgcaatggcgaggaccacgcggtcggcggcgacggagcgcgcgtacctccacttcgcgccgacgagccccctagccggcacgggcgaggacttcgacgagtcggacatctggggcgcgttcgccccgagcgccgctgcgcctgctgccgaggcgccgccgccgcgggcggcgcgcccgtttgtgctggccgcggcggccgggaaggcgacgaagccggcggctcctgcgcacgggtccctgccggtgaagatcccggactggtccaagatcctgggcgacgagtaccggcccgcgggataccaccacggctgggactgggaggtggacgacgccgacgacgacggctccgtggacgcgctggtgcccccgcacgagctcgcgtgccggcgccgcgccgcgtcgctgtcggtgaacggggtcgtcggtaggaccctcaaggtccgggacgcggtgtggaagcggaccaccgggttccaggactgactgaccggcggcagcggcgacgacaacggcggcgacttggtcggggcgcggacgccattttgcactcctatagccggcgtgtgcttcgctatagctttggcagaggaatttaggtttcgatgaaatttaattgagtcgggaatagttgatcgttgcttcaggtagtggtgcaggaagttgatgggtgttgtcttttagtgagtgagttttttgttttgttttgcaagagctagcgttttagctagtccaccccttttgctgtgcgctaatttaatttagcggtgtttgttttgtttct

SEQ ID NO: 114608 - DNA, 648 bp, Zea mays
  Clone ID: MRT4577_36004C.1
cattgggaccctcgaggccggccgggccttgatcgagatagatccacacctataacttatattgacgcgcatgaactcaagcccagttcttgctgacaacaatgtgaagtaccatgaacctgagtactggaaatttaggatactaacgaataatcaccttcccccatgctacagtccatatatatgccatttccaaagatctggcgacttatatctcaatcaatgctcctatcttgcacaaatacgcaaacggaacacgcgccgattggatccagcatcatcaggcttggaagttaatcacatccatgaaaggaacatgtgctaggtgaactccaccacatctgtgagtggaaagggcacattgctcatgactgcgtagcgtctttcgactggagctgcagtggcatatgcaagtctgttgataggatcatgagatgtacatgctcagctgcagagaatggaattcagcacttgcgtagtgtgtcttgatctagcacatacccatcctttgcccaaacatatgtaacataactgaaaatgtatgctcgctggtggcaccagcatagatttctgacaactcctccagtatccttgtcgactcccttagatcatgatcatgccccgaggaacattgccaatgctaactct

SEQ ID NO: 114609 - DNA, 278 bp, Zea mays
  Clone ID: MRT4577_36005C.1
gattgatctcaggcgtctttcgggatgaatctaaggcattgggggagaaaaactatgattataaatttactgccgtgcacgatgtgtgatcaaaccaatggttgcaatccattaacaaacacgcctaaaatgcatctatatatcctgtcatcattacaatagaagaccacgtaacatttcaattccatgaaaacattttcaacatcttcatcaacaattactggaccatattatactatccaacagatcacacccatgagctcaaataattaccatta

SEQ ID NO: 114610 - DNA, 1006 bp, Zea mays
  Clone ID: MRT4577_36006C.1
ttgggtccctcgaggccggccgggggatccacttcacacttcacctgcgttatttaactaataagactcgagtaatctatcatcgttgcgcatcagcatccacttctattcactctattcattcattcttttactcagtcgcttcttcaatttcctcacggtcaccagtcagtaaccaaccgcaccttcaaaatgcgtgtctcatgttttttcgtgtctgttgccgttatctttgctcagcaagctagtgccgcccccatccttgggcttaccactcttcctttgattgagggccacagcggtgttacgagtagcctgtccaacaccctccaacctgttccgctcgtcggaacattaactgacaacgtgctcaagggcaccagcgaaggggatctgatttctaccaccgaactcactggcagcgacctcgttaacgacgacatccatctgggcgagatcatccaccccctcgacaagcgcgctgaaggactccctcttgttggctcccttccgggtcttggtatgcttggtggctctagcggttcttcaggggtctcctcgatgccgggtcttagcaccctttcctcgatgcctggccttagcaccctttcttcgatgcctggccttagcacccttacttcgatgcctggcctcaatcagctttcctcgttgggtggcattcaaggcaagaacccccttggcggcctcacttctgccctacccctgggtggattcgtgaagcgtaactacggcttgggatccctgccgcttattggctcactcccagttattggctccgtgacatccatgcccggcctgtcatcgcttccattgatctcatcgagttcatccgactcatccacgtcgtcggacaccagcacccaattgacttcgtccgacaccagcaccactcaatcgtcgtcggacactagtacctctgggctcggaccagtctctagcattttgaatcctttcgtcagtggcttcggcagcagcttcgcttgag

SEQ ID NO: 114611 - DNA, 909 bp, Zea mays
  Clone ID: MRT4577_36007C.1
tgggacctcgaggaaaccggccgggtctgaggcaaaagagaatcccggcccgtgtccagaagacgcctcagccaccgcaaaatccccaaatccgcggcggagaggagagagccggagagaggggcgcagccagagagatcggagaaggggaagaagatggtgcgggtggcgacctacttcgcgatgaccttcggggcgttcctcttctggcagtccatggacagggtccacgtctggatcgcccttcaccaggacgagaagaaagaaaggatggaaagggagctggagataaagagaatgcaggcagagttactggcccaagctaaagagaatgaatcatgattgtcatttgtccaatggtttcaggcagttcctttatcgtatttcctctgctgtattttccatgcaatatcttgactgatgtatgctcatgctcagcacctccaataaagcgagacatgctatagcattgttgaatgcaagtgggtatgcagtttgcagtatgcttatgttgaattgatgtaacttagccgaactgaaagaggctgccccagcttgattggaacagaggaatttgctgctgtttttgttcttattacggaacaacacaagtcaactctaaaaaaaaattgtttatgagtctggttataaggtgttgttttgtactgagatttcattgttcacttgaagaaacctctgtcggaggagcagaatgcttggtgctgtttaagttggctcgtgttatattgctcatgttcggagcatacatatccaacatgttggacgcttttctgttgtgccattctaagttaatatatgtaatgctgtttctgcaccggtgtagttttgatcaaaaaaaaaaaaaaaaaaaaaaaaaaaaaaaaaaaaaaaaaaaaaaaaaaaaaacaa

SEQ ID NO: 114612 - DNA, 251 bp, Zea mays
  Clone ID: MRT4577_36008C.1
aactgacatctccccgcatccaataagcttgtctcatctcagctcagttggttcctacattgtgagtggatgactgactgtggggctatgctgatggggttccacatgaggtactcggagacgcccaagctgctgatggaccttctcttcctcctcaaccacctgcgcaaggctctgctccttggctgctcatcctctcgtacgcctccgacgcctactccgacactgactctcactacactggtcatcct

SEQ ID NO: 114613 - DNA, 720 bp, Zea mays
  Clone ID: MRT4577_36009C.1
ctcgagccgaatcggctcgagcggctcgagattctttttaaggggggtagagtgtaatatcccaaaaaaaatgttgaccaaaagttaatctctggtgcgtggatgaggtaaagggttgtgggccattggatgcaaagatagaagtcatctgaggcgtcgtttctttctcccacaaaaaccctaggtggccacccctttttttcccttcacccccccctcttggccgccaccccctttttctcccccttggctggacgccccctccccctatggcagccatcctccattgcttcctcccccaagatctccccctacgcagcaaggatcgagaaaaggaggggcacgttgaattgaagaggaagagaggatcaaggagatgttcttccccatctcctcttgaagatttcttggggaaaccctagcaggtggctacactccagatcatgtctagtacatttcttcttcttcgatgaaggtgcttgttgctcatcaaggggagtgggaagtagcagcacatccaccttcattctcataataatgctgcccagacgcagccatgatttaattagaaacttcttgtcaaaggatgtttgtttttaactagtcgtgcgcactgattaattcagttcatgttgttatggttgtcttcccattgctagcagattattaatgtcttatatgttttcttatcatgaaaaaaaaaaaaaaaaaaggccccta

SEQ ID NO: 114614 - DNA, 247 bp, Zea mays
  Clone ID: MRT4577_3600C.1
ttgttttcatagtgctgacggttatactcaacacacaccagttacgcggggttaaaaacaaaaggggtctcaataataataagggcgcgatatgctcgggtcacacgaggaaagtttcatctctacgacaccacccctggtacttaagacgaccccggatttgttcccccaagggccgtatccttccgagccaacaaaaaacataatggagtaacactagaccctccacgggccgtatccaccccac

SEQ ID NO: 114615 - DNA, 718 bp, Zea mays
  Clone ID: MRT4577_36010C.1
gacaagccaacccccctccgcctcgcccgtgtggcctcctccccgcctggtttggagttttcccatccttacggctcggttcgaaccccaatcaactatcctccggatcggatcatggcgacgacgcaagagcgagatgtggcgcagccctaacgacggaggaggcgacgtgaagtaactatgtggtggcggagcgcaaagtcgacgaagactctctctgccgccttctcacggtacggccctgcactctcttccttcccctctcctatccccgcttgtggaggcggtcagggcggccaagcagagacgcggtcagggcatggtcacgacatgcatcagagacacggttagggcgcagttaggcgatcagggcagccatacgtttttgtctgaaggctatcatccttttttatcgaacctgcaagcttgctaccttacctaccccatccattccaaagctccactacaccagacggccgtcacgaattcctatagagtgttggtcgataatttggacgtacaaatgatagtgttggctttttggctggatgttcctctcttgtgttgtccagtaaatttgtaagttaaattcaccttgaccaatttgaacaatggagtcgcatgctcctcacataattaattcagcgacaccatgcttttgtttcatgtgtgaattaataacttacaatattaatcttaagacgtgttctctggtagc

SEQ ID NO: 114616 - DNA, 432 bp, Zea mays
  unsure (1)..(432): unsure at all n locations
  Clone ID: MRT4577_36011C.1
ttgccggnaaaacttcaccccccctcttggccgccaccccctttttctcccccttggctggacgccccctccccctatggcagccatcctccattgcttcctcccccaagatctccccctacgcagcaaggatcgagaaaaggaggggcacgttgaattgaagaggaagagaggatcaaggagatgttcttccccatctcctcttgaagatttcttggggaaaccctaggtggctacactccagatcatgtctagtacatttcttcttcattctcataataatgctgcccagacgcagccatgatttaattagaaacttcttgtcaaaggatgtttgtttttaactagtcgtgcgcactgattaattcagttcatgttgttatggttgtcttcccattgctagcagattattaatgtcttatatgttttctc

SEQ ID NO: 114617 - DNA, 477 bp, Zea mays
  Clone ID: MRT4577_36012C.1
ctcgggggaaccaaccaaggcgagggggtgttcgggacaagaattcagggcccgtataaagggggggttttttacttacaaaccctcacgtaaaagaattttggggccaacccacgggatctttgctactaaaagcagccaggcattttttttttatttctaaagcatttttagctccctacagctggccaaaaggaacgggaactttaaaggggaacaggaccccgatgggtaaaggggactaaatgggggcagggggctccttgggcggcataccctggaaatgtttgccccacccaaagggattgacgtcgcgggggggccccttgtgggggcgcaccaagacaaccacattcttgaggggggaataagttgggagctgccaatattcaatggcaatggccggggcggggacttttttaatcttgccggcctcgagggccttgaggaattcggtatatgagggggaggccccca

SEQ ID NO: 114618 - DNA, 488 bp, Zea mays
  Clone ID: MRT4577_36013C.1
gttagacaattttatcaacagaattaaaatgtgggttggttaaagaagttataaataatttcataagctttccagattgttaaagagtgcattcatatgatttatgaaactccagttatgtttgttttactgtggctgttgctgtttgcctgacaaaaatgagcgggtctgttcactggtgagtttcttctagtaaatggccgaattggctcttccaactatggagacttttgtagagggataaaagttcttactgtcagcagaatttcataatttttggttcagtagtttgggagatatcgaattttgaagttaactaggctgctgtctaaaatagattcagtcagttatcttgtcagatgttttagaacttattgatggcagaatttaattatccattgaataccgaagttgtagagtgtttggtgtagatactcctagagtaatttttgatatcaccactgttttaattttaaagatacaaaatt

SEQ ID NO: 114619 - DNA, 670 bp, Zea mays
  unsure (1)..(670): unsure at all n locations
  Clone ID: MRT4577_36014C.1
cgggtttgtcatcagtctaaactgtgatttggctgcgcagccgcagatgccagctagagtttaccacgcaatcggcatggcacacatgctagatgggagagtggctgctcagtgatgttcctgggccagatcctcggcctacaagcgaagatgaatggacagagagggctatgaccaaattagattgggccagaagaacttggatgagtactcaggattttttcccctcacacctaggctgtggctttaggcccatatctgccccagctggtagtttgggtgaactcacttctgactcctttttctttttcctttgtgacctatggctctaagctgctgttttgtggtctcctaaacttggtaaggcatccactcgcggcaccccttagctctatgtttaagcataaggtgatagtcaattgccacggccacctcatcgccttaaggatgtctctagcagcctccctgtcccacaacctatctcactccctatttcaaacttcactctgcanacaatgcagtctacantgtaaacgtctatatatacatgctccgcaggagatgaccatgatctatgtcactgcagatttatatgttgtttgttcgttacattttggtttttttttggacttgtccggagggcttcaaactgtttacaaacggttttggg

SEQ ID NO: 114620 - DNA, 477 bp, Zea mays
  Clone ID: MRT4577_36015C.1
gccggccgggccgggctttttctcccccttggctggacgccccctccccctatggcagccatcctccattgcttcctcccccaagatctccccctacgcagcaaggatcgagaaaaggaggggcacgttgaattgaaggggaagagaggatcaaggagatgttcttccccatctcttcttgcagaatttcttggggaaaccctaggtgcttgttgctcatcaagggaagtgggaagtagcagcacatccaccttcactctcataataacgctgcttaggcgcagtcatgatttaattagaaacttcttgtcaaagaatgttgtttctaactagttgtgcgcactggttgatttagttcatgccgttatggttgtctttccattgctagcagattattaatgtctattatgttttcttatcatgatatctatttatactttattgcttcccgaaaaaaaaaaaaaaaaaaggccccta

SEQ ID NO: 114621 - DNA, 951 bp, Zea mays
  Clone ID: MRT4577_36016C.1
gggcccccttggctggacgccccctccccctatggcagttatcctccattgcttcctcccccaagatctccccctacgcagcaaggatcgagaaaaggaggggcacgttgaattgaagaggaagagaggatcaaggagatgttctttcccatgtcctcttgaagatttcttggggaaaccctagcaggtggctacactccagatcatgtctagtacatttcttcttcttcgatgaaggtgcttgttgctcatcaaggggagtgggaagtagtagcacacccaccttcattctcataataatgctgcccagacgcagccatgatttaattagaaacttcttgtcaaaggatgtttgtttttaactagtcgtgcgcactgattaattcaaaaaaaaaaaaaaaaaaaaaaaagcggtgagggcgtccgcggagacgatggcgacggagaagctgggcatcaaggtggagcgcaacccgcccgagtcccgtctctccgagctcggcgtccgccagtggcccaagtggggggtgcgagaagagcaagttcccggggacgtgggccgccaaggagacgtgctacctgctgcaggggaaggtgaaggtgtaccccgagggtcacggcgaggagttcgtggagatcgccgcgggggaccttgtcgtcttccccagggcatgagctgcacctgggacgtcgccgaggccgtcgacaagcactacaacttcgagtagccgacgacgacggcgacgatgtgtggtaagcggtggcagtaattggtgatggcctagacgcctagtccaaatgtttggattgctcccgctagcttcctagttcctaccacgtgcttgtattgtagtcttgctgtgctcttgtacactgaacctctgttgctccattcaagagttaaacagcataataaagctccggattagcggactacagtgttgcactatc

SEQ ID NO: 114622 - DNA, 3027 bp, Zea mays
  Clone ID: MRT4577_36017C.1
cccctttctcccccttggctggccgccccctccccctatggcagccatcctccattgcttcctcccccaagatctccccctacgcagcaaggatcgagaagaggaggagcacgttgaattgaagaggaagagaggatcaaggagatgttcttccccatctcttcttgcagaatttcttggggaaaccctaggtggctacactccagatcatgtctagtacattatttcttcttcgatgaaggtgcttgttgctcatcaaggggagtgggaagtagcagcacatccaccttcactctcataataatgctgcccagacacagtcatgatttaattagaaacttcttgtcaaatgatgtttgtttttaactagtcgtgcgcactgattaattcagttcatgttgttatggttgtcttcccattgctagcagattattaatgtcttttgtgttttcttaaaaaaaaaaaaaaaaaaaaaaaaaaaaaaaagaaacaaaaaagcaacaaacaatggcgcccaagaggaagaccgcgaactcgtctgctgcagtgatccccgccatcgaccccaacagtcagttacccttcgcagggagacaggcagatgttcgtactccgagttggactgagtctcccacggaccaagaagtagccgaggcgggcgtgttgcttactgaggttggattactgaaagagagaggtctgactgccgaagccgtggtcacagattttgttttcaaaaacattcagccgctgaaggacagggcctatccggcatatctttaccgagggctggccgactcaactcgagttactaataggagaattccttctgttgatttggtgagccgacttgagatgatccttaggggtaaggtttcaaacgttggagctccagtggcctactcggcttggaacctgccttctcccaaagatttcactctttttgtgtccaatccgcccgtgacagatagcaatttgggtcttagagttcgaccttctgctgaagaggtccgctccttagttgcttcgctcggggagatacctgatgatgaacgtcagatttattttgaagtgcccctgaaccctagtgacgcagacataaatgacatgctcgatctgctagctgaggattcatctgatactgctcctgatggtacattgatagtggtgccgcttccagaggttgatgcgaccttggatgtctcgaaacctgccaatactcgcccgaggcgtcccagccgaaccagtcagcccgagccttctgctgatgagcagaaaaggaaaagaagacgcctccggcgagtgtctagctttgatgaggatgccagcaccttagctcctactgccgaagaaatgactgcaactggtcttgctgacattgatcccaatgggtgcgctccgcctgctgctgacctcaatgaggatgctgtttgtgctgttgccgtggaagatgaggaggaagagaatgaaactccattaactcggaagaacagtcggcagttcgtcgctagcggtggtagtagtggggttccttctcctgccttgtctactcttattggtctgcaagaactgtccatggccaattttgatcaagctctagaggatatggtccctgagaacttgctgatggaacctgcagacgttgatgcaacagaagcttgtgccgccgtgccagatgctgggttgaggtcgtcccgtgcctcgtcgaccttagagcacgatctcgagggtcgggataatgacttggaccgtcctgatcctgtggaaacagctgaaggcccgtcgaccttagaggtggtcacggcagagagcttggatcctttgaatagtgctgacacgtgcccagcccccgagggtgtcgccggggaggactcaactcaggcgaggagtgtaggccactacccagcccccgagggtgttgccgggggtgacccggctcaagtgggcagtgccaaccttgacccagcccccgagggtgtccgagcggggtctccctcctgcacttccatggatgttcatgtgggttcacctccacactctggcggcatgatggtggctcggactccggatcagggggtcgctttggagggcagcatccccactggtctggagttaaactctgctgaatgtactgagcttgttcctgctggtctgctgcaaactgcttcgagtgggggtctggcacctggtcatcagccgatttcgaatgacttggggatcccttcgcttttctccaacctccaggctttggtggatggaatggtcggccagctgaagtcgcagggtgcttccatcccggaggtggcttcatctcttgagcgttggaatccggtgttgcttcagagtcgtgtatctgagttggaagccgctaatgctgggatgactcggcagatcacagttcttgaagaaaaacactctcaagatcaagccgaaatggctcgacgatgcgctgacttcgaggagaagtattctcaaagtcagatcgagttgagtcaggtctctgcggctttggatgatgccaacgctctgagttcctcccttcatgtccagcttgactctgagaaggaggaaaaccgtatccttgccgcttctcgcgataacttggacagattgtaccgagattccagcaactcgctgaccatcttggagaggagccatcgttttacgatggaggagcttgacaatcagcgccgtcaactgcaagaatcctcggatgaagtagcccgccttacacagttgctatcggcaaaggacgccaccatcaagggactccgagcttctaagaaatccattgctcaggagttagaaactgctcagcaggctgttaaagttgctgaagaagctgctgtcacttttaaaactcagcgcgataaggccctggacaaggccattcgagcaggacgaatcttgatgagaagacccggcgtggctgtccctgaagatataaaagccgacgtgaatgctgcccctgattcctcgaatcgcccttcttcgtcagtcgttcctgagaaagacattagaaaataa

SEQ ID NO: 114623 - DNA, 564 bp, Zea mays
  Clone ID: MRT4577_36018C.1
gccggccgggctgggccccttggctggccgccccctccccctatggcagccatcctccattgcttcctcccccaagatctccccctacacagcaaggatcgagaagaggaggagcacgttgaattgaagaggaagagaggatcaaggaggtgttcttccccatctcttcttgcatattttcttggggaaaccctaggtggctacactccagatcatgtctagtacatttcttcttcttcgatgaaggtgcttgttgctcatcaaggggagtgggaagtagcagcacatacaccttcactctcataataacgctgcccaggcgcagtcatgatttaattagaaacttcttgtcaaaggatgtttgtttttaactagtcgtgcgcactggttaattcagttcatgtcgttatggtcgtcttcccattgctagcagattattaatgtctattatgttttcttatcatggtatctatttatactttgttgcttccccgtttatgcaattttcaagggagacactgtcgaaattttatatatgaaaaaaaaaaaaaaaaaaggccccta

SEQ ID NO: 114624 - DNA, 371 bp, Zea mays
  Clone ID: MRT4577_36019C.1
aaaagccgctccgtgctcgcgcttgggcatctgcggcctacgatggggagcgagccggagcccggcagggcctgaggccctacctgcagcgcggagatgatctgcagaagcacgaaccgctcctgccgtactactgccggctctaccctatggagatggggctgaggatacccctgaaggagcgcaccaggagcacgaactctatcctcatgtccctcatgaaccatctcgagaagcacaagaagttgttgactttgggccccgactacaatctacattcggaggcatttgcattaaaggtctctggtagagctgataagcaggagcgtgctgctcgagctggcatatacactgcttagactttctatgct

SEQ ID NO: 114625 - DNA, 1936 bp, Zea mays
  unsure (1)..(1936): unsure at all n locations
  Clone ID: MRT4577_3601C.1
attgggacctcgagccggccggaaaaaaaaaaaaaaaaaaaaaaagaaaaaaaaaaaaaaaaaaaaaaaaacaccacagctcccacacacagcaggcagcagctcgatcgctagctcctccgaaccggaaagccaagcccgctttggcgatcgtgcttgcttgcttggttccttcaattcctgccggagccagcgagagctagctgctgctgtcgcgtggtagacgtcgtcttgccagcgagagcctagctcgatcggtctctctggtacaacgtagggagaaagatcgagggggagaggacgacgacgatggccggcgcgaccgtgaccgtggaggaggtgaggaaggcccagcgcgccaccggccccgccaccgtgctggcgatcggcaccgccacgcccgccaactgcgtgtaccaggccgactacccggactactacttccggatcaccaagagcgagcacctcaccgacctcaaggagaaattcaagaggatgtgcgacaagtcgatgatccggaagcgttacatgcacctgacggaggagttcctggcggagaacccgagcatgtgcgcgtacatggcgccgtcgctggacgcgcggcaggacgtggtggtggtggaggtgccgaagctggggaaggcggcggcgcagaaggcgatcaaggagtgggggcagccaaagtcgcggatcacgcacctggtgttctgcaccacgtccggggtggacatgccgggcgccgactaccagctgaccaaggcgctgggcctgcgcccctccgtgaaccgcctcatgatgtaccagcaggggtgcttcgcgggcggcacggtgctgcgcgtggccaaggacctcgcggagaacaaggtcctggtggtgtgctaggagatcagctccgagatcacggccgtcacgttccgcggcccctccgagtcgcacctcgactcgctcgtgggccaggcgctgttcggcgacgttgaggagggcgcttaccaggacctagacccggacgaccgcgtcgagcgcccgctcttccagctcgtctccgccgcccagaccatcctgcccgactcggagggcgccatcgacggccacctccgcgaggtggggctcaccttccacctgctcaaggacgtgcctggcctcatctccaagaacatcggccgcgcgctggacgacgcgttcaagccgctcggcatctccgactggaactccatcttctgggnnnnnnnnnnnnnnnnnnnnnnnnncctcgaccaggtggaggccaaggtcgggctggacaaggccaggatgcgcgccacccgccacgtcctctccgagtacggcaacatgtccagcgcctgcgtcctcttcatcctcgacgagatgcgcaagcgctccgccgaggacggacaggccaccacgggcgagggcctcgactggggcgtcctcttcggcttcggcccgggactcaccgtcgagaccgtcgtgctccacagcgtccccatcaccaccggagcggccaccgcctgattcatcgattcatcaacgatcaaattcctcccctctccgatccaatnnnnnnnnnnnnnnnnnnnnnnnnnnnnnnnnnnnnnnnncgcaaataatgtgctctctgctataattgtcgtgtgtagtagtaagtagctgttactannnnnccatgtactgtcagtcgcannnnnnnnnnnnnnnnnnnnnnnnnnnnnnnnnncatttcatgcaagnnnnnnnnnnnnnnnnnnnnnnnnnnnnnnnnnnnnnnnnnnnnnnnnnnnnnnnnnnnnnnnnnnnnnnnnnnnnnnnnnnnnnnnnnnnnnngcttggctnnnnnnnnnnnnnnnnnnnnnnnnnnnnnnnnntgtttgatacnnnnntaacacctgtaatgtgcatggtgacggcaaattgaccgccattttcaggcacctaaagc

SEQ ID NO: 114626 - DNA, 332 bp, Zea mays
  Clone ID: MRT4577_36020C.1
ctctactccacactctcgatctctaagggcagcaacatgagtctagctgacatggactcatagcgcagtcttgattccggctataagtgcgaaccaaaggcgcgtgacgatcgcaatgcctgcgggcctaggaagaagtcattgacgaggtccgtcgaggccgagctgcagatatctgaatggcgaatatgtcggtacctgttaaacgtatggtacacgcagcgcgtatgcaatggcgcttccgtctacctggccgacgtcctatagtacctggccgacgaggtgctggtgctgatctgtgactctgacatagacgacatgatgacccgcat

SEQ ID NO: 114627 - DNA, 496 bp, Zea mays
  Clone ID: MRT4577_36021C.1
gccgggccgggaaaaaaaaacttggctggacgccccctccccctatggcagccatcctccattgcttcctcccccaagatcttcccctacgcagcaaggatcgagaagaggaggggcacgttgaattgaagaggaagagaggatcaaggagatgttcttccccatctcttcttgaagatttcttggggaaaccctaggtggcaacactccagatcatgtctagtacatttcttcttcttcgatgaaggtgcttgttgctcatcaaggggagtgggaagtagcagcacatccaccttcattctcataataatgctgcccagacgcagccatgatttaattagaaacttcttgtcaaaggatgtttgtttttaactagtcgtgcacactgattaattcagttcatgtttgtagggttgtcttcccattgctagcaaaaaaaaaaaaaaaaaaaaaaaaaaaaaaaaaaaaagaaaaaaaaaaaaaaaaaaggccccta

SEQ ID NO: 114628 - DNA, 505 bp, Zea mays
  Clone ID: MRT4577_36022C.1
aatgcacatcaacactgctagctttcactgcaacggcggcacgcacgcacccatccacagaccaccagagtctctgcaagcagagcagggttttgttcattcacatctcaaagcatcccaagtacagtacagtacagtacccccccgtagacgccctagagagagcccccccccgtgccctcgtcatcagaaagtggcggaattcgttcgccggaggtcgtggcggtgcttcggcggcagctgctgaatcggcggcggaggcggtggcggtggctgcggctgcttcctcttcggttgcggcggcggctgcttcttgttctgctccgccggtggcggctccagtggctccagtggtttcagcaccttgagctcaatgagacgcttgttctcctcctccagccgggccaccttgttctccagctcgatggtgtacgcctgcttcctggcccgggacctcgccgcggactcatggtatttgatcatgcgcttttgccgccggtccacc

SEQ ID NO: 114629 - DNA, 1735 bp, Zea mays
  Clone ID: MRT4577_36023C.1
attgggtacctcgaggccgggcgccggccgaaaaaagtgtccacaaagatcccgggctgctccttcctcccagaggaagcgtacaaacctggaggggaactgcccgtctcctcggctgacccgtccacctcctgtccatcttttcccctcgtgtccgccgctacacgcgccgccggaaccctagcctccgccgccacaggcagccgggatggagaaaggagcctcggaggcgtcgcccccttgcgctcgctgcggcaagcccgctcagcttcaatgccccaagtgtgtcgaacttaagttaccgcgtgagaatgcagctttctgcacacaggattgttttagggcagcatggagctctcacaaatctgttcacccaaagcctggtgcaccggcatcccagcagtctccagaaggttggaaatattgtttgagaaaagggcgggaacgtgcattgcaacttcctcgttttgattggacaggtccattgagaccacatccaatatcaaagatgcgtgtggtgccagatgaaattgagaagcctgattgggcgcttgatggaattcccaagatagaaccagatagtgatttgcagaaaagagtagagattaagacccctgaactcatagaaaggatgagagtaacatgtcgaattgcaagagaggttttagatgcagctgctcgtgtaattaaaccaggaattacaacagatgaaattgatagagtcgtccatgaagagacaattgctagaggtggatacccatctccattgaattactatttcttccccaagtcatgttgcacgtctgtcaacgaagtcatttgccatggaattccagatgccaggaaacttgaggatggtgacattgtaaatgttgatgtaactgtatactataaaggtgttcatggtgatttgaatgagacatattttgttggaaatgttgatgaagcttccaaacaccttgtacgttgtacctatgagtgcttggagaaagctattgcgatagttaaacctggagttcggttccgagaggtcggggaagtcataaacagacatgtttcgatgtcaggtttatctgtggtgaaatcttattgtggccatggcataggggaactgtttcactgtgccccaaacattcctcattattcaagaaacaaggccgttggtatcatgaaagctgggcagacatttacaattgaaccaatggtcaatgcaggggtttggaatgatcgtctgtggcctgacgattggactgcagtgactgcagatggtaaacggagtgctcaatttgaacatacacttttggtgacagaaacaggatgtgaagttttgacggcacggttaccctcatcaccggacgtttttccatggttgaagaagccgtgatggggaacgccaccaacagcaagaagtgatactgttacactgggtcagcaaaaagttttgttctgctctatcagtcggccaaagctgaaattttcaaatattctagatcagagtgattagcatgctactgctgaacagtcgcagcaattgtctatcgtgcggaactatttctgggagtgtgtattgttaagtcggttttctccgagttatacgagacgtatggcttcttgagatgtgtcaccaatatgattatgccatcagagtttacttttgatttcacagaacacaatttccatcatttcgagtaggttcattttaaaaaaaaaaaaaccccaaaaaactcgagcccgg

SEQ ID NO: 114630 - DNA, 475 bp, Zea mays
  Clone ID: MRT4577_36024C.1
cttttcttggccgccacccccccttttcgccacccttggccgcccctcccccttccccttgcagccaccctccactgcttcctcctccctctagatctccccccacgcagcacggatcgagaagaggaggagcaagatggattgaagaggaagagaggatcaaggagatgttctacccccatctcttgcagattttcttggggaaaccctaggtgcttgttgctcatccaggggagtgggaaggagcagcacatacacctttactctcataataacgctgcccaggcgcagtcatgatttaattagaaacttcttgtcaaaggatgtttgtttctaactagttgtgcgcactagttaatttagttcatgctgttatggttgtcttcccgttgctagcagattattaatgtcgattatgttttcttagcaaaaaaaaaaaaaaaactttgtcctatccccgtttatgcaatttccg

SEQ ID NO: 114631 - DNA, 409 bp, Zea mays
  Clone ID: MRT4577_36025C.1
cgcacgcgtgtgtgagctcgaggaagagattgagaagcagaagcttattatatctgacagcgcagaggggaagcgtgaggcgatcaggcagctgtgcttctcgcttgatcactaccgccatgggtaccagcagcttcggcagctcctgcaggaccacaggaggcccgtggtgatggcaacatgagtgagtagcgtacccttcctggatgttgaaaggatgtcgaatctctgaagttggcttctcagtggtatgctgtctgacgatgtaatttgagctgtctccttcccctcttcctacacaatttgagtaaagcttgtgctctgtagttacttgaactgtcgagttactcgtaatctgtggcgtgtaatgtaatgagctatatggccaatggataatcatggtactccc

SEQ ID NO: 114632 - DNA, 612 bp, Zea mays
  unsure (1)..(612): unsure at all n locations
  Clone ID: MRT4577_36026C.1
gccggccccgcttcttagtaagctagtgggaccccccccgggcttgccagtgtcattcggccacgactgctcctatctccattttcgcccggccggcgaccagggtcttccgttttctcatcggccttccggccggggccttggtaaaacggctttccctggcccattctttccggtggccttcagacacccggtgggtgcctcgtctcctcctggtcccgcattccgaattgggaaggggaaaggggtcgctttcggtgtttgggtgacttcggagaccctgccttgcgcctttaccgccttaccggagaagaccgggtgcccttcgtcttcggcgcccggcttgagcctggcccggacttctttcttggcccgcggcgcccgtgccaagcaagcggaaagccgcatgcttagtggcccgcgtcccgcttgtggcccgcccgcggcccgcggagtgccgtgaaggggcggcccaaaagcagaggcagctttccgtcgctcgacgcccttcccgaccagtgcctttntcgagaatccttgcgnccgcgtgccccggcgtncgcggcgcccgctttcttgcgtctcccgnccgctggctcgcgcttcttcgca

SEQ ID NO: 114633 - DNA, 588 bp, Zea mays
  Clone ID: MRT4577_36027C.1
cagtaggagaatcaactccggcatgatcttttggtttttcagtctgaggatcatctggcgtgacatcttttagtctttcagtctgagaatcaactgctctgtcatcttttggtctttcaggctgagaatcaatcgtttctgaaactaagttatctttaggaagcgatgtggatgaatgatctgttgcaatatgtgcaacgggtgtatcattgcgattcttgaacatccgcactaaagattcagatgttggattgtcaaaatcatcttctgacaatgcaagatcatcctctccaccattcataggagatttctcaacatctttgagatctggaggtttctcctgtcctaggcgccgctttagataatcaggataagcaggagacttctccagttcctcttcaagttctgggattccctctttctcccgaagacgcctgatatcatcatcattctcaaagtcatgaccaagttccttgtcatcatggaatgacatctggctctcaacaggttggaaaaggccaaagtagtcccatggtggtgttccagggggagcttcaaacgttgaactgtcatccaggtcatggatag

SEQ ID NO: 114634 - DNA, 185 bp, Zea mays
  Clone ID: MRT4577_36028C.1
ggggaaaaaaaacacattattggcggatctttcaatccacacaacttaagcatatctgcatcacctatttttacaaacggttacatgaatcatatgccacaacaaaccaactcattgtttctcgggtgttgcataagtcatcactgactttgtaagcacctttctcaacgacataagatagcaca

SEQ ID NO: 114635 - DNA, 204 bp, Zea mays
  Clone ID: MRT4577_36029C.1
aaaaagcatgagcaaaagttggatcgctagtgggctgggtcccgggcattatgcataggagtatgacatggtggtagacgattgataaatgatggatgagaaactgggttggtggctggaactgtcataactactgtgcattctatggcgcaatatgggtcgccttgatatgaatcgagttactgttcgttttactgtacttat

SEQ ID NO: 114636 - DNA, 1727 bp, Zea mays
  Clone ID: MRT4577_3602C.1
gggtacctcgcggccgggggattaagactagctaactagcgtgaaagagctcctccgacgactactagctctcgcttgctccgacgacccctgccggccgcctctggtacaacgtacgtagagagagagagaaagagagacgatcgtcgatggccggcgccaccgtgaccgtggacgaggtgaggaagggccagcgcgccagcggccccgccaccgtgctggccatcgggacggccacgcccgccaactgcgtgtaccaggccgactacccggactactacttccggatcaccaagagcgaccacctcaccgacctcaaggagaagttcaagaggatgtgcgacaagtcgatgatccggaagcggtacatgcacctgacggaggagttcctgtcggagaacccgagcatgtgcgcgtacatggcgccgtcgctggacgcgcggcaggacgtggtggtgacggaggtgccgaagctggggaaggcggcggcgcagaaggcgatcaaggagtgggggcagcccaagtcgcggatcacgcacctggtgttctgcaccacgtcgggggtggacatgccgggcgccgactaccagctgaccaaggcgctggggctgcgcccgtccgtgaaccgcctgatgatgtaccagcaggggtgcttcgcgggcggcacggtgctgcgcgtggccaaggacctggcggagaacaaccgcggggcgagggtcctggtggtgtgctcggagatcacggccgtgacgttccggggcccctccgagtcgcacctggactcgctcgtggggcaggcgctgttcggcgacggcgcggcggccgtcgtggtgggcgccgacccggacgggcgggtcgagcgcccgctgttccagctcgtgtcggcggcgcagaccatcctgcccgactcggagggcgccatcgacggccacctccgcgaggtggggctgacgttccacctgctcaaggacgtgcccgggctcatctccaagaacatcgagcgcgcgctggaggacgcgttcaagccgctcggcatctccgactggaactccatcttctgggtggcgcaccccggcgggcccgccatcctggaccaggtggaggccagggtcgggctggacaaggccaggatgcgcgccacccgccacgtcctctccgagtacggcaacatgtccagcgcctgcgtgctcttcatcctcgacgagatgcgcaagcgctccgccgaggacggccaggccaccaccggcgaggggctcgactggggcgtcctcttcggcttcggcccgggcctcaccgtcgagaccgtcgtgctccacagcgtccccatcaccaccggagcgcccaccgccgcctgagtcgtccatctatcctcgcgatcgctccagtccagacatgaacgacccggcctacgaataatgtatctgcgtaattaatttctatctgtcttgtgtcctagtagctgttaagtaccgttttaaaaacccttaattaattttattatgggcgagctagctcaagagtggagtcataaaaccgcatggatggtgaggtattgtatagtacatgtgtaagacaagcttggctggttttttattttatattttaatctgtttgctcaagacaaaacaaaaaatgaattgttgagctgtcattaatttgcagtgcaccagctcaagttggttgtactcctatcctatgtatgaatgaaatcccttctagtagtatct

SEQ ID NO: 114637 - DNA, 525 bp, Zea mays
  unsure (1)..(525): unsure at all n locations
  Clone ID: MRT4577_36030C.1
gaggacttcaacaggaacgacgtcgatggcgcttccgcacctgtcgctgagaccacctccacgtccgaggtcctcgccgctcctgctgtccccgcaactggtctcgcacctgccgaagaggctgaggcggaagccgaggtcgccgacaagaagagcaagaagcgcaagagccgtggtgacggcgacgacgagggtgatgaagacaaggccgagcgcaagcgcatgaagaaggaggagaaggctgcgaagaaggccgccaaggccgagaagaaggacaagaagaagagcaaggatgattctgacagcgactccgactaaacgatcaatatctgaacgatggacgtccggacaaagcaacagcgcgcatcgctgcttgcctgtaaaagcgctgtacaccacaaaatcgngtacatgtcatagttactactactctatccttggataccagcttcttcaaatgtagcataccggaaaatggcgtttgggatcatgggcatgccggcgttttttggcgcgtcgaagctt

SEQ ID NO: 114638 - DNA, 385 bp, Zea mays
  Clone ID: MRT4577_36031C.1
ggttagtatttgctgatgagtcagtagtgggccgagggcagctaatagatgccagcagccttcatcttcttgtaggctttgaacttggcggaggcacatggctcacatcgcgagcggagctagacaggttgggcccgaacagttagtatgggagcgacacctctacaagggggtagccggcgagcgagaaagaattgcataacgggtatgaccaacaggatccagaagacgcccgaggacacgacagactgtaggagctcggacgcttgacgtcggacctggggggcccgatgtggtctgagcaacggcctgccgaccctggcacacagggagccgtacgtggagaggcatgacaagcagagcaccacacactaaaggacgagct

SEQ ID NO: 114639 - DNA, 298 bp, Zea mays
  Clone ID: MRT4577_36032C.1
attcggctcgagcccacaccgactagtattttgaccggactcaatataggtgtctcaggtggtggttgttcagcacagcaaggggctcatgaatggtaaaaactaaatataaggaaagggtacagtggcaaggattacaaaacgatacaattaaaggagtatgagaaggcatacaaagcagtaagttcggacgatggtgccaagtcttaagaatacggtggactatgacagcaacaaactgagaatatgaacatgtaggacaaatagcttagatcatacgtaccatactactagacat

SEQ ID NO: 114640 - DNA, 369 bp, Zea mays
  Clone ID: MRT4577_36033C.1
gaagaacgcgccaaattatgcacataaatttaagctacaccgaaggcaaaaaaaacaacgggcaacttattatgcgcacgcgaatactcagtaactctcgtctccatgactaccttctaggccataataatcattagttggatctgactcaaatcctgctgaaagttcatctgcatagtcaatatcacattaatgccttaaacttataaataaactatgacctattattgaaaggtgctacacatttacaacaccctctgcatcacattttacataaaccattgtcagttacccatactctcccactgatattcaatgctatagcgtgacctcatttccatagacagatcacatgtttacaacgttgtg

SEQ ID NO: 114641 - DNA, 412 bp, Zea mays
  Clone ID: MRT4577_36034C.1
gggcgaggagcacaagcaattcagttggggctccaaactagcataacaaggagttggcttaatgggggtcgggctggggcttttttgttaacagcactcaatctggggggcgaactcccactcaattaactccaacaaaaactatgatttgggacaaaatatcggatccccagcaagcgggggttcagcatccttaagaaaggcactcaaagaattttgaaccccaggaaatgggggtctgggtccaagaggaagacgctaaggaagaacaaccttaatacccaagaggctggtctcagaataattccccgttgctttgctcccttgctcccttgtgccacaaaacatcaaattgttgggctgcaccatgggttattgggccggcggtccctataattcccccttttttaaa

SEQ ID NO: 114642 - DNA, 176 bp, Zea mays
  Clone ID: MRT4577_36035C.1
tctttacgacggatcccatattacacacagtaagaatctatctgtatctgtctgttcattgtctctctggtggggataccatacccacgaccttgacgtatacacacagactaaactaattaaggcacctatgctttgcattcatgataccatgatcccttttaatttttctcaat

SEQ ID NO: 114643 - DNA, 208 bp, Zea mays
  Clone ID: MRT4577_36036C.1
tcggcatcatgagatcgatctggctgcaggacttctcataaatgtcttgggtttctgctcctgggactttgtcagccatagacagaagtgatgaggaatggccattcagtccgatgaatgtcaccatgttggcatatgtgaacatgtagtagcggcaatccgacactatgtgtggatcgatagtatatatacatcatcaacgacggga

SEQ ID NO: 114644 - DNA, 620 bp, Zea mays
  Clone ID: MRT4577_36037C.1
ccgccgcaaactgagcagccatagcagcctttttctcatcatttgttttcttcagttctaggtttttgctttcaaggagagactctgtcaacttgagcttctcatccaccttctctaattcagcagtgagctcctcgactgccttctcccgtgccctctccgacagccgcagcgcctttatctccgcgtgcgcctcgcccagctccctatccttatccctgacttcgttctcgagccggttaagctcgaccttgacgggatccgagccgtgcatgagagtgaggaggtcgtccgcgtccaggcccgcctgcaccgggccccggcggcgcgcggagcccttgtgcgccgaagcattcccctcttcgcccccgccgtcggccatcttcagatctgaaccccagctgggcaacccaccatccaaatcagccgccgccacccggactggcgctccgccgccgccgagctcccgttccgccgcgctgtagcgtggcttgctgcctccgcaatgccccggtcagcggcggaaaaacctagcggaggtgtcttgctgctaggcggtgagcgcgttgctcctccactagcgatttgtcttgtcttgctcacaaacggtgtgtgtgttc

SEQ ID NO: 114645 - DNA, 151 bp, Zea mays
  Clone ID: MRT4577_36038C.1
gctcctttttatatcgagtaagaacaggaataggcggagctttcctctcatcaactgttctaacttgttggacctggggccccacaaaagccttgattgcaagctccgccttttcctgtgttacatcggtaatacgcggagctggccgcgt

SEQ ID NO: 114646 - DNA, 249 bp, Zea mays
  Clone ID: MRT4577_36039C.1
ctggactttatatccaacaagtttcgctttaagcacgtcttttcaaacttcagctaagctagcttttcaactaccgcctccccaaccaaatgtatcagtggccacatcaatgtacattataacaatcaacttctgtctcttcacctgacaatccctcaatatccatctcgtgataccattatagacactacatgactttcatgtccacaactatctttctcaaccctttacttcaccttctctctccat

SEQ ID NO: 114647 - DNA, 339 bp, Zea mays
  unsure (1)..(339): unsure at all n locations
  Clone ID: MRT4577_3603C.1
gtggggggggtggggtgtggtttttttttttttttttttttttttttttttttttttttttttttttttttttttttttttttgggcaagatttcaaattacaaagttttattctggggggacaaagtttaaagatttgacccacatttcccctgcgggggggggggggcttgcagttntagaaacagggagcttttgttacttattagggctcaacccgatatgaggggggtttattgggggggcttaaaaatgggtttcccaagggggtttggtcgtaacaatccaagttgtcgccgttgtttagaacaaaaatgtcgcaataacgtttgtaaaaac

SEQ ID NO: 114648 - DNA, 293 bp, Zea mays
  unsure (1)..(293): unsure at all n locations
  Clone ID: MRT4577_36040C.1
gtacttgttgatcgccagcgttggaacggttaataggtgatatgcgtctctactaattactatgtgtatgtaataaattcaggtaaaaaaaaaactaaaagagacacagaacgagatttttttgttgcncncccacgactgtggggggggggattattcaaaaagcaaaggtacctcttctttgctccgcggggggtgatttttccaccctntcgtgatgtgtttgcgacgttgaagactcaggatggtggggcctcctgcctgtgtggcggcgtcttaattattgacaggtc

SEQ ID NO: 114649 - DNA, 816 bp, Zea mays
  Clone ID: MRT4577_36041C.1
aagaagaagaagcaggtagcagctagcataccacactcgatcgatcatacacatacaccatgccggccgcgcagcacatcgaacgagaccaagacctcgccatgagcagcgacgagttacttcaagctcagctggagctctaccaccacggcctcgccttcgtcaagtcactggcgctcaaggccgccacggacctgcgcatccccgacgccatccaccgccgcggcggcgccgccaccttgtccgagctggcctccgacaccgggatccaccccacgaagcgctccaacctccggcgggtcatgcgggtgctcaccaccaccggggtattctccattgtccaaggcaaaggcagcaacgaccacgccggtgatggcgctgcgtattacaagctcacgcgggtctcccggctccttgtcgagagatcaccgcacaacctgtccccgatggtgggcaccatcgtcaacacgttatgctggacctctctcctcaaaatgcccgagtggtttacccaaggccaagagggagagtcggcacagtcgcactcgctcgtccagctggccaacggctgcacgttctgggacaccaccaaggtcgatggcggcttgttcaacgacggcatggccgcggacagccgcatcgccatgaaggtcctgttgaaggagcacggcggagcgttcggggaagtgaaaagctcgctggtggacatcggcggcaaccatggcgccaccgcgtcggccgtggcgagagcgttcccgcacctcaagtgcagcgttctggacctcccacacgtcgtcgccgcggctcccgccagcg

SEQ ID NO: 114650 - DNA, 475 bp, Zea mays
  Clone ID: MRT4577_36042C.1
ccccaaaacaacgggaaggggggaaaatggggctggaacccaaacaacccgaggcccaggcagaagaaaaaacccttgttagcggacagccctgccgttgaagtgggaaaagcaaaaaaccctaaggctgggggttttaaggcttcacacacaggcgggcatccctaaacacagccccccataaggcgcccagtggttacgggaagggtccccaccctttggaatccttacccaccctggcaccacagaaaagctcaaaaggaaaacaaaaatagctagcagctcctttttttccggatccccttacttaaaaaagagcaccacccattggggggcggcaccggaaagggaaaccccccggccagggaggaggccatgccccggccgggccaacagaagggtgggggtcctccccggaaaacccctgaaaaatttgagcggaacaaagggcttctggggggggaacctggggggc

SEQ ID NO: 114651 - DNA, 565 bp, Zea mays
  Clone ID: MRT4577_36043C.1
acacaaattacacacataacatgcttatatattacataaataaatgagcaaaacagtttttattttaataataagaaaagacagttaataatctcaaggtcatgcatacgtcaaccaaagaattttcaaaaccatgtccactgatgtccaaacaaaagttcacagatcaaacgccatccaacatgaaagctttgctgataaccagaagcgcgcctgtgaatagcgcaggaggcccccgccatatgctcaagaagcaagttggttctgactcaagaaagaaaacatccctttgtacttggcagccacgaattggcgtgatagcatgcttatcggtggctccttgcagcagctggagctacgcttgatctgttccatggccttcatgcttatcggcggctccttgcagcagctggagctacgcttgatctgttccatggccttcagaacaggtacagggggcatggcttcttccactgcggcactagccggtggctgccacggcgataacttatgatattcaggaacactagtatcagttctgctggtaatgctgctgccatatcct

SEQ ID NO: 114652 - DNA, 315 bp, Zea mays
  Clone ID: MRT4577_36044C.1
atggacaaccaaagattttccaccaaaataaaagatggttctgggtcttcatatccaattaaacaaaaatggatcagcaacccaagtaaagagtgcccaaagtgcaatcatgtcattgataacaatgatatacggtatggggctttagctatgaatattccttttaaaggttatattaaagtgtggtcagctgcaaagtctgttgttcacagtggcccgatttgcttaaagtttaagaagatgaaggcatctgctacactcatccacagaaacttccaggtctctatggatgacattgccctgatgataagatga

SEQ ID NO: 114653 - DNA, 885 bp, Zea mays
  Clone ID: MRT4577_36045C.1
aggctcgccgggccgggggccggtaaactcggccaacgcccaacctctcccacactagccggcctcagtccacccatggcggcggcggcggcggcgagccagagcgatgttcctcaccggcagccggggcagcgtcgtcccatgtgcgccgtatgcacgaagcccctccgcctctgcctctgcggccgcctccgctcctcgccggtggacaacgccgtcggagtcaccgttctgcagcacgcgatggaggcccaccacccgctcaactccgcgcgcgtggcacgcctcggcctccgaaacctcgccgtcgctcaggtcaccgacgtcaaccaccgtgcccgcttcatcctcaccacgcttgatgcctgcggcggcgcggcggcggcttcgggtcctgcaggcggtcctgtggctgctcgttttggaaaccacgataggtctgacgggcctgaggagatcgagttgcaggatggcggtggccttgcgtttcctcgtgatgggatttgtggcgccaaatcggatggaaagcatagtgcgacctgtgattttgacgagtccggattgagtgcctgtggttatctgggcgctgaagacctcagttttggtggttcttgtgaaatgttggatcttggggacgtcaatggtgggatcttctgcaatcttgctggagaggatggttttcttagttgctgccacaacgatggtgggcgtgtcagattcatcaagaagacgaatagtgatggacagcctgctggacttgaaaggcctagctccgctgcaaaccagatagagaacttcgttgatgactcaactataggtgaaaagcaccatggaagcgagggggggtcccatatacggtaaatggaattctggctcattctggtg

SEQ ID NO: 114654 - DNA, 184 bp, Zea mays
  Clone ID: MRT4577_36046C.1
cccacgcgtccgcccacgcgtacgaggacgaataacctttctaggctgacgacacagtggcgcttagcacatatcgggggagcggaacagctgtcaacatgctgcacatggatgggatgaaccctgaaccggaaggcgtaggaatcatctgtggctcacacaactgcaggggcgaagcaggaca

SEQ ID NO: 114655 - DNA, 412 bp, Zea mays
  Clone ID: MRT4577_36047C.1
gggcggaacaaaaaggggttcccgggcccggggggtcgggccgagggggccctgcaaaaaaaaatctttcccttgggggggatcacagcccacaggggcgggccccgggcattatgccgggggctccttcgggtccgggaccctggggggccccaaggagagcggcatcggcaggggggcacagctgaccgacttggggggggggatctggggggggggcatccacaggtggggggccggaggaaaccacaggtgggcttttcgggccccccccccggggggggacccgaagaaggggggccccccccagctcccatctgggggaagggggctgggaacaggcccaacaacagtcagcttgatcaaaaatgcccgcaaagggaaccccagggtcgccccctctaacttggaa

SEQ ID NO: 114656 - DNA, 211 bp, Zea mays
  Clone ID: MRT4577_36048C.1
gggaaagctgttactcctgcaggtgccgaggacggaatttccagggcggccgagctaggttaaataccaaaggctaaaggggagcctctgttgaagccctctggagaggagggcggtgctgatattgactaaaatcggcggatggtgaaaatttaccagggatccgtcttaaaggtacatacattattgccatccacattttaacggtttt

SEQ ID NO: 114657 - DNA, 1869 bp, Zea mays
  Clone ID: MRT4577_36049C.1
ggccggccgggccggggatacagagagagggggagagaaaggttaaggaatccgagctaaggcgccgtttcttctcctcctgcttttttcttctcggcaccgtcactggagggagaggattcacgggacgaggcgacgcggaagggatttcgtcgcttgtgtgggcggcgcgtccgctggttgctttgcttccatggagagggatttcctgggtgcgatcgacagggcgtggaagtgcggcgaggcggcgaaggaggagagccgatcggagccagacagcccggcggcgacgcggtggcagtttgcggcgaggtccggcgtcgcgccggcgttcatgtcgttcaggacggaggcgacgggcgagggctctgaggcgttctcggtctccgagctccggccggccggagacgccttcgacggcatcaagaagcagagctccatgctttcgatctaccagcagcagaggcagtttggccacaacagcagccaggccacggcacagcagcagtaccctgcagcggcgcacaggcagcgctcgcaggtggcggattacggcgcggcggcaccgcatcgtctccctggtggtggtggtggtggatgcaggctagtgcagccggtgtcggtgcgccaccctgtgccgttccatcaggccaacctgatggtcaggtcatcagtgtcgcagagcttccacaaccagcagcagcctttcaccatgagcaacaacgggtttggcggctctacggccggcgtgtacggggcgaggaacccacggaaccaggcctcgacgcagctcacgatattctacaacggctcggtgaatgttttcgacaacgtcccggtcgacaaggctaaagagctcatgatgctggccagcagggcgtctgttcctggtgctaccccgtcaagtgagccggactcgccgcctgttcctgcccctgcccctgccaaggtcaacgtggccgaggtcttccctggtgctagacagatcgcagttcagaaaccggagccctgcgtgccgcatctatcaagcgcggcaactgcaagcccagtccgcatcgtcgtgccgcaagccgtggctccctccaggagcacgtctcactgcgctacagaggcctgcggttccaagcctgctgctgctcctaccagccagacagtctcgtcgtcccggcagttggcagctgcaagtgctgctgcagctgttacgccaagagctgtccctcaagctcggaaagcgtcgctcgcccggttcttggagaagcgaaaggaaagagtggctagcgtcgagccatacctgacgtccaactccaagagcccgctagagagcagtgacgccgtcggcagcgctagcgctccaacgaaatcgtcatccacagacgtcgccccggcgagcagccacaacggcggcggcgcagagcttgtgcgccatggcggatatcccaggagcatcagcttcagcacaaatttgcagatctgactctggtgttgctgtccatagactaccactaccactacgactccgtgtccgtgagcgcgcccctccctacccatcgacacgaaagctggatagctgtcttgctttgcatccggatgaggcgggaggtataggaagatacgatgagatgagagtataaagatgctgagtgctagcctagccgcccgctgtatagcttttgcagcgcgctgctgacaagatcgagggccgtgacctactcgtttcaggctcttcttgaatggtttttttgtcgtggtccattgttgtatattattcaacttgagaaacagagagtgctgctctgtctctgataaaagtttatatgaaattgataaaaagtttctgctttttccaaaaaaaaaaaaaaaaaagtacct

SEQ ID NO: 114658 - DNA, 771 bp, Zea mays
  unsure (1)..(771): unsure at all n locations
  Clone ID: MRT4577_3604C.1
ctaaaacacgtcacaatccgattcaacaaatatcatcgatcatccataaccaaaataaagtacaagttcctatataaagtaccatacaatagttcagggataaccacttggatggtttgagctttggccgttgccgccaccaagaggagggtaggcaaaaagggactcaacaaaagacgttctagctggttcaatcccactcccaccttcctggtgtagcctttggaagaattcaaatatcaataagttaagtatacaaatgtacaaaatcataaaaatatttctcaagttacaaaatgtacctggtctctaggtgcaggtacatgtgtgtaggggtgttgaactgttgcatcgccggtctttgtttaatggacatttgattaagtctagatgcaattcatgttttgctataataactatatactagatgaaatactaggttcgacaatgttataagaaaatttgctaagattagtgtacctaagctagtgtggctgcaaaaggactccaatgtggtcgcggtggcgatggaatatctagtaatgttattgccctattgctgcattgaacaaatgtgttactattacagatgttgttttcaaatatatgaatttagagttcgcaacatctatacttacttgaaacatcgcttgttgatgttgcatgcaagcaataaaatatttccctttgttggctcatctcctcacncaacctcaaaatcttcaacttctgctcatttcggttggttagagcaatagctatgggaaggat

SEQ ID NO: 114659 - DNA, 362 bp, Zea mays
  Clone ID: MRT4577_36050C.1
cccacgcgtccggatctacctaccacggcatcatcatgaactaccctgatcagattgacggtatcggtgcactagatcaggactgccgcacctcacacatagatgtcaagccagctgaactcgttaccaagattgatctgcgatccgtcaaggagctggagaaagagcccaaatttctcaggagctgcgatgctggtatggtgaagatagttcacactaagcccatgatggtggagacctaatctcagtatactcctttagttcaatttagctgccatgacatgatgcatactgtgactggcggattcatcaagagtgtagaaaagaatgacgcaactggatccaaggtgacgaaagctgct

SEQ ID NO: 114660 - DNA, 927 bp, Zea mays
  Clone ID: MRT4577_36051C.1
gcacaaatcgaagctggtatgcaagattacagggaatggcattaagagttggagaagcaagaaggcaggaagtaagctagtgttgacggcacttctttgccaaaagaacctaagaccgagttggctgatggagatgtgcctgatttcggacctgttcctgttgaaggtgtcgcaaagaagagcgagtcaagcaagaaggacaagaagaaagctaatgttgccagcatttctttgccaagagaacctaaaccagagatggctgattcagatgatccagatttctgggtgcctcctgttggaagtcgctgggatgacgatgacgggaaagacagatgggagtcattaccaggaaaggccaacttagcaaagaacgaaggtggtactgatgatggtgatggtgatgacaatgatacggctgacaaggatgatgctgaatcaatggaacttgcttcaaggacaaagcgaatgtcaatagaagcagctgggccaaggaagaaaaaacccaagaaggagcagtaaggcattcgcaatttgtcaagactcaaatgaagaatttggtctcgttcggaagaagaagcgttatctatttgattattgggtcgtgtttcctcagatttgggtaatcaatgactggatttgtgttagcatgtttatggttaacgcctgtcaactgtgatacatctacatttgcacgtaccttgcatttttttttatttttttggaaaactttgagggccaactatcagttgtcttttgctagggtttaggacgtgctatgattggacaacatagacggagctagagctccaaattccaagataactcattcgaaatattaaaaaaaaaaaaaaaaaatattaggtaggaatattttagattgccgatttttatgtacttctgttccaaaacatcggttgcactcgctac

SEQ ID NO: 114661 - DNA, 584 bp, Zea mays
  Clone ID: MRT4577_36052C.1
ggggcgcgctggtgtggtaacaatacggaccactaactaccaccggatccgacggtgcacacacatgtttcctcacttacagcccgtccttggaccaacgagccgataataacagatgaccgctcaaaagctggcgctaggctgagtgaggttggcaggctggaaagcaccgcggctggctgacggtaaccgaagaccatcctcccttgatcgaggatgactgcgccgacaacggaacacctgttgctaacgtaaactccaacatcctatacagcgttatccagcatctgcagacaagcactgacatgcactcgccgcctgcgtcggcgtctaaagaggcgtctacatacgacgggggggccggctccggcaacagcatcgtcagctgcggtgaggacctcaagaactgggatgcggacttcgtcaaggtcgaccaggccacgcttttcgacctcatcttggctgcaaactatctgaacatcaagggtctgctcgacctgacctgtcagactggtgctgacatgatcaagggcaagacaccagaagagattcgcaagaccttcaatatcaagaatgacttcacc

SEQ ID NO: 114662 - DNA, 824 bp, Zea mays
  unsure (1)..(824): unsure at all n locations
  Clone ID: MRT4577_36053C.1
ccggccgggaatgtcgctgaaaagtacttgatctctattcctgaacatgttgagatgcgtcaagccctcggtgtcattctcgactggaacaccgcttactgtctggtccatcgcgccactgatctggtcaggaagggtcagcgcgtcttcatccactccatcagcggggctgtcggttatgccaccatgaccctgtgcttacttgagggcgctgaagtttatggcacagcgtcagagcgcaaccacgcgtcgctgcgagagcttggagtgacaccatttacgtatgcagataagaactggaaggacgaaatgaagcagcgcggtggtgcacacgttgtctacgacccgataggctttgagcattacaatgattcctgggacattctcattaggaatgagcccagccgactcgtcgggtttggcggcaacatgaacattatccagggcgacgacgccaaaccacggtcgcagttctcatcgcaagttaagctattggccaaaaatggctgtctcgtcaccagaagaagcacttcattctactatattgaccgtgaccgctcgacatacatggaggatctgcattcggtcatgtctatgcttgttgctggcaaattccaggtcccagttaaaaagacgtgggacttggagaacgttagggaagctcacgagacttggggtaagttccctggagttggggtcctgttttgtccgcgtagaccccaacgctgnctctctaaggnaggcgacgacgattgattggaaaaattgggtagagtgcgtacctttagattactttaattccagaactgttcctttttcttang

SEQ ID NO: 114663 - DNA, 342 bp, Zea mays
  Clone ID: MRT4577_36054C.1
aaaaaaagcccccgggcaacggcgggcggaattcaattttgggggggacagaaaacacttccactttgggatttccacataggccttttaattctaagggggccccaaatttatttgaaatgggggggccccctccccaaaaggagttaaggcccctgcccccctaccaaaatttgggaacattacacgcgggcccttgccttgccttggaataagaagcatttttttgaagcagcggggggtcatggcctgagaaaatttcagctcaattccccttaaaaaagggggaaactttcatgcttcaacagctttttttgaggggcggggttaacttttttgccc

SEQ ID NO: 114664 - DNA, 457 bp, Zea mays
  Clone ID: MRT4577_36055C.1
gcctgcagtaccggaccgaaattaccgactcgtcccactcatacggcccgccttttgttctacattccagtcccctccggcacactgtgttcttccgttcctctcgcgtggttgtctggtgccgacgactgggccgccgccgcctccgtcctacgctcggtgctgaggccttcgggacttccgccggcgacgcgcaccctccgggttgaaatccctcgagaacaatggggcgcacggttctttcagatgaagaagaagatgagttcgaggctgacgaggaggatccgcggccctcgcggaggaacagggacgatatggacgagcgcgatgacgacgacgacgacgatgaggacggtcaggatgaatttgagaaggatgacttcatagtggacgacgaggaagaagaagaagtggaaggagaggaagaggaacagaagagtgatgacgagaggcgaag

SEQ ID NO: 114665 - DNA, 421 bp, Zea mays
  unsure (1)..(421): unsure at all n locations
  Clone ID: MRT4577_36056C.1
gcaaaggggggggaagagggcgccgcaacacgctgcggccaagagccacgcngcagcccancccggccgnaggagccancnagnaggacccaacaangagagggncncacggcaccaccngccgncnncnncnccacagagcagcaagcgaaggggaaccggaggggggggcacgancngcaagagnaggcagccaaaanggagnccaaagggggagccccncggaaancccacaaagggacnggnaccccncggaccacaccnacggggccgccacnncagcgnaccaaanngaaggngcnnggaaggaaganggaaagggggaaagcaacngggaacacngngggcacaagcaagcggaaaggaaacnggacgggagcaangcagacangggagcgaaagcgaaccaaaaggacaaaac

SEQ ID NO: 114666 - DNA, 271 bp, Zea mays
  Clone ID: MRT4577_36057C.1
tccacatattgatcacagcattgtcacttaccctccaacgttgatgccacatctacgtttacccgtaccagtgcttatgtctttcagacaaagatggaatcggttcaaggagatttgccagtctagtgcctcagccacggctgacttcacgtgggaatgacctactgaacttcgagattacctctgcacatgcatggacttgtcatggctcaaggcatcaagcaagagaatgtcaagaatgacgaatgtagctgctggatggtccagattc

SEQ ID NO: 114667 - DNA, 358 bp, Zea mays
  Clone ID: MRT4577_36058C.1
cccacgcgtccgcccacgcgtccgcacacagtctcggccgggccctctcgaggccgccgtggaaggacccccagcgatgggctccggcgaggaggacacaggaggcggaggaggggcggtgcggtgcgcggtgctgaaggcgctcgtggttgtcggctgcgtactgccgctccgtagactgcgccggtgtactacgcggaacgacctcgcactagccgacaccgactcgatcgataaagagcggtgatccttggaacatacacactcacatgccagatcgtttgtggactctagaatgcttgcacggatatgaacattgagcgtgcatgatgtaagtattgcacgctccttgtaagct

SEQ ID NO: 114668 - DNA, 694 bp, Zea mays
  unsure (1)..(694): unsure at all n locations
  Clone ID: MRT4577_36059C.1
ctggccgggacccaagccgcctgatgctaaccccagctcgcgccatcgggcactgcggtttccgtccctctgctccgtctgcgtagcgctttcatcgggacctacgcgagcggtgagtcatcgcgcgacgtcggtggtcagcgcagtacgccatcgcgcgtcaaccaggaagtggggaaggtcgctggactcacacctcggccaggtcttcaccagaccggaattccagcgtcgaacagcgccagcgccaggacctcgtgaggtaacgtgtcatctgaagagcaagttggtacctggaagctcaagtcccaggcaagttgtgccctgttgggggccttcggcttccgaaggtcctctaaaacatgatttaacaatatttctggagtaaagtacactgacaggtatcttcagactcggatcagagccacggtacgaagaagcacaaagaacacgaaggttggcgcagagccgaagctgtgtgtagaagagcttcggaatagcggcggaaaaggaaaccgacttaaagatgaaaaaccagattggacctcgaagaattatcatagagttattgataaatgtgaggggcattaatgtaattttacatgggctgcgtcccgtgcctataaatagatgaatagtgatcctgtactgttcacgctgatttgacatcgaaaaaaaaaaaaaaaaagcggnc

SEQ ID NO: 114669 - DNA, 781 bp, Zea mays
  unsure (1)..(781): unsure at all n locations
  Clone ID: MRT4577_3605C.1
gntacacacacggcgcgccggtgggatggacttctcggcgccctcattctcgctggggtttgactgggacgacgatgaccccccggccagcagcgaccggcgcgagcagccgcgtgggtacggggcccccgacgcgccgtcgttctcgttagggatcgacgacgacgacgacgtcgtggaggagccccgcatcccggcgagaggccgccagaatgagcaggcgcgtgagttcgcggcgcccgatccgccgtcgttcaccctgtgcttcgacgacgaagacggcgatggtgaactcgctgccgaccagcgccgcgaccaggcgcagccccaggtggcgtccggagctccttcttcgaccggcactgcagatgatgatgatgatgataaggaggatgacttcgtcctcgctgggtgcaatcggccggtgcgagcggagcgtgacagtgacacgctagatccagatcccctgccgacgccagcggagaccaatcggttcaagcggctgcggaagggctctgcgacagcccatccggcgcaaactccccaggtgccgcaccgtgaggcgcctgacgctccgtcttcctcccttagcatcagcgacgacgacttcctagttggcggncagcatcacgagcgactgaagccacaagcctctcctcggatcccctcatcgctcagtatcgaagacgaggacgacgacttcttcctcgctggtgaccgacagccagagccaacactggctcaagtgactcaactccagcggctgcggaagggccctgtc

SEQ ID NO: 114670 - DNA, 232 bp, Zea mays
  Clone ID: MRT4577_36060C.1
gtatgtcgtcacataaaaaggagggagcgaaaaaccattacattaagataatattggaccaaactacttacttgctctaaacagttacttgtaccccttaacctgtcttcaaaagttgcatatagttacagtagtgtataaattaaatattgtggaaaaacagtcttgtatttttctgtatgtgtgtatatatatatgattatgtacttctggcaattctatctgtatttaa

SEQ ID NO: 114671 - DNA, 272 bp, Zea mays
  unsure (1)..(272): unsure at all n locations
  Clone ID: MRT4577_36061C.1
caaatcccgtcaccccgcgtcgaaaacaaaaacacacctttctcaatcatactctttctctccacctcccttctacccccctactggcagctatataaaaccgtatgactaatcctttctctntcccattcaacaactctcccatgacaaactctccttcttctccctccaccccctactccctctctctccctctactgattcactcccattatccaccctcttcccctttctatttacccgcaaacttcttcaccttatcacttcctttc

SEQ ID NO: 114672 - DNA, 496 bp, Zea mays
  Clone ID: MRT4577_36062C.1
tccaatgtgtctcctctagtgggtgtgagagaaattggagcgcttttgctttggtgcacacaaagcaaagaagtcgtcttctatatgacaagctccacaagctagtttctgtacgctacaacttaaagatacgtgctgaagaagatcaagagaaagagagagatatagataaagaaattgatccaagtgcattgctaatggataccacaatgtttgatgaaacaaacccaataatggagtggctgaatgaggatgtagaggatccgattgtggatggagctgatgcagctagtgctgtttttgagcaaataaggcgcctcaactcaagcaggaaggcgtcttatgttggttcaaagggtaataacaagaaaagaaagaggaatgatgatgatgagaatgagtttcttgaaactgagagtgaggatgatgaagaagagaatgaatatgttgataatgacatcgaggatgatgatggggtgagtgaggatgatgagga

SEQ ID NO: 114673 - DNA, 657 bp, Zea mays
  unsure (1)..(657): unsure at all n locations
  Clone ID: MRT4577_36063C.1
gcagaactcgtcgtcggagggcaactcggggtccgccgccgaggtgggctgcgtgggggaggtcgtccgggcatgagcgcttcgccgatgaccggttcttcctcatctgcaagggccagcagaggttccgcgtcgcccgcgtcgtgcgcaccaagccctacctcgtcgccgccgtgcacttggctcgaggaccgcccgcccgccgagcacccggcacacggggcggacgccgaggcgctggccaccgacgtcgaggccctcatgcgggacgtcatacgcatcgccaaccgcctcaacggcaagcccgagaaggaggtcggggacttgcgcaggggcctgttccccacccccttctccttctacgtcggcaacaccttcgagggcgcgccccgcgagcagcaggcgctcctcgagctcgaggacaccgccgctaggctgcgcagggagcgggacacgctgcgcaacacgctcaactacctcaccgccgcctccgccgtcaaggacgcattcccatcctcgccgtcttcggggtgaggttggggtcgtcacttgtcagctaggaatggatgacgataagggggtcttgtggtcgaggctataggataaaaactttgntatcatttcttcgaagccccttttttcttgggcatttttttc

SEQ ID NO: 114674 - DNA, 179 bp, Zea mays
  Clone ID: MRT4577_36064C.1
ggcggcactaaaaagcgttttgccccctgaccggacccccgagacaaaggaaccacacagggcccgttttggggcatggaacaattgatccgagttaacagtgcgcggaacagatacctccctttggggccccttaaaaaacccttagtagaaaaaaaaatcacgagggccatttggaa

SEQ ID NO: 114675 - DNA, 439 bp, Zea mays
  Clone ID: MRT4577_36065C.1
acgagccggccgggaccatcgtaccttcgtctccttcctcggctagggtgtggccgactcagtttcgcccatacactctatcattcggtacacatgcatagctctaagaccactggtaggaagtaatacacctcggaaggatccatgtaagtaagtagccaccacgttgacgcataactgtgaccacatgactagtgtgagtagaagaatgatccacgctaccgcactgcaactgatgcccaccgtgatagatgaaactagtacatgaaaaatgcgatgcagatgccgcagacgccatttcacacgatagatgggtaaattgctcgcaacatacgaattaattaactgtgacagacatatgagctagatacttgctatgatgataatgccgcaaatcttgcataactcctcccagcaagcaacttgagaaataaaaagc

SEQ ID NO: 114676 - DNA, 386 bp, Zea mays
  Clone ID: MRT4577_36066C.1
acctttaatacaattattttttttattaatttctttttttttttttttttggctataaagggggcgttatacttaagggaaagaacaacgaaacataaacaatgaacacgacagtgcaacgtgcatggccatagcaataaccagctgtggcgcttttttggattttagtttatatacaggacattgctttaacctaaacgttcacttgtacaaaacctgagaagtgaacattatgcaacaggttgggatttaggaggcagggggagatttttggaaaccgtacattgggaactcttgctgcttgaaaaaccttcgatttttcttgtccacaaggaccaaattcaggtaatacttgacgctgaatttgatgttaatatttgcggaaa

SEQ ID NO: 114677 - DNA, 525 bp, Zea mays
  Clone ID: MRT4577_36067C.1
aataagccgttttaaattaagaataaaataggcccaagtagcagagacggccgccctttatatccacaaatgtctttggagcagcgccacccccaccctatacgaacgaacacaagggtgtgcataaccacgagcacatccaaaaacaagaccggccgaagaatcctccgtttggaaaggtacgtaataattgttctttaataagagacagctaccgcccatcctatatcgaaaaggtcacacctcaatcacattaattagctgcgagaaccaaaagaaccataaaaagaaaaggaggacgagctctttctccaacagataggctgtgtatgggcggatggccctagagtagacggttgcctctagactgccaagaatggtggatcacatgcacctaggaagaagactgtggaccctgtcttcgtaagaatctgatgtgaagcttccaacgaagtcttgtacttggaagccgacacactaggcttgatgatgctttccggggccgtcaccgtggtgaaagaagca

SEQ ID NO: 114678 - DNA, 352 bp, Zea mays
  unsure (1)..(352): unsure at all n locations
  Clone ID: MRT4577_36068C.1
tcttcgagcgcaaggagcaanaaacggcaggggggagtctcggacgcggaggcaacgcccacacgcgcaagcggaaggaagggggagcgcaacacgcgcggtcgccgggagagagagagagaaagggcgagctagcgagcgagaaccccctcacccgcggccggaaccgagctgaccagaccccgtcgccgccagccgtgggagggagaagaggaagaggaggcggaggcggcggagatggcaccggaggcagcgcacgccaagcacaagcacgacaacctgggggaccagtccgacggcaagacgagcaacatcacccgcatcagggacgacaagctcgaaacacctacca

SEQ ID NO: 114679 - DNA, 505 bp, Zea mays
  Clone ID: MRT4577_36069C.1
gccacgccacttcgggtgcctagctggctgtcatgcatacgctggggtagaactgcgccaagccacactggagtgtgtcgcgtgattcggatgaactaccgcccggccaccggatgcacaggagagggcctgcaggaagaaacgcaagtctcaattaggacggcactcaaccaccaccaagtcgtcaagctttaacacatcgatgatggtgctggtccgtctgagccttgtcaaaacgcagattcttctcacttgatactacccactacttatggataattaaacctgttatcctgccgacccgtatcctgctggtgctctacaatgcatgaaacaatgaccttgtgaggacacaaaccctttggaatagtgccattgtgctagatgatgctgccccattcaagcaatggcacctcactcactatggagttgacattcgtcggaaggaggatacccctgctggacagaaggataatgcttacggacaagaggttgatgcaccagc

SEQ ID NO: 114680 - DNA, 430 bp, Zea mays
  Clone ID: MRT4577_3606C.1
gttcctccaaaagatgataatgtatatgcacagttcttttcttttggctaaacatgtgtgcataccacacacagatacatcatacatgcaacacagacgaacaagaagcaactctgtttacattttagttactactgtatacacacttgataatgacggataattccatcctcctgctgttcgtttaatctcagcagttgctctacttttgatttggtggctaatgacatgatgacccatcatcccagctaaagatgataagcaaatcatcccccaatactcccaaagcgcaaatcccaacgcctcctgttcctcaccaacccaattccaatagagggagggtgtggtcagttgagcagtcgcatcccacggccaccacaaacaacaatgcgcgccgcagtctacgcccgccggctcgaggtacccaatg

SEQ ID NO: 114681 - DNA, 244 bp, Zea mays
  Clone ID: MRT4577_36070C.1
cccacacatccgaccacccatccaaaatctttttaaactttaattccaccctattaacggggatgtgtgctattatcatagggtcatgtgatcttcagatcacctaaaacaaatcttataaaagtctaagtttagtccatacaccatatatcccttgattcatacattcattactactctatccacaaagatctgtaaccgttacacgcgtacatacacagatattgctaacaaatcagtactt

SEQ ID NO: 114682 - DNA, 350 bp, Zea mays
  Clone ID: MRT4577_36071C.1
ggaacaaaaataaaaagggggagtaaaaagccccctggtcacaggtttgaatataaaacaacaaacatttctggtttatgagggagcacaaacacacccgcgaccattcaacaaattccaactaaaacttctacacaaaaccaaccttcaaaccggggccaaaaaattcacggatacaaaccaactaaaaaaaaggggataaaaaaaaggaggcaccaatttttacagcactctataaaaaacaaggatatgtattaccccccccccaaaaagaaaaaaaggggaagaaaaccccccaccgcttggggggtgaaagggaggactccacccggattttatttcggaccccg

SEQ ID NO: 114683 - DNA, 144 bp, Zea mays
  Clone ID: MRT4577_36072C.1
cctcatcatctccttgtgctgtatggtggtttttaccatggcctatatcatgctctgtcgtaagacatcccaacaagagcatgtctacgaagcagccagggcacatgccagagaggccaacgattctggagaacccatgagggt

SEQ ID NO: 114684 - DNA, 159 bp, Zea mays
  Clone ID: MRT4577_36073C.1
gaggaggactaccataagaccggtccgattcccgagcccgagttcacctaccaccctggggttaagatcgggctaaacatcatccgggacgggcttcaaggtgaacgctataattaccgcaagattaaagaaacgcttgattgagtcttttaagagacc

SEQ ID NO: 114685 - DNA, 124 bp, Zea mays
  Clone ID: MRT4577_36074C.1
ccagatctaccttatcatattataagcgcgcgtacctctggcacgtcgacgcatcttcgtctccgctcaacgctcgatcacgcccggcgtcctcccagcgatccacgagaaaccttctcgcctc

SEQ ID NO: 114686 - DNA, 216 bp, Zea mays
  Clone ID: MRT4577_36075C.1
cccacgcgtccggagagaagggccttcttggatcaagaatcaagatctcgtgtgctgtgtgtctccctctctcggggagggagggagggaggattttttcttggcagcataagggtgtggagtgcgaagagctttcaccccatcaaaatcaacaacttgtgcatttatcttcgacatttttattgaacagtggtgtgctgctttaacaatataaaa

SEQ ID NO: 114687 - DNA, 565 bp, Zea mays
  unsure (1)..(565): unsure at all n locations
  Clone ID: MRT4577_36076C.1
gcaacccantgaggtccgggggcaagaacagcgagcccgtgcggcccagcaggtccgcttcttccgcaccctccccgggttccgcgcctacatggccatcaagttcaggcttccccttgagatccttcgcctgctcaacattgtcctgtgcggtgctctctcccggcgccacgacgagctcagccgcaagtacagatacgtcatgcatatcgcagagctgtacgcgccttactccttgttcaaaggatgcttcgatgactccaacacggagaggctgagggcggcgatggcgaacaggagcagcggatatgacttgggtttcgatcccatgtgcgtagactgggacgactatttctacagggttcacatccccggtgttgtcaagtacctgtgtggttactaggttaatacatatttaagatccggagagagccaaatgtatcttcgcatgttttaatacacaaatatgtcgctgtagtttgcagattattaatttccctagcattcttgttcagtggtacaggtttctaagaatggtacttgttttcctttaaaaaaaaacaaa

SEQ ID NO: 114688 - DNA, 519 bp, Zea mays
  Clone ID: MRT4577_36077C.1
gaatgaacactacatcccacacttcctgcaacagttccaggactgtgccaagacacgtgtccagtgaggccttgcatggcccgtggcagcatgacatgcaagctcagtagatacatgtttccatatcttcttcgatggtatcctccgagctatcatccgccttcacatacaagatgcagcagaagcttatgctgctgactctgaagctcagcccgaaggacattccgactggtctcagcattgacgagaacagacacgaggatagacacttagaaacaacctgcgcgaacattttcctggactcttcgatgggcgaggcgttgggggaggtcctggccaagaacgggaacaaggaactgagaaattacctgaacgttcctatgaacttcttgaatgaatactgcgatataagccactggatggagtgctcccctgaggacattatggacaagacgaccgtcttcagcacggcatgcagcagtactaggagtaagaatagggtgacaaccacggcgccta

SEQ ID NO: 114689 - DNA, 295 bp, Zea mays
  Clone ID: MRT4577_36078C.1
caaggacaaaggcttgttttattttaatggctgatccacgtgaggccacagcctggccactatgtacagacacagtgggacgcttcatttcttggtctcttcctccttggacagagtcttgatgatctcctccttcttggcctggaggcgctcctcccggcgcttgcgtgcttccttggtcttagacctgcgggcctcagcctggtcagccaggagcttcttgcgggccttgtctgccttcagcttgtggatgtgctccatgagaatccgcttgtttttgaacacatgccctttg

SEQ ID NO: 114690 - DNA, 203 bp, Zea mays
  unsure (1)..(203): unsure at all n locations
  Clone ID: MRT4577_36079C.1
acgggnccggaataccgggtccgaccacacccgtccaaaagtttcaccattgtaccatggaccggggattaaaaaggagcgtcggggaagcggccgggggcccgccaccgccaaaggtgtcccggtgggagcccagggatttccggtggttggggcaaaggttaacgggcgctggtccgcccgccgccgccgccgttctgggt

SEQ ID NO: 114691 - DNA, 852 bp, Zea mays
  unsure (1)..(852): unsure at all n locations
  Clone ID: MRT4577_3607C.1
cgtattcaccatcatcatccaaaatgtcgtcggaagacacagcggcaacgacctttgtcgaccgagtccaaaacttcgtcgctgagaacaagaaggcagtccttattgctactgctgccgcggtcattgctgctgggggtgtcgcttattatgcgtcgacgtcgtcttcttcaagacctccttcagactcagatgctgaaaagggagctacgggaaagaagggaaagaagaagtccaagtcctcgaagaagaagagcgtgaaagacgatgacggtcctatactagaggaaattgcacccaaaactaccaccgaggacctgccattgacaacagaagccatcgctgctatgccggaagaggaacgctcgaaggaggctgcatcactaaaagagcgaggaaacgctgcctacaaggaacgaaagttcgctcaagctgctgtttactacactcgcgctatccaggtgtcaccgaaacccgagccggtctactacagcaatcgtgctgcatgctatgtgaacatgtcgcctgctcaaaacgacaaagtcatcgaagactgtgacgaggcactcaagctcgacaacaagtacattaaggctcttaaccgtcgcgcgactgctcttgaggcccttgaccggttagatgatgctctcagggattacaccgctgctactattctcgacaagttcagcaaccagcagactgccgctgctgtcgagcgcgttttgacnagctcgcgactaagcgtgcagcagagattctcgctgagcgtgaaccccgtctgccctcatacaccttcatctctgcatacttcgctgccttcaggccccgtggccacccactctccctgaaacc

SEQ ID NO: 114692 - DNA, 241 bp, Zea mays
  Clone ID: MRT4577_36080C.1
aaaaaaaaaaaccctttttttttttttgggaaaattcctgaaagtggggaaaaaatttcctcttttcaaaggcctttggagcgttgcttttccattcatgcaatttacccttagcaaaaaggggtttattatccttaaaaaggaggcgaattttttaaggcggggggcccctttttgaattttttttggggggggggaaaaaaaccctagaaatcccccgggagaaaggcctttgctttgg

SEQ ID NO: 114693 - DNA, 841 bp, Zea mays
  Clone ID: MRT4577_36081C.1
tgggaccctcgaggccggccggggcaagctttcgctgtgcggttgcggtcgctccccttcccgactccagccagaagcagcgacggtgccggcagtcggttactccactcggcggcggcccatcctttcctgttttctcctccagtcctacaaatacaggacacaacacgcttgctcttgtgatactctattaaggtacggcgtgaagatgagagtcctcttcatctgaatgttttgcttgaggaactactggtcgcctgcatttgcttcagtaaaggaggggcctgttcgacatcatataaagtttaattgtgtagtggtttgtggtgccaggggtccaagaccgagatatccccgtgtatggaaaactcgtaagaaaattgggactatttccaagtcacagaagcttgttgaatgtgtgaggatcttgaacgtttctctgttgaaatttaattgtgtctgtgtactcttgtgcatcaccttgacatcctgttgagcttgctgtattaactttagtccattcccacaacccaacaaagaaggaatatcttttcattcagcttttgcagcaaaatttcagttatctgtatttgtagcaactataagtctgcatggtttcattaaccactttttaccaaatttcactcactctacctgtatcactgtatgttacataaggggagaaacatagtttgtgtagggtaccttttgcaaatactcattttcctatggacaaattccaatttgggtgtctgaaattacatgtcaaacttttagcatctcatgcagattaaaggtctgtctaatgtaaaggaggaagtttatggagcacttgactctt

SEQ ID NO: 114694 - DNA, 471 bp, Zea mays
  Clone ID: MRT4577_36082C.1
aggtcgacggtatcgataagcttagaagtttgggcttggcgaaataaggttcgccaatagatttggtaagctgaagtatgccaataaggttggtgagttggagttcgccagaagacgtggtgagatggtgtttaccggaaggctgggtaagctggtatttgccagtggactaagcaaatgtaatcgccgaagggcttggcgagttgaatttcgtcagtgggcctagtgagttgtattgtaacacctcgcaagtgaagggttcgccagttttccaactaactggttgtttgccaaggtttaagcgagctgggggtttaccaaaagattatcaacaagggacttcactagtaaaagtgtatgccttaagatgtccgataccaagttgggtttgctagtttctctataaggtaggtttgctaatgtgatggtgagctagtgttcgccagtcttgctgtgaacaggggattgtca

SEQ ID NO: 114695 - DNA, 943 bp, Zea mays
  unsure (1)..(943): unsure at all n locations
  Clone ID: MRT4577_36083C.1
aagnttctactcattctaggtagtaaaaatacttcagaagatagcgatgtccatgtcttggaagtatgacgacgacatgggttctaggatgtcaaaccaaaacagagagtatgttaccagttcaatttgctctagaccgctttggttaagcaggcacaaaaaagtaccaaatggaagctctgttttacatatattcaaggtctccacaagttgcatcgtccaatacactcctgtcgaggcctgagcttgctgcttcatccaattcattattaaggtgtgtgctttctacctcttcgagctcaccagtgtcaggatctccttttgccgccacttcaggattactgtcagggtaaactctgattcttacgcgcttgcctttgatgtgtcgatattcccatttcggtggtgggtatttcttttttaacttttcgtatttgtccatcatctctatcttttgaaatacatcacctagcatcctgataatagaaccatctggtcttacgcctagttcctccatatcagcaaaaatctcgaacatcttatcatgctctccagcactgtaatagaaagaaataattctcatgaaaaatgtacgaggcaaaccctccatatatcgtgagaataccattctaaataactcttctgcttcctcaatccgtccgtcctcgatcaaagcattcaacaaggtgtaatagctccccattgtcttcccctgacctttgttgaacatccatttaatgacctgaattattcgtttccattccttttcgtcttcaagtttcttcagtgccttctttactactatcaagggaaactccagttcccatgcaacaaaagagtcaagcgctccataaacttcctcctttacattagacagacctttaatgagttttccatacacggggatatctcggtcttggacccctggcaccacaaaccgcat

SEQ ID NO: 114696 - DNA, 714 bp, Zea mays
  Clone ID: MRT4577_36084C.1
ctcgaggccggccgggccgggaacccaaggaaggatggacttaacgaaagataaatccttggggggattgcaagctttcgctgtgcggttgcggtcgctccccttcccgactccggccagaagcagcgacggtgccggcagtcggttactccactcggcggcggcccatcctttcctgttttctcctccagtcctacaaatacaggacacaacacgcttgctcttgtgatactctattaaggtacggcctgaagatgagagtcctcttcatctggtgagaacgaagctcctttttttttaaaggaatacgacgctcttatatgcttacgtggattttgttttagtttttcgctaatatagattaaagaatgttttgcttgaggaactactggtcgcctgcatttgcttcagtaaaggaggggcctgttcgacatcatataaagtttaattgtgtagtggtttgtggtgccaggggtccaagaccgagatatccccgtgtatggaaaactcgtaagaaaattgggactatttccaagtcacagaagcttgttgaatgtattaaaggtctgtctaatgtaaaggaggaagtttatggagcacttgactcttttgttgcatgggaactggagtttcccttgatagtggtaaagaaggcactgaagaaacttgaggacgaaaaggaatggaaacgaataattcaggtcattaaatgga

SEQ ID NO: 114697 - DNA, 1325 bp, Zea mays
  Clone ID: MRT4577_36085C.1
cctccccccccccctctttcttttttcttttaacatgatgtcttgaagatggcaaaagtttctactcattctaggtagtaaacaaaatacttctgaagatatcgatgcccgtgttttagaagtatgacggcatgggttctaggatgttaccggttcaatttgctccaggccgctttgattaagcaggcataaaaaaataccaaatggaagctctgaattatatatattcaaggtctccacaagctgcatcgtccaatacactcctgtcgaggcctgagcttgcttcttcttccaattcattatcaagctgtatactttctacctctccgagttcatcattgtcagggtctccttttgccgcctcttcagttttactatcagggtaaactctaattctaatgcgcttgcctttgatgtatcgatattcccatttcggtggtgggtatttcttttttaacttttcgtatttgtccatcatctctatcttttgaaatacatcacctagcatcctgataatagaaccatctggtcttacgcctagttcctccatatcagcaaaaatctcgaacatcttatcatgctctccagcactgtaatagaaagaaataattctcatgaaaaatgtacgaggcaaaccctccatatatcgtgagaacaccattccaaataactcttctgcttcctcaatccgtccatcctcgatcaaagcattcaataaggtgtaatagcttcccattgtcttcccttgacctttgttgaacatccatttaatgacctgaattattcgtttccattccttttcgtcctcaagtttcttcagtgccttctttactactatcaagggaaactccagttcccatgcaacaaatgagtcaagtgccccataaacttcctcctttacattagacagacctttaatacattcgacaagcttctgcgacttggaaatagtcccaattttcttacgagttttccacacacggggatatctcggtctcggtcccctggcaccacaaaccactacagaattgaactttatatgatgtcggacaggcccttccctcactggagctagtgaaggcgaccagtagcccctcaagcaaaacattctttaatagagtatcacaagagcaggcgtgttgtgcccggtatcagtaggatggatcagaaaacgggaaagaatgggcctccgccgcgtggagtaatcgactgccggcaccgtcgctgctgccggagtcaggaggggagcccccggccgtgtcttggaagtatgacgacatgggttctgaaatgtcaaaccaaaacagagagtatgttaccggttc

SEQ ID NO: 114698 - DNA, 353 bp, Zea mays
  Clone ID: MRT4577_36086C.1
atccaatcctgcgggctacccgttaaggaaccaaacaaatccgtttttgttacaatgcaacaggagccggaatcccatcaatccgtaagccctttgtagatgaggaatttttaacacaaatttcccgggcgcgtacttagttgcaaattcgtggggcaaccattttattttgttgtatcacagggttaaacgcatggaaggaacccttccagggttttccgcccaaaacccgtcagggattttcaacccgggcctccagggggccgggcaaaacgggagcaaacacccttcttaatttgaaaacacccttttggccgtgggccccccatcaccgggccgggttagggccaaaa

SEQ ID NO: 114699 - DNA, 383 bp, Zea mays
  Clone ID: MRT4577_36087C.1
aagaccgcgcgcgctcgcgcacgagagctcaaaattcctctcgcggtggtttaaacgaataagactgcaacagcggggagatcgcaaatttttcggaggcgagcaacatgacaagaccgaagccgatccatagacctcaacatcgcacaacctacaagtgcaaaacactaccgcccctatggctgcttatacatctaccggcagatcgagcatgatacagactcacaccaatgtgacactcgtgataagacctcacttccgaattatacagaaggatgaaccacgcctttacttgctggttcaagttgcacggattgaagaatgcgacaggatgaaacctgaatacagaattccggttcttgaggccacagactagcatacac

SEQ ID NO: 114700 - DNA, 1796 bp, Zea mays
  Clone ID: MRT4577_36088C.1
ctcgagtttttttttttttttttttttttttttttttttttttttttttttttttttgatatagactggctcctgccctgtctgatgtccaggacattgccttcaacaatcaaccatttttgttcacgaaagcactcaaatactacaggtcctaatgccatcgctatatttttaaactggctggaagcattcaaaaaggcacgagccttatgcaagtgaatcaggtaaccaaactttgaaaaacacatatcggggggaagccaccatgatgtcttcaaaaaactgctgatggcaaagcctggcatgtagtttctactcattctaggtagtaaaaatacttcaaaaaatagcgatgtccatgttttggaagtatgacggcacatgggttctaggatgtcaaaccaaaacaggatgttaccagttcaatttgctccagaccgctttggttaaggccgctttttttttttttttttaccaaatggaagctcgatgtcttggatattcaaggtctccggttctgggatgcgtccaatacactccggtcgaggcctgggcttgctttgctctagaccgctttgtcaagctgtacacaaaaaaaataccaaagggaagctctgacctacatatattcaaggtctccagaagctgcatcgtccaatacactcctgtcgaggcctgagcttgctgcttcatccaattcgttattaaggggtgggctttctaactcttcgagctcatcattgtcatggtctccttttgccgtctcttcagggttactatcagggtaaactctaattctaatgcgcttgcctttgatgtgtcgataatcccatttcggtggccgcttttttttttttttttttcgtatttgtccatcatctctatcttttgaaatacatcacctagcatcctgataatagaaccatctggtcttacgcctagttcctccatatcagcaaaaatctcgaacatcttatcatgctctccagcgctgtaatagaaagaaatcattctcatgaaaaatgtacgaggcaaaccctccatatatcgtgagaacaccattccaaataactcttctgcttcctcaatccgtccatcctcgatcaaagcattcaataaggtgtaatagcttcccattgtcttcccttgacctttgttgaacatccatttaatgacctgaattattcgtttccattccttttcgtcctcaagtttcttcagtgccttctttactactatcaagggaaactccagttcccatgcaacaaatgagtcaagtgccccataaacttcctcctttacattagacagacctttaatacattcgacaagcttctgcgacttggaaatagtcccaattttcttacgagttttccacacacggggatatctcggtctcggtcccctggcaccacaaaccactacagaattgaactttatatgatgtcgaacaggcccttccctcactggagctagtgaaggcgaccagtagcccctcaagcaaaacattctataatatgtagttagcagacaagagcgtcgccttcacgagaccaagagaaccctcatcttcacgccgtacctttaatagagtatcacaagagcaggcgtgctgtgcccggtatcagtaggactggatcagaaaacgggaaaggatgggctaccgcccctccgccgcgtggagtaatcgactgccggcaccgtcgctgctgctggccggagtcgggaggggagcgaccgcaaccgcacagcggcaacttgcaattgcaatcccccaaccccaaatgtatcttccg

SEQ ID NO: 114701 - DNA, 325 bp, Zea mays
  Clone ID: MRT4577_36089C.1
gattgggttagactaccgtcagccagcgtctagtagttctcaatccgacatgccgcttctcgttctgcgcgtgccgctcgcctcgaccaacaatactagtacatgcagtggcgctgcacctcctgtagctgtagcaccagcggcagagcattccgacggcctactgttcgacggccttgctctgggccacggtgacgacgtcgacgataaggccgaggcggacggcgacgacgcagcgaccgtgaagctggagtggctgaagtcgcagatcatcggcgcggaagcagagttcgcgtcgcccgttcgggacccgacgcattacgta

SEQ ID NO: 114702 - DNA, 257 bp, Zea mays
  Clone ID: MRT4577_3608C.1
ggtgctctgtgggggttaacgggttttcccttttcgccggggggttataccgaaaaatccctaaccggcgcactcaggcagcccaagatttcaatatagaagaggttttttattgtttcggctcgaaattggtttttacgggctttgttactaaaatgcctttgccgccttggtccttgcgcttttcaagcttggcttgcgaaccgaaaaccgttgggccagcttggggggggtgattgtcaaggttggggcttttc

SEQ ID NO: 114703 - DNA, 369 bp, Zea mays
  Clone ID: MRT4577_36090C.1
gccccagacaacactcaccgatagctagtatcgccgccgacgtttctagagcagagtttccaagctagccaagcgcgcactttggtagacctagctagttcaggcgtcgatatgtctttaggtcagggtggcgctggcgcacatgctccggtgcggcgtcatcatggacgtggtgaccccggagcatgcgcgcctcgcggaggaggccggcttcgtgcgccgtgatggcgctggatcggttccccgcctacattcgcgcgcagggcggtgtggctcgcatgtctgacccgggcctcatccgtgacatcaagcgcgccgtcaccattctggtcatggccaatgcccgtatcggtcactttgttgaggccc

SEQ ID NO: 114704 - DNA, 199 bp, Zea mays
  Clone ID: MRT4577_36091C.1
tttcttccgcaacaacccatcattgacggtggcctgttttatattgcttatgggtgggagttcaataatgaagttctttggatgattattgtgtcttcccacaaataataaagtacatttctagattctaaaataaaaataaaaaaaagggccgcacgcactagagtattttattcttactttctctttcatgccaacg

SEQ ID NO: 114705 - DNA, 441 bp, Zea mays
  Clone ID: MRT4577_36092C.1
tggctctggaacctttgggctgatttatgtgcttgagttctccatctacgacgaagtcccctccctaagggatacttattcctcttagtcccgtgtcggaacagacgagaaactcgcgggccttcttccttagtccgcgcccgtattaaccgacgagtaccctttagacgacgtcttaccgaccctcctcggtccctgcgctacattatccgacgcgaaaatagacggcgcacttctcggcaggatgtcagacccggtactcagctccgacgcgggtctcgtcgtattttaagttctaggggacgtactcttagacgatcgtaacccgagactcgcgtcgataactgttccctaacctttgcacgagacgtattcctaggatagtgccgtagtaacggtttgctaacacgcctgcagcgctaccctcgtcgcgtaaagagc

SEQ ID NO: 114706 - DNA, 268 bp, Zea mays
  Clone ID: MRT4577_36093C.1
ttggtggtggtcttattggatcaggaatctccacataacataccggtagcaacatcaactggtgtgctgagggaagtataccctaaattttttacatggggactgaaaacaatgatacctaatctatggggcctggctacatgacgtgctctttcaaagaactatatgctcatggccatggacttgctaaagggtgcatctattgatttagatcccaaggatgaatgtatctgcactgaggctgccaatgagacaattcctatgtagc

SEQ ID NO: 114707 - DNA, 640 bp, Zea mays
  Clone ID: MRT4577_36094C.1
ggtaccgcggccctctctcgagtttttttttttttttttttttttttttttttttttttttttgcccaagtaatttaaaaatcttgacataaatagccagaatgtttctggaatcttgtaactggaatggttagccagggccaaaaacacatcaagaacaaatttttgtgattcaggtttcaacaaagtgcggattagcatggcgctccaagcatctggagccaaattgatagcttggcggaacgattgcacagtattcaccagcctcctgatcatcttacttctctctggatttaggtcccctagctttcccactttcgcatatacatatgggaatgtcgcttcttgaaggaacacgtctgaagcattaacgatgtcctggacaaggaaaacccgaacccgccatcctttcctcgataaaatgaaatcaaataggtcttctgtagctgcaatcacagaatgcatatcaaatgatctccactcaggacttccattggcgttctcactggagtcagctcctgatgcgcttgaagattctgatgactgttcaaatatagctgcaatcttaagggttctatgtgtcaagagggctaccacaaattagtaatcatgttcacagaaaggataggtccatgaaact

SEQ ID NO: 114708 - DNA, 4643 bp, Zea mays
  unsure (1)..(4643): unsure at all n locations
  Clone ID: MRT4577_36095C.1
accccattcatgtgggagcctctggcactgggtctgtctgtcctgcaataatttgttagctaatattgtcttaggtgtaatattgtcttattacaactggggatgatatgctgttttatcaattttctttcaccgcacagcttggccaagcattgagcacacgccctgatatacttcctagtgcgtactgtcaggagcttgcaaagctacaggatcaaataccaccttttccaactcgcattgcactcaggaccatagagtctcagttgggttctcgaatttctgatttgtttgctgatatcagcccagagccgattgcagcagcatcactggggcaggtttacaaagcatatatttcagacctgagttctccaagttgaaatgcattcctttgatacttanagtaatgcagctcatctacgatctggagagcttgttgcagtcaaagttcaaaggcctggaatggcgcccttgctgactctagatgcacttttgttccacgtgatgtcaggaggcaatcaaatgatttccagggcgtaatgaaccatttgtatgatgtgatgtatgaatttagtttctcccttccccctgattatgcgttggtgataagagctcttggttctctagaagggactgcaaaagcactggatcctgagtttaaagttattgagagtgcatatccttttgtaattgggagactccttgcagaccccagccctgatatgaggaaaatattgcgggagcttcttatatgtgacgatggatccatcagatggaatcgactggaaaggctgattgcagctatatctgaacagtcatcagaatcttcaagcgcatcaggagctgactccagtgagaacgccaatggaagtcctgagtggagatcatttgatatgcattctgtgattgcagctacagaaaacccgaacccgcccggacgcgtgggctctctctctctctactcggcaaaaccctacgctgcccttctttccctccccgtctctccctcccgtgcgggcggcggagctgatgagatcccggccatggcgggccccacctcgcggctcctcatcctcgcccgccgcgccgaccgacgcagatgcctcccttttctcgttccccgcgccttgcaggccgcccccccgaccttttctccggcgttgccgctacctccctgcctccccgcctcaacgccggtgatgagctattcaagtgcatttacaagtgtacatggagagaggccttcatcagaatatgcaaagatcaggaaggagtcactggaaacccagtttggaagaatattgggttcaagttcacgcaggcattttgctgaccgtggctttggtccattccttgctctatacagggctgctactatctcctttcatgttgtaaaactcactatttggcatttgttgctcaatgatatgcataaaagagcagaaaagtttcgagagaccttgatacgcttgggtcctttttatatcaagcttggccaagcattgagcacacgccctgatatacttcctagtgcgtactgtcaggagcttgcaaagctacaggatcaaataccaccgtttccaactcgcattgcactcaggaccatagagtctcagttgggttctcgaatttctgatttgtttgctgatatcagcccagagccgattgcagcagcatcactggggcaggtttacaaagctcatctacgatctggagagcttgttgcagtcaaagttcaaaggcctggaatggcgcccttgctgactctagatgcacttttgttccacatgattggaggacaaatgaaacgatttgctaaggctcgcaaagacctattggtggccgttaatgagattgtcagacacatgtttgacgagattgattatattttagaaggaaaaaatgctgaaaggtttgctactctttattcacatggttcaagtggggtcaattctgaagctagtacaagtatcaaggtcccaaaagtttactggaactatacatgtaaaaccatattgacactggaatggattgatggaattaagctaactgatgctgagcgcatcagcaaagccaatttgaacaggaaaagaatgatagatgagggtctctattgctcattgcgacaactgcttgaagaagggtttttccatgcagacccccatcctggtaatctagttgcaactgaaggtggatctctagcatattttgactttggtatgatgggagatattccgaggcactatcgtgtggggcttatacaaatgcttgtacattatgttaatcgggactccttaggcttggcgaatgacttccattcactaggatttgttcctgagggaacagatttacttgcagttgcagatgcgttgcggttttcctttggtgatgtcaggaggcaatcaaatgatttccagggcgtaatgaaccatttgtatgatgtgatgtatgaatttagtttctcccttccccctgattatgcgttggtgataagagctcttggttctctagaagggactgcaaaagcactggatcctgagtttaaagttattgagagtgcatatccttttgtaattgggagactccttgcagaccccagccctgatatgaggaaaatattgcgggagcttcttatatgtgacgatggatccatcagatggaatcgactggaaaggctggtacatgcttaattattgttccttatcttgttatctcattgttatcacgattttttaccaaaatcatatgatgaaattaccaaaaccagtcttttaaataacaagaacatgctagggagttttgtttgtcatgatatacactcctgatttctctgttcgtatgtgtggaaacagtttcatggacctatcctttctgtgaacatgattactaatttgtggtagccctcttgacacatagaaccactaaggtaagattgaagggagtatccagcctatagatgtggaattattaacaacttttactgttgaccatctatttttttgggatcctgtattttgtttgggctgtatgatctgagctagctcagtttgtgggaatactcacaccactcaggttcgagttgtatttggcttgaatatgatcaacctgcaggggggtaagacaaccccgggcattgcattaagaacttctcacacagagaggattttcctaaccctagactgaatatcctttcttgtgggagtcaaactcaggtcctgcagaggctatcaagtcacataaccatctcagctagagtccctttcacttatctgtttcttcttacttacaacgtgacatggttccttctacttcggtcgactttttaaatatatattctgtgcaagtactgcagtgttgctcaaagaaaaatttgggttggtccagttctggtagtggtacctatgatctaagagccacttcataaactacagctatttgttctcctgttaacaccaatcaacgagttttcacaaccctgatggtagtgctgattggtcccaccccttagacagacaagtatgcatcaaccatcctgggtgtcctcatcacatccaggttgtctggaaggacaggtgtaatcatgttgccatttaaaagggtgctaaagctgtagttttgtgttactatggtgcaatagttgcagttccttgaaactggtcctaggagttgaagtttgagttaggcacacaaaattgtattctgtgaaataatatggtgttaggatcgtaattgcaattttttaatcgtagtttattgagttaggcacacaaaattgtattctgtaaaataatatgatgataggattgtaattgcaatttttaatgttttaagcttcaaatatgcaacagaggagaaatttcgataatctgaaaattttaatgcaacaaattgggttatctttgctcgaaatgggtcatggtctctatcctgttgttggttctaattcttgtgttgggtttgggtagtaacttagtgtgatgagaaattttacagatatttgttttttatttgttcctactaacaacatttggtttttagattgcagctatatctgaacagtcatcagaatcttcaagcgcatcaggagctgactccagtgagaacgccaatggaagtcctgagtggagatcatttgatatgcattctgtgattgcagctacagaagacctatttgatttcattttatcgaggaaaggatggcgggttcgggttttccttgtccaggacatcgttaatgcttcagacgtgttccttcaagaagcgacattcccatatgtatatgcgaaagtgggaaagataggggacctaaatccagagagaagtaagatgatcaggaggctggtgaatactgtgcaatcgttccgccaagctatcaatttggctccagatgcttggagcgccatgctaatccgcactttgttgaaacctgaatcacaaaaatttgttcttgatgtgtttttggccctggctaaccattccagttacaagattccagaaacattctggctatttatgtcaagatttctaaattacttggacaaacaagatatactttaggaacggttaatatatcaattcctttttttttgtgttggcttgaatttatttattttagatcggtcgccactggccaatgttgactt

SEQ ID NO: 114709 - DNA, 239 bp, Zea mays
  Clone ID: MRT4577_36096C.1
atacaaattcagatcagccgacggccaagggtaggagatcctgcgtcgagcgcgcgttggcaatgggtgtggtctcgggagcggctgactcgattgtggaggttttcttacttaccattgaagcagcggcgccgatactcgacgcgcagtcctgtcttcatcataccctatacccggcgccgttcctggaactcaagcgctgttactcctgctagtttggcgactacctagtgggccat

SEQ ID NO: 114710 - DNA, 324 bp, Zea mays
  Clone ID: MRT4577_36097C.1
acctggttttttttttttatcaatccctaagcatacgatgaagtggcaagagaattttcagagttcagtataccacgctcccaatacagactattatggacgatggctgcccccctcttaagcttgaaaatcctcatacacaatgatagaaactgcctgacctgggctgacagatgctctcttgtaattcgcaaacccacaaattgccgtttcacctgattgaagcactttccttgtttatgtttttaagcgaccgactgactacattcaaaagggtgctatgtaaatagtctatccctctggtagtggttttagatattcttc

SEQ ID NO: 114711 - DNA, 485 bp, Zea mays
  Clone ID: MRT4577_36098C.1
aaagggggtttttctttaaaccctttaaaaatttaaaagggcccccttttttttttttgaaaaaaaactggccttaaaaggccccaaaaaaggcggggcccctttaaaaaatttaaaagggccaaaatttattgggtttttaaaaaaaaatttcgccccttttcccggggaaaaaaatttgggggtttttccccccccctaatgggaaaaaaaaaaacccctaaatggcccctttttttaaaaaacttcccaaaaaacgggggggccttgattccttttttatttttttccccccccccaaaaaagcaagttggtttttaaattatttaaatcgggccccccaggttgggccccttttgggaaaggacccccccttggtgaaaatttggcccccaaggttggggccccaaccaaaaaggccagggaaaggttccccccccggggtttgaaaagaaaccttcttgccctaaattaacctcgggggt

SEQ ID NO: 114712 - DNA, 390 bp, Zea mays
  Clone ID: MRT4577_36099C.1
aggggaaaagagggcaagggggaacaaacaacatgccccccacaaaaggcccaccacatcaaccccaacaaagcatggtcgaaaacaacaaccaaacctaagcccccgcttgaaaaaaagcccggcccaaaaaccggccaatatgcagcaggggccaaaaacaccttacccgggagggaccccccccccggccccgaattcccccccaattgcaggggcaacccgggaccggggggacccaaacaccaaaacggtcatggtgctctcaacttgagggaaccccattttatccatgcccccaccaggggaccaatgcaaaaaagctttccccctaaacaaaacaaggaaccgcccccccacacgggggaacatctcccggatggaggggga

SEQ ID NO: 114713 - DNA, 241 bp, Zea mays
  Clone ID: MRT4577_3609C.1
tttaaggataacaacaaattcatgttataagtgggggtggcagtcatagctgtaaatgtaatacattcttaaaccaaatgagaaacaatgaaccagaaaacaaaacgcttactatgtctcctgaagaaatgcaacaaaacaacagagtgtcgtgttcttgactagtttattctcatggacatcctttcattatgtgattggtacactctgatttattttacaaaaacatttttgctcacta

SEQ ID NO: 114714 - DNA, 276 bp, Zea mays
  Clone ID: MRT4577_36100C.1
gcgcggacgcgtgggctcatacgcatgccacggtggcggtgatcaggcccggtatctcatcaggggcgagagtcccaggctcgacggcggcgtcagcatctccccttcccgcttctatccagtggcctcttgccctcgcctccggacctctgcacaccggccggagaccctgcatttctttatacgatgagctggagacttgctctattcggctcccagcagcagcaatcagatccacatttccaggacattcctacgcagtcttagtaccctacc

SEQ ID NO: 114715 - DNA, 138 bp, Zea mays
  Clone ID: MRT4577_36101C.1
ttttgatgaaactaaggaagagtattgtatgctggtttattgacagtggtgtgacactcacccttgcacccaagatgaaggctcttcaaattgcagagaaagctagggacgctgtcctaagaagaaagtctgaccatg

SEQ ID NO: 114716 - DNA, 303 bp, Zea mays
  Clone ID: MRT4577_36102C.1
ttggtttttttttctcaacgcatcccacagggaatagatcaaacaccctgggttaacattgctcattatttgtcatgacaacgggaatacagcccctatggctcagattaactcatttacaatgcctgggaccaaatgttgctgtcgcacaaaggatcatgccaaacgcgcccacacaccaaactatccagaaacaaatatatgaatgctctaacaggtctaaccttgtacacctgctttgtgccaaaatgttgtagtccaaaaagagagggagccctgcttcaaacgaatggtcagaccctg

SEQ ID NO: 114717 - DNA, 1185 bp, Zea mays
  Clone ID: MRT4577_36103C.1
atggcgatggtgccatgcggcgatgacaccgactggtgccacgtgctggacaacttcaacctgttgctgtgttcgtcgtcctgctcgccgaatgctatggccaacagagcggaagactgtctgccgatatctgctgctccacccggacccggccatcatcagagctgctgcaaaaacgaagtcgtcctcgaagcctcttgtgatggcgcgtttgctgcagccgactgcttgtcttcggctctgacgaacctgcagagggaggacgacagtttctatttgcccatgtactctgcgccacccgcagtcggcgatgagtacttctccgatctactcgcgcccgatgccgacggcattgacgaggcgctcctgatgccgttcagcgacatcgatcttcaggtcttcgacagtgacgacgagcacaggcctcctgtcgaccaaatggttaatatgatcccgccggcggttcttcatcatccctccaccgccgggacgcaaaatggaggtgccgttcatgctcatcagaaggccatggcggtcatcgatgactcctgtttccgacgaggagccagtggtgtcgagatggccgtcgtcaggcatcatggtgagcctcgtcaaggaagctcttccgtggcgccagtgccgccaccgtcactgccggggacgcgtgcaaggaggagcgacggccgatcagctcgggcggggaagacgacgaagctggactacatcggcttcgacgagctgcggaagtacttctgcatgcccatcaccagggcggcgagggagatgaacgtcgggctcaccgtgctcaagaagcgctgccgcgagctcggcgtggcgcggtggcctcaccggaagatgaagagcctcaagtccctcatggccaacgtccaggaaatggggaacgtcatgtcctcggtggctgtgcagcaggagcttgcggcgctcgagacgtactgcacgctcatggaggacaatccctggatcgagctcacggacaggaccaagaagctgcgccaggcgtgcttcaaggagaggtacaagcgtaggagggcggccgaagtcaacgtcatggatatggatcgcatctactgctttggccagcatcaccaccagcagctgctgcctccgacgacaagcagttctgacgaccgccatggccagtgcagccgttcctttggctactga

SEQ ID NO: 114718 - DNA, 335 bp, Zea mays
  Clone ID: MRT4577_36104C.1
cggacgcgtgggttcagaaacacaccaagcgaagcgcactagcaacaacctaacaacaatggctaccaagatattatccctccttgcgcttcttgcgctttttgcgagcgcaacaaatgcgttcattatttcacaaagctcacttggtcctaggtccattatttcacaggttcttccaccagttacttcaaaggccttcgaacacccaactgggcaagcctataggctacaacaagcgattgcggggagcgttttacaacaaccaattggtcaattgcaacaacaatttctggtacatttaacaatacaaaaccattgtacgcaacaacaacaac

SEQ ID NO: 114719 - DNA, 345 bp, Zea mays
  Clone ID: MRT4577_36105C.1
ggttggggccttcaaaccaccgggatttatattcaagtgaaatttttttcagcatttacaaccttatttgtactcgcgtccgtccatacaaattaaacctaataaagcacaatgccctttttccccaactaaaacccacccaaatacaccccccaaaaaaagcctaacggcagttgacaaacttacttccagcgttaaatgttcctaaaatgtaccttatccccaagctaccccttttcctttggatttacaaagaacttgaaaaactttccaacccctacaaggaacaacaaggcacttcaaatcttgaatttttgccccgtttaactactttttaccgaactc

SEQ ID NO: 114720 - DNA, 339 bp, Zea mays
  unsure (1)..(339): unsure at all n locations
  Clone ID: MRT4577_36106C.1
gtccgtttttttgcataatcaaatgtatttgaagattggcaggctctgaaagctgcgggtgataacaggctgtaggaaacattaactttcacatgacattgtatacccaaatgacccattatcaaagatcaatgttgatgatgancctgaagcttttttttacgtgaaataaagctgccacgtgacatggccgacataaataacgaactatttatatacggtttcaagcccatgacaaattctgccaaacgacgagcatctgcccacatcaatggcttaaaacccaaggctatatccaataataatcttcgagagatcacaaaaaggaccaagcttact

SEQ ID NO: 114721 - DNA, 575 bp, Zea mays
  Clone ID: MRT4577_36107C.1
agcaaaaggtttcgatgcgttgaaaaggactatttggatgccaaattcaaggaaatagggtacaacaatatgtactcccctcatgctacccccaactcattaatctcctttatgtcacaaattaaaaagttcatgaacaccctgtgacagtaccagaccacagccattatgaaccttcaggagacggacgacgaccgagaggcttttctacaagcttataattgataatgtggcggagctgcttccttttgtttacacaacaactataggtgaggcctgccagaaatatgggtccatctttggacggccacagggtttgtatgtcagcctgaaggacaaggggaaggtcctagaagttctaaggaactagccacataggaacattcaagttatctgtgttactgatgggaatgggaattcgtgtaggcaaactttctctatatagtgctcttggaggatttgatccatcagttctaagcgttcatatattttaaataatgagaaactgttaatgatgagttctacattggactttggcaaaaacgtgtgactggcgaggagtatgatgagcttat

SEQ ID NO: 114722 - DNA, 721 bp, Zea mays
  Clone ID: MRT4577_36108C.1
gacccatgcggaggcggtatttgactgttgcgaggtgcgtccgatcgtagagcggggtctcgataccctacccaggaacccacacacacccctacgccgtcgaccccccacgccgtcggctccgatggggtacgtgctgtcggcggtgggcagggtgctggagcagcccacggcgtggggggcggcctgggagatggcactcctcgcggggcccctttgggcggcggccctcctcggcctgctgctcggctgggcctggcgcccgcgctgggcagccggccttgtcgtcgcccgcctccgcgccccgctcggcaccgccgtgcagcagagggagggtgacacggacgccgtgcaacggaaccgcggaacggtggcgcttggcaggtcgtcggagacggcgacggcgacggcgagcgaggaggtgggggcggtggggatggccgacctggtgaacctctggaggctggtggagggcgcggacggcggcccggcctggaccaagatgatggagaagtcgctgcccaccatgacctaccgggcgtggaggagggacgcccagaccgggccttcacagtaccagagcagcagcatcttcgagaacgccagtccagaggaggtgagggacttcttcggggacgacgagttccggatgtccaacaggtgggacgacatgctcatctaccacatgaccctggaggagtgccggaccactgggacgatg

SEQ ID NO: 114723 - DNA, 1734 bp, Zea mays
  unsure (1)..(1734): unsure at all n locations
  Clone ID: MRT4577_36109C.1
tgggtaccgttctccccctcgngttttttttttttttttttttttttttttttttacgtccaaaaactttaggagatgtttttattagagcatttccaagagctccctataagtcttttctaaatcattttttttttgaaaaacataaaaatgtgtctccaactgttcccctaaagtgcttccgtatcataacaataacagtttctacttctaggttctagactgaactgttaggagtgctgttttatatacagaatgtcttctagaatccaaaggcacagcaaacaccactacagcaggctgcaggagaccagtaatgtgttaatcacagagatgcagccgtgtctctgtgtgtgtgtgtgccctcacctatcacctgcaagttgctgctacatgggggaaacctttcccgtatgtcggcctgcagcagatctcaaaactctgaaatgagtattgcgacgagcaacggacatgaccaggatgacttgggacaggaaccatagctgagagttctgacaagaattatcgggcaggagaatagctcaaactttcgtcagtatttctgcaccgtccctagtcaccagtatggtatgctcaaactgcgcagcccagctaccatcagcagtgacagtcgtccatccatcttcccatgtaacacactctgttttctccattgtgagtataggttcaattgtaaatgtttggccctcaaccatacgccctgagttttcgttggcatgatgtaggataagtggctcagaatgatacatagttccaatcccatggccaacaaagcgttccaccacataatagccataaaaataggcaagcttgcttattttcttgccaatctttctgtagttcacaccatccctgcagatagaaatgcctttctccaagcattcttcagctgcattgagaaaatgtttgatagaatcatcaacttgtccacatgcaaatgttctggaggtacccccatggtatccattcaggaacacatttacatcaatatttataatatccccattctgcagctgagttgaatcaggtaccccatgacagacacactcatttactgatgtacatatacttttaggaaatccatgatagccaagtggagaaggataagcaccagcttcaatgatcatattatggactgcttcgtcaatttcatttgtagtaatggatggcttaactaaagtcccagcaaaatcaagaacacgggcagcaagtttgcaagcagctctcattccagcaattccttgagcatcgtgtaattggcccttgcatagttctggcaatccttttgaaccaacataagatggtcttggaatgtgccctggtacaggaagttgtggggagacctttccacgcctcaaaggtggtcttttctttgattttactgaactttgctcttgtgacttttttatctccataagctcatcttccacccatgcaagcctacttgacacagtgaagcatcgcttaggcactacgaattttccggagcggacggggcggagaggggcagcgagaggccggaaccttccggcctcgaaggtggcggaggggcgcgctcccagtccagcagccatggggagagggatacaggccgccggcgtgagggaggaacggaggtgtgtgtcttcgaggtgtcgtcgagggcggcccgagagaaggcgaagggataagcgggccccccggccggtcaggacgcgtgggcggacgcgnccg

SEQ ID NO: 114724 - DNA, 293 bp, Zea mays
  Clone ID: MRT4577_3610C.1
ggcaggaggaagacctgggcgctcttaaccagccccaacgcccttgtatgcatgtctttatctctgtctcctccttttctgattcttctcccagacaggtgaagaaacaagaaaactaagaaatccgagcggttggagggggagtctgtgtggatgggatggggacgccgggggaagggctgggccgctgctcccatgccctgatccggggagtcccagagagcctggcgtcggcggaaagtgcggcggctggccttcacgctctggatactggcatagctcaaagggagcac

SEQ ID NO: 114725 - DNA, 429 bp, Zea mays
  unsure (1)..(429): unsure at all n locations
  Clone ID: MRT4577_36110C.1
tcgcccacgcgtccgggggatattataaatattgatgtaaatgtgttcctgaatgtaagaaacctcttctaaaatgtggcagaatcatattggatgatgtttccgtttataactagtttggtatgttcctcaacagggataccatgggggtacctccagaacatttgcatgtggacaagttgatgattctatcaaacattttctcaatgcagctgaagaatgcttggagaaaggcatttctatctgcagggatggtgtgaactacagaaagattggcatgaaaataagcaagcttgcctatttttatggctattatgtggtggaacgctttgttggccatgggattggaactatgtatcattctgagccacttatcctacatcatgccaacgaaaactcanggcgtatggttgagggccaaacatttac

SEQ ID NO: 114726 - DNA, 569 bp, Zea mays
  Clone ID: MRT4577_36111C.1
ccggccgggatcagacatcgtacccttcccctcgctccactctccaaatgtctgctcccatgccgtgatcttccgatatcacgatgatggcttccgcgatgcctcgtatcccccgcctctacgtgtgtgcgaccggccgaagcagactcatcctgatcgcttccggtacatgtctcgggcactccgccggccgcgcgcgctgccctgtctgcctatcactcccgctacacacttctccgcatatcgcgatcagactgaatgcatacgccatggccgcctcgcaagcaccatgtcgtatgttcctaccccagattaccctaagcggagctgccataatcgcgcccaatatcccttctagtaacctcatcagagccatcactctgtgaagttggcgcagaacatggcgtaattgcgactatcaccctccagacaaagatggcgagtgcgacctgatctgctatgtgtgatcccgacattcttcaacgtgcataagcaatctctagatctggtggtagagctgcgtctgctactctggctagcccagcatgcccgagaatgattggaagata

SEQ ID NO: 114727 - DNA, 1076 bp, Zea mays
  unsure (1)..(1076): unsure at all n locations
  Clone ID: MRT4577_36112C.1
aggataagcaccagctcaaatgatcatattatggactgctgcgtcaaattcattngtagtaatggatggcttaactaaagtcccagcgaagtcaagacacggggcagcaaagttgcaagcagctctcatcccagtaattccttgagcatcatgtaattggcccttgcatagttcaggcaatcctttcgcaccaacataagatggtcttggaatgtgccctggtacaggaagttgtggggagacctttccacgcctcaaaggtggccttttctttgattttactgaactttgctcttgtgaccttcaaatgtggaagtgtattggtctgttagcagagttattatatatgacacatggcgaaagttggtcttggtgtattagtttgtttttttatggtggagaaccatggtatattagttcaatgtagataacccacaaactgcaagattctcataagatgtgtatgaactagtacaacaacaacaaagccctttagttcccaacaagttgaggtaggttagagttgaaacctatcagaagccacaaatcaaggtgtgtttgaactaatagacagccaaagattacaagaaatctaggatccaatatcttgagtctagaccaaggactctggatactgctaaatatcaagatgcaaaagaactgccaagagcttaaaggagctttctgagccctcctaagtttgtccatgcttgtggtgttgttgtatgtgttgatgttgtaatccgagcggtttgccacactcaatcaatgaaaattcaggtgggtatgctctcatccttttgtatctccacccgctcatcttcgacccatgcaagcctgcttgatacaatgaagcatcgctttggcacaacgaacttgccggagcggacggggcggagaggggcagcgagaggccggaaccttccggccacgaaggtggcggaggggcgcgctcccagtccagcagccatggggagagggatacaggccgccggcgtgagggaggaacggaggtgtgtgtgtgtattggaggttttgtcgaagcgaaaggaaagggataagcgctcgagccgaat

SEQ ID NO: 114728 - DNA, 188 bp, Zea mays
  Clone ID: MRT4577_36113C.1
cccttaaaatttttgacgggccagaacaaaaaccatgtctcccaccaaacacaaggaagggggggggccaaaaaaaaataccaccaccgggggcaggcccaaggggccacccggaaatatcccaaacaacccacggggggcttaggattcaccccgacaccagggggaacagagtgtgcggacaaaaa

SEQ ID NO: 114729 - DNA, 432 bp, Zea mays
  Clone ID: MRT4577_36114C.1
aaccgtcccggcctcagcctcatccccagccacacccatgcccgtgccaacagccgcatccaagcccgtgccaacttgaaggaacctgccgcgttggcagcaccccgatcctgggccagtgcgtcgagttcctgaggcatcagtgcagcccggacggcaacgcctaattgttggcttaatggccggccgtgccggagcaatgtttgcaggaacttaagccagttgagcccgcagcaccggtaccaggcgatcttcggcttggtcctccagtccatcctgcagcagcagcgtaaagcgggcaggtctcgtggctgttggcggcgcacatagcgcagcaactgacagcgatttgcgggctgcatcattcgactctatgcgcttactcctgtgtcggcggtgttctccactgtagaaactatgtgctgttgtata

SEQ ID NO: 114730 - DNA, 706 bp, Zea mays
  Clone ID: MRT4577_36115C.1
tgaaatagctgcttttagaggcttgttcccagcaggaggtgtggcatatataatcgcctcatctttttacttgatgtttttagacttgagcacgtgtatggaagaaaatgcgcaacatgacgtgtactagttttgctgcctccttaaattcatgtgtcctcaatcacgtgcattgtgcccaatgaagaaaattattttagccatataaatgcagcacttgacaataatgactaggaaattatttcccacatcacgagttaccttcatgaacatgtttataatttgtgattgaacatatttctgtcttctgctgctataaattcttcaatggttcatatgtagttacctcacatgcttaaatttctgagaacatatttgcactctgttcttgttggttagtgctatcctactatcctagtcactaccttttgttatgttacctggtcttttgtaatatgactagtaaccaaatatgaattattagaaatgtaacattttgtgtccttaaagacccatagcctgctatattttctaaaagatgcacacatttctgctagcttttatgacagatgcccatatttctgctttcttttctgaaagatattcatatctgtgatactttcaagataggcatgtgtctccagcttgttagtattgagctctatctattcttgaatcgattagttcaattgctggcattttttat

SEQ ID NO: 114731 - DNA, 141 bp, Zea mays
  Clone ID: MRT4577_36116C.1
aagcacaactggggatgaggttattcatggggggggccacacatggcatattttccatcctctccccaaaactgggtccttactgatgttctgggttaataacaggagttcgcatcatcctcttcacagaaataggtactt

SEQ ID NO: 114732 - DNA, 251 bp, Zea mays
  Clone ID: MRT4577_36117C.1
gagcccttttatcactcctggggcgccatctggaggaaggacagctacaaagggtgtaatgtacctcttatcgttcgcctaactaccaagggaggcactaagtccgtctacgacaattgtatccctgcctactggaaggccaacaccgcctacaccgtcaaataaataactttattgctgacaattactttaatccgatctatgctatctatactatattggataggatcccaagcaattttattatacat

SEQ ID NO: 114733 - DNA, 300 bp, Zea mays
  unsure (1)..(300): unsure at all n locations
  Clone ID: MRT4577_36118C.1
taacanggaggaactcctcatcctcctcgcttctgccctttccagagtgctccgtccgtgtgcctgtcatgtcgttgagacagcccgagcatctgggacaatctgctgtaaggttcattgcgagatggagtcgtccgtggactgctactgattataattcggaagcatgaggtggtaagaaacttgagcgtagctaacgagcatgttcacaggctgaaccgtgagagtggctgcgcattattgtacactcagcttgagacacattgccattcggaagagcttgcacgattcatcgatgtt

SEQ ID NO: 114734 - DNA, 1779 bp, Zea mays
  Clone ID: MRT4577_36119C.1
acaaaatacagtttttcacaacttgggtacaaggatcaccagatgcaaatgcacagcctgaaatcaacagacaggcacattaccatcccaagtgaaccacaacgtccataacagtaagtctcagggaataatccaaagtgacagtatgcagtggcaaccagggtcaaagctccaatctgaatcaactctcaattcatgttattttcagactgccatccgttcccttcggctttgcaactcaaggtcctctaccttgataagtacaaagtatcacgtgaacaagaatcgtcgtgggttcctcaatattatttctaaagaaaatctgaaacaagggataccttgtggcttgtaatccctcttgaagatgtgaagcaatctaaaatctatgtaagaagataaataacactcaggagtcaagactagacaactagtcaccccaaagaattagccttttttagccgtgtacacctggaatctaatccagattggcaaccacagcatcggtaacttcctgggtggtgctgctaccgcccagatcctttgttctgtacgtgccttcagcaacgacacgcttcactgccgtctcgagccggtccgcaaatgacgggaactgcaaatgcctcaacatcatagcagatgacagaagcagcgcgacagggtttgctttcttctgctccacaaggttctcattcccaacatttcctgcagaagcgccttgctcaaagatggcgtagtcctgacccacattgcctccaggcatgatgcccgtccctccaacaatacctgcagccgtgttagccaccaaattgccataaagattaggcgtaaccatgacatcaaattgttcaggctttgaaacaagttgcatagagcagttgtcaacaatcatttcattgtactgaataccaggatattttgaagcaacttcacggcaagactccaagaacaaaccatcggcaagcttcataatgtttgctttatgcactgcagtgactttctttcggttgttaaggtaagcatactcgaatgcatatttggcaatcctctcagagcaaaactttgtgatcaccttgaggctctcaacgaccccgggtacgacctcgtgctcgagccccgagtactcgccctcggtgttctccctgattacgacgatgtcgacaccctcgtgcctggtgggcaggccggggaggttggagcagtggacgagtgaggcgtagagatcgagctccttgcgcagctgcatgttgagggaggagaccccgccgccgacgggcgtggcgagcccgcccttgatgcagaccttgttgcggcggatggattcgatgatggctggcgggaccgtgggcatgtctccgtggacgtcgtaggtctcgaagtagacgggcgcgtgcatcgcctccatgacctgccgcacggcgcccgtgactagggggccgatgccgtcgcctgggatgagcgtgacggcgcgcggtgcgccgtccccgggccggggcatgtaggtcaccgtgcgccgcgcgaggacgccgacgtggtccgtgagggactgcagcgcgggcggtgaggaggcggagacgaggcggcgcaggagaggagcggatcgccgcgccatgggtggggaggactaggggtcggggccgcgcgggcaggtgcgaattgcgatcacggaggcgggcgggcggccgcgactcgggagggaaggaaaagggaggtcgccgggaatccgggagagaggaggagaaagggaaggtggagatggatactcaagttgttttaggaatt

SEQ ID NO: 114735 - DNA, 689 bp, Zea mays
  Clone ID: MRT4577_3611C.1
tttccaaaaaaaaaaaaaaaaaaaaaaaaaaaaaaaaaaaaaagcgatgaagaagaccagttcccctctcctgatcgtcctgttcctcacagcagcagccatggcggccgagccggagaagcaggcggcccccgcggcacaggagacggccgtgcacatcgtgtacgttgaccgccccgaggacgccgaccctgaggagttccacatccgcaccctcacccccgtcctcggcagcgaacagaaggccagggacgcagtgctctaccactacaagaacgccgccagcggcttctccgcgaagctcaccccccagcaggtcaaggatctcaaggagcaaccaggtgttctccaggttgtgccgagccagacttaccagctacatggtcctgggtctggcactcaccagggcacgacacacaccttgggccttatgtgaaggcgtatgagaatcaagaagattgtgtttagtatggctgtatggcacaggtctgacgaatgtgtatagtacagtactatgtaagaataagggacgtatcgtctatatactgctttgcgcttgttcagccctgttctaaagcttgtaatgcaccaatgcgtatgttttcaatacaatgacaagtatgctaaaaaaaaaaaaaaaaaaataaaaaaaataaaaaaaaaataaaaaaaaaaaaaaaaaagcggcc

SEQ ID NO: 114736 - DNA, 488 bp, Zea mays
  unsure (1)..(488): unsure at all n locations
  Clone ID: MRT4577_36120C.1
gcggngcccgccttttcacaagccaaccangcgggcgagggcggcgccgcggccgngcaccagcgccgacggcggcgcnagcancgcccgcgcacaaccaagagccggcggcggcgaagacaagcccgncgcggccaggccggggacgacgacgacgacgacgacgacggncgcggcggcggcgggagagggcgggacnaacgggncagcggcgggggccgncgcagggaacagcagcagcagcagcagcgcgccggngaccacgaccgncgggaaancgacgaacanccngaggcaagagggcgccagcgggcagaaggagcgacagggacngccgaaccagaagggcngcgccgggcggagcacaggcccaagcggcacaggggagggaaaagcacgcncgcgagcgcgccgagccccgagcagcacgggagaggccacccgacggacgcccncgacggcgacaaccacaggcacgggcggaaccg

SEQ ID NO: 114737 - DNA, 266 bp, Zea mays
  Clone ID: MRT4577_36121C.1
attactctatgccgggtaatgtggaatgtatttctggttttgttgtccaacggtgggacatgataaatggtgcgcaggctcttagctgaaaccaagagatactagactcccgaacttgtatcatttcttgagccactattgcgtaacaccagagaacatgggcgcaattatttggttatcaaaaacttgaaaaaacgggcgaacttgcaggtcaaggacgaactgtataaaacgtgtcccgctgatggcaagaatgatggagatag

SEQ ID NO: 114738 - DNA, 1282 bp, Zea mays
  Clone ID: MRT4577_36123C.1
acttttcaagacatgttattagaagtgtaatctatggagaacaaccaagaaataggttggatttgtacatacccaaagataatagcaaatcaagtccagttgtggcattcgtaactggtggagcttggatcattggttacaaggcttggggtgctctccttggaaggcggttagcagagagaggaattatagtagcttgtattgattacagaaatttccctcaaggaacaataagcgacatggtcagtgatgcttctgaggcgatatcattcatttgtaacaatgttgttagctttggaggggatcctaataaaatctacttgatgggccaatcagcaggagcacatatcgcggcctgcgctctcttagagcaagcaattaaggaatctaagggagagaatacctattggaatgtggctcaaataaaagcatattttggtttatctggaggatacaatatccaaaatttggtcgatcactttcatgagcgtggtctttatcgttcaatatttctcagcataatggagggagaggaatcactgccacattactcacctgaaattgtcgccaaaaaattaagtgcagaaaccatatctctactacctcagattgtactattgcatggaacagcagattactccataccatcatctgccagcgaaacttttgctgatgtccttaaacaagctggtggaaaagtagagttacaattgtataaagggaaaacacatactgatgtatttttacaggatccactaaggggcggcagggacaaactggttgaagatgttttatctgtcattcatgttgatgatgcaagtgcgcgtgagagggacgcttcggcacctacccctgagcgcctggtttatgaatggcaaattaaattggcccgccaaattagtcccttctaaacaggtctgtacacagaaaggatttgttccaagacttcaacaagcatgtgttgcaacgtgataaactacgtggggtacatgatattttttgggattttcactgggtcaagcaaacgcagcttcaatctttgtttgcagggcgccagttgccaatgatggcagaagatttgccactgatggaagaaataagatttttgaggggtctctaggctgtaggcagtgctctactatactacacctgtttaatttccttggtttctttttacaaaatatatgaaatcctgatacaattctgtaaatagaatacgaagttgtttcatcatcacaaaaaaaaaaaaaaaattcatgtgggaaatgttaaaagtgagatt

SEQ ID NO: 114739 - DNA, 298 bp, Zea mays
  Clone ID: MRT4577_36124C.1
ttttaataattttcaccttggaaccaggaaccaatggaactattcaaatttatataacgtaaccaactaaatgacacataatatcataaaattacgaggtctcactgcagccagccatgctcaagaaacaggagaacatcgtcgtcttagtatttttaattaccacaaacaggaacagcttcgcacgaagtaaatagcatagggaaaatcaagaggtataaatacaaaacaggccggaggcgcctaatatggagaagagtaaaatatagacgttggctttcctttcttccattgcaga

SEQ ID NO: 114740 - DNA, 2380 bp, Zea mays
  Clone ID: MRT4577_36125C.1
ttgggggtctcgcattcggccttcaaccgccgccgcaaagaacggcccacttgactacttgaggttgagggtttcttctcctcgtgcgcactcgcgtttcctcttcatccgctgccacaatctttgcggcgccctcacacaccgccgccgccggctagagcctagggccgtaatcgtaacagccacccctgagactgagatggatacagcggaggaggctgggcaggaagtagtcagcgctgttggggaggatagtatcccggaagctgccgcctgcagcagggaggagaggaaggaggaagaggaggaagaagtggaggtgagcttcgatgaacttggcctggacgagcagctgaagagggcgttgaggaagaagggcatcctcaaggccaccccgatacagcgggaagccatcccgctcatcctggaagggaaggatgtggttgcaaaggccaagactggctctgggaagacctttgcctatcttctcccacttctgcacgagctactgaagttgtcctcagaaggacgtatacgaaaacctgcaccaaatgctttcatcctggttcctactcgagatttatgccaccaggtgtataatgaggcattatctctccttgagctctgtacatgcaaattgagggttgtgcaagttaccgcgagcatgtcggataaggatattactgttgcattgtctggcccccctaacattctcgtatcaactccagcttgtgttgcaacatgcatatcaaagggaattattcgtggacctgcagttaaagagtcactttcaatgatgattcttgatgaggctgacctacttctatcctaccgctgcgaagttgacttgaaagctctcatcccacatatcccgagaagctgtcagtctattctgatgtctgcaacttcaagctctgatgttgacaagttgacaaaactacttctgcataacccatttgttctaactctttcggaggttggtcaagcaaaggatgatgtgatccccaaaaatgttcagcagttttggatctcctgtgatgccaaggataaaatacttcatatccttgcacttctaaagtttgagctcattcagaagaaagttcttatatttgtaaactcaattgatatggctttcagattacgactgatcttggaaaagtttgggataagatctgcagttttgaatgctgagttgccacaaaattcccgactacatattatagaggcattcaacgcaaggctatttgattatctaatagcaacggatgacactaaaacaaaggagaagcaaaccaatgaggaaaataaaaaagaggcaacattgtcccgcaaacggaagaagcaaaccaataaggaaaaccagaaagagcaaaaggtgtcccgcaaacatttgcaacagactttagatgctgaatttggagttgtcagaggaattgacttcaaaaatgtatttacagtagtcaattttgacatgcctctggatgctactgggtatgttcacagaattgggcgaacaggtagagcaaataagactggtgcatccatatcgcttgtttcaccaaaggaggatagtacttttaaagagattgagcatatgttgcaagatgtcgaaaagaaagatatggactgcatttcacctttcccattacttacgaaagatgctgttgaatctctacggtatagggctcaggatgttgcaaggagtgtgacaacacgtgatgtacaggaagcgcgtcgacaagacataaagaatgaaatcctcaattctgagaaattgaagtctcattttgaagagaatccaacggaccttgatttgctcaaacacgataagttgctatgcaacaaggaaattcctgcatacctgcgtgatgtccctgactacctaattgatccgaaaacaaaagaagccagcaatgctgtcaagctttccagggctgctatgcatatcgacaagccccaaaggcggaaaaggcaggggtttaagggaggatcagggaaaagcagagaccctctcaagacattctctgctgagggcaaacgagggagacggaggaaagaaagggagggagaaccagatagaagaaagaagagtaagaaggcgtgaagttgatttttcaagcagtttgctatcaagctcgcccaattttgtaggctttcttgtttgaagcaacttgacaaagtgctgtatcggtgacactcgtaggtcgtagctaaggagcatgtttttattgtctgatggcaactcttaatttttaaagtgtactcgcttccccccttctcctgtactgttaggaacaactaatgacgtgaaatttcattcaccaaatcaggggtatttaaagctaataatgttaagtccccccaggtggaacattcacac

SEQ ID NO: 114741 - DNA, 837 bp, Zea mays
  Clone ID: MRT4577_36126C.1
ggccgctttttttttttttttttccatttgtaactaattgtaactaatttgctttgaaataattcgtacttaccaagttcaaatgcgaatgaaacaaaattcgtcagactcagacatgttgcatggctgatgcctacagaaaagatttggaacgacagactacaatacttggtgcaggtatcttcaaaagttcaaaaccagccgagaacaagcgcgccatcagaaaactcaaagatttctcacaaggctatcgacttagtgctaacaaactcaaaaacaccaaaaaaatgatttgacagttgacacagatcagtacccaggcagatctactcgtcgtcctccacaaccttggtacccagacccttcaggccttctggggggatctcagcaacggtaacaagagagtaaagctcttccttggcgtcttcctcatcgttcctcttgcgtgcgatcctgacacggacacgcctcggcacactccggataccactgctccagatgtgcttgttgagtttcacatcaatcctgatgtcagtggtgcccattgccttctgtgcaaacttcctgatttccttgatagcattgggggctttcttcttgaaggtgcatccgtggaggcgcttgtggaggttgatggtgtactcgcgggtaaccacctcgtccttcctggaccctcctgggcgctgcttcttctccgccatcgcgctccctcactcctgctccctacggcggctgatgactgtggcagggaaagcaagctcagataggtgtatgtcgtcaaaggtttcagaagactgcaccggacccaccagtgctgctgcttttcgtcacaacttt

SEQ ID NO: 114742 - DNA, 662 bp, Zea mays
  Clone ID: MRT4577_36127C.1
ttttttttttttttttttttttttttttttttttttttttttttttttttttttttttttttttttttatccaaaaaactttataaggattatattccattgatttttgtatataaaaaattttttacccccattcagttcctaaaagttttgcccctagtaaaaaataaaattttacctgttcggaccaccaaataaatggcaatttggcaggggggggaaaaataaggcaaaattcatttgcttttgctaaaatttccccccacccgattataaggaggggaaaaaaattttcctttaaaataatttttgtaatgcccccatggttgtttgtcggtactgaaaggctaaatggtaacccttttggggaccccgcggaaggtgatgcccggccccaacgtgggccccatgagcttgtacggaaacaccccagcgccgaaccggttgggggggccagtgtaagcgttgccccgttcaatttcctcctggggggggggcaccttgtccggaaactcgcgcgcggccgcaaacgccggggggtgggccgtccacgcctaataaggccgttccccgaggtactgttcgtcgggggagtgcgtggacagggtgtcaataacggtcataaacgtgggggtctgcgtaaggctgggcagcgccaacag

SEQ ID NO: 114743 - DNA, 370 bp, Zea mays
  unsure (1)..(370): unsure at all n locations
  Clone ID: MRT4577_36128C.1
ggggaatcggagaagacagaaaacaccaccggagaaaacagcaggccaaggcacaaccaaagancacgagcanncnaananaganacaaggccngagggcaagccagcacaaannaggaggcaaggggngggagaggccaagacgaacacacaacaagaaggaaagcgcaaaaggggcacccggaagggaagggaaacacacgcccaancncacaaaggagcagagggacacgcaaccggcaacaccccaaaaagcagacagaagggcaaaaancgggaaaacaaggcaaacggaggagagggcaaaggagaaccggccggaaggaaaccaaaacacccgaagaaaaaggcaaaaaaaaaaagggcccgg

SEQ ID NO: 114744 - DNA, 117 bp, Zea mays
  Clone ID: MRT4577_36129C.1
acccaaccgctccaatacaaacctataaatcctccctatcaatcctttaaacctaacctatttcacgcccgtctaatcccaaatcacaccacatcaataaccgtcaacaatcaaaca

SEQ ID NO: 114745 - DNA, 238 bp, Zea mays
  Clone ID: MRT4577_3612C.1
cttaaaggagatcagaacgaagcttgtcgtgatggtttcttcattctaccttgacatgctctttattggagggagagtggattcgtaccccatattcgactacaaagcataccgcgcttggggaagagcctcttgagggggatagctcaccgatttaaggaactcgatcgccgtaagtgctcaggcaacatcatagtagacggagaacgagaccaagggcaacgcgtatcacaagatg

SEQ ID NO: 114746 - DNA, 814 bp, Zea mays
  Clone ID: MRT4577_36130C.1
catcttcctgctggcagcttccctctccctccgctgctgagcaagctgatccaccgccatggggctggcgatggggaggcttcttgggtggaagaaggaggcgcagatcgcgctgttgggcctcggcggcgctggcaagacggccattctgcacaaactcaagctcggccacgcaatcaccaccggaccaacgatagggttcaacagcgagacgcttgaatacaatggcatcagcttcagggtctgggacgtgggtggtcaaggcgagctccggcccttgctaaggcactacctctatggcgtccagggcgtggtattcgtcgtcgacagcagcgaccgggagtggattcttcgagccaaagatctgctgaacatcattctggacgaggaccagttcaggaatagggatctcgcgctgcttgtgtttgcaaacaagcaggaccggccgaacgtcatgagcgcagcagagatagcggacgagtttgggcttccgtcacggctttgcaaccgtagatggcacattcaaagtagttctgcgatctctggagaaggcctccacgaggggatggcttggctctgcaccaacattcgataggaccaagatcctcctccttcacaaaagactacagtacaaaaggggggcatgctgtttatgtttttgcaggcctaaggaattgtaccagcagatgagatacatgattatgattgctggacaaggatagtttgcagtgtgatgtagaacctgttaggatttatgggctaggcccaattgagaaattcgaataaatcgcaggaaaatcccaaaaaaaaaaag

SEQ ID NO: 114747 - DNA, 135 bp, Zea mays
  Clone ID: MRT4577_36131C.1
taccgaaccataagccactcggatccatctaccactctaccctcctcgtcatcggctgatccgactacacatccgctcgacccctgatccggatctacgacgccgactccagtatccctttactctccgccgtct

SEQ ID NO: 114748 - DNA, 398 bp, Zea mays
  Clone ID: MRT4577_36132C.1
agggggggaaaaacccaaaaaaagggtaaaactttttttttggaaaaaattttttttttttttattacaattggtcactccgggggttgttcacaatgacattgtcccccatgggggggggggaaaaatttttattaaatttttgcccgtaaatgactcaactagcttttttgcccgggggttttttaccgcacaatttttttttagggggggaaacccccctgctaaaagtaggggcttgggatcgttttttgaatgccccacatcccccaaagttgtttgtttttttggtccgccaaaaccccccaaaaatggccttttttacctttctttttaaggaatgactgggggacccaccccaaaaatccctgggcccgggggtggggtttcccctccct

SEQ ID NO: 114749 - DNA, 226 bp, Zea mays
  unsure (1)..(226): unsure at all n locations
  Clone ID: MRT4577_36133C.1
aggggggttaggtgagaagagtnnnggttttttgtgggggggtgagtaaggattggggaggttagaaaatggggtttaggggaagtgntttggaggatataagtagtggganntttttgtgngggtantttattattagggggtgatnaaaagggttattagggggaagatgttactgnnataantgtattggagggggtttgggtnaggggttgttgagatttga

SEQ ID NO: 114750 - DNA, 638 bp, Zea mays
  unsure (1)..(638): unsure at all n locations
  Clone ID: MRT4577_36134C.1
gacaaccccgagtcccgacccgatggcgcccaaggccgagaagaagccagcggagaagaagccggcggccgaggagaaggcggagaagacgaccgcaggcaagaagcccaagtccgagaagcgcctgcccgcctcgaagtcctccggcaaggagggcggcgagaagaaggggaagaagaaggccaagaagagcgtggagacctacaaaatctacatcttcaaggtcctaaagcaggtgcaccccgacatcggcatctcctccaaggccatgtccatcatgaactccttcatcaacgacatcttcgagaagctcgccggcgaggccgctaagctcgcccggtacaacaagaagcccaccatcacctcccgcgagatccagacctccgtgcgcctcgtcctcccaggagagctcgccaaacacgccgtctccccttcttacaagggttcttcgtcgtgtcctctacccctccccctccccgcctatgtatgtgctgtgaaaattgtgatgttctcgtcgggtgaacaaggccagtagctagcttgcctgcttcataaatcgtgcccggattgtaatgggcctctttagatttgacgccccctgttttggaaatatagttgatnccgtgccttccctgctc

SEQ ID NO: 114751 - DNA, 1035 bp, Zea mays
  Clone ID: MRT4577_36135C.1
ccgggaagaaaagcctccattcccgagtctccagccaactgcatccagtccacccccatccccctcgaccccgacaaccccgacccgatggcgcccaaggccgagaagaagccagcggagaagaagccggcggccgaggagaaggcggagaagacgaccgcaggtaagaagcccaagtccgagaagcgcctgccggcctcgaagtcctccggtaaggagggcggcgagaagaaggggaagaagaaggccaagaagagcgtggagacctacaaaatctacatcttcaaggtcctgaagcaggtgcaccccgacatcggcatctcctccaaggccatgtccatcatgaactccttcatcaacgacatcttcgagaagctcgccggcgaggccgccaagctcgcgcggtacaacaagaagcccaccatcacctcccgcgagatccagacctccgtgcgcctcgtcctcccaggagagctcgccaaacacgccgtctccgagggaaccaaggccgtcaccaagttcaccagcaattgagcagcctgcagcgtccacggatttgttaggtctccccttcttacaagggttcttcgtcgtgtcctctacccctccccctccccctccccgcctatgtatgtgctgtgaaatcgttgatgttctcgtcgggtgaacaaaggccagtagctagcttgcctgcttcataaatcgtgccggattgtaatgggcctcgtagatttgacgcccctattttggaatatagttgtatcggtgccttccctgcttgctaattttcttctgccctggtaatttgggatctaagattttgaccgggcagcggagaaccgatgagatgcagggtcataaggttgaaacctcatgggtttgtttcagtctcaggttcttcggcatggatatatttatgagcggtaactatgtattgcagccatatggttcaccatgtgaagaaatgatgattcgatttgcgccaaaaaaaaaaaaaaaataaaaaaaaaaaaaaaaaaaaaaactcgagcccgg

SEQ ID NO: 114752 - DNA, 304 bp, Zea mays
  Clone ID: MRT4577_36136C.1
attctttcttcctgctttcttctaccttcttcccccatcgtccgtagtagcttgattccctatgccgggtaggcggtagcatcgctctctgatctcacctacaccgctacacttaaacagcaggtaccaggaacaggcagggatcggagagctgctggccatggagcctggtcccgacgggcctgctggtggccaaggaaccagtgcgccagcggaggccgggccgtctccgtcgtcgtcatcggccgccgcagccgcctcgtcgtcgagtcggaagcaggcagagcagcaagcgcaagcgcgg

SEQ ID NO: 114753 - DNA, 830 bp, Zea mays
  Clone ID: MRT4577_36137C.1
tacctcgaggccgggccgggaagaaaagcctccattcccgagtctccagccaaccacatccagtccaccccatccccctcgaccccgacaaccccgagtcccgacccgatggcgcccaaggccgagaagaagccagcggagaagaagccggcggccgaggagaaggcggagaagacgaccgcaggcaagaagcccaagtccgagaagcgcctgcccgcctcgaagtcctccggcaaggagggcggcgagaagaaggggaagaagaaggccaagaagagcgtggagacctacaaaatctacatcttcaaggtcctaaagcaggtgcaccccgacatcggcatctcctccaaggccatgtccatcatgaactccttcatcaacgacatcttcgagaagctcgccggcgaggccgctaagctcgcccggtacaacaagaagcccaccatcacctcccgcgagatccagacctccgtgcgcctcgtcctcccaggagagctcgccaaacacgccgtctccgagggaaccaaggccgtcaccaagttcaccagcaattgagcagcctgcagcgtccacggatttgttaggtctccccttcttacaagggttcttcgtcgtgtcctctacccctccccctccccgcctatgtatgtgctgtgaaattgttgatgttctcgtcgggtgaacaaaggccagtagctagcttgcctgcttcataaatcgtgccggattgtaattgtaatgggcctcttagatttgacgcccctgttttggaatatagttgtatccgtgccttccctgcttgcgaaaaaaaaaaaaaaaaaaggccccta

SEQ ID NO: 114754 - DNA, 821 bp, Zea mays
  Clone ID: MRT4577_36138C.1
cattgggtacctcgaggccggccgggaagaaaagcctccattcccgagtctacagccaaccgcatccagtccacccccatcaccctcgaccccgacaacctcgacccgatggcgcccaaggccgagaagaagccagcggagaagaagccggcggccgaggagaaggcggagaagacgaccgcaggtaagaagcccaagtccgagaagcgcctgcccgcctcgaagtcctccggcaaggagggcggcgagaagaaggggaagaagaaggccaagaagagcgtggagacctacaaaatctacatcttcaaggtcctgaagcaggtgcaccccgacatcggcatctcctccaaggccatgtccatcatgaactccttcatcaacgacatcttcgagaagctcgccggcgaggccgctaagctcgcccggtacaacaagaagcccaccatcacctcccgcgagatccagacctccgtgcgcctcgtcctcccaggagagctcgccaaacacgccgtctccgagggaaccaaggccgtcaccaagttcaccagcaattgagcagcctgcagcgtccacggatttgttaggtctccccttcttacaagggttcttcgtcgtgtcctctacccctccccctccccgcctatgtatgtgctgtgaaatcgttgatgttctcgtcgggtgaacaaaggccagtagctagcttgcctgcttcataaatcgtgccggattgtaatgggcctcgtagatttgacgcccctgttttggaatatagctgtatcggtgccttccctgcttgccaaaaaaaaaaaaaaaaagcggcc

SEQ ID NO: 114755 - DNA, 433 bp, Zea mays
  unsure (1)..(433): unsure at all n locations
  Clone ID: MRT4577_36139C.1
tttcctctttatcttttttttttccaccccccccncnccagagaaaaggttttaatattaaaatcaattaaccccttccaaccccaacggggaatttttcttgataaagcggacctttaaaattaaagtcaacccaaccaaagcccacttatgcaaaaaaaaaaaaaattaaaaaaaaatccccaacctttaccggaggtatacctatgtcgctttattaaacctaaacgataaaattgtttaccaaaaaaaattcaaaagcttttgaaaaaaactttctgaaaaaattttcccttcatttaaaataaaaaactttgaaaactactcgtttgaaattaaaaacaaaaaacgccttcactgtgaaaattgccataaactctttaaaattatattaaaaattccgaaaaaagatttcacaaaatgcccttaaaaa

SEQ ID NO: 114756 - DNA, 284 bp, Zea mays
  Clone ID: MRT4577_3613C.1
gagactgagcagacgcctccaggatctgtcggcagctgctgttctgagggagagcagagaccatgtctgacatagaagaggtggtggaagagtacgaggaggaggagcaggaagaagcagctgttgaagagcaggaggaggcagcggaagaggatgctgaagcagaggctgagaccgaggagaccagggcagaagaagatgaagaagaagaggaagcaaaggaggctgaagatggcccaatggaggagtccaaaccaaagcccaggtcgttcatgccgaacttg

SEQ ID NO: 114757 - DNA, 680 bp, Zea mays
  Clone ID: MRT4577_36140C.1
gaatgaatcggtaaccagagcgcttttttagtttatataaactttgattagccggaacgatttcgatacaatccgacacaaacaaacaagacagaaataaactccatttatctctcaatctcacccccctatccctacggggaatggctgacaaagagccactcgtacccattcttatcaccctccgctgctgcgccaagcatcatgtaacgcctgaaggaccgagtcgcatcattcgctcgaaacggaatcggacaaaagatgaatggcatcactgtaccaggcgtagtgccaccaccgcccaccccgtcagcccgacgccgacggcttcgaccgtgaccccgtgctggcacgccgcatccaaccaccctcttccggttccggaataaagtcctgcgtcctttctgcgttcggtggcgtggtcggttggcgtcggcttgtcgcggggcctgcagctgcaatccttccttcacacagcgactcttcttgaacgcagagttctgcgaggagggacaactagcccctccgtcaacactcaacacaaaagtgacacaagtctgactcatggcgcatcagcaagacagcaatggatcaggccggccgcacgtacgcgaacgcgcaatatattgcttccttcaaaaaaaaaagagccacacaagccgcggacgctgggcgaacgc

SEQ ID NO: 114758 - DNA, 1021 bp, Zea mays
  Clone ID: MRT4577_36141C.1
cattgggtacctcgaggccggccgggaagaaaagcctccattcccgagtctccagccaaccgcatccagtccacccccatccccctcgaccccgacaaacccgacccgatggcgcccaaggccgagaagaagccagcggagaagaagccggcggccgaggagaaggcggagaagacgaccgcaggtaagaagcccaagtccgagaagcgcctgccggcctcgaagtcctccggcaaggagggcggcgagaagaaggggaagaagaaggccaagaagagcgtggagacctacaaaatctacatcttcaaggtcctgaagcaggtgcaccccgacatcgattgttgtttatctttaaaaaaaatcggcatctcctccaaggccatgtccatcatgaactccttcatcaacgacatattcgagaagctcgccggcgaggccgccaagctcgcgcggtacaacaagaagcccaccatcacctcccgcgagatccagacctccgtgcgcctcgtcctcccaggagagctcgccaaacatgccgtctccgagggaaccaaggccgtcaccaagttcaccagcaattgagcagcctgcagcgtccacggatttgttaggtctccccttcttacaagggttcttcgtcgtgtcctctacccctccccgcctatgtatgtgctgtgaaatcgttgatgttctcgtcgggtgaacaaaggccagtagctagcttgcctgcttcataaatcgtgccggattgtaatgggcctcttagatttgacgcccctattttggaatatagttgtatcggtgccttccctgcttgctaattttcttctgccctggtaatttgggatctaagattttgaccgggcagtggagaaccgatgaagatacagggtcatgaggtcgaaagctcatgggtttgtttcagtctcaggttcttcggcatggatatatttatgagcggtaactatgtattgcagccatatggttcaccatgtgatgaaatgatgattccatttgcgcc

SEQ ID NO: 114759 - DNA, 1544 bp, Zea mays
  unsure (1)..(1544): unsure at all n locations
  Clone ID: MRT4577_36142C.1
ctcgaggccggccggaagaaagtctccttcccgagtctccagccaaccgcatccagtccaccccatccccctcgaccccgacaaccccgagtcccgacccgatggcgcccaaggccgagaagaagccagcggagaagaagccggcggccgaggagaaggcggagaagacgaccgcaggtaagaagcccaagtccgagaagcgcctgcccgcctcgaagtcctccggcaaggagggcggcgagaagaaggggaagaagaaggccaagaagagcgtggagacctacaaaatctacatcttcaaggtcctgaagcaggtgcaccccgacatcggcatctcctccaaggccatgtccatcatgaactccttcatcaacgacatcttcgagaagctcgccggcgaggccgctaagctcgcccggtacaacaagaagcccaccatcacctcccgcgagatccagacctccgtgcgcctcgtcctcccaggagagctcgccaaacacgccgtctccgagggaaccaaggccgtcaccaagttcaccagcaattgagcagcctgcagcgtccacggatttgttaggtctccccttcttacaagggttcttcgtcgtgtcctctacccctccccctccccgcctatgtatgtgctgtgaaatcgttgatgttctcgtcgggtgaacaaaggccagtagctagcttgcctgcttcataaatcgtgccggattgtaatgggcctcttagatttgacgcccctgttttggaatatagttgtatccgtgccttccctgcttaaaaaaaaaaaaaaaaaaaagcggccgcttttttttttttttttttcagcacaatttggaatatattagaaatttccacactacattgttcctcgggcaacctagtagcactggcctaaagtacgaggaaacgaaacagagccgtcgcaccgtgcggcggcgatctaagaggaagtgaacttggtaacagccttggtgccctcggagacggcgtgcttggcgagctcgccgggaaggacgaggcgcaccgaagtctggatctcccgggaggttatggtgggcttcttgttgtagcgggcgagcttggcggcctcggcagccagcttctcgaagatgtcgttgatgaaggagttcatgatggacatggccttggacgagataccaatgtccgggtgcacctgcttgagcaccttgaagatgtagatcttgtacgtctcgacgctcttcttggccttcttcttccccttcttctcgccgccctccttgcccggcacgcgcttctccgccctgggcttcttctcggccttctcctccgtcggcttcttctccgcgggcttcttctcggccttgggcgccatcgggaattcgatcaaatggagcggcgaacgcgggatgggaagcggcggattgggaatttgttgattggaggtgacgagcgctggtggctttggctgtgtgcctaattttttttttttttttttttttttttttttttttttttttttttttttttttttnnggattttttccccggcc

SEQ ID NO: 114760 - DNA, 568 bp, Zea mays
  Clone ID: MRT4577_36143C.1
aggtttttgggcaggttccagcggtttaccccccaggaatagttaagctttaccattgggcagggtctcagcaaagagaagaaaattccccccaaacctaagcattgtgtcagagtggaaagagacatagagcaaaccctatccgttttcctccatgacccccagcctattgcctccccgcctcaatctgccccatgttgaagtgttgcctaatggtttgaccattattgcggagcagatgccggtggaagccatatcttttcagctctggttgagggtgggttctcgctgggagggagatgaaattaacggtactgctcactttttagaacatatggtgtttaaaggtactccccgcctggccatgggggaatttgagcgggccattgaatcaaggggggcgggcaccaatgcggccaccagccaggattacacccagttttacttcacctctgcgccccaggattttgagcatttggcccctttacagctggatgtggtgctcaatcccaccattgccgatggaccctttgaacgggaacggttagtggtgctagaggaaattcgg

SEQ ID NO: 114761 - DNA, 307 bp, Zea mays
  Clone ID: MRT4577_36144C.1
ggaagctatacaataacatttacgtgcaggggggggaaactaaacacaggcaaaattgggaattagggcccaggttaaaattttaggtgcacatttaagcaaactagtatttgcgaaccacaaagggagaagaaccgcccttaacaattttttacagggccttctgtttaatccaatcaatcccagttggccctgactttccatagggggggggttattaatgtctattttttatttaaaactacacaaggtaaacagggtaattcgcaatgcaaaacagggttttacatgagcatatgcccgattg

SEQ ID NO: 114762 - DNA, 588 bp, Zea mays
  Clone ID: MRT4577_36145C.1
gccgcgcgcgtcgcgtggacgcgcacgggtacaagctggtgtcgatgatacagaatatgaagtgggatatggagtgcgcgatgttcttgcctatgtagaatcatgtttatctaaagggtgattctcatggggaagccctgccaagatagcggcttggagtgacccattggatgactatcaagttctgtacccactctgggaagaactgaaatgtttcctgaaagagtcactccggatgacattaggactcctctcaagagaatgccccttagatctatccttaaaaggacgatgatccaaaggaaggaccacatgtaatgctacctttggcaccatcattgaagaaaccatcactgatgctgccgccatgtcttgtgaggcgttagtaaacgagattatagactcaaagatcgcattagaggactcactggaagcaagaggtgcaacagatgctactgctgatgccctggctgcttacctaagcactcttgatggcacatgacatgcttgtcgtgatgaattgcgtgataaagtgcccagagctggagccagatatggcgcttcattctacatctcgattgaacctgc

SEQ ID NO: 114763 - DNA, 568 bp, Zea mays
  Clone ID: MRT4577_36146C.1
ctcgtcgtcgtcgccgccggtgcctgcgtcgctcgcggacgcgtgcctgtccgacctcccgtccgtcttcccgttcctcagcgacggcagcttcttcccgcagctcgacctcggcgccgtcgtgcttgcaccgccggccttctcctcctcgtggcggtcggtggccccggacttctacgacgggctcgcgccgtggggcgacatcgccggcctcgacctcagctggacaccaccggggagcgccagccggtcgccgtcttgagggggctccggttttagcagtgcggcctcatgagccatcctagcaagcagtgtgttccgttttgatgagccatcctatcctatcctatccagctaggaaaatttaagcagctcgatcaaaattcgcctatgccttcactgtttagatcagggaataatcttgatctgtagttggagccaggatgtaagatctgtgcagtgatttatcatgacaataaaattaagtaggaaaaaaaaaaaaaaaaaaaaaaaataaaggaaaaaaaaaaaaaaatataaggaaaaaataaagaaaaatttataaatg

SEQ ID NO: 114764 - DNA, 459 bp, Zea mays
  Clone ID: MRT4577_36147C.1
taaaaaaaaaaaaaaaaaaaaaaaaaaaaaaaaaaaaaaaaaaaaaaaaaaaaaaaaaaaaaaaaaaaaaggaaaaaaaaattaaaaaagaaaaaaaagtaaataacaagtggaatgcagtgaggtaaactactttttgttggccgctattttgctttgccttggccctgggttgtcccccgcgtgggggggggggaccctgtcgctccgccaccctttttgccttggggggcttgccgttttcgcgggtgggcccgcttgcgtttgcgccccctccgttccgcctttctgacgagtggggcggcccctctggcgattggttcaccccctgtgtcggggttttttcccccgggggggcggtttttttccccggggcggtccgctccgttcccggggctttattgcctgcctttttcgctctcttccctccctttccttcccctgttgcgtgttttttcc

SEQ ID NO: 114765 - DNA, 163 bp, Zea mays
  Clone ID: MRT4577_36148C.1
agcggttgggcgccagactattcatgggcgcgcaggggcagaagctctctgttttcgatgcagccccgaaatacaaggcctgcaggtcatgatacgagtcattcttgctggctcctgttatgggagtggcagtctctcgggattgcggccggacgggaccaat

SEQ ID NO: 114766 - DNA, 200 bp, Zea mays
  Clone ID: MRT4577_36149C.1
cttctcttctctctagttatacatatcaaacacttggccgccacagcggtctctgttcgccgcgcaccgccgcagaaatgagcgtgccgaatcagcaggttgtggattacaccagcttcaagctcgtcatcgttggcgacggtggaacaggcaaaaccacatttgtgaagaggcatcttactggcgagtctgagaagaaa

SEQ ID NO: 114767 - DNA, 1472 bp, Zea mays
  Clone ID: MRT4577_3614C.1
aattcggcacgaggcacccaccgcccacagaagcgcacctctgttctttggtgtggccgtgtggattcaaaaccgctgaccggccgcttatttaagcccttgcccctcccgttttctcctctcccctcggcgctggtgcacgcggctccaacacctgcctgcctgcctgattcttacaccaaccaaccacgcgcgccaagccgaattcgtcttccaccgatccgccccgcccgtttcccattgcttagcttgctatggcgcagcagcagccggtgcggcggattctgaaggtggcaccgccggggaagggggacggggaatccttccccacggtgcaggcggcggtcgacgcggtgccgctgggcaaccgggcgcgcgtcgtcatccgcctcgcgccgggggtctacagggagcctgtctacgtcgccaagaccaagaacttcatcaccgtcgcgggggcctcgcccgaggccaccgtcgtgtcatgggacaacaccgccacgcgcatcaggcactcgcagtcatccagggttataggaactggaacattcggctgtggtacgttcatcattgagggggaagatttcattgcagagaatatcacgtttgagaactcagctccccagggctctgggcaggccgttgcagtccgggtaaccgcagataggtgtgctttctacaactgccggttcctcggttggcaagacacattatacttacactacgggaaacagtacttaagagactgttatattgaaggccattgtgacttcatctttggtaactctgtcgcccttatggagcattgccatatccattgcaaagcagcgggatacatcactgctcatagccggaagtccacatcagaatctactggctatgtgttcttgaggtgtactattactggacatggagaagctggatacatgttcctaggtcggccatgggggccctttggaagggttgtctttgcgtacactttcatggatcgatgcatcaagccttctgggtggcacaactgggacaaatccgagaacgagcgaactgcttgcttttatgagtacaggtgctcagggccaggcgccctcccatcgaaccgggtcacatggtgtagacagttgctggatgttgaagcagagcagttccttgcgcacacttttatcgacccagacgtcgataggccatggctcctccagatgatggcgataagaataccagcctcagcatagtttgatcccggcagccgcaggtcctgcatggttcatgcctcctttctagcctatttaaataaactaagttggaggatgcattatatttgcataagtttgtaacgtttggtgaattagtatccactttcatctcactgtgggcggtggggatagggaatgagagagcttctcttgtaacgaaccccagcactaggctgaaatatatgcagattttattttgcatgaactttttttgtttcattc

SEQ ID NO: 114768 - DNA, 853 bp, Zea mays
  Clone ID: MRT4577_36150C.1
ggggattattttaaaatttatagggggggttaaacaaattaacctttttatattaatttacacaccatctcttacaagccaccccaaacctgcacagcggaagagaaaaaaaaagggggaaaaaaggggacaccaaaaaaaaaaaaaaaaaccccccaaaaaaaaacagacgggacccaaaaaaaaaaaccccccccccccccccgggggaaagggaaaaacccccgcagcaaaaaaaaaaaaccgccccaaaaaaaaaaaaggagggacccccttaatacaaaaaaaaaaaaccccggaaaaaaaccaccaaaaaggggggggccccccccaaaagaaaaaaaaaacccccccaaatctttgccccgggacacaaaaaaaaaactgggggggacaaaaaaaccccccacaagggaaaaaaaaaaaaaacctcacccccgggaaaaaaaaaaaaaaacccccccgggggaacaagggggcccccccccccccggggtgggaacaaaaaccaaacctcccgcggggggggcaaaacacaaaaacccaaaggggactatttggaaacctgggggaaaccccctccacagaggggggggggccccagcgaaaaacaaaaaagggaaaaaaaaaaaaaaaaacccgccgggaaaaaaaaaaacagggttaaacgatccaagaaattccgggcaaccccccccctcgccggaaaaaaaagggggagggccgcccacaaaaacaccgggaaaaaaaagaaaaaaaaaaagcccgccccaaaagaaaaaaaacccgaaaacaaaaaaaagggggaaaaagcccacaaccaaaaacacgggggggtgcaaaagtaaaacac

SEQ ID NO: 114769 - DNA, 437 bp, Zea mays
  unsure (1)..(437): unsure at all n locations
  Clone ID: MRT4577_36151C.1
ggcttgngacctttgggctgatttatgtgcttgactatctttacgggcggtcctttttaccacggcactgcgaagggcgatcattcgacgactaagggtcgtcgcgcgggcttaaagaagagggcggcgatttcttgttagctttcttcgaagtagatcctttggtcggtgtcggaggagactaagtctaagcctactgatatactgcttaaacccgggtatggctgcccttagatcattgacgagaagtagaggcctcccggtaagtctaaggtgcaaggcgtcgtggcgtagtgataagctttaccctctaaaactactaaatcgcgacatccccgcccgcaattccgtcgcatcaagccccgcagttggacggcccgggagtacggcttggctcctcacggaccgccttacgtcctcgaaatcgtacgctcacg

SEQ ID NO: 114770 - DNA, 284 bp, Zea mays
  Clone ID: MRT4577_36152C.1
gcacgcctttagctcggtacttcctgcagtccatgctccgtcactcacaccttggcccgggttaaccttgggacggccagggcctaccagatcaccgcggtctccagcatgctactcccgcagaccttactatcaaacacgtcggcaacgccgcaagtactagggctcgtcttgtgattgcaccggctctgcttgcgctcttgccagtagagcatcactcacataatgacgcgctcatatacaagtgccacatctagatacacctacactgtcactacttgatc

SEQ ID NO: 114771 - DNA, 313 bp, Zea mays
  Clone ID: MRT4577_36153C.1
cccacgcgtgcggtcttacttctattctcccgttcactaccatcacatcagtaccttttgagccgtaatcctttcctcgcccaacgagcgaactactgatcagacaccgatcccaccctacaatagaactacaaaccgtcggttcgacgagcagaacaaaatatacccctgaatggtgaaggcaaaaggtaagatctgcgcaaaaagatggcatcagacgagtataatattcttaacgcacctggacaggctggtgcgaaagatgcacgacgacacgttcaagatcaagatcctgtacagagtgcaattgagc

SEQ ID NO: 114772 - DNA, 440 bp, Zea mays
  unsure (1)..(440): unsure at all n locations
  Clone ID: MRT4577_36154C.1
accgnataaagaaggcaggcgcggggaggcgcgccggaagnacgncaccggcgagaacacggcgacgaagggncggacgctgtagnagcggcccngcagcgccaggaggcgcgggccgcctgctccgccacacggaacaccacggacacgnncccgancangnggaccgagagggagccgcagacgnggaggcacncgaacacgccgcgcaagcgcagcnccacgaagaagaccncgcagaagnccncgaanggcgccgggaaccgcnccgggnagaaggggcagcccggcgcgaccacgcccggagagaacaagaccggccgcnggnacaggcggcagagcagcagcgacggggagaaggaaggcccgnngagcaagcgggagcaccggncgccgaggcggcacgcgccgaaacagaagnagaaggggcagaacacgcg

SEQ ID NO: 114773 - DNA, 207 bp, Zea mays
  Clone ID: MRT4577_36155C.1
atgatgacaacaatttatcttggggagaatttcactggacaattcataaacaaaaccccgtccccatatgggacgcatcaggacaatgaaaataaatctttttttttcacggctccaatcaacaaaattctaccttagtacctctttgccaatttactccaaaactcttctttgaccaacaagtaattcgccaaaacctatatgaac

SEQ ID NO: 114774 - DNA, 580 bp, Zea mays
  Clone ID: MRT4577_36156C.1
gggttgatatatgttcacagtagacattttatagatgattcctgttattgattggaatatgcatggtgtcgatataaaaagacaaagtcataattttctggtcactggcaaatgcttagtgacacccactaagacaatcataattttgcaaggtctaattcaacctacaaagtcttgttaatcctaaagattttgtccaaacgcccaccacaaaaccaagccattgctcccagagagttattcacgacagaactcatagcatgacatctgctgattagcaaacaccagaacatatctctattatatcaaaagcagctgacataagggtattgcaacaaccaaactggaattttaacttctattttagaaggaaagaaaacaatgtactaacagtgggattagtgacaaggtcatcaccgacatatgcagttgctctccaatttcttcagtcatcttagcatagcgaacccagtcgtcctggacacctagtcaaaagtatcttcaataaaatagtggagtgtcaaaaaacctttctcatattctaaaatttaaatacaaactaagtaatgaaaaaagcata

SEQ ID NO: 114775 - DNA, 564 bp, Zea mays
  unsure (1)..(564): unsure at all n locations
  Clone ID: MRT4577_36157C.1
cccgggtccaggnacaccggtttgttcggtggcggcgtccggtcagccgcaccgtccaggnagtggttttttccagtaccagnaggctggnagtgcttgctgggnacgacggnagccactttccaggtgtgcggtgtctcgccagccgtcgaatggtaagnaaggctgtaagcccccntgtttgttcagtgtcaggtcggtntcaagtgtgagcaaggtncacctcgtgttctgatagccggaggaagtgtcgccgagttgtcttgcaaagtatcttgtccacgcccgtcgcccaggactgtgaggctcgtcgtcttggcccggctctgtcgnncttcattgttcgccgtgggtgccttctcctgtgcttctcctcgccctgctattttggtcgtgctcacaacactttnngcaggtattcaccgtggtaagtagacactcttctggtgaagcagtgtagctgcaccttcgatctgtattcctggcnggtggtagtattcggtatattgcgtgttgtgatatatggtggctcagctaagntgattcttgtaggtatgtgtatta

SEQ ID NO: 114776 - DNA, 181 bp, Zea mays
  Clone ID: MRT4577_36158C.1
ccgcgcacatacacaagcacaagcgcacctgatcgctggctcctgagggtggccgccctatcgactccccgctactaaaggcgcaagccgacgtatggcggctcagcctctcctacctcacgcccctgtcactgtcgtgcgccgaggagcttgccagtccctacgggggtctaccgccgtg

SEQ ID NO: 114777 - DNA, 471 bp, Zea mays
  Clone ID: MRT4577_36159C.1
aacacagaatatcacaaagtccacataacatagtccttaatacaaggtccacataacatagtccacaatacatagtccacatcacaaagttgacatcacaaggtccacattacaaagttttcatcataaggtccgcataaccatgttgcatcggctccttttcctagtaccacatttgtcccagcgatgcgctggatcagcaatgtatatcggaccggtgtacgttggccactgtgactcgtcaagaaatggctcaaaacgagggctccaagtacgtactaagctctccacactgaactctgaagggatcatgctctcaaatgcaaagttacgatgacgtgcggcggcaacataatgagaacatggaaagtggtactgtctaggtttaccacaaccacacgaaaatgcatcaagtaacacaacatgtgtcctcgaaggccgcacctcaccgtcggatgttgtgccacccat

SEQ ID NO: 114778 - DNA, 538 bp, Zea mays
  Clone ID: MRT4577_3615C.1
ccctcaccactgtagtactccgagtgctgaaatccagtggatgaaccgtacaggatccaacacgccaacggaggtggcatcctacctctgtcaatctaggtcctcacaacagtcatgagccctataacaacagttacctgcggcggactgatggaaccataaaacaaggctgcatcaactccaataccgagcgcgcgcaaacacagctgcctagtctgggaaagatcagatgggtgcatgcaaccaactaggatcattgaaccactgcgtcctatttgtcgcatgaacaccaccatgagacagatccctgaacctaccgccagagagcattatacgcaccgagcttaagccaacgctactctacctgattatttacagaggcccctactactaccattacctcgctcgctagcagtgagccctgctaaccttgttgacacaaccacaactggtcgacggtctaccaccgcgttgagactaacgctggcaccctattacaactgcgacaatagctgactttcaaccaacttgctttgac

SEQ ID NO: 114779 - DNA, 317 bp, Zea mays
  unsure (1)..(317): unsure at all n locations
  Clone ID: MRT4577_36160C.1
acccactccctcttctatcacactnatntnnctatactggtggactttaaaaccgtctacgacatctnccnccnatcccttnacatttatcncccaacctacaccaacctcaacnatcttgtttcccaggtcatctcatcctttacttcctccctgaggttcaataatgctctgaacgttgatgttaacgatttccagaccaacctggtaccctacccgaggatccacttcattctttcttcgtaccctccaatcatctctgctgaaaaggcctaccacgaacaactctctgtgtctgagatcaccaacagttcctt

SEQ ID NO: 114780 - DNA, 1311 bp, Zea mays
  Clone ID: MRT4577_36161C.1
cctcgaggccggccgggattcctcctgcgaacatacgaaccccaccacggtacccttacctctcgccgctatagctccgccgccgctttgcttgcctcctcagttttcactctcgcagtcacggacatctggctgtttttacattgggactctgctttttcctgctcccaacagcgacacctctttccccgcctcttcctcctcccgcttcggattcccaacccccccgctcaggcctcctcccttcctcccaccaacccaaaaccctagccgcaacgcctacgcatggcttcccccgcgcgccccgccgccacctccgtctccggcgccttcggcctgccccccgacgcgcgctgctcctacgaccagccccgccgccgcgagggcttgcaggacgagaggatggtgcagacgttcgtggccgcctacgcgcagccgccgccgcagcaggacggcttctacccaaaggaagccgtgatggcggccgtggaggagtgcatgcggaagcaggccgacgcgctgctgcactcgctcgacggcatcgggggcaggctttcgcagctcgagctctactgctacaagctcgagaggtccatcggggaactgcgcagcgacgtcatggactaccacagcgagagcaccaccaacttcagatgcatcgacaagaacctcggacaggtccacaaatccttgcaggttcttcaggataggcaggacttggctgaaactccaaaagaactcagcaaacttcaaatagcacatgaggcaccctctcatcagaagggtgaggccaccggttttcccatgcttgcgccaagggacaatgaccacagcacacatgctccaaatcatgaggttgcccttttgcggcttcaccaagttaacgggatgcagtcccctgccgtgcaggtccaaaccagcggtggctttgttctgcagcacctggtgcctgtctctttgagcacgcagcatgatcagcagcaattgaaccaggctcctgtgtactatgtgcaaagccaggatcatgctaaatccacagagagcaaggcgatggaacctttggttcaaggtgtgcagccacttgtccacaaccctgaagtcatggctcaagttgagctacctcagaaacctagtcaagcaactgaattgtaccctcaacctcagaatcacagactacagatgcctacccagcaggttgattcgcatacatggcatccccaacagcccatggtgcaacagcaccaatacattatccaacaagtttcacgacacatggctcaacagcagtcctcggctcctcattctcagagg

SEQ ID NO: 114781 - DNA, 230 bp, Zea mays
  unsure (1)..(230): unsure at all n locations
  Clone ID: MRT4577_36162C.1
caccactcaccactcnttnnnntgcnccaatcagaacgcanatgtctctcgcaatgcgcaaagccatcgctgatgtgcganncagggaaatggattgaaatcactcaacgatgccttgaggaagatcagtgccactttgactgctgcactcgacattgagtcnatcaaggcattgactggcnagntcaactggaccagcgaaganggactcgtgccccagtggccgtgtc

SEQ ID NO: 114782 - DNA, 446 bp, Zea mays
  Clone ID: MRT4577_36163C.1
gaacgatcgctttcccttacgtggtcgctgcgtcggtagccgccgaagtgcgaggcgcgtcgctcgacgggcggacggctcgtctatcggcgtcctgtcgttgctcatgcgcgaggttctcgctcggggtctcgctgctcggtgtgtgtcgactgtgtcgaccacgcacggcgtgatgctcccactccacttgtcgcagtaaacaataactggaactttcctctaagtgcatgacaatacgtcccaatcgcctaagcatcttacagttgcatgtctatacaagtaactctttgcgtgcaggcaacgaccgtgatgacgatacataaaaaacgctatctagtatgactgcttgtgtgttgctctttggccttcatacactgtcctatgactcatgctcatggtaaggtgtacctccagtcaatgtaggtacaaggtattcccattct

SEQ ID NO: 114783 - DNA, 808 bp, Zea mays
  Clone ID: MRT4577_36164C.1
aagatattaaatgttacaaagtcagatacaaaggatggtgtatatgcttttcatttctgaacatgtaaagagcttgtgcttaaaagctacactaaatcactaatagtgccatagtgcaatttagaagagggggcgataattagcaacgctccataagctcacttgcttgtagccgagggaaaatttcttgaatataggatgcaaacatacaggaaacgatcctcagaatatacccattagttcacattggcccacatgccctatgatttatcacattgtgcacttgtgtggtaccaaccacgtgctcccaagatgcatggcttgcatggttttcattaggattaactgcaggcaagtagcctcttggtctcccaacagcgtccaatagggcagacaagatgccaataccaggcagcgcatctaaaccgtacaaatgcaatgtgcgagttttgtagatgaaccctccacaacaaagtatgcttgataagacaatgaacacgcaagaaacaattccaaattttgcccagcctttcatgggatcactctctttctcttgtctgtaaccacattttttcgttagtgtaaattcaattgggtcatagccctccacagggataaaaatatggacctgataaggactggttcgaacaatttcacatctccaatccacattcaaaactgtaggagacagggtactaggcatggcatcattgaatgctgatcctgcaagtgtaacaccaagcccttgcactggattaaccttgaaaggtcggctccaaacaaggcctgaaattgaggacttggcgct

SEQ ID NO: 114784 - DNA, 428 bp, Zea mays
  unsure (1)..(428): unsure at all n locations
  Clone ID: MRT4577_36166C.1
gacccacgcgcnncgaaaaaaaaaaaaaaaaaaaaaaaaaaaggggaaaagaaaaaaaaaaaaaaaaaaaaaaaaaaaaaaaaaaaaaaaaaaaaaaggggcgggccccgccaaaagaacccaagccaacgaacccggccagccaacggaaaagccccncaaaagggccaccaaaancaaancaaccgcccnncggggaacggcgggnnaaccgaaaaaacccgggcnnaacccaaccaaancccccnaaaaaacaaccccccnncnccagcnggcgaaaaaccaaaaaggcccgaaccaancgccccnccaaacaggggcgcagccgaaagggcaaagggaaccccccccgaaccggcccaaaaagcccggcgggcgcgggggaaacccccagcggaaccgcaaaaccggcaagcccccaagccccc

SEQ ID NO: 114785 - DNA, 197 bp, Zea mays
  Clone ID: MRT4577_36167C.1
taagcggcgcctttttttttttttttttttttttggggggtttttttgtgtaaaccaaacatctgtttttattttttatctccgcttgttgttcaaaaagtttgttatatacaacagcaagtgaactatactaccaggtaacacgtatacacgggagtattcagtcttataacggaaacagaatttgcccttttctt

SEQ ID NO: 114786 - DNA, 467 bp, Zea mays
  unsure (1)..(467): unsure at all n locations
  Clone ID: MRT4577_36168C.1
gaaagaggggcacgtttttgtcatgaaacttttatttaaccaccacggtataccgtgagatgacatacatgatccaggggactgggacaataacaggcggtcattacagtagcagcacacacgagacctggacctgacaagcgacaacacggagggtcgagcagactaggccatacgcgcatgggggtcacgtattaactggctggctccgcgtcggaggacatgacaactagaggaggtgcagattatttatggaataacaggtccgaaattgaaggtcttttgccataaggttgttaacctgtaatggaggggggatggatcttgctgtctatagtctcatatggggaggacgaggtccgggagtgacttgtgcgcgctgttggggcggcggctctgacacaggcacttggaccctgcagctgcagacgacgacncaacacgagggggtgaggaggacgaggtag

SEQ ID NO: 114787 - DNA, 398 bp, Zea mays
  Clone ID: MRT4577_36169C.1
gtcataataatatgcatgctcctcaacttaacacagggaaaacaggtcaggaagaaagtgaagggcttcttcaagcgctatcctgatgctcaaacagaattcagaaattctctaaggcttacgttggagaagaatggacctatatcactgagctttgtggtgttggcaagtatgctgctgatgcttacgcaagcttctgtgctggaagggcaaactaagtggttccaaaagatcacaagttagtagattactggaattatgtctgttttgagttaccctcgattcagaaatcgcaggacgctggagtgaccgagctgggaaaccttgtcgctaaagtgcacgaagttgctgtgagctgttgacatgggaaaacagtaacgcggtgggaagcgcttttg

SEQ ID NO: 114788 - DNA, 816 bp, Zea mays
  Clone ID: MRT4577_3616C.1
atcaaacgaaccgcgcacgcttccctgactcatccaatccacgcacaccaacccccattctcggccgccactcgccgctccggcaagtctccagagatacgcgtgcggtgcgacggcggtatggacgcactcccggatggcgtcgtgcagcacatactctcgcagctcagcaacgcccgtgacgtggccgcctgcgccgccgtcgcccgctgctggcgcgactgcatgcccttccttccgtcgctctatttcccgcgtggcgcctttgagtccgtcggcgtcggaccggcgtcagccgtggccgcggccgacgatgtcatcggtcggatggtcgatgccgccgcgcgcctcgaggagctcgtagtgtactgccccttctccgcgtccctgctcccgcactggctcgcggcgcgggccgccacgctgcgcgtgctcgagctgcgcgtggaatccgccgccgacgacaagtcgggccacctggactccatcggggtggccacgagcctcgaggagctcaggctgtgggcgctcaggatgacgcgcgcgcccgcgtggggccagatggagcggctccgcgtgctggaggtcgtcggcgccgtgctggaagacgccgcggtcaacggcgccgtcgccgcctgtcccaatctcaccgatctcgcgctgctcgggtgcgagtgcgcccggagaggcagtcatctcgctcgcccatctcgagcggtgccggctcgatttcgtcggctccggcaacacttctctcaggtttgccgcgccgcgcgtctcgtcccttgaggtcagggcttctcatgatctatctgc

SEQ ID NO: 114789 - DNA, 1733 bp, Zea mays
  Clone ID: MRT4577_36170C.1
aggaggcactgccggcagctccattaattgaggaccctgtgccgaagtagaaaagaggcacaaaattcggcacgaggcacaaatcacgcagatggaaaacaaggtgatgacagagggtgcgacggtaaggaagaaacataggcggcagaaggtgaagcaggagcaatctggccaaacaccatttctcaatgatgtctattcaaaggcaggggaagaagctgctgctggtggcgtcatgggcagtcagtgtgtcaagaggatcgaccgcagcaagaattccaaggttttgaagaagcagcagacactgccccaaggctttttccctcccatagctaatcccgatttcattgatcaggaccccaattattgttctccttttggtgcattttttgcccaattcgcctacaaacctgagcgccggcaagatgggaatggttcgccacttcctagtaccactggtcgcacagcgaggctgcctcctcgaggccacccgtcatctgggtcttctctgcttactgcaaaagaggtctccaaggctgcccggacaacaaccttgaacaccaagcaagcatgcccagcctcagcatcaatctcaagttcacaagaaggtgtaagggtcaagggaaagaaaaaacctgaggagaaaacgacaatggagaaaaagccaaggaaaccaccgatattacttagtcctgccgagaagcggtcagataaataccgccgcctgccgctggatcagctggtgcccccaccacgctccccccataagctattgcaggagaagtatgcttctgacccctggaaggtcatcgtaatatgcatgctcctcaacttaacacagggaaaacaggtcaggaagaaagtgaagggcttcttcaagcgctatcctgatgctcagactgcatatacagctgaccccgaaaagatggcagagtatctagcacctcttggactgcagcgtgtgaaaacaaacagaattcagaaattctctaaggcttacgttggagaagaatggacatatatcactgagctttgtggtgttggcaagtatgctgctgatgcttacgcaatcttctgtgctggaagggcaaacgaagtggttccaaaagatcacaagttagtagattactggaattatgtctgttttgagttaccctcgattcagaaatcgcaggaggctggagtgacggagctgggaaaccttgtcgctaaggtgcaggaagttgctgtcagctgttgacatgggaaaacagtaacgcggtggcaagcgcttttggtgtttctgcttgcagcttaataatgttattcgctccgttctttttttatctgtcatgttttagttcaaaaatattcgaggactgaggtagtataatatatggggtatttatctagttattggggtagcctatgtttcaatgctggttttgagacaaaaattgaaggtaactagccaaaaggaagaaagaaaagtgctgattttgtgtgcatcctgcatgcccaagaatcctatctttaaagtcctgaatctatggaaaacttaaactcccaatgcatgcgtattgtattcaattaatatgcatgcatgtgtgtgtggaggtgtagcgcgcgtggctctaagcagtcaaatgatcaattgatttggtgatagtgcaatcaatgggactaaccaatgtggtgtttggtaaaccatgagaaagagaaaaaaaaagaaaagttaaaaaaaggtgaatttt

SEQ ID NO: 114790 - DNA, 832 bp, Zea mays
  unsure (1)..(832): unsure at all n locations
  Clone ID: MRT4577_36171C.1
ggtaccctcgggctggccggatcgtatcgcctggatttctcttaggctcacccgtccgctcggctcgcttccttccccactctctctgatcccgtcgcacttccctcctcgctgcagcccctctactattgcgattaccgtttcctcgctgccctttcctttttcggccggcagcaatcaccggggcaagcgaaccctcgatttgcgtccccgctctctgctagcgcccctaaaagaggagcgaagcgatgtctatgtcgaagacgggtcaggccgcggagaaggatgagcagcagcagtcccgagggatagcactgatgcagggcatctgcgccgtggtgtaccgcaaggccgataacacgccctgccccatcaagcagggtctctacttgggatctgttggagcagcattcaataaggacgctctcaagagtttgaacatcacccatatcttgatcgttgcaaagtcactggatccagtatttccagctgaatttaattacaagaagatcgaagatgaagctataagctctggaggcaatgttttggtccattgctttgctgggcggtcaaggaggtaatgtctctctccttttaattagtgagacactaacttatattagcactaacttgtcataatttggtatgaagtgctcttatatgttcaattcagtgaacgagacaagcatatggcaaaaaggaaaatagctaatctgtttcagtgctgtgtattatttcatacaacacctgcatttcttggtatcttgatcatggnttgtctccagtatatcatgttccatatcttaaacatttagactagaatacaatggct

SEQ ID NO: 114791 - DNA, 548 bp, Zea mays
  Clone ID: MRT4577_36172C.1
tcgagcggccgcccgggcaggtagaaataagaaagtacatttctaaaaaaaaaaaaaaaaaaaaaaaaaaaaaaaaaaaaaaaaaaaaaaaaaaaaaaaaaaaaaaaaaaaaaaaaaaaaaaaaaaaaaaaaaaaaaaaaaaaaaaaaaaaaaaaaaatttttacctacgctgggaaccccctttgggggaaaattttccacattcttccttcccccttgggggcccttttgaccggccttttttggggccccatttttcccctttttaaaattttttaacaatccattgcccccttttttaaaaggtgccccttggaaaaaccttggcttttcccaatttaatcgcctggcgcaaaatccccttttttccgggtgagttaatagcaaaaaggccccttccgttcccctttccaaacttttttgcaccttgattggaaaatggaccccccctttaccggccctttaaccccggggggcgggggggttacccccaacgttacccttccttttccagccccttattccccctttttttcgtttttttccc

SEQ ID NO: 114792 - DNA, 627 bp, Zea mays
  Clone ID: MRT4577_36173C.1
tatgtgtggtactaccctacaatgatgtttacatttttttatattaaatgcaataacgtgctccgctcactaagtccatttagtaaaaactcaattattggataaaccacgaattaacatgtccttaacctactgttgtttcatgtagactgtcttaatccatagaagtcattgcatagcattattattttttcctgctgaattatctttgtcaaaatgttcagtgtgacgatcgttgttgcatatctcatgaagaagcatcaaatgagcctcgaaagtgccttgtcactagttagaagtaaacgacctcaagtggctcctaatggggggtttatttcccagctggagaagtttcagaaatccttgcaagtggagcaggaatggagaatgcaacctgtgcagcactgataattatactagtgttataataggtgcagaaggcctcatatgtagtgaaggcgtatgcgttgtaagagcgtcttgaccgcgtattatgacatctggataacaagcgaggccttggcaaactttatgatgtaaacagcaagcaacgttgttcatccattgggatgcagtttacatgttgaataatattaaaaagaaaaactaaaaaaaaaaaggccccta

SEQ ID NO: 114793 - DNA, 461 bp, Zea mays
  unsure (1)..(461): unsure at all n locations
  Clone ID: MRT4577_36174C.1
gaagcagccgacgttgctgcttccgcttccacagaatggggggtttaacgaggactcataggaccaatgcgtctttcatacgttccctagggaaattcaaggagaagcggggctctggcnnncacatgactcacagggcacagggataagaggtgtttcaaccagagacatgatagcaaggtactntcacgaccgcaagatacatgagttggttgtgctgatttaccaacaaggacatcactgcccaaatgatatctgcttagttagtggatgatcaggctcttgcttctgcctacttgaatgagttgccacgatatggtcttgtagctggtctgaccaactatgcagatggctactgtactggccttttagtggctcgccgcgtgctcaagatccgtgagttggatgaggactactagggcagtgctgacgccactggtgacgacttatgtgttcgagcc

SEQ ID NO: 114794 - DNA, 964 bp, Zea mays
  Clone ID: MRT4577_36175C.1
tcgaggacgtccggagaatttcattagcaatcggtggccacagagagttaactaaaaataattcagcgacagatatcttcgactcctcgttcgtggttccccatcgtcatcgccatggatttctcttaggctcacccgtccgctcggctcgcttccttccccactctctctgatcccgtcgcacttccctcctcgctgcagcccctctactattgcgattaccgtttcctcgctgccctttcctttttcggtcggcagcaatcaccggggcaagcgaaccctcgatttgcgtccccgctctctgctagcgcccctaaaagaggagcgaagcgatgtctatgtcgaagacgggtcaggccgcggagaaggatgagcagcagcagtcccgagggatagcactgatgcagggcatctgcgccgtggtgtaccgcaaggccgataacacgccctgccccatcaagcagggtctctacttgggatctgttggagcagcattcaataaggacgctctcaagagtttgaacatcacccatatcttgatcgttgcaaagtcactggatccagtatttccagctgaatttaattacaagaagatcgaagtacttgatatcccagacactgatctgttaaagcattctgatgaatgctttggtttcatagatgaagctataagctctggaggcaatgttttggtccattgctttgctgggcggtcaaggagtggagcaggaatggagaatgcaacctgtgcagcactgataattatactagtgttataataggtgcagaaggcctcatatgtagtgaaggcgtatgcgttgtaagagcgtcttgaccgcgtattatgacatctggataacaagcgaggccttggcaaactttatgatgtaaacagcaagcaacgttgttcatccattgggatgcagtttacatgttgaataatattcactgcaatttctcttcc

SEQ ID NO: 114795 - DNA, 749 bp, Zea mays
  unsure (1)..(749): unsure at all n locations
  Clone ID: MRT4577_36176C.1
cttcccactctctctgatcccgtcgcacttccctcctcgctgcagcccctctactattgcgattaccgtttcctcgctgccctttcctttttcggtcggcagcaatcaccggggcaagcgaaccctcgatttgcgtccccgctctctgctagcgcccctaaaagaggagcgaagcgatgtctatgtcgaagacgggtcaggccgcggagaaggatgagcagcagcagtcccgagggatagcactgatgcagggcatctgcgccgtggtgtaccgcaaggccgataacacgccctgtcccatcaagcagggtctctacttgggatctgttggagcagcattcaataaggacgctctcaagagtttgaacatcacccatatcttgatcgttgcaaagtcactggatccagtatttccagctgaatttaattacaagaagatcgaagatgaagctataagctctggaggcaatgttttggtccattgctttgctgggcggtcaaggagtggagcaggaatggagaatgcaacctgtgcagcactgataattatactagtgttataataggtgcagaaggcctcatatgtagtgaaggcgtatgcgttgtaagagcgtcttgaccgcgtattatgacatctggataacaagcgaggccttggcaaactttatgatgtaaacagaaagcaacgttgttcatccatttgggatgcagnttacatgttgaataatagtcactgcaatttctcttcg

SEQ ID NO: 114796 - DNA, 292 bp, Zea mays
  Clone ID: MRT4577_36177C.1
ccccccccccctttgaacttttggaggaaaaccggcgccacccccaaagccgaagaaaaaagaacatcccaagatgccaactcgttctagctgcgactacattacagttgaacctctctaaaaaggccacttggggcacggccagcctagggtggacagccaaacctgccccagctccggtaatccttactcatgaccgacattaactggggtctttactttcgtacaacgtatctatccatgcgaaaaaaacggaatgataggagcccaaaacagaacacttccacacatg

SEQ ID NO: 114797 - DNA, 1596 bp, Zea mays
  unsure (1)..(1596): unsure at all n locations
  Clone ID: MRT4577_36178C.1
gaagtcattgcatagcattattattttttcctgctgaattatctttgtcaaaatgttccccgtccgctcggctcgcttccttccccactctctctgatcccggcgcccgatatcttcgactccacgctcgcggttcccgatcgtcatggccacggatttctcttaggctcacccgtccgctcgggtcgcttccttccccactccctctgatcccgtcgcacctctctccacgctccacgccctcgactactgttagtctccgctgcccccgctgcccttttccttctccactctctctgatcccctcgcccttccctcctcgctgcagcccctctattattgcgattaccgtttcctcgctgccctttcctttttcggtcggcagcaatcaccggggcaagcgaaccctcgatttgcgtccccgctctctgctagcgcccctaaaagaggagcgaagcgatgtctatgccgaagacgggtcaggccgcggagaaggatgagcagcagcagtcccgagggatagcactgatgcagggcatctgcgccgtggtgtaccgcaaggccgataacacgccctgccccatcaagcagggtctctacttgggatctgttggagcagcattcaataaggacgctctcaagagcttgaacatcacccatatcttgatcgttgcaaagtcactggatccagtatttccagctgaatttaattacaagaagatcgaagtacttgatatcccagacactgatctgttaaagcattctgatgaatgctttggtttcatagatgaagctataagctctggaggcaatgttttggtccattgctttgctgggcggtcaaggagtgtgacaatcgttgttgcatatctcatgaagaagcatcaaatgagcctcgaaagtgccttgtcactagttagaagtaaacgacctcaagtggctcctaatggggggtttatttcccagctggagaagtttcagaaatccttgcaagtggagcaggaatggagaatgcaacctgtgcagcactgataattatactagtgttataataggtgcagaaggcctcatatgttgtgaaggcgtatgcgttgtaagagcgtcttgaccgcgtattatggcatctggataacaagcgaggccttggcaaactttatgatgtaaacagcaagcaacgttgttcatccattgggatgcagtttacatgttgaataatattcactgcaatctcttcaaatgaaccaaagaggggtaatagttggtgctctctctccttgaaaaataatggctctctccttttaattagtgagacactaacttatattagcactaacttgtcataatttgggatgaagtgctcttatatgttcaattcagtgaacgagacaagcatatggcaaaaaggagaatagctaatctgtgtcagtgctgtgtattatttcatacaacacctgcatttcttgtgatcttgatcatgggttggctccagtatatcatgttccatatcttanacattagactagaataacaatggctcctattgcttgggagctccgcanaaaaggtggatgacatttctggaatcaaaatattcct

SEQ ID NO: 114798 - DNA, 466 bp, Zea mays
  Clone ID: MRT4577_36179C.1
acccggggggaaggggggtcaaatcttttcggaattgacatacccatcctttttatgggggaaaaaacatgcagctcccggccccaatttttttgcagaggcccaaagcacaaccttctaaggggggaaacaaatgctttccccggctaacggggccatgggctttgcaataccctagatcccctaccaaaaccccaaacgggagaagcaaggaaaccttacaaaacggccatgggggtacaacactaaaacaagggttccacacaggtagcacgggactgatcactgggcccgacccccgggagggaaacggggaacgggcccccccacaggacaactgaaccgaactgaactgcacaggcggggggggcaaaacaaaagaaccggggaaaaaaaggccggggggttcaaaaaaaggagcccttgggggagggggccccccccacgggcctaaagaaggtgggga

SEQ ID NO: 114799 - DNA, 290 bp, Zea mays
  Clone ID: MRT4577_3617C.1
gtactcagtaaccatacttccgaataataacactgcatggagattccttgttaaaaaaaaaaaaaaaaaaaaaaaaaaaaaaaaaaaaaaaaaaaaaaaaaaaggaaacaaaaataaaaaacacaaagacatgcaacaaaaaaaaatgggccgggggggtcacctggtatccaggttccctggcccgctgcttgccaccgccattgcctgggcatcgccctggccgtgacccaacttagtcggcccgggcgctcactccccctttcgccggccggccccttccccggcgc

SEQ ID NO: 114800 - DNA, 1207 bp, Zea mays
  Clone ID: MRT4577_36180C.1
gcgattgggttcctcgaggccggccgggaactaaaaataattcagcgacagatatcttcgactcctcgttcgtggttccccatcgtcatcgccatggatttctcttaggctcacccgtccgctcggctcgcttccttccccactctctctgatcccgtcgcacttccctcctcgctgcagcccctctactattgcgattaccgtttcctcgctgccctttcctttttcggtcggcagcaatcaccggggcaagcgaaccctcgatttgcgtccccgctctctgctagcgcccctaaaagaggagcgaagcgatgtctatgtcgaagacgggtcaggccgcggagaaggatgagcagcagcagtcccgagggatagcactgatgcagggcatctgcgccgtggtgtaccgcaaggccgataacacgccctgccccatcaagcagggtctctacttgggatctgttggagcagcattcaataaggacgctctcaagagtttgaacatcacccatatcttgatcgttgcaaagtcactggatccagtatttccagctgaatttaattacaagaagatcgaagatgaagctataagctctggaggcaatgttttggtccattgctttgctgggcggtcaaggagtgtgacaatcgttgttgcatatctcatgaagaagcatcaaatgagcctcgaaagtgccttgtcactagttagaagtaaacgacctcaagtggctccctaatggcggggtttatttcccagctggagaagtttcagaaatccttgcaagtggagcaggaatggagaatgcaacctgtgcagcactgataattatactagtggttatattaggtgcagaaggcctcatatgttgtgaaggcgtatgcgttgtaagagcgtcttgaccgcgtattatggcatctggataacaagcgaggccttggcaaactttatgatgtaaacagcaagcaacgttgttcatccattgggatgcagtttacatgttgaagaagaatgaaccaaagaggggtaatagttggtgctctctctccttgaagaagaatactccatcgtgcatagatgccggcacaccgttgacttttctaaaaaactttgactagtgttattcaaaaaataatgagttatcatttattttattgtgatttgttttatcactcaaagtaataagatgagtggccaaagttttcg

SEQ ID NO: 114801 - DNA, 1157 bp, Zea mays
  Clone ID: MRT4577_36181C.1
ggttttcctacccttgagtccagcctatgttcatcacaaaaggggacgtagctcttgagtttgagtcggtgtaaacccctccccggtctctggtatggtttacttcaaagcttgcacgccgtgacctgagtctggtgaccacaacctgcaattctcccgccctaccgtggcaaagatatctggagctactacacactcggaaggagtgaagattcaacctgaagtggtgactgaagaggaatctactccagtggctgctgatcaagtggaggagccatctaactggggtttaatagagggatcgagtacctcttctctgcaacaatcgaggctttagcaatcaccggggcaagcgaaccctcgatttgcgtccccgctctctgctagcgcccctaaaagaggagcgaagcgatgtctatgccggagacgggtcaggccgcggagaaggatgagcagcagcagtcccgagggatagcactgatgcagggcatctgcgccgtggtgtaccgtaaggccgataacacgccctgccccatcaagcagggtctatacttgggatctgttggagcagcattcaataaggacgctctcaagagcttgaacatcacccatatcttgatcgttgcaaagtcactggatccagtatttccagctgaatttaattacaagaagatcgaagtacttgatatcccagacactgatctgttaaagcattctgatgaatgctttggtttcatagatgaagctataagctctggaggcaatgttttggtccattgctttgctgggcggtcaaggagaagcatcaaatgagcctcgaaagtgccttgtcactagttagaagtaaacgacctcaagtggctcctaatggggggtttatttcccagctggagaagtttcagaaatccttgcaagtggagcaggaacggagaatgccacctgtgcagcactgataattatactagtgttataacaggtgcagaaggccctctatgttgtgaatgcgtatgcgttgtaagagcgtcttgaccgcgtattatgacatctggataacaagcgaggccttggcaaactttatgatgtaaacagcaagcaacgttgttcatccattgggatgcagtttacatgttgaataatattcactgcaatttctcttc

SEQ ID NO: 114802 - DNA, 440 bp, Zea mays
  Clone ID: MRT4577_36182C.1
cccacgcgttcgtccacgcgttcggccacgcgtccgttcacgcgtccggcaagtaccagaagagcacggagctgctcatccgcaagttgcccttccagcgccttgttcgtgagatcgcgcaggacttcaagaccgatctccgctttcagtcctccgccgtcgccgcgctgcaggaggccggcgaggcctacctcgtggggctctttgaggacactaacctctgcgccattcacgccaagcgcgtcaccatcatgcccaaggacattcagctcgcgcgccgtattaggggccagagggcctgagcgaggcgaggctctcttaccgtaggcggcgttcgtgttgctttcggcctgcttggaagacttgtgcttctcttgggttactttttggtggcatttggcattttggtaccatagtgctttgtcttagtatcttagggg

SEQ ID NO: 114803 - DNA, 237 bp, Zea mays
  Clone ID: MRT4577_36183C.1
cctcgttcctgtcgcgcaccaccgacctccacttccacatcgcccccggcgtcggcgcggtcagttgcaacacggcggactccaaggccacctcggcggtcaccctccgcatccgcaagttcatgaccaaccgcctcctcgcgcgcatgcaatacgtgcttgaggtgatctcataccggccgtgctaacgtcttcaaggcggagttgaaggataggcttgccaaggcgtacgacgtg

SEQ ID NO: 114804 - DNA, 486 bp, Zea mays
  Clone ID: MRT4577_36184C.1
ggacaaaaacaggtcactaatcggggccgggaattagaccgggtcactgaacggggggttggccaagtccaaagcccggccacaaaaaaaaaaaaaagaggccccggttcacgttcctaaacacaaagctggcagggggggggccccccgatttctaaactaaacgggggccccagctggacttaaaaacagaccccgaagacgagacgggaccccagccccccgactacaggttggccttgggaaaggacgggtcccacccctccttggccgccgggtcctttttttccacccccgggtggtcctcggcctcgtccccctcctccacggccgggtgggggctcaagcccaggcttttgggcccccacttgtaaatgctggacccaaaccccttgggggcggggggggggaaccccctctccaaaagggccggttggaacaccagccccgccggttggttaaactccccgctctcgggggcccggg

SEQ ID NO: 114805 - DNA, 154 bp, Zea mays
  Clone ID: MRT4577_36185C.1
tgtaagaaataccttcggtacctgcaccctggaatagtttcccaacatggggtcgcaaagatccttcttactcacctcactctagcaagacccggaggaccccatccttcgaggggacgttgcctacaacaaggattccagccccctgaagggc

SEQ ID NO: 114806 - DNA, 351 bp, Zea mays
  Clone ID: MRT4577_36186C.1
ggggcacctgaaaaaagcttcaagggtaacttgacccatgtttatatttggaaacggggtgacaattcatgattaatacaaggtcacaataacctcaagcaaaggaaataataatacataaatccccattggcatttttgaaatgaaacatatcgtttttttgggggggggggcaaacaaacaaaaatcaggtgggtggaccaattcgcactacccgacaggggtatgggtgcccaagggtgccaaaaaaaccattaaaagggggacactggggaaaaaaaaaaaagaggggtttccagagcacaagtttcaattcagatcccgaaagatagatcaccctcccagattaac

SEQ ID NO: 114807 - DNA, 253 bp, Zea mays
  Clone ID: MRT4577_36187C.1
gacattggggagatcatagaacccaaattttttttttacaaaatatattattttcacatcccgttagtcccgggacgacattcaaaatgtattttccaactttcacgaacacccaagttcttttatgacagggaactttggcagaaattatttgttttttcacttaaaaaccataaattctttggttacccatggaaataatttattggggggggccacaagcacttctaaatagaagtaattattggtttgg

SEQ ID NO: 114808 - DNA, 365 bp, Zea mays
  Clone ID: MRT4577_36188C.1
cactcggaacgctcatagggggggataattgaatattcttactttctaccactcacattgtcaaatgtcagcatctgttgaaccctttcaacaatgtactgataactctgtgcttgtggcgactatgtaatagctgatggaacccttcacattttttgcttaaagtgaccaccttttgactctcccttgagaggcttgacattacgcaagagacacataggcataccgatgacctcgatgccataactacataccttggcataatgatcttaccgcgataggactcaacaactccaccaacaatggttactgtcttaatttaatggcaagcgcccattgttttggctcataacccttcccaaaac

SEQ ID NO: 114809 - DNA, 547 bp, Zea mays
  unsure (1)..(547): unsure at all n locations
  Clone ID: MRT4577_36189C.1
caggntcanaggtttctgattatggtttgtacatccagagatgtgtagtatgcctttctctgctttgctctcattatttaactatgtcttctttagttgtcatgttctttaggtttgtcacctctggtgaaatccaaagagggccgagttcttcgaaccattcatctctggcttgacaaattcgactgtggttcagttctgcaaggcttccgtggagccgatgggcgaggaaagtgaccatgtccacataattgccctatcagatgcgttgggtgtgccaatccgtgtgatgtacctagacagaagctcatgtgatgctggaaatataagtgtgaaccaccatgatttcagccctgaggccaattcatcggacggtgctgctgctgctgagaaaccttacattactttgctctaccgtcctggtcactacgacattctctacccgaagtgattcttgcccggtgaagcattgttggttttttcctcatggccagtttgagaaatcgctgtctagaactctgtagttatggtgctcgtgcatgccacc

SEQ ID NO: 114810 - DNA, 1994 bp, Zea mays
  Clone ID: MRT4577_3618C.1
cccacgcgtgcctcatcgcgtccgatcagccatgacttttgtgaacctttaggtgatcacactgttgattctgatagccatcatgacatgccttattcccaaagcaatctcccaagatcacaatctgcaatatttcagaatgattgcaccagtgatccagaaggttctgtcgattctgagatactagggtgcagatctgttgacggtttatgttcactgactgatgagaaatttgactacctgagaggtggtgaaatgtatcactgtaaatcaaatttggatgtttattgtgcaccttctccaaatatgcaccgggcatcaaacattgacgaccatggttcagtaggttgctctgatgttgctgcagagggtcaacggtccactggaagcacagaagaattttttgtcagggatgggatcctagtaggtcacgaatactgggatggcaaatacatttgtggcgatcactcgctgggtccagttgcccttttctgtgcagattattaccattctgggaatgatgtcgacctcagtgaagctacaggtcaagagagagagctgtcgaacagagatagcacactccaccagtcgcttgtagtggaagtacctgagtcggtgagcatttctgatacaaacgacattagtggggaacctgaacacagtagaactgacattgatgaggacccaagtgaacttactccaagaacctacaatattaaaagaatcgaggattggatcaatcagattgatatcaatgatatcgctttggatgggcaaggagagaattcagtttctgctttagccaaatctcgtgaaccgatggctggcgttcctgctgtgcggcctgatgctaaaagcccgcttggtatggagatagcttacacttatatttcgaagttaactcctgcttcatcatcggcacagttggcaaaccttggtttggttgcgatcccaagactgagcgcattctcaggtttgcgcgtattaaacttatcagggaactcaattgtgcgagtaacagcaggagctcttccaaaaggccttcacatgttaagcctgtcaaagaataacatatcaacaattgaaggccttagagagttgacacgattgcgcttgttggatatcagctataatagaatatctagaattggccatggattggcctcctgttcctcgttgaaggagttatatctggccggtaacaagatcagtgaggtagatggtcttcaccggcttctgaagctcaagattctggacttgcgccacaacaagatttctacatcaaagggcctcgggcagctagctgcgaattacaactctctagaagccattaaccttgccggcaaccctgcacagaagaatgtaggcgatgagcacctgaagaagtacctgcttggtctcctgccaaacctcgctgtgtacaacaagcagcctattagggcgactggatcaaaagacgtctcggaccgccatacccgcaagatctcttcttcgcaccattctgaccgtggtggcagacccgaccgcagatcttccaggttggtgggtgccccgtctgctcacaagccacagagctcgcggcatggacgctctggatatgtgtcaagctcagcgctcaagtacacgagagcccgcaacacgcacaagacctcgctggggtcaaggccccttgaacatgcgagtgccatagatctggcgaagcaaacccagacagagggaaggacacagtaagatcagtcaagcacgaccatcgatatactaccatggtattgttgtgaagtaaagcgaggcaccagttttgctggtggattttttttctctctcacgtgaataaagctcaaaacagtaaacagagcagtgctttcatatcagcccatattttttttctaatattgttgagtggtattgatggcaattgggaattgtatgatttacttgccttatgaataaagcttgaaagaaacaaaataaagattagtattttttttcccaaa

SEQ ID NO: 114811 - DNA, 373 bp, Zea mays
  Clone ID: MRT4577_36190C.1
cccgtaaacccctttcttatacaaacaacatttttctacataataagtagggatttcaattatacaccccttaaaactcggccctcggcgtcggcgggtggggggggggctttttttttttgctgcacaaggccatccctccctcctcctattaggccaaaaaggacccaaaaaatacacccacaaagcacaaaactagcgtgcattctcataaactacagcaggccattaacaaagctattcaaaaaggccatacccgatttttattctaccaacaaaaaacaacaagtttttttatcaccccccgtcaattcccaaaattcctgggcttgctaaagaacccccctgcgtaaagcattttgtacacgggccc

SEQ ID NO: 114812 - DNA, 284 bp, Zea mays
  Clone ID: MRT4577_36191C.1
gggagcgacttttagggggtgggaccaaacaatttttagctttttagcagttcatagcccacaacaacttttttgacagctcacagctcacagcagcttttttcacagccacagcccaaccaaacagaccctaagctaccaactagcacttaactatctaaacaatatgggaatacttttggttatgtctaaacaaatagttttcatgagtatgaaaatgatcctatacttaatgatggggaatggtacataatatagttttggggggcctaccctttaataaa

SEQ ID NO: 114813 - DNA, 364 bp, Zea mays
  unsure (1)..(364): unsure at all n locations
  Clone ID: MRT4577_36192C.1
gtatttctatgcatgttgttggatctgttggtttgtagcaactttttttttttattccngtgttgtgaaacctgctataccaaaggttataccgacctctggctaacaaaccaacatgcgggcggaccttaaaagacaaagctctccaagaccatggggaaaaaacaaccatgccccaacctaccaagaacgggcccccaaacaaaaagcaagaatacattggcacccatcaactcttgcacatgcaaaaaagagaccgcaaactttcgcaaagctcttgcctccccaactttaatcaactggcacatatgcaactattacccaaagacccatcaggacgccagatgcaaatatgatgaataac

SEQ ID NO: 114814 - DNA, 366 bp, Zea mays
  Clone ID: MRT4577_36193C.1
cggccccgtacagttacttcgacgagctgaagagggactacagcgggaagaagaggtctcctgcttgaaggactcgaagccccatggttcataagtctacccatcgagcgggacatactacattatggtcgaccacacccacgttcgagttctacagcgacgtatagttgtgcgagtactcagatccgttaattcagtgtttgcgctataccggccagcagtgttcttcctctaccccgaagagggaaaagaaattggtgaggttcaccttcagtaaggactaatcgcccctgcggcccttaatcgataggtcgaaagctgaagctctggtggaaatgaattgaaagggggattacatgtttgtgg

SEQ ID NO: 114815 - DNA, 185 bp, Zea mays
  Clone ID: MRT4577_36194C.1
aattcatgatctgtaattttcaaacattctcaaaaggctagatcttcagagataagctctgaaaatatagatccatacatataagatatctatgaaattcttttaaaaactattggctaactacaaaaataatggcgtatacatgcataaaccatctgtaattagaaaatttagtaacattcata

SEQ ID NO: 114816 - DNA, 418 bp, Zea mays
  Clone ID: MRT4577_36195C.1
ttttagaataataatacgatcacaataatccaattgagagatggtgtaattacaaaaatacaatggacagcagtatgcgaatctgacaaagctactgaataattgtggctctgggtcaatcctaaaaaagttaaggcttgggcaccatatcaaggatacctgtcaacccaataaagtccccaatttcaaggaattcacaagggccaatatacttgcataactgtcagaaaaagggcattcacatactcataaattggaaaatcttggttatcacaagatgccaagtctaatctaaaccattcattagggtaagctgcggcgccagttcaacaaacttgattagcttttgccagcctggcccacagtcttgaggactccataaatccgacaagtgatggaagacggatacgaacaggga

SEQ ID NO: 114817 - DNA, 2145 bp, Zea mays
  Clone ID: MRT4577_36196C.1
atgccgttcggcttgaggaatgcgggtgcgacgtaccagcggtgcatgaaccatgtgttcggcgaacacattggccgaacggtcgaggcctacgtcgatgacatcgtggtcaagacgaggagagccttcgacctcctttccgaccttgaagtgacattccgatgtctcaaggcgaaaggcgtgaagctcaatcccgaaaagtgtgtcttcggggtaccccgaggcatgctcttggggttcatcgtctccgagcggggcatcgaagccaacccggagaagatcgtagccatcaccagcatgggacccatcaaagacttgaagggagtacagagggtcatgggatgtctcgcggctctgagccgcttcatctcacgccttggcgaaagaggtctgcctctgtaccgtctcttaaggaaggccaagtgcttcacttggacccctgaggccgaggaagccctcgggaacctgaaggcgctcctcacgaatgcgcctatcttggtgcccccagctgccagagaagccctcttgatctacgtcgccgcgaccactcaggtggttagcgccgcgattgtggtcgagaggcaagaagaggggcatgcattgcccattcagaggccagtctacttcatcagcgaggtactgtccgaaaccaagatccgctacccacaagttcagaagctgttgtacgcggtgatcctaacgcggcggaagctgcgacactacttcgaatctcatccggtaactgtggtgtcatccttccccctgggggagatcatccagtgccaagaggcctcaggtaggatcgcaaagtgggcggtggaaatcatgggcgaaacaatcttgtttgcccctcggaaggccatcaagtcccaggtcttggcggacttcgtggctgaatgggtcgacacccagctcccaatagctccgatccaaccggagctctggaccatgtttttcgatgggtcgctgatgaagacgggagctggcgcaggcctactcttcatctcacccctcgggaagcacctacactacgtgctacgcctccatttcccggcgtccaacaatgtggctgagtacgaggatctggtcaacgggttgcagatcgccatcgagctaggggtccgacgcctcgacactcgcggagactcacagctcgtcatcgaccaagtcatgaagaactcccactgccgcgacccgaagatggaggcctactgcgatgaggttcggcgcctggaagacaagttctacgggctcgagctcaaccacatcgcccggtgctacaacgagactgcggatgagctggctaaaatagcctcggggcgaacaacgaaggcacccgagggctacacgcacctgttggtcgccatcgacaaattctccaagtggatcgaggtccgacccctaaacagcatcaggtccgagcaggcggtggcgttcttcaccaacatcatccaccgtttcggggtcccgaactccatcatcaccgacaacgacacccagttcaccggcagaaagttcctggacttctgcgaggatcaccacatccgggtggagtgggccgccgtggctcaccccatgacgaatgggcaagtagagcgtgccaatggcatgattctacaaggactcaagcctcggatctacaacgacctcaacaagttcggcaagcgatggatgaaggaactcccctccgtggtctggagcctgaggacaacgccgagccgagccacgggcttcacgccgttctttctagtctatggggccgaggccatcttgcccacagacttagaatacggctccccgaggacgagggcctatgctgaccaaagcaaccaagctaatcgagaagactcgctggaccagctggaagaggctcgggacaaggccttactacactcggcgcggtaccagcagtccctgcgacgctaccacgcccaaggggtccgatcccgagacctccagacgggcgacctggtgctccggctgcaacaagacgcccgagggcggcacaagctcacgcctccctgggaagggtcgtttgtcatcgccaaagttctgaagcccggaacatacaagctggccaacagtcaaggcgaggtctacagcaacgcttggaacatccaacaactacgtcgcttctacccttaa

SEQ ID NO: 114818 - DNA, 362 bp, Zea mays
  Clone ID: MRT4577_36197C.1
cgcatgcgttccaacatctgagcaatctcttgtgcactcagacatgccaatagacgcggcaatacaaccatggactccaccatcacctgcacaggcactaaggcaaagaatgaggcgaacaagcgcacggtcggccgcacagggaagaagtcaaggtagaagtccgtgaaggcgggtgtgcaggtccctgtccagcgcatcgggcgctacatgaagaacgacctgtacacgcagcgttacgcgaacggtgtccgcacctacgtcgccgtttacctcgaatatgtcgtcgattacgttgtcgatctcgttgttgatgctgccagggacaacaagaaggacagcatgattactcgccttatgct

SEQ ID NO: 114819 - DNA, 3249 bp, Zea mays
  Clone ID: MRT4577_36198C.1
atgggcagtctccagcaacctctccgacccgggacggtgctccgtttcgggagtcttgagttcatgtccttcgacggcagctacgacatgatactccttccaccaccgcgcgacaacgacaatggcggccggcagcccgcctgccggcggcggaatcgacgacgtcttccccgcgtggtggaagaacaacatccgagctcgccccgtcctctcccccgccaacggaggaggaggcggggcaaccaaggccaagcgggaggctgcgcctcgtcggctgtcgagcgagtcgacatccctagcaccccaacggggggcgcgtcgggcgtcgacctcgcgtttgagacgaaggcgagcgccgtctccccgcgacacgccaaccccgagcaagtggacgacgccagtgcgctcgtggagagcttgcaggacgtcgccctcgtacctgggacggcggtgcaatcagtccccgacgtgactatgtcgctgctcgccgaccgaaaggtaccaaccgattcccatcctacgtcatttcgactcagcctcaacccgcctagcgaccttggtttggcgggcgctctcgtagaggcgagatcaaaccctctggggtttcgcatgcggtcgccttgggaccggctgacggacgtctcgacctacgggccctctgggtccgaggaagatgacgaccccaacatctgttgggatttctctggatttggcaaccccagtgccatgcgggacttcatgaccgcatgtgactactgcctctccgactgttccgatggtagccgcagcctcgacgacgagaactgcggcccaagccgcgaatgtttccacgtcgagctaggggacccctccgaaggcaaccatctcggcatgccggaggacagtgatctccctaggccggtgcctcgcgccgacatcccgcgggagctagctgtggtccccgttccggcggggggtcacgacccacagctcgagcaagtccgcggggcgcaggccaggctcgacgagggagcaggagcgcttgagccgatccgccgggacgtcgggcaggtatgggcgagtcaacccccggccggagaaatatgtcacctgccccagggtttccagcaccgcgtcgccaacaacgtcagggtcaggccgccacccgcatccagtggggccggtcagaacctggctgcagcagcgatgcttctccgcgcgatgccggagccatcaaccaccgagggtcggcgaatccagggagagctcaagaatctcctggaaggcgctgcggtccgacgggccgagagctctgcttcccgaaggcagggatacccctcggaacctcatgtcgcgacttcccgattcatgcgggaagcctcggtctacaccgggcgcacgcgcaacaccgcgcctgcggccccgggccacctcggcaacaagcaccatcatcgcgaccgtcgggcccacctcgacgagagggtgtgccgaggctaccaccccaggcgtgggggacgctacgacagcggggaggatcggagtccctcgcccgaaccatccggtccgcaggccttcagccgggccatccgacgggcgccgttcccgacccggttccgacccccgactactatcacaaagtactcgggggaaacgagaccggaactgtggctcgcggactaccgcctggcctgccaactgggtggaacggacgacgacaacctcatcatccgcaacctccccctgttcctctccgacaccgctcgcgcctggttggagcacctgccttcggggcagatctccaactgggatgacctggtccaagccttcgccggcaatttccagggcacgtacgtgcgccctgggaattcctgggacctccgaagttgccggcagcagccgggagagtctctccgggactacatccggcgattctcgaagcagcgcaccgagctgcccaacatcaccgactcggatgtcatcggcgcgttccttgccggcaccacctgccgcgacctggtgagtaagttgggtcgcaagacccccaccagggcgagcgagctgatggacatcgccaccaagttcgcctctggccaggaggcggtcgaagccatcttccgaaaggacaagcagccccagggccgcccatcggaagatgctcccgaggcgtctactccgcgcggcgccaagaggaaaggcaagaagaagtcgcaagcgaaacgcgacgccgccgacacggaccttgtcgccgccgccgagtacaagaaccctcagaagccccccggaggtgccaacctcttcgacaagatgctcaaggagccgtgcccctatcatcaggggcccgtcaagcacacccttgaggagtgcgtcatgcttcggcgccacttccacagggtcgggccacccgcggagggtggcagggcccgcgacgacgacaagaaggaagatcaccaagcaggagagttccccgaggtccgcgactgcttcatgatctacggtgggcatgcggcgaatgcctcggctcggcatcgcaagcaagagcgccgggaggtctgctcggtgaaggtggcggcgccagtctacctagactggtccgacaagcccatcaccttcgaccaagctgaccaccccgaccacatgccgagcccggggaaatacccgctcatcgtcgaccccatcgtcggcgacgtcaggctcaccaaggtccttatggacgggggcagctgcctcaacatcatctacgccgagaccctcgggctcctgcgcgtcgatctgtcctccgtccgagcaggcgctgcgctcttccacgggatcattcccgggaagcgcgtccagcccctcggacgactcgaccttcccgtctgcttcggaacgccctccaacttccgaagggagactctgacgttcgaggtggtcgggttccgaggaacctaccacgcggtactggggaggccatgctacgcgaagttcatggccgtccccaactacacttacctgaagctcaagatgccgggccccaacggggtcatcaccgtcggccccacgtacaaacacgcgttcgaatgcgacgtggagtgcgtggagtacgccgaggccctcgccgagtccgaggccctcatcgccgacctggaaagcctctccaaagaggtgccagacgtgaagcgccatgctggcaacttcgagccagtggagatggtcaaggccgtccctctcgaccccagtggcgacacctccaagcagatccggatcggttccgggcacgaccccaaatag

SEQ ID NO: 114820 - DNA, 695 bp, Zea mays
  Clone ID: MRT4577_36199C.1
ctgtgcggcgctcgaggcggccggttccaatagattgcgagatcactcactctggagtcggatcctcctctactcagttcctccacgaacaagccaccaccatcccatcccaacacatcggccgaccacgggcgccgacatgtccaccgatgacgcggcgaggccggccctgccggcggactgggacgcgccgaaggccgaacgcctgcgcctggcccacgtcgccgtgcgctgcttctggagcgagcagatgagtgtaccagcgcctcccacgcgtggtgcgcacggaggtgctgtactcgcagatccaccgccactcccccacctaccgagacgtctgcagcaacggtacgtgccacgtcgaggaggtccgtgaggactaccaccccaacgctctgcccctacgacgtcctcctcgacgtcttctgggacaagcgacaaccccaccactctcgacatacagggtagccacttgcatacggagtaccgatcggtacatctactactacacgacataccatgacacatctgaagagggagacactggctgcaaagtgaaaggagtggtacgacgccatcgtcaccgaggtcctggcggcgtgctggttctaccccgccggggagtaccgccaggagtacctcgtgaagggtgggcactccgccaagaagggctgcagcgatcccatccgctgcta

SEQ ID NO: 114821 - DNA, 929 bp, Zea mays
  unsure (1)..(929): unsure at all n locations
  Clone ID: MRT4577_3619C.1
aaatcccacatggtcattctgtagcttgctagcgacttgatccagtgcatgtgctctgtagctcagatcggcatcagctgcagaggtgtgctcgtcttatacatgacagcatctcgttgacgccaggaagccacactccggcagctgcagcgaatttacactgcaggtcgaggctagctgagatccatggcgtcgagcagggcgatcttggccatgggcctccttgccgccgtgctgtcccccgccttgtcaacgcggtcgtttatctccatgccagccgacgtgagtagtcctgtgaccctggccaacggcctctcctacggctaccacgccaactcctgcccacagctgcaagacatcgtgtggccgatcgtggagagcgcggtcctgggtgaggtggccatcgccgccggcctcctccgtatcttcttccacgattgctttcctcagggctgcgacgcgtccgtccttctgacgggacccaacagcgagcgggacctgccgccgaaccagacgctgcagccgcgtgcgatgcagctcatcgaggacgtccgcgtcaaggtacacgccgcctgcggcgccaccgtctcctgcgccgacatcatcgccctcgccacccgcgacgccgtcttcgtggccggggaaagcgaaatgttctacttctacgacctgccgctcggccggtttgacagcctcgagccggctaatagcagcgccgtcttcgacctcccgcagtccaccgccgacgccaacacgctcatcaacgccttcaagagccgcaacctcgagccgatcgacctcgtcgcgctctctggcgcgcacaccgtcgggaaggcgcagtgcagctccttcaacaaccgcttctcccgagacgccgacttcgnccggaggctcgccgccaactgctccagcgacccgaaccggctgca

SEQ ID NO: 114822 - DNA, 587 bp, Zea mays
  Clone ID: MRT4577_361C.1
ccggccggggaggcctcagctgatactcgtcggcactctggatgttctcgccatcctcgacagctctcggcgaaggctcgacgtcctggacctgctgcaacaactgcgagagcttgcaacaagaacgcagccgccggagtgccagagcaatgacgtgtcggtcaacggacgcacatccggagcgcatgaactgcgacaaggccgaagcaagaatgcaacccacgatgagccatgaccccctgataacctatcgctgaaaacacaataggaagacaataaggaagatcagcccgaaaagccaaagcgcaaatcaaaagacacgacatcaacagaactgcctgacgatacaaggaccttgacaaagaagaacctcgtcgcatccgaagccgctatcaagaagtcaggcgttgtctacctctctcgtatacctcccttcatgaaaccagctaagctgcgatctctcctcgaaccctacggcaccatcaaccgcatcttcctcgctcccgaggacccagcctcgcacgcccgccgcgttcgcgccggtggcaacaaaaagcgctcctataccgagggttgggtcgaattta

SEQ ID NO: 114823 - DNA, 2253 bp, Zea mays
  Clone ID: MRT4577_36200C.1
atgccgttcggcttgatgaatgcgggtgcaacgtaccaacggtgcatgaaccatgtgttcggcgaacacattggccgaacagtcgaggcctacgtcgatgacatcatagtcaagacgaggaaagcctccgacctcctttccgaccttgaagtgacattccgatgtctcaaggcgaaaggcgtgaagctcaatcccgagaagtttgtcttcgaggttcctcgaggcatgctcttgggaggcctgcctctgtaccgcctcttaaggaaggccgagtgcttcacttggacccctgaggccgaggaagccctcgggaacctgaaggcgctcctcacgaacgcgcccatcctagtgccccccgctgccggagaagccctcttgatctacgtcgccgcgaccactcaggtggttagcgccgcgattgtggttgagagacgagaagaggggcatgcattgcccgtccagaggccagtctacatcaatgaggtactgtccgagaccaaggcccgctacccacaagttcagaagctgctatacgcggtgatcctgacgcggcggaagttgcgacactacttcgagtctcatccggtaactgtggtgtcatccttccccctaggggagatcatccagtgccgagaggcctcgggtagagtcgcaaagtgggcagtggaaatcatgggcaaaacgatcttgttcgcccctcggaaggccatcaagtcccaggtcttggcggacttcgtggctgaatgggtcgacacccagctccccacggctccgatccaaccggaactctggaccatgttcttcgatgggtcgctgatgaagacaggagcaggcgcaggcctgctcttcatctcgcccctcgggaagcacctacgctacgtgctacgcctccacttcccggcgtccaacaatgtggctgagtacgaggctttggtcaacgggttgcgcatcgccatcgagctaggggtccaacgcctcgacgctcgcggcgactcgcgactcgtcatcgaccaagtcatgaagaactcccactgccgcgacccgaagatggaagcctactacgatgaggttcggcgcctggaagacaagttctacgggctcgagctcaaccacatcgcccgacgctacaacgagactgcggacgagctggctaaaatagccttggggcgaacaacggttcccccagacgtcttctcccgagacctgcatcaaccctccgtcaagaccgacgacacgcccgagcccgagaaggcctcggccgagcctgaggcaccctcggctcagtccgaggtacccttggctcggcccgaggcaccctcggctcagtccaaggtaccctcggctcggtccgaggcaccctcggcccagcccgaggcaccctcggcccagcccgaggcaccctcggttcggcccgaggtaccctcggcccccgagggtgaggcactacgcatcgaggaggagcgaagcggggtcacgcctaatcgaaaccggcacaccccgtacctgcaatatctccaccgaggagagctacccctcgaccgagccgaagctcggcggttggcacggcgcgccaagtcgtttgtcttgctgggggacgggaaagaactctaccaccacagcccctcaggcatcctccggcgatgcatttccatcgccgaaggccaggagctcctacaagagatacactcgggggcttgcggccatcacgcagctcctcgagccctttttggaaacgccttccaacaaggtttctactggatgacggcggtggccgacgccactagaattgtccgcacctgtgaagggtgtcagttctacgcaaggcagacccacctgcccgctcaggccctgcagacgatacccatcacctggccttttgctgtgtggggtctggaccttgtcggccccttgcagaaggcacccgggggctacacgcacctgctggtcgccatcgacaaattctccaagtggatcgaggtccgacccctaaacagcatcaggtccgagcaggcggtggcgttcttcaccaacatcatccatcgatttggggtcccgaactccatcatcaccaacaacggcacccagttcaccggcagaaagttcctggacttctgtgaggatcaccacatccgggtggactgggccgccgtggctcaccccatgacgaatgggcaagtagagcgtgccaacggcatgattctacaaggactcaagcctcggatctacaacgacctcaacaagttcggcaagtga

SEQ ID NO: 114824 - DNA, 390 bp, Zea mays
  Clone ID: MRT4577_36201C.1
cccacgcgtccgcttcgacgctctcccctcgcttctcgcgcacactaaccaatccgagcgcccgacgctgccccccgatcgaatccaccggagccgcccacctagggctcgcccgcgccattgtcgaaccaggagggttcgtccgcccgcgcctgctgccccgcactcccgcgccgtggcggtggcgttggcgttggcggtatgtatgatcgctagagggagaggaggaggtggcagcaccggtggggattagggtggcggcagtgctggtgccgggaggaggaggaggaggcgtaacccatgaaggcgacggcgccgccggcaaagcggcggaagggcccgcggctggcggtgctggcgctcgtgttctgttcgctgctcgtgccgatc

SEQ ID NO: 114825 - DNA, 1851 bp, Zea mays
  Clone ID: MRT4577_36202C.1
ctcaaggcgaaaggagtcaagctcaatcctgagaagtgtgtcttcggggtaccccggggcatgctcctggggttcatcgtctccgagcgaggcatcgaagccaacccggagaagatcgcagccatcaccagcatgggacccatcaaggacttaaaaggcgtacagagggtcatgggatgccttgtggccctgagccgcttcatctcacgcctcggcgaaagaggtctgcctcagtaccgcctcttaaggaagaccgagtgtttcgcttggacccctgaggccgaggaagccctcgagaacctgaaggcgctccttacaaaggcgcctgtcttggtgcccccagctgatggagaagccctcttggtctacgtcgccgccaccactcaggtggttagcaccgcgattgtggtcgagaggcaagaggaagggcatgcactgcccgttcagaggccagtctacttcgtcagcgaagtactgtccgagaccaagatccgctacccacaagttcagaagctgctgtatgctgtgatcctgacgaggcggaagttacgacactacttcgagtctcatccggtaactgtggtgtcatctttccccctcagggagatcatccagtgccgagaggcctcgggcaggatcgcaaagtgggcggtggaaatcatgggcgaaacaatctcgttcgcccctcggaaggccatcaagtcccaggtattggcggacttcgtggccgaatgggtcgacacccagctgccgacggttccgatccaaccggagctctggaccatgtttttcgacgggtcgctgatgaagacaggagccggcgcgggcctgctcttcatctcacccctcggaaagcacctgcgctacgtgctgcgcctccatttcccggcgtccaacaatgtggccgagtacgaagctctggtcaacgggttgcggatcgccatcgagctaggggtcagacgcctcgacgcccgcggtgattcgcagctcgttatcgaccaagtcatgaagaactcccactgccacgacccgaagatggaggcctactgcgatgaggttcggcgcctggaagacaagttcttcgggctcgagctcaaccacatcgctcggcgctacaacgagactgcagacgagctggctaaaatagcctcggggcgaacgacggtcccaccagacgtcttctcccgggatctgcatcaaccctccgtcaaggtcgacgacgcgcccgagcccgaggcaccctcggctcagcccgaggcaccctcggctcggcccgaggtaccctcggctcagcccgaggtaccctcggcccccgaagccgaggcactgaacgtcgaggaggagctgagcggggccatgcctgatcgaaattggcaggccccgtacctgcgatatctccgccgaggagaactacccctcgaccaagccgaggctcgacgggtagcgtgacgcgccaagtcattcgtcttgctgggtgatgaggaggagctctaccaccggagcccctcgggcatcctccagcgatgcatctccatcgccgaaggtcagaaactcctgcaagaaatacactcgggggcttgcggccatcacgcagcaccccgagcccttgtcgggaatgctttccggcaaggcttctactggccaacagcggtggctgacgccactagaattgtccgcacctgcgaagggtgccaattctatgcgtagcagacccacctgcccgctcaggctctgcagacgatacccatcacctggccctttgctgtatggggtctggacctcgttggtcccttgtcgatggcgaccagcaggtgcgtgtagcccccgggcgccttcctagttctagatcgc

SEQ ID NO: 114826 - DNA, 233 bp, Zea mays
  Clone ID: MRT4577_36203C.1
ttttttttttttttacgttctccgctcagcggaccgctgtggggcagaaaacatctgaagcacgacggctgctctctgtctctgtttctctctcgaacacgcggtttggttatcagtcggtcctgtggaacccttggcttcgacaaagctggaaaagtttggagctttccagtcatgccaggttcttctatctcactccagcaagtaggagcaagtgttcttttaaaaaaaaa

SEQ ID NO: 114827 - DNA, 4308 bp, Zea mays
  Clone ID: MRT4577_36204C.1
atgggggacacgtcgggcgttgacctcgcgtctgagatgaagacgagtgtcgtttccccgcaacacgccaaccccaagcagacggacgacgccagcacgctcgcgaaggacatgctgggcattagcctcgcacctgagacaatggtgcagtccgtccccgacgcgacttcgtcaccatccgtcgatcaagagcagccgggagaatccctgcgggactacatccggcgattttcgaagcagcgcaccgagctgcccaacatcaccgactcagatgtcatcggcgtgttccttgtcggcaccacttgtcgcgatctggtgagcaagttgggtcgcaagactcccaccagggtgagcgagctgatggacatcgccaccaagttcgcctctggtcaggaggcggtcgaggccatcttctggaaggacaagcagcctcaggggcgccagccggaagacgtccctgaggcgtccgctcagcgcggcaccaagaagaagggcaagaagaagtcgcaatcgaaacgcgacgctgccgacgcagatcttgtcgccgccgccgaacacaggaaccctcggaagcctcctgggggcgccaacctgttcgacaagatgctcaaggagtcgtgcccctatcatcagggtcccgtcaagcacacccttgaggagtgcgtcatgctttggcgctacttccacaaggccgggccaccggcggaaggtggcagagcccacaacaacgacaagaaggaggatcacaaggcagaagagttccccgaggtccatgactgcttcatgatctacggtgggcaagtggcgaacgcctcggctcggcaccacaagcaagagcgccgggaggtctgctcggtgaaggtggcggcgccagtctacctatactggtccgacaagcccatcaccttcgaccagggcgaccaccccgaccgcgtgccgagcccgggaaagtacccgctcgttgtcgatcccatcatcggcaacgtcagtcttaccaaggtcctcatggacggaggcagcagcctcaacatcatctacgccgagaccctcgggctcctgcagatcgatctgtccacgatctgggtcggcgcagcgccttttcatgggatcatccccggaaagcgcgtccaaccccttgggcaactcgatctgcccgtctgcttcgggactctctccaacttccgaaaggaaaccctcacgttcgaggtggtggggttccgaggaacctaccacgcagtgctggggagaccatgctacgccaagttcatggtcgtccccaattacacctacctcaagctcaagatgtcaggccccaacgggtgcgtggagtacgccgaggctttcaacgaatccgaggccctcatcgccgacctggagaacctctccaaggaggtgccagatgcgaagcgccatgctggcaacttcgagccagctgagacggtttttgcgtggagtccctcggacatgcctggcataccaagggatgtcgccgagcactcgctggatatccgagctggagcccgacccgtgaagcagcctctgcgccgattcgacgaagaaaagcgcagagccataggcgaggagatccacaagctgatggctgcagggttcatcaaagaggtattccatcccgaatggctagccaaccctgtgcttgtgagaaataaaggcgggaaacggcggatgtgtgtagactacactggtctaaacaaagcatgtccgaaggttccctaccctctgcctcgcatcgatcaaatcgtggattctactgctgggtgcgaaaccctgtcgttcctcgatgcctactcaaggtatcaccaaatcaggatgaaagagtccgaccagctcgcgacttctttcatcacaccctttggcatgtactgctacattactatgccattcggtttgaggaatgcgggtgcgacataccaaaggtgcatgaaccacgtgttcggggagcacattggtcgaacggtcgaggcttacgtcgatgacatcgtagtcaagacgaggaaagcctccgacctcctctctgaccttgaaacgacattcaagtgtctcaaggcgaaaggcgtaaaactcaatcccgagaagtgtgtcttcggagtcccccgaggcatgctcctggggttcatcgtctccgagcggggcatcgaggccaacccggagaaaatcgcggccatcaccaacatgggccccatcaaggacttgaaaggagtacagagggtcatgggatgccttgcggctctgagccgtttcatctcgcgcctcggcgaaagaggcctacctctgtaccgcctcttaaggaaggccgagcgcttcacttggacccccgaggccgaggaagccctcgggaacttaaaggcgctccttacaagcgcgcccatcctggtgccccccgctgccggagaagccctcttgatctacgtcgccgctaccactcaggtggtcagcgtcgcgatcgtggtcgagagacgagaagaggggcacgcattgcccatccagaggtcagtctacttcatcagtgaggtactgttcgagaccaaaattcgctacccgcaaatccagaagctactgtacgcggtaattctggcgcggcgaaagttgcgacactactttgagtctcatccggtgactgtggtgtcatccttccccctgggggagatcatccagtgccgagaggcctcgggtaggattgcaaaatgggtggtggagatcatgggcgagacaatctcgttcgcccctcggaaggccatcaagtcccaagtcttggcggactttgtggctaaatgggtcgacacccagcttccagcagctccgatccaactggaactctggaccatgtttttcgacgggtcgctgatgaaaacaggagcgggcgcgggcctgctcttcatctcgcccctcgggaagcacctctgctacgtcctgcgcctccatttcccggcatccaacaacgtggccgagtacgaggctctgcttgtcatcgaccaagtcatgaagaactcccactgccgcgacccgaagatggaagcctactgcgatgaggttcgacgcctagaggacaagttctacgggctcgagctcaaccacatcgctcgacgatacaacgagactgcggacgagctggctaagatagcctcagggcggacgacggttccaccggacgtcttctctcgagacctacatcaaccatcagtcaagaccgacgacacgcccaagcccgagaaggtctcggccctgcccgaggcgccctcggctcagcccgaggcaccctcggccgccgagggtgaggcactgcgcgtcgaggaagagcggaatggggtaacgcctaatcgaaactggcagaccccgtacctgcaatatctccaccgaggagagctacccctcgacagagccgaagctcggcgattggcgcggcgcgccaagtcgttcgtcttgctggcgcctcgagcccttgttggaaacgccttccgacagggtttctactggccaaccgcggtggccgacgccactaggattgtacacacctgccaagggtgtcaattctacgcaaagcagacccacctgcccgctcaggctttgcaaacaatacccatcacctggtcgttttttgtgtggggtctggacctcgtcggtcccttgcagaaggcacccgggggctacacgcacctgctggtcgctatcaacaaattctccaagtggattgaggtccgacccctaaacagcatcaggtccgaacaggcggtggcattcttcaccaacatcatccatcgctttggggtcccgaactccatcatcaccaacaacggcacccagtacactggcagaaagttcctagacttctgtgaggaccaccacatccgggtggactgggacgtcgtagctcaccccatgacgaatgggcaggtagagcgtgccaacgacatgattctgcaaggactcaagccacagatctacaacgacctcaacaaatttggcaagcgatggatgaaggagctcccctcagtggtttggagtctgagaacgacgccaagccgagccacgggcttcacgtcgttttttctagtctatgaggccgaggctatcttacccacagacttagaatacggatccccgaggacgagggcgtacgacgaccaaagcaaccggaccaaccgagaagactcactggaccagctagaagaggctcgagacatggccttactacactcggcaaggtatcagcagtccctgcgacgctaccacgcccgaggggttcggtcccgagacctcctagtgggcgacttggtgcttcggctacgataa

SEQ ID NO: 114828 - DNA, 1941 bp, Zea mays
  Clone ID: MRT4577_36205C.1
atgctcttggggttcatcgtctctgagcggggcatcgaggccaacccggagaagatcgtggccatcaccagcatggggcccatcaaggacttgaaaggcatacagagggtcacgggatgccttgcggctctgagtcgtttcatctcgcgcctcggcgaaagaggcctgcctctgtaccgcctcttaaggaaggccgagtgcttcacttggacccctgaggccgaggaagcccttggggacctgaaggcgctcctcacgaacgcgcccatcttggtgccccccgctgccggagaagccctcttgatctatgtcgccgctaccactcaggtggttagcgccgcgattgtggttgagagacgagaagaggggcatgcattgcctgtccagaggccagtctacttcatcagtgaggtactgtccgagaccaagatccgctacccacaaattcagaagctgctgtatgcggtgatcctaacgcggcggaagttgcgacactacttcgagtctcatccggtaactgtggtgtcatccttccccctgggggagatcatccagtgccgagaggcctcgggtagaattgcaaagtgggcggtggaaatcatgggcgaaacgatctcgttcgccccttggaaggccatcaagtcccaggtcttggcagactttgtggctgaatgggtcgacacccagctcccaacagctccgatccaaccggaactctggaccatgtttttcgacgggtcgctgatgaagacaggagcaggcgcaggcccgctcttcatctcgcccctcgggaagcacctacgctacgtgctacgcctccatttcctggcgtccaacaatgtggccgagtacgaggctctggtcaacgggttgcgcatcgctatcgagctaggggtccgacgcctcgacgctcgcggtgactcgcagctcgtcatcgaccaagtcatgaagaactcccactgccgcgacccgaagatggaagcctattgtgatgagaccgacgacacacccgagcctgaggaggcctcggcccagcccgaggcaccctcggctcagcccgaggcaccctcggctcggccagaggcaccctcggctcggcccgaggcaccctcagcacccgagggtgaggcactgcgcgtcgaggaggagcggagcggggccacgcctaatcgaaactggcagaccccgtacctgcaatatctccaccgaggagagctacccctcgaccgagccgaagctcggcggttggcgcggcgcgccaagtcgttcgtcttgctgggagacgggaaggagctctaccaccgcagcccctcaggcatcctccagcgatgcatttccatcaccgaaggccaggagctcttacaagagatacactcgggggcttgcggccatcacgcatcacctcgagcccttgttggaaacgccttccgacaagacttctactggccgaccgcggtggccgacgccactagaattgtctgcacctgccaagggtgtcaattctatgcaaggcagacccacctgcccgctcaggctctgcagaccatacccatcacctggccgtttgctgtgtggggtctggacctcgtcagccccttgcagaaggcacccgggggctacacgcacctgttggtcgccatcgacaaattctccaagtggatcgaggtccgacccctaaatagcattaggtccgaacaggcggtggcgttcttccccaacatcatccatcgctttggggtcccgaactccatcatcaccgacaacggcacccagttcactggcagaaagttcctggacttctgcgaggatcaccacatccgggtggactgggctgccgtggctcaccccatgacgaatgggcaggtagagcgtgccaacggcatgatcctgcaagggctcaagccgcggatctacgacgacctcaacaagttcggcaagtga

SEQ ID NO: 114829 - DNA, 2850 bp, Zea mays
  Clone ID: MRT4577_36206C.1
atgagcgccgtttccccgcaacatgccaactccaagcaagcgaacgacaccagcatgctcgcaagggacttgctgggcgtcacccttctacctgagacgacggtgcagtctacccttgacgtgacttcgtcaccgcccgtcgaccaagaggtaccgaccgactcaaatctcgtgccttttggattcagcctcgacccaccaagcgacttcgcttcggtggacgctctcatagaggcgagtccaaaccctccggggtatcgtatgcggtcaccctgggaccggctgacagctgtctcgacctacgggccctcgggttccgaggaagatgacgagcccgacttttgttgggatttctccggacttggcaaccccagtgccatgcgggacttcatgaccgcatgcaactactgcctttccgactattctgacggtagccgcagcctcggcgacgaggactgtggcccaagtcatgaatgtttccacgtcgatctagggggtcccggcgaaggaaaccatcttggtataccggagaacggtgatccccctaggcctgcgcctcgcgttgacatcctttgggagctagttgtggtccccgtcccggcggggggtcatgacccacagctcgagcaaatccgcgagatgcaggccaggctcaacgagggagcaggaacacttgagccgttccgccgggacatcgggcaggaatgggcgggccaacctccggccggagaagcacgtcatctaccccagggcatccagcaccgcatcgccgacgatgtcagggcaaggctgccaccggcttctagtggggtcggccagaacctggctgcagcggcaatacttctccgcgcgatgccggagccatcaaccaccgaaggacggtgtatccagggagagctcaagaatctcctggaggatgccgcggtccgactgcccgaaagctctgcctctcgcaggcagggctacccctcggagcatcgcgccgcgacttctcgattcatgcgggaagcctcggtccataccgggcgcacgcgcaacacagcgcctgcggccccaggtcggctcggcaacgagcaccatcaccacaaccgtcgaacccacctcgacgagaaggtgcgccgaggctaccaccccaggcgtgggggacgctacgacagtggggaggatcggagtccctcgcccgaaccacccggtccgcaggctttcagccgggccatacgacaggcgccgttcccgacccggttccgaaccccgactactatcacaaagtactcgggggagacaagaccggaactgtggctcgtggattaccggctggcctgccacctgggtggaacgaacgatgacaacctcatcatccgcaacctccccctgttcctctccgacaccgctcgagtctggctggagcatttgcctccggggcagatcttcaactgggacgacctggtccaagccttcgccggcaacttccagggcacgtacatgcgccctgggaactcctgggatttccgaagctgtcgccagcagccgggagaatctctccgggactacatccggcgattctcgaagcagcgcatcgagctgcccaacgtcaccgactcggatgtcatcggcgcgttcctcgccggcaccacctgccgcgacctggtgagcaagctgggtcgcaagacccccaccagggcgagcgagctgatggacatcgccaccaagttctcctctggccaggaggcgaagggcaagaagaagtcgcaagcgaaacgcgacgccgccgacgcggaccttgtcgccgccgccgagtacaagaaccctcgaaaacctcccggaggcgccaacctcttcgacaagatgctcaaggagccatgcccctatcatcaggggcccgtcaagcacacccttgaggagtgcgccatacttcggcgtcactttcacaaggccgggccacctgcggagggtggcagggcccgcgacgatgataagaaggaggatcacatggcaggagagttccccgaggtccacgactgcttcatgatctacggtgggcaagtggcgaacgcctcggctcggcaccgcaagcaagagcgtcgagaggtctgctcgataaaggtggcggcgccagtctacctagactggtccgacaagcccatcaccttcgaccagggcgaccacctcgaccgcgtgccgagcccggggaagtacccgctcgttgtcgaccccgtcatcggcaacgtcaggctcaccaaggtcctcatggacggaggcagcagcctcaacatcatctacgccgagaccctcgggctcctgtggatcgatctgtcctcggttcgggcaggcgctgtgccttttcacgggatcatccccgggaaactcgtccagcccctcggacaactcgatctacccgtctgctttgggacaccctccaactttcgaagggagaccctcacgttcgaggtggtcgggtttcgaggaacctacaatgcagtgctgaggagaccatgctacgccaagttcatggccgtccccaactacacctacctcaagctcaagatgccgggccccaatggggtcatcaccatcggccccacgtaccgacacgcgtacgaatgcgacgtggagtgcgtggagtacgccgaggccctcatcgccgacctggagagcctctccaaggaggcgccagacgtgaagcgccatgccggcaacttcgagccagcggagacggttaagtccgtccccctcaaccccagcaacgacgcctccaagctgatccggatcagctctgttgggtctatgcttcgtcgccgaaggtcttatagaaagaagtggtcctcggctgaagctgtttgcataagatag

SEQ ID NO: 114830 - DNA, 4695 bp, Zea mays
  Clone ID: MRT4577_36207C.1
atgtggtcaacctgggaccgactgacggtcgtctcaacctacaggcccccgggttccgaggaagatgacgagcccgactctggttgggatttctccgggctcgataaccccagcgccatgcgagacttcatgaccgcatgtgactactgcctcttcgattgctccaatggtggccacaaccttgacgacgaagactgtgacccaagtcgcgaatgtttccacgtcgatctagggggtctcgacgaaggcaaccaccttggtatgccggaggacggcgatccccctaggcctgcgcctcgcgttgacatccttcgagagctagctgtggtcccagtccctacggggggtcaggacgcacagctcgagcaaatccgcgagatgcaggccaggctcgacgaggaagcaggacaacttgtgcagctccggcagaacatcgggcaggagtgggcaggccgagcaccagccagagaagcgcgtcatctgccccaggacgtccagcaccgcatcgccgatgatgccagggcaagtttgcctccggcttccagcggggtcggccagaacctggctgcggcagcaatactactccgagcgataccggaaccatccaccaccgaggggcggcgtatccagggagaactcaagaatctcctggaggatgccgcggtccgacggggcaaaagctctgcctcccggaggcaggggtaccccctggagcatagcgccgcgacttcccgattcatgagggatgcctcggtccacaccgggcgcacgcgggacgcaacgcctgcagccccgggtcgcctcggcaacgagcaccaccgccgcgaccgtcgagcccacctcgacgagaagatgcgccgaggctaccacccgaggcgtgggggacgctatgacagcagggaggatcggagtccctcgcccaaaccacccagtccgcaagctttcagccgggccatacgacgggcgtcgttcccgacccggttccgaaccccgcctaccatcaccaagtactcgggggaaacaaggccggaactgtggctcgcagactaccgactggcctgccagctgggtggaacggacgatgacaacctcatcatccgcaacctccccctgttcctctccgacgccgcccgagcctggctggagcatctgcctcctgcgcagatctccaactgggacgacctggtcaaagccttcaccgaaaacttccagggcacatacgtgcgccctgggaactcctgggatctccgaagttgccgccagcagccaggagagtccctgcgggactacatccggcggttttcgaagcagcgcaccgagctgcccaacatcaccgactcagatgtcattggcgcgttcctcgccggcaccacttgctgtgacctggtgagcaagctgggtcgcaagactcccaccagggcgagcgagctgatggacattgccactaagtttgcctctggtcaggaggctattgaggccatcttccgaaaggacaagcagcctcaggggcgccagcaggaagacgtccccgaggcgttcgctcagcgcgacacgaagaagaagggcaagaagaagtcgcaagcgaaacacgacatcgccgacgcagatcttgtcaccgctgccgagcacaggaaccctcgaaagcctcccggaggggccaacctgttcgacaagatgctcaaggagtcgtgcccctatcatcagggtcccgtcaagcacacccttgaggagtgcgtcatgcttcggcgctacttccacaaggccgggcccccggcggaaggtggcaaaggccatgacaacgacaagaaggagggccacaaagcagaggagttccccgaggtccacgactgcttcatgatctacggtgggcaagtggcgaacgcctcggcacggcaccacaagcaagagcgccgggaggtctgctcggtgaaggtggcggcgccagtctacctagactggtctgacaagcccatcaccttcgaccaaggcgaccaccccgaccgcgtgccgagcccggggaagtacccgctcgttgtcgatcccatcatcggcaacgtcaggcttaccaaggtcgtcatggacggaggcagcagcctcaacatcatctacgccaagaccctcgggctcttgcagatcgatctatccacgatccgggccggtgcggcaccctttcacgggatcatccccgggaagcgcgtccaaccccttaggcaactcgatctgcccgtctgcttcgggactccctccaacttccgaaaggaaaccctcacgttcgaggtggtcgggttccgaggaacctaccacgcagtgattgggagaccatgctacgccaagttcatggtcgtccccaactacacctacctcaagctcaagatgccgggccccaacggggtcattaccgtcggatccacataccgacacgcgtacgaatgcgacgtggagtgcgtggagtacgctgaggccctcgccgaatccgaggccctcatcgccaacctggagagcctctccaaagaggtgccagatgcgaagcgccacaccggcaacttcgagccaacagaggtggttaaggatgtcgccgagcactcgctggatatccgagctggagcccgacccgtgaagcagcctttgcgccgattcgacgaagaaaagcgcagagccataggcgaggagatccacaagctgatggctgcagggttcatcaaagaggtattccatcccgaatggctagccaaccctgtgcttgttaaaaagaaaggtgggaagtggaggatgtgtgtagactacactggtctaaacaaagcatgtctgaaggttccctaccctctgcctcgcatcgatcaaatcgtggattccactgctgggtgcgaaaccctgtcattccttgatgcctactcagggtatcaccaaatcaggatgaaagagtccgaccagctcgcgacctctttcatcacaccctttggcatgtactgctatattactatgccatttggtttgaggaatgcaggcacgacataccaaaggtgcatgaaccacgtgttcggagagcacattggccaaacggtcgaggcttacgtcgatgacatcgtagtcaagacgaggaaagcctccgacctcctcactgaccttgaaacgacattcaagtgtctcaaggcgaaaggcataaaactcaatcccgagaagtgtgtcttcggagtcccccgaggcatgctcctagggttcattgtctccgagcggggcatcaaggccaacccggagaaaatcacggccatcaccaacatggggcccatcaaggacttgaaaggagtacagagggtcatgggatgccttgcggctctgagccgcttcatcccgcgccgcggcgaaagaggcctacccctgtaccgcctcttaaggaagaccgagcgcttcacttggacccccgaggccgaggaagccctcgggaacttaaaggcgctccttacaagcgcgcccccatcttgcgccgcgatcgtggtcgagacacgagaagaagggcatgcattgcccgtccagaggtcgatctacttcatcagtgaggtactgtccgagaccaaaatccgctacccgcaaattcagaagctactgtacgcggtaatcctgacgcggcgaaagttgcgacactacttcgagtctcatccggtgactgtggtgtcatccttccccctgggggagatcatccagtgtcgagaagcctcgggagcgggcgcgggcctgctcttcatctcacccctcgggaagcacctccgttacgtgttgcgcctccatttcccggcgtcaaacaacgtggccgagtacgaggctctggttaacgggttgtgcatcgccattgagctaggagttcggcgcctcgacgctcgtggcgattcgcagctcgtcatcgaccaagtcatgaagaactcccattgtcgcgacccgaagatggaagcctactgcgacgaggttcggcgcctgaaagacaagttctacgggctcgagctcaaccacgtcgctcgacgatacaacgaaactgcggacgagctggctaaaatagcctcaggacggacaacggttcccccggacgtcttctcccgagacctacatcaaccctctgtcaagaccgatgacacgcccgagcccgaggaggcctcggcccagcccgaggcaccctcgcctcagcccgaggcaccctcggccgccaagggtgaggcactgcgcgtcgaggaagagcggaatggggtcacgcctagtcgaaactggcagaccccgtacctgcaatatctccaccgaggagagctacccctcgacagagccgaagctcggcgactggcgcgacgcgccaagtcgttcgtcttgctactcctctacatatttattttacgagatgtaacttcaaaagttatggaaagatattctgattcaaaatctttggaaaatgttgtatttcttcctagcagagttcaatacgaaaataaaggactccatgttgggaatggcatacgtagtacgggtggtatttccggtataactgatcagggttgttctgaaagcaagtcaattggtgctttggaaagtgagtgccaaaggctagtcactgcttggtttatagaagggaaggatgaaagagataccgaagagtacaaatacgcaggagtcgggactcatctaactactctttcaactatccctactcttacttaa

SEQ ID NO: 114831 - DNA, 111 bp, Zea mays
  Clone ID: MRT4577_36208C.1
gccgcgcgcgctctcaatcactgtgaacgtccctgggaaaagagtgctataagcgacaataacctactagcttcgtaaaaggaatgacaatgccccatagggaccgactac

SEQ ID NO: 114832 - DNA, 1624 bp, Zea mays
  Clone ID: MRT4577_36209C.1
gcgatccgcaggcgggctacacacacatacatggcggcggagggcgccggaggccggggacgagccatgcggtacccgcctctgtcggcgctcgtggtctccgccatcgcagccttctccgccgtgatcgtcctcgccgtcgtccactcggcgtacgacgacgccatgtcgcggacgcggacgctgctgggccacaacctggagccgacgccgtggcacccgttcccgcacgacaagggccggccgccggcgcgcgcggcgctgcggtgcgcgccctccatcgcctgcctgccgccgctatcaccgtcgtcgtcgtcgtcgccgccgcaaggtaacaagaagaagaagcagaagcagtgccctgcctacttcgctgccatccaccgggacctggctccgtggcgcgggcagggccggggcgtgacgcgcgcgctcctggacgaggcgcggcggcgcgcgtccatgcgcgtcaccatcacgggcggcgggcggcggctgcacgtggacctctactacgcctgcgtgcagagccgcgccctgttcacggtgtggagcctgctgcagctgatgcggcggtaccccgggcgcgtgcccgacgtggacctcatgttcgactgcatggaccgccccgccatcaaccggaccgagcacggggacggcgctctgccgccgccgccgctcttccgctactgcaccaccagggaccacttcgacatccccttccctgactggtccttctggggctggccggagacgaacatcgagccatggaaccacgagttcaagaacatcagggcgggcgccagggcaacgagatgggcggacagggtgccgacggcgtactggaagggcaacccggacgtggcgtcgccgctgcgggaggcgctgctgggctgcaacgacacggccctgtggcgcgccgagatcatgcgccagaactgggacgacgaggccaggtccggctaccagcactcgaggctctcggcgcagtgcacgcaccgctacaagatctacgccgagggcttcgcgtggtcggtcagcctcaagtacatcctctcctgcggctccatggcgctgctcatcgagccgcgctaccaggacttcttcagccgcgggctggagccccgggtgaactactggccgggtcgccgccctgggcatgtgcgagtccatccgggacgccgtcgactggggcaacgccaacccggacgaggccgagcgcgtcggcaggcgcgggcagaggctcgtgcaggacctccgcatgcacgccgtctacgactacatgctgcacctgctcaccgagtatgcgcgcctcctcatagaccaggaccacggcttgagcccgccgccccacgcgcaggaggcatgcgaggcatcccttctctgcctcgcagacgacaagcagcggaggttcctccacgcatccaaggcagaccccgcgccgggcgacccgtgcgtgctcccgccgccgtgatccctccccctccctctctctctaggatttctttctttctttatttatttatttattagactcaacagacagatcagaacgagttgggaggatttcaatgatggttctaaagcttctgaacaaagcatgttcagatttcatttttaggtc

SEQ ID NO: 114833 - DNA, 277 bp, Zea mays
  Clone ID: MRT4577_3620C.1
gatataaccggaaatttttactggcaattctaaacaagtctgtttttttacagtcgacggggggacgaatagtccccacctgattaaatttttcatatatatacacacaataggagtgcttttacaacaaacataacaatggtttccccatccattaccttttgctgtactttacaaacaggcttacaggcgtagggacaggtagctacggggtacaattcataaacaggcaatagaggacaagccttccctttctagtgatcatatgtaaggatct

SEQ ID NO: 114834 - DNA, 2991 bp, Zea mays
  Clone ID: MRT4577_36210C.1
atgggcagtctccagcaacctctccaacccgggacggtgctccgtttcgggagtcttgagttcatgtccctcgacggcagctacgacatgatactccttccaccgctggacgacagcgacaatggcggccgacagcccgcccgccggcggcggaatcgacgatgtcttccccgcgtggtggaagaacaacattcgagctcgccccgtccgctcccccgccaacggaggagaaggcggggcaaccaaggccaagcgggaggcagcgcctcgtcgactgtcgagcgagtcgacagccccagcgccccaacagggggcgcgtcgggcatcgacctcgcgtttgagacgaagacgagcaccgtctccccgcgacacgccaactccgagcaaacggacgacgccggcacgctcgcgaaaggcttgcaggacgtcaccctcgtacctgagacgacggcgcagtcagtccccgacgtgacttcatcaccgcccgtcgaccaagaggtaccgaccgattcccatctcacatcattcggatttagcctcgacccgcctagcggctttgctttggcgggcgctctcgtagaggcgagcccaaaccccctggggtttcatatgcggtcaccttgggaccggctgacggacgtctcgacctacgggccctctgggtccgaggaagacgacgagcccagcttctgctgggatttctctagacttggcaaccccagtgccatgcgggacttcatgaccgcatgtgactattgcctttccgactgttccgacggtagccgaagcctcggcgacaagggctgcagcccaagccgtgaatgtttccacgtcgatctagggggtccctccgaaggcaaccatctcggcatgccggaggacggtgatctccctaggccggtgcctcgcgttgacatcccacgggagctagctgtggtccccgttcaggcggggggccatggcccacagctcgagcaaatccgcggggtgcaggccaggctcgacgatggagcaggagcgcttgagccgatccgccgggacgtcgggcaggcatgggcgggccaacctccggccggagaaatacgtcatctacccaagggcttccagcaccgcatcgccgacgacgtcagggtcaggccgccaccctcatctagtggggtcggccagaacatggctgcagcagcaatgctcctccgcgcgatgccggagccatcaaccaccgaggggcggcgaatccagggagagctcaagaatctcctggaaggcgtcgcgagggtgcgccgaggctaccaccccaggtgtgggggacgctacgacagcggggaggatcggagtccctcgcccgaaccacccggtccgcaggccttcagccgggccatacgacgggcgccgttcccgacccagttccgacccccgactactatcacaaagtactcgggggagacgagaccggaactgtggctcgcggactaccgtctggactgccaaatgggtggaacggacgatgacaacttcatcatccgcaacctccccctgttcctctccgacaccgctcacgcctggttagagcacctgcctccgggacagatctccaactgggacgacctagtccaagctttcggcggcaatttccagggcacgtacgtgcgccccgggaattcctgggacctccgaagctgccgacagcagccgggagagtctctccgggactacatccggcgattctcgaagcagcgcaccgagctgcccaacatcaccgactcggatgtcatcggcgcgttcctcgctggcaccacctgccgcgacctggtgagcaagctgggtcgcaagacccccaccagggcgagcgagctgatggacatcgccaccaagttcgcctccggccaggaggcggtcgaggctatcttccgaaaggacaagcagccccagggccgcccatcggaagatgcccccgaggcgacaactcagcgcggcgccaagaagaagggcaagaagaagtcgcaagcgaaacgcgacgccgccgacgcggaccttgtcgccgtcgccgagtacaagaaccctcggaaacccccaggaggtgccaacctcttcgacaagatgctcaaggagccggtcgggccacccgcggagggtggcaggacccgcgacgacgaaaagaaggaagatccccaggcaggagagttccccgaggtccgcgactgcttcatgatctacggtgggcaagcggcaaacgcctcggctcggcaccgcaagcaagagcgccgggaggtctgttcggtgaaggtggcggcgccagtctacctagactggtccgacaagcccatcaccttcgaccaagacgaccaccccgaccatgtgccgagcccggggaaatacccgctcgtcgtcaaccccatcatcggcgacgtcaggctcaccaaggtcctcatggacggaggcagcagcctcaacatcatctacgccgagaccctcgggctcctgcgtgtcgatctatcctcggtccgggcaggcgctgtgcctttccatgggatcatccccgggaagcgcgtccagcccctcggacgactcgaccttcccgtctgcttcggaacaccctccaacttccgaagggagaccctaacgttcgaggtggtcgggttccgaggaacctaccacgcggtactggggaggccatgctacgcgaagttcatggccgtccccaactacacctacctgaagctcaagatgccgggccccaacggggtcatcaccgtcggccccacgtacaaacacgcgttcgaatgcgacatggagtgcgtggagtacgccgaggccctcgccgagtctgaggccctcatcgccgacctagagagcctctctaaggaggtgccagacgtgaggcgtcatgccggcaactttgagccagcggagacggttaaggccgtccccctcaaccccagcagcgacgcctccaagcagatccggatcggctccgagctcgatcccaaatag

SEQ ID NO: 114835 - DNA, 2325 bp, Zea mays
  Clone ID: MRT4577_36211C.1
atgccgttcggcttgaggaatgcaggcgcgacgtaccagcggtgcatgaaccatgtgttcggcgaacacatcggtcgcacagtcgaggcctacgtcgatgacatcgtagtcaagacacggaaggcttccgacctcctctccgaccttgaagtgacattccggtgtctcaaggcgaaaggagtcaagcttaatcctgagaagtgtgtcttcggggtaccccgaggcatgctcctagggttcatcgtctctgagcgaggcatcgaagccaacccggagaagattgcggccatcaccagcatgggacccatcaaggacttaaaaggggtacagagggtcatgggatgcctcgcggccctgagccgtttcatctcacgcctcggcgaaagaggtctgcctctgtaccgcctcttaaggaaggccgaatgtttcgtttggacccctgaggccgaggaagccctcggcaacctgaaggcgctccttacaaaggcgccggtcttggtgccgccggcggacggggaaaccctcttggtctacgtcgccgcgaccactcaggtggttagcgccgcgattgtggtcgaaaggcaggaggaagggcatacattgcccgttcggaggccggtctacttcatcagcgaagtgctgtccgagactaagatccgctacccacaagttcaaaagctgctgtatgctgtgatcctgacaaggcggaagctacgacactacttcgagtcccatccggtaactgtggtgtcatccttccccctgggggagatcatccagtgccgagaggcctcgggcaggatcgcaaagtgggcggtggagatcatgggcgaaacgatctcgttcgcccctcggaaggccatcaagtcccaagtgttggcggatttcgtggccgaatgggtcgacacccaactgccaacgactccgatccaaccggagctctggaccatgtttttcgacgggtcgctgatgaagacgggggccggcgcgggcctgctcttcatctcgcccctcggtaagcacttgcgctacgtgctgcgcctccacttcccggcgtccaacaatgtggccgagtacgaagctctggtcaacggattgcggatcgccatcgagctaggggtcagacgcctcgacgcccgcggtgattcgcagctcgtcatcgaccaagtcatgaagaactcccactgccacgacccaaagatggaggcctactgcgacgaggttcggcgcctggaagacaagttcttcgggctcgagctcaaccacatcgctcggtgctacaacgaaaccgcagacgagctggctaagatagcctcggggcgaacgacagtccccccggacgtcttctcccgggatctgcatcaaccctcagtcaagctcgacgacgcgcccgagcccgaggtaccctcggctcagcccgaggtaccctcggctcagcccgaggtaccctcggcccccgagggcggggcattgaacgtcgaggaagggcagagcggggccacgccagaccaggattggcaggccccgtacctgcaatatctccgtcgaggagagctacccctcgaccaagtcgaggctcggcgggtagcgcgacgcgccaagtcattcgtcttgctgggcgacgaagaggagctctaccatcgcagcccctcgggcatcctccagcgatgcatctccatcgccgaaggtcgggaactgctgcaaaaaaaggcgcccgggggctacacgcacctgctggtcgccatcgacaaattctccaagtggatcgaggtagagcgtgccaacggcatgattctacaagggctcaagcctcggatctacaacgacctcaacaagttcggcaggcgatggatgaaggaactcccctcggtggtctggagcctaaggacgacgccgagtcgtgccacgggcttcacgccgtttttcctggtctacggggctgaagctatcttgcccactgacctggaatacggctccccgagggcgagggcctacaccgaacaaagcaaccaagccagccgagaggaatcgctggaccagctggaggaagctcgggacagggccttgctacactcggcgcggtaccaacagtccctgcgacgctaccacgcccgaggggtccggtcccgagaactccaggtgggcgacctggtgcttcggctgcgacaagacgcccgagggaggcacaagctcacgcccccctgggaagggccattcgtcatcgccaaagttctgaagcccggaacatacaagctggccagcaatcaaggcgagatctacggcaacgcttggaacatcaaacagctacgtcgcttctacccttaa

SEQ ID NO: 114836 - DNA, 347 bp, Zea mays
  Clone ID: MRT4577_36212C.1
gtacctgcacgactacccgcgcccggcgtgggtgcacatggacgtcagcagcggcagcgtcctccttgccggtgacgggccccgcgccaagctccggggcttcggcgccgcgagggccatcacgggccccaccgccggcgtcgacggcgaatagggcgccgaggaggcgctgttcacgatgacgagccgcatcgcggggacgcgcgggtacatcgcgccggactacctggagcacggcgtggtgtcgccaaaggccgacgtctactcgctcggcgtcgtgctcctggagctcgtaacgggcagggacgccgaggagctggtgggcgacagcgtgggcgatccgttcg

SEQ ID NO: 114837 - DNA, 276 bp, Zea mays
  unsure (1)..(276): unsure at all n locations
  Clone ID: MRT4577_36213C.1
attcggctcgagtaaaaaacagaacagtcngatttactgagtcatgcttcagtttgtttcctttcattttgaggaattgaaatcttacttatggaatagactatttttttgaaaaaaaaaaaaaaaaaaaaaaaaaaaaaaaaaaaaaaaaaaaaaaaaaaaaaaaaaaaaaaaaaaaaaaaaaaaaaaaaaaaaagggccgaaaaaaaaaaaggtatttccatctaccctgtaatcataatcccaaccggtaccctgttgggaaaccgattttcc

SEQ ID NO: 114838 - DNA, 350 bp, Zea mays
  Clone ID: MRT4577_36214C.1
cgtttagaaacacaccaagcgaagcgcactatcaacaccctatcaacactggctaccaagatattagccctccttgcgctctttgcgcttttagagagcgcaacacatgcgttcattatttcacagagctcacttgctcttagagccattatttcacagatcctctcaccagatactttaatgggctttgaacatatagacgcgcaagcgtacaggctataactagcgcttgcggcgagcgtgttacaacaaccaattgtgcaattgcgacaacaatacttggggcatatatacctacaaaccatatcaacgcaacagcaacaacagtttctgtcatcactgtgacacct

SEQ ID NO: 114839 - DNA, 383 bp, Zea mays
  Clone ID: MRT4577_36215C.1
aacaaaaattttttttaatacatatattttttttacgagagtaagaaaactagaaaccatatatggttcaaaaaaagtttcggaaaaagtctaaaacaacactctggataaaacgaaaaaaacagttttaaaaagaaccaggcaaaacgcgccagcataaataaaacaatgaccccgaaaaaataagagaaaaatttcaccttttccactaaaaaattccaaagcaaaaacaaaaacccgacaaaaaaaaaataattctttgcggcaaaacaaggaaacaggatcaataggaaactttttttccaaactcttaaagacttcgaaaaaaaacgtaagccaaatgtcaaggacagaaaagcgaacaaaaaggagggataataaaa

SEQ ID NO: 114840 - DNA, 767 bp, Zea mays
  Clone ID: MRT4577_36216C.1
ttgggaccctcgagcctggccgccggccgggaccgaaaaaaaaaactctgcggagattgaccgaccaccaccaccgcctgcgttcccgcgccgccaccgccatggctgccgctgccccccatgcatactcctccctcgtgcctgtttcggctgcgcggcctctctccggaagcacagtttctttcggtgcttcgtgccacaagtggaggaaggttccggcatggcgactccactgtgttgctgaagacgaagcagaggaagtcaaagattttggagtcaatatggcactatccatgctaaaattttacaaacgagaaatatcacctttactaccttcaagctgccgatatgtaccaacttgcagtgagtactctatgcaggcgtacaaacgatatggtgttgtaaagggttccatcttgactgcttggcgcctttgccgttgtaatcctcttggtggatatgggtatgatcctccaaaatggtttggcgaggaagatgtacctctgcaatagtaatgcctagtaattgaaagtacaggcattgtaattcttcagatccagacttgcagcagtttttatgtaatttactgaaactaaacccagaaacacaaggataaaattctgcaatatctatgcacctctgaaggagcatgtattttttttgtgtatgcctgtatggttattttatctagttctcgtgcaattcctccaaggtgattgtatgagcgaaattcatttattacctacaattaacatccataattcacc

SEQ ID NO: 114841 - DNA, 478 bp, Zea mays
  unsure (1)..(478): unsure at all n locations
  Clone ID: MRT4577_36217C.1
cacgcctgcgtgtaccgggcccctattacacggtcgacctcagcgttcgattgtanaccaactagcacctatataatgcacagtaaagccccaaccatgagcataacaaaactattattgtctgacctatgcattctatgggcatatctagaaagaggcgtcgctcacggaataccagtgtttgcctggattgaacactggctgctatggcaaaccttgttgccccaaacctatcaccagcggcgtctgcaagatgggacaaacccattggttcaaccctccaggatacaacaagcaactgcagctggcataatacgtttataaccctcagaccatccaacattgcatgaatgcgctattacaacatgcacctgtgatgcatttattggcacaaagcatcatggcacaacaactacaacaacttgtgctagcaaaccttgctgactactctgaataacagcagttgctttcattcaac

SEQ ID NO: 114842 - DNA, 484 bp, Zea mays
  unsure (1)..(484): unsure at all n locations
  Clone ID: MRT4577_36218C.1
ggccggcctggggggggggggtttttttatttttttttttttgttttttttgtttggggggggaagcgattgttatgcatttccccgaggggcacccttttaacataacaggggaaggggaacaaatgtttttttttttttaanagcatttgtttggggggggggggaaccgggcgatacactttccctgtgccccccaagggcggggcagacaggggggggtcagggatttgaaggggtgcctctgggtgagggcgcaaccgaagctaacggttttgaaggtgcgcggtgcacacacgggggggggacagagggactgcaatgcgggtaccccccatcgggaagggtccggttaaaagagctggtgtgcagaacggggggggcccttatgaagggggaggcatacttgaaggtgaactgggcatggacgggctggtgggggtgggggattggggggggatatgaccatgggggaaaggggaaa

SEQ ID NO: 114843 - DNA, 289 bp, Zea mays
  unsure (1)..(289): unsure at all n locations
  Clone ID: MRT4577_36219C.1
agcggactagtcggccgncgcccttccccccttacatctttttcattttttgaaaaaagaacgaatacgggggaagggggaaatatacaatccgtttggcaccctacccagtaattcacagactcctcatgggcccgaacactttcctcaagacacaaccaggcggggatcctgccccagtacactttattaaaaactatcacccctaccgtcacaaggttttaaccccggacatatttttacaaatggatagcttaagagaaagtataaaggggcacatcactccgcc

SEQ ID NO: 114844 - DNA, 432 bp, Zea mays
  Clone ID: MRT4577_3621C.1
cgagtacaagctttttttttttttttttttttttttttttttttaccttccctgtcgacccgcccgaaaggccaattccaaagcacaggcccaccacactaggggaccccaccaggggacccaacctggggaaaaaacgggcaaaaggggggggggggggaaattgctgtccgaaaacaattccccacaacaaaccaacccaaaacacaaaccggaaacccaggggggccaaacgggggggccaaatgagagaaatagcttagagcaaacgggccgctctcaaggccggaaacccagccggccaacctgattaaccaaatgcacaaaacaccgggacaagccgcttggagaaggggccctcttacaggtccctgttcacttacccggttcactgactcgttgggctggggcgagcgggttcagctaacccaa

SEQ ID NO: 114845 - DNA, 404 bp, Zea mays
  Clone ID: MRT4577_36220C.1
ctttcgtcgccaccccgtccagtggaacctccacgtgaggagttgctgccccctcgtccgtcgtcggtggtgaaagcctaacgaggggtcacagggaccgccagcggggggcgagcgggggcctcggtctactaagcgcggggaggttgtcccccagaggacgcctaggcactaagggtggtgctgtagagtgctaggrccggcatgggagcctcgttcgtcatggtgagctccttgaagagaagctcattctgcacgacatggaaggtgggaaagggcatggtgctcttgatgggagccttcaggtggccgtagcgggggctgaggccacgcagtaggttcaacactaaggtacggtccgccaccggctcgccgagatcatggagrgagtccgccaggccctt

SEQ ID NO: 114846 - DNA, 380 bp, Zea mays
  Clone ID: MRT4577_36221C.1
tctctttttttttttttttttttttttttttttttttttttaggggaaaccctcaccattttattttaggcagggagaggggtgtgccctttgcatcacggtatttcatttagttacaggggaattaataccgctgggtaccgggaaccggatttacttaaagaagccaaatttggattgttggcaatttcacaaacagaatttggggacttttaaccacccgactgggaacaaacaatggatcgactgacccaaggtgaaaacaaaacaagggtttgaagccgggggtgattgtgaacgatgtcttgccccaggaaggttccccttatattttttacaagaaccttgcgcccttttttcttttctcctcttgaaatctt

SEQ ID NO: 114847 - DNA, 461 bp, Zea mays
  Clone ID: MRT4577_36222C.1
ctactttctcaccgccgatgactgcctcgcgcacctcgagctggcgttcaagttcgacgcgctcaccgacgacgtccacggtgtggtcggacagacgtaccgctccgactacgtcagccatttcgacgtgagggcctccatgcccaccatgggaggagatgccaccttcaccacctccagcctgttcgccgccgactgcagcgtggcgcgctatggagtcagccgtggaaacgacggtgccgcggtgctatctgagctcgctggtgtcacctgcgccagcggcatggacggcaaaggtgtcgtgtgcaagaagtaaaacgcttctgccatgcatatggcgagtgcccgtgcatgtctgcatgcatgcatggttgagaagtacacacagaaataagcaaaggacatacattaatgtgtttggaacttgtaactttatcaagaaatagtatgcgtccgtttgc

SEQ ID NO: 114848 - DNA, 1041 bp, Zea mays
  Clone ID: MRT4577_36223C.1
atgagtacacacgcgcccagagatatacaagctcgtttgtggtgttcttccccaatagcaagggaacgtgtcttatctaatggaggaggccgtaaccctcagtcgcttgttgatgttgacggggaccatgggtctgcaacagctactcaagaaataggtgccccaaagagagccaagtggatccatgagaggaagttgttccttattcagctactaaaggatcacgatgtgccgggttttagaacacaaaatgcttggtgtaaggaggcatggaacaacattgttcgtcgcttgaatgaaaaatttggtacatcgtatactattggccaagtcaaacagaaggagcaagatttgaagaaagattatcgcagtgttaaagaattggtggagcaaagtggttttggatggaatggtgagagaatgatggtggaagcaccagatagtgtttgggcatcttttgctgctcgcaagaataacgagtcagccctccattggagagacaagtcattcccatactatgatgatttatcaaagctgtatgatggtgagaattttatgtgcttttatgagttgtttctaattgcttgcaaatacatccgagtcatatgtgttttcctaaatatgattctgcaggtcgttatgctgaaggaagaactcgtcaaggttcatgaaaaggaagtcccacctagttccacacaaataacttcagagcttcctgattctcgacgtggaaagaagaaaaaaaacaaatctgctagccctcctgatggatttcatgaaagatacctaaaactaaagaaagaagaaatagatcgatttgctgccattgaagagaagaaattggaagatccttacagcatcaacaagtgtattactgtgcttgaagatttggatggtctgcaagtgggagatctattgatggcatctgatatattcaagattaaggataacagggaagtattcttatcatttaaaaatgacgcattaagattagcttggattacaagggagattggtaagatagcagatcaccagaattag

SEQ ID NO: 114849 - DNA, 583 bp, Zea mays
  Clone ID: MRT4577_36224C.1
tttttttttttttttttttttttttttttttttttttttttttttttttttttttttttttttttttttttttttttttttttttttttttttttttttttttttttttttttttttgggggcaaactttaaaattcccccggcagggccagttaaaaagcagcaggagcagcccgggcctaaaaattggggacagaaaactttaaacgaagttttttggggaaaggccatttttacaggggcgcccccccaaaaaaaaaattggaaacggggccttcccccaggggtttaagggggggggggggggaatttcaacccccttgttgccaagccccaacgggcccgaactcgttgttttgggggttacggaaaaaaacggtaatgggggccacccaaagccccaggggggccccgcaaaaaaagttttccacgggcccaacccccccccccggggccccccctgttgccaattgttgttggtggccccggtccccccccccggttcctccgagtccccccactggcggcgcttttttctccgccatttgggaaaacttggaaagggctccggctttttcccccc

SEQ ID NO: 114850 - DNA, 294 bp, Zea mays
  Clone ID: MRT4577_36225C.1
attcggctcgagcgtttacaaagacgggcatgtttcccgcgagctcccgcccggtccgtgaagagattttaggatcaccccctgttacactgcctcaggacgtaactaacgcggactggagctattcggcgccagccctcaccagacacatacactggcagatcgcaatagagccgtgtgcttgacaccagagatacttacagcctgaacgcggaacgcatgcatggtccacagtgacagagtatgctgagatagacaggaaaactggtacccgctttacctgagtgccagatt

SEQ ID NO: 114851 - DNA, 592 bp, Zea mays
  Clone ID: MRT4577_36226C.1
gttttgtttttttttttttttttttttttttttttttttttttttttttttttttttttttttttttttttttttttttttttttttttttttttttttttttttttttttttttgggtttaaaaaaaaaaataacccccccccgggggggggggggggggggcttttttttaaaaaggccccccccagggttaccccccccggaaaaccgggaacgcaaacccttcccggggaacttaaaaaaccaaccccatcgggaaggccttaaagggccccgatttaataaaaccccccccaacctaaaggggggttttaaaaaaccccccccttaaagggcgaaaaaaaaaaaaaccttgtaaaaaaccccgcgaaattgaaagcccggggtcactggggaaaaaaaagcccaccccaccccccttcaaaaatttggggttatggggcccccccaaaaacattttttcccccgggggggccaccacaaaaaatttgttacaaaaaggcaatgccaacccccttattggagggataaaccccattttgaacaaaaactggtttctggtgaaagtcaacccccccccccccggggggg

SEQ ID NO: 114852 - DNA, 503 bp, Zea mays
  Clone ID: MRT4577_36227C.1
ttcatattattgaattatctgcagggtaagctccaaaagttagctaattataatactaaaatactgctctttttaaaagaaacatccactagtacttgtccttgtattaacattagcagataatttcatttggaactcccaaatatcgcttattcggcactcccaaatatcggttattaacttgtaagttgcatgttgacttgttgagtgttgtcacagtcacacaggagcttttttaattatattagaatattaggtagtagttaccttatgcataatgcaatttttgtcttggaatgtggcccttggattaataataaatgaatgcatgtaccatgtagtaagttaccattgcagttcagtgtcaatacctcaaaggttaaattttttatacagttttactccttatcacagtgctatctcattcatgttaccttgtctaaactttcttctcttggtctaggcttgtgcatatgtggaaaaacatgcacgagtgccatcag

SEQ ID NO: 114853 - DNA, 1821 bp, Zea mays
  Clone ID: MRT4577_36228C.1
atgggatgccttgcggctctgagccgcttcatctcgcgcctcggcgaaagaggcttacccctgtaccgcctcttaaggaagaccgagcacttcacttggacccccgaggccgaggaagccctcgggaacttgaaggcgctccttacaagcgcgcccatccaggtgccccccgctgccggagaagccctcttgatctacgtagctgcaaccactcaggtggtcagcgctgcgatcgtagtagagagacgagaagaagggcatgcattgctcgtccagaggccagtctacttcatcggtgaggtactgtccgagaccaaaatctgctacccgcaaattcagaagctactgtacacggtgattctaacgcggcgaaagttgcgacactacttcgagtctcatccgatgactgtggtgtcatccttccccctgggggagatcatccagtgccgagaggcctcgggtaggattgcaaagtgggccgtggagatcatgggcgagacaatctcgttcgcccctcggaaggccatcaagtcccaagtcttggcggacttcgtggctgaatgggtcgacacccagcttccagcagctccgatccaaccggaactctggaccatgtttttcgacgggtcgctgatgaaaacaggagcgggcgcgggcctgctcttcatctcacccctcgggaagcacctccactacgtgctgcgcctccacttcccggcgtccaacaacgtggccgagttcgaggctctcgttaacgggttgcgcatcgccatcgagctaggggttcggcgcctcgacgctcgtggcgactcgcagcttgtcatcgaccaagtcatgaagaactcccattgccgcggcccgaagatggaagcctactgcgacgaggttcggcgcctggaagacaagttctacgggctcgagctctaccatgtcgcccgacgatacaacgagctggctaaaatagcctcggggcggacaacggttaccccggacgtcttctcccgagacctacatcaaccctccgtcaagaccgacgacacgcccgagcccgggaaggcctcagctctgcccgaggcgccctcgactcagcccgaggcaccctcggcccccgagggtgagtcactgcgcgtcgaggaagagcggaatggggtcacgcctaatcaaaactggcagaccccatacctgcaatatctccaccaaggagagctaccccttgacagagccgaggctcggcgactggcgcggcgcgccaagtcgttcgtcttgatgggtgacggaaaggagctctaccaccacagcccctcaggcatcctccagcgatgcatatccatcgctgaaggtcaggagctactgcaagaaatacactcgggggcttgcggtcatcacgcagcacctcgagccctcgttgggaatgcctttcgacaaggtttctacgggccaaccgcggtggccgacgccactagaattgtacgcacctgccaagggtgtcaattctacgcaaggcagacgcatctgcccgctcaggccttacaaacaatacccatcacctggccgtttgctgtgtggggtctggacctcatcggtcccatgcagaaggcacccgggggcttcacgcacctgctggtcactatcgacaaattctccaagtggattgaggtccgacccctaaacagcatcaggtccgaacaggcggtggcgttcttcaccaacatcatacatcgctttggggtcccaaactccatcatcaccgacaacgacacccagttcactggcaggaagttcctggacttctgcgaggaccaccacatccgggtggactag

SEQ ID NO: 114854 - DNA, 3069 bp, Zea mays
  Clone ID: MRT4577_36229C.1
atgggcagtctccagcaacctctccgacccgggacggtgctccgtttcgggagtcttgagttcatgtccttcgacggcagctacgacatgaaactccttccaccgccgcgcgacaacgacaatggcggccgacagccctcccgccgacggcggaatcgacgacgtcttccccgcgtggtggaagaacaacattcgagctcgccccgtcctctcccccgccaacggaggaggaggcggggcaaccaaggccaagcgggaggccgcgcctcgtcggctgtcgagcgagtcaacgtccccagcgccccaacggggggcgcgtcgggcgtcgatctcgcgtttgagacgaaggcgagcgccgtctccccgcgacacgccaaacccgagcaagtggacgacgccagtgcgcttgcgaaaagcttgcaggacgtcgccctcgtacctgaggcgacggtgcagtcagtcctcgacgtgacttcatcgccgctcgacgaccaaaaggtaccgactgattcccatcctacgtcatttggactcagcctcaacccgcctagcgaccttgctttggcgggcgctctcgtagaggcgagttcaaaccctctggggtttcgcttgtggtctccttgggaccggctgacggacgtcttgacctacgggccctctgggtccgaggaagatgacgaccccaacatctgtcgggatttctctggatttggcaaccctagtgccatgcgggacttcatgaccgcatgtgactactgcctctccgactattccgacggtagccgcagcctcgacgacgaggactgcggcccaagccgcgaatgtttccacgtcgatctagggggtccctccgaaggcaatcatctcggcatgccggaggacggtgatctccctaggccggtgcctcgcgctgacatcccgcgggagctagctgtggtccccgtttcggcggggggtcacgacccacagctcgagcaagtccgcggggcgcaggccaggctcgacgagggagcaggagcgcttgagccgattcgccgggacatcgggcaggcatgggcgggccaacccccggccggagaaatacgtcacctgccccagggtctccagcaccgcgtcgcctacgacgtcagggtcaggccgccacccgcatccagtggggtcggtcagaacctggctgcagcagcgatgctcctccacgcgatgccggagccatccaccaccgagggtcggcgaatccagggggagctcaagaatctcctggaaggcgccgcggtccgacgggccgagagcactgcctcccgaaggcagggatacccctcggaacctcatgccgcgacttctcgattcatgcgggaagcctcgatctacaccgggcgcacgcgcaacaccgcgcctgcggccccgggccacctcggcaacgagcaccgtcatcgcgaccgtcgggcccacctcgacgagagggccttcagccgggccatccgacgggcaccgttcccgacccggttccgacccccgactactatcacaaagtactcgggggaaacgagaccggaactgtggctcgcggactaccacctggcctgccaactgggtggaacggacgatgacaacctcatcatccgcaacctccctctcttcctctccgacaccgctcgtgcctggttggagcacctgcctccggggcagatctccaactgggatgacctggtccaagccttcgccggaaattttcagggcacgtacgtgcgccccgggaattcctgggacctccgaagctgccggcagcagccgggagaatctctccgagactacatccggcgattctcgaagcagcgcaccgagctgcccaacatcaccgactcggatgtcatcggcgcgttccttgccggcaccacctgccgcgacctagtgagtaagttgggtcgcaagacccccaccagggcgagcgagctgatggacatcgccaccaagttcgcctctggccaggaggcggtcgaggctatcttccgaaaggacaagcagccccagggccgcccatcgaaagatgctcccgaggcgtctactccgcgcggcgccaagaagaaaggcaagaagaagtcgcaagcgaaacgcgacaccgccgacgcggaccttgtcgccgccgccgagtacaagaaccctcggaagccccccgaaggtgccaacctcttcgacaagatgctcaaggagccgtgcccctatcatcaggggcccgtcaaacacacccttgaggagtgcgtcatgcttcggcgccacttccacagagccgggccacccgcggagggtggcagggcccgcgacgacgacaagaaggaagatcaccaagcaggagagttccccgaggtccgcgactgcttcatgatctacggtgggcatgcggcgaatgcctcggctcggcatcgcaaggaagagcgccgggaggtctgctcggtgaaggtggcggcgccagtctatctagactggtccgacaagcccatcaccttcgaccaagctgaccaccccgaccatgtgccgagcccggggaaatacccgctcgtcgtcgaccccgtcgtcggcgacgtcaggctcaccaaggtcctcatggacgggggcagcagcctcaatatcatctacgccgagaccctcgggctcctgcgcgtcgatctgtcctccgtccgagcaggcgctgcgcccttcaccgggatcattcccgggaagcgcgtccagaacctaccacgcggtactggggaggccatgctacgcaaagtttatgccgtccccaactacacctacctaaagctcaagatgccgggccccaacggggtcatcaccgtcggccccacgtacaaacacgcgttcgaatgcgacgtggagtgcgtggagtacgccgaggccctcgccgagtccgaggccctcatcaccgacctagaaagcctctccaaagaggtgccagacgtgaagcgtcatgccggtaacttcgagccagtggagacggttaaggccgttcccctcgaccccagtggcgacgcctccaagcagatccggatcggttccgggctcgaccccaaatag

SEQ ID NO: 114855 - DNA, 1162 bp, Zea mays
  Clone ID: MRT4577_3622C.1
tcagattatccactgcggcctcttcctcctcttcctccgcccctcccaccatgattgccacccatctctccccaggcctcaagcagtaccgcttcccgtccccgctccactccacctctcacaaccaccaccttcccgtgcacctcccgctcccccgccgccaccgcaacttcgctaagcccgccgcggccgtgcctgacctcctcgccagcgtcgagtccgtggcctccgcggcctccgtcctggccgccatcgtgctcgtccacgagtccgggcacttcctggccgcggcgtcccggggcatccacgtctcccagttctccatcggcttcggcccggcgctcgcccgcttccgcctcggccccgtggagtacgcgctccgcgccatcccgctgggcggctacgtaggcttccccgacgacgacccggagtccggcttcgcgcccgacgaccccgacctcctccgcaaccgccccgtcccggaccgcctgctcgtcgtctccgccggcgtcgccgccaacctcgccttcgccttcctcatcgtctacgcgcaggcgctcaccgtcggcgtccccgtgcaggcgcagctccccggggttctcgtgcccgaggttctcccgggctcctgaccgggacggtgttcgacgggctcaggcagacattgctcaacttctctcagtccgccgacaaggtgtcaggccctgttgccatcattgcagtgggagcggaagtggccaggtccagcgcggatgggctgttccagtttgcggcggtgatcaatctcaacctcgcagccataaccttgttgcccttgccagcattggacggtggcacctcggcattgatccttcttgaggcagcccggggtgggcgcaagatcccccgagaagttgaacagggtattatgtcatcggggatactggtggtgctcatggttggcatgttcctcattgtacgtgacacactcaaccttgatttcatcaaggagatcttgtgatacttcgcgtgaaaaatcaattgattgcagttgtagtaaaattgccagtgtcagaacttggttggcttggaaatgtgtagttgttgtgattcattttgcctttgatgggactgctctagcactccaggtctctggtttcttgctatactgatcgtaggttattgt

SEQ ID NO: 114856 - DNA, 381 bp, Zea mays
  Clone ID: MRT4577_36230C.1
aaaaaaaacgggggctccttttttaacccatgacaaaacataaaagggccgggcaaggaaatcccattttttccatttttgggcccccagtaaaaaaagttggggagcaagtaacaataagggcctcccgcttttccttttaccttcccaaagaacaggatcaaactttcacctttaaacgggacccaggcccccaggcattgcatgggaccacgggggacacaaagctctccaactgtctggatttgggtcccactttttgggtatttaaaaggcaatcagggttcttaagggatcacatgaccccccccccttcccagaggagggggttttaaagctccgttccaatgggcccaaaggcccctttggggattggggagg

SEQ ID NO: 114857 - DNA, 2717 bp, Zea mays
  Clone ID: MRT4577_36231C.1
ggtatcaccaaatcaggatgaaagagtccgaccaactcgtgacttctttcatcacaccttttggcatgtactgctatgttactatgccatttggtttgaggaatgcgggtgcgacgtaccaaaggtgcatgaaccacgtgttcggagagcacattggtcgaacggtcgaggcttacgtcgatgacatcgtagtcaagacgaggaaagcttccgacctcctctccgaccttgaaacgacattccggtgtctcaaggcgaaaggcgtaaaactcaatcccgagaagtgcgtcttcggagtccctcgaggcatgctcttggggttcatcgtctccgagcggggcatcgaggccaacccggagaaaatcgcggccatcaccaacatggggcccatcagggacttgaaaggcgtacagagggtcatgggatgccttgcggctctgagccgtttcatctcgcgcctcggcgaaagaggcctacctctgtaccgcctcttgaggaagatcgagcgcttcacttggacccccgaggccgaggaagccctcgggaacctaaaagcgctcctcaccagcgcgcccatcttggtggtcagcatcgcgatcgtggttgagagacgagaagaagggcatgcattgcccgtccagaggccggtctacttcatcagcgaggtactgtccgagaccaagatccgctacccacaagttcagaagctgctgtacgcggtgattctgacgcggtggaagttgcgacactacttcgagtctcatccgatgactgtggtgtcatccttccccctgggggagatcatccagtgccgagaggcctcgggtaggattgcaaagtggacggtggaaatcatgggcgagacaatctcgttcgcccctcggaaggccatcaagtcccaagtcttggcggactttgtggctgaatgggtcgacacccagctcccagtagctccgatccaaccggaactctggaccatgtttttcgacgggtcgctgatgaaaacaggggcaggagccggcctgctcctcatctcgcccctcgggaagcacctccgctacgtgctgcgcctccatttcccggcgtccaacaacgtggctgagtacgaggctctggtcaacgggttgcgcatcgccgtcgagctaggggtccgacgcctcgacgctcgtggtgactcacagcttgtcatcgaccaagtcatgaagaactcccacttccgcgacccgaagatggaagcctactgcgacgaggttcgacgcctggagggcaagttctacgggctcgagctcaaccacatcgcccgacgatacaacgagactgcggacgagctggctaagatagcctcggggcggacaacggttcccccgaacgtcttttcccgagacttacatcaaccctcagtcaagaccgacgacacgcccgagcccgagaaggcctcggcccagaccgaggcaccctcggcccccgagggtgaggcactgcgcgtcgggggagagcggaatggggtcccgcctaatcgagactggcagaccccgtacctgcaatatctccaccgaggagagctacccctcgaccgagccgaagctcggcgactggcgcggcgcgccaagtcgttcgtcttgctgggggacgggaaggagctctaccaccgcagcccctcaggcatcctccagcgatgcatatccatcgccgaaagtcaggagttattacaagaaatacactcgggggcttgcggtttctactggctgaccgcggtggccgacgccactagaattgtccgcacctgccaagggtgtcaattctacgcaaggcaaacacacctacccgctcaggctctgcaaacaatacccatcacctggccatttgctgtgtggggtctggacctcgtcggtcccttgcagaaggcacccaggggctacacgcacctgctggtcgccatcgacaaattctccaagtggatcgaggttcgacccctaaacagcatcaggtccgaacaggcggtggcgttcttcaccaacatcatccatcgctttggggtcccgaactccatcatcaccgacaacggcacccagttcaccggcagaaagttcctggacttctgcgaggatcaccacatccgggtggactgggccgccgtagctcaccccatgacgaatgggcaagtagagcgtgccaacggcatgattctgcaaggactcaagccgaggatctacaacgacctccacaagttcggcaggcgatggatgaaggaactcccctcggtggtctggagtctgaggacaacgccgagccgagccacaggctttacaccgttcttcctagtctatggggccgaggccgtcttgcccacagacttagaatacggttccccgaggacgagggcgtatgacgaccaaagaaatcaaaccaaccgagaagactcactggaccagctggaagaggctcgggacatggccttactacactcgacacggtatcagcagtccctgcgacgctaccacgcccgaggggttcggtcccgagacctccaggtgggcgacttggtgcttcgactacgacaagacgcccgagggcggcacaagctcacgcctccctgggaagggccgttcgtcatcgccaaggttctgaagcccaggacgtacaagctggccaacagtcaaggcgaggtctacagcaacgcttggaacatccgacagctacgtcgcttctacccttaa

SEQ ID NO: 114858 - DNA, 1971 bp, Zea mays
  Clone ID: MRT4577_36232C.1
atgccggagccatcaaccaccgaaggacgacgtatccagggagagctcaagaatctcctggaggatgccgcggtccgacgggccgaaagctctgcctcccgcaggcagggctacccctcggagcatcgcgccgcgacttcccgattcatgcgggaagcctcggtccataccgggcgcacgcgcaacacagcgcctgcggccccaggtcttctcggcaatgagcaccatcaccgcaaccgtcgaacccacctcgacgagaaggtgcgccgaggctaccaccccaggcgtggggaacgctacgacaacggggaggatcggagtccctcgcccgaaccacccggtccgcaggctttcagccgggccatacgacgggcgccgttcccgacccggttccgaaccccgactactatcacaaagtactcgggggagacaagaacgaaactgtggctcgcggattaccggctggcctgccacctgggtggaacggacgaagacaacctcatcatccgcaacctccccctgttcctctccgacaccgctcgagcctggctggagcatttgcctctggggcagatctccaactgggacgacctgcagccgggagagtctctccgggactacatccggcgattctcgaagcagcgcaccgagctgcccaacgtcaccgacgcggatgtcatcggcgcgttcctcgctggcaccacctgccacgacttggtgagcaagctggatcgcaagacccccaccagggcgagcgagctgatggacatcgccaccaagtttgcctctggccaggaggcggttgaggccatcttccggaaggataagcagccccagggccgccagccggaagatgtccccgaggcgtccactcagcgtggcaccaagaagaaaggcaagaagaagtcgcaagcgaaacgcgacgccgccgacgcgaaccttgtcgccgccgccgagtacaagaaccctcgaaaacctcccggaggcgccaacctcttcgacaagatgctcaaggagccgtgcccctatcatcaggggcccgtcaagcacacccttgaggagtgcgccatgcttcggcgccactttcataaggccgggccacctgtggagggtggcagggcccgcgacgacgataagaaggaggatcacaaggcaggagagttccacgaggtccacgactgcttcatgatctacggtgggcaagtggcgagcgcctcggctcagcactgcaagcaagagcgtcgggaggtctgctcggtaaaggtggcggcgccagtctacctagactggtccaacaagcccatcaccttcgaccagggtgaccatcccgaccgcgtgccgagcccggggaaatacccgctcgttgttgaccccgtcatcggcaacgtcaggctcaccaaggtcctcatggacggaggcagcagcctcaacatcatctacgccgagaccctcgggctcctgcggatcgatctgtcctcggtccgggcaggcgctgcgccttttcacgggatcatccccgggaaatgcgtccagcccctcggacaactcgatctacccgtctgctttgggacgccctccaacttctgtagggagaccctcacgttcgaggtggtcgggtttcgaggaacctatcacgcagtgctggggagaccattctacgccaagttcatggccgtccccaactacacctacctcaagctcaagatgccgggccccaacgaggtcatcaccgtcggccccacgtaccgacacgcgtacgaatgcgacgtggagtgcgtggagtacgtcgaggccctcgccgaatctaaggccctcatcgccgacctggagagcctctccaaggaggcgccagaggtgaagcgccatgccggcaacttcgagccagcggagacggttaagtctgtccccctcgaccccagcaacgacacctccaagcagatccggatcggctccgagctcgaccccaaatag

SEQ ID NO: 114859 - DNA, 310 bp, Zea mays
  Clone ID: MRT4577_36233C.1
tcccgctcgacccactctctctcccatcgtcctcttacgcttttcttctcgtgtgctgcattattacacatgtacagcgtacatggattgatagaggagtcagactacacacattatcatgtacattcttaccaataatatatgcatgatcataataaacttttagttttaatgaatcaatataaacaactaatatcttcactcttaaaattaataacaatcttcactataattcttatttatatatataactattttaaagcaaataatttttttaacaattatattataaatactttcactttaatat

SEQ ID NO: 114860 - DNA, 699 bp, Zea mays
  Clone ID: MRT4577_36234C.1
atgtcgggtgttgtcctcgcacctgagacaacgacgggtgtcgcttcccagcaacgtgccaaccccaagcggactgatgacgccggcacccttgcgagggacttgtcggacattagtctcgcacctgagataacgacacattccatccccgatgcgactttaccaccgtccatcaaccaggagccaggggaatccctgcgagagtacatccggcggttttccaagcaatgcaccgagttgcccaacatcaccgactcggacgtcatcggggcattcctcgccggcaccacttgtcgggacctggtgagtaaactgggacgcaagactcccaccaaggcgagcgaattgatggacatggccaccaagttcgcctctggtcaggaggcggttgaagccatcttccggaaagacaagcagcctcagggaagacagaaggaagacgcccccgaggcgtccgtccaacgtggcacgaagaagaagaccaggaagaaggcgcaagcaaaacgcgacgccattgacgcggatctcgtcgctgctgccgagcacaggcatcctcggaagcctcccggaggggtcaacatgttcgacaagatgctcaaggagtcgtgcccctatcacaggggtcccgtcaagcacacccttgaagagtgtgatgtcacacccgggtttcggggcaccaagacccgggcgcgaacataa

SEQ ID NO: 114861 - DNA, 1500 bp, Zea mays
  Clone ID: MRT4577_36235C.1
ggaccccctggtctcgaaacgccgacactcatcatccgtaacctccccctgttcctctccgacaccgctcgcgcctggttggagcacctgcctccggggcagatctccaactgggatgacttggtccaagccttcgccggcaatttccagggcacgtacgtgcgccccgggaattcttgggacctccggagctgccggcaacagtcgggagagtcactccgggactacatccgacgattctcgaagcagcgcaccgagctgcccaacatcaccgactcggatgtcatcggcgcgttccttgccggcaccacctgccgtgacctgaaggcggtcgaggctatcttccgaaaggacaagcagccccagggccgcccatcggaagaggctcccgaggcatctactcagcgcggcgccaagaagaaaggcaagaagaagtcgcaatcgaaacgcgacgccgccgacgcggaccttgtcaccgccgccgagtacaagaaccctcggaagccccccggaggtgctgacctcttcgacaagatgctcaaggagtcgtgcccctatcatcaggggcccgtcaagcacaccctcgaggagtgcgtcatgcttcggcgccacttccacagggccgggccacccgcagagggtggtagggcccacgacgacgacaaaaaggaagatcaccaagcaggagagtaccccgaggtccgcgactgcttcatgatctacggtgggcatgtggcgaatgcctcggctcggcatcgcaagcaagagcgccgggaggtctgcttggtgaaggtggcggcgccagtctacctagactggtccgacaagcccatcaccttcgaccaagctaaccaccccgaccacgtgccgagcccggggaaatacccgctcgtcgtcgaccccatcgtcggcgacgtcaggctcaccaaggtcctgatggacgggagcagctgcctcaacatcatctacgccgagaccctcaggctcctgcgcgtcgatctgtcctccgtccgagcaggcgctgcgcccttccacgggatcatccctgggaagcgcgtccagcccctcggacgactcgaccttcccgtctgcttcgggacgccctccaacttccgaagggagaccttcacgttcgaggtggtcgggttccgaggaacctaccacgtggtactggggaggccatgctacgctaagttcatggacgtccccaactacacctacctgaagctcaagatgtcgggccccaacggggtcatcaccgtcggccccacgtacaaacacgcgttcgaatgcgacgtggagtgcgtggagtacgccgaggccctcgccgagtccgaggccctcatcgccgacctggagaacctctccaaagaggtgccagacgtgaagcgtcatgccggcaacttcgagccagcggagacggttaaggccgtcacccttgaccctagtggcgacacctccaagcagatccggatcggttccgggctcgaccccaaatag

SEQ ID NO: 114862 - DNA, 250 bp, Zea mays
  Clone ID: MRT4577_36236C.1
tcgcccacgcgttcgcaaaagcccaaaccaaattcaagcgcaagagggggcaaagccgcaaagggggaggcaccaggcacccgcagccattacttactggggctcacttccacaccaaccaaccaaccttctttggctggcgctttttctgcttcgggcggtcacaggtgcaagtactagaggaggacattcgctttcattactgcgcctgcggaggatccgaggaacccctagccgaggcttttatttt

SEQ ID NO: 114863 - DNA, 2116 bp, Zea mays
  Clone ID: MRT4577_36237C.1
atggggcccatcaaggacttgaaaggagtgcagagggtcatgggatgccttgcagctctgagccgcttcatctcgcgcctcggcgaaagaggcctacccctgtaccgcctcttaaggaagaccaagcgcttcacttggacccccgaggccgaggaagccctcgggaacctaaaggcgctccttacaagcgtgcccatcttggtgccccccactaccggagaagccctcttgatctacgtcgccgctaccactcaggtggtcagcgccgcgatcgtggtcgagagacgagaagaaggactcgcattgcccgtccagaggccggtctacttcatcagtgaggtactgtccgaaaccaaaatccactacccgcaaattcagaagctattgtacgcggtaattctgacgaggcgaaagttgcgacactacttcgagtctcatccggtgactgtggtgtcatccttccccctgggggaaatcatccagtgccgagaggcctcgggagcgggcgcgggcctcctcttcatctcacccctcgggaagcacctccgctacgtgctgcgcctccatttctcggcgtccaacaacgtgatcgagtacgaggctcttgttaacgggttgcgcatcgccatcgagctaggggtccggcgcctcgacgctcgtggcgacttgcagcttgtcatcgaccaagtcatgaagaactcccattgccatgacccgaagatggaagcctactgcgacgaggttcggcgcctggaggacaagttctacgggctcgagcttaaccacgtcgatcgacgatacaacgagactgcagatgagctggctaagatagcctcggggcggacaacggttcctccggacatcttctcccgagacctacatcaaccctccgtcaagaccgacgacacgcccgagcccgagaaggcctcgactctgctcgaggcgccctcggctcagcccgaggcaccctcagctcagccagaggcggcctcggccccgcccgaggcaccctcagccccgcccgaggcaccctcggccctcgagggtgaggcactgcgcgtcgaggaagagcagaatgggaaggcacccgggggcttcacgcacctgctggtcgccatcgacaaattctccaagtggatcgaggtccgacccctaaacagcattaggtccgaacaggcggtggcgttcttcaccaacatcatccatcgcttcggggtcccgaactccatcatcaccgacaacggcacccagttcaccggcaggaagttcctggacttctgcgaggaccaccacatctgggtggactgggccgccgtagctcaccccatgtcacacccgggtttcggggcaccaagacccgggcacgaacataatcaccaggtgtgctgggaccaagtctcacacatatgatgaatcatggcacaggatcgaatgtcacatctttactacataacaggagttctgtacaaaataaacaaataattacattatgaggagacaacggtccagcaacccaaagttgactgggagacaacgacctagacctctcacgaactcgtcacagcatcctccatgcgccacatcctgtggtacctgttcttgaccggtcgattggacgatgcagcccactgcccacagagatgggtggcgccacggtggagcatgaacgacgatgagcaatcacgccgtccctgaacttcggcaaggcacccatgacgcgcggtgttccccagagaagatgctccccagccgtcttccatctagccgggcaaatcggaagccgttgcagcacgtcgagcacctgtccgtgcttttgcttgccccagtgccaatggtccgacgacggatttgagggcagccgtaacacctgagcgccgcgcagagcgtgggccggtactgcaggagcgacgcgccataaggtggggcgagtacagaggtggcgttcactgtttttctctactcatagatggcttaggggaggtcggatcaatggtggccggatagttcaacggcaggcactagcagggacgccggcgtacgatgaagaagcccaggctctgcagagtgctcgccatgggttttttttttttttttttttttttttttccccggccgg

SEQ ID NO: 114864 - DNA, 653 bp, Zea mays
  Clone ID: MRT4577_36238C.1
tatactatttcaataataataaaatactaggtgctcagttgtctacgtcttccgagcttgccctgcgtatgatctgcaatgatcatatgtgatccgatgaacgcgaggcaatgagcaagatacactgttggttgatcctacccacctgattaccggactgaaacacgtcctgggggaggccgaggaagatccctccaacagggagcaccaaacaggcctagggtaccccggccccatcccctgcctggcttatctacgggccgaccaatatatctgcctctggcttaccgatggcaccggacgaagctgccctggactcggctctgtctcgacgacgcgcccgactgctggatatgccaaacaggcctgataaggttgcccaaggagccaatcccgagctgagtacaagtacgtgcgcgcgatgtggaagacgttgatgtgcaccacctctctgccgtacaaaagtgctaccggtttctggcggcacacgagaactagctgagacagcttccgtctctcccttggcttttaatggaataccaacgctgccgtagacgagtaagatccccctatggtcatttcccgggaggtcttagcgaacccgcttcgatgcacttaacctctctctgaacctttgacataccctgctggtg

SEQ ID NO: 114865 - DNA, 4377 bp, Zea mays
  Clone ID: MRT4577_36239C.1
atgcgggaggcctcggtccgcaccgtgcgcacgcgggacgggatgcctgcaaccccagatcgcctcggcgacgagcaccaccgccacgaccgtcgagcccgcctcgaggagaaggtgcgccgaggctaccaccccaggcgcggaggacgctacgacagtgaggaggaccagagcccctcgcccgaactgccgggtccgagggtcttcagctgggccatacgacgggcgccgttctcggcccggttccgagccccgactaccatcaccaagtactcaggggagacaaggccggagttgtggcttgtggattaccggctggcctgccagctgggagggacggacgacgacaacctcatcatccgcaacctcccccattttctctccgacgctgcccgagcatggctggagcatccgcctcctgcgcagatctctgactgggacgacctggtcaaggccttcgcgggaaacttccaaggtacgtacgtgctccctgggaactcatgggatctccgaagctgccgccagcaaacaggggaatccctgcgagagtacatccggtggttttcgaagcagcgcaccgagctgcccaacatcacagactcggacgtcatcggggcattcctcgccggcaccacgtgccgggacctggtgagcaaactagggcgcaagactcccaccaaggcgagcgaattgatggacatcgccaccaagttcgcctctggtcaggaggcggtcgaagccatcttccggaaggacaagcagcctcaaggaagacagaaggaagacgcccccgaggcgtccgtccagcgtggctcgaaaaagaaggccaagaagaagaaggcgcaagcaatgcgcaacaccattaacgcggatctcgtcgctgctgctgagcacaggaatcctcggaagcctcccgcaggagtcaacacgtttgacaagatgctcaaggagtcgtgcccctatcacaggggtcccgtcaagcacacccttgaggagtgcgacatgctccagtgctacttcatcaaggcgggaccctcggcagaaggtggcaaggaccaaggcaacaataagaaggggggcgacaaggatgaggagttcccggaggtccgcgactgcttcatgatctacggcggacaggtggcgaacgcctcggctcggcatcgcaagcaggagcgccgggaggtctgctcggtgaaggtagcggcgccagtctacctagactggtccgacaagcccatcaccttcgaccaaggcgaccaccccgactatgtgccgagcccaggaaggtacccgctcgtcgtcgaccccgtcatcggcaacgctaggctcaccaaggtcctcatgggcggaggcagtagcctcaacatcatctacgtcgagatcctagggctcttggggatagatctgtccatgatccgggccggtgcagcaccctttcacgggatcgtccccggtaagcgcgtcctgccccttgggcaacttgatttgcctgtctgtttcggaactccctccaacttccgcagggaaaccctcacgttcgaggtggtcgggttccgaggaacctatcacgcggtgctaggaagaccgtgctacgccaagttcatggtcgtccccaactacacgtacctcaagctcaagatgccggcccccaacggaatcatcaccgtcggatccacgtaccaccacgcttacgagtgtgacgtggaatgcgtggagtatgctgaggccatcgccgagtccgaggccctcatcgccgacctggaatgcctctccaaggaggcgcctgacgcgaagcgccacgtcggcaacttcgaaccagctgaggcggttaagaccgtcgccctcgaccctagcaacgatgcctgcaagcaaaagcgtagggccataggcgaggaagtccacaagctgatggctgcagggttcatcaaagaggtatcccatcccgaatggttagctaaccctgtgcttgtaaagaaaaaaggtgtgaaatggaggatgtgcgtagactacactggtctaaacaaagcatgtccgaaggttccctacccactgcctcgcatcgatcaaattgtggactccactgctgggtgcggaaccctgtcattcctcgacgcctattcaggttatcaccaaatcaagatgaaagaatccgaccagctcgcgacttctttcatcacgccctttagcatgtattgttatattactatgccatttggcttgaggaatgcaggtgcaacctaccaaaggtgcatgaaccatgtgttcggagagcacatcggccgaacggtcgaggcttacgtcgatgacatcgttgtcaagacaaggaaagcctccaacctcctctccgacctcgaagtgactttcgggtgcctgcgcgcgaagggcgtaaaactcaatcccgagaagtgtgtcttcggagtcccccgaggcatgctcctgaggttcatcgtctccgagcgaggcatcgaggccaactcggagaaaatcgcagccatcaccaacatgggacccatcaaggatttgaaaggagtacaaagggtcatgggatgccttgcggctctgagccgcttcatctcgcgcctcggcgagaaaggattacccttgtaccgcctcttaaggaaggccgagcgcttcacttggacccccgaggccgaggaagccctcggaaacttaaaggcgctccttacaaacgcgcccatcttggtgccccccgctgcgggagaagccctcttgatctacgtagccgcaaccactcaggtggtcagcgccgcgatcgtagtcgagagacgagaagaggggcatgcactgctcgtccagaggccggtctacttcatcaatgacgtactatccgagaccaagatccgctacccacaaattcagaagatattgtacgcagtaattctgacgcggcgaaagttgcgacactacttcgagtctcatccggtgactgtggtgtcatccttccccctgggagagatcatccagtgccgagaggcctcgggccataaaatcccaagtcttggcggacttcctggcggaatgggtcgacacccaattgccgacagctccaatccagcccgaactttggaccatgtacttcgatgggtcgctgatgaaaacaggagcaggtgctggcttgctcttcatctcaccctcgggaaacatgtgcgctacgtgttggacctccattttccggcgtcgaacaacgtggccgagtacgaggctctggttaatgggttgtgcatcgccatcgagctaggggttcgacgcctcgacgctcggggcgactcgcagctcgtcattgaccaagtcatgaagaactcccactgccgcgataaaaaaatggaggcctattgcgacgaagttcgacgcttggaggataagttacacgtgctggaactcaaccatgttgctcggcggtacaatgagactgcggatgagctggctaaaatagcctcgaggcaaacggcggttcccccggacgtcttctccaaggacatatatcaaccatccgtgaaactcgacgacgagacctcggccaagcccgaggtaccctcggccgccgagggtttctactggtcgaccgcagtggccaacgccactaggattgtacgctcctgcagagggtgtcaattctacgcaagacagacgcacttgcccgctcagaccttgcaaacaatacccatcacttggtcgtttgccgtatggggtctggacctcgtcggtcccttgcagaaggcacccgggggcttcaagcacctgctggtcgccatcgacaaattctccaagtggatcgaggtccgacccttaaccagcatcaggtccaagcaggcggtggcgttcttcacaaatattatccatcgctttggggtcccaaactccatcatcaccgataatggcacgcagttcactgggaagaagttcctggacttctgcgaagaccaccacatccgtgtggactgggccgcggtagctcacccaatgacaaacgggcaggtggagcgcgccaacggtatgattttgcagggactgaagccgaggatctacaacgacctcaataagttcggcaagtggtggataaaagagctaccctcggtggtttggagtctctggacgacgccgaaccgagccacgggtttctcgtcgttctttctagtctatggggccgaggccatcctacccacggacttagaatacggttccccgaggacaaaggcttacgacgaccaaagcaaccagaccaaccgagaagattcgttggaccagctggaagaggctcgggacgtggccttactacactcggcgcggtatcagcagtccctgcgatgctaccacggccgaagggttcggccccgaggcttccaagtgggagacttg

SEQ ID NO: 114866 - DNA, 143 bp, Zea mays
  Clone ID: MRT4577_3623C.1
ggggggggttttttatattattctcgtctttttattattcctaggatacacactttggtttgagggccccattatcgagtccattttatatgtaatctaatagatggctccttcaacaatgggttgttgcttcggcaagacaa

SEQ ID NO: 114867 - DNA, 4890 bp, Zea mays
  Clone ID: MRT4577_36240C.1
atgggtagtcttcagcaacctcttcagcccgggacggtgctccgcttcaggaatctcgagttcatgtccctcgacggcagctacgacatggtactcctccccccgcagcgcgacagcaaccacgacggtcgtcagctcgctcggcggcggcgaactcgacgacggcttccccccgtggcggaagagcagcatccgggtctgttccgccaccttcctcgccgcaggaggaggaggcggggcaaccgtggccaggcaggaggcggcacctcgtcggctgttgagcgagtcggcgacgccggcaccctagcaggggacgtgtcgggcgttgtcctcgcacctgagacaacgacagatgtcgtttccccgcaatatgccaaccccaagcggacagatgaagccagcacactcgcgaaggacttgctggctgttagcctcgtacctgagataatggtgcagtccgtccccgacgcgacttcgtcaccgtccatcgatcaagaggtaccgtccgtttttcaccctgtgccttttagattcagcttcgatccaccaagcgaccccacttcggtgagcgcttttgtaaaggcatatcctaaccttccggggtaccatatgtggtcaacctgggaccaactgacggccgtctcaacctatgggcccccgggttccgagaaagaggacggtcccgactccggttgggatttctccgggctccgcgatcctagtgccatgcgagacctcatgaccgcatgtgactactgcatctctgattgctccgatgatggccacagccttgacgatgagggttgtggcccaagtcgcgaatgtttccacgtcgatctagggggtcacgacgaaggcaaccacctcggtatgccggaggatgatgatccccctgggcctgcgcctcgcgttgacatcctgcgggagctagctgtggtcccagtccctgcggggggtcaggacacacagctcgagcaaattcgcgagatgcaggccaagctcgacgaggaagcagggcaacttgtgcagctccggcaaaacatcgagcgggagtgggcaggccgagcactcgccggagaagcgcgtcatcaggcccaggacatccagcgccgtatcgttgacgatgccagggcaaggatgcccccagcctccagcggggtcggtcagaatctggctgcagcggcaatactactccgagcaatgccggagccatccaccaccgaggggcggggtatccagggagaactcaagaatctcctggaggatgctgcgggcatgtacgtgcgccttgggaactcctgggatctccgaagctgccacaagcagccaggggaatccctgcgagagtacatccgacggttttcaaagcagcgcaccgagctgcccaacatcaccgactcagatgtcatcggggtgttcctcgccggcaccacttgccgcgacctggaacccacgaagggtcccggaggggccaacctgttcgacaagatgctcaaggagtcgtgcccctatcaccagggtcccgtcaagcacacccttgaggagtgcgtcatgctccgacgctacttccataaggccgggccaccgacgggagatggcaaaggccaagacaacaacaagaaagagggcgacaaggaagaggagttccccgaggtccatggctgcttcatgatctacggtgggcaagtggcgaacgcctcggctcggcaccggaagcatgagcgccgggaggtctgctcggtaaaggtggcggcgccagtctacctagactggtccgacaagcccatcaccttcgaccaaggagaccacctcgattgcgtgccgagcctaggaaggtacccgctcattgtcgatcctgtcatcgacaacgccaggctcaccaaggtcctcatggacgggggcagcagccacaacatcatctacgctgagatcctcgggctcttggggatcgatctatccacaatccgggccgggaaaccctcacgttcgaggtggtcgggttccgacggacctaccacgcgatgctggggagaccatgctacgccaagttcatggccgtacccaactgcacgtacctcaagatcaagatgccaggcccccaacggggtcatcaccatcggatccacgtaccgccacgtgtacgaatgcgacgtggaatgcgtggagtacgctgaggccctcgccgagtccgaggccctcatcgccgacctggagtgcctctccaaggaggttcctgatgcgaagcgatacaccagcaacttcgaaccggctgaggcgtttaagtccgtccctctcgaccccagcaacgatgccttttctgcgtggagtccctcggacatgcccggcataccgagggatgtcgccgagcactcactggatatccgagtcggtgcccgacctgtgaaccagcctctgcgccgtttcgacgaagaaaagcgcagagccataggcgaggagatccacaagctcatggttgcagggttcatcaaagaggtattccatcccgaatggttagccaaccctgtgcttgtgaaaaagaaaggtgagaaatggaggatgtgcgtagactacactggtctaaacaaggcatgtccaaaggttccctaccctctgccttgcatcgatcaaattgtggactccactgctgggtgcgaaaccctttcattcctcgacgcctattcaggttatcaccaaatcaagatgaaagagtccgaccagctcgcgacttctttcatcacaccttttggcatgtactgttatactactatgccatttggcttgaggaatgcaggtgcaacataccaaaggtgcatgaaccacgtgttcggagagcacataggccgaacggtcgaggcttacgtcgatgacatcgttgtcaagacgaggaaagcctccgaccttgaaacgacattcaagtgtttgagagcgaagggcgtgaagctcaatcccgagaagtgtgtcttcggagtcccccgaggcatgctcctggggttcatcgtctccgagcggggcatcgaggccaacccagagaaaatcgcggccatcaccaacatggggcctatcaaagatttgaaaggagtacaaagggtcatgggatgccttgcagctctgagtcgcttcatctcgcgcctcggtgaaaaaggcctacccttgtaccgcctcttaaggaaggccgagcgcttcacttggacccccgaggccgaggaagccctcggaaacttaaaggcgctccatacaaatgcgcccatcttggtggtcagcgccgcgatcgtagtcgagagacgagaagaagggcatgcactgctcgtccagaggccggtctacttcatcagtgaagtgctatccgagaccaagatctgctacccgcaaattcaaaagctattgtacgcagtaattctgatgcggcgaaagttgcgacactactttgagtctcatccggtgactgtggtgtcatccttccccttgggggagatcatccagtgccgagaggcctcgggtaggataacaaagtgggcagtggagctcatgggcgagacaatctcgttcgctcctcggaaggccatcaagtccctagtcttggcggacttcgtggctgaatgggtcgacacccaattgccaacagctccgatccaacccgaactttggaccatgtacttcgatgggtcgctgatgaaaacaggagcaggtgcgtgcctgctcttcatctcacccctcgggaaacatctccgctacgtgttgcgcctccatttcccggcgtcaaacaacatggtcgagtacgaggctctggttaatgggttgcacatcgtcaccgagctaggggttcggcgcctcgacgctcgtggcgactcgcagcttgtcattgaccaagtcatgaagaactcccactgccgtgaccggaagatggaggcctactgcgacgaagttcgacgcgtggaagacaagttctacgggctggagctcaaccacatcgctcgacggtacaacgagactgcgaatgagctggcgaaaatagcctcagggcggacaacggttcccctgacgtcttctctagagacatacatcaaccatccgtcaagatcaacgacacgcccgagcccgaggaggcctcggcccagcccgaggaggcctcggcccagcccaaggtatcctcggccgccgagggtgaggccttgcgcatcgagggggagcggaatggggtcacgcctgacccgaactggcaggccccgtacctggaatatctcctccaaggagagctacccctcaacaaggccgaagctcggcgactggcgcggcgcgccaagtcgttcgtcttactgggtgatgaaaaggagctctaccatgcagccccttaggcatcctccaacgatgtatatccgtcgccgaaggacaggagctattgcaagaaatacactcgggggcttgcggtcaccatgcagcacctcgggccctcgtcgggaacgctttccgacaagtgtggggtctggacctcgtcggtcccttacagaaggcacccgggggcttctcgcacctgttggtcgccatcgacaaattctccaagtggatcgaggtccgacccttaaccagcatcagggacttaaaccgaggatctacaacgacctcaacaaattcggcaagcggtggatgaaagagctaccctcggtggtctggagtctgaggacgacgccgagccgagccacaggtttctcgccgttctttctagtctatggggccgaggctatcttacccacagacttagaatatggttccctgaggacaaaggcgtacgacgaccgaagcaaccagaccagccgagaagactcactggaccagctcgaagaggctcgggacgtggccttactacactcggcgcggtatcagcagtctctgtga

SEQ ID NO: 114868 - DNA, 182 bp, Zea mays
  Clone ID: MRT4577_36241C.1
gccgggttgtatttggaaacgcggagtgagtttttccgtgctgtgtatgggctacaatggacacccagaaggacgttcaacctccaaagcagcaaccaatgatatatatctgtggagagtgtcacacagaaaatgaaataaaatctagggatccaatcagatgcagagaatgtggatacaga

SEQ ID NO: 114869 - DNA, 1971 bp, Zea mays
  Clone ID: MRT4577_36242C.1
atgggcagtctccagcaacctctccaacccgggacggtgctccgtttcgggagtcttgagttcatgtccctcgacggcagctacgacatgatactcattccatcgccaggcgacagcgacaatggcggccgacagcccgcccgcccgcggcggaatcgacgacgtcttccccgcgtggtggaagaacaacctttgagctcacccagccctcttccccgccgacggagggggaggcggggcaaccaaggccaagcaggaggcagcgcctcgtcggctgtcgagcgagtcgatagcgccagcaccccaacggggggcgcaccgggcatcgacctcacgcttgagacgaagacgagcgctgtctccccgcaacgcaccgattccgggcaaacggacgacgccagcacgctcgcgaaaggcttgctggacgtcaccctcgtacctgagacgacggtgcagtcagtccccgacgtgacttcatcaccgcccgtcgaccaagagcggcttcgctttggcgggcgctctcgtagaggcaagtccaaaccctctgggtttcgtatgcggtcaccttgggaccggctgacggacgtctcgacctacgggccctctgggtccgaggaagacgacgagcctagcttctgttgggatttctctggacttggcaaccccagtgccatgcgggacttcatggccgcatgcgactactgcctttccgactgttccgacgatagccgtagcctcggcgacgaggactgcggcccaagccgcgaatgtttccacgtcgatctagggggtccctcagaaggcaaccatctcggcatgtcgtcgtatgccccgggtcgcctcggcaatgagcaccatcaccgtgaccgtcgagcccacctcgacgagagggtgcgccgaggctaccaccccaggcgtgggggacgctacgacagcggggaggatcggagtccctcgcctgaaccacccggtccgcaggccttcagccgggccatacgacgggcgccgttcccgacccggttccgacccccgactactatcacgaagtactcgagggagacgagaccggaactttggcttgcggactaccgtctggcctgccaactgggtggaacggacgatgacaacctcatcatccgcaacctccccctgttcctctccgacaccgctcgcgcctggttggagcacctgcctccggggcagatctccaattgggacgacctagtccaagctttcaccggaaatttccagggcacatacatgcgccctgggaattcctgggaccttcgaagctgtcgacagcagccgggagagtctctccgagactacatccgacgattctcaaagcagcgcaccgagctgcccaacatcaccgactcggatgtcatcggcgcgttcctcaccggcaccacttgtcgcgacctggtgagcaagctgggtcgcaagacccccaccagggtgagcgagctgatggacatcgccaccaagttcgcctccggccaagaggcggtcgaggctatcttccggaaggacaagcagccccagggccgcccttcggaagatgcccccgaggcgtcaactcagcgcggcgccaagaagaagggcaagaagaagtcgcaagcgaaacgcgacgccgctgacgcggaccttgtcgccgccgccgagtacaagaaccctcggaaaccccccggaggtgccaacctcttcgacaagaagctcaagatgccgggccccaacggggtcatcaccgtcggccccacgtacaaacacgcattcgaatgtgacgtggagtgcgtggagtacgccgaggccctcattgccgacctggagagcctctctaaggaggtgccagacgtgaagcgtcatgccggcaacttcgagccagcggagacggctaagttcgtccccctcgaccccagcagtgacgcctccaagcaagtctggatcggctccgagctcgatcccaaatag

SEQ ID NO: 114870 - DNA, 356 bp, Zea mays
  Clone ID: MRT4577_36243C.1
caaatcctccacgacacgacacctcgtcgaggacctcgagggcatcagttatcgacggcgtgaactccagcgtcttccggctcaagctcgccgcagtattgcggcacggctcggccggcgcatcgcccgttaaccgggtgcagctggacgcgcccgaggggtgccgcaccgcacttcacgacctggccgccgtcttctccgtcatcagacacgacggcggtcggccaaggccgaaactcttcaagtggtacgatctgagagatcacctgcaacatggactccttcctcaacgtcatgatggtcagcattggcgtcaactttgcgcgcgcccataccgtcgagttctggacctgcca

SEQ ID NO: 114871 - DNA, 948 bp, Zea mays
  Clone ID: MRT4577_36244C.1
tcgtgggccgatacaagcctctagaataactcgtagaaacagagcaagagcatcgctctcgaagcaaaacgcgcaccacgccgtcgccggccggccacttcgcacgtacgtaggacgcgcacgcaccggtgcatatatggggctcctgaaccagctgtgggacgacacggtggccgggccgcgcccggactccggcctcggcaagctccgcaactgcagcgacgacgcccaggggagagggctggacgaagaagctgcgcgggaaagccaggatgggcggcggcggcggtgacgacgcccccggcacgccgaggagccccaccgtgtacgactgggtggtgatcagttcgctggacctctgaagcccaagccaagacgagaactgcacaaggaaacccaccaccaccatcaacacagctagcgaactgaaggagggagggggcagaggggccatggccatgtaatgtaacgaccaatctctttcagagcttctggtgacgtgtccagttactatatacatacatacgttaacggtgtactatgtgtcttgttgtaaatgtcacccctgcgaggtgttgccgattttgtaagctactacgtactactacgctcggcatgtcaccgtgtgcaagtgcaacacaagtttgtaaaaatgactagctagtagtagcaatgctgttgctgtacgagtaggcctccctctgctttgtacaggggtagtccaacaagtatatggtttgctggtgccatgtaaaaatgtatatagaatcctacgttcacgcccagcaaggatgcgtggttgagtgttctggactctggacaatactactatccaataacagccataccgtgtttttttcctgggcccaaaaaaaaaaaaaaaaaaaaaaaaaaaaaaaaaaaagggcgtctcgtttagaggtcccacgcctcagtacgcgtgcatgc

SEQ ID NO: 114872 - DNA, 345 bp, Zea mays
  Clone ID: MRT4577_36245C.1
acctcaaacaacctaacctcaaggggaaaactccaacaaaacgccccaaaaggcacaccaccacccaataaatctccctcaaatcatggtaatgccacctgggacacccctgggccagggggaacagcacctgtgcctcaccaacctcgactccataacgaagaacaccaatccgccccctaccacggccacgaccccctcaacccactctgtgcccgcttgcgtgaaccccagggcacaaaacactttcccagaccccacccataacgcgtctacccacccggacattcactccttttcggccccagttgaaaggcccccgctacgcaagacctttgcgcgcca

SEQ ID NO: 114873 - DNA, 1272 bp, Zea mays
  Clone ID: MRT4577_36246C.1
cccgggcaaaggagagagatctcgatccgcacacctcacgcctctcttcctctcgccccaaggacaacgaaaacatcaaacaagagaaccaaaggaaacagagcaagagcatcgctctcgaagcaaaacgcgcaccacgccgtcgccggccggccacttcgcacgtacgtaggacgcgcacgcaccggtgcatatatggggctcctgaaccagctgtgggacgacacggtggccgggccgcgcccggactccggcctcggcaagctccgcaagtacgcctccttctccccctcgtcgtcgtcgtcggcggcggtggcggcggcggcggcggcgggctccgcgccgcctccgggcgccgtgacgcggagcttgaccatgctgcggcggccggcggcgctgtccgtcgtcacgtcgccccgcagcgagtccagctccgcgccgtcgtccccgtcgcccgcaagcggcgctccggattcgcccttcggcgcaggtgaccggctggcgccaccatgtctctttttttcccccagctcttgctgtctctgtctgtgtgtgtgtgtgtgtggtgtttcggttttggccagccgaatgaatctttgggatagctagatgatactgtagatccgaaacaaaaaaaaaacgaagcacggctgatttttgttgtatctctctgcacggtcgccatcgtgacatgatgctagctgcagcgacgacgcccaggggagagggctggacgaagaagctgcgcgggaaagccaggatgggcggcggcggcggtgacgacgcccccggcacgccgaggagccccaccgtgtacgactgggtggtgatcagttcgctggacctctgaagcccaagccaagacgagaactgcacaaggaaacccaccaccaccatcaacacagctagcgaactgaaggagggagggggcagaggggccatggccatgtaatgtaacgaccaatctctttcagagcttctggtgacgtgtccagttactatatacatacatacgttaacggtgtactatgtgtcttgttgtaaatgtcacccctgcgaggtgttgccgattttgtaagctactacgtactactacgctcggcatgtcaccgtgtgcaagtgcaacacaagtttgtaaaaatgactagctagtagtagcaatgctgttgctgtacgagtaggcctccctctgctttgtacaggggtagtccaacaagtatatggtttgctggtgccatgtaaaaatgtatatagaatcctacgttcacgccc

SEQ ID NO: 114874 - DNA, 294 bp, Zea mays
  Clone ID: MRT4577_36247C.1
cagggggaaaatttaaaatttcggggggtttatcttttttccttaggcccaacatcaagttttggcccaataaacccctgtgcgaaaccaagggtagcacccccaataatccggggggccggacgactacccaaaagaaaatagagaatgcgcaaccgggagggcgaaaatacgggtccggccattcaaccgaaaatccgcctaggacaaaggtggctctgcccctgctggaaaaacaaaatgggcggggtttattttttttgaccgtggaggcaccctcaggctttttttcat

SEQ ID NO: 114875 - DNA, 446 bp, Zea mays
  Clone ID: MRT4577_36248C.1
attcggctcgaggctgtgtacatatacgggtttccgaggaacatggattcaacgatcctagcggtaatgcatcacaacatgcggttgaataaccacaagggcgcatactagcttacggtcgcgcacgccagtgatttttgacgctgtgcttctttaacgagacttaaacagatgggccagtgcaccattgcactggcgcggctggataattggcatcatgcgttatacagtgttaggctaactcgtctcaagagtgcgcgggtgatgctggatcagaatctgctggaccatgaataatgatttaagagagcgactgtgcgcgcctatggaccaacacttgatgaacatcctacgaaaggagaccatgatagccatagtagtgcttactggccttcacattgacataaaagaaggcttggtgcctgtttacatacatgtgaacactg

SEQ ID NO: 114876 - DNA, 420 bp, Zea mays
  Clone ID: MRT4577_36249C.1
cccacgcgtccggatcttgcttggatttgatctgacatcatcatctgatccgcgtgtcccattcttctccctcccaacggctgcagggtggtgatcagttcgctggacctctgaagcccaaggccaactgcatgcgcgcccaagccaagacgagaactgcacaaggaaaccctccaccaccatcaacacagctagcgaactgagctgcagaggggccataaaatgtaatgtaaccaacctctttcagagcttctgctgacgtgtccagttactatatacatacatacatacgttaacggtgtactgtgtgtcttgttgtaaatgtcccccctgcgaggtgttgccgattttgtaagctacgtacgtaactactacgctcggcatcagctcgtgcatgtcaccttgtgcaagtgcaacaca

SEQ ID NO: 114877 - DNA, 297 bp, Zea mays
  Clone ID: MRT4577_3624C.1
atcgattgtttgatatggtagatgtataggtttatgaccaattcagatcaaagcaatttgagtacaaaagagaaaaaaagagaaaaaaaaagataaaaataaaaaaaaaaaaaaagggggtgaggtttaagaagatgagaagttaaggaaccggtgtttgtaactgtttatgtgttttatagtgctacgaaaatacaatatggtgcatgaaggtttaaaagtgcttaagtgtaaaaaccgtgaggatgagggaaataattgctatacacaaaattttgttatcgctagttggggtaa

SEQ ID NO: 114878 - DNA, 308 bp, Zea mays
  Clone ID: MRT4577_36250C.1
cgagccaattgtattctagacatttatataatcatcattggtatgggaacaacaaatggttttatgcttcatgcattggcaccattccctcccccctttggcacaactgttaaccaactttcacccacttacgaaagattcgcgggcatcaaaaaaaccgctgtgctataactcaacctattaattactgtggaaagcacttacaattggagggctgcaacatatgctcagtacatgtggcatttccagaacgcaggttcctttcatggaaatggagctctaagccgttcactgggtatcccatagcc

SEQ ID NO: 114879 - DNA, 1174 bp, Zea mays
  Clone ID: MRT4577_36251C.1
ctgcactgctcccttggtcctccaagaagaaaggaacaaaggagagagatctcgatccgcacacctcacgcctctcttcctctcgccccaaggacaacgaaaacatcaaacaagagaaccaaaggaaacagagcaagagcatcgctctcgaagcaaaacgcgcaccacgccgtcgccggccggccacttcgcacgtacgtaggacgcgcacgcaccggtgcatatatggggctcctgaaccagctgtgggacgacacggtggccgggccgcgcccggactccggcctcggcaagctccgcaagtacgcctccttctccccctcgtcgtcgtcgtcggcggcggtggcggcggcggcggcggcgggctccgcgccgcctccgggcgccgtgacgcggagcttgaccatgctgcggcggccggcggcgctgtccgtcgtcacgtcgccccgcagcgagtccagctccgcgccgtcgtccccgtcgcccgcaagcggcgctccggattcgcccttcggcgcagctgcagcgacgacgcccaggggagagggctggacgaagaagctgcgcgggaaagccaggatgggcggcggcggcggtgacgacgcccccggcacgccgaggagccccaccgtgtacgactgggtggtgatcagttcgctggacctctgaagcccaagccaagacgagaactgcacaaggaaacccaccaccaccatcaacacagctagcgaactgaaggagggagggggcagaggggccatggccatgtaatgtaacgaccaatctctttcagagcttctggtgacgtgtccagttactatatacatacatacgttaacggtgtactatgtgtcttgttgtaaatgtcacccctgcgaggtgttgccgattttgtaagctactacgtactactacgctcggcatgtcaccgtgtgcaagtgcaacacaagtttgtaaaaatgactagctagtagtagcaatgctgttgctgtacgagtaggcctccctctgctttgtacaggggtagtccaacaagtatatggtttgctggtgccatgtaaaaatgtatatagaatcctacgttcacgcccagcaaggatgcgtggttgagtgttctggactctggacaatactactatccaataacagccataccgtgtttttttcctgggcc

SEQ ID NO: 114880 - DNA, 2252 bp, Zea mays
  Clone ID: MRT4577_36252C.1
gctcgccccaaggacaacgataacatcaaacaagagaaccaaaggaaacagagcaagagcatcgctctctaagcaaaacgcgcagcacgccggccggccacttcgcacgtacgtaggacgcgcacgcaccggtgcatatatggggctcctggaccagctgtgggacgacacggtggccgggccgcgcccggactccggcctcggcaagctccgcaagtacgcctccttctccccctcgtcgtcggcggcgccgggctccgcgccgcctcccggcgccgtgacgcatagcgtcaccatgctgcggcggccggcggcgctgtccgtcgtcacgtcgccccgcagcgagtccagctccgcgccgtcgtccccgtcgcccgcaagcggcgctccggattcgcccttcggcgcaggtgacgggctgtcgccaccatgtctctttttttttcccagctcttgctgtctgtgagtctatgtgtgtgtgtggtgtttcggtcttggccagccgaatgaatctttgggatagttagtagatgataccgtagatccgaaacaaaaaacgaagcacggcgttttaacacccggccagctgatttttgttgtatctctctgcacggtcgccatcgtgtcatgatgctagctgcagcgacgacgcccaggggagagggctggaagaagctgcgcgggaaagccaggatgggcggcggcggcggcgacgcccccggcacgccgaggagccccaccgtgtacgactggtgcgtagttatagatggccaaaaatcacgaggcccgtgagcccggcacgaagcccggtttttgggcccggtccgaacccggcacggtagaataagcgggcgggcttggacaggaaactaggcacggcgggctagcccggcacggcccgtttacctctaagcccgttaagcccggtttttttacactaaaacgtgcttaccggcccgtttagcacgttttcggcccgtttttttcgtgctaaacgggccggcccggcccgtttaggcccgctgcgggccgggcttggacagaaacttgagcacgatggcacagcaggcccggcccggtttttggccgggcttcaccgggcccgggccgggccgggccgggcggcccgtttggccatctctatgcgtagccatcctctggcccgcctgggctccctataacagcgaccaccacctctagttctaatttataaaattcattcacacgcacatatacatgtattatatttatgatatgcatatacatgtattatattatgatgatgatctactacttgctactactaccttggtttatttatcgcactgtaatcgcgtggtaccacagatatttctgaacgtaccgtacgtgctgctacaggattggtgaaaatttcaaccgctattttgatagcaaatcttaatataaataattatgtttatatgtttaatctgcattcttcatctactagccatatgtaatttacaaatagatctgagtagctatgtttcatgttttcgtttgctggaattgctactgtttattaatgttataattatatatatatagtatttatctgagttatatctttttttattcgaaattgaaatatttaatatatttaaatatgttgaaagcatgttacttatttctctataattacaacaaaaatgactagcagggacacgcaaggatcttgcttggatttgatctgacatcatctgatgtgtgtgtcgctctggttctccctcccaacggctgcagggtggtgatcagttcgctggacctctaaagcccaaggccaactgcgcgcccaagccaagacgagaactgcacaaggaaacccaccaccaccaacacagctagcgaactgaaggagggagagggcagaggggccatggcccatggccatgtaatgtgacgaccaatctctttcagagcttctggtgacgtgtccagttactatatacatacatacgttaacggtgtactgtgtgtcttgttgtaaatgtcccccctgcgaggtgttgccgattttgtaagctacgtacgtaactactacgctcggcatcagctcgtgcatgtcaccgtgtgcaagtgcaacacaaggttgtgaaaatgactagctagtagtagcaatgctgttgctgtacgagtaggcctccctctgctttgtacagggtactccaacaagtatggtttgctgtcaatctgtcatgtaaaaatgtatatagaatcctacgttcacgccc

SEQ ID NO: 114881 - DNA, 377 bp, Zea mays
  Clone ID: MRT4577_36253C.1
tgcacattgaaattttcgcaccgtcagtcttcaatcaaccaccgtctcgaagtcaacacctttcacaaccacacacaaatcagccaaaatggagaacgataagggagagattgtcgatctctacgtcccccgcaaatgcagcgctaccaaccgcatcatcaaggccaatgaccacgcctctgtgcaaatctccatcggcaacgttgacgagaacggccgctacaccggcgagaacggcgtctatgcgctcagcggatttgtgcgcgctcgcgcgcgaggctgacgactcgcttaaccgacttgcgcaacgcgatggatacttgaagaatgtctggagtgctcagcgataaatcctcagatttctcgtcgaggggggt

SEQ ID NO: 114882 - DNA, 330 bp, Zea mays
  Clone ID: MRT4577_36254C.1
gagccctccagtcggcggccgcccttcttttttttttgtgctctttcagatactggggcttttttatagcccgaatgtgatgcgagcgaggcgatgaaatgacataacccaaacttggattcgtttccagcccacacagagctaccaagtctctgacatatctctacagtcctcagtatctcactctaggctcatacaaacacaataagaatctggcaacatccaaacccttactgccgaagaggcccaggaaccggaccacaaagccaagccaattggcgttgccgacaaggaggtgggaaccaacagccttgccgcactcccaccaca

SEQ ID NO: 114883 - DNA, 290 bp, Zea mays
  unsure (1)..(290): unsure at all n locations
  Clone ID: MRT4577_36255C.1
atagtgagtcgtattaaacgatngcgagagattgagccttcgatggctaccattgtgttgtaggggtcagcatgatgtgatgcccacaagcttgtccttggacaatgctgcagcctgcagcttcgaccctgtatagccaggatagtgaggtttcagcggacctacgcactcttgtttccaggaaggggactgaactctgagtgaccgctggaagagtccaagtcgtacttcagctgatgaatcgataagtggtttagtctctcggcctttttcgtaggatcgagagcagc

SEQ ID NO: 114884 - DNA, 216 bp, Zea mays
  Clone ID: MRT4577_36256C.1
ataaaaggagttattagttctggaagataacgatgaagggtctggaagagatgtattctcaaagagaacaggctgaggctacttgggcattcacagtccttgggttcatctggaaacttctatttggtgtagttgggttaattgtttcaatagctttggttgcacatattgtcatatactagttgattgatccttccctaacttcttttcttgaat

SEQ ID NO: 114885 - DNA, 249 bp, Zea mays
  Clone ID: MRT4577_36257C.1
tgtgcggacgcccaggcgtgcacgttttcggacgcctgggccgtttccccgcggcggcgctgggccggagctgacccacgctgtcgcgcaagaaccgtcgcaggttcagttgtgggcacgagggagaagcacggccctggtacacctggatccggacgattacttacggcgcgcgctggaggttagggaggggcacgacgtacaaggattactagaggacgcctggatcgctgctctcagataccgaca

SEQ ID NO: 114886 - DNA, 286 bp, Zea mays
  Clone ID: MRT4577_36258C.1
gcccgctactctaccaccaatgatccatatctttcaggtcattgtattgctattttgcaggccatcgactagaacaaagatctttctagagaatcatattgttgattcagaaatttctcttatagccactattaatttggtgtgtgctttgtctttatatatgtgcttttggagaaagctgataggctaaattgtttgggttctaggcagtagctagaaagagacttggaagctaagaaaagctgctgcaatatattgcaagaacttatctcacgccatttcaaac

SEQ ID NO: 114887 - DNA, 1498 bp, Zea mays
  Clone ID: MRT4577_36259C.1
gattccgccgcctgctgatcgatctgaaacacgagaagtgaagagtcagaagagctggaggactcaggaggggatggggcaaatcgcggcgagtgacgaagagagcgctgcctcgcctggtggaggagggtctcgactgctttgagcttggaggagatccaccctgccatggcgctgtgaacggaggcgccgcggggcgaggggattggagcgccgcactaacaggcgactagatctagacatctccctctcccaagatcaagatcagctcgaacgaggaaacctgcgcgacctacagcaacagcagccttgctcctcatctccgagcacattgccggacccgctccaccaccaccacctctcactcccggtccctccctctcgccgcgccctgacaccaacaccatgccaccgccatcgccgtgtccatgcagatctcgtgcctcgacgtcgttaatctctccaacatctacttcctgagacagctcggtgtgagcaatatcagtagcgtgtagctggccgaggtccggccacctgctgtcgttgccgccaataaggagggtcgcacgcgtacggagcgtaccctcgaggttgtcgaccacccgttcctgtcctgcctatacggcgtcgccgagggggaccattagtaatgctgcattgaccaacagtaacacaagcactaggagcaagtggagtggagtagcattgcagcagcgtcccctgcccgtgacccgcatggcaattggcatgttcagaagctgaatgtgttgcagttgcatgcgtgtggaaattcacatcccctttattctgagtttattttgaatattttttaaagttccttctgctgaatattcagtagtactctgctaaatacaaccatgtttttcatataccttgccgcagggatcttcatatagtttggtgcctttttatataccaacctggacaagagatgaactgttcctattttaactaataatgttgttttttcaagtaggagtttgcacgtgatatgaaaaggatcatgttttaataacattttattggtgtatttgttgtggcaattctacaggagtacaaaattaaagtgagaaactctactcatgtggagtagagtccctaaaatggaggtgactgtggtttcaaaacaaaatggaatttggatgtaatgaccactgaccaatcaatgtagaaatagatttatgacaatatgcgcaaagatctcgcgtctagaagctccagtatattgcatagtttgagagaagagttcagtccttacagaggaaatagaagtaactggcagaggcaagcagaatgttcaagctgggggttggattttacagcattgggctacagttcttttatgtagttttcattttttgggggccatagtgacttgaggacggtgtacacatccatagtaaagggtacaatcgagcaagttagaatgatgttattgggaagttcacaatgaaaatccaaataatagtaccgctgc

SEQ ID NO: 114888 - DNA, 677 bp, Zea mays
  Clone ID: MRT4577_3625C.1
tcgaggccggcagaaaccacttctacattcaaccagaagaaaagctgctcgccaaggtggtaaacagtggatagcaggtttatcttaccatgaaggttccaaatttccaaggcgatctcggcagtttgtctggagaggatgtgttggaataagccagacttcatctcaacttgctttacaggttagatatcttgatgcccacatcagatggaaggatttcatccctccagatcatattccctcagatggaaaaagttatgatgctgatttttctgctctcagaaatgctgtagtgtgtgataaaaaaataattgataataagataagatacgcacttaagtttcgcaaccaaaagcatcttcctgtgcgtgtgacaaaaaatatcttggaatcagaaggtgatcaggatgaaaatagcaaattgtggttttctgaaaaccatgtgccattgtacatgctgcgagaatttgagctgcacgctggggataactccttgcctactccaggaatttcagactctaactgttttaccaatttgtacccacgacgagtaaaagcatatgctggagatgtcttttcctatctttttcacaagggagaagtctatccctgcacctcatgcaagaaggatgccatctacagggatattgttaaatgcaacaccttgcagggtaatt

SEQ ID NO: 114889 - DNA, 255 bp, Zea mays
  Clone ID: MRT4577_36260C.1
aaaacaaagagggggggtttggataaaattatagagggagggggacacaacaaagcggggcacatggttagcctgttaggggggggggcccacacaaaaaaacaaactgttcgccagaagcgccccagggggccagggggggacacgaccccgccttcagccattataattatttaagactaaaagcatgccttgggacgcaattgattgattgatttgaaaaaaacacaggggcgccgtttttctttattaagc

SEQ ID NO: 114890 - DNA, 199 bp, Zea mays
  Clone ID: MRT4577_36261C.1
gaataatcaaagtggcagcctaaacattgctgagaggccagaccacgtaagggtaacgagaatacagtgaaatgcctagcaatctgtagggaaggataaactgaatgaacaagacaaggacgacttacaggtggaccatcccgtacttaaccaggttacacactttgaggataggaaactgactaccatcaaagctgga

SEQ ID NO: 114891 - DNA, 583 bp, Zea mays
  Clone ID: MRT4577_36262C.1
gttagatctaaaatgatggtgatgatttaatatgcgcaccatgtgcaccaatcttccatgtgcaccagatatattctcctgttttttagggaactcatgtctagttttttttttttggtggagaaaggctaaactacaatgcctctatgtcttttctggcttctatcatcctatcctatggtgtcattaacattcaaggcttgctgttgcaggttgggtaggaatctgtccttgaaagcagcttcaccacctttccgctgtgcaatctgccaagtggaccaagagcccttccaagatttgatggcagataatggaggtggttactgctcttcccagtacgctccatggggtggcccatgtctctgtttggactgtcggaaaaagaaagatgcaatggaaggaaaaagatgtagccgctctacagcatgcaggtgaaacaatcaaaatgctgagaaaaaggagcaacgagagacactaaattaaatcgctggatccaagagtatgctgaaactaactgtattgacgaccaaggtttgatgttgttgagctcaaataacttgagcttgtagttttgatgtgccct

SEQ ID NO: 114892 - DNA, 1108 bp, Zea mays
  Clone ID: MRT4577_36263C.1
gaattcccggccgcgtcgacagcaagtcaagctatcaaacaccggaggaagactgataatagcatctgatggcatatgggacgcgttgtccaatgaagcagctgcaaaagcatgcagaggattgcctgcagaactggcagcgaagcttgtcgttaagcaagctctgaaaacaagcgggctaaaggatgacaccacctgtgtcgtagttgacattatcccgtccgatcatctgacatcgccacaattgtctccaaagaaaaatcagaacaagttgaagtcctttttcgtagaaggtcgcatagttcagttagaaagcttggaggcaagtctgcctccattggttccgtggaggagttatttgaagaagggtctgcaatgctagaagaaaggttgggtaggaatctgtccttgaaagcagcttcaccacctttccgctgtgcaatctgccaagtggaccaagagcccttccaagatttgatggcagataatggaggtggttactgctcttcccagtacgctccatggggtggcccatgtctctgtttggactgtcggaaaaagaaagatgcaatggaaggaaaaagatgtagccgctctacagcatgcaggtgaaacaatcaaaatgctgagaaaaaggagcaacgagagacactaaggacgtgtttggtttgcgaattcagttgatccggcatgagctgctcctgcatgaggtcgtccgatgtttttctgggagtgaaccggtgctgcataattgcacttctaacgagcactacatggagtatctgatgtcggacgacacagatctatgatgtaaaccaaacaaatatattaggttcggatataggatcggatgattccggagaccgttgtccggcaaaccaaacacgttgtaaattaaatcgctggatccaagagtatgctgaaactaactgtattgacgaccaaggtttgatgttgttgagctcaaataacttgagcttgtagttttgatgtgccctgtagtgtgccttgtgatggtttttgtgggaataggaaacatgtaaaatactccttgtgttattgctgaattagagctgtccattttcctaataaaaaaaattccatagat

SEQ ID NO: 114893 - DNA, 2388 bp, Zea mays
  Clone ID: MRT4577_36264C.1
atgtcgttcggcttgaggaatgcgggtgcaacgtaccaacggtgcatgaaccatgtgttcggcgaacacattggccgaacggtcgaggcctacgtcgatgacatcatagtcaagacgaggaaagcctacgacctcctttccgaccttgaagtgacattccgatgtctcaaggcgaaaggcgtgaagctcaatcccgaaaagtgtgtcttcggggttccccgaggcatgctcttggggttcatcgtctccgagcggggcatcgaggccaacccggagaagatcgtagccatcaccagcatggggcccatcaaggacttgaaaggcgtacagagagtcatgggatgccttgcggctctgagccgcttcatctcgtgcctcggcgaaagaggcctgcctctgtaccgcctcttaaggaaggccgagtgcttcacttggacccctgaggccgaggaagccctcgggaacctgaaggcgctccttacaaatgcgcccatcttggtgccccccgctgccggagaagccctcatgatctacgtcgccgcgaccactcaggtggttagcgccgcgattgtggttgagagacgagaagaggggcatgcattgcctgtccagaggccagtctacttcatcagcgaggtactgtccgagaccaagatccgctacccacaaagtcagaagctgctgtacgcggtgatcctgacatggcggaagttgcgacactacttcgagtctcatccggtaactatggtgtcatccttccccctgggggagatcatccagtgccgcgaggcctcgggtagaattgcaaagtgggcggtggaaatcatgggcgagacgatctcgttcgcccctcagaaggccatcaagtcccaggtgttggcggacttcgtggctgaatgggtcgacacccagctcccaacagctccgatccaaccggaactctggaccatgttcttcgatgggtcgctgatgaagacaggtgcaggcgcaggcctgctcttcatctcgcccctcgggaagcacctacgctacgtgctatgcctccacttcccggcgtccaacaatgtggctgagtatgaggctctggtcaacggtttgcgcatcgccatcgagctaggggtccgacgcctcgacgctcgtggtgactcgcagctcgtcatcgaccaagtcatgaagaactcccactgccgcgacccgaagatggaagcatactgcgatgaggttcggcgcctggaagacaagttctacaggctcgagctcaaccacatcgcccgacgctacaacgagactgcggacgagctggctaaaatagcctcgaggcgaacaacggttcccccggacgtcttctcccgagacctgcatcaaccctccgtcaagaccgacgacacgcccgagcccgagaaggcctcggcccagcccgaggcaccctcggctcagtccgaggtaccctcgtctcagtccgaggagagctacccctcgaccgagccgaagctcggcggttggcgccgcgccaagtcgttcgtcttgctaggagacgggaaggagctctaccaccgcagcccctcgggcatcctccagcgatgcatttccatcgccaaagtcggccccttgcaaaaggcacccgggggctacacgcacctgctggtcaccatcgacaaattctccaagtggatcgaggtccgacccctaaacagcatcaggtccgaacaggcggtggcgttcttcaccaacatcatccatcgctttggggtcccgaactccatcatcaccgacaacgacacccagttcaccggcagaaagttcctggacttctgcgaggatcaccatatccgggtagaatgtgccaacgacatgattctgcaaggactcaaggctcggatctacaacgacctcaacaagttcggcaagcggtggatgaaggaactcccctcggtggtctggagcctgaggacaacgctgagccgagccacgggcttcacaccgttcttcctagtctatggggccgaggccatcttgcccacagacttagaatacggttccccgaggacgagggcctatgccgaccaaagcaatcaagctaatcgagaagactcgctggaccagctggaagaggctcgggacatggccttactacacccggcgcagtaccagcagtccctgcgacgctaccacgcccgaggggttcggtcccgagacctccaggtgggcgacctggtgcttcggctacgacaagacgcccgagggaggcataagctcacgcctccctgggaagggccgttcgtcatcgccgaagttctgaagcccggaacgtacaagctggccaacagtcaaggcgaggtctacagcaacgcttggaacatccaacagctacgttgcttctacccttaa

SEQ ID NO: 114894 - DNA, 2415 bp, Zea mays
  Clone ID: MRT4577_36265C.1
gagcaggtgctggcctgctcttcatctcacccctcgggaaaacatctccgctacgtgctgcgcctccatttcccggcgtcaaacaacgtggccgagtacgaggctctggttaatgggttgcacatcgccatcgagctaggggttcggcgcctcgacgctcgtggcgacttgcagcttgtcattgaccaagtcatgaagaactcccactaccgcgaccggaagatggaggcctactgcgacgaagttcggcgcctggaagacaaattctacgggatggaactcaaccatatcgcccgacggtacaacgagactgcggatgagctggctaaaatagcctcggggcggacaacggttcccccggacgtcttctccagagacatacatcaaccctccgtcaagatcgacgacacgcccgagcccgaggaagcctcggcccagcccgaggccccgtacctggaatatctcctccgaggagagctacccctcgacaaggccgaagctcggcgactagcgcggcgcaccaagtcgttcgtcttactgggtgatgaaaaggagctctaccaccgcagcccctcaggcattctccaacgatgcatttctgtcgccgaaggacaggagctattgcaagaaatacactcgggggcttgcggtcaccatgcagcacctcgagccctcgtggggaacgccttccgacaaggcttctactggccgaccgcggtggccgacgccactaggattgtacgctcctgccaagggtgtcaattctatgcgagacagacacacctgcctgctcaggccttgcagacaatacccatcacctggtcgtttgctgtgtggggtctggacctcgttggtcccttgcagaaggcacctgggggcttctcgcacctactggtcgccatcgacaaattctccaagtggatcgaggtccgacccctaatcagcatcaggtccgagcaggcagtggcgttcttcaccaacatcatccatcgctttggggtcccgaactccatcatcaccgacaatggcacgcagttcactgggaagaagttcctggacttctgcgaggaccacctcatccgtgtggactgggccgccgtagctcaccccatgaagaatgggcaggtggagcgtgccaacggtatgattttgcagggacttaaaccgaggatctacaacgacctcaacaagtttggtaagcgaaggatgaaagagctatcctcggtggtctggagcctgaggacgacgccaaaccgagccacgggtttctcgccgttctttctagtctatggggccaaggctatcttacccacagacttagaatacggttcaccgaggacaaaggcaacgtctttcgcgctttttgactgcttcgatagcgggatcctgaaaacgacgagagtacacgttcagacatcgacagagggagcagcagcaccctcggcatcgtttccaccttcggcagaatctggcccggcctcggatggcgacacgggcggaaggatctccacctcgaaggaggatgccagcaccgcgcttgggccatcgcagcctggatctccgcagggccccggcccgagcagacacctcggttggccgctccgtagcctcagccagctgtccctcgaggacctcagcccggctcacggcctcggcagcataactctgagatgttcaggcctcgacagccacaatgaacaaacacccacactcagggtgccattacaaacggaactccggttccactcccgtgggtatgaacaacctccacaccagagggcctgcgggacaacaaactccaggtggctcgctggtgaccactgcaccagcagcgacaatgacctccgcctcggacggcaagacagcagcagcgatggccccagggcaaacgctaccgctgggaggccctcgttcacgtcccctcacggggatgagaaccagccattaaagccaaagagccggaggcccgtagcgcaggcaccaacctccgcgcggaggcatcgtgccggagtgaggacaagacaatccaagaacacgaacgccgcccatgcggcgtacggcgtcttggacgatcccctggtgcgcacggcgcaacagtcgcccgtgcggtggacagacggccatgcccggatcaagtggcaggaggtagcgtcggaggccgcgacagagccagccgagccaggcagaggccgcagcccggcttgcttctccccaccatcgaactggtggtcatcatcctggatgaccattggtgagggaatgcagccgggctgcatgatgaaaatccttggagccgagcgatggctgaagggtgccaacccccgcgaggtcgtgctcctccaacaacagcaagacaaaggaaacacgggtgctccccatccgggggctcggaaggtggaagggcgcgatgcataa

SEQ ID NO: 114895 - DNA, 3120 bp, Zea mays
  Clone ID: MRT4577_36266C.1
atgggcagtctccagcaacctctccaacccgggacggtgctccgtttcgggagtcttgagttcatgtccttcgacggcacctacgacatgatactccttccaccgccgtgcgacaacggcaatggcggccgacagcccgccagccggcggagaaatcgacgacgtcttccccgcgtggtggaagaacaacattcgagctcgtcccgccttcttccccgccgacgaaagggaaggcagggcaaccaaggccaagcaggaggcagcgcctcgtcggctgtcgagcgagtcgacagcgccggcaccccaacgaggggcgcaccgggtatcgacttcgcgcctgagatgaagacgagcgccgtctccccgcgacacgccaatcccgagcaagtggacgacgccagcgcgcttgcgaaaagcttgcaggacgtcgccctcgtacctgagacgacggtccagtcagtccccgacgtgacttcatcgcctctcgtcgaccaagaggtaccgaccgattcccatcctacgtcatttggattcagcctcaacccgcctagcgacctcgctttgtcggacgctctcgtagaggcgagtccaaaccctctggggtttcgcatgcagtcgccttgggaccggttcacggacgtctcgacctacgggccctctgggtccgaggaagacgacgaccccaacatctgttgggatttctctggacttggcaaccccagtgccatgcgggacttcatgaccgcatgtgacttctgcctctccgactgttccgacggtagccgcagcctcgacgacgaggactgcggcccaagccgcgaatgtttccacgtcgatctagggggtccctccgaaggcaatcatcttggcatgccggaggatggtgatctccctaggccggtgccccgcgttgacatcccatgggagctagctgtggtccccgttcaggcggggggccatgacccacagctcgagcaaaacagcggggtgcaggccaggctcgacgagggagcaggagcgcttgagccgatccgccgggacgtcgggcaggcatgggcgggccaacccccggccggagaaatacgtcatctgccccagggcttccagcaccgtgtcgccgacgacgctagggtcaggccgccacctgcatctagtggcgtcggccagaacctggctgcagcagcgatgctcctccgcgcgatgccggagccatccaccaccgagggtcggcgaatccagggggagctcaagaatctcctggaaggcgccgcggtccaacaggccgagagctctgcctcccgaaggcagggatacccctcggaacctcatgccgcgacttcccgattcatgcgggaagcctcggtctacaccgagcgcacgctcaacaccgcgcctgcggccctgggccgcctcggcaacgagcaccatcatcgcgaccgtcgggcccacctcgacgagagggtgcaccgaggctatcaccccaggcgtgggggacgctacgacagcggggaggatcggagtccctcgcccgaaccgcccggtccgcaggccttcagccgggccatccgacgggcacccttcccgacccggttccgacccccgactactatcacaaagtactcgggggagacgagaccggaactgtggctcgcggactaccgtctggcctgccaactgggtggaacggacgacgacaacctcatcatccgcaacctccccctgttcctctccgacaccgctcgcgcttggttggagcacctgcctccggggcaaatctccagctgggacgacctggtccaagcctttgccggcaatttccagggcacgtacgtgcgccccgggaactcctgggacctccgaagctgccggcagcagccgggagagtctctccgggactacatccggcggttctcgaagcagcacaccgagctgcccaacatcaccgactcggatgtcatcggcgcgttccttgccggcaccacctgccgcgacctggtgagcaagttgggtcgcaagacccccaccagggcgagcgagctgatggacatcgccaccaagttcgcctctggacaggaggcggtcgaggctatctttcgaaaggacaagcagccccagggccgcccatcggaagatgctcccgaggcgtctactcagcgcggcgccaagaagaaaggcaagaagaagtcgcaagcgaaacgcgacgccgccgacgcggaccttgtcatcgccgccgagtacaagaaccctcggaagccccccggaggtgccaacctcttcgacaagatgctcaaggagccgtgcccctatcaccaggggcccgtcaagcacacccttgaggggtgcgtcatgcttcggcgccacttccacagggccaggccacccacggagggtggcagggcccgcgacgatgacaataaggaagatcaccaagcaggagagttccccgaggtccgcgactgcttcatgatctacggtgggcaagcggcgaacgcctcggctcggcaccgcaagcaagagcgtcgggaggtctgctcggtaaaggtggcggcgccagtctacctagactggtccgacaagcccatcaccttcgaccaagccgaccatcccgaccacgtgccgagcccggggaaatacccgctcgtcgtcgaccccgtcatcggcgacgtcaggctcaccaaagtccttatggacggaggcagcagcctcaacatcatctacgccgagaccctcgggctcctggagactctgacattcgaggtggtcgggttccgaggaacctaccacgcagtactgggaaggccatgctacgcgaagttcatggccgtccccaactacacctacctgaagctcaagatgccgggccccaacggggtcatcaccgtcgaccccacgtacaagcacgcgttcgaatgcgacgtggagtgcgtggagtacgccgaggccctcgccgagtccgaggccctcatcgccgacctggaaagcctctccaaagaggtgccagacgtgaagcgtcatgccggcaacttcgagccagtggagacggtcaaggccgtccccctcgaccccagcggcgacgcctccaagcagatccggatcggctccgggctcgaccccaaatag

SEQ ID NO: 114896 - DNA, 1677 bp, Zea mays
  Clone ID: MRT4577_36267C.1
aggtgaaaaggtgtcctctaaaaaaaaaaaaagagaataatcaattccgagtgaaataaattacacatagccatctagaagagagtcctttctagagccgacgcgacgggatcaagatttgtatttgaacccggacgacgggaggagtacgaggcccagtcatggaggaggagaagcaagtgatggagggtgccgctacggcggcgaggcggcggctggtgatcggggtggggttctgggtgcagggcttccggctcttcccgtggctgggcgtcaatttcttcctcaaggacggcatgggcgttgctgcctcctcgctgcagatcctccaggcctccgccaatctgcccatggtcgccaagccgctcattggcctcctctcggatgccgtccccatacgcggccatcgccgcctgccctacgtcgccatcggcgctctcttgcaggcaatttcatggctagcaattgcactttggcaagatatctctcttcaagttcttaccatttttctcctcttgagcaactttggtgcttccatatgtgaggttgccaatgatgccattgtagcggagtctgggaagaaagcggcctcttcctcaggatcaggtcagcttcaatcgtttgcttggatgttcggctcttctgctggtgctttaggaaacctcctaggtggcattgctctcagctatttttctcccaaagtcatgtttctgtttttcgcaatccttctcctgctccagttcttcacaactgtggctatacctgagggctctctcaaactccctaaggtagctacttctaccaatctatcagcactcaccagcatccgtaagcaagtcaaagagctgtcatgcgccctatctatgcctgaaatgttttggtcaattatatggtttacagcgtcatacgctgccataccttttctacttgggaccatgttcttctaccagactgaagtgctaagactagactcctcggttatcggcttatcgaaggtgtttgggcaagtggctctattggcttggagcatgtcatacaacaagtacttcaagacaatgtccgcccggaagctcctgtcagttctgcagttcgtcacagcgctcgtaatgttgtcagatgtgttgttcgttcagggagtatacaggaaggtgggaattccagactccatatacacgattgtcttctccgggctgctcgagggccttatgtttttcaaggtcctgcccttcagtgttcatgttgcaaaactttgccctgctggctgtgagggatcagtgatggcctttgtcatgtctgcgcttgcccttgcgactatcgtcagtggctaccttggagttgctcttgctgccttcatgggagtgtctggagatgatttctcagcactgccagcttgcctgttgattgaggctgcgtgcacaatgttgccactatgttgctcgtccttgatcaaagagagaagagaaaaggagaaaaaacaagagtagattacatatatattatctgaagatgatgtaaagctcattgttgttaccctcgtcctcatggtgtcatttcagtttgttatgtgatcatagcttgcagaaacaaaataggagatgattacacatttacacttgtccggtgttaacacctctaaggcttctcaagaactacagtcaaacgagcatatatgtcaag

SEQ ID NO: 114897 - DNA, 750 bp, Zea mays
  unsure (1)..(750): unsure at all n locations
  Clone ID: MRT4577_36268C.1
ccggccgggaaggcacttgcttgactttcgccccaccattatctcgatgaccagccttcctcgcagggcggtgggcttgagcgtcggaggagaaatcatatctctttcgccttctagctctctagacggggaaatagagatccggtccttgtgatggcaatcctgcatcgtcaactttgccgaccagcgctatcggtgccccggtcattgctggtcgtctcgtgacggttgtaagcccttctattgttggtgatggccgagctacagggccggctagaggcatcttggtcggtcatgtggacattcgatgctcatattgcagatctccaagcatgattagccatcatggagtcccgtgcgaccacatggcaggagactgagttgggtggagttgtgccaagaagtcgatccggtgactcggagcatctgcgcacgtggagcaacacatctacatcgcctacttgacattctgagtcgtgttcggaatatcgtggacctcaacattcatcatggaaatgtcattggccctggttgtttcccatcttcacactggnggttgatctccgtgctttaatgatgcttccttagggcgcccatccgtggtctttgagaatctaatccaggggtacgacgaggctgccctgcggggtggggcagcgttgtgtcttcggaggaaatgatccgatgggctccataaggcccttctctggatttcgccttttagtttttggaacggcagccgaccatgca

SEQ ID NO: 114898 - DNA, 473 bp, Zea mays
  Clone ID: MRT4577_36269C.1
aaaaaaaaaaaaaaaaaagagaaaaaaaaaaaaaaaaaaaaaaaaaaaaaaattttacctctaaacacaaaaccactctgggggagttttaaacaaatatatgtcactttggggggctttcccccccgcttgggggggcccctgcgccctttttgggggcccatttcactttatagtgggtggtttttcacccctttggggcgtggaaacccctttttgacccccattaaactccttttggcccatattcattttgctaagggggggggaataccaaagggggcccgctcttatcccttttccccataatcgccttctctttagggaaggggcccgccctctgtcgccgtttttaaccccctgcgggtggggttttcacccgcagggtcccttttactccccttagcgccctagtaccctgccctttctttttcccccctccctttcgcgacctttacctttttttcccccca

SEQ ID NO: 114899 - DNA, 360 bp, Zea mays
  Clone ID: MRT4577_3626C.1
cttcgcttgccttggtggtcaccccgtcggttgccgcctggcggctggccgggggaaacttttggccttcccggggcccggcttgggttctcctccggccagaagaatggttggcggtttaagggacctgattttggccaggctttttttggttttttggccaaaggtccaaaccccgattagaaaaatcccgttaaaaaaaaaggtattttccactgtattttcctttttaattttcctggcttgcagccagttccaattttttggctttaattcaccacctggacctgatcctttttactgaatgcgggtaatcctcgcttcaaaccggggcactgtgatggagttgggtttaactcc

SEQ ID NO: 114900 - DNA, 315 bp, Zea mays
  Clone ID: MRT4577_36270C.1
ctgggggggggccgggtcttttgttttgctgtcaccggcgcggcggaagtgcttccctggattctcactcctctctggcgagtaccgcccctattttggctgtggccggcttggggttacgcctgttgcgctgggagttcgggaagacctcctccagcctctgcgcagtcgccgtatgagtgtttggagagagctgcgctgcgtggaacagcactgccgttacactgaccaccacacgcttattatggtttccccccgaatgcttggcacgtgacaccatctcccacgtcctgctggtcacctgctggtatgcat

SEQ ID NO: 114901 - DNA, 3192 bp, Zea mays
  Clone ID: MRT4577_36271C.1
atgggcagtctccagcaacctctccggcccgggacggtgcttcgtttcggggctctcgagttcatgtccttcgacggcagctacgacatgatacttcttccaccgccgtgcgaccacgacaatggcggccgacaacccgcccgccggcggcggaatcgacgacgtctaccccgcgtggtggaaaagcaacattcgggctcgctccgttctctcccccgccaacggaggaggaggcggggccgtcaaggccagacgggaggccgcgcttcgccggccgtcgagcgaatcgacgcccccgacgccccgacggaaggcacgccggacatcgacctcgcgttcaagacggaggcaagcgccgtccccccgcggcacgacgaccccgagcaagaagacgacgccggcgcgctcgcggaaagcctgcaggacgtcgccctcgaaccagagatgacggtgcaaccagtccccgatgtgactacgtcgctcctcgtcgaccaaaaggtaacgactaactcccatcttgcgtcatttcgactcggcctcaacccgccaaacgacctcgttttggcgggcgccctcattgaggcgagtgcaaccccactgaggttctatatgcgatcgccttgggaccgactgacggacgtctcgacctacgggccctctgggtccgaggaagatgacgaccccagcatcggttgggatttctccggacttggcaaccccagtgccgtgcgggacttcatggccgcatgtgactactgtctgtccgactgttccgatgcaagccgcagccttggcgacgagagctgcggcccaagccgcgaatgtttccacgtcgagctagggaatcccaccgaaggcaaccatcttggcatgccggaggatggtgatctccctaggccggtgcctcgcgccgacatcccacgggagctagctgtggtccccgctccggcggggggttacgacccacaactcgagcaagtccgcgaggcgcaggccaggctcaacgagggaacaggagcgcttgagccgatccgtcgggacgtcggacaggcatgggtgggccaacccctggccggggaaatacgtcatctgccccaaggtctccagcaccgcgtcgccaacgacgtcaggatcaggccgccgcccgcatccagcggggtcggtcagaacctggcaaccgcagcaatgctcatccgcgcgatgccggagccgtcaaccaccgagggtcggcggatccagggagaactcaagaatctcctggaaggcgccgcggcccggcgggccgagagcactgcatcccgaaggcaaggatatccctcggaacctcatgccgcgacttcccgattcatgcgggaagcctcggtctacaccgggcgcacgcgcaacaccgcgcctgcggccccgggccacctcggcaacgagcaccatcgacgcgaccgtcgggctcacctcgacgaaagggtgcgccgaggctatcaccccaggcgtgggggacgttacgacagcggggaggatcggagtccttcgcccgaaccacccggtccgcaggctttcagtcgggccatccgacgggcgccattcccgacccggttccgacccccgactactatcgtaaagtactcgggggaaacgagaccggagctgtggctcgcggactaccgccttgcctgccaactgggtggaacggacgacgacaacctcatcatccgcaacctccccctgttcctctccgacactgctcgtgcctggttggagcacctgcctccggggcagatttccaactgggacgacttggaccttcgaagctgccggcaacagccgggggagtcgctccgggactacatccggcgattctcgaagcagcgcaccgagctgcccaacatcaccgactcggatgtcatcggcgcgttcctcgccggcaccacttgccgcgacctggtgagcaagctgggtcgcaaaacccccaccagggcgagcgagctgatggacatcgccaccaagttcgcctccggccaggaggcggtcgaggctatcttccgaaaggacaagcagccccagggccgcccatcggaagaagcccccgaggcgtctgctccgcgcggcgccaagaagaaaggcaagaagaagtcgcaatcgaaacgcgacgccgccgacgcggaccttgtcgccgccgccgagtataagaaccctcggaagccccccggaggtgcaaacctcttcgacaagatgctcaaggagccgtgcccctaccatcaggggcccgtcaagcacaccctcgaggagtgtgttatgcttcggcgtcatttccacagggccgggccacccgccgagggtggcagggcccgcaacgacgacaagaacgaagatcaccaagcaggagaattccccgaggtccgcgactgcttcatgatctacggagggcatgcggcgaatgcctcggctcggcaccgcaagcaagagcgccgggaggtctgctcgttgaaggtggcggcgccagtctacctagactggtccgacaagcccatcactttcgaccgagccgaccaccccgaccatgtgccgagcccggggaaatacccgctcgtcgtcgaccccgttgtcggcaatgtcaggctcaccaaggtcctgatggacgggggcagctgcctcaacatcatctacgccgagaccctcaagctcctgcgcgtcgatccgtccaccgtccgagcaggcgctgcgcccttccacgggatcatccctgggaagcgcgtccagcccctcgggcgactcgacctcccagtctgcttcgggacaccctccaacttccgaagggagaccctgacgttcgaagtggtcgggttccgaggaacctaccacgctgtgttagggaggccatgctacgcgaagttcatggccgtccccaactacacctacctgaagctcaagatgccgggccccaacggggtcatcaccatcggccccacgtacaaacacgcgttcgaatgcgacgtggagtgcgtggagtacgccgaggccctcgccgagtccgaggccctcatcgccgacctggagaacctctccaaggaggtcccagacgtgaagcgccatgccggcaacttcgagccagcggagacggtcaaggccgtccccctcgaccccagcggcgacaccaccaagcagatccggatcggttccgggctcgaccccaaatag

SEQ ID NO: 114902 - DNA, 836 bp, Zea mays
  unsure (1)..(836): unsure at all n locations
  Clone ID: MRT4577_36272C.1
cattgggtacctcgaggccggccgggacattcagctcactgctcatatcaagcccacgcgtggtgtcggttaggcggcgcgctccgccttccccttcttcgacctcccgacgcgtgctcacctcctcttcggatcgtggatccgctgctgcgctgcacgaataatcaattccgagtgaaataaattacatatagccatctagaagagagtcctttctaggtgagtaggtgtcctcttacgcgtgggtgagagaacccactaggagccacagccacctcacagtctgttctcctgttggatcgggaggagcagagccgacgcgacgggatcaagatttgtatttgaacccggacgacgggaggagtacgaggcccagtcatggaggaggagaagcaagtgatggagggtgccgctacggcggcgaggcggcggctggtgatcggggtggggttctgggtgcagggcttccggctcttcccgtggctgggcgtcaatttcttcctcaaggacggcatgggcgttgctgcctcctcgctgcagatcctccaggcctccgccaatctgcccatggtcgccaagccgctcattggcctcctctcggatgccgtccccatacgcggccatcgccgcctgccctacgtcgccatcggcgctctcttgcaggcaatttcatggctagcaattgcactttggcaagatatctctcttcaagttcttaccatttttctcctcttgagcaactttggtgcttccatatgtgaggttgccaatgatgccattgtagcggagtctgggaagaaagcggnctcttcctcaggatcaggtcagcttcaatc

SEQ ID NO: 114903 - DNA, 1989 bp, Zea mays
  unsure (1)..(1989): unsure at all n locations
  Clone ID: MRT4577_36273C.1
atgggatgcctcgcggctctgagtcgtttcatctcgcgcctcggcgaaagaggcctgcctctgtaccgcctcttaaggaaggtcgagtgcttcgcttggacccctgaggccgaggaagccctcgggaaccggaaggcgctcctcacaaacgcgcccatcttggtgccccccgctgccggagaagccctcttgatctacgtcgccgctaccactcaggtggttagcgccgcgatcgtggttgagagacgagaagaggggcatgcattgcccgtccagaggccagtctacttcatcagtgaggtactgtccgagaccaagatccgctacccacaaattcagaagctgctgtacgcggccatcaagtcccaggtcttggcggacttcgtggctgaatgggtcgacacccagctcccgacggctccgatccaaccggagctctggaccatgtttttcgacgggtcgctgatgaagacgggggccggcgtgggcctgctcttcatctcgcccctcgggaagcacctacgctacgtgcttcgcctccacttcccggcgtccaacaacgtggctgagtacgaggctctgctcatcatcgaccaagtcatgaagaactcccacagcagcgacccgaagatggaagcctactgcgatgaggttcggcgcctggaagacaagttctacgggctcgagctcaaccacgtcgcccgacgctacaacgagactgcggatgagctggctaaaatagcctcggggcgaacaacgattcccccggacgtattctcccgagacctgcatcaaccctccgtcaagaccgacgacacgcctgagcccgagaaggcctcggcccagcccgaggcacccgagggtgaggcactacgcgtcgagggggagcagagcgaggtcacgcctaatcaaaactggcagaccccgtacccgcaaatttccaccgaggagagctacccctcgaccaagcngaagctcggcggttggcgcgggcgtgccaagtcgttcgtcttgctgggagatgggaaggagctctaccaccgcagcccctcgggcatcctccagcgatgcatttccatcgccgaaggccaggagctcttacaagagatacactcggggcttgcgaccatcacgcagcacctcgaacccttgttgggaacgccttccgacaagaaggcacccgggggctacacgtacctgctggtcgccatcgacaaattctccaagtggatcgaggtccgacccctaaacaacatcaggtccgaacaggcggtggccttcttcaccaacatcatccatcgctttggggtcccgaacttcatcatcaccgacaacggcacccagttcactggcagaaagttcctggacttctgcgaggatcaccacatccgggtggactgggccgccgtggctcaccccatgacgaatgggcaagtggagcgggctaacggcatgatcctgcaaggactcaagcctcggatctacaacgacctcaacaagttcggcaagcgatggatgaaggaactccccttggtggtctggagtctgaggacaacgccgagccgagccacgggcttcacaccgttctttctggtctatggggccgaggccatcttgcccacagacttagaatacggttccccgaggacgagggcctatgccgaccaaagcaatcgagctaatcgagaagactcactggaccagctggaagaggctcgggacatggccttactacactcggcgcggtaccagcagtccctgcgacgctaccacgcccgaggggttcggtcccgagacctccaggtgggcaacctggtgcttcggctaagacaagacgctcgagggcggcataagctcacgcctccctgggaagggccgttcgtcatcgccaaggttctgaagcccggaacatacaagctggccaacagtcaaggcgaggtctacagcaacgcttggaacatccaacagctatgtcgcttctacccttaa

SEQ ID NO: 114904 - DNA, 549 bp, Zea mays
  Clone ID: MRT4577_36274C.1
atgtacttcgatgggtcgctgatgaaaataggagcaggtgcgggcctgctcttcgtttcacccctcggaaagcatcttcgctacgtgattcgcctccatttcctggcgtcaaacaacgtggccgagtacgaggcttttgttaacgggctgcgcatcaccgtcgagctaggggttcggcgcctcgatgctcgtggcgacttgcagcttgtcattgaccaagtcatgaagaactctcactaccgcgaccggaagatggaggcctactgtgacgaagttcggcacctggaagacaagttctacgggctggagctcaaccatatcgctcggcggtacaacgagattgcggatgagctggcaaaaatagcctcggggcagacgacggttcccccggacgtcttctccagagacatacatcaaccctccgtcaagatcgacgacacgcccgagcccgaggaggcctcggcccagcccgagataccctcggccgccgagggtgaggccctgcgcgtcgagggagagcggaatgggatcacgccaaacccgaactag

SEQ ID NO: 114905 - DNA, 3045 bp, Zea mays
  Clone ID: MRT4577_36275C.1
atgggcagtctccagcaacctctccaacccgggacggtgctccgtttcgagagccttgagttcatgtccctcgacggcagctacgacatgatactccttccaccgccgtgcgacaacaacagtggcggccgacaacccgcccgccggtggcggaatcggcgacgtcttccccgcgtggtggaagaacagtcttcgagctcaccccgtcctctcccccgccgacgggggaggaggcggggcaatcaaggccaagaagaagacagcgcctcgtcggctgtcgagcgagtcgacggccccagcaccccaacggggggcacaccgggcgtcgacctcgcgtttgagacgaaggcgagcgccgtctccccgcgacgcgtcaatcccgagcaagcggacgacgccagcacgctcgcgaaaagcttgctggacgtcaccctcgtacctgagacgacggcgcagtcagtccccgacgtgaccttatcgccgcccgtcgaccaaaaggtaccgatcgattcccatcccgcgtctttcggattcagcctcaacccgtctagcgacttcgctctggcgggcgctctcgtagaggcaagtccaaaccctctggggtttcgtatgtggtcaccttgggaccggctgacggacgtctcaacctacgggccctctgggtccgaggaagacgacgaacccaacatctgttgggatttctctggactcggcaaccccagtgccatgcgggacttcatgaccgcatgcgactacagcctttccgactgttccggcggtagccgtagcctcggcgacgaggaccgcggcccaagtcgtgaatgcttccacgtcgatctagggggtccccccgaaggcaaccatctcggcatgccggaggacggtgacctccctaggccggtgcctcgcgttgacatcccacgggagctagctgtggtccccgttcaggcggggggtcatgacccacagctcgagcaaatccgcggggtgcaggccaggctcgacgagggagcaggagcgcttgagccgatccgtcgggacgtcgggcaggcatgggcgggccaacctccggccggagaaatacgtcatctaccccagggcttccagcaccgcatcaccgacgacgtcagggtcaggccaccacccgcatccagtggggtcggccagaacctggcggcagcagcaatgcttcttcgcgcgatgccggagccatcaactaccgaggggcggcgaatccagggagagctcaagaatctcctagaaggcgccgcggtccgacgggccgagagctccgcctcccgaaggcaggggtacccctcggaacctcatgccgcgacttcccgatttatgcgggaagcctcggtctacaccgggcgcacgcgcaacaccgcgcctgcggccccgggtcgcctcggcaacgagcaccatcaccgcgaccttcgggcccacctcgatgagagggtgcgccgaggctaccaccccaggcgtgggggacgctacgacagtggggaggatcggagtccctcgcctgaaccgcccggtccacaggccttcagccgggccatccggcgggcgctgttcccgacccggttccgacccccggctactatcacaaagtcctcgggggagacgagaccggaactgtggcttgcggaataccgtctggcctgccaactgggtggaacggacgatgacaacctcatcatccgcaacctccccctgttcctctccgactccgctcgcgcttgttgccgacagcagccgggagagtctctccgagactacatccggcgattctcgaagcagcgcaccgagctgcccaacatcaccgactcggatgtcatcagcgcgttccttgctggcaccacctgccgcgacctggtgagcaagctgggtcgcaagacccccaccagggcgagcgagctgatggacatcgccaccaagttcgcctccggccaggaggcggtcgaggctatcttccgaaaggacaagcagccccagggccgcccatcggaggatactcccgaggcgtcaactcagcgcagcgccaagaagaagggtgccaacctcttcgacaagatgctcaaggagccgtgcccctatcaccagggacccgtcaggcacacccttgaggagtgcgtcatgcttcggtgccacttccacagggtcgggccacccgcggagggtggcaaggcccgcgacgacgacaagaaggaagatcaccaggcaggagagttccccgaggtccgcaactgcttcatgatctatggcgggcaagcggcgaacgcctcggctcggcaccgcaagcaagagcgccggggggtctgctcggtcaaggtggcggcgccagtctatctggactggtccgacaagcccatcacctttgaccgagacgatcaccccgaccatgtgccgagctcggggaaatacccgctcgtcgtcgaccccgtcatcggcaacgtcaggctcaccaaggtcctcatggacggaggcagcagcctcaacatcatctacgccgagaccctcgggctcctacgtgtcaatctgtcctctgtccgggcaggcgctgcacccttccatgggatcattcccgggaagcccgtccaacccctcggacagctcgaccttcccatctgcttcggaacaccctccaactttcgaagggagaccctgacgttcgaggtggtcgggttccgagggacctaccacgcggtactagggaggccatgctacgcgaagttcatggccgtccccaactacacctacctgatgctcaagatgccgggccccaacggggtcatcaccgtcggccccacgtacaaacacgcgttcgaatgcgacgtggagtgcgtggagtacgccgaggccctcgccgagtccgaggccctcatcgccgacctggagagcctctctaaggaggtgccagacgtgaagcgtcacgccggcaactttgagccagcggagacggttaagtccgtccccctcgaccccagcggcgacacctccaagcagatctggatcggctccgggctcgatcccaaatag

SEQ ID NO: 114906 - DNA, 358 bp, Zea mays
  Clone ID: MRT4577_36276C.1
tgccgagactgatgtgggcgtacagtatgagtgggaactatggaggaagaacctggcagaccggatgccctttctgccttacgtgcactgctgggatgagacagcagcagcctgtcatcgatcagactcagcaggcccactggacccgataatgaccgcctattgcgatacaaaggcaaggagggatatggcgactaccttcctggtggaaagcctgggggtacgaagagggctgagcccagggggattgtatatggcaggcccaagacacaccagggatcacccggttgcaacgtactgaggaacgagaggccagctcctgaggagagagctgatggaaggtcggtggactgacggc

SEQ ID NO: 114907 - DNA, 3000 bp, Zea mays
  Clone ID: MRT4577_36277C.1
atgggcagtctccagcaacctctccggcccgggacggtgcttcgtttcgggactcttgagttcatgtccttcgacggcagctacgacatgacacttcttccaccgccgcgcgactacgacaatggcggccgacaacccgcccgccggcggcggaatcgacgacgtctaccccgcgtggtggaagagcaacattcgggctcgctctgttctctcccccgccaacggaggaggaggcggggccgtcaaggccagacgggaggccacgcttcgccggccgtcgagcgaatcgacgcccccgacgccccgacggaaggcacgccggacgtcgacctcgcgttcgagacggaggcaagcgtcgtccccccgcggcacgctgaccccgagcaagaagacgacgccggcgcgctcgcggaaagcctgcaggacgtcgccctcgaaccagagatgacggcgcaaccagtccccgatgtgactacgtcgctccacgtcgaccaaaaggtaacgactaactcccatcttgcgtcatttcgactcggcctcaacccgccaaacgacctcgttttggcgggcgctctcattgaggcgagtgcaaccccactgaggttctgtatgcggtcgccttgggaccgactgacggacgtctcgacctacgggccctccgggtccgaggaagatgacgatcccagcatcggttgggatttctccggacatggcaaccccagtgccatgcgggacttcatgaccgcatgtgactactgtctatccgaccgttccgacggaagccgcagccttggtgacgagagctgcggctcaagccgcgaatgtttccacatcgagctaggggatcccaccgaaggcaaccatcttggcatgccggaggatggtgatctccctaggccggtgcctcgcgccgacatcccacgggagctagctgtggtccccgctccggcggggggttacgacccacaactcgagcaagtccgcgaggcgcaggccaggctcaacgagggaacaggggcgcttgagccgatccgtcgggacgccggacaggcatgggtgggccaacccctggccggagaaatacgtcatctgccccaaggtctccagcaccgcgtcgccaacgacgtcaggatcaggccgccgcccgcatccagcggggtcggtcagaacctggcgaccgcagcgatgctcatccgcgcgatgccggagccggtgcgccaaggctaccaccccaggcgtggggggcgctacgacagcggggaggatcggagtccttcgcccgaaccacccggtccgcaggccttcagtcgagccatccgacgggcgccattcccgacccggttccgacccccgactactatcacaaagtactcgggggaaacgagaccggaactgtggctcgcggactaccgccttgcctgccaactgggcgggacggacgacgacaacctcgtcatccgcaacctccccctgttcctctccgacactgctcgcgcctggttggagcacctgcctccggggcagatttccaactgggacgacttggtccaagccttcgctggcaatttccagggcacatacgtgcgccccgggaactcctgggaccttcgaagctgccggcaacagccgggggagtcgctccgggactacatccggcgattctcgaagcagcgcaccgagctgcccaacatcaccgactcggatgtcatcggcgcgttcctcgccggcaccacttgccgcgacctggtgagcaagctgggtcgcaaaacccccaccagggcgagcgagctgatggacatcgccaccaagttcgcctccggccaggaggcggtcgaggctatcttccgaaaggacaagcagccccagggccgcccgtcggaagaagctcccgaggcgtctgctccgcgcggcgccaagaagaaaggcaagaagaagtcgcaatcgaaacgcgacgccgcagacgcggaccttgtcgccgccgccgagtataagaaccctcggaagccccccggaggtgcaaacctcttcgacaagatgctcaaggagccgtgcccctaccatcaggggcccgtcaagcacaccctcgaggagtgcgttatgcttcggcgtcatttccacagggccgggccacccgccgagggtggcagggcccacgacgacgacaaggacaaagaacacccagcagaggggttccccgaggtccgcgactgcttcatgatctatggagggcatgcggcgaatacctcggctcggcaccgcaagcaagagcgccgggaggtctgctcggtgaaggtggcggcgccagtctacctagactggtccgacaagcccatcactttcgaccgggccgaccaccccgaccatgtgccgagcccggggaaatacccgctcgtcgtcgaccccgttgtcggcgatgtcaggctcaccaaggtcctgatggacgggggcagctgcctcaacatcatctacgccgagaccctcaagcttctgcgcgtcgatccgtcctccgtccgagcaggtgctgcgcccttccacgggatcatccctgggaagcgcgtccagcccctcgggcgactcgacctcccagtctgcttcgggacaccctccaacttccgaagggagaccctgacgttcgaagtggtcgggttccgaggaacctaccacgccgtgttagggaggccatgctacgcgaagttcatggccgtccccaactacacctacctgaagctcaagatgccgggccccaacggggtcatcaccgtcggccccacgtacaaacacgcgttcgaatgcgacgtggagtgcgtggagtatgccgaggccctcgccgagtccgaggccctcatcgccgacctggagaacctctccaaggaggtcccagacgtgaagcgccatgccggcaacttcgagccagcggagacggtcaaggccgtccccctcgaccccagcggcgacaccaccaagcagatccggatcggttccgggctcgaccccaaatag

SEQ ID NO: 114908 - DNA, 2568 bp, Zea mays
  Clone ID: MRT4577_36278C.1
atgggtagtctccagcaacctctccagcccgggacggtgctccgtttcgggagtcttgagttcatgtccctcgacggcagctacgacatgatactccttcccccgccgtgcgacagcggcaatggtggccgacagcccgcccgccggcggcggaatcgacgacgtcttccccgcgtggtggaagaaccacattcgagctcaccccgccctctcccccaccgacggaggaggatgtggggcaaccaaggccaagcaggagacagcccctcgtcgactgtcgagcaagttgacggcgccggcgccccaacggggggcgcgtcaggcatcgacctcgcatttgagacgaagacgagcgccgtctccccgcaacacgccagttccgagcaagcggatgacgccagcacgctcgcgaaaggcttgctgggcgtcaccctcgtgcctgagacgacggtgcggtcagtccctgacgtgacttcatcaccgcccgtcgaccaagaggtaccgactgattcccatctcacgccctttggattcagcctcgacccgccaagcggcttcgcttcggcggacgctctcgtagaggcgagtccaaaccctctggggtatcgtatgcggtcaccctgggaccggctgacgaacgtctcgacctacgggccctcgtggtccgaggaagatgacgagcccgacttctgttgggatttctccggacttggtaaccccagtgccatgcgggacttcatgaccgcatgcgactactgcctttccgaccgttccgacggtagccgcagcctcggcgacgaggactgcggcccaagtcgtgaatgtttccacgtcgatctagggggtccctccgaaggcaaccatctcggccttcagccgtgccatacgacgggtgccgttcccgacccggttccgacccccgactactatcacaaagtactcgggggagacgagaccggaactgtggctcgcggactacggctggcctgccaactgggtggaacggacgatgacaacctcatcatccgcaacctccccctgttcctctccgtcaccgctcgcgcctggttggagcacctgcctccagggcagatctccaactgggacgacctggtccaagccttcgccggcaatttccagggcacgtacgtacgccctggaaactcctgggacctccgaagctgccgacagcagccgggagagtctctccgggactacatccggcgattctcgaagcagcgcaccgagctgcccaacatcaccgattcggatgtcatcggcgcgttcctcgccggcaccacctgccgcgacctggtgagcaagctgggtcgcaagacccccaccagggcgagcgagctgatagacatcgccaccaagttcgcctctggccaggaggcggttgaggctatcttccggaaggacaagcagccccagggccgcccaccggaagatgcccccaaggcgtcaactcagcgcggcgccaagaagaagggcaagaagaagtcgcaagcgaaacgcgacgccaccgacgcggaccttgtcgccgccgccgagtacaagaaccctcggaaaccccccggaggtgccaacctcttcgacaagatgctcaaggagccgtgcccctatcatcaggggcccgtcaagcacacccttgaggagtgcgctatgctttggcgccacttccacagggtcgggccacccgcgaagggtggcaggggtcacgacgacgacaagaaggaagatcaccaggcaggagagttccccgaggtccgcgacagcttcatgatatacggtgggcaagcggcgaacgcctcggctcggcaccgaaagcaagagcatcgggaggtctgttcggtgaaggtggcggagccagtctaccttgactggtccgacaagcccatcaccttcgaccaagccgaccaccccgaccacgtgcctaccccggggaaatacccgctcgttgtcgaccccgtcatcggcgacgtcaggctcaccaaggtcctcatggacggaggcaacagcctcaacatcatctacgccgagaccctcgggctcctgcgtgtcgatctgtcctctgtccgggcaggcgctgcgcctttccacgggatcatccccgggaagcgcgtccagcccctcggacaactcgaccttcccgtctgcttcggaacgctctccaacttccgaagggagacccttacgttcgaggtggtcgggttccgaggaacctaccacgcggtactagggaggccatgctacgcgaagttcatggccgtccccaactacacctacctcaagctcaagatgccgggccccaacggggtcatcaccgtcggcctcacgtacaaacacgcgttcgaatgcgacgtggagtgcgtggagtacgccgaggccctcgccgagtctgaggccctcatcgccgacctggagagcctctataaagaggtgccagacgtgaagcgtcacgccggcaacttcgagccagcggagacggttaaatccgtccccctcgaccccagccgcgacgcctccaagcagatccggatcggctccgagctcgatcccaaatag

SEQ ID NO: 114909 - DNA, 482 bp, Zea mays
  Clone ID: MRT4577_36279C.1
agccttccgggttgacctaaagttgggcctttcttttttccagggttggcaaccacccttgaaaaatgctatttcaccttggttaaatctggttgccaaaacacattttttgggggttttggagggccatggagaaaaattcgttcccaattcctgtgcaaaatatctgcatggccaagccctaaaaagcaaagcctattcaactggggacctaggcactgttgcccataaagcttttttaagaagggatgaaatgatccaaggccagaaaggttgccaagaactatctgcacttgaagacaaattaaacaagttaatgggaataataaaaggatggattgggtctccaaggggcagggttccaattaatcaccaaaatgatgggccttcaaaggagggacctaactctgactttgctgggccaacatgtggaagtccagcgtgtgtagcattaatataaaccacccaactggtggtggcaa

SEQ ID NO: 114910 - DNA, 443 bp, Zea mays
  Clone ID: MRT4577_3627C.1
ttgagctgtcaggtcggagctcctctgtgtaacgcttgcctggaactgcttcagtgatttggatggttattgagatgagtgcgagcagataactgcaagggtgcacacctggatgctcattaagaggtgtgactaacaatcaaagaagatcaagaggagcaaggatgttaaaaagatcaaagtgcactagatacaagtactagtacacactgggcgtctgctatactggaacaagcctaccagacgcatcaatctattgccataggtttgatcttctatgacctaatagatagtatacatgccagcgtttaacaaaactacgactgctaaaacattagtagcacacaattctactgtatgtaattacataacctaatctattacacctgtaatatcaaaaatggccggacctagcatccttccaaaaattccagcatacctaa

SEQ ID NO: 114911 - DNA, 720 bp, Zea mays
  Clone ID: MRT4577_36280C.1
atgtcgggtgttgtcctcgcacctgagacaacgacgggtgtcgcttcccagcaacgtgccaaccccaagcggactgatgacgccagcacccttgcgagggacttgtcagacattagtctcgcacccgagataacgacacattccatccccgatgcgacttcaccaccgtccatcaaccaggaggtaccatcagttttccatcctgttccctttagattcagcttcgatccaccaagcgaccccacttcggtgagcgctttcgcaagggcatatcctgaccttctggggtaccatatatggtcaacttgggaccgactgacggccgtctcaacctccggacccgcgggttccgaggaagaggatgaccccgactttagttggaatttctccggactccgtgaccccggtgccatgcgagacttcttgtccgcatgtgaccactgcctctctggctactctgacgatggccacagtctcgacgacgaggattacgactcaactcgcgagtgtttccacatcgatcagggggatcacgacgaagacgaccaccttggcatgccaggaaacgacgacgcccatgtgcctgcatctcgtgttgagatcccgcgggagctagctgtggcccgggtccgtgcgggaggtcagggcacacagctcgagcaactccacgagatgcataccaagcttgacgaagaaacgggacgacttgtgcagctctga

SEQ ID NO: 114912 - DNA, 317 bp, Zea mays
  Clone ID: MRT4577_36281C.1
cggattcccagggcctaccacacccttccgtagaattaaaccttgcgcctttttcggctgttttttcctgaaggcccccacctccttaggaatgacttttttaaccatccgggaggtaatcctcctgtccctaatttccttttaccgccttttaagcccctacaaggcccccccttcttcggccctcggaagcaaggccttctaaatccccgcctaccccccctaaaccccttgaagaaaggcctctttccaattctttgttatccgtagccaaccatttataaatggcttatcgaatttttacttcgttaatagtt

SEQ ID NO: 114913 - DNA, 401 bp, Zea mays
  unsure (1)..(401): unsure at all n locations
  Clone ID: MRT4577_36282C.1
aaattganatggggtatgaggatgagnnnnnagaannggagattgaggaaggagttgaagaagagnntgagaaaaatgaagatngtnntgatgaagttataggtggtgagggtgaagataaggaanaggaaaagaaaaagngtgaatgtaaaataanaaaatanatgaagaagtangaangtgngngnatnntgngtanangagnnttgnagataagnatgaatggtnnagtnatggttgagnttgagggtgaaantganntttttgagattngaatgaaggagntgagagngngnaagatannnnttangatnaganggtanttaattgatggaagntatgaagaatggggagtagaagagntnattgtggaggaattttggaaangnnaggttggtgga

SEQ ID NO: 114914 - DNA, 417 bp, Zea mays
  Clone ID: MRT4577_36283C.1
ctcgactgcccgcgcgacggggaacgcgcttcatagtgatacatgattccccgacgccgtggtctctgcaccgacgccgcaagccttccttgcggtgaccaaccctgcgagcgaagcgtacccgggcgccgagggacgctcagaggcgccgaacggtacgccctgtttccacatatggctggggcggatgtccgactcggagcggtgctcgctgccagaaagacggacggggggagagctcctcgaccgttaaggaggaatgaggaacgactatgtgtccgacgacgacgtccccctgcaagggaacctggattacttgcggaagaactacgccctcgtgagctcctacgagctggggggctcattaatgagaacaagttattcgttactaatactgctgggagtggtccgcgcttg

SEQ ID NO: 114915 - DNA, 290 bp, Zea mays
  Clone ID: MRT4577_36284C.1
cggacgcgtgggcggacgcgtgggaaaaaattaaagaagaaacaacaaaaaacgggagacgggaaaactgaaacaataggacagaaaacttggggcacctaacgccctaccgtgggtcgttgcgggtgtctagcataggctccccttgcttgcttggatcctgactttaaatgccttcactaatattcccgcacacggtagcttttaaccactggctgttcaaccaaacgcgatgaccaactgtgtgaatcaaccgttcctctcgtactaaggttaaaatgctactcgcg

SEQ ID NO: 114916 - DNA, 397 bp, Zea mays
  unsure (1)..(397): unsure at all n locations
  Clone ID: MRT4577_36285C.1
ccccaggacagcctctcagcagagagggaccggatcagnacggnngcaccatancttgtacangnagacgagagggagacacccacaatcgcagcggagggcaagccgcccgngaagcaacaaggcagcncgacaccgaccaaagcnggngnggagaaccncgacacgacagaagcaaccacccgagccncaaagaacaaggcccagagcagggcaaccagacagaagaagaaaggcacagaacaccagcaagcgaagccgcagaaaaaacaaccggggagcccaacgagggaagcacccaagaagaaacagaggagcgcacacagcccgcaanccaggcgggaaacacggccgagccaacggcggaaaggaaacggccaacgcgcggggagaggcg

SEQ ID NO: 114917 - DNA, 627 bp, Zea mays
  Clone ID: MRT4577_36286C.1
ggatgaacgggatcggggggcttattactggtggtcgggtcctcaaaagacagtcaaacaagacaaccaagtaggaagggggaggggaccggaaagcccggaggaatcctacgggattggtaaacctggttctggacctggaccttgttcggccttcaacccaagcccagtttaagaaaaaacgggcattaaatcccacccccttaacacgatgtaattcgtgccggcggggcccttgaacttgctggcggggtacttggagtacaggacagggcttcccggggagaccgacagggcgagccttttgccggccttgtccaaggggcctgggccaaccggttccaccggtccgatagaagggttcttcttggcagtttccggaagcagtaagccttctggagttttggctttaacttcaacaaccttgattaaaacaccggcggtcaaaagccttatggctttcacggcattaggttctaaaatacctataacggcattctttttgagaaccaaatgggtgggatcggtcaacgcgaccttggtttcaggggacttaaaatacacaacctgagctccaacctgaatgctgacattaactttcttatccccaattattctttctttttc

SEQ ID NO: 114918 - DNA, 301 bp, Zea mays
  Clone ID: MRT4577_36287C.1
gctaatggctagtcatggattaaaaacaaaggcgggggagccaatggtctttggtgcaagctcatcccaaaaatcaatgaatgctgcacatttttccgggaacaaagatattcttatagggggatgtggccctcctttaaccagtggtgctccaatggctcacttgttcgtaaacactgctgaatgggaacactttcgtgagcgccataaccctcacgcttatatgatggaacacgaagaaatggataacactcttatgcacggccctggagacagataaaatcttctgagcgatgatctc

SEQ ID NO: 114919 - DNA, 235 bp, Zea mays
  Clone ID: MRT4577_36288C.1
gggagtctgggtctcttcagcgccattagcatgtgctgcaccgttctcctgtgcctcctctagcttgtgcttctttttctttttcttcttctcggttccaagctcagcttctccatcagccacgttggagggcttatccacatccattgcatcaccatcagtctcggttttggtcttctttttcttgcttttcttggcagatgtgtccgccttctcattatcatcatcatccatt

SEQ ID NO: 114920 - DNA, 668 bp, Zea mays
  unsure (1)..(668): unsure at all n locations
  Clone ID: MRT4577_36289C.1
cctcgaggccggccggggtgctcgtcgtcccttcgttacccgggtcagtgccgccgtcggtagcagaggagcagtaggtggccagtcagtcagccaattgtccgctcgtccactccgttcgagctctcctactcttcaccgcccacccatccatccatccatccatcggcgagcgcgagagcacactgttgcattgctgatcgctccgtctccgctgccgacgaggacgaggaagaacgagggagagacgcagacaggctgcgttgcgccatgaggagagcaggggggctatcgcgcgcgtgccacggcgcggcgccggcggcgggggtcatgcgggcggcggcgtccgcgttcttcgcggggtaccactgcttcacctccgtggcggcgctgctggcgctgccgttctcggcggcggtgctggtggccgaggcggcggcggcggcgccagcgccggcgccggtggcgctgcgcgcgctagcggcgcggctgcgcgccgtgttcgccgccgcggggttcccgccctcgcccttcttcgcgctgctcgaggccaagctgtcgcagaccgtcttcacgttcgccgccgcgctgccgttcgcgctcaccttcctgctgctcgccaaggcctgcgtcgncgccatgctcccgggacgacgccgcgtcgccga

SEQ ID NO: 114921 - DNA, 502 bp, Zea mays
  Clone ID: MRT4577_3628C.1
actgtcattataaatatatttacattttgttttttattgtcactgacagtgccccgcgttcgtacaacacagattacaagttttcaatcaatcaacatacatataggctgcctcttaacacagcttacactagttggtcgataaaaatcgagttacgatatgtaggggcccaaaaaaatgccatacagaactaaagccatctaaaaaaggtcgagacacgacaggtccttgggaacacccaaccggtccatggaacgggtaccaccaaccagagggggataaatggtttttataaagaatatgagccattaactttctatagttagaaggggaagaagaagcctgacatgctacaaatttactgaagaaagaaggcttaacttgcacacatacttgagaaaaaagggatgaggatactggggaacaaatcaaacgagtcgatggacataaagtcgaaattgaacatttgatcctaaagggaaattcatcgccatagccatcc

SEQ ID NO: 114922 - DNA, 840 bp, Zea mays
  Clone ID: MRT4577_36290C.1
cgtctcgaggatccccgtttccgtctgggcttcttgcattctgggacagccaagtctgtgacttgcacgtactcccctgccctcaacaagatgttttgccaactggccaagacctgccctgtgcagctgtgggttgattccacacccccgcccggcacccgcgtccgcgccatggccatctacaagcagtcacagcacatgacggaggttgtgaggcgctgcccccaccatgagcgctgctcagatagcgatggtctggcccctcctcagcatcttatccgagtggaaggaaatttgcgtgtggagtatttggatgacagaaacacttttcgacatagtgtggtggtgccctatgagccgcctgaggttggctctgactgtaccaccatccactacaactacatgtgtaacagttcctgcatgggcggcatgaaccggaggcccatcctcaccatcatcacactggaagactccagtggtaatctactgggacggaacagctttgaggtgcgtgtttgtgcctgtcctgggagagaccggcgcacagaggaagagaatctccgcaagaaaggggagcctcaccacgagctgcccccagggagcactaagcgagcactgcccaacaacaccagctcctctccccagccaaagaagaaaccactggatggagaatatttcacccttcagatccgtgggcgtgagcgcttcgagatgttccgagagctgaatgaggccttggaactcaaggatgcccaggctgggaaggagccaggggggagcagggctcactccagccacctgaagtccaaaaagggtcagtctagggtaccgagctcgaat

SEQ ID NO: 114923 - DNA, 315 bp, Zea mays
  Clone ID: MRT4577_36291C.1
ccgattttgacctaggtcatgcacgagagctacctggcggagcgccgcaagctcggggtggtggaccgctgcatgtagagagggcagatcctccgagagcggaggtggaacaacgagatgatcgtcaaggggctgcactcatacgatgggtatgtgctgatctcgagcgcgcgacacatgccgacttgaatgttcgacggtagtatcgaaatagatcttgttataaccgggtatagaaagtgtctctactactggtttcaccaaagacttaacaacgactgaatatactagctaggggactgcagtaaattggta

SEQ ID NO: 114924 - DNA, 123 bp, Zea mays
  Clone ID: MRT4577_36292C.1
aacgaagggggggggttgacatacaacttctattaactgattatcaaagttggtgaacgtgataaaaactatggattggggtacagtttttatgaacttgttcgaggttactttataagaaga

SEQ ID NO: 114925 - DNA, 646 bp, Zea mays
  unsure (1)..(646): unsure at all n locations
  Clone ID: MRT4577_36293C.1
gtgngccatgnngcgtcgtccatgcctctccgcntaccacgcgtgccactccagcaggggggcnnggcctgtcctgagttctcctgggctcaggnagcnntcctgcgtcgcttgcccatgcccgccggnaatggcctacctccgnaccgagcttcatnngtccgccccgtctctctttcaggaacgccnagcgctggtcggcaccgagctggnncgggccgnctggcgggctgcctgacgggagnngcgaagnnctgaaggggtggcctnntcagatgggtntnncggccgcnanntcgggccgcannnacttccnttgcggtgncnntggcaccggnngcgcccggcgacgnnncctcgcctcctttcgacccgtcagtcgccatttcaactgacaccggnagggctgtcaaggcannggcgtcccacgctnngctcaagtaccgaactccacgcctttcggcatcttcgatggccgnnacgtcaagccctgtcggcgacaactgccatnnctcctgtcgacggcaaggggtcatcaagnggtcgtgtcccgacccgcannacccctagcaacctnngccgtggggcgaggctcnnggcatcgaccctcnngtcatcgaggggcccaccgggcgtcnnttcgtcg

SEQ ID NO: 114926 - DNA, 664 bp, Zea mays
  Clone ID: MRT4577_36294C.1
gccggccgggtccggtaaccacgcctgcagagcagcaagactcgtggctaccagcctagctagctaccgccgcgatccactatcatcgctcgccgagtttcctgcggcggccggcgggcacctacatctcctctacctgactggctagtcattagcacagccagtacgtacgtgtagctcgcccggccggtgctcgacgacacagtgaattggcgacgcacgtaggaggccagcagctggggttggagatgaccatgccagtgaagctgactcctgcctccctctcgctgaaggcggtctgctgccgcttcagctccggcgggcatgcgctgcgcttaggttcctccctacccccctccccacaggacgccgacgcaacggagcacgtcgtcgtctacgacgcgctctgcggctgagggttagagagcctcgctcccttcgccccgtgtcattttcaagtaaaacacttttaacttcggtcaaatatacatacatgcatgtggccactccaatggtctagacatgtgaccactccaacggtctatacattggttcattaatgtatatatgtccatgtaggcctcttgacgcgctctaatggtcctaacattttagaggcacaccactattactttaggaaaaaaaaaaaaaaaaaaggccccta

SEQ ID NO: 114927 - DNA, 2038 bp, Zea mays
  Clone ID: MRT4577_36295C.1
aacggcacacctccgtgccgctggtggtgccgcgggtgctggcccggccgcggtcgcggcggccctgccggccggtgcttccaaggcgtccggacgccgtatgggagggcacaggagcccattgaaggtgtcacacacgcccgagcattgtcagcactataaagcagttatccagggcaggacaggggatatgactgttaacaatgtcccacatgagatggaagctcattctgcagtgcgtcaaatagaaacagaaatggcaacaaagtggaaccgtcaattcatgaaagcttcccatgagtgcagattatgattacattgaacacaaccatagggatgctggtggagaaatctattcactgagggaggagcttatggtggcccaggaccggattcatgagcttgaagcagagtgtcgatctacaaagaagcagcttgatcacctggcaaagaatattgcagaggaaaaggcttctttgaagagcaaggaacatgataagtttcaccacatcttacatgcatcgagctaagaactgaatcgggagaggaaacagcgacagcgagcagaaatgatgaactccaaactgctcaatgatctatctgagatgaagtttgctgcaaagcgttatttgcaagattatgagaaggagaggaaggcacgggtgctcatggaagaggtttgtgatgaattagcgaaggagatcacagaagacaaagctgaggtggaaggctatgagaagtgaatcgatgaagatcagagatgaattggaggaagagaagaagatgcttcccatagctgaggtttggccgtgaagagagggtacaaatgaagcttgctgatgcaaaactggcacttgagaataagtattctcagctgagcaagcttcagaatgaactcgaggatttccttcaattccaatcaggctgtaatatggaaaaaggaacggtaagggaagcagagaggctcaaagaagcaatctgctcttctaggataaatggtatcaaggagttttcgtacaaggctcctccttcttcagaagacatttttgctgtatttgaagaactcaagcaacgagaagatactgctgagaaggtgattatgcaatgtaacggaaatagacccaagggtcgcggctcaagagcacacacagccagtcctgaaacggacacgttcttggagaatcaaccaaacagatattgcaatgaacctcgtacccgaaatgaggcagcagaagatgatagtggctgggaaactgtaagccaagttgaggagaatgggtcttgtaattcaccgggcggaagtgaaccgtctgtaaatggcttctgtggagaaaacgatgcttccgtaagtggaaccgactgggatgaaaactgtgacaatgatcaggcacacagtgagatcagtgaagtttgttcaacagcagcaggcaggtctcggaacaaaagatcattcgccggactatggagatcatcaaacaccgtggaccaaaagaagatgggatccaatacactcaacggtaggtcatcaaatgccaggatgtcaaatgccaccgaatctgctgacctgaagaatagcgaagtgtgtgacagtccgcacatcacagggcagtggaggccggacctgctaaacccggacatcgttcgagctataaaaggatgcatcgactggccccgaggagtgcagaagcagagcttgaggtccaaggttctggaggcaaggattgacggcagtaaggtccagctgcgtcaagcactgaagcagaagatatagcgtggtcagccggtcacattcttgctggtgggggctttcttcagctggaggcctggagcaggcagcgacccgcgagatgaatttctgcagcagtgggtatctcagttgatgcctgacggcccactgacctgctttgcttccgtaatgaaattgttcgctcagtgccccgttgtaatcacgcctgtcctgtgtagaaatactttaatcaataagcaatgaaatcattcgaccacactaaaaaaaaaaaaaaaaaaatctagatcgcga

SEQ ID NO: 114928 - DNA, 557 bp, Zea mays
  unsure (1)..(557): unsure at all n locations
  Clone ID: MRT4577_36296C.1
gggagtcagtgagggacgaaagaagtcccctaattctttctatcgaattangcgccttcttcctctgcctgccctctttcttcgtactatacccatcacttgtacttttgccgtgtggggtctggacctcgtcggccccttgcagaaggcacccgggggctacacgcacctgttgctcgccatcgacaaattctccaagtgcatcgaggtccgacccctaaacagcatcacgtccgagcaggcggtggcgttcttcaccaacatcatccatcattttggtgtcccgaactccatcatcaccgacaatgtcacccagttcaccgccagaaagttcctggacttctgcgaggatcaccacatccgggtggactgggccgccgtggttcaccccatgacgaatgcgcaagtagagcgtgtcaccggcatgattctacaatgactcaagcctcgaatctacaacgaactcaacaagttcggcaagcgctggatgaaggaactcctctcggtagtctgcaccctgacgacaacgccgagccgagccccagccttcacgccat

SEQ ID NO: 114929 - DNA, 3972 bp, Zea mays
  Clone ID: MRT4577_36297C.1
atgcaggccaagctcgacgaggaagcaggacaacttgtgcagctccggcaaaacattgagcaggagtgggcaggccgagcactagccggagaagcgcgtcatcaggcccaggacgtccagcgccgtatcactgacgatgccagggcaaggctgcccccggcttctagtggagtcggccagaacctgggtgcagcgacaatactactccgagcgatgccagagccatccactaccgaggggcggcgtggaacggacgatgacaaccacatcatccgcaacctcccccagttcctctccgacgccgcccgagcctggctggagcatctgcctcctgcgcagatttccaactgggacgatctggtcaaagccttcgctggaaacttccagggcacatacgtgcgccctgggaactcctgggatctccgaagttgccgccagcagccaggggaatccctgcgggactacatccggcggttttcgaagcagcgcagcgagctgcccaacatcaccgactcggatgtcatcggcgcgttcctcgccggcaccacttgccgcgacctgatgagcaaactgggtcgcaagactcccaccagggcgagcgagttgattgacatcgccaccaagtttgcctctggacaagcagcctcagggacgccagcaggaagacgccccgaggcgtccgcccagcacagcacgaagaagaaaggcaagaagaagtcgcaagcgaaacgcgacgccgccgacgtagatcttgtcgccactgccgagcacaggaacccttggaagcctcccggaggggccaacctgttcgacaagatgctcaaggagtcgtgcccctatcatcagggtcccgtcaagcacacccttgaggaatgcgtcatgcttcggcgctacttccataaggccgggcccccggcggaaggtggcaaaggccatgacaaagacaagaaggagggcaacaaggcagaggagttccccgaggagcgccgggaggtctgctcggtgaaggtggcggcgccagtctacctagactcgtccgacaagcccatcaccttcgaccaagacgaccaccccgaccgcgtgccgagcccaggaaagtacccgctcgttgtcgaccctgtcatcggcaatgttagactcactaaggtcctcatggacggaggcagcagcctcaacatcatctacgccgagaccctcgggctcttgcagatcgatctgtccacgatccgggccgggagaccgtgctacgctaagttcatggccgtccccaactacacctacctcaagctcaagatgtcgggccccaacggggtcatcaccgtcggatccacataccgacacgcgtacgaatgtgatgtggagtgtgtggagtacgctaaggccctcgccgagtccgaggccctcatcgccgacctggagtgcctctccaaggaggtgccagatgcgaggcgccacgccgacaactttgaaccagtagaggcggttaagtccatccctctcgaccccagcaacgacgcctgcaagcaacctctgcgtcgtttcgacgaagaaaagcgcagagccataggcgaggagatccacaagctgatggctacggggttcatcaaagaggtattccatcccgaatggttagccaaccctgtgcttgtgataaagaaaggtgggaaatggaggatgtgtgtagactacactggtctaaacaaagcatgtccgaaggttccctaccctctgcctcgcattgatcaaatcgtggattccactgctgggtgtgaatccctatcattcctcgatgcctacttagggtatcaccaaatcaagatgaaagagtccgaccagctcgcgacttctttcatcacaccttttggcatgtactgctatattactatgccatttggtttgaggaatgcaggtgcaacataccaaaggtgcatgaaccacgtgttcggagagcacatcggccgaacggtcgaggcttacgtcgatgacatcgtagtcaagacgaggaaagcctccgacctcctctctgaccttgaaacgacattcaagtgtctgagggcgaagggcgtgaaactcaaccccaagaagagaagccctcttgatctacgtagtcgcaaccactcaggtggtcagcgccgcgatcgtagtcgagagacgagaagaagggcatgcagtgctcgtccagaggccggtctacttcatcagcgaagtgctatccgagaccaagatccgctacccgcaaattcaaaagctactgtacgcagtaattctgacgcggtgaaagttgcgacactacttcgagtctcatccagtgactgtggtgtcatccttcccctgggggagatcatccagtgccgagaggcctcgggtagggtagcaaagtgggcggtggagatcatgggcgagacaatctcattcgctcctcggaaggccatcaagtcccaagtcttggtagattttgtggctgaatgggtcgacacccagctaccaacagctccgatccaaccggaactctggaccatgtacttcgatgggtcgctgatgaaaacaggagcaggtgcgggcctgctcttcatctcacccctcggaaagcacctccgctacgtgttgcgcctccatttcccagcatcaaacaacgtggccgagtacgaggctctggttaaccggttgcgcatagccatcaagctaggggttcggtgcctcgacgctcgtggcgactcacagcttgtcatcgaccaagtcatgaagaactcccactgccacgaccggaagatggaggcctactgcgacgaggttcggcgcctggaagacaagttctacagactcgagctcaaccatgtcgcccgacggtacaacgagactacggatgagctggctaagatagcctcggggcggacaacggttcccctagatgtcttctccagagacatacatcaaccgtccatcaagaccgacgacacgcccgagcccgaggaggcctcggcccagcccaaggcaccctcggccgccgagggtgaggcactgcgtgtcgagggagagcggaatggggggtgtcaattctacgcgagacagacgcacctgcccgctcaggccctgcagacaatacccatcacctggtcgtttgctgtatggggtctggacctcgtcggtcccttgcagaaggcacccgggggcttctcgcacctgctggtcgccattgacaaattctccaagtggatcgaggtctggcccataacgagcatcaggtccgagcaagcggtggatttattcaccaacatcatccatcgcttcggggtctcgaactccatcatcaccgacaatggcacccagttcactggcaagaagttcctggacttctgcgaggaccaccacatacgggtggactgggcctccgtggctcaccccatgacaaatgggcaggtggagcgtgccaacagcatgattctacagggacttaaaccgaggatctacaacgacctcaacaagtttggcaagcggtggatgaaggaactaccctcggtggtctggagtctgaggacgacgccaagctgggccacgggtttctcgccgttctttctagtctatggggccgaggctatcttgcccatagacttagaatacggttccccaaggacaagggcgtacgacgaccaaagcaaccagaccagccgagaagactcgctggaccagctggaagaagctcgggacgtggccttactacactcggcgcgatatcagcagtctctgcgacgctaccacgcccgaggggttcggccccgagacctcccagtggaagacttggtgcttcggctgcagcaagacgcccgagggtgccacaagcttactcctccttgggaggggccattcatcatcgccaagattttgaagcccggaacatacaagctggccaacaatcaaggcgcggtctacagcaacgcttggaacatccgacagctacgtcgcttctacccttaa

SEQ ID NO: 114930 - DNA, 569 bp, Zea mays
  Clone ID: MRT4577_36298C.1
tccaccgcggtggcggccgccctttttttttttttgcaggtaaaaagtcattcgtttattttagacgagcaatccctttccattttccattcatggaggacaacacgcccgatatagacaaataggcacgcgcatcaaaagcacccaccactcatatacttcacacattacaactacgaacctcatgaccgcgacagctcaggctctctctcccctgatgcggtggacgatctggatgtccttgggcatgatgctgaccctcttggcgtggatggcgcagaggttggtgttcttgaagagccccaccatgtacgccttcgcggactcctgcatcgtcgtcacgggcgaggactggaaccgcaggcccgtcttgaattcctgcggtatctcgaggacgaagctctggaaggggagcttgcggatgagcatctacgtgctcttctggtacttgcggatctcgcgtgacgcgactgtgccatggcggaagcggagcgacttcttcacgccgtccgtggccctggcctacttgcgcgccctcttggtggtcagctgcttcctcggccccttgc

SEQ ID NO: 114931 - DNA, 801 bp, Zea mays
  Clone ID: MRT4577_36299C.1
atggcaaaggccgagacgacgacaagaaagagggtgacaaggaagaggagttccccgagcgaacgcctcggctcggcaccgcaagcaggagcgccgggaacgccagtctacctagattggtccgacaagcccatcaccttcgaccgagacgaccaccccgattgcgtgccgagcccaggaaggtacccgctcgttgtcgatcctgtcatcggcaacgccaggctcaccaaggtcctcatggacggaggcagcagcctcaacatcatctacgctgagaccctcgggctcttggagatcgacctgtccacgatccgagccagtgcggcgccctttcacgggatcgtccccggaaagcgcgtcctgccccttgagcagctcgacttgcccgtctgtttcgggactccctccaacttccgcagagaaaccctcacgtttgaggtggtcgagttccgagggacctaccacgcggtgctggggagacagtgctacgccaagttcatggccgtccccaactacacatacctcaagctcaagatgccaggccccaacggggtcatcaccgtcggatccacgtaccgacacgcgtacgaatgcgatgtggagtgcgtggagtacgctgaggccctcgccgagtccgaggccctcatcgccgacctggagtgcctctccaaggaggtgccagatgtgaagcgccacgccggcaacttcgaaccagctgaggcggttaagtccgtcgccctcgaccccagcaacgacgcctgcaagcaagtccggatcggctccgagctcgaccccaaatag

SEQ ID NO: 114932 - DNA, 228 bp, Zea mays
  Clone ID: MRT4577_3629C.1
gggccgaaaatagcgatgttttaccaaaattaagggtccccaaaaaccctttttaaaagggggttaaattaaaaaaaaatggggttcgggttggcctgaaaaaaactgaaccaccacgggtttttaaaaaaagctttccccctcccattaacaagggccgtggaacattttttccatcagggatttttccgcatcagggagggggtgcccaaacgcagctccaaaacc

SEQ ID NO: 114933 - DNA, 638 bp, Zea mays
  unsure (1)..(638): unsure at all n locations
  Clone ID: MRT4577_36300C.1
ctttttgcttcctctccacgagcgcgcgagcgcgacgacgtcagcaacaacgcagactaccccgcagtcgccgagggagcaattccgcccccaattggccgccggaacccttcttccttcccctcccacggagtcgctgccgcgctcagatagcccagccgagccggcgacgacgaggacaggaccctagccctaataatccggtcccccacatggcggggaccttccgcgagggcgcggggccgggggacgcccatgcgcccccgcccacgcctacgccgcccctctcgcagttcctcgcgctggatgcgctcccgtcctggggctccgaccccaagcagccgcactggcgccaccccgagctccgccgggcgctcgcctccgacgaccaagccgacgagctcaggcggatccgtgccagcgtccaggactccgcgggcaaggccaaggagaaggtcaggtcgctgcacgaggcaatccagaagctcgacaagtacaagaacattgtcacccgcaaacgccagcgcgccacagaggcgtcggccgcgcccgacaagctgggccctgccggcgcctnctnctncggcgcgctcaggatgggcgcgcagaacaactctgctgtccttagcgagcgcaaa

SEQ ID NO: 114934 - DNA, 2640 bp, Zea mays
  Clone ID: MRT4577_36301C.1
atgccgttcggtctgaggaatgcgggcgcgatgtaccagcggtgcatgaaccatgtgttcggcgaacacatcggtcgcacggtcgaggcctacgtcgatgacatcgtagtcaagacaaggaaggcttccgacctcctctctgaccttgaagtgacattccggtgtctcaaggcaaaaggcgtcaagctcaatcccgagaagtgtgtcttcggggtgccccgaggcatgctcttggggttcatcgtctccgagcggggcatcgaagccaacccggagaagatcgcagccatcaccagcatggggcccatcaaggacttaaaaggtgtacagagggtaatgggatgtctcgcggccctgagccgcttcatctcacgcctcggcgaaagaggcctgcctctgcaccgcctcttaaggaaggccgagagcttcacttggacccctgaggccgaagaagctctcggggacctgaaggcgctcctcaccaaggcgcctatcctggtgcccccagctgatggagaagccctcttggtctacgtcgccgcgaccactcaggtggttagcgccgcgattgtggtcgagaggcaagaagaggggcatgcatcgcccgttcagaggccagtttacttcgtcagcgaggtactgtctgaaaccaagatccgctacccacaagttcagaagctgctgtacgcggtgatcctgacgaggcggaagttgcgacactacttcgagtctcacccggtaactatggtgtcatccttccccctgggggagatcatccagtgccgagaggcctcgggcaggattgcaaagtgggcggtggaaatcatgggcgagacgatctcgttcgcgcctcggaaggccatcaagtcccaggtcttggcggacttcgtagccgaatgggtcgacacccagctaccgacggctccgatccaaccggagctctggaccatgtttttcgacgggtcgctgatgaagacgggggccggcgcgggcctactcttcgtctcgcccctcgggaaacacctgcgctacgtgctacgcctccatttcccggcgtccaacaatgtggctgagtacgaagctctgatcaacggattgcgaatcgccatcgagctaggggtccgacgcctcgacgctcgcggcgactcgcagctcgtcatcgaccaagtcatgaagaactctcactgccgcgacccgaagatggaggcctactgcgatgaggttcggcgcctggaagacaagttctacgggctcgagcttaaccacatcgcttggcgctacaacgagactgcggacgagctggcgaaaatagcctcggggcgaacaacagttcccccggacgtcttctcctgggatctgcaccaaccctccgtcaagatcaacgacaagcccgagcccgaggcaccctcggtccagcccgaggcaccctcggtccagcccgaggcgtcctcgggttcagtccgaggagagctacccctcgaccaagccgaggctcggcgggtagcccgacgcgccaagtcgttcgtcttgttgggagatgagaaggagctctaccaccacagtccctcgggcatcctccagcgatgcatctccatcgccgaaggtcaggaactcctgcaagagatacactcgggggcttgcggccatcacgcagcgccccgagccctcgtcgggaatgctttccggcaaggcttctactggccaacggcggtggccgacgccactagaattgtccgcacctgtgaagggtgtcaattctacgcgaagcagacccacctgcccgctcaggctctgcagacgatacccatcacctggccctttgctgtgtggggtctggacctcgtcggtcccttgcagaaagcgcccgggggctacacgcacctgctggtcgccgtcgacaaattctccaagtggatcgaggcggtggcgttcttcaccaacatcatccatcgcttcggggttccaaactccatcatcaccgacaatggcacccagttcaccggcaaaaaattcttggatttttgcgaggatcaccatatccgggtggactgggccgccgtagctcatcccacgtcgaatgggcaagtagagcgtgccaacggcatgattctacaagggctcaagcctcggatttacaacggcctcaacaagttcggcaagcgatggatgaaggaactcccctcggtggtctggagcctgaggacaacgccgagccgagccacgagtttcacgccgttcttcctggtctacggggccgaggccgtcttgcccactgacctggaatacggctccccgaggacgagggcctacaacgatcaaagcaaccaagctagccgagaagactcgctggaccagctggaggaggctcgggacaaggccttactgcactcggcgcggtatcagcagtccctgtggcgctaccacgcccgaggggtccgaccccgagacctccaggtgggcgacctggtgcttcggctgcggcaagacgcccgagggaggcacaagctcacgcccccctgggaggggccattcgtcatcgccaaagttctgaagcccggaacgtacaagctggccaacagccaaggcgaggtctacggcaacgcttggaacatccaacagctacgtcgcttctacccttaa

SEQ ID NO: 114935 - DNA, 3090 bp, Zea mays
  Clone ID: MRT4577_36302C.1
atggcggccgacgacccgtccgccggcggcggaatcgacgacatcttccccgcgtggtggaagaacagcattcgagcttgccccgtcctctcccccgccaacggaggaggaggcggggcaaccaaggccaagcgggaggccgcgcttcgtcggctgtcgagcgaatcgacgtccccagcgccccaacggggggcgcgtcgggcgtcgacctcgcatttgagacgaaggcgagcgccgtccccccgcgacacgccaatcccgagcaagtggacgacgccagcgcgctcgcggagagcttgcaggacgtcgccctcgtacctgagacgacggtgcaatcagtccccgacgtggctatgtcgctgctcgtcgaccaaaagcctcaacccgcctagcgacctcgctttggcgggcgctctcgttgaggcgagtgcaacccctctggggtttcgcatgcggtcgccttgggaccggctgacagacgtctcgacctacgggccctctgggtccgaggaagatgacgaccccgacatctattgggatttctctggatttggcaaccccagtgccatgcgggactttatgaccgcatgtgactactgcctctccgactattccaacggtagccgcagcctcgacgacgaggactgcggcccaagccgcgaatgtttccacgtcgagctaggggatccctccgaaggcaaccatctcggcatgccggaggacgatgatctccctaggccagtgcctcgcgctgacatcccgcgggagctagctgtggtccccgttccggcggggggtcacgacccacagctcgagcaagtccgcggggcgcaggccaggctcgacgagggagcaggagcgcttgagccgatccgccgggacgtcgggcaggtatgggcgggccaacccccggccggagaaatacgtcacctgccccagggtctccagcaccgcgtcgccaacgacgccagggtcaggccgccgcccgcatccagtggggtcggtcagaacctggctgccgcagcgatgcttctccgcgcgatgccggagccatcaaccaccgagggtcggcgaatccagggagagctcaagaatctcctggaaggcgctgcggtccgacgggccgagagctctgcctcccgaaggcagggatacccctcggaacctcatgccgcgacttcccgattcatgcgggaagcctcggtctacatcgggcgcactcgcaacaccgcgcctgcggccccgggccacctcggcaacgagcaccatcgtcgcgatcgtcgggcccacctcgacgagagggtgcgccgaggttaccaccccaggcgtgggggacgctatgacagcggggaggataagagtccctcgcccgaaccacccggtccgcaggccttcagtcgggccatccgacgggcaccgttcccgacccggttccgacccccgactactatcacaaagtactcgggggaaacgagaccggaactgtggcttgcggactaccgcctggcctgccaactgggtggaacgaacgacgacaacctcatcatccgcaacctccccctgttcctctccgacactgctcgcgcctggttggagcacctgcctccggggcagatctccaactgggatgacttggtccaagccttcgccggcaatttccagggcacgtacgtgcgccccgggaattcctgggacctccgaagctgccggcagcagccgggagagtctctccgggactacatccggcgattctcgaagcagcgcaccgagctgcccaacatcaccgactcggatgtcatcggcgcgttccttgccggcaccacctgccgcgacctggtgagtaagttgggtcgcaagacccccaccagggcgagcgagctgatggacatcgccaccaagttcgcctctggccaggaggcgatcgaggctatcttccgaaaggacaagcagccccagggccgcccatcggaagatgctcccgaggcgtcaactctgtgcggcgccaagaagaaaggcaagaagaagtcgcaagcgaaacgcgacgccgccgatgcggaccttgtcgccgccgccgagtacaagaaccctcggaagccccccggaggtgctaacctcttcgacaagatgctcagggagccgtgcccctatcatcaggggcccgtcaagcacaccctcgaggagtgcgtcatgcttcggcgccacttccacagggctgagccacccgcagagggtggcagggcccgcgacgacgacaagaaggaagatcaccaagcaggagagttccccgaggtccgcgactgcttcatgatctacggtgggcatgtggcgaatgcctcggctcggcatcgcaagcaagagcgccgggaggtctgctcggtgaaggtggcggcgccagtctacctagactggtccgacaagcccatcaccttcgaccaagctgaccaccccgaccacgtaccgagcccggggaaatacccgctcgtcgtcgaccccatcgtcggcgacgtcaggctcaccaaggtcctaatggacgggggcagctgcctcaacatcatctacgccgagaccctcaggctcctgcgcgtcgatctgtcctccgtccgagcaggcgctgcgcccttccacgggatcattcccgggaagcgcgtccagcccctcagacgactcgaccttcccgtctgcttcagaacgccctccaacttccgaagggagactttgacgttcgaggtggtcgggttccgaggaacctaccacgcggtactggggaggccatgctacgcgaagttcatggccgtccccaactacacctacctgaagctcaagatgtcgggccccaacggggtcatcaccgtcggccccacgtacaaacacgcgttcgaatgcgacgtggagtgcatggagtacgccgaggccctcaccgagtccgaggccctcatcgccgacctggaaagcctctctaaagaggtgccagacgtgaagcgccatgccggcaacttcgagccagcggagacggttaaggccgtccccctcgaccccggtggcgacacctccaagcagatccggatcggttccgggctcgaccccaaatag

SEQ ID NO: 114936 - DNA, 3168 bp, Zea mays
  Clone ID: MRT4577_36303C.1
atgtccctcgacggcagctacgacatgatactccttccaccgccgcgcgacaacaacaatggcgaccgacgacccgcccgccagcggcggaatcgacgacatcttccccgcgtggtggaagaacgacattcgagctcgccccgtcctctcccccggcaacggaggaggaggcggggcaaccaaggccaaacgggaggccgcgcttcgtcggctatcgagcgaatcgacgtccccagcgccccaacggggggcgcgtcgggcatcgacctcgcgttcgagacgaaggcgagcgccgtccccccgcgacatgccgatctcgagcaagtggacgacgccagcgagctcgcggagggcctgcaggacgtcgccctcgtacccaggacgacggcgcaatcagtccccgacgtgactatgtcgctcctcgtcgaccaaaaggtactgaccgattcccatcctacattatttcgacccggcctcaacccgcctagcgacctcgctttggcgggcgctctcgttgaggcgggtgcaacccctctggggtttcgtgtgcggtcgccttgggaccgattgacggacgtctcgacctacgggccctctgggtccgaggaagatgacgaccccagcatctgttgggatttctctggatttggcaaccccagtgccatgcgggactttatgaccgcatgtgactactgcctctccgactgttccgacggtagccgcagccttgacgacaaggactgcggcccaagccgcgaatgtttccacgtcgagctaggggatccctccgaaggcaaccacctcggcatgccggaggatggtgatctccctaggccggcgcctcgcgccgacatcccgcgggagctagctgtggtccccgttccggcggggggtcacgacccacagctcgagcaagtccgcggggcgcaggccaggttcgacgagggagcaggagcacttgagtcgacccgccgggacgtcgagcaggtatgggtgggtcagcccccggccggagaaatacgtcacctgccccagggtctccagcaccgcgtcgccaacgacgtcagggtcaggccgcctcccgcgtccagcggggttggtcagaacttggcagccgcaacaatgctcatccgcgcgatgccggagccatcaaccaccgaggatcggcgaatccagggagagctcaagaatctcctggaaggcgctgcggcccgacgggccgagagctctgcctcccgaaggcagggatacccctcggagcctcatgctgcgacttcccgattcatgcgggaagcctcggtctacaccgggcgcacgcgcaacaccgcgcctgcggccccgggctacctcggcaacgagcaccatcgtcgcgaccgtcgagcccacctcgacgaaagggtgcgccgaggctaccaccccaggcacgggggacgctacgacagcggggaggatcggagtccctcgcccgagccacccggtccgcaggccttcagccgggccatccggcgggcaccgttcccgacccgtttccgacccccagctactatcacaaagtactcgggggaaacgaggccggaactgtggcttgcggattaccgcctggcctgccaattgggtggaacggacgacgacaacctcatcatccgcaacctccctctgttcctctccgacaccgctcgcgcctggttggagcacctgcctccggggcagatctccaactgggatgatttggtccaagccttcgccggcaatttccagggcacgtacgtgcgccccgggaattcctgggacctccgaagctgccagcaacagccgggagagtctcttcgggactacatccagcgattctcaaagcagcgcaccgagctgcccaacatcactgactcagatgtcatcggtgcgttcctcgccggcaccacctgccgcgacctggtgagcaagttgggtcgcaagactcccaccagggcaagcgagctgatggacattgccaccaagttcgcctctggccaggaggcggtcgaggccatcttccgaaaggacaagcagccccagggccgcccgtcggaagaaattcccgaggcgtctactccgcacggcgccaagaagaaaggcaggaagaagtcgcaagcgaaacgcgacgccgccgacgcggaccttatcgccgcattcgagtacaagaaccctcggaaaccccccggaggtgccaacctcttcgacaagatgctcaaggagccgtgcccctatcatcaggggcccgtcaagcacaccctcgaggagtgcgtcatgcttcggcgccacttccacagggccgggccacccacagatggtggtagggcccgcgacgacgacaaaaaggaagatcaccaagcaggagagttccccgaggtccgcgactgcttcatgatctacggtgggcatgcggcgaatgcctcggctcggcatcgcaagcaagagcgccgagaggtctgctcggtgaaggtggcggcgccagtctacctagactggtccgacaagcccatcaccttcgaccaagctgaccaccccgaccacgtgccgagcccggggaaatacccgctcgtcgtcgaccccatcgtcggcaacgtcaggctcaccaaggtcctgatagatgggggcagctgcctcaacatcatctacgccgagaccctcaggctcctgcgcgtcgatctgtcctccgtccgagcaggcgctgcgcctttccacgggatcattcctgggaagcgcgtccagcccctcggacggctcgaccttcccgtctgcttcggaacgccctccaattttcgaagagagactctgacgttcgaggtggtctggttccgaggaacctaccacgcgatattggggaggccatgctacgcgaagttcatggccgtccccaactacacctacctaaagctcaaaatgtcgggccccaacggggtcatcaccgtcggtcccacgtacaaacacgcgttcgaatgcgacgtggagtgcgtggagtatgccgaggccctcatcgccgacctggagaacctctccaaagaggtgccagacgtgaagcgacatgccggcaacttcgagccagcggagacggttaaggccgtccctctcgaccacagtggcgacacctccaagcagatccggatcggttccgggctcgaccccaaataa

SEQ ID NO: 114937 - DNA, 3111 bp, Zea mays
  Clone ID: MRT4577_36304C.1
atggtgctccgtttcgagagtcttgagttcatgtccctcgacggcatctacgacatgatactccttcccccgccgcacgacagcgacaatggcggccgacaacctgcccgccggcggcggaatcgacgacgtcttccccacgtggtggaagaacaacattcgggcttgtcccatcccctcgcccgccgacggaggaggaagcggggcaaccaaggccaagcaggaggcggcacctcgttggctgtcgagcgagtcgacggcgccggcgccccaacggggggcacgtcgggcatcgacctcgcgtctgagacgaagacgagcgtcgtctccccgcaacacgccaaccccaagcaaacggacgacgccagcacgctcgcgaaggacttgctgggcatcaccctcgtacctgagacgacggtgcagtctgcccctgacatgacttcgtcaccgcccgtcgaccaagaggtaccgaccgattcccatctcgtgccttttggattcggccttgacccaccaagcgactttgcttcggtggacgctctcatagaggcgggtccaaaccctctggggtatcgtatgcggtcaccctgggaccggctgacagccgtctcgacctacgggccctcgggttccgaggaagatgacgagcccgactttagttgggatttctccggacttggtaaccctagtgccatgcgggacttcatgaccgcatgcgactactgcctttccgactgttccgacggtagccgcagcctcggtgacgaggaccgcggcccaagtcgtgaatgtttccacgtcgatctagggggtcccggcgaaggcaaccctcttggtatacaggagaacggtgatccccctaggcctgtgcctcgcgttgacatccttcgggagctagctgtggtccccgtcccagcggggggtcctaacccacagctcgagcaaatccgcgagatgcaggccaggctcgacgagggagcaggaacacttgagccgttccaccgggacattgggcaggaatgggcgggccaacatccggccggagaagtgcgtcatctaccccagggcatccaacaccgcatcgccgacgatgtcagggtaaggccgccaccggtttccagtggggtcggccagaacctggctccagcggcaatacttctccgcgcgatgctggagccatctaccaccgaggggcggcgtatccagggagagctcaagaatctcctggaggatgccgcggtccgacgggccgaaagctctgcctcccgaaggcaggggtacccctcggaacatcgcgccgcgacttcccgattcatgcgggaagcctcggtccacacctggcgcacgcgcaacacagcgcctgcggccccgggtcgcctcggcaacgagcaccatcaccgcaatcgtcgagcccacctcgacgagaaggtgcgccgaggctaccaccccaggcgtgggggacgctatgacagcggggaggattggagtcccttgcccgaaccacctggtccgcaggctttcagccgggccatacgacgagcgccgttcccgacccggtttcgaaccccgactactatcacaaagtactcgggggagacgagaccggaactgtggctcgtggactatcagctggcctgccacctgggtggaacggacgatgacaacctcatcatccgcatcctccctctgttcctctctgacaccgctcgagcttggctggagcacctgcctccggggcagatctccaactgggacgacctggtccaagccttcgccggtaatttccagggcacgtacgtgcgccctggaaactcctgggatctccgaagctgccgccagcagccggaagagtctctctgggactacatccggcgattctcgaagcagcgcaccgagctgcccaacgtcaccgactcggatgtcatcggcgcgttcctcgccggcaccacctgccgcgacctggaggcggttgaggccatcttccggaaggacaagcagccccagggccgcctaccggaagatgtccccgaggcgtcaactcagtgcggcaccaagaagaaaggcaagaagaagtcgcaagcgaaacgcgacgccgccgacgcggaccttgtcgccgccgtcgagtacaagaaccctcggaaacctcccggaggtgccaatctcttcgacaagatgctcaaggagccatgcccctatcatcaggggcccgtcaaacacacccttgaggagtgcgccatgcttcggcgccactttcacaaggccgggccacctgcggaaggtggcagggcccgcgacgacgataagaaggaggatcacaaggtaggagagttccccaaggtccgcgactgcttcatgatctacggtgggcaagtggcgaacgcctcggctcggcaccgcaagcaagagcgtcgggaggtctgctcgataaaggtggcgacgccagtctacctagactggtccgacaagcccatcaccttcgaccggggcgaccatcctgaccgcgtgccgagcccggggaaatacccgctcgttgtcgaccccgtcatcggcaacgtcaggctcaccaaggtcctcatggacggaggcagcagcctcaacatcatctacaccgagaccctcaggctcctgcggatcgatatgtcctcggtccaggcaggcgctgcgccttttcacgagatcatccccgggaagcgcgtccaacccctcggacaactcgatctacccgtctgctttgggacaccctccaacttccgaagggagaccctcacgttcgaagtggtcgggtttcgaggaacctaccacgcaatgctggggaggccatgctatgccaagttcatggccgtccccaactacacctacctcaagctcaagatgccgggccccaacggggtcatcaccgtcggccccacgtaccgacacgcgtacgaatgcgacgtggagtgcgtggattacgccgaggccctcgccgaatccgaggccctcatcgccgacctggagagcctctctaaggaggcgccagacgtgaagcgccacgccggcaacttcgagccagcggagacggttaaatccgtccctctcaaccccagcagcgacgcctccaagcagatctaa

SEQ ID NO: 114938 - DNA, 6090 bp, Zea mays
  Clone ID: MRT4577_36305C.1
atgggtagtctccagcaacctctccagcctggcacgatgctgcctttgggagtctctagttggcgtccctcgacgacaactacgaaatggtactccttccaccgccgcacggcaacgacaatggccgccgtcagcccccccgccggtggtggaatcgacgacgttttccccgcgtggcgggagagcatcatccgggtctggcccgtcaccgtcccccccgcaggcggaggcggcggggcaaccatggccaagcaggaggcgagacctcgtccgctgtcgagcgagtcgacgacgagcacggccagcgtgggagacttccggtgtcgaccgaggctcaacggagccctgcgagctcggagccacaccccaacccaagtcggcgatagacctgtgcctctggaccgcttcctaagggttagcctcgtgctgggataggaccccggctgtcccggaaccacttggtcactcgatggatcccgtccctagggctcccatcctgtgccctttaggttggcggagaccccctctggctccggctccgcgcgacgctttaggagatgcgcatccaaaccttccggggtacatatgtggtcaacctgggaccgactgacggtcgtctcgacctacgggccctcgggttccgaggaagatgacgagcccgactctggttgggatttctcctggctcggtaaccccagtgccatgcgggacttcatgaccgcatgtgactacttcctctccgattactacgatggtggccacagcctcggcgacaaggactgtggcccaagtcgcgaatgtttccacgtcgagccaatggctccacagaggtaaccaccttggtatgccgaaggggtgcgctccccccaagcgtccgccccgagctaacctccttcgggagccaggtgtggtcccaggccctgtgggaagaggcgcgcagctcgggcaaatccccgagatgccgccacgcgcgacgcggaagcagggcaacctgcgcagctctggcagaacgtcgggcgggagcgggcaggccgagcatcggccggagaagcgcgtcatctgccccaggacgtccagcaccgcatcgctgacgatgccagggcaaggctgccctcggcttccagtggggtcggccagaacctggctgcagcagcgatactacttcgagcgatgtcggagccatccaccaccgaggggcgacgtatccagggagagctcaggaatctcctggaggatgtcgcacatcgcgccgcgacttcccgtttcatgtgggaagcctcggtccacaccgggcgcacgcggtacgcaacgcctgcagccccaggtcgcctcggcaacgagcaccaccgccgcgatcgtcgagcccacctcgacgagaaggtgcgccgaggctaccaccctaggcatgggggacgctacgacagcggggaggatcagagtccctcgcccgaaccgcccggtccgcaagctttcagccgggccatacgacgagcgtcgttcccaacccggtttcaaaccctgactaccatcaccaagtactcaggggaaacaaggccagaactgtggctcgcggactaccggctggcctgccagctgggtggaacggacgatgacaacctcatcatccgcaacctccccctgttcctctccgatgccgcccgagcctggctggagcatctgcctcctgtgcagacctccaactgggacgacctggtcaaagcctttgccggcaacttccagggcacatacgtgcgccctgagaactcctgggatctccgaagctaccgccagctgccaggggaatccctgcgggattacatccggcaattttcaaagcagcgcaccgagctgcccaacatcaccgactcaaatgtcatcggcgcgttcctcgccggcaccacttgccgcgacctggagagcaagctgggtcgcaagacccccactagggcgagcgagctgatggacatcgccaccaagttcgcctctggtcaggaggcggtcgaggccatcttccggaaggacaagcagcctcaggggcgcccacaggaagacgtccccgaggtgtccacccagcgcggcacgaagaagaagggcaagaagaagtcacaagcaaaacgcgacaccgccgacgcggatcttgtcgccgccgccgaacacaggaacccccggaagcctcccggaggggccaacctgttccacaagatgctcaaggagtcgtgcccctatcatcagggtcccatcaagcacacccttgaggagtgcgtcatgcttcggtgctacttccacaaggttgggcccccggcggaaggtggtagagcccacgacaacgacaaggagggccacaaggcagaagagttccccgaggtccatgactgcttcatgatctatggtgggcaagtggcgaacgcctcggctcggcaccgcaagcaggagcgccgggaggtctgctcggtgaaggtggcggcgccagtctacctagactggtctgacaagcccatcaccttcgaccaaggcgaccaccccgaccacgtgtcgagcccggggaagtacctgctcgtcgtcgaccccatcatcggcaacatcaggcttaccaagatcgatctgcccacgatccgggccggtgcggcgccctttcacgggatcattcccaggaagcgcgtccaaccccttgggcaactcgatctgcccgtctgcttcgggactccctccaacttccgaaaggaaaccctcacattcgaggtggtcgggttccgaggaacctaccacgcagtgctggggagaccatgctacgccaagttcatggtcgtccccaactacacctacctcaagctcaagatgtcgggccccaacggggtcatcactgtcggatccacgtatcgacacgcgtacgaatgcgacatggagtgcgtggagtacgctgaggccctcgccaaatccgaggccctcatcgccgacctggagagcctctccaaggaggtgccagatgcgaagcgccacgccggcaacttcgagccagcagaggcggtttttgcgtggagtccctcgaacatgcctggcataccaagggttgtcgccgagcactcgctggatatccgagctggagcccgacccgtgaagcagcctctgcgccgattcgacaaagaaaagcgcagagccataggcgaggagatccacaagctgatggctgcagggttcatcaaagaggtattccatcctgaatggctagccaaccctgtgcttgtgaaaaagaaaggtgggaaatggcggatgtgtgtagactacactggtctaaacaaagcatgtctgaaggttccctaccctctgcctcgcatcgatcaaatcgtggattccactgctaggtgcgaaaccctgtcattcctcgatgcctactcagggtatcaccaaatcaggatgaaagggtctgaccagctcacgacctctttcatcacaccctttggcatgtactgctatattaccatgacatttggtttaagggatgcgggcgcgacataccaaaggtgcatgaaccacatgttcggacagcacattggtcgaacggtagaggcttacgtcgatgacatcgtagtcaagacgaggaaagcctctgacctcctctctgaccttgaaacgacattcaagtgcctcaaggcgaaaggcgtaaaactcaatcccgagaagtgtgtcttcggagtcccccgaggcatgctcttggggttcatcgtctccgagcggggcatcgaggccaacccggagaaaatcgcggccatcaccaacatggggcctatcaaggacttgaaaggagtacagagggtcatgggatgccttgcagctctgagccgcttcatctcgcgcctcggcgaaagaggcctacccctgtaccgcctcttgaggaagaccgagcgcttcacttggacccccgaggccgaggaagccctcgagaacataaaggcgctccttacaagcgcgcccatcctggtgccccccgctgtgggagaagccctcttgatctacgtagccgcaaccactcaggtggtcagcgctgcgatcgtagtcgagagacgagaagaagggcatgcattgctcgtccagaggccagtctacttcatcaatgaggtactatccgagaccaaaatccgctacccgcaaattcagaagctactgtacgcagtaattctgacgcggcgaaagttgcgacactacttcgagtctcattcggtgactgtggtgtcatccttccccttaggggagatcatccagtgccgagaggcctcgagtaggattgcaaagtgggcgatggagatcatgggcgagacaatctcgttcgcccctcggaaggccataaagtcccaagtcttggcggactttgtggctgaatgggtcgacacccagcttccagcagctccaatccaaccggaactctggaccatatttttcgacgggtcgctgatgaaaacaggagcgggcgcgggcctgctcttcatctcacccctcgggaagcacctccgctacatgttgcgcctccatttcccgacgtccaacaacgtggccgagtacgaggccctggttaacgggttgcgcatcgccatcaagctagggcttgtcatcgaccaagtcatgaagaactcccattgccgcgacccgaagatggaagcctactgcgacgaggttcggcacctggacgacaagttctacgggctcgagctcaaccacgtcgcccgatggtacaacgagactgcggacgagctggctaaaatagcctcggggcggacaacggtcccccagacgtcttctcccgagacctacatcaaccctccgtcaagaccgacgacacgcccgagcccgagaaggcctcggctctgcccgaggtgccctcggctcagcccgaggcaccctcggccgccgagggtgaggcgctgcgcgtcgaggaagagcggaatggggtcctgcctaatcgaaactggcagaccccgtacctgcaatacctccaccgaggagagctaccccccgatagagccgaagctcggcgactggcgcggcgcgccaagtcattcgtcttgctgggtgacgagaaggagctctaccaccgcagcccctcaggcatcctccagcgatgcatatccttcgccgaagggtttctactggccaaccgcgatggccgacgccactaggattgtacgcacctgccaagggtgtcaattctacgcaaggcagacgcacctgcccgctcaggccctgcaaacaatacccatcacctggtcgtttgttgtgtcgggtttggaccttgtcggtcccttgcagaaggcacccgggggctacacgcacctgctggtcgccatcgacaaattctccaagtggattgaggtccgacccctaaacagcatcaggtccgaacaggcggtggcattcttcaccaacatcatccatcgctttggagttccaaactccatcatcaccgacaacggcacccagttcactggcagaaagttcctgggcttctgcgatgaccaccacatccgggtggactgggccgccgtagctcaccccatgacgaatgggcaggcgatggatgaaggaacttcactcggtggtctagagtctgaggatgacgccaagccgggccatgggcttcacgccgttctttctagtctatggggccaaggctatcttgcccacagacttagaatacggttccccgaggacaagggcgtacgacgaccaaagcaaccagaccagccgagaagactcactggaccaactggaagaggctcgagacatggccttactacactcggcgcggtatcagcagtccctgcgatgctaccacgcccgaggggttcggtcctgagacctccaggtgggcgacttggtgcttcggctacgacaagacgcccgagggcgtcacaagctcactcctccctgggaagggccgttcatcatcgccaagatcttgaagcccgaaacatacaagttggccaacagtcaaggcgaggtctacagcaacgcttggaacatacgacagctacgtcgcttctacccttaagatgttttcaagtcgttcatatacctcgttctctttacatacacaaataa

SEQ ID NO: 114939 - DNA, 1923 bp, Zea mays
  Clone ID: MRT4577_36306C.1
aatatacaatacacatgtatgcaatacccacccggttgtgggttagtggttttcaataagccacatgatagtccttaatttagggcttaacagaggatgtcgctagcattatagtttttcaaaaccgtttttcaaagccaaacaatgtgtttagttgaaaataggtttttcaaaactaaaacttttgtttttaaaatacgtatgtgaccgtatatacttaatccagctccgataccagctgtggcagaacctcccaagctattgggcccacatgcacctgtccttgtctcaaagacctcagacggctaggcatgtgcaccaaataacttaacaggatccgtccgagtgccccaaggacctcggataaaccacttacaatcagaaccacgggattaagtaacacaaatcacacacatcaatatttttgcagcggaaatcttattaccaaattttacaagttacaaaatttttgtaatattttatcggagtgattacaaaagtataagtttgaaatatatgctagctcaagggaccatcctcaataagtagtatagaagggttacttaaacttataagaaggccgagcccaccggcacttaacaccatcacagcagcacaaggttagacctgagtaaacactatgttagtgttgttagatgacgtccgcttgacgagtattcttcgaccgaacattcgcttgatttaaccatcttcaggttggtccatcaacttcaccatgcggagtagtccacgcttggggtcgacttgactcaagttctccgcatctcgtggttaatcaacgtaccatattgaccataacttcgcgcagacaacaacgattcttgcgtagacctttttttccgagcacccgacaagcaccacacgggatttattgctttatccgaattatcgggatcgttcgacgacgcaagggatatcgacgagttggagacttgcagggtcgagcacgacaagtagttccgagggtcgacataagcagcacaaaattggaaatcaaatcatcggagtcgacgagcacgtcgtgggcacaacgtgggtcgacgacgaggtccatgacgagcgtcgcaaggcacgacaaatgggaaggaggtgacgcacgaatttcagagcatggaactcacggcggcttgagggagatggccgtgggagggacttcggcgagctggagcgggatacggcctgggcgcgatgaagggagctgcgcgtccagagcgagcagggagagcaccgagcggaacagagagctccgggcagagagccagggcgcgaaggccagggaatccagggcgcggcgagccgaaaacttcgcgcgcggccatgggaaagcaagtgcggctggactgaacgagctgcgccagggagcagcagccggctgtgaagaacgcggctgggcgcgatgcaggaagccagtcgggcgcagcagctggagcttgcaccaggacggcaaacggcgctggggaaagagagctccgcgagcggaatccgagcagggcgttccggtcggcagagggagcagaggacgccgtggttggggagaagcagggcgccgctgcctgcgatggcgagcgaagcgcagagcgcacgagcgcgcgcagcagggggcgcggtcgagcagagaatctgggcgcgcggccatgaagaagagcaggccgggcgtggcaaaggagctggggacgcgcgtgaacagtgaggaagagagaggaggtacggcgagctccgtggctggggaaaaaaaaagcttgaagcagggagaacgacgagctggaggccaagcgatggggcagtgcagagcatcgggcgggacagaaaggagcgaccggcggtcatggatggttggagaacgagcgccggccacagggagatgaagacgagcgacgcgagagagatcccggcccggccggc

SEQ ID NO: 114940 - DNA, 461 bp, Zea mays
  Clone ID: MRT4577_36307C.1
tgggtcaccctccgagggctcggcccgggaccatcactctttctatacagtaggaaatactgtcccaaaccctacctcccgccctctacggcgaaccctcgcctctctcttcgacatgaccgccggccgcgccccagcgggccggatcgtgatggagctgtacgccaacgatgtgcccaagaccgcgcctaacttgcgcgcgctgcgcacgggcgagaggggcgtggcccagttcggcaagccgttccagtacaaggagatccaccttccaccgcgttactctcgcgttcatgtgccagggcggcgatttcaccggcggtaacgagaccgcctgcgagtacatctacggcgagaagtttcccgacgagaagctcctgcgcaagcccaccgccctcggtgtgctctccatgtccaacgccggccccaacaccaacggctcgccagtgcttcatctgcaccgc

SEQ ID NO: 114941 - DNA, 3216 bp, Zea mays
  Clone ID: MRT4577_36308C.1
atgggcagtctccagcaacctctccggcccgggacggtgctccgtttcgggactcttgagttcgtgtccttcgacggcagctacgacatgatacttcttccaccgccgcgcgacgacgacaatggcggccgacaacccgcccgccggcggcggaatcgacgacatcttccccgcgtggtggaagagcaacgttcgagctcgctccgttctctcccccgccaacggaggaggaggcggggccatcaagaccaagcgggaggccgcgcttcgttgaccgtcgagcgaatcgacgcccccgacgccccgacggaaggcacgcaggacgtcgacctcgcgttcaagacgaaggcaagcgccgtccccccgcgacacactgaccccgagcaagaagacgacgccggcacgctcgcggaaagcctgcaggacgtcgccctcgtacctgagacgacggtgcaaccagtccccgatgtgactacgtcgctcctcgtcgaccaaaaggtaccgactaactcccatcttgcgtcatttcgactcggcctcaacccgccaaacgacctcgctttggcgggtgctctcattgaggcgagtgcaaccccactggggtttcgtatgcggtcgccttgggaccggctgacggacgtctcgacctacgggccctctgggtccgaggaagatgacgatcccagcatctgttgggatttctccggacttggcaaccccagtgccatgcgggacttcatgaccgcatgtgactactacctatccgactgttccgacggaagccgcagccttggcaacgagagctgcggcccaggccgcgaatgtttccacatcgagctaggggatccctccgaaggcaaccatctcggcgtgccggaggacggtgatcttcctaggccggtgcctcgcgccgacatcccacgggagctagctgtggtccccgctccggcggggagttacgacccacaactcgagcaagtccgcgaggcgcaggccaggctcaacgagggaacaggagcgcttgagccgatccgtcgggacgtcgggcaggtgtgggcaggccaacccttggccggagaaatacgtcacctgccccaaggtctccagcaccgcgtcgccaacgatgtcagggtcaggccgccgcccgcctccagcggggttggtcaggacctggcagctgcagcgatgctcctccgcacgatgccggagccatcaaccaccgagggtcggcgaattcagggagagctcaagaatctcctggaaggcgctgcggcccgacgggccgagagcactgcctcccgaaggcaaggatatccctcggaacctcatgccgcgacttcccgattcatgcgggaggcctcggtctacaccgggcgcacgcgcaacaccgcgcctgcggccctgggccacctcggcaacgagcaccatcgacacaaccgtcgggcccacctcgacgaaagggtgcgccgaggctaccaccccaggcgtggggggcgctacgacagcggggaggatcggagtccctcgcccgaaccacccggtccgcaggccttcagtcgggccatccgacgggcgccattcccgacccggttccggcccccgactactatcacgaagtactcgggggaaacgagaccggaactatggctcgcggactaccgcctcgcctgccaactgggtggaacggacgacgacaacctcatcatccgtaacctcccctgttcctctccgacactgctcgtgcctggttggagcacctgcctccggggcagatctccaactgggacgacttggtccaagccttcgctggcaatttccagggcacatacctgccagcaacagccgggggagtcgctccgggactacatccggcgattctcgaagcagcgcaccgagctgcccaacatcaccgactcggatgtcatcggcgcgttcctcgccggcaccacttgccgcgacctggtgagcaagctgggtcgtaagacccccaccagggcgagcgagctgatggacatcgccaccaagttcgcctctggccaggaggcggtcgaggcaatcttccgaaaggacaagcagccccagggccgcccatcggaagaggctcccgaggcgtctgctccgcgcggcgccaagaagaaaggcaagaagaagttgcaatcgaaacgcgacactgctgacgcggaccttgtcgccgccgccgagcacaagaaccctcggaagccccccggaggtgcaaacctcttcgataagatgctcaaggagccgtgcccctaccatcaggggcccgtcaagcacaccctcgaggagtgcattatgcttcggcgtcacttccacagggccgggccacccgccgagggtggcagggcccgcgacgacgacaacaacgaggatcaccaagcaggagagttccccgaggtccgcgactgcttcatgatctatggaggacatgcggcgaatgcctcggctcggcatcgcaagcaagagcgccgggaagtctgctcggtgaaggtggcggcgccagtctacctagactggtccgacaagcccatcaccttcgaccaggccgaccaccccgaccatgtgccgagcccgggaaagtacccgctcgtcgtcgaccccgtcgtcggcaatgtcaggctcaccaaggtcctgatggatgggggcagctgcctcaacatcatctacgccgagaccctcaagctcctgcgtgtcgatctgtcctccgtccgagcaggcgctgcgcccttccacgggatcatccctgggaagcgcgtccagcccctcgggcgactcgacctccccgtctgcttcgggacgccctccaacttccgaagggagaccctgacgttcgaggtggtcgggttccgaggaacctaccacgccgtactagggaggccatgctacgcgaagttcatggccgtccccaactacacctacctgaagctcaagatgtcgggccccaacggggtcatcaccgtcggccccacgtacaaacacgcgttcgaatgcgacgtggagtgcgtggagtacgccgaggccctcgccgagtccgaggccctcatcgccgacctggagaacctctccaaggaggtgccagacgtgaagcgccatgccggcaacttcgagccagcagagacggttaaggccgtccctcttgaccccagtggcgacaccaccaagcagatccggatcggttccgggctcgaccccaaatag

SEQ ID NO: 114942 - DNA, 369 bp, Zea mays
  Clone ID: MRT4577_36309C.1
cttcttgtgatcctgttagctctaacatgtggggagaaggaaatattgtgatcctgttagctctaacatatacagagaaaaaaggatcacaatatttccttcttgtcttgaaaatgatacaggttgctttcatgatgcataaggaaaacattacttttgacacatcgtaaaaagttctttctgatgatccataaaaaacaaattgccaccttcggtaatttatgttccatttccattttatgcagctgatgatgtggttgcctacaagcacggagagagatctgctggtgccttgaaagcaaatggcttttccaatgtgctctgtaagtcatacaataggttttatatctcacctattcagctactcct

SEQ ID NO: 114943 - DNA, 305 bp, Zea mays
  unsure (1)..(305): unsure at all n locations
  Clone ID: MRT4577_3630C.1
tggggaggcacgcgtgcgccctactacatacttcttgcgagacttgaagtgcgcattctccaataccttcaatctgtggtgtgggtcanttggaggagacgctnttggtcttacatgggagaacccaaataatctttgcatataggaagctgatgaagctgctccctatccgacatctatccttaacgagggtggacatggttgtaaacggttattgaagggtgtgtgccttgtcaaggcaccaaagtttcagtgaactgacagggcgtntgcaactgaatatctgaccaacaaacctattcaca

SEQ ID NO: 114944 - DNA, 2814 bp, Zea mays
  Clone ID: MRT4577_36310C.1
atggcggtcgacaacccgcccgccggcggcggaatcaacgacgtcttccccacgtggcggaagaacaacattcgggcttgtcccgtcccctaccccgccgacggaggaggaggcggggcaaccaaggccaagcaggaggcggcacctcgtcggctgtcgagcgagtcgacggcgtcggcgccccaacggggggcacgtcgggcatcgacctcgcatctgaggcgaagacgagcgccgtctccccgcaacacgccaactccaagcaaacggacgacgccagcacgctcgcaaaggacttgctgggcgtcaccctcgtacctgagacgacggtgtagtctgcccctgacgcaacttcgtcaccacccgtcgaccaagagcctcgacccaccaagcgacttcgcttcggtggacgtactcatagaggcgagtccaaaccctctggggtatcgtatgcggtcaccctgggaccggctgatggcggtctcgacctacgggccctcgggttccgaggaagatgacgagcccaacttttgttgggatttctctggacttggtaaccccagtgccatgcgggacttcatgaccgcatgcgactactgtctttccgactgttctgacggtagccgaagcctcggcgacgaggactgcggcccaagtcgtgaatgtttccacgtcgatctagggggtcccggtgaaggcaaccatcttggtatattggaaaacgatgatccccctaggccagcgcctcgcgttgacatccttcgggagctagctgtggtccccatcccgatggggggtcatgacccacagctcgagcaaatccgcgagatgcaggccaggctcgacgagagagcaggaacacttgagccgttccgccgggacatcgggcaggaatgggcgggccaacctccggccggagaagcgtgtcatctaccccagggcacccaacaccgcatcgccgatgatgccagggcaaggccaccaccggcctccagtggggtcggccaaaacctggctgcagcggcaatacttctctgcgcgatgccggagccatctaccaccgaggggcggcgtatccagggagagctcaagaatctcttggaggatgccgcggctttcagccgggccatacgacgggcaccgttcccgacccggtttcgaaccccgactactatcacaaagtactcggggcagacgagactggaactgtggctcgtggactaccggctggcctgccacctgggtggaacggacgatgacaacctcatcatccgcaacctccccctgttcctctctgacaccgctcgagcctggctggagcacctgcctccggggcagatctccaactgggacgacctagtccaagccttcgccggcaatttccagggcacgtacgtgcaccctggaaactcctgggatctccgaagctgtcgccagcagtcgggagagtctctccgggactacatccggcgattctcgaagcagcgcaccgagctgcccaacgtcaccgacttggatgtcatcggcgcgttcctcgccggcaccacctgccgcgacctggtgagcaagctgggtcgcaagacccccaccagggcgagcgagctgatggacatcaccaccaagttcgcctctggtcaggaggcggttgaggccatcttccgaaaggacaagcagccccagggccgcccaccggaagatgtccccgaggcatcaactcagcgcggcaccaagaagaagggcaagaagaagtcgcaagcgaaacgcgacgccgccgacgcggaccttgttgccgccgccgagtacaagaaccctcggaaacctcccggaggcgccaatctcttcgacaagatgctcaaggagccatgcccctatcatcaggggcccgtcaagcacacccttaaggagtgtgccatgcttcggtgccactttcacaaggtcgggccacctgcggaaggtggcagggcccgcgacgacgataagaaggaggatcacaaggcaggagagttccccgaggtccacgactacttcatgatctacggtgggcaagtggcgaacgcctcggctcggcaccgcaagcaagagcgtcgggaggtctgcttggtaaaggtggcggcgccagtctacctagactggtccgacaagcccatcacctttgaccagggcgaccatcccgaccgcgtgccgagtccggggaaatacccgctcgttgtcgaccccgtcatcggcaatgtcaggctcaccaaagtcctcatggacagaggcagcagcctcaacatcatctacgccgagaccctcgggctcctgcggatcgatctgtcctcggttcggggaggcgctgcgccttttcacgtgatcatccccgggaagcgcgtccagcccctcggacaactcgatctacccgtctgctttgggacaccctccaacttacgaagggaaaccctcacgttcgaggtggtcgggttccgaggaacctaccacgcggtgttggggagaccatgctacgccaagttcatggtcgtccccaactacacctacctcaagctcaagatgtcgggccccaatggggtcatcaccgtcggccccacgtaccgacatgcgtacgaatgcgacgtggagtgtgtggagtacgccgaggccctcgccgaatccgaggccctcatcgccgatctcgagagcctctccaaggaggcgctagacgtgaagcgccatgccggcaacttcgagccagcggagacggttaagtccgtccctctcgaccctagcgacgatgcctccaagcagatccggatcggctccgagctcgaccccaaatag

SEQ ID NO: 114945 - DNA, 692 bp, Zea mays
  unsure (1)..(692): unsure at all n locations
  Clone ID: MRT4577_36311C.1
gttacaggnacaaagaacctgttaaaacttccacaagcaatagcggcagtcggaaatctggcagcaagctgaggaaggatgcgaagcctgataggaggaatgaggattatagttcacccagctctttgagacccccatctaatacaaataacactgaggacgactttgatgactttgatcctcgtggataccatggcaaaacaactgctaagtcaaatgaggtggatctgtttagcccaaacttgatggacgattttattgatgcatctgcagcaactccagcaacagacaatgctgcagaaccacaggttgatctgtttgctgatgcagattttcaatcggcaaccgcaagtacagatacagctgcaaatacagatgtcaaggtcaatgttgacctttttgcggaaaaggcatcttttcctgcagcatttccaccacaggctgggtttattccaccaccaagtgccgggacatcttctgaagtaaatacttccgtatccaagaaggcagctccggaaccttttgatccttttggcgctattcctttgaacaattttgatggacctgacccatttggtggcttcagctcaaatgctggatcatctaccgcagcagcacccacccacggttcaactggaaatatcagcacatcgaaccagaaccttcatgctgcaaccgactttgctggcctt

SEQ ID NO: 114946 - DNA, 337 bp, Zea mays
  Clone ID: MRT4577_36312C.1
gtggatatggacgtggaaggtacgaggaagaatacggctacaagaagaagccagccatcgggggctatagatgaggaaaatacaaggatgaagatgactacacgaggaaacctagcactgctagctatggtgggggatggcacgaggatgtagatgattacaagaagaaacccacaagatgaggctttggtggagggagggatgaacaagatgataatccctagaagcctacacgtggcggctcaggtgacagcaggcatgaacaggaccatgaatacaagaagcctctgaccgtatgtggcagtgcactaatggggacgcacgattgaggatcatc

SEQ ID NO: 114947 - DNA, 345 bp, Zea mays
  Clone ID: MRT4577_36313C.1
attgtcaatttatgaatggtttttgttttttttacaagcttttcaattttgtatttttgtggtaaacagaacccccattttcacaaaaaaaacccccatgggggcctgttggccccgggggacaatccaccttgccaaaattattactcaaagttttttggttgagggcaaactagccacacaccctcggggtaaaacctggctcataaaaaacaatacgcttgggaagggtcagcccgccaattgcgaaacaagggccaaaaagcctcccagcttcccctaaaaaaaaaccaaaaaagaagtgggcccaaaaatggtcatagctgggaactgggggaaaccccc

SEQ ID NO: 114948 - DNA, 961 bp, Zea mays
  Clone ID: MRT4577_36314C.1
ccccgcgtccgcccagcgtccgcccacgcgtccgcccacgcgtccgcccacgcgtccgcccacgcgtccgcggacgcgtgggcgcgcgggcggagccatggcggacgacgattacaacgagaatcgacatgggctatgaggatgagcctccagaacctgagattgaggaaggggccgaagaagagcttgagaacaacgaagatgcccctgatgatgtcataggtggagagggtgaagataaggaacaggaaaagaccaagcgtgagcgcaaaacaacaaaatatatgacgaagtatgaacgtgcgcgcattcttggtacacgagccttgcagataagcatgaatgctccagtcatggttgagcttgagggagaaactgaccctcttgagattgcgatgaaggagcttagagcgcgcaagatacccttcacgatcagacggtacctacctgatggaagttatgaagactggggagtagacgagctcattgtggaggactcctggaaacgccaggttggtggagactgaagatgctgatctacttggcatggaaaggatgtgtggtgtgcatcaggacttccctgtagttacaggtcttcgttgcctctgagtggatgctgaacagtgaatgaaccaagacgaaacgatgctatgctagatgttaccttgacgtctgtggttgccttggaactctgtttcagacatgctgtgcagatgattcgtaaactgattcgtctttcattcatttggaagggtttatcgtatcctgctatcttttgtaatgagttgtatgctacatccggcatgagacctgttgctgttgcttgtttcattaaactccaacgttttccataggagaggagcaaatccagatgggtagttcacagcatagctgagcggaaagtatgcagaccagagcatggcgtatttggcgtgttccatgctactggtctggtcagact

SEQ ID NO: 114949 - DNA, 243 bp, Zea mays
  Clone ID: MRT4577_36315C.1
tacatgcatacagggacaaataagttttttttgtcatcaatgagccactcactttagaagaggtccatacgcacatgggggcggttcgactatttcccaatttctaattcacctactcatgtcatttattattattactttctatattatataatactctatttcatctgtcataaattgatctttaaaacttaactcatctgtaatatatatgttttaactccattttttattttttatttt

SEQ ID NO: 114950 - DNA, 863 bp, Zea mays
  Clone ID: MRT4577_36317C.1
cctcgagccggccgggaaaggccttccccgtgaccccgtttccggccggagtttcctaccttcctctcgtcccagcagcagcaagccaaaaccctagcaagcaaaccaccggagcagcggcgctcgcgcgggcggagccatggcggacgacgattacaacgaaatcgacatgggctatgaggatgagcctccagaacctgagattgaggaaggggccgaagaagagcttgagaacaacgaagatgcccctgatgacgtcataggtggagagggtgaagataaggaacaggaaaagaccaagcgtgagcgcaaaacaacaaaatatatgacgaagtatgaacgtgcgcgcattcttggtacacgagccttgcagataagcatgaatgctccagtcatggttgagcttgagggagaaactgaccctcttgagattgcgatgaaggagcttagagcgcgcaagatacccttcacgatcagacggtacctacctgatggaagttatgaagactggggagtagacgagctcattgtggaggactcctggaaacgccaggttggtggagactgaagatgctgatctacttggcatggaaaggatgtgtggtgtgcatcaggacttccctgtagttacaggtcttcgttgcctctgagtggatgctgaacagtgaatgaaccaagacgaaacgatgctatgctagatgttaccttgacgtctgtggttgccttggaactctggaaccgtgatgcatggtttcagacatgctgtgcagatgattcgtaaactgattcgtctttcattcatttggaaggggttatcgtatcctgctatcttttgtaatgagttgtatgctacatccggcatg

SEQ ID NO: 114951 - DNA, 1092 bp, Zea mays
  Clone ID: MRT4577_36318C.1
gagtgcatcatcggcggtgcgcccggcgaaaaccctagtaccacaggagcagcggcgcttgcgctggcgcgagcggggccgtggcggatgacgaattacaacgaaattggacatggggtttgagcatgagcccctagggccgggcctttcctcgagtttcctattttcgtctcctccccacagcagcccggcgaaaaccctagtaagcaaaccaccggagcagcggcgcttgcgcgggcggagccatggcggacgacgattacaacgaaattgacatggggtatgaggatgagcccccagaaccggagattgaggaaggagctgaagaagagcctgagaacaacgaagatgcccctgatgacgtcataggtggtgagggtgaagataaggaacaggaaaagaccaagcgtgaacgcaaaacaacaaaatacatgacgaagtacgaacgtgcgcgcatcctgggtacacgagccttgcagataagcatgaatgctccagtcatggttgagcttgagggtgaaactgaccctcttgagattgcaatgaaggagctgagagcgcgcaagatacccttcacgatcagacggtacttacctgatggaagctatgaagactggggagtagacgagctcattgtggaggactcctggaaacgccaggttggtggagactgaagacgcggatctacttggcatggaaagggtatgtggtgcagtgggtctttcctgtagttacaagtcttcgttgccactatgagtggatactgtagcgaatgaaccaagacgaaatgatgctatgttaacttaacgtctgtggttgccttgaactctggaaccgtaatgctagcatggttgttggttgcgctatgcttgtttttgtttgtttcagtttcagacatgcagttgcagcgtagccaaatgcgtgctttgtgtgcctaatatctgacactggatgtgatcagtgttgtttatgccaatggttgagagctgtgctccgatgattcatgaaccgattgctaaaaaaataaaaaaaagcggcataagcttccctccaagtcgtatcttaaaaaaaaaaaaaaaaaatttcatggat

SEQ ID NO: 114952 - DNA, 1191 bp, Zea mays
  Clone ID: MRT4577_36319C.1
gttcattaactacacccgcatccaaacaatatcattggtattgtagatcaatttcatttctccttaaatttggtatttctagaccaattcaatttcacgacttctaacgggaaaaaggcacttccccgtgaccccgtttcctccagtttcctaccttcctctcgtcccagcagccgcaagccaaaaccctagcaagcaaaccaccggagcagcggcgctcgcgcgggcggagccatggcggacgacgattacaacgaaatcgacatgggctatgaggatgagcctccagaacctgagattgaggaaggggccgaagaagagcttgagaacaacgaagatgcccctgatgatgtcataggtggagagggtgaagataaggaacaggaaaagaccaagcgtgagcgcaaaacaacaaaatatatgacgaagtatgaacgtgcgcgcattcttggtacacgagccttgcagataagcatgaatgctccagtcatggttgagcttgagggagaaactgaccctcttgagattgcgatgaaggagcttagagcgcgcaagatacccttcacgatcagacggtacctacctgatggaagttatgaagactggggagtagacgagctcattgtggaggactcctggaaacgccaggttggtggagactgaagatgctgatctacttggcatggaaaggatgtgtagttacaggtcttcgttgcctctgagtggatgctgaacagtgaatgaaccaagacgaaacgatgctatgctagatgttaccttgacgtctgtggttgccttggaactctggaaccgtgatggctggtggacggtggttgagttatgcttgttcgtttcagtttcagacatgctgtgcagatgattcgtaaactgactcgtctttcattcatttggaagggtttatcgtatcttgctatcttttgtaatgagttgtatgctacatccggcatgagaccatgttgctgttgcttgtttcattaaactccaacggtttccataggagaggagcaaatccagatgggtagttcacagcatagctgagcggaaagtatgcagaccagagcatggcgtatttggtgtgttccatgctactgctctgtttaagactgttttgtatcagagtttgcaaagatggataccatgtatccagatcatcttgctcaaaaaaaaaaa

SEQ ID NO: 114953 - DNA, 581 bp, Zea mays
  Clone ID: MRT4577_3631C.1
ttccgaacgacagacagcgtgcattgagttaccgaccacccgggcacggcaggactcggctagtcagcaacgcgaaacggccgggcatgcattgcttctcggcctcgccgtcgtcagcaggtcccggcgctagcccggacgtggttatggaacacgatcaagacgcagctcatacacgcttacgtcgcaggagtctctcgataccgccgggaacaaatgctgtgacaagagctcgacccagccatgatcaatctcgaggggaagcgagagcacatgcatatcacgtgtgtggtgaccgctacattgaggccactgcgattgtcatgcgggcattgttcacttcccagtgctaagatcacatgattaatgagatcgttgcgaagatcgctcgcgagagtaatgtcgccatgagttgtctgacttggcgaaatacaatgacatattgatggttgtatattactgacaagatctgcctatagactcaagctgtcttggacacctatctgctctattgatagagaagcgcgctctattaaagtggctctgataggagcttatgctcatcatgtggaacgtgtcgc

SEQ ID NO: 114954 - DNA, 2006 bp, Zea mays
  unsure (1)..(2006): unsure at all n locations
  Clone ID: MRT4577_36320C.1
cattgggtacctcgaggccggccgggacttcttctcacgcgtcccgccgcggcgccacacgctgcaccggtctcacgccccccgacgccgtggggccctgtcggtggaccaggcccacggttggctcttcctcgcttcctcctccattcctctccctctctctctcgtcggtgggaccgtgggatacgctgacggacggacgggctgaggcaaggccgcctgcgggcgggaggaagaaaagcgaagctgctgcgccctcccctcccccatctccgccccccgcctcacccaccagacgagagagcgagcgcagttcggccgccggtcgcgtccgactccagcaaagccgagcgcccaccccctcaccctattaccttcctctcgggtccaattcggtgcctggctaactccgcacgtcttccccccttttccctccctcgaccgacgaccgtccgtccaccaccggatccaggagcgaccctccctcgtgctcgtcgacgatcgaccggccgccgatcgtccaggaaggatgtcgagcctcgaggagccgctgggtctcggagacctgcccaagttgagtattaacagactcgggcggttcgtgtcgctgggcgctcggaggccaccggccgacgacgacgaccacagcactggcaaatacagcagcagctcctgcaacaatggcagccctcagatggcattccatcatggcagcaactcctcctatccctggcacccgcagtgccgccaggccgccgatccatcacgcgatgcagtggagcttagagatctccctcgcaaggtcatgtgggagctgccgaggttcgtgaagatagtggaggtggggcctcgggacggcctgcagaacgagaagggcaacgtcccggcgtccgtgaagatccagctgatacacaagctggtcggcgcgggcctgtcggttgtcgaggccaccagcttcgtctccccaaagtgggtgccgcagctagccgacgcagaggaggtgctgaagggtataaagcaggagccaggcgtgcggtaccccggtgctaacacctaacctcagagggttcgaggctgccatcgcagccggcgcgaaggaaatcgcggtcttcgcgtccgcgtctgaatccttctccaggtccaacatcaactgcaccatcgaggagagccttgctcggtaccgcggcgtcacagcggctgccaagaaacacgggctaagcatccgggggtacgtgtcatgtgtgattgcttgccccgttggaggcgcaaccgatccggcgaaggtggcgtacgtagctaaggagctgtataccatgggctgctcggagatctcgctcggcgacacgactggtgtcgggacaccaggtagcgtggttgctatgcttcaagctgtcatgtcgtttgtcccggtggacaagattgccgttcatttccacgatacgtacgggcaggcccttgccaacatcctcgtctcccttcaaatggggatcaacatagtggactcgtcggtgtcgggccttggaggctgcccgtatgccaagggcgccactggcaacgtcgccacggaggatgtcgtgtacatgctccatggcctggggatcgagaccaacgtcgacctcaacaagctcatggaggctggtgactacatctccaagcatctgggcaggccgctgggttccaagaccgccactgctctccgcaagctgaccgcctgaaaaaaccttttcaagcactcccaagagaaatgtatcggttcgaggtcccatctctcagtcatatgaatgtcctgtagttttactttatgctttttttccgctcagacattgcctactctgagcattttattcacacactttgtacccgccgttggatgattctgaataatcttggtgttcctggacgcgagttatgtttgcggaaacgagtgtacggacaaatgtatcagaatatctcggttaacgatctaaacaacaaatgctgctgcaacagtttcttgctncttgaag

SEQ ID NO: 114955 - DNA, 827 bp, Zea mays
  Clone ID: MRT4577_36321C.1
atctccctctgaccctctccccctttttgttcctcgcccctcctcctcggcggccgcctccccgcaccccctccccccacgccgccgccgccatggccatgaagggacccggcctcttcaccgacatcggcaagaaggccaaggatctgctcaccagggactacacctacgaccagaagctctccgtctccaccgtcagctcctccggagtggccgtcacttccacagctgtgaagaagggagggctttattctcttgatgtagcatcagcttacaagtataagaataatcttgttgatgttaaagtggacacagaatcaaatatctctactaccttgactgtcttggatgtcctgccatccacaaagcttgtgacgtctatcaaatttcctgattactatgctggaaaggtggaggtgcaatacttccacgaccatgcaacttttgctgccgctgttggcatgaagccctctcctgtggtcgatttttctttggtagtaggccctaaaggacttgccttcggtggggaggctgggtttgacacttcttcaggaaagtttaccaagtacactggtggtttcagtgtaaccaagcctgacttccatgcttcagctattctggccgacaaaggtgacaccatcaaagtgtcaggtgtgtatcaccttgatgagaagcagaaggcttcggccgtggctgaatttacccggaagctctcaacgaacgagaacacactggacagttgggtggcctgtacaccgtcgaccctcagacagctgtgaaggcaaggctcaacaacactggaaagcttgctgctctcctccagcacg

SEQ ID NO: 114956 - DNA, 199 bp, Zea mays
  Clone ID: MRT4577_36322C.1
gaccacgcgtacgcgctgtcctcgcctgggttactggactccttttgcgcctcctcctacatccactgcaccgggtcctctagcaacagcaggccggcacggcattgcctccccttgctcatctctcgcgctcgccgccagtattccggcagacccacctccggaacaggcagaatgtagtgccgctatagataaaccg

SEQ ID NO: 114957 - DNA, 491 bp, Zea mays
  Clone ID: MRT4577_36323C.1
ggtcatcaaagcatttaagccaacagagcgttgtttgctcttaaagtttgtgacaagctgttcacgagctccactgcttggattcaagtacttgcaaccttctttcacaattcataaggttccatgtgatgtaacactttgggcatcaattggaggccaagatgtagatcgtcttccatctgcttccacatgctacaatacgctcaagcttcctacatacaagcggtcaagcacgctaaggagcaagctgctttacgccataagctcaaatactggatttgaactctcgtagaggtatattcagtggttttgtaaccctgctttggttttgctgtgaatagaggtatagcaaaattcgatcggatgtacaattgcatcttgattaatcggagtaacagcttctatgaaaaaaaaaaaaaaaaaaaagggcggccgccgactagtgagctcgtcgacccgggaattaattccggaccggtacctgcaggcgt

SEQ ID NO: 114958 - DNA, 448 bp, Zea mays
  Clone ID: MRT4577_36324C.1
ctcgttaataaaaaggggctagttagttcgtgattacaggtccgatttcttgtgaaatttataacaaggagaagtgaggggcccctctgttgatattaccatgcgcgtgcctaccgagcgaattgaagctggcgagggaccccgccatgataaaaccttattactgagatcccgtttacccaagggccttgccatcgtactaagaccgggggggggaacatgatgctggccaaggccaggccccttcctaggggagccggggatgaagacaatgaggacgccggggacttcgacaaaaaccaccccgggtagggcccccacgacaaatctggggaaagacagcactagaccccctgcccataggtgggcaccgtgttagggacagacgggccttggacggccttcattttaaagcctgctttgcccgggaggaggggggggctttccc

SEQ ID NO: 114959 - DNA, 752 bp, Zea mays
  Clone ID: MRT4577_36325C.1
aaatcgacacgactctcggcaacggatatctcggctctcgcatcgatgaagaacgtagcaaaatgcgatacctggtgtgaattgcagaatcccacgaaccatcgagtttttgaacgcaagttgcgcccgaagccttctggcggagggcacgtctgcctgggcgtcacgccaaaagaaaaaaactcttcgatcactgtactgaagataccatggccaagtcgaccgcgatgtttgtagccgccctggccctggtggtggtgatggcgacgacgagcacaggcggtggcagggcggcagcggcgtgcgatcccaagccgctggtggtgtgcgatccggcgttcatggacggagcgaaacccgcggcagcatgctgctccaccctgcgtgcgcaggaggcatgcttgtgcgtgtacgccaaagaccccaagtttgcaaaatacatcaacaaccccaacaccgccaaaacctttacctcgtgcggcatagccatccccaaatgctaagcaagcgctctgcgtcgtcgcttcgcttgctcttgctcttgtgtgtaacatatccagcttatgaataaattatgtggatcagttaattagtgggatgaaaaaaaaaaaaaaaaaaaaaaaaaaaaaaaaaaaaaaaaaaaaaaaaaaaaaaaaaaaaaaaaaaaaaaaaaaaaaaaaaaaaaaaaaccccccccatctcctcgcccccatttccgcccctttcccaccccccctccccccccccagccc

SEQ ID NO: 114960 - DNA, 386 bp, Zea mays
  Clone ID: MRT4577_36326C.1
aaaacccggaacattcgcagaaactgggattggaagtcaagatttcaaaccgtcaagatggtccacgccgacgcctccaccttttcctcgggcgtcaccaaggaggaggcctataaacaggtactgatgcaagccgaggggctgttttatgagcagcggaattgggtgtgcaacctctccaacaccgccgccctcctctggcacgcgtacaaatccctcccctcgccaagcagcgaggtgaactgggctggattctacaccctggacccgctctcagtccccccaccaaactcctcatcatcatccacaaccaccccaacacccacacaacctccccagcccgaaccttcccaagcaccacaacaaccctccgcaccgccgcaaag

SEQ ID NO: 114961 - DNA, 155 bp, Zea mays
  Clone ID: MRT4577_36327C.1
aagacttgacatgacacggacagtagagaggcagccgggaaaggagctaggaaggaaggaaagattgccatttctttttggtgggcccgcgacaggtcagcggactaggccctggccccagaagtggcaaccatccttatcctcgtcctcctttt

SEQ ID NO: 114962 - DNA, 633 bp, Zea mays
  Clone ID: MRT4577_36328C.1
gccggccgggtcgcggaccgccccgtgcagctccatgttccagaacaggacgttgcttccctcctgctccctcacgcaaacctctgccacgctacagctcccagacatgttgctcgccctcgcaaagtgttggccttgtgtgctccaccgcatagcaccctgcgatcgctgagtcccgccatgttgtctccctgcttgtgttcacaagctttatcgccttgtcgtgcacacctcagggctcgcctccgtccgccatgagtcccaatcgcgggttcctggtgccttaacttcgccctagttatgctccctcaccagaagcactcgttgtgtccgcagatgcctggacgcgtgctcgtccatcgcgctcaagccactagacgctgctgtctccgccacctgcaacgagcttcgtaaccgcatcctgtcgtcggtgatcgtcgttgttcttgcggagtctaaatcaatttggacatggtaaactgatccatttattttccgttaatatgaggagtggttggattgaataaatgtaggggtcacgatgaatatcttgtttgtagcacagatacgttggttttattacatgtttgatgaaatgccttgttacgaaaaaaaaaaaaaaaaaggccccta

SEQ ID NO: 114963 - DNA, 2193 bp, Zea mays
  Clone ID: MRT4577_36329C.1
atggggcccatcaaggacttaaagggcgtacagagggtcatgggatgtctcgcggctctgagccgtttcatctcacgtctcggcgaaagaggtctacctctgtaccgcctcttaaggaaggccgagtgtttcacttggacccccgaggccgaggaagctctcgggaacttgaaggcgctcctcacaaaggcgcctatcttggtgccaccagctgccggagaagccctcttggtctacgtcaccgcaaccactcaggtggttagcgccgcgattgtggtcgagaggcaagaagaggggcatgcattgcccgttcagaggccggtttacttcgtcagcgaggtactgtctgaaaccaagatccgctacccacaagttcagaagctgctatatgcagtgatcctgacacggcggaagttgcgacactacttcgagtctcatccggtaactgtggtgtcatccttccccctgggggagatcatccagtgccgagaggcctcgggtaggatcgcaaagtgggcggtggaaatcatgggcgagacgatctcgttcgcccctcggaaggccatcaagtcccatgtcttggcggacttcgtggccgaatgggtcgacacccagctaccgacggctccgatccaaccggagctctggaccatgtttttcgacgggtcgttgatgaagacaggagccggcgcaggcctactcttcatctcgcccctcgggaaacacctacgctatgtgctacgcctccacttcccggcgtccaacaatgtggctgagtatgaggctctggtcaacgggttgcgaatcgccatcgagctaggggtccggcgcctcgacgcccgcggtgactcacagctcgtcatcgaccaagtcatgaagaactcccactgccgcgacccgaagatggaggcctactgcgatgaggttcggcgcctggaagacaagttctacgggctcgagcttaaccacatcgcccgacgctacaacgagactgcggacgagctggctaaaatagcctcggggcgaacaacggttccccaggacgtcttctcccgggatttgcatcaaccctccgtcaagatcgacgacacgcccgagcctgaggcgacctcggcccagtccgaggtaccctcggcccagtccgaggtaccctcggcccagcccgaggcaccctcagctcagcctgaggcgacctcggttcagcccgagggcttctactggccgacggcggtggccgacgccacaagaattgtccgcacctgcgaagggtgtcaattctatgcgaagcagacccacctacccgctcaggctctgcagacaatacccatcacctggccctttgctgtgtggggtctggacctcgtcggccccttgcagaaggcacccgggggctacacgcacctgctggtcgccatcgacaaattctccaagtggatcgaggtccgacctctgaacaacatcaggtccgagcaggcggtggcgttcttcaccaacatcatccatcgcttcggggtcccgaactccatcatcaccgacaatggcacccagttcaccggcagaaagttcttggacttctgcgaggatcaccacatccgggtggactgggccgccgtggctcatcccatgtcaaatggacaagtagagcgtgccaacggcatgatcctacaagggctcaagcctcggatctacaacgacctcaacaagttcggcaagcgatggatgaaggaactcccctcggtggtctggagcctgaggacaacgccgagccgagccacgggtttcacgccgttcttcctagtctacggggccgaggctgtcttgcccacagacctggaatacggctccccgaggacgagggcctacaccgaccaaagcaaccaagctagccgagaagactcgctggaccagctggaagaggctcgggacaaggccttgctacactcggcgcggtaccagcagtccctgcgacgctaccacgcccgaggggtccggtcccgagacctccaggtgggcgacctggtgcttcggctgcgacaagacgcccgagggaggcacaagctcatgcccccctgggaggggccattcgtcatcgccaaagttctgaagcccggaacgtacaagctggccaacagtcaaggcgaggtctacggcaacgcttggaacatccaacagctacgtcgcttctacccttaa

SEQ ID NO: 114964 - DNA, 590 bp, Zea mays
  Clone ID: MRT4577_3632C.1
aattcggcacgaggatcctaggcgtggtgaaatcctaaacccgctccgcgggcggcgatggcgctcgtgtccaccgccaccgtcgcgtcgtcgtcctaccactgcgacccccacctcttcccaggggccaggaggagctggcgcgagccgaggtggagccgcggcggcgcgggcgcgaggctagcggtgctgcagcgtgcgggcggcggcgggctcgcggtgctggagcgagcgggcgcgggtgcggggtccgcggtgctagagcgggcggggggcgccgcggcggccgcggcgaggagggaggagctggtgccctcggggaatgcgaggaactcgtacgaggtggagtcactgatcgaccggctgagcaacctgccgccgcggggctccatagcgcgctgccttgagacagcgcggcaccggctgacgctgcaggacttcgcggcggtgtaccgcgagttctcccgccgcggggactggcagcgctcgctccggctctttaagtacatgcagcgccagtcgtggtgccgccccgacgagcacatacacgccatcggattctgcttgcttggacgccagggacccgggct

SEQ ID NO: 114965 - DNA, 5166 bp, Zea mays
  Clone ID: MRT4577_36330C.1
atgggtagtctccagcaacctttccaacccgggacgatgctctgtttcgggagtcttgagttcatgtccctcgacggcagctacgacatgatactccttcctccgccgcgcgacagcgacaatggcggccgacagcccacccgccagcggcggaatcaacgacgtcttccccacgtggcggaagaacaacatccgggtttgtctcgtcacctcccccgtcgacggaggaggaggcggggcaaccgtggccaagcaggaggcggcacctcgtcggttgtcgagcgagtcgacagcgccggcgccccagcgggggacacgtcgggcgtcgacctcgcgtctgagacgaagacgagcgccgtttccccgcaacatgccaactccacgcgggcggacgacgccagcacgctcgcgaaggacttgctgggcgtcaccctcatacctgagacgacggtgcagtcagcccctgacgtgacttcgtcaccgcctgtcgaccaagaggtaccgaccaattcccatcttgtgccttttggattcagcctcgaaccaccaagcgaccccgcttcggtggaagccttcatagaggcatgcaccaaccctccggggtatcatatgcggtcaccatgggaccggctgacggccgtctcgacctacgaaccctcatgttccgaggaagatgacgagcccgactttggttgggatttctccgggctcggaaaccccagtgccatgcgggacttcatgaccgcatgcgactactgcctctccgattgttccgacggcagccgcagcgtcggtgacaaagactgcggcccaagtcatgaatgtttccacgtcgatctagtgggtcccgatgaaggcaaccatcttggtataccggaaaacggtgatccccctaggcctgcgcctcgcgttgacatccttcgggagctagctgtgggagagctcaagaatctcctggaggatgtcgcggtccgatgggccgaaagctctgcctcccgaaggcagggatacccctcggagcattgcgccgcgacttccagattcatgcgggaagcctcggtccacaccgggcgcacacgcaacacagcgcctgcggccccgggtcgcctcggcaacgaggaccaccaccgcaaccatcgagcccacctcgacgagagggtgcgccgaggctaccaccccaggcgtgggggacgctacgacagcggggaggatcggagtccctcgcccaaaccacccggtccgcaggctttcagccgagccatacgacgggcgccgttcccgactcggttccgaaccccgactaccctcacaaagtactcgggggagacaaggccagaactgtggctcgcggactaccgactagcctgccagctgggtggaacggacgatgacaacctcatcatctgcaacctccccctgttcctctccgacaccgctcgagcctggctggagcatctgcctccgaggcagatctccaactgggacgacctgctgggagagtctctccgggactacatccagcgattctcgaagcagcgcaccgagctgcccaacgtcaccgattcagatgtcatcggtgcgttcctcgccggcaccacctgccgcgacctggtgagcaagctgggtcgcaagacccccaccagggcgagcgagctgatggacatcaccaccaagttcgcctctggccaggaggcggttgaggccatcttccggaaggacaagcagccccagggccgccagccggaagatgttcccgaggcgtccactcagcgtggcaccaagaagaaaggcaagaagaagtcacaagcgaaacacgacgccgccgacgcggaccttgtcgccgccgctgagtacaagaaccctcgaaaacctcccggaggcaccaatctcttcgacaagatgctcaaggagccgtgcccctatcatcagggacccgtcaagcacacccttgaggagtgcaccatgcttcggcgccactttcacaaggctgggccgcctgcggagggtggcagggcccgcaacgatgacaagaaggaggatcacaaggcagaggagttccccgaggtccgcgactgcttcatgatctatggtgggctagtggcgaacgcctcggctcggcaccgcaagcaagagcgtcgggagggcgatcaccccgaccgcgtgccgagcccggggaaatattcgctcgttgtcgaccccgtcatcggcaacgtcaggctcaccaaggtcctcatggacggaggcagcagcctcaacatcatctacgccgagacccttgggctcctgcagatcgatctatcctcgaagggaaaccctcacgttcgaggtggtcgggttccgaggaacctaccacgcagtgctgggaggccatgctacgccaagttcatggccgtccccaactacacctacctcaagctcaagatgtcgggccccaacggggtcatcaccgtcggccccactccctcggacatgcctggcataccgagggatgtcgtcgagcactcgctggatatccgagctggagcccgactcgtgaagcaacctctgcgccgattcgacgaagaaaagcgcagagccataggcgaggagatccacaagctgatggccgtagggttcatcaaagaggtattccatcctgaatggcttgccaaccctgtgcttgtgagaaagaaaggagggaaatggcggatgtgtgtagactacactggtctaaacaaagcatgtccaaaagttccctatcctctgcctcgcatcgatcaaatcgtggattccactgctggaggcgaaaccctgtctttcctcgatgcctactcagggtatcaccaaatcaggatgaaagagtctgaccagctcgcgacttctttcatcacaccttttggcatgaatgcgggtgcgacgtaccaaaggtgcatgaaccacgtgttcggcgaacacattggtcgaacggtcgaggcttacgtcgatgacatcgtagtcaagacgaggaaagactccgacctcctttccaaccttgaaacgacactccggtgtctcaaggcgaaaggcgtaaaactcaatcctgagaagtgcgtcttcggagtcccccgaggcatgctcttggggttcatcgtctccgagcggggcatcgaggccaacccggagaaaatcgcggccatcaccaacatggggcccatcaaggacttgaaaggcgtacagagggtcatgggatgccttgcggctctaagccgtttcatctcgcgcctcggcgaaagaggcctacctctgtaccgcctcttaagaaagaccgagtgcttcacttggacctccaaggccgaggaagccctcgggaacctgaaggcactccttacgaacgtgcccatcttggtgccccccgccgccagagaaaccctcttgatctacgtcgccgctaccactcaggtggtcaccgccgcgatcgtggttgagagacgaaaagaagggcatgcattgcccgtccagaggccggtttacttcatcagtgaggtactgtccgagaccaagatccgctacccgcaaattcagaagctgatgtacgtgatgatcctgatgcggcggaagttgcgacactacttcgagtctcatccggtgactgtggtgtcatccttcccctgggggagatcatctagtgccgagaggcctcggataggattgcaaaggacaggcgcgggcctgctcttcatctcgcccctcgggaagcacctccgctacgtgttgcgcctccatttcccggcgtccaacaatgtggtcgagtacgaggctctggtcaacgggttgtgcatcgccatcgagctaggggtccggcgcctcgacgctcgcggcgactcgcagctcgtcatcgaccaagtcatgaagaactcccactgccgcgacccgaagatggaagcctactgcgatgaggttcggcgcctggaggacaagttctacgggcttgagctcaaccacatcgcccgacgatacaacgagactgcggacgagctggctaagatagcctcggggcggacaacggttcccccggacgtcttctcccgagacctacatcaaccctcagtcaagaccgacgacacgcccgagcccgagaaggcctcggccttgcccgaggcgccctcggctcggcccgaggcgccctcggttcggcccgaggcatcctcggcccccgagggtgaggcactacgcgtcgaggaggagcggaatggggtcccacctaatcgagactggcaaacctcgtacctgcaatatctccaccgaggagagctgcccctcgaccaagccgaggctcgacgactagcgcggcgcgccaagtcgttcgtcttactgggtgacgggaaggggctctaccaccgcagctcctccggcatcctccagcgatgcatatccatcgccgaaggccaggagctcttacaaaaaaaggcacccgggggctacacgcacctgctggacgccatcgacaaattctccaagtggatcgaagtccgacccataaacgtcatcaggtccgaacaggcggtggcattcttcaccaacattatccatcgcttcggggttccaaactccatcatcaccgacaacggcacccagttcaccgctacaaagttcctggacttctgcgaggatcaccacatccgggtggactgggccgccgtggctcaccccatgacgaatgggcaggtggaacgtgccaacggcatgattctgcaaggactcaagccgaggatctacaacgacctccacaagttcgacaggcgatggatgaaggaactccccttggtggccatcttgcccacggacttagaatacggttccccgaggacgagggcgtacgacgaccgaagcaaccagaccgaccgagaagactcactggaccagctcgaagaggctcgggacatggccttactacactcggcgcggtaccagcagtccctgcgacgctaccacgcccgagggattcggtcccgagacctccaggtgggcgacttggtgcttcggctgcgacaagacgcccgagggcggcacaagctcacgcctccctgggaagggtcgttcgtcatcgccaaggttctgaagcccgggacatacaagctggccaacagccaaggcgaggtctacaacaacgcctggaacattcgacagctacgtcgcttctacccttaa

SEQ ID NO: 114966 - DNA, 305 bp, Zea mays
  Clone ID: MRT4577_36331C.1
gggagattttgcgcgtcatgcgattttacggaattattccggccagaacggtcaggctcgtcggatgggtcggtcacgaaacaggtaaccaaggagccatctcttacgcgaagatccacgcagacgaaaccgtgctggctctcgaagcgaaccgaggtagttcgatggtcaccggattgaaaaccgccttgctcggtcacgaaggcgtcgaaagagctgttgccgatgttgccgatttggtaaagattttggagaaagcaggacacgttttctaaaacgaacagcttcggtgctcgctctggtct

SEQ ID NO: 114967 - DNA, 1899 bp, Zea mays
  Clone ID: MRT4577_36332C.1
atgccgttcggcttgaggaatgtgggtgcaacgtaccagcgatgcatgaaccatgtgttcggcgaacacatcgaccgaacggtcgaggcctacgttgatgacatcgtagtcaagacgaggaaagcttccgacctcctttccgaccttgaagtgacattccgatgtctaaaggcgaaaggcgtgaagctcaatcccgaaaagtgtgtcttcggggtcccccgaggcatgctcttggggttcatcgtctccgagcggggcatcgaagccaacccagagaagatcgcagccatcaccagcatggggcccatcaaggacttgaaaggcgtacaaagggtcatgggatgcctcgcggctctgagtcgtttcatctcgcgcctcggcgaaagaggtctgcctctgtaccgcctcttaaggaaggccgagtgcttcgcttggacccctgaggccgaggaagccctcgggaacctgaaggcgctcctcacgaacgcgcccatcttggtgccccccgctgccggagaagccctcttgatctacgtcgccgcgaccactcaggtggttagcgctgtgactgtggttgagagacgagaagaggggcatgcattgcccgtcgagaggccagtctacttcatcagtgaggtactgtccgagaccaagatccgctacccacaaattcagaagctgctgtacgcggtgatcctgacgcggcggaagttgcgacactacttcgagtctcatccggtgactgtggtgtcatccttccccctgggggagatcatccagtcccgagaggcctcgggtagaattgcaaagtgggcggtggagatcatgggcgagacaatctcattcgcccctcggaaggccatcaagtcccaggtcttggcggacttcgtggctgagtgggtcgacacccagctcccaacagctccgatccaaccggagctctggaccatgtttttcgacgggtcgctgatgaagacgggggccggcgcgggcctgctcttcatcttgcccctcggaaagcacctacgctacgtgctacgcctccacttcccggcgtccaacgacgtggctgagtacgaggctctgataaacgggttgcaaatcgccatcgagctagggctcgtcatcgacaaaatcatgaagaactcccactgccgcgacccgaagatggaagcctactgcgatgaggttcggcgccagggagacaagttctacgggctcgagctcaaccgcatcgcccgacgctacaacgagactgcggacgagctggctaaaatagcctcggggcgaacaacggttcccccggacatattctcccgagacctgcatcaaccctccgtcaagaccgacgacacgcccaagcccgagaaggcctcggcccagcccgaggcaccctcagctcagtccgaggtaccctcgacacagtccgaggtaccctcggcttggcccgaggtaccctcggcccccgagggtttctactggccgacggcggtggccgacgccactagaattgtccgcacctgcgaagggtgtcagttctacgcaaggcagacccacctgcccgctcaggttctgcagaccatacccatcacctggccgtttgctgtgtggggtctggacctagtcggccccttgcagaaggcacccgggggctacacgcacctgctggtcgccatcgacaaattctccaagtggatcgaggtccgacccctaaacagcatcaggtccgaacatgcggtggcgttcttcaccaacatcatccatcgctttggggtctcaaactccatcatcaccgacaacggcacccagttcaccggcagaaagttcctggacttctgcgaggatcaccacatccgggtggactgggccaccgtggctcaccccatgacgaatgggtag

SEQ ID NO: 114968 - DNA, 263 bp, Zea mays
  Clone ID: MRT4577_36333C.1
gctctatggaatacctactttccccaaccatatcttactaacttactttcacaacaccctaaagacattttatgacactgctatgaacccaacaactaatttcataagactgaggataattacactcaaaaaccttttattttttgcaaaaacataaccctcttctttcaagactcttattctaaaacaccaataaatgccaactacataataatacccatttgtccccgtgcgaataaacaatctaaacatccttactcaac

SEQ ID NO: 114969 - DNA, 1812 bp, Zea mays
  Clone ID: MRT4577_36334C.1
atgcgagacttcatgaccgcatgtgactactacctctccggttgctctgacgatggccacaaccttgacgacgagggttgtggcccaagtcacgaatgtttccacgtcgacctggggggttgcgacgaaggcaaccacctcgatataccggaggatgacgatccccctgggcctgcgtctcgcgttgacatcctatgggagctagctgtggtcccagtccctgcggggggtcaggacacacagctcgagcaaatccgcgagatgcaggccaagctcgacgaggaagcagggcaacttgtgcagctccagcaaaacatcgagcaggagagggcaggccaagcactcgccggagagatctccaactgggacgacctagtcaaggccttcgctggaaatttccagggcacgtacgtacgccctgggaactcctgggatctccgaagctgccgccagcaaccaaaggaatccctgcgagagtacatccgatggtttttgaagcagcgcaccgagttgcccaacatcaccgactcggatgtcatcggggcgttcctcgccggcaccacttgtctagacctggtgagcaaactggggcgcaagactcccaccaaggcgagcgaattgatggacatcgccaccaagttcgcctctggtcaggaggcggtccaagccatcttccggaaggacaagcagcctcaaggaagacagaaggaagacgtccccgaggcgtccgcccagcgtggcacgaagaagaaggccaagaagaagtcgcaagcgaagcgcgacgccgctgacgcagatcttgtcgctgctgccgagcacaggaaccctcagaagcctcccggaggggccaacctgttcgacaagatgctcaaggagtcgtgcccctatcaccagggtcccgtcaagcacacccttgaggaatgcatcatgcttcagcgctacttccataaagccgggtccccggcgggagacggcaaaggccaagacaacaacaagaagcagggcgacaaggcagaggagttccccgaggtccacagatgcttcatgatctacggtgggcaagtggcgaacgcctcgtctcggcaccgcaagcaggagcgccgggaggtctgctcggtgaaggtggcggcgccagtctacctagactggtccgacaagcccatcaccttcgaccaagacgaccaccccgattgcgtgccgagcctaggaaggtacccgctcgtcgtcgaccccgtcattggcaacgccaggctcaccaaggtcctcatggacggaggcagcagcctcaacatcatctacgccgagaccctcgggctcttggggatcgatctgtccacgatccggaccggtgcggcgccctttcatgcgatcgtccccggaaagcgcgtcctgccccttggacaactcgatttgcccgtctgcttcagaactccctccaacttccgaaaggaaaccctcacgttcgaggtggtcgggttctgggggacctaccatgcggtgttgggaaggccgtgctacgccaagttcatggtcgtttcgaactacacatacctcaagctcaagatgccaggccccaacggggtcatcaccatcggatccacgtaccgccacgcgtacgaatgcgacgtggaatgcgtggagtacgccgaggccctcatcgccgacctagaatgcctctccaaggaggcgccagatgcgaagcgccacgttggcaacttcaaaccggctgaggcagttaagaccgtcgccctcgaccctagcaacgacgcctgcaagcaagtcaggatcggctccgagcttgaccccaaatag

SEQ ID NO: 114970 - DNA, 156 bp, Zea mays
  Clone ID: MRT4577_36335C.1
cggacgcgtggggtgctggcaatgtttgtctggtcgattgagtattgttattttcgttaaaaccagtgtactattaagactcaatttctgttatttttgtatcgaacatcgggtgttggccatatgtggttatgagttttgttactacccttgttg

SEQ ID NO: 114971 - DNA, 2541 bp, Zea mays
  Clone ID: MRT4577_36336C.1
atgccgtttggtttgaggaatgcgggtgcgacataccaaaggtgcatgaaccacgtgttcggcgaacacattggtcgaacggtcgaggcttacgtcgatgacattgtagtcaagacgaggaaagcctccgacctcctttccgaccttgaagcgacattccggtgtctcaaggcgaaaggcgtaaaactcaatcctgagaagtgtgtcttcggagtcccccgaggcatgctcttggggttcatcgtctccgagcggggcatcgaggccaacccgaagaaaatcgcggccatcaccaacatggggcccatcaaggacttgaaaggcatacagagggtcacgggatgtctggcggctctgagccgcttcatctcgcgcctcggcgaaagaggcctacctctgtaccgcctcttaagaaaggccgagtgcttcacttggaccccagaagccgaggaagccctcgggaacctgaaggtgctcctcacgaacgcgcccatcttggtgcccctcgctgctggagaagccctcttgatctacgtcgccgctaccactcaagtggtcagcgccgcgatcgtggttgagagacgagaagaggggcatgcattgcccgtccagaggccagtctacttcatcagggaggtactgtccgagaccaagatccgctacccacaaattcagaagctgctgtacgcggtgatcctgacacggcggaagttgcgacactacttcgagtctcatccgctcccgacagctccgatccaaccagagctctggaccatgttcttcgatgggtcgctgatgaagacaggggcaggcgcgggcctgctcttcatctcgcccctcgggaagcacctactctacgtgctacgcctccacttcccggcgtccaacaatgtggccgagtacgaggctctggtcaacgggttgcgcatcgccatcgagctaggggtccgacacctcgacactcgcggtgactcgcagctcgtcattgaccaagtcatgaagaactcccactgccgcgacccgaagatggaagcctactgcgatgaggttcggcgcctggaggacaagttctacgggctcgatctcaaccacatcgcccgacgatacaacgagactgcggacgagctggctaagatagcctcggggcagacaacggttcccccggacgtcttctcccgagacctgcatcaaccctccgtcaagatcgatgacgcgcccgagcccgaggcaccctcggcccccgagggtgaggcactgcgcgtcgaggaggagcggagcggggtcacgcctaatcgaaactggcagaccccgtacatgcaatatctccaccaaggagagctactcctcgaccgagccgaagctcggcggttggcgcggtgcgccaagtcgttcgtcttgctgggggacgggaaggagctctaccaccgcagccccttaggcatcctccagcgatgcatatccatcgccgaaggccaggagctcttacaagaaatacactcgggggcttgcggtcatcacgcagcacctcgagcccttgttggaaacgtcttccgacaaggtttctactggccgaccgcggtggccgacgccactagaattgttcgcacctgccaagggtgtcaattctatgcgaggcagacacacttgcccgctcaggctctgcagacgatacccatcacctggtcgtttgctgtgtggggtctggacctcgtcgaccccttgcagaaagcacccgggggctacacgcacctgctggtcgccatcgacaaattctccgagtggatcgaggtccgacccctaaacagcatcagatccgagcaggcggtggcgttcttcaccaacatcatccatcgctttggggtcccgaactccatcatcaccgacaacggcacccagttcaccggcagaaagttcctagacttctgcgaggatcaccacatccgggtggactgggccgccgtggctcaccccatgacgaatgggcaagtagagcgtgccaacgacatgattctgcaagtactcaagccgcggatctacaacgacctcaacaagttcggcaagcgatggatgaaggagctcccctcggtagtctggagtctgaggacaacgccaagccgagccacgggcttcacactgttctttctagtcaatggggctgaggccatcttgcccatagacttagaatacggttccccgaggatgagggcttacgacgaccaaagcaatcgagctaaccgagaagactcactggaccagccggaagaggctcgggacatggccttactacactcgacgcggtatcagcagtccctgcgacgctaccacgcccgaggggttcggtcccgagacctccaggtgggcgacctggtgcttcggctgcgacaagacgcccgagggcggcacaagctaacgcctccctgggaagggccgttcgtcatcgccaaggttctgaagcccgggacatacaagctggccaacagtcaaggcgaggtctacagcaacgcctggaacatccgacagctacatcgcttctacccttaa

SEQ ID NO: 114972 - DNA, 275 bp, Zea mays
  Clone ID: MRT4577_36337C.1
tggacctttgggctcgatttagtgcttggtaggcccctgccccatttaccccggccctccggccgttataccactcaacgattcagtcggtacatccacaccgtaacagtacactccgaaactcggaacacccgattattattcttctagtcattcggccgtacgttatagactcgaaacctcgaaacgtcgcgatcgcgatcgcgaggcacgaaaaaatagcgcaaacaatgtggccgttcatgcatacgcgcgataccccacatatgcgtaag

SEQ ID NO: 114973 - DNA, 873 bp, Zea mays
  Clone ID: MRT4577_36338C.1
atggcggcagaatcgacgacgtcttcctcacgtggcggaagaacaacatccgggtctgtcccgtcaccttccccgccgacggaggaggaggcggggcagacatggccaagcaggaggcgcacctcgtcggctgtcgagcgagtcgacggcgccggcgccccaacggtggacacgtcgggcgtcgacctcgcatctgagacgaagacgagcgtcgtttccccgcgacacgccaaccccaagcagacggacgacgccagcacgctcgcaaaggacatgctgggcgttagcctcgtatctgagataacggtgcagtccgtccctgacgcgacttcgtcaccatccgtcgatcaagaggtaccgtccatttcccatcccatgccttttacattcagctgcgacccaccaagcgacctcgcttcggtggacgctttcataaaggcatgtccaaaccctccggggtatcatatgcggtcaacctgggaccgactgacggctgtctcaacctacgggcccctgggttccggggaagatgacgagcccgactctggttgggatttctccaggctcgataaccccagtgtcatgcgggacttcgtgaccgcatgtgactactgcctctccgattgctccgatagcagccacagcctcggcgacgaggactgtggcccaagtcgcgaatgcttccacgtcgatctagggggtctcgacgaaggcaaccatcttggtatgccagaggacggtgatacccctaggcctgcgcctcgcgttgacatccttcgggagctagctatggtcccagtccctgcggggggtcaggacgcacagctcaagcaaatccgcgagatgcaggccaggctcgacgaggaagcatga

SEQ ID NO: 114974 - DNA, 1662 bp, Zea mays
  Clone ID: MRT4577_36339C.1
atgggcgagacaatctcgttcgctcctcgaaaggccatcaagtcccaggtcttggcggacttcgtagctgaatgggtcgatactcagctcccaacagctccgatccagccggagctctggaccatgttcttcgatgggtcgctgatgaagacaggagacggcgcaggcctactcttcatctcgcccctcgggaagcacctacgctacgtgctacgcctccatttcccggcgtccaacaatgtggccgagtatgaggctctagtcaacgggttgcggatcgccatcgagctaggggtccgacgcctcgacgctcgcggtgactcgcagctcgtcatcgaccaagtcatgaagaactcccactgccgcgacccgaagatggaggcctactgcgatgaggttcggcgcctggaagacaagttctacgggctcgagctcaaccacatcgctcggcgctacaacgagactgcggacgagctggctaaaatagcctcggggcgaacaacagttcctccggacaccccgtacctgcaatatctccaccaaggagagctaccctccgaccaagccgaagctcggcgactggcgcggcgcgccaagtcgttcgtcttgctaggagataagaaggagctctaccaccgcagcccctcgggcatcctccagcgatgcatctccatcgccgaaggtcaggaactcctgcgagagatacactcgggggtctgcggccatcacgcagcgcctcgagcccttgtcgggaatgctttccgacaaggcttctactggccgacggcggtggccgacgccactaaaattgtccgcacctgcgaggggtgtcagttctacgcaaggcagacccacctgcccgctcaggctctgcagacgatacccatcacctggcctttcgctatgtggggtctggatctcgtcggccccttgcagaaggcacccgggggctacacgcacctgctggtcgccatcgacaaattctccaagtggatcgaggtgcgacccttgaatagcatcaggtccgagcaggcggtggcgttcttcaccgacatcatccatcgcttcggggtcccgaactccatcatcaccgacaacagcacccagttcaccggcagaaagttcttggacttctgtgaggatcaccacatccgggtggactgggccgccgtggctcatcccatgtcaaatgggcaagtagagcgtgccaacggcatgattctacaagggctcaagcctcggatctacaacgacctcaacaagttcggcaagcgatggatgaaggaactcccctcggtggtctggagtttgaggacaacgccgagccgagccacgggcttcacgccgttcttcctagtctacggggccgaggccgtcttgcccgcagacctggaatacggctccccgaggacaagggcctatgccgaccagagcaaccaagctagccgagaagactcgctggaccagctggaggaggctcgggacaaggccttactacactcggcacggtaccagcagtccctgcgacgctaccacgccagagggtccggtcccgagacctccaggtgggcgacctggtgcttcggctgcggcaagacgcccgagggcggcacaagctcacgcccccctaggaggggccgttcgtcatcgccaaaattctga

SEQ ID NO: 114975 - DNA, 274 bp, Zea mays
  Clone ID: MRT4577_3633C.1
atacgagatggaatggtagtcatcatcaaaacccagttgggaagaagccttatttccatggatggtatcacccttctaacatgacagactaacaacttcgtttgcccaacaccgattttggccagccatgcctgggcccgatacaatctggatgcctgtttttgcgcacgcatgctgcaggggcaaccctaaacaaaatttttatttgggaggtggtttgggctttgcgctaggcttccattttttatgggaaaagaagggacaccactaaggg

SEQ ID NO: 114976 - DNA, 1221 bp, Zea mays
  Clone ID: MRT4577_36340C.1
atggagcccatcaaggacttgaaaggagtacagagggtcatgggatgccttgcggctttgagccgtttcatctcgtgcctcggcgaaagaggcctacctctgtaccgcctcttaaggaagaccgagcgcttcacttggacccccgaggccgaggaagcccttgggaacctaaaggcgctccttacaagcgcgcccatcttggtgccccctgctgccggagaagccctcttgatctacgtcgccgctaccactcaggtggtcagcgccgcgatcgtggtcgagagacgagaagatgggcacgcattgcccgtccagaggccggtctacttcatcagtgaagtactgtccgagaccaaaatccgctacccgcaaattcagaagctactgtacgcggtaattccgacgcggcgaaagttgcgacactacttcgagtctcatccggtgactgtggtgtcatccttccccctaggagagatcatccagtgccgagaggcctcgggagcgggcatgggcctgctcttcatctcgcccctcgggaagcacctccgctacgtgctgcgcctccatttcccagcgtccaacaacgtggccgagtatgaggctctggttaacgggttgcgtatcgccatcgagctaggggtccgacgcctcgacgctcgtggcgactcgcagcttgtcattgaccaagtcatgaagaactcccattgccgtgacccaaagatggaagcctactgcgatgaggttcggcgcctggaggacaagttctacgggctcgagctcaaccacatcgcccgacgatacaacgagactgcggacgagctggctaagatagcctcggggcggacaacggttcctccggacgtcttctcccgagacctacatcaaccctccgtcaagaacgacgacacgcccgagcccgagaaggtctcggccctgcccgaggcgccctcggctcatcccgaggcaccctcggcccccgagggtgaggcactgcgcgtcaaggaagagcggaatggggtcacgcctaatcgaaactggcagaccccatacctgcaatatctccaccgaggagagctacccctcgacagagccgaagctcggcgactggcgcagcgcggcaagtcgtttgtcttgctaggtgacggaaatgagctctaccaccatagcccctcaggcatcctccagcgatgcatatctgtaacacccctggtgttactgtaa

SEQ ID NO: 114977 - DNA, 440 bp, Zea mays
  unsure (1)..(440): unsure at all n locations
  Clone ID: MRT4577_36341C.1
ggctggggccggcgccggggcggccaccgccttgcccacgtccaccacgagacttcatgccgctgctgcaatggtccgccacgccgcaaatacaagccagcctgccggccacgtatgaagggtcacggtcgtggcgccggcgctgatgggggcatccgcctagctgatacagcaggccgcgcgctccaaacggctgaccttgcgcaccactttcacacgcacgcggtatacacggtgaggatcgacgatactggaggctcaatgaggctaagccagggggctgcattctcggcgcggccttcagcggcctgcttgcgcggctgtttactctcgcccgcgcataccggaccgggaacttcaggangactcgttttccttatagcgagtagtattcgcactttggaattcacatggtcaataggcggattcctgcgtgagaa

SEQ ID NO: 114978 - DNA, 1353 bp, Zea mays
  Clone ID: MRT4577_36342C.1
atgggatgccttgcggctctgagccgtttcatctcgcacctcggcgaaagaggcctgcctctgtaccgcctcctaaggaagaccgagcgcttcacttggacctccgaggccgaggaagccctcgggaacctaaaggcgctccttacaagtgcgcccatcttggtacctcccgctgccggagaagccctcttgatctacgtcgccgctaccactcaggtggtcagcgccgcgatcgtggttgagagacgagaagaagggcatgcattgcccgtccagaggccggtctacttcatcagtgaggtactgtccgagaccaagatccgctacccacaaattcagaagctgctatacgcggtgattctgacgcggcggaagttgcgacactacttcgagtctcatccgatcatccagtgccgagaggcctcgggtaggattgcaaaatgggcggtggaaatcatgggcgagacaatctcgttcgcccctcggaaggccatcaagtcccaagtcttggcagactttgtggctgaatgggtcgacacccagctcccggcagctccgatccaaccggaagtctggaccatgtttttcgacgggtcgctgatgaaaacaggggcaggcgcgggcctgctcttcatctcacccctcgggaagcacctccgctacgtgatgcgcctccatttcccggcgtccaacaacgtggccgagtacgaggctctagttaacgggttgcgcatcgccatcgagctaggggtccaacgcctcgacgctcgcggtgactcgcagcttgtcatcgaccaagtcatgaagaactcccactgccgcgacccgaagatggaagcctactgcgacgaggttcggcgcctggaggacaagttctatgggctcgaggtcaaccacatcgcccgacgatacaacgagactgcggacgagctggctaagatagccttgggacggacaacgatcccccggacgtcttctcccgagacctacatcaaccctcagtcaagaccgacgacacgcctgagcccgagaaggtctcggccctgcccgaggtgccctcggctcagcccgagacaccctcggcccccgaggaaggcacccgggggctacacgcacctgttggacgccatcgacaaattctccaagtggatcgaggtccgacccctaaacaacatcaggtccgaacaggcggtggcgttcttcaccaacatcatccatcgatttggggtcccgaactccatcatcaccgacaacggcacccagttcactggcagaaagttcctggacttctgtgaggatcaccacatccgggtggactgggccgccgtggcacaccccatgacgactgggtag

SEQ ID NO: 114979 - DNA, 320 bp, Zea mays
  Clone ID: MRT4577_36343C.1
gttataagggctgcgaaaataacttccaaaaaataaccactgcagacaggcagagaatccacggaggatatatatttgaatacatggattaattttacttatgccaaaaggccttcatggaaggtcgtttcatgtaccggtacattaatgggtaatcacatattcaacaagaacgcatggggcttgttaacgaggctctatcattgattacagaaaactgcaaccgagcacacatgaacaactatggagatcgattgcaaacataacatatattatggacgactggtgaacgggttcctaagcatagaaactgggaaact

SEQ ID NO: 114980 - DNA, 714 bp, Zea mays
  Clone ID: MRT4577_36344C.1
atggaggcgttaccggagagaaatcagggagagggaaaaggaaacgggtgtccgtttgatgctaccattacgcaggggcgcgatacgtcaagggaaacggcggttggattgctcgagctcctggcgagtcgctcggtcgggcgcggctgggctcggcacctcgagccctcgttggaaaacgccttccgacaaggtttctactggccaaccgcggtggctgacgccactaggattgtacgcacctgccaagggtgtcaattctacgcaaggcagacgcaccggcctgctcaggccctgcaaacaatacccatcacctggtcgtttgctgtatggggtctggacctcgttggtcccttgcagaaggcacccgggggcttcacgcacctgctggtcgctatcgacacattctccaagtggatcaaggtccgacccctaaacagcatcaggtccgagcaggcggtggcgttcttcaccaacatcatccatcgctttggggtcccgaactccatcatcaccgacaatggcacccagttcactggcaggaaattcctggacttctgcgaggaccaccacatccgtgtggactgggccgccgtagctcaccccatgacgaatgggcaggtagagcgtgccaacggtatgctcctgcaaggactaaagccgaggatctacaacgacctcaacaagttcggcaagcgatggatgaaggaatga

SEQ ID NO: 114981 - DNA, 370 bp, Zea mays
  Clone ID: MRT4577_36345C.1
cggggggcgccctttttttttttttttgggacatgtgtgaaaattataattagcacaccaacagacgcacattggagtaattgaaacgacaaggcagatgtatatgacacacatattcactaacaattcctggatcagatcagcacattggataaaccttcagcgctagccaaactgcatgcaacacacggtgtagttactggagctgttaggcgggcggaacctgccgagcccacacttatctcgttgttgcggttgcacatcctttcgggtgaggacctcgggatactgtatagtgtcgacatcggccttggttgtggcgacaggagacaagatgggtctcacctctaatactatggcgatcacaccc

SEQ ID NO: 114982 - DNA, 267 bp, Zea mays
  Clone ID: MRT4577_36346C.1
ggctcgaaccctacgccggcgcctgcacttgttttctcactttctccactcagggtccggcggcgaaggaaggcaagatgtacaccgcgaggaaaagatccagaaggagaagggccttgagccctcgagttcgaggactccgttgcccagcttttttgtctgagacgggaaccaggagctcaagagcgacctaggacctgggcgtaacaatgctttttatggatgttaccgtagcaggaaggctgttgtattcacgtgtgatacggt

SEQ ID NO: 114983 - DNA, 532 bp, Zea mays
  Clone ID: MRT4577_36347C.1
attatattactgttttttcataaatttttttttttttactttcctttccctttctttggttgggggggaagcgggaaccgggggggagaggggagccaaggaacccctagggaaaaagaaaacagaacggagcggggaaaaaagaaggggccggggggaagcacaaaccccaaacaaaaccggaaaaaacacccccccctcgccccacaaaaaaaaaaccgccccccaaaaaaaaaaaaaacccaggccaaacaaaaaaccaaaccctaacaaaaaaaaaacccgtcccccaaacaaaacctttccccccccccaaatacaaagaaggggcccaccccaaagaaaggggagagcacactaaacgcagagaaagccccacccccagaaaaagacagcccccccccacccaaaaaaagggcaccgcccccgaacagggcccaataaaaaaaacgcggcccctccaaaacttaagccccaccctccgctttatcagtgcaagcccaagacacgtgggtcccgcatgaaaaagaaa

SEQ ID NO: 114984 - DNA, 403 bp, Zea mays
  Clone ID: MRT4577_36348C.1
ctcaccgcctggccctcacgaacacagccgccgcccgctgtgcccagccttccgccgtccgccgagccatcgaggggagaccgagccttccgccgctgcccgctgtgcccagccttccgcccttccagccacgcgctgacgccgtccgcggtccgccgctgtgcccactgcccactgcccagcggccccagctgtacggccttctgtgccgagccggcgagtcgccgttcgctgctcggctgctgtgcccaggcggccaggcgcccagccctgcagccacgcgcccaggcgggccatgccacgcctgtgccttacgcggtcctactgtgtgtgcctgtgcctttcgagctgtaacaagttgatatatttggaggattgttcaaagggcttgatcttcaaaata

SEQ ID NO: 114985 - DNA, 363 bp, Zea mays
  unsure (1)..(363): unsure at all n locations
  Clone ID: MRT4577_36349C.1
ccagcttactagacctcactcgccaccggtcttcctttatttttttccactataaacaagggtcatttgggattttttaattttttctagtatnccnaaaaacccaaaaaaaaaatttaattctaagcagttgtataaaaccctgttaaaaaactgagaacaacaccaagtcgccttatacctctttaatttaaacttcaaaaaaaaaaaaccagccacagaaaataaaacaaaagaatattgtaagaatttttctacaaaaaaacgtttatacagacaacggacatgaagtttcttctgaagccaatgctgaatacattcactaaaaagccccttactctaaaaaacgaagtgaacacaaaa

SEQ ID NO: 114986 - DNA, 265 bp, Zea mays
  Clone ID: MRT4577_3634C.1
agctcggaattcggctcgagatcatatcctgacaatttttgtcacacgaaacagctacttgcaggtcatgggtgtattataacaaaacaagggcgcaaatctgcaggaaaagtttgaagcaattgcatgccacaaaagggagcttgagctcgctccttgccgaagttagagatcagatcgagattttctgcgacgcccaagcggtggcaaagaacaggctggttgaaatgcacatgcacttggactcaacaaatgattccaaact

SEQ ID NO: 114987 - DNA, 472 bp, Zea mays
  unsure (1)..(472): unsure at all n locations
  Clone ID: MRT4577_36350C.1
ggggagagtgttaaaaaaaaaatttattattttttgaaatttttttttatttttttttattaatttttttttaatttttttttttttttggatactaggggggacccgggaaaagcggaccggaccccgcaatcctcccaacttccgggggagaggggcnatttaaaaccgggggggaaaaaaaaaaaaaccctttccggagaaaaaaagggataagggaaaaaacccacacaaaaaaaaaaccgaaaacaaaaaaggaaaaaccagagggccccaaagaaaaaaccaaaaaacaaaaatggggttgaaccaacgggcccctacccaacaggaaaaaccttgttgccagccgcccaaaaaaataagcaaaaacccgaaaaaaaggcactgaagaaatgggccccaagggggctttgaatccaaacaaaaaaaagggcaaaaagggatggcccttaaccccccggacccaaaa

SEQ ID NO: 114988 - DNA, 475 bp, Zea mays
  Clone ID: MRT4577_36351C.1
caggccggccgggatttcaaatgaaggataggcaaatacaattgcctaggtcttcaagacatatatagcaaaatcagaggtatgacagttacatgttttgtagcgatttattcttattttagacaatgttctatttttttatatatatcgcgagttgttctacaagttaattggttatatgctaaatattatacggtccagttgtgtagagccatacctaaatttttatccgtcctccgccactgctgctgggctttgtggaagcggagaaataggctaatcttctatggcggcatcgcatgaaaattgaagagcgttgggtagttgatgtctggtgtgcaaaactaatagtggcaatgtaaggcctcgtgtgctcttgtttttttttttttactaaaacacttgtaaacattatgatgtgggccactaaaggcaatgaaaaattcaggtgagggttcctctcccccgttgacag

SEQ ID NO: 114989 - DNA, 567 bp, Zea mays
  unsure (1)..(567): unsure at all n locations
  Clone ID: MRT4577_36352C.1
aattcggcacgaggcttcgctctgacactgttcctcttccctcctcctcctccccgcccccacccacctcctcctgctctttccccgtgtgtccgtcctctcctccccggcgggcggccatgactgctgtggcctccctctagcctcgctgggcggctgctgtgccagctctagaaagatacgacagctgttggccttcagctgctggcgctgctcgactgcactgcacaccatagagaggaggggagagagagagagggagagggagaggggggagtgtgtgtgtgcgtgtctgtgcctgccgtgtgtgatagaaagaatctggaattgctttccagtcattgaccgtccagttccagtttccttccccccctcgttttgtccccctcctgagcctccttgattcctgtgttgcttgctgttcctcccaccctccctgcctgcttgngtcattgggngtgttgttgctggtattccctgcttggctgttcatgcatcaagctcctcagaatttttctctcccattctacccccctggcgtgatgcctgcttctgcttgtgcttggc

SEQ ID NO: 114990 - DNA, 232 bp, Zea mays
  unsure (1)..(232): unsure at all n locations
  Clone ID: MRT4577_36353C.1
gtcgagatcgaatagtggtgtactgctgttgttttggtatttgctgtgggcattgagcttgtgtctaagttccgtatgcttgcaaggcttgtttttatgagaacatatctggtgtatatgggagtttggtgtacatattaaaaaaaaaaaaaaaaaaaaaaaaaaaaaaaaaaaaaaaaaaaaaaagganggcgnaataaaaaaaaacaaaaaaaaanaaaccgggcaagcg

SEQ ID NO: 114991 - DNA, 684 bp, Zea mays
  unsure (1)..(684): unsure at all n locations
  Clone ID: MRT4577_36354C.1
aacaaggtacaccacatttaaaacctcatcagctgttgtacgagtgagtgagttccttctcatgctcctttaagaccccctccctcttccctgctcatccctttcttcttcattcatcctctctctctctctctctctcgcctttgcccaaaagccatataatgcgctgctgatcccttcttccagttccagctgcctccacaatacaccttgcggtgacacacacacacacacgcgcacacacctttcttcttttaccagcctccaagaatcactcactcactgcacgccatggagattgccatggtatgcacaagagttaacctcctcatcctcatcctctccctctgctcgccatacaagttcatccagagccccatggactttggccccttgaacctgctccccaccaccatcgctgcgtccagtgatttcggtaggatcctcttccactccccgtccgcggtgttgaagccccagtccccgagggacatctctctgcttcttagcttcctctctgcctcgtctctaggcaaggtgacagtggcggnccagggtgcgggtcactccattcatggacaggcccaggcccctcgatggcattgtgggtggagatgcgctccttgccctgcgaaatagagctgcaccaaagaggaagaaagagatgcttccctatgctgatgt

SEQ ID NO: 114992 - DNA, 1946 bp, Zea mays
  unsure (1)..(1946): unsure at all n locations
  Clone ID: MRT4577_36355C.1
ttattcggcacgagggaacgaaccagcgaccgacgctccccgaccagctgacgtggtgaacaggacagcactcagcagccaatggaggcagcactgacgcagcaggcggcagcgacggcgacaccgacgaggtggcggtgcgtgggggacgcgtcgctggctagccatggccagggccagcagcgagcaggcgccgtccggctcggagcggcgcggcgtgcggtcagcggggctgtccgggctagcagcagcaggcatctgggccccgtgcgggcgctcgtctccgaggaggccgccgccggcgagcgggcggcggagggcgagggaaaggacgccgcggtgaggctgttcgtgggcctccccgcggacgcggtggtctccgacggccgcggcgtgggccgccccagggccgtctcggcggcgctgcgcgcgctcaagctgctcggcgtcgacggcgcggaactgccggtgtcctgggccgtcgcgcagcccgggcccgggggctggttcgagtgggccgggtaccgcgccgtcgccgccatggtccgcgacgcggggctcgacctccgcgtctcgctccgcacccacggcgacgcgctccccggatgtggccgacgcgggtggccgacgcggcggccgccgaccccgacgtcctcttcaccgaccgctccggccaccgccgcatgggctgcctctcctttgccgtcgacgagctccccgtgctcgtcggcaagtcgccgctccaggcctacgaggccttcttccgcagctttgctgaagggttcgatgacttgttcggttcatccatggcggatgtgactgtcagcctgggtcctaacggcgagctacagtacccgtcatacccgccggggaaccagggttcccgtggcttcgacggcgtcggcgagttccagtgctacgacaagtacatgctggcacggctgaagcgtcacgccgagtcgtcggggcagccactgtggggcctgtcgggtccacacgacgggccgcggtacgacgacgagtcgccggagtcgtccgccttcttcagggagctggggggctcgtggaagtcggcctacggggagttcttcctgtcctggtacaccggggagctcctggcgcacggcgaccgtgtcctggccgcggcgtccagcgcgttccgcggcaagcccgtggagctgtccgccaaggtgccactcctgcgagggccggggacgggcccgagccccgcggacgccaccgcgggattccacggcgggtacggcccggtcgccgagatgttcgcgcgccacggttgcgcggtgatcgcggccggcgtggaggcgcggccggacgccacggcggaggagcgcctggcccaggtcaaggccgcctgcacggagcacggcgtgcatctcgcggcggagagcgcgcctctcgccgtggcgcgcggcagcgacggcgacggccccacgcgcgtcgtctggctgtccgccgggcgcacccggccgtgccagttcacgtaccagcggatgggcgcagagttcttctcgccgggccactggccgctgttcgtgcagttcgtgcgcgcgctggagtgccccgaggaggcccatgaggacgacctgccagccagcgctgacggcggcgagcggctcactgtgccgtccgcggccgcggcggccccaaaggaccaagcgacaagggaggtgcaaaccgtgtgaccggcaaatcatttgtcgcgcatttttagtgcacagtatttcaaaagttattttttcccccccccctttagtttaaaataaantaaaggaagataaatatttgagaatggagatggtatatagaaaaacttnaattgttatgtaaaaaaggttcttaaattttagtttaaggagttattagaaaaagangagtttttttttagcccccccccccccgccctcttaatttaagaaattgttcat

SEQ ID NO: 114993 - DNA, 2760 bp, Zea mays
  Clone ID: MRT4577_36356C.1
atgccgttcggcttgaggaatgcgggtgcgacgtaccagcgatgcatgaaccatgtgtttggccaacacattggccgaacggtcgaggcctacatcgatgacatcgtagtcaagacgaggaaagcctccgacctcctttccgaccttgaagtgacattccgatgtctcaaggcgaaaggcgtgaagctcaatcccgaaaagtgtgtcttcggggtaccccgaggcatgctcttggggttcatcgtctccgagcggggcatcgaagccaacccggagaagatcgcagccatcaccagcatggggcccatcaaggacttgaagggcgtacagagagtcatgggatgtcttgcggccctgagccgcttcatctcacgcctcggcgaaagaggcctgcctctgtaccgcctcttaaggaaggccgagtgcttcacttggacccgtgaggccgaggaagccctcgggaacctgaaggcgctcctcacgaatgcgcccatcttggtgccccttgctgccggagaagccctcttgatctacgtcgtcgcgaccacccaggtggttagcgccgcgattgtggttgagagacgagaagaggggcatacattgcccgtccagaggccagtctacttcatcagcgaggtactgtccgagaccaaaacccgctacccacaagttcagaagctgctctacgcggtgatcctgacgcggcggaagttgcgacactacttcgagtctcatccggtaactgtggtgtcatccttccccctgggggagatcatccagtgccgagaggcctcgggtagaatcgcgaagtgggcagtggaaatcatgggcgaaacgatctcgttcgcccctcggaaggccatcaagtcccaagtcttggcggacttcgtggctgaatgggtcgacacccagctcccaacagcttcgatccaactggaactctggaccatgttctttgatgggtcgctgatgaagacaggagcaggcgtgggcctgctcttcatctcgcccctcaggaagcacctacgctacgtgctacgcctccatttcccggcgtccaacaatgtggctgagtacgaggctctggtcaacgggttgcggatcgccatcgagctaggggtccgacgcctcgacgctcgcggtgactcgcagctcatcatcgaccaacgcctggaagacaagttctacgggctcgagataaaccacatcgcccggcgctacaacgagactgcggacgagctggctaaaatagcctcggggcgaacaacggttcccccggacgtcttctcccgagacctgcatcgaccctccgtcaagatcgacgacacgcccgagcccaaggcaccctcggcccagcccgaggtaccctcggctcagtccgaggcaccctcgcctcggcccgaggcaccctcagctcggcccgaggcaccctcggttcagcccgaggtaccctcggcccccgagggtgaggcactgcgcgtcgaggaggagcggaacggggtcacgcctaatcgaaactggcagaccccgtacctgcaatatctccaccgaggagagctacccctcgaccgagccgaagctcggcggttggcgcggcgtgccaagtcgttcgtcttgctgggagatgggaaggagctctaccaccgcagcctctcaggtatcctccagcgatgcatttccatcaccgaaggtcaggaactcctacgagagatacactcgggggcttgcggccatcacgcggcacctcgagcccttgtcggaaacgccttccgacaaggtttctactggccaacggcggtggccgacgccattagaatcgtccgcacctgcgaagggtgtcagttctacgcgaggcagacccacctgcccgctcaggctctgcagacgatacccatcacctggccttttgctgtgtggggtctggacctcgtcggccccttgcagaaggcacccgggggctacacgcacctgttggtcgccatcaacaaattctccaagtggatcgaggtccgacccctaaacagcatcaggtccgagcaggcggtggtgttcttcaccaacatcatccatcgtttcggggtcccgaactccatcatcaccgacaacggcacccagttcaccggcagaaagttcctggacttctgcgaggatcaccacatctgggtggactgggccgccgtggctcaccccatgacgaatgggcaagtggagcgtgccaacggcataattctacaaggactcaagcctcggatctacaacgacctcaacaagttcggcaagcgatggatgaaggaattcccctcggtggtctggagtctgaggacaacaccgagccgagccacgggcttcacgccgttctttctagtctatggggccgaggccatcttgcccacagacttagaatacggttccccgaggacgagggcctatgctgaccaaagcaaccaagctaatcaagaagactcgctggaccagctggaagaggctcgggacatggccttgctacactcggcgcggtaccagcagtccctgcgacgctaccacgcccaaggggtccggtcccgagacctccaggtgggcgacctgttgcttcggctgcgacaagacgcccgagggcggcacaagctcacgcctccctgggaagggccgttcatcatcgccaaagttctgaagcccggaacatacaagctggccaacagccaaggcgaggtctacagcaacgcttggaacatccaacagctacgtcgcttctacccttaa

SEQ ID NO: 114994 - DNA, 188 bp, Zea mays
  Clone ID: MRT4577_36357C.1
gggggtaggaatattaaggagcacataatacgctcctcagtgtgatctttggatatgggacggtcagtagaaataggtaaattacagagcgtgaaacttttgtggggtaatggactaataacaatgtatagctggctgacagtaggtgtcacacagacggttggtgggcttgtagtaaatgggggtgg

SEQ ID NO: 114995 - DNA, 3696 bp, Zea mays
  Clone ID: MRT4577_36358C.1
atggattcagcagactccatagccgacaaggcaattggaaggatgcaagagattgcggacaagattttttccttagcgagggaaacaatctttcctggacgcgggttgacctcatttgacgctaccaaacttcgtgtagcattggaggacatagattgcatgctggaccaagactctctggtgttgcaagagaatttggacatcgtgaacaacgtaaacaacccgggtgacagcagctacaaaccttcaaccttgtcctcaccaccccctgctgacgacgaccttactccagactgggactttgtggagcacttcgaaaacttctggggtcttgaatatgactccgatcagatgccttcgtttagtgacaatgagatggacaagtctggcaaagtcattgcaaagtgggatagtagagcaacaaaaatttacaccggaatttgtgtagaagaggtcaatgcacggaataggccacaacaatttctaaatgccgaagggtatgctaacctcataaggaagtttaaggaacgcactggtcgcacttacaccagggatcaaatgaagaataggtgggactcattaaagagaacgttcacccagtggaaaactcttaatgaaagggctacaggtcttggtcgagaccctcatactggttcaatcagtgctccagatgagtggtgggctaagcaaaatgaacccccccttgagaatgaggacgagctaaaggttatgtttggacccatagtctgcacaaatgaaacaacccttgttccaggcgtcgaggatgcaaattcatcatctgatgatcatgtcgaagccaatttaggtgggggtgaaaacagcacacctgacccatgcttaaatgcgactgggaagcgtaaggtgcggcatgattcttctaaccctaagaagaaaaacgatatgagggaagagtacatgaaaggcctagtggaggcttttgagtcgcgttccatgaccactaacaagtccatcacctcttgtcggggtgaggctgacaacggccaagttcagcctcaggcgcaacaggaagctccgcctcgcccgaccttgggcctcggcctcaggaggaggtctccgcctcgcccgaccctagggctcggcccccacctcggcctcggaaggtggtctccgcctcgcccgaccccagagctcggcctcaacctcgaccttgggaggaatcacgtcctcgcccgaccccggcctcggcctcaggaggagtcttcgcctcgcctgaccttgggctcggaccgaccgcgccacgggggatacatcattaccctacccgtagctagctcaggctacgggggaacaagaccagcgtcccatccaggctcgccccggaggaggagacggggcaatcgtgtccaggcaggaggcagcatctcgtcgactgtcgagcgagtcgacgatgccggcaccccagcagggaacatgtcgggcgttgtcctcgcgcctgagacaacgatgagtgtcgtttccccgcaacatgccaaccccaagcggacagatgacgccagcactctcgtggaggacttgttgggcgttagcctcgtacctgagataacggtgcagtccgtccccgacgcgacttcgccaccgtccatcgatcaagaggtatcgtccgttttccaccctgtgccttttagattcagcttcgatccaccaagtgaccccgcttcggtgagcgctttcgtaaaggcatatcctaaccttctggggtaccatatgtggtcatcttgggaccgactgacggccgtctcaacctacgggcccccgggttccgatgaagaagacgagcccgactctggttgggatttctccgggctcggtaatcccagtgccatgcgagacttcatgaccgcatgtgactactgcctctccgattgctccgatgatggccacagccttgacgacgagggttgtggcccaagtcgcgaatgtttccacatcgatctaaggggtcacgacgaagacaaccacctcggtacaccggaggatgatgatcccccccggagcatcgcgcagctacttcctgactcatgtgggaggcctcggtccacaccgggcgcacgcgggacgcgacgcctgcagccccgggtcgcctcggcaacgagcaccaccgtcgcgaccatcgagcccgccttgacgagaaggtgcgccgaggctaccaccccaggcgtgggggacgctacgacagtgaggaggatcggagcccctcgcccgaaccaccagctgggtggaacggacgatgacaacctcatcatccgcaacctccccctgttcctctccgacgcctcccgggcctggctggagcatctgcctcctgcgcagatctccaactgggatgacctggtcaaggccttcgctggaaacttccaaggcacgtacgtgcgccctgggaactcctgggatcttcgaagctgccaccagcagccaggggaatccctgcgagagtacatccggtggttttcgaagcagcgcaccgagctgcccaacatcaccgacttggatgtcatcggggcgttcctcgctggcaccacttgtcgcaacctggaagatgtccctgaggcgtacgcccaacgcggcgcgaagaagaaggcgaaaatgaagtcgcaagcgaaacgcgatgtcgccgacgtagatcttgtcgctgtcgccgagcacaggaacccttggaagcctcccggaggggccaacctgttcgacaagatgctcaaggagtcgtgcccctatcaccagggtcctgtcaagcacacccttgaggaatgcgtcatgcttcggcgctacttccataaggccgagcccccggtggaaggtggcaaaggccaagacaacgacaagaaggagggcgacaaggcaaaggagttccccgaggtccacagctgtttcatgatctacggtgggcaagtggcgaatgcctcggctcggcaccgcaagcaggagcgccaggaggtctgctcggtaaaggtggcggcgttagtctacctagactggtccgacaagcccatcaccttcgaccaaggcgaccgccccgactgcgtgtcgagcccaggaaagtacccactcattgtcgaccccgtcatcggcaacatcaggctcaccaaggtcctcatggacggaagcagcagcctcaacatcatctatgccgagaccctcgggctcttggagatcgatctatccatgatccgggccagtgcggcgccctttcacgggatcatccccaggaagcgcgtcctgccccttggacaactcgatctgcccgtctgctttggaactccctccaacttccgaaaggaaaccctcacgttcgaggtggtcgggttccgaggaacctaccacacggtgctggggagaccgtgctacgccaagttcatggtcgtccccaactacacctacctcaagctcaagatgcgaggccccaacggggtcatcaccgtcggatccacgtaccgacacgcgtacgaatgcgacgtggagtgcatggagtacgctgaggccctcgctgagtccgaggccctcatcgccgacctagagtgcctccccaaggaggtgttagatgcgaagcgccacgccggcaacttcgaaccagctgaggcggttaagtccgtccctctcgaccccagcaacgacgcctgcaagcaagtccggatcggctccgagctcgaccccaaatag

SEQ ID NO: 114996 - DNA, 1659 bp, Zea mays
  Clone ID: MRT4577_36359C.1
atgccgttcggtttgaggaatgcgggtgcgacataccaaaggtgcatgaaccacgtgtttggcgaacacattggtcgcacggtcgaggcctacgtcgatgacatcgtggtcaagacgaggaaagcctccgacctccttttcgaccttgaagtgacattccggtgtctcaaggcaaaaggcgtaaagctcaatcccgagaagtgtgttttcggggtcccccgaggcatgctcttggggttcatcgtctccgagcggggcatcgaggccaacccggaaaaaatcgtggccatcaccaacatggggcccatcaaggacttgaaaggcgtacagagggtcacgggatgccttgcggctctgagccgtttcatctcacgcctcggcgaaagaggcctgcctctgtaccgcctcttaaggaaggccgagtgcttcacttggacccctgaggccgaggaagccctcgggaacctgaaggcgctcctcacgaacgcgcccatcttggtgcctcccgccgccggagaagacctcttgatctacgtcgccgctaccactcaggtggtcagcgccgcgatcgtggttgagagacaagaagaagggcatgcattgcccgtccagaggccagtctacttcatcagtgaggtactgtccgagaccaagatccgctacccacaaattcagaagctgctgtatgcggtaatcctgacgcggcggaagttgcgacactacttcgagtctcatccagtgactgtggtgtcatccttccccctgggggagatcatccagtaccgagaggcctcgggtagaattgcaaagtgggcggtggaaatcatgggcgagacgatctcgttcgcccctcggaaggccatcaagtcccaggtcttggcggactttgtggctaaatgggtcgacacccagctcccgacagttccgatccaaccggaactctggaccatgtttttcgacgggtcgctgatgaagacaggggcaggctcgggcctgctcttcatctcgcccctcggaaagcacctacgctacgtgctacgcctccactccccggtgtccaacaatgtggccgagtacggggctctagtcaatgggttgcgcatcgccatcgagctaggggtccgacgcctcgacgctcgcggtgactcgcagctcgtcatcgaccaagtcatgaagaactcccactgccgcgacccgaagatggaagcctactgcgatgaggttcggcgcctggaagacaagttctacgggctcgagctcaaccacatcgcccgacgctacaacgagactgcggacgagctggctaagatagcctcggggcgaacaacggttcccccagacgtcttctcccgagacctacaccaaccctccgtcaagaccgacgacatgcccgagcccgagaaggcctcggcccagcccgaggcatcctcggctcggcccgaggcaccctcggctctgcccgagacaccctcggctcagtcgaggcaacctcggccctcgaagatgaggcactgcgcgtcgaggaagagcgaagcggggtcacgcctaatcgaaactggcagaccccgtacctgcaatatctccaccgaggagagctacccctcgaccgagccgaatctcggcggttggcgtggcgcgttaagtcgttcgtgttgctag

SEQ ID NO: 114997 - DNA, 409 bp, Zea mays
  Clone ID: MRT4577_3635C.1
ggccccggaaaaaaagggggtttcaatggaaaaaccaagggggggggggcacaacataccctttaggggggggtttttttttttttaaaaaaggaaacggcaaagcggccataagccccggggaggctttttcacaactttaaaaaaaaactagtttaaggtttcccttaaaaaaaaaattggggggggcaaaccctttccacatttaaaaacaaaaggggccaaaatttgcaaaaaatccttgtaacaacccttttaaattcaacaaaaaaaatatgcccccaagggggaaaccccttaaaaataagggggcccgtggggaaaaatagggggggccctgcccccgggaccaggggggaacatttttccttggggggccgggcccccgaaaccaaaaccgggggggggg

SEQ ID NO: 114998 - DNA, 297 bp, Zea mays
  Clone ID: MRT4577_36360C.1
aatgattatacgcacacgggagaaacaggcgggggggttttatagacctacctgcacccaaacatggaaggcactgaaggccaaacaacagataagaacacaccatttgtgcagcaggcagatgtcactaaggaccaaggtcctgacaccaaagagcagacactaccttcccgctctagcatgaccgattttttgagcggcagcgcctcatgctagcctacaatcaaggggaacccaataagagcccccaaaaaccgaagcatcctgcactgaccctgaaagctacctacaatggcc

SEQ ID NO: 114999 - DNA, 349 bp, Zea mays
  unsure (1)..(349): unsure at all n locations
  Clone ID: MRT4577_36361C.1
tccgtcgcgtccgaataagacgactcgggtcagtgaccctcagtgagatcgagcttcttacgcaccacaaggtccaggatgtcttgcaactgcggatcaagctgcggctgcagctaaagctgcaagtgcggcaggagagaccctgacctggaggagacgagcaccgtcgctcaggccaccgacgtcctcgacgtggccccggagatgaaggccgcgcccgagttcgtcgaggacgaagcagtagtcggcgaggaccgccactgctgcagctgcggtggcaactgcangtgcgaccactgcaactgctgatcacatcgatcgacgaccatggatatgattcatatctatc

SEQ ID NO: 115000 - DNA, 1800 bp, Zea mays
  Clone ID: MRT4577_36362C.1
atgccggaaccatcgaccaccgaagggcggcgtatccagggagagctcaagaatctcctggaggatgccgcggtccgacgggccgaaagctctgcctcccgaaggcaggggtacccctcggagcatcgcgccgcgacttcccgattcgtgcgggaagcctcggtctacaccgggcgcacgcgcaacacggcgtctgcggccccgggtcgcctcggcaacgagcaccaccaccgtgaccgtcgagcccacctcgacgagaggctgggtggaacggacgatgacaacctcatcatccgcaacctccccctgttcctctccgacaccgctcgagcctggatggagcatctgccttcggggcagatctccaactgggacgacctggtccaagccttcgtcggcaacttccagggcacctgccgccagcagccgggagagtctctccgggactacatccggcgattcttgaagcagcgcaccgagctgcccaacatcaccgactcagacgtcatcggcgcgttcctcgccggcaccacctgccgcgacctggtgagcaagctgggtcgcaagacccccaccagggcgagcgagctaatggacatcgccaccaagttcgcctctggccaggaggcggttgaggccatcttccggaaggacaagcagccccagggccgccagcccgaagacgtccccgaggcttccgcccagcacggcaccaagaagaagaacaagaagaagtcgcaagcgagacgcgacgccaccgacgcggaccttgttgccgccgctgagtacaagaaccctcggaaacctcctggaggtgccaatcccttcgataagatgctcaaggagccgtgcccctatcatcaggggcccgtcaagcacacccttgaggagtgcgtcatgcttcggtgccactttcacaaggccgggccacctgcggaaggtggcagggcccacaacaacgacaagaaggaggatcacaaggcagaggagttccccgaggtccacgactgcttcatgatctacggtgggcaagtggcgaacgcctcggctcggcaccgcaagcaagagcgtcgggaggtctgctcggtaaaggtggcggcgccagtctacctagactggtccgacaatcccatcaccttcgaccagggcgaccaccccgaccgcgtgccgagcccggggaaatatccgctcgttgtggaccccgtcatcggcaacgtcaggctaaccaaggtcctcatggacagaggtagcaacctcaacatcatctacgccgagaccctcgggctcctgcagatcgatctgtcctcgatccgggccggcgtggcgccttttcacgggatcatccccgggaaacgcgtccaacccctcggacaactcgatctgcccgtctgcttcgggactccctccaacttccgaagggaaaccctcacgttcgaggtggtcgagttccgaggaacctaccatgcagtactggggaggccatgctacgccaagttcatggacgtccccaactacacctacctcaagctcaaaatgccggaccccaacggggtcatcaccgtcggccccacgtaccgacacgcgtacgaatgcgacgtgaagtgcatggagtacgtcgaggccctcgccgaatctgaggccctcatcgtcgactatgagagcctctccaaagaggcgcaagatgcgaagcgccacgccggcaacttcgagccagcagagacggttaagaccgtccctctcgaccccagcaacgacgcctccaagcagatccggatcggctccgagctcgaccccaaatag

SEQ ID NO: 115001 - DNA, 674 bp, Zea mays
  Clone ID: MRT4577_36363C.1
gccggccgggtcgggaagccaggcgcgcggtttccaggcggttcctcctccagactctagagaaagaaggcgcatcgtgagcgagagagagagaggcaatggcgtcggcgacgttcctggaggtgctcctcgccatcttcctcccgccggtcggcgtcttccttcgctacggctgcggcgtaagtgtcacctcacggctgctcgatcgtatgctggttcgattgcaggggagttctggatcgacctcttgctgaccgtgctggggtacattccggggatcatctacgccgtgtacgtgctggtggcttaagttgtgcgaagaggaggacatgaagactctcgatctgtccagaagtacgtagtgatgtgaggacttctcccagtcccagtgtgcatgtctgtctcgattacgcgaattaggagtgactatcggctgatgttgttaataaaacttgtgtgtgtgctgcaagcaaagttgtgtagttgggggggggggcagaaatgtttatcacagcattgttttttttttttgtttctttcttttaccggaggaccgcactgcgattgctgtaacgtaattgctgttgtgtcaatagttgcttgcggtttgtgatttagtagaagatttttttagctagtctcgttggcctattttcatgcgaacgaaattcggc

SEQ ID NO: 115002 - DNA, 2622 bp, Zea mays
  Clone ID: MRT4577_36364C.1
atgggcagtctccagcaacctttccagcccgggacggtactccatttcgggagtcttgagttcatgtccctcgacggcagctacgacatggtactccttcccccgccgcgcgacagcgacaatggcggccgacagcccgcccaccggcggcggaatcgacgacgtcttccccgcgtggtggaagaacaacattcgagctcgccccgtcccctcccccgccgacggaggaggaggcggggcaaccaaggccaagcaggaggcggcaccacgtcggctgtcgagcgagtcgacggcgctggcgccccaacgggggacacgtcgggcatcgacctcacgtctgagacgaagacgagcgccgtctccccgcaacacgccaatcccaagccaatggacgacaccagcacgctcgcgaaggacttgctgggcgtcaccctcgtacctgagacaacggtgcagtcagcccctgacgtgacttcatcaccgcccgtcgaccaagagcctcgacccaccaagcgacttcgctttggtggacgctctcgtagaggcgagtccaaaccctctaggtatcgtatgcggtcaccctgggaccggctgacgaacgtctcgacctacgggcccttggggtccgaggaagatggcgagcccgacttctgttgggatttctccggacttggtaaccccagtgccatgcgggactttatgaccgcgtgcgactactgcctttccgactgttctgacggtagccgtagcctcggcgacgaggactgcggcccaagtcatgaatgtttccacgtcgatctagggggtcccaacgaaggcaaccatcttggtatgccggagaatggtgatctccctaggcctgtgcctcgcgttgacatcctacgggagctagctgtggtccccgtcccggcggggggtcatgacccacagcttgagcaaatccgcaagatgcaggccaggctcgacgagggggcaggaacacttgagctgatccgccgggacatcgggcaggaatgggcgggccaacctccgggcggagaagtgcgtcacctaccccagggtggaacggacgatgacaacctcatcatccgcaacctccccctgttcctttccgacaccgctcgcgcctggctggaacacctgcctccggggcagatctccaactgggacaacctggtccaagccttcgccggcaatttccagggcacgcacatgcgccctggaaactcatgggatctccgaagctgccgacagcagccaggagagtctctccgggactacatccgacgattctcgaagcagcgcaccgagctgcccaacatcaccgattcagatgtcatcggcgcgttcctcaccggcaccacctgccgcgacctggtgagcaagctgggtcgcaagacccccaccagggcgagcgagctgatggacatcgccaccaagttcgcctctggccaagaggcggttgaggccatcttctggaaggacaagcagccccagagcagcccaccggaagatgtccccgaggcgtcaactcagcgcggcgccaagaagaaaggcaagaagaagtcgcaagcgaagcgcgacgccgccgacgcggaccttgtcgccgccgccgagtacaagaaccctcggaaacctcccggaggtgccaacctcttcgacaagatgctcaaggagtcgtgcccctatcatcaggggcccgtcaagcacacccttgaggagtgcgccatgcttcggcgccactttcacaaggccgggacacccgcggagggtggtagggctcgcgacgacgacaagaacgaagatcaccaggcaggagagttccccgaggtccacgacttcttcatgatctatggtgggcaagtggcgaacgcctcggctcggcaccgcaagcaagagcgtcgggaggtctgttcagtaaaggtggcggcaccagtctacctagactggtccgacaagcccatcaccttcgaccaagccgaccatgtgccgagcctggggaaatacccgctcgttgtcgaccccgtcatcggcgacgtcaggctcaccaaggtcctcaaggacggaggcagcagcctcaacatcatctacgccgagaccctcaggctcctgcgggtcgatctgtcctcggtccgggcaggcgctgcgcctttccacgggataatccccgggaaacgcgtccagcccctcggacaacttgatcttcccgtctgctttgggacgccctccaacttccgaagggagaccctcacgttcgaggtggtcgggttccgaggaacctaccacgcagtgctggggaggccatgctacgcaaagttcatggccgtccccaactacacctacctcaagctcaagatgccgggccccaacggggacatcaccgtcggccccacgtaccgacacgcgtacgaatgcgacgtggagtgcgtggagtacgccgaggccctcaccgaatccgaggccctcatcgccgacctgaagagcctctctaaggaggtgccagacgtgaagcgccacaccggcaacttcgagccggcagagacggttaaatccgtccctctcgatcccagcagcgacgcctccaagcagatccggatcggctccgagcttgatcccaaatag

SEQ ID NO: 115003 - DNA, 2799 bp, Zea mays
  Clone ID: MRT4577_36365C.1
atgtccctcgacggcggctacgacatgatactccttcctccgccgcgcgacaatggcggccgacagcccgcccgccggcggcggaatcaacgacgtcttccccacgtggcggaagaacaacattcgggtttgtcccgtcacctcccccgccgacggaggaggaggcggggaaacgaaggccaagtaggaggcggcacctcgtcggctgtcgagcgagtcgacgacgccgacgccccaacgggggacacgtcgggcgtcgacctcgcgtctgagacgaagacgagcgtcgtttccccgcaacacgccaactccaagcggacggacaatgccagcacgctcgcaagggacttgctgggcgtcaccctcgtacctgagacgacggtgcagtccgcccctgacgcgacttcgtcaccgcccgtcgaccaagaggtaccgaccgattcccatctcgtgccttttggattcagcttcgacccaccaagcgatctcgcttcggtggaagccttcatagaggcatgtaccaaccctccggggtaccatatgcggtcgccctgggatagactaactgccgtctcgacctacggaccctcgggttccgagggagatgacgagcccgacttttgttgggatttctccgggctcggtaaccccagtgccatgcgagacttcatgaccgcatgcgactactgcctttttgattgttccgacggtagccgcagcttcggcgacgaggactgcggcccaagtcgtgaatgtttccacgtcgatctagggagtttcggcgaaggcaaccatcttggtataccagaaaacggtgatccccctaggcctatgcctcacgttgacatccttcgggagctagttgtggtcccagtccctgcggggggtcaggacgcacagctcgagcaaatccacgagatgcaggccaggctcgacgaggaagcaggaacacttaagccgttccgccggaacatcgggcaggaatgggcagaccaagctccggccggagaagcacgtcatctaccccagggcatccagcaccgcattgctaacgacgtcagggcaaggccgccaccggcttccagtggagtcggccagaacctggctgcagcatcaatactactccgtgcgatgccggaaccatcaacctccgaagggcggcgtatccagggagagctcaagaatctcctggaggatgccacggtccgacgggccgaaagctcttcctcccgaaggcaggggtacccctcggagcatcacgccgtgacttcccgatttatgcgggaagcctcggtccacaccgggcgcacgcgcaacatggcgcctgcggccccggggcgcctcggcaacgagcaccaccaccgcaaccgtcgagcccacctcaacgagaagatctccaactgggacgacctggtccaagccttcgccggcaacttccagggcacgtacatacgccatgggaactcctgggatctccgaagctgccaccagcagccgggagagtctctccgggactacatccggcgattctcgaagcagcgcaccgagctgcccaacgtcaccgactcggatgtcatcggcgcgttcctcgccggcaccacctgccgcgacctggtgagcaagctgggtcgcaagacccccaccagggcgagcgagctgatggacatcgccaccaagttcgcctctggccaggaggcggttgaggccatcttccggaaggacaagcagccccagggccgccagccggaagatgtccccgaggcgtccactcagcgcggcaccaagaagaaaggcaagaagaagtcgcaagcgaaacgtgacgccgccgacgcggaccttgtcaccgccgccgagtacaagaaccctcggaaacctcccggaggtgccaatctcttcgacaagatgctcaaggagccatgcccctatcatcagggacccgtcaagcacaccctcgaggagtgcgtcatgcttcggcgccactttcacaaggccgggccacctgcgaaaggtggcagggcccacaacaacgacaagaaggaggatcacaaggcagtggagttccccgaggtccacgactgcttcatgatctacggtgtgccaatggcaaacgcctcggctcggcaccgcaagcaagagcgtcgggaggtctgctcggtaaaggtggcggcgccagtctacctagactggtctgacaagcccatcaccttcgaccagggcgaccaccccgaccgcgtgccgagcccggggaaatatccgctcgttgtcgaccccgtcatcggcaacgtcaggctcaccaaggtcctcatggacggaggcagcagcctcaacatcatctacgccgagaccctcgggctcctgcggatcgatctgtcctcggtccgggtaggcgtgacgccttttcacgggatcatccccgagaaacgcgtccagcccctcggacaactcgatctgcccgtctgcttcgggactccctccaacttccgaagggaaaccctcacgttcgaggtggtcgggttccgaggaacctaccacgcggtgctggggaggccgtgctacgccaagttcatggccgtccccaactacacctacctcaagctcaagatgtcgggccccaacgggtgcgtggagtacgccgaggccctcatcgccgacctagagagcctctccaaggaggcgccagacgtgaagcgccatgccggcaacttcgagccagcagagacggttaagtccgtccctctcaaccccagcaacgacgcctgcaagcagatccggatcggctccgagctcgaccccaaatag

SEQ ID NO: 115004 - DNA, 1500 bp, Zea mays
  Clone ID: MRT4577_36366C.1
atgtgttcggcgaacacattggccgcacggtccgaggcctacgtcgatgacatcgtagtcaagacaaggaaaggccttccgacctccttttccgaccttgaagtgacattccgatgtctcaaggcgaaaggcgtcaagctcaatcccgaaaagtgtgtcttcggggtgccccgaggcatgctcttggggttcatcgtctccaagcggggcatcgaagccaacccggagaagatcgcagccatcaccagcatggggcccatcacggacttgaaaggcgtacagagagtcatgggatgtcttgcggccctcagccttttcatcccgcacctcagcaaaaggggcctgcctctgtaccgcctcggggcgaataacgtttcccccggaaagccttctcccgagatctgcatcaaccctccgtcaagatcgacgacgcgcccaagcctgaggcaccctcggcccagcccgaggcaccctcggcacagtccgaggcaccctcggctcggtccgaggcaccctcggttcggcccgaggtaccctcggcccccgagggcgagacgctgcacatcgagggggagcaatgtggggtcacgcctgatcaaaactggcagaccccgtacctgcgatatctccaccgaggagagctacccctcgaccgagccgaagctcgacggttggcgcggcgcgccaagtcgttcgtcttgctgggagaagggaaggagctctaccaccgcagcccttcaggcatcctccagcgatgcatctccaccaccgaagaaggcacccgggggctacacgcacctgttggttgccatcgacaaattctccaagtggatcgaggtccgacccctaaacagcatcaggtccgagcaggcggtggcgttcttcaccaacatcatccatcgtttcggggtcccgaactccatcatcaccgacaacggcacccagttcaccggtagaaagttcctagacttctgcgaagatctccacatccgggtggactgggccgccgtggctcatcccatgacgaatgggcaagtagagcgtgccaacgacatgattctacaaggactcaagcctcggatttacaacgacctcaataagttcggcaagcgatggatgaaggaactcccctcggtggtctggagcctgaggacaacaccgagccaagccacgggcttcacgccgttctttctagtctatggggtcgaggccatcttgcccacaaacctggaatacggttccctgaggacgagggcctatgccgaccaaagcaaccaagctaatcgagaagactcgctggaccagctggaagaggctcgggacaaggccttactacactcggcgcggtaccagcagtccatgcgacgctaccacgcccgaggggtccggtcccgagacctccaggtgggcgacctggtgcttcggctgcgacaagacgcccgaggtcgacacaagctcatgccccctgggaggggccgttcgtcatcgccaaagttctga

SEQ ID NO: 115005 - DNA, 314 bp, Zea mays
  Clone ID: MRT4577_36367C.1
taggctatagctagcctctcggagttcaatgtcagccagtactctacctatgatgacaacgtgccaattgacagggtggcagagcaaatccatgaggaaccatggaagatggcctaccagactggattcagaatcttagttgcatatggtggtgcacctataactaaccatctgagagagttagagagatgcttggaaatcttcgtcataactacttatctcttctataatcttattactagacctcgagtcttaatctacttgtttatgagtttatctcctgatgcaacctgatcaatgctttatactgagta

SEQ ID NO: 115006 - DNA, 252 bp, Zea mays
  Clone ID: MRT4577_36368C.1
ctgaaacttgaaagcacagcacaatatacaaaattaacacccgttggctatggccaaacaaaagaaggaaaaccatgtaccacagttatggctggaaaggctcacgagaatagagtaagtccgaatatcaataaactatgcatttcaatcatcgtactagcaatgcagatttcttatatataaatggttacgtaaaaaagtaaacttctgttgctggaaccagagtgatgtagtagattaaagaactgacag

SEQ ID NO: 115007 - DNA, 2733 bp, Zea mays
  Clone ID: MRT4577_36369C.1
atgccgttcggcttgaggaatgcgggcgcgacgtaccagcggtgcatgaaccatgtgttcggcgaacacattggccgcacggtcgaagcctacgtcgatgacatcgtagtcaagacaaggaaagcttccgacctcctttccgaccttgaagtgacattccgatgtctcaaggcgaaaggcgtcaagctcaatcccgagaagtgtgtcttcggggtgccccggggcatgctcttggggttcatcgtctccgagcgaggcatcgaagccaacccggagaagatcgcagccgtcaccagcatggggcccatcaaggacttgaaaggcgtgcagagggtcatgggatgtctcgcggctctgagccgtttcatctcacgcctcggcgaaagaggtctacctctgtaccgcctcttaaggaagaccgagtgcttcacttggacccctaaggccgaggaagctctcgggaacttgaaggcgctcctcacaaaggcgcctatcttggtgcctccaactgccggagaagccctcttgttctacgtcgccgcaaccactcaggtggttagcgccgcgattgtggtcgagaggcaagaagaggggcatgcattgcccgttcagaggccagtttacttcgtcagcgaagtactgtccgaaaccaaaatccgctacccacaagttcagaagctgctgtatgcagtgatccttacacggcggaagttgcgacactacttcgagtctcatccggtaactgtggtgtcatccttccccctgggggagatcatccagtgccgagaggcctcgggtaggattgcgaagtgggcggtggaaatcatgggcgagacaatctcattcgcccctcggaaggccatcaagtcccaggtcttggcggacttcgtggccgaatgggtcgacacccagctaccgacggctccgatccaaccggagctctggaccatgtttttcgacgggtcgttgatgaagacgggagccggcgcaggcctactcttcatctcgcccctcgggaaacacctactctatgtgctacgcctccatttcccggcgtccaacaatgtggctgagtatgaggctctggtcaacgggttgcggatcgccatcgagctaggggtccggtgcctcgacgcccgcggtgactcgcagcttgtcatcgaccaagtcatgaagaactcccactgccgcgacccaaagatggaggcctactgcgatgaggttcggcgcttggaggacaagttctacgggcttgagctcaaccacatcgctcggcgctacaacgagactgcggacgagctggctaaaatagcctcggggcgaacaacggttcccccggacgtcttctcccaggatctgcatcaaccctccgtcaagatcgacgacacgcccgagcctgaggcgccctcggtccagtccgaggtaccctcgacccagcccgaggtaccctcggcacagcccgaggcaccctcagctcggcctgaggcgccctcggttcagcccgaggtaccctcggcccccgagggtgaggcactacgcgtcgaggaggagcgaagcggggccgtgcctgatcgagattggcagaccccgtacctgcgatatctccaccaaggagagctacccctcgaccgagccgaggctcggcgggtggcgcggcgcgccaagtcgttcgtcttgctgggcgaagagaaggagctctaccaccgcagcccctcaggcatcctcgagcgatgcatctccgtcgccgaaggcttctactggccgacggcggtggccgacgccactagaattgtgcgcacctgcgaagggtgtcaattctatgcgaagcagacccacctgcccgctcaggctctgcagacgatacccatcacctggcccttcgctgtgtggggtctggacctcgtcggccccttgcagaaggcacccgggggctacacgcacctgctggtcgccattgacaaattctccaagtggatcaaggtccgacctctgaacaacatcaggtccgagcaggcggtggcgttcttcaccaacatcatccatcgcttcggggtcccgaactccatcatcaccgacaacggcacccagttcaccggcagaaagttcttggacttctgcgaggatcaccacatccgggtggactgggccgccgtggctcatcccatgtcaaatgggcaagtagagcgtgccaacggcatgattctacaagggctcaagcctcggatctacaacaacctcaacaagttcggcaagcgatggatgaaggaactcccctcggtggtctggagcctgaggacaacgccgagccgagccacgggcttcacgccgttcttcctagtctacggggccgaggccgtcttgcccacagacctggaatacggctccccgaggacgagggcctacagcgatcaaagcaaccaagctagccgagaagactcgctggaccagctggaagaggctcgggacaaggccttactacactcggcgtggtaccagcagtccctgcgacgctaccacgcccgaggggtccggtcccgagacctccaggtgggcgacctggtgcttcagctgcgacaagacgcccgagggcggcacaagctcatgcccccctgggaggggccgttcgtcatcgccaaagttctgaagcccggaacgtacaagctggccaacagtcaaggcgaggtctacggcaacgcttggaacatccaacagctacgtcgcttctacccttaa

SEQ ID NO: 115008 - DNA, 373 bp, Zea mays
  Clone ID: MRT4577_3636C.1
aaaacaacaacaccaaactgaataaccctttggcaaagcgggggaataaagtcttacaacgtacgatgaaagccacacatcgacagatagaataacaaccgtcagggacctaacacggattcgaagccactcacggcatatggggggggggaaaggcctcacaaccccttagacttcttgccagaacagggactaatactcgacaccctaggtgacttgctaaccctgaaaaaactgatcactgaccttgtgcatgaccttttcaagcacctcctgattcttaataaccttagatacactgacttgcttcataccctaaccgacgtaccatatcacgaacgacagcttggcgtgaatgaggtcgaacttcctt

SEQ ID NO: 115009 - DNA, 185 bp, Zea mays
  Clone ID: MRT4577_36370C.1
tccacttacgacgcggaccgactctacttgtaatcttttaggtttcagtgacgaggaccgggtcgtatcctatcgctggctgctttccttcgcgggccaccgtaaggggatattatcctttagggtcgtccatcgtctggatccgcatcatagaggctgttcccaatggtagtgacctaagcgta

SEQ ID NO: 115010 - DNA, 5502 bp, Zea mays
  Clone ID: MRT4577_36371C.1
atggcggaagagcagcatccgggcctgtcccgtcaccttcctcgccgcaggaggaggaggcggggcaaccatggacaagaaggaggcgacacctcgttggctgtcgagcgagtcaacgacgccggcgccccagcgggggacacgtcgggcgttgacctcgtgcctgagacgaagacgagcgtcgtttccccgcaacaccccaaccccaagcggacggatgacgccagcacgctcgcgaaggacttgctgggcgttagcctcgtacctgagataacggtgcagtccgcccccgacgcgacttcgtcaccatccgtcgatcaagaggtaccgtccgttttccaccctatgccttttagattcggcttcgacccaccaagcgacccagcttcggtggacgctttcataaaggcatatcctaaccttctggggtaccatatgtggtcaacctgggaccgactgacggtcgtctcaacctacgggcccccgggttccgaggaagatgatgagcccgactctggttgggatttctctgggctcggtaaccccagtgccatgcgagacttcatgaccgcatgtgactactgcctctccgattactccgatggtggccacagccttgacgacgaggactatggcccaagtcgcgaatgtttccacgtcgatctagggggtctcgacgaaggcaaccaccttgctatgccggaggacgacgatccccttaggtctgcgcctcgcgttgacatccttcgggagctagctgtggtctcagtccctgcggggggtcaggacgcacagctcgagcaaatccgcgagatacaggccaagctcgacgaggaagcaggacaacttgtgcagctccggcagaacatcaggcaggagtgggtaggacgagcactagctggagaagcgcgtcatctggcccaggacgtccagcaccgcatcgctgacgatgccagggcgaggctgcccccggcttccagtggggtcggccagaacctggctacagcagcaatactactccgagcgatgccggagccatccaccaccgaggggcggcgtatccagggagaacacaagaatctcctggaggatgccgcggtccgacggaccaaaagctctgcctcccgaaggcaggtgtaccccccggagcatcgcgccgcgacttcccgattcatacgggaagcctcggtccacaccgggcgcatgcgggacgcaatgcctgcagccccgggtcgcctcggcaacgagcaccaccgccgcgaccgtcgagcccacctcgacgagaaggtgcgccgaggctaccacccaggcgtgggggacgctacgacagtgaggcggatcggagtccctcgcccgaaccacccggtccgcaagctttcagccggcccatacgacgggcgccgttctcgacccggttccaagccccgactaccatcaccaagtactcgggggaaacaaggccggaactatggctcacggactaccggctggcctgccagctgggtggaacggacgatgacaacctcatcatccgcaacctcccccctattcctttccgacgccgcccgagcctggctggagcatctgcctcctgcgcagatctccaactgggatgacctgcgcaccgagctgcccaacatcaccgactcagatgtcatcggtgcgttcctcgccggcaccacttgccgcgacctggtgagcaagctgggtcgcaagactcccaccagggcgagcgagctgatggacatcgccaccaagttcgcctctggtcaggaggcagtcgaggccatcttccggaaggacaggccgcctcagggacgccagcaggaaaacgtccccgaggcgtccgctcagcatggcacaaagaagaagggcaagaagaggtcacaagcgaaacacgacgccaccgacgcagatcttgtcgccgccgccgagcacaggaaccctcggaagcctcctggaggggccaacctgttcgacaagatgctcaaggagtcgtgcccctatcatcagggtcccgtcaagcacacccttgaggagtgcgtcatgctttggcgctacttccataaggctgggccctcggcggaaggtggcaaaggccatgacaatgacaagaaggagggcaacaaggcagaggagttccccgaggtccaggactgcttcatgatctacggtgggcaagtggcgaacgcctcggctcggcaccgcaagcaggagcgccgggaagtctgctcggtgaaggtggcggcgccggtctacctagactggtccgacaagcccatcaccttcgaccaaggcgaccaccccgaccgcgtgccgagcccagggaagtacccgctcgttgttgatcccatcatcagcaacgtcaggcttaccaaggtcctcatggacggaggcagcaacctcaacatcatctacgccgagaccctcgggctcttgcagatcgatctgtccacgattcgggccggtgcggcgccttttcacaggatcatccccgggaagcgcgtccaaccccttgggcaactcgatctgcccgtctgtttcgggactccctccaacttccaaaaggaaaccctcacgttcgaggtggtcgagttccaaggaacctaccacgcagtgctggggagaccatgctacgccaagttcatggccatccccaactacacctacctcaagctgaagatgccaggccccaacggggtcatcaccgtcggatccacgtaccgacacgcgcacgaatgcgacgtggagtgcgtggagtacgctgaggccctcgccgaatctgaggccctcatcgccgacctggagagcctctccaaggaggtgccagatgcgaagcgccacgccggcaacttcgagccagcagaggcggtttttgcgtggagtccctcggacatgcctggcataccgaggtatgtcgccgagcactcgctggatatccgagctggagcccgacccgtgaagaagcctccgcgtcgattcgacgaagaaaagcgcagagccataggcgaggagatccacaagctgatggctgcagggttcatcaaagaggtattccatcccgaatggctagccaaccatgtgcttgtgaaaaagaaaggtgggaaatggaggatgtgtgtagactacactggtctaaacaaagcatgtccgaaggttccctaccctctgccttgcatcgatcaaatcgtggattccactgctgggtgcgaaaccctgtcattcctcgatgcctactcagggtatcaccaaattaggatgaaagagtccgaccagctcacgacctctttcatcacaccctttggcatgtactgctatattactatgccatttggtttaaggaatgcaggcgcgacataccaaaggtgcatgaaccacgtgttcggagagcacattggtcgaacggtcgaggcttacgtcgatgacatcgtagtcaagacgaggaaagcctccaacctcctcactgaccttgaaacgacattcaagtgtctgagagcgaagggcgtgaaactcaatcccgagaagtgtgtctttggagtcccccgaggcatgctcctggggttcatcatctccgagcggggcatcgaggccaactcggagaaaatcgcggccatcaccaacatgaggcctatcaaggacttgaaaggagtacagagggttatgggatgccttgcggctctgagccgcttcatctcgcacctcggcgaaagaggcctacccctgtatcgcctcttaaggaagaccgagcgcttcacttggacccccgaggctgaagaagccctcgggaacttaaaggcgctcctgacaagcgcgcccatcctagtgccccccgttgcgggagaagccctcttgatctacttgcgacactacttcgagtctcatccggtgactgtggtgtcatccttccccctgggggagatcatgggcgagacaatctcgttcgctcctcggaaggccatcaagtcccaagtcttggcggactttgtggctgaatgggtcgacacccagcttccagcagctccgatccaaccggaactctggaccatgtattttgacgagtcgctgatgaaaacaggagcgggtgcgggcctgctcttcatctcacccctcgggaagcacctccgctacgtgttgcgcctccatttcccgacgtcaaacaacgtggccgagtacgaggctctggttaatgggttgcacatcgccatcgagctagggtttcggcgcctcaacgctcatggcgactcgcagcttgtcatcgaccaagtcatgaagaactaccactgccgcgacccgaagatggaggcctactacgacgaggttcggcgcctggaagacaagttctacgggctcgagctcaaccacatcgctcgacgctacaacgagactgcggacgagctggctaagatagcctcgagacagacaacgaccccgtacctgcaatatctccaccgaggcgagctacccctcgacagagccgaagctcgacgactggtgcggcgcgccaagtcgttcgtcttgctgggtgacaaaaaggagctctaccaccgcagcccctcaggcatccttaagcgatgcatatccatcgccgaaggtcaggagctattgcaaggaatacactcgggggcttgcggtcatcacgtagcacctcgagccctcattggaaacgccttccgacaaggtttctactggccaaccatggtggccgacgccactaggattgtacgcgcctgccaagggtgtcaattctacgcaaggcagacacacctgcccgctcaggccctgcaaacaatacccatcacctggccgtttgctgtgtggggtctggatctcgtcggtcccttgcagaaggcacccgggggcttcacgcacctgctgttcgctatcgacaaattctccaagtggattgaggttcgacccctaaacagcatcaggtccgaacaggcggtgacgttcttcaccaacatcatctatcgctttggggtcctgaactccatcatcaccgacaacggcacccagttcactggcaggaagttcctggacttctgcgaggaccaccacatccgggtggactgggccgtcgtagctcaccccatgacgaatgggcaggtagagcgtgccaacgacatgattctgcagggacttgagccgaggatctacaacaaactcaacaagttcggcaagcgatggatgaaggaactcccctcggttgtctggagtctgaggacgacgccaaaccgggccacgggcttcacgccattttttctagtctatggggccaaggctatctttcccatagacttagaatacggttccctgaggacaagggcgtacgacgaccgaagcaaccagaccagccgagaagactcactggaccagctagaagaggctcgggacatggccttactacactcgacacggtatcaacagtctctacgacactaccacgcccgaggggttcggtcccgagacctccaggtgggggacttggtgcttcggctatga

SEQ ID NO: 115011 - DNA, 1248 bp, Zea mays
  Clone ID: MRT4577_36372C.1
atgaggggcgggggcgcggttaggcttaaccctaatgggcgatcagcaaacaagcagccgccgctcacctctcgcccttgccaagccgccgtcgcgaacctagcagttcggtacgcggcgcttcctccctacatccccgaggcgttcgctcagcgcggcgcgaggaagaagggcaagaaaaagtcgcaagcgaaacgcgacgtcgccgacgcggaccttgtcaccgccgccgagctcaggaaccctcggaagcctcccggaggcgccaacctgtccgacaagatgctcaaggagccatgcccctatcatcagggtcccgtcaagcacacccttgaggagtgcgtcatgcttcggcgtcacttccacaggaccgggccaccggcggaaggtggccgagcccacaacaacgacaagaaggaggatcacaaggcagaggagttccccgaggtccacgactgcttcatgatctacggtgggcaagtggcgaacgccttggctcgacactgcaagcaagagcgtcgggaggtctgctcggtaaaggtggcggcgccagtctacctagactgctccgacaagcccatcaccttcgaccagggcgaccaccccaaccgcgtgccgagcccagggaagtacccgctcgttgtcgatcccgtcatcagcaacatcaggcttaccaaggtcctcatggacggaggcaacatcctcaacatcatctacgtcgagaccctcgggctcctgcagatcgatttgtcctcgatctgggccagcgcgacgccttttcacgggatcatccccgggaaacgcgtccaaccccttgggaaactcgatctgcccgtctgcttcaggactccctccaatttccgaaaggaaaccctcacgttcgaggtggtcgagttccgaggaacctaccacgcagtgctggggaggccatgctacgccaagttcatggccgtccccaactacacctacctcaagctcaagatgtcgggccccaacggggtcatctgcgtcggctccacgtacagacacgcgtacgaatgcgacgtggagtgcgtggagtacgccgaggccctcgtcgaatccgaggccctcatcgccgacctagagagcctctccaaggaggcgccagatgcgaagcgccgcgccgacaacttcgagccagctaagacggttaagttcgtccctctcgaccccagtaacgacgcctccaagcagatccggatcggctctgagctcgaccccaaatag

SEQ ID NO: 115012 - DNA, 359 bp, Zea mays
  Clone ID: MRT4577_36373C.1
aaaaacccggccgggcatttttcccgcccgggtaacctcccacctaaaaacaaggggggaataccccctttaggggcccgacccattttttttaaaaacaggccagtgcccaaatggggggccctggggggccccggacaaaaaaaccccgggaaagtcgggggcccacagcgggggaaaacctatttaatccacaggggccgggggcctgcagattgccaaaaacctcatttgggggggccaaagatcccgcccctacggaactacaaaaacccatttgtgggcgaagggcgatttttgggaaaggaatccctcccaaaccatcttgggggacgggtacttggggggcacaaattttt

SEQ ID NO: 115013 - DNA, 1996 bp, Zea mays
  unsure (1)..(1996): unsure at all n locations
  Clone ID: MRT4577_36374C.1
attatcagttctttctctaccaactgatccgtgctctgaaatacatccacacagctaacgtttatcaccgggacctgaagccaaagaatatattagcaaattctaactgcaaactgaaaatttgtgattttggactagcacgagttgcattcaatgataccccaacaacgatcttctggacagattatgttgcaacaagatggtacagagctccagagctctgtggatccttcttttcaaagtatacaccggccattgacatttggagcattggatgcatctttgctgaggtgttaacagggaaacctttgtttcctggtaaaaatgttgtccatcagttagacttaatgactgaccttctaggcacgccatcgatggatacgacttctcgggtccggaatgagaaagcaaggaggtatctaagtagcatgagaaagaaagagacaatttcgttctcacaaaagtttccgaatgcagatcctttagccttggatcttttgcaaaggcttttagcatttgatccgaaagaccgtccaactgcagaacaggcattggctcatccatactttaaagggctagccaaggttgagagagagccatcttgtcaaccaatcacaaagatggagtttgagtttgaaaggagaagagtgacaaaagaagacattagggagctgatattccgtgagatattggaatatcatccacaactgctcaaagactatatcaatggcacggagaggacaacctttctgtacccaagtgctgtcgaccaatttaggaagcaatttgctcatcttgaagaaaatagtggaaacggacctgtgattccaatggaaagaaaacatacttctcttcctaggtctactattgttcactcatctccaattcctgtcaaggaacaaccccgtatcggcccatgtagggaaaggccttcatctgatgagtcctacaggaatcctcgggagacagaacaatattccggcaatctccccagaacgtcacaggctccacaaagagtgccaacagcgagaccaggaagggttgttggtccagtaatgccttaccaaaatggagacaccaaagacccctacgacacacgaaggttggcaatgagctcaggatatcctccccaacaaatcccacaaacgtttggttattatcagacacatggtaaaccagcttgctgcgagccatcacaggctgaaaggtacacgctgcatcagcaggctgcctatgcctgcgcaaaccgtacagccgcgtctgatgttgctctggacatgagagcacccccttttcagcatctatcggcagggcagagaagtgactcttgtgataggctgacagcagagacaaacttgtacacgagatcaaccaacggcatcgctgccactgcagcaggagtggcagcaactactcacagaaaggtcggcgttgttccgtttggcatgtcaaacatgtattagtgactggatcatggccgaatcatggtgaatcctctgtgcggttgatgggtctatgctgccttcaggtggctaaacaccgacaacttgaagcggccaatcaaacctttggctggatgctgcaagtttagagtgcagtagacagtgttttttctgtgtggtcaggaaaagaggaacaccgccggcggcatgaagcctgccaaaaagtttgtatctgcctgtgcctgagaagtgtgcccttggttgcacactgagaaggggtatagtcggcagtccggcggcatgtaatctgggcaatttaggcgccaatttcttttctagagcgaggaggcagaagggaaaggaaggaacattaacgttttaaatgttgtatagagacgtttctcatgcatcaatgtgctacatcagaattacttcagaaagatatgagatacagcaaaaaaaaaaaaaaaactgtatggcataaaaaaaaaaaaaaaaaaaaaaaaaaaaaaaaaaaaaaaaaaaaaaaaaaaaaaggggcggnccgttttaaa

SEQ ID NO: 115014 - DNA, 187 bp, Zea mays
  Clone ID: MRT4577_36375C.1
cttctgatacgggcctaagactcagctgatcgcctaaggattggtacttgtgtggccaaagacctattcacatgacagggtacggggagcctcgagtggtggtaacctattcatactttgctacgatgtgatacggatgcactgtctatacgaggaactgctggccttaatgttcattcatcacatg

SEQ ID NO: 115015 - DNA, 2322 bp, Zea mays
  unsure (1)..(2322): unsure at all n locations
  Clone ID: MRT4577_36376C.1
gaggtcatggattaccacctcctcaccctgctatgccactgcctcatcctcaccctggccaccctggtcctctgggcacgagcccggccgggcacaagcctacaagcaaccgcgtccgcgtgtggagcaaggaaggcgaggggagccgagcgggcaaccggcggcgacagacatggcggagcagcacaaggaggagtcgggcgtgacagtgctggacaagatctccgacaagctccacgggcgcgggggcggctcgtcttcgtcgtcggactcggacgacgagcgctcgtcggcgacggccgccgtgaaggccaagatctaccgcatcttcgggcgcgagaagcccgtgcactccgtcctcggcggcggcaagccggccgatctgtttctatggaggaacaagaggatctctggtggggtgctcgcaggcgcaactgccttctggctgctgtttgaggtcatggattaccacctcctcaccctgctatgccactgcctcatcctcaccctggccatcctgttcctctggtccaatgccacgactttcatcaacaagtctcctcctaacatccccgaggtgaagatcccagatgacctggctgtgaatgttgcacgttccctgagatatgagatcaacaggggttttgctaccttgagggagattggccaaggccatgacctcaagaaatttctgattgtgattgcaggactgtggatcctttctgttcttgggagctgctgcaatttcctcaccttgtcttacatagtttttatggtactgtacactgtaccggtcctgtatgagaaacatgaggataaggttgatgcttttggtgagaaggccatggtcgagctgaagaggtactacgccatcttcgacgagaaatgcctatcaaagattccgaagggcccattaaaagacaagaagcaacattagaagcttagaatcagataagggtctgcggtgatttatcatctcttttgaccattattcgtcggttttggtggatggatgtgattccatgtctaaatacctggacgtgctctagtgttttagtgtggtcagtagcaatgttctaaattatctgagattacgctgaatcatgttctgaagtccacgtttaacgttgctctccctatcctttggaagtggcaatttcctcaatgtctgtaatatatctagtctagtgctatttcttaaaaaaaaaaaaaaaagtacaagcctacaagcaaccgcgtccgcgtgtggagcaaggaaggagaggggagccgagcgggcaaaggggagcgcggcgacagacatggcggagcagcacaaggaggagtcgggcgtgacagtgctggacaagatctccgacaagctccacgggcgcgggggcggctcgtcctcgtcgtcggactcggacgacgagcgctcgtcggcgacggccgccgtgaaggccaagatctaccgcatcttcgggcgcgagaagcccgtgcactccgtcctcggcggcggcaagccggccgatctgtttctatggaggaacaagaggatctctggtggggtgctcgcaggcgcaactgccttctggctgctgtttgaggtcatggattaccacctcctcaccctgctatgccactgcctcatcctcaccctggccatcctgttcctctggtccaatgccacgactttcatcaacaagtctcctcctaacatccccgaggtgaagatcccagatgacctggctgtgaatgttgcacgttccctgagatatgagatcaacaggggttttgctaccttgagggagattggccaaggccatgacctcaagaaatttctgattgtgattgcaggactggnggtcctttctgtttttgggagctgctgcaatttcctccccttgtcttacatagtttttatggtactgacccctgtaccggtcctgtattaaaaccataaggataaggttgatgcttttggttaaaagcccatggtcgaccttaaaaggtattacccccttttctccgaaaaatgcctatcaaagattccgaagggccccttaaaagccaagaagccccctttgaagcttagaatcagataagggtctccggtgatttatcatctcttttgcccattattcgtcggttttgggggatggatgtaattcaaggtttcaccccccccccccgctctagtgttttagtgtggccagaaccaatgttttaaattatttgagattccgctgaatcatgttttgaagtccccgtttaaaaaaaaaaaaaaaaaaaaaaaaaaaaaaaaaaaaaaaaaaaaaaaaaaaaaaaaacaaaaccccccac

SEQ ID NO: 115016 - DNA, 1088 bp, Zea mays
  Clone ID: MRT4577_36377C.1
ctgtgataccagctgatttatttattctcttatttggaacgcgtgggcaacaagaagccactagaaagaataaaggaacagaatgcagtgacaccaccgctccatcatgtaggtgttattacaaatgttagtactaaccttttatgtttatatttgatcaaacctaaaatggctgactcattaaagaatgagaaatgacaaacttttgtgttagagggagtagataatggtgatctgtgcaagctaatctgcagtagtagtcaccagccgatgatcatgtgtttctctgaattctgaaacctaatcctgcttcaaaatggcatatataattcctggtcctctcgaaaaggcaatagaacctgagcttgtgatcttgttttaggagtagataatagtatataattcaagatgttaagtatatataaacaagaatcgtatatgaacccagtttctctacattctgaaacctaatcctgagatgatgtgattgtgatccactgactggaggatccatgcaaatctcagtgtcaccttctccagcaggcaacaactgactgtttgttggtgtgcagtgttcttcaaactattcagcaactaaactgttcaaacatgttactgaagattggcagctgaaacacatgatcaccggctgaacatggtaggcgtgaaaaatatgatcaccgactgaacattttatgatcaccagctgaaacacaagatctgggaggcgtggaacatggtagctgaactcttcaaacatgttaggcaatagcaggcaacaacagtgaaacacaatcaccgattgaaaagctgtccggcacctgaactgcgcaaatttggttgcctggtggagggaggtctaacggctgacactgctattcaattatttttttactttagtttgtatcctccttacagatgttggatgaaagcaaaccttcattttttgtttagcaggcctactaaaacaagcttagtgaacctgggtgaacaacatgcactgattcaaaattttatttgcattcattgcatttagcttgccttgatgaccctgtcattttaatcacagtcttgggcattttatttgt

SEQ ID NO: 115017 - DNA, 350 bp, Zea mays
  Clone ID: MRT4577_36378C.1
ggggataaacttcccatgccattggataatatatgagccattggaaacgttatgcagcattacaaggtcacaacagatgggctatgtttatttaccccgagttccgtcaagggcaatgaaaagggcccctttttaaccaaaaaggttaaaatcttggcggggatttttttacacaacagccctgggaatacataaacccgattaggtgccccctagggttttgacacaaatcacgaacaaaacacggggggaaaggttatcattcccgggtggtgggggggctcaggggggcccttatttgctaccattcctcaaggtttattggagaaatccattttttggcactcaac

SEQ ID NO: 115018 - DNA, 130 bp, Zea mays
  Clone ID: MRT4577_36379C.1
gtgttaactgagtactggaactgatattcagtgggcaaactaagagatgcatagcgagcaacgacggagctgtcacaacacgaggactctgacccaataattgctgacgacgaacgagaaaaagcgcatg

SEQ ID NO: 115019 - DNA, 178 bp, Zea mays
  Clone ID: MRT4577_3637C.1
tggtgcttgggtgtatgctcgcgtacggtttcgacgctcggactcgggctgtccccctccgctcctgcctctccgccactgctccatcctgaggtccacggttccgttgtccgcgtgcggcgaggaagcgtgtccgctggaatcgtcatccagattgagaagctcgggtatgcgtccg

SEQ ID NO: 115020 - DNA, 350 bp, Zea mays
  Clone ID: MRT4577_36380C.1
aaacggaaccaatctgtttaagccgtttgcggcaaaatgggggccgaatcattcaaaactggggtgctgcacacaaaagttaggatcgactagccggggggaaaccccctgcacttagaaaaacatgctttcctagctgtaacctgattagaggataaccttctttgcaagcgaccgtaatcaccccgtttccactttggaactggctcctcaatccgcgccgagattttgacggaacatatactttaaacgccttaacatgattgccggtgcctgacgcatgaaaaacaagatctggtggaataatccggggggaccttgcgaagcatatgacaaaagacatggggtgg

SEQ ID NO: 115021 - DNA, 473 bp, Zea mays
  Clone ID: MRT4577_36381C.1
aggccatacttagtacaatatatatggtcatgcataatattgttcaacactgtacaatgctttatttataaagtggtgcttagcataataaacagtccggggtggaatacgaagaccgttggatatagccttggtagcgagaatgaactatgtgatgggaaagtattgacatgaatggaaccaaccaatacccatatggcatagaccatataggcagggctccgttgatgccatcatcaagtgcaagaagagccctgctaaatccttagaggcttattactgatggatgaacatattaaaaaaggttgagtacctgattatctgctaatgactacgaatgatgcaatccaaaataccaatgacacaataagcagcacctgttagggatgcataggatcccggccatgtgccatctttagcctgcgatcaagttcgcgtaagcgcacacctgattgtaccagtctttcttcacc

SEQ ID NO: 115022 - DNA, 157 bp, Zea mays
  unsure (1)..(157): unsure at all n locations
  Clone ID: MRT4577_36382C.1
ggccgcttttttttttttttttttggagaacatatgctttccatccggaaggcttttccaacatttcaatcgaccttcaaagaatcaaaagccatcatgacttctcacaatcaggtttatgagggtntaataagaataatgaaaggacgatagtctg

SEQ ID NO: 115023 - DNA, 158 bp, Zea mays
  Clone ID: MRT4577_36383C.1
gggcggggtgttggttggacaccaccctaccgggctacgagggccgtcttcccttccaccttgaaacatggtatgtggaggtggacgaggacgccggctcggagcttttctactacttcgttcgggccgagtccggcgccgacgacagcgacaccccg

SEQ ID NO: 115024 - DNA, 795 bp, Zea mays
  Clone ID: MRT4577_36384C.1
gtcatcacgtccaagtactcggtatacaacttcgctcacatgctcaagtgctccatgcctgacaccctcaacctaagcattgtgcgcgtgctgctcgcgctgaccgctctccccaagcctctctccaggtggtctcggtcatgaaggagcaagacagtggacagacggtgattgagctgatgggctcgctgacagagtcgcttgtcatcgccgcaatgaggctgcttattgcgttgtccccgcagatggggcacaccattgccgagaagctgtgcaaggccccggggcagccagggaggcttgtcaagagcattggcctgcacgggcggatcatggagcggcacgccatgtcagctactctcctggcgaagctgccgtaccagcacatcgctctgaacctggcgctgatcaaccagggcgcgatggttaccgtgctagccaagatagaggagatgcagcgcggcgagacgcgggcaagccgccatgcgaaggcgtatatggagggcctcgtgggtgtgctggtccggctaacgacgacgctgtatgacccggacgtgctcttggcggccatggatcacaacctcacgtcggtgctcacagatctcgtgcggtccgcaggcagcgacgaggtccagcgtctcgccgcgattggtctcgagaacctcagcagccagtcgcccaacctttcccagcccccaaccgaggagcggcgcccgaagaagaagaacatcctccggcgcctgcgcgaggcgcacgcggggcgggtgcacgacaaccggaggccgccggcgcaca

SEQ ID NO: 115025 - DNA, 497 bp, Zea mays
  Clone ID: MRT4577_36385C.1
aaccctcgcgccgccacctcttccaccacccagcgctctagctcctcgcgacctgcaagcgcgctccgcaacgtcactcatgaagttcaacatcgcgaacccttccaccggctgccaaaagaaactggaaatcgatgacgaccacaagctgcgtgccttttatgaccgaaggatatcccaggaggtctgtggtgatgctctgactgatgatgtcaaggcttatgtttttaagatcctgtaggatgtgataagcacggcttcccaatgaaccaaggatgtttgacttctgcccgtgttcgtcttctgatccatacaggcactccctgattccgcggatatggaagtagtaatgttgaacagcctgagcaagactgctcgccggatgcatcgcgagccaagacctatctgtctatcaacttgatgattgtgaaaaatgctgagaatgatctgtctgccctgactgactctgagaatataaggatgaggggtcccaacag

SEQ ID NO: 115026 - DNA, 285 bp, Zea mays
  Clone ID: MRT4577_36386C.1
acgtaagctcggaattcggctcgaggaacgttctaaccaatttgtacgcacccacggggcggggacaccacaagggggctttttggcggcttcaggggattgcatcccggcccccctggggcatgacttcaaagtagcgagatccctggaactgatactaccacacaaaaaagccggcctccaagaagaagcccatatacaagatggcggtggccctatccatcacgagggagaccattgcttacatggactcttacggtccgacaacgtgctcccgacgatgag

SEQ ID NO: 115027 - DNA, 313 bp, Zea mays
  Clone ID: MRT4577_36387C.1
aaaaaaaaaaccagggccccaattttttcccggggttttttacagcccttgtttggtggggtacaaggtgtttccccgtttgattttttgccccaatttctttttttttccccccccaattccaaaaaacaccctttgggggaaggaaaaaataaatgggcaagggcctttttttttttccctcccgattcccaaaaaaaacctgggggggagggttaaatttttttggcaatggccccccccccttatttagcctacatgcagaatttcagctttacattcattcttgggaaagggatccaaaccctgtttt

SEQ ID NO: 115028 - DNA, 292 bp, Zea mays
  Clone ID: MRT4577_36388C.1
tcccggttcaaccaacccttccgcgacacccttggtaaaaaaacaaatatttatttaaaacaaaaataaaaaccaacaagggtaagcttatcaactatatccaaaaaaaaagcaaactaactttctaactgttcaatactcttgacattctttgagtaaactttagatatcctctcatacattcattatccagtacctgattgtccattgtctctatattctttactgtgacattatatggttgactcgcatttcccatttatccagtttctgttatactaccattgcttct

SEQ ID NO: 115029 - DNA, 2889 bp, Zea mays
  Clone ID: MRT4577_36389C.1
atgggcagtctccagcaacctctccggcccgggacggtgctccgtttcgggagtcttgagttcatgtccttcgacggcagctacgacatgatactccttccaccgccgcgcgacaacgaccatggcggccgacaacccgcccgccggcggcggaatcgacgacatcttccccgcgtggcggaagaacaacattcgagctcgctccgtcctctcccccgccaacggaggaggaggcggggcaaccaaggccaagcgggaggccgcgcttcgtcggctgtcgagcgaatcgacgtccccgacgccccgacgggaggcacgccgggcgtcgacctcgcgttcgagacgaaggcaagcgccgtccccccgcgacacgctgatcccgagcaagaagacgacgccagcgcgctcgcggaaagcctgcaggacgtcgccctcgtacctgggacgacggtgcaaccagtccccgatgtgactacgtcgctcctcgtcgaccaaaaggtactgactaactcccatcttacgtcatttcgactcggcctcaacccgccaagcgacctctctttggcgggcgctctcattgaggcgagtgcaaccccactggggtttcgtatgcggtcgccttgggaccggttgacggacgtctcaacctacgggccctctgggtccgaggaagatgacgatcccagcatctgttgggatttctctggacttggcaaccccagtgccatgcggaacttcatgaccgcatgtgactactgcctctccgactgttccgacggaagccgcagccttgacgacgaggactgcggcccaagccgcgaatgtttccacatcgagctaggggatccctccgaaggcaaccatctcggcatgccggaggacggtgatcttcctaggccggtgcctcgcgccgacatcccgcgggagctagctgtggtccccgttccggcggggggtcacgacccacaactcgagcaagtccgtgaggcgcaggccaggctcaacgagggaacaggagtgcttgagccgatccgtcgggatgtcgggcaggcagggatacccctcggaacctcaggccgcgacttcccgattcatgcgggaagcctcggtctacaccgggcgcacgcgcaacaccgcgcctgcggccccgggccacctcggcaacgagcaccatcgacgcgaccgtcgggcccacctcgacgaaagggtgcgccgaggctaccaccccaggcgtggggggcgctacgacagcggggaggatcggagtccctcgcccgaaccacccggtccgcggactaccgcctggcctgccaactgggtggaacggacgatgacaacctcatcatccgaaacctccccctgttcctctccaacactgctcgcgcctggttggagcacctgcctccggggcagatctccagctgggacgacttggtccaagccttcgccggcaatttccagggcacatacgtgcgccccgggaattcctgggaccttcgaagctgccggcaacagccgggagagtcgctccgggactacatccggcgattctcgaagcagcgcaccgagctgccaaacatcaccgactcggatgtcatcggcgcgttccttgccggcactacctgccgtgacctgatgagcaagttgggtcgcaaaacccccaccagggtgagcgagctgatggacatcgccaccaagttcgcctctggccaggaggcggttgaggctatcttccgaaaggacaagcagccccagggccgcccatcggaagaggctcccgaggcgtctactccgcgcggcgccaagaagaagggcaagaagaagtcgcaatcgaaacgcgacgccgccgacgcggaccttgtcgccgccgccgagtacaagaaccctcggaagccccccggaggtgcaaacctcttcgacaagatgctcaaggagccgtgcccctatcatcaggggcccgtcaagcacactctcgaggagtgcgtcatgcttcggcgccacttccacagggccaggccacccgcggagggtggcagggcccacgacgacgacaagaaagaagatcaccaagcaggagagtaccccgaggtccgcgactgcttcatgatctacggtgggcatgcggcgaatgcctcggctcggcatcgcaagcaagagcgccgggaggtctgctcggcgaaggtggcggcgccagtctacctaaactggtccgacaagcccatcaccttcgaccgggccgaccaccccgaccacgtgccgagcccggggaaatacccgctcgtcgtcgaccccgtcgtcggcaacgtcaggctcaccaaggtcctgatggatgggggcagctgcctcaacatcatctatgccgagaccctcaagctcctgcgcgtcgatctgtcctccgtccgagcaggcgctgcgcccttccttgggatcatccctgggaagcgcgtccagccactcggacgactcgacctccccgtctgcttcggaacgccctccaacttccgaagggagaccttgacgttcgaggtggtcgggttccgaggaacctaccacgcggtactgggaaggccatgctacgcgaagttcatggccgtccccaactacacctacctgaagctcaagatgccaggccccaacgcggtcatcaccgtcggccccacgtacaaacacgcgttcgaatgcgacgtggagtgcgtggagtacgccgaggccctcgctgagtccgaggccctcatcgccgacctggagaacctctccaaagaggtgccagatgtgaagcgtcatgccggcaacttcgagccagcggagacggttaaggccatcccactcgaccccagtggcgacacctccaagcagatctggatcggttccgggctcgaccccaaatag

SEQ ID NO: 115030 - DNA, 1676 bp, Zea mays
  Clone ID: MRT4577_3638C.1
attatttttattagatcttgacggcaaagctcttggggatatgtctgcccggtaaaatccctcggagcgagtgttttctggtgaactacttgcatactaagaaacaacaacgatgcccctgaagattctaccgggtgcgttttggaacttcttaggcatgttatgcaataagctgcggccaagactaccaatttagcaagttttcttttagatcccttgttggtaaagggggaaagatgatcagttcgatgcacgaaccagtgctgcataatgtttctataggacgaacaacttgtggtatgtatcaagatcttgctattgaaagttgggcgtcatctacaggagctgacgtttatttaactggtccgacaagcccaacgattataaccaactaggttgtaacagtgtcatgatttgtggtatactggagcattgctcctcggtgggttgtttttcttgtcatttgtttctgtatctccatagtttgaagaagcgcgtcccatctgttaagagctcctgattattgccgtgtgtgataatgcattccctctttacgccttttctatgattttgaatcttagtgttgttaagggagagtgttaattggagtacggtctgagcgtactacttcttccctactctgtacacagtgactctgaagttagtttcgtagaaaagcgggaagcacttcaacaattggtcgatgcttccctcgataacaacagctccatttgggcaaagtacttcaatcaaatcttaaaggttgtgcttgaagtattagatgactctgattcatccatgagggagcttgctttatctttgattactgagatgctcaacaatcagaaagatgcaattgaagactctatggagattgtttttgaaaaactcctgcatgtgaccaaagatgcagtggccaagatttcaaatgaggcaaaccaatgcttaaatgttctattggcaaaatacaaccctttcacatgtcttgctattactgtacctttattggtcagtgatgatgagaagatgcttgttgtgtgtatcaactgtttgacaaagcttgttgggcgcctttcccaagaggaattgattgataaattgcctacatttctgccagcattatttgatgcttttaacaaccaaagtccagatgtccgaaagactgttgtgttctgtctggtggatatctacatcatgcttgggaaagcatttgctccatacttggaagggcttagcagcacgcagctccgcctagtaaccatctacgctaaccggatttcacaggcgaggtccggcaagccaatcgattctaaccaatgaggttgtaacattgttattatttgtggtctatatgagcatttctccggtagggtggttttcttgtcatttgtttgtgtatgtgtatagtataaacaagcgcctcccatctgttaagagctcctggtttttgccctgtgtgattatgcattccctctttacgccttttcctctcttttccccctttggtagcttgtggagagtgctaatgagtgtggcttcatttgtactacttggtacatactctgtacaaagaaaggaaagtgtagtttcgtggagaacagttatgcaagtgatttttttgacgccattttccttggcgggatgacaaaaaaaaaaaaaacggcacgagctcgtgc

SEQ ID NO: 115031 - DNA, 2331 bp, Zea mays
  Clone ID: MRT4577_36390C.1
atggggcccatcaaggacttgaaaggcgtacagagggtcatgggatgccttgtggctctgagccgtttcatctcgcgcttcggaaaaagaggcctacctctgtaccgcctcttaagaaagaccgagtgcttcacttggacctccgaggccgaggaaaccctcgggaacctgaaggcgctccttacgaatgcgcccgtcttggtgccccccgccgccggagaagccctcttgatctacgtcgccgctaccactcaggtggtcagcgccgcgatcgtggttgagagacgagcagaagggcatgcattgcccgtccagagaccggtttacttcatcagtgaggtactgtccgagaccaagatccgctacccgcaaattcagaagttgctgtacgcggtgatcctgacgcggcggaagttgcgacactacttcgagtctcatccggtgactgtggtgtcatccttccccctgggggagatcatccagtgccgagaggcctcgggtaggattgcaaagtgggcggtggaaatcatgggcgagacaatctcgttcgcccctcggaaggccatcaagtcccaagtcttggcggactttgtggctgaatgggtcgacacccaactcccaacggctccgatccaaccggaactctggaccatgtttttcgatgggtcactgatgaaaacaggggtagacgcgggcctgctcttcatctcgcccctcgggaagcacctccgctacgtgttgcgcctccatttcccgacgtccaacaatgtggccgagtacgaggctctggtcaacgggttgcgcatcgccatcgagctaggggtccggcgcctcgatgctcgcggcgactcgcagctcgtcatcgaccaagtcatgaagaactcccactgccgcgacccgaagatggaagcctactgcgatgaggttcggcgcctagaggacaagttctacgggcttgagctcaaccacatcgcccgacgatacaacgagactgcggacgagctggctaagatagcctcgaggcggacaacggttcccccggacgtcttctcccgagacctacatcaaccctcagtcaagaccgacgacacgcccgagcccgagaaggcctcggccttgcccgaggcgccctcggctcagcccgaggcaccctcggctcggcccgaggcgccctcggttcggcccgaggcatcctcggcccccgagggtgaggcactgcgcgtcgaggaggagcggaatggggtctcgcctaatcgagactggcaaaccccgtacctgcattatctccaccgaggagagctgcccctcgaccaagccgaggctcggcgactggcgcggcgcgccaagtcgttcgtcttactgggtgacgggaaggagctctaccaccgcagctcctccggcatcctccagcgatgcatatccatcaccgaaggccaggagctcttacaagaaatacactcgggggcttgcggccatcacgcagcgccccgagcccttgttggaaacgcctcccgacaaggtttctactggccgaccgcgaaggcacccgggggctacacgcacctgctagtcgccatcatcaaattctccaagtggatcgaagtccgacccctaaacagcatcaggtccgaacaggcggtggcattcttcaccaacattatccatcgcttcggggttccaaactccatcatcaccgacaacggcacccagttcaccactagaaagttcctggacatctgcgaggatcaccacatccgggtggactgggccgccgtggctcaccacatgacgaatgggcaggtggaacgtgccaacgacatgattctgcaaggactcaaaccgagtatctacaacgacctccacaagttcggcaggcgatggatgaaggaactcccctcagtggtctggagtctgaggacaacgccgagccgagccacgggcttcacaccgttctttctagtctacggggccgaggccatcttgcccacggacttagaatacggttccccgaggacgagggcgtacgacgaccgaagcaaccagaccgaccgagaagactcactggaccagctcgaagaggctcgggacatggccttactacactcggcgcggtaccagcagtccctgcgacgctaccacgcccgaggggttcggtcccgagacctccaggtgggcgacttggtgcttcgactgcgacaagacgcccgagggcggcacaagctcacgcctccccaggaagggccgttcatcatcgccaaggttctgaagcccgggacatacaagctggccaacagccaaggcgaggtctacagcaacgccaggaacatctga

SEQ ID NO: 115032 - DNA, 1311 bp, Zea mays
  Clone ID: MRT4577_36391C.1
atgtacttcgacgggtcgctgatgaaaaccggagcaggtgcaggcttgctcttcatctcacccctcggagaacatgtacgttatgtactgcgcctccatttcccggcatcaaacaacgtggccgagtacgaggccttagttaacggcctacgcatcgccgtcgagctaggggttcggcgcctcgacgctcgtggcgactcgcagctcgtcattgaccaggtcatgaagaactcccactgccacgatcgaaaaatggaggcctactgcgacgaagttcggcacttggaagacaagttctatgggctggaactcaaccatgttgctcgacggtacaacgaaaccgcagataaggaaaatagcctcggggcgaacgacggttccctcgaatgtcttctccaaggatatatatcagccatccgtccaaatcgacgacacgtccgagcccgaggaggcctcggcccagcccaagtggccgacgccactagggttgtacgctcctgctgggggtgtcaattctacgcgcgacagacgcacctgcccgctcaggcactgcagacaatacctatcacttggccatttgccgtgtggggtctggacctcgtcggccccttgcagaaggcacccggaggcttcacgcacctgctggtcgccatcgacaaattctccaagtggatcgaggtccgacccttaaccagcatcaggtccgagcaagcggtggcattcttcaccaatatcatccatcgctttggagtcccaaattccatcatcactgacaatggcacgcagttcactgggaaaaagttcctagactcctgtgaggaccaccacatccgtgtggactgggccgtcgtagctcacccgatgacaaatgggcaggtggagcgcgccaacggtatgattttgcagggactaaaactgaggatctacaacgacctcaacaagtttggcaagcggtggatgaaagaactacactcggtggtctggagtctgaggacgacgctgagccgggccacgggcttcacgccgtttttcctagtctatggggccgaggctatcttacccacgaacttggaatacggttccccgaggacaaaggcgtacgacgaccgaggcaaccggactagccgagaagattccttggaccagctggaagaggctcgggacgtggccttactacactcggcgcggtatcagcagtctctgcgacgctaccacgcccgaagggttcggccccaaggcttccaagtgggagacttggtgcttcggctgcgacaagatgcccgagggcgccacaagcttgctcctccctag

SEQ ID NO: 115033 - DNA, 818 bp, Zea mays
  unsure (1)..(818): unsure at all n locations
  Clone ID: MRT4577_36392C.1
ggcccgggaaaaaaaaaaaaaaaaaaaaaaaaaaaaaaaaaaagatgcaaagtgcttaagatggtttccaaggaaaatccatataccactcagtgatgggttgtgaaagaatatcgatgacattgtaaaacaacaacacatcttggcaaaaagagaatcgatggtactgacaacaattgtttgcaggggaggctacttacttgcaccacaaaaacaaacaaaaacagacaggggtctttggtgtttgggggtgtagattatttgggcgcttttgggtgtgtggcttttttggcaatctcatagatattcttggcttgtggcgcgggaagtagcttggcacactctcgctagaatggagaaaaaaagggacacttctcaaaagccaacttactcggagaaaaaatatcttttataaaaaaaaaacacaaggaacttctcttccttagaaaacaacataattattcattcttgagtgaagaaatcngcccgcacacaaatacaaaagaaaattttttctcttgtgaagaagctcaagaaaaggctcacaaatgaacttttgataacatcaccgcatactttgngnaacgtggaggccatctggaatggggtttaacaaaggaaatcttgttcggatcaagcnngtgtggtagcaaataaaaatttnctaagatcattggagcaagggtgaaanatcgacagtttcatcaaccgagggtcgccatttcttttctcagaataaaccaccgcanacatagtacgactctttcggnatagttgtcttgaaacttgaggtcccacttcctcggggtatgaatttc

SEQ ID NO: 115034 - DNA, 1698 bp, Zea mays
  Clone ID: MRT4577_36393C.1
atgggatgccttgcggctctgagccgcttcatctcgcgcctcggcgaaagaggcctacccttgtaccgcctcttaagaaaggctgagtgcttcacttggacccctgaggccgaggaagccctcgggaacctgaaggcactcctcacgaacgcgcccatcttggtgccccccgctgccggagaagccctcttgatctacatcgccgctaccactcaggtggtcagcgccgcggtcgtggttgagagacgagaagaggggcatgcattgcccatccagaggccagtctacttcatcagtgaggtactgtccgagaccaagacctgctacccacaaattcagaagctgctgtacacgatgattctgacgcggcggaagttgcgacactacttcgagtctcatccggtgactgtggtgtcatccttccccctaggggagatcatccagtgtcgtgaggcctcgggtagaattgcaaggtgggtggtggaaatcatgggcgagacaatctcgttcacccctcggaaggccatcaagtcccaagtcttggtggactttgtggctgaatgggtcgacacccagcttccagcggctccgatccaaccggaactctggaccatgttttccgacgggtcgctgatgaaaacaggagcgggtgcgggcctgctcttcatctcacccctcgggaaacacctccgctacgtgttgcgcctccatttcccggcgtccaacaacgtggccgagtacgaggctctggttaacgggttgcgcatcgccatcgagctaggggtccgacgcctcgacgctcgcggtgactcgcagcttgtcatcgaccaagtcatgaagaactcccactgccgtgacccgaagatggaagcctactgcgacgaggttccgcgcctggaagacaagttctacgggctcgagctcaaccacgtcgcccgacgatacaacgagactgcggacgagctggttaagatagcctcggggcgaacaacggttcccccggacgtcttctcccgagacctacatcaaccctcagtcaagaccgacgacacgcccgagcccgagaaggcctcggcccagcccgaggcaccctcggcccccgagggtgaggcactgcgcgtcgaggaagagcggagcggggtcacgcctaatcgaaactggcagaccccgtacctgcaatatctccatcgaggagagctgcccctcgaccgagtcgaagctcggcgattggccggcgcgccaagtcgttcgtcttgctgggggacgggaaggagctctaccaccgcaacccctcaggcatcctccagcgatgcatatccatcaccgaaggccaggagctcttacaagaaatacactcgggggcttgcggtcatcacacagcgcctcgagcccttgttggaaacgccttccgacaaggcggtggcgttcttcaccaacatcatccatcgcttcggggtcccgaactccatcatcaccgacaacggcacccagttcaccggcagaaagctcctggacttctgcgaggatcaccacatccgggtggactgggccgccgtggctcaccccatgacgaatgggcaagtagagcgtgccaacggcatgatcttgcaaggactcaagccacggatctgcaacggcctcaacaagtttggcaagcgatggatgaaggagctcccctcggtggtctggagtctgtag

SEQ ID NO: 115035 - DNA, 2931 bp, Zea mays
  Clone ID: MRT4577_36394C.1
atgggcagtctccagcaacctctccgacccgggacggtgctccgttttgggagtcttgagttcatgtccttcgacggcagctacgacatgatactccttccaccgccgcgcgacaacgacaatggcggccgacagcccgcccgccggcggcggaatcgacgacgtcttccccgcgtggtggaagaacaacattcgagctcgccccgtcctctcccccgccaacggaggaggaggcggggcaaacaaggccaagcgggaggccgcgcctcgtcggctgtcgagcgagtcgacgtccccagcgccccaacggggagcgcgtcgggcgtcgacctcgcgtttgagacgaaggcgagcgccgtctccccgcgacacgccaatcccgagcaagtggacgacgccagtgcgctcgcggagagcttgcaggacgtcgccctcgtacccgagacggcggtgcaatcagtccccgacgtgactatgtcgctgctcgtcgaccgaaaggtaccgaccgattcccatcctacgtcatttggactcagcttcaacccgcctagcgaccttgctttggcgggcgctctcgtagaggcgagttcaaaccctctggggtttcgcatccggtcgccttgggaccggctgacggacgtctcgacctacgggccctctgggcccgaggaagatgacgaccccaacatctgttgggatttctctggatttggcaaccccagtgccatgcgggacttcatgaccgcatgtgactactgcctctccgactgttccgacggtagccgtagcctcgacgacgaggactgcggcccaagccgcgaatgtttccacgtcgatctaggggatccctccgaaggcaatcatctcggcatgccggaggacgcagcgatgcttctccgcgcgatgccggagccatcaaccaccgagggtcggcgaatccagggagagctcaagaatctcctggaaggcgctgtggtccgacgggccgagagctctgcctcccgaaggcagggatacccctcggaacctcatgccgcgacttcccgattcatgcgggaagcctcggtctacaccgggcgcacgcgcaacaccgcgcctgcggccccgggccacctcggcaacgagcaccatcatcgtgaccgtcgggcccacctcgacgagagggtgcgccgaggttaccaccccaggcgtgggggacgctacgacagcggggaggatcggagtccctcgcccgaaccacccggtccgcaggccttcagccgggccatccgacgggcgccgttcccgacccggttccgacccccggctactatcacaaagtactcgggggaaacgataccggaactgtggctcgcagactaccgcctggcctgccaactgggtggaacggacgacgacaacctcatcatccgcaacctccccctgttcctctccgacaccgctcgtgcctggttggagcacttgcctccggggcagatctccaactgggatgacctggtccaagccttcgccggcaatttccagggcacgtacgtgcgccccgggaattcctgggacctccgaagctgccggcagcagccgggagagtctctccgggactacatccggcgattctcgaagcagcgcaccgagctgcccaacatcaccgactcggatgtcatcggcgcgttccttgccggcaccacctgccgcgacctggtgagtaagttgggtcgcaagacccccaccagggcgagcgagctgatggacatcgccaccaaattcgcctctggccaggaggcggtcgaagctatcttctggaaggacaagcagccccagggccgcccatcgaaagatgctcccgaggcgtctactccgcgcggcgccaagaagaaaggcaagaagaagtcgcaagcgaaacgcgacgccgccgccgagtacaagaaccctcggaagccccccggaggtgccaacctcttcgacaagatgctcaaggagccgtgcccctatcatcaggggcccgtcaagcacacccttgaggagtgcgtcatgcttcggcgccacttccacagggccgggccacccgcggagggtggcagggcccgcgacgacgacaagaaggaagatcaccaagcaggagagttccccgaggtccgctactgcttcatgatctacggtgggcatgcggcgaatgcctcggctcggcatcgcaagcaagagcgccgggaggtctgctcggtgaaggtggcggcaccagtctacctagactggtccgacaagcccatcaccttcgaccaagctgaccaccccgaccacgtgccgagcctggggagatacccgctcgtcgtcgaccccgtcgtcggcgacgtcaggctcaccaaggtccttatggacggggacagctgcctcaacatcatctacgccgagaccctcaggctcctgcgcgtcgatctgtcctccgtccgagcaggcgctgcgcccttccacgggatcattcccgggaagcgcgtccagcccctcggacgactcgaccttcccgtctgcttcggaacgccctccaacttccgaagggagactctgacgttcgaggtggtcgggttccgaggaacctaccacgcggtactggggaggccatgctacgcgaagtttatggccgtccccaactacacctacctgaagctcaagatgtcgggccccaacggggtcatcaccgtcggccccacgtacaaacacgcgttcgaatgcgacgtggagtgcgtggagtacgccgaggccctcaccgagtccgaggccctcatcgccgacctggaaagcctctccaatgaggtggcagacgtgaagcgccatgccggcaacttcgagccagtggagacggtcaaggccgtccctctcgaccccagtggcgacacctccaagcagatccggatcggttccgggctcgaccccaaatag

SEQ ID NO: 115036 - DNA, 645 bp, Zea mays
  unsure (1)..(645): unsure at all n locations
  Clone ID: MRT4577_36395C.1
cgggtggtctccccgcactacgtggtaggttcctcggaacccgaccacctcgaacgtgagggtttcctttgggaagttggagggagtcccgaagcagacgggcagatcgagttgtccaaggggatggacgcgcttcccaggaatgatcccgtgaaagggcgccgcaccggcccggatcgaggacagatcgatccgcaagagcccgagggtgtcggcgtagatgatgttgaggctgctgccttcgtccatgaggaccttggtaagcctgacgttgccaatgacgagatccacaacgagcgggtacttccccgggctcggcacgcggtcggggtggtcgtctcggtcgaaggtgatgggcttgccggaccagtctagatatactggcgccgncacctttaccgagcagacctnccagcgctcttgcttgcggtgccgagccgaggcgttngccacccgcccaccatagatcatgaagcagtgatggacctgggggaactcctctgccttgcgagcttcccttttgtcgttgtcgggggccctaccacttttcgacgggggcccggccttgtggaagtagggcagaaacatgacgcactccgtaagggtgtgcttgacgggaccctgatgatatgggcatgactcctt

SEQ ID NO: 115037 - DNA, 759 bp, Zea mays
  unsure (1)..(759): unsure at all n locations
  Clone ID: MRT4577_36396C.1
gccggccgggttgggctcattcctctctgctctgctctgctccaccaccctgatgacgacgaggccagacggcagcgccgccacgcccgcggacaagcagctcgtggcggcctccaacggcaacggcaacccgctggccgtccgcaaggcgccctccaaggaccggcacagcaaggtggacgggcgaggccggcgcatccgcatgcccatcatctgcgccgctcgcgtgttccagctcacgagggagctcgggcacaagtccgacggacagaccatcgagtggctgctcaggcaggccgagccctccatcatcgccgccaccggcaccggcaccacgccggcctccttctccacctcgtccccgtcatcgctccgctcctcctcgtcctccacagccggcgtccacccgcacgccgccccggcccaggggttctgggcgctgccggcgcgggccgacttcggacagctctggagcttcgcggccgcgccggagatgatggtcgctgcggctgcagcagcagcgccgggcatggccggggaggcgtccgccgccagggtcggcaactacctccccgtcgcgcagggcaacctcaacctgctggcctccttctccggcgggcctgctcccacagcggccgccggacgggccgaggaggagaccgcccgctaagggtcgtcaattcccagtctctctgtgtgtggctcaatccgggatagacagtgtcactctcacccaactctccatttctttntttgggg

SEQ ID NO: 115038 - DNA, 975 bp, Zea mays
  Clone ID: MRT4577_36397C.1
atgggcagtctccggcccgggacggtgctccgtttcgggagtcttgagttcatgtccttcgacggcagctacgacatgatactccttccaccgccgcgcgacaacgacaatggcggccgacaacccgcccgccggcggcggaatcgacgacatcttccccgcgtggtggaagaacaacattcgagctcgccccgtcctctcccccgccaacggaggaggaggcggggcatccaaggccaagcgggaggccgcgcttcgtcggctgtcgagcgaatcgacatccccagtgccccaacggggggcgcgtcgggcgtcgacctcgcgtttgagacgaaggcgggcgccgtccccccgcgacgcgccaatcccgagcaagtggacgacgccagcgcgctcgcggagagcttgcaggacgtcgccctcgtacctgagacgacagtgcaaccaatccccgacgtgactatgtcgctcctcgtcgaccaaaaggtaccgactgattcccatcctacgtcatttcgactcagcctcaacccgcctagcgaccttgctttggcgggcgctctcgttgaggcgagtgcaacccctctggggtttcgcacgcggtcgccttgggaccggttgacggacgtctcgacctacgggccctctgggtccgaggaagatgacgatcccagcatctgttgggatttctctggatttggtaaccccagtgccatgcgggacttcatgaccgcatgtggctactgcctctccgactgttccgacggtagccgcagcctcggcgacgaggactgcggcccaagccgcgaatgtttccacgtcgagctaggggatccctccaaaggcaaccatctcggcatgccggaggacagtgatctccctaggccggtgcctcgcgcagacatcccgcgggagctagctgtggtccccgttccggcgggggtgagagcacctagagggggggtgaataggtga

SEQ ID NO: 115039 - DNA, 1404 bp, Zea mays
  Clone ID: MRT4577_36398C.1
atgtacttcgatgggtcgctaatgaaaataggagccggcgtgggcctgctcttcatctcacccctcgggaagcacctccgctacgtgttgcgcctccatttcccggcatcaaacaacgtggctgagtacgaggctctggttaatgggttgtgcatcgccatcgagctaggggttcggtgcctcgacgctcgtgtcgactcgcagcttgtcattgatcaagtcatgaagaactcccactgccgcgaccggaagatggaggcctactgcgacaaagtttggcgcctggaagacaagttctacgggctcgagctcaaccacatcgctcgacggtacaacgagactgcggatgagctggctaaaatagcctcggggcggacaatggttcccccggacgacttctccagagacatacatcaacccttcgtcaagaccaacgacacgcccgagcccgaggaggcctcgtcgccgaggtgagcaccctcggctcagtccgaggcaccctcggctcagcccgaggcaccctcggctcggcccgaggtacccttggcccccgagggtgaggctctgcgcgtcgaggaggagcggagcggggtcacgcctaatcgaaactggcagacctcgtacctgcaatatctccaccgaggagagctacccctcgaccgagccgaagctcggtggttggcacgacgcgccaagtcgttcgtcttgctgggagacgggaaggagctctaccaccgcagccccttaggcatcctccagcgatgcatttccatcgccgaaggccaggagctcttacaagagatacactcgggggcttgcggccatcacgcagcgcctcgagcccttgttggaaacgctttccgacaaggcttctactggccgactgcggtggccgacgccactagaattgtccgcacctgccaagggtgtcaattctatgcaaggcagacccacctgcccgctcaggctctgcagaccatacccatcacctggtcgtttgctgtgtggggtctggacctcgtcggccctttgcagaaggcacccgggggctacacgcacctgttggtcgccatcgacaaattctccaagtggatcgaggtccgacccctaaacagcatcaggtccgaacagacagtggtgttcttcaccaacatcatccatcgctttggggtcccaaactccatcatcaccgacaacagcacccagttcaccggcaaaaagttcctggacttctgcgaggatcactgcatccgggtggactgggccgccatggctcaccccatgacgaatgggcaagtagagcgtgccaatggcatgattctgcaaggactcaagcctcggatctacaacgacctcaacaagttcggcaggcgatggatgaaggagctcccctcggtggtctag

SEQ ID NO: 115040 - DNA, 2406 bp, Zea mays
  Clone ID: MRT4577_36399C.1
atgcccaagcaggaggtggtgcctcgttggctgtcgagcgagtcgacgacgccggtgccccatcgggggacacgtcgggcgttgacctcgcgtctgagacgaaaacgagcgtcgtttccccgcaacacgccaaccccaaagcggacggatgacgccagcacgctcgcgaaggacttgttgggcgttagcctcgtacctgagataacggtgcagtccgtccccgacgcgacttcgtcaccatccgtcgatcaagaggtactgtccgttttccaccctgtgccttttagattcagcttcgacccaccaagtgaccccgcttcggtggacgctttcataaaggcatatcctaacctttcggggtaccatatgtggtcaacctgggaccgactgatggccgtctcgacctacgggcccccgggttccgaggaagatgacgagcccgactctggttgggatttctccgggctcggtaaccccagtgccatgcgagacttcatgaccgcatgtgactactgcctctccaattactccgatggtggccacagccttgacgacgaggattgtggcccaagtcgcgaatgtttccacgtcgatctagggggtctcgacgaaggcaaccaccttggtatgccggaggacggcgatccccctaggcctgcgcctcgcgttgacatccttcgggacctagttgtggtcccagtccctgcggggggtcaggacacacagctcgagcaaatccgcgagatgcaggccaggctcgacgaggaagcaggacaacttgtgcagctccggcagaacatcgggcaggagtcggaactgtggctcgcggactaccggctggcctaccagctgggtggaacggacgatgacaacctcatcatccgcaacctccccctgttcctctccgatgccgcccgggcctggctggagcatctgcctcccgcgcagatctccaactgggacgacctggtcaaagccttcgccggaaatttccagggcacatacgtgcgccctgggaactcctgggatctccgaagctgccgccagcggccaggagaatccatgtgggactacatccgacgattttcgaaacagcgcaccgagctgcccaacatcaccgactcaaatgtcattggcgcgttcctcgccggcactacttgccgcgacctggtgagcaagctaagtcgcaagactcccactagggcgaccgagctgatggacatcgccaccaagtttgcctctggtcaggaggtggtcgaggccatcttccggaaggacaagcagcctcaggggcgccagcaggaagacgtccccgaggcgttcgctcagcgcagcgcgaagaagaagggcaagaagaagtcgcaagcgaaacgcgacgccgccaacgtagatcttgtcgccgccgccgagcacaggaaccctcggaagcctcccggaggggccaacctgttcgacaagatgctcaaggagtcgtgcccctatcatcagggtcccgtcaagcacacccttgaggagtgcatcatgcttcggtgctacttccataaggccgggcccccggcggaaggtggcaaaggccatgacaacgacaagaaggagggccacaagacagaggagttccccgaggtccacgactgcttcatgatctacggtgggcaagtggcgaacgcctcggctcggcaccacaagcaggagcgccgggaggtctgctcggtgaaggtagtggcgccagtctacctagactggtccgacaagcccatcaccttcgaccaaggcgaccaccccgaccgcgtgccgagcccggggaagtacccgctcgttgtcgatcccgtcatcgacaacgtcaggcttaccaaggtcctcatggacggaggcagcagcctcaacatcatttacgccgagaccctcgggctcttgcagatcgatctatccacgatccgggccggtgcggcgccctttcacgggatcatccccgggaagcacgtccaaccccttgggcaactcgatctgcccgtctgcttcgggactccctccaacttccgaaaggaaaccctcacgttcgaggtggtcgggttccgaggaacctaccacgcagtgctggggagaccatgctacgccaagttcatggtcgtccccaactacacctacctcaagctcaagatgtcgggccccaacggggtcatcaccgtcggatccacgtaccgacacgcgtacgaatgcgacatggagtgcgtggagtacgctgaggccctcatcgccgacctggagggcctctccaaggaggtgccagatgcgaagcgccacgccggcaacttcgagcctgcagaggcggttaagtccgtccctctcgaccccagcaacgacgcctccaagcaagtccggatcggctccgagctcgaccccaaatag

SEQ ID NO: 115041 - DNA, 390 bp, Zea mays
  Clone ID: MRT4577_3639C.1
cggacgcgtgggttgtacctctattggtcagtgatgatgagaagatacttgttgtgtgtatcaactgtttgacaaagaaattgtaacgtaaatggtaacagtaatgattcacactcaaataacaacgcttgttgggcgcctttcccaagaggaattgattgataaattgcctacatttctgccagcattatttgatgcttttaacaaccaaagtccagatgtccgaaagactgttgtgttctgcttggtggatatgtacatcatgcttgggaaagcattcgctccatacttggaagggcttagcagcacgcagctccgcctagtaaccatatacgctaaccggatttcgcaggcgaggtctggcaagccaatcgattctaaccaatgaga

SEQ ID NO: 115042 - DNA, 115 bp, Zea mays
  Clone ID: MRT4577_363C.1
tttcgtcctctcctaggcctattcatccccggggggggcaattaaagagactgatacgtcctcacacaatctcgccgtagagcgccctgcacaacagcgtatccaaagcccctcc

SEQ ID NO: 115043 - DNA, 174 bp, Zea mays
  unsure (1)..(174): unsure at all n locations
  Clone ID: MRT4577_36400C.1
gtcgatgaagatgctgtaaacactgaagacgagaagaaagaggtnccaaattcagatgctgcagagaagactgaggaaggtgaagattagaaagaggagggcccttgctgtagatgcaacaaagaaaactgaggaaggtgaaaataagagagaggaggaggcccctgctggtag

SEQ ID NO: 115044 - DNA, 434 bp, Zea mays
  Clone ID: MRT4577_36401C.1
cggccgcccttgatttttgttttttgacacatttttatttttaaggccaaccacaggggggcaccacctccacaccagacgaacgaagagaaacaccctggaccaggacaaacaccacgggaacgaacaggataactggagtcgccgggcccggccgatgagttcctgcagcccccgcgccaggtgacacaaacggcgccacggttgccaccgccgtacctcaaccaaaccaccagccgaggcgacgacaccaccaccgcagacgacggcacacgacaagcccgcggacccataaaagcgccccgacaccggcgagacgacgactgcctggcaccaccgtacccacctgcggcggcggctgcacggcccccgcgggactgggccccggtgacagagatgttgcgggcgaccaactccttgccgaacataccctc

SEQ ID NO: 115045 - DNA, 1437 bp, Zea mays
  Clone ID: MRT4577_36402C.1
atgtcgttcgcccctcggaaggccatcaagtcccaggtcttggcggacttcgtggttgaatgggtcgacacccagctcccaacagctccgatccagccggaactctggaccatgttcttcgatgggtcgctgatgaagacaggagcgggcacaggcctgctcttcgtctcgcccctcgggaagcacctgcgctacgtgctacgcctctacttcccggcatccaacaacgtggccgagtacgaggctctggtcaacgggttgcacatcgccatcgagctaggggtccgacgcctcgacgctcacggtgactcgcagctcgtcatcgaccaagtcatgaagaactcccactgccgcgacccgaagatggaagcctactgcgatgaggttcggcacctggaagacaagttctacgggctcaaactcaaccacatcgcccgacgctacaacaatactgcggacgagctggctaaaatagcctcggggcgaacgacggttcccccgagcgtcttctcccgagacctgcaccgaccctccgtcaagatcgacgacacgcccgagcccgaggcaccctcggcccagtccgaggcaccctcggctcagtccgaggcaccctcggcccagcccgaggcaccctcggctcggcccaaggcaccctcggctcggcccgaggtaccctcggcccccgagggtgaggcactgcgcgtcgaggaggaacggagcgaggtcacccctgatcgaaactggcagacctcgtacctgcaatatctccaccgaggagagctacccctcgaccaagccgaagctcggcggttggcgcggcgcgccaagtcgttcgtcttgctgggagacgggaaggagctctaccaccgcagcccctcaggcatcctccagcgatgcatttccatcgccgaagaattgtccgcacctgcgaagggtgtcagttctacggaaggcagacccacctgcctgctcaggccctgcaagacgatacccatcacctggccttttgttgtgtggggtctggacctcgtcggccccttgcagaaggcacccaggggctacacgcacctgttggtcgccatcgacaaattctccaagtggatcgaggtccaacccctaaacagcatcaggtccgaacaggcagtggcgttcttcaccaacatcatccatcgctttggggtcccgaactccatcatcaccggcaacggcacccagttcaccgatggaaagttcatggacttctgcgaggatcaccacatccgggtggactgggccgccgtggctcaccccatgacgaatgggcaggtagagcgtgccaacggcatgattctacaaggactcaagcctcggatctacaacgacctcaacaagttcggcaagcgatggatgaaggaactcccctcggtggtctggagtctgaggacaacgccgagctga

SEQ ID NO: 115046 - DNA, 106 bp, Zea mays
  Clone ID: MRT4577_36403C.1
tcgtccacgcgtgatatattatttctccaatcgagcaacaccggcaacgaacaaatcgagcccggggagaggcaatgacacactcgcacgcgttgcacaccctaca

SEQ ID NO: 115047 - DNA, 1151 bp, Zea mays
  Clone ID: MRT4577_36404C.1
ctcgaggccggccgggtccgcgatcctcccccagcgcgtctacagctgtctgcccgcgccccccctctcctccgcgatcctcccccagcgcgtagatcccggctccgcgacgagcgcctccgccccacgccatccgcgccgccatcaagggatctcctaccaccagcgcgtagatcccgtcaaccaagcgagtcccgccgtgaatgtcgcccacctccctccgactccgaacgcggggcttcaccagacaagaacgcgccaagcccgatgctcccaggaccacaccgcccaagccgtcgagcaaatccgcattgtgcaagtggtggcgcagcctcgcgcccgccctgctcgctgccgccgctgtggttcgggccaggaggagtgttcaaagtggccctgtttgcggacctgcattatggcgaggacgcgtggacggactggggctccgcgcaggacgccgcgtccgaccgcgtcatggccgccgtcctcgacgtcgagaacccagacttggtggtgtacctcggcgacctggtgacggccaacaacctcccggtcccaaacgcgagcctgtactgggaccgtgctgtctccgccgtctgaggccggggcgtgctgtgggcgacggtgttcggaaaccacgacgacatggcctttgagtggccgcccgagtgtttctcccccaacggcgtcccgccgctgcgctggccgccgggtccaggatcagggtgcggcttccgggggactccccagatggacctcatggcgacggagatcggcgcgaaccggctgctgtcctactcgtccagcgggccctgggagctgtggcccgacgtctccaactacgtcctgcaggtgctctcgcggggacggcgggcccgcggcgacggtcacgaccacgacccggcgctgctcatgtacttcctcgactccgacggcgggtcgtacaccgaggtggtgtccagcgctcaggtcaggtggttccacacccagtctcagttcctgaatccagatggaaggatcctcgagctcatcttctggcacataccgagcacggcgtacgccaaggtagctccaaaggccaattctgagataaggaagccctgcgtcagctccatcaatggatttcactttgtcttgctatcacgcattgc

SEQ ID NO: 115048 - DNA, 314 bp, Zea mays
  Clone ID: MRT4577_36405C.1
cccccccggatttttttttttttttttttttttttttttttttttttttttttttttttttttttttttttttaattcccaaggaagtccttgcaaaaaagataggtggggcccattattgttttcttattacacaggcaagggcctttgaaagggacaacacccgcggacccgccaacacatttgtttttttccagaaaaataatgacttccctttaattgaaaattggagcgcctgtttgttttctccttaagacaaagggagagagtaccaattaatttgggccctaaaaaaaaaacggcacggaacgggg

SEQ ID NO: 115049 - DNA, 337 bp, Zea mays
  Clone ID: MRT4577_36406C.1
tgccaaccgaggcaactctcaaagtttagggtctgaacccagagctggctggagggacgaataagaagccccttgatgcgagccttctacatggctagctcccaccatggatccaccaccgcccccaagaacctacccgtcaactacagcctgccagtaaatgacaccgcgcgctaccgactacacttttactacttacagggccaggacaagtactatcatgtccacacttagctctacggattcaccacattgcgcatgaacattccttcatgccccctttaggtgcactacccacctatactgtcctttcatgcctccataagatttctaccaa

SEQ ID NO: 115050 - DNA, 620 bp, Zea mays
  Clone ID: MRT4577_36407C.1
ccggccgggattcttagcgatcgcaaataacacactttctcttactgtcctgtcgtcttcacactcccgtcgacagcaacatcagacaaaatggcccccgccgcaaagaagcagaagaagaagtggtccaagggcaaggtcaaggacaaggcccagcacgccgtcgtcctcgacaagaccacctctgagaagctctacaaggatgttcagtcttaccgtctggtcaccatcgccaccctcgtcgaccgaatgaagatcaacggttctttggcccgacagtgccttgccgacctcgaggagaagggcatcatcaagcctgtggttacacacagcaagatgaagatctacacccgtgccgttggtggtaccgactaaatgcaattcaacgaaaaatttgagtctcacgattgtgcgtctgggtggcctggacgatagacaggccacaaggtcggagggtgttgcaaggcgaaaaagaagcctggtttaggacgctattcatgctcggttaagcattgggacggaatcgctttagcaatggcaacggaatgaaaaatcttcgaaacgaccaaaaaaaaaaaaaaaaaacccgcggccgaggcaaaaaaaaaaaacccgcggcc

SEQ ID NO: 115051 - DNA, 384 bp, Zea mays
  Clone ID: MRT4577_36408C.1
ttttgggtttatttaaaggtcaaggagcctggtatataccaaagcattgcaggaagatgctacacctgaggatcagacagcgtctaaaactacagggaaaaaaccagcactggggacaccactttccaacccatgctcttacaaaaattaatggcacaccctttgccgactgcgtcacgccgacacaagcagtaaggataaccatattcaggcaacataagaacccttccctatatattcacaacggaggaagaacagagttcttttttggaggaccttgggctggtccatttcctaagcaagcttatcattatttgcatcaaaacttcgtaagaacgcaaattattactttgctactgactgtatctaacatcaacttacatg

SEQ ID NO: 115052 - DNA, 399 bp, Zea mays
  unsure (1)..(399): unsure at all n locations
  Clone ID: MRT4577_36409C.1
gggcccctcccggcgtcgtggcggggggggcgggtngcncctcacctcaccggacgcgctgggcggcggcgtccccgcgcgttcacgccgcgctcctcttatgctgctggacctatcgtggaaccggctcacgggcggggtgccgcggtcgctggcctcgggggggggcgtgggccacctggacctcagccacaaccggctgtgcggcaccatgcccggcgggccggcgttcgaccggctcggcgcctagtctttcgtgtgcaacaggtgcctgtgcggtgggccgctcgggaagtgcacgtgacacccctgagcccggccatacgcggggcggggagcatgcggacatattcgggcggtttgtgtaacgaatgctaggactatgggtttggggccggg

SEQ ID NO: 115053 - DNA, 249 bp, Zea mays
  Clone ID: MRT4577_3640C.1
ccacgcaaacccaaccatatggattgcattcattacacactttttgggggggagagtttttccaacggaccccaatgcaagagtgcaatagctcccaacaattgcaatagctacgtcaacagcaagaggtggttgttttaaagaaaggaagtaacctcttgtccatccacatttgtttttataaaggggcttttataaatctctttttaaacattcaagcggtaataaaattttttcaaaattccaatg

SEQ ID NO: 115054 - DNA, 954 bp, Zea mays
  Clone ID: MRT4577_36410C.1
tttttttttttttttttacaagaactattttaattttattttacccctcacataaattacatgtacacaattaatcaaacatttctttatcacacaggcctactaatattctactcggtacattgattcagctaattgaccggaatagcgaaataactcgccatactgaatttggctcgataatcgcaagaattgcgaagtcgacgagagtttcgtgacttacacaatttatcgagcacactaatgagcctcgcactaacacattaatttatttaacgatcgaactattctgaataaattatcagcttaccatttccgaatcgactcggagccgtgattttgacgaggctatctggtttgaacccttcattgagcaccatgtgtgcgtcgatctccccaaaatcaaacaatcaatattcggcaagaacatcggtgccgatctttccaacacgcgatgagcaccggtccactcattttgccgaacagggagctgcaggggcgcacggccagcggacacgaggaaacgacgatagcggggagcgaactcgcggcgcggcacggtgtccatggacacgaccaagtgcagagcgagcggtctgcccagggagatgcaagggaggcgaggagctagacgccggatgcggagatgaaggctcaacagcgtacgacaaggtcaatgacgcgcagtggatatcgaggagtctgcaggggttcatgactggaccaacgactggccgacgaactctggtcgtggcacggcttggacaatgtcgacaacgagctgaaactccaggggcgtgcggtcaggcgagctgggagcgggaggaagacgatctaggtgcttggccaagggagatcgggaagagggagctggacgcgcagaacaggacgtcgagcaagcagaagcactgcgcgcgaccagaagaagaggagcacacagagaatatctcgtgc

SEQ ID NO: 115055 - DNA, 641 bp, Zea mays
  Clone ID: MRT4577_36411C.1
tcgaggacggccgggccaatccttctgcatcctagcgagcgctcaccgcccggatcgtgcccaccgcgaccgagcctctcctgctgctcccatgcagaccttcactctcttctctatcgcctcccatgcccaccctccctctgccgcgcccgctgtttcactgcgaagctggtgaatgcgattggcctgcaaatgggccgctgagcgcgcccaacgttagaattgtgggacacccagacagaagcatctccgacgaccgcgtcaccgacatgcataaacggtaactgatgaacctcctcctcctcgaaggcatctcactgcccaccgtgcggcatggacggcccctacagagccttcattcgaccctgccgactcctataacgccgccagagtgacctacgccaatgacaatgtgcacaacgacatcacggaggaggtacggctcaacactaacgaacccaacgaccgcacgatcgcgcaggggatcaaggctgaccccacgtacctggtggaggagcaggacaagactctggccacctacgtgatcaacgacgagagcactcacctcagctgagtcaagtcgtgcacacgacgcccagaacaaggtcatctgaccatggcacggatcccagacacaacaa

SEQ ID NO: 115056 - DNA, 1196 bp, Zea mays
  Clone ID: MRT4577_36412C.1
gcgcacggctacaagaaaaaaaaggagcggcgcgcggccaataggaaagcttcgcgcgcgccttgagagagctggagatggccggcgagcacgcgcacgcagcaacgtatggacaccagggcgcgcacacagggatcttcggctgggcacgagcacaggagcgagcttgagggcgagcaccatgggaagtagaggagctccacggtgagctcgcgcacacaaaattcgagcagaggccgctgacaaatccgagggagagaaagagaagcagggagggagccgagcaggaaatcaatggaagaacgccctgctcaccaccgcacgtctccacatggccggacagccaacgtgctgaccaccacggccagacctgcgccgctggcctggagcacgcacctggcgcggattgctcctcggtctgcagtcgcgcggtgtggaaaggagcaggaacacgcgcaccagggaactgagcggctgaagatgaagctgcgggagggggcggccatgggagaggagctgggcaaactgagtgccgtggaagatgagcgccggctgaggagggcgcggtccgagcctgaagccgtttgagtagaagctgggaactggcgtcgaggcgattgaggttttgggcaaatcccagggcgcaacttgagggcttgttcggtttcatctcaatccatgtggattggaggggattgagtgagtttaaatccatagcaagtcatattgtctactaaaattttccaatcccatccaatccatatgatgtaggaataaccgaacaagccctgaggtggaggacgagcagagccatggacaaaaaggagcaggggcacgattcggcgacattgcggaataaggggcgctcggccgggcgcctgagctggaggagaggagcaccggcagagagagcggaggccggggagaactggcggctgggcgagctgctcggtagagcaggaaatggagacggagctagcagctgtgagcggatgaggctgagggagaagttcggctggggaaagaagtccgcacccgtgaaaaaaatcaagcgagggccggctggaggatagagccgactaggatttttttagatttttctgttttcttcttaatttttttaataaagaaaattgctgatatattggattaagatttttagtgatgtaaagtgggtctgccagctatacggatac

SEQ ID NO: 115057 - DNA, 834 bp, Zea mays
  Clone ID: MRT4577_36413C.1
atgtgggaaagaggagggaaaagatgcttcagctggttgagctccaaaagaagattgataaagcagccgaggaaatgcgacatattacataggatactgagcaagggcacaaaacgcaacaaagagaccttcgtcaagaaggccccaaccatgatgacatgtgctacagagttgcaggctgtcccatggccaccatcgcacaagccatctcagctacccatgtacgatggtcactcagacctgaagcagtttctgatgagttacgaagcaaccatatcatcatatggtggcaacacgactgtcatagaaaaatccttcgtcatggcagcatatgtccgaaggttcttgcgcctcagatctcaggcaccaacagtgccaaatgagattgtcattgaggccatgatcaagggacttcgcccaggcccaatagcacaatattttgctagaaagccccccaaaccctggagaagcttctccaaacgatggatgagtatatcagagccgataatgatttctgacaaagaagggagtaagcctacagaggacaaggggcatacaacaagaacctgtcaagttatgatacaaaaacagaaggagatagctgaggttgaaacacgccagaaccagtcgaagcaagttttacacactgcttcgtgttactctccatacatcctagagtatgtgggtaaccaacaaccattctcacaacctaccccgaaaataacaacgatgaacgccgaagttatagctgaaaagcaacatcttcggcttaaagtggtgtcgaagatcaagcatgatgctgaaccaaagaggaaaagactagctagtccctaa

SEQ ID NO: 115058 - DNA, 635 bp, Zea mays
  unsure (1)..(635): unsure at all n locations
  Clone ID: MRT4577_36414C.1
ccggccggataaatactcaactgtctaacgacaactcggtgaatctctccccttcgcccctaactctccgccggttacaacttgcggtttgtgttacacaccacgcctactggtttgttgtgtctctcgttagcttttccaacctcaaacgtgagttgatagactgataacctccctcaactctaaacccaaccctgatccgcaatgtcggtgccaacacctctcgctctggctgatgcacttgttgctcaaatcatcagttcaggcctcctcaaggaagttgtaagaaacgcggtttcccagccttctgtcgcgcgcgctctgacggcgaactggacccattcaggacctactgatcctcgattgggcttggcagttgactctgccctcaaatcagcactgaagtgcacttcgtctgactttgccggtcctctccgtgctgcgtacgacaatctggctgccaagatagccaacaactttaccgttgtcggtcaaggcctcactccctccccgacctgccatcgttgcaaccggatactctccggaacaacgagctgcctttcgacttaggcagcaccaagcagctttgcaacgcanagctgttcggcagagcaggcacaaggagcgtttggctg

SEQ ID NO: 115059 - DNA, 354 bp, Zea mays
  Clone ID: MRT4577_36415C.1
taagctcggaattcggttcgaggcctatttgaacccccctattgtctccgccgcgcgcattctgcgccgtggggggctcttttaaatttatggggggagtcccagcactctcgctttctatttaatcccgtggctccgatcaccggcgcaccccaccatgtaagactcaggcgaacacaccatctccgaattcaccacccatgacttaaaggataagaaggaagctgtggaacaggcagaaaatggaagagacccccatgctcacgacattgctgatgactaaaatggacaccaggaggcacacacttaggttcacgaacaagagcaagaatgtgccgcggaagagtaggagga

SEQ ID NO: 115060 - DNA, 1560 bp, Zea mays
  Clone ID: MRT4577_36416C.1
acccattctcttccagtaacacctgtaggaactactgacaaggctgcatctcctccaaatcaattagataccctgccaactacaactaatgaaggagttgaagcaaaaattaggcgctcactttcagtacctggaaatcgcaaaaacagaagtttgaggagggcagattcattaggtgtcatccgtgtgattccaacaaccccaagacctgtcccagtcgaagcaaccacatcaagcgatgtaattgaagaaacaatcgatgtccctgaagatggaggcgaagatattcctgaagaagaggcagtctgcagaatttgttttgttgaactcaacgaaggaggtgaaacacttaaaatggagtgcagctgcaaaggagaacttgcacttgcacaccaagactgtgctgtcaaatggtttagcatcaagggaaacaagatatgtgatgtctgtaaacaagaagttcagaatctgccagtgatgttactgagaataccaactcaaactgcaaacaggcgggtagcaaatgctgctcagcagagagcagctcaacaatacaggtaagattttggcaggacattccaattctggtgatggttagcatgcttgcgtacttctgtttcttggaacaactcctggttactgatttgcagtcacgtgcactggcaatttcgttgcctttctcgtgtgtgttaggcctcctttcttcaatgatagcatcaactatggtgtcgaagagctatctatgggcgtatgcttcattccagtttgctatcgttatcctgtttgctcatatcttctacaatgtgttgaaagtgaatccagtccttgcagtcttactctcctcattcactgggtttggtattgctattagtacgaactctctactagtagagtatttgaggtggagagctaggaggaatcagcgtttggctcagcaggctgccaatgctgcacagcaccaagaatctggaaatgatggtggaaatgacaacgatgacgctcagcaagggcacgatccaaattctgggaacaatgctgtgtgatgattcaggttcttggtgcaaaaatccagcaccaaaaaaaaagattatgaaatggtatgggtgtgaacagctgtttttttatctgtacagcaagtatagctcattcaacgcggcaccagtcacaagctgaaacctggaaaaacatatcttcatatgccacgtggagggtgctcacggatatcattatacatcacgcagagatgaagcaaaacacgatatgtttgtgtattagtccggtagtttgacatgaaatgtatctgttattcattttaagcttaatagatctaatgcattatagaagtacatcgctaagtgtgtgcagcttatagttgtgagttgcgagtatagccccatatagatatacatcaatgaaatgtacctttccagtatattgaggtttgctagccggcacggaacggaagaaatactcagattgaattgtgatacaattgtctcaactgagaactacagaattgtatgcaatgcgagcgattgaaataccctgcttctcgaatct

SEQ ID NO: 115061 - DNA, 2202 bp, Zea mays
  Clone ID: MRT4577_36417C.1
tcggccgggacggacccgggctcggaactggcctgggcaaaagcgcccttcagctcccggaccgcttcccctgagctgctgcccaagaacttcgacaccacttgcccaccctccctggattcttgcggctcttcctcgagctcatcgaatccttcatggagagcgccgagggaccgtccccgtactccggtgatcgagcggcaccggttcaggatggcaatggccaaactacacctgggcataattcgcgaaggccaaacctttctttgcaaataccagctaggaccttggataccaatataccttcatcgacaagagttactatatcctgcagccccagttcaacgagagtgggtttgccaccgagacctaattcgacgagaacaaaatcatctatcaagaacatgaatcctcagcacagtttcagagcaaggagttcagcccaggaaggtgatcgagtggtccttctaaatcctgggacgtcatctgaagggcagcaggataatccaagcacagcaagatcattttcttttagaaaggtcattaactcattatcggcaaaaaggacccattctcttccagtaacgcctgtaggaactactgacaaggctgcatctcctccaaatcaattagataccctgccaactacaactaatgaaggagttgaagcaaaaattaggcgctcactttcagtacctggaaatcgcaaaaacagaagtttgaggagggcagattcattaggtgtcatccgtgtgattccaacaaccccaagacctgtcccagtcgaagcaaccacatcaagcgatgtaattgaagaaacaatcgatgtccctgaagatggaggcgaagatattcctgaagaagaggcagtctgcagaatttgttttgttgaactcaacgaaggaggtgaaacacttaaaatggagtgcagctgcaaaggagaacttgcacttgcacaccaagactgtgctgtcaaatggtttagcatcaagggaaacaagatatgtgatgtctgtaaacaagaagttcagaatctgccagtgatgttactgagaataccaactcaaactgcaaacaggcgggtagcaaatgctgctcagcagagagcagctcaacaatacagattttggcaggacattccaattctggtgatggttagcatgcttgcgtacttctgtttcttggaacaactcctggttactgatttgcagtcacgtgcactggcaatttcgttgcctttctcgtgtgtgttaggcctcctttcttcaatgatagcatcaactatggtgtcgaagagctatctatgggcgtatgcttcattccagtttgctatcgttatcctgtttgctcatatcttctacaatgtggtacgaaactcgacttgggtgacatctattgcagataaatgtttgtgtggcactgattgttgtcttgtgattacattcagttgaaagtgaatccacggctcgaggtcttactctcctcattcactgggtttggtattgctattagtacgaactctctactagtagagtatttgaggtggagagctaggaggaatcagcgtttggctcagcaggctgccaatgctgcacagcaccaagaatctggaaatgatggtggaaatgacaacgatgacgctcagcaagggcacgatccaaattctgggaacaatgctgtgtgatgattcaggttcttggtgcaaaaatccagcaccaaaaaaaagattatgaaatggtatgggtgtgaacagctgttttttttatctgtacagcaagtatagctcattcaacgcggcaccagtcacaagctgaaacctggaaaaacatatcttcatatgccacgtggagggcgctcacggatatcattatacatcacgcagagatgaagcaaaacacgatatgtttgtgtattagtccggtagtttgacttcaaatgtatctgttattcattttaagcttaatagatctaatgcattatagaagtacttcggtaagtgtgtgcagcttatagtttgtgagttgcgagtatagccccatatagatatacatcaatgaaatgtacctttccagtatattgaggtttgctagccggcacggaacggaagaaatactcagattgaattgtgatacaattgtctcaactgagaactacagaattgtatgcaatgcgagcgattgaaataccctgcttctcgaatct

SEQ ID NO: 115062 - DNA, 774 bp, Zea mays
  Clone ID: MRT4577_36418C.1
gccggccgggaaaaaatataaaaaaaaaaaaaaaaccttgcccctgctcctcacgccgccgccgccaccgccaccaccacttcggtagcgcccagccgccggagaagaggagggagccagcaccagccaccatgggtcgcgtccgcaccaagaccgtgaagaagacctccaggcaggtgatcgagaagtactactcccgcatgaccctcgacttccacaccaacaagaaagtgctggaagaggtctcgatcctcccctcgaagcgcctccgcaacaaggttgccggcttcaccacccatctgatgcgccgcatccagcggggccccgtccgtggcatctcgctcaagctgcaggaggaggagcgggagcgccgcatggacttcgtcccggagaagtcagcgctcgaggtcgaagagatccgcgtcgacaaggagaccatggagatgctggcggcactcggcatggccgatctcccgggcgtagagcgccaggctgaggtctccagcgtccccgcctacggccgcccgcagtacggaggtccccgccgtgaccgcgtctaggtttaccgccgatcgcagtggttgcgtcgtggtcgcaccgttactcagagttgttatgttactatgttaaacttgttttagatctgtggtttcttctggcgattaagttttgaacttgtctgttatgctttaaattctatagttggatctgcgtgtgatggacattagagttatattcttgcgccaatgaagtctgaagagattataagttaac

SEQ ID NO: 115063 - DNA, 319 bp, Zea mays
  Clone ID: MRT4577_36419C.1
accaacttctccatcgtcttcgttggctcattcgattccttagcttcacatctgcatggcgctgcaccggttactgaagaggaaaggaggcttctatgaacttaacgactatttccctctcgcttctccggcaaccaagattcgccgtctcgacgctgagttgccgtcaattttggaagaggacgaaccgtttcctaacgaggagagagctcttgttctctacaagccttttgttcattccccttcctctttctttctcactctcgattctgaccttatgaaaggaattaggaacaatcaatatctgtggtccaaacaa

SEQ ID NO: 115064 - DNA, 2092 bp, Zea mays
  Clone ID: MRT4577_3641C.1
cgaggccggccggccgggaaccctgcactgcgtgcgctccatgtgactctcacttatttctcctgtcagcgcagcagcagcagcagcagcctactactactactactgcttttaccggccggtggatcggatcaccaaaccggaacgacagcgatggaggccgggacgtgggcggcggcggccgtggcggccgtggcgctgtacgtggcctggttctggcggatgtcgcgcgggctcagcgggccgcgggtgtggccgctgctcggcagcctgccggggctcgtgcagcacgccgaggacatgcacgagtggatcgccgccaacctgcgccgcgcggggggcacgtaccagacctgcatcttcgccttgcccggggtggcgcgccgtggcggcctggtcaccgtcacgtgcgacccccggaacctggagcacgtcctcaaggcgcgcttcgacaactaccccaagggccccttctggcacgccgtcttcagggacctgctcggggacggcatcttcaactccgacggcgacacctgggtggcgcagcgcaagacggccgcgctcgagttcaccacgcgcacgctccgcaccgccatgtcgcgctgggtctcccgctccatccacgcccgcctgctgcccatcctcgccgacgcgcgcgtcgtcgacctgcaggacctcctgctccgcctcaccttcgacaacatctgcggcctcgccttcggcaaggaccccgagacgctcgcccggggcctccccgacaacgccttcgcctccgcgttcgaccgcgccacggaggccaccctcaaccgcttcatcttccccgagtgcgtctggcgctgcaagaagtggctgggcctcggcatggagaccacgctggcgcgcagcgtccgccacgtcgaccgctacctctcggccgtcatcaaggcgcgcaagctcgagctctccgccgccacgaggaaggacctcctctcggccacgccgcacgacgacctcctctcgcgcttcatgcgcaaggggacctactccgacgagtcgctgcagcacgtggcgctcaacttcatcctcgccggccgcgacacctcctcggtggcgctctcctggttcttctggctggtctccacgcaccccgccgtggagcgcaacatcgtgcgcgagctgtgcgccgtcctggccgggtcccgcggcgtcgaggacccggcactgtggctcgccgcgcccttggacttcgaggagctcgaccgcctcgtctacctcaaggcggcgctctccgagacgctccgcctgtacccctccgtgcctgaggactccaagcacgtcgtcgccgacgacgtcctcccggacggcacgttcgtgccagcgggctcctcggtcacctactccatctactcggcggggcgcatgaagacggtgtggggggaggactgcctccagttccgccccgaacgctggctgtcggacgacggcaccaggttccagccccacgactcgtacaggttcgtggcgttcaacgccggcccgcggatatgcctgggcaaggacctcgcctacctgcagatgaagaacatcgccgggagcgtgctcctccgccaccgcctaaccgtcgcgccgggccaccgcgtcgagcagaagatgtcgctcacgctcttcatgaagcacgggctccgcatggaggtgcgcccgcgcgacctcagcgtcgtcatcgacgagctccgcggcgccggggagtacgacgcggcggcaagagccaccgcggcctccgcatagaggttcgtgcagtgcaggtcgggaaggaaaccaacggacagattggaaacgtcaaatgaaaagttatgtagatattgacagtaagtaattaaagagtttggtgaggtatattactcaattgggaacaaaaatgcatgtgtaaaaagtccatatcattttgatttgcatttgaatgggaggacgaagaaaagcgggccggagagcaataataactctctcatgtaacctgacggggaggcgccaaattggtttcggcagcttgtgttaatgggccgccaaaactgttgttgtttgtaaaaacaaaactcaagcgatcattcattcgatc

SEQ ID NO: 115065 - DNA, 432 bp, Zea mays
  Clone ID: MRT4577_36420C.1
acttctctaacttggaccaagttttctgaaaaaagatgttcacatctacaagttcaaataaatgcaactatcaaaaactcggccaaggagggtaagaccatccttgtggtatttcattaatagaacgttgcggcaacggtcccgactgagaaacccccgaaccctgtcctcctatcactaatgggccgattcaagctactcactctgcaaaggcccacctatgcccgagggtggcgcacagccgagttgtagcctgagagcggatgacgaatagcaatgagaattttttgtgtagagccagggtttgaacccgtgacctggtgaaagggaccctgctgccttcaccagtgaggtattacaccatctgcgaatgcaactatcaacactttgttcttttttgcttacagtgattacatcttattatttaatgaa

SEQ ID NO: 115066 - DNA, 945 bp, Zea mays
  Clone ID: MRT4577_36421C.1
ctcgaagccggccgggccaggagtaatgttcttgtagtttgatggtgttcggttctgtatgttatcacgtggtgctgggttcgattccttggcccaccattgtgaaaaaaaaaaaaaaaaaaaaaaaaaaaaaaaaaaaaaaccttgcccctgctcctcacgccgccgccgccgccgccgccgccgccaccaccactaccctagcgcccagccgccggagaagaggagggagccagcaccagccaccatgggtcgcgtccgcaccaagaccgtgaagaagacctccaggcaggtgatcgagaagtactactcccgcatgaccctcgacttccacaccaacaagaaggtgctggaagaggtctcgatcctcccctcgaagcgcctccgcaacaaggttgccggcttcaccacccacctgatgcgccgcatccagcggggccccgtccgtggcatctcgctcaagctgcaggaggaggagcgggagcgccgcatggacttcgtcccggagaagtcagcgctcgaggtcgaagagatccgcgtcgacaaggagaccatggagatgctggcggcacttggcatggccgatctcccgggcgtagagcgccaggctgaggtctccagcgtccccgcctacggccgcccccagtacggaggtccccgccgtgaccgcgtctaggtttaccgccgatcgcagtggttgcgtcgtggtcgcaccgttactcacagttgctatgctactatgttaaacttgttttagatctgtggtttcttctggccattaagttttgaacttgtctgttatgctttaaattctatagctggatctgcgtgtgatgggcattagatttttattctagcggcaatgaagtctcaagagatattataagttactatgaggttttttgttggactgctactgcttgttaccttaatggtagcatgctt

SEQ ID NO: 115067 - DNA, 848 bp, Zea mays
  Clone ID: MRT4577_36422C.1
ccggccgtgaccttgcccctgctcctcacgccgccgccgccgccgccgccgccgtcgccgccaccacatccgtagcgcccagccgccggagaagaggagggagccagcaccagccaccatgggtcgcgtccgcaccaagaccgtgaagaagacctccaggcaggtgatcgagaagtactactcccgcatgaccctcgacttccacaccaacaagaaggtgctggaagaggtctcgatcctcccctcgaagcgcctccgcaacaaggttgccggcttcaccacccacctgatgcgccgcatccagcggggccccgtccgtggcatctcgctcaagctgcaggaggaggagcgggagcgccggatggacttcgtcccggagaagtcagcgctcgaggtcgaagagatccgcgtcgacaaggagaccatggagatgctcgcggcactcggcatggccgatctcccgggcgtagagcgccaggctgaggtctccagcgtccccgcctacggccgcccgcagtacggaggtccccgccgtgaccgcgtctaggtttaccgccgatcgcagtggttgcgtcgtggtcgcaccgttactcacagttgttatgttactatgttaaacttgttttagatctgtggtttcttctggcgattaagttttgaacttgtctgttatgctttaaattctatagttggatctgcgtgtgatggacattagagttatattcttgcgccaatgaagtctcaagagattataagttaaaaaaaaaaaaaaaaaaaaaaaaaaaaaaaaaaaaaaccgaaaaaaaaaaaaaaaaaaaaaaaaaaaaaaaaaaaaagtccctgcccgg

SEQ ID NO: 115068 - DNA, 759 bp, Zea mays
  Clone ID: MRT4577_36423C.1
cgccagtccaacaaaaaaaccctcatcgtaactataaatatctctgagactttcattggcgctagaatataactctaatagccatcgtacacagatccaactatagaatttaaagcataacagacaagttcaaaacttaatcgccaggagaaaccacagatctaaaacaagtttagcatagtagcataacaactgtgagtaacggtgcgaccacgacgcaaccaatgcgatcggcggtaaacctagacgcggtcacggcggggacctccgtactgcgggcggccgtaggcggggacgttggagacctcagcctggcgctctacgcccgggagatcggccatgccgagtgccgcgagcatctccatggtctccttgtcgacgcggatctcttcgacctcgagcgctgacttctccgggacgaagtccatccggcgctcccgctcctcctcctgcagcttgagcgagatgccacggactgggccccgctggatgcggcgcatcaggtgggtggtgaagccggcaaccttgttgcggaggcgcttcgaggggaggatcgagacctcttccagcaccttcttgttggtgtggaagtcgagggtcatgcgggagtagtacttctcgatcacctgcctggaggtcttcttcacggtcttggtgcggacgcgacccatggtggctggtgctggctccctcctcttctccggcggctgggcgctgggagagtggtggcggcggagtgaggagtagggctagggctct

SEQ ID NO: 115069 - DNA, 423 bp, Zea mays
  Clone ID: MRT4577_36424C.1
tgctaacggccgcgccgagcgcgccctcttttttgccagccgcgccgtggagcgcgcgctgttcccggacgcgtcgttcccgcgcaggcaggtgaggcgcgtgaccgtccggatggccgcgcgcaacctcaccgcgggcgccggcgccacggtgcgcggcgcggccccgggggagtacgtcgtgtccctgagccccggcctcgtcgcgtcgtcgtcggcgtcggcgaacgacgccgccgtggccgccgcgctgcgccgcgcggtcgcgcgcatgtggctctgggacggccgtggcgccgcccccgcgcgcgtcacggaggctatggtcgactaccttgcggccgtggccggtgacgatgaggcgacggcgactgtgtcggcggccgaggacgcgcacgggtgcggcacgttctcggcgcggct

SEQ ID NO: 115070 - DNA, 1931 bp, Zea mays
  Clone ID: MRT4577_36425C.1
cattgggaccctcgaggccgggccgggaaaacctcctcactcctcagactcctctccgcacataccctccctacctcgccgtcgccgtcgcatctgccatgggggcgtacaagtacgtctcggagttatggagaaggaagcaatccgacgtgatgcggttcgttcaacgcgtgcgctgttgggagtacaggcagcagccggccatcgtccgcctcacaaggcccacccgccccgacaaggcccgccgcctcggcttcaaggccaagcaggggtatgttgtttaccgcgtccgtgtgaggcgtggtggcaggaagaggcctgtgccgaagggtattgtctatggcaagcccaagcaccagggtatcacccagctcaagttccagaggaacaagagatctgttgctgaggaacgggctggacgaaagcttggtggactcagggttctcaactcctactgggtgaatgaggatagcacctacaagtactttgagatcatcctggttgatgtggcccacactgccatccgcaacgacccaagaatcaactggctatgcaatcctgtgcacaagcatcgtgagctccgtggtctcacctctgcaggcaagaagttccgtggcctgcgtggcaagggccacactcaccacaagaacaggccgtcgaggagggccacctggaagcgcaaccagaccctgtccctccgccgctaccgttgagcacacacatcttgaattcttgatgctctgctaccgtggaacccgccccatgcaggctctgatagtatttggtatttttgttgcattgttaaattttgctacccgtgttccttccgagccccttgaactgtgttgtcagtgtaccgtggagcaagtgtcgcgaactatatttgtggttctcagtcaatgaaaatgattgtttgtagttcaaaaaaaaaaaaaaaaaaaaaaaaaccagccgccggagaagaggagggagccagcaccagccaccatgggtcgcgtccgcaccaagaccgtgaagaagacctccaggcaggtgatcgagaagtactactcccgcatgaccctcgacttccacaccaacaagaaggtgctggaagaggtctcgatcctcccctcgaagcgcctccgcaacaaggttgccggcttcaccacccacctgatgcgccgcatccagcggggccccgtccgtggcatctcgctcaagctgcaggaggaggagcgggagcgccgcatggacttcgtcccggagaagtcagcgctcgaggtcgaagagatccgcgtcgacaaggagaccatggagatgctcgcggcacttggcatggccgatctcccgggcgtagagcgccaggctgaggtctccagcgtccccgcctacggccgcccgcagtatgggaggtccccgccgtgaccgcgtctaggttcaccgccgatcgcagtggttgcgtcgtggtcgcaccgttactcacagttgttatgctactatgttaaacttgttttagatctgtggtttcttctggcgattaagttttgaacttgtctgttatgctttaaactctatagttggatctgcgtgtgatggacattagagttatgttcttgcgccaatgaagtctcaagagattataagttactatgaggttttttgtttgatgctactgcttgttaccttaatgttagcatgcttttagatgtatagttagtttggtgttggttgttaggtccattgtgtcctatgcagattaaattttgatttttattccttgctatgtatttcagtgctgtctaggcgtgtggctgttagctaagggccattgtgctttgggttcagatggaatcctaccaatatttcgctacacattctcattctcaattcaattagtgcgattgtttagtgtaaaaaaaaaaactactgacattcacgtttgacaagat

SEQ ID NO: 115071 - DNA, 1899 bp, Zea mays
  Clone ID: MRT4577_36426C.1
atgccacccgccagggtgaggctgacagcagctgagtccagcctcaggcgcaacaggaagctccgcctcgcccgaccttgggcctcggcctcaggaggaagtctccgcctcgcccgaccccagggctcggcccccgcctcgccctcggaagatggtctccgcctcgcccgaccccagggctcgccctcaacctcgacctcggaaggtggtcttcgcctcgcccgaccccagggcccggcctcaacctcgacctcgggaggaatcgtgtcctcgcccgaccccggcctcaacctcgacctcgggaggaatcgcgtcctcgcccgaccctggcctcggcctcaggaggagcctccgcctcgcccgaccttgggctcggaccgaccatgccgcagggggtacatcattaccctaccgctagctagctcaggctacggggaacaagaccggcgtcccatccaggctcgccccgctacgacatggtactccttcctccgcaacgcggcagcgacaacgacggccgtcagcccgcccggcggcggcggactcggcgacgtcttccccccatgtcggaagagcagcatccgggtttgtcccgtcaccttcctcgtcgcaggaggaggaagcggggcaaccgtggccaggcaggaggcggcacctcatcggctgtcgagcgagtcgacgacgccggcaccccagtgggggacatgtcgggcgttgacctcgcgcctgagacaacgacaagtgtcgtttccccgcaacatgccaaccccaagcggacagatgacgccagcacactcgcggagaggcctgctgggcgttagcctcgtacttgagataacggtgcagtccgtcctcgacgcgacttcgtcaccgtccatcgatcgagaggtaccgtccgttttccaccctgtgccttttagattcagctttgatccaccaagcgatcccgcttcggtgagcactttcataaaggcatatcctaaccttccggggtaccatatgtggtcaacctgggaccgactgacggccgtctcgacctacgggcccccgggttccgaggaagacgacgagcctgactctggttgggatttctccaggctcggtaatcctagcgccatgcgagacttcatgactgcatgcgactactgcctctccgattgctccgatgatggccacagccttgacgacgaaggttgtggcccaagtcgcgaatgtttccacatcaatctagggggtcacgacgaaggcaaccaccttgcggcaatactactccgagcgatgccggagccatccaccaccgaggggcggcgtatccagggagaactcaagaatctcctggaggatgccgcggtccgacgggccgagagctctgcctcccgaaggcaagggtaccccccggagcatcgcgccgcgacttcccgattcatgcgggaagcctcggtccacaccgggcgcacgcgggacgtgacgcctgtggccccgggtcgcctcggcaacgagcaccgccgccacgaccgtcgagcccgcctcgacgaaaaggtgcaccgaggctaccaccccaggcgtgggggacgctacgacagtggggaggatcggagcccctcgcccgaaccacctggtccgcaagccttcagccgggccatacgacgggcgccgttctcgacccggttacgagccccgactaccatcaccaagtactcgggggaaacaaggccggaactgtggcttgcggactaccggctggccagccagctaggtggaacggacgatgacaacctcatcatccgcaacctccccctgttcctctccgacgccgcccgagcctggctggagcatctgcctcctgcgcagatctccaactgggacgatctggtcaaagccttcgctggaaacttctag

SEQ ID NO: 115072 - DNA, 2754 bp, Zea mays
  Clone ID: MRT4577_36427C.1
atgggcagtctccagcaacctctccaacccgggacggtgctccatttcgggagtcttgagttcatgtccctcgacggcagctacgacatgatactccttccaccgccgcgcgacgacgacaatggcggctggcagcccgcccaccggcggcggaatcggcgacgtcttccccgcatggtgggagtgcaacattcgagatcgccccgtcctctcccccgccgacggaggaggaggcggggcaaccaaggccaagcaggagacaacgcctcgtcggctgtcgagcgagccgacgaccccggcaccccaacggggggcgcaccgggcgtcgacctcgcgtttgagacgaaggcaagcgccgtctccccgcgacacgccaatcccgagcaagcggacgacgccagcgcgctcgcggaaagcttgctggacgtcaccctcgcacctgagacgacggtgcagtcagtccccgacgtgacttcatcgccgctcgtcgaccaaaaggtaccgaccaattcccatcctacgtcatttggattcagcctcaacccgcctagcgacctcgctttggtggacgttctcgtaaaggcgagtccaaaccctctggggtttcgcatgcggtcgccttgggaccggctgacggacgtctcgacctacgggccctctgggtccaaggaagacgacgggcccagcatctgttggggtttctctagacttggcaaccccagtgccatgcgggacttcatggccgcatgtgactactgcctttctgactgttccgacggtagccgcagcctcggcgatgaggactacggcccaagccgcgaatgtttccacgtcaatctagggggtccctccgaaggcaatcatctcggcatgccggaggacggtgatctccctaggccagtgccccgcgtcgacatcccacgggagctagctgtggtccccgttcaggcagggggccatgacccacagctcgagcaaatccgcggggcacaggccaggttcgacgagggagcaggggcgcttgagccgatccgccgggacgtcgggcaggcatgggcgggccaaccccggccggagaaatacgtcacctgccccagggtttccagcaccgcgtcgccgacgacgccagggtcaggccgccacccgcatctagtggcgtcggccagaacctggctgccgcagcgatgcttctccgcgcgatgccggagccatcaaccaccgagggccggcgaatccagggggagctcaagaatctcctggaaggcgccgcggtctgacgggccgagagctctgcctcccgaaggcagggagacccctcggaacctcatgccgcgacttcccgattcttgcgggaagcctcggtctacaccggacgcacgcgcaacaccgcgcctgcggccccgggccgcctcggcaacgagcaccatcatcgcgaccatcgggcccacctcaacgagagggtgcaccgaggctaccaccccaggcgtgggggacgctacgacagcggggaggatcggagtccctcgcccgaaccgcccgcgcaccgagctgcccaacatcaccgacttggatgtcattggcgcgttcctcgccggcaccacctgccgcgacctggtgagcaagttgggtcgcaagacccccaccagggcgagcgagctgatggatatcgccaccaagttcgcctccggccaggaggcggtcgaggccatcttccgaaaggacaagcaaccccagggccgcccgtcagaagatgctcccgaggcgtcaactcagcgcggcgccaagaagaaaggcaagaagaagtcgcaagcgaaacgcgacgccgccgacgtggaccttgttgctgccgccgagtacaagaaccctcggaaaccccccggaggtgcccacctcttcgacaagatgctcaaggagccgtgcccctatcaccaggggcccgtcaagcacaccctggaggagtgcgtcatgcttcggcgccacttccacagggccgggccacccgtggagggtggcagggcccgcgacgatgacaagaaggaagatcaccaagaaggagagttccccgaggtccgcgactgctttatgatctacggtgaacaagcggcgaatgccttggctcggcaccgcaagcaagagcgccgggaggtctgctcggtgaaggtggcggcgccagtctacctagactggtccgacaagcccatcaccttcgaccaagctgaccaccccgaccacgtgccgagcccggggaaatacccgctcgtcgtcgaccccgtcatcggcgacgttaggctcaccaaggtcctcatggacggaggcagcagcctcaacatcatctacgccgagaccctcgggctcctgcgtgttgatctgtcctctgtccgggcaggcgctgcgcccttccatgggatcatccccgggaagcgcgtccaacccctcggacagctcgaccttcccgtctgcttcggaacaccctccaacttccgaagggagaccctgacgttcgaggtggtcgggttccaaggaacctaccacgcggtactggggaggccatgctacgtgaagttcatggccgtccccaactacacctacctgaagctcaagatgccgggccccaacggggtcatcatcgtcagccccacgtacaagcacgcgttcgaatgcgacgtggagtacgctgaggccctcgccgagtccgaggccctcatcgccgacctggaaagcctgagagcacctagagggggggtgaataggtga

SEQ ID NO: 115073 - DNA, 2808 bp, Zea mays
  Clone ID: MRT4577_36428C.1
atggcggctgacagcccgcccgccggcggcggaatcgacgacgtcttcctcgtgtggtggaagaacaacattcaagctcagcccgccctctcccccgccgacggaggaggaggcggggcaaccaaggccaagcaggaggcggcccctcgtcggctgtcgagcaagtcgacgtcagtccttgacgtgacttcgtcaccgcccatcgaccaagaggtacccaccggttcccatctcacgcccattggattcagcctcaacccgccaagcgacttcgctttggcggacgctctcgtagaggcgagtccaaaccctctagggtttcgtatgcagtcaccctgggaccggctgacggacgtctcgacctacgggccctcggggtccgaggaagatgacgagcctgacttctgttgggatttctctagacttggcaaccccagtgccatgcgggacttcatgaccgcatgcgagtactgcctttccgactgttccgacggtagccgcagcctcggcgacgaggaccgtggcccaagtcgtgaatgtttccacgtcgatctagggggtccctccgagggcaaccatctcggtatgccggagaacggtgatctccctaggcctgtgccacgcgttgacatcctacgggagctagctgtggtccccgttccggtggggggtcatgacccacagctcgagcaaacccgcggggtgcaggccaggctcgacgagggagcaggagcacttgagccgatccgccgggacgttgggcaggaatgggcgggccaacctccgtccggagaagtgcgccatctaccccagggtatccagcaccgcatcgccgacgatgtcaggatgaggccgccaccctcttccagtggggtcggccagaacctggctgcagcagcaatgcttctccgcgcgatgccagagccatcaaccaccgaggggcggcgaatccagggagagctcaagaatctcctggagggcgccgcggtccgatgggccgagagctccgcctctcggaggcaggggtacccctcggaacatcgagccgcgacttcccgattcatgcgggaagcctcggtccacaccgggcgcacgcgcaacacaacgcctgcagccccgggccgcctcggcaacgagcaccatcaccgcgaccgtcgggcccacctcgacgagagggtgcgccgaggctaccaccccaggcgtggaggacgctacgacagcggggaggatcggagtccctcgcccgaaccatccggtccgcaggccttcagccgtgccacacgacgagcgctgttcccgacccggttccgacccccgactactatcactaagtactcgggggagacgagaccggaactgtggctcgcggactaccggctggcctgcaaacagggtggaacggacgatgacaacctcatcatccgcaacctccccctgttcctctccgacaccgctcgcgcctggttggagcacctgcctccggggcagatctccaactgggacgacctggtccaagccttcgccggcaatttccagggcacgtacgtgcgccccggaaattcctgggacctccgaagctgccgacagcagccgggagagtctcttcgggactacatccggcgattctcgaagcagcgcaccgagctgcccaacatcaccgattcagatgtcatcggtgcgttcctcgccggcaccacctgccgcgacctggtgagcaagctaggtcgcaagacccccactagggcgagcgagctgatggacatcgccaccaagttcgcctctggccaggaggcgtacaagaaccctcggaaaccccccggaggtgccaacctcttcgacaagatgctcaaggagccgtgcccttatcatcaggggcccgtcaagcacacccttgaggagtgcgctatgcttcgacgccacttccacagggccgggccacccgcggagggtggcaaggctcgcgacgacgacaagaaggaagatcaccaggcaggagagttccccgaggtccgcgattgcttcatgatctacggtgggcaagcggcgaacgcctcggctcggcaccgcaagcaagagcgtcgggaggtctgttcggtgaaggtggcggcgccagtctacctagactggtccgacaagcccatcaccttcgaccaagccgaccaccccgaccacgtgccgagcccggggaaatacccgctcgttgtcgaccccgtcatcggcgacgtcaggctcaccaaggtcctcatggacggaggcagcagcctcaacatcatctacgccgagaccctcgggctcctgcgtgtcgatctgtcctcggtccgggcaggcgctgcgcctttccacgggatcatccccgggaagcgcgtccagcccctcggacaactcgaccttcccgtctgcttcggaacgccctccaacttccgaagggagacccttacgttcgaggtggtcgggttccgaggaacctaccacgcggtactggggaggccatgctacacgaagttcatggccgtccccaactacacctacctcaagctcaagatgtcgggccccaacggggtcatcaccgtcggccccacgtacaaacacgcgttcgaatgcgacgtggagtgtgtggagtacgtcgaggccctcgccgagtccgaggccctcatcgccgacctggaaagcctctctaaggaggtgccagacgtgaagcatcatgccggcaacttcaagccagcggagacggttaagttcgtccccctcgaccccagcagcgacgcctccaagcagatccggatcgactctgagctcgatcccaaatag

SEQ ID NO: 115074 - DNA, 1117 bp, Zea mays
  Clone ID: MRT4577_36429C.1
gagtttctcccctgttcttcaatcttgataacttgctctgcttttacactctgattctctcctactttttttagtccttggtactgttttcactgacatatattgatcagacatgtatgtaaatattacttcttgctcgcttcaaaaaaaaaaaaaaaaaaaaaaaaaaaaaaaaaaaaaaaaaaaaaaaaaaaaaaaaaaaaaaaaaaaaaaaaaaaaaaaagctaaaaaaaaaaaaaaaaaaaaaaaaaaaaaaaaaaaaaaaaaaaaaaggggggggttcgttttaaagaataaaactttacaaacggggggtaacaaggtaaaatttcttttttaggggccccaaaattaaatcatgccgtcaatggaaggtggcctcggatccgccccatcggcggcgagggaggtaccggtgccagtggcggcggagggcgacgctgaagaggccgatggtgcggaggaggaggagagggacctgcgggaggcgttcgacgtgttcgacggcaacagggacgggctcatctccgccgaggagctcggcaccgtgctgcgctcgctcgcctgcaccggcagggccgccgccgattgccacgacatgatacgcctcgttacaagggcccattctttggtggaatccagtctatttggatggaatagttccattccagattctgagtatggaatggctctattctgtgtttggcaatcagaacagagccactctgtttctctgtttggttctagaattctctgtttggttctagatttaccagtcattgctgcagctgctaatatatctactttgccatctaagctcggaggctcggcgagcgagtcgtttccacccctagccaaggtggtcaagctcggccttgccgctgtgctggcctatgggctgttcgacgccgtcacctacacgacctccgtgctcgcattcctcggctacgagaagagtacaggcaagaaccctgcgaccaatctcaaggcgctgctcggtattgttatcctaatgtggactggtaacagcgtcacaaggccattccgtgtcgccggtacggatactttggccccaggctatcaacaaaggcttgaaaagcattcaggagaaacttaa

SEQ ID NO: 115075 - DNA, 241 bp, Zea mays
  Clone ID: MRT4577_3642C.1
acaggatgtaattaacatttatagaacactttactcacaacattgtaatatatattcttttcaagtatcaaaggaacaatctaaggtttcatgtaaataaccaaaaaaaaaaaaaaaaaaaaaaaaagaaggaggaggagagctaaatccagagcaaggagtagtaaatatagaaaaagagctgaacatctgaaaacaaaacaacaaaatagagaaaataatagagaaatattattgaaac

SEQ ID NO: 115076 - DNA, 1479 bp, Zea mays
  Clone ID: MRT4577_36431C.1
atgctcccggggttcatcgtctccgagcggggcatcgaggccaacccggagaaaatcgcggccatcaccaacatggggcccatcaaggacttgaaaggagtacagagggtcatgggatgccttgcggctctgagccgtttcatctcgcgcctcggcgaaagaggcctacctctgtaccacctcttaaggaagaccgagcgcttcacttggacccccgaggccaaggaagccctcgggaacctaaaggaactcctcacaagcgcgcccaccttggtgccccccgctgccggagaagccctcttgatctacgtcgccgctaccactcagaggccggtctacttcatcagtgaagtactgtccgagaccaaaatccactacccgcaaattcagaagctactgtacgcggtaattctgacgcggcgaaagttgcgacactacttcgagtctcatccggtgactgtggtgtcatccttccccctaggagagatcatccagtgccgagaggcctcgggtaggattgcaaagtgggcggtggagatcatgggcgagacaatctcgttcgctcctcagaaggccatcaagtcccaagtcttggcggactttatggctgaatgggtcgacacccagcttccagcagctccgatccaaccggaactctggaccatgtttttctatgggtcgctgatgaaaacaggagcgggcgcaggcttgctcttcatctcaccgctcgggaagcacctccgctacgtgctgcgcctccatttcccggcgtccaagaacgtggccgagtacgaggctctggttaacgggatgcgcattgccatcaagctaggggtccggcgcctcgacgctcgtggcgactcgcagcttgtcatcgaccaagtcacgaagaactcccactgccgcgacccgaagatggaagcctactgcgatgaggttcggcgcctggaggacaagttctacgggctcgagctcaaccacatcgcccgacgatacaacgagactgcggacgagctggctaagatagcctcagggcggacaacggttcctccggacgtcttctcccgagacctacatcaaccctccgtcaagaccgacgacacgcccgagcctgagaaggcctcggcccagcccgaggcaccctcggcccccgagggtgaggcactgcgcgtcgaggaagagtggaatggggtcacgcctaatcgaaactggcagaccccgtacctgcaatatctccaccgaggagagctacccctcgatagagccgaagctcggcgactggcgcggcgcgccaagtcgttcgtcttgaaggcacccgggggctacacgcacctgctggtcgccatcgacaaattctccaagtggatcaaggtcagacccctaaacaacatcaggtccgaacaggcggtggcgttcttcaccaacttcatccatcgctttggggtccggaactccatcatcaccgacaacggcacctag

SEQ ID NO: 115077 - DNA, 267 bp, Zea mays
  Clone ID: MRT4577_36432C.1
tttgatcgtttgaacaggctctaggactttctttgaatggcataattgaaataggctgttcaaaagatattaaagtccaaggtattattggaccatgcacatttttggagaagaaaggagccatgtgctttgacacagttgtcggtcaaggaaatacatcatcatggaaaatgtgtggtctcgatagaaatacttcttttacagtatttgttgatgtctcaccgagtgaactgatcgagccagccaggaaaccaaaatgcccatttt

SEQ ID NO: 115078 - DNA, 1452 bp, Zea mays
  Clone ID: MRT4577_36433C.1
atggcgcaccggacagtccggaaaaggtgtaagcctatttccctttcaacgcccacagtcccggatcgcctcggcgacgagcagcaccgccgcgaccatcgagcccgcctcgaagagagggtgcgccgaggctaccaccccaggcgcggaggacgctacgacagtgaggaggaccagagcccctcgcccgaaccgccaggtccgagggtcttcagccgggccatacgacgggcgccgttcccggcccggttccgagccccgactaccatcaccaagtactcaggggagacaaggccggagttttggcttgcggattaccgacgtgcatgccagttgggagggacgaatgacgacaacctcatcatccgcaacctcccccttttcctctccgacgctgcccgggcatggctggagcatctgcctcctacacagatctccggctgggacaacctggtcaaggccttcgcgggaaacttccaaggggaatccctgcaagagtacatccgacggttttcaaagcagcgcaccgagttgcccaacatcaccgacttagacgtcatcggggcgttcctcgccggcaccacatggcgggacctggtgagcaaactggggcgcaagactcccaccaaggcgagcgagttgatggacatagccaccaagttcgcctctggtcaggaggcgattgaagccatcttccggaaggacaagcagcctcgaggaagacagaaggaagacgcccccgaggcatccgtccaacgtgtcccgaaaaagaaggccaagaagaaggcgcaagcaaagcgcgacgccattgacgcggatctcgtcgctgctgctctgcacaggaatcctcggaagccctccggaggagtcaacacgtttgacaagatgctcgaggagtcgtgcccctatcacaggggtcccgtcaagcacacccttgaggagtgcgacatgctccggtgttacttcatcaaggcgggaccctcggtagaaggtggcaaggaccaaggcaacaacaagaagagggcgacaaggaagaggagttcccggagaactccctccaactttcgaaaggaaaccctcactttcgaggtggtcgggttccgagggacctatcacgcggtgttgggaagaccgtgctatgccaagttcatggtcgtccccaactacacgtacctcaagctcaagatgtcaggccccaacggaaccatcaccgtcggatccacgtaccaccacgcttatgagcgcgacgtggaatgcatggagtacgctgaggccatcaccgagtctgaggccctcatcgccgacctggattgcctctccaaggaggcgcctgatgtgaagcgccacgccggcaacttcgaaccagccgaggcggataaatccgtctctctcaaccccagcaacgacgcctgcaagcacgtcagggtcggctccgagctcgaccccaaatag

SEQ ID NO: 115079 - DNA, 614 bp, Zea mays
  Clone ID: MRT4577_36434C.1
tttcggcaaagctgttaagccagacgaaaaaggtcgtggtggaagttttggtctaacaagcctaaatcgtctcctgagtttgaaaaacctaggatgccacctgtaagggttattggagtaatccgtggaagtgagaagccaagcatatttgttccagctaatgagcccaatagtggccagtggttttatgtggatgttcccatgattgctcgtgcttgtggacttcctgagaatactgtttatattgaagatataaatgaagatgtatctccaacaaacccttatcctgttccaaaagatgtcaacaccttgattcgtcactcagtgatgccagatgaccatcttaaatacacgtttacatggtacactctttctgctgctgtgacttacatggcttccaagcggataaaagcaaagaaggtcaggttatagcaggaatttagtccaaacttccgcatgaacgtccatttgcacgcatggtttatgcttctgcactggaagatgcccatggtactggttctttcgtgtctggcaataagtataacattgcacttttttgttccaagttgttctacattgatactgggtatctcacagttgagctctggggttac

SEQ ID NO: 115080 - DNA, 2886 bp, Zea mays
  Clone ID: MRT4577_36435C.1
atgggcagtcttcagcaacctttccagcccgggacggtgctccgttttgggagtcttgagttcatgtccctcgacggtagctacgatatgatactccttccaccgccgcgcgacagcgacaatggcggccgacaacccgcccgccggcggcggaatcgacgacgtcttccccacgtggtggaagaacaacattcgagctcaccccgtcccctcccccgccgatggaggaggaggcggggcaaccgaggccaagcaggaggcggcacctcgtcagctatcgagcgagtcgacggtgccggcgccccatcggggggcacgtcgggcatcgacctcgcgtctgagacgaagacgagcgctgtctccccgcaacacgccaatcccaagcaaacgaacgacaccagcacactcgcgaaggacttgctgggtgtcaccctcatacctgagacgacggtgcagtcagtccctgacatgacttcatcaacgcccgtcgaccaagaggtaccgaccgattcccatctcacgccttttggatccagcctcaacccaccaagcgacttcgctttggtggacgctctcatagaggcgagtccaaaccctctggggtatcgtatgcggtcaccctgggaccggctgatggacgtctcgacctacgggccctcggggtccgaggaagatgacgagcccgacctctgttgggatttctccggacttggtaaccccagtgccatgcgggactttatgaccgcatgcgactattgcctttccgactgctccgacggtagccgcagcctcagcgacgaggactgcggcccaagtcgtgaatgtttccacgtcgatctagggggtcccgacgaaggcaaccatcttggtatgccggagaacaatgatctccctaggcctgtgcctcgcgttgacatcctacgggagctagccgtggtccccgtcccggcggggggtcatgacccacagctcgagcaaatccgcgagatgcaggccaggctcgacgagggggcaggaacacttgagccgatccgccgggacatcgggcaggaatgggcgggccaacctccggccggagaagtgcgtcatctaccccagggtatccagcaccgcatcgtcgatgaagtcagggtaaggccgccaccgacttccagtggagtcgaccagaacctggctgcagcggcaatgcttctccgtgcgatgccagagccatcaaccaccgaggggcggcgaattcagggagggctcaagaatctcctggaggacgccgcggtccgacgggccgaaagctatgcctcccgaaggcaggggcacccctcggaacatcgcactgcgacttcccgtttcatgcaggaagcctcggtccacaccgggcgcacacgcaacacagcgcctgcggccccgggtcgcctcggcaacgagcaccatcaccgcaaccgacgggcccacctcgacgagaggatctccaactgggacgacctggtccaagccttcaccggcaatttccagggcacctacgtgcgccctagaaactcctgggatatccgaagctaccgccagcagccaggagagtctctccgggactacatctggcgattctcgaagcagcgcactgagctgcccaacattaccgattcggatgtcatcggtgcgttcctcgccggcaccacctgccgcgacctggtgagcaagctgggtcgcaagacccccaccagggcgaccgagctgatggacatcgccaccaagttcacctctggccaggaggcggttgaggccatcttccggaaggacaagcagccccagagccgcccaccggaagatgtccccgaggcgtcaactcagcgaggcgccaagaagaaaggcaagaagaagtcgcaagcgaagcgtgacgccgctgacgcggaccttgtcgccgccgccgagtacaagaaccctcggaaacctcccggaggtgcaaacctcttcgacaagatgctcaaggagtcgtgcccctatcatcaggggcccgtcaagcacacccttgaggagtgcaccatgcttcggcgccactttcacaaggccgggccacccgcggagggtggcagggctcgcgacaatgataagaaggaagatcaccaggtaggagagttccccgaggtccgcgactgcttcatgatctacgatgggcaagtggcgaacgcctcggcttggcaccgcaagcaagagcgtcgggaggtctgttcggtaaaggtggcggcgccagtctacctagactggtccgacaagcccatcaccttcgaccaagccgaccaccaagaccgcgtgccgagcccgggaaaatacccgctcgttgtcgaccccgtcatcggcgacgtcaggctcaccaaggtcctcatggacggaggcagcagcctcaacatcatctacgccgagacccttgggctcctgcgggtcgatctgtcctcggtccgggcaggcgctgcgcctttccacgggataatccccgggaaacgcgtccagcccctcggacaactcgatctacccgtctgctttgggacgccctccaacttccgaatggagaccctcacgttcgaggtggtcgggttccgaggaacctaccacgcagtgctggggagaccatgctacaccaagttcatggtcgtccccaactacacctacctcaagctcaagatgccgggccccaacgggtgcgtggagtacgccgaggccctcgccgaatctgaggccctcattgccaacctggagagcctctctaaggaggtgctagacgtgaagcgccacgccggcaacttcgagccagcggagacggttaaatctgtccccctcgaccccagcaacgacgcctccaagcaaatctggatcggctccgagctcgatcccaaatag

SEQ ID NO: 115081 - DNA, 2548 bp, Zea mays
  Clone ID: MRT4577_36436C.1
tgcaaaagcaagctctacaaaagcggaagagccaaatcgcttctgttgtggaagatgctgttgaagctgctgatttgagggactatagttcgcgaactcgtgattccttatcctgttggaatcctgattcaattggttttaatttaatagaaaatgtcttatgccatatttgtcaaaaggaacgatctggtgcaattcttgtatttatgactgggtgggatgacattaatgcattaaaagagcagctccaagcaaatccattgcttggaaatccaagcgcagttttgttgctcgcttgtcatggctctatggccagttcagagcagaaattaatatttgataagcctgagcctggagtaaggaaaatagttcttgccacgaatttggctgaaactagtattactatcaacgatgtagtttttgttgttgattgtggcaaagcaaaagagacatcttacgatgcactgaataatactccctgtctgcttccaacctggatctccaaggcttctgccagacaaagacgaggacgagctggccgagtccaaccaggggagtgctaccatctttatccacgatgtgtatatgatgcatttgctgactaccagttaccagaacttcttagaactcctctccagtccctctgtttgcaaataaaaagcttgaggctgggaagtatatcagaatttttatccagagctttacaatcacctgaatctctatcagtacaaaatgccattgaatatcttaaagtcattggagcatttgatcagaatgaagaattgacggttcttggaaagcacttgtctatgcttccagttgaacctaagttaggaaagatgcttatttttggggctatttttaattgtctggatcccatattaaccatagtttctggacttagtgttagagatccctttttaacccccttcgataagaaagatcttgcagagtcagctaagttgcagttttcatgccgggactacagtgatcatcttgcacttgttcgtgcatatgatggatggagggaggctgaaagagaccgtgctggttatgactactgctggaaaaattttctttcggtgcaaacattgaaagcaatagattctcttcggcggcagtttctctttcttctgaaggatactggtttggttgacgaaaacatgactatgtgcaataaatggagtcgtgatgaaaatctagttcgggcggtaatttgtgcaggactgtatccaggtgtttcctctgttttgaacaaggagaaatccatctccctcaagacaatggaagatggacaggttatgctttattcgagttcagttaatggtaaagaaaccaagattccattcccctggctagttttcaatgagaaggtgaaagtgaattctgttttcctccgggattcaactgctatatctgattctatactgttgttattcggaggctgcataaaacaagggggcttggatggacacttaaaaatgcttggaggttatcttgagttcttcatgaatcgcgatcttgcttcaacttatgtgagtttgaagagagaacttgagaatttaatccattgcaagctccaaaacccaaggatggatatccaaacgagtgaagagctgctatcagccatccgtttgctggtgactgaggatccatgcagtgggcggttcgtgtacggccgacaggagccaagatcaaagaaagcaaagacgatgctttcgccatcctctctgagtgaggctggtggcaacggaggggataatgccaagaaccagctccagacttacctgacccgggccgggcacagcaaccccacctacaagacgaagcagatcaagagctatctcttcagatcgacggttgagttcaacggcatgcagttcgtggggcaaccgtgtgcaaacaagaaacttgcggagaaagatgccgcgagcgaggcactgaactggctcacaggagatggtggagcgattactgactctaggggggctcaggatgcagaccccatgtccttgctgatgcaaccaccgcgtaggcgtcgacatagccatcgtcggaggaactgattagcacgacatgcttttcttcctttttgatcgttttcttatttatgtagcattcgagaagcatagttaagcatagaaggtagcgaggaaaaaatgttatagactcttgaaatgtactacaatagttttgacgtgcagtgcctgtgaattttagagcatggttcgtcagtggtgacggtgagtgatgggctgatggcgtgcgagaatcgcagagaacactagctgtaacggtcgaagggtgatccaattttttttttgctgtgggtactgaattcattatttgttggcgccatattaactgaagagttatgcgtagtgggcaagggcagccacgatgtatgtatttagactaaggtagtctaaatgagggggctcgtgtcaggtatcattgtatgttgtcagatgcggagaactggagactaagactatccgccggttttctctaaatttctaactctatatcaattttttttgtcacctcc

SEQ ID NO: 115082 - DNA, 3315 bp, Zea mays
  Clone ID: MRT4577_36437C.1
atgccgacagttggcgcgccaggtaggggcctgctgcgtgttgacgaacagcttcccgtcaagctccagatgggtagtctccagcaacctttccagcccggaatggtgctccgtttcgggagtcttgagttcatgtccctcgacggcggctacgacatgatactccttcccccgccgcgcgatagcgacaatggcgaccgacaactcgcccgccggcggcggaatcgacgacgtcttccccacgtggcagaagaacaacattcgggtttgtcccgtcgcctcccccgccgacggaggaggaggcggggcaaccaaggccaaggaggaggcagcacctcgtcggctgtcgagcgagtcgacggcgccgacgccccaacgggggacacgtcgggcatcgacctcgcgtctgagactaagacgagcgttgtttccccgcaacacgccaactccaagcggatggacgacgccagcacgctcgcaaaggacttgctgggcgtcaccctcgtacctgagacgacggtgcagtctgcccctgacgtgacttcgtcaccgcccgtcgaccaagaggtaccgaccgattcccatcccgtgccttttggattcagcctcgacccaccaagcgacttcgcttcggtggacgctttcatagaggcgagtcgaaaccctccggggtatggtatgcggtcaccctgggaccggacgacagccgtctcgacctacggaccctcgggttccgaggaagatgacgagcccgacttttgttgggatttctccggacttggtaaccccagtgccatgtgggacttcatgaccgcatgcgactactgcctttccgattgttccgacggtagccgtagcttcggcgacgaggactgcggcccaagtcgtgaatgtttccacgtcgatctagggggtcccggtgaaggcaaccatcttggtatatcggaaaacggtgatccccctaggcctgcgcctcgcgttgacatccttcgggagctagctgtggtcccagtccctgcggggggtcaggacgcacagctcgagcaaatccgcgagatgcaggccaggctcgatgagggagcaggaacacttgagccgttccactgggacatcgggcaggaatgggcaggccaacctccggccggagaagcatgtcatctaccccagggcatccagcaccgcatcaccgacgatgtcagggcaaggccaccaccggcttccagtggggtcaaccagaacctggctgcagtggcaatacttctccgcgcgatgccggagccatcaaccaccgaggggcggcatatccagggagagatcaagaatctcctagaggatgccacggtccgacgggccgaaagctcggcctctcgaaggcaggggtacccctcggagcatcgcgccgcgacttcccgattcatgcgggaagcctcggtccacaccgggcgcacgcgcaacacagctcttgcggccccgggtcgcctcggcaacgagcaccatcaccgcaaccgtcgagcccaccttgacgagaaggtgcgccgaggctaccaccccaggcgtgggggacgctacgacagcggggaggatcggagtccctcgcccgaaccacccggtccgcaggctttcagccgggccatacgacgggcgctgttcccgacccggttccgaaccccaactactatcacaaagtactcaggggagacgaggccggaactgtggctcgcggactaccggctggcctgccacctgggtggaacgaacgatgacaacctcatcatctgcaacctccccctgttcctctccaacaccgctcgagcctggctagagcatttgcctccggggcagatctccaactgggacgacctggtccaagccttcgccggcaacttccagggcacgtacgtgcgccctgggaactcctgggatctccgaagctgtcgccagcagccgggagagtctctccaggactacatccggcgattctcgaagcagcgcaccgagctgcccaacgtcaccgactcggatgtcatcggcgcgttcctcgtcggcaccacctgccgcgacctggtgagcaagctgggtcgcaagacccccaccagggcgagcgagctgatggacatcgccaccaagttcgcctctggccaggaggcggttgaggccatcttccggaaggacaaacaaccccagggccgccagccggaagatgtccccgaggcgtccactcagtgcggcaccaagaagaaaggcaagaagaagtcgcaagcgaaacgcgacgccgccgacgcggaccttgtcttcgccgctgagtacaagaaccctcggaaacctcccggaggcaccaatctcttcgacaagatgctcaaggagccgtgcccctatcatcaggggcccgtcaagcacacccttgaggaatgcgccatgcttcggcgccactttcacaaggtcgggccacctgcggaaggtggcagggcccacgacgacgataagaaggaggatcgcaaggcaggagagttcctcgaggtccacgactgcttcatgatctacggtgggcaagtggcgaacgcctcggctcggcaccgcaagcaagagcatcgggaggtctgctcggtaaaggtggcggcgccagtctacctagactggtccgacaagcccatcaccttcgaccaggcgaccaccccgaccgcgtgccgagttcggggaaatacccgctcgttgtcgaccccgtcatcggcaacgtcaggctcaccaaggtcctcatggatggaggcagcagcctcaacatcatctacgccgagaccctcgggctcctgcggatcgatctgtcctcggtccgggcaggcacggcgcctttccacgggatcatccccgggaaacgcgtccaggccttcggacaactcgatctacccgtctgctttgggactccctccaacttccgaagggaaaccctcacgttcgagggtggttgggttccgaggaacctaccacgcagtgttgggaggccatgctacgccaagttcatggtcgtcccaactacacctactcaagctcaagatgtcgggccccaatggggtcatcaccgtcggccccacgtaccgacatgcatacgaatgcgacatggagtgcgtggagtacaccgaggccctcgccgaatccgaggccctcatcgccgacctggagagcctctccaaggaggcgccagacgtgaagcgccatgccggcaacttcgagccagcggagacggttaagtccgtccctctcgaccccagcaatgacgcctccaagcagatccggatcggctccgagctcgatcccaaatag

SEQ ID NO: 115083 - DNA, 1137 bp, Zea mays
  Clone ID: MRT4577_36438C.1
atgggcgagacgatctcgttcgcccctcggaaggccatcaagtcccaggtcttggcggactttgtggctgaatgggtcgacacccagctcccaacagctctgatccaaccggaactctggaccatgttcttcgacgggtcgctgatgaagacaggagcaggcgcaggcctgctcttcatctcgcccctcgggaagcacctacgctacgtgctacgcctccacttcccggcgtccaacaatgtggctaagtacgaggctctggtcaacgggttgcgcatcgccatcgagctgggggttcgacgcctcgacgctcgcggtgactcgcagctcgtcatcgaccaagtcatgaagaactcccactaccgcgacccgaagatggaagcctactgcgatgaggttcggcgcctggaagacaagttctacgggctcgagctcaaccacgtcgcccgacgctacaacgagactgcggacgagctggctaaaatagcctcggggcgaacaagggttcccccggacgtcttctcccgagacttgcatcaaccctccgtcaataccgacgacacgcctgagcccgagaaggcctcggcccagcccgaggcaccctcggctcagtctgaggcaccctcgactcggcccgaggcaccctcggctcggcccaaggcaccctcggcttggcccgaggcacccttggctcggcctgaggtacccttggcctccgaggtcggccccttgcagaaggcacccgggggctacacgcacctattggtcgccatcgacaaattctccaagtggatcgaggtccgacccgtaaacagcatcaggtccgaacaggcggtggcgttcttcaccagcatcatccatctctttagggtcccgaactccatcatcaccgacaacggcacccagttcaccggcagaaagttccaggacttctgcgaggatcaccacattcgggtagactgggccgccgtggctcaccccatgacgaatgggcaagtagagcgtgccaacgacatgattctacaaggactcaagcctcgaatctataacgacctcaacaagttcggcaagcggtggatgaaggaactcctctcggtggtctggagtctaaggacgacgccgagtgtaacatcctga

SEQ ID NO: 115084 - DNA, 3117 bp, Zea mays
  Clone ID: MRT4577_36439C.1
atgggcagtctccagcaacctctccagcccgagacggtgctccgtttcgggagtcttgagttcatgtccctcgacggcagctacgacatgatactccttcccccgccgtgcgacaacgacaatggcggccgacagcccgcccgccggcggcggaatcgacaacctcttccccgcgtggtggaagaacaacattcgagctcaccccgccctcttccccgtcgacggaggaggaggcggggcaaccatggccaagcaggaggcggcacctcgtcggctgtcgagcaagtcgacggcgccggcgccccaacggggggcgcgtcaggcatcgacctcgcgtttgggacgaagacgagcgccgtctccccgcaacacgccaattccgagcaaacggacgacgccagcacgctcacgaaaggcttgctgggcgtcacccttgtgcctgagacgacggtgcagtcagtccccgacgtgacttcatcaccgcccgtcgaccaagaggtaccgaccgattctcgtctcatgccccttggattcagcctcgacccgctaagcgacttcgctttggcgggcgccctcgtagagacgagtccaaaccctctggggtttcgtatgcggtcaccttgggaccggctgacggacgtctcgacctacgggccctctgggtccgaggaagacgacgtgcccgacttctgttgggatttctccggacttggcaaccccagtgccatgcaggacttcttgaccgcatgcgactactgccttttcgactgttccgatggtagccgcagcctcggcgacgaggactgcggcccgagtcgcgaatgtttccacgtcgatctagtgggtccctccgaaggcaaccatcttggtatgccggagaacggtgatctccctaggcctgtgcctcgcgttgacatcctacgggagctagcagtggtccccgttcaggcggggggtcatgacccacagctcgagcaaatccgcggggtgccagccaggctcgacgagggagcaggagcacttgagccgattcgccgggacatcgggcaggaatgggcgggccaacctccggccggggaaatgcgtcatctaccccagggcttccagcaccgcatcgccaacgatgccaggatgaggccgccgcccgcttccagtggagtcggccagaacctggctgcagcggcaatgctcctccgcgcgatgccggagccatcaaccaccgagggacggcgaatccagggagagctcaagaatctcctggaggacaccgcggcccgacgggccgaaagctccgcctctcgaaggcaggggtacccctcagaacaacgcgccgcgacttctcgattcatgcgggaagcctcggtccacaccgggcgcacgcgcaacacagcgcctgcggccccgggtcgcctcggcaacgagcaccatcaccgcgaccgtcgggcccacctcgacgagagggtgcgccgaggctaccaccccaggcgtgggggacgctacgacagcgaggaggatcggagtccctcgcccgaaccacccggtccgcaggccttcagccgtgccatacaacgggcgtcgttcccgacccggttccgacccccgactactatcacaaagtactcgggggagacgagaccggaactgtggctcgcggactaccggctggcctgccaactgggtggaacagacgatgacaacctcatcatccgcaacctccccctgttcctctccaacaccgctcgcgcttggttggagcacctgcctccggggccgatctccaactgggacgacctgccgagagagtctctccgggactacatccggcgattctcgaagcagcgcaccgagctgcccaacatcaccgattcggatgtcatcggcgcgttcctcgccggcaccacctgccgcgacctggtgagcaagctgggtcgcaagacccccaccagggcgagcgagctgatggacatcgccaccaagttcgcctctggccaggaggcagttgaggctatcttccggaaggacaagcagccccagggccgcccaccggaagatgcccctgaggcgtcaactcagcacggcgccaagaagaagggcaagaagaagtcgcaagcgaaacgcgacgccgctgacgcggaccttgtcgccgccgccgagtacaagaaccctcgaaaaccccccggaggtgccaacctcttcgacaagatgttcaaggagtcgtgcccctatcaccaggggcctgtcaagcacacccttgaggagtgcgtcatgcttcgacgccacttccacagggccgggccacccgcggagggtggcagggcccgcgacgacgacaagaaggaagatcaccaggcaggagagttccccgaggtccgcgactgcttcatgatctacggtgggcaagcggcgaacgcctcggcggcggcgccagtctacctagactggtccgacaagcccatcaccttcgaccaagccgaccaccccgaccacgtgccgagcccgaggaaatacccgctcgttgtcgaccccgtcatcagcaacatcaggctcaccaaggtcctcatggacggaggcagcagcctcaacatcatctacgccgagaccctcgggctcctgcgtgtcaatctgtcctcggtccgggcaggcgttgcgcctttccacaggatcattcccgggaagcgcgtccagcccctcggacaactcgaccttcccgtctgcttcggaacaccctccaacttccaaagggagaccctcacgttcgaggtggtcgggttccgaggaacctaccacgcggggaggccatgctacgcgaagttcatggccgtccccaactacacctacctcaagctcaagatgtcgggccccaacggggtcatcaccgtcggccccacgtaccgacacgcgtttgaatgcgacgccgagtgcgtggagtacgccgaggccctcgccaaatctgaggccctcatcgccgacctggagagcctctctaaggaggtgccagacgtgaagcgtcatgccggcaacttcgagccagcggagacagttaagtccgtccccctcgaccccagcggcgacacctccaagcaagtccggatcggctccgagctcgatcccaaatag

SEQ ID NO: 115085 - DNA, 842 bp, Zea mays
  Clone ID: MRT4577_3643C.1
ttcattgctctgcactgataaaccacagagcttaaattgtggtatgcaccacactttaaataatctagatgaagcaccctaccagcaagaagatatccttttggaacattgctcttatggaacggcagtgtaccttgagccagatcaaacaccttgtagccagcagagcattgcatgtacaaatgatcaagctggtatttcaggaaactaggaagctttctacactcaaagtctccaatggagcaagctcgtcactagttacgaaggacaacttaactacctcagtagcatatccttttactctcatcaaaccatcctggcaagaaggcgatgttaccttgcaggatataaatcggcgaatccgtcctcctcctaagaaggccccagagatccttggaacttcagcattctctggcaagccagtgattaacaagacaagaatcagaacagaaggagggaaaggaagcatcacaatactaagaacaaagggctgagaaccggaaaatacctttgatccttatttatctgctcctttgtggtcaattgtacaggtctgagcacttgaggctgccattgattcacagttcatggaacagagggcttagagcttgaggatgccattgattcttatttatctgccattctctcgattgcttttggcactctggtcaatgtgcaggcctcttagctttccagctgttactttttttctttcagttttgtaccgtgactttgtcttgtgaatagtattatgacatgtggatgtggtcaacgatatatacaaagcactaaagttaatggaattagtgtgttgtggtcaattgtacaggtctgagcacttg

SEQ ID NO: 115086 - DNA, 1074 bp, Zea mays
  Clone ID: MRT4577_36440C.1
atgacgtcgatggctctcagctccttacggaagcaaggaaacgtcagcaggaccccgggccgcaccgtcagctacgcttctacggggctcaagcacttctccgacggccacatgggtagctttcagcagcctctccagcccgggacggtgctccgcttcagaagtctcgagttcatgtcccacgacggcagctacgacatggtactcctcccctcgcagcacgacaacaacgacggtcgtcggctcgcccggcggaggcgaactcgacgacgacttccccccgtggcggaagaggaacacccgggtttgccccgccaccctcctcgccggaggaggggaagacggggcaaccgtggccaggcaggaggcggaacctcgtcggctgtcggaccagagcgagtcgacgatgccggcacccctgcgggggacatgtcgggtgttgtcctcgcacctgagacaacgacgggtgtcgcttcccagcaatgtgccaaccccaagcggactgatgacgccagcaccctcacgaaggacttgttgggcgtcagcctcgtacctaagataacagtgcattccgtccccgatgcgacttcaccaccgtccatcaaccaagaggtaccatccgttttccaccctgttccctttagatttagctccgatccaccaatcgaccccgcttcggtgagcgctttcgcgagggcatatcctgaacttccagggtaccatatgtggtcaacttgggaccgactgacggccgtctcaacctccggacccgcgggttccgaggaagcaaacgaccctgacttcggttgggatttctccggactccgtgatcccagtgccatgcgggacttcatgtccgcatgtgactactgcctctccggctgctctgacgatggccacagcctcggcgacgagggttatcacccaagtcgcgagtgtttccacatcgatcagggggatcacgacgaagacaaccacctcggcatgccggaagatgacaacgcccctgtgcctgcgtctcgcgttgagatcccgcgggagctagctgtggtcccagtccctgcggggggttag

SEQ ID NO: 115087 - DNA, 485 bp, Zea mays
  Clone ID: MRT4577_36441C.1
acgcttcgtctctctgtcttttttcttctctcaacgccgttgattcgccatcgtcgctaccgagggtcgggaggtttacgacttttggactaatctcctctgtggagagcaatgactaaaactcgtgggactgatatgacaaagaaaaagggtaaacatgtttctgaaatggatttcaagactcatcagcatactgaatttttcgataagttgatagagctcacgcctgctagattctacttacctgatgagacagaaaggaaatggtatccaggtcttagcaaggctcaaaaagctagagccaagaaaaaaacaaatgacaacctaaagaaggcgaagagagataagttggacccagagaagtctgctttgacgactctcgatttactgaaggagaagatagagaaggaaagattggcttcacagaagcagaagcttaagaagaaacacgcggatttacgggagcagaagctagagcaggaaaa

SEQ ID NO: 115088 - DNA, 461 bp, Zea mays
  Clone ID: MRT4577_36442C.1
cccacgcctgctactaagtgctctccagcttttccgtcaactactaaaaccaactaacacagataaaacaccacgcggcatgctcacaatgtcgacctggacaggctcaacaagatgctacccagcatctacttcaagctatacaacatgaagggggacatcgccatgtggcataactccttcgactcctgctacgacaagctcatccttgtcaccacgcccacctagtgctactactgcatcgaccccaacaccgtctgatacgtgcccatgcgctcctgcgtaactgctcccagccccaaatacaggaagctggatctcaacgccacgcccaatctaccccagatgctcatcgtcacgccggatctcattatcctagctcctgtcagcatcgcttacaccttcaaacatgacgacgcccggattaagcttaaggtcaatcactacaagacgctaatgcc

SEQ ID NO: 115089 - DNA, 274 bp, Zea mays
  Clone ID: MRT4577_36443C.1
cccacgcttgacgcacacgcgtgcgaattgaccggtggaagttctgactaaatttgctgtcaaacggatgaactatatattgacgttattataccaacagcacaccttattttgtcccgaaaaaaaaaaattactagactaatgtgtaactaactgtaagcaacagagtatccaaataacgtgtatcgatttattcgtgaacaatgctatcaagactgaaaccgaatttaaaaattaaaacttagataaataaaaagtgtgcaccttttataag

SEQ ID NO: 115090 - DNA, 424 bp, Zea mays
  unsure (1)..(424): unsure at all n locations
  Clone ID: MRT4577_36444C.1
gctttcattgcgtccgcccacgcgnccgcccacgcggggggttctcgaagatgagacacagtaccagcaggggtacaaaaatggcgataatgatggtccggcacctggaaaggaagaggggaggcaggacggcacaaagatgggattccagggcggcgaagaactgggcgacatacagggctgacaggatgagaggacgactgcaactcacaacgatcagaatgcctgcacagctcgggtcaggaagaacatcgagcaactggctgcactggtgggcagctatccgctgtctgatccggagaatgaacaaacccaagacgcgatggagaagaaaaggctgaaacttaaggtcatcactgcaagctgaggggtgacgttagagcatgaagggcaccccaaatcatctaaacaggatgctgaggag

SEQ ID NO: 115091 - DNA, 340 bp, Zea mays
  Clone ID: MRT4577_36445C.1
gggttggcttctcctccccctccggttcgggttcgggttcgtagaggtactccggggttcggcttcgagggtgagcggatcgagatggcggcgacggatgttgagtaccgatgcttcggctgcggccttgtctgttccacggaccaccactccctacacatcgcctttactgcctactgcgaggatctgtagagcaagatcatcctgtgtcgtgagacgcaatgtaacggtagtttaactatattgaccttatacacgagatgaagctgtgcaaaacacgcaaggaaaaaaaaaacaaaagggagctcgacgtacaggacataagcttactcacggccca

SEQ ID NO: 115092 - DNA, 478 bp, Zea mays
  Clone ID: MRT4577_36446C.1
ttagtttcaccatacccccccgctccgctgctccggaaccctcgtcgcgaggtcaccgccgatggccggggactcgaccccttccccggcctccggacctgttcaggtgcgctgcgctggttgccgtacaatcctcgctgtcggcctcggggtaactgaattcatctgccccaagtgccgaatggcgcaatgcctaccgccacagctcatggccaagtccacctcgccctcgtcgcctctgcccaaagccccctggaagccttctctgcctcctacgcagaccccgatgggtgacgccgtcggctcagggggtggaccccacgaagatccagctcccctgtgcgggctgccaggccgtcctcaacgtgccccacggtctcgcccgttacgctgtccgcagtgtggcgtcgacttgccgtgaccacgccaagctcaaaacttctcgccgactcaaagcgccacgtcataggccatgccc

SEQ ID NO: 115093 - DNA, 307 bp, Zea mays
  Clone ID: MRT4577_36447C.1
gggatagtgcatcttttaaaatacattttatttggggaggaacatgtggctgagcagacttttgtataatattacttcaaagatatgtaatcacaaacaagaagaactattttttataatgtcatttgagagagtttcatcagtacatatggtggacgttaattgtttgaatttgatagtctttgaatttaatcaagaaactacctggaaccagtgaaaaggaaagctggacttaaataatgcttagattaattgataaatgtcacttttaaaatctactgtatttattataatttacacccttgaa

SEQ ID NO: 115094 - DNA, 252 bp, Zea mays
  Clone ID: MRT4577_36448C.1
aaaaaaaaaaaaaaaaaaaaaaaaaacaaaatataaataacaaaaaaaacgttctacaatatggggaaataaaatacgacgtacacgcgccttcataactgcttctttttttttaccttaacccaacttcctttccgtggctctacttttactaccctgcgaatgcccaaaccattccctttcccatctccttaatctacattcacatccccctttctcccactgtggtaattagaaaaacgccgatccccc

SEQ ID NO: 115095 - DNA, 759 bp, Zea mays
  Clone ID: MRT4577_36449C.1
taccctcgaggccggccgggatcgcacatattattgagaccaattatcaacatagaaactagaatagagtagcaacaatgacaaccaagatattttccctccttaagctccttgctctttctgcaagcgctactaccacgccattttcctgcaatgctcacaagctcctatagcttcccttcttcccccgtacctttcatcagtgatggcttcagtatgtgaaaacccaattcttcatctctataggatccaacaggcaattgcagcaggcatcttaactttatcacccttgttcctccaataaccgtcagccctattacaacagttatctttggtgcatttgttggcacaaagcatcagggcacaaaaactgcatcaacttgcgctggaaaaccttactgccaactctcagtaacaaaagtttattccattcaaccaactggctacattgaactctgttgcttatttgcaacaataacaactaccattcagccaactagttgttgtgagcctgttgccttcttacatagcagcagttgttgccgttctacccgcacgatgtggctaacacaaccaccctcttacaactgcaacaattgccgccattcaaccaacttgcgttgacaaacccaacagcgttctacctacaacccatcattgatggtgccctctgttagattgcttatgagttatagttcaataatgaagttttttggttgatgtttgtggcttcccagaaataataaagtacatttctag

SEQ ID NO: 115096 - DNA, 371 bp, Zea mays
  Clone ID: MRT4577_3644C.1
attcggctcgaggtcttcttctccgatgaatgtgcttgatgctcatcagggggagtgggaagtagcagaacatccaccttcattgtcataataatgctgaccatacgcagccatgattcaattagaaacgttctgtcaaaggatgttagctagtaactagtcgggcgcactgattaattcaagtcatgtcgatatggctgccttcccattgctagcaaaatattaatgtctcatatgttaccttatcaaccaaccagaggacatgaagacacgagaggggctaaagggaccaaactgggcataccgacatgctgaacgcaaaaagtccaggcctgccggcggcggtggccaaataggggcatccaaagccc

SEQ ID NO: 115097 - DNA, 445 bp, Zea mays
  Clone ID: MRT4577_36450C.1
ggaccccgcaaaaccaaatcttagttaagggaaagaaaccgcccaaatgggcaaattcgaaaaacaaattaaaaggtaaaaaaaggccaaaggagggatttagtttactaaaccaaaaaaaaagaggcccacagcaaaaaggacggggggagcaaaaaaaacacggaccaaagcaccagggggaccgggccattttggaaagctaagaaaaagaaatcgtcgttgtcccggggggggggggggtcgacggaacaaaaaaacaaaacggggaaaaaaaccccggggaggaagcccaggatggggagcaacaaactgatccaaaactccatggagaaaaaaccgggggggaggaaaacaccgaggggggggaggaggaccgaacaaaaaatttccaggcaccgggagaaaaaaaaacaaaggcccatttttttcctccaactggggg

SEQ ID NO: 115098 - DNA, 273 bp, Zea mays
  Clone ID: MRT4577_36451C.1
tgcctatatacatgacactgcgcggcacgttcgcacaggcttatagagtggctgaatcaccgtaagcagaattggaggaacattatgaggacgcacatgaacaccaggaggactagtaaaacgatgttgttgctcaccatatgattctcagcgatacaatctgctttgggcgcatggtgaaacaccgatatatacctttctgtttgggctttgaaacttgcgcactctgagttgggcaatgggttctaccagtagatatacctgcatcgagag

SEQ ID NO: 115099 - DNA, 745 bp, Zea mays
  Clone ID: MRT4577_36452C.1
cccacgcgtccgcccacgcgtccgatggttggagccatagagaaaaacattcctaagcttttgaagcatgacaagcttttctctgccaagagagctgaaggttatgtgtattctctgtggtctttgttaccatcttgttgcaactacccatgtgatacgtcaagcaattttagagttttacaagatattttatgtgacactctgcaaaaccatcctgccttgcatggcattgtttgctccagtattcaggttttaatcaaacaaaacaaaaaagctctgtcagtttctagggaagaagacattcttgctgaggatgaaataagcaaatctgaaagaagagcaaaggaacgttatactcaaaatctggctgaggaaaacttgaaagcgatacgtgctttctcttctaagcttttggaagtactttgttctatattcttgatgtcttcgaatgatgctattggattattgcagcctgcgataagtgagatagcttccatatcagacaaaaacgttgttgggaaattcttccttgatgcaataagaaagttgttggatgctacaaaggctgttaatgcagagcctgtggatgatagttcaatggaaattgaatcctattccaacaaaaatatcatgaagagggctctacttttggattttgcagcttcattgatgcctgctttagcttcaaagtctatcaatgtgttgttcagttatgtgaaacctgcaattaaagacagcgactctt

SEQ ID NO: 115100 - DNA, 2196 bp, Zea mays
  Clone ID: MRT4577_36453C.1
atgccgttcggtttgaggaatgcgggcgcgacgtaccagcggtgcatgaaccatgtgttcggcgaacacatcggtcgcacagtcgaggcctacgtcgatgacatcgtagtcaagacaaggaaggcttctgacctcctctccgaccttgaagtgacattccgatgtctcaaggcgaaaggagtcaagctcaatcccgagaagtgtgtcttcggggtgccccgaggcatgctcctggggttcatcgtctccgagcgaggcatcgaagccaacccggagaagatcgcagccatcaccagcatgggacccatcaaggacttaaaaggcgtacagagggtcatgggatgtcttgcggccctgagccgcttcatctcacgcctcggcgaaagaggtctgcctctgtaccgcctcttaaggaaggccgagtgtttcgcttggacccctgaggccgaggaagccctcgggaacctgaaggcgctccttacaaaggcgcctgtcttggtgcccccagctgatggagaagccctcttggtctacgtcgccgctaccactcaggtggttagcgccgcgattgtagtcgagaggcaagaagaagggcatgcgttgcccgttcagaggccagtctacttcgtcagcgaagtactgcggaagttacgacactacttcgagtctcatccggtaactgtggtgtcatccttccccctgggggagatcatccagtgccgagaggcttcgggcaggatcgcgaagtgggcagtggaaatcatgggtgaaacaatctcgttcgcccctcggaaggccatcaagtcccaggtgttggcggacttcgtggccgaatgggtcgacacccagctgccgacggctccgatccaaccggagctctggaccatgtttttcgacgggtcgctgatgaagacgggagccggcgcgggcctgctcttcatctcaccccttgggaagcacctacgctacgtgctccgcctccatttcccggcgtccaacaatgtggccgagtacgaggctctggtcaacgggttgcggatcgccatcgagctaggggtcagacgcctcgatgcccgcggtgactcacagctcgtcatcgaccaagtcatgaagaactcccactgccgcgaccagaagatggaggcctactgcgatgaggttcggtgcttggaagacaagttcttcgggctcgagctcaaccacatcgctcgacgctacaacgaaactgcggacgagctggctaaaatagcctccgggcgaacgacggttcccccggacgtcttctctcgggatctgcatcaaccctctatcaagatcgacgacactcccgagcccgaggcaccctcggcacagcccgagctaccctcggcccccgagggcgaggcactggacgtcgaggaagggcagagcggggccacgcctgatcgagattggcaggccccgtacctgcaatatctccgccgaggagagctacccctcgaccaagccgaggctcggcgggtagcgcgacgcgccaagtcgttcgtcttgctgggcgatgaggaggagctctaccaccgcagcccctcgggcgtcctccagcgatgcatctccatcgccgaaggtcagaaactcctgcaagaaatacactcgggggcttgcggccatcatgcagcaccccgagcccttgtcgggaatgctttccggcaaggcttctactggccaacggcggtggctgacgccactagaattgtccgcacctgcgaagggtgccaattctatgcgaggcagacccgcctgcccgctcaggctctgcagacgatacccatcacctggccctttgctgtatggggtctggaccttgtcggtcccttgcagaaggcgcctgggggctacacgcacctgctggtcgccatcgacaaattctccaagtggatcgaggtccgacccctgaacagcatcgggtctgagcaggcggtggcgttcttcaccaacatcatccatcgcttcggggtcccaaactccatcatcaccgacaacgatacccagttcaccggcaaaaaattcttggatttttgcgaagatcaccacatccgggtggaccgggccaccgtggctcatcccatgtcgaatgggcaagtggagcgtgccaacggcatgattctacaagggctcaagcctcggatttacaacgacctcaacaagttcggcaagtga

SEQ ID NO: 115101 - DNA, 533 bp, Zea mays
  Clone ID: MRT4577_36454C.1
tttttttttttttttttttgaaaaagaggacaaatatatttgtcgaagaggtgtttgttctagaacgtagacagtagcgcgtgcaaaattactgaaaagtgaagggggaaaaaactccgaaggaatacagcataaaaacaagggtctacaacatgccggtagcggaaactgaattttagagcgtgaggatcagtggtggtgcagaggcaagaagcagcaggatgatcgtctgcaggtagtagccgcggcgctctcctcctagcctgccagcggccccggagcagtactcctcgccctcgccatatccgccggcgccctgctgctcgtacggctgctggctgccctcgccgtagtaccggccgccgactgctggcttctcctgctcgtggtcgcgaggcttgcggtagtagtactcgtcggcgccgccgacgcagtctttgcgctccctgatctcaaaggtccctctgtcggggccgtagctgcaccccgtgccgagcgcctgcctcaccgccagcaccgacgcgccgttggag

SEQ ID NO: 115102 - DNA, 306 bp, Zea mays
  Clone ID: MRT4577_36455C.1
cccaccatcacctcccgcagagatccagacttccgtgcgcctcgtgctcaccggcgagctcggcaagcacgccgtctctgagggcaccaaggcctgcaccaatttcacctcctcctatgcttgcacgctcgaccttgcaagctcttctggtgctgatgttcacactgagttgaagttagatgtcgctggtttctctgtcagagctgctctatttctgtaggaactccttaatgtaacccaccagggcctggttaattgggaattattaacactttggtggtgatcacttatggttcaaattcttaa

SEQ ID NO: 115103 - DNA, 3135 bp, Zea mays
  Clone ID: MRT4577_36456C.1
atgggcagtctccagcaacctctccaacccgggacagtgctccgtttcgggagtcttgagttcatgtccctcgacggcagctacgacatgatgctccttccaccgccgcgcgacaacgacaatggcggccgacagcccgcccgccggcggcggaatcgacgacgtcttccccgcgtggtggaagaacaaccttcgagctcgtcccgctttcttccccgccgacggaggggaaggcagggcgaccaaggccaagcaggaggcagcgcctcgttggctgtcgagcgagccgacagcaccggcaccccaacgaggggcgcaccgggtatcgacttcgtgcctgagacaaagacgagcgccatctccccgcgacacgccaatcccaagcaagcggacgatgccatctcgctcgcggagagcttgctggacgtcaccctcgtacctgagatgacggtgcagtcagtccccgacgtgacttcatcgccgctcgtcgaccaaaaggtaccgaccgattcccctcctacgtcatttggattcagcctcaacccgcctagcgacctcgctttggcggacgctctcgtagaggcaagtccaaaccctctggggtttcgcatgcggtcgccttgggaccggctgacggacgtctcgacctacgggccctctgggtccgaggaagacgacgaccccagcatctgttgggatttctctggacttggcaaccccagtgccatgcgggacttcatgaccgcatgtgactactgcctctccaactgttccgacggtagccgcagcctcgacgacgaggactgcggcccaagccgcgaatgtttccacgtcgagctagggggtccctccgaaggcaatcatctcggcatgccggaggacggtgatctccctaggccggtgcctcgcgttgacaccccacgggagctagctgtggtccccgttcaggcgggggctcatgacccacagctcgagcaaatccgcggggtgcaggccaggctcgacgagggagcaagagcgcttgagtcgatccgccgggacgtcgggcaggcatgggcgggccaacccccggccggagaaatacgtcacctgacccagggcttccagcaccgcgtcgcagacgacgtccggttcaagccgccacccgcatctagtggggtcggccagaacctggctgcagcagcgatgcttctccgcgcgatgccggagccatcaaccaccgagggccggcgaatccagggggagctcaagaatctcctggaaggcgccgcggttcgacgggccgagagctctacctcccgaaggcaggggtacccctcggaacctcatgccgcgacttcccgattcatgtgggaagcctcggtctacaccgggcgcacgcgcaacaccgcgcctgcggccgagggccgcctcggcaacgagcaccatcacctcgatcgtcaggcccacctcgacgagagggtgcgccgaggctaccaccccaggcgtgggggacgctacgacagcggggaggatcggagtccttcgcccgaaccgcccgatccgcaggccttcagccgggccatccgacgggcaccgttcccgacccggttccgacccccgactactatcacaaagtactcgggggagacgagaccggaactgtggctcgcggactaccgcctggcctgccaactgggtggaacggacgatgacaacctcatcatccgcaacctccccctgttcctctctgacaccgctcgcgcctgctgccggcagcagccgggagagtctctctgggactacatccggcgattctcgaagcagcgcaccgagctgcctaacatcaccgactcggatgtcatcagcgcgttcctcgccagcactacctgtcgcgacctagtgagcaagttgggtcgcaagacccccaccagagcgagcgagctgatggacatcgccaccaagttcgcctccggcctggaggcggtcgaggctatcttccgaaaggacaagcagccccagggccgcccgtcggaagatgctcccgaggcgtcaactcagcgtggcgccaagaagaaaggcaagaagaagtcgcaagcaaaacgcgacgccgccgacgcggaccttgtcgccaccgccgagtacaataaccctcggaaaccccccggaggtgccaacctcttcgacaagatgctcaaggagccgtgcccctatcatcaggggcccgtcaagcacacccttgagaagtgtgtcatgcttcggcgccacttccacagggctgggccacccgcggagggtggcagagcccgcgacgacgacaagaaggaagatcaccaggcaggagagttccccaaggtccgcgactgcttcatgatctacggtgggcaagcggcgaatgcctcggctcggcaccgcaagcaagagcgccgggtggtctgctcggtgaaggtggcggcgccagtctacctagactggtccgacaagcccatcaccttcgaccaagccgaccaccccgaccacgtgccaagcccggggaaatacccgctcgtcgtcgaccccgtcatcggcgacgtcaggctcaccaaggtccttatggacggaggcagcagcctcaacatcatctacgccgagaccctcaagctcctgcgtgttgacctgtcctccgtccgagcaggcgctgcgcccttccacgggatcattcccgggaagcgcgttcggcccctcggacgactcgaccttcctgtctgcttcggaacgccctccaacttccgaagggagaccctgacgtccgaggtggtcgggttccgaggaacctaccacgcggtactgggaaggccatgctacgcgaagttcatggtcgtccccaactacacctacctgaagctcaagatgccgggccccaacggggtcatcaccgtcggccccacgtacaaacacgcgttcgaatgcgacgtggagtgcgtggagtacgccgaggccctcgctgagtctgaggccctcatcgctgacctggaaagcctctctaaggaggtgccagacgtgaaacgtcatgccggcaacttcgagccagtggagacggttaaggccgtccccctcgaccccagcggcgatgccttcaagcaaatccggatcggctccgggctcgatcccaaatag

SEQ ID NO: 115104 - DNA, 310 bp, Zea mays
  unsure (1)..(310): unsure at all n locations
  Clone ID: MRT4577_36457C.1
cgacggcgccgccggcgcggcggttgtgctgcgcgccggaacacccgtgcgcaggctcgtttgggtgaatgtgggtgnaggtggtgttccagaacacggaggaggagctgcagtcgtggcacctcgacggatacgacttctgggttgtagggtgggtggggttggggttactttcttcttggcttctcctctccttgtcaaacaccattgcccatggacttctttctccaagtacggagtatgccattggaatgagacacatatgtntacgtacaatttggtggacactcaggcaatacacaccgtttag

SEQ ID NO: 115105 - DNA, 2091 bp, Zea mays
  Clone ID: MRT4577_36458C.1
atggcggaagagcaacatccgggtttgcctcgtcaccctcctcgccatagaaagaggagacagggcaaccatggccatgcaggaggcggcgcctcgtcggctgtcgagcgagtcgacgacgccggcaccccagtgggggacgtgtcgggcgttgtcctcgcacctgagacaacaacggatgtcgtttccccgcaacgtaccaaccctaggcggactgatgatgccagcactctcgcgaaggacttgctgggcgttagcctcgtacttgagatgacggtgcagtccgtccccgacgcgacttcctcaccgtccatcgaccaagaggtactgtccgttttccaccctgtgcctttgagattcagcttcaatccaccaagcgaccccgcttcggtgagcgctttcgtaaaggcataccctaaccttccggggtaccatatgtggtcatcttgggaccgattgatggccgtctcaacctacgggcccccgggttccgaggaagaagacgagcccgactctggttgggatttcttcgggctctgtgatcctagtgccatgcgagacctcatgaccgcatgtgactactgcctctccggttgctctgatgatggccacagccttgacgacgagggttgtggcccatgtcgcgaatgtttccacgtcgatctagggggtcacgacgaagacaaccacctcggtccgcaagccttcagctgggccatacgacgggcgccgttcccggctcggttccgggccccgactaccatcaccaagtactcgggggagacaaggccggagttgtggcttgcggactatcggctggcatgccagctgggagggacggacgatgacaacctcatcatccgcaacctccccctgttcctctccgacgctgccctggcctggctggagcatctgcctcccgcgcagatctccaactgggacgacctggtcagggccttcgctggaaacttccagggcacgtaccgcaccgagctgtccaacatcaccgactcagatgtcatcggggcgttcctcgccggcaccacctgccgagacctggtgagcaaactggggagcaagactcccaccaaggcgagcgagttgatggacatcgccaccaagtttgcctctagccaggagacggccgggcccccggcgggagatggcaaaggccgagacgacaacaagaaagagggcgataaggaagaggagttccccgaggtccacgactgcttcatgatctacggtgtgcgagtggcgaacgcctcggctcggcaccgcaagcaggagcgccgggaggtctgctcggtgaaggtggcacgccgggaggtctgctcggtgaaggtggcggcgccagtctacctagactggtccgataagcccatcaccttcgaccagggcgaccaccccaactgcatgtcgagcccaggaaggtacccgctcgttgtcgatcctgtcatcggcaacgccaggctcaccaaggtcctcatggatggaggcagcagcctcaacatcatctacgccgagaccctcgggctcttggagatcgacctatccacgatccgggccggtgtggcgccctttcatgggatcgtccccggaaagcgcgtcctgccccttgggcaacttgatttgcccgtctgcttcggaactccctctaacttccgcagggaaaccctcatgttcgaggtggtcgggttccgagggacctaccacgcggtgctggggagaccgtgctacgacaagttcatggtcgtccccaactacacgtacctcaagctcaagatgccaggccccaacggggtcatcaccgtcggatccacgtaccgacacacgtacgaatgcgacgtggagtgcgtggagtacgctgaggccctcgccgagtccgaggccctcatcgctgacctggagtgcctctccaaggaggtgcctgatgcgaagcgccacgccggcaacttcgaaccggctgaggttgttaagtctgtcgccctcgaccccagcaatgacgcagacaagaagggtctggatcggctccaagctcgaccccaaataggaagcagtgctcgtcgacttcctccgcgcaaacgctga

SEQ ID NO: 115106 - DNA, 3234 bp, Zea mays
  Clone ID: MRT4577_36459C.1
atgccggaaccatcaaccaccgaagggcagcgtatccagggagagctcaagaataacctggaagatgccgcagttcgacgggccgaaagctctgcctcccgaaggcaggggtacccctcggagcatcgcgccgcgacttcccgattcgtgcggaaagcctcggtccacaccgggcgcacgtgcaacacggcgcctgtggccccgggtcgcctcggcaacgagcaccaccaccgcgatcgtcgagcccacctcgacgagagggtgcgccgaggctaccaccccaggcgtgggggacgctacgacagtggggaggatcggagcccctcgcccgaaccacctagtctgcaggctttcagccgggccatacgacgggcgccgttcccgacccggttccgaaccccgactaccatcacaaagtactcgggggagacgaggccggaactgtggctcatggactaccgactggcctgccagctgggtggaacggacgatgacaacctcatcatccgcaacctccccctgttcctcttcgacatcgctcgagcctggctggagcatctgcctccgaggcagatctccaactgggacgacctagtccaagccttcgccggcaacttccagggcacgtacgtgcgccctgggaactcctgggatctccgaagctgccgccagcagccgggagagtctctccgggactacatacgacgattctcgaagcaacgcaccgagctgcccaacatcaccgattccgatgtcatcggcgcgttcctcgccggcaccacctgccgcgacctggtgagcaagctgggtcgcaagacccccaccagggcgagcgagctgatggacatcgccaccaagtttgcctctggccaggaggcggttgaggcaatcttccagaaggacaagcagccccagggccgccagccggaagacgtccccgaggcatccgctcagcgcggcaccaagaagaagaacaagaagaagtcgcaagcgaaacgcgacgccaccgacacggaccttgtcgccgccactgagtacagaaccctcggaaacctcctggggtgccaacttgttcgacaagatgctcaaggagtcgtgcccctatcatcaggggcccgtcaagcacaccctggaggagtggcggcgccagtctacctagactggtccgacaagcccatcaccttcgaccagggcgaccaccccgaccacgtgccgagcccggggaaatatccgctcgttgtcgaccccatcatcggcaatgtcaggctcaccaaggtcctcatggacggaggcagcagcctcaacatcatctacgccgagaccctcgggctcctgcagatcgatctgtcctcgatccgggcaggcgcgatgccttttcacgggatcatccccgggaaacgcgtccaacccctcggacacctcgatctgcccgtctgcttcgggactccctccaacttccgaagggaaaccctcacgttcgaggtggtcgggttccgaggaacctaccacgcagtgctggggagaccatgttacgccaagttcatggccgtccccaactacacctacctcaagctcaaaatgccgggccccaacagggtcatcaccatcggccccacgtaccgacacgcgtacgaatgtgacgtggagtgcgtggagtacgtcgaggccctcgccgaatccgaggccctcatcgccgacatggaaagtctccccaaggaggttccagatgcgaagcgccacgccggcaacttcgaaccagcagaggcggttaaatccgtccctctcgaccccagcaacgacacctccaagcaggttccctaccctctgcctcatatcgatcaaatcatggattccactgctgggtgcgaaaccctgtcgttcctcgatgcctactcagggtatcaccaaatcaggatgaaagagtccgaccagctcgcgacttctttcatcacaccttttggcatgtactgctacgttactatgccatttggtctgaggaatgcgggtgcgacgtaccaaaggtgcatgaaccacgtgttcggagagcacattggtcggaccgtcgaggcttatgtcgatgacatcgtagtcaagacgaggaaagcctccgaccacctctccgaccttgaaacgacattcaagtgtctcaaggcgaaaggcgtaaaactcaaccccgagaagtgcgtcttcggagtcccccgaggcatgctcttggggttcatcgtctccgagcggagcatcgaggccaacccggaaaaaatcgcagccatcaccaacatggggcccatcaaggacttgaaaggcgtacagagggtcatgggatgccttgcggctctgagccgcttcatctcgcgcctcggcgaaagaggtctacctctataccgcctcttaagaaagaccgagtgcttcacttggacccccgaggccgaggaagccctcgggaacctgaaggcgctccttacgaacgcacccatcctggtgcctcccgctgccggagaagccctcttgatctacgtcgccgctaccactcagttgaccatgtttttcgacgggtcgctgatgaagacaggggcgggcgcgggcctgctcttcatctcacccctcgggaagcacctctgctacgtgttgtgcctccatttcccggtgtccaacaatgtggcggagtatgaggctctggttaacgggttgcgcatcgccatcgagctaggggtccgacgcctcgacgctcgcggcgactcgcagcttgtcatcgaccaagtcatgaagaactcccattgccgcgacccaaagatggaagcctactgcgacgaggttcggcgcctggaggacaagttctacgggctcgaagtcaaccacatcgcccggcgaattgtccgcacctgccaagggtgtcaattctacgcaaggcagacgcacctactgatcgccatcgacaaattctccaagtggatcgaggcccgacccctaaacagcatcaggtccgaacaggcagtggcattcttcaccaacatcatccatcgcttcggggtcccgaactccatcatgaccgacaacggcacccagttcactgacagaaagttcctggacttctgcgaggatcaccacatccgggtggactgggccgctgtggcacaccccatgacaaatgggcaggtagaacgtgccaacgacatgattctgcaaggactcaagccgaggatctacaacgacctccacaagtttggcaggcgatga

SEQ ID NO: 115107 - DNA, 312 bp, Zea mays
  Clone ID: MRT4577_3645C.1
acgtaagctcggaattcggctcgtgcccatctagagctgagtgctcgtaccggcagccacaccaccgtaccgcggcgctacgtcaacaaggggcaccgtactaggcagcccccgcgcgcggggctagttgttctcggcgagctcccatcgagccgtgccggcgcccaccgtcgtggcgctggctgcggccaaagagggcatcatgggccgcaacgccagcatcaggggcaggcagcgcacgcagggcagctacaacgcgaaggtgatcacgcctgagggagaggtggagtttcccagacggaacagaacagg

SEQ ID NO: 115108 - DNA, 371 bp, Zea mays
  Clone ID: MRT4577_36460C.1
cagtgaaaaagcacccatattctctagtaatgtcagaattctatcacaccactccaaaggacaagagaccatctgtgtttggcatgactgcttcacctgttaacctgaagggagtgactagccaagaagattgtgctatcaagatacggaatcttgagagtaaactggattgcatagtctgtacgatcaaagatcggaaagagctggagaaacatgttcccatgcctttggaagtcattgtccactacgacaaagcagccactcttttatctttccatgaacaaatcaaacaaatggaggctgcagatgaagaagctgcattttctagttctaagagaactaaatggcagtttcatgggagctagagatgc

SEQ ID NO: 115109 - DNA, 2028 bp, Zea mays
  Clone ID: MRT4577_36461C.1
atgccgttcggcttgaggaatgcgggcgcgacgtaccagcggtgcatgaaccatgtgttcggcgaacacattggccggacggtcgaggcctacgtcgatgacatcatagtcaagacgaggaaagcctccgacctcctttccgaccttgaagtgacattccgatgtctcaaggcgaaaggcgtgaagctcaatcccgaaaagtgtgtcttcggggtaccccgaggcatgctcttggggttcatcgtctccgagcggggcatcgaagccaacctggagaagatcgcagccatcaccagcatggggcccatcaaggacttgaagggcgtacagagggtcatgggatgtctcgcggctctgagccgcttcatctcacgcctcggcgaaagaggtatgcctctgtaccgcctcttaaggaaggctgagtgcttcacttggacccctgaggccgaggaagccctcgagaacctgaaggcgctcctcacgaatgcacctatcttggtgcccccagctgccggagaagccctcctgatctacgtcgccgcaaccactcaggtggttagcgccgcgattgtggtcgagaggcaagaagaggggcatgcattgcccattcagaggccagtctacttcgtcagcgaggtactgtccgaaaccaagatccgctacccacaagttcagaagctgctgtacgcggtgatcctgacgcggcggaagctgcgacactacttcgagtctcatccggtaactgtggtgtcatccttccccctgggggagatcatccagtgccgagaggcctcgggagccggcgcaggcctactcttcatctcacccctcaggaagcacctacgctacgtgctacgcctccatttcccggcgtccaacaatgtggctgagtacgaggctctggtcaacgggttgcggatcgccatcgagctaggggtccgacgcctcgacgctcgtggtgactcgcagctcgtcatcgaccaagtcatgaagaactcccactgccgcgacccgaagatggaggcctactgcgatgaggttcggcgccgggaggacaagttctacgggctcgagctcaaccacatcgcccggcgctacaacgagactgcggatgagctggctaaaatagcctcagggcgaacaacggttcccccggacgtcttctcccgagacctgcatcaaccctccatcaagatcgatgacacgcccgagcccgaggcaccctcggcccagcccgaggtactctcggctcagtccgaggcatcctcggcatggcccgaggcaccctcagctcggcccgaggcacccgcggcccccgagggtgaggcactgcgcgtcgaggaggagcgaagcggggtcacacctaatcaaaactggcagaccccgtacctgcaatatctccaccgaggagagctacccctcgaccgagccgaggctcggcggttggtgcgacgcgccaagtcgttcgtcttgctgggagatgggaaggagctctaccatcgcagcccctcaggcatcctccagcgatgcatctccatcgtcgaaggtcaggaactactacgagagatacactcgggggcttgcggccatcacgcagcacctcgagcccttgttggaaacgccttccgacaaggtttctactggccgacggcggtggccgacgccactagaattgtccgcacctgcgaagggtgtcaattctacgcaaggcagacccacctgcctgcccaggctctacagacgatacccatcacttggccttttgccgtgtggggtctggacctcgtcggccccttgcagaaggcacccgggggctacacgcacctgttggttgccatcgataaattctccaagtggatcgaggtccgacccctaaacagcatcaggtccgagcaggcggtggcgttcttcaccaacatcatccatcgcttcagggtcccgaactccatcatcatcgatagtggcacccagttcactggcagaaagtttctggacttctgcgaggatcaccacatccgggtggactag

SEQ ID NO: 115110 - DNA, 213 bp, Zea mays
  Clone ID: MRT4577_36462C.1
tcttcgcgtgcgggagggcttggggccattctggacgtacatttactgcagctagcgcccgatgtacagcatcttcgtgatcacgatggtggatgtggttctggttctcagtgacgtcatcatgggaagctcgagccccatctgcccctgaaaaaacatgcatattccctaccagatagtctggccctagccatacacgcacaaagccgagtg

SEQ ID NO: 115111 - DNA, 2556 bp, Zea mays
  Clone ID: MRT4577_36463C.1
ccaccaaatgtggccgttggggagccagtctgctcgatggcgcaccggacagtccggtgcacaccggacatgtccggtgcccctgccacgtcatcagtgccgttggaatctgaccgttggagttctgacttgtgggccacccttgatgtccggtggcgcaccggacagctcctgttcattgtccggtgcgccagtatgggcaaacctgacatctgcgcgcgctgcggcgcatttaatgcctttgcaggtagccgttggcgcgggatagccgttgcgctggagtcacaccggacagtccggtgcacaccggacatgtccggtgaattatagctgacgagccgttggcttttcccgaagcggcacagtatctcacgcctcggcgaaagaggcctgcctctgtaccgcctcttaaggaaggccgagtgcttcacttggacccctgaggccgaggaagccctcgggaacctgaaggcgctcctcacaaatgcgcccatcttggtgccccccgctgccggagaagccctcttgatctacgtcgccgcgaccactcaggtggttagcgccgcgattgtggttgagagacgagaagaggggcatacattgcccgtccagaggccagtctacttcatcagcgaggtactgtccgagaccaaaatccgctacccacaagttcagaagctgctatacgcggtgatcctgacgcggcggaagttgcgacactacttcgagtctcatccggtaactgtggtgtcctccttccccctgggggagatcatccagtgccgagaggcctcgggtagaatcgtaaagtgggcggtggaaatcatgggcgaaacaatctcgttcgcccctcggaaggccatcaagtcccaagtcttggcggacttcgtggctgaatgggtcgacacccagctcccaacagctccgatccaaccgaaactctggaccatgttcttcgatgggtcgctgatgaagacaggagccggcgcaggcctactcttcatctcgcccctcggaaagcatctacgctatgtgttactcctccatttcccggtgtccaacaatgtggctgagtacgaggctctggtcaacgggttgcagatcgccatcgagctaggggtccgatgcctcgacgctcgcggtgactcgcagctcgtcatcgaccaagtcatgaagaactcccactgctgcaacccgaagatggaggcctactgcgatgagatcgacgacacgcccgagcccgaggcaccctcggctcagtccgaggcaccctcggctcagtccgaggcaccctcggctcggtccgaggcaccctcagcttggcccgaggcaccctcggttcagcccgaggtaccctcggctcccgagggtgaggcactgcgcgtcgaggaggagcgaagcggggtcacgcctaatcgaaactggcagaccccgtacctgcaatatctccaccgaggagagctacccctcgaccgagccgaagctcggcggttggcgcggtgcgccaagtcattcgtcttgctgggagatgggaaggagctctaccaccgcagcccctcaggcatcctccagcgatgcatctccatcgccgaaggccaggagctcctacaagagatacactcgggggcttgcggccatcacacagcgcctcgagcccttgtagaaaacgccttccgacaaggtttctactggccgacggcggtggccgacgccactagaattgtccgcacctgcgaagggtgtcagttctacgcaaggcagacccacctgcctgctcaggctctgcagacgatacccatcacctggccgtttgctgtgtggggtctggacctcgtcggccccttgcagaaggcacctaggggctacacgcacctgttggtcgccatcgacaaattctccaagtggatcgagttcatcggcagaaagtttctggacttctgcgaggatcaccacatccgggtggactgggccgccgtggctcaccccatgacgaatgggcaagtagagcgtgccaacgacatgattctacaaggactcaagcctcggatctacaacggcctcaacaagttcggcaagcgatggatgaaggaactcccctcggtggtctggagcctgaggacaacgccgagccgagccacgggcttcacgccgttctttctagtctatggggccgaggccatcttgcccacagacttagaatacggttccccgaggacgagggcctatgccgaccaaagcaaccaagctagtcgagaagactcactggaccagctggaagaggctcgggacacggccttactacactcggcacggtaccagcagtccctgcgacgctaccacgcccgaggggtccggtcccgagacctccaggtgggcgacctggtgcttcggctgcgacaggacgcccgagggcggcacaagctcacgcctccctgggaagggccgttcgtcatcgccaaagttctgaagcccggaacgtacaagctggccaacagtcaaggcgaggtctacagcaacgcttggaacatcaaccagctacgtcgcttctacccttaa

SEQ ID NO: 115112 - DNA, 2346 bp, Zea mays
  Clone ID: MRT4577_36464C.1
atgggatgtctcgcggccctgagccgcttcatctcacgcctcggcgaaagaggcctgcctctgtaccgcctcttaaggaaggccgagtgcttcgcttggacccctgaggccgaggaagccctcgggaacctgaaggcgctcctcacgaacgcgcccgtcttggtgcctccagctgacggagaagccctcttggtctatgtcgccgcgaccactcagaggccagtttacttcgtcagcgaggtactgtccgaaaccaagatccgctacccacaagttcagaagttgctatatgcagtgatcctgacgaggcggaagttgcgacactacttcgagtctcatccggtaactatggtgtcatccttccccctgggggagatcatccagtgccgagaggcctcgggcaggattgcaaagtgggcggtggaaatcatgggcgagacaatctcgttcgcccctcggaagtccatcaagtcccaggtcctggcggacttcgtagccgaatgggtcgacacccagctaccgacggctccgatccaaccggagctctggaccatgtttttcgacgggtcgctgatgaagacgggagccagcgcgggcctactcttcatctcgcccctcgggaaacacctacgctatgtgctacgcctccatttcccggtgtccaacaatgtggctgagtacgaggctctggtcaacgggttgcggatcgccatcgagctaggggtccgacgcctcgacgctcgcggtgactcacagctcgtcatcgaccaagtcatgaagaactcccactgccgcgacccgaagatggaggcctactgcgatgaggttcggcgcctggaagacaagttctacgggctcgagcttaaccacatcgctcggcgctacaacgagactgcggacgagctggcaaaaatagcctcggggcgaacaacggttcccccggacgtcttctcctgggatctgcatcaaccctccgtcaagatcgacggctcgcccgagcctgaggcaccctcggtccagcccgaggtaccctcagcacagcccgaggcatcctcagctcggcccgaggcgccctcggttcaacccgaggtaccctcggcctccgagggcgaggcattgcgcatcgaggaggagcggagcggggccatgcctgatcgaaattggcagaccccgtacctgcaatatcttcaccaaggagagctaccccttgaccgagccaaggctcggcgggtagcgcgacgtgccaagtcgttcgtcttgctgggcgatgagaaggagctctaccatcgcaacccctcgggcatcctccagcgatgcatctccatcgccgaaggtcagggactcctgcaagagatacactcgggggcttgcggccatcacgcagcgcctcgagccctcgtcgggaatgctttccggcaaggcttctactggccaacggcggtggctgacgccactagaattgtccgcacctgcgaagggtgtcaattctatgcgaagcagacccacctgcccgctcaggctctgcagacgatacccatcacctggccctttgctgtgtggggtctggacctcgtcggccccttgcagaaggcgcccgggggctacacgcacctgctggtcgccatcgacaaattctccaagtgggtcgaggtccgacctctgaacagcatcaggtccgagcaggcggtgacgttcttcaccaacatcatccatcgtttcggggtcccgaactccatcatcaccgacaacggtacccagttcaccggcagaaaattcttggacttctgcgaggatcaccacatccgggtggactgggccgccgtggctcatcccatgtcgaatgggcaagtagagcgtgccaacggcatgattctacaagggctcaagcctcggatttacaacgacctcaacaagttcggcaagcgatggatgaaggaactcccctcggtggtctggagcctgaggacaacgccgagccgagccacgggtttcacgccgttcttcctggtctacggggtcgaggcagtcttgcccactgacctggaatacggctccccgaggacgagggcctacagcgatcaaagcaaccaagctagccgagaagactcgctggaccagctggaagaggctcgggacaaggccttactacactcggcgcggtaccagcagtccctgcgacgctaccacgcccgaggggtccggccccgagacctccaggtgggcgacctggtgcttcggctgcggcaagacgcccgagggaggcacaagctcacgcccccctgggaggggccattcgtcatcgacaaagttctgaagcccagaacgtacaagctggccaacagttaa

SEQ ID NO: 115113 - DNA, 2109 bp, Zea mays
  Clone ID: MRT4577_36465C.1
atgctcttggggttcatcgtctccaagcggggcatcgaggccaacccggagaaaattgcggccatcaccaacgtgggccccatcaaagacttgaaaggcgtacagagggtcatgggatgccttgtggctctgttccgcttcatctcacgcctcggtgaaagaggcctacctctgtaccgcctcttgagaaaggccgagtgcttcacttggacccccgaggtcgaggaagccctcgggaacctgaaggcgctcctcacgaacgcgcccatcttggtgccccccactgccggagaagccctcttgatctacgtcgctgctaccactcaagtggtcagcgccgcgatcgtggttgagagacgagaagaagggcatgcattgcccgtccagaggccagtctacttcatcagtgagcttccagcagctccgatgcaaccggaactctggaccatgtttttcgacgggtcgctgatgaaaacaggagcgagcgcgggcctgctcttcatctcgcccctcgggaagcacctccgctacgtgctgcgcctccatttcccggcgtccaacaacgtggctgaatacgaggctctggtcaacgggttgcgcatcgcaatcgagctaggggtccgacgcctcgacgctcgcggtgactcgcaccttgtcatcgaccaagtcatgaagaattcccactaccgcgacccaaagatggaagcctactgcgacgaggttcggcgcctggaagacaagttctacgggctcgagctcaaccacgtcgcccgacgatacaacgagactgcggacgagctggctaagatagcctcggggcgaacaacggttcccccgtacgtcttctcccgagacctacatcaaccctcagtcaagaccgacgacacgcccgagcccgagaaggcctcggcccagcccgaggcaccctcggctcagcccgaggcgccatcggctcagcccgaggcaccctcggcccccgagggtgagacactgcgcatcgaggaagagcggagcggggtcacgcctaatcgaaactggcagaccccgtacctgcaatatctccaccgaggagagtgcccctcgaccgagccgaagctcggcgactggcgcggcgcgccaggtcgttcgtcttgctgggggacgagaaggagctctaccaccgcagcccctcaggcatcctcctgcgatgcatatccatcgccgaaggccaggagctcttacaagaaatacactcgggggcttgcggtcatcacgccgcgcctcgagcccttgttggaaacgccttccgacaagaaggcacccgggggcttcacgcacctgctggtcgccatcgacaaattctccaagtggatcgaggtccgacccataaacagcatcaggtccgaacaggcggtggcattcttcaccaacatcatccatcgcttcggggtcccgaactccatcatcaccgacaatgacacccagttcaccggcagaaagttcctggacttctgcgaggatcaccacatctgggtggactgggccgccgtggctcaccccatgacgaatgggcaagtagagcgtgccaacggcatgattctgcaaggactcaagccgaggatctacaacaacctcaacaagttcggcaagcgatggatgaaggagctcccctcggtggtctggagtctgaggacaacgccgagccgagccacgggcttcacaccgttctttctagcctatggggccgaggctatcttgcccacagacttagaatacggttccccgagggcgagggcctacgatgaccaaagcaatcgaacaaaccgagaagactcactggaccacctggaagaggctcgggacatggccttactacactcggcgcggtatcagcagtccctgcgacgctaccacgcccgaggggttcggtcccgagacctccaggtgggcgacttggtgctttggctgcgacaagacgcccgagggcggcacaagctcacgcctccctgggaagggccgttcgtcatcgccaaggttctgaagcccgggacatacaagctggccaacagtcaaggcgaggtctacagcaacgcttggaacatccgacagctacgtcgcttctacccttaa

SEQ ID NO: 115114 - DNA, 250 bp, Zea mays
  unsure (1)..(250): unsure at all n locations
  Clone ID: MRT4577_36466C.1
cgnncggngaggcgccaggagngaggccgagggcagggaggagaaggacggacagnnggggggacgcagcgcaggagaggaacaagggacncaggagcnagggngangngagcngaaaaaaggcangngacgcaacgcaagagcagcggagcnncnaccccagcnncnnaaaccccccacaccagagaacaaaggagggcaaacgaacnaggaggcngnannganccancagcagcncncccgnnccgcg

SEQ ID NO: 115115 - DNA, 1935 bp, Zea mays
  Clone ID: MRT4577_36467C.1
cactcatgcatgctcttgaccatcagccggccaataacattcaaacaagcaagagtgcaagacaaatactacaagttttcatccagggacatctccatcggccgacttgctttgaactgcacttacaaacacaagcacgatcacttacactgcttatactccacaaacacgcagtatctctgggctattcctgacagatgagataaatagctatctatcgtacatgctaaggctgttaatgtgaggtctgccagaattgtattgcttcctacaaaattcttgaatgtcaaatagaccctacacggtgaagaaacctaacaaaactttcactgccatgtcaccgctaacagcaaatcagacagcttcatcatgccaacaacactcaacatgaacagcaatttaagattaatttaaatccctatgagcttttgacctagcccctgacataaaaccagacatccaagacactacaagtataaagatgctgcaaacactatgtccctcttgatcttgttgaccgcctcctcgagttttgcttctaactcggtttccccaatggacttggatgccagaatcagctgctgcagaacctcctccagcctcctgatggccctgatcaggcttccttcgaacacttgggtcatctccatgatttggtagaacttcgaccctctggcccatgaatacaccgcttccattatgtcgggtcggaaagaattcacaaaactttccacatcgatctggatcttgcattcaagctgaaggttagcaacccttcttgctgtctcctgcagctggtagaagagcaaatcgagctcctctcttggcttcggagcatcctggagcttctcctgccaaacaaagcaagagagcagtgccaccacctgctctactgtagcatccttcagagcaccactaaacataagctctgtcaatgtaagctcatcagctgaacttatctcacacgccactttgcccttaacttccacaacatcatcactcgtaacgtaccccagcctgcgaagaacacgtttccgggccttgagttcatccttgaaagctaaaacggtggaagaccgcattgttttctttatggactttattttggctgatagttcttgcttagcatgaaagactttcagcttttgctggatatgtggagagttacggatatcgtgcttctcaaacaagctctcaagagcttctattcgtctggtagctttccgaaatgatttcgattgtactttcatatcttcttctggatccaatagaggcacaccatctttagcaaaccttaaaaggacttcttcaactttcctcaaggtgttttctcgaacttctacaggtataagatccttaggtatgtacatccgtatgctgcttagtccatcaatctgtgaaagtgacaatgaaactacaactggttctccacgcgctttcagaggaacaaccttcattgttttcttaccactgttgtccttagttacagaacatctggtaaggacatcaaccgtgtaatcagaatcctcaggcctcttatcttcaccatgtgacttcactttttcgaagttaattataattccccatgtgacattttcatcaatggaaaagttagctggctcatctgtactatattcaatgcggacaagccttccaggttgcaagaaaggcagcacatgtttgggagagagaacaatatcatggacatccttctttaaactcctgtgctgctgtaagagatcgtaataatccttcaagctctccgcttcctcaattaccatggaatttctctctgattccagttccttgatttgcttctcaagatcaggaagagaacggtcagcctgaaattgataaaatgaatgccggaggagcttttctggatccccatcctcagatcgcatttgatttaacagcatattgctcgagccgaat

SEQ ID NO: 115116 - DNA, 725 bp, Zea mays
  unsure (1)..(725): unsure at all n locations
  Clone ID: MRT4577_36468C.1
ctcgaggccggccggngaacaccaaccatctccaccgtgctcaggcgtcgtctacaacgccgcccgcactacccccagcgcatagcacactactcgcagaaacaccgatggcccctgccattgcccagcagcagccgcaggtgcagccgatcggtgtcggtggtcgaaaggtggtggacgaggtttccggctggctgcgcgtgctggacgacggcagcgtggaccgcacgtggaccggcccgctcgaggccctcccgctgatggagccggtggcgccgtacgcgcagccacgagacgggcacacgctgcacgacctgcccggcgagccgaacctgcgcgtgtacctccccgaggcgaacgtggaggccggggacggcgcgcgcctgcccgtcgtcctgcacctccacggcggcggcttctgcatctcgcacccgtcctggctcatgtaccaccacttctacgcgcgcctcgcgtgcgccgtccccgccgtggtggtcgccgtcgagctgccgctcgcgcccgagcgccgcctgcccgcgcacatcgacgccggcgtcgccgcgctccgcaggctccgctccgtcgcgctggccgcgtccgagtccgagtccgaggacggcgccctcgacgaccgcccggccgccgcgctcctccgtcaggcagccgacgtgtcccgcgtgttcctcctccgggacagctcgggcggcaacctcgtccttctcgtc

SEQ ID NO: 115117 - DNA, 646 bp, Zea mays
  unsure (1)..(646): unsure at all n locations
  Clone ID: MRT4577_36469C.1
cgatgggtactcgagccggcaccaccaccatctcaccgtgctcaggcgtcgtctacaacgccgcccgcactacccccagtgcatagcacactactcgcagaaacaccgatggtccctgccattgcccagcagcagccgcaggtgcagccgatcggtgtcggtggtcgaaaggtggtgtacgaggtttcctgatgacaacgacgccgtccggtgcactccgcagcaacaccgatggcaacgtgagcagccacagccgcaggtgttagcggcggttggccgaaaggtggtggacgaggtttccggctggctgcgcgtgctggaggacggcagcgtggaccgcacgtggaccggcccgcgcgaggccctcccgctgatggagccggtggcgccttcctctttgccgtgagacgggcacacgctccacgacctgcccggcgagccgaacctacgcgtgtacctccccgaggcgaacgtggaggccggcggcgcgcgcctgcccgtcatcctgcagctccacggcgggggcttctgcatctcccacccgtcctggctcatgtaccaccacttctacgcgcgcctcgcgtgcgccgtccccgccgtggtggtcgccgtcgagctgccgttcgcgcccgagcggngcctgccc

SEQ ID NO: 115118 - DNA, 654 bp, Zea mays
  unsure (1)..(654): unsure at all n locations
  Clone ID: MRT4577_3646C.1
gcccgccttatccccatggcatgttcccaagctgaacctttgccgcctgcggcttgcccgggaggcggcggctcattgtaggatgccacaccgatgcggactccggaaaccatcggttcggccctggcccgcttcggcacgtcgcggtcgctgttcgccggagcgcacctccactcccacctcctcaagtccggccttctcgccggcttcagcaaccacctcctcacactctactccagatgccgtctaccgagcgcagcacgcgcggtgttcgacgaaatccccgacccgtgccacgtctcctggtcctcgctcgtcaccgcctactcgaacaacggcatgccccgggacgcactcttggcgtttcgggccatgcgcgggcgcggcgtcccgtgcaacgagttcgctctccccgtcgtgctcaagtgcgcgccggacgtccggttcggcgcgcaggtgcacgcgctggccgtggccacgaggctcgtccacgatgtcttcgtcgccaacgcgcttgtggccatgtacggcgggttcggcatggtggacgaggccaggaggatgttcgacgagtatgtangcgttggaggggagaggaacgccgtttcggggacaccatgatatcggggtacgtcaagaacgaccagagcgggg

SEQ ID NO: 115119 - DNA, 911 bp, Zea mays
  Clone ID: MRT4577_36470C.1
atgtatttcgacgggtcgctgataaaattaggagcgggtgcgggcctgctcttcatctcacccctagggaagcacctctgctacgagttgcgcctccatttcccggcgtcaaacaacgtggccgagtacgaggctctggttaaagggttgcacatcgccatcgagctaggggttcggcgcctcgacgctcgtggcgactcgcagcttgtcatcgaccaagtcataaagaacccccactgccgcgacccgaagatggaggcctactgcgatgaggttcggcgcctggaagacaagttctatgggctcgagctcaaccacatcgctcgacgatacaacgagactgcggacgagctggctaagatagcctcgggacagacaacggttcccccagatgtcttctcccgagacctacatcaaccctccgtcaagaccgacgacacgcccgagcccggggaggcctcggcccagcccgagacaccctcggccgccgaagtgcctcgagccctcgttggaaacgccttccgacaaggtttctactggccaaccgcggtggccgacgccactaggattaaggcacccgggggcttcacgcacctgctggtcgccatcgacaaattctccaagtggattgaggtccgacctctaaacagcatcaggtccgagcaggcggtggcgttcttcaccaacattatccatcgctttggggtcccgaactccatcaccaccgacaacgacacccagttcactggcaagaagttcctagacttctgcgaggaccaccacatccgggtggactgggccgccgtagctcaccccatgacgaatgggcaggtagagctgccaacgacatgattctgcagggacttaagccgaggatctacaacgacctcaacaagttcgacaggcgatag

SEQ ID NO: 115120 - DNA, 2025 bp, Zea mays
  Clone ID: MRT4577_36471C.1
atgggatgtcttgcggctctgagccgcttcatctcacgcctcggcgaaagaggcctgcctctgtaccgcctcttaaggaaggccgagtgcttcacttggacccctgaggctgaggaagccctctggaacctgaaggcgctcctcaccaacgcgcccatcttggtgcctcccgctgccggagaagccctcttgatctacgtcgccgcgaccactcaggtggttagcgccacgattgtggttgagagacgagaagaggggcatgcattgcccgtccagaggccagtccacttcatcagcgaggtactgtccgagaccaagatccgctacccacaaattcagaagctgctgtacgcggtgatcctgacgcggcggaagttgcgacactacttcgagtctcatccggtaactgtggtatcatccttccccctgggggagatcatccagtgccgagaggcctcgggtagaatcgcaaagtgggcggtggaaattatgggcgaaacgatctcgttcgcccctcggaaggccatcaagtcccaggtcttggcggacttcgtggctgagtgggtcgacacccaactcccaacagttccgatccaaccggaactctggaccatgttcttcgacgggtcgctgatgaagacaggagcaggcacaggcctgctcttcatctcgcccctcggaaagcatctacgctacgtgctacgcctccacttcccggcatccaacaatgtggctgagtacgaggctctggtcaacgggttgcgcatcgccatcgagttaggggtccgacccctcgacgctcgcggtgactcgcaactcatcatcgaccaagtcatgaagaactcccactgccgcgacccgaagatggaggcctactgcgatgaggttcggcgcctggaagacaagttctacgggctcgagctcaaccacatcgcctggcgctacaacgagactgtggacgagctggctaaaatagcctcggggcgaacaacggttcccccggacgtcttctcccgagacctgcatcaaccctccgtcaagatcgacgacacgcccgagctcgaggcacccttggcccagcccgagcccgaggtaccctcggcccccgagggtgaggcactgcgcgtcgaggaggagcgaagcggggtcacgcctaatcgaaactggcagaccccgtacctgcgatatctccaccgaggagagctacccctcgaccaagccgaagcttggcggttggcgcgacgcgtcaggtcgttcgtcttgctgggggatgggaatgagctctaccaccgcagcccctcaggcatcctccagcgatgcatccccatcaccgaaggtcaggagctcctacgagagatacactcgggggcttgcggccatcacgcagcacctcgagcccttgttggaaacgccttccgacaaggtttctactggccgacggtggtggccgacgccactagaattgtccgcacctgtgaagggtgtcagttctacgcgaggcagacccacctgcccgctcaggctctacagacgatacccatcacctggccttttgctgtgtggggtctggacctcgtcggccccttgcagaaggcacccgggggctacacgcacctgttggtcgccattgacaaattctccaagtgggtcccgaactccatcatcaccgacaacggcacccagttcaccggcagaaagttcctggacttctgcgaggatcaccacatccgggtggactgggccgccgtggctcaccccatgacgaatgggcaagtagagcgtgccaacggcatgattctacaaggactcaagcctcggatctacaacaacctcaacaagttcggcaagcgatggatgaaggaactcccctcgatggtctggagcctgaggacaacgccgagccgagccacgggcttcacgccgttctttctagtctatggggccgaggccatcttgcccacagacttagaatatggctccccgaggacgagggcctacgccgaccaaagcaaccaagctagttga

SEQ ID NO: 115121 - DNA, 721 bp, Zea mays
  unsure (1)..(721): unsure at all n locations
  Clone ID: MRT4577_36472C.1
cggggcttcgctagcggtccgcacccgttgcctccaaagtcatttctcccgagcgccgccgcgagcctctgttccagcttcgttcatggcttccctcaccggatccgctctctcctttgcgaggcccgtcaaggcaatcagcattaagtctgtctctttctctggtctaaggaaggataatgtagccttccgcttgcagccagtgccacaaagattcgcagtctgctgtcctgctaaaaaggagactgtggatcgggtttgtgatattgtcaagaagcagcttgcacttcctgagggcactgaggtctgtggctcctctaagtttcaagacctcggtgctgattcgttggacactggaataacatctaggatcagtgctctggttctctactcaagtctgcaagttatctgttatgcctgttgagattgttatgggccttgaggaggctttcaagatcactgtagaggagtcgagcgcgcagtcaatcgcaactgtggaagatgctgctaatctcatcgacgaacttgttgcaggagcagcaaaatcgtgttaaactcgtggtggtattgcgttgggtgctgtaccagggcatcacttgttgttctatgcccccttgcctactagattttcttttctacccttngcctggagagatgtttctgtcatgactgtcattgtggatctcgcgatattgttatattgaagcttttgtgcttgttg

SEQ ID NO: 115122 - DNA, 965 bp, Zea mays
  Clone ID: MRT4577_36473C.1
gccggccgggttttcgctccgctgcccccgcacccactcacccgttgcctccaaagtcatttcacccgagcgccgccgcgagcctccgttccagcttcgtccatggcttccctcaccggatccgctctctcctttgcgaggcccgtcaaggcaatcagcattaagtctgtctctttctctggtctaaggcactacggcccggcaccttcgcttcgctagcggtccgcacccactcacccgttgcctccaaactcatttctcccgagcgccgccgcgagcctctgttccagcttcgttcatggcttccctcaccggatccgctctctcctttgcgaggcccgtcaaggcaatcagcattaagtctgtctctttctctggtctaaggaaggataatgtagccttccgcttgcagccagtgccacaaagattcgctgtctgctgtcctgctaaaaaggagactgtggatcgggtttgtgatattgtcaagaagcagcttgcacttcctgagggcactgaggtctgtggctcctctaagtttcaagacctcggtgctgattcgttggacactgttgagattgttatgggccttgaggaggctttcaagatcactgtagaggagtcgagcgcgcagtcaatcgcaactgtggaagatgctgctaatctcatcgacgaacttgttgcaggagcagcaaaatcgtgttaaactcgtggtcgtattgcgttgggtgctgtaccagggcatcacttgttgttctatgcccccttccctactagattttcttttctaccctgggcctggagagatgtttctgtcatgactgtcattgtggatctcgcgatattgttatattgaagcttttgtgcttgttcatgcggcttgctgcggatccggcgcgcttctaaaaaaaaaaaatgttgttgcgataaaaaaaaaaaaaaaaaaaaaaaaaaaaaagaatttaaaa

SEQ ID NO: 115123 - DNA, 169 bp, Zea mays
  Clone ID: MRT4577_36474C.1
tacaaattcgccatgaccatggctggaacgtgttgcacttataactctgccccaactgctgcacctgcacgatgctgcactcctcgccgacgatccccaacctagggcggacagggcgaacaattatacctaactcttacacaaataaatttcaaatcaacaaattact

SEQ ID NO: 115124 - DNA, 468 bp, Zea mays
  Clone ID: MRT4577_36475C.1
gcgctctggaacattcactaacagctactaccgtggagctaacggaatcatcattgtatatggcgtgacagaccaagaaagcatcaataactgtgaagcaatggctaagctatatttaccgttatcaaacagacaatgttaacaaactccttgatgggaacaagagcgatctaactggtaaaaaagctggggcaccctagacaggaaaggcgactggtgatgagatgcccatgcgattcatggagactagagccaaatacgccataaatgggcagcagcccttaatagctataggtgaatgcatcaaggacaggctggacagccaaccagatgatgctcacgcaaggccagcacccgcccagataccgtattcaaccccgggaccagaatacgtcttgctgctcatgctaaggctggctgattgtttgctgtactactagctaactcaagcccacaactactacctta

SEQ ID NO: 115125 - DNA, 294 bp, Zea mays
  unsure (1)..(294): unsure at all n locations
  Clone ID: MRT4577_36476C.1
cggcggtgcgcagagcagagctggtggcgagggcagccgagcatgttcgcctgcatcgtaaagatccccatcattggcgacctgacgggcagcaacaagaatgcgcacctcaagggcaacgtggtgctcgtgcgcaagaccgtgctcggcttggacgtcaccagcatcgcagtgtggggggggggtgaagcnnatccgggagaggaggaacggaagatgtggctggttaagtactagctgggtcgtctgctggggcagggcacctttgtaaggtttactaggcgagggacctga

SEQ ID NO: 115126 - DNA, 270 bp, Zea mays
  Clone ID: MRT4577_36477C.1
ttttttttattatttacgaaacatgggagggatttttaatgacatcacacaaaaaaatggcgcataagccatgattacgcagtgacggacacaacaaaagggcaggcaccagcattacagtactcacagaaaatgccgactcacgcacccaacgacgatggaaacccaattttcaataaccgcagaggcggtaaaacatcagctgggcttgcgcaaacatgcaagctcaagaatgtgacaattcacaaacatggccaatagtgggcctgt

SEQ ID NO: 115127 - DNA, 322 bp, Zea mays
  Clone ID: MRT4577_36478C.1
cccacgcgtccgagaatttgacttgtacaaataatatccattgttttcggtggagtctcctattgctcagtggccagtgcttttaatgtgccacaagtaggcagcgttgttaaaacacatatatgcttatatgcaatacatcaagactcattttatttgtgacttcaagagaatctgctgcagcctgttcgaagatgctgcagcctgttcgaagatggcataatatgtacaattaaacaaatgtaactgttaaacaaatgtaatgtgttaaaactaataattgttagacgatggcatagccatctctttctcatgtttgtag

SEQ ID NO: 115128 - DNA, 242 bp, Zea mays
  Clone ID: MRT4577_36479C.1
caaagtgcatgatgggaatgcgactggccgtggatccgtccgccgccggggcataaccgcggggccatagccaaggccgcgctcgctgatgccctggtcggggccacgcgaccaagcgctcgagttgcgccatggctgttgcgcgcccgcgcgttcgccggggtccacgccagggccaccgcgcctggatggacgggccaccgatgggaggtcgcgccgggatctgcgggctcgatcgcgcg

SEQ ID NO: 115129 - DNA, 396 bp, Zea mays
  Clone ID: MRT4577_3647C.1
gacctttgggtctgtttatgtgcttgtcagtagtcgaaaaggagttgtaggcacggtctcatatggagcacgtcacccccacggatctgaggaaccctctttgactgagtatcggtcataccgggaagtcaaggctaaacccttccggaatcaaacccactactcatgatatataggtcttgcataacggtgggagagcccgtatataggaatgcgtttttagttgctggccgctccttaggaaagccctattaagagccttaagtggtagtcattttgctgtctaggcgaatcatgagtcgaacgcgtcgggaatttgagggtttaggtggacgtagcgtgtcacgtaccttacttttgtactagtggcggagtttggtggtgcggcgttcgggt

SEQ ID NO: 115130 - DNA, 248 bp, Zea mays
  Clone ID: MRT4577_36480C.1
cggacgcgtgggacgactcttcggcgcgcgactcttaatagttcatgtctcacggtggtgtgagcgttgatggataacactagttctcatggcatgcaaattttttaacataatctccttgtaaacttgttgtagcaaatattcccaatctgttgttgagttgccagaagcccatatgctttcctagatcatcaaaaaaatatgctattgcatctggaacacgtagctaactacttgtgtaaattgac

SEQ ID NO: 115131 - DNA, 251 bp, Zea mays
  Clone ID: MRT4577_36481C.1
gtgcgcctcgtccacaacctcccaggagttggaaagaacctccaagaccaccccattgccacccaaagctcctcccaacccgccggtgttgctgcttgcgaaggatctggtcgtgacaccagattcgacctctggttccgtacttccttcaaggctgccgatgatcctcgccccgacattgagaccatcggatccaatgcttgcggtggagccttctgcctcgtgtacctcatggaccccaggtctcgtgg

SEQ ID NO: 115132 - DNA, 757 bp, Zea mays
  Clone ID: MRT4577_36482C.1
ggccgcttttttttttttttttttgacaatgaccaacacaagcatttcaattttgaacggctcctcggtcaatcatcgaggcggcccaaagcaggtgaatcttccataacatgacacaaggtgaacaaacgcataacatgatatcaccaggaatgttccacacatagtgcaagtcgacgcagcacacgcgctacacaaatatgttccacagaatgattcaagcaaagaaactacgacacagattagacctgtcgtccgatctggcctgataaaggctgatgctagtgctgcaaaacgtggaactagcgctaagatcataatttacacaaggggaagcatcctattttacatcagtagctagcatcgggcgacctaagggtgaactaatatagtgtttggttccagagccagttgggatagagcggctctatactagaaagcggctccgtctgggagattttggaaaaccagttggttcaacatttggacatattgtttcttttttagagccactctgtcctatgtagaatcaatccagacagcaacaaattaaaagcagagcgactctgtcctaccatactccgaaaccaaacactacctaaatgcatagtacctaaatgcataggctgttggatacatcagtgtagcgcgagtgcggcttagaatatctaagggcatcgtcctaaggtgattgcctcaaacttccgtggcctaaacaatcatagtccctctgggagcctaactaagggttgccttt

SEQ ID NO: 115133 - DNA, 825 bp, Zea mays
  Clone ID: MRT4577_36483C.1
gggtacctcgaggccggccgggaattgtctggtccagtgccaacgaatggtaatacggttagatgtgacagtgttattgggaatcctttgctgcaatcttgtcatgtgtacactctggctgtgccatcagctgctcagcagggtcgaggtttgaattcgaatgacagcaatgatacaacaccttcaaactcacaaaatgaaggagcgaacaattcatttaatgcaattgaaattgcttcaataacttctgcaacagccatcgtttctatcctccttgcactgattgcgctcttcatatacacaaggaagtgcgcgccccggatgtcagctcggtcttctggaaggagagaagttacacttttccaagatattggtgtcccaatcacttatgagactgttgttcgagccactggaagtttcaatgcaagcaattgcatcggaagtggaggctttggagccacttacaaggctgaaattgcacctggagtgttggtagctattaagagactctctgtcgggagatttcagggagcccaacagtttgacgctgagataaaaactctagggagattaagacatccaaatcttgttaccttggtaggttaccatctaggcgagtctgaaatgtttctcatatataactacttgtctggaggaaaccttgagaggtttatacaggagagatcgaagagaccggtagactggaaaatgctgcacaagattgcattggacgttgccaaagcacttgcttatctgcatgatacctgtgttcctcgcatccttcagcgggacgtgaaccgagcaatatttcgttggacactacta

SEQ ID NO: 115134 - DNA, 329 bp, Zea mays
  Clone ID: MRT4577_36484C.1
acgcccacgcgtccgacacgggtctgtttgaccgcgctgtccaacctgctgttgctgacgggtgcacacacagaggggtacggtgaagacccataataccattgcgtatttcacacgttcaaatcgataatcaagacaaggaggactggacggacagactacagagccagtatactgatgatgaacacactacggacattggacctaacacacaaaaacatatttgttagagtgattaaccaatttggacattactgagctaaggatatttgttaggatagagaatgatatggctgttgctatcccctactatcacgagctgcaacaaa

SEQ ID NO: 115135 - DNA, 154 bp, Zea mays
  unsure (1)..(154): unsure at all n locations
  Clone ID: MRT4577_36485C.1
ctctacttttttccccctatctccactccctcgccaaattttaaaacctcctcgcctccacncactcactatccaaacacttactatactctctatacacatcctctctacactttacctccacctactatacaccttttatacaattccttac

SEQ ID NO: 115136 - DNA, 616 bp, Zea mays
  Clone ID: MRT4577_36486C.1
gtacgcctgcggtttcggtccggaattcccgggtcgacccacgcgtccgccccgccctcccggtccgactctcctgatgcgcctttacctgagaaggtgctgtttcgacagggagacggcaagcgggcggcacgtccactctggccctgatgcgagggaagcaaaccgctcccccctgaacccctcggctcgccccgcgctcgcgacggcggcagttggcggacggatacgcggcggtgaataggcggagagaggggcggagcgtggcagctggcagtagttgcgacacagcggacatgttgtgggtgtgccgtgcgcgtgagccccgtacggccggagaggcaccagctgccgcgcggtgaggaggcacgggtgctaactcgagggaagtcccgaccctttgctcctgtgggtgacaggtcctgtgacaagagggacttaccttccccgtcgtcgatataataattagttctgtctgtaccttcgagtattcctatgatatctcgaggactctgtagactggtacaaactaaggggctgaatgagcctgatatcgtacttattgatggggctcgtgaccctctatccttatgatatgtacgttcgaatggacatg

SEQ ID NO: 115137 - DNA, 351 bp, Zea mays
  unsure (1)..(351): unsure at all n locations
  Clone ID: MRT4577_36487C.1
cggacgcgtgggtgcggtcattgaaaaattgcataaggtactagtagtgactgtattgtgatctntgatctntatatatcttcttcttcttttctttaaaagagtgagttggatatgcatcgtcaatgcatgtacatatcacatatgggctagttagtagttaattaggagtacaattgataaactaccacatgtgacagtgaacagtatttttcatctcgtgcagcacacaggaatcttattcttgacgatctccagtgattccaaagactaaaacatgttcaactgtcttgtgattgattccttgcaggcacatcaatcgacctggggattgcgtacattcttatgctg

SEQ ID NO: 115138 - DNA, 1986 bp, Zea mays
  Clone ID: MRT4577_36488C.1
atgctcctggggttcatcgtctccgagcggggcatcgaggccaacccggagaaaatcgcggccatcaccaacatgggccccatcaaggacttgaaaggagtacagagggtcatgggatgccttgcggctctgagccgtttcatctcgcgcctcggcgaaagaggcctacctctgtaccgcctcttaagaaagaccgagcgcttcacttggacccccgaggccgaggaagcccccgggaacctaaaggcactcctcacaaacgcgcccatcttggtgccccccgctgccggagaagccctcttgatctacgtcgccgctaccactcaggtggtcagcgccgcgatcgtggtcgagagacgagaagaagggcacgcactgctcgtccagaggccagtctacttcatcagtgaagtactgtccgagaccaaaatccgctacccgcaaatccagaagctactgtatgcggagcgggcgtgggcctgctcttcatctcacccctcgggaagcacctccgctacgtgctacgcctccatttcccggcgtcaaacaacgtggccgagtacgaggctctggttaacgggttgcatcgccatcaagctaggggtccggcgcctcgacgctcgtggcgactcgcagcttgtcatcgaccaagtcatgaagaacgcccattgccgcgacccgaagatggaagcctactgtgacgaggttcggcgcctagaagacaagttctacgggctcgagctcaaccacgtcgctcgacgatacaacgagactgcggacgagctggctaaaatagcctcggggcggatgacggttcctcctgacgtcttctcccgagacctacaccaaccctccgtcaagaccgacgacacgcccgagcccgagaaggtcttagctctacccgaggcaccctcggctcagcccgaggcaccctctgcccccgagggtgaggcactgcgcgtcgaggaagagcgggatggggtcccgcctaatcgaaactggcataccccgtacctggaatatctccaccgaggagagctacccctcgatagagccgaagctcggcgactggcacggtgcgccaagtcgttcgtcttgctgggtgacggaaaggagctctaccaccgcagaccctcaggcatcctccagcgatgcatatccatcgccgaagaaggcacccgggggctacacgcacctgccggttgccatcgacaagttctccaagtggatcgaggcagacccctaaacagcatcaggtccgaacaggcggtggcgttcttcaccaacatcatccatcgctttggggtcccaaactccatcatcactgacaacggcacccagttcaccggcaggaagttcctggacttctgtgaggaccaccacatctgggtggactgggctgccgtggcccaccccatgacaaatgggcaggtagaacgtgccaacgacatgattctgcaaggactcaagccacggatctacaacgacctcaataagttcagtaggcgatggatgaaggaactcccctcggtggtctggagtctaagaacgacgcctagccgagctacgggcttcacgccgttctttctagtctatggggccgaggctatcttgcccacagacttagaatacggatcctcgaggacgagagcgtacgacgaccgaagcaaccggaccaaccaagaagactcactggaccagctggaagaggctcgggacgtggccttactacactcaacacggtatcagcagtccctgcgacgctaccatgcccgaggggttcggtcccgagacctccaggtgggcgacttggtgcttcggctacgacaagacgcccgaggacgccacaagctcacgcctccctgggaagggccgttcatcatcgccaagattttgaagcccggaacatacaagctagccaacagtcaaggcgaggtctacaacaacgcctggaacattcgacagctacgtcgcttctacccttaa

SEQ ID NO: 115139 - DNA, 222 bp, Zea mays
  Clone ID: MRT4577_36489C.1
atgtcgcctctcctcctcgcccttcgtggggcgttccggccttgtgcctcaggtgtcggtcgcctgggacttggcaaggcagagctcaccgatggcggtggggacaatagatttgtgttcagtgaggatgcaagcaaggactcactccggatggtggatcacggagaatcaagcaagggactgagacacaagggtttatactgcttcaggccaaagccctag

SEQ ID NO: 115140 - DNA, 279 bp, Zea mays
  Clone ID: MRT4577_3648C.1
ggagcacgagcagcgcctggacgccctgcaggggcgccatggaaggccatcgggtcctcagaggcagaccaggatggcctggccagcacggtgaggagcctgggcgagacccagctggtgctctaccatgacgtggaggagctgaagaggagtgtgggcgagctccccagcaccgtggaatcactccagaaggtgcaggagcaggtgcacacgctgctcagtcaggaccaagcccaggccgcccgatagccatctcaggacttcctggacagactttct

SEQ ID NO: 115141 - DNA, 2154 bp, Zea mays
  Clone ID: MRT4577_36490C.1
atggggcccatcaaggacttgaaaggagtacagagggtcatgggatggcttgcggccctgagccgtttcatctcgtgcctcggtgaaagaggcctacctctgtaccgcctcttgaggaagaccgagcgcttcacttggacccccgaggccgaggaagccctcgggaacctaaaggcgctcctcacaagcgcgcccatcctggtgccccccgctgccggagaagccctcttgatctacgtcgccgctaccactcaggtggtcagcgccgcgatcgtggtcgagagacgagaagaggggcacacattgcccgtccagaggccggtctacttcatcagtgaagtactgtccgagaccaaaatccgctacccacaaattcagaagctactgatcgcaaagtgggcggtggagatcatgggcgagactatctcgttcgcccctcggaaggccatcaagtcccaagtcttggcggactttgtggctgaatgggtcaactcccagcttccagaagctctgatccaaccggaaccctggaccatgtttttcgacgggtcgttgatgaaaacaggagcgggcgcgggcctgctcttcatctcacccctcgggaagcacctccgctacgtgctgcgcctctatttcccggcgtccaacaatgtggccgagtacgaggctctgcttgtcatcgaccaagtcatgaagaactcccactgccgcggcccgaagatggaagcctactgcgatgaggttcggcgcctggagaacaagttcttcgggctcgagctcaaccacatcgcccgacgatacaacgagactgcggacgagctggataagatagcctcggggcggacaacggttctcccggacgtcttctcccgagatctacatcaaccctcagtcaagaccgacgacacgcccgagcccgagaaggtctcagctctgcccgaggcaccctcggctcagcctgaggtgccctcggctcggcccgaggcaccctcggcccccgagggtgaggcactgcgcgtcgaggaagagcggaatggggtcctgcctgatcaaaactggcagaccccgtacctgcaatatctccaccaaggagatctacccctcgaccgagccgaagctcggcgactggcgcggcgcgccaagtcgttcatcttgctgggtgacgggaaggagctctaccaccgcagcccctcaggcatcctccagcgatgcatatccatcgccgaagggtgtcaattctacgcaaggcagacgcacctgcccgctcaggctctgcaaacaatacccatcacctggtcgtttgctgtgtgggatctggacctcgtcggtcccttgcagaaggcacccaggggctacacgcacctgctggtcgctatcgacaaattctccaagtggatcgaggttcgacccctaaacagcatcaggtccgaacaggcggtggcgttcttcaccaacatcatccatcgctttggggtcccgaactccatcatcaccgacaacggcacccagttcaccggcagaaagttcctggacttctgcgaggatcaccacatccgggtggactgggccaccgtagctcaccctatgacgaatgggcaagtagagcgtgtcaacggcatgattctgcaaggactcaagccgcagatctacaacgacctcaacaagttcggcaggcgatggatgaaggaactccccttggtggtctggagtctgaggacaacgccgagccgagccacgggcttcacgccgttctttctagtctatggggccgaggccatcttgcccacggacttggaatacggatccccgagggcgagggtgtacgacgaccgaagcaaccgagccaaccgagaagactcactggaccagctggaagaggctcgggacatggccttactacactcggtgcggtatcagcagtccctgcgacgctaccacgcccgaggggttcggtcccgagacctccaggtgggcgacttggtgcttcggctacgacaagacgcccgagggcatcacaagctcacgcctccctgggaagggccattcatcatcgccaagattttgaagcccagaacatacaagctggccaacagtcaaggcgaggtctacagcaacgcttggaacatccgacagctacatcgcttctacccttaa

SEQ ID NO: 115142 - DNA, 5304 bp, Zea mays
  Clone ID: MRT4577_36491C.1
atgggtagtctccagcatcctctccagcccgggacgatgctccgtttcgggagtctcgagttcatgtccctcgacggcagctacaacatggtactccttcctccgccgcgcgacaacgacaatggcggccgtcagcccgcccgccggcggcagaatcgacaacgtcttccccacgtggcagaagagcagcatctgggtctgtcccgtcaccttccccgccgacggaggaggaggtggggcaaccatgaccaagcaggaggtggcacctcgtcggctgtcgggcgagtcgacgacgccggtgccccagcgggagacacgtcgggcgttgacctcacgtctgagacgaagacgagcgtcgtttccccgcaacacgccaaccccaagcggacggatgacgccagcacgctcgcgaaggacttgctgggcgttagcctcgtacctgagataacggtgcagttcgtccccgacgcgactccgtcaccatccgtcgatcaagaggtaccgtccgttttccaccctgtgccttttagattcagcttcgacccaccaagcgactccgcttcggtggacgctttcataaaggcatatcctaaccttccggggtaccatatgtggtcaacctgggaccgactgacggccgtctcgacctacgggcccccgggttccgaggaagataacgagcctgactctggttgggatttctccgagctcggtaaccccagtgtcatgcgagacttcacggccgcttgtgactactgcctctccgattactccaatgatggccacagccttgacgacaaggactgtggcccaagtcgcgaatgtttccatgtcgatctagggggtctcaacgaaggcaaccagtccctgcgggagctagctgtggtcccagtccctacggggggctccggcagaacatcgggcaggagtgggcaggccgagcaccagccggagaagtgcgtcatctggcctaggacgtccagcaccgcatcgccgacgatgtcagggcaaggctgcccccggcttccagtggggtctgccagaacctggctgcagcagcaatactactccgagcgatgccggaaccatccaccaccgaggggcggcgtatccagggagaactcaagaatctcctggaggatgccgcagtccgacgggccgaaagctctgccttccgaaggcaggggtacccccccggagcatcgcgtcgcgacttcccgattcatgcgggaagcctcggtccacaccgggcgcacgcgggatgcaacgcctgtggccccaggtcgcctcggcaacgagcaccaccgccgcgaccgtcgagcccacctcgacaagaagatctccaactgggacgacctggtcaaagccttcgccggcaacttccagggcacatacgtgcaccctgggaactcctgggatctccgaagttgccgccagcagccgggagaatccctgcgggactacattcggcgattttcaaaacagcgcaccgagctgcccaacatcaccgactcagatgtcatcggcacgttgctcaccggcactacttgccgcgacctgcgcggcaccaagaagaagggcaagaagaagtcgcaagcgaaacgcgacgccaccgacgcagaccttgtcgccgccgccgagcacaggaaccctcggaagcctcctggaggcgccaacctgttcgacaagatgctcaaggagtcgtgcccctatcatcagggtcccgtcaagcacacccttgaggagtgcgtcatgcttcggcgctacttccacaaggctgggcccccggcagaaggtggcagaggccacgacaacgacaaggagggccacaaggcagaggagttccccgaggtccacgactgcttcatgatctacggtgggcaagtggcgaatgcctcggcttggcaccgcaagcaagagcgccgtgaggtctcctcggtgaaggtggcggcgccagtctacctagactggtccgacaagcccatcactttcgaccaaggcgaccaccccgaccgcgtgccgagcccggggaagtacccgctcgttgtcgatcctgtcgttggcaacgtcaggcttaccaaggtcctcatggacgaaggcagcagcctcaacatcatctacgccgagaccctcgggctcttgcagatcgatctgtccgcgatccgggccggtgcggcaccctttcacggcatcatccccgggaagcgcgtccaaccccttgggcaactcgatctgcccgtctgcttcgggactccctccaacttccgaaaggaaaccctcacgttcgaggtggtcgggttccgaggaacctaccacgcagtgctggggagaccatgctacgccaagttcatggccgtccctaactacacctacctcaagctcaagatgtcgggccccaacggggtcatcaccgtcggatccactccctcggacatgactggcataccgagggatgtcgccgagcactcgctgggtatccaagctggagcccgacccgtgaagcagcctctacgtcgattcgacgaagaaaagcgcagagccataggcgaggagatccacaagctgatggctgcagtgttcatcaaagaggtattccatcccgaatggttagccaaccctgtgcttgtgaaaaagaaaggtgggaaatggaggatgtgtgtagactacactgttctaaacaaagcatgtccgaaagttccctaccctctgcctcgcatcgatcaaatcgtggattccactgctgggtgcgaaaccctgtcgttcctcgatgcctactcagggtatcaccaaatcaggatgaaagagtccgaccagctctttggcatgtactgctacattactatgccattcggtttgaggaacgcaggtgcgacataccaaaggtgcatgaaccacatgttcggagagcacattagccgaacggtcgaggcttacgttgatgacattgtagtcaagacgaggaaagtctccgacctcctcactgaccttgaaacgacattcaagtgtctcaaggcgaaaggcgtaaaactcaatcccgagaagtgtgtcttcggagtcccccgaggcatgctcctagggttcatcgtctccgagcggggcatcgaggctaacccggagaaaatcacagccatcaccaacatgggacctatcaaggacttgaaaggactacaaagggtcatgggatgccttgcggctctgagccgcttcatctcgcgcctcggcaaaagaggcctgcctctgtaccgcctcttaaggaagaccgagcgcttcacttggacccccgaggccgaggaagccctcgggaacttaaaggcgctccttacaagcgcgcccatcttggtgccccccgctgccggagaagccctcttgatctacgtagccacaactactcaggtggtcagcgccgcgatcgtagtcgagagacgagaagaaggacatgtattgcccgtccaggggccggtctacttcatcagtgagttgcgacactacttcaagcctcatccggtgactgtggtgtcatccttccccctgggggagatcatccagtgccaagaggcctcaagtaggattgcaaagtgggcggtggagatcatgggcgagacaatctcgttcgcccctcggaaggccaccaagtcccaagtcttggtggactttgtggctgaatgggtcgacacccagcttccagcagctccgatccaaccagaactttggaccatgtttttcgatgggtcgctgatgaaaacaggagcgggcgcgggcctgctcttcatctcacccctcgggaagcagctccgctacatgctgcgcctccattttccggcgtcaaacaacgtggccgagtacgaggctctcgttaacgggttgcacatcaccatcgagctagggcttgtcattgaccaagtcatgaagaactcccattgccgcgacccaaagatggaagcctactgcgacgaggttcggcgcctggaagacaagttctatgggctcgagctcaaccacgtcgctcgacgatacaacgagactgcggacgagctggctaaaatagcctcggggcggacaacggttccctcggatgtcttctcccgagacctacatcaaccctccgtcaagaccaacgacacgcccgaacccgaggaggcctcggcccagcccgaggcaccctcggctcagcctgaagcagccttggccgccgagggtgaggcactgcgcgtcgaggaagagcggaatggggtcacgcctaatcgaaactggcagacctcgtacctgcaatatatccaccgaggagagctacccctcgacagagccgaagctcggcgacaggcgcggcgcgtcaggtcgttcgtcttgctgggtgaagaaaaggagctctaccaccgcagcccctcaggcatcctccagcgatgcatatccatcgctgaaggtcaggagctattgcaagaaatacactcgggggcttgcggtcatcacggagcacctcgagccctcgttggaaacgccttccgacaaggtttctactggccaaccgcggtggccgacgccactaggattgtacgcacctgccaagggtgtcaattctacgcaaggcagacacacctgcccgctcaggccctgcaaacaatacccatcacctggttgtttgctgtgtggggtctggacctcgtcgctcccttgcataaggcacccgggggcttcacgcacccgctggtcgctatcgacaaattctccaagtggattgaggtccgacccctaaacaacatcaggtccgaacaggcggtggcattcttcaccaacatcatccatcgctttggggtccggaactccatcatcatcgacaacggcacccagttcactggcataaagttcctggacttctgcgaggaccaccacatccgggtggactgggccgccgtagctcaccccatgacgaatgggcaggtagagcgtgccaacgacatgattctgcagggactcaagccgaggatctacagcgacctcaacaagttcggcaggcaatggatgaaggaactcctctcggtggtctggagtctgaggacgacgctaagccgagccacgggcttcacgctgttctttctagtctatggggccgaggctatcttgcccacagacttagaatacggctccccaaggacaaggacgtacgacgaccagagcaaccagaccagccgagaagactcattgtaccagctggaagaggctcgggacatggccttactacactcggcaaggtatcagcagtctctgcgacgctaccacgctcgaggggttcggtcccgagacctctag

SEQ ID NO: 115143 - DNA, 2400 bp, Zea mays
  Clone ID: MRT4577_36492C.1
atgccgttcggcttgaggaatgcgggcgcgacgtaccagcggtgcatgaaccatgtgttcggcgaacacatcggtcgcacagtcgaggcctacgtcgatgacatcgtagtcaagacaaggaaggcttccgacctcctcttcgaccttgaagtgacattccgatgtctcaaggcgaaaggcgtcaagctcaatcccgagaagtgtgtcttcggggtgcccctgggcatgctcttggggttcatcgtctccgagcgaggcatcgaagccaacccggagaagatcgcagctatcaccagcatggggcccatcaaggacttaaaaggcgtacagaaggtcatgggatgtctcgcggccttgagccgcttcatctcacgcctcggcgaaagaggtctgcctctgtaccgcttcttgaggaaggccgagtgtttcgcttggacccctgaggctgaggaagctctcgggaacctgaaggcgctccttacaaaggcgcctatcttggtgcccccagctgatggagaagccctcttggtctacgtcgccgcgaccactcaggtggttagcgccgcgattgtggtcgagaggcaagaagaagggcatgcattgcccgttcagaggccagtctacttcgtcagcgaggtattgttcgagaccaagatccgctacccacaagttcagaagttgctgtatgctgtgatcctgacgaggcagaagttacgacattacttcgagtctcatccggtaactgtggtgtcatccttccccccgggggagatcatccagtgccgagaggccttgggcaggatcgcaaagtgggcggtggaaatcatgggcgaaacaatctcgttcgcccctcggaaggccatcaagtcccaggtgttggcggacttcgtagctgaatgggtcgacacccagctgccgacggctccgatccaaccggagctctggaccatgtttttcgacgggtcgctgatgaagacgggagccggcgcgggcatgctcttcatctcgcccctcgggaaacacctacgctacgtgctacgcctccatttcccggcgtccaacaatgtggctgagtacgaggctctggtcaacgggttgcggatcgccatcgagctaggggtcagacgcctcgacgcccgcggtgactcgcagctcgtcatcgaccaagtcatgaagaactcccactgccgcaacccgaagatggaggcctactgcgatgaggttcggcgcctggaagacaagttctacgggctcgagctcaaccacatcgctcggcgctacaacgagactgcggacgagctggctaaaatagcctcggggcgaacaacggttccccccgacgtcttctcccgggatctgcaccaaccctccgtcaagatcgacgacacgcccgagcccgaggcaccctcggctcggcccgaggcaccctcggatcagcccggggtaccctcggcccccgagggcgaggcgctgcgcatcgaggaggagcggagcggggccacgcctgaccgagattggcagaccccgtacctgcaatatctccgccaaggagagctacccctcgaccaagccgaggctcggcggaaggcgcccgggggctacacgcacctgctggtcgccgtcgacaaattctccaagtggatcgaggtccgacccctgaacagcatcaggtccgagcaggcggtggcgttcttcaccaacatcatccatcgcttcggggtcccaaactccatcatcaccaacaacggtacccagttcaccggcagaaaattcttggatttttgcgaggatcaccacatccgggtggactgggccgccgtggctcatcccatgtcgaatgggcaagtagagcgtgccaacagcatgattctacaggggctcaagcctcggatttacaacggcctcaacaagttcggcaagcgatggatgaaggaactcccctcggtggtctggagcctgaggacaacaccgagccgagccacgggtttcacgtcgttcttcctgttctacggggccgaggctgtcttgcccactgacctgggatacggctccccgaggacgagggcctacagcgatcaaagcaaccaagctagccgagaagtctcgctggaccagctggaagaggctcgggacaaggccttactacactcagcgaggtaccagcagtccctgcgacgctaccacgcccgaggggtccggccccgagacctccaggtgggtgacctggtgcttcggctgcggcaagacgcccgagggaggcacaagctcatgcccccctgggaggggccattcgtcatcgccaaagttctgaagcccggaacgtacaagctggccaacagccaaggcgaggtctacggcaacgcttggaacatccaacagctacgtcacttctacccttaa

SEQ ID NO: 115144 - DNA, 2748 bp, Zea mays
  Clone ID: MRT4577_36493C.1
atgcggtcagtcctcaacgtgacttcatcgccgctcgacgaccaaaaggtaccaaccgattcccgtcctacgtcatttgtactcagcctcgacccgcctagcaatcttgctttggcgggcgcccttgtagaggcgagtacaaaccctctggggtttcgcttgcggtcaccttgggaccggctgacggacgtctcgatctatggaccctctgggtccgaggaagatgacgaccccaacatctgttgggatttctctggatttggtaaccccagtgccatgcggaacttcatgaccgcatgtgactactgcctctccgactgttccgacggtagccgcagcctcgacgacgaggactgcggcccaagccgcgaatgtttccacgtcgatctagggggtccctctgaaggcaatcatctcggcatgccggaggacggtgctccccctgggccggtgcctcgcgctgacatcccgcgggagctagctgtggtccccgttccggcggggggttacgacccaaagcttgagcaagtccgcggggcgcaggccaggatcgacgagggagcaggagcgcttgagccgatccgccgggacgtcggtcaggcatgggtgggccaaccctcggccggagaaatacgtcacctgccccagggtctccagcaccgcgtcgccgatgtcgtcagggtcaggccaccacctgcatccagtggggtcggtcagaacctggccacagcagcgatgctcctccgcgcgatgccggagccatccaccaccgagggtcggcgaatccaaggagaactcagaaatctcctggaaggcgccgcggtccgatgggccgagagcactgcctcccgaaggcaaggatacccctcggaacctcatgccgcgacctcccgattcatgcgggaagcctcggtctacaccgggcgcacgcgcaacaccgcgcctgcggccccgggccacctcggcaacgagcgccatcaccgcgaccgtcgagcccacctcgacgagagggtgcgccgaggctatcaccccaggcgtgggggacgctacgacagcggggaggatcggagtccctcgcccgaaccacccggtccgcaggccttcagccgggccatccggcgggcaccgttcccgacccggttccgaccctcgactactatcataaagtactcgggggaaacgaggccggaattgtggctcgcggactaccgcctggcctgccaattaggtggaacagacgacgacaacctcatcatccgcaacctccccctgttcctctccgacaccgctcgcgcctggttggagcacctgcctccggggcagatctccaactgggatgacctggtccaagccttcgccggaaatttccagggcacgtatgtgcgccctgggaattcctgggacctccgaagctgccgacagcagccgggagagtctcttcgggactacatccggcgattctcgaagcagcgcaccgagctgcccaacatcaccgactcagatgtcatcggcgcgttccttgccggcaccacctgccgcgacctggtgagtaagttgggtcgcaagacccccactagggcgagcgagctgatggacatcgccaccaagttcgcctctggccaggaggcggtcgaggctatcttccgaaaggacaagcagccccagggccgcccatcggaagatgctcccgaggcgtctactccgcgcggcgccaagaagaaaggcaagaagaagtcgcaagcgaaacgcgacgccgccgacgcggaccttgtcgccgccgccgagtacaagagccctcggaatccccccggaggtgccaacctctttgacaagatgctcaaggagccgtgcccctatcatcaggggcccgtcaagcacacccttgaggagtgcgtcatgcttcggcgccacttccacagggccgggccacccgcagagggtggcagggcccgcgacgacgacatgaaggaagatcaccaagcaggagagttccccgaggtccgcgactgcttcatgatctacggtgggcatgcggcgaacgcctcggttcggcatcgcaagcaagagcgccgggaggtctgctcggtgaaggtggcggcgccagtctacctagactggtccgacaagcccatcaccttcgaccaagctgaccaccccgaccacgtgccgagcccggggaaatacccgctcgtcgtcgaccccatcgtcggcgacgtcaggctcaccaaggtcctgatggacgggggcagctgcctcaacatcatctacgccgagaccctcaggctcctgcgcgtcgatctgtcctccgtccgagcaggcgctgcgcccttccacgggatcattcccgggaagcgcgtccagcccctcggacgactcgacctccctgtggtcgggttccgaggaacctaccacgcggtgctggggaggccatgctacgcgaagttcatggccgtccccaactacacctacctgaagctcaagatgccgggccccaacggggtcatcaccgtcggccccacgtacaaacacgcgttcgaatgcgacatggagtgcgtggagtacgccgaggccctcgccgagtccgaggccctcatcgccgacctggagagcctctccaaagaggtgccagacgtgaagcgtcatgccggcaacttcgagccagtagagacggctaagaccatccccctcgaccccaatggcgacgcctccaagcagatccggattggttccggactcgagcccaaatag

SEQ ID NO: 115145 - DNA, 3699 bp, Zea mays
  Clone ID: MRT4577_36494C.1
atgtccttcgacggcagctacgacatgacacttcttccaccgccgcgcgactacgacaatggcggccgacaacccgcccgccggcggcggaatcgacgacatcttccccgcgtggtggaagagcaacattcgggctcgctccgttctctcccccgccaacggaggaggaggcggagccgtcaaggccagacgggaggccacgcttcgccggccgtcgagcgaatcgacgcccccgacgccccgacggaaggcacgccggacgtcgacctcgcgttcgagacggaggcaagcgccgtccccccgcggcacgctgaccccgagcaagaagacgacgccggcgcgctcgcggaaagcctgcaggacgtcgccctcgaaccagagatggcggcgcaaccagtccccgatgtgactacgtcgctcctcgtcgaccaaaaggtaacgactaactcccatcttgcgtcatttcgactcggcctcaacccgccaaacgacctcgttttggcgggcgctctcattgaggcgagtgcgaccccactgaggttctgtatgcggtcgccttgggaccaactgacggacgtctcgacctacgggccctctgggtccgaggaagatgacgatcccagcattggttgggatttctccggactcggcaaccccagtgccgtgcgggacttcatgaccgcatgtgactactgtctatccgactgttccgatggaagccgcagccttggcgacgagagctgcggcccaagccgcgaatgtttccacatcgagctaggggatcccaccgaaggcaaccatcttggcgtgccggaggatggtgatctccctaggccggtgcctcgcgccgacatcccacgggagctagctgtggtccccgctccggcggggggttacgacccacaactcgagcaagtccgcgaggcgcaggccaggctcaacgagggaacaggagcgcttgagccgatccgtcgggacgtcggacaggcatgggtgggccaacccctggccggagaaatacgtcatctgccccaaggtctccagcaccgcgtcgccaacgacgtcaggatcaggccgccgcccgcatccagcggggtcggtcagaacctggcgaccgcagcgatgctcatccgcgcgatgccggagccgtcaaccaccgaggggcggcgaatccagggagaactcaagaatctcctggaaggcgctgcggcccggcgggccgagagcactgcatcccggaggcaaggatatccctcggaacctcatgccgcgacttcccgattcatgcgggaagcctcggtctacaccgggcgcacgcgcaacaccgcgcctgcggccccgggccacctcggcaacgagcaccatcgacgcgaccgtcgggctcacctcgacgaaagggtgcgccgaggctaccaccccaggcgtggggggcgctacgacagcggggaggatcggagtccctcgccagaaccacccggtccgcaggccttcagtcgggccatccgacgggcgccattcccgacccggttccgacccccgactactatcacaaagtactcgggggaaacgagaccggaactgtggctcgcggactaccgccttgcctgccaactgggtggaacggacgacgacaacctcatcatccgcaacctccccctgttcctctccgacactgctcgcgcctggttggagcacctgcctccggggcagatttccaactgggacgacttggtccaagccttcgctggcaatttccagggcacatacgtgcgccccgggaattcctgggaccttcgaagctgccggcaaccgccgggggagtcgctccgggactacatccagcgattctctaagcagcgcaccgagctccccaacatcaccgactcggatgtcatcggcgcgttcctcgccgacaccacttgccgcgacctggtgagcaggctgggtcgcaaaacccccaccagggcgagcgagctgatggacatcgccaccccaggcgccttcagtcgggccatccgacgggcgccattcccgacccggttccgacccccgactactatcacaaagtactcgggggaaacgagaccggaactgtggctcgcggactaccgccttgcctgccaactgggtggaacggacgacgacaacctcatcatccgcaacctccccctgttcctctccgacactgctcgcgcctggttggagcacctgcctccggggcagatttccaactgggacgacttggtccaagccttcgctggcaatttccagggcacatacgtgcgccccgggaattcctgggaccttcgaagctgccggcaacagccgggggagtcgctccgggactacatccggcgattctctaagcagcgcaccgagctccccaacatcaccgactcggatgtcatcggcgcgttcctcgccggcaccacttgccgcgacctggtgagcaggctgggtcgcaaaacccccaccagggcgagcgagctgatggacatcgccaccaagttcgcctccggccaggaggcggtcgaggctatcttccgaaaggacaagcagccccagggccgcccatcggaagaagctcccgaggcgtctgctccgcgcggcgccaagaagaaaggcaagaagaagtcgcaatcgaaacgcgacgccgccgacgcggaccttgtcgccgccgccgagtataagaaccctcggaagccccccggaggtgcaaacctcttcgacaagatgctcaaggagccgtgcccctaccatcaggggcccatcaagcacaccctcgaggagtgcgttatgcttcggcgtcacttccacagggccgggccacccgccgagggtggcagggcccgcgacgacgacaagaacgaagatcaccaagcaggagagttccccgaggtccgcgactgcttcatgatctatggagggcatgcggcgaacgccccggctcggcatcgcaagcaagagcgccgggaggtctgctcggtgaaggtggcggcgccagtctacctagactggtccgacaagcccatcaccttcgaccaggccgaccaccccgaccatgtgccaagcccggggaaatacccgctcgtcgtcgaccccgttgtcggcaatgtcaggctcaccaaggtcctgatggatgggggcagctgcctcaacatcatctacgccgagaccctcaagctcctgcgcgtcgatctgtcctccgttcgagcaggcgttgcgcccttccacgggatcatccctgggaagcgcgtccagcccctcgggcgactcgacctcccagtctgcttcgggacaccctccaacttccgaagggagatcctgacgttcgaagtggtcgagttccgaggaacctaccacgccgtgctagggaggccatgctacgcgaagttcatggccgtccccaactacacctacctgaagctcaagatgccgggccccaacggggtcatcaccgtcggccccacgtacaaacacgcgttcgaatgcgacgtggagtgcgtggagtacgccgaggccctcgccgagtccgaggccctcatcgccgacctggagaacctctccaaggaggtgccagacgtgaagcgccatgccggcaacttcgagccagcggagacggtcaaggccgtccccctcgaccccagcggcgacaccaccaagcagatccggatcggttccgggctcgaccccaaatag

SEQ ID NO: 115146 - DNA, 2937 bp, Zea mays
  Clone ID: MRT4577_36495C.1
atgggcagtctccagcgacctctccggcccgggacggtgcttcgtttcgggactctcgagttcatgtccttcgacggcagctacgacatgacacttcttccaccgccgcgcgactacgacaacggcggccgacaacccgcccgccggcggcggaatcgacgacgtcttccccgcgtggtggaagagaaatattcgggctcgctccgttctctcccccgccaacggaggaggaggcggagccgtcaaggccagacgggaggccgcgcttcgtcggccgtcgagcgaatcgacgcccccaacgccccgacggaaggcacgccggacgtcgacctcgcgttcgagacggaggagagcgccgtccccccgcggcacgctgaccttgagcaagaagacgacgccggcgcgctcgcggaaagcctgcaggacgtcgccctcgaaccagggatgacggcgcaaccagtccccggtgtgactacgtcgctcctcgtcgaccaaaaggtaacgactaactcccatcttgcgtcatttcgactcggcctcaacccgccaaacgacctcgttttggcgggcgctctccttgaggcgagtgcaaccccactgaggttctgtgtgcggtcgccttgggaccgactgacggacgtctcgacctacgggccctctgggtccgaggaagatgacgatcccagcatcggttgggatttctccggacttggcaaccccagtgccgtgcgggacttcatgaccgcatgtgactactgtctatccgactgttccgatggaagccgcagccttggcgacgagagctgcggcccaagccgcgaatgtttccacatcgagctaggggatcccaccgaaggcaaccatcttggcatgccggaggatggtgacctccccaggccggtgcctcgcgccgacatcccacgggagctagctgtggtccccgctccggcggggggttacgacccacaactcgagcaagtccgcgaggcgcaggccaggctcaacgagggaacaggagcgcttgagccgatccgtcgggacgtcggacaggcatgggtgggccaacccctggccggagaaatacgtcatctgccccaaggtctccagcaccgcgtcgccaacgatgtcaggatcaggccgccgcccgcatccagcggggtcggtcagaacctggcaaccgcagcaatgctcatccgcgcgatgccggagccgtcaaccaccgagggtcggcgaatccagggagaactcaagaatctcctggaaggcgctgcggcccggcgggccgagagcactgcatcccggaggcaaggatatccctcggaacctcatgccgcgacttcccgattcatgcgggaagcctcggtctacaccgggcgcacgcgcaacaccgcgcctgcggccccgggccacctcggcaacgagcaccatcgacgcgaccgccgggctcacctcgacgaaaggatttccaactgggacgacttggtccaagccttcgctggcaatttccagggcacatacgtgcgccccgggaatccctgggaccttcgaagctaccggcaacagccgggggagtcgctccgggactacatccggcgattctcgaagcagcgcaccgagctgcccaacatcaccgactcggatgtcatcggcgcgttcctcgccggcaccacttgccgcgacctggtgagcaagctgggtcgcaaaacccccaccagggcgagcgagctgatggacatcgccaccaagttcgcctccggccaggaggcggtcgaggctatcttccgaaaggacaagcagccccagggccgcccatcggaagaagctcccgaggcgtctgctccgcgcggcgccaagaagaaaggcaagaagaagtcgcaatcgaaacgcgacgccgccgacgcggaccttgtcgctgccgccgagtataagaaccctcggaagccccccggaggtgcaaacctcttcgacaagatgctcaaggagccgtgcccctaccatcaggggcccgtcaagcacaccctcgaggagtgcgttatgcttcggcgtcatttccatagggccgggccacccgccgagggtggcagggcccacgacgacgacaagaacgaagatcacccagcaggggggttccccgaggtccgcgactgcttcatgatctatggagggcatgcggcgaatacctcggctcggcaccgcaagcaagagcgccgggaggtctgctcggtgaaggtggcggcgccagtctacctagactggtccgacaagcccatcactttcgaccgggccgaccaccccgaccatgtgccgagcccggggaaatacccgctcgtcgtcgaccccgttgtcggcgacgtcaggctcaccaaggtcctgatggacgggggcagctgcctcaacatcatctacgccgagaccctcaagcttctgcgcgtcgatccgtcctccgtccgagcaggcgctgcgcccttccacgggatcatccctgggaagcgcgtccagcccctcgggcgactcgacctcccagtctgcttcggaacaccctccaacttccgaagggagaccctgacgttcgaagtggtcgggttccgaggaacctaccacgccgtgctagggaggccatgctacgcgaagttcatggccgtccccaactacacctacctgaagctcgagatgccgggccccaacggggtcatcaccgtcggccccacgtacaaacacgcgttcgaatgcgacgtggagtgcgtggagtacgccgaggccctcgccgagtccgaggccctcatcgccgacctggagaacctctccaaggaggtcccagacgtgaagcgccatgccggcaacttcgagccagcggagacggtcaaggccgtccccctcgaccccagtggcgacaccaccaagcagatccggatcggttccgggctcgaccccaaatag

SEQ ID NO: 115147 - DNA, 207 bp, Zea mays
  Clone ID: MRT4577_36496C.1
cacgcatccatcaaagaaacaagatcacacatacaatacctctctagctcgccaccaacaatggcctgcgatgtactccatcatgctcgccacaactgcacttgctacgtcttttgtgattgtttcgtgctccacccctctcaccttctacgtcttctatatgctccaaacctttccaccttttccttaccctcaacattgtcacca

SEQ ID NO: 115148 - DNA, 196 bp, Zea mays
  unsure (1)..(196): unsure at all n locations
  Clone ID: MRT4577_36497C.1
tanccaccaaatcaaaactgcaacattaatgttataacgccaaaaaccatgaagcggcgtcgtgtttttattgctttgagtgctccacaaccaaangacaagctgcacacagacactcgcgctacaccaccaggtcaacaacaaactcatgagcataaacctcatccacaacaacatcctccacaaaaacaacaac

SEQ ID NO: 115149 - DNA, 2018 bp, Zea mays
  Clone ID: MRT4577_36498C.1
ccgggactgcacgacacggaggagttaaagagacggcagcgcaccggcacctcctctccggccacacaggcagtcccccctccccccacccacccagcgtgcgaggcgatcaaaccgtgtgcgggcatggcggccacgctgctcctggcctcggcgaccgcgctcctggcgctggcggcggcgtggctctgggactacgtcgtggtgcgcctcctttggcggccccgcgcagtggccggcatgttcagggcgcagggggtccgcgggccgccctacagcttcctcagcggctgcaaccgcgagatgaggaggatgaaggcggaggccgacgacgggctccggctggacgtccgcgaccacaactacctccccagggtgatgccccacttcctcgcctggaagcagcagtacggggagccattcctgtactggatgggtccgcggccccgggtctgcctcttcgactacgagtcggtaaggcaggttcttttcaacaagtccggtcatttcttcaaggacgacgcccacccgactatcctggcaatgatgggcaaagggctggtcctggtggaaggcaccgactgggtgcgccatcggagggtggtcaacccagccttcgccatggacaagctcaagatgatgacggagacgatggtcagctgtgctgagccactgatcaagcggtgggaacagctcgtagcagccagcagatccagcgaggacggtgggaggggagaagtgcaagtggagttcagcaagcagttccaggacctgacggcggacgttatcgcccacaccggtttcggaagcagctacaaggagggcaaagaggtgttccatacgcagaagcagctcctggcgctcgccatggcgactctcctcaacgtgcagctgccaggattcaagtatctccctaccaagaacaacaggctaaagtgggcgctagaaaagaagatgaagacaacgctcatggcgatcatacagttgcgggtggcatccaatggaaggagtagtggatacggaaacgacctgctcggcctgatgctcgaggcctggctcacagcggaacgaggaggggaacgggacgagttgagcctgaccatggacgagatcatagacgagtgcaagacattcttcttcgcaggccacgagaccacgtcccatctgctcacctggacaatgttcttgctcagcgtgtacccggaatggcagcaacggctaagggacgaggtcctgagagagtgcggacaggcaaaccctactgcagacacgcttaacaaattcaatgagatgacgatggtgctcctcgagacactgagactctacggccctgtcatgctcatgctaaggaagcctacctccgacataaggctgggcagcctcagcataccgaaaggcaacgggatcgccatacccgtcccgttcctccaccgagacagagaggtctggggcgacaacgccaatgacttcgatccgttgaggtttcagaacggggtcacgaacgcggccaagaccccgcaggctcttctgtcgttctcgatcgggccgagggcatgcatcggccagaacttcgcgatgctggaagcgaagtcggtgatggccatgatcctgaagaagttctccttcacgctttcctcgagctacgtgcacgcgcctgtggattatatcacgctccagcctaagttcggccttcccatagttttgaggccactcccggatgtatgatgatgtgaaatggatgtgtgtatgtgtgtagcctgatagctgattttttttggggtctaagtatacataagaggtcagtattcaggacttggtttcatccgccaaacagtaaggctaaagaaccaaaacttgttgaaaactggtaactttctgggattttatgcccgtattatgtatataaatatataatgctacatagaactttgtattaaaaaaaaaaaaaaagcggagttggttctgagttgaattacccgagctgacaaactcttgcaaaggcagctaagctgaattac

SEQ ID NO: 115150 - DNA, 1725 bp, Zea mays
  Clone ID: MRT4577_36499C.1
atgccgttcggcttgaggattgcgggtgcgacgtaccaacggtgcatgaaccatgtgttcggcgaacacattggccggacggtcgacgcctacgtcgatgacatcgtagtcaagacgaggaaagcctccgacctcctttccgaccttgaagtgacattccgatgtctcaaggcgaaaggcgtgaagcttaatctcgagaagtgtgtcttcggggttccccgaggcatgctcttggggttcatcgtctctgagcggggcatggaagccaacccgaagaagatcgcgaccatcaccagcatggggcccatcaaggacttgaaaggcgtacagagagtcacgggatgccttgcggctctgagccgcttcatctcgcgcctcggtgaaagaggcctgcctctgtaccgcctcttaaggaaggccgagtgcttcacttggacccctaaggccgaggaagccctcgggaacctgaaggcgctccttacaaacgcgcccatcttggtgcctcctgctgccgaagaagccctcttgatctacgtcgccgcgaccactcaggtggttagcaccgcgattgtggttgagagacgagaagaggggcatgcattgcccgtccagaggccagtctacttcatcagcgaggtactgtccgaaactaagatccgctacccacaagttcagaagctactatacgcagtgattcttacacgacggaagttgcgacactacttcgagtctcatccgctcgtcatcgaccaagtcatgaagaactcccactgccgcgacccgaagatggaagcctactgcgatgaggttcggcgcctggaagacaagttctacgggctcgagctcaaccacatcgcccgacgctacaacgagactgcggacgagctggctaaaatagcctcggggcgaacaacggttcccccggacgtcttctcccgagacctgcatcaaccctccgtcaagaccggcgacacgcccgagcccgagaaagcctcagccgagcctgaggcaccctcggctcagctcgagaaggcacccgggggctacacgcacctgttggtcgccatcgacaaattctccaagtggatcgaggtccgacccctaaacagcatcaggtccgaacaggcggtggcgttcttcaccaacatcatccatcgctttggggtcctgaattccatcatcaccgacaacggcacccagttcaccggtagaaagttcctggacttctacgaggatcaccacatccgggtggactgggccgccgtggctcaccccatgacgaatgggcaagtagagcgtgccaacgacatgattctacaaggactcaagcctcggatctacaatgacctcaacaagttcggcaagcgatggatgaaggaactcccctcggtggtctggagtctgagaacaacgccgagccgtgccacgggcttcacgccgttctttctagtctatggggccgaggccatcttgcccacagacttagaatacggttccccgaggacgatggcctacgccgaccaaagcaaccaagctaatcgagaagactcgctggaccagctggaagaggcttgggacatggccttactacactcggtgcggtaccagcagtccctgcgacgctaccacgcccgaggggtccggtcccgagacctccaggtgggcgacctggtgcttcggctacgacaagacgcccgagggcggcacaagctcacgcctccctag

SEQ ID NO: 115151 - DNA, 815 bp, Zea mays
  unsure (1)..(815): unsure at all n locations
  Clone ID: MRT4577_3649C.1
attgggtacctcgaggccggccggggcccgacttcgctggctcaccgcgcgtcatgccccgtccccgttcgccgcgccacgcgttgcgccccatccgccgcgcgccacgccccagtccgctggtcgggtgggacgaggagttcgtcctcctcgccgcgatggtcgtcgaggacaccccagttcgtgagtcccgtcgcaagaggcgggcctccacctcctccgtcggcgatagcgccggatccagcaccaggaagaggaggtcgcgtaggcagtctccggccaagatcccgccggtggttttcgcgctcgacgacaaaaagtcggacactgcggcagatggcaaatcggaagtgaaggcgagcaaggaggaagagaagcctgtccttgtgggcgacaaggaggcgtccggttctggcgagaaggcagtgggcgcggcaaacatgccgtgcatggatcggctccgggaggagctctcttgcgcaagaacgatctggttgaagatcccgaggaactcacaggagaagcccctgagcagcagctggttggtggaggttgttcgtgttgcaaccactgctcaggtgaagatgaagccatggaaggagacttccaggaattccaagattacgacgagttctaggcgtgggttagcggcaacccccagtcggctgcctatgaaggccacgtgtatctacgtttcttttccgcactntgattattgtaaagacctatgtggatgtctcagacatatgatgtaatcgactattattcccctttttatgttaaaaaacanaaaaaaaaaaaaaaaggggcgggcc

SEQ ID NO: 115152 - DNA, 377 bp, Zea mays
  Clone ID: MRT4577_364C.1
tcccacgcgtccgcggacgcgtgggtccaactcttttagtttgtttctcttgttcgtgccaagtttggtcgtcgtcggttgaactcttttatgtctcaagacagctggttagtggttcctagcgtatggtaagtactgtttgaggtttaacccgtcgtggatgtagttgtatgatcgggtttcatgtgtgagagttctaaccaatcactagacatcgtagaacatgatgaaggtctactttgagactgagtggagcggccatgagaatgagagttcgggcctgttaggcacggctccgactccttcaaaaacgattctggctctgagccaattgttttagctccggcttctctctataaaaatagctccagctcgtc

SEQ ID NO: 115153 - DNA, 477 bp, Zea mays
  Clone ID: MRT4577_36500C.1
tggacctttgggctgatttagtgcttgaggagtcgcccggagtcgccgttccgataggaacgtctcgagggtcgtactcgtcctcgtcgatcctctggtcaaagcacgggacgtatccatcggcgacgaatcatacctacccgaatacaagtacacagcctgggtacgcgtccctctcgaggatatttattccccatctatcggaggtacggaaaagatcccgtgcgcgcacgacaccaactgcttcgacgtagtcttaagagagtccgataaactattcggcctcgcttgaatcgtcgttcggtcctacagcgattaaatcacaccgagccttcgtatcgatacgggcggagcaaggtcacgggacgcgagaataggcaaaaccgcttaaatctccgaaattaaggtcctcaccatcagcgtagaagcaagttaggacggtaggcctactatcatagtagacggtctaagcgcaaa

SEQ ID NO: 115154 - DNA, 1620 bp, Zea mays
  Clone ID: MRT4577_36501C.1
atggcggttgacagcccgcccgccggcggcggaatcgacgacgtcttccccgcgtggtggaagaacaacattcgagctcgccccatcccctcccccgccaacggaggagaaggcggggcaaccaaggccaagcaggaggcagcgcctcgtcggctgtcgagcgagtcgacagcgccagcacctcaacgggggggcacgtacgtacgccccgggaattcctgtgacctccgaagctaccgacagcagccgggagagtctctccgggattacatccggcgattctcgaagcagcgcaccgagctgcccaacatcaccgactcagatgtcatcggcgcgttcctcgctggcaccacctgccgcgacctggtgagcaagttgggtcgcaagacccccactagggcgagcgagctgatggacatcgccaccaagttcgcctccggccaggaggcggtcgaggctatcttccgaaaggacaagcagccccagggccgcccatcggaagatgcccccgaggcgtcaactcagcgcggcgccaagaagaagggcaagaagaagtcgcaagcgaaacacgacgccgccgacgcggaccttgtcgccgccgccgagtacaagaaccctcggaaaccccccggaggtgccaaccttttcgacaagatgctgaaggagtcgtgcccctatcaccaggggcccgtcaagcacacccttgaggagtgcgtcatgcttcggcgccacttccacagggccgggccacccgcggagggtggcagggcccgcgacgacgacaagaaggaagatcaccaggcaggagagttccccgaggtccgtgactgcttcatgatctacggtgggcaagcggcgaacgcctcggctcggcaccgcaagcaagagcgccgggaggtctgttcggtgaaggtggcggcgccagtctacctagactggtccaacaagcccatcaccttcgaccaagccgaccaccccgaccatgtgccgagcccggggaaatacccgctcgtcgtcgaccccatcatcggcgatgtcaggctcaccaaggtcctcatggacggaggcagcagcctcaacatcatctacgccgagaccctcgggctcctgcgtgtcgatctgtcctcggtccaggcaggcgctgcgcctttccatgggatcatccccgggaagcgcgtccagcccctcggacaactcgaccttcccgtctgcttcggaacaccctccaacttccgaagggagaccctgacgtttgaggtggtcgggttccgaggaacctaccatgcggtattggggaggccatgctacgcgaagttcatggccgtccccaactacacctacctgaagctcaagatgccgggccccaatggggtcatcaccatcggccccacgtacaaacacgcgttcgaatgcgacgtggagtgcgtggagtacgccgaggccctcgccgagtccgaggccctcatcgccgacctggacagcctctctaaggaggtgccagacgtgaagcgtcatgccggcaacttcgagccagcggagacggttaaggccgtccccctcgacctcagcagcgacgcctccaagcagatccggatcggctccgggctcgatcccaaatag

SEQ ID NO: 115155 - DNA, 271 bp, Zea mays
  Clone ID: MRT4577_36502C.1
ctcacacatccgaactcacctacttttactttttcagctggtcacaaaactacggggcatgttaaatacgaactgcatcaactacatcctcatatacttcctctcacgctacctaccgtctcattttctacctagacaaccttcttccatctcatataacctcatatccaaagctaataatacatcatataaccaacatgattaacgaccttcaccaaccccatcacctttcactcacccaacctttactccaacataacccatacatatc

SEQ ID NO: 115156 - DNA, 2547 bp, Zea mays
  Clone ID: MRT4577_36503C.1
atgctcgcgaaggacttgctgggcatcaccctcgtacctgagacgacggtgcagtcagtccctgacgtgacttcatcaccgcccgtcgaccaagaggtaccaaccgattcccatctcacgccttttggattcagcctcgacccgccaagcgacttcgctttggtggacgctcttgtagaggcgagtccaaaccctctggggtatcatatgcggtcacccttggaccggctgacggacgtctcgacctacgggccctcggggtccgaggaagatgacgagcccgacttctgttgggatttctccggacttggtaaccccagtgccatgcgggactctatgaccgcgtgtgactactgcctttccgactgttccgacggtagccgcagcctcggcgacgaggactgcggcccaagtcgtgaatgtttccacgttgatctagggggtccctccgaaggcaaccatcttggtatgccggagaacggtgatctccctaggcctgtgcctcgcattgacatcctacgtgagctagctgtggtccccgttccggcggggggtcatgacccacagctcgagcaaatccgcggggtgcaggccaggctcgacgagggagcaggaacacttgagccgattcgccgggacgtcgggcaagaatgggcgggccaacctccggccagagaagtgcgtcatctaccccagggtatccagcaccgcatcgccgacgatgtcagggtaaggccgccacccacttccagtggagtcggccagaacctggctgcagcgacaatgcttcttcgcgtgatgccggagccgtcaaccaccgaggggcggcgaattcagggagagctcaagaatcttctggaggacgccgcggtccgatgggccgaaagctccgcctcccgaaggcaggggtacccctcggaacatcgcgccgcgacttcccgattcacgcgggaaacctcggtccacaccgggcgcacgcgcaacacagcgcctgcggccccgggtcgcctcggcaacgagcaccatcgccacaaccgtcgggcccacctcgacgagagggtgcgccgaggctaccaccccaggcgtgggggacgctacgacagcggggaggatcagagtccctcgcccgaaccacccggtccgcaggctttcagccgcgccatacgacgggcgccgttcccgacccggttccgaaccccgactactatcaccaagtactcgggggagatgagaccagaattgtggctcgcggactaccggctggcctgccaactgggtggaacggacgatgacaacctcatcatccgcaacctccccctgttcctctccgacatcgctcgcgcctggttggagcacctgcctccggggcagatctccaactgggacgacctgccgggagagtctctccgggactacatccggcgattctcgaagcagcgcattgagctgcccaacatcaccgattcagatgtcatcggcacgttcctcgttggcaccacctgccacgatctggtgagcaagctgggtcgcaagacccccaccagggcgagcgagctgatggacatcgccaccaagttcgcctctggccaggaggcggttgaggctatcttccggaaggacaagcagccccagggccgcccaccgaaagatgcccccgtggcgtcaactcagcgcggcgccaagaagaaaggtaagaagaagtcgcaagcgaaacgcgacgccgccgacgcggaccttgtcgccgccgccgagtacaagaaccctcggaaaccccccgaaggtgccaacctcttcgacaagatgctcaaggagccatgcccctatcatcaggggcccgtcaagcacacccttgaggagtgtgccatgcttcggcgccactttcacaaggccgggccgcccgcggagggtggtagggctcgcgacgacgataagaaggaagatcaccaggcaggagagttccccgaggtccgcgactgcttcatgatctacggtgggcaagcggcgaacacctcggctcggcaccgcaagcaagagcgtcgggaggtctgttcggtaaaggtggcggcgccagtctacctagactggtccgacaagcccatcaccttcgaccaagccgaccaccccgaccgcgtgccgagcccggggaaatacccgctcattgttgaccccgtcatcggcgacgtcaggctcaccaaggtcctcatggacggaggcagcagcctcaacatcatctacgccgagaccctcgggctcctgcatgttgatctgtcctcgctcaagatgccgggccccaacggggtcatcaccatcggccccacgtaccgacacgcgttcgaatgcgacatggagtgcgtggagtacgccgaggccctcaccgaatccgaggccctcatcgccgacctggagagcctctctaaggaggagccagacgtgaagcgccacgccggcaacttcgagccagcggagacggttaagtctgtccccctcgaccccgacaacgatgcctccaagcagatccggatcggctccgagctcgatcccaaatag

SEQ ID NO: 115157 - DNA, 691 bp, Zea mays
  Clone ID: MRT4577_36504C.1
cattgggtacctcgaggccggccgggacccgccatctatggccgcctccaccacgcgctcgccggcggcggttgaccggcacgcggtacggctgatcacgcgcgtctccatagcgatggccgccgtcgccacgctctcactcttatacctcttgcgccacgcatccatctactgttctcccgcgtcccaccagcctgccctcaccatctcgctcgcctcattcccccgcacctcctgcgacgccgcctcgcgccgagtggtcccgcccgaccaccgcctcgctaagctccgcgcctccccgcgctggagacgccgtgccgcctccctggccacgtccgccttcccgccgctccgcggcctcggcatcctcgcgaccccttcgcgcgtcctctgcctcgccgccggcgccggacacgccgtcgacgcgttccgcgcagcggggaccagagacgccacagggatcgatctcgtcgacttcccgccgctcgtccgccgcgcggatccccaccacctgccgttctccgacggcgccttcgacctcgtgttctcggatgacccctcggcgacctccggcgcgctcttcccgtcccgcctcgcgcgagaggctgagcgcgccgtccgccgcggtggcggcatcgcgcttgcgttcgaccgggagatcgagaccgccgtcgtcggcacactattcaag

SEQ ID NO: 115158 - DNA, 175 bp, Zea mays
  Clone ID: MRT4577_36505C.1
cggacgcgtggggaaaaaatagactatgataccataactgaaaaacggtgttgagtgtgatcttgcaacatcctgtatgtagccaactgtcactcttacatgaatcttaataaggacatgcctagcgcagtggtaagaagtctttccacagagccaaaggtcctgaatttggcgt

SEQ ID NO: 115159 - DNA, 474 bp, Zea mays
  unsure (1)..(474): unsure at all n locations
  Clone ID: MRT4577_36506C.1
aagaaatctaaaagagggcaccaccaatgatgggttatagttcaataataaagttttttgtctgatgttagtggcttcccagaaataataaagtccatttctaanaaaaaaaaaaaaaaaaaaaaaaaaaaaaaaaaaaattataattaaaggaaaaaaggaaaaaaaaaaaaaaaaaaaaaaaaaaaaaaacaaataaaaaaaaaaaaaaaaaataaaaaataaggggcgcccgtttaaaaaaatcaaacttaactaacccgtgaatgaaaagnaaaagctttttaaaagggcaaccaaaattaaattaactgcccgccttttaaaaacgtgggaacggaaaaaacccggggttaaccaaattaaatcccctggaaaaaaatccccttttcgccaattgggaaaaaacaaaaaaggccccaacaaatcccctttccaaaaagttgcccaccctaaatggaaaagggaaccccc

SEQ ID NO: 115160 - DNA, 814 bp, Zea mays
  unsure (1)..(814): unsure at all n locations
  Clone ID: MRT4577_36507C.1
aatatctcagaacagagggagacgcacaaggacacacgcaacgagccaggactgacgactgcgtctctcctccttcttctccttctccgcctccgctcatcttccaccaccactgtctcttctcttgttccttgcacgcctctttggtctccgtgcgcgtgttaggcggagaagcgcgatgatgaaggcgggggagcggcccaactcgaagctgctccgcggcggccggcaggattcgcgccggttccggctgctggccgtcgtcgtcggcttctccatcgtctccctcaccttcgtcctcgtctccaagcccgacgccatcctcttcggcctgaacggcaggctgccggcggagcaggcgccggcgtccatcccgatccagcagaaggtcaacacgcccgcccagaagacctccaccgacgccgtcatcggtggagaccccaaagtggtcgacgatgaaacctatgtaaagccaaaagagatgagaggcggcgaggaggaggaccatcaggtgctgagcgagccggacccggccagcgggatggcggagccggccgccaacaaggacggcgacgcccgtaagtcgaccgaggagacgttaggtggggagaggaaagacgtggaggaggagggggangcggaggaggagaagcacgccaaggtcacgctcccgaccgtctccaattacaccattcatgacgccgaggacgccgagaatgccaagcaagaaggctcgagcttgagcaccaacgtccagnagcagcaggggagcaagccgctgtgcgacttctcaacttccgggcgaacgtgtgcg

SEQ ID NO: 115161 - DNA, 324 bp, Zea mays
  Clone ID: MRT4577_36508C.1
atagtaatgattaacaaaaaagccaacatagccattgggagagacgaacaaaaaatgtgtagctacatattgtacacacatcacacagggggcaagagagagaaagagagattaaagaccgaagacggatgaaaagtacaagctggtgtcaaccatgacaaaattgtgaccgggcactgtgcagggacaaatctactgaatcacacactcgcatttcttgaagccgccattctccccctcgtcgtccgacaaaccttcgtcgcttgtttcaaattctctgatctcaaaaagttctttcccgcacgtgtcaatccagtgaacttt

SEQ ID NO: 115162 - DNA, 393 bp, Zea mays
  Clone ID: MRT4577_36509C.1
cacgcgacgcgtgggcgtagcaaaggtattcttttatttgctactgcccaccggggtgcgtgcagcatctaccgaagacgtgcatacttcaatgcactccaggacgttcctcacttgcctgggacccaaaccctagaggctcgccgctgaactgcgtttggaaagcatgtggaggcagcacgtatgtcgcgtttatctcaacggtgacaggcgaagcatggtcgtggaggacgagcggagccctgtgccgcacggcacgatacgagcaaatgttcaaggcgaggaaccgacgggtaccctcaagcagaccgggcagaggacccctaccacaacagcttttatgcgccgggggcccagccgaggttaggtcaacaagggctttcgttgactcga

SEQ ID NO: 115163 - DNA, 2530 bp, Zea mays
  Clone ID: MRT4577_36510C.1
gccgggccgggatacctttctcggccttttggctaagatcaagtgtagtatctgttcttatcagtttaatatctgatatgtggactatgtgtccactttgatattaaatttattctttgtgggagagagtctaaaaaaaaaaaaactgtgtatcgcggaattttttgggttctcgggctccgccgcgatcccatccccatccccgccttgccgttgccgttgccggcccccccggttctcccggagctttctttctggccggcgcagtagagaagcaagacagaattgcggcggcgcctgcccgcgcaaaggaaataatcagcactgtttgccaaaggcagctcctgacgcatggctagtacttaaggatactttatgtgcagaccatgaagatagatgacgaaaggccttaccaaactcatatttttcatgatcttgcatctaacggcagtcctaaattagactgtgaggctgaaagacaaagtaatcacaaggttgaggcagataaaatggttgagcaaaccaatcaatctgaagttagctttgtgaaggctgagcatctgaatggaggtaaaattcggaagacacgcattgaggattactcctatgacaaggatgttgtagagatcaaactgccagacacagatctttcttctgattacggtgtccattttgtcaaggatgtctgcattgatgaaggagttcttccagatcaaaagatttcatcagaaaagcaagtagaccaaaaggtgtctataaactttgattcctcggaatatacaaacggggacctaagggaagatataagtgctgactctacaaaaactgcacatgaattaaaatcagaaatagttgtcctacctgtcctgtgtgatactcataacaataatactgtggaacagaactcctcatgcaaaaagcaggatcttgaagataacaatactacagatgtatctaccgattctcacgatgagggattaaatcccaaacaattaccatttcatgaagttgcacaagattaccaggaggttgacagtgtcattccggagagcaatgaaaatcaggaccggcttttcactggagatgcaacccatcaggtttcatcgaatgattgttatgaagctggaattggtatcgcgtcagaggccagtaacatcattcacaatgatttaccagaagaatcagccgctgctgatttcccggtggtgatacctgaggaagttgctgtcactgctgcattgggtatggaaggatccaaccaagttaatcactataacccttttattgcctatggatcgctagacgagacatgggaacccaatctctctctcgctactactgtggatgccgcttctatagcacccatctgtcctgtcgaaaagacagatagttttagtgatcttgtcaacaggccactggaaggatttgatcctattgaactagacgaagctataattgaagagaacaggtcagattcagttgaagaaagctcaagcacattggacgtgcaagcatctgaacaacgcgatgatcagagagagagtctcactaataatgacgtgaaaactgatgcagcacatgaaacgggcaccgctatatctctatccaccagcaatggagagcacagtggcgtcaagggtgagaaatgtcagaaacatgagactgatggtcgagatacagatgatttcaacccaagagatgtggagcctggcacaaaagtaagcgaggacacaacggatgttaagagctcagctcatgtgcagacagaatctgtggttcaacaaaacggacctgatagcgcgaaagtgactactgcacagactgttattcgcaaccccttcgagtccagcttctctggacctagcattacgtcaggtcctctaacgccctctggtcacataccatattctggcaacatttctcttcgatcagagagcagcacaacgagtactcgatccttcgcgtttccagtactacagaacgagtggaacagcagccccgtgaagatggccaaggccgaccgcaggcgtcagaaggaagaccgaggctggggttacagaatcctttgctgtaaattctgaatggcgcttgcctcccctgcatcctttttgcctgtcgagttgagcccttcgtctctgtcatgcttgagccccgtggaggtccatgttaaattcattcatcaaatgtttctctcctctcctctcctcttgtctttctgctcccctgctgttcttatttatctctagcaggttaatggcttgtcggattcggtagtggcttgtaatttacagaacactatgaagagtgaggactcaagtcatagctttggtatagaatttgcggatacttgttcgagtattattccggatgaatgaacatccattcatgtggggtgaatggcggccatttgagccgtgagcccgtgatacaggcatatgcagtaaaatggtgcgcatacatgtaaatcactgaaactattacaagcaaataagcacatctgcgacctgatactaaagcagatgtatatact

SEQ ID NO: 115164 - DNA, 209 bp, Zea mays
  Clone ID: MRT4577_36511C.1
ggaccgtggggcgaagcaggtggttgtggttgacaagcatagcagccagggcaggtagacgaagggaacagagagatcagagatggcggatgcgcacgccgaggccatggatgggagcacctgggaagacatgatgctgacgatgcttcacccgtgcactcccatccccgaggcgccgcccaacctcgactactccatcgccctctagt

SEQ ID NO: 115165 - DNA, 666 bp, Zea mays
  Clone ID: MRT4577_36512C.1
gtgcggcgctcgggccggccgtccggggagatctccacatcctagtagccgtccgcgcaaaaccctccctgctcagactcgtctgctgcagctcctcctccgccgccgtaccaaacgcactctcctccgccgccgcccgaggcaagatggttctccagaacgacatcgaccttctcaacccgccggcagagctcgagaagctcaagcacaagaagaagcgcctcgtccagtcccccaactccttcttcatggatgtcaagtgccagggatgcttcagcataaccacggttttcagccactcccagactgttgttgtgtgcccaggctgccaaactgttctctgccagcccacgggaggaaaggcgaggctcacggagggctgctctttccgccggaagggagactagagcgagtctgttattagtactggatcggttgtcaatctccagtatgtggtcttcaagtttttgctctgtgcccagacgttaaggtcatgaactaccttagctaaggctttccgcatgttgttctattgctgctatgtatctcacgttggttattgctgaacttatagcttgtttggttcggattatgataaaccaaatggatatttgaattatattatggggcacttattctcaaaaaaaaaaaaaaaaaaggccccta

SEQ ID NO: 115166 - DNA, 789 bp, Zea mays
  unsure (1)..(789): unsure at all n locations
  Clone ID: MRT4577_36513C.1
accttcacttgttcttccacatcgacacaacacaaaccgtattcaaccaattcaacttcctcgcttgttatcatgggacttggcgataccatgaagtcggttctccacagcgacacttcgtcggcgcgtcggtcttctcgtgtttctgacaccaacgtcgacggtagtcccaacgttacccacaacgcctccgctcttggtaccgacaccaaccgctcttccaagctgccctccggtacaggaatcggtacttccggaaggcctgctgccgtgagcgagagccagatggagcgcgaccgtctcaagcagagtggccagaacgctgccgggtacgggacagatgctgctgctgccgtcggcggcgacctttcatccactcattccggcgcacgtactggtactggccagactgctggaggtttgggcaacaatcgggagttcaatgggaacgacatcaaagttggcccaactgtcctcactgaccctagctcggagtccgggcagcctatgggcggctctagggttccgcagggcacttccaacgtagcatccagtggaactggtgctcaggccgggcacttgggtgcgactcatgttttcggaccacaggcgtaaagaagttgcttgatattcatcgcggctcatgtctgactgtcgatgatagtactcgacaatctccacgattcgggacataccaagcgcgacgttatgccttctggcatactactgagctgactagccagntgaatcctgtcacgcacgagcatgtgcgccaccttgaaactgaga

SEQ ID NO: 115167 - DNA, 202 bp, Zea mays
  Clone ID: MRT4577_36514C.1
cgacgccaatccttatgtgcttgattgacaaaactttggtaagtgtctgactaggaagccgatagctgacacaacacttgcgtgaggagaagcctcgtgactctctacagtatcactcatccgagggactgggccctcgtatagtccactgagcttccctctgtgaggaggcgccaaccagggtgcgtccataccttacgtg

SEQ ID NO: 115168 - DNA, 1035 bp, Zea mays
  Clone ID: MRT4577_36515C.1
gtagattctccaatcctagtagccgtccgcgcaaaaccctccctgctcagactcgtctgctgcagctcctcctccgccgccgtatcaaacgcactctcctccgccgccgcccgaggcaagatggttctccagaacgacatcgaccttctgaacccgccggcagagctcgagaaactcaagcacaagaagaagcgcctcgtccaatcccccaactccttcttcatggatgtcaagtgccagggatgcttcagcataaccacggttttcagccactcccagactgttgttgtgtgcccaggctgccaaactgttctctgccagcccacgggaggaaaggcgaggctcacggagggatgctctttccgccggaagggagactagagtggagtctgttattagtactggatcggttgtcaatctccagtatgtggattcaaattttgctctgtgcccagacgttaaggtcatgaactaccttagctaaggctttccgcatgttgttctggtgctgctatgtatcgcacgttggttattgctgaacttatagcttgtttggttcggattatgataaaccaaatggatatttgaattaaaaaaaaaaaaaaaaaaaaaaaaaaaaaaaaaaaaaaaaaaaaaaaaaaaaaaaaaaaaaaaaaaaaaaaaaaaaaaaaattaaaaaaaatttaaaaaaaaaaaaaaaaaaaaaaaaaaagttccttcccgggggggcctttaaaaggggaaattcccaccccctggggggcggttataagggatcccaacctgggccccaatttggggaaaaaaagggcaaaactttttcccggggaaaaattttttcccctcaaaattccccccaaaaataaaacccgaagctaaaaagggaaaacccggggggcccaaaggggggcccaacccccattaattggggtggccctcacggccctttttcaagtgggaaaccttgtcggcccatttgatttaagaattggcccaccccccgggaaaaggggtttgggttttggggcctttttc

SEQ ID NO: 115169 - DNA, 1766 bp, Zea mays
  unsure (1)..(1766): unsure at all n locations
  Clone ID: MRT4577_36516C.1
ccggccggggccgccgcgacctttcctcgtcaggcttgcagcgttgttgcaggctccgcctccgatggcgctctcgcgcctctcccaccgcctcctgagcccaacggctgtcgccgccgcgcacttccccatacctaaaacattcacccatggccgcgaccccttcatcctcctgaatcccggccgccgcttcttctccgcgccctcaaaccccagccccaacccctcctccacgacatcagagcccagccaaggcgccccatccgcgcccgcgtcgccggatgagatgcggcaccaggagatcgagggccccacggtggagcgcgatacgtcgccgctggccgacgagacgcggcgggagctcgacgcgctccgccgcaccgtgcagcgcctcagcggctcgctcgcgctcctcggaggagcgcacctcgccgccggcgcgtggatatcttacggtgctccgcctctcggtgtcggatccgccgcggcagtgcagggagtggcggcgttcgcgttccccttcgcggtcgccctggtgctacgccgcgccatcaagcccatcgccttcttccagaagatggaggccaacgcgaggctgcaggtgctcacgttgtgcctccaggctacgaagaacgttaacctcatgctgctccggacacgggtgatggccatctcttgcgctctgggagtgtctgtcgcgtcagttgctgcggtgtttattagatgattttaagttcagacctctgccggaaggatacttagttttcagtatcaaaaggaataaaaatgcactgctaataggcaagtagacttcgaactaaagatattttggtgcttttggatgttggattatgcttagttttggtgattgtacacgggagaggggagattaaaatatgattgttcgagacatttctattacaatgatattaatcttcagcttgtagaaccaattggtaaaatgtagtatcttccttttaaatgaaccagctccataccgatatcctgtttgttaataaattggctacaacmancargctgcagctcctcctccgccgccgtatcaaacgcactctcctccgccgccgcccgaggcaagatggttctccagaacgacatcgaccttctcaacccgccggcagagctcgagaagctcaagcacaagaagaagcgcctcgtccagtcccccaactccttcttcatggatgtcaagtgccagggatgcttcagcataaccactgttttcagccactcccagactgttgttgtgtgcccaggctgccaaactgttctctgccagcccacgggaggaaaggcgaggctcacggagggatgctctttccgccggaagggagactagagctgagtctgttattagtactggatcggttgtcaatctccagtatgtggtcttcaagttttgctctgtgccccagacgttagggtcatgaactaccttagctaaggctttccgcatgttgttctggtgctgctatgtatcgcacgttggttattgctgaacttatagcttgtttggttcggattatgataaaccaaatggatatttgaattaaaaaaaaatctcgctccgttgctcgcctcgggtcaaaccctaagcagggagttgatttatccgctgcagccatgagtaagttgcagtctgagtctgtcaaggatgccatctcccagattgttggggatgccaaggaaaagaataggaagttcactgagactgtggaacttcagattggtctgaagaatatgat

SEQ ID NO: 115170 - DNA, 810 bp, Zea mays
  Clone ID: MRT4577_36517C.1
atgcatcgtgcccttccgccttccgagcccccggatggggagcgcccacgttgctttcgtcttgctgctgttggaggagcgcaacttcgtggaggttggcacctttcagccattgctcggcttcaaggattttcatcaggcagcccggctgcatcccctcaccaatggttacccaagacggtgaccaccagttcgatggtggggagaagcaagtcgggctgtagcctctgccccgccctcagcttcaaggatcttcatcatccttgctggggaggagggcgaggcgagccggggactgccttcgcatgggctggcgtcccgcttcttcctccggcatctgggggtggaaaccatcctccagctctgcggaggaggcgtcctccagccatgccggggaaggcgaactgctgctgcccagccagggtgcagcattccgtcctctgtccgggcgacggtggctaccgcaccagggggtctcacaacacgtcgtacgccgcgagggcggtactcgtgttttgggacggtcccattctcgttttcgtggcgaggacgggagtgaggacctgctggtgcgatttagggcagccggcgctcgctggtgtggtgttggtgggcaggtggacgccgccgtcggtgctgaggtggtggcagctggagaaagcttttctgccgatgagaccgttagtgccacccgcggaccgactctggctctttggctttaatatctggttctcgtcctccgcgaggggacgcgaacgggagccttccagcggtagcgtccgccccaggaccatcgctgctgctgcatag

SEQ ID NO: 115171 - DNA, 457 bp, Zea mays
  Clone ID: MRT4577_36518C.1
ggaaatggaatgtattgtattttgacaaaaccatgtactttgttccgtgcttcttggccggagccatattcttaggttgatgagaactattggaatgatggatcctcttttccttgtttgttttgatcaggaggataggttcgcgccttgtggtgtcgaacaagaagcacctaagctggggcgtgctccaagggccccctcctcaccatggatgcccttttcgatgctttttgctgctatttccacgaaagtgcctcgttcggacatggagttggtcatcagatactatgaagaattcaaggttgtaggtgtccttttcctctcttttgaggtctccgtctgaatgcgttcagcgatatgcatgctaaccatgtttggtggacttcttgattttgaaacagaggaagaggatgagccggagcgatctggtggtacggatgatgcaagtagtcggtga

SEQ ID NO: 115172 - DNA, 483 bp, Zea mays
  Clone ID: MRT4577_36519C.1
tttttgcaataaaacttgcttcgaaatctccatacttgttataatacaagcagccagcatacagtgtagagatccctataaatagatcatgaaattcaatgcacatcatcttcaaactatattgatatctaattaagttttcctatagcctcaaactttcagcctcatagataattacaatcatgtctccccccatctttaaagtactcacactgatcatatctgtttttgccatcttgcaaatatcaacagctggtgacccagatattctcactgacttcatagtcccacccaacaccatacctaatggcaacttcttcaccttcactggcttccgtgccattttttcacccaacaacattgtctcagctttcaaagtgttgaaggcaaccaaggtagaatttccagccctcgaggacaaagtgtctcatatgcaatccttgagttcccaggtggcagcatcaacccaccacacacacaccc

SEQ ID NO: 115173 - DNA, 615 bp, Zea mays
  Clone ID: MRT4577_3651C.1
taggcacttagcaacattttcaccgctcctaatactgttatgcacaacatcactttccaagtcatcgtagggatcccaatttgtctggaatacttttacatgattcatgttgaacaacccaacttgctttagtatggcctccacttcaccaaccgatggtgaatacattggtaaatagaatgattcaagtttttccttctccacaagaccctcatcaactagggatttcagtgactgcgcaagcaatccgtaaagatggttagactctccagtgaacacattctcatgcttccttccaataaatgttagaaccatttggccaccggacacgagttcctcgtagcgtagcctgaggaagagggagaaatccttctgaaactgttgttgaaacaacttcaccatcgacggtgacatagtctttgtgatgtagatatctaggcatgttttttttgttgtttgtgtcactagtgtattgaattacatatggtgtttttgttgttttatttatcacttctcctgtattcctatattttatatgtctaagtttttaaggtgatttcatgcaacccttgtacaagcaattgatacaaataaattgcaccttttatgatcaaa

SEQ ID NO: 115174 - DNA, 500 bp, Zea mays
  unsure (1)..(500): unsure at all n locations
  Clone ID: MRT4577_36520C.1
cccacgcgtccgcagcagtacttctcaaataccatatnnctcggctcttgctatcctgttgatgagtgctcatttccgtctgcttgtgaagatattggggtcatgcagtatcatgtatgttgaggcttgctgctcacataatggactgctatcatatgtattgatacctgttanntgtctgagggttgaaagaattgtgtgtcttcatgaacatgaagcgctacatgtattattcgaacatccatgattgatggatgctgcaccatgattcatcggccaactatattgcttgtatatagaattagtagcctattctctctacgtgttacttgatggctgcatttcatgtgccctatgaatggcctcaacataacagtntctttatngacctgatgctgggaatatcgcttcgcatataggggcttgtttatatcatttgtgcagaaacttcacatttatgtcccatgtggttggccttactgtttgaatacttgacataa

SEQ ID NO: 115175 - DNA, 164 bp, Zea mays
  Clone ID: MRT4577_36521C.1
ggaacaagagcgtttgctcagaagacagacaggtcacctgggtccacccgaacgggggaaaagttatcaatggcgaagcggaatacattaaaaaaaaacgggggccgctacatgagggacctgcgtacagcgaggagggttccgtgcaaagaccttgccaaatg

SEQ ID NO: 115176 - DNA, 1011 bp, Zea mays
  Clone ID: MRT4577_36522C.1
gggtacctcgaggccggccgggccgggtattctggtgtcctaggcgtagaggaaccacaccaatccatcccgaatttggtggttaaactctactgcggtgacgatactgtaggggaggtcctgcggcaaaatagctcgatgccagaatagtgagctagcctcccgagccctatctatccttttctcggcacctcgcgggtctcccgtccgccccgtcccgcattcgtatcctctcctcactctcgccgccgccgcttcccctgcgccccgagccaagatgaatgttgaaaagctcaagaagatggcaggtgctgtgcgcactggggggaagggtagcatgcgcagaaagaagaaggcagtccacaagactacgaccacagatgataaaaggcttcagagcaccctgaaaagaataggagtgaacaccattcctggtattgaagaggtcaacatctttaaggatgatgttgttattcagtttgtgaatcctaaagtgcaagcttcaattggtgctaatacatgggtggtcagtggaactccacagacaaagaagctgcaagatctgcttccatcgattatcaaccagctcgggccctgacaacctagacaacctgcggaggcttgcggagcaattccagaagcaggcccctggtgcttcaggtgcagaggctggcgccagcgctggtgctgctcaggacgatgacgatgacgttcctgagctcgtccctggagagacatttgaggaggctgcggaagagaaaaaggagtcatcatgattttgccacatgcccgcccttgtgaagggcttataagtaaagccttgcgtagaagggacctgttgagaactctgacctgccttatttgtgcctgcgtacggttatgtcatgaacgagaatttggtagtccagcactgatgggattttagtttacatgaagtttgccccccctttttttcacaaaaaaaaaaaaaaataggtcggccaagtcttgttaatgttaaaggccacactt

SEQ ID NO: 115177 - DNA, 1166 bp, Zea mays
  Clone ID: MRT4577_36523C.1
acccgttcatacaaatcagacggcctagaatccctcagggctaaaaccctaaactagaaatgtgttcgcagtgggcagtggccggcagccagtgagctagcctcccgagccctatctatccttttctcggcacctcgcgggtctcccgtccgccccgtcccgcattcgtatcctctcctcactctcgccgccgccgcttcccctgcgccccgagccaagatgaatgttgaaaagctcaagaagatggcaggtgctgtgcgcactggggggaagggtagcatgcgcaggaagaagaaggcagtccacaagactacgaccacagatgataaaaggcttcagagcaccctgaaaagaataggagtgaacaccattcctggtattgaagaggtcaacatctttaaggatgatgttgttattcagtttgtgaatcctaaagtgcaagcttcaattggtgctaatacatgggtggtcagtggaactccacagacaaagaagctgcaagatctgcttccgtccattatcaaccagctcggccctgacaacctagacaacctgcggaggcttgcggagcaattccagaagcaggcccctggtgcttcaggtgcagaggctggcgccagcgctggtgctgctcaggacgatgacgatgacgttcctgagctcgtccctggagagacatttgaggaggctgcggaagagaaaaaggagtcgtcatgattttgccacatgcccgcccttttgaagggcttataagtaaatccttgcgtagaagggacatgttgaactctgacctaccttatttgtgcctgcttacggttatgtcatgaacgagaatttggtagtccagcgctggtatttagccccctttttcacccatatccccgtgcttgtgtggtaaaagtcttgttaatgttaaaggccacacttaaaccaaatcaaggtaccatgtctccggtaccatgcttcacgaagatgaataccagatgtcagttcacctgccaaaaaaaaaaaaaaaaaaaaaaaaaaaaaaaaaaaaaaaaaaaaaaaaaaaaaaaaaaaaaaaaaaaggagaaaaaaaaaaaaaaaaaaaaaaaaaaaaaaaaaaaaaaaaaaaaaaaaaaaaaaaaaaaaaaaaagaaacaaaaaataaaataaaaggggggggg

SEQ ID NO: 115178 - DNA, 416 bp, Zea mays
  Clone ID: MRT4577_36524C.1
ctttgggctgatttatgtgcttggaaagacccacctacgctgggccctgcccccacaactaatctagtccgcgctcgtactcggggcagttcgagtcctcgaccagccaccaacccaccctagcttgccggactccgtgcttcggcacagctcgcgaaaggccctgatggagacctacccggacccacccaacagctcggacgacaaaaaaaatacaagataaaaaaaaaagggtggttgtctcagaggacttaagtccatgcatgtgcgtacgtgatgctacagtctcctcacagcgctattcaaacctaacctatcggttgctgccccataatgctgcgatcgggaaaatttcggtgccatttaatccaactgttccgtagtatactttttccctgttagtcgggtgcacagtg

SEQ ID NO: 115179 - DNA, 574 bp, Zea mays
  Clone ID: MRT4577_36525C.1
ccggtgggtgcagtccgtggtgcgggaggagtggaccgccgaggtgttcgacgtcgagctggtgcgcctgggcgccagcgccgaggaggagatggtggcgctgctgcaggtggccatggcgtgcgtggccacggtaccggacgcgcggctggacgcccccgacgtggtccggatgatcgaggagatcggcggcggccggacggcgacggcgacggcgacggcaacggaggaggagagcgagggcgtaaggggcacgtccgaagaggagccgtcgcggtcgggaggcacgccgccagccgccccgacgccgtgacgcggctagcagcagggtaaaggtgtttggcctgattaaattgcataggttcgtgatgatgcctgtatgccggcattggacagcgtggtattatgtttcttctttgtttttcttttttcttttttttttgtctttccaggtcattgttttgttggatcaatttttctttttttgccccttctcggcctctctctctctctctctctttctctctctttttcaggcttcattaatccaagaaaaaaagtgtattttttcttc

SEQ ID NO: 115180 - DNA, 405 bp, Zea mays
  Clone ID: MRT4577_36526C.1
gtggtggcctgcgtcgtttctacttcgcggaggggccggccagcagcagcagggcgggggcggacgggtacaagtgcgtgctcaactccaaggcgtccgaggacgcgcaggccaacctggcgcggtgggagcccgcgcacggccgcttcggattccgccacccctacggacagtacgccagggtgggcgcggcgatgcgcgcgtgcgcctactgcgtggaggccctgtgcagctgtgcgggcgccgaggcgcaggctcccccgtacgtgaagcggatcctacgagacacgtgcgccacggtggctgtgcggtgcgcgcgggtgctcggtgaggcgtggcgctccgtcgccaccatgtccacgtcctgctcccgggccctggacttagcggcggcggacatgaaca

SEQ ID NO: 115181 - DNA, 847 bp, Zea mays
  Clone ID: MRT4577_36527C.1
cggccgggccgggatccacccatctctttacgcggccggcccgcctaactctcaccttgccgctgcgggacgcttgctccgccccgaagcttcccttccccgatcctccgccgcggctgtttccgtcgccggtcaagatgatgtccggcggtggctactccgccctcgacgatcccaaggcctccggatccgtcccggcggcgacggggccagatccgcagaccatcaagttcactgagtccaacctccagaccttcccaccctcagaagccaagggcaagatctctggcgcctaccgcccgcccactgactccgacgacaccttctcgtccaaggttggagggggcggcggaggcaggggtagcgatggtgggtcggacgatgccgcgcagggcggctggttccggatgttctccgtagctgcctacaagccctacttcgacgttgacacgtccgatgtcgtggagaggatctgggagtcggtcttccccttccgcggcaacttcaccgagaagacttccgacaaacccgacctgtatgggccattctggacatgcaccaccctgatttttgttgctgcttccattgccacgtttgtcacctacctttcccacaaatggcacaagaaagagtggacctatgatattaacctggttacatggtctgctggcttattctatggctatgtgacatttgttccccttgggttatatgtcattcttaagtacttctcagcacctgctggactcgtgcaattgtggtgcctatatgggtactctttgttcatcttcattccagcctcgctactgtcaatcgtgccaatagaaatattcagatgggttatggc

SEQ ID NO: 115182 - DNA, 139 bp, Zea mays
  Clone ID: MRT4577_36528C.1
tcgctctaaccttctgccattccaaaagaacgagaagggttccttttgatccgcggtggggccaccaacaccgcacttagcgtcgatctttcccaataggagcaaatattcctagaacatctcgggaacgccaagttta

SEQ ID NO: 115183 - DNA, 267 bp, Zea mays
  Clone ID: MRT4577_36529C.1
ttttgctctaatgtatgttcatgcttcagtttggaaagagaaaaaagtcatactaatttgaatctttttcaatgtagtgcttgaattgagatatataaatttagcattttttataactatcactactatccacatcaagagaagaactatgacatcttttagaaaagggaacgaattgtcatttattggaaacattttagatccccagaggtataagtttcagaccagtctttagtgtttcaagttgttgatcagacccttctctta

SEQ ID NO: 115184 - DNA, 643 bp, Zea mays
  Clone ID: MRT4577_3652C.1
cctcgaggcggcgggaaaatttccttgataatattttgacatcgtcttgacgaggtgacaaaggtttgtctcggcgggcccgcctgctgcactggccgccgcctgcgctgtctcttgcaaggcctttgccctttccctgatcgccactgctcctgcgccatcacccatgaccagctcaatgcaccttgccagctccgcccctgtcagcacgccatcggcgtctcgctctcctctgacgccgaccccccactcttcctcgaccaagtacatgttcgtcggctggtcgaacatgttgggcacaccgacgatgggcacgccggacgccatggcctccgtcgccgagttccacccgcaatgcgagacgaagcagccgaccgccgggtgcgacagcacctccagctggtcgcaccagtccacgaccatcccctgcatctcggtgtcgttctccaggccatggatgccgccttcgtcgtcgtcgaccccgtccctgcgcacgaccagcaagtacggccgcccgcactggcgcaaccctccggcgatctcctgcatctgccgcttggcgagcttcgtgacgctcccgaacgacgcgtacaccaccgagccgtccgggtgagcgtgaagccactccgggtacctcttcttg

SEQ ID NO: 115185 - DNA, 558 bp, Zea mays
  Clone ID: MRT4577_36530C.1
acttacataagactgggactgctgactcgtagtttgcttcttcctctgctctttcaactgccaaacagagcgccatcagcgtacgcaagaagcatagctccctcggccaccgtcgatggagcgcgacgacggcgcaagagctggcggtgtgcggcaaggagccgccgcgacacacgaggtggcgcacggacaacaccaagacctgaggccgctgatgagatgccgtggccgtccgtctcatcgatcgtagacggctgaatacggatcgacgccgacgacgacccgaggagctccggacggctctccacaactgcggcctcttcctggcgaccgaccatggagtctacgtctctctcatgaatgccgtgacctccgaggctggctgagccgtgctcatcactgactcagacaatgatgaatgtgacgatcggatatacgacgatggccagacctctgaggacgaccgccttgctttcactcttggagtgaccagatgatctgcctgctgcaacaacatggatgtcaccactcctaagtactcaaaggatcgttatgagg

SEQ ID NO: 115186 - DNA, 334 bp, Zea mays
  Clone ID: MRT4577_36531C.1
ttttcagttcacccaacgaacggaagcggtccaggggatgatgtttggtcatgcaccacgccacagagaaaccatgggcccaaaaggccatgaacacggccccatgcacggacacagactcatcaggctgagcaactagcgatcatctgtgctgaccgcacaatggagaactcatacgcctggaagccggcggggactcacttattatggttacggccccacgccatgctggcttgatgctgtgatatccatggcctgcgggcgaaggcatgagcacatgccggggtcacgcttgtagctgccacctgagctgaatccgtgggcggtcacaacg

SEQ ID NO: 115187 - DNA, 279 bp, Zea mays
  Clone ID: MRT4577_36532C.1
aaccaaaaggaggggcagggtttattccgttcacaagtagcatcagcagggatttgggtagcgggggcgggccggttttagttacggaatataccggacacgtgggggggaacatcggccggcagggaaggagtactaggacgtggcaccaaacccccaaaaaataagcccagggcccgcacaagggacacgtgggcacttgggcggctccgccttccccttcgccttggggggggcttgggtcttgggggggatcccaaggggcttaggctggggtgt

SEQ ID NO: 115188 - DNA, 122 bp, Zea mays
  Clone ID: MRT4577_36534C.1
gttaggcatacatgattcgttatcatttttagcaactatagtcattgcttgtcatgcacatggtacaagaaataggatcgttggggggaggggacactaattgatttataaccaaacacaaa

SEQ ID NO: 115189 - DNA, 396 bp, Zea mays
  unsure (1)..(396): unsure at all n locations
  Clone ID: MRT4577_36535C.1
ttttntttattttttctattaaaaacactgggggggggtaaattttaaattttttttcgtccccatccctcattttaaaaaaaaactgggttaccagggggcccatttttttaaaaagccccccaaaaaaaattttggggaaaaatttaccggcccccgggggggggatctaaccacccgggccttggggaaaacaaaataattttgcacagggggggaaaaaggaaaccccccccctcccaaaaaaacccccctggggggcaaaacctaacggatccccaaattgtgcccacgagggggcgggcacaaccctcaaagtttatgaagagggcaaacaccaacggggcggggggccccaaggcccaaagaccccccccgcgaaagaaagggaaaaca

SEQ ID NO: 115190 - DNA, 262 bp, Zea mays
  Clone ID: MRT4577_36536C.1
gggcgtacaaatcaggtaggcgagatccgagcagaggccagggacgcgccgacacgagccgatagggcgcactggcgatggccgcacgggcgtgactccaccgcgctccccggcggggcggcgcctcgccggtgccggaaccgccgcaccggcctctaggctcctcgtcgcgcggcgtaataaactgtctccgctcgctctccggctccgagatgcgccgaggctgtcgttgctccgggtggaagcctgctccgacgactcc

SEQ ID NO: 115191 - DNA, 102 bp, Zea mays
  Clone ID: MRT4577_36537C.1
gtgactcgatcagttccagcgggccatgacctccatggagtacgccctggcggacgtgttatcggagttctccgcgggcgtgccacgattacatgttctttg

SEQ ID NO: 115192 - DNA, 431 bp, Zea mays
  unsure (1)..(431): unsure at all n locations
  Clone ID: MRT4577_36538C.1
ggcgcncnccaccgccgccaancccacccagccccaccggncccgcgcnncgcggggcaagccggngaaggggcngggccggagcaggggccgcgagcgcgcccagcggagcanggcgggccaggcggcgagcagcacccccgccgaccgcgnccccgacagggagaagcggaagcggaggaaccnccnccnccncggcgccancncgnngcccaccgncggcagggncgnccccaacggcgccttctncgncccggccggcgccgggaacgccggcggcgggaccaacgccaaggacaagcggggcaacgacaccacggcggaggcgnggcncaacacgcacggngccaacgaccgcacgcncgcgcaggggcnccagggngaccccacgnaccgggcggaggagccggacaagacccgggccacccacg

SEQ ID NO: 115193 - DNA, 3149 bp, Zea mays
  Clone ID: MRT4577_36539C.1
ccgctcattcctgctgggactgtcctggaagttcgacaggtgatagacacattgtctgattcgctacagttatgctctatgtctgagttgtcattgcccgagccagttacaaagttgttgcagacctttgcttctgtctttgatactcccgtttcactacccccaagtcgctcctgtgatcactctatacctttagtggacggggctcggcctatgaacatccgaccctatcggatttctcctgcactgaaggacgaagtggagtcccagattacagagatgctgaatactgggttaatctagcacagttctagctccttttcttcgcctgtcctccttgttaaaaagaaggacaattcttggcgtttttgtgttgattaccgccacttgaatgctctcactgtgaaatctaaatacccggtgcctatcatagatgaactcctcgatgaattatttggagcagcatggttttctatccttgatctaagagccggtttccatcaaatcttactgaaagccggtgaagagcacaagacagcttttcaaacccatgtgggacactatgagtttcgtgtcatgccatttggtctcacaggagctccaggcactttccagaaagccacgaatcatactcttgcacccttgttaaggaagtgtgtcctagtattttttgatgatattttggtgtacagtcagacctttgaggaccatattcaacatttaactcaagtatttcagttgttggataaggaacagtggaaggtgaagctctctaagtgctcttttgctcagaacaaggttgcttatttaggccatgtggtcagccctgaaggtgttgctacggaccctgctaagattcaggcaatcacagattggccaacacccaaatgtctcaaggatctgcgcagttttttgggcctagctggctattataggaagttcatcaaacattttgggattatatgccaacccttgacagccttgcttaaaaaaggagtgttgtttatatggacaaatgaccatcagtcggcctttcaaacattgaagcaggcccttgggtctgccctagtcctatcacttcctgatttctcctccccattcactattgaaactgatgccagcgatataggtgtgggagctgtattgatgcaaaaaggtcaccccctcacatttctcagcaaagcattgggacctaagttacgtggtttatcaacttacgaaaaagagtatctggctgttattgtggcagtgcaacagtggcgtgcttacttacaacatggagagtttgtgattctcacagatcacaaaagcttgtctcaacttaatgaacaaaggttacacaccccatggcagcataaggtgttcacaaaactcctcggcctacaatacaaaatccactatcgccagggtactgataaccgagtggcggatgcattgtctcgctgttgtcagtccgacttgcatgctatgtcagtgatcacccccagtggctacaggatgtccaacaaagctacctggatgatgcagagtcccagtcaatgattgccaaacttgctatcaacgccaaggctgtgcccaactttgtatttcagtatggcctgctccgttataaaggacgcatctggattggccaggatccctctcttcagtcccgtatagtgtcagccttacactgtgcggcagtgggagggcactctggtgtgccagtcatatactgccgtgttaagagcttgtttgcttggaaacgactaaaatcctttgttcagacgttcgtcactgagtgccaaacctgtttacaagctaaaccggatagagctgcatatcctgggaaacttcagcctctttcggtgcctgttgtagcttgggatattatatcaatggacttcgtcgaaggactccctcgctcgggcaatgctgactgcatcttggtcatagttgacaagttcaccaaatatggccattttataccactttctcatccctacacagccctgtccgtggcacaatgctttctaaatgaagtctatcgcttgcatgggttcccatcagctataatttcagatcgggatccagtcttcacaagtcaattttggcaacatctattttgcctcagtgccaccgagttgaaactcagttcatcttatcacccacaaacggacggccagaccaaacgtgtaaaccaatgtttggaaacatttctccggtgctttgtcagtgcatgccccaccaagtggaaagcctggatccctacagcggagtactggtacaacactagccctcattctgctcttggtcgctctccctttgaggtcctgtatggcaggaaaccaaggtctttaggcctgtctcttgacatagccattccagccacactgtctgaatggattcaggaacgcacagcaatgcaagccttagtccgtcaacacctcatccgtgcccaggatcgtatgaaaaaacaggccgataagaacagatcagagcgctcctttgtggtgggtgactgggtatatctgaaactacagccctatgttcaatcctcagtgcttccccgtgctcaccagaaactgggtttcaagtatttcggaccatatcaggtgttggctcgtgtgggtgccgtggcatatcgcctccaactttctgattccagccgtattcatccggtgattcatgtatctcagcttaagtttgctgcaggttttaagggtgaagcttctactgctcttccagtatctctacctgagttccgtgtgccggagcaaattctacaaaccagaggtgtcaccaagggcaacagattagtccaacaggttctggttgcctggtctggtcttccacatgatctggctacttgggaggacaaagaggcgctccgccaatgcttcccccgtgctcctgcttggggtcaagcagattttcaagggatcgggagtgtcactaccactggaatgcagggcgatgaacagaacgtgtagcttccaggcgaccgcagccagcgcgcgaggcgtgccaatgtacgcgtccatgggccggagtgggccaagtaacgtgggccgcgtctgtaagggtattaatattgtgtcgtgtccgaggggaaaggcatccaaaacatgaacaaacgattgtcttcctgaataatatacttcgtcttc

SEQ ID NO: 115194 - DNA, 281 bp, Zea mays
  unsure (1)..(281): unsure at all n locations
  Clone ID: MRT4577_36540C.1
accttccccgcacaccggttgcgatccgccgccatgcttaagcagggaaccctagccggcctcagcgacggattgcagatctcccagcctgacgtttaagcggnggaacggtggtcgcatcatgcacgggcgcggtcatgttatgtacatgcgctgtttcttttgtgccttgtgctgtccttaggatatggttttttttgcggttgttggtgtggttcattgttgagcatgctgctgtgcgggccgtgctggaggtttgtgtgcgtgttggttgtgttttt

SEQ ID NO: 115195 - DNA, 668 bp, Zea mays
  Clone ID: MRT4577_36541C.1
ctcgcgatctagaactaggaaaatgctataaaaaatattaatggaaaagttgttgcaaagagaccagtggctgttgattgggctgttccgaaaaaagtctacactgttgctgcaaaagttgatgctaaggataatgagcctgagaatatacctgacaatgtcagtgatgatgacacctctgatgataatcttgttggagaagctagctttgaacttgatcaggagacttctaaccgtccatctgaggatgattttgaaactgaagcagatatttctaaaaaagttcttgagaatttgatcaagtcatcagagaagtccgaaccatctggcattgaaggttcggacattggtaccgacactgaaacagaagatgatacatcagaaaaggagaaatctgattcacctgtagctgacaagctggttgagtcgaaacgtgtaacagatgcagaaatcagtaatcctgcttccaaacccaagaaaaatgatactggcctggataggactatatttattagcaaccttccttttgatataagtaatgaggaggtaacagcgcgcttctcagtctttgggaaggttgaatctttcttcccggttcttcataaacttactaagagacctagaggtactggtttcatgaagttttctacaacagaggcagctgatgc

SEQ ID NO: 115196 - DNA, 247 bp, Zea mays
  Clone ID: MRT4577_36542C.1
atttcacattcaagtgcacaaaacaaaaatccagcattcatgcacattaatatttatttatttatcaatattttagaatgcataatctatgaacggagtaattcactcactaaaaaaaacctccttgtcatttttaaggaaataatttcaaaggtaggataactccctattcatgaacattctagtctaaatatttttaagacttttactaaatctcaaaatagaattttgtggtgttacaatcatc

SEQ ID NO: 115197 - DNA, 484 bp, Zea mays
  Clone ID: MRT4577_36543C.1
acctcaggtagcccctctcacgactgagccacccagtacaacagtgctgctaccagacagactcgacgccggtgctggcaacctgcctgcaacaggaccccgacagtactgaggcgcagcgagaccggtgccatacatgaacatgctggatggcaagcggggacatcgccactcgagcaggcgaggactccgatcagatcgcgcgccacacatgccgctagatcctgcgaacatttccacgacgtggttccttgaggcctgccgttgtaccgggctggagatcaatgaccagcagatccccgatatcgctcagggcgggcacggactctttcataaccagccccaagagacaggtgccgtcgactgggccacgtgttaggtaacgccaccgacgatacctctgaactgatagcggtatgccatgtgctgtcgaccaagcttagcgcgcgcctgacagatgtccataaggacggcacatgcgcct

SEQ ID NO: 115198 - DNA, 245 bp, Zea mays
  Clone ID: MRT4577_36544C.1
gagacgatggatcccgcatatatgcgcaagccaaactatcccaaatcctccagagcacgctcaattcagtagctttccgcgactttttcccagctgcgcgtgcagttttgttcgacgaaaggcgggcggcggcgggagagacaccatcgtcgttggaggaatgcattcttcacaggcgcggcgttggtgacttcttcaagggcgggtgcggtgcgacctgtaggtcgtcaccggcgcggcgttgg

SEQ ID NO: 115199 - DNA, 234 bp, Zea mays
  Clone ID: MRT4577_36545C.1
atgggctgttagcgagggcagaccttactcgacatggcgggcatgagtactacaggaaagccccaagccggatagtatgcggagaggaagcaacgagagagttggaacctacataaggggggcagggcagcagaaggcagttgagttgcacctgaggcgcgtgctcaggcacacagaagaaacacactgggaacctgccaaagtatggaaaacagaacgacccagggaaggctg

SEQ ID NO: 115200 - DNA, 271 bp, Zea mays
  Clone ID: MRT4577_36546C.1
aggatgatgaggaagatgtagagtgcgaccccggcgttggaggagacgaagaagttggagagccccgagcttcggtgggcgttcgtccgcaagatctacgtcatcctagccgtccagctcgccatgacggccgcggtctccgccttcgtcgtcaaggtgcccgccgtctccaacttcttctcctccaccaacgcacggggcgcagctctacatattcctcatcttcctggctttccccggccgccctcgtgggttccactgccgccctata

SEQ ID NO: 115201 - DNA, 529 bp, Zea mays
  Clone ID: MRT4577_36547C.1
gagaaaagcacactcaagccaaactttgctaatatgctatgcggcggggcacctaccaatgacacagaatctaacgagcgaaccttctgcacacaatgggacgaagcataatccacacccaagttaatttggctatgccaccacaaaaaactacatgcaaagacctatataactatatctatgtgtcttcacccacacagatacttataaaccgcactggagcagcatgtatgctaattaccataaacacggtaggcaaaaggcacaaacacgagctgattcgataacacctggcaataaaccaatgctcgcacggacttgacttgaacaaacagggtgcggggaaaaaccgggcaagacacatgtagaggccccaacacaactgttacaaaatacaccgatcaagaatgaaatgctggagacaaccaagcaactcaaaggaaaaggatgccttgaaattcacaacctagcagcaggaacaggaacgatatgtgtgacataaatggacttggccaccctgttcgataca

SEQ ID NO: 115202 - DNA, 1580 bp, Zea mays
  Clone ID: MRT4577_36548C.1
ttgggtacctcgaggccggccggggctactatttgttacatttggcaggaaatttctctaattcagcgctcccagttgatggcctgttcggggaacctggcgcccggccgggcaggggaataagctacccagcacagcagtcagcagtgtatacaattacattcatgcacacgatggcactcagcactcaggacttgctcgaagctcacgtcgagctctggcaccagtccctgtgctacgccaaatcgctcgcgctcgcagtggcactggacctccgcatccccgacgcgatccaccaccatggcggcagcgccacccttccccagatcctcgccgagactgcggcccacccaagtaagcttcgcgctctacgccgcctcatgcgcgtgctcaccgtctcgggcaccttcagcgtcgagcaacaaccgccagctggtggtgatgattcgaccgtcgacgcgccggacgaagctgtctacaggctcacggcagcctcccgcttcctcgtcagcgacgaggtgagctcggcgaccttggctccctttgtgagcctggcgctccatcctatcgctgtctctccgcacaccatgggcatctgcgcgtggttccggcaggagcagcgtgaaccgtccccgtatggcctggctttccagcaaacattcccaacgatctgggaacacgctgacgacgtaaacgccttactgaacaaaggcatggtcgcggacagccgcttcctgatgccaatcatgctcagggagtgcggcgaggtgttccgtgggattgaatcgttggtcgacgtaggcggtgggcatggtggcgccaccgccgccatcgccgctgccttcccgcacctcaagtgcagcgtgcttgacctcccgcacgttgtcgccggcgctccgtccgatgtcaacgtgcagttcgtcgcaggcaatatgtttcagagtattccacctgcaaccgctgttttcctcaagaccactttacatgactggggtgacgacgagtgtgtcaagatattgaaaaattgcaggcaagctatatctccacgtgatgcaggagggaaggtaataatcttggacatggtagttggatatgggcagccaaacataaagcatctagagacacaagttatgtttgatttgtatattatgacggttaatggagctgagcgcgacgagcaagagtggaagaagattttcatagaagcaggattcaaagactacaaaatcctacccatccttggtgcactatcagtcatcgaggtctatccatgaatgcttgctgagcaaaggcctccacaataaattgaagaatatgaaagtgcgcgctgatagtaatctatgaattgttctttttactgtatacagtttgaagcacatcgtcgtgtgtccttccacatgtgatacgatatgtaaacgatgtgctatatatattacccatgctcccgttcgatgtagatgctgggatcataggtaactctactatatatgccagatcttaataagataacatggaagcgttttgcttttttgaaaaaaaaaaaaaaaaaaaaaaagaaaaaaaaaaaaaaaaaagcggcc

SEQ ID NO: 115203 - DNA, 330 bp, Zea mays
  Clone ID: MRT4577_36549C.1
aaaaggtaaccatccgatcaattatgcaggggacaaaggaaccacccccttttttcttaacggttttgtgtttaaacgccatgtaaatgcttttgggggatttgttctgtccgtttaattggctgcagctgcagcataaatttaaacctgggaagccaccaggcagggcctgtgttaacaccgtttttttttagagtatgggttttttaataggaaaattttttgttttttttaactgcgctggcagcgcttaggtccacactgagatcaacgggctttccaggaattggtgtgtacatactgggaacatttgtcacagttgttttaaag

SEQ ID NO: 115204 - DNA, 328 bp, Zea mays
  unsure (1)..(328): unsure at all n locations
  Clone ID: MRT4577_3654C.1
cgtccgcataactcaagcatcaggggcaggggcagcggctttatctctgggcagcgtgcgcacgggggggacctanctcggtgtggtagcgctaccatggctgatcaccaccggggcgcgacgggaggtggcgggggctacagcgacctccagcgcgggggcggcatgcacggcgaggcgcaggagcagcagaagcagggcgccatgatgacggcgctcaaggccgggacggccgcgaccttcggcgggtcgatgcttatgctggccgggctgatcctggcccggaccgagatcgcgcttcacggtggccacccccgggctggtgatc

SEQ ID NO: 115205 - DNA, 210 bp, Zea mays
  Clone ID: MRT4577_36550C.1
ggggcctgaaacttggctgcttatttaggggccgttttatacaaggggaatctaaactcagcatgcagcaaaggttagcaaacggcacaacgaacacccatacatagccggctgggaggggggactctgtacgagggggggggatggggcaattggccatttgtacgaggccccctgtttatttgtacggggcaaaggccagttttgctc

SEQ ID NO: 115206 - DNA, 310 bp, Zea mays
  Clone ID: MRT4577_36551C.1
aatggctatcaatgtgttgaaacctgcaataagggtaaccactacatagatcataacagggcatgtgagaaacggcatcaacacgatgttgaccattaaggctccaacattcacataacctattacattaaatagcattagtccatgttgctgtacataacatcaaggatcaaaagctactacatcttggaatggaaaaaattgctgggatactggtaagcaactacctgccttaacgttcaaccaactggcaaatatccaactctgttcattacttccaacagcaataacgaaaaaacctgctgtttgt

SEQ ID NO: 115207 - DNA, 264 bp, Zea mays
  Clone ID: MRT4577_36552C.1
tttctttactcctaaaacttttcaacaccctttcctcaacagacaaaaccaaaatcagccagctcccaagaaaacaaccctaataacatcacaacatactgcatacacatcaaacctaccctaaacttttaccccttaccacatcattcaaccacacccaaactacccaacaccaacacccccaaatgtcctcacatccgacaatcgacgcactccaccaatttacaaacctgacaacttcacccaatccccaaactctccaaa

SEQ ID NO: 115208 - DNA, 470 bp, Zea mays
  Clone ID: MRT4577_36553C.1
gggaaagaacatcctcgcttacctctccatagcgtcacctccactctatcgcccatagtgatcttccttgccttcaccctaggactccaagcaactagccaccttcgtccaaggactctaagcagtcaccttcctcaaagggttgctggtaagattactaacgactttggattgtggtaaggttacttagccactctacttgttaattagttgtaagaaggacgtcaataaggttggcctcatgtgacctggttggtctatatgtatgtggtggggcttctaaagtcggttgttttcatgacctatgcaatagggtaaagcccatatttgccagtggttttgatgatctagattattgtgcaagtttgtatttatgattctcgtataatatttgtccacaacgtatacactgtattttggatatatgttgtacacgttatttagtgaaatgcttctttcattttagatag

SEQ ID NO: 115209 - DNA, 800 bp, Zea mays
  Clone ID: MRT4577_36554C.1
atccttccgctttgtccgcccagcttcatcgcccctccctgctcttccaccaatctgcttgcttgcctggtcgtcggctgtttgcccagatcatccatagcatacacacctcgtccactgactgagtaggatgccgtgggtgttcttccatgtcatcctctgatcatcgccgccgctccgtcgatcgacagcgctccaggaggacatgcgagctgggttcaacgggcctgacgcgatcgttatgacaagtggcgccgtcgcgtattactacagattgacgcaagtctgccaggccgaatacttccgccagctgctcaagcccgtgacgtagattcgaccacaaaaccccacacattcgccagagacaattccatccaaaacagcctcaaacccagacagactaactgaatcaattttgaactgaaccagagaaagcccagctaaacacccttgaattcttgttcgttttccttccattcgaaagcaacacctgtcaatttccttgaattctccaccaaacccatccatccatccacaaagacatttctaggagttgagcagctagcagcaacaagtgaagagatgcagggagatccaggctacgggtacggtggctatggcgccggctacaggtacggctacggcggtggctacggcggtggctatgacatggccgggtacggcaacggtgccgggaggagcctactacaccaacgaccggtatcccgcggcggcggcgcctgcctatgaggacccgctcgccggtcggaggcagcacgatttcccgggctctctgaccg

SEQ ID NO: 115210 - DNA, 107 bp, Zea mays
  Clone ID: MRT4577_36555C.1
tcgcgggtcgacgcacgcctctaagttgagtcgtgtcacaataggtgattgtcctactacgatgcaggtacaacagtttgcacaattattcttcatcttagtctgct

SEQ ID NO: 115211 - DNA, 260 bp, Zea mays
  Clone ID: MRT4577_36556C.1
gtaccgatgaagactgtttgcttgtgtctatttttaaaataaaaattcttaaaaaaaatgagaggggatattaataaataagagtaaagtgggccacacaaacttaaattaacatcttaaccggcaccggcaagcgatttttattagtccttttatagtgagcgcgcatttctttttgttcggggggggcgcccccaatgggtcccagttttcttccccgttgtggccccccttgttttgttttttgtgggggcccccct

SEQ ID NO: 115212 - DNA, 859 bp, Zea mays
  Clone ID: MRT4577_36557C.1
aattcgaatcggcacgaagctagcagctcgaactagctttagctactacgtgtgcaagtgcaagcagcccactcgttcgaccatggctgcgagagcggcgctcctccagctggctgtcagcctggttatccttgccgccgtggcgagcgcgagcgcgaccaactgcccaccgccaccgctgccgccggccccaaagccgccgacgcccggcggccaccacggccacgggtcgtgccccaggaacgcgctgaagctgggcgtgtgcgccaacgtgctgggcctggtgaaggccaaggtcggctcgccgccgtacgagccgtgctgctcgctgctggacgggctcgtcgacctggaggccgccgtctgcctctgcaccgccgtcaaggccaacatcctcggcatcaaccttaacctccccatcgacctcagcctcatcctcaacaactgcggcaagaactgccccaacgacttccactgcgcgtagatgatcagtcagtcagttattgatcgtcgtccatcgccggccggccgtggttcatcgtcattattccgttttgcttaattgttgatcgatcgtcttcttcctgtcagtcccagcagcttatttattttaaatttgtctctttatacatatatatgagtggtgtggttacacttcgttctacatagcctagcgcctacgacgcgtgcgtgtatatgtctggcctggggtgatcagttaattactgatcggtgttgcgcagtacgtatattattcttcatttgtagtcatatgacgatctgtttgcatggttcgttcaataaatgaagttgacaagttgtactttctttctcaaaaaaaaaaaaaaaaaaaaagggg

SEQ ID NO: 115213 - DNA, 195 bp, Zea mays
  Clone ID: MRT4577_36558C.1
caaattcataaagatatttcactggcgattgtgtgagatgcaaaagagagattaaatgataaggaaatgaacacttccattatttgcaaaaactgaaaacacggattggaagctctggattaatgaataatccaacactgcggatagaggctgattgcgcattgggcgctgttccagtttcttgctcaatgactc

SEQ ID NO: 115214 - DNA, 402 bp, Zea mays
  unsure (1)..(402): unsure at all n locations
  Clone ID: MRT4577_36559C.1
gaggcgcgctgcatgcccggcgaattcgattcggatgtcgaggcctccgactcggaggacgcggagcagaagcagagcgagttcnccatgaagatctccaactacgccaatattgtgctgctggtcttcaaggtgtatgcgacgatcatggcaactctaggtttccaggtcttggtccaggccgtcgaacagctggtggagaacaaacctggcgagaagatgacatcggagcagctgatatggttgtactccatcatgctttcggcaaccgccgtgaaactggctctctggctctactgcaagagttcagggaacagtattgttcgggcttatgcgaaggaccactacttcgatgtgataaccaatgtcgtcggtctggtggctgctgttcttggggacaaa

SEQ ID NO: 115215 - DNA, 194 bp, Zea mays
  Clone ID: MRT4577_3655C.1
ctttgtttgtgggggtttttaaaaattttttttgggggggcaaaatgaatttcgttgcgttaatcatgtttgttttgtttaaagtagaaagtattacgctttcattacctttcatccttgcggtccctttaacgcacccaacccccccataggggggagagggggtatttccaacccaacttaactctttccca

SEQ ID NO: 115216 - DNA, 747 bp, Zea mays
  unsure (1)..(747): unsure at all n locations
  Clone ID: MRT4577_36560C.1
tactanaaacgagagatactagctacgtattcaccacctgcgtccgacgtcacccgaactcactcacacagttcacgatacgtagacgctgacctacgttaacacgctattcgatattacaccaatagcagctagcaccgatggacaatggctacctgacaagctggaacctcgctacgacagaagacgctgcgcccatagcacatcctatcctggcagggctacacatctgctccactccacatgtccacatgcgaatccgcgagatcctgctcatggcgcaccggaacctcgtctcccacgccttgctcgatccattccccgtacttcctccagaagaaagacaggccgccactcaccttctcttgtggtggggagttctacctgctagcgatgcgtgtcataactgcgaaccatggctcctacctcctgggactgtatcacctgtcacccacctacgccactgccatacagaacaccatccccgctatcaccttcggcatgtacgctgctctcatgttcatatcacgtggacctgaccaggatgcatgggctggccaaggtggcgcgcactccgctgagcatattacgctgcaccgacataaccctgtactatggactgtcgctgcaccatcacagcgatgatctgcctgtcaagccacctccggtgacgctgtcttccgcccaagacagtcccatcctcaactgtactctcggatgcgtcttcatcctcagtcactgactctc

SEQ ID NO: 115217 - DNA, 385 bp, Zea mays
  Clone ID: MRT4577_36561C.1
gtagtagaagatcagcagccgcttaagtagaggaaagaagattaactacggcaggctgcgacataattgttctattatggcaccaaaaaaaaataaactggtggccgttgtacaacaacgtgactgctgaaacaacggtggcaccacacaaaataatcttgtagcacatcatccttttgtcagctggtggcataataaagaggagggcagcaatggtcgttcttaacaacagctgagcatgaatggtggatggtgcgacccgtgctgcagcgcatcattaaccgcggctgttgtggtgactaccagcatgacgactactatagttagcagcgtagtagcggctgcttttgctgctttcttttctttttttgtcgcgatggtcggc

SEQ ID NO: 115218 - DNA, 1597 bp, Zea mays
  Clone ID: MRT4577_36562C.1
cacataagggtcctccaaaagatcaaaattgcccaagccggccgggaagcgaaaaccaaaactgttccccgtagatagggatacacatacacacccgagagggcgacgaaacagacagccggactcaagtcgacgcccggcgaattgcccgatactatggagggagacgatcggagggccccgctgctggcggccggcggcggccgtcccccgtctctgcggcgccgtgactcggcgcggtcgctgcgcagcagcttcctgtcgcggctgcccgacaaggtgcgcgccgggctcgacccggagcacctcgccgacgtcgacctctcccgcgccaaaggcatgtccagaggtgtgagacagtactacgagaagcagctcgcgaccctgaagaccttcgagcaggtggaggcgcgctgcatgcccggcgaattcgattcggatgtcgaggcctccgactcggaggacgcggagcagaagcagagcgagttcgccatgaagatctccaactacgccaatattgtgctgctggtcttcaaggtgtatgcgacgatcaggaccgggtccatggcgattgcggcgtccacgctcgactcgttgctggatttcatggccgggggtatcctctggttcacgcacctttccatgaagagggtcaacatctacaagtacccaattgggaagctgcgcgtccagcccgtcgggatcatcgtcttcgccgccatcatggcaactctaggtttccaggtcttggtccaggccgtcgaacagctggtggagaacaaacctggcgagaagatgacatcggagcagctgatatggttgtactccatcatgctttcggcaaccgccgtgaaactggctctctggctctactgcaagagttcagggaacagtattgttcgggcttatgcgaaggaccactacttcgatgtgataaccaatgtcgtcggtctggtggctgctgttcttggggacaaattcctgtggtggattgaccccgcgggggctgtcatacttgctgtatataccatcgtcaactggtccaaaactgtattagaaaatgcagctaccctagtgggccaatgtgctcctccagatatgctgcagttgctaacgtacctcgccatgaagcacgacacacgagtgaggcgggttgacactgttagagcttacagctttggagctctctactttgtagaggttgacatcgaactagcggaagatatgcgtctgagagaggcgcacgccatcggtgaatcgctgcaggagagaatcgagaagttgcctcaagtcgagcgggcgtttgttcatatcgatttcgagagcacgcataagcctgagcacaaagtcaggagcagactgccgtctactgatccctgagaccctgacagatttccgaatgcccatgcatgtagtacattgttaagagatagtagctaatagcccggcgttttcttcgagggttacgaggaacgattcccttcacctgtaaaataaaggtacaggatcaacttttccagtttactgatcctaaccacgcatttgatgatagtgttttcgtaagtgcgtgaaaaaaaaaacacgcatccatagtcta

SEQ ID NO: 115219 - DNA, 1773 bp, Zea mays
  unsure (1)..(1773): unsure at all n locations
  Clone ID: MRT4577_36563C.1
ccggccgggacacaacacacccgagagggcgacgaaacagacagccggactcaagtcgacgcccggcgaattgcccgatactatggagggagacgatcggagggccccgctgctggcggccggcggcggccgtcccccgtctctgcggcgccgtgactcggcgcggtcgctgcgcagcagcttcctgtcgcggctgcccgacaaggtgcgcgccgggctcgacccggagcacctcgccgacgtcgacctctcccgcgccaaaggcatgtccagaggtaacagacttgcgaggtctgaatctccgatccctcgtccggtcaccccctctcctaccccttcgcctctcccggccgcgtgcaggtgtgagacagtactacgagaagcagctcgcgaccctgaagaccttcgagcaggtggaggcgcgctgcatgcccggcgaattcgattcggatgtcgaggcctccgactcggaggacgcggagcagaagcagagcgagttcgccatgaagatctccaactacgccaatattgtgctgctggtcttcaaggtgtatgcgacgatcaggacggggtccatggcgattgcggcgtccacgctcgactcgttgctggatttcatggccgggggtatcctctggttcacgcacctttccatgaagagggtcaacatctacaagtacccgattgggaagctgcgcgtccagcccgtcgggatcatcgtcttcgccgccatcatggcaactctaggcttccaggtcttggtccaagccgtcgaacagctggtggagaacaaacctggcgagaagatgacatcggagcagctgatatggttgtactccatcatgctttcggcaaccgccgtgaaactggctctctggctctactgcaagagttcagggaacagtattgttcgggcttatgcgaaggaccactacttcgatgtgataaccaatgtcgtcggtctggtggctgctgttcttggggacaaattcctgtggtggattgaccccgcnnnnnctgtcatacttgctgtatataccatcgtcaactggtccaaacctgtattagaaaatgcagctaccctagtgggccaatgtgctcctccagatatgctgcagttgctaacgtccctccccatgaagcacgannnacgagtgaggcgggttgcccctgttagagcttccagctttggagctctctactttgtagaggttgacatcgaactagcggaagatatgcggctgagagaggcgcacgccatcggtgaatcgctgcaggagagaatcgagaagttgcctcaagtcgagcgggcgtttgttcatatcgatttcgagagcacgcataagcctgagcccaaagtcaggagcagactgccgtctactgatccctgagaccctgacagatttccgaatgcccatgcatgtactcccttggtttctttttattagtcgctggatctttttattagtcgctggatagtgcaaaatccagcgactaataaaaagaaacggagggagtagtacattgttagatagtagctaatagcccggcgttttcttcgagggttacgagcaacgattcccttcacctgtaaaataaaggtacaggatcaacttttccagtttactgatcctaaccacgcatttgatgatagtgttttcgtaagtgcgtgaaaaaaacacgcatccatagtcttaaccccatgaatctccgtggnnnnnnnnnnnnnnnnnnnnnnnnnnnnnnnnnnnnnnnnnnnnnnggccgcgaatt

SEQ ID NO: 115220 - DNA, 566 bp, Zea mays
  unsure (1)..(566): unsure at all n locations
  Clone ID: MRT4577_36564C.1
attcggctcgagcaaataatcccgcgtcgcctacccgccccgcgcgacgccatgctctctatctccttcctcgccaagctcctcgccatcctcctccgggacatcctcctccacctccacgcccccaccatcccgtcctccgcgcaccacttcttctccacctagcgcttgaactcgccttgctgctcccatgccgagagctctacagagatctggcagcaatagcctggcctccctgctccgcgccgagccagcggacgatgtgctccccgactggaagccgaccgagcgcgatggccgccgccgcctccgcaggaggaggagctgcctccggctgcccctcggcgcggccggtggctgccgcgtctgcgcctgcgacgagatggactcctccgccgccgccccgcgccggcgcacgccggggaacgacgaagacgaggacggggccgcagtgcagtgcttcgcctggaagaagggtgacgccgccgcggcgcgcgggccgtcgtcaggagctggcggcgcgggtgccgtggtggtgacggaggcggccgccgactngagaactc

SEQ ID NO: 115221 - DNA, 353 bp, Zea mays
  Clone ID: MRT4577_36565C.1
cagcgcatgcagcgaaagttataccatcactttcaagagcgtcaggatcgatgattactcgccaagctcaggatgtgtcatcggacaagctaacatcaccttgactctcgacactcccgttccggataatgtctattactcttccctgcctcaatgccacttcacaccagactactacgaagtcagtgatatcagagttggagagcaccagatcaccccacttcaatatgacgctcaaactggcacctttttctgcttgacccctgcatggaactacgtggaatccacagctaccctcactttggtcgacccctacgaacaatcctccatctccaacccggtttccttctctt

SEQ ID NO: 115222 - DNA, 542 bp, Zea mays
  Clone ID: MRT4577_36566C.1
ggcgcccaggctgcgccctcccctgcgcggcggaaccttccggcgaactacgcgggtcggccagtggtctggtcacgcgccagccggccagcggaaaggcaccgggtgccgggggagacgccggcgtcacacgacatggcgtgggcatacctttctaaacactctgggcacggggggtgcagccgggcccttcatgatgacagcgttgaggtactcgagccttgcgacgacctctcgcgacctgtgggtcgacacccacggcgggtcgatctcctgacgacgcgcgctgcacgtcggccgttaccaggttggcatgatccactgacacgcggcagcggctcggccagcgccaagaactcgagcaaacccacgagctcaccgtagtgagcctgcgctgcgcttcgaccttgcgcgccgctgctgacgcacggcgtgctcgtcgcggaccggggtccagagcgtgcccgtacccggggctcgccttgcgcctttgccgccgcgcgagggcctcgtgagcgggaggtcgcctcctctgctgccgc

SEQ ID NO: 115223 - DNA, 723 bp, Zea mays
  Clone ID: MRT4577_36567C.1
ccaggacaaagagggcatccccccagaccagcagcgtctgatcttcgccggtcaagcagctggaggatggccgcgccctagcagcatgcagaaggagagccacctggtgcagcgccgtggaggtcgggcggcgggtggtggagttcgttgccggggaccggagccacccgcggtcggcggagatctacgccaagctagaggaggtgaacagcatcgcgagggcgcgcgggcacgtgccgcacaccgagctggtgctgcacgacctcgacgacgcggccaaggagagggcgctggcggtgcacagcgagaagctcgcgctggcgttacgggctcattagacacgcctccccggacgggcatcaagatcgtgaagaacctccgcgcgtgcgccgactgccacgccgtgctgaagctggtgtcggcccacgcgtccgggaagatcgtgttcagggacaggaacaggttccaccatttcgtcgacgggtcgtgcagctgtggggattactggtgaatgctgctagctcttgtgcacaaagtttgcagaaccaaccaaaaaacaaagaaaaagacattgccatccgtcctaaaattagtaaaaccggaggctttttttttttgcgctggctggttgcaattgcaaagcagcggcgattaatgcagaccaccaaatgaatggcaagcagggatccctatttattaggccgatggaagcagaagctccag

SEQ ID NO: 115224 - DNA, 355 bp, Zea mays
  Clone ID: MRT4577_36568C.1
ctcgccgggagtcgtgttggatttggtgccaccactcacaaggttgacccttgatatttcggcgcacttgggttgattctcttggagagatggccctgacgaacctgtcaactggctacatagttgtgctatatttccagccatgctgctggttctgtgctggcccttactaggcggatgcggtatccgtacagtgcagtggaagaacccaaacccatgagttcagggctgcgtaacaagtccctgagttgccagccatgcgacccataagtcgatcctcttccaggcacggagctgaaggatatctcgtgaggtgctcctgccgcacaggtcgacacgtatcattacagacact

SEQ ID NO: 115225 - DNA, 188 bp, Zea mays
  unsure (1)..(188): unsure at all n locations
  Clone ID: MRT4577_36569C.1
aacagacgggatgccctctagctcaatnctcactactactaacccatcgagcttaattttggggtccaactctccatttcaaacttctaatactcgtacacccatgataccctttcattctttaaatacttcatatctcaatcaatctcttctaccaaacttttcaccattttatcaactctaagata

SEQ ID NO: 115226 - DNA, 328 bp, Zea mays
  Clone ID: MRT4577_3656C.1
gagctgaggctgaatcaatgtattgattatttctaggaaacacacctaggtatgagggcgccattatcggacgcatgtgctctgtaatctaaaagatggccccttcaacgatgggttgctgcctcggcggggcgggattcatcaaagagaactggttgtctgggagcactgggtgctgctgttggaagggggcgaccaatgggttagccactcccaatggcttaagttactgttgtcgctgttgttggtgcgcaccatagttcgacagagtccgtgggttgaatgggcgcagctgttgcaagttggcaaccgggtttgccacaggttg

SEQ ID NO: 115227 - DNA, 637 bp, Zea mays
  Clone ID: MRT4577_36570C.1
gccggccgggcctggaccgagataccaacaacccacttctgactgacactgtgacgcgccgaggtcaccggacagacacaccgaacgacgatagccgcgtaggcgatgcaccagagcaccagcttcctcggggaggccctggcctcccgcgccgacgccgtggatgactgcggccgcatcaccatgctgcgcaccgtcaagagcgttccccagagcatatggcacgttcctgatcgccccaagcatcttgtgccggtctccgagcaaacggcgtccgacctgacacgagagctccccggcgacgtacggaggggatcacgcgagcctctcggccgacccggagacattcacgcgcaaccagagagctggaggtgatccactcccggtgggcgatgctgggcgcgctgggctgcgtgttcccggatatccatgacaagaacggcgtcaagttcggcgacggcggcgtggttcaaggccggtgcgcagatgttctctgcagggagagactgaactacctgacgaaccccaacctggtgcacgcacagagcatcctcgtcatctgggcgtgccaggtgatgctcatgggcttcgtcgagggctaccgcgatggcggcggccgggctcggagaagggctcg

SEQ ID NO: 115228 - DNA, 282 bp, Zea mays
  Clone ID: MRT4577_36571C.1
tcgtcactacttcggcggcagcgcgtccgagcgccaccacgacctccgcgtggacatcgtcgagaacatccaggaggactacggcatgtttgtctggccatgcagtgtcatccttgccgagtatgtgtggcagcacagatcacggttctctgcttccagtgttgttgagctaggtgctgggaccttactgccaggattagtagctgcaaaggttggggcagatgtatcattaacagacattgttcttaatatatatttactaaatatttttagaagcctttt

SEQ ID NO: 115229 - DNA, 171 bp, Zea mays
  Clone ID: MRT4577_36572C.1
ttcggctcgagccgcacgaccccaaggggtatggcaagcaggccgccggttcctctgggggggactactgcggtcgcatgggcggcattggcaaggtcatggtcaaggactgtttgtcctcttccttcttcatcttatcctactttttctacattttattttattcctttt

SEQ ID NO: 115230 - DNA, 921 bp, Zea mays
  Clone ID: MRT4577_36573C.1
ccggccgggaagcgcaaggcaggcaagctcctctctcaagtctcggcacctccaactacgcagcaaccaaccatgagcaccagcgatgccgccgcgaccgtgatccccatcgacgacgtgccccgccagcacggcaaggccccggccgtggacacggtcacggcggcgcctcctcctctcgctgcagcagcaccccccgctgcgacgacggcgcctcggaagacgcgggtcccgttcttccggcgcgccgaccgcggcagccggtgcgtggcgctccttgacttggtgctgagggtggcggccttcgggcccgccctcgccgccgccatcgccacgggcacctccgacgagacgctctccgtcttcacccagttcttccagttccacgcccgattcgacgacttcccggcgctcctgttcttcatggtggccaacgcgatcgcggcggggtacctggtgctgtccctccccttctccgccgtcgtcgtcctccgcccccaggccatcggcttgcgccacctcctgctcatctgcgacctgatcatagcggcgctgctgacggccgcggcggcggcggcggcggcgatcgtcgacctggcgcactcggggaaccagcgcgctaactgggtgcccatctgcatgcagttccacggcttctgccagcgcaccagcggcgccgtcgtggcatccttcctcgccgtgctcgtcctcctgtttctcgtcatcttggccgccttcaccatcaggaaacgctgctgaactggatagtatgtgatgttgctgtttttgcgtcgtgcaattaataatgcaatgtggtttcagtttgtggttactcgtgtgtaattgtaaagcgtggagtggaattgcctttgtattattcgtggacacctgcttgcggaattttaaattgggcttaacttc

SEQ ID NO: 115231 - DNA, 229 bp, Zea mays
  Clone ID: MRT4577_36574C.1
ggccgccctttttttttttttttttttttttttttttttttgtttgggggttttgaaaaaaaaagatgaccttaatttccacttaaacaagaatttcacaaagttcaagaccaagtggtttgaggccgtgcaaagaatcactggggatccaaagaacaacaccacttgtttggggagttaagagtacaaatcatgtcagaaatgtttcaaaaaaactggttacctttaa

SEQ ID NO: 115232 - DNA, 374 bp, Zea mays
  Clone ID: MRT4577_36575C.1
ctgactcctgggctgtgtccggtactgcgggatccaatgtcactgcaaccagatctgcccagaacgcagttggaaactccgttggacctgatgacatggccttcaatcacaaggtgactacatgatattccgtgacagaaccatattgacctgcacattcaacctgctcgggacgatgagcagtcaccgagatctggtgccgctggtttgttgatgccgagacactgcaacttatagagaggatagcgttgtttgattgatcataccaatgattggtcatagatacacctatcgaacatatgcttccgaatgtctatacccttggtttttttaagatagatgctgcatgaggcctacagtcttgttgtgtacct

SEQ ID NO: 115233 - DNA, 393 bp, Zea mays
  Clone ID: MRT4577_36576C.1
aaaacatagacactctaatgctctgtgatagtatagacgcacacatcacaacgggcacattgttcttaccgtgttaagcctaaaaaatttagacgccggcaccccccacggggggcggttgcaataaggtggtaggattcgtcaaaacatgacgtctgcatggggacaacagacgctgccggaacaaggcttccatgcatgactgacacagcgccaccaatcggaaccatagtagcggcacccactatgcaggaaagttaaccaaaacctgctagccaaagggctgcataccgtcggggatcccgaaactgacgcggatgaccacccctgaaatgccgaccgggaactggatccccaccaacatctccactagtgaggcggactagaactcgg

SEQ ID NO: 115234 - DNA, 201 bp, Zea mays
  Clone ID: MRT4577_36577C.1
gtggagtaattattggcatcctcattgcctgacaggccttcgacaccctgggggccaggagcatcagccgggccggtgggggcagtgggacgtcccgtcaaccacaggggcaaaggaagactttgcctcggacatcggtgctacgaccatggcgacgaagaggagagcagcaatgacaaagacgacgctagcgcgagccat

SEQ ID NO: 115235 - DNA, 364 bp, Zea mays
  Clone ID: MRT4577_36579C.1
ttggtttagagatgttgaagttgctgtgtggttgttgctaagacgttttcaaacagatgggatcggaagcttgtgaaagtgattgatcacaagaagtcataagctcagttcttgtggatttatctgattgtttgacatgtggggaaacttgttctctggtaagctacttatcttttttagttattcaagatggaaatatgcatttgtacatctagctagattctattcttcaatacctgccagacatggattgaacattgcgatggtttttcacctgtcaccagtaattataaagcgttgcatgttattccctgaaaataagctagctagagactttttttatattcagtgcaacttgtttatt

SEQ ID NO: 115236 - DNA, 217 bp, Zea mays
  Clone ID: MRT4577_3657C.1
tgcccatgccgctgtagtgtacttagtgagaaacagaaactgagatctgagggttgtacaagacgcattggagctgtgcatgctacaagcggttactttggaacagaaacttgcctcacacgatgctgacatacgtcaactcaatgatagggcgtatctacctagacaatctcaagaacccttcaccgagatgcatatttgacttgcgactgacctt

SEQ ID NO: 115237 - DNA, 474 bp, Zea mays
  Clone ID: MRT4577_36580C.1
atctgatgtttgtggcttcccagaaataagaaagtacatttctaaaaaaaaaaaaaaaaaaaaaaaaaaaaaaaaaaaaaaaaaaaaaaaaaaaaaaaaaaaaaaaaaaaaaaaaaaaaaaaaaaaaaaaaaaaaaaaaaagaaaaaaaaaaaaaaaaatacataaaactggcgggggcggaaaccctaaaagggaaagggcccaatttaccctaaaaagagggggccgacaatccattgaccgagggggcacaacacccctactggaaaaacccttaaaattcccaaggtgaaaagtcttaaacaacatcccctttaaaaaacctggggtaatccacaaaaggccccttgcggaaaacccttcttaacacctgcgcagtcttaattgaaaagggaccccccctgtacctgccaaaaaatcgcgcaccctgaatgggaaacgaacaccccgactgttgcactttcaaaccccct

SEQ ID NO: 115238 - DNA, 286 bp, Zea mays
  Clone ID: MRT4577_36581C.1
aaaacacatgctactacacgtagaaagttacacattgaagctgcatccacaacgcatgcatcggggggcgttgcaacgctctgtacaagaccacctaatgcgacgcatattccactagacaggactccaggtatgcacattcttaagacgaacccatacatgcagtactgcataatggaacatacgctcagtagcttgattactcgacagtccatcatgctaaatcccctggtggacatacctcatcacacgatgccaaagatgacgcctcagatgatgacgccta

SEQ ID NO: 115239 - DNA, 304 bp, Zea mays
  Clone ID: MRT4577_36582C.1
aaaaccgggcaaccaaaaattacatgggtccctgggggggggggttttagaaaccgggcaaaccaatggggcaataacatttggggggaccaaaaaaaggggggcggggtccccaacggagccgggcaagggggacaaacccgccggcctgggttgggtaaaccccaaaatttttccccgaattgggcgggggggggcccccaagttttcccgggggggttcacccatttccagggcccggagggtcccccctttttttttccaagggggggaaaagaaacgggttttctaggcacaccccccg

SEQ ID NO: 115240 - DNA, 2391 bp, Zea mays
  Clone ID: MRT4577_36583C.1
agtcaccctgtcgccgttgccgtcgccgaggcaggcagagtctccctgtcgccgttgccgtcgccggcctcctcctcctctgccacttcctcccaactcccagccgcaggggccgacggcgacgggagggaagaggcggcagaggtactccgaggggcgcggagagaggctgtgccaggccacgccgtccagtgcctccgggtccgtcgccgcagcttccggccgcgtcggagaggtagcccccggagctcttcgcggaggctcgggaatggtgcactgggttagcgacagtgatggcagtgataacttcgaatgggacagtgatggtaacggggagcagacagtgagcttcaacgctgctggtgctggttcatcagctctggcagcgacgaacactgatgctcctggcccatcgacacgggttgctaatggcaatgggaaggctgggcgatctgcctctttggttcagaagtatgtggacatgggtttcgcggaagagattgttcggaaggccatgaaggacaatggggataatggagcagattcattagttgaacttcttcttacttactaggaactaggcaatgacctcaaagtggataacggcttcgcttctggttgtgccccccaaactgttgatgatagtgatgatgacgacattctagaaaactgggatgatgaggatgctggtggtgggagaagcaccggggttgctaactctattgatgattctgatgacgaggatttcttacatgagatgtcacggaaggacgaaaaagttgattccttagttaaaatggggtttcctgaagacgaggctgcactggctattaccagatgcgggccggatgcatctatttctgttctggtggattcaatctatgcttcacagaccgcaggagatggttactgtggcaatctgtctgactatgaggataattcctatggagggagaagcacagggaacaagaaaaagagaaaaagatatggaggccaagcacagggaagtagaggcccattagatggtagctgtgatgaacccatgcctctcccacatccaatggttggatttaacttgccagaccagtggtcaagacgagtggacagatcgttgcctgcacaagctattggtccaccgtacttctactacgagaacgttgctcttgctccaaaaggtgtctggactaccatatcaagattcttgtatgatattcaaccagagtttgtggactcaaagtacttctgtgctgctgccaggaaaaggggttacatacacaacctgccacttgagaacaggtcacctctcctccccatacccccaaagacgatatcggaagcatttcctcggaccaagaggtggtggccttcatgggacccaagacgacagttcaattgcctccagacttgcgtgtctagtgcaaaattgttagagaggattcgcgtagccctcacaaacagttcagacccacctcctccaagagttcagaagtatgtgttggaggagtgtaggaaatggaacctggcatgggttggcttaaacaaggttgctcctctagagcctgacgagatggagtttctactcggctttccgaaggatcacacgagaggtatcagcaggacagagaggtatcgatctctaggaaattcatttcaggtcgatactgttgcttaccatctctcagttctgaaggatctgttcccacaaggcatgaatgtgctgtctttattctctggtattggaggagcagaggtggctctccacaggcttggcatacggatgaacacggttatttcagtggagaagtccgaggtcaaccggacgattctgaagagttggtgggatcagacgcagacgggtactctgattgagatcactgatgtgcagacactgtcatctgagaggatcgaggcgtatattagaagaattgggggcttcgatcttgtgattggtggaagtccctgtaacaacctcactgggagcaaccgtcaccacagagatggtttggaaggcgagcattctgcattgttccatcattattttaggatcttacacgccgtcaagtccatcatggagcgtttgtagttcttagaatctttactgttgttttggttctagtagaatactttgtgaccgaacttgtaaatggtttgcaggttgactggtttagttctcttgccactctaatttaggctagtttttttttattttatcttctttggtgattttggtacagttctgtggcactgttgggtagtcaaatgcagattgatccgagaggctgccctgatgtttttcctttttaaaatttgaatttgtcaatgagagatcaggtatcctggttaccaaaaaattaaatggtttgcaggttgactggtttaaaaaaaaaaaaa

SEQ ID NO: 115241 - DNA, 676 bp, Zea mays
  Clone ID: MRT4577_36584C.1
ctgcgccagttcgttcttcttcttacccctcttcccgcctctatcccctaccttaacatctggtatccggagagtcgatcctggatctcccagctcaaatcccgtgtcatccccgctcctctgccatggggaactccgatctcgcctccacaaagatgcttgatgaactccagaacatggagacacgtctgaccggcgcgattgagggacgctgccatagcgtcgagcgcatcgtcgacgaccgctgcaccaccatcggcaaacactttgaacaactctgcggcgacatcgagcatcaacttgctgacgcgaaacaacacgcgaatgtgcgcggtgcgcctgatatccgtcgaaatgtcacgagagaatctacggacgtttggagtggggccgattaatcacgccaaaatatacgggaggggagcagctcgatatgggatgtgaagtttttgggatgaggaagagtgatcggttagagcaagaaaaaagcgactcgtcctctatttttggtctacgggatggttttcaccttttattggagttgctctaaagctggtcgcattgatcaactgcacacggtactctacaaatattcagttatgtatggtgtaaaaatgctacaaccacgtatcttaccctggaaatttaaagtgtggaagagaaaccccttttacgt

SEQ ID NO: 115242 - DNA, 931 bp, Zea mays
  Clone ID: MRT4577_36585C.1
aattcggcacgagggtcgccctagccataggcccctagccctagcacagcagcacaacagcgccgccccccgcccccggtggcccggccccccgcccgttcacccgcgcaaccgcgccgcgcgacccgcgtccggcggccgcccatcgccagtgccgtgacacgtcactccgacgccgtcgccaccaaatctcctggcaacgcctcacgtcttctagttctaattccagcctcactgctgccatcacctccgcctgctgtgtgtcttccacctcgcgctgccaaagccgacaaaccctagcccaactctccctaccctcgcccatcccactcctttcgtccgattcgtggaggcgacggaggggctaaggcatgacgaccgatgggcagctcagggagtgggtctccgacaagctcatgagcctcttgggctactccaagagcgtcgtcgttcagtacgtcatcaggcttgcgaaggagtgctcttcacccggtgacctcgtgggcaagcttgttgagtttgggttcagctcgtctgcggagacccgcaccttcgcgtcggatgtctacgccaaggttccccgcagggccagcggcatcagtaattaccagaaacaggagagggaggcggcaaagcttgtccagaaacagagtacttacaagctgttggtcaacgaggatgacaatactgacaaccagacactggcaagtcaaaagacctcaacaaatccatcatctaagagtcggaagcatttcaggaggaaagcagatcaagacagtgatggtgatgaagtagtggcaacagattctggaaggaatgtccgtcgacgaacagaagaggaggatgaagaaggtggcatcggcagttctgatgaagagaaagaaatgattagagatcaacaggaaaaggctcatctagaaagaaacatgat

SEQ ID NO: 115243 - DNA, 232 bp, Zea mays
  Clone ID: MRT4577_36586C.1
ccaggatgtgtctggacgtcaggcgccggcggctcgtgagcagcccgaggaaactctgggtctcgcggaccgtgttgaaggatgtgaagcctgcatgaccgtcatgctgcgtgaccgtcagaaggtgattcagtgaccgtggggattactgaccatgcccaggaccatttgggtgatgttgtttatgtggagctaccagaagctggtatctgtgtatcccatggaaagaact

SEQ ID NO: 115244 - DNA, 358 bp, Zea mays
  Clone ID: MRT4577_36587C.1
caaacactactacttggtattattgtctgtgtgactgcgatattcatagttcaatctcttaggtctattattattttgtgctgctacttgatctttctagatagataaagtacgtacgctctagacaaggggtcttaggtttcaggctcttagctttagctatgctcttgctgcagagacgacgtcctcgaccgagaatctattactgattttttattttcaatataacgcaccgcgctaattacatactgactgcgtcattgttcgatatgatctgaagtattcatcattcagttgctgtcggttatattaattttctttaagacaggtttgcatttcatgccaaatagtaactact

SEQ ID NO: 115245 - DNA, 394 bp, Zea mays
  Clone ID: MRT4577_36588C.1
gagtcttttcacacaagagggacaggtgctcgctctatacgctactactaggtctctggctttaacaaccggggatcagcactggcatctgctgctactactgtgctgaagacttctttactgaccacgaaggcttaatggtgctccaagccccggctgtttgccgctcatactaggacggcaaccgcatcggtgtgcatgtgggcccgggctagctcctactctgacacagcttgtacagacagggaaaaccagttctgcgagctggaaggggcattctagacatggacgagtagatcgcaacctgccggaagaggcatcactacattggactacagatcacaggggacaaccatcaggactacatgacactgctcgtaagtgctgcaggtgt

SEQ ID NO: 115246 - DNA, 243 bp, Zea mays
  unsure (1)..(243): unsure at all n locations
  Clone ID: MRT4577_36589C.1
aaacgcggtccacctgcangggggcgnggggggcnncacggggggattttggaggnngcccccactgtcaccgctnccaaaaaaagcgggatacaaaggcgcaggaatgcccgcggcttatgacaaacgacggggagacccaagccatcctgaaggcaagctgggggctagtcatgatgactatagctgaactaccaagcagccaagggagagaacatcgggggaacaagacgaaggaaccca

SEQ ID NO: 115247 - DNA, 428 bp, Zea mays
  Clone ID: MRT4577_3658C.1
gggggggggggttgggttgggtattcatccaagccaaaccccgcgggcccctagtaaagggggcagaaagggatctcttccattcccggaccccccgttaaaaagggccacccggaagggggctcacaccaaaattatcacggcaaacttctcaaacaactggcccagaccgggaatcccaacaaaggatttcaaacccccgggggccctgccaaggaacccccccggaaaacccttccttcacggggccgaaattctcccccccccaaacttcaggggagcccccgggggttttccccaaaagggtttttccgaaaacccttccaagggcggaaatttaaacggccatcttcccgcccagggggcccaaattgaaaaacgcgagaaaaaattccccttcacttccagggggaaaccaggcccgaccc

SEQ ID NO: 115248 - DNA, 146 bp, Zea mays
  Clone ID: MRT4577_36590C.1
caccaaaaacagtatgatcatggaaatgtttttttactgaaactagcgcaaaagttcattccacataatttccttgataacaaatccctgtgtcaatccaataacctattacatgtcttccgttacaaatgctacgtggggggggg

SEQ ID NO: 115249 - DNA, 726 bp, Zea mays
  unsure (1)..(726): unsure at all n locations
  Clone ID: MRT4577_36591C.1
ccggccgggctggtggcaccccatccgatcccacccggcagcactcggcagcggcgccgcgcaatggccacccacgcagctctcgccgcctcccgcatccccgccggcgcccggctgcacagcagggcggcggcgtcgtccaggcacggcgtgcagaggctggacttcgccgacttctccgggctcaggccggggtcgtgctccgtgagcgctgccgcgcgggaggcgtccttctccgacgtccttggcgcgcagctcgtcgccaaggtacgtatgcgtttcatgcacgacgtgcgttgctgctgcagcttaaggaataatatatagcagtatcgtctgttcttcaattaacagttgtcatactaactgttcttcagttaaccagttgctagtgttaaaaaaagcaacaacagttggacgacaacaaatgcgtactcgtatatttttcacactgcagttgttatgcagttaagctcgaatagtatgcatgcttaattccctgcttgctggtgacccctgtgacaggccaccggggagaacgccgtgagggcgcccgccgaggcgaagctgaaggtggcgatcaacggcttcggccgcatcggccggaacttcctccggtgctggcacggccgcgaggactcgccgatcgacgtcgtcgccgtgaacacagcggnagcgtcagaacgcgtcccactcctcagtacgactcgatgctcggaccttcag

SEQ ID NO: 115250 - DNA, 724 bp, Zea mays
  Clone ID: MRT4577_36592C.1
gaaatattccgtacttccatatatagtatagtcacagtcccacagcttttataatttacaaactatacaagcgcacagctagctacctccaaacgaaatatcaaatatatcagtgaccaacccttcaaaccggcggtggcaccggctggccggcggcgttgggttcttccacggcagcgcggcagatggggcacgtcgagtgcgagcggagccacatgtcaatgcactccacatggaacagatgctggcacaccggcagccgccgcaccacctcgccgacctgcaccagccccaggcatatgacgcactgcgcccaccccgccgcgtccccgccgcgacccgtagtaccaccctcccgcttgtacgcaaacgccgggatcgcggacaggacaagtgccgctgaagcttccgtccgccgcccatggctccgctcagcgtgcagcagcagggcctctctacggtgcagggcgacgcgctggcgagcctttaggtagcagcaggagagcgcgactgcgcaggcggtaacgacggaggcgcatatcacgccggcgacgaggtagagtagggtgaaggagaagaagatgccgaaggtgaggagcaccgtgaggttgtggtccctgtcgtcgtcggacggagcagctgatgcgccgtcgcctggactgacagctggctgctggtggtacgagagcccagagatgagaacatgctaatagctagctgcagt

SEQ ID NO: 115251 - DNA, 1561 bp, Zea mays
  Clone ID: MRT4577_36593C.1
cctcgaggccggccgggccaccatcggatatcgcccgcccgaacgggtggctgcggcgcatgcaatcgccttatccccccggcccgccgccccgcggccacaagcgcaagcagtgaacacggcgcctcctcgctcgcgcggccacgcccccgtcgtcgtcttctcccggcaggtactacagcgcataaatacgcagcaccgccgcccggctcggttcccgtctggccacccatccgatcccacccggcagcggcgctgcgcaatggccacccacgcagctctcgccggcgtcgtccaggcacggcgtgcagaggctggacttcgccgacttctccgggctcaggccggggtcgtgctccgtgagcgctgccgcgcgggaggcgtccttctccgacgtccttggcgcgcagctcgtcgccaaggccaccggggagaacgccgtgagggcgcccgcagaggcgaagctgaaggtggcgatcaacggcttcggccgcatcggccggaacttcctccggtgctggcacggccgcgaggactcgccgatcgacgtcgtcgtcgtgaacgacagcggaggcgtcaggaacgcgtcccacctcctcaagtacgactcgatgctcggcaccttcaaggccgacgtcaagatcgtgaacgacacgaccatcagcgtcgacggcaagcccatcacggtcgtctccagcagggacccgctcaagctcccatggggtgagctcggcattgacatcgtcatcgagggcaccggagtcttcgtcgacggccccggcgccggcaagcacatccaggccggcgcgaagaaggtgatcatcacggctcccgccaagggcgccgacatcccgacctatgtcgtcggcgtcaacgagggcgactacgaccacagcgtcgcggacatcatcagcaacgcgtcctgcacgaccaactgcctcgcgccattcgtcaagatcttggacgaggagttcggaattgtcaaggggaccatgacgacgacgcactcgtacaccggcgaccctctggaggacttctgcaaggacaacccccgagaccgacgagtgcaaggtgtacgaagtatgaggccagggttctttccacgacgaaacgtacagcacgggcgcgagggttctttccatagagaataatatacagattattcgacgaaagagacgtatgttatatatatatatgagttgtatgcagtcaccgaactggcggtacaggcttccgctttccatttcctgttgggagtcgtgtagtgtaatcctggggtgtgtatttgtttcatcaaccatgcctgccgatttgaatctcgtttcaccagcatggcagcattatctgatttgggtatacaagtataaaccgcaacgagcgatcttgtaaaaagagaaacggagttgcagggggttaagggtttctctccaagatagataccttggatagaaaatttcatctcagaagaagacagtgtggctgtaaacgttaaatgacaaaatatgtcatggtttttaaacgaaggaaggctttagagaaaaaaaaaaaaaaaaaagcggcc

SEQ ID NO: 115252 - DNA, 2033 bp, Zea mays
  Clone ID: MRT4577_36594C.1
cctgccgggcccgtctggtggccacccatccgatcccacccggcagcactcggcagcggcgccgcgcaatggccacccacgcagctctcgccgcctcccgcatccccgccggcgcccggctgcacagcagggcggcggcgtcgtccaggcacggcgtgcagaggctggacttcgccgacttctccgggctcaggccggggtcgtgctccgtgagcgctgccgcgcgggaggcgtccttctccgacgtccttggcgcgcagctcgtcgccaaggtacgtatgcgtttcatgcacgacgtgcgttgctgctgcagcttaaggaataatatatatagcagtatcgtctgttcttcaattaacagttgtcatactaactgttcttcagttaaccagttgctagtgttaaaaaaagcaacaacagttggacgacaacaaatgcgtactcgtatatttttcacactgcagttgttatgcagttaagctcgaataatatgcatgcatatacaccctcccaattttgatctgcgcaaggtttggcttcatccagcttaataagcaagcgtacggtacagcttaatagctagctttatagtacagatggtcctgagttatattatatatccctgcttgctggtgacccctgtgacaggccaccggggagaacgccgtgagggcgcccgccgaggcgaagctgaaggtggcgatcaacggcttcggccgcatcggccggaacttcctccggtgctggcacggccgcgaggactcgccgatcgacgtcgtcgtcgtgaacgacagcggaggcgtcaggaacgcgtcccacctcctcaagtacgactcgatgctcggcaccttcaaggccgacgtcaagatcgtcgacgacacgaccatcagcgtcgacggcaagcccatcacggtcgtctccagcagggacccgctcaagctcccatggggtgagctcggcattgacatcgtcatcgagggcaccggagtcttcgtcgacggccccggcgccggcaagcacatccaggccggcgcgaagaaggtgatcatcacggctcccgccaagggcgccgacatcccgacctatgtcgtcggcgtcaacgagggcgactacgaccacagcgtcgccgacatcatcagcaacgcgtcctgcacgaccaactgcctcgcgccattcgtcaagatcttggacgaggagttcggaatcgtgaaggggaccatgacgacgacgcactcgtacaccggcgaccagaggctgctggacgcgtcccaccgcgacctccggcgggcccgcgcggcggcgctgaacatcgtgccgacgagcacgggcgccgccaaggccgtggcgctggtgctgccgcagctcaaggggaagctgaacggcatcgcgctgcgggtgccgaccccgaacgtgtccgtggtggacctggtgatcaacaccgtgaagactggcggccaagtggcccggcgccgcggcggccggcagcggcgaccctctggaggacttctgcaaggacaaccccgagaccgacgagtgcaaggtgtacgaagcatgaggccagggttctttccacgacgaaacgtacagcacgggcgcgagggttctttccatagagaataatatacagattattcgcccaaagagacgtatgttatatatatgagttgtatgcagtcaccgaactggtacaggcttccgctttccatttcctgttgggagtcgtgtagtgtaatcctggggtgtgtatttgtttcatcaatcatgccagccgatttgaatctcgtttcaccagcatgatctgatttgggtatacaagtataaaccgcaacgagcgatcttgctcgtaacgaagggcgcgatcttgctcgtgaaggtaatgaaattatcaaagcagcttgcaaatggagtgctgaactagccgcagcttgtgaaatatggaaggagatcaaatttgatggtttcaaagcgatgcataccatataaaattgaaaaaaaaaaaaaaaagaaaaaagtacctcggccgcgaccacgct

SEQ ID NO: 115253 - DNA, 1694 bp, Zea mays
  Clone ID: MRT4577_36595C.1
ccggccgggccccgtctggccacccatccgatcccacccggcagcggcgctgcgcaatggccacccacgcagctctcgccgcctcccgccggcgtcgtccaggcacggcgtgcagaggctggacttcgccgacttctccgggctcaggccggggtcgtgctccgtgagcgctgccgcgcgggaggcgtccttctccgacgtccttggcgcgcagctcgtcgccaaggccaccggggagaacgccgtgagggcgcccgcagaggcgaagctgaaggtggcgatcaacggcttcggccgcatcggccggaacttcctccggtgctggcacggccgcgaggactcgccgatcgacgtcgtcgtcgtgaacgacagcggaggcgtcaggaacgcgtcccacctcctcaagtacgactcgatgctcggcaccttcaaggccgacgtcaagatcgtggacgacacgaccatcagcgtcgacggcaagcccatcacggtcgtctccagcagggacccgctcaagctcccatggggtgagctcggcattgacatcgtcatcgagggcaccggagtcttcgtcgacggccccggcgccggcaagcacatccaggccggcgcgaagaaggtgatcatcacggctcccgccaagggcgccgacatcccgacctatgtcgtcggcgtcaacgagggcgactacgaccacagcgtcgccgacatcatcagcaacgcgtcctgcacgaccaactgcctcgcgccattcgtcaagatcttggacgaggagttcggaatcgtgaaggggaccatgacgacgacgcactcgtacaccggcgaccagaggctgctggacgcgtcccaccgcgacctccggcgggcccgcgcggcggcgctgaacatcgtgccgacgagcacgggcgccgccaaggccgtggcgctggtgctgccgcagctcaaggggaagctgaacggcatcgcgctgcgggtgccgaccccgaacgtgtccgtggtggacctggtgatcaacaccgtgaagactggcatcacggccgacgacgtgaacgcggcgttccgcaaggccgccgccggcccgctgcagggcatcctggaggtctgcgacgtgccgctcgtgtccgtcgacttcaggtgctccgacgtgtcctgcaccatcgacgcgtcgctcagcatggtcatgggcgacgacatggtcaaggtcgtcgcctggtacgacaacgagtgggggtacagccaacgcgtggttgatctggcgcacctggtggcggccaagtggcccggcgcggcggcggccggcagcggcgaccctctggaggacttctgcaaggacaaccccgagaccgacgagtgcaaggtgtacgaagcatgaggccagggttctttccacgacgaaacgtacagcacgggcgcgagggttctttccatagagaataatatacagattattcgacgaaagagacgtatgttatatatatatatgagttgtatgcagtcaccgaactggcggtacaggcttccgctttccatttcctgttgggagtcgtgtagtgtaatcctggggtgtgtatttgtttcatcaaccatgcctgccgatttgaatctcgtttcaccaaaaaaaaaaaaaaaaaaaaaaaaaaaaaaaaaaaaaaaaaaaaaaaaaaaaaagggcggccccgactagtgagctgtcg

SEQ ID NO: 115254 - DNA, 371 bp, Zea mays
  Clone ID: MRT4577_36596C.1
tccacgcgtccggcacccaccagaggaaaagggcaaaagccaaaaggcatcaccgccgcgacgactactacgactacaatggcagccttgctccaagccgcggccaccctgatgcagccggtcaagatcggtggccgggcgccctttgcctcgatgccgtcccgcccgtcgacgcaactcggctgcagggcgttcggggcgcacgccggcgccggcaggatcacgtgctctgtgcaggactgtagcagcaggtgcgcctacgccgcgaagctcgtctgcttggcgctcgtcacctcggcgctcctggtgtcggacgcgagcgcgtagggcacgcccaagaggcggtcctacgacgagacccagaccaaaac

SEQ ID NO: 115255 - DNA, 1918 bp, Zea mays
  Clone ID: MRT4577_36597C.1
cggatatcgcccgcccgaacgggtggctgcggcgcatgcaatcgccttatccccccggcccgccgccccgcggccacaagcgcaagcagtgaacacggcgcctcctcgctcgcgcggccacgcccccgtcgtcgtcttctcccggcaggtactacagcgcataaatacgcagcaccgccgcccggctcggttcccgtctggccacccatccgatcccacccggcagcggcgctgcgcaatggccacccacgcagctctcgccgcctcccgcatccccgccggcgcccggctgcacagcagggcgccggcgtcgtccaggcacggcgtgcagaggctggacttcgccgacttctccgggctcaggccggggtcgtgctccgtgagcgctgccgcgcgggaggcgtccttctccgacgtccttggcgcgcagctcgtcgccaaggccaccggggagaacgccgtgagggcgcccgcagaggcgaagctgaaggtggcgatcaacggcttcggccgcatcggccggaacttcctccggtgctggcacggccgcgaggactcgccgatcgacgtcgtcgtcgtgaacgacagcggaggcgtcaggaacgcgtcccacctcctcaagtacgactcgatgctcggcaccttcaaggccgacgtcaagatcgtggacgacacgaccatcagcgtcgacggcaagcccatcacggtcgtctccagcagggacccgctcaagctcccatggggtgagctcggcattgacatcgtcatcgagggcaccggagtcttcgtcgacggccccggcgccggcaagcacatccaggccggcgcgaagaaggtgatcatcacggctcccgccaagggcgccgacatcccgacctatgtcgtcggcgtcaacgagggcgactacgaccacagcgtcgccgacatcatcagcaacgcgtcctgcacgaccaactgcctcgcgccattcgtcaagatcttggacgaggagttcggaatcgtgaaggggaccatgacgacgacgcactcgtacaccggcgaccagaggctgctggacgcgtcccaccgcgacctccggcgggcccgcgcggcggcgctgaacatcgtgccgacgagcacgggcgccgccaaggccgtggcgctggtgctgccgcagctcaaggggaagctgaacggcatcgcgctgcgggtgccgaccccgaacgtgtccgtggtggacctggtgatcaacaccgtgaagactggcatcacggccgacgacgtgaacgcggcgttccgcaaggccgccgccggcccgctgcagggcatcctggaggtctgcgacgtgccgctcgtgtccgtcgacttcaggtgctccgacgtgtcctgcaccatcgacgcgtcgctcagcatggtcatgggcgacgacatggtcaaggtcgtcgcctggtacgacaacgagtgggggtacagccaacgcgtggttgatctggcgcacctggtggcggccaagtggcccggcgcggcggcggccggcagcggcgaccctctggaggacttctgcaaggacaaccccgagaccgacgagtgcaaggtgtacgaagcatgaggccagggttctttccacgacgaaacgtacagcacgggcgcgagggttctttccatagagaataatatacagattattcgacgaaagagacgtatgttatatatatatatgagttgtatgcagtcaccgaactggcggtacaggcttccgctttccatttcctgttgggagtcgtgtagtgtaatcctggggtgtgtatttgtttcatcaaccatgcctgccgatttgaatctcgtttcaccagcatggcagcattatctgatttgggtatacaagtataaaccgcaacgagcgatcttgggaaaaaaaaaaaaaaaaaaacccgcggcc

SEQ ID NO: 115256 - DNA, 350 bp, Zea mays
  Clone ID: MRT4577_36598C.1
gggctagaatacggtctgtgctggcccagcactttattggtgctggaagccacaatgaggagaaagttgcaatgtatgccattgattcactaagacagcttggtatgaagtacttggagcgtgctgaattaaacaatttcacatttcagagtgacatactgaaaccttttgtcattttaatgaggaatacccacaactcaaaaatccgaggtttaattgttgattgcattgttcagctgatcaagccaaaagctggtagcataaagccagggtggcgttgcgtattcatgatatttactgcagcagctgatgatgaggatgaaccaattgccgagagtgcttctgaaaat

SEQ ID NO: 115257 - DNA, 2150 bp, Zea mays
  Clone ID: MRT4577_36599C.1
ccggccggggccgccgcgcccgcaatccgccacacatcggatatcgcccgcccgaacgggtggctgcggcgcatgcaatcgccttatccccccggcccgccgccccgcggccacaagcgcaagcagtgaacacggcgcctcctcgctcgcgcggccacgcccccgtcgtcgtcttctccctcccggcaggtactactacagcgcataaatacgcagcaccgccgcccggctcggttcccgtctggtggccacccatccgatcccacccggcagcactcggcagcggcgccgcgcaatggccacccacgcagctctcgccgcctcccgcatccccgccggcgcccggctgcacagcagggcggcggcgtccaggcacggcgtgcagagggtagacttcgccgacttctccgggctcaggccggggtcgtgctccgtgagcgctgccgcgcgggaggcgtccttctccgacgtccttggcgcgcagctcgtcgccaaggccaccggggagaacgccgtgagggcgcccgcagaggcgaagctgaaggtggcgatcaacggcttcggccgcatcggccggaacttcctccggtgctggcacggccgcgaggactcgccgatcgacgtcgtcgtcgtgaacgacagcggaggcgtcaggaacgcgtcccacctcctcaagtacgactcgatgctcggcaccttcaaggccgacgtcaagatcgtggacgacacgaccatcagcgtcgacggcaagcccatcacggtcgtctccagcagggacccgctcaagctcccatggggtgagctcggcattgacatcgtcatcgagggtaccggagtcttcgtcgacggccccggcgccggcaagcacatccaggccggcgcgaagaaggtgatcatcacggctcccgccaagggcgccgacatcccgacctatgtcgtcggcgtcaacgagggcgactacgaccacagcgtcgcggacatcatcagcaacgcgtcctgcacgaccaactgcctcgcgccattcgtcaagatcttggacgaggagttcggaattgtcaaggggaccatgacgacgacgcactcgtacaccggcgaccagaggctgctggacgcgtcccaccgcgacctccggcgggcccgcgcggcggcgctgaacatcgtgccgacgagcacgggcgccgccaaggccgtggcgctggtgctgccgcagctgaaggggaagctgaacggcatcgcgctgcgggtgccgaccccgaacgtgtccgtggtggacctggtgatcaacaccgtgaagacgggcatcacggccgacgacgtgaacgcggcgttccgcaagggccgccgccggcccgctgcagggcatcctggatgtctgcgacgtgccgctcgtgtccgtcgacttcaggtgctccgacgtgtcctgcaccatcgacgcgtcgctcagcatggtcatgggcgacgacatggtcaaggtcgtcgcctggtacgacaacgagtgggggtacagccaacgcgtggttgatctggcgcacctggtggcggccaagtggcccggcgcggcggcggccggcagcggcgaccctctggaggacttctgcaaggacaaccccgagaccgacgagtgcaaggtgtacgaagcatgaggccacggttctttccacgacggaacgtacagcacgggcgcgagggttctttccatagagaataatatacagattattcgcccaaagagacgtatgttatatatatatgagttgtatgcagtcaccgaactggtacaggcttccgctttccatttcctgttgggagtcgtgtagtcactacaagaaaaaaggtaaggagtgtcggccaaaaccccacactcttactgaaataagccgacactctaagtataagagtgtcggttgaccgacactcttagccgtcactctaaaatggacgctcttattcgtatagaagtgtggggaccgacgctcttatgttaaaagtgtcggttcaacaagcaaccgaacgagtttaccagtgtcgaggttaactgcccgttttatattagccgcatagcgatctgggaacctcagctttttcaaccattgaaatatctcttctcgctcttgccgtttcagacaataaggagcttgtggccgactctc

SEQ ID NO: 115258 - DNA, 362 bp, Zea mays
  Clone ID: MRT4577_3659C.1
gagataaatttatatatatagggggggggtcactgattatttaaataaccgcagcacaccaattttagaaaacttgcagctgttgattacatataaacataaatatgctttctttcactacgcttccacaccataagttcttttgagttgctcccgtattctccaacctaaaaaagtaaacggggccatcgaaactttatcacgccccattcataggcgctggaatccatgatcacctcatccttgccagaactgaagtctgaacaagccatgacatacttggttttcaaaaattgaaaggaaaacacaaccccgttgttactctgtacaatgaggaatatcctctacccgaaggaggaatc

SEQ ID NO: 115259 - DNA, 265 bp, Zea mays
  Clone ID: MRT4577_365C.1
ccgtcgaattccgggtcgccgcactcgcacgctccccacctcgcacctcgcggaaactgaagggggctcgaaccaggcgagaataactgatataggcaacaacaaaattgtccccgtttatgcttacccctgtgtgtgtctgtgaattgttataccgccctccctactgtctgtacagcgaagcgagtgcttgcggacactgggcgcgcgcagggaatgctcgaggcattcattaccggcaaaccacgccccgagatcaagatat

SEQ ID NO: 115260 - DNA, 2012 bp, Zea mays
  Clone ID: MRT4577_36600C.1
cattgggaccctcgaggccggccgggaacaacctgcaacagcgacgcacacagcgtgccgccgcgcccgcaatccgccacacatcggatatcgcccgcccgaacgggtggctgcggcgcatgcaatcgccttatccccccggcccgccgccccgcggccacaagcgcaagcagtgaacacggcgcctcctcgctcgcgcggccacgcccccgtcgtcgtcttctcccgggaggtactacgtacagcgcataaatacgcagcaccgccgcccggctcggttcccgtctggtggccacccatccgatcccacccggcagcactcggcagcggcgccgcgcaatggccacccacgcagctctcgccgcctcccgcatccccgccggcgcccggctgataacacagcagggcggcggcgtcgtccaggcacggcgtgcagaggctggacttcgccgacttctccgggctcaggccggggtcgtgctccgtgagcgctgccgcgcgggaggcgtccttctccgacgtccttggcgcgcagctcgtcgccaaggccaccggggagaacgccgtgagggcgcccgccgaggcgaagctgaaggtggcgatcaacggcttcggccgcatcggccggaacttcctccggtgctggcacggccgcgaggactcgccgatcgacgtcgtcgtcgtgaacgacagcggaggcgtcaggaacgcgtcccacctcctcaagtacgactcgatgctcggcaccttcaaggccgacgtcaagatcgtggacgacacgaccatcagcgtcgacggcaagcccatcacggtcgtctccagcagggacccgctcaagctcccatggggtgagctcggcattgacatcgtcatcgagggcaccggagtcttcgtcgacggcccccggcgccggcaagcacatccaggccgggcgccgaagaaggtgatcatcacggctcccgccaagggcgccgacatcccgacctatgtcgtcggcgtcaacgagggcgactacgaccacagcgtcgcggacatcatcagcaacgcgtcctgcacgaccaactgcctcgcgccattcgtcaagatcttggacgagggagttcggaattgtcaaggggaccatgacgacgacgcactcgtacaccggcgaccagaggctgctggacgcgtcccaccgcgacctccggcgggcccgcgcggcggcgctgaacatcgtgccgacgagcacgggcgccgccaaggccgtggcgctggtgctgccgcagctgaaggggaagctgaacggcatcgcgctgcgggtgccgaccccgaacgtgtccgtggtggacctggtgatcaacaccgtgaagactggcatcacggccgacgacgtgaacgcggcgttccgcaaggccgccgccggcccgctgcagggcatcctggatgtctgcgacgtgccgctcgtgtccgtcgacttcaggtgctccgacgtgtcctgcaccatcgacgcgtcgctcagcatggtcatgggcgacgacatggtcaaggtcgtcgcctggtacgacaacgagtgggggtacagccaacgcgtggttgatctggcgcacctggtggcggccaagtggcccggcgcggcggcggccggcagcggcgaccctctggaggacttctgcaaggacaaccccgagaccgacgagtgcaaggtgtacgaagcatgaggccagggttctttccacgacgaaacgtacagcacgggcgcgagggttctttccatagagaataatatacagattattcgcccaaagagacgtatgttatatatatatgagttgtatgcagtcaccgaactggtacaggcttccgctttccatttcctgttgggagtcgtgtagtgtaatcctggggtgtgtatttgtttcatcaatcatgccagccgatttgaatctcgtttcaccagcatgatctgatttgggtatacaagtataaaccgcaacgagcgatcttgtaagaaaaaaaaaaaaaaaaaagcggcc

SEQ ID NO: 115261 - DNA, 328 bp, Zea mays
  unsure (1)..(328): unsure at all n locations
  Clone ID: MRT4577_36601C.1
tttttatttctcnttttttttctaccttatcttaccgttttggggggggtttacaaatattcaaaaggtgcgcccacacgctagatgacagatgcgagtttatacgaacatggagaagggaagattaggaaggaacttccctacgccgactgctggtacaccatctgatccagaaaaaaaaaacgttctgctcctgaaaaaacaagggcataaagcggtccccccgctccgccaaaaaaaaagcccccgatgaccccaaaagccaagaaccgatggtaggataacgccatggacgtgtgccttttaaaaaaaaaaataacccgccaaa

SEQ ID NO: 115262 - DNA, 521 bp, Zea mays
  Clone ID: MRT4577_36602C.1
actccatagggcaattggtttcatcaaggccggccgggaaacttgacctccaacacaacaacatcacctccaactaccattcataatgtctgccccatacgatcccaaccaaggctactaccctcctcagcagggtggatatccccctcaaggcggctaccctcccccacagcccatgcagtaccagcaagcgccaccaccccaagaagaaaagagccacggctgcttctacacatgtatcgccacactctgctgttgttgggtctgcggagagacctgcgagtgttgtcttgagtgcctcgactgctgctgttaatcacaccacctgcatttctcccccccccctccaaacaaagcgcttggagataataaagaatgcatgatttttattgccctttttctcattacccctacatagctactgggtctctcatccagcttctttttttgtagctctcaaataacggcctaaacacaataccacacatgtcagcaaaaaaaaaaaaaaaaaacccgcggcc

SEQ ID NO: 115263 - DNA, 274 bp, Zea mays
  Clone ID: MRT4577_36603C.1
gaataaacctacgaatctttcatgcttaacaaaggtgcgagatgcttcaatcgagatcctgtcaaataaacagaaaagatcatcacacatgttctaagagtatgaaaatagtataaatggaaaatgtgcgatatattgtgaatagctacgtgtaagagagactaataatcttatgttctaattaacttatgtatagaacatgtctttatactcataaattgctagtagaatagaagttatgaatcactataatcgccctttctattctattata

SEQ ID NO: 115264 - DNA, 323 bp, Zea mays
  unsure (1)..(323): unsure at all n locations
  Clone ID: MRT4577_36604C.1
tcgaatgggtcctccaggggcgcgggggnatctgccctcccagatatcgcactacatagatgtaggcaggggggccacgtatccgaggggcgtgatttatgcaccaaggagacgatagatgcgtggagccgaaggtaattcggggtcaacggcgaagcgcgctgccggctataggtggtggtggacaacctgccacgcttgacccaggaacacgaactgtaaagcaagggagtcgatgaatggctccgtcgcatccaggactaccgcactctgaaccaccgctggagctacgacgccacattcatgctcgcccaggtcaccgg

SEQ ID NO: 115265 - DNA, 656 bp, Zea mays
  Clone ID: MRT4577_36605C.1
acgcctgcaggttctcggtccggaattcccgggtcgacccacgcgtccgcccagaacgtcagtccagagactgcccagctgctcctcatagtttctgatgggcgaggccttttcctcgaaggcaaagacagagtcctagcagcagtccaggctgcccagaatgccaacatcttcgtcatttttgttgtgttggataatcccaattcacgggattctatcttggacattaaagtaccaatatttaaaggaccaggagagatgcctgaaatccgatcctacatggaagagtttccatttccattttacatcattcttcgggatgtgaacgcgcttcctgagaccctcagtgatgcgctcaggcagtggtttgagctggtgactgcatctgaccactcctagagcagagcacagtctagtgaggctgtggggtcactggagctcccttcacagctgtttgtgaactcagagctctgattctacttcatcttggacctgatttttcttttttactgtatccaacagttataaaaacatttttattgcactatacatttgtatttacaacatagaagagcttaacacaagctcttggactccctgctgtactgactgagcacagacagctcacaagtagtaccagggctcgtgactaggga

SEQ ID NO: 115266 - DNA, 291 bp, Zea mays
  unsure (1)..(291): unsure at all n locations
  Clone ID: MRT4577_36606C.1
ttaagttgggatgaccttttcatgtcgagattcatcaagctcaattgaagtttggttcagtctttcttggcaaactcagtctctgactcgacactgaacataccattgcctattcttatgtttttctgggccatgtggcgatcaacaggccatttcttacatgatgcccaccaagaaattgatanacagctaaggattgtaatgctattagaattctaaaccagtaacacagatcaatttggttgagcgccttgtccaagaattgttttatcaatcatattgtaaaggcac

SEQ ID NO: 115267 - DNA, 335 bp, Zea mays
  Clone ID: MRT4577_36607C.1
cggggcacacaaagggttttcttctttgaaagggcccttttttaaaaatttggaaggggccaatttttccaaaaaaattttttcccccatgagggggaatgggaacagcaacaagaccccaaaaatttgcttttaggggaggcacacaattttgggtttttttttgacaggggatttttttcggggctggaatacggggccaaaaataaaagctttttaagcttttgggggccgttttcctgttccgggcctttggtggcccaacgggacatttggggggtcccctttcctggggaaattctttgggggaaaaattttttcgggggccggctttt

SEQ ID NO: 115268 - DNA, 502 bp, Zea mays
  Clone ID: MRT4577_36608C.1
ggaagaacgtcaatggtattttcactaactttgagcatgtataccagagccagtatgactggatctggctgctcccagcatagtatttaatgttaatatatatacactgagatcgctggccgcccgtagaaacaagaggctctttggtcatggagatgccctggcaaggtactgcggccacacctcaggagttctgagtgcagatcttgcctgcagtccaatccagcaaccgccagaacaaaaataagagaatttcttctgggaaaagagaaaaagaacacagccttacagatgcaagtggaactgaagctaaaacttgagcagtaataatatgcgcactaattactggcaggtgaattcatctgcctgacccttcttctcttcactgcctgcagcagctgccacagctgatgaattcggatgccttttgttcataaaaggcccgtccgcccgttgctggcccaactagtgcgaagtaaccctaacaaaacaggcaccgatc

SEQ ID NO: 115269 - DNA, 226 bp, Zea mays
  Clone ID: MRT4577_3660C.1
gacccaagcgtaagggaagttccatgtggaacatgtccccgggttcctatgtgtgggaaaacaggggtgtactttttttaaatgggcaaccccattggtagggaaatccaagggggtatatcctttccacgaaaaggattggatagatgtatggctatctttatgttgtgttctccgaccacgggaaagaatggtaattgaaaaacactgtggtgctatactgagc

SEQ ID NO: 115270 - DNA, 233 bp, Zea mays
  Clone ID: MRT4577_36610C.1
ctcggtacccctgtatagtaaaccccgctctcctagtaccccgagtgatacagtagtgtcaaagcctcggcgcacaccaaactgcaggttcggatcgtgcctgggggggctcctacctgatgctacgcaaacttttgcgcctcactttaattactcagaaaagcagggcaagctatcacaaagtgaaagcgtttggccacgtataatccatacaggtcatacatatatagcct

SEQ ID NO: 115271 - DNA, 525 bp, Zea mays
  Clone ID: MRT4577_36611C.1
ccacgcgtccggcccccgcgaagcgtgggcctgctgccagggctattggttccaggcgactctgccgtcgctcggggagggcatcttggtgccgccggccaccaccatctccacgcaccacacctccggccccttctgccacagcacgaggccgccggcgatctcggcgccgccgtggaccacgcccaccattcccgtcctgcaggctctctgcccctgcttggtcgtcgacgacgacgacctcgttctcatcagcaccttccccaccgcgtacatgctcgtcgccgcgctcagtgcccgctcgcccccagacgccgcgacgtactgctccacgatgtacttcgccttggacacctcctgtgggaaaaaaaataaaaattcaaaatgcctcttttattagccacgccgcgatcacagggtcgacagtacatgttaggctgtgcttaacgttagttacgtacaaggggctctttcttgatgtcctctacggccaccatgggcttcctcgcctgcactggctgcggc

SEQ ID NO: 115272 - DNA, 163 bp, Zea mays
  Clone ID: MRT4577_36612C.1
cttcaatcaggccaaagcaaaaggaccacgccatcaccatatttttaaaattcaaaacttttagtctgccaaattggtactctttcatgtaagagaaccctcttgccagctaagagatgaaaacattttcatgacaaaggagagaaatttcctttactagggg

SEQ ID NO: 115273 - DNA, 249 bp, Zea mays
  unsure (1)..(249): unsure at all n locations
  Clone ID: MRT4577_36613C.1
cccacgcgtgctaacacgtcagaaaggacctctgaatgggacctcaccaattctcattgatgagtattttacatcatccttagccactttaacatttttttcccttaccctaccttctacttatcatanctttatattttttattctgtcttatcaaccttgcttgttctaacctttgcttttacagagtttttttttttgtttttattatgctaccaaaattctacttccatagatccttttgatgac

SEQ ID NO: 115274 - DNA, 521 bp, Zea mays
  Clone ID: MRT4577_36614C.1
ccgggaggcactgtggttgcggaggcgggcctgaccgccacagacacacaccgagcggagagggagacggagagaaggacagagacggcactagcaagcatggtggctgccggcctagcgcccaaggcggctgcttcgttgcctaccaggggcgcctcatttctcatcctcttcgcggcatggcgatggcttcatctccacgcgtgatccactgagaagagggttcctccgtcccattccgtgcgcctgatccccggcttccgttttgatgccgaacccggacctcgagactgggcctgaccagcacgttgatggagatggacatgaagcgccgacggacaccaggccctgccgcatggacctgttcgctgagcagcgaccattaggctacgtgctcggctacaagatccggtgccagagcttgatcaagaacctaacggaagatgggcgacgagctgatagaggacaccacgcacgagggagcgcctgaggaattccgcggagtacaaggtaagaggatc

SEQ ID NO: 115275 - DNA, 102 bp, Zea mays
  Clone ID: MRT4577_36615C.1
cctcatgctagatggtctcagctggcctccaacagtataccatggaggccagctgagaccatctagcatgggtactgcgagctagatggtctcagctggcct

SEQ ID NO: 115276 - DNA, 298 bp, Zea mays
  Clone ID: MRT4577_36616C.1
tgccttctgcgcttcctttcggactctgttcgttgcaagctcaatgtcacctccaacatcagtaaagaggagtcccacatcatcactgccggtattgggcctgtcgactctggtaagcggaccaccacaggacaccttatctacaagcctggaggtgttgacaaccgtgccagcgacaggttcttgaaggagggtggttagatcaacaagcgggccttcaagcacgcccctgtgctactcaaacttaaggctgagaccgagacaggtatcaccattgatattggtctgggggaggttg

SEQ ID NO: 115277 - DNA, 341 bp, Zea mays
  Clone ID: MRT4577_36617C.1
attacggcgggcgccctttttctcgttcttgtgaggatctagagcaagttacgcgatactttattttaagacaagggtacaaaaacatctgtggcggcaatcatacggccgaaagaaaacacaaaatgctcacgttggataggaaccgaacgtacttgttggaaaccatattgaataaactgcgaccgatcgtccattaaacgttaacaaataaaacagacctgtctaatttacaatgccctttaattggaaacgaacggcaggatatataggggggaagagcctaatgaacatttctcttagtaggaccgtagcgggagacttttttggtgccgtaggtt

SEQ ID NO: 115278 - DNA, 236 bp, Zea mays
  Clone ID: MRT4577_36618C.1
gagatcaagggacacgcgggaggccgtgaaaaccacaagcgtgagagttttcaggcgccaacaagcaagcgcaacaagcaacagaccataaacacccctgaccttacaacaaccgacagccctatctgtggcgcagacaacggcacaaaccatcacggcacaacagccgtaccaacaagcgcaaccagtgatcaaccaagcagctccggcacaaccaacccaccgtactacaaaca
